United States Patent Application Publication US 2007/0083945 A1 - sequence listing, part 38

SEQ ID NO: 258189 - DNA, 160 bp, Glycine max
gtattttgtagaagacttgactgactatgtatcctctggtacttgatcttcacatattgaaacaaagactatgtaaatactagtttaatcaggactagtatcaactgtgagatctgttctgatgagagaaccttgacaagttgtatgacctctatggaga

SEQ ID NO: 258190 - DNA, 292 bp, Glycine max
  unsure (1)..(292): unsure at all n locations
tatatanngttcttggtggtattatggataccaccaaatagtcatttataccaatgaccaagagaagaaagctttgtgtgtccttcttgggtatatgcctataagagaatatcattnggattatgcaatgcacccgttacatttcaaaggtgtatgctagccactttttctaattnggttgagaaatgtattaaagttttcgtggatgactnttcattttttggcccatccttcgattcatgcttgnngcaattggatattanntgtgaaggatgtatagagactaatctca

SEQ ID NO: 258191 - DNA, 287 bp, Glycine max
tacataattttgacattctcacttatccatgtctaagcaggacaatcaaaacttcatggagtatttttacttaatattaatattactgaataaaaatatatttataaatattatatctaccgtcaataaatgatttattcaatgataaaaaaatctatttatattgactatttttaatttgtttttgctaaccatacataaaaagatccatatctctcataaaaaataagtctaaaatatactaaatgaatttatatatttaatcttaattgttattaatcaatata

SEQ ID NO: 258192 - DNA, 208 bp, Glycine max
gcttaacgtgtctacagattttgatagagttgaacagaaggttgtttaatcagtgtagagcatcttttattctcgacataataaccagcctgaaagaactatattatatacctcacgatatttgaaataccttactataatactgattcaaaagactcaattctatatgtgatatagaatgaagagaaaatcatggtgtaaaatgaga

SEQ ID NO: 258193 - DNA, 286 bp, Glycine max
  unsure (1)..(286): unsure at all n locations
aactcccttattctaatacagtgggacaatatttgtgtttatctaaatactgagtagtgaggacaccttaattactgagagnttcatataaaatgacttatgttgaggacgctaacactaggtataacaaagaataatctatctagatctatatatggaggaaattgatttttctaataatcatgcttcattgacaacaacttttagacatttattgatgatattcaggatattgaaaaaatggtaagtagagccttattgttatatatccttgttttaatcttgt

SEQ ID NO: 258194 - DNA, 241 bp, Glycine max
  unsure (1)..(241): unsure at all n locations
gtcctattctctacatgatacctcttatgactttgaaaagatgtgttttactaggtgaaacagacagccttgttgtcaagaagctactagccattctactttctgctnttaacttgactaaaggagcttgagggagtgactgatgtacaaggggccctatgctatttatgaaacttataggcccctcactacccactatataagacttatcctaataagcctcaactggacatactgttca

SEQ ID NO: 258195 - DNA, 248 bp, Glycine max
aaatatttccgccatcatggcaatccatgccgaaggtagaggacatctctaagacttgtgcatgttattaaataactccattacagcacatggccttccccgaccgcttattggctttatagccttataactgagtatggtcatcagtacttaaaagatccgtttcaaaggcagttcctttttcgctttttcactatgttagaactaacccagtctgcacatgaaggcagacacaaacctgtaaagtc

SEQ ID NO: 258196 - DNA, 264 bp, Glycine max
ttttttctgaccatggtggcttacattcttactcataaaggagttacatcattgatgtactcagcatatggctactaatgcatatatctgaaaatcttctgaacatgaaactctttatatcatgcatatttgataatcctacacagtacctgacgtcatactacataactacatttttaacagataccttagcatcttttggaagctaattacaaatgcatatgccttgattttcttgattcaaagcgatgtcttatgacttgc

SEQ ID NO: 258197 - DNA, 419 bp, Glycine max
  unsure (1)..(419): unsure at all n locations
caacattcaatttcgagcgtctcgatatattatgtcactgaatcagacattcaancgaaaagttattgtcgtttgaataggctcatatgttcaacattcaatttttagcgtctagatatgttaccggactcaatcagacatccgagtaaaagttattgcatttgaattgctcatatgtcaacattcaattcgagcgtcagatatatacnggactcaatcnacatacgagagaatgtattgtcgttgaattgctctgagcttaacattcattcagcgttcattatactgactaacaacatcagtaaagtattgcttgattgctcaagtacatcatttacgttgatatacgactacgactcagaaaagatgcgtattgtaagtaactcattacgtcaatatacggccacactcagaaagat

SEQ ID NO: 258198 - DNA, 334 bp, Glycine max
aaaaaatttgtttcctccacagaacacagagaggatgactgagaagagttgatctagtgagataacttaccattaataccactcacactttatacaactaatactttgaggatgtatactgtcattatgacaaaaatatggccttcatatgatgtttatctatgaataaaacatagtttctagaacaggattacttaatatggatataaaggatagtcttttttaagtgtatattttctatgaagtacttctataatttaaaaattctttttttttttacaagaaaattaaaaccttcttagaaacaaaaaaatattttttaaagatatatatt

SEQ ID NO: 258199 - DNA, 261 bp, Glycine max
tggacaaccaaaaccttgttctttttaagaaaacgccatattgaagatgacccacgctgttagaaaaatgtactacattaaacaattttttttttaaatgaaattataagaatggagctatttaaaaaatcactatttagataatgccttcacatttaacactaactgaacaaaataacaactttttatatatataacgctggataacatttaatatcatagaaagcaattaaatttagatactaaaatggtttgggcagc

SEQ ID NO: 258200 - DNA, 373 bp, Glycine max
actgcaagtgtcactggacagggatgtttaggagttttatatcatggatactatgtagtattagaagaagaatagttggagtactgctttatgtggttcatatacttgacaaccgctagagatatttgtagactaaagaccacctctcaaagtaaggatcatatgtctcaaataatgtatcattatgtaagagattaattgctacgtactttcatatcatgttgataaagattgttctaatattatttctgacactcgaatccgctgtggaaggaaccacactggtctctgcctactttcggagggttaactcatggaactgagaaaatatgagaggcagatttttatattcaagtctgtatctaacagggtc

SEQ ID NO: 258201 - DNA, 238 bp, Glycine max
taagttaagacgcatggctgagttgttcaacagtcatagtttgccgaaatagctataggctaaacatccttcctcacacaaaggttgcaaaaaatgaaagacctttgaagagtgaggctgctaaggcagactgcaaacttgggagaatcaaccacactattatataatgctctagctagttaaacccaggagctgagatgcccatatatcagataaggtgacatgcttgttgtaacag

SEQ ID NO: 258202 - DNA, 280 bp, Glycine max
gctcacttagagttagacttagacttagtttttagacacagttataaacggatctgtgactgtaaaactggaacctaaataactttctttctcttatcggctccccccttttttttttttttctaactctttacttttcagctttggggaaccttctgtatctagtggctcttacttcttttgtgttctgggaaactgagcttgataatccttaactcacactctaggaaacaactaggcctacctattatactcctggtcatcttgcctagtgaaggac

SEQ ID NO: 258203 - DNA, 147 bp, Glycine max
aggatttggctctcatatcaaaaactattacgcagtccacaagctagatatcgcaattccgaagacagaagtatatctgaccaagacatgtgcgccatgttcttacgataactccatgtcagcacatggccttcgccaaaccgctta

SEQ ID NO: 258204 - DNA, 283 bp, Glycine max
  unsure (1)..(283): unsure at all n locations
tttctttttctaatctaattgttcgtcaaacgttgtttattggnacctgacaatctgtcagacgctatattatatataatagagctgtttaaccccattgattgacaatactacagagacgtactcatcccacaaacactgataaagttagtctcaatcaggaagatgcttaattcgcctgtgctattgcatcagtttcttgatatgactagttagtcaactcactattgtctgattccacctcattagattagtttttagaggctagtatgtttctcagttc

SEQ ID NO: 258205 - DNA, 347 bp, Glycine max
  unsure (1)..(347): unsure at all n locations
tattctgtattcccttttgagtcgtacagcttattttatatggatgtagaaatcactctaaccgtacgagctagtgggagctaagtggtaactgatcacaactaactctacccttcttacccactatntacaanggtagttccctcataatgccattaacccaactggaaaatcatccaaagcttagacccgtgcttcacacataccgaacgaacgtcgtgcatggcttcatcgtgcatgcacgtatcangaagtcacaatccagtgtgctagcacctaccgtagtgatccatggaaccacattgaaaagatgacgtgacactttatctnngtatgtcatcatcagt

SEQ ID NO: 258206 - DNA, 271 bp, Glycine max
tattcttctatctctattttcttatctatctctttatcttatctaatctttattttctatctttactttatttccttacttcatcttatcactttagtcaagcgttatttatcttaatcttatctatctactatattctatcttatttaatcttatctatgctttaatggttgatatctagataacaagtctgagatccctcgcttcagcttctactggcattgtcctgcacagtacctcagcttatcacataacgaatatgagattctta

SEQ ID NO: 258207 - DNA, 355 bp, Glycine max
aagtgcctttttgttatatgagttatcgttgttctgaaatattgggtgggttgtgtcgcttgcgtgtgagtactttaaattattatatatgtagatgatcattgatttcggtgaacttctcttactgaattgctcacttttcctattgctgactcattttgattgattctttctcttcgactatggccattcaatgaagtgagcagttgaattataatggatacctatattgatgtactaccattttcggatgatgcgactaaatactgtactctggtatgtgagtgaattgtgctgactgacttgactgcttgagtactaatgcatggtgatgcctatgatgtatagtctggtc

SEQ ID NO: 258208 - DNA, 216 bp, Glycine max
  unsure (1)..(216): unsure at all n locations
ccacactcagtgcttcctttttgtctattacactaaatacnnatatgaaattagatattcaacattaagtaccaaatggtctacacagtactaaaatataactagaagcattngttaaatgacttactttaacaacaatccacctagcaacaacaaccttggatttactttgtggagtatcgtcaagtcctttcaaagcaccgttgaatacaaaca

SEQ ID NO: 258209 - DNA, 330 bp, Glycine max
  unsure (1)..(330): unsure at all n locations
tctctcttataacatacgatgtccctgtttttagcgaaagtcgctacaatcttagcctactaggagatcatcatgatcttgagtatatatatgggtcatctgattctatggcacttataaccaagtggaaaatatccccttcttacgaaattatttaaatgatgattgttatgtggataattcttatgaagataatcgnacaattaacctgaaaattataatatggtgttaagtacttatacgcttctacacatgatgtcgttatcgaaaatacatatgcgttatcgaaaatgtaatataatataatctctataaaaaaagtgctcaaag

SEQ ID NO: 258210 - DNA, 146 bp, Glycine max
actgagtattatgctcccctaggctcccaattgttcgctactcttctgcagccttggctatgtcaagccttgcgaattgattctttccgtaccggacactcttcacgtggagaccactgactctctggcagttgcttctactcctt

SEQ ID NO: 258211 - DNA, 351 bp, Glycine max
  unsure (1)..(351): unsure at all n locations
tcaagcaaaggtttgtgtacaagtaactatttgctgatgtatcttttaataattatgaattgcaactatgttggaagcactactatgtaaaatactgaagtataatgcggatgtacctaggaatggaaaactgtgtattgtgatatgaacctgtatatattcttctctttgtgagttggacatatggaatctatctttactattgtggtttagtagtgatnagctgtattagattagtttctcacctgactagtgtgctagttagactgtgactgtcacatgagccaaactctaagattgagtgactaaaagattgtgaataaatcagatgacgctcttgcatacatatac

SEQ ID NO: 258212 - DNA, 404 bp, Glycine max
  unsure (1)..(404): unsure at all n locations
tgcattatccacatatcgttacctagaatggatgctatacttatcgtgtgttgtgatggctcacagttgtgccatactcaagtccatcctctttgcactagataacagaacacacatgactcaagcttcttgcacccaccttntgctaagggcttgacttgctatgaaattctcatctcttgggattgccctataactggctgtaggaatgacactctgaaagaggcaatatatgtctatcctcttgatgtggagtcatgaggaactctctggaaagacatcttaattctgcataaagctcacactagagaacataatagttactatataatatagcaaaatttatgtcttgcgacacaatagagactacgagcagngacttctactactcgcttgtaacaata

SEQ ID NO: 258213 - DNA, 414 bp, Glycine max
cagctctcttatcaggccatgactcagtaacttgtttgttttaactcgttatacaccctcttcttaacatcggaacatcaatatgcgtgattgctcactcgtttatacacgtttttttcggccataactcgatgagtatgcattgattctaagctcgttcattcagcgtgttataaggtcatcgctcaggaagtttgcgtgattttagactcgtttcatcacgctattcttggaccacgcatcataaatatgcgtgattgtaacttagtacatcacgccgatatcgctatcgctcaataagatgcttgttctaactcgtaatcacgctatataagtatcgctcagtaagttgttgttcaacttgtatcacgtatctcgacatgcacatatatggtgattactttttaacgcttt

SEQ ID NO: 258214 - DNA, 286 bp, Glycine max
  unsure (1)..(286): unsure at all n locations
ggtcttagcacgcgctcgcttgctttcatcttgatctacggctgatggaacgtttggatggctgaatgctttagttcttaaattggctattgaattgtgacctttgatgttattcttcanaaagaaaatatttatctctttatgatgatattcacgtatgatatgttactactgatgaaaatctaagcagggattttaaaattacatgaatgaagacatatgcaaaagtaaagtgtagtaaaggggggagatatgaaatcataaatggcacttaatcattgtaatc

SEQ ID NO: 258215 - DNA, 191 bp, Glycine max
actctggcttctgcagcacttgaagtagttaccaaatgctcctaacaaacgctacactctcataatcaactcatgaattaacagctatcctcttttacacgtcatgccagaatctatactagaaatgccctatcatcaggccctgtcctaatattatagtcttcagggattgtactactacccattcttgt

SEQ ID NO: 258216 - DNA, 57 bp, Glycine max
tacctatttaatttttggaagttttatatttcctatttttttgtaaaaatacatttc

SEQ ID NO: 258217 - DNA, 221 bp, Glycine max
ctcgagacattcaatatattgaacacccaaatatacacttgtcgatgtccttaaactgaatggtactggatatcatctctgctcgtgaaagaacaatctgtgtctccagcaggtaaatattagtacttagctcacattaattcggcgggcactttttatacatcataaaggaaaatgaatgccaacgagagtctctatttagctactgcttgtaagattta

SEQ ID NO: 258218 - DNA, 227 bp, Glycine max
  unsure (1)..(227): unsure at all n locations
tactgcgctgcactggtctngccaaatgattggcctatttaatcttatgcgcctatttatanaagctacatccagctcaaacctgctatatgcatgagctttaccacactggggccatttagctaatacaaaagggggcatgggagcccatgttcagaccctagctagcatcctacacctcataaccatcactaaacaacaaataccctaattaccatcccattaac

SEQ ID NO: 258219 - DNA, 116 bp, Glycine max
  unsure (1)..(116): unsure at all n locations
catctactagacactgaaaactgggcaatgaaagggagaagaggagaaccatgtggactgcattctatacgncaagtttccaccaaacccaacaatgtcattacttcgtcaataac

SEQ ID NO: 258220 - DNA, 84 bp, Glycine max
ctctccacatctggttatagcatatgcgcttgttctaacatccgtatacgtccactactggcatatacgcgatcgcaacagtgc

SEQ ID NO: 258221 - DNA, 277 bp, Glycine max
gcctgatcatctcttgtatatacaattgatcatccaacaaatgttaaacttatgattcactcatgatcaatgatatcagttgtacatacaggtgcgtaataataatgaagtctcttctaactttgatatcctgatgatatcaaatgacttaagttatttaatgttacttaactatataagtttgcactaagttacagtcttgtcactcaatatattcatatttcaattcctgttattgatttttctgcagtcagttgtcctaatgtttttttttctc

SEQ ID NO: 258222 - DNA, 301 bp, Glycine max
gacatatgttaataatatatcatttatacactcgtgcaaaccatttcataccagtattgtagtgtactctcaatggaaatacacttatgagataacctctaagtattttttattcagtgaaaactctatatatagagggtaaaccaaaagacagaaacctcaatgaccttataagtccaatcagctgagcccactgagcatcaacagtactccattgatctccctaataaccaaaataatatgaaatacggcatgtgagaatatggtcagagaggataacattagcacagaccatgatatc

SEQ ID NO: 258223 - DNA, 90 bp, Glycine max
  unsure (1)..(90): unsure at all n locations
acccgtgaagatcgaagaacgatgaagaacttatgaagaacatctaagaacgggtgaaatctttgcgagattcctcacggaannacgtac

SEQ ID NO: 258224 - DNA, 421 bp, Glycine max
  unsure (1)..(421): unsure at all n locations
ctgcaagctaacanagaaactataatgtgcatattttaactntngtaatattttatttaatangaaatgggtgatatagaattgattcattatttaatntaataatgtatatattttttttaagataaattctattcatgtaaaggatctactaatggtgataaggataagtatataactccccatgcttcattctagaattaaataatnaaactatgctattagaattgctttatgatggagatttatttaataacttgcctacaatatatagtgaatataaattatgatcaacatagtcgtagattgtaaatcatcaacatcatatgcatcgtacagtttttaaatatcaccgacatataattttttttaataattattaattgttttacactatataatatagaacctattttcttta

SEQ ID NO: 258225 - DNA, 243 bp, Glycine max
aagggctcgttgagtagatttttatatatcagaaattttggagagatatgcagtagtattgcacaaatattttttatccaattatgagatatgtttaacaatatcgagtaacgtattgatagtttacttagtttattgttatttccctcattacgtcttattgagtagaatatggtagtagtgaacacatcgttataacactgtgaaattattggagatttatattcgggttacgaattaaag

SEQ ID NO: 258226 - DNA, 364 bp, Glycine max
  unsure (1)..(364): unsure at all n locations
agcacgagctgcactttgaagaggctttcattgattgattcatttcagcctgaacgatccaaacatgtatcatacagttttgaataatggatgtgtaatcatttaaacttttcaaacatntgtactgtatcatacaaatctggatcataccaaagtaaactttgtaactgttgaaaacattctctcatttgaaaactttatctattgataccttttgatctggctgactgactgatctgaactgacctgattgattgcttactttttgactgatcttgactattgacctgatgctgatctagtgctgatgcttacttgctactgcaactttatacatgataaaccttatactatactactgttc

SEQ ID NO: 258227 - DNA, 385 bp, Glycine max
  unsure (1)..(385): unsure at all n locations
tgtttggctttacatgctcaactctttgagtgacattnngtatgggtggtatattgaatggttcatcttanntcatatcatatctcttgtgcatcatgcatcatcatgagtaagtgagaagatagttctaagttagaaagtccttcacaaggcacaagtctttgtttaatcgatacagccttatcgtacctgatactcacagtgcttaagcttgcanagtatgtctcgtactcgattaattaattgcagcttctcgtatcgattacacagtgtgttatacaatgactattattccgagctctgcttatcgatatatgtgattaatagatactctcttcataagtggtagaaggacaagacacttagtgatacttgagatctatca

SEQ ID NO: 258228 - DNA, 226 bp, Glycine max
ttagagttaagttagagttaagttagaccttttatacggaatggatgtagaacgaaaataagcctttcttttctatcgcccttttttctttttctcatgaaccacttacagtatgggagcttctgtatcagaggcctctttctgtcgtgtcggaaactagcttgataacacctacccgacctaagcgattgtctcctcaaaagacggatttgttctctaaatagac

SEQ ID NO: 258229 - DNA, 406 bp, Glycine max
  unsure (1)..(406): unsure at all n locations
tagtacttagttttattcccaaacaaaaaaaagtacttttatataaactggcttattctgatttgaaagatgattgttgggtaaaatattttattcttaattaaccttttttttgacatgaaaattgtattttttttcatttagttctttgtaaatatattattctttaaatttatatattaaaatattttatggtaagtgcattatatttacggatataattatttatagaataaaatattttataggtgaactaaaacatagtactgaaaattatnaagttttttatttatattatatgaaatttagtttttatttgctattatttattacctaattatatgcgacgatgtatttaaagctagtaatatgttcagtaagtaatattttaaaacgatgcgatact

SEQ ID NO: 258230 - DNA, 159 bp, Glycine max
atcctgaactgcctcttaccttaagggtggcgcttgtctacgtatctcttagtcatcttgtatgtaacaagtgtagctcaatttggcttgataccttctttacagagcaagacgattctgctctgacatagtggagtactgggggactgaactggaaaa

SEQ ID NO: 258231 - DNA, 327 bp, Glycine max
cgtttgactgacaacgactttcatgctgggctttctaacaattacgacgacctaggtatttcattattacactggagatggatcgaaagaaacagtcatgagctttacacaggaactaggacaaagtgtgtcgtcaggacactgactgagtgacgctagaaaccacaaaacgcgagccgccatcgcgcctgctgcccgagaccgacggcgctgtgtctgtccatgcgtgtcctcagactactgtccgaagccgaatacggggaagggtggacgggcaggtacttttcataaagaggaaactcttcattatcagctttgcaaaaagaa

SEQ ID NO: 258232 - DNA, 475 bp, Glycine max
  unsure (1)..(475): unsure at all n locations
atccttnagtcacctgcggcatcaagcttagcgagagatgggctcgttcatttcgtatttatnccacccgcggagctcaccaaagtcgtcgccatgatttcgcgaagaggagtggaattcgaatagctaaggttaaggttaaggttagggtttgtgttttgggacttaacagaataggcgatctgagaaggggccaggagtaagaaggagttgagaaagggttgggttcgtgagtgtgtactttcttttgtatgctaggaacatcttcaattcttattcaacacgaaatggatcaatttgtcaatttctataaaatatcaattccccttttttttcctaactttgtattccccaacacctaattaattaattctagttaatcagatgataactangtaaaaaanaaaataccaatcttatcgtattaaaaaaaaaattctcaccggtaactttttaagaaaactcaattatttga

SEQ ID NO: 258233 - DNA, 452 bp, Glycine max
  unsure (1)..(452): unsure at all n locations
ggcattggcttgattgtgtctccaaaatttgaagtacaattcttatttacgaactaagaaatcatacacatcttgaaattaatggacaatttataaggttacgatggatcctcctattagatcatgacttacaattgctacttattttttctagtcatgcatgatttgtaacctccaatagcttcacacattttgaattccaaactgttgcaaaacttgcttctttttataaggaaatattattttttcttttaatgcttcacatgcactaccaattgacatggtattctatcataatcttatccatcttatcaacaatntatacattaaggtatttttatatatttttttccgttgccaacaagtccatataaattaatcaaggtagtatgaggatcatgcataataacataaacatgcatccgattatccaaatatattattattntatg

SEQ ID NO: 258234 - DNA, 377 bp, Glycine max
agcttgcctcaaagagatccaggaaggattttcttcttttgaaccagctccgctcccgaatatgacagccactgttttatgagcgctgagcaccagcagcgcttctaggccatcaaaggatggtcatttctccgggagcgacgcgtccagctcagggacgacgagtataccgacttccaggaggagatagttcaccggcggtgggcatcactggttacccccatggccaagttcgaccaagacatagtcctcgagttttatgccaatgcttggcctacagaggagggcgtgtgagatatgcgatcctgggtgaggggtcagtggatcccgttcgatgcggatgctctcagtcagatcctgggatatactttagtgct

SEQ ID NO: 258235 - DNA, 397 bp, Glycine max
tttaacttgacgcccaagtatcctccaattagataacagtcttgcctcttgtccttcataactgtgatatgctatggttacaaacaagttaatacaaatggtgatactgatgatatataaccttgtggaacaggctcataatgaagcagggaatttagggataccaagaaccactctagtcagtattattttaagagaaaaataataatgctgcatgtgatttccaactagagaacagacattagttagttatcttaaagcaaagcatggcaaggcagtatttccatttggttctatagcaacatataccactatgccacaagtatagaattaagagggaaccttgatcagtttttgatcccggagtagcttgaactggcttttccttataatgaac

SEQ ID NO: 258236 - DNA, 440 bp, Glycine max
  unsure (1)..(440): unsure at all n locations
agcttgtaaggatatattggatattaccggtaaaccaacgtanaattttttttatagtgatcttagcgacaacgttagtaatggtattaatgatagagattaaaacacagtaaatntagtggtccagacaccaaacttaatttttctacatgtatggtcgaaatagtaaagtacagattattaataattaaacttactattcaaaaataataataattaaacctaatttgtaatttctttgtacttttctgaatgataaaaaaactaatttgtaattcaaattttttttatggaatgggatatatgtttcttttggaatgctagcatgcgtctaaaagaaaaagtggatatatgcaagtattttcgttttcgaattcatgttagcatgggagctatatcaaaagagtaagtgatattaaatcaatgttagttatctcata

SEQ ID NO: 258237 - DNA, 383 bp, Glycine max
  unsure (1)..(383): unsure at all n locations
taataagtccatctatggattgaaacaagcctcccgcctgtggtatttaaaatttcatgaggtcatttcttcattcaactttgaagagaatgtcatggatcactgtatataccagaaggtcagcgggagtaagatttgtttccttgtattatacgtacatgatattctgcttgcgactaatgataagggtatgctatatgaggtgaatcaatttctctcaaagaactttgatatgaaggatatangagaggcatcttatgtcataggcataaagatccataaagaaagatctcaaggcattttaagcttgtctcaagaaacctatatcaacaaaagtttagaaagaattaatatgaaagattgttcaccaagtgtagcttcca

SEQ ID NO: 258238 - DNA, 364 bp, Glycine max
agcttggataagcaactgattatgactacaattcatcaggtaatatcatggtacctgaattcgttatgagaatgttgtcctcatcctattaatggtgaagactttgaacttagtagaaaaagatgtgactaatttgacgattacaatctctagtatggtgatagctgttgacttatcgattcctacattaaaggagggatggaaatagctaacacttgagccatgaaaatgaaagactacaccaactaaataatacaaggttggagtgttttggatcaactaaagctgggggaagaagctggaacgagaaattgatgccttggcaacctaataactcaccttggcatgaataagagatctacac

SEQ ID NO: 258239 - DNA, 301 bp, Glycine max
tcttagttacagatgatgcacatgggttcggagctaccttatgcactcctctaatgactatagcatcatatctggagctaaactgctgggagatggaggccatcttctcaattaaataaacaggcttaaacacgagtcatgtgtgcaatggctacaccaccttggtatttcctatcatactaatgtctatattactgagaccttcataacaatatttgagaaaaaactcgtttgacaataaaaggtgggggcaactggcacataatttgttaaatcgattccaagactcatacaagctctt

SEQ ID NO: 258240 - DNA, 333 bp, Glycine max
agcttttgtatcaatttcgagcttttttttatattacgacactcaatccgatgtcggagttaaaagttattgtgggttgcatttgctaccagcttctggtttcaattaccggcgtctcgatatattatgggactcaatcggacatccgcgtaaaaatttattggtgtttgaattagcaacgagctttcggtttcaattacgagcgtctcgatatattacgagagtcaatcgaatatcgaagttaaaagttattgtggcttgcatttgctacgagcttctgtttcaattacgggcgtctcgatatattatgcgactcaacacgacatccgtgta

SEQ ID NO: 258241 - DNA, 393 bp, Glycine max
tacccgaccacttacacaaacaaatcaaacggaacaagacaattatagttgctgtctgaatacctcacccactcaagggtatcacacaattatggctcttctctaatgaaacactcttgccttttaccactctaattccccttgagttcttacgcaattcaagagattatggccacaaccaagaacaattcaccaatatgtgtaaggtaaggctagagagacaaggaaaaggttaaccaagaaaaaggctaacaatgtctttaggcacaaatgaaggaaataaaattcataatttatgaagtcaagtaacaatccttcatgcaaccaacatattaccttaaagagattattttaaagttcttcatcatgaaccatcacccccaattttttttt

SEQ ID NO: 258242 - DNA, 399 bp, Glycine max
cagctttgacacataaaatgcaatatttattctatgactcatgaggaattcagttgacaaaaaggatatactttcataattaattagcagctatgggtgcaattttaatgtcactggaatggaatggaacaccatgattggacccaccaaccaacttaacaaatagacttcttattgctactttctatatatctcataactctgtcatcttcatttggtaccacataactattaagtacttctttgtccaatacacgcgtcatatatatgaagtataagtttaatttagatcgtacttaaagaattgtatgaggaaataattttgttctgtattctatgttttgttaaggcatacatatatataacaaagttataataaaattttctaagaatgagtta

SEQ ID NO: 258243 - DNA, 292 bp, Glycine max
tgtattggaaaaatattacttatgttgacaaaaaaactttaaatttgactctcgcatttaaatttaaaaaaattcttaaaatttattgtaagtcttatttatcggtaaatcaatcctcatgccacaagataaataaaaagtgtacaaaaaatttatttcaacatattcattacacaaataataacaaacccattactatattaataaaaaaaaacttctactagctaaaattgtcaatcactaattatgaagaatttaaatgttcatcacaattcaagcatgaaagcacatt

SEQ ID NO: 258244 - DNA, 425 bp, Glycine max
  unsure (1)..(425): unsure at all n locations
agcttgaaggatgtaagatcctttgattcttcaatggccaccacaatgtgatcaaactttgatatcaatgttctaagcaccttttcaatcaccaattgttccttaatttgttctccacaacacttcatctggttggtgagtgtgagaatcttggtgagatactcaactactgattcagtctcctccattgcaagaagctcatactatcttctcaatgtctgaagtttcaccttctttatcttttctgcaacttcatgactctttacaagaatgtcccatgctttcttcgagggtgtggcatttgcaattntctcaaagatggcatcatttacacactggcgaattatgaataaggctttgcagtcctttctctttaaatctttgacgtagatcgtttggtttaataacattggcactgggttctt

SEQ ID NO: 258245 - DNA, 458 bp, Glycine max
tcatgatgatgaatcaagtatgaatcacgtagttctgatgatgacaaaaagcccaaaagaatgatttcaagattgagtcaacacgttcaagatcaaaattaatttcaagattcaagagaagttgatttcaagattcaagaaaagacatcaagaagaatcaagattcaagagaagatgaattcaagattctagagaagaaatcaagaagcaacaagtcaagacttcacaagggaagtattgaaaaggatttttcaaacaccaaacatagcatagttttgttctacaaaagagttttctcaaatttttctaagttaccagaatatttactctctggtaatcgattaccacatttctgtaatcgcataccaatgatacaatttgatttcaaaaaggttttaacttgatttgcaccgtccacatgatctttaatggtgtatcgattacatatattggtatcg

SEQ ID NO: 258246 - DNA, 440 bp, Glycine max
  unsure (1)..(440): unsure at all n locations
agcttataaagttaagacaccttctaaatggntattatgggtctcacatagatagtggcactggagatataacatccctacaaacactacgtcaagtggacataaaccataatacagaagaagtgtaaaagggttggaaaaacttacacaattaagggtgttgggcttgacagaagttgagccaagattcaaaagttntctgtgctccttgataaacaagatgcaacacctggagaagttatatattacttcaagacgtggtaggaacatggatttgcattctgatgtattggcacctgtacttcagaaggttcgtcttatggggcggttaaaggagttcccaaactggggtgccaagctccaaaatattgttacgttgtccttatcatgcaccgagttgacacatgatccatngccactacttatagatctaccaattt

SEQ ID NO: 258247 - DNA, 377 bp, Glycine max
tgcttttgtggctgtttaacgaagagagctgagcaaggtaattcccaaacagcacccaccttccctctcaagaaacctttgaggtcacactcacaaatctgaacattctatgtcttcatattcctaactttgcccatttaacacctaaactcccccaacttccacctttactgtacctgctaccttgtggctcggatattaactctagccacacacactcttctaaattgtgtgcggtccacattaaatcatgcatgaggatacctatataacggacgtaacaccatccatatcgattacctaacactaccattgcattatcttaaacaagggcccaatatgtgaagatatacgggtttacttaaaaaaataccgcg

SEQ ID NO: 258248 - DNA, 468 bp, Glycine max
gtatactctaaagtgcacgcgcacgcacgcgagctagtagggtgaaagtttcacgattgttacgtgctcatgcaacaattgttagccgtggctatacaagatatcttgccaaacaaagtccggttagcgataactcgtctgtgctttttcttccatactatatgtagcaaagtcattgatctagtcaagtttgatgagttggaaaatgaggccgcaattatactgtgccagttggagatgtattttccccccgctttctttgacatcatgattcacttgattatgcatctggttagagaaatcaaatgctgtggtcctgtttatctacagtggatgtacccggttgagcgatacatgaagatattaaaagggtatacaacgaatctatatcggtcagacgcatctattgttgagaggtacattgcagaagaaaccattgaattctgttcagaataggtagagaaagct

SEQ ID NO: 258249 - DNA, 433 bp, Glycine max
  unsure (1)..(433): unsure at all n locations
ntgaggagttggtctttgccagtgaaaggatctatgtgggtccgaaaagaggcaaatttgatcatcctactatgacgactgagaaaactggggcaaatgaagagggtgagaaagagggagaaacccatgctgtgactgccattcctatacggccaagtttcccaccaacccaacaatgtcattactcagccaataacaaacctcctccttacccaccaaccagttatccataaaggccatccctaaatcaaccacaaagtctgtctaccgcacttccaatgacgaacaccacctttagcaaaaccaaaaacaccaaccaaaaatgaattntgcagcgagaaagcctgtagaattcaccccaattccagtgtcctatgctgactttctccatatctacttgtaatntcatggagccataacctaccaaggtcat

SEQ ID NO: 258250 - DNA, 382 bp, Glycine max
ggctcgtcttgctgatatttatcatgcagacttttcttatgatgaccgaggaacaattagggatcaacttgaaacttatgtgcttcaagtgagaagaaatgcttctttctccacttgtgaagatgttcaaagtttggctatgaagatggttcaaactgagaaacatttggtatttccattggtttataaacttattgagctagctttgatattgccggtgtcgacagcatccgttgaaagagctttttcagcaatgaagattatcaagtctaaattgcgcaataagatcaacgatgtgtggttcaatgacttgatggtatgttacaccgagcgggagatattcaagtcacttgatgatattgatactatttcgaacatttac

SEQ ID NO: 258251 - DNA, 438 bp, Glycine max
  unsure (1)..(438): unsure at all n locations
agctnttctcatagatagcgatggatgtatagttttttgcaaacatgcgtaagaaaaaatgaaacacatagaaaagagaaagaaagacctcgaaggtctgcatgttatggtcataggaaacacaaatcattcatagagagcaaacatatctttcggaaacaagaaattgacgctaagagtttattttccaaaataaccgagatcagaatggatggattcgttgaaccaatgaaagaacataatttggaaacgttgggtctacttgcgtaaatcccaagccttagcatcataatgccataagctggatgcttgagtacccacctagctgtatgcatgactaattgtgcgcgttgtttccaaatcatcattgttacgcgcgcctcgtggaaataatatgggagttcaacccgaaaccgacaccctgacacatgaatttgt

SEQ ID NO: 258252 - DNA, 441 bp, Glycine max
tgttaaaccccaaattgttactctacctttacagctttactacttccactgcttcatattgttctcaaactaccacttgtaggccttgcattttgtcatttgtttatgatttgctgattatatttatcaagaacgtaggagatttgcattgctatccatgatatttctatttcattatttttctttatagatttttaatatgatatttaataatacatcttacttggctacatgctcacagtggtataatattctatatgcagcgtttttttgatacaccacggctcatgttgaattgccgtggatttccttatagggatgtcaaggtacgcgttgaaagtgcttggagttcagtcaatctctatgaagtgctcatagtcatttttgagcgtcatagacatattaccacgtcaaacgtttattattaaattgatgagagtc

SEQ ID NO: 258253 - DNA, 405 bp, Glycine max
  unsure (1)..(405): unsure at all n locations
agcttgtaccatattcaaacgacaataattntttactcggatgttcgattgagtcctgtaatatatcgagatgctcgaaattgagaaaagaagctttgagcaaattcaaacgatattaactttttactcggatgtccgattgagtcccgtaatatattgagacgctccaaattgaaaacggagctcgtagcaaattcaaacgataataatttttaactcggatgtccgattgagtcccgtaatatattgagacgctcgaaattgaaaatggaagctcgtacgaaattcaaacgacaataactttttactcgaatgtccgatggagtcctgtaatatatcgagacgctcgaagttgagaacagaagctctgagcaaattcacacgacaattactttttactcggat

SEQ ID NO: 258254 - DNA, 471 bp, Glycine max
  unsure (1)..(471): unsure at all n locations
actaagcttnagtatgcccgagtcattcatccctatgagatgttgttgaagtattggcgatcagaatttccattccttggattacggcgttgaaccaagctcaagcttttacaaaaaggatcatcatgtcaagttgaaatatggaagtaaccatcctgcataattggggcaaaagatgaatcgagtcacatcactgcttcgtctactgccaaacatatttaggattattgatgtccttgttacttccagtttcaccttgacaaagatgtcatggaccatgttgaaaatctaaattgattcaaccccatatcctgcgtaaaaattcgcaatacttcgactgtacatcattcgcatgcatccatgcttttcattggttgcattgctcattgcattctttccttgaacaataaaataaaatagaatgaacttatcaaaagaaaaggaacgctttacgggtgcttaacgaactcg

SEQ ID NO: 258255 - DNA, 439 bp, Glycine max
  unsure (1)..(439): unsure at all n locations
ttaagtcacctgaggcatgcaagcttgttcgaaccgcaggctctaacacatttgatattttatagtcgaattaaatatgtctatagagattcaatcattggttatatacataagctgttgaactagcaaagtttaatacaaaaaatagatagacagttgagttaaatatatgtcgataaatattcgatttatgtgcatgcagaatgtaatttaattagtaatatctattagtccttgaccacaatatggtaattaattaatatgccacgtacaaattaaaataaataaataaataaataaataaataaataacttgttctctttagctactgcgcgtaacctacgnttgggcccaacgaattaaaaacagtaggattctgttgcacccttgtgaacaatgtcatctaatgtggttcaccacagtgcaatatatataacc

SEQ ID NO: 258256 - DNA, 438 bp, Glycine max
  unsure (1)..(438): unsure at all n locations
ntcctgcagacgatatcatttgctagatagactgcaatttagtgatttatttagtcctaataggaggcaaagggaagatatgtcgggttctgatggaaacaatgctgatgaagataaagtttgggacaatctaaagaggaatcacaaaatggctgtctctgatacaacaaagctggttgaggacaaaagttaaaatgtagttgctgcagagcaaggattcactcctttgggtaaaagaacattgcatggtgaacgaccattttcaagtgataagaacaaaactgatagttggatagcaagagataatgctgccaacatgcacggttcacaatcagtaggtacaaacatttggttgggtggtgatgtaaaaatgtctcttgactacgaatttagggtcacatattccacgtgtattcaaattggatgacattatttcat

SEQ ID NO: 258257 - DNA, 449 bp, Glycine max
agcttgaaattattattatgcatgtaaaaaaatcttaaaattattaattctaaaactagttgaaatttagttctatataaacagattatgttaattcctaatattgatgctcttttatcgtatttatttgggattaaatacttattattatgttcaaatttatatttgaattgattcagtctccaggaatatatgtaaatattttttattaaccaaaaagaaagaagcatatattttatatttattttttagaaataaatatttattaaaatcaaaagtttctacttattaattatcataattttaatttaaaaataatcgagtagtgaataaatacataaattatatatttttgtggaattatttttgtgaaataaatatataaattatagattcaaacatatgtctcatttagtatattaaacaaatctatatctatctatattatt

SEQ ID NO: 258258 - DNA, 421 bp, Glycine max
  unsure (1)..(421): unsure at all n locations
tgaccaanaaccatattntaaaaactgttactcaacatatcatttcttctaataatcttttccaatgtaattcttgatctccctctgcttgtcctcttgagatctttccatggaataataatgtccatatttattccacaatgttagctattaaccctgtaatgcatctccgtagttccacttaaaaggaggggaaggagccaatcctatatcctatagtcatgaagagtatgtgacaagcgagtctgttagttctgcagggtctttaaaactactgtactcggatattttcacgagggagaaggaaaatgatgaaggcggtgagggcatgaccagaaaattagatcacacagatcgcgctgtgtgttgtcaactcattcctgttaagcaaagatgtggtgtgggagtatacatttatcac

SEQ ID NO: 258259 - DNA, 444 bp, Glycine max
  unsure (1)..(444): unsure at all n locations
agcttctagaaggtttgtncattttggggacaatgacacgaatgaagttggcctacgacgccgccaccacgccaatggcctgtgattccgtcagaggagggctttcgttgagggagaggacaagggctagagaggaatactcttttagtgtttgtttcgccttcaggagcttgcggctcggggcaacaacttgtttattagggttttgttgttgttggtgtctggtggcaatcattgggaggcagcaaaagcgacgaaggaggagaggggaagtggatgccaccgtcgcgcgatgccggagcatggagaatgatgatgcgaacgacatggaaaaattggaaatggagaaaatgaatcactgtatggaattgaaactaattttgtgttatggagttatacacttttgaggtcacagtttgttggagtccatttttttgtatggag

SEQ ID NO: 258260 - DNA, 448 bp, Glycine max
taaagtgaacatacaaatgtctgaacatgaaatatttcctacaaccataaccatcccattactcaaatacgtgatttaccacataaaaatgtaagcctttcttgcatattgatgaaataattagagagccattttcttgaaaagatccaatgttttcatgaacgagttccataaactacattgcattggtccagtcgttcaacttcataataaaatacatattctcgtttttacaattatccccggtcatcttctccctctcggcccttgaaaaaacaaattagcatttggcattgtgcttatacaattagattgatttataatgttaagaatgttttctaacaagatgagaaagaaggaaaaacacactcaaattagtacgagcttgttttcaatataatcaatcactgcaatctgattgaaatggtctacaatggtccacaatata

SEQ ID NO: 258261 - DNA, 429 bp, Glycine max
agcttactgattaacatcataatattcttttttttcttaaccctctttgcatcataagaaaaaaaattcgattaatccaaaatttgactaagaaataattaaaatctgataaacttaattttaacacattaaccatttatatccaataacttgattacatatctaacatgtttaataacatgtctactaaactgaccggagagaatacaaaatatatggaatacttccataaatctggtgatacttcagaagcttaattcttcttattcatgcttatcctaatatctatgtttatgcacgttgtctttgtttgaatgaaacaaaaatgttggttcaaaagactacaagtgaatgcatttgcttctatttctgtctcaataagaacaatgttgtttgcgcattaacaatttgctgggaaagtcccccgga

SEQ ID NO: 258262 - DNA, 294 bp, Glycine max
cttggcgattcctcatgcatgggatcttatgacccaaattatggctaaagtgctcgacctagatctaggagggtctttagcaactcatgtttttagctacatgtcactctgtgattatatgagagtatatttattatttggttttatatatcttagatttttattttgttaaacaaatgaaattccctattcggccaaataacttcagattatgctcaatacaatcaaatgttcgaccgaaggtttaacacatataattcatggtctctgttacatgttgatattaagtgtgag

SEQ ID NO: 258263 - DNA, 392 bp, Glycine max
  unsure (1)..(392): unsure at all n locations
agcttctcatgattctgaattgactgatgttgtctgngagacatcaattgatcagcacaacaacccaaaaggtgatggaccggaggaatctctatatgtaaatgagttccaacctgattctaaccctgcattgacgatgccaaatggtaatgaaaatgataccgctgctgaagtaactgaaggcgtggctgatttgaatttacgggatactgcctctgctaatgacccagatgaccaacagactctatcaactgcagacgttaatttcctgttagataagtgccctcttcaagctttgcacacaacagtgaaggacaaagacccttcctttgcctggaagcactctatggtgggattctctctctctctttgcctcttggttgaccaagttg

SEQ ID NO: 258264 - DNA, 449 bp, Glycine max
actcaagctggctagttgcaacctatcaaccactaccagctgcattcattaaggtactaatataccaaatcccaataacctctaaaaatagcacacagatttttatttcctgttgtcaaaactagtgttgttttggatgtaaaagctaaataccttggtcatgtagtcaaagtagttaaataaccccacattatagtgcagtacctgacccctatatgctataatggtacagcaaagcagctactacaccaaatcaaatagtttctatataacatgctcaaaactaaagtactcaaatcaaaactggagaaacaatgttgggcttggttggaaaaggatgaaagagaggctgatggacaggataatgcagagggtacagagaccaacaaagcatgaacaagtggttggctactggaaacttgagagagcaagtgcagagagtgagaaac

SEQ ID NO: 258265 - DNA, 426 bp, Glycine max
agcttgccaaccctttgagcaatctcttgtacaaagaagtatcatttcattttgatgaattgtgtttagaagcttttgatactctgaaacaaaaactgatttttgcacccataatcactgccccaaactagacacttgattttgaaataatgtgtgatgctagtgattgtgttgtaggagtagttttgggtcagaggaaaaataaagttttccatgtcatacattatgcaagcaaggtgttaaatgaagctcaaattaattatgcaacaactgagaaagaattgcttgtggtagggtatggtttggaaaaaattagatcttatttgataagatctaagattatggtttgtactgatcatgttactatacaatatctgttggtcaaagctaattctaaacttaggtttatccgttggattccacttt

SEQ ID NO: 258266 - DNA, 393 bp, Glycine max
  unsure (1)..(393): unsure at all n locations
tagccctagaggggatggaccttntaaggtcttggagatgatcaataaaaatgtctataggaggagttagtaccacttttaatatttgtgatttaattccttttgcaggtggagctgatattgaggaagaggaaccaacagatttaaggtcaaatcctcttcaagggggaggggatgatgcaatcctctctaggaagggactagttaccagagccatgagcaagaggctccaagaggatatggctagagctactaaagaaggccctagggttctcatgaaccttagggtagatttttgagcccataggtcaaggttggatccactcttctttgtaaatattagaataaggttttcctcttttgggccttgtattntggccattctagtagtat

SEQ ID NO: 258267 - DNA, 422 bp, Glycine max
agcttctctttgacctttgacaagcctttaacttgtcctctaatatcataccttcgactctggactagtccctcttagccctttggagcttgagttcgctattgctgccccataaagcccctcggaacttgtttcggccccattcctcttttcgggccctctttgtttctcgttccaatgttgtggctgtagttgtgttgacatccctcagctcgtcacattcctttctgactctgatggctgccgtcttgaacttttccttgactacttgcgttctttccagttccacttttaaggcttgcacctcttcgctttcctcagggacctcagtctcttcctcacttgaaacccctagctttgggaaccaagttatctcttgcgtctgagccttcagccacatgtgatagccaccaatgatccca

SEQ ID NO: 258268 - DNA, 346 bp, Glycine max
  unsure (1)..(346): unsure at all n locations
acactatcnaanactcaacctagtaggattatggggtacccatcacatgtggtactatgtttcggcccatcgatggngcacaacaagttttacacattcacaaagcgcgcataaacccaccatcccctgttgcccacctccaactgagctcacgtacttacacgtagcccatatcctctattctcttaacaccgggtccacatcaatcctcccaagctttcccaacatcaaagcaaaacaacattcaaacagcacaagctatcacagccaatccaaacagagctaaggcagaaaactctgcgcaaacaccaaccataaccacagcttttctcactgtaagacccca

SEQ ID NO: 258269 - DNA, 244 bp, Glycine max
cgaggccaaaacaacaacccacctacaaacaaacagaacccaccatccgcagtgcccaccccaacagagcccacgaaccccacggaacccctatcctcgggcctctcaacaccgggtccccaacaacccctccaagctaacacaatatccaagcaatacaatagccaaacctcacgaactaccctaaaccaagaaaacagggcagaaggagaaaactctgcccaaaacaaattcacatattaca

SEQ ID NO: 258270 - DNA, 433 bp, Glycine max
  unsure (1)..(433): unsure at all n locations
ttattcctttntcactcatgtgtccaagactatgatgtctcatggttaaattattgacaacctcagtgactactaccatatactcatatgcaatcatgtaaagagatcctcgcttctttccatgagccacaacgagattgccttttgttaccttccaagctctatctccaaaagtggtgtgatgtccctcatcatccaactgccctatagatattaaatttctctttaaggcgggaatatgtctgacattgtgcaatgtccatatggatccactggaggtcttgatgttgatatcacctcttccgacaatgtcaagagattttccatctgcaaggtaaactttcccaaatactccagagatatagttagacaatatatcttttaaaggagtgggtggaacgacacaacttggtccatgatccatgaatcaata

SEQ ID NO: 258271 - DNA, 410 bp, Glycine max
aaatagtttcaacttctggtaatcgattacataccttatgtaatcgattacaggcttttgaattcaaattcgaaatttgtaaaaactgtttacaaatcaatttggccactggtaattgattacattctctggtaatcgattaccagagagtaaatattatattttgaaatcttaaaaagctttttggaaaatatcctttggccaaacctatgcgtcatcaattaagaaactcttccttagattctaggaacaaagttcatcaattatcttgaatttttggattcttgacttggatcaaacgtgagaagcgcttttctttggcataatcaaaacttcatatcatatttgctctacattcctcacatcataacatcaggttcaacaaaactaattatctaaatccaagcatt

SEQ ID NO: 258272 - DNA, 166 bp, Glycine max
cgcttctaaactgtatactataatgaatctcttataccacttgttagacaagtggcctcacttatcttaagaaaggggggcggggggggttctatctctatctcacatatcctccccccacatctaaaccccattctaaatcctttatgctatccctatctctcct

SEQ ID NO: 258273 - DNA, 374 bp, Glycine max
  unsure (1)..(374): unsure at all n locations
ttgcaagctggaatcagttattctatcttctgcagcctatgggtgagtcccgtccaggtagtcccgaagaaaaccggcctcaccatcataaaaaatgggaaggaggagctgattcctactcgggtgcagaacagttggagagtctgcatcgactataggaggctgaaccaggttaccaaaaaagaccattttcccctgccattcattgaccaaatgcttgaacgcctgtcaggcaaatctcactactntttccttgatggttnttctggttatatgcaaatcactattgctcctgaggatcatgaaaagaccacattcacctgccccttcggcacttttgcctatagaaagatgcctttcngcctgtgcaatgc

SEQ ID NO: 258274 - DNA, 436 bp, Glycine max
  unsure (1)..(436): unsure at all n locations
agctngtgtactggtgcattctactaanatatggatttgttcactgctttgnttgaggataacaattgcttgaccacaacaacgctagagacagtaaaggacaatggtctttcaaataaacctgttgtacgtgaacaaacattattaactcaaatgaaccagggaagtcattgcataattctaaaagttagactagctatcttcaatgtacctaaacaaaattatttccaaacatgtgacccacacatatcatgcaatgcacagaagaatcgggtggtggttgacttctaagaggaaaaaatgtcatgctttgttgtcgagacaacgatacaaggattacattataccttgatgcaatgacatatctcatcttccgtatatacatccacttgtccacactaaccttgaataagcaacatacacacctaagttattt

SEQ ID NO: 258275 - DNA, 456 bp, Glycine max
tggagaatatgtttctcctccttcaatattgtcacttaaatacataagcattgtggctattcgctgcccaccacgcttcaagttgaactgtctcaaaaaagaaacacaaaaggttgtagatgggatttcgttgaagccacttcaaggaaattattatcttggctataacttgaaaattaacaaagacaaatacaacttacagtatcagaaaaatagtcatgatgtggtttgtaatattgattcttctcgtacctgtgctgctgcagatgttagtcttgatactggtaaaacccatcatgttcagatgtagcatgaaaaaataagtcatattctcacctcaggacttgcataagctctccattttcaattggtatttgagaatagacagaaattcctttttcaattgcctagttgagcacattgaacatattttatcaaactgtacaattaatggta

SEQ ID NO: 258276 - DNA, 391 bp, Glycine max
tgagtggaaaatcctaatttggttaaacctgaaattctgcagcatttgcaaagcagattcaaattaattgaagttatgtacgagcactgcagcttttacaaaaataagcactacagcttatttaagacacaaattctgcagcatttgcagtatgtgggtggaaaaagggtgggagtggaaatttaaatggagaagacacttgtttgacagagagcttgagatggcagattgtttccgtaatgatgttgctggcagctgtattcagattcacaaaaaagatgagtggatctggaaaatagaccctactggacaatatttggtcattaaaggagagactactaacaaagacaacattgaggaggagaagggtggcgattaatgacacattatg

SEQ ID NO: 258277 - DNA, 469 bp, Glycine max
  unsure (1)..(469): unsure at all n locations
actaagcttcacatcagaccacttccagggtgctggaattacttcttatggacttgatggggcctatgcaagtngaaagccttggaggaaagaggtatgcctatgttgttgtggatgattactccagatttacctgggtcaactttatcagagaaaaatcagacacctttgaagtattcaaggagttgagtctaagacttcaaagagaaaaagactgtgtcatcaagagaatcaggagtgaccatggcagagagtttgaaaacagcaggtttactgaattctgcacgtctgaaggcatcactcatgagttctctgcagccattacaccacaacagaatggcatagttgagaggaaaaacagaactttgcaagaggctgctagggtcatgcttcatgccacagaacttccctataatctctgggctgaagccatgaacacagcatgctacatccacaacagagtcacact

SEQ ID NO: 258278 - DNA, 450 bp, Glycine max
  unsure (1)..(450): unsure at all n locations
agctngtagcttanacaaaagaaaaaaatatatttataatctgtggaagacttttttttcttgtgaagaacaggtttatattaagagaaaacacatcctcttgcaaagttagaaaagaccaccaacttcaattagaatttatatagtgaaatttaagtatcggttaccaacatcaaaagtttgaaaattgaacccaaatcgtcgatagcgtgagttttagatgtgttaactcctacaaactactatgtgaaaaatgtattaaaaatttaatctacgcatgacttatttaatgaaaaaaaaaacctcctgcttatagtgtattatatttctttttaaaaaaaatatttatacacattcttgtatctaaatgttgtaaagtcctagcatttgtcccttaaagtcctatgcccgaccaatgaactttgaattacttaacctaatgtattatag

SEQ ID NO: 258279 - DNA, 424 bp, Glycine max
  unsure (1)..(424): unsure at all n locations
tgtcaggtttcctaactcttttggtatgttgccagtgatgtctcattttcttgcanagaactaatacaagtacaatatgcatcaatttacttccccatcatcaaaaattgagcgagtagaatgccaaaaataatttttagtattatggagttgaccaagattgtgtgaatattttttgtaatagaaatccttacagagctgtaagatattttaaaactcctatccttgggttcaagtatcctgtgaatcccatatatgctagtgatctgaaatgaagcaatttatatattacacagcaagcacgaattatagaattaaaaatgtgaaatatataattttctaaaatgaatagtgacagccaacatctttagcgaatcaattattaaaagaaaacaacaacatataatacttaaatatcttacac

SEQ ID NO: 258280 - DNA, 350 bp, Glycine max
ttgtcctcagatccctcttgttggactagacttagaccatacaatattattgtaacaacattcttaaaacgaaaacttaatctgcagatccctcatttaagactaagtttcaatcctgcttcattcaagttctaaggcaacaatacatttcacaatgctaaagtcacctaaccatgcatacaaatggttgatcagaccaagagcatacaaaatttaagcactgaaagaagcattgaacacaagaaacacaatcaattagatattaaagtaattacatcaactgttctttagaaatccccaacaagggtgtttatgatgcaatcctaccccgcaagggcatcatatagaag

SEQ ID NO: 258281 - DNA, 380 bp, Glycine max
  unsure (1)..(380): unsure at all n locations
agcttcagaattcaattgcgagcgtctcgttatattacgggtcntaatcagacatccgaggaaaaagncgttggcgtttgaattagctctgaggttcagaattcaatttcgagcgtttcaatagactacgggactcaatcaggcatccgagcaaaaagttattgtcatttgaattatctcagagcttcagaattcaatttcgatcgtctcgatatattacaggactcaatcagacatctgtgtaaaaaagttattgtcgtttgaatatgctgagagcttcaacattcaatttcgagcgtctcgatgtattactggactcaatcagacattcgagtataaagttattggcgtttgaattaactctgaggatcagaattcaa

SEQ ID NO: 258282 - DNA, 434 bp, Glycine max
ctctttgttcggtattgcctaaaatatttgcgatgtagttcggctatgtttcttcttgcgagctcaaccgaagttgtatttcggccgacgccggcattatgtcggccaggaaaacattagcccacctcggcaaaaaaaaacatgattcaccggtattgacagaaaaaaatgctggccttagtccgccaggatagatgaccgatcgaggtctaaaaaagaagcatgaccggattacgccgatcgaacatttcctaatagatatcctccaagcattattcagggattgaatggagaaaacaatagccgacatctgtagttaaatagccgcgactgatatttttcaggcaacactgcgcaacttttttcacaaacgctggccgataatatttctttacgggcaaggatgctttcgttgttgggtgtcgctataaaat

SEQ ID NO: 258283 - DNA, 401 bp, Glycine max
agcttgctctaaatatacattgatgtttgtttttatgggaggaggttgtatgccattttttaagagtagtgtcccactagtaaaactaactttccaaatgtttgccttcgcgggaaatggccccgaggaagcttgcctcatagaggtccaggaaggacaaggcagccgaaggaactagtttcgctccggagtatgacagtcaccgctttaggagcgctgtacaccagcagcgcttcgaggccatcaagggatggtcgtttctccgggagcgacgcgtccagctcagggacgacgagtatactgatttccaggaggaaatatggcgccggcggtgggcatcactggttactcccatcggccaagttgatccagaaatagtccttgagttttatgccaatgct

SEQ ID NO: 258284 - DNA, 446 bp, Glycine max
  unsure (1)..(446): unsure at all n locations
ctgatctgtntcattgttattctaatgaggaattctactgttgcaataatgcattatatagaaaccaagcatatctctcgaaaagtgaagtacaaaatttgccaatgcaaaagaatattcatgtgctgccttattttcccctgtaaagttggttggctaaaaacacaataagatcttctgccatcttgacatgtgtatagaaaatgacctaaaattaaaataaaaataaaggaaaaggagaaatattaacgaaaataattatcaattgagcaacataaaaaggcacatattctccagcttttgataagcaaaagcatgtgagttcctgtacaggaatcctagatctaacagcaccagtcaattattccaatttaattaagctaagtctaacacgttgaatttttgcactttatcagagtacaccctctagcttctaattgcatata

SEQ ID NO: 258285 - DNA, 382 bp, Glycine max
  unsure (1)..(382): unsure at all n locations
agcttgatgtgcttggtcttttctttctctttttttatgcgcgnatagcatcatgttctatatgttcaaggttacaaattctgcattgttatgataataacatcgtaccctattattaatgcattcgttttatgaatccttcagttgtagaaggtgagaaaaaatggctttcattcaaggatgcatggataatgaccgaatggaattgttggaggaataaatgtgtatgtccaatatctattttattatgttattaattttaataaagaattattctttattttattatcatatttattattgtattaaattattaatttgataagttcttccttaaaatctaacaatccatttttaacatagtgacacacttttaatataa

SEQ ID NO: 258286 - DNA, 303 bp, Glycine max
tattatctaacgaattattgcctgatgagaaatgacatatttcaagctagcttattgagtcgaggcaaaaaagctttaaatcttaatatacagattcttcactatgttctgaaactacttaagaaaggacaaaggcattattagccttctgagactggataaatttaagtcactcttttcataagaatatagggtcgcactcggcatgagtgttcttttcctctttgggttaatccccagcttctcttcctgactgaatggccatgcatactttccagaagccccaatttgaataactacata

SEQ ID NO: 258287 - DNA, 433 bp, Glycine max
  unsure (1)..(433): unsure at all n locations
agcttctagccaaatggacttaccttgaattaattccttngatagcccttttgagccttgtttccctttccttgttttgaatctctctacaagccttaaatgaaaaaccatgatatcaccatatccttaaggaattttggagctttggaattgttttgggaataagtgtggggggtttttgtttcattggataacttgtnttgttggctatgcttcatgatgtattttgggccatacttgatgtacattgtatattggttaaatgttggacatgctgaatgaaatgttgtttctcaaaggctatagagtaaaaaaaaaaaatattcgaaaaaagaaaaagacaagcaataaagttgagtgaataagatcttaaatggcacaagaatgatgaaactctnggttctactctttatgtctaaatcttatctttact

SEQ ID NO: 258288 - DNA, 449 bp, Glycine max
tgtctctggaccctctctttaaatatgaccgtttcactttttcagctgcgctgctgaaacattgaatacacttaaatttgctcagagagcaaaacttattcaaaataatgtgagtgccattctatgatcagtctgaatttctttcaaaggaatgaatctcatcaacctatcactatacattccatatattgttcttgtaggctgtggtgaacgaagattctactggggatgtaattgctttacaacatcaaattcgacttttgaaggtggtatcagttatttcttgtagtataagttttatgtgagttgctaatttaactaacatgataaatttttgggccaagaaaagctttctatcctcaaacgacgtcagaatggctctaggtctttgtcattctctttgtcattattagtgcagaataatttaggggcatctttaaaaatatgtg

SEQ ID NO: 258289 - DNA, 394 bp, Glycine max
tctatcgatatttttcttgttagaaagccaccaactaagacaagagaacccaagacatcccaaatacgttgacatccttagcgcaaaaaagcagacaagcgagcaagaaaccgcattgaacaaaaaaatagatgataacaaaacacatgggaggcaaaaccaaacccatggcaagccaagctatcaaacctaagggtgaaagaatatctattctcaacaaaatctaaggctagagaacaagggataacatcccaccaaggaaagctgtcatataaatgagctttgtatgcaaagaagtccgcacgagagcttccctccctataaatatggcctatcacaaaatgcatgtgactagttaaagctatacaagtacaccttctattattcataaacc

SEQ ID NO: 258290 - DNA, 419 bp, Glycine max
  unsure (1)..(419): unsure at all n locations
agcttaactgaattagaccttnctatttatttacttcttggaaccatttcgggagacatagccactcgtataccatttgcaacatctgttattctagcttcaaatgaattttttggggagattcctgtgagtcttgcaaactataaatttcttaatacccttaaactccatcagaatcgactcactggtcaaattcctccataatttggtgttctctcacgaatcaagacattttatgtatccgacaatcttttgatgaggccagttccaatctttagcgctggagtttcagaaaattatgcaaataaccaaggcctatgtggaggaaaatcattcgcgccttgcaaggcgaagtcttccaagagtaacttggttgttattgcgtgagctgcagttggcggagtgactcttgcgacatt

SEQ ID NO: 258291 - DNA, 422 bp, Glycine max
ttggtaatcgattacaagtattgtgtaatcgattaccattgttaaaatgatttgagaatgtttaaacacaagttgtaactcttgaaatttaaaatcttaacgttttaaaacactggtaatcgattactaccttctggtaatcgattattagagagtaaaactctttggtaatgatcttgtgaaaacttcttgtgctactcaatgttttgaaaaacttttttagtacttatcttgattaagtcttctcttgattcttgaatcttgaaacttgaaacttgattcttgaatctttgcttgaaactttgcttaacccttgattcttcggcatcatcaaaataaccttggaaggcattgcttccacaatcttcccctttttgatgatgatagtcctaacatcacaagaatgcatacaattattgttc

SEQ ID NO: 258292 - DNA, 383 bp, Glycine max
actcaactaacggccgaacataatctggatcgtaacccatttttaaatgcaacactaggctcgaccattctacatgcactcacatcatactctctcttttgagcacttcctttttcttatatggaaagaatagtaatccgtttagagtttagcggcctttttgtatcataattatttattactgaaaacagttaatttcagaaggaaaagatttgctttcaccacactctgtaaaataattattgcttaactaaaaaaataaactggcaaaatagcaccaccaccggcaattttggggtagaactcaccctatctttatggtgtgcacttgttgtccacgttccccgagcacatcactgtacaggaagattctgagttatctt

SEQ ID NO: 258293 - DNA, 430 bp, Glycine max
agctttagtgactatgagcaaccttatattttacattgagtgtcctcattgatatgttctacagtcgatcttgcataaatttctaattgtcatagcatatgattcgtggatatgatttaggctttctctctttctgtacattttaagccattggccaaaaagctatcccaatgtatattatttttgccatttgcaagccctttgagccaaacaattgatattttgttggaacactaacctaggataaaagtttcttaccttaccttacgttaggagagcaaaggtgttttgttgggaatttctatcatttggtggctaatatgatgtaaatactctgttgttaatatgggtgttaagggaaattaaatatttaaacaacaaaggaaaacagaagagacagacaaaaagaaaaaaaggaaaccagttcttg

SEQ ID NO: 258294 - DNA, 389 bp, Glycine max
  unsure (1)..(389): unsure at all n locations
ggacctataaaataacttaaagagaaaaaatagtttcttgtattgtatgcggaattagctcaacatagagtataactaacaaacacttgtggaggctatcacttcattggtggatgtttagtttcttggacaatcaagaaacaaggaacaatagctctatcattagtagagacaaagtatatatcaattgcaatntgttgttctcaactcttgtggatcaagcatcagcttgaggactacaacatgtttgagagtaacattcttatcctttgtggtaatactacttccatagatctttctagaaatcctatcatacattcacatgccaaacatatggagataaaaaataatttcatacaggatcacgttttgacggtattgtggaatat

SEQ ID NO: 258295 - DNA, 455 bp, Glycine max
  unsure (1)..(455): unsure at all n locations
agctntgactcctcgcatgtatgtgatatatacgacttgcatctggacaattataagataattaacctttaatagtcagtgtcttcatcttatatgacttataaaaatagacaaaagtatcaattaatatatggttacaactcatactttggcaaaagaatacgtattaacattatttcttgcacggaacagagcttttgttggggagtgattgtggcataaaagcaagagcaagtattgatagcttctttttattttatttttaaatagcaagatttacttaaatgccctttgagttaaagtggttgcatctaaattatagatttagacaccccacaaaatttgttgtataatattaaaatgagaaaatagtctataattaatattattggaaaatatattacatttttatgtaactacaaataattatgtaggataataattacattaactat

SEQ ID NO: 258296 - DNA, 317 bp, Glycine max
cacactaatttttcttaagacatatcatgtacgcggctatatgaattcatatttttcatatcgtaatctcaataaggggccattaagcaatcagaatctgttccatccacgagggccccttggtatttctaactgagagggctgcagtttattaaaactcacacctaagtatcatgagatatcccgatctatatctctatgcttattcagaatgttaagaacctccgaattgatactctatggtgtgtagaagcgcttatcttactctctaactcgaattatcggtcatcactagtagacatgatctccccctctct

SEQ ID NO: 258297 - DNA, 437 bp, Glycine max
  unsure (1)..(437): unsure at all n locations
agctntgtactagttcacaatcaactctgatcagctatactaaataataaaaagaattaagttgataccactctcattgcataatgctctgcatatagaattcatgtctggaacacccacatatctcttgcttagtcctttctaataaatattccagtagaaacaactgttcaaataaaagcaatctatgatacaaaaggttttgtaacaaatcttttgttagtaaatattttttaatttaaaatttataaaaatgttacttatattaattttgcttttataaaatatactatttgttctaaaatatgttatgtaaaattaaattttctatcttttctaagattttgttttaatgggtcaatgcaatntgttacgtgtaaggtctgttttgatatttgtaaattggtttctaacgatcagggtttttgtattgcata

SEQ ID NO: 258298 - DNA, 468 bp, Glycine max
  unsure (1)..(468): unsure at all n locations
atactcagctcttanaaatgttagtttcagaattctacagccttttatattatattctttcttatccattctaaataaaatagagttttattattttaaccataatattattatttttcataaattgtttaaattaaaatatttattttatctattgtaatttttatataatattaaatttattatttcaacattatacttcacaatccttctttatcaactatactattaaatctggctacatccaagtcaaattagactgtactaaataattaaatccctaaggttttaatgttaacaaagtataatttttttgtattaatctttcatgcttaagctacaggttcatatatatctctatgagatacaagtaganaagcatgaactgaacgactctggacaaaaaataaagtattagtcattggacgatactgcttcaatgtcaagccctaagaangcaagtgcttt

SEQ ID NO: 258299 - DNA, 444 bp, Glycine max
  unsure (1)..(444): unsure at all n locations
ctgcagcttattgtttcaaaatggacattttgaaacatgatatttataatcatgttatgttttaaaaatattaaaatgcaagccctattttgctcgcactctcctctttntcatctaaggttcttcttcaagattgtatatctctatctctgcaacctttcacgactttgggcaactctgtttcaagtatctttccatgactcggtttcaggtattgtgttgctgaggtagtagattttgaatgtagcaaacaatgccccaatgagaggggctagcgctagctagatagggttgtgttgctgagcttgtatattatgtgcatgtttatagcttgctttctagggattgatttatttggggtttctggggtatgtatattcgaatccgggacccaacttttgcaagcttgatttagtataataagaagcacggatataaatatct

SEQ ID NO: 258300 - DNA, 360 bp, Glycine max
  unsure (1)..(360): unsure at all n locations
cgtcactttnttgagtcactcaggacagccctaagtttatttatttggtgtctttatagaacttgtcttttcttaatacacttaagcaaactcataaatagggattaattgaaaaggcttatgatttgtgtttaaaaggcttgtaataattaaagcatcaagggttttggactcaacaaatttcccataaaataagatgtaaaaacaattatcaaagagacattggagaacattcaccatacaaggatagagagcacatatgaactaatcaaactgaatggtacacagattgaaatcataagggactaaacaataaatatctaaacttcatataaccggcttaaattacctgctaccaca

SEQ ID NO: 258301 - DNA, 375 bp, Glycine max
agcttggataagcaactgattatgactacaattcatcagttaaaatcatggtagttgaattcgttatgagaatgttgtccaaatcctattaagggtaaggactttgaacttagtagaaaaagatgtaactaatttgacaattacaatttctagtatggtatagtttttgacttatcgtttcctacattaaagggtagatggaaatagctaacacttgagcaatgaaaatgaaagactacaccaactaaataatacaaggttggagtgttttggatcaactaaggctggggggggggaaggctaattaatactgcttttggaactataaatgttacttataacgttattgtaacgtctaggactactgtctatttt

SEQ ID NO: 258302 - DNA, 384 bp, Glycine max
tcttagtttcagatgatgcagatgggttcgtagctacctcatgcactcctctaatgactatggcatcatttctggagctaaactgctgggagttggaggccatcttctcaattaaatttctggcttcagcaggagtcatgtctccaagggctccaccactggcagcatctatcatacttctctctatattactgagtccttcataaaaatattggagaagaagctgttctgaaatctgatggtgggggcaactggcacatagtttcttaaatctctcccagtactcatacaagctctctccactgagttgtctaatacctgagatatccttcctgatggctgtggtcctggaagcagggaaatttttttctaagaatactctct

SEQ ID NO: 258303 - DNA, 434 bp, Glycine max
  unsure (1)..(434): unsure at all n locations
agcttgctaacatctacattaataatatgtatcttattgttaacctcccgaggttcaataggaagaacagacaagggccttcagatcaagaggaaggaaaatcccaagagagaggatgatgcaatcctaccccgcaagggcattgaatagaagactccaagtagattggaccagagatgtaagagaaggccctatgattctcatgagccttagggtagattntgggcccatgggctaagtataagcccacttatctttgtacatattagattaaggtttcattattttggaccttttatttagggttccataatgtaggtagagtaccctagaaatgtatgatttttcagcccttgtattttacggtacctagactaattnttgtattangggtagttctataatttcacatgcattaagtgaatatttgatgt

SEQ ID NO: 258304 - DNA, 436 bp, Glycine max
catgaaatcagcctgccgatactgcaacgctggatgccaaaatttgtttctttatgatggcccgtattcgtctatgcagctcatgggacctatattatttacatgtacttccaaggtgaatatgaaacttacatgacacacatgatcttggctaaactgacgtacatgcatactctcagcattttgcggtacctatgactgcagatgagaacatcttggtgtttctgacacctatacatacacaagcttcatgatgaatattgactatctacactatagagtgctacatttcgagctgttctcaagttatagctacctaatgccggatgcaaactctagtgtattttactatgctgacaaagcatttatgacaaggggtataatctatttcgacagtagcttgtttacataacatgcgacatatttatctatataa

SEQ ID NO: 258305 - DNA, 411 bp, Glycine max
  unsure (1)..(411): unsure at all n locations
agctngtaggattatggggtacccatcacatgtggtactaggtggcggncgggcgatggtgcacaacaagttttccacatccacaatgcgcgcataaacccaccatcccctgctgcccacctccatctgagctcacgtactcccacgtagcccatatcctcgtttctctcaacaccgggtccccatcaatcctcccaagcttccacaacatccaagcaaaacaacattcaaatagcacaaactatcacagccaagcaaaacagggcaaaggcagaaaactctgctcaacacaccaaccaaaatcacaacttttctcacttatagaccccagtaacaattccttcgatccaattcggtaacccgtggatcgactgcaaattttactggaagtctataatacataaacctaca

SEQ ID NO: 258306 - DNA, 428 bp, Glycine max
  unsure (1)..(428): unsure at all n locations
ttttggagtagaaacatgggaccaactcattttattttttaaagtcgcatctagtcaagggctgagagaccatacaagttttctagcgatttctaattatgtgggccattaagtctatcatatgctgacaatagccgagaagcccatgaatttcttcgggggcggtgtaggtgtccgccattgccttggccttggctaacaatcggngaagttcttgattcccgttcaaggtaagagcaaaccgatccatccacatggttgcctcttggtgtaaagagtcgatcacccttcctctagcctctttttccgcgtatacttgggcatactcgtccgcgaccctatgctcgtgggccgtggctagaactaactctttttggtacttggcgatgatagctaacatgttgatctccgtctcgcataaaccctga

SEQ ID NO: 258307 - DNA, 401 bp, Glycine max
agcttgttttcttcttaatggttcttcattatgaaaacaacaaagtaaactactttcttaaaaattcctatattctaaaattttaaataaaaactaagccaaatactaccttggttatcagtgggccagtggcattaacagacgttggtgcaagtaggaaaggtagatttatcttaaattccacatgccatgaattcgttgaacagtcaaataaatagatatatatccctatcttacagcttggaaaataagacccctagactgtttaccttttcaatattcgttatcttatctcatttaaatatgcattccaaccaaggttgtaaacatcaatatcacattacaatgtcatcgtatttgttgatatacagcaaatcacggataaatgcgggcgatgtagt

SEQ ID NO: 258308 - DNA, 461 bp, Glycine max
cttacatatatctggagtatgttgctggaggctccatatataaacttcttcaagaatatggacaattcggtgaactagctattccgagttttactcaacaaattttgtcaggacttgcttatttacatgctaaaaatactgtccacaggtaaacagagacacttgttcatttttaaaaccttaaattttactgctgcctcataatgattaactttttatactccagagtcctgatatatatctatcacttacattgcatttcttgcaaagggacatcaaaggagcaaatatactggtagatactaatggccgggttaagttggcagacttcggcatggcaaagcatgtaagcttggagataaaagcttgctcttatgctaattgtacgatatgaaaattggtttctcgtggttactgatattatgaataaggctcgaaataactattcaccacctcaggag

SEQ ID NO: 258309 - DNA, 329 bp, Glycine max
tccattgcaccctatcattcttattatggatcagagacttgtaaggaaaacgaaagttccattgatggacaaaaccaaaaactactgtaattcctcatattgcaaagtgtccggctacatcagaatgcataatacacgaatactagcgtggtagataatacataagtgatgcgaaagaccatctctactttggcgcaacaagtaatctacatcttgcacacccccaatattaacctcatctaccttgtacaacataaggtccaacaaaactatacctcaagtaacatctgtgtgtaaccacatcaactataccaccttctaaagatgtc

SEQ ID NO: 258310 - DNA, 341 bp, Glycine max
  unsure (1)..(341): unsure at all n locations
ttancatctaacatgttgctaagaatgacaattatactctttttctcaaatgcagaaattcaaacaagatattctcaattgcttttcttagaacaaagcatggatgactataaattctttgaaacaagttataatgctaaaaatacattgagaatgaagtaggcttttatgttcattggtgtaataaacatcctcagtaaaggagcctagtactttcttcctaaaccacaaagccaattgcaattttcaacacaaccctctagtcaatcactaaaaaggtatagaaatatcagtaaaaacatttgtttgaatatggggaaaaatcccacatctaaagcatc

SEQ ID NO: 258311 - DNA, 425 bp, Glycine max
agcttgactaggcgagttgattatagccttattttcactttagttattagtcaattcaattaagaatgagaaatcccaaagagaaaacgtccgattgatttttcgctctattttactaaaaggtatttttttattattatattattattttaccttttcttttatttcccacgtggttacggcacgaccgaacggtcggaattcattttaaccaaaattaacggatgatacaattcaaacgatcggtggaaatttattttatttttagattatgcgagaaatgacttaaataaatgacttaagcacgtcaaaaggggtataaaaagcgaatgaaaacgagaataaaaatacatgaaacaaaatgtggaccaccacgggtacatagaatgaatttgaaagctcggtttgaggtacttacccgttga

SEQ ID NO: 258312 - DNA, 440 bp, Glycine max
  unsure (1)..(440): unsure at all n locations
ntgaaccatacaacggcaaccctgccttcgcgttcagattgctttactctagagacccttggtctcttaatccctttgcagaaataagatgaagagaagaagaaatctctcttgaaagagatagatcgaacaatggagcactcaaataattccttattgaattgcaagtgtattggccaaggaatttttaagaggataagacaattttggctttgagaggataagacctttttgttctaaaaaactctaagcacatttgtgttccaagtcacatataaatagaccctggatggccattcaaaaaccatctgaacagatgtgactctcggaaattattttttgaaaatctcctctggtgatctgatacaagatttgggaaacgactataggcttataaattgatttaaacgctctgaactgctggtatcgataccatccta

SEQ ID NO: 258313 - DNA, 439 bp, Glycine max
agctctttattgtaatcttgaaattatgacatcactctgatttctgagggttgtgggacaaaaatggtcattgaccaatcccttttccatgacttaaccaaattacccagtgacggcgtaccatttgaaggtacactgaatgacgactggaaatttgatttctctgcccatgatgcccgccagttggtttgcaccaacaatgcggatatgaccggacgtcttcttgccgggtcattggcttttgaaagccgcatccttcactatttaattgtgcgtattttgcttccacggtcttccaaccttgcccaggtatctgaagaagatctaattatcatgtgggcctttcatacagggcgtcaactctactgggcacacttagtcagatatcgcatgcataaggcattgcgattaaatgctccactaccatatccacagcttg

SEQ ID NO: 258314 - DNA, 445 bp, Glycine max
  unsure (1)..(445): unsure at all n locations
tgtctcatagatagcgatggatgtatagttcttgcaaacatgcataatataaatgaaacaaaaagaaaagagaatgaaagacctcgaaggtcggcatgttatggtcataggaagcacaaatcattcgtagagagcaaacatatcttttggaaacaagaaactgacgctaagagtttattttccaaaataaccgagataagaacggatggattcattgaaccaatgaaagaacataatttggaaacgttgggtctacttgcataaatcccaagccttagtatcataatgccataagcaggatgcttgagtacccacctagttgtatgcatgactaattntgcacgttatttccaaatcatcattgttacgcgtgcctcgtggaagtaatatgggagtttaacccgaaaccgacaccctgacacatgaatttgttttgcccaaataa

SEQ ID NO: 258315 - DNA, 321 bp, Glycine max
gagcactaacatacaatttttagcttgtcattatataacaggacaccatcgggcatacgagtaaaaagttatagacgtatgaataggctcataggcacaacaatcgatgtcgagcggcgggacatatgaacgggactcaaccacgacaacacgagtaaaaagataattgcgctagaatcgctcagagcttaacattcaataacgagcgtctcgtaatattatggcactcaatcagacatccgaagtaaacgctatcatccggtcgattggctcatatggtcaacattcaatctctagcggtcgatatatcacgggactcaa

SEQ ID NO: 258316 - DNA, 368 bp, Glycine max
tgagccaattctaacgactatatactattactcggatgtccgattcagagacgtcatatatcgcgacgcttgcaattgaatgttgaacctatgagccaactcaaacgacaataactttttacttggatgtctgactcagtcccgtaatatattgagacgctcgaaattgaatgttgaagctttgacccaattcatacgacaataactttctactcggatgtctgattgagtcccgaaatatatcgagacgctcgaaattgaatgttgaacctctgagccaattcaaacgacaataactttttactcggatggctgattgagccccgcatatatcgagacgctcgaaattgaatgttgaacctctgagc

SEQ ID NO: 258317 - DNA, 422 bp, Glycine max
  unsure (1)..(422): unsure at all n locations
agctttagcttcccaaggaagcttctcaatgaagcttctcaaggaagtttctcaagaaagcttctcaaggaagctacctaggctataaatagaagcatgtgtaacacttgttgtaagcttctcaagaaagcttctcaaggaagctacctatgatatcaaggaagtttctcaagaaagcttctcaaggactaagttcttcaaagttcaacttctcttcctcttttctttcttcaatttcgtgctcccccctttttctttctctctctctttattttcctccattgaagcaccctctccaaacttcttatccaaggcactctcttagtggcgaagctccttcttccatggcttattccctagtggatggcgcctnctcttcacctttctcctttgtcttccactacatctncatggtggaaaat

SEQ ID NO: 258318 - DNA, 458 bp, Glycine max
  unsure (1)..(458): unsure at all n locations
ntacaatggattaggtatcctattccaaacaaaaaagatttactcattggattgaattctgcaaagatattctccaaatttggcatgaagtcaggattttggcaaatccaaatacaagaatctgataggtacaaaactgtcttcactgtacctttcgggcaatatgaatagaacgttatgccatttggtttgaagaatgccccttcagaattcaaaaaatcatgaatgacatctttaatccctattcaaaatttttcattatctatatagatgatgctntaactntttctcaaaatattggatcaatattttaacatctgtagaccttcattcacattatcaaacanaatggtcttacggtctcccaatcgaaaatcaatctttttcagacaaagatcagatttcttggtcacaacatacaccagggaacaatcataccaatagataggtcaattgag

SEQ ID NO: 258319 - DNA, 449 bp, Glycine max
  unsure (1)..(449): unsure at all n locations
agcttacccattcagttntagggttnttatgatgatgcttgtgatgtttatgtgctgaaattgcttatggaaaactgttagagatgaagggtagagttaatctatggttagaaagtgagaatgtggtgttgagtggaaaaagagtgaggccttgagagttggaaggttaaatctggattctgtggtaaatggaggttaaagtgagttaatcctagcttgaaatgtcatttaggacttatgagaaagcttggactgtgctagagagaaaaacaaatgaccaaagtgaaccaagagccatttctagggcaaaattgggtgtggaggagtcaaattttgattcggtggaattttatgtgtaaatccagtttgagcaacgttagattgatgttatggacttgtgtgaagtgagagtttgcttcagatttacctcattctcaatttcacttctc

SEQ ID NO: 258320 - DNA, 459 bp, Glycine max
  unsure (1)..(459): unsure at all n locations
actaagcttttatccaggctcatcttggtgggtgaagctccttattccatggtttattccctagtggatggcgcctcctctcacctcttctcctttgtcttctgctgcatctccatggtggaaaatcacaattaaaggaccccattgaagctcaaagatccagcctccatagaatccccacaagcaagcttccatcaagtggtaaatagagcacaagagcttcaagtaggtgctccttaaacctccattaattatttgctttaccttttcttcgattgttgtttcttcattttttctccatgtatctcctcacatgtcttgtgataaatgtttttaacatgattatttagagtttccactgattaaacttgctatagaagctagaattgattntctatggttcaaatttcttgttcttgttcttgaaccatgaatcgtgttgagtttacgttcctttga

SEQ ID NO: 258321 - DNA, 449 bp, Glycine max
agcttgagaggtctaatactaagtcctcctcatttttccaaagatatagtcaccatttttcttttatctacgtctcccacccagatgaaatttctaactgacttatcaatcataatcaaagtatcaatggaccaagcataagtatgaaagttgtataatgacatactttgaacaatggatctaacaacttgaacacgacccataaaggaaaggagagaacctttccatgatccccgtttcaatttgattttgtcaattataggctgcagaaaaataaattagatttaccttggaagataggcaccccaagataaatgaaaggaatagatccttgagaaaaagtacccatagtgtctttgataaccctcaagcggtttccttcgtgggtggaatagaattttcacatagacaagtttagtgattggtctaaggaagctccataattctta

SEQ ID NO: 258322 - DNA, 408 bp, Glycine max
  unsure (1)..(408): unsure at all n locations
taactctcttcgaggttctgtttatgatgtagcttccttttttttttccttcactctttaactcacattcgctaatgttaatctatgcacgcttcgtgttcgattaatttcctctgagcttaacttatgttcatgcttaatgaacgaagggttaattggtgtatgtgttgcctaatcacgtattgacaaccctaagttgattctcgcttattcaatcaacatagggttggattaagtggttaactgttagggacgaattcttcataacctattagaagagaatggcttttgaatcaaaggaaacaacatgttnttaatactattaatttcgtattccaattcacttcaattgttactgttactgcaagtatattatgaacatttggtttattattgctcgttgggaaa

SEQ ID NO: 258323 - DNA, 448 bp, Glycine max
  unsure (1)..(448): unsure at all n locations
agcttcaagaacaagatggcctcagcaaatttcttatttcctgaanggaattctatcaatagacctccaatctttaatggagagggttaccactactggaaaacccgaatgcaaatttttatcgaggcaatagatctaaatatctgggaagccatagaaatagggccttatatacccaccacagtagaaagagtttcaatagatggtagttcatcaagtgaaagcataaccatagaaacacctagagatagatggtctgaagaggatagaaaacgagtacaatacaacttataagccaaaaacataataacatctgccctaggaatggatgaatatttcanggtttcaaattgtaagagtgctaacgaaatgtgggacactcttcgattaacacatgaaggaactacagatgttaaaagatctaggataaatgcactaactcatgagt

SEQ ID NO: 258324 - DNA, 443 bp, Glycine max
  unsure (1)..(443): unsure at all n locations
tgtgatctttgtaatgttttcttactaattggggggattcgattttttctnatattganncccnnaataataaactcacccctcacaatttttgtaccgtgtggttggtacctgtgatgatcgtgaagctttgttcatgggagcagaatgacatcaatagagtatgagaagtgagattcttttgtggagtcgtccagccgacgtgatgatgttgggattattttgggagagagttgtgttttgttaatcaactccttcatagttggttccataactcttgtgttgaattgaggatgtaaatcacaaatttaattatatgtatgaacaaaattacattccattatgtgaatgatgtgtactgagttagtatacctatatatataatcatttacttaagtaatagcgcgttgtttggtgaatgtacattcgagaaaaaaaattct

SEQ ID NO: 258325 - DNA, 447 bp, Glycine max
  unsure (1)..(447): unsure at all n locations
agctntaaaagagaagaaaataagagcttattcttttctctaaaagtgcagatgcaagaatctaatggatcgaacaactctgatggatccacaaatgatgaaatgaccctcatgaccaagaagttcaaacaaatgataaaaaagaatggaaagtttcaacactcctacagacgtatagattttagattcaaaaataagaacaataaggaaagcaatgagatcatctgctttaagtgcagaaaacttggacatctgaaggttgaatgtcctcaactaaagaagaaaagataaactggggacaagaagaagaaaaatctgatggtcacctgngatgactcaaacaatgagaagagtagaagttcaaatgatgaacaagccaacatttgtctcatggcagatacaaatgataaggtcaaggtaaaaacctgttctgaatttgatgcctcg

SEQ ID NO: 258326 - DNA, 279 bp, Glycine max
gccaggttcaatctctaccattcgggaactgctcgaacaagccgacgttcagacaccgcctcctgacagatacttgaaaaaatcctggctcagaccaaaccaccttagacgcccatgagaatgtcgagggttggacccgacctccctagagtcgcttgaaaaaaccgaggtccaaacttgaactcctttacttggaaactaactaagcgaatcagcaaacaaacgtggacaacacacggatgaacaaaaggtggcgactaaacgaatcgaattgataat

SEQ ID NO: 258327 - DNA, 436 bp, Glycine max
agctcgtcctattgtgtgaggatactcctctatataagatatgaaccactctttggtgagcaatgttataaagtgggcagctttcggtcatctcttgcaacctttcccagacttcaataagactctctgtacaccctgagatatatatctatatactattagtaattatggctgatgtttgattatttgttgcgttattttcatccgtgattatttttaaggaagttaatttagttaataaaggggtgtggatagataaagatctagcttctcaaagaagcctcttgagaaagattctcaaagaagccacgaggaagcttctggaggaagcctcttaatgaagctcctagagaaagctacatgaagctgtctccgtaaatatggctccgcgcctttggtaacccgtggatcttctcagaattcggctgcacttcac

SEQ ID NO: 258328 - DNA, 245 bp, Glycine max
actgaatccaggtgctgactatcttgacgagaggttatttgtttcgaaatcaaacttatttccacgccgatgatgacgcctaggacttatgctaaggcgacgtatggccatatccggtaagacccatgtcttgtatacgccataccaacaccacctctcatctatcaatagtgcccaccacagacaactcatactaaccaccacctgtgttccctgtagggaacacctacatgcgtcctttttac

SEQ ID NO: 258329 - DNA, 443 bp, Glycine max
agcttaagcccaactatagagcttttatattcttataggtttacattatgctcgtcgcgtaaatgccggggcgttcttacactcgccaatttcccacctggaaatcatgagggcatggtcgtaccaaatccaatgtactcggaacatcatcttcgtatatcgcgaccacttgaccttcgtcccccagacccgcgcttataaagctcctacttatgtggcagggtgggcttccttcaccttcttgtctcaaccgcgagctttgactactgcccttccttcctacgatgcttctctttatatctgcctgagtgggcttatagcctaacccatgcttcccacgattttctttggcatttatcaggctagttatgccgcccgtgtctttgtctaaacccattccgggttcgtaaccattcctcaatataacttgggccatcattact

SEQ ID NO: 258330 - DNA, 421 bp, Glycine max
  unsure (1)..(421): unsure at all n locations
gacactatanacaacncaagcacggtgatataatcagaaagagcaagcagatgttctttattttatgatccattngtcccatgagaatgcatcacagttggagtgcatcctatacggcccaacccagccaacacatactttctcactccaaggatgtgtaatgcctgcccatcataatcaaatttccctactcaaccatcatatcataaatgatgtagcttcaatttatatgctactactatcattccaaaaagtaatgttatatcctctgacaaaactttctgatctttataaaaaagcgagtttaatttttatatactctccctttaagaatttacactatcaatttattggaaatcatgaaagatatatgacttttaaaatcctacattgtcaatacacacaccattttctctataaa

SEQ ID NO: 258331 - DNA, 433 bp, Glycine max
gagcttagtaaaacttctaatcacgtattattcttatcaagtagcgcaacggagcaacagagtgccacatacacacatgacagatacaccgacattttggggcctcccccacgttattcgtccacgtgtgccgccctccattggtcaccttacagatccaccattaccatcgtatctttttttccatgttctaactatcacttgactcgcttttccattgcccacatgcttaacttttattttcattattgactaaatgtattggtattagattattctcttcactttaattttgtttcgaattatgaatacaagttaacaaactgaattattcactaattttatctgtactatttccatcctcacatataacagaaatgtgctgatctttgtaaattttatattatactaattatcttttgagaatattttt

SEQ ID NO: 258332 - DNA, 338 bp, Glycine max
gccttttagatgagccttggagagtgacacttgttgccgtgatttatgactaaatccttaatccacgataacagtactaaatgtggtcatgagattgtggggagctctcctctttggacttattcccaatattacagatattttgggccgaggggggttaattactgaattgcggcatttactgatagattagaatgcatagctacttctcttggctatagaagagtcttttctatgaaaggagtatgaggttttaaatattaatccccttcccttcatatataatcatatgtacgcacaggtttatatatgcgaatgcgtgaacacagggaggggat

SEQ ID NO: 258333 - DNA, 437 bp, Glycine max
  unsure (1)..(437): unsure at all n locations
agcttagcgaattgttgaaactatttttctangttttaattatcatattgaaaaaacttgaacttatggaaaaaaagggaaagtatttccataattctttatgttgaaatttgtccgtattaatttttttaaccacattcacaatccttgtctaactaattatgcatattttgtacgtcatcttagggacacatcccataaccatttgtgctaagttgaagaaggcatcaaataagctaggagtgtttgtggtatggtttgattcaatttttgcataaaaagtcatcccgaaccaaacattaaaattatgcgtggttcaatttagttcaatttgaatttgatattagatccgaagggaaccaatcttttgtagtttgtgttggaaccatatttgtggttctaattaaatcattattcttctaaatttctctaccttc

SEQ ID NO: 258334 - DNA, 480 bp, Glycine max
  unsure (1)..(480): unsure at all n locations
tatanaaactcaagctntagattaattgggatatcatcagggctatcataaaacttttcctcataangacctacaaaaaggcagctnggtcgaacaaaaaacacttcatcccatcgacgtagcttcccatggcgaatacaatgtattcttcaacggatttggtgcagacaaaatgaaatacacaaatatgtatatttattctcaaataattggcaatacttgtacaaactcatttttaatggttacagaaaccatcaaattcaccatagtggtttggcctatatcatctagacctttatacatcggatgtttttaacatttacaaaaaatgctacccatttcttgcgaaacgctgttatgggcttgatgaaatatacacaaaataagtcacgtacatgtgaaatgattaacaagtgatagtccactaataattaaagttgttcaagtaatataccatgctccatcattctataaaccccg

SEQ ID NO: 258335 - DNA, 460 bp, Glycine max
tgagacgaattcctagagccagatgacctatgattggtgtacatcgatgagctgcagcaaagataattacaatattcaattatctacaactatcaatacatcaaaacagtgatctattatcagacaaaattcctcatgctatgatgatgatgctatctgatccacatacagagtagaaacaatccattttctgttttatggaggaaacagagcaagactctgtttttaatgtagtataatactttcaaaatctttaaagtatttctttagaaagacatgtgcatttcggtgcctctcacttcaaagttataaaccaccagtaccttaatggcacccctttcacattggactacattggatagaaatagtgaaatacaactaacaaagttaaatttaggctattattatcttatcaagatgggttaactttctcacctttgattcattctatctcatctgt

SEQ ID NO: 258336 - DNA, 394 bp, Glycine max
agcttaaattctctaaatgaacggtggtcaccatattttatctagcaaacaacatctgaccttaatgtatccaagttcttacgatacattgacactggtaatgccttccctgacttccatcgacaagcacatggtttcctctcatgataatcctcatcagcaacaatggaagcaattgtagggaaatgctcgtagatccaacagtgcatatattgaaaaaaacaaaaagttctaataaatagtaaatataaactataaaattaataattgaagttaaaagaaattataattacttgtaacaaagtgatatatcctgcaagatgttttgtcgaattcgttgatgcatcattcaaattgtcatacatatggaccagtgcagccgcttcccatgaat

SEQ ID NO: 258337 - DNA, 407 bp, Glycine max
  unsure (1)..(407): unsure at all n locations
tctcgcttaatgttacaacaactttacactcttctntgggattcttctcagtatttgccccacagctggtggatgacttctcatctaactgcttggccagttgacccacttgaatctcaaggtttttcaggactgactcaatactcttatggttggacatggttacttgcatgaattgagctatggtttcttccagtttggtagtcctctggaaaatattacgcccttgttgaggcggcctgttggaaggtccaccctagtccttattgaattgattaccagggtgtgatctctattgtccttgctaatcgtagggaccttgctggaaacctgagaatcctccttggttgaatccttgcctctgttgattccctatgtaactaactttctgcgtttgttcttcaaaa

SEQ ID NO: 258338 - DNA, 381 bp, Glycine max
  unsure (1)..(381): unsure at all n locations
agctttcttgagaaaacttccttgagaagtttctttgagaaaactttcttggaaagctagagcttagctacacacacccctctcataactaagctcacctccttgagaagcttccttgagaagattcctaaagaagctagagcttagctacacacacctttctaatagctaagctcatgcacggtgcccctcattgccccagtgtaaggcttcgaggtaccaatcattgtctttcgtcatgaccttgtagcagggaacctattgggtgagaacttctaatctgcccctaggttcgcttaaggtttatgcatggtgcctttcattgccccagtgtaaggctctgaggtatccatcgttgttntgttttcacaaccttgtagc

SEQ ID NO: 258339 - DNA, 395 bp, Glycine max
  unsure (1)..(395): unsure at all n locations
tgaaggcatgtaacccaccatcttctcatattanaacatttgtaacgcgtctactatcattggtatcatctccctctccatcatcgggggcgctacttgagctaccagatccctccaccattgggtgtattctttgaaagattcatgctccctcttaaacatgttatgtagctacactctatctggagtcatatgagaattgaactcatactacctaatgaaggaaaccattaggtctttccaggaacggacctgggaaggctctagattggtgtaccaggtgatggatgccccaataagactttattggaagaaatgcatcaaaattttttcatcttatgcatatgcccccattttcttgcagtacatcttcaggtgattcttggggcaagtag

SEQ ID NO: 258340 - DNA, 449 bp, Glycine max
  unsure (1)..(449): unsure at all n locations
agctnaaggacannccatacacaaaaaatattgattatctgaaccttacatgagttggtcaagcaacgcaccaaaggtcgtatctgaatcctacttgagctttttaaagcaactctccaaaggctgtgtctgaaccttacttaagccttttcaagaaactctccaaaggtcatatccgaatcttacttgagccttctcaagtaacttttcaaaggtcggatccaaaccttgagcattttcaagcagttctccaaaggttgtgttcgaatcttatataagactaaatcaaaaccttgatttataattcaagcaagatgctctagatgcattgattctctctaactcgattttcttttctacattatacttctaatgcaatttgatatagccatgttataacacaataaacttacaaagatagactaaataacttcgcatttcattcatac

SEQ ID NO: 258341 - DNA, 398 bp, Glycine max
  unsure (1)..(398): unsure at all n locations
aactcaagctncaccaccaagagagagtctcggatgaaaagcttagagttatatactttatggagctataaaacgagagagagaaagagagaaagtggcgtgcgaatgaaggaaagagagggagagaagatgaactctgaagtttgtctcataagactctcattcatcaaagatgctacaagtgttacacatgcttctatttatagcctaagtagcttccttaagaagctagtgttacacccttccaatagctaagctcacccccatgccaaaataaagcttccttgagaagcttcgttacacccctgcaatagctaagctcacccccaagggaacacacacacatccaatagctaagctcccacctccctcccccgaatacttgaaatacaaaaaaa

SEQ ID NO: 258342 - DNA, 242 bp, Glycine max
ctcagcccaacacgactcactactgagtataaccatattttgagaacataaacagctcagcacgcgcacaaagaacacagtcatcttgcaatcagctccacgaaagaacctttaaagccagtccctacattcacggggcatctacaaaactctggatcttatcgaaaaagaaaacaaaatacaaaacagagagaccaagagaacttgggatgccaccaataattaacaaattacgctaagaa

SEQ ID NO: 258343 - DNA, 455 bp, Glycine max
  unsure (1)..(455): unsure at all n locations
gaaactcaagctcgggtggttanactanagagagagagagagaacgagtttattctttggtctcaacgagaggagagagaaagagcgttttttttttttcaaaacttcttcgattagattttcccgcttgcttctcgatcacaaatcaaaattggccctgattcaggggccttcttaatctgaacccataaaagggcaaacgataattacacctcacctatataataaacatacctctgttttccttttctttttcaatattctttctaattgattattatgccccaataatcatgaatgcgctaagaaaataaaattttgaatttgatcatatgagattatatatgtgcctcatcatattaaattcttaaaagaattatcatcggtaattcgaatattctaataattcattttgccgtcactttcatgtttaaggaccacaatagggaatttta

SEQ ID NO: 258344 - DNA, 442 bp, Glycine max
  unsure (1)..(442): unsure at all n locations
agctcgtggattntacggattgagggctgtatttgtttgtgtttatgttcgagatcgtgtttgaggtttgtgttttggaacacaaacctcaagaataagttttgggtttatgtgtatgattctcttcatagagattggccaacgaaattggtctgaggagtcatgcacgtgattgtgcaatgacatcccttctgatatcaagttttaatcctcccacaaagcaatccaatagagcttcttgtgtaattccttgtactcgattagctaaagccgtgaactgcacgtaatatgactgaactgaaccaatttgagcgagtttaaacaactgagatctacgacattcatacggtgatgggccaaattctgtctctaaggctcgcgctaaagcaatccatgttttgaatgaattctcacgagtcatcatttggtagcttggcacaac

SEQ ID NO: 258345 - DNA, 414 bp, Glycine max
tgttcagaaacgtgcattggtgtgcaatacacaattccttattcttataacaaaatggtgtatcagaaaggcgtaatataactttaatggatatggttaggagtatgttaatcaattagactttacccgtatctttgtggatgtatgccttgaaaactgccatgtatttgttgaacagggttcctagtaaggcagttccaaagacatcttttgaactgtggacaaataagatacctagtataaggcacctgtatgtttagggttgccaggcagaaataaggatttataatccgcaagaaagaaaattggatgcaagaacaatcagtggatatttcatcggttatcccgaaaagtcaaaggggtatatagtttattgtcctaaatataatatgagaattgtcgaaactggaaatg

SEQ ID NO: 258346 - DNA, 447 bp, Glycine max
agctttctctagttgattatcataagaccttatatgatagcttccatggcgacccctacgaatttctctaaaccctgcctaagatggtttttccaaaagtcgacttagaatctatagaatttaagataattgttctaattacaatcttagaattttaaaaaaaaaaaaaacctacagtaatatctttttatcaaataagaactcaccataattgactatagaatttacaaatcatatttgataaaaatcgtctctcttcccaacatgatgatattttgttactcaataaaattaaatttaaattcatgattgatttggtgaaaaaaatcttaaaacttagaagaaagtcacatgttttccctaattataccatgcaataatattcaaaaattcaaatgaaagtttaaatgtaattatatatgaggattattctaatttctgatgata

SEQ ID NO: 258347 - DNA, 350 bp, Glycine max
taatcaattggaaattgacggtgtgggattatccctgttcttttcttgggcaatattccttggcacccttaatcatgttcaatttgttggtaagtttacgtcttttaatccaaaaaaggaaacttggttaacatgtgagagtaatttggataaatgaaaatagatttggatgttatatgcatgagtatttcaatgcttgcactactacgaaagtggtgtttttatgacaggtgttctacttttgtaattatgtgtctgaaaaatccttttatgatgcacattctaagacggttattgagaaccgccttagaatgtgtgttcctcataaaaaattatgaccggttttatta

SEQ ID NO: 258348 - DNA, 402 bp, Glycine max
  unsure (1)..(402): unsure at all n locations
agcttccatcaataagaggagggtgggcttgttttatttgttcgacgaagtggacgagggttctcatgtagtggccaattctgtgatggagtangccaagatgatggagaggagtaagagaatgttggcgtttctggatgcatgagtatcggtgaaaggatgtttggagaaggaggaagagggtttggttcattggaaatggtggatctgtctatttgagtgggagtagtgaggttaggaaatgtgtcttgggctatgaatggtgcacgtaggatatctatttgtgggcttatactaatatcgtgtgggctgtctttgagaaaaggaaattgcatttcatgaaatagaacatttctggaaataaaaatttctttgttgcttgtatcaagaacaacataccct

SEQ ID NO: 258349 - DNA, 311 bp, Glycine max
  unsure (1)..(311): unsure at all n locations
tgtccattntaagggtcatagagcgcatggtatcgtcattactatctaaggaatcatcnaggttgcgggagaccatatggacaaactagagcatcacatgttacgaacaatacataatgcaggaaattaaagagttggcttctaggcaccacaacctccagaggaagaagaagagtacagaggagagtaatttgctaatttcattcatgcctgatgctattattacatagccatatatgtactgcattctatgtaactaattgtggcatattgtgatatctaaaatgttcagaactcagcaatttggttat

SEQ ID NO: 258350 - DNA, 440 bp, Glycine max
  unsure (1)..(440): unsure at all n locations
agctttactataacaaagatttgatttattataaaaaaataggattccattgtatcagatacttccaaagcaatgtaagaccttaattcctcgttacatatgaaaactaaaagaaaaatgagtgtttctataaattatggttgaaagttaaaccttaaccttttggcatttacctttttcacacgcacatatccctctactctacatccacctgctgatggcgctggcctttttgcattgtctgaagcatttgatttatcctccagagctagcttttgagattctgttgggagagatgtgactaaatcctccataaactgaaggcagaaagtgatgcttaattacataaaaaaaaaaaaaagcatcaagtctactgattcanattatngctaattaaaatatagtatgaaccttgactaggctttctgtatctcgatctc

SEQ ID NO: 258351 - DNA, 452 bp, Glycine max
ctaaattcattatggatgcatatgctaagagtattctaatggcttctaatatagcaactagagcatatgtttcttcataatctataccttcttcttgattatatccttttgcaactaatctagccttatttctaatgattattccatgttcatctaacttatttataaatacccattttgttcctatgatgggatagattttaggtttctcaacaagttcccacacattgtttctttcaaattgattcagttcttcttgcatagcaattatccaattatcatctattatggattcttttatatttttaggttcaatcatagatacaaaagtcatattattgcataattctttaagagaatgtctagttgttacccctttttgagatatcaccaataatgtttgcgacgagatgatctattgaggctttccattcttttgaagatcatcattt

SEQ ID NO: 258352 - DNA, 394 bp, Glycine max
agcttgagaataattcattctttgtgttataatcctacgtcaaacggtttgattattgatgtttctatcacaatcaagtgattagtgacgtctccatatgtgtgtacaccatggtcatgttttcgttcctagaattcatttggaatatttgttgttgattctgaatgagtgatccttcttggtttaaaaattattgtctcctaatcaatcgagtgttcatcttatcatgggttgctcatcttccaatcatgtcttgttaaactgcttgataacatgtcatgttggtacttctgttatgaatagagagagatttcacccttgccaatcacgttaaggtgtttctagaggaaatacttgagtacgcatgatccttgttacctgtagacgaaagtca

SEQ ID NO: 258353 - DNA, 433 bp, Glycine max
  unsure (1)..(433): unsure at all n locations
acactatacgaaactcaagcttctacacttaagaattgatagtaacactgcagacctatctttctctaatgatgggnctccaataaaatgttgggctattgtaaaaattaatgtgttgacaacgtcagtaatctctttatcatcgtcattagtaatgacttttccattgaaatctgttttgactgcgctatagattttttatttctcttcattagtgagataattatcccaccatcctttcagttgtccagaaaatcatgccactaagatatctataatggtctcttctgaacattcgtgggaggttcggtaagtcgtggctaccacggtcatgtgttggagtgtattcatgatgttatactccgattttgcatctatgttccattcatagatgttgtttgcactaaaacttttaaaatatgtttcacctctt

SEQ ID NO: 258354 - DNA, 379 bp, Glycine max
aagtccaatattatatgtgattcagattcagactcagattcgcttagcttagctataaatgaatttgttgagtaaaattatctagctggagaaagctactccttatttaaccgatgattaactcaattattgcatctaaacttaattaccagaagacaaaaaacaatcaacatttgtattgagaagtataaatcatgctctaccaaccaaaaataaaataaaaaacaagccgagtgcaaattaaattcgtgtcaaccccaacaaggatattcttacacaggtacgggatgagtgtgaattcaatattattagaaaatatgagcgctctagaaaactaaagaaaaaattgttctaaagaagatcatgtgatataagttac

SEQ ID NO: 258355 - DNA, 439 bp, Glycine max
  unsure (1)..(439): unsure at all n locations
agcttggatcagcaacgaccaatggttaacgtctatcctgccagngggagaggatcacggcccaataaagaaaagtttcatagctatctggaggttgtagcacgagaaaaaattcctattgcccactccaattggaatgttgtcccagaatctttaaagaacctaatatgggatgacattttgataagtgcatatttaagttgacatttggattcaattttctttaattagtttcaaaatatgatcattcactaaatgttacataacaatttcaatttggaggccaaattagacatccatgagggcggcaatgccaaaaagaaggtgatgtcaatgatcgttactagataaaggcaatttaagtcctcccttacgacaaaatatatttatgctgacaatgagggtcaacaaaaagatgatccttctgttaagtatggta

SEQ ID NO: 258356 - DNA, 414 bp, Glycine max
tatcattatcaattcttgggcacaatattccatcttctattgatgaatttaagacgtgaaacttgttccattatattcacttacataaaaactacacgaaccaactaatgtataaagcataattagcaataaacatgatgaaaattatgcgaaaagtgagtgtcatgagcaataagaaaaaaaatgagattttagttctcagtcgcttatgagactcactttttatacaaatttcaccatggttatgtctctgtttgctctcaaagttagcttgttctaatagttttcatgcaagtgatacaatgagacaaacttcacatcctaaattaataaaaactatgttcaaagttgtatctaaaataaaaaataataaggtttttgaaaggacgaatgtgtcattacataaataaatat

SEQ ID NO: 258357 - DNA, 431 bp, Glycine max
  unsure (1)..(431): unsure at all n locations
agcttatgtcttggntggagtattctgatttgtttgtgctnnnncctttaaaaaacgttgctagatggactgtanatgttttctggattgttagttcattacctctttggaattacacagatttttttagaaatgatctattgctaaaatcctagtgagaaaaggcttgattgctgttgttattctactgttaaaaatgttcataacgtactttttatacacagaaaagcacatcaaaatacttggctagattgtttttttcccactgtatactgctcctacatataattttggagattcacatttttgttatttgaaatctaaggagagaggtttatcttactataaatggatgccttcttattgctgtgtgtaattgattgcaaaattatcccaactccataacanatttcatgttttagagtattgat

SEQ ID NO: 258358 - DNA, 385 bp, Glycine max
  unsure (1)..(385): unsure at all n locations
tccaaggcaggttgtgtcctcttctgtgtagctgtatgtttttctctctttggaaccctttgttgcacacctcacatataaacctgtttgttgccattagggtcttgggagatagtgctatcacctccgcatctggatctgttaccatggaaaaatgccaaacaaaaactaattattaattagaaaaattaattaattcactacacaagctataattaaaaaataaaaagactggaaatcaaattgagaaagcttcaagacaaagatttccaaaggcatacatacccatttaatttcagtccattttaataaaatttggtttgaaattagggttccctagagaattaattcacatataccanatgaaaaaagaaaggtagggagc

SEQ ID NO: 258359 - DNA, 363 bp, Glycine max
  unsure (1)..(363): unsure at all n locations
gacctatagaaactcngcttcctcccatctcagcgcctctcattatccactttttctgccccttcagacccagctcagattgattctcagcactatgatgccatgcttcagagcattcatcaaggacatatcattttacttcacagtttataggtggtggcgcctccatgatccattccttttgttgagcagtttctagagagagtagcctggcctgcggcccaaccttttcttacagggaagatgaaggtcccacagcccaggtaccccatcatgtagaggatgcatcatctgaggccatcattctagagccattcattatagaggaggaggcaggtgagacacggttagacaggaagctgc

SEQ ID NO: 258360 - DNA, 432 bp, Glycine max
  unsure (1)..(432): unsure at all n locations
agcttgaaatcagatcttttgaatggagtttgtcatttcttcttgagaagcctctacatgcacaagagtctggccttggcttgaagcttttgcatgtttaagaagttctagaaagagaaaggtccaagttccaaagagttctgagagattttgctgtgtgaagatctgcagagacgagagcttgaagcggaagccgttctgagagcttgagatgagtttgtgagtgattgtgagatcctagaggtgaaggagacatcctcaccacttgtatttttgcaatctttcatcttgttcttctctgtgttgtaaaggagggttccagactatggaaagctaaatcctttgttggatcttccctgtaagtacctgatgtaaatatatntctatcaactgtatgatgttctgtgtgttctctgtgctatctattgatca

SEQ ID NO: 258361 - DNA, 332 bp, Glycine max
  unsure (1)..(332): unsure at all n locations
caaactgcagcttgcattggcctctccatgcactgtttctgatgcagagtattctgcaatattgggagttattattggccgcgagggctgtgactatcagtctattaaaactttctcagggaaaacattgtccatcccgatttcattccatcataaccctgaaactaaatataatcggcctagctatgtacttacactacgtattaggcatatgcaaccttaagcaacgatgttatacctgcatcatatcatccaatgcacntgactgataatgatgcgtcccatcaatctgtgtgtcatttgcgagcgctatacttgtaagttgctctact

SEQ ID NO: 258362 - DNA, 440 bp, Glycine max
  unsure (1)..(440): unsure at all n locations
agcttatttatgacaaaattcaatctcttttgcttatctttctagggattactcacatgatccatttggatttttgtagtgtcttataggccttgcattaggcagataggtcaagtaagcacaaaatccaaaaataagcaacaattatttatttgtctaagaccaaaactgagttaaggtaggaaaatatgagtcaaagagaggtcaaatatgctaagaagagtagaaaaaaaatactaaactacaaaatgctcaatcatcatccaatggatattaacagacactcaaaacattcaatatattgacacttaatcatgcatttttacttttatgcaaaatgcattgtttctaccaaaaccgagttaaggtgggaaaataggagtcaaagagaggtcaaataagctaagaagaatagaanaactaaccgatcattgcacaga

SEQ ID NO: 258363 - DNA, 438 bp, Glycine max
  unsure (1)..(438): unsure at all n locations
gaagaagacactactatacaaaaaagtctttaaaagactattatttaatattctctacaacagtttttaaatcgtcttaaaatcttgattctacattggttcttttagaaatcatcttagaatatattattttttattttaaaaatgtttaaaaaatgaggatttgaagatgatttttcaaaaaactatcttataaagtagacattctaggacagtttttagaaaactgtcttaaaatgtaaattttctaagataagttttccaaaaaaatagtcttagaaaacctacattctaagatggctttttagaataaaattcttagaatatgttattnttttcgttaaaaacgtgaggatttaaagaggtatgtattatctagaatatacactntntacgaagtttttttttataaaaattatcttagaatgtatcctttct

SEQ ID NO: 258364 - DNA, 380 bp, Glycine max
  unsure (1)..(380): unsure at all n locations
agctcttacaagaataaatgaagaaagctcatttatatcttatctgngagaattttttttttgagtgtactacagcatttgggttacattgcacagcctatgccagtggggaagtgggaaccattgcagttataataaaacttttcagttcttaacccaaagcccatccatttgttagagtttggtttctttatcccatattatttagttggtaaaaatttatgtcttattaataatgttatatataaagacatcttgtaaattctaaaatgtgcaagtaacaattttttttttaatgtaaccgtaatcataggtatactaacaccatccaatcctttgtaaaattaagtatgttaagctctgacatgcatgagggcgaa

SEQ ID NO: 258365 - DNA, 471 bp, Glycine max
actcaagcttggaatagaaacattatatatattgtttatagaatcatttttgcttgcaagattaaaaggcagatttcttacaaatggatatctaattaatgtattcaaggtacattaatttaagcaatagatttccatgaataaattaatggattgatctagaatttatactacactcggaatactttatttcataaccaaaatcttatagtggagtgcagaggccactataatctaactatataaatgattatatgtaacaaatatgttatatttttaattatatatttaaaaaaattaaaattataatcaaaatatttttttaattgaccgtgtataatatttatgctaatggtatataatcattaaatttgttaataaaatattgtctttgttacacaatgtaattactatatgaataaaaatttcaacaatatatttctgatattaattattcttaaaatacaaaac

SEQ ID NO: 258366 - DNA, 454 bp, Glycine max
cttaagtgacctgctgcatgcagcttgcacaactatcttctgatcagacttggtctatgtctgtgccactgatgattatcacacagataggacaagcttcatagaaactgagcttcaagtcgaatcttctaaattgatgctacattgcaacagcagaaagcgcttgaaggtgaagacaaagacgccatcacgacagactggccaagagctttgtgcacacacaactatttccaacatagatctggtgtttgatacacactttaccaaagaaccaactttgatgttgagaggaagtgaggtcgtgtgcgcttctcaaagtgtgagagggtgcgagagagaaaggaagtctagcatgagagttaggccttaacagagtggcgaaggtagcatagcggtggcagtcaaagtgataggacacgagagtgaaaaaggaaaactcgtctcattcaaagat

SEQ ID NO: 258367 - DNA, 394 bp, Glycine max
  unsure (1)..(394): unsure at all n locations
actcaagcttctntnggaccttgaacaagcaactaactcctctntcattctatgctatgngctcgcgactggtccctctcttcccttcgcagcttgagttcactattgctaccccatagagctccacgaaatttattccggccatactcttccttgcgagccctcttggtctcttgttcaagggctcttgcggtaattgcattctcttcccgtaacccggcacactccttctgaatgtgtgttacggccaacttgaacttctccttggcaagtttcgcctttcctaactcgcttttgagagcttggacttcttcgtcctcttccggtgctttaaaactctcttcgctgacgacttttaacttggcgagccaatctaaacctcgtatatgaactt

SEQ ID NO: 258368 - DNA, 440 bp, Glycine max
  unsure (1)..(440): unsure at all n locations
agctntanaaagtaaacccaaaacaaaatctaccatgtcctcaaaccaatccaagtcttcaaaccaagacctcatttattcaacttcattctttttctgtttttttttttttcgatttttttttggtttttttttgcattttttttttttgaacatgaacaatagcaattgaaagcatttgaaaaataaagcaacaattaggcaatatatgtatacatcatcaagcatggccaataaaaacatatcatccaatgaagcataccccctctcacacttattcccaaaacaattccaaagctccaaaattcctttatagtatgtttggatagagaattttaactgaggaaagtaatttatcaaagaatttgaatttctgtaatctagaactcattgtttggatgtgtttttgtgaagaatttaaaattttgaaattctaaaac

SEQ ID NO: 258369 - DNA, 427 bp, Glycine max
  unsure (1)..(427): unsure at all n locations
ttgagctntganaaaagctctccacccgaatctaatttttgttgtctttcgtcaatcattgtaaacaatgcggcattcaacacagtcttctataatcaaatgggtgaaccttttgtctttcataaagtaatacatactacttggaacatcctgacataaacaataacttaatgtgagaaatcaggtaataaaaaaaattgacagatgaaagtgcttttgaattaattaagtatatagctaagtaacttaccaagctactgcacgtgaccttgtattcattcagaagcaccttgaaagtgactgaattcggcacttgatggtataatgagtgcattttggaaattatcttgatcactactagtnttgaatatggtccaccagaagaaacattgaccataatgggttaatgtcacttagtgaactttct

SEQ ID NO: 258370 - DNA, 465 bp, Glycine max
cttaagtcacctgcagcatgcaagcttgaagcctaagccaatagaatgattatttctttgcatacagatatgcaagtaaatgaaaattgttttgtaatcaaacctgacacaaatgagggatgcaaataaatgttctcttataaacaatgcaactgcttatttttcaccaaaatagccttcaaacatacagctacacaacttaaggcacagtatccccctgtgcaatgacctctctaacctccacacaaattcaacgtgtgactcattaggatacaatacaatttcagcaaacttttgatttaagatccaaaccttaatcctaatcacaacaatcatatgcagtggatacaaatacacgcagttttgtgactctcccgtcatctccttcattcctgcttatttcactaaacttcacagtagatcttatcaatatggcgttggttttttgtggatattgagatacat

SEQ ID NO: 258371 - DNA, 425 bp, Glycine max
  unsure (1)..(425): unsure at all n locations
agctntggaatatgatntctatacaaatgttagtcgtataaagcgactaacataaatcgaagagaaagatctatatttttcatgaagactaagccttgtaacttgaaagagcttaaagaagttttgtctttttacatgcccaactctttgagtggcatttctatttattgttgtattgtttgttgtgccttagtctcaatattttcatatgtacatcatgcatcatcatgtagaagtaggaagattgtttctaaagttagaaacttcttcaacagtgcataaaactctagtttaattgattacaaggaaaantttaatggattacagaagtgtttgcagcttgtagagagataatcaattgaaatgttaatataatcaattacttcttcaaaataattgattacattgactatttagtcgacaag

SEQ ID NO: 258372 - DNA, 438 bp, Glycine max
tacctcataactaactatcaaaatcagatgaatgatggttatttaacaacgcttattttctcagggaaacatggattacctgttcttcctcggcctcttcaacatgctcaaagaaccttctgatactttccccttttgtgattgtaacataaccatctcctacaattaacctgcaatgtacacactgttgacccttcaacgaatgagctttaacagaaagttcagtacagcgttcatctaatctcccagctcggagggtaacaaaacatgcactcaaaccaccaagatccaggccactggctcgaacacattcattcaatcctacattttcaaattccacaatgtcagatcttccttcagttgtccccacagccactcaaagtgatatagggtcccgctgcataagcaaatgtctgacgcccatcaccttgactgagt

SEQ ID NO: 258373 - DNA, 435 bp, Glycine max
agcttgccacccagctcgcccaagcgagctatgttgcttcctccagaagcaaccgccttctagaggaattatcgggaaagcccaagtgggcctggttgctatttgcacccctatttttactaagtacacccctgcctttttttggtgattctttttccataacattacgaaactttacgaatttcgtaacgatgcttgttttctttccgtaatgttatgaaaccttacagattacgtaatcatcccttttttgccttccgaacgtttacggaattttacggattgcgcactaacacttccttttaatttccggcatgtcacggaacttcacggattgcctaacgatgggtgccaagtaccttgatgtagtcaaacaagggtcgcatcccaacaacggatggtcccctgacgaaattatggtatgacagttgcccc

SEQ ID NO: 258374 - DNA, 461 bp, Glycine max
  unsure (1)..(461): unsure at all n locations
ttcagccacatgagtcactcaccctttataattctattattctgcaaccaatntcttatccatgtgggtcgagtagatcttcaaacacttgggttaatcctaattccaagcttgctgctcagccaaccaatcaatctagtgcttacaaactcagcttctcatggcaatggtcaagctagttcaacctgtattctagattctggagctagcttccatgtgactggtgaatcacaacatatcaaactgtttgcacactttgatggacctgaccaaatatttataggaaatggtgaaggttcgcatatttctagcactggttcctcatccttcgtgtctccttatggctttcataattacttcaaacttaataagctattgcatgttcctctcatttccaaaaatctgttaaatgtgagtcatttgcatgggatacatctgcttctgagctcatcctccatttt

SEQ ID NO: 258375 - DNA, 427 bp, Glycine max
aagctatgatggtgtcaagaagaaatctctatgtttgtcatcatcacaaaggaggagaatgtgaatgtatgtatacatgattctgatgatgtcaaagaagaatctaaccacgctgcttcaaatgatcagcatttgctccaagaataattcaagattgcttcaacaaacaaagcctcgtttcaagattcactaaagaccaagccttgccttaaaacaatgtgctttcaagacatgcaatgctctggtaatcaattaccaggaagtgtaatcgattaccacaaaacagggttgagaaatagccgttgaaaaaggttctgaattcgaattttcaacatgtaatcgattaccatatgtctgtgatcgatcaccagcaacaagactttgcaaattcaatccaataggctaacccttcaattatactgtgtat

SEQ ID NO: 258376 - DNA, 391 bp, Glycine max
  unsure (1)..(391): unsure at all n locations
accgcaatcatggagagctacaacctctgtcggttcttatttgtagggactagangcaaacaccgatagagctatttaatgaggtcatatgtgttctctgtgctatcaggacaccatttcagtatgcttttcccttaatcacgtagatgcatgctatgttaggagcattcaacagaggaaactggcctgaatcttagaactcgataggacagggctagtttatcgcattatcacgagggatcaaggtaccgtaacctatctgtcagtatgcccgacacaatgccggtcaagccaacttactccaacaagaggaatctgaggatgatgcctaatcaagattaggctacactatcatgacgaatcgtggattagcctttcaggagacccctca

SEQ ID NO: 258377 - DNA, 458 bp, Glycine max
  unsure (1)..(458): unsure at all n locations
taagtctaccatttggtaattggtttcatcacctatggttcttacagtgtcgnganaaagcaagctcatctagaaaaggtgtaaataaggaagaaatgaaaccaagacccattcttccaaaagttacaatggttggtctctctacagaagaagcaggccaaacgagcaaagctaatttaaagaagacaatggacgatttgacaagagagttggagaagacagaactagatattatgacagatggtggcagtaaagagtgcaaagtagaagatagggatccactatttgtggcaaatgggggaaattactattctagtatgaggagaaaaccaggatctggtcgctagtttagagtaggatccaactaaaaccttnttgtacagaattttcatttgcaggttgttgcggatatttattgatctccgaataaggttcagaaatatcgggtatctattaac

SEQ ID NO: 258378 - DNA, 337 bp, Glycine max
atgtgcattatatagagtgattatattaattgcacataaacacaacaaattagggttacattatgtgcctatataaaccgcaattattaataaaatcagaatattatgtctgattacgaaactccttcctcaactagaagcataactctcatcttattacaagacattttattcccaacaaataaatgaaaacatataaatcgagttccaccaaaaaataaatagtttgaacagcaagttacgggtgttggagaaatcagagaaagtttctaggaagaaatatcttgtccaactgctggaatggtcttactttgaaagacaatcatgacaaaataac

SEQ ID NO: 258379 - DNA, 415 bp, Glycine max
tgttcttgattattcctcagttctttaacaagctatgaacaatatacttggccttcatttaactgtctttgggcttggcagccacgctcaacaaagtactttcgacacctactgtacgttgatttcaccaatgctgttatgggaatgttgcgacaatcctttaaaaccttattgatacattctgagaggttcgttgtcatgtggccatatcgacgtccttctctatcgtaagccatcgtccatttttcttttgagatgcgatcaatccatgttgctatggctggactcagttcaccaaatttttctatatcttgatcaaaaatgtgctcgcaacgagtgtatgctgcataaaattagctatgaataacaattaaagtataaatgacagtaaaataaacgtggccatcaatttaaa

SEQ ID NO: 258380 - DNA, 356 bp, Glycine max
tcaacctagaggagacgaaccattccatgttttggagaacatcaacgacaatgcctacaagatagactcgcctagtgagtataatgtaagtgccactttcaatgtgtctgatctatctctttttgatgcagatggaggagccttggatttgaggacaaatccttttccacgagggagtgatgaagacataaccaatggcaaggaccatgaagcactcgaaggtcccatgaccagaggcagacttaaacaagcccaacacatcatagagacaaggctggtcattggtatagctgtcattgatgatgattgaaagccccagcggagaaagatgaaggcccataggcagaggccctacc

SEQ ID NO: 258381 - DNA, 424 bp, Glycine max
agcttcccgtatccgtacttggaaggatctgattaccgtcttcctaaggcagtatcagtacaattctgatatggctcctgaccgtactcaactgcaaaatatgttcaagaaagagggtgaaacctttaaagaatatgcgcagcgatggagggatttggcggcacaagtagctcctcccatggttgagagagagatgatcaccatgatggtagacactctgccagtgttctactatgagaagctagtaggttacatgccgtccagctttgcggatctggtgtttgccggggaaagaatcgaggtaggattgaaaagaggaaagtttgattacgtttcctccacaaacgcgaatgccaaaagaatcggggcaacaggggcaaaaaggaaggagggagatgcccatgccgtctcttcaacacccgcg

SEQ ID NO: 258382 - DNA, 470 bp, Glycine max
  unsure (1)..(470): unsure at all n locations
tgcttagatgaaacacttctctcattctcagagagtttgatacactttcattcaataattcatatgtaagttcttcttgcagaatgtatgaattattcttacacacacatatctttttaatttatcaaataacctttattataaaatttagtagacaataatgttctttctcctagaaggtaaacattnttctttctatttcatcaaataacacgaggtttaaaattaacctttgtcttctcattttgattaggtaaattactttttttttctcattttgtaatttcagtatttgatcaaacatagaggtaaactgatttatttcgatccatcaattttttactattattatgtaatgggtatgacttaaaaataataaacacatatttaagtttctttgcgaatcattctagttngagtgactaattctttctctcttatatctcacatgactataacagatgtagatt

SEQ ID NO: 258383 - DNA, 440 bp, Glycine max
  unsure (1)..(440): unsure at all n locations
agcttattgaaacagccaaggtctaggatttaacttgtcatgccaacatcttgttntgtgatcaggtggcctgtgttttactacatggtatgattaggatctttaagtccaatggatcttttctttggaataaaaaatgtccaaagaaaacaaggcatatcaacacaaatgagctcttattgacacaaacaagtccatgttggttccgtcattcacgtatgaagggttgcaaccagaaactgaaacaacagcaaaaaagcaagaatgttctatcagctttctgttaaaaaatctgcccttaaaagttagtaataacataaacacataagagatgcacaagctagtattntgttttttttttaaatagttatagaaagtacaagtccagggaagtactgaatattaacatggacagggaggaagtacttacggttaaatga

SEQ ID NO: 258384 - DNA, 451 bp, Glycine max
  unsure (1)..(451): unsure at all n locations
cgtcgggtttgaaagcgtcatgaacaacaatataaaagttagtattattccttaatcacaacgatggttctcctccataactcatgtaatacaaacttgccttaaaaattctatatatgaatcgaactgctcgtaggttactntgacaacaccacacaacaaatttatggaagacgatgattcgagaccgattttcacattatacatgtgattaagttccatatcaaggattactcccataatcgaccccaacaccctaagtacaattgttaaaaaaaaactagtatatattatgaaagtaaaactttaatttggattgaaaattaacaccaaaattacttactccttggtaagaataaaatctgaatcaattattattaatgatgaagctttctttgttaaacattcataacttgttcattatgctcgaactctatattaccattaaaaa

SEQ ID NO: 258385 - DNA, 447 bp, Glycine max
  unsure (1)..(447): unsure at all n locations
agctntaattgaaattaagttatttaattatgtaagttcttgatttaatccctattttctctccccctttggcatcaacaaaaagccaaagtgcataacaaatataaaacatacataaatgactaatcatacaagacatttattgaaaaatctaaaccgatcatgaagcaaaaaacatgaaatatccaaattaaaatataaaccacataatcatataacataatttatagatgttcagttatagtaagcaaatagtaaaagaaatactaaatgttcaaatgtcataatattacagatcatttggataagtcactagcatctagcagtcctaattctcttctaatgttgtagaaggaatctttatttagtgtctctgtgaagatgtctgcaagttgattcttagtatctacaaattcataacaacatcaccttntagaatatgatctc

SEQ ID NO: 258386 - DNA, 321 bp, Glycine max
  unsure (1)..(321): unsure at all n locations
tcaagaaaaatggcctcagcanacttcttatttccagaatgaaattcaatcaatagacctccaatctttaatggagaaggttaccactactggaaaacccgaatgcaaatctttattgaggcaatagacttaaatatttgggaagccatataaatagggccttatgtacccaccatagttgaaagaaccacaatagatgggagcacaacaagtggtattagagcaggattcttgtataaagtttagaaacttcaagaataaatatggcctcatctatcttatgctcaatggtgaggggtatcattattggaaaacaccaat

SEQ ID NO: 258387 - DNA, 440 bp, Glycine max
  unsure (1)..(440): unsure at all n locations
agctntgaaggtttactgtattatggtgttaaagccttgtggacgataaattattacatggtccgacaccaccttgtatttataatatcgactaatctttacctgacatatattcgattttccagaatttctttttaataaaaactgaatacctgacaaaaattgattggaaccaaattaattttagatgatacaataataataataatttctccggtgtacattattttacaatctggcaggatgagaaataaggctagaggacggggcagcattgatgtttcatagatggagtaaatagtgtacagcacagtctcagttaggtgctatacttcaaatatgcaaatacaaactaagtcttttctaatactgagttaagtggtgttaggaggcaagcttatttcgtagctcacactntatctgcagctacgaaattcttt

SEQ ID NO: 258388 - DNA, 388 bp, Glycine max
  unsure (1)..(388): unsure at all n locations
ctatgagaattatagggtcttaggaatgagaagcaagcacaacaaaaaattctaaggaaagaatattctagatttttgtgaagcaactgttgaaaaggaacttcattttggatggatgtagatggaagtctatttataacaaggtccaacctatgtctactatgtgtatgttcttcctttctcttagcaaaacactcagaaacttagtaaaaggtctcatctgcattcagatggttatttggaggctacgcctaagaggattaaacgatccacacggatgagaaggttgactttaagaaccttagattagcccagaccaacgattaacgttgatcctgcaactggaagaggattangacacacaaaaccaaaatttcatagctatttg

SEQ ID NO: 258389 - DNA, 177 bp, Glycine max
agcttcatcaaagctccaacctttgctcaccatttctggtccaaatcgggaaaggaaaccattctcggaggcgtgaagcgcacctttacgttgggggactacaaaattcaggtttggggatacttctttctcacactaatttttggggatttgtgtgtttgggaaatatgacgggta

SEQ ID NO: 258390 - DNA, 391 bp, Glycine max
agctatcgtaagtgaaatcaagtgctatctttttccttagagtcctctcacagggtggaggttgtgccatgttctcacaatgttcaaaattagaatgctcaaaatcagaatgctccaaattataatgctcaaaatcaggatgttcaaaatcaccaataacagaatgcacagatgattcaccagtaatggaatgctcacgatgatcaaaaggtataaaatgatgcctaactaatatatgaaatgtcctatctatctcacgatcaaagggttgtaagtcagatggattgcctctagtcatacactacattcagcatgcacaactagttgctttgtcatgtatataaaggtgtaggtttgaactacagctaccctccaatgatatccaaatgac

SEQ ID NO: 258391 - DNA, 254 bp, Glycine max
tccgcatagaccacttgacaacgttcagcggatctaactcattagaccacgccctggtggaaaatgatgcttccatggaactcactgaaaaggaaggaccaaactctcatcgtgggaggctttcatgcggaagattgaatatgataataggccaacctttagcactctctgcaaaaagattgtacaccgactaccaaatctgaaaagatgtgtctgctactaaaaatgagaccagggaaaaaaccacaaattgc

SEQ ID NO: 258392 - DNA, 405 bp, Glycine max
agcttggaattgcatttgggcacctaattttaatctcctatgctgtccctacatatataaaacagtcctaccatcctaattttacaaaatcagattcatacgtcattggggcatttcaccgagcacttggtgggcgcatgtttagacataaattgcaagagaatgggggcaatgtggcatgccccattgcttcagaatgcatcatatgcctaaggccttctcacacaaatctttaactcaacaaatcaagcataaaaagtaacccaaaactgccccacaagcatgagcatgttctcacaatttagagcaccaaaatgaacaaaatgcaccaacggaaagcaaaaaactcaaggattgaatacttacttgttggagtgagtagaaacaacataaacgaaagcaaaa

SEQ ID NO: 258393 - DNA, 409 bp, Glycine max
gtgatttcctttgttccggaaacctttcttttctcatgtgcacccaaacccaatctccgggttcgaagacaaccttctttctccctttgttggcttgtttagcatagcttttatttttcctctcaatttgatctttgactctctcatgaagcttcttcacatagtccgcctttgcttgaccttctttatgcttaaaaacagaaacattaggcataggcgaaagatcaagaggacttagtaggttaaaaccataaacaacttcaaaaggagaacaattagtggtgctatgaacagctctattgtaagcaaattcaacatggggtaaacaagcttcccaagtttttaagtttcttcttcaaactggtctatagcaaagtcccaaagtcctattaacaacttccgtttgcca

SEQ ID NO: 258394 - DNA, 440 bp, Glycine max
  unsure (1)..(440): unsure at all n locations
agcttaaagtatgcccgagtcatttatccttatgagatgttgntaaagtattggcgatcagaattgccattccttggattatagggctgaaccaagctcatgctttttcggaaaaaaaaagttcatcaagtcaagttgaagtatggaagtaaccatcttgcataattggggcaaaagatggatcgtgttacatcattgcttcgtctactgccaaacacatttagggctgtcgatgtccctgttacttccagtttcaccttgacggagatgtcatggaccatgttgaaaatctaaattgattcaaccccatatctagtctaaaaatttgcaatacttcaactgtgcatcattcgcatacatccatgtttttcattggttgcattgctcattgcattctttccttgagaaataaaataaaatataagagaacttaatcattg

SEQ ID NO: 258395 - DNA, 384 bp, Glycine max
  unsure (1)..(384): unsure at all n locations
ttttggtcactataaactttactgaacgtttgaagtaaaatagcaaaaccctaaatgtttcaatatgcttatcatcaatttggaatcgctctggataggatcctgctatagttcttgactgaacaaagataagtgttgtactttgttaataagagttatttgtgtcgagactcttggcgttgctgatggagatgtgtttgggcatatgtgcatgaatcaacggctcctgccaagttgttgcagtatgtgttgtgccctgatagattcaactatattacacatacacctaagttttgggttgcttaggggactccatacctaatgtangagagtttggtatatgatggactctcttggtatggatgaagggctactctgatcata

SEQ ID NO: 258396 - DNA, 438 bp, Glycine max
  unsure (1)..(438): unsure at all n locations
agctttagacaacttgttggaatcaattacaatgaggctgtaatcgatcaaaacagagagtttatgcctttgaagaaacttttctaacttagaaacttttctcaaaacaaaccatgatgatgcatgatgcaatacagatatcaaatatactaagatgcaccaaccaagataacaaccaatacaaatgccactcaagagagttgggcatgtaaaagccaaaacttcttcagaacttcttcaagcttttccttgagcttcaagctttagccttagggtagttcaccatgttgctcattgttcgtggtcggcaagtgtaccggatcgcacaagtagtataaaacagtaagaactgagtatcgaactcttggggaacttgtgttatctggtaagctatntcggtaaataggtgtctggtatgaaaatatgattatgggtatg

SEQ ID NO: 258397 - DNA, 435 bp, Glycine max
accatcaagaaggcctcaagaggataatatttctctctcatacttccatggaaaaaacaatgttgagacctacttagattctaaaatgaaggttgaacaactctttgcttgacatcatattagcaaagagagaaaagttccattggctacccttagcttgcaagggtatgccctctattggtggacttcccttgcaagggaaccaaggattcatggggatcctccaatagagttttggaatgatcttaagagtgctcttaggaagaggcacattccctcctactatgaaagggagcttatggacaagctccaaaggcttatacaagggagtatgactgttgaagaatatagacaacaaatggaactactccctttaagagctcgacttagggaggaggaagaacaaccatagctatgtccttagtggcttatatg

SEQ ID NO: 258398 - DNA, 384 bp, Glycine max
  unsure (1)..(384): unsure at all n locations
agcttgtgggattatgtgatagtgacnntttcttatatgncgacgaacgaaaaagtactaccggatttgtattttttatgggtgattgtgtttttacatggagttctaaaaagcaaggcattgtgacactttctacttgtgaagccgagtatgtagctacaacttcttgcacatgtcatgccatttggcttagaagattgttggaggaacttcagttgttgcaaaaggaaagcacaaagatctatgttgataatagatctgcacaagagcttgccaagaatccggtgttccatgaacgaagtagcatatagatacagggatcatttcattagagagtgcttaccaagaaaaagtataatgactcatgtaaaactcaagacaagt

SEQ ID NO: 258399 - DNA, 402 bp, Glycine max
agcttcgtgcagataaatggtcttaactaatcactcagagggtcgattgaggcgcataatatatctacacgctcgaaattgaacaatggaagctcttgagcgattcaaatggccataacttttcacacacatgtcaaattcaagcgcacaatatatcgagacgctcgtaattgaacaacagtatctctcgagaaattcaaatggtaataacttttaactcggttgtcagattcaggtgcataatatatctagacgctcgaaattgaacaatggaagctattgtgcaattccaatggtcatcactaatcactccgaggtgcgattgaggcgcataatatatcgacacgctcaaaattgaacaatggaagctcttgaacgattcaaatggtcataacttttcac

SEQ ID NO: 258400 - DNA, 374 bp, Glycine max
  unsure (1)..(374): unsure at all n locations
tacagcagattctagtaatgacccactatcctacaatttaaataacttgatgccattaacctacggaattataaataacttaatggctgaatgaaactgaaaatgtggccaccaaaagtcacccccaacagccaacatgtaagtcaccattnggtcttcccaaaggctgatgcctatgttgccatatgggcccttattacaaccttaacttaacctaactaaagcccttntagttgaataaccaaaacatattttgggcaccaactttacaagattggccatttttagacaactaacactctgaattgaacaaaggcgggcttaatcctctccatttgggcctatacaactacaccttgacatttctcttgaac

SEQ ID NO: 258401 - DNA, 189 bp, Glycine max
ttaagtcacctgaggctgcagcttctcatatcaaacattcgtctcattatcatgaactacccttaaccagaaacagagtgagcagaaactctgccaaactaatcaatccacagtttcctattcaatacccagtaaattctcttcgtccgttcggtaccattggatcgcttgaaaatttactggaggttt

SEQ ID NO: 258402 - DNA, 374 bp, Glycine max
  unsure (1)..(374): unsure at all n locations
attaaattcatatctagataagataagataagatctagattaaataatatctagatgagaaattcaaatctagataagataagataagatctagattaaataatatctagatgagaaattcaaatctagataagataagatctagattaaataatatctagatgagatcaaatctaaataatatctagataagataaagataagataagatctacatttgtagaataaaatagtctgccctcttcaagtccaagctcaattctggattcaaacccaatgcttcattaattcctgaaattagattaaaaacatcaaattagctgaatgggcccaaataatanaactgcctaagtaaattgacaattaagaccaat

SEQ ID NO: 258403 - DNA, 427 bp, Glycine max
agctttgagccggcttgcgggcgaaagaggttattcaatgttgaagtagattgtctcgcgtcgaatgagtctgtttggtgtatggggtagtaatcttgacaagtagagggtgacgagtttgtcaagccccccaagtgtggactagtgttgtccggtgtctggcgtagtagccttgacgaatgtgagagttgcagatcgatgaggcttgtcaagcccccaagcctgaacatgtgttgtctaggctacctttgtcaagatgtccgtgatgaacatatttttggtgtgccaggtaaggtaagtcattaaatttgacaactctaccctctttctgactgttggagagtgcattgaagacaacatgtaacggttatttgttgcagcaggcgcgtgtagcacacgtgcaatactcttgtatgcgtgtcacacg

SEQ ID NO: 258404 - DNA, 275 bp, Glycine max
  unsure (1)..(275): unsure at all n locations
agctatcgagaaattcntaatggtcataactttaacattgaggtccgattcaggcgcataatatatcgagacgctcgaacataaacaacgaaagctctcgagaaattcaaatggtcataacttttcactcggatgtccgattcacgcgcataatatatcgggacgctcgaaattgaccaacataagctctcgagatattcaaatggtcataacttttcacatggatgacagattccagtccatgaatgatcgagacgctcgaaattgaacaacga

SEQ ID NO: 258405 - DNA, 393 bp, Glycine max
  unsure (1)..(393): unsure at all n locations
tctctatatgtgatgctgctgaatcggtcatccgggataaaaggtatggaccatttaatntctcaagagctttcgttgatccatttcgaacgtcttgatatatcacgcacctgaatctgacctacgagcgaagagatatgaccatcttaatttctctagagctttccgtgttaatgacgagcgtatcgatctcttatgcacctgacgcggacctccgacggagaagtgatgaccatcttaatttgtggagagcttgcgtagatgaatctcgagcgtctgtatatattatgcgcctgactctcgcctccgagtttgaagttctgaatatttgaattgcgcgagagctggcgtttgtcaatcctgagcgtctcgatattcatgcgcatgatccga

SEQ ID NO: 258406 - DNA, 437 bp, Glycine max
agcttcctctgtcttccgctgtaaaacctgatgcatagaaatagagagaaaagtggtcacgctgtgagaaaaacaataggcagatagctacaaccaaaagaaataaaaggacatggaacgcattgaggaaaatacaatgaaccaaccattttaagcctatcatttgaagccagcaaactttgggtcttgacttcattcctccttccctctttcttaagctaatgttacatgaacaaatattccataagataaaaatgctaacaggaaaggagatttatactataaacagcagctagatctgtaaacaacaattgctatgtttaccaaatatatacctcaccggtcttccacttaaaaaacaaacaattattttcatcaatgaaatcataatcattcaaaatcttagacacaagagagtgtaactaagtggatacctg

SEQ ID NO: 258407 - DNA, 441 bp, Glycine max
  unsure (1)..(441): unsure at all n locations
gcttgccaagaagttgcgcagacattgccncatctggtgttggaagtcattaatagtgaagaggacaaagctgatggtatagagattctgtacatgtatcggtctctggacgggccacgggatgatgctcaaaagtagtaccatcctttgctgattctttgaaacttaactagttcttagataaacctgccacaagaatgatgatttgtgctgtcaatgtcagaanaagttgaactcanaactcaactgttntttgccaacactgttgtgatggcaggccatagaggactatagattctattatgtggcaaagcatttcaaattctgcattcttgtttatgggacagagcttgtggaatatcaaccggagagggtgtgctgagaatgatgcanatgataaaaattcctgtaggatcggaccatncaatgttgtatcactat

SEQ ID NO: 258408 - DNA, 458 bp, Glycine max
  unsure (1)..(458): unsure at all n locations
agcttagccctcagaatctcctccatgtccttcctcgagtcggttcgcaagcttttcctgctcgtgcaaggcaccgatcgccatattttcctgcatgccctcctcattcttgcttctaatttcaattttcaacaatttacatatccactaacacatcacacattaataaaactatgcctattgatgatatataccttgagtgaccttatgaaatctgagttgtcaaatttagttctaactcttctctctctctctctatatatatattactaagaaaagaagagagggtatgtgtatgcaatatgatcaagggaatttccttgagtaatccgattagttggatagctagcagctattgaaagggggcacanaaaattgtgattgcctacaaaagcaataatcgtcattcctttacaactatgttttaatcataatgagcatantaaatatagtttttt

SEQ ID NO: 258409 - DNA, 413 bp, Glycine max
  unsure (1)..(413): unsure at all n locations
actctgtctgttacaataagtatgtggtcaagaaacaccacttgagccatgaaaccccgttccagtggagacaataattgaggttccaagggtgttagacatcatggttgcatggtaggcaaacatctcacacatgtggttcttcaacacttgaccaatgttaggtggcattttaccaccaagtatantggcttctgtccgcaatgctactgtgtgcattacttgcacagcttttagtgggaacttttcatgagctcgttctccacacaacattattccatcataaccttctcaaacagcaattgctatatttgatacctctgttctggttggagttgggtgaacaatcatgctgtctatcatatttgttgtcacaataacagacttttccatgctacaacacaagttgatta

SEQ ID NO: 258410 - DNA, 357 bp, Glycine max
gacaatggtagtgcaatcttgttgtagtcctggatgaatcccctatagaaacttgcatgtccaagtaaagaatgcacttcctgcacagaagcagggtgaggcgaagaagccataacatcaatcttggccttattgacctcaatacctctactagagaccaaattccgtaagactattccttcatgtaccataaaatggcatttctcaaagttaagaacaaagttattctcaatgcatcggtcaagaactctagagaagctatccaaacatacataaaaaaaggaaccataaatagtgaagtcatccataaacacctccatgcaactctccaataaaatagaaaagatacttaccatg

SEQ ID NO: 258411 - DNA, 479 bp, Glycine max
  unsure (1)..(479): unsure at all n locations
gcatggaccattcaaccaactcaaccctatgaaggaccaactcgtacttacacacttaaggacttacaccttacaggtttaatgcttntgggactatggatcatccgactaactcataccaatgaatggttgactcgtatataccactcaaatgacattgttagtccgttctaacttgcatttctatttcacacgttcttccattntcttcatttcaagctcaaattgcttgcaattntcttcatgggcattgttgaacattctggtaaagttgagcaaagttgtgattattgaagaaaaaacatacattaattagttggcacgaggaaacaattatatagtagtaacaaatattatgactgctagagatgtgaattcatagttttctttntttcataattgaattgtatgacttccatatcagtatgtctgataatgataccagatatcaacatannagtagacaaattgaaagaatg

SEQ ID NO: 258412 - DNA, 444 bp, Glycine max
  unsure (1)..(444): unsure at all n locations
agctntgagccanaatcctgactcaccataaaccttgacccagggtgagaatgccaatccttaccctcggaagcaaaaaaaaggagaagagaaggaaaatttccaatcaaagaggaagcataaaaaggagagaaggaaaatttccaatcaaagagaaagaaaagaagaggaaaggaaattcccaatcaaagagtgggagaaagaaaaaagaaaagaaaagaaagaaaactcccaatcaaagaatgggagaaggaaaaaaagaagtaaaaaagaagaaagctcctggtcaaagaaactagaagaaatgtgcagaaaggtcttttgaccggacgatatctgaacaatacagaattgtcaccaaatgaacaaaanaagaaggaaaggaaaccacgacctanaatggtcttctccctttaattaccaaccaaaatcccgtgcgctagc

SEQ ID NO: 258413 - DNA, 428 bp, Glycine max
  unsure (1)..(428): unsure at all n locations
tncttcgggccattcctgcgaaggcaaacattnggaaagttagttttaccagtgggacattactcttaaaacaaaaatggcatataacctcctcccacaaatacaaacatcaatgtaaatttagagcaagcttatgcgcatatttccttacaatcgttctcttgcacaagacaaaaaaaaatgcacccatatacaatcaaggcagcttcgttacctagattatttacacgtacttccaaggtgtatttgttacttacatcacacacatctccttggctaaattcacatacatgcatactccaagcattntggggtaccaaaaattgcacctgtgcacatcttggtatttctaatacctatacatacacaaacttcatgatgaatcttgactatctacacaataaggtggctacatctcatgccttttt

SEQ ID NO: 258414 - DNA, 121 bp, Glycine max
tactacctttgcttcagacttcacctgtattatgcacaacccaaacaaagaccccaccttagtgtgttctgtccacctatttcattaggcgtgacccccaaatccgatcacatatgcatta

SEQ ID NO: 258415 - DNA, 484 bp, Glycine max
  unsure (1)..(484): unsure at all n locations
tctcgccgctcacgcgacacacatgccaagatgctatgtatcatgtccatgtagcttaactagtactgtcttggcagagccctatatcatccgactgtcgatgcataggcccaaatgctcgcggaagtagatgctcttggcgaggtgatcgactctacacacctacaggcaaccagtgtgtgaggatcagtgtgctgttaccttgtactgctgtggagaacttaactcagtgtttaacttggccactgctatggcacacacctacttcgtcccctgagagattatatggcttctctgacatagcatgctttgatagatccatatggccacatttcataaatcgttaaggaacttgctggttataagaccttgacataatacgcttacttcttaaatagatgagatggaccatgttgatactcttatgcttgaganataaatctcttcacatatacttatacatgctttttatagtaccactccn

SEQ ID NO: 258416 - DNA, 312 bp, Glycine max
agcttgaaggcctcaagatttatgacttcaagactttgaatgttgatattggcatctcatatatgtgctcttttagctaaagtaaagataatttaaagaatgatataatggctcccttatatatgtgggatatgtgctaacataaaaagtgttaatattaggacaccacttgtgctataggtactactcagctggatgcctttgaaaggtattctcaagatgcctgctgtattataacactacgaaaatgaaattcttattatccatgagggtgatgataaccattccctgtacaatacaatttatttctta

SEQ ID NO: 258417 - DNA, 497 bp, Glycine max
  unsure (1)..(497): unsure at all n locations
atatactgaacatatgaagaatacctgtgctacgctatactagccattgcatgagtgagacgaaagtcctaacatcctactagtgtatgggcctcattaaaggttctagacgaacgaatggctgatgaccctcatgatctttgagctttacacatacaatggatactttaagcaatgctgtttctcctggatgcaatgctaacgtgccctattgatttacaccatatctatttcaattcacacctgatcttaatatgactatctacaattcacacctaaatgggcatgcactaatgctccaatgcttgttctatcaatccatatgactcctggatttataatttattacctgccaacacgatgcttctagcanaggaccgcttatgagcagtctaataaccgtgattggattctatctgacacaagcttccttgacacttactgataactcaccttatcgtactagaagatctactatattagctccacttacttan

SEQ ID NO: 258418 - DNA, 168 bp, Glycine max
tatatactagagaattagtgagcattgaagattctaatattaaaaaaaaatcatttttaagtgttatccaaacatgatcatatatcacttagtgggttaagaagaagaaaagaagaaaaagataggagatttaatttctcccgttcacacataataatgaagatattt

SEQ ID NO: 258419 - DNA, 446 bp, Glycine max
gctgactatgattatggcttgattgttgtgaatttatgggtttgagatgtcattaataaaactcagcaaaatcattttctatatgacactggcagtaaggagcattttactttctgcagtatcttagtgcacaaaaggttgagtctttgcactttccatcggaacctgattccattctttgtttccatatatagtcaagtacttaacagtggaaaggaagggaatcatcttattatgcttaaagattcaaaatcccaaagtctttcattcatgctctcgacctttgtatccagaaagtcaaaagtggatgaatgatcagtatgaagaaattattcatagggtactttaagcttccttgttaaaatctagtatttagcttaataattatgttccttatttcttaacagtgtaatgcattgatcttttcctttctttgatgaattatg

SEQ ID NO: 258420 - DNA, 448 bp, Glycine max
agcttcgaaagatacttaatcttcacttacacttttcaaagaggtcacattaaataacttaaatcattgttatgcccaaccctacatgtagtaactcatgcatgtaagcattacaaacagcaataattgatgcaaattgttgaatttgagtatttccatacgatatatatgctagatttaatatggacaagttttaataatcttcattttttggcatgccaattgccaagttttaatatgcccaattgcccataatgttttatgttgtataaaatcaaaatgtactttcattgcctccttcattttctatgtgcaattgttgcccggcatagtagttcaagaaatataagaccaatgctttataagttcataggcaaaagataattagttttcctttctattatcatatctaaatcaagatggctttcttattgaataatacttcaat

SEQ ID NO: 258421 - DNA, 400 bp, Glycine max
ctaagtgagaaaccatgatatcaccatattcttaagggaatttggagctctggaattggtttgggaataagtgtgggggtttttggttcattggataacatgttttgttggtcatgcttcatgatatattttgagccatacttgatgtacattgcatattggttaaatgttggacatgctgaatatgatgttgtttctcaaaggctacagagtaaaaaaaaaaagaatcgaaaaagaaaaagaaaagcagtaaagctgagtgaataagatcttaaatgaccaaagaatgatgagactcttggctctactctatatgtataaaatgtatctttacttctctttatgttcttatgttgtcttaatatgcacttattctgcattgctcctctattcctttggg

SEQ ID NO: 258422 - DNA, 593 bp, Glycine max
  unsure (1)..(593): unsure at all n locations
tctctgctctcntcntatatctcattaaatttattatttaggttattttactcatttcctcnttctctcncactctgcccgcggaantttgaatcataccgtctcgngcaccgcatactcacaggcacgctgcgactgcatagcttctatatcctgttgagggagagccctatgttctcccgacaggactaacacggtggctgcactcaattctgattgcgcaagcgaataaactcttataacatgtacagagttctatattgacttatgcactctcatggcccctgatgttcaagaagaccataactttcttaaagaatctccccatcctcgtccaacgagtggtccatgattgggagaacaaccctgctcacaaactgttgttagctgttatgatcctcacatggtgatcttgaaatagtatttccttgcttctaagaccactgccactcataaagacatttcaggcattatgcaccttataggagagagctcggccgagtactgtgcacgactccccccatattgtgaaattgtcctccccccagatttttatcaaccttttttcatctacgtataggtgattactaccg

SEQ ID NO: 258423 - DNA, 393 bp, Glycine max
  unsure (1)..(393): unsure at all n locations
ggttctcgagaatgagggactcaaagcacaagagctattgaagganaaaataagatggagaggaatgaaagcatttcaacattgaaagaatgagattatgagaggtggctaatcccttttcctatctaactacccctttcttttatttacagcgttcctctacatgttattgtgaccatatttacggcctgatatagtctcagcccactaacactcttattataccaacagtaancaaaatatattaactaacatatcaattaacataatgtcatatttcatcttacgatgtannataaacactcaaacacaaaactaatataaatcatnacattacaattctttctgacaggaaatattcgtctgcaaaaattcacctacctatgaagagat

SEQ ID NO: 258424 - DNA, 462 bp, Glycine max
  unsure (1)..(462): unsure at all n locations
agcttaccatgagtattaaaaaacttcaaaactgcctaatactaaccttatcatgttatatcaaatagtcacgacaacactataatgtgtagagaggcacaatgtcctaacataaatcaatatgaccttctatcactataaaataaatgctcggtcatttatatttaattaaataaataaagagataatcatttcataacatacagtatactacaacacttccaaaatgcttagcaaagcanaatgctctacataaatcagtatagtattctattaacacaaaatatatattcttttatttatatttaaatattntaatcttacaaagatcatttaacaatagcacacagtgtacaccagttttcgatctggttgctactggtctgatttggttgagatggtatatntcagctcaattcatctaaataacagcagaaagtatgctatcagacaatgaaaata

SEQ ID NO: 258425 - DNA, 411 bp, Glycine max
  unsure (1)..(411): unsure at all n locations
atactaagcttctatccaggcactctctnggtagtgaagctcctncttncatggcttatttnctcgtggatagcgcctnctcttacctcttctnctttatctttcgctgcatatccatgggtgaaaatcaccattgaaggacctcattgaagctcaaagatccaacctccatagaagcttttcaagcaagcttccatcanatccttcttccatagtttcaagagttttctttcctctactttgttaagagctaaacctaaaggccaactctgataccaactgaagtacctgaaaaacactaaaagaggggttgaataatgtgatggataaaaactctggtgttctaaaactattaaaagcttttcttaaacagatatcagtggatgaagggtttatccaatgggtcaaaat

SEQ ID NO: 258426 - DNA, 461 bp, Glycine max
  unsure (1)..(461): unsure at all n locations
agctngctntaagactgtatattgatttctttagtatgcacaccatgtgttcatttccttcaactgagaaccccattggttggtccatacaaacattctcctctaaatctccattcagaaaggcggttttcacatctatttgatgtagctccaagtcataatgggctactattgtcatgataatcctgaaagaatcctttcgtgagaccaagaaaatgtctctttataatcaatgtcatctttctgagtaaattccttagcaacaagtctagccttgtaacgttcaaggttgccatgagagtcacgtttagtcttgaagacccacttacaaccaactctcttacaaccccttgttaattctacaaggtcccaaacaccattantgtccctgaaatctatctcttctttcatggcagttaaccacttctcagaattatcacaacttatagcttgtgaaaatg

SEQ ID NO: 258427 - DNA, 504 bp, Glycine max
  unsure (1)..(504): unsure at all n locations
taatagttgaaacacgagtcaaggagaanatagtagtgagacgattgaacagattntttatgataaaagtatgggagagtagtgagggttttaaagagacgaanaatntactggtnaaaattaaacataagataagatgaggataaattaatttcaagaataatttgatttttatatcagagataaatctcctatcaaaaaatttattataaaaagatatactgtttcaaaataccaatcatatatttgatttgacaataatttattttccgatagttctagattctaataattgcttcaacctaattgtgatgcctttcttgaacttaaaaaaaaggaattgatctctctatttgtaatttgtacgtcgtgtagaaagtggcaaaactganacggtgaanaatacgtaaaatccaatctaaacctttttttattagataagctcgaattgatcttataattaatcaataacaattcacatctaatggactatntaattaacac

SEQ ID NO: 258428 - DNA, 382 bp, Glycine max
  unsure (1)..(382): unsure at all n locations
agctngatgatataagtgagaagtgcgtgtatgtggttcacgactcaagatccacggggtactagctctatcttccctataggagagggatcgtcataagtcgcgacgtctacttcgacgaagaagattgttgggattggactgctcgcgaagactagtatgactatcttccttattttgaagaagatgctgatatcgtacaactcatcatggaggaacatattgcaccacctgcctcaccgacacctacgctggatgaaacttgttcatgtgagaggactccgcgactaaggagcattgaagagattcttgagggaacccataacctaaacgacattaacctcttttgtctttcctgtggttgtgagcctctaatctctca

SEQ ID NO: 258429 - DNA, 563 bp, Glycine max
  unsure (1)..(563): unsure at all n locations
ngcggggtcgcctcgatctcatcatctatgcgacactatagatactcaagcttcctctntaagcttctcatccaagccactctcttggtggtgaagcttattcgttgcatggcttagtgctctagcggatgatcgctactctgaccccgtatccgctcattttcgctgcaattccatggctaaaaatcaccattgaacgaacttatcgaagctgaaagatccagcctacatacaagctttataagcaagcttccaacaagtggtatcagagcacactagcttcaacttagcgctacttaagactgcactaattgatagctctactttctcctccattgctgtaacgataatgctatacatgtatcttctcacctggcttgcgcttaatgatgttgacataatatgatataagtatcaccgattaagcttgctatagaagctataatctattttctatggatcaaattccttcgtcttgaacttgaaacatgaattgggatgagtgtacgatcctctcgagtttatattgccaatatattcgctgcacctacaccatacagtcg

SEQ ID NO: 258430 - DNA, 429 bp, Glycine max
  unsure (1)..(429): unsure at all n locations
aatgtaattatgaaattgagatgcccgaagaaacaccattttctaattaaccatgcattaggtaccatgttcaattattttgtttttaaatgaaacgggtttgtgatcccaacatgggtggctcgtggggcctgtcgcacctacccttcggcgggagggcgacgcgagactcgcgggatgcgtgttccacgaaaggaatacgcgcggagtcgccaccaacgtttatttgatgaaaacgtcggaaaagcccgaaaagacgcggtctacgaactttttagtgaaaggttcgggagtngtatttacgcacggggaaggtatttagcacccacacgcccgtccccagggacggcagcctttaatcgaatgtgcaaacatgactctgattttatggtccctcttatgtcttatacctttatacccttttatata

SEQ ID NO: 258431 - DNA, 425 bp, Glycine max
  unsure (1)..(425): unsure at all n locations
acatgatacatgtcacggcttggttcggttcaaggataatagggatgccccacattatttccatgacacaaatgcaaaaatgatgatttggaaacttcatgcaaaacttgtcatgcatgcatctatgcggacactcaaatgtcaaatttttatggtcatgtgatgctaaggctcacgattcattttctctatttttaatcaacccaatgtttccaaaatatgttcttttatcaatttgtgcattcatccgagtccatttcgggcgtccgggaaatttcacagcattcacccttcaggcgtagacacattttccaaaaattggttatggtcaatgaagtttttcatagaacagctggaaatcggctcttttcaaaagcatgtcatttntagctagacaactcattttcttttgttctccttcttct

SEQ ID NO: 258432 - DNA, 458 bp, Glycine max
  unsure (1)..(458): unsure at all n locations
agcttacatcacttgtgaagataacaatatgaattcttccggagactcagaanatgaggtcatgaatctaagtctcattgccaaaaactatgacagcgaagaagaggtaacatcttctaacaataacttatctatttcctttgatgaacttcaagatgcattcagtgacttacataaagaatcagtcaaacttgccaaactagtctcgttttctaataagactatctcaaatttagaaaaggaagtcttaaaattaaatgaagaattagaaaatcttaaaattgaagttaaaaccttaaaaccaattgatacaaatcaatcttctaccatanaattgatacaagatagtaatgaagcatctaattcatgtaatgttgtaacaagtttaaagaagaaatcaaagatctcgaaaattctcttttcaaatctactattagcaaaagtaatgtagatattat

SEQ ID NO: 258433 - DNA, 493 bp, Glycine max
  unsure (1)..(493): unsure at all n locations
tcatacaattaatatagaacctatatccttatgtcacatcctatcagagcgttgtgttccctgtcctcaagcatgaggttcttcatagtcatccacctattcatctgctcccccgaacacaaagttcaagatcatcacaggatccaaacacaaacagcaaaccgagagtgagttatcacattcctaactactagagagaaacaagacaacatatagtagccaaatacaatttacttagcatatctcacagtatttcatcactntgtcattcaaaattcactgttcaatcatcaatcacaatacacaagaatcacacactccgatcaagacataataacacatcaatttcataataaacaattagcaagcgtatgcaacagttatgctaagactcaagcctatatgcaatgtggtaccatgttagtgaanaacctcgtccggcgcctaggagtacatgacaagacaaaccacacacaagcaagtcaagtcactc

SEQ ID NO: 258434 - DNA, 307 bp, Glycine max
  unsure (1)..(307): unsure at all n locations
agctttgagcaaatttaaacgacaataactntttactcggatgtccgagtgagtcccgnaatatatcgagacgctcgtaattgaaaacagaagctctgagcaaacttaaacgacaataacttttgactcaaatgtccgcttgtgtcccgtagtacatcgagatgctcgtaatagaaaagggaagctctaagaaaattaaacgaccattacttattactacgatgtcggatatagccccggaaaattttcagacgctctaaattggaaacagaagctcttaggaaattcaaacgacaataagttttga

SEQ ID NO: 258435 - DNA, 452 bp, Glycine max
  unsure (1)..(452): unsure at all n locations
aagttcttcctcaacactgtcctaagcaaagttcccaaagtcctattaacaacttccgtttgcccatcggtttgtgggtgacaagtggttgaaaataacaatttagtgcccaacttgctccacaaagtcctncaaaaatggcttatgaacttagagtccctatcactaacaatgctccttggcaaaccatggagtctcacaatctccttgaaaaacaaatcaaccacatgggaagcatcatcaactnntttacatggaataaaatgagccattntagaaaacctatcaacaaccacaaaaatggaatctctaccattgcttggttttggcagccccaaaacaaaatccatggataaatcaatccaaggatactccgggaatggcaatggagtatacaatccatgaggctntaccttagactntgccctcttacatacaatgcaatgntcaca

SEQ ID NO: 258436 - DNA, 458 bp, Glycine max
  unsure (1)..(458): unsure at all n locations
agcttgtaggattatggngtacccatcacatgtggtactaggtggcggtcgggcgatggtgcaaaacaattctccacatccacaaatcacatataaacccaccatcccctgttgcccaccttcaactgggctcacgtactcccacgtagcccttatcctcgtttctctcaacaccaggtccccatcaatcctcccatgcttcaacaacatccaagtaattcaacattaaatcatcacaaactaacacagccaagaaaacagggcaaaggcagaaaactctgcccaaaacacaaaccaatatcacagcttttcacattcaaataccccagtaacattctcttcgttccagttctttaaccggtggatcgactcgaaaattttattggatgtctctagtacataagtatacattntgaccggtgggatctgctagaaaatgttcataaccccatatgtac

SEQ ID NO: 258437 - DNA, 358 bp, Glycine max
  unsure (1)..(358): unsure at all n locations
tagcgcacaactgcgcttagcgtgccaatgggacgtttgagtntaaaacccaagtgcttagcctagcctcgcgctaagcctaacttgaagttgtaaagtcccataagcaccttgggcttaatgcggcaggttgcacttaacactttctgcaacacaaaaaatctttctgcaatatgcgcttagcctgagatgtgaggcttagcgtaacatcaaacttcaacttacagagattagtttaggcttagcacaacaagtgcgctaagcgaacttccaagaattcaaaacccgtaagagaatggcgcttagcacctnctggcccgctaagcccagcttaaaaactcaagttacataatggatc

SEQ ID NO: 258438 - DNA, 419 bp, Glycine max
agcttcttatccaaggctcatcttagtggtgaagctcattcttccatggcttattccctagtggatggcgcctcctctcacctcttctcctttgtcttccgctgcatctccatggtggaaaatcaccattaaaggacctcattgaagctcaaagatctagcctccatagaagccccacaagcaagtttctatcaagtggtaatcagagcacaagagcttcaagtaagtgctccttaaacctccattaattttttttctttaccctctcttccattgttggttcttcatttctctccatgtatctcctcacatgtcttgttctaaatgttgttaacatgattctttagagtttccaccgattaaacttgctatagaaactagatttgatattctatggttcaaatttcttgttcttgttc

SEQ ID NO: 258439 - DNA, 436 bp, Glycine max
  unsure (1)..(436): unsure at all n locations
tcttgattggtattatgggtggtgtttggtcttggacatgcatcgggtggattttgtggccgatttgggggtggcctttgtgggtgattgggcgttcttggctggtagggtggtgggtaatgagaacgactgatattggccgagtattgatattgttgggctaatgggaaatttggccatgtaagaacgaaaaccacaacatgggtttctccctccttcttattctctccatttgcctcaagcttcccattcatcanagcaggataatcaaatttccctcttctcagacccacttcaatccttctaccagcgaacactaaatcgacaaagcttgaaggcatgtaacccgccatcttcttgtagtagaacaccggcaacgcgtctactatcattngtatcatcttcctctccatcattggnggcactacttgagctg

SEQ ID NO: 258440 - DNA, 511 bp, Glycine max
  unsure (1)..(511): unsure at all n locations
atgtgtgtgaagtgtatgtggcagaagcggtgtattacacatctgatgaagaggtggatgattgtaatggagatgaggttgatgttattgatgcgctggacgctgaaccacatagtcgccggtgaacataacgctcatgttcatcttgatgatgaaagtctcgtggatgctcaggtgcacgactatcatgacgcttgtgttgaacgtgacatcgatgttaggatcaaaggagtggaataacatgtattgtccctattcatgcactatatgcagcaaataatgtgtttctgatctagcaccttgccatgggcgtaaactatagctatactcacaccatatctaactacgctgaaactttgtgatgaacaccctattatcatttaaatatagcacacagaattttctacatctaatccaagtctatctattgaaactacctcagcttagcgtataagatattcgactatagtcgcttaaaataaaaatacatattatactgctgattctggcn

SEQ ID NO: 258441 - DNA, 411 bp, Glycine max
agcttctagaccagcaattcttgtgcctccgtagtataaatgagttgcatcaacatcaggaaagatgccctctccaaagatatttttgcaaaggtccatatggtatctgcaatgcatgagaaaagaatcaacaaccgcacatattaaagaatagagtcctaatgaaatattaaataagaggaaagaatcctgtcaatagaggagtatataaagtgaacagtgaggatgacgaacttgctttgcatcaatttctgaggagcgtatactatcatttgatggagccacctgaaagaatgcaacttcagtgcaaacttgaaaccaccataatcgagtagaactgtcttcatcgatagcagatttcttcaagtactcctggtcataagtctgcacattaacacccaaggttccaat

SEQ ID NO: 258442 - DNA, 331 bp, Glycine max
  unsure (1)..(331): unsure at all n locations
tcattaaaggggggcatgaactatgactgcaccncttatagttgctaatttctcatttcactgaacgggctataaaaacatgtatgttcactttctagagcgcagactctaacatgttactcaatacaatatgattaaaacgaatctttagaccgccttgatgggatttatctgtgcccttttccacactatctgtgggagtgaaattataagcattaatcaccttgtgatctttcattcaatgaggtgatgattgatcattatgtctactcacagtgggcattccctgttcgaatgtctattacagctggatcttaaaagtcggattgat

SEQ ID NO: 258443 - DNA, 436 bp, Glycine max
  unsure (1)..(436): unsure at all n locations
agctttagagcttacaaatgaaagataataacatcatgacaatctatgataaaatcacaagctttcaagtctctcagcacaatntacgtaaaataaagcattattttccacagttcatgttaacattaaaaattataagccatatacagaagtaacaacaacacttttcacgccaacttatatgtcacaaggttttaaaaatatgtctgcaactgcgatttcagctgcaacaaatgagctggaattgtctgcaatttcccgcaatataaaggaaagtgacaaaaccgtggccgcaatttaaaaccttgatgtcaaccatccagtcaactaatcaagatacacaccaaanatacctgagaagaaccagaatcatctggtgatgaggctntagcacgacttcttcttccatctagcacagcatggacatttacataac

SEQ ID NO: 258444 - DNA, 340 bp, Glycine max
  unsure (1)..(340): unsure at all n locations
tatatctnntctttttcagaatataaatgctcaagttaattntctagaattacatgatatattatgttggcttccttaaatatttgaaatatttctggtaaaaaaaagttaacattttgcaaattaacttgatattttaagagacataatgaattgatattgaatatcagattttatacttaattaatttaaccgtcaaagttcttttaaactagcattgaattgaccaatttaaccgttaaatngatttaattttacatattaaaatagtttggtgtttttatctaacaaagttacaaaagaagaaacatgtcaatactttgttttaatctctttattt

SEQ ID NO: 258445 - DNA, 464 bp, Glycine max
  unsure (1)..(464): unsure at all n locations
agcttgactctngaagggctataccagattgtcgggaagtcgactgtggaaagatgagttctttgggagccatagatcgaccattcaagatgttctcgctntaatcactaagttagtccaccaatcatgagttgatctacatgatttttaaaatacaagaactgtaaattaatgtggttcatgcaaaatcaaatggaaattgtcaagattaaaagttatttaatggtcacatgatcatattaaaaagttatcatcatttatatgttaatctctaccattcaaattcaaataagatctaatgatttatattttattctcacttctcacaataaaagtgttctccgcacccttcccaaaagtatgttttgtttattaataatttaattttttttaaaacatatactaatttaacttattcattataaatntcaaatatacttttatattcaaatatattacatcat

SEQ ID NO: 258446 - DNA, 414 bp, Glycine max
  unsure (1)..(414): unsure at all n locations
ttatccatcatccaaacacacacttaaacttgtgggttaaaatctgaaaagaaaatgattatttatcataaacctaanacatatctaagctnttataataaaaatattcaaacataaattatatgactttaaaagtaattttaaccaaaattatcgatcatccaaacactcttctgggttaaaatctgtaaaggaattgatnttgaacagacacgggccacacccaaacatacataaaagttattagttgtaactctcgggttttctacaaatctgatgtggttntctgtgttataaacgtgtgtcgaataagcaccaagtaaaatatatttaagggaaggagtaaaccaaattacaaaacacgtaaaccagatttctttgtgctcttgtcacaattgcatgtccaatatacac

SEQ ID NO: 258447 - DNA, 440 bp, Glycine max
  unsure (1)..(440): unsure at all n locations
agcttgagatgaggaagtgttgaagggtgaaacttcctgctnttattgttgaccacagagtggtacctggagatatgtcgcggnggtcaggagaccttgnggacgtcaggtggggtgctattgcccaaaaccaagcttgaccaatcccgacccaacccgggcatagtcggtcagtgagaacctgtgatgtacctaagcaggcgagctcctggcagtcaacagataaaaggaaaacaagaccacaaagcaaggaggcttgtggtggctggccagctgtgaaacttgattgatatgtggattgtggcctctggtaatcgattaccaagggtgagtaatcgattacaaggcttaaaattgaggacaggaggctaagatggtctctggtaatcgattaccaaggggtgtaatcgataccaggcttgaaaacgaagtcaggaaac

SEQ ID NO: 258448 - DNA, 210 bp, Glycine max
  unsure (1)..(210): unsure at all n locations
catctcttatttaagcatttcagcctttgctttcgtgtagcttaagaaaaacgtcatttcttcttctttctttcttccaaagccatttctaaagttccaagaactttctccatcacccacatccaccattagccaccacaaaccatcattgntctccattgaaaacccacactgagaggaacccttcaaccgaagcggaatctttcaact

SEQ ID NO: 258449 - DNA, 285 bp, Glycine max
  unsure (1)..(285): unsure at all n locations
agcttatnntcttttgttcattgatccctattctataatattggtctgcttaactaaccctgtagatattaatttcacaatggaagtaaatgccattagaaatctagttgtctaatttgttataattagccaatggacaattgtactatgatactctagttgataaattcataacccttgccgatggcaacgcgggggtggagccggagagctcgggcttgcgattccactggaggaggacaaaggggggtttgggttttggaggggaagaggggagaatggggc

SEQ ID NO: 258450 - DNA, 330 bp, Glycine max
  unsure (1)..(330): unsure at all n locations
atgactgcagctcaaggaaggtagtgatcagtagtgatgtaatctttgatgagtatagaagcctgaattgngaaaacataactgtagaaactaatcatatgcagcaggatctcaattttgatttggatgagcctgcctcagaaccacctgaagggcatgaggatatgaatcatgacatattggatcaggatagtcagaacctataagaggcaatccatatgagggtcaaaagaactanggttcatccgtcaagactccaataatatgaggcatactcagatgatacggtgactgatgaaggagaactcttacccagtgaagaagtgcaca

SEQ ID NO: 258451 - DNA, 463 bp, Glycine max
  unsure (1)..(463): unsure at all n locations
ttaagcacgcggctgcagcttcatggaggaaganaatgagagagatggtgggcggtggaattaaaagagattagggagagaagttgaactctgaaatgtgtctcataagggtctcattcatcaaagttgcgacaagtgttacacatgttttatttatagcctaggccaataactcaaattgtgaatttcattttcatttcttgtgaatctaaaaggaatattcttagaatatgccaaatgcatcttagcatattctctttagatgccacaagcatggaaggtgtgactctagcacatgggaagcttccttgagaaacaaggaaggtagctttttccttgggaagcaaggaaggtagcttccttgagaagctagaggttagctactcacacccctccaatagctaagctcactcccatgtcataatacatganattacaacagaaagtcttactacaaagacta

SEQ ID NO: 258452 - DNA, 455 bp, Glycine max
  unsure (1)..(455): unsure at all n locations
agaaagagggagagaaagagagagggggagcacgatattgaaggaataaaagagggagagaagtggaactctgaagtatgtctcacaagactctcattcatcaaagttacaacaagtgttacacatgcttctatttatagactaggtagcttccttgagaagctttcttgagaaaactctcttgagaagcttctttgagaaaagcttcttgagaagctagagctntagctacacacacccctctcataactaagctcacctccttgagaagcttccttaagaagattcctaaagaagctagagcttagctacacatacctctctaatagctaagctcacctccttgagatgagaagctagagcttagctacacacccnctataatagctaagctcacccccatgacaaanaacatgagaatacaaanaaaaaagtccttactacaaagactactc

SEQ ID NO: 258453 - DNA, 433 bp, Glycine max
  unsure (1)..(433): unsure at all n locations
cgattatatatctatatcggtccgctgccaccgtgagccgtcgttatgtgatctcttagaatcacatcctctggaacaaacacgaaacttttgatcgattgcagtccacgaattacaatttcaatgaaaggcccattctattgagctggaacgacgctgttttccagatgagcatgaaagatcctacatcttttatatactcgcattaacaatcacgattgtgctgtggtgttatgctnggtgtccttactttctctatcattatatggagaatggagactattagatctaacctttcgcatctagaccattgcccggacccctccctcacgaacgagagagnaatttcacttattaacctttccttgctatcctaaacaggatgtttagtatcaagctgtgcacccttaaattggggtcctttgggcagacn

SEQ ID NO: 258454 - DNA, 430 bp, Glycine max
  unsure (1)..(430): unsure at all n locations
agcttgaaaggatgcttcaatggaggaaaagaaagagggagagaaagagagaggggggagcacgaaattgaaggaataaaagagggagagaagtggaactttgaagtgtgtctcacaagactctcattcatcaaagttacaacaagtgttacacatgcttctatttatagactaggaagcttccttgagaagctttcttgagaaaacttccttgagaggttctttgagaaaacttccttgagaagctagagcttagctacacacacccctctcataactaagctcacctccttgagaagcttccttaagaagattcctaaagaagctagagcttagctacacatacctctctaatagctaagctcacctncttgagatgagaagctagaacttagctatacaccccctataatagctaagctcaccccca

SEQ ID NO: 258455 - DNA, 476 bp, Glycine max
  unsure (1)..(476): unsure at all n locations
ctgcttaattgctccaggttgctgcatggaagggcaaaggtctgtatggtggtcagtagaggagcacacaccacaaacccttgcgacaggtacagatttctgattcaaggccagctgggttaccaagttaaccaatgcatccagtttgccttcaagcttcttagtttcaaatgatgcagatgggtttgtagctacctcatgcactcctctaatgactatggcatcatttctggcgctaaactgctgagagttggaggccatcttctcaattaaatttctggcttcagcaggagtcatgtctccaagggctccaccactggcagcatctatcatacttctctccatattactgagtccttcataaaaatattggagaagaagctattctgaaatctgatggtgagggcaattggcacatagtttcttatatcgcttccagtactcatacangctctcttcactaagctgtctaatac

SEQ ID NO: 258456 - DNA, 428 bp, Glycine max
  unsure (1)..(428): unsure at all n locations
atcatgattgtgattaggacctgacggctccctgagtgaaatagtacgacgcctgacaattctcggtgctgtctagatgcctcactcaatggagagacccgagctgtcatggcgattgtctaacgaaacactatttgccttcgaccacactgatcgctcttgagttggtaagccagttttgacgatctcgccactgaatagaacaacccgcacatctttgtgtcgtccagctagagagacaatgaacaggttaaccacgacacatgctatctctgttcttctgcacacctgacggaaatataattgtgaatcgaggaattctagtaacattccctcatgcagccgagatattagcttaaagagaccttttctacgtgcttaaagcatgggcccttcaccccactcttgggtctagactgcgtaaccan

SEQ ID NO: 258457 - DNA, 273 bp, Glycine max
agcttgtatccattagaagagaatgagcatttgattgaaattatgactgaaaatgttagtcagtttgtcagatggattatgaaggaatgcattgatcatatcccgatgagagtgtgatccttaaattttgagagaaactaccataatttagtactaatttttgcgtgaatctttgacgtatggactgaatgcatgaaattgaggatgatgaacgccatgtttgattgtgatagccacttaaccaaaaagctgaccacatgcttgaatgattta

SEQ ID NO: 258458 - DNA, 390 bp, Glycine max
tgtagggttaaagtgtcatgaatgtcacgtgctcatgcaacaattgttagccgtggctatacgagacatcttgccaaacaaagtcaggttagccataactcgcttgtgctttttctttcatgccatatgtagcaaagtcattaatcctgtcaaatttgatgagatggaaaatgaggccgcaattatattgtgtcagttggagatgtattttccccctgctttctttgacatcatgattcacttgattgtgcatctggtcagagaaatcaaatgttgtggtcctgtttatttgcggtggatgtacccggttgagcgatacatgaagatcttcaaagggtatacaaagaatctatatcgtccaaaagcatctattattgagagggacattgc

SEQ ID NO: 258459 - DNA, 452 bp, Glycine max
  unsure (1)..(452): unsure at all n locations
agctntattcaagacaaagaaattaaagatattctagatggatgatcaagacaagtctctagtcttagaaatggtatattaaataggagggaattccaattgaagtagcaaaaggtttggccaagaaatttaagttaaaaagtcttttacaagaaatttactctctggtaatcgattaccagaggatgtaatcgattaccaatggccaaaactgatttacaatagctattaaaatttgaattcaaaatttgcactgtgtaatcgattacacatatgtggtaatcgattaccagcaatttctgaacattttaattcaaattttatagtttgtaatcgattacacatatactgtaatcgattaccagagcagattttcagaatatattctcaacagtcacatctttttgtgtggttcttgaatggctatcacagggcctatatatatgtgactt

SEQ ID NO: 258460 - DNA, 395 bp, Glycine max
  unsure (1)..(395): unsure at all n locations
ttgtgtggagcttcaatggtgaatgaggaagaagagaatggcaacgtgagggagagagagggctgtctgaaattttctgttttgctgagtgaggagagagaaaagctttttggtcttaaataaaaagggttttccctttttccattattttatttatgcaaaagccacatgtctccatttgagtggagcaagaagggcccacttttccttttgactgtgacccacactcagccacacaaacgaaaaaaatctaacctttgaaatgctaaaatcctgcctcagtttgcgtgccgtttctctggttcaattcctcgcgtttctctgcgtccgtcggggccatgtttctatngcaagcaatatatatatcaaaacgctcagaataaaaccccgagcgt

SEQ ID NO: 258461 - DNA, 116 bp, Glycine max
agcttgtggcgcgacatgttgacttgatcaggcttcttacattcacaaccgactctgtcttgtaggattctcatagagggaccgcctgtacctgcacgtttgtcaacgacatattt

SEQ ID NO: 258462 - DNA, 451 bp, Glycine max
  unsure (1)..(451): unsure at all n locations
agcttccatcaattntaaagctgtccncccacatgttcacttgatggaatgggtcatatatacccatccttttcgtgaggactagttgagttgatgaagagttcatatactataaatcatgcaaaaagaaaattcacatctcaaattggagattcaatgcaatgtagacaaggtaaaatgggaaaatttagacttggttctctataaaactggcaattgatttgaaaactggaatatgggtttgctggaaattgaatgaaacctcaacatcagaaacagcaagattgaacttttcacatggtttatgttctgttatctctaggattggccaaaggaaataactgttttctaaacaatactattaaaaaacaaaataacatatgtttgatgccacttataagcaaaatttaacatgataaacgaacttcaatcaaaaggaagaagctgattt

SEQ ID NO: 258463 - DNA, 328 bp, Glycine max
  unsure (1)..(328): unsure at all n locations
tatgactctnnggcaatatctttaaaaactagtcacttaanaaattgtgacttttgaaanaatcttcagaaacaagtcacttgaagaattgtgacttttggaaatgtatttttcgaaatcagtcactggtaatcgattaccattaaggtgtaatcgattacacaccaaccaatgtgacttttcattctgaattttgaaaattaaaatgtttaggagctctggtaatcgattacaagtttaaaatacttttaaaactggttaaacataagttataactcttgaaatttgaaatcttaacgtttaaaatactggtaatcgattactacct

SEQ ID NO: 258464 - DNA, 453 bp, Glycine max
  unsure (1)..(453): unsure at all n locations
agcttggttntaattatgttgttacaataatgctgtttagtttaggcctagtcttacatgatgcatttgcggacaaagcttaggctaaattaggctaaactttcataagctacttgagctgagtctagtcttacatgagggatctgcagacgaaacttagtttaagttagtctaaacctaagagggttgtctaaatcgggtgtagtcttacatgagggatctacggacgaagcttggatattcagcctgacgagggatcaaaggtttagtaatttagggtacaacatagaacacaagagcaagattgattagagaaatatatttctgtcataccctaatttcgcccggggaccattgtttggtggcatgaaacctttgcttgaccgcctcggngtacttgacacccatcgttaggcaatccgtgaagtttcacaacattctggaagtcaaaaa

SEQ ID NO: 258465 - DNA, 410 bp, Glycine max
  unsure (1)..(410): unsure at all n locations
tcttagttntagatgatgcacgatgagttgtagccacctcatgtactcctctaatgactatagcatcatttctggcgctaaactgctgggagttggaagccatcttctcaattaaatttatggcttcagcaggagtcatgtctccaagggctccaccactggcagcatctatcatacttctctccatattactgagtccttcataaaaatattggagaagaagctgctccgaaatctgatggtgagggcaactggcacatagtttttaaatatctcccactattcgtatgggctctctccactaagttgtctaatacttgagatatccttcctgatgcgtgtggtcctggaagcacggaaaattntttctaagaatactctcttaaggtcatcccagctcgtgatggacc

SEQ ID NO: 258466 - DNA, 455 bp, Glycine max
  unsure (1)..(455): unsure at all n locations
agctntcaacanatgtcttcacaaataatcatcacacagcagaaccctagcaagattacccatcatatctccccaaaaccccatacccacgaaatttaagagagaaagaagtccacccaaacctgaattttcgaagtcccactcgtagccacgcacttcactaccccgaaaatgctgtcctttcgtgatttggagcagaaatgagcaccaaaggttgaagctttgttgggcaacaatggtggatgggagaaaagaagaagaaggctgcgtgagagagagagagctgtctgaaattttgtggggctgagtgaagagagagagagttgctttttagttntaaaagaaagggttttccctttttccattattttatttgagcaatgccacatgtctccatttgagtggagcaagaagggcccactatcctcttttgactgtgacccatactcagtcac

SEQ ID NO: 258467 - DNA, 440 bp, Glycine max
  unsure (1)..(440): unsure at all n locations
cgtcttgtgcagaattaggatacagagggcacaaatttttaacaacaattccaaagcacaccataatgcctatttntcgaggaaagagcttggaggcagcaagaggagcagcttntgcagagagacctaggttttgtaattagagagagattagtgagtcgtagaataattgtgagatgctgagaagaggagtatggatccctcttcttgtttaaggaataattattctatactcttaatctcatttgtgttaggggttttctgtatggctggctaaacactcttgttgggaatttctatggaacagctgatgtaattactctaatatctaattgactgtgtttctatgttcaatgcttctttcaatgcttaatttctacatgctcttggtctgatcacccatttgtatgtctagttaggtcactttagcattgagaaat

SEQ ID NO: 258468 - DNA, 461 bp, Glycine max
agcttgaatgaggctgaagaagctgctgctcatgttcaacaagatccggtggagattaatttatctcagcctcatttgtcacaagatagtgacatggaggtccctgcaactattgttccaccaatagcaaggaataagctagccataacaagagccaaaaaaaggaaggttgctgataaagatgatgcacaaaactgaagaaccattttttgttgcattttgaaggttgctgaagacccattttttgttgcgcattttgaaggttgctgagtttgaaggttgctgatgaagaaaactgaagaagcattctttgttggcatttgatattaggatgtgtagttgtatatattgaaagcttcactggcatgtgaaatgatgtcaaatattaggatgtgtagttgtatagtttgaaggcctactgaacaattgcttctaactaccatgctttgggatgtcaaata

SEQ ID NO: 258469 - DNA, 388 bp, Glycine max
  unsure (1)..(388): unsure at all n locations
acacaccattcttggaaaagtcctattaatccatgattgcgcatgttatctttgatttgataggaaatgatttgcaaagtcaagtcatgacatatctatggttcagaattaggatgaaacatttgcctgtgtgagatttatacactttgagcgatttccctctatttcaactggacccaatgtttcttctaagcgctcatttagaaacgaaatgctaatatcctaaatctcatttgtggttatgagaaaattctatcagcatgctttccttcccaatagacacattgttttcttcaaaaatacatgttgtntgatcagttgaaagttgtttcttgctagcgtgttgcatttagtgaaaaacaccgagatacttagtctcgcctttcat

SEQ ID NO: 258470 - DNA, 462 bp, Glycine max
  unsure (1)..(462): unsure at all n locations
agcttataatattnttcatttctaanaatattatggactattattntgcccactctaaagaaactntctggatctattattggatgcaatacctatgcaaatgataaccatagagaaaattgatgataacgagacatgacatgaacggaagacaaccaccttggtacatgattaatgtttttatttattgtaatatttttattctaacttccattattatttttttagtacttatgataaataaataacatatttaaaaattaaatatagtggtataatactaataatttataacatcttaaagatttaagcagaaataaaattgtttaaaaagtagattgataaagaaacataaaataaatccatttttcaatactagttacatcaaagttcatttcattctttntcttccggnggtggagaattataataattttttatgtcaacgtaattagtattatt

SEQ ID NO: 258471 - DNA, 443 bp, Glycine max
  unsure (1)..(443): unsure at all n locations
cctganatngagaganaatgattattaaacacacataatgaaaatactaagtatttattacctatacttaacagaaaatacttataaaattacaaaataaccataaattgtgagagtttgatacaatttatacaagttttatacacaaaagttagtcgttttcaccgactaacaactcccccaaatttatagttttgctagtgctcaagcaatcaagaacaactcacttgtcctcaagtgataacaacgagcagtgattatgtacaaaggtgtatgcatcacaaattactgattgcataatgagaaagatgaagcaatgtgtacctatcactcgtcttcacaaaatatgcagttattcaaagagaagaataacaatttaactatacagttagatgaagttaatcataagacagatatcaaggagagtagcttaaaccacagtc

SEQ ID NO: 258472 - DNA, 448 bp, Glycine max
  unsure (1)..(448): unsure at all n locations
agctngtatttccatgtcacgatattaccagagcccncttccatccaagatgatcctactccttctccccacattcaaactatccttgaccgttaccaccctttgtttcaaacacccaacacccttcctccgcaacgtgagacagaccaccgtatccatcttctaccacaagccacacctgtgaatgtccgcccctaccggtacccccatttccagaagcaggaaattgagaaacaagttgaaattatgctacaaaagggccttatacaacctagtaatagccccttttcatcgccggtcttgcccgtcaagaaacaagatggatcatggagattctgcgtggattatagggcgctcaatgctctcaccattaaagacaggttcccgatacctaccgttgacgaaatgttggacgaaatanggggtgctcattacttctcgaagctcg

SEQ ID NO: 258473 - DNA, 493 bp, Glycine max
atgcgtgtaagtgaacaaatataacacatccaataacatgaggtggtaaataaaccatggaaggaaggatacaatgatcaaacaacacatctagaggccttctcaagttaagcacctctagaaagggttcgattaatcaaataaactgtagagctcacagcctcaccccataaatgagatgggacattaccatctatcaaaagtaatcttgtcacctctaatatatgtctatctttccttttagccacttcattttgttgtggtgaataagggcatgtagttcgatgcaagataccattaaagttcatgaactctattaattcagtcttaaaatatatccctcaattgtctaatctaatgaccttaatatatgtgttaaattgtgagctatcatctgatgaaaggaacacacaatatcacacacatcacttttatgtttaagcagatacacccaggttacccgagtacaatcatcaacaaaactgataaacca

SEQ ID NO: 258474 - DNA, 451 bp, Glycine max
agcttgttgccctcaacgtgttaaagaatacatgagtatgcttttccctgttctggtcaagttaagatgttagccaaaacttaatttgtttccatttgacaaaatatttaaattatccttatttcacttaaaataaacctctttactggttgtactattttataaacctcaaacatgatgcattgttatttgagtatgattgatccagctgtcgttgtcattggcactgagcatctttcgaggtttgtctctatttataaaaagttgtatgattgtaacatgtcgttgttcaaatatcggtattgtttcatgttactagttagttgcattatgagtgaaccttagatgcccgttcgagattcgatacatcgattaatacggatagtttgaattaatcgatgtattgattcttgaattgccttttggacaggtcgggatgacatatttttat

SEQ ID NO: 258475 - DNA, 479 bp, Glycine max
  unsure (1)..(479): unsure at all n locations
tgtgccacctacattgtaacatcccaattctcgtaaactagattaatatggatggctatttataaataaatggaatttaaaaaaatgatgagattttataaataaataaataaggagatataattattaattaaaataatgatttgagagaaaacaaaaagggttttttttatttgtttgatagagaataaaataaagtttggttttataaactaataaataaataaataaataaataaataaatagagtaaataatatgtcgtanatgcccctagctataaatagcaacatgctaggttagttttcagactgactcctcagcctcctcttgctcacaatttcgttatttctttcttcttccaaaaccctctattttttcccgaggccatctaacatgtctcagaanaatgacgatctcngactcattcaccgttggatcgtcgtgaaatttgagcaccacattctgcacccaattact

SEQ ID NO: 258476 - DNA, 438 bp, Glycine max
  unsure (1)..(438): unsure at all n locations
agcttcttcatcagtgcatcccttgaagaaaggaggctcataatcagctggctgcaggataaaacaattatattgtcaaatcaccctgtatataagtcagccctttgcttgggcataacagaatgctaaaatagtcaccagttgcatagcaaagtatgcatttcaagtctgggcaatgcagaaattcatagaaaggataaaaggagccgagatttgctattcatgttaaagaacataccgtcacatcatcatagtagaggagcttcatcagaatagtgcgctagggaaagaatgcagaaatcagagtttgtaatgattacttaaacttgaagagagaatattatgaaattatcattcagagcatttgaatttctttacctcttctggcattntctccagaagtctcatcaactgaaccagagttcggatcatcttaca

SEQ ID NO: 258477 - DNA, 445 bp, Glycine max
  unsure (1)..(445): unsure at all n locations
ntccncaccacctttcttctagatattgttttagatagcggtttggtgtcacgaggaggcatagacaaatcactactttcggattcaggttgatcaatcttaacaggagaatggtctcgttgtcgctgctctctgaagaccatcaagagcttctgagccttctctcttcctctcgaggtcccattcactgatattgacaccaatgcaggtataaccccttcttgcaggaccatctgacaacattcctcactcctgttacacaaaattaggagacaagaagcagcttgttcctgctctatgggctcaccggtatctagtgtggaagccaacgcacttataagtccaggagccaacatcattttctctcttcctgcttgataaaccgccaacattatcaaaacagctatgcagttttctgtccacatgcaatcaccctggtctacaa

SEQ ID NO: 258478 - DNA, 439 bp, Glycine max
agcttatagtctctttaatcctgcctaggttagctgtgctattcttagccggtcccaagcccggataaaaggagagggttgtgttatgctttcgacagccaacgtaaaactttgtcgaatctctacgacatggatcaattacgtaataatgtgaatgctaagtcgttgcccggaagcaacgcgctgtatggctcgagtacagtgtcaaaagagcaagggccactgcatcgccgcccggatgtagtgaaaagtaagcaagggttctcacattttcgtgaacgggtgtgggtaaagaagctagttcatgacaggaggattcgctttggtacatggaatataagcacacttactgaaaaatctatggaaatagtggatgttatggtgaggaggaagatcaattttatgtgcctacaagaaactaagtggacaggtgaaaaaa

SEQ ID NO: 258479 - DNA, 436 bp, Glycine max
agctagactagcactttacataagccaagatgaagatgtacattgtgtgcaagatgtatagggtgaacagcaagtgcagctttgaattccttcactgccatgcgtagtttacccttactagcattatctttagcctttcacatagaaaccaaaagacaacctaccatttcaacacccaaaagaaagaaggaaaatagaatttacatgttatgtgaaaataaatttccacaatagatccaagcttacacttttactctttttgagtagatgtctcaatccaaaatatgcctttttaagacactatgctctggatctacgcggagacctttatgacaatgcctgaatatatatgttcgcatataagctagatgttatatatacatatatagatatatgctatatatatatatatatggatatatgtatatatatatat

SEQ ID NO: 258480 - DNA, 413 bp, Glycine max
  unsure (1)..(413): unsure at all n locations
tactaagctggattcctttagtagggaatctatcctacctaagatggagcataacccagtcacnctcattaagaattagctctttccttcctctatagcctttatttgaatacacctttgtttggttcttaaccctctcatgccacttctttaccaactctgacctagattccccttctttatgtataaaagaagtgtctagtggaaggggaatgaggtctaatggtgttaggggattgaacccatagacaacctcaaaaggggatggcttggtggttctatgaacccccatgttgtaggcaaattctacataaggaagatactcattccaaggttgcctttcagaaaaccccttaanaagatggataaagacctattcactacctctcgttgacaatcagtttgtggatgac

SEQ ID NO: 258481 - DNA, 444 bp, Glycine max
  unsure (1)..(444): unsure at all n locations
agctagtgtctntacttttttgttntagaaggagattntattttatttttgaatacaaataacataaaattttcacgaattcaaacgttaaatcattccaaacataaaataacattacattaactttaaacattacattaactttaaacattacattaacttaaaacattacattaacttaaacagagtcgaaagaaataaaatttgcatcaaatacgacaattaagtcatgctaattttgcgacaatgacatattatcttccatttcgattacatgcttactaaaaacagctaaaatttctattggcccgaattttttccaatagttagaatgcactaacaccttcaacatgtcatcgttggtttccagttcaataatttcgaaattgataattttatctgaatgctcatagtgacttggtcgtcaaaaaaacaatcgctata

SEQ ID NO: 258482 - DNA, 470 bp, Glycine max
  unsure (1)..(470): unsure at all n locations
tatactcattgagaagtacataagaactataataatatgtcgaagagcataataaaatntatacatcaataaagtcatcaccttcaattctatactcagtctaactttatgaacataatataatttatgaattggtgaacacatcaaattgtaagttcacatgattgaaatattataattcaagtttaagaaataaagagtatcatttaacatattattaaattaaaaaaggcaaatcggttgaaaaacataaaaaattaaatgttattcatgtcaccaagtttaacaataagaagtgtcctgatcaaaccaaacgagaagccctcatttcacaaccttgatatcatgcattaaactaaaggccaatcaatgaacgatccttgtctnncatttctgatcattaatcagtcaaaaaaacagtcaaatattttaagatattcanatacacttcaattcatgaacacaaagac

SEQ ID NO: 258483 - DNA, 357 bp, Glycine max
agcttgagccaaaatcctgactcaccataaaccttgacccagggtgagaatgtcaattcttaccctcggaagcaaaaaaaaaggggagagggaaaatttccaatcaaagaggaagcacaaaaggagagaaggaaaatttccaatcaaaggaaaaaaagagaggaaagggaattcccaatcaaagagtgggagaaagcaaaaagaaaagaaagaaaattcccaatcaaagaatgggagaaagaaaaaagagaagaagaaagggaagaaagttcccgatcaataaataataatatgcagaaaggtctttggaccggacaatatctgaacaatacagaattgtcaccaaatgaataaaaa

SEQ ID NO: 258484 - DNA, 362 bp, Glycine max
  unsure (1)..(362): unsure at all n locations
tgtttgggtgagttagatatacccattctgttntaaggtttttgcgatgatgtttgtgatgtttatatgctgaaattgctgatggaaatctgttagagacgaagggtagaactaacccaacgttagaaagtgagaatgtgatgttatgagtgaaaaaaaaagagtgagactttgagagttggaaggctaagtctgaattctgtggtaaatggaggttagagtgagttaatactagctcgaaatgtcatttagaacatgtgagaaaggttatgctgagctagagagaaaaacaaatgaccaaagtgaacaaagagccattgctagggcaaatttgggtgttgaagagtcaaattttgatttgg

SEQ ID NO: 258485 - DNA, 447 bp, Glycine max
agcttgcctaattaacctaaaattgagagaaaatgattattaaacactcaaaatggaagtactaagtatttattacctatacttaatagaaaatacttataacactacaaaataaccataaattgggagactttgataaaatttatacaagttttatacacaaaagttagtcgttttcaccgactaacaacttccccaaatttacagttttgcttgtcctcaagtgataatgacatgtagtgactatgtacagaggtgtatgcataaaaaattactgattgcatgatgagaaagacgaagcaatgtgcacctatcacttgtcttcacaaaatatgtagttattcaaagagaagaataaaatgtgaactgaacaaatagatggagttaggcataagataaatatcaaggaaagtagcttaaacaatagtctcacagttattcattaat

SEQ ID NO: 258486 - DNA, 251 bp, Glycine max
  unsure (1)..(251): unsure at all n locations
tatccttatggcctgcctncggacttcaccccccgtgccaccccggaagatntaagccaagcccctactttcgaggggcaacatccaccttatgaagactatcccgggcaagatgatggggaaggagatacccatcttggccccctgctccacctcaaagatctgtccccacatgaactaccccaaccgaacatagtgcgccataccccggcctcacccacacctttaaaagaatctgttcccttcgcgga

SEQ ID NO: 258487 - DNA, 453 bp, Glycine max
  unsure (1)..(453): unsure at all n locations
agctnttcgtcttcaataaacatggctcanagaaagaaaacaaatttcccaaaaggttatcaatattaaatcttggaatacataaatgaagggagagtactatattttgattgaggtgtgatttttaaatacatgccatatatacacattatttatttctttacatttctatttttttaattaattatatcatattatttatcatatttaacattcaattctctgtgtgtgtatttgtatgaaatacatgattcatgaataattttcattttgattttaatgatcttctttatatattattatataattaaagttagttagtataataaaaaataaagacacacagacgtgataatgtttgtatggtgttttgctaagatttaataaatataaaatgagtgctctcttcctacatnttgagaccttttcgttttcttttctaacacatttttg

SEQ ID NO: 258488 - DNA, 410 bp, Glycine max
  unsure (1)..(410): unsure at all n locations
ctagatcaaaatcttatgtagatgtggaaggtgataatgctgaagttcanattaaacaggaacagatcttaggctaatgttcaatgaccaataatttcacgccatgcagagccaacttcatcagttcctaaatgttatctcactcttgacaacaaaatttgttaagcagaaatatgttcttaaactgagccaattcaactcaacatcattacttaaaaatctgaataataaaaccatggtcaagcacggcaaaagaatctcagntcctaatagattcatcaaatatctcaaatacattgttggccatgctatggtctaggtcactcaaattaccagctatgatcaaaatgaaatgccaattcttatttcgattggagtggtcacatgatattacattatgtctaacttca

SEQ ID NO: 258489 - DNA, 442 bp, Glycine max
  unsure (1)..(442): unsure at all n locations
agctngtccaattgctgaaaatgagactctgcatttgatgattctacggcgagaactttcatatgtccagctgaactggtagccttcactctttgctgtcattagaaaagaaaaaaaaaacaattcaaaaggatataaagtgcttgctcaaaaccaatagataatatcagtatattataatatgatgtgaaatgtaccaacctttttgacaaaactgtcttcttcttctggagaaaaaggacgctcacagcaagggcaaacatgattagctcttgcaaccctttcaaaaggatcaaacatttgccgcataccatcagcaatattatatttgctgcaagcaatcaccagacaaagtattagtacatgagaccagtacctagtgacaacacaaacaacactntgatatggtcacaaagatgacgtcatgaatgtctggcacaaa

SEQ ID NO: 258490 - DNA, 475 bp, Glycine max
  unsure (1)..(475): unsure at all n locations
tttaccacaattgacgacttgagctaatttagaacatctgaagcatagggcaatgacataccaataggctgcttcttctgctacacaacctgaaagtgaaagatgttgcctcaatttcaagagtgacattccaagtgtaaccacggaatggccattagcatttgtcaaggtgtatattatatttcattcacaatattttctttcgtagcaaaatggatttaattaaaaaagttaacattataattttaataacctcatgaatctgattataattaaatcattaagttttaattaatgattataattgtatattttcttttaaaatatactttctaaacaaaaagctaatttcagataagatattcttcaagataattaanaaatgactacaggcttttggttctaaatagggttcttctagtacgttaaagacatactactttagagtatnaaagtggtatttgctctaattatt

SEQ ID NO: 258491 - DNA, 389 bp, Glycine max
  unsure (1)..(389): unsure at all n locations
agcttataaggaagtgaacttagttattagagggatgtgtgtagctaagctctagcttctcaaggaattgttctcacagaagcttctcaaggaagttctctcanaaaagcttctcaaggaagctacctagtctataaatagaagcatgtgtaacacttgttgtaactttgatgaatgagagtcttgtgagacacaactcaaagttcaacttctctcccgcttttcctccttcaatttcatgctccccctctctctatctctctctctttctttttctccattgaagcatcctttccaagcttcttatccaaagcacattcttggtggcgaaactccttcttccattgcttattccctagtagatggcgcctgctctcacctcttcttct

SEQ ID NO: 258492 - DNA, 383 bp, Glycine max
  unsure (1)..(383): unsure at all n locations
agaaaattattattgaacacacaaaataaaagtactaagtatttattacctatacttaacagaaaatacttataatcttacaaaataaccataaattgggagagtttgatacaatttatacaagttttatacacaaaagttagtcattttcaccgactaagaagtcccccaaatttacagttttgcttgtcctcaagcaaaaagagaacaactcacttgtcctcaagtgacaatgacatgcagtgactatgtacaaaggtgtatgctacaaagtgactgattgcatgataagagaatggagtaaaatgccctcatcacttgtctttcacaaggtatgcagttatncaaagagaagaataaaatgtaacctgaacagatagatg

SEQ ID NO: 258493 - DNA, 416 bp, Glycine max
  unsure (1)..(416): unsure at all n locations
acatcagctacatatagtggcgagatacagtctattagtgagggacagccctcacccctatagctagctttttgtgtcgaggtaggcataaactccatctatgaatcttccacggtattagaagtatatctaagcttaatacatacggccagcctcattagttatccacgcaccacgcctaagaagtgctgggcgaganngantgtgttgggattaatctgagcactcacttgactaaaatcaaacgtgtgaagtatagagtatgtgcaccctcggccttagctactatcggagtcagagctgtctgactgcattgtacaatataagacttgccttaggatcacatagaaggcatatcctcatattttcagaatgttactttctttctggccttataggcaaaacggtggcctctg

SEQ ID NO: 258494 - DNA, 78 bp, Glycine max
ctaagcttgtagagatctgctgaccattcacgaacaagcatgaacgcacgtcgatcgcgtgtacgatatactctccac

SEQ ID NO: 258495 - DNA, 383 bp, Glycine max
  unsure (1)..(383): unsure at all n locations
agctgggacgaatctgaacctaagtttctgatgtgtgtccactaaaaaccagacactatcctactttntctttccctttctctctctctctctcaaatccaacgatcctagcctctcttccttctctttctctacccttcgcagtctctatttctactccgaacccttcttgcccttgccccctcctctcacctccatgacaacctcgatgacaagtggttcgccttcccctctttctctctccctccaaatctaggactccaacaatgacttcctcctcatcaagtcgggccttccacctcctctggtggctcaaccctgacactgtgcaccactgtctcttcctccgatggatgcctctacatcgataaccagatttgcga

SEQ ID NO: 258496 - DNA, 424 bp, Glycine max
  unsure (1)..(424): unsure at all n locations
tgactgacttctactcatagatccattctagtgctcatggtgatcctnctcatcattaccttctgaagagaaagaagtgatcatcaagtcttaaaagtggattgaaagagtatcaaagatatctttgaggatataacagtgacaaggcgtagtctagaagaacaaatcatatagaaaaatcttcagctaatcatgtaaagacattgtgagtgcattaatagaacaataaatggatgaccatttcacttgcagtgtatcatcaaatactatagtgtatctatattagtctaactcacaccaaggtttaaaatactttgtagtatctacaaactcatttcatgccggaagaaaactttccatttgaaaaagcagattttggtgcctcatcatatgaaaccttntgcaaaacattccaggaaacata

SEQ ID NO: 258497 - DNA, 418 bp, Glycine max
agctaggatttcctcttattagggaatctatccttcctacgatggagccaaatccagtcccccacattaagaactagctcctttcttcctctattgtctttagttgcatacacctttgtttggttctctatttggttaaccctctcatccagctcctttacaaactttgacctagattccccttctttatgtataaaagaagtgtcaagtgggaggggaattaggtctaaggatgttagaggattgaacctatagacaacctcaaaaggggattgcttggtagttctatgaacccccttgttgtaggcaaattctacatgaggaagatactcatctcaagacatatggttgcctttcagaagagcccttataatggtggataaagacctattcactacctttgtttgcccatcatttg

SEQ ID NO: 258498 - DNA, 484 bp, Glycine max
  unsure (1)..(484): unsure at all n locations
atcaggatatgactcttcacaattgatnttgaatttcaacgtttagatacactggtaatcgattaccaatatcttgtaatcgattacaccattttgaaatcaattggaacattacaaattcagttgaaaacttttgaaatcaaactttgcaactggtaatcgattaccagagagtaaaaactctggtaacttagaaaattgtgaaaaaaactcttttgaaaaacaaaattgtgctatgtttgttttctgaaaaatattntcaatacttcccttgtgaagtcttcttgatttcttctcttgaatcttgaattcatcttctcttgaattntgaaatcaaacttctcttgattcttgaaacatgttgactcaatcttgaaatcattctcttgggccttttgtcatcatctntgttatcaccaaaactacttgaatcaacttgattcatcatcatgaagctngctctctacaactaagtcatcatttt

SEQ ID NO: 258499 - DNA, 437 bp, Glycine max
  unsure (1)..(437): unsure at all n locations
agcttcccttggttcttgggcaaaaaactgaatctgatcttatcaagacaacttgtggcaatcaaatctatcacttatcactcaccttctcacctatttcttgagtgtggcatcaatatccttcccctaaaaaaaagctaaaccaatttctaaatctgaattcttcaaggtgattcatcccattttcgtgtttgtatcaagatatctggcatactccctggagggtggaggatcatagccttggacagctagggcttcagggtcaactaccacttgctcatcaaactcaacttcttcaatgataggttgcacttgatatgtcaagatgaatcttgagtaaggaagatgcatgatgaanaagaaggcgtgatcaaataaaataaagaactcttgaatcaatgggcaaaccatgttgaaaggagtgttntgagtgaaac

SEQ ID NO: 258500 - DNA, 528 bp, Glycine max
  unsure (1)..(528): unsure at all n locations
tgctattatgtgacactatgaaactcagctataattaagaatttcacatatatttgagttccttacattccacccaaagattatgtttactcattntgaggtcttcataatctttgtatgtttgtgcacattctctccataaattatttctctttttgttttgataatcacttaattcattcagatccttcagatctttttgaagatctttcattttattttccaactcctgaaagttcttaagaagagtaactttttccctagcagttgtctcaattntaagatatagcttggactctctttctttaagagttatacaagctccatatgtttgagtggactcatgtagtgaaatatctacttgatcctgaaggatcttctctagttctaaatgatctttggatatatatttgaaatcttttcacaagttcttgtaagcttttaaaagaatagataagttagacaaaagntcatgataatcctttctaagagacttacggtcatcaaagtttacctcatcttcttgat

SEQ ID NO: 258501 - DNA, 444 bp, Glycine max
agcttggacgaataaggtgatgcatctatgaaacacaacaactaacaagtatgaaaattgtaaatatatattggttttagggtttacacacgaatggataaaaataattgtttgtgttttacaaatgcagggttaagtttgcacattgggccttaaagagactactaccgaatagccttggagacctatgtagtgtttgagaagccatgaacaatatgatcactctacaacatattgaaattaaggcatcgtttgagacaactacacatgtggttgggcatgtttttaaagttaccttatacaagaaactatttggcatggtatcaaggtatgtgttaaaccagattgttgctgagttcgagcatgtaaattatgctagcattgatagttctcattatagatatataatgagaactactcacggtcttccatgtgcacgtgagc

SEQ ID NO: 258502 - DNA, 489 bp, Glycine max
  unsure (1)..(489): unsure at all n locations
tccatcaagtggtaatcagagcacaagagcttcaagtaggtgctccttaaacctccattaattnttttgctttaccttctcttccattgttgtttcttcatttttctccatgtatctcctcacatgtctagtgctaaatgttgttaacatgattctttagaatttccaccaattaaaatagctatagaagctagatttaattntctatggttcaaatttcttgttcatgttcttgaaccatgagttgtgttgagtttacgttcctttgagttttgtcttgctatttttctgtggctgaaacctaacacataaaattcttacaaaaatattaaagtagaagaaaacctcacaaatctagagtgacttgttcacctgttgtagctctgtcatagaagtcatgtctagtcatgaaactcgtcacataagaattcttatgctgtgctgaatttattttcttggttctttgctaactcattngtcatgagtgta

SEQ ID NO: 258503 - DNA, 510 bp, Glycine max
  unsure (1)..(510): unsure at all n locations
ttttttctgcatattattaaacttctatattacttanttctcgccgggatgttgttctctgcccggactcaatccctgagctgcacttgaaggttttattgctgataaaattgggaataaaaagatggggtacctaattgaaggaataatagacaaacaattgatctttgattggggtataacactactttctttcttctaagatacaacgagggttcctcatgctcttctttttaaacataggatctccttcgttaagcttccttgtaaaaactcccttgtaaagcttctttgaaaaactttccttgaaaggctgattttattttcaaccccccccgttaataacttaactcacctcctgtggaactttgttaagaaatttctaaggaagctgagtttacctcacatactcctttaatacttaacttacctcctgaaaaaaaactaaaacttacttccaccccctttttgtgtaccttccccgtgactaaacatgaaaattataaaatn

SEQ ID NO: 258504 - DNA, 416 bp, Glycine max
accctgcttcttggacaaaatcttcttttaaggtaaacacaaaatgtgatttgcaagtgaataacatgtgtgaggcattcaacaatgtaataatggagtatagagataagccaattattacactattggagggaatccgattttacataagctctataattgtcaagttaaggactatcctcatcacgtatgatggttcaatctatccaaaagctcagcaaatcattgataaatataaaaaagcatgtgaagcatggcgggcacattggcgtggtgatgttgatttgtctttatttgaggtgtcaaagggcatggaaaaatttgttgtcaatcttaaacaatagacatattatagaaagtgggagttaactagaaattcatgcactcattccataccatgcatgtggatcaatagt

SEQ ID NO: 258505 - DNA, 466 bp, Glycine max
  unsure (1)..(466): unsure at all n locations
agcttcaaccaaggagagatggaccatttcaagtgcttgaaagaatcaatgacaatgcttacaaagttgagctgcccggtgagtataatgttagttccaccttcaatgtctcagacttatctctttttgatgcagatggagaatccgatttgaggacaaatccttctcaagagggagagaatgatgaggacatgaccaagaacaagggcaaggatccacttgaaggacttggaggacctatgacaagggctagaacaaggaaagccaaggaagctcttcaacaagtgttgtccatactatntgaatacaaacccaagtttcaaggagaaaagtccaaggttgtgagttgtatcatggcccacatggaggaggactaaatggcaccactctgtctcaattttagagtggttaattngtctaaataatggcccaatccttgtaaagttggcagaccaaaaatatgttt

SEQ ID NO: 258506 - DNA, 421 bp, Glycine max
  unsure (1)..(421): unsure at all n locations
cttacaacagcaagccccaagagactcagcataaggatgcacagaccaaagttgcgtatgtaaaaaaattgtatgaccaagtgaaggtgcaaattgcaaagaagaatgaaagctatgccaagcaagcccaaaagaaaaggaaggaagtggtacttgaacccggtgatgatcttggacatttgaggacaaatgttttccaagaaggagggaatgatgagaatcatgaaacaggccaaatacagtctaaaggcccaagtggagaaggacgaangcccaagtggagaaggacaaagcccccgagtggagaaggatgaangcccaagtggagaaggatgaangcccanaggcagagacactatcaagactattaattgatgctgaaggccaagaataattngaaggcccataataaatatgttct

SEQ ID NO: 258507 - DNA, 433 bp, Glycine max
  unsure (1)..(433): unsure at all n locations
agctngntcttgattntnttgaagttctttaaaaaccttagaacaatatacttgtccttcatttaattgtctttgggcttggcgaccacgatcaacaaagtattttcgacacctactatatgtggattttcccaaagctgttatcggtaggttgcgacaatccttcaataccttatcaacacattctgagaggttggtcgtcatgtgaccatatctacatccttctttatcataagtcatgctccattnttcctttgaaatgcgatcaatccatgtacatatggctggactcaatngactaaacttttctaaattatggtcaaaggtatgtttgcaaggagtgtatgctgcatcaaaagggtttgttagcaacaacaatctgaagtatatgtcaaacataactaacatcatattataaaataaatcttaccca

SEQ ID NO: 258508 - DNA, 450 bp, Glycine max
  unsure (1)..(450): unsure at all n locations
taaccaccaagtagaaactatacctcacagtttaaccacttggcagaagtaacaaggcttaaccatcaagagcagaagccaaaacaatgcttaacaactcaagacagaagtaaaacaacaatccaatgcttaaccatccatgacaaaagctcaaacaatgcttaatcaccatggacaaaagatcacatcaacataaagcaagaagaacataaaatatgtctttagtgaggacttttcacaaatactttgtgaagtagcagcaaccaaggcttaaccatccatgatagaaactaaaaacaatacttaaccaccatgaacagaagcaaacaaatgaacaatgcttaacaatcacacatggtagaaactaaaatcatcaaaacaagcctaanaggctgaanacaataagccaacacgggccaaatatcaacanaataatgaaaaagatattca

SEQ ID NO: 258509 - DNA, 554 bp, Glycine max
  unsure (1)..(554): unsure at all n locations
tctcccttgtaccgctcgttactctttccntanttcatcattaanntcttntnttttnnnnnnngggcggcgcgcgtggtgtgncttggaaccttttataaggagacctataaaccacacagcgccgctggtacccgcaactgtgagagaagtgattttctacacacacaatcgaaaggctgagcgctcattttctattcttaacacaaaatactcataacgctccacaataaccataaatagcagaagattgatacacttatacaaggtgtatacacaaaagatagtcgtttttactgactaacagtcatatgctcgctttcaacacttcaatggagtcgataagactattaaagcttctttgccttcaagacaatcaatgcgctggaccagatacaaaaatggtcgatgccctttggaaagatcttggtttcatgaaacattatagatatttgcttttagaaacaaggtgggggagcaaacaaaacgcattgcatttgaaactaatgcttggaaaaaaaaattttttcttctaacaaaagatgtgatgcaac

SEQ ID NO: 258510 - DNA, 367 bp, Glycine max
  unsure (1)..(367): unsure at all n locations
agcttcgaaatgaatgttgaagctctgagtaaattcaaacgacaatatacttttactcagatgtccgattgagtcctgtaatatatcgaaaagctcgaaattgaatgtagaagctctgagcaaattcaaacaacaataactttttactcggatgtctgattgagtcccgtaatgtatcgaaatgctcgaaatggaataccgaagccctgagcaaattcaaatgacaataactttttactcggatgtctgattgagtcccgtaatatatcgagatgctcgaaatggaataccgaagccctgagcaaattcaaacgacagtaactntttactcggatgtctgattgagtcccgtaatatatcgaaaagc

SEQ ID NO: 258511 - DNA, 137 bp, Glycine max
  unsure (1)..(137): unsure at all n locations
tcggtattccatntcgagcgttcggatatattacgggactcaatcgtacatccgagtaaaaagttactgtcgtgtgaatctgcttagagcttcggcattccatttcgagcgttcggatatattactggactcaatca

SEQ ID NO: 258512 - DNA, 406 bp, Glycine max
  unsure (1)..(406): unsure at all n locations
agcttacaagatatgcactcatagcccctttatatatgaacagagtgatagggtccaaaagaacattagatcttggcctaccataaggaagtacgtgaatatcttttcttgcaagcactctgatgatgtttgtggtaacaaagcttgccatacctataaaagaggagacgatatcttgaattgtttgatagcaaaacaacaatgcttatctcggcgggtgaggtcggctacatggataacatgatgtcattttgttcggttaaaaattacagtctcaaaaatattatttagtataagatctctttttgacaacttgtttgcaaagtctttcttgatgccaattaggctcgcaatggctcgttattcttttattgctntgtatgggggatcttcttgtatgtatcat

SEQ ID NO: 258513 - DNA, 537 bp, Glycine max
  unsure (1)..(537): unsure at all n locations
tgcctccgcgtgtctctacatcgacctcagatactaagctgccctgcaagtgtgcctcaggctgtggacgctgataggcttcaagctactgttggtgattcagagtggctgcaaccctgtgttgaagcaaatgtcttctgagttcttgaaaatgtgcagtctgaattactcaactagcatcttggtttccaagtgtatgctcaccacaacaatacaatgaaagactagagagatattgttatagcttcatcatattcagtcacaatggattcatatgtttatgaattntatattattccctctcttatgtctatttataaatgttgagaaactgcaaagaaattcaacgctcatgatatatatatatatatatatatatatatatatatatctatatatatatatatatatanccacatatatatctatctatattagatagagatatagatatatataccgagnaccgattgcccaacgaattcttgtatgaatcgcgcttgtgagtattancgataaatattctatagtgccccg

SEQ ID NO: 258514 - DNA, 458 bp, Glycine max
  unsure (1)..(458): unsure at all n locations
agcttgtagagntaagtatcgtatcggtttaatcgattaccgatatctcataatctattacactattgtttgagacaatgactgatttatttaggagtctttgctttaatcgattaccaagtggattaatcaattacttctatctcgttcaagtgttctggggtgaacaagaacactttaatcaattacttaggttatctaatcgattacattgttcttgagttgttttctagatgttggaagaacattttaatcgattactttgtgaaaataattgattactttatagatctaatcgattacagacggttataactgttttctctataaataaccatcttgtgttcacatctacacatcaagagatcattacagaatactcaatacatctcaaanacaactttctagccttagaataagcaagatttcgtgctttcattagtggataagagaagaga

SEQ ID NO: 258515 - DNA, 392 bp, Glycine max
  unsure (1)..(392): unsure at all n locations
cacctttgccaaggccactaacaacttcaccagtcaccagcacggacttcattntttttctctatgtcttcttattcctcgctctcttcgatgacaaacagagcagagcagagcaacctttttcaacaggagaaaatggtttctatgttctagttttagctttttggtttaccttttggcttttgcattcaaagagagagcacaaacaacacagaatcttgggtttgcagcgaacatatgcagagttgcaaagaagcagagtttgaagaaacaggagggaaagtagaatggaatggcaaccaatgctaccattggttggctntatatactaagtattctggctctgattccaaggatgagacatgatacagatgagagagagagaaagaaag

SEQ ID NO: 258516 - DNA, 119 bp, Glycine max
gactgagcacacatcgaattatcagaaaccgtacatagtgctctcttgataatacctgtataagacaaaatatctccttttctattgaaaaacaactctccccttcctaaaaatacttt

SEQ ID NO: 258517 - DNA, 432 bp, Glycine max
  unsure (1)..(432): unsure at all n locations
atcctacagcaatctcaccaaaccaagttggtgcatataattggggatggaagctccacacaagtgcaagatcatgcaatcctacaaggaagatagcgatcttaacaacctttcccaatatagaaactagaaagaaagaaagaaatgaaaacaatcttgtccttttggatacagacttttattcatagcattgcatgggcatcttcactaggcaaacattaaaaactataaaatggatgaccagctcaaaaaattatggcagcagaggaatgtagaacatctagagatgaacacaagttgtctggtcaagtagaacctaatgaaatgatgctttccaatactaaggttaaaactttccaaagtaccttcccacaattaatgctgaanaggtggtaaccgtagatcaatntactcataaaccagcatgaaaga

SEQ ID NO: 258518 - DNA, 444 bp, Glycine max
  unsure (1)..(444): unsure at all n locations
agctntagtcaaacagaataatccgaaaatgtcaaagaattgggtgttgaanaagcataacaagactttntgtgattggtttaaagatacaatctttgcagatgagaatgattcagaaacattaagaaagctagcagatgggcctaaaagaaatgttataacctggcaaggatacgacataaacaagtattcattttacacaaaagcacaagatgacaaaagtacaatgcagaacagcggggtcaccctaaggcctgaatctcaacactttgcaagtgtcaatgacgccaatccctgtgtagcttccatcccttactttgggttcattgatgaaatttgngagcttaactatgtgaaatttacggtatgtgttttcaaatgtaaatgggttgacagcaacaccggtgtgcgcaccgatgatatanngattatgttggtagacct

SEQ ID NO: 258519 - DNA, 328 bp, Glycine max
ctgcatgtcaagctttgcacaagacctatgggaagaattgggatctagctatgatagatgtttctattgaagccattgcagccctcactcagtattacgatcagccactaagatgctttatgtttggggactctcagttagtaccaaccgtggaggagtttgaagagatcttgggatgcctgctacgaggaagaaaaccatatcttttttctgggttctatccttccatggcgagaatagccaaggtagtcaaaatctcggtgcaagaattggaccgagtaaagcaaaatagaaatggcgtggtcggaataccgacgaagcacttgga

SEQ ID NO: 258520 - DNA, 453 bp, Glycine max
  unsure (1)..(453): unsure at all n locations
agcttcgcgcacactccagacatcttctcaaagatcccaacggttaggtagtggacaagtgtcttgtgaagttgcataccaaatttcgagaagatccaacggttaacgaaggctgggaagcgtttttaccgagacagctcatgtagcttcctcaagaagcttcattaagaggcttcctcaagaagcttcctcaagaagcttcctcgtggcttctttgagaagctntctcaagaggcttctttgagaagctagatccttatctacccacacccctctattaactaaattaacctccttgaaaataattacggataaaataacataacaaatacaatcaaacatcaaacataattattaatatatatatatatatatatatatatatatatatatatatatatcagggtgttacaggaccaatacaaaacaatgtcattgaagatgagctcaaac

SEQ ID NO: 258521 - DNA, 454 bp, Glycine max
  unsure (1)..(454): unsure at all n locations
tatgagaattccaagctntataagcaaanagtaaaaatttatcatgacaaanagctatcaaaaaggaattntccacctggtcaataggtattgttatttaattctcgattaagattgtttccaggtaagatgaaatccaagtggtttggaccattcatcatcaaagaatttatgccacatgaagcagtgatactagaggatccaaccaccaaaaggacatggactatgaatggtagtaggatcaaacactacctatgtggagattttgagaggataatcattgttgtccatctacaagagacttgaaccacaacaaagatgttcagctagaaagacgttaaagaagcgctcctaggaggcaacctagtatttctaaaccttactctttaattntctttttgttaaatttcatatntgtgttatttaaatattttttggttaaaatatgtctaaa

SEQ ID NO: 258522 - DNA, 370 bp, Glycine max
  unsure (1)..(370): unsure at all n locations
acatttggaaagttagttntaccagagggacattactcttaaagcaaaaatggcatataacctcctcccatcaatgtaaatttagggcaagcttatgcgcatatttccttacaaacgttctcttgcacaagacattctatttaccgaagaaaaatgcacccatatacaatcaaggcagcttcggtacctagattatttacacgtacttccaaggtgtatattgtacttacatcacacacactctcttggctaaattcacatacatgcatactcaaagcattttgtggtaccacaaaatggacatgtgcacatcttgggatttgtaataactatacatacacaaacttgatgatgaatctngactatctac

SEQ ID NO: 258523 - DNA, 497 bp, Glycine max
  unsure (1)..(497): unsure at all n locations
tcaagagaagggcaaactcncttccaaaatctgatgtcatgcttaaatatgtnggcttgttcatgctcgtgcgcttagtgcaattctgaactgcttagcgcgcattagtgaatttcggcttagcgcggcttttctcactcagcggatggattgaagcagtgcgcttagcaggatgacccttcgctcaaggaacatgcacaactcatccttcttccagattcttcctcgcgcttagccgacgattattgcgctcagcggttggctcgctaagccaatttgttggcttagcgagagggtgaaaatcaacacttcaaaacttgcctaattaacctgaaattaagagaaaatgattattaaacacacaaaatggaagtactaagtatttcttacctatctntactcanaagaagatataacactacagaataaccatgaattggagggagttgatacnaattacacaacgtntatacacaacaagtagtcgtattcatcga

SEQ ID NO: 258524 - DNA, 421 bp, Glycine max
tgggcttatcaaaagctgattcagctggaagctctaacacctgcattagcgagggccaagttaggggcacccatgggcaagaggcttataactgttttctggagctctgaaagttctaggtaccatcttatcaacatacagtgttccatccaggcgatcacactcatgttgtaaaatccgggcctgccaaccagttgcatttattttgatgggttcaccgtaacgatcaaaacctgcaacctcaacatcgaggtaccgctctaccacagcactatatccaggaacactgcacaatgttattaaagatgagaatgtttcttgacacattattatcacataaacacaaatataaagcgatccagagctggtatgctataaattatgacaacaccgctgaatagctgctaccttaacaataatt

SEQ ID NO: 258525 - DNA, 377 bp, Glycine max
  unsure (1)..(377): unsure at all n locations
tgctaagcgcgcnttttcatcaatccagaattactttcttctttgttggtacaccaaaactctacccaaatacaatttaaactaatttaacttcaatgaactaaaaaaaaattaaaaatattaatttataacttattgagaacaaattaagcaataaatgaagaanattaagataattgttgtacaaattcaataaaaaaaaaactaaacatacacaacaattatcttctcccaactttggccattataattcgtaacatgattatttcattatgtaatgtggtaattaatttgttaacaatagattctaggttaattagagacaaagtaaaattataaatgttcctgaaatttcttttctaaccataactctcatg

SEQ ID NO: 258526 - DNA, 388 bp, Glycine max
agctagagctctccctttctctctatattatatatttactatccattctttctttcacccctcagttgtgaagccctcaatggccatgagtggataataccctagtaagggcctggcgggcctaaaaagccaacgatgtatggtgcacttcaagagttatcaatgcagagaggattccttccaggattttattggaacaagtggccttggaataattaagaggggggggggggatgtaatcacaactgaatgagctgagtcagcacattcagatattcagtaaggaaaagcagttaacaatagttgctccttcctctgtataaatacctatgtaataaatgaacgaaaatcattttctctttctcttaatttgtataaacaattctct

SEQ ID NO: 258527 - DNA, 380 bp, Glycine max
  unsure (1)..(380): unsure at all n locations
agtgcanataacatctatgaatggaatatagatgcccaaatggagtacaatatcatgaatacactccaacatatgactatggtagccatgacatactagacatcccatgagtgttctaaggaaacaatcatcgatatcctagtggcaggatttttcggccaattaaaaggatggtggaataattatctcactaatgatgaaaaataaaaaatttacagtgcagtcaaaacggatctcaatggaaaagtcattaccaatgacgataataaagagattcttgacactgttaatacacttatttttacaatagcccaacactctattggtgacccatccctttggaaggataggtccgcgaaattattatcaaatcttaattg

SEQ ID NO: 258528 - DNA, 462 bp, Glycine max
  unsure (1)..(462): unsure at all n locations
agctntatcttcttcataagggattcaagctcatgctcgagaagccttccaggtcaagttataggatatatggttagaggaacatcttcatctttgtcaagcagtaactccttgcctttgtgtaacatttagccttttggaacaaaacaagcttatctattgctattcagaactaagtgtttggagtggctaagcaagaaaattgtgatcctagcatgaaaggcagacaagtgttgatcctttctattcttgtcaaaaattctgtcttgatatggtttcttatcttctgtgtaggtagataacttcattcttagcttaagttcatagtttgactgctcatagtctttgagactctttctctctttatgtgccttcagattgatgtctgtagtttggaaggtctctccaaacaaagtttgatcccaaggaagaacaaaattgacggaacacaggtgactcatc

SEQ ID NO: 258529 - DNA, 194 bp, Glycine max
  unsure (1)..(194): unsure at all n locations
cgttcatgtgtcctccatcttcgagtttgttgccatgcgtagtgattgcttaaggcaattctccattctcaaccctttntcggagccccatgaatagcgttctcgttcatgtgtcttccaccttctagtttggagccatgcgcagagattgcttagtgcaattcttcattctgaacccttttttctgaacccca

SEQ ID NO: 258530 - DNA, 200 bp, Glycine max
gaaactgaaattgttggcaaccaaaagtcacccccaacagccaacaagtcagccaccatttggtctcccaaaaggctgatgcctaggttgccaattgggcccttattacaacttgaactaaagcccttttagttgattaacccaaaacatatttttggtcagccaactttacaaggattgggccattatttagacaaact

SEQ ID NO: 258531 - DNA, 407 bp, Glycine max
  unsure (1)..(407): unsure at all n locations
ctcaagcttgagtaaataaaacgacaataactntttactcggatgtccgattgagtcccgtaatatatcgagacgctcgtaattganaacagaaactctgagcatattcgaacgacaataacttttgactcagatgtccgcttgtgtcccttagtatatcgagacgctcgtaatagaaaacggaagctctaagaaaaatcaaacgacaataactnttaactcggatgttggatagagccccgtaatatatcgagacgctcgaaattgaaaacagaagctctgagcaaattcaaacgacaataacttttgattcggatgtctgattgagtcccataatatgtcgagacgctcgaaattgaaaacagaagctctgagcaaaattaaacgacaataactttttactcgga

SEQ ID NO: 258532 - DNA, 451 bp, Glycine max
agcttccatcaagaagatagagattagctacacatacctctctaatagctaagctcacctccttgagatgaaaagctagatcttagctacacaccccctataatagctaagctcacccccatgacaaaaaaacatgaaaatacaaaaaaaaagtctttactacaaagactactcaaaatgccccgaaatacaaggctaaaaccctatactactagaatggccaaaatacatggcccaaacgaaggaaaaacctattctaatatatacaaaggtaagcgggctcatacttagcccatgggctcaaaatataccctaaggctcatgagaaccctagggccttcccttggatctttagcccaatctacttggagtcttctacccaatgcccttgcgggataggattacatcatacttgccccaagaaccatctaaagatgtattgtcggaagat

SEQ ID NO: 258533 - DNA, 276 bp, Glycine max
taactggagggcgacttatgaatatgattaatattttctgtgcattattagatggaaacatcatctgttatagtggtacaataatgacgtgttacatgctattcttattatttgctagtagaagatgctaaaatcgattagaggattgttaaaaataatttgtcaagctattaatagatagaaaatgtgcgtgtaaaaatattgatttggtcaaaattaaaaaggtatttgtaatattaaatcatgaacttccatttaaacatgtattgtcttagg

SEQ ID NO: 258534 - DNA, 464 bp, Glycine max
  unsure (1)..(464): unsure at all n locations
agcttgctgcccagctcgcccaggcgagcaaggttgcttcctccagaagcaacagccttctggtggaatcttctggagcgcccaagtgggcctagttgctatttgcacccccatttttactaaatacacccccctgcccctttttttgtaattctttttccgtaacgttacgaaactttacgaatttcgtaaggatacttattttccttctgcaaggttacgaatccttacggattatgtatttactcttttttagctttcgaagaagttacggaaacccacagattgtgcaaaaacacctctttttgacttccgccacattacggaatttcacggatcgcacaagcctgcttccttttgatttctgacacgtctctagacttcatttattgtgcaacanaggacgccaagtatctcanagcggctaaccaaaggttgcatgtcatcaagtaataatccccgga

SEQ ID NO: 258535 - DNA, 486 bp, Glycine max
  unsure (1)..(486): unsure at all n locations
taaaccacagcaacacaaaatctatgtgtccaaaacccctcaattcaatacgttntctaggtttgaaaagtgaaatctagaatggggtaaatttgaagcaaactctcacctgacacaagtccataacatcaatctaaactctctcaaactgaatttacacctaacattccaccaaatcaaaatttgactcttcaacacccaattttgccctagaaatggctcttggttcactntggtcatntgcttttctctctagctcagcctaacctttctcacatgttctaaatgacatttcaagctagtattaactcactttaacctccatgtaccacagaattcagacttagtccttcaactctcaagcctcactctntttccactcacaacatcacattctcactttctaaccctaggttaattctacccttcatctctaacagagtctcatcagcaatttcagcatataaacatcacagacatcatcac

SEQ ID NO: 258536 - DNA, 441 bp, Glycine max
agcttgcttctcaatctccctcttgttgatgatgacaactctgaaatcaagaaacacatacacattctttttcctagtcgatcactcacttgattcttcatattctccccctttgttttctagtttaaccttctcttgaaattaagatatttaattatgtgaattcttgatttaatccctattttctctcacccattggcatcaacaaaaagccaaagtgcgtaagacataaaaacatacataaatgattaatcactcataagacattcattgaaaaatttaaaataatcatgaagcaagaaacatgaatagaccaaatatgagaaccacatagtcatataacataattcataattgttcagtcatactatgcaaatataagatatactacatgttcaaatgtcataataatatagccaaatacacgactagaaatcaaag

SEQ ID NO: 258537 - DNA, 482 bp, Glycine max
  unsure (1)..(482): unsure at all n locations
agaaattcatgaaggtgctctaatgtctgaaatctatgggattaagatggtcattgaccaatccctattntatgatttaacaaaatttcctagtgaaggtgtaccttttgagggtgcactgattgatgaatggaaattcgatttctctgtgcatgatgcccgccggttggtttgcaccaaccaagcggatatgaccggaaggcttcttgccggttcattggcttttgaaagtcgcatcctccattaccttatagtttgcattntgcttcctagatcttcaaaccttgcctaggtttctaaagaagatctcattgtcatgtgggcctttcataaaggtttacaaatcgattgggcacatcttggtagatattgcatgcataaggcatngcgattgaatgccacattgccttatnctcatctnagtactctntttcttcaacacttcaacatccctcttgattctgaaccctatgttcaaatca

SEQ ID NO: 258538 - DNA, 443 bp, Glycine max
  unsure (1)..(443): unsure at all n locations
agcttggttagatatttaaatgaagtagaaaaaagtgagaaaaatataaatattataggtgataagaagaaaaacacagaaagaaatgatcagtattaataaagtattttaaaaaaataaaatatctaaaaatcattactcattaggtattgccctttaactatatattgaaattcaacactttnttggtgcttacggtgcacttgttgtgcttattaaacagaagaattaagaaagtatttctttttctaggctcatacttgctaaaaaaatcaagaaattaaaaaatatttaataagaagtatacatatttaataaattaatttaatttaaaacataaaattagttgttttttattttctatttgaattattgacaagtaaactaacacgtagtagacgatagtcaatgctgtgaggaagaagacgtgtgtggacaacctt

SEQ ID NO: 258539 - DNA, 499 bp, Glycine max
  unsure (1)..(499): unsure at all n locations
cgcncacgcgctgtccatcattagcgacctatgatactaagctatacctaagtggtctgataaattagacccattactggtttaattgtacggaaaaaatacggggggaagtgttttcaatcacaaaaattttattaatttggaggacatgggacacaattgccaaataattaccaaaaatcatgtttaaacaaagaggaatggcacttcgtttataaattaggagaaaggagaaaaactgcaatnggatgaataaatggcaaagtgcaactgacccttttggcagcttacaaattctcatcatctgccatcatgtgtcttgctccaatgttgatacatggctcatgatcagcaaccaatgtcatctacccccatgaactctcttttagaagtttccagtacctgacataaatgttcgatgtcagtggctttgcttggtgacatgtgcatcaaatctgagcttgggcttacgattgataatacctgagatgaacattct

SEQ ID NO: 258540 - DNA, 452 bp, Glycine max
  unsure (1)..(452): unsure at all n locations
agctntcgcaaggcggngatgttcatgagcagatcagttcgttgccgtgtagtcatgatctacataatgtcagatcatattactttgtatgtatgacaaaaatgaaaccaagatttttggacctctcatttatagttatacaaggttgcatacctccatgcttgttccatccttagctatctgttgtgatggagcaaattcaacaatataatcagttacagatagaagccactcaatttcttttctccacctggcctttctttctgaggacattggctccagctttgattgttctccgaaaacagatgctgcattgaatcaggaaacaaattattgaatggaaatttcattgagacttgagagatcacatctcagttagtcacagttataatatgcatgtgctttgaattgaattgagatgactacactatctattaattntatagaaatca

SEQ ID NO: 258541 - DNA, 456 bp, Glycine max
  unsure (1)..(456): unsure at all n locations
ctaagctctactgtatagttctctcttaaaatttcagtctttcggtttgtgtgtagcttaatgcaggtctttccacccaattgctgcttaccttatttaatgtgaatggagttctncattacggaattgcacggaatgcaaatcctaaactccagattggagatgttactattcctcaatattgggcccacacaggactttggcattggcaggtactatgttggataatatattaatctttatttgctttttctgaccatttcatcctctctatatacagtaacttgtgacaacaaaggaagttgaaattaactttttttttctctatacacatgctcttatataatttcgatctagaattatatganaaagaagaaatttatatccattctaatggtacatgactttaaaaccaatcactatatatatgccatacgtgtangaaccattatacta

SEQ ID NO: 258542 - DNA, 464 bp, Glycine max
  unsure (1)..(464): unsure at all n locations
agcttcttagtttcagatgatgctgatgagtttgtagctacctcatgtactcctctaatgactatagcatcatttctggcgctaaactgctgggagttggaaaccatcttctcaattaaatttctggctttagcaagagtcatgtctccaagggctccaccactggcagcatctatcatacttctctccatattactgagtccttcataaaaatattggagaagaagctgctccgaaatctgatggtgagggcaactggcacataattttataaatctctcccagtattcatataggctctctccactgagttgtctaatacctgagatatccttcctgatggtcgtggtcctggaagcaggaaattntttttctaagaatactcccttaaggtcatcccaactgatgatggaccttggagcaaggtaatacaaccagtcttttgccactccctctaaagaatg

SEQ ID NO: 258543 - DNA, 307 bp, Glycine max
  unsure (1)..(307): unsure at all n locations
gaccacagagtggtacctggagatatgtcgcggnggtcaggagaccttgnggacgtcaggtggggtgctattgcccaaaaccaagcttgaccaatcccgacccaacccgggcatagtcggtcagtgagaacctgtgatgtacctaagcaggcgagctcctggcagtcaacagataaaaggaaaacaagaccacaaancanggaggcttgtggtggctggccagctcgtgaatttgtgtaatatgtggattgtggcctctggtaatcgattaccaacggtgagtaatcgattacaaggcttaaaattg

SEQ ID NO: 258544 - DNA, 456 bp, Glycine max
  unsure (1)..(456): unsure at all n locations
agctatanaacctagtcgacattcttttcgttgaanaaagtatttgcatagctgtaatgtattcaatttttccacctaacaatattgcaggttgacaaaaagagtaatttagaaagtactcactcgaaagtgtctagcaagatagattctcaaaattaggataggacaataaatttgtccaaatatttataaaaaaaaaatgaattaaaattttctcctaagttagaattaacttgtacacttatttttttttctcatttaatctttctaaaaactcaactatgcacataagttgatttttgtttccgatagaaattcaattcatttcacttttattatatttccttttcctataaatatatgtggagaaatttatttaaacatcacctcgatattttcagcttttagtttcctccttgttgtattcataacaattacaaaggaaaactatgaact

SEQ ID NO: 258545 - DNA, 468 bp, Glycine max
  unsure (1)..(468): unsure at all n locations
tatgctgcanacatctacaacagacctcctcaacctcagcagcanaatcagccacaacagaataattatgacctctccagcaactagtacaatcccgggtggaggaatcatcccaaccttagatggtcgaatccttcataacagcagcaacaacaacaacaaccttattttcagaatgctgctgacccaagcagaccatacgttcctccaccaatccagcaacaacaacagcaacagcccagaaacaacaaacagttgaggctcctccgcgaccttcccttgaagaacttgtgaggcaaatgactatgcaaaacatgcagtttcaacaagagaccaaagctntcattcagagcttaactaattagatgagacaattggctacataattaaatcaacaacagtcctagaattctgatagattaccttctcaatctgtccagaatcccacaaatgtgagtgtcattacat

SEQ ID NO: 258546 - DNA, 457 bp, Glycine max
  unsure (1)..(457): unsure at all n locations
agcttaggctaaactntcataagctatttaagctaagtctagtccaacaagaaggatntgaggatgaagcttagtttaagttagtctaaacctaggagggctgtctatattgagcctagtccaacaatagggatctgaggaagaagcttggattgattcattccaattggggatcgaggtttagtaatttaggctacaacatagaacacaaaagcatgattgattagagaaacatccttatatgcatcagctggtctgctagaaagacccaacacttctacctattgctatcaattttacttacttacatttttactggttttatcctagacatagtttaattctactttaaaccatcaattatcaatgtttctttcaacaatgccttatttctgaatttaacccagtcttagactagtttcattgagttcgatactcagattcatcccatttaatt

SEQ ID NO: 258547 - DNA, 482 bp, Glycine max
  unsure (1)..(482): unsure at all n locations
ttctccctattttcgtataaataaggggagaggtgaagggaaaaaatgttcagcccttctggtatttcgaggtcacttgaaattagtgaaaaaaattgttttcgtgaagaaaatccaagttgaggcgcttccgtaatgtttccgtgggtgatttcgcaatgattttcaaccgttcttcgacgttctttgtcgttcttcggtcttcaaccggtaagttcccgaaatcgaacttttcaatatattttcgtttcatttactttccgtacccccttttgacgtgctttagtcattttctcgcctaatcaaaaaataaaataaatttccactgatcacttgaattgtaacatccgttaatttctgttaaaatgaaatccgaccgttcggtcatgccataaccacgttggaaaccaataagaggtaaaataataatataataataaaaaatatattcttagtaaataaaacaaanaaatcaatcggac

SEQ ID NO: 258548 - DNA, 387 bp, Glycine max
agcctcgcctcattgatgttctctttcttttttgttaatatcgctctctaatgaatcatgtaactcaaacaaagttcacgagaggctaatgtaaattactccgaaacttatgaaattatcatgtgtgctactccaaatgtcactcaatgcaccttatttccttccctttctcctcctcctcctccacaaatagttcacatttgccaaatacttaaataactttcactaattcaattcatcaaaattgtccactgcaagcattctagttctctctcagaactaattcccgaaatattgaaccacgaaaaaaaaaaaacacctctgaacatattgctaagtgctaacaatcatccacaagatggtttataatattatcatgcattaaat

SEQ ID NO: 258549 - DNA, 486 bp, Glycine max
  unsure (1)..(486): unsure at all n locations
cgtattntatttattntaatcccaggaacatactccattgtcagaatctgcattggaaaaatagttaaattgtagataaatatgaaagatatcagaagtaacaatgggaaagatgcataactgctatattattatctatatgaaaactgaaggctaaacctgtggtgtggtataatcccagatgattgtagggactttcacataatccaagttttcaaagttacttgcaaatagttctgcattagcagcttccttggtgtaatcaatctcctgaaaattgcaatacatgttacattaacaggattagataaagttgaggatgtgaagaaaacacatganaacatcattctgaaacatgaacaagatccacaaattaacccctccaaacctgcaaatttgcttaagagntcctttatacattggctaacctataatacttgaaaagcaataatgttgttcaacgcttagacaacgactgatgacata

SEQ ID NO: 258550 - DNA, 392 bp, Glycine max
agcttgaaacgaggtcaggaagctagggaagcctctggtaatcgattaccaaggggtgtaatcgattaccaggcttaaaaagggaactgggagatggtggaagcctctggtaatcgattaccagcctgtgtaatcgattacacagaggaatgggtcactggtaatcgattaccaggcatgtgtaatcgattacacagtgcattattgcatatttcatgttctgagactgtgtaattcaagtttagcctctggtaatcgattaccaaggctgtgtaatcgattaccagagatgaaaagccttaagataccccttttaatgtcatgtagtggttatgagatgcattgtgcggcggcatagttagattcttgtgaaagagtctacccctttcttt

SEQ ID NO: 258551 - DNA, 386 bp, Glycine max
  unsure (1)..(386): unsure at all n locations
tccttaagaagattcctaaagaagctagagcttagctacacatacctctctaatagctaagctcacctccttaagatgagaagctagagcttagctacacaccccgtataatagctaagctcactcccatgacaaaaaacatgaaaataacaaaaaaagtccttattacaaagacaactcanaatgccccgaaatacaaggctaaaaccctatactactagaatggccaaaatacaaggcccaaatgaaggaaaaacctattctaatatttacaaagatatgcgggctcatacttagcccatgggctcgaaatctaccctaaggctcatgagaaccctagggccttttcttggatctctagcccaatctacttggagacttctagc

SEQ ID NO: 258552 - DNA, 452 bp, Glycine max
  unsure (1)..(452): unsure at all n locations
agctagtcaaaactcagggcaaacacatcctcggtccaaggctcgacaaacctaaagttcacccttggtgagccctttctgtttctaagttccatcttcaaaggaactcgaggtacacaaggtctgtccttgacgatcttctttattcctagtttttatctgtctaggaatacgagtatatataaaacccaaggtctgcccttggtacagattcctccaaaacccaaggtccacccttggtacgtactcctgtaaaacccaaggcatcccctaggtccactcactcgcagcaaccatgacgaccacaatcaaaggtctaagttcaacaacacaaactaccaccaaactatttggcaaggcctttcaatcaggtggaagtcatacttgctcctcanaaccatcagagaagaagcttcgcaagtcaaaacgacccatcaccaaaatgagtgaca

SEQ ID NO: 258553 - DNA, 390 bp, Glycine max
  unsure (1)..(390): unsure at all n locations
tgagaaaataacttttactatcaaagttgcttagtctatcantttggtagtatttcacgctgacatatactaactttcttcccaccctaacaacactatcttgttcacatcaatgatatcatcacctgggtctaatctgagaaagcctattcttccatattgcgtgaagaatcatatgaaacaagtcatacttaacaggaactttgtgccacangaagtgctgctgaaccttctttactcccaaatgcagtgccaggtacttctcttctgggatngagagaagtatgtctctgagacttgggacatccctttcacgaacaaacagggaaaatgcctnccacttcaatacctcanataaaggaggcacantaatatctgatatgataactg

SEQ ID NO: 258554 - DNA, 403 bp, Glycine max
agcttgagataaggaagtgttgaagggtgaaacttcctgcttttattgttgaccacagagtggtacctggagatatgtcgcgggggtcaggagaccttggggacgtcaggtggggtgctattgcccaaaaccaagcttgaccaatcccgacccaacccgggcatagtcggtcagtgagaacctgtgatgtacctaagcaggcgagctcctggcagtcaacagataaaaggaacaaagaccacaaagcaaggaggcttgtggtggctggccagctgtgaaacttgattgatatgtgagatatggtctttggtaatcgattaccaacggtgggtaatcgattacaaggcttaaaaatgaagacagggggctaagatggtctctggtaatcgatttaccagggatg

SEQ ID NO: 258555 - DNA, 487 bp, Glycine max
  unsure (1)..(487): unsure at all n locations
taagataccacctaaggcaaagattttacctggagactcatcaaagactgcttaccaacgaagctgaacctaagagggagacaagtggagataactgacccaatgtgtccgctttgtaataattccgaggaggatgcagcacacctcttcttcagctgcagcaaggtcctccccttgtggtgggagtcactttcatgggttaagtcagtgagtgctttccccaaagaacccaaataccattttatgcagcatactatatcgaacgctacacgatcaaaggatatgagatggagctgctggtggatagccctcacaaggaccatatggcaacacagaaacaagctgttatttgataatcaaactnttaacgcaaccaagctgatggatgaagcacttcttcttttatggtcttggcttacagcaatggaaaaagaatttgatacacatttcaatcagtggtcctctaatctggcagatgcctttatgt

SEQ ID NO: 258556 - DNA, 434 bp, Glycine max
  unsure (1)..(434): unsure at all n locations
agcttcggacaactcanagctatcctagagatataatcatcggtaacacgaggacagcttctgattaacaacacctcaagggttgcgcatctgaaatgcttagacaagtatacacaaagaagcttaatgctccaatgctatgacttattcacaatggaaggcacaaaccccgcattttacagacaaattaaaatattggagtttcagaatcagagttctaatataaaagaaaaatcatagcatactcttgaaatctgaaaagcaatcagaacgaattatggcatgtttggatgcaccttaaatgattcaatattacatgaaaatatcaactaatgtaattataagtataggtaacatttagttcctagttgaagaattgattctcgtccaaaattgattctgagctgaaacaacattttgatactaacatgctt

SEQ ID NO: 258557 - DNA, 420 bp, Glycine max
aagatgatgctttaatggaggataagaatgagagaacgggggagcacgaaattgaaagaataaaagagggagagaagtggaactttgaaatgtgtctcataagactctcattcatcaaaggtacaacaagggttacacatgctgttatttataaactaggtagcttccttgagaagcttatatgagaaaactttcttgagaagcttctttgataaaacttccttgagaagctagagcttagctacacacacccctctcataactaagctcacctccttgagaagcttccttaagaagatgtctaaagaagctagagcttagctacacatacctgtctaatagcttagctcacgtccttgagatgagaagctagaactcagctacacaccccctataatagttaagctcacacccatgaca

SEQ ID NO: 258558 - DNA, 509 bp, Glycine max
  unsure (1)..(509): unsure at all n locations
tactaagcttaacaactntaacacgtacctgctagctgntattgcctgtagtgttngaatacaggttttaatacatggtttagacatatacatgtatatataaaaagtagtaacaatgtgctttacctgtacttgatataatgaaacagcttccacaagaacaccaatggacaaaccaacttcaactacaacaaagtaattcaccttcacctggagttcatataatgagtaatggcattagaagaagtcaaagccaaaccaacttcaagtacaacaaactaattcagctttttctcaaccaaactatgtcaaactatttgttgtctattaaaagtgttagttattcatgtgacagacatactattctagtttctattcatcattaagattcacaaagcacatatagtgttctcatagcaataccacacacagacaggggtgcagatagcagccacaggcccacaatcagaccagctntgccttgctattatcttgtcnnggagttgtat

SEQ ID NO: 258559 - DNA, 340 bp, Glycine max
tatacttggccttcatttaactgtctttgcgcttggcggccacgctcaacaaagtattttcgacacctactgtacgttgatttgaccaatgctgctatgggaatgtttcgacaatccttcacaaccttattgatacattctgaaaggttggttgtcatgtggccatatcgacgtacttctctatcataagccatcgtccatttttcctttgaaattcgatcaacccatgtggctatggctggactcaaatcacgaaatttttgtaaattctgatcaaaaatgtgcttgcaaggagtgtatgctgcataaaaatagttatgaataacaactttaagtatat

SEQ ID NO: 258560 - DNA, 364 bp, Glycine max
acctttgaagccactggttctacacccctgtgcgagacgaggtttccaaggtactccacctgagactgagcaaagaagcacttacacaacttcaaaacaaattgattttcgagcaatacctgaaatgtggtctctaaatgacgtagatgttcctcgattgacccactataaatgagaatgtcatcgaagaaaatgatgatgaatcgttggaggtaaggtctgaagagcatgttcatggtggcctggaatgatgatgatgcattacacaacccaaatgacattactttgaacttataatggccatggtgtgttcaaaagtctgttttgggaacatctgctgagtggatgcggatttgatggtatc

SEQ ID NO: 258561 - DNA, 454 bp, Glycine max
  unsure (1)..(454): unsure at all n locations
agctagacaccattgcttggtgctttcattgctgattcttatgctggaaagttctggactgttactgttgcttccattntataccagatagtaaagatcctctcccgactctttttcttatgattgacaagtattacttatatatcaaattttaacttcttggtgttccaatcatgtattttgtattcttaccattcgagaaaagtagaatgttatctgcagtgatatggatattattattagggtaatggagctagaggatcaagggaaccctttccctaaccctaattttattgaaaattgtatcggaatattttgttttttattgggtagttattatgattatttttattagtttttattagtgagagaaatttaaatttagtatctcttttttacttctacaatactcaactaccaactcaatcgngtagttttgttatgttttgtcact

SEQ ID NO: 258562 - DNA, 455 bp, Glycine max
  unsure (1)..(455): unsure at all n locations
agctagcagcctagttgtagctntcacgctnntttctctaatcagtcaaatgctacacaattcatatactaaaagctaccaaatactcctacgtggcattgctagaaatcgatagccgtcaaccttctacgtgagatgtgcttaccttaccacattaaagctagtactttacagtttctaccatttgttgtctgactcttctctatatcctttatatttacttttaatatgggtaatttagtaattctagttaagataacaaatgatgataaagaaaaaaattaattaataaataattcagaatgggaataaatttacaaaacataaaatatgatgagacaaatattttttaaagcataatttgtctttggaaacttcaatgaatctcanattaattggaatgtaattatatttcgatagtagctgttagaaactctaatttatataatcgaaat

SEQ ID NO: 258563 - DNA, 450 bp, Glycine max
  unsure (1)..(450): unsure at all n locations
agctttcataagtganatcaggtgcaaccatctccctaagagtcctctcacgaggtggaggttgagccatgttctcaatatgaaaattagtagttgaatgctcaaaattagaatattcagaatcaccagcaacagaatactcagaatgctcaaaatgctcacaatgttcgaaatgcacagaatgatcaggatgaacactatgcctaactaatgtatgaaaggttctatctatttcaagatcaaatggttgtgaatcccctggattgcccctagtcatgcattatatgcagcaaataatgtgttctcaaacaagcaccaggggagggttaaaactacaactatagtcccatgatatccaaatgagctgaaattttgtgagcaacaccctataatcatgaaaagatagcacanaaattttcagacaaaaattcaaagtctaactatgaaaac

SEQ ID NO: 258564 - DNA, 439 bp, Glycine max
  unsure (1)..(439): unsure at all n locations
tatgctgcanacatttataatagacctcctcagcaacaaaaccaacaacaacagaataattatgacctttcaagcaatagatacaatccaggttggaggagtcatccaaatctgagatggacaagtcctccaacacaacaacaacaggctgtccctccttttcagaatgttgctggtctaagcaagccatatgttcctcctccaatacagcagcagtcaccacaaagacaacaagcgactganggcccctctcaaccttccttagaagagttagtgaggcaaatgaccatccagaatatgcaatttcagcaagagacaagagctttcattcatagtctgacaaatcaaatggggcagatggctactcagatgaatcaagctcagtcccaaaattctgacaaatggccttcacaaactgtgcataatccgaaaaatgtaa

SEQ ID NO: 258565 - DNA, 380 bp, Glycine max
  unsure (1)..(380): unsure at all n locations
agcttctatataagctgaaccattntatcaataaacacaagttgagttttattcagaaaattagagtttatctcttttatcttagtgagagtgattctcctaaattcttgagtgattcaagaacaccctggctgtatcaaaggactttcacaacctttgtgtgttgccctcgctggaaagagtgattctttccttcctatcatctccacccttgttctttcaaaccacaattccagaaaatccacctctgcccaaaattatctcgtgaccataactcccatttcacacactcaaattaagtgattcttgagcctaaattgaatttcanaacgagacctttcacctcgttttggaaatcacctcattggagccctgtagct

SEQ ID NO: 258566 - DNA, 472 bp, Glycine max
  unsure (1)..(472): unsure at all n locations
tagcttgtcgaaaatactaaaactgtttaaggtccaacgcctttaatggtcctctntgcttttatcggntaacatggaccgttcaaaagcataaaatcaacatgtaactctaccacttttgcaagaactacgtaggtctgatttcctcatcgcaattgaggatacgtaggagcaaaagccccgcttttgtcgaccacccctagagatcgttaatggtccagtgccttaacgtttctcttctttcacaaccaagagatcgttaatggtctaacgccttaacgtttctctcctttcaaaaaccaaaagatcgttaatggtccaaaggccttaacgtttctctcctttccaaaaatcaaagatcgtttaatggtccaacgccttatacaactntagttcggtcaaaatatatcttacaaaanaggataaaaataacttaaccaacgtttagttctcaaagaactacgtaagtctg

SEQ ID NO: 258567 - DNA, 452 bp, Glycine max
  unsure (1)..(452): unsure at all n locations
agcttcattangcgttgcttcgatcctccggcctactcctagtttatgttctatttccttagttttatttcagccttgtattttggcgtttattactttagtactctgattatggttgtcttggatgtttaccattatgtttttgctttgaggttgggttatttcttgactttgttctgcttaattaagacttgtgtggtttattattctatgaattgaattagtttatggatggattgtgctatggttcttgttgatgcattatttcttttctttagacagtgttggctttttgctattgccaaagggggagagaacaagggtaggtagaatttgtcatcaaccttaggcataaattccaatcttaatggggagtgagtgttgtgagcatgctttatctattgtatattatttatcttgatttcagattatcggcatcatcaaagaggggg

SEQ ID NO: 258568 - DNA, 474 bp, Glycine max
  unsure (1)..(474): unsure at all n locations
ntntgactcctgattctntggaacttgcttaactctggattctntagcatcatcaaaataatcttggaagacattgcttccacaatagaaagttggactagctcatctaggtccctatatggaaggagttcaaccttgtccctcacttccatattaagcccactaagaaacctagctatgcttgttctttccccctccctaagtcctgctcttaaaaggagtagttccatttgttgtctatattcttcaacacttatactcccttgtctaagcctttggaacttgtccataagctccctttcatagtaggagggaatgtgcctcttcctaagggcactcttaagatcattccaatactctactggaggatccncatgaatccttcgttccctaacaagggaagtccaccaatagagggcatacccttgaaagctaagggtagctaataggaactttatctcttcactaatatga

SEQ ID NO: 258569 - DNA, 451 bp, Glycine max
agcttgcaccatgttaacttacaagaaatcaatgttaatcaaagcattctaaaataattattcaacttggagaacataaggacaaatgggcagagttaacttacaatttattacaataaaacataggtatccaacatcaatcatcatccaacacaaaattcaattactgatatgcataaaattggatgggcccacaccataatacatataatccaatacattttggttttatgaattcactccaaggaaaagcagataacaggtcattaacatcaataaaatatcttttacttacgaaaaacatataagataacatcaacaaaccatatgtttatggttagaattaatccgctctgtgcaaatcaaattggaatgccactttcggttatatacataggattattattattatataattcaaattgaaatcaaagcattgaaatacgaaaac

SEQ ID NO: 258570 - DNA, 382 bp, Glycine max
tcacatgtttgtcatcatcaaaaatggggagaatgtgaatgtatgtatacatgatgttgatgatgtcaaaagaagaatcaaacaaggctcattctgcttcaagattaatacaagattgtttcaacaaacaaagctttgattcaagatttcttcaagatcaagccttgcctcacaatgaaaggcttcaggtcattcaaggcacatgtaatcgattaccaatacatgtaatcgattaccaatggttggaaagtgtgtaatcgattacacatcatatgtaatcgattaccagagagggatctcaaggaatatcgccaacagtcacatcttatcattcgaatactgaatgggcatcaaaggcctatatatatgtgtgacttgggac

SEQ ID NO: 258571 - DNA, 380 bp, Glycine max
agcttgtgccagaatccgcaatctacgccaagttgctgggactcgagactcaaatagactctgctttggctaggaagaaaatcgatgtgcaggagaatgttatgaaccctcgctgtgttaggaaaacgcttagagtttatgtttacaacactttttcgaatcacgtgaaagtggagcctgtgaagaatggtgtggaggagccttcttgggcgcttatgataaccggaagggtgttggaagatggtaaggattctgtggcggaagggatttcgacgaaggaatatccaaaattctcggctggtttcaagaagattaccatatacttggatcagggcttgtaccaggataaccatgttgttgtgtgggatagtgcccgttct

SEQ ID NO: 258572 - DNA, 195 bp, Glycine max
attggttacattattagatatccacttatatatctagttcacgacttgacgagaatatagctacagtttaggttcgcatgtaagctatactcacagacaactaatgagcaataacttttttttctcatcattctctaatgctaaatttctgtctgaattaactaatcttaagctcaaaagtaatttaaaaaaaat

SEQ ID NO: 258573 - DNA, 413 bp, Glycine max
  unsure (1)..(413): unsure at all n locations
agcttcaacattcaatgtcaagcgtctcgatatattacgggactcaatcagacatccgagtaanaaggtattgtcgtttgaattggctcacagcttcaacattcaattccgagggtctcgatatattacgggactcaatccgacatccgagaaaaaaattattgtcgtttgaattggctcagaggttcaacattcaattttgagcgtctcgatatgttacgggactcaatcagacatccgagtaaaaagctattgtcgtttgaatttgctcacagattcaacattcaatttcgaggcgctcgatatattacgggactcaatcagacatccgagtaaaaagttattgtcgtttgaattggctcagaggttcaacattcaatctcgagcgtctcgttatattacgggactcaatc

SEQ ID NO: 258574 - DNA, 404 bp, Glycine max
  unsure (1)..(404): unsure at all n locations
ctgagacaattcanacgacaacaactntntactcggatatctgattgattcccgttatataacgagacgctcgaaattgaatgtttaagctctgatccaattcaaatgacaataaattttttctcagatgtctgattgagtccaataatataacgagacgctcgaaattgaatgttgaagctctaagccaattcaaacgacaataactntttactacgatgtctgattgagtcccgtaacatatcgagacgctcgaaattgaatgttgaagctctgagacaattgaaacgacaacaactctttactcggatctctgatngagtcccgtcacatatcaagacgctcgaaattgaatgtggaatctctgagccaatttacacgacaatacacttttacttcgatgt

SEQ ID NO: 258575 - DNA, 448 bp, Glycine max
  unsure (1)..(448): unsure at all n locations
agcttaacaaacttagaaatcaagtgatcatgaattccgaaatatatggggagtaaacgaatgcacattntatctatatacaattgtttgttgcttgcttgaatcttgatttcaggtattgtattgtcatcatcaaaaagggggagattgtagatgcaattgcctttgatgttttgatgatgaacatgatgatgtgttgcaattgatgcaaatgagcttttcaagattaaattcaagacaatgcttcaagattacaagtcacaacatcaagatgatcactagaatattaggaaggcaattcctaattgaattagcaaaggtttggccaagtgatttatattaaaaagtgtttctcaaaggttttactctctggtaatcgattaccagaggatgtaatcgattaccagtggccaaatacgttntataacagctataaaaatttgaattc

SEQ ID NO: 258576 - DNA, 324 bp, Glycine max
  unsure (1)..(324): unsure at all n locations
tcanattatcatccanaagtatgttgctggatttaatatctcgatgcacgatatgtggttcacactccttgtgcaaataagctaatccatgagctgcaccctgngcaatcttgagtcttacatcccattttagagctgaatttccatcctcactctcatgcagccaatagtcaaggcttccattctccaagtaggagtaaattaacaatctgtcattgaaatgctgacaataacctttaagtgaaacaaggttcttatgttgagctcttgagagtgcctccacttcagcttggaattcacgttccacctgaccacagtaccctg

SEQ ID NO: 258577 - DNA, 421 bp, Glycine max
agcttctcacctcttcctaagagtgtattttgcggggatcgaatccccgtgtgttaactaaactacactcattcatacaaataatttttttttactactttagtattaacaagtgaacatttttatgtaccacggcattgctggtggacacgcccttagcggaatcgtcctcctcggagtcgcgccgctttctgctgttactgggtccgagtccgtggctcggcccggtggtgaaatccccaaactgccctcctggcccgtgaccgaactgcgggcttctgagccccaatccaccgccgccactaatcgccggcgggaactgctgccagatctccgccaagctaaacggcgccgtattaccgctcgcattgttcgcgaagggaaccctcgtcatcatcgcgcccggatccataaacagaaa

SEQ ID NO: 258578 - DNA, 95 bp, Glycine max
cgaacacacatgtttcactaaatttccttgcatagtgaaggaatatcaacattaacaagaaagcaagcacacaaattaatatgttaatgagacag

SEQ ID NO: 258579 - DNA, 401 bp, Glycine max
  unsure (1)..(401): unsure at all n locations
cttgagtgaaacaatgtgactcttcactttttaaattgaatttcaacgttcaaggacattggtaatcgattacagccttttgaaaatatttggaacgttgtaaattcagtttgaaaacattttncaaactcatttgctactggtaatcgattacaacaatatggtaatcgattatcagagagtaaaaactctttggtaaaggttttgtcaaaaactcatgtgctattcanagttntgaaaaactntntaatacttatcttgattgagtcctttctttattcttgaatcttgagtcttgaatcttgatcttgattcttgagatcttgaatcttgaatcttgattcttgtttgtaggctntcttcttgagtcttgaattcttcttgattcttgaactcttgac

SEQ ID NO: 258580 - DNA, 129 bp, Glycine max
  unsure (1)..(129): unsure at all n locations
agtcacctgcggcatgcaagctntgattctttattctttgattcattggttaatattctattttaacattcagtctgtgaactttgctaactttgattatctagttacttaactatgtatacgaggtac

SEQ ID NO: 258581 - DNA, 362 bp, Glycine max
  unsure (1)..(362): unsure at all n locations
tacacccgcgctgtttgtattaatgatcatcgcttgtcttccttattatatattnngatatcatcattcattttggtgtctttcctctgtgggcatggcgattctgtcctaatttcttgtagaatgcatatagattcataattctacttgaggaaagttatttattagataatttaaatgtctttaatctaatattgattgctcgaatgttctcttataaagaagttaaatttttataatgcttaacacttaaaaatatagaatgttaattcccttctaaaaagtgagaaattgaaattttcttcttgataaaagagcctgataaaatatctgcgtatcttctttataacctccgctctctc

SEQ ID NO: 258582 - DNA, 342 bp, Glycine max
  unsure (1)..(342): unsure at all n locations
acctgtgccactctttacatattatggaattcgactttntgaataaatatgcattgtcttaaacgtttcataatttgttgatatagattattatgctaactcatttaaaagatattaaaaaattatataaactaacacatcaattattgaatttagtttatataacgattaggatgataataataatggtcggaaccaacaaaaagataaaataactattaataagaaataaaaatgaatatattttactgtttgggtattgtgtatctagaatgagcatgatccaataataaaaaaaaaaaaagtgagcatgacttcgatccgatgaacttgatttgtctt

SEQ ID NO: 258583 - DNA, 176 bp, Glycine max
tctagccaaatggacttaccttgaattaattcctttgatagcccttttgagccttgtttccctttccttgttttgaagctcactacaagccttaagtgaaaaaccatgatatcaccatatccttaaggaattttggagctttggaattgttttgggaataagtgtgtggagggggg

SEQ ID NO: 258584 - DNA, 415 bp, Glycine max
attcgtgcttaatccccatagttaattctatgttaatatgcgcttaagagtcaatggattgcaaatcaagttcaatttgaatctcactcacaaatataaattctccctaccaaccaacactatagaagggttggatttcatacaaacatagaacaattacacatgcaaacttctcttacctacaacatcccccacgataggtctttgaagaagaagaagaaaagaaagaatcttgagcttcaatatgaatttcctccaatcaacgacaccatcacaacatatccatcgaatactcacaaaaacaacacatatgaggaatttctataccaaaacccatcatgattcgacccaaggaaggagaggtgataagagaggaatcaagagatcaaaacagaaagaaaacaggcttacctac

SEQ ID NO: 258585 - DNA, 378 bp, Glycine max
  unsure (1)..(378): unsure at all n locations
ngagctatcagaagacttgcttattcatttagtgttgatttctctaccttcactgtttagtcagtttaagatctcttataactgttagaaggagaaatggtctcttaatgagctcatttcataccgtgtgcaagaaaaggaaaggctgaagcaagaaaggactgaaagtgctcatgttgtgagtacctctaaagacaaaggcaaaagaaaaaggactgaggagcccaagaatgaagttgttaagggtccaggacaaaagaaacaaaatcagggtgacaactttttctcttacagtaagcgtggacatgtagagaagaaatgtaacaaatatcatgcttggcgtgcaaagaaaggtatgtttcttactttagtctattt

SEQ ID NO: 258586 - DNA, 466 bp, Glycine max
  unsure (1)..(466): unsure at all n locations
agcttcacanaatctgtgttgccttgcttctgaatgttaggccgtgcataaacagagggaaaagatagaggcacaagagcatcaaagtgctcaaattaattcagagtatgcagatgcaaaaaggcttaactgcagttcactagtaatagatttgcagtttacatccccacctatacctgtcgatattcctgagagaaatagaagtcaaaataaggaagaactgggttttattagcttcaaatctggagtcacatgtttcccaagaaggacatgttgggagtattactgatcatagcttgttggtaagtactaaggctgaggttggtactgtcatggtaaataaaacatggttgaagaatagcatggggaaagcaacacgagtgcatctcaatactaaacctgctgttggagtgcctctcaatagcatggtgaaagcagcangagtgcatcttaatactaaacttgc

SEQ ID NO: 258587 - DNA, 466 bp, Glycine max
  unsure (1)..(466): unsure at all n locations
ctatgaatccaggtattccttanacccttctccctataatctaacataatgtgtttggtgctcatttggcattntatatgatttgttaaaattccaacaatggatgctttacgctttaatggagaagactctggtaagtagcgacgaccttcagtgagaagcggaacttgcatacatctatacaaccactntgatgccaaagttatagagtgtaaaagatgtataaaatgagcttattaccaataggcatgaaatgctntatatagtagtggtgaaacaattaggcatagttgtctaaatggcccatcaatcacatgggaagcctaaaggagtctagaacacacaccaccctacaactagctaaaaaatttatttcttaactaatcgcanactatcacattntacctttatctgaatacttgatctntttaaccgtntatacctttcaattattctctattatctc

SEQ ID NO: 258588 - DNA, 262 bp, Glycine max
  unsure (1)..(262): unsure at all n locations
ngcttattgaaatcaaacaagatgataatttatcctcacattatataataaataaatcatgagtcatcagaacatanatcatttgtctaagtcacttgcatctagaagttctaattttcttctaatggtgtagaaagaatctttgggtagtggttttgtgaagatgtctgcaagttggttcttagtatctacaagttttaaaaatacagtcacctctttcctaagactaagtgcttattgactaccaacacttaccaagatg

SEQ ID NO: 258589 - DNA, 442 bp, Glycine max
  unsure (1)..(442): unsure at all n locations
nggacgaataaggtgatgcatctaggaaacacaacatctaacaagtatgaaaattgtaaatatatattggttttagggtttacacacgaatggataaaaataattgtttgtgttttacaaatgcacggttaagtttgcacattgggccttaaagagactactaccgaatagccttggagacctatgtagtgtttgagaagccatgaacaatatgatcactctacaacatatngaaattaacgcatcgtttgagacaactacacatgtggttgggcatgtntttaaagttaccttatacaagaaactatttggcatggtatcaacgtatgtgttaaaccacattgttgctgagtttgagcatgtaaaatatgctagcattgatagttctcattatagatatataatgagaactacttaccgtctttcatgtgcacgtgagcta

SEQ ID NO: 258590 - DNA, 468 bp, Glycine max
  unsure (1)..(468): unsure at all n locations
agctngacanagaaatagaaactatctgttctagattttcatctacgcaagaattgcactatgcattgagtcgcaatgtaatttgtctttgtgtgagtagatnttgtgaaaggttcactctaagtacacatatcccaagagaggttagcacactaatctagaagattaggataaaatttatcaattttagcaaaaaaattttttaccattttttgcaaaactctactttatccttttatagttagttttggaaaagtgcaagaagccatataaggcatggctgagctcgtggagagaacctcaagggctgtccaagctgccaattagtcatattaatggtcattcanagtgcttagattaagaagataagaattaggccttgcaattccattggtctaaacatttcacctacaataagtgttgtttttatagccaaatctatgccagtctccattttgatgaacgttg

SEQ ID NO: 258591 - DNA, 431 bp, Glycine max
  unsure (1)..(431): unsure at all n locations
ngaaccanaaccggtgagagtgtgaacttaaactatgagtgaacttttagctgtgagcaataatctttgcatgaatctctgaattntagaatgaaatgtataaacaagaacatgatgaaggccatgattgtacataaacaagccttttgaccaaaaagcttaccttgaattataattatatcctttgtaccccttttgagttgaatgatattgtcaaaattttgaaccctgaacttaaataatatctcttgataccttgcttagattctagtgtggaagcaaagcttcatgatgaatcaacaatgattcaaaggtgttttgatgataacaatgatgacaacaaaagatgatgacaaaagtgatgaacaaaaagctcaagtgaatcaaagaacatccatctcaagagaatcaagaacaagtcaagagttcaa

SEQ ID NO: 258592 - DNA, 404 bp, Glycine max
  unsure (1)..(404): unsure at all n locations
acctgcggcatgcaagcttccatcaacaaccataacaagaaataaatatccatcgcccncccncccctcaaaacatcacacaatatcaccaaaaggttttatacaacaaaatattacgtcacagagtatagaaatcttcccaccccaaatatacatcaaaaagggaaaactatcctacactcagagcagtcagtacccaaggcccacaactacctcctgaggaatcgtgttactcgtcggttgaaagcatctctccctcaagtatctcttcaccaataacatccatgtagtaggcaatctcagacggtgtgagattgtcatcatcactgaaatctcaacatcctcgtaaactntaatggtcctgtcctgcaaaaggagatctagaggttctcgtgacaccggtt

SEQ ID NO: 258593 - DNA, 381 bp, Glycine max
  unsure (1)..(381): unsure at all n locations
ngcttcttgcaattccaagacactagagagcttcttaataggtggcatgtcgcacttgtactnttttttatctaatttgcatcctgcaaaatcagaatctgaaaaacctgttatgcttaaggagatacctttgggatacaacaaacctacattggttgtgcccttaagatacttaatgatccttttaacaacaactaagtgagattccttaggattggactggtatcttgcacataagtaaacgcttagcatgatatccagtctacttgtagttaagtagagaagtgatccaatcatacctctatatcttgattcatccactgatttacctttctcatctaaatcaaggtaggttgatgtagccattggagtatatgcttc

SEQ ID NO: 258594 - DNA, 458 bp, Glycine max
  unsure (1)..(458): unsure at all n locations
agctngcacaataagtaactaattctggtttgtacataatgaagtaactaactaactaacactaatatagagtaactactcgaaggaatgaataggacttgattaggcccgtctaatctacctaattaaacaataaaaagtccaactcgcaactcaatntgaccctcgaaatggcagaattggccaaagcttatctataacaaaattaaagatatttttctaagatttctagggactactcacacgttccatttggatctatntagtgtcctctaggccctgcacaagacggatagggcaagtaagcacaaaatctgaaaattagctacaattctcaattgagttaaggtgagaaaataagggtcaatgagatgtcaattgcgctaagaagaatagaanaatactaaactacaaatgctcaatcaagaacataactatgttagtgtcataccctaatt

SEQ ID NO: 258595 - DNA, 450 bp, Glycine max
  unsure (1)..(450): unsure at all n locations
tcaagaaaaagatggcctcagcaaattccttatttccttaacggaattctatcaatagacctccaatctntaatggagagggttaccactactggaaaacccgaatgcaaattgttatcgaggcaatagatctaaatatctgggaagccatagaaatagggccttatatacccaccacagtagaaagaatttcaatagatggtagttcatcaagtaaaagcataaccatagaaaaacctagagatagatggtctgaagaggatagaaaacgagtacaatacaacctaaaagccaaaaacataataacatctgccctatgaatgcgatgaatatttagagttccaaattgtaagagtgctaaggaaatgtgtgacactctctgattaacacatgtaggaactacagatgttaaagatctatgatgaatcactaactcatagtatgaattat

SEQ ID NO: 258596 - DNA, 543 bp, Glycine max
  unsure (1)..(543): unsure at all n locations
cttgcccttgacccgtgtaacacagcatcctaagacaccgctgctgccgctttaataaagagcttcctatttctctctattgcatcacctctcaatgagcaggtgaagaagaatgtggcatttacctgtggtgaaaaacaagagcaagcccttgctttgctcanagaggagcttactaacgcacctgttctagctcttgatgcctctggagtgggagtcggagctgtactgtacaaggcgggcaccctattgcttatttgtgtgaaaaacttcatagtgataaagagctatatgcctcaataagagcgcttcagacttatgaacattaccttgtntccaacgaatttgcattcatagtgatcatcaatcgcttagctacattaaattgtcgaancgagcttaacaagacgcatgcgatatgggtagagtacctacagcgcattccatatgttatccaacactatcatggaaacaccccatattgttgctgatggcctctatacgagaccacccattgtatcctccttagacctcatattattg

SEQ ID NO: 258597 - DNA, 547 bp, Glycine max
  unsure (1)..(547): unsure at all n locations
acggtgancctgtgacttgagaccatctattacggacactataatactcaagctgttatcccacanctaggaccagatggcttccaattaagaactttgcgagcatcgaattgattagagtcagaagttactgtatgttaactgggagccatggtcttcatactgacgcccatgatcgacagtgaactgcaactaaaaatgcagctgtactataaatattgcgcaccgctgttgtgagtcagactgcattgacttaactgaaagagccggctattatagcattgacaactcctgaactagaacaataaatcatcttaatactgagaattcttgatacactcatatgctatgtcaggctgtgcggcgtagtcgtctaagacgtatcacgtnagacacactctgacatacatatcataggctattattcctatacgtagcatactcatacaaatatgggcaattgaatctgaggattctcactttcatagtagagctacgacacttacgacgagcgtgttgagtgagacgaatacatgacgacatgccn

SEQ ID NO: 258598 - DNA, 455 bp, Glycine max
  unsure (1)..(455): unsure at all n locations
agcttctcaaggaggtgagcttagttatgagaatggtgtgtgtagctaagctctagcttctcaaggaagttttctcagagaagcttctcaaggaagttttctcaagaaagcttctcaaggaagctacctagtctataaatagaagcatgtgtaacacttgttgtaactttgatgaatgagagtcttgtgagacatacttcaaaggtccacttctatacctcttgtataccttcattttcgtgctccccnctctctctttctctccctctttcttttcctccattgaagcatcctctccaagcttcttatccaaggctcatcttggtggtgaagctccttcttccatggcttattccttagtggatggcgcctgctctcacctatcttcctttgtcttccgctgcatctccatggtggaaaatcaccattaaaggaccacatcgaagctctaagat

SEQ ID NO: 258599 - DNA, 442 bp, Glycine max
gacactataaaactcagcttgtggattatggcgtacccatcacatgtggtactaggtggcggtcgggcgatggtgcacaacaagttttccatatccacaaagcgcgcataaacccaccatcccctgttgcccacctacaactgagctcacgtactcccatgtagcccatatcctcgtttctctcaacaccggagccccatcaatcctccaaagcttccacaacatccaagcgaaacaacattcaaacagcacaagctatcacggccaagcaaaacagagcaaaggcagaaaactctgccaaaaaaaaaccaaccaaatcacaactgttctcacttaaagatcccagtaacaatttcctcgttccggttcattaaccgttggatcgacttgcaaatattactggaagccttagtacataagctacattgtgaccgtggatcta

SEQ ID NO: 258600 - DNA, 432 bp, Glycine max
  unsure (1)..(432): unsure at all n locations
tcattccaatccactcanatcatacaattgctcattcaaataattatcaaacactcatttcataccaaacaatccattgcatatcattttcaatcaattcattgttcaaacacgcttttggtacaagcaaacaactcaaagtgctgaaatttaaaataactaaaatataaagcaaactaaatactaataaactaaaatgttcatgctntgcagaaattaaactaaacacaatntaaacatcctgctcatcttgtggctgatcttcattatgatctagtgttggagctgctgatgaatcctggataggctgctctggctccgtgactggtgtagaatggctgggtctctcaggaactggtgcaggagatggcttaagtatttgatctatggaagtccccttcttctgagccatgtgtgcatctgcatcaaaat

SEQ ID NO: 258601 - DNA, 453 bp, Glycine max
  unsure (1)..(453): unsure at all n locations
cgcttgtggagcttctatggaggctggatctttgagcttcaatgatgtccttcaatggtgattnttcaccatggagatgcagcggaagacaaaggagaagaggtgagaggaggcgccatccattaaggaataagccatggaaaaaagagcttcaccaccaagatgagccttggataagaagcttggaaggatgcttcaatggaggaaaagaaagagggagagaaagagagaggggggagcacgatattgaaggaagaaaaagggagagaagttgaactttgagttgtgtctcacaagactctcattcatcaaagttacaacaagtgttacacatgcttctatttatagactaggtagcttccttgagaagctttcttgagaaaactttctttgagaagcttcttgagaaacttccttgnaagctagagcttactacacacacccctctcataa

SEQ ID NO: 258602 - DNA, 86 bp, Glycine max
taaagttattgctatttcacttatctcagagcttcggatctaaacgttgagcgactcgatatatgacgggactcaatgagacatcc

SEQ ID NO: 258603 - DNA, 437 bp, Glycine max
  unsure (1)..(437): unsure at all n locations
acactatctatactcaagctcctacagcagatttagtaatgacccactaacctagaattaaaatatcttaatgctcattaacctagggaattaaaacaaacttaatggctgagtgtaactgaaattgtggcaaccaaaagtcacccccaacagccaacaagtcagccaccatttggtctcccaaaaggctgatgcctaggttgccaattgggcccttattacaacttgaactaaagcccttttagttgattaacccaaaacatatntttggtcagccaactntacaaggattgggccattatttagacaaactaaacactctaaaattgaaataaagtggtgtcatttagtcctcctccatttgggccatgatacaactcacaaccttggactnttctccttgaaacttgggcttgtattcaaatagtatggacagc

SEQ ID NO: 258604 - DNA, 628 bp, Glycine max
  unsure (1)..(628): unsure at all n locations
gctcctttagtcgttacatncgcgtcgacgttacantaaatattatcgagtatgcatnnannnnnacaggcagacaatggatantcttgtggccctcgtgaancgacgacctatagagtcgacctagcagcatgcatgcttgatgattaactttgttgcgagagctaaaatatattttgtgaactagtgaaacttgatggctaaccaataactgaacttattctgaatggtagacacaaaccaatataaatatgcgccatactctacttataggtatccttggacttaaaccgacataatgattgaatttgatcctgtttgaacaacatatcctattctttaacatatgttctcatatgtttaaacctgatatagtcccaatattgctatctccttttatcaagttatactttcaatgatcactttagctttcacgaaaaaagacttatgacaattctaaaattacatattaaacccgttacgatagttttatttgatgtacttgtcttaagacttaacttttgacacttaacacactgagatcatagccattatattattattaataacctattattgccaagttctgtgggaccactctattatgtattgtacctgatgataaacg

SEQ ID NO: 258605 - DNA, 379 bp, Glycine max
ctgagggtgcgtagcccaccatcttttatagtagagtatcgattatgtgtctatcatcacgatcatcgtctcccttgccatcattgggggtaccacctgggccgccagatccctccaccttttgggcgtgttctctgaaagatccatcctcctttatgcacatgttctgcatatgcatcctatccgagaaccatatcaaaattgtgctgatactgcctaacaaaggccaccattaggtccttccaagaatggactctggaagatgccaaggtagtgtacctatgtacaactaccccagtaagactctcttggaaggaatgtatcaccaattccgtatcttttgcgtattcccccatcttctgacaatacatctttagat

SEQ ID NO: 258606 - DNA, 354 bp, Glycine max
gagcttatatatatcgaggcgctcgatattgaacaatggaagctcttgagatattcaaatggtcataactattaactcggatgttcaattcatgcgcatcacatatagagacgcttaataatgaacaacggatgctctccagaagttaaaacgcgattaagtattcacactgacgtccgattcaggcttataatataacgcggcgctcgaaattgaacagcggaagctcttgagaaattctaaagtcataacgttaactcggatgtccgatatatgcgcatacatatagagacgctaagacacgaacaactgatgctctcaagatattaaaatggccacaagtgctgacactga

SEQ ID NO: 258607 - DNA, 432 bp, Glycine max
  unsure (1)..(432): unsure at all n locations
cgaaacagtcaaactacagctntccgaaatagatcacatgcaggttgcgaccatctaagggaagttaaaagctcaatttaagggaagttataactaagggaagttaacatgatggcaagcataagcaaaacttaccttgtgattgcgagtacaaagatgagcaaagattgcttttgtgccaatggaatggctgcaaggaaagcgaagctcattcaaagacaatggcagtgaccacattaatttttcacacacaaggaaagcaacgaaggtcgttcaaggaaagcaagaaaacttaccaaaacacgagggtggggtaagcgtcacagcgacgacgacggcctgaggatggctttgcgagactcagcgtatggggtcagggacaatggcagtcacaagggtggatntgcaagagactgagcgcaagaagagaga

SEQ ID NO: 258608 - DNA, 357 bp, Glycine max
gtagttggagaatcaataaaacaatcaagaaacaatgcagcttgttgaaatggtaaatatacacagaagtccatctgaagcaacatagcacaacgttaggaggagtgggtcaattaactttgacagtgaacatacatgaattgaaccaagcatttaagatgtgaattccttggggggggaaaattcctgactactgtgtgcttcaacagagacatgatgaccatcagattcttttcaaaatttgccacaaagtttactaatagtgcattacagatataatgatatattcaaggaaagtatgagaagcttaacaaggactaaccattaacatcaaagaatatctgctggttgcgtcta

SEQ ID NO: 258609 - DNA, 427 bp, Glycine max
  unsure (1)..(427): unsure at all n locations
gcatgtgaattaggaagcatcaacaagaatcaagccaaggctattgtgcaagcaatcaatggggcacaacaaaccaaatgattatgatgatggatatctcaaattctcacaaaggtaaacctatcactttcaaattgagctttcaaaactatcatgacatgtagaggaaaaacaaggatttcaaatcacaaaatggcaagagacttttattntcagaacaattacccattacttgaacatatcctataattcaaagaanaacatgcaaatttaacacaacataactaacaaaattaaactagaacccaacaaaactaacagaattaaactaatttaacagaactatcagaaccaaaaccatagaacacccgcncatacttanacaacacattgccctcaatgtagcacaattaanatattaaaagca

SEQ ID NO: 258610 - DNA, 411 bp, Glycine max
  unsure (1)..(411): unsure at all n locations
gatgatatggtcttcaccgaagaaaggatcaaagtgtttctattaagaggaacatctgatcatcatgctntgatgaatgcaaaaagaaaacaaataactagggcaaatgatgagggtgaaaatgagggagatgcccatgctgtgactgccattcctatacaaccaagtttgccaccaacccaacaatgtcattactcagccaataaacaaaccttctccttacaccaccgccatttatcgacaaaggccatccctaaatcaaccacaaagtctgtctaccgcacttccaatgacaaacatcacctttagcacaatccataaacaccaaccaagaaatgaattatgcagcgagaaagcctatagaattcaccccaatatcagtggcctatgctgacttgcttccatatctac

SEQ ID NO: 258611 - DNA, 457 bp, Glycine max
  unsure (1)..(457): unsure at all n locations
agctntgagccanaatcctgactcaccatataccttgtcccagggtgagaatgccaatccttaccctcggaagcaaaaaaagaatagaggggaaatttccaatcaaagaanaagagaaggaaaatttccaatgaaagcaaaaaagaaatgaaggaaaattccccaatcaaagagtgggagaaagcaaaaaaaggaaaagaaggaaaattccccaatcaaagagtgggagaaagcaaaaagaanagaaaggaaaattcccaatcaaagaatgggagatagtaaaaaaggaagaagaagaaggaaagaaagctcctgatcaaggatcgaaagaaaccagaagaaatgtgcagagaggtctttggaccagacaatatctgaaccgtacagaattgtcaccaaatgaacganaaaagaagganagggaaccacgacctanaatagtcttcttcctttgata

SEQ ID NO: 258612 - DNA, 360 bp, Glycine max
  unsure (1)..(360): unsure at all n locations
tctagcacaatggacttacctcgaataattcctttttagcccttttgagccttgtttccctttccttgttttgaagctcactacaagccttaaatgaaaaaccatgatatcaccatatccttaaggannatttggagcttgtgaattgtttgggaataagtgtgaggggtttttgtttcattggataactcgttttgttggctatgcttcatgatgtattttgggccatacttgatgtacattgtatattggttaaatgttggacatgctgaatgaaatgttgtttctcanaggctatatgagtaaaaaaaaaaacaaaaattcgaataaaaaaagaaaaagaaaagcaataaagttgag

SEQ ID NO: 258613 - DNA, 357 bp, Glycine max
  unsure (1)..(357): unsure at all n locations
agtgaaacttgattgctaaccaaaaactgaacttagtctgaatggtaaacacaaaccaatataaatatgtgtcttactttctttttagttatcttttgtcttaaactgacatagtgtctgaatttgatcttgtttgaaaaacatattctatattttaaaatatgtttccatcggttaaacttgttttgcgcaaatttgtatctcttttattaagcatacttcanatgataactttagtttcacgaaaaaagactaagaaattctacattacatttaacccttacgaattttatttgagtacttttttaaacttactttgacactatcacatgaatctagctattaattatattaata

SEQ ID NO: 258614 - DNA, 360 bp, Glycine max
  unsure (1)..(360): unsure at all n locations
cgagcctttaactntatgatatcatctctcaaatattatggaagtgtgttgtctctaactactttntcaccttcaagcagcatcttttggattataatgattgacctgatcttagccctgaagatcgagatatgtggattgaagatctggtaccattcttgaactatttccattctacttaaccaccggtgtttgtaccccaaaagtaaaaaatccactagtttttcagtgtggtagattatctttaaatgtgaatggatagtggatttcctttttctaacacactttatttctattctcatcaatcatattggctntnttaggtgggagagaaaacttcaatatggcagacagatgaac

SEQ ID NO: 258615 - DNA, 388 bp, Glycine max
  unsure (1)..(388): unsure at all n locations
ttcatcattaatatacacgtcattcaatattctacactcatttatccaacataattgctatattttaatcaattactgtcaaacacactttttgacagcaacactaaagtgccatggataagacttgaggaagaagagataatgaaggagaggagagaaaagcacggaatttgtgctctaagagagctctgaaatctgaagtttaatttttaaatgatcaaagttgaaaaaatgcacacacatggcttctatgtatagcctaagtgtcacacaaaattggagggaaacttgaatctctattcacaattttcttgaatttgaaatcgaatttgtggagccaaattgtggaggcanaatttcactaattatgattagtgaatctaactat

SEQ ID NO: 258616 - DNA, 440 bp, Glycine max
  unsure (1)..(440): unsure at all n locations
ctcataagtgaaatcaggtgcaaccatctccctaagattcctctcacgaggtggaggttgagccatgttctcagtatgaaaattagtattcgaatgctcaaaatcagaatattcagaatcaccagcaacaaaatgctcaatatgatcaggatgctcaaaatgcacagaatgaccaagctgcacactatgcctaacttatctatgaaaggttctatctatttcaggatcaaagggttgtaaatcacctggattgcccctattcatgcactatatgcagcaaataatgtgtttctcaacaagcacctaacaagggggtaaaactatagctatactcaaacgatatcaaaataagctgaaattntgtgaggaacaccctataatcatgantagatagcacanagaattcanacanaaattcanagctaactatgaaactacct

SEQ ID NO: 258617 - DNA, 337 bp, Glycine max
  unsure (1)..(337): unsure at all n locations
agcttgagatgaggaagtgttgaagggtgatactttctgcttttattgctgaccacagagtggtacctggagatatgtcgcggcggtcaagagaccttggggacgtcaggtggtgtgctattgcccataaccaagcttgaccaatcccgacccaacccgggcatagtcggtcagtgagaacctgtgatgtacctaagcaggcgagctcctggcagtcaaccgattaaatganaacaagaccacanagcatggaggcttgtggtggctggccagctgtgaattctgtgtaatatgtggatggtggcctctggtaatcgattaccaagggtgggtaatc

SEQ ID NO: 258618 - DNA, 337 bp, Glycine max
cgagatgaggaagtgttgaagggtgaaacttcctgcttttattgttgaccacagagtggtacctggagatatgtcgcgggggtcaggagaccttgtggacgtcaggtggggtgctattgcccaaaaccaagcttgaccaatcccgacccaacccgggcatagtcggtcagtgagaacctgtgatgtacctaagcatgcgagctcctggcagtcaacagataaaaggaacaaagaccacatagcaaggaggcttgtggtggctggccagctgtgaaacttgattgatatgtgagatatggtctctggtaatcgattaccaagggtgggtaatcgatta

SEQ ID NO: 258619 - DNA, 527 bp, Glycine max
  unsure (1)..(527): unsure at all n locations
tatgaccctggactgtgnncatcgtagaacgacacttaagaactaagcggacacaatttatatggctacgaacgagttctgtagctttggtactttgagcagagtggagttttgagcaactcaggattcaacgaacgtggcatggaccatngctgctctgctgagagagatacttatcgttctgttttacttgccgcgtatgttgctgacctgttgattgctagatctagtatgactggaagtgattaatgcgcaccacatgttgaagacaactctcaagcgaatgatcgtgagccacctaaacaagaacctcgtatgagaattggtgagaatctatcagaatgaatattgaagctgcgcccgagaactctatacacagttgcttgtacgtttaccttggagattgtactacaccaatcccacttgtgatctccattgagtttgtaaaaatgaatctttgattccgatgaggaaaatggtcacgtctaaacaccttatccttatagctggaagtccgacttccctcg

SEQ ID NO: 258620 - DNA, 344 bp, Glycine max
gtgcttggagcacaacggaaatgaatattataaatttgttacttgagggagagagagagctgtctgataagcttattagtcctaaataaaacaggtctctctttttctatcattttatttaagcaatgccacatgtctccatttgagtggagcaaacaaggcccactttctctttttgactgtgacccatactcatccacacaactgaagaaacatctgatctttgaaacgctaaaatcctgcctctgattgcgtgccatttctctggttacaatatctcacgttactctgccttcatctgggccagttttctacacgtcaacaatatatatatcaaaatgctc

SEQ ID NO: 258621 - DNA, 448 bp, Glycine max
  unsure (1)..(448): unsure at all n locations
agctaaaggaagtgaaagaattagtatgggcagatatgtctccgcattgattggtaaatctgttccccaaatccctgaaaaatgtaaagatccaggtacattcgacataccttgtattatagggaacaataagtttgataatgccatgctagatttaggagcttctgttagtgttatgcctttgtctattnttaattntctatctctaggtccttngcagtcaactaatgtggtaattcatttagctaatagaagagttgcctaccctgctggtttcatagaggatgtcttagttagagttggtgaactgattttccttgttgnattnntatatttgaatatggaggagggattntctanaggatcagttcccatcattctangcagaccttttatganaactgctataactaagatagatgtatatgcaggcacactatctatggag

SEQ ID NO: 258622 - DNA, 415 bp, Glycine max
  unsure (1)..(415): unsure at all n locations
tcctcgtgggcttctttgagaatctttctcgagaggcctctntgttaagttatatttttatctacccacacccctctattaactaaattcatctctttgaaaataattatggataaaataacacaacaaatcaaatcaaatatcaattataattactaataacatttcagggtgttacatgagccattgtcaataagcaccttggccaagatgtgatccatgaatntgacagatacatgaagagccctattatgttctcgtccctcgacgagaatctcctccttagcgaagtaaggtagttattggcagtgatattgttgacaatcccctcgaagcctaacatggngatgttttgggccacataggcctcgttcaaaactttaactagcaatgctcggtgaggctcanaactcat

SEQ ID NO: 258623 - DNA, 107 bp, Glycine max
gactgattgtcacttattactattgaccatgttgagcaacacaagtagatatatatatatatatatacacacacacacatgtggcagttgtactaacatgacaagat

SEQ ID NO: 258624 - DNA, 262 bp, Glycine max
gaagctacctaccacagagcatcaaagtaatcctgatccggtatgtcatatcactctagtcagatatttgcgacatgtaaagcgatatgatgtcttagttctcggaggagaatgacgatgtatctgaagatcccttcatacgatccagatcactttcttacatctaccataagtgtaatgttgatgtaatggagcctgatggatatgaacacgctactgctgatcatatgtggataattgcactgtataggagcttattatg

SEQ ID NO: 258625 - DNA, 512 bp, Glycine max
  unsure (1)..(512): unsure at all n locations
atcctctaagcaccgcggctgcagctanggacngcgattgataggacccgacaactctacatactctcatggacctcaccatgttctccaaagtcacttgaaggtagttaccaactcagtaaacgatactcctattataaggaatacattagaagacgaaaggtaatttatcataatccagtaccacgcatacaattaagactcttactaaggagattaactattcgaagtcccttttgcaagtatccttaccttgctagaataaggagattaacactaaaagggagatcagaaccaacactaaggatagaagtaaggagctcagacataccaaaactcagtaagaacaattattattattattatatagacataanaataagtgacaagtttgaatagttaacatttcatcttcttattctttcangagcttatgtataataatctacacggagagtgttcntcacatgatatgtaaatgaaatggtatatttattaaaaatattacttaa

SEQ ID NO: 258626 - DNA, 304 bp, Glycine max
  unsure (1)..(304): unsure at all n locations
tgcttcactgctatatgctaagctttccttgaatggtctatatgtgttgtttctctcctctatatgacgngctatgactctagggatatccacaatatctttatctttctgatcctgctcactgctgattgtatttctcagaagaaataaattcagtgttacgtatgacatggactatggtttatttttcaggtgatcatatactacttttaattgacattgnacttgaaggtcgatcaggttatagcaactccacgtacgtacgtaggaactagtatgtatatactgctagatcatttaaaat

SEQ ID NO: 258627 - DNA, 210 bp, Glycine max
  unsure (1)..(210): unsure at all n locations
ctcgctgcanaatccacttcttggttggtgtttttggtttgtgctaaaggtggtgttcgtcattggaagtgcagtagacagactttgtggtagatttagggatggcctttgtggatacctgngtggtgggtaaggagaaggtttgttattggctgagtaaagatattgttgggttggtgggaaacttggtcgtacaggaatgtgtagcac

SEQ ID NO: 258628 - DNA, 493 bp, Glycine max
  unsure (1)..(493): unsure at all n locations
gatccaagaaggcgtatattgcttgggatgactatgactcatccgatcgttcggagaaggagatcaatcttctatccaaagactatgaaagcgatgaanatatctctcaagaagattaagcaaaaagcaaaagtctgacttctaccttcaaagatctagtcacttgaattatgaaaaaggtaacatcaaaaccattctcttttaaatntagctgattggaatttntctttcaattaacttggttatatgatgactaacaaaatcttaattggttggcttggatgattgctatgtgcttatatgaatgattgagttattntctttcttaaagcatgaagtttaatattaaaacaaaccagtgatagtacatatgattcttgcatgaattttggataatatgtgatcattcatanaagttnttttaaaaaaatctattatggtatatatatttggattatataagagttttaaatataaatactttgactctttc

SEQ ID NO: 258629 - DNA, 296 bp, Glycine max
catgaaataccaatcatcacttcattcttctcaaacacaacacatgccaaacaaacttgaatggtgcacacttctatccaccaaatgcaagtgtcaacgtacaattataaaacaatcacacattggtgtatgtgctattttatgatatatatatatatatatatatatatatatatatatattgaaaggccttatacctacactatatgcaccgtgcccatcatggtgcaaacggccaaatgctatttaaatccacacaacatgctctatataatgaattatgcatttttttgcat

SEQ ID NO: 258630 - DNA, 391 bp, Glycine max
  unsure (1)..(391): unsure at all n locations
ctctgaagttntctggttntccaaaccttgaanacttatgctatttatctttntcattcccttctccctttgccaaaaaaaattcgccaaggactaaccgcctgaattctntctgtgtctctcttctcccttttccaaaagaacaaaggactaaccgcctgaattcttttgtgtctcccttcttccttgtcaaagaattcaaaatgacacagcctgagaattcttttgattcttccctttccgtaatacaaaagggttcaaaggactaaccgcctgagaattcttttgtatccttattcacaaagtatcaaaggttgaacaacctgagatctntgtctgtaacacatggagggtacatcctctgtggtacaagtagagggtacatctactt

SEQ ID NO: 258631 - DNA, 432 bp, Glycine max
  unsure (1)..(432): unsure at all n locations
agctntgcagatntggtcttcgccagtgaaaggatcaatgtgggtccaaaaagaggcannattgatcatcctactaggatgactgaganaactgnggcaaataaagagggtgaggatgagggagaaacccgtgctgtgactgccattcctgtacgaccaaatttcccaccaacccaacaatatctttactcagccaataacaaactttctccttacccaccacccagttatccacaaaggtcatccctaaatctaccacanagtctgtctaccgcacttccaatgacgaacaccacctttagcacaaaccanaaacaccaaccaagaaagtgaatttgcagcgagaaagcctgtagaattcaccccaattccagtgtcctatgctgactngctcccatatctactngataattcaatggtagccataaccct

SEQ ID NO: 258632 - DNA, 345 bp, Glycine max
  unsure (1)..(345): unsure at all n locations
ctganaagtgttggttttcaccttctcgctaagccaatccgctggtttagcgatcgttcgctaagtgcaacactcattggctaagcgcaaggaagaatctggaagaagatgagctgtataggttcgttgatcacaccgcttcatctcactaagcgcactgcttcagtccatccgctgagcgagaaaggcacgcgctaagccgaaattcactaatgtgcgctaagcggtccagaattgcactaagcgcacgagcacgaacaaggccacctacttaagcctgaaatcagattttgtgaagggagtntgggctgagagnctgaagcttgcatgtctagntgatcgata

SEQ ID NO: 258633 - DNA, 462 bp, Glycine max
  unsure (1)..(462): unsure at all n locations
agctntccttttcattggaaatgtcactctatttttatattacactgatgagataagcaaataaattaactcccttgcgagcttttattctaacaatagatgaccaattattctaaattacatgtcgttagataaattgtggacaattagaacttgatttggataattttaatcgatggatgtgacgctgtcactgccatctccacttttgatcaacggcttaaaattgattcatcgagatggattccatgttgggtgtaactaagtaattttctttgacaaaaatgtcttaatcaagcactattagctgtagcccgttcatattatggaattgaataagtaaccgttaagcttaaaattctgttttgtttttcttattctaatttaaatattattcacacacacatatactgtgttatgttatgtaaagtagtcaatataaatatattatgtctatattat

SEQ ID NO: 258634 - DNA, 422 bp, Glycine max
  unsure (1)..(422): unsure at all n locations
tacttggaatggtaaatcaagtttaaggggtgttgattttataatcttgatttagcccattaatcaagtgttaggccaataagtttgtactattactccaaagaaaattctagagaagtgtagaaataagtagaagaaatatttaattggaagaagtgtatagaactaagtagttggaagaagtgtgtagaaatctcccttgaagtgtgtggaatctttcttgatgtatctagaactctcccttgaagcctataaaagggggaaagattgtcatttgtaagtgaacccaaaaaagccaaaaaaaaaaagccaaaacaaanaatttctcaagtcataaaaactagtcttctttcaaatattctctcgtctatttctctcaattaattcctataaccctctcttttcaacagtagaagccttgt

SEQ ID NO: 258635 - DNA, 457 bp, Glycine max
  unsure (1)..(457): unsure at all n locations
gtttcctccaaaagcaacagccgtctggaggaatctcttggagggcccaagtgagccatggtgctattcgcacctctatatttactaaatacaccccctttgcccttatattggagattctttcttcgcatagttactaaaactacggattcacacaaacttgtatctttcggaagtaccggaacctgtggataacataataataccctcttatgacttacgaaatgctacggaaccttactaattgtgcaacgatgcttccttttgatcttcggtgtgtcacggaaccatacggattgtgcatcaataccttctttagattctggcatgtaccggaacttcacaaatttcccaatgatgggtgccaagcaccttacaatgaccaaacagatagtgcatgccaccgagacaaggtncgcgacgacataatgcatgacaccacgcaccctatacaccn

SEQ ID NO: 258636 - DNA, 387 bp, Glycine max
  unsure (1)..(387): unsure at all n locations
ctatgaagttntctggttttctaaaaccttgaaacttgtgctatttatcttttcattctcttctccattttccaaaaagaattcgccaaggactaaccgcctgaattctttttgtgtctctcttctcccttttccaaaagaacaaaggactaaccgcctgaattcttttgtgtctcccttctcccttgtcaaagaattcaaaatgacacagtctgagaattcatttgattcttccctttccctaatacaaaagtgttcaaaggactaaccgcctgagaattcttttgtatccncattcacaaagtatcaaaggtttaacagcctgagatctttgtctcaacacattggagggtacatcctttgtggtacaagtagagggtacatcta

SEQ ID NO: 258637 - DNA, 454 bp, Glycine max
ctcttgcctactcaccgtcttttggtttcatttctagctatcttatacttatcccatgtgtcagaaactctacacctagaccactccttgaaacactgctttgttactctaactgtgctctgaacactttcattccaccaccacgactctatacccctaggaccaaaacctctagattcacccaacgtgtgtttagccactgtaataatctctcgggacgtgttgtaccacatatcatttgcacttccttgtgattggccacaccatccctcccatatcttttgttggaagattccttgttactcacccttcaagtgcctccatatgagccttggtgctaacataggacttcttctctttgcctatcttaattcttacagccaaagcaaactctatggtgggagtcagctgtcttccggataacttacagtcaagcatacttctatagacttct

SEQ ID NO: 258638 - DNA, 384 bp, Glycine max
ggtaatcgattaaactgatatgagagacttctctgttttgctctaacactcgagtaatcaattacaattagcctgttatcgattaaaataaagagttctaaacatagaagaaattatctaactttagaacctttcttcttacttctacatgatgatacataatgcacacatggaatgatagagactaagatgcaactcataatacaacattcaatacaaatgccactcaagaaagttgggcatgtaaaagacaaaacttcttcaagctcttcttcaagcttcaaggctaagtcttcatgttgctcccctatctctaacaaggttctaataaggagagaatgacctctctttaagcatattaaaccttgcccaagcagtgacaat

SEQ ID NO: 258639 - DNA, 401 bp, Glycine max
  unsure (1)..(401): unsure at all n locations
agcttatcattntatttaataataatataagaaagtttaattccaaatttagtttcttatttgtttcatatttttaatttagtctctctttaactcatcaattgagttgtttcatttttttaatcttattattttagttgttagtttcgaaattaaatattaacgatcacgtttcgtactttggttgaacgttagctaagtacatgaaattaaaatatgtgccagtccatgcccaataacaatatgaattaagattcgtgagtaagaactaaaattatggaattgcagaaaaaaatgagtgactcgttaaattataaaaagagacaaataaaaaattaaatttgcaattaaaccaaataaaaataaagaaattacacaagttggaaggctcactgataata

SEQ ID NO: 258640 - DNA, 358 bp, Glycine max
  unsure (1)..(358): unsure at all n locations
tactgcttacctatgttcttttagtaactgttaattgatgacattgttagatcaatgatgattgatgaacaaaaccaacttaacaatttctagtctgaggcatgtaattgttgggcctattaaaaaagaggggaaaaaaaaagtaaggataaagaaattgctgggccattataaatacatgggtaattnggaagatatcaaattcccatcacaaagcanacttatcattttccctctcccncacaggatatctgtttagtctaatcttatgattcaaatttccttttttttttaatctttggtttttgaaaggggtcatccatattgaaccactttttattcttattataagtccttg

SEQ ID NO: 258641 - DNA, 218 bp, Glycine max
  unsure (1)..(218): unsure at all n locations
gcttgagccaattcaaacgacattaactnttactcttatgagagaatgagacctgtggactatcctgacacttgaaactgactgttgaagctctgatccgattcaaacgactataactttttacacaggatgtgtgattgagatctgtcatatatccagacgctcaaccatgatatgttgaagctctgagccaattcaaacgacgataactttttact

SEQ ID NO: 258642 - DNA, 358 bp, Glycine max
  unsure (1)..(358): unsure at all n locations
cttcgattcattctatgtacccgtagtgggccacattgtgttttgttcattnntattctcgnnntgtttactttntataccccctgttgacgtgcttaagccattttacttaagtcgtttctcgcttaacttaaaaataaaataaatttccaccgaacgtttgaattgtattatccattaacttcggttaaaatcaattccgaccgttcggtcgtgccgtaaccacgttggaaatcaaatagaggtaaaaaataatataataatcaaaaaatatctttttagtaaaataaagcggaaaatcaatcggacgttttctctttgggagttctcattcttaatcgaattgataataactaaa

SEQ ID NO: 258643 - DNA, 510 bp, Glycine max
  unsure (1)..(510): unsure at all n locations
agcttatgcttccgcctaagggacgccacattaattctgggcacaacagtcaattctctgtagaaaataccttcattcatgcagacaagaatggatcaacttcagttacctcatacaaagatgataagtcagttacctcgtataaagatgatgagcacagccacatttatgggcagatgagtgattcagcgagcagtacttcttattcctctgaagataacgaaagtagtactgtcactggtcttgattcccctgtcactaaggtttgggatggaaaaagtaatagaaaccaggctgtttcttatgttcatcacccacttgaaaattntgacaatcacagtgcanaganaaggaataagagccattctcggtatccaagaatatccagagcccaatctggcagtaaaaggtcttgggcaggtggtcaaaaatacaaacgtggcanggaagtgagagaacaagctttttatctggagatggcaagacatacttaattcttcaaaatacata

SEQ ID NO: 258644 - DNA, 464 bp, Glycine max
  unsure (1)..(464): unsure at all n locations
ctacatctntatctgggttacccaaatcattatagacatcataattatagatcctttcatgttccttgcgctctccggttccatttcctcttaaaatctccaactcttcttccctgtacttaactaatggacctggtgttgcacttggaagatatgtctacaatatatagatttcatgaattaatnttctcattcacaaaatgaaaataattaaaaaaatgttgtgacaatatacaattggaaataaatgagctaagtaaatcttgtaaacattaggaaaatagtacttagattcaaaactactagacttaccttattggcaaagaaaatgcgatcctttntgtcgtagtctttaaagttgtaaacccatgagttacaaacaaagtgaatggttccttgatttggaatgtcctcaagagtgacactgacaaggaagaactcatcactacgtatagttctgatgt

SEQ ID NO: 258645 - DNA, 314 bp, Glycine max
cgctctcaggcgataggccgaactgcatttatacttgtgcgagtctgagaacgctatgaccatgaagagtgacgagctgcttcaacgagtatcgctcgctatttctacaccaccaacaaccccgtctactatcacaccgacaccacctgtccctacaccaatacacagaatgaaattaaatgtcccacgattcgatggatccgaccctctcggatggaattgataaaaaaatcacatggtctaggccagtcgactcacgattcagacatacttacactcgactctcttcatatggaaggccgtgctctagcgtg

SEQ ID NO: 258646 - DNA, 413 bp, Glycine max
tccattgttcaatttcgagcgtctcgatatatcatgcgcctgaagtctacctcttagtgaaaaataatgaccatttgaatttctcgagagctttcactgttcaatttcgagcgtctcgatatattatgcgcctgaatcggacctccgagtgaaaagtaatgaccatttgaattgctccatagctttcattgttcaatgtcgagcatcttgatatattatgcgcctgaatcggacctccgagtggaaagttatgaccatttgaatttctcgagagctttcgttgctcaatttcgagcgtctcgatatattatgcgcgtgaatcggacctccgagtgaaaagtaatgaccatttgaattgctcaagagcttccgatgttcaatttcgagcgtctcgatatattatgcgcctgatc

SEQ ID NO: 258647 - DNA, 494 bp, Glycine max
  unsure (1)..(494): unsure at all n locations
agctngtatngnngaaaacccaagtcccacatcagctaataataaagccaagttagagtatataagtgagggacaaccctcaccccttaagctagctnttgaggttgagttaggtttaaactcattctaagaatctaagatggtattagagtatatctaagcttaatccanagggccacccacaatagttatccacgcaccacgcctaagaagtgctgngcgtgacngagtgtattgngaaaaatctaagtcacacatcaactaaaaataaagtcaagttagagtatataagtgaggggcaaccctcatcccttgangctagctttggagtcgagttaggtctaaattcacattctaagaatctaagagcttgtcattaggatcacatganaaggcattatcctcaatatttatcatactgttccctttccttcatgtgccatctcgcgcaaaaactctntccctctaaatctctnttccataatggatgggca

SEQ ID NO: 258648 - DNA, 458 bp, Glycine max
  unsure (1)..(458): unsure at all n locations
ctcttgtacggttcaagggagaagtagaccgcagataattgtttgtgtatagtgcncggccattggctttctaatagtcgaatgtcctaatagatcttagaacaactagatgtaggtcttcttgaggactgaaccagtataaattcagtgtgtgattctttctttccctaaccctttgatttgtgaatcaatattgatattggaattgatatgtgtgggccattaaactttgttttctaaggtttttgaattcattagtttattgtgttggtaatattttatacaagactcttgagagaccctgtatttcataaggtgattgattntaatcgaatctaaacatgattacgtaaaagtattgaaaacaatctattcaaccctctntctagaatctcgactaatgccaacagtatttctaatctagtacctgagatatctcctatgataatcccaatatt

SEQ ID NO: 258649 - DNA, 485 bp, Glycine max
  unsure (1)..(485): unsure at all n locations
agcttgtangattatggagtacccatcacatgtggtactaggtggcggtcgggcgacgatgcacaacaagttttccacatccacaatgcgcgcataaacccaccatcccctgttgcccacctncaactgagctcacgtactcccacgtagcccatatcctcgtttctcccaacaccgggtccccatcaatccttccaagcttccccaacatcaaagtaatacaacattcaaacagcacaagctatcacagccaagcaaaacagggcaaaggcagaaaactttgcccataacaccaaccaaatcacagcttttctcacttaaagaccccagtaacaattccttcgttccggttcattaaccgttggatcgactcgaaaattttactggaagtctctagtacataagcctacagtttgaccgttgtgatctactagcanacatccagaactcattctgcactaactcttccacagtcaatcacacac

SEQ ID NO: 258650 - DNA, 407 bp, Glycine max
  unsure (1)..(407): unsure at all n locations
cgatgctgctgccaatggtggttccttgtgggtcnttgggaagcttttgatttttggggaaaatggggtgaaatctgatttcacccctcccctttntaattttcccgtcagccatgctcgcccagacgagctagccactcgcccaagcgagttgaattttttttttttgcaaatttttgttgctattattattattatatatctcccttttaagccttataattatgtataaaatctaggtaaatttatgatataattcaagaaaaggaacaatgctagctcgcaatggaaagcataaaacataaaattaaagagcaaagtttagagatactaggttgccttctatgagcgtttctttaacgtctttagccaaacgcgtggtcggaggtcgaggcttcgtcatctca

SEQ ID NO: 258651 - DNA, 178 bp, Glycine max
  unsure (1)..(178): unsure at all n locations
agcttctagccanatggacttaccttgaattaattctcttgatagctctcttttgagccttgttccctttccttgttttgaatctcactacaagccttaagtgaaaaaccatgatatcaccatatccttaaggaattttggagctttggaattgttttgggaataagtgtgggggggg

SEQ ID NO: 258652 - DNA, 312 bp, Glycine max
  unsure (1)..(312): unsure at all n locations
agccttctctagatggattatgccagagacatatgtgtagatctgaagtccagatactctcgaggagatntattgagaatctttgatctgcaattcgtcaaggtgattgctcaattactgattatttcacacacctttgaagatttcgggagttgagtctaagacttcacagagaaaaagactgtgtgatcaagagaatcacgagtgaccatggcagagagtttgaaaacagcaagtttactgaatactgcacatctgaaggcatcactcatgagttctctgcagccattacaccacagcanaatggcatag

SEQ ID NO: 258653 - DNA, 427 bp, Glycine max
  unsure (1)..(427): unsure at all n locations
tgtagactngagtctcgtatcggtttaatcgattacatctatctcataatcgattacattgttgtttgagagaatgactgatttattcaggactctcggctntaattgattaccaagtggattaatcgattacttctctctcattaagtgtttagaggtgaacaagaacactttaatcgattacttagggcatctaatcgattgcattgttcttgagttatttccagatgctgggattaactctttaatcgattacttagataatctaatcgattacttcattgaattaatcgattatgctatagatntaatcgattacaggcagntataattgttttctctataaataaccaacttaagttcacatctaaaaatcaagagatcaatagaggatccctcatacatctcannaataacatcttaacct

SEQ ID NO: 258654 - DNA, 452 bp, Glycine max
  unsure (1)..(452): unsure at all n locations
agcttaanaagtaggtgactatgaactgaaatgtttacttggatgggagagactaataagagtagttaagcaggaaatntaaaattcaccacgaaggttttgagcagagaatttcagacagatggacttcaattcagtagcacgataacgatcagccagagggagaatataggcaacagaatctatcgatatgtctttgcaaagtacagattcgcacatcagcttaagtcttggtaactcatacttctctgcagcagctaacaacttggctggaaatgattcagacagcgaaggcaataatgacgaatgcagcatanagagctcttcatcttctataagagtgtccctataaatataatgaagcanagcctgcgcaacaataggacacaagaaacattagataaccaagcanatganaggcacactgaaactgaattattagtacatatgct

SEQ ID NO: 258655 - DNA, 369 bp, Glycine max
  unsure (1)..(369): unsure at all n locations
ntagagctngtttgtgggatgagggaagttggtattgtacaaagattttcttcaatcagttatgctctgcgggcttgtgggaacctttttatgcttaaagaaggaagatcatttcattcttacatgattaaaaatcctttggaagatgactgtagattgggcgtagaaaatgctcttcttgaaatgtatgttagatgtagagctattgatgatgcaaaattaattntagaaaggatgccgatacaaaatgagttttcctggactactatcatatctggatatggtgaatcanggcacttcgtagaagcactggggatcttccgtgatatgcttcgatattcaaaacccagtcagttcacattaattagt

SEQ ID NO: 258656 - DNA, 648 bp, Glycine max
  unsure (1)..(648): unsure at all n locations
gtacatctaaatcgcgatcttcacacgatcatacgtatattctaaatacgtaatcanattnnaannancagcccggttgattgcacctgtagacctcgcgaacncgagagnctatanagacgacctgcaagcatgcaagctatactcactttcactcacattnttgttatcattgactaaaattaatctattcgatacagaaatattttatacaatcaaactttatatatacattgtgcggcataatatattcattctacttttattgaactacctaaattaagtgtgntccttgccttaatggccgcggaggtctgaaaaaaacgaactcctctaacaaaatatcttgttccccatgtcttatacatattgaacaactaactaacgatttagagaggtccatcaagtcttcaactctaacacatagtacaaaatgttgttctaacataaagaatatcaatacaaaccggaatattcaaccccttcaacagcactgcaagttggctctcactngccactcgcctgttacttgcattgaattataatctcagaatatctttccttcgtgagagacatcaatgtcacatattgagcacaggcttatcataacataataacagtagtctagttccaatagtctctcaaccg

SEQ ID NO: 258657 - DNA, 355 bp, Glycine max
  unsure (1)..(355): unsure at all n locations
tgttaaaacanaataaattaggtctcatgatgcacatttataagtttctagaagaactattgtaattgaaaactagacatgtattgatgtaaatctaattatgtatgcatgtacatgttatatgatagatgtagcttcataatggaaaaacattttggtggttgatatgttgttcattntcttggtgtaagttgccactattataagaaaaagcggcacaaccactaaacagggaagcatcactttccaatagcatatggcagaaataaaaactccaacaatggaagttgcacaacttgagttgaagtgacctaaatgtgagtaggaaaggtgattgaggaaaggtgaaactcgt

SEQ ID NO: 258658 - DNA, 400 bp, Glycine max
  unsure (1)..(400): unsure at all n locations
gcttctcaggaagcttnctagtctattaatagaatcttgtgtaacacttgttgcgacttcgatgaatgagagtcttatgagacatacttcaaagttccacttctctacctctnttcttccttcaatttcgngctcccccatctctctttctctccctctttcttttcctccattgaatcatcctcttcaagcttcttatccaaggcttaatttggtggggaccctcattcttccatggcttattccctaatggatggcgccgcctcttacctcttctnctttgtcttccgctgcatctccatggtggaaaatcaccattaaaggacctcattgaagctcaaagatccagcctccatagaagctcacaagcaagctttcatcataaactacatgaacatgt

SEQ ID NO: 258659 - DNA, 459 bp, Glycine max
  unsure (1)..(459): unsure at all n locations
ctgggctacaaaaatcattggttnttctaggattcaaaggcttagattctaagagagcataaatcctagacttatccaagtaatcttttcaatacaattagcttactcactagcctttcactttaatttggctttgaccttattaatagcacacattttctttgattgctcttttttttaacacacaacttanttgttgtgtgtgttgatgctttaccttttactttacatcccaatcaactccacttcccccaaattggggtaaatntgccttgaaccatatgctctcctagaatcaaagcaaggtatctagagatattcattcaagtttaaggttcaattttgaaaatgtaaattagctcacaaagggtacaaaagatacaattatcattcaacgtaagctnnttggtcaattgctnggatatatacaatcatggcctcatcatgtcctcatcatac

SEQ ID NO: 258660 - DNA, 499 bp, Glycine max
  unsure (1)..(499): unsure at all n locations
agctnggctcgtttagttaaaatttcggtaattctgtttatgtcaaatgtgaaatactaactattcttatactggcatctgcattctgcattttacttttgatgagcttaggtactcagtcataagggttacaacggtgctgtggcagatgtttggtcctgtggagttatcctctttgtcctactgactggatatcttccttctgatgaactgtatggtattcttccttctaaagtgaatagagtcggtagaaaaaaattgtttgtactgaaagaacttaatattcagtagtggcatgttatgatctgttatttttctccatttcgatatgaaaacaaagtattctcagtttcttttgctgtgtagttgtgatacaccctgctaacttctttatttagactaattctaatatgtaaagtggatgacctacggtaaaagtttgtatttcatacagaaattgttggacaatttagtacccataataacatatcccctacag

SEQ ID NO: 258661 - DNA, 476 bp, Glycine max
  unsure (1)..(476): unsure at all n locations
tcatgcttaactatgtatggcaaaaattcattactgttgttcaagacatacttgtgagcttgtaacaaatcttctacacttggagtgatcacatgcagtcctcttgaacccttaccacccactctgtcatcatgccgagactcangaaggccaacaggtttagccttctctaagtattatgaacaaaattcaatggctttttctgcaatgtacctctcaacaatagatgcttctggacgatatagattctttgtatacccttttaagatcttcatgtatcgctcaaccgggtacatccaccgtagataaacaggaccacaacatttgatttctctgaccagatgcacaatcaagtgaatcatgatgccaaagaaagtagggggaaaatacatctccaactggcacagtataattgcggcctcantttccaactcatcatacatgactggatcaatgactttgctacatatagcatg

SEQ ID NO: 258662 - DNA, 495 bp, Glycine max
  unsure (1)..(495): unsure at all n locations
agcttatagtntagatacttacaagtaataagctgttaaaataaactagtctatgaaacacttataaactaatcaaataagttataaattaatttgaatgtcatgtcaagtacactcgtaattacaactacaagaattaaatcccacatagtaaattgcaattaataaagaaaagaaattagcaaaaaagaaggttaagggtaaaccaaatagttaaaaaaatattgagagtgtaaagtcaaagttagactcaaagtgaagtaaaaaaataatgaatgaatgaatgctntatagtgcggtgatatataaccacgatcaaaggagttacaaaagaagtgaagaacacttagattntacaaacgtaacttacaaataagagatgaggaaatttaacttggtaatttcatgtctttgcttctacatatgatagataatagatatagtgcgaaattgggagactgatatttngtcttggaggaagtctatagtacttac

SEQ ID NO: 258663 - DNA, 439 bp, Glycine max
  unsure (1)..(439): unsure at all n locations
ggaagtaaaacanaaatggtgcaattntctgctgcattttgcagcactttaacgattgacaaaggcgtgaagaaacaaacgactntaaagtcgttgtccttcctacgacttcactattggagttaacggccaagattgaatcattgaatggcgcggattgaagcacgagacatttgctgaattgttgaagtcgtggaataccacacgacttcactattcatgcaattcattattntatatatatatatatatcctaatgaatntacagtttgcattcttaagctttcttataaatattatactttcagcatnatatttgtatgtaacatanattagtgtttagttattattaattaggattttgtagataaataatatacatgttaaataatttggtaaatattatctatggttagatatagcgttagtattataatta

SEQ ID NO: 258664 - DNA, 257 bp, Glycine max
agcttgctgacatcaacaacctgtttcccttcaattttcttacctgcttccatgccatcataaataatttaataataaattaattcttaaattctataatttgttattaaattatttataagactaatttattattttttttatactttcaaaaaagattattacatcacaattttgaagataaatttcacaatttactctttttttctttacttttcctttcatttctctattattagggaaaaaggtgggggggg

SEQ ID NO: 258665 - DNA, 400 bp, Glycine max
  unsure (1)..(400): unsure at all n locations
tgtgtggtagctggtgcttagttctaccctttntccgttagggtttctgtcattgatcaaaaatgacttctgctggacctactttttctttttctgaaactccgactatcacaactgcgaaactaaactggaagaactatttgtcctggtctgcttcagttgagctgtggttccttggccaaggataccatgatcatttggaaaagggtatcgatactgttccaagtgacagaaaatctgagtgggagaagctggattatcagctatgtgctgtcttgtggcaatcagtcgaggcggatgttntggagatccttagatcgttcaaaacatgtngttctttttggaagaaggccagagaaatctttgccaatgatattcagaaagttgtttgatgcactat

SEQ ID NO: 258666 - DNA, 508 bp, Glycine max
  unsure (1)..(508): unsure at all n locations
agcttccatcaatgccccatgtggcgtccctaaattaatgactggtttaatagtaataatttaaataagcaaaaaccatggtaaatnntttttttctttttctttttcatttctttctcttttcaccaaaacaaggttntgaaggaaaatcctcactatagagtcctgaatggccagttcacaactctattcggagtcatttctttctcaccgctcataatctctaaactatnttgctntttcaaaaggaagaatgtactagccattactttaggtcgtcacgtgcaaataaaagaataaaatacggtcgataaactctnttacaaataaagttgctaatgctttcttttanataacaagatcgatcataaatgcattcatcatttaatgctgtccaaaatatgggagtnttacaaaatatatagtgtcatccagagcaaacgtgtccatagtggtggctcagccacaagatacaatcatcaaatcctatacatcangtctacccata

SEQ ID NO: 258667 - DNA, 383 bp, Glycine max
  unsure (1)..(383): unsure at all n locations
tggcctcaacagactacttatttccagaaggaaattcaatcaatcgacctccaatatgtaatggaaagggttaccactactggaaaacccgtatgcaaatatctattgaggcaattgacttaaacatatgggaatccataaaaatagggccttatatacccaccacagttgaaagaaccacacttgatgaaagcacaactagtggaagcacaacaatataaaaacctagagatagatggtctaaaaaggatggaagacgagtacgatataatttaaaagccaaatacataattacatctaccctaggaatggatgaatatttcanggtttcaaattgtatgagtgctaaagaaatgtgggacactctacaagtcacacatgat

SEQ ID NO: 258668 - DNA, 332 bp, Glycine max
  unsure (1)..(332): unsure at all n locations
cacctgagctgcagcttccttgttaattctgagcgtctcaatatattatgcgctctgaatcagacatctgagttgaatgttatgtccatttgaatttctcgagagctctcgatgatcaatttccagcgtctcgatatattatgcgccagaatcggacctacaagggaaacgttatgaccatttgaattgctcaagagctttcattgttcaatatccagcgtcttgatataatatgcgcctgaattggactctcggtgaaaagctatgaccatttgaatggtcaagagcttncattgtcaattttgagacgttcgatatatcatgcgcctgat

SEQ ID NO: 258669 - DNA, 402 bp, Glycine max
  unsure (1)..(402): unsure at all n locations
gcactacacatgaaggcccgtgttataatctattacaagagaacagntacagacactatgtgttctgtggagtcttcatatcaccctccacaaatcaaaacatatggcttcaactacttgtttttttacttttgatcagactccagaggaaccccctgccaaagatcccaccacagaaatagtagcatgtccttcacatgtcaagtgttccaatcacttattgatatgactaatggtagagaggtcgtctagctctacgggacactgaaagttcagtatcaattntgaccctgaatagtcccagaagaatcaacttcaaaagttaaaaataattgtaataatcatatcaataatgcaaagaanaaatgcaagagaatgggagacatacagatagcttatcac

SEQ ID NO: 258670 - DNA, 453 bp, Glycine max
  unsure (1)..(453): unsure at all n locations
agctcgccacccagctcgcccaggcgagcaaggttgcttcctccagatgcaatagccttctggaggaatcttctggagggcccaagtgggcctgggtgctatttgcacccncattnttactaaatacaccccctaccttatttttggtgattcttttttcgtaaagttacagaaacttacgaatttcgtaacgatacttgttttctttccgtaatgttacggaattctggcgattacataatcatcacttttttgacttacggaatgttacggaacctcactaattgtgcaacgatgcttcctttngatttccggtgtgtaacggaaccttacggattgtgcatcaatattttcttttgatttccggcacgtcacggaatttcacanattgcctaatgatgggtgccaagcacctcataatgaccaaacacaagttgcatgacaccaagcata

SEQ ID NO: 258671 - DNA, 457 bp, Glycine max
cgttaaagaactgagggaaaatcaagaacaagcttgtacgcacatctttcgcgtgtatgatatccactccacaaggtttgaagtagaagagagcttcaaccctataacgcaatgtggcggacaaaagtgggcagtaaacttgaatgatcgtcattgtcaatgcggaaggtattctgcgcttcactatccatgttcacacattattgcagtttgtggttacgtgagcatgaactactaccaatatatagatgttgtttatacaaatgagtacatcttaaaagcttactccacacaatagtggcctcttgggaatgaagcggctattcctccttctaatgacgcatggacacttatccctgacccaactacaactcgtgcgaaaggtcggccaaaatcaacaaggataagaaatgagatagattgtgtcgaaccatctgagcaccgaacaaaatgcagt

SEQ ID NO: 258672 - DNA, 522 bp, Glycine max
  unsure (1)..(522): unsure at all n locations
tctaagtcacctgcggcatgcaagcttgtagaatggctagacatgatacatgtcagggtttggtttgtttcaaggataaaagggatgccccacattatttccatgacacaaatgcaaaaatgatgattctggaaatttatgcaaaactggtcatgcatgcacctatgtggacactcaagtgtcaattttttatggtcatgtgatgctagggctcacgattcatttcctctattttaaatcaacccaatggttccaaaatatgttcttttatcaatttgtgcattcatccgagtccatttcgggcgtccggtgaaaacttcacagcattcacccttcaggtgtatacacatttttttcaaaaactagttatgatcaatgaattctcttcaaagaaaagttggaaatcatctcttttaaaagcatgtcggttnttagctagacaacttactgttcttttctctctctttttttttaattggntattactctttcttgttggtctttttcttctttttttttcat

SEQ ID NO: 258673 - DNA, 432 bp, Glycine max
  unsure (1)..(432): unsure at all n locations
tatgcgcatatttccttacgaacgttcacttgcacaagacatcctatcaactattattaatgcacccatatacaatcaaggtagcttcattacctagattatttacatgtacttcctaggtgtatttgttatttacatcacacacgcctccttggctgaatttacatacatacatactcaaagcattttggggtaccaaaaattgcacatgcgcccatcttggtatttctaatacccatacatatacaaacttcacgatgaatcttgactacctacacaataaggtgctacattntcatgctttttttttcaagtttttgctacctaaagccacatgcaaattcaagcatattttcctttgctgactaaaattgtattcaaattagaagggatatatctttttgaatatgtttcgtcacataacatgcaaca

SEQ ID NO: 258674 - DNA, 407 bp, Glycine max
aagatatggacaaattacgattagctagtagggcactaactgaaattaaattgaatttaaatataggaatgtaagcaacactatgcaagactaaggtgttggttaagcaaattgaaccaatggcaagaatgggtataatgtcactattatgcaaagttacagttttatcataacaagctgatatgatctataactatgaagagagcaagtaatatgaatgcttgcaccagaatctaaaagtcaacaatcatgaagaaaattggaagtggaagtagaaagaatcataccacttgaggaagaaacaccgtgaggaatgacaacattggtagcatgactctataaaagattcatcaattggctatattgttgagcagtaagttgaaactgtgaacccaagtcaacaaaag

SEQ ID NO: 258675 - DNA, 415 bp, Glycine max
  unsure (1)..(415): unsure at all n locations
tcatatgattcangaagctcacanagcacctganagaagtttctttagactaaaattgcaatctaaattgtacatgtcaacagtttttcaccccaaaatttagtgtagcatgcctttcaattactgcaaataattacttcaccaattcaagttcgtcctacctttccaaatcaataaatactaaaagtgttattgttagttataggcaaatagaaattgatacatactgagtccattaactttgattaataccaaaaggcaaaacataacatgtctttaatagtaataaaagggttaccttcacatcgttgagaaagataaatttacatccattcagatgggctcagactgctatatccatgtcttctacaattatcctctcaagccaatcaccagattcttcaagtgcttttat

SEQ ID NO: 258676 - DNA, 283 bp, Glycine max
taacgatacttccttcactaaagcggtgatccatctccacacatattctatccatagcaacactacaaatctctgcaccgcaatgatgaagattaatgattggactcccttctgctcttgaacgaccccgaacttggatctcgtcattcatatctggtaccagaatacttttagcaacacaaaatgcttggacatcggctaaaaaattattccagccactctctctcattgtgcccaaccgagctttgcaacatcaactaattccatggcattcacaatatta

SEQ ID NO: 258677 - DNA, 348 bp, Glycine max
ctgcttgtatgatcttcaccgacgaaaggatcacagtgtgtctgtacagaggcgcatctgatcatcatgctacgatgaacgccaaaataactacggcgcatgaagagggtgagaatgaaggagaaccccatgctgtgactggcatttctatgaaccaaggtttccaccaacgcacgaagtctgtctaccgcacttgcaatgacaaacaccatctttagcaaaaaccaaaacaccaacctagaaatgaattttgcagcgagaaagcctgtagaattcaccccaattccagtgtcctatgctaacttgctcccatatctacttgatgattcaatggtagccatgacccta

SEQ ID NO: 258678 - DNA, 437 bp, Glycine max
  unsure (1)..(437): unsure at all n locations
agcttcatgataatgaaccaagtagttttgatgatgctcaaaagatcaagattgagtcaacaagctcaagatcaagattgatttcaagattgagtcaaaaaattcaagatcaagattcaagattcaagagaagaaatcaagaagcaacaagtcaagacttcacaagagaagtattgaaaagaattgttctcanaattttctgagttatcagagtatttactctctggtaatcgattaccaatttccagtaatcgattaccagtgaccaaattggattcaaaatattttaactgatttgaacgttccnnatgttttcnatagtgaatcgatacactatattggaatcgataccagtgatctgaacgtggaattanatccagtggaagagcacaactctcataaatgcatgtgaatcgatacatgatatagaatcgata

SEQ ID NO: 258679 - DNA, 139 bp, Glycine max
gcaaaagtactgtaactctagcactatagactatggcatatttacatattggaattacattagcatcttgaactgagtcattatgctaagctcagaatagggtgacagaatcatgagtgacgaagaagaccgtgatcat

SEQ ID NO: 258680 - DNA, 480 bp, Glycine max
  unsure (1)..(480): unsure at all n locations
agctngcaactagtaatataagatatcttttggtatattcaccttntcacctaccataattntgttcatgcacaatctatcctggtaattaacatagtctttgaacccaagtctgggtataaccatgttaaacataaagttgtggatgagtctacagatgtaagagagatatacggtccttaagaatttgatgagctcaactctatcctttgtgatttggccgagcccgaccatagagcatgatgtcaacagtctcttgggtgatatccttctcccaatctttgtcaaaaaccaggccttcttccaacaaccagatgtatgggcgatggttgttgggtagacaatgatatcttttccttgaatggtacctctgatgttgactccttcttgccttgtagtccccagaacatgcatatggaccatagtgcaagcctaaactttttattaaanatggtcacctactgatcaacacgttctgtt

SEQ ID NO: 258681 - DNA, 413 bp, Glycine max
  unsure (1)..(413): unsure at all n locations
ctagccttaggttgtaccatgttgctcatgttgttcctcctatctctaatagtgaatccactatataggaagagcacatggctttggaagaggcaacaaatgaagggatttgactgaagggtccgattagaaatctttgattttcacaagaaaaggttgtcattttctacaacagtctaagtgcaatctatttagccaaggatcaattccatcatgaaaggactaaacacattaacatcaaatacaacttattcgtactaagaataaggtcaaagtccagaaagttaatacgagggagaatacaactgatatgttcatgaagcatgttccaagaagtaagtttatgcactgcctggatgtacttaatgtagatcgctagagatgaacaaagttacttgtaattcanaaatgta

SEQ ID NO: 258682 - DNA, 402 bp, Glycine max
  unsure (1)..(402): unsure at all n locations
accttctgcgcctcctcatagtttgtgcatgataaaacacgctctatactcatctcccactccaaggaggcctctgcatcattctttcctcttaaatggaggaatgtcgagtataataccatcaataccgttttgcctatgaacaccatcattaccctctctactacttccttctccattatgatctctattatccatttgatccaacactctcctaggaggccttaatctcatcgctncataatcctctccaaatgccgcatcacagcttgcattcggaattgcgaaagccccactccatcattaggaatagtacccgacatctcagacacacaaatcaaacgcatcatgacaatcatagtcgctgtttgaatacctcacccactcaagtgtttcacacaa

SEQ ID NO: 258683 - DNA, 307 bp, Glycine max
  unsure (1)..(307): unsure at all n locations
agctcctccctctgtgccctatanatagggggaggagggattatcacactcgttcaaccctcctggngtctgaggatcacttgaagatagtgaacaaaatcatttccgcgaagaaaatccaagtcgaggtgcttccataacgcgttcgaaacgtttccgagggtgatttcgtgaagattatccgccgcctttcgttcgttcttcgacgttcttcggtctttaaccggttagtttccgatatctaacttttcaattcattctatgtacccttggtggtccccacttgttatgcgcacttttattttca

SEQ ID NO: 258684 - DNA, 457 bp, Glycine max
  unsure (1)..(457): unsure at all n locations
agctntacaatnggttgtttgcattttttcgtttggaacttgagaacatggaaacaaaggtaaggggaagttcatttaaccttggaacccacacttttgattgaaatggatgaaccctaaattttggtgatgtgaaaatatgatttattttcattctttcctctatttgacctactgggaatgatggatgtattattttctttttttgagtacaaaaatggattcattgatcccaaaaacttggtaaaacatttaaaattcgttgaatttggctttgtataactctagatattgcaatttgaagttcaatatcaattatacccttaatgtatctgaatatacgtttcataactttccaatgttccttactaggattacccacacacctactcacaacactaactggctttactangcctgatctggtcatattgaacatacatgagattgttacaca

SEQ ID NO: 258685 - DNA, 360 bp, Glycine max
  unsure (1)..(360): unsure at all n locations
gtacaaacaggtgctaggctcagatcgatcgatcattacctcgcgtccggctaaagacgttaaagaagcgctcctatgaggcagcctagtatctctaacttttctttntaatttcctgtttcatacttgttcgttttcttgaattatatcctgaattcgcctatgtttatatgcaattataggaattttttttttagaaaaaatataacaatgaacaacacaattctgcaaagaatttttttttgaaaaacaaaaaaaaaatagctcacctgngcagcaaccccaagcttccattgtgcactnttgctttcatttttttgcatttctttcatctcacacaagtaagtaccatcttcattc

SEQ ID NO: 258686 - DNA, 440 bp, Glycine max
  unsure (1)..(440): unsure at all n locations
agcttctagccaaatggacttaccttgaattaattccttngatagcccttttgagcctcgtttccctttccttgttttgaagctcactacaagccttaagtgaaaaaccatgatatcaccatatccttaaggaattttggagctttggaattgttttgggaataagtgtggggggtttttgtttcattggacaacttgtttggtggctatgcttcatgaatgtattttgggccataacttgatgtacattgtatattggttaaatgttggacatgctgaatgaaatattgtttctcaaaggctatagagtaaaaaaaaaaaatcgaaaaaaataattcgaaaaaagaaaaagaaaagcaataaagttgagtgaataagatcttaaatggcacaagaatgatgaaactcttggttctactcttcactgctaaatcttatct

SEQ ID NO: 258687 - DNA, 485 bp, Glycine max
  unsure (1)..(485): unsure at all n locations
tatcagaatntaatagtaataatagaacctcaaagagagctgtgcttgatcctcaagagaaaacaacgctagagacttagccttccattaatcagtagagaacgaaattgtagatttaagcaggtaacaaaattttattgctaaaacgaaaagtgactaaaacgaaaaagagagtagcactctaaaactaaaatgaaaaagagagagaggagagagcgggagagagagtaaaatgaaaagagaggagagagagcttaaactagaaccttggtgctgttatatagttttcagccccaaagtttacaaatatgttttaaatccaagcctatgaataaaatctagataagataagataagatacgatctagatgaaataatatctagatgaaataatatctagatgagatcaaatctagataagatangatctagatgaaataatatctagatgagaatcaaatctagatagatangatctagatgaa

SEQ ID NO: 258688 - DNA, 442 bp, Glycine max
  unsure (1)..(442): unsure at all n locations
agcttcacaatatccannaaattcgatttcatttatcatgaaacaaccctaaaccaagaaaacagagtagaggcagaaaactctgcccaaaactcattcaaattccatagttntccctactcacatacctcagtaacattcttnttgttctactttgttaaccattggatcgccttgaaaantttactgcatgttcgtagtacataaatcaacattntgaccgttgggatctgctagaaaatgcctggaacacgagatgtactacccttcccgtgactagcaatgcacaaccatttttctgcactatgataaaaatcttgctgcacaattgacagctnttggctgcacaattggcagaattcgaaatccaacttgcccacantccaatttactcannatggatcctacangtnctaaatcatgtantaaatcatattaaacc

SEQ ID NO: 258689 - DNA, 542 bp, Glycine max
cgcatgaccattgttagcgcactatgagatctgaagctagtcagggatcgatatagagtgcatcacgtatggatcatcgagagtctccatccttcacttttagatgctatcatcagtagtgtgcacgcagcgggtgcgtaaacgtgaacaagtaccaacactctcagctcatattgatgagctcctcggtaatcgatcggcactcatagtcaagactagtgtagcccctagacaaccataccgaagtggcattctaacttcaaatctgaacaacaatcttatacgcatgatctacataatgcgaacgtagaatgtgcgaatgctcacacacgccgtaagatgctctatcagctatcacttcatgctaagacccgattgtatagacccatgtcgttatcgcagacttataagaactcaactctgatcaagcagatgggaattgagaagacatctgcgcgactatctctctaatgaatggaaactcttaccttggtgacacgcaccatgccgtatctgtccgcaccctatgtgctgcacactag

SEQ ID NO: 258690 - DNA, 380 bp, Glycine max
  unsure (1)..(380): unsure at all n locations
agcttgngttngatacacagccagtcctcattgggctcatcatatntcaggtacttttcanaattatggtctttccatctaaataaaaaaatttagaagattatctatttcctctaatcatgcttgagaaagcttaaaatattatattaaattgtatataatttgagaaagcaactagcactcagttatatcgatctcttacttattggtgccaaaagcctacctataatattgtctttataacattgccgcattctctcaccaatcttgaacatggcacgcttaanatactaacatgtcaccaacaaannaattctataatataagttagagctggtaattaaggccacatcagtctaaagagacatcatggtcaacac

SEQ ID NO: 258691 - DNA, 511 bp, Glycine max
attgtcccataggagcagctgcactatctaatactcaagctctgacatgcataccaatgatgctggcattcactgctctgcgaatgtttctaacttctccaccagacaccagcgcgttcagcaatcaagatctctatgtctgattattccttgcgggctttgttgacatgcggagccgagctgagcaacgctgtatgacagcagcaactggctactatgatctgtttagaactttttggttaaccttatggcatttgcgctcaaagagggagcacacactacactcaatctttggtgcgtggcgctaatatgcgaggatgaaaggaccggattctgaagagacatgatggaacgcttcagaggaaggaaccagagctacctgagattgctttaatacttcgcttccggtctgatagagcgtgaagatgacagctgaacatatatagtgtacattcatcaatcaagtgtcctccagaagacaatgatcgactattaatggccgcttgtgtcg

SEQ ID NO: 258692 - DNA, 84 bp, Glycine max
gtaccgatggactctcgaggtgcacatgaagttataattgagttgagcgaaggtggaggttgatggtcatcttggtgaggcgtc

SEQ ID NO: 258693 - DNA, 267 bp, Glycine max
acgtgcagaacaatatcctttatccattgtgactagaacgaagcaatgactaagagtagcaattgaaagaagaacgcatacgcaacacacagatacctactcgtcaaggctttgaggacctcactctcgacttcaacaagatcttcaggagttctatagcaggaacttctaaaccagacaagtactatcagcttatcgcgacgtatgctaccaacctaaaaacctatgtaataaaaatgccaactagtcttagacagaattccaatc

SEQ ID NO: 258694 - DNA, 435 bp, Glycine max
  unsure (1)..(435): unsure at all n locations
agcttatatacatctgcaacgtgaattctattacatctgataagctaactaactaattcagccaactaactaactatttctggtaaagctgtttatactgctaagagatttgtcaagtgactgatttctataaatgtaatgacctcaatgtaacatttctttgagagatgacctgtttttagtagtcagttgtcctatcattgattacttatacagaaacttcttgagaagttactttttgatataggatgacattgcttgaaatgccagatatatgacgctaatggtataaaatttttctgtttgcagggtggtgttcaaagagatcatttgatggatggcactattagaggagttctggtgntagaactgttcaagagagatgggatgggaacaatggtggctaggtacgagaaaatcgccctctatctcatg

SEQ ID NO: 258695 - DNA, 419 bp, Glycine max
  unsure (1)..(419): unsure at all n locations
cggatattcagcctgacgagggatcgagggtttagtaatttaggctacaacatataacacaagagcatgatttattagagaaatatatttctatgcatcagcnttattgttagaaagacccaacatatctacctactgctgtcattttatttaccttgcattntatagtttttagcacacaagtttagtttaaattctgtttgaaattatcacttatacatgttctctcaacaatgcttcgattctgaacttaattcaggctaacattaggtccctgtgttcgatactcggattcatccgttttaattntaaatacttgacgaaccagtgcgctttccggtgaaaactccccaatgaaatttcctcgagacataaatgcacaaaaagtaactgaagtgcggngtgatcaaagtatttat

SEQ ID NO: 258696 - DNA, 512 bp, Glycine max
  unsure (1)..(512): unsure at all n locations
agctntaatctgaaggatatagccaaatgggcagatattgattattcacagcatactctagctagcatgaattttaaatgggtatgattcataatcattcaaacacaatgtagatagaaccaacaaaagtgtttcacgatctgtgaattttgtatacagccaacaacagctgctagaaatctctgtctgtcctagtattaggcctcgccagactatttgtctgatggcttaatattaccagagccagcttgatggctttaaatcaccccttttcacttgcgaatatttatttggcttctttcatataattaatgtgcacatattatggccgagtttcatataaagcaattcttgatagtgtctatagatctaaaccaataagagagtgtgtggttaaaagagtttgttagaacgggttgctaacatttctcttaanataatatgaagttcttactacagttattntaatattatnttgagttcttaactggctgcgcctatcaacatcatac

SEQ ID NO: 258697 - DNA, 414 bp, Glycine max
  unsure (1)..(414): unsure at all n locations
tgaattcatattatgatgttgcccaagttaacatcataatatgaattcatattggaagaactttcctcatctcacgattaccttttcaaaacttcaattccagaagcattaggcaagtgtctgaaatttggtgtactggatctctcacacaaccaattctcttaggattccagacggtttggaaaattcgattagactaaattctntgttctcaacaataaccttctcttatgaacaatacctcccataaatgggacgaatatgcactaaattgatcaagcttgacttgtccaatataatagattaacaggaagcatcccagtggaaattggcaggcttgggagaatngatcaattntctcaatttatcatttatacaattggaaggaaagattccatctgatggtatctttac

SEQ ID NO: 258698 - DNA, 171 bp, Glycine max
atcacatgctagcgtgcctatgaatgattcacactttactggtaacatgtgtcaatactattcgaacaatatgcagactcgtatgtcttggtgaaagaaccttatcttgagaccgcacttgctatatacttgaataacactatttcgacaaggtgccagatggctacatca

SEQ ID NO: 258699 - DNA, 369 bp, Glycine max
  unsure (1)..(369): unsure at all n locations
ctatggatgattctaatttccaataattgttgtctgatatatttgtttgttgtctttntatggtttttgacatatataaaacttctgtatagtttatttggccgcttattattctactactgaaagatagcttgaaatggtagatgaatcgttgatagagattatgagctatttttactgtttatcaaattaaagaataatgaatcttgcgtgtgcttggtttggtgtttgcactttgcaagtgatgtcagatggatataagaaagaaagaaattagaataaaaaaatgaggatttataagggaaattttgttgaacaaatgttantttctggtaatttctaccttttcttggtattggttgtatatgt

SEQ ID NO: 258700 - DNA, 457 bp, Glycine max
  unsure (1)..(457): unsure at all n locations
gctaagcttcaagagaaatggcctcagcaaattccttatttccatattgaaattctatcaatagacctccaatctttaatggagagggttaccactactggaaaacccgaatgcaaattnttattgaagcaatagacttaagtatttgggaagccacataaatagggccatatatacctaccatagtagaaagaattacaatagatggtagcacatcaagtgaaagcataacaatagaaaaatctagacatagatggtctgaagaggatagaagatgagttcaatacaatctaaaagccaaaaacataataacatctgccctgggaatggatgaatatttcagggtttcaaattgtaagagtgctaaggaaatgtgggacactctacaattaacacatgaagggaactacagatgtaaaagatctanggataacacactaacccatgagtatgaact

SEQ ID NO: 258701 - DNA, 408 bp, Glycine max
  unsure (1)..(408): unsure at all n locations
tgttggattatggngcacccgtcatatgtggtactaggtggcgatcgggcgatggcgcaaatcaactctcccacttccacaaatcaaacatgaacccaccatccccaggtgcccaccttcaactgagctcacgtactcctacgtagcccttatcctcgttcctctcagcaccgggtccccattaaccactccaagcttccacaatatccaagcaattcaattccaattaccatgaactaccctaaaccaagaaaacatggcagaggcagaaaactctgcccaaaacacattcacacattacagctgtccttactcatatatcccagtaacattttcttcgtttcgattcgtaaccattgaatcaactcgaaaaatttactggaggatcctagtacataagtctacatc

SEQ ID NO: 258702 - DNA, 459 bp, Glycine max
  unsure (1)..(459): unsure at all n locations
agctntgctttaatccttaatgatgtttgttggatagttatcaaataatgataagtggtggcggcagcaacaatgatagtggtgatagcggtagtgacaacaacggtaatggtggtggtaatggtgagagtggtgatgatagggtgagacgaaagaagggagagagagagagtgacaatcctatgttattgctttgtaacttaactcctacctcaggataagatatacactacatacacaggatagacaccaaacaattgattacagcaggataacatagttatcctggccactaaatgagccctgaatgtataatactagttaagacaatgacaagacaatgactgaatgattaattaaatgaccatagttgtaactagtggcaaatatttattcatctccttanatattataaaaactccaaacatctaatgtacctcagtcagtgatcagtgcagc

SEQ ID NO: 258703 - DNA, 336 bp, Glycine max
  unsure (1)..(336): unsure at all n locations
ngagatgaggaagtgtataaaggtgaacttcctgcttttattcgttgaccacatagtggtacctggagatatgtcgcgggggtcaggagaccttgnggacgtcaggtggggtgctattgcccaaaaccaagcttgaccaatcccgacccaacctgtgcatagtcggtcagtgagaacctgtgatgtacctaaacaggcgagctcctggcagtcaacagataaaaggaacaaagaccacaaagcaaggaggcttgtggtggctggccagctgtgaattatgtgtgatatgtgattatggcctctggtaatcgattaccaagggtgggtaatcgatta

SEQ ID NO: 258704 - DNA, 391 bp, Glycine max
agcttgtacgattatggcgtacccatcacatgtggtactaggtggcggtcgggcgatggtgcacaacaagttttccacatacacaatgcgcgcataaacccaccataccctattgcccacctccaactgagctcacgtactcccacgtagcccatatcctcatttatctcaacaccgggtccccatcaatcctcccaagcttccacaacatccaagcaaaacaacattcatacagcacaagctatcatagccaagcaaaacagagcaaaggcagaaaactctgctcaacacatgaaccaaaatcacagcttttctcacttaaagaccatagtaacaattgcttctatccaacttgataaccgttggatcgactccaaaatttactggaagc

SEQ ID NO: 258705 - DNA, 333 bp, Glycine max
  unsure (1)..(333): unsure at all n locations
ctagagntttggatgacaccacttctagagagggaagattagttattgtagacgcgacaaggattaccttgataagtctgagattggttcaacaaggaacccagagagaagctctcacaaaattntatcaaatgccaaaagttcctctattgaaaatgaaaaccaatacatatagtgtgtctgaacaaaaagatagaaataaacatgggccttctaaacagtttgggccaacattacaactaaaaaattataacataaaaagaacatatntggcatgggccttcaaattagtttgggcattcagcaacaattaatagtcttggtaatgcctct

SEQ ID NO: 258706 - DNA, 355 bp, Glycine max
  unsure (1)..(355): unsure at all n locations
agcttcaaccttaggccatcatttctgccccanattgcgaaaggagggcatcttcggtgtcgtgaagtgcgtggctacgagtgggacttctaaaattcatgtttgggtggacttctttccctctcgattttcgtgggtatggggttatgggagatatgatgggtaatccagctaggcttctgctcgtgtgatgattactcgngaagacatttgctgaaagcctcgttgaacctgccacgtttgcatgagctacacatacccattctgtttcagggtttttgtgatgacggctgcgacgtttatatgctgcaattgcctatggaaaactgtcacagatgaatggtagagttaacct

SEQ ID NO: 258707 - DNA, 355 bp, Glycine max
tgtctcagcgtttatgcaagacggagaccatcatgctatctatcattttcaagtaccaagaaaagttatgtctagccgcggtccacgagcatatgatcgcggacgaatatgcccaagtatacgcggataaagaggctacaggaagggtgatcgactctctacaccaagaggcaaccatgtggatggatcggcttgctcttaccttgaacgggagtcaagaacttcttcgattgttagccaatgccaacgcgatggcagacacctactccgtccccgaagagattcatgggcttctcggctattgtcagcatatgatagacttaatggcccacataattagaaaacgttacgaaac

SEQ ID NO: 258708 - DNA, 384 bp, Glycine max
  unsure (1)..(384): unsure at all n locations
agctngcatcttggaccctagctccttcctttctttcttttcttcatcttaaagtacgttccttgagtttgacaggtaagggaagctctaaactaactttcatattatgttagatatgttggatcattgttctagattattaatagtgtattaattcgatattcatgtttggaaatgaaagatttgagttggatatggattggaacttaatagaagggtaataatagtagaaagtcatgatttctgcagaccttgtttcgcctggctaacatcattttcatcgcatctaacattcgagtgaggtctcacgaccttatctcaccatggctaatattatcttcgttgtggctaaaatcacatcttttctatatagtgagaatctgt

SEQ ID NO: 258709 - DNA, 366 bp, Glycine max
ctttgtccacaagaaaatcgctggaatccgttcaaaaggtccaatgccttaactgttcttttttacttttatcggttaaaacaaaccgtttagaagtctaaaatcaatactccgcataactttctcgctttttaaagaactacataggtctgagttcctcatcgcaattgaggatatgtaggagcaatagagattgaagtcatgattttgcacatttgattaaaggttgccgtcccttgtgacggacgtgtggggtgctaataccttccccgtacgtaaatgactcccgaaccttttattctcaatattcataggtgatgagaatcctgaaactgaccaaatacaggctaaaggcccaagtggaga

SEQ ID NO: 258710 - DNA, 219 bp, Glycine max
  unsure (1)..(219): unsure at all n locations
agcttganatgaataatggaagctctcgagaaatatatatggtcattacttttcactcggattggcgattcaggtgcataacatatcgagacgctcaaaattgaaccaccgaagctcttgagaaattcaaatggtcataagttttcacatggatatccgattctgtgttataatatatcgagaccgtcgaaattggaccacgacttcggaaatccaatg

SEQ ID NO: 258711 - DNA, 323 bp, Glycine max
tctggtctcaatttcgagcatctcgatatattacgggacttaatcttacatcctatttaaaagttattgcggtatgcatttgctacgagcgtccattttcaatttcgagcgtctcgatatattactggactcaatcggacattcaagcaaaaagttattgtcatttgaatttgataggagcttccgttttcaatttggagcgtctcattatattacgggactctgttggacattcgagtaaaaagttattgtcctttgaattggctacttgcttatgttttcaatttggagcgtctcgatatgttacgggactcattcggaca

SEQ ID NO: 258712 - DNA, 500 bp, Glycine max
  unsure (1)..(500): unsure at all n locations
atctctaagcacctgcggctgcagctaatggatttctgaaaaaggacatcttttaatgtaagaatcgtgagttcaataatgagatttcaagaactttcaggtagaagaaaagatgaaggttataaagaatatacgcaaacattctgaaagtgttttctatccataagaaaatttcaatttttcacattttagaaggaaattaaaattccacgtttttagttctttaaaaatttaatttaaaattccaacatttaaatctttcataaaaaacatctaaataatgaattttagattaaaaaaatctaaattctctgataaattacttttttcatttaaaattttctatccaaacgcactctaatttcttngaataagtttctnttcattgtagaaaggacagccttaatttgtttgtccaccaatcttaatcaacttgataaaggagttatgatatattagtgcatgtaatattaagagataatgctcattatctgtacaag

SEQ ID NO: 258713 - DNA, 435 bp, Glycine max
  unsure (1)..(435): unsure at all n locations
ctcagctatgagaatnttganagatataacatcagatacagtgtagctccttattaagattctctttgtgaagaaacatagcaccattctcttgaattgattgggttcaatcataactcataaatacataaaagcaagatgtaatattaacctctaccatagagtcacaagatctttcaacatacatagaacttgatagtttcagataaaaaaagatattcagatcaacattcatgatcgtgcttaggctttagtattttaacatttggtaaaagaattgtatttgggctgagtggtggattaggatcactatctactaattttgtggtgtagtgataagtctaactaaattattgttacaattacactgaagaactctttctcgactatctcaagctacactcattctatctttatttgtcactggattacttt

SEQ ID NO: 258714 - DNA, 496 bp, Glycine max
  unsure (1)..(496): unsure at all n locations
agcttactcaagggattgtctgganactggcggatagaagagatggctgcctttccttctgcagtcttagactcggngaaatacttcttcataaaattttctaccaccccgtcccaagtcttaagactgttgtctttaaatgaatgtaaccatctttttgcttctccggacagtgaaaatgagaacaaactcagccacacaacatcttctggcacacctgcaagcttgattgtattgcaaatttcaatgtaagtcgctaggtgtgcgtacggatcttcattcggtaggccatgaaataaattgccttgtattaaatgaattanagaatggngataagtaatattatgtgcttgaacctctggccgcgctatactagtgaaaaattgtggcacaacagaactagagtagtcttcaaaggtcactcttctaggttgatcttcagccattatgtnggcctcaagtgccctggtgtagattcccttatctatggaaagat

SEQ ID NO: 258715 - DNA, 442 bp, Glycine max
  unsure (1)..(442): unsure at all n locations
ctntggagtagacacatgggaccaactcattntatttcanaaaggaagtcgtatctagtcaaggtcttagagaccatacaagtttcctaacgatttctaattatgtgggccattaagtctatcatatgctgacaatagccgagaagcccatgaatctcttcgggggcggagtaggtgtctgccatcgccttggccttggctaacaatcggggaagttcttgactcccgttcaaggtaagagcaaaccgatccatccacatggttgcctcttggtgtaaagagtcgatcaccctatctctagcctctntttccgcgtatacttgggcatattcatccgcaatcctatgctcgtgggccgcggctagacctaactcttcttggtacttggcgatgatagctagcatgattgtctccgtctcgcatatacgctgagacaagcttc

SEQ ID NO: 258716 - DNA, 512 bp, Glycine max
  unsure (1)..(512): unsure at all n locations
agcttgcatctattcttaattatataaaaagactcttataatggatcataagttgaatacttactatttccatgcatgtggaagcttctntgtcttgttatagtagcaggcaaggcaatgatacaaatcttctagaatttcatatttttattattaattaagacttgatcaatcttacattaattgaatttaccgtggtgatcatgtgcgtgtatttggtagatctagctagtgaatgtttataccaaactgaatgatcaaagtgtttaagtaatatccaatagattagttttatctttaatatagtcatccctagactntattctatcatttgtcttaaattgatatattaatgatcagtggaatatcgattaacacanaagcatctatttattgacccagatcaaatgctttaggtgactntgggaattgctaattaacctanggttggaatttcataggaataaggttgnngaaaaatcggtactatggagtcataatcctcgatctct

SEQ ID NO: 258717 - DNA, 362 bp, Glycine max
  unsure (1)..(362): unsure at all n locations
tgtaatcgattacacacatactgtaatcgattaccagaggagaatttcatgaaatattctcaacagtcacatcttttcgtttggttcttgaatgaccatcaaaggcctatatatatgtgacttgagacancgaattgttaagagtttttcagaacaacaagtgtttattctctcaaaaagcaaaatcgttntatcctcttaagaattccttggccaattcaattgcaattcattaaggaatcatttgagtgctcagatggtaaaatctatctctttcaagagagattcattcttcttctctttctgattcactaagggattaagagaccgagggtctcttgttgtaaaagaattctaaacac

SEQ ID NO: 258718 - DNA, 405 bp, Glycine max
  unsure (1)..(405): unsure at all n locations
tcttagtttcagatgatgcagatgggtttgtagctacctcatgctctcctctaatgactatggcatcatttctggcactaaactgctgggagttggaggccatcttctcaattaaatttctggcttcagcaggagtcatgtctccaagggctccaccactggcagcatctatcatacttctctccatattactgagtccttcataaaaatattggagaagaagctgttctgaaatctgatggtgggggcaactggcacatagtttcttaaatctctcccagtactcatacaggctctctccactgagttgtctaatacctgagatatccttcctgatggctgtggtcctggatgcagggaaaatnttttctaagaatactctcttaaggtcatcccagctcgtga

SEQ ID NO: 258719 - DNA, 383 bp, Glycine max
  unsure (1)..(383): unsure at all n locations
agctngagatgaggaagtgttgaagggttataactttctgctnttattggtgaccacagagtggtacctggagatatgtcgcggaggtcaggagaccttgaggacgtcaggtggagtgctattgcccaaaaccaagcttgaccaatcccgacccaacccgggcatagtcggtcagtgagaacctgtgatgtacctaagcaggcgagctcctggcagtcaacagataataggaaaacaagaccacacagcaaggaggcttgtggtggctggccagctgtgaattctgtgtaatatgtggattgtggcctctggtaatcgattaccaaaggtgagtaatcgattacaaggcttanaattgaggacaggaggctaagatggtctct

SEQ ID NO: 258720 - DNA, 384 bp, Glycine max
  unsure (1)..(384): unsure at all n locations
ntgagccaaaatcctgactcaccatanaccttgacccatggtgagtattgtaattcttaccctcggaagcaaaanaaaaggggagagggaaaatttccaatcaaagaggaagcaaaaaaggagagaaggaaaatttccaatcaaaggaaaaaaagagaggaaagggaattcccaatcaaagagtgggagaaagcaaaaagaaaagaaagaaaattcccaatcaaagaatgggagaaagaaaaaagagaagaagaaagggaagaaagttcccgatcaaaaaaaaataatatgcagaaaggtctntggaccggacaatatctgaacaatacagaattgtcaccaaatgaataanaagaaggaaagggaaccatgacctanaatggt

SEQ ID NO: 258721 - DNA, 369 bp, Glycine max
ttcttccatagcttatgccctagtggatggcgccttctctcacctcttctactttgtcttccgctgcatctccatggtggaaaatcaccattaaaggacctcattgaagctcaaacatccagcctacatagaagacccacaaccaagcttccatcaactaggtccactatcccactcaacatctgtgataatgacaatctccaaacaccaacagtgctacaacatcgatgacagtagtccactctccttgaccagccaaagctcttgctttctcttgcaagtgggtactgcggatcccaaccacaccatttctatcttgtgcactcggtccattcttgcgccgagatcttgactccttctgctactctt

SEQ ID NO: 258722 - DNA, 420 bp, Glycine max
  unsure (1)..(420): unsure at all n locations
tcatgatgatgaacagcaattntgatgatgcgaaaagcccaaatgattgattcaagatttcaagatcaagcatcaagaatccaatccatgattcatgattcaagagaagaaatcaagaagcaacaagtcaagacttcatataggataagtattaaaagattttttcaaaaaccaaatagcacagttttgttttagaaaagaattttctcaaattttctaagttaccagagtgattactctctggtaatcggttaccagtgaccagtttggttttcaaaatgttntcaaatgatttgtaacgttccaaaatgatttcaaatagtgtaatcgattacactatattagtaatcgattacaagtgaatntgaacgttggaattcanatccaattgtgaagagtcacaactntccattaaataca

SEQ ID NO: 258723 - DNA, 487 bp, Glycine max
  unsure (1)..(487): unsure at all n locations
actaagcttacacatttagcttcagcaatcaatcattntctactgcactntatctaaatttcccacacttcacaatccacatacaccattcatgacgaaagtccaatgtcaaccaactgagctgaactaaaccccttcattaaaaaattgaaagaaaatttatatcttgtctcaaaaattaaggaaatgtttggtttggttgttttctatagaaaatgataatgaaatgtgtttggttggatttttaaaaacataggaaataaccagaaaataaaaacaataaaatattatttacagtgttttcagttgaaaaaacagaaatctcattctggataaaatgaaattgtgatgacaatcaatataatttcaagcaaatctaaaaatataaaaagacaagaagtcaatatatcatacacnttttaatattttatttcataaanacagaaaacgagaagtcaaatcanacatattttcagaattataatct

SEQ ID NO: 258724 - DNA, 161 bp, Glycine max
ctaaataaacgacttttattaatagtattctacttgttagtagacttggatattagaatcttttttactactaatattggctttactaatattactttattaaaatcataattatttaatatttaaacaaaaattaatgttacccaattatcacactatga

SEQ ID NO: 258725 - DNA, 485 bp, Glycine max
  unsure (1)..(485): unsure at all n locations
caatgccaaanatcattaatatatatgatatatattntatagaattgtgagatntatcaattttcaatacaaagtaatgtaatatacattttacataaatgacatctttagctctccacttaatgtttttccaaaagcgtagttcatttattattataggtaattctttataaacactgtctacactagttaaatataaatatctatttgtagaagaaaaaaaatataaatctcaaagagagagacaagaagataagaaagaatataaaataagatgattgatgtgtgatggaaaaaaataatgaatttttttatgaataatataattcaataacatatacatgtgtttcccctgtgaaaatagatatattcccgtaaatccttaggtgttagcatgatgtatttnntatgaacactaattgtttttgngatgattacagatatgncaaactgatctggaatttaagcttaacatgatgagtgat

SEQ ID NO: 258726 - DNA, 460 bp, Glycine max
  unsure (1)..(460): unsure at all n locations
acgcagtgacaatagccctgcgaagactcgctttcgctacggctccggtggtctaccttaaccaagccactgcctatgagtcggcggctcattcttaaacaagcaccgcacgctcgagtatctgaggttcgctgctactgatctggaatgcttacgagcactaacctttttatacgtccgcagcctctgaatcgagcgcctcgaaccactactcccacgctcccaaacttgaatcctcgtagccctcaccaaatcacaccgacattcactcttgacccgatatgctgcttaagtcccctacaccttcacacctctatattaatgctttgcctctangacattaaacgaccttactttccccctacgctgatgaccccccatatccaagcgctcactatcatgttcgcccctcaataacctcccgccatcactactcctccactgtttacccgcccccccg

SEQ ID NO: 258727 - DNA, 472 bp, Glycine max
  unsure (1)..(472): unsure at all n locations
tacagtntgngaagaggttntgattgatctaaaagattaatcttcttcaaccgatatgcccttaggcacggcaatacataacatagaaatcacactcggaaagggtggacaattagctagagcagcaggtgctgtagcgaaactaattgcaaaagaggggaaatcggccacattaaaattaccttctggggaggtccgtttgatatccaaaaactgctcggcaacagtcggacaagtgggaaatgttggagtaaaccagaaaaatttatgtagagccggatctaaatgttggctaggtaagcgtcctgtagtaagaggagtagttatgaaccccgtagaccatccgcatgggggtggtgaacggagggccccacttggtataaaaaaacccgcaactctttgcgttttctgactttgatgaaaagtttaaactgaacaatattgtgatattgatcctcctccacgctaaacc

SEQ ID NO: 258728 - DNA, 235 bp, Glycine max
  unsure (1)..(235): unsure at all n locations
agctggcttgtggngcttctatggaggctggatctttgagcttcaatgaggtcctttaatggtgattntccaccatggagatgcagcgaaagacaaaggagaagaggtgagaggaggcgccatccactagggaataagccatggaagaaggagcttcaccaccaagatgagccttggataagaagttagagaggatgcttcaatggaggaaaagaaagagggagagaaagagaga

SEQ ID NO: 258729 - DNA, 429 bp, Glycine max
  unsure (1)..(429): unsure at all n locations
tcttatccaagggtcatcttnggggtgaatctccttcttccatggtttattccttaatggatggcgcctcctctcacctcctttcctttgtcttccgctgcatctccatggtggaaaatcaccattaaaggaccccattgaagctcacagatccagcctccatagaagccccacaagcaagcttccatcaggttacatgccatccagcttcgcggacctagtgttcgccggggaaagaatcgaggtagggttgaaaagagggaagttcgattacgtttcctccacgagtgcgaatgccaaaagaatcacgacaacgagggcaaaaaggaaggaatgagatgcccatgccgtctcttcaacgcccgcgtgggtcaaacccccgcagacacctcatggtacccatcagtatgcgcaacatcacccgagctt

SEQ ID NO: 258730 - DNA, 215 bp, Glycine max
  unsure (1)..(215): unsure at all n locations
agctntgaggaatttcacacgacaataactctntacttggatgtctgattgagtccnctaatatatcgagacgctctaaattgaatgttgaagctctcagcaaattcaaacgacaataactttttactcgaatgtctgatggaggcccgtaatatatcgagacgctcgaaaatgaatgttgaagctctgcacaaattcaaacgacaataaccttt

SEQ ID NO: 258731 - DNA, 348 bp, Glycine max
  unsure (1)..(348): unsure at all n locations
acttcaatctaagcttaacattcaatgtcgagggtctcgatatattacgggactcaatctgacatcctttanaaaagttatngncatttgtatttgctgagagcatcaacattcaatttcgagcgtgtcgatatattacgggactcaatcggacatccgagtaaaaagttattgtcgtttgaatatgctcagagcattgggattcaattttgagcgtctcaatatattacaggagtcaatcagacatccgagtaaaaagttattgtcgtttgaatttgctcagagcttccggattcaatctcaagcgtgtcgatatattacaggactcaatcagacatccgagttaaa

SEQ ID NO: 258732 - DNA, 423 bp, Glycine max
  unsure (1)..(423): unsure at all n locations
atctggttcgcaagacaactcattgaattctcatatgaagacagtgctatgtaaaaatatacatacactgatctaaacatgcaaataaatttaaatagcatatttagatcaaacaacggaaattaaaagaattacgagcatatctctggccattgcaaattgaacgggaagcggcgcacacacgaacctgaaagacagttttgttctttcatacccttactcactctgaatagatgatgtattttttctgaatagagaagtgggtttggtgatacaaaacttagagcaccccatcctatttatagagtctgtccatcacagagctctcagcttggtatcagacagcttgtcatcagaacgtgagataggaagttatgaaacgtgacatanaaagtgatcagtacatgagatgatgaatacgtg

SEQ ID NO: 258733 - DNA, 140 bp, Glycine max
actcagctctccgccgcaacaatggcggcatccacgtcataacagaccccgtctgaattttctgaaaagaaaccctctttggtaaaatgtttctaacacaagccctctgaagtaaatctgccactggttgtatcgttgcg

SEQ ID NO: 258734 - DNA, 418 bp, Glycine max
  unsure (1)..(418): unsure at all n locations
agctngagatatcctggctttgccacaatccatatgagttgatcacttcttgatgtagctccatgtggagcttgtaggccttggatcttcttcatcaatggattcctttgattcttgaatatcaatgttagcggaatggagaaggaagaaagatgattggagatgccacatcaaggataagatgagtcagtcaagaagaagctcaccaccatatgaagccatagattagagcttggaggtaggagaagatgagtggagggagagaaggagaagaagcacgaaattttgtgcctcanatgaggtctgaactttgaagtgtaattctcaaatgatcaaagttgaaaaaatgcacacacatggcctctatttatagcctaactatcacacaaaattggaggggaaattgaatttctattca

SEQ ID NO: 258735 - DNA, 410 bp, Glycine max
  unsure (1)..(410): unsure at all n locations
aatttacagaaggtacctattacaatntatgagatgtaatntgtgaaattatgataaggcacagtttatcataaacaatgttgaaataaatgcagaaaaaaacatataaaccaataagatacacaaagatacatgtagtaattataactgtaatacacataaatcagatacatgtagtaatcgtaactgtaatacacataatgcaaatatcatgaacacaacattagtccacattaagaggtctaaacacatgtgttccaatgcacagacaaccatatgttcaaaacctagagattacaatttaaaagtaaatgccaaacagcacanagcaattccaggccgatggttaaccaaaattccagttacagcatggtaaaaatgaagacatgctaagtacttactcatgatca

SEQ ID NO: 258736 - DNA, 465 bp, Glycine max
  unsure (1)..(465): unsure at all n locations
agctntacaacacggccaaagtgatctnntttgtggtgaacgatgctctggtctcccaccatgacttgtccataatcattccggcaacggaggaaatcagaacttgtgagaggttattaatgactntataccagaaccatctgaaacaaattaagaagatcgaacaaaataaaagtgaattaatattgcacatctatactaaatcaaatgaattgaacaaanggcttaactaactaattatgagtataccttgtagctgcatcttcttgaagattttagaatcgatcacagatatgattggtggttacagcgtgaatggaagaagactgaaaatgcctatgatggagtagctatccaatacttgatcattctattgtttgtatcaacttctcgttgttattatacaggattggtcttggatcanatcanatgaaaaccactcacgaacagtggcggttctacatg

SEQ ID NO: 258737 - DNA, 381 bp, Glycine max
  unsure (1)..(381): unsure at all n locations
tgtgcttgtgggaaatacccatatcagtatatatggtcataattcaatttctttnttagtgaccgactgattcactttaaaacttttattggttattaagccagacataagagaactcaatgtgaaatataaactgtctttttggatgcagaaggagagatgaaatttaatgaaagagtcacaatgatttctatggaaaaacaagaaaacttttcttggctattaagccagacataagagaactcaatgtgaaatagaaactgtctctttggatgaaggagatatganatttaaagaanaagagtcacaatgatttctatggaaaaagaagaaaacttttcttgactattaagctagacataagagaactcaatgtgaaat

SEQ ID NO: 258738 - DNA, 488 bp, Glycine max
  unsure (1)..(488): unsure at all n locations
agctggcaaaaacatctttcactattatgatgatttatgcttagntttcattcttacaattttcgacatatcttcaaatcttaaccaagaaagcaaccttcgatgaattggaactgtatcaagtaatgtgttcagttcaccattaattatatgtacacaaagtggcagaactacaatatcgtcaagtagtttttcactcttaattgaatctaaaatatataataatgggataaacatcatgacaaatttnttttagcagattaagttacctagcataatttttagtgctctgtaataatagatgacatggctaatgtggtgcttctttcaaggaccttagatctgaatcatatgtcatctactattagaaatggcgtgcttcatatatctatggtactaatctatataatctaccacatcctcatgccatcaacggctatgattatgcttatttcactcatttccacccatatcaaccactgggacta

SEQ ID NO: 258739 - DNA, 484 bp, Glycine max
  unsure (1)..(484): unsure at all n locations
gctcgagatgaggaagtgtcaaagccttctctagatggattatgccagagacatatttgtagatctgaagtccagatactctcgaggagatttattgagaatctttgatctgcaattcgtcaaggtgattgctcaattactgattatttcacaaagttaagaataatttgggatgaacttgaaaattatagacctaatgctacttccacatgtgtaaataaatgtacatgtgatgctctcctatgtgttatagaaagaaaaacacaagatcatattatgcaatntttgagaggattaaatgatcaattcattaatgttaggtctcacaatttaatgatggatccactgcgtataatttacacaaacttttcctacatcgtgcaacaagaaagacatnatatggggatgaatcatattggaacattagaatcctaggatatcatgnataatgcagcaagttctacatctaatcatagatgttctt

SEQ ID NO: 258740 - DNA, 221 bp, Glycine max
tctctaagtgacctgaggctgcagcttaacatagaccacttcaggttatgaacttcttacatggacttgatggggcctatgcaagttgaaagccgtggaggaaagaggtatgcctatggtggtgtggatgatttcttcagatttacctgggtcaactttatcagagagaaatcagaaacctttgaagtattcaaagagttgagtctaagacttcaaagaga

SEQ ID NO: 258741 - DNA, 404 bp, Glycine max
  unsure (1)..(404): unsure at all n locations
tctgttgtcaatttcgagcgtctcgatattntacggtgttctatctgatatccaagttaaaagttattgtcgtgtgattgttctaagagcttcccttttcaattacgagcgtctcgatatattacgggacacaatcggacacccgagttaaaagctattgtcgtttgaatttgctcagagcttctattttcaattacgagcgtctcgatatattacgggactcaatcggacatccgagtaaaaagttattgtcgtttgaatttgctcagagcttctgttttcaatttcgagcgtctcgatatactacgggacacaatcggacatccgagctaaaagttattggccgttgaatttgctcagagcttctattttcaattacgagcgtttcgattactacgggactc

SEQ ID NO: 258742 - DNA, 138 bp, Glycine max
ttaactaatcatgttatgcacgtacatgataatatgctagacatgcaatcttataataaactctcttttgaatatattctctattggtgaaagaatatcaaatatcacatcagcctatgcatctcatgctatatactg

SEQ ID NO: 258743 - DNA, 403 bp, Glycine max
  unsure (1)..(403): unsure at all n locations
ttttgaaatgttagtagtgtgccttggcaaattaggaatagatggttgaatatccttgagtaatctaagtcaatgtcccttatttagtcatatttaccaagaaacactattagaaaaagtgcttntaacattgattattttagacattcaacattgattttgaaccaatgttgaaataacggtcattaaaagtaaattatttttaacattagttataaaaatcgatgttgaaatctattatacaacatctgttcttcccaaaaccaatatggtatagtagtagcaaatagtaaaaaaaaaaaaggcataaatgacattgactctatcanaatcaatgttgtatagtatttacaacattggttttggcaaaactcgacgtgtatgtgctacacaacatcaattt

SEQ ID NO: 258744 - DNA, 495 bp, Glycine max
  unsure (1)..(495): unsure at all n locations
agcttgtangattatggcgtacccatcatatgtggtactatgtggcgcgcgggcgatggtgcacaacaagatttccacatccacaaatcgcacataaacccacaatcccctgttgcccacctccaactgagctcacgtactcccacgtagcccatatactcgtttctctcaacaccgggtccccatcaatcctcccaagctttccctacatccaaggtattcaacattcaaacagacatactatcacagccaagataacagggcaaaggcagaaaactctgcccaaaacaccaaccaaaatcacagctnttcccacttacagaccacacgaacattgtcttcgctccaattcgttaaccgctggatcgactcagaaattatactggaagtctctagtacataagcctacattgtgaccgttgggatttgctagcaatatcagagatattctgcctactcttttacaaccagcagaacatagattttctgcactat

SEQ ID NO: 258745 - DNA, 387 bp, Glycine max
  unsure (1)..(387): unsure at all n locations
acgcacagaatcttgttgatgtccacctgtctcaactattattaagtttacagcataccaaagcacttagtatttgatctcgtctataattaatttccttacacaggtttgggtgttaatttattacatcttttgtctttaaccagctagggaagataacgcagaaaactcaaagtgagccatgattgcttggactttagccaaagagatggaccacatgatatgtntcttgtggtcgtccgacgaatgctaattaatggaattacgatgagcaacacagaaagcatttataatgtgttactttaaagaagtgggagacaacanaatcatattgtgaaggaataaaatcactttgtaatatttaaacctgaaagttctaatcctaat

SEQ ID NO: 258746 - DNA, 197 bp, Glycine max
gcttctcgatacattatgcgcctaaattggacattctatgttaaggttatgacaatctgaattgctctagagattccattgttcaatatcgagcgtctcgatatattatgaatgtgaatcggacctccgcgttaaaagctatgaccatttgaatttctcgagagctgtcgatgttcaatgtacagcgtttctatata

SEQ ID NO: 258747 - DNA, 246 bp, Glycine max
ctcggatgtccgattcaggcgcataatatatctttacacttgtatttgaataacagaagctctcgagaaattcgaatggtcataacttttcacacggatgtccgattcgggcgcataatatgtcgagacgctcgcagattaacaacggaagctctcgagaaattccaatggtcctaacttttcactcggaggaccgattcaggcgcataatatattgagacgctcgaaattgaacaacggaagctc

SEQ ID NO: 258748 - DNA, 475 bp, Glycine max
  unsure (1)..(475): unsure at all n locations
agctntaactntcctctcgatcttgttaccctaattaaacctcaattaccacaagaaacatttagatttatattatgccgatctgtacacataaactgcctttctttatttgcatgccaaaagaaacctctcacatcaaaccaaaaaaaaaaaaaaccctctgatatttgaagtataacatcacatatccacttaattaaatgattcacagttcgaattctgatttataagtataaaataaattatgttaaaaaaaaaataatcatcttatgtgtggtttccaacaaaaatttgttactattttcaatagaagtacctccataccaatatataccatgattaaagaaaataaaataaagactacaacatcacacgtgcaatgtgtgtgtaacccctttcttctctatgctttgctttgatttcttctgcacacctcanggtcctctcaatgtggtaccctctcaatgctacttcc

SEQ ID NO: 258749 - DNA, 487 bp, Glycine max
  unsure (1)..(487): unsure at all n locations
cggagaggatgcttcaatggaggaaaagtattagggagagaaagagagagggggagcacgaaattgaaggaagataaaaaggagcgaagttgaactttgagttgtgtctcacaagactcttattcatcaaagttaccacaagtgttacacatgcttctatttatagactaggtagcttccttgagaagctttcttgagaaaacttccttgagaagcttctttgagaaaacttccttgggaagctagagcttagctacacacgcccctctcataactaagctcacctccttgagaagcttcctgaagaagattcctaaagaagctagagcttagctacacatacctctctaatagctaagctcaccttcttgagatgagaagctagagcttagctacacacccnctataatagctaagctcacccncatgacaaaatacatgcanatacanaanaaaaatccctactacanagactactcaaaatacc

SEQ ID NO: 258750 - DNA, 417 bp, Glycine max
  unsure (1)..(417): unsure at all n locations
agcttgctacgcaggataggtcgagagcctctatgtatttgggaggcagcatctctggtgaagtgtatcaccaaaggttngggtttgcttgggcttttttctgccaattgtatacacacatgttgctctcccttgctcgtaacaccaatttcaaatcggccttggtccatcatttgctgtaacaactccttcgctgctgaacaattttccacgtcatgcgatgcatgcagatgcatcaaacaggaatcccatttgtgcccatcaagggaaaccatgctcgcctcttgcagcgcctcanatataaacctcctagaggttaccatgtccttcatttgcttcgacctctacagtctgcactcctctattgcatntactgtcgatcctccatgattggcaagcggatatgtctttacattt

SEQ ID NO: 258751 - DNA, 347 bp, Glycine max
  unsure (1)..(347): unsure at all n locations
ctttcgattcattctatgtacccatggtggtccacattgtgttntgttgtattttattctcattccatttactttttataccccctcttgacgtgcttaagccattttacttaagtcatttcccgcttaacttaaaaataaaataaatttccaccgaacgtttgaattgtattatccgttaacttcggttaaaatgaattctgaccgttcggtcgtgccgtaaccacgttggaaatcaaaaagaggtaaaaaataatataataataaaaaacaacttttagtaaaataaagcggaaaatcaatcggacgttttctctttgggatttctcattcttaaccgaattgac

SEQ ID NO: 258752 - DNA, 431 bp, Glycine max
agcttgtaggattatggtgtacccatcacatgtggtactatgtggcggtcgggcgatggtgcacaacaagttttccacatccactaatcgcgcataaacccaccattcactgttgcccacctccaactgagctcacgtactcccacgtagcccacatcctcgtttctctcaacaccgggtccccatcaatcctcccaagcttccacaacatccaagtaattcaacattcaaacagcacagactatcacagccaagaaaacagggcaaaggcagaaaactctgcccaaagcaccaaccaaaatcacagcttttctcacttaaagaccccagtaacaattccttcgttccagttcgttaccatgggatcgactcgaaaatattactggaagtctctagtacataagcctacattttgaccggtgggatctact

SEQ ID NO: 258753 - DNA, 603 bp, Glycine max
  unsure (1)..(603): unsure at all n locations
tcgtgattagtagtgtgagggtgtngatgtgaatattacgtctggcggatgtcatccaatgcgcgtgtggtcttggttacgtgaactatagatactaatctagtctatggtgaggcatatcttggagatatacacagtagtctatcttctatatctgtaaattccacgaattacatcacgatcctggaagagtgttgagacacacccgctagagagatgtaagtatctttagatgttctaaatgaccaattgatgacgacaactttcctctctgttgacaatggagcgcacgcagaggataacatctcaatacatgaggataaaagctatcagagtaggccagatgcccccttcgataaattcaagccgaggctgaatatataagacctcagagattcgactctatgcaaattgttagaatctgatcgctctaaggagaaccaccgtttgtatgatagagcgcgcactaccttaccccagagagaatgtcgctcgcgtgtgcgacgttaacaaccgtgtctggtaatatatgcgcgatcctgataanatcatgcatgtggaacttgtgactagtcacatctctctttcacatttgtagaaacg

SEQ ID NO: 258754 - DNA, 192 bp, Glycine max
gttgaaaggtgaaactttctgcttttattgttgaccacagagtggcacctggagatatgtcgcgggggtcaagacaccttggggacgtcaagtggggtgctattgtccaaaaccaagcttgatcaatcccgacccaacccgggcatagtcggtcagagagaacctgtgatgtacctaaacaggcgagctcct

SEQ ID NO: 258755 - DNA, 298 bp, Glycine max
  unsure (1)..(298): unsure at all n locations
ctgacggtgcgcaggccatcatctnttcatagtagagtaccgattatgtgtctaccatcacgattatcgtctgcctttccattattggaggtaccacctgtgccggcagatccctccaccttttgcgcgtattcttagagagactcctgccccctttttgcacacttgttgtagttgcatgctatccggagccatatcagaatatgactgacactgcttaatgaatgcaaccattaggtccttccaagaatgtactcaaaaaggtccctaagttaatataccacgcgacagttgtcct

SEQ ID NO: 258756 - DNA, 422 bp, Glycine max
agcttgcaacccagctcgcccaggcgagcaaggttgcttcctccagaagcaacagccttctggaggaatcttctggagggcccaagtgggcctggttgctatttgcacccccatttttactaaatacaccccctgccttttttttggtgattcttttttcgtaaagatacggaaacttacgaatttcgtaaggatacttgttttctttccgtaatgttacgaaaccttgcggattacataatcatccccttttttgacttacggaatgttacgaaacctcactatttgtgcaacgatgcttacttttgatttccggtgtgtcacggaaccttacggattgtgcatcaatattttcttttatttccggcacgtcacgaaatctcacaaattgcctaatgatgggtgccaagcacctcaaaatg

SEQ ID NO: 258757 - DNA, 354 bp, Glycine max
  unsure (1)..(354): unsure at all n locations
tctaagcattcatcattacacacnaaaaactctgtgtgacccactaactgcgcttttaaagctgaatcttaaaattaggacggctgctgagtttttttagagtttcttgctgtggagagactggagagaaccgatctataagaggaagctatcttgcgattggatgagatttttgagtgattgtgaagcttctataggtggaagagacatccccactacgtgtaattctgcaatctttcactttctcttctctttgttgtcaaagaagcctccttgctatatagagctaaatcctcatgtgtttcttcctatggggtacttaatgtaaatacctttatatctatccgatgatgt

SEQ ID NO: 258758 - DNA, 279 bp, Glycine max
  unsure (1)..(279): unsure at all n locations
agcttctagtctncaatttgagcgtctcgatatattacgggactcaaccggacatccgngtataaagttattgtcatttcaatttgctcagagcttctagtctcaattttgagcgtctcgatatattacccgattcaatcggacatccgtgtataaagttattgtcaattcaattccattagaggttcaggacctaattttgagcggctagatatacctaccgacttaacctgacttacgtgtatcatagttggcgtattcgaatttgctccgagcttc

SEQ ID NO: 258759 - DNA, 416 bp, Glycine max
  unsure (1)..(416): unsure at all n locations
tcaattntcaattcggagcgtctcgatatattacaagactcaattggacatcctttgataatgttatagccgntggaatttgctacgagcttccgntttcaatcttgagcatctagatatattttgggacacaaccggacatccgagtattaagacattgtcgtttgaatttgctcagagcttcgattctaaattttgagcgtctcgatatattacgggactctatcggacatccgagataaagttattgtcgtttgaattttctgcaagcttccgttttcaatttggagcgtctcgatatatnacaggactcaaccggacatctgtgtatatagtaattgtcgtctcaatttgctcagagcttctagtctcaagtttgagcgtctcgatatattaccagacttatatatacatcc

SEQ ID NO: 258760 - DNA, 513 bp, Glycine max
gccggtttgaatcatgcgatctcgtacccgggatactctaagtcacctgcacgcatgctagcttgcctgtctgatacagcaagtagtgttggctccgagtattgttgggcgaaccggtaccaacaccggaatgtggtttcgcgcaataccacatgtagcctaactatgccttgttaatggccaaagaaaatcctggaagtatcgcttaaggtattaacccacttctgccgatattaagagaaccctttcgggaaagagaaaccgtggtcacaactttcgtttggagacaagaaagagaaggaaacccgccctgccacatatagataaactttataaacgcgcgggtctggaacacaaaggcaaatgggctcccaatatgcaaagatgacgctccgataacattgtatgtggaacgaccttccctcctgatttcacctgaaatttggagatggaggaccctccggcttttcgcaacgagttaatgaaaccttacctattaaacacttatattgc

SEQ ID NO: 258761 - DNA, 630 bp, Glycine max
  unsure (1)..(630): unsure at all n locations
tgtgtagcatacgactgtatgtgtgatgtgnctatgagtattatagaatangtcgattgcgcgcgacnnnnaccgcaacattctgatgcgatctatgacggacncttactatggagactcagcgtnagtagtggcatctctgatgtgtatactgttgctacaaatgtctatgtttgttattggctcttcatctatgattatcacatttactatctagattggcttatggctctgtgtgctctaattgcatattcttatgtgatcttcacaaaaatacgcgtcctgacatttgtcacgatgactcaatagaggcgcatatattgatatcttctattttctagcactacaatgatattcgacaggtcatggcattacaattgggggcacacaaaatcacagtgaattccatatcacctgcacttttcaaatctgatatcactgaataactaatggagaaaaattggttgaatactgtgggcatgaaaacagcaccctgtgagaatatatggcacttctgatccagcattaacatcgctggctcggtatttaatatacgattcttctgagtatgtgcaagcaacaatcttgttgtgtatgctggacgcaccttaccaggtgtgcttattcatg

SEQ ID NO: 258762 - DNA, 381 bp, Glycine max
  unsure (1)..(381): unsure at all n locations
aatgtattatatggttgccttaggattcaagactcctctgatgtgccttacctgaactattattattattattcgcttaccttgatatttcatggctactatatgtatctcacgtgaaatatattattattattaataattggtgctcatgattttataatttaaagattggttgagatggatcatgtttgcttggtgaatgttaataatngattgaattgtgatgggtttttcatatgattttattaaactaaatatgtttgatatcatgtcttttgtatatgcaattgcttgataataggagattgacctaacttcttatagagaaaaaatatctacgtgtgagattgaattgatgctccacatgattggcttatgccc

SEQ ID NO: 258763 - DNA, 454 bp, Glycine max
  unsure (1)..(454): unsure at all n locations
agggtatgtgtccatcactacaagatttccacattcgggtttctctccgatcganataaattggtcactcttcactaaatttgtgtgctttcacttcttaccaatctgatgcattcttggatttatttttcttctttgctatctcaagctctgcttctcccaatgtgtatgagttgtgtccacaattcacggctaaggaattggtaatacgtttttatgaacaaaatggtttcttcttttgggtaataagtcaaaatgctcttcagctttgctacatagtcgatcacattgtttctggtaagtcatctttcatcttccagtatataatatattgatatacaatctactgcttaacaggggagtttccttctgtggtagtgcacaaatactgtcctcatactgcacctataatcgctagttactaatatgatgcgctgatattccgctatctgcc

SEQ ID NO: 258764 - DNA, 392 bp, Glycine max
  unsure (1)..(392): unsure at all n locations
agctttagtggtgtcaacaagtaagggtatttcttattaaacagtagtgcttgagttatccatctctaaaaataaattataaatatctacagaattctacttgtatccatcttagcttgatggttccatccctgaccagacaggagaaaggcatgcacacacacatatatatatatatatagagagagagagagagtataaagaggtagtattacgcttcactgtttcacaagaagcatggtcaagaagaaaatatccaaaggagatatttcctagttacttttccccacatcccgaatcctntaaaaaaaggatagccgcctttcatcatcccttaatatcctctctctcactccttcttcagatcctctaaacccactttaactctgttt

SEQ ID NO: 258765 - DNA, 378 bp, Glycine max
  unsure (1)..(378): unsure at all n locations
agcttatataacattcaataaacttagctactctaccttcattttgaanttcaataaacactgccaaattgaattaaacctttntatcatcatgaagctatttgcggatcaggcatctagcgttcaacctattgatattcctatggaaggtatatggaatttcccaggaggctagtatactttgggaccttcgtatcatctatttttaaaggtaaaaaaactttacatgctcatgcatttctattctagacgagtctatcacataaagtataattgtattcaccaaaatactcatgtctaccaccaggccttcgaacccaaaaaattatatttgattttgagagggagagaccccctaaatggttgtttattcttttt

SEQ ID NO: 258766 - DNA, 295 bp, Glycine max
  unsure (1)..(295): unsure at all n locations
cttgctgtgactgccattcctacacgaccaaatttcctatctaacccacaatgtgattactcatgcaataacaacccttctccttacccaccacccagttatccacaaaggccatccttaaatcaaccacataacccacctaccacacaaccaatgcccaaacaccacccttatcgataaccaaataaggaattttgcacataaagcctgtaggattcaccccaaattccggtgtcctatgctaacttactcncttatctactngataatgcaatggtagccatacaccctacta

SEQ ID NO: 258767 - DNA, 455 bp, Glycine max
  unsure (1)..(455): unsure at all n locations
agctntacattatgtataaatacattaataacaaatattattggtgaaactaaaatgtacgcttaaccaaaatttaacaatatttaccaacaaataaagacagttgagtgagtcaaatacaattaaactaaaaacatgtgcaatagaagattaagttttataatcctagtcaattttttgttggatcttgtaatgttatataactttgaatgttttatttaattttttgttctaatagaagattaaattttataattttaaattatttttttaggtctcataatgagtccactttctaatatttatttatattttattttaaaataattaaaattaattaatcattttcttagtttatgaaagagatattaaatatcatgttttggatctccatgcanatcttgttcttcttatcaaaacatanttcaccgagacatcattattttttgatctca

SEQ ID NO: 258768 - DNA, 477 bp, Glycine max
  unsure (1)..(477): unsure at all n locations
ntgatggaataaccacatctccgaccctgcccatcatcaaaataatttctccatcgccattgcatcatattttcctaagaagtntggagagaaattcttttggcattctccttggtttgtcttgtccttccaaatatcagatccattactcgtcttccttcgtcgattcatagtttccatgtttccatctcattcatgctcacacactgtttcattcacttactctctgtctctcacccgttttgtctcacactctctctactttctctctcatctctcaatcataatttcaaataagacttacacaaccatttattataatgtattntattgttgtatctcttaagaaaataaaataatgttgtataggtaaaacaaattggggatgtacctattacatacatgtgtaagttaattgggttcaacctatgcatattntataaataaaacataatactagatggttcagatatattt

SEQ ID NO: 258769 - DNA, 274 bp, Glycine max
  unsure (1)..(274): unsure at all n locations
agcttgaacccatgtgcaatgtcggtcatcctantccccaagaaagatggcacgtggaggatgtacatagattgtagacccatcaacaacatcattatgaggtatagacatcctatccctagactaatgatatgttggatgaacttcatggttcttgtgtcttctccaacatagatttgaaaagtgattaccatcaaattacaatgagagaaggtgatgaatggaaatttgtttctaaactaaagttggacttatgaatggttggtcatgcctt

SEQ ID NO: 258770 - DNA, 442 bp, Glycine max
  unsure (1)..(442): unsure at all n locations
tgtattgacagccactcatgacacatgtactcatgctttcctcctttgcgagttattgttgcaatggcatgtcggcatggcatccgtacatcaaagttgccaaatcagcgcacacgtgcgttaagactgaatcataacctatccagaacacagcctgttagttgccatactccacaagtgcatgttcattcacctaaatcgacctcaaccttattcgcccacatgtggacctcatatgtcaggcccatgttatcaccacaccaaatgggagtgcatcgattagcaaaatggaattctttttctagtcttttatactgcactaaacataatcggccacgttntccagaaagttaaccttgtgggcagccataggtctcatgatataacctctaattgcttcaagcattgagataataggctagcatctatactgcagaattct

SEQ ID NO: 258771 - DNA, 443 bp, Glycine max
  unsure (1)..(443): unsure at all n locations
agcttatatctcattgtgtgcaagaggaagagaggtcgtanaaagacagatctaaaagtgctcatttaagcttgacattgacttgctacttctacaagaagtctggacacatgaagaaagagtctacaaggtaagttgcatggcgtgtaaagaaaggtaaatctcttgctcttgtttgttttgaagttaatttagcaataacagatcattcccatttatttgcatatctagtgatttttttaattaaattgattgacacgatatattgtcaaagtaatccctattgtaaaaattgacttgattaaaattacatagatttatgtataagattatttatgcgaattgtgttcacccaaaggaagacataatttggccaaataatattctgtacctgtgatgataaatgtgtgacaattataacggtgtttcatgtgaataatagt

SEQ ID NO: 258772 - DNA, 415 bp, Glycine max
  unsure (1)..(415): unsure at all n locations
tacttnagcactgctcaatctgnttttccacaacagttgcagcaacaaggctacccgggaaactcttcacaagcttctatgattgtcaattatcctatgacctatacttcagcactgccgcagtcagctcctccatcatctactactcctaatcaaccacaagctatgattgctggatccactaatactccatctagtagctggtttcctgattctggtgctctcctcttgtgacctcaaatgttcaaaacattcaacattgtgttccctttaacggatctgatcaagttattatagtaaatggtcaaagtttgccgattaaatctattagctcatcttcatttttatctccattcaattctaatgttactcttaatcttcataatcgtgtgcatgttcctaatatctctaaaac

SEQ ID NO: 258773 - DNA, 334 bp, Glycine max
agcttataaggaagcctctcgagaaaagcttcttttgattctacctgacactaccttggtaaaagcgctcttctgctatcgtttaacgctacatctcctcgaaatctggtcgggaggccatctgacccacttctacgatctgattcgttcaatctacgatatcgtgttttggtgtgtcagaaaatccttctttctctgagaattaaaacacttggagtggctcaaggtcttaattttagtgtagccttggaaaacaaccattccttttttcttttttcttccaaaacccttcctcaatgctccaagcttttttgtcaccacccacaaccaccga

SEQ ID NO: 258774 - DNA, 462 bp, Glycine max
  unsure (1)..(462): unsure at all n locations
agctntgtaatgtgttatcattttcttccacactgctctctttcatttctttcctcttagaagtacccagacatgtcttcatatctagccattaaatgctcaagaaattattgtccgtatcatcagggtgtctaccacgggtagaattatcaatgaccccttggtaataatgaataagaatatcaagacttgatgatttgttatgataaaaatgtgttttactttaagagagttggtagtgtctcagatttcatttcatgtgtgtatgcttacatgtgtaagggctagtaatatactccatttagttatcaaaatgagtatttcatttctggaagtaaaaagttgtgtgtctttagacttagtcctgagtgtttgtctttgtataatgtagtatccgaaagtctgaaaatattgttttttagtccctccattaccagaggaattaataatttgataagtcta

SEQ ID NO: 258775 - DNA, 192 bp, Glycine max
atcggaatggaccatattgggagcccccaggggaaggatgggactgagcactaaccacttgcacatcctcaggcgggatggttgcggtcctttctgtagttctatcatatatggtgacacaaatataataacaataacgataacgagagtacccagtcgaggtctgagtgacaagcttagacagaaagtcag

SEQ ID NO: 258776 - DNA, 458 bp, Glycine max
  unsure (1)..(458): unsure at all n locations
agctngcatgaagaaacgttaaataaaanagcacatganaagttataagggaaaggtacaatgggaatttaaaaaatttgttgagttatatcaaaactaaaagaggaaaggaagcccattatacgattacaaatagtggggactagagagtttcttttctatttttttataaattacattcttttatttaaaaaattattaaattataactttttgttttgaaatcatactttattttgaatagattaatatacattacattgaatttaattaaaaatttaatctatctatattttgtttgataaaaaaaaattatccaatccatttattaactatttttaaaaataaacattaatatttattataattttatacccagatactcttgaatattgattcaaggattccttaatgaacggtgtagtatctaattcaatagaatacatattatattaaat

SEQ ID NO: 258777 - DNA, 360 bp, Glycine max
  unsure (1)..(360): unsure at all n locations
ctatatnaccatagagaattctcggtgacacattctagaacacattttattgaactcattattattggagtaaatttattaaaaattacaaaattttataattgtataggtataatttcctatttgagctccacttataattttaccatttctgataattntaattaaaaaataaaaagtgtggaaaaaaaagttcgttaaagaagggcttactgatacctgtgtcctcttaacataataaggtgtaacatggacatgtgacaccttggtatgggagtggtctctcaatatatggtctctcattttaaatcagatctatggttttccgattcaactattcattgtaaatagaattgtcta

SEQ ID NO: 258778 - DNA, 413 bp, Glycine max
  unsure (1)..(413): unsure at all n locations
agtcttggaagaaagtgatgaggtacaagccctataggcagagtttgaaagagcccgggtagtcaaagagaagttcaagtccatagccatcaaagtctgaagagagtatgatgaactaagggacgtcaatatggccaccgatgaagccttggaatgagaaaccaagaaggcccgaaaggaagaacacgaccaaaacaagttttgaggtgctttatagggagcaatagtgagctcaaactccgaagaggtgaaaggaatcatcacgagtcaaaggcatgatctggaaggacgagctaaaggcttgccttangtcgaacagaaatttgtcccaacagttaaacgagactgaagggaatatgtgggccatatcgataagtgcaaagagaagctaaatctagcggcgactcacgagc

SEQ ID NO: 258779 - DNA, 374 bp, Glycine max
ctaagcttacgatcactgagttgatgggtacagaccactccactcatgcacacccagaaaaaatacgtacctcgtatgtcgatgacgacgaaccaaccaccgcaacaatgaacattgaccccttcaccttcacccaagctcacctatctcaataaaaaaccacagcaaagagataaacggaagaacaaaaaagcatggaggcgtaaaacacttctcacccagctttttaaggaagatgataaaagagggacatttttggcattcttttaaatgctgggtgcacaagcaattacgctggtgcctctagcatcacccatgatactattgttcaatggttggttctcgggccaatgtatggtccatgaagccacttt

SEQ ID NO: 258780 - DNA, 406 bp, Glycine max
  unsure (1)..(406): unsure at all n locations
agcttgtccacgaaatgtntgatgtaatgtacaagttagctntctcggtgttgaagtgttatctatatgtttgctttagttgagtaaaattatggtgaacttttgttgtgcttttttttttttttaatggaattgaattattaatgaaatgtggcatagactgtttttgtagtagaacacatagttggttcacctctctgttcattttattggttctgactcctagtgagatcgtgccatttattgaatttttgggttttagtgcattgtgaacattttgattatcagattatgtaagctattttggtttttgaatacggtataaacttattcaaattaaaacttatcctaaccagaatataagtatatttcaatgaatcgtttcttacaatacaagagtggtctt

SEQ ID NO: 258781 - DNA, 403 bp, Glycine max
  unsure (1)..(403): unsure at all n locations
gctcanaaagacaagagtggtgaaagagatgctgatgacgacattcactaaggtcaagaaagagtgtgatgagctaaaagatatcaacatgaccatggttgaagcgttagagtgggaaacaaaaagggcccgaaaggaagaatggagcaagataaagtttcgaggggctttgtggggcagcagtaaccagttcaagcttataaaggccgagagggacgaatcatggatggaaagcatggtgttagaggataagttaaaggcttgtcagaggccgaagagaagtttgacggaatagttgagaaaaatagaagataatatgttgataatcattgatcaatataaggagaaagtgagctcggttgctagtcatgcacaaatgctggaagacgaacaagtaaagata

SEQ ID NO: 258782 - DNA, 422 bp, Glycine max
  unsure (1)..(422): unsure at all n locations
agctntaaccctatggtcaactntcttttggagcttacatcaatcctaaactcgctccctggtactatggtcctttcaaggtgctggagcaagtaggcaaagtgtcctacaagttacagctgctcgacacaactaaaatccattcagtgtttcatgtgccactttttaagaaagtcgtgggtagttactctatggaggagcccctcccattgagcctaagcaatgatgagactataagtgtgattgttagcaaacacaaaacattaaatgctcaaaccgacatcgctgcggcagggaaggtacctggcacgagatgtacctggcgtcgcaaagaaaccaaatagaaagggttggtcctaacagagacgtgagatgtcatggtggcggaagacgtcgacatcggagtgcaaagactggagttc

SEQ ID NO: 258783 - DNA, 491 bp, Glycine max
  unsure (1)..(491): unsure at all n locations
gaccatagaaactaagcttcaaaatatggcctcatcaatatactagtntcccgaaggatattctataaatagacctcccatctttaatggagtgagttaccactactggaaaacccgcatgcaaatctttatagaggcaatagatctaaatatctgggaagccatagaacaaggaccttatgttgcctctataatagccggaagtgcaacaatagaaaaacctaaagcaaattggactgaagaagaaagaagattagtacaatataatttataggccaaaaatattatgacatctgccttatgtatagatgaatactttatggtttcaaattgtaaaagtgctaaagatatgtgggatacactacaagtaacacatgaaggcacaacagatgtgtaaagatctacgatatacactctaacgcgtgagtatgaactctctatgatgaatgtanatgaaagtatacaagacatgcataagaagttcacacaca

SEQ ID NO: 258784 - DNA, 329 bp, Glycine max
  unsure (1)..(329): unsure at all n locations
agcttgcttctacaactaatttcgttaggtctcgtgaacctctctacccactacacctcagtgtatctttgtccatcatccactntcttaatgtaacctcaccattcacanattgtatagaaaccttggttccttactattcctttggtcatctcgctcttgctgccacatcgtgtgcaaaatcctctgccatgtttgacaaacatattaaaacattcacccaaaaagaaataggcgaggatcaagcttacgtactattctcaggaaacccatctcaatctctcaggtcacaaaaccaacacataacacataaatttacggcaccttac

SEQ ID NO: 258785 - DNA, 408 bp, Glycine max
  unsure (1)..(408): unsure at all n locations
ggtagaattatgtggtacccatcacatgtgggactangttgtggttggcgatggagcacaacaagttttccacattcacaatgcgcgcataaacccaccatacgctgttggccacgctccaactgagcttacagtactccacgtaacccatatgctcgttcttttaacaccgggtcgccattaatcctcccaagcttccccaacatcatagtaatacaacattcacacagcacaagctaccacagcccagcgaaacagagcaaatgcagaaaactcttgcataacaccaaccaaaaatcacagctttgtccactcaaagaccccagtaacaatttcttcgatccaattcgttaaccgctagatcgactccaaaattttactggaagtctatagtgcataagcctacat

SEQ ID NO: 258786 - DNA, 592 bp, Glycine max
  unsure (1)..(592): unsure at all n locations
catctattactagcgagtacatatcangtgngngtctgtttgattatacatttnttngtatctnnnnnnnnntncnnnnnnnaagccgattttganatcgtgaccnttctcgcgacccgcgatactctagagtcgacttgcagcatgcaactttgaaagctgagctcaaaaagatttgagtggttaatgagaagctgaacgtggcagtctctatggttatgaaagaatgtgatgaactaaaagatatcaacatgactgtagctgaagcccctcagcgggaaaagaaaaatgccctaaatgaatagtggtgcaaaaacatattatgacggcttctttaggaatagtaatgaactcaaacttataaaggcccagagggacaaatcaaagatggaaagcctgatgtttgaggataagttaaatagttgtcacaggtcaaagatatatttgaaagaatagttgaccaaacaaaaaaagtatgttgatatcattgccaatttaaaaaaagtgacctactgctattctggcatatgctgaagagaaccgcgaagtgtatccttccgggtgaaaggaaacaagattggggtatactact

SEQ ID NO: 258787 - DNA, 421 bp, Glycine max
  unsure (1)..(421): unsure at all n locations
ggatcttaagtcacctgcggctgcagcttcatagaaagttcgctcctaatttctctacaattgcatcacctctcaatgagctagtaaagaagaatgtggcatttacctgtggtgaaaaacaagagcaagcctttgctgtgctcaaagaaaagcttactaaggcacctgttctagctcttcctgacttttctaaaacttttgagcttgaatgtgatgcctctggagtgggagatggagctgttttgttacaacgtgggcacccaattgcttattttagtgaaaaaattcatggtgccacccttaactaccccacctatgataaagagatgtatgccttaataagagcactccgaactttggaacattaccttgtttccaaggaatngtcattcatagtgatcatcaatcacttaagttcatt

SEQ ID NO: 258788 - DNA, 464 bp, Glycine max
  unsure (1)..(464): unsure at all n locations
ctttggttttgggtgcaagaaagcatgataatgagagcatgttgttgaggtttcccttttaggccaacacttggtttgggctataccatgatgatttctttgtacctagatggcgtgaaaatgttgttcaccatgtacatgggtatatagagtaggtagccgagttctttgcaagtgtgcatgtatgttgagtatggcacgaaaattcttctcaaaataggaatatatgacatgaaattgcctttcaaaaatatgaattagtaatacaaaaattgcctttccaatgaatgtgtaaacatganattgcttttcaaatgagtgtaaatatgtgtgaacgtacatagcatgaagctgcctctcaagtgtatgaccatatatgtgaatagaatgtgaacatatagcaaaaatgtcgttcanatggagtagataggtagcaaaatgcctcgcanatatgtatgtggagt

SEQ ID NO: 258789 - DNA, 442 bp, Glycine max
agcttgtcttcttcagggtattcgaattatagcccaggacattcaaaaatttaatgacttccctcacgtactgtctcgtggggggtatgaactgcttgacaagaaacttatggaggagaagagcaagcgtggacatgaggaacattcgtgtgctgaaagcccaacactcaacgtggacccaccatcctcagtagcaagacacttgaagtggaggatcgcccgcactaagcggcatggccaaatgacgtctgaagtggcacaagaaattgtagacaaaattgtcagttcatatatttttttggttactgtcattggcaaataatggttagctaacctagtcaaatttgtttattcaaatacaacaattgtatatgcatgcaggattcattacacgaacaagcaacacaagggatgtttgttctggatgggcgacaggacatac

SEQ ID NO: 258790 - DNA, 102 bp, Glycine max
atcacggacactatagaaactccgcttctaactcttacaagactgagctctgatccacttgtttatctgtggcctcagatatcttaagaagggcgggggggg

SEQ ID NO: 258791 - DNA, 342 bp, Glycine max
  unsure (1)..(342): unsure at all n locations
atttttaatggagagggttaccactactggaaaacccgaatgcaaatttttattgaggcaatagacttaaacattcgggatgccatanaagttggaccttatgtacccaccatggtggctggaaatacaatagagaaacctaaagaagagtggtctgaagatgaaagaagattagtgcagtataatttaaaggctaaaaatattattacttctgccctaggaatggatgaatatcttatggtttcaaattgtaagagtgctatggatatgtgtgacactctacagttacacatgagggaacaactgatgtcgaaagatctacgatgaaactttaactcatga

SEQ ID NO: 258792 - DNA, 314 bp, Glycine max
  unsure (1)..(314): unsure at all n locations
tgtacgattatagggtacccatcacatgtggtactattgtgctgtctggcgaaagtgcacaacaagtnttccacatccacaatgcgcgcataaacccaccatcccctgttgcgcaccttcatctgagctcacgtactcccacgtagctcatatccctcgttctctcaacaccgggtccctatcaatcctgccaagctttcacaacatccaagcgaaacaacattcaaacagcacaagctatcacaaccaagcaaaacagagcaaaggcagaaaactcctgccaaacaccaaccaaatcacacgctttctcactt

SEQ ID NO: 258793 - DNA, 436 bp, Glycine max
cagcttctatgatcaagtggccaagattgcaatttttagtcatagtatttcttgatattaagcatccaatcagttgcaagatttatcatccatttaataatttagcagaagtatctaaaaatcttgcatagtaatttcattaattacatgtttcaaagaaaatattgatcaagaggagcttatgcataccaatgacctggagtagtctctgtgctggtgtcttgtctacatagccagtatttgagtgaaccttcacaacctagatttaaaagagagcaatatattaagttccaaataatcgcgacaaaagtacgaactagatcaggacatgcaaaatagacttatatatagatatagttcaaattctcacaacattaacagatataagaaacaattcagtgttttattccaatggctgagctgatataagcacatg

SEQ ID NO: 258794 - DNA, 389 bp, Glycine max
ctgcaagcttgtgtaatcgatcacatggctgtggcaatttattactcagagaccagtttcgaatacaaatcaagagatattactattgcaacggttaacaggcttgtctaaaagtgataactcttctaatgtttttcttgaccacatatgaagagttgaataaaaacgagaccttgacttgcatttcataagaacaatcacttatgactatctaatatacttatgaatatcttattcttccattgccagaagctttcaaagttctctggcttctaaaccttgttctttcacagaaaacagaagtgtgctatccatcctttgtattctattctccctttggcaaaaaagaattcgccaaggactaccgccacaattcttttcgtgtctct

SEQ ID NO: 258795 - DNA, 441 bp, Glycine max
  unsure (1)..(441): unsure at all n locations
agcttgagtaatagaaaagccaaatccatgtttggtctttgttcagcttaggaacaaaaatcattcattaccatatttccttttctctcttccttccttctataatgttgcactctcaccatcaccaccttctcttctccactttccctattcctctttcactcagcaccatcacctatcaccacccatcattaccatctcttcattttctccagagacccatcaccagcaccatcaccatcaccacaactgtttcagccattccttttattgttgcatggcttgcaaagctcacaacacaaggctttggcccctttgaactaccttnttttagtccttcttcccttcttttattaaatgaccttctacccttcaggttgcttccaatgttctgttttctggtgccatcactgtcttctttcactcaatccagcaccacac

SEQ ID NO: 258796 - DNA, 446 bp, Glycine max
  unsure (1)..(446): unsure at all n locations
ctgctctattcaagctctcccaanatctagaggtaatcctatgatctctatcagacactatgctagatgacacaccatgtaacctaacaatctgactaatatacagggaggtcaacttttccaaagatggataggcaaatggtacttattcttaaccgtcaccttattcaactagcggtagtctacacacaacctcatggtcccatctttcttcttcactaacaacactggtgctccccatggagacacactgggtctcacaaactgcttctctaactggttcttaagctcggctaactctataagatacatcctataaggggctatggatacaggtccaaccncaggtactaagtctttggaaaactctatctctctctcgggtggcagaccagatatatcctcaggaaactctntgacaacagggagagcacccatggaaacct

SEQ ID NO: 258797 - DNA, 339 bp, Glycine max
agcttcgaggaccccgcaaactgaacacaaatactctttactttccgcacaactgaaccggcaacataccctacacttacacacaaaactataaacacacgatcaccacacagaatagccaaagccacttcttagacgggcgtgctcaatcacacaacaatacgctaaactatgtggactacttccacagactaaccccatagagaaaataacttgaaaacaaaatccgtctccatgtttctaggacttgcaacagtgactctggaagcaccttgactcaccgttaccgcaccttcacctacgggaacgactgtgacaataacgctagcgattttagga

SEQ ID NO: 258798 - DNA, 534 bp, Glycine max
  unsure (1)..(534): unsure at all n locations
cgttgatcgatcattacggaccttagatactcagcttgaaatgcttacagcgatatcacaaaggttgacccttccttgttctctttgaatacctagtggatgtaccctccgtataactgactccaagagatttccctctcttgtctctagtcaaacccatgtacatgtgacctctacttggtccacaaaggatgctcccctcagtgtgttaatacacagaagtcaagccgtcaacctttgacactttgcgaaaggggatacaaaagaatattcatgcgcggagcctctgaatactcttgtatgaatgaacgggaagaatctccaaaatgctcagactgtgtgggtgtgaattcttggacaacggagaagggagacacanaagaattcacgcgggtagtcctttggtcctctggaatacggagaacagagacacaacaagaacttctgcggttaggtcctggagaattcctcttggcaaagggagatgagatgacaagaatgcatancactcgtcttttacggtcacataacccg

SEQ ID NO: 258799 - DNA, 123 bp, Glycine max
agcttcaccaccaaccaaatgagccacaacacactttttcttttcttgcacagtggaaacccagcctcacatagtcctccacacactcacgcgcatatacctgcacctctattattctctgat

SEQ ID NO: 258800 - DNA, 373 bp, Glycine max
  unsure (1)..(373): unsure at all n locations
tactaagcttaatgttaatgtcacatcagataatatcaaagactatatcaaattatggagatcatgatatggnattggaagtgacatccttggccagagtacgtttgattgggatggcacttagcacatgatcacaattgagaatgaaaatgcttgaaatgaatattgcactataagtattctttaatatattggtattcgttattcaaagtagattggatttgactntttcttattttccagcggcatatatagagtaaaccgtnttgattcaaggtgcttcaaaactatgatgatacagtggatttgtgcgctaaagatagagccattggtcatggagtttaaactgctgatgtagctccatgtggagctt

SEQ ID NO: 258801 - DNA, 251 bp, Glycine max
agctttaaacaaacaataaactccccttatctatctatatctctctgttagttcctcgtgccgttgttctgagatctcttaggttcacgtcctttggtccaaacgcagagctcttgatcgaggtcgtacccgaatcaaataaacatgaaaatgcagtaactaggaagtgatcctaggtcgtttcccaacgagcaatgaaaaaccaagcattcataatatacttgcagtaacagtaacgattgggggggggg

SEQ ID NO: 258802 - DNA, 166 bp, Glycine max
  unsure (1)..(166): unsure at all n locations
tgactaggaaagatctgattactgncttcctattgcaatatcagtacaattctgatatggctcccgaccgcactcaactgcagaatatgttcaagaaagagggtgaaacctttaaagaatatgcgcagcagtaggacagatctcgcggcacaagctcctcctccca

SEQ ID NO: 258803 - DNA, 381 bp, Glycine max
agcttggagagaaaccgcgtgtgggacaacttgtccgggagatgatggcttactctgttgacgcgtgtaacccgttatattgtttcctctgtttttctgaaatcaagagagaacaagacatttttcactagattggaacagaatcttctattacatttttaggttaaactgtataaacataaattttgaatcacaagtatatgagtattccagtttgataaaaatttaggtcattaaaatgcaatttatgttttttttaagtattttctttcaacatgtatttgcattccaaagtttgataagatattatgaatgataaagtctcaaaactcaaatgtaacatattggttagaaatgataagtatataataattgattcat

SEQ ID NO: 258804 - DNA, 374 bp, Glycine max
agcttgcgcttggtttatctaaatccctatgatcatgagcaactaggtgcatcctactataaatagtgatcaaataacaagcattgattcaaaaggtactaggttgcctcctagtagcgcttctttaacgtctttagctggacgccttatgacttgttggtcacggacctaatacttcgcttacctttggctttggacttggtcgcctactggtcggccatgtgtcgtaggcaacactctaacttttttgtggatgagcagaggtgaactctaaaggtggtggcggtgcgtctatttcccgctgccgaccatcccaatgctgctgtggtgtttcgccctgcgcctgtctggggccagtacttcttgatgaaagc

SEQ ID NO: 258805 - DNA, 352 bp, Glycine max
  unsure (1)..(352): unsure at all n locations
tgtctattttgggcattccggcctccaccattctggtctttcttgggtcgtgaacaatctctcttagggtgtcccttttttncacaattaaaacatgttatgcctatatcgggacaattcgaggagatgtgccctggcttaccacacttgtaacaaatgatatgagtggagaacgtattggggttgctaccggtaccacctgcaaatcccctatcaacagtcctctgattgtcatggcggntaccatattgcttaagaggaatcaaatatgggtttcctcgatgttgaagcccattctttttgttcctcattggacctgtactcttatagtaagccgccctgtctcgggagt

SEQ ID NO: 258806 - DNA, 433 bp, Glycine max
agcttcacatgtctacatggactcgtcctatgaatcatctacttgatcttgaagggttttctcaagttctaaatgatcttttgatagattcttgaaatctttttgtacgctattgtaagcttttgagagataaaatgagttagatagaagctcatgacaagtttttctaagatattcagggtcgttgaaatttaccttcttgagttgattcagactcttgggaagctacattttccatcacgcatatgttggcttcttcatcaagttcattagacgaggtgttgttcatgtcctcccaggtacttataagacccttcttttctctagtctcgatgaatttcttcttatcttaactttctccagttctgggcattcaaacttgaaatgtccaggccttttgcactcgtagcagattatggagcttttgcctttt

SEQ ID NO: 258807 - DNA, 399 bp, Glycine max
  unsure (1)..(399): unsure at all n locations
tgcatgatgcatngaaattcttatggtgattgtgtatgatctggataagctaatgatgaaatggcgttactattaatcttattggtagatattttatgtaccaattctgttcaaatggaaaggagatgtagtttttttgtttgtaatagttaatatgttggtttgatagacttggatgatgctacctcaagtatgaggttctttnttgttntagattagtttatatcatctggtgatttcagnttatattattaatatatttgtaggactaccaactatattaacgttagattaaaaattaagccaaattatatattaaggccttgtttagcctattatagaaggtgtgttatttattttctggtaaaaacaactatcanaggaatattaaaggtttat

SEQ ID NO: 258808 - DNA, 372 bp, Glycine max
  unsure (1)..(372): unsure at all n locations
agcttgccacccagctcgcccaggcgagcagggttgcttcctccagaagcaacagccttctggaggaatcttctggagggcccaagtggccctggttgctatttgcacccncatttttactaagtacaccccctgcctttttttggtgattcttttttcgtaaagttacggaaacttacggatttcgtaacgatacttgttttccttccgtaatgttacggaaccttgtggattacataatcatcccctttttgacttacggaacctcactaattgtgcaacgatgcttccatttgatttccggtgtgtcacggaaccttacggattgtgcatcaatattntcttttgtttccggcatgtcccggaatttca

SEQ ID NO: 258809 - DNA, 387 bp, Glycine max
  unsure (1)..(387): unsure at all n locations
tgctcttatatacatagatgtatgtatntatgggatgaggttatatgccattcttgctntaagagtagtgtcccactggtaaaattaactttccaaatgtttgccttcgcaagaatggccccgaggaagcttgcctcatagacgtccaagaaggacaaagcggccgaaagaactatttccgccccggagtacgacagtcatcgctttatgagcgttgtacaccaccagcggttcgaagccatcaatggatggtcgtttctccgagagcgacgcgtccagctcatggaggacgagtatactgatctccacgacgaaatagggcgccggcggtgggcaccactgggtactnccatggccaagtttgatccagaaatagtccttgagttt

SEQ ID NO: 258810 - DNA, 394 bp, Glycine max
agcttcatatatgagctacattatgatgatgcaatcctccctaggaagggactagttaccagagccatgagcaagaggctccaagaggattgggctagagctattgaagaaggccctaaggttctcatgaaccgtagggtagatttttgagcccatgggccaaggttggtgttagtcgcttgatacgactaacttttgtatagaaagccgcgcgctaagcgcaagatcagtgtgctaagcgcaacaagtgccttcagccaggctaagctcgagactggtgctaagcccaatttcacttactcgtgctaagcgcgagggtggcgctaagagcaacatcgcgattttagagctatttaaagcctgtctcgtgcagaattggggtaccaacttttat

SEQ ID NO: 258811 - DNA, 324 bp, Glycine max
  unsure (1)..(324): unsure at all n locations
agatccagcaatgatttctcaataactcttanaatggattcagatgttccttcgtttgaagcatgagattcttctttttaagattgaaaacttctcactcatcttttttcctactcctaaaggtggtcccagcatctgaagctatatagtagcttacaaaaatataatttattcataatagagaacaaagatgagaattatcaatccttgggtccataatattatataggagactgatgtaattcgggcatgtatttcgtccttgctgaaattctagaggaagttatcatcatatgaattggctattataaattagtttcactc

SEQ ID NO: 258812 - DNA, 428 bp, Glycine max
agcttctcaaagatgtacttaaccaggtccatcttggatatcaaccaggtggtatggctcagcatgtattgtcttagacggtgggacgcccagactaaagcacaacacgttctttcgagcagggagtagttcatttcataggccgtgaactttttactcaagtagtagacagcgcgttctctcttcccggactcgtcatgttgccccaacatacatccaatcgactcatccaaaatcatcatatacaagatgagaggccttcctggtaccaacgacataagcacgagagggttcatgagacactgtttgatccttccaaacgcctcttgacaatcctcattccaacggacggattggttttgcgtaagaagtggaataacggctcacaattagcggtgagttgtgatatgaatctggcaatataattc

SEQ ID NO: 258813 - DNA, 324 bp, Glycine max
  unsure (1)..(324): unsure at all n locations
ctcactttaacctccatttaccacagaatccagatttaaccttccaactctcaaagcctcactctttntccactcataacaccacattctcactttctaaccctaggttaactctacccttcatctctaacagtttccgtaagcaatntcagcatataaacatcacaagcatcatcacaaataccctataacagaatgggtatgtctaactcatgcaaacatggcaagtncaacatgctttcaacaagagtcttcacaaataactatcatgaagcagataactaacagaactacccatcatagtctccaaaacgccatacccac

SEQ ID NO: 258814 - DNA, 377 bp, Glycine max
  unsure (1)..(377): unsure at all n locations
agcttccaaatatccaagcaaaacaacattcacacagcacaagctatcacagccaagcaaaacagagcaaaggcagaaaactctgccaaaacaccaaccaaaaatcacagcttttcccactcaaagaccccagtaacaattccttcgatccaattcgtaaaccgttggatcgactccaaaattttactggaagtctatagtgcataagcctacattntgaccgttgggatctactagcaaacatccagaactcattctacattactctttccacaaccagcaaatacatggatttttctgcacttgtgcagaattctgctgcacaattttacagcaaaatctgcacaaagagcatatttcaaaaccacacttcccct

SEQ ID NO: 258815 - DNA, 450 bp, Glycine max
tagacttacttctgaagtaataggctcgcccaagtgagctggtttcttcacactgaagtaactagcttgtagagagattttagcttaagtttaatctattaccagttaaccgtaatccattacataattcagctgagaccatgtctgggttctcatgaatttccactttaatcgattaccaagtgatcataatcaattacttcattcttaaaggtgttcctagaagtgatcaagaatagtttaatcgattacatcaagaatctaatcgattacattgttcttgaatgttttccagaagttaagaagaacactctaatcgattgaaatgataatataatcaattacttcttcgaaataatcgattacattggatatttaatcgattacaggcgattataattgttgtctctataataaccatcttgtgtatcactttaagacggaaaagag

SEQ ID NO: 258816 - DNA, 431 bp, Glycine max
agcttctaaactttatacaagaatgaagctctgatatcacttgttggacaagtggcctcaattatcttaatagggggggttgaattaagatacacaaactattcccaattaaaatttaaccctttttttggattaacactgcacccttaatatgaattactgaaaagacaactcaaaatgaacttcttttatgaaaaagataaattgaaataaataatagaagtttaagggaagagagaatgcatactcagattctatactagttcggccacgttctgtgctaacgttcagtccccaagcaacccgcttgagatttccactatcttggtaaagaacttttacaaactgtgaaccacacagggaccccttctcttgtgttcagatatgcttacaacttaagagacccttggtcttctaaacagatctctttg

SEQ ID NO: 258817 - DNA, 277 bp, Glycine max
ttgactatatgctgcaaagaatgggatttgtccaagtggaacaatggatttaccatggctcacaacagcaaccatatcaattttagttaatggcagtccctcaaaggagtttgtcccttctaggggcttgaggcaaggggaccctttatccccattgttatttaacatatttggagaaggcatcacaggtttgatgaaggaagcagtgcaaaaaaatctatattgaaactacttggttgggaagaataaggagcccactaatattctgcaatatgct

SEQ ID NO: 258818 - DNA, 386 bp, Glycine max
  unsure (1)..(386): unsure at all n locations
agcttatatgatccaccatataatgagtcaatcttgtgaactcattcttgtnaccctactatcattttggatagaggaagaatctccatattggagaattataatcgtgtgcttccattactacctttaattactaagtgtctatcttaacttccagaagcgggaaagtctgagttttcccgaaaaagacttaccaagtttgagtagtattcggttttgttctaaaatttaaaaatgaaatgtgagtcatatgtgcgacgatatttcttggttttttaacgttatttaatggttaactaaaatcgaaggaaccgggcaaatatgaataataaaactttacacaaggaactaaaattgaagagctcatatttatcacaattaaaaat

SEQ ID NO: 258819 - DNA, 453 bp, Glycine max
  unsure (1)..(453): unsure at all n locations
gaccttagatactcaagcttacttcatagtactgaagaattgaaagaggatcctntatcctgctataatacagtggaagcatccactcagtcaaaatacatgggacactgattaatagtacggtggcataatgatggaagaatgattctataatatttgcaaatgacctccacttaaataaccaccagttcaaacaattagctagttatagtcaccgctttcactaatttatcgatctgatacccaattcatcagcagaataaagttgacaggcataaatcttaatcgggtcattataattagatggtgcagctcatgatacatcagaaattacaacactggttatacatcccgtcacgatatctatacacgtgcaatgtcccacatacttatntgcagcggattgatctacttgtatatatagcccatggccaacaactgattctaagtttt

SEQ ID NO: 258820 - DNA, 413 bp, Glycine max
  unsure (1)..(413): unsure at all n locations
ngctctcccaacatcaaagtaatacaacattcaaacagcactatctatcacagccaagaaaacagagcagaggcagtaaactctgccaaaacaccaaccaaaatcacatcttttctcacttaaagaccccagtaacaattccttcgttccaattcgataaccggtggatcgactccaatattttacttggaagtccctagtacataagcctacatcttgaccgttgggatctactagcaaacatccagaactcattctgcactgctctttccacaaccagcaaatgcctagtatttttctgcacttgtgcaaaatcctgctgcacaatttcacagcaaaaatctgcacaaatgcagatttcgaaacacactttccctattcatcttgccaaatcaatctacaagtccaatcat

SEQ ID NO: 258821 - DNA, 450 bp, Glycine max
  unsure (1)..(450): unsure at all n locations
agaaagagggagagaanaagagaggggggaacatganattgaaggaagaataagggagacaagttgaactttgagttgtatctcacaagactctcattcatcaaagttacaacaagtgttacacatgcttctatttatagactaggtagcttccttgagaagctttcttgagaaaacttncttgagaagcttctttgagaaaacttccttgagaagctatagcttagctacacacacctctctcataactaagctcacctcctttgagaagcttcttaagaagattcctaaagaagctagagcttagctacacacacctctctaatagctaagctcacctncttgagatgagaagctagagcttagctacacacnccctataatagctaagctcacccncatgacanaatacatganaatacaaaaaaattttctactacaaagactact

SEQ ID NO: 258822 - DNA, 460 bp, Glycine max
gatccttaagtcacctgcagctgcagctttgaggtagatgtgactctttcatttaaatttgaattccaacgttcaaggacactggtaatcgattaccaaaacattgtaatcgattacaaccttttgaaaataattggaacattgtaaattcagttggaaaactctttcaaactcattttgctactggtaatcgattacaccattatggtaatcgattaccagagagtaaaaactctttggtaaagattttgtcaaaactcatgtgttattcaaagttttgaaaaaactttttaatacttatcttgattgagtcttttcttcattcttgaatcttgagtctttaatcttgatcttgattcttgagatcttgaatcttcttgattcttgaactctcgacttgttcttgattcacttgagttgtgccttgatccttgagctgtattgtcatcacctttggcat

SEQ ID NO: 258823 - DNA, 567 bp, Glycine max
  unsure (1)..(567): unsure at all n locations
tatcctgcctccgtctagactgtgtctgtgtgctgttatagtgatcttcgncncggnggtgttgtgcatcattcatgacggaactataaatctcagctagctctacattacattgacgttggcattgatgggaggatgctatctgccatttttgctttaagagtagcgtcccagtggtcaaattaactttccaaatgtttgccttcacaagaatggcgccgaggaatcttgcctcaaagattgtcagcaaagacatggcgtgcgaatgaactatntccgctccggagtacgacagtcaccggtgtatgatcgctcgccaccagcaacgctgggaagccatcacaggatgagcgttgtctgtggagcaactgtccaactcggcgttacaagtatcttgatttcacgatgaataagacaccagcgtgggacctctgatactctatcgccgagatatccgaaataagcttaccatatgccatgttggccacatacgagcccgcctaacgatgcctgggtatggtcacagattcagtcatgcgagcttaagccaacctggaaccaacatgg

SEQ ID NO: 258824 - DNA, 343 bp, Glycine max
  unsure (1)..(343): unsure at all n locations
tcaagcttacccatttgttntagggtttttatgatgatgcttgtgatgttcatgtgctgaaattgcttatggaaaactgttagagatgaagggtacaactaacctagggttagaaagtgagaatgtggtgttaggagtggaaaaagagtgaatgttttagggctggaaggtcaaatctggaattggtagtatttagaggttagagtgagttaatcttagcttgaaatgccatttanaacatgtgagaaaggttaggctgtgctagagtgaaaagcaaatggccaaagtgaaccaagagccatttctagggcaaaattgggtgttgaggagtcaaattntgatt

SEQ ID NO: 258825 - DNA, 421 bp, Glycine max
  unsure (1)..(421): unsure at all n locations
ttaagctcttgatgtctttagagggtactttctcgctgacatcttttgccttgaatggaattgccatgaccgggttattggtactggctttgatatttggtagttgatattgggttgcgggaaattattccgattggattaactcaccatccttaacttgccaatttggtatgacatttggtgttggatcacctatgatgtcttgtttccaagggtaatctatatcatttctgatggcataagcatgaaaccaatcaaagaaatggacattaattttgactcgttcgacaaatttcgagaacttatcttggnattgcttctggttgtacccttggaatgggtgaaaaaccatcttctttgaggttcattctccgaagaataaaaatctttcctaagggtttccttatcaatgcttaagttg

SEQ ID NO: 258826 - DNA, 193 bp, Glycine max
  unsure (1)..(193): unsure at all n locations
ctcagctttgaatacaagctggaagatgactctcaaaccactactatcaaggtgaggaatttattaaatgttgtttctctcagttncattgacaaggagattgaatcaagaatgaaacaactacttgatctcctagaacttcttgcgagccaaaagagtgatttagggttgaaaaatgcttgcgatgttggga

SEQ ID NO: 258827 - DNA, 539 bp, Glycine max
  unsure (1)..(539): unsure at all n locations
ctattcgtttcactacttcatactcatattctgtttaattatntatattaannnnccacggatgattganatgtctcactcgagatctctgagtcnactgcngcatgcagctttccctcttacccttaaataggggatgatgtgttataccctaatttcgtccgggaccttngcttgatgacatgcgaccctttcttggttcctttgaagtgccttgcattcatcattaggcaaattgggaaattccaagacctgccgcataaccaaatatattttgatgcccaattcgtaagttttcgtgacacaccggatattaaatgggagccatcgttgcataattaagtgaggttccgtaacattccccaagtcaaaatagggatgattatgtaatccgcaaggtcgtacatacngaagaaacatgttcgtacgaaatcgtagtttcgtactttcaaaaagaatcaccaaaaaaacagagtggtgtacttaataaaagggggtgcaattcaccagcccactgggccttcagatatcctcagacn

SEQ ID NO: 258828 - DNA, 332 bp, Glycine max
  unsure (1)..(332): unsure at all n locations
tatctgcatcatagtaaggcccgctcttattntatactcacatgttctatctctactttttggctatttttatagcgggcaagctaaaaatatgattaatatctttatttggacctacaacagtctatgttttatatggatctttccctattaagtatcatttttcctatatacttattatttatttattcatggattaagtgtgtctttcctgtgaacactttttcaagtgtatgaaagagtattagaacgatgatttataaactatataaaaacattttaggaatctncatgttttcttcaagcaacaataattgctgtctttaatttat

SEQ ID NO: 258829 - DNA, 384 bp, Glycine max
agcttctgttttcaattacgagcttctcgatatattacgggactcaatcggacatccgagtaaaaagttattgtcgtttgattattctcagagcttcagtttttaatttcgagcgtctcgatatactacgggacacaatcggacacccgagttaaaagttattgtcgtctgaatttgctcacagcttctgttttcaattacgaacgtcttcatttattacgggactcaatcggacattcgagtaaaaagttattgtcgcttgaatctgctcagagcttttgtttcaattacgagcgtcttgatatatacgggacacaatcggacacccgagtgaaaagttattggcgcttgaatttcgtatagcttttgttttcaatacgagcc

SEQ ID NO: 258830 - DNA, 414 bp, Glycine max
  unsure (1)..(414): unsure at all n locations
ctgcggatttggtcttcgccagtgaaaagatcgaagtggatctgataagatgcaaatttaatcatcctgcttagacgactgagaaaactgnggcaaatgaagagggtgagaaagatggagaaacccatgctgtgactgccattcctatacggccaagtttcccaccaacccaacaatgtcattactcagccaataacaaacctcctccttacccaccacccagttatccacaaaggccatccctaaatctaccacaaagtctgtctaccacacttccaatgacgaacaccacctttagcacaaaccaaaaacaccaaccaagaagtgatatttgtagcgagaaagcttgtagaattcaccccaattccagtgtcctatgctgactcgatcccatatctacttgataattcaatg

SEQ ID NO: 258831 - DNA, 407 bp, Glycine max
  unsure (1)..(407): unsure at all n locations
agctntagcttctcaaggaagtttctcaaggaagcttttcaaggaagcttctcaaggaagcttttcaaggaaacttctcaaggaagcttttcaaggaagctacctaggctataaatagaagcatgtgtaacacttattgtaactttgatgaatgagagtcttgtgagacacagctcaaagttcaacttctctcccccttttcctccttcaatctcgtgctcccccctctctctttcttttcctccattgaagcatcatctccaagcttcttatccaaggcacatttttggtggcaaagctccttcttccatagcttattccctagtggatggcgcctcctctcacctctttcctttatcttccgctgcatctccatggtggaaaatcaccattgaaggacctcattg

SEQ ID NO: 258832 - DNA, 431 bp, Glycine max
tcttagtttcagatgatgcagatgggtttgtagctacctcatgcactcctctaatgactatggcatcatttctggcgctaaactgctgtgagttggaagccatcttctcaattaatattctggcttcagcaagagtcatgtctccaaaggctccaccactggcagcatctatcatacttctctccatattactgagtccttcataaaaatattggagaagaagctactccgaaatctgatggtggaggcaactggcatatagtcttttaaatctctcccagtactcatacaggctctctccactgagttgtctaatacctgagatatccttcctgatggctgtggtcctggaagcacggacaatttctttctaagaatactctcttaaagtcatctcagcttgtgatggaccttggagcaaggtaatacag

SEQ ID NO: 258833 - DNA, 453 bp, Glycine max
agcttcccaagggtgcatatggataaattatgaatatagtgcttttatgatatagcttttctcgagttgtagaagttcccctctctagtttacgagagaataatgaaattactttttttggcaggaggggtttatttttaattttttgaagaacttatccagtgatcttaacaactttaggtatattttgttattttcaaatatttaaaacaatgttctacataaagcacaaccaaatggacactaaaatattttaaaatccttggttttgaaatgtagaatgaaagccctattataaaatctgtagcactcagtagttaatatatgctgggagagaaaagttgggcaaacatagcataagatagctattacattgcaatattatcttatggaatatttcttatccatgtcatgtcaattgaagtctaatatttgtcttaattaacttaaatt

SEQ ID NO: 258834 - DNA, 397 bp, Glycine max
tcttgtatttatagatcatctttaacaagtgtttgctggctctatacagattgattctctttgatgaaagcttgtcggtgaacaaatgtctcttacatttaatgcatgtgccctccatgctgggaaaccactttttttagctctcttatgagtattggtgtctatgctgtagcgcacacacccagtctaagttagcttacaaccaattaatgtatccaataagaatatctattaactatatctatctcttttagctataataaagatgtctttcatttccatagtctctgctaaagaatgaaaagttatggtacatgaaagatgaataaaagacacattaacatgtgtatcgctagatactaaagaacaacctcacagaagctcccacatgacctct

SEQ ID NO: 258835 - DNA, 322 bp, Glycine max
  unsure (1)..(322): unsure at all n locations
agcttcttgcgtagccgctcttgctgctcagaaaatcccaaaaacaaatccctcttattactagctattttgaattctttagttcctgaatgtacaaccttcaaatttttgctcgttcccctctttgagaatgacgaggatcttcataggacttcatccagctaatgttggtcgccagnnncatcatncaccaccctttttcttctatgccttctcacgtttgtagttgttaaacccattattatgccttcctcccttgaagcctagttctatcacatctgtagttgaacctcttatcttcagcacagccgaatctcctgtc

SEQ ID NO: 258836 - DNA, 402 bp, Glycine max
agcttcttattatcaacagatgaagatgaatccgtggccacatcatagactcctctaaggacaatagcatcatttcttgcactgaattgttaggagttggaagccatcttctcattcagattcctagcctcaacaagagtcatatcaccaagagctccaccactggcagcatcaatcatgctcctctccatgttgctaagtccctcatagaaatattgcaaaaggagttgctcagaaatctggtggtgaggacagcttgcacacaatttcttgaatctttcccagtactcatacaagctctctccactaagttgcctgatgcctgaaatgtcttttctgatggcagtggtcctagatgtaggaagatattctccaagaacaccctcttaagtcatcccaact

SEQ ID NO: 258837 - DNA, 422 bp, Glycine max
  unsure (1)..(422): unsure at all n locations
ctagagcacaacaacacagaatctaagtgtccaacacccctcaattcaatgggtcttctaggtctgaaaagtgaagttgagaatgaggtaaattngaagcaaactctcacctcacaccagtccataacatcaatctaaacttgctcaaactggatttacacctaaaattccaccgaatcaaaatttgactcctcgacacccaacattaccctagaaatggctctttgtcactttggcatttgtttttctctctagcacagtccaagctttctcctaagtgctataagacatctcaagctaggattaactcactttaatctccatttaccacagaatccagatttaaccttccaactctcaaagcctcactctttgtccactcacaacaccacattctcactttctaaccctaattaactcta

SEQ ID NO: 258838 - DNA, 393 bp, Glycine max
agcttcatgatgatgaatcaaatcgagtcaagtagttttgttgatgactaagatgatgacaacgagcccaaagaatgatttttagattgagtcaacaagttcaagatcaagtctaatttcaagtttcataagaagaaatcaagaagattcaagaatcaagagaagtctaatttctagattcatgagaagaaatctagaagacttctcaggggaagtattgataagatttttcaaaaacaaacatagcacagttttgtttttcaaaagattttttctcaaaattttctaaggtaccagagtttgtactctctgggtatcgagtacccggtttcctgtaatcgattaccagcgacaaagttggatccaaaagcttcttactgaatttgcaatgtt

SEQ ID NO: 258839 - DNA, 389 bp, Glycine max
  unsure (1)..(389): unsure at all n locations
cactgctcagtctgattggctcacaccctttcattggaatggatcatcaagattcatacacgcatttgtctaccttcttggagttgtgtagtaccatgggagcttttggcaaaaatgctaaagttgtctacctcaaagctttcccattctccttggcaggtaaagcaaagacatggctccaatcacatctaaacaaatgcctcaacgcttgggaagaggtggtagaaaacatcattgcaaagttctttcctctatccagattcatcaagatccattgctactttntcccaaagatctgatgaacctctctgtgaaacatgggagagattcaagtctttgttgcagaggtgcctataccatagtnttgatgatgttgcacaactacatat

SEQ ID NO: 258840 - DNA, 455 bp, Glycine max
  unsure (1)..(455): unsure at all n locations
agcttgtgactctnggcaatttctttaacaaaaccagttacttaaaaggttgtgacttttgaagaaatcttcagaaacaagtcacttgaagaattgtgacttttggaaatgtatttttcaaaatcagtcactggtaatcgattaccattaaggtgtaatcgattacacatcaacagatgtgactcttcattntgaattttganaataaaacgtttagaagctctcgtaatcgattacaagtattgtgtaatcgattacacaagtttaaaatgatctaaaactggtgaaattcgaaatctaatggtttaaaacactggtaatcgattactaccttctggtaatcgattaccagagagtaaactcttcggtaatgattttgtgaaaatntcttgtgctactcaatggttttgaaaacnttttaatacttatcttgattgagtcttctcttgattctt

SEQ ID NO: 258841 - DNA, 424 bp, Glycine max
  unsure (1)..(424): unsure at all n locations
tcttgattcttganatcaactttcctcttgaatcttgaagtgttcttgaatctatcctgaacatctngaactcattctttgattgaccttcgagctctttgtcatcacctttgttatcatcaaaacatctttgaatcaatcttgattcatcatgaagctttgcttctacaacttcttcctttggctcaaaaatatcttcctttctcctcctcccctcgcattcaaatcatgaaactacaatgtaagggaagcttaaccttgcatttgacttctatattgntagaaatgctggtagatggtatatagattgcatggaaaatgatattttgtgctaagtgaggcttatggtatttggatctggaggccatgaatatncatgaagcaatttgattcatgaaaacttgaaatatgcaaaatcacactc

SEQ ID NO: 258842 - DNA, 405 bp, Glycine max
  unsure (1)..(405): unsure at all n locations
agctntgtatcccagggaggggattcgagctaaatgctgatgggcagccgttgaagatattaaggaagaacatgaccaccttagctcagacatggagtgttctttccttctctaacctaattcctacgtcctacacatctgatgtcaccttagacagagtcaaattaatttatggcatcattatgaagatggatatgaatttggggtacctcatctcccaccatatctctcttactgcacaacatgatacatccagactttgattccctgccttgatcacagctctatgcaaggccagaggagtccaatcaaattctagatccttggagaacttgagccctgccattaacttggcatatattaagagaactgttggaatctagatgatccaacagtgacatttag

SEQ ID NO: 258843 - DNA, 433 bp, Glycine max
  unsure (1)..(433): unsure at all n locations
ntaagacatntagcatctgcaagttaccatagataagaaagccttcctccacttatacatttattgtctgcctacaaaattcaatattcattctaaaatgacaatagaccctactactcttaagtattcaatattcattctaaaattgagaattcaatattcagtattcatacctttntgctctaacaaatctgttgttcatctgatagcaatcaccggagaaagaacactatatcttcttggtgaatcttaatcatgaatagaaacaagaattatcctcttacagctctctttgcctgtcacatgaataagtaacactnttaatagccaacaagcagtttcacatactnttggttaagcataagctgaatagtntggtgtagttgaactaggtttggctttgagttcttctaatgccattactcattagttc

SEQ ID NO: 258844 - DNA, 351 bp, Glycine max
atcttcttggtaaaaagatactgacatattcttatgttttaagctaaaatacgtatagctcacttagcgaatcaatatgacgtttggttttaacaaagccttgcgcttagtccaacctctcgctaagcccaatgtcaaatttataaattccaaagagttgtggggcttaatgcagtatgccggcgcttagtgttgtctgcaactcaaaattgttctgcaatctgcacttagcgtgagatgtcaagcttagctctaaatcaagctctaacttatagggatagtccaagcttatcgcatcaaccgcactaagtgcaattctatgaatttcaaaacaatgaaggattggtgctt

SEQ ID NO: 258845 - DNA, 693 bp, Glycine max
  unsure (1)..(693): unsure at all n locations
ctgaaacgtcgtcacaaatacgtancggtgagtgangngctcgntgtgttcggcntacnntannagtagtaagtgatnctgtggaaaacnnnacacccatgtgggttgatagtctcgnctgctatctacgagactctatagaaactccagctatgcgcactatttgcttacatcacgcttgtctatggacaaagactntctatctcgaagagacattgcgctccatnttacaatctgacggctcgtttgctacctagattattcacacgctcctctcacgggtttcagctacttacatcacacacatcctcttggctaaactcatattccatgcctatctcattcatttgtggagcacgagaatattagcacatagtgcacatcnttggcagtttctaatgacctagcatatcgcaatacgttcattgattgagatctctgacctatcgtacacaattaagtgcgcctacatatcttaagtcatactgtttctcttgctgactaaagattgcattcaatactcaagaggcatgattccttggcaatatgtgttcgctcatgcaacagattctatatatattcttctgtgagacattntgactaccaaaaattatttttcatacatttaagtatcttgctgtcatacccaagtgcacatggccaaagtatctggtacctatctaaactaccacg

SEQ ID NO: 258846 - DNA, 188 bp, Glycine max
agcttgcaagttggtgtataggcgacacaataactctaaacttgagttcagcatagatgactttaattcatgcatgatcaacactgaactgggagctccaaaatttaagatcgtatagcataaatttcgcaagtaatctcttcatgaaataatctatctttaggaacaccaggctgaaaactctttat

SEQ ID NO: 258847 - DNA, 444 bp, Glycine max
  unsure (1)..(444): unsure at all n locations
agctngtgcaaatcaaatcactcctacattntatctctagcatgcattgtatgttggtctcgtcctttgtcacgggaagccggaaggtccatctcaccttcttaattgtacacatggggcactgcgcccccaaatgcgcaagtaagaagagataattttccgggctctcgtgtccgtaaaatgcattcatatcatgcatcgcataagcatctcttcataacatcataatggacgtatcctgcatttgcatgagtcatggcatcatcatgcatatgcattcaacaaactttttggtctgcaaaattgcataccatttgttttcatgtttgctcatccttgcgttttcctctacaaaaataaacaaaaaagggggaagcgtgaaacttcacactacattcttagtttcatgtgctaggcaccacgagccaaccagtgtgggatcat

SEQ ID NO: 258848 - DNA, 494 bp, Glycine max
ctcatagaagtccatgaaagacaaagcggccgaaagaactattttcgctccggagtacgacagtcaccgctttaagagcgctgtacaccaacagcgcttctaagccatcaaaggatggtcgcttctccgggagcgacgcgtccagctcatggacgacgagtatactgattttcaagaggaaatagggcgccggcggtgggcaccactggttactcctatggcccaagttgatccaggaatagtccttgaatttatgccaatgcttgccaccaaaggaggccgtcctaccataaaaccctgggttagggtccatggaatcccgtctatatccacactcttaagccacttccggatataccctatggtgttagaagagcgccaaattgcaattctgccacaaggaagaccctgtctattgttctatatgaagagctctcgccaacttcttatataccgcgggatgatattctcccgtttgtggagagaaggcaacg

SEQ ID NO: 258849 - DNA, 362 bp, Glycine max
agcttgggaggattaatggtgactcagagtttataggaactacgatatgggctacgtgggagtacgtgagctcatatggaggtgggcaacacgggatggtggttttatgctcgctttgtggatgtggaaaacttgttgtgcaccatcgcccgaccgccacctagtaccacatgtgatgggtaccccataatcctacacgcttgagatgaggaagtgttgaacggtgaaacttcatgcttttattcgctgaccacacagtggtacctgtagatatgtcgcgggggtcaggagaccttggggacgtcaggtggggtgctattgcccacatccaagcttgaccaatcccgacctcacccgggcta

SEQ ID NO: 258850 - DNA, 438 bp, Glycine max
  unsure (1)..(438): unsure at all n locations
tctccctctttttccctataaataggggaaggagggaagaacattatggtttaaccctcctggtatttgagaattacttataattagtgagaaaaactgtttccgtgaagaagatccaagccgaggcgcttccataatgcttccgagacgtttccgtgggtgatttcgcgaagatatgcaaccgttcttcgacgttcttcgttcgttcttcgatctcaaccggtaagttcccgaaattgaacttttcaattcattctatgtacccttagtggtcctcatttgtttcgcgtacttttattttcatttcatttactttccgtacccncttttgacgtgctttagtcattttctcgcctaatcaaaaactaaataaatntccaccgatcattcgtattgtaacatctntcaatntctattaaaataaaatccgaccgttcg

SEQ ID NO: 258851 - DNA, 425 bp, Glycine max
  unsure (1)..(425): unsure at all n locations
agctngngattgtgagactatttngtatatatagggacaacatgaatgatttaaaatgagtgcccgaatgcaattctaggcctaggaacccaagcttttaatttcaatgcaagggagcatgacttatgcctaggaatttaaattttggttttgaatgtaaaaaaggggcatgaatattatgacatgtttgagaggttttctaatttaaatttggctgccccatgaggaatatcttgcacttaggtagcatggaaaatacctttcaacggtatgcatatatgtgaatggcataaaaataccttgcaaagtgtgaattaataataaaaatgcctttcaaaatatgtatattgtggataggtagtataaggagtctttttttttaaaatgtcccatgtcaaaatagcacgcgatgcttccaatgatat

SEQ ID NO: 258852 - DNA, 482 bp, Glycine max
  unsure (1)..(482): unsure at all n locations
agcttagccttggttgtaattatgttgcttatgtagctccccttatctctaacattagagacttaagaaataagtttaatggagatatatgtgtcgatagcataaaattatttagaattgtcaatcaattacaaatcagttttgtatgattttaaagataattattataaaatgataaacgtatcacatataatgagttggaattggataacgatgtaagaacgttttactattgtcaatacatgacctatttttttagatgaaatttgaataaacttcttcaaaaacacttatagaaaaagaaaataagatgatgaaatatataagtttctatataagatatttttttgtctagacaacaagtatcttcaattagagacaatcttgttcgagtaagatagaactactatgaacaacacaactcttctctcaagtatttagtgtatttgcanacggaagatttaaactcgagatctcttaat

SEQ ID NO: 258853 - DNA, 452 bp, Glycine max
  unsure (1)..(452): unsure at all n locations
agcttagatcggaacattcattctcttaaacaaagatttggtgatctaaacttgtggttcacgttaaccagcccttattaatctggcaactagtccggacaagttaaggaacaaaactgcagggttggtatagcttgtatctaacattattattgttattttagtgaaaaatcatttttatacaacaaatttccactacgaaagaggccaggagagaaaagtatgtgagataaggtgaataatgtagtaataaagagcgataaagaagaagaaaaaatattataaaaaaaaaatattgaatgagtagtgctagctagtctttttttagtgccataagataaagcttccgtcaggttacagtaaagggttaataatgttaatcatgcacaatgaaagctacgttagaaaagctagttgaattattatttcatganacgcttcagcatgtacat

SEQ ID NO: 258854 - DNA, 366 bp, Glycine max
  unsure (1)..(366): unsure at all n locations
ntgaagcaggagttagagcatatgttattaattcatgatcttcttggctctcatgaatatcaaatattccattgtgtgccaaacagcgcatgatccgctgcacaaaacaagccttatccgctgcaatctgtagagttgagaccaactcacgaagagtaatgggtttgacatggttgtgtatcatgtctggaatacctagttgcacaacccatttaagacacatagatgttaggctaccatatagctgcatgtacaaaaggttntggccctcaaagagctcaattgcttcttggttattcattgaagccattattgcaagcgatatttaatntgcttaaactcgttcgcttttttccatgactagca

SEQ ID NO: 258855 - DNA, 433 bp, Glycine max
  unsure (1)..(433): unsure at all n locations
agctntagatgcctttaaaggttttaaggctgaagttgagaaacaatgtggaaaacaaattaagatcgtgagatcagatagaggtggggagtactatggtagatacacagaggatggacaagcaccaggttcatttgcaaaatttcttcaagaacatgggattgttgcccaatacactatgcctggttctccggatcagaatggtgtggcagaacgaagaaatngaaccttattagacatggtgagatgcatgaggagtaatgtaaagcttcctcaattttttgtggattgatgctcttaagacggttgcgtatatattaaaccgagttccaaccaaggctgtctcaaagacacctttnagttattgaagggttggaaaccaagtttgcgatatatancgcgttggggatgcccgtctgaagtaagaatttat

SEQ ID NO: 258856 - DNA, 429 bp, Glycine max
  unsure (1)..(429): unsure at all n locations
tattacgtacacttaaatactaagctngtataagataggacaatgatgagagaaaacttgtgaaagagcttgagattataaggaaggactatgagagctaccttaagataaaggttgngatgaaggaaatgaaagacaacaagaacaatgaacttactcctggaaaatgtgtccctccaccaatttcttgccttaaaaatattaaggttgcaaacacttcaagtatctaacatatgataaagaaagtgaaatctaagttgttgaagagataaaaattcctgaagggaagtgtttccatgctactaaaagggaagagaggttgaagttgtttgcccatctcctagagaaggaagagtcacaagagaagtagataagatatactaatggtgcacatcggagggtaggttcactgatgaagattaacgacat

SEQ ID NO: 258857 - DNA, 456 bp, Glycine max
ggatcctctaagcaccgcggctgcagcttaagacaaccttctctactgttggctacttcaacttcaacttcagacaactatttgtctaatgtagctcctgttgtcaataaaaatgttagtgtagcttcgaattctgtaatctcatctcctaacaatgctagtctttggcatgctaggttaggtcatcctaatagtcatgtcatgaagctagtattcaatcattgtaatatttcttcatctaataaattctttcagacttttgctccttatgctgtatgggaaagtctcagattgtctcatagattgctatctaacacctctacttctgtttaatctcctttggaacttgtctacacaggtttgtggagaccttctcatttgacatctatgttggttttaaatactatgtgccctttattgatgcattttctagatacacttggatatttcctatta

SEQ ID NO: 258858 - DNA, 442 bp, Glycine max
  unsure (1)..(442): unsure at all n locations
tctcttggactntaagcaaacctttagctcatccttcaagatcaaactgtctactcatgattggtccctttcctctctccggagtttaagctcgctgttactgccccatagagcccctcgaaatttgttccagccgtattcctccctactagcccttttggtctctcgttccaaggccttggtggtagctttatttacatctctcagttcggcattctccttttggatcttaagagctgctgatttgaacctttctttgactgattgggcttgctcgagttccgccctaaaggcctgcacctcttcgtcttcctccggagcctcaacttccacccctttagtggttctcaatcttgggagccaatccaaatcttgcatgtgggctttcaaccacctacggtagccaccgatgaggcccgtagtactagctttgagttccttt

SEQ ID NO: 258859 - DNA, 461 bp, Glycine max
  unsure (1)..(461): unsure at all n locations
agcttgtacctcaattggtgccaggcaccagccccactatctgaggacctactcggttcaaaaacaaaatatagttttggttttcaattataattacaaaatatttcactttattttcagtttttcattccaattcctatttccaaacattcatgaaaaaaattgcaccagccacctccgataaactttaaacaaaaaaaaaaactaaattcgcgtataataataaaataaattcaatagaagtttacacgatcattcactgagtctccgacaacaagcattaccgaaattcaacaattaccttccataggttgaggaccttctggcaagtcagagcgaggaaccagcatctcatcgtgctcggctgctgctgttgctgctgcacacaacacanacaaatcgaacatcaaaaaccctagaaatcgcgcaatagaaaaatcacaaaacaagaaaaaatgatc

SEQ ID NO: 258860 - DNA, 379 bp, Glycine max
  unsure (1)..(379): unsure at all n locations
ctattagtttacaaatatgtttgaaactatttttagccctccctaatatttccttaaagattttctatgttcaaaaaccatttttgagcttagaattactaagagagtcatctactgtctgaaattaaattgctgtccaatcttgcaaagttttgctcctaaacttattttcaattttctaggtgttctgagatcnggttttcataaattttacatgctaccctatattttcacacctattaaactcattcttgaaggcaaatatttaacaaaaacagtctgtataatcataaaaccacgttattttcgtggcaatttagtccctaaaaaatattccttanacttgtttcattcataacttntactagaaaactttgat

SEQ ID NO: 258861 - DNA, 438 bp, Glycine max
  unsure (1)..(438): unsure at all n locations
agcttgtatctcanacctatcatgcataaataagagtcttttgactctcctctgtaatcagaatttgcattcactttcaataaacaaaagttacttttctctcatgtcatatttctatagatcctgaaataaaaagtgatcagcacaacaaagtaattaaaggcatgggtaaatatagcaatcaattacattatctcaaaagcatcaacaaattaaacaataggaacattaacaatttaagggcctttttagctagggaaaacattttctatttttagatataattacaaaaatgccaccttgtttttactttgtttctagttttcaatatttcatacatgaaatagtgaaaacaacatctaagaagaaatccttaggtctcatattatatattatttattaaaaaaagcagctcaagtcgctatcattatgataaat

SEQ ID NO: 258862 - DNA, 458 bp, Glycine max
  unsure (1)..(458): unsure at all n locations
tctggtgggacatcttgacttgctttccaatctaacattcaccacagattctgccttcttctattntcagattgggaatgcctctaacagcacctttgtcaatgattntcttcatgcctcttaagtgcagatgtccaaatctttgatgccatattttgacttcatcttctttggagaatagacatgtggaggagtaactggtttcttgaggtgtccatatgtaacagttgtcctttgatctgctgcccttcattaagacttcactcttctcatttgtcaccaagcattctgactttgtgaagttacattgaatccttcatcacacaactgactgatgctgatcaagttcgcagtcagtcccttcaccagcagtactttgttcagactaagaagtccatcatggactatctntcccattccagtgatctntcctttagagccatctccaaatgtcacat

SEQ ID NO: 258863 - DNA, 325 bp, Glycine max
agcttgttagtgaccgtctgctcacagacttattctcactccgtccctcacaatagagccgccatccaatcctactcaatcactcatatctctggacactcgaccaccacacgagatagccctaagcactttgttgacgggcgtgcgcgaactcaaatcaaagccctagagtatgtggactacttgcacgcacgatcacttcagataaaatgacttggaatcaatagccgccgccatgttcctaggactatctacagagactcttgaagcaccttgacttacctgtacgagcactgtacctacggtatctacttctcaatttcgg

SEQ ID NO: 258864 - DNA, 375 bp, Glycine max
  unsure (1)..(375): unsure at all n locations
agcttatgttttggaaatttacctttgatgctttaattagttgccttttgttgttctctaatgtgcgcgtccttcatgatgggaaaataacagaactgttttttctatgttcaatttgtcacaggggctgttgttgaacttaaaaccataagtggtgccctttctgctgatgaaagtttgtctgactctgctgttgaaaaaatcaagctgctccaacaaattcttacatatgttgnatcaataatttatattttcattgatttaggttcaaatatagacaaaaaggatgagttattctgcagtcttgtaagctttatttcacatgctgatgctccaatcatctctttcaatagtcaaaggttttggctactgaag

SEQ ID NO: 258865 - DNA, 447 bp, Glycine max
  unsure (1)..(447): unsure at all n locations
ctaagctgcttaacgtcaatttacaggtctcgtaagaagatagttatgataccactttattggttctatggaagaaaagataaaataaaatagaggagaaaagaatagaggaatgcgttgaatatttgaagaaggaatggaatgataacatttattcattagcagcagtacatttataataattcagataaaacataaaactatcacattaccaagattttagcaatatgtggataacaacctaacttgctcctaaagtgtatgaaccacttatngactaaagcagaaactaaaacaatagaagataaagataaaagagtcacgtaatgaagtccagaaacaaataantaacaattatcataatcacatgtgcatcaaagatctctcagcttctttctctctacgagaaatttcatccaataaccatagaacaacctcttttgatct

SEQ ID NO: 258866 - DNA, 387 bp, Glycine max
agcttgtaataagatctggaataacgctcttgacgtctgtgagtatatatattattctgccaaagtttaatttcagagcttagctttttattttatttttatttatttctaaggtactgacaaagaatcacactctcatcccttggcaaaccaacctcttgcagattagtttttccatattcgaagctgcaggctatgaagcttatggtactgaaactcctagctttcgtgttcctttggttgtggaggagtacttgtattcatgttaaagcagaaaatgatcgtttaaagcctggtgattcactgaatttttcacaatcactaatttctaagagcggcacatattcaacaataatcttcgtattcttgatgaggatgaatatcact

SEQ ID NO: 258867 - DNA, 476 bp, Glycine max
  unsure (1)..(476): unsure at all n locations
tagcaacccacctgacgtccncaaagtcttctgacccccgtgacatatctccaggtaccactctgtggtcaacaaacaaaagtaggaagactgactcttccacgctttctcacatcaagcttgttggattatggggtacccgtcatatgtggtactatgtggcgatcgagcgatggcgcaaatcaactctcccactttcacaaatcaaacatgaacccaccatccccagttgcccaccttcaaattgagctcacgcactcccacgtagcccttgtnctcgttcctctcaacaccaggtccccatcaacccctccaagcttccacaatatccaagcaattcaattgcaaatatcatgaaactaccctaaaccaagaaaacagggtagaggcagaantactctgcccaaacacattcaaataccacagctggtcttactcatataccccagtaacattctcttcgttccgattcttta

SEQ ID NO: 258868 - DNA, 427 bp, Glycine max
  unsure (1)..(427): unsure at all n locations
agctntagcacttctgtagggtttcacggctttccatcagctcagataaatctgccatatactcagtcggtattaggcctcatgagctttctcatatttagcatcttactggatttagcttgggtggcttcccttttagatacttgggtgttccctttttatcatttagattaaatgtatgccactatgctccattgattccaagattactggcctgattcacggatggagcacgaagctctatcttatgcaagtaagctagagttgatcagagcagttattcaaggaattgtgaatttttggatggagaattttcctttgcctcaatctgttctggaccgaatcaatgcttctgcccgtaatttctgtggagcaaagcggatattaggcaaaacaagcccttggttgcttgatcagtagtttgttc

SEQ ID NO: 258869 - DNA, 448 bp, Glycine max
  unsure (1)..(448): unsure at all n locations
tccagaagcatttcattatcaagataatactattaaacaaaccccacactttccttcacaaagaaaggcgaaagaaaggaagaaaaccaaaaactttccacaagtaaaacaggcatacaacactgatcaataggataatcagataaaaacttactgaaattgtgattactccctctttgccaactttctccatagcttttgcaatcaactcaccaatttctctctctccattagcagatatcatcccaacctatcaattcaaattcaaaattcaaaaacagaaattaaagttaaaacccagaatccttattatcatctcctgcaatatacaagaagaggctctagcaaagtatgatcgacaaacctgcgctatttcttcagatgtgctaatcatcctagctcttgctttcaaatntgtgaccacagcatcgacagccatacttatacc

SEQ ID NO: 258870 - DNA, 518 bp, Glycine max
  unsure (1)..(518): unsure at all n locations
aaaacgattactaagngcattgactntcaganncattgngannnaagcnnacccgcngnnngganggattgttttaancaanaaaaatnatagatctattttngangaagagcaaaagggngaatttatgtccaaaagaattcttcccccggtgaggatatatgttctagatctagatttaatcacaatttatttctagtttctagaaatgacatctagaagaattccgagtctagagaagatgtactttcaagggaagtatcgataagaattttttaaaaaatccaaacatatgacagttttggtttacaagaaaagtttttcttctaaatttctaaggtaccagaggttttactctttgggaaatgagtactgcgtcctgtgatccattaccagnggtgaaaggtgatttcaaaagctttactgaatttgctattgttcaattgttttaaatggtgaattgaatacatatattggaattcataccagtgtattgaacgttgaaaatcaaattaatt

SEQ ID NO: 258871 - DNA, 489 bp, Glycine max
  unsure (1)..(489): unsure at all n locations
ttacaaagaaagaaccaagaggtaccatggcagaaagatcctccacaaagaattcaaactcggacaagaaatattgctctacaactcaagattaaagtagtttccaaaaaattaaaattgagatggagtggtccttttactattaaatatgttaagccttatgaagcaacagagatagaggaccaatccaaagacagcaactggttggttagtggccaaagcttaaagatctaccttggtggagaagtcccacaacacaccatattcatcaagctcgaagatccttagactgacaccaaacatcaagcttgtgatattaaagaagtgcttaccaggaggcaatacagctntctaactcgtagcttttacattgcattcatttaggagtaattttagctcctgagttggagttaaaaaaaacttatcacttagtagcataacagtaactcacatttttttagtttggtcatcatgtgcagccttattaat

SEQ ID NO: 258872 - DNA, 303 bp, Glycine max
agcttcttttggaccttgaacaagcaatcaacttctctttcagaaccatgctatgtgctcgcgactggtccctttcttccctttgcaacttgagttcactattgctaccccatagagctccgcgaaatttgttccggctatactcttccttgcgagccctcttggtctcttgttcaagggctcttgcggtaattgcattctcttcccgtaacccggcacactccttccgaacgtgtgtagcagccaacttgaacttctccttggcgagagttgcctttcctaactcgcttttgagagcttgga

SEQ ID NO: 258873 - DNA, 402 bp, Glycine max
  unsure (1)..(402): unsure at all n locations
ttacggacctatgatactaagctttgttcctctttatanaagagaagttctgaaactccatcacgttgtctaaaaaggccttgaagtggatctaagtgctctgatcattcattagcatattcatgaattggtggcatgctcaccactatctgtttctttagggaactcaccataactaataaagcacagaggcacccctataacaccagatccaaaagtaagatggataacanagagggagtgcaagaacagatgaatgccgacatgtcggccttaaaagatcagatggcttctatcacggaagccatgctaataattcaaaaatcaatagaagacaatgctacggcagtcgcttccaatacagctagggaagcggaactggtgctacagcccgcaatgaac

SEQ ID NO: 258874 - DNA, 256 bp, Glycine max
  unsure (1)..(256): unsure at all n locations
tcacagcacctttgtcaatgattntcttcatgcctcttaagtgcagatgtccaaatctttgatgccatattttgacttcatcttctttggaggacagacatgtggaggagtaactggtttcttgaggtgtccataggtaacagttgtcctttgatctgctgcccttcattagaacttcactcttctcatttgtcaccaagcattctgactttgtgaagttacattgaatcttcatcacacaactgactgatgctga

SEQ ID NO: 258875 - DNA, 416 bp, Glycine max
  unsure (1)..(416): unsure at all n locations
tcatcagatgttgcattntaagatcgcttnctcttatggaagaacggaatgcacttcttgcattgtatatctgtttaatggtcgtacaactattggcattgtgttccttcagagttagcagaatgtttcttggcttcaccatggacttcgtcatatcagcaataagtgttttttcagctttagtcaatcgccccgcatatggatgtccaactaatgacttggccaattcatgattatgcactccacaaatcaacttcaccatccagccttctcctccaaccactggcttgcaacgaagcttgaagggacacccacatttcctagtcccagtgtctcttctgataaattctttnttcctacacctatactcgccactcctttcatagccaattaacacaaatgtagtccttctacta

SEQ ID NO: 258876 - DNA, 400 bp, Glycine max
  unsure (1)..(400): unsure at all n locations
agcttatgacttctntgaatactgatctttaaggttcccttttaaacctttatgttntctccaagtattttagtacttgtctgaatgttccctactagctactttagaaagacagaaaaacactaatttgttttatagatggtctcagatgacagatctgttgaaagtgaaacagactcagttcttatatgaaaactaggaaggttgtaatggaggctagatcagaagtgtattactggaatgagttatccgttgaaagggggaaaaattatacgtaaattaagccattttctcctgaaatccaacaaactgcatgttcttcctctgtctttcgaaccaaagcaactcatagtattgaatacatgaccaaatattataaataaaaaaacatgttaaatga

SEQ ID NO: 258877 - DNA, 420 bp, Glycine max
  unsure (1)..(420): unsure at all n locations
tntaaattgagttatcagctaaattttaaatattgtcgcctgtccagtgattatccactaaaattaagagaatactccgtcatcctaattttcaggtctgaccatgcactctgaaaataaactgatgaacttcttaagaaatatagatttatgctggtgcggatatttgaagttgagggctgagaattcatattagctggttcttttgctgtaccnctgcgtgtacggatttttgtggcagagtacatgcatgtgacactttatattactaactttcaatatatgttctggttccacattatttcaacttaatatgtgatttatgataattattactaatattaaggtgaagctgtcaatcatatttgcatttaggttaattgaagcccgtactggcatggaaggaagacagagtgctat

SEQ ID NO: 258878 - DNA, 471 bp, Glycine max
  unsure (1)..(471): unsure at all n locations
ggatccttaagtcacctgcggcatgcaagcttaagacaaccttctctactgttgtctacttcaacttcaacttcagacaactatttgtctaatgtagctcctgttgtcaataaaaatgttagtgtagcttcgaattctgtaatctcatctcctagcaatgctagtctttggcatgctaggttaggtcatcctaatagtcatgtcatgaagctagttttcaatcattgtaatatttcttcatctaataaattttttcagacttttgctccttatgctgtatgggaaagtctcagattgtctcatagattgctatctaacacctctacttctgtttaatctcctttggaacttgtctacacaggtttgtggagaccttctcatttacatcctatgttggttntaaatactatgtgcgccttattgatgcatnttctagatacacttggatatttcctattaaatctaaagctg

SEQ ID NO: 258879 - DNA, 438 bp, Glycine max
  unsure (1)..(438): unsure at all n locations
tctcttggactnntaagcaaaccttagctcatccttcaagatcaaactgtctactcatgattggtccctttcctctctccggagtttaagctcgctgttactgccccatagagcccctcgaaatttgttccagccgtattcctccctactagccctttaggtctctcgttccaaagccttggtggtagctttatttacatctctcagttcggcattctccttttggatcttaagagctgctgatttgaacctttctttgactgattgggcttgctcgagttccgccctaagggcctgcacctcttcgtcttcctccggagcctcaacttccacccctttagtggttctcaatcttgggagccaatccaaatcttgcatgtgggctttcaaccacctacagtagccaccgatgggcccgttgttactgcctttgagttc

SEQ ID NO: 258880 - DNA, 341 bp, Glycine max
agcttgattgttgctatagatcaaacaataactgtattgttaatgcaaatagaccctagttggttttcataaatatttatcttatcgagtttagtgtaattccttgcggagtcacacatgctctttgattcgatttgggagctacaagatacttaagactggcgcgctctttaacatgttaaacataagctgtataaacattatctatcaattcactcttcagcgaatagatgtaaagttctcgttaaagcgttttcacatttgtctgatcaccctgaaatagagtgatattacattaaatcattcttaaacatgaggggttaagacctatggtttctttc

SEQ ID NO: 258881 - DNA, 410 bp, Glycine max
  unsure (1)..(410): unsure at all n locations
tcatacttcacaaaatatatatatgtatggttaggtagaatgataccttggatatgcatgtatgtaacaaaaaaatacttcacaaaatatatatatgtatgtttaggtagaaagataccttggatatgcatgtatgtaacaaaaaaatacttcacaaaatatacatgtatgtttaggtagcaagataccttggatatgcatgtatatagcaaatatatctcacaaaatatatatatgtatgtttaggtagcaagataccttggacacgcatgtatatagcaaaatacctcacaaaaatatacatatgtttaggtagcanaatacctcatggaaaaagaaggaatgaaaaaagaaaataataagaataaaaagttgtctagctaanaaataacatgctcgtgagaatagat

SEQ ID NO: 258882 - DNA, 497 bp, Glycine max
  unsure (1)..(497): unsure at all n locations
tgaccttgaatctaagctagcccgattcatatcgattgaagntggcttagctcatccttggccagcttaacggaccaaatcagcatcagatgaaatggttgggggctaagcgcttaagactctcaacttaacacatgaccgaagatgcgcttaacgcaaagctggcgcttagtgaaaagactggttttcattaaatggtttataaattatttatcaggcccttcctcaacaaattgaaacccttatatctaacattcaaagataggctgatatactcctatgtacagactatgcagcaagttcccaatgatctaatgcatgaaaacaaaaattacagaaattaanatctcaagttgcttacagagcaacttaccaagtgtttctggtgaaatctcaagttgcttagagagcaacttgttctatgccaatanagtgtcatgtgatgatagctctaacaaagctttcttcgtgggtngatggggtctgtctcgtacaat

SEQ ID NO: 258883 - DNA, 115 bp, Glycine max
agcttagatgtctatgaagaaatgctctttatatatgtaataatactcctgcttagatgatatcttataccggatgcttaaaactctacggctaacatgtgcttttggtacttta

SEQ ID NO: 258884 - DNA, 504 bp, Glycine max
  unsure (1)..(504): unsure at all n locations
nnatggaccactacgatctgacactcccggcgcatgcattttctgttgcgttgagtgcactatacgatatngcacatagatatcagcgcagcgatgcggnttacatcggccgcctcataatagatgtaaatcgaagcatcgctcgaacatgccttcataaagcggtgcatggatataggcagctggcgactacatgcgtgatcacagtaaataatcacacaatcagtgaacgcacgtgggttaggtagacggactcttagacagagatgcggctgcggctctttagaaatgcttccgtgacttacgactagaggatatcatggggatattctgatgaacactcgacaacatgtgataataccgaccctctcgagtacgagcatgaagcgttaacagcagttattttcaccaaggggggaaacatgtatagagtatagagaggataatgagtatggcccataaccggtgtgactcagcatactacaagatggcagtataggatct

SEQ ID NO: 258885 - DNA, 413 bp, Glycine max
  unsure (1)..(413): unsure at all n locations
aagcttgacataatctggttgtaaactatcaatatattattatagtcaaggcaaacgagtaaataatatatttaattttatcaaaaaaacttgtttaaatattatttttttgcacaagaattatatttttttatataaattattggacgagtacttgtagggaattgatatacccaatccccaacaggagagattgaaaaaaaaaattcacatccatcataaataaggaaaaagaacagttttgggagaaaaatgaagatgaaaaacacaaaaagacgagagaatataatttgtgggtgggtgtggagggagcttgcccaccctantttttatatcttcttttattaatattggtctggttatttaaaactagaatattttcatcttaaaaaatattccatcactataatttt

SEQ ID NO: 258886 - DNA, 237 bp, Glycine max
  unsure (1)..(237): unsure at all n locations
gcttattgggaaaaaccccaatcccacatcatcttaagataangcctagatagaatatataaaagggaggccaccctcattctatgagttaagttttatggttgagttagactcaaacccacattctaagaggatttaagaatcgtatggatgtactttcctctttctattctatcctaatttgtctacttctagcagacttccaccaaagatcctttggcatgtaatgtgtctcat

SEQ ID NO: 258887 - DNA, 358 bp, Glycine max
agctgggagaggatgcttcaatgcatgtaaagaatgagagagagaacgagaaaggggggagcacctccttgagaaacttctttgaagctttcttgagaaaactttcttgagaagcttctttgagaaaacttccttgagaagctagagcttagctacacatacccctctcataactaagctcacctccttgagaagcttccttaagaagatctctaaagaagctatagcttagctacacacacctctctaatagctaagttcacctccttgagatgagaagctagagctaggctacacaccccctataatagctaagctcacccccatgacaaaaaatagttcttactacatagacttc

SEQ ID NO: 258888 - DNA, 485 bp, Glycine max
  unsure (1)..(485): unsure at all n locations
actcagcttggttgaagtacttacccgctgaagactgaagaaaacgatgattgtatgatgaatctttgaagaacgggcgagaatcttcgcgtaattactcacggaaacgttacggaagcgcctcggcttggattttcttcacggaaataattttcctcagcaaattcgaaagagagagaagtgcctaaagggctgaacccttttcttcttcacttcttcccctatttatagcaaaataggggagaagcttgccgcccagctcgcccaggcgagcaaggttgcttcctccaaaagcaacagccttctggttgcctattgcacccccctttntactaaatgcacccncttntctattntttttgtaattctttttccgtaacgttacgaaactttacgaatntcgtaatgatacttattntccttcccgtagggtatgaatccttacggattatgtatttactcttttatacctttcgaagaagtac

SEQ ID NO: 258889 - DNA, 451 bp, Glycine max
  unsure (1)..(451): unsure at all n locations
atatatatatggaaaaaatgtatttnttttacatctctttgaaagagagtgtggtggctcacatgtcttatttcttactatttntatggaaaaaacgtattttttttgtagattaacttagttctaaatttttcatcgcataaatgttgaggtgagacctggcatcctatttgaatggaaatgcacgctttaattttttagctagtagttttttaaaataatgactatggcagattcagtttaatttataaacaaaaataaaaataaaaatggaacaatgtaagcattgaaaaaaattaaccgcatatattctattctatttaataatcaactaatacaaaaaaatgtaaatattntatgctacaaaagcgtagtggttgaacaaaaaacaagtttttcatctcttaattaattntaaattctgcttaagtcttactattatcttctttta

SEQ ID NO: 258890 - DNA, 437 bp, Glycine max
tagcttgatatcaaatgaatcatgactttcttgatcaaactttaaatgatgcttatttctaaaaaaatagggtcaaactttctaattctttctcccatacttcacttcatgtcgatattcatttaaaaataaacatgtaaaaatcatcatttctaatattaacatgtggttgacattattaaattaaccgatgcattggttacttctgttattgagaaactgcatgccatcctataattgaattggatgatagaagaaaattgacgcacatttattataacgttacaaattctagaggactctccctccactccaatgtcatattccaattttatgaaaatatgccaaatgtacctttattttaatactaccaggttaacactactattgaattgatgttacccactaaactaatgataccaaatattttaaaagaa

SEQ ID NO: 258891 - DNA, 404 bp, Glycine max
agcttcaacattcaatatcgagcgttttgatatattacgggactgaatcagacatccgagtgaaaagttactgtagtttgaagttgctcagagctaatgcattcaagtccgagcgtctcgatatactacgagactcaatcagacatcctagtaaaaagttattgtcgtttgaattagctcaaagcttctgtattcagcttcgagcctctcgatatattacaggactccatcagacacccgagtaaaaaagttattgtcgtttgaattttctcagagcttcaacattcaatttcaagcgttccgatattttacaggactcaatcggatagccgagcaaaagatattggtgttgaattgctcagagcttcggtattcaattccgagtgtctcgatatatgacggga

SEQ ID NO: 258892 - DNA, 334 bp, Glycine max
attaggaccttagaatctcagctttatataactgaacctttatcattagcaagtgattttatccacaacagtagagggcatcgcttttatcttagggagagtgattctcgcaagttcttgagtaattcaagagcaccttcgccgtggtcaaaggactctcacaacctttgtgtgttgccctcgccggaaagagggatattttcctttctttcatcttcaacctttgtcgttaaaaccacaattccagaaatcctctcctgcccacaattatcttgatgaggacatgttcaagagcaagggcatggatccacttgaaggacttggaggacctatg

SEQ ID NO: 258893 - DNA, 445 bp, Glycine max
agctttgaattctcatagtagtttcgtttcaaacttcagaggttctaaaatctagtcgtatcatatatttctcgtcaagacaaataaattatctatgattctgaaatgtatgcagcataaggttgtgatctaggtgtccatgaatgaccacaaattaatgatctagattgcggttggactttcacgttagaaaagtcactttaaattcaaagaaaatatcagcttattatccttaggactgatttaccaatctttaggactaatttattataacagaatagaaaataagatatttacctaattttataatattatctaattatagttgcatgataaatttattaatttcgtataattagctcacaaatcgtcttacagttgttttaaattgataataagatattgtattttaccataacaatatataatcattaaactcaattaa

SEQ ID NO: 258894 - DNA, 482 bp, Glycine max
  unsure (1)..(482): unsure at all n locations
taggacctatgatactcagcttaacatcagaccacgaccagggtgctggaactacttcacatggtcttgatggggcctatgcaagttgaaagccttggaggaaagaggtatgcttatgttgttgaggatgatttctccagatttacctgagtcaactttatcagagaaaaatcagacacctttgaagtattcaaggagttgagcctaagacttcaaagagaaaaagactgtgccatcaagagaatcaggagtgaccatggcagagagtttgaaaacagcaggttcactgaattctgcacttctgaaggcatcactcatgagttctctgcagccattacaccacaacaaaatggcatagttgaaaggaaaaacaggactntacaagaggctgctagggtcatgcttcatagccaaagaacttcctataatctctgggctgaagccatgaacacagcatgctacattcacaacagagtcacact

SEQ ID NO: 258895 - DNA, 335 bp, Glycine max
  unsure (1)..(335): unsure at all n locations
agcttctaaactntatacaagaatgaagctctgataccacttgttggacaagtggcctcagatatcttaagaagggggggggggtgaattaagatatcacaacttatttcgccaattacaaattctatttatctttctatttcagctataaattcccttaataatgagtttcttagatattgattccaatagaacagattgaatatgaatataaaacactaataaataacagagtttaagggaagagaaaatgaacactcagatttatactggttcggccacacccttgtgcctacgtccaggccccaagctacccgctagagaggtccactatc

SEQ ID NO: 258896 - DNA, 599 bp, Glycine max
  unsure (1)..(599): unsure at all n locations
tttgccgcatctctntcatatgattntngtgtcaatctattattntttgatatttaaatnnaantnnnnnnnnaaccacgagattgatttcgatcgcgctgccgcgacccttagagcacanccgcaggcctgcaagcttcnagaatcacgcgtatagcgcttatcatatctatattattcgagagcgggtcaagatcaagacggctatgggaacgattaggagccttcattccttcacacaaaataagacccagagattcactcaactattgcatacattacagaatcacctgaagcatacaaatgagatatatagaccacactagcctcaccaatccctatccgagagatccgacaaaacatggaatacaacaaatgggtggtcttatgcaacctccagacttggccagtcccttcataaaacagcataactatccctattaggagagcaactttgataatcaatctctaggaagatttgcaatgccagaacgaccgacacctttgacaaagagcattcatcagctagatcattgctcgaaccacagacctcacttaccaaccacaagagctcgccacaaaagctcgtgcgtaaatcg

SEQ ID NO: 258897 - DNA, 405 bp, Glycine max
  unsure (1)..(405): unsure at all n locations
agcttgagtctttgactaaactggcctgattagttataaattntaatggcgacactgacttttccctttaagggtagaactgtgtacatttaatctaatcttttccatactttgcaacagtctaatttctgtacattaatcatagatgtaaggcttgaggggagagtaatgttgcaatatggattttgtttcattcctttctttactatctaagcattgcaagatcatcttttttataatatatatgagtagcctttcgcgatatcatttctatttttcttttaagaaattgtttgatttacaaaaccttatgaaaagaatatatcttgccaactaaattaatgatactttctaaataatgaccggtggacgagagaaagcttattatatcttttattttaataa

SEQ ID NO: 258898 - DNA, 501 bp, Glycine max
  unsure (1)..(501): unsure at all n locations
tcagaganaacagttacatggtaattcttactttcataaccgttatctccaattcatccgtgtgtgaatcaaattatgatgcaagacaggtgcataaatgggaccctcctaagccagtgttgcaagtaaaccaagcaaaaaaacaacagaaaagctcaagtactaaaaggcaagacatagagcttataacaagaccttattcagataacctttttctcttccctcatagattcttaggttgctttcaaatattataatattaacaaggacatgcaatattgcaaccctagactattcatattcaatatttccctctccccaagccactcttttctcattatataaagcttcttccaccaaacctgtntcacactctcatctcatcatcatatatctcccaacaaagctaatntntntctttcttgctattgatcaacatggaggaatcacagtactggctgtggatcaagaganaacaaatggtgaagtcacatattcagc

SEQ ID NO: 258899 - DNA, 322 bp, Glycine max
  unsure (1)..(322): unsure at all n locations
agcnttgcacgataaaaaaaattacatataaatattactgattgcaagaatattaattacgcgtaaaactgaagttctaccatataacagctccaatgcatgcatgtatttgtagtagaagtagttcaattctgactttggtggatcatacaaattacctaagtcttgggaatgttactactatatacgaataaaatcgaatggaggtttaatgatacctaggctacattacagaggtaggttgacaaatctgcgatgcgtaaacacgtactcacaaatgatgatggtctcttcttattcccacccaaaagagattattttt

SEQ ID NO: 258900 - DNA, 384 bp, Glycine max
  unsure (1)..(384): unsure at all n locations
taagcttgagttggccacgcgacatcacagntcatccaatattgatcagtatatgctgtgcatgtcatctgattntgatcgcatgtagctgtatatagactattcatggacttgctagtagctactaatataaaaaatgaaagtgccatgttgatagaagtgtacatcagattaaaattaacaataaaactcttagatgcaaaccagtgcttgatattctacattcagaacataccaactcgctatcctattggatgtttttcgaaagtaaaagcactactgaaacaacgaacatagactacagttatgcctgaaattattacagctgggtcacactagctatggtgaaccctttcaanagcttaaaggatgcaatgctataca

SEQ ID NO: 258901 - DNA, 142 bp, Glycine max
agactctcacggagcttgaaaaattttcaaaaaccacctcccagtttgttcacgaagtttctcaaatttaagtccaagtttactttggaatgatactgttctgtacataccgggtaagtgattcaaacttactgattgcttg

SEQ ID NO: 258902 - DNA, 256 bp, Glycine max
  unsure (1)..(256): unsure at all n locations
tggagaatgagggagaagaatggcatctttagggagaaggagagagaaagcttctgcaatgtttactgctgagtgaagagagagagagttgctttttggtttttaaaaggctttttcctcttttcttattattttattcaagctctgccacatgtccctatgtgattggagcanaaagggcccactttctctttttgactgtgacccatactcagtcacaaaagtgagaaaaatctgacctttgaaacgctaaaat

SEQ ID NO: 258903 - DNA, 446 bp, Glycine max
agcttatcaaacatttctataacgtgttttgcgttttttgcgcatggaatttcctgggagagacttggggggcagttgtgatggttttctgtgtgtttctccacatagttttgtggattcctacatgggattttactttttgtggttttctgtgtgtatttcttcttcttcctagaaaatcttttcatacacggtagagtaaggttatagtcattgtggaaaattgtaaattaagaattcttggctctggtagtatcattcagattggagaataatgaccggaataagatagctctaggaagtacggaaacgtagcttcttacaaatctcctgtggattgataattctttagtaaactcaggtccttatcgaataccattaatctctttccctttctcacacaaaccaaggagagaggttgaaaatggcatcatggctgatcgtta

SEQ ID NO: 258904 - DNA, 371 bp, Glycine max
  unsure (1)..(371): unsure at all n locations
tgtatgcagagaactcactattcgagatgcgagaaggttccaccttttaacatggacatctccgcaggatattgtgaactgactaggacttctgctctaattctatattcccttgtatttgattggtagctaatgaaattattgtaactgacatgcctgcaatttgtgtgagcaaacatttatacttcagaagtagttaagctcaacttacatgatacacatcttccttatatgttgctgtcaatatagtgtgcttagtttttacagtatgtaccatgtgcaaatacaatgagttctgccagtaaaactncagcctagaggtactttattgcaactatactctgtctaaactgactatattgtagtcataa

SEQ ID NO: 258905 - DNA, 424 bp, Glycine max
  unsure (1)..(424): unsure at all n locations
agctntgcttctacaaactcattcgactaagagctcgtggaagatgcccaaagacaattgtgttagtagggtacatatgatagtagtcgctcatgcagactccataggattccttttgaatccaaatatagtatttgttatataaattcttgagggattaacccatgaaatcaagtttcagcgggattgacagatcgatgacatcgctctatgatcttaaatcgggaaagtttaactttgtcatataccaaagtgtaacaatccattgccatccttcaatggttcacgcggtcggtcccaaatccttacatttccttgttgtgcagaataatcgaagtttttttttttaaaaaaagaagaggacaaaccctatgactaatattccagttgattgattaaatgtcanatggctccactttcgtca

SEQ ID NO: 258906 - DNA, 402 bp, Glycine max
tgaccggatgtaagatacatcttcttcaaccttagtcattcttgactccatttcattgaagcgcatatccacttgcagttccaaagtatcaaacctctcaccaacaaaggtttgaagaccattaaacctttccaaaatcttcgaaagaagagatgaatcttctccctcatgtccttcttcaccaatatttctagcacccttctttacccatgatccatcatgctccttaatataaccaaaggatgctatgactgaagcgcctataaggaatgatctcttgattggaacataagggtcagaatcaagagggatgttgaaatgttgaaggaagagggtaacaaggtggcgataatgcaatggagcattcaatcgcaatgccttatgcatgcgatatctaacaag

SEQ ID NO: 258907 - DNA, 264 bp, Glycine max
aatatgagacagagcttgcagctagcgagcaagagtacattaatacaaaaatttaagctagaggtgtctagctaagaaacatcatgctttgtgaaagagataattttcaacttttctttgaaagatcgttactgatcttaaccagttttttgaaaaaaaaaatgtgggtacatacttgaagggtgaatgctgagaaaagttttttcaccaccccagatagactcagatgaatgcacaaattgatagatgaacatattttggaaa

SEQ ID NO: 258908 - DNA, 472 bp, Glycine max
  unsure (1)..(472): unsure at all n locations
cccatcacatgtggtactaagtggcggtcgggcgatggtgcacaacaagttttccacatccacaatgcgcgcataaacccaccatcccctgttgcccacctccatctaagctcacgtactcccatgtagcccatatcctcatttctctcaacaccgggtccccatcaatcctctcaagcttccacaacatccaagcaaaacaacattcaaactgcacaagctatcacagccaagcaaaacagagcataggcagaaaactttgccaaaacaccaaccaaatcacagcttttctcacttaaagaccccagtaacaattccttcgttctggttcattaaccagtggatcgactcgaannatttactggaagtctctaatacttaagcctacattttgaccggtgggatctactagcaagcatccagaactcattctgcattactctntccacagccaaccacacacaagcacttt

SEQ ID NO: 258909 - DNA, 329 bp, Glycine max
  unsure (1)..(329): unsure at all n locations
tgcaagcttttgcaagctggaatcattcatcctatctctgagcgtcaatgggtgagtcccgactaagtagtcccgaacaagactcgcctcacagtgatcagaaatgatatggaggagctgattcctactctggtgcagaatagttggacagtctgcattgactataggaggctgcacctggttaccaaaaaggaccattgtcccctgcctttctttgaccagatcgcttgaacgcttggcaggtaaatcctactactgttaccttgatggtctctctggatatatgcaaattactatcgctcctgaggatcagganaagaccacattca

SEQ ID NO: 258910 - DNA, 448 bp, Glycine max
  unsure (1)..(448): unsure at all n locations
taatttcaataatgtcaaaagttctcacaattaagagtttctgagtatttatagaactaggcttaagaagataactaagtctctaataagccctatttacatcaagctccagcccattacacaaataaataaaaattagaaattntttgtaatttacgttgaaggtttgcgctaatcctgacaactcgtgctaagcccaatttctcctcggtttggaattgggctaagccatacactcactctaagccagacagctcacgctaagcccaagtgtgcttgttgacgatctttaacgtgctccaattcagttccttatgattntctncttccttgcctttggtgagtaatccatcgntgatcctcttggtcatctcttcttgtggaagcttggctctagaccttgtcattggccctttcaactcatgaagtagttctaggccttatgctc

SEQ ID NO: 258911 - DNA, 428 bp, Glycine max
  unsure (1)..(428): unsure at all n locations
gtggactgttctgttcttgtgtttacgcctgagttcgtgcttgagcgttgtgttctggaacacaaactccaataaaaatttctgggcctacgtgnntgtttctctttatacagtttggccacccaaatcgttctcaggagccatgcttgtgatagcgcaatgaccccccttctgatatcacggtcttattcctccaccaacgcaatccaataacaccttctgttgtagttccttgtactcaattagctaaagccccgaactgcccgtaatttgcctgacctgacccaattggtgggagctccaccanngagatctaggacatccttcggcgacggcccacttctgtctttaagctcgctctaagcatccctgtttgaatactatccgagtctcttttggtgcgggcacccctctctttcccggattcg

SEQ ID NO: 258912 - DNA, 382 bp, Glycine max
ttgctatgtaaacacaacttagatcaactacaaatgctaactagttatgtgctaaaaaaacaaactcttctcaaccttgccttttgtaatggaataaaacaaattaaaatctgcaatggtaaagaaaaagttaccttcaatactataatagaagaaaggaggtcatcatggtaattgcggtaaagtaatggtgtttctactcttatttcttagcataggaagccattccattcatgagaccatttgtgtatttcgagtaatatcttcaaattcagaaaaaaaattaactaaacattctcaagacttactcaccaaattaatatcattgttccgccatatgaagccatgctatttcatgaaatatgaaaatatttttaccttg

SEQ ID NO: 258913 - DNA, 422 bp, Glycine max
  unsure (1)..(422): unsure at all n locations
ctgcaagcttgctgatttagttntcgccgatgaaaggatcgaagtgggtctaaaaagacgcaaatctgatcatcatgctttgataaatacaaaaaaactagggcaaatgaagatggtgagaataagggagaaacccatgttgtgactgccattcctatacagccaagtttcccaccaacccaacaatgtcattactcagccaataacaaaccttctccttacccaccacccagttatccataaaggccatccctaaatcaaccacaaagcctgtctaccgcacttccaatgacgaacaccacctttagcacaaaccaaaacaccaaccaagaaatgaattttgcagcgaaaaagctgtagaattcaccgcaattccggtgtcctatgctgacttgctcccatatctacttgataattcaatg

SEQ ID NO: 258914 - DNA, 491 bp, Glycine max
  unsure (1)..(491): unsure at all n locations
ctaagcttgactaccctacaatacaatttcaaagaaatggaataagagaataacaaaacatagaacattatacaacgtctaaatgtaaggaaatggagaaactacgatcaaaaaggagtgaggaaggagaaacaaactcaatgtttggaggcacagttagtagtgaatggattcacagagtntatgatcaatttanaggagaaaataatgagagaagtgaattaaaaacagtgacaaggagagtgaatctaactaaaatattacataagaataacacttcttaattaaaantgagtcgaccttccaccacaacgggttaattgatgttatttcatatgagttattgatcctttcttcctaagtagtgcgtggggaccattactctcaacgaagatatctctttataataatattcgagaataatctttacttacaatatgtatgtcagaactttattacatgatgaaattaggagtggtatttattacaca

SEQ ID NO: 258915 - DNA, 483 bp, Glycine max
  unsure (1)..(483): unsure at all n locations
cggtgaacatgatgacccatctgacccggatcttanatcacctgcggcatgccagcttgcagcggcagagagatagaagaaggttattgttaacaatggcgaaagcaccaccggcgttccgttaatagaacactagagaagagaggtctgtcgtgtgggggggtttaaccgttaagaaatgaatgaatttttctgagtggattgggaaggaaaataccacaaaggggtaagccccgtcccatggaaccaccattatacctacctgtcttagtaatactaacgtttacctctctggccagtacagtgactaagtcccactacttttatttttttagaataaaaagaacagatgattggaattaaactcttattaatatgagaagttttgggaccttatcttgattacaagaggtatatttttattattatctctctattatatttctatttatcccgcagagagaatttatcctgctccccacc

SEQ ID NO: 258916 - DNA, 447 bp, Glycine max
  unsure (1)..(447): unsure at all n locations
tcagtcttggaccagcaatgttctggaatngattcttatctcatagttntagagtctgccaaagagaaaagagatgtccaaagaaggtcaatttgtgccagacattcatgacgtcatctttgtgaccatatcaaagagttgtttgtgttgtcactaggtactggtctcatgtactaatactttgtctggtgattgcttgcagcaaatataatattgctgatggtatgcggcaaatgtttgatccttatgaaagggttgcaagagctaatcatgtntgcccttgctgtgagcgtcctttttctccagaagaagaagacagttctgtcaaacaggttggtacatttcacatcatattataatatactgatattatctattggttctgagcaagcactctatatccttttgaattgttttttttttctgttctaatgacagcatagagtg

SEQ ID NO: 258917 - DNA, 452 bp, Glycine max
  unsure (1)..(452): unsure at all n locations
tgcaagcttgatgccattntgttagaaaaagagaagaataatgagaaaaaggagattctcttcatttggcacacttggtatatggtttggtggtctatttatagtagagcaacccatatccattacataactcttacattagcacacttaaagagcacaatgagaatagccattctaattcttaatgtttacataagaataatatcccttaatacttattaacccatacccattcatcttctaatagtaactcatgacttttcattntctaattattattatttctaatatatctcactcaaatagctataatagtatgggtggatggatttattctatttttggatcctctttcttcgggtggttatttgtcatatagtagcaattaagggcttgaagtgagtctacacctagcttaagatcaactntataagaaatcannagtttttcat

SEQ ID NO: 258918 - DNA, 456 bp, Glycine max
  unsure (1)..(456): unsure at all n locations
agcttggaaagggaggctttggttatggctcctattnntcactgtcaatgatggacagacactaccatagtggaatgtcagttgaagaagcagttgatctcgttgataagtgcattatggagatcagatccaggctcgttgttgcaccaccgaactttgttattaaaattgtggacaaggatggtgcaagagagtacgcatggcgtgaatctgtccaggatgttcctgttccttcagcttgagtaactctgttcctaattttcattggacttatttcttttcgatttgccctgcttttatcttgctacaatttttttactggtcttgtaatgtctctgaaaatcatggtctatagatgctctaaaggaagacagtttatcatttgaattaaatatgcacgatggctagttctattcataaatgaatgtatgacattgtgtgaagtacgcttgactt

SEQ ID NO: 258919 - DNA, 61 bp, Glycine max
tccccccttgtatcacatttggtttttctttacaaacggcaacagtgttatcccaacaaaa

SEQ ID NO: 258920 - DNA, 431 bp, Glycine max
  unsure (1)..(431): unsure at all n locations
gacattggcaaactgtatgtggtattagtttttttttttcttttctgtaaatttaagtaataattatgtgaatgatttagtttcatgttgcatttctaagtactaatatcctcaactgtaaggtattaatcatttaatatgttactaaaagtagtgaaagtggtatacaaggattagatgtttgtatactggcttcatataattcagaaaacactagttttctagaagcttcttgttattaaagttacaagagtgatcctttttcttatatcactaagcatgcaagctctctttctgtcatttggattcatttcatcaagatgtgaattcttaccacttcataactgttcttttgtcatttctcttatgctgcctcacttggttaatgacttaacgagttaatgttgtttttcaagacaaaaattattgcn

SEQ ID NO: 258921 - DNA, 424 bp, Glycine max
  unsure (1)..(424): unsure at all n locations
ggcagcaagcttgaggacctactcttgctgcctgagtcagtacataagagagttgtgttgatcccttatgacagaacccatacacggcagcatcagacaggatattgtatgctgaggacaatcctacctgtgtggttgcccttggaagagtatattaggggtcgaccaccatgctcaacatccttttcagcaatgatcaggtgaaggtgggtgttgatgaagtacaagatattgatgcttgcatccttctacccactgaagagatttagatagtggggaagacccttaacaccctacttgcttgtgtgccacatcttgtacaatacttttcagaaaaggtgtttactatatgtggcgtncattattattaaacaatgaattgtacaaatgaagtattgactttcattggcttatgttcattaac

SEQ ID NO: 258922 - DNA, 466 bp, Glycine max
  unsure (1)..(466): unsure at all n locations
ntaaggctaagtcttcatgtatctacactatctctaacaccatctatgacggctcattgaaggtcacaacacgcctggatgacggagcatacagactactagaactggactggtaagcaattgcaagaacatagaacgccacccacctgaagttctctttagatgacctacatgcaaacccaatcatgtactctctcttctactcaagtcttttgatccaaatatacaanaactatggttttgcagacgtttaacacgcacacttgaataacaagggaattgactcatcaatcattgatagaatctcacccttctttacatatttttcaacagagctcatatagagtcaagtctaaaccatggcacctagaagctcttcacatagctatgaccgcacacacattcatgtccgacagcatgatccatctcctccagaggcagtgcaaccacctaacagcgcatctag

SEQ ID NO: 258923 - DNA, 249 bp, Glycine max
taatgcaattcccgttcatcgcctatttccagtcactacacgacttgaataatgctaatccacgtgcatagcatacatcacacgatgaccgagttgaataatgaactcttgagcattgcatcttggagtgatacacgacttgcataatgctattcccgagcatccgtatatgcctaatactgaattgaacatgctattccgtgcatcgcctatttaagctatacacgacgtgcatatgctattccgtgt

SEQ ID NO: 258924 - DNA, 440 bp, Glycine max
  unsure (1)..(440): unsure at all n locations
agcttgacaaagaaatagaaactgtctaagctagatttccatctatgcaagaattgcactgcgcattgagtcacaatgtaatttgtttgtgtaagtagactttgtacaaggttcactctgagtacacatatctgaaggagggttagcacactaatctagaagattatgataagatttaccagctttagtgaaagtagtttttaccatttttggcaaaattctactttatccttttatagtttgttttggaaaattgcaagaagccatacaaggcatggctgagctcatggagagcacctcaagggctgtccaaaatgccaattagtcatattaatggccattcaaagtgcttaaattaagaagataaagattangccttgcaatcccattgatccaagcatttcacctacaataagtgttgntnttaaaagataaagtct

SEQ ID NO: 258925 - DNA, 212 bp, Glycine max
  unsure (1)..(212): unsure at all n locations
gagtcttctctgtggctatcttactggtttagccccatcctctaaatntatccgatgcatacatgtggatgggctaataccangaatgtctgctagggtccagcctatagccttcttatgcttcttgagaactgataacaacttctcctcttgctcatcagcaagggaggcaaatataattactggaaaacttttgctatcatccaagtaag

SEQ ID NO: 258926 - DNA, 450 bp, Glycine max
  unsure (1)..(450): unsure at all n locations
agcttagctgctgcactaagcttaatctgcagaaaaaatactttctgtgtcttcaggctaagcgccagtccgctgcgcttagcgcctgagtaaaatttcacaaggcgtgctaagctcagcctgctgcgctaagcgcccagtcaaattttcaattttatttttatgtttttgttgaaaataacctgtgctaatctcttgtgttttgtcttatattttgcaaatggcatctaagaaaaggaaggctccttctacacctacccaggccagatatgacagatccaggttcatatctcaagaagcttgggagagatatacagatattgtggtgcctaagaaactactatcggagaggaatgtagtagtttacttcactgagtttgacgagttcaaggaggaactcgagagaagacactatgatgagaagttaactgattntgtacacaaaaatat

SEQ ID NO: 258927 - DNA, 550 bp, Glycine max
  unsure (1)..(550): unsure at all n locations
cgacggggtntttgtacccatctttngtgacctatgatactcagcttacatctcgtattcgcgtcattctgatcttagtatanagggtaccgatctacaatgtataaatgaggattcatgtcatgagtaatgtttgtaagagttcagtgtaatgatgaacaccacaaagggtaagtgaacaaatcttgtgcaactatgatcaaataatggtccatccgttatactagcatatctagacctatnntgtttgtgatataccagttactgaccatgagattctagttntggacctatggttntcanggtgaagtaagcatgtagctgtgtcaatatatgctgaanagaacttcactggatctttcccgatttccttantnnatattgtngtggaattctttgatgcattatgcaagtatcctgtcccaatatanatcatatttctgtcatatgctggcggcgagggagtcctatcnatgtatgatatataatcttttcanctgcactagatgatcattatgtattactntaagatgcctctgttggttgagtg

SEQ ID NO: 258928 - DNA, 443 bp, Glycine max
agcttagcagcagtcccaaaacccaattttattcgcaaccaagtgtcatgatttctatattaccaattttgctagctgttaatgttgaatcatagttttgctctcttatctggcattcgtctcatattgtaaacctattccacgtggtccagatttaaaacatacttctcttactttatttcaaaatcattcttctctttaccttacaactcactcaattatatcattaccctttttcatatgcagaataccaacatgcaaacatatctaatccagcaaatggcaccatcaataggcaagctatgatccagaaccaacaagatgccttatctcccatttctttcatcttctaaatttattgtaccttctgcagatttaaaacaagcatttggttcttgatttcaacatgaatctactgtttagtttataattcactcaattct

SEQ ID NO: 258929 - DNA, 311 bp, Glycine max
  unsure (1)..(311): unsure at all n locations
tctctaccattctgaccgagtgaattgngcttcaacgtagttctttacagaacctatggcaagctgtgtttggaggccttgttggtaacattgacggacaattcttgaaaggattctatggtaatattggttggtctgacaacctgcatacagagatatacgcattaagacaagggttggaaatatgtntggatctgggtataagggagataacgtgcgaaacagactctcttcacacccttcagttggtgaataatgtcatcgacccccacccacaacacgtatatgcttctcttgagttagtactatta

SEQ ID NO: 258930 - DNA, 445 bp, Glycine max
  unsure (1)..(445): unsure at all n locations
agcttatgctgcanacatttataatagacctccacagcagcaaaaccaacaacagcaaaatacttatgacctttcaagcaacagatacaatccaggttggaggaatcatccaaatctgagatggacaagccctccacaacaataacagcatgtccctccttttcagaatgttgctggtccaagcaagccatatgttcctcctccaatgcagcaacaacaacaacaacaacaacaacagtcacaacaaagacaacaagcaactgaggctcctcctcaaccttccttagaagagttagtgaggcaaatgaccatccagaatatgcaatttcagcaagagacaagagcctccattcagagtttgacaaatcagatggggctgatggctactcagatgaaccaagctcagtcctaaaattctaacaaatttccttcacaaactgtgcgg

SEQ ID NO: 258931 - DNA, 243 bp, Glycine max
  unsure (1)..(243): unsure at all n locations
tctttaatggagaggggtaccactactggagaacccgaatgcaaatttttatcgaggcaatagatctaaatatctgggaagccatagaaatagggccttatatacccaccacagtagaaagagtttcaatagatggtggttcatcaagtgaaagcattaccatagaaaaacctanagatagatggtctgaagaggatagaaaaccagtacaatacaacttataagccaaaaacataataacat

SEQ ID NO: 258932 - DNA, 443 bp, Glycine max
  unsure (1)..(443): unsure at all n locations
agcttgatcattntctaactggttaaactatattttgnggtcttcaaatttttcaactcttattatttgggtcttttaaattttcaaagattaattttccttcctaaatatttgttacgtctaatattttcgtcatttatgtctaaaatcaccgttaattatctacgtaacattaattgtattattgtattttatgacggctaaaattctgtcagaaattgcttagtaatagattcttcttcttctctttctcttactcgacaccagccaccgccgacgacaccatccccaaaccagggagagcgagaaaggagacagagggagagtgcgggttgtcgttggtcttctccgtctcgatccagatgccgacagtggcggtgcgggctggtgttggtattgacggcgacagcggtgtcgggcattgcagatctgaaactagatct

SEQ ID NO: 258933 - DNA, 447 bp, Glycine max
  unsure (1)..(447): unsure at all n locations
agcttaaatgaaaaaacacgatatagaaatgttcctttgtcacaaatttcaaacaattgatagagaatttgcattgcgttgcaaagacaagccatgcccctttttctcttgtatctccccttccctactattatacaccatgacattgctttagaagctaaactacgcacaaaggaagcaaggttgaaataaattaggttgtcttcaactgcaagcatatatttccttgtacatttccctaacataaaaaaagtaagtctcaaatctttgctcttattttcttcaaaaagaaatnttaagagatagaattttgtcacgaatttaattttaatatattgctaatgcaaaaaaattatattgtcaattaattaacaaccacttatatgtaaacaatcttcaattatatgttagttcatgagttgataataacaattggtaaattctgtg

SEQ ID NO: 258934 - DNA, 274 bp, Glycine max
  unsure (1)..(274): unsure at all n locations
tctctcatttcaacttttatttcgaaacttanattgattctcaacaacttttcttttaattaanaatttcaaacttcaccatcattagaaaactttcattnttctcttttgctacataccatcacttgctcgtcttctgaccttcccttctaaggaacaaatattgtcttttttttatgtttgcatgatgaactatntcttcttgcacaccttacaaccttacttggaactaacanactngtaacattctccccaccacagatgttatatttgt

SEQ ID NO: 258935 - DNA, 577 bp, Glycine max
  unsure (1)..(577): unsure at all n locations
catattcggtcactcagtgtttactcttctctattctctctttcctttttcctcattgcnannnnacgaccggtgantcgtttcgatatcgtacncggngcacctntacagtntacctgcacgcatgcaagctcgctcaacatgctatgttaggatgagattcacattcccgggccatccaagggtctcaatgatgatgcttgtgacgttcatgtgctgaaatagcttatggactactgatacaaatgaacggcataaataacctatggttatagagtgacaaagcggtgtttagtatgcgaaaataaagaagtttttacggctgtgaggacgaatatataattggcagaatttgcatagttaaaagagaataaattctatcttgatatgcacattaagacttatgacaacgactacaccgtgcttaggcgaaggacaactgaacatggtgcacctggagccttctctttggcaaaagtggttgtcgaatagaacaatattgatacagtggatgtgaggcgtacatcagattgaccacgacaattggtgtgtacacttggcggaggtcagcttctcn

SEQ ID NO: 258936 - DNA, 444 bp, Glycine max
  unsure (1)..(444): unsure at all n locations
gccttgttccacttatacatttatcgtctgcctacaaaaatcaatattcattctanaatgacaatagaccctactactcttaagtattcaatattcattctaaaattgaaaattcaatattcagtattcatacctttctgctctaacaaatntgttgttcatttgatagcaatcaccggagaaagaacactatatctgcttgtngatcttaatcatgaatagaaacaagagtatcctcttaaactctcattgctgtacatgaatagtacactttaataccacaacagttcacatacttggtgacataagctgaatagttgtgtattgacttggtngacttgatctttatgcatactatattctcaaggttttgtcaaatggaacatatatgtgtgagatggcatgtaatgctatctntaattagtatatcctctgtatggctgt

SEQ ID NO: 258937 - DNA, 457 bp, Glycine max
  unsure (1)..(457): unsure at all n locations
agcttgtcacgtttcctaactctnttggtatgttgccagtgattccattcccttgcaaagatctaatacaagtataatatgcatcaatttactttcccgtcatcaaaatttgagttagttagaatgcaaaaataatttttagtattatggagttgaccaagattgtgtggattttttgtgatagaaatccttacagagctgtaagatattttagaactcctattattgnggtcaagtatcctgtgaatcccatatatgctagtgatctgcaatgaagcaatttatatattacacagcaagcaggaattcaagatttaaaaatgtgaaatataacactttctacaatgagtaatgacagccaacatcttcagcatatcaaatagattagagaacaacaacattgaatattaaaatatcttacacttgcatgacattgttgtttgagtcacagtaaaca

SEQ ID NO: 258938 - DNA, 284 bp, Glycine max
ctgacttgtattggtactgcatggctttaacagataaagtagtgcattatggatgtctatggaaaatggtagcacgaaccatattatcagaatacaaagcatagaaagagatgaggaagctttgaaatatcgtcatgcaaaatgaaccaatatgcttcaagccgtcccatatgatggaaattcaaatagtgtatgtatacatggtggagaacataaactttttgatagatatccagaacagagaaactattaccttagagctactaactaatctgcacatttta

SEQ ID NO: 258939 - DNA, 426 bp, Glycine max
  unsure (1)..(426): unsure at all n locations
agctntcatatgtgaaatcatgtgcagccatcttcttattatgttctctcacgaggtagaggttgagccatgttctcagtatgaaaattagtagttgaatgctcaaaatcagaatgttcaaaatcaccaacaacaaaatactcaaaatgcacataatgatcaggattcacactatgcctaactaatctatgaaaggttctatctatttcaggatcaaagggttgtaaatcacctggattgcccttagtcatgcactatatgcagcagatcatgtgtttctcaaacaagcaccaggggagggttaaaactacaactatagtcaaatgatatccaaataagccgaaattttgtgagcaacaccctaaaatcatgaaaagatagcacaaaaattttcagagaaaaattcacagtctaactatgaaaact

SEQ ID NO: 258940 - DNA, 73 bp, Glycine max
atcatacgccatagcgtttgtctccacaggagaaaacgagcggtgtcaccaccaacatttatttgatgaaaac

SEQ ID NO: 258941 - DNA, 456 bp, Glycine max
  unsure (1)..(456): unsure at all n locations
agcttcagttacatggtttgcaagttcttggcgtataactgggaccttctccagggcaagttttgagcaggaaacaaaaattctgcataacattgaatactgaaattttcatatctaagcaggagcaattgaaaatatagaaaaatggggaaaatcataaaggaacgactaaattagaattaatattaatacatgtgtgctaagatgtcctcacgattctcaagggattttgccacagttcttgctaatatnagtttcccagagccctgnggaaaaaaatatttaaatgtcaaatgcatagataattcactcgtcagattggcaagcttttatatggtcagatcaacaatatgaaggtagataagaaaaaatcactaatcttaatatgaagagctagattctgagctcanagactagcacggcagccagtaatttgtattgtgtgatgtgatgact

SEQ ID NO: 258942 - DNA, 515 bp, Glycine max
  unsure (1)..(515): unsure at all n locations
cgcgtagccatgtcttcgagccttnanactcaagctaagacttgagtgtntacantantntgaaaaanantacanttcttgatacttgtngtancttttgattntaacaacaagcttcggctactancanntgaaactntggagaanatngaagaacagaanaacaagagaagtcacacccgaattgaaattctctatcccnnatttcctgttcttctcacaaccccaaaaagctattctatggtcggtgaaaactagagaatctctgtgatcgtccaataaacattgacacgtcaatttgaaatcatgtactatttattaacttgcagattntaacgcgttccttttagcctttcttttatcattcacttcccatcagtttaacttatgcgatgtagaactanataaacaggctattacatgaactctatctgtntacaatttatttaccgatccagggtaaccgctttcacctctcatccttatagcaagtacacatgtgatttaattcgagc

SEQ ID NO: 258943 - DNA, 455 bp, Glycine max
agcttgtttgctacatccaagtataaatgatttgatattataagtataaacctattcaaaacttctgttcaaaatattaaaataactttacttgaaattttgaacctctgcacttgtttttaattagctaattccaatcttctggagatatgtattttggtttgtttatatttttctttaagatgagcttcatgtaaatgataaaccttattcttgtattgagattcaatttgctctattacacattgtttgacctaatcagataaactaaaaccatccttatgtcatacgttttcatggaaaagtaaaaatttattactatgaacatacattgtaaaaaaaaattggcaaacataagtaatattcaaatatataaataaatgagatataattcacctaattatatagtaaccttcatatgtcgccacatttgatgtacatcatgctgactaatt

SEQ ID NO: 258944 - DNA, 283 bp, Glycine max
  unsure (1)..(283): unsure at all n locations
aagtaccaagaagagttaggtctagccgcggcccacgagcatagaatcgcggatgagtacgctcaaatatatgcggaanaagaggctagaggaagggtgatcgactctttgcaccaaaaggcatccatgttggatggaccggttgctcttaccttgaacgggagtcaagaacttncccgctttgtagccaaggccaaggcgatggctagacacctactcacccccgaagagattcatgggcttctcggctattgcagcatatgatagacttaatggcccacat

SEQ ID NO: 258945 - DNA, 437 bp, Glycine max
agctctgtgaacctgctatggttggattagtttaacatacccattctattttagggtttttatgatgatgcttgtgatgttcatgtgctgaaattgcttatggaaaactgttataaatgaagggtagaactaacctacggtttgagagtgacaatgtggtgttaggagtggaaaaagagtgaattttttaaggctggaaggccaaatctacaattggtagtatttagaggttagagtgaataaatcttatcttgaaatgccatttatgacttatgagaaagcttggactgtgctatggagaaaaacaaatgaccaaagtgaaccaagagccttttctagggcacaattgggtgttgcagagtcaaattttgattccgtggaattctatgcgtaaatccagattgagcaagtttacattgatgttatatacttgtgtg

SEQ ID NO: 258946 - DNA, 438 bp, Glycine max
  unsure (1)..(438): unsure at all n locations
agcttgcctcaaagaggtccaggaaggacaatgcggccgaaggaactagttccgccccggagtatgacagtcaccgctttaggagcgttgtacaccagcagcgcttcgaagccatcaagggatggtcgtttctccgggagcgacgcgtccagctcagggacgacgagtatactgattttcaggaggaaatagggcgccggcggtgggcaccactgattactcctatggccaagtttgatccagaaatagtccttgaattntatgccaatgcttggccaacagaggagggcgtgcgtgacatgagatcctgtgttaggggtcagtggatcccgttcgatgccgacgctatcagccagctcctgggatatccgatggtgttggaagagggccaggaatgcgagtatggccagaggaggaaccggtctgatgggttcgatg

SEQ ID NO: 258947 - DNA, 314 bp, Glycine max
  unsure (1)..(314): unsure at all n locations
atcgtctccctttccatcattnggggtaccacttgngccgccagatccctccacctcttgggcgtgttctttgaaagatccgtccccctttctgaaaatgttctgtagttgcatcctatccagaaccatatncaaaatgtactaatactggctaacaaaggcaaccattatgtccttccaagaatggactcgggaaggttccaagtagtgtaccaggtaacagctaccccagtaagactntcatggaaggaatgtatcaacaattcctcatcttttgcgtatttcccatcttctgcaatacatcttagatggtc

SEQ ID NO: 258948 - DNA, 152 bp, Glycine max
agcttgctgggtcaaaggatatgaatttgattgttcatatgccacagacgatagacgttggtgtatcatacatcttgccagtcttagttaggggagccatagcccgcctgtggtgaatatcacgtgctataagtaactatggccttgatcat

SEQ ID NO: 258949 - DNA, 146 bp, Glycine max
gccttaactcagctgcacgtgaggcgatagggcatgtttgtcccatagtcctcaagctgccgacgatctgcgttgcacaaagaatctcatcttggcgcctccgaccaatcttctcgagattgtgataatacaatgcacactactcc

SEQ ID NO: 258950 - DNA, 432 bp, Glycine max
  unsure (1)..(432): unsure at all n locations
agctntaaacattcaatttgagcgtctcgatatattacgggactcaatcagacatccgagtaaaaagttattgtcgtttgaattggctcagagcttcaacattcaatttcgagggtctcgatatatgacgggactcaatcagacatccgagtaaaaagttattgtcgtttgaattggctcagagcttcaacattcaatttcgagggtctcgatatattgcgggactcaatcagacatccgagtaaaaagttattgtcgtttgaattggctcagagcttcaacattcaatttcgagcgtctcggtatatgacgggactcaatcagacatccgagtaaaacgttattgtcgtttgaattggctcagagcttcaacattcatattcgagcgtctcgatatattacgggactcaatcagacatccgagtaaaaagt

SEQ ID NO: 258951 - DNA, 396 bp, Glycine max
  unsure (1)..(396): unsure at all n locations
actaagcttttatccaggctcatcttggtgggaagctccttcttccatggcttattccttaatggatggcgcctnctctcacctattntcctttgtcttccgctgcatctccatggtggaaaatcaccattaaaggaccccattgaagctcaaagatccagcctccatcgaagctccacacagcaagcttcatcaagtggtatcagagcacaagagcttcaagtaggtgctccttanacctncattcaatttttttttgccttctcttcattggtgttcttaattttctccagtatcntctacatgtcttgttaaatggtgtaacatgattcttagagttccaccgattaacttgtatagaagtagattgattttatggttcaattctggtctgtc

SEQ ID NO: 258952 - DNA, 243 bp, Glycine max
  unsure (1)..(243): unsure at all n locations
ttaatggtgaggcctttccctggagatgcgtcggaggtgcaactgcgaatgagacaggggaggctctgtgcactanggtgcagaccgaggatgaaggagcctgatcaccctcttgaggaccctatatgaatctctgcgaagaatctctgactgtggataagatagacataatgtttgtgcactatttattatgaatagatgatggagagaaccgcaactttgaagtgagtctcattccactct

SEQ ID NO: 258953 - DNA, 266 bp, Glycine max
  unsure (1)..(266): unsure at all n locations
ccttcacccgacgaagacactgacaaaaacttatcttctccttcttggacaaagtatggcagggctggggcaagtaaattttcttcccatcagaccttggatgcaactgtgatcgtatacccatatcagctagatcttgaagggtattcaagccatccttcgtcttgccttgaatgttaanggagcgtccaatgacactatcacnagacattttntccacatgcataacatcaatacaatgtctaacgtcaagatcacaccagtac

SEQ ID NO: 258954 - DNA, 434 bp, Glycine max
agcttatgctgcacacatttattatagttcttcacagcaactaaaccaacaacagcgaaatacttatgacctttctagcaacagatacaatccaggttggaggaatcatccaaatctgagatggacaagccctccacaacaataacagcatgtccctccttttcagaatgttgctggtccaagcaagccatatgttcctcctccaatgcagcatcaacaacaacgacaacgacgacagtcacaacaaagacaacaagcaactgaggctcctcctcaaccttccttagaagagttagtgaggcaaatgaccatccagaatatgcaatttcatcaagagacaagagcctccattcagagtttgacaaatcagatggggctgatggctactcagatgaaccaagctcagtcctagaattctaacaaatttccttcac

SEQ ID NO: 258955 - DNA, 179 bp, Glycine max
ctatcaatagacctccaatctttaatggagagggtaccactactggcaaacccgaatgcacatctttatcgaggcaatagatctaaatatctgggaagccatagaaatagggccttatatacccaccacagtagacagagtttcaatagatggtagttcatcaagtgaaagcataacca

SEQ ID NO: 258956 - DNA, 448 bp, Glycine max
agcttccttggtttctttaaaatagtgtgttatgcaagaataactttttgggtgtcattcccaaagaacttggagatttacccaagctagagttattggatttaggggagaataacttgtcaggaaacatcccaatagaaattggcaagatgtcattactaaaacacttgtaagttaactttctattttgtgtgcatgtgttattagatttttagtatttttttcaatggaattttattttaccatacgttactctgtgataataaaatataaggaagtgatcctaaagatggtcaaaagttcaaattttctttgaaatctctaattgaaaatggttcattaactctaacaactatattttcctacatcaataaggaatttggacaatggtaaatatatctttaatttatcctccctaacaaagctatcttagtagtgtcattacatc

SEQ ID NO: 258957 - DNA, 245 bp, Glycine max
  unsure (1)..(245): unsure at all n locations
aacttctacagtntctcttgcattaacctaagtaaagtctgaaatatttctaatcttaaaaaagaatgttatttcaatacctattatttatcggtccctcagcacaaatgttgcatacctcattgaacttaattgcattccttccatatgctgctctggtggaataggagtctcattttcagccttaggggcaacattcatctctcttttcttattatcatcttcctgtcagctctctactctat

SEQ ID NO: 258958 - DNA, 273 bp, Glycine max
gtcgcatctcgtcaacgtctgagagaccatacattggacctagcgattttttattatgcgtgccatcttctctgtcgtatactgacccatgcctataagcccatgaatctcttctggggcggagaaagtgcctgccatcgacatggccttggataacactcggagtatctcatgacttccgttcaacgtaatagcatgccgagccatccacatgggtgtctctaggtgtgaagagacgctcagcatgcctgcatcctatgcatgtgggccgtg

SEQ ID NO: 258959 - DNA, 368 bp, Glycine max
  unsure (1)..(368): unsure at all n locations
ccctcaatttaatggattntctaggtttgagaagtgaaactgagaatgggaataatttgaagcaaactctcacctcacacaagtctataacctcaatttaaacttgttcaaactggatttacgcctaatatttcaccgaatcaaaatttgactcctcaacacccaaatttaccctagaaatggatctttgntcactttggtcatttgtttntctctctagcacagcctaacctttctcataagtnctaaatgggcattcaagctangagtaactcactctaacctctaaatactaccaattccagaattggccttcagctctcnaaaatcactcttttttcactcataacatcatattctcaccttct

SEQ ID NO: 258960 - DNA, 434 bp, Glycine max
  unsure (1)..(434): unsure at all n locations
agcttcaaccttnggtgctcatttctgccccatatcgtgaaaggagagcattttcggngtcgtgaagtgcgtggctacgagtgggacttcgaaaattcaggtttgggcggacttctttctctcttaaatttcgtgggtatggggttttggggagatatgatgggtaatcttgctagggttctgctgtgtgacgattatttgtgaagacatttgttgaaagcttgttgaaattgccatgtttggatgagttaaacatacccattctgttntanaggttttgtgatgatgtctgtgatgtttatatgctgaaattgctgatggaaatctgttagagacgaagggtagaactaacctatggttagaaagtgagaatgtgatgttatgagtggaaaaagagtgagactttgagagttggaaggctaagtctgaattct

SEQ ID NO: 258961 - DNA, 197 bp, Glycine max
  unsure (1)..(197): unsure at all n locations
ctaattattacatgtacttcaagtgatttgtattaatacacaccctctggtaattactctgctataacattcggaccaatgcatcctcattggttctatacatctatcaatatataattacactccatanggtcattatgcttttttttttttaggaataaatgcctctttatgatacattgcactactatagtaat

SEQ ID NO: 258962 - DNA, 454 bp, Glycine max
  unsure (1)..(454): unsure at all n locations
agcttgtttcccaactcanagctcttctcaagggtcttcacttgttccatgttaagcctccttttcttctctccagcctgtgatccatcatcagacaaatcttcctcagcattagcttcttctccaagctcaatccctgaaaatgacatagatctcttgcctagaaaggatgctcctcctgcatcaacatttgaaacattggtattaggccacataacataatattgcactattggttggtgtttttgtgtctaaaagagagtaccatggtactcttgaggtgcacatgaagttataattgagttgagtgaaggtggaggttgatggtcatcttggtgaggtgtttgtagcatgaaatntgctgggaagaaagccatatcattgctagtctatgcttgcctctgatcttcaattgctgaatgatattctgatcaccatgtgnatgctgatgctc

SEQ ID NO: 258963 - DNA, 263 bp, Glycine max
  unsure (1)..(263): unsure at all n locations
cctgaattttgtgggtatagctcacttctatgcctacagaatctacctaccacagagcaacaaagtaatcgtcagcatggatgtcaaatttctggagtcagatagttgggactggaacaatgataagaggtctgagtttcacgaggagaatgaagatgttgatgaagaacccatcagaggaaccagatcactttcagacatctaccaaaggtgtaatggtgatgtaatggagcctganggatatgaagaagctacagctgatc

SEQ ID NO: 258964 - DNA, 449 bp, Glycine max
  unsure (1)..(449): unsure at all n locations
agcttgacaganatctgcagccgaaccacctgtttctnttcctgcattccacccaccttgatcattaccttttccctgtttatcatgtgatgaagagactggagcattccaattgttttttgttccccagccagatgacccactcccatccttagttggttggcttttccacccaacatcctgattagcatcaatatctgaagtaccatcagggtttccaacttctttgactccacttttaaaaccattgccaccaccccatccaattgatgacgtttgatttgactttntgacactgttccaaccagaagactcctcttcagaagccttggttgtattccaattgcttttgctgtcccttgctgaggattgatttccattcaaattgttaggtttgtcattccaattgctattctgattgccatcacccatgcttccagttntatgct

SEQ ID NO: 258965 - DNA, 361 bp, Glycine max
  unsure (1)..(361): unsure at all n locations
gcatcattgtcttattttgatgttatgttaaagaacacaagtggaagcagaacagaatatggaaatgcagctcgaagcataaagtgttggatgaatgaagctttaagaagagtgtggactgtagtgtggtgttgcatcaccagtacggcttattttattgtattatattttgtaggtttctgacagcgtctaacaatataataaataattacttttctagaacaaaaatcactcctttttattcacttacagttatagtctgcaatcatcctcgttgatttcgacgaatctcngatcngatgtttgagtattatttacttaataatcataaactacgtaattttatctactgcagtatata

SEQ ID NO: 258966 - DNA, 441 bp, Glycine max
agcttcttgaggaagctacatgagcttcctcagtaaaaacgttgtacagccttctttaaccgttagatcttctcgaaatttggtctgcagcttcaaaagatacttgtccatgatctgaccgttgggatctttgagaagatgtctggagtgtgcgcgaagcttccgttcccgagaacatttctcatttaagcatttcagcctttgctttcgtgtagtttaggaaaaatgccatttcttctcctttctttcttccaatgtcatttctaacgtcccaagcactttctccatcacccatagccatcattagccaccgcaaaccgccattgttatctgttgagacccacaccgagaggaacccttcaactgaagcgaaatcttccaacttggcttgcggtttcggtagagaacgaaaccctaatctaacctttcattctctttcga

SEQ ID NO: 258967 - DNA, 553 bp, Glycine max
  unsure (1)..(553): unsure at all n locations
nggcgcgtgtttatgacnatgtaactctagatctcagctnggaaggatgcttaantggaggggaaganagagggagagaaatatataantgggagcactatatngaaggaagaaacagggagagaagttgaactttgagttgtgtctcacaagactctcattcatcaaagttacaacaagtgttacacatgcttctatntatagactatgctagcttcttgagaagctatcttgagaannacttcttgagaagcttctttgagaaaagtcctttgagagctagagcttagctacacacacccctctcataactaagctcaccttcgngagaagctgtcttangaangaatctanagaagctagagcttagctacacatacctctcgtatagctanggtcaccctcttgagatgagaactagagctagctcacacccctatatactaactcacccatgacaatcatgatatacaaaaaaatctactcaaactctanatgctcgatcanggtaaccttctctaatggcaatcaggctatgagganactattattn

SEQ ID NO: 258968 - DNA, 388 bp, Glycine max
ataatttctcaccattatctctccaaaaatcaaaactaggacctttttcttctctatcttgcgtgagatctttaaggaggaagagaccaccattgtcatcttctttcaagctacattttaatttgttgagattccttctctcaaagatttggtgagaagatcctaagactctcttatcttctcatttctcatcattgtcatgccaagctcttatgttggggttccaaaatttggttttatcctttggaagcttgagacctcaagatctaagcttttgttccttgaacatgtcgtggaaaccttactcaagataaggggagtctttccacttcttaaacctaaccttgttgtcttcaaaactaggttcattacatgtcggtgtgatgtt

SEQ ID NO: 258969 - DNA, 133 bp, Glycine max
  unsure (1)..(133): unsure at all n locations
atgtaaagatccaggtacattcagcataccttgtattatatggaacaataagtttgacaatgccatgctagatntangagcttctgttagtgtgatgcctttgtctattgttaattctctatctctcgggccc

SEQ ID NO: 258970 - DNA, 422 bp, Glycine max
  unsure (1)..(422): unsure at all n locations
agcttctcctccaattntctataaaattgggggagaagtgaagtagacaagggttcagccccttaggcacttctctctttctcgaaatagctgaggaaaattagttccgtgaagaaaatccaagccgaggcgcttccataacgtttccgtaacgtcttcatgagtgatttcgcgaaggttttcgaccattcttcgacgttcttcatcgttcttcagtcttcaacgggtaagtacctcaaaccaagctttttaattcattctatgtacccgtggtgagccacatttggcttcatgtagttttattctcagtttcatttactttttatacccccttttgacgtgcttaagccatttatttaagtcatttctcgcttaatctaaaaataaaataaatttccaccgatcgcttgaattgtatcatc

SEQ ID NO: 258971 - DNA, 260 bp, Glycine max
  unsure (1)..(260): unsure at all n locations
tgcattgactgtatcccaatgagagtgtgatccttaaattatgagagaaacgactatcatttactactgatgtttgcatgaatctctgaagtatggactgaatgcatgaaattgaggatgatgaatgccatgtttgattgtgatacgcacttatcctaaaagctgaccacatgcttgaatgatttatcccttgcacccagcttgagcttaatgaatcatcgantgatcgaaccttgagcctttacagtggtatcttctga

SEQ ID NO: 258972 - DNA, 526 bp, Glycine max
  unsure (1)..(526): unsure at all n locations
accgtganttgtctcctatccgagatccctatactcaccatgcagctgcagcctgcaagctcgtctcgtacataatgcggtgctcaacgatgatctatgaactaggaccgacgagatgtggtgcaactgctgggtgcgacgccatgttctcccgtcactctctgcaatctatcttgcagattactgatcatctggatgaataaaggaaatgaaatggcgatggagagatagtataaccttagaccactctctataccgtagcatgacgtgcatcatatgtatatgcaacaacgatgttgccgcaatacacatgctagatgtggacagagtgatgatcactaagaaaagtacgaatgataaagtgtagactttagtntagagaaacacaaggagagagccactcctggactatattgatagggaccatggcacagagagatgagagcaaagattagatccagagagatagacactacgactatcatgtgaagtgatgacaaccaaagtaatgctcacaactgtgctg

SEQ ID NO: 258973 - DNA, 164 bp, Glycine max
ttatacttgtatatttatatgaacacgctctttctctctctctctgtctttcttctttcctgctgcagaagtgcttctaggtttctacataacactaggatacacttagtaatagcggatgaacgtgagcatatctcactgcaattcgcgaaacttaactatac

SEQ ID NO: 258974 - DNA, 391 bp, Glycine max
  unsure (1)..(391): unsure at all n locations
gataaataagaattcaatgtgtacattacatcatgcctgtggaaaaagcttataagaattatttgattcttaactaacgaagtccttgtaagtttattggcgcctagagaaattanacgagagcttacgaaaatgttgaggtgttaagttaatattaacttacaagagaagcttgacttcctcaactcattatagattcttctccctcgagtggttgttgagaaatttattcaaactgactcagtgcaatggtatttctcatacattggatattccaccactgtttgctgagcttctcagagtgtggcttttaattagtcaaaattatcctagaattcaaagaacaggaagaagcattntccatatatttctaagaatatgcttgtacact

SEQ ID NO: 258975 - DNA, 106 bp, Glycine max
  unsure (1)..(106): unsure at all n locations
tcttactatccanacttcgtatagcctcttcatagcttcttggatcatcatcatcatgataaacctcatccgatgtgtcatctaggactcatcaatttaatctatc

SEQ ID NO: 258976 - DNA, 316 bp, Glycine max
agcttcagaattcaatttcgagcgtctcaatatattacgggactcaatcagacatccgagcaaaacgttattgtcgtttggattagttcagagcttcagaattcaatttcgatcgtctcgatatattacgggtctcaatcagacatctgaggataaaagttattggcgtttgaatttgctgagagcttcaacattcaattttgagcgtgtcgatgtattacgggacttaatcagacattcgagatataagctattgctgcttgaatttgctgagagcttcaacattcatttcgagtcgtcctttattttacgggac

SEQ ID NO: 258977 - DNA, 139 bp, Glycine max
  unsure (1)..(139): unsure at all n locations
gctctcagcaaattcaaacgacaataactttttttctcagatgtctgattgagtcccgtaatctatcgagacgctcgaaattgaattctgaagctctgagctaattcaaacgacaataactntttactcggatgtctga

SEQ ID NO: 258978 - DNA, 453 bp, Glycine max
  unsure (1)..(453): unsure at all n locations
agcttatgcgcatatttccttacaaacgttctcttgcacaagacattctattaaccgaaaaaaaaaaaaaatgcacccatatacaatcaaggcagcttcgttacctagattatttacacgtacttccaaggtgtatttgttacttacatcacacacatctccttggctaaattcacatacatgcatacccaaagcattttggggtaccaaaaattgcacatgtgcacatcttggtatctctaatacctatacatacacaaacttcatgatgaatcttgactatctacacaataaggtgctacatttcatgctcttttcaagtttttgctacctaaagccgcatgcaaattcaagtatattttcctttgctgactaaaattgtattcaaattaaaaggtatacattntttggtaatgtatcttctttacataacatgcaacatatttatgtata

SEQ ID NO: 258979 - DNA, 146 bp, Glycine max
gctatataatcgcccgctcgacataccgtcaaaactctctgtatattatatcgtcatagctattcacacggatgttcgagtctggcgcattatatgtcgccaggatcggacctgcacgacagaagctcttgccatattcaactggc

SEQ ID NO: 258980 - DNA, 457 bp, Glycine max
  unsure (1)..(457): unsure at all n locations
agcttattcacaaatggttgattggtttccatattctagatagaggatcgataaacaaaactatggagattagtgtatcttataattacctcaacagtggccatttggaatgcaaagagggaaagtaataatatgatgaagtatgaactcgaaaggaaagctaagaataaaagagagtggttgtgagttgatcgaagtaagagaggtttaaatatatagttgtagagtcttcaacactaataccttcctagagagtgtgaggaatggccacttccaagaatctttttcaagcagacaactcatgccactatataccaaaaaatttaatataataataacagagatcaccatttccagttgtaaatgatttttgtttcctttcatttatctntcagaaatattactctgacaaataactagaataagagatacacgaatatatatatatatatatata

SEQ ID NO: 258981 - DNA, 455 bp, Glycine max
  unsure (1)..(455): unsure at all n locations
agcttctcaattcattctatgtacccgtggtggtccacattntgtttcatgtatttttattctcgttttcatttgctttttatacccccttttgacgtgcttaagccatttatttaagtcatttctcgcttaatctaaaaataaaataaatttccaccgatcgtttgaattgtatcatccgttaattttggttaaatgaattccgaccgttcggtcgtgccgtaaccacgttggaaataaaaaaagaggtaaaataataatatactaatcaaaaaatatcttttagtaaagtaaagcgaanaatcaatcggacgttttctctttgggatttctcattcttaattgaattgactaataactaaagtgaaactaaggctaaaatcaaacttgcctagtgaagctcgtccacaaaaataggttttttttttgaaagttatcctttcagtttcttacta

SEQ ID NO: 258982 - DNA, 273 bp, Glycine max
  unsure (1)..(273): unsure at all n locations
tcaccatggagatgcagcggaaggcaaacgagaagaggagaagggaggcgccatccactatggaataagccatggaagaaggagcttcaccaccaagatgagccttggataagaagcttggaaggatgcttcaatggaggaaaagaaagacggagagaaagagagaggcgggagcacgatattcgaggaataaaagaaggggagaagtagaactttgaagtgtgtctcataagactttcattcatcanagttacaacaagtgttacacatgct

SEQ ID NO: 258983 - DNA, 396 bp, Glycine max
agcttgaaattgaacaaccgaagctctccagatattcaaatggttatgacctatcacacgaaagactgattcatgcgcataatatatcgagacgctcgaaattgaacaacggaagctctccagaaattcaaatggtcataacttttcaaatggaagtccgattcatgcgcataatatatcgcgaagcttgaaattgagcaacagaagctctcgagaaattcgaacggtcataacttatcacactgaagtccgattgaagcgcataatatatcgagaggctcgaaattgaacaacggaagctctcgagaaattcaaatggtcataacttgtcaaacggaagtccgattctggcgcatactatatcgagaagcttgaaatggaacaacagaagctctc

SEQ ID NO: 258984 - DNA, 386 bp, Glycine max
aaaaaatgcacccatatacaatcaaggcaccttacatacctagattatttacacgtacttccaaggtgtatttgttacttacatcacacacatcttcttggctaaattcacatacatgcatacccaaagcattttggggtaccaaaaattgcacatgtgcacaatctggtatctctaatacctatacatacacaaacttcatgatgaatcttgactatctacacaataaggtgctacatttcatgctcttttaagtttttgctacctaaagccgcatgcaaattcaagtatattttcctttgctgactaaaaatgtattcaaatttaaaggtatacattttttgggaatgtatctctttacataacatgcaacatatctatgtata

SEQ ID NO: 258985 - DNA, 215 bp, Glycine max
cactaagatttcagttcaataactctttatatcctctctttcttcctacggtaaagattacatcttctttatcataatacaggtgctgtatttcccttgtatatacaagcttttggtatttcaattctattagaaagggtttcatagattaatgtgcacatcattggtcaattcttatggtccatggcaattaaagagttggatctgatctaatg

SEQ ID NO: 258986 - DNA, 447 bp, Glycine max
agcttaatgaaacaaacaacagcatattccttattcatatcaattcaaaatttaatgagaagaaaaagaaattaatgaagaattggctaacctgtgatgctaacaaaggaagaagaagggatgacaaaggatgattggaagagaaataaagaaaatggaagagagattgacgaacggaggaaggcacaaaaacacgtatattatgaggaacaagagagagaaattttgagggttgaaatctttttaagacataattgttcaagctatatatggaacagattcccaaaaagttaaaatttcacaagctggatatctgagcttcaacaaaagatctactgagagcttttacttttataaaagctaaaaaaaatttataaccaaacactcttaagaaataaaaaagatctttttctggttgataagatggtaaaagatcttttgagttgc

SEQ ID NO: 258987 - DNA, 418 bp, Glycine max
  unsure (1)..(418): unsure at all n locations
cgccggttgntttgttccatcgattgctgacttaganactcagcttacaaagtttccattggagcatatattngnaatatgtttacttaatgaagtggctatttaacaaccgtacttaattcttcttttattaaaaaacactttaatttaaattaatgtggtaaataacactcctcttcacttacataagtaatttttataaattttaattatgtgcagggggcttaatataataacactcttaacatctactttaaatctatgatatagtctctaagaactattctccaaaattgtcattggaaaatgtccaaaaggtcattaaaaaatatcaatatgtcttgaaaatgcctgaattattcagaatatcattctaactcaaagtatattgaaaatatattctatatatagagtgaac

SEQ ID NO: 258988 - DNA, 442 bp, Glycine max
agcttgttgtatgacctgatgacgacttgtgttctctcgcacaactctgaggtctaacaagctttgcatagctcttgactccatatggaatcgatcttgaaataataacaattataattaataactatttttctagtgataatttacgggaaaaaaatcaacaaaatttaatttgcattacttggcaagagtaaactccacttggtatatagttctcctatgactgcccaagctatggctattgtgggatgagtagtaaacgtacatgactacatagtgcctgtcactccgccaatggaatgacatagtgtggaaacattgcataaccaggacacatagttagaggcgcaagcccaaagaccctgagatggcacaatattatctagaggaataatatgttgttattatcactctgcccatgtttgatcacaaagctggtatg

SEQ ID NO: 258989 - DNA, 281 bp, Glycine max
  unsure (1)..(281): unsure at all n locations
atgggtattctagctctctcttcctagcaatattccccagattcaccaagatctttgagttgtcttcaaaatattgcgttgaagcttgcaaataatggctgtaagaaagtcataacttgattctcttaagctggtggatatgtttgttttctttctagccatatttccccgatggcaccaacatatncttcagttgtacttcanacgttctttggtggaactccattattgttatgtcttttaatgtattagtgcgaataaaatttcttgtaataagctga

SEQ ID NO: 258990 - DNA, 165 bp, Glycine max
agcttgtacatgattctaccatggatttctcgtattttgtgcgactatcgatagatgcgtggagctcctaatttgtaggataaccctcgagagataacttcgttctttgagacgtgtgatcgagcactcatcttcttcaatgttacatcacgtggcacacgggct

SEQ ID NO: 258991 - DNA, 449 bp, Glycine max
agcttgtagtggtccttgaagttgttttatcgtcatggtttctaaatctttggtttcctcgattgtcacaacaatgtgttcaaatttgggatctaacaagcgtagtatattctccataatttttacatcttctaacttctcaccatttctttttagttgatttgaaacaacgagaattcttgagaaataattgaaaatggactctaactctttcatatgtaaggattcaaactcacctagtaaagtttggagacacaccttctttactctgtcttctcctttgtgggaggattgaagcttatcccatgcctccttagcagatgttgcattagaaatcttctcgaacacatcatcatctaatgcttgatagataggaagagagctttcttgtctctctttcttgaatcctttaaagactccttttgtgcctcggatagtgaagtctcatc

SEQ ID NO: 258992 - DNA, 175 bp, Glycine max
  unsure (1)..(175): unsure at all n locations
actaatcatgtggttatgaagaattctgtgatctcttatcttgctagactcaatgttgttaaagtctctatgtatgacctacaagatcctatgtgatattgtttaagaagtttgagatatgaaaagattgacatattntgtacattctgcggtgcattcacttctatntgtatat

SEQ ID NO: 258993 - DNA, 400 bp, Glycine max
agcttgaataatcaaagtataagtgtttgatatatgagcttattgaactatagtatcataacgttaagtggacttatctcttagattaacttctcacgataccaacctattcagatgtacacttaataatgatgatggaataacattggctgctctccccattatgaaagtctgccctgatatgttcccacactcgaagttatacgctcaccaacccattacaattctctctcagacactcagacatagataaatgatcatggcactggttgggacggattttatcccgcactccattcgccagcgcccattcattattgtttatgacagaaagggcgaatgtattactgtacattgagttacgatgcatcaaaattcgtccactctaaacatctcatta

SEQ ID NO: 258994 - DNA, 128 bp, Glycine max
  unsure (1)..(128): unsure at all n locations
gacgatgactaccaactgttcgttatgagcaacagcatagaaaatatctatttgcatgtagtatactcccccttgngcttcgatgaatgcttatatgagacaattgacgatatcatattnttcatata

SEQ ID NO: 258995 - DNA, 319 bp, Glycine max
agcttctacttatgtggcagggcgggtttccttcactttcttgtttccaacgcgagctctgaccactgttcttccttcccgcgatgcttcttttcatgtacgcctgagagggcttatagcctataccatacttcccacgattaccttgggtttttattacactaaatatgccgccattgtctgttcctaaacccatcccgggttcataaccgttccccaacataactcgggccatcattaccgccgcctccgacagacaaagttgcccataaagggagttcacggaggaaatgctgaccacctcacaagactggaaagc

SEQ ID NO: 258996 - DNA, 195 bp, Glycine max
  unsure (1)..(195): unsure at all n locations
gctagagcttagcccacatacctctctaatagctaagctcacctccttgagatgagaagctagagcttatctacacacccnctataatagctaagctcacccccatgacaaanaacatgataatacaaaaaaagagtccttactacaaagactactcataatgcgccaaaatacaaggctaanaccctatactac

SEQ ID NO: 258997 - DNA, 315 bp, Glycine max
ggctcgcatcttgctattgaagactataaagttacatatgttatgataaagtaatgaaaacaaattcagcaaaatcatgtttggctgcaaccagtggaaacacctagaagtttaatccacatgtggtgaagcataggaactacatacgatttataaaagatattcgcatattcaagtgtcgattgtgatatttctacacacagatactagggaacaaatactactatttgttatgggccatgctccagtattcgattacatacataatagtatcagtcggtagagcttaagcttgaactaccctgacaatacaat

SEQ ID NO: 258998 - DNA, 215 bp, Glycine max
actagggcaaatgaagatggtgagaataagggagaaacccatgttgtgactgccattcctatacagccaagtttcccaccaacccaacaatgtcattactcagccaataacaaaccttctccttacccaccacccagttatccataaaggccatccctaaatcaaccacaaaagcctgtctaccgcacttcaatgacgaacaccacctttagcac

SEQ ID NO: 258999 - DNA, 456 bp, Glycine max
  unsure (1)..(456): unsure at all n locations
agcttgagctcactattgctgccctataaagcccctcaaaactnntgcttggtcgtgttcttcctttcgggccttcttggtttctcattccaaggcttcatcggtggccatattgacatcccttagttcatcatactcttttcagactttgatgggtatggacttgaacttctcttcgactacccaggctctttcaagctctgcctttagggcttgtacctcatcactttcttccaaagctntaacctcatcgtctctcacagtctttagatttgggagccaatccagtccttgtgttcggactctcagccacttatgatagccaccgatgatcccattactgcttcccctaagctctctgtcctttcttcacgccgcatcccatgccttgcgaactccttggagtaccctcgcgttgtggtcactgaaacctcgtgcgatgaaaggcgtgatgct

SEQ ID NO: 259000 - DNA, 115 bp, Glycine max
  unsure (1)..(115): unsure at all n locations
aaatgcgaaaaaggatgaccctagggctgcaaactcgtcaatcccgtgggtatggcttttgaaaggggggaaaagaaagttttgaatgtaaaaacgcccncccttttcgtcattc

SEQ ID NO: 259001 - DNA, 420 bp, Glycine max
  unsure (1)..(420): unsure at all n locations
agcttgtggttctcataattctctggttttgctctgaattctttgttggtgggggctagttttttaattaagtatgcttgtttttcccaaaacaatgtttttgaagcaaatgggtttaacccaatttgccaagtggatttgtgcattggatactatgctatcttgcaccaactttgaggtaataatgatttttttaacaatcgatatttgaagttagtttacaaattaagaagcgtctaatacgtgtagaatattaatttatttagtaaaaaatgatttcttatttaatataaaatgtgaatgcgatttgcttgttgttgaaatgtattttgagtanagtgtatgtgcaatattccttgtaatggacgtatacatgggaaacataataaatgacatttgagatttgataaacatcaatac

SEQ ID NO: 259002 - DNA, 461 bp, Glycine max
  unsure (1)..(461): unsure at all n locations
agcttctccaacagcatagagctaacttcctgcaaatttcaaaataaacaagtatatcaagtagaatctaacaagaaaaaaaaaagagagaagccagcagtaggaaagtgcaaggaaagcataggtaaagatacgaaagaaacatcatactgcaaccatgtgcagggaggaaatggagaaattgaaagacctgngtcactctgactaagaagctggtatcatcgaaccaaagttcagtaaaaataaaaaccaaccaatattataaatacaaacaaaaaaaatgcccaacaccacatatatacattctctttgccgctntggtccatccttgttaacatctgcactagcattatcagtcctgggggtgtctctctttggagcaacagcaaaagcctttgggggtggtgaaactntctgccttggaggtagagtatatcttgccttcatgacattgccatcta

SEQ ID NO: 259003 - DNA, 547 bp, Glycine max
  unsure (1)..(547): unsure at all n locations
cgacgtgatagtcctatgatttatgtgcactctagatactcaagctngacttgaccacaaacttgagaatcacatatntattattgaatgtgcngatantngagtacaatattnctaatttaatcagtaatttgatttcaaattctaaatacgcagttacttagaaatacaantttatcagtcatgaanatcctattcgattctctagttaaagatatatgtangatgtgactaggattntagtaaagtcacgaccaacgcanaattaacttcatgcaagacatgttttgctataccattgaacaaatatgtatatatccaaggcanaagctagaacacaagaacatatatattcngctgctatatcaacaggacgtgncttttgcaagcatctcaagtcggacgtcattcataatttatnatagaaaattactagactattatacaactgtaacaatgtgagtcaagggtatactannatagataatgtgatatatcgagtgattgtgaatatctgatactatttatttatgatttgacacaatan

SEQ ID NO: 259004 - DNA, 581 bp, Glycine max
  unsure (1)..(581): unsure at all n locations
tagtcacggacactccagacgcacacccgttanttggaaattacagtaattatcaacaactcccacaaccgcgtgnttgagtccntcgcagaccgcganctctagatcnacctgcagcacgcaagcttgaaccgcgacacaaacataagaataacacgttcatgagcnacgacaacccggcggttcacttcggcggatgacaactcgcgagcgacaagatacagcgacctcacagaacgaatcatatcacaccatgagatggaacagccccccacaacaaaacatgcatgttccaccgattcgaaacgacgcggggccaagcaaaccaactgaacatccgaccatgacccttccatcaacaacagcacaacaacacctacaacagaaacgacacagcactgaggcactctccctacccccccgaggaaaagtacggacgcagacgaccatcccaataagcagttcacaagagacaacaccaccattccagatcgaaactcgaacgggctgatagagcctcacatgaactacacccagaccaacgaaaagacaccatcccgcaccgaagtgcagaccccaag

SEQ ID NO: 259005 - DNA, 169 bp, Glycine max
  unsure (1)..(169): unsure at all n locations
tcttaatactctgacgatacgatattctttggagaagcatctatggcaaatgtcataactgtgaaggttattctcangagttttgagctggtttctggattgagaattaattntgctaagagcaaatttggagctgttggtcaatctaaggagtggtgtcttcatgctg

SEQ ID NO: 259006 - DNA, 341 bp, Glycine max
gcttcaatctgatcactaagatgatgcaatcttattccgcaagggcattgggtataagactccaacttgatggggcttcagatccaagggaaagccctagggatctcatgagccttaaggtagatatccagcccatgggctaatgatgagcccgcttatctttgtaaatattacaatacgtgctttcttcagctgggccttgtattgctgagcactctagaactatatggctttagccttgtatttcggcgcattcttagtagtcattggagtaaagacttttttctgtattttcatgtcttttgccatgggggtgagcttagctaatattgtgggtgtgt

SEQ ID NO: 259007 - DNA, 283 bp, Glycine max
  unsure (1)..(283): unsure at all n locations
gagatgaaattcagagattggacctcttgctagttgttattaatgaatagcttaaacacttgtgcttgagtgaaacagtagccgtgagactgtggtttaagctaattttcttgatatctgtcttatgattagctccatctaattgttcaaattacattntattcttctctttggataactgcataccttgtgaaaggcaagtgatgagggcattntactccattctcttatcatgcaatcagtaactcttgtagcatacacctttgtacatagtcactgcatg

SEQ ID NO: 259008 - DNA, 447 bp, Glycine max
agcttccatcaagtggtaattagagcacaagagcttcaagtaggtgctccttaaacctccattaattttttgctttaccttctcttccattgtagtttcttcatttttctccatgtatctcctcacatgtcttgtcctaaatgttgataacattattctttaaagtttccaccgattaaacttgctatagaagctagatctgattttctatggctcaaatatcttgttcttgatcttgaaccatgaattgtgttgagtttaagatcctttgagctttgtcttgttattgtttgtggcttaaacctaaaccataaaattcttacaaaaatattaatgtagaagacaacctcaaaaatctatagtgacttgttcacctattgtagttttgtcatataagtcatgtctagtcatgaaacttgtcacataagatttcttatgttgtgctga

SEQ ID NO: 259009 - DNA, 266 bp, Glycine max
  unsure (1)..(266): unsure at all n locations
attgatcatcctactaggacgactgagaaaactgtggcaaataaagagggtgaggatgagggagaaacccatgctgtgactgccattcctgtacggccaagtttcccaccaacccaacaatatctntactcagccaataacaaactttctccttacccaccacccagttatccacaaaggccatncctaaatctaccacaaagtctgtctaccgcactttcaatgacgaacaccacctttagcacanaccanaaaaacaccaacaa

SEQ ID NO: 259010 - DNA, 427 bp, Glycine max
  unsure (1)..(427): unsure at all n locations
agcctttgcatgtttagagatttctatatagagaaaggtccaagttccagatatttttgagagcttttgttgtgcgaagactggtagagaactgagcatgaacaggaagccgtcttgacagcatgagatgagtctgtgagtgattgtgaggttctagaggtgaaggagacatccccactacttgtgtttcttcaatccttcatttttctcttctttctgttgtaaaggaagcttcccagatatagagagctaaatcctctgttggntcttccttgtaggtacttgatgtaaatacctgtatatctatntaatgatgttttatgtgttctttgtgctatcagtatgtcatttcagtgtgctcttgccttgatcacgtagatgcatctctttgtaggatcattcaacagtggaaactggtctgattctt

SEQ ID NO: 259011 - DNA, 316 bp, Glycine max
  unsure (1)..(316): unsure at all n locations
ttataatattcttaaatcgagattttcctatgctgtattttgaatgtattgttatgtctctttatataccaattgtttttctaatcagctaaagaaaatatattactgatggtacaaggagtaccatgtctcgtatacaattgtgtgtatgatgcgcttcaacccaaaacaatgcagccttcctaatgcagagaaaaatttacatcccatntaaaccaaaacatatctcagcaactgcaattgaaaccctgcagcagcataacaacanatcanagcttgtcaactaactanactaaaactaatanagtttacaaca

SEQ ID NO: 259012 - DNA, 393 bp, Glycine max
agctcgaacctgatacacctaagtccggtgatcttactagactttatgataccaagtaggactccaccgctaacttgttcatcaagctcctcacaccactacttgtttggggtcatatggaatcaacacacagagtcccagatccattttgtctcactgttatcatgagacaccattaaagcctcagctgactcatatccatcttcaactatagcagtatttctagggactttagatcaatcatgcatgtgccccttttgtctaccaggacaaaatcttcgagtatgaccttctctttacagtgataacatatactgtctggtacattagatccacatcgacatcgtgactaggatctattcccttctgccttataatactacttatactgtc

SEQ ID NO: 259013 - DNA, 555 bp, Glycine max
  unsure (1)..(555): unsure at all n locations
cgccgcgttgtttgtctccatcttaccggcactatgagactcagctatattatagtgtaaagaaatacgaagtttgagcttgntataatatagatatgatataccataatctcatattgccgtgtgttaataaactctccgatttcacgcagagatactgtttcaatcatcacatgactaaatatcagaaaagattgatttctattatatatataaccagtaaaggatattctcatgactatggatcacttgcacaantaagaaaatactacatgtgatatggtctcctctattaaccatatattctaggtggcatgcaagaaggtaaatacatgtgcatatgatatttattgtattaaagaagagtctctagactagttatcatatcaaatatcttcttgcccaacacttgaacactcatttgggatgactcagatgtctatatcaatcgtagacatggggatataaggctaatcacgagagatacaccctcctactatgatactgagtacattttacttagaacactaaaaatatgtgattttatctcttacg

SEQ ID NO: 259014 - DNA, 450 bp, Glycine max
  unsure (1)..(450): unsure at all n locations
agcttgaacgagagagagacctctaagtgatgcaaagaggagccgacggggagctcacgataggtgaggggagttattataaaatttaccgttttgacaccatagttagggtcagggaacctagctatgagaatatccgcctgttcctgttgcatgctgattttctttcaagaaaactatgttttaaactaatgggatgcgatatatatattgttgatgaataacattattgtttattaaacttgtgttgtttgaagacttggggagtgtggacctcgggcatgaaaaatatatttgtagaagcaaatgactntggtgttttgataatgatcatgatgatttgatgcaaatgggcttttcaagtttaaattcaagataatgattcaagaatacaagccacaacatcaagatgatcactagtattntaggaagggaattcctaattgatat

SEQ ID NO: 259015 - DNA, 260 bp, Glycine max
  unsure (1)..(260): unsure at all n locations
tgtcttctcttactccaacctaactcccacatcccacacctcgattngaatatggacaaagctaggttggtctatggcttggtaaccaacatggatatgaacattggagcccttatctcangtcagatttcttctattgctcagagtaactcctctaggctcggatttccagccttgatcactaccctatgcagagctagaggaagtacctctaacagcctgacctatgagagcttgagcccggcattaacttggctaca

SEQ ID NO: 259016 - DNA, 431 bp, Glycine max
agcttagcggattaggtcttcgctggcgaaaggatcaaagtgggtatggaaagaggcaaatatgattatcctgctttgatgaatgcgaaaactggggcaaatgaaaagggtgagaatgaaggagaaacccatgctgcgactgccgttcctacatggaaactcccccgccagctcaacaacatcattactcagccaatatcagcccttctcattacccaccacccagtcatccataaaggccatccctaaatcaaccacaaagcctgtctaccacacttccaaagacgaacaccacctctagcacaaacccaaagcaccaaccaagagatgaattgtgcagcgaaaaaacctgtagaattcaccccaattccggtgtcttatgatgacttgctcccatatccactcgattattcaatgatagccatgacccc

SEQ ID NO: 259017 - DNA, 498 bp, Glycine max
  unsure (1)..(498): unsure at all n locations
ngatggtacgctaagcctcacatctanagctaagtgcatatngcagaaaaagttgcgtngcagaaagtgctaagcacagcttattgtgctaagccccagatgctcactggactntacaacttcaagttgggcttatcgcgaggttaggctaagcacttgngtttntaaactcaaacgtcacatgggcacgctaagcacagctgtgcactaagcgcgccatacanaatttcaattttattaaaaccaaaggctaaggcacttgnngtgtaccccacatacctntagcttctccttttgtaaacctgagcaagtgtgtattctgctgcgtgtgtgactgcttgcagcatctctttggtcattcaatcacatcaagaagtggacatttcatntattttcatcctcaacctangataatactctcgttcttatngatgtgtaagtaagtttttagttaggtagcatttggattnacgtactacagccataggggaatggctn

SEQ ID NO: 259018 - DNA, 426 bp, Glycine max
  unsure (1)..(426): unsure at all n locations
agcttctacattcaatttcgagcttttcgatatattacgggactcaatcggacatccgagtaaaaagttattgtagattgaatttgctcatggcttcggtattccatttcgagcgtctcgatatattacgggactcaatcggacatccgagtaaaaagttattgttgtttgaatttgctcagagcttcggtattccatttcgagcatctcgatatattacgggactcaatcagacatccgagtaaaaagttattgtcgtttgaatttgctcanggcttcggtattccatttcgagcgtctcgatgtattacgggactcaatcagacatccgagtaaaaagttattggtcgttgaatttgctcagagcttctacattcaatttcgagcgtttcgatatattacgggactcaatcagacatccgagta

SEQ ID NO: 259019 - DNA, 313 bp, Glycine max
  unsure (1)..(313): unsure at all n locations
ctcggatgtctgattgagtcccgcaatatatcgagacgctcgaaatggaataccgaagctctgagcaaattcaaacgacaataactctntactcggatgtcagattgagtcccgtaatatatcgagacgctcgaaatggaataccgaagctctgaacaaattcaaacgacaataacattttactcggatgtctgattgagtcccgaatatatcgagacgctcgaaattgaataccgaagctctgagcaaattcaaacgacgaatcacttttactcggatgtctgattgagtcccgtaatatatcgagacgctc

SEQ ID NO: 259020 - DNA, 451 bp, Glycine max
agctgtgtatggtagagatccacctactctggtgagatatcaaccagacatcactgatgttccaactgtgtaggagcaattgactgctagagatgaatttttgagacaattgcaggataatttgatgaaggcttatacatatatgaagaatcaggctgataagaaaagtcaagatgtcaatctacaggtgggagacttggttctagttaaactactaccatacaaacaacattcagctgctcttagaaagaatcataagttgggaatgcacttctttggcccctttaaaattctggccagagtaagagcagtggcctacaagttagagttacctgcagaagctagaatacataatgtcttccatgtctctcagctgaagttgtttaaaggaacaccaggagaacagtacttgcctttacctttaactacaacagaaagtggaccaattatt

SEQ ID NO: 259021 - DNA, 201 bp, Glycine max
  unsure (1)..(201): unsure at all n locations
ttccttctggagagtcacttgctctntgatagttgtcacacctctgaacatattcataagcatccttgtgcaaggtaggccaataaaaactagattgaaggaccttggcagtagtcctctctccatcgtaattgccttcacaatgtgaactatggcaatgccacaatatgcttcttgcctccacctaagttacacatcttc

SEQ ID NO: 259022 - DNA, 452 bp, Glycine max
  unsure (1)..(452): unsure at all n locations
caagcttcggaaatgatttctatacaaaagttagtcgtatgaagcgactaacaacattcatatccatatattataagaacaactaatcaacctttgggtgatccataaatgtcttataataatgaacttcaattaacccataaaccaataatctataatttagcatccattctatgggtaattgaaataaaattgtcactaatttggaattaaacaaaacatacagatttgaccactgtggtgatcacaaatctatcatatatttaatccaaattactttatccaattttaaattgaaattgacgtaagggagagatattgaatttcaattcaagacattcaaaaattggattcaaggcattccaaactcgaaaacaattataatatgcacaacggaaaatcaaatggtttgaataattntccaattggaatcagattcatacaatgtatgg

SEQ ID NO: 259023 - DNA, 428 bp, Glycine max
  unsure (1)..(428): unsure at all n locations
aagaacttcaagactgtgcttcggacacgttcattcattctgagccttacggtctcctacatcgaggcttcatctgtggccatcatgacatcctttaatgcatcagactctattgagactacgatgagtatggacaataacatctattcgactacccatacaatttcaagctgagcctttatggctcgtacctcatgactttgttcctgagccataacctgatttgagtcacagtctctatgagtgggagccagttcatttcttgtgctcggactctcacccacttatgatacccaccgatgatcccattactgctcctcctaaactttctgtgccatcttcacgcctcgtaccatgcctatcgaactcattggatacccgagcgttgtggactctgataccttatgcgatgatangcgttatgcttn

SEQ ID NO: 259024 - DNA, 68 bp, Glycine max
tacattgcaacacggatctggctccctcgaaccgggatatttgatggaaaaaccacgttgttactccc

SEQ ID NO: 259025 - DNA, 457 bp, Glycine max
  unsure (1)..(457): unsure at all n locations
agcttatacttaagcatatatttattttatcttctaacttatatagttacttacgtcatactcttttgtttcaccgatcttatctcccgtcctcttaacaaaagtctctctcaaaaccaacctgcgaagtccaggaatctacttcagtcacgtccagtataaggtctaaccttagattttgttaagtacattaaatattttatatatttttaaaatattcgtatatttattttttatttacttattttataaactataattatattaaaaaacaatgttgcttccatttgattntccatcctaacgtatgtttagttaatcaatccgaatcatatcaacttaattatgttttgttattatattaattttaaattgaaacaaccttaaagaatttacattgaatcttactatanacttgcttttaagataaaaatatctatacgcaaattactcttat

SEQ ID NO: 259026 - DNA, 294 bp, Glycine max
  unsure (1)..(294): unsure at all n locations
ctttacttcttggttagtggatagatccgccacagccttggcacatacaagatcaatactgaatacttcaacanatcctttactactaatggatccggtgatttcaggtttggaatggctaaaaaaatcacctacagtgtctaacacgacatcaaattatcatgtctttcacatcaaaccgaactggnaaatacattntggctacttagtacttaccatcagaaaataaatatatttaagaatttaagagggagatacctgcggaagtggaataatngatagaatatcaatgat

SEQ ID NO: 259027 - DNA, 512 bp, Glycine max
  unsure (1)..(512): unsure at all n locations
gtcgttcaacggcacgatgagttgtcgcgatcgcgnaccgcgaaactctaaggcgacctgcaggctgcagtctgtaatacagatagcgccctctttatgttcttatgagccgtcggttgatctcccgatacgtgcctcgaaatatcataaaattgtcccttctgacaacatatttagggccatgggacctatccttgagaataatcgattagtcctgtcacttgctgattttgtatcctgaaagcttcgctgcaaactaccgcgaatctagtttaatatagacattaagtttcagcactgtttattatgaatagagttaggtgaatactcgcggattgatgacctctggcatgaacactatctttgtagaagcgcaagactttggcgtctgaataacgaacttgatgatgttatgcgcacgggcttcttaagttaaattctgcatgtgattctacatacagtccactatttatacacgagacttgatttgatgaaggaagtctaatataccc

SEQ ID NO: 259028 - DNA, 202 bp, Glycine max
  unsure (1)..(202): unsure at all n locations
atctctaacaatagtttgtcataattaaaaccaaggatgtggattcaatatgtttaacccacaaatntagagaactagagtagtagtctcgaataacatagatccttgttgataattcgcaatatcgagtttgagctataagcattntgtcacattattttaattgtaattggtcttcaaatgatcccacatatctttaaca

SEQ ID NO: 259029 - DNA, 423 bp, Glycine max
  unsure (1)..(423): unsure at all n locations
agcttgctggaagctngctgattggatatttctactggtgagggagcttgtgtgtttgtttggaatatggctctttgaggtggctgaaggaaaatctctctaagccttcccatatcctcattgtggacatgaatatgttgtcttctaggtggtggtgctggaaaattgcaaattgctcaaaatttggtaaattagcttgtcttccaccctaaagcctanaaatttacatgttcatgcacataaatagcataagtataccaaggagtggtggggagaggttcctttaatatgatcatattgttcattggcttccctgctcttaaaaagaattccattactacaaaaaattaggctcttgctgtcttccttttgcattcttgacattagtatttgattgttaattcatttaccaattgtgaaatc

SEQ ID NO: 259030 - DNA, 369 bp, Glycine max
  unsure (1)..(369): unsure at all n locations
tttgatggtgactctaatgtaagcaacaattatgttcccattaaggctagaggaaatgaaactntaacccggtattcaaatgctggattntccagcattcttactttctcatggatgagtcctttagtaactctaaggaatgagaagactttagagcgtgaggatctcccacatcttgctactaatgacagtgtggatgggattttgcaactcttcaaacaaacttgagtcagagtgtggtagtgtgataacaaccctacganaatatganggtactgcacagatgaacaacactatgctagtgtgataacaacccttcttacnactatcaatcaaccctgcttctagtgtatggttgtgataacacta

SEQ ID NO: 259031 - DNA, 454 bp, Glycine max
  unsure (1)..(454): unsure at all n locations
agcttgtgcaaatcaaatcactcctaagtttcatctctagcatgcantttttttctttacccactcctcacgtttggttttatagggaaaaacaccataactaaacgcgccgcaagggatccctatcgcaccagatccaaatctagaacgatgggtgatcaagaggagacgcaggaacagatgaaagccgacatgtcggctctgaaagaacaaatggctttcatgatggaggccatgttaagtatgaagcagctcatagagaagaacgcggccaccgccgccgctgtcagttcggctgccgaagcagacccgactctcttggcaactacgcaccatcctccctcaaacatagtatgaccgggaagggacacactggggcacgatggcagccctcacctgggatacaaccgagcggcttacccttatggattgccgcccaactattcaccacccg

SEQ ID NO: 259032 - DNA, 297 bp, Glycine max
  unsure (1)..(297): unsure at all n locations
ttcgctcgtcaaactccactaacaataaagaatagaanaacaaaactaaaacatacaatctatgtaaccattgcgtgtggctatctaaacaaacaacactctcgcatcctaagcgtgtaactatcacacttaattcaccattgngcccaatcactgccaccaatcctcctaagtcttgatggtcgttaaaaatcatgtggatgtcagtcaggagcaatctctacatatgggtacatcgtacaccaacctctcatctnctaactcanaaagcatagtctcanagtttgcatgagtaac

SEQ ID NO: 259033 - DNA, 447 bp, Glycine max
  unsure (1)..(447): unsure at all n locations
agcttctaaaaaatgctgctctaggtactatttgaattgtatcgctcaaattacatgaccaactaatctagcattaatgtttggtttggttgtggccataaagcacatggcttttcttaataaccaagttaggttcatcaatgcatccatttggtgcctccatggataatgcctgtcattaattattgaccaatgaaatggaaaggggaaagacaaagagaaacaaaatcatgctgaagataagcaactacttgtaaattcactcatttggaaaacttgaaatgggccaggtatttcggctgtacgtggcccacatagtacaacttgaaacaccatttcttgaacacaacaaaattatttatagaccanaaaaagagaaacacaattacttcatattcttttgtccacctaaaaccactatatttcgttgacagcaaaccatgcttt

SEQ ID NO: 259034 - DNA, 323 bp, Glycine max
  unsure (1)..(323): unsure at all n locations
cgtcatgtgaattcctaacctcttattgaatatatatatatatatatatatgggtgattgtaatttaaaaataattaatacagacatagattatatcttataagagaaaactgaacatcatttctaatttaaatcttttataaataagaagggaagtagtataagtgcggaggaggtagtattaaaaatatatattnttccctccacttcngtcatggtggaaatgtgcggnctacacttacagatgcatatttccttcgtcgtttcctgtccaatattctggtgcaaattggattttaaagtgttataatcctaggaaatga

SEQ ID NO: 259035 - DNA, 453 bp, Glycine max
agcttcgtcctcagatccatcttgttggactaggctcaacttaagcagcccatgtaggtttagactaatttaaactaagcttcgtccgcagatccctcatttaagactaggctcagcttaaacagattacgtaagtttagactaatttaacctaagcttcatcctcagatccctcttgttggacttggcttaaattaaacaacattatcatcacaacatattaagaaaactaaaacttaatcctcagatcctacttgttggactaagtttcaatcctgcttctatgaagttctaaggcaacagtacatttctcaatgctaaagtcacctaactagacatacaaatgggtgatcagaccaagagcatgcagaaattaagcattgaaagaagcattgaacacaggaaacacaatcaattagatattaacataattacatcagctattccttagaa

SEQ ID NO: 259036 - DNA, 426 bp, Glycine max
  unsure (1)..(426): unsure at all n locations
agctnttggcacanagaagaagaagaagttcatagagattcaaggcttgtaaaggattctataagattaattggattgatagaaagattgattgaaaatgcaaaacaaagccttgcttttatagactcttcatgtctggtcacgagaaccatttagaagagttatgacttttagaaaaacttaaaaccaatttgaaaaagtcaaaaaccatttgaagagttacatcttttgatttatttagaaacaatcactggtaatcaattaccaaatcagtgtaatcgattacacaaagcttttatgtgaaaggatgtgactcatcacatttgaatttgaatttcaacgttcaaaggcactggtaatcgattaccaaaacattgtaatcgattacagctttttgaaatcaattggaacgttgtaaatttcagt

SEQ ID NO: 259037 - DNA, 188 bp, Glycine max
atcaatacaatgcctataggttggaccttccacaagtgtatggagtcaacaccacttttaacatttctgatttaattcctcttgcaggtggagctaatattgaggaggaggaaccaacagaattgaggtcaaatcctcttcaaggggaaggggatgatgcaatcctccctacgaagggaccaatcact

SEQ ID NO: 259038 - DNA, 440 bp, Glycine max
  unsure (1)..(440): unsure at all n locations
agctntntcctcatgaaacaagtcgaacctgatctgctggtcttctatggccatttatagtttcctcttccccatgtctaccacacggcttactgtagacataaaaggtcttccaagaattatgggaatgccaacatcttcttcaatgtctatcactacaaaaccagctggaaatatcaaatgtttgaccctaaccaaaatgtctataatcactccatagggtcttgtgatggagcgatcagccaactgtaaggtcatacgagtgggcattatctctaactctccaagtcaccgacacatggagagtggcattaaattgatactggctcccaagtcaatgagagtcttgcctactgtaacctcaccaatagaacatggtattgtgacactacctggatctttatgcttcaatggaaggatacattgtatgaatgcactgc

SEQ ID NO: 259039 - DNA, 157 bp, Glycine max
ctctaatcattgatggtggaagttgtaccaatgttgcaagcactagattagtggagaagcttggtttaaaaccacccctcaccctaagccttataagttgcaatggttgagtgacaatggtgagttggttgtggataagcaagtgttacttacattc

SEQ ID NO: 259040 - DNA, 398 bp, Glycine max
agcttcagcctttagtgcccatttctgctccaaatcgcgaaaggagggcattttcggagtcgtgaagcgtgtctctacgtgtgggacttcgaaatttcaggtttgggtggacttctttctcctttgattttcgtgggtatggggttttgggagatatgatgggtagtcttgctaggtttttgctttatgatgattatttgtgaagaaatttgtggaaagcatgttgaacttgccatgtttggatgagttaaacatacccattcagttttagggtttttatgatgatgcttgtgatgcttatgtgctgaaattgcttatggaaaactgttagagatgaaggatagagttaacctacggttataaggtgagagtatggtgttgtgagtggaaaaagagtg

SEQ ID NO: 259041 - DNA, 127 bp, Glycine max
  unsure (1)..(127): unsure at all n locations
tctatcaactggagcatatgtttnctcataatntatactctcttcttgattatatcacttggctactaatcttgccttatttctaataactatgccattntcatctaatctgtttctaaacacccat

SEQ ID NO: 259042 - DNA, 147 bp, Glycine max
tctaaacaaataaacacgagatgttgcaagtttgtacccccactcatacgagatcgattcacggatgactctatcacttaggactttccccttttctgtcaatgattacagggtgtattgaaactttagtatctatacaaggattta

SEQ ID NO: 259043 - DNA, 455 bp, Glycine max
  unsure (1)..(455): unsure at all n locations
agctntgtatttgtgatagtcaatgagagccctactaatgaatttaaataacaaaaagggttaagacaagggagtcatttggcgccttttttattcctagtggtgagtgaagtgtaaaatccacattactgattttaattatggcaaacctttagcaatgcaaattgtaagggtgatgagttttatatgatgactaacattatgctcaagtatttaagtgttaaacttactaagaagaagatgtgttcattgtaacaccctgacgaatcacactagaaagagatggatctagaggctttgcatgtatgagactgtacaattgaggatgacttaaaggaattaattggtactacctataccaacaagatgcatctactttttggtagcccatcacttaagaactccatagttaagcatgcttggcttggagtagttatgggatgggtgaccttctg

SEQ ID NO: 259044 - DNA, 118 bp, Glycine max
  unsure (1)..(118): unsure at all n locations
taatagcaaacaaagctagntatgacgatttccatactagttcttgaattttctgcaccttttcttttaatgcatagtacatgtactgatgttcatttctatgataagcataggtcta

SEQ ID NO: 259045 - DNA, 453 bp, Glycine max
  unsure (1)..(453): unsure at all n locations
agcttatatgtgtaacaccctaagatattattaattatatattgatgtttaattgtatttatcgtgttatttgactatatggttggcttgaatgagttgaggtatgacttgaattagtcatgtatgaatttcttgatgtggatgttgagttatgtggagttctgttgagctaagttgaaattatgagatttcaaattttacctaaacccatcttagtaaaatcgcaatctcggattcgntaatcgttggattgtcttcaaatgttttttggaggtttctaagacaactctccacattctgaccgttgggatctgcaaaataacatcttgagtatgagatatgactttntaccanagcagaaaaatttgaactggatcagttcacccagcgagtgttgcaggcctcaaatatgtccagcagcgtanaccaatcatcttcttcctccctctcttc

SEQ ID NO: 259046 - DNA, 396 bp, Glycine max
  unsure (1)..(396): unsure at all n locations
attcactaccaactaagcatccagtagaaatagtggttctgatgataaaataaatagtgattctgcctcacagttattagagtttactaacgatgcagaattaattatgtctttagcaatattaaacatctaaaagaccataatgaaagctaagttagaaaggttcacaagactatatgaatggtgcatgaacttgaatatcatatagcttgagttgtgaattgngagcaacttacttttggaaggccaaaagaacaagtcatgatttgttgtcacagcttcatggagtatattttatccctccaaatctataactanaggatctggaaaagctaaaatttccttttatttcaagagagaattatatatactgtcttctcaatcacttagaatact

SEQ ID NO: 259047 - DNA, 443 bp, Glycine max
  unsure (1)..(443): unsure at all n locations
agctngtcttacctatcaaacttaatgaacctgctttgatatgaacagaggaaggaaatgaggagacttttggtccaagatgcaagtttttcctcactcctaaaacagttctgtcgcagcgtgggctacaacaagatgacgataaaaagataaaaagaggtattccaaaaagaaaatctgggaaagtcgccactaacatttatttaaggaaaaggttgggaaaaccaaaaaggataaggaatggtacggtttgagaaaaaggattcgggagtcgtttacgtacggcgaaggtgttagcatcctacgcacctgtcatgaagatgacaacctttaatcaagtgtgctaaaaataaagtaacactttaattatatatttttcctttagaaaaagaaagncgaattttattttttagaaaaaaatggattttttttaggtcgacatg

SEQ ID NO: 259048 - DNA, 150 bp, Glycine max
  unsure (1)..(150): unsure at all n locations
tgtgcgggtctcttgtggatccgagaagttccacgtgcttcttggttacttgtggtattaatgggctgcatgggtatcttagtgggctgcatgggtgcctctatggtacttatctcgctatcaattcccncggtcttgaaataaaccttg

SEQ ID NO: 259049 - DNA, 524 bp, Glycine max
  unsure (1)..(524): unsure at all n locations
gtaatttcccggggacctgttntttgtgttaatgcaggaccgggatactcacaggcgagctgcggccttcaagctcgtttcgcatataataagacgaatcacttttatattctagagctgtaacagatttcatgtgattaattggattgatagaaacattgattgataatgcataaccatacctcgcttttctagactattaatggctgggcactagaaccatttagacatagatatcgctttttccaattaccttaccccaacctgacgaactcaaaatccatctgcagaaatactgttgtcgctttatacatactacctgactggagatcgatgaccaaaacaaggagatcgaatgcccaagagttttctgtgatatgatgtgactcatgacatttgaattccaatgttaacattctaaggcactgggaatcgataacccaaacattggactcgactacaagttatatacaaacaacgtatctgtgtggattcactagcaaccttttgctatcacttgtgcg

SEQ ID NO: 259050 - DNA, 238 bp, Glycine max
  unsure (1)..(238): unsure at all n locations
tagaaacacaattaattaagggttgaggacaaattacaatacaaaagagatataagattgattntttcatgattggaaaagggaaagagaggtgagagagaatacatttataacaaaactaanaaattaatatttatcagatgaaaaaaattacaattcaagtgcatacaacaaccatgagccaatacttacttttggtntcttanaatagaatgatgaanacaaaataacagtacac

SEQ ID NO: 259051 - DNA, 436 bp, Glycine max
  unsure (1)..(436): unsure at all n locations
agctngactttaacccattattgcttgtcctatcaagtcaccactcgctctaaacaaatccacaggatttgttgcaagtttgtacaataactaatacgtgatcgtcttatggatgaatatattacttagcactttagtcttttctctcaaggtttacaaggggttttgaaagtttagtatttatacaaagatttacaaaaagctttataagaaagaatgaaagaatatgttcacgcaagataattcgtatcttgcttctttaaaacttcttctatttatagcttccatcttcaaatatttgttgtctcacaacaggtggattcttcactatgttctttgtctgaagtcttgagctcgctggagaatttaacacgtccattcttcatgaaggttcatgctggtaggcaagcgtgccttatacttcaacagataaagt

SEQ ID NO: 259052 - DNA, 162 bp, Glycine max
  unsure (1)..(162): unsure at all n locations
cacgatccatgattcgatcatcttctgtgagaaatngaggcggaatgactggattaaccacaaacctctgcaacttatgcgatntaatgactggttcaacgtgttgtcgccagtgtagatagttggaatcatccaatttctcagctatcgttgtcggaaatg

SEQ ID NO: 259053 - DNA, 404 bp, Glycine max
aacttaagcagctgggctgcggcttgtgaaggagcagatagcccttctgttttgctataccatgatagggagtgtacggcggtgtcagatggcgactcttttactgctactggcgagtgacaagaactatacacacctctgatagccaatatggcatacccaccacccctctttgagtgatgctgatgagatttctctgacgactcagattctggagcaagactgatctgatcaactgactaagaatacagagacaccgatgttatccgctgatgaacaacactacaaagagatagacctagatgctttgacaggctgaaactgctcgcactatgatgacttactcgaccctcatcaaatcatcattactatcaagaggcttctccgcactattttcaaaaatc

SEQ ID NO: 259054 - DNA, 149 bp, Glycine max
  unsure (1)..(149): unsure at all n locations
acctgtaaccttgaaaaatatagntgccatcataccactaagctatcataactatttgatgaataaatgcataaattaatatatatcataaatgtactaattttctattaatcataccgagttatacacgtcaattagtgacttatgtg

SEQ ID NO: 259055 - DNA, 449 bp, Glycine max
  unsure (1)..(449): unsure at all n locations
agcttgttaaagaatntagaaaaaatctagaattagcttgttcacacatcgttcgcgtgtatgatatccactccacaaggtttgaagttgaggagaccttcaatcctattacgcaacgtggcggacaaaagtgggcagttaacttgaatggtcatgattgtcaatgcggaaggtattctacacttcactatccatgttcacacattattgcagattgtggttacgtgagcatgaactactattaatatatagatgttgtttacacaaatgaacacatcttaaaagcttactccgcacaatagtggcctcttgggaatgaagtggctattcctccttctaatgacacatggacacttatccctgacccaactaccaattgtgcgaaaggtcggccaaaatcaacaaggataaggaatgagatggattgngtcgaaccatctgagcaccga

SEQ ID NO: 259056 - DNA, 309 bp, Glycine max
  unsure (1)..(309): unsure at all n locations
atcaaaagatgtaactcttcanaaggtttttgacttattcaaattggttttaagtctttctaaaagttataactcttctaaatggttgtcttgaccagacatgaagagtctataaaagcaaggctttgaattgcttttcaatacattcattcattcaatcttgaatacttttccaatcaatctcttacaatcctttacanagccttgaatcttttgaacttcttcttcttctttgtaccaaaagctntatgaagttntctggtntctaaacattgaaaacttgtgctattcatcctcttcattcccttc

SEQ ID NO: 259057 - DNA, 443 bp, Glycine max
  unsure (1)..(443): unsure at all n locations
agcttccgttntcaatttggagcatctatcgattaattgcgacactctgtcgggcatccgagtaaaaagttattgttgtttgaattttctaagagtttccgttttgtatttgaagcgtctcgatatattacgggactcaaccggacatccgtgtataaagttattgtcattacaatttgttcagagcttgtagtctcaattttgagcgtctcgatatattacccgatttaatcggacatccgagtaaaaagatactgtcgtttgaatttgatacctgcttctgttttcaatttggagcatctcgatatattacgagactctctcgaacatccgagtaaaaagttatcatcgattgaatntgctacgaccttccgttttcaattcggagcgtctcgatatattacgggactcaaccggacattcgtgtataaagttattgtcat

SEQ ID NO: 259058 - DNA, 433 bp, Glycine max
  unsure (1)..(433): unsure at all n locations
agcttctagccaaatggacttaccgtgaattaattcctttgatagcccttttgagccttgtttccctttccttgttttgaagctcactacaagccttaaatgaaaaaccatgatatcaccatatccttaaggaatttttgagctttggaattgttttgggaataagtgtggggggtttttttttgtttcattggataacttgttttgctggctatgcttcatgatgtattttgggccatacttgatgtacattgtatattggttaaatgttggacatgctgaatgaaatgttgtttctcaaaggctatagagtaaaaaaaaaaaattcgaaaaaaaaaatcgaanaaaaagaagaaaaagaaaagcaataaagttgagtgaataagatcttaaatggcacaagaatgatgaaactctnggttctactctttat

SEQ ID NO: 259059 - DNA, 314 bp, Glycine max
  unsure (1)..(314): unsure at all n locations
caacaagtttccacatccacaatgcgcgcataaacncaccatcctctattggccacctncatctgagctcacgtactcccacgtagcccatatcctcgtttctctcaacaccgggtccccatcaatcctcccaagcttgcacaacatccaagcaaaacaaaattcanacagcacaagctatcacagccaagcanaacaggaaaaggcaganaactctgctcaacacaccaaccagaatcacagctnttcccacttaaagaccccagaacaattccttcgatcaattcttaaccgctgatcgactcaaatttact

SEQ ID NO: 259060 - DNA, 442 bp, Glycine max
agcttgttgaaccatctatatggcccctatgattgagacataaagcaagaggctgcattgaacgaaatctatcaaagcattatgacctccaataccaaagggacttttttgagtttgagaaagaattgaaattatagtgaaaacaaatattaaataacaaacaaagaaataaaagtcaaaaagctcaataccaaggacaaacaaaatgactaaccaacaaattcaataacacggaactaaaatgagaaaaacctaaattttctattatgactacagaaaaatgaatcattatcaccaccatagcagactgcaaaagagagatcaattcatatgaaccaccaacatgattggttgaaacacaaaagcaagatcattcttaagtatatatgtttaataaaagaagaaaataaatataaatatataataaactcttacatagtgc

SEQ ID NO: 259061 - DNA, 185 bp, Glycine max
  unsure (1)..(185): unsure at all n locations
atgaagataagctgatccgtgaagagaagtgactgagtgagactttttaaggttgattcaagacaacgccattttggagctttnttttatgagaaanacccagtccgagtttcaaaaaccagccaagttgttaggtttacacaaaaccagtcgggttcgatctggtcatcccgggccaaatgcat

SEQ ID NO: 259062 - DNA, 410 bp, Glycine max
  unsure (1)..(410): unsure at all n locations
agctttaaagaatgatttcatctattatgaggctttgtccactcttttgggatcctcctagggttgaaacaaagtagcacctatctatagaagtaggcccaagatttaattactggagaaccaaaatccaataaatatataaacattaaaagtcatataaattagttatgcgtttttaaaatgatctaagaacatataatagaaaatccatatacatagaagatattaaacatttttttaaaaacccaaagttataaatgacaatcctcaatttcatgtcaccaagaatgttcatgaatttataaaaaaattgctatatatgttttcttttttacgagaaatcctattagttatatttgaaaaatcaacttatatattntgaacagattatgttactaaataatgtttat

SEQ ID NO: 259063 - DNA, 176 bp, Glycine max
tctcacctcttatcctttgtcgttcgctgcatcttcatggtggaaaatcaccattaaaggacctcattgaagctcatagatacagcctccatataagcaccaccagacaagcttcatcatgttgcacattcaagccaaatcagtggttcaatgatttctctggtatcatgtcatac

SEQ ID NO: 259064 - DNA, 456 bp, Glycine max
agcttagtcaactcaactaagattacgctatgcaaaagctgcaatgtgtctaatgtctatgctcgagccaaagcttcttattagaaactcttgtgaggtttatagatacaatacaatttacaaacgtttgtatagaataagttacttaaagtactgacacgtatcctaatgtgatatcaatactccaccaatatgaatatgagaagtatccaagcctttaaaaaaaatagaatccttgtgctccttagataagaggcaaagtgaacaggatgaagcatcttgtatagaacttttggagtgtgtttctaaatcaaagagacatttagatcgcgatcttgataatcctaaaccatgcaagtctagaaagtcaattagttctagttcattattttcttgcaagtacagcaagatctcattctgtggcattgaagaccatctatcagatgactgttatga

SEQ ID NO: 259065 - DNA, 149 bp, Glycine max
cccggaatgggtttaggcaaagacaacgacggcataactagcctgataaatgccaaaggaaatcgtgggaagtatgggttaggctataagcccactcaggcagatataaagagaagcatcgcgggaaggaagagcggtagtcaaagctc

SEQ ID NO: 259066 - DNA, 457 bp, Glycine max
  unsure (1)..(457): unsure at all n locations
agcttgttgcactagcataaacaaggagttgagcaactgcttctggtcttgggtgtcatggcaatcctttggcatgaaaaattctaaaacaaaatcagcggaggcactccggagtggaatgcccagagcagcatgcaagccaaacatgttagcatgatgtgccagaggatactccgccttgctgaaggaagtaatgtcatttgcaaaacaaggtttggtggttgtgaaagctgtcccaactactccttgcccccccaaaaggtggcactcagagcacgcttccaggaaacccattagctctacatccgccacaaaactagcagcatacacagtcgacacataattcatctcatcgtttgaatgcccacatccactctntcctgcttgttggatgcagggagcccatgtcagagctaaaggcaagttatgcgccttgcatacacacgtcaaaacttgt

SEQ ID NO: 259067 - DNA, 145 bp, Glycine max
taccagcccatgtccttagatgacttcatctgccacatagacaacgcccttcagctcacagcataggtgagatatgttcgcttttatttatcagcgtctattaagaaaagagcaacttcgcaacatcttttgggataattgcaca

SEQ ID NO: 259068 - DNA, 452 bp, Glycine max
  unsure (1)..(452): unsure at all n locations
agcttgtcgttagaatcatagacctgtggtttgttgaaactaatgataaatttgaacaagctgaaatgattattatggatgaaaatgttgtcttatttaactttcttatgttaatagatattgtatggtgttataataatttgttttctgattattacctttggactatgatttttgttcttgcaggttgacaagattcatgtccttataagaaaagaggagttaaagacatggaaattgactctaaaggagaacaacacttatatgatgcacaactttaaaatntttaacaacgagggccagtataagctatgtttgcatccatataagttgatttttactggtgtcactattgtcatagaagtggacctttctaatatccctttaaaggcatatgagtttgcttaatttgttgatatccttgctagaacctaccgacgcgatttgttagt

SEQ ID NO: 259069 - DNA, 323 bp, Glycine max
  unsure (1)..(323): unsure at all n locations
taagaaaaatcttttcttgattcaagaacattcttttggaaataattatatttttctttntaggaaaaatacttgagtataaattatttttcttttataattcgctattggtagtttataaatgacttgataattgcaatcaaatgtcatgattggtctttcaattatagttgcataattgaatnttgantntatacttnttgggcctcctatcttatatctttgtcttttggtagtggtgtaaccttgtgatacttgagttgttgaaagttaacttcatggtactatatctggggagtggtgaaagagtatcaaattaaaca

SEQ ID NO: 259070 - DNA, 438 bp, Glycine max
  unsure (1)..(438): unsure at all n locations
agctngtcgttagaatcatagacctgtggtttgttgaaactaaagataaatttgaacaagctgaaatgattattatggatgaaaatgttgtcttatttaactttcttatgttaatagatattgtatggtgttataataatttgttttctgattattacctttggactatgatttttgttcttgcaggttgacaagattcatgtccttataagaaaagaggagttaaagacatggaaattgactctaaaggagaacaacacttatatgatgcacaactttaaaatttttaacaacgagggccagtataagctatgtttgcatccatataagttgatttttactggtgtcactattgtcatagaagtggaccttcctaatatccctttaaaggcatatgagtttgttaattttgttgatatccttgctagaacctaccga

SEQ ID NO: 259071 - DNA, 251 bp, Glycine max
  unsure (1)..(251): unsure at all n locations
tctcttcttttaattggtatattttaaataagacaaatcttttcttgattcaagaaccattttttggaaataattatattnttctttntaggaaaaatacttgagtataaattatttttcttttataattctgtattggtagtttataaatgaccgtataattgcaatcaaatgtcatgattggtctttcaattatagttgcataattgaatattgattttatactttttgggccttcctatcttataatc

SEQ ID NO: 259072 - DNA, 401 bp, Glycine max
agcttcctagaggccttcattgcaaaaccttggtggacctctttttttccaagactccagatacggacaggaaatgtgagttttcattcggccttttatcattattttccatttacttttgctaatgaatattactctttttctttggtgataataggcaagtttgactattgttccattaggaaggctcagattgaaaaggttaagaaggtccttgtggaaaaggataaggagaattagaaggaaaatccccaagatgacttggtgcctcctcctcctcctattgctgctagtgtcatcattcggggcgagcatgggccttccagtagtggtccttcataaaggcagaggttggagttggtgcctgtggttgtaccttcattcgttgagagcatccctac

SEQ ID NO: 259073 - DNA, 288 bp, Glycine max
  unsure (1)..(288): unsure at all n locations
cagctataaatatanattaatgagctgaagaccaatgaagaactgttgaaggtgttagtacaatctaactactggagaaaatatggaccaatagaaattntagctgtctctgctaaatatgttgtgaaattcgaagacgaggtgactgcgacatcgctaaacgactgaatgcaatgtttanttttttgctttntcgttgatgtaaactntatctatntacggtgtgtttaaatcccataataaagttcaatgtgttatttcaatggtccanagaataattttttaatt

SEQ ID NO: 259074 - DNA, 425 bp, Glycine max
gccgccgcatgcaagctttctttacaacaaatgaaagagatagatgaaagattgcagaaataaaagtggtggggatgtctcctccacctcttggacctctcaatcactcataaactcagctcatgctcttaggacaacttccttttccagctttggtctctacagatcttcacacaacaaaatctctcaaactctgtggaatttggacctctcaagaaaaatggccaaactcatcctctaaatatgatttcacgcttaaataggtggctttgttcgtgctcgtgcgcttagcacaactctgatccgctcagcacacattagtgaatatcggcttaacgcgattttttctcgctcaacgaatgaaatgaagcggcgcgcttagcatgatgacccttcgcttagcaaacatgcacaactcatctttc

SEQ ID NO: 259075 - DNA, 290 bp, Glycine max
  unsure (1)..(290): unsure at all n locations
tccctcttgtagactaggcctagactaaacaacattattataacaatataattaaaaccaaaacttaatccgcagatcccttntgtaagactaagtttcgatcctgcttcaatcaagttctaaggaaataatacatttcccaatgctaaagtcacctaactatgcatacaaatggatgatcataccanaagcatacaaacattaagcattgaaggaagcattgaacacagaaaacataatcaattagatattaggtatttacatcaattgttcattagaaatccccaact

SEQ ID NO: 259076 - DNA, 448 bp, Glycine max
gagcttgtaagttacacaatagagaaattctagtgaaatattatgcatgcttttgtatgtaagcattgtattagattatgtaactactaccaactaactgtacttaggataggtgtgattctctttatatatattcctcatcctatatcaccacttattatcttagcatttaacgggcttaaagaataattgctcttgacaaatattagggagaacaataagtgcttcaattctttcacacatgatgaaatgaaaggtaggaatctttttaggtttcaacagcagcaccaaaggtaggatccacgatgtaagggcagccccatccgattttgatctcagattgtgctacaataacgagcttgaaaatctacacatcccctattaaagaacgtgcagacatatcccagctagctgggaatacgctcgtagtgtatatacaagacataca

SEQ ID NO: 259077 - DNA, 362 bp, Glycine max
attgtcacatcacctatgtgatgtgaattctcctaataactgctctaatatatgaaaatactgcatcatatcttactagaatatcttacactatccttacgattagtctctctctatctgtcttgaatttgtgattagctgccatatttctttatcttatcatgacttgttttcttaattcggattatgattagcatataagggttagtactataggtcttatgaatatatccaatcaaatatgcacgatgttaaatacatctcagttgatatcaaccccagggttcattctcatttatctctcttcctccctcatatctacaagagataatttcaacataattagatatctttggtgacac

SEQ ID NO: 259078 - DNA, 449 bp, Glycine max
  unsure (1)..(449): unsure at all n locations
agcttcttacatagtccgcctttgcttgaccttctttatgcttaanaacagaaacattaggcataggcaaaagatcaagaggagttagtggattaaaaccataaacaacttcaaaaggagaacaattagtggtgctatgaacagctctattgtaagcaaattcaacatggggtaaacaagcttcccaagtttttaagttcttcctcaaaactgtcctaagcaaagttcccaaagtcctattaacaacttccgtttgcccatcggtttgtgggtgacaagtggttgaaaataacaatttagtgcccaacttgctccacanagtcctccaaaatttttttaggaacttagagtccctatcactaacaatgctccttggcagaccatggagtctcacaatctccttgaaaaacaaatcagccacatgggaagcatcatcaactntnttacat

SEQ ID NO: 259079 - DNA, 197 bp, Glycine max
  unsure (1)..(197): unsure at all n locations
ccttgacccagtgtgataatgtcaatccttaccctcggaagcaaaaaaagaatagaggggaaatttccaatcaaagaanaagagaaggagaatttccaatgaaagcataaaaagaaaagaaggaaaattccccaatcaaagagtgggagaaagcaaaaaaagataagaaggaaaattccccaatcaaagagtgggag

SEQ ID NO: 259080 - DNA, 452 bp, Glycine max
agcttgtacacagtgaagatgttgttagagatatattgtgatcacatctaaatttcataaagctattaaattcatttctaacagtgttaatatgtggtgttataagatgaacaattttggggacaaaaggttttgaggatgttcatcttataagtaatattacatatcgacaccacaatccacatttcaactttaaaataatctaaattaataattgagatgttaacaccaaaatccacacttcgacttttatactagacccgtgttttatcttttatatattacaatagatagataaacagatatgactagtacctaaaatcggtatgagagatatcaaactgcatgcaatacttagaacctgaaacacattgaccaacagactacctttagagaatatagtaagcacagaaagaactcagcgtaatacaatactttgtgcctcgaaaaga

SEQ ID NO: 259081 - DNA, 263 bp, Glycine max
aaaacaactaaaatgcacagttttaatcacataatatttaacataaattactttaacaatgatttgggcttattttttgtatttacagaatccaccatgaagtctcaggacattgctatctatatctactatttagaaatgtatggaggtgatgtgtgtatagtggtcaccactctatatgggaattgggattaaccgaataatatggaatggaactatattaagtgaaaactatctaacctacttaagcttttttatacttg

SEQ ID NO: 259082 - DNA, 376 bp, Glycine max
  unsure (1)..(376): unsure at all n locations
agcttgatttgtgagttgattttagccttagtttcactctggttattagtcaattcattcaagggaacttttaaagaaaaacgtccgattgatttttttgattattttattcaaagatattttgattattttattattattttttcaagatattttgattattttattattatttgcctttttttgatttaaccgaggttacaacgtgaacaatcagttagattttgttttaatagtgattaaacgagattacaacacaaatgatcggttgaaattcattttatcaattattaggcgagataacggcttaaataaacggtaaaaagctcgttaaaagcggaatanaagaaaatcgaaagtgaacgagatgaagatg

SEQ ID NO: 259083 - DNA, 193 bp, Glycine max
ttctcgctaagccaatctgctatcttagcgagcatctgctaagcgcaccacccatgggctaagcgccaggaagactctataagaagatgagttgtacaggtttgctaagcgaaccgcttcagtccatacgctaaccgagaaaggcacgcactaagccaaaattcactaatgtgcgctcaacggtccataattg

SEQ ID NO: 259084 - DNA, 409 bp, Glycine max
  unsure (1)..(409): unsure at all n locations
agctngcaatntatcaaatacgactctgacttgttctacttgactaaacttgtaaggaatcagtaattagaggtttttattattattgaaaattactatgttatgggtgtattgaaaatcattgtgcaaatgagttaataatgctttttaataaatatatttttatttttaattcattaacttaacatttgtaagtttttgcaatttaaatatcatgtcgaaagagagcataaactttcattttttacattcctatgagctcaattttttttcatagtggttgtatactattattgctaatgtcatatgagccgagcccgctttgctctggacactgatccagaattatgggccagttaagttacaatgcccncaaaattaagttcttcaaaatgtacatttaagactc

SEQ ID NO: 259085 - DNA, 163 bp, Glycine max
  unsure (1)..(163): unsure at all n locations
gtctgtgtctcctgccacanatatagacaaattaccttcatatgccttattctctttgctattggtttcacgacccaaggttatcccgcttctattctcttctttccactctnnttcttttttgttatctaattttactctgttactttatatatgtcatata

SEQ ID NO: 259086 - DNA, 427 bp, Glycine max
atacttaagtcacctgctgcatcaagcttctacatgctgaatgaccttttatactgatatggcaaatctcaaggccacatgagttattcttgagggactcacttgccatcagaagaagaaatcctttaaggatgctaatcattatgtgtgggatgatcctcactggttcaagattggagcaaataacttgatcagatggtgtgtcattgaagtggaagccaagagcattctttggcattgtgacaattcaccttatgggggccattttaatggagaaagaactactgccattgtctctaacaagtatttttctggcccataatactcatagatgcacatttgtgtgtgaaacaacatgagtaataccaaagaacaagaggaatctcatgaacgaatgagatgcccctgaacaacattattgaagttg

SEQ ID NO: 259087 - DNA, 162 bp, Glycine max
  unsure (1)..(162): unsure at all n locations
attcatttccttcatggtttacaacaaacaatgaagccatatgtcagtcagtcacatggatcaattgatgccactatgctccatcaaaaacccaattttcaataaaatntatcaatcaacaagacattttcaaaagttccagtgaatatactgctatataca

SEQ ID NO: 259088 - DNA, 440 bp, Glycine max
  unsure (1)..(440): unsure at all n locations
tcttatctctcttggtgttatattaaaacgattatgatatctttcagtaaaacgagtttgacacttataaccattttctctggcaatctcgcttataggttttaccgtcgtttgtatagcagacaacgcattatttaacctcacatcgtccagtatactttggaaacttaccccctcgcttgctagacggcgatgtaatgtagaaacagaaatgtagagatatcgagcaaccttgtttgctgtccattttgtgccgggttcggatagcagcaggttataacaacgacttatcaatgattggttactatatgataaaagtaaatgaataacatgattcactcctaacgaaagtagaacgcccattgctaaagtgctcctgaatttagttgagaagcctcgggaaacagatgttnnntatgtgctccaacaatatattaact

SEQ ID NO: 259089 - DNA, 308 bp, Glycine max
aacactgctaattttattctagactttctttgggatttttggttggacagtcattttaagctgagtaatataatgctaaaaatatatgttctatatataaaatacgactggtcataatcttacatttagctaggaggcgatgaagtaggcaacttgggaggactctgccatgacattttttcataaatcgttataattacattagcctagataaaagtttatcatataatactatgtgttggttctttttgtgatggtctgaacgtaattttctataggaagaattgctctatagggatgtttatttc

SEQ ID NO: 259090 - DNA, 467 bp, Glycine max
  unsure (1)..(467): unsure at all n locations
tcattnttaatattctctacacaaaaacttatatgatgantaatttttatgtatttgctcaaaaaggaaaaattagaatagaaaaattacaaattcctctataatttaacccccaaaatatactcataattagcatttatcagttggattgtgattttagaagttttaaagcctttttgttcaacaacaaagttatcatttgaagtataagcttaacaaaattgataatagatttttgtaagacaaattcatatgatagaaatagatgttgcaaaacaaaataagtttttcaaaaattaaattaaattcaaaccctaagccaatttaatacagaagataaacaaaaagaatataagacacaaagatttatattggtttgtccctaccactaagaatacattcaattcttagttaacctgatgcaatcctacccccaagggcattggataaaagacttcatgaagatt

SEQ ID NO: 259091 - DNA, 447 bp, Glycine max
  unsure (1)..(447): unsure at all n locations
gttctagagagagaaaggtccaagttccttagagttctgagttattttgctgngtgaagatctgcagagacacgagttcaaagcgaaagtctgtttgagagattgagatgagtttatgagtgattgtgagatcctagaggtgaaggagacatcctcaccacttgtgtttttgcagtctttcatcttgttcttctctttgttgtaaaggaggtttctggacgatggaaagctaaatcctctgttggatctttcttgtaggtacttgatgtaaatatatttctatctatgtaatgatgttttgtgtgttctctacttgtctttacacagtatttctctttcatgattttctttccttttgcctagatagtttaaatacctgttcataaccacagtcatanttttataccagacgcctatttatcgaaatagcttgccagataacgcaag

SEQ ID NO: 259092 - DNA, 417 bp, Glycine max
  unsure (1)..(417): unsure at all n locations
ggaaacaannanaaagnaantctaaagcctattcatgttatttccacttatgtctttagagctgctacaccctaacatgtttggatcaaccacgattgcctcctttctcgatgcaaatatagaattgatatagcggaaaatcatgggccacgctcctaacccatacgaataagccttttgataccctttataaattctataaaaagaatcaaaatgaaaaaggcatctgtatctcttcaatcaaaagtgaccattggggagagattgaaaatgatatcttcaaaaaacattgagaaaagaatggtattcatcacaattgttcgactctaagaacaccaccatacaatgaagtcattgagagatgaaatagatctattcaagaaatggctacgaccatgcttagtgaccaatcaacct

SEQ ID NO: 259093 - DNA, 370 bp, Glycine max
  unsure (1)..(370): unsure at all n locations
tgagtattangacatgtttgagagggtgttattaaaaatataaattggctgccccatgaggaataccttgcacctaggtagcatggaaaatacctttcaatggtatgtatatatgtgaatatatatagtatgaaaatgccttgcctaatatgaatatatatagcatgaagtgccttatcaagtgttggatgggtagcgtaaaagtgttttcaaaatatgtcgtattgtgagtaggtaatataagaaaccttccaaaaaatgtgtgatatataatatgatgtacatgaaaaggttgtcaaaaaatatgtcatgataggtgtctaaaatgcttacacaaatttttatgtgtgcaatacgatgtgtataaata

SEQ ID NO: 259094 - DNA, 322 bp, Glycine max
  unsure (1)..(322): unsure at all n locations
tctattctgaatttcaagcatctttatatactacgggactttatctaacatccgagcaaaaagttattatcgtttgattttgctcacagcttctattatgaatttcaagcatctcgatatactacaggacacaatcggacaaccgagtaaaaagttattgtggattgattntgctcagagcttctgttctgaatttcaagcgtctctatatactacgggacacaatcagacatccgagtaaaaagttattgtcgtttaattntgtcagagcatctgatctgaatgtcgagcgtcttggtatactaccggacacaatcggaca

SEQ ID NO: 259095 - DNA, 295 bp, Glycine max
atttgtaagactagtcaacttttctgcatgcgtgttactgtatgatatctactagcaagaattctgatttctatgtgcataaaggtcgtctatcagaggatgatgcacgattctatgcagctgaagttgttgatgctctctaatacatacataatttgggagtcatacatcgcgatattaaggtagttccgtggcatggatatactgcatcattgcatatatggctatgtgaatataaaatttctcaactgcagccagagaacttattacttacagctgaaggacatattaaaat

SEQ ID NO: 259096 - DNA, 422 bp, Glycine max
tattcgtgaccgcgtgaccctctttctatcctctactgatattgtgtccttagctcatgacaaccctgtagcaatatgagctccatcttccattcgagacatgccactctggatcatatcctcaaattctatggccatccctatcaccatagctcttagagggcaagcccactcgattcatggacaagccatgacaaatgatgatggtgtggtgaacatgactgagtcaatggctctacaaatggcgatgggattatggtagtgtctgatgacacaacatctacaactattggtccatatgctgacatgggtggtgaacaaatatggatggatgtgttgcatgcaacactggagcgtggactcacacccctctcttggactgagtacgatgccttatcggttggaggaactctcttcaatgc

SEQ ID NO: 259097 - DNA, 317 bp, Glycine max
  unsure (1)..(317): unsure at all n locations
tagtgaagtggctatgaggtttatcttataattcacctcttctatgcancacttcaacataaccccagtatgtttataacaccattctgctctctttcttttcacaggaacttgattgagagacatttcacaagcttaatgaaacagacaaaagtataaccctaatccataacaattcaaaatttaatgagaagaaaaagaaattaatgaagaattggttaacctgtgatgctaacaaaggaagaagaagaaatgatgaacgatgatcgaaagagatgaggaaggagatctgaaaggatgatgaacgagattgtatc

SEQ ID NO: 259098 - DNA, 264 bp, Glycine max
  unsure (1)..(264): unsure at all n locations
acagccttctggaggaatcttctggagggccccacagggcctggtttctatntgcacccccatttttactaagtacacccccctgccttttcttggtgattcttttttgcgaaagttactaanacttaccaatttcgtaacgatactggtttgctttccgtaatgttacggaaccttgtggattatgcatcaatattttcttttgttttccggcatgtaccgaaaattcacaaattggctaacgatgggtgccaagcacctcac

SEQ ID NO: 259099 - DNA, 278 bp, Glycine max
gctcaaaaaggggaaggagaatccttaggtcgccttagcaatctaacaagtccaaacccaggggagacacataacagcctagcatacattatggggctccaaaaaagggaaatgagatgcttggggcccattagcatctaaaacactccaacttgagggagaccaaacacctagcatacatattggcttcaaaaagggaaatgagatgcttaggtccactagcatttaacacaatcactctagtgagacatacctgtacatacatctggctcaaaagg

SEQ ID NO: 259100 - DNA, 385 bp, Glycine max
  unsure (1)..(385): unsure at all n locations
cttcctcatgcaacaatgtttanacctcagactaattatgatttctctcttcgggagatgtgtgcatattntcctgcatctgctgtaaatctactcgagactttattgtcgattgatccaggcaaccgagggactgcctcatctgccctaatgtctgaggtaaagtccattgattttttattatgtgtatgattatgtatccttcattttccgaagaattcttatatatattatattgtgacaaagagttggtgttctaagcatatacttcatagctgttattctaaagatgttaggttattatgttgtccaatggatttctgattctattttcgtggtataccctttacagtatttcagcaccaagccatatgcttgtaatgca

SEQ ID NO: 259101 - DNA, 422 bp, Glycine max
  unsure (1)..(422): unsure at all n locations
cttcaagaattatggcctcatcaaactacttgtttcccgaggtgttattctataaatagactctcccatctntaatggagtgggttaccactactggaaaacccgcatgcaaatctttatagaggcaatagatttaaatatttgggaagccatagaacaaggaccttatgttccctctataatagccgaaagtgcaacgatagaaaaacctatagcagattggactgaggaagaaagaagattagtacaatataatttaaaggccaaaaatattattacatctgccttatgaatagatgaatactttatggtttcaaattgtaaaagtgctaaggatatgtgggatacactacangtaacacatgaaggcacaacagatgttaaaagatctaggataaacaccttaactcgtgaatatgaac

SEQ ID NO: 259102 - DNA, 483 bp, Glycine max
  unsure (1)..(483): unsure at all n locations
ctcgtatcanaatcatagtccttctcactactattagtaagatcttcattnttctcagtgtggtttctggtttctttggcttctctagcttctgcagatactttatgtaatgcagaagctgagctttccattaattgcctttttactcttttcttctctggctcctgttaagcctatactgtataatatatataagtatggatctactatcaaataggaacaattacatgatgcaggatcatcatttattttcctgaccataaacatacatgtatggttattgtatatgataaaaaaattaaatttaaatagattcatatatatatatagaggaacataaccaatcatgggaaattaatgtggtataattaacttatttacgggagtattgaaaataaaaccctacataatatgtctaagtaacgtatgaactctctaaaagtatagagcttgctattcgtgtgttcacaatgcacacaacaa

SEQ ID NO: 259103 - DNA, 490 bp, Glycine max
actccagcttctatagaaggttcgttcctaatttctctacaattgcatcatctctcaatgagctggttaagaagaatgtggaatttacctggggtgaaaaacaagagcaagcctttgctttgctcaaagaaaagcttactaaggcacctgttctagctcttcctgacttttctaaaacttttgagctagaatgtgatgcctctggagtgggagttggagctgtattgttacaaggtgggcaccctattgcttattttagtgaaaaacttcatagtgccaccctcaactaccccacctatgataaagagctttatgccttaataagagccctccaaacttgggaacattaccttgtttccaaggaatttgtcattcatagtgatcatcaatcacttaagtacattagagggcaaagcaagttaaacaagaggcatgcaaaatgggtagagtacctagagcaatttccatatgttatcaaatacaaaaaggg

SEQ ID NO: 259104 - DNA, 407 bp, Glycine max
  unsure (1)..(407): unsure at all n locations
catagaataaacattcgagtttcagacctcctaccgttgtttttacaaagcaatttttttatttattagaatcacctatttctccaatggtatggatgaagattctgaaatgtgttacttagcaaaacttcaatatctaacaaaatgacaattacagaaagggtttactgtaattgtgtgttgtatcacacatgtatactctcattcataattgaataacagtacagcctatggaaacatacatcagactatcaatgacaataatccctaattatcacctaatggtaattccctaattatacggatcaaatcatatcttcaaatacaatattgactgttcattctaaaacataagcatatgaactaatctcatatctgtccttctgttgagtgttnctcctacccta

SEQ ID NO: 259105 - DNA, 297 bp, Glycine max
atctgatgaaggtgggtctgaataaaatattgcaaactatttccgcgattaaaattctatttcactttctatccaagttacaaagtcccgtaaaaatgaactcttatataatgattccaatagaacaatctgaatatatatatttaacaatcataaacataagagtttaagggaagagaaagtgcacactcggagttatactggttcggccacacccttgtgcctacgtgcagtgctcaagcaacccgcttgaaagttccactatcttggtaaatacatctacaagttctgaacaca

SEQ ID NO: 259106 - DNA, 157 bp, Glycine max
aaacctaaaccataaaattctgacagaaatgttacacgtgaaagaacaccgaaagaatctataacgacatattctcctatcagagtctcgtcataaaaatcatggataggcatgaaacttgtcgaggcagaatgcatatgatgcgtgggatgatata

SEQ ID NO: 259107 - DNA, 471 bp, Glycine max
  unsure (1)..(471): unsure at all n locations
aactaagcttgggaaaatgggaaccttgtttattcggaatgttgtaatcttctggaaccctatgaaagagtatggaagggagtataagagtgtccagactcctataatgtgtgcagcattctagagaatcaatatccaccctaggatacaagtaatctccaccattcattgtggaggtggagtaatataaataatggtaggagtcttcattcctaaccattcaagacaaagagtaaatccacttcttagagtgagaaaaagcctctttgagagataagataaatatgctgggaagtctctatcctcaagcttgagtgaaccaccatagagtgagtcaattntgtaaacacatccttgtaaccctactattcatttgtatagtgcgagaatcttcatattcgagaattatattcgcgtgatcccatacttaccttaatactaagtgcctatctaacttcacgaagcgagaag

SEQ ID NO: 259108 - DNA, 448 bp, Glycine max
  unsure (1)..(448): unsure at all n locations
ctataaaactcaagcttgacagcccagatttctatagcagctntgngacactaattcaaattaattcaagatgacatcttgcacatttgcacagcctcagctatntcttcaatgtgtgttatgtgcaagtgtagcttcaaaactgtacccgttattgttacattgttggcaactacttttcttttagaacaacttgttccttgaaaattgggtgtctactttcaccctggagcaattacttctaatacattntaagattntggtaacaataagtattcctaaaatttgtccccattttttgtagttctctatttgtctagtgtggtgagcagaaaggaattatctgcaagggtctgttctgttatgggagatagcatggtgttcatgacttcactgaaatgttctccacatgagttaacgcgttttgtaatatttattgatgttgcat

SEQ ID NO: 259109 - DNA, 419 bp, Glycine max
  unsure (1)..(419): unsure at all n locations
gcttcttgttcgccacctaaaattcttattggtattggcctcatttgtttctcctttcttatctatgtctatctattcatataatataattgagggggaaaaggatatgcaaagtaattgtttccctctttctatttattttttcttcatatatgagatctttcggtaataatgcaattttatatgagatatccaccacagtggctggctctgggtttgtattgagttatgatctgagccagaaactctgtcctagatccgaacctcacttgtaagcgaagctactctaaaccaacaaacacttatataaatatctaaataaaattggagagggaccaatattntattgaaatttaacctctactttcttcatatgtaatttccggtggaccggactccactctgnttgatgtctctga

SEQ ID NO: 259110 - DNA, 342 bp, Glycine max
  unsure (1)..(342): unsure at all n locations
gactagaagcctatgaggtgtttcctgagatttttatatatgangatgtgtttattggttcatctagcactaatgggagaagcagaatctgccaccttccaagaagcaattaaaaaggaagtatggttagaagctatgacagaagagttgaaagccatacagaggaacaagacatgggagctagctagtctaccaaatggcaaaatagctatagaggttaaatgggttctcaagacaaaactcaaaccacatgggagtattgctaaacacagagccaggctagtggcaaagggctttatgcagaaagaaggatatgattacaaagaagctnttgcagtagtg

SEQ ID NO: 259111 - DNA, 284 bp, Glycine max
  unsure (1)..(284): unsure at all n locations
tttaatataaatagccctcttcttgggcttgttttggcatttatatataggtttagcttgtatttcaggatttgagtagtcttgtagtgggactttttttgattttatgattntgcaaggggtgactatttttaatggngtggtagtaacttacctttaagaactttaaggagtgactactttaatggtggtgtactagcttacttctaagaagttttaaaactttaagaagtttttaaaagctttaggaactactattatataaacatgctaactgtgaatta

SEQ ID NO: 259112 - DNA, 439 bp, Glycine max
  unsure (1)..(439): unsure at all n locations
tggaccttgaacacgcaactaactcctctntcaaaactatgctatgagctcgtgtttggtccctctcttcccttcgcagcttgagttcactattgctaccccacagagctccgcgaaatttattccggccatactcttccttgcgagccctcttggtctcttgttcaagggcccttgtggtagttgcattctcttcccgtaacccggcacactcctttcgaatgtgtgtagcggccaacttgaacttctccttggcaagtctcgcctttcctaactcgctntagagagcttggacttcttcgtcctcttccagtgctgcaaaactctcttcgctgacgacttttaacttggcgagccaatctaaacctcgtatatgaactgtcagccattcgtgggacccaccaataatgccattacgaatgcccctaagctcttgatc

SEQ ID NO: 259113 - DNA, 298 bp, Glycine max
  unsure (1)..(298): unsure at all n locations
cttcaagcccttcatggaggaacgcattgttgacatccaattgtcgcaagtgccattgattttgcgcagccaatgcgagaagaacacgaacggtggtgagtatcgacaccggagagaatgtgtcgaggcagtctaacccctccatttgagtgtaacccttggcaaccaagcgtgctttataccctnctattgaaccatccgccggtattaatcttgtaacccatctgatccaatagngccttgtaggaggaaatgtggagtctcacgtgtgttcgctgcaagcttgaactcggcttat

SEQ ID NO: 259114 - DNA, 395 bp, Glycine max
  unsure (1)..(395): unsure at all n locations
ntgcagatntagttntcgccggcttaaagattgaagntggncttattaagangcaaatttggttatcctgctgtgatgaatgagaaagctagggcaaatgaagagaatgagaaggagggaggaacccatgttgtgactaccattcctgcatggccaaatctcccaccagctccacaatatcaatactctgccaatatcagcccttctcattacccaccacccaatcaacgacaaaggtcatccctaaatcagccacaaagcccgcctgccgcacattcaataccagacacataccaaaacacccaccatggaaggaatttttcagcgataaagcctatataattcaccccaatttccgggtcctatgctaacttgctcttatatctactcgataa

SEQ ID NO: 259115 - DNA, 448 bp, Glycine max
  unsure (1)..(448): unsure at all n locations
aactgtcttatgttccaaatagcatttgtttgtttttagatgactgtttataatatgcaaggaagcgaccatctcgataattntaactgaatcatcttagacttacaaggtgttagaggatattgatgatgaagatcaagctataattctattatgttcctggccaaaatcatatgaagaatttgttgatactaccattcttggagaaaataagattgtgtttggtttgcattttcattttctgttttcattttctgaaaactattttcattttcaaaagattaaaattctgaaaatatatttgatttgacttcttgtgcgctctgttntttgtcgaaggagagaaacatgtgaaggaaaggaagacaatgtatttctagatctgtttaaaattacactccttgtcaccgcgttttcattttaatcaaaatgaaggttatgttaaaca

SEQ ID NO: 259116 - DNA, 462 bp, Glycine max
  unsure (1)..(462): unsure at all n locations
acatggagctacatcacaacctccgcaaaaacaagatatattttctngcccaacatatcaaaggtgtaaccaacaccattgctagcagattttcctataaagggaagtccaatcagtcccgtaagcatcacctccataccatttgggacattgacatcaattgtgttgatgcaccatcaccacgaagtctccttcccatcatatttacaaaaagagacttcaagggcatcaaccctatcaaccaggacaaccctatggttatcgccatcataattgccaacttcatagtgtccaaggtcctcattgaccaaggtagctccatggacatactatactagaagacattctagaggctcgaagtctcatttgatatagtccagccacactctggaccactcctcggctttgctggagaaaaagttgagaccaaaggctacatcgacctaatgactaccttcgatc

SEQ ID NO: 259117 - DNA, 477 bp, Glycine max
  unsure (1)..(477): unsure at all n locations
ctgagacacaccttcaccaaagctcagacaaatatgaatattctttacaactttccctatgtgttggaaccaaaaacaacaaccatccaataagctataaatttganaactctagcatgggatgaattattaggcatgctaagagttcatgaagttcatctttagaattgagatcatcttccagagagagattccatagcccttaagtctggtgagactagctccaaacaagaagaaaagaaaagctcttttaaagctcttaaagtgtaaatgattgagtttgatgggttagataatagttctagagattccacagatgatgaagtggctctcatgttcaaaaatttcaagtggacgatgacaaagacaggatagtgtcaacactctctccaaagaaaagacacacgagtgaataagaaatataatgaggaaaacaatgagatcatctgattcgaaatgtgaaaatttggacacatg

SEQ ID NO: 259118 - DNA, 237 bp, Glycine max
  unsure (1)..(237): unsure at all n locations
tgacaagcgggctttgaccgtgcatatacgcacacggagaatggtatccacatccctgagattgaagatatgattgatccatacatgtatcaacttccatgagaagcatccataatataatgtacattgagatctttcatcccattgattatcagagtgtcaatagtgagattgtactttantctcaactagggttcgtcccaaataccaatattagatccatttaccaactttcat

SEQ ID NO: 259119 - DNA, 375 bp, Glycine max
  unsure (1)..(375): unsure at all n locations
gtggatcaacatgaagcaatagttctttatgaaaaaaatggaatgtggtattctatttttaatagaggaagaaggcattcgatttaccaaaaaacaagctgtcaaaactgcatcaccccaatgccggacaggtacattggcatgaagtaataatgttcgagcagtctcaacaagattcctattcttcctttcggcaatgccattctgttgaggagtatgaggacaagaagactgatggagaatgccctgcgctgacaaaaaagaagaaatagcacaagaaaagtattctttcgcattatcacttctaaggatcttaattgtcttaccaaactgagttttaatttcattaacanaagaaagtgagaatcgaaaaaa

SEQ ID NO: 259120 - DNA, 411 bp, Glycine max
  unsure (1)..(411): unsure at all n locations
tccgagcagcttatcaatatgatacctttcacgccncttgcttcctcaagttcaccaaagcatttcgagcaactgcctataatgatagaagaaatttgaaataatgaaagacagctcataatgtgtagccaatggatttactaaaaacaccttaataatattcagatgaccaatgaggtcccaaacaacactcaaagccaattatgactaatacatcttattatttatacctaatgcataccacacaatttgttcaattccacactccatattactcctaattatttgttccacaaagcaagactaaatattcaccttcaatatgcaagaaatatgaaacagaacagccgacaatgcagtgttgacatcttaaatggacacagtgagaaaatagactactactgaagcaac

SEQ ID NO: 259121 - DNA, 432 bp, Glycine max
  unsure (1)..(432): unsure at all n locations
ctttgcactctcgatatgtgtgaacagataatacacgagnatgatttatgatcacagctcgaatgctgccttttttcggatcctgtaaaacacagttgattatttgaaccaaggacaccgaagttgggaactgcaaacacagttggagaaaatgagcnaataccttaagcttataagcattggccacacaaacgcaagggttttcccagagccagttggtgcacaagcaaagcattcacgaccctatccaaataattgaagagatacagcagcgaanacaatattatgtttaatgcctaactcaaggacaacataatttgcatataaaatcatgatcaaacttcagtaacaactctctcaagactaaaaaattaaaagcagaacaattatagcacagacagaaaatccatacttgtaaaagtactggtatag

SEQ ID NO: 259122 - DNA, 378 bp, Glycine max
ttctttccataccaagcttcaattggagtctcatcttttaccgacttagttggacatctgttgagtattgtaacagcagtgtagactgcttcagcccagaatgtgttaagtagtacctttttcttgagcatcgatctatccatttccataactatgcgaatctatctctcggataatccatcttgttgagaagaatatgcgactgtaagttatcgctcaatgccttcatcctcacaaaatctttcaaactcgcgagaggtgtactctttgtcgcgatcacttcttagtacttttatccattttcactttgatatcagcagggccttggaattttgaatctccaagactgttgattttctttataaaaataccatgtca

SEQ ID NO: 259123 - DNA, 311 bp, Glycine max
ttttcagagagaccataattcgggtcgtattgttgtcgatatttgtgtcaagcctgtactgtaaaggcactatgaacttgtgcatctatatatgaattattttttagaagctctttaccattcatgttaccattcagagcattattggcaaccgcatattagtacattcggattcattcctaatagtattatgtaaaggccactttgactcgagcatttctgattgaagctccacttgagcctgtacgcctaggaacttcttctataatgactctcttgcttctaggcgattaatggctccgtatgcggaa

SEQ ID NO: 259124 - DNA, 438 bp, Glycine max
  unsure (1)..(438): unsure at all n locations
actcagcttatggaaacttcttntccttctccatttaactcttctttctctcgccttntgttacttttatcatagatagtgcaagtatctccttcaaagtgaagagaatagcttttctccatcatttgtccaatgcttgagaatttctttaagattgggaactgataagacatctttgtgaatcttgtacctttctttttctccaccgtgacagtgctttttccttttgattctaccatggtgccatttcccaatcaaactttgactttgacaatgtcaccaatttccttgaagatgcttctatcattagccatgtgattgctgcaaccgctatccaagtaccagtttctacctatctcatcattggaatcttgagtagcataaaaaaaatgtttctcattgtcatgatctctatatgtccanatttcttacaataat

SEQ ID NO: 259125 - DNA, 455 bp, Glycine max
  unsure (1)..(455): unsure at all n locations
gacacattcttggtcangaagctccttcttttatggtatattccctattttatggcgcctctcctcacctcttcaactatatcttccgctgcatctacatggcggaaaatcaccattgaaggacctcattgaagctcaaagatccagcctccatataagctccacaagcaagcttccatcaagtggtatcagagcacaatagcttcaagtatgtgctccttaaacctccattaattttcagctttaccttctcctctattgtagattcttcatttttctccatgtatctcctcacatgtcttgtgctaaatgtctttaacatgattctctagagatttcaccaattaaacttgccatagaaactagatttgactttctaaggttcaaacttcttgttcttgctctagaaccatgaattgtgttgagccatgtcctttgagttatgctgtattttt

SEQ ID NO: 259126 - DNA, 228 bp, Glycine max
tcggggaacgctatgcatccttagctcagcctgaaaagtcttatgaactgagagccctaacaaccctttttagtaacatccttatgacaagaactatctgactgaggcggcgtatactatctaaccgggtatgacccacaggtgctatgtgctaccgtgcacaaatcgagggaattcagccacctttggtccgtttgaaggaaccaggaggaactagaacaaggttca

SEQ ID NO: 259127 - DNA, 301 bp, Glycine max
tacgtgagaggaggcgccattcactacggaataagctatggaagaaggagctttaccaccaggatgagccttggataagaagcttggataggatgcttcaatggatgactatatagatggagagaaagagagaggggggagcacgaatatgatggaagaaaaagggagagaacttgaacattgagttgtatctcacaagactctcattcatcaaagttaccacaagtgttatacatgcttctatttatagactaagtatcttccttagaagctttcttgaaaaacttccttgagaagcttc

SEQ ID NO: 259128 - DNA, 392 bp, Glycine max
  unsure (1)..(392): unsure at all n locations
aaatactaagcttcaccggaatgccttcattttcttcactaggacctatctattgttttcaatccattcaaccaaatataattatggaatctatagctccaacctatataattaaccaccgtgggtaattatcaaacccattctttatataaatatgtttctaaaaactaaatagagatttcaaacttcaaattttatcaattaaaagaaagtggaattcaatctatgactgagtcttacttttctaatagatcataaagcgtataccattcaaagaattcaaattatgttgatattcattggcacaccttaaaataaatgtattgcctttattgtggaataagtacnggcacctaaattaaaatgtgagcacaccttacacgcagctcttc

SEQ ID NO: 259129 - DNA, 350 bp, Glycine max
gacctccctgagaagcttccttaggaagattcctactgaagctagagcttagctacacatacctctctaatagctaagcttaccttcttaagatgagaaactagagcttagctacacaccccctataataactaagctcacccccatggcaaaatacatgacaatacaaaaaaaaaggtatgtgtaggttgcgacgcacatactatgccaaaatacaaggcccaaacgaaggaaaaaccctactataaagactactcacaataccgtcgaatacaagggctaaaccctaaactactagaatggccaaaatacaaggcccaaacgaaggaaaaacttattctaatatttac

SEQ ID NO: 259130 - DNA, 393 bp, Glycine max
  unsure (1)..(393): unsure at all n locations
tactacaattagaactgggtagtgtactctttctcttacttcgatattttgtcccatttgtaaaaaaataagggtttttgcttaataaattttaaggaggcacacctgagtacctttgtaaaggaagatccctattaaagttaaatcaccaatgaaatccttttaccccacacaatttacatanccttttgccatcttacattgcactatggaaacaaaaggtcgaatacgaacctcaacttttcaaaataaaaggtcaaatctgaacctcgaaattttcaagccagcgaaaggttgaatctaaaccttggcttcttcaacccaacaatatgtcaagtctgatctntatctttctcaagcaaacatgatgctgaattcgaaccttagctattc

SEQ ID NO: 259131 - DNA, 421 bp, Glycine max
  unsure (1)..(421): unsure at all n locations
ctttgaagcctacagtgcatgtgtatcacaaaaantaattattcaatatgatgaaaacttgtttgaaaatatatgcaataacccactggttactcacccctgttaattccgcagcacttgaatgtccattctcagatacagatgcacgaggtgatgagtcttcatcagatccttctcgaactggggatggtggttgaggaggagcaacataaacaactctcaacttgcactcttcaacatcatgaccagattctntattgaactatataattgagaaaagtaaaccatcaacttaagcaacatgtcacatgtattaattctatcatgaaacagtgtaatttgctgaatggataccatttctggagtgatatcttttgtgtgtgccccacggcttgcaactacactttgaaggagaaactta

SEQ ID NO: 259132 - DNA, 419 bp, Glycine max
  unsure (1)..(419): unsure at all n locations
ccttattacctanncattccatattattatcacaatantttttattttttgtanaatcacttcgaactcttcttcaacattagagaagtatagagttcttgtttctcaattgtcactctttctatctataagagggatgacacagggtaacaactcatatattctaagggatgtattggacctatggaatatctttnttctctatcactcatctccttattggtgattttccctttcttaagtatttagtgtaaatcccttttgtaagggttagctgaatttcggatccggatcctctcaattcgcaaataatgggagaaaattaagcttaattaatgtgaatccgaagaataaaataaagggttgcgaattactcacacgtttactaaacacatcaaatcgttattttaatattgttc

SEQ ID NO: 259133 - DNA, 263 bp, Glycine max
atacacaccacataatgaagacattatatggatgaaattccattgagtgtgttgcaacaatgttgctctatcagtcatgttcattctgaagatcttcatgtcagaaacgcgttttataccctttagttcatatattactctctcatagcttgaaagtcttcttatatccagtgagcatgttgacttttcatttgagtcacaaccagtgacactttgagcttcttttggcattcaagcctatcaccctctttgagtgactcatg

SEQ ID NO: 259134 - DNA, 464 bp, Glycine max
  unsure (1)..(464): unsure at all n locations
ttacactcagctcgaagatgtggtgatctagattgtaatcatctttttatcaaataaatgtgttcctacagatttagcgtaagaaaggttgggttgtgcccttgccaattcttcctggatggtgagatggaatgaaacatgggtctgaaacttgactagacatagatcgtattacaactatccctatacttgtttgagtttagggataaaaaaaggacaaaagaaaataggagacaagtctaatcattttgaacaagtgtggtcggataatgatgaaaagtggtattgtaaaaaatgaatgggcatttaagcgaagtgttgacactaaattttgtgtgttgacatcatactagaagagtacgaaagtattgttttggttagttgccaaagaatatcacagaaccacaaaggaaaatgaatgatttgtaaaaatgaacattgattanggaacacacttgatacat

SEQ ID NO: 259135 - DNA, 390 bp, Glycine max
  unsure (1)..(390): unsure at all n locations
tttactctctggaatcgataccagttactgtaatcgattattatttgcaagttctggtttcaaaaagctttcaactgaatttacaacgttccaaacaattcaaaatggtgtaatcgattacaatatattggtaatcgattaccaatgtgtttgacgtngaaattcatattcaactgtgaagatcacatcctttcacaaaaatgctttgtgtaatccatcacaatgaattggtaatcgattaccagtgataaagtttaaataaaaatcaaaagatgtaactcttccaatggttctcaagtttttctaaaggttataactcttctaatggttttcttgaccagacatgaagagtctataanagcaagaccttaactcgcattttacatacat

SEQ ID NO: 259136 - DNA, 453 bp, Glycine max
  unsure (1)..(453): unsure at all n locations
agtcctgcgtgacaaatgaacttatattttacagattttttgtgtacactgtatttttccccaaaattattatctttccatctaaactcactttctctttctcactctctccgttaacatttctattttctttatctttgtgttctgaagaatctttacgatttcgttttatttctctctttggccacttcatctcattttttccttttttgttttcacaaattttaaccgtttcttttgggttttttgtatgtgtctctctggtgttgtaatttgtaggttgcttatgtgcttgcatgtgttggacatggatcttgcttttctgcctgtttattatgaaggaaaaaaaggacttttccttgcctacaaacctcatttcgnttcagaaatggacgtttctattgtcgctgaagtttgtatgtattcttcactgtntcgggttgctcttttttg

SEQ ID NO: 259137 - DNA, 464 bp, Glycine max
  unsure (1)..(464): unsure at all n locations
agagaatgagcatgtgatnggaagtattatctatatatgnnagtcttgtttgtcagatngantatgaaggaatgcattgactatatcctggtgagagtgtgatccttaaattttgagagaaatgactatcatttagtactgatttttgcatgaatctttgaagtatggactgaatgcatgaaattgaggatgatgaaggccatgtntgattgtgatagccacttagccaaaaaagcggaccacgtgtttgaatgatctatcccttgcacctagtttgagctgaatgaattattgattgattgaaccccgagcctatatagtgttatctcctgctaccttgtctangcattcctcggcggcagccttctcatggtggagcttatccttgatgttgcggttaaggtcctcaacggcatcgtcctcattgtggatgaagtgcacgtagctgttgatggtgtattggt

SEQ ID NO: 259138 - DNA, 470 bp, Glycine max
  unsure (1)..(470): unsure at all n locations
gaccacaataagagtagtgttgtagcagtggagaacttcctacccncttttatctttttcatgttcacgccctaattctctctctcaaacacacttatatatatgtatatggtccctcttatcttttccaaaccaaacatagcagcctcatgtcctaattatagaaagccactaagcaatttcttatttcatcatattatataattagttaatagggagggggaatgaatccatgcagagtcaaaggaaccaattcaagacaaataatatcattagcaatttataactgttggggaaagacgaaacattgtgcagacaattccaaaaataaaataaaatggaatgctacaaaacacaatattactaataaattggttcctctggataacaagaagcgcaaggtactntttccctctagctatgatggcagtcttacacatatatgccaaaaatgagtgaattgtataatg

SEQ ID NO: 259139 - DNA, 466 bp, Glycine max
  unsure (1)..(466): unsure at all n locations
acctataaaactaagcttgcttctctttactgacttttatgttcccctttttagaccaaggatgctccaaaactgataatggcatcttcatcaaggggacccattggccctgcaccctggagcgcttatacctaacttcttcatctgtgggccatgcattaacataaaattccatgactatnttcgggttatatttagccatgggccctatgagttgagtccattgccttttgaaacttcctcctggaacttggtgtattcttcctctcttagttggacccgcctctccttgaggaaagactaactcttgatcaccttacagcggcgttggtgttcctcactttgtaactggtgtccgccaaattctattgccgcttgaggagccacactggatccttctctcgtggtgtccttccttgccctcttatagagaagcttctttggagccatttgctacaaagacaca

SEQ ID NO: 259140 - DNA, 289 bp, Glycine max
  unsure (1)..(289): unsure at all n locations
atgaatgaaagtcttattaaatacacttcagagctccacttctctacctggtgaatccttcaagtacgtgctgcccccttctctctatctgttcctgcattaaagcattctcattaagcttgttatacaaggcaatttttggtggagagagctcggtcttcttggctatgccctagagaatggtgcctcccactctctcttatgctttgccttacgatgcatctccatcgtggaaaatcaccattgaaggaccgcattgaatctcanagagtcagcctccatagaagct

SEQ ID NO: 259141 - DNA, 427 bp, Glycine max
  unsure (1)..(427): unsure at all n locations
tctcatatatgacatagactttgttgttttacccactcgcaatgatgcatcngaggagccgaggaagaggcttaccacctctcttatcatgcagccaccaaactgggagctcctanttgagctcatgtgtgatgcctctaactntgcacttggggctattttgtcacatggagttggtagactatcccatgtcactatttatgcatcacgcactttagatgcaacccatgttaactacaccaccgttgagaaggagcttttagctattgtttttgctctagataaattcaaatcttatatgctcttctctcatatcactattattactgaccgtgcacctttaagatacttgtattagaaccctgatgctaaaccttgattgatttggtggatggtatttcttcaagagtttgatactaagatcaaa

SEQ ID NO: 259142 - DNA, 253 bp, Glycine max
  unsure (1)..(253): unsure at all n locations
gcttttatgcgaaatgaacgtggcacccatgccatgaccatagcggccaccagaatacaaggagaagatattttcatttgntttctccgaggagacacgagagttagtattagcctattaggagcatcatcatgtggaggaaacactattgaagatttcccaaccgtgatttccctctaagagggagaaactattacgtattcctgactactatggccccaattagtctcccattacatgtaatcgagtattc

SEQ ID NO: 259143 - DNA, 457 bp, Glycine max
  unsure (1)..(457): unsure at all n locations
ttgaaactcagcttctaaccttgtcaagaatgattctctgaaccacttgttttattttggcnccatatctcaagaagggggggttgaattaagatattccaaactgtttcccctaaataaaaatctatatcacttcttactcacgttatgaattcccttaatgaccatcttcttaaatattaattcaaacgaagcaacttgaatatgaatataaagcaaaaataaataaaggagaataatggaagagaaaatgcnaactcagttttatactgggtcggccacacccttgtgcctacgtgcagtccccaagcaacccgcttgagagtccactaacttgtaaatccttttcaagttctaacacacaagaccatccttcctttggtttagagatcctttcaacaagagactcacagcctcttaatcccttatagaatgagaagaagaagaggaacacatc

SEQ ID NO: 259144 - DNA, 441 bp, Glycine max
  unsure (1)..(441): unsure at all n locations
nntggcttcttataatgatgaaatggtgaatttgtttttaattgcccctcanaatgcaagatacactttatagcaccccgatcgaatcacaccagaatgagagagatctaaagggtggacatgcatgagaatctatagttgaggatgaattaaggaaattaattgctactacctataccaataagatgtatctacttttcgatagcctgtcacataagaacttcacagttaaatatgcttgatttgaagtagttatagggtgagtgaccttttgaaaatttcccagacagcatgtgagtgaggataaagtatgttgaacagtcttgtgttggtttgtggcgataatcaatgatcttgagagcagtcgagtgatgtcagagctggttgtcaaggtctcagaaagggctacctatggaggaatctaattgatgaacgttctga

SEQ ID NO: 259145 - DNA, 472 bp, Glycine max
  unsure (1)..(472): unsure at all n locations
actngatgccttggtcaacctattaactcatcttgtcatgaataggatatctgttcctgttgcaagagtctgtggtctatgttcttctgtagatcaccataaagatctttgtccttctttgcagcaatttggagtcaatgagcaacctgaagcttatgctgcaaacatttataatagaccccctcagcagcaaaaccaacaacagtagaataattatgatctttcaagcaacagatacaatctaggctagagaaatcatccaaatctgagatgggcaagtcctccacaacaacaatagcatgtccctcttttccagaatgttgctggtccaagcaagccatatgttccttctccaatacagcagcagtcacaacaaagacaacaagcaactgaggctcctcctcaaccttccttagaagaagtagtgaggcaaatgaccaaccagaatatgcaatctcagcaagagacaaga

SEQ ID NO: 259146 - DNA, 431 bp, Glycine max
  unsure (1)..(431): unsure at all n locations
gcttctgttcctgaanaactggttcccaaacgacaacagggagtgttttatttctgnaaactttagcattgcaacaagtcctagggaagtagacccggagatggataagaagatccgcagtattgtgagtagcattttgaaatacgcctctgttcctgatgctggtgaagatgttccaacattctccaccccgaatgtttctgtgcctgatgttgataaagatgttccaacatcttccaccccaaatgctgaagtcctcccttcacccagtgaagaggaatcaacagaggaagatgatcaagcgacaaaggagacccctgcaccaagggcaccagaacctgctccaggtgacctcattgaccttgaagaagtagaatctgatgaggaacccattgccaacagggtggcacctggcgttgcagaacgattac

SEQ ID NO: 259147 - DNA, 394 bp, Glycine max
  unsure (1)..(394): unsure at all n locations
gcccacacttgacacgtgaacacgttatcgtttagagnatggttaattnntatttatgacagccatttatgcatagatggaccattaattatttgcacacaactcgattctcggataattacaaactactatataaatgctgcttgacagtcaaatatcaattgcaattgcatgaaatggaatactcctgtaatgccaagagaaaacgaaaacattactaatgagccatgaacagtacctgatgatggataaggctttgaggattctatttgctgtccagatgatccatgacaagagtagctcacaaaaatttgaattatttgtatataatagagtcctctgtggttccaagtccaatgtcactatatcgattgcgtccccaactctaattgta

SEQ ID NO: 259148 - DNA, 402 bp, Glycine max
  unsure (1)..(402): unsure at all n locations
aatggcatagcaaccctcgtcctattcaacacaacacatcaactgtaagtattagatgcaaactcatgcactatactnttcttacgaacacttcacgtcgcactaagatatatcttctaactcaagaataaatgcagcccacgcacatatcaaatgcacacttcgttatcctagatcacttatactgcacttccaacggtgtatttgctacctacatcacatgcatttccttttcaaatttacatacatgcatactcaaagcactttggctaccaacaattgcatacgtgcacattctggtatttctaatacctatacatacacaagacttcgtgatgaatctcggctacatacacaataagtgctacattcatgctttatcaactgtttctgctactaaag

SEQ ID NO: 259149 - DNA, 464 bp, Glycine max
  unsure (1)..(464): unsure at all n locations
atatccgctcatggaaggtacttttaactgccctcttttngtttgtccagnacaatacagacatggcccctgatcggaaccagctacagggtatgactaaacgagagcatgagtccatttaggagtatgcccagagatggatagatctcgcagcccaagtcgtgccgcccatgacggaaagggagatgatcacaattatggtagatacgttacccacgttctactatgaaaagctgataggctacatgccagctaactttgcggacctcgtcttcctcggagaaaggattgaatccgggctacgataaggcaagttcgaatatgctgcctatatggcccccaacaacaacagaagagccccgtgagtgggtgcaaggataaaggaacgagacgctcatgcctgcactcaccgcccaacatggatgaaagcactcctaaatatctaaagctcataccagcccaat

SEQ ID NO: 259150 - DNA, 432 bp, Glycine max
  unsure (1)..(432): unsure at all n locations
acctatgaaactaagcttaacattttacacactagcattttagtcacaaaatcnataaataccatnaactccaaatgtcataaaattgacattgatagtaacgctccataataggtataccccaacaaaaaaagttctaataccaaaattcaatcaaaatatattttatctactgtccatataataattgaatgcactaacaaaattacataaataacctatattatttttgtgaccacgtgtttacttagatatgngtttttttttcttatcttcatctttcttatatctgtctgcttttattttataaaactttcacgaatattttttctctcgtttattccacccctctcntttctctctctctcttgcacacacatatttctctatcctctctctatngacaccctctacctatgttctctctctaac

SEQ ID NO: 259151 - DNA, 334 bp, Glycine max
atggagatgcatctgaaagcaaatgataacaagagatgtgttgcaccttccactcaggaatataccaatgaagaatgaaccttaccaccaagaattgtcttggataacagcttgaagacgatgcttttatggacgaaaagatacatagaatgggggagcaccaacatcgattgaataaatcaggacataagtggaactctgaagcgtatctcataagatattcattcatcaaagttacaacaagtgttacacatgcttctatttatagactatgtaccttccttgagaaggtatcttatgacatcttccttgataagcgtctttgagagaactt

SEQ ID NO: 259152 - DNA, 468 bp, Glycine max
  unsure (1)..(468): unsure at all n locations
ctgaaatngcatgtggatacctattatgaatctcctatgctgtctctacatacatatattagtcccaccatcccaattctgcaaaaccatattcatacatcattggggcatttcaccgagcactaggtgggcgcacgtttggacataaattgcangagaatgggggcaatgcggcctgccccattgcttaagaacacaacgtatgcctaaggccttctcattcaaatcctcaactcaagaaatcaagcataaaaacaacccaaaactgccccacaaatataagcacgttctcacaatttagagcaccaaaagatgaagaaaatactccaatgggaagcaaaaaaactcaaggattgagtacttacttgttggagtgagtagaaacaccaaaaaggaaagcaaaatgcaaccaaaagtggcttatgggagcacaaaccgcaagccttcgtgagttctatcttttgaatg

SEQ ID NO: 259153 - DNA, 468 bp, Glycine max
  unsure (1)..(468): unsure at all n locations
tctctctccctctcattagacactatctttgataactattatttcttgacttgnattagcatcttggaactgcgtttaatcacatgccaatgagtgtaagatgtgaaagctaccgatactaacttcatgatggatccacgttgatgccaagtggatgtgaaatcatacacacacaaactatttcaaatgtacgcccaacaaacattaaatgcctgcatgcatatagcatgtgcatgctgtatcattaggccatctggcttttggattatagtttggctaaaatttgtctgagatggcaagccctggcacagcggtaaagttgtgcctagttgaccaggtgatcattggtttgaatatggaaacaggctctttgcatatgcaaagggtgaagttgcatacagtgaccctttcccatacctttgcatagtgaggagcctgccggcactggtttactctagtttatacatt

SEQ ID NO: 259154 - DNA, 386 bp, Glycine max
  unsure (1)..(386): unsure at all n locations
ntcttgagaaaactttcttgagaagctcctttgagtantttttcttgagaagatagaacttagctacacacacccctctaataactaagcttaccttcttgagaagcttccttgagaagattcctaaagaggctacaacttagctacacacaccccctataatagccaagctcacccccatgccaaaatacatgataatataaaaaaaagtcctactacaaagactactcanaatgccctgaagtacaaggctaaaaccctatactactataatggccaaaatacaaggcccaaaagaaggaaaaacctattctaatatttacaaagaagaaagccccaaccttggccatgggctcataaatctatcctggggtcatgagaaccca

SEQ ID NO: 259155 - DNA, 341 bp, Glycine max
tactatgtaccaaataccactatacattatcctgttctatacaagaacgatattggacatcataacctaaatactgagccaaggttttacatactaaccactctacattaatgtagctccttaatattaacattctacacacagcactataagattgaagctaactctctaaatctttggaggacgttaaagctatactgaataaaagtagatattcgtgctcgtcaatatatgaatttatcaaacgatatataaattgcacattgtgcatcttattaataatcatagcgaacaaacacttatttctcccttatatcataattgtccttcacaactttctt

SEQ ID NO: 259156 - DNA, 406 bp, Glycine max
  unsure (1)..(406): unsure at all n locations
tgacagtcccagaattntctatatcttcttttgtgacactaattcanataattcaagatgacatcttgcacatttgcacaacctcagctatttcttcaatgtgtgttatgtgcaagtgtagcttcaaaactgtacccgttatttttacattgttggcaactacttttcttttagaacaacttgttccttgaaaattgggtgtctactttcaccctggagcaattaactttaatacattttaagattttggtaacaataagtattcctaaaatttgtccccattttttgtagttctctatttgtctagtgtggtgagcagaaaggaattatctgcaagggtctgttctgtattgggagatagcatggtgttcatgacttcactgaaatgttctccacatggcttaac

SEQ ID NO: 259157 - DNA, 394 bp, Glycine max
ctcagctgccacgttgtgccattggagtgtgccaattttatattctgccgtgtccgtgccagccttcaagaccagacagcatctgtgtcaccgtcgaaatggagaagccaccgcccaaaccgccgcaactaccagtccctttctatttgtaattagctgcttccaaggtttcaaaatgggccaagattcttctccacaaccacaattttcaaaatatcaattatcaaagatcacagcgaatcttctggaaccacagtatcatagatcacgacaaaacttctgagacctaaatttaaaaatcttggctagttgtgctactgcttctcatcacatgtttctatttcccaccatttgttgtactaatgtatattcattttgttcacccaaattagag

SEQ ID NO: 259158 - DNA, 357 bp, Glycine max
tgaagtcactttacataatgtttatgatattgagttcaatatatatctgttggatactcgtttagacaataagaatatattgaactggcatttggtagattctgttttcctaggttctatttgttggaattggaccacgtgtattttattatttacctatcttaaatggattatttctatgtacccttccttggtctctttgaacaaccaagtggatgtaccctccacttgaattggtccagaagagatgtaccctctcttgttctcagttacaacaacccaagtagatgtaccctctacttgtatcacaaaggatgtaccctccaatgtgttaagacaaagtttcaggcgcgtagt

SEQ ID NO: 259159 - DNA, 257 bp, Glycine max
attagcatatttgaagtgtatcgattgatatatacaaaaatgtaccttattaaattcttttaaccacaaagcgtctaaaaaatttttttatctctcctcatacattataagggacctccacgagtcttctgggtacgctgacttcatatatcggaacgtaagtgctaaatactatcttgtgaaagaacctcactgaactggtgtactggaacccaacacatttcgtcatcctactgagcgaataatggtttgaggtt

SEQ ID NO: 259160 - DNA, 390 bp, Glycine max
  unsure (1)..(390): unsure at all n locations
atatatatatatatnatgtacccgtaatttagttgatatatgaatattatnntatgtagggttggttaccctatttgcaggacatngcttncttnnctttcttactacgacggttctctcttcttgataagtggttcttaactggtgacttaaatatttttggattaatatatatatgtaagctaattctagntgatatactaatattatctaggtacggttcttacgctgatcttattagctgtgtatatatatatgctacggtacgtntatataaattgatactataattntgttaaaatctcataatgagatggtactttaaatctaagtacacgttgaatatattatattgtgtatatgatatgtataaattattgaatgtatatt

SEQ ID NO: 259161 - DNA, 313 bp, Glycine max
ctttctggcactgcagtcggtgacaattctttcttcacgcactacatctgtgggagaagcactttaccgctagtgagtatttgcagtaattctcacgcaactctaacactacttgtccattgtggctatgcatacaaatatctgaagatctttttatgaaaaagacactcaagagatttctaatcttatctaaactttgtgtctgtgatgaatataactatgacttataagaccagaaaacttactctggactatatactaataatttatatatatactataattcatttataggcttatactttacaatatc

SEQ ID NO: 259162 - DNA, 141 bp, Glycine max
cacttcaatgtggcgtcccccttgttatgcaaatgaatcattaacaactgctcattgatcgtttgtcttacctaagatacactaagagactcaacgtattatttttgtattttgatacatgcttaattaatttaagactag

SEQ ID NO: 259163 - DNA, 391 bp, Glycine max
  unsure (1)..(391): unsure at all n locations
ccggacttagcacgcgctgcactagagagacagtgtcagagntgtttgcatttatgcaaagccaagatgttcagatggtcacagtcagacagataattcagttctgaacgaatcaaagatcagaatcagaaagttgttcagatcagaaaagaatcagatcagaaaaatcagaactccacggagatgaaagatttaaaacaactaccatttgttttaaaagtttctaaattctagtccaagtttctcttgtatcataccgttctgatcatataggcnagtgatcaagttcacgattcacgtcatgttcaagggatcatcaaatgtatgatcaaattgacgtccggtctacggatcaatatgggagcttctttaacttggacatctgttgaca

SEQ ID NO: 259164 - DNA, 321 bp, Glycine max
  unsure (1)..(321): unsure at all n locations
tatagaaatcataaaatagaaatgtctctctgctatcanctatttacggctgagtgcataatatattagcatctaagggaatgactaccatgacgggtagtctgtgacttgtgtatttagatgcactngcatacggtattgattaaaataacagaaagagggacaaagcacacaagcatcaaacttactcataatgtagtactatgattcagcaatgaatatatntcatgttcaacntanacaaagtattcattggactcatancanaaataataattcacataataacaatgtagctgcaccattaatttactatctaac

SEQ ID NO: 259165 - DNA, 215 bp, Glycine max
  unsure (1)..(215): unsure at all n locations
aaatatataatactgaacaaacatgtaaccccataccaatattcccaattattatcttgcccgtttgaatcctcattctggctttgtcatnggacaanggtaatannagaaaaatgtacaatatttcaaacattataacangcgtacattcaatattcacacattatcnttggcaatttgaatcctcaatcagatntgtcattggacaaacaata

SEQ ID NO: 259166 - DNA, 194 bp, Glycine max
gtactttgggtgatgcgggatttatactttatgtgatgtgctttacatggttttgttgaggttctcactgctgtacgttgataaggggtgtattgatagaaaatatgtattctgcacagttactttagagagtaggtctattgtacctgataacagttatggatcttgaaagtctggtattgtgcctgaaaaaa

SEQ ID NO: 259167 - DNA, 223 bp, Glycine max
gtcacaaatgtaagaactttattttcaaacaatacccattcttgactatctatatcaagaaacatcaagtctcgtccacaatgcccaatataactgaatcacaactacacatacaataccactacatacaacacaactcaaccagcctccccccatctacaccatgctatgccatacataacatattcaaatgcatgttaacaagatgaaaaaatcactggga

SEQ ID NO: 259168 - DNA, 199 bp, Glycine max
tacctgatatctgatcctttacctgtcttctgttgactactcacctaggaaactgataccttcttagattggactggatgttgaatatggggggttgttatgacatgttgtgttctatagattggctctatgcatgttgtaagtgactcaagaagtgtttaagcaaaaaaattaaaaaaaatctaaaaaagaaaaaaga

SEQ ID NO: 259169 - DNA, 184 bp, Glycine max
  unsure (1)..(184): unsure at all n locations
tattattaagatcctcgtacctgtgaccttcacttatgaaactattccctccatctacagcactattatgcttggacanatactgatctttgtactggaaaccactaacattgggtaaaccagcttgctagaaggcagaattttattcacggtctactctctcacaaattgagttacatcttga

SEQ ID NO: 259170 - DNA, 91 bp, Glycine max
agtactaccgtaaatcattgcgtgctatgaaaatatagataactcgttcggtagaaaaaatttatcgctggcgcaaagaggatctcaaaaa

SEQ ID NO: 259171 - DNA, 278 bp, Glycine max
aactttatggcgtactgttggtacagaaagcttcttcttttctcaacattacgcagctttctacccaccctatctaccctaacgctgttcggaacccccaagactcacgaggattcctgctcgttatagagactatgattattctcagacaggccctgtctggagtagtgctgctttgctgaccctgtgtcttctgaaactaaaaatgaatacttaagcgttgactctgcacatgggcgttcaacctgaacaactactagtgcggtacacgaactgtt

SEQ ID NO: 259172 - DNA, 389 bp, Glycine max
  unsure (1)..(389): unsure at all n locations
agtttctctttacttaggagaggatctctaatctgagtgataaacacctgctgttcaaagacttcacaccttgtggttgcctcctggaagagagatcttttctnctatcatctcacccttgtcttcaacacaattcagaaatcaccctgccaaatatctggacatactccatttcacactcaataagtgatttacctaattgattcaaacagacctccctctttgaatactattgagcctgtactcgtattgcatttatattttgcagcacactaactcgttacatcattctcattatgcgaacactatagaccacaataaccctattcatcttctaatattcgcttcatcagtatcaacactagcacctgcctgggtaatattgataa

SEQ ID NO: 259173 - DNA, 116 bp, Glycine max
taaaacttcctcacctagaatgcatacatttcaatacatacctactagtccgatgattatgggctacttgtctgggaaaagaataattagataactaatcgctctaggcgttcata

SEQ ID NO: 259174 - DNA, 95 bp, Glycine max
gaatcagacacgagaccccaaatagttgtctaaagcaatgctgtaccaattaaagcgtccaccaaaccatgtttccctgtgacatacgctcctag

SEQ ID NO: 259175 - DNA, 202 bp, Glycine max
  unsure (1)..(202): unsure at all n locations
atatatttctaatacacttgtaataaaataatgtagatagaatcatctgcaactcgtggaattcagagggtccctgcagccatatatctgctgtgagcatnggatttatctaatgaatttataatcacatgtctatactatataatctntcattagtatataactcttgctgctacttctgcttntnttttcttaatcatat

SEQ ID NO: 259176 - DNA, 219 bp, Glycine max
  unsure (1)..(219): unsure at all n locations
agaaatcagaaggggttcttgtgtgattctacgagagatacaagtcacttgtggcaaggagactcatgtgtntctgcagaatgatgaggggcatcagaggactcattcttattcggaagaatcataagccatgaggagagcttgaatgaagaagagtcagaagaaaagcattattctganatggtgtctctccattaactcaccacaagttctgacttg

SEQ ID NO: 259177 - DNA, 75 bp, Glycine max
aatttctccttttattataactttagtccttgtaacgctcagtccaatgttggatttttaaattacattttattg

SEQ ID NO: 259178 - DNA, 279 bp, Glycine max
  unsure (1)..(279): unsure at all n locations
tatatatgtggtaatctacaagtaatatacttcaatgagcttnaacttctgactgtgagaaaatcaagattcaagtccaaatgtcagactttatttcaaacaatacccattcttgacatacctataattanagaaaacatacaagtcgtcgtcacaccaaatgacccaaatattaactaatatcgacgaactacacataacaaataacacactacaattacaaaacaacaaactacaaagcaagaatctcccctctccatactaacacacatgtctcat

SEQ ID NO: 259179 - DNA, 81 bp, Glycine max
ttctgcaggcgtttaattgataatacttgcaaatcaacttctgtggaaacattttaacctgatgaacgctgtatcacaatc

SEQ ID NO: 259180 - DNA, 362 bp, Glycine max
  unsure (1)..(362): unsure at all n locations
cggatctagcacgcgctgcactgtgggaaaaagctgattcaattatttttcccactgacgaattatatgtttcttacaaattctaacagcaattatccgagcgccttcctctagactgggcgtcatccttttttcgtcctatcctcttgaaagacctttgataccnaaaaactattcttgtactctattgatatacttaatcgatgcaatgtgtccctgtctatatcaagccaaattaagtctgtgtgtgcaaaaaaagctgataatttaaaaatataatataaggatatatcggtggagcattcattgggcagtacagagatccctcacaacattgcataatggtaacacttatgctgata

SEQ ID NO: 259181 - DNA, 283 bp, Glycine max
cttgctgatgatgcatacagttatgtacgcttatattgagtgaatggtgcggaggatccatgatactacatctactgcattgtatgattgtgtgacactatagctgttcacggattatatctttgatgctactaacacaaaaagactatttctgtgcaatcgaactgctgatttttgtgcctgatgtgaaacatcttagtattcgaaagaattctaggtcttatgaatgcaacttagtctaaaagtggagacactgcgctgctgtgtgtgctgtcaaaagatc

SEQ ID NO: 259182 - DNA, 239 bp, Glycine max
  unsure (1)..(239): unsure at all n locations
atatctcaatctctgatgagatttgagtcatacggctctggtatcagatcctggttaatgacttgtgacccaacatggtaatcagttttattttttatgttacgtgtggactctggaatatctatttagaattatatatcttgtntatggtggggaaataaaaacagtatacatctgctatgtgtgatattcaacgatacataaacaagtgatanatcaaatcattatgtcccatttat

SEQ ID NO: 259183 - DNA, 219 bp, Glycine max
atctgtttaaacggtcctaatctcagctccactcaacaaccataacgcagttaagcacaaaaacaagaaaattgaacacacaaacgttttatagaccaacatctcatcatggacggacatcaattctgagattctacacttacgtgcacacacacatattaatttcacaccccacttttgcacaacgtgcatgaaattgtagcataaaatcttcatgat

SEQ ID NO: 259184 - DNA, 238 bp, Glycine max
ttcttgtagcttgtgttattcttcagaccttctctaggagcatttctatctatggctcaaaatagtctactactgttgaacctttacatatctgacactatatgatgactgctgcttttaagataacactaaaactaacaaagctatatactaaccatatcttctttgtggtatgattatataaacaggtatgctcatacattcctaattcacactattctgtcctcttgggtaccat

SEQ ID NO: 259185 - DNA, 237 bp, Glycine max
tgattagtgaatatatgttgtatgtgagatactcagtatgactgtttaaaaaagacttgtgttacactgcaggataaagaaagctactgttataatgacagagataaagacttgacttgaaaaacaatacaattttgccaactctacaagggtggaagaaatatcctgaagcaaccttataacaggtatcttgcaagtgcttgtgcactgacagcttaacattggaatcttatgtag

SEQ ID NO: 259186 - DNA, 286 bp, Glycine max
  unsure (1)..(286): unsure at all n locations
tgatatgtctcactcagcaggaatcatgtactagcactaactggcctcatgctgatagctagttcttgctggcggctgagctatatttttcgaaaaaactatntgtaatagaacctaattatatgactgctgctgccaagccttggtcttttaggaatttgtggatgtggctgcatatgcacaagcggatcgttctgagttggtatttaatgttaagtatcctgatgagagatatgatatgtactccttttacactgcagatatcttcggtaatatgtgtttcaag

SEQ ID NO: 259187 - DNA, 275 bp, Glycine max
  unsure (1)..(275): unsure at all n locations
caacaattcaatgttaaccatccatgacannaagctaaacaatgcttaatcaccatgaacttatatcnaacaaatagaanaatcataanatctgtcttctaccagaacttttcacaaacactttttgaactaacaataactaanggataaccacttatgatagaaactaacaaatgaacaatgcttaattaccacatattatgacagaagtaaaataataanacanatctatanggctgaaacatagtcaaatcttgagaacattaatcaacacc

SEQ ID NO: 259188 - DNA, 327 bp, Glycine max
actctcacgctggttttgagggggttgccacagcaagtatgcggggtgtttgaagcttataaaagtggccccctggggagcgaccatgttaactagagtgagctttttaaaaggactttatacacgttgggaaattattttctctctctcagataaatactctgaggaaagacaagccaccatacttagctctttactattctcaatttcttatgggctcccttacccacttgtgtgctcctgtagttgtagatatgtgcacataacgccccctgggtccgtcgtgcggcatagtgatgctccccctgtcattaaactttagtgaat

SEQ ID NO: 259189 - DNA, 463 bp, Glycine max
  unsure (1)..(463): unsure at all n locations
aagcaccgcngcatgcagctgtctctgctcaaactttttctactcgttcattactctttgctgtatatggaccttgcccacaacgatagtgctgtttccagttgtgggtgaatggaaggggatggtcatttctctctagtgtggataggagaaggaagctgtaaggccctgtcaatggaaccagggtggtctctgaagaacattaacctgaaaacctgtgggcaagagaaagaagcagaataatgccattgtcactcctctgcttctgggctaaagtagtaaatatcttctcatacatttttatgttattatttgtcatcaagatgtgtcgcttcagcttgtataacactcagctatctcactccctgattgtatctcgctagaatacaaacaatatggttatgacaatatgtatatttgaacttaggcagttgtaatcattaaattcccagcatgtattctt

SEQ ID NO: 259190 - DNA, 161 bp, Glycine max
  unsure (1)..(161): unsure at all n locations
atctatagaatagatattatgtgatatatatatattacatngattattatctattttatgattgaatatatacaactgatgcttactatattattaactaattcacgaactattgccaatggcaattttatggtttggtggattagactataaatatatct

SEQ ID NO: 259191 - DNA, 162 bp, Glycine max
  unsure (1)..(162): unsure at all n locations
gtataactcttctaaatggtcttcttgaccagacangaagagtctatataagcaagggcttgntntgcattttcaattcaattcattcgttcacactnttacacttatttcatacaatcctntacaagccttgaatctctntgaacttcttcttcttctttg

SEQ ID NO: 259192 - DNA, 272 bp, Glycine max
tgtatctacaacgaatattatctacacttctattctgccaatcactgaaaagacagaagaagtggtgctccatacctcttatgtatactgccatatcgatctggcatagtcacttcaactttttttcttttctatactgactcacaacttgtagcaattttctaacaacacgtgtgctcagcatgatcttcctgtacacatgggctaagttcaataggagactttcttatctcatatgaacagtactacaagtcactctgtgatacaacatg

SEQ ID NO: 259193 - DNA, 228 bp, Glycine max
  unsure (1)..(228): unsure at all n locations
ctgaaatatctaagaactgccaatggcggtcttctcttcttggaggtaccacangatatgatacttctcgcaccttcgttcanagctttntctcttttcttctctctagctnggtcacttctactcctctcttcattcttaaatttttgatctttttcaagtatttcattttctttctctttttctacttctttntctttttcttgggcagttaattctnttttcttg

SEQ ID NO: 259194 - DNA, 131 bp, Glycine max
  unsure (1)..(131): unsure at all n locations
gtagcgcatatgactacttgttgaaagttataaatgttgtctttctcattatggtcttgtganggttgacatattttatgttagttaatcttttctcagagatactcctatatgtgaataatgtggtcaac

SEQ ID NO: 259195 - DNA, 396 bp, Glycine max
  unsure (1)..(396): unsure at all n locations
gatcacttcatgatgacaaagatgataacattcaagaatgagctcaagattgagtcaagaacacttctggatcaagagcanattgatttcagatcaagaatcagatcaagatcacgatcatgatcaagaatatcagatcagatcagactcagatctagatctagatcanactcagatcagatcagaaaacttatctatagttgaaggttttccactgataccatgttttctaaactgtaccaaagtttctcttgatcatacaatatgatcattcacacaatggttgaaagttcaatattacacgtcatgtncaaagtgtacatcatgttgatcatctatcttacggatcaatcatggaagcctctcctaagcttgacatcctgtcgatatcctgtt

SEQ ID NO: 259196 - DNA, 142 bp, Glycine max
ctaaaaagatatggtagagtatgtctacaaaatgtggtgtatatgaggtgaaggggtataaatatgtatctgagatgagtggttatgtaatatagaataactactgtgtttaaaaagctgttgttgatcatcatctgaacat

SEQ ID NO: 259197 - DNA, 328 bp, Glycine max
attcactgttcataatgaaagtcaggggaattattgtaattgcctttataacaaatttacaaactacttaagcttatctactataactctactcaaaaagaaaatatatctatgaatcacttacacacaaaccttccttagtgagactatggacacactcttttttttaaacatctaaaggattttctaactttacaatttaagttttgttacttatatggatctctcacacttttgggttatacagacatatttgctataaagctttctttttgaatagatacttttttgtgcttcttatataaactattgaatgttactttccttt

SEQ ID NO: 259198 - DNA, 68 bp, Glycine max
atctcaatttcaccatttaactttataatattaaaataaacttctcttaacttcctgggcactgtatt

SEQ ID NO: 259199 - DNA, 194 bp, Glycine max
  unsure (1)..(194): unsure at all n locations
tacaacaaatgggtagaganatnngtcgtcatcaatccatcanaagccctgganaacgaagtcngntatggaaacctgaggaagttcaagaagtattgaaatataaaagagtgagtggtagattcaatntctttntgacaatatgtatatcctctatgaatgatattcatggtaattattattctantttctat

SEQ ID NO: 259200 - DNA, 114 bp, Glycine max
taggctaggttcctgatccagcagaagagggctctggtactgaagcttccaatgctgtaaattaagtctttggaaaaaaatggccaatagataaggatatgcttagtgttaatt

SEQ ID NO: 259201 - DNA, 216 bp, Glycine max
catctctagaaaaattataatatttattatcccctttattagaaaatatatattatcttatttatatgatggttttttatataggtaattaaagatatttgctaatcaatttcatttattttattttattaataataaaattttatatattaatgaattgtaaaattggattatagataaataaacataaaattcaattgcataataagtcgattt

SEQ ID NO: 259202 - DNA, 133 bp, Glycine max
atcgcatgtatcctagacttcttctataaatttaatataattaaaagctgaataatagtttcacttgtgcatatttttaacaaagtactcatactataaactaatgcttaactactatgtattcaacattaat

SEQ ID NO: 259203 - DNA, 295 bp, Glycine max
aaacacataaggctctaatttccaattgaccacttgagtttttagtatccgtttttttctctgaagagatttgggaaaatcggtagtattacaaaaatctactggagttaatatctatattgcaaattgttcgcactaaatacaacccttaccccggttattacgttgtttttgtactcaactgcccgggcaaaccagatgacaaacgccaacagtgttacttaaaactttttttgacaatataataaaaaggccttgtctaaaactgcatttaaaaaaactttaaaaccttttc

SEQ ID NO: 259204 - DNA, 293 bp, Glycine max
  unsure (1)..(293): unsure at all n locations
tatttggnatcagttatagatgtctgaatgatgttaaattgcttatgacttccattntctgatatcactctatgaatnngtttcacgcaaccacattgaatgacgttaaatcaatgaagggcacagcattctggatggcgcctgatggttgccttcaatctttacatctgagcagagatactgcataatggttcttctgccacagttattaatggagtgtgtacatggttccaaacttctaaataatntccttaacnagaattntgtatgttaatatatgcatgactgtaaca

SEQ ID NO: 259205 - DNA, 171 bp, Glycine max
cgaaacaccgctcaatcagatcagtacgtggttctttatttacacgaactaccttaatttgccggcctggcgatattatgtttcctacctactaatttttacaaaaatccgctagtacatctaaacactgccgcctgtaaagcatttttaactttaacgaacgctctgttt

SEQ ID NO: 259206 - DNA, 304 bp, Glycine max
  unsure (1)..(304): unsure at all n locations
tctcctagtatacatgattagcttatcattcaataacctccctcatgtntntngtgggatgacananngggagaagttaatggagagagatnggtgtanggggtgataactcgcgaatttgngctttaattaatagtcaattttactaagaatattagantcctttattattgtgttttaatgaataatggaaattaatttatgtagtttttaccgtggatcaaaaaaaatacatcttgaggaatatcaaaataaaaaccttaaaatgaatggtctgtactcaacacaccgtttctacgctcac

SEQ ID NO: 259207 - DNA, 320 bp, Glycine max
  unsure (1)..(320): unsure at all n locations
ttanaatatgtgtgcacctcggatcacaatgtgtgcaatntctaanatggggttcaatntaatataacaaatagcgatgtacataatgtntgacacattatatatgtgtggataatgaatttactcgacagcttaggatacatggcaggttcaggctcataaagtatagcacccactcgtcgtatgtcttatcaacataagggaaccgaataaaccaaaagcatcctatgcttgctattactgttagtcattgatatggcaccttcatanggatcttatgacagactattgattcccccccaaatagtgtgtgcatgtgt

SEQ ID NO: 259208 - DNA, 82 bp, Glycine max
cttcggaactttggtcttggtatgaatccttaatctgaatttacttctttgctttccgtcaccatgttgatctgcagttgtt

SEQ ID NO: 259209 - DNA, 357 bp, Glycine max
ccggtcttagcactcgctgcactaatcgtgttctctgagaggagcttttcatacagaaccactacctaactgaatgcttgggcttgtgtagggggtttcaatgaaggaacaaatgaggaataagattaagagggaggtgaggcatactgattcagcccattctatctgataggacaaacccatttggaacatctttgtctctatcatgctctgtatctaagtccaacgtaatgcccaaaatattctatcaatgctctacattaatatgcccaaaatattctatcaatgctctacattaagtcaaacctaagggtgaaggttttgaatacacctctcccatttgtttggtaacatttt

SEQ ID NO: 259210 - DNA, 281 bp, Glycine max
  unsure (1)..(281): unsure at all n locations
atctactgctatatgtgcttttaaccatgtggggatggtcatgttgggagatatcactaaactacagattaaccttttgttctatacctctacgtgctggtgtaagcatatttatgatatttggtgctcaatgggtcaagactaaatcttttcgatcaaccttcttcaaattgaagccacagtctctggactttaagaaagggatgtaccngctctttaaacttattataagtacaaacttatatgaaaagttaagtgagagctggatctcgtgtcttgtt

SEQ ID NO: 259211 - DNA, 310 bp, Glycine max
tgaagaatgtgattcaattgctatgcgatttgtgcaatagtcgcagattggttgtcaaaaagctgttgtgtggtggaagctatcaaatgatttgatgtgtataatccacgcacaatgagctattcttaactcataaatttgagtcatcacgtacaatgatcaagatgtctgggcttaggaaaacttattgtggtgttgaagtttgcttgttgttctgctgaactggcttgagtgttctgattggactggagtgtgaccggtaaaacagttgctctgatctactcatgggcacggtgggttccctctgttg

SEQ ID NO: 259212 - DNA, 350 bp, Glycine max
  unsure (1)..(350): unsure at all n locations
ctatgatcatacctgatgtatcataccaggatgttctgatatataaaatgaactctcaatagttttgactttcaaatggttaagtntctaaagtatactcttctaatggtgtctgacaacaacataaagcataaagcagtttgttgctatcatctaacatatatacatcttacacctgatctttaactctctttttttgaccnaactntcaaagttctgtntctaaccttgaaacatgtctatcatctttcattctctcctttgcaaaagaattcgcaggacaaccgctgaatctttggcttctctcctttcaaaaagaagacacctctaaatcttggctcctctcctgc

SEQ ID NO: 259213 - DNA, 188 bp, Glycine max
gttctctggcctagatttatattctatcagtaaacagataatattgatgcttattacaacaataaaaataaatgcttatgtgatgaaccttgattggaccttaccatctgggactacaatgcatattgtccaagacagagcaaaaacatgcaaatcgatgcctcatttcaataatcatgactgtgcat

SEQ ID NO: 259214 - DNA, 333 bp, Glycine max
ctgaatacataaccatctatgactaaagtcagaaggtccatcaaactttaaatatctgactgtttgctattcatcaattactaataataaagtaaaattatcctataatatgagtaaaaaacagatataatcaccactaagatctatgtacattctataacatattttacaaatcataggactgatctaatttgagtttttcttatcttttaaattatgtaagttgccaaaaattagaaactaagatcaactccctcttgtagacaaacaattaattagaacactatttatcagtatgtgaattaatatgtccacactaactgtagatctgaa

SEQ ID NO: 259215 - DNA, 398 bp, Glycine max
  unsure (1)..(398): unsure at all n locations
tatggatgaatgcacatcttcaatagtattactatcaacttcttttttgctcttgctattcttaagatggatcagaaactgaggttagaatgaatggngaactaagtggggtaacggagttaaagaactagaacttgaagtttggatcagttntngatttacacattgngcattatntgtcagtacagcgcttgtgaattgngaatgatatgtcattctttatgggcttattaagtgacagtgagttctgcatgatacattactatctgtgatagtttatgaacagcatagtggaatatgttaatgcgattatttattttgaaaacttagatactgattgactagtgtacgtgtaatatctcaatatcatttttttttctccattaaaaatgctacta

SEQ ID NO: 259216 - DNA, 211 bp, Glycine max
atgaaatttgaaagcaacgataatacagaaagtcatatttcgttactctcaccaataatttgttactaaacttaacgtatgctcaagtagattagggaatattaacctggaacatcatctaagaaatgacgccactgtactcaataaaatgcctgtacaatcattctcaaatttctatgacactagattttaaaataaactttctaatcaa

SEQ ID NO: 259217 - DNA, 343 bp, Glycine max
agtagaaagaattgattctgttacaatggaaacctcacttgtaaattgaaaccaatcattatttaaaaccggctattaagtttaagattaaataaataatattaaatattgaataaatatataatcttaaagatatggggattttattataaagatgtatacagccctctaatggcaaggcctatagcttattgcttgctttctcgtcctgagatgcttatccatcctattatctcgcttgtcaatttcttccaaacttaaaactattctgtcacttatcaaatgactctcaagatgagacgtgttgtatacaacaaagcgctctatctatattgtcactatt

SEQ ID NO: 259218 - DNA, 211 bp, Glycine max
cctcaccatatgaagccgcgagatccatactgcttcctaactcttgccttcttacccgatccatgctcctgagaccctccgtgggcacaaaccccggcagaaagcggagttcactaagggctctctatgggtaccactgctatgcagaccgatatattatacacccttgtccataagggacattggacatctcgctgagataaatctgatc

SEQ ID NO: 259219 - DNA, 347 bp, Glycine max
  unsure (1)..(347): unsure at all n locations
ctaaagatttcaagagcgaagttattttttttataagngctgctacaaaaacgcactgccagtcaaagaggcataaatagggttatctcagactacttaatgaccgaagctaacatagttacactggttttaaataaccagttaagccactgaaaacttactgactgatagaaacatacaacctacgcatgtactaaccatgtagttatctatacacaccagtcaactgcttattctatatcagaagacaccaaagatcangatttagtgtaggtgctgccatatgttttagtcaactagtctgagcttctaaaccttttctatctcctctgcttttagctacttct

SEQ ID NO: 259220 - DNA, 261 bp, Glycine max
  unsure (1)..(261): unsure at all n locations
tgagtctaatgcccttcttccaaggaaggattntntagatgatattntagattccttagaagatacacatanttcatggaatgattctaaagaanaagatgaaggaagcaatgaggattctcaagataatggggctagaggaaataatgaacttccaagagaatggagagcctcaagagatcatcctctagacaacattattggtgatatatcanaaggggtatcaactagacattctcttaaaccattatgcaataatat

SEQ ID NO: 259221 - DNA, 308 bp, Glycine max
  unsure (1)..(308): unsure at all n locations
taagaatgagtcagtcatataagacgatgatggtcaagtggcatttaagaaaaataaacgatgtntgatgaatctttctatngtggtcccaccggtgcctgngaaacctcttattctatacatgatagtattagacgagttgatgggatgtgtgctangacaacatgatgaattcaaaaaagggaacggccatctattacttgagcaagaaatcacagcatgagagatgaactactcgntgctagaaaggacatgttatgctttgacatgggcagctcacttgttgnggcagatatgttgagtacact

SEQ ID NO: 259222 - DNA, 258 bp, Glycine max
  unsure (1)..(258): unsure at all n locations
cttctctctctctcganatagctganggagaatagttccgtgaagaaaatccaagtcgaggcgcttccgtaacgtttccgtgagtaatttacgcgaagattctcgaccgttcttcaagaatcatcgnntcgtcttcgttntcttcagtcttcaacgggtaagtacctcagaaccaagttttcaattcattctatgtacctgtggcgggccacattntgnttcatggtattntggttctcatttcatttactttttata

SEQ ID NO: 259223 - DNA, 226 bp, Glycine max
  unsure (1)..(226): unsure at all n locations
cattgaattcattaagtaaaaggtaaagccattcantttgttttcattctcaatgttcccaaaatcactctattgtgttctaatccanatcacaagcaaagttcanaatcaccggctgctgattctttccanaacatgttatgtccaagaattttttntggttaactcccacaacangnnatatatatatatatatatatatatatatatatatatatatatattc

SEQ ID NO: 259224 - DNA, 460 bp, Glycine max
  unsure (1)..(460): unsure at all n locations
ctcattcgcacgtttaaagtaacacnattatgcacatgcatatgtgtagaatatcctactatntatatcagcatagaggccatccaacacattctaattgtcatacatatatatgcattngaanagaacacacattctcacgcttaagagcgttgcgtcgaaaattacacttaactatgtcttatacatttgctatcacanactacctacacacactcgctctanatatatataccatacaaacctttcatggttcactcacatttatgcatattggcangatattacattatgcacatacttgccttnatatntacctatgatacacactatataaaagcattccacgtactangtgcaagaccatcatgggcagccaatctacagcaatctatttatgtttctacttaaaccaatttgatctagatagatattctgctgactanaagtggtctactgg

SEQ ID NO: 259225 - DNA, 99 bp, Glycine max
tataatgcttcaatgatatgtctctcacagatcttattcacaactgcctcagctgatagctagctcttgctggctgcttagctatcattttttcgcata

SEQ ID NO: 259226 - DNA, 58 bp, Glycine max
gagaatgaaagaatgagagagagagagagagagagagagagagagagagagagaaagt

SEQ ID NO: 259227 - DNA, 321 bp, Glycine max
tgcttgttctccctgttgcagatgtattaacatgaattctaatctattaacatgctataaaaaatattcctacattatttcatctctccttgcactcaaacaatctgatgaagagaaatgttcctgtgcagataagcaggatccaagactaataactttacatccaaacctattctttaacatcaataaaaactcaaggttcttactcctactcaactatctcaacatctctcaactgattctcagtagcattatacctatcaccatcatcatatctacattacaaacatttaaccataaacattcagacttcatcatcac

SEQ ID NO: 259228 - DNA, 171 bp, Glycine max
gcacccgctcactgtgacatataatatcttatgcctgacagtgtctactttgtattacaaacctcgactgcctatgcatggtaccccttctattgagttggtgcctcatggagcttaacgccattttcatggaacctaaaaaattttggaatacacacaggttctagagat

SEQ ID NO: 259229 - DNA, 186 bp, Glycine max
cttgtacaatgataggagagtgtgataccaccttaggtctcttgcattatcatattaaagttgagtcttgtatgtcgataaaaatgaaaaccctctggccttttgtgtgtgattatactggcgcaatgtatggagagaaaaaaaagtgtgaggtgctatgattatgctcgggtttattacttaaaa

SEQ ID NO: 259230 - DNA, 314 bp, Glycine max
  unsure (1)..(314): unsure at all n locations
ctaatatantttctacccatcgataaaatntatcagaaactaacacacaattctgagtgaaatttgtaaataaaaggtaagaattatatcannattttgtgatttctaatcaattagttaaaaaagaatgtgttcaagagaatangtngaaaaatgttaccagtgtttcttctgtgattgatgtaacaccatatactccgcactgtccacacattngtccataccaacatatctntntcttcgatgttgtgtaattacttcacagccccctgtggttatctgtcttgctntccatntgccttatanngtctcgt

SEQ ID NO: 259231 - DNA, 184 bp, Glycine max
  unsure (1)..(184): unsure at all n locations
actccaaagtcagtgcgaatcaaatcacttcccgcatttatctctagcatgcattcattattctnntacctactcctcacgttggttnntttaggaataacaccataactaaactcgccccaaggcatccctatcgcaccagatgatcaagaggagacacacgaacagatgatagccgacatat

SEQ ID NO: 259232 - DNA, 257 bp, Glycine max
aaacatgcacatcactgaacacctggtaacaaaatctatgctccctcagaatctaactttaacgttattcccatagacactacaggcaacaccccctcccatacgtctacttcacttaaactgctataatcctgcctatgataaactacctccctaaaatctaatattacatttttccatagactcacagcatgcccagtctccactcacgtaactttctcattctactgttatagatcactcctaaatttattact

SEQ ID NO: 259233 - DNA, 250 bp, Glycine max
  unsure (1)..(250): unsure at all n locations
gacaatgatgatntgaaacaacatgcaatattagtcatcgctacagccaggtgggcactcaagcatcccgtgtatggcattgtatactacggctggaattacacaacagcacaatgtttcaaatatgtctccatactcatgatcatcatctatttgtattacaataacttagcgcgtcctgttcaaaattgttgtcttacatgatatctttacttacaatcacctcagctcttctttctttttattatat

SEQ ID NO: 259234 - DNA, 289 bp, Glycine max
  unsure (1)..(289): unsure at all n locations
cttatgctttcctatctagctngcaccctgcanagtcagagtctgaaaagccaattatatntaaggaggtacctttgngataccacacaccaacatttggtatgcccttaaggtacttaatgaatccttttaataactgtaagtgagggtccttangattagcttgatatcttgaacacaagaaaacactaagcataatatctggctaacttgaagttaagtaaagaagtgaaccaatcataactggatacctngacttcatccactgattaccttttccatctaagtc

SEQ ID NO: 259235 - DNA, 161 bp, Glycine max
actagctcttaagtactgcttaaggacataagcgtttactttaatttgataacttgatcaaactttgtttattttattaaataagttaatacctaataacattatgccacttatacacaatgtaactaaacttatcttataaaatgactaagcccttttta

SEQ ID NO: 259236 - DNA, 346 bp, Glycine max
ccttattccaaaatagggaaaaccttatctattcaatgttgtgttgctgattgattcagatgattgctctcaaaagggaatgaatcatggcttatgttgatatggacaatatcaatgctttagatgattcaacatcttagatacatccaactcaatacataaaattgaaggatctatgatacaagtggcatgataataaaatgtttaagttactttgatgtacaagatgacatcctgccatttttacctcaaatgatcaattactgatatccattgatatcccatatattttaattagtgacatccatctgtctcacgatcaaattaagcattagttttaccagtt

SEQ ID NO: 259237 - DNA, 215 bp, Glycine max
tataaactagctacagataaaaataggggacgatggacaagaccaacaagaccttgtcaaggtcaggcaggcttcataaacataactatatacaaaattgacattagtgctttacaaaactaagacaaggattgctcctgcaaaaccactgattctaatgtgtaaaatgaatgtaactctgttctttactgaagccagctaagactgctgttgag

SEQ ID NO: 259238 - DNA, 368 bp, Glycine max
tattgtatgagatgctaatagaaaatattataaatgtaattaatttgtatatatacatgtggagatctaaatcctgtgattatcacacatacacttgactatcatattgtttatatcatgaagctgactactagatctgttaagacgtaatcaattcctcctaatacagtgatttataattattgtgcaatattaaaaataatttatgtatacatgaagatagttcctcatatttattacaatattatctaacataataattatattatgcagttcactaatatatataaatgctatatgcgatgagtttttatattcagtacatcttattattaatgtaactagtgatacttatatacgcataatat

SEQ ID NO: 259239 - DNA, 367 bp, Glycine max
actctttatggactgattgtgctcatacctctaattatgcacatcaaacctaatcagagtgcaatataaaaaaaataatggtcactttaattgataataaaataaattagattttccaattataatataaaatagaggcaggccacctctaatcacacgttaatgatgtggatatatcttatgtataagctgataaataatatttgttcatcaaattgatggctccagtctgatattgatttgttagaaaagaaaaaagtgagacgtgtattctcttatatatattacttcgaactcaattctgtactgagatcctttgattgaaagctgtgtgaagtcctatattcatctaaagatgtagatccag

SEQ ID NO: 259240 - DNA, 235 bp, Glycine max
acacacacccaaacacagagtgagcctccatctcctcaactggagaatacatcgaactcgttacagaacaacctcttgactaccataatgacatgtccatgatacacgccaatttacacgcttagcgcaatctaaagaggcttatggcgaacggcagacaacgcactctttgagacgcactcttctaaaagggaaatacacttttcggacttccgattatgacacaccttctctc

SEQ ID NO: 259241 - DNA, 277 bp, Glycine max
tttctgtatctatgtgggctcttaccattcttgttcgtgattcatgggaataccttaagactattgactcaagatcacctcataaacccacagcagctcatagggttaaccaaacatagaggtctaactcatattttgttggtttttcatgtttcttatttttctgatctctcagctgttaagtgtcaattatatacatacgctacaattgtatgcaatctgttgttacaaagggagagtcttattgtgatttggtgacactaattcaaatagtaaa

SEQ ID NO: 259242 - DNA, 287 bp, Glycine max
ctattactgccattctctggatgagaacgagcttgcttttttaatgtagaatgttggaaatcaccaggctcgacgttcgaggatccaagttcacgtctgcgtttatgtttaactaacggagcctaaccactttattatcttgcccgggggccaattgttcagatttagccgttattatttatcccttgcggctagcatattagcatttcctaccaaaataaaaattccccacattaatggtaccgaactggtaaaaatcacgaggcggcgacccttgaataaaaaaa

SEQ ID NO: 259243 - DNA, 221 bp, Glycine max
tttcgcacactttatatatacgatgctgctgcttatggggacggatcatacagcgcatgaaagtcactcggtaactttaatgagaaagggttttcaatttcattgttctccaataatattaatcaaatatattgtgttttttgctaaaattattaaattcaaaaaagttatataacttaatactttccgtacttttattaatttcttacaattaggaaaat

SEQ ID NO: 259244 - DNA, 357 bp, Glycine max
tgtgctactctgcttaagttgtgagcgcttcagagaagacacgtctcttttattatactactatctatcgagagacgactccttaagtaactactgtgcgtaccctcacaataaatgccgcgcttccacgaacaacaacagtagcgagtcaaagctttatacaaaagctatcgataccttatcacatggaatcgctcagcaacaataagagcagacagactctcttgcttattatactctacacagctatatagctcttagctcactactaactctgttcggacagtgtacactctcctgtcagactgctttataaggccatttcgtcgacgaatgatcatcttctactttatcgcc

SEQ ID NO: 259245 - DNA, 375 bp, Glycine max
  unsure (1)..(375): unsure at all n locations
gagctagttcactgatgatctcttaatgtgacctgcatagaattgtgctctactaagaagtgacctaattggttctgcacctaatctctggaatgtaaattcaattcaacaagtcactcngatgtaatttcaagtgtctcaaacttataattgcgaaataaatggaaggcagagtactgccttgttactagtcactacgtgatggcaattgctaatctcactgactgtatctgtgctgatcagatgattgggtagtctagatactgctacttttatatgctcaatattctttgcagttgaatgtctctcacactactttctattcatatggtttgtttcctactatggccactaagggccgatctctatcattat

SEQ ID NO: 259246 - DNA, 313 bp, Glycine max
atttagagagtctgtcagcttggacctggcgagatttatcccgtctatgttgggtgggatgctatgttcatacacaataaacaccactcattggtcttcatgcttgcttcaaactatcaatgtaatatatctgtctttttcacggatgaataataagaaattacttgacatctaccctcttccccaactttgtatccccccccaccctcttttttttttcgctatatccccaactgtttttatcacagaggttgtagtagtgtgggtcctcctttgtttcatcactatctggactgtgtttaagaaacctttt

SEQ ID NO: 259247 - DNA, 133 bp, Glycine max
agttattgtggtaaggaccactcctaatgcttatgttgtgtataatgcatatgtggtgcatatacttaaattatttaacggtatttacgtaactcatttccatacgatgccttctacgttttccacggacgct

SEQ ID NO: 259248 - DNA, 311 bp, Glycine max
gtcctgttattagaacttattaagaatttccattgggaggaactatggatcaaaagaaaagctcccccacaatattttttaaaaagaaataatggtatgacagcaacaggaataaacttgacactatgtttaaaacatggatagttgaatctgctttgaattaacctgacctaaaaccagatttgttcagctatcacctaaaatctctattgtatctttactttgctaagaataaatgacttgtgtgatatatataacttctataaagaccgaatgtaacgtcttttgtatctatctatttagaatatttt

SEQ ID NO: 259249 - DNA, 291 bp, Glycine max
  unsure (1)..(291): unsure at all n locations
ctgacatccgacccctggctagtagcatgaaaccggactactaacagcactctgcatcaccataaaacaagtcacaacaggagctggggngtggcacttaatctgatgattgaattggcttggatcatacaaggggtattatcaggtaaaatgaactgagtaaaggcttgtatcatacaactaaaggacaatgtagggcttgtatatacatgtggatcatctaagacatacctgatatcctttttacatccatgaatgactctgcgactggatcagtgaactgatatcaat

SEQ ID NO: 259250 - DNA, 304 bp, Glycine max
gcttctacacatcattgggtcggagaacgttttgttttctatgatcaaaagatctacgcagttcattcatcctgtgtctccacttgacaatgacttgaacatgtcatctttcgcgcagccatcagataaataaattaaaactcaaggacgtggccagaataccttctaaataattttcaaaactgtagtgataatgataaatgtccgccaaactacatctaaacaaggctccttcactattcactataaacaaacgaacagcttgtttgacacactgagctccttctaaccgtaagctttggaa

SEQ ID NO: 259251 - DNA, 144 bp, Glycine max
  unsure (1)..(144): unsure at all n locations
ctactattatnactatactcgtggtattgaaataatatttactattatcagattaaaaaccgtatagaatatacaaatcatttgttactaagtgattattcgattttataacattataatgagtaatagtgtgttggcctctaa

SEQ ID NO: 259252 - DNA, 138 bp, Glycine max
  unsure (1)..(138): unsure at all n locations
tttggctccttctatgngagaaaagccaatgaaatgncatttgtctacttattaagtggagaggggcngatatacaacacagagagagaaaacactcctctttgagagggagagaagttacacatcattgagagagaa

SEQ ID NO: 259253 - DNA, 388 bp, Glycine max
gcactgagtgtcttcggtatcctttactataggtctatgggggaacaatgcttgtgattttatggaaatctaaaagttgagcgtaaatgacgaactattatactggtataactacagtttgtacggttatatttatttgtggagggctttgccaaaagattgattcaacaaacacaaataaaaagttgattcatttgtgatttaaaattaaattttatataattgcttgtatttttatcgaaacaaaaccatgtgaatataaccttaaaatattattacctagataagtataaattgttgtatacttatcaactcataaaatattatctggatgtctttggaattaacaatacgatgtaaaaatcttttatatttttcagtaaatcta

SEQ ID NO: 259254 - DNA, 106 bp, Glycine max
agtaatgctctatcatattctcgaagatctctaacagaaaagcttggacaagtttttagaccttgacagctgccttatttatgtgctggagcttctggttaaacca

SEQ ID NO: 259255 - DNA, 380 bp, Glycine max
  unsure (1)..(380): unsure at all n locations
caatataacaatcatactntcagctcanaatgggtgcaagggataaatcaatcatgcacaangtaagcttnttagctaagtggctatcttcaatcaaaacatggccttcatcatcttcaaattcacacattcattctatactcggagaatcatgccaaaatcattactcaatgttagtcattctctcactaataaagatcacactctcactgngttacgaactaatgcgttcttcacaatcaacctgacaaaccaactaactatttcagtcatgatcctaaatccatgtccttctctctaatgatngcatgctcatcanggacatgatctacgcattccattcactaaatcacgcattgacaatcaaacatcataacact

SEQ ID NO: 259256 - DNA, 404 bp, Glycine max
  unsure (1)..(404): unsure at all n locations
actagttgtgcggcacatcaggtatgatccttgtgatgctatccatttattttcatcacttgtccactacctaataaacaacatccatctagtattaagttggtttaaaaatacctaacaactacctganaccatcacaataggacaccttaatgttaatcttctgtgccacaaaggtgatgagcatgtacatttgcagtcttaataattgtgccaccacggcaaaatttcccaccctataagcgaatgaccattacagtttgtcgttctatcacatgtggatgaacctttaatgacaatgtcactcaatatctgtgttcgcgtcaaatatcctcattatgaagtgttttacaatgaacatactatcacccttggatttgcttttatattttggcctatgtact

SEQ ID NO: 259257 - DNA, 286 bp, Glycine max
gtctgtgtggagaaggtgtaaagggtctctgcgcttttggctcgagaaaagtacatcaatagtgacacaagcgtacaacattgtacgactcaaaacctacgtacacatatgtcgctaaaaaatacgtacacattgcgtacaacacgcaatcctattgcctataccagttataatttatattgtagatacctaccagttaaggaagatccaaacgtaggaggctaagttgaacatatgataacttacaccctcattggtcaaacaacatgttcatgcttagatctca

SEQ ID NO: 259258 - DNA, 304 bp, Glycine max
  unsure (1)..(304): unsure at all n locations
tagtagtgtctgacgaccatntaattntcaatacccacattattcttgctagttgtataactggctattttatagataaaataagaacttatttctccttttttcaatataattataagattactaaatatttctttttattcaaacaaattgagattgtgtgtgatggctgacctgaatattgtatgtactgctcctatctaacagtaggtgtatatgggtattaacgtgagatctttaatatatattttgccatatacttgacatctcaccgcctaatataactatatatatataacctaag

SEQ ID NO: 259259 - DNA, 112 bp, Glycine max
ccttggcctactactggtgatattggagattttcatgcagattgctttaccacttgattagcaacagctgtatagtatacagttaaaatcaaaggctgtggattttttgttt

SEQ ID NO: 259260 - DNA, 322 bp, Glycine max
  unsure (1)..(322): unsure at all n locations
aaggatgtccacatattccatgaccanatgcaaatatgattgaaatttatcaaactggctgctgccctatctgacctcaatgtanatttatggcatggatgcaagctangattcattcttatttagtcacccaatgttcaaatatgtctttatcattgtgctcatccagccattctgcgtcggaaatttacacatcaccttcaggttcacattttaaaacagtatatcatgatntttcaaaaatggagcattcttcaaacatgtgttttactaacaactattttttcatctttctactgttctttctagtgccctttttact

SEQ ID NO: 259261 - DNA, 285 bp, Glycine max
  unsure (1)..(285): unsure at all n locations
cttcgacgttcttcattcattcttcatncgtcttcgatcttcaacgggtaagtacctcgaaccaagcttttcaattcactctatgtacccgtggtggccacnattcgttcatgtattttattcttcattcattacttttataccccctttacgtgctaaccattattaagtattctccttatgtaaatgaataatatcacgacgttgaatgatatccgtatttgtaaatgattcaccgtcgtcggcataccacgtgaataaaaagaggaatatattatatcaaaa

SEQ ID NO: 259262 - DNA, 389 bp, Glycine max
agcttcgtgtttatttagattacaagacatctagatggaaagtgtattcactccgtgagacccataaccatgaactgaccccacccactgatattcgtcatattcctaagtataatgtgatgactgatttggataaaagccaagtggacgatagtttgcataaatttggtgttagaacttgccacatcatggatgtttaatggctcaaaaggatagatatgatggagttggtttttcctaaagggatttatgaaatcatttttatcggaagcaacgagatatgatcaaagacaaagatgtttgtgttgcattaagttatttggcaagcaagtttgccaatgatcccttgtcatattcaacattcctaactacaattgatgatagattga

SEQ ID NO: 259263 - DNA, 367 bp, Glycine max
acataacaaaactttcctaaattggggtaaagatataatctttgatgaccataatgcatctgaaacgttctggaagttagtagatggacctaaaataaatgttataacttagaaaggataggatatcaacacatattcgttccacacgaaatcacacaatgacaatagtacaatgcaaaatagtggtgttagtctaacgtttgaatgtcaacactctgctattgtatataatggcaatccctgtgtagctttcatgccttactttgcagagattgaagaaatctgggaggttaattatggtaaatttagtgtctgtgtttcaagagtaaatgggtaataacaatatcggtgtacgaaccgatgattt

SEQ ID NO: 259264 - DNA, 397 bp, Glycine max
agcttgtctcagcgtgtatgcgagacttagactaacatgttagctatcatcgccaagtaccaagaagagttatgtctagccaccgcccacgagcatataatcgcggatgagtatgctcaagtgtatgcggaaaaagaggctaaaggaagggtgatcgactctttacaccaagaggcaaccatgtggatggatcgtttgctcttaccttgaacgggagtcaagaacttccccgattgttagccaaggccaaggcgatggcagacacctactccgcccccgaagagattcatgggcttctcggttattgtcagcatatgatagacttaatggcccacataactagaaatcgttaggaaacttgtatggtctctcagaccttgactagatacgactttct

SEQ ID NO: 259265 - DNA, 402 bp, Glycine max
tcgagtgcctgtatattgatgcgcctgaatcggacattcgagtgaaaaggtatgaccatttgaatttctcgagagcttcctatggttaattttgagcgtctcgatatattatacgcctgaatcgaacctcagtgtgaaaagttatgaccatttgaatttctttagagcatccgttggtcattttcgagcgtctctatatgtgatgcaccttaatcggacctccgtgtgaaaagttatgaccatttgaatttctcgagagcttccgttgttcaatttcgagcgtctcgacatattatgcgcccgaatcggacatccgtgggaaaagctatgaccatttgaatttctcgagagcttccgttgttcaatttcgagcgtctcgacatattatgcgcccgaatcgga

SEQ ID NO: 259266 - DNA, 399 bp, Glycine max
agcttggacaatgaaagcaagccaactaatgttcttttatatttttgaaaaaaaatcattaagtccctaatctttgttaaattataaaaatttattcaaaaatgcatatgtagcatgagaagtcgcttccttactattcatccatcctcatctctaacttgtcagtgcaagaacactatctcacacacacacttcaacataaagttaaaagaagaagaacaaagaagaaggaaaatagattgatattgcacacacactatcactatcactatcactatcactatcactacaagtatacacatactaccttttatacagttggtcctagtccaactaacactaattgtcacacttagtaacagttgggctgtaacaaacctataagcccattaactaact

SEQ ID NO: 259267 - DNA, 454 bp, Glycine max
tactaagcttaaggaggaaacatattcgtttagagacaagtgatacttgtttgttgaaaacctataaatacctaaagctttgaagacaacgagaatcaattgtaacactcattattcaagttctttctgtaataagctctttgtgtaaattcttgtcatgtttagaaaaactcttaaaacactttgattatcttgagagggaagactaagtactgaaactgttcatccatttgtaagacgataaagtgttagaactagcacgggcttggtaggatagaaaatatttgttgtaacaagcttggtgtacagcttgagttaaaaaaccgaagatgacaatgattaatacttgtaacttgttgaaattagtggaaaccggtactttaccaataactagatgtgacaaccccttgtacattgactcctactcaacctttgtttaactttaataaactct

SEQ ID NO: 259268 - DNA, 396 bp, Glycine max
agcttgtattttcttaaatgatcaaactactttcgcaggtcaacaacatgtgtctacctttgttctagacttagtgataatataatccacatacacttcaatctccttatgcataatgtcatgcaataaagttaccattgccctctaatatgtttccctaacattttccaatccgaaatacactactctatagaaaaagttccccacaacgtgacgaatttggtcttttccatgccttcaggcactatcttaatttaattgtatatggagaacccatccatgaaggaaaataaggaatgatgggttgtgttatctaccaacatatctatgtgaggcaatgggaaatcatccatgaggctaactttattcagatcacaataatcaacacacattctg

SEQ ID NO: 259269 - DNA, 462 bp, Glycine max
  unsure (1)..(462): unsure at all n locations
gggaaggatgcttcaatggaggaaaagaaagagggagagaaagagatagggggagcaagaaattgaaggaataaaagagggagaaaagtggaactntgaagtatgtctcacaagactctcattcatcaaagttacaacaagtgttacgcatgcttctatttatagactaggtagcttccttgagaagctctcttaagaaaacttccttgagaagcttctttgagaaaacttccttgagaagctagagcttagctacacacacccatctaaaagctaagctcacctccttgagaagcttccttgagaggctagagcttaactacacacacccatctaaaaactaagctcacctccttgacaaaatacatgaaaatacacaaaaaaagtccctactacaaagactactcaaaatgccctgaaatacaaggctaaaaccctatactaatagaatggccaaaatac

SEQ ID NO: 259270 - DNA, 389 bp, Glycine max
agcttagacaaatgaaaactacatcttaaatgagttaaaaatcatccagctttagatggctcacttgtagatttcgtacctatgttcttcctcacaaattcagacaaacttgcacaagcagcacgccctctttctaggcagtgaagataatcattcactagaaataaaaaaaaataaacagaaaactattagatcattgtgaaaccactgaacactgtatttttcaccttatcattttctttattattttattatttataagtcaccaggtctagcccaaaaatatataataaggaaagaggaaacagtcagatccaccagaggttctttaatagattcatggcccaagcacaattagatcttgcacattttattgattttattctgca

SEQ ID NO: 259271 - DNA, 278 bp, Glycine max
cttgctcaccttttccctcaaaaaatgaaatcatagctcaaaatattatgaacttccatgagtgactggattcatggccaaactgatagtagatctgaagtctacatacgccctagctggactctgaatattcaccttcaattcttcaagcaaggagtccaaccacaaggcttgacatgcaacatagcacgctgctatgtactctgcctcacatgaggataaagccaacactcgctatttcttggaacaccaccttattgatgtacccataaacttga

SEQ ID NO: 259272 - DNA, 386 bp, Glycine max
agcttgttattggaccaatactataattagtgctgcttagtttcttttcttttaattagtgctgcttaaaaatcaaattaattagcgctgcttagttccttttgttttaattagtgctactggacaatttgccattgtgtgctattggataattactaacattatacactatttaacgataacaactttcctaacatctattttcagttgtaccatcgataatccacctaagctagattattaccaagaagtactgatgtagagttgtttcaccttgattagtagtttcaaattgtagtctttgatatgttgcaagaagaaaatgacaatttggtcgataaggtgataaaatacattagtttgagtaatatgttttccttagacat

SEQ ID NO: 259273 - DNA, 498 bp, Glycine max
  unsure (1)..(498): unsure at all n locations
tgtgtcttctactaactacaagataatattttcatcanatatttgtattttacaggataccaataccaaggcgaggattggtacagttgaagtgagtcgcggtctctatcagttcacacccgaaacaacaaaatcacataccatatgttccactattactcacccaaaatgtaaagtcattcccataaacctatggcactttcgtatgggccatccttccctcgaaaggttacaagccatgcagtcctattatccattnttgaacaataacaaaaacttcatatgtaatacatgtcattatgcaaagcataaaagattacctttctcttctagcatctctcatgcatcaaataaatttgagcttttacatatcgatatttaggggccatgttcaaagacatccatgcatgggcatcactattttttaactatcatagatgactactctcggtatacatggactcatctcatgcacacaaaagccgaaacacgtaaaat

SEQ ID NO: 259274 - DNA, 391 bp, Glycine max
  unsure (1)..(391): unsure at all n locations
agcttctacgtcctttggtatataatgtgttctttggcatgtcactaaaagctgaagtagccaattgcatgaattaaattattgcatttttccaaagtttgaattaatggcaggatcatttggttggcacgagtgcagcctcaatcgctgtttctgaagagtcaaggatgcatgggcattacaatcattgcaagctacacaggtgtgcaaacaactgaacggntatttgggcatagtaaataattatattataaatgcttttaatgctacacattctatgggtcaactggatctgacaattgggccagcatcatgatcaaacaatgtacacagaggtttgccacttggttgctaatttaataaacctgggctgatattgagaatttgggtt

SEQ ID NO: 259275 - DNA, 284 bp, Glycine max
tcaaacccggaacatgtgataatctgaggcaccagtgagagcaccaaaggtgtatgcttagaagacaagactcatatcaaatctatccttagagacctgaaatatgcttacatgctggaatgtcctttcgggagtacatatatctaccacaacactgactgttatgctcgtccggttggtgtatacctaacaacatgagatacctacacacttgataaggaacatgggaacgtattcttcttaaactactgagggattgagggaatagaaaatgatgtgtcaag

SEQ ID NO: 259276 - DNA, 391 bp, Glycine max
agctttaagtgaggaagtgtggaatggtgatacttcctacttttattcgttgaccacagagtggtacctggagatatgtcgcgggggtcaggagaccttggggacgtcaggtggggtgctattgcccaaaaccaagcttgaccaatcccgacccatcccgggcatagtcagtcagtgagaacctgtgattacctaaacaggagagctcctggcagtcaacagataaaagaacaaagaccacaaagcaaggaggcttgtgtggtggctggccacctgtgaactttgagtgttacatgggatatggcctctggtaatcgattaccaagggtgggtaatcgattacaaggcttaaaagtgaaattcgagtttagcctctggtattcgattacca

SEQ ID NO: 259277 - DNA, 411 bp, Glycine max
  unsure (1)..(411): unsure at all n locations
tgcctgcatgcatgctagcattttcgtttatgagggaccttttttctgtggtcctcagcgtgtgtctagctatggtgtacacttagtgatactcttacacacagcccgcataatccccttatgccctgtggcccgccttcaactgagcttatgccctctccacatgagctcactaaccttgnttcatctcagaaatacgctactctatatctaccgagcttcaccaccatacaaattttatctttttcatgccgtacaggcctttactaattaactagactagggagaagccgaacactatggacaaaacagcaagcagggtccagtttcttacatacatatacatgagaggcattgggttagtatccattaggttaacgttggatcgactccaatattctactggcagtc

SEQ ID NO: 259278 - DNA, 405 bp, Glycine max
  unsure (1)..(405): unsure at all n locations
tctatatacgctgaaccattgtatcaataaacacttgtttagttgtattcacaaaattagagggtatctcttttatcttagtgagagtgattctcctaaattcttgagagattcaagaacaccctggctgtatcaaaggactctcacaacctttgtgtgtngccctcgctggaaagagagattcttttcttcctatcatctccacccttgttctgtcaaaccacaattccagaaaatccacctctgtccaaaattatctcgtgaccataactcccattttacacactcaaattaagtgattcttgagcctaaattgaatttcaaaacgagacctttcacctcgttttggaatcacctcatttggagccctgtagcttacgttattgccatttctatatttctgtc

SEQ ID NO: 259279 - DNA, 385 bp, Glycine max
agcgtataagaacaaaaacgcccgaattattttcaaatatgcatgtgaaccacgacgcagcaacgagaatcaagccaccgctaatgtgcacgagatcaatagggcaaaacacaccaaatgattataaagatggatggctcaaattctcacaggggtaaacagatcactgtgcacgagagccctcaaaactgtatgacaagaacagaagaatcaaggatttcaagtcaccaaatgccacgaacttttattctcaaaacagttacccatttgttgaacatatcctacaattcacagaaaaacatgcaacgtcgtccccgcacacaaaaaagacccaaaatggtaactgagaatacgacgaaactaacaacattaaccaattaacaca

SEQ ID NO: 259280 - DNA, 379 bp, Glycine max
  unsure (1)..(379): unsure at all n locations
agctttaggctactcaattgctccatgttgctgcatggaagggcaaaggtctgtatggtggtcancaaaggagcataaaccacagactcttgcgacaggtacagatttctgattcaaagccagctgggttaccaagttaaccaatgcatctagtttgccttcaagcttcttagtttcacgatgatgcagatgagtttgtagctacctcatgcactcctctaatgactatagcatcatttctggcgctaaactgctgggagttggaagccatcttctcaattaaatttttggcttcaacaagagtcatgtctccaagggctccaccactggcagcatctatcatacttctctccatattactgagtccttcataaaaata

SEQ ID NO: 259281 - DNA, 430 bp, Glycine max
  unsure (1)..(430): unsure at all n locations
tgctctanatttacattgatgtttgcatttatgggaggaggttatatgccattcttgctttaagagtaatgtcccactggtaaaactaaccttccaaatgtttgccttcgcacgaatggccccgaggaagcttgcctcaaagaggtccaggaaggacaaggcggccgaaggaactatttccgccccggagtacgacagtcaccgctttaggagcgttgtacaccaccagcgcttctaagccatcaagggatggtcgtttctccgggagcgacgcgtccagctcagggacgacgagtatactgatttccacgaggaaataaggcgccggcggtgggcaccactggttactcccatggccaagtttgatccagagatagtccttgagttttatgccattgcttggccacagaagagggcgtgcgtgacatga

SEQ ID NO: 259282 - DNA, 395 bp, Glycine max
agcttataagaacaaaattgccttaattatttccaaatatgcatgtgaattaggacgcatcaacaagaatcaagccaaggctattgtgcaagaaatcaatagggcaaaacacaccaaatgattataatgatggatggctcaaattctcacaaaggtaaaatcatcactttcaaattgagctttcaaaactatatgacatgtagagaagaatcaaggatttcaagtcacaaaatgtcaagaacttttattttcaaaacaattacccatttcttgaacatatcctataattcaaagaaaaacatgcaaagtcgtacgtgcacacgaaattgacccaaaatattaaactgaaaatccgacgaaactaacaacattaacaaattaacacaactaacaaa

SEQ ID NO: 259283 - DNA, 484 bp, Glycine max
  unsure (1)..(484): unsure at all n locations
tataagaacaaaattgcctcaatcatttccaaatatgcatgtgaattatgaagcatcaacaagaatcaagccaaggctattgtgcaagcaatcaatggggcaaaacacaccaaatgattatgatgatggatggctcaaattctcacaaaggtaaactcatcactttcaaattgagctttcaaaactatcatgacatgtagaggagaatcaaggatttcaagtcacaaaatgtcaagaacttttattttcaaaacaattacccatttcttaaacatatcctataattcaaagaanaacatggaaagtcgtacatgcacacagaattgacccanaatattaaactagaaatccgacgaaactaacaacattaacaaattaacacaactaacaaattaacaaaaccaacaaaactagtaaaaccaaagaacacttcccccncncnctccatacttaaacaacacattgttctcaatgtagcacaatt

SEQ ID NO: 259284 - DNA, 393 bp, Glycine max
agcttatggctttaaaatgatagagttgtcacaaatttatttgctctatattatttttgtttagaagctttgatgttgtgtgtcgaagctagaaggtatttttttaatttcatcacttctcaagcagaggactttgttttccaaaggggtacctttttttctttatttcggtgccacaagcagggatggtggatcagtaagtgagagattactaataagagctgaatttgagggatatggacaaggaaaaagaggaagaaatcggtagaaaaagaaaaacagtttgaaaaatttgaaggatttaaatgaaattatttgatggtgtgatatttatattttctaaaaacaattcataaaattcatcaaaatctattttagaaaaaaattattaaa

SEQ ID NO: 259285 - DNA, 400 bp, Glycine max
  unsure (1)..(400): unsure at all n locations
tatgatttatacatgatttaggacttgtatgatccaatctgggcaaaattggatgagggcaagagtgatttctaaaatctgcactattatgcagaattttgctgttgaaatgtgcagcagaattttgtgcttgtgcagaaaatgcttatgcatggctggttgtggaaaaggttgtacatattaagttttggacgttntctagaagatcccaacggtcaaaatgtatacttatgtactagggacctccaataaaattttcgagtcgatccaacggtgaacgaattggaacgaagagaatgttactggggtatttgagtaaagaaagctgtggttctggtttgtgtcttgggcagaagtttttagctctngccctgtttcttggttttggatagttcatgat

SEQ ID NO: 259286 - DNA, 394 bp, Glycine max
agcttctttggagccatcgcctgcaatatttgtttataaaaagttaatttgcatgaaccgcacaaccatcatttcatttatcttaaacaagcaaaggccaaacaatttttgaatggtgcatatcactttttaccaaatgcaagtgttaccgtgcaattagaaaacaatcatacattgatgcatatgtcattttcatttttttttaaaagcattttagctacctagatgcaaggcacctatcatagtgtagcaatctcaatcattagtctaattccaaacaatcactctcacatacttatgtaattcatacattttgcatacaagaaaaagtttagatttctatgcctaactcatgctcttggcatttaatctaacaacctaagttgtttacacc

SEQ ID NO: 259287 - DNA, 384 bp, Glycine max
  unsure (1)..(384): unsure at all n locations
caggtatgttattntcttaattgcttcaaatatatttattctttataaatcgctatattntattatttgtatgctattttttttgcacgtggtcatcttgtgtacaagaaaattgtattaacttacaacataacaacgattattcttccatctatatatattttcgctgctagtataatttgttcattattttagttattttttattaattatataataaattatttatctgtgttacggttgtttaatgtttagaatataaatttaattaacattcataataaatattactcgaatatcgctattaggcgtatttaacaaagaaaggcctattattattatatataaaatatatatatatacgtgttcttatattattctctg

SEQ ID NO: 259288 - DNA, 395 bp, Glycine max
agcttttgttttcaatttcgatcatctctatatataatgggacaaaatcgtacatccgagttaaaagttattgtggtttgcatttgctatgagcttttgttttcaatttcgagcatctcgatatattacgggacttaatcggacatccgagtaaaaagttattgtcgtttgaatttgctacgagcctctgatagactttcgagcgtctcgatattctacgggactcaatcggacatcagagtaaaaagttattatggttggaaattcctactagcttccgttttcaattacgagcgtctcgatatattacaggaattaatcggacatctaagttaaaagttattgtggtttgcatttgctacgagcttctattttcaatttcaagcatctcgata

SEQ ID NO: 259289 - DNA, 451 bp, Glycine max
  unsure (1)..(451): unsure at all n locations
tggagtttccaagtgccaattcgncttcttctttagtccagtcttcttctggcttcaatccatcagtgggctttccttctgtgtccagcatcttgggatgttcccagcctttgatgacagctttccaggttctgctatccagtgatttgaggaaggccaccatccttgctttccagtattcatagttggttccatccagaattggtggactgttcactggtcctccttctttctccatgttcatcagaatttatctccctagatcccactcagtgatttcgagtgcccgctctgataccaattgaaattctgataccaatgccagatgtcgtaccggatgtcacgacatcacgcttcagaacatgcagattatatatgatagtgtgaacagatttaaccagtgtattacacaagagaattggttaacccagttggtgcaacctcacctaca

SEQ ID NO: 259290 - DNA, 396 bp, Glycine max
agcttaagcctatagatgaagacaattctatttatatgtggtacaaaaacaccaagtactctctgcaggacaattggcagagaacctagggattgctactgtggattggcgtgatgttaggtctatttgcctacaaatttgtgcagcatatgagaaaagctgcatatgaggtgatgggccattgtgtatgcatgccaaaggtgcagccaaaacacttaaattaaaggtgactaaaaaggaacatatgtatctactttgctctaatgcttggtgaaacttaatagctttcataagtcaataaggtaatgaaagttgaaataataagaacataatgagagtattttttttacagtgtatagctgtggcagtaacaattgaagttggtatacatggcat

SEQ ID NO: 259291 - DNA, 431 bp, Glycine max
tactcaagctttgcaattaaaattttgttcctcaagcacagggacatctagtgctaactctttttcactcaacagtaacaatgcttaatgatgataatgcccaagccttttgtgccagatttctgtgcgattttctgagagagaaaacaacttgctcctccttcaatggatttagagcaaaaaattttcctttcattctcaccttgaagatttcttgaccagctacatctttaattaagcaatatttgtcttcaaatacaactttaaatccttgttcaatcagttggccgacacttaataagttttggtcaatttcaagaacaaatatgacatcagcaatacatctagagcctacagaacttgtgattgcaactatcccctttcctgtgactgatatgaagtattggatggtcctggtgccttgcgataat

SEQ ID NO: 259292 - DNA, 389 bp, Glycine max
agcttcttaacttgataaagtcttctttcttgggcggcttggtgaagatgtcggctatttggtcttgagacttcacatattctacatgtacatcctttcttgctattaacaggtatcaatatgtttgcttcaatcatggaacactggattctttgctacagcaatggctgactgtccacaaagacctggttgggtcttcttgtgacatacccaactcttttaacaaattcctaagctagactgcatgacaaacatatgaagtagttgctacgtattctgcctcacaagtcgaaagagtggccgtaacattccatttttttgtaaataaattaaaaaggttttttagttaaaaaaaaaagaaatagagtttcagtaaatggtgagatttt

SEQ ID NO: 259293 - DNA, 419 bp, Glycine max
gcttagctaactctaagggagacatcctatcatgtgctatatatatgggtcatgttccacgtaccgagtttatggaaaactcaatctcatgctcggttggtagactagtaacttttatttaaaacaccttaggaaaatctctcactataggtacatcactcactgttacaccactctcaagtttcaagctagctatcatcatgtatacttgggagttctctttcatggattccttcacttagttggcaatgataaatctcgcatccataccctcacacgaatttgtaaacataatagacttatgaaaacaattcaacaggacatgattgaaagataaccagtccatgccaagaataacatccaattgactaagaggcaaacatatcaaaaatcatcacatgacaatttaagcaaacatc

SEQ ID NO: 259294 - DNA, 383 bp, Glycine max
agcttcggtattcaatttcgagcgtctcaatatattacgggactcaatcagacatccgactaaaaagttattgtcgtttgaattagctcggaggttcagaattcaatttcgaacgtctcaatagattacgggactcaatcagacatccgagcaaaaagttattgtcgtttgaattagctcagagcttcaaattcaatttcgatcgtctcgatatattacgggtctcaatcaaacatctgagtaaaaaagttattgtcgtttgaatttgctgaaagcttcaactttcaatttcaagcgtctcgatatattacaggactcaatcagacatccgagtaaaaagttatcgtcgtttgaatttggtcggagctttaacattcaattta

SEQ ID NO: 259295 - DNA, 481 bp, Glycine max
  unsure (1)..(481): unsure at all n locations
tcttatccaaggctcatcttggtggagaagctccttctttcatggcttattccttaatggatggcgcctcctctcacctcttttcctttgtcttccgctgcatctccatggtggaaaatcaccattaaaggaccccattgaagctcaaagatccagcctccatagaagccccacaagcatgcttccatcactcatactatctcttacccaacctttgctaatgagttcatccacttgtctttgaatctctttggtttcttgtggattacttctataggctggcctattgggcaaagaagctcccggaatgagatcaatttgatgctcaattcccctcaaaggtggtagtccacttggcacatttggtggaaacatgtcttgaaaatcctgcaaaagagttctaacactagaaggcacttcacattcatcccaagtgttggtggtcaaaatctgatttttganaacaagatatatagtgact

SEQ ID NO: 259296 - DNA, 401 bp, Glycine max
ctgccgcatgcaagcttcaagtacatgatctttgtatgtctctaatatacaacaatgggtttaagtaattgattggtggtatgaattggctataataccttttgtcaaacactatatttcgttaattgttttatggtctgtgtatatcgaaatttcattgttgaacctaattatcatttaaagtgatggatatcacttttaattttgatagtttgttatgtttttaaaggttaatgatttgtttgagttttggataggtgtttcattctggtttgtgatggcttcttgggcgctaatgctttaaatggttgctttcgtgcatgcacataatgaaatctttggttttggttacatggactgctgtaatttgctgctgcttcactacctctgcatctatgtgt

SEQ ID NO: 259297 - DNA, 375 bp, Glycine max
gaaatctcattctacttttttatttataggtcgggcatttttgttcctaagattgtaaaatcctccattagtccatgactttgaaaaagtaattggtttttggtccttttcactttatttttctctattgttttgccccatacaagattcaagtgaatgacattttgcaaattaagggattaaccgaagattttaatatctttgggaactaaaatgcctgaaacactccttgtttcctcactttaatatatttatgagaaaaattgaataaatgtaacgcttggttacccactttgagatatgggttgtgcttgtggcttctctttagtactcacgggtatttcaagggagtgtctggtgtcatatggagagaga

SEQ ID NO: 259298 - DNA, 389 bp, Glycine max
agctttagccaattttgccatttcgagggtcaaactgagcttggaattcagaacctctgcacttgaataattgggctacgagtttgggctttgttttgtgaaattagtttaattaggtatattagatgagcctaatgaaggcctatcccttacttctaagtattcactctatatatttgtggaagttagtagttagttacttcaatttgtaaaaaacaaatttagttacatgttgcgtaagcttgaggataaaactcttttctctctttttctctgaactgttcttcattcttcttccttttttcactttttttcttcctttctcgtgcacaaatttcgtggattttctattggtgatgatcatggaaggctaaaaacttaatcaatcc

SEQ ID NO: 259299 - DNA, 407 bp, Glycine max
  unsure (1)..(407): unsure at all n locations
tggtcttggagtccttcttcttgagcaaggcttacacactcactttattcattttcaagtgcttcaatccataagtatcagcaggtctacctttaatcttgtggatcatgcttngtggggatgttcttccgtcttggtgggtggaggaaaactcaaattctgcatcttctatatctaaaactcaaaattagtgaaagttcattgtttacatgttgatggctgacggaatttcattttttattttagtggtgcctatctctgccatgcaagaccatttctgaggtttttggggtcattggaaccattggtgaaagtttaaaatctttctgagtactccctctattatcgctggattgttttttattttggacanatctgtctattntcatatttgagttttaatacat

SEQ ID NO: 259300 - DNA, 391 bp, Glycine max
agcttgagatgaggaagtgttgaatggtgaaacttcctgcttttattcgttgaccacagagtggtacctggagatatgtcgcgggggtcaggagaccttggggacgtcaggtggggtgctattgcccaaaaccaagcttgaccaatcccgacccaacccgggcatagtcagtcagtgagaacctgtgattacctaaataggcgagctcctggcagtcaacagataaaaggaacaaagaccacaaagcaaggaggcttgtggtggctggccagctgtgaattttgtgtgatatatgggttgtggcctctggtaatcgattaccaagggtgggtaatcgattacaaggcttaaaaatgaagacaggaggctaaaatggtctctggtaatcgat

SEQ ID NO: 259301 - DNA, 452 bp, Glycine max
ggggctcttgcctcactcaccgcctttttgggttcatttctagctatcttatacttatcccaagtttcagaatttctacacctagaccactccttgaaacactcattttttactctaactttgctctgaacattttcattccaccaccacgattctttacccctaggtccaaaacctctagattcacccaacgtctctttagccactttaataatctcttgggacatcttgttccacatatcatttgcacttccttgtgattgtccacaccatccctcccatatcttttgttggaagattccttgtttctcacccttcaagtgccaccatttgatccttggtgctaccataggacttcttctctttgccctatctctaattcttacatccataaccaaaactctatgttgggtagtcaagctctctcccgggataactttacagttcaagca

SEQ ID NO: 259302 - DNA, 362 bp, Glycine max
ttatttatgaaccttatgcggtgatgactaatgaacaaacacatcagttaaacacatggatagctaagactgaagcaacaaaagaaatttgtgataactgatgatgactaagttaattttaaaaaaaaaaacgcaaaacttctatgaaatttgggttctgaaaacatttagaaatctcacctttttgctcaaaactcatgaccaaattgattccatttcaaatccgaagtcaaactacttctttagaaagtacattccatcccgaagttctaacttcttcttagaaactagaccagacaaaattcagggggtacaagacaagccattcttacctggagagtatagtgaattccttcattaaa

SEQ ID NO: 259303 - DNA, 420 bp, Glycine max
  unsure (1)..(420): unsure at all n locations
tataagctacatgccagctaactatgcggatcttatatttttcggagaaaggattgaatccggactactaacaggcaagttcaaatatgctgccaatatgggccccaacaacaacagataagccccaatagtgggcgcgaggaaaaaggaaagagacgcccacgcggtcaccaccgacccgacgtggatgaatgcaccccaaaatatccaaagctcataccaacccaatcccccagattttttaatccgagctgggaagttcctcccgactcaagtaaaaggaccactcgcagcagaaagagcgccggcacaacgcacagctccagccgcaccccggncagttaataatacaggccccggcgcgacttatatatatgcacaacacccagcccgcgaaagacaacttcccttctattccat

SEQ ID NO: 259304 - DNA, 388 bp, Glycine max
agcttcattaagaggcttctagcacacttcagacatcttctcatagatcccaacggtcagatcatggacaagtgtcttgtgaagttgcagaccaatttcgagaagatccaacggttaacgaaggctgggcagcgtttttaccgaggcagcttcatgtagctttctctagaagcttcattaagaggctcctccagaagcttcctcgtggcttctttgagaagctttctcaagaggcttctttgagaagctagatccttatttatccacatccctcttttaactaaattaacctccttaaaaataattatggatgaaaataacgcaacacataatcaaacatcaaatataattactaataatatataatatatatatcaggggtgttaca

SEQ ID NO: 259305 - DNA, 414 bp, Glycine max
  unsure (1)..(414): unsure at all n locations
tcctagcggnttctaattatatggggcattaagtctatcacatgctgacaatagctgagaagactatggatctcctaggaggcggagtacgtgtccgccattgctttgtccttggcaagcaatcggggaagttctcgactctcgttcaaggtaagagcgaatacggtcattcacatcgttgcctcttaatgtaacgagtagatcacccttcctctagcctccttttctgcatacacttgggcatactcgtccgccactctatgcttgtgggtcgcggctagatttagttcttcttggtacttggcgataatagctaacatgttggtctctgtctcgcataaccgttgaggcaaacttcttttggagctcgagcaagccttcaattcatctttcaagatcaaattggccactcgc

SEQ ID NO: 259306 - DNA, 392 bp, Glycine max
agcttctggtttagtgaattccaagattatgttttcatgaaccttatgtggtaatgactaatgaacaaacacatcagtaaaacacatggatagttaagattgaagcaacaaaagaaatttgtgataactgatgatgactaagttaattttaaaaaaaaaaatgcaaaactttcatgaaatttgggttctgaaaacatttagaaatctcacctttttgctcaaaactcatgaccaaattgattccatttcaaatccgaagtcaaactacttctttagaaagtacattccatcccgaagttctaacttctcctcagaaactagaccagacaaaattcagggggtacaagacaagccattcttaccttgagagtattgtgaattccttcattaaa

SEQ ID NO: 259307 - DNA, 487 bp, Glycine max
  unsure (1)..(487): unsure at all n locations
tccttgagaagcaaggaaggtagattccttgggaagctatatgaagaaagcttccatgagaagctagagaggggctactcacactcctccaatagctaagctcacccccatgccaaaatacatgaaaatgcaatggtaagcttccttgagcaaagaaggtagcttccttgggaagcaaggaagaaagctttcttgagaagcaagaggggggctactcacatctctccaatagataagctcacccncatgccaaaatacatgaaaatacaaaaagttccttctacaaagactactcaaaattccctgaaatacaaagctaaaaccgtattgtactagggcacctttaacttgtagggttgggtgcccttaatttttatggtaccctacaaacctaanatggccaaaatacaaggcccaaaatgaggaanacctattctaatatttacaaagaataagtgggctcatacttaaggctcatgagaaccct

SEQ ID NO: 259308 - DNA, 394 bp, Glycine max
  unsure (1)..(394): unsure at all n locations
catgcaagctngtgtattcctgcattctactaatatattttattgcccattgctttgcctgagaataacaattggttgaccacaacagcgctgggggcggcaacggacaatggtctttcaaataaacctgttgtacatgaacaaacattatatcatgcgctgaccgtgccaaacgaacaagcgaagtcattgcataatgttacactaactatattcaatgtacctgaacaaaatgatttccaaacacgtgaccgacacatatgatgcggtggccagaagagtcaggtggtggttgacttctaagagggaaaaatgttatgctctgttgttgggacaacgatacaaggattacgttataccgtgaagcaatcacatatcccatgtctgttatatc

SEQ ID NO: 259309 - DNA, 393 bp, Glycine max
  unsure (1)..(393): unsure at all n locations
agcnttgagaatatttcttttccttcttattgttgctaccaaaacaagttcttgaaattatttgagcagacaaacttcgcagatcttttgtccattttaatctctgatactgctccctcactttcaggtctagcctcccaagacctttgtgttatatttgttgcgtccactatcagattaaccatttccttaacatgatttacagcaaaagcaaattatgagatagcaattctaatgtagtacaactgaaattatttagctctcttgaagattagctttcaaggtaaaaatacttcaaaatactttatttagttaagggtcatgctagcagacactgattaaggaattaaaaaacgaaaagcttttattgaaataatctagtagcgcttttaa

SEQ ID NO: 259310 - DNA, 361 bp, Glycine max
gttaaatcgagtctagaatctagataggttattttaaaattaagtaatttaatatttcctatggatcatatatattatatggcatttaaaaaaattaacaaaatattaattacttttcaacaataatcttcaatttattatgggaattattttaattaataatttttttaacaatttgcatattatattaaaagataaatatttttttttacaatagtcgcattcaggattttaacatataaacatgatgataagatggattgatgctcgaaaaaataatatgagatggaagaaagattaaatcttagatgaataaacatacaattcccatgactacatcctacgccacacattcaaaaag

SEQ ID NO: 259311 - DNA, 394 bp, Glycine max
agcttttgcatgttcagagatttctagttatataaaggtccaaagtccagagagtttttagagcttttgttgtgcgaagactggcagagaactgagcatgaagaggtagtcatcctgagagcgtgagatgagtctgtgagtgattgtgaggttctagaggtggaggagacatccccactacttgtatttcttcatcctttatttttttctcttctctttgttgtaaaggaagcttcccagatatggagagctaaatcctctgttggttcttccttgtaggtacttgatgtaaatacctgtataggaactaagtgggtatttagaaataaattagatgaaaatggtatagtaattagaaataaagctagactagttgcaaaacggtacaaccaag

SEQ ID NO: 259312 - DNA, 395 bp, Glycine max
  unsure (1)..(395): unsure at all n locations
agctttntatttatttatttacgacggttatttaatgaaaaccggtgtaaacttcattatacaaaacattctaaggcagttttcaataaccgccttagaatgtgcatcatcaattacaattttgaccatcataattacaaaattgccaccaaaccactttctaaggcggttccagtgacaaccggcgtagaaaggtgtcgtaaaaagccctttttctactagtgggaacaagcctttccatcttcgtgacccttatatgcctctatatcactccccacctctaccactaggcttagagaatctttgtcggctttatgagaattctctagtgttatgtaaatcttctcttgggctaagattgttggggtggtcttgtggcttacaggctcatgttt

SEQ ID NO: 259313 - DNA, 391 bp, Glycine max
  unsure (1)..(391): unsure at all n locations
caattattntggcacatgtgtgaggtgaaatcttatatcgtgtgagaaagaaaagattgaacactatataagtgaaagaaagactcggcaacccggatcttaattattcatgacttattggtgtaaatctctcccgtatatattctctcaattgcacaacaatacatgatacaaggcaatgccggtactgctttgagttgatctgttcttcactaattaagtctatgagtgaagaattaaattccaccggaaaattgtattaaagggagatctggctttcttagcaacaacatgaatgtaaatcgacagaatggttacttgaaccactgnttcattgtcttataattttaccaccacagctcagtctatttctctgcaacgtgcatgttat

SEQ ID NO: 259314 - DNA, 389 bp, Glycine max
agcttaatttgtgagttgattttatccttagtttcactttggttattagtcaattaatccaaggaaacttccaaagaaaaacgtccgattaatttttttgattattttattattattttttcaagatattttgattattttattattattttgcccttttttggtttaaccgtggttacagtgtgaacgatcggttagattttttttaacagtgattaaacgagattacaatgcaaatgatcgattgaaattcattttatcatttattaggcgagataacggcttatacgatcggttaaagtttgttaaaaacggaagaaaagaaaaccgaaaatgaacgaaatgaagatgaaagctaaaaaaacaagaaatgaattgaaagtctcgga

SEQ ID NO: 259315 - DNA, 414 bp, Glycine max
  unsure (1)..(414): unsure at all n locations
tggtctaagccaataatgcgtattgtgaagngatctcttgtagacttttctttgcaggagtgtaagctctatcccgaagaattgcatggtcattacctgccatgttttcaataagctccataacttcatcaggtgtttttaactttatctttcctccaatggaagcatctaaaagttgcttcaagtgaggttgtaagccatcaataaagatattcatttgtattggctcactgaatccatgcattggagtccggcggagtaaaccgtggaagcgatctagagctttgctgagtgattcatctagaaattgatgaaataaagagatctctgcttttccttatgatgtctttgatttcttcaagaatatctccaaaacctctctccaagttcttaggctatttcccttaagcgaat

SEQ ID NO: 259316 - DNA, 386 bp, Glycine max
agctttaactcttatagaaaccaataattaaagaagagagctattacattgaccaaagactgaataatatatgcatgttacaatggttttaattacagatgttaatgaattagaatccaagttaacaaatcaactaagtttgaaggcatcacttttcaatttttgtaacgagaaagccatgtacacatcagaaaaacttctttacctctccatgttttgattttggtttgttttttcttcttctatcggtgttccctttatatgcataaagtgttagaaaagtagtttttcacattaacatgcttcattttgatgttgtttgatgatcaatgacagtttggaatgccccagccaatgccctcaccttgttcttcctttcctccaaa

SEQ ID NO: 259317 - DNA, 467 bp, Glycine max
  unsure (1)..(467): unsure at all n locations
ntacccttcacttgcaagaaccacttctcataacaacaacacacactcttctgctagtgtccacaacagtcttcttagtccaaaaaaaaattcataatactgttgtatctagttcttttaaactttggcatcaaatactatgccatcctaacaaggatgcactagcaattgtactagataaatgtaatataccttttatcaataaaactagcagggatttttgtaattcttgctctatagccaaatctcacaaactaccctcttctattgtttatactgcacctcttgaattagtattctttgatgtttgggggccctcttcagtagagtcatcttgtggattcttgtatttcctaacttggtttgatgcctattctagattcacctggatttatctgcttaatcataaatctgatggtctaacacagttcagcctttaaagctatggcagacaaacaatttcaaca

SEQ ID NO: 259318 - DNA, 390 bp, Glycine max
agcttggatggatgggactccattgtttcttcctgtactaacgaaaaaaatatttagatcatgaaaaaaaaaatcggtccaaaacaaaacgtgagccccatagacagcatccaagagatgtcataccttttctcttacatatcgcggtagtgcaattgatgccagattgcacacagcagtctcaggcggattgaatattcaattatctcagtacacaagtttgacgatttaattgtacccaaattctgttgattgcttttcctattgcaagtatcctaatagtgtaaacaaaaatgctggaattactcaacgggtgaaaacaataaatacaaaatctcatgaggaaagtcaaagacatctaagaacaccaccttaaaaagcatgtacggg

SEQ ID NO: 259319 - DNA, 265 bp, Glycine max
gtaccacaccaatataagaggtgatttgaacactaataactatatctttaaaactttaatattgcgggttatagttggtctgccttttatgaagattacagaataactttattcaccacattaatgattcggtccagcatacctgactatctgggattgcgaactactctgtcagtatcaccacaattgtatttagaatgtaatagaaaactgaaaagagaatactaatgatggagactacatgcccaatgtgaatatatatctt

SEQ ID NO: 259320 - DNA, 396 bp, Glycine max
agcttgtaggattatggggcacccattacatgtggtactaggtggcggtcgggcgatggtgcacaactagtttttccacatccacaatgcgcgcataaacccaccatcccctgttgcccacctacaactgagctcacgtactcccacgtagcccatatcctcgtttctctcaacaccgggtccgcatcaacctcccaagcttccacaacatccaagcaaaacaacattcacacagcacaagctatcacagccaagcaaaacagagcaaaggcagaaaactctgccaaaacaccaaccaaaaatcacagcttttcccactcaaagaccccagtaacaattccttcgatccaattcgttaaccgttggatcgactccaaaattttactggaagtctac

SEQ ID NO: 259321 - DNA, 505 bp, Glycine max
  unsure (1)..(505): unsure at all n locations
cattacggacctataaaactcagcttacaagcaagctttcatcaagcacctcccncttggaaatgatttgacctcaaatcccgatgttcttgatactctaggctccttccctcgacacctgtaaaaagaataaaaacatatatattaatggtgttgggtatgttagagtatggtaaagtctgaaaacccctttcctgggcattatcccatgagggaacatggttcctcaccaactcaatgagtggtgctacaagtatagaaaaatatgggacaaaccttttgtaaaagtttgttaagtcatggaagccctagatttcccttatactttgtggagtgggccaatcaggaatgacctttattctctcagggtccataagaaccccttgatcacaatntaaaaagttaaggaaagcaatgcacgaaaatgtacctttcactggatattcatgtngattattcctacaaaaaagtacgacaaacctcaaggtgtccatatgagcaccta

SEQ ID NO: 259322 - DNA, 388 bp, Glycine max
  unsure (1)..(388): unsure at all n locations
agctttatgtaggtatgagagtggtctaagactcggngtgtcttttccctttggcttgactccctttttatagttgttggagtggacttgggcttgcatactcacgcttagcgtgctctgctcgcttagcgcacgtgcctgtttttgggcttagtgggcgctatgcgctgagcgcgtcttggactgggctgattttaaaatcttcatctttttcctatttttggcttctttttgcttttaatccctccattttttatatctacaagccataaaaaaaatcaattcctaacaattaagcatgtataactgctaaataattatttttaaagatattttaactctattgttataaaaaaatttcttatttagcaattatcaacatttaatg

SEQ ID NO: 259323 - DNA, 495 bp, Glycine max
  unsure (1)..(495): unsure at all n locations
tctatagcattaagagttcaacattactaattttaaattttgaacgtactgatggatattgattgatatagccagatttgtttgtttctgtatgccccctgccccttttttcctctttcaaagaagaataaaaagagcatatagtcctgccaaagaatttggcataacattcattactttttcactcttcttgtaagcaatgtcctttttcttgcagctgcaagtgccggatgaagccttatcacttgttatgagcatgggttttgctgaacgtgatgcaaagagagcattgagaatgaacaatcaagatgttgggggtgccattgatttccttgctgaggagaagacaaagaaactgcgaaagagggaggaggatattctgaggagaaatgaaattaagtgagtgacacttaatgcttatcagaacttattttctttggtttctctttctaaatagcttgccttcagggaacanaagcgatatgggatgacacc

SEQ ID NO: 259324 - DNA, 388 bp, Glycine max
agcctaaaacattccttcttcggccctttttttgaacacttttccgggatgaatcgtttgcgacaccctctttgttgatttaaaaatgctagatctatttcgcgcatcacacgttcgatccaaaaccttggtccactagaggaataaaaaccaccgacttcgttcccataaagcctagtgctatttccttccaatttcgtaacactgattgtaatttgcaaattgtacagctagaattttgtttcttttctttgggtaaatgtctggtttttttttcgtatttcctttattttacaattctctttgctgggtttgcaaagtttgtacagttagggttgtatatggtgaggatcggagggtgtttttgaaagaattatcagattttgat

SEQ ID NO: 259325 - DNA, 391 bp, Glycine max
  unsure (1)..(391): unsure at all n locations
catcttacattaaattcaacagaaacctaatctatngttggaaattgggttttaatagtaccaaaacaacctatttattaccattaaaatatattcaaaacgcttaaataaaatctaaaagaaattaaattgccagtttataattgacacattattatttcacttggattaaatatatcttgaatttttctttcttactttaagctagaacttgtaatcgttaattttttttaagcaagatctccttcggtntcttaactcttgctctagttgttgaacctcataacccaattaagttcttcctctcttggttttattcattaagttttccttactcttattaataattcttgaaaatatatgtaaagaataactatatatcttttatata

SEQ ID NO: 259326 - DNA, 390 bp, Glycine max
agcttgcgccgccagcaccacatccctttaattctgtgcgagaataatcgccgccggggaggcacaaatggcagcagctgcgccacgactgataccaacgtttaccatcaccggaaatagggttgccatcagcaaaacacccagaccggttgcggaagagacggccagagacatcaaacaggcgacaaaatagcggcaatcatcagcaggtaaggggagttaatatactgcaatggttttgacgccagcttgaccaccatatcattcgcgccgatatgggtcatgtaagcggcaaatccacacagcatcataatcatcatgccgaggtcgccgccgcggctcattagtaatattttaacgtattcaacgatatccgtggcgctgtagcct

SEQ ID NO: 259327 - DNA, 401 bp, Glycine max
  unsure (1)..(401): unsure at all n locations
tttttattatttactttggggcctggagacatgatatattatgctgacattcattgagctccttattgnggttgtggttattgtgggtgtagctcgctacatcattaaagggtattccgccactggtgtgttatttgtcggtggcctgttattgctgattatcagtgccattatggggcacaaagtgttaccgtccagccaggctttaacaggctacagcgccacggatatcgttgaatacgttaaaatattactaatgagccgcggcggcgacctcggcatgatgattatgatgctgtgtggatttgccgcttacatgacccatatcggcgcgaatgatatggtggtcaagctggcgtcaaaaccattgcagtatattaactccccttacctgctgatga

SEQ ID NO: 259328 - DNA, 394 bp, Glycine max
  unsure (1)..(394): unsure at all n locations
agcttgtaaaactgcagtaaaacatcngtgctttgaaaaagaataaccaatctcatcgtccagttggtgttgtaggttgcactgagcaatctttgattcaagctgggctagttgttcttcctcccaagaaaacaatgctctcctccagtcccagttccaattccaaactctgttttgatttcatccagaccataagtatctttatctgttgagatactgaacaatctagcaaacatattcttcaatatcactttatctatccatttctgtttgcagaattttgttgacaaaactacctagtcttgggcaccacagccttaaatccgcagctcctaaccttaattaaaatccacacttaccactgttttcctgggaattccaaaagatcatacac

SEQ ID NO: 259329 - DNA, 465 bp, Glycine max
tctatagaagggtacgccctaaatactctacaagagcatctcctctcaatgagctggagaagaacaatgtggcatttacctgtggtgaaacacaagagcaagcctttgctttgctcaaagaacaacttactaaggcatctgttctagctgttcctgacatttctaaaacttttgagctagaatgtgatgcctctggagtgcgagttggagctcgattgttacaaggtggtcaccttattgcttattttattgaaaaacttcatagtgccaccctcaactaccacacctatgataaagagctttatgccttaataagagccctccaaacttgggaacattaccttgtttctaaggaatatgtcattcatagtgatcatcactcacttaaatacattagagggaagaacacagttaacaagacgcatgccaaatgtgtagagtacctacagcaatttccatatgtta

SEQ ID NO: 259330 - DNA, 398 bp, Glycine max
agctttaagacaaaattcaagtctagttctgtaattgttgatgacaaaaactgaacgtgcgagtttatctgtattatgatccatcatatttgctaggcccatcttttgtgtacgcgggccgaacccactgtccaggttaaaccttttgtgaatgttgtcaaagaaattggactctcttaccatgtatttgacaaagagaagatgggaagaaagaaaaataagaataacacatcatttctttttgttaaagaaaaaatgaaaggaaaagggagagaaaaattgacttttaaaaataaaatttatttttttaattcaaattttaaaattttgttttctttcttatttttcttcctttcaaccaaacagatcattagtgttgctccaagcgaatctacctt

SEQ ID NO: 259331 - DNA, 356 bp, Glycine max
aaaatctactataatgcatataaaaggaacttattatatcactattttaaacctccttcgatattgaatatatgccaagaaaaatattatttatacatattaagaacagtgggtaccattatttaattatatccaattcattttaaacaataaccctttttttcttctaaaatatcccttaacttggtataagaataaaataatcatgaaaaccaaacctccattaaatgaagcatttgaagaatgatctcttgaaaagaaaaatattcaatttactaattaaaatgaagagacattaatatatgaactcattaactcatttaacacaaaaataattcctctataaaaaatattac

SEQ ID NO: 259332 - DNA, 398 bp, Glycine max
agcttgcttgtggggcttctatggaggctgtatcattgagtttcaatgaggtcctttaatggtgattttccaccatggagatgcagcggaagacaaaggagaagaggtgagaggaggtgccatccactagggaataagccatggaagaaggagcttcaccaccaagatgagccttggataagaagcttggagagatgcttcaatggaggaaaagaaagagggagagaaagagagaggggggagcatgaaattgaagcaagaaaaagggagagaagttgaactttgagttgtgtctcacaagactctcattcatcaaagttacaacaagagttacacatacttctatttatagactaggtagcttccttgagaagctttcttgagaaaacttccttgag

SEQ ID NO: 259333 - DNA, 484 bp, Glycine max
  unsure (1)..(484): unsure at all n locations
aactcagcttttggagagaacatggacaactcttgtattcatatatttttcatatctactcaggtctgagagaccatacaagtttcctaacgatntctaattatgtgggccattaagtctatcatatgctggcaatagccgagaagcccatgaatctcttcggtggcggagtaggtgtctgcccatcccttggccttggctaacaatcggggaagttcttgactcccgtcaaggtataagcaaaccgatccattcacatggttgcctcttggtgtaaagagtcgatcacccttcctctaacctctttttccgcgtatacttgggcatactcatccgcgattctatgctcgtgggccgcggctagacctaactcttcttggtacttggcgatgaaagtaacatgttggctctgtctccataaacgctgagacaagcttctctggaccttgacaagcatcactcctcttcaaaccatgctatgtgc

SEQ ID NO: 259334 - DNA, 393 bp, Glycine max
agcttattatgaaattcatctctgcgaggttgtctgcatgtccacaggcgcgcttaaataatttagatgcccacctgagagattacaaaatgatggtattgcgatgaccctccatagttttttgctagttataaagagggtgtgctgctggctttgacctgcattggtgaggtagctaactgacgatgattccaactgttaggggcctttaccattccgaactaatacatttatttgatgtcacccgtggagttgttggatagtccattgcataactattataagcagcgtgactgcctgaattaatactttacgctccgctggattttgattcaatttaaaaggttagattccttaaatttcttcgtttgctaccattcaataactcttgga

SEQ ID NO: 259335 - DNA, 390 bp, Glycine max
agcttaagctcatgccgatcctatgtattttaagccataaaagagaaaaacaggtgagataataactatgtgattttaatatacacataacgtatgcataacacttgtcaaactctcccaaatttaatgttttgcttgtcctcaagcaaaagtaaactacaactatactaagttagattaatgacattgtgaagttgtatcaatcacaacaactaagataattgcatattttttaaacaagtttagtttccaactctcaaattcacacatgccatggtttcatgatggaatcatgcacagaatgtgattagagattgaaataggttagcaagcatgacaggtattaaagaagatcaattatgtttctttcctcacacagctagtgtttct

SEQ ID NO: 259336 - DNA, 423 bp, Glycine max
gtgctacaaatgtggtaaactcaagacaaacgaattgctgtttcaatcatctggttgcgctggatcaacatggctcaacggcaaccaacgaacgcccgcagtggcgacaggtactgctcacccgtgaataaagatctgaatagtccaccacgggacatcttgatgcatagggagagaggaccagtgtaatgcttgccgaatatgcatcacgtgtcaaaaaagatagtgtgcatgaacttgaagcgctggaaaagggccctgtgttggggtgcgtgcggcaatgtgttggctgcacagttggatggtgatgggtgacagcggtcaaaggtgagcttccacgaacaagcattggaaagtgttccaacaaggccagagcatcaacgtggtattgtcactgccaagaggggctgcttgataagaaaa

SEQ ID NO: 259337 - DNA, 385 bp, Glycine max
agcttctttaaaacccctccatttattctttattcttgaatgacgctttgtggatcctgtgggggtggtgggctggaggtttcttatcagctcatacccctatgttatatagtaatatgcgctaatcaacattggagagtgtgaatgatgcttttggcattagtacgccatccatggatcgaaccatctcattaatatagatactccctgcgctccaaaattatagatgttttagcatcttatttgtgctccaaaactatagatgttttacaaatccgagactaaattcacaactttttcacccttgggtacaaatattagtgcattgactattttttgatatccaagatacacaccaatagccaaccactcatcaatgagaata

SEQ ID NO: 259338 - DNA, 426 bp, Glycine max
  unsure (1)..(426): unsure at all n locations
tgtgctaatatctcgaggtccattaagaagacatatgcttctgattacatgtggtttaaaaacaaaagaanaacatatttaatcccacagggagagaaaacacacaaagcaagtttgaatacttgaatgcactgtggcactgtttgacagtgaaggaagtaactgaggaccaaaatgctagttagtctaaacttctaagcatgaacttaacagaattatcactgataaggatgcaagaaatgcctataatgtgaatcaattatgctcttactaaaagacttataaaaaaagaaaattcaaacacaactcaatacggcattgtaggattgctaacagagacagatggctttccatttaatgataaccaatgatcagtcgcatgctttgagcaaaaatggcgcttcatgcactttctttctgtgcttc

SEQ ID NO: 259339 - DNA, 237 bp, Glycine max
caagtaacgacccaaactctacacgacgcaacccaccgaacacactgagagaacttcctccatcatgagggttcaacgcagaccgaagaatgggtgtgcctccacaaccgaatgaagagaggaccaacgcatgagcaaattgccaccgcattccacgcctatggcgaagagggtaaaggaactgggcggcacataacatataactctctataggcaacagagcacgaggacatatgc

SEQ ID NO: 259340 - DNA, 391 bp, Glycine max
agcttgctccaaaacaaaatgtttgcttacaggtaatggaagtgggtaacgaggttctagaagtaaaaaccaaaacgtgatatcacccattgaggtaaaagcgtcaagctagtgacgttaaagaagcgctttctgggaggcaacccagttctaatttatgttagtttgttttattttatgcattgtatcattggaacatgcttcacaatcagtacattggggtatatcagtttgtttttgaatgatagatataaggttttcaaatttcttgaggaagggactaaaaaatacttcaaattttttttcctgaaaatcagtcctttcgctaagcgcaagcctcgcgctgagcgcatcttttgttatgcgctaagcggagagtctctggcactta

SEQ ID NO: 259341 - DNA, 466 bp, Glycine max
ttatagccaaatcctaactcaccataaaccttgttcctttgtgagaatgcccatccttgctctcagaagaagacaaaaaatagaaagttcccgatcaagggtcggaagaaagcaaaagaagaaaactcccaatcaaagattgggagaaagcaaacaaagaaagaaaattcccgatcaaagatcggaagaaaacaaaagaaatatgcagaaaggtctttgggccagacaatatctgaacaatacagaattgtcaccaccaaataaggaaagaaaggaaaccacgacctgaagtggtcctctccctttgattgccaaccaaaatcctgtgcgtcagtgactttttcacctcgcactaaacaaaaatagaaaaggaaaaggccgaaacactcagaggcaaaattctctccaaaaacactatgcgccaagaaaaagtgcaattgatccatgatcacgcatataatctttt

SEQ ID NO: 259342 - DNA, 394 bp, Glycine max
cagcttatctacatgatgaacaattctttcctttgagtacctcacctccactcgggcgaaacattgaaaaacaatgccttacatagagacttatcaaatgctacatgaagaggatcccgaattagaatgaagttgtgtcaaagtctatattacaacgacgaaaatattgactcttatgaactaaacacccgaatggttcaaaacgactcataatgcatcacaaggacaatatcagaccttccatatgatatcacacataccgaatacacacattagaagacaggagttgacaacattctactttcctcatgtggtcacatacactaagggcacataaaaaagtgaaaactaactgcattagaagatgcacaattcttgacagctaaatctgtca

SEQ ID NO: 259343 - DNA, 417 bp, Glycine max
  unsure (1)..(417): unsure at all n locations
acctatgaaactcaagctgtggattatggggtacccgccatatgtggtactatgtggcgatcgggcgatggtgcaaatcaactctcccacatccacaaatcaaacatgaacccaccatcccccgttgcccatcttcaactgagctcacgtactcctacgtagcccttatcctcgttgctctcagcatcgggtccccatcaacctctccaagcttgcataatatccaagcaattcaattccaactatcatgaactaccctaaaccaagaaaacagggcagaggtagaaaactctgcccaaaacacattcacatattacaactttccttactcaaataccccagtaacattcccttcattccgattcgttaacccgtggatcgacttgaanatattactggaggcctctactacataag

SEQ ID NO: 259344 - DNA, 340 bp, Glycine max
ggccatattgtggacatgcgtgaataatgctatcagtatttcttaatttgcttttccattcatttgagaatagaaaatcctgcactgtaagttttacaatattttcaaattttctcacgtatttgacacccaccaaacgacaaaaaataccgggatccatcatctttccttccctttctttctctttaattttagtatttcacttgtgcccaatagagcataaaagaaacaattaaaaggggattggaataaaaagattcgagtttgtggggtaaaaaatccatgcacggtgatgcttgtaggttcccttccccttcacagttccctcaccggtgatgca

SEQ ID NO: 259345 - DNA, 467 bp, Glycine max
ttctccgtgaggtacgtaggtcaacttcgtctattctatttttccgtgggtgctcatgttttattgatgataataataatactacgtcttcagttgcagtattgttgattgaggtaccacgaaagcttaaagtttcctgccattctgttagatctcactgccattgtcactggttgggttcgaggtaagcttgggctctttttcatttgtattttacttaggaaacatgttgaagtttgtctctgttaaatctatagactgcttggagcaccagtagagattactagtgataaggatcttgttattatgagtaatttagctcactatctcattattttgcattaaacaggttcataacaagttactgacacttctttgcattatattggagtttggggcacttgtttggtatgccacacatattacaaacgcccttcatataaatctgtgtgaatataacttatact

SEQ ID NO: 259346 - DNA, 353 bp, Glycine max
cagcttgtgccacctacatattatatgtttttcatggctgatcaacctaggctgtggttgcaaatttgaaaatctctcccatacccaaatatgaaccaagtagtaaaagggcgatctaataccacactctgtcagtccatccgactctcaattgatcgtcgcgtcgacatgcccccattttctattcagcttcaaagctgtccaatctatcatcggacccattgcccgttcctctaatgcgttatggtccgttgatttactgatagcttctgctctaaaaacctcgcgtgtcttttattgctgacactcaattcgccctccgagtccaatctattcgcgatagccattccttc

SEQ ID NO: 259347 - DNA, 472 bp, Glycine max
  unsure (1)..(472): unsure at all n locations
tgtagacaacactgtggctgtagcattcaatgatgaccttttccaacctctatagcccttggtgcccaaattcctttgatctttcaatacatcagccaatacacgtttcatctccaaattccatgtagaataactttttatttcctcattattttttcctaaaactttcttttgtccatcatttttcaattagatgactcaattaaagttaatgtcacttatttaacctgcacataacagatattagatacaacctactttattcatttgattagttcactgcacaatcatagaaaatatttcaagcaaattttttatgcaatagcaaagtacataanagtttatcttcaatagcaaagtacaatagtaacaaagcacacacangttgtctgcagtagcaaaatacatttaacagaagaactatccctaagcaaagtttcttctaactttgatcgtagcanacatattcata

SEQ ID NO: 259348 - DNA, 391 bp, Glycine max
agcttatggtacttaactagcatgcattggttccttgcgcatcatatgctctaggctgaaatgaaattatggtcgagccatgttggttctttgctttatgaagtgtcaaatgaaatttgctagtagttttctgctcacgcgttggagcttttatgcagactttggaggaattcgtgctaacaattttctcgcatttgtacaatttccataatagcaaggaactattcatatggactaggaccactgttaaaccttaaagcagcttgtagtgtttgaaaaataatcacatgatttaatgtcctattcttctctttctcttggaatttacacattgtttcggagctggtatctgaactttgaattagagagaacaaggaatgaccattactaa

SEQ ID NO: 259349 - DNA, 475 bp, Glycine max
ttagagtgagaaagacaatcaccataacgagagtgtgagatctttgttagttttactgaaattaaacaataaatgaaatttaagggttttacctatacctacatcaattatccgtgggtaaaaagtctaccaaaccaaattatgagtgtcactataagtgagtgtaggcataaataacttttttgtagtgagcacaggtagttggaatattctgttcatgagaagtagcagattcttggttagaagatgtcattgtggatgttgaaaagatgaatctttgagtaaaaaggataaccaacactttgattaagatctattataatatcaagatcagattttaagtaaaatttctcgaataataacatactcttgtgctaatcaattgaagaactttatgatagatcttggtaatgagaatctttttaaactctttttttgttaatatgttgttttgaatcttaatcgagatcttgtc

SEQ ID NO: 259350 - DNA, 408 bp, Glycine max
  unsure (1)..(408): unsure at all n locations
acctgccgcatgcaagctngngtattgctgcattctactaanatagtgtttgcccactgctttgcctgagaataacagttgcttgaccacaacaatgctggaggcggtaagggacaatggtctttcaaataaacctgttgtacatgaacaaagattatatcatgtggtgaccgtgtcaaatgaaccaccgaagtcattgcataattgttatactaactatattcaacgtacctgaacaaaatgatttccaaacacgtgaccaacacatatcatgcgatgcccagaaaaatcatgtggtggttgacttctaagaggaaaaaatggtatgctttgttgtcgggacaacgatacaaggattacgttataccgtgatgcaattacatatccnatctgcgttatatccatcca

SEQ ID NO: 259351 - DNA, 470 bp, Glycine max
  unsure (1)..(470): unsure at all n locations
tactaagctttggaaatgggctgctctggggaagagatggagagatatatgtctttctcctcccatattataaaaacctcgtcagacacgctccgccaggcgagctaattaattaatttattaattaacttttgttttgcaagaccctctgctaaattggataatccctttggtttggatatattttctaatatcctataagtgcatataaacttatgtgagttcaagacataaatcaagaaacaataccgttagaagctcgaattttaaaaagcaaaaattagagatactatgctgcctcctaagagcgcttctttaacgtctataaccaaccgcgggatgatgatcaatcaatcatgggcctaacacttggttgaacctggccctaagcttgtacaaaggaaggggatattcaacaangtgaacaatggtcaagatgctggatacctttactaccctatctcaattgg

SEQ ID NO: 259352 - DNA, 391 bp, Glycine max
  unsure (1)..(391): unsure at all n locations
agcttctgttntcaaattcgagattcttttttttttctggactcaatcggacatctgagttaaaagttattgtcgcttgattttgctgagagcttctgttatcaattacgagcgtctcaatatattacgagacttaatcggacatctgagtaaaaatttattgtcgtttgattatgctcagagcttctatttaaatttcaagcgtctcaatatattacgggacacaatcggacatccgagtaaaaggttatggtcgtttgaatttgcagagagcttttgttttaaatttcgagcgtctcgatatattacgagactcaatcggacatccgagtaaaaatttattgtcgatagaaatttcttagagcttcccgtatcaattatgagcatctcg

SEQ ID NO: 259353 - DNA, 290 bp, Glycine max
  unsure (1)..(290): unsure at all n locations
cgtaatacatacagaggctcgtagctgataacggaggctctgagaaattattaacgacattaactttttactaagatttccgagtgagtcctcttatatatcgagatgctcaaaaatcaaaatagaagctccaagcaaaactaacgaccagaacttttaactcggtagtacgaatgaatccccgcatatatcgagatgctcgganatgataattgaagctctgagaaaattctaacgacaataactttttactcagatgtgtgatcgagtcccgtaatatatcgagacgc

SEQ ID NO: 259354 - DNA, 388 bp, Glycine max
agctttaaaattaacccaaacaattcttccttgtcctcaaaccaatccaagtcttcaaaccaagacttcatttatttattcaacttcattcttttttttatttgattttttttatcatggacagtagcatttgaaagcaattgaaaaataaagcaacaattaggcaatatatgtatacatcatcaagcaggccaataaaaacatatcattcaatgaaacataccccccccccccccctctcacacttattgccaaaacaattccaaagctccaaaattccttaagggtagggtgaaatcatggtttttcacttaaggcttgtaatgaacttcaaaacaaagaaaggggaatataggctcaaaggggatatcaaaggaattaattcaag

SEQ ID NO: 259355 - DNA, 90 bp, Glycine max
attaggctatattatgacaattgcataaagtagtatttctttatttgcatggatccaaagagcagtcatgaattatattatctgactctg

SEQ ID NO: 259356 - DNA, 397 bp, Glycine max
agcttctactcctctccttgttttgtttgttttcgcaacctaagcctttctctttagaggggcacatgtatcttcaccttgtgtcatacattacagtaaatgctggaaagataattcaagttgctgctcttaatttattaatcttactgtcgatataaaaaaaattactcaagaaatgttattataactattgtgtacgaacaaaaaacaaaacttataactatggtacaagaaaccaaacgcatacaatgtacaaggagtaaaaaaaatagaaatcaaacattattcacaacaaattaaaagcacaaattctactaggtgaattggatacccagttttcttggttatactaattaaccgaaatcttattaaattgcatgttacctttaaaaaataa

SEQ ID NO: 259357 - DNA, 296 bp, Glycine max
ttctttaattctctctatttgtcttaatttattttgttttggtttcattttcttttattcctattttaaattcttgcattcaggataatgtaatttcactactttaatttcaatagtttacattcagtcatttaatagttttaatttactctgatgcatgataggtaagtagatacttattgattggttgcaacacattttgagtaaactgattgcatgagtgagactaactgcgtactaacgagtatttttgtaaatggttgattctcgtcattacaagtatcagtgtaagtgat

SEQ ID NO: 259358 - DNA, 388 bp, Glycine max
agcttcttttggaccttgaacattcaattattctcctctctcaaaaccatgctatgtgctcgcgactgggccctttcctcccttcgcaacttgagttcattattgctaccccatagggctccgcgaaatttgttccggccatactcttccttgcgagccctcttggtctctcgttcaagggctcttgcgtaattgcattctcttcccgtaacccggcacactccttccgaacgtgtgtagcagccaacttgaacttctccttggcgagttttgcctttcctaactcgcttttgagagcttggacttcctcgtcctcttccggtgcttaaaaattctcttcgctgacgacttttaacttggcgagccaatctaaacctcgtatgcgaac

SEQ ID NO: 259359 - DNA, 433 bp, Glycine max
  unsure (1)..(433): unsure at all n locations
cacttctttagatgagaagagagtacaaccatttgtattcttgcaggggggggttctatattcaaagaacactttgccttcttaccactatctctattaaagaatgatatgccaattaacaagtaattttcttctattcattagaagtgaccacctccattaattgtatctgccatgttatagaaattcgaattcatttgtgtttttgaaatattattggtaggttataagcatcaattttggtgtagaaaccaaggtgtttgtctntaaaaaaaccgtctagtattctcttctaactgcactcttcatttttaaattgagcctattatttccatcctctaaggagcctctctttcttataattattctacagggttggatagaagaactacaaatgctccaggggagtgctgacataccatggtcgacccat

SEQ ID NO: 259360 - DNA, 381 bp, Glycine max
agcttcccgcatccatactaggattgttctgtttactgctttcctaaggcaatatcagtataattctgatatggctcccgattgcactcagcaacaaaatatgtttaaaaaggaaggtaagacctttaaagaatacgcgcagcggtagaaagacctggcgacacaagtggcccctcccatggtcgaaaggagatgctcaccatgatggtagacaccttggcagtgttttactatgagaagttagtaggctacatgccttccagcttcgcggactttgtattcgtcggggaaagaattgaagtacggttgaaaagagggaagttctattacgtttcctccacaagtactcatgctaaaagagtcagagcaactggggcaaaa

SEQ ID NO: 259361 - DNA, 388 bp, Glycine max
agcttctatttttaacagactcttgtttttatttgacaaccgatgcatgtcattattgactcctgaccttgtcttttcattaataccatgtttcttctttcctcgatcaagcattacatcagaactggactttttgcgattcaggccaagttgcagagcatcaacagatcccactccagtttcaggtcagcggcatggctttgcatgttattttgaccctcagaaattggcatttgatacaaagcataaagtgcttttgttgtctcctcctcgctgatgttacaccgattcattccaggcctaacaacaatttcagaagaacagtgaaaatctaataatatatagcaaaggccaaatgtatcataatttgtatatcaccctaggtact

SEQ ID NO: 259362 - DNA, 345 bp, Glycine max
tcatatacctcgtaattaaatgtctttgctaactcacattcttgcgtcaatacgaagatcgttatatgaacttttacaaaggattttttatatcaaaaataggtgtgaaaatattatagaaatatgaaaaaagatgtgactaacaaacagtatttttgattgaaaatacaaagaatgaatgcttctttttattcatgctatcattttgagaaaaaacaatttaaacaaactttgtgtcaatgacagtaaggcggaccctcacatcgcccatgacattttaaaaaattactattacttatggaatcgaattcatatcttccagatacagagcatgccctgttaatg

SEQ ID NO: 259363 - DNA, 396 bp, Glycine max
  unsure (1)..(396): unsure at all n locations
ttatgctactgcatttgaataagaacatatataatttaattctgcttaaaatcaaaagaaatgtatgggattatctcgctagacggatcctttattgtaactcaacactttgtattatgctatcaatttcataaaggtcaaaatgcttgtggatgaccataacttcttattgcanggcactaatgtcccgatggtattgtggctgcattaattggaattgtaactggttggtgcacaggccctctaatgcccatatgtgggcattgtgtacccaggtcatccatcttgcaatctctgctacatcttaacgtgtttgctatggcattatcatctcagctctttccttacactatgtctgcgcctaagaagattcgttatcatcatactttacatact

SEQ ID NO: 259364 - DNA, 388 bp, Glycine max
agcttacaaatctgttttaaatccaagcccataagtaaaatcaaatcaaatctagataagataagataagatctaaatgaaataatattgaaattctgatactggggacagatgtcgtacaggatgtcacgacatcacgcttcagaacatgcagattgtgtttgactgtatgaacagattaaacaagtaataacacaagagaattgttaacccagttcggtgcaacctcacctacatctgggggctaccaagccagggaggaaatccactaaaatagtgttagttcaaggtctaacagccactgtttacaaccttctcacctaaccactacccgtgcgatctctacctaagagccactcttagatatgagaaaccccgctcactccct

SEQ ID NO: 259365 - DNA, 429 bp, Glycine max
  unsure (1)..(429): unsure at all n locations
tcataattngatgcttgcttgctcaccaaagaaagagtatttgtcaaattaagcttaatggtttgcgggcaattgatttcggttactagattcatgtatgcataaagaagcatgttcagaagcataattattagactgagtaggaggatcagactgatggagaataaaagaatgattacaaggaacaacagatttgttattggattcattagacatgggattagagacaacttgtagttgttgctgagacaaattttttaattcgacagattgttgatacctttaaggtaacttaaaggtgctcttcattctggtcttattttgtatcctgcttctcctcatcaacaccttttcattatgggtttatgtgactgataaggctctatacccggatgtatgttggccctaacttggtatcttggtgggcca

SEQ ID NO: 259366 - DNA, 387 bp, Glycine max
agcttgcttctacaatcttccttttttttaggatgacaaccctgaaatcaagaaacacatgcacatattttttcctaatcgatcactcacttaattgtccatattctacccctttgtttttgagtttaagcttcacttgaaattaagttaattacttatgtgagttcttgatttaatccctattctctccccctttggcatcaacaaaaaaccaaagtgcgtaacaaatataaaacattcacaaatgactaatcatacacaagacattcattgaaaaatctaaaccaatcatgaagcaagaaacatgaatatatcaaatatataaaaaccacatagtcatataacataattcataattgttcagtcatactatgcaaataaaagaaa

SEQ ID NO: 259367 - DNA, 420 bp, Glycine max
  unsure (1)..(420): unsure at all n locations
tcatgatgatgaatcaagattgattcattgagttntgatgataacaaagatgatgaccaacatcccaagagaatgaggtcaagattgagtcaagaacacttcaagaataaagagaaatttaatttcaagattcaagaatcaattttcaagattcaagtttcaagaatcaagaatcaagaataatcaagttgaagattcaagaatcaagaaaagactcaatcaagataagtactaaaaagtttttcaaaacattgagtagcacatgaattnttcacaaaaccttttaccaaagagtttttactctctggtaatcgattaccacgttattgtaatcgattaccagtagcaaagattgttttcanagagctttcaactaaatttacaacgtttcaattgatttcaagatggtgtaatcgatta

SEQ ID NO: 259368 - DNA, 389 bp, Glycine max
  unsure (1)..(389): unsure at all n locations
cagcttgtgatatttttactatattgtgtgtgtcttcgnttatctctacctgtttaaaaatgtgataattcactcatcatgtgttgtttatgtttggatcatgtgatgatcttaaaccttgtgtttgtgagagcaaatgactaggtgaattactttaagaaaccttgtgatggaggactctgagacacaatattttgataggatgtaacattggaacaagagtttttattttaattgcatgacgtatcaaacatgtcattttactttatttgataaacttgaacagtcttgttttaagtcataaatatttctaagaaattttatttggtaacaagtgaagcgaatgtgaacattacccacgtggactgatttacgattttattgaataa

SEQ ID NO: 259369 - DNA, 280 bp, Glycine max
  unsure (1)..(280): unsure at all n locations
cacccttatgatcaatatgttggataaataaaaatagttttttttttgctatatgcatgagagtttcaatgctagttgtcacacaaatgtattatacaaaagtacctatcacataaagagtggctatgcaacttaaaatgcatcaagaagttttagaatgtgcggctacattctttggaaccaaagtcattgcatggaanaaatactacatacccatatctaacgggaatttctattttcatgtttgactnttttgaggaagatctcaccacacgttatg

SEQ ID NO: 259370 - DNA, 397 bp, Glycine max
agctatatgctaaaagaatataacccatttctttctcaacataatatattccccatgaggaagtatgaagcagcattatgcagatattaaacttatccagtctatcaaagcaccaatctgtttcatttctcagaagacaaacacagggcttacaagtttatctaaataaaaaaaggattaatctctcaatagaaacaaaaaactatagcttcaattcactagtgtacatgaggcatgtgagagagcagctccccaacattactattagcagcaatatgtcgaggcataaatccaaagtagtcttcaaacttctatagctaactatctgagtcaaatgcagcgaatgatgaatgaaatgagcataatgaaatactacagatctatattaaaaaggctt

SEQ ID NO: 259371 - DNA, 411 bp, Glycine max
gatgaatcacctttattctttcgtgtagggactgtatctttctcgcgatatccatgtctgctgcggagttgatactgtgagcacaacaaatgcatgtttcttcaattgacaaatgaacttgtataacataatggaattacttggtaaaaactcactttttagtcatatattgataaaaaaatggagacaacaagggttgtgctggcgtaaaggtcttgagcatgattttcctccgaagctttggcttctttggaagcattctcctgtccccttacagctgtagctattccaaggtggtgaggccaattaaatgttggatagcgaaaatattggctatttgagtcaaacatgtgcagaaagacccacttatattaaacaccaactattaaacacaatggtgggcctcaaaag

SEQ ID NO: 259372 - DNA, 397 bp, Glycine max
tgaggcatgcaactacctccgtttgagagcctttttgtgtttctcggaatgaggtacaaacacagtagaagtaataaaaagctgcaacaaaaaaggaaaggttcagatgactcataatgaagtattcaaagaaattatctcatctcgcagaacaaagcagacaaaagggatcttacttaacgatgataatggcaaaagatcagtaatgatagacagaaaagccaaacaggaactatgtctcacaaaaatgttgatacccttttgtagaacataccataagtagttttggcttggtgagagaatctaattgcaaaagtataaaaacagacagagtatatataaccaagtaagtaagtaaccagatacaatatcggagtgcgctgatggtgctgaagtc

SEQ ID NO: 259373 - DNA, 280 bp, Glycine max
acacaaaagcttgattgattagagaaacatctttatatacatcagctggctctgtataaagacccaacacctttacgtactgctgtgcatcttacttactatgcattttactatttatagccctatacttaggtcaaatgctattctaaatcatcaattatcaatgattctttcaacaatgccttatttctgaatgtaaccctatctaatactagtgtcctgagttggatacttggattcatccggtttaatattaaatacttgacgactcggtgcgctt

SEQ ID NO: 259374 - DNA, 390 bp, Glycine max
agcttgaaggtgtgtagcccaccatctttttatttataatactggtaatgcgtctactattattgtcatcatttttttttctccgtccttgaggtgccacttgagctgccaggtctctccacctttgggcgtattcttttgaaggattcgtgccccctttttgcacatgttttgtagttgcatcctatctgagccattatactgacattgcctaacgaaggcaaccattaggtccttccaagaatggactcgggaaggttccaagttagtgtaccaagtaacagctaccccaataagactttcttggaaggaatgtatcagcaattcctcatcttttgcatatgcccccatcttccgataacacatctttagatggttctcggggcaagt

SEQ ID NO: 259375 - DNA, 282 bp, Glycine max
cacacagcctctatcgtacatacgtcccgttcggtatgataccttggggatcattggcggggcgctagtgcccaagaccgatcttgtccaataccgacccaaaccgggctctagtcacacttgataatgtgtgatatgcctcaaaagctatctacatgctcttgaatcatgatttggagacgaacctacgatctatgatgcttgatgtgtatggctaactgggagaactgtgagatcttgggttgtggcctaaggtagtttataccagaggttcgcatctga

SEQ ID NO: 259376 - DNA, 389 bp, Glycine max
  unsure (1)..(389): unsure at all n locations
agcttncacaagaagctcaaaggatctatttgctcacattctgaagtctcaagctggaaagaatgaaaaagaaattctggaacaaaaaacaagaactttgcacgaaaatgatggagaaataagaagaaaagagaggtttaagagcttcttgccaaagctgtgagagaagaagtcacaagaacactagtataagctcggaagaagaagaaaatagtggtatctcctcccttaaaggtctcgtgcaagaggaagaagaataagatttcaagtttttgattcgtgaaagaaatgatgagttaatggcctaaggctactaataagctcaaatgacaagcatgaatgacccctttgatggtcaaggataacatgcaaaagggtgtcataaatgg

SEQ ID NO: 259377 - DNA, 392 bp, Glycine max
agcttctaaccacacgcgcttcttctttctttataacgttgagcaaatgaatttccatgttatttgttttaacatcagaaaattacgttttatatattttttaaaatattttaatgcaaataaataatttatattaatattatatatatatatatatcaactatgtacagcgtaatatgtactttattgtattaagaaaaaaattcatatagattaaatttaagtaattaagattaaaaataatttcacttgacttgtttaagtggttatataaccatattaattcattaatttttaatcttgagtatctctatatatatctgtatatataattcagattacggataaaacatatataattcagatttttatgtaccttgaaattaagtttt

SEQ ID NO: 259378 - DNA, 440 bp, Glycine max
  unsure (1)..(440): unsure at all n locations
ataacttctagtatatggtggtgatacaaaacatttgtagaagaatttataagagaagaaaataagaaaaaaaaataaaacacactttattcataagttaaaattaacttaagcataaattcatttgtagaaccctctcatattaagtttttaaaaatgatttctaacttatacataanataatttcaccttgtaagagaaatntatttcatttttactgtttgtttcctttttctatacttgtttatggatcaaccagagaaaacaaggcctaaagtntaaccttgttatatacatgcaccggagaaatttataaaataaagagacatggtaaatttttggttttatatatatagagagagatgtaaacaatgttagcatataaaatgagaatcttcanatgctatgtgatattcttatattaatttatacaacaattt

SEQ ID NO: 259379 - DNA, 394 bp, Glycine max
agctttaacatttaaaactaaagtttaattttaatataaacttgaagggcaatcaaagatctcattattcaaaccactagggtcggccaaacagtgaattatagtagtttgcatggaatcttaagtacaagccccattaccaccattatacacccaaaaaaaaatctcatatgcatgcatatagtcaaataactagcattctatccaacatgacagtgagcttacaaacacattcataacaaaattttaatgaacttacagtctctctttcacttgttccttctggtggcaaaatatcttgtatccactcaacctctgaaacacgatacctgcataaaacatttaaaaaataaagccatatttccatgaaagaaaaatagccagatcaacaact

SEQ ID NO: 259380 - DNA, 333 bp, Glycine max
  unsure (1)..(333): unsure at all n locations
acatgttgttcctttaataaagcacgcctcttgatgcaccacagattgaagttgttctttccattgaatttctcaatcttgattgtgtttgacatgatttcttgaatattcttgatcacaaagaagcagcgaaagaaccaganacaagactcccacagcttgatctttgtattcagatgagaatcttgaattccctcgatcgcaacttgagctcttgataccagtttcttatggaagtaatgaagaacatacaagaacagcagccgcagaaacagccgaaagttatgtcatacacacagatgtttgcagcagggtgaaagagagaaaaatgag

SEQ ID NO: 259381 - DNA, 389 bp, Glycine max
  unsure (1)..(389): unsure at all n locations
agctttntttggcagaaaatcgtgtatttaattcccttatctagattctcctttgaattctgagcattttgatatatagtgggcctcaaacggacaaccatagcaaaagttatgagcatttgaattttactggtcatatctgttatcttatctattatcctatctaatatcttatctgttatcctatctatatcttatctattatcctatctaatatcttatctgttatcctagctaatatcctatctaatatcttatttgttatcatatttgttacccaaattaaagctaatttgttatccaaatccaatctaatatattattatccaaatcaagtccaagttgttatcccaaatcaaatctgtctgtgatcattatattgcctttcc

SEQ ID NO: 259382 - DNA, 299 bp, Glycine max
gcataatgtaccttctccaacgggggtgatgatcgtgcatacggacctataaaaccagcctaagcagcaatagactgagtgcctgctttctctttatttaccaatataagcgaaataggcgttatcaaagttgtaagaattctacagaagcattacgaaagcctcggaagctccggaaaccatattccagcagaacgtggaggatcttgagaagtcacccccctcccctttgctatatggcacttcctcctaatttacacacccctttaactaaaggtaaacccctctggctttttttt

SEQ ID NO: 259383 - DNA, 304 bp, Glycine max
ggctgtttgaatgcccacaccttgccatgcctgaggaaccccggctgctgagtccaacactttaggccttgatggacacaccaaaactggctgggacgattgcctttctttctccattgcaaccttatctatgcgggccaactccccttcaaaaactaaggacccaatgaagatgtgggtattctccaagtaattggaaaaggcttgaacaggacgcgccccaagcttctaaacaagaacccaaatctttaggaagcagcttgctttgctggtgagaacatcactgcacactgaaggatattgg

SEQ ID NO: 259384 - DNA, 452 bp, Glycine max
  unsure (1)..(452): unsure at all n locations
gacctataaaactccgcttacatattcncatgactctctttatgattgactggaactgatcatcagcgtactctcgagtgggaaaaggagctattcgtatgcttgcacggttaaactgagtccaaggatttttcaatgagaaattattgtcctagaagcctgcaagaggaagctctagattntcagcattgaaattgaagtcagactgctgcgctattaatattatgaacgaatcaaccatttgctggagctacagaaccagaaaatataaatgcattaatagtgtaacaaagtatagatatcaagttaacaaatagaagcgacaaagatgtaaacttataacatacggaagcaagccaagaacgacagaagaaagcaagattccctcattcccacaagttgaatcgacccaatgtctttccctttaataaaccaataccatttctagcttt

SEQ ID NO: 259385 - DNA, 378 bp, Glycine max
gttgcagcttttaagagccataattacttatcttttgttcaacctggcgtcattcatttggactgaagtatgaggaactcggacaaacccagaaggtgggttcatggcctaattatactaatagtgaattttgtgatgtggaaaccaaagcaacttttgtggaactaacaaacggtgaatgaccacgctggctgcttcctgtaatgcgaatgttgtttttcatggaagcttgatttcagaatcttacatgcctaaatgtatttaaggacttgtccaacttatcccaaattaatggagttaaaacaatctggtgctatttttttccttgagataaattatacaatatcttgtattaaaacagagtatatgatgtttgtg

SEQ ID NO: 259386 - DNA, 484 bp, Glycine max
  unsure (1)..(484): unsure at all n locations
tcaagaagaactgggncaatatatacatttcttttaccattagctgccagacgatcagaagccataaacattcttatcttaaacaaggagacaaaatctagaagctatagattacctcaacaccatcagataacacaccgatcaccaacatcaaatggatgcattacaaacacaaagatgatagcttcaaatatgttcttgcatgtgcttccaaacatgaaagctgcaagtactaactgtgatgagaggaatacaagtacttttgttgttgcaatctccatcagtagaagccacacgattatgttcaccactactatgagtacggccacgagtttgtttaaatgttttacagctgtnttagtgtcacttaaggcatgtgctaatgctctgcgttctcgatataccttcaactgaagaacacagacattatggagtggaaatgttagcaaccaaaacagaatttcagtacttcattatcatgaca

SEQ ID NO: 259387 - DNA, 388 bp, Glycine max
agcttcaaggcaagctattaatttggtttagtcacaagtctattttaatagaaacactcctaaagatactaaggagattgacaagtcttctatcctacgagtttcagagtgccttggaacaagcaagtaagtatctgggggtaccctctagtgaagttagcagtgcaagccatactaaccaattgatgagtatcttccttttgccaatatctttgggggaggaaattcagagaatgatcaactcattttgatgtggtagtaacaagagttcaggaaatgggataaattggttgaggtaggaccagttagcactgcggaaagaaaatggaggcataggattccttcatttctatggcttcatcaacctggccatgctaacgaagcagtg

SEQ ID NO: 259388 - DNA, 374 bp, Glycine max
  unsure (1)..(374): unsure at all n locations
cgtagtgtaattatgtcaaattacaaaaaacaaagtatactatccattctaataaatattggataaaaaacaaaagtaatgagaaggctgttaaattacatctacaaatgggagaactatntttttccttaactggagtagtataatggtattctcactaaattggatttttaggagaatcaacaccagaacttagccttctgataagagcccaacatttaagtggtttggcctggcttccctcatttcaaggaagtgaaagaaccagccaaatttatcccatagtctaaaccatcagcaactgattcattgaaaatcagatggaatatggtggggctctgagcttttacttcattgtggaaattcttcacaaa

SEQ ID NO: 259389 - DNA, 397 bp, Glycine max
agcttgtttctacacttagcgcaactactaaactagacagcacaggcttggtgagcagtctcgctaagcccaattctaagaaatttaaaaacagaggcataatagcgcttagcatgacatgcatgcttagcgcccaacaaaaacacaaaaatcctaagtgtctaatacacaatactcgcttagcgcatagctgcgcttcgcgagttcaacggataactgaacagaaaagatgaacgtgcttagagagacagatgggcttatcgcgttcatctagaaatccaaaatctttaacagaaacgatgaactcgcttagcgcagcaaggctcttagtgcgttcatcgcgattttcagaaaaataagggcttctcaccccttctcataggcccctattgggcca

SEQ ID NO: 259390 - DNA, 252 bp, Glycine max
tcatctgtagatccctcatgtgagactaggcttaaactaaacatcattattgtaacaacataattaaaaccaaaacttaacctgcagatccttcatgtaaggctaagtttcagtcttgcttcaatcaagttctaaggcaacaatacattttccaatgctaaagtcacctaacggtgcatacaaatgggtgatcagaccaaaagcatacaaacattaagcattgaaggaagcatttgacacagaaaacataat

SEQ ID NO: 259391 - DNA, 398 bp, Glycine max
agcttgcttgtggagcttctatggaggatggatctttgagcttaaatgaggtccttcaatggtgattttccaccatggagatgcagcggaagacaaaggagaagaggtgagaggaggcgccatccactaaggaataagccatggaagaaggagcttcgccaccaagatgagccttggataaaaagcttggaaggatgcttcaatggaggaaaagaaagagggagagaaagaaagaggggggagcacaaaattgaaggaagaaaaagggagagaagttgaactttgatttgtgtctcacaagactctcattcatcaaagttacaacaagtgttacacatgcttctatttatagactaggtagcttccttgagaagatttcttgagaaaacttccttgag

SEQ ID NO: 259392 - DNA, 479 bp, Glycine max
taaaagaagtgaacgaattatcatgggcagaaatgtcttcttattgattggtaaatctggtcctcaaattcctgaaaaatgcaaagatccaggtacattcagcataccttgtattatagggaatagtaagtttgacaatgccatgctagatttaggagcctctgttagtgttatgcctctgtcgattattaattctctatctctagggcccttgcagtcaactgatgtggtaattcatttagctaatagaagtgttgcctatcctgttggtttcatagaagatgtcttagttagagttggtgaactgattttccctgttgatttttatatcttgaatatggaagataggatttctcaaggatcagttcccatcattctaggcagaccctttatgataacagctagaactaagatagatgtttatgcacgcacactgtccatggagtgtggtgatataacctgtcattttaatattctgg

SEQ ID NO: 259393 - DNA, 336 bp, Glycine max
cgactgcgcgcgggatgattcgttgccgccatgcgcagctacccatatgctaacatagacgctccttcagtaatctagaacaaacaatatcctttgctttatgcgaagaaactcaagaacagcaacaccccagaaatcaacctgatgcgcctataaccatccgcggaacaaaagagggaacgaaaacaaacctaaatctccaaaacctatcatgtcaagctgagtagcgaactacaaattaataatttatgaacccttaactgtattggcgatgttcccttaatctttactctgaaccatagctcacgtttggcattgctgacgatcacccggcac

SEQ ID NO: 259394 - DNA, 425 bp, Glycine max
cccgcgatccttaagtcacctgcggcatgcaagcttgtgaaatcttgggatttaacatatgtttattttgattacaaatctacaatctgtaggaatttactgaggtgaggatgatatatgcagtatgattcacttgcaaaataatttagatgtaaacaaaacatattggtcctaaaaactaaaccatattgattttctgttgtgaatgcaatcaattgtttaaaatcattcttcttaattcttttatcttaaaattacatggttactagtctatttttttgaaaggctaaggaaaatggttactagtctatttaagattaggagtttacgactgtcatattttctagaataacattttgcaattgctaaattccctgaagcaaataggtgtttgaacttttcattgcatgtttcattctttaaat

SEQ ID NO: 259395 - DNA, 396 bp, Glycine max
agcttgaccaaatcgaacatctaattgtatcatgtatcagctaatatagctatgtttcgggtcatacattttttgctttaattacgggtctattctatcacaaaaatataggggctgctatttgcattctaatttttactcttcacacctcttattattttcaaacattttaaaacaccctcccctatttcttcttaaacacttttctcacttccctccccaaccacccccaaaataacatgcatagttattgtctttgttaacaaacagtgtgtgaccttatgatcacaaaccacaaaccgtacataataaaggcaggcaagtaatggccatctcatatgtattgcttattaaaaaaatttgttgtactttaatgaccagatacaaaaatgtggt

SEQ ID NO: 259396 - DNA, 424 bp, Glycine max
actcaagctcggggatgttgcgcgtactgatgggaaccatgaggtgtttgctgttgtttgacccacgcggctgttgaagagacggcatgggcatctcctttcttcctttttgtccccgttgacccgattcttttggcgttcacgtctgtggaggaaacgcaatcaaactttcctctcttcaatccaacactcgattcttttcccgcgaaacaccatatccgcaaagctggacggcatgtgacccactatcttctcatagtagaacactggcagagtgctaccatcatggtgatatctctctctaaccatgggaggagctacttgtgccgcccaatccctcctcgctgcgcaattttttaagggttaccctctttcttgacatattctgcagtgagtacggcaggagcctatcaaattggctgaa

SEQ ID NO: 259397 - DNA, 385 bp, Glycine max
agcttgaaaggaaacaccattgtcttttttaacaatggatccatttggaaaaataaaacctaatgtggagttcacaactgtctgactgcttgtccctcccaagaatgccatagttttttgtaagagttgggttacgactgaaacttgtggttttttacagtgttaggttgtgtcatatatatagatgagtttaatatcagtgctgcattttttaaagattaaaaatatgcatgcacatgctttctgtatgtgttgtcaactacaccaatgacatgacatgttttagcttgcatcaaatctgcatgtgtagtcacgctgtgcaaggtcctttcacgcgctttatgttaatgcagacaacaatttatcatacacattttttcataat

SEQ ID NO: 259398 - DNA, 393 bp, Glycine max
agcttattaattttccattttacttgtatttctaagtctctaatctgattgtgtgattatatataatatactttgcaggtaacttctgtaggataaaaggtgcattttctttgggtgctaagcggatagagaggttgctgtcttgcacagaagataacatcatagctgaatttgatttgttcttcacgattcgtgggacagaaacggcaatggttactgggtcgataccgaaacctataatctgcttataaggaataaaagtgttgaaactagccatgaatatgcggttgagcagcctcatggtgtttcccaaaatcctgataatcattcagaagaatcaaagcaaatgtctggaacttctgatgtaattgttgctaataccatgaacaataa

SEQ ID NO: 259399 - DNA, 489 bp, Glycine max
tgctatatcacatgctcatacttcaatgaccaccttctcttaattagcatcatgcttccgaggagccttccacagactacgaaaccatgattctgcaaccattgctaatataggaatggagaaaacctatactcttgacaaatccagtgccatagctctgtaatactcatcaaataaaatacaaaatgagattgttaaaacagtaattaattatctcatacacatttcagataaatttcagcctgtataaaaatatttcatatgttcacgtaaatatctcaaatgtaaccaaagaagctattaaacactatttgtaagttgcatgaaagcaaagaaaatcatttgctacttgagaaaaaaaacatatgcattatatctttgtcttaccttctttgcgttactattctgtcccacactaatagaaggagaatgagtggggttgactgtttgagcttgcagtacttcactttggtctagtgcatactggtt

SEQ ID NO: 259400 - DNA, 392 bp, Glycine max
agcttattaattttccattctacttgtttttctaagtctctaatctgactgttcgattatatataatatactttgcaggtaacttctgtaggataaaaggtgcattttctttgggtgctaagcggatagagaggttgctgtcttgcacagaagataacatcatagctgaatttgatttgttcttcacgaattcgtgggacagaaacggcaatggttactgggtcgataccgaaacctataatctgcttataaggaataaaagtgttgaaactagccatgaatatgcggttgagcagcctcatggtgtttcccaaaatcctgataatcattcagaagaatcaaagcaaatgtctggaacttctgatgtaattgttgctaataccatgaacaat

SEQ ID NO: 259401 - DNA, 437 bp, Glycine max
  unsure (1)..(437): unsure at all n locations
tatanaaactcaagcttgctattncaaatgctgatacctcaatgaccacctatctttgatatagcatcatagctttccacgagccctccacagactaccaaaccatgattctgcaaccattgcttatataggaatggagaaaacctatactctngacaaatccaatgccatatctctgtaatactcaccaaataaaaaaccacaatgagattgttaaaacaccaattaattatctcatacacaattcagataaatatcaacccgtataaaaatatttgatatgttcacgtaaatatctcaaatggtaccaaagaagctattaaacactatttgtaagctgcatgagaagcaagaaaaaccatctgctctttgagaaaaaaaacatatgcaatatatctgtttcttaccctctttcggtaccaatcagcccacactaa

SEQ ID NO: 259402 - DNA, 375 bp, Glycine max
agcttaccgacgtgactttcttcaaaagtctttgtcgtcctcctacaaatatttaagtgacgtattaaactcaaagttccaattttcttcccaccccctgctaaatctttcttataacccctgcatagagctctatcattaggcaatctgtcaaaataattccataaagaagatgtaactcccctacccccattaggcaatctgtcaaaataatttcattttcttcattgtttatttcatccaccatatcagcattatcatttatggaatcatcatagtaatccatatttcataatacaaagcttaaatcaattcaaaatatatatttccaattcagtaacaattaaataagtgacgtatattcaaaatatatat

SEQ ID NO: 259403 - DNA, 495 bp, Glycine max
  unsure (1)..(495): unsure at all n locations
tgtctctaaatctagatanatgccaaccactgatttgttagttgggtgatcaaaccagaagttgaagaagcggaaggttttggaccccaatcttctatagaattttgcaacaaaatgaaacaatggtaaaaaatttctctagaacctatccactgtgatgtacaatttcacagcgagattaagtctttttacaacagaaaaagatctaatctttacatggtactgccatctactgaacaatgagaattgtcttccaaggacaggaagatccaccactaccacgtcatcaagaaataccggaaattactcatctactatatatatatatatataaaagaatatctatttttatgagaagatgacagatttatatttatttctttcacaagaagtattacatcagataactctatttctaattcaaataaatataattcataattagataaattaattaatattaatatactagatgatcaatctactaatctaaat

SEQ ID NO: 259404 - DNA, 372 bp, Glycine max
agcttccattatccctaactaaccaatgttgagctctgggccaggccacctttttaatgaattgctctacactcatgattggcctttgctgggccaattcttgcaagctacgcataatgagaatttgtcctttaaacaagctctgcaacctagcatctaaagtctgggagctctgggcagatgggcgactgatcctggaggtggagctggagtataagatgaagggatgcaaactattggtgcagaggaagagggaacatcagctgctctaagcttggtcttccttgcccctagaaaattaattgattggtcattcacattccaacagttccttgtaatataggccaagttaatgatcggcctcaaactctc

SEQ ID NO: 259405 - DNA, 387 bp, Glycine max
tgggctcttgcctcactcaccgcctctttggtttcatttctagctatcttatacttatcccaagtttcagaatttctacacctagaccactcctcgaaacactccttttttactctaactttgctctgaacactttcattccaccaccacgattctttacccctaggtccaaaacctctagattcacccaacgtctctttagccactttaataatctcttgggacatcttgttccacagatcatttgcacttccttgtgattgtccacaccatccctcccatatcttttgttggaagattccttgtttctcacccttcaagtgccaccatttgatccttggtgctaccataggacttcttctctttgccctatctctaattcttaca

SEQ ID NO: 259406 - DNA, 386 bp, Glycine max
gcatgcaacttgttgggggttttttgagctggacctatacctaaggggtcctaatggtgcttttcaccatggagatgcaccggaagacaaacgaaaagatgcgagacgaggcgtcatccattaaggaataacccatggaaaaaagagcttcaccaccaagactagccttggataaaaaagttggagaggatgcttcaatggaggaaaagaaaaagggagagaaagaaaaaggggggagcacgaaattgaaggaagaaaaacggacaaaagttgaactttgagttgtgtctcacaagactctcattcatcaaagttacaaccagtgttacacatgtttctatttatagactatgtaactttcttgagaagttatcttgagaaaactt

SEQ ID NO: 259407 - DNA, 477 bp, Glycine max
  unsure (1)..(477): unsure at all n locations
tgtagaattcaccccaattctggcggtgtatgctaacttactctcatatctactcaataatgcaatggtagccacaatcccagcaaaggttcctcaacctccattttcctgaggatacaactcgaatgcaacatgtgcttatcatggaggagttctggggcattccattgagcagtatatgaccttgaaacataaggtgcaaagtctaattgatgcgggatggctaaaattcaagggggacaattgctcgtgaattctaatgtcatcaagcaatactatgtatgatgcttggggaaatttgaaggttgttgttagatgtctccaatgactcattangatttttaggtttatgccatcactgtagacaacagtcacaatgctaataatatggataaattcgatgtccttgtctctcattctctcacaaatatatcttctcttatttaactctcactggaatgtgaatataagtcgctg

SEQ ID NO: 259408 - DNA, 379 bp, Glycine max
agcttgggccttactgtcaactttctttacccgaacctcttatttgaaacttgccaaaagactatatggcccatttaagattttatctcgtattggcaaggtagcttataaattatagctttcagaggttcacgaattcatcttgtttttcactgttctgtactcaaaccattttatcaaactccttcgaacaaggatgggcctatagccttaccacctcacgtttgtgaacaccaacctataatttcacctcccacgattattgacactcgttgggacgtcatagagggtgaacctcgttctattacagtgggaatgtttgcacccagatgacacttcctaggaggtttgggccaattcaaaagaagatttccacctt

SEQ ID NO: 259409 - DNA, 410 bp, Glycine max
  unsure (1)..(410): unsure at all n locations
ngacacactcaatattctctgtcttatcaagccactgttgaattttaaacaaataaaaagatttgtgggttgtttgctcactgactaaatcttaattgtattacacgacgaatatgacatctaagcaagcacttattcttttctatcaaaatgttttgaaagctttttcgaactataccagaatatatagagagattgtcacaaaacatatttaaatgttagcgcacaggttcgtaacccatgtctttaaaacttttgttatttataggcattcatcttcaagtatttgctggctctaaacaaataattctcttcacttgagcttgcatatgaagcttatggtcgttcgggcattgcattatatgcacgtacttctttatgccagacaaccactcttattcactttcatg

SEQ ID NO: 259410 - DNA, 395 bp, Glycine max
agcttgctaatgaaatatactcatcaaattttattatctcaccggtaatatcaaaatatttcactttaggagtagtaagcttgctatttaatcgaattgcatacgatagattaattgtgacatgaaacaaccgtgcaataatcagaaccctttttcgtagtgttttgcatagagtaataataatatgattaattcatatattttgtcaaagtggtagggcactgtatagtgccacggtaatctattaggggaccaatcttatcaaatagtcgttaaagggcttcttcgtatgcaattggtgtcgcaaaagaacctgattctacaatcattagcatcgctttccctttggcatcaattgataaccttctacatgtgtcccaataaaaagaagaaaa

SEQ ID NO: 259411 - DNA, 395 bp, Glycine max
agcttattgttcttgatttaaatgggctgcttgtggacatggtttctccccctccaaagtactgtaaagcagatgcaatcatatgaaggaaagcaagtgagaaacaactgtgttattctacttttctatactatgaggttgtgccttatgcattctttactaatggggttgtgtttcatttcagtgttcaagacacctttctatcttgagtttctgaacttctgctttgagaaatttgaagtggctgtatggtcttcaagaaccttccaagggtacggtgtgcttggttagaagagtaaatgtaaaatatttttacacaattatctaataacaaatcatcataaataacaagtttaataagaatttttacaataataccaacgacttacataaga

SEQ ID NO: 259412 - DNA, 390 bp, Glycine max
agcttgaaggtgtgtagctcaccatcttttcatagtagaataccggtaatgtgtctactatcattgtcatcatttttttttgaggtgccacttgagctgccaggtctctccacctttgggcgtattcttttgaaggattcgtgccccttttttgcacatgttctgtagttgcatcctatccgaagacattatctgacactgcctaacgaaggcaatcactaggtccttccaagaattgactcgggaaggttccaagttagtgtaccaggtaacagctaccccagtaagactttcttggaaggaatgtatcagcaattcctcatcctttgcgtatgcctccatcttccgataatacatctttagatggttcttggggcaagtagtcccctt

SEQ ID NO: 259413 - DNA, 470 bp, Glycine max
ctgctcaattgctccagggtattgtatggaagggcatatgtctgtatggtggtcaacacaggagcacaaactacagattcttgcgacaggtacatatttctggttcaaggccagctgggttaccaagttaaccaatgcatccagtttgccttcaagattcttagtttcagatgatgcagctgagtatgtaactacctcatgcactcctctaatgactatagcatcatttctggcgctaaactgctgggagttggaagccatcttctcaattaaatttctggcttcagcaggtgtcatgtctccagggccccaccactgacaccatctattatacttttctccatattactgaagccttcataaaaatattggagaagcaactgctcccaaatctgatggtgaaggcaattggcacatacgtttttaaatcactcccagtattcatacaggctctctccactgagttgtct

SEQ ID NO: 259414 - DNA, 385 bp, Glycine max
agcttattcaaatgagctctgtcataattaacttaagcaataagtaatgaaatgcaactaaaagagtgtaataacaaatttcaaatttacagctggcaaaatctggatacttttaatttaaatagtaatgacacatgtacctatagacatgaattggtaggattgataaggaacttcatatcaagatgttgcgagcaataaaagtagcgttcattcattgataaaatatttagcctcggcttctttaaagtcatatcttgtataatatttaaaaagttaatgacattacatgatgaatacatgacagccatatttgtttcttcttgtatacatgcggaactggataccagattttgtctgacacatataataaattgacttaaat

SEQ ID NO: 259415 - DNA, 440 bp, Glycine max
  unsure (1)..(440): unsure at all n locations
ttataagcgcgggttcgggagacaaaggtcaagcgttctttatatgcgaagatgatattccgagtactttggatttggtacgaccatgccctcctgatttccagctgggaaattggcgagtggaggaacgccccgacatttacgcaacaagcataatgtaaacctttacggttttaaaagctctatagttgggcctaggctttagagttnttccttttgttaaggctttgtgtcttttgtttttgaatttataatacaaggatcttgcttcatctgttcctggtctctacccattctcattcatttgcatgtttacttctttttctgaaacggcagatccgatgacgagtccnccgaaggtactaatacctgngacccgtctatcgacttcgagcaagagatgaatcaaacggaagatgagggagatgangatgtgggac

SEQ ID NO: 259416 - DNA, 393 bp, Glycine max
agcttcaacgagatcgatggacccatgttatccctctatgatcttaaatcaggaaattttcacttggtcacatacgaaagagtagcaatccattgccattaatggtttatgcggccggtcccgcaaccttatatttccttgttgtgcagacttatcaaagttttaaacaaaaagaaagggacaaaccttgaatcaatatttcggttgattgattaaatgtcaaatagctcaactgccattatccaaaatggccaagcaattgaatcaaacaaaatatactttctaagcgagtctccaaagagatctacaaaaggcaggatgaggttggatgaatcatcacatcttttagaaagagacagttaatctatgtttataaaaaaagaaacccaaaaa

SEQ ID NO: 259417 - DNA, 395 bp, Glycine max
  unsure (1)..(395): unsure at all n locations
tctatcgcgttattggactatatgggcggctcgaatgcagtgacgtatgactcgaattantcatgtatgaatttcttgatggggaagttgaggtatgtggagttctgttgagctaagttgaaactatgagattccaaatttacctacacncatcttaataaaatccaatctcggattcttaatcgttggattgcttaaatgtttttggaggttcttaacaactctcacattcgaccgtgngatctgcaaataacatcttgagtatgagaatgacttttaccanagcaaaaattgactggtcagtcacccacgagtgtgcagcctaaatattcaacagcgaaaccaatcatttcttctctttcttcctaaacctcccacaccccagtctcttacac

SEQ ID NO: 259418 - DNA, 394 bp, Glycine max
agcttattagtggggggtttcagtaccttgccactgtcaatgaagcatatcaatttgagcatcataaagtgtttgtgtttctagtttctagttgttcaatatatatcctctcatgtgaaaaaagttgatcaagtgatcattcacaccatgggtggcgtcttctaccatgaagaaaagccaccaaaccatccaagagatgcaaattcattgcagggactttgaaagaagtgttttcccactgtcaaacttttagttgtctgaggctttcaactgcaagccttgaggaggagtgccccatcattgatgatgttgatgaggtaaagcaagtactttcatcaaacccttttgaaaagttcttcactttgttaaattgtctgttattggatgagcgttt

SEQ ID NO: 259419 - DNA, 492 bp, Glycine max
  unsure (1)..(492): unsure at all n locations
tcttctatggctacaaatcttggtggtgatgaacatttttcgaaggtttatgttgttaaggaacaatccgggttgatggaaggtgacaaagtgaaggctttgccgggacaaccatctcaaggggtggattttgatcaatatgctggctatgttacggtcgatgccaaggcagggagagcactgttctactactttgtggagtcacctcacaatgcttccaacaagccccttgttctatggctaaatggaggtaagtactctataatacattntgtttgttcatttgaatatgatgtgtagtatcagataattaaatgcatagtaagtagcacatataagatggattgaatggttaaagaaaaagaacaaaanattatagggttcaatttttttattaacaaaaattaacatttaccgataaaaactaacattctaacttaaaaatttatatctctatatantttggtaatttgtacatgatattaaatgaat

SEQ ID NO: 259420 - DNA, 386 bp, Glycine max
agcttcaatcggacattcgtgtgatttgttatgaccatttgaatttctcaagagcttccgttgttcaattttgagcctctgtacatattatgcgcccgaatcggacatccgtgtgaaaagttatgaccatttgaatttctcaagagttttcgatgtttaatttcgagcgtatcgatatattataagcctcgatcggaactcagtgtgaaaagttatgaccatttgaatttcacgagagcttccgttgtgcatttacgagcgtctctatatgtgatacgcctgaatcggacatccgagtgaaaagttatgaccatttgaatgtctcaggagctgtccgtgttcaattttgagcgtctcgacatattatgcgcccgaatcggacatcc

SEQ ID NO: 259421 - DNA, 356 bp, Glycine max
actccgtgctattacacctcgcgcgtatatatgcgctccactcggacatacgcgtgggaaattatggccatatgcatatggccagagcttccgacgctgaagttcgagcgtatcgctttattattggccaggatcggacctgcgcgcgagaaggtctgaccattataatatggccagagcttccctcgctcaagatcgagccgctctatatgttatgcctccactcggacatccacgtgagaagctctgaccatatgactatgtcagagcttccgcaggcaagttcgagcgatccattataattcgcccgctcgaacatcacgtggacagtcttgccatttaattgctcatacctt

SEQ ID NO: 259422 - DNA, 385 bp, Glycine max
agcttgacttataccaaacatgacaagtttaacatgttttcatcaaatttcttcacaaataactatcatgaggcataaacctagtaaaactacccttcataactcccaaaacccaatacccaggaaaattcatgtgataagaagtctacccaaacctgaaatgtgaagtcccacaatggagaggtgtcttcatgactccgaaaatggcttcctttcgcgatttggagcaaaaatggtgtgcaaaggttggagctttgatggagcttcaatggtgaggaagaagaaaggaatagcaacgtgagaaagagagggagaaaagcttctgaaattttgggctgagtgaggagagagaacgtggcttttggtttaaaaggcttttcttttc

SEQ ID NO: 259423 - DNA, 474 bp, Glycine max
  unsure (1)..(474): unsure at all n locations
tgctgcacacatttgacagctcttgctgcacaatttggcagatttcgaaatccaacttgcccacatccaattttactcaaattggattcaacaagtcctaaatcatgtataaatcatatttaaaccaaaagcaaacttcataccaaggcaaatcaaaatatatgtatccaaaacccaccaatttattgacattctaacggtttgaaaagtgaaaatgagaattgggtaattttggggtaaactctcatctcaatcaagtctataacattgatttaaacttgctcaaactggttttaaggtgaaaactccaccgattcaaaatttgacctctcaacacccaacttaccctagaaatggctctnttctttacatttgtcactcatttgctctgtccaagctttcctacacagtctaattgacattctaaactagaatcaacttactgtagaactccactttcactaaccccaaatt

SEQ ID NO: 259424 - DNA, 395 bp, Glycine max
gagatcatctagaggcatgctggcgcgtgctagcttgagaggtcgaactgttttcgttggtcaccaacgcgtgtataccttggccacagactgattcatgataatatgcacatgcgcgtaagtcaccttatgcacaatgggtggcgtgctattgaccattaccatctatgatcgatccctacccttttccggcatagaaatacactagatatatctggatggacctcaacaagcgagactaatgtcggtctttcacatgccttgacgcactatcctaattcaagaggcttgtgtgaacgccatggcctgatgaaactatgaatgattgggggtgatggccatccggatatctatgagaagggtgggaaatcattcctgaggctaactttgatcac

SEQ ID NO: 259425 - DNA, 321 bp, Glycine max
  unsure (1)..(321): unsure at all n locations
attgtgcactcttgctttcattattcgcattttctttaatctcctacaacgtagaaccatctcccttcaaaattccgctttccattggggtatttcggtgctctggatgtcatgaactttgcaaatttcatgagacaatatgtttgagaataaatgctttgatcgattgattggggttgtacacaaaggatcaagctgaatgttttgatgatgccaaaggatcacatgttnttccaagctttattcaagacaacaaaattaaagatattcaaaatggatgatcaagacaatctctagagtcttaggaagggtatattaaat

SEQ ID NO: 259426 - DNA, 216 bp, Glycine max
cattgtgtgtgatctccctaggatcacattgtttttataacattgcttaccctatcctgattagatcaaattgccacaacatccatttgagtagctaaacagaagtacaaaagctctgtttgccagagaaaataattagatagcatcttcacatttactaaattttaaatctactactcgcatttttttatgttcattgttttttttcaaaaagta

SEQ ID NO: 259427 - DNA, 58 bp, Glycine max
tctaacctatagttatctacacgtacatttatatcgacctggtactgttcccattcct

SEQ ID NO: 259428 - DNA, 61 bp, Glycine max
atacacacacctttttgatgtctggccagcaacatcttcttacatcacacacacacagaca

SEQ ID NO: 259429 - DNA, 160 bp, Glycine max
ttgcactgagtccagctgcccgatttactctaggctactggactcctacagggaattaaatcaatcccttgggagaacaaccttagatttcttttctaattaaaacaattggcgattaccgaatatcaatggtgtggacaaaatttagaacaatctgagt

SEQ ID NO: 259430 - DNA, 111 bp, Glycine max
agttatccttatctaggggaggatctctaatctgatgatagaccctgctgataatgcttacacctttgggtgcctcctgaagaggatcttccttcttatctcaccttgtct

SEQ ID NO: 259431 - DNA, 194 bp, Glycine max
tccgccactgtggcattccttccgaaagtagaggcactccaagacttgtgtgtgttctacgacaactcatgtcagcagatgaacatgccaaattgcttgttgccttaatagcctataattgacgtgctcactgtgcactttataatgcagttacaatgcaaaatcactattcctgttgtgctgcgacagcttct

SEQ ID NO: 259432 - DNA, 298 bp, Glycine max
aaaaccgctccctattccatctgcagaacctactggaaccctaatatgaatgtaacacttattgttgcgattaactgacaccacatattacaacttacctattcttatgaagcacctaccagcctactgctcctctgaagaccagtatacccttctctgataatacattttatgctacataaaaatttatgcctgtaatcatcctagaccctagcggttagatactaaggaaccgattggccaattttacaaccttcatcgctttggatagccttgcttggaagccccccaatcactc

SEQ ID NO: 259433 - DNA, 188 bp, Glycine max
tggtgtcttcagtacaacattccttgtcatatattaaagtagctgtgtgtcaactacattgtagagactcttctgggagatcattagcgttgcaggcagacagtgactgttaaaggtcatactctgcagttggacataggtatgtctctacactatatacaaggtgctgtttaactgtgtgatataaa

SEQ ID NO: 259434 - DNA, 224 bp, Glycine max
  unsure (1)..(224): unsure at all n locations
cttgaatacttgacatcaagagacatcccgcaatatacatcataattgatcaactgctgtgacatacctattgacatacactatgacttatcattaactgatcatccactctgatcattccagaattcaaaaatctatagccattttattgtctgatgcatccngctattatttactgnaccgattgtatattctacaaagctatcttatagcaatgtatctta

SEQ ID NO: 259435 - DNA, 171 bp, Glycine max
tgtaattgaaaaagaattttatcttctcgcacatgcatatatatagtatatccttcaacgtcattttatatatacgtttcgtgcacaaaaaacattgacaccacgtaataataaatgatattccccccctcgtccagaaacatgacactgtaaaataatgatttccccccc

SEQ ID NO: 259436 - DNA, 323 bp, Glycine max
ctgaccatcacttcttcaataagaaaccaggctgctctaacattttacaggtaaggctgcggtgcattacctctactaactgactcacgtagcttgtcgtctttattgtgctcgatgttactcaacctgatgcaggataatcttctgatgacgcagtgattgttttgtagtagatagcactaatatctaggcgatatagcaactaggtctgactttgcaattatattagtaattcaaattgtattaacctatatgtagcctttattggaatattacagcctacctgacgtatgtgtaggcctctatgcgctgaaggtgatggg

SEQ ID NO: 259437 - DNA, 111 bp, Glycine max
aatagaatgtcgaaacaccgctcgagtcggtttcaattacgctattttgattgtctgctacgagccaacacttatttttgactatgctatgtccggtattcatttctcgcc

SEQ ID NO: 259438 - DNA, 242 bp, Glycine max
  unsure (1)..(242): unsure at all n locations
aacctacaaagtcaagatggtgactctgaagctagtctatacctagaatttagcatggcagttggtcatctttgactattacagatgattattatctgattaggtcatatgagaggacctaaaatagatttaccctgtttaggactaacagtntgatagggagttgtatcaatcctacgaattgatggggtgaaaattatgatgtgaccatcataattcagggaggagatgtatcctatgcc

SEQ ID NO: 259439 - DNA, 136 bp, Glycine max
ttcttttctattcgcccttttttctttttcctactctcactttcagtttgggaccttttgttctagtgcgctctttctgtcgtgttaggaaactagcttacaaatgcctacagcttcacgtttaagtaatataatt

SEQ ID NO: 259440 - DNA, 244 bp, Glycine max
  unsure (1)..(244): unsure at all n locations
aacactggctcctataccttaatgcactgcgctactctcatacatagtttctactatcatgactaatanaggtggtgctcagtacctcttacgcatagctgatgcgctactcatgatctgatcaattggggtcacttagaacatctcttcatctcattacttgacaacatttgtcacaatctttctcataagaacaagtgactcgacactatccattcacgttcttccattccatcactacgta

SEQ ID NO: 259441 - DNA, 331 bp, Glycine max
cattaatgttacaatgtccacacattctttatacccacactgtcaccaacccaaataatatctcctttaaataagcgaagtcggcatagctagattattatactagacaattggtctccattatccctcgacgtccaagtagctgcaaattttgtcacctatatatactatggggaatttattgattataactctattatgagtctatatatgtttagcacacaattcctaaacttttattgacttttatagatacttgcgatgtcaacttgcttatagcttttttatacaagagtaatattggaatatagaaatacctaccatttatctt

SEQ ID NO: 259442 - DNA, 173 bp, Glycine max
gcttgtgactctaaagcaatggctgtgtattgcccctgtacaaacccctgcttttgtgatctttcgacgtacgacttacatacgacaactgttcttcgatgccgaactacgatactatctcttttggctcgatgtcgactacaatgcacatgctcttactcgctgacgactat

SEQ ID NO: 259443 - DNA, 183 bp, Glycine max
gagtcgagatcgagtcacgcccgccacgctacgccaccacgaaaccacactcacacagccgggcacaggcgataccgtaactacccttgcgcactatagatcgcacaaaaaaccccggagaacgccgaagacaccgccaccggacaagaaataaaaacctgaacaacagcgctgacccacaga

SEQ ID NO: 259444 - DNA, 199 bp, Glycine max
  unsure (1)..(199): unsure at all n locations
gctaaactaaagggtgataaatcaacgtcctataaattattacttactagtatgatcctatgacactctaattaataatgagcctgattgaattacatatataagaataggagaaaagcnctagtttctggcgccacctggcacgcagccagcacgtgagtcacttgaatctttagttaacccagcatctcttggtaac

SEQ ID NO: 259445 - DNA, 227 bp, Glycine max
cactaatatgtgctactgcgtcattaactgcgtgcatgatagacgcaccacctggcgcggcgaattagtaactatacatcgcatacgttacttcgcaacactagccaacgcaaatcccgctctatacggatataatgccgacccaagtgaaccatccgtacctgcctgaaatgcgaacgcaatgctgcatacacgacccagaggaaaattaactagaagagtccacc

SEQ ID NO: 259446 - DNA, 156 bp, Glycine max
taagtcattttaatataataaaaatagtattagtcagtctaaaagcctttttccctcccatttttcccctaactattgcatccttgatcaaatgataaaaaatctatgacagatagtatcttcttttactgaacacacatagaatgaatttgacta

SEQ ID NO: 259447 - DNA, 202 bp, Glycine max
  unsure (1)..(202): unsure at all n locations
ctactctactgcaagcttatatnagagatctgtgaccttccacaaacctgcaaactatctctcttctgacaagatgcaggctgggcagtaattcttcatcaacctggtcactggactatccttactaactgacgatcagcatctcgctgctgatgtngacgtcatacactgacaacattttccatctacacatcatgctacg

SEQ ID NO: 259448 - DNA, 169 bp, Glycine max
taatttaatattttaaatggataaactgctggcctgctgctgaatataattaatgtgtttctataaagtacagattactctctttatcaacaactattataattatatctcatatctcattaaaaaatttaacatattattaaatagagactcatatctataggtaata

SEQ ID NO: 259449 - DNA, 139 bp, Glycine max
tacacaggatttctaacgtgaaccatcggctcatgcatactatagtctacacagctaccttcagtatacactctaaggatggtctctgtactacagagatacggtataagatgatatgaacctgatagttaactatatc

SEQ ID NO: 259450 - DNA, 124 bp, Glycine max
gattaaaaagcatcaatttttttttgaacgcaactgcaagacctcgactaaattggagttagttaggagaacccctgtttctctctttctttttgagactctaataacatcctggctctggctg

SEQ ID NO: 259451 - DNA, 161 bp, Glycine max
ctcacggctctactctaatatacgctttcaccgcaacccgcctaacataattcgcgtatagttaggaccaaatacgacgaccatcgtgcaaccagcctagctatgatcaattattcgatgtattacgccgacacagcctagaatatttgcatggagtgtgt

SEQ ID NO: 259452 - DNA, 286 bp, Glycine max
  unsure (1)..(286): unsure at all n locations
aagtgtttactttgacatcttaagaatgttctagtcatgaaactattaaaaaatatatctgaatattaattactcatcctatcaccctctctatctgttcgaatccattataaaagtaccttctgnacatactttgttatctatattaaactacttagggaagattattctgcttctctacattgttatatcacatataaggaattgagtatcttgaaccatgctcaatcaaagattggttataaatctctaattaatacagaattaactggctgtctcttacaca

SEQ ID NO: 259453 - DNA, 172 bp, Glycine max
cacttagatctcatttctctgtctcatagtgggactgtgcttgctaactgccatattagctgtaaagacagaaaacatgtgaatcgtaagcaattatggcctgtgacacgatgtatactgatgcacaactgtgaagaattattttataggccgcattcaggtattgggataa

SEQ ID NO: 259454 - DNA, 158 bp, Glycine max
tgtatatatcagatacattacgattcatttaatggtgactcagtgtataatcacatttcatcataagatttatttaatctgagtatcttataatataaatatgtgtatacttattactcacttctactgaagattatagaggatatcagcataacaat

SEQ ID NO: 259455 - DNA, 237 bp, Glycine max
aatgctgtggtcaactttctaatcacggtcctcttattactgactctgactttgaactctggactcttgaactctgaaacgactactccacaccttctactgctactctgagagctctagagatctaaaggtgctactcatctttatctgctctctgatgagtactctccccctttgcactccctgcaactgatcaaaatctctcaacctcatccaatcagtaacttctctatgcat

SEQ ID NO: 259456 - DNA, 68 bp, Glycine max
cacactggttggttatcagggatcctctgcccttttttttttggaaactctgtgaacattatgctcta

SEQ ID NO: 259457 - DNA, 216 bp, Glycine max
  unsure (1)..(216): unsure at all n locations
gatcagttaggatcaccccctctgatctgtagctgctcgaagatgaatcacagcaactctactgctacttctgtactactggtaaatttgactactctcctgatctcnatgattataagnttcttgagtctacatatatatctctgccagagtgcatattgatcttgtgctacttcacatcagtaatataatctctggtcatggtacttcatccat

SEQ ID NO: 259458 - DNA, 124 bp, Glycine max
gactttataccatgtgctcttgtaaaatttgtcccaacaagattgtaactaactaagacattggctcactttacactgagacactcattaatcttaaggctacagaccagcattcacttgtgct

SEQ ID NO: 259459 - DNA, 206 bp, Glycine max
tagtggctcacctcggtcgtctaagatcctccatgattaaccttcccattggacacatttgcaatgcatgtgtcgaagtctcatccctacacaagacggcaaacatctatgtctctccgacgctgttagacactgcgcacttgtattatgttcttttggaccttgcagtatcccctcagtttatctgacatacacgtctctttcga

SEQ ID NO: 259460 - DNA, 99 bp, Glycine max
ctgagacttcacaggtatcaatactttttgatatggactaagagttcatggctctgccgactgacgaagggtatccaactttcgtatcatagagcctcc

SEQ ID NO: 259461 - DNA, 197 bp, Glycine max
atcactttgagaggactttaactctgtatcctacatttttgagaacctgtttccaccattgaaaaaaagaatgtcaactactacacggtaaaaaaaaacacaccagaattccttttaacactttttttttacatatgtttttatttatcttacctccgtctactaaagaactttttttttcaacactcttctctctg

SEQ ID NO: 259462 - DNA, 203 bp, Glycine max
cttagattctcttggacaggctgcctcgggcaaataattattgaataaatgcgatttatcgccaacggttcatttatacctctctacacacgataacaattcattaggatgtcagaaattctgtcagtaatgttctcgataaattagcatatattacacttgtcatcatctcattctcttataccctaattacatttacatat

SEQ ID NO: 259463 - DNA, 190 bp, Glycine max
aacacactcctttctttgtgctactgaaaagtatgtcgagacaactgcatcaaatagtgattagctccttacgattgagtatatcttcactccttcaaagccattaaccataaacttactacaatagagactacaactcgctgtataataggtagtatcttaacacatcactgttttttttataccatac

SEQ ID NO: 259464 - DNA, 100 bp, Glycine max
cacgtctcacatttcatcttctctcggctcatctcacggtatacctcacaacattgatatcttgaccgagtgtccactggtcagttttatctcgtatact

SEQ ID NO: 259465 - DNA, 223 bp, Glycine max
ttatctaactcacggtcctctttttaaagactctgaatttgaactctaactttgaatttgactagtctccccccttacacactctgactctaatttctagactctatcctctttatctacactctgataacaactattcccttactacccctgcaactaacaaagcttcaacttagccatcgtacttcttatgcacagcacagaactttttcaatacgttctc

SEQ ID NO: 259466 - DNA, 260 bp, Glycine max
  unsure (1)..(260): unsure at all n locations
ctgctaatctctgtgcaactaacaacactatggcactctgaacaactatcgaatctctgtagatagttcatntgcttatcagtctagcacatcttccatgtagccctcttccacaagggatgacagagctcaattatcctgaagacatgacacaaaccatcataaataaatattctactgtataaatccacaagtgtacagcatcaaaacctatatataaagatcaactagtctgaacgtcttgtctcaattttccaaag

SEQ ID NO: 259467 - DNA, 258 bp, Glycine max
gactgtcgactgtgactgtattgtttgatcaaattgagttgtacattccttgtatgaacgataaaaatcatcttcttaatatattcattcctgtgattgtataatatatcttgagctatatcatttcctgatgcactactggagcacaggaatggtcaaagaatgcgtccactttagaaggaacgaggcacaatagagtgatgttgcgagtaccactcgagaaactaaagaatatatgtatcttactagtttgctgtt

SEQ ID NO: 259468 - DNA, 284 bp, Glycine max
acactagtgcactaacacacaactagtcctattatgattaagttgaatgaagaatgggattgagaactctattaacatttacatattactgtaactgttcacaaacttacatcaatgatctacaccattcctaaaggcttgttacttgcatattctcttgcaccaacttcatatcaagactcaacagacactcttattcatacatatcaatacttaacctaagataattcattatatcattatttaccagtattactattttatttctccttcgccacatcact

SEQ ID NO: 259469 - DNA, 174 bp, Glycine max
  unsure (1)..(174): unsure at all n locations
tggcaaattaggaaagccgaggtatcggagttgaaaataggttcattcccgattaatgctgatagtagcacagctggcggatatgaaagagtgtcaggcnttnttttattatttcttttttatttattttatacattactattaaatatatattctttccactctctctcctat

SEQ ID NO: 259470 - DNA, 100 bp, Glycine max
  unsure (1)..(100): unsure at all n locations
aaaggcgcagaacagggaaaacgagagggcccacaccggggagggnngacagaacagcgagaccgaacagaccacggcaacccgggcgagggcgcagaaa

SEQ ID NO: 259471 - DNA, 245 bp, Glycine max
gctctttgctgaggttatgcctatgaacatgttaaactctagaattaatgtcttctgattggtgtggcctaaaaacatgtctggcttgtcagccatttaagagaaaaaaaggtgatggaaaaaccttttgtatctgcctatgcatacattcaactgtggacgaaagtgacaactttccttacactttttttaggtatacatcttatggtactaatttagagtctttaatttaattttatatttta

SEQ ID NO: 259472 - DNA, 238 bp, Glycine max
  unsure (1)..(238): unsure at all n locations
ctgcactgtaccgctgtactacatatatatatatatatatatatatatatatatatatatatactttttgtaatctatctatcaattatcatcaattattatcaattatccttggttattctcatctattatgtgtcaattatttatcgttatggttgactanaaattggacctgggctagacattacacacagttagtatgagtttttcgaagaatatctagattaaatcattatct

SEQ ID NO: 259473 - DNA, 240 bp, Glycine max
ttttttttttaaacaaagcgggggaacgatctcaagcgcacccgcgatgtactatattaacactttatcactgcacactggaattcacaaattatcaacctgcgacatgatggaaatgtgcaaaagtctagctcttatgtttaaaaataggatgaaaacctatcaatgtattggtaactcttactgcaagcgaaaaattcatatagtatcaaggtactaatgtgaatataatttaaaact

SEQ ID NO: 259474 - DNA, 273 bp, Glycine max
atctcttgaatgcatatcagattattcatgatacaactaacgctacctactataaaaatatataatatttactatctgaaatataatattttagacttattataagaattaaattttcttatctgccttttgatattgctaaaaacctgagacaattcctgtgtatatgcttagatattgaaccgctgaagatccctccatgtacgctggaccactgataactatggactgcagcgcgcattgtgaacgtcatttctgacatgatagaccgtt

SEQ ID NO: 259475 - DNA, 351 bp, Glycine max
ccttggtgttcttcggcattacggcctattcgatcttcgacaggagatagttatacgctggactctggactatatctgtgagagcgcaggcgcactctttactgtcaccacgcggttctgctgactgatgtcttgactagatttcattcgcacatgctacggagatactggaggactcagtttgccttggacatactcatgatttaactggctttatttacctgtactgaagcttgatttggtactgatttctgtgggttgcctcgataaagaacggtgtgaatacaccaagattagctcgtaaatgacagtttgggactaggagaataaattctggtggagggtttttgg

SEQ ID NO: 259476 - DNA, 129 bp, Glycine max
ctaccggtcctgtgccttttaccattacctactgttcaaaatgctactattctatgtctcaggctcatgataatactagcaatgtggtttgtaataaaatactttactctctgcactaatatactcact

SEQ ID NO: 259477 - DNA, 64 bp, Glycine max
attacgactgtcgctccagaatagtttgcgtagaatgccaagctcatttcactctacggccgac

SEQ ID NO: 259478 - DNA, 74 bp, Glycine max
ggtctacactggctactaatattagcgtatatcgctcttctcacttctatgcgtgatgtccactctatcattca

SEQ ID NO: 259479 - DNA, 165 bp, Glycine max
gatggtttttgttttgactttgcctactgtgattgtcttcttcataaactggttaatgactgtcctgagctactcctctgcgcttttttgagttctactagtccatggtagacgcagtccttagaccttagaattctgtggtgcctccttagcagcttgtgatga

SEQ ID NO: 259480 - DNA, 85 bp, Glycine max
ttttatcccaatactcgaacctaaataatgctacttacgtgcatcgcctaatgcaagcttatacacgacctgaaatcaaggctac

SEQ ID NO: 259481 - DNA, 168 bp, Glycine max
ctattatgcttatcatatatataaatctgattgaagatcatgcttggctttccacaattttgattttattatagctggtcatgattatactccgtgatgttcatatatagataagtgatctgttcacataattgatatgatgctgtaataacagaatgactaatcact

SEQ ID NO: 259482 - DNA, 183 bp, Glycine max
acatcttctatccatgccataacactcctgtgcactcatactcgctcactacctatcgttttacacgccctatcttactccactcacaacactaacgcacttcacacaagacagcaacctgccctacaaccgtttactaaccgcatctacatctacggaaccaattctgagattgtactctta

SEQ ID NO: 259483 - DNA, 111 bp, Glycine max
actcagtctgaaatgaacaagtccgcaatttgtcttatgttctcagcttggcataagctggtcctaccttgaaatgtgatgatgctctagcaactcattgtgttatgtttg

SEQ ID NO: 259484 - DNA, 296 bp, Glycine max
ggctcaaacaaatgttatgtgctataaactctactacgatcgtgcgatcgactgtgtacacgttgcatgcgacatattctctgtaagatcttcctatactgtttatttctctgcactattttttttatctctactacttataatcttctaaggtggaaatttttattgatatgtaatcacaagtttattatgtatgtacttattatgacttacatttttactttgaatctcactatgtatgaataaacttaaaaactgagtgtctatataacaaattttactgtattaaatctttt

SEQ ID NO: 259485 - DNA, 149 bp, Glycine max
taaaacaggttaccccaatcttaataccatttgatattcgtaaatactcataggtagaaaagcccattcgtgcacttcttatccaacgtatcattgatctcattaccagcactctttcatttaaaaccgctacttataaaaaacttaaa

SEQ ID NO: 259486 - DNA, 168 bp, Glycine max
tgctgacagcgttttcttccatatttttaaatcggcaaagtactgcacctggaaagttattcattacacctcaagcaattaggtacatgtgttatattttgcagatacgcggttcttttttcttaacgtaatgagattctgacaattttcgtgcattcagaagaatca

SEQ ID NO: 259487 - DNA, 140 bp, Glycine max
acactggtactgatacaactctcacttacgtgtatgtaattttctttgagcactaaagaattatcctcaaactaatctcatcacctttctgctgatattgtgcactctgaactgcaatgcttctcttgtgtggtaaacac

SEQ ID NO: 259488 - DNA, 304 bp, Glycine max
acttgaccacactgtgcgtacttgtgcggcgcctatcttaccacctcctaaacttttgcatctatacttaaccataccttttttttttgcacacttgagctagtgaacagtcaaaatcagttgtgtgacataggattcgttagcaccttcattttcttatatataatatagtaaaatatgaggaaattaacatgaaaggtaaatggttattttttttttttttttccatatttagtttacattttcttacattagtatttcaagtaaacatcccaccatcactgtatgctgacaaggatgtaga

SEQ ID NO: 259489 - DNA, 322 bp, Glycine max
atcataatttaacttaaagcttaattgttgtgttaatgacagacttatgaatccttcttagattacattttaaaccaagttaagcatctcatttgccagatgctgatttaaaatgctttgttctttcaaatcatattttaaacactttttgacattgctatagttgtatgatgcgcctgttaatctctcatgcttcgttggaacctatgttaatcggattttcgtcttcaccccattatatcccccccccctttacttcctctgagatatttgtacgttttacaaagcttagggaaaattcatcctcgtggcaaaccttttt

SEQ ID NO: 259490 - DNA, 84 bp, Glycine max
ctagtgtatgcttatgtgagagcgattgtggttgcaactgctaattgccggcatttgattgacggtctgtacagctagttctac

SEQ ID NO: 259491 - DNA, 198 bp, Glycine max
tctatacttcaccagtaactatacataacataacatagtctactctacatccaaacactttgctatcattaattttaaatagttgatgcgctaatactttactacttgcattctttaatcaccagttgatggtaggatgtaagctgtgcagcggatagacatagctgatcactacaatagaatcttagatacagattt

SEQ ID NO: 259492 - DNA, 161 bp, Glycine max
atcgcgagtaaccatatgcggcgcacggacttgtatatcccaactctgctctccgattcaaaatgctgacgaacgcttgtccctctgattgtatcgaaccacttctttcacgcgcgatataatctgtatggagggaaggagttgctacagttcttctgctc

SEQ ID NO: 259493 - DNA, 203 bp, Glycine max
tctatgattttcgaccaattatgtgttgatacagctcaactcataatggggtctggctgtgagcttacatatgccatgagtgagtatacatcacaaaatctgtggttatatgctatctaagactgtgaaacagacttacttcagccacttctaactttttactctatcggacatttagggcccacattgttgtctctgggatc

SEQ ID NO: 259494 - DNA, 133 bp, Glycine max
ccatttctgtgcctctgcctcattagacatgatccttctgaactcagtacccagccctctttcaactcaaaatcgttacactatgtaaatgaaattttaaaattctaactggacttattgcggcagttttaac

SEQ ID NO: 259495 - DNA, 236 bp, Glycine max
ctaccaagtaatggctatttcaacatttgcgatcatgcactgtggtattctctgcagaaaaactgttatttatgatatacaggcttggaactgttgacgtcaagtattacattgattgagtcgcaacttcaaatgggtgatagtggcgggattatgtcgatcttttgactgcacatgagtgcttatggatcagacatttggaaactattactcttgctacaaggaatttaactggg

SEQ ID NO: 259496 - DNA, 370 bp, Glycine max
  unsure (1)..(370): unsure at all n locations
caacataaatgttaacccattttgttctgttgaagaataaaggaaattgacaactctttccacatcttacctatcaactgctaacagttacacaaactcccgatcaatactccacccattacctaaagcgctgcctcttggatcattctcttgcaacaacncncagctaataattcactagatactcttactcatacccatccatggcttaatctaagctcctttcctcttatacgttctttacctagtattacctatttatattcatgcatcacacacatcgcttcaaacctaaaaggactgcatcaataaatacactttatctcaaacttaagtacttactctctacaccacctccaattgaaactca

SEQ ID NO: 259497 - DNA, 148 bp, Glycine max
ctatgacatcaaggcgggcggcatttcccttcatcactaacattcttaaacacaactgtgctttgtcgcctcctaaaatttttaaataacaaaaggctgctggggaccgcaaattctttacacaattacttaagaagaaaaaccgccc

SEQ ID NO: 259498 - DNA, 52 bp, Glycine max
accaaaaaacaccacgaagaaaagaccacgggaaaggggtttttttttctag

SEQ ID NO: 259499 - DNA, 435 bp, Glycine max
ctataaatactcagcttcatcaccattaatgcttaagactattcgcgtggcctattgatgttcaatttgaacaatccggcctccaccattatgctcattcttgagtcatgaacacattttattgaatgtgtaccctttgtgcaccattaaaaccaatcttatttttatctggacattctgaggagatgtgccctaacttcctaaaattgaacaaatgatatgaatggggaaagtatagggttactaccactaccacctgcaaatccctatcaacactcctttgttgtcatggcggttaccatatttcttacgaagggtcgagtatggttttccccaatgttgagtcccattcttattgttcctcattggacctgtactttcatcaaacgtcaccctacttgagaagtctaatctctaacccgcgcaagttaccaa

SEQ ID NO: 259500 - DNA, 355 bp, Glycine max
tacattattttccgtgcattcgacattgagagttggagaaactccaggttccttttcttagcaactggctgatccactgaagaattttcccgacccaaaggtttatagtgacaaagtattctaagagatggaatgcgaatctgcttgtctgaatgatgcaaattatcacgaacatgttgccactgcatctgcaggcttttcttcaagctctggatgataaattctatacacagcgacttgcacaaagaactggatatgccaggagatggttcacaacgacaaagctatactactaatacacctatcgacaaatgggactctatagaattggagaacaaaacacaaaatattcttg

SEQ ID NO: 259501 - DNA, 211 bp, Glycine max
aaatctcttgagaagaatcagtccataccagacagtgtcttcattatacaactctccgctctattcattttgtgatacaatcaaacaggcggagccacggcacaagggtcgtataatgattgaaaattaaatgcactcacaccaaccaaatattgattggaaatggaaagaagctcaccaaaactacccaacttggtttttgagcaaatac

SEQ ID NO: 259502 - DNA, 321 bp, Glycine max
tgtgctcctatgctgaccaccatacaaacctttgcccttccaagccgctacctggagcgattgaacagcctgaagcttatgctgtcaaaatttacaatagaccttctcaacctcaggagcaaaatcaaccacaacagaaaaattatgacctctccagcaacagatacaaccctggatggaggaatcaccctaacctcagatggttcagccctcagcacaacaacagcaagctgatccttccttccagatgctgatggcccaaacagaccatacattcctccaccaatgcaacaacagcaacaaccccagaaacaaccaaca

SEQ ID NO: 259503 - DNA, 467 bp, Glycine max
  unsure (1)..(467): unsure at all n locations
ctgacataaggctttatgttatttaagaaattgtcactgctgctcttatagaagttaaaatggaagcatctttattaattacaattgaagtatataagttggttttaacatataggagataaggtttaattacaacagggagtggttattcaaaataacatgacgtggaacgtgggggatggagagataattagattctggaaagacaaatggattaatcaacaggaatgactagtagaaaggtaccccaggctgtttatcttatcctcacagcagaatcacaccattaggcagatgggaattcacaatgacaagggctgggaatggaaatattaatggagaagactgcttgttgacaatgaaattgatacaaccatcaattctcttatggaggtagaaggacaaagcatacagcaacaacaaactgacatttgggagtggctaggagatccatcanggaattactc

SEQ ID NO: 259504 - DNA, 256 bp, Glycine max
gcggaccttgtttttttatagcctctggagatcaagacttaccatggatggaccctaagtttgaccagcctcggacacgtcccatagatccaccttggggttaatgagcctttggagacgccataatcaccaacggtgaacacttatgatcgatgaggcctttggatgctacgaccaagagacacacttgtcctgtgttctgtcaagacttaccaagggtggaccttggggttaacaatcctttgtccagttgaat

SEQ ID NO: 259505 - DNA, 402 bp, Glycine max
tacgacgaccctatgggttccctattcaaactttaccagcgcggatcagtgtacaattacctcatggaatttgagcgcctcacgaaccaaatcattggcctcccacccacattacttctcaggttctttattttgggattctcgacaaacattcgccgagagggccaagcattgcaccctatatctcttccccaagtcactgcccttactaagctgtatgaagataaattgaatgatcgacgacacggtcactattcaccaccatcccctgtccaatcacctttacatcacttgtgccaccttttcaccacacacccaaagcccattttattcaccgaactcctgacacaatggtttatcgccgagagaaaggcccttgttacaattgcatcgagaaatgga

SEQ ID NO: 259506 - DNA, 418 bp, Glycine max
  unsure (1)..(418): unsure at all n locations
cctgangcatgcaagcttcaagctgctcaattgctccagattgttgtataatatggcacacgtgtgtatggtggtcgagagaggagcataatccacaaactcttacgacaggtatagatatttgattcaaggccagctgggctaccaggttaaccaaggcatctagtttaccttcaagcttcttagtttcaactgatgaagatgaattcgtggctacttcatgcactcctctaatgacaatagcgtcatttctggcactaaattgctgggagttggaaatcatcttctcaattaaattcctggctttcgcacgggtcatgtctccaaaggctccaccattgggtgcattaatcatacttctctccatgttactcactccttcataaaaatatttgagaagaaattgctccaaaatctg

SEQ ID NO: 259507 - DNA, 451 bp, Glycine max
  unsure (1)..(451): unsure at all n locations
ctcaagcttacctatcgtctntacagtctgtagagttgggagcctttccagtccttgtgttcggactctcagcaccttatgagtagccgccgatgaacccattactgcttcccctaaactatctgggctttcttcacgccgcaacccatgccttgcaaactccttggagaacactcgcgttgtggtcactgaaacctcgtgcgatgaaaggcgtgatgctttcctctgatggcactcctctcatgggatatccttcgcatgaagatagaaacctgattcttccttacttctagcgagggaaccatttaacaaacgcccctccatgctagccaagagttggtgcacaacacacaattactgcgccgatctttcacatccccgtcgaacgtgtcaacatggccaaatggcacaaccggcttacttgcatgagagaggcaggaagcgtaatcgt

SEQ ID NO: 259508 - DNA, 407 bp, Glycine max
tcataagcgactgcggctgcaagcttcatcaagcggtgatagagctcttatcttcaagtcggtgttccttaaacctccattaatttattgctttaccttctctctcattagtggttcttcatttcttctccatgtatctcctcacatgtcttgtgataaatgtgtttaacatgattctttatagttttcaccgattaaacttgctataaaagctagatttgatattctattggtcaaatttcttgttcttcgtcttgaaccatgaatagtgctgaggttaagatccctcgagtttcatcttggtatttttcgaggctgaaacctaaaccatataaattctactaaaatattaatagttaagaaaaccctcaaaatctatagtgacccattcacctattgtagtttgt

SEQ ID NO: 259509 - DNA, 395 bp, Glycine max
  unsure (1)..(395): unsure at all n locations
agcttaaatgagtagactattggtcttgcaatttcttttgctcgtctcgtgctttgcttttccatttgttgggcatggctattctctgttgttatctgattgaagtttacttgcatcggattcagtatttgcttgcagtttgatactcaattcaacgatgttacctgattagtgttgcactttattgttttatcttagtcccctacaaccatcaacctaaagagagtaaaaggtaacgtggtttanttgatgtgaaagagggtagagaagaaaaataatgaattaaaggagtttggtatgtaaataaagaaaaaaaaaaaagaaattatgcgttaacaaaatttgtatttacctctttttttttctttttctttttacccttataaaaataaatt

SEQ ID NO: 259510 - DNA, 408 bp, Glycine max
  unsure (1)..(408): unsure at all n locations
tctcacattntgtctctacttctggttgtaatattcaacttcctatacatagcaatctatagaagagagccaagaggttcagacaaatttctccaggcaagctaaactcgcctaggcaaatttcttgcctagtgttgaaggccccaattcttccaggcgagttgtaactctcccaggcgagttggttgcttaagcctgaagaaaattgattagcccaggcaaggtggttaccagcttgggcgaatggatgtctaataatttggggaaatgaccattttgcccttcttttgactttgtttttggatttaacaaaccaccattcaaacctacacaatcatggatgaatccttcatatgtaaacacaaaccattgttaattggccacatatatatatatgtatatatatat

SEQ ID NO: 259511 - DNA, 448 bp, Glycine max
atcttaagtcacctgcggcatgcaagctttgagccaaaatgctgactcatcatttttcttgacccagggcgagaatgtcaatccttacccttggaagcaaaaaagaatatatgggaaatttccaatcaaaaaatagaaaatagagaaggaaaattcccattgaaagagaaaaaagaatagaaaggaaattcccaatcaaagaatgggagaaagcaaatagaaaagaaagaaaattccctaccaaagaatgggaaaagtaaaaaagaaaagaagaaagctcccggtcaaagaaactaaaagaaatgtgcagaaaggtcttttgaccatacaatatctgaacaatacagaattgtcaccaaatgaacaaataaggaaggaaaggaaaccacgacctaaaatggtcttctcccttaattaccaaccaaaattcccggcgctagcgaccctt

SEQ ID NO: 259512 - DNA, 408 bp, Glycine max
  unsure (1)..(408): unsure at all n locations
aatggatnttcaggtgtgagaagtgaaattgagaatggtgtaaatttggagtaaaacctcacctcacacaagtctataacatcaatttaaacttgctcaactggatttacacctaaaatttcaccgaatcaaaatttgactcctcaacacccaattataccctagaaatggctctttgttcacttaggccatttgaatttttctcttgcacagcccaaactttctcataagtcctaaatgacatttcaaactaggattaactccctctaacctccaaataccactaaatccagatatggccttccaactctcaaagtctcactctttttccactcaaacaccatactctaccttttaaccctagtaactctaccttcatctctaacagttttcataagcatctcagca

SEQ ID NO: 259513 - DNA, 403 bp, Glycine max
agcttgaccggatgtaagatacatcttcttcatcctttgtcattcttgactccatttcattgaagcgcatatacacttgcaattcctaagtatcaaacctctcaccaacaaagttttgaaagctatcaaacctttccataatcttcgaaagaagagatgaatcttctccttcatgtccttcttcaccaacatttctagcacccttctttacccaagagccatcatgctcctttatatatccaaaggatgctatgactgaagcgcctataaggaatgatctcttgattggaacataaggttcaaaatcaagagggatgttgaaatgttgaaggaaaaggggtataagatgaggataacgcaaaggggcattcaattgccatgccttatgcatgcgatatctaac

SEQ ID NO: 259514 - DNA, 461 bp, Glycine max
  unsure (1)..(461): unsure at all n locations
ctgacttgagtcatcaagagattatacatatgtgaccatggcatgaattngaagaacaatctatcatttatctttcaatatcttctttcaacactttcaacacatctttctgatttatttctcttcatctttctaaaagttttgttcaaacactatgtcttccaagaaaagttctttgttcaaaaacttgtgttattcatctttttcattctcttctccctttgccaaaagagcgaaggactaaccgcctgaattcttttgtgtctctcttctcccttacaaaagattcaaaggactaaccgtctgagaattcttttgattcttcccttccccataagcaaaatatttcataggactaaccgcctgagatatcttttgtttctccttacaaagattcacaggactaactgcctaagaattctttgtcccaacacattggagggtacatcctttgtggtaca

SEQ ID NO: 259515 - DNA, 424 bp, Glycine max
  unsure (1)..(424): unsure at all n locations
ctgcagcatgcaagcttgacctcatttattcttcatatgattttacagatcctaggagaatgcctctacaaaatagattttatacacggagtattaaatgaagtcttaaatgtcatatcanatcatgattccatcttgctatcatttgaaacatcagatgcagacttcaccaaacatgttctgatagcatataagacataacttttaacctttgtatttgcttacatttaatcaaaataatcaagggtcctgggtcatcttttgacttaacaatctcttccccccccccctcttttttttatgtcaaacaaacacaaatataaaaggttgaagcaagattataaatttcacattaagtggtagcacgcttatcagatgcagaaaggtatatcatacatagatatcatacatcataagatctgag

SEQ ID NO: 259516 - DNA, 465 bp, Glycine max
  unsure (1)..(465): unsure at all n locations
tggagagggtgcttcaatggaggagaagaaagagtgatataattatagaggggggagcacgaaattgaagataaagggagagaagttgaactttgagttgtgtctcacaagactcttattcatcaaagttacaacaagtgtcacacatgcttctatttatagactaggtagcttccttaagaagctttctcgagagaacttccttcagaagcttctttgagataacttccttgggaagctagagcttagctacacacacccctctcataactaagctcacctccttgagaagattcctaaagaagctagagcttagctacacacacctttctaatagctaagctcacctccttaagaagagaagctagagcttagctacacaccccctataatagctaatctcacccncatggcaaaatacatgaaaaaacaaanaaagtccctactacaaggactactcaaaat

SEQ ID NO: 259517 - DNA, 249 bp, Glycine max
aaaaaagggggatgtctctctccccccctaaaacgcgagcgcacaagaaagtgttttttttatgccacaccagtttttgacccaagtactgtgcttcaagcaagctctcgatacataaccgtggaactactcaacgcccgacccacctttttgtcactagccaaccaccccacataatgagcggaacatgagggggaccaaaacgaaacccattctggctataccaaaagtccagcccacaaaaggacc

SEQ ID NO: 259518 - DNA, 342 bp, Glycine max
cagcttcaatacaaataatatttattttgtataaccacactacaacagctagcttttaaattggaaagccacatgcattatataccccacacactagaatcccatacttcaatgtgtgactcaagtaccataccttgcatttggatcttgacatactacatagtacaaacaggtcattacaaaacctgtaactcccccctaactcaatagccaataattgcctacctctcattttccacctcttcaggtatatcccacacaacctctaactttaccaaattgcttcccacacccatttcatgtaatcaagtatgttagttaaaggccaaaaggggaaaacct

SEQ ID NO: 259519 - DNA, 454 bp, Glycine max
  unsure (1)..(454): unsure at all n locations
ntctgagtgaaaggatgtgactcttcacatttaaattattattatcacgcacaagggcaatggtaatcgattacacacaatattgtaaactattacagccttttgaagataattggaacgtcgtaaattcaatctgaaaactatttcaaactcattatgctactcggaatcgattacaacaatatgggaatcgattaccagagagtataaactctctggtaaaggttttgtcaaaaactcatgtgttattcatagttttgaaaaaacctcttaatacttatcatgattgagtcttttcttcattcttgaatcttgagtcttgaatcttgatcttgattcttgagatcttgaatcatgattcttgattctaggctttcctcttgagtcttgaatacttatcgattcttgaactattgacttgctcttgattcatatgagatgttctttgaatcac

SEQ ID NO: 259520 - DNA, 323 bp, Glycine max
  unsure (1)..(323): unsure at all n locations
atggtgacagcangcccagaatattcacttactggacggtcagcattcatctctctcttttcttcattctccctctactcacatcaatcaaccctagcgtaaacatgaatgaacttttatatatatgacaaagcggtagggtgaattcctattagatgtttctataacaaaataaaaataataaacttgcaataaattaaactcatgtatttattactcagaaaacaattattgtgataagttgcccttgagtggagatttataaatcttgtctagcttcttttgggtgatgcagagtgactcatataaacaaccggatgcta

SEQ ID NO: 259521 - DNA, 393 bp, Glycine max
  unsure (1)..(393): unsure at all n locations
actagctttactgaattgggttacgcgaattacttctttctattgttaatatgttatccttcaataataaactaaatgcatcttcctgatcaagttttaaaccgtttttttctaacattaacatgatataatcattatacgttaaatttaaactttctttggtattaactaaaattaaacactttatccgatggcaattgaactacaaatttagcctcggntgtatatatatcttgcaacgaaataatttatatttatttttatattctgaaattaccaacaaactataattccttattgtaacgtgtagtttcacatagaggtaactctacctgaacataccgaaggaaacctttgggtcctactctcatttatcaatttattacaaccaaa

SEQ ID NO: 259522 - DNA, 423 bp, Glycine max
  unsure (1)..(423): unsure at all n locations
agcnnnacggcctagcggaacgaccattgtttttatggtgnggactacaatcatcatgacgggactatagccatagtgagtccactacaagcattgtcagaggggcatcatcatattaccaaggccatcatgttcaccacgatcatgctggatgtactacgaccgtggtcaagtgacagagtcttcaaattttcaggtaaaagtgtaatttttcactattttcacttaattgagcaactatgcatctgaaagacaaaactagctcccaaacatgagttttgccaaaaaaagtgcatgcaaatagcacaaaatatcactgcaaaagtggtttattaacactcccatacttgagcttcgctcgtccttaacaaattattctacgtctctaatcaaaaaaattcttccaagccaaaactcatgcat

SEQ ID NO: 259523 - DNA, 403 bp, Glycine max
agtctctatataagctgagcgcttatatctattatctcatgttgagagttattcacagagatagagtgtatctcttttatcttagggagagcgattctcctaaattcttgagtgattcaagaacaccctgggtgtatcaaaggactttcacaacctttgtgtgttgccctcgctggaaagagtgaaacttttcttcctttcatcatcacccttgatctttctaaccacaattgcagaaaatacacctctgcccagaataatctcgtggccctaactcccatattacgcactcaaattaagagaatctttgacctatattgactattgtaacgagacctttcaactcgtttccgaaacatctcatttggagccctgtaactttagatattgccattgctatatt

SEQ ID NO: 259524 - DNA, 303 bp, Glycine max
caccagacgatacccggaaagccaaaaacccgacaccatctgccctcctaaaaggcacaagcctaggcggcctaatgaggcattatggcacctgggactagcaccaacgttaacacccttagctgattaacacccaacacatatatcgcgtagctaactctaaaaggaggggaccaatgaatggaccgactcaacacacaacaagggaaacgaagtgcgggactttagtcaacatcatgcggtccatgaacaactaacaacctggactgttctcatgacaccgggcttgagtcaaagaatggc

SEQ ID NO: 259525 - DNA, 277 bp, Glycine max
cgcacttctctctccctcacaattgctgaggaaaattatttccgcgaagaatattcaagccgaggcgcttccgctacgtttctgtaacatttccgcgagtcataacgcgaagaatctcgaccgttcctcaagattcatcgtccgctcttcgtatatcttcagtatacaacgggtaattacctcagaccgagcttttcaattcattctatgaacccgttgccgcccacacatctgctcatgtaatcttattctcgccctccttggcgttttataaccc

SEQ ID NO: 259526 - DNA, 407 bp, Glycine max
  unsure (1)..(407): unsure at all n locations
atgcaagcnttagagctttatgtctatgattggttttctgttcnatgctatgtctatttctaaaagattcatcctttactttccaatgatgcatttgaattgaatattatttttgtacacttagggtgggaagcatgacaagatgggtatgaatatggttcctttgaaagaacttttgcctgaagagcctaaagtttttactcttgaccttctaaaaaacatggatcctaatgatgcccaaaatgagaagtctcgtggacaaattgctttggaattgacgtataaaccttttagagaggaagacttagcacgttctgatgaaacacaatcaatacaaaagctcctgaagcactccacctggtggtggctacttgtagcataatcctgaagctcagactagaggaagt

SEQ ID NO: 259527 - DNA, 217 bp, Glycine max
atcggagctgtgactcgatttgaaactaattatttggtcgatacaagtactgataaagataaattgaatctaaaaatataggggattttggccggtaatagcccgctcacattaatgatagaccgttgcatagtttataagtcgctaattcataacatggttttcttaaggcaaatttactttcattcagatagattgcattgttcaataaaagaaa

SEQ ID NO: 259528 - DNA, 294 bp, Glycine max
tgcaagcaactccttgggcttcccttcaaggtatttggttatcgcgcaatggctcgaaccggttctctctttgagactcgcaatcgtctctgctatcatctacagaataatcaaattaaatacaattggaaaagaaataaactaatagaattgattctgaaagagagtatttagggaaagtaccaccgctaaaggagggtgggagaggggcttcttggacgacgcccgtttcttggccttgggttgcgatgcggtatacatgatgaaggcttgattgatactcacaactgaaaa

SEQ ID NO: 259529 - DNA, 265 bp, Glycine max
ctcaagggaactatgaatgaatattctaaaaattatgggatgcgaataattgaaaatattatatctcttaaacatgttacaattgatccacatgtgtgctataaaaaacattgctttaaaaaatcactctcctaaaaatcttatacctcagagagtaatcttactattaatcggacgcttaaatctaaaaaaagtcaaatgagagtacactaaacctccccttatatggtgaattgagtgatcaattattgacactgctacccga

SEQ ID NO: 259530 - DNA, 208 bp, Glycine max
ttgaggttgaaagatgtttgaaatgagaacttttggaaattttaaaaatggaaatttttaaaaaggtttttaaaatgaggtttttttaaaaaaaaaaatggggggccaaggttaataaaattgttgtgggagaatagagggggtaagggcatttgggccaagaatttaaaattctcaacttttttggtcattcaaagggggccaaatt

SEQ ID NO: 259531 - DNA, 395 bp, Glycine max
catgcaagcttggagaatggctagacatgattcttattcgggcttggttcggttcaaggataaaaaggatgccccacactatttccatgacactaatgctaaactgatgattgggaaactctatgcaaaactggacatgcatgcgcctatgcggacgctcaagtgtcaaatctttatggtcgggtgatgctagggttcacgattcatttcctctatgttacatcaacccaacgtttccaaaatatgttcttttatcaatttgtgcattcatccgagtccattttgggccgctgggaaaatcttcacagcattcaccctttaggtgtatacacattttttcaaaaactagctatgatcagcgaatttttcttttaaaaaaaggtggaaatcatctc

SEQ ID NO: 259532 - DNA, 400 bp, Glycine max
  unsure (1)..(400): unsure at all n locations
ctgcactaatacctttgctgtccgagtatcatggcctagcacgtgaagatactcataaacatcttaacgagctccaaattgctcgatccaccatgaagctccctgatgtccaataacatcatatctttctaaaggcttttcctcattctctggagagagtggcaaaagattggctatactaccttcgctccatgtgcattttcatcttgggatgaccttaaaagggagaccttggagaaattctttccctgcatctaggaccactgccatcacaaaagacattttangcgtcaggcaactcaatgcgaaaagcttgcatgaacaccgcgaaagattcaagaaattgtgggcaagttgtcccccaccacattctaaccacccctcttcaaaattctatgac

SEQ ID NO: 259533 - DNA, 447 bp, Glycine max
cttaagtcacctgaggcatgcaagcttgaaggtaggagaagatgaatggatttagatttatataacgagcacaaaattttgtgtctcagatgaggtctgaactttgaagtgtaattctcaaatgatcaaagttgaaaaaatacacacacaaggcctctatttatagcctaagtgtcacacaaaattggatggaaatttgaatttctattcaaatctcacttgaatttgaatttgaattggtggagccaaaatttcactaattattattagtgaattttagctatggttcagctcactaatccaagatcaagtccaagattctccactaagtgtggttaggtgtcatgaggcatgtaaaacatgaaagacatgcacaatgtatgactatatgatgtggcaataggatgtagcaagcaaatgctctcctctcccttaagatggtccaaa

SEQ ID NO: 259534 - DNA, 303 bp, Glycine max
tcactgagctgcacttgaaggggcaagcaatgtattttttttggaaatctgtcgatcagccttcagcaagatcatcacgcctgcccaggttaatgtcatgacaatttagaaacaactccttgtctaaaaaaacttaccgattttcaggagccatccacctttgcttttattattactcatgatcattctatatgggattgtttctccaatcttgacatgttcagcataactttaatgcgcaatctttgctactgtgaaagattttgtgtttctcaaacactccccctgtgtgtaagtgtgaca

SEQ ID NO: 259535 - DNA, 326 bp, Glycine max
gctgcactaggtgagtgccgtctgaaggtatcttatggtcgctgggcttacccatgcgggtgttgaagacaccgcatgggcatattcttccttcccttttgccgctgtagctccgattcttttggcgttcaggtgtgtggatgaaacgtaatcaactttcctcttctaatccaccccgatgcttccccggcacacacctaaatccgcatagcctggatcggcgtgtgtactccctatgctctctcatacgtaaaacaaccggctcgagagtctaccctcatggagatcatctctctcttaaccatgggaggagctactttggccgg

SEQ ID NO: 259536 - DNA, 463 bp, Glycine max
tttgtgtgaaaggatgtgactcttcacatttgaattcgaatttcatcgttcaaaggtactggtaatcgattaccaaaacattgtaatcgattacagccttttgaaaataattggaacgttgtaaattcaatttgaaaactttttcaaaacaattttgctactggtaatcgattacaacaatctggtaatcgattaccagagagtaaaaactctttggtaaaaggttttgtcaaaaactcatgtgctattcaaagttttgaaaaactttttaatacttatcctgattgagtcttctcttcatccttgattcttgagatcttgaaccttgaatcttgattcttgtctctagactttcttcttgagtcttgaattcttcttgattcttattttgaactcttgaattgttcttgattgctctatgatttacttgagttgttctttgattgatctatgattctcttga

SEQ ID NO: 259537 - DNA, 359 bp, Glycine max
  unsure (1)..(359): unsure at all n locations
gcaagcttgaggatggaatacttacttagtggtgattaataaaagcgcaaaacagaatcgaagaatgcgaanagtagagatcctaggggtgcaaactcgtaaatttcgtgggtatggcttttgaaagggggaaaagaagtttttgaatgcaaaaacgtcccccctttcatcatttttatattttggtgcaggggttgctcgcccaggcgagctaacctgcactttnttttttttgagaggaacattaaccatgtccccttcttccttatgggttagcgtttcgcctcacttgaacttacttaagttagaattatgcgttgattactntattttaaaaccaaccaaatagttaaagaaaa

SEQ ID NO: 259538 - DNA, 459 bp, Glycine max
  unsure (1)..(459): unsure at all n locations
cttttagtgcatcacgtntaaaaccgagtgtgatggtggtactatctttgatggtactcggggggaagtgatgggggaaatcgacattcctattgagataggccctcacacttgcaatgtggtgtttcaagtgatggacataaatcccacctatagctgtctcttggggagaccttggattcatgcactgggagtggtcccttcgacacttcaccaaaaattgaagttcgcggtgggtggacttttagtgatagtgtcgggtgaagaggatatgttggtgagctgcccctccttcgcaccatacgtagaagcggcggaagaatcgttggaaacggctatccaatccactcatctcttcccctaatgattgcctcgatcctcatgtgcgtccacatcttttccaaattgtcttgtccattgatccttgatgtacaattcttccttacgcatcacaacaaa

SEQ ID NO: 259539 - DNA, 292 bp, Glycine max
  unsure (1)..(292): unsure at all n locations
cacctttcccccccccccccccaaanaaannnnnagggnttatctctgcaccacaaacacgagcgcacnaaggaacggctcttccaagccccaggggagccagtcagaaaaaaccgaagcaaacaagtaaaaccaccaagccaagcacaacagaagcaaagccaaaccaagacagagcacagcacaacataaagatacaccaacaagggaaaaccgagccacagacaagcaaacagacccaacaccaaagggaaacaccaccaaaaccaagacaaatggacccccaacagaa

SEQ ID NO: 259540 - DNA, 413 bp, Glycine max
  unsure (1)..(413): unsure at all n locations
ngctttgggttcgatggctccaatgttatctattccccacatggaaaagggccaaggggcggacataacattcaaaggatgaggcggaacattaacattgtccgtgtatgcttgacatttatgacatttccttacatgggcgcagcaatcgctttccatagtgagccagtaataaccggctctaaggatcttcctggccatagcatgcccattggcaggtgtcccaaatgaaccccccgggatttcctcaatcatgtagttcgcctctttggcatctacgcatcgtaggagggtcatgtcgtggtttcgtttgtacaagatggtaccactcacaaagaaaccagtagccaatctccttaacgttcttttgtcattgtcggaaatcccttgtggatattcttagttctcaacat

SEQ ID NO: 259541 - DNA, 166 bp, Glycine max
ctaagcttgaccaatcccgacccaacccgggcatagacggtcagtgagaacctgtgatgtacctaagcaggcgagctcctggcagtctacatataaaaggaaaacaaagaccacaaagcaaggaggcttggggtggctggccaactgtgaattttgtgtaatatgt

SEQ ID NO: 259542 - DNA, 398 bp, Glycine max
agcttccttgagaagatttctaaagaagctagagcttaactacacacacctctctaataactaagctcagctctttaagatgggaagctagagctcaactacacatgccctataatagctaagctcaccctcatgccaaaatacatgaaaatacaaaaaagtccctactacaaagactactcaacatgccctgaaatacaaggctaataccctatactactagaatggccaaaatacaaagcccacaagaagaaaaaaaacctattctaatatttacaaagaagattgcacccaaccttggcccatgggctcagaaatctaccctgggggtcatgagaaccccaagggctttcttagcagctctagcccaatcctcttggagtctttatccaataccg

SEQ ID NO: 259543 - DNA, 475 bp, Glycine max
gaccttgaaactcagctgaccagaattattgatgggatggatgttgaattcttgttgttcctggcgcggagatgatggtacagcgggtgaaccataagcggaagtttcttttggtgaggtagccattgaaaagcagagcgtttggaatgatttcttaaatctcagaaagctattgggaaatgctggtaaaaacacgaatgccaagcagatataaatttgaatgaagaatgtacaggggcgtgtgaagcaacggtcgaatttgctttgtggtgaacgcgctattaatgttaagtgattcgtttgggcacgttcagattgcagtagctgctataattcctctagcagacaaatgcccagcttgcccctcaatttttcaaactgatttgcatccaaagcctttgtgaaaatatctgctatttgttcctcagtgtcaacatgcttcagtgtgatcactttatcttcaacaagatctctg

SEQ ID NO: 259544 - DNA, 229 bp, Glycine max
ttttgggaacaacctatgggggcgaaaaaaacccgcgtagttccgggtgccataagcccggtctatgttaaaaaaaggtccgcgggttttaccaatgggttctctaaacacaatctaagtttcggctgaaatgcactaaaacggggatcatattttccaaaagaaccccttattgagaacattaatctttggaacaaattggggcttaatattacggggtcccgatatt

SEQ ID NO: 259545 - DNA, 126 bp, Glycine max
aaactttttgaaatgaaaaacacaacccggcatactgaaatagaaataagtgtgccaaaggaaccttctcttctaccgaagattggccttggaaaacgaacgggccatcacttctattaaatatat

SEQ ID NO: 259546 - DNA, 409 bp, Glycine max
agcttctccgaagggcatggttattttcattttcgtagaggtgaaggagacatcctcaccacttgtatttttgcaattatcatcttgttcttctctctattgctaagaaggcttcctagtatggaaagctaaaacctctattggatcttccctgtaagtacctgatgtaaatatatttctatctatttaatgatgctttgtgtgctctctaagccatatgattttcattccagtatgcctttaccttgatcacgtaaatgcatgctttgttagggtcattcaacaagggaaactggtctgactctaaagtccttgatagtgcacggctgaattgtcgtgctttcatgaggaatcggggtgcgataagatagttgagtatgtgtgtattaatgccggcctacttgagttt

SEQ ID NO: 259547 - DNA, 358 bp, Glycine max
cttggcatgagaaaaaggaaaaggttttgttacttatcgcgtgcggggaaaatggaatttggggtcttaagttatgaataagacaacatcggtttcttaaacaaaaccgatgttaactttacaatggttacaatcggtttatcaaaaaccgatgttaactttctacaattaacatccggttttcattaccgatgttaagaaataatgttaacatcgagttttggaaaatcgatgttacctcaacttgttacattggttttttcaaaccgatggtattaaggcaccttatttccaaatggcctcctgcttaattacttcgttttgcgaacaactgtgttagcttgcgaggttaaacaat

SEQ ID NO: 259548 - DNA, 413 bp, Glycine max
  unsure (1)..(413): unsure at all n locations
agctcggattgattcagtctaactatgcatctaggcttactaatttaggctacaacatagaacacaaaaccatgatttattagagaaacatctttatatacatcagctggtttgttagaaagacccaacatctttacctacagctgtcaatcttacttccttgcattatcactgtttttagccaagacttagtttaattatgttctaaatcatcaattatcaatgtttctttcaacaaagccttgtttctgaatttaaccctgtctaagactagttccctgagttcgatactcagattcatccgttttaattttaaatacttgatgatccagtgcactntccgacaaaccatatttcccttgaacatatttgcataaagaaaaagtggaccaaaaagtaactgtaggggaaat

SEQ ID NO: 259549 - DNA, 453 bp, Glycine max
  unsure (1)..(453): unsure at all n locations
tggttntgggcaatagcaccccacctgatgttcccaatgtcttctgacccccgcgacatatctctaggtaccactctgtggtcaacgaataatagcaggaagtttcacccttctacacttcctcaattcaagcttgtaggattatggggtacccatcacatgtggtactaggtggtggtcgggcgatggtgcaaaacaattctccacatccacaaatcatatataaacccaccatcccctgttgcccaccttcaactgagctcacgtactcccacgtagcccttatcctcgtttctctcaacaccgggtccccatcaatcctcccaagcttccacaacatccaagtaattcaacattcaatcatcacaaactaacacagccaagaaaatatggcaaaggcagaatactctgtccaaaacacataccaatatcacagcttttcacattcaaaaa

SEQ ID NO: 259550 - DNA, 438 bp, Glycine max
  unsure (1)..(438): unsure at all n locations
cttaatcacctgagcatgcacttgcagtggtgtccataacgtttttttaaaacttgcaaactgtccctgtggggctcaactcatatagaatgagacaaggagcttaactaacagagcaagccaaagaggaggtggtgaatcaagaggagctttgaacttgctaggcaagggactgagttctgggttgtcacctaagttcctttctggattatttacgaaagaaaagccagagaagactatgcagcataaagacgaacacattatcttaatgggttccttaccaagcactatatgatcacaacctgtacgtaagtgttatctgtctatatcttacgctgatcagctataccatacattntattacatcttaggatgtttcttcaataatcactaatgtccatgtattcaaatttttggatttgtcattctctttaaaaa

SEQ ID NO: 259551 - DNA, 298 bp, Glycine max
attgtggaatggacatggctgacagattatctattttggggaatgatttcctttggccctagtcctggttcttcggggctcaagaaacaatcttttgttgctcgaatgactgctaaagctaagtatactacaaaaaaacatgatttgttaatttaaaaatattattaatatattaatttccatacttttccagtataaaatgatttaagaacatcatatatttttatgaatattataaataccaattttctaattttttaaaaaaataatctagtcgctaatctcaaatattattaat

SEQ ID NO: 259552 - DNA, 393 bp, Glycine max
  unsure (1)..(393): unsure at all n locations
gctctanaactcgatccaatctcctaactcttttacntccacaacatcactcctccaacacttttctacaacatgatagctgaattgggatacaaagtgtgaatcagaaagtgacatgttagtctcaataattttaattntagtttcaaagtatctttattagaaaatatcattatttaaatttaataagaaaataaaacttgattataataaatctagattttactttcgatttttttatattctgattaaaagagattagaaaagtcttatgattaaaagtgaccaatataactgacggcccaaagttacctaacggcccacagtcatggtctttgtcttgaacacaacaaaagttacctgacatactaaaacaattcagaatacgctgtc

SEQ ID NO: 259553 - DNA, 301 bp, Glycine max
actcgaatgcaacatgtgcctatcatggaaaagttcaggggcattccattgagcattgtatgaccctaaaacataaggtgcaaagtctaattgatgcaggctggctaaaattcgaggaaggcaatttcttgtgaattctgacattcgtcaagtgacactatgcgtggggcaatttgaaggttgttgttagatgtcttcaatgactcattaggatattcaagtctatgccattactgttaacaacagtcacaatgctaatgaaatggataaatatgaagtccttgcctttcattctctcaca

SEQ ID NO: 259554 - DNA, 465 bp, Glycine max
  unsure (1)..(465): unsure at all n locations
tcacataatcagtgccaccgncatccatcgtcgctggctctctatattatataactaattttgccacaatgatataaatatattctttctcttcttcatgcatacttatctgttgcatgtccgacattttcgaccaacctcactagtgaaaccctcgttcacggacttcgccatgccgtctcttccagccactgtcgtgacatactattacggcgttgtctatggtgtggagtagaatcgtcggcacagtaacaaaactatgattgtaaagagtttactccgagcctaccaagaaaacgattctatgtgcgattcaactcataagggatctacaagcttgtaaaattgtgtgattttacgatttaaaactatagttcgataaccacacttaacagattcgggagggaagccacatgataatgatgcaaaagaagaataaagctctagaatgaatcaaaataaaac

SEQ ID NO: 259555 - DNA, 396 bp, Glycine max
ggatcttaagtcacctgcagcatgcaagcttcttgcgaatggtgcgaaaggtatcgttcctaccagtgagtatctcttgcacaacatcaactttggaatcgccagcaacctgatcagccaaattgaggggtttctgaccatacttaacttcatatggagtcattctggtgccttcattccatgacgtattatgtgagagttcaacccagggaagtaactttttccatgcacgaaaatgacgatgaacaaaagcgcgaaggtattgttcaatgattcgattgaaaacttcggtctgaccatcgctttgagggtggtaggctaagctcatactgagcttaataccactagctcgaaagagttctttgcagaattggcttacaaagagcgggtcgtggt

SEQ ID NO: 259556 - DNA, 474 bp, Glycine max
  unsure (1)..(474): unsure at all n locations
actaagctntgtcactccacccatatccggccttcatgttaaccaaacttaacaccactaaaaataatgtcaatgacttcttacaccctggatacaaaggcttcttcaaatcactctccagtgtatcatacaaaggggtatgtgcttgcttaaaagactatcatgaatcatgtcctctaaatgatctctcatttctatattaacttgctcaatttgggaccccctttgcatgtttatcaattcaccatgtcatatccatgttgtataattctttttaatcccatcatagagaaaatgttctcttatgtcgtctactacttgttgtctctcattcaaacaattaatacaaggacacaaatatttcccctcctcattcgatcgacttctttccaaggcgaatttcgagaactattcaacctcattctcatacgcaaggctcatgcgacttgcattcatccaacttcaatccatttt

SEQ ID NO: 259557 - DNA, 407 bp, Glycine max
agcttcaccttttggtcctactcataggtgtttcatgagaaaacatgctctattttcatcttccactccaagtaggcctctggatcattctttcctttaaagggaggaatgttgagtttaataccatcaatttggttttgtctaagaaaaccatcaatccctcttctcctcctttcttcttcattatgatctctattctcaatttgatccaacctctcatagagcgcatcatctcgtttgttcattaacctctccaaatgttgtgtaaaagcttgcatttggacttgcgaaatccccactccatcattaggattattacctgtcatctcaacaaacaaatcaaacgtaacaagacaattatagttggtggtttgatacctcacccactcaagtgtatcacacaatta

SEQ ID NO: 259558 - DNA, 378 bp, Glycine max
  unsure (1)..(378): unsure at all n locations
tcagtcttaccaactatttcaactggcgtattctaacacccacccaacagaaccattattctgaaattattctaacttccatatacttaggtaacaaaccaaatttgattatcagcataaagaataggagaacaaaatttgtatgacgggcaagctcatatatgttgaataagcttcaaaataaaaaaaaagaactatntgtattacagaagatcaaagtatcataaaaagatctggaatactattatagaagganacctgcatacatcatgctcataaaacaatttgctagaagatcaaagtatcataaaaaggcctgcaacaataaaaaagaaaccccatttctcaatcttcagcaaattccaagtgaacatacgt

SEQ ID NO: 259559 - DNA, 432 bp, Glycine max
cttgtgtcattcacaagacactttgtggacctaaatgaatattgattatgcattgtattacgccattgtatttgttatgcgatataattcgttgtaagccattattaaccaattaatattattaagtactctttttgttaagcaaaaaaattgctggtgcaacaaaaattatttacgcgtgtagcatacatcattgtcataattgacaacacattatgacatgcatgcgtattaaagtttgagcgcgacaacacattgactgacttgactacccattttgaaggaaccatatacacgagacatgttcacgcgtgttatttttttgtaacaaagtgagcaatgctcgattcaccatcttttttatacagacccggtaattaagacaattatttgttttaatatcctccattgaacacaagttgtcttttaaga

SEQ ID NO: 259560 - DNA, 413 bp, Glycine max
agcttctaatcattattaccagagatcttactattgtatgcatgaacgtctaaatacaccacttgtgtattgactactctaaatataaaaggatctcacttaattttaaaatgttaagactcaaacaattaaattataagacaccaaaactccacatgagcaagctagtgtttaattggaataccgttttcttaattcaccatccactaaaataagggatgcattgtcactcctcacgccacatagaaatatgacgtcataattaatttgactctgggagttgaaggaggaagtagccatttggaaccttcaatcatgcacagtctaattaatatgaaaatcttttcgaaaattgttattattctttttattcttttttaatctaattctagaactgagtcataacagactca

SEQ ID NO: 259561 - DNA, 465 bp, Glycine max
tagtgagacaacacactttgcaccttcaaatattctcctttgtacctggaattgaagtgaaatttacattaaattcatatggaaagcttctattgagaaaatataaaaactaaacaagaaatatttacaatcctaccaaaaagaaccataaattgggagaaatatatacatttttgaaaacttttctatacaaaagttagtcataaaagacgactaacagtaaggcaatgaaatgggaggaggcttgctatatacaatttcatagggagtagcataggcagaagtatggaaggtggagttgtaccaccatttagctaaagagagctaatgaacccaatgatgaggtctatctaaacacatacaccgaagataagtctccaaacgcctcttaacatcctaagtctgcccatctgtttgtgggtgataagaggtggaaagctgcaactgaaccccatgaagactcat

SEQ ID NO: 259562 - DNA, 368 bp, Glycine max
cttaatcgactgcagctgccacttcccccacccccccgccccttattattatgtgaaagaaacgtcagatttatatacttagtgtaattcatatatcctaggtaattctcaaactattactatatatatatatatatatatatatatatatatatatatctatatatctatatgtatcttactttgagaaaacaactagatttatatgttttctaagaaatttagtatttactagatcttgatagtggccctttcataccccctcggagagcactttccattctaatgatgatgatatattatgggccacccccttcttaattaatacaatatcctttgttctcacattaatgagggtttgatgtatc

SEQ ID NO: 259563 - DNA, 465 bp, Glycine max
  unsure (1)..(465): unsure at all n locations
aactaagcttacggatataaattccgtctgacaaacaatatattatgttttattgttagtaaataacaaatttagactattaaacaaaatcaacgaagaaaactcaaatacctgaatatcctnccatatcaaatccttctgagcagtaaggacttactttcaggtgtcatatgtcacgtcgaccttatcacgagcgacaatccctaaatatgtttttaatttcttcttgtggggaccgtcggccttgccggtagcaggatcaacgttgaccacaagtctttctgccacaggtggtctagtggccaatgatcatagccgtgtcgccttgcgtgtccgcttcaacgtagatggagacgctgatgcgtctgcaggaggaggaggatgaggaatatgacgaggaggcgatacacgtggagtacccatggtcctttaaagagaaaaatctgagttagttaatattatcaa

SEQ ID NO: 259564 - DNA, 182 bp, Glycine max
atttttgtttacaaactctatagttatctatattaaacattattttgattcgagaaacttacaacaactatcaacagcataataaatcatatgccaaatcacgcaaagcttgaacggacatcttatattaatcttcctataataataaaaacgagttcatttggatgtttattaaataaact

SEQ ID NO: 259565 - DNA, 447 bp, Glycine max
  unsure (1)..(447): unsure at all n locations
tggagaggatgcttcaatggaggagaagaaagagggagataatgagagaggcgggagcacgaaattgaaggaagaaaatgggagagtagctgaactttgagttgtgtctcacaagactctcattcatcaaagttacaataagtgttacacatgcttctatttatagactaggtagcttccttgagaagctttcttgagaaaacttccttgagaagcttctttgagaaaacttccttgagaagctagagcttagctacacatacccctctcataactaagctcacctccttgagaagcttccttaaggagattcctaaaagagctaaagcttagctacacacacctctctaatagctaagttcacctccttgagatgagaagctagagcttagctacacacccnctataatagctaagctcacccatatgccagaaaacatgaaaata

SEQ ID NO: 259566 - DNA, 419 bp, Glycine max
  unsure (1)..(419): unsure at all n locations
tgcaagcttctaaactctggacaagactgtagctctgataccacttggtgaacaagtggcctcagatatcttaagaaggaggggggttgaattaagatatcacaaactatttcccaattaaaaaatctactttgattttaacccaagtcccaagattccttttaaaattaattcctaaataataattcaaattaaacttactgaatataaacaataagcaacaataaacaaaagagtttaagggaagagaaagtgcaaacacnagttttatactggttcggcaaagtccggtgcctacgtccaatccccaacaaatccgcttgggagttccactatctcacaaatcctttacaccttctgaaaccacaaggacaacttttctttgtgctagatgcttaacacaagagactcgcaatctc

SEQ ID NO: 259567 - DNA, 409 bp, Glycine max
tctttgagaagctagatccttatctatccacacccctctattaactaaattaacttccttaaaaataattacggatgaaaataacgcaacaaataatcaaacatcaaacataattactaacaatatatagatatatatatcagggtgttacaaggagtgcattccttgcaagctaccttggaaagagcccattatttatcaacaatttttagattagccttggttgctttggtttttagtcttcttggaacttcagaaaggataactagtttcttagctacaagtgttgctctagccttcttaagagcaagagatgcttgcttctgagtattgaccttccttttctgtagaacaagttgaacattatcaacatcgttatcctcagtttcacttcagtttttcaacttct

SEQ ID NO: 259568 - DNA, 415 bp, Glycine max
agctttgtgtaatcgaatacacatatttggtaatctattaccagagttcgttctgaaaatctaaagatgttactcttcacaaagttttgactttatcaaatgggttttaagttcttctaaaagttataactcttctgaatggtcttcttgaccagacatgaagagtctataaaagcaaggctttgttttgcattttagaatcaatcattcccaatcttgaacactctttcaattcattcaaacaatcctttacaagccttgaatctctgtgaacttcttcttcttctttgtagcaaaagctttctgaagttatctgcgtttcctaaccttgaaaacttgtgttattcatccttttccttctgttctccctttgccaaaaagaactcgccaacgactaacccgctgaattcttttt

SEQ ID NO: 259569 - DNA, 460 bp, Glycine max
  unsure (1)..(460): unsure at all n locations
tgtagtacttcccaatttatggttattgtggagtaaaatttgtttattaatcttgngttatggctaatgctgtctttaaaatatttccattggatataatgatgatatctgtgcattttcaggtgaaaaagaagctaagttttgaattgcaaaaagtaacagttgggctaagcgcatattcaccgctaaggagaatctggcaaagcatcatcatcagtgcgctaagcgtagcaagtgccttcggccaagctaagtgcaagattggcgctaagctcaatttcacttactcacgctaagcgcgagggtggcgctaagcgcaacgtcatgatttcagagcctatttaaagcctgtcttgtgcagaaatatggtacactttacagaatacccagggcacaataattcacaccagccacagtgcctatttatggaaaagagccctataagcagcaaagaggagca

SEQ ID NO: 259570 - DNA, 455 bp, Glycine max
  unsure (1)..(455): unsure at all n locations
tctanactttatacaagaatgaagctctgataccacttgttatacttttggtcttacatatcttaagaagggggggttgtattaagatattccaaactgtttcccctaattaaaaatctatttcacttttttttttactcaagttatgaattcccttaatgacaatctttttaaatattaattcaaatgaaacacattgaatatgaatatacagcaataataaataaaggagaataagggaagagaaaatgcaaactcagtattatactggttcggccacacccttgtgcctacgtccagtccccaagcaacccgcttgagagttccactatcttgtaaattccttttacaagttctaaacacacaacgacaatccttcctttgtgtttagagatcctttacaacaagagactcacacgctcttaatcccttatagaatgagaagaagacgaaca

SEQ ID NO: 259571 - DNA, 463 bp, Glycine max
gcaatattgaaatactaataatgcattatatgagtgttgttttattttaaataatacaacgtaaatttgatcatgttatttatcacatatgaatagttgctattcaaattgtttacagatcatataccatttagaaaactaacaccacctattacaagatcactgcccaataagaaaatgtccccgcgagtgtgccaataaattcaaatagttatattgatcgctctgtgtgtatgtttgtacatgattttgaaatgacaatcaaatagatcttttcacaagttttttgagaaaaaaatatcatatgtgtggatatcatgtacataaatattagattgtatgtgcatgagacatgtgtttactctttttagtaacactactaagaaacttattgtttacaacgcacattctatagaggttactcataaccgttttataatgtgacgcagtggtaatcttataa

SEQ ID NO: 259572 - DNA, 402 bp, Glycine max
  unsure (1)..(402): unsure at all n locations
agctngtgagatccacttgtgataactatatgtattcttcantaatattaaaaaatgatttatatatatcaatcttaatacgatactaacgatataaacgatgaaatccaatcatatgttttcttgaattaatttaagtcattattattgcttccataatttatgtatttccgacgcatcgaatcctgttattatcgtattcttgctatttccgttattttcactattcttttactttaagttgtctttagttaggtaaatcaaaaccaatgaaatttcgataaatttgtacataactattgaactaataatctttattcgaatgaattaagataactcaagttcttgtggagacaactctgtataaatatcacacctacaatgacaaatgatacgcttgct

SEQ ID NO: 259573 - DNA, 463 bp, Glycine max
  unsure (1)..(463): unsure at all n locations
gatttggtcttngtctgcaaaaggatcaaagtgggttataattatgtaatctaatcatcctgctttgataaatgcgaaaaccggagcacatgaagacgatgagaatgagggagaaacccttgctatgactgccattcctacactgccaaatttcccatcagcccaacaatgtcattactcagccaatatcagccattctcattacccatcacctagtcatccacaaaggccatccctaaatcaaccacaaagcctgcccgccgcacatacggtgccaaaacaccaaccaaaaaggaattatgtagcaaaaagcctgtaggattcaccccaaattctagtgtaatatgctaactcgctcccatatctacttgataatgcaatggtagccataacccctgccagggttacttaacctccatttatccgaggatacgactcgaacgcataatgtgtatatcatgcg

SEQ ID NO: 259574 - DNA, 252 bp, Glycine max
tatactccgtgaagctactttgggactcactatccctggggagaactaacaacctagattctttaggggaagaacctcctatctaaggtttatcctattactaaattttaaaagtccaatctacgcagaataacccaaaacaactcaaatgggtggttaataccgaaaaagttggatgcaaacataatcttggttgtaaggcatggccccttataacattttcactgtgatccttgcgagtctcttacaaaa

SEQ ID NO: 259575 - DNA, 365 bp, Glycine max
ctcaagaaagcttctcaaggaagctacctattctattaatagaagcatgtgtcacacttgttgtaactttgatagccaccgtgtatggagcgccgagcaccaacagcgcttcgaggccatcaaaagatggttgttccacagagagaggctcgtccagctcagggaggatgagtttacaaatcttcatgacgagatagctcgcagacattggacgtcgctggtgactcccatgggctaggttgaccctgaggtagtcctggagttctatgctaatgcttggcccatagaggagggagtgcgagacatgcattcattggtgaggggtcagaggattcttttgacgcagatgccctcatccagttctt

SEQ ID NO: 259576 - DNA, 456 bp, Glycine max
ctcagcttctccccaatttctataatagggggagaagtgaagtataaaatgggttcagccccttaggcacttctctctctttcgaatttgcttagaaaaaatgtttccgtgaagaaaatccacgtcgaggcgcttccgtaacgtttccgtaacgttttcgtgagtgatttcgtgaaggtttttgaccgttcttcgacgttcttcattcgttcttcatcgttcttcagtcttcaacgggtaagtacctcagaccaagctttttaattcattctatgtacccgtggtggtccacatttggtttcatgtatttttattctcgttttcatttacttattatacccccttttgacgtgcttaagccatttatttaagtcatttttcgcttaacctaaaaataaaataaatttccaccgatcgtttgaattgtatcattcgttaacttttgttgaaatgaat

SEQ ID NO: 259577 - DNA, 249 bp, Glycine max
ctgagcatgcactgctgtcaaataacttttcttctgccaacattcaacgacaccccaatcaagggatctggattctccattattgaccaaatctttttttcaagtcaagctctccaaatccgactcacagtataacaaattttatgccttggctgatgttcttttgctaagattgatgctttcatggcaaaacaacttattaataaaccgctcatgcgctatgaacttgggacctataatcgaccccca

SEQ ID NO: 259578 - DNA, 466 bp, Glycine max
  unsure (1)..(466): unsure at all n locations
ntcatggaagcaagatgtgatcttaaactcatactgcatttttgaaaatatcattaacaagtaatgaatcttctaaatttgaaaccccaaaactcgaaatttctcataacgaataaaatatcttggttatataggttacttacccatgtccacaagaaaaaggctatttggaatgcattctgaaaaacaacgaataaacagctttgagtcaaattggattaccaattaagcatgtcaaaatcacaagaaaaattattatacggttcagaataatcataatttcaatcaatctttatgtgacattatattntattatctttttccataaattaaaatttaattatatattatataaaaattgattgggatgacagtcacatgataatctcaaattatatagataaatttctagtcacacacatcccaaatttatatgtatacatagacacaccaactatcacctccg

SEQ ID NO: 259579 - DNA, 381 bp, Glycine max
actgcaagcatgcaaactcgggcattcaatatacagatgatgtatgtttatatggactcaagactggactaatacatttgctggccaaggatcatgatcatgcatgtgaacatactcataagcgtcttaaggaggtacatattgtctgttccaccatgaaatccctttgatgccaagaagatcatatctttctaaaggcttttcctcattctctaaaaggagtggcgaacgattggctgtactaccttgctcccaagtccattaccagctgggatgaccttaagaaggtggtcatggataaattctgtccttgatccacgaccactgccatcaaaaaagacatttcacgcatcatgaaacctaatggagagatcttgtatg

SEQ ID NO: 259580 - DNA, 463 bp, Glycine max
  unsure (1)..(463): unsure at all n locations
ntaacctcatcgnctctcacagtctctagatatgggagtcatttcaatccttgtgttcggactctcagccacttatgatagctgccgatgatcccattactacttcccctaagctctctgtcctttcttcacgctgcatcccatgccttgcgaactccttggagtaccctcgcgttgtggtcactgaaaccccgtgcgatgaaaggcgtgatgctttcgtatgatggcactcctctcatggggtagccaagctgtcttatggcgaggacgagattataattaatacaaccccttgttcctatcaagggaacatttggacatccttcgcatgaagatagaatcctgattcttccttccttctagcgagggaaccagttaaaagacgcgcatccatgctagccaagagttggtcccaaatcgcctttcccttttcgacgcacgagcggtgaccttgtagcggata

SEQ ID NO: 259581 - DNA, 440 bp, Glycine max
  unsure (1)..(440): unsure at all n locations
atctcttagtcacctgcggcatgcaagcttgtagagttatgtctcgtatctgtttaatcgattagagccttctcgtagtcgattacacagttttttctgagagaatgactgatttattcaagagtctttcctttaatcgattaccatatgatataattgattacttctctttctataattagttcagaagtgaacaagaatactttaatcgattactttgagtatctaattgattacattgttcttgagttgtttccaggtgtttagaaggacactttaatccattaaaaagataatctaatcgattactttgttgaattaatcgattatcttgtagatttaatcaattacaggcagttataaatggtttctctataaatagccagcttatgttctcttcataacaatctcaanaataacacaacaagcctctgaatgag

SEQ ID NO: 259582 - DNA, 433 bp, Glycine max
tgttgaaattgccatgtgtggatgagttatacatacccattctgttttacggttcttatgaggatgctcgtgatgttcatgtactgaaattgcttatggaaaaatgttagagatgaaaggtagagttaacctagggttagaaagtgagaatgtggtgttatgagtggaaaaagagtgaggctttgagagttgaaaggctaaatctggattctatagtaaatggaggttaaaatgagttaatcctagcttgaaatgccatttaggacttatgagaaaggttatgctgtgctagagagaaaaacatatgaccaaagtgaaccaagagccatttctagggcaaaattgtgtgttgaggagtcaaattttgattcggtggaatattaggtgtaaatccagtttgagcaagtttagatcgatgttatggacttgtgtg

SEQ ID NO: 259583 - DNA, 289 bp, Glycine max
agaaacaacatccttatgattcaagcttggttcaaccttccggtgaaactgagaaagacgagaactgataagaccggtgagaacgcggaaaatctttgtggatttgctcacgaaactttcgatgctacggaagccctcgcttgatttcttcatggaacacatttttacccaaacaccgaatgcatacatagggtagggtcaattaccagacccttccatttataccaaatgggtggccttgcctttaagttcttaggaaattttgaccccccaatactatttaccccct

SEQ ID NO: 259584 - DNA, 400 bp, Glycine max
  unsure (1)..(400): unsure at all n locations
tatacatttatgcttctcaacaatagaagtttatgctagtgtattaaccatatactaaccaaaattgaaaacttgttgttgcaggtttaagcctatgacatgaatnttctaatggagtcttttggttgaacaggttgagttgaatctattattaagggatttgggctacgtatacaggattttatatcaaatattttaattgaaatgcgagggaaaaaggccaattttcagcatttgtagttcatagaagaattttgtgtttaaactttaaagatgggtcattgatatccaaatcatgtattgagttctcatggcttattcaagtgtaaaataatatatggcttcttctttaatgatggtctagagaatctggtcaagttaattgtcatttctgatcact

SEQ ID NO: 259585 - DNA, 307 bp, Glycine max
agcgggttctaatgactcctctgccgcctacacattaagcataaaagatgggcacctcaccaagatgtctttctcgcctaatacgatgaccagatgccccttcactaccaatttcaacttttgggggagtgtagagggaacaactcccactgagtggatccaccgtcgccccaacaaacagctggaggggggttaataaccattattcggaaggtaacttgacaggtgtgaaggcctatctgtaccaggagatcgatctccaccctaacctctcgggcggtgccgtcaaggcaccaaccaccattga

SEQ ID NO: 259586 - DNA, 416 bp, Glycine max
  unsure (1)..(416): unsure at all n locations
tgctctacaacatatttatgatattaagagagatttatatttttaattatanaagacgaactttaaatattattaatattaataactaaatattagtaataatggactgtaatatcaaaaggcgaatgaattaattttggtcactaaaaatgtacgttctgaaagccttcttgagatggaaatctatttcggtggctactttgaaatatattttgggtaaaatagcaactaaaattgatttgatcgctaagaaaaagaaatgtgttgttaactatagagcgagaaaatattaatgttatttctgacatcattgacactattaaggactaaaatgcagtcgatcactgagttattgaaaataaggctataaataatccgtagaattccataaacaaatataaaatttaaatatgtaa

SEQ ID NO: 259587 - DNA, 253 bp, Glycine max
agaagggacaagaagaaaacccagctcgactgcaatcctaatggacaaaatcccaccgccaacaagggcggacccagcaaaatcaaccctgtactacccaccacaagtacccacaaggccatcctaagtcaccacaaagccaccaccacccaccaagctaaacacactttgcgcgaaccccacacaaccaaaaatgagattgcaacgaaagcctgcaaatcaccccatactggggccaagctgattgccccat

SEQ ID NO: 259588 - DNA, 420 bp, Glycine max
  unsure (1)..(420): unsure at all n locations
agcttccatttttgaaaagtatgttgctgataaatctattgagttntgttcacaatacatagaaacaggtcaacctgtcagggtaccaaaaactcatcatgaccagacacgaggaggtaaagggacacgaggatacaatgttgtaaccatgacttgacaagatgtctcataagcgcatttgtatatcttgaataacacacaagaggtcgttccctacatacgaactcacaaagaatatctcacatctattcacccaaaaatgaacatgatgaaattgttgcaagagcataataaaactttcataaactgggttaaagaaacaatcattagtgatgacaatgcttccaaaacattaagaattgttggtatcggtccaaatctaaatgtccccacttggaaggtgtatgatatatacaatta

SEQ ID NO: 259589 - DNA, 428 bp, Glycine max
  unsure (1)..(428): unsure at all n locations
tgtatctgacattnggtggatatactgggatgttgttttttaatacatctatgactatttattgctaattatgaattatgaatgccattaattatgaacaatatttatcattttttagaatttatatgtatatagtatacattgtatagactataaaaaatttaaaaatagaagctatcctgctatatgctatctcactatagtgtgtttggagccagccgctatgtgttgctctctgggatttaaaacaatttatgaaacgtgtgagatatataaattatatatgtgtgaaaaaataacttatattctataaaagtgaaacacataaaaattagcataatattgactcanaagttcaattggccgaatatgacaagagggtgcatgacacatgctgcaaccacaacgctcataacaactgctatagc

SEQ ID NO: 259590 - DNA, 426 bp, Glycine max
ggatcctctaaacgactgcagcatcaagcttcacagatgaagtaaggtttttttttgtttcgatgatgaccaacagcccatagaaccatgcaagattgaatcatccaacttctacatcaagactgatttcacgattctagaacagacatcaagaaaaaacaagattcaacagacgatgaattcacaagggaggtattgtaaaggatgttttaaaaaccaaacatagcacagttttgttctaccagagaagttgtctcaattctttctaagttaccagagtatctactctctggtaatcgactaccattttgctataatcgataccagtgataaaatttgactcgaaaagtttaactaaatttcaacggtcaaatgattctacatagtgaatcaatacaatatatcggaatcgatatcactgatctg

SEQ ID NO: 259591 - DNA, 433 bp, Glycine max
tgtgacacgtgccaatgacaaaaatatgatacattatcttttattggtctcttgcagcaattaccaataccggagaggttatgggaagacattatcattgacttcatcactggtttaccaagatctagaggatttcaagcattcttgcgggtagtagatcgattgacgaagtatttccattttgtgcccctcaaacatccttatacttgaaaggctcttgctgaaattttcatgagggaggtagttcgactacatggagtttcaaattctattgtgagagatagagaccctttatttatgactttgttttggaaatagttctttaaaatgcacggaaccaaactgaaaatgagcacagtctaccattcgctcacagatgaatagactgacgtaacaaataaatgccttgaaacgtatctctgatgcttcatca

SEQ ID NO: 259592 - DNA, 416 bp, Glycine max
  unsure (1)..(416): unsure at all n locations
tncagaatggtataccatgctacagctgctccggatattctgtttttaaagaaatggaccaaccaattctcgtccgcagaatacacccccatctttcgacaatacatccgaagatgcccctttggacatgtcatccctttgtacttatcaaaaaccgatactttgaacttgggagggacgacgatgttgggcacgagacataaatccgctaaatcctagaatgggtaattgccaaggccctcgactgctcttaacctctcttcaagcacctcaatctttcccttatcttccgcaaagggaacagattcttttacgggtgtgggtgaggctggggtatggcggactatgttcggttggggtagttcatgtggggacagatctatgaggtggaacacggggccaagatgggtatttac

SEQ ID NO: 259593 - DNA, 414 bp, Glycine max
  unsure (1)..(414): unsure at all n locations
agcctgntataaaagctacaacttttccttcatcttagaaacaaanatcaacttccatctcaaagaaatttagctccaaagtcagagacctgatcatcgaaaatagtcaaagtcttacattgggagaaataatctcatgaatctctttcttcccttatatatagaaaaaaccaccacgccttaagagaatcaaaagaatagagagggcttaacgtccagcatggagtccctcatagttaatatttttatctttccctttgagattttaaactggggggatataagtagcttgagttcgtgttttaaattgcacttatattttagccttagtactgtggagatcgtgacagacaacgccacaaagttcatataggctagttagagctcgcttcatgcttgtctggtgagtgatct

SEQ ID NO: 259594 - DNA, 334 bp, Glycine max
cgatgaacaggctaagcgcagcaggcgcgcttaacgcgttcatcgtaattcccagaaatacacacaggggttgtcacccctttcagccacattgcccctaattggcttctaaactacctaaagtcctaagatacctaaccctaaagctaagttacttaacctagcaacaatactaatcacgaaaaccataaatcaactatcctaaggtttgaagcatgaaatataatgaaaaaggtaataaatgaacttacttggatgtgtgcaaagtatgaggaagctaggaatgcaatgcaatagcacttgagcacaatgacaatgaagcaaaggaaggcag

SEQ ID NO: 259595 - DNA, 367 bp, Glycine max
tataaatactcagcttactatgaaaatgagacggaagaggatgtattctactttatatatatagaggtagacagtcatattaataacttatgcaaacaatattgtacagtgctatatcatgattccacaacactattaaagtgtcgcaacttcgacaatattatggttcaatattatgaacatgtgaatgttgcaccatatgaataacattgggaatgttatgagatggttgatgagacgttatgagatgacaaagtgggacctgatattccattgtgataagcggatgcgtacatttgagggacattaattatatcgcgagctatgaattaaccaaaacccgaccagagtttatgcgctgtgtcaa

SEQ ID NO: 259596 - DNA, 246 bp, Glycine max
cctggatggaggaatcaccctaatctcagatggtcaactctcagcacaacaatagcagctgcccttcgtccaaatgtgctggccaacagacatacttctcaccatcaacacacacagccagaacaacacagtgggccctcacacttctcaagactggaggaatacttcaaaatgagtcacaaaaccaacttcttaagctgctcaccggatctgtgatgaaagaatacactttgactgatattcctt

SEQ ID NO: 259597 - DNA, 456 bp, Glycine max
  unsure (1)..(456): unsure at all n locations
tgagctcactggtgctgccccacaaagctccacggaatttgtctcggccatgctcttccttgcgagccctcttggtttcttgttcaagggctcttgtggtagttgcattatcttcttgtaactcagcacactctttctggacgtctgtagcgactaacttgaatctttctttggcaagtcttgcttttcctagttcggtttttagagctcggacttcttcatcctcttccggagcttcaaagttctcctcgttgataattntcaacttggagagccaatctaaccctcgtgtatgaactttcagctattcatgataaccaccgatgatgccattacgaatgcccctaagttcttcatctttccttaacgggctttcccacgccttgtggnactctctgtaaatcttaaaactttgcgcgccgaaatctctcacaagcaaaggagaaaggctctctt

SEQ ID NO: 259598 - DNA, 398 bp, Glycine max
  unsure (1)..(398): unsure at all n locations
aaatactcaacttgccgcaaaatcctaaaaagattcaaggttcgataccttattttttctcaccaagtagaaatggatcattataaggtccaacgccttaaaaggaccaccttccaagtaagaaaaatcgcttgattccctctttagaaagaactacgtangtttgatttcctcttcgatgagggtacctaggagcaagagccccgcttttgtcgacctcaaaaattaaaaagacataaaagtgtaggtacacaatttcacataattctacaattaaggctgttgtcctttgggacaaacgtgagaggtgctaataccttcctcacatgtaaatacaactccccaatctggaatattcttcatgactgcgttccttcgatttttctgacgttttccac

SEQ ID NO: 259599 - DNA, 417 bp, Glycine max
ttcctttttaaaagcttcccatgtatgtttttgttgagcatccttctcatccacatccttcagctcatattttctataaacttcatgagatgttagcaattgtttgtcccgagttgtgatgatgattttgctgccgggaccaaaccaaccaggtcttccagcaattgcttgtaattgctcgcgtttgtcaacatcatctagaatcacaagaatcttctttcccgtgagcctagactctatgattggaattccttgttccttacttgttaagctgatgttcttctctccgagtatttctaaaagaagctcttcttggaggcgttctaacccgtgtttgtctgagttttccctcacatttgcaagaacacacaaaccatcaaacttctcagcaattatcacttcattatagacagctcg

SEQ ID NO: 259600 - DNA, 81 bp, Glycine max
  unsure (1)..(81): unsure at all n locations
accaacttaggaagccaganaggcggagggagataattttttctagagaagggggaccaaaatcaggtgatcttcaccaca

SEQ ID NO: 259601 - DNA, 402 bp, Glycine max
  unsure (1)..(402): unsure at all n locations
agctctcaaattcgaagagtgtgaattatatctgtattgtcgcaatttgaaagaatgatatttgaagttaatcatntacttaacacgcagctgttatttgtggattgctttaattattcttttatcggctaaataagtagctatctttggtctcaaaagtacacacttaacacaatttcagtcgaatatttttcacgatatatattattcatacaatactctttaaaacacttattttccttttttattatctgtattgcatcgctatcttctcatctctcttttcttttatacagaaactttacacaaacaaactacggattctcattttcaacatattcgtgttaccgtggtgcgatgcaactgccgcttactaccttatccttttatataaatcatact

SEQ ID NO: 259602 - DNA, 406 bp, Glycine max
  unsure (1)..(406): unsure at all n locations
tacaatactnaagcttatatgatgcgcctccttcacctcttgatagtgactagtctcatttgttataggcatatgtncggaagagtggtcagtctttcttaccaaaagtgtccaacatgacagcccacgtttaagttgcttcttattttcctattcttaaatcgaactactcgctgtggttgtaggatccaaactcattaaagtcatatatcacagagaaaacaagactccttttgttcatggagaggaaggagactattgaccttccttcttattttgatctagaagcctctggcgactctgaagaagctgactttgatcacacctttgctcgtgaaaaggccaaagcatatggcgcgggcgaagatgttgatgataatgataaatgctctatcttgcactggat

SEQ ID NO: 259603 - DNA, 469 bp, Glycine max
tagggcatacatatatgcagatacgtcgagtgtgttgattatacttatccataagcaggagtattgcttatcatagagaactttgtcaataattcatcgagtctagaagtcattgaaaatgtgctcggaacaaacattaaacgagtaatttgatctcaaaaacaaattgcggttggatagttataaaataagatatgactttgaaatcctcttatgatgcgggtatttagaaaaacactcaactttgggtggatttgatattttaggccacacaaatttactaagcacggaaaactgtttacctgaatatggaccaataaccatattcacaaaattacatttaaattacaggacaagcgtcttggataagatagtgtctacgagacataccaaggcaacagatatgacacacctgactacataacaatggaagtgcataaatctctgcaaaggtaacgctcccaacaac

SEQ ID NO: 259604 - DNA, 200 bp, Glycine max
cacaacaccggccgggggggcaagcaagacaacgcctacgaaacatacacccccattccccaaagggctactaaaacaccacaacaaagaaaagcaacataaagcaaaacagtgaaaaactacaaattcaatacaaacaaaatacacaaaagaaaaaaaccaacaaacacgcacaaaaaaaaagcaacaaaagcacacca

SEQ ID NO: 259605 - DNA, 378 bp, Glycine max
  unsure (1)..(378): unsure at all n locations
ttcatctggctgcaattataattgtctttccttagtgaatggaaacaatgtgaccatccgcaatggctttcaaattcaaaatattggattctttgtctttcatgaaataataatattactcgatacattctgatgttaacaacaactttatgtgagaaatggaaaaaattaaaaatatggcagataaagattaaatgaatgattaagtatcgtgttaagtaacttaccaagctacttgaagtaattntgtattgattgaaaagcacggtgaaagtcaccaaactcaacacttgatcgtataatgaagtgcacttttggaatgaatttggatggttgtgggtttgaatatgggcacaagttacactctaccataaggat

SEQ ID NO: 259606 - DNA, 449 bp, Glycine max
  unsure (1)..(449): unsure at all n locations
cttgcatcctagannaactatgatttgtttgcagcccattctattacaagccaagaaaagtccttcggtttcaatttgtgtgtttgtgactgtatggcataagatgaaattcaaaagttgggacttatgttggttgttgattgataaataggctaaacacttgtgctttaatgaaacagtgaccgtgaggctttggcttgatgatccttacgtgatatctgtcttgcttgctagcttatttcacttgtgttgcttaataatcatgttcctatctttgaaaatctgcatatcttatgaaaagctgttggttgaagcattgtatgccactagtgtcatgtgattgaaggcttggaaacaaacacaattttgaataaccactgtgagcttgtcacttgaggacaagtgaactgttctttctttgcttgaggacaagcaaaattgtaaatttg

SEQ ID NO: 259607 - DNA, 364 bp, Glycine max
  unsure (1)..(364): unsure at all n locations
cacaaaaaaccagccnngaccaacaaaaaaagagacaaagatttatatcgcccccaccacaggccgggtcaagagaagaacaccccccaagccaagcgggaaagccaaagagcgccaaacgcaatacgaacagacgcaaacgatgataagaccccacaaaccgaacaacatgaaaagggcaccaaacaagaacaacacccaggggaaaacggagacaacccgaaccacacaacggatggagaaccaccaacgcgcaaccagacccacacagaaccagacgacgggacgagatacaacgcccaacagaccaaaaaaagggcgcaagcagacagaccagccaaggaacacaacatcccgaaagcaa

SEQ ID NO: 259608 - DNA, 463 bp, Glycine max
  unsure (1)..(463): unsure at all n locations
ctcaagctntagcgcgttcttctagcttctctgcgaaaccaatagcatgttatatatacttaagcatgaagaaccgcaacagatcgaaatgattgaaaacgcataatacggtgagggtaaaggaagcacatcaacatcggagcaacaaagaaaacaaccccgtactcattaaaatcgccgctataatgtgttcttccaccttttctgccaaacaaagaatataggaagcaaaatggaaaaaaagaaaaagaaaaaacatataagacgggtgggcaaatgaaaacttacgaaaggtccgtttatcaaaatcgcagttttagtgtgttcgtccaccttctctgttaaacaaagaacacaagacgcgatatgataaaaacaacaaaaagaaaaaatgcagaagacgagtggacaaatgaagagatgtcgtgttaaaaattgcatctttagatgtaacaaaaatgca

SEQ ID NO: 259609 - DNA, 400 bp, Glycine max
  unsure (1)..(400): unsure at all n locations
agctntaacctcatcgtctctcacagtctttagatttgggagccaatccagtccttgtgttcggactctcagccacttatgatagccgccgatgatcccattactgcttcccctaagctctctgtcctttcttcacgccgcatcccatgccttgcgaactccttggagtaccctcgcgttgtggtcactgaaacctcatgcgatgaaaggcgtgatgctttcgtctgatggcactcctctcatgggacatccttcgcatgaagatagaatcctgattcttccttccttctagcgagggaaccatttaacagacgcccctccatgctagccaaagagttggtgcacaaaaaacaattcttgcgccgctcttttcacatccccggtcgaacgtgtcatacat

SEQ ID NO: 259610 - DNA, 267 bp, Glycine max
  unsure (1)..(267): unsure at all n locations
tgcctctaataggtccaggaaggacaaggcagctctaagaactagttccgctccggagtatgatagtcaccgctttaggagtgctgtacaccagcagcgcttccaggccatcaagggatggtcgtttctcctggagcgacgcgttcagctcaaggacgacgagtatactgatttccangaagaaatatggcgccggcggtgggcatcactggttacttccatggccaaggtttgatccagaaatagtccttgaattttatgccaatg

SEQ ID NO: 259611 - DNA, 400 bp, Glycine max
gcttctatagaagggttgttcctaatttctctacaattgcatcacgtctcaatgagctggtgaaggagaatgtggcatttacctggggtgaaaaacaagagcaagcctttgctttgctcaaagaaaagcttactaaggcacctgttctagctcttcctgacttttctaaaacttttgagctaaaatgtgatgcctctggagtgggagttggagctgtattgttacaaggtgggcaccctattgcttattttagtgaaaaacttcatagtgccaccctcaactaccccacctatgataaagagctttatgccttaataagagccctccaaacttgggaacattaccttgtttctaaggaatttgtcattcatagtgatcatcaatcacttaagtacattag

SEQ ID NO: 259612 - DNA, 455 bp, Glycine max
  unsure (1)..(455): unsure at all n locations
tnctttggaccttgaacaggcaactaactcctctntcaaaaccatgctatgtgctcgcgactggtccctttcctcccttcgcaacttgagttcattattgctaccccatagggctccgtgaaatttgttccggccatactcttccttgcgagccctcttggtctctcgttcaagggctcttgcggtaattgtattctcttcccgtaacccggcacactccttccgaacgtgtgtagcagccaacttgaacttctccttggcgagttttgcctttcctaactcgcttttgagagcttggacttcctcgtcctcttccggtgcttcaaaattctcttcgctgacgacttttaacttggcgagccaatctaaacctcgtatgcgaactttcagccattcgtggtacccaccaatgatgccattacgaatgcctctaagctcttgatctttccttaacg

SEQ ID NO: 259613 - DNA, 287 bp, Glycine max
  unsure (1)..(287): unsure at all n locations
tcttccacccaaangacgagttgactagtaccagagaagggtttttttttatacacctatggctctttgagaataggataaaccctactcttgatcttgcatcctaagtgtattcctacataaaagtcagcaagcggactaggacaactcatcaaaacaaaaacaattggagaaaattagcttgctaaaagccacaagggaaaaagtggtttactcggaatggttggtgacatggaaaaaagttacgacaagaacaaactctacaagggaaggacattaaggctgaa

SEQ ID NO: 259614 - DNA, 327 bp, Glycine max
accttaacaaaaagctatactggtggttaacatatatgtggtagcttttgtttatttgtgggcaagagctgttgctattgacgatcggttaaaccttgtgttatggttaactgcacaatggttaagcatatcccaattgtctttgaatggatcagtcattgactatacatagctgatgtatatacggcatgtatcattgtattgcgctttcattatggacttgtatagctcatcccacgctcggaagtgttgagtctcaccttctagcttgcggaggggctgttagagatatgaaccagatgcattggatgtcctagtcattgactc

SEQ ID NO: 259615 - DNA, 370 bp, Glycine max
  unsure (1)..(370): unsure at all n locations
ncagcttcttgcgtagccgctcttggtgctcagaatattccaaaaacaaatcgctcttgttgctcgttcccctctttcttttctgcaaaaaagaaaatcaaatgctgtgaaaacatggatgaagtcctaagaaaatcaatatcaaagaaaacatggatgaaatcacaattaaaaagcacaactacctatctttcagagtcctttgggtaatttggcttgtctccttatgtgggggggtttttgttaataatattatacttttgccttccaaagaaatcttatgactgatcctcttttcattaatccaattctgtatgttattgtataaaagatcatgggttctccaccttgcttcactccttctcctcct

SEQ ID NO: 259616 - DNA, 369 bp, Glycine max
tgcctcaaagaggtccaggaaggacaaggcggccgaaggaactatttccgccccggagtacgacagtcaccgctttatgagcgttgtacaccagcagcgcttcgaagccatcaagggatggtcgtttctccgggagcgacgcgttcagctcaaggacgacgagtatactgattttcaggaggaaataaggcgccggcggtgggcaccactggttactcctatggccaagtttgatccagaaatagtccttgaattttatgccaatgcttggccaacagaggagggcgtgcgtgacatgagatcctgggttaggggccaatggatcccgttcgatgccgatgctatcagccagctcctgggatatccgat

SEQ ID NO: 259617 - DNA, 288 bp, Glycine max
  unsure (1)..(288): unsure at all n locations
ccccccccccccaacanaaagggngtgtctctcccctccgacttaaaacgagtcacttatttaaatttatttaagacacttgtgtgaaaaatatcccactcatttcgctaaattatggaaattttgttatacctgccagtgcaatgattctacagctatcccagatcacatatttatcatccttaatggctctaaggaaccaagggtccattatacaatatacctctaataaaaagataattaaacacaaacgagcgtgtaaataaggataagggcttcataataata

SEQ ID NO: 259618 - DNA, 434 bp, Glycine max
  unsure (1)..(434): unsure at all n locations
ttacgtgacctataaaactcaagctttatgtanaggatgcgactttcacattgatttattttcaacgttcacaggcactggtaatcgattaccaaaacattgtaatcgattacagctctttgaaattaattggaatgttgtaaattcaatttgaaaactttttcanaacaattttgctactggtaatcgattacaacaatctggtaatcgattaccagagagtaaaaactctttggtaaacatattttgagaaaaatcatgtgctactcaatttttgagaaaaacttttcatacttatcttgattaagccttctcttgattcttgaatcttgagccatgaatcttgatcttgattcttgagatcttgaaccttgaatcttgattcttgactctaaactttcttcttgagtcttgaattcttcttgatcttatct

SEQ ID NO: 259619 - DNA, 399 bp, Glycine max
ttctgttatattatatgttcagcagttgctttatatcacacagatgataccttaattaataccacttcaacaaggctgttgcaaagccccaagtgttgtagtgaaaataaaagcaatatggaggcatcctagcttaattgtatttgtctaagctaaattaaaaagatattactatttgaagcataaaatgacaagatttctcatttcaaggcttatggtgctgggtgtagatgtagtctaggtgagctgctaaagtcattcttctctgcaaacattcttcatctccacttttgcagtcctccacccccagcagctgctagattccagaaacagacatgattgtaagatataatatcaagtataatttactcagacggaaaagttctatagatggttttg

SEQ ID NO: 259620 - DNA, 410 bp, Glycine max
atgttttttaaagaaatcataacattgatttggtactaacaaaaaattaaagattcaactatctccactaataattaacaactaagatttattgataaaaaaatgatatattattttagaagtattcatagatcaatcaaatttattgataaaaaacatagatcaatcaaattttatgaagattggaaaaactcaatatggaaaagtgaaaaaagaaatatgtagtattaaaaatatttatttaaaagcatgtaagccaagtctaattacattaataaaaaattaaaatacaaaaatgtatccaaaacattcagtttggaaaattctaaaaataaagagtattttaataaagaaaatattgttttgattaaataaccaatcaataagaaaaataattaaatctagaaact

SEQ ID NO: 259621 - DNA, 403 bp, Glycine max
  unsure (1)..(403): unsure at all n locations
cagcttgagaaaaatctaacgacaattatcttttactctgatgtcttatcgagccctgtaatatatcgagacgctcgtaattgaaaacggaagctctaagaaaagtcaaacgacaataacttttaactcggatgtcttgatcgagccctataatatatcaagacgctcgaaattgaaaacggaagctctaagaaaagtcaaacgacaataactnttaacttggatgtcctattgagccctgtaatatatcgagacgctcgaaattgaaaacggaagctctaagaaacttcaaacgacaataacattttactcggatgtccgattgagtgccgtaatatatggagacgctcttaattgaaactgaagctctatgacagtcaacaactataacttctactcggat

SEQ ID NO: 259622 - DNA, 212 bp, Glycine max
gatttttctcacagcttcagatctcaatctccagcgtatggaaataccaccggacacaatctgacatccgactcgaacactatcgttcatggaattcgctgagagcttgggctctcaatgatgagccacttgatattccacagcgctatatccaacgtccgaggtaaaaggtattgtcatgcgatatttgttacagctcccgttgtcaacta

SEQ ID NO: 259623 - DNA, 344 bp, Glycine max
ctgccgcatgcaaactttatgggacagctgtgttggtaatttcttgtgagaaccaattggattgagaggttttctcatccatcctctttgggtggactttcttttggttcacaactgatatagaaacttgttttccggggtttagttggaaataaaactgatttagtttataatcacgattcggatctcttagcaatttggtgatatttgtttagcgacgtctttgtttagctattattttttaaaaggttctgcatccttaagaaatctacttttggtagtcaacgtgaaagcataatgggactctgttaaacactcttgtctcgcccccaatctgggacagt

SEQ ID NO: 259624 - DNA, 457 bp, Glycine max
tttactctgaagtatgatattgcataatggatgattaatatattgttatgaaatttggttttgaggttttttggtttgtattgtataatgtatgaaagtataatgtttgtttaaaatattttggttggtgtgaatttatattttgaaggtttcagtggtttattactttatttatatcatgtatggtagtgaatatgcaattgaaaataggaacacaaactattaggttgtagctttactttgaacacaaactattaagttttgctcaaagtttctcctacttatgtgtttgaagcccttaaatttagtcactcgttagaatcccaaaaggatgttaaaaaaaattagaaccctgcaacatatgttcatgttgtgttcttagacgtcatgtgtgacctcagtcagactaagaggtatgcatggggagctgctggcctcgcgcatatgtacgatcacc

SEQ ID NO: 259625 - DNA, 345 bp, Glycine max
gccacgaagctgtattatcatctattatgcttaccccgccacaggtaggggactttggtgtaatgaatgcttgggtggcgaagttaaaggagggtatggcagtggagactctataagatcgtattgcttgggaattggggtacaaattgtaccataatttctcggagatgacatgattctcctctctggggtatcggatgaaatagcccaactcatcatccaaacgaagaaagagagtggcaactcactctgatgcatggttatctaagaggcctgatagctctcaatttatccttgaaagaaattattctgatcactgtcctatcattatgcaatctaaatgca

SEQ ID NO: 259626 - DNA, 414 bp, Glycine max
  unsure (1)..(414): unsure at all n locations
gcttctaactaacaacaacaacaacaactccttatcccactaggtggggtcggctacatggatcaacttccggcataatgttctatcaagtaccatacttctatccaaaccattaatttcgagatcctttttgataacctctcttataatctttttgggtcttcctctgcctcgaattgtttggcttctctccatctggtctactctcctcactacagagtctaccggtcttctcactacagaagcttctaactaacaaacaagcaaaaactaagcatggtttgttttgtggcagtataacattcattntattgattcatttattccagaatcaaatctcttttaagtccggtcactttgttaacacttgtttttctttgcatgattatgaatgtatacttgtattttttcata

SEQ ID NO: 259627 - DNA, 461 bp, Glycine max
tgagaaatattttgattctggggatatgaagactggttctgctgtgaatgaggtaaagatcacttcagagaagctgagtctacaagaaatatacctgaatttaaacattgtgaccagaatgcagtttgtgaactcaaacaatgatacaccagcaagctttaaggggcagtaacattgtcaaaatggaaaaggcaaaagaaaggagatatatgtgttaggaagtcccacattgcttgactcaattcttgggatgtagcttatatatctattgggaaacttcacttaatgccaattgattttaagctgaaatctatcatggtttcagaacctatagcccatcttggttcttacctatctaacaataggatcatcttctcttaactacctgaaatttctaaaatttgagatgtcaactttcatattacttttttgaaatattaacatacaatgttattatgtag

SEQ ID NO: 259628 - DNA, 118 bp, Glycine max
catttgggagaggggtacttcattctttattttaacgccaacgaaatatggtgttcctaagatcctctcatatgacggaacaacaaacaccatctatcatgaccccgcgcatcctcct

SEQ ID NO: 259629 - DNA, 253 bp, Glycine max
  unsure (1)..(253): unsure at all n locations
tagtaacaacttacttctgctggaagatngctgcgcatacttgtatagtactctagttgtatttcggtgacattttagtaatacaattctaatacttgaatctattttgtggtctatacctctagggagtgaaagatccaagttgtacaaggcataaaaataaagtatcctatcctagtatattcttttatcaaactcaccttctgattatacaaattttctatttgttctgttgttaaaacaatttattcac

SEQ ID NO: 259630 - DNA, 376 bp, Glycine max
ttgaactagctaccactggtatataatttaagctcatcaactcttgtcttgttaaaaaagagaaagaaaaaaaccgtctgtgcctgaattcaaaagcagctataacatgttgttttcaaagtgtcattaaatattgggttatatcaatgatctattaaattacttaattaattactataagttatgcaaaatatttaaatatatagtgacaattgataatgcgtaataaaaatatttagttactctattatcttgaaacattatttatcataagaatgtgctaagctaaacactctattgtatttattaaaggataataaattgaaaattcttgatgaaattgaataaaaagacatatctgacggctcacttctaa

SEQ ID NO: 259631 - DNA, 415 bp, Glycine max
  unsure (1)..(415): unsure at all n locations
cttctcttcattttctttcttcatttcgagctcccctctctcttctctcctcttcctgtgctcattgagcatatctcaacttctatcaaactcatctgggggaactcttcttcatgctattcctagggatggccctctctactcttctcttgctttactgcattcatggagaaatcacataaaggacctattgaactaaagatcagctcatagagctccacaaacttcatcagtggatcgacacaaactnaatangtgctctaacctcatgattcagttacctctctcatagtgtctcatntctcatgattctcacatgctggcaaagtgtaaagatttatattcacgataacacttaagctaatattaatgtaatcttgttgacagatggtagtagtcttattgctgtattttt

SEQ ID NO: 259632 - DNA, 436 bp, Glycine max
  unsure (1)..(436): unsure at all n locations
ctaagctgggattctttatanggaattatcctactagatgagccaaccagtctcttattataactactctttcttctctttgccttattgaatcaccattgtcggtctcatttggtcttacctctatgctctcttacaatttgacctaattctcttcttatgttaaagaaggtcaatggacgcgatgacgctaccgtgtacggattgaccataacacctaaatggactgtggggtctatacccctgtgagcatttactagaaactatccaactaggtgcttaaaaccttaaggcgtaaaacatactcttgtcctattggataaggaaaagatttcctctaccaagttcaatgtagataatttttgcaagccagaactgctaactctgaaattaagtgacctcctggctgtagtgcttgactccccagaagtccttt

SEQ ID NO: 259633 - DNA, 188 bp, Glycine max
aatcatgatattctgcttaagattatatacgcataccttaattgaaccgtacaagtgccgcccatgctatgatactcggtcttctactcatttaccaccaaacaaagcctttcttattttaaatcttgtcgctctaattgactttacctgacaatctgtatctaacaagctagaagtcatgcatatct

SEQ ID NO: 259634 - DNA, 297 bp, Glycine max
  unsure (1)..(297): unsure at all n locations
ctctgctgctgttgaactttgaacattattggtgactaaaatgatggccttctaacatgacttataatttctgataaagggcacagaagggttgactactggatctgtctatttacatttataaattacggtgtgtttatcactgtgagacataacttatggatggtacatacttgtntattcatgaactatgacttatcttagctgttaaaatcttttatttatatattaataattaatttgtattgattttaaaagattcagactctacagtagctacctaaagaaaatcaaatc

SEQ ID NO: 259635 - DNA, 190 bp, Glycine max
taactcagctgtgagagattacctgctggactaaaattgagaataagcgttctactgtgacggatatctatggcgtagttattgtatgcactctctttcttaaacatacattacgaaccactatttattgttcgctacatgcaagctaccataaacaatggatgaatatacggatatagatatgtattgc

SEQ ID NO: 259636 - DNA, 295 bp, Glycine max
tggctactctgttggcttctgctggtcgccttatatcattcctcacttaataactttgaaattttatggtttgcatgaaagctgtccaactagtgatgtgttaagaagactggtgacattgccaaatgcgctcaacaaggtgtgcttgtggtggatgaaataatgtgctggttactgttcaaggaatgccaaattgcactcgctatttgttagtttgtgatatgaaaagaatttattgggctcctttttattatacattttttttttatctcttttcacactttagcttttcaaa

SEQ ID NO: 259637 - DNA, 120 bp, Glycine max
  unsure (1)..(120): unsure at all n locations
atggtctcgccgccccccagagtgtgctctcgccnccgggaccatgagaaaaaacggcataccagttttttttaaccccgtctgcaaggactagtatcagaacgtctccttgataccaaa

SEQ ID NO: 259638 - DNA, 312 bp, Glycine max
  unsure (1)..(312): unsure at all n locations
cagtttgataccaagttagacattntcattatgtacgtcctaatataaatggtcccttcttttttaaccacataaaaactaaacaaaaccgcatgccaaaacttctatttatacaacagaccataaaaagtgttcaaataatatgagcaaaacaatacctgattaataaatcattgcagttatagatcaaactaatatcacataggggttgtcatatgagttaggactataattatatcagacctcggatatagaattagaactgtctatatgcacaccgaataaatgacgtgcttgatctacaacttatct

SEQ ID NO: 259639 - DNA, 193 bp, Glycine max
tctgtggatcagaaacaataatgtgcaagcttgacgcattctacatacaatgccgatacaaataagaagaacacactaatgctctcttatacaccaaatcgccacactttcccccctaaaaaacaaaaaaaccacaaataagctaacccaagcgaaccccaaaacatcaagagcttgactacccttatttatt

SEQ ID NO: 259640 - DNA, 100 bp, Glycine max
gactttctataatggagctcgaggcctttggaaccctccatttcaacattgctggtcccctaactgttgtgtgaatctccatatttgaagactctgctat

SEQ ID NO: 259641 - DNA, 311 bp, Glycine max
gctttgtgtccaactgattaatgggagctattggcaagaactcttaaaagcctaggggtgtagcactattttctgtgaggttaggaataattgcattggactcaccatctccttggagagcttctatgtctgcaagaatactcctgtatatgaatacattaaagcgataactctctgggctatttactttggattcagaggttagagattttttacactgtagacaattcagcatggttattgttaatggtccactgcataaggcacaataagctacatagcatgcatactaccacggttaaacacggata

SEQ ID NO: 259642 - DNA, 195 bp, Glycine max
cttttgcgactgtttttattggccagaaaaccaactccatctttaattttagaagttatcctacagctcaaagatctccgtattgttgggaactattacagatactcagtgatgagctctgccatttactaagtatccttctaatagcatacatcagacattccatatcgctgatttatcttcactacaccattt

SEQ ID NO: 259643 - DNA, 441 bp, Glycine max
actacttaaatagatcaataaatgtaaattaataatatgtaaatcggtaaaacgaattaaagtacaacagtgagtaaacaggtaaaactatatggtataaatattaataggaagcgggatacaaagggactgattaagaaacccaattccacctaccacatttgactccgccctctcattaaaaaataatcaataataatttatgacaagtaataaacaaatttgtgcacacgaaataatttggcctagtacattttgcttgcttatagtatttttattagttcgaagtacgttttatttattataaattgtatttatctaaattgatttaattgatccgagggacttagattataaattattaaggtaaggaaactacttcaactaaacaaaaatcgataatgaacgtcttagttataaaaactctgaaaaaaaatcatt

SEQ ID NO: 259644 - DNA, 266 bp, Glycine max
aataacttaataatctgcgtgtcactgatttttttcctccaaataagtatatatatacaaaattactatcatgtaaaagtatttaaacgttataaaaaaatttttaattcttaaaatacagaatatatataattggatagaattaactatattcaaaaaaaagaagacttaaaaaatattaaaaataggaaatgaataatactaaaccatataccatgagtagaggaaattacttgtaaaaatcacgtggtataaaattaaatgtg

SEQ ID NO: 259645 - DNA, 338 bp, Glycine max
  unsure (1)..(338): unsure at all n locations
ctcacttgattcaatggcttctatatatatgactttgttttatcttatatanacactagcgtcaaacgatgataattcgttatacccgtaaagcatcgttaatataatcttcttagagaccgaaacttatgtacatgtcaccaatatactttctactgtcgacaacgacctataaagactatctaatttcttaaggacaaaaatttaaatatactaaaaatatccctatattatactattctgaaaaaatcaaactagcttacattaatactttaattatattaaattcatattttatgcattaaaaattaagtaaaaacaaaacaatatctctttat

SEQ ID NO: 259646 - DNA, 387 bp, Glycine max
  unsure (1)..(387): unsure at all n locations
cgaaaaaaccaaaccacaccccctggaaggacctccaaaaacctctggtacgtggtgcaagggagccggcgcatttttgcgtgtggtgtaaaaaacccgcgagcgccgaccaatgaaaaccatagtgtaccttcttatttccccttctacttctactaggtaggctctctcttctctcactccttaagtttcttatgttccctttcatcaattacgggtggtctgaatgcgacatgtgccaaatggtccgatgcaaaanacatatgactgtgatccgcataggcattcgtcgcttactttactcttcattcttgtttcgaacagtgttttctctaaattcggaccattctctggtctctatgacacaatctagttagttattctttt

SEQ ID NO: 259647 - DNA, 286 bp, Glycine max
ttactatatgaaggtactatatgaattagtctctaatacatggaccactaaggtgaatgaaactatactattggttttaataattaatttatgacaaaattatggtaattaggttattcattaacctgatcttcatttaaagtattatatttttgtaaataatttctatagatcacatattactaactaaatctatcagttaaaaaaaaatcttagaactttttttgtatggagtaaattttgtaataaaaaaaaaaaatcttttgctttagtttaaatatattta

SEQ ID NO: 259648 - DNA, 276 bp, Glycine max
tatgtagcatctgttagtccattcaatcatcaaattactgttgtttacttttaattaaatccaagataataaataacaatttgagcatactgtgtctatcattgtaaataggaattttaactattccagacgctgttcatctactgataatacaagaatattacggtttgactgcaacatgccttattcatacatgtactactatactaaccaagataactgtgagagcggaatgctataatacctattatgatttagcatctctcttgatcatat

SEQ ID NO: 259649 - DNA, 95 bp, Glycine max
tatctctgacagaattctgaatcaatctgaagtggaactcaagaagtctcttcaagagcaattgtggcatgctgctaatgcctatgaatctatgc

SEQ ID NO: 259650 - DNA, 374 bp, Glycine max
  unsure (1)..(374): unsure at all n locations
ctaagcttaactgttgagacgtagtgatcgattaccctagataaattctgttcctatttttacaagtacacgtttttgctcgaaaaactatgtctaactgaatgaccgtatactataatctataaagatcatcacagatgactatacgacagctgacttaaattttactatcacaccaccatcctctatttaaccgtctgagttgatacatgatatngcttcaaatctttcatgttgatctgaccaatagaaacgatttcatattgctcataaataatttgaaacattatctgggccattgatctggatccctcctctctggactttttccacctttcatctagatacctgctttgatgtgtaagtacaaatgt

SEQ ID NO: 259651 - DNA, 374 bp, Glycine max
gcgacagacctgtcctagcacgcaatgtttctttatacaacacccagacccttgcaggtaaagaaaagcatcttgatgaagaaccatttcaattatgttgagagagttataaatactgctaaagctgttaagcataaggattgtgacctcaacaagtttataatgaaggacctttggatttcattacacttctaataacaccttcagaagctatccatacctatatatgccatttagcgctcacaccaaagattactgaatactatcttgagaaactttcaaatcatcacctgtgtggacctactccactacttgggaccaatgcatagtgattcttgcaccctcgcagatgtacatgaagacagctggttgat

SEQ ID NO: 259652 - DNA, 498 bp, Glycine max
  unsure (1)..(498): unsure at all n locations
actgagctgcagctgacttatgcctatctggtagtcattgttcattatttaagttgattaaaagtcctaactctgtttataactggacgggaggaaattttaagcggtcgaattatattctgccatagagactcctatgatcgatggtgcacatatgtcactctgtattgtttgtacnacatttcacttttaaattgttgcaggcctacatcatgaatgggacttganttgagtgaactgtttctgaaatgagatctacttgatatcttgtcgataccttctattgttatactatgctagatgattatttcactctttctcgtgtaaatcgcagctctctaatgnactagttgacctttttcttcttatattataacaacacactatttattagctttttgtgcttcttgtttntactccttatagaaaaaatgatataaatataagttcttattttattatatagtctccagatttacttctacttataccatacat

SEQ ID NO: 259653 - DNA, 162 bp, Glycine max
cacacgagcgactatggcgatgtcagaagctaattattttttttaggccacactcagaaatgatgcttaatgttaaccaatatctacgttggtatcactcaccccccataaatatgcgtgatagcaacctggttatcagcgtattcaggccataactcaaaa

SEQ ID NO: 259654 - DNA, 111 bp, Glycine max
cggccttaactactttggaatctttgtggtttgttggctagtgtttttctttaaggcgacacagcttgggtgataggatgcttgtgatactggcgcggtagagagttgttt

SEQ ID NO: 259655 - DNA, 63 bp, Glycine max
tttcacatcatttagatgtttggcagtgtcctatcttgtaattcaccatatgggctgcgtctt

SEQ ID NO: 259656 - DNA, 104 bp, Glycine max
  unsure (1)..(104): unsure at all n locations
tctcgatatagtatgcagctgaatcgngcatctgagtgaaaagttatgtcatatgagttagccgagagcttcggngttcgatntcgagcgtctcgacatattat

SEQ ID NO: 259657 - DNA, 356 bp, Glycine max
  unsure (1)..(356): unsure at all n locations
actcggcaatcatangacctgttctttggtgggaacaatgacatagacaacaatactcggcacaatggtggtacttccttncattctggtgctggagtggctggaatacncacttggatttaaacaaggcaatgaatgaattacagaagataaagtctctcaagccttcaggcctgctcttcggataattgtatacaccatatcaaatgctattgagtgctatgcaccattacctcaatcttgtgttgactaacaacttctcagctaccatgtaaagatgggactgaatgactctcctcctaaacattattttgagtgccaacaagatacgatgctgctgcatgtatgtatgatgt

SEQ ID NO: 259658 - DNA, 56 bp, Glycine max
ggagatggcacagtgggtgtgtatggaaaatcaggaggacgtactatgaggggata

SEQ ID NO: 259659 - DNA, 268 bp, Glycine max
actgatgttggcctaaattcttataataatctttttctgaatcaatattaaaattcacatgtgactaacatatcagtgcttcacctattttttaatcagatttaaatttataatcaattatgttataatacctagtcatatacatgatactcttgtagggagacattacattttaagataaatacttgcttttcaataataattatgttgagaaatcacctcttattagaagatcggagatttacaacagaagaccacgaaaaaataa

SEQ ID NO: 259660 - DNA, 422 bp, Glycine max
  unsure (1)..(422): unsure at all n locations
gatggcctctatataaaaagaataattaacctctctcttcaatgttcattaatttttaaagttatatgtcctatttttaaaaatcattggccaataaatcaatgtatttatttgagaagtttggacgaatcagacgatgaatcccaaaacatagatatattgaaaaaattatgtatatgtctccgttctccaattctgcaaaaaaccaataaactacttctaaacaactattcaccttctaaaatagagactcgtanaaatttacagacgccgaacaacttcaaataatagaactcacagaatacctttttttttggatatgttctttgtaaaacaacatattataattttctttatgtcctagacttaccaacacaacatcttatactagtcttgttcttcattgaaataatggttactgt

SEQ ID NO: 259661 - DNA, 384 bp, Glycine max
  unsure (1)..(384): unsure at all n locations
ttatatgngatgtggtcaaagagcgtgaattgtgggctatgaccaaaatccatatggaagttattgtgtattttctgtttgcctctgttataaaagcaagatgcctgtatttacatnangatagcttcactgtataatgcaaccatataaagttctgttttcctacgtgattacctactcaaggaacactaactgttggggtcttcttatcctttcttaatttgtgcacatcgggtggacaacttctgtgattgtgtgtattctgtgtctcatactccacattgatacgattatgatgcaatatgtgcctgatgcccatcacatgtattcatcatttactccgctctactgttgcattctgacagatctcactgtcacatgaat

SEQ ID NO: 259662 - DNA, 371 bp, Glycine max
  unsure (1)..(371): unsure at all n locations
cttagtagcttcatgaaaaaaacaataaggacggtatcttgtttagggaacgagtaaatctttttttcacaataaagctaaatatataaattaatacatctgtgtatctataaaagctaatgaacagaatacattatnataaattacactaatgattatgaatgcccaattgaatatcattatatatttattatacatctattagtttatacgatcaattacttattaccggaatgaaaatttttgtacgatatattaaactccgctttatatggagaaatgactaaataacaatggctactgtattatacacgttatagtttcaatctgtatttactgcaatttaatataaattacagggtaggttttta

SEQ ID NO: 259663 - DNA, 155 bp, Glycine max
  unsure (1)..(155): unsure at all n locations
aacttctccttactatcattctctttctcctatgtttctctctctctagctgccctggtatgctatatatctatctgcatatacaaatgatactctctttntacttcatggtgaataantaacctacctangtctacaatganggactgaaagtt

SEQ ID NO: 259664 - DNA, 299 bp, Glycine max
attggagatatattttggcatgctaatgtttatttgtcatgctgtgatatttattgctagtcttcttatcttattcgacgtcatcaaaaaaaatcatgtgaatctgattctctatcaaaaaagaaaaagaggagtgatataagctgttaaactattggagctgtgattgtattaagttggtatatggctatcatatccatgtctttcttggatactctatcattttcttctacttgctgcccatcaccttaagcttgactattgctgtgtgagtgtgcattaaattcagtatggtgttt

SEQ ID NO: 259665 - DNA, 352 bp, Glycine max
tataacatcaacatatgtttgatactttttgtttttgaaaatcaatcactacataacaccatattgattatactcagattatccaaaatgctctccattcttcagagtactggtttggtgttgaagccacacttcaaaagcattctggactccacctaagtcatttatgtagttttgttattcacagtgtgacattgaaaatactgttattatgccttacgaacttcaaaaatttatgaacattttcttatattactacttactcctatctttctaatctactgaagcctaatcttttttaatatgtattagctcaatccacatagtgttaaatgataatctatttagtacg

SEQ ID NO: 259666 - DNA, 237 bp, Glycine max
  unsure (1)..(237): unsure at all n locations
ctcgacattgatctgatcaagtcccagacacctctggtattttcaacccacgtgttaatggttataggatttaagatgaagtccacgaagacacacattaagttcattttggcagaatggagaaatttcttgtcatactctatacatggatcgantaagatgctagctgcagaaagagtgactctttctccaagacatgtactaattaataatacattactgcatatatgaaacact

SEQ ID NO: 259667 - DNA, 380 bp, Glycine max
  unsure (1)..(380): unsure at all n locations
tgaatggttgcttaaagtaaagggtttttgatcttcaaaaatgatgactcaaacctgctcagaagcgcttctatatttataacttgcatctgttgatttagaactaaaaatgcacaaaggtaaaagaaatgactacaccctctatgggaccaagttgaaaaagataattaggggagttatgttanatctaatattatcctgaactttatttgactcaacacattctgagnaaactctaaacataatgaatattatgtattgtccacttactcaagctatatgttagcttgattgagaatcttatttgataatgactaatattactagatatgattagactaattattagcatacgggttgtgttctataatttattattt

SEQ ID NO: 259668 - DNA, 310 bp, Glycine max
ctctctttgtcacgacttaccgttttccgagttttttcgcgaggtaactaactctcacttcttgctatactattgcgcggttgctaccatcggtgatgtccatactggctatatgtgtgcagactgccaagatccagaattacctaaacgaacgttagatttcgtcctaggaagtgcgtcaagctccctgacaacagcttctcaatattggagtagacacctagaccgcccacaatgtgggatcttgagataaggagcttttggacattctacttggccagcacctatgttaggtagattcagctgtcta

SEQ ID NO: 259669 - DNA, 182 bp, Glycine max
aacaactacgcgttgtttcaaaagttttctaacttctagtcccagtttcttctgtatcatccatactgatcatccatgaagtgattcaacttactgttcacgtcatgtttaatggtacatcaatatgacatccagtttacgtgatcatcatggaagcctttttaacttggatgtctgttgac

SEQ ID NO: 259670 - DNA, 431 bp, Glycine max
  unsure (1)..(431): unsure at all n locations
ctgttcatcgattcttgcactgaagtgantaaatcctgaaatccagtatcacatcacacagtattgaacagntcatgaaaagttcagaaattaagtggtttgattgaaatatatctgattatgattntgannagctagaatgaataananaacagggatctgtatcttgaagtcatacanactaagtaanggtcggacccagtcagaataggagaggatagaaacttagaaaggggtgattantttgagaaatgtttctgtttcactgttctatatcttntttaaacaagcaatgatataactgcattttgtataaatgacattctcactaacaccccagagtggtggttgagaatatttgtttattcattacaatatacaaatgacatcttacttgttcattaaaaatgtgattgttatctacatctgac

SEQ ID NO: 259671 - DNA, 209 bp, Glycine max
  unsure (1)..(209): unsure at all n locations
tggagagaatataaggaaggangaacccatattgtgactgcgtcctacttggccaaattcccaccagctcaacaatatcaatactcggccaatatcatgccttcttantacccaccaccctatcaaccaagaacgctctctcattcacataggccactcctatatcatgcaataccaaacaccacccttaacacaaaccanaacaccca

SEQ ID NO: 259672 - DNA, 281 bp, Glycine max
  unsure (1)..(281): unsure at all n locations
catctacttgagatggaacctgcgcaataagagatagatangaaggaccatgtgtgctgcattcaaatatcaccactcacaatgcatactcactaaatatccttctattacccacatcaacatcacaaagccatctaataccacaagctactgcacacatcatgcaacacacctacacaacaaacccaccaggtgaattctacgaaagctgaattacccaatcgtgctagtactgtccatttactaaatcatggagctacccaccaagtctcactcttttt

SEQ ID NO: 259673 - DNA, 336 bp, Glycine max
  unsure (1)..(336): unsure at all n locations
atttatgataggaatggttagtctagtccaaatactataagcttgtacaaatattttgataattacaatctaagaacctatatgaattatgtcataaaaatgatcttctgaggaatgatgctaccgaacttttactcacccatcaatatactccgtcttagattacatattatactgaatgtgtctcttgaagtgacatagaaatgaaacaacaacatatttggtgaactaccttatgcctcattcnacctctgctattctctgtcatctactgaagtacttgacgttgccacttgcttgtttctatcctctacttgacaaagaatttataaacta

SEQ ID NO: 259674 - DNA, 318 bp, Glycine max
ttattatataataactcatgtcccatataataaagaatttactacaatataataataacctattacaattattatatatggtaaataagttaaacccaaatacaaaataccttaactataataagttgtattgtaaataacactccaacggtggctgtaagataaaaactcaggatgtgaaaatcacgacaaaataccactctgctatatatatctgcgatagcagatgtattaaaataaaactcaatatgataaatcttaaaagaactatttctgaagaatacgtcttattaaatttccccgtactaggaatatact

SEQ ID NO: 259675 - DNA, 214 bp, Glycine max
  unsure (1)..(214): unsure at all n locations
taagttggtgtatgccaatgaccttcttgaagatcaccccgagcccgcgtcccctccgccgaaggtagtgcacagtggggctcactcgcacaattttagagagtaggccaatcaatcagtgtgcttccttaccacgacntccctttatagactatctcgtgtgctttctccttatgntcttgtgtatataaactctgttgatgctgttagtgtg

SEQ ID NO: 259676 - DNA, 426 bp, Glycine max
ctcagctctagccactgcttctactgcagtgctgtgcatatctcaatccatgtgtctgatctaatagctgttcttgcttcagaacagcccaccactatgctaatatataccactggtgctttggatcatctggagagtgttcaatctgatcgttgatcttcaagtacagcggaacctttatatgtctccaagattatggtcttttaggacctattacccttaatacgtgccggctcatataagcactgtaacctgatatatccacacatacggacctatcctaagtgcatatcttcgctcgttgctatcctcacatgtctaacaattacctgatattgtgactacagtcatcaagacatattttaatcttatgggaatgacaaaattctttgacttatttaacagatccttgttcagttcttaatg

SEQ ID NO: 259677 - DNA, 387 bp, Glycine max
  unsure (1)..(387): unsure at all n locations
cttggactgactttttcaccttctcttaccctctaagnctcaagaagagtatacattgactaatgtaacttggagattaccttctaaccacacccnctccaagccaataatgaagccatgtcctctaaaggatgaanntcaaataacaaattcnattggagaaataatgagacacatttnctttttaagtcacaatgtttagttctcttataaagttgaattacatagctagctttagtcattatatcaagaataaacctctggttggattggaatctatttcttttttatgcataataatagtaagagaataaagacacttctaatgctatanttcaagtgtctaatgacttgtaggacttangactatcaatgatatgatatatt

SEQ ID NO: 259678 - DNA, 224 bp, Glycine max
tctgtagtggaacacttttttttaactggaatgatactctcattatgtattgatgatagttttataaatagaaaactacatcttttgggtaaacattttcattagaatagcagtgaggtatttccttcgactacaccccacctatgggaaaaaaaaaaaaaacatcagagggtatgatagcaacataggaacttgcactatgtaaaacctgtattaatgcttta

SEQ ID NO: 259679 - DNA, 328 bp, Glycine max
gaaggtctcagcttcatcttgttttttactgacctgcattaaacttcacaggctcctgtctgagaattgctcataatttactctttagatgagaggcgtgaacttctggctatacacacagtagactatataaatacctttcagatagtcactgggacaaggaagggaatgactaaagaatgaattggctaccacataaatttctcttgcataatgatggaccaagatggaaatagctatatcaatgttgagactcatgtggcttgtggcaacaaaaagtcagtgaacttgactgcaccatgagacgttgtaaacacactcttcacgg

SEQ ID NO: 259680 - DNA, 325 bp, Glycine max
  unsure (1)..(325): unsure at all n locations
tcgctgatntcatctgttaatacctacctacactatcgctgtgctactctttaaacaattacaactttaaacaaatagccatggtacaattcttctattttcttcattcaactgttctcatttctggtgcttcattattctcttatcttactcattttagcatccagaatactcttttctgatatcattcagactaccataaaaaagtcatctctctatcatcatgtaacacaaaatgaccagtcatctatctacaacccttcacaaatcaagacaacaaaaaccatgtatgtgctcctgataccacaccaaactctctcgtatc

SEQ ID NO: 259681 - DNA, 116 bp, Glycine max
  unsure (1)..(116): unsure at all n locations
aatgctcataccactataatatacaccaaacacctttcattcaatcgcacaatttcacacaacctaacttcacataccanattcaatcttaatactatggcattcttatgagaaac

SEQ ID NO: 259682 - DNA, 347 bp, Glycine max
tgcccactgccagcgacagtgtctcaaacaagctttgtgattttgaggccatggcctatgtatgcccccattactaatcacccgcttttttggaactttttctaagtcgaactcaagtgacaactgctttttcgaagtacgactgcgatactatctccttttactacgagacgacctctatggcacacttctggattcggggacgactacgatgcatatattcttgatccgcgtacaatccaactgctaggggcaaccctaagacaccaatgtcaaaacagccgcaatagatactgctcatgctatagtatgggtatgaatacttaaaatattttttatttgtaaac

SEQ ID NO: 259683 - DNA, 252 bp, Glycine max
catattcatatggcatgatgtctcgtttgacctggtgatgaatgattcaccggagacatatcggccatagtagccaatgggtgtattagtatgcctacgagaactttcatgcccataaacttgacaacgttattcaattctgcttcggaaaggttttatcagtatacaattattgctgctcacctgccattgctgccgaaatgtggtacgtaaaatcaaaccagttttggcaatcttcatttcgtcagaaac

SEQ ID NO: 259684 - DNA, 299 bp, Glycine max
  unsure (1)..(299): unsure at all n locations
cataatatnaatatttatggagtggaacatatatgaaagtacagaaacagaaagcaatcaaataatgagaatataatagacactcgtactacacctaaatgtaattaaagtcttgttatangaaaaaagtatggagtgtatcaaagctgataggttcacaaaaaattaatgtatccaaaataatattatatattggtcgcacaaataataattatatatatatatatatatatatatatatctgctaatctatttctaacatattattatctatcgccgcctataggctatatggtttt

SEQ ID NO: 259685 - DNA, 351 bp, Glycine max
atctgcagactatatgccactaccactatctatgacagaatttctactgacaaacagaatcaaaaaaaagaatcacaaaacaaaaaagaatctcaaaaaaaagatcctcaagaaacaaaaaaaatccacaatggaattataaaaaaaaagagagaaaactctgtagtcaaaaaagaaagtcgaagcttgacgacaatctgcatcaattgcccatgacaaaagaagaacacactaaggtctctcttatacaacaaactggctgtactgtccttgcaacaacaaaagaagctaacccaactataacacaaaccttccagaccttgactaaccatattgattagaaattcaaca

SEQ ID NO: 259686 - DNA, 364 bp, Glycine max
actagctgatggagagattacctagttcttgtatagcattatcatgtctcaaaaaactcatcatttatatttgaaaattgtttatatatagcttttgttaccagtacatggacgacgtaatttgttaatggataacaatacatgcaatatcggtgaactatttatattatagcaaaacgctaacatcgtaactcgtaaatggagaaaatactgattgacgaataagagaagctacaaacagaaagattaaatctggattgaactacccgtgagacgaaacaatgatacggcgaaaacggagaacgtgaaacttccggttgttcggacattcgagcgtcgggcctcactgattttacgaacattt

SEQ ID NO: 259687 - DNA, 318 bp, Glycine max
  unsure (1)..(318): unsure at all n locations
ggctgcaccgtcatcacgctgtatacgaccacatttttttttagtccgcncgaaacgggagctttttattcacgtttatataagaccacggacttaggcaagtctttctgattgccaacttgttcattgacgttaaattacgactaatcgacatcataaatatgtcttaattgtaactcgctcattgacgccaatataatgatatcgctcatcaatatgcttgattctaactcgctcatttacgctcattaaagctatcgctcatcaacttgcttattgtaactcgttattcacgtattaagccatgatcacaacatg

SEQ ID NO: 259688 - DNA, 267 bp, Glycine max
caaattcagacactcgatgaataagcctgacaatctacacacactttatcgtgtcgatgaaccgataatcaacctcaaataaaccagctctacaataacacatactttatggagcgatagccgataatgaccctcaatgaagcactctacaataaagaagattttgcgagtcatgatcgataataacgcaatgaatgactcacaataaacaactttatgttcatggccgaatgcgactaatgactactgaataacaatacttatcat

SEQ ID NO: 259689 - DNA, 225 bp, Glycine max
  unsure (1)..(225): unsure at all n locations
agttatctctnttatcttagtgagagtganntctctanattcttgagtgattcaagaacacccttgctgtatcaaaggaactttacaaccttttgtgtgtgcccttcctgganagagtgnatctttcctttctatcatctncacnncttgtctttanaccacaattccagaaaatccacctctgccccaaatatctcgtgaccataactcccattntacacactc

SEQ ID NO: 259690 - DNA, 344 bp, Glycine max
  unsure (1)..(344): unsure at all n locations
atgggttcatgaagatgcgctcgatgtattatcanaagaaactgtaagacttncatctattattnnttctatatttaaatatccaagctatggtcaactacacattataatagtctaaatcattggcatgatgcctaaatttgaaattggtggtggaatggtttgttctactctaacaagatggttctacagttactactatttttactaccagtaccttcgttttatctagacaaactttgagatgttgagtccagactatcantgtgacctaactttggaataaaactagtgtcactgctggcactgtgaattagatttcaaactaatgttgtgatgttctt

SEQ ID NO: 259691 - DNA, 378 bp, Glycine max
  unsure (1)..(378): unsure at all n locations
ctcagctctatcatatgttgcctatatcatcattatatatatactttatattcttttaacgcttaatgtcattatatattatgtaggaataatgctatattattcctctcttcaagcanaaacaatgtttncattaacacaagattaaactcttaactatttatcataaacaacttgtgatgcaatgatcattataatttaagatctcatatatntaaaaattctatagtgttgaatattcatatctgatgttattcagccactactgtgctttctaaataattgtccatcaatattttacccactactaaaaacgattaattctattacacatccctattattaaggttacaatcattacgattaatatacttttct

SEQ ID NO: 259692 - DNA, 199 bp, Glycine max
  unsure (1)..(199): unsure at all n locations
tatttatggtccgaacatcgtgtcattgtncgtcatgacatgttatgtatgagtttcattacaanagatataataatatattatatggatatagtagctaatgtattcattttaagtcactattttaatggtatttgcttactttaaaatcacatatctcatattttatgaacattgctattttaaatatgattagttc

SEQ ID NO: 259693 - DNA, 353 bp, Glycine max
gtaagaggtgttattctggattggggtagatatgagaactcaactctttttagtaacctctatacgcatgaagaatttaaaagctattttattccacatagatatttgatataacaatagtagatcaagattataactacacactagtaaataatcaatagctatttattgtgaaaaatggaatcattaatactcgcattcaaagatagaaaaacctgtatatagtgttgacagagtttgatggattcaatccagatgttcaaatctgaataaattcatcaatatgctatatcttagtatttatgtatcatattatttctaaatttcaaatattcacattctactgttatctc

SEQ ID NO: 259694 - DNA, 322 bp, Glycine max
ctgtaacatggtttattctaaagggtgataaatttccaacactccaataaattatcactttatcagttaatcctatagaacttaaatgattcaataacattgattgattaagcatataacaaggaatagggagagaatgcaaccagatatctggtcgcaccctttgctactcagtccacacccgtgaagtcatatttgaatctttacaatctaacccaggcatctcctatgtaaatcttcacagaaccatgctctattctaagatagaagagagataacttttaagaaaattcaatgacctcatattctatgatgatgatac

SEQ ID NO: 259695 - DNA, 346 bp, Glycine max
tcatgaccagagcaatatgagagtggaacttatcaactgtctctgcttatcgactaatgaattatgcagaatcttgccagatctttcttattaacaccatgttcaaaatgtctttataattggcatcatcgagtcatttcggcgccgggagattacagatcaccttcagtgaacacattccaacatagtatgacatgaatttttcaaaaagtaggaacggtcttcaaagctgcattttactaacactaattcttttcacctttctactgctctcttgtctattgtcttttctactgctctttccttgctcttcactaactttctcatttattacagattttgtatt

SEQ ID NO: 259696 - DNA, 268 bp, Glycine max
caatacggtcacgtggaaaaccccttctatagcttttaaagagtaaaagggggcttatataaaaaactaggggaaacatataacggataaagaaagtactaagaaagttctaaccactttgtctaacaaataatgtgagcacctgtcacctaaaatctcgatattgggtctgatgaaataagatgcaatgactagtggtggatggatacctacatggctatgaaatacggagcttgtagactctgattgatcacactattttggtcta

SEQ ID NO: 259697 - DNA, 167 bp, Glycine max
atcagcctctttctgcttatgtagacgtcccccctttctactttctccatcatactgacagttacgtctatgaacttgagatagaatgccttatctacacctagttacattggctcagcagtcaggtaacctttatggacaccgatcgatttgttgctcagacttta

SEQ ID NO: 259698 - DNA, 192 bp, Glycine max
cctcgaatgaaacaaacttggcaattaacacatcatttactcgagtcgatgagccgattatagacctcaatgaaataacttgacaatcaacacatactttactgatgcgatgagcagattattagacctcaatgaaaagagactgcaatcaacacaaactttctcgtgtcatgagccgagcgtcattatatc

SEQ ID NO: 259699 - DNA, 307 bp, Glycine max
actctaccactatgatagcgcgatgatccattctgttctctagctcttgtcttcttacccgatcatgctgcaatctgagactcctgggcctaccctcagaagggagtctcgaggcctttgggaccacttctatgagcgattatatcccctgtctcaggaattgactctcgatgagaaatctgatttcttcttacgagacaatacaacccctctgcaccagaatgtccattgcttctttcatccacggactgacgaaacggctctctgaaaagttgatactcctaaaccggtaaacattgctgtttaa

SEQ ID NO: 259700 - DNA, 409 bp, Glycine max
cttaactactcctgtttaactttaagtttaaacaatttattatcaccttatactaaatacttctaaatatacgatgaaatactacaatataactcactatactaaaatttattattattttttattatttttaatatattatatattttaatataggggcagcccaactgtgccacacgacaaagacactattgactatttaaactacttagatcgaagacaaacttatctctctgtctgaaagatacacttatcaagaggggatgtttaacaacagcttaaaacttttgcaatcttataacttataacaactaatacctttacaatctttaagtttttaaaaattttacttaatttaacataaaaaaaataaaaagcccttattgtctttttaaatattttataccat

SEQ ID NO: 259701 - DNA, 151 bp, Glycine max
gccattatcttaaggtgactcaattatactcatatctgtaaacgcactctagccatatgaaaaaatttcgtaccacttataaacttctacaaaaatttacttagagagatccatatgtggaagcgagatctcagcatgcactaaaagcatc

SEQ ID NO: 259702 - DNA, 415 bp, Glycine max
  unsure (1)..(415): unsure at all n locations
ccttgatctagctgtgatacctgtgacactgtgtctctccacactctatgctacagcttgctactctgactcatatgatcactgaatatacatatattatacatnttctaggtattacggaaaaatcacaaattattgcttctggagagagctcactggattatttctatatgccagcttgtatgtgatagataacgactgatctaggctgcatcgcatgatactatggaacatgaaacagacctataagccagccaaacctgatgccattattaagataatgtgatatattgctgtgaccaactgatcngacggaggtgctaatagtatgtgatcttttgataatcacttgtagattgtagtgcattccctagcagttggacataattcattgcagacagttaggtgactatat

SEQ ID NO: 259703 - DNA, 320 bp, Glycine max
ggatcatttttggacatccagaattataattaatgtgaaagttgcctggacatacacatacaataattgtaaatttactattctgcaacttgtctaataatcctctttaatcctttaatttaactgctgacatcttaaatttatgttgctgaaacttaaccgtacttggtataacatgtgacttttcatatgtggatattcactacgaatgatgagatggtcatggcacctacacactttaaacatgttgctcatatgcatatgttacctcatatgttcgacaagatctattcattgcttcaaaaaactcattaggcttc

SEQ ID NO: 259704 - DNA, 207 bp, Glycine max
  unsure (1)..(207): unsure at all n locations
gctatatcagatcaacagacttaaatatgaatctctagaaatatactatatatattctgtaccaagtgataataaactctttatgattggtagagagacatgatgttctcatattaagatatcaatantaacattagcatctttattgctgtccttctcttgtcaaatatttcaaagtctattacgacacgatctatcaccacatcc

SEQ ID NO: 259705 - DNA, 60 bp, Glycine max
tgaacttgactcatttcttaataagtctgaactgcacgctctccaaagttacagggcttt

SEQ ID NO: 259706 - DNA, 88 bp, Glycine max
gagctacataatgacatgataggagtgcttaattctgataatctggaatagagtcattaatgtattgacctatacgtgtttgacacac

SEQ ID NO: 259707 - DNA, 253 bp, Glycine max
ctcgcaacggagtctggggtgaggctatacctatctgcgctcagatcttaatcttgaaaactcgttctatctccgactagcaccggtatttacatcaatttgcttgcaactcgagcacactaactcatatcgcagcctagggggggtgaatctctaacggtgccgatctcatgaagttgctcattaaagcctctcccaacggatctccgtctctaaagcactgtcgtacgacctttcaactttccctttcaga

SEQ ID NO: 259708 - DNA, 347 bp, Glycine max
  unsure (1)..(347): unsure at all n locations
cagtttctgatctcattagactattgacttgagtcatttgtacgtgctatagtaccatttggttggtttccaaaggttgactgtttcgtcatcctattagatntatcatgtngctaattttaatgttgtgttcttattaaatgatcgaaatgtatgaaaactagaaactaattgtcattgctggatattgtcataatacaattacgataagttcagtttcaaagctgtgtagacactaatgataatgtggtttgaatgtaccatataatgctacaatgatgatatgtctanagaaccacaaaagatcactactctactgctccaattaccatcacggtttgcactgc

SEQ ID NO: 259709 - DNA, 335 bp, Glycine max
  unsure (1)..(335): unsure at all n locations
attcataccaatcaaatgatattggaacttaccanactgtctgctgccctatcggcactaagtgcaattntatggcatgtgatgctnggctcagatcgttctctatttatcacccatgttccaaaatgtctttataaattggcattatcgagtcattcggcgtcgngaattcacagattaccctagggtgacacattccaaaatgtatgacatgactttcaagaaagtgaaatcgttttcaaactgtggtttactacactatttctttttcactttcctatgcctttttctatgcctttcttcattcttcttcatcattcttcttcatttattac

SEQ ID NO: 259710 - DNA, 439 bp, Glycine max
  unsure (1)..(439): unsure at all n locations
ctaacactcttctattctcctaatgtcggctatatttattgntggtacaaattactattcttctctgagcttaaacttcagatctgagctcgttctcgtaacatctcaactttctatgtgtatgtggtagacaattntattgctactgtcgtgcgattaagtattattgttagactatagaaatggtaatcaaaagagatgttaccataggatacatatgcatggctacactcttaagtnttaagctaaagtctagaaagaataaaataattagagaggatctctagtcaataatggtcactctcaatgacctcatgttaatattggattttggtttacacacgtaacgtctgaatacgttattcaataatgtgatgtgaaattctggatacatagaccatattatagagctactaatatctatgatctttaacacact

SEQ ID NO: 259711 - DNA, 357 bp, Glycine max
  unsure (1)..(357): unsure at all n locations
gtcattattgattaagagcttggtaacttaacagatgaattgcttacaaattgatcacatagtatgatagagtttgaagagattaggcacgtctgatatatatgttgganatttgaatttatcgaattaattcaatgatcagaaagcttcttcctgaacctcatatgttacctgtgaaaaggatgtganatgtgaaaaaaaatatatctatgacacagaattatgaacgaagaagatgaaagaggagataatgatatgtgaaaaaggacaactcaacactatctgtatgaaatctgttgcagttatcaatatctgaactattattacaaactattagacttattacagttcctgcaa

SEQ ID NO: 259712 - DNA, 370 bp, Glycine max
  unsure (1)..(370): unsure at all n locations
tcatctaatgagtcaacgattctaacccatatatttgttactgcatgacagatactctctattgtctagctcacattgcttagatgctttctaaaacttatgccatttaattagtaacagcattagtctatatctgtgcaatcttggatgttggatatcgtngagattcaaagatgttgaagtaaaaagttgagtctgttgatacccaaagatggtatgaaagagaatttgcttaactatttgaaataactggactaattaacccatctatgcactagtaccacttatcaactgctcttgtattttaactataacaacatgggtcactagctggctaacttacacactctatgactctacattatgcctt

SEQ ID NO: 259713 - DNA, 277 bp, Glycine max
gagagaaaggaaagtgactgatggctacagattatctaagtcacaggtcactgtcatataactgagttctgaagcttttgaaaactctgaactccccttatactactactctgaagctctagaaatctaagactgactactcctcctttatgtactactctggagaaactgactactcccccttaattagtacccatgtaaactgaatcaaaagtcttctcaaactctaatgcccatcaggtaacttcttgatgcaatcagccacatgaactattat

SEQ ID NO: 259714 - DNA, 436 bp, Glycine max
  unsure (1)..(436): unsure at all n locations
tggcactccttgtatcaccaaattcctaactatttactttttagtcctgctgaatgagtacaaagtgacttgtagcagtttggtgagtaacctaacattgtatataatcagtataataatacctctgcctatcacattttagaatcatatacatatctaagatgaacttaatgttaatttcaggatgtatcgagtaccatgtactcatttatgagaggtgtgggattcacccatgtgaatctggaagggattacgaaatgtangattgtttataatcataggagaaagattgcaaaaattggctattgatggaggacttttgcacaatcacaacatatggaagcttcccagatgtaacatctaactctgttttaatttggatatgcttgaattgaagacattatattatactaaatcataaatcttggttataact

SEQ ID NO: 259715 - DNA, 314 bp, Glycine max
tgtgtgatctatgcgttcaaaagaaatttatttctatattagaaaacagcacagcctttggacattgattgcttttgactgcccatattgacaattgctagctgcatatgatattctgcgcagaaagcactaagatagctgtaacactgcgtaaaataaacacttctagagcatgtgttattcaataaggatataaaagcatgcttttatataaaaatcaattgaacttggcctaattaaatcgcttttgtgtctgtgtttataaaatctacccttgattttaggcttaatctttacaaattaataacatctca

SEQ ID NO: 259716 - DNA, 377 bp, Glycine max
tgaagtccaacgcagcacgcgtgtcgttaaagttggtattgttatgcaatgaaggagacgaacgtggagtgtagtttccactgtactttactctagcagtggttgtggtgttatcaaaggcaacaccaacaccacttgaatatgctcttgcagcacgatagtaatgattaggttcttggttggcatgcaataacacatccattgtttgtcccggtgatatgcaaatgtattcccttgccaatggcttggttaacataccatcagcaccaacaacagtgaggttgtgttttgaaacagagaagaagagaatgagattcattgccgcattgacaacacggagaagataagtcctgccttgctctacatgaaactcgaac

SEQ ID NO: 259717 - DNA, 288 bp, Glycine max
tttttaatattgaatgactaaatggaactagaagagaaactactattcatggtgtctaaataagttgacaaacgcttttacacattattttatcacattttataaggcatacttttcttcacaagtatgaagcttgtacatgttatatcaaccccattcaaaatcatgtactccaaccaaaaccaatatgatgacttactgaatacgtgtatataacgcaaattagcactttttgttttaactgctcactacaaccatctttaaaagcataacatatttttcctttgt

SEQ ID NO: 259718 - DNA, 519 bp, Glycine max
  unsure (1)..(519): unsure at all n locations
acactatgaaactcagctttggaccacaccgacagatagggggtacctgactttattacagtgtaaatttgtgtttntaaatatgttacattggattattatttaaacatgtttttatgttatgttaacctcattttttttgtagtgctggatctatgagcactttccgagtgtgcatcagtgcgtcacagatgatgcgtacgaggagacgtccccacgtgctttccggtggctaacgacgaaggcgcatatgaagggagttacaggagcgccgtatcgggcacgctgtgatgctttgacggtcatagatgtgtgctgattgccttacagtgatcatcgaggggttagggggtttgagctaatttcatcgttccagggtcagctgagatggngtcctatggtggtcacagttcgaccagagagggtgctatgngccgtttggtacattcagagcnatccttcgtcgcctggtagcgcttcgntgtcatatgatgatatagatgacaagtggatgcattt

SEQ ID NO: 259719 - DNA, 386 bp, Glycine max
accagctactcctccattggacagtcccccagaatcaggcagcacttttgtattctaagaatccattattatatcctaagtgcaaaaatcggtacagtaaatgaaacaaatttacaaatccagaacaacactattcataagaatgacaggagttacacatagttaatatcaaggaataaagctgcacctcatcaaaagatacagctacatactcatacattgtgacaggaattagatctgcacattgagaagtgttaaaaaattctacactttcatgtgctcacaaaaacttttcaaaatgcatgcaacaagtgcataattaaattagtccctgaaagatacagtgtatcataagagtctcttgaaaaatagaaacaacaccactc

SEQ ID NO: 259720 - DNA, 387 bp, Glycine max
ctgagtgaatctatatgtataagggaaatcttattaatggatttctattttatgtaaggtctataagggtacggtgacaaataatctgaatgttgcaattaagcacataatcaatgatgatggaaatgtggacacttttgtcagagaaattacaagcttatctcatgtcagacaccctaatatcagcagttgcaaacaatcacagtttacttggtgccaacttaaagtggaattaaacaaggtataaacttaaagttataaaaaagttaataatgctctaataggcaatcctagcttaaatttacccttccttgatgcacccaaagcggaagtcaacttatgaattctcttgaatgcatccaacctaaataagttaaaacctcagat

SEQ ID NO: 259721 - DNA, 355 bp, Glycine max
  unsure (1)..(355): unsure at all n locations
actaagcttagccaataggttgctaaagtagcaggctcaattaaccttttagnaagtgcttctcatgccattcttcggatggcagcaagggatgccgttcttgatacagtgaaagaatttgataaacataagcataagccacacatcaccaaggtgtacacccacaaatagcgagcaagagaagcaataatcatggaccaccagcagcagggtgcaatatacccaaggggtgcagaccacccaacaattacaactcacccaaaagggtgtaaccacccaacagttacaattcacccaaaggggtgcaggtcagaagatatgaatcaatgggacatgacccctgngaacagtgaca

SEQ ID NO: 259722 - DNA, 404 bp, Glycine max
  unsure (1)..(404): unsure at all n locations
actcagcttacacaatnntattttctcagacttaaggtctgtgtgactctttactaaggctntcctaactagatgattaagatgatgcatatttatgtgtgcaatcctaagatgccataaaccagtcttatctgtagtatgcttttgcacgttgagcaagtgattaagatcactctttcctttgtttaattntccaaacatatctttaagatagaaaaaatcaatttgcaacttcatacgttcagcatagtgatccgtttttatattttaaaatttagtttgcaaagacttgtaatcatccatgttaaaagaaatagaggtacaatcacaactagtggctgtatagtttgaaacaagtttntcattgtcttgcttcaaattatctatctcactttgtgttgaag

SEQ ID NO: 259723 - DNA, 183 bp, Glycine max
cataaaaccgaaaggtggcacacttagtgtaagtcggatgtttacctgggagatacatcccacttgccatgacacacctatcatggcaatactcaagttattccttttagctttggttatcttatgtttgatttttactttggcacaggtcctgtctcttctatgatcgaacactcgatctta

SEQ ID NO: 259724 - DNA, 441 bp, Glycine max
  unsure (1)..(441): unsure at all n locations
tacttgagaagcctctatggagagaggagcttgttcttctttaggttcttcaatggtaatattcaaccatggagatgcaactgaagataaaggagaagaggtgaaaggaggtgtcatccactangaaataagccatggaacgaggaatttcaccaccaagagtgtcttggataaagttagagaggaaacttcaatggaggaaaagaatgatagagaggggggacacaaaattgaaggagagaaagaaggagaaaagttgaactttgaagaatttgaggagacagctcacatcgaaggatgtttgctttgcctatacaacaaccaagatcaaggcttggcaacattacccactgagtggagcttcggttagacattccanaaactttctttccattctgtttattttgttctctaatttatagaaaagtttaggtttctgag

SEQ ID NO: 259725 - DNA, 395 bp, Glycine max
  unsure (1)..(395): unsure at all n locations
ntcttaagaaaacttccttgagaagcttctntgatataactttcttgagaagcttctttgagaaaacttcctcgagaagctagagcttagctacacacacccatctaaaaactaagctcacctccttgagaagcttccttgagaagttagctacacacacccatctaaaaactatgctcacctccttgacaaaatacatgagaatacaaaaacaagtccctactacaaagactactcaaaatgccctgaaatacaaggctaaaatcctatactactagaatggccaaaatacaaggcccaaaagaaggaanaacctattctaatatttacaatcgattaaaacttaatttacaaaagaaaaagcgataccgatgacaggagaaggagatgaagat

SEQ ID NO: 259726 - DNA, 293 bp, Glycine max
ctcagcttcggcccatatcccttaggcaagatttgtccttacaaaatagcactaatgccacagcataagtgagacccaaacgtatccgttcatctctcatgtaaagaatatgttcaatcccgcttcaatcaagatctaaggcaatgtgtacatttcccaatgcttaagtcacctaactgtgcacacaaatgggtgagtagaccacaagcatacaaatattaagcgttgaaggaagcatcgaacacaaaagacataatcgattagatattaggtatttacatcaactgctcatt

SEQ ID NO: 259727 - DNA, 475 bp, Glycine max
  unsure (1)..(475): unsure at all n locations
ntgatctaccaccaccaccgccaccatcatcttagttntctatttattttaatattactagtactttgttttctagtcgtgtatttagctatattatgacatttggataatttagtatttctttatttgcatggtttgattgaacaattatgaattatgttatatgactatgtgattnttatatatttgatctattcatgtttcttgcttcatgattggtttatattcttcaatgtatgtcttgtgaatgattaatagtatatggttgtcttatacttgttacgcactttggctttntgttgatgccaaagggggagagaaataggaattaaatcaagaactcacataagtaatcaacttaatntcaagtaaagcataaactcanaaacaaagggggagaataggaaaattaagtgagtgatctactatgaaaaagtgtgtgtatgtgtntcttgatntcagaagtgtcatcatc

SEQ ID NO: 259728 - DNA, 142 bp, Glycine max
tccatttttcaaagtttaattcagacagttctttgacaacatctgacatccagcagtattcacttactatgccgcatgttaaggacatcaaatgacgtcagttgcgtgatcatctggaagcctttaagtggacatctgtgac

SEQ ID NO: 259729 - DNA, 416 bp, Glycine max
  unsure (1)..(416): unsure at all n locations
actaagctttgtcatcacctaaaaccattttttaaggtccaacgcttttttatnggtccttttcgctnttattggttaaacatggacttttaaagcctaaaatcaacacatagctttgtcacctctttcaaaaataaaagccaagagatcattaatggtccaatgccttaatgttttctctcctttcaaaagaatcgaaagatcgtttaatggtccaacaccttaaatgacctttntaatcaaaaaatattctgcaaaaagaataaaaacaacttaaccacacgtttagttctcaaagaactacgtaggtttgatttccttatcacaattgaggaatacataggagcaagggaaacacccttgtcgaccacaaaaagataaaatatataaaaggcataaaaagacatacaaagcgt

SEQ ID NO: 259730 - DNA, 473 bp, Glycine max
  unsure (1)..(473): unsure at all n locations
ctcaagctcgtcagaagtctataccgctgatntaatgtaattagagcctatatattttctttctctnttgntttctgaaatctacctcattaaataaacaaagagatcttgtttcatctgttcttgcagttccaccttttctcatatcattttgcatgtttntgtttctttggtcttgtttggtatagatatgagggtcgattctttgaggatcctaacaacgagggtttgacaatcgattttgatagagatataagccaaacgataaacgaggaagaggaagaggacgtcctgtcaccatagttggagaggttggtcgctcangaagaacgtgaaatgaagccttaccaagaagaaaccgaattggtaaacatggngaccacggaggataagaaagaagtaaaggtaggaaccgatatgatcgcgcctatccgtcaaggcttgataacccttcttgaagagtatcaagatgt

SEQ ID NO: 259731 - DNA, 393 bp, Glycine max
ttcgtcttcttcattagcccattcttcttctggcttcaatacataagcgggctggccttctgtgtccagcatcttgagatgttcccagcctttgatgacagctttccaggttctgctatccagtgatttgaggaaggccaccatccttgctttccagtattcatagatgagtccatccagaatgggtggtctgttcactggtcctccttctttctccatgttcatcagaatatatctccctagatctcactcagtgatttagagtgcccgctctgataccaattgaaatcttgatactgaggccagatgtcgtaccggatgtcacgacatcactcttcagaacatgcacaatatatttgactgtatgaacagattaaacaagtaaataacaca

SEQ ID NO: 259732 - DNA, 474 bp, Glycine max
  unsure (1)..(474): unsure at all n locations
nnaacaccttcattcacacacttatgcatgagattctcagtatcatcttcttgagtcacattagtcacttccaacaaattcgcaattctagcgaacaaatcgtgcgaatcaacatccaagtagttcttggcaagaaccttgaatgcctcanagcggcaataggacaattcaatgtgtttgtccatcctacctgtcctaataagagcaggatcaagcttgtccacaaagtttgttgtgaaaataataatcctctctcccccacatgctgaccaaatgccatcaatgaaattcaacaaccctgatagagttaccttactattcttgttaccctcctcttcatcttttatactaagatcttttggttcctcttcctcacccctttcccttctcatgttcctctggccagtgagatcgagcgagcaatcaatgtcttccacaactataatagccttactagaagtctcaatcaacaac

SEQ ID NO: 259733 - DNA, 324 bp, Glycine max
  unsure (1)..(324): unsure at all n locations
gtcatcaagttatagcccanacaagacaagcatgatcaanatcaaagctttaatcaataaataacccttaactaanacagtgagagagataccaggaagaggggattgaaaatgagagagtggcacaaagtcagcaaagtgatcgaacttgaaacaagcatggttgaaggtggtgtaatgccaacacatggctctcgacaattctctaccacctggccgactacctgtaggccacttacatgggcctctgtgtggctgggctcttttgtttcgtcatggtttattggttatatcattcttcaatattaaattcattctctaaaa

SEQ ID NO: 259734 - DNA, 409 bp, Glycine max
gcttatcaagaatgggacccaatctagcatcattggtatggcgtgcgcctagagcagtttacatagctggcaaatgtctttatgtaaaaccaatattgaactattggttcaaccactttaacagtattttttttttttttttttgcataaagtgctgcacttgctagttgtaaataagaatttgtagttctattcttttccaattttcaatcccagataaacaaaccattcataaagttaacccccccaaaaaaaaagaagagaaaaacatccgatcttttgaccatggcgtaaggctttttctaatgagtaaaaaaagaaggaaaacaacccttcttatagcacaaggattcaaaagatcaggtttaggggtggctaaattttttaaaaacaattgattactcgaacc

SEQ ID NO: 259735 - DNA, 159 bp, Glycine max
tataactgagagatttattatatgtgacacacgtctggtatgcattacacccagactgcattacagtcatctctgtatgcgtgcttcctgaaggtgtcactcttaataaatcttttctcttcaaggaccgctcacttaactactcctttagatgtccgt

SEQ ID NO: 259736 - DNA, 406 bp, Glycine max
  unsure (1)..(406): unsure at all n locations
gcttcttgcgtagccgctcttggtgctcagaaaatcctcttaatttatccctcttattactagctatgttgaattctttagttcctgaatgtacaactttcaaattgttggtcgttcccctctttgttntatgcaaaaaatgaaatcaatatcaaacaaaacatgcatacaattgtcatcgttattgctacttgaaccataaggaataacatctaaagaagtacttccaaacatttatttattntttttggtacttnttgaattacaatttgacttcaatatctaattntttaatgtacttaggtggaggatgttgacaaagagaaggagaaggaagaaaataatttacagaagattaacgaagtgtcacatttttttttcctcagcaaggaagtgtcacatgaat

SEQ ID NO: 259737 - DNA, 409 bp, Glycine max
  unsure (1)..(409): unsure at all n locations
ctcaagcttctccctcattntnctataaatatgggaggagggattaacttttatgtttaaccttcctggtatctgagattcacttaaaattagtgagaaaaactgtttccgtgaagaaaatccaagtcgaggtgcttccgtaacgcttccgtgacatttccgtgggtgatttcgcgaagattatcaaccgttcttcgtcgttcatcgttcgttcttcgtcggtcttcgatcttcaaccggtaagttcccaaaatcgaacttttcaattcattctatatacccttagtggtcctcatttgtttcgcgtgcttttattttcatttcattttctcgcttaatcaaaaataaaataaatngtcaccgatcattcgtattgaacatcctttaattcctgttaaatgaattttga

SEQ ID NO: 259738 - DNA, 367 bp, Glycine max
  unsure (1)..(367): unsure at all n locations
gcgatggagcacaacaagatntccacatccactaagcgcgcataaacccaccatcccctgctgaccacctccaactgagctcacgtactcccacgaagcccatatcctggattctctcaacaccgggtccccatcaatcctcccaagcttccacaacatccaagctaaacaacattcagacagcacacgctatcacagccaagcaaaactgagcaaaagcagaaaactctgctcaaacaccaaccaaaatcacagctcttctcacttaaagaccccagtaacaataccttcgatccaatacggtaaccgatggaacgactccaaaactttactggaagcgtatagcacataagcctacattgcgacc

SEQ ID NO: 259739 - DNA, 450 bp, Glycine max
  unsure (1)..(450): unsure at all n locations
tgagttccacagttctattatgtgataaaatagacataatgttttctattgtgataaaaaagaagtcaaaagagaanaataagataacaaaaaaagttagcatatttttgcgagctatatatagtaattaaataaaatatttatatataataaccatttataatttgttaattatataaaatgtaagatgatttttttacataaataacccccttcctctcttaattttataatttgttgaatgtgaattattttaccaataataaccttttcttaccatcatatttttttaaaattttatgttacaccgctagaaatattctagctagaaacaaagtgctgcaacgattaaaatatatntattttgctcgtctatgaacttaaaatatatgatgtttaagtatataatggaacagtaaataaagtatatgaataaatacaggaatcaat

SEQ ID NO: 259740 - DNA, 349 bp, Glycine max
  unsure (1)..(349): unsure at all n locations
actaagctttagaaatcttcggtgtctggatatactggcttctctctatgctgatttggaagaagctggggcgtttctcacagataggacatgcatgatgccctttcacactgtatccacttaaatttncatatgctggaagatcattaatagtacaaaacaccattgtgcgtaacctgaacgtctgctgcacatttgcatcccacacatctaccncttcttcccacaatagtttcaagtcttcgattaatggcgtaagatacacatcaatatcattccctggctgtcttggacccgcgatcatcatacacaggataatgtanttacgcaaaatgcacaaccatggggg

SEQ ID NO: 259741 - DNA, 351 bp, Glycine max
  unsure (1)..(351): unsure at all n locations
cttcttgttgggncatatagangncttcctctaaatccncatgcaagaatgcagttttaacatctaactgctccaagtgaagattctctgcaactactatgctcagaataactctgatggtagtcatctttacaactggagagaagatctctgtgaaatcaattccttgtttctgctgaaaccctttcaccacaagtctcgccttgtatcttcttctaccgtcagattcttcctttagcctatagacccacctattctgtaacgccttctttccttctggcaattcagttaaagaccacgtcttattcttctgaanggatgtcatctcatctttcatcgctagctcccact

SEQ ID NO: 259742 - DNA, 253 bp, Glycine max
  unsure (1)..(253): unsure at all n locations
acacctctatgcttcttaacagaactttcacacataccgagcacacatatcttacaacaaccttacctattaagcccttanaatgtcgtctctctattgaaatcncaaatcaacagaaaagtattctattgagtacaccacaatctcaacaatggagacgattatgttcatctgtagtagatcacaatcacattgtgggaatcattaatagctgatggatctaatagaccactgatgtcttacacatctaagt

SEQ ID NO: 259743 - DNA, 384 bp, Glycine max
  unsure (1)..(384): unsure at all n locations
ctttcaattcattctatgtacccgnggtggtccacattntgtttcatggtattttattctcggtgtcatttactgtntatacccacttttgacgtgcttaagccatttatttaagtcatttctcgcttaatataaaaataaaataaatttccaccgatcgtttgaattgtatcatccgttaatttcggttaaaatgaattctgaccgttcggtcgtgccgtaaccacgttggaaataaaaaaagagaggtgaaataataatataataataaaaaatacctctttgaaaataaagcgaaaaatcaatcggacgttttctctttgggatttctcattcttaattggattgactaataactaaagtgaaactaatatcttgattcac

SEQ ID NO: 259744 - DNA, 114 bp, Glycine max
  unsure (1)..(114): unsure at all n locations
atcatcaaagaaagctaagtctatgaacttagagtcgatnatggaacgagaagagaaaagagaattgtaccggatacgttgntcttccgaggaaaacaacgtaggagatgatat

SEQ ID NO: 259745 - DNA, 491 bp, Glycine max
  unsure (1)..(491): unsure at all n locations
ccttgatactcagcttgatctacaccaccaccgccaccatcatcttagntntctattatgattaatattattattactttgatttctagccgtgtatttggatatattattataacatttgaacaatttagtatttcttttatttgcataatatgactaaacaattatgaattatgttatatgactatgtggtttttatatatttgaactattcatgtttcttgcttcatgaatggtttagatttttcaatgaatgtcttgtgaatgattagttatttatgtatgttntatatttattacgcactttggctttttgttgatgccaaagggggtgagaaatanggattaaatcaagaactcacataagtaattaacttaatttcaagtaaagcttanactcaaaaacaaagggggagaatatggaaaattaagtgagtgatcgactatganaagtatgtgtatgtgtttcttgattcacgggtgcatcatca

SEQ ID NO: 259746 - DNA, 505 bp, Glycine max
  unsure (1)..(505): unsure at all n locations
aaactaagctttggcgaaatataatggagtagacccaacccgtttctattattttcttatttggcgcataatgtcaagcaaaaatacaagaaaacaaaattctgcaaattttaaccagacacacttcgatagataatagctttgtttcttccttgtgaatcctcccaaaaaatattatccttgagaacatctttgagaaaccagaacaggtcgttcaattctatcaagcttttcatttcacaacattacagtaatccataaactgtaccaaccaaaacataagtgctttatataattaaattntcatgcttcacataccaaactgaagagttaattgcacatattgttaanagttaacaatatccaagaactttgaatctccagacaataatgcagggaaaggaactgatctagataatgaatatcacatgctaagaggggagatttcagctataattaacctaactgattcanaattacacaataagcatgcatggatttggat

SEQ ID NO: 259747 - DNA, 450 bp, Glycine max
tcatcttcaattcaagaagaaagtcataagaaacaagacttgtttgatatagaagatgatgatgatttcagttccttcataaagagattcaataaattcctaagaaacaaaggaaatcaaagaagattaaactttaaaccaaagaaaagaggagaagattcatcttctattccaaagtgttatgaatgtaatcaactaggacatcagagagttgattgctcgagtttcaagacaagaatggaaagatctgagaggaaaaccttcaatgataagaaagcaaagaaaacttacatcacttgggaagataacaatatggattcattcagagactcagaaaatgaagtcgtgaatctaagtcttatggcaaaaaattatgaaagcgaagaagaggtaacatcttctaacaataacttagttatgtccttttatgaacttcaagaatcattcact

SEQ ID NO: 259748 - DNA, 461 bp, Glycine max
  unsure (1)..(461): unsure at all n locations
cgtcaagatacgtgatcttgaggatgaggaggatcttacgttctnattagtgaagtanaggggtgatggcttgaaggcattttctccttggccagttgttgatatccctaatgatgaatttgaatcatggtgtaaaccatggaagggctatgtggttgttcatgtcctaagaaagagagtatggttcaaaatcattgaatttaagataaaaaaattgggctcatgcgaaaaagattcgaattgtcgacacttgatggtttcttcctggtgcaatttactctattcaatattataaacatgctttgtttgagggcccttggatggtgggggatcattacatggtggtgtagagatggcgaccaactctcattaagaattctaagatcatgaagaagcagattggggttngggttcgttttcctagattgactatgaaactatagcatgaggcattcttactc

SEQ ID NO: 259749 - DNA, 404 bp, Glycine max
  unsure (1)..(404): unsure at all n locations
acaaaagcttatagctctctcttctctgtatgcctatttagtatgaacacaggacgttcttcttttaagtgctcgataaacaagtatggagttccaagtgagaaatataaatgggttcctaagggaaccaaagaggttgcttaccaataaagacctaacacaatttgggtacctaaatcgaccttctagatctgctatgtaggtgtgcctagcagttgaaagtcaactctggtatcttgacaatatctgctcaaggcatatgacaagagacaagtctnatattttgtctctaaaagttaaagaaggaggttttgtcacctatggagatattaacaaatggagaattctaggagaacggtatatttgcaacttcctaaccactttcacatagcagcgcttataca

SEQ ID NO: 259750 - DNA, 389 bp, Glycine max
atgtatgtgatgataatatataatatctactttaagctagcacacttgtcgtaactaacacaagtgactttgaggtgagtaagcttgactagaactagaagttttgaatatttttatcaaaacaacatgtatcatttatgggagataattatgttcaattcaaatgggataagatcaccagtgacaaaactctctttatgcaggtatgtacattctaaaattcggaaatcaaatttttcggtttaagttgaaaaatttttcaactactttatacacttagtactataagtcgtggatctatgtcctcataaatgaacaaaacattagaacaagtttgaattgcctagctacaaagggttgaagttggtcgtgctaacactaaactctat

SEQ ID NO: 259751 - DNA, 439 bp, Glycine max
  unsure (1)..(439): unsure at all n locations
tgaagttgagcaccgtttaccttggtggagccttgttatttctggcgcattgaagtccaaatatcacgagcagtttctttgttcaagatagtctccaagattgtgcgatcaatggcttggaaaagatagttcttggctttaagatctttgagtttgctatcatcagctgctttgctttgttcggcagtggaatnggcaggagctaccaccgatccatcttcaataatgctccaatactccttagaacgaaggagattttccatcaacatggaccaatgatcataatgaccatcaaatctgggaatagagggttgcagaaaggatgattccgccatggatttgcagaaagaaacgaaacagaaaacgaaagaaccaggaagacgataacagataacgggtacaatcacacgccgtgtacanactgcgggtggtagcactc

SEQ ID NO: 259752 - DNA, 296 bp, Glycine max
  unsure (1)..(296): unsure at all n locations
gcacgagatgcactgngagcaaagagggctttctttggatcaacatatnttgtttgccacatcataaaaacactaaattattatattattcagaacactgttgtgagatcttaatttggactatgtctttgtgaactttttctgaaaattacaagggatttttatcagcaaaattcatttaaattagtactgtaaacatttaaactatagatctacactgtgtgagtagtgattacttaaagttaaatattgcatgttgcatcactaatgtatattgttggcgaccccatagagtt

SEQ ID NO: 259753 - DNA, 440 bp, Glycine max
  unsure (1)..(440): unsure at all n locations
accccacagtgaagcccnactgtgttctttgctgttagcgctaagagcgaattcagcgtgaaaatatagttacctgaaggctatataaggaggaagaagtataggggaaagacacacaaagtctcatagctatccaaagcctcagtctatcccttagggaaaacccttctatgttttttatccatttccctctatcttgctattagtcatccaaccccttctttcattagctcccgaagtgtaaagcctctaatgactatgagaggccaaacccctttttgttgggagcctggaggccaaactcttgtaatggaattcttccctactatctatataatgcaattatgtttctattattcttctatatggtctttctggtattatggcatgaccacccatataatgtttagacggtaatgaatagaagaatgacttatttc

SEQ ID NO: 259754 - DNA, 373 bp, Glycine max
  unsure (1)..(373): unsure at all n locations
tcgtgtgtctgttggtcatagcacacttgcagcattagttgtttaaaagttagtgctcctcggggcatttagataattagttccgtatatcttattgttttctagttatttgattttgttgctagatgccaaattatcattcttgtctttattatattatttatcttactgatcacaataacaattctgatggactattttcatttgtcagatttaagganaagaattatggtagtagtggtgctacctctggtttgacatcaagtcttgcattcacaccagtgcaggttagtttcacttttattgtttctgtagatgttctcctgctctttangaccataattagtataaaagttgtcaattttgtgaagct

SEQ ID NO: 259755 - DNA, 499 bp, Glycine max
  unsure (1)..(499): unsure at all n locations
tatgaatgatatgagtcgaactcattngctctattcaatttctatttataattattatccatactttatttatttatttattttataaaaaaaacatttaatgtgaatttaattaattaaaacacatcacttaataaatcattaaaatttataccttaattatatttttgtattaaattaaataatataataatgaaggaaaaatccctcgagaaaaacataatttgtagaaatgaaccactcctctcacattaaagttctaccaacacatgtatggngcgtgtacatatattgtttttatcaggcgtatgagaatggttctatagtacccttttgagatcctatccatngttatccatattgatgatccatttttgtgttcaagagctactcatattttntatactagtaataggtattaatttatttgtaatanaatactcatacannatgtaaatggttntttagaatactntttaaatgtataatataatattat

SEQ ID NO: 259756 - DNA, 375 bp, Glycine max
  unsure (1)..(375): unsure at all n locations
tcttatccaaagctcatcttggtggcgaagctcattcttctctggcttattccctagtggatggtgcctcctctcacctcttctcctttgtcttccgctgtatctccatggtggaaaatcaccattaaaggacctaattgaagctcaaagatccagccttcatagaagccccacaagcaagcttccatcaagtggtaattagagcacaagagcttcatgtaggtgctccttaaacctccattaattttttgctttaccttctcttccattgntgtttcttcatttttttctccatgtatctcctcacatgtcttgtgctaaatgtttntaacatgattctttagaatttcaccgattaaacttgctatagaagct

SEQ ID NO: 259757 - DNA, 411 bp, Glycine max
  unsure (1)..(411): unsure at all n locations
attctatcactggtaatcgattacaggattctagtaatagattaccagggagtaaatactctagtaacttagaaaaatntgagaaaactcttttgtaaaaaaaaaattgtgcgatgtttggtttttgaaatatccatttcactatttcccttgtgaagtcttgactctgtgcttcttgatttcttctcttgaatcttgattcttcttgatgtctcttcttgaatcttgaaatcaatcttgaccttgaacttgttgactcaatcttgaaatcattattttgggttcttttgggctntttgtcatcatcaaaactacttgactcatacttgattcatcatcatgaagcttgcttctacaatctccccctttttgacgatgacaacccttgaatccagagacacatacacattc

SEQ ID NO: 259758 - DNA, 406 bp, Glycine max
ctgacggctattcaacgctctccctctcttttctgctattctctgcttataaaagggctcactgacgacgcgctgagagtgtgcctgcgtgaaatattcccttccagattccttctacccgctaagcacgttgatgcctcgcttagtagatgacactcactaagagcattgagcttgcttagtgagacatcaactttagcacttcttcaaaataactcctttttgcctgaaattgaagagaaattgacattaattccatacacatggcttctactaagcacagataaaaacaacgcataatctatttacaatcctacacaaagaaccatatattggggaagatatatacattctgtaaagagttcctatacaaaagctagccgtataagacgactaacacaatact

SEQ ID NO: 259759 - DNA, 430 bp, Glycine max
  unsure (1)..(430): unsure at all n locations
ctgagcanattcanacgacaataactntttactcggatgtcttattgttgtcccgtaatatatcgagacgctcgaaatggaataccgaagctctgagcaaattcaaacgacaataactctttactcggatgtcagattgagtcccgtaatatatcgagacgctcgaaattgaataccgaagctctgagcaaattcaaacgacaataaacttntactcggatgtctgattgagtcccgtaatatatcgagacgctcgaaattgaataccgaagcgctgagcaaattcaaacgacaataactttntactcggatgtctgattgagtcccgtaatatatcgaaaagctcgaaattgaatgttgaagctctgagcacattcaaacgacaataactctttactcggatgtctgagtgagtcncgtaatatatcga

SEQ ID NO: 259760 - DNA, 409 bp, Glycine max
tccatcactctctctccctctccctacactcatcttctcctatcttcatgctcttacccatggcttcctatgccggtgagctatttcttgactcatcttttccttgaagtggcgtctccaatcatctttcttccatctccattctgctaccgttaaacttcaagaagcaagggactccattgatgaagatgatccaaggcctatatgctccacattgagttacattaggaaaaatacttgtttgaaaatgtaaacaattacaaaacatattatatatatttatatattttaaattacacacacacacacatattcaagttttacttatactaaaaaatacttaaataatgtatgtggttactagaatatatttacaaactaactaattcatctactagagtcaggactg

SEQ ID NO: 259761 - DNA, 516 bp, Glycine max
  unsure (1)..(516): unsure at all n locations
aagctttnctccagtcactctactacggtttccaagcattagagttataatttattgatntgagcctccatttcactgtatctatgtaagggacatttctttcacgatagacattgtttcataaatcccaatagtggagatgtgcgataatgagtttcgaacctggtattcaaatttcacaatgttctaactgttaacaagttctggatcgtagttttactgagacaggtttgggtgtatgcaggataaaaagaactacgtgaaagggacatttctctcgccccagacattatttagcaaatcctagcggtggagatgtccacaaatgggtttcgaactggtgttcaaattccacgatgatccaacagttatgggatcatagttttactatgataggtttgagtgtatgcgggataaagagaatgttntgggagagggggaatggaaaacgaatttgagacatgataaaatgtatagatgtatcatatattgtaacactggtctaatatgttctat

SEQ ID NO: 259762 - DNA, 351 bp, Glycine max
  unsure (1)..(351): unsure at all n locations
acactactcttaaacagaaatggtatatattcttctnccataaatacaaacatcaatgtaaatntagagcaagcttatgcgccatattncttacgaacgttcacttgcacaagacattctattaactaagaaaaatgcacccatatacaatcaaggcagcttcgttacctagaataattacatgtacttccaaggtgtatntgttacttacatcacacacatctccttggctaaatttacatacatgcatactcacaagcatttgngggtaccaaaaangcacatgtgcacatcttggtatttnaatacctatacatacacaaacttcatgatgaatctngactatctaca

SEQ ID NO: 259763 - DNA, 479 bp, Glycine max
  unsure (1)..(479): unsure at all n locations
tgcggatntggtcttcaccggngaaaggatcaaagcgggtctgattagaggcattattgatcatcctgctttgatgaatgagaaaactgggacaaatgaagaggatgagaatgagggagaaacccttgctatgactgccattcctacacagtcaaatttcccatcagtccaacaatgtcattactcagccaatatcagctcctctcattacccatcacccaatcatccacaaaggccatccctaaatcaaccacaaagtctgtctaccacacttccaatgacgtacaccacctatagcgcataccaaaaaggaattttgcagcaaaaagcctgtaggattcaccccanatttcgatgccatatgctaacttgctcccatatctacttgataatgcaatggtagccataaccgctgtcaaggttcctcaacctccatttttccgaggatacgactcgaacgcaacatgtgcatatcatgg

SEQ ID NO: 259764 - DNA, 258 bp, Glycine max
ctgcctcctcattttgcaggaggttttgtcggaataacccctcctggctttctcatgctttaacagctaatagatgggaagtcaaactcacctaatgactaaactgtttctattgtttaagaggtattgccattcttctttgtactatcactcagggttctattcctatccacagaactctaggaatataatacactcttaaaaaaaaattgatttgaaatactgctttcatatggtgctcctatttttaacttctaa

SEQ ID NO: 259765 - DNA, 444 bp, Glycine max
  unsure (1)..(444): unsure at all n locations
acacttgaaactcagctataaccactagctattagtaatnaatctttcttttcttataacntnnaaccatcatacttaggacaataatttaagtttttctttttactttcttagctaccctaattatataattaattaagatttattatttcctttttaatttttgacatgtttcttttttaatctatgttctactttgtatataatacgatgtacaatagatatgtacatacaaatagaaaataatcatctattattccgtccatgtttcttgcattggttcactattttcttcctactaccctcttcttaagaatttttaacgaaatcgtaaaattatttatcaatgtgggtgtttagaaaattattacctttagagtgattttgtcactacgattgggaagtgccacttagtagtgcatctagtggtttcattgtctacat

SEQ ID NO: 259766 - DNA, 443 bp, Glycine max
ttacttatttggtttatatagtaattaaaagtttatgtttaattataggttcacacaaagagaagaaaccgcttacatcaacagaaaatgaatgacttggtttatgtgatgtataacttgaagttgaaaagtaaacaaaatagaaaaagtattgctcttccatttgatgagattgagtctgacgatgagtggacaactaaagagggatataatgatgaggatgagaaacctcaacgtgaaggtgatggtggaaatgttgaattagtgggagatgttggaggaagttcagatgaaccagttgtagaagatttgatctagatatctaatttggtggaacttgggatgatgcacaatttgataacaccttgatgatatggagacgtgatgaaactgtatatcatgaaatgacctatagagaatagcatggtcttgacgactctatg

SEQ ID NO: 259767 - DNA, 268 bp, Glycine max
agggaaaaaggaaacctctggatgcttctatcgcagttcccaaccacatgtttactaccatacaactctctaccacaccttatccaagcatctaatacccaagctgtacgactcatgacatcacttaccaccaaaccaccaaatgattgacagaaccgtaataccaatcggcatgcgctgtcctttctgactaggagctaccacagtatactttttcaatcatcacaggctgtagaactggctctactgagttaacagcagcatactg

SEQ ID NO: 259768 - DNA, 338 bp, Glycine max
gcacgcgctgcactctgatggtttaacttactacaaccatttattttacactaactcctgatcagtgaacttgtgcctgacttactgaaaatatggaatggcactcaatttgagctaattttactaaattctaactctgaccaaaaataaataataccagtgattggtaaagaaaaacaaaatccacagtgttgaaatcattttgaaaagtaaagaagggctgtgttggtcaattgtttatgtgcattttaccactatttaattcattaaataaggaacagcccactaagtctggctatgtgttttacatcttgagcattagttttaagcactgttgg

SEQ ID NO: 259769 - DNA, 451 bp, Glycine max
  unsure (1)..(451): unsure at all n locations
gacacttgatactaagcntgtatgagcttcacaacatagaaaggcgaacatatgctcttatgggctatcaaaggaattaattcaaggtaagtccatttggctagaagtttataagaacaaaattgcctaaatcatttccaaatatgcatgtgaactatgaaggcatcaacaagaatcaagccaaggctattgtgcaagcaatcaatggggcaaaacaaaccacaagattatgatgatggatggctcanattctcacaaaggtaaacttatcactttcaaattgagctttcaaaactatcatgacatatagaggaaaaacaagggtttcaaatcacaaaatgtcaagagacttttattntcagaacaattacccatttcttgagcatattctataattcanaaaaaatatgcaaagttgtacatgcgaacagaattgaccaaaatattaaac

SEQ ID NO: 259770 - DNA, 386 bp, Glycine max
  unsure (1)..(386): unsure at all n locations
tcctaaggtccctccaccagtaggaaagtcccctcttggctcgatcagactgaanatcagaccagcctccatatttggaattaataattctagcccataactgttgctgatcagaagctaaggcccatatccattctcccagcaaagctatattgaatttggagatatctttaatccctagaccccccttagccttgggaaggcaaacaacctcccattttacccaaggaatgttcttatggtcatggtctcccccccacaagagattcctttgcaaagctaccaatctatggactaccctttgaggaatcttgaaaaaggataagagatatattggtaaagcattgagaacaaagtttattagagtaatcttccccccatggata

SEQ ID NO: 259771 - DNA, 194 bp, Glycine max
ttgcgctcccggctgtcgacaatctctactgacatcttcaccattctgcacactctctattatacatatccgcgttacacctcacttatggaccatacctccttaaattaccacaccctccctaatactctgtagattacagcatcttccaactaactctcaccgatgataattcttcactcgacacaccatgg

SEQ ID NO: 259772 - DNA, 439 bp, Glycine max
  unsure (1)..(439): unsure at all n locations
tcaatgttaatgtcacatcagataatgtcaaannaccgatattattattgagattgtggtatggcgtnngaagggacatccttggccagagtggatttgattgggatggcactaagcacatgatcacagttgaaaatgaaaatgcttggaatgaatattgcactgtaagtattctttaatatgttgctatntgttattcaaagtagattggatttgactttttctttgttttccagtcgcataaatcggctaaaccgtttcgatacaaggtgcttcaaaatcgggatgatatagtggatttgtgtgctaaagatagagacaccggccatggagctgaaactgctatggatgctaatgaagcgatgagtagagaaacaaatgaactggaattcatggggttaggtgctactaccatagacttagaagaaccaagctctaa

SEQ ID NO: 259773 - DNA, 202 bp, Glycine max
  unsure (1)..(202): unsure at all n locations
tatgccggaatgtatatgaatgaatgccgagaacacatttctattacctgcttttgccatgtcaatatntgttttagtgaacggttatgacccacatggtgctcgtgtgcctacacatgtactaaaatgtatggaagttcacctccccctctttgtttgtttgtaaggaaaccaagatgacaacataaacaatggttgcatt

SEQ ID NO: 259774 - DNA, 426 bp, Glycine max
  unsure (1)..(426): unsure at all n locations
tcggaagaaagtgatgaggtacaagtcctataggcagagcttgtattttctgttagtcgaagagaagttcaagtccatagccatcaaagtctgataagagtatgatgaactaagggatgtcaatatggccaccgatgaagccttggaatgagaaaccaagaacgcccgaaaggaagaacacgaccaaatcaaatttttgaggggctctatatggcagcaatagtgagctcaaactccgaagaggtgaaaggaatcatcacgggtcaaaggcatgatctggaaggacgagctaaaggcttgccttatgtctaaaagagatttgtcccaacagctaaggtgagactgaanggaatatgtgtgccatcatctataattgcaaagagaagctaaatctatcggcgactcatgagcaaaggctagaggatg

SEQ ID NO: 259775 - DNA, 457 bp, Glycine max
  unsure (1)..(457): unsure at all n locations
ntgcttgcanaaacttctgctagcattacaacagntaaagtttcgtatgctcagctacagaatgctcagactccttatgaccctgatggaattcaagttgctgatcaattgatagtctcagagttcaagaccttgtctgagctaaagcaatgttacttcaaaaaacaatttgatcctttaccagatagagcaattcttgcagctaaattaaaggagctgcaaagtgtcaacaaaacctttgagattacagggaagaagttagaatcgcaggcagggctcaaggactctgagattatatttctccaagaaaagctagaggaagctaatgtgcacaataagtcaattgagaagagggtaaatcaaagtggatcattatcagttcttgataatctccatatgtcaggactaagtcctagccatcttgtcacctgtcttcgccacacagttaggtccattc

SEQ ID NO: 259776 - DNA, 412 bp, Glycine max
  unsure (1)..(412): unsure at all n locations
aaactcaagctanagtatgcccgagtcattcatccctatgaagagttgttgtttattttcgatcgaaattgccattccctgcgttatggggttgaaccaagctcatgctttttcgaanaaagttcatcatatcaagttgaagaatggaagtaactatcttgcaaaaattggggcaaaagatgaatcgagtcacatcactgcttcgtctactgccaaacatatttaggattgttgatgttcttgttacttccagtttcaccttgacaaagatgtcatagaccatgtggaaaatctaaattgattcaaccccatatcctgcacaatacttcaactgtacatcattcgcatacatccatgcttttcattggttgcattgctcattgcattctttccttgacaaagagagatataa

SEQ ID NO: 259777 - DNA, 324 bp, Glycine max
aagacgcatgagccactggtaaaactaactctccaaatgatagcctccgcatgaatggccccgatgaagcttgcctcaaagaggtccatgaacgacaaggcggccgaaagaactagttccgctcctgagtacgacagtcactcgcttaagagcgctgtacaccagcagcgcttcgaagccattaagggatggtcgtttctacgggagcgacgcgtccagctcaaggacgacgagtatactgattctacggggaaatacagcgcccgcggtgggcaccactggttactactatggccaagattgatccacaaatagtcctctaat

SEQ ID NO: 259778 - DNA, 480 bp, Glycine max
  unsure (1)..(480): unsure at all n locations
tctacatgttgttcatgttgctcccctatctctaactgtggtgtaaatgagtttaaagctagctcacaagagcctcgatatagtcaaggtggcaaagatgatccctatgtctataaactattatgttttttgataaatatctggatgaagtaagagatagttaggtggatttggatgttttaagttggtagaagctaaactcangtccgattccatttcttgcaagcatggcaagagatgtgcttgctatacatgtctctattgtggccttcgagtcttcctttantagcgaagcaagagtgttggatctatatcatagctctcttactccgcatatggtggaagcatttgtttgtacacaagattggatgaatagaacatcaacaccattggctttaaatgaaaatgaagaattcttattgtctgagagaataaagaaggcacaatattgtcgatgtactattatatattatatatatg

SEQ ID NO: 259779 - DNA, 158 bp, Glycine max
ctcactgaaagctgcatgctatggttttccattttctctttcaaacatgaattatctgaaatacttattggtaggggtcctatggtaccagttgatggatatttggtcagaccttctgcttaagttctgggtaatgacccacctgtgttgtgacccat

SEQ ID NO: 259780 - DNA, 402 bp, Glycine max
  unsure (1)..(402): unsure at all n locations
ccttagntncactttggttattattctattgatcgaaggaaacttccaaagaaaaacgtccgattgantttcttgattattttattcaaagatattttgattattttattatctattttcaagatattttgattattctattattattctttcttttttggtttaaccgaggttacaacgtgaacgatcggttagattttgttntaacagtgattaaacgagattacaacgcanatgaccggttgaaattcattttatcatttattaggtgagaaaacagcttanatgatcagttaaagctccgtaaaaacggaagaaaagaaaatcgaacatgaacgaagaaaagatgaaagccaataaaacaagaaatgaattgaaagtcacgaattcaatacttacccg

SEQ ID NO: 259781 - DNA, 474 bp, Glycine max
  unsure (1)..(474): unsure at all n locations
tcaagaaanagatggcctcagcaaattccttatttccagatttggtttctatcaatagacctccaatctttaatggagagggttaccactactggaaaacccgaatgcaacattttattgaggcaatagatctaaatatctgggaagccatagaaatagggccttatatacccaccacagtagaaagagtatcaatagatggtagttcatcaagtgaaagcataactatagaaaaacctacagatagatggtctgaagaggatagaaaacgagtacaatacaacttaaaagccaaaaacataataacatctgccctgtgaatggatgaatatttcannggttcaaatcgtaagagtgctaaggaaatgtgggacactctttgattaacacatgaaggaactacagatgttaaaagatctaggatgaatgcactaactcatgagtatgaatatttagaatgatgcgaatgaaata

SEQ ID NO: 259782 - DNA, 493 bp, Glycine max
  unsure (1)..(493): unsure at all n locations
tgttccnctcaacanatattagctntgcaccaattttntctctctctaacgaatatgaatntgattcctcttattaatacaagaattttatcgataatatacaagtattntgtatttatgtaaatatttttttattcggtgtgagttttatctcacctaaacttttcggttatgaaaaaaagcaaaacttattgcctggttcttggcagcctangggaggtaaaaccgacattcctattacaaagatagtatggaatactttattattntttagtaaatataaataattttaaattntagttagttacttagtattaattacaatttctaatttatcataataagatatatttggtggctganaatcctcatgtctaagatcgtgtatcataagatcgngtatcatgtcctttatactatctttgatttctactttaaccgggtcactggatcagacacaantcatcatgtcatatntattttgtataataaa

SEQ ID NO: 259783 - DNA, 321 bp, Glycine max
  unsure (1)..(321): unsure at all n locations
agctgcggtgtatgatatataaatgatattatntatgttagattttgtatataaaacccctgcatatctaattttatgagaatatcttttcaaatgttttcattaattaaagatcttgctttttaaattaattgaataaaatcatctttctacttatttaaagaaaatatttttttaacaatttaataaattaataacttaatttaattaattttttttctagacaaagcactgaaacaaacttgacggtaaacagttgattccctcgattccacgactatttcgttctccaaagccggcaaataattcaatttcaaggat

SEQ ID NO: 259784 - DNA, 412 bp, Glycine max
caagggatatgcgtccttggggcatgctttgttgtttgtcttgtattcagattcagtgcacatatgccatttcctattggccttctttaccatgataatattggccaaccaggtcgagtatctgacctttgtgataaattgagctttgagtaacttgtcaatctcttctctaactgcctttcgtcattcttctcccatctttctcttattctatgagactggtttggcctgagggcaaatggccaatttgtggcatatgatgctaggatggatacctggcatattagatggttgccatgcaataaatccgcattcctttgtaagacttcaactatatgtctctattcatgattagtgaggtccctactgagttgagtgcattgtctatgatcggggtcaagtttcaacttga

SEQ ID NO: 259785 - DNA, 450 bp, Glycine max
  unsure (1)..(450): unsure at all n locations
ctaagcttgaacgcgtagtcgtggaccgccacgaatatcttctgtattgttcttatttgcacagnggccagagatgcatgggagatcctgaatatcactcatgaacgaacctcctaagtgaatatgtccagattgcaactgttggccacaaaattcgacaatctgatgatgaaggaggaagaatgcattcatgacttccacatgaacattcttgaaattgccaatgcttgcactgccctgggagagaatatgacagatgaaaagctggtgagaaagatcctcagatccttgcctaagagatctgacatgagagtcactgcaatagaggaggcccaagacatttgcaacatgagagtagatgaactcatnggttcccttctaacctctgagctatgactctcggatagggctgaacagaagagtaaatatctggctctcatgtccaatgat

SEQ ID NO: 259786 - DNA, 316 bp, Glycine max
atcgaattcgatctgagtgtagtgttctctaagctttcgcatgattacaatttaatgggttttccttataaaaaaaaataaagcttaagacgggagtaaaaacatgcaaaaaaacagttaaatttatgtaacaggagtgcaaatgctctaatagatgaacagatgcattgaataacatatagtatgagtgaatcactgatatattggtacgcgtatatatatgtatgcattatttttcatatacagatataaatttaatacatcaaacattcttctgttctacagtatatatttaaatactctttgttataattcc

SEQ ID NO: 259787 - DNA, 437 bp, Glycine max
  unsure (1)..(437): unsure at all n locations
acatgggatgagacataatcaatganaactttgttggtgtatggcctcacgactgaaaccagaggtatgtgtgaagaaatctaaatagagacagaggcaggaaggttcacacttgatgctgtcttgttcgatttggaagatattgatgttattttgggtatgtcttggctaaaaactctatgggtaatgacagtagattggaatacgcagataatgaagtttgaaacagaactgggaacgaaaaccttgagaggagtaaatcaagaggagtctttgtttgccactttgtgtggggtacttgatgaaagacaggagtagaaggagaatgggctgaacagtgagcagcaatgagctctgggagacattcttaccagttgtgatgatgtctntgtggaaccgaagggattacctcctgttcgtgtgaaggagcatacaat

SEQ ID NO: 259788 - DNA, 339 bp, Glycine max
  unsure (1)..(339): unsure at all n locations
tctaacttatacaaatgaactctgtaccactgtaacaagtgtgctcaaatctaagaagtggtgaataagaatacaactatctccaataaaatctatntactnttattcagtacaaatccttataatgactttaatatgtcaataaacatctgatataatatacacataataataaagagttagggaagaaggaaccgattgctggtgccacttgctcgcagaccacaccgtgaatcatattgaacttacattaaacagaatctcttggtaatttcaaaactgctatctaattagaagaagattttgaaaaattacacccaatcttgatgaggtgcagat

SEQ ID NO: 259789 - DNA, 399 bp, Glycine max
  unsure (1)..(399): unsure at all n locations
actaagctttagtatgaggtgttaggagaacttcattttctattctatattatctaccaccaagagcagctaagtattgcatagcaatatttgttgtctctgttntcccagatccactctcaccactataaaaaaaattctaacagcgattattaacaagtatactagtgactataaactcttattaccaanaaaaaatatgaggttaggaacatgtattaagaggcgtgcataaaacaaatcatctaatgtgctgagtgctgaccttatgataatggattgattcgcttcatctgcaatgtgcaacatgcaaatagaaaaactttgtatcacacaactgcattatacaaagtctcaaacatttgaatttggaggacaatcttagcatgacattcacta

SEQ ID NO: 259790 - DNA, 424 bp, Glycine max
  unsure (1)..(424): unsure at all n locations
tgaaggcgtgtaacccaccatcctctcatagnagaacactattaatgtgtctaatatcattggtatcatctccttctccaccattaggggcgctacttgagctgctagatccctccacctttgggcgtactctttgaacgaatcatgctcctttttgcacaagttctgtagctacattctatccggagccatatcagaattaaactggtattgcctaatgaaggcaaccattaggtccttccaataatggactcgggaagtttccagattagtataccaggtgacggctgccccactaagactttcttggaagaaatgcataaacaattnttcatctttcgagtatgcccccatcttctgacagtacattntcaggtggttcttggggcaagtagtccccntgtacttatcanaatccgacgtc

SEQ ID NO: 259791 - DNA, 434 bp, Glycine max
  unsure (1)..(434): unsure at all n locations
ntcattccttattactacccacttttctggggtttctgttttctgcatttctggtacgtaacaaatttcccattccggttatcgaggagctattagatgagttgaatggagctaagttttattccaaactggatttaaagtctggttaccaccaagttagagtaaaggaatctgatgtccataagacagcatttangacgcatgagggacattatgagtttcttgtgatgccctttggactcatgaatgccccttcaactttccaaagtctgatgaaccatgtttttcggcccctattgagaaaacatgttatggttttttttgatgatatactcgtctacagtaaggattggaaaactcatttgttgcactcggaagaggtgttgagtctactgtcctcccacagtctagtcgccaatagaaagaagtgtcac

SEQ ID NO: 259792 - DNA, 504 bp, Glycine max
  unsure (1)..(504): unsure at all n locations
actcagctgaggatatggggacccgtcaatggggactatgtgtttatctgtcgatggngcaagtcgactctccacatccacaaatcacacataaatccaccatccccagttgcccaccttcaactgagctcacgtactcccacgtagcccttatcctcgttcttctcaacaccgggtccccatcaatccctccaagctgtcacaacatccaagcaatgcaacatccaaacatcatgcactatcaaaaacaagaaaacagggcagaggcagaaaactctgcccaaaacacaaaccaataccacagcttttcttactcaaataccccagtaacattctcttcgttctaattcgttcaccggtggatcgaactctaaattntactggagggccctagtacataagtctacattntgaccgttgggatctgctatataacgttcagaaccaaatatgtacaccccttntcacaaccagncatacacaacatgtgtctgacaaacacaa

SEQ ID NO: 259793 - DNA, 383 bp, Glycine max
  unsure (1)..(383): unsure at all n locations
atggtttatcaagctctaccttttcttctttttctgaatctgatcttctgatgttatatcagctattaggcacaaattggtttcctccttgtcttcttcatccgatcttaaatcttcccaggtactcatgagatttgtcttggttcttgacttgaaggatatcttcttgtctttggtcttttccaggtgtgggcattctgatttgaagtctctaggtttttttttactcatattagatgattagactcttctcagtattactttttttccttgaagaaccttttggatccactattgtctctccacatcttcctaattnttcttgacatgaatgtgcactcatcatcttcggtaattctttgctctagatcatcatcatagca

SEQ ID NO: 259794 - DNA, 483 bp, Glycine max
  unsure (1)..(483): unsure at all n locations
tacggacctataaaactcagctggtgaatcatctggcaagaaaaatgatatcagcacgtggactgtttaataaagagtgactaaatcctcactatataaagtgtgtgtatgaaaaataaacttcacactctattattataaaatttcaaaacaaaagataaagtgcttttaatgcgtgaaaattngaattttaacactaaagtttatgtgggttaaatgcaagtggacaattgaattttacttgttagatgaaaactcattgaatggatacattgaaaattattttgtttcaattctcaagagaacttatttantttagttggtgaaaatcttcaccatatatagagaagagaattagtggaaaagatacacatganaagagtgtgtgtgagaagaagaaattgtaaataaaatcactcttgtcagagaaacaacatctttgtgtgaatggtatcattntanggtgagttacaatcttgtaat

SEQ ID NO: 259795 - DNA, 215 bp, Glycine max
  unsure (1)..(215): unsure at all n locations
tctctcaataaatntcttgcttcagcangagtcatgtctccaanggctccaccactggcagcatctatcatacttctctccatattactgagtccttcataaaaatattggagaagctgctccgaaatctgatggtgaaggcaactggcacatcagtttttaaatcgctcccagtactcatacagactctctccactgnagtttctaatacttga

SEQ ID NO: 259796 - DNA, 415 bp, Glycine max
  unsure (1)..(415): unsure at all n locations
ctctanagttntctggttatccaaaccttgagaacaaaacttgtgctattcatctttttcattcccttctcccttttccaaaaagaatttgccatggactaaccgcctgaattctttttgtgtctctcttctcccttttccaaaagaacgaaggactaatcgcctgaattcttttgtgtctcccttttcccttgtcaaagaattcaataagacacagtctgagaattcttttgattcttccctttcccataaacaaaatatttcaaaggactaaccgcttgagaactttgtcttaacacattggagggtacatcctttgtggtacaagtagagggtacatctacttggtttgttgactgagaacaagagagggtaaatctcttgtggatcagttctagtggagggtacatccact

SEQ ID NO: 259797 - DNA, 397 bp, Glycine max
agactaagctcggcgttgagagcaaataatcccaaagaatgtacatttgctttaatcataacattggttactctgtgccacccataccctgaataaatatttctttaatcttagaatctaatattaagattcttctttttcatttatttaataagagccattttataaaactatcatttgctttcatctatatataattctttctcgtgtcgggacacttattttgggaccgaggtagtaatatcttttggtcatttaaaaaaaacaaacgaatcactagacattgaattgattcagtctacttaatgcatgcatgtacaagtgatccatgaatggaaagaccatttaaattatttaattaataaacaagcacattagcgagtgtccttcttaaaac

SEQ ID NO: 259798 - DNA, 439 bp, Glycine max
  unsure (1)..(439): unsure at all n locations
tccttgaaaagctagagcttagctacacacacccatctaatttctatatctacctctcttaacaaaaacatgagtagacataaaataagtccctactacaaagactactcaaaatgccctgtgatacaaggctaacatcctatactactagaatgaccaaaatacaacgcccanaagaatgaaaaacctattcttatacttacaaaaaagagtggatccaaccttgacccatgggctaaaaaatataccctaaggttcatgagaaccctatggcattctttagtagctctagcccaatcctcttgtagtcttctatccaatacccttgggggtaggattgcatcagtttccctcactcctacgtatccgcaattgtgattatgaaatcaagcctacgtagttctctaagaactaaacagtggttaagttcttcttatct

SEQ ID NO: 259799 - DNA, 475 bp, Glycine max
  unsure (1)..(475): unsure at all n locations
ctcagcttttatccaggcactctcttggtggtgaagctcctccttctatggtttattccctagtggatggggcctcatctcacctcttctcccttatcttccactttgtctccatgattgaaaatcaccattgaaagacctccatgaagctcaaagatctagcctccatagaaccttctcaagccagctaccattaagtggtatcagagcacaagagcttcaagtaggtgttccttaaacctccattaattnttagatttaccttctcctccattgttgtttcttcatttttctccatgtatctcctcacatgtcttgtgataaatgtcattaacatgattctttagaatttccaccaattaaacttgctatagaagctagatttgattntctatggttcaaatatcttgttcttgttcttgaatcatgaaatgtgttgagttaaggtcctttgagttttgttttgctattttgg

SEQ ID NO: 259800 - DNA, 394 bp, Glycine max
  unsure (1)..(394): unsure at all n locations
actcaagctcgcatcttatctgattttatgtcaaaccgattgcctcctttgttttctgtctacatgtncgcnatccgtgangctttgattctacatattccattatcgctcctcgccattcatcttccttcatacactgacttcaatgaatctttagactccaacctccattatcgttcattatcgatcatactcatattccgatgagcgactaatttcgctataggaacatatttggttatatcactacatgcctaattgattattatgaaaccatatcgtatgtagagaaagtggaaggagacactctagctgcgcttactaactccacaaacctacgatttttatatgatatttatcgcacataggattctttactatgttctctatctac

SEQ ID NO: 259801 - DNA, 438 bp, Glycine max
  unsure (1)..(438): unsure at all n locations
ggatgtgagaaagcgtggaagagtcagtcttcctatttttgtggttgaccacagagtggtacctggagatatgtcacgggagtcaggagaccttgcggatgtctggtggggtgctattgcccaaaaccaagcttgaccaatcccgacccaacccgggcatagtcagtcagtgagaacctgtgacgtacctaaataggcgagctcctggcagtcaaccaataaaagaacaaagaccacgaagcaaggaggcttgtgtggcggctgaccagctatgtatcttgtgtggtatctggaaattagcctctggtaatcgattaccattcgtgggtaatcgattatagggcttaaaaatggagataggatgttaaaatggcctctggtaatcgattaccaatggggtgtaatcgatacacanggtgatagggcactaataatcga

SEQ ID NO: 259802 - DNA, 499 bp, Glycine max
  unsure (1)..(499): unsure at all n locations
ntcccgctcngggatcttctctggcttcacctcatactcattatatntcgtcaccaggnngaaaggcacgtgcgttattagaaaatatgctttttacactggttatttatgactttctacatcggttgttaattgatgttgaaagtattatcgttaacattgcgtttttaaaaccgatgttaacgtaaaattaacaacatcgattatctaaataaccgatgttatataaaaagaattacaccaaaaaaatgtatgaatgttgacaattcacatcggttntaatacaaaaccgatgttaacttatacattaacatcgattgtctataaaaattgatgttaacttatacgttaacatcggttctgtataataaccgatgttaacgtcagtttcagtcataaaccgatgttgaaatatacgttaacatcggttnttgtagacaaccgatgtttacaatatttatgtctacatcaacttntaacagaaactgatgttaacgta

SEQ ID NO: 259803 - DNA, 175 bp, Glycine max
tctttactcattatcttgtggtcgggaatccttaatcatggcttattatctctgtatctctgctggttggtgaggtatgaaaatacataactactctgctcttttataattgaacacctgacagtttggtgatagcttatttctctaatctggtgacataactaattctccattg

SEQ ID NO: 259804 - DNA, 400 bp, Glycine max
  unsure (1)..(400): unsure at all n locations
cgtgcattcaatatcctgataaggatggcccatatgttctttatactgttactaaacaatcgctgcccaagtttcatggtcttgcaggtgaagatcctcataatcatcttaaggagttccatattgtctgttccaccatgaaaccctctgatgtcctggtagatcatatctttctaaaggcngttactcattctctggaggaagtggcgaaagattgggtatactaccttgctcccaagtccattaccagctgggatgaccttaatgttggatcgagtggcctcagaataattaagacagggggggttgaattaattattcctaatcctttactaattaagaaactactcttctaaggcttttactcatattgtagaaaatgacgatacaagagaaactc

SEQ ID NO: 259805 - DNA, 412 bp, Glycine max
  unsure (1)..(412): unsure at all n locations
ntagcacacttagcgcgacaggagaatctggcaaagcatctatatcagngtgctaagtgtagcagttggtatcatccangctcagcgcataactagcgctaagctcaaatccacttactcgcgctaagcgtgagggtggcactaagcgcaatgtcacggattcagagcctatntaaagcctattttgtgcagaattatggtacacaattacacaaatagcatttgcagagaattccaaagtgttgcaacctacccttcggcgggagggcgatgtggagctcgcgggtgcgtcttccatggaaggaaaatgcgcggagtcgccaccaacgtttattcgaggaaaacgtcggaaaaaccggataaggtgtggtctacgaactttaagtgtgaaaggttcaggagttgtatttat

SEQ ID NO: 259806 - DNA, 296 bp, Glycine max
tgcactgatttatcttcacttcttgctctacagctattctttcttaagcctttatgcaatcaaacaatttcataatctgcaagagaaataccatgtttcaaatatatagatgagcaattgggatacaaaatatccatatcccaattatattctaaagctatgttggaaaatcaagatgcacattttgtactaagactaataaccatacttaccaatgcttcttacacaaacaagaacatcatgccttataaaatcattatatgaatctcttgggacaacagcttttaaaatgtgct

SEQ ID NO: 259807 - DNA, 419 bp, Glycine max
  unsure (1)..(419): unsure at all n locations
tctacttatgtggcagggcgggctttcttcactttcttgtctccaacgcgagctntgaccactgttcttccttcccgcgatgcttcttttcatgtccgcctgagtgggcttatagcctaaaccatacttcccacggtttccttgagtatttatcaggctagttatgccgccgttgtctntgcctaaacccatcccgggttcataaccgttccccaacataactcgggccatcattaccgctgcatcggacagacaaggctgcccaaagagggagtccacggaggaaatgctgaccacctcataagactggaaagcagtttctaacgattcttctgcggcttccacataaggcatggaggaatgggaagctaccaagatgtcttcctcgcctgacacgatgaccaagtgcccctccacta

SEQ ID NO: 259808 - DNA, 190 bp, Glycine max
  unsure (1)..(190): unsure at all n locations
cttatgaccatttgaattctcgagagcttntcgtgttcaatttgagcgtctcgatatatgatgcgcctgaatcggacatccgagtgaaaaagtatgacangttctatttctcaagagctttcgtgggtcaatatcnggccgtctcatatgtgatgggctcgaatcggacaatccgtgtgataacttatga

SEQ ID NO: 259809 - DNA, 323 bp, Glycine max
  unsure (1)..(323): unsure at all n locations
aactcaagctgaggattatggngtacccatcacatgtggtactaggtggttgtctgtctattgtgcacaacaagctttcctcatccacaatgcgcgcataaacccaccatcccctgttgcccacctccaactgagctcacgtactcccacgtagcccatatcctcgtttctctcaacaccgggtccccatcaatcctctcaagcttccacaacatccaagaaaaacaacattcaaacagcacaagctatcacagcctagctaaacagagcaaaggcagaaaactctgctcaacacatcaaccaaaatcacagcttttcttact

SEQ ID NO: 259810 - DNA, 377 bp, Glycine max
  unsure (1)..(377): unsure at all n locations
gccggtagccatactcgcctgtgttttcttcctgcctatgtgcaagacgtgatctgtcagttgatgacagaaatgcgccgcattatctgtgcagtggagagtattttccctgcttcttgacatatgatcacttgatgtcatctggcagagaataaatgtgtggcttgttattgcngggatgacccggtggcgatcataagatttanagggttacaaaattattcgtcaaacattattgtgaagtacatgcaaagagccgcgatttgtatatcatgagaagtaactgtggctcctattcactatacaatggtgaggctatagacgtggacctcacttaaattgtcagctcttgtactgacacgatgagtngctctcta

SEQ ID NO: 259811 - DNA, 431 bp, Glycine max
cttgctcttctgctcactggatcgggttccaggaattcaatgttttgtttatattgggttgtgttgatctgcaccaagatgcttaatttacgttgaataatccattcatttgcgagacttagcttcgaagatgaaccatttagttgaaagctcaatgaatactcaaagggtctctagagttcaagctccactagtaacctcgacgacgttgtgcaaggacgacccaatgttggtgaggaacgatggcgcaacgacggggaagactcactgaggcagaggtacaatgtgaggttgtgagggtgacctcgatggcgtagcgtaaattagggtttcaagatgcaaggagaagaatataataataaaaattaagggtttttcagtgttaatcttttttaccatgcatggataaaaaaacataagtcaatgtcact

SEQ ID NO: 259812 - DNA, 179 bp, Glycine max
tgtcccgggtgccacatttgttcatgatttattctcgttattacttttatcccctttgacggctagcattattagcattctcctatctaaaaagaaattcaccgacgtgatgttatcgtatttggaaacaaccacgtcgcggcgacccgtgaataaagaggaattatattataaaatct

SEQ ID NO: 259813 - DNA, 434 bp, Glycine max
  unsure (1)..(434): unsure at all n locations
gtaatcagagcacaagagcttcaagacggtgttccttatacctccattaatncnagntctgtaccttctcttccattgttggttcttcatttttctccatgtatctcctcacatgtcttgttctaaacgttgttaacatgattctttagagtttccaccgattaaactcgctatagaagctagatttgattttctatggttcaaatttcttgttcttgttcttgaaccatgaattgtgctagtttacgttcctttgagttttgtcttgttattttctgtggctgaaacctaaaccattaaattcttacaaaaatattaaagtagaagactaccttataaatctagagtgacttgttcacctatagtagttatgcatagaagtctgtctatcatgaaacttgcacatagatttctatgttgggctgatttatttc

SEQ ID NO: 259814 - DNA, 172 bp, Glycine max
tctaatacacacattctgtaatactactctctcagcttgggacaaatgcattcctctgtttttatactatctaccaactcatataatctgctattttacaaaaagggctacactcatccctttttcaagttttgctcctaaagccgctgcaattcaacatatttctttctgc

SEQ ID NO: 259815 - DNA, 386 bp, Glycine max
  unsure (1)..(386): unsure at all n locations
ctaagctagacaagtgtngntttcaccttctcgctaagccaatctgttggcttattgagcgtccgctaagcacaacactcatgggctaagcgcgaggaagactctggaagaagatgagttgtacaggtttgctaagcgcaccgcttcatctcactaagtgcaccgcttcagtccatccgctaagcgagaaaggcacacgctaagccaaaattcactaatatgcgctaagcggtccataattgcgctaagcgcacgagcacgaacaaggccacctatntaagctagaaatcagatattgtgaagaaagtntgggctgggattcacagctttgcatgtctagagattctagagagagaaagggtcaagttccagagaggtttgggaga

SEQ ID NO: 259816 - DNA, 383 bp, Glycine max
  unsure (1)..(383): unsure at all n locations
cgccgcccagctcgcccaggcgagctttttgttttctcttttgcaacagccttctggaggaatcttctggagggcccaagtgggcctggttgctatttacacccncctttttactaaatgcacccctttctattnntttggaattctttntccgtaacgttacgagactttacgaatttcgtaacgatacttattttccttccgcaaggttacgaatccttacggattatgtatttactcttttttagctttcgaagaagttacggaaacttacggattgcgcataaacatctcttttcgacttccgccacattacggaatttcacggatcgtgcaagcctgcttcctttagatttctgagacatctcnggacttcatttatt

SEQ ID NO: 259817 - DNA, 256 bp, Glycine max
tcattggcatttttctctcccgcattacaatgttacagctaaagttaaatttaacaacaacttacaggcataaaagttcaaccccatataattcagtgaagaaatagatggatttggtacctatcaaatatactattaatgtcaggttaggaacccataaatgctcacaccatacaaaggtttttaattgatttgctccacttcacagctatgattactaaactcttatcttctaccaatgtttacctaataattc

SEQ ID NO: 259818 - DNA, 406 bp, Glycine max
aaatttataatgaggtacattttaagcaaactctcacctcacaccagtccataacatccatttagacttgttcaaactggatgtacaccgtaaatctctccgaatcaaaatttgactcttcaacacccaaatttgccctatagatggctctttgttcactttggtcatttatttttctctctagcacagtccaagctttctcataagtcctatatgacatttcaagctagtattaactcactttaacctgcatttaccacagaatacagacttatcctttctaccctcaaagtctcactactgttgtgtcactcataacatcacattctcactgtctaacctatggtaggtctacccttcgtccctaacagatttacatcagcgattccgcgtataacatcacata

SEQ ID NO: 259819 - DNA, 168 bp, Glycine max
  unsure (1)..(168): unsure at all n locations
tcgagcctgtgtacactgcaccgagaaattgtattgtcatactcacactagctaagtgctctctcccttacacctaacgttaatcccctctgcacattcataattcatactcctctcanggtagtgccacgactcttcttctaactngctctacgtgtcatttctttc

SEQ ID NO: 259820 - DNA, 492 bp, Glycine max
  unsure (1)..(492): unsure at all n locations
ntacttcttggatatgttntatgttattgtgagatgttcattcttcttatatacagcacatccacaaagttgttaatcttgtgacctgttaaagagcctgtactttgaggatcagtataattgtagtttattttgtttgatagcaactatagcatgcttgggaattgtttagttgtgctcattccatgaaccttgtttccatttgaagtatatgatgaatttttgagcatgcataacatgcagctaggcaacaaagttctatgaatccagctccctcttgaagatataaacagtggactaaatatggataacatgaagcaagttaattctgaacanagaggcatacctattgaagaatttaatgggaggcaagaacttgctggatcttctgaaacttcacaggagaactaacaaaatactatcagaagaacttgttggatcttgtgacaagttacacaatactttcagaaaagtaaacatcntatcaacata

SEQ ID NO: 259821 - DNA, 328 bp, Glycine max
atgacagagtctcttgcacattggctatgcttcgagcaacaactatacaccttcaggatgacagaatcaagaacagtcactgagcaattggctgatctcactaagatccttgatgattgggaaaatattggagtaaagcttgtaaaggaggataaagctcttttgcttatgaattccttaccaaaatcctatgaatatttcaaggatgcaattctttatggctaagaccaagacattaccctagaagaagtccagacctctatacggacctatgagatgcacatacagcatgactcctaatctgatgataatggggagagcctgaata

SEQ ID NO: 259822 - DNA, 425 bp, Glycine max
  unsure (1)..(425): unsure at all n locations
tgtagatgagttatgtctgcgaatcggacatcctgtgaatatgtttgactcattgaaanactcgagtgcttgcgttgtttaatatcaagcgtctcgatattttatgtcctcaaatctgacatctgggcgaaatgttatgaccattcgaatctgtcgagagcttgcgctattcaattctcagcgtctagatgagttatgtcaccgaatcagacatctgagtgaaatgttatgaccattcgaatttgtcgagagctcgtcgtgttcaatttcaagcgtctagatgagttatgtcacccaatcggtcttccgtgttacaagttatgaccatctcggcttacgacagcttccgtggtcaatntcagcgtctcgattcttatgctccgatcggcatcctgcgaaagtataccatggctatacaaagcttc

SEQ ID NO: 259823 - DNA, 491 bp, Glycine max
  unsure (1)..(491): unsure at all n locations
ntctagtgagcccagngggtggaaaatgtccccatagcgatctatttgccnctcttttgagtactttgcacatttcctttcaaaacatcacaaaaccctacggattatgcggaaattaacattaagcagctcaattcaactgacaagaatccaaatgttggccaatgatcatcccagacaaaattagggtatgacaggcacaaacgaatcggtgaaattntattntacagtaataaagtgagatggtagaagaatgagatgaagatgtgaaaagcaagagggacccctaagggtgcatagagcaaattcatagctccaaaataaaaaataatcggtcgacgaacgaagaacgaacaaagaacagacgaagaacggtgaagaatggtgtatgaattgatcacngaagcgattcngaaagtgctttgacctcatttttcttctntcttttgcttattctcaataatttcactaaaatcctctcaatatcagat

SEQ ID NO: 259824 - DNA, 254 bp, Glycine max
aacatatacttcacacagatcactgatgagatacctactaaggcagctacaccacgagctgtctctcaagtgtgccacactcttctcacatccacgacacccaacactgtagctccactctcaactgagcagattaactcgtacaaacactctcactaccaaagaatgtccatgatacacgccattcaggcttactgcaacaagacctttggcgaagagagctacctactcttgaatttcatttatacctgact

SEQ ID NO: 259825 - DNA, 334 bp, Glycine max
cctttatctcacttgaccaatcctgactaccactttcttttctctttgctgaaagaatagaagggaaagttccaatctaagatagggaaagaacgaagatttccaatcaaagagaaagcatataaagagaagaaggaaaattccccaatcaaagagtgggagaaagcataaagaaaagaaagataattctcaatcaaagaatgggagaaaataaataaggaagaagaagaaggacagacagctcctgatcagggatcgaatgagaacagaagaaatgtgcagaaaggtctttggaccgatcaatatctgaacaatacagaattgtcaccaaacg

SEQ ID NO: 259826 - DNA, 442 bp, Glycine max
agcttgtcgggttcattattaattaagcgcttgtggcatccccatggactgagcaaaaaggccggggtcattaaagtctacgcatcttttaaggcacaaagcgaggatcaaaacaacgaaaccccaatcccacgttctttaaaagattgcgacgagaaaattacagaggacaagaatccctggaaggaaaccacagaaaatgaaaaacatgcagcgacttctttaattgccccaagtcttcaacgtagtatcacttgacaacgtcggagttcatgggtgaaggtagttcctcgtcatccatgttggtgagcacaaggaaccctccagagaaagccttttttacgatgaaaggcccttcgtagtttggggcccactttcccctattgccttgcagggcttgtgagactttcttcagtaccaggtccccttcgctgaacctatg

SEQ ID NO: 259827 - DNA, 324 bp, Glycine max
gctgtgactgccattctatacgccaagtttccaccaacccaacaatgtcattactcaacccttctccttacctaccgcccatttatccacaaaggccatccctaaatcaaccacaaagcctgtctaccgcacttccaatgacgaacactgcctttagcacaaaccaaaaacaccaaccaagaaatgaattttgcagcgagaaagcctgtagaattcaccccaattccagtgtcctatgctaacttgctcccatatctacttgataattcaatggtagccataaccctagccaaggttcatcaacctccatttctccgagaatac

SEQ ID NO: 259828 - DNA, 438 bp, Glycine max
gtcacctgcggcatgcagcttctcaggaagctacctagtctataaatagaatcatgtgtaacacttgttgtaactttgatgaatgagagtcttgtgagacacaactcaaagttcaacttctctccctttttcttccttcaatttggtgctcccccctctctctttctctccctctttcttttcctccattgaagcatcctctccaagcttcttatacaaggctcatcttggtggtgaaactccttcttccatggcttattccctagtggatggcgccgcctcttacctcttctcctttgtcttccgctgcatctccatggtggaaaatcaccattaaaggacctcattgaagctcaaagatccagcctccatagaagctccacaagcaagcttccatcaagtggtaatcagagcacaagagcttcaagtaggtgttcc

SEQ ID NO: 259829 - DNA, 466 bp, Glycine max
  unsure (1)..(466): unsure at all n locations
cacaatantaaacctagacatgaggaagtgtagaaggcggaaacttactgctcttattgtttaccacanagtgctacctggggatatgttgcgggggtcatgagaccttggcgacgtcaggtggggtgctattgcccaaaaccaagcttgaccaatcccgacccaacccgggcatagtcggtcagtgagaacctgtgatgtacctaagctggcgagctcctggcagcctacagataaaaggaaaacaagaccacaaagcaaggaggcttgtggtggctggccagctgcgaattctgtgaatatgtggattgtggcctctggtaatcgattaccaaacgtgagtaattgattacaaggcttaaaattgacgacaggaggctaacatgcgctctggtaatccattacacaggggtgtaatcgattacaagcttgaaacgaatctggaaacttattagcctccggaatc

SEQ ID NO: 259830 - DNA, 401 bp, Glycine max
gatcccatcactgagcatgcagctgtgggatgagaggcggagcatttttactttttagaggatcgcacgcttagatccaatgtgtcataacatgattctattagactcacacatcaaaaatctctgcagccctgctatctgatcttgtcttaagcccagcaactattctataccaaaatttttggcattaaatactcatgagcagatcgttccctttagtcacaacatgcgaatgatagatgctcgatgataatagaacatagcatcttggctgattgtggctctgcatgaagtgccaggtccatgaaactggctcacagctagagaacataacgtacgctgtatgatggtgcctcgatccgacatctgctcggaatatatccactccccttattatacga

SEQ ID NO: 259831 - DNA, 447 bp, Glycine max
tcaccattaatgaatgaaggctgagagctgtagctgatcattttttaattcatagttacaaactttcctctaaatgctgtcatattcattttaatttaactgtttaatactgcatgtgaaggactgcatctgtcgaagtcagttgtgaacaattatatctacttgtcacgtttgagtttgtagttctttgtaatctttctttctctatagaactgctcaaaccaataccagtcataaatttgtaaattgacaactattacagtttgtctgtactctctagttaccaatggctattaataaaagtattaaaagacatcttgtacacaaaatacattgattacatccaaaccttattccaataggtgggatcaattacatggattaatggttaccgttgggctcaacaaaagcaaaattttcactctaaccataattatcatttagagc

SEQ ID NO: 259832 - DNA, 455 bp, Glycine max
  unsure (1)..(455): unsure at all n locations
ntgagccanaatcttgactcaccgtanaccttgacccagtgtgagaatgtcaatccttaccctcggaagcaaaaaaaagaagagaaggaaaatttccaatcaaaggaaaaaagagaggaaaggaaattcccaatcaaagagtgggagaaagcaaaaagaaaagaaagaaaattcctaatcaaagaatgggagaaagaaaaaaagagagaaggagaagaaggaaagaaagctcctgatcaaggatcgaaagaaaacagaagaaatgtgcagagaggtctttggaccagacaatatctgaacaatacggaattgtcaccaaatgaacaaaagaaagaaaaggaaaccataacctaaaagtggtcttctccctttgattaccaaccaaaatcctgtgcgtcggtgacttgttcgcctcgcatcaaacaaaaacagaaaaggaaaaagccaacaaaaaa

SEQ ID NO: 259833 - DNA, 430 bp, Glycine max
  unsure (1)..(430): unsure at all n locations
agcttcttatccaaggctcatcttggtggtgaagctccttcttccatggcttattccctagtggatggcgcctcctctcacctcttctcctttgtcttccgctgcatttccatggtggaaaatcaccattaaaggacctcattgaagctcaaagatccagcctccatagaagccccacaagcaagcttccatcaagtggtaatcaaagcacaagagcttcaagtaggtgctccttaaacctccattaattntttttctttaccttctcttccattgttgtttcttcatttttttccatgtatctcctcacatgtcttgttctaaatgttgttaacatgattctttagagtttccaccgattaaacttgctatagaagttagatttgattttctatggctcaaatttcttgctcttggtcttgaaccatga

SEQ ID NO: 259834 - DNA, 457 bp, Glycine max
  unsure (1)..(457): unsure at all n locations
tgtagagttatgtctcatatcgatttaattgattacagccttatcattatcgattacatagttgtttttgagacaacaactaatttatttagtctctgctttaattgattaccatatgatataatcgatcacttctctttctataagtgtttcaaaagtgaacaagaacactttaatcgattactttgagtatctaatcaattacattgttcttgagctatttccaagttttaggaaaaacactttaatggattatattgttcttgagttgtttcaaggttttggaaagaacattttaatcgatcaaaaagataatctaatcaattacttcattgaattaatcgattaccttgtagatttaatcaattacaagcggttataactattntctctgtaaataaccagcttgtgttctcttcaatctaatctcggaaataacaatataagcttctgaatg

SEQ ID NO: 259835 - DNA, 455 bp, Glycine max
tagaatcaagtgatcatcaattccaaaacatagggggagtgaacgcaatatattatgcatatacattgcttgcttgcatcttgatttcaggacttaaattgtcatcatcaaaaagggggagattgtagaagaaaatgactttgatgttttgatgatgatcatgatgatttgatgcaaatgcgcttttcaagtttaattcaagacaatgattcaagaatacaagacacaacatcaagatgatcactagtattttaggaagggaattcctaattgaaatagcaaaagcttttgccaagtaatttaagttaaaaagtgtttttcaagagatttactctctgataatcgattaccagaggatgtaatcgattaccagtggccaaaaatggtttacaacagctattgaaaatttgaattcaaattttagactgtgtaatcgattacacaatattggtaat

SEQ ID NO: 259836 - DNA, 434 bp, Glycine max
agcttggtaaaattccattctcttctgctttaatctatccctttccatcaattcaaatgattaagggtttctattttctatcctctctttgatttttcaattgttacatgtctcaatctctcctcggctcttccctcacaactccaagcctttctttgcctcgtgaaggtttttcgatctctactctctacatctatttttgctcttccttcttgaggttgccaatgaatatgagtaactatatcacaatgctgcctctgctgatcctaaaaatctaaattaagcaagtccttttatttgttctattatgtgcttttagtttcaaatttggaacctaccttttagtgcctaagtatgataggcctatggtagatggaaacagttagggggcaaggtgtgcatgttgaataaaatcatataataagctcgattat

SEQ ID NO: 259837 - DNA, 453 bp, Glycine max
  unsure (1)..(453): unsure at all n locations
ttaccttctttatcttttctgcaccttcataactctttataagaatatcccatgcttccttcgaggttgtggcatttgcaattntctcaaagttggcatcatttacacactggtgaattangaataaggctttgtagtcctttttcttcaaatctttgtaggtagatcgttgtgcctcaatagcactggcactgggttcttgatacccgctcgtgacaatctcatacacaccttgaaaacccaaaagagctttcatctgcacatgccatcgatcaaaattcttttcaccaagaactgggagattgttcatcggaactccattgctcgtcatagctcaaggttcttcctctgctcgaattcgtcttccttaaaaaacatggattcacatagaatcgcctttgattgtttcaatcacaggtcccacctttcacgggttgattcacacagaaacag

SEQ ID NO: 259838 - DNA, 439 bp, Glycine max
agcttctagccaaatggacttaccttgaattaattcctttgatagcccttttgagccttgtttccctttgcttgttttgaagctcactacaagccttaaatgaaaaaccatgatatcaccatatccttaaggaattttggagctttggaattgttttgggaataagtgtggggggtttttgtttcatgggataacttgttttgttggctatgcttcatgatgtattttgggccatacttgatgtacattgtatattggttaaatgttgaacatgctgaatgagatgttgtttctcaaaggccacgtacgtaaaaaaaaaaatcgaaaaagaaaaagaaaagcaataaagttgagtgaataagatcttaaatgacaaaagaataatgaaattcttggttctactctttatgtttaaattatatctttacttcgttttatt

SEQ ID NO: 259839 - DNA, 465 bp, Glycine max
cgcgacctatacaaactctagctctagctctaggcccgactctcttcacaagatctgattttttgcttaaataaatggccttgttcgcgctcgtgcgcttagcgcaattctgaaccgcttagcgcacattagtgaatttaggcttagcgcgtacttttctgcctcagcgaatggactgaagtggtgcgcttattgagatgaagcggtgcgctcagcgaacctgtacaactcatgttcttccagattcttcctcgcacttagccaatgagtgatgcgcttagcggatgctcgctaagccagtagattggcttagcgagaaggtgaaaaacaacacttttcaaagctgcctaattaacctgaaaatgagagaaaatgattattaaacacacaaaatggaagtactaagtatttattacctatacttaacaaacagtacttataacactacaaaataaccataaacta

SEQ ID NO: 259840 - DNA, 433 bp, Glycine max
agctttagagaacagtgtgctctgccatgtctttcctcttgtttcttccgaggagcagtatcatgtcagcgtatagttgcagcagcgtatcatgccctagctcctcacgaataaagaggaagacctgttgtatggattctatcacataaatgaatattaccattatgattattggtaaaatgaccagagacagagagagagagagatcgcgacttgagcgaccttgacagataactggagttggaattgtctttgcaattcctccaataggttaaaggcatcgggtttcaagaggcgagagagtttggcattgaaaacgtgggcaggggatctggcgagtttgagtgcgtgaatcacttctatgctctctttcgacaatatccttgtgcgacgccgcgctttgtagctggaacggaggccgcatattatgact

SEQ ID NO: 259841 - DNA, 443 bp, Glycine max
tcctgcagtcaattcaacacttaaagtagggctgtttgattacgagtaatggggccgcttatgctcttgcaagggtaactccgtcctatcctaatttccagtatttacataagattcctccatgtctagcagagctcattatgaacgaaaacccttgagtttgtttctgtccacaaaaccaggcataaacttatgaacacacaatgaaatcgggtggttatccttcttttcaaagcagtaaacttggtgctgctgattcgttgttgtcaaaatgtagcactgttcagattggaatcgtgatgagatgagaagagtagttgtgcaactttgggagggggaagcatcaatagttgaagactcagagcacactttgttatgtgttgacgaaggtgtcaggctaaataagagtgtgaccgtcaccagcagcatctacaccactagtc

SEQ ID NO: 259842 - DNA, 309 bp, Glycine max
gatgatgactaagatgatgacaaaaagcccaccgaatgatttcaagattgagttccagatcaagattaatctccagattcatcaatgaagagtcatgacttccgaattatgcagatcaagattctggactccccggattccggatccggagaagactttatcaagatacgtgttctatttttttcgtaacattgagtgcccaagacgttttcataaaatcatttcctaagagttttactctctggttatcgattaccagaatatttgtgtccggttccagtgttttagaacattaagattttcaaaatt

SEQ ID NO: 259843 - DNA, 458 bp, Glycine max
taatcttcatgttgctcctcctatctctaacatgtgtcataatataacagatttcaattttttgaggaccaaaaaggactcacaatttcgcaaggacaaattccaaacatttcgatatttgttgggacaaaaaacatattttagcctataatttaagttctaaaaaatgtcatgtaggctcagattcgtccaagcctagccctaagccaaaaaaataacaaatttcaattttaagaggaagaaaaacatactgaaaattttgcagggatgacttctgaacttttcaatatttataagaacgaaaaatatatttaaattaattaaacctttggatcatatcacttccctttttatctctcttttctattaactaaaatacttcattttgtggtttatgtttataatgtttcagacttcagagggataggataatacctctcaatatctcataaccatat

SEQ ID NO: 259844 - DNA, 432 bp, Glycine max
caagctgaatacattaggacctattttattatttattatggattctagacttgtctgcatatcttgggctaaattgaggcctatagcatgattggtgatatttatttttcctttttaacgtgaaaaaacacattgatacggggaggttggttactattttgaaaattaacttttaatttctttcctcccctaggaggtaatcctatccccttatgttgtcccataataatcaacttgtgtcttgtgagtgaatattgaatttgggagtagaacttgtgagtgaatacaattatagaatttgggagtttctactcatacgtaaccaaaattaaatttaatccaagattatccatctgtctttacctctatccattcatccatctatctttatcattatctctccatccatatatattatatcctattgtataa

SEQ ID NO: 259845 - DNA, 372 bp, Glycine max
  unsure (1)..(372): unsure at all n locations
ntgcttctacactcaagagattagaggacacttttgccctaccaaccacaatcgaagatcttcagacagaaattaacaatctgaaacaagaagttaaagaacttaggcaacaacaagaaattcatcaaatcatcctatctcattttgaagaaaatagtgattcagaaagtgaagaaaaggagataaaaaatgacgattaagaatgaaatgttcatgggattaatcaacaagattaaaattcgaaaattttatattaatattaaaatcattataaatgattttggtttagatacaatggccctatttgacactggggttgattcaaattgtattttggaagggttagttcctacaaaattctttgaaaaaatc

SEQ ID NO: 259846 - DNA, 410 bp, Glycine max
gcttccgatccatacttggaaggatctgattactgcctttctaaggcaatatcagtataactccgatatggcttccgatcgcactcaactgcagaatatgttcaagaaagagggcgaaacctttaaagaatacgcacaacggtggagagacctggcggcacaagtggctccttccatggttgagagagagatgatcaccatgatggtagacactctgctagtgttctactatgagaagctagtaggttacatgccgtccagcttcgcggacctagtgttcgccggggaaagaatcaaggtaggattgaaaagaggaaagttcgattacgtttcctccacgagtgcgaatgccaaaagaatcggggcaacaggggcaaaaaggaaggaaggagatgcccatgccgtctctt

SEQ ID NO: 259847 - DNA, 446 bp, Glycine max
tcttatccaaggctcatcttggtggtggagctccttcttccatggcttattccctagtggatggcgcctcctctctcctcttctcctttgtcttccgctacatctccatggtggaaaatcaccattaaaggacctcaatgatgctcaaagatccagcctccatagaagccacacaagcaagcttccatcactagtatcctttaaattcccagtaattattactgttgtgtcttcaaagtaaatattggatgcctaatctaccctaagggggttcgagtaagtgaacgctgacccttagagagccatacttatgtcttccctaaaacaaaaagtacaggttagctcgcctgggcaagcaccccctgtacgagatgagttaaaagagagggaggggtacgttttcttcacccaaaactcccccccccccactttcaaaaacgctaaag

SEQ ID NO: 259848 - DNA, 445 bp, Glycine max
ccgacgctgcagctgctttttaggttacgaaagatgtctttatattcaaaattaatgactgccctcacgtactgtctcgcggggggtatgaactgcttaacaagaaacatatggaggagaagagcacgcgtggacatgaggaacattcctgtactgaaagcccaacactcaacgtcaacccaccatccctagttgctcgacactggaagtggaatatcgcccgcactaagcggcatggccaaatgacgtctgaagtggcacaagaaattgtagacaaaattgtcagttcatatatttttttggttactgtcattggcaaataatggttagctaacctactcaaatttgttttattcaaattcaacaatcgtatatgcatgcaggattcattactggaacaagcaacacaggggagatccgttctgcatgggcgacaggacatact

SEQ ID NO: 259849 - DNA, 324 bp, Glycine max
tctcatagttatgacatgatatattttctttgaaggacatttgatgcccttataaaagtctctataacagctgttgtcatatggtttctgtggcatgcccttcagaatgcttttgcaaccagtcttcaatattgtatttcctaaggtaggaatagtgcataccacttctgagctgatctctgatatcagtcacaggttttattcttccaggtagagagttattcagtgacttggttaaggacctttggcaagtaacttgggagctctctcgatgcaatatcataattttagcagttaattactatgtgacatgcaattattatg

SEQ ID NO: 259850 - DNA, 442 bp, Glycine max
  unsure (1)..(442): unsure at all n locations
agcttctctgctctctgatcagagcctcctgcttattgaanagagntccactccaattaactcctaatgtttgataatatagatttcatatatttcaatttaaaactgtcaaatgagtcgggttggccgcaacaacaaaattagaaaagagtgatgttttttgcatgatagcaatattaagatgcttaatcatatgaatgagaatattcatgtgtgaatttaatatattcacatcttgtaataaaaaattgtatatatctccatgtcataggttgtaaattttatacctatgctcaatataatataattaggtcctttctatatccccaatttacaaaaggtatcccatagttagccttgaaataattatctatcaaaaatcagctcagtggttccaaaaccactgtatacagtatacaccctaacccttagtaccaaaatg

SEQ ID NO: 259851 - DNA, 447 bp, Glycine max
tgtgcaatcatgaatatcttcactgacgtggacactattttttgtttcatttcaactatgagcaactgtgtttgttagttaatcaagttctaaagcttaaggatagtgtcttcgtatactgttcaaaacagcaacgacgcgtttaatacactatgttttatgaagctagcaacatctaggtattttaatttcatattggaattcgaagacgttatgataaataaaacactacatttgataactatgcttcatgcttacaataacgttgtaattgaacaaaggaatttgtttatcaactttttattttagtctagttcctatactgggcatcttcattgaaacaactgattcactatattaatggccagtataatatggaaatgaaactatccctcttttatttatatttatacaccggaaaagataatagtaataataataaattag

SEQ ID NO: 259852 - DNA, 443 bp, Glycine max
  unsure (1)..(443): unsure at all n locations
nttaaatagatcatcataaaatatgaagaaatcactaaagacttgtaatggagggagtatatttctttaatgtgatttctctaaaatgagaagttcaattcatcgtatttataagaggtaaatgagaaaaatattaaaaattaaagaaaaaataattgtttccaaatgttatggacaaatatgtttttaatacttgtaaaatgagcaagttttattttgacctctataaaaatattatttattttttattcctctaaaacttgaaattgtcaatttggtccttataaattaacaaattttggtctttgtatttatagggcttactattttttagttcctaaacttttttttacctacttttcatcattcaagttcttgttccgtcctaatttttaatcctttaacttttcttcatccttacatttcgtcccttaaaatgatta

SEQ ID NO: 259853 - DNA, 432 bp, Glycine max
  unsure (1)..(432): unsure at all n locations
ctcacagtcacctgaggcatcgagcttgatgcagaaatctaagacttgtttgactggctgaagtgcatttaagtacctgattaaataatatttaaacaggcttgctgacctgatctatcttgcttagaagaagatccacaatctgataacgaactgttctcccgtgacctgtctccatatgatgactgctttgggtagcttctaatcgtactagagctatcagaagacaatatataatggtgataacgtttgcaagagataatanaatcctcaatgtcttccacactatgacaatctgctagcgacacaaactttggcaaagaatatacgcattttgtttctgcgatctctgcatcatgtacataatgagatctccagatatccagagacaagtcatatttaaccaatgcagttttgcatggcatttaatta

SEQ ID NO: 259854 - DNA, 461 bp, Glycine max
  unsure (1)..(461): unsure at all n locations
ctcagctctgaacctngatgtctcttatgatacacacgtgtcttatttatatatactagcatctagcagcaattactggggatcatcacatctacaccttccaatattaatcattcttattataattgtaaatgaaaagacattataaaatattcaactcaggaacaaacatgacatttttaacaaacgctcgtcatcatattatgctgacataaaaaaattcacgcccttttacaactaagcctgtccgtgaaaggatgaaacgatagcctgtcacatacattaatagcaacaaagaacaataagtgcgcatattgagcttcaccttattatttgtaacaaaaccgagcatagatgcaagagaacatcagattctaaggccccacaaaagtacattaatgcacagttattggagtactttttttcagacattcctttcttattatcgattctaatatttt

SEQ ID NO: 259855 - DNA, 420 bp, Glycine max
agcttgtcttattcccttgtcagggtattgttcttcttatcagtatgtcagtatttgttggatctgtactggctttgggagcaatagtttctgcaaagcccttatacgatttaagatacaagggatggaatggtgatccaaaaatcttgggttccccttacacatcatctgtttttcttggctgggcaatggcatctgcaattggtttaattgttacgagtgtgcttacaataatttcatggtttgcaacatatcggttttccctttcctctgctatctttattggactttttgcaggtattttctcattttgtatttacaaatgcctaccccccccttcccccacccctcaaacaataaaaaaaacaaaagaataacattgctcttgttgctgctgatatctaattatctatatttctg

SEQ ID NO: 259856 - DNA, 444 bp, Glycine max
  unsure (1)..(444): unsure at all n locations
ctaatcattggtcgaccaatcttcgattagctnttatgagttatagtaggagtatcatgttacagttgtgttcaaattatgtaattctgatttcaggcttgggttcctatcaagactgcagcaagtctgatctggaacctagtgcttgacatcaatatttgtaagcttaatacatctggtactcatttaatactacttatacttttgctgagcaaaaaaaaaattaattgcatattacatttacaagaagaataaacacaagtgcaactacctaagtacttgaattaaagcaccttgcatgaatctaaaatttcatgaatccaagctttaaattcagctattcccaatagatttgttgcagtttccaacaatgtgcttccattcattttgcatggtaatatgtactattctcaagggctaattcttctgtttaaagaagttttc

SEQ ID NO: 259857 - DNA, 432 bp, Glycine max
gcttgcacccagctcgcccaggcgagctatgttgcttcctccagaagcatccgccttctggaggaagaatctggaaggcccaagtgggcctggttgctatttgcacccctatttttactaaatacacccttgcctttttttttgtgattcttttttcgtaacgttacgaaactttacgaacttcataacgatgcttgttttctttccgtaatgttacaaaaccttacagactacgtaatcaacccctttttggtttccgggatgttacggaactttacggattgcgcacttacatttccttttaatttccggcatgtcatggaacttcacggattgtgctacaatgctttcttttgacttccggcatgtcacggaacttcacgaattgcctaacgatgggtgccaagtacctcgaagtggtcaaacgagggt

SEQ ID NO: 259858 - DNA, 425 bp, Glycine max
  unsure (1)..(425): unsure at all n locations
ncaatactctactttgatntggtcatcagacaacatatattatctgnttcgatatcactttatgggtgtgatttctgtgtagtttgtgttgagatacattataaaagaatgagatatatttcgccaatcaaagagcttcattgatatttgattcatcttcactacaagtgtactgaacaaacttattaaccctgcaattacatgaccctctctcatctagagtaattatgtgaattgagtnctctcatatcaataattcctattatagacctaatatctcaatcttaaaaggtgaaacacatcatatacttatcgtactcgatatatgcttaaatctaaacaatattttagagataagataatattctttttaaatcagacaaatatcgtataaatttgaattatgttcaaatataggggtcatc

SEQ ID NO: 259859 - DNA, 440 bp, Glycine max
  unsure (1)..(440): unsure at all n locations
gatcttaagtcacctgangctgcagcttgggagatgctattcctgctattttctttatcaacggggttcttgagcgaacgggggagttctgggtgaataaaactcacccccagccccttttcatctaccttgtgcagggggtgctcgcccaggcgagctaaccctgtgcttttttttttgaagaaaatacgcactctctattggacggcgtttgcttactcgaaacccctagggtaagttaggcatccgatcatcatcttaaataataataggtaggaatttaaaggatactacgcttcctcccaatagcgcttcttgattgtccacagctggatgtgggacaacaatctgttgatcatgggcctagggtccattcgtgcccatcccagagtaacccgaagcctgaaatgacattgtgcagcaaatcgtggtcacattac

SEQ ID NO: 259860 - DNA, 447 bp, Glycine max
aagctatgctaaatagcttaatcatctatgatagaattaattttttaagaggataagacataagtgactggcggatcagctatacacatatacatgtttatataacacgttgaaacagtgtgcgttacctggactttatataatgaaacagctgccagatcaacaccaatggacaaaccaagttcaacatcaacaaactatgtcaccttcacctgaagacgatatatataggtaatggcgttagaagaactcatagccacaccaagttcaagtcaagaaactaattaagctcttactcacgcaaagtgtgtcaaactgcatgtcggctattaaaagtgtaagttattcatgtgacacgaaaagagagttgagagacgatgatctctattataaaatggcaatgaagtattgcggccttaatttgttccacttgatcaagaacaatga

SEQ ID NO: 259861 - DNA, 433 bp, Glycine max
agcttgagaacagagtagaaaggcttgaatgagatgagagcttgaacgagacgtgaaagaggggtctccccaacccactttggtcgctccagcttcccttcttcgtactcacccatttgcaccgacgcagaggcggtggtgtcggacgccgccgcgtgaaccgcccagggccgccctctcggcggccggggtgtggcgacggcggtggcattgcctttggcggagatgagtgcagagaggttctgaagtggcgaagacagagccattgttgtgttccgttactgtgtgtgcaagtgacaaccagaaagacatggctatgcttcaccgcaaaatctccttcatctatagaatttcgccacgtggatttgaaaactactcttattttttgtttaacaaaaagacagaatgtaaatccatcaccagcacattcgtg

SEQ ID NO: 259862 - DNA, 427 bp, Glycine max
  unsure (1)..(427): unsure at all n locations
actaagctcgggaatgcaatggctcggtatatatgttgactgttattaagaattgngtatatatatagtgtgtgagattctgtggaaacccaattcccagagaaagtgactgtcaatggatggagggcatacccatgagatatcacatggtgttgtcttcggtccaactatgaaggataagttgtgaagacttgcgtaaccccaccttatcatacattaattggccagcataaagcctccacatgtgaccaaatgagacgtgcctcagtgaaacgtaacgtctattcaagcattatatggtattccatatttttgtaaacatgctctgggcatgttctggaaggtaatatctggctgatgaataataaggcagcggatagcgagaggtcatatatcatttaattatttctgatgcctgacatctatt

SEQ ID NO: 259863 - DNA, 434 bp, Glycine max
agctcgaatatcatcatttgagtaatgcatacctatcccaagcatttcattggctacacactctccaatctcttccttctttgacccacctatatttgtcaggatgcacactccctcactataatgaaccatccttgctcaacttctcatctctgcaaactctccatctttcccttactcgttattcccctgccattacttttgtccccaagtggatattcaaattgaagaaacttgttctcttcaatttaggggtaatgaaatccaaggtccgattcctgttggtattcgaaatctcacacttcttcaaaatcttgacttgtctcaaaattcattctcatcttctatacctgattgcttatatggtcttcatcggctcaagtatctggacctaaggggcaacaacttgcatgggactatatctgatgccctgc

SEQ ID NO: 259864 - DNA, 466 bp, Glycine max
  unsure (1)..(466): unsure at all n locations
cggacacttanatactcagcttcatntaaatttaaaaatacgctctaagccattggtgtatgtttaatactaattgtcagagctgctaaaaaaactaattaacaaaactgtagctaataataactatagtcatataaaaatagttataaaattataattaattctataaaaatgattatttaaaataacttatttttatttatctatcagctgattatataactagcttttctttgtttaatcaaatgtattcgggactaattatttaatatccaattaatttgataacttgttatataactagttatattcataantttttttgaagaaagatatattcataaatagttatataaatgttaaaattcacattttaatacacattgagtggaaaaaataaatgaaaagatataacagattcttagtcagtttgcaacaataaatgataaaaaaataattgatcatt

SEQ ID NO: 259865 - DNA, 434 bp, Glycine max
ctgcactgtcatggatcttctcatggcacaatcttttctttatgactaagacgacacacttctatccatcacatacaaacacacgcatttttataatggaggtcacagtttgactcatccaaagcagatccagaacaagtaaaactctggtttcaatcccatccagaatttctcaaagcagttgatccacaaacttctgtgtttttgaaccaaaaatctcatctggcaccatttttaacaggatcgaaatccaaggacgtcctaactaacaatctaaaggaagatctgcaaatgttacagcatgaagaagaatgttcatcctcaaagaaagaagaaacaagttctgctgaagaagaagaagaagaacccctttacccaaacgaacaagattgtttggtatatgtgtgattaacattaaattccgtcacaaaacc

SEQ ID NO: 259866 - DNA, 440 bp, Glycine max
  unsure (1)..(440): unsure at all n locations
agcttctttgaataaacgtgcattaaagtattgaaagtatcaacaattggaataatttgcatctcaagcatcaaatcaagaacccaaatagcattgtcaatcttctttgaatttgcaagccctctaacaataagactcacaacaacattgtgggagttgatgccaagtgttttcatttcatcttgaaatttcaatgctccttttatgtttctaactctacacatgccattgattaaagtgatatattgtttatttgtaggaacataaccacttttcgacaagacttgcaaaacacaatgggctttatcaaaatcactagttctaatgagtccatcaaaaatggcattctatgtatcaacactaggaatagccataagagtgtgctcaattcaacaaattccaatgttatccatctcaaaggactttntcatctcattcgt

SEQ ID NO: 259867 - DNA, 422 bp, Glycine max
  unsure (1)..(422): unsure at all n locations
agacaatatgatcttaagtgtatcatccaatgatttagtagagtttcgcttcacagattntgctaatctcttctatattttccctgttatgcttttgagtagagactgtcttttatagacttaagagaaggatccattataggattagcactgaatcttgatatggttgttgtctcgcatgtgggggcgagacaacgtgacacgctttgatttgagaggaaaggaacaaaagtacagacaacaacatatgctcctctttcgcgtcaaaaacgacttctagcggaattttctgtgaataccctctattctcttctataatgtcatttccttaaattcaaatgttagaaattcaaaataaagataggtaaaattgaatttcgtaaagagagatcatgcacttctctttgtagataacattgctt

SEQ ID NO: 259868 - DNA, 441 bp, Glycine max
  unsure (1)..(441): unsure at all n locations
agcttaataaatctatatattgtttaaagcttgccttccgtcagtggtaccttaagtttcatgggacaatttcttcatttggttttgatgaaaaccctatggatcaatacatataccacaaggtcagtgggagtaaaatatgtttccttgttttatatgtaaatgatattttacttgcagctaatgattggggtttgctacattaggtgaaacaatttctctctaagaattttgacatgaaggatataggtgatgtatcttatgtcattgtcattaagattcatagagatagaccttaaggtattttaggtctatcacaagaaacctgcattaacaaaattntagagagatttctaatgaaagattgttcaccaagtgtcgctcccattgtgaagggtgataggtttaatttgaaccaatgctcanagaatgactttgaaa

SEQ ID NO: 259869 - DNA, 452 bp, Glycine max
actaagctcgttatgtgtcttgtaggaaaaggtgaagtcatctttgtgttggtctattgataagtagcaggacacttaagtcatgcattattggtggttcctgccaagggcaatactaggtcctaaacattcaaatcattcaaattccattccaaactcctatttccattcccaacaacagctttcttcattcctaacacacaaccatgattgttttttgcatttgctacatggtctgtgatgtccacagtttttgaactacaagttacttatctattattcttaatagcttttggcagctagtgccttggaggaaacaaacatatttcaaaacaaattgctaccggagacaatatctaacggcaccaacatttgggatattcaactactagaaggttagtgccaccacatccttacttcagagtgtttttgctgtggtttttattgcttat

SEQ ID NO: 259870 - DNA, 142 bp, Glycine max
tgcagcagcaagcttgagagcaccacggccgacgccatttattcctcacgggagggtacccatagcgccaccgctatgagatgacgaactgacgaaggcgcaaactttccgcctatacaggcgaccaacagagtcggtcctg

SEQ ID NO: 259871 - DNA, 447 bp, Glycine max
  unsure (1)..(447): unsure at all n locations
ggagatgaggaactgttgacgggcgacacttcctgcatatattgttgaccacagagtggcacctgcagagttgtcgcgggggtcacgagaccttggggacatcangtggtgtgctattgcccacaaccaagcttgaccaatcccaacccaacccgggcatagccggacagtgagaacctgtgatgtacctaagcaggcgagctcctggccgtccccagataaaaggaacaaagaccacaaagccaggaggcttgcggtggctggccagctgcgaaactagattgatatgtgagatatggtctctggtaatcgattaccaagggtgggtaatcgactaccaggcttaaaaatgaagacaggacgctaacatggcctctggtaatcgattaccaacgggtgtaatcaatgaccaagcttgaaaacgaggtcaagaagccctgatggctt

SEQ ID NO: 259872 - DNA, 446 bp, Glycine max
tgataatcattgtctttgcctcatacaatgaacttggaagcttttcatgttcaaatgcatcttgcaagagttacaaaatcattgccatggctttgtcattcatcccacacatgcatttaatatgatacaatttcaacaaaaaagacaaccttgaatattttgaaccttcatacaagggttgttctgcatcttttggtaattcataaaactcttcggcttcattcctttcttgagtgttttttggaaccatatcttcatccctatcaacctctacattgaaccaatgggcacttcattcgtatgctgcctatcaactctaaaagcatcattaatcatattttggataggatttttaataatgttgtcttgaactacatttgtatgtgagacatttccaagtttttcacttctagactccccatggtacaaccaaaatgtgtacccta

SEQ ID NO: 259873 - DNA, 434 bp, Glycine max
agcttctcatgcttccatggtttctcgaataattgattatttcatcatagagagagttctttaagtttccatacgcaatctaatcgattacaatacatgataatcgattatctcaagttacaaaaccttccttctaaaattggcttttgtaatcgaataaatgagaagtagatcttcctcggtcagttatgcatgattgctccccttgggagtaatggtccaaacaatcaaatatgacaaaagtcggtgttccatctacaaggggccaatgccaaatctttcctttcccttgcctttggagaccacaatagataatgttgaaaggtccttaattaaggccatgtacctagtgaccttgttgaatttcactccaacatcgttgaggcctttctcattggccatcatcccctctgaatacaaaccaacaatgtctt

SEQ ID NO: 259874 - DNA, 459 bp, Glycine max
  unsure (1)..(459): unsure at all n locations
tgtatgtccaagctgtcagcaccagcgatgttttttaagcatggtatattgattgccttgggcttactttcaaccttcctatgtatgttgaactaactaggatttcttacccaagttttaggagttcaatattcacttaggatcaacatttcagccagcaattcaatcaccaaaactcaaattcacaatagacacaatcataaggaaacctaaaagttcaagtaaaggttcacaatcaaagactctctaagaattttgcatgaacatgttaaggactaattaacatgaaagatttgactcacatcaaataataggctaaaataatttcatacactcatgagcaaatgagttagacaaagaaacaagaaaataaaattcagcacaacataagaaatcttttgtgacaagttcatgactagacacgacttctatgancaaactacaataggtgaacaagtc

SEQ ID NO: 259875 - DNA, 432 bp, Glycine max
  unsure (1)..(432): unsure at all n locations
agcttgtatgcataaacattaagttattatttaatgtatnataccaaaataattaactttaagatttgttaatacaataccggttgatttaaaaaattgaacaactctaatccaaggtttgacaagaaaatcccattcatactcatgtttgacacgatttatgaattcttgagttgatagtgattcttctactacacaattgttcattatttctggaatcacacccgcaagtattgaaatgatggatggtgcattggagatactccctttcacaaacaatgggaggttagggttatcaatatccagaccttcccatggttttgtgtccatgactacacaaatatggtattaagaggtttatggaattgtacatggagatcgccagtaaacattgtagtggaacattggtatttacaatagtgtccttaccat

SEQ ID NO: 259876 - DNA, 436 bp, Glycine max
agcttaaacattcaacttcgagcgtctcgatatattacgagtctcaatcaaacatccgagaaaaaagttattgtcgtttgaatttgctcagaggttcaacattcaattttgagcgtctcgatatatgacgggactcaatcagacatccgagtagaaagttattgtcgtttgaattagctcagagcttcaacattcaatttcgagcgtctcgatatgtgacgggactgaatcagacatccgagtacaaagttattgtcgtttgaatttgctcaaaggttcaacattcaatttcgagcgtctcgatatattacgggactcaatcagacatccgagtataaagttattgtcgtttgaatttgctcagaccttcaacattcaatttcgagcgtctcgatatatgacgggactcaatcatacatccgagtaaaaagttatt

SEQ ID NO: 259877 - DNA, 448 bp, Glycine max
  unsure (1)..(448): unsure at all n locations
tagagccaattcanacgacaataactntttactcggatgtctgattgagtcccgtcatatatcgagacgctcgaaattgaatgttgaatctctgaaccaattcaaacgacaataactttttactcggatgtctgattgagtcccgtaatataacgagacgctcaaaattgaatgttgaagctctgagccaattcaaacgacaataacttcttactcggatgtctgattgagtcccgtcatatatcgagacgctcgaaattgaatgttgaagctcttagccaattcaaacgacaataactttttactcggatgtctgattgagtcctgtaatataacgagacgctcgaaattgaatgttgaagctctgagccaattcaaacgacaataactttttactcggatgtctgattgagtgccgtcatatatcgagacgctcgaaattgaatgt

SEQ ID NO: 259878 - DNA, 422 bp, Glycine max
  unsure (1)..(422): unsure at all n locations
agcttgctaacccatggaagctcctaatatctcccacactctntgnggtgggccattcttggatggccttgattttctcagggtccacttggaccccatttctaccaactacaaaacctaagaaaactatattatctacacaaaaggtacacttctctatatttgcatagagggtgtttttcctaaggactgaaagaacttgtctgagatgtcctaagtgatcatctaggctcctactatacactaaaatatcatcaaaataaacaactacaaatctacctatgaaatcccttaagacatgatgcataagcctcataaaggtgcttggtgcattagtgagcccaaaaggcatcactagccattcatacaaacacaaactggtcttgaaaagcagtttccactcatcaccctttttcatcctg

SEQ ID NO: 259879 - DNA, 374 bp, Glycine max
tgacatgcatgtcgctagagttgccttgtcatagccatggctctgtcattcatgccacacttgcttaccttatgaggcgtgtatcacggctctgacatccttgattctttgcaccctccttacacgggttgatctgcatcttttggtaattcacatatcccttactgttcatgactcttctgagtgtactaggctccatgtttgctgcctatcaacctctcattgaacgagcgccctctattcggagacgcctttcattcttatacatcaaaatttatatttgagctgaccataataatgatgatagcacttcgtctgatcggcacgctctgctccttacttgacattccatggtattacggttgtgatcctac

SEQ ID NO: 259880 - DNA, 342 bp, Glycine max
aacaaagccttgcttttataaactcttaatgtctgggcaagacaatcatttagaagagttattaatcctagaagaacttaaaaccaacttgaataagacaaaaaccttttgaagagtcacatcgtttgatatattcagagacaaacactggtaatcgattaccacattaccaaattagtcatagtaattggcacattatgttctaagcttgtgttgaatttttactttgttgatggaattctagatacatgcttccatgtattcttgtcattcttagactatcttgtgaatgtgtagtctaattcatgcattttatttagctcataacatgttctaaatcaa

SEQ ID NO: 259881 - DNA, 392 bp, Glycine max
  unsure (1)..(392): unsure at all n locations
tcatgatgatgaagccagctattgtgatgatgccagctgcccatgtgattgagcctcgagcttgagatccagcatcatggatacggttcaggattccatactccagaggcgaaatctagagacccatttcaagacttcatacacgcattggttttttggatctttttacaaaccttgtagcgcatctttggtttacaaaagaattttctcagattttcttacgttgtcggagggattactctctggtaatcgatacctatcagcagntatcgactaccaatgaccacattggtttcagcatctatcaactgatttggcaattttcaacatgattttgatatggtgtaattgattgccctatttaactactcgagtacgtgagactttgaccg

SEQ ID NO: 259882 - DNA, 270 bp, Glycine max
  unsure (1)..(270): unsure at all n locations
atcttattcncaactataggactatttataatacatgccctacaatccagatttctgccaaggggtattgccaaaacaaaaaaaggggaggggtgaaacccttcttcaccccattctctccccaatattctaaaatcactaacggcgtatgggaatgcacgaaatatgcactccccaggcaccatttttccattcttgctctccattatagcatattgcgcaatcttctacaataaaatactgctcccgtctcagttatggaatttcatt

SEQ ID NO: 259883 - DNA, 444 bp, Glycine max
  unsure (1)..(444): unsure at all n locations
cattacgcaacataaaactcagcttcacgagctgagccctctctctcatgtagaactcatattgaanaagaaggctatgagggatatcagccattactccaaaaatggctaaattatatgatgaccatttcgctatgaggagagctcgtctcccttgaacaatttgatgcttatactttatttctcctaagacatcaattgtttttcgaggcattaagctaccatttctattactaagtatcaaagtcccgattgttttttgaggcagctttaacaattttattttgatggtctacgtggtgatcttcatttcatttatacttagcttatattgctttagatatttttcgttgattgatgcaatatgccttgcagtagtgggttctataatcgaataagcattattcaaaaaaacatttttgatatgaaacggctcatcccaat

SEQ ID NO: 259884 - DNA, 434 bp, Glycine max
agctttgacttttatcatttccacatgctttatagttgaaaaatggaaccttagacctaagacccattctagttgttggatcgatagcgaggacgacggacccaacttgctaaaaccaggtgttaatcttggacataaaaccctcgttcaatatttaacttaatttggacaaagtttggttaagaaaactttagaaaaatattaattttggctacagcaatggcttgcatgaagttttcatacattaaaccagcttttacgtaataataaatataatttatttcacatttcctttttgttacgctacgtttgttgtaaaaatattaaatcaccggcaaggtaataataatgttgattaaatgttcaattcctacggattgatgattattggcatatacacatactaattaaagccgtctaaacatatgggtttc

SEQ ID NO: 259885 - DNA, 386 bp, Glycine max
  unsure (1)..(386): unsure at all n locations
tggcaacaatccatccagctaccttgttgctctataatacacgcccgaagtagatcctctagaggctgaatggttcgttcagcctgaccatctgtttgaggatgataagctgaactaagcttcagctttgtccccaaggcttcatgtagactcgtacaaaatcgcgaagtgaacctcggatccctgtcagatacaatactagaaggaattccatgcaaccttactacttccttgatgtacaactccactagcttttccattctatacttcatattcactggaataaaatgagcagatttggtgagtcgatctactatgacccacacggcatcatgcccacgactaagtttgggtaaactagatacaanatccatagatatgctctc

SEQ ID NO: 259886 - DNA, 425 bp, Glycine max
  unsure (1)..(425): unsure at all n locations
agcttgaggagactcctttctatacctgtttatgttgaagcttcaaagcctgacgttttacatatatgtttttgtataataggtggataatgtgggggaataagattctctctcacgagtagtattattttatcgtatcgatgtttgtggatttctcttttgttccatccctaactgcctttttataatggagaataattatttcatacagaaacaggaaagggggagggataaattttaattaataggtaacgtgatagaaaaaaaagagacagaactaaaacaagatgaggagggtgtgaagaggatgcacaaaatttaggtgagcaaaagccagaactcttctacaatgtgtcatgtccttaatggntggttaggaaaaaattagtctcgacagactacacatacctgacacctgtaagaat

SEQ ID NO: 259887 - DNA, 445 bp, Glycine max
tgttacagaacttaggaaaaatcaagaacatgcttgttctcacatcgttcgcgtgtacgatatccactcgacaaggtttgaagtagaggagaccttcaatcctataacgcaacgtggcggacaaaaatgggcagttaacttgaatggccattattgtcaatgcggaaggtattctgcgcttcactatccatgttcacacattattgcagcttgtggttacgtgagcatgaactactaccaatatatagatgttgtttacaccaatgaacacatcttaaaagcatactccgcacagtggtggcctcttgggaatgaagcggcaattcctccttctgatgaggcatggacactaatccctgacccaactacaattcgtgcgaaaggtcggccaaaatcaacaaggataaggaatgagatggattgggtcgaaccatctgaccaccga

SEQ ID NO: 259888 - DNA, 462 bp, Glycine max
  unsure (1)..(462): unsure at all n locations
gatctctaagcacctgacgatgcagcttgcatcctaaggacaacacgttgttatggataataattagcagtagcaacagttagaaaatattatacatgcaatctccctcacctactctcatccctgacttgtgaacactcagaaacttggaagttatctaacaataactaactggtgcagtacccaacaaccaaaagaaactcatcagaaattttacaaatagtttaatagagattgtttgacttgtagcaatatttcaccatgtatataagtagtttgaaaaaaaacatgatgaagacaatcctaacagcctgtataatgcaccagcttcttctgattaagacgaaaaagtagtgaatgacaacaaaaagaccatcttatttattgtagtagcgaatagttctcanaataaaccggtctattggtacaataagtgctcattntttaatatgctgtcagctc

SEQ ID NO: 259889 - DNA, 274 bp, Glycine max
atggatctcgaacctgaaacaaaaattgaaggagcagagaggaagagagaagaatcgagaggttgggaagagggttgttggttgcgaaggaagctagtgatgttggaaaaggaacttccactagccgccatgtttactccgaccaagttggatctttaaggaaccattggaaaaggctattaaggtggttggttgatgaataattgagggaaattgttgtaatttaagacttgtggcggaagaagctggtgatgatgatttcagtgatgtggga

SEQ ID NO: 259890 - DNA, 438 bp, Glycine max
gcttaataaatctatatattgtttaaagctattcttccgtcagtggtaccttaagtttcatgggacaatttcttcatttggttttgatgaaaaccctatggatcaatacatataccacaaggtcagtgggagtaaaatatgtttccttgttttatatgtaaatgatattttacttgcagctaatgattggggtttgctacattaggtgaaacaatttctctctaagaattttgacatgaaggatataggtgatgtatcttatgtcattgtcattaagattcatagagatagaccttaaggtattttaggtctatcacaagaaacctgcattaacaaaattttagagagatttctaatgaaagattgttcaccaagtgtcgctcccattgtgaagggtgataggtttaatttgaaccaatgctcaaagaatgactttga

SEQ ID NO: 259891 - DNA, 454 bp, Glycine max
  unsure (1)..(454): unsure at all n locations
ctaagcttgttatgtgtcttgtagganaacgcgaagatcattctgtgttggtctattgataagtcacacgacacttaagtcatgccttattggtgggttcttgcacaggcaatactagggcctaaacattcaaatcattcaaattccattccaaactcctattttcattcccaacaacagctttcttcattcctaacacacaaccatgattgttttttgcatttgctacatggtctgtgatgtccacagtttttgaactacaagttacttatctattattcttaatagcttttggcagctagtgccttggaggaaacaaacatatttcaaaacaaattgctaccggagacaatatctaacggcaccaacatttgggatattcaactactagaaggttagtgccaccacatccttacttcagagtgtttttgctgtgttttttattgcttatttt

SEQ ID NO: 259892 - DNA, 169 bp, Glycine max
ttgatacctcacggtccactaggacctcatgtctaccaactacaacctctacaaggactatgttgtctccacagcagggacgcttgtgcatatctgcttagagggtgcactgactgacgattctgagagctcggatgacatttccatcggatcatgtaaggtcgcccgg

SEQ ID NO: 259893 - DNA, 453 bp, Glycine max
  unsure (1)..(453): unsure at all n locations
tcaatactatgaagatactcgttcgtatctcatactggatacgctttatcctgttttggaattcctgttgactccggaggagtatgatgagcgagacaatgtttgtcaatacaatgtgcatcaagtacatctagtagaggctatagaggaccgaggtgaccatttggacatgtcgcccaaagagaatgaggagtactagaaacttttaaggcagttggagccaatgtctaaagaggaaagtgacaaacattccaaggacgcgtcttagttaatttagtattcctagtgtaataagtggtctactctagtcctagttttctttaatgtttntgatgtattttgagagatattttctccatgaacatgtattttattatagtaagaatgtaaaatgtatcttgtgtattatcacactattatgggttggattcgtatatttatctctgacactac

SEQ ID NO: 259894 - DNA, 431 bp, Glycine max
agcttcttatccaaagctcatcttggtggtgaagctccttcttccatggcttattccctagtggatggcgcctcctctcacctcttctcctttgtcttccgctgcatttccatggtggaaaatcaccattaaaggacctcattgaagctcaaagatccagcctccatagaagccccacaagcaagcttccatcaagtggtaatcaaagcacaagagcttcaagtaggtgctccttaaacctccattaattttttttctttaccttctcttccattgttggttcttcatttttttccatgtatctcctcacatgtcttgttctaaatgttgttaacatgattctttagagtttccaccgattaaacttgctatagaagttagatttgattttctatgggtcaaatttcttgttcttgttcttgaaccatgaa

SEQ ID NO: 259895 - DNA, 457 bp, Glycine max
  unsure (1)..(457): unsure at all n locations
tgtagagttatgtctcatatcgatttaattgattacagctttatcattatcgattacatagttgttnttgagacaacaactaatttatttagtctctgctttaattgattaccatatgatataatcgatcacttctctttctataagtgtttcaaaagtgaacaagaacactttaatcgattactttgagtatctaatcaattacattgttcttgagctatttccaagttttaggaaaaacactttaatggattatattgttcttgagttgtttcaaggttttggaaagaacattttaatcgatcaaaaagataatctaatcaattacttcattgaattaatcgattaccttgtagatttaatcaattacaagcggttataactattttctctgtaaataaccagcttgtgttctcttcaatctaatctcggaaataacaatataagcttctgaatg

SEQ ID NO: 259896 - DNA, 439 bp, Glycine max
ctgcaagcttgatgtttgacatgaccaaaactttatgttatcggctctacctaaagcagtcggtgtattcgtttaaaatgcatgaagatagatcagtatgagaacaattggattcgtttaataaactgattctagatcttgaaaatatcgatgtcaccattgatgatgaggatcaagctctgttattggtgtgctctttgcctaagagttactctcatttcaaatagactttattgttcggaagagattttgtttctcttgatgaagtggaggctgctctgaattcaaaggaattgaatgaaagaaaggaaaagaagtcctctacaagtggtgaagggctgacagcaagaggcaagaccttcaagaaagatagttaatttgataagaagaagcacatgccagaaaattagaagaatggtgaatgaaacatcttcaaaat

SEQ ID NO: 259897 - DNA, 446 bp, Glycine max
  unsure (1)..(446): unsure at all n locations
tataagggctganaggatgcacctattagttcgctatatcttctctctctctctctctctttctgtcatacacacacacacacacacaaatcattggttggggaaatgtttgacttttggctatctcgagagcgttttgaaatgtaaaggtcgtaatcattacgccttttttgaaaacatatgatgacattaaatgcatacggacaatacaatagttgacaagatgactcttcgaatacttaatcactcagatttgacaaaagacaactattccttcattcccattttaagaccaagataaatacttggctaaagaggaaatcaaattccctttaagacttgactacaacaagattgatgagtgttactcaaactcggttggtagatagcaatgtctgggatgaggacttgagaatattttacacaaaactactaccagcagcttc

SEQ ID NO: 259898 - DNA, 54 bp, Glycine max
cgtatccttaagccacctgaggatgcagctgagtatttataggcatctattttt

SEQ ID NO: 259899 - DNA, 435 bp, Glycine max
  unsure (1)..(435): unsure at all n locations
agctntaccactaagcagaaattatacctcatagtttaatcacttggtagaagcaacaagtattaaccatcaagagcaaaagcaaaacaacaattcaatgtttaaccattcatggcaaaaacttaaacaatgcttaatcatcacgggcagaaacttacatcaacaaaatagaagaatcacaaaatctgtcttctttgaggactttttacaaacactttgtgaaccaacaataaccaaggcttaaccactcatgacagaagctaacaaatgaacaatgcttaaccaccacacatgatagaaactaaaatcatcaaaataagcctaaaagactgagacaataagccaaaattttcaaaattttcagaagcatttaatcaaacaccttgtaggcataaattgggcagtgctacacatagagaaacttacacaaacttc

SEQ ID NO: 259900 - DNA, 458 bp, Glycine max
accttaaaactcagcttgcaagctgtctctctcctatttgtatatatatatgttatttgaatgaaataaaaaaaagcaactgagggaaaaagtttctctcctcacatattcaaaacttcaagtattctgtttgttaatatttttaaaataataggttagctagataagtattgtaagtttaggttaattaagattaataggcattgtaaggttaggttagttattattattaataaattaataagtatgctgttatttgttattaatttttatgtagtaacagatatttgaagagtaagttaggttaggttagttagtataaaaatattatttagtttgtagtatatatttttagatttgtagtatatatttgaaggttagtttgtataaaaataagtatgttgttattagtttgtagtatatatctgaaggttagtttgtactatatatttgaaggt

SEQ ID NO: 259901 - DNA, 429 bp, Glycine max
  unsure (1)..(429): unsure at all n locations
agctttataagtgctggtctgggagacgattgtttttgttcacgatatgtgaacatgatgttgcaagtacttcagatttggtcctaccatgcgcctcctgatttgcagctgggaaattggcaagcggaggaacgccccggcatttacgcaacaagcataatgtaaacctttacggctttaaaagctctatatctgggcctatgctttagagttatcgttccgatgaggctttgtgtgttttgtttttgaatttataatgcggggatcttgcttcatctgttcctgcgctatacccattctcattcattcgcatgtttactgttttttctgaaacggcagattcgatgacgagtccaccgaaggtactaatacctgtgacccgtctatcaacgtctagcaagaaatgaaccanactgaagatgatggaga

SEQ ID NO: 259902 - DNA, 451 bp, Glycine max
  unsure (1)..(451): unsure at all n locations
tgtaggattatggggtacccatcacatgtggtactatgtggctatcgggcgatggtgcaagacaattctgcacatccacaaatcacgtataaacccaccatcccctggtgcccacctccaactgagctcacgtactcccacgtagcccttatcctcgttcctctcaacaccgggtccccatcaatcctcccaagcttccacaacatccaagtaattccacatccaatcatcatgaactaacaaaaccaagcaaaataggcaaaggcagaaaactctgcccacaacacaaaccaatatcacagcttttcacatacaaataccctagtaacattctcttcgttccaattcgttaaccggtggatcgactcgaaaaatttactggaagtctctagtacataagtctnacatttgaccgttgggatctgctagaaaacgtccagaacccatcggg

SEQ ID NO: 259903 - DNA, 432 bp, Glycine max
  unsure (1)..(432): unsure at all n locations
agctntgaaggttaactgcataccctatatttatgtgcatgctcaaattaatatcacatgccagagttcatttttatacatcaaaagtcactttaagcacaaagcttatcttcattatatcaataaatgcatgtaattattaccttttgctaaaaaaattctgtcctaaacagcctctcctctaaagtataccaaataccagcacaagaaaaactactacaccagccacaattgcagccacggaacctgcagacatgctacttccattttctgaggaaaggatgaagtctgcttgattgttatagaagacattgttatacgagcttatatggcatgttttaattgttcctgggaatataaagaatattcccaactaattttataattaaccaacacattttttattaaatacttaagaataatattctcatg

SEQ ID NO: 259904 - DNA, 427 bp, Glycine max
  unsure (1)..(427): unsure at all n locations
tgaattctccaagcatgtgtttaacacacgaaacttgtgtgctactttacgataatgatatgtcaaaaccagactggagaagtatgatgcagttgcatggtagatgtttaaagtggtttatatttcccaatttccatgaactaatgctatttcactccaatagcaaggtttgctgatgggccattgcattttggtctttttctgtatgtctgtatgtagntcaaccttaatgctgtataacaaattcatgtctacatctagaagccaccagaagttatgactatttctttgattagttccaaacatgtttcaaatgtgttttctctcaaatgagtcacttgattattgttaatagctaaacttggcaattaaatggccacttgatccttgcagattaatggacattataaatttattatatcattat

SEQ ID NO: 259905 - DNA, 427 bp, Glycine max
  unsure (1)..(427): unsure at all n locations
agcttgaaataaaattagtaattaatgtacataaagttagaaattaagtgggaataattagggttgattattggtgattttgtttccatagaattagaaaaaagggtaattaagtcataaaattttaaaaatagaattttagtttaattatttggtaactaattaaagtgtctaattatatgatgtagaataattaaaataagatagagttgtaataccctgaaaaattacaacttagactaacagaggaaactctatgttgtgtcatttgtgtgtgtgtgtgtgtgtgtgtgtgtgtgtgtgtgtgtacgataaaatttatcatttttagaaaaactctactttatccttttgtagttagttntggaaaagtgcaagaagccatataaggcatggctgggctcgtaaagagcacctcatgggttgt

SEQ ID NO: 259906 - DNA, 433 bp, Glycine max
taagttattatctagtactaatatattactactagacttgattatttaaatattctaactttatgatttattgttttgttttattatattgttgaaatgtttaattaatatattatatatagatacttttattattattatatgaactagactcttactagtctatgaattgaatccacaagtcgagtttatgaaactctcacgagtttagataaactcttgaatttgataacattatttatgattcttgctaattagatttttttttcatccaataatacaaataagttaaataattatgtaaataaaacaacccagaaagatatttatcctaagatacaacatattgaacaatttctcacgtgtcatttttttacacattataaaatcaattctttcatgatgttatttttttttctaaaccaccttatga

SEQ ID NO: 259907 - DNA, 400 bp, Glycine max
agcttattatctacattgtcaaggattattttctttacatgaagcattagttctctattttaagaaaatgtcttataattaattaccattttctttaatttttataagaaaaattatttgacaattaatccttgtttttcacgacatgaaattaaaaatagtataaaagcttatagctacatgtattttattggctcgtattggtttaattttgattttcaaagataggagaatcatactatgtgatcttcccttatatatatatatatatatatatatatatatatatatatatatatatcttgatgctacctctgagtgatgcgaaaattaggtcttgtctaatgccttatgtttgaggttgaatcatcctcacacctgcctatgaactatgtatttt

SEQ ID NO: 259908 - DNA, 426 bp, Glycine max
  unsure (1)..(426): unsure at all n locations
tgagaatggngtttttctaacacattgtgggttatcatttatttaatatcagntgcattctcacaagaaaaagtttagagacattggaagaaacttaagtctttgtttttgatgatcaagttagtaatatcagagagggagcctttatgctttcttcgagaactgacaaccaaatttgtaagtgcaatgacttccctaatgatatggtggagaagaatcacatcaacaaagtaaacttatcacttgcaaaaaacattataattatgttcacgaaaaattaccaccatatacatcttgagtatatatggcatggttcatttgacattcgattttaaaatactaaattttggtgcaaacgtcttagatgtgcaatgcaattattaccaaaactaaaattacaaggttcttggattttctttaaccttc

SEQ ID NO: 259909 - DNA, 393 bp, Glycine max
catggcgagtaaaatacggagaacttttttttcccgccaaaccgcccaaaccggaaccccagtggctcactataatcatcgaaaagaaaacgccgactcgcaggaaatgaatatggtgaaagccgtacacattgacaagaacttggcgacgattatctcaaaatagcgtgtctataacaaccctctctggtcccgtcttacgaaagacatcaatccttatttttctttttccacaaggaaaccaataattcatgccgattgtactgcggaagccaggaccatctttcaaaggagctcacgagtttatatatcacgcttacagaactagaaccattaaatacgatggccatagctaaaactaaaaaactaaaatagtactcgcataagagtcgc

SEQ ID NO: 259910 - DNA, 340 bp, Glycine max
ttctgaagaagggatcaactccattatctagctatagccttatgtgctacctaggatagctcctaccccaacgatgggaatgatcaaagagtccttggtccaagatgtggacgggggtcctaaaccgatggataagaccaaattccaagaagtacgcgtctaatcaaatccgggaagcatttttcctctaattaatatatatctatcaccttaatagaaataacactagctacataatcagaactaaccaagcgagcacgcagatcacctaatgtgaaattaacttaatataaccacaaatcatgagtgtagatatgcagtatcaagtaccgcatgatga

SEQ ID NO: 259911 - DNA, 456 bp, Glycine max
  unsure (1)..(456): unsure at all n locations
gtcacctgaggcatgcaagcttataagaacaaaattgcctcaatcatttcctttatgcatgggaattgggacgcatcaacaagaatcaagccaaggctattgtgcaagcaatcaatggggcaaaacacaccaaatgattatgatgatggatggctcaaattctcacaaaggtaaactcatcactttcaaatagagctttcaaaactatcatgacatgtagagaaaaaatcaagggatttcaagtcacacaatgtccagaaacttttaatttcaaaaacaattaccccattttcttggaacttattctattaattcaaaagaaaanacattccaaaggtctaccgtgcacacacaaaatgaccgaaaatttttaaccaaaaattccgacaaacttaccacctttaccaatttaccccacctaccaatttaccaaacccaccaaagctaccaaaacca

SEQ ID NO: 259912 - DNA, 397 bp, Glycine max
  unsure (1)..(397): unsure at all n locations
atgaattcgttaatcgagataaatcaacggccaagccttcttccactagagagattgaataacaacccttgttataacccagcaagggtcctaagatattgctactaactatgcagcacattaaccttgaatgtattgagcttgaatatttaatttaatggattaaaaaggtacttcatatcaccaccaaatcagtggctatgacaatccatcatcaaatttctcattaaaaaagaaatcttgacattaatgaaatggataaactttcaatcatatgagctattcaataaagtatatgtggttccaaggtgctagtatgactggattntgataattttaggtattgtttgtgattataaatacatgacacgaaaaacattttataaaggtgaagccc

SEQ ID NO: 259913 - DNA, 374 bp, Glycine max
agcttctcggaatattatgcacatgaattattcttttgtttgataagctatgaccatttgaatttctgagagcattcgttgttcacttatgagcgcctcgatatattgtgcacaagaatcggacttccgtgtgacatgttatgaccatttgaatttctcgagagcatttgttgtataatttcgcgtggttggatatattgtgcgcccgaagtccacctccgtttgacaaggtgtgaccattcgaatctttcggagctcccgctgttactctacaccgactcgatatgtgaggcgccaaaattggacttccggggacgggtttggacctatgaaatcgtgcagaccttcgctggtaaatttcgggcgtctcgatt

SEQ ID NO: 259914 - DNA, 195 bp, Glycine max
tctcgatatgtgatgcacctgaatcatactggcgagtgattagttattaccatatgaatgtgtggagagcgtccgtagtgcaaatgctagcgacacgatacatcacgcgcctgaattggacttccgcgcgataagacatgaccatatgaactacccgagagcttgcgctgtttcgaaccaagcgactcgatatgc

SEQ ID NO: 259915 - DNA, 436 bp, Glycine max
  unsure (1)..(436): unsure at all n locations
actaaaatatcaactctacggggagcacctccttntcctagggaaggttattttgctgtctcacaatatacaggaccccttggctatgcattgagactattttgggcaaacaaacacgttttggtgaagaaaaattcagacaaaaagctgccctaatgcttccgagatgtttccgtcgatgattctgtgaaaattcttcatcggtcgtcgccgttcttcgtacattcttcgacgctcatgggacttcaaccggcaagttcccgaaatcgaatctttcaattcattctatgcacccttagtggcccctacttggttagtgtactatcacttccatttggcttactttcagttatcttctattgcgcttcaacgagatttaagcatttatttaagacgtatctcgcctcataaatgatataatgcaattcaactgatc

SEQ ID NO: 259916 - DNA, 419 bp, Glycine max
  unsure (1)..(419): unsure at all n locations
ttaagtcacctgangcatgcaagcttgctgctatttcaacacctcctagctatgtttcagtgccaatgcttgatgaggaagtgcgctcagttatgcactcatatggtataatgaatgataagcactatgttgacccgctgcatgtaattttccactggacccccctccctgctgttattgcaagttctggttctctactgatgataatgtgtataaataccatactgttgacatgcaatgctatgttttggagagtttggtgaccatttttattgaaggcaatgggcgttggctatgtaagagaataatagccgttataaaagctgcaaacaccttgggcctctcattttctgaggcggtcaacaaggcaccaactgaactactacagctgctttcgcttaaagcacaagattcctttg

SEQ ID NO: 259917 - DNA, 428 bp, Glycine max
  unsure (1)..(428): unsure at all n locations
ttgcgattgacgggccttatcttcggccaccacgtcactgttcttgttgacggcgggagtactcacaactttgttcaaccacaggtggcgacacagttgggcttaccttgccggcaggcagagtcacccctgcgggtcatggttggcaacgaccaatacttggagtgcaccaaccattgcgaagatgtttcagtcgtgattcacgacacttattttaccctccatttatacatacttccaatttcaggcgctaacattgatttcagtgtgcaatggcttaaaacgtngggtcccgtgcttaccaattataacacattggccatgcagttcttntatcangactgcctcgtggtgctccaaggtgaacatgaaacacagtcaggccggctcacccacaatcaacttcgtctgatttgccatcatcagtc

SEQ ID NO: 259918 - DNA, 460 bp, Glycine max
  unsure (1)..(460): unsure at all n locations
gcgatcttagaacgactgcagcatgcaagcttccccttggagaagaagtcattattgtatatttgctacaatccttnggtcattaaccatcaactttcccattggggcccatactgatagtatagacccatgacaaccaatagttgttttgtcaggagccaagcaaagaaaatacagatatattaaaaacaagataaatggcgataattcaaatgacagacaaagctagaggtctataagtagacttgatattgcgcaatgctatagtcagttctagtcagttttacggcaggaggcggagcacgagattttcactaagatgagaatgaagtctgggaactgaattggtaacagggagatttggctaatcaactacgtctatcaacaggtttgagatgtgattgtcattgcctcattgatatatgagcaagaaaggaggtgagacaggtcctgagtactg

SEQ ID NO: 259919 - DNA, 293 bp, Glycine max
aaacacatccctaaaataaaaattctactagagcttaacccaagttccaagctcctttcaaagaaagacctctacaagacgactccaaaaaacacacctccaacgtagatgcaaagccacaacaaaaaacagagttcaagggaagagaaagagccaacacaaatttatactggttcggccacacccctgtgcctacatccaagccccaagcaacccgcaagagagccacactatcgtcgaaaaaacaccatcacaagggcttaaccacacaacgacaaccctacctttgtgtt

SEQ ID NO: 259920 - DNA, 438 bp, Glycine max
agcttacccattctgttttaggggttttattatgatgcttgtgatgcttgtgtgctgaaatggctgatggaaaactgatagagatgaagggtagagttaatctagggtttaaaagtgagaatgtagttgaaattctgataccaatgacagatgtcgtaccggatgtcacgacatcacgcttcagaacatgcagattatatttgacagtatgaacagattaaacaagtaaataacacaagagaattgttaacccagttcggtgcaacgtcacctacatctgggggctaccaagccagggaggaaatccactaaaatagtgttagttcgaagatctaacagccactgtttacaaccttctcacctaaccactacccgtgcaacctctacctaagagccactcttagatatgagaacccctctcactccctctcaatcact

SEQ ID NO: 259921 - DNA, 469 bp, Glycine max
  unsure (1)..(469): unsure at all n locations
tacggacctatgaaactcagcttcaagaaaagatggcctcagcaaattccttatttccagataggaattctatcaatagacctccaatctttaatggagagggttaccactactagaaaacccgaatgcaaatttttattgaggcaatagatctaaatatttgggaagccatagaaatagggccttatatacccaccacagtagaaagagttacaatagatggtagttcatcaagtgaaagcataactatagaaaaacctagagatagatggtctgaagaggatagaaaacgagtacaatacaacttaaaagccaaaaacataataacatctgccctgngaatggatgaatatttcagggtttcaaattgtaagagtgctaaggaaatgtgggacactcttcgattaacacatgaaggaactacagatgttaaaagatctaggataaatgcactaactcatgagtatga

SEQ ID NO: 259922 - DNA, 411 bp, Glycine max
  unsure (1)..(411): unsure at all n locations
agcttgtgggattntgtgatagtgattctttctgagatgttgatgatagacaaagtactaccggatttgtattttttatgggtgattgtgtttttacatggagttctaagaagcaaggcattgcgacactttctacttgtgaagccgagtatgtagctgcaacttcttgcacatgtcatgccatttggctaagaagattgttggaggaacttcagttgttgcaaaaggaaagcacaaagatctatgttgataatagatctacacaagagcttgccaagaatccggtgttccatgaacgaagtaagcatatagatacaaggtattatttcattagagagtgcattacaaagaaagaattagaattgactcatgtgacaactcacgatcaagttgcggatattttcaccaagc

SEQ ID NO: 259923 - DNA, 449 bp, Glycine max
tattgggtgaagaaaagcttataaaatgtgacaatttcatataaaactatattttgaagtggatcagttagtcattagaaggagaattaaatagtcacacacaaattcactaggtcttttttgcacaaataaaaacttgcttatgatattttattttcaagttattgtatggaaattaaaaatttaattaggagctaggcttttcatcttaattactcagataaaatagataatccaacaaaaaatctctaattaagttaaacaaatgttatgttgcttcggaaaattgctcctggaaataacaaaacctattattacatattctggtttttgtttcaataaaaataaagtgtagcgctcgaaggttaaaatagttgtaaaaaaaaataatataagatcagagttgtacttatataaaatgaggttttccaaaacttaaaatatgtatg

SEQ ID NO: 259924 - DNA, 326 bp, Glycine max
tacttatagggacggaatatagaatttacaggactctgcataccctcaatttatcgtccaatagcgacctaatgctatattgtgcagcataggaagattactctgatgcacaggaaatgctctcgaaaatgaattccctcccgctcgatctacatacctcacttggacacgattactaggggataatggaggttcccatctagagaataatcacttatattcaagaatatgataatcgtgatatggtactcagcgtgataatggaaatgaccatggagagtgcttctaccctactcaagagacggtaattgcgttggcttatcgat

SEQ ID NO: 259925 - DNA, 404 bp, Glycine max
tgtgatcgactacacatatactgcaatcgagtaccttagcttatcttcagaaaacattctcaatagtcacatctttgtatgtggatcttgaatggctatcaaacgcctatatatatgtgacttgacacaccaatttgctaacagttcttcacaacaaaaaggtcttatcctcttataaagcaaaatcgttttatcctcttacaaattccttggcccaattacttgtgattcaataaggaattatttgagtgctcaaattggtcaatctatctctttcaagagagattacttcttttcttgttcttcattctgaaaagggactaagagaccgagggtctcttgttgtgaaagaattctaaacacaaaggaagggatgtccttgtgtgtttataaccttggaaagg

SEQ ID NO: 259926 - DNA, 431 bp, Glycine max
  unsure (1)..(431): unsure at all n locations
agcttgaagttggaactgtctcaaacatgttctcaaagcttcagccacaacaccagcaacagcatcaaccttttcaattctctcgtgaatgtcaaacgtccgaggacgatgacagccgaagcagcggtggccctaacaccgccgtcgctcaaaaatcagttttaggcggcggaggatgcagcgatggggccacaattgaagtggtgcggcggcccangggccgcccgcccgggtccaagaacaggcccaagccgcctctcataataacgcgcgaacccgagcccgccatgagcccgttcattctagaaatcccgggcggaagcgacgtcgtcgaagccctagcccggttcagccgcagaaaaaacactggcctgtgcgtgttaaccggttcgggaaccgtcgccaacgtcactctccgtcaaccttctttc

SEQ ID NO: 259927 - DNA, 454 bp, Glycine max
  unsure (1)..(454): unsure at all n locations
tgagcttctagtgcccggnttgactcatctacccctctactcctaggatcatcaagtaaagtcattgtgttatgacaaaaataaagttttcacaaagaccatttagattaaagtcaaaccaccatacacaagatttagtcatgtattcctcaataggtaaactccaaccttctattgaatacactcattcatttataatcttttcttttcttgaacaactactcatccaccacaatgcttatgcttgtggtggcacttcagaaccacaagcaatcactattcttatgcttgttcaaataaattntagcacatgtacgcttgctcaagtttatttcatcctttggatttcttaaatctcagaagaagaaaaagtcaacacatagattattagtttatcacacacacagtctaccactatgccaaacagttgattatttgattcccatattgtaca

SEQ ID NO: 259928 - DNA, 443 bp, Glycine max
ggatccttagagcgcctgcggctgcagcttgaagttgaaaggtttgtgcttttcatgcctaactcattgagtgacattggtatagattgtcgcatctgagtcttaatctatccatttgtacatcatgcatcatcatgtagagataggaagattgtttctaaagctagaaacttcttcaacacataaactctatattttaattgattcccaggctatccgaaatcgattacacaagtcttttaagaagcttgcagagatctttttgataaactctatactttagaataaaaatctaatcaattacttctttatgataattgatcacattgaaaatttaatcgattataggcggctataattgttttctctataaatagccaccttgtgttctgactttcatgcattcgagtgaatgagtttatactgagctcttgcgactcaca

SEQ ID NO: 259929 - DNA, 463 bp, Glycine max
  unsure (1)..(463): unsure at all n locations
cgacggacacataaatactcagctcatattgcagcgaatattaacagacaacactgttgtattgtatgacacatcaacaacaaatctgccacatgtgatgctagaggtcgacaatcaattgctatgtacaatgcaaacattattttggagcattggctcaaaattacttatagagtcaagtaagcttatcggatggcccctctttgggattcctatccccatgttggaatgtattgttgacatgtaacacatctatcctatacattgtgtatggactgacgctccaagaatttatacacctacccatgactcagacttgtactccactcatacataaacctattgataacattagcaatgaaaactgttcataccatatattgcaaaggatattaattattatttcctgaaacgaaagctctnnctctatatacttacaccttcgcactatgtatactatgac

SEQ ID NO: 259930 - DNA, 420 bp, Glycine max
agcttctccctctattccctataaatagggggaggagggaagaacaaaaatgttcaaccctcctgatagctgacaatcacttaaaattagtgagaaaaatcgtttccttgtagaaaatccaagccgaggcgcttccgtaacgcttccgagatgtttctgtgggtgatttcgggaagattttccgccgttcttagtcgttcttcgtccattcttcggtcttcaacctgtaagctcccggaatcgaacttttcaattcattctatgtacccttagtggtccccacttgtttcgcgtgcttttatttttatttcatttactttccgtacccccttttgacgtgctttagtcatttatgtaagtcattttctcgcctaatcaaaaacttaaataaattttcaccgatcatgtgaattgtaacat

SEQ ID NO: 259931 - DNA, 410 bp, Glycine max
  unsure (1)..(410): unsure at all n locations
tgagatgaggaagtgttgaagggtgaaactttctgctcttattgttgaccacagagtggtacctggagatatgtcgcggtggtcaggagaccttggggacgtcaggtggggtgctattgcccaaaaccaagcttgaccaatcccgacccaacccgggcatagtcggtcagtgagaacctgtgatgtacctaagcaggcgagctcctggcagtcaacagataaaaggaaaacaagaccacaaagcaaggaggcttgtggtggctggccagctgtgaattttgtgtaatatgtggattgtggcctctggtaatcgattaccaaaagtgagtaatcaattacaaggcttanaattgaggacaggaggctaagatggtctctggtaatcgattaccaaggggtgtaatcgatta

SEQ ID NO: 259932 - DNA, 454 bp, Glycine max
ctctaagcaccgcggctgcagctttccttggtgtctgcctaggttttcttcattatagagaaggagaagggattggagccacaatttcattgtctccatgtgaggggtatatctctctctatagataatattttgccactcccaacgatgagaatttgagagaaagagttccatagggggtgaccaaattttagaatgatccaacggttaatgagcccaagatcatagtttttctaagataggtttgagtgtatgcgggaagaagagagaacgaatttaggaggatgaaagagcatagagatatatcgtaattgtaaaaattgacctagtatatctctatttatagctagggtactctaagtctattatttattctatttttctttattttactattttataaaaggaactttattttactctttcattaaataaataaccaattaaaacatca

SEQ ID NO: 259933 - DNA, 452 bp, Glycine max
  unsure (1)..(452): unsure at all n locations
tataagaaccgaaattgcctaatcatttccaaatatgcatgtgaattangaagcatcaatcagaatcaagccaaggctattgtgcaagcaatcaatggggcaaaacacaccaaaagattatgatgatggatggctcgaattctcacaaaggtaaacttatcactttcaaattgagctttcaaaactatcatgacatgtaaaggaaaaacaaggatttcaagtcacaaaatgtcaagagacttttattttcagaacaattacccattacttgaacatatcctataattcaaagacaaacatgcaaatttaacacaacaaaactaaaaaaattaacaaatttaacaaaactaacaaaattaacaaaactaacaaaactagcaaaaccaaaaccaaagaacactccccccatacttaaaaaacacattgtcctcaatgtagcacaagtaaaagat

SEQ ID NO: 259934 - DNA, 457 bp, Glycine max
  unsure (1)..(457): unsure at all n locations
ttaagtcacctgcggcgtgcaagctntcgtgtctacatctttagcgagcttatttttgatcgtaaatgattcttatttttgagtgataaaatatctgctaaagcataatggtaaagataattattttttgatgattggttttttttatttccgtaattaatattcggatactgctgaatccctctattatctatctcttgaaacccttgcattttttgttgtcttaaaaactaagataaaaatgttactttttcattcacatttttttcccttttaacttcgttccttctggattggatatatcggtttctgtgttgtttagattaatatattttccttttatccataaaggtatattctactaagtagaaatatgaccgtttagagataaatctatcaactaaattaanattatacatactattatgactaattatggaaggggaaattaaatgct

SEQ ID NO: 259935 - DNA, 414 bp, Glycine max
aactaagctctattagctgacctttatcataagacagttgtttttatcagaaatagagctatctcttttatctagtgagaggatttcctaaattttgagtgattcagaacccttggctgtatcaaaggactttacaacctttgtggttccctcctggaaagaggattctttccttctttcatcatcacccttgttctttcaacccaattccgaaaatccacctctgcccagaattatctcgtggccataactccattttacgcactcaattaagtgattcttgagcctaaattgaatttaaaacgagacctttcacctcgtttggaatcacctatttggaccctgaacttcagttattgccatttctatatttctgccagcaccacttaactacgtttaccatccattctcctt

SEQ ID NO: 259936 - DNA, 394 bp, Glycine max
  unsure (1)..(394): unsure at all n locations
agctntgcctttagggcttgtacctcatcactttcttccgaagctttaacctcattgtctctcacagtctttagatttgggagccaatccaatccttgtgtccagactctcagccacttatgatagccgccgatgatcccattactgcttcccctaagctctctgtcctttcttcacgccgcagccaatgccttgcgaactccttggagtaccctcgcgttgtggtcactaaaatcccgtgcgatgaaaggcgtgatgctttcgtctgatggcactcctctcatggggtagccaagctgtcttatggcgaggacgggattataattaatacaacccattgttcccatcaagggaacatttggacatccttcgcatgcagatagaatcctgaatc

SEQ ID NO: 259937 - DNA, 448 bp, Glycine max
  unsure (1)..(448): unsure at all n locations
tatgcacggaaaatgtaattatgaaattgagatgcccgattaatctccatttcctagttaaccatgcattaggtaccatgttcaattatcttgttttgttgttgtgtgttttatttttttttttttttagaaatgggtttatgatcccaacatggttggctcatggtgcctaacacatgcaactaagaaggtagtgtgaagtttcacgcttccctttttttgtttttgttttgtagaggaaaacgcaaggatgagcaaacatgaaaacaaatggtatgcaattttgcagatcaaaaagtttgttgaacgcatatgcatgatgatgccatgactcatgcaaaatgtgaggctggaatatgataacggacaaatgcaggaacgatatgttcattatgatgttatgaagagatgcttatgcgatgcatgatatgaacgcattntacggaca

SEQ ID NO: 259938 - DNA, 455 bp, Glycine max
tcgtccgcagatctcctttgtaagaatagacttaactcattctttattattgtaacagcatattcagaaaaccaaaaccccacaatccatcccaggcaatatggttattcagtcctgcttttatcaagttctaaggcaacaatacatttcctaatgctaaagtcacctaactgtacacacaaatgggtgatcggaccaagagcatgcagaaattaagcattgaacacataaaacacaattaattagatattaaagtaattacatcaactgttccttagaaatccccaacaagggtgtttagctagtcattacagaaaaaccctaacacaaatgagatagagagtacagaataattattccttacacaagaagggggatccctcctcctcttctcagcatctcacaatcactctaaaactcactaatctctcttcaattgaagaaccttatgcttc

SEQ ID NO: 259939 - DNA, 448 bp, Glycine max
tcttaagcacctgagctgcagcttacgcagatttagtaatgaccctcttatctataattaaaataacttaatgccattaacctagggaattaaaacaaacttaatggctgagtgtaactgaaattgttggcaaccaaaagtcacccccaacagccaacaagtcagccaccatttggtctcccaaaaggctgatgcctatgttgccaattgggcccttattacaacttgaactaaagcccttttagttgattaacccaaaacatatttttggtcagccaactttacaaggattgggccattatttagacaaactaaacactctaaaattgaaataaagtggtgtcatttagtcctccatttgggccatgatacaactcacaaccttggacttttctccttgaaacttgggcttgtattcaaatagtatggacagcacttgttgaagagc

SEQ ID NO: 259940 - DNA, 401 bp, Glycine max
taacaaaaggcatgcgaagcgggtggaattcctagagcattctttttatgttattaaacataacaagggaaaaggtaatactgtagccgatgctctttctcggcatcatgatttactttctatgcttgaaacacaattgattggtattgaatgtttgaaaagcatgtatgaaaatgatgaaacttttggagaaattgttaaaaattgtgattaattgtcagacaatggtttctttagacatgaaggctttcttttcaaagaaaacaaactgggtgtgcctaaatgttctacaagaaacttgcttgtttgtgaagcacatgaatgaggtttaatgtggcattttggggtccaaaagactctagaaacattggaagaacatttttattggcctcatatgaaaa

SEQ ID NO: 259941 - DNA, 430 bp, Glycine max
agctctaacctcattgtctctcacagtctttatatttgggagccaatccaatccttgtgtccggactctcagccacttatgatagccgccgatgatcccattactgcttcccctaagctctctgtcctttcttcatgccgcatcccatgccttgcgaactccatggagtaccctcgcgttgtggtcactgaaaccccgtgcgatgagaggcgtgatgctttcgtctgatggcactcctctcatggggtagccaagctgtcttatggcgaggatgagataattaatacaaccccttgttcccatcaagggaacatttggacatccttcgcatgaagatagaatcctgattcttccttccttctagcgaaggaaccaattaacagacgcccctccatgctagccaagagttggtcccaattcgcctttcctt

SEQ ID NO: 259942 - DNA, 432 bp, Glycine max
atgccaccaaacaatggtcctcggacgagattttggtattacacctacactctcttattcttgccgtgcactataattattgcttcttacttttggataagtatcaattcctgttctttactttcttaacttagtagtaaaatcctgattaaatctatcaacattaagaaggatagatttttaattactaaaggctcattaataattaattcaacccccccttcttaattattttgaggccacttgatccaacaagtggtatcaaagcatgtatcttgtagaaagagtaaccacttcaagattcatggtctcttcaaattctttgtgtcctgaaggaaattccatccataggccacctatctttaatggtgagggttaccactattggaaaacccgtatgcacattttcattgaagccattgatttaaacat

SEQ ID NO: 259943 - DNA, 433 bp, Glycine max
agcttgtatgttgactgacattaattttttttattaatagctgaaataataaattataatatatatatatatatatatatatatatatatgcaatacatattactttttaaaaattctgtacaataagttataaatacttgttaatattaattggggtgacatgacttcactcgatcaggttagatttttaataaattagattctaaataaaaaagaattatgttagttaacataactttaattttgagttattataatcattcagtttaattttggcttattataataacatattaaatcagcattaaataaaaattggtaaaattgtatttgtaccctattttcttagatgggaagtcttgtgtaaaagttgtatgtgtttatttgatatggattgtagtagtattattttttagtgaaatcatacctata

SEQ ID NO: 259944 - DNA, 425 bp, Glycine max
  unsure (1)..(425): unsure at all n locations
cagctttaacttatgctgggaacgtagagtgacactctgttttttctctgnccatgacacttggactacggagattattggactctgatttggatgccaaaatagacatccttgaccctcaaaacctaggaaagcctataaagctagccgaatttgaatgtgcgtaacgaaagttatgttaaaaatatagttttaaacccttttagactgatatttgcattatttgtggaaaggtgaaatgggggttgaaattggaacttttggacttcaagaatggattttccatgcttgaaaactttgagaaatatatagaggtttcaaaaattggacttctatgttaatggaaaaaattatggctaaattatggctctattaataaattgcttctatagtatgcttctatcatgaaatcacatttaaaatat

SEQ ID NO: 259945 - DNA, 431 bp, Glycine max
  unsure (1)..(431): unsure at all n locations
agcttgagctgctatattacttcatgtttgttgtatatgaacactaaatttttaaccaatacttatttctacaaaatgtctaagctattntttgttacaaactcgagtgtttggatctttgttctcattactattaagtagggttatttttgcttaaggagtttcaagtgggtcaactcgtcaacaaaatggacatgatcaattgagtatcacctgttttgtaggtttgtaaacatgtttacgatgattgcttcattgcaattttgcaaattggagcattataatccattctaagtcaggtttgagcttaattgtagatgagtgtgttggcaaacggcaattctgattagagtatcgctggttatagcaaggttgcattatttgatgctgctagttcttactctcacctatatgctacaattacatcaagt

SEQ ID NO: 259946 - DNA, 364 bp, Glycine max
taccgactgtttgtagaatttatttcctggtaagcatgattaacgctaatctgcaaatataatacattacaaagtttaaatagcattcacagttttggatgtgtttgctgtctctttttgttatagttatttagtttatacgtcatgaaatttctggcttgcctctgactttgtttatctgattgagattaatgattgattattatggaagtaaactataacttattgctgttattctgctcgtaaatctgagtgtgtctccttttagcatgctggaactgcaattcgtccacatatgtctgatgtagtgtgctgcatgcttgaaagtctatcaagcctataagatcaatcactcaattatgtc

SEQ ID NO: 259947 - DNA, 371 bp, Glycine max
agcttctaaactctgttcaagaatgaagctcttataccacttgttagacaagtcgcctcagatatcttaataaggggggggggggggtttacttaataatctccaaacgccactcctaattaaaaatccatcttactttgtacttgagctattcttttcctacttgacagtcatcttatacatttattcagaagactccacttcaatttttatactatccacttttgagtaacccacctttacggtttatataatgcgaacaaattcttattctgattccacacacaccctaatacctgctccctgaacccatacacccctcatgagacttacaccaacttgatagaaccttttaactttcttaactcaca

SEQ ID NO: 259948 - DNA, 433 bp, Glycine max
  unsure (1)..(433): unsure at all n locations
tatggctnttgcattaataaaggtgtatacacggtttgtttatttaaggacacatgaatctacactagatgtttataagtcatgttgagaaatgtggtgcttatgattgttacatgaccaaatatgtccttagctaggagggaagttagttctttgaagatagtgagaaaatagaaaggagagagatagatccagtagttaaaaatatggaaaatggaaaagggttttaactataaaaaaaagtgagaagggagagtaaaggaaaaggagtttgaaagaaaaacatacttgaagtgccactgaaagccagaagaagcagtgctagagctagagcagccatgggaatggtgtngggactgaggctgagatggagaanaaaaacgtggtacagctataacagaaaagagtgagtgagtgagtgagagagaggagt

SEQ ID NO: 259949 - DNA, 421 bp, Glycine max
  unsure (1)..(421): unsure at all n locations
agcttcatgcttaagaatgtatgggataacttcattactgtngntcacaacatacaagtgagcctgtaacacatgttttacacttcggagtgaacacatgcagtcctcttgaacccttaccacccactctgttatcatgccgagactcacgaaggccaacaagtttagccttttcaatggattctgaacaaaattcaatggcttcttctacaatgtacctctcaacaatatatgcttctggacaatatagattctctgtataccttataagatcttcatgtatcactcaaccacgtacatccaccgtagataaacatgaccacaccatttgatttctctgaccagatacacaattcaagtgaatcatgatgtcaaacaaaagcaaggtgaaaatacaatctccactgggacactataattg

SEQ ID NO: 259950 - DNA, 212 bp, Glycine max
tatgagtatttatttttgatcttgggttttaccataaggatactctttttcctctaaatatttaacataactacatacattccaaatcaggacttagattcaaaaccttttgttaagcttaaaaaatctcataccaattgattccgtgtgcttgataatatcattctatgaatgtcaattttactctctttaaaggtttaataataaaataa

SEQ ID NO: 259951 - DNA, 433 bp, Glycine max
agcttcatgataatgaatcattattgtttcttgaagttttgatgatgactaagatgatgacaaaaagcccaaagaatgatttcaagattaagttcaagatcaagattaatttcaagattcatcaagaagattcaagattcaagaataatcaagatcaagattcaagactcacagattcaagaatcaagagaagacttaatcaagataagtattaaattttttttcaaaacattgagtagcacaagaagttttcataaaatcattacctaagagttttactctctggtaatcgattaccagaatatagtaatcgattaccagtgttttaaaacattaagattttcaaaattcaaaatgaagagtcacatctgttgatgtgtaatcgattacaccttgtcataccctaatttcgtccggggattattacttgatg

SEQ ID NO: 259952 - DNA, 447 bp, Glycine max
  unsure (1)..(447): unsure at all n locations
taatcttcatgtggctcctcctatctctaacatgggttctttatataacagatttcaattntttgaggaccaacaaggactcaaaatttcgcaaggacaaattccaaacatttcgatatttgttgggacaaaaaacatattttagcctataatttaagttctaaaaaatgtcatgtaggctcagattcgtccaagcctagccctaagccaaaaaaataacaaatttcaattttaagaggaagaaaaacatactgaaaattttgcagggatgacttctgaacttttcaatatttataagaacgaaaaatatatttaaattaattaaacctttggatcatatcacttccctttttatctctcttttctattaactaaaatacttcattctgtggcttatgtttataatgtttcagacttcacagggataggataatacctctcaatatc

SEQ ID NO: 259953 - DNA, 400 bp, Glycine max
  unsure (1)..(400): unsure at all n locations
agcttggatgttatggatattattattattttcattcatnctacttagaactcatactctttcatattatattttctaatatctatatttcttatgatatcacatctttcttaatttcctcacccaatccacacaagaaaggattatacatttataaatatactcatttaatttggagcatcattagttgttgaatgtgttgccccaatcatacgatgccttttcgtttagatgtggattgtttttggcattatacgcctccggatatatataacttttggtgcttcgcatttcttaattttattctacgaaattaagtctttaaaaattattctcatcgtcatattctttttctgtctaccatttaaattcaaaaatctatttaatcttaaagctcatt

SEQ ID NO: 259954 - DNA, 306 bp, Glycine max
gcacacggacacaagaaactcagctggtaattcgcttaccctgtcggcgccttatcgatattcttttacccttgattctatttgccatgctttattggcaaattgttccaatgtttctttccctcatagactttggctggtaataaattccttatgccttattctctctctccccacacacgaaaaaaaaagaagctaccattcgtagcctatatgtcatttctaagattaccgcgattgtatccttgcatatggtcacacacacacttatattaattatttaggaccacagagaaatgaacgata

SEQ ID NO: 259955 - DNA, 437 bp, Glycine max
  unsure (1)..(437): unsure at all n locations
agctatcaaaaatattaaaacacattacagtanttattttggtcactggtaatcgactaccaaagagtaaataccactttcatgaattcttaaaaaaatacttcggacataacttgcgcatcatcaatttagaaactctttttaagactctagagactaaattcgtcatttatcttgtatttcttggagtcttgccttggatcaaacatgagaagcacgtttctttggcatcatcaaaacttcatgacatatttgcttctacattcttcactcttagaattgctgttgtcaatatcttctcatgtcatcatgagaccttattctttcctaagaacttcttcatgacaactttcatgtatgctcaaatttattacactcaaaccaaataatctctactctgtcttccttactaactttcttttagatcttgctacctt

SEQ ID NO: 259956 - DNA, 426 bp, Glycine max
taagcttcgtccgagacatccttattagcaggaacctttgtttctgtaccgaggcaaacggattggttctttttgtttcttccaacgcatttctaaagttccaagaacttttccatcacccacaaccaccattagccaccacaaaccatcattgttctccattgaaaacccacactgagaggaacccttctaccgaagcggaatattccaacttggcttgcggtttcggtagagaacgaaaaccctaatctgacctttcgttatctttcgaggtaaccatgattctatgctcggttcttgttagtttcatcttggctttgcatcttttctgactttggaaccgccattgcatgtcttatgcttcctatgaaaaaccttaaagaaaaagactttgtcaacgttatcctttcatgaaatgcatggtat

SEQ ID NO: 259957 - DNA, 427 bp, Glycine max
gatcttgagatgaggaagtgctgaaggtgattcttcttgcttttattggtgaccacagagtggtgcctggaaatatgtcgtgggggtcatgagaccttgaggacgttaggtggggggctattgcccaaaaccaagcttgaccaattccgacccaacccgggcatactcggacagtgagaacctgtgatgtagctacacaggcgagctgctgacagtcaacagataaaaggaacaaagaccacaaagcaacgatgcttgtggtggctggccagctgtgaattttgtgtgatatatgggtagcggcctctggtaatcgattaccaacggtgggtaatctattacaatgcttaaaaatgaagacaggaggctaagatggtctctggtaatccattaccacggcgtgtaatcgataccacgcttgaaacga

SEQ ID NO: 259958 - DNA, 451 bp, Glycine max
  unsure (1)..(451): unsure at all n locations
ctcagctgctctaattacattgatgttgattattggagggatttgtatgccaatttttgtntaagggtagcatttcttggtaaaaactaactttccaaatgtttgccttcgcaggaatggccccgaggaagcttgcctcaaagaggtccaggaaggacaaggcggccgaaggaactagttccgctccggagtacgacagtcaccgctttaggagcgctgtacaccagcagcgcttcgaggccatcaagggatggtcgtttctccgggagcgacgcgtccagctcagggacgacgagtatactgatttccaggaggaaatagggcgccgacggtgggcatcactggttactcccatggccaagtttgatccagaaatagtccttgagttttatgccaatgcttggccaacagaggagggcgtgcgtgacatgagatcctgggtaaggggtca

SEQ ID NO: 259959 - DNA, 417 bp, Glycine max
agctttcttgagaaaacttccatgagaagcttctttgatataacttccttgagaagtgagagcttagctgcatacacccctctaataactaagctcacccccatgccaaaatacatgaaaatataaaaaagaagttcttaatgcaaagacctactcaaatgccctgaactacaaaggtaataccctatactactagaatggccaaaatacaaggcctaaaagaaggaaaatctattctaatattacaaagaagtgaggacccaaccttggtcccatggctcagaaaattaccctgggattatgaaaacccccaggctttttatcaactcaaccacaacctttggagtttttatcaatacccttgggggggggaatgaaaaatccctcctaaaaaaggagaacacctcccaaacttaa

SEQ ID NO: 259960 - DNA, 232 bp, Glycine max
gaactagctacgtaggcatggagcaaaggcagagctttctcttttgaactgacgcgacggaggactaatgtactaacattcaaaccagacaaaaaccacaacccacccgtctgactcggggtccatgctgacaggacaaggaccataagcttcccctacaaataaaggctggttaagtgctgattcatttggacagaagaaacatgcagctacaaccacatctggcaaatag

SEQ ID NO: 259961 - DNA, 450 bp, Glycine max
  unsure (1)..(450): unsure at all n locations
ctagagatcacgatngatgaggataactccaatagaatttctgatctctccaccagagaaagaactagtaaacataggaaagccatggatgcctcagtgcttgtcttgcagtaggccttcttttggggttgatgctaagtaagtatctgacaaagtcgataaacgtagtatcagtgacctgtaagtgctgctccaatgatgactcttctggaattatgtactccagttgatcagtctcctgtgcaatgtgtacaatgttaaagattagatggaaagaactaaaatgaaatttagaaggaggattcaaattcaaattatgctgatgcatgaaaggcctttatttttcttccctttattgtgcataactagtacgtgtgtatattcccctttcatttactctactttctcactcaaaatagacatactaatccatctgagcttttcctcaca

SEQ ID NO: 259962 - DNA, 252 bp, Glycine max
ctgctgctatgactcacgcagcggagggtcttctagattccggtgaggtctcctagagggacggagtgaaattcctccaagagcatggacgaaagcggtgtccaggaatgacgcccgattcgaccctgtctgctgatgaagtccttatgcatcctaagaccttggtaatatgcgcagacttggcaaattcgacttataatgcaacgtattgtgcattctgcaggagtgtaacctgctatttatccaacaaat

SEQ ID NO: 259963 - DNA, 452 bp, Glycine max
  unsure (1)..(452): unsure at all n locations
cttaagcgactgagcatgcagcatgacatggtcgtaatccgtttctttaataacgtgtttgatgattcgcctctgtgaaagagagaggttctatttctttctagtcatcacacacaatgtcaaaatgattctcaaaaggttcattcagctagcgtttacatgtgggtcatcccaatccactacctttcccttcaactcccttgttgtctccactaacgtgcaaaataattaatgcgtgcatgccccttaaccctgtgtcccctttctacaccatatgttatatcagttcaggactcctgttcccaccttagtttgaccacgttcaatgattccatcattaattatatatattccttagaatataacttgcaatgacttgccgattcttagagtatatgctanacaaatctcagtttagtaaacagtgcttgtaacgtgtccactttctactc

SEQ ID NO: 259964 - DNA, 440 bp, Glycine max
tcaaaattacatataaattaaccaatccctcagattctattatttcttacaaaggtattgcggcttaagggtcccttggtttgattatctttgtcatagtctttcatctgaattctttatgtctaggcttaccgaattaggcattgaggcccactcagttatgacacctcacagtcaaacaagttcacaactttcaggttctagccaattgtcagcaaaggatgcatttttttttataaagttgaggcaaagatcctttctgagattaacaacatgttagaggtactgggcttatttatcctttctataattcatcacaccagccacttactcatcagtctaattaccatgttgttttgggcaggaaattgtttgtgtaatagttgagaccattaccaaaattgtcatggaaaatcattcattgtgttatgcagcttgca

SEQ ID NO: 259965 - DNA, 212 bp, Glycine max
gagggaaggggaagagaggagattaaaagaagaagaaggaaaagaaagaaagaagcaaagaaggaaaaagagagagaaaaaagaaaaagagaagaaaggagaagaaggagaaaaagaaggaaggaaaagaagaggacgaaggggaaaggaagcaaaaggggagaaaagaaaaagagggaaaaaaggagggagagaaaaaaaaagaggaaaaa

SEQ ID NO: 259966 - DNA, 437 bp, Glycine max
agctttacaaattgtgatcatattacgtgtttatttcctttacaatgtgtttggttttgagaaaaaacgtaaaaggaaagaaagtgaaaataaataaatgaaaagagagaaaaaattgaaagtaagatattttttttaggtttctggcacgagaaaaaaattgaaaaaaagaaggtaaaacttttctttcattttgtatggttacgtagaaagtgaacagaaagaacatagacatgaatatgaaaaatataaatatccttaattaaggaattataagtctggattttaaattaattattacaaaaacaaataatattatatatctataataatttgtgattaaatgaaaatataaaatctctttataatattaatatatttaaattaaatatttttttatacaagagtaattttatatttttgtcttacaatataaa

SEQ ID NO: 259967 - DNA, 318 bp, Glycine max
ttttgattgctcgcttagcgcacggccacgcttagtgagacaatatgacgtttggttttaacaaagccttgtgcttagcccgacctcgcgctaagcccaattccaaattttcaaattctagagagttttggggcttaacgcagcaggcctgtgcttagcgttgtctgcaactcaatattgttttgcaatttgcgcttaacttgagatgtcaggcttagcgctaaatcaagctctaacttacagggatagtcttggcttaacgcatcctgtcgctaagctcaattcatgaaagttcaaattcagagaggaaattaagct

SEQ ID NO: 259968 - DNA, 362 bp, Glycine max
  unsure (1)..(362): unsure at all n locations
cgacccgggatcttnagtcacctgcggcatgcaagctttctcacaaactgaattcaaagtacacaaatggtggattttttgcctgtgaacctcaaaagtttgaggaagcatccaaagaagaagtttggagaaaatccatggacgaagaaatcaaaatgatagagaaaaatcatacatgggagctcatgccaaaaccaaaagaccaggagatcattggcctgaaatgggttaccaaattaaatataatgacgatggaacaatccataaacaccaaagcacgacttgccggtaaaggctattcacaactgctaggagttgatttcaacgagacatttgcttctgttgtgcgcatggaaacaatc

SEQ ID NO: 259969 - DNA, 431 bp, Glycine max
tcttagtctcagatgatgcagctgagtttgtagctaccttatgcactcctctaatgactatggcatcatttctggcgctgaactgctgagagttggaagccatcttctcaattaaatttctggcttcagcaggagtcatgtctccaagggctccaccactggcagcatctatcatacttctctccatattactgagtccttcataaaaatattggagaagaagctgctctgaaatctgatggtgagggcaactggcacatagttttttaaattgctcccagtactcatacaggctctctccactgagttgtctaatacctaagatatctttcctgatggctgtggtcctggaagcaaggaaatgtttttctaagaatactctcttaaggtcatcccagctcgtgatggaccttatagcaaggtaatacaac

SEQ ID NO: 259970 - DNA, 445 bp, Glycine max
tttacaccacacatgtaacaatataaagatctatagaataattttctttcattctttttaaaaaagttttgttcccaagtgatttccggcaaactcaagctttttcatcaaagagggcccactgaacttaagcttgtctaccccttttcctgtggatatcttcgttgaatattcattcctttacgcaatgagttgttttcggcaatggatttttttcacccatgcaaggacaataatgaattatgatctcttttccaaactcttttcgttcttctcaacctcaagagtaaaaacgacctctttcatagcacaatgcactttgttaacttgaatgaaaaagggaatattcgacatcgacagttcttttaaattcatgatcacgagcataccaaatgtttgataacagatgcaaacaaatccaatgcaaaaaagctgaaactcctta

SEQ ID NO: 259971 - DNA, 414 bp, Glycine max
  unsure (1)..(414): unsure at all n locations
ctctgaacgactgtgcatgcaagctcgagaaacatgctcctctttcatctggatgcttcctgtataagcttcctgatgggcttanatgggcctagggcttaaaacaccctccctaagatgatcagttcaccctcatcttgagtttttggcttaactctgttgacaagaatctaaatgtttgcaaatgattgtccttcgacgaaattacggtatgacaattgcccctctttacttatcttttattggagataaatgggaagtcaagataagacactaatttcggttgagctaactttcccccgaccgaccactaacggaagtccacaccatcaaactcgtgaagcatgaaacattgtagctccccttttctcgtctattcttctttatctactataatatttcaattattactat

SEQ ID NO: 259972 - DNA, 464 bp, Glycine max
ctataaatactcagctgtaaccaagaaaagctcaactacaacgacctctctatcctcgctgctaggttctgtcttttaccatttgagtttgcaatataattgttccttccaacaacactccactgtccaaatataaactacaatgtcatcaactgaagacaacaggaacatggaaaaccatagatttataagcaagtctgattcaacaaaagtcaggagcaacagaaagcgtattagacaacaaaaagtccatcttgatgttcagcatagtgtccatgcaagtctcaatccagcttcatcccatactgaagatgattataactaaccaaagacaccacctcatagtgttcatgcaactgccaatcgggctccacacgatgctgaaaatcattgtgcgttatcaaagttaacatttttatatctttacattgagctcatattagtaaattatgttgatacaatat

SEQ ID NO: 259973 - DNA, 89 bp, Glycine max
ctgctgattctaacctttggtggcataaatgcttcttaatccctgcaaatgcagttacatctactgctcagtgggatttcgctctatgc

SEQ ID NO: 259974 - DNA, 446 bp, Glycine max
  unsure (1)..(446): unsure at all n locations
gggaacttctggttntccaagtattcgaaccctgattaaatttatgatntaaccctacaaaaaaaatcataaaccatgtcttgttcaatagtttccttcagaacagtagcatcttcaacaaaattagtcttaattaccttgtaataatctaattccatccaaaaagactttaaatggttagcatattcagtaacaaatttgtttccatattttccagctaatgttttcacctttacatcatagacctaagtagcatctttaactttagaataagtttgttctattgcgtcccaaatttattttgatgtgttgagaaacataatggcaacactaatctcaagattcatagaattccataaccaagcaattatcaatgaatattccttatcccatgttgtaaattttgggtctccctcctctggtccagcaccagtcaagtggttgat

SEQ ID NO: 259975 - DNA, 455 bp, Glycine max
cttaagtcacctgaggcatgcagcttctggagttgagtgatggcgaaatatttattaagttgacgttttcagctacggtgtggtcttgatggaacttctgaccggactaatggctcttgacgagagacggtcagaggaaagccgatacctagcggaatggttttggcaaatcaaatcgagcaaagaaacacttatggctgccattgatccagctcttgaagcaagtggagagacttttgagagcatttccattgtggccgaacttgctggacactgcacttccagggatgcaagtcacaggcctgatatgagccatgcagttggcgtgctatccgcattagtggagaaatggcgaccggttgatgaagaatttgattatggctccggcattgacctcactcaaccacttccccagttgctgaaagcttggaaggaatcagaaggcaaagaatcaa

SEQ ID NO: 259976 - DNA, 404 bp, Glycine max
  unsure (1)..(404): unsure at all n locations
tgataaagaagattaanatttcatatttttttaaaagtgaaagacgaaatgtttcaattaaacaataaaaaaattaaaatcataagtattttaaaagtgagggacaaaatatctcatttaaaaaataaaaaactaaaataatgaatttaaaaaaaataagaggacggaaattgtattttagccaaatattaattatgaattttatattaatctattaaattttttagctgtaaacataatttaacaatgttttataatcaagtaattactctcaatagataaaatgattaatcttttccatataaattataaataaaaaaataaaataaatgagaaaaaatgttgagacggaagaacttagaaataaagacaattatttattaataatttctatttcaacaatt

SEQ ID NO: 259977 - DNA, 455 bp, Glycine max
ctgtgtttgacttacggatggcctttgtggataattgttgtgttgtaaggacaagggttgttattggctgagtaatgacattgttgggttggtgggaaacttaaccgtataggaatggcagtcgtagcatgggtttctccctcattctcaccctcttcatttgccccaatttttgcatttatcaaagcatgatgatcagatttgcctcttttcagacccacttcgatcatttcgccagcgaagaccaaatccgcaaagcttgaaggtgtgtaacccaccatttttcataatagaacactggtaatgtgtctactatcattgctgtcatttctttctccgtcattgagggaaccacttgggctgccaggtccctccacctttgggcgtattctttgaaagatccatgccccctcctgcatatgctctatagttgcatcctatccggagccatattc

SEQ ID NO: 259978 - DNA, 458 bp, Glycine max
  unsure (1)..(458): unsure at all n locations
ctaagcttcatggaggaagaacatgagagagagaagcgtgggaattgaatgatattacggagagaagttgaactttgaagtaagtctcaaaaggttttcattcaccaaagttatgacaagtggtacacatgtttttatttatagcctagcatatgggaaacttccttgagaagcaaggaaggtagcttccttgggaagctagaggaagaaagcttccttgagaagctagagaggggctatccacacccctccaatagctaagctcaccccatgccaaaatacataaaaatacaatgggaagcttctttgagaagcanggaaggtaacttccttgggaaacaaggaagaaagcttccttgagaagctagagggggctactcacacccctccaatagctaagctcacccccatgccaaaatatataaaaatacaaaaagtccctactacanagactactc

SEQ ID NO: 259979 - DNA, 387 bp, Glycine max
gtgggtttccagggagggaggtgggcaagttggtcgatggcggacttggccttgttgatgagccagtcgacggccttgctggggcggtcgtagcccaagcggtcctggacgtcgtagaattggatcgcggtgtgggccgatagtctcacccgtcggtcacgcgggcctttggcggtgcacactttgctgtgacggtccttccgccctgtagaccgcacaatgtgaccgccttcaacctccactatctccccacctcctccaccacttgctctcaccatcccctgcctcgacgacgtcgttgctgcatgctccaccgtacccgcgaaagcccgtttccgttgctggtcttccgttgttgatgctgatgttgttgttgctcttgtgtgg

SEQ ID NO: 259980 - DNA, 450 bp, Glycine max
tcaggaaacccccctctcatcttgtgagtgtgtatatcctattactgattacacttttaccatattgagtaaagcctggattgattattctatcctatgtgtcttccataatcagaggcacaaaaatataaatcatgattattttacattttttaacacctttctttacaagccttgaaaaagacctctttgttggttatgactctctttctcttttttacatcacctatcatttcatcactcgtcataaaagtgtaagtaggaagtgtaaaaataaaggtgatatgaaataaattttcattcacgcgaaaacttatgttcatacccaagagagattttgttcttgtgttatcaaggattatgggggattgcttgatcccaagttaacatctcacttgatcggtgtggtcccaactcacgtgctttgttaaaaactactgataaaagaag

SEQ ID NO: 259981 - DNA, 433 bp, Glycine max
  unsure (1)..(433): unsure at all n locations
agctntgcggatttggtcttcgctgttatttgatcgaagtgggtctgaaaagaggcaaatctgatcatcatgctttgataaatgcaaaaattggggcaaatgaagagggtgagaatgagggagaaacccatgctacgactgccattcctatacggctaagtttcccaccaacccaacaatgtcattactcagccaataacaacccttgtccttacctaccacccaattatccacaaaggccatccctaagtcaaacacaaagcttgtctaccgcacttccaatgatgaacaccacctttagcacaaacccaaaacatcaaccaagaaatgaattttgcatcgaaaaagcttgtagaattcaccccaaatttcggtgtcatatgctaacttgctcccatatctacttgataatgcaatggtagtcataacccct

SEQ ID NO: 259982 - DNA, 436 bp, Glycine max
tcacaagcaagcttccatcacaaggtatgcaatcctaatttaatcctccattgtttgattttagcaagacaagcatccataagcaaggagatagtgaaaggatggccaaattcgagaaatacatggagatgatgcaagagaaaaaggaggaaccacctattgaaaatctcacatgggatgtgctacatcaagtaagacccacaagacatttggaggacaagcaacgttttaccatcctcatcatgagaaccgttcatgtaaccattgatgttcgtaaaggagtttacacactaaaagagggcaagaaataaatgttctacaacattcaaggcattgaagatttttccaatgaatcggctcactaacaacaccatcatactacgccttgacaatccacatgcatacaccaagctattgatgttaagaaagtgcttat

SEQ ID NO: 259983 - DNA, 449 bp, Glycine max
tgcttgtggggcttctacggaggctgtatctttgagctttttgatgtcctttaatgattattttccaccatggagatgcagcgaaagacaaaggagaagaggtgagaggaggcgccatccactatggaataagccatgaaagaaggagtttcaccaccaagatgtgccttggataagaagcttggagaggatgcttcaacggaggaaaagaaagagggagagaaagagagaggggggatcacaaaattgaaggaagaaaaagggagagaacgtgaactttgagttgtgtctcacaagactctcattcatcaaagttaccacaagtgttacacatgcttctatttatagactaggtagcttccttgagaagctctcttgagaaaacttccttgagaagcttctttgagaaaacttccttgagaagctagagcttagctacacacaccctc

SEQ ID NO: 259984 - DNA, 436 bp, Glycine max
  unsure (1)..(436): unsure at all n locations
agctntcataggtgaaatcaggtgcagccattttccttagagtcctctcacgaggtggaggttgtgccatgttctcagaatgtgcaaaatcagaatgctcagaatcagaatgctcaaaattataatgctcaagatcaggatgttcaaaatcaccaataacagaatgcacagattcaccagttatggaatgctcagaatgatcaaaaggtataaaatgatgcctaactaatctatgaaatgtcctatctatctcaggatcaaagggttgtaagtcagatggattgcctctagtcatacactgcattcagcatgcacacaactagttgccttgtcatgtaaataaaggtgtaggtttgaactacagctaccctcaaatgatatccaaatgacttgaaatttggtgagcaaccttatacaatgatgagaagatagcaca

SEQ ID NO: 259985 - DNA, 447 bp, Glycine max
gttcttccttcagtttctctcactattgggtctagtgttttttcagcgtgtccacaactgaatcccaagaccctttatataaagaaaattgatagaataagacaaatatcccttcagtcaagaacaataaagttattgttcatttactttgtcacagggctgtcttttacaaataaagttttgtagataagctcaatgtcatagtctatgcaacaataaagatttccgccttggattttgaatgtgtttaggcaggatgtttctgtctttaattcttggttgattttgtgatagtaacatcttcttcgtcttggatattcccagaacagaagatgtcgaatgagtcttccattgagaggtcgatggatgggaaatgaggggtttggtgtccatcacatccgctggctttgtaaatctccttatttgtttctctttctggaagaattg

SEQ ID NO: 259986 - DNA, 418 bp, Glycine max
  unsure (1)..(418): unsure at all n locations
tcttaagtcactgggctgcagctttcatgcgtatgtttaagaatgtttttcttatgccctcagaataggagggtacgccttggcggacgtntaattataactaacgcactatgttcgctcgtaatataatcattctctgagccagttgcataaatattctgaggagtgtaagcctacttttattcaaacctaacggaactgaccttcgccccactacctcttcgaagatagttattagcttataagctccacacaagcagacagatgctaccttattgtctaagtgtgatctaggctgactattccttttagggagaaaaaaaactaataatacactagtccatgctaattgtatgtcacacgtgattgggattgtaacttatgactagacatgggcatacggcctatcatgtgaatt

SEQ ID NO: 259987 - DNA, 337 bp, Glycine max
  unsure (1)..(337): unsure at all n locations
agagaaaattntatcgaagagtgagactgatntttattgtttatcaaacctgattgaacggcacaagatgatcacacaagagagtataatgatgtccgatcaaagaatgtgaagcatctgaaatggaacatggaggatgttgaggtanaaaacatgtgaggtgttacctttggtgagtttcaataacgacgtgaggatggatgctatggtttctacatggtggatgagcttaacataatacaggcggtggttggtgacaatgttaatgacaatggtgacaaagtctgatctattgtgttgtgagggagaccacatatggtggaaagacgaggaatgt

SEQ ID NO: 259988 - DNA, 137 bp, Glycine max
gaacaaaaattataattcgaagaaatgggtcacccgtgctactcataaagggagaaaaagaaaagatggcacgagctccgccgatgaccaaaaatgtttggaaagaatgaccaaaaacaataacctgggcaaggaag

SEQ ID NO: 259989 - DNA, 455 bp, Glycine max
  unsure (1)..(455): unsure at all n locations
tgttagccatggggccctggtgctaccactccttactcatctagaagttanggcttacgcggattaatggggattattagctcttgttgttgcacggtatcctactacaaacacaggcttagtgaatgcttttttgagaggtggcactaggagacattttccttccatctgcctgttagagagatgaccattactctagatgatgtgtcttgtttgctacactttcctgtgacaagtagacccattgatcatatcccctcactctttgacagagaagtagtgaagatcctgcggatgactcatctgagcattccaatagagacaaaggcttcagcggtggcaaatacatgtgttacggtgaggttgacgtgaggggaagacctttatcaccactatgttgagttaggctcatatgttggccagccacaacatatctctggcacttaatcgatagg

SEQ ID NO: 259990 - DNA, 429 bp, Glycine max
agctcgcagatagatattagctaagtataattaatgagaatagacagatggaaatagtaataaagaagaaaattcttactttatacccacgactatttcaatatatcaagatagcaatttatttgaataacaaagtcatattattattttttacgcattatttattttaaaaagtcacggtcatctttctcttaatttcatttgataaaattaattgtagtaatagtttcatgaggctttaagtatttaactattataacaattatagtttaaatttatagtggaaagtactcgtattttttattaaattaactcttagtgagaattttatcatcgaattagaaaaatagtaatgaaaactcttatcacataaaaactcgaatttattgtaataagacttgaattattttcaaaccgacgttgcatcaa

SEQ ID NO: 259991 - DNA, 413 bp, Glycine max
atagctatagaagggatcgcaggacatatgatatgaaaggtgttttattcttttatcatcctacaacttttaaagcttaattttagtttcttcaaaataattctatctacttttcgccttcgtcaactttgaaatgttcaattctttgttaaagcgcaatttaaagttttattcttctgtcaagaggtatataaaacattctgaaataaaaaatattttaaatatggaagaaacaatggacattttaaaattagaaaaaaatgaaaaagaagccattttttaataggactaaaattaaattctaaaagaattttgatttactcacagaaatatttattgtgcgaaaggattgttacagatatgagtgggaagttcaattccaccatgaaatctaaatctggatgaagaaacat

SEQ ID NO: 259992 - DNA, 357 bp, Glycine max
  unsure (1)..(357): unsure at all n locations
ctcttcccaattaccatatacctgctcgagggcccattgttntgccaaccatgctttacgatatgtgatgggtatccaaactctgtctacgacgcgagaatgtagaatggtagctgctcgttatcttcaaccatcacaatgatatttttgcctcaagatttgaatccatcttattgtgatcttgtgagctgggtggcatgacgcatgtgtgagaccctcctatcattctaattcccaaactttttaaatttttcttttcgacactctaagtttgcatggcacccttcaccgggcaacatagaaccatgattcttccataccctggcttcaaagtacctggccttaaggcccatttta

SEQ ID NO: 259993 - DNA, 448 bp, Glycine max
  unsure (1)..(448): unsure at all n locations
ntcaagccctctacacatgcgcacccacatttgggcagtttggtgatgaaggttgatggttgtgggattggtgtaattttggtgtgggtaaggaaaaggggtgagaataatttggtgagtggaaaaaagagggatttctcatgatttggcaatgtcaataacaaatttggtagtgtcaatagtagtgcctaatgatgtttgacttaagtctagtgatcatgtgatgcttgacccaagctcaatgaatccatgtgatctagtgatgtctaaccaagcccaataaagcccaagtggcaagcttactatttatattagactaatacaaaaattacaaaattatgggacaatgttaatcattaatgttacactttaagcattacaggagctagtaggtcattagttttacacttgggccatagccagtcattagtgttatagttggacctta

SEQ ID NO: 259994 - DNA, 340 bp, Glycine max
aatagaacaagaaacagacacagaccaaaaatcaaacgcgtcaacaggaaatacttactggacccccctaggccacgggaggcacaatttactgggaaaatccaagacccaagaatatttataaacaccgagccgaagaggacaactctacccaaacactaacatggaccctcatccgagcacttggtaatctaatgcaacgatgcgaacgcaaacaaattcgatcgctgaaaggcatctcgccagtcctgaacctcacactgaatacaaaaccgaacgcagaaatggagcaccaacccttaccactgccctcagtcaaatgatccatcaaagaaaacaa

SEQ ID NO: 259995 - DNA, 376 bp, Glycine max
  unsure (1)..(376): unsure at all n locations
agctttcggtcccgagagcttttcttattttttcacttcanccntcgcttgcgtggagcataggaaaaacgacatttcttcttctttctttcctacaaagccgtttgtaaagtaccaagcactgtctgcatcacccacagccaccattagccactacaaaccatcattgttctccattgaaaccccacaccgagaggaacccttcaaccgaagcggagtcttccaacttggcttgcggtttcgggagagaacgaaaccctaatctaacctttcattttctttcgaggtaaccatggttctatgcttgtttcttgttagaaacatcttgtctatgcatcttttctgactntggaaccgccattgcatgtcttatgct

SEQ ID NO: 259996 - DNA, 366 bp, Glycine max
  unsure (1)..(366): unsure at all n locations
agcttaccttaatattagggacctttctttgttctctcaattagntctgcaggaattgaccccgatagcttattccctcctatatttcttcaatcgaaagacaatcatatgatcctctctattctcagaaataaaaatatcaaaatcatttaaaatataatatatagttctgctcaaaatacaacttacaaaatcctcaggtactcaagttgagataatgactcgggcacaaaaccatttaaactgttatctgagacatccctgttaattgagtaagtgagaagaccatagcatgtaacaattccactggtgatgttccaaaaaatatgtgtagacatactaactgtattaattattatgtgtaag

SEQ ID NO: 259997 - DNA, 328 bp, Glycine max
ttatctaaccattgtaagtttgtaaagaactacctcatccacatatttgaatactttttcctttacattgctttgcttaagctgaacttggatccagaggacaatcatattgcaaaaactacaaaaggggctctcccttgtttgtgatccattccaacttttattatgcaccactgtttcaataacatcgctggaggttaaagttatactattattaagagaactggaacaaaggaatgtgtctcttaaagaatcaagattaggaaaatgagaaaagtgtactccattatattaaatccaatgtttgaacagagtccaatgtcactgc

SEQ ID NO: 259998 - DNA, 336 bp, Glycine max
ttttttccaccaccacaacacagggtcaaaaaatatactcaacacccccaaccttttaatgggtgctagaatggctattaaaggcctatatatatatgtgacttgaaacaccaatttaagaaaaagttttggagaacaaaaaagtcttattctattaaaaagcaaattcgggtatcctcttacaaattccttggccaaattacttgtgattcaataaggaattaattgagtgctcaaattgttcagtctatctctttcaagagaaataacttcttttcttcttcttcattctgaaaagggattaagaaaccgacggtctcctgttgtgaaagaatt

SEQ ID NO: 259999 - DNA, 310 bp, Glycine max
  unsure (1)..(310): unsure at all n locations
agcttgaatggancaagatattgtttatncgnnaanaacnggggggagcaaaccgaggcggcaggaggacccccagcaccccngggcaacaccannagaggaaaacatacaaaacagcaggccaagcggaaccggccatcncccataaaaggagacgagaactgctagtgctaatgaatatcactctgtattgaattttattaatgatggattgaccaaaagttctcaccctgaaactgtcaatgtaattcgcttcagcggttatatatatgtacttttgtgccactgccagcctgttatacttgattac

SEQ ID NO: 260000 - DNA, 351 bp, Glycine max
  unsure (1)..(351): unsure at all n locations
agcttgagccatctttttacttttctttncaannagcgctaatanctctaccttcacaggttagttagtttaagatctcttataaatgtcagaagaagaaatgatctcttaatgagctcatttcatactgtatgtgcaagaagaggaaaggttgaagcaagaaaggactgacagtgctcatgttgtgagtacctctaatgacaagggcgaaagaaaaagaactgacgagcccaagaatgaagctgctaagggtccaggacaaatgaaacaaaatctgggtgacaactggttcgtttgtagtaagcttggacatgtacagacgaaatgcactcaatatcatgctcagcgtgc

SEQ ID NO: 260001 - DNA, 361 bp, Glycine max
  unsure (1)..(361): unsure at all n locations
agcttcggatgttttttagttcttgagagagaaaggtccaagttccagagagtttgagagattttgttgtgtgaagatctgcagagaccagagcttgaagaggaagccgtcctgagagcttgagatgagtttgtgagtgattgtgaggtcttanagatggaggaggcatccccactacttgtatttctgcaatctttcatctttctcttctctttgttgtaaaggaagtttctcagttatggaaagctaaatcctctattggatcttccttgtaggtacatgatgtaaatatctttttatctatataatgatgttttgtgtgttctctgtgctatcagtatttcactctagtatgctttta

SEQ ID NO: 260002 - DNA, 376 bp, Glycine max
  unsure (1)..(376): unsure at all n locations
agctttgagggagcgaancctttcttttntttatattagaggaccgataatgggtctaccatcacgattatcgtctccctttttgcacactttttgtagttgcatcctatccggagccatatcagaattgtactgacactgcataacgaaggcaaccattaggtccttccaagaatggactcaggaaggttcctaagttagtataccaggtgacagttgtcctaataaaactttcttaggaaaaatatatcagcagtttctcatcttttgcgtatgcccccatcttccgacaatacatctctaagtggttcttggaacaagtagaccctttgtacttgtcaaagttcggcaccttgaacttgggaatgaccatgtt

SEQ ID NO: 260003 - DNA, 375 bp, Glycine max
  unsure (1)..(375): unsure at all n locations
agcttaattaagaaacatgtnggtcaatatcctaggagttggaatgaaagtttagatcaagttctttgagcttatcaaaattcacccaaaagggccattggtgttactccttttaaggtggtttatgggcacgaagcgatgttacctatcgaaataaatataaattcgattcaaattcaaagacaaaacaaaatctctatccagactattgggatatgatgtatgacgagttgaatgtcttagacgaagaacgtttaattgctttagaaaacattatttgccaaaaagaaaaagttgataaatactataataaaaaattgaggaaaaaatattttgaaattggagatttggtctgtaaagttatattaccaatgg

SEQ ID NO: 260004 - DNA, 285 bp, Glycine max
aaaaaaacagccccacaacccggagcacacaaaaccacgcccagaaaccggggaggcagcccaccaagcaccgggggggcgcacggggaggcaccgaaagcacgacaacggggacaaagaggcacgcgccacaacaccagaacaccccccaggccaaggccaacccagacaaccccccaagggaacacaaaacaaccccgaaaggaggagaaaacccggccggagcacaacaaacacacgcacacgagagcaccagaacccccacgggaaagccagaaagcccaa

SEQ ID NO: 260005 - DNA, 290 bp, Glycine max
gaagaaataacatcaactcggacggaatcaaacttatgaacgttgtagaacggaatgactaacacaaaatatactattcttatataaaataccatcctttaattatcatttatgatgcacgataaatttattgactttcatcaaattatttatagctaaaaaatcatatcaatggtgatgattttttgtgattggatgatcctacatcatctttaaactccagattgaatactataaaaatatctatgcccgccacaatgaatatttggtctgcatgtcacaaaatggac

SEQ ID NO: 260006 - DNA, 373 bp, Glycine max
  unsure (1)..(373): unsure at all n locations
ctgcagcttaaagaagaacgttgaatattttcccatncacagacttctagagaaagcagaaaaatatgacaattgtcaactcatgacaacttacacaatcattatgaggaacaagatatatttttacattcataatatgtaattagtatttttatcttaatttgatgatatgaactaagttggccccttgataatcaaattgatttaatttggaatgaatgtgataaatttaaaaatccataccaaatcaaataaattaaatataatccattaggatttgattccatcctaaatccaaacccaactaatgttaatcaatttggttctcaaaataatttttttcctatttgaaccaatccgacgaatgacttgg

SEQ ID NO: 260007 - DNA, 361 bp, Glycine max
tagcttgttaaaaacggaagtaaatattccgaaattgaacaaaataaagatgaatgccaaaaaacaagaaatgaattaaaaagtctcggatttggaaacttacccgttgaagaatgaagaacggacgaagaacggtaaagaacggaggaaaaccttcacggatttgcttacggaaacctctcggaagctttacggaagcacctcggcttggattttcttcacagaaacaatttttttttacccaaaacagctgaaatgcatagccaggggaatcaggcacccttagaacaacccccttttgcctttttataggaaaaagggggaggaggttgccgcccagctcgcttatgcgagctgggtt

SEQ ID NO: 260008 - DNA, 365 bp, Glycine max
  unsure (1)..(365): unsure at all n locations
agcttgcacatttttttttgatattagaagaggaggatggntagccttggtattttaatatcaaacgatacatcaaggacaaggaatacccgcttgaggcctctaacaatgacaagaagatattacgggggttggcggccagtttctatctgagtggggatgtcctatataaaagaaagcatgatatggtattgctctggtgtgtgaatgtagatgaggccgagcagatactaacagaggtgcatgaaggatcctttggcacccatgccaatgggcatgccatggctcgaatgattctaaaagcctggtgttactgtatcaccatggagaattattgttgtgttcacgtcacgaaatgccataag

SEQ ID NO: 260009 - DNA, 361 bp, Glycine max
  unsure (1)..(361): unsure at all n locations
agcttgtgactcttgtttttttctttaaaaccagncacttaaaagggtgggacttttaaaaatatcttcacaaacaagtcacttgaagaattgtgacttttggaaatgtatttttcgaaatcaatcactggcatcaacagatgtgactcttcattttgaattttgaaaattaaaacgtttagaagctctggtaatcgattataagtattgtgtaatcgattacacaagtttaaaatgatttaaaactgtttaaacataagttgtaacttaaaatttgaaatcttaacgttttaaaacattggtaatcgattactaccttctggcaatcgattaccagagagtaaaactctttggtaatgat

SEQ ID NO: 260010 - DNA, 374 bp, Glycine max
  unsure (1)..(374): unsure at all n locations
agcttgtattgaaactaaaaattttatcnttcctacttaatgggtccctatgtacacacaccatgaagatgttaggtgtatgagtgattttacaaaagagggttgcaccactcaaaacattcatcataccacctattttagggacttggtgcctaataatacctattctgggcactaacaaagcacaaggatttaagctcttgcgaaccaaaccctcatccaacaacttctttacttgaggaataaactcaagcccaagaggtgtggcaatgctagcaagtgtctttttacaaaagagaaaatgtggaggttgtctaagagggaaaatttatttaatgtttgtctttattgtaaaatgagtttccttcttagct

SEQ ID NO: 260011 - DNA, 316 bp, Glycine max
ccttcattcttttcattccttgctagctctcttttccttttcctctttttttcctttattagttatttatcatttgttcatttcctctctcttctttctttttttttctctttttctctctgaaaaagtcgtgcggacaagggcacacactacctactcacgtctaaccacaaggtgaacgagaaacgcacaaaaatggtaggtcgtaatatggtgacgaaataaatgagagccataacgccgaaaatttctaacagaaacgagcaataatgatagtaatgttagtaaccatatgaacaaaatagaaaatagtaat

SEQ ID NO: 260012 - DNA, 365 bp, Glycine max
gcatattctggtatggggattttttttgtttttttggaaacccctccgcggcgtcggggcaactataagtctccctatcacaaacgcttacatcacaaaaagtaataattatatacttatctataaacattatcaaaccaattagatgatcgtaccaattttctaatattttagaaaataaatgtaactgaccttgtatatattaaccttatatggaacccatttcatctacatgatccttactaatttccctccaaccattaacttgtaaaggagttgtttggcgaatacacacttgtgcctcagacttggaatattttgcatgttttcttcaaaccatataaaatggtggaggaaattggatg

SEQ ID NO: 260013 - DNA, 315 bp, Glycine max
  unsure (1)..(315): unsure at all n locations
gaagcggcanccccaaacaccggggcgccgcggcaggccagacccacagaaccccaagaagcaaaagaccctagggaggaagaaaaaccaagggcgacaagcccgacanagagccacagcacaggcaacggcaccaaaggcggcataaccaaaagccacaagaggcagggccctaggnggggccatctcagcggctaccgccgggactgagccgagaccgtggacaaagtgcacacgtgccaaggaagagcgccccccccgggaaaacccgcaagccaccaagaggaggaccccacgaagccgaggcccgagggg

SEQ ID NO: 260014 - DNA, 352 bp, Glycine max
  unsure (1)..(352): unsure at all n locations
acaccgacgcagcagcagcagaaaacccngttgttatgaacacgcccagacaggggggaaagagaaaggncaagcccaacacacaaagggancaccagaagaaaaggggacaccanaagncgcaacccaccccaccgcgggcgagcgaagcgaggcacacgggagcgaccaccaaaggaggaaaacgcgcggagccgccaccaacggnaaccggcggaaaacgacggcaaaaccgaaggaaaccgaacaagaaaaacagcccaaaancgggagcnacccacacccgcgaggaaggaanaaacaccccgcanggacggcccaaaggacaacaacccgaagaaagaagcacgcg

SEQ ID NO: 260015 - DNA, 344 bp, Glycine max
  unsure (1)..(344): unsure at all n locations
agcttgangnaattgttttgtttttttactanccaggcggaagcccggttgtatccggtaccagagcgaaactgtcgaacttgcacacatacggtccgcgtacaatccggcggcaataagagttactccggtggcggccttagagcgagcttatatccagacgctgcgatgcgctcagtgactgggatgagattggaaacctgatgcgctctcttatgaaggcaattgccgaccgaaccccttgcggccctccgggtcgacaaacgatgctcccggggacagaaacgcctataacttttgacttggatgcgcgaatgagccttatatatgcgtagatgcccgca

SEQ ID NO: 260016 - DNA, 371 bp, Glycine max
agcttgccgcccagctcgcccatttctatcttgttgcttcctccaaaagcaacagctttctggagggcccaagtgggcctggttgctatttacacccccctgtttactaaatgcaccccccctttctatttttttgtaattctttttccgtaacgttacgaaactttacgaatttcataacgatacctattttccttccgcaaggttacgaatccttacggattatgtatttactcttttttagctttcgaagaagttacggaaacttacggattgcgcaaaaacacctcttttcgacttccgccacattacggaatttcacggatcgcgcaagcctgcttcctttagatttctgagacgtctcgggactt

SEQ ID NO: 260017 - DNA, 372 bp, Glycine max
agctttgagccaaaatcctgattctttataaaccttgacccagggtgagaatgtcaatccttaccctcggaagcaaaaaagaaaagaaggaaaatttccaatcaaagagaaagcaaaaagaaaagaaggaaaatttccaatcaaagagaaagcaaaaagaaaagaaagaaaattcccaatcaaagaatggaagaaagtaaaaaaaggaagaagaagaaggaaagaaagctcctaatcaaggatcgaaagaaaacagaagaaatatgcagaaaggtctttggaccggataatatctgaacaatacagaattgccaccaaatgaacaaaaagaaggaaaggaaaccatgacctaaagtggttttctccctttaa

SEQ ID NO: 260018 - DNA, 385 bp, Glycine max
gatcttaatcacctgagctgcagctgagtattaaaacttctttgtttatttaatgaagactaaacatgcattgtttatgtaattgtattcattatgcgatataatttgttgtaacccgttactaactaattaatattatcaagtactcgtttggttaagtaaggaaattgttggtccaacaaaaatcatttacgcgtgcagcttacatcattgtcgtaattgacaacacataatgacatgcatgcgtattacagtttgagcgcgacaacacattggctgactttagtacacattctgaaactagcagtcgctcgacaacacattggctgacttgactacacattggcgacaacacattggctgacttgactacacatttacgcgt

SEQ ID NO: 260019 - DNA, 366 bp, Glycine max
gcttttagacatcaactgtgaatttgttttcgagagaaactttattcaggctgtctcgtgtgtcttcttgtagtcacttctcatgcgcaagtagtggacatgtttacgtttactatggcgtctacatcatgagtatttctaatgaagatcacctttctaaactgagaatgataataaacatcttccatccttcaacttaaggggggggattagttccttcgagtaatatgtaataaaagcacgtgaccaaaagtttgttgagttgtaacttgtaaccgaggtctgttagaaaattacgagaatcatagtttcattatcttttttaattaatcaaatatgaaaatcataatttttcaatgtaaaatt

SEQ ID NO: 260020 - DNA, 365 bp, Glycine max
agcttcttttggaccttttcttttttcaactcctctttcaaaaccatgctatgtgctcgcgactggtccctttcttcccttcgcaacttgagttcattattgctaccccatagagctccgcgaaatttgttccggccatactcttccttgcgagccctcttggtctctcgttcaagggcccttacggtaattgcattctcttcccgtaacccggcacactccttccgaacgtgtgtagcagccaacttgaacttctccttggcgagttttgcctttcctaactcgcttttgagagcttggacttcctcgtccttttccggtgcttcaaaattctctttgctgacgacttttaacttggctagcca

SEQ ID NO: 260021 - DNA, 368 bp, Glycine max
agctttacattactccttatgttttttatcatgtctaataaggttcgattttttcgttttgccacaccattctgatccggagaaccagacatagtgtattgggcaacaatcccatgttcttgaagaaatttcacaaatgaacctggtgtttgtccatcctctgtgtatctaccatagtactccccacctctatctgatctcacgatcttaatttgttttccacattgtttccacataaaaaactttctccaaatgtaatttaaagccactacttaaaactaagatgcacgttccaatgacctctacatgcgagctcatcctactccctgagtagatgcactactcacttcccactggcttccttagac

SEQ ID NO: 260022 - DNA, 360 bp, Glycine max
  unsure (1)..(360): unsure at all n locations
agcttatcatagnatacgacataattttcacccncacctcatctttgtggacctttttctttatgttacataaatcttttggctttttcaactccatatacttctgctcgttcctttaatgatgacttcagttatttcatacctttttgttgtctgactatgtgcctgatcggaacacataatttgttggcactcactattgtggattaggattaaaggtgtaaggatgtggaataaaatttttggttatttaattattaattgatcagaaacgacttttagttaaccccggcctgtaagtttaaaaaattggtattttgtatgttcatacgtatcaaagtttccaggcttaacctaata

SEQ ID NO: 260023 - DNA, 301 bp, Glycine max
  unsure (1)..(301): unsure at all n locations
gcacgcagcagcaacagaacaagggtattgagttacagaccgcaagccagagggacgaaaacggaaccagacaaagggaaagcaacggcgcaagaccaccaccagaacgggccaaaacacaaagcgagcgaaacaaaaaaacgcaaccggaaggacaaccagacggaaccgccgcagcgggcagggcccaacggcgacggcccaacgatgancgggggcgggggccaaaaacgaaggaagcaaaaccgggagcgggagagagaaaaacgccanccagggccgagaaacaaaagccggggaa

SEQ ID NO: 260024 - DNA, 360 bp, Glycine max
  unsure (1)..(360): unsure at all n locations
agcttctggngggacatcttgttttgctttccaatctgacattcaccacagattctgccttcttctattttcagattgggaatgcctctaatagcacctttgtcaatgattttcttcatgcctcttaagtgcagatgtccaaatctttgatgccatattttgacttcatcttctttggaggatagacatgtggaggagtaactggtttcttgaggtgtccataggtaacagttgtcctttgatctgctgcccttcattagaacttcattcttctcatttgtcaccaagcattctgactttgtgaagtttacattgaatccttcatcacacaactgactgatgctgatcaagtttgcagtc

SEQ ID NO: 260025 - DNA, 365 bp, Glycine max
agctttatggcccattttcttcttcattttcaaaaacacaaattcagaaaaattaacattactagaaaataggctttcagcatcggttattaagtactttcaacatcggttattaatcgatgttgaaactaccgacgttaaaaatctcaacattaacatcagttttacaaaaccgatgttaagtattttacacaacatcagttttataaaaaaaatgatgtcgtatcataaaaaaataacaaaaaaatacgtggtttttttttatgaaaatcgatgttgtcagtcaacagataaaaaatcgatgttattggttttcataaaaaaaattgatgttattttgaatgataacatcagttttttggaaa

SEQ ID NO: 260026 - DNA, 370 bp, Glycine max
agctttgaagaaacaagatacttttttctatgcgaattattctttcattctttcttgtaaagttttctgtaaattcttgtaaagatataaagctctcaaaacaccttgtatacattgagagaaaaaactaaaagtgttgagtgatatatacatctgtaagacggtcatatattatagttagtgtgtaaacttccaacaaatgttattgatttgtttagagccaacaatggcttggtaggacaaagaatatttggtttaagtcaagcttagggtagaacttgcaagtgtaagagccaatagtggcaataaacaatacttgtaactttgatgagttagtggaaacttgatggttgccaagaactagacgtag

SEQ ID NO: 260027 - DNA, 370 bp, Glycine max
  unsure (1)..(370): unsure at all n locations
agcttatgtttaaggaaacactttctgnnttgttcaattatcaatgaaataaaaaatcaaaccaatcaagtatacctgtgtcaaggtcattgcttcctgcacctcccttgttgcttcatgacctccattatttgaaaaaatagacgaatggacaaatatgtccctcactatcacaacttagcctagcactttttctttcttttcttctacatcgtgacacctgtaacagtcgtccctttgtttctcttaaatataaaggaactttaaccctgagcaactttgtaaaaacatttatgttcctttttctttgactctcaagaaccctaacaaagcaatcggaggaggagctctagagagcaccaaaaacacc

SEQ ID NO: 260028 - DNA, 227 bp, Glycine max
tgatatgtctacattctaaagaggtctatctggtctagtcttatacaaacttggcctactgagaagctgtttcagccatgatttcacttttcaccaatgccatggccctggatactacttcggcacttgatattgctacaacactccgcttcttaattttccacaaatgccaattcttcctcccatcagcacacaaatcccagatgtggatcgcctatcaatgggtg

SEQ ID NO: 260029 - DNA, 204 bp, Glycine max
agaaaaatgacaaagcaagcaacaccctaaaacaaacccaaaatgagtccgcaaaggagccctacacaagcgcacacaaacacccaatggagaaaaacacaaccctaacccccgagcggacccacgagacctcagcccaccgaacagaaccaaccaagcggcaccatgagaggcgcacataaacccccccagacaaggcccaaa

SEQ ID NO: 260030 - DNA, 55 bp, Glycine max
  unsure (1)..(55): unsure at all n locations
aggggagaggcacaaaagcagaccgaacggaaaagcacgngcggaaccgacgaaa

SEQ ID NO: 260031 - DNA, 369 bp, Glycine max
  unsure (1)..(369): unsure at all n locations
agcttatcaanaaaacccgatgtaatttttctgacaccngaaaacacggaaagaaaacagggagggaagaaatagaggcaacgcacagnaacttgaaacttaaattgttgacaaaaaatatcttaccaccacagcaaaatcataaatgataaataaaataaatattgttgttagttcaaacacattctgaaatataattctgaagtaatacatgtgttgcgtaataggatttctccttatattagagacctcctactctagagtataaaaatgtattctacctttactcttaggtgagacatgatttgtataaagttctctaattatattatctccataaatcacagagataagatatacctgggaaaa

SEQ ID NO: 260032 - DNA, 271 bp, Glycine max
aaagagcccgggcagacaaaacagaaaaccaagcccacagccaacaaagccagcagagagaaagaggaacaaacggacgccaaaagggccaccgacgaaaccccggaaagacaaaccaaaaacgcccgaaaggaagaacacgaccaaaacaagtcaagaggggcgcaacagggcagcaaaagggagcccaaaccccgaagaggagcaaggaaccaccaggggacaaaggcaagaaccggaagacgaacaaaaggcctgccccaaggcgaaa

SEQ ID NO: 260033 - DNA, 357 bp, Glycine max
  unsure (1)..(357): unsure at all n locations
agcttgaacaaaaagattataatgttttgaaannaaatatcaacatcagcagctacatgtgaaggtggctttggcatacctgctgcatagatgccctgccgacaaggatcttcgttaataaatgtatcatcatgcaccataagtgaatgtctagaaagctccttaggcgctgatctgaagggttgagatatcctaaggaaccactccatatactctattgcacacttgtcaaaatactacaaaattatcccacttacccaaggggttctaaaaactgaagccatcttatcatcaatcacctttatagataaggatggaactccagggggtggagggaaactcttgacataaacaaac

SEQ ID NO: 260034 - DNA, 403 bp, Glycine max
  unsure (1)..(403): unsure at all n locations
agcatgaaacacctacttatcttttttcttgacccanngagagacaggcaacaacaatccaatcaggggtcaccatgtctttccatattaaccatggctcaagtgggagagttaacaaaagtacacgccatacccatccctgtagaaagtctcttaaaagacctctactgagtccaaacacagcgaatcctcgagtattcgtacatagttctgcatggttgtcgcacaaacacacaccttggtgccccttggcttcctcccctgcatccctcccatgaccaccgtatcggccgctgtcacctccaccaccaccaccgaagccatcgcctccaccaccaccacggtcaatgcgggtttgcacttcatgggtagagatgtttggccatcaaagtcttcgccgagc

SEQ ID NO: 260035 - DNA, 338 bp, Glycine max
caaccaccgccgctgcagcttaaaactttttttgtgtttgccacaaacacgagaagagggcataacacccaactaactatcatcgagtgacaattcaatgtaaagggaagcctttgaaagatcagtcaaatgagtaacctcgaagaacttttgttagaagagagatatagctcataagtacaactatatcacagtcatgagttctaagcggtgagctaaccatagcataggccaacaatatacaatattgcatcagaaataaaagagattgaaaacctgtacaaattcaaaactgtcgcaacgagcccttttgcgggcgtgcgaggacgaggttcacg

SEQ ID NO: 260036 - DNA, 371 bp, Glycine max
agcttccctggtattcaattattttgtttttagacaacttctttcgatgggaaaattgttgaaaatcattcatcatcaacttaatgatgcattgtaccaaattatagtaaaaatattaaagtataattgtgctcacctgtctggcttgaaaactatgttcttatatacaaaccactgcaaagaaacaagtagaagatgaatgataggttttcatggagataaaatccagtattacaagacttagttttagaaccattcttatgtatttgcaattgttaaacccccaatattttttttggctattctgtatttgttgaatagtgcctcaccctggttaagggagttgaagtgcatgattcatttgttaaacc

SEQ ID NO: 260037 - DNA, 369 bp, Glycine max
  unsure (1)..(369): unsure at all n locations
agcccatccggagggcgcgccttcttgacttaccccccgngccaccccggaagaaataagccaagcccctacttccgaggggcaacccccaccatatgaagactatcccgggcaagacaatgaggaaggagatacccatcctagccccctgctccacctcaaagaaccgtccccccatgaactaccccaaccaaacatagtccgccatatcccgacttcacccacacccgaaaaagaatctgttcccttcgcggaagataagggaaagattgaggcgctcgaagagaggttgagagcagtccagggcctcggccattacccatacacggagatagcggatttatgtctcgtgcccaacatcgccaaccc

SEQ ID NO: 260038 - DNA, 404 bp, Glycine max
  unsure (1)..(404): unsure at all n locations
ccaaaagccgaccnggaggcatgcacacttcttgagaagcaagtttatattctttttgttaagctagaaaggggttgcttattatccctccaatagcttaagctctactccatggcccataaatacattgaacaatactatataaagtccctattacaaagactactctaaatgtgctgaaatacaaggctaaaatcctacactattagggtacccgtaacttgtagggtagggtgcccttaatttgtagggaacccttcaaacctaaaatgaccaaaatacaatgcccaaaataagaaaaacctattctaatatttacaaagataagtgggcaacatacatagcccatgggcccaaaatctatcctaaggctcatgagaaccctatggccttcatcttcatct

SEQ ID NO: 260039 - DNA, 324 bp, Glycine max
  unsure (1)..(324): unsure at all n locations
tctgtctcgcanaaaggcgagaacactggcagacacaaccacaacaagcacagacgccacccaccgggggccacaaccttaactaacccccagcagaaacacccaacacgcgcgcgggacggggactcaacccaccaatgaacaaaaccaacaggaccggctccgaaaacccaagggggggagaacctctcaaaaaacctctgaacctccccaaagcttcactcaaagattcatcagggaactgacgaaatgaagacatcgcagccccccccaccacagaccaggacaccggcaaaaaattccgaaagaaccctccaacaaccc

SEQ ID NO: 260040 - DNA, 369 bp, Glycine max
agctttagcttctcaaggtatttttttttataagcttcccaagaaagtttctcaagaaagtttctcaaggaaatttctcaagaaagctacctaggctattaataaaaacatgtgtaacacttggtgttactttgatgaatgagagtcttgtgaaacacaactcaaagtttaacttctctccctcttctcttccttcaatttcgcgctctcccctctctatttctctctctttcttttcctccattgaagcatcctctctaagcttcttatctaaggcacattcttggtggcgaaactccttcttccatggcttatcccctagtggatgacgccttctctcacctcttcttcttttcttgtgcatctcca

SEQ ID NO: 260041 - DNA, 365 bp, Glycine max
agctttttcatgagactcttgtggttgatgagttcgtggcaaacctctgtttggtcttgccaattttatgtgatgatgtgccttgaatggaacttgaggagtttttttctcccttcttttatatgttgaatctttgtttgcatttcattgcatgcttacattgaggacaatgtgcacttcaagtgtggggggaagggtttagaaaaggaaaaaaaattgctatttgttctctctgtttgttggtttctgtttctgtattactacttgcttactgtatctatttgttgtttccttatctatttcctattgtgtcctatttttaatggttatatttggtcttcgcgatggttctatcttatgttttg

SEQ ID NO: 260042 - DNA, 356 bp, Glycine max
agcttggttacctcattcttcattttatcaagaatcacggggttgagtcttctctgtggttggcttactggtttagccccatcctctaaatttatccgatgcatacatgtggatgggctaataccaggaatgtccaccagggtccagcctatagccttcttatgcttcttgagaactgataacaacttctccttttgcttatcagcaagggaggaaaatgttattactggaaaacttttgctatcatccaagtaagcatattttaaatttgatggcagaggcttcaattctggtgtgggcggttggataatggtaaaaaaagaaggtttctcagcccgtaccttataaagaaagtc

SEQ ID NO: 260043 - DNA, 365 bp, Glycine max
  unsure (1)..(365): unsure at all n locations
agcttatanggatgattctaatgattcaagtcaagaatcaaagatacattcaaacaagattaaagaaatcaagaagattcatgagaagacttatggattgctagaacctcaagaaaagcattaaaattagtataaaaagaatttttcaaagaaaagattgaatagcacaatttgtccaaaagaatttttcaaataaaagtcttttaccaaagtttttactctctggtaatcgattaccataaggcaggaatcgattatcagaagcccaaaacagttttataacttttttacaaagtagtaattgattaccaatatttttgaacgttgaatttcaaatctcaagagtcacaacttgtgacataata

SEQ ID NO: 260044 - DNA, 364 bp, Glycine max
  unsure (1)..(364): unsure at all n locations
agcttcatcggagggtttttntttgttctccaagacggctaaaaattaacttataagccagctaaaaattaagaattgaaaaattagaagttagttaaaagtttataaaatagtttttttaattgaaagtatttgataaaattagttgataagtcaactgataaatatcaaatgacatatttaacatttataatatttgaattttatttctaataacttatcatttgaatgtaagaacgtaaaattatatacgatggttttctcaaacaacaaaacaaacgataagaagggtttttaaattaaataaaagggtaaaatgaaattttaaatgaaataaatggagatgaaaaaaaatagtaactta

SEQ ID NO: 260045 - DNA, 366 bp, Glycine max
agcttaacaagtaaaaaaggctttttctttttttctttcaattctaatgggcaggcggcttatgtgcaaagaagcatgtactaaatagccattatctagctaccatttgggaaaaagacaatcatgattgcattgttgttttgataccatgattttaaacttaaccacctgcagaagtttatgggcaaagggtaatgttcttcgtagagctcagttggccttacaaatgagaagagaatacctaatcttctttggtaggacataggaattgcagtgagaatggaggctcaaagaagaagtcatgtgaaataagaaaggataagaaaatcattctttataattacaaatatggtagcatatagcaag

SEQ ID NO: 260046 - DNA, 366 bp, Glycine max
  unsure (1)..(366): unsure at all n locations
gcagcaacngaagacagcaacattttttatcggctaaacgcaagatgcagaaagatctcggagccgcaaaaagcgctaagtgctgcagctgcgctaagccccaaatgcgcactggaagatacaacttcaagtggggcctaacgcgaggctaggccaaacgccaatgtaaaaaccccaaaagccacgtcggcatgctaagcgcgccatacgaatggcagtccttaaaaagtagaggcacaggcacttgggttgctaccttggcacccaaaccaatgcactccctcatccccgagcatagtagcgatagcagagagcccatctgcccctttgcatacccttgcgacatcacaacttgcacaacacaac

SEQ ID NO: 260047 - DNA, 363 bp, Glycine max
aacaccgcagcagcagcggctaccagcccgcttgtttgttttaagccaaccccaaaagcagcagccttctggaggaatcttctggaaggcccaagagggccaggatctattgcaccaccaagtttactataaacaccccctagcctctcattgggagatatctctttttcctcaaggtatacgcgtaaactttaacaaatattctctaaccgaatactttgtatttcctttcacgaaatgattaccagaatcctctgtgagattacaataatcatcccctattttgacttaacggaatgttacttgaaccttcactaattgtgcaaaatactcttccattcgaatttaagagtgtaaaagaac

SEQ ID NO: 260048 - DNA, 320 bp, Glycine max
gggaaaaaaagcgaccgcagcacgccacaagaggagacaattattattcacaacccccctaacagaaggaggctcagggctcgcgacaggaccctctccatcaagagcagcaagaggccaaaaaagcaaccccaaaaagctacgcaaaagaaacaacagccaacaataacaaggagccccacagggcacaagcccaagggccctcgcagaaacagaaaaacacagccggaccccggcacacaccaaccgaaggagtgaagcggacaacaggaacaacgaccgaggaagagacaccaagcaaacgccaaaagagagcaaga

SEQ ID NO: 260049 - DNA, 361 bp, Glycine max
agcttttgatgcgtagcgtttttttacttgttgttcgcgaagctcgacatgcgcacgaataatatcaatgatactttccagacgagatgacaacgtcacaatgatgtggtactaattgggttaacaactctccataaatcatagatcaatgtcggtgatgtacggttggagtctcaacccttcgtggatgtaaagctcttgctttcagcaatgacgatgccattgatgctgacagaagttgggatacagggccatattcaattttgaagtcctctgttcacatgaaaatggatttcatatcttagatctggaaaaaatttgagaaatctcatatctggcggatggaaaataagcttggggt

SEQ ID NO: 260050 - DNA, 318 bp, Glycine max
gctgctccggcccagcagactagaaagaacaggaccaacaatatctcggccacagaatacggccccaaccttcggcaatacaaacgaagatgcccctttggacaagaacgccccttgtacctaacaaagcccgacactccgaaaccgggaggaaagaagatatcgggcacgagacataaacccgctaaaaccgaaaacggggaaatgccaaggccctcaactgctcctaaccacacttcaagagccaaaaacattccctcaacctccgcgaagggaacatattcctatacgggggtgggtgacgccgggaaacggcag

SEQ ID NO: 260051 - DNA, 349 bp, Glycine max
gcagcagcaagcgagccagggcaaaaccttagttgatactatccgctcacgagcggataacaccatttggaggccgaagaagaacctaacctctacggccaccaaggcatcctacaaccaaagggaaaaaatcagccgagcccgcccaaccacacaaagcaaaaagtcacacagcaaagcaccaaacctgggcgcccaacaaccaacagaagaaggaaaccgaaagagaaacaccgaagaggcaaccaaggacacaagaaaaaacgcgcaggacccaaaaaaaagaaaagctaccccgaacccgaccacaaggccaacgacgaggactggaaatcggagcatcaacccc

SEQ ID NO: 260052 - DNA, 363 bp, Glycine max
agcttatagaaattgttatggtttattttaacaccccaaaagcaagcgcacccttcaagaaacgaaaaattctttttgcggctcttaaatgaggagaggtaggagcctccgtaaagcgacacacaacttccaccgcatataaaataccgggccctggattggttagataccctaaactccccacaagactcttgaaaaccatggaggctaccttctctccttcatcaaactttgataacttcaagccaccttccatacgtgtgttcacgggatcgctaatcagcatcctatattacttcaacacttccttttggtatcttccttgcgagacaaaaatacccatcctcctttggctcaccttcc

SEQ ID NO: 260053 - DNA, 362 bp, Glycine max
  unsure (1)..(362): unsure at all n locations
agcatttaaacattatttatttattattcnccgacaccacttgttagacaagtgtgcctagatatcctaagaagggggggttgatttaagatattccaaacttctttcccaattaaaaatctatttcactttttattcaagttataaattcccttgataatgaacttcttaaatattgattcaaataaaaaaatttgaatattgatattaagccttaatacacaaaggagattaagggaagagaaagtgctaactcagatttatattggttcggccgcacccttgtgcctacgttcagtccccaagctacccgctccgagagttcactatcttgttaattcactttacaagttttaaacaca

SEQ ID NO: 260054 - DNA, 372 bp, Glycine max
  unsure (1)..(372): unsure at all n locations
agcttctcccccaattntctataaatagggttgttaagngaagngaaaaagggttcagccccttaggcacttatctctctttcgaatttgcttggaaaaattgtttctgtgaagaaaatccaagccgaggcgcttctgaaacgttttcgtaacgtttccgtgaggaatttcgcgaaggtttcgaccgttcttcgacgttcttcattcgttcttcatcgttcttcgatcttcaacgggtaaatacctcgaaccaagcttttcgattcattctatgtacccgtggtggtccacattgtgtttcgtgtatttttattctcgtttcatttactttttatacccccctttgacgtgcttaagccattttatttaagt

SEQ ID NO: 260055 - DNA, 373 bp, Glycine max
agcttgtaatcaacgaaacgatatgtcttaatcacaaccatcaaaatgaagccaacttcaatttcatgcaaagcatggttcaatcagacagtgttgctccaaacccaagccaactcaatttcatgcaggaaatctttcaaaatcaattttctcttgctcctatgaggccacttaatgatggtaaccaggtagcatcttacctacttaatcttgacataggttctagttctcaatcccaaatgcttaactttgatccaaatcttatgcaactaattgccaagaatcaaggggtgatggatattactaatcaagttgatgtgcctctggcttgtgcaaatcaaattaatgctttaagaaattttacaaatcaaca

SEQ ID NO: 260056 - DNA, 366 bp, Glycine max
agcttgtcaacaagtaactatatttgttttttacaaaatgaactaactaactaactaacactaatttacagagtaactactcagaaggaatggatgggccttgattaagcccatcgaatctacctatttaaactaattacacaaaacaaaagcccaaacttgaagcccaattattcaagtgcataggttttgacttccatgcttaatttgaccctcgagatggcagaattgaccaaagcttatttttttaaaaaatgaagatctttttctcaactttccagggactactctgtagaaacaaagcttcatggtgaatcaaagatgattctagggtgttttgatgataacaatgatgataacaaaaga

SEQ ID NO: 260057 - DNA, 369 bp, Glycine max
agctttgaattcattctatgcacctctttgggtccattcttgctttgtatgttttcatcttcatctcgggtactttcggtattattttcctttgttttaaacgagtttcgaccgatcgtttaagccgtaacctcacttaatgaatgataaaaatgaatttcaacggatcgtttgtattgtaatctcatttaatcatcgttaaaataaaattcaaccaatcgttcacgttgtaacctcggttattcaaaaaataagtaagttccaaccggatattttactttgaaagttctctcttttaaatgagttgggaaataaataagtgaaactaaagctaaaatcaactcacaaatccaactttgtccgtcaaaa

SEQ ID NO: 260058 - DNA, 321 bp, Glycine max
agcttagcaacacctttttttgttgctggcgacttgatatcatctttagtagtatggaatggagcctatgattctaaagatatatcataagttggctgaaagggagatggagcttacgctgcctggttaagctgctgcctgattccaacaacattgaagatctggcctcgttcaacctttaccagattataaccatcaatttgcataaatcacattcctgtggaattagccttaacagattctcaactttacgcatttaatcattccataaacgcaaaagctggggagatctccatatcaactcctaaactaaccacacgc

SEQ ID NO: 260059 - DNA, 405 bp, Glycine max
cgcacccgggatcctataaagccacctgtcagcatgcatgctatcttggaagaaatgtattttttttatatcgaccctagggtatgcccccattttttgggaatacatctttaggtgattttttggggcaagtggtccctttgtatttatcaaaatctggtaccttgaactttggagggatgacaacattatgtaccaaacacaattccgtgatttcggcgaaagggtaatcaccaaacccttcgacaactcttaatctctcttcgatgagatcaagtttctctctcacttccattgccagaggcggcccccctactgagaaatgcaacggttgtagagggcggggttgatgagctcctgcggtattgggtttaggcatatcattacacaccactcccttatcgg

SEQ ID NO: 260060 - DNA, 361 bp, Glycine max
agcttcttagtgggcgcatttttctattttttcgtagctaccgaccgcactgcccttatgactatggcatccttcctggcgctcaactgatgggagttggccgccgtatgcatcaacaaatttgtggcttcaactcgagtcatgtgatccaaaggctccacgtctggcaacgatctatctccttcgattcatgtgactgactcctccataaacatatagtgacaagaaggcgttcggaaatgacatggtggtggcaactggcacaccactacgtccatgattatcagggctcatgcaggctctctccactgatttgactatcgcctgaaagatacatatttatggcagcagccctgggagc

SEQ ID NO: 260061 - DNA, 364 bp, Glycine max
agcttgcccagagaaggatttttttaggaaatgcttaccacctcaaaagactggaaagcggtttctaatgactcctctgcggcttccacataaggcatagaggatgggcaactcaccaagatgtcttcctcgcctgatacgatgaccagatgcccttccactatgaatttcaacttttggtggagtgtagagggaacaattcccactgagtggatccacgggcgcctcaacagacagctgtaggggggattaatatccattatttggaaagtaacttgacaggtgtgagggcctatctgtactgggagatcgatctttcccttaacctctcggcgggtgccgtcgaatgcacgaaccaccattg

SEQ ID NO: 260062 - DNA, 314 bp, Glycine max
agcttgtaccctctagcctttattttttggctttacaaactccaacattagtggtggggctcctaagcaacgacgcatatagctttggtgcatcactcttgcttctctagcaaactgaatgtccatgacagagcttttggatgataatattgacactttgacaatactgtcttttattccatgaacataaccgctatggtaattccttttaggcctgtttgaacaaaccatctacggtcttcggtttaaaaacagtgattgcaacgaagttttcaacctgaagctcatatcttccatttacattattgcttctt

SEQ ID NO: 260063 - DNA, 354 bp, Glycine max
agcttcaacagcactcctctttccggcgctggaactacttcacacggatctgatggggcctatgcaggttgaaagcctcggaggaaacaggtatgcctatgttgttgcggatgatatctccagatacacctgggacaactgtattagagagaaatcccaaacctttgaagtattcaaagagttgagtctaagacttctaagagaaaaggactgtgtcatctatagaatcaagagtgaccatggcatagagtttgaaaacatgcgggtcactgaattctgcacatctgaaggcatcacctatgaattctttgtccccattacaccaccaacaaatgactttgttgaaaggaaaac

SEQ ID NO: 260064 - DNA, 367 bp, Glycine max
  unsure (1)..(367): unsure at all n locations
agcttgntgcagaattataatatttggctagaatgccgcaaaaatggcctaaaaaacatccatcggttttcttggcctgaacattgccgcaactacctctcccatgttgagtatggcaggaactctcgctccatatcccacttggaaattacaccaattgctgaagaatgaataagtgactcattgagagatgtataagacatttcttttagattctccactgaaggagactccaagctgaatggagagatggaccctgtagcaaggcagaagcaaattattgaagcaatcatgtgcagggtctcttccactggcaattctaatgccagttgttactttcctggtaggaggcaaaggctagttatgg

SEQ ID NO: 260065 - DNA, 356 bp, Glycine max
agcttgccaacctttttttgctcctaatatctcccacactttttggggtgggccattcttggatggccttgattttctcagggtccacttggaccccatttctaccaactacaaaccctaagaaaactatattatctacacaaaaagtacacttctctatatttgcatagagggtgtttttcctaaggactgaaacaacttgcctgagatgtcctaagtgatcatctaggctcctactgtacacgaaaatatcatcaaaataaacaactacaaatctacctatgaaatcccttaagacatgatgcataagcctcataaaagtgcttggtgcattagtgagcccaaaaggcatcact

SEQ ID NO: 260066 - DNA, 335 bp, Glycine max
  unsure (1)..(335): unsure at all n locations
atctatggatcaaggcaggtttgccacatgaagctgtcactgcttatcggcgggctctattcaagccctggaatttggagccgcggaggttggcctgtgtgcaaaaagatttagctaccacactactctatggaggtgttgaagcaaacctgccccctcagttgcaagtgaatggcctaacaacacctatgagtggcactgaagaggctatacttttgctattaatactttcaggaaagatggcacttcaggaaatagattgggaccctgaaataatggataatcttacattntcactttcaattactgggatgtgtgaatcattagcggatcat

SEQ ID NO: 260067 - DNA, 467 bp, Glycine max
gtgatcggacatgatggttcacggataaattgaccccacattttaacaaaccccttttgtcggtgttccaacagttcttgggttggaagatgacacaccatatccttgtgtgccccctttttcattcttcatgcacttgcctattatgcctattgtcatgcatttccatgctctctcaaataggcttccattcacttgtactgatgcggcccattgcatttgggccaaacgaataatatgaactggagcgatgataggaatccaattcgaatatggtttgagccccactgctccatagtgtacttcctcgttgtacttgtagctggtaactcactgcgcgttccacattcagcatcctatacctcgattgcagtcctaaagctctcatactatgcactctcaccttatactctctctaaaccatggataaatagcctgaaattgtcatcacaatactttacttgtaa

SEQ ID NO: 260068 - DNA, 337 bp, Glycine max
  unsure (1)..(337): unsure at all n locations
ttattactaacgttgtcatacaaagatgatttactttgtgaagcatgttacacaggataacaaatcaaaaactcattgtcaagtaaaaacattctttccactaatgacaacttgggtaagtttgactctaagtgtgacaatggaatattgcttgaatactctataacatctaacgcttatagagtatataattctatatcctcaattatggatgaagctatccatgtgaatgttaatgacactaaccatgatattgaaacgttataattggatgagtctattgcatatctcagacnggatgatggcattggacccttaacatcaacatatcaaccaa

SEQ ID NO: 260069 - DNA, 394 bp, Glycine max
gaatcttgatccggctctattttttatatcaggccttgattctgattttctatagttaggattcaaaagaggtcgtttaagtaaagtagtctagttctgtgatagcagtatccccttctgctttttattgtaagggatgatggattctttactttttactaatatgaatatgaatgaatgaataaagttaaggtgacatgtattcgtagctatttgtattttttgaaacgctgtgatgagaagaagcttattctttattacttttatcctaaagtaaaacaatctattccttgataagaaaaataaaacacgtgaatggtgattggattgatgataaaatcgactcctacgtctatcaattataaatgtctatattagaatgctacttaataat

SEQ ID NO: 260070 - DNA, 335 bp, Glycine max
ttccatacgttcgcaccactgttcattctatatttctgctccaccactaaccgtaattcctcatgttaaacctttcgtttataaacaataaaacacacaattatcacaagctggaatggaaagatgccattaatatggacaaaattgcatcagtgttttatgacgtgatatactttaaactgaagatggcagggattactattttgcccattatgctatccacatagaataatttgagttgatatcttgatagttaagactttatgagaacatgatcatttttgtaaagttaggcccttaatttactaaggttctctaataataatcaatactaa

SEQ ID NO: 260071 - DNA, 458 bp, Glycine max
  unsure (1)..(458): unsure at all n locations
gtcacctgcggcatgcaagcttcaagaataatggcctcagcaaacttcttattctcaaaaggaaaatcaataaataggcctcatanttttaatggagagggttaccactactggaaaacccgaatgcaaatcttcattgtggcaatagacttaaacatttgggaagccatagaaataggaccttatgtacccaccatggtggctggaaatacaacaacagaaaagcctagggaaaattggagtgaggaagatagaagacaagtgcaatataacttataagccaaaaacatagttacatctgccttaggaatggatgagtattttagggtatcaaattgtaaaggtgcaaaggatatgtgggataccctacaagtaacacatgaaggcacaacagatgttaaaagatctaggataaacacattaactcatgaatatgaactatttaganatgaatacaa

SEQ ID NO: 260072 - DNA, 397 bp, Glycine max
  unsure (1)..(397): unsure at all n locations
atactcagctatgtaatcgatacaagtattgtgttatcgagtacacaagtttataaggattctataatatttaaacacaagttgtaactcttgaaattcgaaatcttaacgttttaaaacattggtaatcgattacatgattatggtaatcgattacagctttgtaaatcagttttgaaaacaatactggcttctagtaatcgattaccagagagtaaaactctttggtaaaagattgtgtgaataattcttgtgctactcaatgttgtgaaaaactnttttagtacttatcttgattgagtcttctcttgagtcttgaaacttgattgaatcttgaaacctgattattcttgaagcttnttgactcttgattctttggaacttgattaactcttga

SEQ ID NO: 260073 - DNA, 284 bp, Glycine max
agcttgatcggtcgattgcaggatattctactatgcccttgactactaatgtaacaactagttacaaacaatgctgacagatctgctaggggtagctctgctggactcacatcagaccttgacccaattcgcaatcagataatatccagacctacagctcccacctattacttaggccaggagcagttgctgcgtatcggcatgcacataccttcggaccctattccacttctactggggatttctctgcgcttagaataatcactccactcattatggacgac

SEQ ID NO: 260074 - DNA, 395 bp, Glycine max
  unsure (1)..(395): unsure at all n locations
cttgtgttggaccgaccttctctcaacgagagagagacctcgtagtgacgcagatataaactgacgaagagctcacgataggggaggggagccattataaaatttaccgttttgacaccatatgtagggtcatggaacctaactatgagaatatttgcctatccatgttgcatgctgattttcctccaagaaaaactggttgtaatgaatgggatgcgatatatccagtggcgatgaagaacatcattgctgattaaacatgtgtgtgttgaagacttggggagcgcgaaccgtcagcatggaaaatatatttacatgcagaatgcgactcaatgatgatgtcgctatttgtgaccttaaatgattcgtgggacgtnatacttatgagatattga

SEQ ID NO: 260075 - DNA, 479 bp, Glycine max
  unsure (1)..(479): unsure at all n locations
atccttaagtcacctgcggcatcaagcttgctgattacatctccccctttcttttcaaattcttcttgatatcatcaaaatcttcatgatttacattctccccctttntgatgatgacaaccacctgtaggttaggagcaacaacaaagaaaatatctatttgcatatagttttactcccccttggttttacattgattgcttatatgagacaaatgaagatttcatatttttcatatataaaaagttgtctcataaaacaatagataatttttcttactattttatcttttatctttctctccccctttgtcaacatcaaaaacaaatcatgaatagagaggagaaagatgttaccacttgttgcaatgtatgagaatcaagtgataccaaaaggcattaaaacaatcattcaatattaatcaagcaaaaacaagtacaataacacatcaatcaaacacaatcaaatacaatcaatca

SEQ ID NO: 260076 - DNA, 327 bp, Glycine max
ttccgcccctgagtatgacagtcaccgctttatgagcgttgtacaccatcagcgtttcgaggccatcaagggatggtcgtttctccgggagcgacgcgtccatctcatggacgacgagtatactgatttccatgatgagatatggcgccggcggtggacatctctagttacccccatggccaagtttgatccataaatagtccttgagttttatgccaatgcttggccaacagatgagggcgtgcgtgacatgatgtcctgtgtaaggggtcagtggatcccagttgtgtcgatgcttcggccgctcctggatatccgtggtgttgg

SEQ ID NO: 260077 - DNA, 437 bp, Glycine max
  unsure (1)..(437): unsure at all n locations
ctcgctaatattttctcattttgctcaaatttcctttcatccaacggattgacagcgttacaacacttgtttgttttgtctcataatgttctcttgtaattctactatttttttaacacggacatctttaagctttatatagacttaaaagctttgatctggtgagagattcctactagtcattggctaatagctttagtgcttgcacaaggccattactgtgcagagagagagtggggaccacaaacactttttgcagcatatcttcaaagaagtacagtttgccagtgtcacctagtgctcaaacttgactttcatcgtatgaattgaaagaaatgttaacaacataagacaaggaattaagaatgtcaagacaaggcaatttaaatcttctcttttgtgcgttatggcacaagtntcttactaagcctatggac

SEQ ID NO: 260078 - DNA, 328 bp, Glycine max
  unsure (1)..(328): unsure at all n locations
caattgggctataatggatgagggaaagagtggttntcgaaatctgcactttatgcagaattttgctgttgaaatgtgcagcagaattttgtataagtgtagaanaaaatgcatgtgtgtggctggttgtgaaaagggtagtacatatggggttctgggcatttgctagcagatcccaacggtcaaaatgtagacttatgtactagagacttccagtaaaattttcgagtcgatccaacggttaacgaattggaacgaaggaaatgttgttggggtatttgtatgtganaagctgtgattttgagttgtggtttgggcagagttttct

SEQ ID NO: 260079 - DNA, 419 bp, Glycine max
  unsure (1)..(419): unsure at all n locations
aagtaggtgctccttaaacctccagtaatttttttgctttaccttcccttccattgttgnttcttcatttttctccatgtatctcctcacatgtcttgtgctaaattttgttaacatgattctttaaaatttccaccgattaatcttgctatagaagctagaatttgatttgtatgggtcaaatttcttgttcatgttcttgaaccatgagttgtgttgagtttaagttcctttgagttttgtcttgctattttttgtggctgaaacctaaaccataaaattcttacaaaaacattaaagttgaagaaaacctcaaaaatctagagtgactttgtcacctattgtagttntgtcatagaagtcatgtctagtcatgacacttgtcacataagatntcttatgtngngctgaatttattt

SEQ ID NO: 260080 - DNA, 424 bp, Glycine max
  unsure (1)..(424): unsure at all n locations
tacaacctactccctatgttaaccatcccacttcatagactacctatttttttacaaataaattattatattaagataattttatttttattttaaaataaaattaactgtttacccaacattcaatttaaatataatatttgtcaccaaaactatgtagaaattacttgttttagcttccgaatatacactttttaacacgttctaattattatgcttatactttntaacccgcttaatttttataagaggaagttctagctacatattccctaacactctttctaagattactataaatttattgataaaagtgagacccccaaaatttataatttctaacatagttcaaccaaccaacaatagactgtgtttaanaaaatgtgttggtagagcatttctcatcccaacaatttcgaacaaa

SEQ ID NO: 260081 - DNA, 461 bp, Glycine max
  unsure (1)..(461): unsure at all n locations
gatccttaagcaccgcggctgcaagctgcttggagaggtcatcactctttatattcttgatgctggnggtatctaagcttttaaccttgacttggtagaaacctcttgccggttgatttgttcccatgcttgctaaagtgagacaaaagctggtgcaaatcaaaactccgatatctcatgggtggaatggatgaatgcatgaaggaatgcatataacacagatgcaatctaggaatgcggnggtccggngaattcgtccccttcttagacacaacgtctaggggtagcaaagtgccccaacgtacgtttttaagaaggtgacacggaccctccgttggtttgtttacagaagggatcaagacagaacccatatgcgatgcctatgcaaaagacacaatgcgggaatgtacacagtatgacaatattcactgaacataagcaaaagggtatatgatacttat

SEQ ID NO: 260082 - DNA, 317 bp, Glycine max
  unsure (1)..(317): unsure at all n locations
tcatgatgaatcaagattgactcanagatgttttgatgattacatatgtgatgacaaaaagctcacagatcaagaacatttcatgataacaaatatgatgatctcaagaatcatataatgaattcaagattgaatcaagaacacttcaaggttcaaagagaaaatttgatttcaagaatcaagaatcaagtttcaagattcacggtccaagaatcaagatctagattcaggactcgagattagagaatcaagaaaagacttaatcaagatacgttgaaaaagtttttctaaaactgagtacacatggatttttctca

SEQ ID NO: 260083 - DNA, 292 bp, Glycine max
aacccacatgagccatcattcatctagaatggtgagggtactagtcataaggactctctctctagaatagtagatgagttgaggtccctcaagttatggaacgaaaaactagaaagataagacaagggcaagtataggaaagaaagttttccggatgacagagaactttctagatacgaagacagaagataatttattcaacaaatgaaaagagaaaaacatgcctcctatactactcatgactcttgctagagtttaagtgaaaaacttatcaactattatagagggcacc

SEQ ID NO: 260084 - DNA, 349 bp, Glycine max
ctcgctctcttccggagctttggccttttcctctcttgcagcccttaactttgggagccaattcaaaccttgtgcgcagactctcagccacttatgatagacgccgatgattccattgttgtttcccctaagctctttgtccttccttcgcaatgcatcccatgccttgaggattcctcgaagcaccctcgcgttggggtcattgaaaccctgtgcgatgaaaggcgtgaggctttcctccgacgacgctcctctcatggggtatccaaactgtcttatggtgaggacgggattatagttaatacaacccctcatttacatcaagggaacatttgggaaatcttcgcat

SEQ ID NO: 260085 - DNA, 401 bp, Glycine max
gaaatcgaaattgaatgaaataaagatgaaagcacttattggtaaatttatatgtgcacccccattttgataatttcaccccttctttcgtaatttacggaatagttacggaagcctatatgacttgatattcctttttttttcctgttccttctcacccatattaagtgaaatatgcttatttagggttatgggaattttgcggaaacattactggtgttccggaagcccattatttaacaaaacggaggatgtggttgccacctatcatcccaggcgatctatgttgattccacctttaacatgatatttcccagaaacctctataagggccctaatttgataaatactatatgcacccacattatactaattacacaaccttgacctttttttgctga

SEQ ID NO: 260086 - DNA, 250 bp, Glycine max
acaagcagtaatggatatattattgtatcaatgtttctcaggaacagccttgatcaacttagcattgggtttaagacttcaaaataagcatcaatgtgttgtacaagggttagcatgcctctacaataatttgagaatctgcgagaacagccaggtttgtctgctcagcatttcatgaatatctctgtgcccgtttaagaagacaatgttctattattaataaaagatgataataagaaaaagatatcac

SEQ ID NO: 260087 - DNA, 437 bp, Glycine max
  unsure (1)..(437): unsure at all n locations
tatgatattttcacttatgtgtgatccaaaaggattgaagggacatggcttgcggactggtcaattgctttgggttgaaatctttgaaaattatgtgcaagtataatccacatagtactttctatgcataatgtacatatatatacactatagactgtccccgccatccgcttcataagtaatacaacaaatatgtctcaagctagtttggccacgaacaaaatataaaattgtctgccttgctggaaccgtataacctcatcagtgggggtaaagaaattattgaatatcaataatctctatttcaattatgtgccggcaaaattatatttcctgcaaattcggcccaatacagcatgctgaaataagtgaaggatcaaatgctgatcttctcttccatataaatgatataatcngatagcctttatgacaattca

SEQ ID NO: 260088 - DNA, 381 bp, Glycine max
  unsure (1)..(381): unsure at all n locations
atcacaaaatcttgtgcctcanaagaggtctgaactttgaagttcaattctcaaatgatcaaagttaaaaaaatacacacacatgacctctatttatagccgtgtcacacaaaattggagggaaatntctattcaaatttcacttgaatntgaaattgaatntgtggagccaaattttggagccaaaatttcactaattatgattagtgaattttagctatggttcaggccactaatccaagatcaagtccaagattctccactaagtgtgcttaggtgtcatgaggcatgtaaagcatgaaggacatgcacaaagtgtgactatatgatgtggcaatggggtgtagcaaagcaaatgctcacctccnctctaaaaattaa

SEQ ID NO: 260089 - DNA, 369 bp, Glycine max
  unsure (1)..(369): unsure at all n locations
tgctcgtgctaagcgcacagacccctaattaggtgactaaatagttcagctaatcgcacatcactatgctaagccccacatcttcacggtaattgaaccttaaccagtgggcttatcatggatgatgcgctaagcgccacttcttctttggaaaattttattatagcagcgctaagcgcgctatcctacgctaagccctagatccanntttgtaatgagttnttaagctgggcttagcgggacaagaagcgctaagtgccaatctcttacaagttttgaattcatggaagtgcgcttatcgcgcctgttgcgttaagcctgaactactctctgtatgttgaagcttgatggtacgctaagcctcacata

SEQ ID NO: 260090 - DNA, 396 bp, Glycine max
acctgccgcatgcatgcttgcatgtgcaattgcgaaagggccactctatctttaggattaatacctagctctctcaccacaagctttgtcggacgtaacatgacaactctacttgctgtgagcatacctcacccactcaagggtggcacactcctacgggtttgctctaagcaagcacgatagacttttaccactctaatgccacttgagatcttatgctatacagagaggatggccactccaaacaacagatcaccaatatggagaaggtaaggcgacactaggaaaacgctaaccggaagacacgctcactgtagttctaggcacgaatgattgatatatctttcacaatatatgacttctggtgacaatccctcatgcggccaatatattacc

SEQ ID NO: 260091 - DNA, 428 bp, Glycine max
tactctgcttctgtatgaatctcgagtgtctcgatatactacgggacacaatcggacatccgagtgaaaagttattgacattcgaatttgctcatagcattcgttgtcaattacgagcgtctagatatattaaaggattcattcggacatccgagtaaatagttattatctttttattttgctcagaacttctgttttcaatttcgagcatcctcgatatattacaggactcaatcggatatccgagtcaaaaggtattggcgtttggatttgctacgaacttccgggttcaattacgagcgtctcaatatgctacgggacacaatcggacatccgagtaaaaagtattggcgtgtgaatttactcagagcctccgtcgtcaattacgagcgtctcgatatattcaggattcatttggacatccgagt

SEQ ID NO: 260092 - DNA, 412 bp, Glycine max
  unsure (1)..(412): unsure at all n locations
atgaaggtgtaatagatatagctgagattgagcaatatttatagacaaaagataaagatagagagaataaagtngaagttatagccaattagccataataaataaaattaagatgagaatacatgtgtgtctaggactatatatctagtatttcaggtctccattcttatactttcctctaatttgagtactttcatctagtaaagcggtgaactttattctcacgatttgcattatactctattatgctttcaatattaagaatggtttaacattattttttatttttttcaatctatcacgaattttcaataactttaattaattctaacttgaatntaaaattatacgttaaaaagtatntatttattttagaatctaattatatatntagaaatagttattattatat

SEQ ID NO: 260093 - DNA, 411 bp, Glycine max
  unsure (1)..(411): unsure at all n locations
gctattgtacgagctatggaaatgcgtatttttaaagatctgtatgtgaacttttgaagtggcttatgactttccttaaagcccttttaagcgtgaaaggagaagggaaaggagggagaggtcatgggttcgaattccccacctacatctaacaaactaacattttcggataatttntttttccagaaagagttataagaaaaggttaaattaagctttttccgtaagttaaaattaacttatgcataatttaaaaccagcttttggagaacctacagtgagcgattttctatagaagtatataagttgatttaagacttagttcattttactttcatattatcttcttctataagtgcttactggaaaatttatcctaacacttgctaaattaaattggttaccccaacg

SEQ ID NO: 260094 - DNA, 470 bp, Glycine max
  unsure (1)..(470): unsure at all n locations
atccttgagtcacctgcggcatgcaagcttatcccttcccccgccctggccgtcctttataacctttagagtcactgctatgatgtaaatggatttgatgttaaaataatgccatcttccttatctcatttgaaagttaaccttgtgatgggatttatctattatggtgatggcagaagagagttacaggtatattaggaggaggtaacctagtcatcaaattatgctatgtgcaagaaaaaataggaaaatattggatatatacttaatttttctttcacatcatttatcatatttatcaaattttttgttttttttctctatctttctttcttccacctatacacccaaaaatgcggtgtattagtatcatttcttgaaaaatcatacataattttgaatntttttttactacctgtttaagtgcactntatccacctattaatggaaagagagtctggaaacatatg

SEQ ID NO: 260095 - DNA, 371 bp, Glycine max
  unsure (1)..(371): unsure at all n locations
taaagattcatgtaaaatatataaggaaaaggatataaagntgtgaataaaatgagttaccacctcatctcaaagtaagtaagtaactactatattgaactcaaaaagctgcagaagagggcaagtcaataactgaggttttctcttaccttctatgtagcattgaaatgtacaaaaatgttaaaagactcagctgaacccacaaaaggtaaaggatacacgttggaagaaagctaagtctctaactagctagttctattgagaaactgaagatacgactgaataatgactaagtgtccaaaaaagggaagaaattaacaaggaggaaaatatacatatacctatgatgctatgacaatgagtcagtaaca

SEQ ID NO: 260096 - DNA, 447 bp, Glycine max
agcttgagcatcaaaagttacaagacttgttttttgtggacaaccaaattcttaaagactgttgtgacagcaaggatttaattgatctaattctcctagacaatattgatgattgtaatgagtggttgataggggaaatggggtaaagatggagaagtggttgaagatgaaccagtctttggtgatgatagcttgacttggggaattgtaggtgatgcaattggggttggtgatccagctagactcactagacagcatactagactcactacagttgcacctattgaagaggaaaaggaggaagaacatatctttaatgatggggaacaagagatgaggaagaaattggaagtggagatagtgattctatttaaggaatcacttgtaataagcactagtcagcatacttactttgatattagtctttgttagtattggatttaatgt

SEQ ID NO: 260097 - DNA, 405 bp, Glycine max
  unsure (1)..(405): unsure at all n locations
tcaagcgtacaacggataatatctcaacacccacttgcaattntatctttcagatagttaattcttcagcctcttctttgatgatgccctcactagttgctatcttgtttgttagtttattcttgattctgttttcttaagatttctttgtacatacattagagatgttattttttatttatggtttcattatttcttggagatatagtctggatgatattaattagtttacagtttctttcaatactgaatttctcacattgatctcagataagtagtcaagttatatatttatttctagaataatgctaacaacacactttataatacatttttttttataataacttatgctttgtacctaaagtttctcctttttattactcgtggtttgaacttcgaatt

SEQ ID NO: 260098 - DNA, 383 bp, Glycine max
  unsure (1)..(383): unsure at all n locations
tattaaatctcgagctaacaagctatgcttttagggaatttggtccgtgattattatcttgataccataattcaaatttatttttatagcagggttttactatgtaattgtgtgtcaatgtaaattatacctcaattaatagaatattatttttgcagaanaaaaatacctcatgctatttatatatgaaaaaggaatcagtattgattacaagatcaatcaattactgattaataggaaatagaatattctataataaatacaatatgaagaataatatcaagacataatctcacaatttttatttnttttattatatgatattctccatatacagggatgtaggttctctcaagcagctgctgctttgcatgagtttaaac

SEQ ID NO: 260099 - DNA, 425 bp, Glycine max
tcagacattgagaagacagtatgagcttcttgcaatggatgagactgaatcagtagctgagtatttcaccaagattctcacactcaccaatcagatgaagtgctgtggagaacagattaaggaacaactggtgattgagaaggtgcttagaacactaacatcaaagtttgatcacattgtggtggccattgaagaatcaaaggatcttacatccttcaagcttgaagaactacaaagttcacttgaagcgcatgagcagagattaagagaaaggaatcctgagaagcacaatgatcatgcctcacaagctcaaacaagcagaaagtttgactagcattgagacaaatccaaaaagaacaaaggaaagtggcgtaatgagaagtggagaaagactgaagattcaaaatgtggtgattctggatcat

SEQ ID NO: 260100 - DNA, 416 bp, Glycine max
  unsure (1)..(416): unsure at all n locations
taactgctaaataatcatttttgtgatatntccattatattcttattgtcgaaaccgctcatatttagtagttatcaataaagatgggcatgctcaagagagtgtttttttatcctattcatgttgctgacacttcttctttaacattgaagaaagaaatttctagtgttctttctcgccattgtcttgatattcaaaatcttcgtggccaatggtatgatggagccagcaacatgcgtggtgaatggaataggttacatgctttattcttgaaggatggtctgtatgtataatatatacattgtctttctcatcgcctacaacttgctctaattgtatttgcaagaaaaattatccatcatgttcaagaattttgtttcaaggttatcattgatcgtgaatgttgtgattgcttc

SEQ ID NO: 260101 - DNA, 324 bp, Glycine max
  unsure (1)..(324): unsure at all n locations
tccatccctgataacgactcagcacgaactaaaactcaacattgtgtccaaccataaatcatatcaaattatcaatgtaacactttaatccaccaaaaaagaacaaagtaagacgatgtaatgtgaaaatagagatggcctaagtttctatttagtaaagtctgaacggttggattatagagaacatacttttttttcgataggctgatagtggactatatcttattagccaacaacgctcttctattagtcgcgactaatagacaaatttggggcataaatactctntcccttataaatttggggcactcaacctactttaaa

SEQ ID NO: 260102 - DNA, 265 bp, Glycine max
tactacttgtgtcaactgacttctcaacattgctctgtcttgacctgatcttttgggctcccctacccgctctcaaggatgagatcatttttctttcattccttactctcttatacttttttgtcctttactacttcccttgctcatgaattttcactacctcaacttttctgtcacatgtatacatacatacctaccaatgtttttaataaacggtctatgtcacaacatcaaagcttcttgtggtttccatgaccatattctg

SEQ ID NO: 260103 - DNA, 259 bp, Glycine max
tatgaacaataaagcaaagatattgatcatgatgatcaatttatgctttgtcttatatattgagcaaaaggtacctatatacagattggaaatatatgctgaaactaacacaagagcattgcaaagtttgttacaaatctgctagaattcaaaatgaatttggcggaaaaggtagtattattgtaacgtgcttcccttgataagataatatgaattcgaattgcaggattacaacttggggcgacgtgaaattatttct

SEQ ID NO: 260104 - DNA, 366 bp, Glycine max
  unsure (1)..(366): unsure at all n locations
gtccttcttncaagggcaaggggtataattcttatcttacgtcaaggtttatggccgatgagctgaggttctggctcaaaagacttgtagagggccggacatgatgtatgtaagggatatgtgttcggtaagcgggtcaaggataagggaatgccccatattatttccatgatacccatgtggacactcaaacatcaagtttgtagtaatgtgagactaaggcttaggattcatttntcccatttaaatcaacctagtgtttccagaagatgttttttatcaatttatgcattcatctgagtctgtttaagcattcgggaaaacttccacagcattcacccttcaggtgtacacatatattttttt

SEQ ID NO: 260105 - DNA, 454 bp, Glycine max
  unsure (1)..(454): unsure at all n locations
attttgatgatgccaatagcccatattatttgattctatgatttcaacgatcatagccattattgtaatccatntgccaagtattcaatgaattcatagtagatagaatatcaatgaaagcaatcatcgtcaaggacttcatattaggatatagtattaaaaagatttttttaaaaaccatatagcacatgtttgttgtcaaaagatatttctcaaattttctaagttaccagagtgactactctcaagtaatcgactaccagttggcagtaattgaataccagcgactagtttggttttaaaaatgtttcaaatgatttggaacgttccaaaatgatgttcaaatagtgttattgattacactatattagtgatcgattacaagtgaatctaatacgttgaattcaaatccattgtgacgagtccaacttgtcataaatacattgtgtatcat

SEQ ID NO: 260106 - DNA, 470 bp, Glycine max
  unsure (1)..(470): unsure at all n locations
agcaccgcggctgcaagctgaatcgatacacatatactggaanctannttcagttgagtnnnccagaaaacattctcaatagtcacatctttgtatctgattcttaaatggccatcaagggcttatttatatgtgacttgagacacgactttaacaagagtttttcagaacaaaaaggtcttatcctctgttaaagcaaaatcgttttatcctcttaaaaactccttggccaaaacactcgtgattcaataaggaattatttgagtgctcaaattgttcaatctatctctttcaagagagatatcttcttctcttcttctttattctgaacagggatttagagaccgagggtctcttgttgtgaaagaattctaaacacaaaggaaggattgtccttgtgtgtttagaactcgtaaaagggaattacaagatagtggaactcacaagcgggtngctcggggactggacgt

SEQ ID NO: 260107 - DNA, 265 bp, Glycine max
  unsure (1)..(265): unsure at all n locations
cttcctattacaatggtgctctgactataactanctccgagcatgccgcgaagcttgttaccttgttctgaaaataatgcatcttgataggcaatatattgagatggaacaacgcctcaattaattccttttgagaatctatattctaccaccagtattggggtgtctcccttatatatcggtaattcgacaatgaaaatcgagtgataagttctcctatggctgagtatgaaaaagtaaggagatccattctgctgtttcctgt

SEQ ID NO: 260108 - DNA, 449 bp, Glycine max
  unsure (1)..(449): unsure at all n locations
agctntaaataggctctaaatccgtgacgttgttcttagcgccaccctcgtgcttagcacgagtaagtggatttgagcttagcgccagttatgagctgagcctggctgaagacaaccgctgcgcttagcgcactgatctcacacttagcgcgcagccttgatattgatgctatgccagattcttctgtcacactgaagttgtgcttagcgatggatgcacgcttagctcaactgatgagctgagcttaactgccacttttaacacttcatgacttaacctttttttaacctgaaattgcacagatttcatcattaaatccaatggaaatattctagagacaactttaacaataaaacaagatttatttacaaattactacaaaataaccataaatgggggaactatacaanngtttggaaaatatttctatacanaaagtagtcgtata

SEQ ID NO: 260109 - DNA, 363 bp, Glycine max
acattgattccgcacctaatgtcatattagatgggaattgggtatcttaacataagagatctcagatggactttaatcttagtcccacagccgaccttttcacgagatctctacttaaccctttggttaaatgatcggccaaattatgctgagttctcacaaactccactgatatcacacacatgccatgattatactccccgaaccattgttgtgtctaacacccaagtgtctaaacttcccattatacacttgactatatgccttatccaaagtatcctgactatcgcacccgattgacatgggaggtataggtttgggccacaatggaatctcatagatcagatctcttaaccactcagc

SEQ ID NO: 260110 - DNA, 352 bp, Glycine max
  unsure (1)..(352): unsure at all n locations
ggaccattggtacttgtatctactcacttggcatggacgatcgtcgcaccataaagtctgtnactggtctgatcataatgactgtcttattgctcaacaatcatgaaccagagcctttctgtcgaggtccttgttcaagattcatagactacccggggttgactgttaacaatgcgcttctaacacgcgcaaggatgtggttctcttataccaggacatgggatggaattccctgatacacggtggagacttgcgcgaggataatagatctaatctccatgttcgacatgtttgggcatcctataaagcgattatcggaccccaccnctggaccctaggatgtggatagaca

SEQ ID NO: 260111 - DNA, 470 bp, Glycine max
  unsure (1)..(470): unsure at all n locations
tatgctgcatacatctacaatagaccttctcaacctcaatatctaaatcagcccaatagaataattatgacctctccagcaacaggtacaatcccgggtggaggaatcatcccaaccttatatggtcgaatccttcacaacagcaacatcaacaacaacagccttattttataataatgttggcccaagcagaccatacgttcctccaccaatccagcatcatcaacaacagtaacagccccagaaacagcatatagttgatgctcctctgcaaccttcccttgaagaacttgagaggcaaatgactatgcaaaacatataatttcaacaagagactagagtcgtcattcagagcttaactaatcaaatgggacaatnggctacacagttaaatcaacagcaattccagaattctgacagattacctcttcaatctgtccagaatcccaaaaatgtgagtgtcattacat

SEQ ID NO: 260112 - DNA, 357 bp, Glycine max
  unsure (1)..(357): unsure at all n locations
agcttgtagtgaggcttggctacaaaaataattggtttttctaggattgaaaggcttggattctaagagagcacaaatcccaaacttatccaagtagtcttttcaatacaattagcttattcactagcctttcattttaacttgtatttgaccttattacaacaacacacactttctttgattgctttntttttctcctcttcttttttaatttttttatttntttttaacacaacttatttgttgtgtgtgctgatgtgctttgccttccactttacatcgcggttaactcccccaaatttagggaaaatttccttgaaccatcttgatgcaatcctaccctcaaggacattggat

SEQ ID NO: 260113 - DNA, 421 bp, Glycine max
  unsure (1)..(421): unsure at all n locations
tgcttatttccagtttcctgaaaatatcttataatctcaccagatgacgatctttttccttcttggaaggtaccatatgatatggtacttccataccttcatccatagctttttcacttctactcttctttgcattcttattattttttttcttctttttcattttgtacattttctattctttttctacttcttttttttcttggtccttcaattctttattcttgaccattatttgttcctctctttcttgattactttcacctcttacctcattgttcatgccatcggtacctctcttgtcagcagttttcttcttatgcacaacattatcctcatcctcagcctccacatacactttactccttgtcatcacagacttgcattcactcttgngattctattctgtaatttgccacaa

SEQ ID NO: 260114 - DNA, 364 bp, Glycine max
  unsure (1)..(364): unsure at all n locations
cttcgatgaatgagagtcttgtgagacacaactcaaagctcaacttctatccccttgtcttccttcaattgcgtgctcccccctctctctttctctccctctttcgtttcctccattgaagcatcctctccaagcttcttatccaaggctcatcgtggggggaaagctccttcttccatggcttattccctagtggacggcgcctcctctcacctcttctcctttgtcttccgctgcatctccatggtggaaaatcaccattaagggacctcattgaagctcatagatccagccttcatagaagccccacaagcaagctttcatataaaagcangagatgagagttaagagattgcttcagatg

SEQ ID NO: 260115 - DNA, 322 bp, Glycine max
atgcttggctattaaacacaaaagtttgctggtgttgtatgagtcctgaatatcatacgctcgaatcgaacgctgtactctcaacaaatctacacaatattgttacctggatgctaataaggccgtgaacatggacacctctattgaatgtgaactctcgcaattgaacgacatactttttaccgatgctgatgagtcgtattatcgaagatcgaatgatgtgaaccgggatattaaacgactaactttcctaaaattgatgatccgatattgggagacgaatgattcgacctaaccattaacgaatactttcctggtgctg

SEQ ID NO: 260116 - DNA, 332 bp, Glycine max
  unsure (1)..(332): unsure at all n locations
cttttctaagagcacttgccacatgtccgcttttaagtggagcaaaaaggggcccacctttttcccttgattcgacttcatattcagccacaaaggagaaaaatnttgacctcttggatgctaaaatcctacctcggtttgcgtgccacctctctggttccagatcgcgtttctctgcacccgtcggggcccgttatcgaaagtaggcaatatatatatcacaacgctcagaatgagaccctgagcgtggtcanagggttggtttgtaaattttaagtacacccanaacgataatctagactaataatctataactgcccagtatggatact

SEQ ID NO: 260117 - DNA, 375 bp, Glycine max
taaccttacatggagctacatcattatctaacatattcaaagacattctcagttattgaacttgtattttagttgtttctaaaataaacatacaagtggaaccaactatattaataatgggcctttggtttgaacaaattacgtctgcatatcgcaatgcaatcatgtaacattatgaataaggaataatgaagacaaaatggacatttgggtctacaacacaacctgacaataaggcaattgtaatgaaacatgacggaatacaataatattattgatgcagtcatgatgttgttttggccgaaattttgtttcatttgtgtaaaaaaacatgacaattgggttgcttacctaactgtgacaaaacattgagtt

SEQ ID NO: 260118 - DNA, 321 bp, Glycine max
tcagagcacctgcagctgctgctgctgccactgagatatgtcgaatatatttctcttataaccctttagagccttgtttccttttccttgttttgaagctcactacaagccttaagtgataaatcatgatatcaccatatccttaaggaattatggagctttggaattgttctgggaataagtgtggggggctcttagattcattggacaacttgttgtgttggctatgctatatgatgtattttgggccatactggatgtacattgtatattggttaaatgtcggacatgctgaatgaaatgtagtttctcaaaggctat

SEQ ID NO: 260119 - DNA, 377 bp, Glycine max
  unsure (1)..(377): unsure at all n locations
cttgagtttctctccacaaacaatggttttttgttttcattcttcttctcattggattaggaacacttgatgtaaatcacatagctcggcaagttgtaaaggaatactctttcaatacagtaatagtttatctacttgatcattccaaattttcaaagatgttcaaaattcaatgccaattggattgctctatctgaatattctaccccaaattctaactgtaagccgtctaaatctcaaagggaatctaaatcttccgcatctgcacaaaccaaatcctggcaatctcctaaaggactttttcctagtaaatntgcgcctacttttatcatttctattatgagagccaaaatcttcatccacgtaactaccctttg

SEQ ID NO: 260120 - DNA, 388 bp, Glycine max
  unsure (1)..(388): unsure at all n locations
cctcagcagcaaaatcaaccacagcagagcaattatgacctttccagcaacagatacaaccctggatggaggaatcaccctaacctcagatggtccagccctcagcaacaacaacagcagcctgctccttccttccaaaatgctgctggcccaagtaaaccatacattcctncaccaatccaacaacagcaacaaccccagaaacagccaacagttgaggcccctccacaaccttccctcgaagaacttgtgaggcaaatgactatgcagaacatgcagtttcagcaagagaccagagcctncattcagagcttaaccaatcagatgggacaattagctacccaattgaatcaacaacagttccagaattctgacaagctgccttcac

SEQ ID NO: 260121 - DNA, 429 bp, Glycine max
atcagtaatttaaatatgggagaagtctaatctattttaccttctagctttactttataactgtgtacactgtaaaatttatccaatcaaagtcaaaatctcaagctaatagacaaaagaaatcaacaaagatctactttgatctatacaaattggttgttgtaccttctcaatataacaacctagaacagacaaatatagaaggatatataaaatagattcttttataatataagttaaaatttgcatatgtataaaactaatttatagaagtttcttatgtaatttttctatttgttaatattaacttatacattagttaattctaacttgtaagagaaacttaatctaatgtgatctaatgaatgggaaagcttaatcagctaatgtaaatatgggaaagttaatcctttaacttcaatgtctttt

SEQ ID NO: 260122 - DNA, 442 bp, Glycine max
  unsure (1)..(442): unsure at all n locations
tacaaccccactaaaattctctctcaaaagatccgtcatattctcaccttanagtttttgggtgtctctgttaccctcttattccctctgtaactagaaataaattacagcctcgctcaactccatgcgtcttttaggttatccttcaaatcaccgaggttataaatgttatgagttgtcgagtcgtaaaattattctttgtaggcatgttatttttgatgaaaatacgtttccgttttctgccttgaatgctcctccaacctctagttatgaatttttggatacaagcgacacaccatttcttaacaccgacccaacctcttcacccctcatgacaccaacgcctaaccaacattcccctcatccaaatactaccccattaccaacacctatctcattacccaatcgcactactacgacccccaccttccaacatatgcca

SEQ ID NO: 260123 - DNA, 381 bp, Glycine max
cccatcacatgtggtactatgtggcggtcgggcgatggtgcacaacaagtttttcacatccacaaatcgcgcataaacccaccatcccctgttgcccacctccaactgagctcacgtactcccacgtagcccatatcctcgtttctctcaacaccgggtccccatcaatcctctcaagcttccccaacatccaagtaaatcaacattcaaacagcacaaactatcacagccaagataacagggcaaaggcagaaactctgcccaaaacaccaaccaaaatcacagttttttctcactttaatgccccagtaacaattccttcgttccagttcgttaaccgttggatcgactcgaaaattgtactggaagtctctagtacat

SEQ ID NO: 260124 - DNA, 446 bp, Glycine max
  unsure (1)..(446): unsure at all n locations
gcaagcttcaagaattatggcctcatccaactacttgtttcccgagggaaattctataaatagacctcccatctttaatggagtgggttaccactattggaaaacccgcatgcaaatctttatagaggcaatagatttaaatatttgggaagccagaaaacaaggacctaatgttccctctatagtggccggaagtgcaacaatagaaaaacctanagcagattggattgaggaagaaagaagattagtacaatataatttaaaggccaaaaatattattacatctgccctaggaataaatgaatactttagggtttcaaattgtaaaaatgctaaggatatgtgggataccctacaagtaacacatgaaggcacaacaaatgttaaaagatctacgataaacacattaactcgtgaatatgaactggttaggatgaatgtaaatg

SEQ ID NO: 260125 - DNA, 409 bp, Glycine max
ggtccgcatcagtccatattagagcaattgtcaattgtcttgagattcactatttggtgatacattcatgtcacataataaggcagatgataaatgctgatttgctttgtgtgtgattattttgcttaactaggagtgaaatagaataacataaagctgattgcaaagataaattgcatcaatttggagactactgtgataacattgtagcaggtaaaactggttgaaacaaattctaagttttgtgacactatggaaccaaaaagtatggctaaagcttatttcatttacataggtaattggttccccatcagtccataagagagcaattggcaattgtcttgagattcaatatttggtgatacattcatgtcacattataaggcagatgattaatgctgatttgctt

SEQ ID NO: 260126 - DNA, 435 bp, Glycine max
  unsure (1)..(435): unsure at all n locations
gcagcttcanaccacagcaacacataatctaggtatttcataccctcaattaatggattntcaagggttgagaagtgaaattgagaatagggtaaattttgaacaaactctcacctcacacaagtctataacatcaatttaaacttgttcaaactggatttacacctaacattcccccgaataaaatttgactctcacaccaaattaccctagaaatggctctttgtcactttggtcatttcgttttctctctagcacagcccaaactttcttataagtcctaaatggcatttcaagctagaaataactcactctaacctccaaataccactaaatccagaattggccttccaactctcaaagtctcactcttttttcactccaacaccatactctcacctctaaccctagttaactctacccttcatctctaac

SEQ ID NO: 260127 - DNA, 405 bp, Glycine max
  unsure (1)..(405): unsure at all n locations
aagaaagagagaatggtggagcacgaaattgaatgaataaaagagggagagaagtnggaatttgaagtgtgtctcataagactttcattcatcaaagttataacaagtggtacacatgcttctatttatagactaagtagcttccttgagaaactttcttgagaaaacttccttgagaagcttctttgagaaaatttccttgggaagctagagcttatctacacacacgcctctcataactaagctcacctccttgagaagcttccttgagaagattcctaaagaagctagagcttagctacacacacctttctaatagctaagctcacactcttgagatgagaagctagagcttagctacacaccccctatgatagcttagctcaccccatgacataatacatg

SEQ ID NO: 260128 - DNA, 349 bp, Glycine max
agatgaacgactaaggattcgttgtatgtggttaagctaagtgatataagtaataatacttgctgagatttattcacctatgtcgtatatcgcaccatgagaacttaaatattcttgtatctaaatttatttcttataactcatgcttaaacagtaggatcacaatctctaaattttgtattatcaagaaatggtaaagacttggtgatttaactcattgtttatactcagatttttctttctttgttcaaactaccgtgatctcatgaggtacaattgatcacacacatattgggtaaaaatcacttctgtaccttctaacactttattaatactattatctctaaac

SEQ ID NO: 260129 - DNA, 294 bp, Glycine max
tacgtcatcttccgtactcacatgatctgtcatactcacatttgagtcacgctgaccggcggaaatacccgagtggttagccgtataaacattcttcttgctatctgtaagacaaaaagcctgatagcatgcgaagactgacatcgttttctgcgcccttcgtcaatcgcggccgacaagcccattgacacgcggagatatacgtcatcttctgcgctcacaaaatctgtcatactgacatttgagtcacgctgacgggcggatatacccgagtggttatccgtataaacattc

SEQ ID NO: 260130 - DNA, 246 bp, Glycine max
tgggacggtggcgaggtgtcacggtgacaagctgtcatggtggctgcagagggagagagtgttctctctttgacaaatgcaaaatctatcagcaagtgtattgagacacaagtaatataaatactgtagaaccgagtatcgaatcacaaggagttcgtctcattcaaataaatgttcattcaataagtatacatctgtataaaatcatgatatggaaatcaacatatgatatagttgcaattctaa

SEQ ID NO: 260131 - DNA, 468 bp, Glycine max
  unsure (1)..(468): unsure at all n locations
aagtcacctgaggcatgcaagctngaccaatcccgacccaacccgggcttattcagtttgtgagaacctgtgatgtacctaagcaggcgagctcctggcagtcaacatataaaaggaacaaagaccacaaagcaaggaggcttatgtggtggctggccagctgtgaactttgattgatatatgggatatggcctctagtaatcgattaccaagaggtgtaatcgattacaaggcttaaaaatgaagacaggagactaagatggtctctggtaatcgattaccaaggggtgtaatcgattaccaggcttgaaaacgagatcatgaagctaggagggcttctggtaaccgattaccaaggggtgtaattgattaccacgcttaaaaatgggactggaatgttgaacgggcctctggtaatcgattaccaggatgtgtaatctgataccagtcactgtgtaatcgatacac

SEQ ID NO: 260132 - DNA, 477 bp, Glycine max
tccacaacatccaagtaactcaacattcaaacaacacaatccatcacagccaagataaacatggcataggcagaaaactctgcccaaaacaccaaccaaaaatcacagcttttctcacttaaagaccccagtaacaattccttcgttccagttcgctaaccgttggattgactcgaaaattttactggaagtctctagtacatatgcctacattttgaccgttgggatctactagaaaacacccagaactcattcagcactgctctttccacaaccagcaaatgcatagcatttttctgcacttgtgcaaaattctgctgcacaatttcacagcataaatctgcacaaagtgcagatttcgaaaaccacactttcactcatccaatctttgccaaatcaaatcctacaagtcccaaatcatgtatcgatcatgtctaaaccaaagtcatgcttcataccacagcaacacataatcta

SEQ ID NO: 260133 - DNA, 415 bp, Glycine max
tctggctcataagaagcactttccttctgttaactggcttattttttattcaaaatactcaacggtatgttccataattggttactatgtaactcatcctccagctttctacttttgtatgcatatagtgttggttccatgactttccacgaatttttaatattgtctttttggtatctttaggcacttgaaacctttatgagcaatttgatccagatttatcaacattaagacaaaggctcgtgatattctgcatagggaagatgacctgaatgaaattgtacatgtgtgcgttcttttattggcaatgattgtctgctaatgaaatgtccccatgctctctccttatacgggattaagatttgttcaaattcattctgcaaatataggtgtggtcaataaataaccagtggac

SEQ ID NO: 260134 - DNA, 320 bp, Glycine max
gtggtattttgaagtatgtctcacaagactctcattcatcaaagttacaacaagtgttacacatgcttctatttatagactacgtagcttccttgagaagctttcttgagaaaacgttcttgagaagcttctttgagaatacttccttgagaagctagagcttagctacacacacccctctcataactaagctcacctccttgagaagcttccttaagaagattcctaaagaggctagagcttagctacacatacctctctaatagctaaggctcacctcttgagatgagaagctagaacttagctacacacccctaata

SEQ ID NO: 260135 - DNA, 350 bp, Glycine max
gaataactcaagagcttccattgttcaattttgagcgtctcgatatattatgcgcctgaatcggacctccgagtgaaaagttatgaccatgtgaataactcaagagcttccattgttcaatttcgagcgtctcgatatcttatgtgcctgaatctgacctccgtgtgaaaagttatgaccatgtgaatttctcgagagcttccgttgttcaatttcgagcgtctcgatatcttatgcgcctgaatcggacctcggagtgaaaagttatgaccatttgaataactcaagagcttccattgttcaatttcgagcgtctcgatatattatgtgcctgaatcggacctccgagt

SEQ ID NO: 260136 - DNA, 370 bp, Glycine max
  unsure (1)..(370): unsure at all n locations
accttaagtcacctgcggcatgcaagctttntccttaacatatatctaagattaattattctgtgtgtccgncaattaaagacgatcgagtttgatagtaaaaagttcacttaccgcagtagggtctccaattcgaactccaaagaagatagctcgaatcgggtgttactttagcaaagcctccaaaccagacttgaaatctaagctaatggtgtcaaatttgcaacccattgctgctcaagataaaaaatcattagctgctctacctttaaaggaggacaagcctccaaagctaaaaattacaaacagtggtagatattaagggaggaatatatcacctctcaatattatctaaacttccatgaccaat

SEQ ID NO: 260137 - DNA, 435 bp, Glycine max
aatggcttagtaattcacttttgttatgaagacgtattcttgccgaccacagtactataaaattaaatgcgaggaagaatgaatgtagaacgttgatagagaatgaactaaacaagattgaagcatatctaatagctatgcacctctcattggttgtatttctttgctaattaaattacatacaagtgaacaagtgtgtgagagtaactagtatgtgtccaagttcgggaatgcatcctttagaggtttcaatacgaattcttatttgaagatatttgatttatgttatgcagacaatgaatatataatataacattattaagaattggataaaccgcaagaatttgatatcattataagatgtgaaaactgtacgaacaattggcaatatgataatcatatagattcaaattaactctactgtttatttacact

SEQ ID NO: 260138 - DNA, 443 bp, Glycine max
  unsure (1)..(443): unsure at all n locations
agcttgttaatatatagaaacacattgcagtttattctgatgttttaactcagttaatataaagcgcttattccaatcaggtcccaagtccgcataaatctggtatatatggagtgttcagatgattggttgtagctagacatcgtgcttcctcggaagattaatcagctttatgttcattttgactttcttatcagaggaagaaaattcanaagatggaagcatcttatatggcatgtcacctgctggtgcctatggaacatttggaatgccatagttttttgagaacaacattctgatgggctcaagctattggaagatatcaagatcatctcttggcagtgattcttatataagggaagaactaaatccgngatctctttctcttcttggtgactaaccccttatcttgctntaattcagaaaagtaaaatctgatagga

SEQ ID NO: 260139 - DNA, 426 bp, Glycine max
  unsure (1)..(426): unsure at all n locations
tactgcctgaaactatattgtggaccgagaaaggaacaatttgattaaccttgacggagttacgagtggtggcttgggaatatcagttgagattcttaatcatcaagaacaagttgatttcacggataacgtcattgtacctttctgccccaaatctaggaatggtgtcgctcaatatctaggaattgtgtcatcatcttgcaaatntaacagtttttcattatcttgagtntgtttatgacattatcatcacccttataggagtaaactttcggtattggtgaattgccttacattagttgagaataataaatttttacctaggaagctcattgtggataccgatgattgtatgttttacaattgtaatatattcttattcttactcgcttgtgtagcatcctcatatcctcaacataaagaacg

SEQ ID NO: 260140 - DNA, 288 bp, Glycine max
atgtgcgtatcttgatgtgcctacctcttttatctctatataccacccatctactataattaatcatatataacaattgagtgatcatctttatatagtaattgttttcgaagatcatcaattggttctttattggccattcaattagacataaggggtcacttgatgcatgcttgatggatcaatctgcgcccttcaatgttcattaatcagcaacatcgaccagattataaaactaaactaaatttagagatagagttgagccatactagctgggtaattatcaaa

SEQ ID NO: 260141 - DNA, 404 bp, Glycine max
  unsure (1)..(404): unsure at all n locations
ctctctntagttacattccagacatggttcaagaaggtgctaatgctacctcctcacatcaaggcaactcaattgcttgcaaaacatctctcaaagccaacccatacttaaagctttaaagccacttaatgttaagaatgaggtggtagggtttagtaatagagtctatgtgccactagatacaactaatcaacttggtggtatgtaaagtttagtcaagaattatttctgtcaagaatcgaacttgggaactactcaaaccatttaatcttaactttaacacattaatcacttgtactcaatcacttggttattagaaacttaagatacgaatcatagaagtggtctcaagaaccaagagaggttctctcacacaaaagttataattcttctcataaaatgag

SEQ ID NO: 260142 - DNA, 410 bp, Glycine max
tgggactctgttgattcaatttgggcgaaattggatgatggaaagagcggttttcgaaatctgcactttatgcagaatattgctgttgaaatgtgtagcaaaattttgtacaaatgcagaaaaatgcttgtgtatggctggttgtgaaaagggtagtacatatggtgttctggaaatttactagcagatcccaacggtcaaactgtagacttatgtactagagacttccagtaaaatttttgagtcgatccaacggttaacgaattggaccgaatgaaatgttactggggtatttgtatgtgaaaagctgtgattttgaattgtgttttgggcaaaagtttctgcctttgccctgatttgcttggttttgtagtccatgatgaatggatgtggattacctggatgttgtg

SEQ ID NO: 260143 - DNA, 263 bp, Glycine max
taaaggtgccttactcttattcattaccttgtcctcatcaacatggcaacatagatatgaccctttgcatcactagactgaatgatatctcgtctagctgggccaacatctctagctggcatagtgagccatacaaaatcaattataggccaccaataccaaaatggaaattgtacaaatttttttaaagggtacatttgatcttggatcatttcaatcaactattcgacaaattctaccatgtaaagctgaacatctttcac

SEQ ID NO: 260144 - DNA, 287 bp, Glycine max
tcatgtttatttgtggaagcggtagagttgatttgcgccatctgccgatcgccaccttgtaccacatatgatggataccccataatccaacaagcttgatgtgagaaagtatggaagagtcattcttcctatttttgtttgctgaccacagagtggtacctggagatatgtcgcgtgggtcatgagaccttgtggacgtaatgtggggtgctattgctcaaaaccaatcttgaccaatcccgacccaacccccgcatagtcatgtattgagaacctctgatgtacct

SEQ ID NO: 260145 - DNA, 369 bp, Glycine max
  unsure (1)..(369): unsure at all n locations
gccccgcaagncacacagatctatataaactacagcgtaacgtgaaacagttgggaaaataatatccttctcacaaattctctctctctatctcttttccactatccttctctaatctggtatccaaagccaaaaagatccctcaatggcataatctcctccttttgcactccttgaaaaccccacttcttatgactttgccctttatggctgcctcggagactctgctacccgaaccaattctaggtctcaaagtcctactatgacacgcattctgtcttacggttccaccaaaatatagacctaacttggctcagaagggaactatgccttgcctccagcagggtggacatctaagaaattcactca

SEQ ID NO: 260146 - DNA, 302 bp, Glycine max
cttgatggttcctatgcaaattgaatttttggagaacaagtatgcctatgttgttgtggatgatttctccagattaacctgtgtcaccttatccagagaatcacacacctttgaagcattcaaagagttgatttccatacctcaaaagagaaaataaatgtgccatcaaaatatataggagtgaccatggctgagagtttgaatacagctagtatactgaatctctgccatttgaaggcatcactcatgagttctttgcagccatctcaccactacaaaatggcattttttgaaggaataac

SEQ ID NO: 260147 - DNA, 432 bp, Glycine max
  unsure (1)..(432): unsure at all n locations
actctcttatacctagaaantgtttttattccttgattttcttacggaatgatgcttctgattggtaaggaaactgtgagagaaattcatcaacaccaatatacggaggcaaatgtcgcttctctgctgcttggaattcacggcacatgtgtaccaatagcctgttcatcatgtaagtctgaagaattttacttccaggtgataatacctccatgagaggctcctgcaaagcatagtataaaaattattatcacacatcacaattataagatgcactttttttcatgccactgtcaaattttcagagacataacttgggactttggtaggcaaatcgcatatgacacaaagaanagttagtcaagatataaataccacataattatgagtatgactactcaacctatcacatccattaagattttaccaaac

SEQ ID NO: 260148 - DNA, 348 bp, Glycine max
ccgtaacattaaattcaatgttgattataaccctatcaaccattttaaagctagtatatcttatcatcatgaatatctggggttacgaatttcctgcgatctttacctatttcttcataatttaagggtgatttcacaccttctggcactggcatgataggaataatgctatctctatcaattacaccttcaataattccgttttccactgctttaattggaacatattttatccctatcaatatcttttgaactgtcaaatgaacgtccagggaacttgattaatcttgtgaatattcttgtgacatacattttaccctaattttaattattcttgtcacttccctc

SEQ ID NO: 260149 - DNA, 332 bp, Glycine max
  unsure (1)..(332): unsure at all n locations
ttttgaataaataaaattattatgtctatattgaaaaatcgtcannatgggctaatagaattaatgattgtctatatgtataaaaatctcaatacgaaagattctcaagtaatggtgactattactatnttcatcaaagaggttttataatttacgtttcacaatttggcttatatcattcaagcattttttatgatctaagccatcaacccgtttcctatatgttaataatgaagacctttaatatctatacacattattgctatttgatgagatctgtacagatgcacaacaatctccaattcttctataaatcaatctagtatagtgta

SEQ ID NO: 260150 - DNA, 312 bp, Glycine max
  unsure (1)..(312): unsure at all n locations
cccaaatgcctttcatattcttgaaccataattttgtatcatgttgtngcatcttacattagtgattttttttatcggcaaatgctagttgtaatttgttaatttttgttagcggngggattcgaacctgcgacctatccctcccttcctttataattatttcattatatttttagcaccatttatgtttacataatatacatgatgagttgcacttgggaagaaataatataaatatgatttcttttttgtctactatgaactttaaaatttcccttattttttttggggagggaagtatantatctattt

SEQ ID NO: 260151 - DNA, 456 bp, Glycine max
agcttataataagacataccagcattttattgttccagtccaaggaccacaatattgggcccagacacagtatacacaccctgttccaccacataaaagggtccaaagaggaaggccaaagaaaaatagaaggagatctgtagatgaggacaatgtcacaggacataagctaaagaggaaattggctgagtttacatgtggaaggtgtggccaaaccaatcataacattagaagctgtaaaaatattggagttcctgttaggccaaataaatatgttgcaccatcaacttcaaatgaggatgaccacctattatctcaagatgaacaagctttgaatgaggctgaagaagctgctgctcatgttcaacaagatcaggtggagattaatttatctcagcctcatttgtcacaagatagtgacatggagttgatggtaaatatttgtcacaacaaagt

SEQ ID NO: 260152 - DNA, 443 bp, Glycine max
ggaatatgtgagaaatagaaactgttcactcactcacttgctttattacattcaaataatacatatatatatacatcaaaaagggatagagacagcttgacaagacatgccatactgctgtcttctaccacaagctaagtatgagactagggaagctaaaaacaaaatctatcaaaagatacacataattataacactccccctcaagctggagcatataaatcatatgcaccaagcttggaacatataaactgaatcttaggcccccttaaagacttagtcaaaatatcagctggctgatcattagaattaatgaactcagtggcaatctcattggacagtagcttctctcgaataaagtgacagtcaatctctatgcgcttggtcctctcatggaagactgggtttgaaacaatgtgaagaacaaccttgttatcacaatt

SEQ ID NO: 260153 - DNA, 442 bp, Glycine max
  unsure (1)..(442): unsure at all n locations
agcttgtgcagcgttataaaatgtttccttattccaaacatgtcacaccttcatctcatctcttcatccttcgtgttgngcctgtgttgttggttgtggttgttattgttctccatcttccattctttcattgtgtcaaactaggtaagttaattaatattttttacgtttatttatttagtaattatcttagatattaatattatttatgttacgtattataagtttgtatgataaattaattctactttttatgttaatattatttgttagttttagttggaggttagctctagttataattctttatggtacttagttttagtttggggtatcctaattttttagtcttgtatgttagttttaatacgttacgcttacaaatgatagttctatattaggttcagtttagtcttaggtagtctaagttgttagttttact

SEQ ID NO: 260154 - DNA, 396 bp, Glycine max
ctcgccatgcaataccctaatagatccttcctgcatgtgtaactacacattgaaatataaaaatcagaaaatgtaaaagggaccaaaacatacaaatttccaaatgatttatttaaataacttgtaaaaaaaattcaatagaattgtaacttaaaatagatatatgtttgttttaaatgatatttcattgaacttcaaaagaataaacatattaattctagggttagtttggataaacttcatgataagcaattgtagaaaataattgaaaaataaagtatactaaggaaacaaattccatcaaacttcttgcaaaagttaaaatcgaccgacctttgcacgtcaacttttttaaaactaacttcatctaacttgttgtcttcaatcataaaccac

SEQ ID NO: 260155 - DNA, 366 bp, Glycine max
  unsure (1)..(366): unsure at all n locations
aatgataggaccatntcatcatttgtgatttatactacgctctntgtattatataaagctatcgaatattatgatacacttctaaaatgaaatggcaataacgtcatgcatacttataatataactataaccacatggatttagacacaacaatgaaatcagatgaagaacagatgtatcatagagaaggtttctattctgcatgctcccttcacttcttcgtaacaaattccttatatagcacattctgcctcttaatttgcgtgctttgcctgcctcctgcatcaactgacacgtgtacattctccctaaccaacattggcgacaatctctctctctctcttcctcgcatgttacaatacccca

SEQ ID NO: 260156 - DNA, 460 bp, Glycine max
  unsure (1)..(460): unsure at all n locations
caagctntaaaattgaattaaaacgttcagatattgctggttatcgattaccatgtatgtgtaatcgattacacagtgcaaattttaatagcttttttaaatcagttttggccactggtaatcgattacatcctctggtaatctattaccagaaagttaatttcttgtaaaagactttgtaacttaaatttactggccaaacctgttgctacttcaattggaattgccttcctatataatataccttttctaagattctagagactgtcttgatcatccatcttgaatatctgcgatttctttgtcttgaataaagctttgtgaaacatgtgagcctttggcatcatcaaaacatcagcttgatcctttgtctacaatctcccttctttttatgatgacaatctctaaatcaagacacaccatatacaagatgatagcacattcacacagcccttactcc

SEQ ID NO: 260157 - DNA, 427 bp, Glycine max
  unsure (1)..(427): unsure at all n locations
agctnctaatcagtattgagttgtggtatatttctttttcaccttcatgtaccgctcaactggatacatccactgtaaaataactggaccacatatatgaatctccctgacaagatgaacaattaagtgaaccatgaggtctaaaaatgatggaggaaaatacatctncgactgacaaagaacaatggcgacctcattctccaaatcatctaattgttgagggtcaatgactttgctatagataacattaaaaagaaaacataaacgggttatggcaaccctaactctgttaagaaagatcccgcgaattgcaacccgcaatatttgttgtgttaaaacgtggctatcatgaaacttcaaaccaaccaacttgagattattggggctacaaggctatatatattgatagtatcttgtggactttaca

SEQ ID NO: 260158 - DNA, 58 bp, Glycine max
gaaaacgacaagataacacccaaaggccctaaggagaagaatctactgtgactacgaa

SEQ ID NO: 260159 - DNA, 447 bp, Glycine max
cacttttctagatattgaacatatttgcttgccacataacttgtttcaagcttgctgatgacaaatcttcggtgaaatccctccatgtgcatatgctgctcatattatttacatgaataatgtaattgattatcatcaatagcattttgtatctccaaactaactttggctgggtcttgagcctgtaccaagattctttcatccacactagagaaatatagtccatgaagaagaaatgtattctatgatccaagtggaaatgcttgagaacttgagttggctgattaagagccaacacacttaacaataaactggacacttttgttactataatactcggctgtgccataattgcaattatcaaccatgacatattaaacaaaatggatatcatgtcctgtttagagcattcttatagcaagcatcttcaactatcagcaactttgc

SEQ ID NO: 260160 - DNA, 338 bp, Glycine max
cacatcaagctttcacatacactatgcgcgcattaacccaacattcactgttgcccacctccaattgagctcacgtactcacacgatgcccatatcctcgtttctctcaataccgggtccccatcaatcctcttaagctttcacaacatccatgcataacaacattcaaacagcacaagctattacagccaagcataacagagcaaaggcagaatactctgctcaacacatcaaccaatatcacagtcttttttacttatagaccccatgtacaattgcttcgatccaattcgtaaaccgtggatcgactccaaatattactggaagctatagtgcat

SEQ ID NO: 260161 - DNA, 422 bp, Glycine max
gctccttagactctaattaatttgattcacaccattattatagtctttccttcacaactcaacaagatggttatagtctttccttcttcctcattcttatattagaaatagttcatctgtcatttaattttcctattacattcttttatatctcaaagcaaaggaagtttaagaaactggaccttagtttaatatagcttggcttcagcaacgagctttgctactgcgcgcgccttgtttataacatactataaacagtgaaaaaggctaataggttacttagccagttcttctcctcgttcagcttctggattctctactctttcgtccagtttcattaacttataatatgtgtgtgctgatgaatttgatccccattgtgatgtgtagacccgactctgatgtcatggtttcattaacta

SEQ ID NO: 260162 - DNA, 362 bp, Glycine max
acctacggaattaataaaaacttcatggctgagtgtacctgaaattgtggcaaccaaaagtcacccccaacagccaacaagtcagccaccatttggtctctcaaaaggctgaagcctaagttgccaattgcgcccttattacaacttgaactaaacctaactaaagcccttttagttgattaacccaaaacatatctttggtcagccaactttacaaggattgggccattatttagacagactaaccactttaaaattgaaacaaagtggcgtcatgtagtcctccttcatttgggccatgatacaactcacaaccttggacttttctgcttgaaacttgggcttgattcatatattatgga

SEQ ID NO: 260163 - DNA, 280 bp, Glycine max
atcatcattatggggagaatgttaatgcatgtatacgtgattttgatgatgtcaaagataaatctgacatggctgcttcaaatgattagcatctgcttcaataataatataagattgcttcaacaaaacaagtcttgtttcaagattcaactataaccaagccttgccttaagaaaagtgctctaagactgcaggctctggaatcgatacaagaaggtatcgattaccaaaacggggtgaaaaaactttgaaaatgttgaattgattttcacatgtaatc

SEQ ID NO: 260164 - DNA, 345 bp, Glycine max
  unsure (1)..(345): unsure at all n locations
cacctgcngctgcagctttcttctaatcaacctgctatagcttatcaatttaatngcaactcacattcttgttctttcttcgtctacatacataccttctcaaactcatgaaaagaaacacaaactccatcacaatcatgcattcaatccaaaatcaattcatacaccaatgttcacaanaagataaaagtgtttcactgcaatatcatcaaagtcaagtcaaactgttccatatgcttcataacaagcatactatctaatcacaaacaatatataagtgtatataaacattaaccaaaataattaanaaccaatgtactgaaactataatcattataataataa

SEQ ID NO: 260165 - DNA, 425 bp, Glycine max
aagaggatgagataggtgcacaaaagataaagcttccttttcatgagggagctaacaaaaaattggtgcaggtggaccttcttctagtaattctgacttaagcagcctctatcctcttcattcccacctttagcattccaacaaatagatggaaagaagtggaaaagtgagatacttggagacccttcatgaaagaagaggtgaacatacctctgctagatgccatcaagcatattccaagatatgccaagtttctaaaggagctgtgcacccacaaaaggaagctcataggcaatgaaaggattagcatgggcagaaatggatcatcattgataggtaaatctggtctcacattcctgtaaaatgtaagacccaagtactttctcatatcttacttattgggaaagatatttgaaatgcctgct

SEQ ID NO: 260166 - DNA, 438 bp, Glycine max
  unsure (1)..(438): unsure at all n locations
agctggttaggcagcatcgtccaagagaaatgtttcttaggcaacaaanaaatgtctttattgtttatatcttggttctctcttttttaataaccacaattagggtatttagtttttcggtgagatcctaagtattctcgcaagttttgatccaaaatgagactaatatttagttcgagacttaatgacacttaaaactcctcatcatccctaaagatgtattttgcaggaatcaaattcaaactctctatgtatattcatgcctgtataaaatactttatggtttattttaagaatttaattataatgtactaatagtctaaaagctttttatgctaccaatccattatagattactatgtatgactatatcggttatttttgtgctatcactttaaaagttaatatattaatgaattacttcaggacaggacatat

SEQ ID NO: 260167 - DNA, 287 bp, Glycine max
catcttaagcaaaattaggaaaggaaacagaatcttcaaaccccactaggtcagtcccactcgagctcaatcaaggatgataattctacccaaatcttatgggcaccacaaataacatacacaatggtgtaggttaatactaacttatcgacatgggtataacttaagaatttacccacacaatttaacatgagttattgatgcggtcaagtttgtgtatacctatatataagatgattaattaatctctttatccttaaactttgtttaaatgtaaatttcaatcc

SEQ ID NO: 260168 - DNA, 422 bp, Glycine max
  unsure (1)..(422): unsure at all n locations
agcttcttatccaagacactctcttggtggttatttctttccttccatgactcattctctagtagataacacatcctctcacctcttattctttatcttccactgcaattccatggctgaaaatcaccattgaacgacctgattgaagctcagagatccagcctccatagaagcttctcaagcaagcttacatcactatgggtttagctaacactactaaaaatagtgtattccacgacgcgcatttaaagtcgatcgtcacaaaaccgtctttgtttgggggcggtgacatttttgtaaatactggcaacattctaaagacgactttcttgaaaccatctttaaatagtataaaacacagaccggttttgcanaactgccttatttacactatttaaaatagttccggaaaacccttctta

SEQ ID NO: 260169 - DNA, 307 bp, Glycine max
  unsure (1)..(307): unsure at all n locations
ctcatccccctggctattaatggtagcttgttctgcgcgcaaaatnattgcttccgtgaagaaaatcgaacctgatgtgcttccgtatcgctcttcagacgttttcgtgagcaaagtagtgaatgttttttgtcgttcttcaccgttcttcgttcttctacgagtaaatgttcgaatgcgaggcttgcaattcattgcttgttgtttagctttcatcttcatctcggacatttgcggcttcttttatactggttttatgcgcttgatcgatcgtgtaaccgtttctccctattaatgaataatgaat

SEQ ID NO: 260170 - DNA, 438 bp, Glycine max
  unsure (1)..(438): unsure at all n locations
agcttatgatattnggtaatgtgttcttactatattgcggntatcttattttcggatcaatttcttttataataaaatcatccctcgcaattattgtaccgtgtggttggtacctgtgatgatcacgaatcttgtgttcggggagcagaatgacagccacttagtacgagaagtgagattcttttgtggagccgccgagctgacttgatgacgttgagattatattgggagagtcgtgttatggtaatcaactcctccatagttggttccataactctttttgttgaattgaggatgtaaatcacaaatttaattatatgtatgaacaaatctactttttattatgcgaatgatatgcactgagttactatatatatgtgtgcgtgtgtgtgtgtatgtatgtattcacttaagtaatggcgcgctcgttggtgaatg

SEQ ID NO: 260171 - DNA, 422 bp, Glycine max
accttgaaactcagcttgaatagtgtatgacttggtccatttatctgccatttgactagtgttcattcagacaattcttattataatgctaacgttttgttaaaagtattctctcaatagggttatttgaacattttaagaatgataaacaacacaataaagaacaatcgtcagaataataatatgtaaaatggaatatcaagaatgatcacagtatcttgcgagaattgtaaggttaatttgaacggttacggatggactgggttttctcttctttcaatataatacacacaattaatctaattattcatgcaatttatcctcatgtcacaaatatattctaccataatgtcttatgtggaagagtcatacttattatattaatttctatggtttgggaactaatctaaaatataacatta

SEQ ID NO: 260172 - DNA, 457 bp, Glycine max
  unsure (1)..(457): unsure at all n locations
agcttgtgactctnggcaatttctttaaaactagtcacttaaaaagttgngacttttgaaaaaatcttcagaaacaagtcacttgaagaattgtgacttttggaaatgtatttttcgaaatcagtcattggtaatcgattgccattaaggtgtaatcgattacacatcaacagatgtgactcttcattttgaattttgaaaattaaaacgtttagaagctctggtaatcgattacaagtattgtgtaatcgattacacaagttaaaaatgatttgaaaatgttttatcacaagttgtgactcttgaaatttgaaatctaacgttttaaaacactggtaatcgattactaccttctggtaatcgattaccagagagtaaaactccttggtaatgattttgtgaaaaaaaaaacttcttgtgctactaaatgttttggaaaacctttttagtacttatc

SEQ ID NO: 260173 - DNA, 474 bp, Glycine max
  unsure (1)..(474): unsure at all n locations
tggaccgtgcgcttagcaagactcaaccgctaagcgaggcatcagccgcttatcgagtaagatgaatattgaagagaatctgccatgtcatcatgcgctcagtgcgtcatcagctcgttcaacgagaagattgtctgttctgcgcttaacgcgagaatggcactaagccaaatttcacttactcgtgctaagcgcgaagttggcgcttagtgcaccttcgtggacaaaaagcccttttaaagcctgaattggagagaatgaagagaggaggtctgaatagactatgtgagcttattgctgaacgaataacagatgatatactgagcaaggaagaaaaagaaccctactntntggtagatttcaggtttatgagtgattactaggctcctagatgtggaggagacatccncactactttgtaatctggtattttctcttaaacccttctcctatttgtgaaaggtgctcccttgt

SEQ ID NO: 260174 - DNA, 449 bp, Glycine max
  unsure (1)..(449): unsure at all n locations
atcctctnagtcacctgcgggatgcaagcttcttcttcttagctgaggtgtctcttcttcttctccgnncattaggttgacgcatttctattctctctcgagataagttgctctctttatcatttttgatttgtttgtgcatctgtttgttagaatcattgacgtttggttggttgttgtcgacgatggtagcgtgaaaatgacattttttctgaactggtgggcatacngattgccaatctgtatgaatcatactgaatcgncaattcgtatgttttgaaaaaaaaatatgcacctcttcttctctagcgacgaaaaatcattgaacttcaccgtatatctcgaaacaacatgtgtacatcaccggtgacaacatacactcacaatagaacgctaacagaagtaagttcactaatgactgtagtttacgaaaaatgtctgcgaaataa

SEQ ID NO: 260175 - DNA, 371 bp, Glycine max
  unsure (1)..(371): unsure at all n locations
cccactacaaaggatnngatgaagcnnngnttgnaggaaaacaatattcctggctcccttgatgttctaaagtgtacttgtgtggttcatcaataaattctatctttcatagtaagtattttatcggttataattaatacattgttacacaaacagtgtgatgttgcaaaacataaactactattttccttttcttgaatttttctcctttattacaaattgtttgaataacatggcttgcatatccataattcttgagtcatgtgctctgtgtgctctcaccttatattgcattcctatgatactggagatcatgaaaggtatgcanattttgtgatgaaaccctcctgtgtttgcacctgtttttaaat

SEQ ID NO: 260176 - DNA, 288 bp, Glycine max
tgggaaggaccgcttataataattcagatttattcgaatggtgcgtactgaagtggaagagcttacccctcagtacgtcctttgagtataaatgggtacatatttgaaataatataaaccaacattgctcgaagttaaaataagcatagaataagagaaatactggaaacataataatggcgataacagtaaattgccacaaaagggcatgtgtcaatattacatcaaaaagtagaatcgaaataacagaattcgaaataaagatatcataagttctactaattcatg

SEQ ID NO: 260177 - DNA, 389 bp, Glycine max
aacataaagtttagtttatgtgtttaatattttttttctagtaggttatacgcggaaaactcctcgtaaacaaatatatgaacgttggaagtaaagacttcctgttatattaatatctgaattaaagtaatatgtctattttaaaacttattttaaaaactgttgaatcgagcttctgataacatctgttcacaaacaaatagacactgttgataaattcaaataattaagaaaaattgttctcgatctgctgagcgcttatattacttatctactcctttttatcataccatgattgcttatgaggtgtcattcagtatatcattgattctgcttcattttgaacgtatgctatcatcacagtacacatgttgtaccatgaattttta

SEQ ID NO: 260178 - DNA, 403 bp, Glycine max
  unsure (1)..(403): unsure at all n locations
cctgaaattgagggggcttcacattaaattcattaggaaggcttctaatgagcacatattaaaactaagctagaaatatttacaatcctaccaaaaataaccataaattgggagatctatatacattttggaaaacttttctatacaaaagttagtcataaaagacgactaacacatatcttgagagaattctttgcaaagagaatcattagttgacccaaaaatgatatcatcaacaaagatatgtactaagagtatatcattcaattttattctaataaaaagggtagtatcaaccttacctcttgaaaaacccttttctaaaaggaatttactcaaacgttcataccaagccctangggcttgtttaaaaccatataaagcctttttagtttaaaaacat

SEQ ID NO: 260179 - DNA, 230 bp, Glycine max
cgccgctctactacatatcttctattgtggtgtgaagactcaaaccacaatgatccttgattcctcatcaagatgcactattatgtccaagagtcccgaggaagctattattatcattgtattcatatctgccaatgattatcaaagtcatcatgatataacttccactcaaagaaaaggtctaatggagctggacactaaaagtgcaattctatcctataacaaactct

SEQ ID NO: 260180 - DNA, 272 bp, Glycine max
  unsure (1)..(272): unsure at all n locations
agcatataacacaagagcacgattggatagagaaatatatttctatgcatcagcttgtntgttagaaagacccaacatatctacctactacagtcattttatttaccttgcatttgatagtntttagtatacaagtttagtttaaatcttgttggaatntatcagttatacatgttctctcatcaatgcttcgattctgaacttaattcaggctaacattagttccctgtgttcgatactcggattcatccgttttaactttaaatacctga

SEQ ID NO: 260181 - DNA, 306 bp, Glycine max
atcgattgctcttatactccttaatggtggatctttttggtaatgagtgagcatgccatgcgcgtttcataattgtgtaatgattgaggcggttcatggctaaagtttaaattcgtctataaatatgcagattaatatacaaaatggtggtgtcttgcgacaatttttctacttaccattccactccaataactcatcaattgaaaaaacattggttgcatccataattaataattaaacggtatgagtcatacaatacgtgtgtcaacaaaaaatatatatggttcaataaaaagattcaatcta

SEQ ID NO: 260182 - DNA, 406 bp, Glycine max
  unsure (1)..(406): unsure at all n locations
atgcaagctttgccttcagcatcagcgatgcacgagtatttatttgtttgtgatagcgcaagatatctgntgttcccatacattgggatagtttttaaagagtcatgcctctgtatgctttatagaattgaacatatatgctagtcacatatatggatatgctacttattctattatgtcctattttaatggccaattactgattgaatacatggtacatattgtatcaatgttcatcagccattactgagtttgatccaacactgatgggatccatcacaccgcctaagcacattttgccattatctaatagtcaagtggatgaaataccacttgaagatttatcatccatacaacctatcctcaactactctgggcaaaaatcatatcaagattgaatgatcac

SEQ ID NO: 260183 - DNA, 287 bp, Glycine max
attataaagcttggatgaagccagttttgttcacattgcacatatgttcattcaaaacaatttttaggtgctcgacgttataaaaatatacctataatcatatggatgctcgtttcgctgcatgactcatagcccattacgccacaaagtgacaatacttggtatatgatctggctagggggagaccttgcatgtctaacacaatagacactagtaattaccggtagatcatatcatcttaaataatggttgaatgcatactttactatttgtcattcatacatatc

SEQ ID NO: 260184 - DNA, 428 bp, Glycine max
  unsure (1)..(428): unsure at all n locations
agctntacattcacaccttggtgattctctgtttctctgntcttttaaagggtctatgattgtcaacgagcttctaccttcacgatggcaaaaaaaatcacgcctcctcataattccatttcgtttgatgaatctaccttttcgaacagagaacccatgctgatatgcatacctcttataaaatgcaaatgcttcttcctcgctaagaaaaatttgaccaacaaaaggaacaatatttgtctcattataagtttcatctctatcaacttcttctgcaaattcatttatctcaatattctgactagaagacacaatattttctttctcataagtgtcaattttctcaacttctaatacatcatttgccacaatatcatgatcaacatgttcactaactgttcctgaataaccattctctaaagaaatat

SEQ ID NO: 260185 - DNA, 275 bp, Glycine max
tttcgactatcactacaaaatgtttgcgttgattgtctactcacattaattcagcgtccattattacaagtatcaacatcagtaaagtatgtcgtgaatgcttaaggtcacatcaattcagcgttcgtattacggactaacaacatcgataacgtttgcgtgatagtcaactaacatcattcacgttatttacgactatcactcagaaagttgcgtgattgtaagtacataattgacgtatttcggctataaatcagaagttgtctatgcaacta

SEQ ID NO: 260186 - DNA, 242 bp, Glycine max
  unsure (1)..(242): unsure at all n locations
acatggctcccgatcgggagcggcttcanggtatgactaaacgagagcatgagtccatttaggaatatgcccaaagatggggagatctcgcagcccaagtggttccgcccatgacggagagggagatgatcacgactatgtgagatacgtttcccacgttctactatgaaaagctgataagctacatgccagctaacattgcggatctagtcttcaccggatataagattgaatccggacta

SEQ ID NO: 260187 - DNA, 228 bp, Glycine max
tatgccgctttccttttcacatatagaaattccaaacaaaaagatggactaaggggataacgagatcttggagacctctaggaaagtagaggtgaacatacctctgctagatgccatcaaggaaattccaagatctgaccaatcataggagcttcgccccacaatatttctagatttaaaagatactgttctctgcttaccttttctgcatgccataaataacttatc

SEQ ID NO: 260188 - DNA, 372 bp, Glycine max
cttttatggacctcatcctcctaacagactcctaacagtctatcggccatgcttctgtttactgggttcgaaatacttcgtacctatctagcctaactaactcgatatgaattgcatggcttccttactcacgcacgtagtcctcttagttagatggatgcgctattctccgtttgggccttgctaaatacacccctccattgttgtcttccacttgttctgataatggcaccccttgcgtttgctgctatcactcccctgcccttcaaaccagaccttgtacctgatgtcatgaatcgtttgaaactcagaccagtcttcccatgaagcgtactctggtggtgagcccacccactgtaccaacaccatgcg

SEQ ID NO: 260189 - DNA, 447 bp, Glycine max
  unsure (1)..(447): unsure at all n locations
ctctaagncacctgcggcatgcaagcttccttaagaagagtgctaaagaagctatagtctatcttcacacacctctctaatagctaagctcacctccttgtgatgannnactagagcttagctacacaccccctataatagctaagctcacccccatgacaaaatacatgaaaatacaaaaaagattcctactacaaagactactcagaatgcctcgaaattcagagctaaaaccctatactactagaatggccaatatacaaggccctaacgaaggaaaaacctattctaatatttacaaagataagcgggctcatacttagcccatgggctcgaaatctaccctaaggctaatgagaaccctanggccttcccttggatctctggccaatctactaggagtcttctatccaatgcccttgcggggtaggatatgcatcattcctc

SEQ ID NO: 260190 - DNA, 370 bp, Glycine max
ttgtcatacataccaacattataacttagcgatatatagtggatgaaaactcatcaatgctcaggcatgagcatctatggcacatttctcttcacagatataaaaagatagttaaggaagaaattcttacgaatatcgattgctgattgtagtacttggatagaatgcatatagggattgcatactaataagcctagtaaaggtgccaatataagtaacgagcttcttgaaattatttatatagatatgtgtggaccattttccacaccttgtataaatggtcagaataattgaatcatttattgatgccactatgaatatgtatcttatctttttacacaatctgaacctgatgcttaagcttcaagct

SEQ ID NO: 260191 - DNA, 463 bp, Glycine max
  unsure (1)..(463): unsure at all n locations
agcttgaccatccaaaattatgacaacactgtctacccanacgaccacttggatgtctatatcacatatgttggcagcatggtttgacactgaatttgcaaccagttggtcttaccacctaacctcaacagcgttggtcaatatatgacaagaaaagaaggaatcaatctgaactttcatggaatgttgtagaaagttagctcttaacatttgaaacgtagatcctgtggtagttatgcatcatcttataacaacttctagaccaggaccttttgtcaatagtttgcataagaaacctacattagatttggatgactctctgtgaagggcgacaaaatacatgcagatagaggaattgactaagtacaaaattcaagttagatttgaagtaaacacaacataaaagaacttgggaaaactaaacttcccatagactagggaggagaagcatatggatcaacct

SEQ ID NO: 260192 - DNA, 396 bp, Glycine max
  unsure (1)..(396): unsure at all n locations
atgtgactcttcacattggaatttgaattttaacgttcaaaagcactggttatcgattaccaaaacattgttatcgattacagctttttgaaattaattggaacattgtaaattcaatttgaaaactttttcaaaacaattttgctactggtaatcgattacgacaatctggtaatcgattaccagagagtataaactctttggtataggggtttgtcaaaaactcatgtgctattcaaagttgtgaacaactttgtaatacttatcttgattgagtcttctcttcattcttgaatcttgagtcttgaatcttgatcttgattcttgagatctcgattcttgtctctagactntcttcttgagtcttgaattcttcttgattcttatgttgaactc

SEQ ID NO: 260193 - DNA, 239 bp, Glycine max
  unsure (1)..(239): unsure at all n locations
ctgccagattctccttcgtgctaagcgcgatgtgtagaaacaagcttcatgatgatgaatcatagtgattcaagtagtttttgtgatgacaaagatgatgacaaaaagcccaagagaatgatctcaagattgagtcaacaagttcaagatcaagtntaatttcaagtttcatgagaagaaatcaagaagattcaagaatcaagagaaatttgatttcaagattcaagagaagatgaatt

SEQ ID NO: 260194 - DNA, 434 bp, Glycine max
  unsure (1)..(434): unsure at all n locations
cagaccaaagcaactcanaatctangtatctaaaacccctttttttattggattntcaaggtttgggaagcgaaaatgagaatggggtaaatttggagcaaactctcacctcacacaagtctataacattaatctaaatttgctcaaactggttttacacctaaaattccaccgaatcaaaatttgactcctcaacacccaattttaccctagaaatgggtattgttttcactttggtcactcatattcctcatttgcacagtctaagctttctcttaagtcctaaatgacatttcacactangattaactcactttaacccccaattaccactgaatccagatttatccttccaactctcaaagcctcattcttttccactcataacactacattctcactttctaaccctaggttaactctacccttcatct

SEQ ID NO: 260195 - DNA, 409 bp, Glycine max
  unsure (1)..(409): unsure at all n locations
agctttactactaagctatgattatttatataacagaaaccatgacttagacaaaagtcaagcgtaaattaacagtgcacagtggaaatttaggagcgtacggaagaagaatacaaacacaagtttttatactggtttggtaacaacccgcgcctacatctagtccccaagcaaccacaccgggacttgagatttnctttaacacttgaaaatcctttacaagcacagagccagaaaggatgtaccctcccttgtcctctttgaacaaccaagtggatgtacccttcacttgaactgatccacaagagatagtccctctcttgttctcagtatcacaacccaagtaagattaccctctacttgtaccacaaaggatgtaaccctcaatgtgttaagacaaagaattctc

SEQ ID NO: 260196 - DNA, 302 bp, Glycine max
aaccttgataacttgttctattcatctttttcattctcttctccctttgccaaagagaattcgccaaggactaactatctgaattctttttgtgtctctcttctcccttttccaaaagaacaaaggactaaccgcctgaattcttttgtgtctcccttctcccttgtcaaagaattcaaaacgacacagtctgagaattcttttgattcttctcattcccttatacaaaagtgttcataggacttaccgcctaataatttctttgtatccccattcacaaagtatcaaatgtttaacagtct

SEQ ID NO: 260197 - DNA, 473 bp, Glycine max
  unsure (1)..(473): unsure at all n locations
tctaaggcacctgcagcatgcaacttaagagaactaaaggttttaanaatttctcacccggcaggttcaaaacccacatagggaagcctacgaaaaagtcagggtataattataaggaaaaaaagagaagcatgtttattataggttttatctcacaattcagattataagagtctccgtcaagatacgaaatgacacatagtcatgtttcttcatcccaatcactaatttatgccttgctactcactatgagccaaaagtataattgttatttttaaataataataataataataataataataataataatctaaaataacaaaataacataaaaataatatatataacaaaacaaaaaaccatagtaggaaccaccgcttaactatgaggaagagcaatgcaagcaacctatgtaactctaagttgggcctcaatgatgttcaagaaaagatatactataggcgagtgaa

SEQ ID NO: 260198 - DNA, 197 bp, Glycine max
ttctacacgtttacatttcaagcatattatttattggaacttacatatataaatatatggttaggggtgaaaatcgtgactctctcaagatggaatgacgcctccaatcggtgcacaattgttggtacatctaatattgacgggccgaaaatgagaaatgtttatggtattgagaagtgaacaaacttgtacccatt

SEQ ID NO: 260199 - DNA, 219 bp, Glycine max
ctccgacggatccaagcacgagctgcacttgcgcaaagtttttattttccggccagcctaacatgggactccagtgattccacgcatgggtcgagacaaacccgtttgcacccaaatggaaatgttaagccagtctacggttctcttcaacagaacgtaaggcaccctaacattttctttaaacaaagacgtaagccacgggaaacctgaaaccaatca

SEQ ID NO: 260200 - DNA, 349 bp, Glycine max
cgagaagcgaaatcgataatgtaagtaaattcggagcaaactctcacctcacacaattctataacatctatttaaacgtgcccaaattggatttacaccttaaattccaccgaatcaaatgttgacttctcaacacccaattttaccctcaaaatgggtgtttggtcactttggacatgtgtctttctctctacacagcccatgcttttctataagtcctaatgacatttcagcgatgattaactcacttaacctccaaatacccctaatccagatttggccttccactttaaaactcactcttgttactcaaacaccattcctaacttctaaccttagttactctacc

SEQ ID NO: 260201 - DNA, 388 bp, Glycine max
  unsure (1)..(388): unsure at all n locations
gcttaagtctattggctttccagcccagttctgtacttggatcatggaatgtgtttcttccacttcctttagtgtgtcagtcaatggatccatttatggtcacttcaaagggcagcggggtcttagacaaggggatcctctctctccttatctatntgnngctctgttggagtacttttccagagatatgagcagcctcaaggaagatgccaattttaaatttcatcccaactgtgcaagtattcaactatctcatttggctnttgcagatgatattatgcttctatctagaggagatatcccttctatgtcaactatgtttgccaagcttcagaactttctgtagggttcagggctctccatcagctttgataaatctgccatatac

SEQ ID NO: 260202 - DNA, 392 bp, Glycine max
agcttaggaactcctgtctataatgaagctgtgaacacttgttgtaactttgatgaatgaaagtcttatgagatacacttcaaagttctacttctctccctcttttattccttcaatttcgtgctccccccttctctttttattttcctccattaaagcatcctcttcaagcttcttatccaaggcaattcttggtggtgaagctccttcttccttggcttattccctagtggatggtgtctcccctctcctcttctcttttgccttccgctgcatctccatggtgtaaaatcaccattgaaggacctcattgaagctcaaagatccagcctccatagaagctccacaagcaagcttccatcaagtggtatcagagcacaagagcttcaagt

SEQ ID NO: 260203 - DNA, 148 bp, Glycine max
tgaggtaattacatgcacttaatgcacatgtaccgggtttgaacattgcaaaagcggtacctactcgctggtttttcatgcctatgacaagcgtatctgcagttagagatgaagggtgatttctggcgtggaagatttccctgttttg

SEQ ID NO: 260204 - DNA, 353 bp, Glycine max
  unsure (1)..(353): unsure at all n locations
gcttagcttctctngaatcttctcacgaagtttctcaacgtagcttcttaacgaggtgagcttagttattacgtgtgtgtagctaaatctagcttctcaggaagcttctcaaagaagcttctcaaggaagtttcttaatgaagcttctcaaggaagtttctcatggaagcttctcaagaatatttctcatagatgctacctacgctattaataatagcatgtgtnacactcgttgcaactttgatgaatgagagtcttgtgagacacacttcaaagttcaacttctctccctcttttacaccttcaatgtcatgctcccccctctctctttttcttctctttcttttctcctt

SEQ ID NO: 260205 - DNA, 409 bp, Glycine max
  unsure (1)..(409): unsure at all n locations
agctggcaaggaagctacctagtctataaattgtagcatgtgtaacacttgttgtaactttgatgaatgagagtcttgtgagacccaactcaaagttcaacttctctccctttctcttccttcaatttcgtgcttccccctatctctttctctccctctttcttttcctccattgaagcatcctctccaagcttcttatccaaggctcatcttgggggtgaagctccttcttccatgacttattccctagtggatggcgcctcctctcacctcttctcctttntcttccgctgcatctccatgatggaaaatcaccattaaaggacctcattgaagctcaaagatccagcctccatagaagccccacaagcaagcttctatcataatgacacatcaatgcgcgtatcac

SEQ ID NO: 260206 - DNA, 231 bp, Glycine max
ttctatggttttagaatccagctttactattcttgcccctgttcacgtgaaataaaattccttttctgctatttcgcttctgcttcaatctacaatttcattttctactgattaaatggaggcttagtctccagtgttggtttctcttgaagatcaagcacaactccttttgatgtttgttattactattgaattctgatcaattttcctcttcatcaatactctgattta

SEQ ID NO: 260207 - DNA, 416 bp, Glycine max
  unsure (1)..(416): unsure at all n locations
agcttcctcggagccattcctgcgaaggcatttcttnggaaagttagttnttaccaagaaatgctacccttaaaacaaaaatggcatacaactccctccaataaatacaaacatcaatgtaaatttagagcaagcttatgcgcatactccttcacgaacgttcacttgcacaagacattcttataactaagaaaaatgcacccatatacaatcaaggcaccttcgttacctagattatttacatgtacttccaaggtgtatttgttacctatatcacacacatttcctttgctaaattcacatacatgcatactctaagcactttggctatcaaaaattgcatacgtgcacatcctggtatttctaatacctatacatacacaaacttcatgatgaatcttgactatctacacaat

SEQ ID NO: 260208 - DNA, 276 bp, Glycine max
cataaacctctctctctctcttatctacctatcttttgtactctatatatatgtactatctctaattcaataaagtaaggaaaatagctcccttctggtctccttcaactttaccataacaagctgctgtatggccataatggtctctttggccaatgttcaatttcaggacggtctctgaaaatttatcctatactcaatccttattttttatctctctgggtttagcgcaggtctataacgtttttgttaaaatattaccggtttggttcccat

SEQ ID NO: 260209 - DNA, 457 bp, Glycine max
  unsure (1)..(457): unsure at all n locations
agcttagcaagacaacaactnttgcaccttttttattttctcctttttacctgaaattgaggtgaaatttacattaaattcattaggaaggcttctaatgagcacatatgaaaactaagctagaaatatttacaatcctaccaaaaataaccataaattgggagatctatatacattttggaaaacttttctatacaaaagttagtcataaaagacgactaacacatatcttgagagaattctttgcaaagagaatcattagttgacccaaaaatgatatcatcaacaaagatatgtactaagagtatatcattcaattttattttaataaaaagggtagtatcaaccttacctcttgaaaaacccttttctaaaaggaatttactcaaacgttcataccaagccctaggggcttgttttaaaccatataaagccttttttagtttaaaaacatgat

SEQ ID NO: 260210 - DNA, 233 bp, Glycine max
  unsure (1)..(233): unsure at all n locations
gttgtgtcttctctgtggctgtcttaccggtttagccccatattctaaatttattcgatgcatacatgcggatgggcctataacagaaatgtctgtcatggtctatcctatatcccttttatgcttcttgagaaactgataacacttctcctcttgctcattaacnaggtaggcagatataattattggaaaacctgtgctatctccaagtagcatattttaaattgatggaa

SEQ ID NO: 260211 - DNA, 336 bp, Glycine max
tgcaagctaggcatgctacaagaacttgctattttactctacttcaatatctgctgttgagccaaagctctactcgaagaggtttcatgattttgttgcgagaatattcattgaagagaggtagcatatgggtcaacaatgaggctgaaatatttctcttcctgaaagtgaagatgcctgattgttcaaaacattcaggataaaatgctttaaatttgaaaccctaggcaaaggtcttggagataaaatgccactccacggtcaagtggctgacagaagctctctggatttccggttggttatggcttaattttataaacacagccattgagaatg

SEQ ID NO: 260212 - DNA, 361 bp, Glycine max
tgcttctacactgtctacttggatctcgactccactgatttctgtcatattcttgccacactgattacggtggcattaaaccataggagctctcttacacttgcaatattgtcctactacaaaatctacaattaacatcgtgaagttaacatcgggttttgctataatcgatgtctcaaaaatgtgatggcaatatgtgtaataatgagactttagtaacaacggttctgaataataccgatgttaagataaatgtcatggcataatttatgaatattgcgtatacgtctacatcgtgattgataaatactgatgttaacgaagtgacttttacatcggctcttgtaaaatcgatgttaac

SEQ ID NO: 260213 - DNA, 478 bp, Glycine max
ggatccttaagcacctgggctgcagcttttatgcagagcgcgattacaattcttactgctgcaaatggacgggactccacattacatgacaaagcagatgtatagtattcaacagcttctgcatgccttccagcctgaaatgctgcattccctgcagtctacatatgaatagatttacacaatcctaatcaaaagcaattttcatgttacacaagatggacagaatgaattaaactaacagaaacttcttataatacaacaatgtggcacttaaattgctttctccagtctttgatgatggaagagttgtattagagaagagtatagaactaaaacaaaggaagaggatatagtatcaagatcaatgaaattacagcagtatcagtgtgtgtgatggatattcagatggacttgcacaatgtgtatgtgtactatagttgtgcaatccacatccagagtatataacttaatacccaca

SEQ ID NO: 260214 - DNA, 391 bp, Glycine max
  unsure (1)..(391): unsure at all n locations
tatcgatcatatgagtaatataaccaattttattgcaatctattcgctcacaacatcattagggacacctgcttactactgcgctctgcacgggtaatatttcctctttcaaaagagacaatgtcgtgtttgtactgatcactttgatcacctttgctgaaccatgaaacgttaaatgaagcctatctccagaataaagaaattaattaaattcaattcttttaagtaggagtaaatcagagtatatacattgcaantttagcaatagacaagatgaatatgtctttaaagtaaaaatggtagaagatgtcttaccacatgtttctaagttcaataaatggaatcaaaatacaagatgatggaattataatgaggtgtaatgcacagattc

SEQ ID NO: 260215 - DNA, 441 bp, Glycine max
  unsure (1)..(441): unsure at all n locations
agctntagttgggtgagtgttttggnagtcntatcatgatggacttctatggttttgtaactagtggtaggtgatcatttgtaaatattttacgcttaagtaagatataactaaatttacactggtgtatgtggttcaattagtaaaattatgctttctagcgtgtgtgagtgcatcatatcccgcaccgtgcgtaaggaatnttttcaccatcaacgttatgttagcacaccagattataggaccgtaactccttgggtcgtgtaatcctttgaggccgtgaagccaagcgcatgtaacatactctcaatctcaaataaaacataatttcgtcccttgacactgttgagaggatcatgtacgaccccaatgatcggtttcttggtttgggtactacagatcttcgtggtagtggaagggccttattcttatgtctccatc

SEQ ID NO: 260216 - DNA, 286 bp, Glycine max
tgcttctcgtgcatcatacatcttcaatcttcataacttatgatttatatagggcctcatctccaaggatatgttctcttacaacggtagatatcttcacttgatctttgtttgatgaaaaaggttgcttggagaattttatgctatcattatatacacgttattttcttctggcgaaagtcctcagacctctctccatgcttgcatgtttatgaattgcagatggtttaactccttttgatgtcgattgagggattcaaatctttgacttattattcttcttgga

SEQ ID NO: 260217 - DNA, 243 bp, Glycine max
  unsure (1)..(243): unsure at all n locations
tctctattcaaaaagggcagcttcacatccacctgatgtagctccaagtcataatgggctactaatgccatgataatcctaanagaatcctttcgtgagactggagacaacgtctctttataatcaatgtcatctntttgagtaaatcccttagcaacaagtctagccttgtaacgttcaagggtgccatgagagtcacatttagtcttgaagacccacttacaaccaactcttttacaaccc

SEQ ID NO: 260218 - DNA, 404 bp, Glycine max
actcaagcttctgatctgcagagaatggaatatccaatataagattcatgatcgccacattgccactctcatctgccaaaaacagtggtgaacacctatacttgttcaattcatggaccatatccttatctctatgtaaaatgacttgtagcacacttatatctccattattgacagcctcatgcaaaggagtatccccaagttcatctttctctcttgttatctctttgtctttcatcacatcatgtgttgacttcatcgatgcatattgggagagaatgagggtgaccattatagagttcttggacctcacagcaacatgaagtggagtgccacctcttacatttctcctattaagaagctcaggacagtgacaccaaataaactctacaatctgttctttt

SEQ ID NO: 260219 - DNA, 276 bp, Glycine max
atcaacgcccatggctggacaacgcgcaccatagatcgagactgggaagaccttcattattttcttactctaacacgatcatgaaccatagcattttattagagtctccttttccaaggattaaaagacttcccgggatagaggctcaacatagatcttctaacatgcgcaaggatgttgttatcttataccagaacatgggatggaattcactgatatccattgcaaatctgcgtgatgtactagggatctaatctacatcatagacatgtttgg

SEQ ID NO: 260220 - DNA, 199 bp, Glycine max
ttggcggtttgtttttaaaatgtatttaaagagataaaataggggatacatgcgattatgcctgatggtccacatacattcttagcttcgtcaaacccaatcaatatggagctcaaatggaaattttttctggatgccgcattaatgggtgctcactttattggggttaagagacgacaaacggccataatgttgcggc

SEQ ID NO: 260221 - DNA, 273 bp, Glycine max
  unsure (1)..(273): unsure at all n locations
aatcttaaataatatccagcaagatgcttcaggtttagaatcttggtctggcaagaattctgatgaatctaatcacaaggaatgatataattcacttttcaaaataaaacattgtgcaatgcagtgcaacaaattaagatcagaatatgatatttgataanatgaaaaatctcttcctttcttattataccagctgaagcaattattcactatcaccaaattacctttctacatcgagtaaaagtgcctntctacatcgattatcacgcgtca

SEQ ID NO: 260222 - DNA, 292 bp, Glycine max
  unsure (1)..(292): unsure at all n locations
tgatagtccatcatcatgtaaagataccatcttcttacgagattatgtgatgatagtntatgtgatataattcctatggaagcacggcacatttggttaaattaaccatggtaatttgcaagaatacaatccacatggtctcacaatgaaataaccctctcccatgtgaacaaaatgttcaaacttgttcccttgacaccttcacaagtggctggggatccaatactaattagactcaaacgggtgaagataagaatggtaaaagaaaagaagaacatcctttaatgggtta

SEQ ID NO: 260223 - DNA, 383 bp, Glycine max
  unsure (1)..(383): unsure at all n locations
agcttgagtgcattgatttgcagattctggtagatctatatagtccggctggactacaggccggtgcatttgaatgtattggatgatgaagttgaatcattccctcccaaggctcgggtgtattaaaatacatgctaacggatggattagacttgtagtctcaatgttaaatgacagggaaaaaatgcaatanaatgtcctaaatgtgtgattttgatcttttatgataatcgttgcattcatcatcaatgttgattgatattcctggcatcctctaataacactctgtatgtgcagcacaaaataatagcaacacagttctattcactgtttgggttttgacatgaatttgcttatttatcatatgctaagttgggcatatg

SEQ ID NO: 260224 - DNA, 346 bp, Glycine max
agctttcacaacttgtagacaacaacattttacttttttgttctatgcaaacacatggaagactctacacataacagcactatatgttatgcccctgagaccaaatgatgcgtcaacctatgtggatccacttatgaagaagcgttctttatatgtaataacatcttatttacaaaaacgacttagaatgtctaattttattttcacatacataagatggcagctcaataacatattatcacatgctgagaagataatggtggtgcatatatgttcactgattgctcgttttaatagctgcgacctgtgtcaatgctcatctttttctagacaataatctaaatag

SEQ ID NO: 260225 - DNA, 320 bp, Glycine max
  unsure (1)..(320): unsure at all n locations
agcttctaaactctatacaagaatgaagtctctataccacttgttagacaagaggcctcatatatcttaataagggggggggggcatttatttcacgtcantgttattaatcctcattaaatagttggtgttagatatataacacaaaacatacatgtgcaagcaaaaatttatttttatgggaaagtcccacaccaaaagtgatcatcacacaccctgagcaaatcaaagaattcttcaacaagatccaagactgttataaaccaaagatgagccccattatcaatttgttgggcactggacttgcaaaattacaatgc

SEQ ID NO: 260226 - DNA, 404 bp, Glycine max
  unsure (1)..(404): unsure at all n locations
agcttgtgtagctcagttggacctatgattggatttgcatttaacaattgctttactttnttctgtaggtataagtttgtttagcttccccatgttgattcatatttctcatatgttccaaccaaacatataagctaatcatattggaaattaagtatgtctgcacacatatgcgcaagtgacacacacagtcacacacacactgtttctgctggatgtgccatgcatcatctaataatgggtacatataataaaaaatatgaagaatattgttagtgagtagcttgtaaaacaatgaatattttctactgcacttgattccttcggacagtggcccattagcagggggaaatttctaaacgtctaacttattctcaaaatatttaagtacttcaatgattttt

SEQ ID NO: 260227 - DNA, 418 bp, Glycine max
  unsure (1)..(418): unsure at all n locations
agcttcttgcgtggccgctcttggtgcttataaaatcccaaaaacaaatccctcttattactagctattttgaattctttagttcctgaatgtacaaccttcaaattgttgcttgttcccctctttcttttctgcaaaaaagaaaatcaaatgctgtcaaaacatggatgaagtcttaagaaaatcaatatcaaagaaaacatggatgaaatcacaattaaaaagcacaactacctatctttcagagtcctttggttaatttgtcttgtctccttatgtggnggggttttgtttaataatcttatacttttgccttccaaaaaaaacttatcactaatcctcttttcattaatccaattttgtatgttattggataaaagatcatgggttctccacctgcctccactattgctcctcc

SEQ ID NO: 260228 - DNA, 361 bp, Glycine max
  unsure (1)..(361): unsure at all n locations
agcnttttggagtagaaacattttaacttcttattttatttcaaaaaggaagtcgtatctagtcaaggtctgagagaccatacaagtttcctaacgatgtctaattatgtgggccattaagtctatcatatgctgacaatagtcgagaagcccatgaatctcttcgggggcggagtaggtgtctgccatcgccttggccttggctaacaatcggggaagttcttgactcccgctcaaggtaagagcaaaccgatccatccacatggttgcctcttggtgtaaagagtcgatcacccttcctctaacctctttttccgcgtatacttgtgcatattcatccgcgattctatcttcgggggct

SEQ ID NO: 260229 - DNA, 390 bp, Glycine max
ctttctctacagttagtttatcttgacaaaacttggatcggttttaacctaatcgagctgaaggtgacatgcaaattctctttaattattatggatattcgaactacatgttggcatatgctaataaacttattgccacaattgtcacgaagtgtatgtataagctatagcgacacacaacacacatgtgggcaaattccatccagaattcacacttagagtgagtgtgagtatatgccaatctagaatatgcctatgtatattttacctatagtgacacttcttgtctatcactataagtgacaaaccttgtagtgtccattaaatgtaaggatgtgttttaactaatgaagagggcttcgaactcactcaaatacattttctctaatt

SEQ ID NO: 260230 - DNA, 417 bp, Glycine max
cccggatccttaagtcaccgcggcatgcagcttatgtcctctgctatgtagtttcatgacatgccctaaaccatttgaaacgacaataagcctatcggagtcttaaatgcagttctatatgcccataaagcatcatccaatttgagggaccaatccttcctattataggccatagtcttttctaaaatcttcttcaattccctatttgatacttccgcttggccattggtctgagggtgatagggagatgctatcttgtgcgttacattatattgcttcaacaccttctgtagctgattattgcagaaatgtatgcctccatcactaattaacattctgggtaccccaaatcgtgaaaagatgtttttctttaaatacttcactatagtcttggcatcattatgtggggtagccact

SEQ ID NO: 260231 - DNA, 418 bp, Glycine max
  unsure (1)..(418): unsure at all n locations
agcttaagaaaagagccttgagggtaattttctcaacaatattcgaattctccaaactgtgtattaatatatctccattctgatttataatttattgattcagttctcttgactttcatgtgaacaggtgattgcagagtatctgtccttacaagaagctgctggaataaaagagggattccacctgatggatacaagcaataaaggcaagattagcgtcgatgagctgcgtgtagggttgcataaactaggtcaccaaattcctgatggggatatccaaatacttatggatgctgggagtatatttcactttatctggaaacttttcttttctgtntgttctacaattgatgtgtgaagaaataatataatagggctcttgtttttaaaaatttattgtcattgtaatatatcaaac

SEQ ID NO: 260232 - DNA, 331 bp, Glycine max
agctttatactaagggtgaatcttattatttgtctaaagaattgaaactatatggccaaacctgaggaactcattgaacaatcaaaagaccctcttttcaatgaccattgacgatttaaactaatgatccacccgaaaatcacatctttctatggtcattaaagaatccctctctttattattaagacaaattaatcccgcctcctattaaagactagcactcattattcaaataaattaacatgtctttaacacattgcttgatcgtcctgaattacaatgcattgcttaattgaacacacatttttgaaggggcaacgaaccataacta

SEQ ID NO: 260233 - DNA, 420 bp, Glycine max
  unsure (1)..(420): unsure at all n locations
gctttctaattctatctatgctcaatttgaanaaaaacatctttctactagttttcatgcaaaactattatgtgaatatccaaaatgcattacatatttgattaaatttataaatatatgatatattatatttttaattaatttttcacaaggtactactgcattccacaaaggcggtaggtggcaagtggcaagtaattgggggttttaaaagagatttatgtgaccgtggagttgtctgtggtatccatccgcgcatattctcatttcaatttgcatttgcatttgcgtttcatttggcgtcttgtttctttctggaagcttcgttcgggcatcaatggcgtccttcgatgaagctcctcccggaaactccaagaacggcgagaagatcttagaaccaagtgcgctcagtgcccaccg

SEQ ID NO: 260234 - DNA, 53 bp, Glycine max
tcttcctttttgtttgctgtatttttcatctccagagggagcggatgcgcatg

SEQ ID NO: 260235 - DNA, 396 bp, Glycine max
  unsure (1)..(396): unsure at all n locations
agcttgtgccacccacatagcatatgtttttcatgggtgatcaacctangctgtggttgcaaatttgagaatctctccaataacaaaatatgaaccaagtagtaaaagggtgnccnnnncctnncctcttttcttcttccncactatctattgtcttctctacctacctatattcttcgtatgttggcttcacacttggtctcctagccccatatctacctcatcgataactttctttctctctctcccattgctagagatgtcactcttcttcactcatttgcactgcgatgttttttccccctcttcttcccattctcctcttcatttcctcctccccttccttttcccaccactctttttactctctttcctatttctccctcttattctttt

SEQ ID NO: 260236 - DNA, 432 bp, Glycine max
agcttagaacatgagaggagcaacatgattaccatgctcataaagagttttgacttttacatgcctaactccttattgagtggcatttgaattgtttgttgctttcttgtcttagtttatttgtgtttacatcatgcatcatcgtatagaagtaggaagatggtttttgagataagaaacgtcttcagtgttgtttttctcattgctttaacttattaccactcatgtgtaatcgattatatacgtcttggagaagcttgcaaagagttcatagctttggtttaatcgattatcatatatttgtaatcgattacacagttgtttttgagaccatgtttgttttctcgggtttctagttttatcgattacaaggacgtagtaatcaattacattattcttgaaagtgttcccagaagtgatcaagaacacttt

SEQ ID NO: 260237 - DNA, 415 bp, Glycine max
agcttcgaagggaagagagagaccaatcttgagctcatggcatggtcttaaaagaggagttagctgcttgctcaaggtccaaaagaaacttgtctcagcgtttatgtgagacagagtccaacatgttagccatcgtcagcaaataccaagaagagctaaatctagccacggcccatgggcataaagtggcagacgagtatgcccaagtgtacaaggaaaaagaggctataggaagggtgatcgactcgttacatcaagaggcagcaatgtggatggaccgatttgctcttactttgaacgggagtcaagagcttcctcgattgctagccaaggccaaagcaatggcggacacctactccgcccccgacgagatccacggatttctcatctattgttagcatatgatagacttaat

SEQ ID NO: 260238 - DNA, 384 bp, Glycine max
agcttctcaaagaaggcacggcgaagctttttgtatatacctctcaaggaagcttcttgaggaagtgacatgaagctgccccggtaaaaacgctgcccaaccttgtttaaccgggggatcttttccaaatttgggatgcagcttgacaagacacttgcgcatgatctgaccgctgggatccttgataaaatgtctagagtatgctcaaagcttccgctcccgagagcagctcttatttaagcattttaacctttgctttcatgtagcttacgaaaaacgtcatttcttcttctttcttttttccaaagccatttctaaagtcccaaggaaattctccatcacccacaaccaccattaaccaccacaagccatcgttgttcttca

SEQ ID NO: 260239 - DNA, 407 bp, Glycine max
  unsure (1)..(407): unsure at all n locations
agcttctatggaggctggatctttgagctttaatgaggtctttcaatggggattttcaaccatggagttatagtggaagataaaggagaagaggtgagaggaggcgtcatccactaaagaataatccatggaaggagaagcttcaccaccaagagattgccttggatgaagcttanaaaggaagtttcaatgtgggaagagaatgagagagagagagagagaaagtggcataaaaaattgaaggaagaaaaggagagaagttaaactttgaagtgtgtctcacaagtttctcatttatcaaagttatgacaagtgttacacataattctatttacagcctagtacataggaagcttccctgagaagcaaggaaggtagcttccttgggaagctataggaagaaaact

SEQ ID NO: 260240 - DNA, 351 bp, Glycine max
ttgcaacagggaagattgcccaatcctatccttctgtccatagccgaggggaaaagttgtttctatcttatttataaaaaagatgctccacactactgccgatgactttttattataggagaattgcccgtggtataataaaatatcccatgctttatatttacttgcgatcatgataacacccatccaactctttataaacatgtcggtttcgcgtggggttgattagatcgaatagcgctcaaaaaaaaattgtcggttccattacccgttagcagacgtgaactatatggggagatatttatcttgatgagaaagagtgttttagacacctccttctaccattttttc

SEQ ID NO: 260241 - DNA, 427 bp, Glycine max
  unsure (1)..(427): unsure at all n locations
agcnttgagggtgcgcagccctctctttttatattagagtatcgataatgtgtctaccatcacgatcatcgtctccctttccatcattgggggtaccacctgggccgccagatccctccaccttttgggcgtgttctttgaaagatccgtccccctttttgcaaatgttctgtagttgcatcctatccagaaccatatcaaaattgtactaatactgcctaacaaaggcaaccattaggtccttccaagaatggactcgggaaggttccaagttagtgtaccacgtaacagctaccccagtaagactttcttggaaggaatgtattagcaattcctcatcttttgcgtattcccccatcttctgacaatacatctttagatggttcttgggacaaagagtccccttttacttgtcaaggtccaacac

SEQ ID NO: 260242 - DNA, 333 bp, Glycine max
agcttttgtccaaaaaatagcttttctttgttcatgtggcatacgagttacgacgaattgtaaaacgaaacagcttaaaatagttaattgcatctatcagtgtgcaatgaaaaaaaaataaaaataataggaaagacccagatggagaaaaaggaaataatcctgttagcacttatccacaaatgatggagcaaagaaaaggaatgagaggaatcccatgactagcaccaagctcacggactacatctgtaattgagctggtatataaaaaataattgatgatattattatttttatgtaagttatgagaatattttgattctattctctctc

SEQ ID NO: 260243 - DNA, 345 bp, Glycine max
agcttcgggctgctaatagcttttgtttctgtatggaagggcaaaggtctgtatggtggtcatcaaaggagcacaaaccacaaacccttgcgacaggtacagatttctagttcaaggccagctgggttaccaagttaactaatgcatctagtttgccttcaagcttcttagtttcagatgatgcagctgaatttgtagctacctcatgcactcctctaatgataataacatcatttttggcgctaaactgctgggagttggaagccatcttctcaattaaatgtctagcttcaataggagtcatgtcttcaaaggctccaccactggcagcatctatcatacttc

SEQ ID NO: 260244 - DNA, 324 bp, Glycine max
  unsure (1)..(324): unsure at all n locations
agcttggacttatataaatgccttttgtatgtctatcatanagaaccaaaaaatatcaaatcatgcctattaagagcatgtttattcacacaaaaaaacaaactaggtgatttatcttttagaagggtgcttggcgccctattaattatgccagttacatgacaaatggcatacgaccacaactcctttgctaatcttgaacgaaaaagaaatgccctccccacattgagcacatgttgatgctttctctcaacccttccattctatcgaggggattccacacaacttgttagatgaactatgccttctgaaacatataactat

SEQ ID NO: 260245 - DNA, 421 bp, Glycine max
  unsure (1)..(421): unsure at all n locations
agctntaaaattngaattatatctttcttaaactgctggtaatcgattaccatatgtgtgtaatcgattacacagtgcaaattttgaattcaaattttaatagctgttgtaaatcagttttggccactggtaatcgattacatcctctggtaatcgattaccagagagtaaatttgttgaaaaagactttctaacttaaatttcttgaccaaaccttttgctacttcaattggaattctcttcctatttaatataccctttctaagactctagagactcgcttgaccatccatcttgaatatctttaatttctttgtcttgaataaagctttgagacgcattaaaaactttggcatcatcaaaacattcagcttgatcctttgtctacaattatgttctaagtttgtgttgaattgttatt

SEQ ID NO: 260246 - DNA, 418 bp, Glycine max
  unsure (1)..(418): unsure at all n locations
agcttaataaagtccttttgtttcatttgtgtgtgngtgtgngtaattgcattgaatgagatgatgtgcaaagttgggaatcctaaattttgttgttttgattgaaatacacataaccaaaacacttgtgtgctcgagagaaacaatatacttgtgagaagtgaagcatgattgatgattgtcatacttgctaacctactttatctccaagtgagttcttgcttgcttctatcatgaaaactatgaagaatgtgaacttgagaattggaaattgaagttgtctgaaaggtatgccattgtctcagttattgtggttggttacatactgaacattgtcattgacttgacttattgaagttatcctacttttgcttgaggacaagcaatactttaaatttgggggaggtcgataatttta

SEQ ID NO: 260247 - DNA, 410 bp, Glycine max
  unsure (1)..(410): unsure at all n locations
agctntntctgtagaattggttatacaatctcaagaatggttcggccaagaaccttgatgaagttgtatagaccgtcaccaagaatcattgctattgctatgaaaacctgttattaaagaatacatcaataaaactgatcaactaggatatattcttcagttagctacaatatcattcaaagaacaatgcgacagtacattaatattgtgtcacatgttgcgtacagtgtcatatattgatactaaatctatcaattatgtccaaattattgatatatttttaggtaaattatttttttagggtgtntcaaatgtctcgttaccttctcaatccatatgatataatcaatcataacttcaacaaaatgaatttcagatttattgtggatactaagagttaaacattagag

SEQ ID NO: 260248 - DNA, 422 bp, Glycine max
agcttacaaatctgttttaagtccaagcttaaaatctaaataaaataaaactggatgaaataaaataaaattggacgaaataaaataaaattgtttgctttcttcaagtccaagccggttcagcccaattccggatccaagcccaattgcttataattctcctgaaattaaattaaaaacacaaaattaatcaagtagagccaaatgataaaactgcataattaatttgacaattaaggctaatcagtaattaaaatggtgacaaaaggattaagaaataggagaaaataatgacgcatcaatattccttgaaagattcttgcacatgctctgtcgctgcatcctatctggagccatatcagaattgtactggtactgtctaatgaaggcaatcattatgtccttccaagaatggatttggg

SEQ ID NO: 260249 - DNA, 370 bp, Glycine max
agcttcttcatcataatttttaatctgcttcatggctttttcccagccaggggtagttattgctcgagctaccatccacatcaactctttcaatgtatggtcagacttcctatcatgaacctttccactttgataatatatttgtcatataattatttgttattgctgaaactgatttaacatacaaacattgctttacaattcacgaaatttaacatcacttgatactgaattcagaattggttggtttgtatttgagtttgtttaaatacattttctgtttacaatacaaaaaaattagaacctaggaccaaagttaattggtatttactttgaaaacaatcacttaaagatacactttgaagaaaaa

SEQ ID NO: 260250 - DNA, 441 bp, Glycine max
agcttcatccttggatccctcttgttggactagacttagcttaaatagcttatgaaagtttagacaaacttagcctaagctttgtcctcagatccctcttgttggactagacttagaccaaacaacattattgtaacaacatacctaaaatcaaaacttaatccgtagatccctcttgtaagactcagtttcaattctgcttcattcaagttctaaggcaacaatacatttcctaatgttaaaatcacctaactaggcacataaatggttgatcataccaaaagcatacaaaatttaagcactgaaagaagcattgaacacaagaaacacaatcaattagatattaaaataattacatcagttgttcattatagcaacaagggtctttagtcagccattatagcaaaacccctaataatagtaatgagattacaaaactag

SEQ ID NO: 260251 - DNA, 230 bp, Glycine max
  unsure (1)..(230): unsure at all n locations
agcttgngcaaatcaaatcactcctacatttcatctctagcatgcagtttctttctttacccactcctcacgtttggttttttagggaaaaacaccataactaaacgcgccgcaagggatccctatctcaccagatcctaatctataacgatgggtgatcaaaatgagacgcgggaacagatgaaagccgacatgtcggctcttaaagaacaaatggcctccatgatgga

SEQ ID NO: 260252 - DNA, 431 bp, Glycine max
agctttttctacaaccttctcttcctctttggcatcatcaaaaagccaaagaactcgggaatcaacacagatataacaatggagtagaaagatataaatatcagagtataaaacataaccatccaaactcacaaacaagaaataatcaaaccagaatccaaataactcaaaatgtcaacaacctcataatgtcaaagtagaaaaaaggctgaaatttaaataccacaagataaataagcaaagtacttaacataataatttaaaccctaagagactaaatagccaaaatacatggcttataaaagacatataatcagaaactaaaatctaagaagacggaggtggtggtggaagatcgaaactctgacgaatgtatctgacatcctcttcaagctgtgtgaggcgaatgtccataccggcaaagcgtgtat

SEQ ID NO: 260253 - DNA, 430 bp, Glycine max
  unsure (1)..(430): unsure at all n locations
agcttggntatctccttcttcactacattaagaatcaccaggntgagtcttctctgtggctgtcttactggtttagctccatccactaaatttattcgatgcatacatgtggatgggctaataccaggaatgtccgccagggtccagcctatagccttcttattcttcttgagaacagacaacaacttctcctcttgctcatcagcaagggaggcagatataatcactggaaaacttttgctatcatccaagtaagcgtatttcaaatttgatggcagaggcttcaattttggtgtggtcggctggatagtggtagaaggagatggtttctcancctgtacctcataaagaaagtcagaggtatgtgtacttcctgaaacatgngtagtcctatctgactctatagaatcaatctcaagaggtaaaacac

SEQ ID NO: 260254 - DNA, 422 bp, Glycine max
agctttctcggggccattcctgttatagttttacatttgaaaagttagtttacaagaaatataacaatcattacaaacaagggccaaacaacacttctcatggcacgagtgtcaacatgcactttataaaataatcatattggggtcgtgctattttatgacacatacgtatttgcacacataaaaattttgtgtgaagcattttacaacacctatccatgtacatatttttttgacaaaccttttcatgctacatcctatatatatacacacattttttggaaggcttcttttgttacctactcacaaatacacatattttgaagaacactgttacgctacccatccaacactttgtaaggcacttcatgctatatatactcatattatgcaaggcattttcatgctatataatatcatac

SEQ ID NO: 260255 - DNA, 427 bp, Glycine max
agcttgacttcaactttaccaaatctaatactactgaaaaccgcgtgaaagatgtgcaccccgaatataatggcatgttggaatcacattctattgtatcatacagaggtgcatgcggttgctcaaaagtctcttgtccaagatcacatatcatttcctctataccctctccgttgtcttcgtgtaccgcttgagattgagaaacagttggaatgtcggccaattccctatgccatatccattttgtgtaattcggaatgatgccgcaacatatgagatgtgatcagatttcatcaactaactggtcgctaccattaagacatttaacacatgggcatatataattgccccttaaactttcagcattaagttgagtaaattgtagaaattgttccaccccgttctcatactcgtcattgatgcgttt

SEQ ID NO: 260256 - DNA, 347 bp, Glycine max
  unsure (1)..(347): unsure at all n locations
ttaagncgaccgcggcatgaagcttaataagaggcttcctctataagcttcattaagaggcttcctcgagaagcttcctcgtggcttctttgagaagcttttctcgagaggcttctttgagaagctagatccttatctacccatacccctctattaactaaactcacctccttgaaaataattatggataaaataatacaaccaatataatcaaacatcaaacataattactaataatagttcagggtgttacactaaacacctcttaaaaccagcatccaaacaccatagctttaaccctttcactccctcaggatatcctagaaaaatgcacttgacagctctag

SEQ ID NO: 260257 - DNA, 424 bp, Glycine max
agcttggattgattcaccctaactagggattgagggttagtaatttaggctacatcatagaacacaaaagcatgattgattagagaaacatctctatatacatcagcttgtttgttagaaagacccaacacttttacctagtgttgtcaatcttacttgcattttttactgcttttagcctagacttagtttaattctattctaaaccatcaattatcaatgtttctttcaacaattccttatttctgaatttaaccctgtcgaatactagttccctgagtttgatacttggattcatctcgtttaattttaaatacttaacgatccggtgcactttctggtgaatcgaatttccttaaacatatttgtataaagaagaattggaccaaaaagtaactgtaggggaaatccaacacctgaattg

SEQ ID NO: 260258 - DNA, 371 bp, Glycine max
  unsure (1)..(371): unsure at all n locations
agcttacccctatggcttgcctccggacttcactccttgngccactccggaagatttaagccaagcccctactttcgaggggcaactcccaccttatgacgactatcccgggcaagacgatgaggaaggagatacccatcttggccccctgctccacctcaaagatccgtccccccatgaactaccccaaccgaacatagtccgccatatcccggcttcacccacacccgtaaaagaatctgttcccttcgcggaagataagggaaagattgaggcgctcgaagagagggtaagagcagtcgagggccttgggcaatacccattctcggatttagcggattatgtctcgtgcccaacatcgtcatccctcc

SEQ ID NO: 260259 - DNA, 434 bp, Glycine max
agcttgcatacctttcggaagtgcagactttgatttctctattagagagtccggcatcttttctgtccagcacactatcctatgcacccacttgagtaaagaaaaaccttgactgtaaaatgcatggcattgttatttaagcacggatattggtaggttggatctattttaattcgacccaatgctaagttgccttataaattcatgccagggttataacctgcaaagatgaaatgaggaatctgcgcgtgacctcgcatataaacatgacttagtcatcgaactatgtcaatactgtatgtctttctacaactctttataatttatttttctgcctttttcttttcatcttattataataatatttttcctcttatctcttttatttggctctttattttgaaagaattggataacaattatgttaatgaata

SEQ ID NO: 260260 - DNA, 426 bp, Glycine max
agcttgcctgtccgatgcagcagtaatgtatggttctagttatgttggggaacggttacgaacccggaatgggtttaggcaaagacaacggcggcataactagcttgataaatgccaaaggaaatcgtgggaagtatggtttaggctataaacccactcaggcagatataaagagaagcatcgcgggaagaaagagtggtggtcaaagctcgcagttgagacaagaaagtgaaggaagtccgccctgccacataagtagaagctttataagcgcgggtctgggagacgaaggtcaagtggtcgcgatatacgaagatgatgttccgagtacattggatttagtacgaccatgccctcctgatttccagctaggaaattggctagtggaggaacgccctggcatttacgcaacgagcataatgtaaa

SEQ ID NO: 260261 - DNA, 157 bp, Glycine max
agcttctatagaaggttcattcctaatttctctacaattgcatcacctctcaatgagctagtgaagaagtgatgcaagctccattggagcttgtaggcctaagatcttcttcatcaaaggattcctttgcttcttggaagataaatggcagtggaat

SEQ ID NO: 260262 - DNA, 448 bp, Glycine max
  unsure (1)..(448): unsure at all n locations
ttaagcacctgggctgcagctgaagagaccggaaaaatgttgagtgtatgctagctgaagaaacagaattggatctgttgtgggagacacttcctgatgcaacatggatcccatcacaagagaagcaatagaaacaggtccaactgcaaggtcctttgagcttccaagaacagcatagacaagtggtggaacaaaactagaatctgaaatgtgaaacaaggccaatcacaataacccataagcatgtgatgtaacataaattagcaccaaactaactatggcgataaatcaatacacttacaaagtccaacaattggaggaagacttgcangcttagcataactaattccctgaatgacaaaagtcaatagttgaataagaaaaccaggttaaaaatatgggtgaacatttnttatgcgagaacaagttcgagcagaatgtcttcaat

SEQ ID NO: 260263 - DNA, 400 bp, Glycine max
  unsure (1)..(400): unsure at all n locations
agcttggcaagaatatggaatattacgagaggatcttctattatttgctagtgtattacgttatgtggccctgccactggatgattttgaatttgttttcgttaggactacataatgttagatggtgacagtagtttagttttctcttagcgtattcgcctactaattgaagcttgcttaatttttctttagtcataagttaaacaccatagatgctgacggttattgatttaagaaaattttacaaattacgaaaattaaatacaagttcttttattaaataaataatttttatttatattagcgcatcaagatcttacactatntagcaaatttatattagtgttcttaattatttaggcacaataataattacaattgaaaaagaaaagaaatcaat

SEQ ID NO: 260264 - DNA, 424 bp, Glycine max
  unsure (1)..(424): unsure at all n locations
agcttaagaacaccctcctggtgttgttctgctttctgctatggcattctccgataacgcagcaacagaactgacaccggagcaagcggcagcggttaaaccttttgaccgtgtagtggttaccggtcgttntaatgctattggcgaagcggtgaaagccgtttctcgtcgcgcagataaagaaggtgccgcctctttttatgttgtcgacacttctgattttggtaacagcggtaactggcgtgtggtcgctgacctctataaagccgatgctgaaaaagcagaagaaacaagtaatcgcgtaattaacggtgttgtcgaactgccgaaagatcaggctgttctgattgaaccgtttgacacggtcaccgtccagggcttttatcgtatccagccagaagtcaatgatgccatcaccaaagcg

SEQ ID NO: 260265 - DNA, 430 bp, Glycine max
agcttcaatccagaaggtcttctattcctactttctaagaggtcaatcatttccaagatgacaatatagatctctcaaccgtttttcttatatatacaagaaacatgccatattgaaactatctcacataactaactcactaatgtaactaactactggataactaacctattataactattaatgacagttacctaatcactttccattctcattgagaagatcaatgactagttttggttatatatgaattcttaacaaattgatttcatatgctttataattgttcttctcatgtaataactttacttaaaatgtaattacttacctagaagaataaagcatacaagttgaattatcttctagcttagtccttaggagacatgagttgctgaaattctttttatcgtgctgcatttgacacacatga

SEQ ID NO: 260266 - DNA, 169 bp, Glycine max
  unsure (1)..(169): unsure at all n locations
agcttgcaccactaaacatatacttccttttacagcgggggngggagacatgatagacatgtgccatgaggcggaggaaaaactgccgttgcatatatcaagggtgcttagaatgactccattgacgccaaccatccaacataccatagacctctttatcggaggggaa

SEQ ID NO: 260267 - DNA, 412 bp, Glycine max
  unsure (1)..(412): unsure at all n locations
agctntgcagatttggtcttcgccagtgaaaggatcaatgtgggtccaaaaagaggcaaatttgatcatcctactaggacgactgagaaaactggggcaaataaagagggtgaggatgagggagaaacccatgctgtgactgccattcctgtacggccaaatttcccaccaacccaacaacatctttactcagccaataacaaactttctccttacccaccacctaggtatccacaaaggccatccctaaatctaccacaaagtctgtctaccgcacttccaatgacgaacaccacctttagcacaaaccaaaaacaccaaccaagaagtgaattttgcagcgagaaagcctgtagaattcaccccaattccagtgtcctatgctgacttgctcccatatctacttgataat

SEQ ID NO: 260268 - DNA, 405 bp, Glycine max
agctttcaatgttgaattattgctatattatcgaaacaaaaaattcttaggttaaaaatctctatgaaccgcgtggtgtgaatgacacagaagtgatgttaagcatttgtctcacaattggaattacttccctcttcagcataccgctgatgcttcttggtgagtgtgcgctccaaaagggtgtctcccctacatagttccataacaatgtagacattgtaattatctccataagcattttgaaattggaccacattttagaggccctggccaatcaacgacttcttaattcaaagatgctgactttggattatccttcttctctaaaatggaagaggatcttcatgagagtgttgatacactttactacatacgccctggggttgagtgggaactcaatttatg

SEQ ID NO: 260269 - DNA, 252 bp, Glycine max
agctttgcagatctggtatttgctggctataagatcgaagtgggcctaaaaaagggaaaattctattacaccgcatcaacaagtgctgacaatatgaggactggaacaggtggggcaaagaaaaaggagggagatgcccatgccgttaccacagcacccacacaaccaaattcccaccaaacccttaatttccatttaccattttctttcacccaccttattacctgggccacatggggtttcccccccgcc

SEQ ID NO: 260270 - DNA, 403 bp, Glycine max
  unsure (1)..(403): unsure at all n locations
agcttgtgacgcatattatatgatcacatattgctgttagtgagagctaagacaatgaacgagcactgaaaccgttaggtgaaagagataataatgattgggtcaatgacaccataactatatatgggaggacccaaaagaaggcatcctttgagccataaaagccaatattcattgaacgcccatactggtccgatattgatgctagacattgtgtaggacctatgcctgaggagagaaatgtttgtgatattataattggcaccgcttttaacatttatggcaagacaaaggatggtctgaggtatcacacatacctgattgacatgggtatatgagagcattagcatacactatntcacgatcgacgaacgacttgccaccacatgtatgcgatgtaaca

SEQ ID NO: 260271 - DNA, 438 bp, Glycine max
agctttgatgatatggtcttcaccgattttttgtttttagtgggtctaaaaagaggcaaatctgatcatcatgctttgataaatgccaaaaaaaaaaactagggcaaatgaagagggtgagaatgagggagaagcccatgctgtgactgccattcctatacagccaagtttcccaccaacccaacaatgtcattactcagccaataaccaaccttctccttacccaccgcccagttatccacaaaggccatccctaaaacatccacaaagtctgtctactgcacttccaatgacgaacatcacctttagcacaatccaaaaacaccaaccaagaaatgatatttgcagcgagaaagcctgtagaattcaccccaattccggtgtcctatgctgacttgctcccatatctacttgataattcaatggtagccataaccc

SEQ ID NO: 260272 - DNA, 431 bp, Glycine max
  unsure (1)..(431): unsure at all n locations
agcttctagaagaagccggtgactatatttctgctttggatatgcaagtgcgagccatgaaggctctcgccgaccttctcgccaccggtgctccgccgccagctccgatcggtttgagttgaccgaagatgttaattcttactattaggggtttcttcatatatcgnttatattagttgttagattacagttccatcttcgccacttattttattttttctcttcattttttattatttcagttaaaaaagttataatagacagtaagatatgttctatattggtatattacataataatataaatgatatggtatataactaggttacacatataattgtactaatatatatgatatggagtattaattctattatattttccaaacgcttttttatatctgatacaacgtctgaaatcttattatatat

SEQ ID NO: 260273 - DNA, 406 bp, Glycine max
agcttaatgacttgctagcaccattttgctacttataatgtcattcatgaacatacaacatgttgctcaaacatgcatcatgtcaaaatggtggaaggatagatgaaatttttctatagttctattttaccttccattgatttcagcaaccatgttttctttgaattaatgcttgagattgtatcttagcacaatggaaataatcccctacatactattgaccagaatctccataattactttaaacctgagatattactaatcttgaagggattttgtgtcttataatatccaaaaactgagtatataagttctattcatcaatcatcaatctttgttttgttgacaagtttttttttctttgtcaatctttaacatcttttagtacttcaatttcatcatatga

SEQ ID NO: 260274 - DNA, 414 bp, Glycine max
agctgttactgagaaatgaaagatcagttttctttttcttgaagagatgtgatccaatatggataatatttttcaggtgcaaaaattggtggcaatggtttctttatacctacccacgagcgctctccttgaatatggtctcatacaaggactccacaaagaaaccacacctcaccaaagtctaatatcaatctccacatggaggcataggcttataccaacaatcttcgatgtatattttactatctgaccctagacaggaacggaatatatgctcccaccatatcttatcatagaaatacttcagattgattgagcacacccagctatgatgttatacaggttgtgtatatcacacaaaacatcttaaattgtgcccatgcagggctgaaaagcttttataggtttttccac

SEQ ID NO: 260275 - DNA, 187 bp, Glycine max
acacgcgcccacaaaagggccaataactaagccacaaagcaggccaaacacggaagacacaaaagcaaaacaacggctaaaaaggacccagccgacaccccatgaaaataagaacacgaaaggaacaaccaatcacaaccaaccagcactccaaaaggacgcaaaacatcgacaacagggaccaaca

SEQ ID NO: 260276 - DNA, 429 bp, Glycine max
agctattgggggcaaggacgcattctcttttcatattatgattttggcttgcgtagctcaccattcggtgtttagaaatagtaaaatgcgtgatagcgggctatgttttgttgaagtcaaaatatgaaaccataaactttaactctagcacatctagaattggtggatttttttttagtaaaattatatttttgatccccaattcactggatgtggtccaccaataatttaattcacgaagttggtctcgctacgtgtcatgttgtttttattaacattgcacgattttacaaaataagaggaccaaattcgtgaattaaattattggaggaccaaatgtaaaacttgaattatagtgagggaccaaattcataagtttatcattgcttatcatcatctctccatgttggttctcccgaacaagcatat

SEQ ID NO: 260277 - DNA, 352 bp, Glycine max
ggatcttaagcaccgcggctgcaactttgctgttagagattttatttattagaaaggtccaagttccaaagaattttgagagttttgctgtgcgaagactggcagagaactgagcatgaagaggaaggcatcttgagagcatgatatgagtatgtgagtgattgtgaggttctaaaggtggaggagacatccccactacttgtatttcttcaatccttcatttttctcttttctttgttgtaaaggaagctctccagatatggagagctaaatcctctattggttcttccttgtaggtacttgatgtaaatacctcgttatctatatgatgaatgtttattgtcgtccctgt

SEQ ID NO: 260278 - DNA, 372 bp, Glycine max
agcttctagccaaatggacttaccttgatttaattcctttgatagcccttttgagccttgtttccctttccttgttttgaagctcattacaagccttaagtgaaaaaccatgatattaccatatccttaaggaattttggagctttggaattgttttgggaataagtgtgggggtttttgtttcattggacaacttgttttggtggctatgcttcatgatgtattttgggccatacttgatgtacattgtatattggttaaatgttggacatgctgaatgaaatgttgtttctcaagtctaaagagtacaaaataaaaaatctgaataaagagagagaaagaaagcattaagttgagtgaataaatcttaat

SEQ ID NO: 260279 - DNA, 394 bp, Glycine max
  unsure (1)..(394): unsure at all n locations
agcttctcccccaattttctattaatatggggagaagtgaagcaaaaaagggttcagccccttaggcacttctctctctttcgaatttgcttaggaaaattgtttccgtgaagaaaatccaagccaaggcgcttccgtaacgtttttgtaacgtttccatgagtgatttcgcgaaggttttcgaccgttcttcgacgttcttcattcgttcttcagtcttcaacgggtaagtacctcaaaccaagcttttcaattcattctatgtactcgnggnggtccacatttgggttcatgtatttttattctcattttcatttacctttttatacccccttttgacgtgcttaagccatttagttaagtcatttctcgcttaacctaaaaataaaataat

SEQ ID NO: 260280 - DNA, 426 bp, Glycine max
  unsure (1)..(426): unsure at all n locations
agcttgaagcctcaaagacttgtcttttgtgtcttagntttggcttaatgattttacaatgccaaacaagttttatagatgtggcatttgtattgaatgttttagtctaggcgtgatgtttgatattgtttaagtttgcttatatccatgctcagtgtgaatcgaatatatcaaaaaatggattaatctctaagtttcgtagaagcaatgagttcaaaacaatgtaatccattacaaggttttggaatgaattacaaagtgttagaacaaacatcaaaactctcttctacttgaaatatggcaagaagtgacaaactaatcgattaccagttttgtaatcgattacagaagctaattttagaagaagaaagaccctatagctaaagataatcgattacaataatgtttgaaacttaaagagctctt

SEQ ID NO: 260281 - DNA, 225 bp, Glycine max
gagtttcatgagataatttccaagagtcacatctattcaaatggtttatgaatggccatcaaaggtgacttggaaaccctaatttaaagagagttttcattgcccaaaaagttttatctctctaaaagattaagagttttcctgaactgaaatgtctttatattctcaaaaagattccttggtcaaccacttgcatattcaattatgagatttgattgaacttcc

SEQ ID NO: 260282 - DNA, 427 bp, Glycine max
  unsure (1)..(427): unsure at all n locations
agctntataattatttaatgtttaaactgcgctgacagagaagatatgaaacagctttatgggtgtatatgttatatagtattcatgagaaattctcactcataaaataaaaaaggaaacttcattaaaaaattgtgaataaacttgtaaaataagtataaaaaaacaactgttgatcaatcttatcaataattaatttttgttaaaaaattaattaattagttttagtgaaaaaaaatttaatcatatttttttatctataaaacttaaatttgatattttactaaatagattatatgttagctccaatcaaactaataatgtttttagcttcttaaccatttgaatttaataaaactcataatttaaagaaaaaaaaacttttttttacaatntacatacgttacatgatgttntattacgtaaa

SEQ ID NO: 260283 - DNA, 391 bp, Glycine max
  unsure (1)..(391): unsure at all n locations
tagcttatatanaaggaaaggatcaggttttttttttatacacaagtttattcaaccaacaaagaaagtggtccaaataatagaaaccaacaaggatgaggttgtcgtgaagatcaaggaataggacgaggtcatagacaaggacaaggccatgggaaaggctcaacaaatttcaaagaggagaaatctcatcaagaggtcatggccaaggcaactcaagatcaaggtatgacaagtcaaatgtgaaatttaacaattgcggtaaattttacaattgtggccaaggcaactcaagatcaagggatgaccctctattgacgacttgcatgatttatgaaagaagaaaagacaattaatggtacctatacactggtgcagcaatcatatgtgt

SEQ ID NO: 260284 - DNA, 430 bp, Glycine max
  unsure (1)..(430): unsure at all n locations
agcttgtgactctaggcaatttctttaatactagtcacttaaaaagttgtgacttttgaaaaaatcttcagaaacaagtcacttgaagaatngttgatgcaatcctccctaggaagggaccaatcactagaaccatgagcaagaggctccaagaagattgggctagagctgttgaagaaggccctanggttctcatgaaccttagggtagatttctgagcccatgggccaaggttgagtccaattatctttgtacatattagactaggatgtcattatatttggtccttgtatatagggatccatattgtaggtagggtaccctanaaatataggatttttcagcccttgttttttgggcacctagacctagttttgtattangggtagttttgtaatttcaatgcactaatggatatttgatgtgtgtg

SEQ ID NO: 260285 - DNA, 420 bp, Glycine max
tgcaagcttctagcccaatggactgaccctgttttttttcctttgatagccctcttgagcctcagttccctctccttgttttgaagctcactacaagccttaagtgaaaaaccatgatattaccatatccttaaggaattttggagctttggaatagttttgggaataagtgtggggggttttgtttcattggataacaatgtttgctggccatgcttcatgaaatattttgagccatacttgatgtacattgcatattggttaaatgttggacatgctgaatgagatgctgtttctcaaaggctaccgagtaaaaaaaacattctcaaaagaaacaaaaagcatgtaagttgagtgaattatatcttaaatgccaaagaatgatgagacttctggctctatctttatgttaaatttatc

SEQ ID NO: 260286 - DNA, 419 bp, Glycine max
  unsure (1)..(419): unsure at all n locations
agcttcttgcttagataacaacaaatattttgatttttatatttccttctcaagtacttggataaatgaataacacaaagttctgtatttatcaacagggtgtataattaaatatcatattttagcttttgtaaataaggttgtcaaatacaaaatttaagcgcgcatcaactaaaataaatgagaagcgattaagaatgttaccacacaccaaagatttattctgtaacctgngctacctctaataccttcacttgtaggctttatcaattaagaccaagcacaaaattgtggtattctttctttcttgaaaccttcataagctcctacaccccatcattttaaacctctataaattctacttaatattcttttatttatcctgccggccaacactctattattattatgaacctctt

SEQ ID NO: 260287 - DNA, 417 bp, Glycine max
  unsure (1)..(417): unsure at all n locations
agcttatgatttagcatggctatttgtttttctcaattcaaatcttagaacaccacagttcaactttgactttcatctcatgttagtcaatatatcaaaggcatgcaaagatcactaaggactttattgacttgtaatggggctcggctaacaaggagtattggtttttcatgatatttcaaagtaactagaggaagggaagcattagtctattcatttcattttattcacttcctacccatccnttgtaccccagatattcaatttcatacatacttctctttgtcctcaatttgatttttctttactttacttctcttggtngtatttattcctctattcttcaatacattacaagagagaatgaggataatactctcaacctttgtcatgtgagagctgttggtccctttattt

SEQ ID NO: 260288 - DNA, 435 bp, Glycine max
  unsure (1)..(435): unsure at all n locations
agctnttcaaatgggtaaaaggctcacattcactttcttctacatcatattcaaacttgtccaaataaataataaagtcatctcgactcaaagaaagtcatataagtctcatacaattaatatagaacctatatcctaatgtcacatcctatcagagcgtggtgttcctgtgtcctctagcatgaggttcttcatagtcatccacctattcatctgctcccccgaacacaaagttcaagatcatcacaggatccaaacacaaacagcaaaccgggagtgagttatcacattgctaactactagagagaaacaacacaacatatagtagccaaatacaatttacttagcatatctcacattatttcatcactttgtcattcatcaatcacacctntcaatcatcaatcattatacacaggaatcacacactccgat

SEQ ID NO: 260289 - DNA, 428 bp, Glycine max
  unsure (1)..(428): unsure at all n locations
agcttggttcgaaaagaaaggtgagcatattgctcatgtgtgtttngaatcaaatttaactgaagttccccataatactaggtggattgattctggatgtacaactcatgtttctaatatgatgcaaggattccttacaacccgaaccattaacccaaatgagaagtttgtctttatagggaatagaaagttccagtggaagctgttgggacttatcgtttaatccctgacactggatttcatttatacttattagatactttntatgtacctagtatttctagaaatttagtatctttgtctaaacttgatgttgctggatactctcttaggtttgggaaatggttgtttagttcgtataagcgtacttgtatgattggatttgtacactctatgatggttatataaatcaaatcttgataattata

SEQ ID NO: 260290 - DNA, 427 bp, Glycine max
agcttgaaattgaataacggatgctccctataaattcaaaggggcataacttttcactcgaatgccagatttaggaacaaaatatatagagacgctcgaaattgaacaacagatgctctctagaaatttaaatggtaaaaatttttcactcggatgttagattcaggcacataatatatcgagacgtttgaaattgaacactaaagctctggtccaattcaaacggccataacttttaacatgggtgtatgattgaggcccatgatgtatcgagatgatagaaattgaataacggatgctctcatgaaattcaaatggtcacaagttttcactcgtatgtcagaatcaggaacaaaatatatagagacactcgaaattgaacacggaagctctggtccaaatcatatggcctaaacttttgacatgc

SEQ ID NO: 260291 - DNA, 402 bp, Glycine max
  unsure (1)..(402): unsure at all n locations
agctntgcttctacatgttctactatatgaaaactagaagatgcctcagaagattgaggttcttcctctggaattgctgctgcctctaagtcttgcaaaaatatgctaattctcccttgattatgccttctacaagtggcgttaatatccaaatcaatgggaatcaaatcacctgcggaagatctgctttgcatacaagaacagtacaacagttatccagttcaaaagaacaataaatatactaaactactatgtgatgtaagctccattggagcttgtaggcctaggatcttcttcatcaatggattcctttgcttcttgaagaataatggcagcggaatggagaaggaagaagagaggagacgccacttcaaggagaagatgagtctagaaaaagctcac

SEQ ID NO: 260292 - DNA, 399 bp, Glycine max
  unsure (1)..(399): unsure at all n locations
agcttgaagcctcaaagacttgtcttttggtcttagatttggnttaatgattttacaatgccaaacaagttttatagatgtggcatttgtattgaatgttttagtctaggcgtgatgtttgatattgtttaagtttgcttatatccatgctcagtgtgaatcgaatatatcaaaaaatggattaatctctaagtttcgtagaagcaatgagttcaaaacaatgtaatccattacaaggttttggaatgaattacaaagtgttagaacaaacatcaaaactctcttctacttgaaatatggcaagaagtgacaaactaatcgattaccagttttgtaatcgattacagaagctaattttaaagaagaaagaccctatagcttaagataatcgattacaat

SEQ ID NO: 260293 - DNA, 398 bp, Glycine max
  unsure (1)..(398): unsure at all n locations
agcttctatataagccgaaccatnttatttataaacacaagttgagngttattcagaaaattagagtttatctcttttatcttaatgagagtgattctcctaaattcttgagtgattcaagaacaccctggctgtatcaaaggactttcacaacctttgtgtgtcgccctcgctggaaagagtgattctttccttccaatcatctccacccttgttctttcaaaccacaattccagaaaatccacctctgcccaaaattatctcgtgaaaggtctcgttatgaaattcaatttaggctctaaaatcacttaatcttagtgtgtaaaatgggaattatggtcacgatataattttggccgaccaaatgataagatgcaatttttctataaataaaatgg

SEQ ID NO: 260294 - DNA, 334 bp, Glycine max
  unsure (1)..(334): unsure at all n locations
agcttcccaccacccatggggctcatcattttcatgttggtctcaaccctcatcagaagtgtcttcttaggggtacaataagtagaacccccacccccattttgatacccatcactgaaattcacaaaagcacccttcccgtgaatcccatgtgcgaaattcttcacaacctgaatcccattatcactcaccaagaaactgttgtccaaagcccccaacgcaaggctttgaattccacccgtggaggcttcttcgaactcctctttttagtttaggtttgacctaaccggagtggggctctggtgaaaacttcctctgcgtnctcccacatgga

SEQ ID NO: 260295 - DNA, 271 bp, Glycine max
aagctccaatttaacttatcggtgattccatacttgtactcaattagattcagtcacatcaatagtagcgctcagttataacatccttatatggataaaagttgaatttaaattcgaactccatatatcatatatgcatgtagcggccaaaagtgtcaaacgtaattaaatttgcttggattttatatgtcttatgggtcgacggggtataacattaagatacttagattgatttgaattaatcattaaataattccaaagaggcattttt

SEQ ID NO: 260296 - DNA, 392 bp, Glycine max
agcttgtaatcgattacacacatattgttattattaccagaggagattttcagaaaatattctcaacagtcacatctttttgtgtggttcttgaatggctatcaaagacctatatatatgtgacttgagacacgaatttgataagagtttttcagaacaaaaaggtcttatcctcttagaaagcaaaataattttatcctcttacaaattccttggccaaaactcttgtgattcaataaggaattatttgagtgctcaaattgttcaatctatctctttcaagagagatttcttcttttcttcttcttcattctaaaaagggattaagagaccgagggtctcttggtgtgaaagaattctaacacaaaggaaggattgtccttgtgtgttta

SEQ ID NO: 260297 - DNA, 305 bp, Glycine max
agctgcgccactcgcttttttttgttgttcccaacatcggaggccaagtggtctatgcatagcacccctgtactaatgcccccttctattttggatctttccgaactacaaattttaatttcgtacaactatttccttccaaggacaacctacgatatgttttaccttttacttcgagaattcggaactccgatgccaaacacttttcatttcgccattacaaattacaatagcagccgcttctttatctgaactctagattatttttctgtttattaatatccgctaaatggtataagtgccct

SEQ ID NO: 260298 - DNA, 428 bp, Glycine max
  unsure (1)..(428): unsure at all n locations
agcttgaaggtcctacaacaaataattatgaggatgaccatgttaaaacatgaagaaaaagttaaaagccgtttaagaatatatatatatatatattaaaaaattaaaagacattttcttccatacctattcctcatgaatgaataaaaaattcaactttgaggaggaattctaatgtaagctccattggaacttgtaggcctaggatcttcttcatcaatagatccctttgcttcttggaagatgaatggcagtggatatgaaaaggaagagagagaggagacgccacttcaaggagaagatgagtctagaagaagctcaccaccatagaaggccatggataagagcttggaggaagaaagagatgaatgaagggagtgggagagaagaacacgatattntctactctaaaagagctctgagatctg

SEQ ID NO: 260299 - DNA, 366 bp, Glycine max
  unsure (1)..(366): unsure at all n locations
agctntaagaacatgatatggaacttatttatcttcatcaacatgaagagaatgacaaacaaaaaggaattgctctcagagcctcatcattttctattcaagaagaaagtgacaaagaggacttgtatgaaataaaacaaaatgatgatttcacatattttgcgaaaatattcaataaatttctgagaaataaaggaaatcaaaggatattaaatagcgatccaaagaagatatgagaaaattccttctttgccccaaaggatatcaatgatttgcctaaagaatattgtaaactcgccaaattaggttcatattctaagaaaactatctcaaggttataaaagagaatttgaaatttgaaattta

SEQ ID NO: 260300 - DNA, 398 bp, Glycine max
agcttgcctaacaaccttattgtctcagttctttatagctgtacccaacacacttgtttgagctccgcgagaagtgaattctcatgctgagaacagtcaaaacatttaagctggaacatctataaaaatattagccttttagcatggtcaggctattatatacccaatttagggatgtcacctaacatgagtgaactgaaattacagtagtgtgctgcttatagaattttgaagttgttaaagggggaagcataacttggccaaaaattttcctttaccttaaatataggaatgtgtttatgtggtttctcatatccccattcagattttcttatgttaaagatacttatatttacccgtgtatgatataaatttttctaatttcccatgattatttt

SEQ ID NO: 260301 - DNA, 410 bp, Glycine max
agcttctcccccaattttctgtatatagtgggagaagtgaagagaaaaagggttcagccccttatgcacttctctctctttcgaattttcttggaaaaattgtttccgtgaagaaaatctaagccgaggcgcttccgaaacgtttccgtaaggaatttcgcgaaggtttcgaccgttcttcgacgttcttcattcgtttttcatcgttcttcgatcttcaacgggtaagtacctcgaaccaagcttttcgattcattctatgtactcgtggaggtccacattgtgtttcgtgtattattattctggattcatttactttttataccccattttgacgtgcttaagccattttatttaagtcatttctcgcttaacctaaaaataaaataaatatccaccgatcgtttgaa

SEQ ID NO: 260302 - DNA, 384 bp, Glycine max
  unsure (1)..(384): unsure at all n locations
agcttgagatgaggaagtgtagaagggtaaaacttcctgcttttattcgtcgaccatagagtggtacctggagatatgtcgcgggggtcaagaaaccttggggacgtcaggtggggtggtattgcccaaaaccaagctagaccaatcccgacccaacccgggcatattcagtcagtgagaacctgtgatgtacctaagcaggcaagctcctggcagtcaacagataaaaggaacatagaccacacagcanggaggcttgtgtggtggctggccacctgtgaatcttgtgtgatatatgggttatggcctctggtaatcgattactaacggtgggtaatcgattacaatgctttaaaatgaagacaggaggctaagatggtctct

SEQ ID NO: 260303 - DNA, 426 bp, Glycine max
  unsure (1)..(426): unsure at all n locations
agcttatcaatctcatccagaagaattagagcaacattcaacgacatctagttgaagttacctattttaatcttttcgtcaatctcaaagtaacacaagcacctcttacaacacttgaaatcaacatcaatatctgtctgcaataattgagcattaattcatgactcaatatttatatatttttctgcaaacactctttaattgaagattactaacatatctcaatgagttttaatcatcaataaaaaggaccaaacatttaatgctactaaatattatgaaattttatttactttattcttattaccatttatgaattttcttataagtacatttattgtatatctttgtttaaggataagaacaaacaaatgttaatacaataaatgtcctcagaaaaaaaattcatcntttttattgataatt

SEQ ID NO: 260304 - DNA, 310 bp, Glycine max
ctcacaagactctcattattaagttacaacaagtggtacacatgcttctatttatagactacgtagcttccttgaaaactttcttgaaaaacattctttgaaagcttcttttaaaaacttccttgaaaagctagagcttagctacacacacccctctcaataactaagctcaacctccttgagaagccttccttaagaagaatcctaaagaagcttgagcttagctacacatacctctctaatagctaagctcacctccttgagatgagaagctagagcttagctacacacccccataatagctaagctc

SEQ ID NO: 260305 - DNA, 368 bp, Glycine max
  unsure (1)..(368): unsure at all n locations
agcttacccagcatcatactgggtctcaattctcttgaatacctaagtctttcttgctgttcaaaaatgtacaatatagttatttgatgaaccaagggatgatgagctttcagagaagctttgtatacgtgaagctcctactcaatcccaatcaacatcctccattntgaaaaaggttgttttcgaggcctttacatttggtgtatgccaaagcacataaagattcagttagtcgtttattgttttccttgcctattttctcctgtatgcgtgaacttgatctaagtttttgaaatttacatcaaatccctggtgctnttggaaatttacattgcttagaatgcctagatttaaagggagacaacttt

SEQ ID NO: 260306 - DNA, 306 bp, Glycine max
agcttgcctccattatgacagagagagcctgtgcttgcaatagtacctgatcctgcccggaggactaccacattgactgtaagagagtgtttcgccaccatccctgcgaaacatcaaagatggttttataagaagctaccttcagctcgggactaccatgaatctgtatatatgacggaatgcgtgccatcgagggtgaccaatgccatctcctattgcgcaagcctctccaccaataagccttgcgtgttattccattgcttatccttcataagatggtgttcccaacgtacagatctcggtcag

SEQ ID NO: 260307 - DNA, 398 bp, Glycine max
agcttattataaggaatagaatttacaatgtaagggggcagagaactcttaagctctcagaacctagagtacaatgctcattatgaaacagacaataactaactgtctaaccaaaaatggatacaatagaaaaatagttaacggttacaattacaagacaacacatgtttatgaaccatcagattagaggctcccttctacatgactagacattccactatattatagaagattgaacgaccaatatataagacaagagtactcatctagatgaccaacacaatcttcaaccctatctctattgtccatcatccaacaatcaacatgatttatctcaatcaccaagactacgtccagttcttggcgaaccatcaagttccaccaacatgggttaacta

SEQ ID NO: 260308 - DNA, 397 bp, Glycine max
agcttcattaaaaaccctaaaccttgtttttcctctcattttcatatcatattctaggggagttaagagcagacaaacttcttcttcttcttgctcttgagggttgttctataaacctagaagcctataagtgttatggttagccagttcacccttcactctagccttgttcattcttcttcatcactcgaatcttcttctctcgttcttgagttttgatgaagcttgtttttgacttaagagaacttcattcttggatgtatccttctctttcacattgagactactagaggctgggtggggtggggagtatatttctataatcatctatttccattctacgttatgggtgatcatataacatatgtttatctctatttgtatctataaaaaaaac

SEQ ID NO: 260309 - DNA, 298 bp, Glycine max
agcttaacgaaacagaactccaccgccgctatcttatccactacacctgaccatagcctagtgagaaattattaccaaccccaaatctgcccatacccacaccaaaccaaccctaccccctaaaatcctttgcaaacccctcacctatgaggagatgactgtatggcgcgtctggggactttgctatcactgtgatgactaatggattactaacgcgccatgtaaacctaccaagcatgtcctaaggccatacaaatagattcaaagctgtgttgcgagttctggggcccatggatta

SEQ ID NO: 260310 - DNA, 428 bp, Glycine max
agctttctatcaagatctgcacttactttctcctcccatgcaagggggggtcttctccatgttcatacaccaaattgttttctttaatcatttgtacattaatttatatgaatcttgtataaaaaaatcaagtcgaatagggttgataatccaaacttacattccactaatctaacttgggcaattacctaacacacctattttttgcttagtgcacccccaaaaattgtaaagtctccatcttacccttttcatctcggtcagtcttttcttctatccatcttactcttcatcacgacaccatcatcaaacataacatgccctatgagagcatcaacattggacttaatagaagcgcaaaaggaagtatttatgtctcaacacacacggtgagaacacgtgacccatgtttgttttcggcatgcctc

SEQ ID NO: 260311 - DNA, 337 bp, Glycine max
agcttcttatccaaggcactctcttggtggtgaagctcctccttccatggcttattccctagtggatggtgcctcatctcacctcttctcccttatcttccactttgtctccatgattgaaaatcaccattgaaagacctccatgaagctcaaagatctagcctccatagaaccttctcaagccagctaccattaagtggtatcagagcacaagagcttcaagtaggtgttccttaaacctccattaatttttagatttaccttctcctccattggtggttcttcatttttctccatgtatctcctcacatgtcttgtgataaatgtcattaacatg

SEQ ID NO: 260312 - DNA, 401 bp, Glycine max
agcttgtgaaattgtatgtttggatgatttaaacatacccattctgttttacggtgtttgtgatgatgtttgtgatgattatatgctgaaattgctgatggaaatctgttatagacgaaaggttgaactaacctaaggttagaaagtgagaatgtgatgttatgagtggaaaaagagtgagactttgagagttggaaggctaagtctgaattctgtggtgaatggaggttaaagtgagttaatactatcttgaaatgtcctctacgacttgggagaaagcttggactgtgctatataaaaatcaaatgatcctaatgaacaacgagcttttctatggcaagattgggtgttgaggagactacatttgattccgtggaatttatgtgtacattccatttgag

SEQ ID NO: 260313 - DNA, 393 bp, Glycine max
acccggatcttaagtcaccgcggctgcaacttcatgcagtatttcttaatttgttcacacaggaacatgctgctgtagcaggtctaaacttcagtgaggactgcacacctcatatgtgaacgccatacttggatggaataagtagcaaactacttgtacttatttagggatattaaacacatggtcattcttaagagaaaccgtaatatggtcatttttctgaatgatcatactgatcgaattattttttcacctaattttggatattctatacatttatcaaaatggtaagcagatggtgcaagacagagccttatctgctgtggcatcaatacgtgattatactcacgtattttgtgaacttctcagcacatttgctgagatttaccattt

SEQ ID NO: 260314 - DNA, 390 bp, Glycine max
agctttagcagcggacctgtctaacatggtgttataacgaggacataacataacctctgtcccagctttctgtttcttcgacataaatatgaccaatgattcccctgtaggtggaaaaattgactcttcttcctttttgaactctttcaaggtttgattgacctccttttcaaatagaggagtgtagatgcaattggctctgatgttttgatgatgatcatgatgatgtgttgcaattgatgcaaatgggcttttcaagattaaaattgaagacaatacttcaagattacaagtcacaacatcaagatgatcactagaatattatgaagggaattcctaattgaattagcaaaggtttggccaagtgatttatattaaaaagtgtttctc

SEQ ID NO: 260315 - DNA, 273 bp, Glycine max
agctttcaacaaatttaaactataattttttgccgacacaaatggtaggaggagacccgcaaaatttcgagacgatcgaaagtgaattcttgagctctgaactcatgcgaaggactattactcggtgctcggatggcggattgagtcccgtcatctattgcgacgtttcaaattgaaatatgagacctttagcttaatcaaacgacgataacgttgtacaccgatgggaagaagtagaccaggatatattgacaccctcgaaattgaatccga

SEQ ID NO: 260316 - DNA, 187 bp, Glycine max
ggacaaacacgaggcactttgattttttaaagggacggggcggggaagacaacacaccacaaaaacaaaccacccccggcacacacgacacgctcacgaccaactgaactaacccgggccacaaccgagcccaatcaggatatacacgagacagcagaaaacggcagcaaactccaacaaaccaaca

SEQ ID NO: 260317 - DNA, 361 bp, Glycine max
agcttttcgtataaagggggttgttgatgcttaatataacaattaaatcaatgtgaatgggagttccttgcataactttgggtttggttgagtttcatagttctatagagtgttactaatattttgtagtgaaaaattaagatttattttacattaaaaaatatataataataataaactaaaaaataaataaaaatttgtatactcaaatgtgggaatgaaaaaaattatttaaaagtgtatccagctaaaatcaatctttgtcatcaactttttaataataaatgtctaaagaacaaacattctttttactttttcatctaaaattaagcttatttgactttttttttaatttatttct

SEQ ID NO: 260318 - DNA, 379 bp, Glycine max
  unsure (1)..(379): unsure at all n locations
cccccaagtcaccgcagctgcaactaatgtgcaaacaaattttnntgtatatctttaacccgactctctgtgggagttatctaatttcaaaattcaaagaaagatttgatgttgtgcttgtagcagctgtctgcatttgcattagtttctccttttgtgggatttcacttcctcagtgtacagtgtgtctgcatgtagggcaattatccaaatgacataagctgacaattttgaacaataactttcttcagctctatctccatgtatgtcttcatgtctacatgaggttcttattcacaagcacaatttgttgaaaatagcagtaatgcttcaaaactgattttgacttgctcaatttttctgcttatgttctaaatac

SEQ ID NO: 260319 - DNA, 350 bp, Glycine max
  unsure (1)..(350): unsure at all n locations
agcttatatttggacgcaatttcttttttatggaagncaaacgagcagctttcaatttcatgagaaaattaaagcccaacatacaatattcgttttttgtccgttcatttctttggtcaaacatctgggatgtattcttttttagtatatgataatgacactttttttctgtcactaggtacattcataaacactgtctaatcaagttgggcaaacaaccaaggtaaacacattgggacaaaattgaattggtgcgtctgtgatatggagactcgtggcacgaaagtgagatacaggatcagggactatattcatagatgtgcaagagtattggatgaccttcctaccgc

SEQ ID NO: 260320 - DNA, 307 bp, Glycine max
aaccaccgcagcaacaccatagaagcccaaaggtttatggcctaaatttttaaacaaggggaaaaccgagcacgagcaggaacgcaacggacgcggggagtaccgcgggagacacccagaggacggacaacgcaacatgcccgggccgacagagcacaggggggaggacagatgccaccaagacggaggcgcagaaagaaaaggaagggcaaccaaagcagacgcaaagacaccgttagagaacgacaaggggtggaaacgcaaggagcgacacacacgacggaggggacgccacgccagacgcaaa

SEQ ID NO: 260321 - DNA, 341 bp, Glycine max
  unsure (1)..(341): unsure at all n locations
agcttgngcggattatccataatgatcttttcatggnnagacaacccgcaagatgtagagggagggcactgacttggcaagaggacaccgaggaccacctcagagagttgctatgaatcgttcattgcccatatgcctttgatttccaaagactatctacctgaaagatatgaaaaaacgccttactaagattctaaagacctacatacggaaaagactttgttaaaacacattggatggtacatgcttggtgcaaccattagacgatacagtttgtcgccatggtgaacatataaaatgagagggaccatttgttgctgaccatatccaaaggagtggaa

SEQ ID NO: 260322 - DNA, 328 bp, Glycine max
ttgccaggggcatacgagttacgacgaattgtaaaacgaaacagcttagaatagttaattgcatctatcagtgtgcaatgaaaaaaaaataaaaataataggaaagacccaaatggagaaaaaggaaataatcctgttagcacttatccacaaatgatggagcaaagaaaaggaatgagaggaatcccatgactagcaccaagctcacggactacatctgtaattgagctggtatataaaaaataattgatgatattattatttttatgtaagttatgagaattattttgattctattctctctcatactctctcatttccaggataa

SEQ ID NO: 260323 - DNA, 347 bp, Glycine max
  unsure (1)..(347): unsure at all n locations
agcanacacatgtagattattttctaangccacannagaggggaatcgggtatccttacataagagatttcagatggactttaatcctaatcccacagccgacctttatacgagatctctacttaaccctttggtttaaagatctgccaaattttgctgagttctcacaaactccactgatatcacaccatgcatgaattacttccgaaccatgttgtgtttaacacccaattgtgtagaacttccattttacacttgactatattgctaatccaaagttgcctgactatcacacctgataaacattggaggtttatgtttgggcctcaattgaatcttattgatta

SEQ ID NO: 260324 - DNA, 349 bp, Glycine max
  unsure (1)..(349): unsure at all n locations
agcttttgnanggttggntatcattgaannggngntttgcttttgtcttgagtggttaagcattgattttagcttctgctcttgatggttaagccttgttgcttctgtcaagtggttaaactttgaggtatagtttatgcttcgtgtcagaccttaatttcgtctgggaatattgctcgatacaatattttgattcttgctagaagaattacgatatttggcaccagttacagtgtgaagcaaggaatcactcaatgttttgatcaagaaaacaaaaagatacaaaggaaaggggcaaaagggtcttttctggatttttctagacactagctcgcccaggctagcatct

SEQ ID NO: 260325 - DNA, 348 bp, Glycine max
agctttaatataatgaaacttttttttaacaaagctaagattcactcatttctcgcaagtttccttcatccattaaagttgatagcgctacacatggccgttactgtgaaaagagagatagtgggaactctaaacactttttgtagcatatcttcatagaactacaacttgccagtgtcgtcttgcgctcaaagttgactttaagtgtacaaatcaaatataacgttaacaacataagacaaaaggaatcaagaatattaagacaagacaatttaaatcttcccttttgtgcgttgtggcacgagttgcttattgaacctatggacgctactttctgatgattgcttt

SEQ ID NO: 260326 - DNA, 298 bp, Glycine max
tactatcattatcattctttctctgtcattgaggtgccacttgagctgccaaggctctccacatttgggcgtattcttcgaaagatctgagcccctttttgcacatgttctgttgttgcatcctatccggaaccatattaaaattgtactgatactgcctaaagaaggcaaccattaggtccttccaagagtggactcaataaggctccaagttagtgtaccaagtaacagctaccctaataagattttcttggaaggaaagtatcaacttctcctcatcttttgcgcttgcccccat

SEQ ID NO: 260327 - DNA, 304 bp, Glycine max
agacgcatcatcaagagatcagccaaggctattgagctagctatcaatggggaataacacacccaaatgattatgatgatggatggctcaaatttccacatagggaaactcatcactttcaaattgatctttcaaaactatcatgacatggtaaaaacaatcaaggatttcaagtcacaaaatgtcaagaacttttattttcaaaacaattacccatgtattgaacatatcctataattcaaagaaaaacatgcaaattcgtacttgcgcacaaaattgacccgaaattttaaactgaaaaatc

SEQ ID NO: 260328 - DNA, 181 bp, Glycine max
gggaaaaaaacgaacacaaaggcgggaaaagcgaggcaaccaaaaagcacccccagcaaccgacagaggacccaacaggagggcacccaaaaggcagaggcccaggaggcacagcgggcccacaaagacaaggagggaccaaaaccaacaaaaagcccaagagggagagaacccaaaacaa

SEQ ID NO: 260329 - DNA, 309 bp, Glycine max
tacccacaatctccattttgagtaatgtaatggcggctaagatctacacaaggaaaatatgtcaagttaccaccaaaaatccaaaattatctgcaattatcaatttagctcaatcatttgcctaagaccaaaactcaattaaaatgataaaataggggttaaagaaattctgattgagctaagaagaatagaaaaatactaaactacaaatgctcatttagtacccaaattttcaatttcatacataatttgttttgtcctcaatttttaagaattttctttactttgcttctttcttttttctttatt

SEQ ID NO: 260330 - DNA, 358 bp, Glycine max
agcttccacaacatccaagtaatatatcttttaaacagcacaagctatcacagccaagcaaaacagagcaaaggcagaaaactctgctcaaacaccaaccaaaatcacagcttttctcacttaaagaccccagtaacaattccttcgatccaattcgttaaccgttggatcgactccaaaattttactggaagtttatagtacataagcctacattgtgaccgttgggatctactagcaaacttccagaactcattctgtactactctttccacagcctaccacacacaagcatttttctgcacaaagccaaaattctgctggcacctatttaacagcaaaattctgcataagtgcag

SEQ ID NO: 260331 - DNA, 274 bp, Glycine max
aactgaagcctccccgatgaaaacctcataaaggtatagcacttattctcattatagcacatgggcattattatgaccatatgaaaatcggtgttactcctaccaaacttcaccttctggcttatgtatcaaattaatcccaacttacaagacttgaataacataactactctgtgtatataaatagtttttatatcagaagaataatataaacaacttaatcattgccgaaaaactcgaatagatattttaacaccatcatgaatcgttatgt

SEQ ID NO: 260332 - DNA, 355 bp, Glycine max
  unsure (1)..(355): unsure at all n locations
agctngnaagattatttggtactcgtcacangaggnactaggcggcgatcgggcgagggtacaagtcgactctccacgtccacaaatcacacataaatccaccatccccagttgcccaccttcaactgagctcacgtactcccacatagcccttatcctcgttcctctcaacaccgggtccccatcaatccctccaagcttccacaacatccaagcaattaaaaatccaaacatcatgaactatcaaaaccaagaaaacagggcagaggcaaaaaactctgcccaaaacacaaacaaataccacaactttccttactcaaatacctcagtaacattctcttcgatcctattcgtt

SEQ ID NO: 260333 - DNA, 350 bp, Glycine max
  unsure (1)..(350): unsure at all n locations
agcttttatngatttttcctatcnttggagngaggnnnagtaatttaggctacatcatagaacacaaaagcatgattgattagagaaacatctttatatacatcagcttgtttgttagaaagacccaacacttttacctagtgttgtcaatcttacttgcattttttactgtttttagcctagacttagtttaattctattctaaaccatcaattatcaatgtttctttcaacaattccttatttctgaatttaaccctgtcgaatactagttccctgagtttgatacttggattcattcgttttaattttaaatacttaacgatccggtgcactttctggtgaatcgaa

SEQ ID NO: 260334 - DNA, 346 bp, Glycine max
agctttgcggattttttcttctcctttgaaaggatcgaagtagatctgaaaagaggcaaatttaatcatcctgcttagacgaatgagaaaactggggcaaataaagagggtgaggatgagggagaaacccatgctgtgactgccattcctatacggccaagtttcccaccaaacccaacaatgtcattactcagtcaataacaaaccacctccttacccaccacccagttatccacaaaggccatccctaaatcaaccacaaagcctgtctaccgcacttccaatgacgaagaccacctttagcacaaaccataaaaaacaccaaccaagaaatgaattttgcagc

SEQ ID NO: 260335 - DNA, 198 bp, Glycine max
caagaaacgacaacaggaaaggtcggacaccatgaccgcctcaacaaccaaagacccggggccctcaaaggacaaggtgaccacccacatcccaacagggaaccaaacagagcgaaccggaagaaggctagtggcagaaacaaacagccaacacaacaaggggacgccagaagggagcagcacagaggaccagacccc

SEQ ID NO: 260336 - DNA, 365 bp, Glycine max
agcttgtcacatagaaggggaattaatggaattttgtgagattgaagagggatcaataagtggtgtagaggaagaggaacaatcaccagagccacacaagtcgaaggaatcgccctacaaaatgttggtgcagcggcaaggcctccgtaaagaatactatcattgatatgttctctattaaaaaagagggtaaaccccagcaactccttcgaaatcttatactttggttttgttgttggggaaaattaaaaatttcccaaaacggatgggtcacatgcaattttaaattactttttttagtggtggcttaataggttgtttataaaaaaaaatcttactttagtgtgtcacatgtaattttaaat

SEQ ID NO: 260337 - DNA, 360 bp, Glycine max
  unsure (1)..(360): unsure at all n locations
agcttgaaatngaacaacggattctcttgtttaattcaaatggtcataacttttcacacggatgtccgactcaggcttataatatatcgatacgctcgaaattaaacatcgaaaactctcgcgaaattcaaatggtcataaattttcatacggatgtccgattcgggcgcatcatatgtcgagaagcttgaaattgaacaacggaagctcttgagaaattcaaatggtcataacttttcacacggatgtccgattctggcatatcacatatcaagacactcgaaattgaacaatggaagctcttgagaatttcaaatggtcataacttttcacacggatgttagattaaggcgcatcaca

SEQ ID NO: 260338 - DNA, 334 bp, Glycine max
  unsure (1)..(334): unsure at all n locations
tgcaaactaaaagatttttcactnattgactttttttattaatttctctcggtcacttattaaaggatttaaatttcatggtagttattggatttctaatggaagtcccttcatggattgattttattatcttccatgaaatgatataagcatttttgagtttaaaaaaaggtaaattagtttggacatcccccgattattggtaatttttaattaaggtttttataaaaaaaatcaattggagtccctaaattatatttttttttctttaattagggcctttgtaaatatggtgactatgggcaatgaacaaattaattaaaaaaaacagaag

SEQ ID NO: 260339 - DNA, 351 bp, Glycine max
agcttgacaggagtaatccatttaatattttactgacagacggcaagcacctgagtggaaacctttttgcagagtgcacatctgggtacgtccaataaaaaacacatacactcttgctattgaaagaccaacacaggtttgaaaaggaaggcgccactggcgatactagactatcaacggctaagtgtaaagtctagcgggagtgctgccaaaatgatgaactgcataggtttactgggccaacagtgactagtcgagctaaagaaatctcatgtcgaaaggagaatactgcatgtatcccaaagaagggggttcaatattataaaaatctctgggcgataatatccctca

SEQ ID NO: 260340 - DNA, 355 bp, Glycine max
agctttcataagtgaaattatgttctaccatctccctaagagtcctctcacgagttggaggttgagccatgttctcagtatgaaaattagtagtcgaatgctcaaaatcagaatatttagaatcaccagcaacataatgctcaaaaatgcatagaacgatcaggatgcacaccattcctaactaatctatgaaaggttctatctatttcaggatcaaagggttgtaaatcacctggatttcccctagtcatgcactatatgccgcaaataatgtgttcttaaataagcaccagcggagggttaaaactacaactattagtcaaatgatatccaaatgagctgaaattttgtgaac

SEQ ID NO: 260341 - DNA, 352 bp, Glycine max
agctttttggtcttaaataatttggtgtttttccttactccaatattatattcaagctctgccacatgtccttatttgattggagcaaaaagggcccactttttttttttgactgtgacccatactcagtcacaaaagtgagaaaaatctgacctttgaaacgctaaaatcctgcctcggtttgcgtgtcgattctctgattccagtttctcgcgtttctctgcttccgccggggccagttttcgaaagcaagcaatatatatatcaaaacgctcagaataaaaccccgagcgtggttcagaggttggtttcgttaaattttaagtcccacgcaaaacgatgatttttaact

SEQ ID NO: 260342 - DNA, 356 bp, Glycine max
agctcgacacttttttgagttttctttgtttattcctaagagcacttcaataggtgtctttatagaacttgtcttttcttaatacacttaagcaaactcataaatagggattaattgaaaaggcttatgatttgtgtttagaaggcttgtaataattaaagcatcaagggttttggactcaacaaattttccataaaataagatgtaaaaacaattatcaaagagacattggagaacattcaccatacaaggatagagagcacatatgaactaatcaaactgtatggtacacatattgaaatcataagggactaaacaataaatatctaaacttcatataaccggttaaaattacc

SEQ ID NO: 260343 - DNA, 346 bp, Glycine max
agctttggagatcttgtttgttcattcgaaaggatctaaaggggcctcttaatgggaatattctacatcaccgggttaacctttgctgaccataagatgactgtaacacgaggcgctaataacaacgatggagatgcccatgtcctatccactgaagcaacgacaaccatacttgctatacaccctctcaatatcccatgtaccaatattcgtcgcaccaacataatgactctgccaacatctggtgttccccccgaccgactcctgtacaaacaagcatgcccaatgaatgacacagacctgcttaccacagcccacatgatccattggacacaactcccacacc

SEQ ID NO: 260344 - DNA, 296 bp, Glycine max
  unsure (1)..(296): unsure at all n locations
caagnggacgcgatatgtgaagatgatgttccaagtacttcggatttggtccgaccatgccctcctgatttcctgctgggaaattggcgagtggaggaactccccggcatttactcatcaagcataatgtgaacctttactgttttaaaagccctatagtcgggcctaggctttatagatttcattttgtaaaggctttgtgtcttttgtttttgaattataatacaaggatcctttctttatcctgttcctaatctctacccattctcattcatttgcatgtttctttctctttt

SEQ ID NO: 260345 - DNA, 328 bp, Glycine max
  unsure (1)..(328): unsure at all n locations
agcttttattacttgagtttttctggctnagggccaatacatgcgctaagcgcacttccaaggagctcaaaacagaacgatgttggcgcttagcgcatccttgcccgctaagcccacttagcgcatcatccacgctaagcccactgattaaggtgcaacttacaatgaagatgttgggcttagcgcaacgatgtgcgcttagctgaaccattcagccaatcaattaagggactctgtgcttagcgtgagcaagctcggcttaacgcgtgaaaagatggcgcttaccacaaggtctgcgcttaacggataagcaatctgaaaatttttc

SEQ ID NO: 260346 - DNA, 316 bp, Glycine max
aaaccttggcaagaaatcttcttctttcttgaccaattctgctttaaatcgctctgtttttttttttattggcccttgtattagcataagtttttccttaaccttctgaaaacctttttgagcttgaattaacttatttcaatcctgctctatagaagactctatttcaacaatataaattgtatgttgactatgtaattgatgagctttaaaggcattattgaagatattaaggaaagattccattttccttttgaatctcatcaaccaccaagttttgaaatttgaaaacctcattgattgattgttgaagttg

SEQ ID NO: 260347 - DNA, 360 bp, Glycine max
  unsure (1)..(360): unsure at all n locations
agcttcaattggagncccgatttttctgatttaaanggacancngattagtatgtaaacagcagtgtaaactgcttcaacccagaatgtgttaggtaagtcctattccttgagcatcgatctatccatctccataattgtgcgattctttctctcggacactccattttgttgaggagaatatgcgactgtaagtttgtcgctcaatgccttcatccttacaaaatctttcaaactcacgagaggtgtactctttgtcgcgatcacttcttagtatttttatccgttttccactttgattatcagcaagggccttgaactttttgaatactccaaagacttctgatttttcttttagaaa

SEQ ID NO: 260348 - DNA, 294 bp, Glycine max
  unsure (1)..(294): unsure at all n locations
acctgcggcatgcacgctttagttagcggaagcatttttctggtttcncagtgcttaaacccgggacaagaaagcacaatggttcgggcatacttgctcatgctatgatagactaaactaataacaccctgtctctatctagagcatcttaacctgatgttcaaacttcccggttgatagtggcctgaaagagagcaattccagggtcctcataaagccaactgctatacatatgtcaagaaccctgtctctttactgactttaataatttaaatccttggaaggtaacataat

SEQ ID NO: 260349 - DNA, 356 bp, Glycine max
gcctgctgcatgccatcttatggacaagctacaaatttttatttttttttttcgagcggacgggagtttctgccgcatatggaacttctcctttcgtgagtagggcttatgatgaacgtaatagctagtgtagctcggctattgactaagtatcgaaattttggacaaggttgagctcctttcatgttagggtctatatgacctagcccaccttacgctaagggtagagcatctacttataaggaagccaacttcaaaatctgatggctttcactcatttccaattaaagaccaaagtctaggcattcttggtctacaccttctaatacccaagatgattaggagaatactattga

SEQ ID NO: 260350 - DNA, 353 bp, Glycine max
  unsure (1)..(353): unsure at all n locations
agctngaccccttaagatagtatttagtgttctgncaaaggatttatgccagcaaattctataagaaatgagtcgccaagagtcactgagtcaggcattttaagatacaaacccttattcgtattgttagcactcttaatgcagcttacaataacttcatttgtcaactgagatgagtaagaagaatatcttcaaatcaattcctaggcttatagctgcaacataaagtccatctaaggattccattacagtggaaaaaaaagttaaggtctccttcaaacacccgaaaagagaatataacatatttaaaccagctcaatgtataggtaactaaagtcaaccatcacaacaat

SEQ ID NO: 260351 - DNA, 345 bp, Glycine max
agctaagcaaattcacgttttttttttaagacaaagggcattgcttagcttcgatccgggctgggcttgcgtgcctttagagtcaatgcacctattttaaataagccaattttagtagtgacattatgttaactacaagattcatttgactattaaaataacatggttaattcttatgtgtttgctcacatgtagtagttgtgcaataatatcttattataattagtaactaataattagattattgacatgaagaaaatagatctctattagatgtattgtaagatttggaccgtccaatatgatatatctagacgatataaaatactcataattgtgatgata

SEQ ID NO: 260352 - DNA, 350 bp, Glycine max
  unsure (1)..(350): unsure at all n locations
agcttgataggggagtngatnttagttcttatttncactnnggttattagttaattgattcaaggaaacttccaaagaaaaacgtccgattgattttttttattattttattcaaagatattttgattattttattattattttcaagatattttgattattttattattattttgctttttttggtttaaccgaagttacaacgtgaacgaccggttagattttgttttaatagtaattaaacgagatttcaacacaaatgatcagttgaaattcattttatcatttattaggcgagataacgacataaacgatcggttaaagctcgttaaaaatggaagaaaagaaat

SEQ ID NO: 260353 - DNA, 348 bp, Glycine max
  unsure (1)..(348): unsure at all n locations
aactttctcaaaagctaaatatttgtaagttagncntaccagcgggacattactcttaaagcaaaaatggcatataacctcctcccataaatacaaacaccaatgtaaatttagagcaagcttatgcgcatatttccttacatacgttctcttgcacaagacatttaaccgaaaaagtgcacccatatacaatcaaggcggcttcgttacctaaattatttacacgtactgccaaggtgtatttgttacttacatcacacacatctccttggctgaatttacatacatgcatactcaaagtattttggggtaccaaaaattgcacatgtgcacattttggtatttcta

SEQ ID NO: 260354 - DNA, 347 bp, Glycine max
agcttgaagcctcaaagactttttttttggtcttagttttggtttaatgattttacaatgccaaacaagttttatagatgtggcatttgtattgaatgttttagtctaggcgtgatgtttgatattgtttaagtttgcttatatccatgctcagtgtgaatcgaatatatcaaaaaatggattaatctctaagtttcgtagaagcaatgagttcaaaacaatgtaatccattacaaggttttggaatgaattacaaagtgttagaacaaacatcaaaactctcttctacttgaaatatggcaagaagtgacaaactaatcgattaccagttttgtaatcgattacag

SEQ ID NO: 260355 - DNA, 307 bp, Glycine max
catgttaacgtccaaactgaatttggatactaagccccatcctaggccatacagactttattggcttattgaaaatgaagaggctaaattgactcatcaggttgaggtatgtctcaccattggaagatacaatgatacagttctatgtgatgtggttccaatggaggcgacttatatactgttggagagaccatgggagtattacaccagatcagtgcatgatggtttcaccaacaagaattcttttcagcaccatgaccagaatattattcttaaacctctataccctatagaaatgtgagattga

SEQ ID NO: 260356 - DNA, 354 bp, Glycine max
ggcagcaagctttttgccttttatatgtcctttaaagaactcctttgcgtgcagacgatggatatgcccaaaggggcgaacgagcaagatgaatggagacgccacttcaagcataacatgaatctatatgaaattgaccaccatatgataccatggctaatagcttggatgtataagatgatgattgactggagaggattataagagaattgaatctcattgcctctaaagaagactgcactttgaaattgaattctctaatgatcaaagatgacaaattgcacactcaacacctctatttataccctatgtgtccacagaatttgggggaaatttgtatttccctctctattt

SEQ ID NO: 260357 - DNA, 356 bp, Glycine max
acccaggaaccttaaaccaccgcagcagcaacttctcccttttttgttataagggagaaggaaagaaaagggcagcccttagccccttcccctataaaaaacttgaaaaaatggtccggaaaaaaaactaaccgaggcgccaccgaaacgattccgtaaggaatcacgcgaaggcgtagaccggtcttcgacattcatcattcggaattcatcagccttacatcatcaacgggtaagtacctcgaaccaagctgttcgaatcattctatgtactcgggggggtccacattgcgcgtcgggtaattctatccagggtacattcacctttaatacccccattggacgcgcttaagcca

SEQ ID NO: 260358 - DNA, 341 bp, Glycine max
agcttctacttatgtggcaggtctggcttccttcactttcttgtctccaacgcgagctctgaccactgtttttccttcccgcgatgcttcttttcatgttcgcctgagtgggcttatagcctaaaccatacttcccacgatttccttgggtttttatcaggctagttatgccgccattgtctttgcctaaacccatcccgggttcataaccgttccccaacataactcgggccatcattaccgtcgcatcggacaggcaaggttgcccaaagagggagtccacggaggaaatgctgaccacctcaaaagactgaaaagcggtttctaacgattcttctgcg

SEQ ID NO: 260359 - DNA, 361 bp, Glycine max
agcttgcaataaaaggacacattcatgaagttttttccaatatgaccgagtaaccaattctaatacgacaaaaggaaagggaagttgttattctcccatatacaacacaacaaaactaagactggcaaataacaggctacaaaaagggctgggcaatgaagaacataacagtggtcattggccaacctaaaaaactaaccagactaactcatagttcggatatgaaattggaatggaaaagaaaattaacaaattacgaaaaataaaccaacagtcacacactcttgatcattactattccattccaagcacatgtgataccaaatgcaaaatccaaatggaaaattcaagaaatcaaaca

SEQ ID NO: 260360 - DNA, 304 bp, Glycine max
  unsure (1)..(304): unsure at all n locations
aagccccgagctgcaacttgctgttagaagtttctgattaggttctaanccaaagttctgaagattttgtggtaagatccgcatagacagactcgaatggagccgttgagagctgagatgatttggagtgattgtgagatcctagagtgaagaacatctaccagtatattttgaatcttatctgtcttcttgggtttaaaggaggtttcggactatggaaagataatcttgtggacttcctgtagtcctgatataattattctattatgtatgatgttggtgtcttggcttctgtttattccag

SEQ ID NO: 260361 - DNA, 358 bp, Glycine max
agctttttgattctgaaatctgtgctttgtttttttcctatgatccaggctctttagttagctcctgttccttttctgccagaagtttcaaggaaaaacaaagaaatgagacttggatttgcttcttggagattcatcccatgcaccctggttgcctttttggtaagttaaatcatatctttgttgactttaaactttctttttatctccattttacagatttgcaacttaggtcttactcaactgtttcttgaataactttgtttcaaatgattttggttcctgttgatctgagaacggttacttttaagagaaattaatcaatctctccatgatcctcccccttgatttttcaact

SEQ ID NO: 260362 - DNA, 268 bp, Glycine max
agggagggcgaactagggcaaacgggcacgctggacgtaacccgacaaacccgggagccaagacagtggcgggagccggcgaagaacaccggatacgcaaaacccaacaataccgcggacgaacaacccaaaccgggagaaactagcacgccaccatactgaaaacgcccgcaacgggcatgaacacagacaagaagccgacccaaacacggggaacgcggggcaccaaacgagtgatgaaggaccacagaccaaacaagaggggcac

SEQ ID NO: 260363 - DNA, 356 bp, Glycine max
agcttcattctgcacctgaaattttatgatgagatagttgcacaaaagagaaagcttcctaacaaaaattttcatgcaggtggaccttcttctagtaattctgacttacagcagcctcatatccctcttccattcccacatagagcaattccaaacaaaaagatggaagaagcggaaaaggagatcttggagaccttcaggaaagtagaggtgaacatacctctgctagatgccatcaatcaaattccaagatatgccaagtttctaaaggagttgtgcacccacaaaaggaagctcaaaggcaatgaacggattagcatgggcagaaatgtgtcaacattgataggtaaatttgt

SEQ ID NO: 260364 - DNA, 243 bp, Glycine max
aaaaaggcacaccaaggggaacagaacgtgaacagacaaccacaccggaaggaccgtataaacataccccaccagaagcacaaagaaaaaggcggctggaacagcaaaaggaggaaacgccacgagctaaggggcgccaaaggccatggcgaacccgaaagaaaccgcaacggaaaacggcgaaagcggaactataaaataaaggaaaggcatcaaagaaaaacccacaacaacaaaccgaac

SEQ ID NO: 260365 - DNA, 347 bp, Glycine max
  unsure (1)..(347): unsure at all n locations
agcttgcagatgctctanggatatttgctttttaacngcagagcaaggaggatcagaatagaatagtggacataacaatttggagtcaacaatagtggttcccataatttatctcaggatagtttctagaagatgaacatcatactagttaccctttcttttttttaatcttctgtctgcattatgccacttttttgtggtttactactgccactaaggcattttatacacaaatttggaggttactgcattttatttattctcttctttcagggaggttatatgaatctttctccggtcaataatagtggttgtacagatgataatgatattactattacttatta

SEQ ID NO: 260366 - DNA, 348 bp, Glycine max
  unsure (1)..(348): unsure at all n locations
agctttcgggctattccttcttccaaacattgccgngttcctgtctcggcccggatttaaggcgggctgcagcaccggctccgcttccctaaccgtattggaggcgatggccgnggctttatcctctatagttttctggagttttaacatgacctccgagatggaagccatttgatcttttaaggccgatagatcggccttcatctgttcctgcacgccctcttcattatccatttttctggatcgagtgttataggggtgccttggtgttttcttaattatgatgaaattcctaaagaaataaacaatggtgagtatgccaccaaaacatgaatatgcaaatgaatg

SEQ ID NO: 260367 - DNA, 345 bp, Glycine max
agcttatatatctcttgcttgtcgatcggattactcttcaagtaaaaattatccgatgttatagggcagttatttatattttctttcatgggtaattaagtacaacagctaaaaagagctgcactttccataattggctctctatcagttcccgtaattaaatattacatacataggtacggttgtattgaaagacttaattacgtaaatttattttatggtagcttaatattggagtatcttaaattaatcattaatgcatttatatttactaggaagaaataagatggatcttttgctaggggagaaataagatggatcttttgctaactgatattttaagaa

SEQ ID NO: 260368 - DNA, 350 bp, Glycine max
agcttttcaatcaatctttggttatctacattagggcaactacccccatcaataatcaaagaacatattttccccaagaccatgcacctagtatgaaaaatattctccctttgaatttcatctctatccttacacacactacccattagcctcctaaccataaaaaaatcaccttccaagggttgtacatcacattcactttcactttcactagaagaattagaagaagattcgatagtgatatccctattacctaacacaaccatagactttttgttaggacattgagaggcaatgtgaccctttcctaaacacttaaaacatttaatagaacttgttcttgaagaagt

SEQ ID NO: 260369 - DNA, 430 bp, Glycine max
tgcaagcttgtcctctgtgacgaagacaaaagtattatttccctttgagcttttcacaggcgtcaacgattctgtagaaggaagggtctttgttcggaggtgcccgtgaggtggagaacaacctcagtgtcggaggtggtggtgaagatggagacgttgtcctccaggttggttcagaggctcttatacttgacgaggttgccgttgtgggccacgcggacggagccgaagcggtagccggcgacgaagggctggacgttttttatcatggacagaccgacagtggagtactggacgtggccgatgaaggggctgccggggagttggttaaaacttcggagagaggcccatgccggtgatgggttggaggacgttgttgttgacggtgaccattccggtgccttcttggccgcggtgctggagggcatgt

SEQ ID NO: 260370 - DNA, 451 bp, Glycine max
  unsure (1)..(451): unsure at all n locations
agcttgtntggctttgtttataattaagttttgattaaattagaatagctctgaaatagtttaaatgtttgatttttcatctcgttttagtttattttggtgtaaaaataaatgaagaaagaatatagctggtgtgggacccaattcaagggtgaaatggccaaaattgaagcctggtgcgcgctaagcaaattgttcctactgccaaagatttaggctaagcatgaattgttggataagttgcctcaataacttaagagatggtgaattaaattttaaaattttccgagtaacaaattttaacccccttttaaattacatatgataggctcagaatgtagaagaaaaaataatcaatttaaaaatattcttttaaatgcgcaagatagagtaaactgcaataaaataattgagataaaggaagagagaattgcaaatttgtttttatcct

SEQ ID NO: 260371 - DNA, 450 bp, Glycine max
agcttgagctggatggtcactttccgaacttatattctctctgatatcgcaaatccagcgcctgcagtgttaaaaaaaaggtcacatgtttagatgaaaaataacacattttgcaggactattaaatggactaacaagaattatatctaacaaaaaaaagtgccaaattagatcaaataagaattagttcatatgtgatttgtaaagaattctcatcaccatgaaatagatatgatgttacttacgctgtatatcattaaactacaaaatttatattatatgtctcaatataattgaaaaaaataattaaatttctaacaaatatatgttaagatttgacttgtccataattatatttttattttaagcttttgtttaatttacttttgcttcaatggttatttcattagtctaccttaccacttctggaatattcttctgagatttctc

SEQ ID NO: 260372 - DNA, 450 bp, Glycine max
ttaagtcacctgaggcatgcaagcttgtagggttaaagtctcacgaatgttacgtgctcatgcaacaattgttagtcgtggctatacgagacatcttgccaaacaaagtcaagttagccataactcacctgtgctttttcttccatgctatatgtagcaaagtcattgatcctgtcaagtttgatgagttggaaaatgaggccgcaattatattgtgtcagttggagatgtatttcccccctgctttctatgacatcatgattcacttgattgtgcatctggtcagagaaatcaaatgttgtggtcctgtttatctattgtggatgtacccgcgtaagcgatacatgaagatcttaaaagggtatacaaagaatctatatcatccagaagcatctattgttgagaggtacatcgcagaagaagccacttgaatttgttcataatacattc

SEQ ID NO: 260373 - DNA, 399 bp, Glycine max
tcgtacctgagatccttagattcacctgttgcatgcaagcttgtggtgttatcaagatcatgccacatttagaagctaatcatccaatgataagatcatacgagggggcataagcatgcttacaaggggtgtgtgaatgcaaccctaaagcttatgttcgtgatttaatttttttctttttaattgggcttaaaccatagttattaaactcaactagattggccgatccaactagaaaccaaaccttttaccaatttgaccaatttgtaagatcaacagatacccaattcacttagtacaaacatcatgaattgggctcaaactagtaagaaccggtcaacttgtctagttttgattcatttatgcatgttgtatcatatgaagtgataaatataccac

SEQ ID NO: 260374 - DNA, 395 bp, Glycine max
  unsure (1)..(395): unsure at all n locations
atgatgaaagtgtgggatctagaaaccgaggtaactttcttgaaatgataaagctcttggtttcttataataaggaaataaatgaagttgtcttaatgtcccttaaaatgcaagatacacttcacccattatccaaaaaaatattctacatgtctttgctaagaaggtgaaatatgaaattcgttaagagattggtaatgcaaaatttngtttaattggtgatgaaactcgtgatgaatctaaaagagaacaaatgactctagttcttagatttgttgataataatgaatatgttaattaacgagtggttcttggatatgatacatgtgcaagatactacatcatccactcttaagcatgagatatgatcaatattgtctcatcataatctaaca

SEQ ID NO: 260375 - DNA, 414 bp, Glycine max
  unsure (1)..(414): unsure at all n locations
cacctgcggcatggcagcttataaatattttgatttaatattaattatctcgaacatgttataactcatttcattgatcgttgagtatccgtaactttatggtaaaagaatataatacataatatattatgaagagaaaaacctgctttatgagtgatatttccgctagaatctctatattaaattatcacaatccatatgaaaaaaacggcgaataaagcaacaaaacattcttatcaggaatttaaaagatagaaaaaacatttaaaaatatatttactgacattngccaggttgacaaataatttactccataaaaatacatttatctgagatgaaagatgaaattgtattgacctaattcaaataattattataacacctcataatttaatatataacatgatctctatt

SEQ ID NO: 260376 - DNA, 272 bp, Glycine max
  unsure (1)..(272): unsure at all n locations
agctngcctcatataggtccaggaaggataatgcggctgaagggactantttcgctcctgagtatgacagtcaccgctttaggagtgctgtacactatcagcgcttctaggccatcaagggatggtcatttctccgggagcgacgcgtccagctcagggacgacgagtataccgatttccaagaggaaataaggtgccggcggtggacatcactggttactcccatggccaagttcgatccagaaatagtccttgagttttatgccaatgct

SEQ ID NO: 260377 - DNA, 248 bp, Glycine max
tttgattctcttgaaacgaccttattattatgaaacaaggatctttacaaatttatcgttcatgcatgagcatctaccattccaagctcctctaatggacactagctcacctgttgccctaagaaactcacgaggatgaaaatctaaggatctaatgtgtcctttatggaacttcgaagtatgccggagctttcacctgatagatcccataccagtacataggatatttagatccacttatttattct

SEQ ID NO: 260378 - DNA, 287 bp, Glycine max
  unsure (1)..(287): unsure at all n locations
tagcttatcaagcaagcttccatcaagtggtatcagagcacaagagcttccagtaggtgctccttaaacctctattaattattagctntaccttctcctccattgttgtttcttcattttcctccatgtatatcctcacatgtcttgtgctaaatgttgttaacatgattctttaaaatttccaccgattaaactngctatagaaactagatttgatgttctatggttcaaatttcttgttttgaaccatgaattgtgttgagttaaagtcctttcagttttgattt

SEQ ID NO: 260379 - DNA, 217 bp, Glycine max
agcttatgagaccaaaacatgacaaagatcttttccaacaatctaattctcacactaatctagtatatcttggcctattctttatatagcgttatgattacccaattgattcaagaactaagggcaaccctgcatattcgcgtggtaccatggactattatataaaaatatttctgatcatcttcactaagacaaatacggatattggtgataatta

SEQ ID NO: 260380 - DNA, 412 bp, Glycine max
gctttcaacttagagataaacattaaatgttaatggtggtgtgttttaaacaatggttcatagatgggaccatgaatatatgtgtgtcacgtcccttgttcaattgttcacaatctcctcgtcatgagtttgtggcatataccatcactcaataatactctcattatcctttaccataggtaccacaaaatcttttatttatacaataaaccacaccctcattttaaaataatgatatgatgatgatgataatataaaagctttaattcattttgaattatttgttattttaaaaattaaaagtactcgttattttttttatccctgctgcccgaattctcataaaattagatatattaggtaaataaagtacaagattaattagttaaatatactacttcttacttttaaa

SEQ ID NO: 260381 - DNA, 454 bp, Glycine max
  unsure (1)..(454): unsure at all n locations
agctngacacaatgttgataagaagacaaacttcaattgcttcttgtttgtgacaactttgttttaatccaaatgattttttgcatgagaaataaattttgaaaaaaatatatgatgcacaactaacctggtagaatattgtctagaaattttcccaaattattataaagtgatatgataatatttagagtttttcttgtgaaaatactcttgcaggacaacaaaggaataataattatgaaaatagattcttgtaattttgtttggcttgagaaaaatatatgacatattattaaggttaaggaaactcgctattaaattttataaaattcagagctgtctaaatatatttttttaaaatttaaaaatagcatttaagaagaatttcagtgttaaaaattaaattggaaaaaacatttctgtaatgagttttggggaaccgaacattctatga

SEQ ID NO: 260382 - DNA, 428 bp, Glycine max
  unsure (1)..(428): unsure at all n locations
agctntggaaaatgttgttttcaccttcttgctaagccaatctgttggcttagcggatgctcgctaagcgcaacactcctgggctaagtgcgaggaagaatccagaagaagatgagttgtatagatttgctaagggcaccgcttcagttcattcgctaagtgagaaaggcgcgttaagccaaaaatcactaacatgcgttaagcagtccatacgtgcgctaagcacacgagcacaaacaaggccacctatttaagcctgaaatcagattttgtgaagaaagtttggactgggatttagagctttgcatgtctagggtttctagagagagaaaggtccaagttccagagagtttttagagattttgctgtgtgaagatctgtagagaccaaagctcgaagcaggagtcggtttgagagcttgagattaa

SEQ ID NO: 260383 - DNA, 488 bp, Glycine max
atccttaagtcacctgaggcatgcaagcttgaacatgatgaaactcgttaactcaatgacactaagattcactcaattcgctcaagtttcctttttccagtgtactaatgtttgaacccggcaagtgcactggattgtgcaagtagtttaaaacggtaagaatcgagtatcgaactctcgaggaacttgtgttacttcgtaaagctatattcagtgaataggtgtctagtatgaaaagagatgtgtcgactatgcacaagtatgtaaactaactattaaaaggaaaatcacgtgagtaatgatgtgtaaagacaagtagacaacaccttggtcttcctatttaggtgcctgatgttaaaaggatattctctacttaacaatgctcatgtgttctatggtgtctcctgaaatgctaaaccccgattcctcatgatagtctatcctaatcccgatcaatatcgtccttagattcctcttggtggactaaa

SEQ ID NO: 260384 - DNA, 460 bp, Glycine max
  unsure (1)..(460): unsure at all n locations
agcttgcgatgaanaaatgaatgcttatgattttgaaagagttgttgtgctcggacatgatgcactcacccacgcaggaagaaagcattttttttttttggattgatatgttttattttttttataattttttctgatgtatgcatgtctactataatcccacacatatctccaaaaaaaaataccatatcctacggaccagatttatttctcatggtaggggatttgcttcgatttcccaccctagaagccgctcaagttatatatgtaactcgtttattttggtgttaatataaggggaccaggcagaacaacagaagttggccaacactgttccaaaagaacacgtgggagtgagaaatcaaaaaccgtagccgcgcgaaacagacacaattgagcgttgggagagaccaggtggactggaccctgctcgttcgtatatttcaatgtcgtaaactac

SEQ ID NO: 260385 - DNA, 387 bp, Glycine max
agcttataagaacaaaatttcctcaatcatttccaaatatgcatgtgaattaggaagcatcaacaagaatcaagccaaggctattgtgcaagcaatcaatgggggcaaaacacaccaaattattatgatgatggatggctcaaattctcacaaaggtaaactcatcactttcaaattgagctttcaaaactatcatgacatgtagaggaaaatcaaggatttcaaatcacaaaatgtcaagagacttttattttcaaaacaattacccatttcttgaacatatcctataattcaaagaaaaacatgcaaagtcatacacgcacacacaattgacccacaatatttaactataaacccaacgaaactaacaacattaacaaattaaca

SEQ ID NO: 260386 - DNA, 443 bp, Glycine max
  unsure (1)..(443): unsure at all n locations
agctntaagttattttggagactaaaccttctccaatttgccttctatcccaacgtaaaatttcaagcaaacaaagcaccaaaaattccaatgcatgaatatatattcatgcagacataatagtttcgaaataaccatattttcacataacatccactatcaaagtgagaatctaacttccaggcacataatttcaaggattttcttaaacattcttagcatacaaaatcacaggatatagaagccaagaatatcaatcaatcatcatactcacaaatagttctatacaaaagataggatgagcttccctcaatgtgatgctaaaaataataacagcttgaaggaggaaagaatgaagaaattntagtctcccgaacaaaacttctggaccactacgtactatgaaccctcaacaaatcanaatccaggaacttgggaaacta

SEQ ID NO: 260387 - DNA, 293 bp, Glycine max
  unsure (1)..(293): unsure at all n locations
agcttgagatgatgtagtgttgaagggtgtatcttcctacttttattgttgaccacagagtggtacctggagatatgtcgcgagggtcacgagaccttggggacgtcaggtggggtgctattgcccaaaaccaagcttgaccaatcccgacccaacccgggcatagtcggtcagtgagaacctgtgatgtacctaagcaggcgagctccttgctgtccacagataaaaggaacaaagaccacaaagcanggaggcttgtggtagctggccaactgtgaattatgtgtgatata

SEQ ID NO: 260388 - DNA, 401 bp, Glycine max
agcttttcaaatattatagacccatcacatatcaaaaatttattagggaccaaatgccaaaaatgagtatttatgagagaccaaaaatatatttaaaccattatctaactataactcactatgtgataagtttattgacttttaaaataattattttaaagtaattcaaacaataatttatgattagttgacagtgtaaaattattttacatcatcaatacataagtattaaactctctctctctctctctctctgtgtaactctgtgtctcgacagatatatctacacatatatattctatctaagcgggcgatgagctgaaatgttttaatttccttaacatatctaaaggctcatttttaatgaataattgggaatcccttttttaagatatttatgt

SEQ ID NO: 260389 - DNA, 347 bp, Glycine max
tatttctcccaccccagagatcccttatttacttaaactgattgagaatgagtgagccatctttttgtttttgaacttccattcccaaaaaatgatcttaatcacccagatctttggaagaaaacacagaattcatttgacataccagggagtgaattaccctgatgttgttactagtgagaaaaatgccatctacgtacacccagatgtataccatcgaccttttgttattatataccaatagcgatggatcatatcttctagaagaacatttgaggctcaaaagagtagccctgagttcatcacaccacgtttcacgtgcctactttacgccaaggatggctttg

SEQ ID NO: 260390 - DNA, 217 bp, Glycine max
  unsure (1)..(217): unsure at all n locations
agctttgtgcggagcttctatggaggctttatctttgagcttcaatgaggtccttcaatggtgattttccaccatacagatgcagcggaaggcaaaggagaagaagagaggggaggcaccatccactatggaataaaccatggaagaaggagcttcaccaccaagaatgtgccttggataagaagctngaagaggatgctttaatggaggaaaataa

SEQ ID NO: 260391 - DNA, 429 bp, Glycine max
  unsure (1)..(429): unsure at all n locations
agcttagataccaccagcatcaaggaattagggcggttaatggaacctctccaaatgcaagctttccgcaagacttacggaaagatcttagagttgaccttagcagaggtatccatagaagccattgcatcactcacccaatactacgaccagcctttgagatgcttcacattcggagacttccaattagtaccaaccattgaagaatttgaggaaattctaggatgtcctctcggggaaagaaaaccatatctttcatccgggtgtctcccctctttgagcagaattgcaactgtggtctaggattcagcaagaggtttggaccgtataaaacagactcggaacggcataacgggcctaccacggnggtacctagaagacaaggcgaggggtatggccaatcaaggagattgggtcccgtttatggat

SEQ ID NO: 260392 - DNA, 477 bp, Glycine max
tcgtacctgagatcctctgattctacctgctgcatgcaacgctttgacggactataccaagctctatgatccagggacggagaaagatctatatataggcttgctaagggtagagagaggaaaactagagatttggatcaagtaaagtgtgttaaggatgaagaaggcaaagtcttagtgcatgaaaaagatatcaaggaaaggtgaaaggcgtatttccacaacttatttaatgatggatatggatatgactctagcagtctagacacaagagaagaggaccggaactataagtactatcgtcggattcagaaacaggaagtaaaggaagcgttgaaaagaatgagtaatggtaaggcggtggggccagacaacatacctattgaagtgtggaaaactcttggagataaaggtcttgagtggctcaccgaactctttaacgaaattatgaggtcaaaacgcatgccggagaaatgg

SEQ ID NO: 260393 - DNA, 461 bp, Glycine max
  unsure (1)..(461): unsure at all n locations
agctgttaaagaacttatanaaaatcaagatcaagtttgttcgcatatcgttcgcgtgtatgacatccactccacaaggtttgaagtagaggagaccttcaatcctattacgcaacgtggcggacaaaagtgggcagttaacttgaatggtcattattgtcaacacggaaggtattttgtgcttcactatccatgttcacatattattgcagcttgtggttacgtgagcctgaactactaccaatatatagatgttgtttatacaaatgagcacatcttaaaaacttactccgcacaatgatggccacttgggaatgaagcgactattactccttctaatgacgcatggacacttatccctgacccgactacaattcgtgcgaaaggtcagccaaaatcaacaaggataaggaatgagatagatngattntgaaaatgagggtaccagtaaggacaaacat

SEQ ID NO: 260394 - DNA, 357 bp, Glycine max
agctttcaactaaaagaagtatctccaatgttgtggatacaagttattaacaactatttcgaaagtgcaaattaggttatgagagccttctttagggttctcaaagcgtattagaggcttcttttcaatggctactagatgtagttaagtctttacagaactgagtgaatgaactaacaatattagaaaattacaggacacaagaaatacctccattattatcagttaatggtacaagagtcttcaagtgcacatgcagtgcatacaataatcaaaatcaagacaagcacaaaacatgcaaaaagtgcacaaacatatacaataaaaaaaaacattaaaaaacccaaaaacagcctg

SEQ ID NO: 260395 - DNA, 328 bp, Glycine max
agcttctcccattcttgtcttttatcaactgtaacagaatccgaggttttctccaagtggtcatggtgtccttgaccaaggaaccacaactccatggaagcagaccacgaaggatagtttttccagttcagctttgcagtagtgatagttggagtcccggaaaacgaaaaaacaggtccagaggaggccatttaagagccaaacagcaaaccctaacacccaagagaggaagacactctagagcagaccaaatggcttgtcggaagcgggaggtgaagcctgaaacagacccaggaagtgacgacgaagctgccaagaccggaagtgg

SEQ ID NO: 260396 - DNA, 373 bp, Glycine max
  unsure (1)..(373): unsure at all n locations
gcttcaaacttttctcataatttctactccaaattgcaaaaggaagccattttcggagtcgtgaagcgcacctctacgttgtgggacttcgaatttcaggtttgggtggacttcttctcacattatatttcggggtattgggtttttgggagatatgatgggtacttttactaagttaatgccttatggtagttatttgtgaaggaatttgttgaaagcatgctaaacttgacatgtttgatgtgagccaaatttacccattatcgtttanggttttatgatgatgctctatgatgtttgtgtgctcgaatttgttgatagaaaactggtccagatgatggggacaggtaattatcggttaatgtgagaatga

SEQ ID NO: 260397 - DNA, 284 bp, Glycine max
tagcttctttgagaagcttccttgagaagctatagcttaactacacacatctctctaataactaagctcacctccttgagaagctttcttaagaaactaccttgagaagcttccttgagaagattcctaaagaagctagaacatcgctacacacacctctctaatagctaagctcacctccttgagatgagaagctagagcttaactacacacccgctataatagctaagctccccccctgcgaaaatacaagaaaataccacaaaagtccctacttccaagac

SEQ ID NO: 260398 - DNA, 171 bp, Glycine max
  unsure (1)..(171): unsure at all n locations
ttcacacaatttatttttctcaaacttgatgtttggaagaccaattactaagtcttttctagctaaatgatttagatgatgcgtgtntatgtgtgcaacccagcgatgccataaccatgaatcatcaatcttacttaccaaacaactaagctcatgatttgatgcatgtcc

SEQ ID NO: 260399 - DNA, 459 bp, Glycine max
  unsure (1)..(459): unsure at all n locations
acctgtggcatgcaagcttagagcaagtggcttggaaatatcgttatgatgaaaaagagtgtggagatcactaacaacactaataattttattcatacttttatctatttaattactgattgaagatacgtggtatgaaatcaatatgaatcaagaaataaattaatctccatttcaaaatcgggaagagactaaaaatactagtgtacattaacattattgttgctgtcaagttcccaagaaaccttcctaagaaaaccttaagcttaatagttaaagcctttaaaaaaattgaaattttaaggctaaagatgtgcttaatggattcatgaattagtaactcacttccagaattacaaaacatagcagtgaaaagtatgtcagaactctaaaccacattttaaagaatctactcagcngccacaagaaaggaacaagaaaacataattataaaaaccc

SEQ ID NO: 260400 - DNA, 479 bp, Glycine max
  unsure (1)..(479): unsure at all n locations
ggaccttaagtcacctgaggcatgcaagcttgtcgcctagctcgcccaggcgagttttgttgcttcctccataagcaacagacttctggaggaatcttctggagggcccaagtgggccttgttgctatttgcacccccctttttactaaatgcacccccttctatatttttttttgtaattctttttccataacgttacaaaactttacgaatttcgtaacaatacttattttccttccgcaagattacgaatccttacggattatgtatttactcttttttagctttcaaaggagttacggaaactcacggattgcgcaaaaacacctcttttcgatttccgccacattacggaatttcacggatcgcgcaagcctgcttcctttagatttctgagacgtctcgggacttcatttattgtgcaacaaaggacgccaagtatctcanagtggctatccaaaggttgcatgtcagcaagt

SEQ ID NO: 260401 - DNA, 484 bp, Glycine max
  unsure (1)..(484): unsure at all n locations
gatccttagatggacctcgctgcatgcaagcttaagctaaacgtgcctgcaaacgtatgttcatagcaaatgaatgtgttaagtgacaatgagaaactgatggacgatctgggggcaaatgtcacgccggctatctattacatgagtaaggaaaatacgctacaacaggccgtggggttgcccgatcagaaaacgcttaatatcattatggggaataaataaaaggtaattcatggatggttgaactatatccctgcttttcaaccatcctaaaaaagcatgaattgctcgctctgccctaagtggctgtgctattttagaaaaacttaatcctgagttaagcaaaaaaacataatcaataaaaatatatacgcaaaaaacattgattaagtgaatatatcatggaagaaaaatataaccggagtagtgtatggccaatctctacgacttgaaaaagttcgacttanatcttctcgtcatattt

SEQ ID NO: 260402 - DNA, 460 bp, Glycine max
  unsure (1)..(460): unsure at all n locations
agcttagcaatgaataatattattcttactttaataaagtantttatgtaccaatatgcctaggtaaacttgaaaaataattggacttactcctaagcgtggtgcagtttaaaatataaattgtcataataattattaaaaaattaatagttaagattgtaattaattttatattttgttatatgtgtatttaattttatcacaatttttaactattgatttttaattaatagttatatatatactttattatttaaagtacacctccttaatttagaggaatcaaagcccaactaatttagcactttgtcttatccaaaatacacaagctccaccactttatccattttattnttgggatactttgataatatttacattcattcaattattaagcataataattttattttcctataaataatataatataaaatataatatatttccttttcttttc

SEQ ID NO: 260403 - DNA, 462 bp, Glycine max
  unsure (1)..(462): unsure at all n locations
agcttaagagagtgaagaacctgtgatttttattcaagatgagtgtgattaccaggttcaggggtctgctttgaggctcacgttctatagttattgagagattgaaagagagtgaaaaagttatagagagaagaaggttcactggtgttgtggcctgtgggagataacgctcagaactgcatatttattgggtctaaagcgaacttacaggctcgctctcaggattcaacataggatcgttagccctaagtaccctaagctgctaatttattcactggtctattcctatcttaattcactctttgattcacaatgttgttcttatccattactagtaataataatattgtcttcattgtgttcacaatgatggaaaaatcaggcttaaaatcatgtgtttctctcgattccaatgtttctaattcctcgccaagacattttttcattatgatactnttaaat

SEQ ID NO: 260404 - DNA, 418 bp, Glycine max
ttaatgtttttattcaatacacgtctttctacatgctagaaaatcacttttgatggtgtttgaatcagagcatgtctatcatagcaaaatatgccctttgatgtagtttggctactccaaagagcttgaacttcatttattcttcatgagattctatagatcctacgagaattcttatgagacggtccttgcaaaataatctcaaacacagtattaaatgaaatcttaaatattatctttaagattgtaccagggcatgaattaaacctacttttgtatgaaactccatacacaagactatgatacatactatgatatcacacaagatgcaacgtttaatgtctatatttatttgcatctaatcacaataattaagggtctaattcatcttaagacacaaatgtctttgactaacaat

SEQ ID NO: 260405 - DNA, 413 bp, Glycine max
  unsure (1)..(413): unsure at all n locations
tttcctcactcttactatgacgatgaaagaggcataacatgtaggatctgttctgagatgcccatacaagacacaactcatattaagccactcaagcgagataggcatataagagacaaaacatctataagctgttcccccagcttcaagctttagccttcatgttatccatgttgctccctctatctctaacagggactacagganaaagttaacaataagtctacaatgtgataatggcaagatatggtacctgcatcaacttgctatctattaaaagtgtttccacataatcttgatgcaggtcaataagcacgctaaaacttctataacatagaattggagagagtttatcaatgtatgatgtgaacctgattatgagcggaatgtttgatcaggcttggagttctgat

SEQ ID NO: 260406 - DNA, 283 bp, Glycine max
  unsure (1)..(283): unsure at all n locations
tcacaaccaatctaactagaaacaaagtagcaaacaagtctatagttagatacacacacacccttgataagtttatactataaaaaccaagtcatatctaaattaaaccgcaccacaaaataaccaaaccttttaaacagattaataacccaaattctggtttcttataccagatcagtaatatgaaagttgaacagattnttaatccaatttggttataagttacaaccaaacccaaaacaatataagaataaaatacacatccaaccacaaatagtctatg

SEQ ID NO: 260407 - DNA, 272 bp, Glycine max
acctcggctgcagcttgagtgtttctttgaccttgtttttccttgaaatttccgcttcattgcaacccagatttttcttgtcgcgtccctctcgaaaatagtttcaaggacctcatgatctattgcttggaaaagataattctttacctttaagtccttcaacttctactcctagatcaatttgtgttgcgcctccggatgctttattccatttgccaacaccaatatctcattcccaatgagatcccaatattatttggaacagagaaaat

SEQ ID NO: 260408 - DNA, 442 bp, Glycine max
  unsure (1)..(442): unsure at all n locations
agctttgcgaaaagcttgctgctggagcttacccatcaactgccctagctcttttaaactggtgattcctaggctcttgaccttgacttgatagaacctctttttaagcgaaggcgtttgacttgatcctatgttttactaaagtgaaacaaaatttagtgcgaatcaaaactccgacacccatcatgggtggaacggatgaatgcatgaagaaatgcatatgacacaaatgcaatttatgaatacgggagcccgggaaattgtctccttcttatatacaacgtcttggggtagcaaagtgcccgacgtatatattttaataaggtggcacggaccctccgttggtttgtccaagagagggaatcaaaatanaacccgtgcatgatgcatatgcaaaaggcacaacacggggatgtacatagtaagacaatattcacaatca

SEQ ID NO: 260409 - DNA, 214 bp, Glycine max
tagcttgaagaggaagccgtcctgagagctttagatgagtttgtgagtgattgtgaagtcctacaggtggaggagacatccccactacttgtatttctacacactttcatctttctcttctctttgtgggaaaagaagctctccagttatggaaagctaaaatcctctgttggatcttccttgtggtacttgatgtagatatctttttatctat

SEQ ID NO: 260410 - DNA, 296 bp, Glycine max
  unsure (1)..(296): unsure at all n locations
aaattaacttaagagaattaaccaanagcttagaactgagaaaaaaatattcactgcaatgtaaaaatcgatacactttacttacagtaatatgagntaattattttttggtgtctctgtctctaaagcttaactcacaattaaccaatcaactttaataatctaaactggaaaattcccaaatttttaaaaaaaacaaaacttaacagtccccatccttttattatttaagaccggcaaaattcctaattccaaaaaattaaaatagcctacatttcttgaaaggaaggttattt

SEQ ID NO: 260411 - DNA, 478 bp, Glycine max
ggatccttgttcaccgtggctgcaagctgtcttacagcagagctccggcgttaagcctgaaacaaatcaacttactaaaaatgagggtggtagatcgacgatgcggttggcaagcctttcaaacttgtgtaagaactcattgactaagcctctttgggtgagtttgaatagtgcgccctttggatcatcataaaacgtgggagcgaaacgagtctccagcgcatggagtagtgagggccatgaagtgatcagaccgtttcgatgcatccactgaaactagcttagtgccggaccatccatgtaaaaagaggccacggtaatgcattcctcgtccggggtatggtggtagttgaagaattgggagatcttaaagatccaccccatggctatggatcatgcattgttttgatgatgtcgaaaagaaatcacttgattgccgtcatcaaaatgggggagaatgtgaatgtatgtatacatg

SEQ ID NO: 260412 - DNA, 452 bp, Glycine max
  unsure (1)..(452): unsure at all n locations
agcttaatgcttaactcttaagggggntnttttatttttccttttatttccataaaaatgggagtaataattttctttataattgtaagaagggtcttgttaaccattgcccttaggatattgactaatgaactaaaagaaaaaaatatttattgtaaaaattataggaaagcttaaaaatgatcatagacaacataatttttcgcctcccaataaaaacattttcactttaagtttcttattcaaagccttaagggcattgattaacatttgtcttataagaaacatgatcacttttacacgtattaatgactagcttccttctatactcttaatttattgggaagtctattgattagatgtcactcatttcccatgaaagtgagtgtatgtaatgagctattaataatataactcattctcattggttgaaaaaatatntnttgaattat

SEQ ID NO: 260413 - DNA, 444 bp, Glycine max
acttaatcaccgctgctgcaactgttggcttgtttataataatttttttaaattagaatatctttgaaatagtttaaatgtttgatttttcatctcgttttagtttattttggtgtaaaaataaatgaagaaagaatatagctggtgtgggacccaattcaagggtgaaatggccaaaattgaagcctggtgcgcgctaagcaaattgttcctactgccaaagatttaggctaagcatgaattgttggataagttgcctcaataacttaagagatggtgaattaaattttaaaattttccgagtaacaaattttaacccccttttaaattacatatgataggctcagaatgtagaagaaaaaataatcaatttaaaaatattcttttaaatgcgcaagatagagtaaactgcaataaaataattgagataaaggaagagagaat

SEQ ID NO: 260414 - DNA, 446 bp, Glycine max
agcttccacgtgaagtcgccagcagcatttttgtttgggcttccttgtgtctaatgcccgcaaagtcgccattcgaacttgcgttttgcatgcaaaatgcatgcagcccacgtagaaaagagcaccatgccggaaattgttccaaaaggaccccatttggggaataagtttgcaaaagggaaccattttgggaaatttgcctcccgatgctccccataagggatccaacagacatccggaatccggagtcggtccaagcgctccctgtacgacggcgtgcgaatgctcttcacggtcttctttgtcgcaatccacctgcacgcaagcggaaaagcctcgtcgtagtcttgatcagcggtggactccgcgaccgagggaaagtgctcgtaaatccaacactacagatgtaacattaaaattataaacattaataatgaaagtgtaac

SEQ ID NO: 260415 - DNA, 463 bp, Glycine max
accttacaccgagctgcagctgtgaaggctagaatgaacatgtatggcttggtttggttcaaggataaaaagggatgccccacattatttccatgatacaaatgcataaaaaaatgatgatttggaaactttatgcaaaactggtcatgcatgcacctatgtggacactcaagtgtcaaatttttatggtcatgtgatgctagggctcaggattcatttcctctattttagtcaacccaacgtttccaaaatatgttcttttatcaatttgtgcattcatccgagtccattttgggcgtatgggaaaatcttcacagcattcacccttcaggtgtatacacattttttcaaaaactagttatgatcagtgaacttttccaaagaaaagttggaagtcatctcttttcacaagcatgttggttcttcagcttgacaacttattttttctgtgttctccttcttt

SEQ ID NO: 260416 - DNA, 276 bp, Glycine max
  unsure (1)..(276): unsure at all n locations
tatatattctaaactnagagcaactgatgcaatctatttgattgagaagataatgtatactactcttataatgtggtgtacaactaaaaaaataatataatagaaaatagtgcttaagccattcaagtcaagtcattttgaatctcatcattagtatcatacatctatatgtgtcaaagagaaggagaaacatgcatggtaatgcataacacatcaaaacattataagaaaacatgctttctaaacccaaccaagggaaaaatgtgttcatatttc

SEQ ID NO: 260417 - DNA, 292 bp, Glycine max
gtaagactacgcttaactttatcagcattatcatcacaacatattcagaaaaccaaaaccccacaatctatccctggtgatgtagttatttagtcctgcttctatccaatcttgcttaacataaacaacattatcatcacagcattatcatcacaacacttttttatctcgcctcgctctcccgtcgaaaggtaggttgcggcagtatccatggccttgtaagcttattaggagacaattccaataattgtctcatttacgatgaaaatcaataaatcttcaggtccatcac

SEQ ID NO: 260418 - DNA, 330 bp, Glycine max
  unsure (1)..(330): unsure at all n locations
agctttgaaaagattttgataataaaacattatgcttacttggattgagatgaagatgtnaaataagagcaagaagaatgcaggagataacttgaaacacaggcatcaaaatgcacaaagcacagagtaagcacaagcacaaaggagagaatgctttgaagtgtaaagggaactgcatatggcaattctatttcattttancattttcgtttggcgcacttagcgcatagctgcgcttagcatgccaacgtgacgtttgagtttaaagctcatgtgcttagcgccacctctcgcgctaagcccaattcaataatttcaaattccagaaag

SEQ ID NO: 260419 - DNA, 372 bp, Glycine max
agcttgaactttttataaaaaataaatctttatctaattatttatcaaatatattattatcacaaaataatttcaattactttatgaataatatcgtaattaaattagttttattttttttatagtaaagattacaaatattattcccgagcgataatcctactcgagattattttgtgtgaaaaaaatcaattagaaacaataatatcatgaattaaacaattttagttttcatagaaccaaaaattatcatttacgaagacaatcatactcaaaattattgtggatagcaaagttctatttttattataaaataatttaaattacttattcaataatatcataaagtacattagttttaatttttttatg

SEQ ID NO: 260420 - DNA, 119 bp, Glycine max
  unsure (1)..(119): unsure at all n locations
gctgtcttaaattttgtggggcctaatgaanaaaaagaaaaagattcttttttggtttaaataaaggggttgccccttttttctattaatttatttaaacctatccccatgtcttcctt

SEQ ID NO: 260421 - DNA, 256 bp, Glycine max
ctcgacccgggacctctaagtcacctgcagcatgcttcttatgagaccaaaacatgacaaagaacgtttccaacaatctaattctcacactaatctagtatatcttgtcctattctttatatagctctatgattacccaattgattcaagaactaagggcaaccctgcatattcgcgtggtaccatggactattatataaaaatatttctgatcatcatcaataagaaaaatacagatattgttgataataattga

SEQ ID NO: 260422 - DNA, 445 bp, Glycine max
cagcttgagaaggttcatgacagatgcttactatatgtgaagtttgagaagaagcgattcttcagctggtttccttgctttggttgcttgccatgctgcaagttgttcaaagcacggtttcaaatccccgagttgagagtagaccacacaacagaatgtgttcttaggaacctaatagcctttgagcagtgtcactatcctgaggagccttacatttgcaactatgtttctctaattgactctcttattcacaccaaagatgatgcagagtttcttgttgagaaagaagctattgtccatggactgggaagtgatcaggaattggcgaatctggtcaacggtctttgcaaaaatgtggtgataaattcaacatgctaccaccaaattatggaagatgttaatggacactacaacaacaattggaaatgggcaatgggcacattga

SEQ ID NO: 260423 - DNA, 456 bp, Glycine max
agctttgacttgagtcatcaagagattatttttatgtgaccatgatatgagtttcaaatatcatccttaaacaatcgatcgtcaatcatctttgaatcatctatctttcaatctttgcaacatcatctctcaacatctttcaatcaatctttcaactctttctacagaattttctgagacatttctcttcatctttctaaaagattgtgatcaacactttctcttccaagaaaagatctttgttcaaaaacttgagcgattcatctttttcattctcttttccctttgccaaaagaacgaaggactaaccgcctcaattcttttgaggctctcttctcccttacaaaagattcagaggactaaccgcctgagaattctattgagacttcccttccccttaagcaaaagatttcaaaggactagccacctgagatatctgtggtgtcccctatacaa

SEQ ID NO: 260424 - DNA, 450 bp, Glycine max
  unsure (1)..(450): unsure at all n locations
agctngcccagagaaggagtccacggaggttatgcttaccacctcaaaagactggaaagcggtttctaatgactcctctacggcctccacataaggcatagaggatgggcagctcaccaagatgtcttcctcgcctgatatgatgaccagatgcccttccactacgaatttcaacttttggtggagtgtagagggaacaactcccactgagtggatccacggccgccccaacagacagctgtagggggggttaatatccattatttggaaggtaacttgacaggtgtgagggcctatctgtaccgggagatcgatctcccccctaacctctcggcgggtgccgtcgaaggcacgaaccaccattgaactcggctttaggtgggaagcattgaatggtaatttctccaaagtgctcttatgcatcacgtntaaactggaaccattatcgat

SEQ ID NO: 260425 - DNA, 462 bp, Glycine max
  unsure (1)..(462): unsure at all n locations
agcttgcagccattagaagagaaagaacttgtgactagaattatgaatcaaaatgttagtcagtttgtcagattgattgtgaaggaatgcattaactgtatctcggtgagagtgtgatcctaaaatttggagagaaacgactatcatttagtactgatttttgcatgaatctctgaagtatggattgaatgcatgaaattgaggatgatgaaggccatgtttgattgtgatagccacttagccaaaaagcttactacgtgcttgaatgatttatcccttgcacccagttttgagctgaatgattgaaccttaagcctatacaattttatctcctgctaccttatcttaggttgtaggagagcatcatccacagaaaagcttggttcaagacanaattgtcccaaatttgggggagttatatgtcaaaacaaatttgtcccaaatttgggggagacactgggt

SEQ ID NO: 260426 - DNA, 449 bp, Glycine max
agcttgcttgtggggcttctattgaggctttatctttgagcttcaatgaggacctttaatggtgattttccaccatggagatgcagtggaagacaaaggagaagaggtgagaggaagcgccatccactatggaataagccatggaagaaggagcttcaccaccaaaatgagccttggataaaaagattggaaggatggttcaatggaggaaaagaaagagggagagaaagagagaggagggagcatgaaattgaaggaataaaagagggagataagtggaactttgaagtatgtctcacaagactctcattcatcaaagttacaacaagtgttacacatgcttctatttatagactaggtggcttccttgagaaagcttcttgagaaaacttccttgagaagcttctttgagaaaacttccttgagaagctagagcttatctacacaca

SEQ ID NO: 260427 - DNA, 208 bp, Glycine max
aaaagaattccaacctagttgtgtaccatgaaaccaataatctgaagtccgtccaatttaatgagaaaagccctatttataccgcaagactctattatatcaaatactccagcaagaatggctaatgttgttaacaatctaagaagaaaagatggctaatttaccaaaattaatcttcgtaaagaatctaaacatacgcacaagtaac

SEQ ID NO: 260428 - DNA, 394 bp, Glycine max
  unsure (1)..(394): unsure at all n locations
agcttcggaggacttagctgagactatctgtcatattctgagtttattntgtaaaagctcgaaacaaagattcaagataaaaaccagcatttatttctccaaaaaatttgggtggcagaggagacaattgagccagcggctgggcttcagtttcacagatgatcttgggaagtaccgctcggtatcctcattccgcataacaaagtctctaccagcacgtttcagtgtattatttcgaaagtggatcagaggctctctgcctagaaatctcgccaactttcctctgcggggagaatcactctagccaaatcgattatccaggccctgccaaattatgcaatgcaatctgttgtccttcctaaatcggtgtgcaaagaaatggacaaaagtgcat

SEQ ID NO: 260429 - DNA, 335 bp, Glycine max
  unsure (1)..(335): unsure at all n locations
agcttagagcatattttatntatttgcgctattttgaggggcagtgttagaaaaaactgctttatatctgttgtaaatcttctaatggggaaagacagtaaagatgggactcgaagctcaaataatgaagctacgccacatatagtgctgaaaacttatgttgactcttgcagattcaaaatacctttctattgaagaaattgctgttcacgtttctgattattggcttgacgaaatgaaggacgataagttgctggttgataacttacaagtgtcaatttttgaagttccaactctggatattcccttaatgaagcttgttttggaattctgtt

SEQ ID NO: 260430 - DNA, 233 bp, Glycine max
gatgctcctctgttgaccaccatacagacctttgcccttctatgcaacaacctggagtaattgagcaggctgaagcttatgctgcaaacatttacaatagacctcttcaaccttaacagcaaaataaaccacaacagaacaagtatgacctctccaacaacaggtataatccccggtggaggaatcattccaaccttagatggtcgagtcctcacaacaacaacaacaacaat

SEQ ID NO: 260431 - DNA, 327 bp, Glycine max
atagttgaataacaaaaccacgctaaaaatatgggtgaacatattttatgcgagaacaagttctagcacattgtctccaatgaagaatataaatgttgtactttgtgacaaaaaaagaaaagaggcggagggagaacttgacaaaacctgcgggatggccaatctatcaatattgaggccacaaacaacgtcagatatgaagagttcgagattatacttacgaccccattggagaatatggaacacatattgagctccaccgatcagttttctcttaagaggctgtcccttgaattggcgcacaggatcatcatggaagaaagttcc

SEQ ID NO: 260432 - DNA, 157 bp, Glycine max
ccttatagacctctcatggagaggaggttgagccatgtcctcataatgttcaacatcagaatgctcagaatcagaatgctcaagattgcaatgcgcagaatcacgatgttcacaatcaccaataacagaatgcacagattctccaataatggaatgc

SEQ ID NO: 260433 - DNA, 189 bp, Glycine max
  unsure (1)..(189): unsure at all n locations
atcttctaaactttgtacaagaatgaagctctgataccacttgttagacaagtggccttagatatcttaagaaggggggngtgaattaagatatcacaaactattccctaattaaaagttctgatntaattttaacccaaatcccaagattccttcttaaatgaattcctaaatattattcaaattaaa

SEQ ID NO: 260434 - DNA, 455 bp, Glycine max
  unsure (1)..(455): unsure at all n locations
agctntacagcagaatttagtaatgaccctctatcctagaattaaaataacttaatgccattaacctagggaattaaaacaaacttaatggctgagtgtaactgaaattgtggcaaccaaaagtcacccccaacagccaacaagtcagccaccatttggtctcccaaaaggctgatgcctaggttgccaattgggcccttattacaacttgaactaaagcccttttagttgattaacccaaaacatatttttggtcagccaactttacaaggattgggccattatttagacaaactaaacactctaaaattgaaataaagtggtgtcatttagtcctcctccatttaggccatgatacaactcacaaccttggacttttctccttgaaacttgggcttgtattcaaatagtatggacaacacttgttgaagagcttccttggctttccttgctct

SEQ ID NO: 260435 - DNA, 450 bp, Glycine max
  unsure (1)..(450): unsure at all n locations
agcttganaagaataacaagatcaaaatgttcttttngctacgtgacatgggaagagaaattgttcgtcaaagttctctagaggaacctgagaagcgtagtcgattgtgggttcaccaagaagtgcttgatttgttgttagaacatactgtaagaactttctctacatattattttgaaacttttgatcatatgtgtttttatcatgatcacaaaactaaatttaaatcatcttgttctttttaagttttgctaatttttgtgggattcattgttcacaaaaataaatttgaatgattttgctcttttaatgtgatgcaatgttattagacccggatttattcagaccatgttgcttgcaaaccagtgttcgactgtctgaactaggcaaactggggaccatcgggttgatctggttgaaagacaagctgtaaaaaatgcttgaaaattg

SEQ ID NO: 260436 - DNA, 483 bp, Glycine max
  unsure (1)..(483): unsure at all n locations
atccttagttggacctgtggcatgcaagcttgaaaagaataacaagatcaaaatgctcattttgctacgtgacatgggaagagaaattgttcgtcaaagttctctagaggaacctgagaagcgtagtcgattgtgggttcaccaagaagtgcttgatttgttgttagaacatactgtaagaactttctctacatattattttgaaacttttgatcatatgtgtttttatcatgatcacaaaactaaatttaaatcatcttgttctttntaagttttgctaatttttgtgggattcattgttcacaaaaataaatttgaatgattttgctcttttaatgtgatgcaatgttattagacccggatttattcagaccatgttgcttgcaaaccagtgttcgactgtctgaactaggcaaactggggaccatcgggttgatctggttgaaagacaagctgtaaaaaatgcttgtaaattgagattag

SEQ ID NO: 260437 - DNA, 465 bp, Glycine max
  unsure (1)..(465): unsure at all n locations
agcttcaaaccacagcaacacaaaatctatgtgtccaaaaccccttttttaatggattttctaggtttgagaagtgaaattgagaatgaggtaaatttgaagcaaactctcacctcacacaagtctataacatcaatttaaacttgttcaaactggatttacgcctaaaatttcaccgaatcaaaatttgactcctcaacacccaaatttaccctagaaatggctctttgttcactttggtcatttgtttttctctctagcacagcctaacctttctcataagtcctaaatggcatgtcaagctaggattaactcattttaacctccatctaccacagagtccagatttaaccttccaactctccaagcctcactctgtttccactcataacaccacattctcactttctaaccctaggttaactctacccttcatctctaacagntttccataagcaatttcag

SEQ ID NO: 260438 - DNA, 185 bp, Glycine max
ctttgaggaggaacattcattctcttgctgaactcacctgggttaaacgaggctgaatcgctgagcccagtaactcaaccatattttttatagccccaccgccggctgaggatacttgagccgaacccgattggctgcgacataccctgaggtaaacgagcttagttgcttagctcccacaacta

SEQ ID NO: 260439 - DNA, 383 bp, Glycine max
agcttaacattctttgactggccttcaattgtttctctctctttgccgtctgcgccattgacaagttacagtctaacaatactaactctgaggaatattcctctttcattccgaatcttccgcatcctatcacgttaaacgcaacaccaccgaagatattgaccgagttcatgaagccactgctggaaacagagctcaaaagctacggcttaatcgtcaacgactttgcggaactcggaggagaagagtacatcgagcactatgagcaaaccacgggtcacaaggcgtggcatattgggccagcgtctcttatgtgcaaaagaagccttgaagagacagcggagaggggacagaatagtgtggtgggagctgacgagtgcatg

SEQ ID NO: 260440 - DNA, 359 bp, Glycine max
agcttatcattcatgcatcctccagcatttagtttggagccccacgaatggatttcctagcgctgctcgtttatcctacaccctcaaatcttatccggagccccatgaattgcttgtcattcatgcatcctccgccatcgagtctcgagccccacgaattgattgcctagcgctgttcttctatcctccaccctcatatcttatccggagccccatgaattgcttgtcattcatgcatcctaaaccatcgagtctggagccccacgaattgattgcctagcgctgatcatctatcctccaccctcatatcttatccggagcgccatgagatgcttatcattcatgcatagctcacaatc

SEQ ID NO: 260441 - DNA, 333 bp, Glycine max
aattccttccttggttggtgttttggtttgtgctaaaggtggtgtttggcatgggttgtgcgacatgcacgatttatggttgatttagggatgacctttgtggatgattgggtggtgggtaatgagaagggttgatattggctgagtaatgacattgttgggctggtgggaaatttggttgtgtaggaatgacagccacaacatgggtttctccctcattctcatcctcttcatttgccccaattttctcattcgtcaaagcaggatgatcaaacttgcctcttttctgacccacttcaatcctttcaccggtgaaaactaaatcaacaaagc

SEQ ID NO: 260442 - DNA, 435 bp, Glycine max
agcttatgaggagaagcataagaagaagcttgagatcaccatgcgactcttcaagttgcaactgaaggagaaggaagaaagtcaaggaaatgaaagaagtcattgaggccgaggtacaggttgaggtcacggtcgaggataggttggaggtggcaatagtgtacgaggttcaaatttcatcaacaatagttacgagaaatgaaaaagctcaagagaatgtggaaaaggctatacaagcacaaggtatgataaatctcaaactcgatgttataaatgtcaaaagattggccactatgcttcaaaatgtagattcgccaagaatagagttgaggaggagactaactatgtggagcaaaaggatgagaagtttcacatagtgctcctagagtgtggaagtaatgaaggtagccaagaaaacacatggtaccttgacac

SEQ ID NO: 260443 - DNA, 355 bp, Glycine max
  unsure (1)..(355): unsure at all n locations
tgacccggatccttgagtcacctgaggcatgctagcttcgagtntctttgatcagatgaatgttggaggtggctttccaaattctaatacatgaaacggttcgctggaacatacatgagaatctttgtagaatatgatctcattatacgttcttggcttgtatgtctcatcctaacagttataaagtggcagctggttttggaatctacacgctcccatggtttgtgatgttctgtctatcatacgaattgatgctggcatatgtgatcttgaggtcatccttgtctatgatttgtatgactttcgcttaaatctgtcactcttcttcacatccattctctactatcattatgta

SEQ ID NO: 260444 - DNA, 428 bp, Glycine max
agcttgctgggggctacaatatactaatattatcaataaataaatgttttaaatggtcatagaaagtgccaaatgtaaatagctgaatgggaaaaaaagaggtaactgtttgcttcgatggcggctgaatttggttaggcagtctggtgacagttctcacatttattgcataactccattagttgaattatacatgaaagctgacgcttttcatgggctggggtctatcaagcacattttagtcaggctctctcacagaaaactaatagtcaaggtacaagtgatgtgatgtacacctcattgaagatacattgtctcagagcaagaactcggaaccttcccttcccccgccttaacacctaaggcatgctttgtagggtgcactgcctcttacttccctgatcactctgaaataataacacagagat

SEQ ID NO: 260445 - DNA, 446 bp, Glycine max
gcatgcacagctttgacggactataccaagctctttttctcttgacggagaaagatctatatatatgcttgctaagggtagagagaggaaaactagagatttggatcaagtaaagtgtgttaaggatgaagaaggcaaagtcttagtgcatgaaaaagatatcaaggaaaggtgaaaggcgtatttccacaacttatttaatgatggatatggatatgactctagcagtctagacacaagagaagaggaccggaactataagtactatcgtcggattcagaaacaggaagtaaaggaagcgttgaaaagaatgagtaatggtaaggcggtggggccagacaacatacctattgaagtgtggaaaactcttggagataaaggtcttgagtggctcaccgaactctttaacgaaattatgaggtcaaaacgcatgccggagaaatgga

SEQ ID NO: 260446 - DNA, 463 bp, Glycine max
agcttgtaagtcatatgctggacccatttttatgttaacaaatgattgtattggaagtaggagtcgaccaaagagcgggagtgatgttgaacttgtggtttatctttcttgggttgatcctcaatccttaagtgaaaatcatttcattcctttcaattgaactactttagcatcaacaaagttaaaatgggtcctctatttgagaggataatggtccatcaattcccatggtatataacattctcacattatattatatcctcatattcttataaaatagtaataacattgttaacaacattaactttgctaatgctagtaaattaagtagctaagcattaattgaatatagaaacagagaaacatgcgacagatcaatatgcttctgaacatatgtgttaaacattgacagaggggccataccatggttattatagtgtcttactggtcaggattcatgttt

SEQ ID NO: 260447 - DNA, 199 bp, Glycine max
cttggattataagcttagggaggaagcttcaatcggggaaaagaatgatagagagaaaggggggatcaccacatttaatgacaaaagagagggacagaagttgaactttgaatgatgtaactccatgtggagcttggaggacttggatgttcatcatcaatggagctctttgctttttaaagaccaatggtcgtgaaat

SEQ ID NO: 260448 - DNA, 425 bp, Glycine max
  unsure (1)..(425): unsure at all n locations
agcttgatgtgatgaagcatggaagagtcattcttcctacttttgtttgtcgaccgcaaagtggtacctggagatatgtcgcgggggtcaggagaccttggggacgccaagtggggtgctattccccaaaaccaagcttgaccaatcccgacccaacccgggcatagtcagtcagtgagaacctgcgatgtacctaagcaggcgagctcctgacagtcaaccaataaaagaacaaagtccacgaagcaaggaggcttgtgtggcggctgaccaaccatgtatcttgggttgtatctngaaattagcctctggtaatcgattaccattcgtgggtaatcgattatagggcttataaatggagactagatattaaatggcctctggtaatcgattaccaagggggtgtaatcgattacacagggtga

SEQ ID NO: 260449 - DNA, 425 bp, Glycine max
  unsure (1)..(425): unsure at all n locations
agctttacaatntaaaattttatcctcaatctcagggacatcaagtgctaatcctttttcactcaactgcagcaatgcttgatgatgataatgcttgagcctcttgtgccggatttcagtgtgattttctatgagagaaaacaacttgctcctcctccaatggatttagagcaaaactttttcctttcattttcaccttgaagatttcttgaccagctgcatctttaattaagcaatatttgtcttcaaatacaactttaaatccttgttcaattagttggccaacacttaacaaattttggttaatttcaggatcaaatagaacatcaacaatacatctagtgcctgcagaacttgtgattgacactgtcccctttcctttgattaagatatatcaccattaccaattctgactttggtgacat

SEQ ID NO: 260450 - DNA, 445 bp, Glycine max
  unsure (1)..(445): unsure at all n locations
agcttctatataatctgtaaccatttatttatatacacaagttgagttttattcagaaaattagagtttatctcttttatcttagtgaaagtgattctcctaaattctcgagtgattcaagaacaccctggttgtatcaaaggactttcacaacctttgtgtgttgccctcgccggaaagagagattctttccttcctttcatcttcaaccttgttctttcanaccacaatgtcagaaaatccacctctgcccagaattatctcgtggtcataactcccattttacacacttaaattaagtgattctggagcctaaattgaatttcaaaatgagacacttcacctcgttttggaatcacctcatttggagccctgtagcttcagttatggccatntctatatttctgtccagacaccacttaacctacgttttaccttcgcattc

SEQ ID NO: 260451 - DNA, 239 bp, Glycine max
agctagtgcctcttcttgtctggaatatgtttgtagcatatagatccaaagacccttacgtgctttgctgatgggttcttcccgttccaagcgttaattggagtcctgtcttctacagacttagttggacatctgttgagtatgtaaacagcagtgtagactgcttcaacccagaatgtgttatgtagtcccttcttcttgagcatcgaactagccatctccatagctgtgcgattctt

SEQ ID NO: 260452 - DNA, 368 bp, Glycine max
  unsure (1)..(368): unsure at all n locations
agcttaacagaatttatcactgttttttcttataggtattatcttcaacgatacttttcattngcaagttatgaaatttaaattccaacatttaaaatatagaaaatatgagtttcttgaaattttgtatattttattcatggggaatattgagttgctttgatcggtatatgaatatatatttctttatcaacaccacccacatgtttcgaaattctacttatcaaacacggatgagtagcactggctgctgtgaacaagtggaatgcattttatttttcatgaaggcaatcattcaaatattttgtcattaataacataaaggattaaaactaggattattttatgcataaactattattcaacaa

SEQ ID NO: 260453 - DNA, 371 bp, Glycine max
  unsure (1)..(371): unsure at all n locations
ttaagtcaccgcagctgcaacttgatgcccttcaattttttttctttgcatgccngaccacatctttactatcaaattccatgccaacatataattcttggccaacattaaaggtcgatggcatctccaaaccgcaaatgtcctcctcatcaagataactccagatgatattgttataatgtgaggcatcattccaaaatgaattttcaattagttgtgcacctaacagttcaaaataaaataaaaaatcaaataatacttatttagcattaaatacaattgtcatcaaataataaatgtattgtctaattttttcatacaacaaattataccttctgctgggtgaacaattcttactggttgatgaatgt

SEQ ID NO: 260454 - DNA, 365 bp, Glycine max
  unsure (1)..(365): unsure at all n locations
agcttatgctgcaaacatttattatttatctcnctcagagcaaaaccaacagcagcagaatatttatgacctttcaagcaacagatacaatccaggttggaagaatcatccaaatctaagatggacaagtcctccacaaccacaacagcctgtccctcctttccagaattctgctagtccaagcaagccatatattcctcctccaatgcagcaacagcagcagcaatcacaacaaagacaacaagtaactgaggctcctcctcaaccttccttagaagagttagtgaagaaaatgacaatccagaatatgcaatttcaacaagagacaagagcttccattcagagtctaacaaatcagatggggc

SEQ ID NO: 260455 - DNA, 361 bp, Glycine max
  unsure (1)..(361): unsure at all n locations
agcttcatgatgatgaatcattttgtttcagtaattntgatgatgacaaaaagctcacagaatgatttcaagatttagtcaacaagttcaagatccagatgaaattcaagtttcatgagaagaaatcaagaagattcaagaaccaagagaagtttgatttcaaaattcaagagaagattaattcaagattcaagagaagaaatcaagaagacttcacaagggaagtattgaaaagatttttcaaaaaacaaacatagaacaattttgtttttctcaaaattttctaagttactagagtttttactctctggtaatcgattaccagtttcctgtaatcgattactagtggcaaagtttgatt

SEQ ID NO: 260456 - DNA, 331 bp, Glycine max
gcacaaaaggcgaaacaaaagagcaccccctcgaaaacaatcccgccacaagccccgaacaaaggaaaccaacctcagcaccgccagaaacccaacaagcgagaccgaacccccaaaggcccaagaaccctcacaggaagcgggcgacacatcgcccaaagagaaaacccaaggaccaaccccccgtaggggaaaagaacaccaaatagacatggaccccggagcaagccctcctagaaggccaacctagaagacaaaccctcaggagaccaaggagaaagaatcccaagccaaagaagcggcggacaaaggctgggcccaagagagccca

SEQ ID NO: 260457 - DNA, 354 bp, Glycine max
agcttgtaggaaagaattggttttagagctcccttggagagaacagaacagaagggcagaaaaaaggtaaatgttcaccaaaaatttggaaactacaaaaactgacattggagctgtgagtttgctggaaacggaggtgctcttcaccagtgctgctgtttagtcaagtaatcattctcaacttctcacaacagaaatagagtgggtcacttcctttcttttaaataaagtctgaaatatcaaaagaaaaaaaaggaccactttcctacaaataataagtgtagtgaatggattttcctaggtcaacagtagcggtagctgagactcctgcgacacaactctccactggagtcc

SEQ ID NO: 260458 - DNA, 362 bp, Glycine max
agcttccttgaaaagcttgacttatctacacacacccctctaataactaagctctcctccttgaaaagcttccttgagaagtttcattgagaagcttcctagagaagctagagcttagctacacacacccctcaaatagataagctcacctccttaaaatcagaagctagagcttagctacacacaccccctataatagctaagttcacccccatgccaaaatacatgaaatacaaaaaagtccctactacaaagactactcaaaatgccctgaaatacaaggctaaagccctatactaccagaatggccaaaatacaaggcccaaaaaaaggaaaaacctattccaatatttacaaagaag

SEQ ID NO: 260459 - DNA, 358 bp, Glycine max
agcttctcaaggtggtgttctttttatgagacgggtgtgtgtagctaagctctagtttctcaaggaagttttctcaaagaagcttctcaaggaagttttctcaagaaagcttctcaaggaagctacctagtctataaatagaagtatgtgtaacacttgttgtaactttgatgaatgagagtcttgtgagacatacttcaaagttccacttctctccctcttttattccttcaatttcgtgttcccccctctctctttctctccctctttcttttcttcattgaagcatcctctccaagcttcttatccaaggctcatcttggtggtgaaactccttcttccatggcttattccctag

SEQ ID NO: 260460 - DNA, 377 bp, Glycine max
ccggatccttaagtcacctgcggctgcagctgaaagcactttttttttagggccttcgttcacatggatttgaacacaactcataagctggagcataagacaaaggtgggataaatcatgttaaagattagtcattgttcgacaaaattacttcggtctaataccatgataaagaaaaaagaaaaagacaaagatgggatagaaaaagccaaaaaattggtaggcaatgttttaagggtgtggttattattactatggatttcgctagcatatataaatattatgttgtctttattaattggggattattgtcctcttgtgaagtttctaccaaaaatacaaattgggttgactggatttagcttggatattcaatc

SEQ ID NO: 260461 - DNA, 364 bp, Glycine max
gcttgcttatttcgcccatgtttttgttcatgcatgcatagtttctttcttagtagattttgtatttcacatcttattattaattgatatataaaggtacatgaacaattcagaatgttcttttaacatgtctaaattgttcatgtacctttatgtgatgaataatgaactattgagcattaatttcattaattttgattatttcttccatgttgtctgtactgaaggacttcaaaaggttagagaactaattgatatgggcacatcatttgatcatgcaaaaattggtaactagcatctaatgagggagggtcattcgcatcataaaaatgtgtgttgcttatatgccaaaaaagggattaaa

SEQ ID NO: 260462 - DNA, 368 bp, Glycine max
agcttccaccagatcatatattttaatgctttcagacaatctgcagatatatcctcccaaacgtcaaattctccgcctatatattcaacctttccatcactggcacgtggagcgaatcttcctccatggtgcaatactaaagttatattgtcattcattctacacaatcagaaaccacaaaaattgtcatatattaggaaataaaaaaacctacctcaaactcaaacataggcacatcacacaacaacatgcaatgtcatctataaaaacagagcatcataaacgaaaataataaaggatcataaacctccctacgaagcgcgaagacaatgcaaatgaaacccctcgaacatataaaaccccaaatt

SEQ ID NO: 260463 - DNA, 362 bp, Glycine max
  unsure (1)..(362): unsure at all n locations
agcttggaacattagacttattttccctagtttgagcgagngttggaattagtagttaaatgcctttcagatacaggtacactattcttgtacctagaatataccgtgcatgtactaaggaactagaatcatcattaatctccttataaacacaaaacagtgtatataaatactagatcagctgaataactcattcaagctattagaaaagtcattctcgtaatccctaaaaattcctcatgtaataacattcaaccttccaacaaatgcatatggaggatttcacattctcaattcattgatcttcattcaagtgctactaaatctcaaaatatataaattttatgtctttgttgcatcta

SEQ ID NO: 260464 - DNA, 360 bp, Glycine max
  unsure (1)..(360): unsure at all n locations
agcttaatgtgctagncnaatttttttcttttttcttttaattngattctctgtgagttatctaatttcaaaattcaaagaaagatttgatgctgtgcttgtaacagctgtctgcatttgcattattttctccctttgtgggatttcacttcctcagtgtacagtgcgtctgcatgtagggcaattctccaaatgacataagctgacaattttgaacaataactttcttgagctctgtctccatgtatgtcttcatgtctacatgaggttcttattcacaagcacaatttgttgaaaatagcagtaatgccatgtttatgatcttgacttgctcaatttttctgcttctgttctaaatgc

SEQ ID NO: 260465 - DNA, 355 bp, Glycine max
agcttcccgcatccgcacctattatgttcttatttccgccttccttaggcagtatcagtacaactttgacatggctcccgaccggactcagttgcaaaacatgattaaacgggaaagcgagtcctttaaagaatacgctcagcgttggagggacctggcaacgcaagtaacccctcccatggtcgagagggaaatggttactatgatggtggataccttgcctgtattttactatgagaaattagtgggctacatgccttccagcttcgcagacttggtcttcgtcggagaaaggatcgaggtgggtttgaaaaggggaaagtttgattacgtctccccgataggtgcctgcagt

SEQ ID NO: 260466 - DNA, 364 bp, Glycine max
agcttgtcttgagtattattattgttcacacaattttttagaattccagagcaaggacaccacagtgctaatttcgagataaagactctagaggtagcaagaggagcagctttgtagagaagcctagggttcttcaattggtgagagattagtgagctgcaaagtgattgtgaggtgttgagaagaggaggagggatcccccttcttgtgtaaggaacaattattctgtactctcaatctcatttgtgttagggtttttctgtaatgggtggctaaacacccttgttggggatttctaagggacaattgatgtaattactttaatatctaattaattgtgttttatgtgttcaatgcttaattt

SEQ ID NO: 260467 - DNA, 387 bp, Glycine max
cccggatcctctaagcacctgcagctgcacttgacaaagtattattatgtttttggtacaaaatgaagtaattaactaacttccactaatatatacaattactacacagaagtaagggatgggccttgattaggcccatctaatctacctaattaaactaattacacaaagcaaagcccaaatttgtagcctaattattcaagtgtagaggttctaacttcctagctcaatttgaccctcaaaatggtagaattggccaaattttatttctcataaattaaagatatttttcttagcttttcagggactatcacaggctccatttagagttttgtagtgtcctataagctctacacaaggaagataggtcaagtaaccacaaaaatc

SEQ ID NO: 260468 - DNA, 357 bp, Glycine max
  unsure (1)..(357): unsure at all n locations
agcttgaatcggacctctattgtaattattatgaccatnngaatttctcaagagcttccgttgttcaattctgagcgtctcgatatgtgatttgcttgaatcggacatccgtgtgaaaagttatgaccatttgaatttctcaagagcttccgttgttcaatttcgagcctctggacatattatgcgcttgaatcggacatccgtgtgaaaagttatggccatttgaatatctcgacagcttccgatgttttatttcgagcgtatcgatatattataatcctgaatcggacatccgtgtgaaaagttatgaccatttgaatttctcaagaccttccgttgttcaaattcgagactctc

SEQ ID NO: 260469 - DNA, 359 bp, Glycine max
agctttataagtgcgggtctttgtacgaaggtcaagtggtcgcgatatgtgaagatgatgttccaagtaccttggatttggtccgaccatgccctcctgatttccagctgggaaattggcgggtggaggaacgccccggcatttacgcaacaagcataatgtaaacctttacggttttaaaagctctatagttgggcctaggctttagagttttcattttgttaaggctttgtgtcttttgtctttgaatttataatacaaggatctttcttcatctgttcctggtctctacccattctcattcatttgcatgtttacttctttttctgaaacggcagattcgatgacgagtcccccga

SEQ ID NO: 260470 - DNA, 356 bp, Glycine max
  unsure (1)..(356): unsure at all n locations
agctagagccccanttctacttcttcaatgtaancccctctccctcatttgatagcttccatgaagactacaataagtgcttttgagtcctacaatgtaaatttcaaatctaaatattatatgtgaaaatatcttagatttgttaagtgctttatagttaaatcactagttaagtagaaataataagccaaattattcatactaaattaatagaataatcaagttgaaagttttcaaatttgcgagtaggagaaactagtgttgacgagaagaaataaattaaagtttatagacttaagtttgggttaaactcaagtttgaaaaatatcttaggttatacttttttatagacccaa

SEQ ID NO: 260471 - DNA, 380 bp, Glycine max
  unsure (1)..(380): unsure at all n locations
ccgagatcctnaagccgacctgcggcttgaaactgaggaaccctttcttgtttgttcaatgacaagaaacagaccgagggctaacaacccaaattttggtcttagaatccgaaaagcctgagaattaggactcgcttgcaacaattttcactccaatttgggctaccccatgtttgatactttgcatagaggtagcatggacaacaccttgcaagagtgcgcatatatgtgtaaatataaggggcatgaaattcctaacaaaggtcgaatgatcatcttcctaaatgaatatatgatagcgtggaattgcctctccaatgcaagtgtgcgcaggagataaaaagctttccaatcttcatataaataaatgtgagtgaaac

SEQ ID NO: 260472 - DNA, 284 bp, Glycine max
tctaaagctaccatccctaaatagctatggaaagtatctctatgcgacctgaacctctccagaaagattgcactgacccactaccttggccttatctaactcgccatccgtcaagctagattcgggcggactgttattagccttcttgacgtacaccctgtaccagctgatcaccgtggaggggaacttggcggtgtattcataccctctcgcaagtaaaacggattatgaattaaacaacttttaaggttcagctccctaatatccaaaaatgataaaaactg

SEQ ID NO: 260473 - DNA, 368 bp, Glycine max
agcttttccaatgcttcctctttcttgttttgagatgtacttatcacagggacatgcataccaaaagccttagcaaacttgacagccacatgacctatgcctcccaagcccaccacacccaagtgcaacccaggctgagcaagcccataatatttcattgggctgtatactgtgattccagcacatagcaacggggctgcaccatctaatggaagagattttgggattagcacgacaaagttctgatcaaccactatgttatttgagtatccaccttgggttattgttccatcataatagtgggcactgtaggttaaaatcatttttggacaatatacatagaagccggtgctgcagtccgaacatga

SEQ ID NO: 260474 - DNA, 367 bp, Glycine max
  unsure (1)..(367): unsure at all n locations
tgcaacttatggtgaaagaacattttaatcagtttggcgnctatggncaaagagcatagtaccgaaaacttgactgcatttcttttttcccctctttaagagaacttaattcttaataacttttctccatgatgatgttcattttataacattgcgcaagtagacacaacaaatagacatacttacatatgctattagatacaaattcacataatatgcaaactatacatagctttattcccctagatacataatgccaacacagaatagaggcgtgtgaacacacacacacacacacacatattcaaattccagttagttccaaccaagtattatgtagtacaaagatgggaatcattaccccatg

SEQ ID NO: 260475 - DNA, 360 bp, Glycine max
  unsure (1)..(360): unsure at all n locations
agctttgacgcaaagagattttctttttctttgccttngangggcgacggggacagaaaattttagctgctacagtttgtagatggaatgcaacacagtcacttacgttttaggaagaagaatggactaaatggaaggaacatcaatgatgagtcacccttcttctgtgttaactttgtcctttccttattatttattatttattaaaacaactaccaatatgtcaccatgactcagtacatccgttttcatttacacagtcactcacgttgattgctttttgtattttacgtcaataatgttactgctccattaattttaaaattttgaaatacttaagttaaaatagtgacaactaat

SEQ ID NO: 260476 - DNA, 364 bp, Glycine max
  unsure (1)..(364): unsure at all n locations
agcttattctatgagaannacctttctttctcttgatcacaaaattcaagtttatctagtttatcaccatctaacaagttttgcttctcaagttcatgtaatcctctttcactaacatggcctaacctcaaatggcagagttttgttttatcaatcaatgtattactagctaccgatgtatgtccaacaatagtggaaccttcaagaataaacaagcgattacttttattcttgttacccttagctatgattaaagatccatttgaaatcttaagaacaccatttaaaattctagttgaatatcctaaatcatcaaacatgtttatggaaataaaatttcttttgagttctggaatgtacctta

SEQ ID NO: 260477 - DNA, 360 bp, Glycine max
agcttttggcacaaagaagaattgttgttttttgagatacaaggcttgtaaaggattgtataagatcgattggattaagtgtttgaaaagcaaatcaaagccttgcttttatagactcttcatgtctggccaagaggaccatttaaaagagttataacttttagaaaaacttaaaaccaatttgaaaaagtcaaaaaccttttgaagagttgcatcttttgatttattcagagacaatcactggtaatcgattacacaaggcttttatgtgaaaggatgtgactcttcacatttgaatttgaatttcaactttcaaaggcactggcaatcgattaccaaaacattgtaatcgattacaac

SEQ ID NO: 260478 - DNA, 360 bp, Glycine max
  unsure (1)..(360): unsure at all n locations
agcttctgcgctctcttcttcttcttatctccggctaacgaaaccgnccctgtgtgcatctgagcatcgtgttcgtcgcactcgagcatcgtcacaagtctctgtttcttctccttcgccaccatacctaggtatgttttgtctccttcgcgttgtcttgtccttctctctgtcttcttctccatctaagctttcttgctctctttgttctccttctaccttgaagctgtatgttctccatctgaccatcattttgtctaaggtcgagcatcgtgttcgtcgcactcgagcatcgtcagaagtttgtgcttcttctccttcaccacctcacgtaagtatgtttgggctaatcctgtataa

SEQ ID NO: 260479 - DNA, 363 bp, Glycine max
  unsure (1)..(363): unsure at all n locations
agcttatgtccgaacttttaattttgtcacatgtatgaccngaagcaatgcaatacctaacatgttataccactttgaaaagttttcaattatttccctttataattcacattcaaaatcttgaaattcactcgttattgtgatcaactggattaaaataacttatttaatgtttttgaatttatttaatgtttttgaatttgagatttcaaatatataagttatgtttcacaatattagataaaaaaactaattagaaactgaaaaaagctggctcaaagttaaaaaattaattgattgttggaagctgaaaaattaatttattaaatgataagtgttcgataaaattaattgttgaaataa

SEQ ID NO: 260480 - DNA, 359 bp, Glycine max
  unsure (1)..(359): unsure at all n locations
ggcagcaagcttgtataatcattttngtagagtgcaagccaaaattggagggacctttgatgtagcgaaaagttctctttgccgccttcaaatgagtggttgttggattctccatgtagcaactaacaaatccaatcgcataaagaatatcgggccttgtgcatgttaagtactgcaaatttccaactaagctcttaaagagtgttggatctattctttcttcttcctcatgctttgatagcttgattccacattacattggtgtgttgataggattagagacatccatcttgaacttcttaatcactttcttagcatgaccttcttgagtgatgaaaatgtctttatcttcttacttt

SEQ ID NO: 260481 - DNA, 347 bp, Glycine max
  unsure (1)..(347): unsure at all n locations
agctttatctcnaagatttttctgcgttnannncaagaaaatgatagatctcatccagcgcaagttgttgcagcccaaatacgcacactggtatataaacatgaaggctgcacgagttttccaccaagtccgggattgaaaagttattttgtgagttttgggacttgagtggtttgtgagccaccttgatgttaccctaacatcaagtgttggacctgagtgtgtagagttgatctctattgttcagaaagcaatctctggtgtgtattagatttaattgtaaacacgggagagtgattgatatggagtgagaggggttctcatatctaaaagtggctcttatgtag

SEQ ID NO: 260482 - DNA, 357 bp, Glycine max
agcttcttagtctcacctgattattatgaattcatggctacttcatgcactcctctaatgacaatagcatcatttctggcactgaattgctaggagttggaagccatcttctcaattaaatttctagcttcagcaggggtcatgtctccaagggctccaccacatgtagcatctatcatacttctctccatgttgctgagtccttcataaaaatattggaggagaagctgctctgaaatctggtggtgagggaaactagcacataattttttaaatctctcccagtattcatataggctctatccactgagttgtctaatgccgaaaatatcttttctgatggtcatggtcctggaa

SEQ ID NO: 260483 - DNA, 359 bp, Glycine max
agcttagagagtattcttctttgttgaagagaatgagagaaagagagagaggcgtgggaattgaaggagattagggagagaagttgaactttgaagtgtgtctcacaagtttcttattcatgaaagttatgacaagtgttacacatgtttgcatttatagcctatcacatgggaagcttccttgagaagcaaggaaggtagcttccttgggaagctagaggaagaaaacttccttgagaagctagagcgagggctactcacacccctcccatagccaagctcaccccatgccaagatatatgaaaatacaatgggatgcttcctatagaagcaaggaaggtagcttccttgggaagcaa

SEQ ID NO: 260484 - DNA, 365 bp, Glycine max
agcttatgataattgtggatattgttttattgttgccttattaagtatggatgaagattcatggtctttggttcgtaatcatttgctgaaagaacttggacaatggcctgatgagtatatatacctgcttgatggcataaacaaatatgaggatttagagcagtcgctacttgttgatggattatccatggtatataagttttttgttacgtattcatatataaatatttttttgataatattaattaaaattgttacgtgcaggtaaccatggataagtggatgaatattagtgatatgggttatgtgattgcatcaaggtataacgtcatccttgtttctttttctctctaacaaagcatgac

SEQ ID NO: 260485 - DNA, 364 bp, Glycine max
agctttccgcaagacttactgttgatcttatagttgaccatagcagaggtatccatagaagccattgcatcacttacccaatactacgaccagcctttgaggtgcttcacattcggagacttccaattagtaccaaccattgaagaatttgaggaaattctaggatgtcctctcgggggaagaaaaccatatctttcctccgggtgtctcccctctttgagcagaattgcaactgtggtcaaggattcagcaagaggtttagaccgcataaaacagactcggaacggcatagcgggcctaccacggaagtacctaaaaaacaaggcaaggggtatggccaatcaaggagactgggtcccgttta

SEQ ID NO: 260486 - DNA, 322 bp, Glycine max
  unsure (1)..(322): unsure at all n locations
agcttgcagaatgcaagggttgtcattttttttccgngctcggncggcaccaagtggtttgaaagtcttctgtttcccaattgcatttggaatggcccgttccccaaaatacttccttctcttgagcttcctgatcatcctgatcttcttcaaccggttgggggcaacaactttcttgcttttttccaatttctctttccttccctccttataagcctgaatgggtttacttctctgatcatctggtaataaagcccatttggaaaatttcttgggactcactatctcaagtttctcaataatttccttgaatgccggaaca

SEQ ID NO: 260487 - DNA, 363 bp, Glycine max
agcttttaatgaaaagaaagctatgtttgtttacattacatggaatgacaatgatatggactcatctgaagattcagaaaacgaagttgtaaacctaagtccgatggccaagaattatgaaagcgatgaagaggtagcatcttctgataacaacttatccatttcatttgatgagttacaagatgcatttgctgatttacataaagaatcagttaaacttgcaaaactggtttcatcttctaagaaaactatttcaaatttagaaaaagaagttttaaaattaaatgaagaattagaaaatcttaagactgaagttataactttaagatcaaatgatacaaatcattcttctaccatgcatga

SEQ ID NO: 260488 - DNA, 378 bp, Glycine max
atcttaagtcacgcagctgcagcttgcatgattacatctttcttttctaagcaaattcttcttgatatcaaaatcttcatgatttacattctccccctttttgataatgacaaccacctgtaggttaggagcaacaacaaagaaaatatctatttgcatatagtttactcccccttggttttacaatgattgcttatatgagacaattgaagatttcatatttttcatatataaaaagttgtctcataaagcaatagataatttttcttactattttatcttttatctttctctccccctttgtcaacatcaaaaacaaatcatgaatagaaatgagaaagatgttaccacttgttgcaatgtatgagaatcaagtga

SEQ ID NO: 260489 - DNA, 325 bp, Glycine max
agaagacgaaacatacatgagggagggaaccgcatcccaaaagcgagataattcgttgtaacccgttactaaacaattaatattatcaactactcgtttggataagcaaggaaattgttggtccaacaaaattcatttacacgtgcagcatacattattgtcataattgacaacacataatgacatgcatgcgtattacaatttgagcgcgacaacacattggctgacttcagtacacattctgaaactagcaggcgctcgacaacacattggctgacttaactacagattgctgacaacacattggctgacttgactacacatt

SEQ ID NO: 260490 - DNA, 364 bp, Glycine max
agctttgcccttaaaatcttttttgttttcaaaaaatgaaaaacgcaaattaattgggctatcatttccaatacataaacatagtaatttacaaaaagatcgtaaaattatggttattaaatataaaaccaaacattggaattatcacagagtgtagccattagaatgtgtgattggtagcaaattattctctttcacttttgttatgtcaagcaattataaatgagattatattgtcttatttttcgcataatgttatttctagttattcggtaaattggaaatgaaaaacaacggcgggatcaaattacttattttaaaagataacagagtcagataaatggacatgattcatgaatgagtt

SEQ ID NO: 260491 - DNA, 355 bp, Glycine max
agcttgttcttgaattttttcctagttctttaacaagagcaatatacttgcccttcatttaactgtctctgggcttggcggccacactcaacaaagtactttcgacacctactgtacgttgatttgaccaatgctgttatgggaatgttgcgacaatccttcaaaaccttattgatacattctgagaggttggttgtcatgtggtcatatcgacgtccttctctatcataagccatcatccatttttcctttgaaatgcgatcaatccatgttgctatggctggactcagttcacgaaatttttctaaattttgataaaaaatgtgcttgcaaggagtgtaggctgcataaaatt

SEQ ID NO: 260492 - DNA, 302 bp, Glycine max
  unsure (1)..(302): unsure at all n locations
ggcatgcaactttataagaaagatttngtgcttcttgtgccaacaaacaaaagctgtatgtgaaaaacttttttatacatataccggtgaaggtcaatagctctctaaacaccttgaatattttgaaagaaacgactaagtgcttagcttgtgcattcgtctattagatgattaagaactagtcactaagcaaaccaacaacgaatcttttgatttgtattaaagccaccattggcttgatatgacaaagaatactgatgttgaagcttgataatatactctggttggggagccacaagcga

SEQ ID NO: 260493 - DNA, 355 bp, Glycine max
  unsure (1)..(355): unsure at all n locations
agcttttcgacgggtttcatgctttttttagaggngncatctcgcggatctatgtcgaattcatcacccaggcttgcttggtagatagttagggctcgaatttgagacccttcgtccacactcatgacttgagtgccttcagccgctgtggagtgaggcttattaggctccttggtgggaggatatggtgctaccttcaagctctctgcatagcactgtcatgcttgcttttggtctaccttgatagttataatctccccagtcagggcagggaatttcattttcaaatggggcgtggagactatggctctaagctcgttaagtgtcttcttatcgattaaagcaaagtatgatg

SEQ ID NO: 260494 - DNA, 356 bp, Glycine max
  unsure (1)..(356): unsure at all n locations
agcttgaaaattttatttaattttcggngatagaagcagacaaacgaatgacgttatattctttttctacagatctttcaaatactttatgagtgtcaaataaaaaaacaaatcatgtttttcaaatatataaaaaaaatagttaatattttctctattttgctagtaggaaagttagcaaaatgctataagagaatttagaattagaaaaaaaaaatacttgtcaggaaattaaaaatagaaaacattaaaaaaatattatgataccctctcaacataacatctaaacataattttcaataaaatatttttatgattaattcattttttaggttaacgagatcctggtgaacctt

SEQ ID NO: 260495 - DNA, 384 bp, Glycine max
ggatcttaagcaccgcggctgcagcttgttgcaggaaaattttgtgttttctttctcttctccctttcttcaacttatggcttgaaatgagagaaaattggagctttcaacttctctctaagtgttttgttgtgttttgtgagacagaaatggtgagtgatggggttgggtctgataatgcatagactaagtgaatgaggctgatgctaggtgcacccaacattattgctggtgcacccaacacttaagggtaaaagtcaaaaatacccttgcttatttttttaaaagtttttcacccatgaggcttttcttcttccatgcttcttcttccgcgactcttcttctgcgaccctgtgcacctagcatcagcatcctcttcttgag

SEQ ID NO: 260496 - DNA, 375 bp, Glycine max
  unsure (1)..(375): unsure at all n locations
cctgcagcatgcaagcctcataatgcgtaagggtttttcctcnttggggcaccaaaacagattgggcctctacattaaactccttaattacctttcttctaacataaaatttcaatacagagtgagttggacctattatttgctggcccaactcccccccttcgttttgaatattaagacctaagataaaggaggtggagtctccaatcaattaagttgaccccttgtacaggctaaggtttccttaaaaagacctgatatttgtgtttcaccctccataataccaactttggcaccagaaaaaatattcataatacccctagttcagtaatgcgattcatatactcatgaggtagttgcttcttatcattgatg

SEQ ID NO: 260497 - DNA, 372 bp, Glycine max
actgctgcatgcaaacttcaaagctaaagcccatttggcttccttatctgcaacaaaagggctataatgagataatgacccctctttaagcatattaaaccttgcccaaacagagacattggctcttcttatagcaacttcagagtgcttgtgcaagtcagagacaaactgagagcgaagaggaggagtattatggattactcattgataaaactcattatctccttcttgccttaggaagcacattcaccaattgttgaagtatatcttggttggacgcaagatctgcaccatacgcatgtgactggaggtatctttcttgacataatctaaggtggatgcaaaatgagagttttcatacatgtcttttaa

SEQ ID NO: 260498 - DNA, 230 bp, Glycine max
caagtgctagggcctcgactaatgacaaagccgcaatgtgtgcctgtctcactcgaaaggaaaacagtggatgagtaccttcagaaaatcaaaggctacattgacgagcttgctggcgttggagctccaataccgcatgatgagcatgtcgatgctgatcttgaagggccaccttcagattaagccgccagaagtatctgggatggaaaagcacaaaacatattccaccc

SEQ ID NO: 260499 - DNA, 353 bp, Glycine max
  unsure (1)..(353): unsure at all n locations
agctttgatcttattcaaactttanctcctttttactcggatgaccgaaggaggcccgaaaaatatcaaaacgctcgaaattgaatgttgaaacttggagcccattcaaacgacaatatctttttactcggatgtctgattgacgcccggattatatcgagacgctcgaaattgaatgttgaacctctgaacgaattcaaacgacaataactttttactcggatgtctgatttagtctcgtaatatatcgagacgctcgaaattgaatgttgaagctctgagctaattcaaacgacaataactttttactcggatgtctcattgaatcccgtctttattgagacgctcaaaat

SEQ ID NO: 260500 - DNA, 360 bp, Glycine max
  unsure (1)..(360): unsure at all n locations
agcttatccttttncgttcctcatagtatgtacttaagacaattttacttcatatgtcctacctttttacaaaagtaacaagtaaattatttatcttactcttttgtttcttctctgattgagaacaactttatgtaatataaaacctcaactccattcattttcttattctaagaataacttgatttgattcaagatcacgataaagaataacctagtttgatctaatatcatgataaataaaacttcattagagttttccgtagttaaattttttttttgcctaattccatgcaattaagaaaattctcaattgactctttttaaaattgcaggtttgggattccaaaaaaaaaatag

SEQ ID NO: 260501 - DNA, 358 bp, Glycine max
  unsure (1)..(358): unsure at all n locations
agctttgatctttcttctgangtgcttaactactttcaaatgcagaagatggtatatatttggcatactcagatttcaatcaattcttgctaggagattcatcttgtctaaaagagctaaatcagtggtttgctaagcaactggacacagtaagtggcacacgtgtttttctttactttcttctcaatctatggtgtgcttttgttaggataaatattgtcttcatgtgaaaaattctatttttctattaattctaataaattgataatatacttagcttagaaggatgaataggttcccttttgagcgcaagccgtagtgcaatggcaaaagttgctaccttttgagttgtgactac

SEQ ID NO: 260502 - DNA, 355 bp, Glycine max
agcttcaggactgaaaatgacgttattacattaccttaagcatgttgctcagaaaattaaagcaatagaccagtcaaatacaataaaaaaatatataccttaactttgagtagcttgcagcaagtccatttgtgttacatgatgatttacctacttaccaatgaaatatttaaattgtaggcactatttatcaggatcacgacattggttcctggacactatactgatcatcatcacaggtacaaaagtttgcaatcaattttgatgcttaattttgttatgattgtttttatatgttggtgtatgtcattaatgtactttgctttagatacaacttttggtcataatgagtgaa

SEQ ID NO: 260503 - DNA, 358 bp, Glycine max
  unsure (1)..(358): unsure at all n locations
agctttccttgctctttttattttttagggactcatggncactatgaatgacaaattccttgggataaaggtagtgttgccatgttttcaaagcccgtactaaggcatacaactccttatcataagttgaatagttaagggtaggaccacttaacttttcactaaaataagcaattggatggccttcttgcatcaacacagccccaatcccaacatttgaagcatcacactcaatttcaaaagatttttgaaagtttggcaacgcaagtatgggggcattagttagcttttgcttaagaacattgaaagcttcttcttgtttctctccccatttgaaaccaacatttttcttgaacac

SEQ ID NO: 260504 - DNA, 248 bp, Glycine max
  unsure (1)..(248): unsure at all n locations
acaaaaggaaaaaaagaggcgacagcctagctaccnncaactatataccctaaccatgtctcaaatttgaagtaaatcataaactgaatagacaacaacaacgccaccctctatcaagtcatacataaaaacacaaaaaacaagacataaaccccccagaaaataaaaatagcccttgaaaatcggttagtgtggggaaagcaacacacatcctcatatccaagataaaatacatctcacgggatgaa

SEQ ID NO: 260505 - DNA, 366 bp, Glycine max
  unsure (1)..(366): unsure at all n locations
agcttctaaatattcacttagttgttctatttcattcaannaagtggaatttttgcattgttttaaaccctttagtacttattttttatttttatgataaaaaactaataaatgttcttaaatgtcaaaattatcaaaatattcaaataaaaatgatataattgtagactaacgaatttgctagtactaactaatgtaataaaatttcttaattcctataaattactttaaaaaaatcttctatataaaacgccattcacccaagaatgctacaactttggactgtgaagcactagattgtaatgattccttcaaggtgagccaatgaaatatgggaggagatgcttgctgctccgtgttaattaa

SEQ ID NO: 260506 - DNA, 320 bp, Glycine max
gcctgaaattatcctaaattaatctattgcattgttccagacacaaatcattcacaaggcaaggataatgatgatggggacaagttgggcctttctgccatagaacaaatcatatggagtggtcattaaaatgggtcttattaaaaccctatttaaaatgctgcatgctgtgctaacggcttaagcccaaaagtattctggaagaggagtatcactttattatggtctagaaatctctgccatagatctatttttcctttcaacaacaccatatcgttgaggggttcttggcgcagaaaagttatgctcaatcccttgct

SEQ ID NO: 260507 - DNA, 280 bp, Glycine max
ggaaggaggacaaaaggcgccgaaagggaaaacccaaacaccaaaacacccagcggggcgaatgcaccaagccaaagaccgaaaaaaaaccccccccgggaggcaacccacactcaaaagcccccaacaggggaccaccagcacaaaacatacggaacccggcgcaaaagaccaacccaggaggagagcagccccacccgcgaaaggaaacacaagggggccaaacccccggaaaaggaccggaaaataacccaaaaaacaccggcggaaaaaaaaaaaa

SEQ ID NO: 260508 - DNA, 352 bp, Glycine max
  unsure (1)..(352): unsure at all n locations
agcttgttgatcgatatacaattcctttatttacaggtaaggaaatngatcatttctataaaaaaattgtatatcagtaggaaatttctttattggtattttttatttgatagaaaatgggccgcaattgattatgaataggctattaatcatattaagaagaagtatgagttggagaatatggaaattgtgaacaaggaaaaagaaaaggttcgatatgatttcctggtatttgtagaatgtaatttccatcaacatgtttctaatcaatttgaacctttataggctgacaaagccattgcagaaattgaggcaaagtgtggccaaaaaattgaagaatgcaaagaaaaac

SEQ ID NO: 260509 - DNA, 370 bp, Glycine max
  unsure (1)..(370): unsure at all n locations
agccttggtctaagctttttttatccttgcatcatcaaacctggatacanttaacacataaaaatattaaaccaaaatgtagggagttcccaccatanttccaaatgaagcaagtttcatataagatttcagttgaaggcttctaaagttatgaacttccaaaatgacaagtatatcatacacaaccatcaacagttatttgaatgtattagctcaatttgaaatccatattcaatataacaagaaacttggaaatcatggaatgctaaatgcaaacaatggttgacaatgaaaccaataaataaatattaacagataaacatccctagcctctaatatgacaacaaaagaaatacaaaaactcacatat

SEQ ID NO: 260510 - DNA, 356 bp, Glycine max
agcttcataaacaaaaacaatccgtgctttgatcaacgaacgaggaagaacaaactaagaacaacgaagaacgcccatggatccgatcatggaaacatcaaggaagcgtaacggaagcgcctcggcttggattttttctttttttcttcttttcctcactaatttaaagtgaaaactaaataccaagggtgttgaacccttcatactcagcctccctcccctatttatagcaaaaataggggaggtgcttgccgcccagctcgcccaggcgagttgagagcttcctgatcaatctttatgatgggtccagtggtgcaagaccccctccaattttataattacacccccattttcgt

SEQ ID NO: 260511 - DNA, 357 bp, Glycine max
  unsure (1)..(357): unsure at all n locations
agcttcagctnttnggtgttcttttctagagcgtagtgcattttttctattgctagatcactgatctagaacacttgtccccattgtagtttcttagggaagctacctacttatgagatttcccgattataccgttggataatcattccaacttatttatcattatattacttccaaaacagttgcccccaagtcactagtttctcacagaagttgccgacttattcgatccactaataaggttgtgcgaaaaagactttgtatagatgtgtgttcctcgaaatgtgttttgtacatagttctttccattatttggcagttattgtggtggcgcacaaggcatttcaaatcatgtta

SEQ ID NO: 260512 - DNA, 355 bp, Glycine max
agcttctgttctgaatttcccgatcctctatttaccactggccacagtcagacatccgagtaaaatgttattgtctggatatactacgggacccaattggacatgctagcacaaagttattgtcgtttgacttttcttacagcttttattctgaatttcgagcatctcgatatactacgggacacaatcggacatccgagtaaaaagttattgtcgtttgattaggcaaagagcttctgttctgaatttcaagcgtcttgatatactacgggacacaattgaacatctgaataaaaagctattgtggtttgattttgcacagatcttttgttctgaatttacagcgttacgatat

SEQ ID NO: 260513 - DNA, 355 bp, Glycine max
  unsure (1)..(355): unsure at all n locations
agctttgttcaaacacctgtnctacattgtaaagtcaattcactctaaaagtgttcagtaaaatataataggacaggaacctgttacatgtctatgtgatagaattttctgcactcccaaaaaagtataattttgtcaagaggctgaaatattcctcatgaagaaataaagacaatgacaaattaccttgaacaaagtcaaaaaatgattgtcaatatccaacatatgatcataattggagatatcatttgctgtttcccacatgaaatatatggggggaaaaaagtatttgggaagtgaaattgcaaggaagttagatcatgagggcaaacataagtaccttaagctatcagta

SEQ ID NO: 260514 - DNA, 355 bp, Glycine max
  unsure (1)..(355): unsure at all n locations
agcttgangaaattgcctttgttgatgtgttagacacacccattctgttttagggtttttgagatgatgtttgtgatgtttatatgctgaaattactcatggaaaactgttagagatgaaaggtagagttaacctagggttagaaagtgagaatgtgatgttatgagtggaaaaagagtgaggctttgagggttggaaggttaagtctgaattctgtggtaaatggaggttaaagtgagttaatcctatcttgaaatgtcatttaggacttatgagaaagcttggactgtgctagagagaaaaacaaatgaccatagtgaacaaagagccatttctagggcaaatttgggtgttg

SEQ ID NO: 260515 - DNA, 313 bp, Glycine max
taagatgagagataccttccatgttcaaacaaaatataagaaaataaaggggcttcctatttgatgcctcttaaaggacgaaattgtttaaacatctttcttttccaaagcattctcaatataaatgaagaaatattatgtctaattagattaactaaagaacgagaaaaaccaattcgaagggaagctccaatgttactaagaacttttgagaagtattcatgtgtcattcaaactgctttaaaatgaacgacctatgaagattatgaaacttgtcatgagctttacaaacaaaaagaggataccttttttt

SEQ ID NO: 260516 - DNA, 366 bp, Glycine max
  unsure (1)..(366): unsure at all n locations
agctttgaaatttaaatncaatttttcattttctgttataaaacatttaaaatttctggtaatcgattacaagtcttgtgtaatcgattacaggcttttaaaatcaaattcaaaattttaagaacattttagaaactactttggccactggtaatcgattaccagagagtaaataccatatttttgaaatttcaaaaagctttttgaaaaatgtcctttggccaaaccttttgcatcatcaagtaaagaatgttgtctaagactctaaggactaacttcatcatttatcttgaattttcgagtccttgacttagattaaacttgagaagcgtttatcttgtggcatcatcaaaacctcatattaag

SEQ ID NO: 260517 - DNA, 365 bp, Glycine max
  unsure (1)..(365): unsure at all n locations
agcttgggagaaggattanttttctcttgttctcactttatcggaatcaatttattcaaaagtcaaaataaaatagtggtttagttgcactttatttaatcttgtcagcgggttgtttgacttttcgtatatttttttataaaaaaatgttaatttgtttatgcttattcattttttaaaatataatgataaattgtaattttaaatttgttaaaatacacttcaaagttatactttagtaaatatttgtttttaatatatattaacaagttcttaattgaattatcaccaaatatatggatcaactgatgtgaaattattttatcctaacaaaagggtttaagatcaagtctttaaacaattac

SEQ ID NO: 260518 - DNA, 360 bp, Glycine max
agctttgacttgagtcatcaagagattattttatgtgacaatgacatgaatttgaagaacaataatttaataagaaatctatctttcaatattctctctcaacatcattcaatatctttcaactctttctacagaattttctgattcatttctcttcatttttctaaaagtttttgttcaacactttctcttccaagaaaatttctttgttcaaaaacttgtactattcatctttttcattctcttctccctttgtcaaaagaacgaaggactaaccgcctgaattcttttgggtctctcttctctcttccaaaagattcaaaggactaatcgcctgagaattcttttgattctcccctt

SEQ ID NO: 260519 - DNA, 311 bp, Glycine max
ccacgctctgaaaaaactcttggttgaagtagcaagcatcttccaattggagctcgttgcgggcaaaggtgaggccatactcgtatattaaggaaggttcaagagtggttctggatagccaagagaaccagcccatggatgatgatgatgatgatggggttgtgcccatatggtaggatatgctaaagtttgaagtggtcattgtgatttataaggtataaagatatatagattaggaggtgtggacattgatatgtgagaatcattgcataaatgataaatgtggtcggtacgtgggctatttatttttg

SEQ ID NO: 260520 - DNA, 339 bp, Glycine max
  unsure (1)..(339): unsure at all n locations
gggttcccaaanccttttcttccttttccactcnaaaccaacaacttgccttaaacttatgtgagcccatgtgagatataattcgccacattgactttttttaccactcaaacacttgccttctccattcaaacttccacacccagcccccttacctgcaatgtcccacgttatttgtacactcattttgttgtgtagacaaactatatagcctacgaaacatagacgctgaactttcttcccccacccaattattaaaccaaaatttatcttgatccccttccccaatttttcacttcaatctcctatcaaaccatccgatattcctctactccgaca

SEQ ID NO: 260521 - DNA, 360 bp, Glycine max
agcttcttatccaaggctcatttctttgtgtgaagctccttcttccatggcttattcccttgtggatggtgcctcccctttcctcttctcatttgccttccattgcatctccatggtggaaaatcaccattgaagctcaaagatccagcctccatagaagcttcacaagcaaacttccatcagacactatatgaaaaccatatcttttaggagctttgatttgtttttgtgactttctaggtgttgttgttttaagctacttcaaatggttttgactcatcagttagtcccctcaactggtgttgaattttgatgttgagggttcatttcaagatcttgatacaggtgcttcaaactact

SEQ ID NO: 260522 - DNA, 356 bp, Glycine max
agcttgaatcccttcttcttctctcttatgcttagaaaccctagtagagcaacgagaggaaaaacttcagcaatcttagagaaccaatagagatgcctgtatcactatcacactttacgcgtgagcctgcttagaggtaagggatgagtttatcacaattgggttaaaatgaacatgtgtagcgatccttagaggattaaattgggatttattttgggataattactgtattgtaattctacatttacgaatataattatgagattgttgtgtttgacgggccaattgatgccctgatgtgaattggttgataaaattgagtgctcttggtgttttcatagttttgacctatgttt

SEQ ID NO: 260523 - DNA, 348 bp, Glycine max
caagcttcattaaatgtgttttcattctccagatatcttctcaaagatcccaacggtcagatcatggaaattgtcttgtgaagttgcagaccaaatttcgagaagatccaacggttaaagaaggctgggcagcatttttaccgaggcagcttcatgtagctttctctagaagcttcattaagaagcttctagcacactccaaacatcttctcaaagatcccacggtcagatcatggacaagtgtcttgtaaagtttcagaacaaatttcgagaagatccaacggttaaagaaggctgggcagcatttttatcgaggcagcttcatgtagctttctctaaaagcttcat

SEQ ID NO: 260524 - DNA, 358 bp, Glycine max
agctttatcctcagatccctcttgttggactagacttagaccaaacaacattattgtaacaatatatttaaaaccaaaacttaatccgcagatccctcttgtaagactaagtttcaattctacttcattcaagatctaaggcaacaatacatttcccaatgctaaaatcacctaaccaagcacacaaatggttgattagaccaagagcttacataatttaagcactaaaagggctttagttaggtttagttcaagttgtaataagggctcaattggcaacctaagcatcagccttttgggagaccaaatggtggctgacttgttggctgttgggggtaacttttggttgccacaattt

SEQ ID NO: 260525 - DNA, 354 bp, Glycine max
agcttcttttggaccttgaacttgttattaactcctctttcaaaaccatgctatgtgctcgcgattggtctctctcttcccttcgcaacttgagttcactattgctaccccatagagctccgcgaaatttgttccggccatactctttcttgcgagccctcttggtctcttgttcaagggctcttgcggtaattgcattctcttcccgtaacccggcacactccttccgaacgtgtgtagcggccaacttgaacttctccttggcaagttttgcttttcctaactcgcttttgagagcttggacttcttcgtcctcttccggtgcttcaaaactttcttcgctgacgactttta

SEQ ID NO: 260526 - DNA, 380 bp, Glycine max
gagtcacctgcggcatgcaagcttattgcatatgaatacaacaaggggtgtctttacaggaaaggaaaatacttacagacttccatgatctaatttttccatacaaaccaatgcactgagttccatataaatctttacaggaagctgaacagctcaaagctgttgctccatcattatcaactttgcaaacagcacaattttcctgtagattgatttacacaagcatgcaaaaaatgtaattagcatattaactgatgcactttcaactaatatcataatgctctacagcctcaacctagactgacacaaatcaaccaagttcaaatatgaaatgaaattcaaatgagaaactttgctacagtcatttatgtccaaatatt

SEQ ID NO: 260527 - DNA, 363 bp, Glycine max
  unsure (1)..(363): unsure at all n locations
agcttatgctgcaaacatttattatttatctcctcagcagcaaaaccaacaatagcagaagaattatgacctttcaagcaatagatacaatccaggttggaggaatcatccaaatctaagatggacaagtcctccacaacaacaacagcctgtccctccttttcagaatgctactggtccaagcaagccatatgttcctcctccaatacagcaacattcacaacaaaaataaataaccccccctaattcgttactattttattactatctgttatgaacgtttggttgaccattgctcgttaggagatgacnnnagatcacttcctagatactgcatttttaatgtttatttgatttgggtgc

SEQ ID NO: 260528 - DNA, 358 bp, Glycine max
  unsure (1)..(358): unsure at all n locations
agccttgaagattatggggnacccatcatttgttttctaagnggcggtcgggcgatggtgcacaacaagctttccacatccacaatgcgcgcataaacccaccatcccctgttgcccacctacaactgagctcacgtactcccacgtagcccatatcctcgtttctctcaacaccgggtccccatcaatcctcttaagcttccacaacatccaagcaaaacaacattcaaacagcgcaagctatcacagccaagcaaaacagagcaaaggcagaaaactctgctcaacacatcaaccaaaatcacagtttttcccactcaaagaccccggtaacaattccttcgatccaattcgttaa

SEQ ID NO: 260529 - DNA, 350 bp, Glycine max
agcttgacgtatacccactgttctttcttaatgtaacatcatcgcgtcgtgcgtcaacataccttttcatggaatcttgagctttctgtaggcgcctttgtagctggatgtggaggttatgacgagattccaggagtgagtcaacagcttcattctttgtcagtcctgaaatataatggggtatcgcgggtgggggtttactgtatatgatttcaaacggtgtgaggtcggagctagagtgtagtgatgtgttataacaccactcagcgagcgataagaagcgaaaccaggaggaaggttgagagttgacaaagcagcggaggtattgttcgagaacccggttcacgacc

SEQ ID NO: 260530 - DNA, 350 bp, Glycine max
  unsure (1)..(350): unsure at all n locations
caagcaacagaagaaaggttgttgttcaanccccaaaggcagagccgaaaaagcccgagnagncaaacagaagancaaggccatagccaccaaaggctgaaaagaggacgaagaaccaagggacggcaaaatggccaccgcggaaggcccggaacgagaaaccaagaaggcccaaaaggaagaacacgcgccagcaaagacacgaggggcgctatagggcagcaaaaagaagcccaagctccgaagaggtgaaaggaaacatcacgggccaaaggcatgagcctgaaggacgagcaaaaggcggaccctacggcgaaaagaaattcggcccaacagcaaagcgagaccga

SEQ ID NO: 260531 - DNA, 374 bp, Glycine max
agccgacctgagctgcatctatagtgaatatgttttttttattttaaaaatctcttttttggtaattgagaattttttaaataagaaaaatcttttcttgattcaagaacatattttggaaataattatatttttctttttaggaaaaatacttgagtataaattatttttcttttataatttgctattggtagcttataaatgattgtataattgcaatcaaatgtcatgattggtctttcaattatagctgcataattgaattttgatttttatactttttgggccttcctatcttataatctttgttcttttggtagttgttgaaaaccttgtgatacttgagtttgtttgaaggtttaacttcatggtta

SEQ ID NO: 260532 - DNA, 362 bp, Glycine max
agctttgaatatctgcataatggtttgttctaaaacaaatatagcaaacttatcttccctttattattaattttaacactacttttgttggtgcagcattaagtatggacataaaattctacagggcattcaaaatgagaacaagaacatgaaaaaatcacttaaggtaatttaacaaaagctatttgacatgttttaaaaatttagagctaatacctttgtatatactaatcataatccaaatcttgataagataatgaaatatggtaatcaatcctaatgagatgatgaggaaaataaggaagttactcctagaggttaatctaagattaagatatttttgtatattctaacacaagtat

SEQ ID NO: 260533 - DNA, 358 bp, Glycine max
tagctttaacccacatctccatctttatcccctgctacctcaactgggactaccctccattcctctgccacaacaaccctcagctcctcaaaccgaagggcttatgttaggaagagaatggctaggaaacctcgcagaaatgttaacccttttttaccagttctaatacccaatcttttgttgttgtcctttatgatttggaacccgcttaactctcaagattgacacacgcaccctttcatcttttatttctttctgtcacatctttttttctcttgtctttcttaattatgtgttggtagattagatcctatgtaggaacaaaacaaaatgtctgactaatagtgtgagcacattt

SEQ ID NO: 260534 - DNA, 405 bp, Glycine max
acgaaatggcagcaaaaaaaaaaagaaaaattgatgtgctcgcaaccccagataccaaccaccgccgcagcaagcatgagcagaccgtcttttccaacaaaaaccgaagctccagaagaaaatatagggggacaagcgaccaggccgcaggggaacgacaaagagtgctcgagccgagagggcaacggagtggcacaaaaggagcgcccggggagagagagagagaacaagaaccccccgtaaccacgagaggtcaacacagacagattgtcacacaggaaacacaaaggggggcgaccatgcaggccacaaaagctacaaggggcgggaagaaacacgcctgggggcgccggcccgtgtcaaaactaaacggcaccctgggttttatacgccaaagccgaacaa

SEQ ID NO: 260535 - DNA, 356 bp, Glycine max
  unsure (1)..(356): unsure at all n locations
agcttaannagattttattttttcgttttaaaaaaaaaaagcccgggcgcctagaagctatnagngcttttattttcattcactaaaaaaagggtcaaacgtagaatgaggtagcaaggtaaatatattaatgccataaaacttttagaagtctaactttgtcttatacaaagaatagcttaaaaaatttatttggactattcatatgcatagtcaataaaatttaaacaaataaatatattaatgattacatatattaaaaaaataaaactaataaaaaatattcggaagaataagaatattgtcattaatattggagtaatgttgaaaaaaatatataaatcttagacacatcc

SEQ ID NO: 260536 - DNA, 354 bp, Glycine max
agcttgccttgccccttgatttattttagggactcatggtcactatgaatgacaaattccttgggataaaggtagtgttgccatgttttcaaagccccaattccaacatttgaagcatcacactcaatttcaaaagatttttgaaagtttggcaacgcaagtatgggggcattagttagcttatgcttaagaacattgaaagcttcttcttgtttctctccccatttgaaaccaatatttttcttgagcacttcattgagaggtgctgccaatgtgctaaaatccttcacaaatcgcctataaaaacttgctaagcaatgaaaactcctcacctcggtcacggacttatgtgta

SEQ ID NO: 260537 - DNA, 356 bp, Glycine max
agcttgttacaacttttatttgttcgaccaagccactgctagctctaacacataagaaaatttggtggttagattgcacaatgactaacaccatattgtcttacaaacgaataagcaaattaaatgcatagtctcttttctcaagatgaataaagtgttttgagagcttttctaaactttacaagaatatacacagagagatttttacacagaatgaaataatgagtgcttcaaatcatgctacatatcttcaaagcttctggtatatataggccttttttaatcaagtaattgttatatctaaacggacatatttcctctcttaagcttatgtctgaagaaaatggacgttgggg

SEQ ID NO: 260538 - DNA, 420 bp, Glycine max
atcgcacctgaggatacataagagcaagggcaacacccttgttgacccccaaaaaataatagaatattaaaagggaagagtaaataattctgaagtcacgttgcacacactcgattaaaggctgccgtccctcgtgacaggcatgtggggtgctaataccttccccatgcataaacaactctggaacccttcttttcaatattcgcagacctctttttggtttttctaatgtgttcctccaataaatgtgggtggcgactccactcgttttctcccttggagacgaacactctggcttatctatattgcttttgccctctcgtcgaagggtaggttgtgacagatggcgactccactggggacttgttagagagttaagctattccataagcgtgcaatgtttatcatgacttcttcatt

SEQ ID NO: 260539 - DNA, 302 bp, Glycine max
agatagcttgccactaaagctgtcccatcttttgccctaattcttggaaactctagacctctaaactcttgaccttgacttggtagaaccttttcttgagctgaggcgtttggatggattccatgtttgctagaaataaaagtccggcttgaatcaattcctcaccatgtattaaaggatgaatggatgcctttgtggtgcatgatgccaaggcggttttccgacacgagagcccggaacatcgtctcttcttacttgtaacatttgagggcagagttacccccccccatgtgtgtgcagtt

SEQ ID NO: 260540 - DNA, 452 bp, Glycine max
  unsure (1)..(452): unsure at all n locations
agctggaaggatgcttcaatggaggaaaagaaagagggagagaaagagagaggggggagcacgaaattgaaggaataaaggagggagagaagtggaactttgaaagatgtctcacaagactctcattcatcaaagttacaacaagtgttacacatgcttctatttatagactaggtagcttccttgagaagctttcttgagaaaacttccttgagaagcttctttgagaaaacttccttgagaagctagagcttagctacacacacccctctcataactaagctcacctccttgagaagcttccttaagaagattcgtaaagaagctagagcttagctacacatacctctctaatagctaagctcacctccttgagatgagaagctagagcttagctacacaccccctataatagctaagctcacccccatgacaaanaacatgaaaataaa

SEQ ID NO: 260541 - DNA, 429 bp, Glycine max
agcttgtatccacaaaaccataatgtgagttggattctttatggaatcaaatgcatgttcatgactctataggcgagtgaaacaatagtgacagttttcaaaattgtcggactaagatgtggtgtttaaattttggagtttagttgtggttgctgttgagatgacttaaaaggagctgaagcaaatacagtggttatctcgtgatgttgagctgcagttaaggtaattgcaatgcttattgcaattcactgcgatgggaacaaacagggatgttgggagtcactccttcattgctgtaagggtgatgaagtgcaaaccatcatgtcttttccatcttatttttttgctctgattctgagataaggtgttaaaggatgctcacagagagtgattcatggagtgatctcagaggttggtgtgccacgatga

SEQ ID NO: 260542 - DNA, 355 bp, Glycine max
  unsure (1)..(355): unsure at all n locations
aactcccccccacccnaccaactacaaaccctaagaaaactatattatctacacaaaatgtacatttcttatatttgcatagaaggtatttttcctaaggactgaaagaacttgcctgagatgtcctaggtgatcatttaggctcctactgcacactaaaatattatcgaaataaacaactacaaatctacctatgaaatcccttaagacatgatgcataagcctcataaaggtgcttggtgcattagtgagcccaaaaggcattactagccattcatacaaaccaaacttggtcttgaaagcagctntccactcatcacccttttttatctcgatttggtgatacccaccttta

SEQ ID NO: 260543 - DNA, 441 bp, Glycine max
  unsure (1)..(441): unsure at all n locations
gcttcatgatgatgaatcaagattgattctttaagctctgatgatgactaagatgatgacaaaaagcccaaagaatgatttcaagattaagttcaagatcaagattaatttcaagattcatcacgaagattcaagattcaagaataatcaagatcaacattcaagactcaaagattcaagaataaagagaagacttaatcaagataagtattaaattttttttcaaaacattgagtagcacaagaagttttcacaaaatcattaccaaagagttttactctctggtaatcgattaccagtgttttaaaacgttaagattttcaaaattcaaaatgaagagtcacatctgttgatgtgtaatcgattacaccttaatggtaatcgattaccagtgactgttttcgaaaaattcatttccaanagtcacaattcttcaagtga

SEQ ID NO: 260544 - DNA, 402 bp, Glycine max
  unsure (1)..(402): unsure at all n locations
agcttatagaatttataataagagaacaatgactattgtagaatcgattcatgtttcctttgatgagtctaatgatatctctccaagaaaggatattttaaatgatattgtagaatctttagaacaaatgcacattcatggacaagattctaaaggaaaaggagaaggaagcaatgaagatcctctagtagaagtcaaagcaaataatgatcttcaaagagagtggaaagcttcaagagatcatccccttgacaacattcttggtgacatctcanaaggggtaacaactagacattctctcaaagatttatgcaataacatggcttttgatctatgattgaacctanaatttaaatgaagcctaatagatgaaaatggataatagcttgcaggaagaactaa

SEQ ID NO: 260545 - DNA, 388 bp, Glycine max
  unsure (1)..(388): unsure at all n locations
agctnttcgtcttacagtatgcataaagtttatcggataaccactcgtgtattttcgcccgtcagcgtgactcaaaagtcagtatgaccgatcttgtgagcgcggaagataacgtaaatctccacgtgtcaacgggcttgtcggccgcgattgacgaagggcgcagaagacgacgttagtctctgcgtgttatcaggcttttcgtctaacagacagcaaaaagtttatacgaataaccactcgggtatttccacccgtcagcgtgactcaaaagtcagtatgacagatcttgtgagcgcggaagataacgtaaatctccatgtgtcaacgggcttgtcggtcgcgattgacgaacggcgcataagacgacgttagtctctgcgtgcta

SEQ ID NO: 260546 - DNA, 398 bp, Glycine max
  unsure (1)..(398): unsure at all n locations
gtgagcaacgaaggtcgttcaaggaaaccaaataaaacttaccaaaacatgagggtgtggtacgtgagcgtcacaacgatgacgggggcctgagggtggctattcgagacttaacgttgggggtcaaggacaatggcagtgatgacggcgacctgagggtgcctttgcaagagtgagcgtggggggtcagggagaatcaagagggtgggtttgcgagagactgatgagcgccagaagagagaaggcttttcagtttgtaagtttaagtaaaaagacaacatcggtttttttaaaaaaaaatcgatgtaaacatcgcgtnttgaaacagccgatgttaacatagaatcgttaacatcggttttgacaaaaccgatgttatctacctaatgctaacattg

SEQ ID NO: 260547 - DNA, 427 bp, Glycine max
  unsure (1)..(427): unsure at all n locations
agctntaggagaaaccattaaaactaagattgttcctaaacaaaaatcaattgaggaagcttcgccaagtgtccccattgaaaaacctttattcaaacctgtcaaagtcagtgataaggctaaacgaaaaattatggaacttagaaaaactaaatccataattgaaggcgtaggtgacaatcatagcgaattactaaacaagattggtagtttgcttaaggtcattccagacactccccaagcctcggaaaatacttccaaaatggtaacaagaagtacctccaaattaattaatgttattaatgaagatagtgaccaaaactcagataacacaactaagataggatcagtgtcagaaaagaatataaatccaataaactccaaacactggagaaccccctccacattatattatcaacgtccaact

SEQ ID NO: 260548 - DNA, 331 bp, Glycine max
  unsure (1)..(331): unsure at all n locations
aatgtttgaaattccaaattcatcttgtgaagaagtcacatcggtttcatatacaagcctttgtgtaccagggatttggtgattcgattaccaagtgaacccgtcttcgaacaaagaatcaaaaggatgtaactccttccaatgggttctcatattatttctacaagggtatatactcttttaactggttgttcttgaccaagactttgaagagtctataataagcaagacccttgatttgcatttgaacaacacttacaacctttacaaacaactnttccacatattcctttacaacctttgaatctctttgaacattttcttgaacttc

SEQ ID NO: 260549 - DNA, 439 bp, Glycine max
  unsure (1)..(439): unsure at all n locations
agcttctggtgggacatcttgacttgctttccaatctgacattcaccacagattctgccttcttctattttcagattgggaatgcctctaacagcacctttgtcaatgattttcttcatgcctcttaagtgcagatgtccaaatctttgatgccatattttgacttcatcttctttggaggatggacatgtggaggagtaactggtttcttgaggtgtccataggtaacagttgtcctttgatctgctacccttcattagaacttcactcttctcatttgtcaccaagcattttgactttgtgaagtttacattgaatccttcatcacacaactgactgatgctgatcaagtttgcagtcagtcccttcactagcagtactttgttcagactaggaagtccatcatggactagctntcccattccagtgatctttcctt

SEQ ID NO: 260550 - DNA, 456 bp, Glycine max
  unsure (1)..(456): unsure at all n locations
agctntcgataatttacaagtgctgcaaggtcatgacttactgtaagatcatttacgcaattgccttaggcctcaaaatcatttaagacatcaattttttcatatttttaaaaaaagtattaattattaatttgaattattatataatttattatatattacaatttttattagtaagactgtacttttaaaattgtagtaattgaacaattcaaaaccttggaagaagaaggattgaaaatagtatcgtagtgattttgaaaaaaaattaattttaagttctactaaatattataatattgaagatcttaatttattttaaaaaaataagatattacaagaagtatagacaaaaaaaaaatcacatttcactaacaatattaattatttaaaagatattttttttccaaatacatgcattgcttctaaaatgttattggtaatacttttaattat

SEQ ID NO: 260551 - DNA, 412 bp, Glycine max
  unsure (1)..(412): unsure at all n locations
gcttcttatccaaggctcatcttggnggtgaagctccttcttccatggcttattccctagtggatggcacctcctctcacctcttctcctttgtcttccgctgcatctccatggtggaaaatcaccattaaaggacctcattgaagctcaaagatccagcctctattgaagccccacaagcaagcttccatcagtgtttactttgtgaaggtgcgttgagcggaccacgatccgctaagccgcatgtcttatttttctatttttcaatttgaataacttgtggtctaactaactttntgggttcctttgtgttgcagatggcctccaagaagcgtaagagcattggggcaaggccaactacttagtatgatactagacggttccattcgcttgatgcttggaaccgttatac

SEQ ID NO: 260552 - DNA, 419 bp, Glycine max
  unsure (1)..(419): unsure at all n locations
acattttcacttataattttaattaaaaattatagattaagagtatagcttttaattataaattataaataattaattgataaataattattaaaaaattaccgccctatatatttttcctaagggtaataaagaatataatgaataataaataattattaatatttaatattttataattttattacatatatatttatgtattttagcataattttaattaccaattataaaattataatttttcatatatatgatatgaaagagaaatttaaaataaaacattaaatgtaataaacataacattaatgattgaattcaaaataagataattatctaaactttattaatgattaaaatattgttgtttaaccccatttttagtttngcttaattataaaacaaattaatgagaaaaa

SEQ ID NO: 260553 - DNA, 140 bp, Glycine max
gaagaacaccatcgttgtgatttggaaagaaaatacaaccttgcgccacagtgctatgtccaaacagcatgtgctctgccaagtccccgagtatagcggaattttcaatgaccgtattgtgctatgccattggacctatt

SEQ ID NO: 260554 - DNA, 80 bp, Glycine max
aatggaataaggtaattattgtaaaaattaaaaaatgaaaatatttatataaaaaaagagaaattaataaattttaaaat

SEQ ID NO: 260555 - DNA, 427 bp, Glycine max
  unsure (1)..(427): unsure at all n locations
tgcaagcttccatgatgttgactcttttatggtggtattctcgaaatagccaatttatttcttgatgaaacaactttagcaactgcctctttcaatgaagatgaccaaaggctttgatagactaatatttaaactttttgttagacttgatgtcctttagtcttagtattgtttgttagacatatgatatatctcttgatgtcttctgcattactatataaaagggctttaacattggttntagaggagtttcaacatcggttctagaacggatgttgaaacagctgtcattaaaagttaacatcttcaacattgattttaaaatcgatgttgaaaatcattatctacattagttatgattaacatcgatgtagaaatgtcgccaatattgtatattttgaagcgcttaggttcttgaaaaactaat

SEQ ID NO: 260556 - DNA, 453 bp, Glycine max
agcttatgcacggaaaatgtaattatgaaattgagatgcccgaagaaacaccatttcctagttaaccatgcattaggtaccatgttcaattattttgtttttaagtgaaacgggtttatgatcccaacatggttggctcctaacacatgaaactaagaatgtagtgtgaagtttcacgcttcccccttctttgtttttgttttgtagaggaaaacgcaaggatgagcaaacatgaaaacaaatggtatgcaattttgcagatcaaaaagtttgttgaacgcatatgcatgatgatgccatgactcatgcaaaatgtgaggctggaatatgataacggacaaatgcaggatatgtccattatgatgttatgaagagatgcttatgcgatgcatgatatgaatgcattttacggacacgagagcccggaaaattatctcttcttactcgcgcatt

SEQ ID NO: 260557 - DNA, 145 bp, Glycine max
ccactggaaagaccttttttttagcttctccacaaggcagatgaattaccagatgccgtacaacagaggatcatccagtggagaagcagctgaaaagaagctttttgacttccttattgatgctttcattgagttgacacatatg

SEQ ID NO: 260558 - DNA, 456 bp, Glycine max
  unsure (1)..(456): unsure at all n locations
tcgaccggatccttaatcacctgcggcatgcaagcttanggctagctngacttcttcttaatgcctgcctagtgtatagcttaggtcaaaagaaactatgaattgattaggcttcatattgttactactgaacttgaacccttctttgtcctcttgtcttttcttacaccaaccaaggtccatgtctaaaaggaaatttcagcaacaaaaaatagttttgaattgatgctgctgctaagggattcatatagaccaccaagatatttaacagctaaaacattttattaaggattaatccatttaataatcccactataaatgtctctacttacggactctcctctntaagattcaattgaacgctctccaactttttggaaatattaagaaaaatgaatccatattgccattgagttttgtggtttatgctaatctgtatctgaattgagtcaattg

SEQ ID NO: 260559 - DNA, 363 bp, Glycine max
  unsure (1)..(363): unsure at all n locations
taataaatatttataatatattgaatagataatatttctatattatttatttgttattaaattttaattttatataatttattaaaataataattgtaaaattaaaatattatattagatattaatatatataattaaaatttcgnggttcgacgtatagtagttaattagtttattttaataatatatatattttaagtgaaataattatatataatttaaaataaaaatttgtataaataaatattaattaaaattattaatagattataattttaaaaaatatttatattatatattagcatatttcataaaataaataagtatatatttaaatttaatatatttttgattataattttt

SEQ ID NO: 260560 - DNA, 319 bp, Glycine max
agttgttgattgaagaggataaaaatactccaccggctagatatgttaaagcttggcttggtcatcttttcaaacataagtttcaagctctcaagcacaagaaaaagctcattaatctggagtggtacaccatgaaaaaggttttatagattgaaggaatgttgctctgttctaaaacctgatgaaaagccacatgcaggtgtaattcaccatgaaatagatcgatgctatcagaccttggactacacttgcttcactcaagaaattgcttttaacatgatttgtgcatggaaaagggggttctatgctatgtcttatc

SEQ ID NO: 260561 - DNA, 448 bp, Glycine max
agcttcttatccaaggcacattcttggtggtgaagctccttcttccatggcttattccctagtggatggtgcctcccctctcctcttctcctttgccttccgctacatctccatggtggaaaatcaccattgaaggacctcaatgaagctcaaagatccagtctccatagaagctccacaagcaagcttccatcacctcacttgctcgaaatttccagtctttattcactcatggcccagacacagatgccacaaagaattatcattggatgcatggctcccagcttgtgaaatagttaagacgaagtttttcataaaggacccttgaaggatgtatagatttccttgcttggtcccctgcattaccataaacttccctttccctctgattttcataactctatcttcaacctaacaagaaaaaccttttgaatccatgatgaagctc

SEQ ID NO: 260562 - DNA, 402 bp, Glycine max
tttgaagagtatccttgtggaaccttcacccgatgaagacactgacaaaaacttatcttctccttttaggacaaagtatgacaagctgggggcaaataaattttcttcccatcagaccttggatgcaactgtaatcgtatccccattttagctaaatcttaacgggtattcaagccatcctttgtcttgccttgaatgttaaggagcatcccaatcacactgtcacatacatttttctctacatgcataacatcaatacaatgtctaacatccagatcagaccagtagggaagatcaaagaaaatagacctcttctttcatatgcaagtcttacttttatccttctttggggtctttccaaatatagtattaaggtgttgaaccctctggtatacttgctca

SEQ ID NO: 260563 - DNA, 460 bp, Glycine max
  unsure (1)..(460): unsure at all n locations
atgcaagctntgccactgtctggaacgccggcgattcgttattgtgatgatgactactacatgtntggggcgttggtgataggatcaatggtactgaaaaagagaactatagtaatagtgatagagataatttggtgacacttgcaataacacaaggatatgataataggaaatattaatataataatagtagtggccaaagtaccaatattaacaatgataaatgatgttcttttaattgttaaattacaattttaatctcttttaattttttatttgtgattttagcgcatcaatttttttaaatttagtcctcttattatcaagtgcatgttttattcatggaaaagtcaaaattcaatcaatattattaattcatatcttaaataaaaattgaatatattctccttactattctcttagccgataagaatatttaccatattataattataatata

SEQ ID NO: 260564 - DNA, 366 bp, Glycine max
agcatagcctccagactgacccaggtctcgaaaagcctccagatgcaccatatgagcatgggttgaactcttattagccaaaagagtacaatccaccaggtagaggaggtaagcacgagcctctacaatccaacgtcgggccaagcatctactctcatagacgtcacagagccatgacagttgcacgtaagccccatgagcacgtacgatctcatctcgagcctcctcaccagatacctctaaaagctccgtcaataacgagacctcatccacgtgcagaggctcaaacctgtgtaatacccctgtgatatgaagatggagaagacacgccacatcgtccaatgtgattgtcaactctcccactgg

SEQ ID NO: 260565 - DNA, 189 bp, Glycine max
ggaccacactcacaccggagaacccaaacgcaagcaaccggcaggtacgagacggaaagacagagaaaacaatgatgcagccgggaaaacagacctactcaaagcaggacgccaaaaaggacggaccctccgacacacaaggacaaagacgggaccaaaaaaagcccgcaaaagcccgaagagaaaacg

SEQ ID NO: 260566 - DNA, 81 bp, Glycine max
tgtgtgggtttttggtggtgatttgggttgggttgttttgagggtttttttggtgggtggtatttgtgtgggtgtatttgt

SEQ ID NO: 260567 - DNA, 411 bp, Glycine max
  unsure (1)..(411): unsure at all n locations
acccaagcacctgcagctgcagctttataaaacataaaacaaagcatgactcttttctctcaggnntataattggaatgatatgctctaaatttcctcaataatgttgacgaaacatttggatgaaggccaaagatattacattgagttggaagtacacattgttctcctttgttaaaagagaagaagtttcacctttcttatccttgaattatccaaggtagcactcaagtttataccagccgtgtccaaatccttggacttgaaagcaaccacaacatcatctaaagccgaaagcgaatccgagtaaagaatgaagcaatcttttatgcaagccttattgtatcgatcaaaagtattgttcttcacaccccatctaacatatttagctagacattcataagtcggtgta

SEQ ID NO: 260568 - DNA, 426 bp, Glycine max
  unsure (1)..(426): unsure at all n locations
agcttnccatctgccatattaatgtctggttttatggnngcaggttggccaatatgattgactgtgacctcaaacaaattaatgtcgaagttatcattattaagaagtttatattttaaaaaacaaatcataataagattatttttcttcaaattaattaaatcaccaattataggtgcatggatcatgcattgaaattacgaaaatccagagcgcttaagtttataacagtgattaacactatatgtacaacaatattttgacgtactaggtactttctggtgaccaatgcaatagcatgcacgtatgcagtcctgtctctactccttgccctcgngaatagaggtaaaagcaaaggcttgtggacattgatcgctgtcctcgacgcattcatggtggctttgctctcttccggcaacggaaccc

SEQ ID NO: 260569 - DNA, 452 bp, Glycine max
gcttacctgcgggagtggagatttcagatttagcatgcgacagagttgttgaagaacaagaactccctgtcaatgttaattctaaccctgcaggagttgaagcttcaatggataattcatccagcggctcaagtaaccagttgctccaaaagtcagatgcaagggttcaaaatctgaaaccagagacaaggattcaaaaatctgacgatcgattgtttacacttgctgctattgggcttactatagcaattgtggttcttttgctgaagaagttcattaaatctacagaatatggtgctgttttcatggatgaatcttagatgaattatttgctcgtgttagcttcaatatcaagaatcttagcccaggtatagtcgataggaaaatatagaacttctctgatatcttatgatccttgaattgtacgattggcttgtaattatgcgaatata

SEQ ID NO: 260570 - DNA, 350 bp, Glycine max
gttgtgctcctttggtgaccaccatacaaacctttggccttccattgcacaacctggaacaattgagcaacctgaagcttatgctgcaaatatttacaatagaccttcttaacctcagcagcaaaatcaaccccaacagagcaattatgacctctccagcaacagatacaaccctggatggaggaatcaccctaacctcagatggtccagccctcagcaacaacaacagcagcctgctccttccttccaaaatgctgctggcccaagcagaccatacattcctccaccaatccaacaacagcaacaaccccagaaacagccaacagttgaggtccctccacaaccttccc

SEQ ID NO: 260571 - DNA, 440 bp, Glycine max
  unsure (1)..(440): unsure at all n locations
agctntgagcaaaatctaatgacaataacattttactcggatgtccgaatgtgccccgtagtatatcgagtagctcgtaattgaaaaccgatgctcgtagaaaattcaaacaacaataactttttactcggatgtccgattgtgtcccgtagtatatcaagacgcttgaaattcagaaaagaaactctgagaaaaatcaaacgataataacttttaactcggatgtccgatttagtcccgtaatatatcgagatgctcaaaattgaaaacagaagctctcatcaaattcaaacgacaagaaccttttactcggatgtccgattgtgtcccgtaatatatcgagacgctcgaaattcagaatagaagctctgagcaaaatcaaacgacaataaccttttacttcgatgtgcgatttagtctcgtaatatattgacatgctc

SEQ ID NO: 260572 - DNA, 280 bp, Glycine max
ataacaaagaaaaagtaaaaccaccattaaagtatatccaatttacatgagcagagatacactattgttggagactgcattagcacgaggataataaagaacgtgttttctatttaatgtactgagagagccactgaaagccttcaccatatcccatcttgcggacaatactgcacataaaaacctccaaaggacgaacattggagtcaaccaaattaaccttgcccttgcctgtagtgaagttagtgagacccatgttatagcgtagttcatcctctga

SEQ ID NO: 260573 - DNA, 409 bp, Glycine max
agcttatgagacagagatgcaaaacaagacatcgatgaactcatttccaaataatagagacccctggattcatgtcctatgtcaatcgaccgacctataccacgttcctatttaataaaggaattagttcaatatcgaatgttacagaacaatttaatacttttgttagttgactaagagaaactaaattgaaaagacagttaggggaaaaaaggactagatccaggtttaaggacggagaaatagagactttgacgactcctttagaagtgactttagtgtcatttgctagtgtgattagatgaagaactttatgaggagacagagaggtgaatagagaactattaccaaaaatatgattggaagcacctaaatcaattacccatggttcttgactatccacagaatg

SEQ ID NO: 260574 - DNA, 411 bp, Glycine max
  unsure (1)..(411): unsure at all n locations
agctttgagccaaaatcctgactcaccatatatcttgacccagggtgagaatgccaatccttaccctcggaagcaaaaaaaaagaagagaaggaaaatttccaatcaaaggaaaaaggagaaggaaaatttccaatcaaaggaaaggaaattcccaatcaaagagtgggagaaagcaaaaagaaaagaaagaaaattcccaatcaaagaatgggagaaagaaaaaaagagaagtaaaaaagaagaaagctcctggtcaaagaaaccagaagaaatgtgccgagaggtccttggactagacgatatctgaacaatacagaattgtcaccaaatgaacaaaagaaagaaaaggaaaccatgacctanaagtggtcttctccctttgattaccaaccaaaatcctgtgcgctag

SEQ ID NO: 260575 - DNA, 408 bp, Glycine max
  unsure (1)..(408): unsure at all n locations
agcttatacttctcaatctgcccatcgactgtattacaattatagtggccaggtcgcacccttgccctttgattgcatagcatacatactaccttatacttatgagaagggacacagtctgcttcaggatcatgcattctattcccaatcaacctatgacacccatgtgacaaaaagacaaagcggtcaatgttattggtaagaacaagtccactgtctcgtctggcttgaaacaggccgactcactatccacgaaacacacatgtntgtataaacgtctaccaaaatcactatgacaatgtgctggaatataatagttctgatgatcaccaaaaagaggaaatcttatgacattaacaactctgagacagatcctgcgtatggtgagtccaagcatccttctcatct

SEQ ID NO: 260576 - DNA, 459 bp, Glycine max
  unsure (1)..(459): unsure at all n locations
agcttctaattnttttttcaaccgngttntttaatagatcataagtattttttttattagagacaattttatgataattgagtaggatgacttaaaattatttgtttaaatatttaatataattatatatttatgactcaaatttaaaatcttcattggattgaatcaattttgttgaacatattctcatataattactttttctaacaaagattcaaacattgattagtcacgaaaacctaacattttctatttggtacccaaaatataatatgataaattttattgatgaaattttggtatatatataattattatcattatcataatttattttactttaattttcaaaaatcatcgttcaaatgaattgtcgtattaaatattagtgttaaaattcgatattacttatatgttagtgggtcagaacatcactttgtatttctttgaataaaacat

SEQ ID NO: 260577 - DNA, 388 bp, Glycine max
  unsure (1)..(388): unsure at all n locations
actanttccgctcctgagtatgacagtcaccgctttaggagcgctgtacaccagcagcgcttctaggccatcaagggatggttgtttctctgggagcgacgcgtccagctcagggacgacgagtatactgatttccaggaggagataaggcgccggcggtggacatcactggttacccccatggccaagttcgatccagaaatagtccttgagttttatgccaatgcttggccaacagaggagggcgtgcgtgacatgaggtcctgtgtaaggggtcagtggatcccgtctgatgccgacgctatcggccagctcctgtgatatccgttggtgttggaagagggccaggagtgcgagtatggccacacgaggaaccggtctgatgggt

SEQ ID NO: 260578 - DNA, 397 bp, Glycine max
  unsure (1)..(397): unsure at all n locations
cttcttgaacgggatcaatatattcatttttatagattaaaggatgaaaangnnggacgcgatatcttgtggggtcatcctaatgcagtgaagttatacaatgcatgtaatttgatgttttggatagataatacctacagaacaaacaggtccattacttgactttgttggtgtgacaccaacagggatgacattctctactggttttgcatatttggagggagaatatgtaaatagtgtggtatgtgctctacaatggtgttgaggtctttttctaagacgtgatgccctccctggagttattgtgaccgattgagacctatcattgatgaatgcagtgaaaactgtttttgtgaggcgantaacttgttgtgtagggttcacatccattagaatg

SEQ ID NO: 260579 - DNA, 479 bp, Glycine max
aactcacaggcgacctgcaggctgcaagctttgtacatgtcaaagcaaattgttaattcttttaattgcatatcatgctaatgcggacttacctattctcgtataggtgttagatagcttctatctatacttggaatgaaaatagcaagcaatctgcaggtagtcctatatatcttgttttaaaataagcatagtcaaagaaaacaaacttgatggtgtcttctgttgcattagaagtagatcataaaccaacatgttggcttaagtggaactgaacttaatctcctttaagtaaggtctcaagttcgacgtttgtaaatgaaaaaaacatagttaggaagggagatcccactaaaggtaacaagtcatgtttctagcagagattaatcatcaataaaattgacggattctctatactaatgtcatgacgaccataaaaaataggataaaacagatcctatactatataacttacagac

SEQ ID NO: 260580 - DNA, 446 bp, Glycine max
  unsure (1)..(446): unsure at all n locations
gctntacagcagattntagtaatgacccactaacctataattaaaataacttaatgccattaacctagggaattaaaacaaactaaatgactgagtgtaactgaaattgttggcaaccaaaagtcacccccaacagccaacaagtcagccaccatttggtctcccaaaaggctgatgcctaggttgccaattgggcccttattacaacttgaactaaagcccttttagttgattaacccaaaacatatttttggtcagccaactttacaaggattgggccattatttagacaaactaaacactctaaaattgaaataaagtggtgtcatttagtcctccatttgggccatgatacaactcacaaccttggacttttctccttgaaacttgngcttgtattcaaatagtatggacagcacttgttgaagaagcttcttggctttctt

SEQ ID NO: 260581 - DNA, 436 bp, Glycine max
  unsure (1)..(436): unsure at all n locations
agctttgatgcttgcttggactcttggttttctctaagntggcccaagatttatcgaagttnttattttgaccgatgtatttccgatatgtttcgctatatttcatgttttcaatttttttttctttttttcttttctcttttttctttaatgttgatatattgtattctctgaggtagaagtgttttcaacacattccagcttacgggggtattagacataaaattaatttagttagttactataagttatttgagtaagttagttggttattcaagttatagttactagaagttatttgagtaagttagtgttagttactcaagttagttattctctatctttgtataaatacatcaactttgtaatactttgatcaatgaataaatgaatgtatcctaaacctgcttttatctatcttcatttttttcatcct

SEQ ID NO: 260582 - DNA, 135 bp, Glycine max
taattattaatatattataaaaaatttattatatattattttaggttattgattagataatataaatagttaaattaaattttaaataatatgtatttttaaaaaaaattaataatttaaatatttatgaaaata

SEQ ID NO: 260583 - DNA, 417 bp, Glycine max
  unsure (1)..(417): unsure at all n locations
agcttccttggggccatttcctgcgagaactatacattggaagttagttntacaagataatgcttattttaccacaaaaatgacatgctaatccctccggtttagaacgaactcatgcgcacgtttaaagtaacacatttatgcacatgcgtacgtgtaaaaatatcctactatttatgtcaacatacaaagacacccaacacattctaattgccatacatctatgtgcatcttgaaaagaacacacattctcatgctcaaggcgttgcgtcaaactttacacctaattatatcctagatttttgctatttacaaactacttacacatatttgaaatatatatcatacaaagtttattggttcactcacatttatttatatgcatattggaaaactaattatattctgcacacacac

SEQ ID NO: 260584 - DNA, 418 bp, Glycine max
cttgagtcacctgcggcatgcaagcttctagccaaatggacttaccttgacttttttctctttgatagcccttttgagccttggttccctttccttgttttgaagctcactacaagccttaagtgaaaaaccatgatatcaccatatccttaaggaattttggagctttggaattgttttgggaataagtgtgggggtttttgtttcattggataacatgttttgttggccatgcttcatgatatattttgagccatacttgatatacattgcatattggttaaatgttggacatgctgaatatgatgttgtttcttcttctaaaaaaaaattataaaaaaaatcgaaaaagaaaaagaacaacagtaaagttgagtgaataagaaaagaatgatgagactctcggttctactcttta

SEQ ID NO: 260585 - DNA, 362 bp, Glycine max
atgtattttttgttaatttttggggtttgggtggtatgggtggtttaaagctgtggtgtaagagaaaggttgcatcttgtgttggatcaagtcaagaatctaaaaagggggttgaatagattctttcaaaatctttaccaattcattcttaacaccgattaaaaaacccctttaaaccaatcaacgtttcttcaaaagatctttagtaaacaaaaactattctgatggcccttaagatcaattccattaccaagatgattacaaaactgagagttatagagaataagagaattacacaagagtttatactggttcagtccaatctggacctacatctagttgttctaagtcttcttagaact

SEQ ID NO: 260586 - DNA, 403 bp, Glycine max
  unsure (1)..(403): unsure at all n locations
agcttntagattggtgtaccagatgatcgcttccccagccaagctatcttggaagaagtgcatcaacaacttctcatccctagaatgcgaccccatcttgcgacaatacattgtgagatggttcttagggcaagttgtccccttgtacctatcgaaatcacgtaccttgaatttcggggggatgatgacatccggtactaagcaaaaatcagccatgtctgtgaacagatagtcgccaaagccttcaacaaccctcagatctctcttcgatgagatcgagcttcctcttttcttctgttgtcgggggtgtcccttctgcggaaaagaatatcttgtgtgctggggggtttcgaggttctcccatgatggtgggctgacgtagtgcattaagcgctggcccctc

SEQ ID NO: 260587 - DNA, 441 bp, Glycine max
  unsure (1)..(441): unsure at all n locations
agcttcagacaaactgtgtaagcaattatgattaggctgtnatcgattaaaacaaagagtgtttccttctgaagaaacttttgtaacttagaatttttttctccccacttactcatgatgatgcataatgcacaaaagatatgatatggactaagatacattcaatataacaaccaatacaaaagccactcaagggaattgggcatgtaaaagacaaaacatcttcatgattttctccaagctccaagctttagtcttcatgtggttcatgttgctccccctatctctaacacaaaggcatgacattttttcctcttagaagtcaaccaacaagagattcttctatacatcgtgttatatgtattggtcatgtgtatgaaagatatcttgttcacgtgaaataatgatcatcccacttgaatgtgtatatgcctatgcaac

SEQ ID NO: 260588 - DNA, 305 bp, Glycine max
caacccctatttgaaccttctagacatgaaggctacttcattaatttgggatccatcaaattcctgcatcttcacttttaaagctttaaacaaactcttctttttcttctcttctgaaaaatatctcttcaaatttaaaggcagcggaaatcttcttttgtagatgctacctattttgaaggtggacttcatggactcttaagatgtccaacaactcatcccatgcaagattattcaaaatttttgcttcttggaaggtgtggtcttatgtaacaccctgagatgttattaattataaatcgatg

SEQ ID NO: 260589 - DNA, 450 bp, Glycine max
  unsure (1)..(450): unsure at all n locations
agcttgcaatattgaaacacatctatacactatctgatactctaaaaaagatgatggaacatcatgaaaccctttactttttgacctcattatgctgtcattggcagtgtttccttctccacaaccataccaagaaaaagttgttgcataccttgcaacaatctcagtaaatcgtggtatgatctttcctagttggcgtagatgttttcagtggccttttgctttgccaaccatggtttacggtacatggtggtgtatccttcagtgcttttgatgtgtgctatcaatgctgacactaaagttgatggatcatnttcaatcatagtgtggatgcttttactgacgagcaaatacgacaactntgcatgatcttgtgagattgatggattngaacatgtatggggttcacacagctttcttatttcccgttgcttacttgcaaggatgtat

SEQ ID NO: 260590 - DNA, 437 bp, Glycine max
  unsure (1)..(437): unsure at all n locations
aagcaccgcagctgcagctacacattattttctaaacttgtgttttgttaccaattactaagtctttcttaactagatgattaagatgatgcatgtttatgtgtgcagtcctacaatgccacaaccaagagtcatctatcttaccaaacaactcagctcctaaaatgatgcatgttcaatatttaacatatagatattacctactctcttgccaatatggacatcctgaccagacatagcttcactaataagacaataattcttgttgaattcaattttgaagcctttgtcacatagttgactaatacccaagaggttatgctttaatccatccacatatagaactttctttatctngagtttgactgatttccatatttccttcttcattatctttcctttgtattggctcaaaagtgacatatactccttttttg

SEQ ID NO: 260591 - DNA, 325 bp, Glycine max
ggaagctacccagtctataaatagaagcatgtgtaacactcgttggtactccgatgaatgagagtcttgtgagacacaactcaaagttcaacctccctccctctttcttccttcaatttcgtgctcccccatctatcttcctctccctctttcttctcctccattgaagcaccctctccaagctgcttatccaaggctcatctaggaggcgaagctccttctcccatggcttaatccttagtggagggcgccctctctcacctcttctcctttgacttcagatgcgtccccatggcggaaaatcaccactaaacgacctcactga

SEQ ID NO: 260592 - DNA, 428 bp, Glycine max
  unsure (1)..(428): unsure at all n locations
ctctaaatttacattgatgtntgtattgatgggaggaggttacatgccatttttgctttaagagtaacgtcccactggtaaaactaactttccaaatgtttgccttcgcaggaatggccccgaggaagcttgcctcaaagaggtccaggaaggacaaggcggccgaaggaactagttccgccccggagtacgacagtcaccgctttaggagcgttgtacaccagcagcgcttcgaagccatcaagggatggtcgtttctccgggagcgacgcgtccagctcagggacgacgagtatactgattttcaggaggaaatagggcgccggcggtgggcaccactggttactcctatggccaagtttgatccaaaaatagtccttgaantttatgccaatgcttggccaacagaggagggcgtgcgtgacatg

SEQ ID NO: 260593 - DNA, 371 bp, Glycine max
tcctctcacgaggtgaagggtgagccatgttctcagtataaaaattaatagtggaatgttcaaaatcagaatatttaaaatcaccttctacaaaatgctcaaaatgttcaaaatgcacagaatgaccaggatgcacactatgcctaactaatctatgaaagggtctatctatttcaggatcaaagggttgtaaatcacctgaattgcccctagtcatgcactatatgcagcaaataatgtgtttctcaacaagcacctaacaagggggtaaaactaccactactctcaaaccatatccaaatgagctgaaatttgtgacgaacactctataatcctgaatagatagcaccaaaaaattcacaccaaaattc

SEQ ID NO: 260594 - DNA, 86 bp, Glycine max
ttagaggaggtagtggagtttggggttgaaaaggtattgtgggtggtgtatggtggggtggtgggggtaatgtttaatttgggggg

SEQ ID NO: 260595 - DNA, 427 bp, Glycine max
  unsure (1)..(427): unsure at all n locations
agcttgcaattaaggataatcttttgtatgttctttatnaacacatccaagactaggctaaacaagtaaagacttaaagctaccttggtgtaatcatatcccaataggaaagtccttagtttcacctattggagttctcacactagtaattaccccttcatgcatgtcttgtatagctcaaatataagtcatgcgcacaccttttttctccaaagtcttccacaacacatctcttgtgacacggtcataagctttttccaagtcaacaaaaaccatatgtaagtttctttccttaactttgtacttttccatcaacttacggataagataaatgacttttgttgtagaacctccaagtgtaaaaccaaaataattctctaagatcctttgttctactctttaatctatgtcaactacccttttacat

SEQ ID NO: 260596 - DNA, 362 bp, Glycine max
gtttgccgaagaacttgaacaacaggtcacaaatggcggtgagctccgatatgaatctggccatttaattcaagccttccaagaaacctccggcttgcctctctgtaccgagtttttgcatttcaaggatagcctttaccttttcgggggctacctctatccctttttgggttacaatgaaaccaagcaatttctttgatttgacccccaagggacacttagtgggggtcaaccttaattgatttttcttaagcctttcgaaccacttccggaggatgaccaggtggtcttcctcggatttaaatttaacaaatatgtcattcacgtagacctccaatttttgatgcatcatattatggaac

SEQ ID NO: 260597 - DNA, 403 bp, Glycine max
agcttgaaggaaaattggatgcattggttaatcttggaacccagctggccttgaaccaaaaatctgtacctgttgcaagggtctgtggtttgtgctcatctgctgaccaccatacaaacctttgcccttccatgcagcaacctggagcaattgagcagcccgaagcttatgctgctaatatttacaatagatttcctcaacctcagcagcaaaatcaaccacagcagaacaattatgacctctccagcaacagatacaaccctggatggaggaatcaccctaatctcagatggtttagccctcagcaacaacaacaacagcctgctccttccttccaaaatgctgctggcccaagcagaccatacattccttcaccaattcaacaacaacaacagccccagaa

SEQ ID NO: 260598 - DNA, 383 bp, Glycine max
acgagatataatcttataaatctgaagtaaagagaaaacacctggtgagaaaaacctgaacttcaccctccacagggaagagtgagagaaattatttaatagtcttgtccatgattcaactaatatatgtgttacacatatttgagttttttagattaacatagaattattcacggatcattcggtatcatcatgtggagaatagccgacactcgaaaatattgggaccctctcgtaaaacttatcatagtggggaccatcttgcaaaatgttgctacaatttgcactaacatgtccccgttgtatcacaagctcctgatatagaattgcaagaacagaagttttcactttaccaagcctctatgctctccatcacgcttaat

SEQ ID NO: 260599 - DNA, 413 bp, Glycine max
gcttatgaacaatcccctacactgttcttatcagattttcatacaggaatttataataatagcctctctactgacaatttttacatggctatatgatttttgattttacttgagaaaatttgaaaaatttaaataactgaatgttgtttaccttaatgtcatgatgatggtgtgcttgttctggcttgctcttttttttttttttggtgaaaatcttgttctttagatgtagtaactagtaattcacgaagactcaatcaacaatcatgaatatcttttgcatccaattaactattatcttcctcaaagagatcctttcattgggaactaaacaggtttattttttaatcataaagcacagtgaaaacaaatcatatatcaatttaaataattcattgttaaagcaaaccccc

SEQ ID NO: 260600 - DNA, 341 bp, Glycine max
  unsure (1)..(341): unsure at all n locations
cccccctcccacccccgccctccacccacccctcccccacccctccccccccctcctcagcgctccctccctctccaccaactcccctcccctcccccccccccacccccccctatcccccccctcgcccccacccgccccctcaccccaccgccccacccacttcccccctccccgccccgccctcccctgnagcccccccccccctcccccccccctcctcccccccccccccccccccctccccctcccacctcctcccccccccccccctctccccctctccccccaccccccccccttcctcccccccccctttccttgccccccccccccccccc

SEQ ID NO: 260601 - DNA, 412 bp, Glycine max
agctttgaatggacagtgcttcactaaggtctctattgactacttcaccaaatgggtttgagcggattcgtgcgtccatgtaactaggagcgtggaggctaggttcatcaagaaagagattatttgctggtatggtttacctatgaagattatgaccgacaatgccacctatctctacatttaaatgatgaatggaatgtgtgaggatttaggatccaacaccatacttctaccccttatatgcccaatatgaatgggcgcattgaggctgcttagatgaacatcaagaatatttttcagatgatgaccgtgtcattcagggattggcacgagacgctcccttttgtgctgcatgggtatccaaccttcgagcgcacatcctctgcggcaacctattactatttcggataca

SEQ ID NO: 260602 - DNA, 447 bp, Glycine max
agcttcgtttagcgactaccgcgtaaggttttctgcgtttttcagtaagataattagagaaaatatgattaaaaatttgccgcaaatagtgttgttgaatattgtcggcctcgcgctgtttctttcctggtatatccccgttaatcatggattctggttgccgattgatgcggatattttttatttctttaatcagaaactggtcgaaagtaaggcctttttgtggctggttgcattgaccaacaatcgcgccttcgacggttgttcactgctggcgatgggtatgttgatgctgagtttctggctgaaagaaaacgcccctggcagacgacgtatcgtgattattggtctggtcatgctattaactgcagtggtattaaaccagctgggtcaggcattaattcctgtaaaacgggccagcccaacattgacttttaccgatattaa

SEQ ID NO: 260603 - DNA, 420 bp, Glycine max
  unsure (1)..(420): unsure at all n locations
agcttcactntttacatctgatgcatgcattatatattatttaatcattatatnaaataaagagtatttgaatgataatctttaactctttttttatccgtaatttttcttaactcattatactaaacaaaagcactctgaattcattatatatgctaaacaaaattccttaccgagttttcaagacagagaagtattaacacttatgcatgcaacagatcaatttaattcattagcagtttcacattagaaaatcaatgaaaaccagaaactgaatttgaacaaaagaagacaaattttgtgaaaaggaagattcaaatatcacaaattcataattatctaataaactgaatcaaggcgattaagttctccctgcgttcaaagagatataattaaatgtacagaatatngcttccttga

SEQ ID NO: 260604 - DNA, 309 bp, Glycine max
gaaattttattctatgtactaccgaataaggtttgtgctgtttattgcattcaactgcatcgatgcattttacagctaccacgaaccagacagcaccaagtgaccttttggactctaaaaccataaaaacaagatgaaaatggcactagcagatataatcaatcttttaacataataagacattttcacacagccaggaagattaatggtaaaaataagccacttctgaaaaaagtggtaaacaagaagttttacagtactagagggcccataagacaaaatgaatttcaaattatgatgtactacata

SEQ ID NO: 260605 - DNA, 395 bp, Glycine max
agcttccttaagaagattcctaaagaagcttgagcttaactagacatacctctctaatagctaagctcacctccttgagatgagaagctagagcttagctacacaccccctataatagctaagctcacccccatgacaaaaaacatgaaaatacaaaaaaaagtacttactacaaagactactcaaaatgccccgaaatacaaggctaaaaccctatactactagaatggctaattataattccttgttgattaatccttgagttccaagccaaatttctaatgttttaggtgatttagacctagaaactcagagcttgatcaatgaatgtctacaaatgcaagtgtttgatccatttttgacatcaaatccttacacaatttcaattcagatct

SEQ ID NO: 260606 - DNA, 403 bp, Glycine max
  unsure (1)..(403): unsure at all n locations
agcttgctctaaatttacattgatgtttgtatttatgggaggaggttgtatgtcattttagntttaagagtagtgtcccactggtaaaactaactttccaaatgtttgccttcgcaggaaatggccccgaggaagcttgcctcaaagaggtccaggaaggacaaggcagccgaaggaactatttccgccccggagtacgacagtcaccgctttaggagcgttgtacaccagcagcgcttcgaagccatcaagggatggtcgtttctccgggagcgacgcgtccagctcagggacgacgagtatactgatttccaggaggaaatagggcgccggcggtgggcaccactggttactcccatggccaagtttgatccaaaaatagtccttgagttttacgccaatg

SEQ ID NO: 260607 - DNA, 67 bp, Glycine max
ccctatatataccaatgataacattaacattgagggtccatgtcaataaaggaaaacgtttatcggt

SEQ ID NO: 260608 - DNA, 417 bp, Glycine max
gcatgcaagcttgaagagttggcccttaagcattctatgttattaatccctgtgacaccatccacaccaagatccctggtaaggtgtttcttctgcttcttttttcttaaataatatagttatgaaaggcattcccttttaatttatattgatttattatttctacaccttaagggttttatgtgcaatataaaatttcatggtacatctatatgtggcatcatgattgatgttcctcctgagaatctgctaaactagcaacatgtcatatgtaaaatatattctcttccagttttcttgctctatgtgttagatatatctaattgatgaattattttggaagtgttaaagaaatatgtacccatttgcggcgcttacttttgaatgagtctagtttaaaattatttaactcaattt

SEQ ID NO: 260609 - DNA, 441 bp, Glycine max
agcttctaatacaagtgatatatttcgagtattcactcaactgcgatggtgttgttgtctgtgcacgtgggataaaggttgttgtgtggtggtctttgttagtcgtcttttacgactaacttttgtatagaaattttttccaaaatgtatataaatctcccaatttatagttatttttggtaagattgtaaatatttctagtttacttttcatatgtgctcagtagaagccttccttatgaatttaatgtaaatttcacctcaattttaggtaaaaaggagaaaattatgaaggtgcaaaagtttttgtcttgctaagcctgaaccatgcgcttagcgagaccaaaccgctaagcgagacaacagtggcttagcgattgaggataagcctgaagagagttctttcacgtcaacacgcacccagtgcgtatgcagctcgcta

SEQ ID NO: 260610 - DNA, 438 bp, Glycine max
  unsure (1)..(438): unsure at all n locations
agcttgatgggttctaaatagtggttattgaattcaaagaatgcaagtaaaattctgaatgcttatgtgatactttatgaattgcttatatttttaaaacttataacttgttatttattattttataattattatttataggttctagatcaattgaagaatcaacttttattgatgagattgaatccgatgatgaaggtatattcacttttagttgttctaaatttttttaatatcattatacatatctaatttttcaaattttttaaaatataagtggatctttggtcagtagcattactcaatgtntacaagattagtagacattattattgatcggtaaagtaataactatacttatctactaatgtgatgtatgaatttaagaattgaaacatctaacatatgatggttgattttattaatactacgctgagc

SEQ ID NO: 260611 - DNA, 254 bp, Glycine max
  unsure (1)..(254): unsure at all n locations
ttatggtcattactttcacacgaaggtcagattcacgtgcataatatatcgcgaccgctcaaattgaacaacggaagctctctaaaaattaaaatggcatacttgtacttggggccgttcagggcatattatttaagaacctttgaattgaacaacggaagcttcccgaaagatcaaatacgcctaactttttactcggcggggccattcaggcgcattatatatcaagacacttgaaatngaacaacggaagc

SEQ ID NO: 260612 - DNA, 342 bp, Glycine max
ttttgcttttgaaactctgcgaacaaccagagtgtgctctatattttcattctctgtctccttttccaaaaagaattcagcaaggactaatcgcctaaattattgttggtctcacttgtcccttcttcaaaagaacgaaagactaaccgtcttacttcttttgtgtctcccttctccctttccaagagaattgaaaggaccccgcctgaaaaatttttgattcttccctttcccttaaaaaaaaagattgccatgattcaccgcctgaaaattttgtcttacacactggatggtcatcctttgtggtcaagcttagggtacatctactcgggttgtggactg

SEQ ID NO: 260613 - DNA, 449 bp, Glycine max
  unsure (1)..(449): unsure at all n locations
gcttagcttaaaatgaagagagatgtaatttactttattataaatatttgataaaattatctgtttaaataattaaaaaataaaaaatgataaaaatagacatatattatataatgtattaatataaatttcagttttattttatggatacaaatatattctgaggtgataaatttttggataaaatatgtttggaatccttatgaagtttaaaaatattaattttgtcctcataaaaaaattgtattaattcgactcccataaaattaaaacattcttttgttggccctagagataactttgttagacgattccatgatatgactaacaaacctaaaggattgtattgaattaggattttaaaagaatattttgacaaacaaaaattgtgaatnttaaaagattttgcacaaatataatgattnttaagattttttaagacttctatg

SEQ ID NO: 260614 - DNA, 438 bp, Glycine max
gtcacctgaggcctgcaagcttagtaggagacagtagttccaaaccatctccaatatatttagtccctccctttacctttattatcttcacttcctctccttttgttaaatcaatcttgaacaagttgccgctgaaagtgtgaatcacaatcaagaacccatctgggtggtaaactatcccatttagcccaaccaagttcttataccactcttttgcactaaacaacgggtttctaatgattgatataagcttcccttccaccccaactttccagattttgttgccttttatatctgtgacataggcattgccttctgcgtccactgcaacatcatccgcgaaaagattctcatcacctgcatccaattgaaaattgatattgtcacaaatcacaataatgtcaccaagacccaccagttgtatatctaagctgacac

SEQ ID NO: 260615 - DNA, 436 bp, Glycine max
  unsure (1)..(436): unsure at all n locations
agcttccacaacatccaagtgaatcttatttattcagcacaagctatcacagccaagcaaaatagagcaaaggcagaaaactctgccaaaacaccaaccaaatcacagctgttctcacttaaagaccccagtaacaattccttcattccggctcattaaccgttggatcgactcgaaaattttactagaagtctttagtacataagcctacattttgaccgttgggatctactaggaaacatccagaactcattctgcactactctttccacagccaaccacacacaagcatttttctgcacaaagccaaaatcctgctgcacctatttngacagcaaaattctgcataagtgcagatttcgaaaatcacacttcccctcatccaatcttgcccaaatcaattcctacaagtcccaaatcatgtatcaatcatgtc

SEQ ID NO: 260616 - DNA, 449 bp, Glycine max
agcttgggttctcagttctgtgtgtgaatgaagtgcgagctaaaataagtgaaataaagagggaagattaagtgcttagaaaaaatgcgactcacaaattctaaacttcgtttttgaagatctcatggtgaaaagtgagttgtgaatttctcttaagttcaagaagacactcattcactcaagaaaggttcttgcacatgattgattaggttatgtctttccttgactatgtttttcatgtgtttctacacattgctagcatatgcaggaatttcaaaaggcatactagaataggtttttctagttcaggctaagggtaggtttctcttaggctcttattcacagaggaccctagggttgggtgccttagtctcttcttttggggtgggaactaagattgattgtgatttattgtaagaattctatactggattagcttcaatttactg

SEQ ID NO: 260617 - DNA, 316 bp, Glycine max
  unsure (1)..(316): unsure at all n locations
aaattttactaaaatatatttaaaattaatataatacatatatactgtcaaaaataacacctataaataatattttaaattaatctcaacaatatattataataaatactttaaaaaatcttcgcnttccgctgcatctaatataatattaatttacataaaatatatatctatataaatctacatattataataatctcctacattaattattttataatataaatgattatataaatttataaataatactttaaataatattcataatatatatctactgcatataaatattaattaaatatatacactctat

SEQ ID NO: 260618 - DNA, 418 bp, Glycine max
  unsure (1)..(418): unsure at all n locations
ttganaactgaagctctgatcttattcaaacgacaataacttttaactcggatgtccgattgagccctttaatatatcgagacgctcgaaattgaaaacgcaagctctaagaaaagtcaaacgacaataactttaaactcggatgtccgattgagccctataatatatcgagacgcccaacaaatgaaaacggaagctctaagaaaagtcaaacgacaataacttttgactcggatgtccgatagtgtcccgtaggatatcgagacactcgtcattgaagacggaagctattataaaaatctaacaacaataacttttaactcggtggtctgatcgagccgtgtaatatatcaagatgctcaaaattgaaaacggaagctttaataaaagtcaaacgacaataactttggacttggat

SEQ ID NO: 260619 - DNA, 436 bp, Glycine max
  unsure (1)..(436): unsure at all n locations
agnctatgccgcaaacatcaacataataccttctcttcctcaacagcaaaatcagcgccgactaaataattatgacctctccagcaacaagtacaatctcggatgaaggaatcatcccaaccttagatggtcgaatccttcacaacagcagcagccacaacaacagacttattttcaaaatgctgttggcccaaacaaaccatatgttcttccaccaatccagcagcaacaacagcaacagccccagaaacagcaaacagttgaggcccctccgcaaccttcccttgaaaaacttgtgaggcaaatgactatgcaaaacatgcagtttcaacaagagaccaaagcctccattcagagcttaactaatcagatgggacaactggctacacagttaaatcaacaacagtcccagaattgtgatagattaccttctcaa

SEQ ID NO: 260620 - DNA, 422 bp, Glycine max
  unsure (1)..(422): unsure at all n locations
agctggcatcaatataaccctntattttttactcagaatctctccataagtgaggaactcgtctttagttcttctcaagtacttaagaatggtctgaagtacttttcaatgttcctcaccgaggtttactggatattgactagctgcacttagtgaataagcaacattaggacgtgtacaaatcatgatatacatgatagctcccactgcgctggcatatggtactctagtcatgcattctttctcttcatgagtttaatataattttgtaagatgacccttgtgttgaatgtcttcttatgacctttgttgcttgtttgataattgggagtaatatagagatgatttatgatgaatacctatgaaaaataggcatgttaagcttcaaaaattggggtactccttttttaattcatttcata

SEQ ID NO: 260621 - DNA, 425 bp, Glycine max
agcttctagccaaaaggacttaccttgaatttattcctttgatagccggtttgagccttgtttccctttccttattttgaagctcactacaagccttaagtgaaaaaccatgatattaccatatccttaaggaattttggagctttggaatcgttttgggaataagtatggggggtttttgtttcattggacaacttgttttgttggctatgcttcatgatgtattttgggccatacttgatgtacattgtatattggttaaatgttggacatgctgaatgaaatgttgtttctcaaaggtaaaaaaaaaaaaaattcgaaaaaaaaaattcgaaaaataaaaaacaaagagaaaagcaataaaggggagtgaataagatcttaaatggcccaagaatgatgaaactcttggctctactcttcat

SEQ ID NO: 260622 - DNA, 438 bp, Glycine max
gcttgtaagatctggccaaaaaccccatattaccttcaatggttgcaatgcaagctcttatttctcaacagccaaaaaattcaacaagtgaccgtgtaactgagagtccaaggatgaagcattcccaaatagttttgtacaatgaagccagcagagaaagcttctcccaagagaggagagatatgagactaaacatagagaaaatgcaatggggtgtaatagaactggctaaattacgcaagcaaacgaacgttcagatgccacagttgtttacccataatgtcttgcttaatcctgctcgtgcttcatcctcaccaagattttgttgaataccttgaccttctgtacctgtgtacgactatccatgatattatggtgtatttctggaattgtaaaaagatgtaattgctattttactttgtactttatatttgcttt

SEQ ID NO: 260623 - DNA, 481 bp, Glycine max
  unsure (1)..(481): unsure at all n locations
gatccttaagtcacctgcggcgtgcaagcttcgatcacttttgctgctacgtatccttaatttgtgatgaggaactcagacctacggggttgttgataattgtgagactaaaaatagtctcggtgttttcttcactaaaatgcgaacatgcttttgtaaagagacaaaacttccaactgatcagagcaacatatgctttttggatgaaaaacaatgtgtctatcggggaaggagagtatgctgatgaaattttctcctcatcgtaaatgagattntggatgttagcatttcgtttctaaatgaccatttaggggaagcactgggttcagcaaaaattgaagaaaatcactcaaaatgtatcaatctcacacaggtaagtgttttatcctaattcgaaccatagatatgtcatgagttgattttgcaaatcatttcttatcacatcaaagattacatgcgtgatcatggatcaataggactt

SEQ ID NO: 260624 - DNA, 443 bp, Glycine max
  unsure (1)..(443): unsure at all n locations
gcttatcttcatgatgatgaagggaccatatgtttcttcttgagagcaatgtttgctggcctggattgacaaatgccaagacccccccttgtctttggttgtgtcatttgagtccagctaacccaatgagataacgattttccccaaataaagcttctaatagatttgtcaatgttttcgcatataccttaccagagccaaagattttgcatggtgtaaatagggatagttgataaaattgcactacctancgtcactctttctgcttgattaagagtcttggtcttccaacccactaactttccattgattctatcaacaatgtgggagaattcactatatttctgacactacccttgagtaaggggaaccccaagtacttagccaaatctatcgtgtgatggaaatggataatagatgtaaagaaacgaggcttttgcaca

SEQ ID NO: 260625 - DNA, 395 bp, Glycine max
cggctgcagcttatgagaataagatgtttctatttttttgtgagacaacgtgaggcggggagctttaagatcaagaatgagttcaaaattgaatcaagtttcaagattcaagccttccagaattaaatcaagattcaagactcaagattcaagaatcaagagaagactttatccagataagtatgaaaaagttctttcaaaaactgagtaacacatagatgtttctcaaaacttatttaccaaagagtctttactctctggtaatcgattaccagattgttgtaatcgattaccagcaccaaaatgtttatgaaaaagtttttcaactgaatttaccgcgttccaattgatttcaaaatgttgtaatcgattacaatgtgttggtaatccattac

SEQ ID NO: 260626 - DNA, 437 bp, Glycine max
  unsure (1)..(437): unsure at all n locations
gatgcancccatanaaagatctcatatctctaaataataatanaaatacttgaggggactctacgataagacaaaaagacatcttctcttttggacgctacgcaccccagacattcacttgccagcaacaatttttgctaaaagaaacattttcatcatcaaattgaagagcattgacttacatgttcacgatatgtacggatatttttaacgaatatgatgttatttcaggtactcgtaaaaattaagaataacaactctaaaatgagctgtccagttaataaaaagtaaagtagaattttgagaaattatataactatgaaaatggaaacaaatataccttatgatcactagacaagtccacgggctcacctnctcttcccaggacgggcctacaatcaccgcaattagcaacgacaaccttcgccgccgcgacg

SEQ ID NO: 260627 - DNA, 417 bp, Glycine max
  unsure (1)..(417): unsure at all n locations
ttgatgcttgctatggactcttggaatccgtccaagttggtccaaaaggagtggagttttattttgaccgatgtatttcccatatgtttcgctatatttcatgtttccaatctttttttctttttttcttttctcttttttctttaatgttgatatatggtattctctgaggtagaagtgttttcaacacattccagcttacgggggtattagacataaaattaatttagttagttactataagttatttgagtaagttagttggttattcaagttatagttactacaagctatttgagtaagttagtgtaagtactcaagttagttattttctatctttgtataaatacatcaactttgtaatactttgatcaatgaataaatgaatgtatcctaaacccgctttntatctatctt

SEQ ID NO: 260628 - DNA, 419 bp, Glycine max
aaacaggtcgaacctgatcttctggtcttctatggccatttataggttcctcttccccatgtctaccacacggcttacggtaaacataaaaggtcttccaagaattaggggaatgccaacatcttcttcaatgtctatcactacaaaaccagctggaaatatcaaatgtttgaccctaaccaaaatgtctttaatcactccataaggtcttgtgatggagcgatcacccaactgtaaggtcatacgagtgggcattatctctaactctccaagtcaccgacacatggagagtggcattaaattgatactggctcccaagtcaatgagagtcttgcctactgtaacctcaccaatagaacatggtattgtgacactaccctgatctttatgcttcaatggaaggatacattgtatgaatg

SEQ ID NO: 260629 - DNA, 425 bp, Glycine max
  unsure (1)..(425): unsure at all n locations
agcttatgctgcanacatctacatcttactcttcttacctcaacagcgaaatcagccgcgggctaaataattatgaccctctcagcgacaagtactatctcggatgaaggaatcatcccaaccttagatggtcgaatccttcacaacagcagcagccacaacaacagacttattttcaaaatgctgttggcccaagcaaaccatatgttcttccaccaatccagcagcaacaacagcaacagccccaaaaacagcaaacagttgaggcccctccgcaaccttcccttgaagaacttgtgaggcaaatgactatgcaaaacatgcagtttcaacaagagaccaaagcctccattcagagcttaactaatcagatgggacaactggctacacagttaaatcaacaacagtcccagaaatttgataga

SEQ ID NO: 260630 - DNA, 371 bp, Glycine max
tgcagcttttttccaataacctgtaatttttaacaaatctaattgcaagttggcagggttgttctctttttggataacatacatacttgctcaaacttatgaaaagaaacactaactccatcacaatcatgccttctatccaaaatcaaatcataacaccaattttctccaaaagataaaagtttctcatgttggatcaagtggcctcggaataattaagaaggggggttgaattaattattaatgaacctttcctaattaaaaaatctatccttcttaatgtggctagatttaattaggcttttactataatgtctagagagttaagaacaacaatagaaacttaacccaaagttaaagcgataattaaa

SEQ ID NO: 260631 - DNA, 204 bp, Glycine max
  unsure (1)..(204): unsure at all n locations
ttggggacgtcaagtggggtgctattgcccaaaaccaagcttgaccaatcccgacccaacccgggcatagtcagtcagggagaacctgtgatgtacctatacaggcgagcttctgtgcggccaccgatgaaaggaacaaagaccaccaagcanggagggcttgcggggcttgccagctgtgaactttgattgacatgtgggtta

SEQ ID NO: 260632 - DNA, 323 bp, Glycine max
agctttgtgtaatcgattacacatatgtggtaatcgattaccagggtttgtttctgaaaaatctaaagatgtaactcttcaaaaaggttttgactttttcaaatgggttttaagcttttctaaaagttataactcttctgaatggccttcttgaccagacatgaagagtctataaaagcaaggctttgttttgcattttctgatcaatcattccaatcttgaacacttttccaattcattcaaacaatcctttacaagccttgaaatctctttgaagttcttcttcttcttctttgtaccaaaagctttctgaagttttctgg

SEQ ID NO: 260633 - DNA, 322 bp, Glycine max
gactcttctgcaaaggctaatcgttggatcttacccatcaactgtcctaactctttcagactggcgactcctaagctcttgaacttgacttggataaacctctttttaagcgaaggcgcttgactcaatcccatgttcttactaaagtggaataaaaaccagtgccaattaagactccgacatctatcatatgtgaaatggatgaatgcatgaagaaatgcgtatggcatatatgcatttaacggatacgagatcctgggagattatctctttcttaaatacaacatttgagcagcataacactcgatgcatgcatttaaga

SEQ ID NO: 260634 - DNA, 337 bp, Glycine max
gaccttaagcgacgcagctgcagcttaaaaagaccctttcactctttggaacaatccactgcggaagccacaatgagaaaacttcggtatcagttcgcgcccgatcagaagctcccatggcacgtttatacatatactatgtatattacatgtcttcattaatcattaagtaattctcaaaactaaattatctgatttaattattgttgcagatcagtgatggatgccaaagggagaaaatatggacaaaaaatggccaaggggaatccatgccctcgaacatactacagatgcactatggcagttggttgcccaatacgcaaacaagtgagctttt

SEQ ID NO: 260635 - DNA, 315 bp, Glycine max
agcttgctttctctgtcacttgtttttacctggcgccagtttttttccttcctgcaagttcttgcattgtttgaataagctcattaccggccaacctggttcgtaataacttggccaacacacggccaacttataggtgggggttcgatctcatagcctcaacaagagcaatgatggcactagctaccttaaagcgttccactctccagatagtgcaagcagtcaccttctattggcaacttcagcctccaaggatgccactttttttaacgcctcttagtgttgctgcccattttctttaagaattgctagact

SEQ ID NO: 260636 - DNA, 319 bp, Glycine max
agcttgccaacccatggaaacttcttttttcttccacactttttggggtgggccactcttggatggccttgattttctcagggtccacttggaccccatttctaccaactacaaaccctaaaaaaactatattatctacacaaaatgtacatttcttatatttgcataaaagggatttttcctaaggactgaaagaacttgcctgagatgtcctaagtgatcatttatgctcctactgcacactaaaatattatcgaaataaacaactacaaatctacctatgaaatcccttaacacatgatgcataagcctcataaaa

SEQ ID NO: 260637 - DNA, 316 bp, Glycine max
agcttgaatgaatgtttttttattttgccaaaaatggacatagtaattcaacaatgcccttgtttcttccttaacactgatgtttgtgttcaatgccttgtttttgtagggaatcgggctatatggcttatagacttgaatctgttgatcatcttcacaatccatttgtgtccatttactttggtgttgcttatttagcatggttgtcataatgtgcaggaaggtatgtctaattaggttaccccgctaaagatttttatttttggataaagttaccctagtatgcaaataatttccacttttaatcataggggtt

SEQ ID NO: 260638 - DNA, 315 bp, Glycine max
agcttgtgtaatcgattacacttatttggtaatcgattaccagtgactatttctgataaatcaaaagatgtaactcttcaaaaggtttttgactttttcaaattggttttaagtttttctaaaagttataactcttctaaatggtcttcttggccagacatgaagagtctataaaagcaaggctttgattttcttttcaagatactttttcaattcaattcattctttcatactttacttttccaatcaatcctttacaaaccttgaacttattcttcttctttgtaccaaaagctttttgaagttttctggttt

SEQ ID NO: 260639 - DNA, 319 bp, Glycine max
  unsure (1)..(319): unsure at all n locations
agctntgcttttatagactcttcaaatctagtcaagaaaactgttagaagagttataacctttagaaaaaccttaaaaaccatttggaaaagatataactttcagaaaagcttgaaaccaattggaagagttacatcttttgattttgttcagaaactatcactggtaatcgattaccaaataagtgtaatcaattacacaaagcttttatgtgaaaggatgtgactcttcacaattcaatttgaatttcaacgttcaaagacactggtaatcgattaccaaaacattgtaattgattacaacattttgaaaataattg

SEQ ID NO: 260640 - DNA, 317 bp, Glycine max
agtcttttggagtagaaacttggaccaactcattttatttcaaaaaggaagtcgtatctagtcaaggtctgagagaccatacaagtttcctaacgatttctaattatgtgggccattaagtctatcatatgctgacaatagccgagaagcccatgaatctcttcgggggcggagtaggtgtctgccatcgccttggccttggctaacaatcggggaagttcttgactcccgttcaaggtaagagcaaaccgatccatccacatggttgcctcttggtgtaaagagtcgatcacccttcctctagcctctttttccgc

SEQ ID NO: 260641 - DNA, 320 bp, Glycine max
agcttgctctaaatttacattgatgtttgtatttatgggaggaggttatatgccatttttgctttaagagtaatgtcccactaaaactaactttccaaatgtttgccttcgcaggaatggccccgaggaagcttgcctcaaagaggtccaggaaggacaaggcggccgaaggaactagttccgccccggagtacgacagtcaccgctttaggagcgttgtacaccagcagcgcttcgaagccatcaagggatggtcgtttctccgggagcgacgcgtccagctcagggacgacgagtatactgatttccaggaggaaata

SEQ ID NO: 260642 - DNA, 314 bp, Glycine max
agcttcaagctgcatgtccatttccatttgatgaagccaatttgtggaaaggccaaagtggacctgagctaaaacagaaaattcaacaacaatttagaaacatcaggtattacttcaaactagtggaagtggactgagctctgtctagctaaatattatccattaataacttgcagggctttgttgtggcttagtctcttgtaagcatgcatcatactgctaaaaaatgacaattgattaccaatgattcgtagtaatgcttacaaaaccatttttgtggaaggaatcatagtatatataggttggattctatc

SEQ ID NO: 260643 - DNA, 285 bp, Glycine max
tggcatggtcttaaaggaggagttatctgcctgctcaaaatccaagaagagtttggcccaacacttaaaagccatggagcaaagcatgctagctataatagggcagtacaaaaaagagttaaaccagtctttgacccatgaacaaaagctagtagaggacttcacacaagtatacgccgagaagggatcaagagggagggtgattgatgcattacatcaagaagcgaccatgtggatggataggttcgccttgaccttgaatggaagtcaagacctcccgcgact

SEQ ID NO: 260644 - DNA, 320 bp, Glycine max
agctttcgataatttacaagtgctgtttgccatgacaactgtaagatcatttaggcaattgccttaggcctcaaaatcatttaagacatcaattttttcatatttttaaaaaaagtattaattattaatttgaattattatataatttattatatattacaatttttattagtaagactgtacttttaaaattgtagtaattgaacaattcaaaaccttggaagaagaaggattgaaaatagtatcgtagtgattttgaaaaaaaattaattttaagttctactaaatattataatattgaagatcttaatttattttaa

SEQ ID NO: 260645 - DNA, 259 bp, Glycine max
ttaccatttttcccatttcatccccgtcagttgcctcaatcgggtttccatatgctagtcataacccatcaatagttattgctccaacggctaacttttatgtgttaacataactgcccctcttttcctgagtttgttgaaaattgaattctatgtccttgaaagacgataggaaaataaccaaataatgaagaatgtttgaatctagcaaccatattttgagttttgaaattcgatttccgcttttatcttctatttc

SEQ ID NO: 260646 - DNA, 274 bp, Glycine max
ttgggaaatttatcttaaatgtgtccccaagttaccaaagggagaaaatcacagagtttgatgaaatttcacatgaaattgggctgccagtgattgaaagaggttatctgagtcaaggattgtcatactacaagacaacttttcagttatctgcaataggagaggataagactttggtcaacgtgaaaatttcttatgaccatgaatccgaaatagaagaaagggtcaaacctacgaagacatcagagtcaactttattatatcttaggcgtct

SEQ ID NO: 260647 - DNA, 322 bp, Glycine max
  unsure (1)..(322): unsure at all n locations
agcttttcaaatgggtaaaaggctctcttttattttcttcnacatcatattcaaacttgtccaaataaataataaagtcatctcgactcaaagaaagtcatataagtctcatacaattaatatagaacctatatcctaatgtcacatcctatcagagcgtggtgttcccgtgtcctctagcatgaggttcttcatagtcatccacctattcatctgctcccccgaacacaagttcaagatcatcacaggatccaagcacaacaacacacagggagtgagttatcacattcctagctaatagagaaacaagacaattaaatat

SEQ ID NO: 260648 - DNA, 318 bp, Glycine max
  unsure (1)..(318): unsure at all n locations
agctttgatggggnttatatttatcacatgtttgtcatcatcaaaaagggggagaatgtgaatgtatgtatacatgattttgatgatgtcaaaagaagaatcaaacaaggctcattttgcttcaagattaatacaagattgtttcaacaaacaaagccttgattcaagatttcttcaagatcaagcattgcctcacaatgaaaggtttcaagtcattcaaggcacatgtaatcgattaccaatacatgtaatcgattaccaatggtttgaaagtgtgtaatcgattacacatcatatgtaatcgattaccagagactc

SEQ ID NO: 260649 - DNA, 318 bp, Glycine max
agcttgtatgaacgcatcttatttttgccaacgagggacatagtaatccaacaatgccctggattccttcctaacactgatgtttgtgatcaatgccttgttaatggaaggaattgggctatacggcttatagacttgaatatgaggatcatcttaacaattcatgtgaatccatttactttggagttgcttatttaagatggttgcaagaacgtgcatgaaggaatgtctaataacgcaacaccgctcaaaatttctatttttggataagcgcaccctaatatgcaaataaatgccactgttaatcataggggtttc

SEQ ID NO: 260650 - DNA, 320 bp, Glycine max
agcttatttgtactaataactttctcaaaaaataacttagaatagaaagtgttaattacttgaagaaaatattaattgtataaagatcaaactaggttaaaattgatcatagttaaatataaaatggcaaaaggccgaaagcccatagaatacaatgagcggcccaaaagaagttgcccaacgcaaggctaaaagcctaaaacttgctacacttgcactattatttcctaaactgactacgttttccaaaatacaaaagacaacagtgagaatacccgcgaagcagctaacaatacactgcacataaactcaaaggtacg

SEQ ID NO: 260651 - DNA, 317 bp, Glycine max
agcttatacaccaccagctacatagtggagggcggttgatggaacctctgcaaatgcaagctttccgcaagacttacggaaagatcttagagtagaccttatcagaggtatccatagaagccattggatcactcacccaatactacgaccagcctttgagatgcttcacattcggagacttccaataagtaccaaccattgaagaatttgaggaaattctaggatgtcctctcgggggaagaaaaccatatctttcatccgggtgtctcccctctttgagcagaattgcaacagtggtcaaggattcagcatgaggt

SEQ ID NO: 260652 - DNA, 321 bp, Glycine max
agctttgagttgagtcatcattagaatataaatatgtgaccatggcatgagtttcaaaaaatcatccttcaacaaccatattatcaatcatctttgaatcatctatcttttacatcatctttcaacatccttgaatctatctttcaacatctctcaatatcttctttcatctctttcaacactttcaacaaaactttctaattcatttctcttcatctttctaaaagttttttatcaacactttctcttccaagaaaagttctttgttaaaaaacttgtgttattcatctttttcattctcttctccctttgccaaaagaa

SEQ ID NO: 260653 - DNA, 316 bp, Glycine max
agcttaactgagacttttttttccggataaggggcgagtcttctccttttatcagttcttgggtcaccctctgatcctggaggagcgaccaactgtgctagcactaccagagaggtatgctatcgcacagctactatgcataccggggcgaggttttacccgtgccgctgcaaatagacaagtgtggatcgtgcgcaccaacaagaccactcttaacagacatatatgacattgctacttagcaacattctgcccagcgaccgacatgccgatctccccctatggaagtatcagatggtctgtgccgttccgacat

SEQ ID NO: 260654 - DNA, 315 bp, Glycine max
agcttctggtgggacattttttcttgctttccaatctgacattcaccacagattctgccttcttctattttcagattgggaatgcctctaacagcacctttgtcaatgatattcttcatgcctcttaagtgcagatgtccaaatctttgatgccatattttgacttcatcttctttggaggatggacatgtggaggagtaactggtttcttgaggtgtccataggtagcagttgtcctttgatctgctgcccttcattagaacttcattcttctcatttgtcaccaagcattctgactttgtgaagtttacattg

SEQ ID NO: 260655 - DNA, 324 bp, Glycine max
agcttattataaaaataatatatggttttatttcatccaatttacatttaatatcaaatttaacgttatagcactgttttgcattgtggtttgccttagctcttcagtatttgtaaaattatgtatttatttatgtgctatataaatcttaaaagagaaaaacaccatgacagtataaaatatcatcccgtgacaatttatatgtatggataaatttattacgttttacaataactattttaaaaatcatactaagaattatttgtaatcgactgataatataaaattattttatattttatataactattcaacttattctaa

SEQ ID NO: 260656 - DNA, 321 bp, Glycine max
agcttgagcttcctagcatattcaccttattcattcactagtgcaatgtgatctttagcttgttggtgtatcaaatccattcgggtcctaagagggtcagatttcaatgccaaaaaggttctatgcacgtatgcattaccagtcgtgggaagatcctgttaaccaaaaacacctaaacaattacatggggttcattcaattactcaaatcaccaagtggcaaagtttaaaataacagttcgcaacagcgatttcagcctcaacatcaaggttttggactcatgtaagcaatttcccgcaatgtcaaggatcgcgacgaaac

SEQ ID NO: 260657 - DNA, 247 bp, Glycine max
aatccaaacaatgggaagactattgtgacccgaaatgtcgaatttctattgaagtaaaacccttggaattgggaggagaaagaaaaccttatgattttttccgactttgagaatagatgaataagccttgactccaaatgattcaactccagcactttcaccaactccttctaccatgaagcctcatcatcttccgaagggagttcaagttaaaggcccagaagaatgagaaatattcaagaattat

SEQ ID NO: 260658 - DNA, 146 bp, Glycine max
tatatgaagatctattatgtcaatctccctattaatttgcttccccgttcgcgagatcatgatcaggacatgatccttattcgtctgcacacaaggagagaggagtctgattttttgctattagtaaatctagagcatataatttc

SEQ ID NO: 260659 - DNA, 281 bp, Glycine max
gcatgcgcagcccaacaagggaggcggggataaaccaactgaatcaagcgagccccggaggaaagcgggggcatacaaggaagggaaaccaaacggaaagaatgggagcctaaaaacattaagccggcccaagaacctcccagatcccggactccagctggcccaggccaagaagagcctgcactcgcattactggggcccgcaagcatgctacctacataaaaaccagaagacaaaaactagcggggccagagaagagaaaccatgaccaactaaaaagc

SEQ ID NO: 260660 - DNA, 313 bp, Glycine max
agcttttaacgagctttcacatcattgcatacttctaaaaatgataaaataggttcttgctggcctacgacttattagagtaagtcaatgtgtgtttacaatcatgaatcatcaatatgtcatttggtgtttttggtaaaaaaatttaagaattatttataaaatttattattaagaacttaattgaaaaattaaataaattataaaataacttttaaaatataaaaccccctaaaaactccaaattatatagatatgttttaaaaatttatttcacggattgatcttggattgagaagaaataaatttattt

SEQ ID NO: 260661 - DNA, 307 bp, Glycine max
  unsure (1)..(307): unsure at all n locations
gctnagcaccncatagttcatgctcttaanacgngaagaggatccttgtggaacctttacacccgactaagacactgagaaaaacttatcttctcctttatggacaaagcatggcaagctgggggcaagaaaattttgttaccatcagaccttggatgcaattgtgatcgtatccccatatcaactagatcttgacgggtattcaagccatcctttgtcttgccttgaatgttaagaagcgtccctatcacactgtcacatacatttttctccacatgcatccaccttctatccatgtctaacatct

SEQ ID NO: 260662 - DNA, 317 bp, Glycine max
ctgcagcttggggagcctcttttttctctcagttcggtattctccggggggattttcaaagccgctgatttgaacctttctttaactgtttgggctttctcgagttccgccctaaggacctgcacctcttcgtcttcctccagtgccataacttcctctcttttagcggttctcaaacttggaagccaatccaaaccttgcacgtgggcttttaaccacttacgatagccaccgatgggcccattgttactacccctgagttctttgtccttcttttgcaacacctcccatgccttgcggaccttctgaagtgtctc

SEQ ID NO: 260663 - DNA, 318 bp, Glycine max
agcttgtctcagcgtttatgttataagagaccaacatgttagccattgtcagcaagtaccaagaagaattaaatctagccacgacccacgagcacaaagtggcggacgagtatacccgagtatacgcggaaaaggaggctagaggaagggtgatcgactcgttacatcaagaggcaacaatgtggatggaccgatttgctcttactttgaatgggagtcaagaacttccccgattgctggccaaggccaaagcaatggcggacacctactctgccctcgaggagatccacaaacttctcagctattgtcagcatatgg

SEQ ID NO: 260664 - DNA, 318 bp, Glycine max
  unsure (1)..(318): unsure at all n locations
agctttgaatctccatacattttttgcacatgtcgngtgatgcaatcctaccacgcaagggcattggatagaagactccaagtagattgggctagagatgcaagagaaggccctaaggttctcatgagccttagggcagatttcgggcctatgggctaagtatgagcccacttatcttagtacatattagattaaggtttcattattttttgggccttgtatttagggctccataatgtaggtaaggtaccctagaaatgtaggatttttcaaccattgtattttagggcacctagactagtttttgtattaggggta

SEQ ID NO: 260665 - DNA, 315 bp, Glycine max
agctttgcggatttggtcttttccagtgaaagggtcgaagtggatctgaaaagaggcaaatttaatcatcctgcttggacgaatgagaaaactggggcaaataaagagggtgacgatgagggagaaacccatgctgtgactgccattcctgtacggccaagtttcccaccaacccaacaatgtcattactcaacccttctccttacctaccgcccatttatccacaaaggccatccctaaatcaaccacaaagtctgtctaccgcacttccaatgacgaacaccacctttagcacaaaccaaaaacaccaaccaa

SEQ ID NO: 260666 - DNA, 314 bp, Glycine max
agcttgtgaaatgtgaattgtcttgatttatgtttgcttactgtttatctagttatggtttttctttgcatatagaattttgatatcactcttctatatggaacatgactcactaatagcacttgtaaaacttgacagatgtagaagttccaggtgcctgcatcatattgataggcttgtcctatgcagtggcagcagtgagttgcttctctaaaacaatttatattgttattattactacatttttaaataaatggtgattaaaagcacaataaattttaataaactagaaaaatattattccattatatata

SEQ ID NO: 260667 - DNA, 321 bp, Glycine max
agctttcaaattctcacctattctgcaccttagaagttgatatagagtttgatttaccaggatgacaagcatagcacatgggctcaagatttctctcacccatccttcttccattaagctttccacttgcctttgtatctcctttgtccttttcagattgcttctatatgttggcttatttggtaaggaagctcctggaatgagatcaatttggtgctccatccctctcaaaggaggtaacccatgaggggtgtctttggaaaaaacatccccaaactccttcaataattcttccacacctaaaggcaaagaactatcaat

SEQ ID NO: 260668 - DNA, 323 bp, Glycine max
agcttgtccactactatcttgtacttagtgttggatgtggccacacaaagacacctacccttagcccaatctagaaaaccctattctagcatgcctttagaaattcatgcatacactaacaacatgtaaaacacacaatgttaacaacttacttttaccatgaatgcttcaaaaaatgaagtttagaaggtgtgagtcgcacaaacttattcttagaactttttcttttctcttaaaagtgagaacataaggtcattatttatagagaaaatagttataaccgctgtaatcgattatatcaaagaagtaatcgattagattat

SEQ ID NO: 260669 - DNA, 321 bp, Glycine max
caagcttcaatccttgcttttgtttttttttgaggtaatctgacttctatgcctgtctcccaattgtttgagcttctcttaatgtctcttggtgtttgggtacccgtaataagatgtttttacacttcctttgaaaacccttgaatatgagacgttgtaaaaagttatctttttttttataaaattgatgttgttttcatgacctttgctgaaccccgatccaattggcgtgatcggaatttcaaaatgacttctctttgtagtagaaccagaaacccctttagccttttttattttgatgagggtatttgaccctaaatg

SEQ ID NO: 260670 - DNA, 317 bp, Glycine max
gggggtactatagcttctctttattgttgctggggtaatcaaatgcagatgccatgcaataaaaaggggtaaagacaatatattactacaattatatgaaattgagtaggtaatactaaaaacagaatattagtagcatgaccgaaaataaaatagccgctgtgtcaaataacataacaattgtctcaaatacaggaaaaaaaatactccaacgccatcattagccgttttgacttattgctgtctttaaaaaaaatgctgcccatttctttcgaattgtggtgatgatgtcgaagtccaacggtgtgtcattagca

SEQ ID NO: 260671 - DNA, 324 bp, Glycine max
  unsure (1)..(324): unsure at all n locations
agctttatacaatgttaaaatttttcatgtattttttttttggtgggcgcttaattttcctctattgcttagtatacaaattaaaatttgggattgttgtgtgtaagtttttactanaatccatggaaaagctgcctttttgaatgtgaaacccataaaaggtgtgccatctgttctttatcgtttgaatgattgttgttaatttaaatcttatgcttatgcattgaaatttcatagtatcattacaaacggagtgaatcagctctcttcttgcaaccgagataagttaaacctgttatagttgactatgtcaaatgtattttt

SEQ ID NO: 260672 - DNA, 316 bp, Glycine max
agcttatgggcattttaatatatgtgattcaaaggtgttttgatgataacaatgatggcaacataagatgatgacataggtgatgaaaaaaagctcaaaggtcaatccaaggatgagttcaagatgttcaagaaggaatcaagaacaaggatgagttcaagatgttcaagaaggaatcaagaacaattcaagatcaagactcaagaggaaaagttgaagaacatttcaagattcaagaagaaggatgaattcaagaatcaagatcaagattcaagaatcaagagaagacttaatcaagataagtatgaaaaggatt

SEQ ID NO: 260673 - DNA, 316 bp, Glycine max
agcttctacattcaatttcgagcttttcgatatatgacgggactcaatctgacatcagagtaaaaagttattgtcgtttgaattgactgagagcttcaacattcaatttcgagcatctcgatatgtgacgggactgaatcagacatccgagtaaaaagttattgtcgtttgaatttgctcagagcatcaacattcaatttcgagcgtctcgatatattacgggactcaatcaaacatccgagtaaaatgttattgtcgtttgaattttctcagagcttcaacattcaatttcgagcgtctcgatatgttacaggac

SEQ ID NO: 260674 - DNA, 319 bp, Glycine max
agctttaggatcaaactctttttctctttttttctcaaatgtttttcatttttcttcctcttttcacttatgttctttctttttcttgcacaaatttcgttgctctctttcactggtgatgatcatggaagcctaaacactcaatcaatccaaggatccactccaagcaagaaaaaatttgagttttggtttagtatttcaattctatgtgaatgttcatctttttcttcaatcctatatttggttttcatgattatgaatatgcttaggattgaaaaacgaattaggttatggattcatttcctaatttcaaaattta

SEQ ID NO: 260675 - DNA, 320 bp, Glycine max
agcttccttggggccatttcttgctaaaacaaacatttggaagttagttttacaagataatgcttattttaccacaaaaatgacatgctaatccctccggtttagaacgaactcatgcgcacgtttaaagtaacacatttatgcacatgcgtacgtgtaaaaatatcctactatttatgtcaacatacaaagacacccaacacattctaattgccatacatctatgtgcatcttgaaaagaacacacattctcatgctcaaggcgttgcgtcaaactttacacctaattatatcctaaatttttgctatttacaaactac

SEQ ID NO: 260676 - DNA, 315 bp, Glycine max
agctttgtgtaatcgattactcttatttggtaatcgattaccagtgattgtttctgaataaataaaaagatgtaactcttcaaaaaggttttgaatttttcaaattggttttaagtttttcgaaaagttataactcttgtaaatggtcttcttgaccagacatgaagagcatataaaagcaagactttgtttttcatttcaataatcttgaacacttatttcatacaatcctttacaagccttgaatctctttgaacttcttcttcttctttgtaccaaaagctttctgaagttttctggttttccaaaccttga

SEQ ID NO: 260677 - DNA, 315 bp, Glycine max
agctttgacctatgacattttttagattttaaatgcataggattttcatttattagtctagaaaaagagaaaatagttcaaatattatagtgggtttggcagcaaagcttagtgatgaagagaagagagagttgtggaagttactaatttcgaggcatttcactggtttggaaattattagatggggatgaaattgcagggagatatttaaaaataaggtggatcccttgtgtaagaaatttctcttcaaactacaaagtcaaactacaaagattggcgacgaaatgaataataacttttactttaccaactagt

SEQ ID NO: 260678 - DNA, 348 bp, Glycine max
  unsure (1)..(348): unsure at all n locations
acctctaaancgacctgcagcatgcaagctttgataacaacatgaatcttatttatgatagaataatacaaaaaattaaattcaacagtcaaaaaatagttactaattaatgcactgaatcaaatcccacatacaaataaatactttgctatccaaagttgaaaacccaacataagataatgcctccattaggtcttcatcatagccagattgttcctgttccttttttaaggagatgggaggtatattggccatccgtattgctacttcgtataattaaattaaagagacaaatgataacaattgctatcactgataggttctataacttgctagaaccccaaggaa

SEQ ID NO: 260679 - DNA, 323 bp, Glycine max
agcttgcaatattgaaacacatctattctctatctgaaactccaaaaaagatgatggaacatcatgaaaccctttactttttgacctcattatgctgtcattggcagtgtttccttctccacaaccataccaggaagaagttgttgcatagcttgcaacaatctcagtaaatcgtggtatgatctttcctagttggcgtagatgttttcaggggccttttgctttgccaaccatggtttacggtacatggtggtgtatccttcagtgcttttgatgtgtgctatcaatgctgacactaaagttgatggatcattttcaatcaa

SEQ ID NO: 260680 - DNA, 323 bp, Glycine max
agcttcttatccaaggctcatcttggttgtgtggctccttcttccaagggttattccctaatggatggcgcctcctctcacctattctcctttgtcttccactgcatctccatggtggaaaatcatcattaaaggacctcataaaagctcaaagatccagcctccatagaagccccacaagcaagcttccatcaaaagggtacgtgacacttatgcatggcagtgtgaaaatggcatgcagcgtgtccgcttcatgcccctattcaagggatctatatgagagagagctaaaaaggtttttagtgataatccccaaggtggtc

SEQ ID NO: 260681 - DNA, 67 bp, Glycine max
acggcaaaccaagggggcccaagaaaacgcagagcaaaggaagagcgacagacccagcgagccaccc

SEQ ID NO: 260682 - DNA, 317 bp, Glycine max
agcttctcccccattttgctattattatggggagaagtgaagaagaaaagggttcagcgcacttctctctctctcgaaattgctgaggaaaattagttccgtgaagaaaatccaagccgaggcgcttccataacgtttccgtgagtaattacgcgaagattctcgaccgttcttcaagattcaccgttcgttcttcgttttcttcagtcttcaacgggtaagtacctcaaaccgagcttttcaattcattctatgtacccgtggtggtccacattttgtttcatgtatttttattctcgttttcatttactttttat

SEQ ID NO: 260683 - DNA, 347 bp, Glycine max
  unsure (1)..(347): unsure at all n locations
acccgggatccttaagtcacctgagcatgcaagcttgacaacagttacttttttgttnttttacaaaaggaagtaactaactaactaactaacttccactaatatataaagtgactactcagaaggaagggatgagccttgattaggtccatctattctacctatttaaactaattacacaaaacaaagcccaaactcatagcctaatgattcaagtgcaaaggttatgatttccaagctgaatttgaccctcaaaatggcataaatgcccaagcttatttgtgacaaaaatgaattttttttcttatctttctagggactactcacatgcttcatttggagttttg

SEQ ID NO: 260684 - DNA, 318 bp, Glycine max
agcttgtttgacattttttattttttagtttgaataaattagaataacttttaaatagttcaaatgtttaatttttcatctaattttagtttatttttgtgtagaaataaatgaaaaaagaagatagattgtgttgggacccaattcaagacccttttaaaggaaattttataggctagaggggtcagacacgtagcatgcactttagactaagtgtaaaactctatctttcataaaaaactaaaaagaattttattttaaaaaataaatagtttttaaaaattaaatacatgagagaaaaaagtttttgataattaa

SEQ ID NO: 260685 - DNA, 313 bp, Glycine max
  unsure (1)..(313): unsure at all n locations
agctttgagccaattctaattataattaatttttacttggatgtcagattgagtcccgtaatatatcgagacgctcataattganaatggatgctcgttgcaaatgtaaaccgaaataacttttaactcggatgtccgattgaatcctaaaaattattgagacactcgaaattgagaacaaaagctttaagcaaattcaaacgacaataactttttactcggatgtccaattgagttccgtacactcaaaattgagagcagaagctctaagaaaattcaaacgacaataacattttactcggatgtccgattg

SEQ ID NO: 260686 - DNA, 281 bp, Glycine max
aactcgctctattatttctttgttgccgaatctaaggggagaggttgtacgttatttttggtctaaaacttgtgtcccactggttaaactaaccttccaaatgttctcctccgctagatatgggctccgagaacgcttgcctcaaccacgtcccagaaggacaaggctctctaaagaactatttccgttaccgaattatgataggcaccggttttatgagtgctgttcaccagctacactatgacgtctacaagggatgggcgtttctccgggagcgacgc

SEQ ID NO: 260687 - DNA, 319 bp, Glycine max
agcttgcacgtccaatctcatttattgtttatgacgaaaaagggaagtgcacatgttctattttattcaaattttatttgcctctcttatttttgaatagctaatgtttgaatctaagaaaaggattgtatctaagataataaaacgtttccacggaatattcccctatacgtcactttctctgaggacaaaaacacatggcattgcatatactatggataaatcctctccattcaaagcttacatgtcaccttattcttcaatgtaagacaccagacctttgaagatatagatgttgatcccataacagataagtcac

SEQ ID NO: 260688 - DNA, 358 bp, Glycine max
ccgggatccttaatcgactgcggcatgccagctttcaacaaaaagtcttcactatattattttcacccagcagaaacctagcaagaactagcccatcatattctcccaaaaaccccatacccacgaaatttaagagagaaagaagtccacccaaacctgaattttcgaagtcccactcgtagccacgcactccacgaccccgaaaaggctctcctttcacgatttggggcagaaatgagcaccaaaggttgaagctttgtgtggagcttcaatggtgaatgagggaggaagaaaagcaacgtgagggacagggagagagagcttctgaaaatgtggggctgagtgaggagagagaggg

SEQ ID NO: 260689 - DNA, 320 bp, Glycine max
agcttcgtttagcgactaccgttattgttgcctgcgtttttcaggaagattattagagaaaatatgattaaaaatttgccgcaaatagtgttgttgaatattgtcggcctcgcgctgtgtctttcctggtatatccccgttaatcatggattctgggtgccgattgatgcggatattttttatttctttaatcaaaaactggtcgaaagtaaggcctttttgtggctggttgcattgaccaacaatcgcgccttctacggttgttcactgctggcgatgggtatgttgatgctgagtttctggctgaaagaaaacgcccc

SEQ ID NO: 260690 - DNA, 325 bp, Glycine max
agcttctcccccaatttgctatttattggggagaagtgaagaaaaaaagggttcagcgcacttctctctctctcgaaattgctgaggaaaattagttccgtgaagaaaatccaagccgaggcgcttccataacgtttccgtgagtaattacgcgaagattctcgaccgttctttcaagattcaccgttcgttcttcgttttcttcagtcttcaacgggtaagtacctcaaaccgagcttttcaattcattctatgtacccgtggtggtccacattttgtttcatgtatttttattctcgttttcatttactttttataccccctt

SEQ ID NO: 260691 - DNA, 319 bp, Glycine max
agcttctaaacgcttttaatttattccgtttctctccccctttgacaacatcaaaaagccaaaatgcatgggcatcaacacaagatgatataactaaagtttacacaatcaatcataagtcaaaaccaaatataatccaagcataaaatactatgtgccaaataccgaaagataataaaagttcaaataaattaaaaaacatagccaaatacacggcttataataaacgaaaaataagaatctaaagctaagaaggcggtggaagatcgaagcaccgatgaagataagtcacatcctcttcaagctgggggatgcgggt

SEQ ID NO: 260692 - DNA, 318 bp, Glycine max
agcttgaaggtaaactatattttttatttaacctggtaacccagctagccttgaatcagaaatctgtacctgtcacaagagtctgtggtttatgctcctctgccgaccaccacatagacctttgcccttccatgcagcaacctggagcaattgagcagcctgaagcttatgctgcaaacaattacaatagacctcttcaacctcaacagcaaaatcaaccacagcagaataattatgacctctccagcaacagatacaatcccggatggaagaatcaccttaatctcagatggtctagccctcaacaacaacaacagc

SEQ ID NO: 260693 - DNA, 315 bp, Glycine max
  unsure (1)..(315): unsure at all n locations
agcttttaatggaagtttattcatgantttgcgccgataccatggactggtgagcatgtatatcaaccggttcaacacctgaacactgtattcgggataacccaaaacatggataatagtcagagttgcctatggaagaagaggcccattttctttgatcttacgtactggtgtgatcttgacgttagacattgtattgatgttatgcatgtggagaaaaacgtttgtgatagtgagattgggacgctccttaacattcaatgcaagacgaaggatggcttgaatacccgaaaaaatctacctgatttgggtata

SEQ ID NO: 260694 - DNA, 320 bp, Glycine max
agctattacttgattttttttttattaagtttgcaaatgaaacaataaaaacatatttaaaagtttattttattaataaaaccttttgaataagtttacaaatatatctctaaataatctaataagctttttacgaaattacacgtatctttcacaaaaacaatcatgcttaacccaaatatgattattatgaataataaacactccttccaaatataaatatatttaaactaattatatgtaagctagcagattgtaaagctttaaatagattaaaaaatatataatcttagaacattatagtaaaattttataataat

SEQ ID NO: 260695 - DNA, 320 bp, Glycine max
agcctaagcatcctttttgtttattgctcttaaaatttaaagaggatccttggggaaccttcccccagcgaagacacagggccaaaaacttatcttctcctttttggaaaaagaatgacaagctgggggcaaataaattttcttcccattaaaccttggatgcagctgtgatcgtgtccccatctcagctagatcttgacgggtattcaagccatccttcgtcttgccttgaatgttaaggagtgtcccaatgacattgtcgcatacatttttctccaaatgcataacatcaagacaatgtctaatgtctagatcagacc

SEQ ID NO: 260696 - DNA, 315 bp, Glycine max
agcttgaagaatagcttgattatgttttgtcttttacatgcctaactctcttgagtggcatttgtattgattgttttattatgtgttgcatctttgtctctatcattttatatgtgcatcgtgcatcgtcatgtaggagttaggagtaggtttctatgataatttcttttgaagttaaaactctctattttaattgattacaggctgatcataatcaattacccaagtgtttgaagcttgcagagaagtgtctcgtatcggtttaatcgcttacaggcttatcgtaatcaattacacagttttttttagaaaatg

SEQ ID NO: 260697 - DNA, 314 bp, Glycine max
agcttcttagatgaagttctttgtaagtcgagccgcgacaaaaacaaaccatagtatatcatactatcataggataaaatttacgtgcagtttcattgcttctagtgttgatctttaattaaaattagaattttatcctagtaacccaatgataaaggtgtagattaatcttgaaacactattgaggcgaaattacatttttttttatttggatcctcagtataatccaagttaagctggatgaactcatttaagagagcaaaacccttctggtgcatttttttttcattctcattactcaaaccccatacctt

SEQ ID NO: 260698 - DNA, 288 bp, Glycine max
atgtcacagtgagcacatttgggtctttctttcttgatgtatttccctttattgatatcacattggttctttgatgcagaattaacagaaaatactatattttctaaagtattggtgggtgggtgagtaacaacaatctccctttgagcttcttcttgaaggattagggagaaaacattaccaattgaaggcaaaggatcagagatcaggatctgacctcgtatttgagagaaagaatcattcaaacccatcaagaatgacattacatactcagattcgttgtgagtt

SEQ ID NO: 260699 - DNA, 331 bp, Glycine max
tgcagcatgcagcttctgaatattacagtatttttctgtcatccgaggaaaaagttatttggcgtttagaaatttgatacaagcttccgttttcaatttcaagcgtctagatatattccgggactcaatccggcatccgagtaaaaaagttattggccgttagaatttgctaagagcttctgttttcaatttcgagcatctcgaaatattaggggactcaatcggacatccgggtaaaaatttattggcgtttgactttgataagagcttccggtttcaatttggagcgtctcaatatattccgggactcagtcggacatccgagtaaata

SEQ ID NO: 260700 - DNA, 178 bp, Glycine max
atttggccccccataacaataaaatatataaaaaaatccccgcggattctctttaaaaaaagaagcacccgcgggaaaaaacaccctttaaaaagggttaaaaaaagaaaaactccctttataaaatcattaaagacccccctctaaaaaaaaccatttaaaaaaaagatgggccccc

SEQ ID NO: 260701 - DNA, 319 bp, Glycine max
gcttttgaattagccactgtttttttctcttaatcaaaatgctacaacacttaaaactttccttaacttctcaaatctttcaatctttattgtcttactcatcacatatgctacttgtgattcagtgagacaatagacaattttgatcacacctttattcatgtgttcctttagaaagtgaatttttgtcccaacatgtttgctccttctatgggagattgagttcttggccaagttaattgtaaatttattatctacaaacaactttataggcttcttcaacttgatcctcaattttgtcaccaatgaattaagtcaa

SEQ ID NO: 260702 - DNA, 323 bp, Glycine max
agcttgcacacaagattctccttgccttgttcttcaaaaccttctggttaggtcatataaatttcttcctctaaatccccatgcaagaatgcagttttaacatctaactgctccaagtgaaaattctatgcagctacaatactcaaaataactctgatggtagttatctttacaactggagagaagatctctgtaatcaattccttgtttctgctgaaaccctttcaccacaagtctcgccttgcatcttcttctaccatcatattcttcctttagcctatagacctacttattttgtaaagctttctttccttctagcaatt

SEQ ID NO: 260703 - DNA, 317 bp, Glycine max
agcttgaccaggaattattttattggttggatgttgaattctggttgttcctggtgcggagatgatggtacagcgggtgaaccagaagcggaagtttcttttggtgaggaagccatggaaaaacagagcgtttggaatgatttcgtaaatctcagaaaactattgggaaatgctggagaaaacacgaatgccaagcagatataaatttgaatgaagaatgtagaggggcgtgtgaagcaacggtcgaatttgctttgtggtgaacgtgctattaatgttaagtgattcgtttgggcacgttcagattgcagtagctg

SEQ ID NO: 260704 - DNA, 318 bp, Glycine max
agctttgcatttttcaatgtttatatcaaaaggaggaatcatacttgtttttgacatatcttttaatcttttgtaatgaacatgtcctaatctagcatgccaaatttctgattttgtcatattagttatagaactacatgaggccatacaaacagattcatgaacaaaaggaacatcaatgtttaatttaaacattccattacaacgataaccaaatccaacaattgacaagatgtacttgtcactttcaagtacttgcttgaaaccacaattatttaaaaccataccagacaataagttcttacgaataccaggtac

SEQ ID NO: 260705 - DNA, 316 bp, Glycine max
agcttgaggtatttgtggattttgttggatgaatcttcccaattatcatatacatactcgagggcccattgttttgccagtcgtgctttacgatatgtgatggtgtatccgaactcttgtctaacgaatgcgataaatgtaagaatggttagttgctcgttttcttcaaccatcgcaaggatatttttgccaacaagtatctaatccatcttattgtgatcttgtgaaatggttggtatgatgcatgtgtgaggtccttctatcattctaatttcccaaacttttggattttttttttcagacgctctaaatttcc

SEQ ID NO: 260706 - DNA, 316 bp, Glycine max
agcttctcccccaattttctatattagggggagaagtgaagtagaaaagggttcagccccttaggcacttctctctctttcgaatttgcttagaaaaattgtttccgtgaagaaaatccaagccgaggcgcttccgtaacgtttccgtgagtgatttcgcgaaggttttcgactgttcttcgacgttcttcattcgttcttcattgttcttcagtcttcaacgggtaagtacctcaaaccaagcttttcaattcattctatgtacccgtggtggtccacatttggtttcatgtatttttattctcgtttcattcac

SEQ ID NO: 260707 - DNA, 308 bp, Glycine max
agcttgcaaagtatctccttttttttaactcaaacacgttccatacgtgaggaacctgtgattaatgatactcaagtgctacatactggacagaacatcttctctatgttcctcactcctgctaactggatctcgactatctgtacttatcgaactatcaacattacgacattgaaccaatcatgatctacatgataactcccgctgatctggcatatggaactttattcatgccttgcgttcttttcctgagggatggatccttctgtaacatgaccctcgtggtgaatggctgcttatgaccggtg

SEQ ID NO: 260708 - DNA, 317 bp, Glycine max
agcttccatcagaaaattaattggaaaagagagggtagaaataaatcaagatgagagagaacaaataagagaggaagaaagaagaaaaataatgaaagaaatgaaaagagaaaaacatgcctcctatagtagtcatgactcttgcaagagtttaagtgaagaacttagcaactattatagaaggctccatagttcacatactaaacatcattcccaaagaagagaaaaggatacaaggcctctagaggttaacattagcctcccatatttccatggaaaagataatgttgaggcctacatagattagaaaatgaagg

SEQ ID NO: 260709 - DNA, 310 bp, Glycine max
agcttgtagccaaatggactttcctagaattaattcctttgatagcccttttgagccttgtttccctttccttattttgaagctcactacaagccttaagtgaaaaaccatgatattaccatatccttaaggaattttggagctttggaattgttttgggaataagtatggggggtttttgtttcattggacaacttgttttgttggctatgcttcatgatgtattttgggccatacttgatgtacattgtatattggttaaatgttggacatgctgaatgaaatgttgtttctcaaaggtaaaaaaaaa

SEQ ID NO: 260710 - DNA, 325 bp, Glycine max
agctttgagccaaaatcctgactcactatatacctcgacccagggtgagaataccaatccttaccctccgcagccaaaaaaaatagaggggaaatgtccaatcaatgaaaaagagaaggaaaatttccaatgaacgcaacacaaaaatgaacgaaaattccccaatcaaagagtgggatacagcaaaaagaaaagaggggaaaattcccaatcaaagaatgggagaaagtaaaaaaggaagaagaagaatgaaagaaagctcctgatcaacgatcgaaagaaaccataagaaatgtgcagagaggtctttggaccagacaatatc

SEQ ID NO: 260711 - DNA, 320 bp, Glycine max
agcttgcaaagggtgctacggttctatatatatatgagggtatataaagaagggggggtgcacatatatgtatgatcatttttggatacatgacgttcatttaattgagtgtgacaagagtcttattcatcaaagttacagattgtgttactgatgctattgtcgatcatacttgtgtcttccttgagaggacagcgtgtggcttcttgcttccaaagatcacctgaaaaaacttccttgagatgcttttttgcgacaccttccttgtgatgcttgagactggcttcacactcctcttccttagccgatctaaccttctt

SEQ ID NO: 260712 - DNA, 306 bp, Glycine max
agcttctccctcacagggatatttatatgttgagaagtgaagcaaaaaggggttcagccccttaagcccatctcctttacgaataagcttggggggatcctggcggaaccaatggtgcttgccaagacgatttacaaactgtcgctaataatgatgcttctgggttacagaacttgatgttgcatataaataactgagtaaactgcgtcaggggtatgattcatcctcggaagcaagagtttgtgctctgaggcggccccataagctgaatatgcaatgaatgcacacaccataagagcatgtgac

SEQ ID NO: 260713 - DNA, 325 bp, Glycine max
agcttagctacacacacctttctaatttctaagttcacctccttgagatgagaagctagagaatagctacacaccccctataatagctaagctcacccccatgacaaaaaaacatgaaaataaaaaaaaaaagtccttactaaaaagactacttaaaatgccccgaaatacaaggctaaaaccctatactaccagaatggccaaaatacaaggcccaaacgaaggaaaaacctattctaatatttacaaagaatccaaccttgacccatggactcaaaaatctaccctaaggttcatgagaaccctagggccttctttagtagct

SEQ ID NO: 260714 - DNA, 317 bp, Glycine max
agcttttatgatctgtgtgcacaataaattctctgcccaataaataatgtctccagtgctgaatacaaagcacaagggccatcaattccttctcatagacagattttgccagattcccattagataaagctttactgaagaaagcaataggttgtctctgctgcattagaacaacacctatacctctaccagccgcatcacactcaacttcaaaaggtaaatcaaaatttggaagaattagcacagggggagaagtcatgatcctcttcatctcctcaaaggccttgacagcttctattccccaagaaaaattgtct

SEQ ID NO: 260715 - DNA, 317 bp, Glycine max
agctttacataaacggttttttttttcccagcgaatcaccaagcaaccaggctgacataaaatttttcgaagctcaagggtattgtcacaaacaaaccacgtcgttggatcgcttggtgacagcatacgatcgagagaatagttcctcggccatgtgatggggatggccttccatgcccacatgtcaccggagaatctttaccatcttcatgacacatatattcttgcaccaaacttatagtgtcatcagatgtcacggtctgggaacccccatcaatgggttgttaataacctccctttcggggaagcacatatac

SEQ ID NO: 260716 - DNA, 317 bp, Glycine max
agcttgcctgtccggtgtctttattatgatggcccgagttatgttggggaatggttactaacccggaatgggtttaagcaaagacaagggcggcataactagcctgataaatgccaaaggaaatcgcgggaagtatggtttaggctataagcccactcatgcagatgtaaagagaagcatcgcgggaaggaagggcggtggtcaaagctcgctgttgagacaaaaaagtgaaggaagttcgccttgccacataagtaaaagctttttaagcgcgggtctgggggacaaaggtcaagtggtcccgatataccaagatg

SEQ ID NO: 260717 - DNA, 320 bp, Glycine max
agcttatgcatggaaaatgtatttatgaaattgagatgcccgaagatacaccatttcctagttaaccatgcattaagtaccatgttcaattattttgtttttaagtgaaatgggtttatgatcccaacatggttggctcgtggtgcctaacacatgaaactaagaatgtagtgtgaaatttcacgcttcccccttttttgtttttgttttgtagaggaaaacgcaaggatgagcaaacatgaaaacaaatggtatgcaattttgcagatcaaaaagtttgttgaacgcatatgcatgatgatgccatgactcatgcaaaa

SEQ ID NO: 260718 - DNA, 319 bp, Glycine max
agcttgaacctgttggaaagttaccttgactggggtcacccctaagtacttgttgacaaagagggtgatatgaacctatcaagtcccaattatcctttgcaatggaaggaagacccattgactaaaacaatgcatatgacattcattattcttgaagatattcaagatatcattagatttagcatttattttaggatttagagttaatatgattaggatatgttttgtcttatctttggatttatttcctttattaggatgtggatcatatcttattaagctttgtttcctctattaggattttatcttatctttagtc

SEQ ID NO: 260719 - DNA, 319 bp, Glycine max
agcttatgctgcaaacatctacaacagacctcctcaacctcaacagcaaaatcagccacaactaaataattatgacctctccagcaacaagtacaatctcggatgaaggaatcatcccaaccttagatggtcgaatccttcacaacagcagcagccacaacaacagacttattttcaaaatgctgttggcccaagcaaaccatatgttcttccaccaatccagcagcaacaacagcaacagccccagaaacagcaaacagttgaggcccctccgcaaccttcccttgaagaacttgtgaggcaaatgactatgcaaaac

SEQ ID NO: 260720 - DNA, 316 bp, Glycine max
agcttaaccttaataggttgtgaaccactcaataaaggaatagagtgatcatgggatctctgtggaggtaagctgctaggagtatcaaaaagcacaatgtaagtgtgcaataataaggctaattcaggctccatcataactggtaagtcaagcatagacttaggaacaacatctggcttcatcaactacagactataaacttcagcaatggaattagtggccaccattcttcttatacaatgtagttgagcttgctcaggtaccagttcacaatctcctttaaagtagtaaatttacccttccacaaaaacttcaa

SEQ ID NO: 260721 - DNA, 315 bp, Glycine max
agcttgagatgaggaattgttgaagggtgaaacttcctgcttttattcgttgaccacagagtggtacctgcagatatgtcgcgggggtcaagagaccttggggacgtcaggtggggtgctattgcccaaaaccaagcttgaccaatcccgacccaacccgggcatagtcagtcagtgagaacctgtgatgtacctaaacaggcgagctcctggcagtcaacagatgaaaggaacaaagaccacaaagcaaggaggcttgtggtggctggccagctgtgaactttgattgacatgtgggttatggcctctggtaat

SEQ ID NO: 260722 - DNA, 363 bp, Glycine max
ctgaaaagagtatgatgaactaagggacgtcaatatggccacagctgaagccttggaacgagaaaccaagaagggcccgaaaaggaagaacacgaccaaaacaagttttgaggggctttatagggcaataatagtgagctcaaactccgaagaggtgaaaggagtcatcacgggtcaaaggcatgatctggaaggacgagctaaaggcttgccttatgtcgaaaagaaatttgtcccaacagttaaagtgagactgaagggactatgtgggccatcatcgatgagtgccaagagagataaatctagcggcgactcacgagcaaaggctagaggatgagtacgccaagatatcagcaggaagcg

SEQ ID NO: 260723 - DNA, 97 bp, Glycine max
cggcaaaaaaacaacgacggcaacggaaaaaaatccgcaaacggaaacaccaaggaaaaaacccgaaagccgaacccgaaaacagggcaaaaccaag

SEQ ID NO: 260724 - DNA, 443 bp, Glycine max
  unsure (1)..(443): unsure at all n locations
agctttgcgaaaagattgtcgctagagctgatcctttttctgccctaactctnttagactggggatccctaagctcttgaccttgacttgatagaacctctttttaagcgaaggcatttgacttgatcccatgttntactaaagagaacaaaaatcggtgcgaatcaaaactccaacatctatcatgggtggaatggatgaatgcatgaaaaaatgcatatgacacatatgcaatttatgaataccggagcccgggaaattgtctccttcttagatacaacgtcttggggtaacacagtgcccaacgtatgtatataaagaaggagactcggaccgtcccgtggttttccaatgtgcgtgatgtatatgcgaaaagcgcaccctggaatgacaatatgacactatcacaaaatataagcaaaggggtcgcgacacttatgcat

SEQ ID NO: 260725 - DNA, 445 bp, Glycine max
agcttagcagatgtctaattcagtggcaggttattatttgactaatatactgacacaaacagatttgatatacatatttccaaaacaaagatatatataaccatctttcaggaaaatgtataagaatatatacatttcgtctacttagttttgaaattaatccttttgaacatttatttttgcggtcaaagttgctttatcgatcgatcctcacactatttacactttgatttatatgaaatggtatgtttcatttatatgccagccatttattctattaattaagatgactcaaccctatattattacactttgtgtttgattgctattattaacgcagggcctgtagtatcccacatatattggcatttgtttaaaaaacagttgaagtcttctacaaggcgttcaaattacgtatatgatatggaactcgtgattcctatca

SEQ ID NO: 260726 - DNA, 414 bp, Glycine max
  unsure (1)..(414): unsure at all n locations
agctttgagccaaaatgctgacttatttttttcttgacccagggtgagaatgccaatccttaccctcggaagcaaaaaatagaaaagaaggaaaattccccaatctaagagtgggagaatgcaaaaagaaaagaaaggaaaattcccaatcaaagaatgggagaaagtaaaaaaggaagaagaagaaggaaagaaagctcctgatcaaggatcgaaagaaaccacaagaaatgtgcagagaggtctttggaccagacaatatctgaacagtacagaattgtcaccaaatgaacgaaaaaagaaggaaagggaaccacgacctaaaatagtcttctccctttgattaccaaccaaaatcccgtgcgctagcgactttnttttctcgcccgcactaaaaaaaaaaaaaaaaaaaaa

SEQ ID NO: 260727 - DNA, 437 bp, Glycine max
gctttacatttatccatggcaggcacgagatttatgatggtatcagagctcttccattgaaaagctctgttgtgcaactctcttctcttgcttcttctttagtttccttttgatttcttcaacatgactaacaattcatctttgaaagatcaatatctaaatatacacaacccatactatcttaattcaggagaaaatcttgcaattgctttggtttctccagtaattgattcgacaaattcaacttgtggagttgatcaatgcttactgcattgagtgcaaaaaataaattcgaatttctcgatggatctattcaaagatatgcatcaaaccatacacttcatacaacttggaagaggtgaataatatggcgctttcttggcttgttcactcagtctcacattcgattagacaaagcatcctttggatggatgatg

SEQ ID NO: 260728 - DNA, 386 bp, Glycine max
agctttatattgtgagaaaggaagatatcttttcttacatatgagcacaaactcattatagcattcaaacaagacaaacaaataaaattttgttagtcatcatataaacaagttaaataaaagagaaatttcaaccaacttaattttaaaagataatggttttgatgttacctttttcatgattcaagtgcttagatctttaaagatggaagtcagacttttgtttttcttacttaaacgtcttgagagatgttctcatcactttcatagtccttggataaaaggttgatctctttctccaaaccatcggatgagtcattgtcatcccaagcaatatatgccttcttggatcttctttctttataacttttcttctcattcttctc

SEQ ID NO: 260729 - DNA, 263 bp, Glycine max
acgagccgcagcaggccaaaaaaggggcttgtcaccaacccaaaaaagggagccaccaccggaaaacagagccaccaaaacacgcggggccaaagaaacagggcaacgaagaagacacaaaggcaaacgccaaaactcaagtgaacaaaagcaaaaaaaaaggcatcaaaacaaaacaaaagagccgcagatacaatacagacaaaagaagggccaaaaaaaaaacgcggcaaaaaaaaaacacaaagagaaaagcaaggaag

SEQ ID NO: 260730 - DNA, 258 bp, Glycine max
ccccaaaccctcatcatccaatatggtttatgagtgctccatgatttacttgatattgagaggtgatctacaggcccaggtgcgtgttctacaaattgctctccatgatgatgattatgcatatagtttaaattcattatgtaaatttgaatgttacttgtagagctcctctgctaaaaaattcataaattaaattttctttcaataaaaattcttggttttgactactaaaatgcttactgacaaatacaactttgc

SEQ ID NO: 260731 - DNA, 187 bp, Glycine max
gaaaatattttattacgtgacactcttgcagcctttcatatccaacttcaaatgtttttggttcaaagatatgaatgggtttgactggctattattgagtggattaaatcccctatgcatgttattcatgaaatgactgcctctatgattgcccaatttgagaaatattggggtgtgataatcgggg

SEQ ID NO: 260732 - DNA, 410 bp, Glycine max
cagcaagctttacttagcttctcttttgtttatacaacgactaatctccaaagaacttgtacaaccttggtttaactgtatggcaaaatcgtcaccccagacccaaaatttacacctcctatcttcctgaaaattatacaacagaggctaatcacaaacgacaaacaagaagttgaaacaaaaacccaaaaccaacataaatataaaaacaacacaaacaaaatcacaccacaaaccaaatttgcaaaggtgaacttttcttaccttccactcaacacatcgccaaaatatcttgtcaaggtgcttcttggttcgagatgttagttgaatcgtgggattatttcacaaacaatggacaaaataaacccaaatgacgaacaagagcctaccatggatgtcattctcttttt

SEQ ID NO: 260733 - DNA, 457 bp, Glycine max
  unsure (1)..(457): unsure at all n locations
ctgcagcttctaaggaagttntctcaagaaagcatctcaaggaagctacctagtctataaatagaagcatgtgtaacacttgttgtaactttgagtaatgagagtcttgtgagacacaacacaaagttcaacttctctccctttttcttccttcaatttcgggctcccccctctctctttctctccctctttcttttcttccattgaagcatcctctccaaggctcatcttggtggtgaagctccatcttccaaggcttattccctagtggatgccgcctcctctctcctcttctcctttgtcttccgctgcatctccatggtggaaaatcaccatccaaggacctcattgaagcttaaagatccagcctccatagaagccccacaagcaagcttccatcaaacatttggaaagtaatttacaaggaagcactattttatagcaaaaacggcatact

SEQ ID NO: 260734 - DNA, 433 bp, Glycine max
agcttatccttatggctggccttcggactttattctttcgtaccaccccggaagattaagccaagcccctacttttgaggggcaactcccgccttatgacgactatcccgggcaagacgatgaggaaggagatacccatcttggccccctgctccacctcaaagatccgtccccacatgaactaccccaaccgaacatagttcgccatatcctggcctcacccacacccgtaaaagaatctgttcccttcgtggaagataagggaaagattgaggcgcttgaagagaggttaagagcagtcgagggccttggcaattacccattctcggaattggcggatttgtgtctcgtgcccaacatcgtcatccctcccaattcaaagaccagactttgatagtacaaaggcgacatgtcaaagggcattccgatgtat

SEQ ID NO: 260735 - DNA, 298 bp, Glycine max
aaaaccatcccatatagtgttgaccttccaaacgtggtagtctatgccaaatcgccatgtcccgtcatgctttttgacccaagagccccaaaaaagaaaaaaggctggggcttggttgggtcaggcctttctgcagcatcaattcaacttggagctcaatttcacacttctgaaagtgtgggtagtgatatggacggacatttacaggggtggattggagaagaaggtgtatatgatggtttgtatctcgtgtcggtgggaaagtgtcaggctgggtaaacaggaaatggaacttggc

SEQ ID NO: 260736 - DNA, 444 bp, Glycine max
  unsure (1)..(444): unsure at all n locations
gcttaaggagcttcaaccggggttttatcccaangcctagacttcgaagagtctttcagagcctctccatccttattcaggtccaacctagaaaaaattttaacatgcagactccatctatgaactataaaaaacacatgactccttaattgttctcaaaataattttaactccgtgcatctcaaagtgattaaactcattgggttcccacaatggatcccatcataatactcattgtgtgttaattngtcgcccttaaagagtcttacagtcatgtaattgtacagtttatagctcacaacattttaatacatgtgtgatctcacaatttaacacatactcaacttgtcacttatgcacaattcacacacattcataatcccaagacatcacatcatcacgcctcatgcatgatatacatatcacacaataataatattaacc

SEQ ID NO: 260737 - DNA, 279 bp, Glycine max
  unsure (1)..(279): unsure at all n locations
agatcaagatttaagaactccgagacgactcaatctagataagtactaaaaaagcttttcaaaacattgagttgcacaagaaattttcacaaaatcttttaccaaagaggtttactctctggtaatcgantacaagtagccatcattgttttcaaaactgatttacaaagctgtaatcgattaccatgagcatgtaatcgattaccaatgttttaaaacgtttgatttcaaatttcacgagtcacaactaggggataaacactttcaaatcattttaaa

SEQ ID NO: 260738 - DNA, 382 bp, Glycine max
  unsure (1)..(382): unsure at all n locations
cttgtattattagtctataatgttactttcgaacaaagtaaagntagtactttttttgaagaggagtaaagtcagtcctaaatttcaataattgcgaactagatcagttttaaaattaggacacaagtgtaccctaaaattaagaatcaataatcgacagataagaaagcatacgaataattcattaaaaaaaaagaaggtataggaataaattacttttgttaatgtttcaaattgtttgactcctaataaaattaaggaataaattttctattttttaatctgaagaataaaactaatcaatcacatcaatcttgaaaaataaattggcgttcaatatattgtgaaatttacatcacaaataaaatttttatttcttttc

SEQ ID NO: 260739 - DNA, 359 bp, Glycine max
caatttcgagcctctcgacatattatgcacctgaatcggacatccgtgtgaaaagtcatgaacatttgaatttctcgagagtttccgatgtttaatttcgagcgtatcgatatattataagcttgaatcggacatccgtgtgaaaagttatgaccatttgaatttctcaagagcttccggtgttcaatttcgagcctctcgacatattatgcgcccgaatcggacatccgtgtgaaaagtcatgatcatttgaatttctcgagagcttccgatgtttatattcgagcgtatcgatatattgtaacccctgaatcggacctccgtgtgacaagttatgaccatttgaattcacgagagct

SEQ ID NO: 260740 - DNA, 334 bp, Glycine max
  unsure (1)..(334): unsure at all n locations
caacttgtgacgttaaacaagagctttctattatgcaacctatgactggnatccatttaattatgctttgctgaatgatttatattccatcaataagacacattgcctgctagaactattatcggggccaactgaccacgacccatgccttcatcgtcaaacacgagtatggctgtggtcaattgaccacaacccacgtagttttcgtcagagtcaataatagtcataatcacgccaccacagccatggtcatttaagaaaaatattttcaatttatttttattttacttccagcctttatttccagctgtatcttaggccttagttcatttta

SEQ ID NO: 260741 - DNA, 268 bp, Glycine max
actttttggggggggccattcttggatggccttgattttctcaaggaccacttggaccccatttctaccaactacaaaccctaagaaaactatattatctacacaaaaagtacacttctctatatttgcatagaggggtggttttctaaggactgaaaaaacctgcctgagatgttctaagtgatcatctaggctcctactgtacactaaaatatcatcaaaataaacaactacaaatctacctatgaaatcccttaagacatgatgc

SEQ ID NO: 260742 - DNA, 419 bp, Glycine max
cagcttgtgaggagacaatttcctttgattatttcatatatcatgaccattaacaaatctcaaggtcaaccattgtaaagtattgacttgtatttccctagaccagtctttagtcatggctaattatatgtagcattttttagagtgtagagtaaacaatgttttgagattttgatacatgacaaagaaggaaaaggctaaaaaacaaccaccaatgttgtttataaggaggttttacaaaacttatggtcactgtgtaacaacttatatattacttataagctttatttcccaatataatattaaccatattgctttttgtgatgcagaattttggataacaacacatttttgcattttgggagcaacaagtataaatatttgatttattggcactcactttatcactttactatcca

SEQ ID NO: 260743 - DNA, 366 bp, Glycine max
agcttatgcgcatacttctttacgaacgttcacttgcacaagacattcttataactaagaaaaatgcacccatatacaatcaaggcaccttcgttacctagattatttacatgtacttccaaggtgtattcgttacctacatcacacacatttcctttgctaaattcacatacatgcatactctaagcactttggctatcaaaaattgcatacgtgcacatcttggtatttctaatacctatacatacacaaacttcatgatgaatcttgactatctacacaataaggtgctacatttcatgcttttttcagtgttttactacctaagccgatgcaaattaagatattttcttttgtcactaaaat

SEQ ID NO: 260744 - DNA, 411 bp, Glycine max
  unsure (1)..(411): unsure at all n locations
tcatgatatgagggagattatattttttagatagcccacccgttggctctntggtttttcttttgaaggatgttatgggtttaaccacatcccataaaatttgcgtttagtatgggtcaggtgttttgtcatccttaatatcaaaaaaaataaaaaggaaaaatgaattgagaaggagacaaattattcgactgaaatgaaatacgaataaggatgcctaaatttaggtggacccatcaaaaaacatatccttcttactatgacataaaataaagcaaaggttcttatttcaaaatgatatttctatataaatccttcaaaatngacaatttcaatggacttctcatgccttagtggtcttattgctcttctttatcatatcattcgtgtgcataaccctgattttggttt

SEQ ID NO: 260745 - DNA, 330 bp, Glycine max
  unsure (1)..(330): unsure at all n locations
ttttatttttctagatacaaaagcaaagaagcaaagcatcttctcttctcgtacacatccacattgtcttgctntcccttgcaagtttcaaccttttccttgcttaagagtttagctctctccttttttccccctttataagtccattgatgcactattaaaactgtgggtgtatcttctttttgcataaaactcactttaagtttggaatcgctacgtaatccaagcgattaatgtggtcaaaatgggtcaagaattccatctttttggttcttgatggcccaaagtttttgcacctgttcatgttntgtgatgcatgtgaaacccatg

SEQ ID NO: 260746 - DNA, 411 bp, Glycine max
  unsure (1)..(411): unsure at all n locations
ctgcagcttcaacttgcacaaggagtgagttgtttttagattcgcctccaactcttagaggtgactttgagcgtntgtttatggaggagtccgagtcaatttctgaatatttttctcgagtattggccgtagtcaatcaacttaaaagaaatggtgaaaatgttgatgaggtgaaggtcattgaaaaaatacttcgaactttaaatccaagttttgacttcattgttaccaacattgaagaaaacaaggattttaagaccatgactatcgagcaactcatgggttccttacaagcatacgaagaaaaacacaaagagaaaaatttatcaaaaggaggctacggagcaactactacaactcaacgtataggaagcaaactatgcacattacaagaaccaaagaggacgaggt

SEQ ID NO: 260747 - DNA, 392 bp, Glycine max
agcccaacccaatcccccttattaagaattatctcctttcttcctctattgcccttaattgaatacacctttgtttggctctctatttgggtcttaaccatttcatgcaacttctttacaaactctgacctagattccccttctttatgtataaaaaaagtgttcagtgggaggggaatgaggtctaagggtgttaagggattgaacccatatacaacctcaaaaggggatagcttggtggttctatgaacccccctattgtatgcaaattctacatgaggaagatacttatctcaagacttatgggtgtctttataagaacccttaaaagagtggataaagacctatcacttcctctgttgcccataatttgggatgacagtggttagaaa

SEQ ID NO: 260748 - DNA, 436 bp, Glycine max
  unsure (1)..(436): unsure at all n locations
agcttggtaatcgattaaactcccttggttatcgattaccagaagccttcctagcttcctgacctcgttttcaagcctggtaatcgattacaccccttggtaatcgattaccagagaccatcttagcctcctgtcttcatttttaagccttgtaatcgattacccacccttggtaatcgattaccagaggccatatcccatatatcaatcaaagttcacagctggccagccaccacacaagccttcttgctttgtggtctttgttccttttatctgttgactgccaagagctcgcctgtttaggtacatcacaggttctcactgactgactatgcccgggttgggtcgggataggtcaagcttggttntgggcaatagcaccccacctgacgtccccaaggtctcctgacccccgcgacatatctccaggtatcac

SEQ ID NO: 260749 - DNA, 412 bp, Glycine max
  unsure (1)..(412): unsure at all n locations
agcttctatataagctaaaccattttatcttttaacacanagttgattttattcagaaaattagagtgtatctcttttatcttagtgagagtgattctcctaaattcttgagtgatgaggacatgaccaagagcaagggcaaggattcacttgaaggacttggagggcctatgacaagggctagagcaaggaaagccaaggaagctcttcaacaagtgttgtccatactatttgaatacaagcccaagtttcaaggagaaaagtccaaggttgtgagttgtatcatggcccaaatggagaaggactaaatgacaccactttgtctcaattttagagtgtntagtttgtctaaataatggcccaatccttgtaaagtnggctgaccacaaatatgttttgggttaatcaacta

SEQ ID NO: 260750 - DNA, 362 bp, Glycine max
  unsure (1)..(362): unsure at all n locations
ttctttatatctgatataaaataagaaaaatgaacataattatatttttttattaatataaattcaaaaacttataattatgaccacaaaatttgatttaaaaaaaatatatgacagattaataaaataacactaataatatttaagaaactatatctaagttctatctaaaaaataatacatgtttgataaattaatttagatttaactaaaatagtgtaaaacttacgttaagaaaaaatattttgtttgcgagcatnatttattctatttatctttctatcttttataagagatatgttatagattggaatcatttcttattataaaaataacattattctttgtctatccctttttca

SEQ ID NO: 260751 - DNA, 242 bp, Glycine max
  unsure (1)..(242): unsure at all n locations
gctatgtgctcgcgactggtcccttttttcccttcgcaacttgatttcattattgctaccccatagagctccgcgaaatttgttccggccatactcttccttgcgagccctctnggtctctagttcaagggctcttgcggtaattgcattctcttcccgtaacccggcgcactccttccgaacctgtgtagcagccaacttgaacttctccttggcgaagtatgcctttcctaactcgcttt

SEQ ID NO: 260752 - DNA, 432 bp, Glycine max
  unsure (1)..(432): unsure at all n locations
agcttgcatgttcaagtttcttgttccattcctagnaattctctttgatggataatagacatgttaccattcttcttatcaatgaagagttgggtcccatttttgtgttggacgacacacccttctttgctaaagaaaacatcaagtccattttcacataattgacttatgctaagcaaattatgtttaagccctttaacaaaaagtacattatcaatgggaggataggggtcaatactttnctttcctactcatgctatcttccccttatggtttcctccgaaagagactgttccaccatgcatgggagtcagacattggaacattcagacattggaacatacattnttctcctattatgtgacgtgagcaaccattgtacacgtaccatgatcggtgtgccatggttgaaaaatcaccacatgattattt

SEQ ID NO: 260753 - DNA, 319 bp, Glycine max
  unsure (1)..(319): unsure at all n locations
gtcccggaccttaagtcacctgcggcatgcaagctntaattcaagacaaagaaattaaagatattttatatggatgatcaagacagtctctagagtcttagaaagggtatattaaatacgaagggaattccaattgaagtagcaaaaagtttggccaagaaatttaagttaaaaagtctttttcaacaaatctactctctggtaatcgattaccagtggccaaaactgatttacaacaactattaaaatttgaattcaaaatttgcactgtgtaatcgattacacatatatggtcctccattaccaccacgttctgaac

SEQ ID NO: 260754 - DNA, 293 bp, Glycine max
gaaaaaagagggggggtattttttaaaaaaaaaaaggagagagaggaaaaagaagggaaaaaggagaggaagaagggaagagggagggagagagaagagaggagaaaaagggaaaaaggggaggaaggagggaagaaggagagaagagagaaaaggggaaaaagggaagaaaggaggaagaagggggaaagggagaagaagggaagtgagagagaaggggagaaaggggaaagaagagaaaaaaagggaagaaagaggaagaggggaagaggggagaagggggaaagaggaga

SEQ ID NO: 260755 - DNA, 387 bp, Glycine max
ttcgagcgtctcgatatatttctcgactcaataagacatccgagaaaaaagttattgtcgtttgaattggctcaaagcttcaacattcaatttcgagcgtctcaatatattacgggactcaatcagacatccgagaaaaaagttattgtccgttgaattggctcagaacttcaacattcaatttccgagcgtctcgatatgttacgggactctatcagacatccgagaaaaaagttattgtcgtttgaattggctcaaagcttcaacattcaatttcgagcgtctcaatatattacgggactcaatcagacatccgagaaaaaagttattgtcgcttgaattggctcagaacttcaacattctatttcgagcgtctcgatatgttac

SEQ ID NO: 260756 - DNA, 425 bp, Glycine max
  unsure (1)..(425): unsure at all n locations
agctntatntaatgttctaagcacttctatctaattaatttataaaagagattaatcgngaagtttatctctatctattttcaattcgcataataattgtccgaacaattttggaattttctacaactttacatttttaatggaagctgacgtcctgattcagatcccactgaggctgatagtggtttgaactttttatgaattgatataccattgtacattgctctgaatctagtcttagtgcatcgatctgatgcctcattcccatattcctttcaagatcagcacaacaaattatagacttataaactaaaagtgtaggtacagggggaattgaatttctttattattaaggcttaggtagtttaaatgtaaagtgaaagattatattttattaaatgaatggatgcatcagctcgttttat

SEQ ID NO: 260757 - DNA, 410 bp, Glycine max
  unsure (1)..(410): unsure at all n locations
agcttctaaaattcctcaggcatacttatattgttttctagatcatccaaattaccactaataaggctatcatcaagagagtctgatgtgccattattttctcctatttcttaaccctttttgaagccatttaaatactgattagtcttaattgtcaaatttattaggcagttntattatttgggcccattcagctaatttggtgtttttaatctaatttcatgaattaatgaagcattgggcttgaatctaaaattgggcttgggcttgaatccancattgggcttggacttgaagagggcaaactaatttattctacaacaatagatcttatcttatcttattttatatagatattatttagattcgatctcatctagatattatttcatctagatcttatcttatct

SEQ ID NO: 260758 - DNA, 455 bp, Glycine max
ctccgcccggacttaagcacctgggctgcagcttgtagaatgggaggtaacaatatctttataggagggaatggcattgctgatggtcaagttaatgaaaccaatcttaaagaagcaatggaggctgtgtgcaaacggggatttggacataaggaagaggaagatgcaaggcttatcatttgttactgaagtccttgttatatacatttgcttacatctttaactattccacatttgagaataaatgaagatttcttacctcaaattgtaaatttcccagtgaaggtattactggtgaccctgacagtccattcaccacaatcattcctcgtgaggaatatgctaacaagtacggtccaactactggtgacaaaatccgtcttggtgacactgatttgtttgctaaaattgagaaagattctgctctctatggtgatgaatgtgttcttggaggt

SEQ ID NO: 260759 - DNA, 425 bp, Glycine max
  unsure (1)..(425): unsure at all n locations
agcttgntttggcagctcgaacaaccatgtttgtaacttcaatttttaacgccatgaagaaggatgatcaggagatatttggtattgacatggaacctaaggttttcaaggtgtcacattcattaaaagctcctctttttctctatacctttgaagctgttatttgttccacacaagatatgtgctatttaattcagttaaaatctggcctatcgtttggttggttatctaattttaatcgtgttctatgttgagcaggctttacttcattttgtttatagagacactcttttggaagatgaaaagctctttatgttggaatcgtcattctttccttcgttgtctgaatcatttatagcaaagattgtatactgctggagaaaagtatggtttgccaagactaatgttgatgtgtgaatctatac

SEQ ID NO: 260760 - DNA, 423 bp, Glycine max
tgcaagcttgtcagtattcttgccgcatcatatatattatcatgcaacaactaaaggaaattctgcattttttttaattaattgttccatattccatgataattaattcatttcatggctttgtaggggggataaacggcaggtccacaacatcactcgttcattggtacatattttacttcacttgatagtgttacgcaaagtttaatggcaaactcttaaaagttttgtaaatacttgtttgccaagcgtagttaatgtaacaagaaaaaatttccatctccaaaaggtaaacttcttctgcatatatagaattattctcgttttcaagttatagagtaatctttgtaattttgcacaaatttataagggtgagccgaacctataaatgtatggaaaactaaaatggaaaacaaaaacctt

SEQ ID NO: 260761 - DNA, 414 bp, Glycine max
agctctgaatataatcatgggaggacattggcacttgggtggtgaaatcttgagtatggactattctattatctttcttattatagagaataaattttgaagatatataatttgccagcaacaggacatcaccattttcagagatgcacagaagcttcagtattacacagggcagaggggcttgaagaagctcaagagttacattcaacaattgagtccaagaattttcaactccaaattccctcattagccaaacaacgaaatgggttctccggtgaacatgagaaagacacaagcagccctttcataccccacgttcagggccacgggaaacttgagaaagaccattccgcatcagcaaatatttgaatgtctccttggttagatcatatgaaaaaattactaattgatcga

SEQ ID NO: 260762 - DNA, 366 bp, Glycine max
  unsure (1)..(366): unsure at all n locations
atggcttattccctagtggatggtgcctcccctctcctcttcttctttgccttccgctgcatctccatggtggaaaatcaccattgaaggacctcattgaagcttaaagatccaaccttcatagaagctcctcaagcaagctttccatcatgcctcatgggctatacacacccttacccattccatctacaccttgggtagacattagtatggactttgtccttgggctccctagaacccaaagaggtgtagactctatctttgtggtggtggataggtntagcaagacgacacactttataccatgtcacaaggtggatgatgcttcccacatctcaaaactctcttttatggaagttgtgagac

SEQ ID NO: 260763 - DNA, 410 bp, Glycine max
gcttctcaaggaagctacctagggtataattatatgcctgtgtacacttgttgtaactttgatgaatgagagtcttgtgagacacaactcaaagttcaacttctctccctttttcttccttcaatttcgtgctcccccctctctctttctctccctctttcttttcctccattgaagcatcctctccaagtttcttacccaaggctcatcttgggggagaagctccttcttccatggctcattccctagtggatcgctcctcctctcacctattctcctttgtcttccgctgcatctccatggtggaaaatcaccattgaaggacctcattgaagctcacagatccagcctacatagaagctccacaagcaagcttccatcaagtggtaatcagagcacaagagcttcaa

SEQ ID NO: 260764 - DNA, 131 bp, Glycine max
ttttggctcacgacttcagggagtatgtgttaaactgcactcgttaaattgcgctattaacggactatcgcttcaggaagtatgcgtcaatgctcactcgttaattcacgttgttggcgactcatcgactc

SEQ ID NO: 260765 - DNA, 429 bp, Glycine max
gcttcttgcgtagccgctcttggtgctcataaaatttcataaacaaatccctcttattactagctattttgaattctttagttcctgaatgtacaaccttcaaattgttgctcggtcccctctttcttttctgcaaaaaagaaaatcaaatgctgtcaaaacatggatgaagtcttaagaaaatcaatatcaaagaaaacatggatgaaatcacaattaaaaagcacaactacctatctttcaaagtcctttggttaatttgtcttgactccttatatggcggggatgtcgttaataaacctatacttttgccttccaaaaaaaacttatcactaatcctcttttcattaatccaattatgatgttattgataaaagatattggttctttactgctcactcctctctcctcacatctcttattggatga

SEQ ID NO: 260766 - DNA, 446 bp, Glycine max
  unsure (1)..(446): unsure at all n locations
agctntagacaaacagaataatcttattatgtcaaagaattggggggggaaaaagcataacaagactttctgtgattggtttaaagatacaatctttgcagatgagaatgcttcanaaacattaagaaagctagcagatgggcataaaagaaatgttatatcctggcaaggatacgacataaacaggtattcattttacacaaaagcacaagatgacaaaagtacaatgcagaacagccgggtcaccctaagggctgaatctcaacactttgcaagtgtcaatgacgccaatccctgtgtagcttccatcccttactttgggttcattgatgaaacttgggagcttaattatgtgaaatttacagtatgttgtttctaatgtaaatgggttgacagcaacaccaggtgtgcgcaccgatgatatangatttacgctggtagatcta

SEQ ID NO: 260767 - DNA, 442 bp, Glycine max
  unsure (1)..(442): unsure at all n locations
gctttatacatttagtgttacaagggatttgatttgaattggnttgaagaaagggaagtttgactatgttgcttcaacgaattctggtagtaagaggcctgggatgaatggagtgaaaaagaaagagggagaagcctatgtcgtggctacggttcccacatggacaaacttcctgcaagccccttataaccccatgtattagtatcccctacaccaataccactgctcgaccaatattaaccctccccctgcccaataccccttcgaccaagagctcccaatcaaccacagagaccaccccaaaatcacccacaaaatccaccccttatacaacctagaccaaacactactcccaatcctaacctaaacactaacccagaagagaatttccagaaaagaaaccagtcctatttgccccaatccaatgtatacattaacctac

SEQ ID NO: 260768 - DNA, 372 bp, Glycine max
  unsure (1)..(372): unsure at all n locations
agcttcaaattctaacatacaacaggtgcttttagttttanatacttaatgtaaaatgtctggccaagtgataagtgcagagaaaacgagtatttatttctcaaaaaatgttttttctcagctttgggcagaccttgctaatcagtctgggtttaaagaggtaggagccttgggtagatatacaggggcacctttattaggtaaatcacctaaggggacttcaattatctgctagagaaagtgacttctaagttatctgggtggaaaacttctcagctcactcaagtgggcgaatgactcggactgaatatgtcattgaagttgttcccatctatcttatgatgtccatgttcattcctagacatattattc

SEQ ID NO: 260769 - DNA, 388 bp, Glycine max
agcttcatcagaaggtgcatgccaagaacttttcctcttatggaagaacggaatgcacttcttgcattgtatatttgtgtaatgaacggcagctattggcattgtgttccttcagagttagtagaatgtgtcttggcttcaccatggacttcgacatatcaacaataagtgttttttcaactttagtcaatcgccctgcatatggatgttcaactaatgactcggccaattcatgattatgcactccacaaatcaacttcaccatccagccttctcctccaaccattggcttgcaacgaagcttgaagggacacccacatttcctagtcccagggtctcttcagataaattctttttttctacacccatactccccactcttttcaca

SEQ ID NO: 260770 - DNA, 303 bp, Glycine max
  unsure (1)..(303): unsure at all n locations
ttttttgtttagtttaaaaagctaaaggggcatttgccgtcccattcaaaacaaaactgataatttttttttaaaanaaaagtttctggaattcaagtttgaagtaaagataaaatcgcttatccaagaaataaggtgttaatgatatcctctataccaataaagattataaagaatgactttagatgattaatggaaaaaattgagataaatggttaatcaaaataaatttaaaattaaaattaagaaatatatttgaaaggaataaaaaatgaaattaaatactccatatttaggaataat

SEQ ID NO: 260771 - DNA, 268 bp, Glycine max
attatggcgaccctatagaaatccttcttcttgtggtgcttcatatctcctttccattggccatgaatgcgcatgtgccgttgggtttttttgattgttaaaaagaatatcccggcctgataaatttttttatggcggaaaggccattatacaaaaaggtttaaaggggagaagcgataatggaacataattcatttgcttgaaaaattatttcttgagcatgtgatagttttgcaaaattcttgtacaagacaccttaaaattcaac

SEQ ID NO: 260772 - DNA, 445 bp, Glycine max
gcttatcaaaagaaataagctttcaatgttataaactattaattagctattatcacaaggttgctcccttgctaacttcaatcattagttatttaaataagtggtgcaaagcaaggaaaaaaatgcaacgaacaatttgtaattttaactttttaccatgtaaacctacaatttcacttaattcgatatcaattttatttttcttcaatccgaaaacatcttcagaacattgacagcatcaacgaacaacaaaatagcacgagtttcagctttcaacgtgctttatttaatttcgtaaaacgaaaactaggtcctaccggtggaaggatcgtaacgcgaccaaagcttggtcttcagcgtgtactcggcgttgaggaagcgaacccagacgcgttcatggcttccgtcggtttcgtcaacggcgtgcagcatcgagccaccgaca

SEQ ID NO: 260773 - DNA, 380 bp, Glycine max
  unsure (1)..(380): unsure at all n locations
aactggattcctcatgcagtgtgggtatactctggcgaagggcgaatatttcttaatcaaaanaactggtcctgccagaatcactggaattctgaaatattttgatgacttcgttctagctggaaatgatcttactgagaatgaatccctcaaaccacaactttacaggcaattcagcatcagagatctatgcaagttaaaaaaatatttcttggttttgaagttgcccgatctgtaaagggtatcactttataccaaaccttgcaatacacccatggacagcatgcttaaactgcacaaggaagctggttctcctttacctgatgcatcagtctataggagactatatacttgatggaagacttctgtatctcactcac

SEQ ID NO: 260774 - DNA, 417 bp, Glycine max
  unsure (1)..(417): unsure at all n locations
tgcagcttgagaaaggaatctcttactctccttctctttcgttcataagctntactccctgggatatgtgttgaattttttggggctcctctcctatgtgaactaacccgttaaatgagaagaccactttgtatcacttgtttaaatggagaagggtcagattagggtgtaagagagagactcatttgtgaggaaaaagaatagttaccaaatattgagagagaaaagaaaaccaaagtcattgcgattttgacatactcattagagagcgcttttcagattgcaactgcgaatccgttcaccattagatctgactgatgtgtggacaacacagtctacacatgtgattcttcaaattatcccgagtggatcatctaaacaatatcacgagaggaattgtggaaactctcttgtccc

SEQ ID NO: 260775 - DNA, 331 bp, Glycine max
ttacatcacacatggttttttttttttttcttgggtaatgaatacaacgcacttaacagtttcccatgtggaacttaacttttaaaatgataaccaactaatgacaccaagtgagtgcgttccgttgacctttattctattttgagcttatcaaacgaggagaaaaagattaggctcgatttttttggctattgttacagcttcaaacgatgtagattaatggtagtgcaatgtgcaggtctgtgaaacaaaaaaggttgataatgaatgtgtttttacttgagacaaaacaaatttgataataaatgatgcgacatgaacacatgagcct

SEQ ID NO: 260776 - DNA, 401 bp, Glycine max
tgcacaagacattctattaaccgataaaaaaaatgctctcttatacaatcaaggcagcttcgttacctatattatttacacgtacttccaaggtgtatgtgttacttacatcacacacatctccttggctaaattcacatacatgcatactcaaagcatattgggataccaaaaattgcacatgtgcacctcttggtatttttaatacctatacatacacaaacttcatgatgaatcttgactatctacacaataaggtgctacatttcatgctcttttcaagtttctgctacctaaagccgcatgcaaattcaagtatattttcctttgttgactaaaattgtattcaaattacaaggcacacattttttggtaatgtatacttcttacatatcctgcac

SEQ ID NO: 260777 - DNA, 401 bp, Glycine max
gcttctcaaggaagagttctcaagaaatcttctatggaagctacctaatctataaaaagaagcatgtgtaacgacttgtgtaactttgatgaatgagagtctcgtgagacacaactcagagctcaactgctctccctcttttcttccttcaatttcgggctcccccacccccctctctttatctccatctttctttgtctccattgaagcatcctctccaagctttttatccaaggctcatcttggtggtgaagctccttcttccatggcttattccctagtggatggcacctcctctcacctcttctcctttggcttccgctgcatctgcatggaggaaaatcaccattaaaggaccccattgaagctcaaagatccagccttcatagaagccccacaag

SEQ ID NO: 260778 - DNA, 428 bp, Glycine max
agcttacaaatctgttataaatccttgcttatatataaaataaaatcaaatctcgataagataagataagataagatctagatgaaataatatctagatgagatcagatctaaataatatatagataagataaagtctaaagtctagataagataaaatcttgtagaataaaatagtctgccctcttcaagtccaagcccaattttggattcaagcccaatgcttcattaattcctgaaattagattaaaaacatcaaattagctgaatggacccaaataataaaactgcctaataaatttgacaattaagactaatcagtatttaaaatggcgcaaaaagggttaagaaataggagaaaataatggcacatcatataggttatatacaaatcaagattcatgatggggatggtagaaccctaatcga

SEQ ID NO: 260779 - DNA, 288 bp, Glycine max
catcagtcctggatcatctttcatttgcaggaaatattccccctgtggagctaatcctccgccgggactgatgataagaaaaaccaaacctcgaggaaggctttatgctcttaataactatataaccgtggaatattaatataaaatcatctgcaacacgtgtaacctggagtgagaattcccttctgaatgatacaggagaatagccctgggatcaatatcttaatagaccgctccctggggagaaactctaatattttccatgttaactggtttatataaaaaatg

SEQ ID NO: 260780 - DNA, 172 bp, Glycine max
caacacccgctgcacagcaatttattttttttaccgaggcaaagcaccagatggacatcggtcaacaaactcttccagcccaattacccttttccttttttaggccaaaatctaccttaagacctcatattcatcaccacattaatattatgcactcccgcttatactgcat

SEQ ID NO: 260781 - DNA, 335 bp, Glycine max
agccaattatggagcataagtatatatgtttgctcagcatgctattctatcacgtaacaccttatgaactacttactcattttgatataaaaaaggggaaaatcactgtaattatactcatttaacttcttttcttcaaaatatctaaatttagggggagaatatgatgtttcaatccaagaaaaagaattctctccagtcacatattatttataaagatacatatttacatttttttcaccctaagagaacaaatttgccgtatgtgagactctatcttcttcttctttatcaatccttctaggtagaaattatgtaagttatgtgggggaaat

SEQ ID NO: 260782 - DNA, 410 bp, Glycine max
  unsure (1)..(410): unsure at all n locations
ttatgtcatgattttatggagctttatgattaattgtggaattcgggggaggagcaagcggttggtgtgttaaaccgtgccaaacttgttctaactgattggtgggctgctgacgaggtcaaaaatgatatacacactcatgcaacgtggatgctgcgttctttaacgatgaaggtgtaacagcttcaactgttagagagggcgaagctactgctccttcaatcattgagttggctaataaaccagaatctgttcaatgaccgattccaacttgattgttgatcagattattagcaatgaggaagatatttctgtgtgtnggtttattcttactcaaaattagagatatcttgagattgtatccttccttttaattcattttgtaggcgataagtaatattgtgcttaaa

SEQ ID NO: 260783 - DNA, 400 bp, Glycine max
  unsure (1)..(400): unsure at all n locations
gctggtncgagggacttacccgcngattatcttataactatgaagaatgaatgcaaaacgtctaagaacggccgaaaccttcgcgaaattcctcacggaaacgttttggaagcgcctcggcttatatattcttcacggaaacaatttttccaagcaaattctaaagagagagaagtgcctaaggggctgaaccctcttcttcttcacttcctcccctatttatagcaaaataggggagatgcttgttgcccagctcgcccaggcgagcagggttgctttctccataagcaacaaccttctggaggaatcttctggagggcccaagtgggcctggttgctattcgcacccccatttttactatgtacaccccctctgcttttttggtgatctnttttcata

SEQ ID NO: 260784 - DNA, 440 bp, Glycine max
agcttcctccacgttttcctccatacctattactttttaccttcgattctcactcgattcttcaccaaatcacgtcccgtaaagcccaatcttcctctttttcactcctctttcacttccaccgatcaaaatccaaaaaaacttcatcaaatggcagagccatcaaagaagagaaagggatcatcttccaccgccaccgctgctgcccatcgccgtcacggcccatccggagcacccacagcacctattcctccttctttgtcatctccaagatcatcaacactgttttcatccgatgatcaacgtctaccggacctttctcaggtttcttctataataatcttagaccctaagtacctagacgtagagttctttaatgatgaaacgttggattgttatcaagtgtatcaaaaatcctggtcttgttgatttcatgtcat

SEQ ID NO: 260785 - DNA, 430 bp, Glycine max
gctgagctcgttgtgctgccttattttcctctcggaacttgatcctgctccattctatcttttgggccctttgtgtttcccactctaatgcttcaaccgtagtcatgttgacatctctcagctcatcacactttttcctgaccctagagactgtcatctttagcttctccttgaccactctcattttttcgagttcctctttcaaagcttgcacttcttcgctttcctcagggactttagcttctttcccacttaggccttatagcattaggagccaagttatcccttgcgtccaaaacttcaaccacttgtgatagccgtcgatgacgccattgctacttaccttaagctccttatctttccttttcactgtattccacgcgttatgaattctttgaaagatcttcgcattggcgtcatcgatacctca

SEQ ID NO: 260786 - DNA, 401 bp, Glycine max
accttggtgcccatttctgctccaaatcgcgaaaggagggcattttcgcagtcgtgaagcgcgtctctacgtgtgggacttcgaaatttcaggtttgggtggacttttttctctcttgatttttgtgggtatggggttttgggagatatgatgggtagtcttgctaggtttctgctttatgatgattatttgtgaagaaacttgttgaaagcatgttgaacttgccatgtttggatgagttaaacatacccattcagttttagggtttttatgatgatgcttgtgatgtttatgtgctgaaattgcttatggaaactgttaaagatgaaaggtagagttaacctagggttagaaagtgagaatatggtgttatgagtggaaaaaaagagtgaggctttgag

SEQ ID NO: 260787 - DNA, 414 bp, Glycine max
  unsure (1)..(414): unsure at all n locations
ttaagtcacctgcggcatgcaagcttgttgacataactttgacagtatttttttaatgttgngtagcgatcttttgtcatgcatttgtactatgttttgatgaatgcttttccaaatttagtgtattgactatcagaatacacatattggaatggtggtagtcacgtcaatattataatggcgatgcttaaaattggagaaaagggttttgaagataatcagagatacagagagtaagagatactatgtaaagatttcccccagctcgatgcttgtgaaatattgacagcatattctatcattgtcattcttgcattccttaatcaaactccaaccagttacctagaatctcttcccaattaatcacccttgattatggggtaaaaaccttcttaattgtttcctaattcttgg

SEQ ID NO: 260788 - DNA, 415 bp, Glycine max
  unsure (1)..(415): unsure at all n locations
agctnnatccttctttgtgctcttcttgtttttnntggatnccgcagggacattttcttgtttttctccatctccatcagtctcaacacctgtcttatcctgagcacctgcaaatgcaatttcacaacatcttattttagcaagattcaataacaataagcgttgagtgcttgcatcttgaaacacgaaaaaattacttttctcagataaaagaagattaaaaaaagtggtttgaataaaaaggtttgtcttctgtacttaaatagaaaaacctgttgatgcaaaacaaaagaagtggccaacaaagaagaagaacatggctattaataaactaaactcacacaacacataatataatatccaatataatatggcacaggtctacaaatgtaccttgagactcatcttgaccatc

SEQ ID NO: 260789 - DNA, 336 bp, Glycine max
  unsure (1)..(336): unsure at all n locations
ttgcacaatcttcctctttttgatgatgacaactcttgaaatcaagaaacacacacacacttttttctagtcgatcactcttataaaagctccccccttggttntgaatttatgctcatcttaaaattaaaatgattactcatgcgaggtctcgatttgtccctatttttctacccctttggcatcaacaaaaagccaaagtgcgtatcanacttaaagtatgcaaatatatcttaaacattcatacaacatttattaataaaattaaccaccacatgaagtaaaaaccatgaggaagcactcattaacagattaacttataaaatccacatagtc

SEQ ID NO: 260790 - DNA, 341 bp, Glycine max
  unsure (1)..(341): unsure at all n locations
actacaggggctcatattgctgcacctgcctctattcgaccacaaaatataaaaacaaaagggaggagagagaatgcaggatcaaggaaaacaaagttgaaggaaaacgacatcattttttacttttcttttttaaaaacaaactttntttcacgtgtaatctcggttaaacaaagattacacgtgacatgcttgcgtgccagtcacgcaggcagttaacggatctcagacaaaaattntcaaatattagagactatccgaagaaaaaatttattagaaaccaaatgaagaaaaatctcagagccaaaacatatttaatattttatcaatatacaaattcc

SEQ ID NO: 260791 - DNA, 319 bp, Glycine max
  unsure (1)..(319): unsure at all n locations
agcttctcacgcccttgacatttatgggtggaggangnnncccaattacatcaatctttcccttgtccacctctattccccttactgaaatcttatgccccagcactattccttcttgaaccatgaaatggcatntctcccaattgagaactagattggactcttcatatctctgtgatactctctcaagatttgataagcaccctctaaaagatggcccanaaatagagaaatcgtccctgaaaactctgatgtatttttccccatatcagaaaaaatagccatcatacacctctgaaatgtagctggggcattgcat

SEQ ID NO: 260792 - DNA, 416 bp, Glycine max
  unsure (1)..(416): unsure at all n locations
gcttacattatatcctttagccactaatttaaccttatttctaatgaatattctatggtcattccatttatttctaaatacccatttaattcccataattggatgaatggtgggtttccctggagttactttttggttaaatatattcaaagggaatttgctttgtcggaatgcgcaccggatcatcaagtatttaaaaattaaaacggatgaatccgagtatcgaacacagggaactaatgttagcctgaattaaatgcaaaaatgaagcattgttgagagaacatgtatgattgataatttcacataggatttatactaactcttatgcttaaagctataaaatgcanagtaaataaaagtgacaatagtaggtagaaatgttgggtctttctaacacacaagttgatgcatat

SEQ ID NO: 260793 - DNA, 401 bp, Glycine max
  unsure (1)..(401): unsure at all n locations
agcttgccacccanctcgcccaggcgagcatggtttgctttctccagaagcaacagccttctggaggaatcttctggagggcccaagtgggcctggttacctattgcacccacatttttactaagtacacccccttgccttatttggtgaatcttttttcgtaaagttacggaaacttacgaatttcgtaacgatacttgttttcttttcgtaatgttatggaaccttgcggattacataatcatccccttctttgagttacggaatgttacggaacctcactaattgtgcaacgatgcttccatttgatttccggtgtgttacggaaccttaccgattgtgcataaatattttcttttgttttccggcatgacccggaatttcacaaattggctaatgat

SEQ ID NO: 260794 - DNA, 457 bp, Glycine max
  unsure (1)..(457): unsure at all n locations
cttaagtcacctgcggcatgcaagctnttacattagggttagagatattattatcttgtttatcatgtaaaggaatcaaaacccaaagtcaatagcaaatggaaatcaaaatgagacttgatgagcgaataggtcgtactacactagtatttttgactttataagtaacccatacatacattngtggtacacaaacaaatttatggcttacaaagctttgcggtggaaacagaaatccaaagctccaataattctgtatctcaatcatcaaatgggtactgctcatacctgattgtacaatcatgcagcaccgaacgagctcctacacgtttcggacacccgttgaacatggctgttttataagcaccaagacaggttttgcagtcagtggcagtcagattaaggttgcaagcagcatgttcatatgcaaaggcattangatatggagaaatgttgt

SEQ ID NO: 260795 - DNA, 353 bp, Glycine max
  unsure (1)..(353): unsure at all n locations
agcattctgaagtttttgtgttttccaaaccttgaaaacacgngctattcatcttttcattctcttctccctttgccaaaaagaattctcccaggactaaccgcctgaattctttttggggctctcttctcccttttccaaaagaacgaaggactaaccgcctgaattcttttgtgtctccattctcccttgtcaaagaattcaaaatgacacagtctgagaattcttttgattcttaccattccctaatacacaagnggtcaaaggactaaccgcctgagaattctttttgttccccattcacaaagtatctaagggttaacagcctgagatgtttgtcccaacacattgga

SEQ ID NO: 260796 - DNA, 446 bp, Glycine max
  unsure (1)..(446): unsure at all n locations
agctttaaagaatgaagaagagattttggtttttaaaataagaactttgcacgagaatgatggagaaataagaagaaaagagaggtttaagagcttcttgccaaagctttgagagaagaagtcacaagaacactagtttaaagcttggaagaagaagaaaatagtggtatctcctcccttaaaggtctcgtgcaagaggaagaagaataagatttcaagtttttgatttgtgaaagaaatgatgagttaatggcctaaggctactaataagctcaattgacaagcatgaatgacccctttgatggtcaaggttaacgtgcaaaagggtgtcataaatgggtgtttttacttttgaatttttaaccagaaatggataacgtagacataaggcaaaatggtgaaaccatttttccaaaactagtaaaatttatcttanacgtctatat

SEQ ID NO: 260797 - DNA, 440 bp, Glycine max
  unsure (1)..(440): unsure at all n locations
agcttatcttgctaagcccagataacttatataattnttggaaatgccatctcgcgctaagcgcagccatcctgagctaagcgctattccttgcagcctgcattgggctaagcaagcttgaactcgctaagctcatataacttagacaattttttttatttttgccttgcgctaagcgcctcacttttgcactaagcgttattcattgcggtttgtataaggctaagcgagacttgctcgctaagcccaatagcgtctagtagtcgagtcgcgctaagcgagcacctctcgctaagcgcatgtttaaaactgtttttccctgagctaagagagtgcctatctcgctaagccaattatgcagaaaagattttctgtcataactcgctaagcctatgaagtatttctcataaggcacgctaagcgagcatgatctcgttgag

SEQ ID NO: 260798 - DNA, 396 bp, Glycine max
  unsure (1)..(396): unsure at all n locations
agctntgagcaaatggaaacgactttatctctttactcggatgaccgatagagtcccgtgatatatctagacgctcgaaattgaatgttgaagctcagagccaattcaaacgaccataactttttcctcgtatgtttgattgagtccccgcatatatcgagacgctggaaattgaatgtttaagctttgagcaaattcaaacgacaataacattttattcggatgtctgattgagtccactaatatatcgagacgctcgacaatgaatgttgaaactctgaccatatcaaacgacaataactctttactcggatgttcgattcagtgacgtaatatatcaggacgcttcaaattgaatgtgaacctctgagccaattcaaacgacaataatctttt

SEQ ID NO: 260799 - DNA, 364 bp, Glycine max
  unsure (1)..(364): unsure at all n locations
agcttctattatatatcttatacaatagttttattgtttaatcattaaccattacttgttcattgactgtttttttgggatattatgaattatatacatgatgactccaggtacagatgaaatatagttactacaatcgtctctataaacagaacaattgtcataaactccttaaagaaatcaaacatcttgaagtgacaaggaaaaagtcggctcaatttaaacaaagcatcagaaatcaagagaaggtaaaatattaaatacatatgttggttgaaaaacatttctcgttaatcttttaaggactaattaatctcactgatatctttgttntttctagattatgaatgatgagttaatccag

SEQ ID NO: 260800 - DNA, 338 bp, Glycine max
  unsure (1)..(338): unsure at all n locations
aaaaattcacgatatntttttcataaattaataaccaatcctttgaaggattgaaacgatttaaaagacacaccgtctcttatagatatttttttttactcgcgatagatattaagaatgacaaggcttaatcaaatttgtttgataaataaaaatgatagacccacgaacacctctcaatattttgaaactaacaaattataacctggttaaaataataaaatgtgtactaaaaataataagatataattttggcgataaaataatgaaaacaataattgagatcggattttttataatatggaactatataaaaatgaggattgtaattttataac

SEQ ID NO: 260801 - DNA, 308 bp, Glycine max
gcttttcaattcgatctatgttcccgttgtggtccacatctatgtgcacgtattttgattcttggtttagactactttttataccccttttgacgtgcgtaagccatatatttaagacatttctcgcttaatccaataataaaataaatttccaccgatcggtggaaatggatcatccgttaaatttggctaaaatgaattccgaccgtacggtcgtgccccaaacacgttggaaataaaaaaagaggtctaatattaatataataataaaacgataccttttagtaaaataaaagcgaaaaaatcgc

SEQ ID NO: 260802 - DNA, 375 bp, Glycine max
agctaacaatcaggtcatactattgatttaaacaaagcacgcataaatatgccatgctagactcaaaatatgcaacaaacactagacctaaatcagtgtcacagaaattggaagaaaatattttatccaagcacaaacttgaagccttattccatgtattggggggaagttatggctggccatatgggtagaggtgtcatacaggagcacgtatataggaagggaccttggactgctgaagaggacaagttgcttgttgagtatgtcacgttgcatggtgaaggcagatggaactctgttgctaggcttgcaagtaaaaaacaccacacctctttcactggcttgtttcttaatatatatgaatgggatttcaca

SEQ ID NO: 260803 - DNA, 351 bp, Glycine max
catgcaagcttgttactcagacgctctattttttttttaagaataaaaaacaagattttttttttaaaatggaagacaaaagaaaaaaaaaatactattctaagaatattttttttctcaattatcattattcatactttttctttctttcaaaagaccataacttttcaacaaccctaaagtcatcctacgattttactagggtgccctcactttcaaaccattgatctaaaattcacacgtgtgttctttttagaccattgatgggttctgtcttgtagtcgtaaaatcaggtcaaaacgcggggtacttcacccacgttgagaccactggtgtcatgtcttttgcccg

SEQ ID NO: 260804 - DNA, 343 bp, Glycine max
gcttgcattttggaaccttttttgttattatcgaaaggttgaaggattaagtctttggggaagaagggatagggttagagagggggtgggctgctgcacaaaaaaaaaatggaagtttcgggaaagggggagaaaggtcttgggatttttaaaactgcacgggagtggcttgtgttattttaactttcgttatttaatattatattattatttaagtgaaacagtgcgtttcaatcaatcgctaacgaagattaatcttcacttgggaacttatggttatattttttttatcagttcaacttttcttttggctcttccaaataataccaccttccatgcatgg

SEQ ID NO: 260805 - DNA, 345 bp, Glycine max
  unsure (1)..(345): unsure at all n locations
agcttctagccaaatggactttactttgttatatttccttngatagcccttatgagccttgtttccctttccttgttttgaagctcactacaagccttaagtgaaaaaccatgatattaccatatccttaaggaattttggagctttggaattgttttgggaataagtgtggggggtttttgtttcattggacaacttgttttgttggctatgcttcatgatgtattttgggccatacttgatgtacattgtatattggttaaatgttggacatgctgaatgaaatgttgtttctcataggctatagagtaaaaaaaaaaatcgaaaaaaaaaattcgaaaaaaa

SEQ ID NO: 260806 - DNA, 342 bp, Glycine max
agcttcttagtctcagatgatgctgcttattttgtagctacctcatgcactcctctaatgactatggcatcatttctggcgctaaactgctgggagttggaagccatcttctcaattaaaattctggcttcagcaggagtcatgtctccaagggctccaccactgacagcatctatcatacttctctccatattactgagtccttcataaaaatattggaaaagaagctgctctgaaatctgatggtgggggcaactggcacatagtttttaaaatctctcctagtactcatacaggctctctccactgagttgtctaatacctgagatatccttcctgatg

SEQ ID NO: 260807 - DNA, 346 bp, Glycine max
tccagcttgaagacccatctctctttatttgagactgcgcttgcttcttttctaaattggtgcttgcttttataagaaccaaagaagggtatcttggaattttatctgtaccttttttggtgggttgaagataattgcttatccttttgaactaaaagggtgaaagctccctttctgtcttcacttactgtgaactacacagaagtaaacattctagtgtctatagaagactatgaagccttttagccttttagtgttatctttatatttcttctctgaggtagggcagcttccctctcatgacattttaacattgctggagtttaagaaaggcatcaagcatgac

SEQ ID NO: 260808 - DNA, 343 bp, Glycine max
  unsure (1)..(343): unsure at all n locations
agctttaaagcgaaactttgtttttgaattaaatgttcctctctctggnaatggattaccagaagctaaaatgagttttaaacagttttgcaaattttttgaatttgaatttccaaatgtgtaatcgattacatagatattgtaattgattacatagtatgaaattttgatgattacaaagatgaaagctattcaagtttgatcaaagtcaagaatcaagaaattcacgagaaacgatgaacaaatagtccatagtatgttaaaagaattccttaaatgaggttgcaaaggtttggattgaggttaactccttaaaacatcttacaaagctttaaagtgaaac

SEQ ID NO: 260809 - DNA, 317 bp, Glycine max
  unsure (1)..(317): unsure at all n locations
agcttgctgttttatgttctctttgtttggggtatacttggtggcattctccaccttcttttgtcttaaggagttctttaggtacaggcaagggcttcctttctacagatttctgtaaaaggctntccttgagtatggtctgaccctcccaagtgtcttattatccttccttttactatcaatatatatttgagctgggtccttctggggaggtaggggttggaatgccaacatatttggaatgtcaggcccttgctcctttttgctaaaaaaaaaaaccttccattcaccaaaaaacgttacagggatgcatcctt

SEQ ID NO: 260810 - DNA, 339 bp, Glycine max
agcttctttctattagcagtttgtactaaaaaaacacaagcaaccaaacactcttaaagaagtaatatcaaagggagttccatagagtttctcatatggagttttattactaagaaacagtgtaggtatgccatttatgagagtagcagaatgaattaaagcataagaccaaaaaatggaaggcaaattggactgaaatagcagggatctagtaacattaagtaagtgttgatgttttctttctgcaatctcattctgttgaggggtttcaacacaagatgtttggtgaacaataccagtttcatcaaaattttcttaagatgaattccgatccatttt

SEQ ID NO: 260811 - DNA, 336 bp, Glycine max
agcttctggaggaagcctctttttgaagcttctagagaaaactacatgaagctgcctcggtagaaacgctgcccagccttcgttaaccgttggatcttctcgaaatttggtttgcaacttcacaagacactttaccatgatttaaccgttgggatctttgagaaaatatctggagtgtgctagaagcttccgttcccgagagcatctcttatttaaacatttcagcctttgctttcttgtagcttaggaaaaataccatttcttcttctttctttcttccaaatccatttctaaagttccaagtactttctccatcacccacatccaccattagcc

SEQ ID NO: 260812 - DNA, 338 bp, Glycine max
agcaataacatctataaacgttttcggtttccattcttgacacctttcgtgatttccttcactcagcaacaatgtttttgcttcactcaaacaatgttatggtttttgattgcggcacgccaagtagttatttgtgttaagcaaaagcataattgcgtacgggcccactagtaacgaacggctgtgattcaagcatatctttgatcaggatggcgatgttgacacatggcttcatcaattgcaaattaaaccgtcaaacaccgaaaggtatagtcacttccaatttgaatcaaattatcaaaaccacgaatttttcgctttgtcccattacttaatta

SEQ ID NO: 260813 - DNA, 330 bp, Glycine max
agcttgcttgtggggtctttattgaggctggatctttgagcttcaatggggtcctttaatggtgattttccaccatggagatgcagcggaagacaaaggaaaggaggtgagaggaggcgccatccattaaggaataagccatggaagaaggagcttcaccaccaagatgagccttggataagaagcttggagaggatgcttcaatggaggaaaagaaagagggagagaaagagggagggggagcacgaaattgaaggaagaaaaagggagagaatttgaactttgagttgtgtctcacaagactctcattcatcaaagttacaacaagtg

SEQ ID NO: 260814 - DNA, 351 bp, Glycine max
agcttagacagagaagaagagagcttatatggagatcgaagaagagagcgcgagcaaaataagactcgcgcttgatatattttaaaatgtaagttcaacatcggttttcaataaataaataaaaaaccgatgttaacaaaatgatgttagagtaaacatcggttttttggatgaaaccaatgttaacttatcatacgttaacattggttttcagcccaccttctctataattttcctcagtttcccaaaatcaacaaaaccccccacaacagaaacaaccaaaacaaccacccataaacataaaaaaaaccaaacaaagaaagaaaaaccatcagagggagaggaaaaaaa

SEQ ID NO: 260815 - DNA, 322 bp, Glycine max
agctttaagagaaacagacatattcattctaagatactaaaatacgatgattcgctctaagtatgaaaaggagtttcatgaactttggccctgttatgcaagagcaaattatgtcctaggctaaaagtcagtgcccacctcattataaatgtatgtgaaagctttacccccacccaatttactatgaaattgtgaggggaaagtgaagaactataattgtagccagcaaaagaattcataccttatggtgttacgaagtcggcccaagcatatcgcatggatatagatacaggggcgtggataccaatcaatataatgtgct

SEQ ID NO: 260816 - DNA, 344 bp, Glycine max
agcttcttttatttttggtatttttgttttttttataaaaaaaaaagcaaaagaaaaacacatagaacaataacaactaagaatgaaagctattgaataagaaagaaaatagaaagggaaagaatcaatctatcaaagatagaagaaaagaaagggaaaatagaaaggaaaaacatgttctttggaccaaacgatgtctgaacaatgtgcagaattattgaaaagaaaaaagagggagaagagcactagtaacttggttatgacacaggggggtttaaagtgattgcctactttagttacaaaccaaatctttgtgtctactctcatgttccataccaaacaaa

SEQ ID NO: 260817 - DNA, 338 bp, Glycine max
agcttgtagagagatcttcattttggtttaattgattactgattatttgtaatcgattacactattcagttgagaccatgtctcattttcatgagtctctactttaatcaattaccaagtgattgtaatcgattacatcgttcttgaaagtgttcccagtagtgatcaagaaaactttgatcgattaaatcaagagtctaatcgattacattgttcttgaaagctttctaggtgttgggaagaacactttcatcgattaaaaatgataatctaattgattacttctttaaaataatcgattaatgtggcaatttaatcgattacatgcaattatgatt

SEQ ID NO: 260818 - DNA, 344 bp, Glycine max
agcttataagaacaaaattgcctcaattatttccaaatatgcatgtgaattaggaagcatcaacaagaatcaagccaaggttattgtgcaagcaatcaatggggccaaacacgccaaatgattatgatgatggatggctcaaattctcacaaaggtaaactcatcactttcaaattgaggtttcaaaactatcatgacatgtagaggagaatcaaggatttcatgtcacaaaatgtcaagaacttttattttcaaaataattacccatctcttgaacatatcctataattcaaagaaaaacatgcaaagtcatacatgcacacataattgacccaaaatattaa

SEQ ID NO: 260819 - DNA, 338 bp, Glycine max
  unsure (1)..(338): unsure at all n locations
agcttcacacaaatacattttttcttctttattntaaaaaataccacaacaacatcaagatagcgttatgaatatatttttacccaatgattccgttgtaaataaattttttatcacaacaaaatcatgatttcactgtgataaaaaaatattcacaatggaattgtgattccattttgttaggagagtgttgcaaaatataacaacagaattacaatttcattgttatgttataaaatatgtaacaaaatcattattttgagaattataatttcgttgtgcattctgtataataaaatcatgattctatgtgggaaagagtgtttttggaataaaca

SEQ ID NO: 260820 - DNA, 328 bp, Glycine max
agcttgcacaactagtgtaattatatttgaagtgtcttttgaaattcgtaaagaactcacccaacaagtatgtcttgcccaatgagtcgatcacactttgaagtgacaagacaaaagttttgggcccgatataaaatgacattttcttaggattgacataaacttaaggttgtgtgcgatgactaaagctcccatctacctccatctttcattttcctccattttccttcaatttctctcttgcattttgtaattttaaggtctctcgtgacaatgagaagttagttcatccattgttggggaatttgtacactaagtttacttttat

SEQ ID NO: 260821 - DNA, 339 bp, Glycine max
  unsure (1)..(339): unsure at all n locations
agcttataataacattttctttatttttaaactttgnatacatgcatctattagcatcactactagaaaaaccatcaacaagtaaagtctcattaaacttttcatgccattgtttaggaacttgttttaaaccatatagggatttcaaaagtttgcacattttgttctcttgaccatccaccacacaccccttaggttgagtcatatatatctcttccgctaaatcaccattcaagaaagttgtcttaacacccatctgatgaatcactaacttatggattgtagctaaggctatcaaaatcctaatggaggaaatccttgtaataggtgcaaaggtat

SEQ ID NO: 260822 - DNA, 330 bp, Glycine max
  unsure (1)..(330): unsure at all n locations
agcttagacgaccntgttgatttcttattactcnnacaccnattgggacaagtttaaatttgatgtacaacaaaatcaatgtgagcctttttcccctttgaaagacttgcttaaaacaaatgttttacaaatatttttaattaatatttgaatttttttttattccttattaatatgtatgggaggggtagagggtgtcacatgaagcattgatttcttggacattctccaagcaagcacgcactatgcactatgtgttgggctctttctgcagaaacatagctttgaagccaaatttctgctttgtcctttattttgggatcttgagat

SEQ ID NO: 260823 - DNA, 328 bp, Glycine max
agcttgcccagagaatgaatttctgttgaaatgcttaccacctcgaaagactggaaagcggtttctaatgacttctctacggcctccacataaggcatagaggacgggcagctcaccaagatgtcttcctcgcctgatacgatgaccagatgcccttccactacgaatttcaacttttggtggagtgtagagggaacaactcccaccgagtggatccacgggcgccccaacaggcagctgtaggggggggttaatatccattatttggaaggtaacttgacaggtgtgagggcctatctgtactgggaggtcgatctcttccctaacc

SEQ ID NO: 260824 - DNA, 338 bp, Glycine max
agctaatattttttggacttatcttgaattaattcctttgatagcccctttgagcctatgttcccctttctttgttttgaagctcattacaagccttaagtgaaaaaccatgatatcaccttacccttaaggaattttggagctttggaattgttttgggaataagtgtgtgggggggtatgtttcattggaagatatgatttgtggccatgcttaatgttttattttggccatgcttgatgtatatatattgcctagttcttgctttaatcttcaattggtgcaaaaaaaaaaaaattcaattggctgaaatttatactgttaaaaaaaaaaaaaaa

SEQ ID NO: 260825 - DNA, 335 bp, Glycine max
agcttgaacgggaaactaatgtgtcactcaacatgcacataattttaataattgacatatttgaaaaaatgtaatatccccataagtgtgaagttgacatacataccttaaaagatatgtgtaacaataactatgactgcggtgatggcagggaaaattgtatgacatttggttagtcaaccaagaatgatagaaaagtgccttaacttcctatggaagtgaaatattagtacctacaaccaatcccaaagactataattaggtgacatactaaagcagcgatataaaaattgttcatgcatgttattaacaaaaaaaacatggcttgcaggaaa

SEQ ID NO: 260826 - DNA, 347 bp, Glycine max
agctttacttataatgaaaggcttagtctctttgttggggagttactactgaatctcttgatgtaatactcttactatcagtttaatgttatttctatgtgttcattgcttctatctatgcttattttacatgcttgtggcttgatcacccatttgaatgtgtagttaggctttctagtattggaaaatactttaaaaccttagaacttgatagagcaagctagaaatttatatgtctaggaatggagtgaagtgatctagtctattttacactgtaggcttagtgcaacttttttagaacaagtttgttgagaaatcaagaacaaagactaaagaaagttaggctc

SEQ ID NO: 260827 - DNA, 345 bp, Glycine max
agcttgagatgaggaagtgtataagtttaaacttcctgcttttattcgttgaccacagagtggtaccaggagatatgtcgcgggggtcaagagaccttggggacgtcaagtggggtgctattgcccaaaaccaagcttgaccaatcccgacccaacccgggcatagtcagtcagtgagaacctgtgatgtacctaaacaggcgagctcctggcagtcaacagataaaaggaacaaagaccacaaagcaaggaggctggtgtggtggctggccagctttgaatcttgtgtgatatatgggttatggcctctggtaatcgattaccaagggtgggtaatcgattaca

SEQ ID NO: 260828 - DNA, 342 bp, Glycine max
agcttcaggctgttcaattgctttattttgtttttcagaagggcaaaggtctgtgtggtggtcggcacagaaccataaaccacagagtctggcgacaggtgcaaattttttattcatggccagttgggttaccaggttaaccaaggtatctagtttaccttcaagcttcttagtctcacctgatgaatatgaattcgtggttacttcatgcactcctctaatgacaatagcatcacttctggcactaaattgttgggagtttgaagtcatcttcttaattaaatttctggcttcagcaggggtcatgtctccaagggctccaccactggcagcatctatcat

SEQ ID NO: 260829 - DNA, 345 bp, Glycine max
agcttgtgtttatcacaacgagtgaggattgacgtacattaatcacttgagttcacgcatcacactaggtgtgcatgaccagaagtgtacaaccataaatagttctaaataaaataatttgttaacataaataacactaaattttttgaatatttttttatgataaatattaaatattttttatatttataaactattaaataaagttttcatttattattttctttataaaagagaatatttttagaatatattttgttaacatataccttaaaaaacactaaagtgaccatcaagtgcatgaatccattggcagtagattcaaaattaaagagtcctaataag

SEQ ID NO: 260830 - DNA, 331 bp, Glycine max
agcttggggaagaaaaaatttttttctatttttaaactaacagccaagacactaaaccatcaggatggcatatgaaacgtatgttgaccttcatgattaccactgtatgaggattagaattccaaaatgcaaacaaatataaacacaatttttgcttccaaaaaggcattatttgccacattgctccattaaaagctcttgtctatacaaatagtccaacacaacatagcaacaaattccatcttgcgggaagcaaactacaaaacccatttatttacatcctttgtcattatcacacaataagtcatcgactcattatcttcctaacaaa

SEQ ID NO: 260831 - DNA, 337 bp, Glycine max
acttgagagatgttttcttatgtacagacgttagtctttgtgttagcgctctaattgtcctatcatcttctgaaagcatctatgtcactttccaagggcaagagggcaagagagaagagaactatagaagggtaagcttttctcaaggacccctctggctatggtcacttttaaaagtgtgacttttgcggcttagggccctttctttctttcttttccaaagtcatacaactatttgattgcatggacatatcacaaatcagcaggggtcgttacacaatattaaaatataactagaagcgttgtttaaatgacttactttaacaacaatccacct

SEQ ID NO: 260832 - DNA, 342 bp, Glycine max
  unsure (1)..(342): unsure at all n locations
agcttcggatccaacccancttgtttttatgcccgaacctgctggatcggagtccgaagcaagaagccgatgcaactgcatgatggagttaaccgccacggcttcgttcggattcacctgcagcatccacggcttcacgtcttcaaggcgccacgccgccacgccacgaaatgcaaacctaacattcacggaccgcgccagctcagcgagcctgagcccaatttcgcggagcgtgtcgcggttgtcggacgagggaagcccaattcccgtgagcctcaacagcggaggcccaccgggccgaagcgccagggcctgaatcagcgcgggccactggagcccctg

SEQ ID NO: 260833 - DNA, 338 bp, Glycine max
  unsure (1)..(338): unsure at all n locations
agcttgtggcggctgatgatgtgtattttgnngctttgaaggaacaagttcttttgaaggacactactgataaagagaatgatgaggtaaaagatgagaggagtaagtggagagaaaaacaaattattgtcggaaacaaagaattaaaagacaatgaaaaagaaaaagagggagaaaaacaaaaagaaaaagaagaatttgaaaaaaaataaagaagagaaaaaagtaagagtaaaaaagaaagagaaaagagaaaagaaacagcttcagatgagggaaagaaagtgccataccctttggtaccttccaagaaagataaggaacgccacctggcgaga

SEQ ID NO: 260834 - DNA, 339 bp, Glycine max
agctttgatgggccatttctttcttgttctcaacaccccttgccacatccaaggcaattgtcaatcttctattccactccagtggttctagtccttcctctggccaattaaaaagatggctactcaacgttccctgaggcatgtactcgtacacaagaagcttctcattcccatccaagcagtaaccaagaagggcaacaagatgccggtggcgaaccttagtcaaaacagcaatttcggacttgaattctgtcgcacccttcccagctattgccccacactccattcttttcaccgcaattcttgtaccatcatggagttcacctctataaaccgctc

SEQ ID NO: 260835 - DNA, 332 bp, Glycine max
agctttagtgcccttattttttttcaatatttgacattcccataatgtattccctgacatttcttttgccttgatagttcatggaaatcaagttctaaaagagagtacttgtttccgccttatcgctttttgcaaagcactttttcaatttcagtaagaaattctttggcactagttatatcatctaaaacaatgctcctaaagacctcaggaatgcgacgcttaatgatcataagactcatgcgatttgagtgatcccacttctcatgaagtttcctctgttaagagattgtggaattccgaggagaagggggtttctcaatccttaatgc

SEQ ID NO: 260836 - DNA, 324 bp, Glycine max
  unsure (1)..(324): unsure at all n locations
ncaagctattttatctattcaattcctttaaagcaaactctgctttttcctcggaaattattgatctaaatgagatagaagatggcacccatatatggttatttttagaaccatttattttaatttgtatttttaattcaatcaaaaatatttttcagccgaataaatgactgcacatgagattaggatctacatgtaaattgttatagtaatttatttagtatctcattattgattttttactttacaaatcacttagtagaattgtcttaattaaattaattttttttactatctagattttttttaatgaaccatgaacta

SEQ ID NO: 260837 - DNA, 331 bp, Glycine max
  unsure (1)..(331): unsure at all n locations
agcttgctctaaatttacatttatgtttgnatttatgggaggaggttatatgccatttttgctttaagagtaacgtcccactggtaaaactaactttccaaatgtttgccttcgcaggaatggccccgaggaagcttgcctcaaagaggtccaggaaggacaaggcggccgaaggaactagttccgccccggagtacgacagtcaccgctttaggagcgttgtacaccagcagcgcttcgaagccatcaagggatggtcgtttctccgggagcgacgcgtccagctcagggacgacgagtatactgatttccaggaggaaatagggcgccg

SEQ ID NO: 260838 - DNA, 342 bp, Glycine max
agctttgagggtgcgtagccctttatcttttcatagtagagtaccgataatgtgtctaccatcacgattatcgtctccctttttgcacatgttctgtagttgcatcctatccggaaccatatcagaatagtactgatactgcctaacgaaggcaaccattaggtccttccaagtatggactcgggaaggttccaagttagtgtaccaggtaacagctaccccagtaagactttcttggaagaaatgtattagcagttcctcatctttgcgtatgcccttatcttccgacaatacatctttggatggttcttggggcaagtagtccccttgtacttgtcaaag

SEQ ID NO: 260839 - DNA, 241 bp, Glycine max
  unsure (1)..(241): unsure at all n locations
agctttacttataatgaaaggtttactctctntgctggggagacactactgaatctcttgaagcaatactctcactactcagataatgctatttttatgcgcacacccgcttctatctatgcctaactaacatgctcgcggcttgaccacccagctcaatgtgtagaaacgtcctcataccattgcaaaatactctacacccctcccacttgatacatcaagctaaccatccctttctcta

SEQ ID NO: 260840 - DNA, 342 bp, Glycine max
agcttgctagcaatttgaaatgttaattaatttactcatgaaaggtgggcccattgcttcatattcctacaatttagtctaattttatgcttgtgtgtcaagtccaaccatcgttttgcaagaactgtatctccaaccttgccacatagcaagcttcatctaatgttcactagttatttttgtccttattaatacacttattgatgccttgtttgatatacttgaaatcaatgtatggccctatcattatattatcttaccaatcttatttagagtcactcgtctagtttctcacttttcctcccctactgcaaaggaaagaatttagatagcattacaaag

SEQ ID NO: 260841 - DNA, 333 bp, Glycine max
agctttaaacttcataaagatgtcttcaacatcatatttaaacttcatacaataaatccaacacattcttgaataatcatcaatgaatgcaatataatatttactgtcattcaatgatggtgttttcatgggtcctcccatctgtatgtactaactgcagcttttgtgtagctctccaagtcttgttttgttgaaaagaaagtctaatttgctttccatattggcaaacaacacattttggaggtaaatcttctaattctggcatgtctttcactatgttgctctttttcatgaaaagtagtgcaacatgatgaaagtgccccaatctcttat

SEQ ID NO: 260842 - DNA, 343 bp, Glycine max
agcttttagaaacacttatttttattgactgcaaagctctacgattaataactcggaatcatcagaaatcatcatatcgacttctttcataagaataattattgattcatgagtttgaaaacaagtaaaataagaattgacttccccaaatacttactcatactcaggaacagtaatacgagaaagattatctttcctacttcttctaacctttttgattccttcaaactttttatcttgtttttgctttttccttttttcatgagattttccaaaaaccctttaatcattagtaatgactcaccataaaactcttcatttcccctaacccacagtaacatct

SEQ ID NO: 260843 - DNA, 342 bp, Glycine max
agcttgtgaaatcaatggaattcaagattctgtttgacacaagtcattcaattctattcttagaaatgtgacctaaaagcttatgccataatgctcctgagtttgtattatcaattctacgcttagtaccacgtaattccgcattaaaggattcaccataagaagctacactatcaagtaaatatagattatcataagccaagacagttccaacaatatctgaattaaaagacaacctaaacacattatttccaaatgaacataaataatccaatttgtccaagtaagaaattgaaaccaaatgccgtctaaatgaagatacaacaaaagggtctttcaaat

SEQ ID NO: 260844 - DNA, 334 bp, Glycine max
agcttctctgcaatatttttttggaacaactgagaaatgagatttgacatagcagaagccatgaaagcacataacaggaccttgaagaaacacagaattacaaaaaaatggctctagataccattttagaatgttaagaatgtgagttggctttatttttagtcgatgtgagacttgagtttttcccaacacatcccctcacgcccagcacttcttgggcttggtgcatgaacaacaatagtgaatggccctttggattaatcttgaatatgctctgataccatttttgataaattgagaggaaagtagagacttaccagagaaaagggaaaag

SEQ ID NO: 260845 - DNA, 338 bp, Glycine max
agctttacagcagattttagttttgacctcctaacctagaattaaaataacttaatgccattaacctagggaattaaaaaaaaaaaaaaaaacttaatggctgagtgtaactgaaattgtggcaaccaaaagtcacccccaacagccaacaagtcagccaccatttggtctcccaaaaggctgatgcctaggttgccaattgggcccttattacaacttgaactaaacctaactaaagcacttttagttgattcacccaaaacatatttttggtcagccaactttacaaggattgggccattattttgacaaactaaacactctaaaattgagacaaa

SEQ ID NO: 260846 - DNA, 338 bp, Glycine max
agcttctccaaagggcattgttatctctagcttcttgaaaatatccagaaatcttgctagatgtctctctttatcttttctagaaggtaccaaaggatatggtacttctttcccttcagctggagattcttctctccttttctctctcgcacactcactattgctttttctcttctccttttttctctctttttctttttctttttatttttctatatttttctcctcatttatttcttgttcactcacttttattgttgtctccttcttcttctcatcttctacctccaactattctttagattcactcaaagactctaccacagggtcaagtgtta

SEQ ID NO: 260847 - DNA, 317 bp, Glycine max
agcttgaagctcgagaaaaagtttaaagatgttttgacttttaaatgcctaactcctttgagtggcatttatattggttgttatcttgtatgttgtatttgtattgcataattcatcatcatggttagtgtgaagaaaagtttctaagttagaaaagaaattcaagaggaaaaaactcgttgttttaattgattacatgtctatcgtaatcaattacaacaagttgtttgaaacttgaagagttgagtcttgtataagtttaattgattactgatatctcgtaattgaatacaccatttgttgagacagtgactgat

SEQ ID NO: 260848 - DNA, 330 bp, Glycine max
agcttccatgatatgaattatttagaatgtgttttctttatatatatatatacacacacacatacacacaccaacacacatcttgatattatcatgaaggactttattattgaattaatgaatatataatttaacctttaggatcagaaccaatttatacttatgtgtactatgttataatcattgtaaatattatatgacttagttattatattacgtatataattgttgttatatatgtggtttcatattattagtttattctattattgttgtggtgtaattttgaaaattattgttgaatgcacaaaattagggagtttgctaata

SEQ ID NO: 260849 - DNA, 345 bp, Glycine max
agcttttgattttgaatgcaagtaagcatgaagatgagagcatgttggtgaggtttcccttttagacaagcacttggtttgggttgcaccatgatgatttctttgcacttagatggtgtgaaaatgtttttcaccatgtacatgtacgtatagaataggtagcaagaggcgaatacctttcaaataaagtgtacgtatgttgaataggtagccaagtgcttcataaatgtgcatatatgttaaatatggcacgaaaatgcttctcaaaataggaacatatgacatgaaattgcctttaaaaaatgtgaataggtagcacaaaaatttcctttccaatgaatatgt

SEQ ID NO: 260850 - DNA, 347 bp, Glycine max
agctttttggagtagaaacatgggacctactcattttatttcaaaaagaaagtcgtatctagtcaaggtctgaaagaccatacaagtttcctaacgatttctaattatgtgggccattaagtctatcatatgctgacaatagccgagaagcccatgaatctcttccggggtggagtaggtgtctgccatcgccttggccttggctaacaagcggggaagttcttgactcccgttcaaggtaagagcaaaccggtccatccacatggatgcctcttggtgtaaagagtcgaacacccttcctctagcctctttttctgcgtatacttgagcatactcgtccgcgatcc

SEQ ID NO: 260851 - DNA, 355 bp, Glycine max
acctgcatgcctgcaagcttattatgaaccaactagtttaattaacgttttaattctaaaaacaatcaaatagctggtgtgatgctattctcacttttttgggtatcctcatttgccatgatgaaatcaagctgcagcattgcagttgtaccaaggaaacaaaaaatgttggaacttgatgtctcagttagcaataaagacatatatacaagaagaaacggaataatggccacacaaactgaataaaccaagcaggattttcttaatatatttttcactttccaccgcacatgcttcaaattatgctctcaataagaacttcatctagttaatgactaatgacacataccgaagt

SEQ ID NO: 260852 - DNA, 343 bp, Glycine max
agctttaacagaaacaaggatatagagttctcacaaaaatttagaaacaaaaatactaatagtgaccaaaggtggaaataataataataaaaaaacaaatccaacaatgagcagatgtaaaataaatggaaaaaatcagatatgcacatttagacaactaaatattaactcacattttgtcaaagtcacatctaattcttatctcgaaattttaataaatataataagaaaaaatgtgtcaagtcaaaggaccacttaacctaaaaagttcatgttggtaagcaaggtacgactacaagtaggttgcagagaatattaaaaactaactacaggtgcagtagta

SEQ ID NO: 260853 - DNA, 343 bp, Glycine max
agcttcccgtatccgtacttggaaggatctgattaccgccttcctaaggcagtatcagtacaattctgatatggctcctgaccgtactcaactgcagaatatgttcaagaaagagggtgaaacctttaaagaatatgcgcagcgatggagggatttggcggcacaagtagctcctcccatggttgagagagagatgatcaccatgatggtagacactctgccagtgttctactatgagaagctagtgggttacatgccgtccagctttgcggatctggtgtttgccggggaaagaatcgaggttggattgaagagaggaaagtttgattacgtttcctccaca

SEQ ID NO: 260854 - DNA, 342 bp, Glycine max
agcttgaggaaaattattaattttagaactttatattcccaatttttctttaaatttataattataaattctcactctcttcttttaatcatctctcacatgtgccttaactcatttggtgaaaacaagagggctagtgcattttctctgcattttttaaaatcaattccaaggtatgaggggttttcttctctttctcatgctttttatgtgttgatggtgttggtccccatgttagaagtcataaatatagatttaagcttttataaagttgattgatcaggtgattaagtgtcatgaatgaagcacacaagctatttgatattttttagcactaacata

SEQ ID NO: 260855 - DNA, 342 bp, Glycine max
agcttgcttagcggattttcacttactctcgctcagcgagacatgctcgctgagtgagccttcatgtgttgagaagtccaagagcatttaaaacactgaggttggcggaactcaagagacacaaccggtcaagagccataaggagagtctagctttgtgaaaaaatagagagaattagggctgagaggctggagaagacattctccaacatcttcttccattttctttcaccaaaaatagtttctttctcatattttgaagctttgcttgtaatggaaggctcctctttgttggggagtaactacagaaactcttgatgtaagagacttaggctcattcatg

SEQ ID NO: 260856 - DNA, 340 bp, Glycine max
agcttataagaacaaatttgttttaatcatttccaaatatgcatgtgaattaggacgcatcaacaagaatcaagccaaggctattgtgcaagcaatcaatggggcaaaacacaccaaatgattataatgatggatggctcaaattctcacaaaggtaaaatcatcactttcaaattgagcttttaaaactatcatgacatgtagagaagaatcaaggatttcaagtcacaaaatgtcaagaactgttattttcaaaacaattacccatttcttgaacatatcctataattcaaagaaaaacatgcaaagtcgtacgtgcacacaaaattgacccaaaata

SEQ ID NO: 260857 - DNA, 326 bp, Glycine max
  unsure (1)..(326): unsure at all n locations
agctttaggaggacagcancttttcagtttattttacacacatatataaactctattggatgtgcttatgtatgtgtcatgtttttattgaatgagtgcataaatgctaacatgttggcaatgatatttcttttacgcacaagtgtttttgttaattaatttggagcattttttgttcaagatctgtgcttcagtgcttattcttctcaacctctaactatttgctgattgattcaaactacatataattaagttttcatcagcttacacccaaaattaaaaagatctttttttgccttccaatatattattccatctttgtttta

SEQ ID NO: 260858 - DNA, 332 bp, Glycine max
  unsure (1)..(332): unsure at all n locations
agctttaggaaaaatgttgtgttatatttgccaagtggtccagaaacattggagacaaaggggcgtaatatgaggctaatgagtggtgggggtagtggtggttatggcttatctatataaacttgtatatttggttacatacttttgcttattctattttctgaccatcaacatcttattggttacaaacaagcggttaggttattatattttgcggttagatttatgtagctatcaatgcaaaatatgcaatagaagcagctctgtccagttgatatcagcagtgctagatgttaagagaacatttcgcacaaattntcccttttctttaa

SEQ ID NO: 260859 - DNA, 332 bp, Glycine max
agcttggagaggatgcttcattggaggaaaagaaagagggagagaaagagggagggggaccacgaaattgaaggaagaaaaagggagagaagttgaactttgagttgtgtctcacaagactctcattcatcaaagttacaacaagtgttacacatgcttttatttatagactaggtagcttccttgagaagctttcttgagaaaacttccttgagaagcttctttgagaaaacttccttgagaagcttctttgagaaaacttccttgagatgctagagcttagctacacacacccctctcataactaagctcacctccttgagaagcttcct

SEQ ID NO: 260860 - DNA, 344 bp, Glycine max
  unsure (1)..(344): unsure at all n locations
agcttgccttcatagtttaccctatataaacctctctgatcatcattgaccctgacccatatattttcttgactattcacctcatacttcttttcatttgagtttaaatcatctccaatagattgaatcagttcacatatgttgataagtgctatgcatacgttatttgtataatgaaatcacatagnaattatctcattttcttatcttttattgcttatttttgtgttaaaataataggactaagcttcttcttctgagttttgataaagttaatgattttagattaatttttgttgtagtttgtgtagagttgtaacagagacatggaagaggattaacaa

SEQ ID NO: 260861 - DNA, 342 bp, Glycine max
  unsure (1)..(342): unsure at all n locations
ttgcaactttggttaagtccaaataaacttatttttatnagaaggagccccatggtgcccaacatggatcattgatgctataaaacttcctaccccattgtccgaagctcttctctatgcgaaggtatgggggaaggatgttgtacgcagccttacccttgcatacgccaagaggctgtttccggattcgaacccatgaccaacaagtcaccaaggcacaactttactgctgcaccaaggctcgcccttcgatcattgatgctataaaataccttttcagcataatctaatcctttcacacttagtatacatatttattagagcattactgttaaatcttcc

SEQ ID NO: 260862 - DNA, 360 bp, Glycine max
  unsure (1)..(360): unsure at all n locations
gccgaaatgnaagcatgcaagcttataaatatacctgcctttattttgcattattcaangaaaaagggttgaatttccttactcaattctacttctttctttatttctgtaggagctggccctcgtaagctagcttctatctttgagaacctaacaaatggtcgacatgtgtaggtggaggcagcggaagcatcaagagagtttgatgacaaaggtgaaatcaaaagggtttgggtttgcgtgacggatacaaaacagaaaacacattgtttgggtattggcgattaggataaacgacaatagaatccactaacatgctagcggttttatggagagagaaagtacgaacatgaggtgtca

SEQ ID NO: 260863 - DNA, 338 bp, Glycine max
  unsure (1)..(338): unsure at all n locations
aagcttggtttggtttaaacttattttttcatgattnaggacttgtaggatttgatttgggcaagattggatgacgggaagtgtggttttcgaaatctgcactttgtgcaaatttttgctgtgaaattgtgcagcagaattttgcacaagtgcagaaaaatgcttgtgtgtgattggctgtggaaagagtagtgcagaatgagttctggatgtttactagtagatcccaacggtcaaaatgtaggcttatgtactagagacttccagtaaaattttcgagtcgatccaacggttaatgaaccacaacgaaggaattgttactggggtctttaagtgag

SEQ ID NO: 260864 - DNA, 341 bp, Glycine max
agcttagccctaaaggggatggaccttttagtgtcgaatgggtactggagtggaagtttgaaaataaacatcactgtcgttgtgaacaatggatccatttggaaaaataaaatctaatgtcgagttcacaattgtttgactgcttgtttctcccaagaatgccatactttgttctaagatttgggttaggatagaatgtgtgattttttacagtgttcagctgtgtcatatatatagatgagtttcagtatcattgcttcaattttttaaaataaatacatacgtgtgcacatggtttctgtctgtgtggtcaactacaccaatgacgtgacatgctttat

SEQ ID NO: 260865 - DNA, 341 bp, Glycine max
  unsure (1)..(341): unsure at all n locations
agcttttatcctcttgtatttgtacttaatgcgngtgtgcgctcgtgtgtctgtgtgggtgtgtgtagttttgtagatggagaattaaaatgttctcccatataatcatatactgagtatctttcccacttcaaatttgcaatcaaatagggttatgcaaaatacgttgattggagtgcaaatatgatggaagaagaggcaaagcaaaagctgaagactgctgaactgcaggctaagaaagacaggttaaggatgtggacaaactatgtaccaccgccttcaaattcaaaggcaatttataaccagaatttttctggcaagggaaataatgctcaattatt

SEQ ID NO: 260866 - DNA, 371 bp, Glycine max
  unsure (1)..(371): unsure at all n locations
ccccgcgancttagagtcacctgcagcatcaagctttgtgtaatcgatacatttttttgtaatggattaccacngactgtttctaaaaaatcaaaagatgtaactcttcaaaaaggttttgactttttcaaatgggttttaagtttttctaaaaatatataactcttctggatggccttcttgaccagacatgaagagtctataaaagcaaggctttgttttgcattctgaataaatctttctaacaacaatcttgaacacttatttcatacagtcctttacaagccttgaatctctttgaacttcttcttcttcttttgtaccaaaagctttttgaagttttttggttttctaaaccttgaaaacttttc

SEQ ID NO: 260867 - DNA, 340 bp, Glycine max
catgcaagcttaacacgttttttttttatttttgggctaggccttttaatctaaaaagactttttaaaagcttgagcttaacctttatagtaaataagccgagccgagccttacataggccgagccaaaggccctcgacaagttactcggctcatttctacccctagtgtcacagtcctactattgtacgtatcccactttttctcttttacagatgatagataccaccacgcatattgtctctggttctatactcctttcaggaaagattcctccatgaacagtggtatttgctaaagagtgtagtgtaagtacgtataaaaaaaacaattcgacacgc

SEQ ID NO: 260868 - DNA, 336 bp, Glycine max
agcttgcaacccatctttctctggctttctctgctcgcccaggcaagcaaggtggcttcctccagaagcaaccgccttctggaggaatcttctggagggcccaagtgggcctggttgctatttgcacccccatttttactaaatacaccccctgccttttttttgtgcttcttttttcgtaaagttacggaaacttacgaatttcgtaacgatacttgttttctttctgtaatgttacgaaaccttgcggattacataatcatcccttttttgacttacggaacgttacggaacctcacgaattgtgcaacgatgcttccttttttatttccggta

SEQ ID NO: 260869 - DNA, 339 bp, Glycine max
agcttctgctttcagaaatgctaatatttgtgacaataaacttgtagaggggaaaagttgttatggaatagcttttgggagccaaaaacatcttccttctcgggtgatgaaaaatgttgttcaagtggagcaagatccagaaggaaaggaaaagtattggttttttgaaacacgtattccattatatttgataaaagagtatgaagaaggtaatggaaatatgccatgtaatgaggagcacttgaatactgcatttgagttgctgcacaaaaggcggttgaaggctatcttgcaagacatatttttttacctaacatgcaaaagagataacttggatgt

SEQ ID NO: 260870 - DNA, 336 bp, Glycine max
agcttctatccaaatggacttaccttgaattaattcctttgatagcccttttgagccttgtttccctttccttgttttgaagctcactacaagccttaagtgaaaaaccatgatatcaccatatccttaaggaattttggagctttggaattgttttgggaataagtatggggggtttttgtttcattggacaacttgttttgttggctatgcttcatgatgtattttgggccatacttgatgtacattgtatattggttaaatgttggacatgttgaatgaaatgttgtttctcaaaggctatagagtaaaaaaatatatattcgaaaaaataaa

SEQ ID NO: 260871 - DNA, 331 bp, Glycine max
agcttcttgtgatgttttttattattctcactagaggcttcagtaaagtctacaatctcattagagacatcaacattgaagtagtcaatgaattttgaggcaaccacagcgtaaggaaattcataatccaccagacgatgactcttcagcataatgcctttaatcagtagtacccagttcatcttgatacccgatttcataccataaacaatttgtagatcatcattttttgcctaagcatgattgcttgacctcagagtgagaatttaggtaatgaggtaaaccaacattttgtcttatgcagtcagtccaccaactcctaagcgattca

SEQ ID NO: 260872 - DNA, 346 bp, Glycine max
agcttggtttgaggtacttacttgttgaagactgaagaaaacgaagaacgaacgatgaatcttgaagaacggtcgagaatcttcgcgtaattactcacgaaaacattacggaagcgcctcggcttggattttcttcacggaactaattttcctcagctatttcgagagagagagaagtgcctaaggggctgaacccttttctacttcacttctccccctatttatagaaaattgggggagaagcttgccacccagctcgcccaggcgagcagggttgcttcctccagaagcaacaaccttctggagggcccaagtgggcctggttgctatttgcacccccattttt

SEQ ID NO: 260873 - DNA, 341 bp, Glycine max
agcttgtcatgccccttgatatatttgagggactcatggtcactatgaatgacaaattccttgggataaaggtagtgttgccatattttcaaagcccatactaaggcatacaactccttatcataagttgaatagttaagggtaggaccacttaaattttcactaaaataagcaattggatgaccttcttgcatcaacacagccccaatcccaacatttgaagcatcacactcaatttcacaagatttttgaaagtttggcaacgcaagtatgggggcattagttagcttttgcttaagaacattgaaagcttcttcttgtttctctccccatttgaaacc

SEQ ID NO: 260874 - DNA, 346 bp, Glycine max
gcatgcaagctccacagttaacgtcacatcatattatgccaaaaatcgcaccacaccatggagagcgtgatatggtatggaaagcgacatcctcggccaaagtgagtttaattgggatggccctaagcacatgatcacagatgagaatgaaaatgctcggaatgaaaattgcaccgtaaaaattcctaacatatgctatacgacacccaaagcaaattgaatctgactttttcttttttccagttacataaatcggctaaactgcttcgattcgaagtgcctcaagactgggatgaaatagggaattcgtgtgcaaagaaagagccactgggcaaggagctgaaac

SEQ ID NO: 260875 - DNA, 337 bp, Glycine max
agcttaggtggagctttatgtttataatcataacagtcagcttcaattttcacttcagctttggtacttaaaatgttagtttttgcataggtaatagtaattgaagcagcaattgttacaaaatagtaagaaactttccaatttcaatcgtgtctaatgaaattcacaatagaatatattatggtctactttgcattaaactcaagaaattgtaatatgccaatctttatccgtattgccgtccatatctagttgggttaactgattactatttatttctgttgcggtactcatttgtagtactatcacttggcattaaaatggccaaatatcctat

SEQ ID NO: 260876 - DNA, 340 bp, Glycine max
agcttcttcttcagcttcttctatcttattgatattttatgttgttggtggctctcttactataattcattcatgatcaacatatgtcatgccaagcttcttgagatgccttacggttatctcattagaggctttggtgaagtctactattagaaacatcaatattgaagtaatcaatgaatctagaggcaaagatagcatacaaaaattcataccccactagttgatggcttttcaacatgatatcttcaatcgaaagtacctaattcagttgaatacctgatttcagcccatatacgatttgtaagtcgtcatcaataacttgagcatgattgttgga

SEQ ID NO: 260877 - DNA, 339 bp, Glycine max
agcttcaacttacagatagtattttaggcttagtgcaacaggtgcactaagcacacttccaagaattcaaaacacaatgaaggattggcgcttagcgcatcctgccccactaagcccaagtatgaaagttcaattccagaatggatctggggcttagctcaggacaacgcgcttagcactgctataataaacttttccagagaagaagtggtgcttagcggatcatgtctgctaagcccactgcttgaagtttacttccaatgaagatgttgggcttaacgtagtgatgtgcacttagctgaactattcagccaactagtcaggggtctaagtgcttag

SEQ ID NO: 260878 - DNA, 332 bp, Glycine max
agcttatcacatgcttctttgtccgttttgcgttggatatcttctcaaatgtatcttcatccaccgattgataaatgagaaagagagctttcttgtctctctttcttgactccttcaacgtctcctttacaccttggcttaacgaggcttcatcttgctcctcgaagccattctctacgatatcccacacatcttgagctcctagtagtgccttcatcttgatactccaattatcatagttgttctttgtgagcatcggcatttggaaaggaaaacctccattcgccatcttttgaggatcttgaagctctgataccactttgttggaaata

SEQ ID NO: 260879 - DNA, 330 bp, Glycine max
agcttcgagtaaactgtcgaaccggtttctggtttaggtctcttcgccttcaccacgcgaacgtataaaaacggcatgcgatcaacgaggtcgtaggcactgcagctccgatcgcctctcagagatcgcagttcgtgatcgctcacgttcagatccgcacgcttctgcacttcgccgtgcttttccttcggcggctttggcttctccgtctgcgcaataagtggattctccacctccggcggtggcggtgccgccgcctccgccggagccttctcctttgggttttcttcttttgaatcttccttaaggttattctcaacttctttcctt

SEQ ID NO: 260880 - DNA, 337 bp, Glycine max
agcttcaaccaccatccttctatattttgctcactccaaaaggctacaaatctttgaagttgctctactttttgtcagaagattttcacttatttcaagttcaatgatctccaattcttatcatcaataatattcacataagagtagtaattaattaatcttgtcattacgggtaagatagtttaatttatttgagaagacttttgatagatttctgcatacaaatttcaaaattcaaatccactcagcgatgaaatatatactctactcatatgtaaaacccggcagtagagcaacaccttagtttgttttgtacaaacgcaatgaaactcaaagg

SEQ ID NO: 260881 - DNA, 333 bp, Glycine max
agcttgtctctaatttaattattgaagcaggtgcaaatcgtgtacttgcttgtgacctccattctgggcagtccatgggctattttgatattccagttgatcatgtgtatggacaggtaacagatgattatgccatattgtcattacaatataatagcatggaagaaaaaaaacatttaatctattaaactcaaacaaacaaacatgccttggatatgttgtatatttgtaattgatagttactccaataatttgttaattcattgtattgatgcatctctagtttgaattgaaatgaagtgacaaccttctagtgacatgccaattttactg

SEQ ID NO: 260882 - DNA, 338 bp, Glycine max
  unsure (1)..(338): unsure at all n locations
agcttggaagattccgcttcgattgattggttcttctcagngtggggtttcaacaaagaacaacggtagtccgtggtggccaccggtggttgtgggtggtggaaaagaagcttgggatgttagggaagggttttggaagacagaaggagaaaggaatggttgttttccaaggctacacgaaaaataacgtttacgacactcaagtgcttctgctctccagaaaagaagtgtttctcacgcaccaaaagacatatcgcagatcgcaacggtaagatcatgaaaatctgtcctttgaacctccagaccaaatttcgagaagatccaatggttatcgaatg

SEQ ID NO: 260883 - DNA, 345 bp, Glycine max
agcttaacagtaacagaacatgtaacttttacaacacataatactgtagtgtatacactgacatgctatgacgtacataggataaaaacatccagtatcataaataagaataaatcattcataacaatggtcaataaaaacactaccaggccaaattctaaaacatgtcagcatcacgagctactgagatagtaagttccaatttcctagttactaataactaaaccaagacaacaaggcaagttcagctcttcagaatagcaatactaagaagagacaaacagaactttaaagtttcaacaacgtgcagatagataacaggtaagcatcgatccacacaaacgt

SEQ ID NO: 260884 - DNA, 317 bp, Glycine max
agctttcgttttcaataatgattcttcttgatatattacgggactcaatcggacatccgagttaaaagctattgccccttgaatatgcttagagcctctgttctcaattaccagtgtctcgatatattacgggacttaacccgcattcgagtgaaaagctattgccgtcgaacttgctcaaagcttctgttttaaattccgagcgtctcgatatataacaggacttcatcggacatccctgtcaaaagatattgcccattgactctgctcacagcttctggttccaattaccaccgtctcaatatactaccggactc

SEQ ID NO: 260885 - DNA, 361 bp, Glycine max
gatccttaagtcacctgcggcatgcagcttgaagaggaaggtattggtttattcttcctgcttttattcgttgaccacagagtggtacctggacatatgtcgcgggggtcaggagaccttggggacgtcaggtggggtgctactgcccaaaaccaagcttgaccaatcccgacccaacccgggcatagtcagtcagtgataacctgtgatgtacctaaacaggcgagctcctggcagtcaatagataaaaggaacaaagaccacaaagcaaggaggcttgtggtggctggccagctgtgaattttgtgtgatatatgggttgtggcctctggtaatcgattaccaagggtgggtaatcgat

SEQ ID NO: 260886 - DNA, 322 bp, Glycine max
agcttgcttctacattctctttttctccctccactcatcttctcttatcttcgagctcttatatctatttatctttctcaaacactcatctctctgacttttccaacatttcctttcaatagacttacaaaattatcataacatgtatgaaaaccaaattaatttggaggtggatcattgcattcttgacattagcaatctactcaaatatagcttttgtcctgtatctgtctaatgagtttataaaaaatcttacagcgacttcttacttctctcctactcatcatgaaatttaaaatggaaaagaagatcttagtttcac

SEQ ID NO: 260887 - DNA, 361 bp, Glycine max
ccggatcttaagtcacctgcagctgcagctttaccaatgtttttttttgtattaattcctttgatagcccttttgagccttgtttccctttccttgttttgaagctcactacaagccttaaatgaaaaaccatgatatcaccatatccttaaggaatttttgagctttggaattgttttgggaataagtgtggggggtttttttttgtttcattggataacttgttttgctggctatgcttcatgatgtattttgggccatacttgatgtacattgtatattggttaaatgttggacatgctgaatgaaatgttgtttctcaaaggctataaagtaaaaaaaaaaaattcgaaaaaaaaaa

SEQ ID NO: 260888 - DNA, 330 bp, Glycine max
  unsure (1)..(330): unsure at all n locations
agcttgagcattggttttatttgattgtgancacttctcaagttgcttaaagctgctggaattgttgttaccctcgcactttcttcagccaaagcgtcacaaaaagctctatgcgttatgaagctgtccttcctgatttgttagcacatgtagatacacacacatctaagaaccctcatttattattccaaacaaatattctctctcagttactactactactcatttcatatgtgacattagtttctttaaattccttcattaattatcgggcatgcactagatttaatgaattaaccgaatataaattgcaactgtataatgtattac

SEQ ID NO: 260889 - DNA, 339 bp, Glycine max
  unsure (1)..(339): unsure at all n locations
agctttnnatnaaaatttaatttattataagnatacngatgttattaaatgttatagtttacagtgaaaacaattatttttggtttttaactattagtgcaatgattattgtaatttcttttacacttttatcaatgtaatgtttaataaaacaataaatggaatttttattaagaaactgtcaagattttattaataatatataatttctaataatatatattttttactttcaattactaaccattattcttaatatttgaatatttatagaaaagtgacacgagagtaaaaaatttctatgtttagtaaaagaaaataaaattatttattaaatat

SEQ ID NO: 260890 - DNA, 328 bp, Glycine max
agcttctttgagaaattttctttgtgattctagagtctaacgccccacacccatctagaaactaagctcaccttcttgagaagcttccttgagaagctagagcttaactacacacacccctctgatatctaagctcacctccttgagaagagaagctagagcttaccttctcacccgtataggggctaagctcacccccctgacaaaaaactggagaatacaaaaaaaaatgctactacaaaaactactcaaaatgccctgaaatacaaggctaaaaccctatactactaaaatggccaaaatacacggcccaaaaaaagaaaacaac

SEQ ID NO: 260891 - DNA, 316 bp, Glycine max
agcttcaacctagatgagactgttcattccaagtgttggagaagatcaacgacaatgcctgcaagattgacttgcctagtgagtataatgtaagtgccactttcaatgtgtctgatctatccctttttgatgcagatggaggggccttggatttgaggacaaatccttttcaagaagaagggagtgatgaggacataaccaagggcaaggaccatgaagcacttgaagggctcatgaccagaggcagacttaaacaagcccaacacgtcataaagacaaggctggtcatttgtatagctgccattgatgatgattg

SEQ ID NO: 260892 - DNA, 336 bp, Glycine max
agcttgtaggcactttgaactctttattctccattattttccatcctccaaatgactattttgtttttgtaccttgcataataggcacttgaagaatggtattcacatcccttagattgaatatttgattaatcacatccatgtttcaacttccatgtgaagtatccataatatttgttactttgagatttttcatcccattgattataagagtttcaatagtgagattttacttcattctcaactagggttcgttccaaataccaatattagtaccatttcccaactttcatttatatccttcctttatgaccattttagaagaaaacatacttt

SEQ ID NO: 260893 - DNA, 333 bp, Glycine max
agcttgttagcagatagtctgtcatacaatgagatctcacacaccctgcaaacctaatatgttaactgacaatatttgaaacaagaaataatcttgaaacaagcacctaataaaacaaaagaaaacaaatcaatggttttgccaattacatagcaaaaccaaactgaataatgtcaaactacaggagcacaagcccacccctctcctttattttatccaagaacactcaagtttctttttttcctttctttacattgggggttgcaaacacaaactaaataattcacaggtagttcttactgaactttacacaagctaaaaccaaacacaagt

SEQ ID NO: 260894 - DNA, 302 bp, Glycine max
cataatttgagcgttgattattacaactcatcgactcgagaaagtatgcgtgattgtaactcgattatcaccttgttactcggactataactcgagaaatatgcgtgaatgctcaactcatataattcacgctgatttacggatagcaacatcagaaagatgcgtaattgtaactcgataatcagcgccgctatacgactatcgactcataaaaatgcttgatgtaagctggggccaaaagatgttatgatgttatacaaccaggattttttctctttcttccattttccttcactacagtt

SEQ ID NO: 260895 - DNA, 435 bp, Glycine max
  unsure (1)..(435): unsure at all n locations
ttgagcanattcaaacgacaataacttttcactcggttgactgactgagtcccgtaatatatcgagatgctcgaaatggaataccgaagctctgagcaaattcgaacgacaataactttttactcggatgtctgactgagtcccgtaatatatcaagacgctcgaaattgattatcgaagctctgagcaaattcaaacgacaataactttttacttggatgtctgattgagtcccgtaatatatcgagatgctcgaaatggaataccgaagctctgagcaaattcaaacgacaataagtttttactcgtatgtttgattgagtcccgtaatatatcgaaacgctcgaaattgaatgtcgaaactctgagcaaattaaaacgacaacaactgtttactcggatgtatgattgagtcatggaatatatcgagatgct

SEQ ID NO: 260896 - DNA, 398 bp, Glycine max
  unsure (1)..(398): unsure at all n locations
cagctttgttctaattatttatttcttctatgcacgngatatgttttgttctgttaacgacactaagttggaggaatgattaacatttattcgctgaacaatttaagttgttgcttttttttattatgtaatatgaaagaatgaaacatgtctaagttggttaacaaaatgaaacatgttgaaggacaaccaacatagtatattaatatctccttttttgctaaatagaatcatatgttacttattgttgggacaacatatatttagatggtaatgtttttttttgtgggaaaataaatatgcatgtcttaattcctcatgccatcccacattttatgattttaattgaatagattgatttgttttagtaattttttaaattatgataatgaccctat

SEQ ID NO: 260897 - DNA, 318 bp, Glycine max
actaagcacgagagcacaccaaaacatctttaaaatcatctatttatgtatgctcctcaatggagctatgctttcgcaatgccaccactaggagggtgcagttattcactcactttttgcacttacaattcatattaaccatatccgctctttaagaatgcgaaacatcctactagaaacaacagtaactcattattcgatataaacctatgctccaaaatgcaaggcaaatatcaatagaaaacaacatacttactaatctattaggaaaaaatagaaagcgcccgtgccagaaaaaataaagtacttaaatataga

SEQ ID NO: 260898 - DNA, 419 bp, Glycine max
  unsure (1)..(419): unsure at all n locations
actaagcttaagctanagaaaagcttgaagaagtttgaccttacatgcctatctcccttgaggggcattagtattggttgttatcttgtatgttgcatcttactacatatgatatcgtattgcatcatgtatcatcatggttagtgtaaagaaaagtttcttcaagaggcaaaaaatctttgttttaatcgaccataggttcattgtaattgattactacatgttgtctaaagcttgaagagatgagtctcatatcggtttaatctattacattgttgtttgagacaatgattgagttattcaagagtctctactttaatcgattacgaagtggattaatcgattacttctcgctcgtctagtagctcaaaagtgaacataaacactttaattcagtacttagagcatctaatcgatta

SEQ ID NO: 260899 - DNA, 414 bp, Glycine max
gctttcctctaatgcttgataggatttccatgctttatagataagaagaaggaattgaacccttcatttcattgtctccgtggaaggaatatttctcttactacagtagtaaattcgcaaatcccaacggtgagattgtccagctttgactttggaagctgatgttcaaatttcacgacgagccaacggttaacgagcccaacattgtagttttattgaaataggtttgggtatatgcgagaaaaagagagctacatgcaagggacatttctcttatcacatacattattttgcaaatcccaacggatataatggttgaaaatgagtttagaacatggtgttcacacttcccaccaatccatatgttaatgagtctgggatcataaatttgctggaataagtttgagtttatgt

SEQ ID NO: 260900 - DNA, 421 bp, Glycine max
tataaaagtccttctgattcaatatatgcattcttatctgtatgccatgatatgaagtgcaaaggttggaccgcatgttaattgctaattattgattatcttaaacacttgagcttgagtgaaacagtgacattgcactggttaggcatccttccttgaaatctgtctgctgattagtttcattcagttgtgctgcttaataaaaatgctcttgtctctaaaaagctgcatgtcttatgaaaaaccattgattgagttcattgatagatgtctcatcatatggttaatgtgttggaagcaaacaccctttgtaaataatcactgcattattttagcacttgaggacaagtgagttgtttttatttgcttaatgaaatcaaaattgaaatttggggagtttgtagtcgtttatacactaact

SEQ ID NO: 260901 - DNA, 381 bp, Glycine max
ctaacttaaactattatcaaatgaaatgaactctatatttttgattctcaaggcggaatttagaaaatctttgatgaaatgcttgtgaatccacatgtcctaaaaacttctgagcctttgacattgctggggggtaatttcaatgacttccacttactttgtaacctctgagatactcatgggagcttgtggccttagatcttcttcatcagtgaagcctttggatggaagcttgcttatggggcttctatgggctggatttttagcttaatggggtctttaatgggatttccaccatggagagcacggaaacaaagaaaaaggtgaaggaggcccatccttaggataaccatggagatgagctcacaccaatgacctgat

SEQ ID NO: 260902 - DNA, 422 bp, Glycine max
  unsure (1)..(422): unsure at all n locations
tactaagcttgtaagaaaactaccactcatgggttntccgagcttattctattgaatatgtatgtagacgggctgagaccacaaaccatgctactgttagatgcttctgcagggggaaagataaaactgaagaccccagaagaagcaatagagctaattgagaacatgttagccagtgatcatgccattctacgagatagaacccaccaacccacgaagaaaagcttgatagagctatcgttacatgacacattattggtacacaacaagttgctttctaagcaactggagattttaacagaaacacttggtaagctgccaactaagttgtctatgggtcaacctacacactcttcttgttttaggttacagggtgtaccatcagtggtgaggcttatgaaacaagccaatgtacttccact

SEQ ID NO: 260903 - DNA, 278 bp, Glycine max
acccgagcgctgacttcggcgtactaatctgtctcaaagtatgtaaaagagtgtgacgatgtgtgtgtcccctacttctgcgcaacacaggctgtaaatttgctctgaattgacgacgtcgtgctggttaccaccctcttggttagggcaagaaattggattctgaccttatggccagtcatgcgcagatcctcgttgaagacccctgctgtgctgacgcactaattgctgcttaacgcatggccacgatgctgatgccttcccaaaatctccttctg

SEQ ID NO: 260904 - DNA, 196 bp, Glycine max
  unsure (1)..(196): unsure at all n locations
atatatcgagacgctcgaanatgaatggtgaatctctgaaccaatccaaacgacaatatacttttactcggatgtctgatngagtcccgtaatataacgagacgctcaaaatagaatgttgaagctcagagccaattcaaacgacaataacttcttactcggatgtctgattgagttccgtcatatatcgagacgc

SEQ ID NO: 260905 - DNA, 364 bp, Glycine max
gaccaaaaactaacttaagttgccagaattatccctatgagagtgttttttttgttcgacaaatgccatcttggatatagggttgaccaagctatgctcttacaaaaaggtcatcaagtcaagttgaaaatggaagtaccgttttaaaattggggcaaaagatgaatcgagtcacatcactgctttttactgccaacatattaggatattgtgtcttgtacttccatttaccttgacaaatatgtatggaccatgttgaaaatttaaattgatcaacccctatctgcgtaaaatccattcctggatatagggttgaaccagctcatgctcttcaaaaggttaacaagtcagttaaatttgaaaa

SEQ ID NO: 260906 - DNA, 435 bp, Glycine max
  unsure (1)..(435): unsure at all n locations
tatgaaactaagctntcagcngaatttaaaatgacccactaacctatatattattatttcttaatgccatcaacctagggaattaaaaaaacttaatggctgagtgtaactgaaattgtggcaaccaaaagtcacccccaacagccaacaagtcagccaccatttggtctcccaaaaggctgatgcctaagttgccaattgggcccttattacaacttgaactaaacctaactaaagccctcttagttgattaaccaaaaacatatttttggtcagccaactttacaaggattgggccattatttagacaaactaaacactctaaaattgagacaaagtggtgtcatttaatcctcctccatttgggccatgatacaactcacaaccttggacttttcttcttgaaacttgggcttgtattcaaatagtatggac

SEQ ID NO: 260907 - DNA, 407 bp, Glycine max
  unsure (1)..(407): unsure at all n locations
actcaagcttgcgctanagcaacagattgcctatcagactctattatatcatgtcagctatattccaccacatgcacgcccagtggacgagcaacatatctaacaacaggtcctttttctacaccctgcattattacgttgatcaggaaatacaacatgcaccattcatgcatttcaaaaccaccatttagttgacattttaaacgaacaacaattaacgatatcaaatggtagtcaaaattacacagtatttatatgaatcatggtagaaatactgatcccttttctaaaacaaagcaggaacaacatagaacacatctgcctagctattcattgaaactgaatctttaaacttggaagaaagcactgaccgacaaaaagatggtgtaagtattgaatcctataat

SEQ ID NO: 260908 - DNA, 438 bp, Glycine max
atactcaagctcgatgatacttcgattgtcgtttgatacctatttcttagtgttgcctaacatatcttccgcgcctctctctatgtacccttttgtcctcctgcagcgtatggagattatgaataaaaaaaatgtgatactgttaacaaagaaaaaaaaaatagttaccttctgttcagaacttctgatagctgttccgaattcttaaaatttcccgtgttttgaaaattgcctctttttctcttttttcttatacatgaaatttgtttcttaatggcgagactatgcaatgcgaaaacatgttttataaaatcgccaaattttaccatatcaggcaccaaccctctgttttgcaactgcaactgcaacgttaatgtgaagccatttccttttttcgattgcttatgcctattgaccaatattctgctcaacaccaac

SEQ ID NO: 260909 - DNA, 363 bp, Glycine max
  unsure (1)..(363): unsure at all n locations
gactaatggatttttaattaacaaggctaaataattataatacgctatnacaagaggagattctatattaaagcacacaatcttctttcgttacattacaaactttaaagataacctcttatatgcaccattatttatatgatcagtctaataatcacataccttaaagctttattaacatggaaataagaactgaataacaatctcaagctgtggctcagatcttaatcaagaaattggtagactgcctgaataaacctgataacatcgtaacaaggtgcggaaaacttaacttatacatatatatagtgagagtatatatgcttatctttcgctaggaagacacccaacactggttactag

SEQ ID NO: 260910 - DNA, 409 bp, Glycine max
tatgatattattaactagaaagtgttagactgggattattttaagaaggtaatattgactagtgtgagcggtggacggtgggcaataatggcgcgtgtgaataaaatgagacagcaatgcggcacgtggttcattgctcaaacaaaagtttccgtgttttgcaactatatatactttacattcatcccccatgtctgcttctttcgttctataattcttcattgctctcaattatcaatggctccccaaaccatttccattctcaacctcttaccagaacctgatgtcttcattcacacttcccatggaacacgcattccagcccacgcacccattctggcttctatgtccccggttctggagaacttgatagatcgcccacgtaagcatcggagctccgagagaataa

SEQ ID NO: 260911 - DNA, 315 bp, Glycine max
gaactattaatctcagctggcccatgaggatgagttgaaattattgtttatagaattcagaagctttactctctttttttccaaacttacaaaaatatcatcttatctttctacctcatgtcatgattcgagaatgtgttttgctacaaagactgacactttaatttgtgtcatgcatcttatatctgataccaatatattgatatatttcactgtgacatatatgtgaagtgacgaattcttaaaaaaattatgaaatcaaatatagtcacacgttacatacacgtagtaaaatttagaaatataaatgtttat

SEQ ID NO: 260912 - DNA, 226 bp, Glycine max
tattatttagaaatgggtttatgatcccaacatggttggcttatggtgcctaacacatgcaactaagaatgtagtgtgatagttcacgccttcccttctcttgtttttgtttgtagaggacaacgcaaggatgagcatacatgaaaacaaatggtatgcaattttgcagatcacaaagtttcttgaacgcatatgcatgatgatgccatgactcatgcaaaatgtg

SEQ ID NO: 260913 - DNA, 431 bp, Glycine max
  unsure (1)..(431): unsure at all n locations
actcaagctttttggagtagaaacatgggaccaactcattntatttttatttgaagtcttatctagtcaaggtctgagagaccatacaagtttcctaacgatttctaattatgtgggccattaagtctatcatatgctgacaatagccgagaagcccatgaatctcttcgggggcggagtaggtgtctgccatcgccttggccttggctaacaatcggggaagttcttgactcccgttcaaggtaagagcaaaccgatccatccacatggttgcctcttggtgtaaagagtcgatcacccttcctctagcctctttttccgcgtatacttgggcatattcgtccgcaatcctatgctcgtgggccgcggctagacctaactcttcttggtacttggcgatgatagctagcatgttggtctccgtctcgcat

SEQ ID NO: 260914 - DNA, 106 bp, Glycine max
  unsure (1)..(106): unsure at all n locations
caacacgagcgcagcaatcaaacaccttgccacaatacattatcacttaagcgcgaaggcaaggataaacattgggagcancagcctgataaacaaacaaacacaa

SEQ ID NO: 260915 - DNA, 351 bp, Glycine max
  unsure (1)..(351): unsure at all n locations
tttcctagcgacgaaaacactgcctccactctgatcttaagcattaaaagtattgtgaattggtgattccctttctatcacttcattctcattctaatttttgaacactagtgacaagacccgataaaccagtatgggcgtaatggaattcactccctgtacacactatagatgctcacagtgctagaatgttgtagattcctgcagcaatgatttcctcacaaaagtaaatatcttaaatgaacaacttnttaaatgggagcaattatcatataataatcagctgttagaggcatgtaacattatttaattatgtgtcatgatacctgcctgacattcccaatatgagct

SEQ ID NO: 260916 - DNA, 228 bp, Glycine max
ccgccaacaaattttttttcttacctaccccatccactaattaaatggaagctagtgcatgctgggatacatggctgactcgaccttattcagcaattctctatgtcaaaactcgtagccgactcacccgacactccttgcaactgagagtactctacgctaatatagagcctacgcggcttacttgctactataaaaactgtcgaaacgtatatctaacagtaactt

SEQ ID NO: 260917 - DNA, 348 bp, Glycine max
gaaccttcaacaaataatattctctgacggctcagtcggaggtactatgatgttgaacagcccacaggaagcggctgtaatcagtgactacattgcttctcatgagttctcatagtgcccatgagcaagctccgatacaaacaaactgtattatggagttggatactcaaaaagcgattctggcttaaaacaaactcttgactgaacatatagatgcctgttccaagcttataagccaacttccttggctatatcaaccaggtggatcacagcagacacatccagctcactgactttaacaaataatagaaagtgacttttgtggtggagaccattgtaatggtcact

SEQ ID NO: 260918 - DNA, 396 bp, Glycine max
ctcaagcttgaaatcgaacaccggaagctctctagaaactcaattgtttataacttattacacggagggtgcgattcacgcgcataatattttgagacgctcgaaattgaacaaccaatgttgttgtataaattcatattggtcatgaacttgttacactgaatgtccgatttcacgagcataatatatcaagattctcgaaattgaacaacgtgagctcttcataaattcgaatggtcataaacttgtcacacggatgtctgatatcacgtgcattatatatcgagacgcttgaaattaccaacgaatgctcttcataaattcgaatggtcataacttgtcaaatggaggaccgatttacgtgcataatatattaagacgctccgaattgaacaa

SEQ ID NO: 260919 - DNA, 349 bp, Glycine max
  unsure (1)..(349): unsure at all n locations
acatcattttctntgattcacaagccacggatgacccgtgcatgaaaacaagctatgagcgagagaaatcatgggataataaaacgcgaaagttaatgccatgcaccacctatgggaaatggagcacaaactgagagccagagctgcagatagccttttacgataaaccttattcaacagtctcttcacaaaatctttagcgacagctgataacgatggccaaggagcttcctcaaaacatggatctgccttcaggacacaccgaaatatgccagatactgccctggcccaaaagggtcggcttccacataaaagaaaataagccattacaccaacgctccacatatcg

SEQ ID NO: 260920 - DNA, 274 bp, Glycine max
  unsure (1)..(274): unsure at all n locations
tcaacgaaaaaanaacgagcaacaaaaaaaaatatttttaaaagcagcggagggcaataaaaaaaacaaagaccactggagagggggaagacaagaaaacaaaaaaggcagaagacaacgcagacaagaaccacagagaagtgaatgtaggaaaagagacagaacaatggacgaaggaacgaaaacacatgagaagaaagagagaaaaaaacactctccgagagaggcaggagagaagaagaaaaggctggaccaaaaggacgaaggaaaaaag

SEQ ID NO: 260921 - DNA, 437 bp, Glycine max
  unsure (1)..(437): unsure at all n locations
gaccttaaaactaagcttgaccttagttgntaactaatccttctgcagtcttataattaccattaccaaccattactctaaattgagtagttggttcaactagtaattttagaaacttagccactctatgctgtaagaaattgtctgaacttcctccatcaattatcacagtcacaggaagtttatcaatataggccattaatctgatagaactaactcctacaccgcccttcaaagcatttatagacaagtgatgatcatcaggttctatagtttcaacttcctgaacatccgaaggtgcaatcaagctagaagaatcctcaacatcctcttctttcaactgtagagaccaaaaattcctattaagacatttatgactgatagaaaacttcttatttacaaaataacgaaggactttcttccttcttaactacatt

SEQ ID NO: 260922 - DNA, 208 bp, Glycine max
aaaaacttgtaaaaaatggtccttttctttatcaactgccatcatgtgataggccctttttcctggcctttcaacgaaattcttactatctcttgtgcgttctttccttcgtttgtccggcctttaccctttcctccttagccccctgttagggttaatagtcccacttttccttgatcctcccctgttcttttcctattccttttta

SEQ ID NO: 260923 - DNA, 424 bp, Glycine max
  unsure (1)..(424): unsure at all n locations
aactatgaaactaagcttgtcccaaattctgacaaattgccttcatttactgttcataatccgaaaaatgtgagtgacatcaccttgaggtggggcaaccaaattcaagtgcctccaccagtagtagcacctgcacctgaacctatcaagcttcattctacacctgaaaaagaggatgagatagttgcacaaaagagaaagcttcctaacaaaaattttcatgcaggtggaccttcttctggtaattctgacttacagcagccccctatccctctttcattcccacctagagaaattctaaacaaaatgatggaagaagcggaataagagatcttggagaccttcaaaaaagtataggtgaacatacctctgctagatgccatcaagcaaatttcaagatatgccatgtntttgaaggagttgt

SEQ ID NO: 260924 - DNA, 396 bp, Glycine max
tatctctaaatattctggcccttcatctatttgcgtttttttcgacaataccccttctttatcatcttaagtgtccttacctgtttttatgctcaaacgctatactatctgatgtattacataggaggtttcaaaggatatgtttgatcaaaacgaattcaatgcttggatggcgctgcctttaaaagtgttgtataggcctgttccctagataggcatctctgtcgattaccgagctttactaatctcggggatgttggaatgttaaaatatggacaccccacatcttaaataggctctttactccggctgtctgcattttaaaaacgcctttaattagctaaataaacaggtatgacctatactctcctgaaaattcttcctctattatgacta

SEQ ID NO: 260925 - DNA, 185 bp, Glycine max
tatggatattggtgctatgaaggagtatgcatgtacgaatcttgtacctatatatgtcaactttacttcggactgatcactgtattaaaggcaagagatggctacttgtgttgttatcaaggcgtaagtgtcattcccccctacaccgtactcactgcagatgcttatataccctcttccattca

SEQ ID NO: 260926 - DNA, 421 bp, Glycine max
ctttaaactcaactcttatttcaatgagcagagggtttgtacttttcatgcactcctctaatgactatggcatcatttctggcgctaaactgctgggagttggaggccatcttttcaattaaatttctggcttcagcaagagtcatgtatccaagggctccaccactggcagcatctatcatacttctctccatattactgagtccttcataaaaatattggagaataagctgttctgaaatctgatggtgggggcaactggcacatagattcttaaatctctcccagtactcattcatgctctctccactgagttgtctaatacctgagatatccttcctgatggttgtggtcctggaagcagggaaaaaatttctaagaatactctcttaagtgatcccagctcgtgatggaccttgaa

SEQ ID NO: 260927 - DNA, 312 bp, Glycine max
  unsure (1)..(312): unsure at all n locations
attggtcttcaacttcacaagacaccatgccatgatctgaccgctgggatctntaagaagatgtctggagtgtactataagcctcttaatgaagcttctggagggagcctcttaatgaagcttctagagaaaactacatgaagctgnctcggcacanacgcttcccagctcttctgtaaccgtnggatcttttcgaaatatggttggcaacttctcaagacaattntccatgatctcanccgtggtgatcttgagaagatatctggagtgtgctagaagctctcgttctcgagagcatctcttatttaagca

SEQ ID NO: 260928 - DNA, 456 bp, Glycine max
  unsure (1)..(456): unsure at all n locations
ctttcgcaccttaaaactaagcttttatccaggctcatcttggtggtgaagctccttcttccatggcttattccttnaaggatggcgcctcctctcacctcctttcctttgtcttccgctgcatctccatggtggaaaatcaccattaaaggaccccattgaagctcaaagatccagcctccatagaagccctacaagcaagcttccatcactcatggtggtttctaagttgtggttctttcttgatgggggtttgaaaacaaaaggtaaaagaaactatggttgaaatagccaaaataaacactaaaaggggtgtgaaagatatggtaaaaactaattggtaaaagacaaactatctatgcggtttaacaatggaaggtaaaggaaataagctattaaagtaagcaagaaatgtaagcagcgcgaatcctaagagttcttggatgaccacattta

SEQ ID NO: 260929 - DNA, 392 bp, Glycine max
ctttacagcaaaatctagtaacgacccaccaacctacaattataataacttaatgccaccaacccagagaattaaaaaaaacctaatggccgagcgtaactgaaatagtggcaaccaaaagtcacccccaacagccaacaagtcagccaccatttggtctcccaaaaggccgaagcctaagtcgccaaatgggcccttattacaacttgaactaaacctaactaaagcccttctagctgattaacccacaacatatatttggtcagccaactatacaaggaatgggccattatttagacaaactaaacactctaaaattgagacaaagtggcgccatataatcctcctccattagggccatgagacaacccacaaccctggacttttcatct

SEQ ID NO: 260930 - DNA, 403 bp, Glycine max
gccattctctgcgaagcaaactaacttttaactcttataccacgggaagctactcgtcaaacaaagatggcatacaaccatactacaataaataccaacattcatgcaaatttagagcaaacttatgcgcatattaccataagagacgccacctgcacaagaaactctaaaaaccaagaaaaatgcacccataatcaatcaaggcatcatccgaacctaaataatatacatgaacttccaaggcgcccaagtgacctaacacacacacattttcttaggataaattccaacatgcatactctaagcactttgggtataaaaaattgtatacgagcaccaactgggactacagatacctatacacacacaaacctcatgacgatactggactataacacaaaaa

SEQ ID NO: 260931 - DNA, 306 bp, Glycine max
agcttgagaaaagcaacgacataacatctatctcgtgttctaatgaatcccgcaatatatcgagaggcacgaaattcagaacagaagctcttagaacaatcaatcgacaataacactttactcggatgaccgaccgtgccccgcggaacatcgaaaagcttggaatccagaatagaagctgtgagcaacaacaaacgtacataactctttactcggatgtccgaatgtgtcccgtagaagatcgagacgctcggaattcagaaacgaggcttcgagaaaataaagacgacaataacttttcatacg

SEQ ID NO: 260932 - DNA, 370 bp, Glycine max
  unsure (1)..(370): unsure at all n locations
gacaccanannaaactcaagcttgtatataagccgaaccactctatcaataaacacaatttgattcttattcacacaaccagagttcatcacttttatcttagtcgagagcgaatctcctaaattcttgagcgagacatgaacacccaggcaggatcaaaggactttcacaaccttagtgtgatgccctccctggaaagagagacgctgccatcctttcatcttcacccttggtcttccataccacaataccagaaaaatcaccactgcccacaattatctcggggccataactcccattttacgcactcaaattaagcgattttggaacctaaattgacattccaaacgagacctttacactcgtacgg

SEQ ID NO: 260933 - DNA, 293 bp, Glycine max
  unsure (1)..(293): unsure at all n locations
agactctgtggttgatgttcctctgccgaccaccacacagacctttgtccttctgtgcaacaatctgaagcaattgaacagcttgaagcttatgctgcaaacatatacaacagacctcctcaaccttaacagcanaatcagccacaacagaataatgtagacctctccagcaacaggtacaattccggatggaggaatcatcctcaccttagatggtggaattcttctcacagctgcagcaacaacaacagacttattttaaaatgttgttggccagcagacacacgtgtctc

SEQ ID NO: 260934 - DNA, 427 bp, Glycine max
  unsure (1)..(427): unsure at all n locations
nttanatttagaggtaattgcaatgttgttttctctctcaaatgacaaaaatatttctgaagaggttgtaaattcgtaatgcacggctgatttgcgatctatagtaattattggtgttattatttttagactttgtttgagttaacttaagcactttaatttttggagaagttgaacgaaattatagtgcttttataaaagctaaatacataaattgatttttgtacctttacattttatattttatttcatataagtacttatgaagaacttgatccaaataggtcttaatagaattacgtgaagctcttatataaatttagtgaaaaccacgtgacaatattgacattttaagttaaaaacatttatactgaaaacatttaaagtttctttgcatcaattttttataattttaaagaatgatagt

SEQ ID NO: 260935 - DNA, 175 bp, Glycine max
cgagtcactagtgactttaaacttattttttccactgaatttacttagcaaatcatcagtgagattctattgaggacattccacacacagtgcctcttaaagtgtgtcacagctatgtctcttaacaacacacacgactcccctatttaagttgaaagcggaccactctcaactg

SEQ ID NO: 260936 - DNA, 333 bp, Glycine max
acttttgtggggggctggccttccatatatatcacctttttgaacgaatcttcccagctcgtgacgagagtgaattcacgttcagccgcaactgagaaacacacacactatgttgataatatttgattgaatagcataaattttttatattattctacaaaaattatcactcctctagctcactatctctttgccccgaacatatatatgatggaatagcatacatgttttcagttttatcgctgttggtataaataaaggcataaagacaatccttcggcacaaacatatatatatatatatatatatatatatatattagggcattcatac

SEQ ID NO: 260937 - DNA, 421 bp, Glycine max
actcagacttgtcattaatcatataaaattttttttatgttctttcaaactcaattagattgagttgggccaatattaggtcagatttcaacttttccaatgtagcttatattttttatctcacgctaaaaaaaggggatattattgagcttacctcatttcgactacctagagtaatctggagaagaaattaactactctaagtttatgtttgtcctatgagaaaacatttattatattcatttctagcatgaaaacaagtaatttaaaacttaacctttgcatttagttaaactgttagtatcgttcaattgtccaatattcttctaggatattttaccttttgctacttgcgttgatgtcactattggcattcatgctccacagttgttatgttgacaatttacttctaggatacttt

SEQ ID NO: 260938 - DNA, 367 bp, Glycine max
  unsure (1)..(367): unsure at all n locations
ctcacgctttcaaccagataactcttcattcatctgggctngagctcttcttattgagtttctcataacgggtcagatcccttttaactgtcctcaggaagatcacacgaacaataccagcaagaaaagtgatcaccatgagcgaattaaggatagagaaccaatgcactttagctccctacatctttaagttagcatcccatctagacggtcacttgatgttactctcctcaaaggtgatctcataagtgaaaacaacaggctggcctctcttgataggcattgtcacaagtggccggatcacatttgatagatgactggtacttgcatacatcttcaagatttttgcatatatcacattttgcat

SEQ ID NO: 260939 - DNA, 103 bp, Glycine max
  unsure (1)..(103): unsure at all n locations
gcccccaaaaaacggaagcgcagnagacaggcaaactttttttgccaagacccacgcgggggaaaacggcccaaacagggggcagacaccccagaagcggcac

SEQ ID NO: 260940 - DNA, 390 bp, Glycine max
cgcacaacaagcaacgacagacacgtatactaaatgtattttctatctaacaagagaatacgtaatatatagagttactacttagaaggaagggataagctttgattaaacccattttatatacctatttaaactaattacacaaaacatagcccaaactcccatcccaattatttaagtgcagagatatctgacttttgagccatatttgaaacttaaaatggaagagttggctcaagcttatttgtgacataattgaatatactcttcttagctttcagggactactcacacgctccatttggagatatgtagaggcctataggtcctgcacaattatcaatttagctcaatcattttcctcagaccaaaactatgttaaagtgagaa

SEQ ID NO: 260941 - DNA, 435 bp, Glycine max
  unsure (1)..(435): unsure at all n locations
cacactattnaatactttagcttgccaccaccgagcataacgactatggacttgtgtgtttttacacgctacaacaggagagagctagataatgataagccaatggttgatacatggactgagatgaaaaatatcatgatgaagctgtatgtgcctgctataaactcaattgacttgtaattcaagctccaaaaactaacccaaggctacaagggggttgaggagtatttcaaggaaatggatgtgctcatgatttcagcaattaatgaagaatatgaggagggaactatggctcgatttcttaaaggattgactaatgatatccgtgatattgttgagctgcaggagtttgttgcaatggatgatatgtttcacaaaccaatccagatgggccacaattaaaaagaaaggagggcttacagagtttaccaactt

SEQ ID NO: 260942 - DNA, 154 bp, Glycine max
cgcaatataattgccatcggaaagaaaaaaagaaagccacccaagatcgagtgaagccaaaaaacatgggccactgcagcctggatgaagaaaatactaataccatataaaaaaatgttagtatgtccaggaggttactttataaaaagaaact

SEQ ID NO: 260943 - DNA, 217 bp, Glycine max
tatggtgtattgcacaatactaaagagtcctgcactaacgagttaattagagccttcatacacagatattcacttctgcgacgtagacaccctatttctttgtgcaataggtctagcctctatatagatggctagcctatcattgcggaaattggggtagaatcctaacatgtactaggacgaccatgcaaagaggccgacatttattgacaccact

SEQ ID NO: 260944 - DNA, 327 bp, Glycine max
  unsure (1)..(327): unsure at all n locations
acaacagactngagcctccatccacattatttgcatgcctatctgaattacatagtctggagataagcactccatctctgaactcanatattttacgtgtgctctatcttttctcttcatatcatatttgngtccccttcaccagatccagctgaaacattataattggggaatgctctntctgtctcacaattctcacgggatatgacgacatgaccagtggacacctgctctccagcattatgcataataccagagaagtaacactagtactatcttctaaattagatgatccattatcagaactgtgctntagtgcactggcat

SEQ ID NO: 260945 - DNA, 304 bp, Glycine max
cctgaaactcccgacacaaactagctgagaatgatgctaacaacagagcatgtgatctcaagcaagcacagacaggcatacagaacaattcttgatgttgaatataaaacacagcatagaattagagatgggctaagctttccgatgcagaggagctagcccatgaaaaatatcacgaccgtggggcatttcatccaacaccattcgtgcaccacagaacatgtgctgatgggaacgctagccccacaaacacaaagatgaaattagacgcaaatcacaggtgatcacaatcgccgtaatccat

SEQ ID NO: 260946 - DNA, 374 bp, Glycine max
  unsure (1)..(374): unsure at all n locations
actcaagctcgaacgacagagagagagaacctcgtccactggtttatgttcatacaangggacacgtctctgacaagataagggtatttacttaatccccttctcaatgcctcattcatttctagtattaaattacctgcttctctgtacttacacatggtcagactatcagatcctgcacccccttcaatcctccacttgacgattaggacccaaaattgttatctctgaactggaaaagcccgttcgtgccgaacaaaacggtcatctggaaacaggacccaccgttaataataatactatcatatctaagacctgaaaccctaaaaacaaatccgttttttatacagaaataaacccacccctatcacccg

SEQ ID NO: 260947 - DNA, 54 bp, Glycine max
catttttggcacaccccagcaaaccacaccccaacgacaaacaaaccccaaaac

SEQ ID NO: 260948 - DNA, 392 bp, Glycine max
gtcatattatcgaattagatctgctggtcactgttcttatgatgaagtccccgaggtatactatacatattctcactaaccaggatgttaaatcatgaaagattgatgaaaaaaccatattgatggtttatctgtaattaatacatgatggtaggacataaaattcttgctatcgcgggtggatcagaaatctagagactgaggtgtatatctcattgtcactgttagagggcctaaacagtctgaaacaagctaatgccacgggagttagaatttatcagagaatgttcaacaaaatcagtgatggttagattttacgaaaccacattctccctttgggacatgatatgatcttacatcaaccatcgttctatgttgaaaaatccgcaacc

SEQ ID NO: 260949 - DNA, 376 bp, Glycine max
aactcagctcgacccaaccgggaggggtgatttttctgttttgaacgacagctgtgagaataatcttgcatcaactatgaatttagaatgaaagtatgaatgggacatgatgaaggccatgattgtgtatataccagccatttgaccaaaaagcttaccttaaattataattgtatcatttgcaccctatgcgagctgaatgatattgtcaataattgaaccctaaacataaatgattatctccagataccttgcttagaatctagaagacatatggttcaaggaaaaactaccccaaatttgggggagtggagctgaatgggatgtaaagtaaaaggtaaagcatcagcccacaccacaattaagttgtacgtta

SEQ ID NO: 260950 - DNA, 223 bp, Glycine max
gaacatatggtggctgcgttgaagaatacaataaaataactggggaattatttactctagtgtcgcacacagataatcgtggtgtgggaagactaaagccgggggggacaacacgataaattcattgcagtatggttagagcttggggacatgtaaactagtgcacttgtagatcggctaagtatggcaactatgtgctcacgtgattttgagacttatcgaa

SEQ ID NO: 260951 - DNA, 351 bp, Glycine max
  unsure (1)..(351): unsure at all n locations
ttacaaatctctctcttcccagtaggcatgaagataaaaactgaactctgcgtactcattctaaatntgatccggattggaaacgggtcaaatntctcctgacttataaataggaagacgatattaagtatctcacttcttaccccaccttcaagcgtcttacatgtattgntacatatattnntttataattatattactatattaataattcacgagaatactattatctctcattgtacatatataattatgtaattgttctatatctcattcttataattattaagatatagaacaattattttaatacgtagataaactatattattactataatacttattataa

SEQ ID NO: 260952 - DNA, 398 bp, Glycine max
actccacttgagccaaatcctgactcacaaaacctgacctttgtttgaatgtttatccttaccctcggaagcaaaaaagaattgaagggaaatttccaattataacagaatagaaggaaaatttcctatgaaagcaaaaaaagaaaagaaggaaaatcccccactcaaagagtgggagatagcaaaaagaaaagaaaggaaattcccaatcaaagaaagggagaaagtaaaaaaggaagaagaagaaggaaagaaagctcctgatcagggatcgaacgaaaaacataagaaatgtgcatataggtctctataccggacaatatctgaacaatacacgaattgtcgccaaatgaacaaaaagatggaaaggaaaccaccacctaataaggtcttctccc

SEQ ID NO: 260953 - DNA, 424 bp, Glycine max
attgtaatcctcgttgtgagtcatacacggatgttatatatatgtataacgcagcctatacataatcattaggtccttgcttcaacttgcttgatataaataactcaagttttagttataatactgattataacctgcaattatagagcttaagcgccaacgagcacctgttgttgtgatatctcaccaggttgttagcaagtcattaagctacattcatgcttgtaaagactttatatggttgactgttataatccgtgaggttctttcatacgttctacatttgacgcagttttgaaggcacaatatgcttattttgttgaaaacctctggacgaaatctccattatcggtaatatgtgaattatttatctgaccttcttgatcttactatatgggggcatattaaacatggatgtgttgct

SEQ ID NO: 260954 - DNA, 201 bp, Glycine max
  unsure (1)..(201): unsure at all n locations
gctgaaaccaaaaaccaacnaaaggacacaagcaaacacagcgggcattttcgtacgggaagcccatgagacacaccaaaaggccacccacaccgccgaaccaccaaaagggacccccgactactcactcacactagcctccataggagcatcctctccaaacagcgtaaccaaggaacaatcctggcggagaagattctt

SEQ ID NO: 260955 - DNA, 294 bp, Glycine max
taggtgacacaaaaaaactgaattttttttataaaaaatatctatgtaccattacctcgattgtcgcaaacttattctaaaaccacccttaggtaaacttaactgcaatcataatgaggggcaggatcaaatgtgcaaacatggtacaacctatcttccttagtctccttactgacacttactctcttgcttctcaatccatcttcgtcacctaacacacaccctgcaaactcacggacacttaatctcatcctgcctcacaccttcgaactctaattactaccaaatcgctct

SEQ ID NO: 260956 - DNA, 110 bp, Glycine max
aaaaccagccgccgcgacgacacggacaggccatgatcacagcggggggaagacagtgaggcaggcgaaccacccacaaaaagcggacgaaccagagagccggggaccgg

SEQ ID NO: 260957 - DNA, 263 bp, Glycine max
  unsure (1)..(263): unsure at all n locations
aactgaacaaagctctctatgggctgaagcaagcacctcgtgcatggttagaaaagctttcagcaactctcatctctcttgngttcaaggctagcaagngtgaccctttcttatttgtctcttcctcatgtggaaacacaacttatacgcttgtctatgtggatgacataatcctcactggaaataacagtgttctaattcagcaactccattcatagctaaactctatattctctcttaaacatctcggcaagttggactac

SEQ ID NO: 260958 - DNA, 407 bp, Glycine max
  unsure (1)..(407): unsure at all n locations
acatttgagttttttttgaggaggatatacataaactatcattaacttcaactattaagcgatataagccttcataactatctaatcaattaaaaatatatattctaattgtgatttatggattgacaaaaaggtatataagaataaaccctatcaacaatcatcttaatggttatcacggagttagattcataaatggcatgttcaaacttgtgttaatagaatttgctatactttttaggaatatcttactattgtcatttcgagaaaagtggataattattattacacgaaactacagctagcttatagcgtctttaaatatttgaaattgcagattttatttctcatctagacaaaaacaaaaggcaatnttctcaactatccaagggttaacttacttatgt

SEQ ID NO: 260959 - DNA, 365 bp, Glycine max
tctcggctcatgctgggaacgcctctagatcaacactcttgcattctaaggcacccacccagagggcagcttcccatgttccaactcctaacacagctcaaccggccggtaattacaacacgacaaggaactaccctacaaggccattgccggaattcaccccgctaccgatgacgtacgaagatcttctaccatccctcatcgccaatcataaggcagtggtaactcccggaagggttctcaaacccccttacccgaagtggtatgaccctaatgcaacttgccaataccatgggggtgtcccggagcataccagacaaaaatgcttggcccttaaaaacaaggtccaacatataatggatgcc

SEQ ID NO: 260960 - DNA, 161 bp, Glycine max
aaggtcacacggcacatgacagcacggaacagaccaaaacaaacgaaggaagggacaaagcagaaacaaacaagacacagctgataacacggcacagcaactaaggaaaaaggcagaacaaacaccaccgaaaaataaaagcaaaacaaaaagaaccggac

SEQ ID NO: 260961 - DNA, 260 bp, Glycine max
actacacctagaccactccttgaaacactcctttttaactctaactctgctctgaacactttcattccaccaccacgattctttaccccaaggtccaaaacctctagattcacccaacggctctttaaccactataataaacacttgggacgtattgatccaacaaacaattgcactaccttgtgaatggcacatcatacacaccatatcctttgttggaagaatccttaatactcaccctacaagtgccaccatttgat

SEQ ID NO: 260962 - DNA, 261 bp, Glycine max
aagaaaatgcgactgaggtgatgtcatgggtgacgaacgagaccaaaaccatctctcgccttcctgaacaaaaacaattggtgagggtcacaaggaataataatgcccttgctagagggatggacgtataaaaaatatccatttttttaattaaccacggtacaaggtatttttcatcactgcgggtgcccaacaaaaatgctgtgtgcacctagcaacactcccaaaaagtgttgtatttggcaacaacgggcctgatgt

SEQ ID NO: 260963 - DNA, 206 bp, Glycine max
tatgtctgagtctttcttggtgcacttcattttgaacactcttctgcaggaatatgggccgtttaagatttcctacagcgcacataaggacaaatggcttatcaatgatataatgaccctgtgtgtcaagaagatgaaaggcttgtatggagataaatgtctgagtcttcttgggcacttcatttgaacactcttctgcagaatat

SEQ ID NO: 260964 - DNA, 447 bp, Glycine max
  unsure (1)..(447): unsure at all n locations
actcaagcngggactcttcatanatagaaatgcacatcatagtctgataatgatcagtattttgagtcattccagaaaaacagtcacattctctccctcactttttctttctatttcattcacttgccattactttctcaagaatctctggatattaataaagaataacaggaataataataaactattctatgacactaatctttgcaatgatacattaactcccacaatttccaatgacatactaattgctattaccatttccaacactattatatgagttgaattggctagattataaatgaccctctactagtagttgcaaattctttaacacctttctgtttattatcttctctggtaacctaaaatgtttgatgacaatatacaacgagtaataaattatagatgtaatgtatattacaaagctttaaaacattctgctta

SEQ ID NO: 260965 - DNA, 309 bp, Glycine max
taatcatagcacaccagacggcaatatatgctttttttacccccatcactctctgctcggtacctatctcttccattgatgtttcttcatttctctccatgaatctccctacatgtcttgatctaaatgtcgctaacatgattctttacaggttccaccgattaaacatgccttacaagtttgatttgatccttcatggtccaaattattgtttttgttcttgaaccctgacatgtgttgagtttacgacccttatgagtaatgacttgttattatttgcgcctcaaacctataccctaaaatccttaa

SEQ ID NO: 260966 - DNA, 437 bp, Glycine max
agctttagtcatttaaagagaataaagtgatccagaactatgtattttttttattaactctgaaccaagttcctacatgctatgttttgtggcaaatgccaaatgttgactcatggtcctaatgaacttgttgctcaacataaaccattgactgtataggttcaatcctgcactaggccacctatgccacttccatacacaggtgtgcttgtaccaaccaatataacaggaaaagagtttttacaaggcaatcataagaatacattcccaattatatgatggaagagatgcccaatatatattagcccacaccacactcaaacatctcactaccaatgagtcacgagctaaaactacttaatacataatgtgacgtaaataaagaacagagagattcccgcacaaagtgcatgtgaagttggttgctggattagtct

SEQ ID NO: 260967 - DNA, 432 bp, Glycine max
ataaatactaagcttagggtgtcaatagctccaggtgctgcatggaatgtgcattgtatgtttggcggacagcagaggagcattaaccacagactatttcgacaggtacaaatttctgattcaaggccagcttggttaccaagttaaccaatgcatctagtttgccacaaagcttcttaaatccagatgatgtaaatgagtttgtatctacctcatgcactcctctaagcatcatttctggcgctaaactgctgggagctggaagccatcttctcaaacaagtttctggcttcaacaggagtcatgtcttcaagggctccaccactggcagcatctatcatacttctctccatattactgagtccttcataaaaatattggagaacaaactgctctcaaatttgatggtgaaggcaactggcacatagcttt

SEQ ID NO: 260968 - DNA, 141 bp, Glycine max
aaaacaacgaaaaccaaggaacacaaccactaaaagaacaaaaagaaagcgggacaaacaaactgcacgcagaaacaaaggaaaggagaaaacaaaaacaaaaaccagaaaaaaacacccaaaaaacgccaaaaaaacaaa

SEQ ID NO: 260969 - DNA, 402 bp, Glycine max
tgttgaaactgccatgtttggatgagtcgtacatatctattctgttccacggatttagagatgatgtttgtgatgataatatgctgaaattacttatggaacactgttatagattaaaggttcagttcacctaaggttagaaagtgagaatgtgatgttatgagtggaaaaagagtgaggctctgagagttggaaggataaatctgaattctgtggtaaatggaggctaaagtgagttaatcctaacttgaaatgtcatttaggacttattagaaagcttggactatgctatagagaacaacaaatgaccaaagtgactaagagccatttctaaggcaaatctgggtgttgaagagccaaattttgaatcggtgagattttatgtgtaatccatgttcgaca

SEQ ID NO: 260970 - DNA, 347 bp, Glycine max
ggtttttgctgaataggttttaatgagacaccatgtttcatatcactatcaatgaaaacatctttccatcatatttgaatattgcgattctcaaggacgaaattaacaaattccctcccaaataccctcttcagctaaaaataaacttatgaacatatttgggtaaacatgaattgattgttgtaaaccttttatgaacaccttatatgatcatttgttcatcgttaacaaaactactagggcaattagacaatcattataaacacaacaaaagtaacatttcatttatatatggaacagttgaagccaaaccttacatacgaaaatgactttgaaaagccttaaat

SEQ ID NO: 260971 - DNA, 136 bp, Glycine max
aaaataccaatgaaaaaaactaaactcatctagcaaaagcagcaccccacaaatgctttgatcacttggaatcaaaagcgtatattccgaattttcctgcctagcaaatcaaactacaatcggaccctctcattgt

SEQ ID NO: 260972 - DNA, 129 bp, Glycine max
gaagagtccgactgatgtcacacctcgttcgtgaaaagggtgagaaccccggttccacgctagaacctcgttaacttattggcagcttaagttttttgtaggctggcttgttgattaaaacagacttta

SEQ ID NO: 260973 - DNA, 135 bp, Glycine max
  unsure (1)..(135): unsure at all n locations
ataaagtcacgtnatatatcgagtcgctcgaaatataatccagaaagtgtgagacaattctaacgtcaataacttcttactcggatgtccaattgagtcgccgcatatttcgagacgctcgaaattgaatacata

SEQ ID NO: 260974 - DNA, 420 bp, Glycine max
  unsure (1)..(420): unsure at all n locations
ggccaccacggagttnttcgactatggtcttgtgttttggaacaagctacaaaaggagagagcatgaaatgaagagccaatggttgatacatggacggagatgaaaaagatcatgaggaagcggtatgtgccggctagttactcaattgacttgaaattcaagctccaaaaactaacccaaggcaacatgggggttgaggagtatttcaaggaaatggatgtgctcatgattcaagcaaatattgatgaagatgaggaggtaactatggctcgatttcttaatgcgttgactaatgatatccgtgatattgttgagctgcatgagttcgttgaaatggatgatttgcttacaaagcaatccaagtggagcaacaattaataaggaatggagtggctaaaggagtttaccaactttggtct

SEQ ID NO: 260975 - DNA, 468 bp, Glycine max
  unsure (1)..(468): unsure at all n locations
tcccatctgattctctctgaatatacattttcccatgtgttttcattcttatgtgaccaaaccacagctgcaaattntgccactttagatgtatcacacaatcaaataaaggggcaactgccagattgttggaaatcagtaaagcaattactgtttcttgatttaagcagcaataaattgtcaggcaagattcctacgtccatgggcgcccttgttaatttagaagccttgattttacgaaacaatggtttgatgggtgagttgccttcttctttgaagaattgcagcatgttatttatgctggacctgagtgaaaatatgttgtcgggtccaataccatcatggattggagaaagtatgcaccaattgataatcttgaacatgcgaggaaatcacctctcaggaaatctacccatccatctctgttatttgaaaagtattcaattgttggatctttcaaggaataac

SEQ ID NO: 260976 - DNA, 460 bp, Glycine max
tcagcagcttattgccataactcacatatctatatcccaattatcagcaactcaaagtagttattagatagcatggaatatatctcatttttataaaaaatgaatactatctaagagaaagttaaggatacaaatataagaggataagatatcacccctaacagagcataacaaatgtagttatttgatttagtacataattacatcactgtaagtgatgtatattcacttacgttttagcagcctgcctgcccttcccaattgcagcaccgaaatatctctagaacaattaccaaatgaacaaatcattacaaaaataccacatggaacttccacaaaggaatatcaattgcatgtgtaattataaagaagtctggaagttgctatcaaatgacaaaaagtagctcacatacgaaacaccggaaggttcaaccatgtacaactgtggtccatccctgtc

SEQ ID NO: 260977 - DNA, 408 bp, Glycine max
atctaaagctacagataaagtcttataccctaaagcttagacaatacaaagagaacaagaatccacgaactctactggatggtgtatgattgatgctacacaagccaaaacgcactcaagagagtacattatgctaaatgtgcaaatttctggagagagagaatgcagaggtgacgcttcttgcatccggcaaatgtgagtgtaactgttgttacgctcacttaagcaattttttaataccttctcttagcggaccgttgctctaatcgagcaatagagactgttggtttctcaactaagctcgcttaatgaacatgtgcgctctaccgacgtctcaaattctaaatcaaaataaatattctatttattatcttttgaacagaatctaacttatcgcgagagtaattc

SEQ ID NO: 260978 - DNA, 450 bp, Glycine max
  unsure (1)..(450): unsure at all n locations
tgtccacaacttgaaatgatttgtttagcaaataaatattatgccattgcaaataagacaaacttagattcagttctttagatgttgcttgcgctgttctcccattagaattagagttttaccctgataatccatnttagtcctttaatgcaaactttattttgtagattaccaaaaatgaaactctaattctaattgaataacaacattaacagccaacaatatcaaacaaaccttatctaagttttattcttgaaaatatcacccgtgatcacaagttcacagctatgatattgccataattgataaactgacctgtgataagaaattgctggactttatctcatgcgatgttaatgaaccagacaagttattatttcttaatccaccaagcaaagaacggcccactagtttgattctcaacacatgaaaccaaagcaaagctaatta

SEQ ID NO: 260979 - DNA, 390 bp, Glycine max
  unsure (1)..(390): unsure at all n locations
ctggcttcttagctntccgcatggtagactttttagaaatcttgattctttggtnngagaataccattggccggtcttccagtctaaaatgctatcgtctaattatattctagactagtgttatggtctaattttgaggggtcacataacaactcgatcagtcaaaccatatgcagtagtactggtcattgtattgcaattaatgtttgggggttgatgaaacttcatcaagttcatgttgagctaacctctctttcccatctttcttgacactcttgtgtcgaagtgaccaacgctaacggtgccattatcttttacttctcttataagaacaaanactttttagtagtctgcgcctttaccccgctctttgttgacccattctattta

SEQ ID NO: 260980 - DNA, 445 bp, Glycine max
  unsure (1)..(445): unsure at all n locations
nggtctattctcactatacaagctgaacatgtgaggccgtgtttgcctagatccccaattctaagatcttactttgttgggtatagccttcttgttggctatatggacatggaaacacgccccttggctcgcatggtttatggaagcttagatctctaccttgatatgttttacatgatagagtgaactaagattatgagttgtctaagctatgagtgaattattaacacatgctgagctgtgacagtatctcatgattggcattacatccacttgagtgataaaatggcgactataatgcaaatcaatttcacaaatctccattgttctttttagttatatataatgaattacgttgtgctcatagagaggttcatactactttgtgccttgtaggagtcgcaagggcttgatgctgctaccacatgggtggaagacatggatg

SEQ ID NO: 260981 - DNA, 455 bp, Glycine max
  unsure (1)..(455): unsure at all n locations
gctcgaagaggatgctttaatggagganaagaaagagagaatgtttgtgcaccatattgtangaataaaagagggaaagaagtggaactttgaagtgtatctcataagactctcattcatcaaagttacaacaagtgtgacacatgcttctatttatagactaggtagcttccttgagaagctttcttaagaaaacttccttgagaagctttcttaagataactcccttgagaagtttctttgagaaaactttcttgagaagctagagtttagctacacacacccatctaaaaactaagctcacctccttgagaagctctcttgagaagctagagcttatctacgcacacccatctaataactacactcacctccttgagaagctttcttgtaaagctagagcttagctacaccaccctataatagctaagctcactcccatgacaaaaaaacat

SEQ ID NO: 260982 - DNA, 453 bp, Glycine max
tcaagcttaatggtcaatcgcacattcaatcttaagatagcagaaatctctatataatatttctattaaaaggtagcactggtggtatgagaccttatgaatatctactacaacagttctaaatactctcgccatgaggaaagcagtccattattgtccaatactctatccattgatccatatttaaccttttcccataccccccatatccaatgccaatggctcatcttccttcacgagcatcaaaataaaattgtgcagtttacggattgactccatcaattttcaacctagtgtaattttcttcagtctaagctaacatattactctgcaatctcaccttgtgccatgtcaatggctgatttctttgaacaactattgctgactgcatccacgcaacactagagataccatctggagaggcaacatccatggcttctctttacaatcatc

SEQ ID NO: 260983 - DNA, 455 bp, Glycine max
  unsure (1)..(455): unsure at all n locations
caacgactaaacatgcatctgccttttttgttaggctcttagcttctgtgtctggcacactctagaactaaggtccaattatcactggacaagccaattatgattcctaaggcagactactacaaggtcaaagagaatattgttgatcatttggcaagtgcaccaaaatgtccaagttgtaatactcataagtccgagtatcgattntcacaaggactttgttttgtactttgcgttggataatttccaatttataataggaaaagatgagatgaggtaaaagatgagctaatagaaaaagtaacttaaataaaagatattaataagagacacaagagataatacggaacttaatgagatgagactgctaggatctatcatgccttatttgcctaagatctattattntagattttcttctatcaatcaaactaaagtttcctacctacatctat

SEQ ID NO: 260984 - DNA, 348 bp, Glycine max
atcaacacttcgtgaaatatgacatactcatgagcaattcaaagtttctaagaaaatgctagtcttgtatatgaggaaaaaccaaattacattaagaactgactgctatgtgagaatgaaggattgaaaatttgatcatgaacttcaaatatgataacttatgactgaatgacttttttttttaaagaaaatgaaaatttggattatgtgacctttgacagccttccggagagattcgtgatcttccacaggagagtggttggaaggagcaatcaccgtcaccatgtgtgaattgatgtgttttttttttttcttttaactctatgcttctacctaggtaaactaaat

SEQ ID NO: 260985 - DNA, 332 bp, Glycine max
tatcacgcgatcatggaacttcctgggcttttctctgtcaaacttggcatcctcatacgcttctaagcagagctcatctaactcactcaggtgcaactttctatcctcaccagcttgatccatagaaaagtttcacggcctcactggccagcatgccttgtgctcaatacccactggaagatgacatgcctttccaaaaacaacccgataacgagacattcctatgggtgctttgtacgaagccccaagtgcccaaagagcatcatcaagcctgcgactcaaactttcctacatggctgcacaatcatctccaaaaatctcttgatctccct

SEQ ID NO: 260986 - DNA, 318 bp, Glycine max
  unsure (1)..(318): unsure at all n locations
cttctcctcctcttcctataaatagggggtgatgtgaagatgtattattctctgccatcctggaaattcgagaatcacttgaaattagtgaaaaacatcgggtccatgaagaaaatccgagccggggcccttatcttttgtggcctttggtgttgacaagggacatttcagcgggtgctcatgggctttctatcactgttggccgggagtctcccttacacggcaactttcctggtgtcaaactattctattccttctatgctcggtccatggcgatgatntccctatcacctcttattatctgcgcgtttctttggt

SEQ ID NO: 260987 - DNA, 367 bp, Glycine max
tcttacaatcatatgatgctgaccgtatttttatacgcttttctctcacacattgactcattgatcatagtttgggcatgactgaacatgacttgatgcctcaccttcttccatagtaaagaatttatgctgattgattcctacaaaggctgctcccacgggagcaagtgtgtactaccttataaactggactcttatcaagttattgaaacctagacagcaattatattcttagtgggggcaactgttacacttaatcttaaatatattttacaactcatgattgatgtattcttgtggttgtttaaaaacaacatattgcttaatagagagtgaggtactgttaacatgaccaacgattattata

SEQ ID NO: 260988 - DNA, 448 bp, Glycine max
  unsure (1)..(448): unsure at all n locations
cgacacaatgaattggcctcccactaacatagacttctctttcaacccttcttttcccatacaaacacatntccccatccaaaaccctagcagccacatccaatattccaagggttgaaaacttgacatgattattatcatgaaagaaaagatgtaaaaagggatctgagaacctataacttctaattntattccatccaatgactatgattaacatatgctcatgtcctagccaaaactgcaattttgttcattagtagtcgttcatgtaattttcttctcagaatatctacagtgagacttgtttaaaattctcattaatgatctagttgctatttttattatgggcttgcacgagtgagtgaataaggtacctttggttacactaatggctttgatgcttccacggcaattacattttattactttcacgaacgaagatggttat

SEQ ID NO: 260989 - DNA, 481 bp, Glycine max
  unsure (1)..(481): unsure at all n locations
atacaatactcaagcttctatcccctgttaggttatattacaagatattttaattatattttaattntttattaattaaaaaatttatttgacttaaaaagtttttttaagtaatcgttagtgtttttctaaaaaaaatttaaagttattttttaaaatattaatttcttacttttttatattttctttcatttttttattattttttttaaaataaattatgattttattatttttattcactttatattttttaggtatttcaacaactaatttcaaatacttataatttaataaattaattttttaactttcattaacttttcaacttttagtttccagttaactttttaattagttgtatcaaacctaatgtctctcaatactagaacaattcagatgattttctaaaaagtattatttttaaaaaagtcttgattnttatagtaactatcttagaaattatacaaataataattta

SEQ ID NO: 260990 - DNA, 484 bp, Glycine max
  unsure (1)..(484): unsure at all n locations
ctatanaccactcaagctntanaagacagcagcttctanacgagaggaatattcgaaagtgattttatttgtaagggtgataaggacaagcgcatataaagtaattatataaagaggagaagaaatagaacattggagtagttgatggtgaagaataagagctttgcacttccttagtttgtctcacaactaagataacatccttaatattggaaaaatcttctcaggggacaggagataatatcaagataaattatataagtagaggataattcttctcataataattaatttttaaaattgagttaaatttaaattcatattttaatatgatgttagagtttattctaaatctatttaaatgattatccaccatattacttgtgatgttttaattgcttttaaatgagtagtgatatatactttcattatttaactaaatgcctcacaactaagataagatccttaatactggaaaaaatgg

SEQ ID NO: 260991 - DNA, 360 bp, Glycine max
tcatactaagcttaaaaacaagaaatgaattaaaagtctcggattcaaaaacttactccgtgaagaacgaagaacggatgaagaacgatgaagaacggacgaaaaccttcacggatttgcttacggaaacatctcggaagcgttacggaagcacctcggcttggattttcttcacggaaacaatttttttcacccaaaacagctaaaatacatagccagggggctgagggatgcttagaacagcccccttcagcctatttataggaaaaagggggaggaggttgccgcccagctcgcccaggcgaccttagctcgcccaagcgagctgggttgctttcacatgcacctacctccataaat

SEQ ID NO: 260992 - DNA, 455 bp, Glycine max
  unsure (1)..(455): unsure at all n locations
cactcaagctngngcatncaatatcctgatgaggcgagaccatatgtgcttaatactggactaatacattcgcagcccaagtttcatggtcttgtaggtgaacatccttataagacatcttaatgagttccatattgtgttgtccaccgagaagccccctgatgtccaagaagatcatatctttctaaaggcttttccttattctctggagggagtggcaaaagaatgggtgtactatcttgcgcccaagtccattttcaactaagatgaccttaaaagggtgttcttggagaaattctttcctgcatctaggaccactaccattagaaaagacatttcacgaattatgccacttagtggagaaagcctgtttgagtactgagaaaggttcaagaaattgtgtgcaagcctgtctcaccaccacatttctgagcactcctttttcaatagtctat

SEQ ID NO: 260993 - DNA, 423 bp, Glycine max
  unsure (1)..(423): unsure at all n locations
cctttatatgcaccctgtttattccccttgatatggngcgcatttgctcatgatgtaactcagctatttatgatgtcaggttgtcgctgaagactctcgcagatgatggtgaaatatactccaccatagatgacgaccattacaaaaaagcctgatattttatgtaatctgaggaatatagctaaggattgagctggatactataggacatgaaccatgatctattttgatttcaagtttccagatatgtacatatgtttctggatgaattgatattttatgctcaaactaaaagaatcacttctgttaacgcgtaatgatgttatacgttgctttgagaaaaaaaaaagtattttcaatttttttatttttgaaacgattttatcttcgatggtacctttgaaaaatataattgaattatat

SEQ ID NO: 260994 - DNA, 450 bp, Glycine max
ctggtggttaagacacacgaccgcacttgcttttcttttattggtagccaggactatacgagacatcttgcctaacaaagtcaggctcacgataactcgcctgagctttttcttccatgctatatgtagcaaagtcattgatccagtaatgtttgatgagttggaaaatgaggccgcaattatactgtgccacgtggagatgtattttccccctgctttctttgacatcatgattcacttgattgtgcatctggtcagagaaatcaaatgttgtggtcttgtttatctactgtggatgtactcggttgagcgatacatgaagatcttaaaagggtatacaaagaatctatatcgtccataagcatctattgttgagaggtacattgcagaatacgccattaaactttgttcataatacttacaaaaggctaaagctgttgggcttcctga

SEQ ID NO: 260995 - DNA, 342 bp, Glycine max
ctggtattattattctatggataggaaataacccgtgtgttgtggaagatgagtggagctcgttacggctgcattgaaatccaccactagcgtttgtgcacttgtgcatagaagccatggcctcctcccaatgaagtgcttcatcactgaggaagaacagccacctctgaatttaacgccccgccctcctccgtactttgagactgaccattcaggtaccaccttatatttctcccatgtctgatggtcttcaagctgcattagcttgtatgaaatatcatttgcgttatatgtgctgctggtgctgctactactattagagtattattatcgtgattatta

SEQ ID NO: 260996 - DNA, 448 bp, Glycine max
  unsure (1)..(448): unsure at all n locations
ctcaagcttanccctagaggggatggacctttcattgtttggagatttctatatcaacgcctatagggcggacctcccacaagagtatggagtcagcaccacttttaacatttctgatttaactccttttgcaggtggagctgatattaatgaggacgaactaacagatttgaggtcaaatcctcttcaaggggaaggggatgatgcaatcctccctaggaagggaccaatcactataaccatgagcaagaggctccaagaagattgggctacagctgctgaagaatgccctanggttctcatgaaccttanggtagatttctgagcccatgggccaaggttgggtccaattatcttcgtacatattagactangatgtcattatatttggtccttgtatatagggctccatattgagggaggataccctatacatataggagttttc

SEQ ID NO: 260997 - DNA, 413 bp, Glycine max
tcattgcttcatgatgatgtttcaagattgattcatgatgttgaatcaagatcgattcacggtgttttgatgataacaaagatgatgacacatagcccatgagaatgatttcaagattgagtgaagaacaattccgaatcctgagaatgattcaggagaatgttttgtccagaagattccagattcaagattcactactgatcaagatcttggttcaggactgaatgattctagaatcaagagatgactgtttcgagatgagtcttaggctgtatctcccatctgtggatcacaagatgtactacaaagtcatggtcaagagtttactctttgaggtcgattacagattgctgaatcaatgctaggggtttagatgttagatttcccactcaaagagaggtcatctgtgtgtg

SEQ ID NO: 260998 - DNA, 466 bp, Glycine max
  unsure (1)..(466): unsure at all n locations
atacaagtngccaaataactaaaaactaaaaactgaaattttaaactgaactgaaatttataaactaaaacataaacataaatctaaattataaaatgtactaaagacatgattataataaaactattcaaaaagcaaggaaataaaaatcccgatcctatcaatgatcctggtccatggcatgctcatttaaatccaatgccaaagtgccaactgatgaatcatgaggaaagggcaggtccgacactggtgcagatggcttacgctgaggagatggctctggtgctgcaacatcctcctgtacaataactagatcagactcgaaagttaatggttcaagtgggatgggctctgaggcctcaagaatgtcctcctcctagtccggctgaggctcctangctacagaggcctcaccccctccaaaaagagaaggctagactcctggttaggccaccttctgaacaaa

SEQ ID NO: 260999 - DNA, 464 bp, Glycine max
  unsure (1)..(464): unsure at all n locations
actcaagctggggaatctagttatagcccgagtatgcatctagaaaatttaggataatgaatccagatgctccatcaactagacaatctatactagggagtgggtgtaagtctttggggcaagctttgttcaagtatgtgtagtcggggcacattctccacttcccaccagaacttttcaccattaccacgttggtcaaccacgtggtatactacacctttctaatgaaaccaacacttagtagtttctttacttcttcatctaccatttttcctctctcaggacctagtttcctttttctttgggccatggtttagcctccgggtacatggataacttgggatagtggaagtttaggtcaattcccgacatatttgatgcagaccatgcaaataggttagtgttggttgctagcacttgngctactaactcttctacttctttacttatttgacacccaagtt

SEQ ID NO: 261000 - DNA, 404 bp, Glycine max
  unsure (1)..(404): unsure at all n locations
cgagcgttccgatatattacgggactctatcggacattctagtntaaagttattggtgtttgaatttgttcagagcttcaacattcaatttcgagattttcgatatattacgggactcaatcagacatccgagtaaaaagttattgtcgtttgaatttgctcagcgcttcggtattcaatttcgagcgtctcgatatattacgggactcaatctgacatccaagtaaaaagttattgtcgtttgaatntgctcaaagcttcggtattcaatttcgagcatttcggtatattacgggactcagtcgaacatacgagtanaaacttattgtcgtttgaatttgctcagaagcttcacatctaatttcgagcgttttgatatattacggcactctatcggacatccg

SEQ ID NO: 261001 - DNA, 268 bp, Glycine max
gtaacgacggtgaagtataactcctcaatggatctttcgacaaaatgcatttacaagtgcgagaaagaaaaggactacctatataagcatgaagtctagccgctttcctaagctgggacttgggtctgatatgccttatgaacgataaggacacaggctaggaaactattgtccacccacagtaatgttataaactattgtgcggaatatcttcatgtattcattatgaataaaaagggctcacaccttactgacaccctgatattct

SEQ ID NO: 261002 - DNA, 475 bp, Glycine max
  unsure (1)..(475): unsure at all n locations
tcaagctntatacaagnngccaaataactaanaactaataactgagattttaaactgatttgaaatctaaaaactaaaacataaacataaatctaaattataaaatgtactaaagacatgattataataaaactattcaaaaagcaaggaaataaaaatcccgatcctatcaatgatcctggtccatggcatgctcatttaaatccaatgccaaagtgccaactgatgaatcatgaggaaagggcaggtccgacactggtgcaaatggcttaagctgaggagatggctctggtgttgcaacatcctcctgtacaataactatatcagactctaaagttaatggttcaagtgggatgggctcttaagcctcaagaatgtcctcctcctagtccggctgaggctcctaggctacagaggcctcacctcctccaaaaagagaaggctagactcctggttatgccaccttctgaacaaa

SEQ ID NO: 261003 - DNA, 454 bp, Glycine max
actcagcttagcttcttaagatctctaagattcttctcgtgtgtgaccttatcttgagaggggtatgtgtagctaagctttagcttctcaaggaagttctctcacagaagcttctcaaggaagttttctcaagaaagcttctaaaggaagatacctaatgagagtcttgtgagacacaactcacagttcaacttctctctctttttcttccttcaatttcaggctcccccctctctctttttctctctcattcttttccttcattgaagcatcctctccaagcttcttatccaaggctcatcttggtggtgaaactccttcttccatggcttattccttaatggatggcgcctcctctcacctcttttcctttgtcttccgctgcatctccatggtggaaaatcatcattaaaggatctcattgaagctcaaagattcagcctccatagaagcc

SEQ ID NO: 261004 - DNA, 434 bp, Glycine max
  unsure (1)..(434): unsure at all n locations
ggcttatctctatctgagtttactctatcatntatcggcgaaacagatgcctcaggcccaggaattggtgttgttttgtctcaaaatggtcatccaactgctttcttctctaagaagctttcttctcgtatgcagaagtaatcaacttatgttcgtgagttgtatgccattactaaagcacgggctaagtttccgcattacctttttggccattatttcatcatccggacaaaccatcgtagtctcaagcacatttcggaccaaatcattcaaacaccagagcaagagtcctttgtacctaagcttcttggcttcaacttctcgattgagtataaacctggacccactaatcaagttgtcgatgctttatcacgatctttctatatggctctttccagccctcaagcaaaccttctagatgacatcaacgatgt

SEQ ID NO: 261005 - DNA, 416 bp, Glycine max
tagttatgttctgaggatatacgcgagttagactctgattaattcgccagcgcgaacgacgacgcacacgtgttgatgatcgaacgtcatatatatcgacagagggagaaattaacactccttcatgttaggattagtgggacggcggtgccaactaacgaacttaattagcgaagttgctatgacaagtcttgctcttaataatgtcaccttttcgtaccaaagcagtatagacagagacggaaaaaatatatatctactaatatgctgtttttgctgctctgttctcaatagaaatttctgaaatatgaacacacgttaaaagagtactaatatatacaaaatttaccaacagatattaaaaagaactacacaattattttatcgaattctctaccttttaatgtcttagtcga

SEQ ID NO: 261006 - DNA, 457 bp, Glycine max
  unsure (1)..(457): unsure at all n locations
tgtaatgcgaaccaagaagaatgaaatgaacagaagacgctgttgggattatcgtctacgggccttaaacagagaaacgaatcaaggacctaaaaagggattattaaagaggttaaaaaaacggaaattgttaaacaagaataacataataacagtattttacttgagtcataacataatttcttttatatttattatttgataatcgatacacattataagtatttagttttactatttatanttgttactagatataaaacttatacggaatatacgcgttaaccgtaaaaatcataaaaatgtctttcgatagataattatattttcatgctagattttattgacaaatacgatttntttttatcatgaatcataaacattaatatttgattgtaaagtttttttatcaaatatataattttcaacttaagataattgtttatatgttgacaaa

SEQ ID NO: 261007 - DNA, 446 bp, Glycine max
ttgatgggccaagccatggaggtactcaacactcccttgccttatctaaggcaattgtcaatcttctattccactccagtggttctagtccttcctctggccagtcaaaaagatgcctactcaacgttccctgaggcatgtactcgtacacaagaagcttctcattcccatccaagcagtaaccaagaagggaaacaagatgccggtggcgaaccttagtcaaaacagcaatttcggacttgaattctgccgcacccttcccagctattgccccacactccattcttttcaccgcaattcttgtaccatcatggagttcacctctataaaccgttccaaaacctccttgtcccagaacattcttctcactgaaattgtcagtgacattcttcagaacttgtatggaaatgaccatatttcctgcttcaaccatttgaatatcacta

SEQ ID NO: 261008 - DNA, 418 bp, Glycine max
  unsure (1)..(418): unsure at all n locations
ngcatgctcatgaacacagttttgatattatttggaagccttacatgnagacattntttaagggtgataaccaagctctaataacttttgaacggttgaacctgcattattttgtaacgagtttgatgttacaactctaaaattagctttgttagtgtatatatatatttaaagtgcggggggacagcccaggcatgctcgtatgcccactcataattatgggataacatgtagcttctttgattcatatttttctgtattctgtttaacaagtttcctatcctttctaacggacaatgaataaaaagaacacaagttttaaagtggtcccttactcctctgcactctcagatgtcaaaactcaacctttccaaggaaaagaacatgcatagaactaggatgtacaaaatctgctaca

SEQ ID NO: 261009 - DNA, 457 bp, Glycine max
agatagatctaggatggacaccgcggtcgacaggactattgcctctctcgagttctacgaccatcagttcatgagcgctgagtaccaccaccctttcaaagacattaaaggatggtgcttccaccgatagagacgcgttctgctcatggacaaggattacacaaatttatacgaggagataactcgtatgcgtgggacgtagctggttactcccatggactagtttgatccgaatatatacttagagttttatgccaatgcttggcccacagaggagggtgtgctgtacatgctgtcatgggtaatgggccagtggattccttttgatgcacacgccctcactcagttcctgggatacccgctagtgttggaggagggccaggagtgggagtatattcttagaacgaaccgggccgatggatttgacaaggagggcattgtccagctgctatgcata

SEQ ID NO: 261010 - DNA, 111 bp, Glycine max
caaactgccagtttttttattttttttcggacttgccctgcctctgtcagaaaaacctcaatgatttgtgggatagatctgtcccaataattcttggaatatgcgaacctt

SEQ ID NO: 261011 - DNA, 347 bp, Glycine max
cctctagaagaacactctgctctgcgtcctcatgaagataacgaagggccaaagctaccccatatgctaccttgtacctgtgaagagaattgagaatataaaagagaattaagaataatcgtgaataataatgtttaatttcactagcataagctaattccatcacaagagactgaactgtatatacaaagcccataaaaaaaaaaaactacgaaaacaatggtcaccctattcggataaccctccttataagcactctaatatatatataaaataattcttttgcataagggcaagttaagttatgcataagttaaaattgtctttgtatttgcattcactggtag

SEQ ID NO: 261012 - DNA, 376 bp, Glycine max
gtaaaactaccatagcaactactacagttgtgacaatcttgaagaacgacacaagcttttaactttaaatactggactgaactactcgattaagcccactaaaactaacttgcatcttccaagaagccttatacatgtatcttgataaccttgcattctacatatccctgcaaccgaatgcttattctatatttattcggctcaacctctattattctctgttcgcggatagtgaatctactaataaacatattacaaactcaaatagtttgattgatgaacttgaactactacggagtgttttttcatttcctttcgaaatctgcgagttgattttactaccatcctctactagacttacttactatttcaaatg

SEQ ID NO: 261013 - DNA, 398 bp, Glycine max
  unsure (1)..(398): unsure at all n locations
actcaagccttctcacacgtcctaaatgacactntaatgcttgattaactttctttatcctccaattaccactaacccggaatgtagcctttcaatccctcaaaccgcacactgttccactcacatcactaccattctcactttaagcctaggtgaacttgtcccttcatctctaccagttttccatcagcaatgttagcacacaaacatgccaaagcagtcgtataaaaccctaaaacataatgggtaagtttggctcacttaaacatgacaagtttagcaggctttcaacaaattccttcacaaataactaccataagggatgaaactaggagaactacccattatatttcccaaaaacccaatacccacgaaatctatgtgagaagaagtctacc

SEQ ID NO: 261014 - DNA, 432 bp, Glycine max
ctgagctgttgattgaatcttatttggcggtataggaatttgttggcgcggggctgttggagatggtaccagcacacggaatctctggttccttcgttcacttttgttgtacaaattatgcaaaggaaaaaaaaagaaaaaatatttatactgccggaagactttgtcaccttttccttattttatctttcattagccatccttttatttctatctctctatcagatgtgtacagatcatcactactgaatgaagactctacttttggatattggctctgccttgcttagacctcttcgctcaatgcctctttaatttcgtataataagtgatgctgctgattttggtttaacggttatcttatgcttctaatgggcgtatgaaaaaaggatactattatgtgtttcgtaagtagtgaaaataaggctttac

SEQ ID NO: 261015 - DNA, 454 bp, Glycine max
  unsure (1)..(454): unsure at all n locations
tcagcaatgattgctcagttctgagggtggtcaatntatattgtgcatataagaggattaagtctctcgttaacatatttggtcagatacattttcatgcaatgattaagtttcattagggaatagacattgccacaagttcctttgatgtctagaaggaacaaagacacagatttctcaattctggaggattcaaacctttgcacgtataaaatcatattaaatgctcattgaaaatcaagattttcaagcctgaaggtccctgtagcaaaactggtccactagacactagttcttgttttgaacataaactaccctgaaagttcaaaaaagaatttatgcaaacatataattagtcaatatgcttttacgagactgaaactttgcttcttattgctttaacttcttagttagatactacaattagaaacggaatttgaaccctaattgagtg

SEQ ID NO: 261016 - DNA, 339 bp, Glycine max
aaaggtagacagaacatgagaggcgggcattttatggatttatggtgccccacatatcttatgacacacatgcccatacccactcggaatttaatgcagaactggcatgcatgcgcctatgcggatctcaagtgcaaatgctatggtcatgtaatgttctcgttaaggcggggcgaaaaagacgctatcgcacgcgattttggttggtaatcaaagggagaagaccatattaggccgcggatccttaccctcttttgtcatttggagacaatctgtattgtcagatattgtcggccaaagacctcttgacatacttacgtgtccttcatcctgatagga

SEQ ID NO: 261017 - DNA, 408 bp, Glycine max
cttcttgtgtcatagatggtttataaaatctgaacatgcttttttatgtgcaattatataatcatttatttgatttacttaaaagggatgttctaaaagatgttggcagaatggaagaagcaatccaatgctataatgtatgttctttccttatcctggggccttacaaaacatatatagtattagaacctctgaccaagtggtctaattggttcatgatcagttacaatgaaacaattattggtgttaaagtatttgattatcttgttctattaggctcaaaaagtaatacatgttcaaatatgttcttgttatccaatacaatgaaccgaaaacatattagcgtgtagaaatctaaagtaccggaaatcttatggaatgatattttaaatcataaattctggactg

SEQ ID NO: 261018 - DNA, 469 bp, Glycine max
  unsure (1)..(469): unsure at all n locations
tatagaatactaagcttctaacctcattggggtaggggtaccactatcaatgctgtttattgccttgacataattcctattgcaatctctcaatcccatacccacaccaaaagttggagtaggggtaccactatcagtgttggtcattgccttggcaaatttcccattgcaatctctcgagcacatacccacgccaaaagaatntgtctgagttttttaatccctaaggatatctttcacaaagaaatttacattagttgttatactgcacaatattttacacttctttgtaatttcatataattttttttattctaaacaactcagtgaaacaatttctctaaccaaataacttaaagaaagtgtcgctagcaatntgcttatttagttatttcctaataacattagagtgagagtttacataaataactcaccgatcatataattaagaaaacaagaaagatcaaag

SEQ ID NO: 261019 - DNA, 459 bp, Glycine max
ctaagctttgcggctgacgacctatataacaaccctatgtgtttagtttatggctatcttctggagaggagaataattctagggttttagaattctagtttttactgttcatgtgcactgttcacgttaaataaaattcgttttctgcaatttcgtttctgcttcttaatggaaggctaagtctccagtgttgttttctcttgaggatcagcacaacgctcttggaggttttgttattactattgaattctgatcagtttttcctctccaccaattactctatatttgttgctattaatccatgcatgcttagtgcttgattaattgtctctacgcttaatttacgttcatgcttaatgatcagttcgttcatgattaattggtgtatgtgttgcttaatcacataatgacaaccttatcgttaattttgcttaataatttaatttagggttgtgtcat

SEQ ID NO: 261020 - DNA, 456 bp, Glycine max
tgcacacaagatacgccttgcctgacacttcataaccttcttgttgggtcatatagatgatctcctctaattccccatgcaagaatgcaatcttaacatctaactgctccaagtgaagattctctgcagctacaatactcagaataactctgatggtagtcatctttacaactggagagaagatctctgtgaaatcaattcgttgtttctgctgacaagtctcgccttgtatcttcttttaccgtcagattcttcccttagcctatagacccacttattctgtaaagctttctttccttctggaaatttaattaaagacgacgtcttattcttctgaagggatgccatctcatctttcattgctagctcccactcaatagagtcattcccttgcgtagccttactgaaacattttggctcaccagcatcagttaacaacaaataatgcaatgaaaa

SEQ ID NO: 261021 - DNA, 349 bp, Glycine max
cgaactgctctgcttattctttgtggagtcgctatttgtttacttggtgcatgctttttcagttattgtccatcccgcattgatttacataatgacctgttacccacatacattttaaagagcccttactttttaccctctattttataccatttcggcttcatgtcacaactggcatgtgcttcacacatctttttttatttatttaaaagctaattagactaaattttataaataaatcttgttaaaaaaatctaaaaaaaatattatacctgacaaagtccaccacctccttctgtttgttttcccttctactgagaaatagtttcaattagactctaaatttttt

SEQ ID NO: 261022 - DNA, 435 bp, Glycine max
cccaaaactcagcttgttacacgcggagatatacgtcatctttcgtactcactatatctgtcatactcacatttgagtcacgctgaccggcggaaatacccgagtggttagccgtataaacattcttcttgctatctgtaagacgaaaagcctgatagcatgcgaagactgacatcgtcttctgcgcccttcgtcaatcgcggccgacaagcccattgacacgcggagatttacgtcattttcggcgctcacaagatctgtcatattgacatttgagtcaccctgaccggcggagataccccagtggttatcccgataaacattcctttttgctgtctgtaagacgaaaagcctgatacatgcgaagactgacatcgtcttctgcgcacctccgcaatcgcggccgacaagcccgctgaccgccgagattatgta

SEQ ID NO: 261023 - DNA, 391 bp, Glycine max
  unsure (1)..(391): unsure at all n locations
agaacttaaaatatggttacccctattaatgacactaatgttcactttggttcctatacagaaaaagcttttgatttgtgtataatcatcttcaatgtcattttcaccatatattgccaattgcctgtataacaccatgacattaacaaggagttattgtggagtataggaactgtcacagaactaaaaattatagtatttctggtccttactatatcacactcatttaaaatttagaagaagatngaaaggacttatgcgaagtttatttggcttaagaaagtggcttatgacctttccataagcttccttttagctaatttcaatcaacttgacagtgaagcttatcaaaataagctctcatgtcatataagttcttgctaagaaaaga

SEQ ID NO: 261024 - DNA, 351 bp, Glycine max
  unsure (1)..(351): unsure at all n locations
atcaccgggaatcctgaaaacaccaatatgaaagacgaatataaaacacaattagaaatcaacaatgccaccaagcatagttgttgttgtttgcagaaaaatttacctggaagcatgtaaaatccattacacaattagaaatcaacaatgccaagtacagttgtttgcggaaaacattacctggcagcacgtaaaatacgacaccaagaggcttccactaatgctgctcttctagcctcgattgccttatgtgccgcttctctagctgccattttctctctcagcactcttgagtaatgtgggttanaantgttaagagtgtgagtaagcgtgaaatncataccatctact

SEQ ID NO: 261025 - DNA, 460 bp, Glycine max
  unsure (1)..(460): unsure at all n locations
nggtgtagtgttgaagacatttcgcgggtacaatttaagcttggtttagtgctgatgtatggtaatggtcgttgtanggaagacgctggtaatcgataagttcattgtgaccaaccggtgctacattgttgacttggctgcaaaagggtcagtggctattttctttcttttgtctgcttgatgcatagtgaaggtttggattaacacttgtttgattcaattcattgttcctaagttagacttttatgtccctttagattaacatttgtttatttattttgacgaattcaggtttggaggaagtagtttcatgttattagagttaacaatgttgaagattttgtaggaaatgattagttattataattagaattagaatggaggattgtgtacgaactaatttgttgttgtgattagaatggaggatttcaaggaaatgatttgttcttgtgattagaat

SEQ ID NO: 261026 - DNA, 471 bp, Glycine max
  unsure (1)..(471): unsure at all n locations
cactcagctnggaatgatgttggaaaaatgtgccatgatgacatgacatatgtatatttgtcattgccaaagttccgggcccatgaaactcagatcttgaagaggagtcacacggtttggtttgattgtgttttgcaggactaccctcggattggaccggctgttgctgaatcatgagaatttttacaattgatacatttgtaatctctcataaaaatacaatgttttaatttagtttttgttggcttgttttcttgaaattaaataataatcctctattttctgggataacaaggacttttgcttcttcagtatgttccaagttatattgcatatgcatctgttgatgtttgaactaatataaaagcccaaatttcaacgtacttgcattattatatatgttccatgataaagccatagatgttttatataggtaactgagactacaattacataaaaagaaaaaaagtg

SEQ ID NO: 261027 - DNA, 411 bp, Glycine max
gaagctccaatcagaaacacagctcttcccactagaaatacatttgaccacagcctcaaaatgaatctgaatatcaatcgcttgaacttcaagcacttgagcaagacgaatggcctttcagagcaccccacgattcaaccacaaaaagcatttggagctttacacgtttcttgacaatatcttgcgcgaaccacataaactctagaaattccgtaagaagccaccacacgtagctaaaccatactggatgcctgtctcaggatccatcactgttaagagccacccaccctttcaatggaagttgccacccaatagacacctcctctttctgcccaggagtctgcactagcatctaagccaactctactacctcactcattatttttaattatgtataaatattacataacc

SEQ ID NO: 261028 - DNA, 449 bp, Glycine max
tagaaggttcatcaagagagagaatctttttgtgagattctatatataggcctgcgttggagaagggaaagcaaaattcatcaaatttggcatgacgagtaatgtacatctgggatattgagatgtccaagcatcgaaaacctttgtgcatgctgctatatccaagaaagatacatggaataccctgtggtgataattgatgaggagcataacctcgcaaacagggataaaccccacaaccaaatggatgaaagtgagcataatttggagaaacatcatataagagctcaaaaggagaaataccttttaacaagggagtaggtaaccaatttataatataaacagcacagcagaaaacatcaatacaatacatagtgggcatgtgggaatgaaaaagcattgcaagacttgtctcggtaatgtggcgatgcttacgtttgcgcctacca

SEQ ID NO: 261029 - DNA, 405 bp, Glycine max
actaagcttgaatcggacctccgtgtgaaaagatatgaccttatgaatttcttgatatggttcgcggcttaatttcgagcgtatcgatatatgatgtgcctgaatcggacatccgagtgaaaatttatgaccatttaaatttgtccaaagctttcgttgctcaatttcaaccatctcaatatattatgcgcttgaatcggacatccgagtgaaaagtgatgaccatttgaatgtctccagatcttccgtggttcaatttccggactctccatatttgatgtgcttgaatctgacctcattgtgaaaagttctaaccatttgaatttttcagaggttccgttgtcaatttcgagcgtctcaatatttgatgtgcctgattctggcatccgagctaaaagttatgac

SEQ ID NO: 261030 - DNA, 457 bp, Glycine max
  unsure (1)..(457): unsure at all n locations
tcaccggatgacgccgatcgaacatttcctaaccgacgtttttctttatttgttcacggagtgaattgagaactcgttacgcgacatctgtcgngaagtagcgaccgatattcttcagccgacattgcacaattctttttagaaaagctcgctggtcgataatgggctttttacggcagagtaagacttcttgttttggtgttgcataaaaaagatacaatgtacttcggctaggtttttcgtgcgagttcaaccgacattttgtttcggccaggaaaacattatcccacctctgcaaaaaaaatatntgctaaccgtcttcatgcatatttcattcaacgattgaatagaaaactcaatagccgacaacggtcgtgaaatagttccgactgatatgtttcagccggcattgcgcatttcttctttataaaacgctcgctggcagattatgtttttt

SEQ ID NO: 261031 - DNA, 215 bp, Glycine max
ctggtttattttatcctttccttgcaaaattgcagctccgctgattctgggcttcttctttcaaacaagacaccgcgatcttggctctctcctgcaaatcaagaccttgaatcttatcttcatctttacaatgtaagataccgctaaatttgatccaccaaataaagtaccctgaattgtacatgagaaactgggcagaaggctactggtataac

SEQ ID NO: 261032 - DNA, 440 bp, Glycine max
  unsure (1)..(440): unsure at all n locations
tgtaggatcatggggtacccatcacatgtggtactaggtgttagtcgggcgatggtgcacaacgattctgcacatccacaaatcacatataacccaccatcccctgttgcccaccatcccctgttgcccacctccaactgagctcacgtactcccacgtagcccttatcctcgttcctctcaacaccgggtccccatcaatcctcccaagcttccacaacatccaggtaattccacatccaatcatcatggactaacaaaaccaagcaaaacagggcaaaggcagaaactctgcccaaaacacaactcaaaatcacagcttttcacatacaaatacccctgtaatatttccttcattccaattcgttaaccgttggatcgactcaaaaantttacgggaagtctgtagtacataagtctacattttgaccgctgggatct

SEQ ID NO: 261033 - DNA, 451 bp, Glycine max
acctatgaaactcaagcttctagctgccagaccacctttcacgaccactacccacactactcgccaaatggagcttccatggctgccttccatggcttctcgactaccttccactaccaccacccacactactcaccaaacggagcttccatggctgccagaccaccttccactaccacccacaataaccgccaaaccacctcgaattttctctcgttaccgatgaccgccttgaggccgccttggccaaagttgatgtggctcaacgccacctcgactcccaattggatgcacttcttcgaaaattgcctccgagaaccagccacccctactcttctccctccctgtagaccactcaacaacaacaacaacgccacccaccacactcctctccgtcttccttccctctgcagtcaccgccaccagtcgttccgataccgaccacgctact

SEQ ID NO: 261034 - DNA, 353 bp, Glycine max
  unsure (1)..(353): unsure at all n locations
aagctgactacaagccttacgtgaaaaaccatgatatcaccatatccttattgtatatcggagctctggaatcgttttgggaataagcgtggggggcatcgctccattgcacaatttgctttgctggctatgcttcatgatgaatctagggccatacttgatgtacattgaatattggttaaatgtcggacatgctgaatgaaatgttgntccttacacgctatacagtaataatctaatattccaaacaatatagataatcattacatttgagtgaatcagacttttattggcacaacaatgatgaacctctcggttctactctccatgtttaaatatcatactttactcct

SEQ ID NO: 261035 - DNA, 474 bp, Glycine max
  unsure (1)..(474): unsure at all n locations
actcaagctgggttcgaggtacttacccgttgaagatcgaagaacgatgattaacgaatgtataacgtcgaagaacggtcgaaaccttcgcgaaatttcttacggaaacgtttcggaagcgcctcggcttatattttcttcacggaaacaatttttccaagcaaattcgaaagagagagaagtgcctaaggggctaaacccttttcttcttcatttcctcccctatttatagcaaaataggggagatggttgccgcccagctcgcccaggcgagccaggttgcttcctccagaagcaacagccttctggaggaatcttctggagggcccaagtgggcctggttgctatttgcaccccatttttactaagtacaccccctctgctntttttggtgaattctttttcgtanagttagggaaacttacgaatttcgtaacgatactggtnttctttccgtaatgttacggaaccttg

SEQ ID NO: 261036 - DNA, 431 bp, Glycine max
tcatacattcatggatcgcgatcttattatcacattcaatctttcaaagcatagtgttcttggaaaatgtggttgatgtttggaatgatttgaaggagagattctctcaaggagaccttatcagaatttctgaacttcaacaagagatatatggcctcaggcaaggttccttctctgtcactgaatattattctgagttaacaatactttgggaagaactttaaacatatatgcgtattccatgttgttcctgtaccattaaatgcacctgtgctgcaatgagaaatgccagacattctcatactcttaattatgctataagatttttgactggtttgaatgagaattcttcagtagtgaaatctcagatcctactaatggatccactgcctagtatgaacaaaatttcttctatggtcattcaacatgaa

SEQ ID NO: 261037 - DNA, 407 bp, Glycine max
  unsure (1)..(407): unsure at all n locations
tatacaaaccctattatattcactattacaatgtaataccttgctttctacctcctgctaacaaagtttttnctttataatacggctctggactgatgtataaacttaatctggatcaattcgtctttggtgcaggtcatgaggtttgtgagaagccggctgtggtatgttacaacacaaacatgattatctactttacaacacagcttcacatgctattgatcaaagcagctaacaccctcactaacttctgtggaactgcaagcttgacaccatcgcttggtgctttcattgctgattcttatgccggaaagctctggactgtcacccttgcctccattatatatcacataggtaagaccctcccctaactctttcttgtgttgaactgaattgacagagtatta

SEQ ID NO: 261038 - DNA, 364 bp, Glycine max
taatgactcctctgcggcctccacataacgcatagaggatgggcagctcaccaaaatgtcttcctcacctgacacgatgaccaaatgcccctccactactaatttcaactcttggtggagtgtacagggcacaactcccactgagtggatccacggatgccccaacagacagctgtagggggggttaatatccattatttggaaggtgacttgacaagggtgagggcctatttgtactgggagatcgatctctcccctaacctctctgcgggcgtcctttaatgcactaaccaccattgaactcggctttaagtgggacacattgaatggtaattcctccaacgagctcttaggcctcacgctt

SEQ ID NO: 261039 - DNA, 430 bp, Glycine max
  unsure (1)..(430): unsure at all n locations
gggtgaatatactctacctttatacagatcactgttgcctttttaaatacatgcaactcggaagttaacataataaccactacattgaagttaatatgataaccactacatgccactacatgctataataaccactacattaactacttctagaatgataactgccataagtgggaccggagattggcatccaagagggggtcgaaggagagtgtctggtgcttgttaaccagaatgtgggaagctgccatgggaagggaaggtggcgtggtttctgctgttggtggaagtggcttgcgttctactggtgatggtggcttaacaaacgaagacaatgggttggttaccttgggaagcacacgcggcatgggtggngactttgtagaggcagacaatggagaaggttgtctgggtaccatggtattcaata

SEQ ID NO: 261040 - DNA, 263 bp, Glycine max
agaccgggagagggcaacagccccccgactccaccggaaatgcgaatggcaaatgccccgattaccaacagccaacgcaacctcacagttcaaaagcctatagtgggcccagcctacagatccccctcgtacgcctgcgcttcgccttaaataaatacaggagcatctcaaccggcctgcctgaccccacaaggaacagacctttcaacatactaaacgcagaccacgcgagcccccaagacaaaacctgggccccctccgcc

SEQ ID NO: 261041 - DNA, 365 bp, Glycine max
ctgcttatatggcagggatgtcttacttcattttctagtctccaacgcgagccttgaccactggttttgcctcctgtgagcctctattatgtccgcctgaatgggcttatattctaaatcatacttcccaccaaattcctgggtttttattaagctagttatgcccgcattggctttgcctaaacccattccgggttcataacccgtcccccacataactacggccatcattaccgctgatccgacatacaaaggttgccaaagaaggagtcccggaggaaatgccgaccaccttaaagactggaatgcggctcctacgattcttttgcggttccacatcaggcatggaggatggcaagttacca

SEQ ID NO: 261042 - DNA, 441 bp, Glycine max
  unsure (1)..(441): unsure at all n locations
gtctctctctataatgggttgtcgctggtattccataccgtcacaatattattatcttgagtgatgatacctctagaaaacagccatgtgagatatggatcgttgggagtagttattagagacccctagatattatcatgtagtcctaaatgtcatgtacgactttgcttgtaattatttgtggatattgtcgtactatgtgcatccccgtgttatgcttttgcacgtctacatcatgtcatcacacacacgttgtatgttggtctcgtcttttgtcatgggaagccagaaggtccatatcaccttcttaactacacacatggggcattgcatccctgaatgcgcaagtaagaagagataattnttcgggctctcgtgtccgtaaatgcattcatatcatgcataacataagcatcttctcatggcatcataatgaacata

SEQ ID NO: 261043 - DNA, 423 bp, Glycine max
  unsure (1)..(423): unsure at all n locations
tttgtaatcttcaagtcggagacctagcatgatnctctagattcactctcccgctcccttatgttncccatgaaccacgggtatcagggccctctttcaactcacagcgtgtgcacatagggttggtggttgtgtgcatcaaatgaataaatatttaccctatgcatacacttcataatgcactaaaagccacaaagagtttatatacataacaacataatgaagggaaacccacaaacggataagccatgggtaaacattgcacacgattaaaatggctaactctctaaaacaatcccacgggaggcgcaaatgttcaacctacccttcggcggagggcgacccagactcgcggatgcctctccaccaaagaaacgcgcggagtcccccaactgttactgatgaaacgtcggaaaaccgacg

SEQ ID NO: 261044 - DNA, 289 bp, Glycine max
tttggcctctctagtgtgctgagaaacttttctatttcatctcccctccagtaggcctccggatcatcctttcctttaaatggaggaatgttgagtttaataccatcaattcggttttgtctaagaacaccatcattccctctcctcctcctttcttcttcattatgatctctattctccatctgatccaacctctcatggagcgcatcatctcgttgtttcattaaacctctccaaatgttgcatcaaagcttgcatttggaaatgcgaaagccccactccatcatta

SEQ ID NO: 261045 - DNA, 371 bp, Glycine max
gatctctaagtcatctgaggcatgcaagcttctgttatgaatttcgagtgtctcgatatactacaggacttaatcggacattcgagtaaaaagttattgacattcgaatccgctcataacattcgttgtcaattacgagcgtctagatatattaaagggattcattcggacatccgagtaaaaagttattatctttttattttgctcagagcttctggtttcaatttcgagcatctcgatatattacaggactcaatcggatatccgagtcaaaagttattggtcgttggatttgctacgagctctcggtttcaattacgagcgtcttaatatgctacgggacacaatcggacatccgagaaaaagttatt

SEQ ID NO: 261046 - DNA, 351 bp, Glycine max
  unsure (1)..(351): unsure at all n locations
gccttcgctgaccttctntatgcttaattacagaaacattaggcataggcaaaagatcaagaggagttagtgggttaaaaccataaacaacttcaaaaggagaacaattagtggtgctatgaacagctctattgtaagcaaattcaacatggggtaaacaagcttcccaagtttttaagttcttcctcaaaactgtcctaagcaaagttcccaaagtcctattaacaacttccgtttgcccatcggtttgtgggtgacaagtggttgaaaataacaatntagtgcccaactngctccacaaagtcctccaaaaatggcttaggaacctagagtccctatcactaacaatgc

SEQ ID NO: 261047 - DNA, 434 bp, Glycine max
agctctaagaataggtatgcgtatgccgatgatttagctagattctatggttcacacatcggaagctggcttaggaaacagtacccacagcacagtataacctttgacgtttatgcaattgacgctgataaagcattccatgaagagtatagggcaaagagaggggtcacattgttgccctatgcagcatgggtgaggaatgagacactgctctttgacatcaccacagacccaagcaagaaggtgatgatcacagggagaggcgagagggatggggaggattccccctggcacacctcttctactctacggctaccacgaccagattccggttccactctcccaacggtcacggctgtccccctcttagtaccccgctctccccccaacacctccacccctcctcccttccctccctctctccccaccctccc

SEQ ID NO: 261048 - DNA, 266 bp, Glycine max
tgcatatatagctacagacgtcttgtaattgatacatacgaacatttgtgggccatttcatacactttcatggaatggtcaacaatattttatatcattcatagacgattactccaaatatacatacttgtttcttatatatgaaaagtcacaatatctggatgtgtttaaaacatttaaacttgaagttgaaaatcaactcacacaaaaataaagagtgtcagatttgaccgtggcggtaaatactatgacagatatgacaattc

SEQ ID NO: 261049 - DNA, 413 bp, Glycine max
cagcttttacaggaaacaaaatcaccccgtaactttttcctatatatatgaatcaaactgagaccaacacttctgcagcttcaacaaaaactcttaacttcctcttttacagacccaagccgaaatgatcctcaaggccacaccaaagtttagcatgagaacatttacagatatcattgcccgctgtgttcgattaccggtgttgcaacgtacataacccaacgaagacccaaaccacaaagttgctcacattattattgattaaatgaaatggctcataccaccgacaaaccaagaaaaagaccaagaaaagactttacgacagtctaacgctcttctggcattatttgataagtgtgatatttatattttctttattagaaacgcctataaattcattacaatctattgaa

SEQ ID NO: 261050 - DNA, 301 bp, Glycine max
  unsure (1)..(301): unsure at all n locations
gaatgctgtagttctcgtctctatcttagtgcactaaatttagtagatgctcatgattttcttattctattcccctatgctatacataaacatatcagtgatatttttatgtgtaacgttctagtgttcttctgcttccaaatttaaaagttctttgacaaaaaagactgaaggaatgagtcattagccgaaaatccgatgcttccagggctcagcatcaagtccattggaaaaggttcttgacctgcagatgatgggtgctttgtgtcatgaagtgagtttgcgaaacttgctganttag

SEQ ID NO: 261051 - DNA, 105 bp, Glycine max
  unsure (1)..(105): unsure at all n locations
agcttgataaagaattatcagagttggatgagtcttttgcagacttgagactggaagatggaatcanaaactctgtcattcagtcgcagcatagaagttgaagca

SEQ ID NO: 261052 - DNA, 395 bp, Glycine max
  unsure (1)..(395): unsure at all n locations
aagcttattgtatgcgatttaccaccacacatgatcacaaaattcatgtttatctagtttatcaccacctaacagattttgtttctcaagttcatgtaatcctctttcactaacatgacctaatctcaaatgccagagttttgttttatcaatcaatgtattactagctaccgatgcatgtccaataatagtggaaccttcaagaataaacaagccattacttntattcttgttacccttagctatgattaaagatccatttgaaatcttaagaacaccatttggaattctagttgcatatcctagatcatcaaacatgtttatggaaataagattccttttgagcttttgaatgtaccttacatctttcagtagatactctctggtatcaaaca

SEQ ID NO: 261053 - DNA, 328 bp, Glycine max
  unsure (1)..(328): unsure at all n locations
agctntgagcacacgcacgcggcctctccaacattttataggtctataaatatatgactactactacgcttgggagcctatggaatgctctgtagaattatggaatttgaacagtggactagatacatatttgcatggtagggtagctgatcatgtattggtgactgtagcctatatgcttattatagacactctgttcatgaatggtgttgatgatttatgctcctcgcattagaagcatacacgtgctgggatgataatgatgtctgatataaagatctgcactcgatatgtttgaagaagatccttggagctacaatgttattaa

SEQ ID NO: 261054 - DNA, 100 bp, Glycine max
actcaagcttcaccttctggtcctcctcatagtgttgcatgagacaacattctctattttcatctgccactccaagtatgcctccggatcattctttcct

SEQ ID NO: 261055 - DNA, 347 bp, Glycine max
  unsure (1)..(347): unsure at all n locations
ttaaccactaacagtttatacctgataagattgtaagacaattgctcacgaaaatatagtgctcctatataagctaaatccccaagtaatataactggttgcatatcaagtgaaaaacagtaagatggaaactttggaacccagctaccccatgtatgcattatgactcttaatgggtatgaaaaaacacagcaaanaaactggctcagttactcaagtgaggtaggcttggtgactagaaattacatatctcacatagccatcacagcagttcaacattgatgtacgcaagacaaagcattctcagaatgtgaacatacccacattaacgtacatgatcaacaaaa

SEQ ID NO: 261056 - DNA, 255 bp, Glycine max
  unsure (1)..(255): unsure at all n locations
tcaatcatattcaaattgatggtagcttgcttgtgtggcttctatggaggttggatctntgagcttcaatgaggtcctttaatggtgattttccaccatggagatgcagcggaagacaaaggagaagaggaggcgccatccactatggaataagccattgaagaaggagtttcacactacaacacatctgttaaataatggaggttatttattcgtttagtggagggttttaccctccgcaaaatatattacgga

SEQ ID NO: 261057 - DNA, 253 bp, Glycine max
agcttggagtgacatttatagagattctcgaatttatgggcgtcgctatacgttgtaacttcataatatattagatataacataggtgtgagtttgctaagtctattacttgacgtgtcaaggaatctgtacttacactatataaatggtctaatgtgtaattcacttctttttcaataatattcatctcatcattcttgagcgcgcgtgattccctagcttttctccttttctccaacaatcttaaatgaat

SEQ ID NO: 261058 - DNA, 305 bp, Glycine max
  unsure (1)..(305): unsure at all n locations
tcacagttcaatttgagcgtctctgtaatattacgggactcaatcagacatccgagtaaaaattcattgtcgtttggattggctcagagattcaacattcaatttcgagcgtctcaatatattacgggactcattcagacatccgagtaaaaagttattgccgtctgaattctctcagagcttcaacaatcaatttcgagcgtgtcgatatattacgggactcaatcagacatccgagctaaaagttaatagtcgttgaattggattaaacttncacattcaatttcgagcgtcttgatatatta

SEQ ID NO: 261059 - DNA, 321 bp, Glycine max
  unsure (1)..(321): unsure at all n locations
agctttctgttttctacaagcaacttaaccttttttntattcttattgcgcatatgctattccttcgtggattctcaacatctccgttaccattgtggacgtcgctgtttgggtattcctcacctactatgtcattggatttgatccacacgttgggacgcaaacaaactactttaaacatttaggagcatgcgaatgttgttgcttctactaatatgcctgctacttatgatgtgacttcttgaattatgcgcaggctcttcaccccgtacctcgtgctattaattgctagccagacggcttcgggactattcctaagta

SEQ ID NO: 261060 - DNA, 110 bp, Glycine max
  unsure (1)..(110): unsure at all n locations
agctcttcgatatattatgcgtctgatatcggactttcgntagagaaganatgagcatccgatcttgtgcacagcacgcgaagcacacttttgagcatctcaatatgtca

SEQ ID NO: 261061 - DNA, 123 bp, Glycine max
gacactatgaatctcagcttctcatagtatatgcgcctgttcggactttcggtgacatgttatgaccatttgaatatctccagagcttccgttgttcaattccgagcgactcgctatattacg

SEQ ID NO: 261062 - DNA, 391 bp, Glycine max
  unsure (1)..(391): unsure at all n locations
aagcttacatgagaatttttatattataanagctatgggaaggagacacacgatgacaccgatgcttaaccaatattctcactactgttcctcttatgcccattgcttgggtttctatttatgaggaaggaaaaaaaaatataaatcctaatctcatatgacctaaagataagacataataaaatcttaatccaaatagaacaaactcatcttaataaaatagaatctccatcctaataaaggaaatagcctcaaagataagaccagaaaacatatcataatgatatcaactctaaatctcaataatccatacaataaatattagatacatgaatatatcttcaactatcttttgataaacctcactcataaactctctagaaatctactt

SEQ ID NO: 261063 - DNA, 367 bp, Glycine max
agcttggaatatccagtggattgatctcacactaatgtctgtcggtgaggatggactttgactataaccaactctccaatcacaaactgtacatctttatgttcggtgtctcgccagcgcttcatacttgtttgacaattctccagtttcttcttgatttcaccgaaaactgctgttatatcaatgagcatttcatcaaccactttgatgttagaggcgctagccaaatatcgcgaaaaattgaaaggctttttgccaaaagtgatttcgtaaggggaaactcccgaacccgagtgccaagacgtgttatatgaccacctacaccagtgtaatgattctcctcaagacgaacgctccttatgaacaa

SEQ ID NO: 261064 - DNA, 67 bp, Glycine max
gcactacatacatggttgcaaaagagttttctaatatatcaattggcaacactaaaatttttttgct

SEQ ID NO: 261065 - DNA, 194 bp, Glycine max
agctgcagcttttgcacactttcgttacgtgaaatcaagaggaccgtaggggttgaataacagactgggaaaatcgaaaggggtttgctttgtttgttacaagtctccagaaggggccaaggctgcgttgatagatccaatgaagacttgggaagggaggcagttgagtcgtagttggcgactactgatgggaa

SEQ ID NO: 261066 - DNA, 361 bp, Glycine max
ctctctcaattgcacaaggccttaatatttgaagagtattcttgtggaaccttcacccgacgaagacactgacaaaaacttatcttctccttcttggacaaagtatggcacgctgggggcaagtgaattatcttcccatcagaccttggatgcaactgtgatcttatacccatatcagctagatcttgacgggtattcaagccatccttcgtcttgccttgaatgttaaggagcgtcccaatcacactgtcacaaacatatttctccacatgcataacatcaatacaatgtctaacgtctagatcacaccagtccggaagatcaaagaaaatggacctcttcttccatatgcaactctgac

SEQ ID NO: 261067 - DNA, 459 bp, Glycine max
agcttgacccttacgagtcagtttagtcaaaggtatagccatcttggagaaaccttctatgaatcttcggtaatatcttgctaaacctagaaaactcttaatctcaaaaacagacttaggactctcccacttaagaacaacttctatcttagagggatccacagctatacccccttgagatatcacatgccctaggaaactaactttctctaaccagaactcacacttggactacttagcatagagttgtcggtccttaagggtatgcaacacaatcctcaaatgttcttcatgttcctctctagtcttggagtataccaaaatattcgttatcaatactaccacaaaactatcaaggtaaggatgaaaaactctattcatgtagtccatacagactcctggagcattagtcacaccaaagggcatgactagatactcatagtgactgtaacgcggtct

SEQ ID NO: 261068 - DNA, 123 bp, Glycine max
gctcgcccaaacgagtaggctgcttactacagtgtccaccggctcatggaggaatatgctggaatgccccagaaggccaggttactatctgaaccacaatttttacggaagtcagcccctgac

SEQ ID NO: 261069 - DNA, 321 bp, Glycine max
agcttgtaagttgtaatatttgacgaatctttactgcctaaatgtcctactaagtttattacattcagattgagttgtgcttgattttattatgaggtccaagaagttaacaaaaatatattctacactcaatgattctatcatggcgcgccataattcttttttgttatcaacatacaagtgagtatgacctcaattctaaccaaaattatggaacttaatacaccaagagaggggcgaattggttttcaaattaaaacactcttttaaaaccagagttacaattctttttgtatgaatcgtatcacaaaactttccatg

SEQ ID NO: 261070 - DNA, 335 bp, Glycine max
gagtgaatgctaatggtcaatctctaaagatcctcaggattaacctgaccacactctctcagacttaaagtgttctctcttactccaacttggtccctacctcccacacttctaacatcacactggaatgggccaaagttgatttatggcattatcatgaagatggacatgaatctgggctacctcatctgccaccagatttctatcattgcctagcacgactcctttaggcttggatttccagccttaatcccagctgtgtgtaaagctagaggagtcacatcagattctagacctctggagagtattagccctgccattaacatggcatatat

SEQ ID NO: 261071 - DNA, 290 bp, Glycine max
agcttcatgatgaatcaagattgattcaaagagttttgatgattatcaagatgatggcaacaagctcaaaagtcaagaacaccttatgataacaaagatgatgatctccagaatccaagaatgagttccagattgaagaggaaatatgatttcaagaatcacgaatccattctcaggattcaagtttcccgcctccagatcaagattcaagactaaagattccagaatcaagagaagactcaatcaagattagtattaaaaagtttttcaaaaactgagtagcacatgaa

SEQ ID NO: 261072 - DNA, 353 bp, Glycine max
  unsure (1)..(353): unsure at all n locations
gtaagaagatttcctagtttatcataacatattactatttggttaaccaatctatatactttattgctaacttagaaattggtctgaaaatcagtttcctagaagttataaatattntaaaattaaaaaaaatggtataatcatataaatatgaactaaaaaaacatattttctccattttgaaataattatagataaatgttaacaacacactattacttgatgaatttcctacaacttntaataacaataatataaaaaagagctggcctaagctttctagtggaactcaagagattcacctattaataaagagctcgatgaaaagtgtgcatgaaagaatggttatcata

SEQ ID NO: 261073 - DNA, 420 bp, Glycine max
tattgaatcttacttgcggtgcaccacactcgatggtggacgatgcatgaatagcgctacgcaatacatccatggctcttcaaatcacattcgagggtggcagatatacgaacaatgctcagccactcacttcgcggggctccgaaatagatcggagagtggatgatagaccaaacacggctatgcactcacttcctggagctaccgacttgatggtcgaggacgcatgaactccgctaggcaatcactcatgcgtctcccaataacatttgacggcggatgatcaacgaacaacgcctacgcaatccattctgtggcgctccacacctgatcggtggcgacccatcacccccccttgccatccattcatgcgtctcaaatagatttgaggcgacgactaccaccctgcacgcatcaccg

SEQ ID NO: 261074 - DNA, 162 bp, Glycine max
tgcgcgcataaaccaccatgccctgttgtccacctccaactgagctctcgtactcccacgtagcccatatcctcgtttctctcaacaccgggtccccatcaatcctctcaagcgttcacaacatccaagcaaaacatcattcaaccagcacaagctatcaca

SEQ ID NO: 261075 - DNA, 435 bp, Glycine max
  unsure (1)..(435): unsure at all n locations
agcttgtaagataattgttacaatttttaaccactcacagnncatacctgataagattgtaagataattgttcaggacaatatagtgttcttatataggttaaatccccaagtaatataactggttgcatatcaagtgaaaaacagtaagatggaaactttggaacccagctaccccatgtatgcattatgactcttaatgggtatgaaaaaatacagcaaaaaaactggctcaattactcaagtgaggtaggcttggtgactagaaattacatatctcacatagccatcacagcagttcaacattgatgtaggcaagacaaagcattctcagaatgtgaacataccaacattaacgtacatgatcaacaaaatcccttgacgaaaacaaaataacacgaaagaaaatgtagtctcaccgacatccgatgctaac

SEQ ID NO: 261076 - DNA, 222 bp, Glycine max
ctcgtgggcttctatagaggttggatctttgagcttcaatgaggtcctctaatggcgatttttcaccgtggagatgcagcggaagacaaatgagaagaggaggcgccatccactatggaataagccattgaagaaggagtttcacactacaacaaatctgctaaataatggaggttatcttttcgtttagtggaggtttttaccctccgcagaataaattac

SEQ ID NO: 261077 - DNA, 108 bp, Glycine max
tgcaccgagctcgcccaggcgttcttagctcttccaggcattctacgttgctacatctattagcaaccaccttttggacgtacatgctagtatgcccaaatgagcctg

SEQ ID NO: 261078 - DNA, 460 bp, Glycine max
  unsure (1)..(460): unsure at all n locations
actaatatatacaaactaatttatttactataatcaaatactatctagtatgaatcnttatatccaacgctatcgagaaatcacgttatcacatagatagtgtgtattacaatcagaaatattcgataaaccacgctaacaataattacttacatgaactattgatacacacatattttctaacccacaaatgctaaatcgatggcaactgctcgcagcgaatacaggtgataagaacggcgaatgaggacgtgtatttaaacaccatctgacgccaaccttatttgggcatattcaaccctaaaacgctaaccccattctcgcttacagaccgaaagctgactcagtgatcctggctgacaaaactgctgcgggtatgacatagctggagtacttgctgtaaatgtacaagcccagttgactggtgcctttactatctcatgaaaacgcgccaatgctc

SEQ ID NO: 261079 - DNA, 406 bp, Glycine max
  unsure (1)..(406): unsure at all n locations
agcttcaagaaaaagatggcctcagtaaattccttatttgcggaagggaattctatcaatagacctccaatctttaatggagagggttaccactactggaaaacccgaatgcaaatttttatcgaggcaatagatctaaatatctgggaagccataaaaatagggccttatatacccaccacagtagaaagagtttcaatagatggtagttcatcaagtgaaagcataaccatagaaaaacctagagatagatggtctgaagaggatagaaaacgagtacaatacaacttanaagccaaaaacataataacatctgccctaggaatggatgaatatttcagggtttcaaatcgtaagaatgctaaggaaatgtgggacacttcttgattaacacatgaacgaacta

SEQ ID NO: 261080 - DNA, 352 bp, Glycine max
tgtaaatggctagacatgatacatgtcacggtttggtttagttcaaggataaaagggatgccccacattatttccatgacacatatgcaaaaatgatgatttggaaactttatgcaaaactggtcatgcatgcacctatgcagacactcaagtgtcaaatttttatggtcatgtgatgctagggctcaagattcatttcctctattgtagtcaacccaatgtttccaaaatatgttcttttatccatttgtgcattcatccaagtccatttcgggcgtccgggaaaatttcacagcattcacccttcaggtgtacacacattttttttccaaaaactagctatgatcagtga

SEQ ID NO: 261081 - DNA, 188 bp, Glycine max
  unsure (1)..(188): unsure at all n locations
nccctcccgcccccaccacaactttcaccctcgaagcctcatcaccgcctgctccctctctactcttattatcctcatcccgccgacgctccccccctcctacccaccactcactgctcattccattcctcccgccctgcacacctccctctctgccacctcaccacacctcctccgcacgccactcg

SEQ ID NO: 261082 - DNA, 496 bp, Glycine max
  unsure (1)..(496): unsure at all n locations
gggncgcggcggtgagccctgannncactgataccttagtagnnccncgcgcncactagagtngacctcgaggcatgcaagctcgctctaaatctcattgatgtttgtatatattgcgaggaggtgatgccacttttgtttaagagtagtgtcccccgggttaaactaagttttccaatgtttgcctctgcaagaaatggccccgaggaagctcgcctcaaagaggtccaagatagacaacgcagccgaaggaactaattcccgctcggagtatgaccgtcacccatatcagagtgctgtacaccaccaacgcttctatgccactatcgtacagactctcctctggacccagtctttccactaactcgctgagcaagccttcctagccaatcctccctctttccatatataccatctacccccccttccctctctccgccctccctcctctcgtgcctcacccattccgccctctgccgcccctcatgcttccccc

SEQ ID NO: 261083 - DNA, 408 bp, Glycine max
  unsure (1)..(408): unsure at all n locations
agcntttttgaaaacatcaacaatcttgccaaatgatgatctttctccttcttggaaggtaacacacgatatggtgctttcacaccttcgacccacactttttcacttctacctcttttgacaccttatctttctcttctcttgcatccttcttattgtccattaccactccttcttctaacccctcctttcttttattcggaacattaattatttctctttttcctgagatccttcaccccttccatcatttttcttaaatctactatttttcttttaaaccactctttcaatagacaccacactcttttattggatcaccactctgcaatcctccttggattactgtccgcattccgccacaaatattggaagacctgtcactatctgccgtggccatttcccccg

SEQ ID NO: 261084 - DNA, 454 bp, Glycine max
  unsure (1)..(454): unsure at all n locations
cgatgganaccntttgaanaagcnnattgataccccttgaannctttgataccctgcatnacggacacttaaactcaacttgtttgatcagtcactagtttcatagttataatttttgctcacattaacactaaagctgacgatttagaaacatctaattgcataactgggctgtgaaagacccaacctttacctattgtcgtcaatttaccactagcatttttactgctttaacctagacctagttaattctgttttaacgatcattaataatgtttctttcaaaatgccttatattgaatttacctattttattctaggtttctgagttgatactcggatgcatcgcttaaattttaatacttacgattggtgcgctttctaaaatcaggttccctgaaaatttttcaaaaaaaatggacccaaggaccgcagggaagccacaagtttttcg

SEQ ID NO: 261085 - DNA, 391 bp, Glycine max
  unsure (1)..(391): unsure at all n locations
agcttagcgggaccatanatttcagaaatttcactaactatgtgggcttcgtgagctaggcttgcttagcccaatggttgcagcaacaaaatgagcttagcccatataggctaggcttagtgcatggctttcaacaaaaaaattgactaatttatctgggcttagcgagtcagccccgcttagccacaggtatctcattaagaagatgaatgtttatccacaaaagatgaactcgcttagtgcagtagacgcgcttancgagtttgtctgaaaacgcaaatattcaagcaattntgatgaacccacttagtgcagcatgcgcacttagcgaatgcatcgcattttccagaaaaaatgcagaanacaaagttcgttttcttctctttttgag

SEQ ID NO: 261086 - DNA, 370 bp, Glycine max
  unsure (1)..(370): unsure at all n locations
ctcgacaacattcaagcaatttcaactccaaacatcatgaactatcaaaacccaagaaaacagagcaggggcagagaactctgcccaaaacacaaaccaataccacagcttttcttactcaaataccccagtaacattctcttcgttccaattccttcaccgttggatcgacttgaaaattttactggaggtccctggtacataattatacattttgaccgttgggatctgctagaaaacgtccagaacccaatatgtacaaccctttccacaaccagccatgcataagcattttctgcacaaacacaaaattctgctgcacacttgaataacanaattctgcttagaagtgcagattttcgaaatcact

SEQ ID NO: 261087 - DNA, 386 bp, Glycine max
agcttgtaggaatatggggtacccatcatatgtgtgtactacgtggcgaccgggcgatggtgcaaatcaactctcccacatccacaaatcacacatgaacccaccatccccagctgcccaccttgaactgagctcacgtatccgcatgtagcctttatcctcgttcctctcagcatcgggtccacatcaacccctccaagcttccacaatatccaagcaattcaatatccaaacatcatgaactatcctaaactaagaaaacagggcagaggcaaaaaactctgcccaaaacacattccaataccacaacttttcctactcaaataccccagtaacattctcttcgttccgattcgtaacgcgtggatcgactccacaagtttact

SEQ ID NO: 261088 - DNA, 413 bp, Glycine max
  unsure (1)..(413): unsure at all n locations
agctttgctgcnacatttatatagacccctcatcagcaaaacctacaacagcagaataattatgacctttcaagcaacatatacaatccaggttcgaggaatcatccaaatctaagatgggcaagtcctccataacaacaacagcctgtccctccttttcagaatgctgctggtccaagcaagccgtatgttcctcctccaatacagcagcagtcacaacaaagacaacaagcaattaaggctcctcctcaaccttccttagaagagttagtgaggcaaatgaccatccagaacatgcaatttcagcaagagacaagagcctccattcagagtctaacaaatcagtggggcagatggctactcagttgaaccaagctcagtcccaagattctgacaaatggccttcacaaact

SEQ ID NO: 261089 - DNA, 327 bp, Glycine max
agcttcatatatcatcaaacaaattatcttcgttatcgccttgtcatcaattcttatcgacaaaaagaacaaaaaaatgattctgacaaggagcccgtataaaacaagactaggtgcatggcatcatgttggcagtcatgtcatttgaatcataagccggggcattttagcattctaaaaagagaacatggataaggagacgtactaacctggagcgccgcaaattggagataagactacaccagcaccccaagaggaggagccacgctcttgaaaaacttcactccattcctccttgcaggaatcgtcctttcttccctcatcaca

SEQ ID NO: 261090 - DNA, 353 bp, Glycine max
gttcattattctgctgccgactgtagataatttgcagcagaatgcgggaaaattggatttcctgcgaagatgtatttcagtggttatattttttccgaccattcaatgcggtccagagtgcgggattccttttgtacaataagagttgtttttcaatatattacataaaattttgaatcttcattaacttgctaatcctaaaacttatttagcatgttcttcaatatgcatgaagttatcgggtatttctgtatttcatgttgcaatattctttatagtgctttgacttagtgcaatctattttgaattacagagataaacgagatggtaagcaaactgtaaagttgagatgc

SEQ ID NO: 261091 - DNA, 430 bp, Glycine max
  unsure (1)..(430): unsure at all n locations
aaaggttgtcgatctattcttacacacgaagccgacttctgtgcacactttccctaaatctctcgcgaagatttaacactgtggcgctctgattcagctatcgtcctactttggtgcgggcatattgaatggttctacctcagaaaccaccttttaacgctatgaaccaactcctcgtgtttttcggatcccaacttactttctcacgcaatttcttttggcttccaatgtcaaggcgttgtctacccgataaaagatggtatgtttcctataaaattaccttagggccgcggctactcacgccctgtgtttcnttgacagcatgcatttcttactcttcttcctattgaaacaaagacggatggttctcttttgcgactaacatacccatatgcactctctacctcgtacccctacgttgtctgcagcg

SEQ ID NO: 261092 - DNA, 498 bp, Glycine max
  unsure (1)..(498): unsure at all n locations
ctactgannccattgcatntanctgactctatacaatactcaagcttggtgctggctcgcttcgctgcaatgtgctgtgctaatgacttctngcttatacaaggctgttgttgcgtatgcgtccttgacacataatgagggtggcaagaatcctcatggcctcagcctaatagcaggtgctgacctatagttgttcacatgacgagtgcttaccagatgtccggagcaggtataattgctgtattgagcctatctctaagacatcaagacatgggtaactgtctaaccatatactaaggccataccttctgctcaattatcatggtcatgatgagaattgcaaagatgactcagctcatgtctacgtgaaggagtgtatactgcctgttctccatgacgagtatcacttgcaactcttgatgttgagatgagtgcgtaccccaactataggcggggaggtagacatttttgaattcttgtgaggagcctcatgttgac

SEQ ID NO: 261093 - DNA, 430 bp, Glycine max
  unsure (1)..(430): unsure at all n locations
catgcaagcttaaccagtcgcttctaatcataaactcaaatgctatgtatgtgaatcttgcggagcaggttatgcaactaataaatgtgctatgattcacaaggaaatgtagtacatgaacaatcaaaggcaagggaacttcaaaaactacaacaatcaaggttacaaacctcatccaagtataggtcaagagcaaggaagtaattctaatgccatgcccaggaaaaatctttatgaaaaatgtagtacatgaacaagaaaactaggaagagacccttactcagtttgtcctagtatctctttccaaccataagagtattgaagcctccatcaagaagttggaatntcaagttggttagcttgccaaccaattggttgagaggaactctataaaaatttctcagccaacactaaatcatatacacaaagc

SEQ ID NO: 261094 - DNA, 277 bp, Glycine max
  unsure (1)..(277): unsure at all n locations
cagctacgaaaagggacacagtaataatttntcattgaatcataaactctatgacaataaactattctcttatttatctgaatatatttctgtgaatatgtttagatattgaatgggattaatttgacattcatcttctgctatgtgtttaaaatgcaactgaaaccttaattanataggatcatcatcatgattatcctcaaaactatactattcatatattctcaataacttgctgatgtttcataattatgaccatatatttctctgcattgtt

SEQ ID NO: 261095 - DNA, 333 bp, Glycine max
  unsure (1)..(333): unsure at all n locations
tacatgacatctgaattcatgtacagcanatctccatgcattcttagttggaacatgggcgctagagtggcaagggcatcgaccatctgattttcctctctaggaatgcgatgaaatgatatgtcatcaaagagctccatcaatttcctaatgtaagcctggtaaggcaccaatttggggcgtctggtctcccatttacccttcaactgatgaattaccaatgtcgagtccctgtataccttgagtaacttgaccctaaagtcgactactactcggatcccaagggcacatgcctcgtactccgctatgttgtttgtgcatttgaagcccaac

SEQ ID NO: 261096 - DNA, 357 bp, Glycine max
  unsure (1)..(357): unsure at all n locations
agcttcctcaactctctattagtctatctctcactaccctcatacttgctcacatantcactgaaaccacaacctttgacttcttatctctcacgcactcgcaccttttcgattgtcggtttgagcgcggtttggaagagcttctcgaccctcttagggattgtcttaatctgaagcacttgtatcttcatcgctgtcagtactatggaggattccagaggtttaaaatctttgcccccaaactcaccctgttgagcattgccctgatgagagtagatgaaatgtttgattctgattgtaccatccagcttttcacgccaaagctccaatcttttacatactgtgactctgatctct

SEQ ID NO: 261097 - DNA, 278 bp, Glycine max
atatggacaattcacatatatgtgaaagagcacagaataaactgatgcatgaaacttttataggcctagacacaagtagataccacatatatgtgattaagatagcaccaatcatgctaagattcataaatcatacagcaattcctaaaggtctgtacggtttacaacaagttcaaaagacaataagcatacaggcctacaaaaccaacagtggcatatgaggggccttgtgaattgaaatgaaatagagaacaatccaacgcaaaaaactttacctg

SEQ ID NO: 261098 - DNA, 361 bp, Glycine max
agcttaggcaactgaataacattgtagtcaaaatatgaagaatgtgtaactcattaaactaaaaccatgcactcaatcaatctttctttgcctctcataaaaaagtagccattctaaccatcacgcaacccgttcattgtaatcatagggacacatactgaagaaattcgaatttaattgattataacaatattttaaattttaacgttacaaaaaaagtagcaaaagaaatcataaatgcgcaacaagaaaaaaaaactgctaaaaagaaaataaagtgctgctacatctcatatacattatttcgtcgtctaacctatgcttcatgcctacttcatagccctggctgtccatctcacct

SEQ ID NO: 261099 - DNA, 373 bp, Glycine max
  unsure (1)..(373): unsure at all n locations
tcaacaccaacacagagtcctgtattgatattccattgatttcgttgataagaccctataaattgggcaaaaatctttggttttttttgtttttgaataaaaggtcaactcacttagtgagatgctacgcttagtgaggtgccactcacttagcgaattacaggaaattgcctagattccattccattctattgttcctacacacacctctttttttggagaggggcgtgtgttggatatgcacgggtgcatagttttcaaaatgctaatgattatgcacgccacatgcataatttatgtaggggttacacataagtttctattgttgttcttgcgctatttttactaatngttccaacagttttttttttac

SEQ ID NO: 261100 - DNA, 368 bp, Glycine max
ctacccagtctataaatagaaacatgtgtaacacttatcgcccgcccgatgaacgagaagtttgtgagacacaactcacagttcaaattctctccctttttcttcccttaatttcgcgcctccccctctctctttctttccctctttcttttcctccattgaagcatcctcttcaagcttcttatccaacgctcatcttggtggagaagctccttcttccatggcttattccttagaggatgacgcctcctctcacctcttctcctttgtcttccgctgcatctccatggtggaaaatcaccattagacgacctcatttgaagctatagatcccgcctccatcaaaagcccacacgccagctttcatc

SEQ ID NO: 261101 - DNA, 231 bp, Glycine max
  unsure (1)..(231): unsure at all n locations
tttattaattatttgggctatgntgttgttcgcatttttgcgggccaactgaagaacagacagtgaggttaaagattcactatggagggatgtttgtttataagccatccaatgtgtatgtcaatggagacatcgttgaagaggaatggggttgggatgtggatactatgtcatatattaacttgatgaaggtcattaagtctattggctacaaagcattcaagtgcttat

SEQ ID NO: 261102 - DNA, 437 bp, Glycine max
  unsure (1)..(437): unsure at all n locations
agcttgaagtagaggagaccttcaatcctagaatgtaacgtggcagacaaaagtgggcagccaacttgaatgaccattatctttaatgcggaaagtattatgttcttcactatccatgttcacacattattgctgcttggggttacgtgaacatgaattacttccaatatgtagatgttgtttacacaaatgagcacatcctaaaagcttattccgcgcaatggtggcctcttgggaatgaagccggtattcctccttctgatgagcaatggacacttatncctgatccaagtacaattcgtgcgagaggtcggccaaaatcaacaaggataaggaatgagatggattggctggaaccatctgagcaccgacaaaaatgtagtagatgtggaagagaaggacacaacaaacgtcgatgtccaatgcaatctgaatgt

SEQ ID NO: 261103 - DNA, 467 bp, Glycine max
  unsure (1)..(467): unsure at all n locations
tgctgaaccttganancgatgaancattgnaatncnatgatnccactgtatnacggacaatagatactcaagcttgtgctggacagttggcctgacagcctcgagcgatctctctggagcggaagttcgacatcgccattgaaggcaacaagtccgaccaattgtacgaacagaggactatctaactacactaacctatatttgataaatcttctctacgttttcacttctttaatgagaattatacatgattcatggttttctgatagggaaacgaaagagaaaatcataaagcattatctcataacagaaacacactcctaatagaaatgtgctacacatataactccctaacagaattgtctcaacgattctatatgaccatggtaaatgggatgtgctgaaataatgtgctcttctatcgaccaatgttacatcagagactactactacctaattattttgaa

SEQ ID NO: 261104 - DNA, 340 bp, Glycine max
agcttgccactcatttcgcgcaggctagctaggttgcttcctccagaagcaaccaccttctggaggaatattctggaaggccccagcgggcttggctgctatctgcacccccatttttacttaatacacccccttgctctttcttggagattttctctcgtaacgttactaaattttacgaaacccgtaacgattcttgttttcttttcgtaatgttacgaaaccttacagattacgtaatcctctcttttttcccttgcacaacgctaccgaactctacggattgggcactacacacttccctttaatttccggcatgtgaccgaacttcatggattgt

SEQ ID NO: 261105 - DNA, 449 bp, Glycine max
agcttatccctcttaagttattgaggccgctggtccaacaagtgtatagttgcgtttagcgcgcctacgtgacgtttgagtttaaaacccaagcacttagcctagccttgcgctaagcccaacctgaagttgtaaaatccagtaagcatctggggcttagcgctgtaggttgcgcttagcgctttctgcaacaccaaatttttctgcaatatgcgcttagcctgagatataagtcttagcgtaccatcaagcttcaacttatagagagtagttcaggcttagcgcaacaagcgcacttccaagaattcacaacccgtaagagattggcgcttagcacctcctggcccgctaagcccagcttataaaatcaagttacagaatggatctgcggcttagcacaagatagcgcgcttagtgctgctacaataaaaactttcccatgaagaagt

SEQ ID NO: 261106 - DNA, 204 bp, Glycine max
  unsure (1)..(204): unsure at all n locations
tacccgttganatcgaagaacgatgattatacgaatgaagaacgtctattaacggttgaaatcttttcgaaattcctcacggaaaacgttacggaaacgtttcggaagcgcctccgcttagattttcttcacggtaacaattttccaagcaaattcgaaagagagaaaagtgcctcatgggctgaaccccttactttttgcact

SEQ ID NO: 261107 - DNA, 324 bp, Glycine max
tgacacgtataccatcttcacacttatcttagcaagttgttgttgaataagatcaattgtttgttgcgtggagggcttttccttgttcataaaaaacttgtcacaaaaagaaacattgggttgtacttccctacctacataagctggtggttcactacccgagccctcgtgacctatagtacctacagagaaaactaaaacctatcggcaagccatagtcttttttgaacataggttggttgagttcgtttaagatgtctaagaaagactttaggggaagtgaattaggaatatcactatcttagatgtcataaatttatcttc

SEQ ID NO: 261108 - DNA, 428 bp, Glycine max
  unsure (1)..(428): unsure at all n locations
agcttatccttatggtctgcctccggacttcactcttccgtgcctatccggaagagttaagccaagcctctactttcgaggggcaactcccaccttatgaagactatcccgggcaagacaatgaggaaggagatacccatcttggccccctgcaccacctcaaagatccgtccctccacgaactaccccaaccaaacatagtccgtcatatcccggcttcacccacacctataaaagaatctgttcccttcgcggaagataaaggtaagatggaggcgcttgaagagaggttaagagcagtcgagggccttggcaattacccattctcggatttggcaaatttatgtctcgtgcccaacatcgtcatccctcccaagctcaaagtaccagactntgataagtacaaagggacgacatgtccaaatggg

SEQ ID NO: 261109 - DNA, 348 bp, Glycine max
ctttcatagtagagtatcgtttatgtgtctaccatcacgatcatcgtctccctttctatcattgggggtaccacctgggccgccagatccctccaccttttgggcgtgttctttgaaagatctgtcccccttcttgcaaatgttctgtagttgcatcctatccggaaccatatcaaaattgtactgatactgcctaacaaaggcaaccattatgtgcttccaagaatggactcgggaagattccaagttagtgtaccaggtaacagctaccccagtaagactttcttggaaggaatgtattagcaattcctcatcatttgcgtattcccccatcttctgacaatacat

SEQ ID NO: 261110 - DNA, 143 bp, Glycine max
tacgatattcttttaacatataaaggtctattcgttatagcttctcttgacttgttgatcctgacctaaatcaacgctgaatagctttacatctttggcatcatcagaatcctcataccacatatgcacttacaattaaaatc

SEQ ID NO: 261111 - DNA, 329 bp, Glycine max
  unsure (1)..(329): unsure at all n locations
atgttaagactcatcctatatgcaatgtggttccatgtcagtgaanaacttcgtcgtacgcctatgagtacatgacaagacaaaccacacaccagcaagtcaagtcactctcactaggtaatatcatagggagaccagtcagggtcacaatgttttgtgagaatgctccaatcatatgggatcaacataggcttaaaggagcactcaaaccgtgtgacccccaaggcctacactccgaagagtccgtcagggcctctccctcctaattcaggtccaacccagaaaacattttagcacacagactctatctatgaactgtacaaaacaca

SEQ ID NO: 261112 - DNA, 326 bp, Glycine max
  unsure (1)..(326): unsure at all n locations
agcttatctactgcacttgttaggttgcactatttntgctaacaagagtacaacacatgtgcatgtcatgttcttaaacacccttcgagacctcagtcagagtggaagttacacatggngaattgttgtcctagtgcacatgtacgataatttgaatgatgcttgcaagagcggcggcaaacaacttgttggatatatcactgttacaggtaattgccaatgaatgttatttaattgtttttttaatattcttttacatgttcatgtgtaattttttctgttcttatcacatttgtgtagcgttggattataagtgtttccatcta

SEQ ID NO: 261113 - DNA, 395 bp, Glycine max
  unsure (1)..(395): unsure at all n locations
attatatcaaccaaatgaagatcgagtcgacgctaaacaactancagtacctccattggacaaagatagtcatttcaaaacgtgaaggtcattgcggaccggcttggtgaagccctatgcatgtgctcccagatgaaccaaacgacgatgcccacacttttggaagagccttcgcgccttaccgattactggatggcacaaacactcaaggaatataaagagagcacactctgcgggagatgtgacacctgttctcccacgactcaagaacacgggctccctttgtgtttttcttcggcggcgggacaacatttttttttttttgcggggggggtgttttattgacccccccccttcacgtggggaacccacacacacgggccgcggggggggcg

SEQ ID NO: 261114 - DNA, 369 bp, Glycine max
  unsure (1)..(369): unsure at all n locations
gagtctcgtattgttttaatcaattacatatatctcacaatacattacactgttatttgagacaatgactaatctagtcaagagtctctgctttaatcgattaccaagtggattaatcgattattatctctctctcattaagttgtttagatgttaacaagaacacattactacaaaagtcatttactacgacgtaccaacaaggacggtccacagaagaatggcatagaatctttagattgtaagttcaaggacggttattttaaaaacccgcctttgaattggtatgtatntntctctctcttatcttatcttctcgggtacactactgacccttcattatcccctaacctttcattttcctctctc

SEQ ID NO: 261115 - DNA, 550 bp, Glycine max
  unsure (1)..(550): unsure at all n locations
cagacttacctctcttctctcactcatttntatcctttttntgttttcctccccnnnncccggcccggatgcgctgancccttgaacnctcgatccttaaacacccgagatgcaactcaaaccaaacctccttcatatgattaaacttatcccaaaatgcataaccaccaccacaaggcgaagatcacaccttaatccctgtgtcatctaaacaaatactccatgataaccataaccgagcaaatacttaaccctaatacccctttgtggtgaacattgacggagtgtgtgagaagacaaaacaaattaacgcacattcaaagcacacctctcttcctcttaatttagcataangacgtcgttgctttatttcctccttcctgtaaactttaattctgaacccagataatatctgctgattattcttaaaaatataacatttcatgtcttatttgacatccactcatacttagagtacacgtgcgatcacaggtagctcgccgacgtgttgaaataatggtacatcagcatcaacagatcttctaatggc

SEQ ID NO: 261116 - DNA, 407 bp, Glycine max
ttaattatctctatgcttattctattttctatctcaccagttatatctacggccagattttcaatcgtgtacaaaatgctagttgtagacaaaattcatatcacaacccttgaaatatagtaatattttatgcatcaactggaccaacgtccaagaaacagtacacattaaagacccaatatctcttcaaaaaaaatctataaactgttcaaaacactacatacccaatatatattttaagggtcaatatggatacagaacgtaccttgtttgggagtgttcgcagaaaagaagaagaaagtgaaggattatcatgtaattatccaggacttctgctttatgcattttcacagatacctttatgacatcaacctgtgagaaatgaaggtatcacaaaccatttaaca

SEQ ID NO: 261117 - DNA, 363 bp, Glycine max
agctttgatgacatggctacgaacctatgcgctctcgttcaaattatttctataaacaactttttgtaaattgctatacagctcaaaaaaaaaaatactcacaacaccttgaacactttgagagaaatgactaactgatgatattgcatatttggttgacagacgattaagagttattcattgcgcaaacaaacaatagatctttttgaattatacaaagccaacaatgacttagtaggacaaagaataatgggttgtaacaagtttggtgtagagcttgtaacttgttgaagttaatggaacttgatggttagccaacaaccggacttagtcttagtggtgaaaatgaaccaatatacatct

SEQ ID NO: 261118 - DNA, 374 bp, Glycine max
ctgtggatgttcttcaatacgctgacgatacgatattctttggagaagcatctatggcaaatgtcaaaactgtgaaggttactctcagaagttttgagctggtttctggattgagaattaattttgctaagagcaaatttggagctgttagtcaatctgaggagtggtgtgttcatgctgcaaactacctcaattgtgctctgctccaatatcctttctgctatctaggtattccgaatggtgtcaatcccaaaagaaaggtggtgtgggatcctataattatgaaatttgaggataggctgaacaggtggaagatgggtaaggcttaccaaatcctgttctcgaagatgctgggctgaggagggattccctga

SEQ ID NO: 261119 - DNA, 327 bp, Glycine max
  unsure (1)..(327): unsure at all n locations
ntggtatttatagaccttcttcaacaaatgtttgttgtctcttaataacaagatttcttttctttatcttgcggctgaagaatatggccattggagcatttaatgtttgcattaaatacacatacttcttcatactagaactcgactcttcttggatatcatgttgaacaccccagtaagaaatcgcttccttttgcgttaaagcagatttgcatagtagagtgcttcttttgatggaaattagcgaatttgaggacttggactttatttattcttcataggatttgacagatcctagagaatatctctgtaaacaaatctcaaaca

SEQ ID NO: 261120 - DNA, 256 bp, Glycine max
  unsure (1)..(256): unsure at all n locations
agctcttagctcgtnccttaagatcatgccttttacccgtgatgattcctttcacctcttccgagcttgagctcactattgctgccctataaagcccctcaaaactttgctttggccgcgttcttcctttcgggccttcttggcttctcgcctcaaggcttcagcggaggccatattgacgctccttagttcatcatactctcttcagactttgatggctatggactcgaactcctcttcnactacccgcgctctt

SEQ ID NO: 261121 - DNA, 199 bp, Glycine max
  unsure (1)..(199): unsure at all n locations
tcagctagggtggaatacttacttgttggtgatgaacaaaagcgctttacggaatcaaaaaatgcgaaaaaggatgaccctagggctgcaaattcgtcaatcccgtgggtatggcttttgaaaggcgggaaaagaagttcttgaatgtaaatacgcccncccctttcgtcattgttataattnggtgcaggggtggctt

SEQ ID NO: 261122 - DNA, 596 bp, Glycine max
  unsure (1)..(596): unsure at all n locations
ctacccagtctacnctcaaaancacttaanttgtntatntgttnnanngcgnactnnntnnnntnnnnnnnnnaaggccccgcaccatgangcttcgaancnctgacgacccctggcagcnnccgcggatactctcccaccnacctgcacgcatgcaacctcgctaccacaatttactcattttacncnttcacaccacacgacgatctcctgcaaacgaacgaaccgcgcgccccacaaccctctgccaccctttaacgaataagaagccctacccgccccctgtttgagcacccacaaacgtcatcctatcgctctccccctttctcaccacactacactttcactcccaatgcgctgccttctcgaggctggcctaataacctttgctactcgggaccgctcctcttctaaaaacccaaaaacgaatcatnctatgtctatcgctgattgcatacacgctaaactatcttcacggaagagctctcttttgcctagtatggctcatgtagagcttaacaaatctatcactcaacgctcnctactctatagatctcacggacatgctcgctagctcctctctcaaacgtagatcg

SEQ ID NO: 261123 - DNA, 177 bp, Glycine max
cgacaatataatactaagctttttgacagagatcactcccagatgttccaaggatgttatgtcttatcctcaatggttagctttgatgaacgatgaatacatggctctcatgcataataaaacatgggatcttgtcccttcgcctcctcataagacggctaatggttctaaatggat

SEQ ID NO: 261124 - DNA, 326 bp, Glycine max
agcttataataagacataccagcattttattgtttcagtccaaggaccacaatattgggcccagacacaatatacccaccctgtcccatcacataaaacggtccaaagaggaaggccaaagaaaaatagaacgagatctgtagatgaagaccatgtcacaggacataagctacagaggaaattggctgagcttacatgtggaaggtgtggcccaaccaatcataacattataagctgtaaaaatagtggagttcctgttacgccaaagaaatatgttgcaccatcaacttcacatgaggatgaccacctattatctcaagatgaac

SEQ ID NO: 261125 - DNA, 406 bp, Glycine max
agcttaacattcaatttcgagcgttccgatatattacaggaatcaatcagacatctgaataaaaagttgttgtcgtttgaatccgctcagagctttcgtattccatttcgagcgtctcggtatattacacgactcaatcagacatccgagtaaaaagtgatcgtcgcttgaatctgctcacagcttcaacattaaatttcgagcgttccgatatattacgggactcaattacacatccgagtaaaaagttattgtcatttgaatttgctcagagctctcatattccatttctagcgtctcgatatattacgagactcaatcagacatccgagtaaaaagttattgccgcttgaatatgctcacggcttcggataccatttcgagcgtctcgatatatacgggactc

SEQ ID NO: 261126 - DNA, 200 bp, Glycine max
  unsure (1)..(200): unsure at all n locations
ttgagcacattcaaacgacaataacttttactcggatgtctgtttgagtcccgtaatatatcgagacgctcgaaatggaattccgaagctctgagcaaattcgaacgacaatcacnttttactcagatgtctgattgagtaccgtaatatgtcgagacgctcataattggattctgaagctctgagcaaattcaaacgac

SEQ ID NO: 261127 - DNA, 421 bp, Glycine max
agcttcttagtttcagatgatgcagatgggtttgtagctacctcatgtactcctctaatgactatggcatcatttctggcgctaaactgctgggagttggaggccatcttctcaattaaatttctggcttcagtacgagtcatgtctccaagggctccaccactggcagcatctatcatacttctctccatattactgagtccttcataaaaatattggagaagaagctgttctgaaatctgatggtgggggcaactggcacatagtttcttaaatctctcccagtactcatacaggctctctccactgagttgtctaatacctgagatatccttcctaatgctgtggtcctggaagcagggaaaattgtttctaagaatactctcttaaggtcatcccacctcgtgatggaccttggagc

SEQ ID NO: 261128 - DNA, 330 bp, Glycine max
tggagtagaaacatgggaccaatcattttatttcaaaatggaagtcgtatctagtcaatgtcttagagaccatacaagtttcctaacgatttctaattatgtgggccattaagtctatcatatgctgacaatagccgagaagcccatgaatctcttcgggggcggagtaggtgtctgccatcgccttggccttggctaacaatcggggaagttcttgactcccgttcaaggtaagggcaaaccgatccatccacatggttgcctcttggtgtaaagagtcgatcacccttcctctagcctctttttccgcgtatacttgggcatattcgt

SEQ ID NO: 261129 - DNA, 71 bp, Glycine max
  unsure (1)..(71): unsure at all n locations
agctttatnttcaattacgagcgcctcgatatattataggacttcattcgacatccgagtaaaaagacatt

SEQ ID NO: 261130 - DNA, 386 bp, Glycine max
ctcggaagatagtgatgaggtacaagcctaaaggcagagcttgaaagagcctaggtagtcgattagaagttcaagtccataaccatcaaagtctgaaaagagtatgatgaactaagggatgtccatatggccaccgatgaagccttggaatgagaaaccaagaaggcccgaaaggaagaacacgaccaaagcaaagttttgaggggctttatagggcagcaatagtgagctcaagctctgaagaggtgaaaggaatcatcacgggtcaaaggcatgatcttgaaggacgagctaaaggtttgccttaggtcgaaaagaaatttgtcccaacaagtaagcgagacttgaggaaatatgtgtgccatcatcgataagtgcaaagagaa

SEQ ID NO: 261131 - DNA, 320 bp, Glycine max
  unsure (1)..(320): unsure at all n locations
catgcaagctanagtatgcccgagtcattcatccctatgatatgttgttgaagtattggcgatcagaattgccattccttggattatagggttgaaccaagctcatgcttttacaaaaaaggttcatcaagtccagttgaaatatggaagtaaccgtcttgcaaaattggggcaaaagatgaatcgagtcacatcactgcttcgtctactgccaaacatatttacgattattgacgcccttgttactttcactttcaccttgacaaagatgtcatggcccatgttgaaaatctaaattgactcaaccccatatcttgtgt

SEQ ID NO: 261132 - DNA, 180 bp, Glycine max
aacatccaagcaaaacaacatcacacagcacaagctatcacagccaagcaaaacagatcaaaggcagaaaactctgccaaaacaccaaccaaaaatcacaggtttttccacttcaagaacccagtaacaatttccttcgatccaattcgttaaccggtggatcgacttcaaaattttact

SEQ ID NO: 261133 - DNA, 332 bp, Glycine max
agctatgaagataatcatgggagtttatctgccttctgtcgttgaaatcttgcggacggactatcttattatctcgccgattgtagaaaatgcatcgggagcgtggatagttcggccgcaacatggtgtcatcattttcaaacatacacgaccaatgcgccgccaataattgccaaggtggaaagacttgagtccaagagttttcaactccaaattccctcattaagtaaacaacataacgggttctgccttgctccagaccatgataaagacacaggcaaccacggcgcacggacaaatatttatgtctcttttgtttagatcatatgaaa

SEQ ID NO: 261134 - DNA, 415 bp, Glycine max
  unsure (1)..(415): unsure at all n locations
cttnattcattctatgagcccgtggtggtccacatagtgtttcgtgcatatgtattctcgtgttgtttactctttataccccttggtgacgtgcttaagccatcttactcaagtcatttctcgcttaacttatgaataaaataaatttccaccgaacgtttgaattgtattatgcattaacttcagctaaaatagattccgaccgctcggtcgagccgtaaccacgttggaaatcaaaaagagggtaaaaataagggctaaaatcaattcgcctagtcaagctcgtncataaaaaatatgctcttgaagtttgtcatttcatatcctcactaagtaaaatggatcattactaaggtccaacgcgttaaaatgaacacctgctaaagtaaaaagaatcacttgataaaaagaacta

SEQ ID NO: 261135 - DNA, 236 bp, Glycine max
acgaaaaaactggcgcacatgacgggggtgagaaagagggagacacccatgctgtgactgccattcctatacgggcaagccttctatcacacccaaccatgctattactcagccaataacaaacctcctgcttacccaccgtccaggtattcagaaaggccatccataaatcaaccacaaagcctgtctaccgcacttcccatgacgaagactacctttatgacaaaccaaaaaac

SEQ ID NO: 261136 - DNA, 436 bp, Glycine max
  unsure (1)..(436): unsure at all n locations
ntgnaanagcttgtcgctagagctgacccatcaactgccctatactcttttagactggtgatccctaggctcttgaccttgacttgatagaacccttttttaagcgaaggcatttgacttgatcccatgttttacggttgaacaaaaattggtgcgaatcaaaactccaacatctatcatgggtggaatggatgaatgcatgaagaaatgcacatgacacatgcaatttatgaatacgggagcccgggaaattgtctccttcttagatacaacgtcttggggtaacaaagtgcccaacgtatgtatttaagaaggtggcacggaccctccgtcggtttgtttaaagagaggggatcaagacagaatccgtgcgtgacacatatgcgaaaggcgcaacatggtatgacaatattcacaaaatataaaaagggtacat

SEQ ID NO: 261137 - DNA, 309 bp, Glycine max
agctatatgcgatgagggttattgtaaggggaactcggcgcgaggtaaggaggatgaagaagtggcggtctaccaatgagatcggaagggaaaccagtgtgtggcaactttctggaggagtttaacgagttttactacattaaattctgggttgttgctgctggggagaactggttggaggtaagctttgcaatgacatcctcaatacggtccatattggacttggagtgggttgagtcggccatgaaggaaactcaatgaaagcactatataatatgaattgaacaaccacaaggaaggtgagatcct

SEQ ID NO: 261138 - DNA, 312 bp, Glycine max
  unsure (1)..(312): unsure at all n locations
tgaatgaggaagtgttgaagggtgaaacttcctgcttttattgttgaccacagagtggtacctggagatatgtcgcgggggtcatgagaccttgnggacgtcaggtggggtgctattgcccaaaaccaagcttgaccaatcccgacccaacccgggcatagtcggtcagtgagaacctgtgatgtacctaagcaggcgagctcctggcagtcaacagataaaaggaaaacaagaccacaaagtcaggaggcttgtggtggctggccagctgtgaatattgtgtaatatgtgagatatggcctctggtaatcg

SEQ ID NO: 261139 - DNA, 369 bp, Glycine max
  unsure (1)..(369): unsure at all n locations
agcttgatgtgaganagcgtggaatagtcagtcttcctacttttgtttgctgaccacagagtggtacctggagatatgtcgcggcggtcaggagaccttggggacgtcaggtggggtgctattgcccaaaaccaagcttggctaatcccgacccacaccgggcatagtcagttagtgagaacatgtgacgtacctaaacaggcgagctcctggcagtcaactaataaaagaacaaagtccaccaaaaaaggaggcttgtgtggcagctggccaactatgtatcttgggtggtatctagaaatttagcctctggtaatcgattaccaagggtgtgtaatcgattacagggcttaaaaatggagacagaat

SEQ ID NO: 261140 - DNA, 96 bp, Glycine max
tctcctctattccctataaatagggggaggagggaagaacattatcgttcaaccctcctggtatctgagtttcacttgaaattattgagaaaaatc

SEQ ID NO: 261141 - DNA, 460 bp, Glycine max
  unsure (1)..(460): unsure at all n locations
gactgagctgcagctntttttctcaatagcctgtctattgcctaacaattctaattgcaagttcacattcttgttatttctttgtataacatacatactcgctcacacttatgaaaagaaacacaaactccatcacaatcatgcattcaatccaaaatcaattcataacaccaattttcacaaaaagataaaaatgtttcattgcataatcatccaagtcaagttaaactattccatatgcttcaaaacaaacatactagctatccataaacaaaaatagcagtgtatataaacattaaccaaaatcactaaaaaaatgtactgaaactataatcattataataataatccaaaaagcatcatcaggaatttagaattcctgtgactcgtcctgagtatgttgattctgagcctcctccttatctatcagatggaanaacaggggaatcagagagagcaa

SEQ ID NO: 261142 - DNA, 290 bp, Glycine max
  unsure (1)..(290): unsure at all n locations
tccagtacctttaactntgagattntcattgcaaatcatgttgtccattaagtgatgatatgctgatctgactgtatattatccatgtgcactatatttccagcatggacgatcactatcatgagtgttagtcaaaggcaccatttgtaaatcattcatgtcatcctcattgaggatgtgtgcagctatatccattctccagctattattntcatggtctataagagagttaacagtcataaattcaagaccaagcggtggtaagaacgaaacataggacttatcttttt

SEQ ID NO: 261143 - DNA, 133 bp, Glycine max
  unsure (1)..(133): unsure at all n locations
agcttgaaattgaanttcggaagctctcnagattttttaatacgcataccctttcactcggaggctagatatcgacgcataatatctccagacgctcgtcattgaacaccgaccgttctcgagaaattccaat

SEQ ID NO: 261144 - DNA, 409 bp, Glycine max
agcttgttcaaagacaatgacagtcataaggatttcaacgaaggccattcaaggaaaacaacaaagcttaccaaggtagacggcggtgaacatcctagtagacacgaacaaagcgcgaccacggcctcacggtggctttgcgagactcaaagtaaggagtcacgatggtggcgaaggccacacagcgtgggggtttgcgagggagggtttgcgagagactaaccgagcgcgagaagacaaggatttgcagtttgtaacttttcttaaaaaatacaatatcagttttttgtcgaaactgatgttaacatcagttcttaaaaaaactgatgttaacgacattatgttaacactcggttcgacaaaaccgctgtaataacatgacactactaaaaaaatgagctttaacatc

SEQ ID NO: 261145 - DNA, 419 bp, Glycine max
  unsure (1)..(419): unsure at all n locations
ctgagctgccgcttgctcttatactagagggcggcaaaatttcttatttgcatattctccctattntgaagggggacttcaaggactctcaagattcctaacaactcatcccatgaaagatttttagagctcttgccttttggatagttgtgatcttaggttcccacaccttgggaaagttgtccagcacctttaagtttatctaagccttggagtacatctgtccaaaagcctttaaattatttaaaagaacttgaagtcttcaaaacatgttgctcacagactctccatccttcatgatgaaacgtttgtaatgtctggtcaaagctgcagctctcctcagtctgacatcttcggtgccttcattgtttatactcaacgcagcccacatctctttacacgctctcagtttgccgatc

SEQ ID NO: 261146 - DNA, 336 bp, Glycine max
  unsure (1)..(336): unsure at all n locations
aaattgagaatggaatgctgttgatggtagataacaagtctgctataagccttgcatataatcctgttgctcatggaaggagcaagcacattgagactagatttcactacttaagagatcaagtgtacaatggaagatggaggttggatttttgcagatttgcagatcaacttgcagacattntgacaaaacctttgaagaaggagaggtttgaagatttgaggagaaagatgggacttagaagctcaaatgacatctgaattaaggaggagtgttagataaaaagataactcagatgattagttagttagttctatcacttggtgtgtagttagt

SEQ ID NO: 261147 - DNA, 430 bp, Glycine max
  unsure (1)..(430): unsure at all n locations
cgctntacttgtgatgacaagttttcncctagttatcgttgttctaataagcaacattctgttctacagtgggaagaagaggatgatcctgcattacaactagatccaccagacgaggttgagacagctggcgaccccagtttgcaagatcatcatttgtcttataatgctttaaaaggctcatcaggtcttggaataatgaagtttcaaggatcaataaatggattgggagtgcagattctactagatagtgggagttcagataacttcctccagcctagactagctcaatgcctgaagttacctgtagaaccaattcctaatttgcaggttttggttgtaaatggacaatgcttgactgctgaaggattaattcaagacttggaggtgaaaatccaaggtcatacactaaagctaccacgttacctac

SEQ ID NO: 261148 - DNA, 418 bp, Glycine max
  unsure (1)..(418): unsure at all n locations
acatgcatgtgcacaccactattactaaacttagatcaactgatgcaatctatttgattgaaaagaaaatttatactactcttataatgtagtgtacacctaaaaaaataatataatagaaaatagtgcttaagccattcaagtcaagtcattttgaatctcatcattagtatgatacatctatgtgtcaaagagaaggagaaacatgcatggtaatgcataacacaacataacattataagataacatgctttctaaacccaaccaaggtaaaaatgttttcatatttcatgaaatagcatgacttcctatggcggaacaatgatattaatttggtgagtaagtcttgagaatgtttagttaattggttttctgaatttganaatattactcgaaatacacaaatggtctcatgaat

SEQ ID NO: 261149 - DNA, 102 bp, Glycine max
  unsure (1)..(102): unsure at all n locations
tactctcagctctatgagactatactgcttggatgagactctgagtctctggatcaagngcaggctgctctgatattaaaggactagaatgaaatagaggaa

SEQ ID NO: 261150 - DNA, 359 bp, Glycine max
  unsure (1)..(359): unsure at all n locations
atctctctgcanataataacaagattacttatatatcatattgagatgagtctgatatctcaagattacatttgaataaaatcatgaggttgaattaattgaaatactttaaggttatagcaaaaaaggtttcagctaaaacaaatgcaaggcagcgtaagaaataaattactacattagcaataacgcttaaatatctacataaacagaatattccataaagattatatttaagccccatgctgagatgcaagtaatatgctgtttcatatttatcaaaatatatgaatggaaatgatgcaggaggcccacagaattaagtcataaacctgaactcaactacatctgtgcatacacat

SEQ ID NO: 261151 - DNA, 362 bp, Glycine max
agcttgaaggcatgtaatgttcaatggccgacaattgcaccttatcacgcaagtagcataaaacgataagaaccgagtatcgaactctcgagcaacttgctctacttggtaaactgtggttcactatataagcgtcttgttgtaaatggtttgtgtggggtatggacaggcttgtaaactaaactattaaaaaggcagatcacgtgaataatggtgtttgaagacagatagacaacgtgtcagtcttcctagcaggcttctgatgttataaaggattttctctacctaacaatgctcatgtgttctatgttatctcctgaaatgctacaccccgatgtcttgcgcatgtctagcctaacctt

SEQ ID NO: 261152 - DNA, 337 bp, Glycine max
  unsure (1)..(337): unsure at all n locations
attatggngtacccatcacagtggtactaggtggctgtcggtcgatggtgcacatcaagttttccacatgcacaatgcgcgcataaacccaccatcctctgctgcccacctccaactgagctcacgtactcccacatagcccatattctcgtttctctcaacaccgggtccccatcaatcctcccaagctttcacaacatccaagcaaaacaacattcaaacagcataagctatcacagccaagcaaaacagagcataggcagaaaactctgccaaaacaccaaccaaatcacagcttttctcacttaaagaccncagtaacaattccttcgatcca

SEQ ID NO: 261153 - DNA, 424 bp, Glycine max
  unsure (1)..(424): unsure at all n locations
aanacctttacatgattncttaccgctctattctaagaaaatgccctatcattcattancatcttctttcattnttataaaagaaattatttgacaattaatccttgttcttcaagacctgaaattacgaatagcctaaaagctctatagctacatgtattttattggctcgtattggttcaattttgattctcacagataggagaatcatactatgtgttcttccattatatatatatatatatatatatatatatatatatatatatatatatcttgatgctccctctgagcgacgtgaagtttaggtctctgctaacgccttatgtttgcgtatgaatcacctccacacctgcatatgacccatgtatctcttctctgtgtgtgtgcgtgccgcgccagcgtctcctcaagatgtatatcg

SEQ ID NO: 261154 - DNA, 292 bp, Glycine max
cattagaagaaaaagatcatgtgattagaagtatgactgaaaatgttagtcagtttgtcagattgattgtgagggaatgcatagatcgtatccctgtgagagtatgatccttaaattttgagaaaaacgactatcatttagtacttgattttgcatgaatctctgaagtatggactgaatgcgtgaattgaggatgatgaaggccatgttatgattgtgatagctacttgccaaatagctgaccttgtgcttgaatgaattatcccttgcacccagtttgagctgaatgaat

SEQ ID NO: 261155 - DNA, 296 bp, Glycine max
  unsure (1)..(296): unsure at all n locations
ngacccatgtttgttacaacctattattctntgtcctatcatgtcactgctggctctacacaaattaanaaatttattgttggtttgcacaatgactcactcttaatcatcttatagtcaaatatacaatctcaacacttactctgttatctcaagttgttcaaggtgttgagacttttttcatactatacaacaatttacaatatagctttttacggatagaattagaatgaatgcgcatatgctcattaccatattttcaaaacttctggtatttataggcattcttcaacaag

SEQ ID NO: 261156 - DNA, 272 bp, Glycine max
actacataatactcaagcttctatggactatgaacaagcattcaactcctctttcagaactatgctatgtgctcgcgactggtccctttcttcccttcgcaacttgagttcattattgctaccccatagagctccgcgaaatttgtttcggacatactctttcttgcgagccctcttggtctattgtacaagggctcttgcggtaaacgcattctcttcctgtaacccggcgcacattattcgaacgtgcgttgcagccaacttgaacttct

SEQ ID NO: 261157 - DNA, 480 bp, Glycine max
  unsure (1)..(480): unsure at all n locations
cccacgcgtggcattatttcttgacanccgaccttcagtgactgaggcatgaagcttaagaaccacaaggcagacaaagcctttgtttgctaaccttcagtggtggcgcgaagaaaccactattcaacaccagttttttgtaaggggaagcgcggctgtatcctcatctctccactctcacctcacaccactcctcactccctccgacgccgactcctgcactgctccccaccttccaccacctcccctcccatctcctccccgccctcccctcttttcaactctactctcntcacccccatccctcaccatctccaacctctcccacccccacccccagctcttccacctctcccctctcccccccctcccttccctactccaatctcccccaccctctcccctccaaatcccactcgccccctatccctccctccccacatcaaccccttcactcccccccccgctactccctccccc

SEQ ID NO: 261158 - DNA, 363 bp, Glycine max
  unsure (1)..(363): unsure at all n locations
gtagcgcattcacgaatcctgaggtttatntattgggagatctaagactcaacanattataaaaattaaaattaaagaatttaattatataaatataaataaaataaaatgcaaaaatataatattttatttataaatttgataaattaaaaaaaaaatgattacatctcctcacttgagtaggtccgccactaatatcggatagggcaaacaacacgtaatcgcgaaagagggagagtacgagagttganttgggtactcgcgcgtgtgagattggattgcattttctttgggaacgccagttgcaagcaatgaggcaatagaaatacggtgataccctttataatattggattcccagctt

SEQ ID NO: 261159 - DNA, 250 bp, Glycine max
tcaggattacattctacttcctttctattctccatccgacctctaccacatgttattatcatgacttacatccttatctctcagaccaaaatcccaatatcaacaaaccattgatcctaatagtattggacttagctccttgcacgacagtctcatttaagattcgtcaacgtaacattatgattaaaaaatcattaaagatgtctaactccattcttcagagataatagttattagtgcatacttcaca

SEQ ID NO: 261160 - DNA, 401 bp, Glycine max
tgttatagaatcgggcgtcgaaaaagcataacaacacttcttgcgattggcttaaagatacaatctttgcagatgagaatgttcaaaacattaaaccctagcatctggccctaaaagtccaacgcacaccagccgggtcatcctacgggctgaatctcacactgtgaaagtgacaatgacccccatccctgtgcacctaccaccccttactttgggttcactgatgacattcgggagcccacctatgcgaaatttatgacgtgtgtccccactgcagatgggtacgcagacccctcggcgtcccacccatcaatatcgattaccgtgaacacccaaaacccctgctaccacaatctctctttctcaccgccacacacctaacttttctccacccgcacccc

SEQ ID NO: 261161 - DNA, 142 bp, Glycine max
catataatactcacgcttgcttctacaacacagttcatcacttatcttgaattggtgagttcttgacttggattaaacttgagaagcgctgctctttggcatcaactatacctcatggcatgatagccctctactacaatca

SEQ ID NO: 261162 - DNA, 271 bp, Glycine max
gaatgtgaacgtatgtatacatgattttgatgatgtcaaagaacaatctaacaacgctgcttcaaatgataagcattcgcttcaagaataattcaagattgcttcaacaaacaaagccttgtttcaagattcactaaagaccaagccttgccttaaaacaaagtgctttcaagacatgcaaggctctggtaatctattaccaggaagtgtaatcgattatcacaagacagggttgagaaataactgctgaaaaatgttttgaatgtgaatt

SEQ ID NO: 261163 - DNA, 381 bp, Glycine max
  unsure (1)..(381): unsure at all n locations
gacactataatctaagctgtgagaacactagttctcgtctagagctattntgctagtttattgttaggagtgtaaaggctntgtgggatcctctcacccgcagaccctttcttttgttcaaagggatgtgaacaaagtagctaatagtttggcttctttagcttccctttntgaggatagagtttggattgaggaagtttcccctcaaattctttcccttgtaaatgatgacttangacctctagccattttcagttaattaatatcgtttacttcaagaagaaaatgaattgacaatatccatcctttgatgattgaaggagatacaagaaggaaaaattattattataagtagaatttatatttatttccttttcttta

SEQ ID NO: 261164 - DNA, 441 bp, Glycine max
  unsure (1)..(441): unsure at all n locations
agcttatgattcttcatctataccctncttatattatttatcttcaataatgacataatttatagctataactttatctttcgatccacaaatacattatgattttgaagataatagactaaaggctttctccaatcatgagttgccaacacatctatattcaaaatttctatttcatcatgtaattgttctttggtagctatcaaagtttccaaactttgtttactcaatttataactagatgcaatntgagccanatcattagcttctttgttttgctctcgaaacacatgttcaaattcaacttcgttaaatctagctaacaactcgcgtacatatgaaaagtagttcagtaaattactctttatgcacttaaattcatgagttaactgattgataactaatccagaatcctctttaatctatacatggtttgcacct

SEQ ID NO: 261165 - DNA, 308 bp, Glycine max
gctatttctttgctacacctttttctcctcctttggcaacatcaaaaagcctttgaactcggaaatcaacatagttacaacaatggagtagcaagatataagcatcagagtattaaatacaataagccaaactcacaaacaagaaataatcaaaccagaatccaaataactgaaaatgtcaacaaccacaaaacatccaagactgaaattaaaatccacaagataaataagcaagtacttagcataataatgtaaattctaagaaactaaaagccaaaatacacggcttataaaagataaataatcag

SEQ ID NO: 261166 - DNA, 280 bp, Glycine max
tttgtgggcgatgagaacacgtactcttatatacgtaccatcttactcaacaccattcgtacgtatattgcttggctcattttactttaccttatactgatattgactgcataaaacataaattatcccttatgcttgatgccgcatactacaatcacagacggcactattatagctgcacagaacctacatatgactctgttagaccactaatagcgatattattctcttagagctcttgtcaactaattattggcaatatttatatgctcacgactta

SEQ ID NO: 261167 - DNA, 122 bp, Glycine max
  unsure (1)..(122): unsure at all n locations
cctgaggcatgccagcttttgctactttgaatacaaactgatctctatcaccataattcactgctccaaactgaacactagattntgaaataatgtgtgatgcacgtgaccatgcatgcagc

SEQ ID NO: 261168 - DNA, 414 bp, Glycine max
  unsure (1)..(414): unsure at all n locations
ctcataagtcctaaatgacatttcaactaggactaactcactttaacctccaatttctactgaatacagatttagcctttcaaaccctcaaagcatcacactttttccactcataacactacattctcactttctaaccctgngttaactctacccttcatccctaccagttttccatcagcaatttcagcacataaacatcacaagcatcatcataaaaaccctaaaacagaatgggtaagcttgactcacaccaaacatggcaagttcaacatgctttcaacaaatctcttcacaaataactatcacaaagcataaaccaagtaaaactacccatcatatctcccatagccccatacccaccaaaatttatgtgagaagaagttacccaacccgagattcgaggtccacacg

SEQ ID NO: 261169 - DNA, 496 bp, Glycine max
  unsure (1)..(496): unsure at all n locations
agtacgagctgaaaccctngaanancngcctgaanccnatgtangnacngacactattaatactgaagcgaagtggtggggcgggaatcttatgcagatgcaacgcancatcgggggaaaagacaatacatctgtagaactaactgagaaggagaaagtaacactagaaggagagaagcataaacacgacccaagagaaaagagccggtgagacaaaagacaaaacaagcggctcaaatacagggaaaaaaaatactccaacgccaacaatagccgattggacatagagctgaattacaaaaagagctgacgattaggtaccaatgaggggaaaatgccgatgtccaacagcgcgcaatagctaaccactgcaagaatacataatggaagtaggactgcaaaacaaaagcagttccagcgactggagctaagccacacggaccaccactcttacggcggggccggaaggccaaaccaagattacggataaccacac

SEQ ID NO: 261170 - DNA, 277 bp, Glycine max
gactcaatcagacgtcccagcagaacattattgtcgttcgaattacctcagagcctcagaatataattcagacggcgtcgacatattacgggtgtcaatcagacatctgagtaaaaaagtctttatcgctcgaatctgctgagagctttcacattcaatttcgagcgcctcgatgtactacgggacttaatcagacatccgagtaaaatgtcattgtcgtctgaatttggccatagctccaacactcagtttacagcgcctcgatatattaccggac

SEQ ID NO: 261171 - DNA, 357 bp, Glycine max
  unsure (1)..(357): unsure at all n locations
ntgacanattcgaacgacaattacttntaactnggatgtcttattgagtcccgtaatatatcgagacgctcgaaattgaatgttgatggtcgctgcaaattgaaacgacaataactttctactctgatgtctgattgagtcccgtaatatatcgagacgctcgaaattgaatcttgatgctttgagcaaattcaaacgacaataactttttactcggatgtctgattgagtcctgttatatatcgagacgctcgaaattaatacgaaagctatgagcatattaaacgacaaaattttttactcggatgtctgagtgagtctcgaatataacgacacgctcgaaactgaatgtgatgc

SEQ ID NO: 261172 - DNA, 397 bp, Glycine max
  unsure (1)..(397): unsure at all n locations
tgtccacccaatgagtctacaaactctataactcgcaatttcaatgttctcgcaaacccaaacgtatcttcattactctctacctctccaaacactcacatatgattcaaaaccatcccaatactcaacacaagtccaaaaaaacataaatcaaccatcaattaaacatatacaagatttcatcaagaattcccaaatcaaaagcatacaatgggcaaggactctaaaggaaacccaacaccaaattccaccaacccacaaaaatcaaacatgctntgaagcataaacaacccttccaatcagattaagcaatagaccataaggtagagttttccttacctattgtctacaagcttaggtcttgaaaaaaggagagaatgagaagcattctactcaa

SEQ ID NO: 261173 - DNA, 390 bp, Glycine max
agcttccaatatctcattgaggatgttggatccataatataacacacaatctcatttgatttgtccctgcacaaaccactctccacagcacatgaagtttctccatctcttagagacacgcttcacgacagaatgatattgtctaggaattcttgcgcggcgcataacacaaatatcctctggaaggccaccaagaatcggagaatatgcggctctcacttattgccactatctgatgattcttcctccttatctatatgctccattgtatatatagcccagagaggatctgaacaagaaaaggcaaatgttagccaaactcttatcagatcacacatctacttctatctcagctcatttgcgtgtacattgtacaccatattaacatct

SEQ ID NO: 261174 - DNA, 366 bp, Glycine max
actacataatactcaagcttgtcctctaagacggttgccgtcttgaagcacaccagcactgtcatggctgacgtcgactattatacaggccagatcgtcgacaattatacacttctagatttgaatatatataccctagggcattattgtatactactgatgctgcgtatttgatacagaaaatcgaagagaaaaattggattcgaggccagcacctccagacaacgttaagagcggaagggtagcttaagatttcatatctacattgtgccttacaaatgctttatttatactaattccttggtaacattaattgacattttgcgcaaagtgtatatctatgaattattggctacaatttatggg

SEQ ID NO: 261175 - DNA, 119 bp, Glycine max
tgttcatgcatgaatagagtaacatctacgttctgcgtaacattgatgcctatgctactctcagctcctatttcgcgatgcatgctcataggacttttacacgagaagacgaatcatac

SEQ ID NO: 261176 - DNA, 408 bp, Glycine max
aacatgaaagcctctctccgctcgttctgcttgtaacagatgaactctcttgcatgactcccacatagcttcattcatggaacgaaactttactctagcttgtactgtttgtgcctggcgggggtgttatcctaattctcaatttatttgctcacacttccacacgtgtggcagacaataacgctctccctaaccaaacactctttctgggtcggtacgccctacatgacatgtctggagaaacaatactattaacctctatattaacctcttgctgacattccacaacaaaattgcacgcaatcgcaaacacttgttcaccgggccacatctataaatggctgtcgctcacccacccctctactatcggacagctccccatccaccccaaaccactatgcttcccct

SEQ ID NO: 261177 - DNA, 492 bp, Glycine max
  unsure (1)..(492): unsure at all n locations
ctatgataccatggaatncngattgatacctttctaagcctttgaccacaattgtgactcgcgatcatctagactcagcgtgttagtgcctacccataccgttttaagcgaaaatagattagaagggagatttccaatctactaattttagaacgaaaatttccaatgaaagcaaaaaaagaaaggaatggacatttccaattctcgattcatatgaggaaagatccccaataaatgagttgcagtaaacaaatacaatagaatggtaattcccaatctggagattgggatatagtgataaacgttgaggaataccgaacgaaagcccctgatcggtgatcgaaggaaaaacatataatatatgcttataggtctttgtgccggacaatatttgaacatacataattgtcacaaatgtctttaaagaagaaccgaaccacacctaaatggtctctccttggttccatcaaatccttggctacaccttttcct

SEQ ID NO: 261178 - DNA, 451 bp, Glycine max
  unsure (1)..(451): unsure at all n locations
agcttgtgcgagctttccgctctgatgctaaatattatctattattgagagcaaggtgagtgatgattctcaacaatttaatttgaggaatggngcttaataatctccccctccgtattgtgctatcatttggtttgaggaattctttctcatctctggtgtgttctactttctgttgtttgaaacactgctcatgtttcatgatacaggagctccaatatgatcaaaataatggaattcatgtcttggaagctttcccaaacaatgtggatgtgggaacttatgcgtttgtttttgaggtacctgcttgttaagtttagtgaatatttttccattaagttgcatcaaggtgtatttgtatcagcctgtcaactattttaagcccgttttgtagattgcacttcatgattctgctggtgaaacaagttatgctactggaggccacattcat

SEQ ID NO: 261179 - DNA, 374 bp, Glycine max
  unsure (1)..(374): unsure at all n locations
taataataataatttctattattattattaaatgaaaaaatttcaaaaagaaggagactcaagctaaaaagataatgcaaccaattaatatttccaaggaaaaaaatgttttgtaaagatattttcagacaatttaaatatttttgtttgactatattagtataaatcatctttaattcatacattttttaatattatgttctctttttttcattttcttttgatatactntgtgttttaacgacttggattcaatatgattntgtttatcaattatttttggatttgtacattacttacgaaattgtataagtttctttattttagttagtatttcactagaatgtaaaatatataattgatcaaaacatctt

SEQ ID NO: 261180 - DNA, 453 bp, Glycine max
  unsure (1)..(453): unsure at all n locations
agcttntatataagctgaatcattntatcaatattcacaagttgttttttactcagaaaattagagtttatatctttatcttagtgagagtgattctcctaagttcttgagtgattcaagaataccctggctgtatcaaaggactttcacaacctttgtgtgttgccctcgctggaaagagtgattatttcctttctttcatctttaaccttgttctttcaaaccacaatttcataaaatccacttctgcccagaattatctcgtggccataactcccgttttacgcactcaaattaagtgattcttaagcctaaattgaatttcaaaatgagacctttcacctcgttttagaatcacctcatttggagccctatagtctgagttattgccatttctatatttctgtctagccaccacttaacctatgtttaccatctcattcttcattttat

SEQ ID NO: 261181 - DNA, 344 bp, Glycine max
gaagaaacaagacatgaattaccatgcgaatcattctttcagtaaatcttttctgtaaattctagtaaagatactaagctctcaaaacaccttgtataccttgtgagaaaaaactaaacatgttgagtgatatatctatctataagatgatcataaaatgtagtcagtgtgccattttccaaaaaatcttgttgatttgtttataaccaacagtggcttggtaggataaaaaacactaagtttaaggcaagcttaggatagagcttgcaagtgtaagagttagaagtggtagtgaacaatacttgtaattttgataaccagaagtggtagtgaaaaattcttgt

SEQ ID NO: 261182 - DNA, 216 bp, Glycine max
tataaaaaactaatgttcttttctcttttgatttccttttctacaagcaattgccacatgtcccatttgaagtggagcaaacgggcccacctttttcccttgatttgacttcatactcagccacaacgaagaaaaatcggacctttctggatgctgaaatcctgcctcggtttgcgtgccgcctctctggttctagtttctcgcgtttctctgcac

SEQ ID NO: 261183 - DNA, 215 bp, Glycine max
cccattcctgactcaccataaccttgacccagggtgttaatgtcaatccttaccctctgaagcaaaataagaatagaagggaaatttccaatcaaagaataagagaaggagaattttcaatgaaagcaaaaaaagataggaagggaaatgtccaatctaagaaaaaaagaaggaaaattccccaatcaaagagcgggagaaagcaaatagaaaag

SEQ ID NO: 261184 - DNA, 485 bp, Glycine max
  unsure (1)..(485): unsure at all n locations
gacggcgaccatgagnccnctgatcctgannccctaattataaaaccttgtctcacaagaatattgnaggcaccnattacttcgtggagacacggcatcagggcccgccccgaatcgctgggacgtaggacagccatctgtctcaataagtattactagactttataggagtcatatgaccaagagcttcaccattggcagcatcaatcatacttcttctcatgttgctaagtccctcatagtaatattgtaggaggagtggctcaaaattttgatggcgaaaacagcttggacacaatttctggaatctttcccagatttcatacaagccctatcaactaaattggctgatgcctgagacggattgtttaatggcacttggcctcaatgcacgagaacatttcaccttgcggaccgcttatgttattggtcatggttaataccctggagtcaggtattcaagcacatctgcggcacttctggcn

SEQ ID NO: 261185 - DNA, 324 bp, Glycine max
  unsure (1)..(324): unsure at all n locations
agctntgaacaatatacttgccctttttttaactgtctctgggctcggcggccacgctcaaaaaagtactttccacacctactgtacgttgatttgaccaatgctgttatgggaatgttgcgacaatcctctacaaccttattgatacattctgagaggttggttgccatgtggtcatatcgacctccttctctatcataagccatggcccatttttcctttgaaatgcgatccatccatgttgctatggctggactaatccaccaaatttttctaaattctgatcaaaaatgtgctcgcaaggagtgtacgctcgataaaatt

SEQ ID NO: 261186 - DNA, 328 bp, Glycine max
tctaggcctcaaatgatccagagttctgtgcagaaaattcatgaaacaaactgggaaacagcactaactacaattaggtatctgctcaagcagagatgatatctctgaaactacattaaacaaagcacacaacagattaaacaaaaataatatataactagttaactaccatctactagtttccaaatgtgacactgtcactctatcaaccatttggtagggaacatgaagagacatattctgcagtttcttttgctgccgcagtgatgcatcaatcagtttctacaataagggccaaaaacataacgatcatcaaatgaaagtaaca

SEQ ID NO: 261187 - DNA, 378 bp, Glycine max
  unsure (1)..(378): unsure at all n locations
nttctatctccaccagtattattgagatcttattgccacactttcctatgaggacttgtgtcgtttattcaaattcaagcatcggttatgggcatttcagtgctcttcaatctcgataaccaatgataatattattagtatttttaaccaacaactaccataatatatgaggtggtgttttacttacgtaaagatggtgctaattgaccccacatagtatccaacagatccaattttcagttgtcatgacattatgttaacttagagtctaggagtattctcacgcggagaaaaattcaacatggattattatgaatttaatgataatgcactgtaaatataacaatataactttagtttatattattatctaatcac

SEQ ID NO: 261188 - DNA, 246 bp, Glycine max
aatgcatacgttcctatctttgaacagctgcatgtctgtgaagtgcatttgactgaagcattccatgatattcatttcatatgagtaaatttttctgggacacaaacatcactttgaccaaccactgtattttcgcactggaggacaagcacaatgttctttctttgcttgatgacaagccaaactgctaatttgggggagtttggtacacgcttataccactacctcttgtaagacaacattgta

SEQ ID NO: 261189 - DNA, 327 bp, Glycine max
  unsure (1)..(327): unsure at all n locations
tccacaagtggtatcggagcacatgagcttcaagtaggtgcttcttaaacctccattaattatcttttgctttaccttctcttccattgttgnttcttcatttttatccatgtatctcttcacatgtcttgtgctaaatgttgttaacatgattctttataatttccactgattgatcttgctatagaagcttgatttcattttctatggttcaaatttcttgttcatgttcgtgaaccatgagttgtgttgagtttaggttcctttgagttttgtcttgctattttttgttgctgaaccctaaaccataaaattcttacaaaatta

SEQ ID NO: 261190 - DNA, 362 bp, Glycine max
  unsure (1)..(362): unsure at all n locations
agcttcttttggaccttgaacaattattcaacttctctatcagaaccatgctatgtgctcgcgactggtccctttcttccctctccaacttgagctcattattgctaccccatagagctccgcgaaatttgttccggccatactcctccttgcgagccntcttggtctctcgttcaagggctcttgcggtaattgcattctcttcccgtaaccgggcgcacttcttccgaacgtgtgtagcagccaacttgaacttctccttggcgagttttgcctttcctaactcgctcttgagagcttggacttcttcgccctcttccggtgcttcaaaattctcttcgctgacgacttttgactttgac

SEQ ID NO: 261191 - DNA, 328 bp, Glycine max
cttttatttcagcagatgaagatgaatccatggccacctcatgtactcctttaaggacaatggcatcatttcttgccctgaattgatgggagttggaagccatcttctcaataaaattcctagcctcaataggagtcatatcaccaagagctccaccattggcagcatcaatcatactcctctccatgttgctaagtccctcatagaaatattgtacgaggagttgctcagaaatttgatggcgagaacagcttgcacacaatatctcgaatctttcccagtattcatacaagctctctccactaagttgcctgatgcctgaaatgta

SEQ ID NO: 261192 - DNA, 111 bp, Glycine max
  unsure (1)..(111): unsure at all n locations
cctgatttccggtccccaactcccaaaactcatgctcatcccttntcattggtgagctatgattctcttattgtctactctacgtccttagctggattaaatatttccggc

SEQ ID NO: 261193 - DNA, 268 bp, Glycine max
gcgcgatttctctgactgttttcctggttctctgcaatttttatcccttgctcatccaatatagatttctccttctccaactcaaaatctgaaaagacgaataaacacagagtcacgaaatcatcgcaattgcagcaattgaaacaatgcggcaacacatcacagattagagatcgtcaagtcaattcacacacgcggaaacacgaaatcagatgaaagctatgaaaatcgacggaaatttggaaagagcgaaacgtggaagtgaagt

SEQ ID NO: 261194 - DNA, 271 bp, Glycine max
agcttaatccactaaatctcatagattttaagatttcatagaacttagacttcactctaagagctcaaattaaatccgagcttgtgggcttgagttaccataacctacaattcactttgacttaaattcccgcgatcaaatatatgacttacatttaaaacgtttaacatgaattaatctttgatctttctggctggatctagccttagctaggaaaagtctataaaatctaagtttcacactcattttacaacactaagttgaatttatg

SEQ ID NO: 261195 - DNA, 154 bp, Glycine max
tgtgtattagttgatgatgtagcttgtgagggagaacaatacttaattgatggataaaaaaaaaaagcagcggattcagtatcacgggctgcaataagagctcggagactatatatgtacatggctacatataagactggaacaattttatccg

SEQ ID NO: 261196 - DNA, 321 bp, Glycine max
agctcaaaaaaaatctgtggtgctttctccttgtactacaaactcgtaaaaactactgggaattggctactttgaattctgagctgcaagttttactgcattttctacacatctgagacaaggtataaaacaacaaccaagtgacttggataaaagcacaaacatacacaaaatcactacgagtcggccggaacatcagtatacagacaacaaaaaggtgaaaggggaagcgtgcttgttggttcggctcaaaatttattctataattggcgcctatgctataccaatcttagttctgaaattttaattgaaaattactat

SEQ ID NO: 261197 - DNA, 489 bp, Glycine max
  unsure (1)..(489): unsure at all n locations
cgccacccggtgngcttgagncnctgataccctcgaannccccgatctctaagtgacctgcngcatgcaacttatgagaatttctattttattacaaaatttcanatctatcactgacacacagctatcaaaaaggaacttttcgcccgggcaacaagcattgttatctaattcttgactaacattattcctacgtaagccaacatcccagtggtatggaccattcattatcaaagaagttatgcctcatggagcactgatattggaggaccccaccaccacatggacctggatcgtgaatggaatcaaaatcaaaccctccctacgtggagattccgagaggataattattgcttgcccctcccagaggttgacccacaccaacactcctactataaagacttaagaatgctccgggaggccccacacatctaaccccccttttaatctcttccccccgcctcacatgcgttctacaacctaccgccc

SEQ ID NO: 261198 - DNA, 353 bp, Glycine max
acatgatcacaaaatccttgtttatgtagtgtatcacttcctaacagatattgtttatcaagttcatgtaatcctctttcactaacatgaccgaatctcaaatgccagagttttgttatatcaatcaatgtattactagctaccgatgcatgtgcaataatagtggaaccttcaagaataaacaagccattacttttattcttgttacccttagctatgattaaagagccatttgaaatcttaagaacaccatttggaattctagttgcatatcctagatcatcaaacatgtttatggaaataagattcctattgagctttggaatgtaccttacatttttcagtagatactc

SEQ ID NO: 261199 - DNA, 574 bp, Glycine max
  unsure (1)..(574): unsure at all n locations
tgcgtccangtntcctnttacctctctacttctctctacctataccataccgtcccatcctctccctcaatacacgcccgggtgacgcgtggacgcctccgacctctaacgtcaccgcacgctcctaacctcgacagcctgcttatcttagtaacaatctttacgcacctcactcttttctataccatggttatcacattatgaatgatccgatgcaccgacatacccgtgcttagagacgttcctcgcgatgtggaaacaactcaaaaagaacaagaatcacgttcaaagcgatcttataagcctgatgaatacttcccaagaaaaaattgtttcgtaagacaactgccgacactctacatatctttatgtggctgtctcactataactcatctctaacccatttaattttcaagactatccctcttttcttcactttctttcgatatactctactgttcaataacttcgactccatatgatttcgcctatcaatcattatcgatttgatgttacttatatgacatttcgcacggtcctttcgcactagtcttcagtacatccacaaacaccn

SEQ ID NO: 261200 - DNA, 345 bp, Glycine max
  unsure (1)..(345): unsure at all n locations
cttatccatggcttcctatggatgtgagcttcttcttgactcatcttctcctagaagtggcatctccattctgctgccattcattttcaagaagcaaaggactccattgatgaaaaagatcagaggcctacaagctccacatggagctacatcatgaattatcctgcttttttggactttattttactcactaagtgacgagaatcctgaaaatggccaaatacaggctaaagacccaagtggagaaggacgaangcccaagtggagaaggacaaagcccccgggtggaaaaggatgaatgcccaagtggagaatgatgaaggcccanaggcagagacactatca

SEQ ID NO: 261201 - DNA, 385 bp, Glycine max
ctcatggggtatctgtctcaacttgagtctttgctgctaacacgaccaccgcttttcacgatatattccttcaacactgcaaaaatgctctacaatgaaattcatagacatgggaaataaccaactttctgacacaataccacaatggatgtgggaaatgcaatatctaatggttctttgtctaagatcccacaatttcaatggcagtattactcacaagatgtgtcaactttcttcccttacagtgctggatcttggcaataacagcctgtcacgatccattccaaattgtttggatgacatgaaaacaatggctggtgaagatgacttctttgcacacccttcaagttattcatatggctctgactttagttataaccactac

SEQ ID NO: 261202 - DNA, 367 bp, Glycine max
attgacctgaaatgttgtttagtgagagatcaaggtgtttctaaaaatttcttttttcccatgtcatttggtatccctccagacagatgatttctagacaagttcaaaaaccgcaaagcagatagcttggaaatttcagatggaattgctccagacagcttattacttgaaaggtcaatcattctcaccaatatcagattgtctctgtactctaactcatctcctttgggaactaagacaagagtttccttgtagtggttataactgaagtcagagccatatgaataacttaaagggttggcaaagaagtcatcttcaccagccattgtcttcatgtcatccaaacaatttggaatggatcctgaca

SEQ ID NO: 261203 - DNA, 389 bp, Glycine max
  unsure (1)..(389): unsure at all n locations
gctaatatatcgagacgatcaanattgaacaacggaagctctcgtgatattaaaatggtcataagttttaactcggatgtccgattcaggagcttcacatatcgagatgcacgaaattgaacaatggaagctctagagaaattctaatggtcataaattttcacacggaggtcctattcaggcgcttaatatatccagacgctcgaaattgaacaatggaagctctcgagatattcaaatggtcataacttttcactcggatgtccgattcaggtgtatcacatatccagacgcttggaattgattagcggaagctctagagaaattcaaatggtcataacttttcacacggaggtcctattcaagcgcttaatatatcgagacgctcg

SEQ ID NO: 261204 - DNA, 443 bp, Glycine max
  unsure (1)..(443): unsure at all n locations
agctntgatggtgttgagaacaaatcacatgtttatcatcatcacccacgttgagaatgtgaatgtatgtatacatgattttgatgatgccaaagaagaattacacaccgctgcttcaaatgataagcatttgcttcaagaataattcaagagtgtttcaacacacaaatccttgtttcaagattcactaaacaccacgccttgccttaaaacaaagtgctttctaaacatgcaccgctctggtaatccattaccaggaagtgtactctattaccacaagacacggttgagaaatagttgttgaaaaatgttttgaatttgaattttcaacatgtaatccattaccatttgtctataatccattaccacccaagaacctcctgaaattcaaattcacaagtcatgacccttcacattataattgtgtaatcgattacataatc

SEQ ID NO: 261205 - DNA, 244 bp, Glycine max
  unsure (1)..(244): unsure at all n locations
actctatgcagtactcgctcttggtgctcagaagatcccaaanacaaatccctcttattactttctatnttgaattctatagttcctgaatgtacaaccttcaaattgttgctcattcccctctntgttttctgtcaaaaagaaaatcaatatcaaagaaaacatggagagaattgtcatggttattattactcgaaccagaaggaataacatctaaacaagtcattttattcttacgtttatt

SEQ ID NO: 261206 - DNA, 445 bp, Glycine max
agcttgacttagtgcgtgaagagatggcgcttagtgcaaggtttgcgcttagcggataagcaatctaaaaatttttctaagtcattttctgcttatctcttcacacataattttaacaaccctttttgttcattactaaacaagctgaaatcaatcacaatcacaagcaagatgtcttaactacatgcaagaaataaaaatgaagatagagaagggaaagaaaagttgggttgcctcccagtaagcgcttctttaacgtcactagcttgacgcatcatcctgttatccaggatccaataatgttcccacttcaaggaccttcttctcacgtcttctttcctccatcacatgaactctaaaatacgcattccggtcaagtggctctttatcttcatgaaatacatcaaagctgattttctgatcttctatgcccattcacaacatc

SEQ ID NO: 261207 - DNA, 463 bp, Glycine max
cttctcaggaggtgagcttagttatgagaggggtgtgtgtagcttagctctagcttctcaaggaagttttctcaaagaagcttctcaaggaagttttctcaagaaagcttctcaaggaagctatctagtctataaatagaagcatgtgtaacacttgttgtaactttgatgaatgagagtcttgtgagacatacttcaaagttccacttctctccctcctttattccttcaatttcgtgctccccctctctctttctctccctctttcttttcctccattgaagcatcctctccaagcttcttatccaaagctcatcttggtggtgaagctccttcttccatggcttattccctagtggatggcaccgcctgttacctcttctcctttgtcttccactgcatctccatggtggaaaatcaccattaaaggacctcattgaagctcacagatccaacctccata

SEQ ID NO: 261208 - DNA, 281 bp, Glycine max
caatggcaaacactccatccacctaccttgttgctctatacaacacgctcgaagtagatcctctatagtctgaatacttcgttcagtctgaccatctgtttgaagatgatcacttgaactaaccttcaacttctgtcccaaggcttcatgtacactcgtccaaaatcgccaagtgaaccttggattcctgtcagatacaatactcgaaggaattccctgctaccttactacttccttgatatacaacttcactagcttttccattctatacctcatattca

SEQ ID NO: 261209 - DNA, 305 bp, Glycine max
  unsure (1)..(305): unsure at all n locations
ngagaatggagaattgcactaagcaattattactcatagctctttactcgaaagtggaggacacatgaacgatnacacaattcatggagctcctgaaaaagggtagataatggagaattacactaagctatcactacgcatagcttcaaactcgaaggtggaggacacatgaacgataacgcaattcatggtgctccgaaaagattgaaaatggagaattgcactacgcaatcactacgcatagctccaaacgcgaaggtggaggacacatgaacgaaaacgctattcatggngctccgaaaaga

SEQ ID NO: 261210 - DNA, 384 bp, Glycine max
agctttagaatacatagatccaacgcgtgttgtgaggaagctgaatagaacagcaacaacatctctctcagcttcggcatacagtatttttttttatttgattttctcactgttaccttaaggtttatactggaattgtaattcgtccacccttattttctggtctaagttttggtgaaaaagtgaacacccgcttagattctccatttccttataatacgttgctgagaggagaattggaggttactgtctgctttagtatgtccatactctctctctatatatataacaacacgtaaatattcataacataacaaaatttcatggacttacaataatctaaatgctgccatatatgttaaaagattgagtgcacagtaatac

SEQ ID NO: 261211 - DNA, 380 bp, Glycine max
tgagtgaaatcaggtgcagccatttatctaagagtcctcttatgaggttgtggttgagccatgttctcagtgcgaaaaatagtattcgaatgcttaatatcagaatattcagaatcattagcaatagaatactcagaatgctcaaaatgctcacaatgctcgaagtgcatataatgatcaagatgcacactatgtctaactaatctatgaaaggttctatctatttcacgatcaaagggttgtaaatcacctggattgcccctagtcatgcactatatgcagcaaataacgcgttctcaaacaagcaccacgggagggttaaaactacaactatagtcaaatgatattgatatgagctgatagtttgtgagcaacaccct

SEQ ID NO: 261212 - DNA, 427 bp, Glycine max
  unsure (1)..(427): unsure at all n locations
agctntacgatcaaactttntctctcaactattcttcattctccttgctcttttcacttcttttattccattttcttgcacaatatttgtagctttttctattggtgatgatcatggaaggctaaacactccatcaatcaaaggatccactccaagcaaggctgaatttgagttctggtttactatttctaatctttgcgaatgttcttctttctcttcaatcctattttccattttcatgattatgattatgcttacgaatgaaaacatattacgttatgaattcatttcctaatttcaaaatttaatcacaaattttttggatgattttcgaacctaatttgcgatctcaaacaatttacgaattgattccattgaactatctctaatgcatttgaatgaactttcacactaaacaacatttata

SEQ ID NO: 261213 - DNA, 444 bp, Glycine max
  unsure (1)..(444): unsure at all n locations
tgngattctcataaacactgagtctanactcatncaactgttgcaacctgttactacatacttaggatcaaaaattaccaacattaaaacccacatgggtttgcacttaattgagtaagctcattgggacctgtaggcctaagatcttctttatcgatgggatcctttgcttctttggaagatgaatggcagcggaatagagaaggaagagagagaggagacgccacttccaggagaagatgagtctagaanaagctcaccaccatangaggccaaggataagaagctggaggaagaangagatgaatgaanggagagggagagaagagcacgaaattntgtgctctaaaagagctctgaaatctgaatttaatattcanatgatcaannagtttcaaaaatgcacacacatgacctttatttatagcctaagtgtcacacaaa

SEQ ID NO: 261214 - DNA, 220 bp, Glycine max
agctttggggctgaatataactatataacagcgttgcagttctagtatatgggcccctcctctctcgctcgcgggagacactatctctctcctgtctctcttatatgattagtatttactattagactctctcatctctcgtctctattcccgatctttgtaccattccagatcagacatttagttttatcaataaaatatcattttctatttcattcat

SEQ ID NO: 261215 - DNA, 393 bp, Glycine max
  unsure (1)..(393): unsure at all n locations
tatatagaaggtttgttcctaatttctctacaatttcctcacctttcaatgagctggtgaagaagaatgcggcatttacctgnggtgaanaacaagagcaaagctttgctttgctcaaagaaaagcttactaaggaacctattctagctctttctgacttttctaaaacttttgagctagaatgtgatgcctctggagtgggagttggagctgtattgttacaaggtgggcaccccattgcttattttagtgaaaaacttcatggtgccaccctcaactacctcacatatgataaagagctttatgccttaataagagccctccanacttangaacattaccttgtntccaaggaatttgtcattcatagtgattatcaattacttaagtaca

SEQ ID NO: 261216 - DNA, 406 bp, Glycine max
agctatgaatgctctatttattggagtcgaccataatatcttcagactgatcaacacatgcacagtggccaacgatgcatgggacatcctgaaaaccactcatgaaggaacctccacagtgaagatgtccatattgcaactattggccacaaaattctaaaatctaaagatgaacgacgaagaatgtatttatgacttccacatgaacattcttgaaattgccaatgcttgcactgtcttgggagagacgatgacagatgaaaagctggtgagaaagatcctcatatccttgcctaagagatttgacatgaaagtcactgcaatagacgaggcccaacacatttgccacttgagagtggatgaactcattggttctcttctacctttgagctacgactctcggata

SEQ ID NO: 261217 - DNA, 434 bp, Glycine max
  unsure (1)..(434): unsure at all n locations
tcttagtttcagatgatgcagctgagtttgtagctacctcatgcactcctctaatgactataacatcatttctggcgctaaactgctgggagttggaagccatcttctcaattaaatntctggcttcagcaggagtcatgtctccaagggctccaccactggcagcatctatcatacttctctccatattactgagtccttcataaaaatattggagaagcaactgctctgaaatctgatggtgagggaaactgacacatagttttttaaatctctcccagtattcatacaagatctctccactgagttgtctaatacctgagatatccttcctgatggctatggtcttggaagccagggaaattttttctaagaatactctcttcaagtcatcccagctcgtgatggaccttggagcaaggtaatacaattag

SEQ ID NO: 261218 - DNA, 282 bp, Glycine max
attctacactaacaactcaaactaaccatcatgcaagttcaaaatgaacaaacacaggctaacatgaagccttacttggattcctgaaattggatgcaaagaacgaagccatgaaaacaagcgaatagtgagagcacaaagaacagagaaagcttcaacgaaatgccaaaatgtatgttaaaaacacaaatgaaaatgtaactgctaaacgcacgtatgccttatctttggtggtttcaaatgcatcgcttactgcgtcaacttgctaagcgagcatacatg

SEQ ID NO: 261219 - DNA, 520 bp, Glycine max
  unsure (1)..(520): unsure at all n locations
tggcncccccttttgaaacctttcatttgcagacnctttgataccttttgcatgtacgcgacactatancatactcaatctgttcctctcacaactaacttgtatcagctcattgtccaacgacttacgcgtctcctatactcttattggcgaccaatgaactattcaaaatgttccaatctacactatgcgttactgtcttacttttcaagaactacgtaggtatgagtttctcatcacactctangatacataggagcatggtccacactctcgtcgaccgccaaagataccttcatcctaagggaagaattagtaatcttaaagtcgtgattagcacactcaattaaagacttccagcccttgtgataaacgcgtggggtgctgatactttccccgcacataaacgacatccacacccttattttcatcatctgtagacacgcttttggctatttataacgatctactcgaataacagtggtgactacatccgccatattcctttcgtgaacacccg

SEQ ID NO: 261220 - DNA, 444 bp, Glycine max
gctcggtgcactgacctggaccttaatgaccgttagaccggacttaataactgcagctgctgcttgagggccatccacatttttttattaagaacgatatgagattacagcgagatcatcgtctccttgatcatctgtcataccctagttgcttccgtggacctttggtgaatgatctgtgacctatttttcgaacatgcgacgtgcttggctcccattattacgctgttcttcacatctcttacatgttacaacggcaaccaacccgattgactattcgatgtttctgtgaaccttagacgtactcagacgcatcggtcattatttatgacatatcgactctattcggatgcttagacgggatgaattgtataccaactgattcgtacattatcgaagaaacattattgtactatactctgattgccgatctttacacacacg

SEQ ID NO: 261221 - DNA, 396 bp, Glycine max
  unsure (1)..(396): unsure at all n locations
ctgcctgtccgatgtagcagtaatgatggcccgagttatgttgtttaacggttacaaacccggaatgggtttatgcaaagacaaacacngcatgactaacctgataaatgccaaaggaaatcgtgggaagtatgggttaagctataagcccactcacgcagatataaagagaaacatcgctggacggaagagcggtagtcaaagctcgtggtcgatacacgaaggtgaaggaagcccgccctgccacataagtagaagctctataagcgcgggtctggtggacgaaggtcaagtggtcgcgatatacgaagatgatgctccgagtacatcggatttggtacgaccatgccctcctgatttctagctgggaaataggcgagtggagtgtcataccct

SEQ ID NO: 261222 - DNA, 375 bp, Glycine max
  unsure (1)..(375): unsure at all n locations
tcatttgctgtaacatatcaaactggttntgggcctaaggttctccttgttcccaattaatagatattgaggcatatcttggatgggtagaaaatgggaaagaagatacttgggtcagactaaatgataaaattataccatttttattggtagttgctatatctacttcctttcttttcttatgcaccctccttttcaatttgtgtttcaaaaaatacactcccttgtctacctataaaaggcgagtggataagtgaatatagcagtaaagatataccatgcttatcggtagatgctatatatacttcctttcttttcttatccacccttcttttctcgatttgtacttaataaatacactcccttgtttaccta

SEQ ID NO: 261223 - DNA, 386 bp, Glycine max
  unsure (1)..(386): unsure at all n locations
tgatgatgacattacgcctcacagaatgtttcacgaatgagtcaccctgttctagatcacgataagatcaagattaatttccagattcacgaaacgacatcaagtcgaatcacgattcaagagaagatgatttcccaccggaagtattgaaaacgatttttcacacaccaaacatagcacagttntgttttacaaaaaagttttctcacaattttctacgttaccagagtatttactctctagtaatcgattaccagtttcctgtaatcgattaccaatggtaaattntgatttcaaaagattttaactgaatttgccacgttccaaatgttttttaaatggtgtcatcgattaccatatattggtaatcgattaccagtgtatct

SEQ ID NO: 261224 - DNA, 425 bp, Glycine max
  unsure (1)..(425): unsure at all n locations
atacacgaatgaagctctgataccacttgttagacaagtggcctcagatatcttaagaaggggggttgaattaagatattgcaaactatttccccaattaaaattctatttcaatttcaatgcaagttgcacgttcccttaaaaaatgaacttttaaataatgattcaaaaagaacaatctgaatataaatataaagcaataataaataaatgagtttaagggaagagaaactgcaaactcagatttatactggttcagccacacccttgtgcctacgtccagtccccaagcaacccgcttgagagttccactatcttgtgaaattcttttacaagttctgaacacacaacgacaatcattcctttgagtttagatntctttacaacaagagaccatcggtctctcaatcccctttgagaattta

SEQ ID NO: 261225 - DNA, 441 bp, Glycine max
agcttctccttccttttcctataaataggggaaggagggaagaacaaaaatgttcaaccctcctggtatctgagattcacttaaaattagtgagaaaatttgtttccgtgaagaaaatccaagccgaggcgcttccgtaacgcttccgtgacgtttccatgggtgatttcgcgaagattttcaaccgttcttcgtcgctcttcgtttgttcttcgtcgttcttcggtcttcaaccggtaagttcccgaaattgaacttttcaattcattctatgtacccttaccggtcctcatttgttgtgtgtgcttttattttcatttcatttactttctgtacccccttttgacgtgctttactcatttatttaagtcattttctcgcctaatcaaaaataaaataaatttccaccgatcattcgtattgcaacatcctttaatttct

SEQ ID NO: 261226 - DNA, 427 bp, Glycine max
ctctgtggattcggtcttcgtcggcgaaatgatcgaagtgggtctataaagaggcaaatatgatcattatgctttgataaatgcaaaagaaactggggcaagtgaagaggatgagaaggagggagaaacctatgttgtgactgccattcttatacgaccaagtttcccaccaacccaacaatgtcattactcagccaataacaacccttctcattacccaccacccagtcatccacaaaggccatccctaaaatcaaccacaaagcctacctaccgcacttccaatgacaaacaccacctttagcataaaccaaaacaccaaccaagaaatgaattttgcagcgagaaagcctgtagaattcaccccaattccagtgtcctatgctgacttgctctcatatctacttgataattcaatggtagccat

SEQ ID NO: 261227 - DNA, 427 bp, Glycine max
ctactgcacaaaatagcatgcatataaatgttaaattgagttttttataccacaatatgaaagaagcatatgatgaaattcagactccattgcgttcccaaatgccaactacattttcaaaggtgtccataattcaagagctggatgcaacggcatacgacgaagcacctgctatcgctttcaacatgtcctttgaagtaagtcgtttgaaccatactagtttaactttaaccaatattagattgagaacacactctcttattggttaacatttatagcacactacaacaggagtgggaaatttttttttatttccattatatttcaaccaatagtagagtgttaagaagtgtattactaacatttcttatatcagattactataaaaatgacgaaccatacagtcgttttgccttatttaagtgac

SEQ ID NO: 261228 - DNA, 409 bp, Glycine max
  unsure (1)..(409): unsure at all n locations
tcgttaatggctggacatgatgtatgtcagagtgttggtttggtcagtggtacaaggataatagggttgtcccacattatttccatgacacacatgcaacaatgatgatttggaaattttttgcaaaagtggtcatgcatgcacccatgtggacactcaagcataaagnttttatggtcatgtgacactagggctcaggattcatttttcctatttaagtcaacccaatatttccaaaatatgctcctttatcaattcatgcattcatccgagtccattttgggtgttcaggaaaattttcacagcatttacccttcaggtgcatacacattttttttcaaaaacttttggtttgatcnggtgaatcttttcaaagaaagggttggagttatttcttttaaaagcatgt

SEQ ID NO: 261229 - DNA, 376 bp, Glycine max
  unsure (1)..(376): unsure at all n locations
agcttcaacaccggaatcttgtacagctccttgtttgttgcattacaggaaaacaaaaattactattatatgaatacatggttaatggaagcctggactccttcatatctggtacgtaatatatgaatcatgcctaaattacgttcacttgtgttctattctttaagctaatactcagcaccttattaatcttgaatatctaatactgaacaataattcttaactctttcagataaaataaaaagtaaattactggattgccctcaacgcttacacataatacttggaattcctagggggctttcgtatnttcatcaagattctcgattaatgattattcatacagatctcaacgcacgtaacattttactcgatg

SEQ ID NO: 261230 - DNA, 434 bp, Glycine max
caactcattgttgatagaacatcgaccctcattgttgatattgttcgaagaatgtcagatttttctataagacatatggcctccacattgtctgctgccttgaacattgcaaagaggaaagaaaaagttagatctttggaagcatttacaaattctagaataataggaggactttatatttataaattattctaccttattatctgacataactctaatgaaatctttaaaatcccacaacctgctccacttccatggcttcctaggtgatttttctctaacaatatacttgcccaaatcgcacaacaactcatgcatttgaatccacctcgaatccatggttatgagtgatttatcaacgagaacttgtacgccatattcgggaattaatccacgaaaatctataacttccttcacatatttcacaggataat

SEQ ID NO: 261231 - DNA, 355 bp, Glycine max
  unsure (1)..(355): unsure at all n locations
agcttcaacccttggtgcccatttctgctccatatcgcgaaacgagggcattttcggagtcgtgaagcgcgtctctacgtgtgggacttcgaaatttcacgtttgggtggacttctttctcctttgattntcgtgggtatggggttttgggagatatgatgtgtacttttgctagttttctgcttcatgatagttatttgtgaacaaacttgttgaaagcatgttgaaattgccatgtttggaagagttaaacatacccattctgttttatggtttttatgatgatggttgtgatgttcatgtgctgaaattgcttatggaaaactgctagagatgaacggtacaattaacctac

SEQ ID NO: 261232 - DNA, 429 bp, Glycine max
  unsure (1)..(429): unsure at all n locations
agcttgcttctacaatctcccctttntgatgatgacaactctaacatcaagacacacatacacacacttttgtctagtcgattactcacttaattntccattctncccctttgtttttgagtttatgcttcacttgaaattaagttaattacttatgtgagttcttgatttaatccctatttctcttcgcctttggcatcaacaaacagccatagtgcataacaagtataaaacatttatatactattaatcattcacaagacattcattgaagaatataaaccaatcatgaagcaagaaacatgaatagatcaaatatataaaaaccacatagtcatataacataattcataattgttcaatcataccatgcaaataaagaaatactaaattgttcaaatgtcaaaatatagccaaatacacggctag

SEQ ID NO: 261233 - DNA, 369 bp, Glycine max
  unsure (1)..(369): unsure at all n locations
tgccacccagctcgcccaggcgagcaatggtgcttcctccagaatcacagccttctggaggaatcttcttgcaggcccaattgggcttgggtgctatatgcacccccatttttactaaatacaccccctgcctttttttggtgattcttttttcgtaaagttacggaaacttacgaatttcgtaacgatacttgttttctttccgtaatgttacggtaccttgcggattacataatcatccctttntttgacttacggaatgttacggaacctcactatttgtgcaacgatgcttccttttgatttccggtgtgtcacggaaccttacggattgtgcatcaatattttcttttgatttccggcacgtca

SEQ ID NO: 261234 - DNA, 425 bp, Glycine max
agcttcttcgtcatttatatcttacaacatcattataataattaaaggtttaaatatatttaaggtccctcataactaatattgctttggatccctactaaaatttttacttgctctgagttcctaatatattaaaacttttattttgaatcttttaattttaatatatggcgactcaaaaacaattcaaaaatctaggtacctaaataaaattccgtcatttatcacatattttaaacttatttaagacataattaaattaaaagaagcaaaaagactaactcggtttcggtggggagaccattgtcgccgaggttgatatccacggcggagagaattcgaccatcaccgcgagcgtcgtgagctttgacagcgtttaagcttcttttacgccgctccaccgggaacacaatattttcgttggc

SEQ ID NO: 261235 - DNA, 389 bp, Glycine max
  unsure (1)..(389): unsure at all n locations
tatctaaatgcaccctatagtgtattacttttcacatgtatttgtgtatctatgtttgatcatgattttttgccaccccctgcacgtggttatcaaggtggcagagttatgttgggccttgtgttggtatgctttcaatcgacaaacaatcttctgataaccatttgataacccacccaaagattgcagatagacctgtgcctattgataattctgacattatttcaaagggaaataactgtgacagcaataatttagatattcatcgaatgttggaagagggtacagactatgttttagttcctgaaaaagtgtgggaaaggctgttggaatggtaaatttattatataaatatgttgctttttaatttggaaaanatgaatgatctt

SEQ ID NO: 261236 - DNA, 423 bp, Glycine max
agcttgtggcatataatgctagggtggataccttgtatggctgccaagtgaacacgtcagcattcttgtgtacgacatctgctatgcgtttgtactaatgactggtgaggtccctgctaagctgtatacactgcctgcgtttgcgcctgagttgcagtttgatgacttcttcaatgggctttggttctttatcagtagtgtcgtttcgtggatctacatcaaatatgtcatccacggttgctcgatacacgattacggcttggattggagacccttcctccatgctcatgacttgagtatcgccactcgttgtgaggtgagacttgctaggctctctggtgagaggatacggtaccaccttcacgctttcagcataacactgatgcgcttgcttttgatctgattgtaaagctcctcgagagc

SEQ ID NO: 261237 - DNA, 355 bp, Glycine max
  unsure (1)..(355): unsure at all n locations
aaatcaatcctgaaaattcctacacaactagtgaattgtatacaactctctagttctcagcaaaaaggacttggcgccaacggtttcacacgaaagtnctgcangtaaagtgggcttcttactcactctctcttaagcctgttggtgttttctgtaatgtgggctgcgtatggttgtgctgctgtgttgctatcataaatggcatacctatccaaagtagaaaccagttctttttgatcgattccaaattctgtcccttccgaggagagcaatagttttcaaaagaatcatatgctaggtacttgtcatccaattcaacgactntcaaaagagattagactgtgacaatgaatta

SEQ ID NO: 261238 - DNA, 428 bp, Glycine max
  unsure (1)..(428): unsure at all n locations
agcttctatataagctgtaccattttatcaataaacacaagttgagttttattcagaaaattagagtttatctcttttatcctagcgagagtgattctcctaagttcttgagtgattcaagaacaccctggctatatcaaaggactttcacaacctttgtgtgttgcccttgtcggaaagagtgattctttccttcctttcatcttcaaccttgttctttcacaccacaaatccataaaatctatttctgcccaaaattatctcgtggccataactccccttttacgcgctcaaagtaagtgattcttgagcctaaattgaatttcaaaacgagacctttcacctcgttttggaatcacctcattcggagccctgtagntcgagttattgccatttctatatttctgtcctgccccacttaacctaca

SEQ ID NO: 261239 - DNA, 413 bp, Glycine max
taaagatccaacctctatgatgcaatcctaccccgcaagggcattgggtagaagactcaaagtagattgggctagagatccaagggaaggccctagggttctcatgagccttagggtagatttcgagcccatgggctaagtatgagcctgcttatctttgtaaatattagaataggttttcccttcgtctgggccttgtactttggccattctaatactatagggttttagccttgtatttcgaggcattttgagtagtttttgtagtaaggaattttttttttattttcatgtttttgtcatggggtgcgcttagctattatagagggtgtgtagctaagctctagcttctcatctcaaggaggtgagcttagctattagagaggtatgtgtatctaagctctagcttcttt

SEQ ID NO: 261240 - DNA, 417 bp, Glycine max
  unsure (1)..(417): unsure at all n locations
agcttcaaatatcttacttgattcgttaagcaaatctcatttatctaatattntactagtcatattggctcttctaacattcctttttggtgatgacagaattaccatgcaaaactttctgcttttggcttggcaaaagatggaccacctggtgataagagccatgtctctacaagggtaatgggcacatatggctatgttgctcctgaatatatggccacaggtacctaagtttgtggagtacttagcttatgaacactttagttggtcatacaaacttctatacatatcctgccttctaaattattgcgcaccaaccatataatacattaccgaaaataagacacccttatcaattctttntcaagccatcggggagctttntagcttcttttttttcccttcattaacaagcac

SEQ ID NO: 261241 - DNA, 347 bp, Glycine max
  unsure (1)..(347): unsure at all n locations
ctcagctggaaggatgcttaatggggaaaaagagggagaaagttagagtgggagcacaaatgaagaagataagggaagaagtgacttgagttgtgctcacagactttattatcanagtacaaaagtgtacacatgctttattatagactggtaccttccttgaaactntcttgaaaaacttcttgaaagcttttagagaaactttctcgaaactagagcttactacacatcccctctataactaactcactcttgaaacttcttagagattttaagaactaagcttactcacacacctttaatactagtctctattgaatgaaactagacttactcaccccatatat

SEQ ID NO: 261242 - DNA, 392 bp, Glycine max
agcttgacttaaacgtattattctttgtcctactaagccactattggctctaaataaatcaacgaaatttgctggaagttcgcgcactgaataaatatgtgaaagtcttatacacgaatatatcactcaatacttttagtattttctcttcaggcatgcaaagtattttgagggcttaatatcttcacaacaattctaaaaaaaaattacaacaaagaatgaaggaatatgttcgcatacatgattctatcttatttcttcacatcctcctatatatatatatatatatatatatatatatatagccttcatctgcaggtatttattgtctcaccacagctagactcttcactttattcttcgtctgacgccttacgcctgttggagcattc

SEQ ID NO: 261243 - DNA, 419 bp, Glycine max
  unsure (1)..(419): unsure at all n locations
ctgagagttcactcataatttaattcatcggtctgtctacgatgtttattaaaagggggagaaacatgtgcgagggattctaattgctgtcctatttgaacatgtctcagtaaagagattagatccttcgggtagcgatattttgatgatgagtaatatcattttcaatgtattacaaaagagctctttttgtattttttatttatctaacgaaatgtcgatatcagagtagcaactcttangagatagttctatattgacttaaataagattggagaattaataagcgtagatccgggaattcccgatatatgtcaacctttcgaactatcgctgaatccatgagtaggcactagacagtctggtgaactgaaacatcttattatctatggagtatggtgcttaaattgattaatatt

SEQ ID NO: 261244 - DNA, 449 bp, Glycine max
  unsure (1)..(449): unsure at all n locations
ntgagccaattctaacgacaataaccttttactcggatgtccgattgagtcccgtaatatatcgacacgctcgaaattgaatgttgaagctctaagccaattcaaacaacaataactttttactcggatgtccgattcaatgacgtaatatatcgggacgctcgaaattgaatgttgaacctctaggccaactcaaacgacaataactttttactcggatgtctgattgagtcccgtaatacatggagacgctcgaaattgaatgtttaagctntgagcaaattcaaacgacaataactttttactcggatgtctgattgagtcccgtaatatatggagacgctcgatattgaatgttgaagctttgagccaattcaaacgaccataaccttttactcggatgtctgattgagtcccgtaatatatcgagacgctcgaattgaatgttg

SEQ ID NO: 261245 - DNA, 256 bp, Glycine max
tatccctctctttttttaccacacagcactaaaaatatctacatattctccttgagatcgaccgacttcacatattacttcttctaccccaacaataaccactatttaccctcaaatataactgcacagagagcatcagccattcacagacactgctctatataagactaatgcacaatacctctcttcagtctattaaataaatacgttcactaacattacctttgactctatttctctatatacatactatata

SEQ ID NO: 261246 - DNA, 448 bp, Glycine max
actttagatcgctacaaagaaggacaaatatcagtatggaccaccttatggactcctctaagaacaatagcatcatttcttgcactgaattattgggaatcggaagccatcttctcaatcaaattcctagcctcagtaggggtcatatcaccaagagctccaccactggaagcatcaatcatactcctctccatgttgctaagtccctcatagaaatattgaagaagaagttgctcaaaaatctggtggtgagggcagcttgcacacaatttcttgaatctttcccaatactcatacaatctttctccaccaagttgcctgatgcctgaaatgtctttactgatggcagtggtcctatatgcaaggaagaaattctccaagaacaccctcttaaagtcatcgcaactgaaaatagacctgtgagcaaggtagtatagccacatctttc

SEQ ID NO: 261247 - DNA, 574 bp, Glycine max
  unsure (1)..(574): unsure at all n locations
atgaaagttctctctctgtatcataaagantatattacattcgnttgtattgataaantacatcaannntcnccgctccagagattgatccgtgcactacgtgacacttagatactcaagcatccgtcgttaaactcctagcgcctcgatacgctatgcgctgatttgcacatgctcagtgatcagcgatcaccatttgattatccagagaacatccgccgttcaactctccagcatgtttatctgttcatgcgcctaatttagacatgccattgaacagttatgaccatttgactgccttaagaactttcgctgtgacatgatctagctgtctcgtcatgctacgctcctgaatcggacatgcgagtgagcatttctgatcattgtagtatcccagaaacatccgaagtttcattcgagcccttctatctggtatgcctctgaatctgcatttcagtgaatagtctgcacattcttattatcgctagcatcgctgtcaatttatttttcgtcgtatgttttctcgtgctgtcatcttttatcgaatctttcgcctgtctatcctcttcacccc

SEQ ID NO: 261248 - DNA, 402 bp, Glycine max
catgcaagcttcccacaaggtatatttattttcagttttctgaacatatcaacgaatctcgcccgacggtggtccttgtccttcttggaacgtaccacaagatatggcacttctgtatcctcatttgaagattcttcttacttctctcttgcattctcacttctactcttttcttctcctcctttattccttctccactttctctttttcttcatttccatctcctttttctacctctatctctttctcttgctcgcttatttctttctcctccaccattactggctctttactcttctgacttgccacattcgctacctcctctttctttttctccatgccatctcttataacaatttgtttctcaaagccactttatccttatcctcaactaccaaattc

SEQ ID NO: 261249 - DNA, 434 bp, Glycine max
cgatcttcatttctgttatttagtccattgttgcatgcatcatatgaggcatcaattttagtattgtttaacttttctaccaaatgtttattttcctgttttaaagcatgtaactgcaggatgaacatagtgataagaatgttaatatccctgttagtgtatcatagctcagcaaaagttgaatactaaatccatactattttgaagaaaaattaaaacttgtactacatacacaatggtaacttgaaaatgatcatgctactttttgggtatccttctttctttcgaggaaaaaaaatacttatttattccctatattaattatgaaaaatatagagattataactgatggctaccaaaaagttaacaatctccacttgttcctttctgtataactacccataaaccgttgcagacctggattggaaattctg

SEQ ID NO: 261250 - DNA, 273 bp, Glycine max
aacatagttatccacatccacaaagtgcgcacaaacccacgataccctgttgcccacctccaactgagctcacgtactcccacgaagcccatatactcgattctctcaacaccgcggccccataaagcctcccaagcttccgcaacattcaagcaaaacaacattcagacagcacaagctatcacagccaagcaaaacacagcaaaggcagaaaactctgctcaacacattaaccaaaatcacaggttctctcacttacagaccaacagataa

SEQ ID NO: 261251 - DNA, 399 bp, Glycine max
ttgcccattgactttagatagctacaaagaaggacatatatcagtatggaccaccttatggactcctctaagaacaatagcatcattgcttgcactgaattattgggaattggaagccatcttctcaatcaaattcctagcctcagtaggggtcatatcaccaagagctccaccactggaagcatcaatcatactcctctccatgttgctaagtccctcatagaaatattgaagaagaagttgctcaaaaatctggtggtgagggcagcttgcacacaatttcttgaatctttcccaatactcatacaatctttctccaccaagttgcctgatgcctgaaatgacttttctgatggcagtggttctatatgcacggaagaatttctccaagaacaccct

SEQ ID NO: 261252 - DNA, 417 bp, Glycine max
cttttttcaaattaatctgtctaccgcatatcactccccacgcgaagctctcattcctgctccttcttcgcctaacatacacacttgctcaaactcatgaaaacaaacacacatttcatcacaatcatgcattctattcaaaacccagccatacactcattttcacaaaaagataaaacgcgtttactgctatgtcatcaaaatcaactcaaactgtctcatatgcttcagaactacgccaccaactactaaaaaataaaactagcagtgtatataaacataaaagaaatactgtattgaaaccataagcataatacatatgatccacaccgcccaataaaaataatacatatcatcacgaattcaaaattcctgtgactggttctgagtgtcctgtgtctgcacatcctcctcatc

SEQ ID NO: 261253 - DNA, 402 bp, Glycine max
  unsure (1)..(402): unsure at all n locations
tagcagccaactcctgagggtcaggcctcatgagtgcaaatctttaataagcacaaagtgttacccctcttgcacaacaacaggggtcttcaagaaagtgttaagcgtatcctcatcaaacttaatcaaatgacctctcaccctcacctgcttaggtgatttgtcctcggggtcatagaggttggtgtaaaactccttcacaatggcaacatcaatgttaccgtcaatgaaatcagtcaactccttatcccagtggcgtctctcgagttcctccctgaactcatcanactttgtatagtagaccaccacattcctctctggcaaaagcttcctaggcacaataacatcagtgtatcttttcccaccctcttgtgaagtgaatctggatcttgaaaatctaac

SEQ ID NO: 261254 - DNA, 452 bp, Glycine max
attgaccccttcaccaccgccatctctcagtcacctgcggcatgcactcttattccttatagctaacattacctcgttggccacttaacaccctcaaatgcgctttttcctataacaaaccatgttcgcggggggggttaaattgttctcaccttctatgacctttccacaatctctccacttcaccgtcaacaccacctccacacaatacacaattccaccccacgttccaactcaattactaccgctaccatcccctacatctcctcctcctcccctgtcttcacctcacccctcaattacatctctcattaacacctacactccaccactctcacctcccctccctccacgtctacaccctatctctcatcctcactcctccccctcctacctctcacaccccctccctctctccactacaactttcccctcccacccatacctccccc

SEQ ID NO: 261255 - DNA, 300 bp, Glycine max
  unsure (1)..(300): unsure at all n locations
gtctaattcaccccaatctcaatgtcgcatgctaacttactattatatatactcaatattgcaanggngaccataattccagcaaagattcctcaacctccattttcccaacgatacaacttgaatgcaacatgtgcttatcatggaggtgtccctgggcatttcattgagcatcgcgtgaccttgaagcataaggtgcagagtctaattgaagccagtaggctaaaatccaggaggacaactggttgtgaattctaacactgtcgagcgatactatacatggtactcgggtaaatttga

SEQ ID NO: 261256 - DNA, 497 bp, Glycine max
  unsure (1)..(497): unsure at all n locations
tggttgantcccatggatatacgtgacactatttaacactcaagctagcagctttgatatatactgagccacttcctgtcgcaacctatctttaggcgttaggacgaccgagggctgacgggtgtctctgccaagggagaaaagcgtgggagtcgccacaccttttatttggcgaaaatcgttgataaaccggaacagttgctatatgttgtttatgggtcaacggcttagcggttgtcttcttgcacaatcaaatgattgtcacccggcgcatccgcttacatgactttcgcctttaaaaatctgtgttgcggaagaagtatcatacatctgtatccccgtttattattcgaagaggtactttatgggcaattccttacctcatatgctgtatattgacgaacacgggatactctctcgtcgaccgcatcttgatatggaagtagaaggcttaactagacttttcttcggatgagaggtggatcactggattctcn

SEQ ID NO: 261257 - DNA, 429 bp, Glycine max
  unsure (1)..(429): unsure at all n locations
agcttcacactacagcaacacanaatctacgtgtttaataaccctcaatataatggcatctctacgcttgagaagtcaaattgagaatgggacaaatttgaagcaaactctcacctcacacaagtctataacatgaatttacactcgcttaaactggatttacgcttaaaatctcacccgatcaaaatttgactcttcaacacccaaatttaccctagaaacggctctttgttcactttggccatttgtttttctctctaccacaccctaacctttctcataactcctaaatggaatttcaagctaagattaactcactctaacctctaaatactaccaattccagatttggccttcacccctaaaaaattactctttttcactcataacaccacatttactttcaaccctacttaattctaccttcat

SEQ ID NO: 261258 - DNA, 449 bp, Glycine max
tgtagaattcaccccaatttcagtgtcgtatgctaacttactcttatatatactcaatatatgcaatggtgaccataatcccagcaaagattcctcaacctccattttcccaaggatacaactcgaatgcaacatgtgcttatcatggaggtgttccggggcatttcattgagcattgtgtgaccttgaaacataaggtgcagagtctaattgatgcaagttggctaaaatcgaggaggacaactgcttgtgaattctaacgttgtcgagcgatactatgcatggtacttgtggaaatttgaaggttgttgttagatgtctccaatgactcattaggaatttcaagtttatgccattattgtaaataacaatcacaatgctaataatatggataaatttgatgtccttgcctttcattctctcacaattacatctgtgcatatttattt

SEQ ID NO: 261259 - DNA, 431 bp, Glycine max
  unsure (1)..(431): unsure at all n locations
agcttaaaagaattaatgaatcacgctgttcaattaccgaagcaacactgatattcggcatgtttgttgggttttgattactctatacaatatagaacggacgacactaacatggttgcatacgcgttatcacgatgttcagaggaaccaagtgcctcgtttttcatcctctcaatacctcactttgcatttcttgaagatctgtctaacgaattacaatcgcataatgaatttataaccttaagggagaaggttcatgcagacncagccacctaccctgatcatgtgttaacacccaactttaatttgtatcaagggcgtatttggataccctcagactatactttcatcaaagctttgctcacggaatttaatcaaacaccaacaggaggccatatgggttttcgaaaaaccttgaatcgtgtagcata

SEQ ID NO: 261260 - DNA, 432 bp, Glycine max
  unsure (1)..(432): unsure at all n locations
tgagatggaacaggtcaaatgcgtgggataccaacttgtgtgttttcaccaacaacatgatggcaatcaatttccaagtgtttggcgtgtttgtgaaaaactggatttgcagctatgtgaagagcactttagttgttacaatattaatttaactgaggtacatgtgcattgaactttgagattagagaacaaatacataagtcattatagttcacaaacaacagagacaaatgctntatattatgggttgggataagtgttttgttttgtttgttgagaatgacaagtgggtgggaattacactttactacaacaatggaattggatccctgagtgcagagcagattcagaggatctctgcaagggtgaggcagtacggtaagattgaaggcaagaatgtcttgtattggttctagaaccacaaagctcgag

SEQ ID NO: 261261 - DNA, 441 bp, Glycine max
  unsure (1)..(441): unsure at all n locations
agcttctgatccacccaaggaggaatacatacatgttagagctcgccggcgtcaagcaacaaacagccatagccttgcagagagagtaagattntgtgagaacttatctgtaatgaaaatgaagtttttgtatgaagaattttaaattacattttcactgccggtgaggagggaaaagataagtgagagaatgaagtttcttcaagatcttgtacctggatgcagcaaggtggcttctaagtttgaacccacaaaattcactatgtcatattgttatttgcgtttatgtatcacatccttttaacattgctatttttactttctatgcttttacgtcactggcaacgcagtaatgctagatgaaatcatcaactatgtacagtcacttcaacgaccggttgaggtatggatgaacagcttatctccctattgcccacatgt

SEQ ID NO: 261262 - DNA, 387 bp, Glycine max
  unsure (1)..(387): unsure at all n locations
tgaagctntgatataatattgtgcaacttcctgtcgcaacctacccttcggcgggaggacgacggagggctcacgggtgcgtcttccaagggagaaaggcgtgcggagtcgccaccaacttttatttggggaaaacgtcggaaaaaccggaacgtttggtctatgaaatttaagtgtgaaaggttcgggagttgtttttatgcacgagtaatgtattagcaccccacgcatccgtcacaaaggacaacaacctttaatcaaatgtgtaaggtatgacttcaaatttatgtattttccctttttttatgtttttaggctttttatgggtcattntatatttttttatctttttgtggtcgacaagggtgtttccctcgctcctacgta

SEQ ID NO: 261263 - DNA, 429 bp, Glycine max
agcttcagctctcatcccacacttcttttacaatatctgattctacgcttaaataggcggccttgttcatgctcgtgcgcttagcgcaattctgaaccgcttagcgcacattagtcaatttcagcttagcgcgtgcttttctcgctcagcggatggactgaagcagtgcgcttagtgagacgaagcggtgcacttaccgaacctgtatagctcatcttctcccagattcttcctcacgcttagccaatgagtgttgcacttagcggatgctcgctaagccagcagattggcttagcgagaaggtgaaaaacaacacttttcaaagtcgcctaattaacctgaaattgacagaaaatgattattaaacacacaaaatggaagtacttactatttattacctatacttaacagaaagtactaatcacacta

SEQ ID NO: 261264 - DNA, 454 bp, Glycine max
  unsure (1)..(454): unsure at all n locations
acagccccactattcctttntatcaagacacttctagctctaacaacaaatcataagatttgttggattacaggtgcacactaaccagtggcggatcaaattttttttagtagggacaaaaaatagtctagcattttctaaaacaaaaaattatataagctttattaaaaatggtaataaaaaattaaaaatagtaaaattaaagggttgggtaaaattagtatcaatttattctcttttattttttacaactatttacattcatcttaataaaaaaattatcttgtggggacaagatctattttttatgggacaaaaaaaaaatatttattcaatatattcaagtaaaaaacttactttgtaggggcaattgcccccattaccctncatgntaatccgncattgacactaactatctatcgtcttacaaacgattatacaagatcaagcttac

SEQ ID NO: 261265 - DNA, 465 bp, Glycine max
  unsure (1)..(465): unsure at all n locations
ctctaagttacccgccgtctgcacgctttggaccatatcaactcacaatntacgtattccacacccctcactctaatgcgatttcctgtttgagaagtgaaaatgagaatggggtcaatttggagcacactctcacctcacacaagtctataacactaatttaaacttgctcacactggttttacgcctaaaattctgccgaatcaaaatttgactcctccacacccaattttaccctacacatggctcttgccttcactttgcgcatttgctcttctctcttgcacagcccacactttctcataagtcctaaatgacatttcacactaggattaactccctttaacctccacataccactaaatctagatttcgccttccacctctcacccnntactctttttccactcataacactacattctcactttctaaccctacgtcaactatacccttcatccctac

SEQ ID NO: 261266 - DNA, 412 bp, Glycine max
ttgaatctgattcagtggttgttttgtttgaaatgaatggttgtgttttaattgattgagcaaatgtatgaattgagtgtattggaatcattacgtgtttgttttggtcaagcttgcagtcattagaagagaatgagcatgtgattgaaagtatgactggaaatgttagtgtgtcagattgattgtgaaggaatgcattgaccgtatctcggtgagagtgtgatccttatattttgagagaaaatactatcatttagtactaatttttgcatgaatctctgaagtatggaatgaatgcatgatattgaggatgatgaacgccatgtttgattgtgatagccaattaaccaacaagctgaccatgtgcttgaatgagttatccctttgccccagtttgagctgaatgaattac

SEQ ID NO: 261267 - DNA, 326 bp, Glycine max
agcttcttatccaatgttcatcttggcgcgcaatctccttcttccatggcttattccttaatggatggcgcctcctctcacctattttcctttgtcttccgctgcatcttcatggtggaaaatcaccattaaagcgacccattgaagctctaagattcagcctccatagaagccccacaagcaagcttccatcaataacttttcactccgatgtccgatcacgccaataatatatcgagacactccaaattgactaaacgaagttgtcgagaaattcaaatggccacaactctttactcgcgattccgattccgcccataatatat

SEQ ID NO: 261268 - DNA, 264 bp, Glycine max
tatggtactcaatatcgagcgtgtgggtatttatgcgcctgattcggacatgcgtgtgaaatgttatgatcatttgaatttctcgagggcttctattgttcaatttcacgcgttttgatatattatacgcctgaatcgcacatgcgcgtgaaaagttatgacctttacgatttctcgagagcttccgttgttcaatttcgagcgcctagatatattatgcgccataatctgacatccgagtgaaaagttatgaccatgtggatt

SEQ ID NO: 261269 - DNA, 388 bp, Glycine max
  unsure (1)..(388): unsure at all n locations
acgcttgcttccacactagacgtgtattctgatgttaatctttatcaccttttcttgctcatttatttttcgctcttgttcattattttcccattgttttcttccgactgtctatttttcccagctaaaatttcacgctcccaaatcaaattattcaagccatggcggagttaacaagacagtgtgccaaaactgacagcaaccacaatttcaatctacaaataaagagtactgtttatgttgcttaacgcttgcatacttaaaatttgtattttcttatgctcaattgtcttgaataatacaattcacgagagcttaccacttattntgattcacacatccacccacaactcacctacacaactcaatttcttctacgcatcatata

SEQ ID NO: 261270 - DNA, 436 bp, Glycine max
  unsure (1)..(436): unsure at all n locations
ctgtaggatcatggngtacccatcacatgtggtactaggtggcggtcgggcgatggtgcacaacaagttttccacatccacaatgcgcgcataaacccaccatcccctgttgcccacctccatctgagctcacgtactcccacgtagctcatatcctcgtttctctcaacaccgggtccccatcaatcctcccaagcttccacaacatccaagcgaaacaacattcaaacagcacaagctatcacaaccaagcaaaacagagcaaaggcagaaaactctgccaaaacaccaaccaaatcacagcttttctcacttaaagaccccagtaacaattccttcgatccaattncgtaaccgttggatcgaactccaaaatttactggaagtctatagtgcataagcctacattntgaccgttgggatctactagcgaaca

SEQ ID NO: 261271 - DNA, 495 bp, Glycine max
agctatcgttgacgcgttcaccttcgacccccttggaccacccgcgcatctctacaaccactccagcatgccagatttacttcgtttataccatcactttttctactcctgcactcatctcacgacaatagcatcacttatggcactacattgctgccactatgaagtcctccttctcaatcaaattaatggcttcagcaagggtcatgtgtccaagggcttcaccactggcagccactatcatacttcctctccatgatactgagtccttcatcaaaatagtggatgagaagttgataacaactctagtggcgacgacaactggcacatagcttctcatatttctcccagtattcatataacctctctctactgagttgcctaattctgaactatcttttctgacggccgtggtcctagaagcatggaaaacacattctaaccatactctcttgaccgcataccagctcatgatacaacttgcaacacggtact

SEQ ID NO: 261272 - DNA, 446 bp, Glycine max
  unsure (1)..(446): unsure at all n locations
tgccacccagctcgcccaggctcgcccttgcgagctacgntgctttctctagaaggcaccgccttctcgaggaacttcctggaaggcccaagtgggcctggttgctatttgcaccccgatgtttactaaatacacccccttgcctttnttgctgattctttttccgtaacgttacggaaccttacgaatttcgtaacgatacttgttttctttccgtaatgttacggaaccttgcagattacgtaatcatccctttttttgacttcagaatgtcacgaaacttcatggattgtgcaataatgctttcttttgacttccggcatgtcacggaacttctcggattgtgcaacaatgctttcttttgacttccggcatgtcaccgaacttcacggattgtgcaacaatgctttctttttgacttcggcatgtcacggaacttcacggat

SEQ ID NO: 261273 - DNA, 380 bp, Glycine max
agcttgtatatgtcatataaaatcacacgcttatgatcaatgcattgtgacgtgctctacgcacataaaacgctgtcaactatagcgccttcgccttggatgtgatgtgacattgcgcgctcattgctccttaactttcttttccagctatcaatctaagttagctaatcgcatgcggtgtctccatatcacaccctctctattttcgctcttctgtctaacaggatgaatatctataatacacctctttgctggtcctactcacatactttatctcccttttctctcttccttactcttccttctctttctacaaccaacctgactgccctgctttgctatttttcacaccctcactaacactcctttcaaactacaaa

SEQ ID NO: 261274 - DNA, 448 bp, Glycine max
tatacaaaattattaagtaagaattaatttatatgaaagggagtatcgtcagtgttttatatacattttatcttaatatttatgaatgataatcaaattcaatgtgaaatactcgtaccaaaaaaagtaaaaatttgaaatcaaaattgatttgaacaatacaaaaaatttaaatataatatatatatatataaaagttaacttgaccttaaaaatatattaatgtagcatctatataaatatataaataaacaaaattttctctatataatatcataaatatgacacgattatgttatttaataatgctttaaaaaggaatatgaaacatgaccatgcagattttcatcaataaaatgatctaataattctttcgcttgtgcatacccccacatattcatgtatttgtaacacgccagacaaattatacaatatgagagaaattgaa

SEQ ID NO: 261275 - DNA, 268 bp, Glycine max
agcttgcagagttagtatgattcgcaaaaaatatttacttcttcagcacgattgccggtcatcaagcatgttttaaccccttgcggctgctccaaacgaaaacacctaatagttgctccagtcttctcctttacttttaactcatcttcctcactgttaaatcgtgtaacgcttgatattagagttgtgaatacattatgttccttgtctaaacatgtgctggaaggtacattttcaacatcacaacatattggtgaaaattgggggg

SEQ ID NO: 261276 - DNA, 438 bp, Glycine max
ctgcagagctcaataattgattggatagagaatcaaactttaatttatttgttagatgacattctgttacttatgatcgaattaatttaatttttgaaatattttataatttacaacaataagtatcataacattttcagacaccgaatttgatattatatattaaggttagttcaaaatagtagaaactttagcaaaattttgaattaatattctctcatttcatgtttatcaacacagtttctaactaataataagcttaataacatatgcacaaatgttgaacaattaaaatgctaaaaataacatgatttatgttttgaatatcaatggcttcaagttcttaatttctaacaacaaaaagagaatagcactacaacaagcacactaaaggaatagtattcatgaggtgcaccatcagtataaaatgggatagaa

SEQ ID NO: 261277 - DNA, 393 bp, Glycine max
tatcttatgacaattccaatctttataagcacaatgtacaaatctatcatgacaaacagctatcaaaaaggaattttcaccctgccccacaactattgttatttaattctcgattaacattatttctacgtaagctaaaatccaagtggtatggaccattcatcatcaaagaagttatgccacatggagcactgatattggacgacccaacccaccaaacgacatggatcgtgaatggaagcaaaatcacacactacctacgtggagatttcgagacgataatcattgttgtcccgctacaccacgcttgaaccacaacaaagacctccaactattaagacgttaaagaagtgctcctgcgacgccacctactatttctaaaccctacttttt

SEQ ID NO: 261278 - DNA, 340 bp, Glycine max
  unsure (1)..(340): unsure at all n locations
tctctgaanggcagtggtatttccagtttcctgaaaatatctaataatctcgccagatgacgatctttttctttcttggaaggtaccacaagatatggntcttccacaccttcatccacagctttttcactcctactcttctttgtattctcattattttttttcttcttattcattttttcattttctatttctttttctacttctttttctttttattgggccttcaattctttattctcgaccattatttgttcctctttttcttgattactttcacctctcacctcattnttcttgccattagtaccttttttgtcaaaaaatttctttttatgca

SEQ ID NO: 261279 - DNA, 245 bp, Glycine max
  unsure (1)..(245): unsure at all n locations
taatcttgtaatcgattacacacatactgtcattgtttaccagaggagattntcagaaaatattctcacccctcacatcttttcatttggttcttgaatggccactcaacgcctatatatatgtgacttgagagaccttgttatcatgtgggcctatcataccgggccgtaacttgactgcgcacacttactccgatattgcatgcataacgcattgcgattaaatggtctattgccatatccac

SEQ ID NO: 261280 - DNA, 322 bp, Glycine max
  unsure (1)..(322): unsure at all n locations
ntagcctgatcgctaagcgataacttatccttggctaagcatgacctattgtcaccaagctaaattccttatgaccataactgaggttcatgaagctaagcgccagacatggcagctaagctgaattccttgcagcaatgtgagcgctaagcaagtccttattagctatgcgcatgctcctctatacttaagatgcatcattntagctaagctggtcacagcctggcttagcgagagttgcagcttttcggatctgcaaacctcactaagcaggcttatcctcgcgctaagccaagcttgtgtgaaatattaaaaaaaaact

SEQ ID NO: 261281 - DNA, 412 bp, Glycine max
  unsure (1)..(412): unsure at all n locations
agctngcgattgcatttgggcatctattttgactttcctatgctgtctctacatacataaaacagccccaccatcccaattttgcaaaatcatattcatatatcattggggcatttcaccgagcacttggtgggcgcacgtttggacataaattgcacgagaatgggggcaatgtggcatgccccattgcttcagaatacaacatacgcctaacgccttctcattcaagttctcaactccataaaacaagcatggattcagatgcaaattgcttcacgaattttgcaaaaaatgagcaactaatgcaccaaaacaacatcaatggagagccaaataaccaagggaaattgcacttacttgtggggagtgaattaaagcgtgaaaaacgaagcaaaaagtcaacaatggaagc

SEQ ID NO: 261282 - DNA, 453 bp, Glycine max
  unsure (1)..(453): unsure at all n locations
tgtatgattatggggcccccatcacatgtggtactaggtggcggtcgggtgatggtgcacaacaagttnttccacatccacaaagcgcgcataaacccaccatcccctgttgcccaccttcaactgagctcacgtactcccacgtagcccatatcttcgtttctctcaacaccgggtccccatcaatcctcccaagctttcctcaacatccaggtaaaacaacattcaaaccgcacaaactatcacagccaagaaaacagggtaaaggcagaaaactctgcccaaaacaccaaccaaaatcacagcttttctcacttaaagaccccagtaacaattccttcgttcccgttcgttaactgttggattgactcgaaaattntactggaagtctctagtacataagcctacattttgaccgttgggatctgctagcaaacacccagaactcattct

SEQ ID NO: 261283 - DNA, 426 bp, Glycine max
  unsure (1)..(426): unsure at all n locations
agcttaatgtcctcaaacaaaattacaaagttgatgttatgacaagtcatgtgtaatatcagtttctaagcacgttaacattaagaaagagttaaataccagtgccttagaaattcggtacataaaggtatacgtcatccattgccataagaactgggaatttcatatacattttattcatagtcggattgatctttctttctagcacgtgataaatttagctgcaagatgtatggtaaccaaagcttgtcataataacatacaactcagcaccccaaatataaagaagtcaacatggaacgatttgagttgactatgataaaaaaaaaaaaaaatctagtcaaaatagaaaacgagtctaaccctaaatttcttgtactaattntaagaacaaaatccgagaaagagtcttcttctacactaatc

SEQ ID NO: 261284 - DNA, 458 bp, Glycine max
  unsure (1)..(458): unsure at all n locations
ttaacattggttgcctttgactttcaacatcaattnttaactgatattgaaaccactgacattaaaattatcaatgttaccatcgattntaaaaaaactgatgttaacatatgttacacgatatcagtttttacgaaaactgatgttgtataataagaaaaatacaaaaagaaaaaaactgcaaaaacaacattgattttgacgaaaactaatgttgaatgtgataagaacatcggttntgaccaaaactaaatgtgcacacgacatcggttaagtgcactttctacattggttttagaccaactgatgttgttttttgcaaaaaaaaaaaaagttaatattntgtctgtttttacaattaaccaatgaaaaccaatttataaaaaatacattaattntaaattaaaatnattaaatatattattttcattataatatcacattacttataatctcat

SEQ ID NO: 261285 - DNA, 427 bp, Glycine max
agcttggttgttgtttcaaaggaaagatcgtatccattcggagtcatctattttttttttttttttttatactgaactacgagtcatctattacttcataaaatttcctcatttttaaactctacatatttgatatctaaacaaaacattttattctaacgtattttaactactccccttacagtacaatacttactcccttatattacatcatcccaacacattctaagaatttcctataattctattgttgctctatgagaaattgggtgaaatggagaatgaacataacaagtgcacagtattgagacctacttttcattaatgaccaaaacaactattgactggaatttacaaatactccagttgtgggacgtcatataacggtgacactattcttgatactcaccagtagaaaaaccttgat

SEQ ID NO: 261286 - DNA, 278 bp, Glycine max
gctatgaacgcgactgaagcctcaagaactaggttcactattaaacagtaacagctatcctaccatagcttcataacatatgtactatgaatatcatcatggctcatctgccatagactatatcagtcaccaccgtcatcaccatgatgcctttcacccgacatctcgataatcatagtcgcaaagctagccttgtggagatatctctcagtattaaattatctgagtcaaattgtgaaatcaatggtgtttttttaattcaacatcgacacttgacg

SEQ ID NO: 261287 - DNA, 437 bp, Glycine max
agctatacacagattttagtaatgacccactatcttataattaaaatattttaatgccattaacctagggaattaaaaaaaaacttcatggctgagtgtaactgaaattgtggcaaccaaaagtcaaccccaacagccaacaagttacccaccatttggtctcccacaaggctgatgcctacgttgccaattgggcccttattacaacttgaactacacctaactaaagcccttttagttgattaacccaaaacatatttttggtaacccaactctacaaggattggaccattatttacacaaactaaacactctaaaattgagacaaagtggcgccatttagtcctcctccatttgggccatgatacaactcaaccttggacttttctccttgaaactcgtgcttgtattcaaatactatggacagcacttgttga

SEQ ID NO: 261288 - DNA, 397 bp, Glycine max
  unsure (1)..(397): unsure at all n locations
tatatggcccggcgggcttccttcactttcttgtctcccacgcgagctntgtccactgctcttccttcccgcgatgcttcttttcatgtccgcctgagtgggcttatagcctaaaccatacttgccacgatttccttgggcatttatcaggctagttatgccgccgttgactttgcctaaacccattccgggttcataaccgttccccaacataactcaggccatcattactgctgcatcggacagacaaggctgcccagagaaggagtccacggaggaaatgctgaccacctcacaagactggaaagtggtttctaacgattcttttgcggcttccacataaggcatagaggatgggcagcttaccaagatgtcttcctcgcctgacacgatgacc

SEQ ID NO: 261289 - DNA, 439 bp, Glycine max
  unsure (1)..(439): unsure at all n locations
agcttgaagggacacccacattntctagttctagtatctcttctaacaaattctttcttcctacacctatactcgtcactcctttcacagtcaattaacacaaacgaagtccttcctctactaccagtgtttgtgtcagaccttataatcaccaccacaaatccgttttcatgaagaacggatcgagcccaccgcaaaacatcctctcggttgtcaaacacctacaaagcaatccagataatttcaattttctacaacatattcattttattaaatcactcacaatcatgaacattattacctgagaagtattgagcgcaatggaacaaccaacacgtggttcattcgcaccacattcttcttcattatgataattcatatccacttctttagacattatactttcatacatccactgattgtcgtccatcttaacaat

SEQ ID NO: 261290 - DNA, 349 bp, Glycine max
  unsure (1)..(349): unsure at all n locations
atgaggaagtgttgaagggtgaaacttcctgcttttattgttgaccacagagtggtacctggagatatgtcgcggnggtcaggagaccttggggacgtcaggtggggtgctattgcccaaaaccaagcttgaccaatcccgacccaacccgggcatagtcggtcagtgagaacctgtgatgtacctaaacaggcgagctcctggcagtcaacagataaaaggaaaacaagaccacaaagcaaggaggcttgtggtggctggccagctgtgaattttgtgtaatatgtggatggtggcctctggtaatcgattaccaagggtgggtaatcgattacaaggcttaaaattg

SEQ ID NO: 261291 - DNA, 332 bp, Glycine max
agcttgagaaaatcttttataaaaccatcggaagagttacatctcttgattttttattcataacttttcactggtcatccattactataaccatgtaatcgattacacaaaacattctatgaaaagatgtgactcttcacaattgaatttgaatttcaacgttcagatacactggtcatcgattaccaatatattgtaattgattacaccgtttaaaaaaacatttggaacgttgcaaattcacttaaaagcttttgaaatcaaactttaccactggtaattgattacacgtaattggtaatcgattaccagagagtaaatactctggtaac

SEQ ID NO: 261292 - DNA, 355 bp, Glycine max
tgggacaactagtgattcttgttactaaacaagatttgtaggtagagctagagaaaaataaagtgttggctaaaccttataaatcacactacgttgaaatgaaaatttgaaatatggtgtaactctgaagaaagtaatgtcaacatttgtatatgaatggctagtgcaagatattaacaacgtcatccattttttaacctagaatattgtagaagcaaataacacacaaaatgtgacaccctctaccccgacatacacatagtgaaaggaaacatagaataataggagtaatttacaaatatatacttcacaactcaatataaaacttctcaacagagtaaaaggttcacattta

SEQ ID NO: 261293 - DNA, 420 bp, Glycine max
  unsure (1)..(420): unsure at all n locations
agcttgtgcattcaatatcttgatgacggtgctctatatgttctcaatattggactaatacatttgctgcccaagtttcatggtcttgcacgtgaatatcctcttaagcatcttaaggagtttcatattgtttgttccaccatgaagccccctgatgtccacgaagatcatatctttctaaacgctnttcctcattctctagagggagcgcgacaagattggttatactaccttcgctccacctccatttttagctgggatcaccttaacacggtgttcttggagaaattcttctctgcatctacgaccactgccatcagaaaggatatttcacgcattacgccactcagcgcacagaacctatatgaatactacgagagattacaaaactatatgccacctgctctcacactacatttc

SEQ ID NO: 261294 - DNA, 449 bp, Glycine max
  unsure (1)..(449): unsure at all n locations
tatgctgcanatatttacaatagacctcctcaacctcagcagcttaatcaaccacagcagaacaattatgacctctccagcaacagatacaaccctggatggaggaatcaccctaatctcagatggtctagccctcagcaacaacaatagcagcctgctcctttcttccaaaatgttgttggcccaagcagaccgtacattcctccaccaatccaacaacagcaacagccccagaaacagccaacagttgaggcccctccacaaccttccctcgaagaacttgtgaggcaaatgactatgcagaacatgcagtttcaacaagagaccagagcttccatttagagcttgactaatcagataggacaattagctacacaattgaatcaacaaaagtcccagaattctgacaagctaccttctcaagctgtccaaaatcccaaaaatgtcag

SEQ ID NO: 261295 - DNA, 358 bp, Glycine max
aataaatctgtaaactattaccaattgaaaatctcatgtctgtagagttactacgactaaagcttaccagcatacagaacaacagaaagctcaattaagagttatgaagatatgtttattattagtttcaacaacagagattcctgcacgacttccaaaaatggaatgatacgactaactatactaacaacaacgatagtctgtcaacatatttccacaacgatcaacttcactaaaagcttaagaatccagggtggttatatatatgtatatatcaacacgaagcacataaattcgaaaaataatattagatcaccaataaacactgaacgacaaccgaactactttttctagctca

SEQ ID NO: 261296 - DNA, 394 bp, Glycine max
  unsure (1)..(394): unsure at all n locations
ggagataaanaaaaatntaaggagtttataaggaaactattattctaattagtgtggtacaaaataaaaaaagtgaaattatttgaaagattacaagtataagaaaatttgtggccaatgatcaagggagggtgaatgcgggcgagtggcgagtgaactcaatgggttaaaaaatagaattgggttttggattgggttgacgttacgtttatctactctcctcttgttcatttcatcgactctcagccaccttcccttcgctcctctctctatctctctctcgcgcgcactacaatcaaagtcatgaaagcattttgttcatagaagaagaaattcctcttcctattagattangggtttntttccattcaattcaatcattgcttcggcactg

SEQ ID NO: 261297 - DNA, 420 bp, Glycine max
  unsure (1)..(420): unsure at all n locations
gcatgcaagctntgacttgagacatcaaaagattataaatatgtgaccatggcatgaattttaagatgagatcaatcatctatctttcaatcttgtctcaaacatcattcaatatctttcaactctttctacagaaatttctaattttttttctttccatctttctaaacgtttttgttcacaactttctcttcaaagaacagttctttgttcaaaaacttgtgttattcatctttttcattctctgctccctttgctaaaagaacaaaggactaacccgctgaattcttttgcgtctctcttctcccttacaaaagagtcaaaggactaaccgcctgagaattcttttggttcttccctttcccttaagcaaaagatttcacaggactaaccgcctgagatatcttttgtttnctctta

SEQ ID NO: 261298 - DNA, 398 bp, Glycine max
  unsure (1)..(398): unsure at all n locations
gaagaacaatgatgacattgcatgcctttaagaacaatgggttgtatgcagacattccatactttgctagaataagtgaccctaaagaagggacaaataagagcaatcacaccttccactgtaaagtctagtaatagtttcatgccaatagaaaaccaaaaagttttttcaagcattgtgtttttacaaattacaaataaattattatggatgagaggggtattctataatacctgtaaccacttaattttagacactggaagaaaaagatatcacaatcttttccagtgaaagcaaatcattcaattaatatgaacatcactatatttttatagaaaaaaatgaagaanagtatactaattcattttcagtctatgctagaaatctaccaaaacatg

SEQ ID NO: 261299 - DNA, 381 bp, Glycine max
agcttgctcgtcttgctgttatttatcatgcactacttttctgacgatgatcgacgaacaatgagggatcaacttgaaacttatgtgcttcaagtgagaagaaatgcttctttttccacttgtgaagatgttccacgtttggctatgaagatggttcacactgagaaacatttggcatttccattgcgttataaacttattgagctagctttgatattgccggaggccacaacattcgctgaaacagctttttcagcaacgaagattatcaagtctcaattgcgcaataacatcaacgatgtgtggttcaatgactcgatggtatgctacaccgcgcggcagatattcaagtcacttgatgatattgatattattcgaaca

SEQ ID NO: 261300 - DNA, 346 bp, Glycine max
  unsure (1)..(346): unsure at all n locations
tgtgggtggacgacgcatgaacganaacgcaattcatggngctccaaaaaagggttgaggatggagaattgcactaagcaatcactacgcatggctccaaggtccagggtggaggacgcatgaacgaaaatgcaattcatggggctccaaaaaagggttgaggatggagaattgcactaagcaatcactacgaacggctccaaactcgtgggtgaaggacgcatgaacgaaaatgccattcatggggcttcgaaaaagggttgaggatggagaattgcactaagcaatcactacgcatggctccaagctcctgtgtggaggacgcatgaacgaaaatcacattcat

SEQ ID NO: 261301 - DNA, 194 bp, Glycine max
gtgcgttcaatatcctgattatgacgccgcatatgtgatcattactggactaaaacattagctgcccgaggtgaatggtcttacgcgggatgatcctgataatcgtatttaagaattacatattgtcagttgcaacatataatcgcctgatgttcaataagatcatatgtttgtaaagacttatcgttattctc

SEQ ID NO: 261302 - DNA, 517 bp, Glycine max
  unsure (1)..(517): unsure at all n locations
cgaacacgggttgacnncntcggacctttgagcgcggtgggactttgagcgccttggtagtacncgcgcatcctctacagtccacctgcacgcatgcattcttcctctaccgcataaaaaacactatccgttagtgttattaagaagaattgtcccctgcctgtagataaatatcagtcgtggctatataacgaccgatgtcaggtcttttcgtctcacttcaactccctgaataatatttggatattcgccaataggaaatgtcccaccggcgtcatcacgtgatgctcgctttttattctacacctgctggaccggtcatctttcctgctcgacctcgactatcatttattttatcactcgtcgtgaataatgtttcttggtcgacgcgggctgatgttcttctacaccgagaaatgagaacacgcccctgttccgcctacacacagcttccgttgagcttcgcaccaacacacaaagccgacctatatcgtccgttctctacgccacaccccct

SEQ ID NO: 261303 - DNA, 245 bp, Glycine max
cttcttcttcaatatttctatgacggacttagcaacatggagaggagtatgattgatgctgacagtggtggagctcttggtgatatgacccctgctgatgctacgatattgattgacaaaatggcttccaactccctacgattcaatgcgtgaaatgatgttattgtccttacatgagtctatgaggtggccacaaattaatcttcatctacttacaataaaaagctatgatgaaaacttgatgc

SEQ ID NO: 261304 - DNA, 440 bp, Glycine max
agcttatgcgcatatttccctacgaacgttcacttgcacaagacatcctattaactaagaaaaatgcacccatatacaatcaacgtagcttcattacctagattatttacatgtacttccaaagtgtatttgttatttacatcatacacgccatcttgtcaaaatttacacacatgcatactcaaagcatttcggggtaccaaaaattgcacatgcgctcatcttggtatttctaatatctatacatatacaaacttcatgatgaatcttgactacctacgcaataacgcgctacatttcatgctcttttttttcaagtttttgctacctaaagccatatgcaaattcaagcatatcttcctttgctgactaaaactgtattcaaattacaacgtatatatttttttgtaatatgtttccttcacataacatgcaacaca

SEQ ID NO: 261305 - DNA, 457 bp, Glycine max
  unsure (1)..(457): unsure at all n locations
tatcatttcaatttcttactaagtaaaatggatcattttcaatgtccaacgccttanaatgatcaccttttaagtaaaaaagaatcacttgataagaaagaactatgtaggtctgatttcctcattgcaattgaggaatacgtaggagcaaagggaaacacccttgtcgaccacaaaaagagaaaaaatataaaaagggtataaaggatataaagacataaaagggaacgtaaaaatcaaagtcatgtttgcacattcgattaaaggctgccatcccttgtgatggacgtgtggggtggtaacaccttccccgtgcgtaaatacaactcccgaacctttcacttaaaagttcgtagatcgcgtcttttccagtttttccgacgttttcctcanataaacgttggtggcgactncgcgcgtattcctttcatggaacacgcatnccgcgagtcacgcg

SEQ ID NO: 261306 - DNA, 432 bp, Glycine max
  unsure (1)..(432): unsure at all n locations
agcttgaaattgaacaacggaagctctcgagattatcgagtgcgcatatattttacaccgatgttcgattcggcgaaataatatatcgagacgcacganattgaacaacggaagctctcgagaaattcgaatggtcataacatttcactcggatgttcgattccgcgacataatttatcgagacgcttcaaattgaacaaccgaagctctcgacaaattagaatggtcttaacttttcacgccaatgttccattccgggacataactcatctatacgcttcaaactgaacaacggaagctcttgagaaatttgaatggtcataagtcttcacaccgatgtctcgattggggacataatatatcaagacgattcaaattgaacaacgcgcgctctcgacacaatcgaatggccataacccttcacacacatgt

SEQ ID NO: 261307 - DNA, 456 bp, Glycine max
  unsure (1)..(456): unsure at all n locations
agcttctatataagctgacccattttatcaataaacacaagttgagttttattcagaanattagagtttatctcttttatcttagtgagagtgattctcctaaattcttgagtgattcaagaacaccctggctgtatcaaaggacattcacaacctttgcgtgttgccctcgctggaaagagtgattctttccttcctttcatcttcacccttgttctttcaaaccacaattccagaaaatccacctctgcccagaattatctcgtggccataactcccattttacgcactcaaattaagtgattcttgagcctaaattgaatttcaaaacgagtcctttcacctcgttttggaatcacctcatttggagccctttagcttcagttatttccatttctatatttctgtccagccaccacttaacctacgttntaccatcccattcatcccatttat

SEQ ID NO: 261308 - DNA, 407 bp, Glycine max
ctgcaagcttatataaatccgaacgccatactcacgtatatttcacaactgaaaagtgaatattgaacttatgaagtggtaacgggtgtcaatgtgcttacttcttttcatgaaagactggattctttgtcacagcgagtgctgatttattgtccacacatatttccataggttcttcttgtggcatttttaactctctcaacaagttccttagccaaattgcatgacaaacgcatgatgtggcaccgacatactccgcttcacaagttgatagcgtcactattgcttgcttctttgacatccaagtgaaagccctatctcccataaagaacacaacaccagtagtgctctttctatcatccaagtcttcactccaatcgctatcactatagcccacaatcgtataa

SEQ ID NO: 261309 - DNA, 371 bp, Glycine max
ctccagcaactataaaaagaggatcatgccaaagagaaatgacacaccgagtcttacaacactctaatacacacctaaagcctgagaactctcccttagggaatattttcttctcttccattattttctattccctttttccatcccttctcctccattagttcctatatcccttttcaagtgtaaggccccttatggctatgagaggttaaacccttagttagggcctgataggcctaaaaagccaaaagatgtattgtatgcttcatatctatcaatgcaaataggtatttgctttcctattatcctttcttattttaatttcatgtatcattcatccttgcatcatctttaggggttaggtgctcgac

SEQ ID NO: 261310 - DNA, 393 bp, Glycine max
agctattaaccttgactcggtagaacctcttgttggtttgatttgctcttatgcttgctaaagtgagacaaaagctggtgcaaatcaaaactccgatatctatgggtggaatggatgaatgcatgaaggaatgcatataacacagatgcactctacgaatgcggcgatccggggaattcatccccttcttacacacaacgtctacgggtagcaaatcgccccaacgtacgtttataagaaggcgacaccgaccctccgttggtttgtttacacacgggatcaagacagaacccatatgccatgcctatgcaaaagacacaatgcgggaatgtacacactatgacaatattcactgaacataaccaaaagggtatatgatacttatgcatggca

SEQ ID NO: 261311 - DNA, 429 bp, Glycine max
  unsure (1)..(429): unsure at all n locations
tgatgcgagagttacacacgtgcactntntggccaatatggaactccttcctaagaattctagagtcatgaaatctcttcactttctccttgtaaatcttggagttctcataggcttctaagctgatctcctcaagttcttgcaattaaagcttcctttccataattgcttcatcaagtgccatgttacaacctttcaccgccctataagcatggtgcttaatctccaccaaaaggtggcatgccttactaaaaaccatcctatagggagacattcccaaaggtgttcgataaatggtcctgttgggttgcatgaccttctgcaacacttgtttgatctctctattaaaaacctttgcttgctcattagtttggggatgaaaagttatagcaactctatgcataaccccatacttttggagcaaggata

SEQ ID NO: 261312 - DNA, 414 bp, Glycine max
  unsure (1)..(414): unsure at all n locations
agcttggcaagttattgacactctttntgaatttctactagtttatccacatgttacctcagtttttcttttacaagattatttgccgctgataacttttgtgcttcttgatgcatttcattgaaaggatgtagtagttgatcatagttatcatgaacttttgaatacaaaatgtttacctcactctcaccttcaatgattgccatccaccggaaatttgcttcttcctcttttctccttgttgcttcttttcgtagatggggtactctaccttaatatgtcctatcttttcgcactttaaacaagtgaatctgttggacgaagatgattcacctttcttgagattcttcttacgtgaaaagttatgctttcatagttcttctttttcttgaggaatttgttgcaccttttcac

SEQ ID NO: 261313 - DNA, 416 bp, Glycine max
  unsure (1)..(416): unsure at all n locations
ccgaggaccctgctgtcgantttgaacgagaagtgaatcggcttcaggttgattaagaagaaggtatggaatttccccctaagctagaaaggatggtcgctcaggaagaccaagagatgaagccgcacgaagaagaaacggaagtcgtaaacttaggtgttggcaatgagaagaaagaggcaaaagtgggtacgggcatgaccacaccaatccgagatgaattggaagtcttactgcgggactaccaagatatcttcgcatggtcataccaagatatgcctggtttaaaccccgacattgtgtagcattgtttacctctgaaacccgagtgttccgcggtcaagcaaaagttacggaggatgaagccagagatgtgttcgcggctgtcgcaacctacccttcggnggggggggggg

SEQ ID NO: 261314 - DNA, 253 bp, Glycine max
gaattgacacgtttcggattcaaacacttattggttgaagaatgaagatcgaacgaagaaccgatgaacaacggtgtacaaccttcacggatttgctcacgacaacgtctccgaagcgttacggaaccaatttttttcacccaacacacccaacatgcataccataggggttagggaccctttggaacactctccctttgcctatttataagaaaagagggaggaggttgcctctcagctcacccacgcgatc

SEQ ID NO: 261315 - DNA, 448 bp, Glycine max
tatcagaagcaatgtactgcacacatgtgtcttataatgtgacataataaaaaccttattaataaaaagcaataaagcattcaattttcctgatttgtattgatcaaacttgagtgcaaatgcatacctgttcacctttaagattggcacaagcctcaagttgacctcgcatactatgagttagccttgaaatatctgactcagtcttcactcgtttccttttctgctcattaccttctgtaacacaagtactgtcagctacacaaggtatataaaaattgacatcccacaggaaatgaaatcataataataacaaatagcataataaaattatttgcttcaaccaaaatactccataaacccttccacatatttgtatgtattttgattctcatgattgcatagcttcacgttatcaactgaatgttgacaaaacattaccacattg

SEQ ID NO: 261316 - DNA, 408 bp, Glycine max
agcttatcgacttcatcaaaactcataaaacgaattgttgtaaggctgaaatggcacatgctcgctaagccataaatgtaggcttagtacctcgaacacaagccagagagtaactagttccactgtacaaacagctaaaccaacaaagcctaggtgaaacctaaaaaaaaacaaccctaagatgaacatgaaaaaaatgaaacgtagagaacaaagtcatgcacagatgcaaacatgactgtcaaactcaatagaaattacaacatcacaaaaaccatgctttcatggacaatatgcacagaagatgagaaaatggacaaagaaaatgcacgacgatgacgtagtgtgtgtgacaaagaacgaacgagacgaagtgggaaagaaagagtgaagcgcgacgaatgggta

SEQ ID NO: 261317 - DNA, 414 bp, Glycine max
  unsure (1)..(414): unsure at all n locations
aatcttaganaaaccattgtttattgaagcctagcctctctacaaccctataaaagtccttctgattcaatttatgcattcctaactgtatgccatgagatgaagtgcaaatggtggacctcatgttaattgttaattattgattagcttaagcacttgagcttgagtgaaatagtgaccgtgaggcactggttaggcatccttccttgaaatctgtctgatgattagtttcattcagttgtgttgcttaataaaaatgctcttatctctgaaaagctgcatgtcttgtgaaaaaccattgattgagtcattatacagatttcttatcatatgattaatgttttggaagcaaacacccttaacaaataatcactgcattatttttgcacttgagggacagtgagttgttcttta

SEQ ID NO: 261318 - DNA, 420 bp, Glycine max
acgcttaacattcaacttcgagcgtctcgttatattatcggactcaattagacatccgagtcaaaagttattgtcgcttgaatttgctcccagcttcaccattcaatttcgaccgcttccatatattacgggactcaatcacacatccgagtgaaaagctattgtcgtttgaatttgctcaaagcttcaacattcaacttctagccgtctcttatattatacgactcaactacacatccgattacacatatattgtcgcttgaatttgctcacagcttcaacattcaatttccagcgtgttgatatattaccggactccatcacacatccgagtaaaaagttattgtccgttgaatttgctcacagccttaacattccacttcgagcgtctcgttatattatacgacttaattacacatc

SEQ ID NO: 261319 - DNA, 417 bp, Glycine max
tacccatcacatgttgtactaggtggctgtcgggcgatggtgcacaacaagttttccacatccacagtgcgcgcataaacccaccatcccctgttgcccacctccaactgagctcacgtactcccacgtagccgatatcctcgtttctctcaacaccgggtccccatcaatcctcccaagcttccacaacatccaagcaaaacaacattcaaacagcacaagctatcacagccaagcaaaacagagcaaaggcagaaaactctgccaaaacaccaaccaaaatcacagcttttctcacttaaagacccccagtaacaattccttcgttccaattcgttaaccgttggatcgactcgaaaattttactggaagtctctagtacataagcctacattgtgaccgttgggatctactagc

SEQ ID NO: 261320 - DNA, 402 bp, Glycine max
agcttaccaaagacatatggtgaactctatctctattgttcaaaaagaatatggagactttgtgagagataaagacggtatcgaagtggccattacatattacttttctaacttgtcctcatcttccaatccttaacatattgatgaaattgcctctttagttgaccggacaatcttggctgaccactctcacgttctgaataacgtgtttatagtggaagaagtctatgaagccttgctcgcaatgggttccactaaagcctggggccagatggaaccctaaccctcatttctagaaattttggcctcaagtatgcaaggaagttgtgagcttggttctgaatatattgaataatggcgttgatccaacaaatttgaacaccaccttcatttctctcatac

SEQ ID NO: 261321 - DNA, 391 bp, Glycine max
cgtagggttaaagtctcacgattgtcacgtgctcatgcaacaattgttagtcgtggctatacgagacatcttgctaaacaaagtcaggttagcgataactcacttgtgctttttcttccatgctatatgtagcaaagtcattgatcctgtcaagtttgatgagttggaaaatgaggccgcaattatactgtgccagttggagatgtattctccccttgctttctttgacatcatgattcacatgattgtgcatttggtcagagaaatcaaatgttgtggtcctgtttatctacggtggatgtacccggttgagcgatacatgaagatcttaatagggtatacaaagaatctatatcgtccagaagcgtctattgttgagaggtacattgca

SEQ ID NO: 261322 - DNA, 243 bp, Glycine max
agcttgaaattgaacaatggaagctctccacagttttaaatactcataacttttcactcggaggccagattcagacgcataatatatcgagacgcttgcaattgaacaaccaaacgctcctcagaaattcaaatggtcataacttttcactccgacgtcccactctgcgcataatatatcaagatgcttcaaattgaacaaccacagctctcgaaaactccaacgcgctctaacctttcacat

SEQ ID NO: 261323 - DNA, 386 bp, Glycine max
gacctattaaactaagcttctctatatgtgatgtcctaaatcggtcatccgggttaaagttatgaccatttgaattactcaagagcttccgatgctcaatttcgagcgtcacgatattttatgcgcctgaatcggacatccgagtgaaaagttaagactatttgaatttctcgagagcttccgttgttgaatttcgagcgtctcgatatattatgcgcctgaatctgacatccgagttaaaagttatgaatatttgaatttctcgagagctttcgctggttaatttcgagcgtcacgatatattatgcgcctgaatcggacctccgagtgaaaagttatgaccatttgaatttctcgagagcttcccgtgttcaatgtccagcgtc

SEQ ID NO: 261324 - DNA, 386 bp, Glycine max
gtttcttcgtctggtttgctttctaagagaagaacttctttctatgacttcgagataccttcaatcatggaacgaaactttagtctaccttgaattgttgggcctggcgggggtggtaatttaaatcttcacttaattgctcagaattttaagcgtgtgcgaaagaataatgtatcacttaagaaacaaccctttttgggttggtagtaactacatgatatgtatggccaagcaatactattaacatctaaattaaccttttgatgacatcctacaagaacactcgcatgaatgggaaagacttgataccatgcggccaaattattaaatggttagtcgacgatcccaagcaattaactattgtgacagctctttcacatcaccaa

SEQ ID NO: 261325 - DNA, 420 bp, Glycine max
  unsure (1)..(420): unsure at all n locations
tcaatggaacttacatcatgtggtatcaagagcatcttcatctatgtgatgntcttttgcttcctctatctttttgntcggcgaattctctttaattccttgttcttcatcttattctccatgtatatcctccatttccttgtggtttggcgctgtttagagtatattcaaaaaaaaaaaatcgattaaatcttagatctacacttgatcttgtatttctatggttcacattttgtagatctactcttgaatcatgtctttgtgttgattataggttctatcatttttcattcataatattcttgtgctgaaccttagatctaaagtttattccaaaatattgattagaaaacaaaaacacaaaaatctaagtgtaaatcacttaatccatgttgtcttagagtcatgtttagtcatagt

SEQ ID NO: 261326 - DNA, 437 bp, Glycine max
agcttgtgttgcatgagtataaaactgctacaaatatgactgagcagtttgctgctttggttgccatagcccaattaactctagtaaaatccatgatgatgtttttgctgactcttgcggcaagctgttgtatgactcttggtaaatttccatctccgtgactttgtttttggaattattctttacatgttgggcatgtctccatatctattctttgtcaatatatcctgtgttataaactttgcctcatatgttgatggtgacgctggatttaattgatgatgccatttgataacaatttccagcatgctctcttattatacctactctagccttgcttaatcttttttgctctggcctgcctgatggctattaaatttctcatatttgcctctcctttctttcccgcgaacaaatggtttgctcttcaagcacat

SEQ ID NO: 261327 - DNA, 449 bp, Glycine max
  unsure (1)..(449): unsure at all n locations
gattctatagtcttaattgccaatgatgattaatttatcaatgatatagttaaagtttcacattttgcatctgggcattacttgtgaaaattatttataggtttaattactcatttgattntatagttccatcatttataccttttagtccctatagttgtaaagtgatttttttagtctttatgatttacattntaattgtcttttaatccttgtagtttgaaagtaattttttaagtcattataatttgtattttaatttctttataatccttatagtttgaaaatgatctttttaatccatatactttatattttaatttccttttagtccttatcattaaaatatgagtaatattatcaattataattaactacaaaaataataataagtaattcgtaactaatttatcgcaagataatttgaataatttntttaataattataa

SEQ ID NO: 261328 - DNA, 429 bp, Glycine max
  unsure (1)..(429): unsure at all n locations
gcaagctttgtccataanaatcacctaanaaccgttttaacgtccaacgccttatatggtcctcggtgcttttgttgcttaacgtggacttctcaacgcctaaagtcaacatgtaactatgtcactactttccaaaaccaagggatcattaatggtccaatgccttacaatgtttctctcctttaaaaagaatcaaaagatcgtttaaatggtccaacgccttaaaacgaattttttcggtcacaatatatcttgcaaaaaaagataaaaacaacttaaccaacgttcagttctcaaagaactacgtacgtctaatttccttatcacaattgaggaatacataggagcaagggaaacacccttgtcgaccacaaaaagataacaaatacaaaccggaaaataaaacaaattgaagtcatatctgcatac

SEQ ID NO: 261329 - DNA, 403 bp, Glycine max
  unsure (1)..(403): unsure at all n locations
tggacgctcctaatatctcccatacttnttggggtaggccattcttggatggtctttattttctcatggtccactttgaccccaattctatcaactacaaaccctaagaaaactatattatctacacaaaaagtacacttctctatatttgcatatagcgtgtttttcctaaggactaaaagaacttgcctgagatgtcccaagtgatcatctaggctcctactgtacattaaaatatcatcaaaataaacaactacaaatctacctatgaaatcccttaagacatgatgcataagcatcataaaggtgctnggtgcagtagtgagcccaaaaggcatcactggccattcatacaaaccanacttggtcttgaaagcggttttncactcattaccctttttca

SEQ ID NO: 261330 - DNA, 397 bp, Glycine max
agcttgcctgtccgatgcagcagtaatgatggcttgagttatgttggggaacggctacgaaccttgaatgggtttacgcaaacacaatggcggcataactagcctgataaatgccaaaggaaatcgtgggaagtatggcttacgctataaccccactcaggcagatgtaaagagaaccattgcgggaacgaagggcggtggtcaaagctcgcggttgagacaagaaagtgaaggaagcccgctctgccacataagtagaagctttataagcgcgggtctgggagacgaacgttaagtgcgtccaatataccaagatgatgttccgagtacattggatttggtacgaccttgccctcttgattctcacctggggaattggcgagtggacgaacgcccc

SEQ ID NO: 261331 - DNA, 360 bp, Glycine max
  unsure (1)..(360): unsure at all n locations
gagatctaagaaggcataagcggctgaaggaaccatttccgctcccgaatatgacagccaccgttttaggagtgctgagcaccagcagcgcttcaaggccatcaagggatggtcatttctccgggagcaacgcgtccagctcagggacaacgagtataccgactnnnaagaggagatagttcgccggcgttgggcatcactggttacccccatggccaagttcgacccagatatagtcctcgaattttatgctaatgcttggcctacagaggagggcgtgcgagatatgcgatcctgngtgaggggtcagtagatcccgttcgatgcagatgctctcagccagttcctgggatacccttt

SEQ ID NO: 261332 - DNA, 442 bp, Glycine max
gcaagcttgccgatgagagagagaaacgatggcgatggtggcgacgtctctgctattactacacacaggagagacattgttttttttgttcttggacagaaacaaaacaaaaggaggacataacgagggagatttctctagaaatcacattgaggtagtggagttccatcgtttatgacaatggtagcacaagatccttaatcatgcaatccacctgctccaatatgaacttgttcaaatcaaaacccccccaaatcgcaagtgttctttggctggattcggtccaacaatgtcaacccatacggttcactcggatgggttttttttttcgcccaacccgactggcctgaagcatcgcatgcccctaattgctttgtttacgttactacttttgatgtttctagttctctacttctaaactccttcgagtcttctggagaac

SEQ ID NO: 261333 - DNA, 389 bp, Glycine max
  unsure (1)..(389): unsure at all n locations
tcctcgtggcttctctgagaagctctctcgagaggcttctttgagaagctagaattttatctacccacaccctgctattaactaaactcgcttctttgaaaataattacgggataaataacacaacaaaataaatcaaacatcaaatataattactaatatatatatatatatacatcagggtgttacacgaccactngtcttcacctttttagttggccttttgggttgttcacttttgtgttccacttctattggcactttaccaccttcttcactaagtggataaaatcatgttcttcatcaattcttctctttttggtcttgctcttattttcttcaatatnttggttcattggataacgaacatcgggagacacctttttgcac

SEQ ID NO: 261334 - DNA, 408 bp, Glycine max
agcttccattattgccgacaaccaatgttactcttactcctctgttacattttacaacacactatgaccacaaacaatcaccgccaccccttgtgctgtgatccatcgagtttcgtttcgttcgacagataactcactgtttttattcttttcttcccctcccctcactttacaatttatcatgtatggaaatctacgtatatccattgacgtaaaatgattgtccaagatgtttatatataaaatgagtaaagttttacagggtttaaaataacttaatttgtttagctacctagctatctaaagtatgttcgaccaacattttaactaagcttttaaccttttctttctattacgccaaaacttgcttgattatgttagtagatcctgataaatacgcttatttta

SEQ ID NO: 261335 - DNA, 454 bp, Glycine max
  unsure (1)..(454): unsure at all n locations
gttgatattccacaagggagtattcttggtctgcactttagtttacattaatttgacatgtacactaatggaaagtgtcatcattttttagccatctctctcctgaagcgccacaatgtgtatgcaacttttcataatgaagaaaattttatcatatttagtatacaaatgtgtcaattagttaattggttagtgattctagtaaacaacacttcacaaagggtttgaagcaaaccaaaatgcatgcaaactttaggatatataacaggctgagtatatttctagacaaataatatggaagccaacgacaagattnttcactttaaggttaggaagaaataagagctcgcaagcccaagaggtgtttggctcaaaccctatcctgctgcttggacgtatatgaaggaaatgaactaagtgatttgatcattatgattactaatactggatacta

SEQ ID NO: 261336 - DNA, 403 bp, Glycine max
ccacaaaaatagggatttgaaagtttatcatttcagcttcttactaagtaaaatggatcatttttaaggtccaacgccttaaaatgatcacctttcaagtaaaaaagagtcacttgattcacgcataagaaagaactatgtaggtatgatttcctcatcccaattgaggaatacgtagcagtaaagggaaatacccttgtcgaccccaaagagagaaaaaatataaaaagggtataaaggatataaggacgtcaaagggaacataaaaatctaagtcatgtttgcacatttgattataggctgccgtctcttatgacggacgtgtggggtgctaataccttccccatgcgtaaatacaactcccgagcctttcacttaaaaagttcgtagatcgcgtcttttt

SEQ ID NO: 261337 - DNA, 241 bp, Glycine max
catatatcacgggtctcaatcagacgtctgactacaaaagttatcatcgtcaggcattgctgagagctttaacatttcattactagcgtatctcatgtattacggcacttaattacacataccacaaaaaagccatcgtcgatcgaatcggggccgagctttcacctcacgtctccagcgtctcgatatattaccggactaacttacacatcccacgaaaatgttattgctctttgaaaat

SEQ ID NO: 261338 - DNA, 336 bp, Glycine max
attcaacgacatttctttaactggatgcttttgaatcccgaaatatcgagacgctcgaattgaatgttgtggtcgctcacattgaacgaaataacttttactctgatgtctgatcggtcccgtatatatcgagacgctcgaaacggatcttgtgctctgagcaattccacgagataacttctactcggagttgattgagtcctgtaatatcagacgctcaaattaatacgaagctatgacaaatcaacgacaatattattaccggatgtctgatgagctcgaatatatcacacctcaaattgatgtgatgcctggcgattcaacgatataattttc

SEQ ID NO: 261339 - DNA, 361 bp, Glycine max
gacatgtgcttatcacacatcctgtcatactcgctcaacgcgcttaccacacaaattgcgtggaaactaagcctgatctacacttataaaagacggagagagaagaagaggaaaacacatacaacattcaaaagaattccattccttaccgaacacaaaggtccaaagttagagagacacacatcaggagtcatttctcttacacttgcaatgtctcctatgataatgaacgactaaacactttttcgtgggagcttaacaatcaattgttcttaatcgaacttctctctatctatccatgaatattacgctttcattatccctttatgtgctcatttctactcctatgatctgatcactc

SEQ ID NO: 261340 - DNA, 406 bp, Glycine max
gtgatccgcctctatatttgccacaattctatcttccctccatataatgagtttctggtgaagggtagatggcacagccccaactccatgaatccattctcttcctaataacaagttaaaattagccttggactgaatcaccaggaatagagttggtcgaactatactgcctacagcaacatctacttgaatggctcccaaagaatagccagttgtaccttcataattcgaaagcacaatgttgtgggcagatagatcagtgtcatgtttcccgattttgtagagcatatatcgaggcattaaattgacagccgctcctccatcaatgagcactttgttgattccaacattctcaacttttgctctgatgaaaagaggtttgagatgactcttcatctgaaaatct

SEQ ID NO: 261341 - DNA, 324 bp, Glycine max
atgcaagcttcatattatgtttatctgatacgcgctattattgaggactggaatctccgtattcagtttatttgcattgagcactgccatacctctctgctaacggctataaacctccaaatgtttagttgtcgatccgccaccatatcactatatggttgtgttaatatgctgatcgcatcatatctttgtgtcagaaaaagaacttttataactctattcctaaaatcacccaaccgcccataatctgtttacttacatacaaactccacagcatacatggctatctttattactcgacaatgcggaggatgttaatttcta

SEQ ID NO: 261342 - DNA, 77 bp, Glycine max
ccaataggaattcatatcacttgcccgtatggtatgtgagcatcttaccagactgcaagagtgttatgcttaatacc

SEQ ID NO: 261343 - DNA, 275 bp, Glycine max
tatcttgtacactatgtcttctatttcaaaacatagtaattatgaaaaaattatctaattttacataccgtattttataaatgaaataaacttaattgttttatctcacatatcaaatttaaaaatgaataaattttgttattttatcaaaataagaaattgtaacaatcaaaataatatttcattcacatattaaaaaaaattgaaggaatttcaattgcaattcttaaagtttaactctctttgtcattctaaaatctttcatccacatacca

SEQ ID NO: 261344 - DNA, 413 bp, Glycine max
tgtagggttaggaacggctgtaaaggatagagagttatagtcttttcactgtcctcatttgatagttcaattgatttttctctgttgagctttggaattttctttacgagacgaagcttgtagagttaggaacggcgaaaaaagaaagagagagaacgagaggcgaaagcgtacacgtggcacctcttcacgctgacacctcttgccctatgtggctctattccaacctcaacctccctcactgcccggtaataataacttactttattctaaaagccgcgtgacttgagccttcgcccttagcctagaacacaggaccaaacttggaatgggcaccaggcccaaccaagtaagcccaattctcttcaacattctcgttccccgcaacctttattaagcaattattaattaac

SEQ ID NO: 261345 - DNA, 358 bp, Glycine max
atatgcatgtgaatcacgaagcatcaaccaagaatcacgccaacgctatcgcgcacagcaataatggggcacaacacaccaaatgattatgatgatggatggctcacattctcacacaggtaaactcatcactctcaaattgagctttcaaaactatcatgacatgtacacgagaatcaacgatttcaattcacacaatgtcaagaacctttattatcaaaacaattacccatttcttgaacatatcctataattcacagaataacatgcatagtcgtacatgcacacaaacatgacccccaatattaaactaaaaattacacgccttaaatgaacaaccatgatataaccatatctt

SEQ ID NO: 261346 - DNA, 445 bp, Glycine max
gggaaggtagtcatacctctcaaaatatatatatatatatatatatatatatatatatatatatatatatatacatatatatatatatatatatatatatatatatgtgtaggtagaaagataccttggatatgcatgtatgtagcaaaaaaaatttcacaaaatatatatatgtgtgtttaggtagcaagataccttggatatgcatgtatatagcaaaaatatctcacaaaacatatatacgtatgtttaggtagctagatacctgggacacacatgtatatagcacaatacctcacaaaaatatacgtatgtttatgtagaaaaatacctcatgaaaaaaaagagagcgagcgagaggagaataagaagagaaaaaacatagagagagaaataatagaaacatatataatataataaaggttgtctagctaaaacacaacat

SEQ ID NO: 261347 - DNA, 367 bp, Glycine max
atcttgcttgagaagcttttacggacgctggatctttgaccttcaatgacgtcttttcatggtgattttcactcatgacgttgcactccaacataaaggagaacaggcgagaggaggcgccatccactacggaataacccatggaaaaagaagcttcaccaccatgagagtgtcttggataataagctttgagagggagcttccatgcaggaagagaatgacaaacagaaaatggcgtgggaatgaacgacagatacggagagaagttgaactttgaagtgcgtctcacaagactctcattcatcacagttatgtccagtgttaaacatgtttctatttatatcctaccataacggaaacttccttg

SEQ ID NO: 261348 - DNA, 438 bp, Glycine max
  unsure (1)..(438): unsure at all n locations
tcaccttctggtcctcctcatagttgttgcatgagaaaacatgctctattttcatctcccactccaagtaggcctccagatcattctttcctttaaatggaggaatgttgagtttaataccatcaattcggttttgtctaggaacaccatcattccctcttctcctcctttcttcttcattatgatctctattctccatttgatccaacctctcatggagcgcatcatctcgttgtttcattaacctctccatatgttgcatcaaagcttgcatttggaattgcgaaagccccactccatcattaggattagtacctgacatctcanacaaacaaatcaaacgtaacaagacaattatagttgttggttgaatacctcacccactcaagtgtatcacacaattatggcttttctctaatgaaacactcttgactttta

SEQ ID NO: 261349 - DNA, 426 bp, Glycine max
tgcttggagattactctgcgatacgcttccttctaaggaaaacctaatcatgacgcagattctccttcaaaatgacctttgccccttctgccaaagccaagtcgaatctgcttcccatctatttttcacttgtcataacgttatgcctttgtggtgggaattcaactcatgggtgaaggaagatagagttctgcacagtaagcctatggacaactttcttcaacactactcattggctggatcaacgaattctaacggaacgaggaagatatggtggatagcaactaccagatccatatggaatctcagaaatgacatgatttttaataatcacccttttgacatctctaaatcggtggacaaagcaatctttctcacttggtctttgttgaggggatgggaaaaggatttcactgtttcttttca

SEQ ID NO: 261350 - DNA, 446 bp, Glycine max
  unsure (1)..(446): unsure at all n locations
cgatagggtatcacctcagtggaaggtctgactcgctgttgaatgccatgtgctagccaatgaggaggcatcttgatgaaagatggttgcactagacgagtccacattggaggtagccaatgaactttgcttctgatgttagagttgtcaaggcctcaaatggagtgtgatgatagtcatagcgagtctaggtgggtactttagcatacatggtttcccttaccatgggttcaaagaaaatggcttcagagaagggggtgataggtgtaggattactatgaacgaaggccagggggaatctttgagcattagataatggatcccttagagcttcccttctgaacctttccaagtctaaaggagaggaacgtggatggngttgagtgattggtgtggacttgtggaggagcatgattggagtactgttagtgaattcaccatctaat

SEQ ID NO: 261351 - DNA, 438 bp, Glycine max
  unsure (1)..(438): unsure at all n locations
agcttancccataattcccattcctttntcaaataatcctacctatttctaaattgcttatatgcatacctcaaatttgttgtcttattgaacttttctgccccacccgcncaaccaagcttagtgaagtggttgtcacgtttatttccaacattcacctcttctttgcacactttcaacaaaatctcaatatttttatcacactattatgctttctttcttttcacaacaacttgattgaaaaacattccataatcttaagaaatacaaacaatgataaactttcaattaattttcaagaatatttaattatacctcatactctncacaagaatatgttcaacgggtcaaaattcataataattaatgaaataaacaaaagcataaccctaatccataacaattcaaaatttaatgagaaaaaaaagaaattaatga

SEQ ID NO: 261352 - DNA, 393 bp, Glycine max
  unsure (1)..(393): unsure at all n locations
tgtttctaagcagggatccattattagtgattgtagaactacccttgccacttatccaaacttttcggtcaagtttattaggtgacgagctaatatagctgcaaatagcttaactaaaacagttattgcatatgttagtcgtgcctgttttaatcatatttcacattgtattttagaagttatcaataatgaaatgatataagttgattctggtataaaaaagagtaaaacatgtgtgtgtatgtgtgtgtgtttttatttttttatttttacgataaatttcanaatagtaatataaatcaaaatcaacatttcttttaattttttcttctattaaacattacattttggtaaataattttattattcgggttatgcagtaaatctcttatg

SEQ ID NO: 261353 - DNA, 289 bp, Glycine max
agtaatctggtatactaaataataccaccaaattattattttatcacattgatagcatactaccattatgagacgagctgcttcagagctgttgaccatcattcactgctcttcttcagaatagaaaagccatctcacgctgcacgagtctgagatttaccatttaatcatgaaattcacacagaactactgcataatctgatgccctaagtgtcaactgccgatagatataaaaaaggacatccgaaatcttgtggaatcacctccatacatgcatattgacgcacat

SEQ ID NO: 261354 - DNA, 322 bp, Glycine max
attgtcatgatttcaatctttcaataatgatgctattctgtatttgagaagtttttgcatatgtctgtgtggatattgattggtcacgaattgtggatatatattgtagcacattcgctgaaggtgctgctccttgtaattaatgagtctcacatctatcactgtcgatgtattctcttgtagattctatcctgtagcaaatcttacttagcgggtccaatacacggaatcaaaattgacccatcaaagtttacctttaaatgacagtaagaacttctaagtcttgatatatacccttaccctaacaagttatattttctct

SEQ ID NO: 261355 - DNA, 443 bp, Glycine max
agctcgcagaggatgcttcaatggaggaaaatatagagggagacaacgatatagggggagcacgaaattgaaggaataaaagagggagagaagtggaactttgaagtatgtctcacaagactctcattcatcaaagttacaagtgttacacatgcttttatttatagactacgtagcttccttgagaagctttcttgagaaaacttccttgagaagcttctttgagaaagcttccttgagaagctagagcttagctacacacacccctctcataactaagctcacctccttgagaagcttccttaagaagattcctaaagaagctagagcttacctacacatacctctctaatagctaagctcacctccttgagatgagaagctagagcttagctacacaccccctataatagctaagctcacccccatgacaaacaacatga

SEQ ID NO: 261356 - DNA, 459 bp, Glycine max
  unsure (1)..(459): unsure at all n locations
tattactggaccttgtgtgagttgggaactcatgctatgtgtatgacaagaggttaacatcgttgtattaacatgtggtggtgatgcagggaattttccaagaccaatgtctgttcgaatattggtcttatgcatctgaaaaatagtaaatggtgcttcgtcactttagcaacaaacaacattgtagaatgggatcccctcatgcaaaaaaagctgaagcacatgcattggctgaagttctttattcatagaggagttgaattatcaacattatgataaaccaagacaggtagtacatggttgatagtgttaatagcaacaatgccaatctctctaaanttggacttgcagataatttgttacaagtattagttactaagctagtactacctaatcctcacatgtaaccagcaattatgcttctaacaatgaaagtcattattagacatgacaatcata

SEQ ID NO: 261357 - DNA, 214 bp, Glycine max
cccactcgccctcattaagaaccacctcttttctttctttattggctttacttgaacacacctttgtttggttctctatttgggtcttaaccctctcatgcaccttctttacaaactctgacatagatttctcttttttatgtatcaaacaactgtcccgcgggaggggaatgacatctaatggtgtcacgggattaaacctatacacaacctc

SEQ ID NO: 261358 - DNA, 308 bp, Glycine max
  unsure (1)..(308): unsure at all n locations
tctaaaatgcccgattggtctgcctcagcaaatgtacaaaggggaccgctgtttggctgaccctcttcttcccattcaggttgggttgacccaaaaacgacatatatatttctgtcttatcccctcatcatccatatttccaatcatcacctatacttnttttaatgttaaataattacaaatttaaataagattaaaatattatttgattagttatttggacacttgccatttggttagttataacttaacatattatttttcattatacaatctatgttaggtttattctcatataatccttttta

SEQ ID NO: 261359 - DNA, 112 bp, Glycine max
actcagcccgacaaccgccaacaacgcgtgacgcgaaacctatgggtgaggatcggtagaaagcacgataggtctcctgtggtgacttctccacttatagaaggacgctacc

SEQ ID NO: 261360 - DNA, 428 bp, Glycine max
  unsure (1)..(428): unsure at all n locations
agcttgtacaaactttctctgagttcaacaactttaatgcatgataaaagagattattatagaggatgatcatgcggacacacacacacacacacgcatatgtaatagtggaaataaagacacataaagtagctctaaaaaacactttttgaattaatgaagaggtgtgtcgcaacctacccttcggcgggagggcgaggtgaaacaaaatggcgcgccttagaaaagaagaaaatgcatggagttcccaccaatgtttattcaaggaaaacattataaaaaccaaaaagacgaaggtctaataattntgagaataacggttcgggagttgtttacgcatggggaacacattatcaccctacgcgctcgtcacaagggacgacagcctttaatcgagtgtgcaaaacatgacttcaaattatgtattt

SEQ ID NO: 261361 - DNA, 413 bp, Glycine max
taagagtgaagaaaccagctcgcctaggcaagctagattactttatgaggaagaaagtagattgcctgtgcgagctgagatcgcatgggtaagctgttgtggaacctccacccctcattttctataaataagcatgaggggctgaaggaaaggggtccataggtcaagaaagaagaggacagaagagaatagaagaagaaagaagagagaaagaagctcaaatgccactgaatcgcgactgcaatcgatttctacatcgttcgtcggtcgttcttcgattgttattcagacattcttcattcgttcttcgatcttcattcgattagtgcttcttttaagaatctgaacttgattcatggacccttaggggtcctctctatagattgtgcatctttatctccttctttgatcat

SEQ ID NO: 261362 - DNA, 378 bp, Glycine max
agcttgtgcattcaatatcctgacgagggtgtttcatatgttctcaagactggactaatacatttgttgcccaagtttcatggtcttgcacgtgaacatccttataagcatcttacggagttccatattttttgttccaccatgaagcttcctgatatccaaaaagatcatatctttctaaaggttttttctcattctctggagggagtggcaaaagattggttgtactaccttgctcccaggtccattttcagctgggatgaccttaagagggtgttcttggagaaattcttccctacatctaggaccactgccatcacaacacacatttcaggcatcacgcaacttagtggagagagcttgtatgagtactgggaa

SEQ ID NO: 261363 - DNA, 454 bp, Glycine max
ctggctacaaccttgttctcccgctatgtgcaacatcaaaaagccaaagaactcggaaatcaacacagttataacaatggagtagcaagatataagtatcagagtattaaatccaataagccaaactcataatcaagaaaataatcaaaccagaattcaaataacataaaatgtcaacaatcacaaaatatccaagaccgaaacacaagaaaaataagcaaagtacttagcataataatgtaaattctaagaaactaaaagccaaaatacacggcttataaaagataaataagcagaatctaaaatctaagaagacggaggaggtggtggaagatcaaaactctgacgaatgtatccgacatcctcttcaagctgtgtaagacgaatgtccataccggcaaagcgtgaatctaacgagtcaaagcggtcaccaacatacgaacgaagaccccgt

SEQ ID NO: 261364 - DNA, 423 bp, Glycine max
agcttcttatccaaggcactagaacgcccttgttgaggatcctttactccgacagcatctagggttcctcgaacaatgtgatatctcacactacgtaaatctttaaccctccccctcttactaagactacagaatattcttgtaaattatgtccaataccaagtatataagcagtaatttcaaatccaaacgttaagtgtactctactaactttatgtaaagcagactttggttttttgggtgtaataatggaaaagttgacagataagtcacccttattgccactctacagaaccatacatgagattttcacttcatatggctcctcgttcaattcttttgaagtcattggatctgtttcctagttcagtttgagaatctctcccctttttctaatttggtccgaagagtaactacgaccaa

SEQ ID NO: 261365 - DNA, 434 bp, Glycine max
tgtgcttagagagagcttagccttttctttggtttttgactgataaccaaattgattcttatcatggaagctattcctttgtggcgaatcctctttcggcttatcgattctccgtggatcgtggcatcattttgttcatcttcttcatcttatccatattttccatttttctgttcttgagttcttggaaggtcgacaatggcggttcttgaatttgcatccagaacgatccgaaccaagcgtccatggcttggattgcattagcttgtagggcacaacagtgggcccatgttggtcaaaccctcctccaatgcaccatcattattctaatcctaacctgtatttccatttcaatcttatggcctaactttgaacccatacctctcttttgtggccaaacccccatcatctcacccatacatctcatgtttagt

SEQ ID NO: 261366 - DNA, 293 bp, Glycine max
agcttttgtggcttcaaaaattcaaaagagcttttataaggtccaagagatagatcctaaagtcaagtttaaacgccatatactttttcttacaagacattgtatgttccttgcgcaaatgttttgttgaaatacatggttttgacagacgaataaaggatctagttcccatttcaaagcattcgaagttaatgatttggcatttctaagaggaggaactactgaacgttccaagaaagggtactacgagtattataatccttcatgggtgaataggaacatatcgaacacct

SEQ ID NO: 261367 - DNA, 447 bp, Glycine max
  unsure (1)..(447): unsure at all n locations
tgacatanatatcattagacaatgaacatttaacagtgacaactttaacttttccagtacctcactactgaaaatagtttaccaatccactaaataagaaaagtaagcaacaaaaatgccaagataggataatgagctagaaaatatgctttaaaatcttaattcaatacacccccgtaactccctaagattgtttcatatccacatactctgatggaagaaatgctattaaaactagattaaattactcaggctttgtgcttgcactagtagttgtaatgccactccgatacagttcctttaagatcatgacctgctgtttggtagggctccatgttggtgaacctgttatggacagagtatagcagtagtagtctatatttgtgtcatgaagcatggcaacatgttggagtagctgacttacaacgatttagcaaacagcattga

SEQ ID NO: 261368 - DNA, 414 bp, Glycine max
agcttgtctcagcgtctatgcgagacacaaactatcatgttagctatcatcgtccagtaccaagaagagttgggtctagccacggcccacgagcatagaatcgcggatgagtatgcccaagtatatgcggaaaaagaggctagaggaagggtgatcgactctctacaccaagaggcaaccatatggatggatcggtttgctcttaccttgaacgggagtcaagaacttccccgattgttagccaaggtcaaggtgatggcagacacctactccgcccccgaagagattcatgggcttctcggctattgtcagcatatgataaacttaatggcccacataattagaaatccgtaagaaacttgtatggtctctcagaccttgactagatatgatctcttttttgaaataaaatga

SEQ ID NO: 261369 - DNA, 437 bp, Glycine max
  unsure (1)..(437): unsure at all n locations
ggctcgtcttgctgatatatgcagactnttctgatgatgaccgatgaacaattatggatcaacttgaaacttatgtgcttcaagtgagaagaaatgcttctttttccacttgtgaagatgttcaaagtttggctatgaagatggttcaaactgagaaacattcggtatttccattggtttataaacttattgagctagctntgatattgccggtgtcgaccgcatccgttgaaagagctttttcagcaatgaagattatcaagtctaaattgcgcaataagatcaacgatgtgtcaattgtatttgtaattaaattaaagtatacaagtaaactttaatattttagcttaaaaacatgaataccaataccacaatactattgataattgaatgaaattttaaaacattaataaaacaataattgttaattattaaat

SEQ ID NO: 261370 - DNA, 379 bp, Glycine max
ttcttctatgatcactcatgattataaagcggtgctccaaaaggtattgcctccatttcttaacagcagtggtaatcgcagtgagttcacgaacataagtggaggagctaagtaacctagcgcaaaactgtttgctaaaaaaatctattacgtgtcttccttacgacaccaccgtgcccatacccgaacccgaggcgtttgtctctaccatgaaggatttagtgaagtcaggaagtgctaagactggagaatgtgtcataccatgcttcaagtttttgaaggcaacgtcaacttcaacagtccacttgaactcttctttgttaacaggcatgagagtggtgctgccaaagtagcgtaccttcttatacatctatgataa

SEQ ID NO: 261371 - DNA, 443 bp, Glycine max
  unsure (1)..(443): unsure at all n locations
tgagctgccactttcttcccgcatacatccagctttccatgtattcctcttgaaaccgcatcttgngccatcctcgactacaactgccacattgccatctacagggaacaaccaccaactcttggtctctcctttatccattctggattggaagtgggaccattcatcttccccacctaacaagaaagtccttgtttagtgggatggcttagcatcgaaggatacttcatgggaactatgggacaagctgcgtgttgcctatgaccttgaggacaaggttgttttcaaagaagggggtgttgatagcaacaacaaaataccagacccacagacagagaccaacaacagcattagcaatataccagacccacagacagagaccaacaataacattagcaggccaaagagagatacaaagaagcccaattacttgagtgactacg

SEQ ID NO: 261372 - DNA, 1034 bp, Glycine max
  unsure (1)..(1034): unsure at all n locations
agggcccacgtgttggtcctgcattagcgacatagatactcagcttattggacctcagtgtgaaaagtatgaccattttaacttctggagagcttttcttgttcaatgtgtagcggctctatatgtgatgcgcatgaattggacatccgagtttaaagttatgaccaattgaatgtcggaagaacttccgttgtttaatttcgagcgcctgatgtataataagcctgaatggaacttaggggaaaaggttcaaccaatttaattggacggagcttctttggcaatgttatcatttagggttatattggccttaatgggaagcgggcgaaagtggaccatcttgttttgagaatttcggggtttttcgacagttatagctatatttgcgaagcgttttttagaggtattacagtgattgctggaagaccttatgtaaaagagtggataaagaccaagtgtctcttttgaaagtgacagcgggaaggaggcccctttgcctaaagatgtctataaaacaatttttccccgggtgggccttttttccggcgggtttaatttgggctcaaaacaagccatgacctcgtaaatttatctaattaaaaggggtggtcgggatcttaccgtcctccgtcgcctttcgtcccctatatcttcttcgcctccgctactgagaatatagcgattagatatatacaccgttgcgctcctactctattacttagaccgcatcgtcttccactactctgagtccgtagtcttggcaggtgtggttctacaatcgttcaccgtttggttactacatggttctcnttgccnttcgctcatctgttgtttttggattcactactgtctgattgtttgctagtcttctcagcagatcgtttagttatgggccactggtatttttttgttttcttgtgtcttgtgtcgggttaggcgtgacggttctggggggnnnnntcatctcgtatctgctcttataaccctaatgctcacgataatctctatttncttagctcacagctcatcccgcg

SEQ ID NO: 261373 - DNA, 1041 bp, Glycine max
  unsure (1)..(1041): unsure at all n locations
aatataccagtgtgtatacgataatgatagatgntntnanaaaaatttnnnnnnnnnnccgatgcgaacccggaggccccccnananannntctnnnnaagnnaaaaaaggaggatctcgaacgttctcttacagcgtacgaagggagggggagcacccgcgctccagcgtcaacaaaaaacgaaacggggagggagaaacgggcaccgcggggccaagaacgcaacggagccaagcaaaaaagaaacgacgccaaagaaacccggaagggagacctcccagggataacatgaaaaggaaaaattggaccccgaaaaaggggccttaaaaaggaccaccgggaggaaaaccggtcgggcttggcccaccacaaggcatacctcgagagcgcggtccttcaaaagaacggaacgggccggcgggaggagctccacggacaaggacgggaggaccgaacgagcgcgcccaaacaaaaggtggggagggggaagcagggcagcctaggcaaacagaggcggaaaaaaaaacactctccccccgcgggggcaccttgatcaccaggggataaagccgggcgccaaaccaaacccaggggccggccaaggggacaggaacaagaggagtggaggggcacacaaaaagaacggcgcaactgcaggggccagaacccccccccgcgccacccaagagaggccccgggaaaagaggcgcgtaccaaaacgggggcgcgcgccgaggaacacaaaaggcccaaaacgcaagcgggcccgccccggggccgaaaaccgcacccacacagggccgcggagacaacgcaacganccaaaaggaaacaggcagggagcgcgagggacccgcgaaaagcgggcggcacaggggcgacgggccgcgaccgagagggaaacggtaacggaancggaagttttcacaattgcaaacggaaccagcaggcgaaannnnnnnnngtgantcggagcncggcacaacaacactaaaccgccaccggaagcacacacgcgacacgcacgtacgcaggcaccc

SEQ ID NO: 261374 - DNA, 412 bp, Glycine max
  unsure (1)..(412): unsure at all n locations
agctntgagccaaaatcctgactcaccatanaccttgtcccggtgtgagaatgtcgatccttaccctcggaagcgaaaaaaaagagaaggaaaatttcctatcacaggaaaacaagaaagaaggaagatttccaatctaagagaaaggaaaaaaaggaaagaatgaagatttccaatcaaagagaaagcaaaaaaagagaagaaggacaattcccaatcaaagagtgggagaaagcaaaaagaacagaaagaaaattcccaatcaaagaatgggagaaagtaaaaaaggaagaagaagaaggaaagacagctcctgatcagggatcgaaggaaaacagaagaaatgtgcagaaaggtctntggaccggacaatatctgaacaatacagaattgtcaccaaatgaacaaaaag

SEQ ID NO: 261375 - DNA, 357 bp, Glycine max
agtacaggggatggtgggtttatgcgcgctttgtgtatgtggaaaacttgttgtgcaccatccgccgaccgccacctagtaccacatgtgatgggtaccccataatcctacaagcttgagatgaggaagtgttgaagggtgaaacttcctgcttttattggtgaccacagagtggtacctggagatatgtcgtgggggtcaagagaccttggggacgtcaggtggtgtgctattggccaaaaccaagcttgaccaatcccgacccaacccgggcatagtcggtaagtgagaacctgtgatgtacctatacaggcgagctcctgcagtcaacagataaaggaacaaagacacaaagca

SEQ ID NO: 261376 - DNA, 447 bp, Glycine max
  unsure (1)..(447): unsure at all n locations
agcttctaatgtatggaaaatatatagcaacatcactatacatatataatatataataataagagtacatantttgagatgtaagaattcgaattcatgaatcacanattgattcctaaactaaacttaaggaagtacatatatatcatatatgaaattgcaacctaaaacaaatggatgcaattgcgtcaataaataaatatatttatattacaaatcaggatcgtatctatatattgaaaacatatatgcatatatgatatatcactacttttatttcaatgcaactacaaggaattctagcacgagaaatttggccatgagaatttgaaccctgtaattcaaatcaaagcacaatttcaatcgatagaagaattttgccaaatttatttaaaaaaattgcacattctaattctcagcggaatggttctatgtatagtacccatc

SEQ ID NO: 261377 - DNA, 498 bp, Glycine max
  unsure (1)..(498): unsure at all n locations
cttagattctaagagagcacaaatcctagacttatcccaatggtctttntaatataattggcttgctcactagcttttcactttcacttgcttttgaccttgttacatcaacacacttttcctttgtttttaacgcacaacttatgtgatgtgtgtgttgatgctatatctctttctttgcatcccaattagttccactcccccaaacttggggtaaaatttccttgaatcatatgctctnctagaatctaaacaagatatctggagataattatttaagttcagggttcanaatttngacaatatcattcagctcacacaaagggtgcaaaagatataattatcattgaaggtaagctttttggtcaaaaggcttgtatatgcacaatcatggccttcatcatgtattcatttatacatttcattcaaacaatcagagattcatgcagagaatattactcacagctagtcgttcactcacagtntaagttcacactc

SEQ ID NO: 261378 - DNA, 385 bp, Glycine max
agcttcaatgccactcaatcctagaagagatgtggaattagatggttgtttccaccaaaaacaaccgtttctcgatatttattttgtttttccttagaaggatgtttagagatgactttactcacagccgaagataagctataaacactgccagagtggacataaagaagcagacagtgactttatgctgtgaatttccctgtggtgatctggttccggcattcgggctggaagctggggctattttagcaacaggaggcaaaggtggctctgccacttcagattctgtcaagggtggaaatggagcctcggctggaggcaagaattctttggtaatgagtccaaaaagactacctggttgaacaggttccatgtgagtaggttt

SEQ ID NO: 261379 - DNA, 491 bp, Glycine max
cgtgaaagctcaacaacacaatcagaatcaaacatttcattcattcctcatccaggaaatgctcaagtgggtaagttgggggacgaagaattgaaacctgtggattccaccataatactgacaacgatgaagatacaagtgtttcaaattaacgcaacccctaaaagggtcgagaagctcttccaccccacactcgaaacgacaatccaaaaggtacaagttttcaagggaaacgaagtcaaaggttgttgtttcagtggatatgtgagcaagtatgagagtggtgagggattgacagagagagagttgaggaagcttcccaatgacacattcagcgaggatgctaagaacctgaatgcttgtgagtgaaacatggtcaacgacggagtcaacgatgtggccatcttcaagttcatctgtgcatgcatagttgagctcgtagacgttgctggaagagtctctgcgagatataacatggtccacgaaacact

SEQ ID NO: 261380 - DNA, 391 bp, Glycine max
ctctacatttgattacctctcaatgagctagtgaagaagaatgtggcatttaactggggtgaaaaacaagaaccagccttttgtttgcttaaagaaaagcttactaaggcaccttgtctagctctttctaacttttctaaaacttttgagctagaatgtgatgcctctggagtgggagttggagcttgtttgtgcagggggcaccctattgttatttagtgaaaactcatgggcgaccttactccccactatgatagagcttatgcctatagagcctccgacttggacataccttgttccaggattgcattctaggatcacatactaagtcataaggcaagcagttacaaagcatcaaagggagagaccaagcattcattgtaaatcaaag

SEQ ID NO: 261381 - DNA, 992 bp, Glycine max
  unsure (1)..(992): unsure at all n locations
ggcacagtacactctgnaatacatattaaatatnnaaaanngggtgactctgatccacanaannagccgggnaggcaaacaggagcccnaatggtttttcaacggcaagaaaagggaaccgatccccaccaaaaggacagaatggggggaaaacactccaaggcgcccaaggccccataggagaaggacaaaaggaaagcaccaagttaacggaaggagaacctcgacgagataaacaaaggaaaaacggcccaggaaaacggcgaaaaagacaacccggatgaagagctcggggaattccaaaaaaagcatacggccgacaggctctggaaagaataaaagaacaggggagagacctcagaaaaagaggggaacagacgcaagaacccagaatggagagaggggaaccggccccttgccaaaagaggcaaaaaaacaatcacccccggagggggactcgaacccagagggagtaattcgcgcccaaaaaaaccaaggcgccgtaaagagaaacgaatcaaaagggcgggacgggaatcaaaccggccgcgtcgcctgtacgaccccatgacattcaacggcaccgacacagaggacagagcgactagatcacaacacagaacgcaccagacggcatgcccctcgaccacagcgtcgtacacacactgaagcggccggagcgacgaccgggacctaacagacatggacacgcgagtgggcaacgaaaacgacgcttntatacggacacgagaagcggcagaaggacggtaccatcgactgaagagagcgccacgcgaagggaccacaacaatgagctgacgattgtcgaaccgcaacgcatgcagcgtccgcatcagaatcggcagccgaaacgcagaacggacacgggntgcgcgnntccccgcgtatcgtacctgcatctgacagccatcgacgcacgctcatcatcgtgctacagctgatagacgaagcgatcaagcagatacacgcct

SEQ ID NO: 261382 - DNA, 230 bp, Glycine max
ttcgagcgtctcgatatattactggactcaatcagacatgcgagtaacacgttattgtcgttcgaaaattctcagagctttggaattcaatttcgagcgtctcgaaatattaccggtctcaatcagacatccgagtaaaaagttattggcgtttgaattagctctgaggttcagaatttcaattcgagcgtttcaatatattacgggactcaataatacattcgagcaaa

SEQ ID NO: 261383 - DNA, 229 bp, Glycine max
  unsure (1)..(229): unsure at all n locations
catcttggtggtgaagctccttcttncattgcttattccctaatggatggcgcctcctctcacctcttctcctttgtcatccgctgcatctccatggtggaattccaccattagaggacctcattgaagctcaaagatccagcctccatagaagcttcacaagcaagcttccatcataaagtaaattaaatatgttgtaattagtacccaccaacaaagaacaacatag

SEQ ID NO: 261384 - DNA, 437 bp, Glycine max
  unsure (1)..(437): unsure at all n locations
agcttctatagaggttggatctttgagcttcaatgatgtccttcaatggtgattttcaattgtggagatgcagtggaagataaagaagaagaggtgagaggaggcgccatccactacggaataagccatggaaggaggagcttcaccaccaagagagttcattggataagaagcttagagaggaagcttcaatggaggaaaagaatgagaaagataggggaggcacaaaattgaaggagaaaaagagtgagagaagctgaactttgaagtgtgtctcacaagttttacattcatcaaaattatgacaagtgttacacatgcttctatttatagcctangtcactaactaaatgaacagcttcttgagaagcttatttgagaagcttccttgagaagctagaagttagctacataccccctctaatagctaagctcac

SEQ ID NO: 261385 - DNA, 450 bp, Glycine max
  unsure (1)..(450): unsure at all n locations
ctattatactcagcttggacttggaattcttaaacagtactaaaatttgtttctttgaaaaataatcagaaacacgtcacttgaacaaatttgactcttggaaatgtatttttcgaaatcagtcactggtaatcgattaccattaaggtgtgatcgattacacatcaacaaatgtgactcttcattctgaattttgaaaattaaaacgtttagaagctctggtaatcgattacaagtgttgtgtaatcgattacactaagttaaaataatttacaattgtttaaacgtaagttggaactcttgaaatttgaaatcttaacgttntataacactggtgatcaattactaccttctggtaatcgattaccagagaagtaaactctttggtaatgatattgtgaaaacttcttgtgctactcaatggtntggaaaacatttttagtacttatc

SEQ ID NO: 261386 - DNA, 394 bp, Glycine max
  unsure (1)..(394): unsure at all n locations
agcttagtgaagtggttgtgaggtttatttccaacattcacctcctctatgcacactttcaacataatctcaatatttttatcacaccattctgctttctttcttttcacaggaatttatttgagagacatttcacaagcttaatgaaacaaacaaaagcataaccctaatccataacaattcaaaatttaatgagaagaaaaagaaattaatgaagaattggttaacctgtgatgctaacaaaggaagaagaagggatgacaaaggatgattggaagagaaataaagaaaatggaagagagattgacgaacggaggaaggcacaaaaacacgtatattatgaggaacaagagagagaaattntgagggttgaaattntnttaggaacataatg

SEQ ID NO: 261387 - DNA, 447 bp, Glycine max
  unsure (1)..(447): unsure at all n locations
gcacttacactggtttctgcttttgatgtcctatcatctagatttcacttgaatgaactatcattaggaaaggggaatatctaaacagattgtgatgagttttgactaactaattcaaaacgtactaccagggaactttgatggtaaagtacaaaatgtcatgacaatatctactcattcttaatgctagtgttcagcatccacaatcaccaacttctacagaaatgcatggcatgttgagaactagtcacaacttctgtaaagagtaacataccggatattgatctgcccatttccacaactgagacagttctntattacccaatctccatcttggcctactgcaaatagcaagatagaaaaatgtaagcaagacaatcatagcattggcaagcatcagtacaaattagtaacataataataataaagagatctacaatggcttat

SEQ ID NO: 261388 - DNA, 311 bp, Glycine max
  unsure (1)..(311): unsure at all n locations
tncttaaccaccgaacggtagcaactatgagattattttgcttaagctgaaatcatctaagttccccactatcagcctaagtgcagactgtatcaccactcatgacacaagctcccattaccttttcatctatgcgccaagcctaattaatacttaaccaccactgacatgagccaacaaatgaagagagcttacccaccacacatggcaaaagctacgattcttgtaacaagcctcaaaagctgagaacaattagccacagcatgccagacatcaatgacacaatgaaaagataaatcgccaaacaattg

SEQ ID NO: 261389 - DNA, 988 bp, Glycine max
  unsure (1)..(988): unsure at all n locations
tgcacacccgacgacaacaatataaaagaaagataaanataataataaaaaaaatagctgcacgtagacgcccaananaanagnnngncgannaagaaaaaagaaaaagaggagaaannagctcgtcctccaaaaagcacaggggggaggagggagggacaangaaacacgccgccaccaacacaaggcaagaagaagaaacagaggagaaaagaccaaacacccccgacgcgaaacccggggaaacagacccaaacgaaaaccaaaagaaaaggnccacggaaacaaagcgaaggaaacggccagggcgcacaaagacggaacacagcacgacgggccaacgaagcagaagacaaaagccggaaagcaccgaggcgcccaaacggaaacccgaaccaaccaaggcacaaaacccacggaaggggaccaacacaaacaggcaccacggagcaagacgagcgcacaaccccgcaaaaaagagcaagagcgcgaaaggaacacaaacaaccccacccggggacggaactcgcgcccaagaaaaccgagccaagcaagaccagcaaaagcaaaaaacggggaggacaccgacaagaaagggaaggggacaccaccgacaaaaaaggggggcgagaaagggcaagaaaaatgccacaaagcggggcaacggagacaatcacaaaggggaggcaaaaaagggggggaccaccacaaacgaacacgggcacgggagcccaacaacagccgcgaggacaaggcgacgcgaaccgggacacgaacacgacggaaccgacgacaccggcgcacagagaacaaaaaaataagaaaggacaagaaaaagagagaaaagaagcacacaaaagagattaaaattgtgtgggtgtaaaaantgggggggagaagggaagcccaacaaccaccaccccccncacngggtaaggggnaggangaaaagngcccccccccccccccccccccaccgaccaattag

SEQ ID NO: 261390 - DNA, 1398 bp, Glycine max
  unsure (1)..(1398): unsure at all n locations
ncgtgtttgaaccatctctgngcgacactcttgantactacagcttcttattcaagggctcatctggtggtgaagctccttcttccatggcttatttcctaatggatggcgcctnctgtcaccatttctgctttgtcatccgctgcatctccatggtgggattccaccatttgaggacctcattgaagctcaaagatccagcctccatataagctccacaagcaagcttccatcataaagtaaattaaatatgttgtgattaggtcccacaaaccaagaacaacatagttaactaaaaatgcagttcaatatttatagttaaaaatcccaatcttaggcttctatttaacagtgttgatttgggaagttttataagcataaatcaaagagcactctccacacttaaaaaatatatttgacccacaagaaaaggaatataattcatagctggaggctagagtatctaaaggtccataagtatcgtcttttgattagtagaaaacccgtcttatatgctagacagaatataacaagcactcagatgtctgctcgtgtctaaagaaagtggttggtgtgtgcattgagggatagccgacggtgggatattaacanttanacaacactatacttccctttttattatgatgaaggcattacatgtgtacaatatcagaggtatgagttcttctgctatatctttatatctcaacacgaactaacttgcattggtcacttattgatttcacactacatcctgtgtgggatcctccgtctgcgtttctttctcactctgctgcttgtcattgacttcatcagttatactgaaacatataccaatgcgtcgtcttcgtagtctgcacacttctatggctcgtgccttacattatatctgcgtatatatcgtctcgtttctcaatcngncatatatatactactgagtgtgaattatcatctgtattgcatatnctatgttggtgtatatattgaatagtttagtgtatntttgntgatgtatgtataatttatagattagtggatgatggatgattgangataaggtctnnntnnnncnttccacagnnnnngtacatatcatggatatctctctctgttacatattccaactctcgcatacatcgcaatctcgtcacttatcacactgtgtcacgtctcacatattctatgactattngttagattgtcctattcttatttttnntttttannattattctctattatactatatctatatgtatcgcttctgcatacactggngtgagnnnnntnnngnnnnnnnnnnctnttcnccttctctntcgtcctcncctcacatctcgatttcntgcattatatagcngtatcgcttagctatatcatcactcgttgtgtatgcgt

SEQ ID NO: 261391 - DNA, 366 bp, Glycine max
  unsure (1)..(366): unsure at all n locations
agctntaaccaattcagggtaaaaagttagtttcatggagataaactaaattaaacaatatatttgaaatggcttgaagcaatcaaacacttcatcatcaaaaaaagcttagtctatgaacttaaggtcgataatggaacgagaagagaaaagagaattgtaccgaatacattgttcttccgaggaaaacaacataggaaagggaggaatttgagatgtctgcgctttggatgttccgtggcttcgagttccagtgactgcggatgaagttgcaacccccttttgcttcttcgatggttcttccatttggaggtgtttntggaagttntaatctgtggagatgaaagagactgataaatgatgaat

SEQ ID NO: 261392 - DNA, 1314 bp, Glycine max
  unsure (1)..(1314): unsure at all n locations
aactgtgtcatatatagtantttgaataaaaattagttgtantaaattanaagaaatannnnnnntaaatgcgtgtgacccantggattgaccccactcgtaaaacccccanatnnnatnatnanaanannntggaaaacaaactcgctaagattattggatatacaaggctttataactgaagacgagaaaggcgcaacacatggagcaaacgagctactcctacacagagaagcatatcgatgagatggataagagtgctataatacatggatactaccacctagaaaactacagctgaactcactatgatagagccctcaacgagaacaaaagagaccactagaagacggctctatagatacactataggtcatcccgcttgtcctcgcaagcacgggcacagacagatacatacgacctcaaatgacatctcaagctccgaaaaattcaatgggaacaccctataccactagaatcggcaatagactacgcacatagaagacacaacctattccactattacaaaaagagtggcccaaacccggcgatgggcttaaattctctcaacgttatgaaaccctaatgcatcataacaaccaggcacatcattggacctaagctgatggataggaaacggacctaacaggaggacgacatggttcgagagttgctcccaaaaataaaggagcgtaacaatgcaactgccctgaaatcctatggctaaccgactacaccagagggaatgaggcttgccaaacggagtaccaggcgaaagaacgcgacgctacaagacgatatgctcncctcctatgagagcaaaacgcgccgaagtgcggcgctaggactaacgcgacgagaaatatataagggattgncaaggatgacactaaagagtggtctaggagaagaagctggaccagaaaggtcaatatctcatactcgctcgatgtacatagggaaagatngaatcgactgatgtnttggtaagagggaggagaggaaagagagagagaatgaanaannganaagananaaaaaaaannataaaanaaccgacgaatgaacagcacattataatatacaaataatcatataacagaactactatataatgcgcacgcataataatcagccaccacagatccgcctgcacccatacgtcgaacggacgaatgtgatgcgatactcacacgatcacacgcagtacaaggtagcactaactagctgttcagtnggncgaatctcacatctccgtcactcgtagcgcgtaaacgaatacatatgcgctacccgcagaccgccgtcctagct

SEQ ID NO: 261393 - DNA, 241 bp, Glycine max
  unsure (1)..(241): unsure at all n locations
ccatttcatataccacgccttcctcttcttcaacgacaaacgtgaggtcagtctcttggctaaaaaatccctttctcgtttcaaagctctaatgctgcatattataaaatgtatattcaatgaaaaattcccattcataatgaagcataattaactctactacacatctatctatattactacacagngcaagatatattatactccatgaaattttcngatcctttaacggacttttata

SEQ ID NO: 261394 - DNA, 1187 bp, Glycine max
  unsure (1)..(1187): unsure at all n locations
cgggaccgatgtctattagcgcctnatctaagcctccttttatggccgatcgactttcgttgaaagttattccttttaaattcttttgtgccttcgnnggtcaatttcgaaggtgtggatgtattatgccccgaaccgggattccggttgcaaatgtactaccctttatatttcttcagaacctttcctgaggcaactccagaccggcctccatttttaatggcactaaatatgctgttatgtgtaccaacagtcaaaaagacgtggttgacaagatgcaggcaaatttataagttaataatgccattcttaggcttcacttaacagggatgatctgggaagtntgcaaacatactcaaagagcactgttccgcttaaaagatttttgaccaagagaaacggatatgatcatagctgggctgagtgttaaggtgctagtctgtgattgataatcaaaaccgtgttatggcagacagagatacaagcactaatgtgctcggtgtaagaagtgtagagtgtcattgaggatgcgtngggagattgacacttaacacatatgcgtcttttgagtaggagagagcctgatggtcacaatccagcggaagagtttcaccggatacacttatattgcattttggatatgttattataatggttaatgttttcccgatggccaacgtcgcttcttcctctatgtggttttgaaattcggtctagtaaacgttttccactcatggtgcaggggccaatacttttgaaatatgatatattcgccctacgtgtgtcaggatctccatgtgtgtcccgtgtttgtatttgcttattgcattctgaatttataatctgtcaccgcaattctggatcagtgagggagtattgcgtatcacgtacttacaaacatatctacgacttatgcaagatgcatcatttactatgcgatananatatacgcgaatagaaacttttattgcgttcactgtatagttcttaactgagacatgtgtacttcntntntannntnnntngnganntnntttttttcncnnaatagaaacgaagagataggtaagagaagcacacgtagatcctnnnnncnnnnnntnnnnnnntnngcatgtatcaatcgctcacactagtttgtgactatatatctcattgttgtcacagcgatctcctcatcgtcgccc

SEQ ID NO: 261395 - DNA, 532 bp, Glycine max
  unsure (1)..(532): unsure at all n locations
gtagaccatgtattatttnnttnntnnanattatnnngtacttacatctactccggggnaagttagcatcgttgacccggaccataaagcaccgcagcaagcagcntccaaaatatttacacaaacatttcttatgtaggctcacaaagaataagaatatctaaaattctacaagaacttcccctactccttccaccctcaacctaaaacaaactcttttacagcatatctcaccgaacctggcaaaccctcaaccacaattagaaataagaaaggtggcagttgaactccctaacctaaacctctttcaaagttaaattcctcccgataaatccattaactaacattgatattgaccgtgatgcaatgcaatctgtaaccaccctattcactgcctggagaatcaaatcttngaaaacgaaaagcccaaacattgagcaatatctttccaagcacttaaagacaaacagattcctttactttacctatgaacacccagagcgccatggtacatcataagttcccnaaaccg

SEQ ID NO: 261396 - DNA, 303 bp, Glycine max
  unsure (1)..(303): unsure at all n locations
taagctggcgttcttaggaaaaaatgcctgcgcttttaacngtagtttactgacttataaatgcctgtggactggatatgactaattttggcagcatcatggctgaaaatgaaagctttttactagtaggcatgatagtgcataaaactcacatccaaaaggagagaagataaaaatatctatttttattaagagagtacaaagaggtagagtcacacacacacactanattatgtattctatttcccataaagaatgccaacacatgtttctaatcaccttttatttttgtaaggggggggg

SEQ ID NO: 261397 - DNA, 479 bp, Glycine max
  unsure (1)..(479): unsure at all n locations
agcttgcttgtggngcttctatggaggctggatctttgagcttcaatgaggtcctttaatggtgattntccaccatggagatgcagcggaatacaaaggagaagaggtgagaggaggcgccatccactatgaaataagccatggaagaaggagcttcaccaccaagatgagccttagataagaagcttggaaggatgcttcaatggaggaaaagaaagagggagagaaagagagaggggggagcacgatattgaaggaagaaaaaaagggagagaagttgaactttgagttgtgtctcacaagactctcattcatcaaagttacaacaagtgttacacatgcttctatttatagactangtagcttccttgagaagctntcttgagaaaacttccttgagaagcttctttgagaaaaattccttgagaagctagagcttagctacacacnaccctctcataactttagctcacctcttg

SEQ ID NO: 261398 - DNA, 421 bp, Glycine max
  unsure (1)..(421): unsure at all n locations
gagaagtgaaattgagaatggggtaaatttggagcaaactctcacctcacacaagtccataacatcaatttaaacttgctcaaactggatttacacctaanattccaccgaatcaaaatttgactcctcaacacccaaattttaccctagaaatggctctttgttcactttggtcatttgtttttctctctagcacagcccaaactttctcataagtcctaaatgacatttcaagctaggattaactcactttaacctccanataccactaaatccagaattggccttccaactctcaaaacctcactctntntcactcataacaccatattctcactttctaaccctaggttaattctacccttcatctctaacaattntncataagcaatttcagcacataaacatcacaagcatcatc

SEQ ID NO: 261399 - DNA, 435 bp, Glycine max
  unsure (1)..(435): unsure at all n locations
agcttagcccaataatattgctaacaataatggtaatatcaatatttctaactccctcccctaaactatagttcacttaacatcacacttgttacaaagtattagaatgtcgcaacatctttaatgtatctcagaatattngtaggatcatattgcaaggtatgaaagttgagtctcacattgaaagttggcatctaatgtagggttttttaggcctccaccttcatttttccaactacaattgatggcttttatggtgtagttctggtagggtcttaataattggtattagagcttcttcagtgttgttaaatggtggcgctacggctaccatggctgaatggcatcatggtttttttgtcaaccaccataggaaatttgtgaagggaggccagttatggtggctcctattagacaatggcatctctatatggt

SEQ ID NO: 261400 - DNA, 279 bp, Glycine max
  unsure (1)..(279): unsure at all n locations
actggtttcagcaatccaagatgactcttcgacttcagtaacagntagttcacattctanggccagagattctgaagtaaattcaactcatcatcataatttaaaatcagcctcgcaaattgttcatgagcaactgctcgtactgcctgttcagcanaacaatatcagaaatgcagtaatctcaaaagnaataaatggaaaccccaggaaaatggggttggnggaatacatncaatngtaattngtgttcanaaaacataccagatggtctgagtcatc

SEQ ID NO: 261401 - DNA, 453 bp, Glycine max
  unsure (1)..(453): unsure at all n locations
taagcacctgcagctgcaagcttcattgatcattgtggcattatctacatttattcacattttacgtggtattaacaataaacttaaggatttttattttgacacccactcacgaatttaatatataagaaagtaataatgttaaatattaacatgttaactgttggaattctttttattttattattttggaacaattagttattgtgaatctgggtcattttccatttacattcaacccatatctctgcaaatatatatgtaatcaccgtgccgcttcctgttcaattcacaatggcgggaggtacgcttcgaatatatttaatttccgctatttgatctaaatatgtcatttaaatcgaattattgcatgtctagataaatatatgtatatctttaggcatacaataaacccaactcttttactgaatatattanattatcatattacca

SEQ ID NO: 261402 - DNA, 1301 bp, Glycine max
  unsure (1)..(1301): unsure at all n locations
aacctgattccctcgaatatttgacactctatantactcacgctnggaacanatagactgaatcctangtcctcgcaatgacttagtcttaatatctgctggctgatcattagagctaatgaactcagtgataatttctttggacaatagtttctcccgaatgaaatgatagtcaatttctatgtgtttggttctctcatgaaagactggatttgaagcaatatggagagcggcttggttatcacaatataacttcatctgcccaacttcacagaatctcaattcttgaagtagttgtttgatccacataagttcacatgtagccatggccatagatctatattcagcctctgcactggaccgggcaacaacagtttgcttcttgctcttncaagagatagcattccctccaatggaaacacaatatccggatgtggatctcctatccataggacaaccagcccaatctgcatcacaatacccagatacttgtgtattacctttgtcttcataaagtaatccttgtcctggagctctcttaatgtatctaagaatacgcataacagcattccaatgatcaacatgaggattttgcataaatnggctcaccactccaacagccaaggaaatatantgtcttgtaatgggagatnaatgagtcttcaccagcctttatatttctcggatcaggacacatctccttgtattccacaagctcaatattgngccctacgcgatcgacaggcacaattctgttgctgtcttcctcaatgtacgtcatcttctatctgatgtatactccttcttgctcgccgtctactcccgcatactactatatctcgtcttntttgtatgatgtatacgtcatctactgactatttaattactctcttgtgtgtttttttntatgngatgttttatcgcgcccgcaccaaagagttttattccccccaccctccccccccccccgctcccgtgtnttnnntttttttttntatatccctctcctccatccctatcttttatcgtcctctctctcccctcccttccacccttctcatttttcttccttttctaacttatgtatattttgccttacacctccttatcccacccccactcctcttctcctcacctgcatttgcccctgaactcccgtctcctatctacttctatctcctcctcctccctnctccgcccccttttcntctctcttcactcttatacttttctactctcacactctctctccgttgatctatctctacatgatacatctcatcccacagcacgcacactct

SEQ ID NO: 261403 - DNA, 180 bp, Glycine max
  unsure (1)..(180): unsure at all n locations
tggtcattattctatcaataaatatccctttgatctttatncgtgaattattcttttcttttaatttctataatttaaataaaatatctcattttagtttcaatagttaccatttttaactcttttgttccttcctactgtcatagtacatccaagtgttatgcacaatttattttttga

SEQ ID NO: 261404 - DNA, 963 bp, Glycine max
  unsure (1)..(963): unsure at all n locations
gagaaaattgaattgtataggaattnntttttaaataaaaaaaatnntagctgacagagaggagacctggaaacccnnnnnnnnnnnnaanaannagggggagnnnatagtgatggggnaagttgagaagggggggaagagggagaggaagaaaaagaagagaaagagaaagaagagaagagagggaaaagggagagagaaaagggaggaagaaaagagagaagaagacgaagaaagagagaaaggggaagggacaaggaaaggggaggaaaggaacaaagaggagaggaaaagggagagagaaagaaaggaggagaaggggggaggagaagagaagaaaggagagggacccgagaggaaaaaaaaaaagtaatgaaaaagagaggaagaaaagagagggagggagcggaacaaaaggggcagagaagaagggaaggagagagcaggaaaaaaaccggacgaagggggagaaaaagaaaaggaggtaaagggaagaatgggcgaagacggggggggaagaagagaccagaagtcaaaacaacgaaaaaagagaaagggacaaggaaggaggaagggaggagaaaaaaaggcgttgaagaaaaagggaggggatgagagaaagaggagaaagaaggggggggaaagtgacgagggaccccttttttaaaggagataggaaagggaagggaggagaagagggggaaaggaggagaagagaaaagaacgcacagccccgcctggggggggaaagaaggaagggattggaagggggaggggagggaggaggagggggacaaaagaagaaaagaaaagggaaaggaaagaaaggagaatttnatcaagagggggaggggaaaaggaggggagaaggaagaaaaacgaggaagagggaggacctattgtggagagggaaagaagagggaagaaaaaggagagggagggaccaccccgacgaatgttttg

SEQ ID NO: 261405 - DNA, 525 bp, Glycine max
  unsure (1)..(525): unsure at all n locations
atgttgaatcttgtaggaccgccagncgatcatagagttgacctgctgcatgcaagctctatgatatctatcatattaatgggcagtataattactttctagctgcgcgttccctcacactatagtactacttatctatgacgctacgttgtccaagtatatatagatgacgcgacatactttaatgctatctcataataatcgctcggatcactattgctaggtaggaggagctgaatctcacagttgcagttcggccttaaacgaaggtgttttgaggccacctcctttgtgttttcaactaccaaagatgcgttttatagtgtattattggtaaggacataacaataggtattatagcctcatcacagttgttataagagggctcctccgccaccactgctggatgggtgcagggttttttgcacccccaacgaaatcggacgggaggtctcttggtggctctatagacattggcttattaatggactaaatgaactctgtcgtgatactctgcatcttatc

SEQ ID NO: 261406 - DNA, 1223 bp, Glycine max
  unsure (1)..(1223): unsure at all n locations
gcgcaacagctgaaaaccaaaaatataagaagtgagataatatgtataatattaaanaaaaaataaaaagcgtgagacgctgaagagcgcccatnaaacatagcccgggcaacccaaatggngacaataggaggacggcagctctatctccaaaagagggcagaagccgaaagaccaacgtgcaggacaacgcatcaagcggcaacatatatcaagacggatggcaggactagcatgcacacacaaagaccacgcggccacagacagaccaccgggccagcaaccagatgaaaatggactcagaacagtagcaacagttaggccaagaaagcgaggtcaattcacgtgacaacgaactcaaacaggcggacaaccgtcataaccagtgaccgacgctgcgagcgaacaccgcggaaggagcaactcatagaaaaaacggaaaccccatgaaatggggccgggggaaacatccaccgaaaacgcggcaaaaaccatacccaagggcacgggaacccaaactcgaacccttataaccaacccacacagcgggccgattcgccaaccacatgaaggaacagaggatgacaaacgctacacacataaacagagcaaaacaagacagtgacccatacccccagaaccaaccccgagcgcaagagaagaaggcacacacgtagcgctacgcccaccgaagggggcacaggcgaaagcacctctgtatcgaaaaaccggccagcgggatacagacctccgagtacgaaaaacaacacgcagaacgcgaaggcgcccacggccgcggagagagacaccaaaactcgcacgcacaacgacgaccgaacgagcactgcggatacgcgacgaccggagacggcaaccgcgcacagacccgcgctacacgacagctcaccactatacacctcatacgcgaacaacacaccgcggaaccgtgaagccgcgacccggataccagatcggacgctcaacgcatcggcagcgcgcgagaccgacaagagacgacaacaccgagacacgcgaacgccgcaacgccaacagcacaacaacaatagcgaaatccgacacaccgacagctctatcgtgtaatctatctcatggacacagacgagacgccagccgcggggnnnnntcacgcactgcgtaagacggactagaacatcatcgacagcgccaacgcgaaccgagaagtcggcatagcagcgatgccg

SEQ ID NO: 261407 - DNA, 455 bp, Glycine max
  unsure (1)..(455): unsure at all n locations
agctntngcaagctggaatcatatatcctatctccgacagccaatgggtgagtcccgtccaggtagtcccgaagaagaccggcctcacagtgatatanaatgagaaggaggagctgattcctactcgggtgcagaacaagtggagagtctgcattgactatatgaggctgaaccaagttaccaaaaaggaccattttcccttgccattcattgaccagatgcttgagcgcctggcangtaaatctcactactgtttccttgatgggttttctggttatatgcanattactattgctcctgaggatcagganaagaccacattcacctgccccttcaacacttttgcctataggaggatgtctttcggcctgtgcaatgcccctggtaccttccagcggtgcatgattagtattttcagcgacttcttaaaaaatgcatagaggtgttcatggatg

SEQ ID NO: 261408 - DNA, 1461 bp, Glycine max
  unsure (1)..(1461): unsure at all n locations
tgacaatcagaagctgaaatgaatattgaactataattataaatatatgtnnntcgctagaccgtgactccgcccaaanaccngnngagaaaanagnnnganaaaagcggggcaacattatactttatccagangcttggttgcacgccataaaaacgaacaatgcaagagcgaacgaaccctacaggctcaaacgccaaagacatcgtgccgccgaattcggactatatagcagacataaggactcaggaccccactgacgccaaccacagatagggacgacccaagagaacccttgggataacaaaacggagagctctaaccctacggacgtagatcacaaaggcgggcaccttatcaaagccacgagaaaagtcaggagccacacgcgtaagtgagcaccaggcggagcggactgatgtgaatgacaaggaagggactcatgcatgacaaatgagatactatggatcgacccgcaaacgcgggaggaggggacatgaagatgcgatctgttaggcacaaatgacacatgatgtactgggacgggtcacatgccccacgcattttcacaaaccatacctccgaagactactcgcagcaccaacagacagaagcaagactaatcgagatagggttaaagacactaaagacacccttcacgcaacaacatataatccatcaaaccgaggatgcaaaggcacggtggatcgcatcaacgaggctacacaaacatacgcacaatcaccaccacagtgtagcgagaacggctagatcgccaccgctgaacaagacatagtctgcacaggcgatactacaggatggattacgcatagtcgcggataacacatctcggcgcgtagcgatccgaacgtgctgctatcgaacacataccaccatgcgacgcactgattacaacagcgcacgactacacgtcacgcaatactctgcgcgagatctcgaatcagcatngccggtgatacaggaacgacggtcgtaacgactatgcaccacacgcgtcnatcgatctaccgtcagcagatgtctatagcagacactattcacgttatatacatgcactacggtgacatacagcagatcanacgtgcatacgcagcatcgccgcacaattanatacgctatactagatctgccgatccacgacgtgtgctatctgtacgcatactacatgacctacacgccgatctgacatcaactgctgangancngacactacacgacgtctaatgtggcntgnntngtacntacgtacgcgaacacgcgatcatgcgagcngcgcgacgccctgcaactcgacgacggnnnnnnntnnngatcngnagtacgatacaacgtancacgcgacagcgatgccgtcgcacgactgctcgacagtaagacgangacaactccacacagtagctggantgctacgcgacgacgcgcctctanancacgacacgn

SEQ ID NO: 261409 - DNA, 380 bp, Glycine max
  unsure (1)..(380): unsure at all n locations
agcttgcctcanagaggtccaggaaggacaatgtagtttaatgaactagttccgctccggagtatgacagtcaccgctttatgagcgctgtacaccaccatcgcttcgaggccatcaagggatggtcgtttctccgggagcgacgcgtccagctcagggacgacgagtatactgatttccatgaggaaatagggcgccggcggtgggcatcacttggtactcccatggccaagtttgatccagaaatagtccttgagtcttatgccaatgcttggtcaacagaggagggcgtgcgtgacatgagatcctgngtaaggggtcagtggatcccgtttgatgccgacgctatcggccaacttctaagatatctcgtggtgttg

SEQ ID NO: 261410 - DNA, 1087 bp, Glycine max
  unsure (1)..(1087): unsure at all n locations
tgtacacgcacaatcntnttantttataaattaaaaaaatntaattataataataanagtgaannnnanataaaaagcgctcgacatcgtangacngacacaannatnaatannatnnaatannaattaaggaantatgacacggcgacgagagacaaatatttcttctatcgcgccgacatataaaagaanaggggagacggcgtaaaacatagctacgcgaccacacacacacacccacacgaagacgcttgccacccttccacggcgactgagacactctccacggaagaacacgagcggaagacccaatcgggtacgggcgcacgggcgaacacacacatagccgcggctgcgcctcacaggcagcgaatccggacacccgagggcgccgganggcctccaaacgcagcaatcgaacggcccggccggaaaccgaaaaatccacccgtgcacggacgcggcgccaaacaccatgcaacaccccttccaaagaccacaacccctccacggagaacaacatgctggcgaggcgctccgatcatacgcacgccatctcactgccatcacaaacccaaaaccggcgaacctagtcccaaacgaagcccgccagccgcccacacggcaagacggactaacccagacgggacacacacggtagctagcaggacccccccccacgcccgaccgagacccaagtggaagaagcggcaccccaacacccgccggaccacccgcacgcaccccacagtaaccgacggccccaaaccaatgtgaccgcacgacccgaaccggcccgacaacccggccaccccagcccctatccaaaccaccccgcaccacagacacaggaatgattgaccccccccccaagaccccccccataccagacaagagagagagagaaaaggagaaccgggtgagccccccccgaaccaaccgaaccgagccgcacccacacaccacaccagcgacccgagcaccacacccaacccagcacacgaacgcacagcacggccgcagcccataccaaaacccagcacaacaaaacggccggaccaccgagtacaccaacaccccacgccac

SEQ ID NO: 261411 - DNA, 1103 bp, Glycine max
  unsure (1)..(1103): unsure at all n locations
agtggcttgatgacaatganacncnnnnnataaccggacacggaggcgtttttttgtaccactctttcgagggcgcatcgcaggagagcaacaggcggaccaaacgccccaacagaggactagctcactacactaaccaatatgtgatagctcttctctacgatgtcatttcttgaaaagagagtttatacaagatttcatggtttgctgatcgagaaaagagagagataatattatatcatacatttcgtaacaaaaacatcgctctatatataaaggatgtaccactagtaacgttctaacggaatggctctcaacaaactctactatgacctatgggtagatggtgaaggagccgtactactggtgctgctaccatcggacctatggtacgaacagaggactaggtactacactagtaatagtggtgagattcgtcacgcgtaatctattaagggaggaaatcaggagtcatggtggcagtgacggagagaagaaatagctgagngtagcatctatgttaacgcatgtaatcacaaggcgagattaaatntggaagatcgattgtaactgctacgctctcatgttatagatggagactcgacacggagatcgaatctccatggagacctgcaccgtagagtctattaacttgtacatgacaccgacgctttatgctctcgagtaagtaaaaacacacggatggatatgaattatgaacggagaacgagccgctacgggatgcgcgatactactgggagattgttacgtgacgccttatcgaatgtacgttggcattagtacctgatgaaggatcatgctgattacagtatacgttcagaacgttaattctgatttgatgtaagggtagtcgtcgacgacaagtgtgtaacattactaacgcgcgagatagtatgagcataatgttctagngatgtcattggcatcaagtcgtatacgctaatgttggatcatgaaagatggccgttagttttaatagtgaggaccacccggacgccccccccatcacgaccgtctattgcactatcgtatagtgtgattaacgtcctgatgctctcttaggtgttatttgtttagacaat

SEQ ID NO: 261412 - DNA, 377 bp, Glycine max
  unsure (1)..(377): unsure at all n locations
agctttgttgngcaacaatggtggatggtagaaaagtataaaaangttgcgtgagagagagggagagcttctgaatttttctgttttgctgagtgaggagagagacacgttttggttttaaataaagggnnttctctttttctattattttatttaagctatgccacatgtctccatttgagtggagcaagaagggcccactatctcttntaattgtgacccatactcagccacaaaaagtgagaaaaatctgacctttgaaacgctaaaatcctgcctcggtttgcgtgccgtttctctggttccagttcctcatgtttctctgcgtccgttggggccagttttcgaaagtaggcaataaatatatcaaaacgctc

SEQ ID NO: 261413 - DNA, 1130 bp, Glycine max
  unsure (1)..(1130): unsure at all n locations
ggtgaacacacattaaagtttagatatgatantggagantagngttatatataaataggcaaaggtctgaccgtagatgagaccctgtananccnncntannanatanananggnaggtgcaggagggngacctctgatagagaaaagatatcagggggcagaaaacgacgaagagaagagacaaaagtccacttgagccgcgcatcacaagacccaataggatcctccttcagaagctcacacgaaaaacttcccgagaagctccttcgagagaaccacccgagaagctaaagactagcaacacatacccccctcataacgaacgacaccccccagagaagcgttcctcaagacgaattcctacagaagctcaagcttaactacccacacctctctaaaanctacacgacaccaccgtgagatacgacgcgagagcctagcgacaccacccctatcataagctaacgccaccgccacgacacagaacacgaaanacaagaaaaaaggcctacacaaagacaactcaaatgcacgaaaacacgcaaacccatccacaaaagcaaaacaggccaccaggaaaccatcaactacaaagaggggctcctgccatggccaaacacccagccagaaacctcgactcaagagcagccagcccgggtcacaacctggggagggccaccccccggagaagacaagccaggccaaccacgcaccacccgtgaacacaaactgaacgcgcgagcacacacaccgaaacgagagcgcccgaagcagcgcccagagaacgccacacacataccaccaacactacacaccaacccaccacgatcagccaagacgcgatcgcgagccaccgaagagcgacaaaccaccacaagcccacggaccgcgcgcacacaaccacgacggaagcggcggcgccgaccgacagacaagccacccccaacaagcaggcggccccacacacactccgactgcgacaaatcagggcacactgcaccacccaaacaccccgcccgcacaaatgtacggaagtatggtagaggtaaggggccaccccccgcgcccccccccccccactcgacgtggatgcccaccgcgcccacacgccgcacccccactgaggaac

SEQ ID NO: 261414 - DNA, 1145 bp, Glycine max
  unsure (1)..(1145): unsure at all n locations
ngatgacctgttactgaccactatctagctattgttgctttatggaggaactggtaagagagggtttgttcacaataaattatttggagaggtaattcccagggatttgttgggttaatattaagtaatttggaggaaaaaaaggttaaaatttattatttaatanatttaaaaaaagccaaaggttgaaagagaaaggagaaagggtaaaagatagtaatggggactaggtaagtattggtcttttccatgggaatatagataccatactcttnccctactcttganataccaaatggttggcacaagagaacacaactttcctaggntcaaatatgtccgggaaatatattgtcataacctttctaaaaatatgaaaattaataattctcactcttaccatttcgcanattatagatgtcttgatacaatgttccgataacaagggttngtattcagtacgatttatataatatacactagattggctatgtgtttaagacttttaggagatgcacatctttaactattacggtaaggcttacctattattctaaaagttgaatcatagctgattcgtgcagattatacttctgtggataactgnttatccattgtgttctactgaaatctcttacttcgatatgcaaatatttacagtccgtatcagctgttgttactcacctgagggctcatttatttcgttatctactcttgatctgtttccttgtggagcatatactcgtgtgcgctatttgtcgatcttttgaatgcttgtcttatactggtaatctgtgtcgtcgttgactatcgcaactttacgtctattgtttattgctgcatagattagtaatcggctttgtatcttgttggttccattgtggtataatttatatattttattgtttatgatttttgagagggagggggagatgttannanaaanaaagaanngtaaaaaaaaaagaggtaagaagtatngggaactccaccctctgtttctcctgttggttttctcctctctctcctccacgctcgcccatggtgggtgtgtggtggtggtgggnntnaanntgagtttgggtatatgtcgggattggtattgtgtgaatatagtttttgttatgccagacagatctttgttt

SEQ ID NO: 261415 - DNA, 151 bp, Glycine max
ttttccgaagcgcgctttcccgtttgaactaaggaaagcccaaaaaaatttgtagttccaagaactgttgagtaccgaaccacttcgaagaccccccccttcgaaccacggcctgatagctttcaacctcccaacaattaaaaagccgggg

SEQ ID NO: 261416 - DNA, 590 bp, Glycine max
  unsure (1)..(590): unsure at all n locations
tatgcctcttacaccttgatctagctttttgaaagcaggtgttttttacccatattccttttttcataataaggacatggcaatagacacttatactgtaccatgacttatttcaattggggcttgagctgattagtcctgccctttcactcaactaaacattttccaagccttttttgtagggttcagcgaaatgtgagcaagcacagtcctccaaattcaaacccattctaactaacggtacccaggtggtataccaagttctttacaacgtgggtcacccctttcgtggacctaaattaaatgcccccacaaataggggtataaggtgcctcaaacatatttggctcgcatgatgttgatttctttaaaactttggtttcaaatgccttcctgtttttagaaccttttctcatttcctttaaaaatttttttttttatttttatttttttcctagaggaggaaaaaagaaaaaaaagaagaaaaaacccaaccaccccccctaatcttttccctatttcccttttttttcaacatacctcccccccnnntttccacgggagtgacgatgtgtttgtatccccttttt

SEQ ID NO: 261417 - DNA, 483 bp, Glycine max
  unsure (1)..(483): unsure at all n locations
atccttaagcgactgcggctgcagctgatctgatgatctgaataatctgaatcttgctnngttgntgaagcaaccttgtattaatattgaagcaatgcttaacctttgaatgtttattgaagaaatcttgacagcaacctttgttgattattcttttgcatcctcaaaccatgtattcatacattcacattctcccccttttttatgatgacaattattatcaagtgaattcttttcggcatcatcaaaaacttgcatgattcacattctcccctttnttgatgatgactatcattatcaagctaattcattttagcatcatcaaaacctgaaacctgcatgattcactgtacgaccnctattccaacactagaagcatcacattcaatttcaaaagctttaacaaaattaggcanacaaagcagaggtgcattggttagcttatctttcaatanattaagagcacacctagtaacaagcaca

SEQ ID NO: 261418 - DNA, 527 bp, Glycine max
  unsure (1)..(527): unsure at all n locations
ngatagagctatcatacatgacgctntattggcacanaacaactcttctttctaaganacttgagattntaacagaaacactcggtaagctgccaactaagttgtctatgggtcaacctacacactgttctgttttgcaagttataggttgtaccatctgtggtgaggatcatgaaacaggccaatgtattcccactgaagaaaatactcaagaaattcattatatgggaaatcaacagcgataagggtatactcaaggaggattctcaggattccagtagggtccctataatcaactaggatagtggaggacacaccctggcaaccagttcaacacagacttgagtgggccttcaaataggccaatccaacaaggacctaacatattccagaggactactacgatagaggagaccttgactcagtttatgcaggtaacaatgtcaaatcataaaatcactgagtcaacactgaagaaccttgaagtccaggtgggacaactgggcaagcagatagctgacaagtca

SEQ ID NO: 261419 - DNA, 479 bp, Glycine max
  unsure (1)..(479): unsure at all n locations
agctntagacaaagaaagtaacccagaaatgactaagaatattgtgttgaaatagcataacaagactttcctaatatggtttaaagatacaatctttggttacgataatgcttctgaaacattaaggaagttagcagataagcctaaaagaaatgttataacttggaaaggatatgatatcaacaggtattcgttctacacgaaattacaagacgacaagagtacaatgcaaaataatgggttagtctaagggctgaatctcaacactttgctattgtacctgatgacaatccccgtttggcatccatgccttactttggagtcattgaagaaatctgggagcttaattatgaaaattcactatctgtgttttcaagtgtaagtgggttgatagcaatatcagtgtgtgaaccgatgaatttggatttcctttggtagatctgaagaagttcgcttatcagaataagcctttcatcatg

SEQ ID NO: 261420 - DNA, 476 bp, Glycine max
  unsure (1)..(476): unsure at all n locations
tcacttaagggtattatgagagcactcactatatccctttttacttatgaggcaaccaatctttcatagatttcccaaattnttatttacgataaaagaacaacaacacaaaggatctttntgtgggttctcattctatttccactttcattttcaatggttttttccaacaattttcaactgtgtgctgcttgtttttacaagaaatccctgcataagatatttacaaacatttctctcccccnaaattggaaaanaatttccttaaaccgcaagtaacgctcttctattccctaaggtaaagtgaacataaattcattntagttcaagtggtcaagaacataattcattcactgttattaagctcaaagggggattcatcattcatcanacacaaatgggtggttttggctaagtgagtaaanaaaataaaccagcaacaccttcttgatcatatccacattgtctatgaactc

SEQ ID NO: 261421 - DNA, 384 bp, Glycine max
  unsure (1)..(384): unsure at all n locations
gtggcatgtcccacttgtgctttttctatctaanttgcatcctgcacaatcaaaatctataaagcctgttagatttaaggaggtacctttgngatacctcacacccacattggttgtgcccttaagatacttaatgatcatattaacgaaaattaagtgagattccttaggattggactgacatcttgcacataagcaaacacttagcatgatatctagtctacttgtagtcaggtagagaagtgatccaatcatagctctacatcttgattcatcaacannatttaccttttcatctaagtcaaggtaggttgaagtagccattggagtagatgcttctttgcatttttccataccgaatttcttaattagttctatatagta

SEQ ID NO: 261422 - DNA, 444 bp, Glycine max
  unsure (1)..(444): unsure at all n locations
atatttctntgttctaatagtaactccaaccattttacagcttctaatgttatgattggtttggccacaccttccacatgtaaactcagccaatttcctctttagcttatgtcctgtgacattgtcctcatctacagatctccttctatttttcattggccttcctctttggaccctcttatgtggtggaacagggtgtgtatattgtgtctgggtccaatattgtggtatttggactggttcaatanaatgctggtatgtcttattataagcttctattgacagccactcatgacacatgtcctcaggcttcccttctttgtgagttattgttgcaatggcatgtcaacatggcatcccttcatcanagttgtaaaatcagcacacatgtatgttaggaatgaaaaaaaaaactataaagaacacaacctgtagttgcatact

SEQ ID NO: 261423 - DNA, 1134 bp, Glycine max
  unsure (1)..(1134): unsure at all n locations
tatgagctctgtaggcgatcataatactcaagcttagctacatgggatccctttgaatcttgaaatcacctcattacatttcctttttgctgatcaaaattgcctgactatgccctcttaggatgtttcacatacaaattgagaatagtgtttatcgattgggctccattgtatatgcaagtatgctgcatttgctaggacacataactatggtcgngtgctattggttctctgaaacctttaatcgtgtatttatggggctagcaattttgttgaccaattcatggtcatttaatggtgtctcaggcccaaatgcagttgatatgtaatccacagggggagctggagatagtccaatggttataatcctacaaataattggaaaagcaaataaataatatgtgctatcaataatttccatgaagatagatggggtggatgaatcatgtgtacatcaattattcgacatgcatggtgatgtttataatcacatagcatggctgcatggtataagagtctataggggtaaattaatcggaaattgccaacttgaaaagtaaaatatgtccgtcttctgtccaccttaagataacttcttcaatcccaccaacctaaatggaatttctttcccacccctactaatggctctcttttattatcttttcaaaacaaaattttgtggtcttttctttaaacaacccttccaaattttttggatttgggaaacctccctacgtggactataattagagtgtgttgtgaaagaggttatttggcttactgtcgtaatccacaccattcttctattttctttacctttagatattggtaacgacaatcataattataatctgatngnntactgtctcattctctattctcatctcactacttcatctcaacttctactcactagtttattcatggttctctgactcttcacttcccatttcctgtctatgtatctcncacttacttcctacttttcactgccgtttttcatactttaatttattccatcgatctctcctctattctccctcactcaccntnnnnnncctnnnactcgactcttcgttgaacattctttctcgctcttactatatccctcccccttttttttttttctgcgat

SEQ ID NO: 261424 - DNA, 441 bp, Glycine max
  unsure (1)..(441): unsure at all n locations
tgctaatatttgaagagtattcctgcggaaccttcacccgatgaagacactgaccaaaacttatcttctcctctttggacaaaatatgacaagatggggggcagtaaattttctttccatcaaaccttggatgcactgtgaacggatacacatctctgcttgattttgacgagtattcaagccattctttcgccttgcctaaatgttaaggagccgcccaatcacacttgtccatacatattttctcgacatgcataacatcaatacaatgtcttacatctagaacagaccactacggaagataaagaaggtgaactcttcttcatatgcangtctgactttatccttttttgggtcttccaaatacagattcaagtgttgacacgctgtatacctgttactagtcaccgtgtcagcacatatgtgctctgacttcataag

SEQ ID NO: 261425 - DNA, 1115 bp, Glycine max
  unsure (1)..(1115): unsure at all n locations
aatttgagactttgatagcaactttattnccanccccatacataaacggaaacaggaggcgcncagataactaccgtaccctttttggcgaaacgagagcggcaaagctggaaggtgtgtaacccaccatcctctcatatgagaacactggtaacggggcgactatcattggtatcaactccttctccgtggtctttgaaagaatcagtctcgtttctacacaggtgctgtaggtgcccttttatcggagccatatcaaaaatctaccgagactgcctaatgaaagagacactatgttcctccaagacagaggcgggacggcctagacaagagacctgggaggggtggccaacggacttgcctggagtactgttcacacaaatttgacaaggactagtcccactcccctgagatccttaagaagaatcgtagcggtaatcggggtggcggctagtgacacatggatcttacggactagcgaacagccggggtggagagggtgccggaagccctttggcatgcggggcgatccgtatggcaatggggaggatcggcacgtctacgatcaagttaggacaggagagcgtatgccaccagactggtgccgtaagtaatcaaatcagtagtaatcggtatgcgattgcaacggatccaactgacacccgtgcgatgacggtacagatggaggagcggccggactcagcgggactgacataaggaagcgcgatcgcacgcatgtgtataaactcaggctgagctgagtgatcgccctacggaggaatcaaggagaaacgaacaaggtgcaatacgtggtaaggggactggaatgcacttcatacctcatattgtaacgattcgtgcgaccgaagcagctgccgaatcggacactacgtaaggatcgtgaacggcggatcggatattcaatatgatagtggatactggattgacaatattgcattganaatgttnnttttgtttccctgtagggtgatctgcgtggtcgcgcaccgccgcgcgggntntgccatgtagatgaacgttgataagtagagatagggtaatattaatataatgtcgtcaccaacaaccgcggagaatgagatcggagggtgggt

SEQ ID NO: 261426 - DNA, 454 bp, Glycine max
  unsure (1)..(454): unsure at all n locations
agcttctatagaggttnttgtggactgcttgtctatttataccagaataccttcagctacaatattgaaaagcaagggagctaggggatcttcttgtctcaaaccccttgtagggagaaatttcttagaagggcttgccttaatcaaaattgatataaaagctgagtggaggcaagctgatatccatgatctccattttgagcaaaatcccaacctgaacagcatgtagtccaaaaaagaccaagaaactgaatcgtacgccttttcaaagtccaccttgaagatcatcacaggtttcttatttctccttgcttcctcaaccacctcattgagaatcacaataccatgaagaatatgccctgctttaataaaggctgacttgctttcatcaattaacccattcattacagacctcaatctggtagacagcaacttggctataactntatacata

SEQ ID NO: 261427 - DNA, 1321 bp, Glycine max
  unsure (1)..(1321): unsure at all n locations
ggtgacactcggcaantcgattatntgcaacttgtataananaatatgnnnanttnnnannnnannttcgctgactcgctgacnccccncnaanananncagcccgtaggggccagggcagaaaatgccccaacangaccctactgccctctatgngggtattangccaaccccttactaaacatcgaataacccgacggctcgcgcagaaattggtgtcaagcagctcaatacgactagcaagaatccacacgtttgaacataatcgggcccggacgaaaatagggtatgacactaccccctgcgagccacagaatatttgtactctagaaacaacagaagcaaaatagaaaccttgagtaggaaccaccactaaaccagtgggaagagcaatggaaacaacacatgcatggaggcgggcaacaatgaacagggaacaataagcccgccaaaggcgagtgaagaaaaataagagagacaaagatctncagaatttacaagaaaggcacacaagtgcaacgaaagattaatgtatatgacataaggagtacagcccaactcacaagttgaaatgaataatatacangcaagactctcaagggttctacttaatataaccctcacacactctntgagcctttctaagtccttctttcatggctctcttaccccggaccacgttatangcgcaganangccccatgtggatcaaggattgactnnatttgctnttaagtggactctanaacgaaactgngcacctntggacggcacattatattctatcatataaccacacaagggggcaagaaacacggtctccctgcacatcgnacaagccaccgacacaaccccgaacgccatacaaaggtcaaatacggagcgaactctgtcgctccgaacctcaacacggcgcttcgaaacccgggtccggtcatgtgacacggccctgtcttcgccaaccagacgtccgcacctcggatagcgacatccgcgatacccaacagctgtcttccatacactactcggtcaccggggacacggctccgtcatacggaatcgcggcggccgccttgcatcagcaaatcggacatgccacagtggtatcgcgcgatcggcctacggcaacgncaaccgccactgcgcatgtgcataactgtatcaccgacatcgcgaccgcnataagtgnaatntataatgataataaggatatagaggagtgcagacccagnttnnnnnngtgagaaagacgaactcagaaattaggactcggactccgcccacaccacccaccgcactaggtgcactcgcacaccccccg

SEQ ID NO: 261428 - DNA, 456 bp, Glycine max
  unsure (1)..(456): unsure at all n locations
cagcttgtatttctgtaaattactgttaatcctttatctctctgaaagaanatgngtctatctttcctgtcagatcctgtttcagaaacaaatgggtntatttttgtccggatacaagggggttttcatgagatcaggaattcggtaagggtatcaagttcaagatctgtatcctattatatntatatcaaacttaaactgtagcattatctgttttttatcccacatatgtgatgttgttgcggttgctcgacttctcaatgctacattagctatgcctgagatccaatcaacaaccagcagcaagggaataaggttactattctttcaaggaattaaaatttatattaactcagtctaatgtgatataaattatgagtttaaactatctctcttatctcttcgataattaattttatccagctctcagttcaagaagtttgcatacctatataa

SEQ ID NO: 261429 - DNA, 434 bp, Glycine max
  unsure (1)..(434): unsure at all n locations
tgatcatacagctgcagagaggcggatccaaaaccactgtgtcgaacagtttaatagcgaagtggagctgctctgccagctgcgtcacccaaagatcgtctctcttataggattctgcaacgacgaatatgataacactgatgtgtactagtacacggtcaatggatctctaaatcgacacctacgaggtgaggataccgatgcactgccctggaataagaaggtagagatcttcatacgaatatangagcagcaagtggactacactaccttgacaccgacactaacaacattctattggatgataacatgcagccaaaactgacagatttcgaccttggcgacaccgagcatgtttatgtcaagcccaaaccaagtatagagagaatgataatatatgggaaatcatatcttatttatgagctacactcact

SEQ ID NO: 261430 - DNA, 159 bp, Glycine max
ttcacctctaggagcttgagctactattgctgcctaaaagacccacacacattgctgggacgagggtatcattcggccttctggatcctcgtccacgggctccccgtgaccctatagacgtcctttattatcaaactgaacacacttgagggctaggac

SEQ ID NO: 261431 - DNA, 1134 bp, Glycine max
  unsure (1)..(1134): unsure at all n locations
acacaaactcgtaacgcaaccgaccaggaataaaatataantatataaaaaaaaaaaaaaaaaaaggcccgcacgccgactaccccatatataanannnnnnnnngnnnnnaannaaanannngnaggagggaggagaanaatttgactccatataannanngggttaaaaaagaggaaagggagaaagagaagaaaangngtagatagcaccgagcacctcgcagacttaaacaggggcgaatacgcaaacaacaacagcaaccacaaacaccccactggcggaacagaggacggccgcaaaagagcaaacggaaatttcacaaagtgcggcacccaacagcgaaccaccctgacaccagcaggaacaagagatggcgccacccgcgaccccccgcctcagaagaacacggagagcgaatgagcaaggcaaaacaagcaggggaacaagaacaggaaacaccgacggaacccaaaaaaaagacggacggcggccacaccggagaaagggggaaggaaaggccaacgggaaccccccaaaagggaaaaaaacaagggggcagaagaagaagaacaggaaagacgccaagaaccgaaaggcagaacgccaccaccccccaaaacagagagacgaaaaagagggccacaacagagggaccagaaagaagaaagcataaccccaacagaaaaaaggggagcgaaaggatcgacacagaggcagaaaacacggagacaagaacaagggacactgagaggccaacccacaggagacacaagggaaggcttgaagaagcgaaggaaaaggaaaagatacgccgaaagagaaaaggaaagaagggcaagcggccggaaccaggccccgaacgaacacacagcagaaccagaacacaggagaaacgaaccngaacagaacactaacacgcaaagatcacagcacacgaaagacacgcgaacaccaagaaacacgaccagacacaagagacagaagacagcggaaccaaacctacacgcgagcgaataattantgttaggcagacccccccgcggcgcaacccacccccccacccncttattaanctatattaaataatataaaaagaaaacaaccacacaccaccacccccggaggccgcct

SEQ ID NO: 261432 - DNA, 1050 bp, Glycine max
  unsure (1)..(1050): unsure at all n locations
atctgcctgtnactgacacttgtanacanccaanaancataaccccaacttaacggagagagcttgcttctttgnggactttttccacagaagaggaagaagggggggggagaacaaganatccaacctatctccacaaggacagagtctttgcaccatccattcaagtatagcttccctacgtatgaattcctaaatgatgagtcaaatcaacactctgagtgtgagttaatacaatcaatacaaaggagttcaggtgagataagggcgagccacatcctactggtgtggcacaccttgtgcctacgtcaggaccactcgcccgcttgagattcactatcggtaaaagctgtgcggagtataaccacaggactaccatcctcggggtgagcaagtcactagagactccgtccttaaccgaagcggtaagcggtagcatggaactgctgtagaataatccggttggcgtctggacgatcgaggattaaggcgttgtcagaggtgccgcgtagcaagtgttctatgtggcccctcctataataactcgtctcggtctctacgtgtaaggtgtgtgcgcgcgcctctcatatggcattggatccaattgacatcgcaatgactcgcaatggttccgttcgactccacacgatgatggtcggacgatcggtatgggtatgtctcgctagcttccgatcgatggcatacgttctaatggcttctcctttgttccgcgctttgttaggtcactggtctaatggggctaatatagttgtcgtcacctatttcacgagcctggtctcacacgaatatatcgtgttataccagccgtccttacgatatgcacgcatccgtacgctcgacttgcatttcttcttagtctccgtattccttgcgccaattctattctcacacgtccncgttcacttcattctgcactatttcatttgggcacgtgcgtcggagtcgtgctgctgtatnntctctcttatcgtgctacgttatctctgactaggatacgtattagctatcgtcgacgtcatgccgacacct

SEQ ID NO: 261433 - DNA, 150 bp, Glycine max
acccttggacgaatatggatattcgggaggaaccttacaataattcaaggtgcatccttaaccgaataagggtatttatgaggcgaaacctgcaatgattcaagctgctccttaatcgaataggggtattcgggaaggaaaccttgcaat

SEQ ID NO: 261434 - DNA, 394 bp, Glycine max
  unsure (1)..(394): unsure at all n locations
gaatagttacttgagtatatanngacttggcctttcttcttttttctcttccctcccacccatattaagggaaatatgcttatttatggttatgggaatattacggaagcactacgggtggtccggaagccccgaaagcccattttttaacaaaacgggggaggtggctgcaccttaaacaaaatatgcccagaaacctggccaaatttgaaattctatttgcccccccaattacaaataacccctctgccttttttcatacatacggaactcacaattacgaacgaacttgtttcttgcgaatggacaaacttgggataccaaccatccttttcgttatgatgtacgactttatcatggcataatgtgcttcactcaacaggcgaaactacgt

SEQ ID NO: 261435 - DNA, 967 bp, Glycine max
  unsure (1)..(967): unsure at all n locations
acgtggccttttactgacatcatatactaacctcgaggttgtctgaccatcttagtaacggcttactatgcttcttggatctataaggcagagatgatcgttgagacaattgattgttaataactgatctaatctgaaatatcatgtcccatgtgatgagatccgccttgttttgtggctctcgccaaaggaccccctttttggacctttagtccaatactctttccctaattttccatggcttccctattcgtttcgcgctccttctctatcatcttggtctccattgactcctttcttattttcatcttttgttgttcacctccgttatggctctttgtataaccctgatttccttcctcttttttatgctttcctctcttcccttgcctcttgttttgcatactacgcctttctcgattttcctgctatttatttctattgtttccctcttccggctgcctctgtttgcatgtctcgtcctgtttctctccgacgtttctctgttccctctccttttccgtacctattgtccgtcgtcttctctttactcctctattgttctctcctccaacggtcttgtcacgcctgtctcctcttgtctcctatcgttcttcctttccttcgtctcgctctctttctgctccattcgctccgcgctgccttcctcctcaatcttttcctgtttcttcctcacttctactgtttgctgttagctctcattatcgtgcctatttttctcttctccgctccgtgatcttgttgtgcgcttgcctccatttccccacttttctagcatgcccctctcggtgccttctcgtcactcacttgtttactatatctatatttgttgtttctgttgctccggcggcgtcctcccgcctnnnnnnntattcgttccctcactcggatcttaatctgttatttgcatctctcacattgcctttccgctacttcatctctgcct

SEQ ID NO: 261436 - DNA, 417 bp, Glycine max
  unsure (1)..(417): unsure at all n locations
tgtggacattgtgcaatgggtgagaaaaatgacagactccaacaaggaatgagttcttaaagttcttgatcctagacttccctcaggtccacttcataaggtgattcatgttttttatgtaaccatgctatgtgttgaggaacaggcggtggagcggccaactatgtgcaaagttgttcaaattctgaccgagcttccaaaaccaccaagctcaaaacaaggagacttaacaatcatagaatcctctgtgtcattatcaaacagtttagagtctccaaccacggcatcaaaggaacccanagatcaacatcatcctcaatggccaccaaccgatctacttatcatttgaattttgagtgctcagttggagacaagggtgtgcgtcatattatttccttggattgggtagctatctat

SEQ ID NO: 261437 - DNA, 1227 bp, Glycine max
  unsure (1)..(1227): unsure at all n locations
ngcctctacttatgtggaaggccggccttccttaactttttggtccccattgttatctctgacaactggtctttcctcccgcgatgcttcttttcatgttcggctgaatgggcttataacctaaaccatactttccaccatattcttgggtttttatcaggctaagtattccggcatttgttttggctaaacccatcccgggttcataacccttccccaacataacctcggccatcattaccgncgcatcggacagacaanggttgccanagagggagtccacngaggaaatgctgaccacctcaaaagactggaaagcggtttctaacgattcttncgcggcttccacgtaaggcatggaggatgggcagcttaccaagatatcttnctcgcctgacacgatgaccaagtgcccctncactacgaatntcagcttttggtggagtgtagaagcacaactcccactgagtggatccacgggcgccccacangcagctgtagggggggtaatatacattattttgaaggtgaccttgcaggtgtgagggcctatttgtactggagacaatctctcccctactctcgcgagtgtcgcgaaggccgaacaactatgacttggttaattgaacattgatggaacctgccaatgctctangatacgtttactgaacatatcatgaaccttgcttcatatgtctaacttgacaaacggaaactatatgctctcctcgcgggatttcttggaaggaatattgttgtggatgtggcacccctcaacattacaaatattggccgagactgtaaacttctattaaccgaagtcggcttttataccaccgactaccgggtttgtcttatactacctttgaatcaagaaatgtctctcacctttactttccggccgttgtaattnattgggggactactccctattacaantnntntgtgtgtctctgcacatacactagtatattattatcttctttatattcgantgccactatggtttcatcccatactgttnttctaantttngnttttttttatttttgtttccnnntntncntnnntaataantgaatctgtctaccttataactatctatctttanntcttttntnnnnntccacgnannnngttnntnntaatcttattatattgtcttctcatcttctcttgtcaaattacttttttatgtgtactcactaactacatctatcacactcc

SEQ ID NO: 261438 - DNA, 393 bp, Glycine max
accttgaaccaatgatggttgccatggatgaagaagttttatgtgtgttccaatggtgggaatcttggaacccaaaccattcttgggaagggttcaagatcgcaatctcccaaaggtgtcaagcttctaacctaaggaatccttttcatgcattgttggcgctctaacatgaaatagcagtgcaagaattcatagtccaattcgagaagcatgtctgaatggtgaacggtgtggaggaacctgttctggtgaaggtgtttcttaaagggctaaaagaagagatcaacactaaggtgaggctctatgaaccaaacaacttgatggaatctatggtcaggcttgtaaggtagaagataataattacgtcttacgacaattacccgtgagtaatac

SEQ ID NO: 261439 - DNA, 316 bp, Glycine max
gtgtcttaagtgaattcacccattattacctatccgaaccagttctgttatgacttaaggcctgtatgctcagggagttgctggcgctatgctcaagatggtgccatggaacaatcttattctggtgagtttctccttgttcccgactctccttatgaaaaacactctggcatcatcagaccgcacccttgctttcttcttcttttgccctggaagatcagctttacacacataaatatgagccttcggtggtttacctaatatgttttctgaccataatattttccacaatatatatttgcataattatgcatct

SEQ ID NO: 261440 - DNA, 464 bp, Glycine max
agcttctgttcgtgcttaacagataattgaaagactattgtcttactccttgtgctgaattcacggtactcagctgaaatagcatagaatctgtaatcctcactggtttgaatacctgcagagatatcaacattcaaccaaacatatcttaatatcaattttaaacaaaagtaaacatgagcaacaataatagtataatacccgactattcaacatagcaatttagtttacctttgtcattagcgtctccattccattgaccagaggtgtggttccactccccagccacgttctcatcttttttccaatctgatttaacccatcgattttcccacccgtctggcatccacacaaagcacatgcacacgagttagaaaagtgggaaatactgatctaggattaaagaaaatacaaatgaacttcgaaaaggactacccgttgaggcgcaaggacaaataatattt

SEQ ID NO: 261441 - DNA, 433 bp, Glycine max
  unsure (1)..(433): unsure at all n locations
tggttccccgactctgaatcattattgttttacttgacatatctctgataatactgaggtgaaaatatgatggaataatattttagatggaaaatatatctgggactttaaatcatccaaggttttgtgatgctttcagtttcatgtctaataagtaataacctaattgtcatgaaagtttggtggttgcactaatgggaaagtaggaattaaacccaacaagcctgtagctacaattatacatgtatttctttgatcaataaatgctttaaaaatttgcatagtgaaatttggtgccctattctgtctgatatcatcactaatttngtaattcatctcaaatgtagattgtacattccgctttagataactttgatnggagtagacaaaatgaagaagctgatgccagcgaagaggcacatcataattgggt

SEQ ID NO: 261442 - DNA, 535 bp, Glycine max
  unsure (1)..(535): unsure at all n locations
ctgccnncattgtggccatgagactcgtgatccttaagcatctcagctgcagctggacaaggatgtgtcttttgcacaaacgtgaacaattctacaagatgcttgcgttacctttcacttacccgtagtgcttatctcagaatggtgtggtgttgaccgtcactgcaaatgactcttcattcattcttcgatttgtaggatcctcgaatgacaagatgcaaatgcctgcatgcttatgaatgaacattanatgcaacaattaaacgggtgttatggtctttcattttatctaaacgcttacggcaccccgttgatcgagccaaatggcttccgatttaatgggcaagatcgagagcgtatgttcttactgcccatangaagtaacagacaccacacacgagggtgagatgcgcatcattagcccatatttattaatggtgcgattatgggttacaaatggatttaagacttggagatcccantgagttcgttgggaacagtcatgtagtgaaccttctagctgccgaagcgtttn

SEQ ID NO: 261443 - DNA, 347 bp, Glycine max
  unsure (1)..(347): unsure at all n locations
gattattctcataattgttntgttgaattgtctgcaagtaaatagggaagttctagataaataaaacaggccaaacacaaatttttgtttgatgaggaagagcttatatgactattaaaggatgaaatcaccatgattgcaatntaatacatggcaaggacctatntaaactatataatgtccaatccactgaataaaaaaaaaggatcagtaatggaatgatggacggtgagaccaagaacccatgataatatgacctgcanaatgtctgtctcttgttcgcggngcctttgacatgagatctccagcagagaagtatctgctttcattagcccttttgatatctc

SEQ ID NO: 261444 - DNA, 326 bp, Glycine max
agtgcaattctccattctcaacccctttttctgagccccatgaattgcgatttcgttcatgtgtcctccaccttcgagtttggagctatgtgtagtgaatgcttagtgcaattctcaattctacaccctttttcggagcccatgaattagcgtttcgttcatgtgtccctcaccttcgtgtttggagctatgcgtagtgagtgcttattgcaattcttcattctcaaccattttcggagccccatgaatagcgtgttcgttcatgtgtgctccaccatcgagtttggagctatgcgtagtgattgcctagtgcaattctacattct

SEQ ID NO: 261445 - DNA, 410 bp, Glycine max
  unsure (1)..(410): unsure at all n locations
gtgttntattcagaaaaatagaagttatactttttatcttagtgagagtgattctcctaaattcttgagtgattcaagaacaccctcggttggatcaaaagactttcacaacctttgtgtggtgcccttgctggaaagagagaatctttccttcctatcatctccacccttgttcttttaaaccacaattccaaaagatccacctctgcccaaaattatctcgtgaccatactcccatttacacactcaaattaagtgattcttgagcctaatttgatttcaaacgagaccttcacctggttggatcactcattggagcctgagcttcgtattgcattttatattctgtcagcaccattacctacgtttaccatccatcatcatttatgcagaaacacttataagaccct

SEQ ID NO: 261446 - DNA, 1330 bp, Glycine max
  unsure (1)..(1330): unsure at all n locations
gcacaacataaaattggtagaaataaaattagannantaannnnnnnaccgctgacccactgattccaaccttataaannnnnnnnggnngnanannnnaaannnngtaagcgaannaagcagagccctcccaacacagggatctgagacgaagggaantaaggaagtcgaaacccacgagggcaggccacaaaaaacccagtccaacaagagggagcggaggacgaagcccggagggaccaccccaaccagggacagaagcctaccaagggaggcaaccacacanaacacaaaagcaggaatgaatanacgaacaatctgacagaccaagagcgcgcgctgtgaggagagacccaacagcaatgccgaccgccgccaacacaacagacgagagagtcatacagttnccggccgagacacagtataacccggaggaggccatgcaaccacaaagattccctcaaccacgccataaagcagaagccacccccgaccaacacaagacccggggggggagacacgaactattccacccaagtgatgaaccggacgacccgtccgccgccgggagggcgaaaaccacaacagaagggggcacagaggggagcgcaaaggaccgnggagaaacccacagaacccacgccagagctgcgagaccgcaccacaccgacccgaagaaaagaaatgctgaccgccccacccaacggctacgcccgagataactggacaccacacgagaacccgggacacacgacggcgctcgaaacacctagaacgaagacgcacacggcgcggcggcatcgcggacccacagcggcgcagaacgaagcaccaccgctcagagccgacgaagcacaagcgcgacacgacccaccggaccacgcgagagacaacacccacaagctcccatgacgcacacgaacacccgtacgcaggacacaacgcgatcgatcgccgcacaaccgcgcaacatagagatagcagccacaccaacggcacatcgcaaannnngaagcagagatgcgcacgacccgagaaaccgacggccgcgaagacgtggcanggcgcgtgacgacgcgtcgagagcgntgaagcgcgcagctgcaccaggtaacgacacgcacagcacgactacanncacattactcntgacagactatctggnacacaagcgacgacgcagacagtacgcgacgacagggcgctcgggnggngnngcncgggcnaaaatnccgtngnacaaatatatggatatcctacacgagagcgacgccacgcaaccaactacatcacgcacgcgattagngagcagagancgngcgtctcgccg

SEQ ID NO: 261447 - DNA, 474 bp, Glycine max
  unsure (1)..(474): unsure at all n locations
agcnttacatgcatgttcaaaccatatttactatacttcgatctactgatgcaatctatttgattgaaaagataatttatattacacttctaatgtagtcgaccactaacaaaatatattacagaaagtgatgcttaagccaatcaaatcagatcatttaaaatctcatcattactatcatgcatctcaaagagaaggagaatcatgcatcataatgtatagcacaacataacattaaaagaaaacatgccttctaaagccaaccaaggtaaaaatgtatttatatgtgtgaactttttcaaaattataacacatatataaccatatataaaaacatggttgaacaatctgaccacatgcacaacacattccacacattatttctgagaatgagtggaagggaatataataaagcattgttattaagactgtctgtgcactaagataacaagggtgtcatgacanaaggaacac

SEQ ID NO: 261448 - DNA, 1418 bp, Glycine max
  unsure (1)..(1418): unsure at all n locations
ccacaatgtcaagtctctcntattaanntnatngataatcgaattcaatattnttganttttcaatttattataaaaaaaannanaaaaaaannaatgcgtactgaacncccccttgtnagntaccacacannctatagtaanactcccaagctctannggatgnnaggacctaaataagnncgctactcagtatacgaaatcatagcatcacttcgtactntatcacattcttcntagacacgagacgacagtgggatgagaatctgaatgcgtacacattactctcgattatgagnggacactatcantatcatggggctcgtaaaattgcttctctgatgcaagcagagcgatctacctaatcactcaataaagttgcttctaacgctcataaatctactgcaagatctaagatactttaaaagtagttgcaacatgaacgagtaatttcagtaatgatatctaaacttaaaactgtaagactcaantattacctatatctaacttaccgtactactctactagactatatcaatttagcacgagtcgaactcttantcacacaaaatcatgtcacattatccatggagtcatatagtgttaatactctcttagacgattgactgtctctatctcnacatacaacagcaattattcgttgtccgaccgtatagtacaaattattaacatatgaagacagcacatatcactcagtcaaatgacgctactgccgctgtatatatcaaggaatatttaacaattgtgtaagtacactgcgtaaaacatgacaatatcaatcatctcgacaacgatggaatattntactgacgtgcccgacgaaaatacaactaataattttacaacactgtctgaatgaactgcccttttctggcactcatacaattgatcaaatcattattctatatcgtctatatgtcgaaatgacacctcaagaaagcaatagaataagcccttgtgaccagatccgcccacatacattaatattatcaccctactcacctcaataacacaccaacctatcgttgtgtacacatccatctcaaccgccaattgataaggcaaaaagaaaattacctagacattatttttgatcggaatcataaggtcagtccattttgcagaataaaaacacaaaaaaatataccactcaacggagaccatgatataattatatnntgacaccccacgcgggggnagaaccccccccccacatacaangctagcaaaagattgtaacacgtagatatacaaacatatacacgcttcacgaataaacgcacccctccttaattaacattttaaataaatataacactccacgatcaccccctgcncccctcccctactccttacgcctaccaccacatcatcatgaccactcgctccacccacact

SEQ ID NO: 261449 - DNA, 450 bp, Glycine max
  unsure (1)..(450): unsure at all n locations
agcttaaaggaagtgaacgaattaggatgggcagatatgtctctgcactgattggtaaatctgttccccaaattcctgaaaaatgtaaagatccaggtacattcagcataccttgtattatagggaatagtaagtttgacaatgccatgctagatttaagagcttctggtagtgatatgcctctgtctatttttaattctctatctctaggtcccttgcagtcaactgatgtggcaattcatttagctaatagaagtgttgcgtatcctgttggtttcatagaagatgtcttagttagagttgacgaactgattttccctgttgattnttatattntgaatatggaagatggattntctcaaggatcagttcccatcattctaggcagaccctttatgaccactactagaactaagatagatgtttatacaggcacactatccatggagt

SEQ ID NO: 261450 - DNA, 1029 bp, Glycine max
  unsure (1)..(1029): unsure at all n locations
aaattattcgggcatctcgtanannacannnnnnannannnnaanagncccggnggangaaangnannnnacanctcttgcgcggcgaggaatatttcgngttccttcttcacgaacacacacnccgaggacggcgcnttangcgcggacngcctgcatactcatcgaactatggtaccttgaacttgttgggaatgatgatgtcaggtactaaactcttatctgctattgcgacacagggtagttgtataggccttccaccgatattaatctcttttcatgcaacattatctatcctttgtctatgaaatgtgtaggagtttcttaatgtgtgcgtattgatacagtgcatggcggattatgtatggactgggcaacttatggtgggccggtttcttgatgggaagttgagggactaaatcgcatctactaatatttcctctggtgatggtccatatgaaggcacgtctcctcttttttatacatgttgctttctcttcaaatcattagagtgtgtccattgtttctcttttctcttccaatgtatctttttctatcttcaaatttttttatttggtggcttgattctaatcgttttttctcttatttattcatattttttttttttnncnnnnnnnggannnnnngannngagaaagattttttttttttttttatttacctcttttttttatttacaccccccctctccatattttctttttttttttttatanaccccccacaccgaacaggccccttntntntgaatatattttttttatttttttttccgnntnttnttanttnaatttgattttaangagtccccgagggacagaagacttttatctttttttatttattgtgataaaaaaaaanagaaaaacaccccctctttcctaaaaaatactcttatattgttgagtaaatgtttggatagaatatgtacgtatatgatatttaatttaatttttttattttttgtcttatcctatctcccctgtttagcattcctactgcttggct

SEQ ID NO: 261451 - DNA, 432 bp, Glycine max
caaattgctatatgaatctgtttctggagactaagagcctacctctacctcgtgggaccttcaatttcaggtaagggtggacttcttctcactctaaatctgtgggtggtggggtcttgggagccataatggatagctctactacgttattgctttaaggtaactgtttgtgaacgaaattgatgtaaatatgctcaacctgacatggttaatggaagcaaaactgcccatgttgattaagaatcaataatgatgtttcgagttatatgtgtgcttaaaatgtagatagaaaactggttgagacgattgggagaggtatcttatagttaaatgtgagaattctaatgtcgttgtggaaagctctacattctaagtctcaaactcatttggtgttgaaaactatatcttactgataaacacacctactggact

SEQ ID NO: 261452 - DNA, 898 bp, Glycine max
  unsure (1)..(898): unsure at all n locations
agaagagtacggatatnatatgtaattnaaattnaaatnnnnnnnaagcgaacgtgacgaacctganaccnnnggnnnaanngnnnaaaaaaaaaaagagatgtggncaaaatagacgggaaggaagaagaggaaaaacagggaccacaacaagaaagggaaaaaagacgcaggacaaaaagggagaagaaaaccacaagagacgaaggagacaaaaaaacggagcagcgcctacgcaaaaccaaaaagcggggcaaaaaaaagacagcaaatgagcgacgaaaaaaaaaaaacgggaaacctcaaacaagagcaagctacttcaaaaagacgacaaagcgaaacaagcgcaaaaagaggaaaaaaaggcacaaaaggcaatgcgccaaaagaaaaaaaaacaaaaagcacaaaaaaaaaaacaagagcaaaacacccaaggaaacaccagacgcaagagaagccggacgaacccgaacaaccggaggcaaggagatccgaaaacagaaggcacgcaaaaaaaaaagggaggggcggaccaaggggcaaagagaaaaaggggcacaaaaggggaggaaacaaggggaggggagaagaaacaaaaggaaagggaaaaaaaagagagcagagggaaaaagagaggggcgaagaaaggggaagagagaggaacacaaaaagaatgaaaggtaaaaacacaaaagaagagaagaaaaaaacgaaaagagaacgaaaagaaaaccgaaaagagacgagaaggaggaagaaagacaaaacacgaagcgatgaacagccaatagaccagcaagaaagagagaaggaggaagagttnnnanagaacgacaaaacaagaaggaagcgagagagaaagaaaagacaggaaagaacagaaagcaacaaa

SEQ ID NO: 261453 - DNA, 403 bp, Glycine max
  unsure (1)..(403): unsure at all n locations
agcttgngttcctaagcttagaaatgcatttgggcactcatctcanatcctttatgctgtccctatatatataaaacagccccacaatcccaatcttacaaaccatgttcatatgtcaatgaggcattccaccgagcactcgctgggcgcatgtttangcatgaatagcaagagagtgggggcaatgtggcatgccctattgcttcangatgcaacataagcctaaggccattccctacaacaacgcaattcaaacaaatcaagcatgaaaacaacccaaaattgccccacaaattngagcacattctcacaatttagagcaccaaaagatgaacaagatgcaccaatggaaagctagaaaactcaaggattaaatacttacttgttggagtgagtaggagta

SEQ ID NO: 261454 - DNA, 1185 bp, Glycine max
  unsure (1)..(1185): unsure at all n locations
cgcgtgtgaccccctaaactgacanactagtaaaacccnncntanagaattgttattcaccttattcctgcaccaatctggtggtttagctactcgttcgatgttctcttcactaatgggcgacgcctccatgtacactgtggaagatatacaatggtgcatgttcactgaggagaaccacctatgaaagtccgtagtgaagctcatagaatcatgctacataagagctgcacatgccaagcctacatcaagtggtagtccgcacacaagagcttcacgaatgtgctctacaagactccgctaattctcagctgtagctccttcgcccattgccgactatccattattcaccatgtgtctactcacatgttgtggctcaatatgatagatgagtgtctagaagttccaccgactaaactcttgtatataagctaaaattgattttcatggtcaaattcttgtcctgtctcgaccatgattgtgggagttatggtccttgagtttgtcttgcatttcttgtgctgaaactaatcataaattctacaaaacataagtgaagaaacctaaaatctaagtgcttgtcactatggagtcttatagaatatgttagatgaactgccaaagattctagtggtgacttatttttggtcttgcaacaatggcagaagtgaatatttgctatgcaacaccctcgggagggcacagtcagggtgttaagaggaacccgaaggccgacttattaggaacttgaaacaaccgtccgatttaatagggtagtggtgaacgtggatacacctctctantgctatccgacaagcgagacataattgattccaacaatctagctggatgagtagttttatagttgtttttnactttttttggtgaccccncccntnntntnntgtcatgttttntctggtacgtcgagcggctgataagtattgcgacgatggagtatcgattttctctcagttgtcatctcaatatcaataatgtatatgttgaatgtttaatcgttatattcaactcctgatcgcacnaatnttgacctctctgcaattatatgcgatatacgtcctctcgcgcctcccnnnccatgnntcncnacgtatgtccacattatgatactcctgtaactccngactgctatataatcgcgtcagcacccatgaatcactccct

SEQ ID NO: 261455 - DNA, 293 bp, Glycine max
ataatctctggaacagccggaactttttataaataaataagaaattaatatacttataaataagtgagttaaaaaaataattaggtcataaattcccactatataaaccaaatattaacctagagcagcttttagaacacacattttgttcctttcttctttttctaacgcacaagaaccctaacagaacaatcagaggtggagctctatagagcaccacagacgccacaattactaacggataacatttaagcgactacatcgagggtaagggatgagttattcacgcttgg

SEQ ID NO: 261456 - DNA, 1112 bp, Glycine max
  unsure (1)..(1112): unsure at all n locations
aggaacgtactaactgatgacgacaacnttggaggagaccccgcgggccngaaancacccacgcaccaacgtgcagcacnancctctcttttcgtataacacctttctctaanacggggaaagacttgaaggaagcaatggacatccccacccactgaatccacacatcataatagtataataaatacgtatccaggcgagaacaggtctggcacacagagtatacgtcacactcaatacatgccgagattcccatatctcgctctaatatccagatacgcaaatattgcacacaatacagcatggttcgaaacaaacatcaggctcatccaagaaatatacccggatatatgcgatctacaccctgctacttattacaaaattaatcttgacttttcgtgccaagttaaataggtttatgggcaacatcacaacatgactatgaaccaccattccgagggtaccaaacacttcagcttcaaactgattatacccacacgagatctagtcaaatcacgaatttaaagactcctttgacctgccggaaaaaaggataagatccagatgcaactgcaaaatgattaaagcgcaactccagtaaaactggcaatggagcttgaaagtcctagcctcgaaccttagtaccaaaatacaacgcatggaaatctcgttcgtaaccatgcgcaacatgtacgactctcaaagacaagggaacgcatcgatacgacaaggaacgcacccggttcgcattagaaccgcccaggactgacaaggtacaaaaccaagcacaaaagaaagattggtgccctaattgcctctgacataacattccgagctaaagtactacatgatcccgtcaacgaagctcgagtatcacgacgtctattactagcgcgtatgcattatttgaacgtcatggagcgtatacaaacagtagacctcactcgacgatgataacccctacaaacgttatcaacgctgcctcaaaactatctatcgtctaatctagcgtacatcacactgagccctgacgaaggattatattcggatttacatattagctctatgcaagaacgaagcgaagatagtcaacaaacgctctgcacaggaca

SEQ ID NO: 261457 - DNA, 408 bp, Glycine max
  unsure (1)..(408): unsure at all n locations
aaagatgctaaatacatgacagtagttttaaaaaaaatgcttaaggttcatacaacaacttcaaagaagcaatgacgatttaaaaaatgaacctaacctttcaagttaaaaactacgatatactattgaagagtggaggcacaatcacaaatcagcaatcaattataggctacccaataacaaattcaagcatgatgtttaaggtggaacagaacaattaccctgcaactgagctgagcagaaacgaagcaataacacaccaaccagtaacggtagaggtagtaatcgcaacatagtcaaagaaatacacgagactcaaccgagacacacgtgtgccaacaagtatcgacaagaacaaccncagtgtgatatagtacatacattgaagacacacaatctgagcaacaa

SEQ ID NO: 261458 - DNA, 1171 bp, Glycine max
  unsure (1)..(1171): unsure at all n locations
ntgttgaccttagtacggacctatgatactaagcttgaatgaccacgagctctcagaaatcgagtggcataaatctcacacagaggtccgattcggggaaatatatatcgagacgcacgaaattgaacaacggaagctctcgagaaatttgaatggtcataacatttcactcggatgttcgattcggggacataatatatcgagacgcttgaaattgaaccaccgaagctctctacaaattagaatggtcgtaacttttcacgcgaatgttcgattcggggacataactcatctaaacgctcgaaattgaacaacggaagctctcgagaaattgaatggtcataagatttcacacggatgttcgattccgggacataatatatcatgacgctcgaaattgaacaaccgaggctctcgagaaaatctgatggtcataactgtttacacagatgttcgattctgggacataactatctagacgctcgaaatttacaacggagctttcgcgaaattcgatgtcgtaacattcacccgatgttgattcgggcatatatatcagaagtcgaaatgacaacgagcctctaaaattgatgtcttattttacacaatgtggatctggactattattaacctcaatgacacgagcttctaaattatgcttcttttccctgtcgttggcattattttacctcagtaacagagctcgaataatggtatttccccagtggttgggcattttaagccaattaaagcctctaaatatggctttttcatgcttggctatattatcgttgacctactttatactgtcttccttgggtgcgctctatacatcgtctacttcactattgccttccctctcgggtattatccttacactctctccatattcacatctgttttatacgacatatcttatctgatcttcgtgctcattattctncgatttcggtcttcttctatctttctgtgtaatgctacatactgacttcttctacttctctatctatctgtgttctcgtctaaattagtcttcttgttatcgatgcaggcacggcgtgcatctagttttgntantcgtcgtctcnnnnatctctctccctctgttgtgcattcgtcgtcattgcgtctcggattctgatctattcttcgttgtatctctctattccct

SEQ ID NO: 261459 - DNA, 451 bp, Glycine max
  unsure (1)..(451): unsure at all n locations
atccttaagcacctgggctgcagcttctaaggaagttntctcaagaaagcttctcaaggaagctacctagtctataaatagaagcatgtgtaacacttgttgtaactttgatgaatgagagtcttgtgagacacaactcanagttcaacttctctctctttttcttccttcaatttcgtgctcccccctctctctttctctccctctttcttttcctccattgaagcatcctctccaagctttttatccaaggctcatcttggtggtgaagctccttcttccatggcttattccctagtggatggcgtcgcctcttacctcttctcctttgtcttctgctgcatctccatggtggaaaatcaccattaaaggacctcattgaagctcanagatccagcctccatagaagctccacaagcaagcttccatcanggagcaacatggtgaacaa

SEQ ID NO: 261460 - DNA, 326 bp, Glycine max
ctcgctaaaccaatctgctggcttagcgagcgtccgctaatcgcaacactcatgggctaagcgcgaggaagactctggaagaagatgagttgtacaggttcgctaagcgcaccgcttcatctcactaagtgcaccacttcattccatctgctaagcgagaaaggcacgtgctaagccaaaattcattaatgtgcgctaagcggtcatacccgaatcaaataaacatgaaaatgcagtaactaggaagtgatcctaggtcgtttcccaacgagcaatgataaaccaaatgttcacaatatacttgcagtaacagtaacgattggggg

SEQ ID NO: 261461 - DNA, 909 bp, Glycine max
  unsure (1)..(909): unsure at all n locations
gctacttgacacatattagccgcgaatgtaagacccatgaatgggagattcttttcagccattaaactaaatcggccaaacaggtagatcaggtcttccatagtcgatctaagagaaacaaaatccggcagtttaacgcatcgacatatggcccattactcttaatatccaacatgaagtgctagcgacgtggaaagataaccggacccccagcaaggaactggaaggtttgaccccatgtgactcatctattataatatactacgggctgattgccggcgtgtcaatccttaaggggatgctacaatagcggccggtgccagaattgagcggactgccataaaaactacactaactaccaaacgtctcaaacggtcagacaaacacctactcaccagcgtgcaacactgccccctccttcacaaatattaagtacaatatacctcgcagactaatggccctgccctccacccaccgcaattcaccgcggttagaaccaacagcttcccgctccagcctatgagaatgcgctaacaccgtccgaccgctcacactcctataccacacctccttctgtacttcttcaccccccatccactactacttcacctaaacgcacgtccccgacgtcatcagacacaactcaccttcctctactcattcattaaccgcacatccggacaccgcccacatcttccctatctctccaccacactcgacccacttcttccacaccctggctacatgctcctattaccatatcacatccagctcacttctactcctgaatccatgctcattcacactaactggttatactacccgacaaacacgccaccggngnggcctcatccgaatccatacaccacgtctcatcttatctctacatctctctctccctctcaacag

SEQ ID NO: 261462 - DNA, 488 bp, Glycine max
  unsure (1)..(488): unsure at all n locations
agcttcacccaataatgaatggtaccactcaggtcatgagcgtggacaaaaggtctccagtttgagccctgactatctaccaagcatgcctggatgacgaagtcgatgtagactcgtgcgaagacacttctaatagaggcccaaagcctattgatgatgccaaagaatcaaggattaagcaaagtttcaagcaaagattcaagaatcaagtttcaatattcaagactcaagtttcaagaatcaagattcaagaataatcaagatcaagattcaagactcaagattcaagaatcaagaagaagactcagtcaagataagtattaaaaagttnttcaaaacattgagtagcacaataagttttcacaaaatcttttaccaaagagttntactctctggtaatcgattatccgaaggtagtaatcgattactagtagccagcattggttttcanaatgatttacanagntgtaatcgattaccataaacat

SEQ ID NO: 261463 - DNA, 396 bp, Glycine max
  unsure (1)..(396): unsure at all n locations
tgatgtaaatcatgtgacattatatatgtttgtattatacataaattatatcagggtgactntgttttaagtgacacctgaagtaataatgacgatcttaactaaattaaataaatttgaaattttaagagtaaatagacaatttatttccttactttgtacccttgttgtatattagtctctaacttaatgaaaaatctaaaatagttcctatctttatataagtgttgtaaaatagtctttgtcgttacatttgaaggtaacatcatcaatgaggtgtccacgtagtgccagacagactaatatgcattgatatgcatcttattgccgcttcacatggaagaaccccaacccaagccaattctacataaacccctcggttatcgggacccatac

SEQ ID NO: 261464 - DNA, 336 bp, Glycine max
  unsure (1)..(336): unsure at all n locations
gactatcatctcaactatttcttgcagaatttcccagatattatttcaatatcaatatcagaatttcttggcaacaattcgacatggttgcaaacaataatcagctccatccaagattaatacacggttaattggcatctaaaacgagttatttaagacaaattcaaactaatctctaccgtacgcaagtacatagctttaaggtacaaaattcanactattgatagaatcaatcattcaaagtgtaccanataatntcagctnntaaactgatctctanctctactaagtatatagcttaatttccaaaattttaacaccatctatgatctaact

SEQ ID NO: 261465 - DNA, 504 bp, Glycine max
cgattgatgcatctctgtcacgcgatcctctagagtcacctgcggcatgcaagcttctatataagctgaaccattttatcaataaacacaagtttgagtttattcagaaaattagaggttatctcttctatcttagtgagagtgattctcctaaattcttgagtgaatcaagaacaccctggcttgatcaaaagacattcacaacctttgcgtgttgccctcgctggaaagaaagattctttcctttctttcatcttcacccttgttctttcaaaccacaattccagaaaattcacctctgcccagaattatcttgtgcccatactcccattttacgcactcaaataagtgattcttgagctaaattgatttcaaacgagcctttcccttgtttgggaatacctatttggagcccttacttcagtatcccattctattttgtgccaccaccattacctacgtttacctccatttatcattttcgccacaccacttatagaccct

SEQ ID NO: 261466 - DNA, 1620 bp, Glycine max
  unsure (1)..(1620): unsure at all n locations
atcataaatcaccgacagcatnntaatntgatnnannnnntannataaatggcgnnanntgatctataaaaaaantntnaananttantnntnnnnnnnnnannnnnnnnnnannnnnnnaacgacggtngttggaacgccccgctcggaacctngtaccgaccnnntcngggagannnaccnncncnnnnnnnnnnnannnnannnnnngnnncnnnnnannnnnannanagctgaagagcggggggnnnnagatcntaccatcatcactcagnggaagngacacttattcttcacanangancgncanaggaaggggantggacgngactaaacacgggngncaacacacctcaacacannccgacgcaaacaacgtcacgcagtcancgacatagtatggcctcancaagngaagatngcagntactatncaatcaacacncgancagcgacaaagctnatcaacngccaggtnatgcggctgacaagaaaactcgaacagggcgcgtagacgacaaagctagtcgcatcgaaaatganggtagccaccntcacatgtcncgacaatcggacanatcacggggcagacgactantgccgacgccgnagtgacattgggacaattcggcatatanacgtcacatcaatgcgagaagagacacgtcaataccnatgcncgatngacatctgtacggcaatggcagaanctatgtactgcgacatgctcaacactggaaaaccacacaatcaacacatntgaacggaaagtgatcacgaagactgactgctgcagacgcttctacagcgcacgaacattcacactaagcctacacaggaccaacaatcgcggcacctacgacatcgagcaaccacggtagagggctgacccaagagatgaagcagcacagaccagagccaacaaggagacaacgaaagccgtacaccggagagcgggaagagaaagaagggggtgaccaggaccgaagcggagcataaaaacaagatacagaagaagcgcatgccgacaacaagggaccggataggccccagccgtcaacatcgacagccagcaccaatgctggcgnccagcaacacagaaccgagcacactccacaagacggcccgtacaacagaacagagttagcctggggtggaccaacggcggagcaaccagaaccacgacgagcggcggcagacacacacacacgggaagaaccgacgccaccgaacgtacaaggagaaacaaaaacccgaccacaacaagacgaacacacgaacggagaccacacccggaagaaaaccgaaccccgaccactagaagagggcggaaagcgccacaccaggacaacgacgaggaacggacaccgaaaaccgacaggagacaagcactcggagacggcaacgcagcaggcacacggaaacgggaaaccgcaactggcaacggaagagccacccaggacacggcacccgtcgaccgtncctagcgaatggaacaatgacagacgagagcgaagacgcgggttngngctacngaanttaactacacacaacggaaacgagangacagcgacacggacacacgcacagagacagacacggacacgcaaactgcaaaccg

SEQ ID NO: 261467 - DNA, 382 bp, Glycine max
  unsure (1)..(382): unsure at all n locations
agcttgacaaanaataatagtctgaactagatttgcatctatccaagaattacactgcgcattgagtcacaatgtaatgtatctctttgtgagtagaatttgtatgaggtttactttgagtacacatatccctatgaagattagttcaataatctagaaagctaacacattaatctagacgtttaagataagattcaccacttttggcataaaataattnttaccattgttggctatatctacattagtcatttcttgctaaagatataaaaataaaaccatccatgtattacaagctggtgcacatgccctatggcttatacaatgggcattcaagcttgtcaattgaacacatcactagctttgcatcatttgccatcat

SEQ ID NO: 261468 - DNA, 1320 bp, Glycine max
  unsure (1)..(1320): unsure at all n locations
ctacctcagccttcttacactcaattgaaatagtgactntcgnagattannaanntaanntgcgctgaccctctgagcaccccctatttatatactctcagttantgctacccactctcctcccatacacaagttgctctcctgtttgcaccaacttcattaatcttagagaaaaatccaggctaaaaacaacagacaaacttatcaaatatcatatgcaaaacaatatatatatatatacatatacatacatatatatacatatatatatatatatatatacatgacaacacacaaagacatggtttcgaagtggcgcggatacacaaagtcatatatcactaagagacataccctcagaagatgttcaaagcactcatcacaacaacctttatgtacgcctgagcgccacaccatccacataacccacacgaaataatgtgcaatcagctactagtggtccaagagatcctgcaagcaaagcgtgtgctacaccaactgctcggccttggtcatcacaaatcacaatgacgcgcaactccctacgtacgctatngactcccctcacatacaccatcatactcttgagccgtttctcgagactctaacaatagagaacctctcatcagacaaaggattcccttcccatgacgagaactacacatataaaataaaacacacacctgatacctactgctcaccacccacagtgtgagaccacgcccacctgacgccatatgttcatcctctgttgcactccaatgtgacacccagaagacggcactaccnttggacctcggacgtcgggacacactgcgggacaatactgagactctggactcaagctcccgaaaaggcactccccggcctacacctgggaaccctggggcacgggaggccgattggtatacacccctcgcgccacttcgacccctcaggaaaaacatattccacactccaaacctaaatacagaacaccattccacttctgagtgctctccagcgccctttaatttggattttatttaatttttgttgtgttngggcccccccctcccccccccancccccccctcaacccccanccgaaagaatgagaaatttggaaaggaganangagaaggaatgaagtaagataaagaggcaaaggaaagangagaagagnagtatatagtaatatgtagaaatagtgaataatatgangtgtnntntnnttttattntgtaaatatatgaatatgtaggttattgtcattgagatacaattngctattgaataattagggagaaagagacactccacgcaccccacacacgacct

SEQ ID NO: 261469 - DNA, 465 bp, Glycine max
  unsure (1)..(465): unsure at all n locations
agctngcttagagaactgacttatggagatcgactttgacaagattcagtcagtaccaacaaggaaagaaggacaaattagctctaaaatcttaacttgcttgaatcttctgagatctgagtatcgacaactccctaagtagcttcactcacttaaaggactaaaacataaagtccttgcattgttgtgagtttcagactcataactcttttcattattgatttcatgaacgtcgtttacaactaagctttttccctagtttcttacttgccctaagggtttgttgtgttggacttgatatacctcgaccctagtctttgctagtaataggaaacattaagaaaaatatagttgtctatttaatttaataggataaataaagtcttcatgcctttcagaatgagcattcctctttctttttgttgacccattgctagctttccaactggaactactnaatatacg

SEQ ID NO: 261470 - DNA, 396 bp, Glycine max
  unsure (1)..(396): unsure at all n locations
ttcctcttagtagggaatctttccttcctaagatagatcgattcccagtccccttcattaagaattagctcctttatttctctattgcctttagttgcatacacctttgtttgattctctatttggttcctaaccctctcatgcaacttctatacaaactctgacctagattccccttctttacgtataaaagaagtgtcaagtgggaggggaattaagtctaaggatgttagaggattgaacccattgacaacctcanaaggggattccttggtggttctatgaacccccatgttgtaggcaaattctacatgaagaagatattcatcccaagacttatggttgcctttcagaagatcccttanaagggtggatagagacctattcactacctct

SEQ ID NO: 261471 - DNA, 457 bp, Glycine max
  unsure (1)..(457): unsure at all n locations
gtcacctgcggcatgaagcttataaaaaaatatggcttcctaataggatgtgtactctctatgtaaggacagagatatgctntgctctgtgcactcttgaactatgttactatttgtgtgctcatgatcatggcgtcatatgtaatgaactttgtgcctttctcaatgcttctaattctgctgaaacctctatcattgtcggtcttttctttccattaagtctcaagcatattattgcaagatctgcaacagcaagaatgtcatctatacttgcgtccttgagcactctgtcatcaaaaattatacacacttggctcttcttcatcaatgaaatgaattgagcaaccagatcttgaccctcatcttcatataacaatgaagtatgctgtctcccagatatgagctgtacaagcacaactcccagagtatacacatcactcttatctgataattgact

SEQ ID NO: 261472 - DNA, 974 bp, Glycine max
  unsure (1)..(974): unsure at all n locations
atgccgcactacacctcaccccatgntgtgcaatacatgtgaaaaaaannnnaaaaaagcggtgactcgctgactgccgcactggaanacccaaannnanaanaaagaannccaaccagaggcggggacaccccgctcatatacccccttccatgataagaacgcaaaacaccgtagaggcgacgccccaaacaaagcagacaacaccacgtacccgaacaacggggcgcaagacacagggccacacggaacaaccgccaccgagaggggcacacccagcacgccgaagaaaagcacaaagcaaaggaacggcagtaaaaacacaacccaacacccgaccacccaacaaccacacaagggaagagcacacccccccgaccggtgcccccgaaaacggagcgaacacccacaaacagaaccgctcgaaacaagaaagcccacaacaaccacccgggcagcccacggaaaaggcccccacgagcagccacaagcagcgcccccacaaaggacaaaaggaccacacaccccaccacccaaggcgaaagcaccgaccgcgaacaaacgggaccaaaaaacgccgacaaccaacaaaaccagccaaaaagccgccaacgccccccagaagacagcccaccgcgccacggccaaccacccgccaacaaggcggcggcacaaaaaacaaggcaagacgccccccagggcgccccagccacccacgaccggccgaaacccggacagaccgccccgaaacacgcccccacaagagcaccgatcctccccgaggaaaaccacagaccgggtaacaaccccgagaagcccccacaccaacgcaagatgggggacccccccacccccccccacacccaaaaaaagagggaaagaccctgataaaaggggggccgccgcccccccccccccttgccacccccccccaccccatntaataaaaacgccccccgcccccccccggcccc

SEQ ID NO: 261473 - DNA, 347 bp, Glycine max
  unsure (1)..(347): unsure at all n locations
agcttgcttgtggngcttctatggaggctggatcttttatgcttcaatgaggtcctataatggtggttntccaccatggagatgcagaagaagacaaacaagaagaggtgagaggaggcgccatccattgacgaataagccatggaagaaggagcttcaccaccaagatgagtattggataaaaagcttggagatgattcttcaatggaggaaaagaaagacagaaggggggagcacgacattgaacgcctccaggagggagagaagtggaactctgaagtgtggctcatnagactttcattcatcaaatctacaacaagtgttacacatgcttctatttatatact

SEQ ID NO: 261474 - DNA, 1238 bp, Glycine max
  unsure (1)..(1238): unsure at all n locations
ggaagtacacatacatacataatacagaattattagttttnaatttnntaaatannnannnnanaaagtgagcctcgatnactgagacctcgnanaccgcannnaanaaaanaagcccnnggagnagaacaagggaccaactcatattatncaaaaaggatgtcantatcaatcaagggcngagagaccagacaagtnacctaacgaaatccacatatgagggccactaaagctaccataagctgacaatagccgagaagcccacgaatctcctcggcgggggaggaaggggctgccatcgccatggccgtggccaaaaagcggcgaaagtcttgacacccgcttcaaggaagagcaaaccgggccatccacatggttgcctcccggtggaaagagacgaacactcttcctctagccgcttaatacgcgtacaattgagcatactcgcccgcgactacatgctcgtgggcacgggtagcacccacctggccaaacttagagatgaagctagatggaggtgtacgtactcaaaacccgagacaagccctttggacccgacagcagtaacactctatagaacatgcataggtcggacgggccttcatccctagaactgaggaataaaggaccacaagagatcgcgaaggggactgcatactctctgcaagccacggccttgtaaagcgaagcgaaagatctctccgaaccggcacccacgactggagagcgattgacccctggaggcgcatcgacccgaaaaagggaagccgcccccgtcgcaaactctgcgcacntaacgggacaacaaccgaataaatcacacgggacacagagcaccaagccaaccgactncaacgggccaaccagaccagatgtaaagttgcccacccaacaagagaacaccacggaccagggcaaggaaagcagagaacaaccatacagacggtattagaaggcactgtcagtggngacgtgagactaacggacacgacaagacggacagagagtagaggaaaagaggataggtanattaaanattgtaatagaagnngganggagaggggggggcgcgccccgcgcgggngccgnngngncngnggaacgccaccacaccccatccaccaacgaggangtgagaagaggagaggtggaagtaagtgtggtnttntgatgaaggagaatggagagagggtggangagggaanaaaaaaaacacccaccccccaaagacaanagat

SEQ ID NO: 261475 - DNA, 453 bp, Glycine max
  unsure (1)..(453): unsure at all n locations
agctntgagccaaaatcctgactcaccatataccttgtacccaggtgagaatgtcaatccttacccttggaagcaaaaaagaagagaaggaaaatttccaatcaaaggaaaaaagagaaggaaaattcccaatcaaagaaaaagcaaaaaaaggagagaaggaaaatttccaatcaaaggaaaaaaggaagcaaggaaattcccaatcaaagagtgggagaaagaaaaaagaaaagaaagaaaattcccaaccgaagaatgggagaaagtaaaaaagggaaggaaagaaagttcctgattaaagaaacagaagaaatgtgcagaaaggtcttttgaccagacaatatctgaacaatacaaaattgtcaccaaatgaacaaaaagaaggaagggaaaccacgacctanagtgatcttctccctttaattaccaaccaaaatcctgtgcgtcgat

SEQ ID NO: 261476 - DNA, 238 bp, Glycine max
  unsure (1)..(238): unsure at all n locations
tccagaatcacgagaagcttgatttcaagactctagaagagatgaattccagttctcagagaagaaaccacgaagacttcacaagggaagtattgtanagattattcataatacgaacatagcacaattctggttttcaaaagagctattctcaaaattgtctatgttaccagagcttctactctccggtaatcgattactagtttcctggaatcgattaccagtggcgaagtttgat

SEQ ID NO: 261477 - DNA, 466 bp, Glycine max
  unsure (1)..(466): unsure at all n locations
agctntanaatttgaattaaaacgttcagtaactgctggtaatcgattaccaaatatgtgtaatcgattacacagtngcaaatttgaattcaaattttaatagctggtgtaaatcagttttggccactggtaatcgattacatcctctggtaatcgattaccagagagtaaatntctggaaaaagactttnttaacttaaatttcttggccaaaccttttgctacttcaattggaattcccttcctattaaatatactcttcctaagactctagaggctgtcttgatcatccatcttgaatatctttgatttctttgtcttgaataaagctntgagaaacatgtaaccctttggcatcatcaaaacattcagcttgatcctttgtctacacataaaactctctctttcctgaaggaaactctataaatacgcctnctattttaatggtgatagtattattattgga

SEQ ID NO: 261478 - DNA, 340 bp, Glycine max
  unsure (1)..(340): unsure at all n locations
tatacattgagtgtcctcattgatatgtgctatagnntgatttgcaggaatttctaatggtcataacatatgattcatggatatgatatangcattctttctttctttacattttaagccattggccaaacagctatcccaatgtatattattttatcatttgcaagccctttgagccaaacacttgatatttttggaacactaacctaggctaaaagtttcctaccttaccataggttangagagcaagggtgtntttgatgggggtttatatcatttggtagctaatgtgatgtgaatactctcgttttatgggtattaaagaaaattaaatatttat

SEQ ID NO: 261479 - DNA, 451 bp, Glycine max
  unsure (1)..(451): unsure at all n locations
agcttaacccatcaagagtataagctaaacaatgttttatcgctcaagtcaaaagcaaccaagacttaatcatacatgacataagctaaaacaatacttaaccaccatacgcagaagcaaacagagaaattgtgtttaacctccacatataacaaaagctacaatcatcaaaacaatactaaaaggctaaaaacaataagccagattaggccaaaaagaataatcaccacacaattggtgtgaaccttctctaaaatattgtaagacttcagacaatagtcaatatatcttcacaaaatttcaatagcatttaatgaaacacctgtagtcaaagctcgacaatgctagacattgagagaacctggatatctaccaaacttaaggacatcaaatccgacatcaagtctcaaacaacaattccatatgaatcctcatcananatcgccactca

SEQ ID NO: 261480 - DNA, 287 bp, Glycine max
  unsure (1)..(287): unsure at all n locations
tcgtgtctgcgtggtcgtgagcagaaataagagagtcggaaaaatcatcattgcttgctcatttttgcataaatggatcaatgggtntctatctgtctgagttatgaaatccttcttcttcttcttctcattcccagaaccactttcttttctttattnttctttctcctcaatccttcagctacttgctttgccttgtgacggcattcataaatacttcngagttatacctcctgatatcggtaaattaaatttaattattttctctcacttctcaggggttctat

SEQ ID NO: 261481 - DNA, 472 bp, Glycine max
agcttagcccataattggtcattccttttagagaatcccacctatttctaaattggttatattcatatctcaaatttgttgccttattgaacttttctgcaatatttgcccaaccaagcttagtgaagtggttgtgagggttattttcagcattcatctcttctatgcacactttcaacataatctcagtatttttatcacaccattctgctttctttcttttcaccagaacatgattgagagacatctcacaagcttaatgaaacaaacaaaagcataaccctaatccataacaattcaaactttaatgagaagaaaaagaaattaatgaagaattggttaacctgtgatgctaacaaaggaagaagaagagatgacgaaggatgatcggaaagaatgacataggatgattggaaacacgagagagtaaatttgaggaacaagagagaagaaatttgagggtttagaaaat

SEQ ID NO: 261482 - DNA, 426 bp, Glycine max
  unsure (1)..(426): unsure at all n locations
agagtgagtcaatccaagagacaagagtgaatccactccttggagtgagaaagctagaaagttagagagcctctctgagagagaagataaatagcttgagaagtttctatcctcaagcttgagtaagcctctctaagagagaagataaatagcttgggaagtctctatcctcaagcatgagtaagcctctntgagagagaagataaatagcttggaaaatctctatcctcaagctggagtgagccaccatagagtggagtcaatttgtaaacacatccttgtaaccttactatcantttgtatagtggaagaatctccatattggagaattataatcgtgtgctcccattactaccttcaattactaagtgcctatcttaaacttcacgaagtgggaaagtctgagttttcccaacaatggtatca

SEQ ID NO: 261483 - DNA, 476 bp, Glycine max
  unsure (1)..(476): unsure at all n locations
agcttatcctgtctatactaacaatatgcaataactatgccctccaacttgatccccactacaacacacccatttttttccttttcanagccattcacaacatactcaaagaaaaagaataaaatactcaaattcaaagaaaatggtggatgcctgatatctttagtttctagaaaagaatatattaggttatcttttaaaagttttattttttttaaaccatatcaaaatttacatcaagtgaataatccatgttaacaacaaacatcatcaattcacaaaactagaagttcacctctcactctctcagtcactgtataaaaacaaagaaagaaagattttcaacaacacacaacaggaaattatttcaatcagagccattagaaaaagaaaaaaatttctaattccatctccacgtctattttcactcttaagattaaagaaatctagttctttattagatcattaatctaata

SEQ ID NO: 261484 - DNA, 556 bp, Glycine max
  unsure (1)..(556): unsure at all n locations
gctgcttggggctttatggggctcatcttgagcttaattacgttctttaatggtgattntccatcatggagatgcagcggaagacaaaggagaagaggagagaggaggcgccatccactatggaataagccttggaagaaggagcttcaccaccaagatgagccttggataagaagcttggagaggatgcttcaatggaggaaaagaaagagggagagaaagagagaggggggagcacaaaattgaaggacgaaacagggagagaagttgaactctgtgttgtgtctcacaagactctcattcatcatagttacaacangtgttacacatgcttctatntatagactangtagcttccttgagaagctntcttgagaaaacttccttgagaagcttctttgagaaaaacttcttgagaagctagagcttagctacacacacncctctcataactaagctcacctncttgagaaacttccttaagaagaatcctaaagaagctagagcttagctacacatacctctctaatagctaagctcaccttcttgagatgag

SEQ ID NO: 261485 - DNA, 467 bp, Glycine max
  unsure (1)..(467): unsure at all n locations
atccttagagtcacctgccgcatgcaagcttgtgcaaatcanatcactcctagcatttatctctagcatgcattggatgttggtctcgtcctttgtcacgggaagccggaaggtccatctcaccttcttaattgtacacatggggcactgcgcccccaaatgcgcaagtaagaagagataattttccgggctctcgtgtccgtaaaatgcattcatatcatgcatcgcataagcatctcttcataacatcataatggacatatcctgcattngtccgttatcatattccagcctcacattttgcatggtcatggcatcatcatgcatatgcgttcaacaaactttttggtctgcaaanatgcataccatttgttntcatgtttgctcatcccttgcgtttcctctacanaacaaaaacaaanaaaggggggagcgtganacttcacactacattcttagtttcatgt

SEQ ID NO: 261486 - DNA, 380 bp, Glycine max
  unsure (1)..(380): unsure at all n locations
cttgagcggttntcctctactcagttgaatccagtgtttcttctaatgctcattattaaacgaaatgcaaaatgtcttaatctcattattggttaagagaaattctatctttgtgctttcattcctcattcttcgcattatttttttggaaaaaatgtgtgttgttctgatcggtttgtggctttgtttctttaccatgcgtgcttgcattctagtgagaagtttcagaaacttcaaggtcttcagtcttttacattcacaagacttcaatgtcttctgtctgttacattccanatacttcaatgtcttttattttatacatttacaagacttcaatgtcttcttctttacatttcaaagacttaatgtcttttgctttt

SEQ ID NO: 261487 - DNA, 857 bp, Glycine max
  unsure (1)..(857): unsure at all n locations
tggaagagaatgggatagaaaaggaagtagataataaatananntnnaagcagcacgagcgccanaaaaannnnnnnannnganaaaaggggagggagaaattgtttggagaaagaggnngtgaaggaggaaaaggagagaacaggaaaggaagagaagaaatgaagaaatagggggggagggggagaaaggaaaagggaaatggggggagggagaggtagtaaaaggagacaagaacaggaggggggacagaagacaaaaagaagaagggtatgaggagagaaaaaaaagcgggaaaaaaaaaaggggggaaggacaaggaagggtaaaggaaagggaagggagacagaaaggggaagcgaggggagaaagaaggaagagaagttggggggaaagaagggagggaagacgaaggagggaaaggaagaggggggaaaggagagagggaggaaaggaggaaggaagggggagggaagggggaagaaggggaagaaggaagagaaaaggaggaagggaggaaggaaaagggaaaggaggaaagaagggagggaggaggaagagaaacgagggaagaaagaaggagaagaggaaagaaggagagaaagagagggaagagaggaaagaaaggaaggaatgagaaggggagggggaagggaagggaagcgacaaagggaaggaacgggcgggaacgagggagaagatggggagaaaaaaatgagagggggaaggagaggaaagggaagaaaggggaaagagaggaataggacggacgagggagagaggggggggagaacncntagggaagggaaaagaagagaaagcggaagaggaacggaggagggaggaaagggaagagg

SEQ ID NO: 261488 - DNA, 456 bp, Glycine max
  unsure (1)..(456): unsure at all n locations
agcttgtgttaatatgttctatagacactctntgtttctgttcttcttctttcacggcaaagtacttcaattccatatgcttagcacccgtagagtacttgtcgttcttagaaaagaatactgctgcggagttatcacaatacattttcagtggcctagcaatactgtcgacaattccaagccctgaaataaagttccgcagccaattagcctgaattgtagcctcaaaacatgctacaaattcagcttccatggtggatgcagcaacaactgattgttttgcactcttccatgatattgctcctccggctaagagaaatacaaagccaagagtggattntcttgtatccacacatccagcaaagtctgagtctgaatatccaatcacctctaggtgatcagacctcttatatgtaagcatgtggtcttttgttccctgtaagtatctcagaactt

SEQ ID NO: 261489 - DNA, 1095 bp, Glycine max
  unsure (1)..(1095): unsure at all n locations
agaagacctaattaaattatgtaatttattataaaatnanatannaaggggnactgtgcccgatgcggcaccttgaaaacacccagnnataaatatccaagggagaagggctcaattagcgtttggaacttctcacaaagggccgcgaacagaaaccgccgcggctcgggacccaactgacaaaccaagaagacaagaccggtcagcccggcgaaaagagcacggggaacagcggggagcgaagagcgcgcaccgcgcatcacacagaaccgaaccaagacacaatcaagatggtcgggagcgaggcacacagaaactgaggagaggacgaacggaacggaacggggacacggggcgaggcgggacaaggaaaaaaatgcacgcaccccagggggtagggggggaacgcaagacaatcaatccgctcacgacaagggcgaaacaaacgagacaccggcacaaaccccgggcgaacaaggggcgcgacgagcgacacccgaacacgcgactaccgggcgacgcccgaccggtaacaccgcgaaagagcaaagcacacacccaagaacgcaaagcagaaacacagacacaatcaaaggcactaggcccacggagccaagcgagcaggcgtggacgcaataaaacccgatggcacggaacacgaacatgaaaggcgcacacgggacaagacagcggaacagacaatgcgccgacacagcggacgaagatgacgacgactcacggcaagaaatgccaaatgcacgaacctgaactagacgagcgacaaaggcancgtaccgcactcggacacgcaccgcggaacgtcaccacgagggctcgacaactcagccacgaacaggatacacggcacgcgtacgacacgcgggcaaacacggacacacgcggcgagactcaacgtgtgtagtaagtcgacagcgtctgataacgatatgcacaccgcgcgccgcgtgtaaagaaatgagagaggaaggatagaagtagagggnnnnnnnngnatatggaaagaggcgccacccccgangaagacaaggagatcacgcaccgtgttnctgtttgtttgagggatgcaggagtaat

SEQ ID NO: 261490 - DNA, 1228 bp, Glycine max
  unsure (1)..(1228): unsure at all n locations
tatagactcactgttaataanggtantngttaataacngacaattanttnttanagtaaaantannnattaananatccgctagaccctgatnactgcacacacatacacagcctgctgtagagctaaatggaggcagaagacgagctcacatacttcctctatggagattatccatcaggagatgcaccggatgacaaacgagaagaaggaacaggacgcgcatccactagggagatcaccctggaagagcgaccttcacaacaagaaagccctgagacaccctcgcaagacgctctaagcgcgcaaagaacagggaagaagagagaggggagctgcaacatcgacggacgataacgggagagaagatgaactatgtgtagcgtctcacaagacttccattaccaaaggtccacaagcggacacatgccttaaaatagataggaagctccagaaaaccatctggaaaacttcttgaaagctcctgaaagactccggaaagctaagctacctaccaccccccctatactagctcacctctgagaacatcattagagaatcctaaggagcagacctagctcgcatacctgtctatagctaagctgaccgcctgaatgagaacgaagcgtactcaacacctataagctacctaacgctgcaaaaatgcaaacaaaaacctaatcacacaccaatgccgagcacgccacctacacataatgccattcaggctcgcaagaaacattatattccaacacgcgcacctatctggctgaccactaacataacacggcccctgtcaagcaacctgaccaccagctcgacgagaacccgccgcagcaatggaatctgaagagaaccattctgtggttttgtaagaggagaaaagaatataaaagagaatagagagacggacaangccacaccacccccccccccgcccccacacccgacacgacaaagatatagaagatgtaataggatgtagtataaggattacagtaatgtgttgtcgttatattgtaaacaataatgagtaatgagactacacacacggacacactatcagtcttgtcgtagctctacacgcatctcgctcaccgcgaatgagtatgtgagaaggagaaagtagtatangnanaaaatgggattgggggnngnnggggaggggaaggaaggaangnggagagagaggaaaaacaccacaccccacatcaccgcacacacnccgt

SEQ ID NO: 261491 - DNA, 436 bp, Glycine max
  unsure (1)..(436): unsure at all n locations
agctngtgcaaatcaagtcactcncgcattttatctctggcatgcatnggatgcaggactcgcgctttgtcacaggaagccggaatgtccatatcaccttctttatcgtacacatggggcgctgcgcctcctaagcgcaagtagaatagataattattcgtgctctcgtgtccgctaaatgcattcatatcatgcatcgcataagcatctcttcataacatcataatggacatatcctgcatttgtccgttatcatattccggcctcacattttgcatgagtcatggcatcatcatgcatatgcgtccaacaaactttttgatctgcacaattgcataccatttggtttcatggttgctcatccttgagtctttctctacaaaacaaanacaaaaagggggatgcgcgaaacttcacactacattcctagcttcat

SEQ ID NO: 261492 - DNA, 1091 bp, Glycine max
  unsure (1)..(1091): unsure at all n locations
acaagaccgttatgtgaattgaattactaaanatntaatatatagaaccaaggtgagccgtagatgcccccctaaataacaccgctcaattgatcaatacaggctccaaaaagagacaaattctctgctttaaagngagattccgtgatgcggaagcagaggtgagacgacngcaatacaggaacagagggaggcgcactacactcaggaacgagccttggaagaatgacgcccacaccgcgaccataaccaccggacaagacacctcggagaggaccgcgaaaggcgaggcgacaggaagcgaggagaaacaccaagaaggggggagccacaaaaaccggagggcatgagaacgggcgagccacaccgacgatctcgtgacgcggaaccgccgggacttcgacctccgaggagcaatatagcaaggggccgcgcaaacgcgcatccagcgcctcagatgaaacgcgacggaatctcggcacaaggacagcaactcacacgcgtcgcgacaatcgcacgggaacacaaccccgaacgagccgacccagtagcaaacgaagggaaaaacagtcgagacgccgcgcgcaacgcagagacacgcaatcgtgaagcaaacggacaagatgaaaccggatgcagagacaacccccgaggtcaccccccgaaacgggacccactcgaacgctcagagcagaacgaaaaacataaaacatgatcggctgcaaaagcaacaaaacggagcgaccgcatgcaccaacagccacgcttccgaaacaagcgccccaacggaaacgaacaatacgaaacggggcacacggaacaccagccaccacaactaacgcgaagagctccacacaacggtaccgtcgcgcagcggtatggaagggtacagatgttttggttccggggcccccccccccccaccggaaggagagatatgaaagcgttgaaaggcatagcctgcaacagaacacacaccgacggacagagagagagagggaaggagagggaaggggaggagaaggaagggaaaggaaagnaaaggagagagaaagaggaggaagggagacacaacaccccccccccgcccc

SEQ ID NO: 261493 - DNA, 462 bp, Glycine max
  unsure (1)..(462): unsure at all n locations
agcttgaagaactatccggagaggccataccctanacatggaactccattcatttgaagttntactgcaattaaatcatgtaaaaggtggtatactatttttcctacctcgaccttttatccctataaaaatgtaaaaaggtttttgtcgagaaggttttaacgaggcacacctaaacttatactatcaatgaatacatttttccaacaattatacttgtcatttttttttatagtaccctctcgaataccctnnttggcagaggttgaactctacgataacaacatgtgttccctctcgaataacttatttgatcgaggatgaacttatttcgttaagcaatagttccctcttgaataatccctttggccgaggatgaaattatcacaatatatcgtannagtccatcccgaatactctcttttgtcgaggtcaacaccatacgataaaaatatattgctc

SEQ ID NO: 261494 - DNA, 836 bp, Glycine max
  unsure (1)..(836): unsure at all n locations
acgacaaacgcctaaggaaaaagaaaaaaaaaanaaaaaaaaaaagaggtgatcctgagaccctaaaacaanccnnaaagcnaaaaaccggggcgaagaacctccacagacacagacacgggaggagcaaaccggacgagaaccccagccagacgcaaacccaccagcaagcacaaacccaccggagaccccgagggcggggaacaccgcggaccaaagaaaagggccaaaaaaaaaaaaagcaaggcccccggccccacaaaaacaggcgagaagagaaaaaagggggagaagaaacagaacgccggggacccacacagaagagggaccgcgcaacaccaccaaaaccgagagacccacctccgaaaaaaagaaggcaaacaggagaaaccgaagaccccagaacgaacgccagagggccacaagcccaaaagagcaccacaagcgcccacacaagggaagaaagcagacgaacccccccagagccaaccgaaggaaggaagaaacgaagaagcccccgggggaagaaaaacacgaaaggagcacccaccaaaagcaaaggaggccggggagacacagaaaaaccccacccccgaagaaaagcaagcaaggagggaaaacacgaggaaagaccgaaccagaggcacaaacgcaaaagagccaagaccggagagaacggaccagccacccagaacaagccaaacacgccaccaaaagaaaacaagaccccagccacacacacccccagaaccaataaacacaagaacaacaaaacgcnnaagggaaaaaacgagaaaaagaagggcgagcgctcccccaagagccccccccccccg

SEQ ID NO: 261495 - DNA, 464 bp, Glycine max
  unsure (1)..(464): unsure at all n locations
agcttcacgatgtacaaaagagactatgttgacttatttgatgattgaaaatgtacctttgaatgaatgatcattttgaatttgaatctgacattagagttatctatctttggttatttgttatgctaacataaaaattattagttaattgttgctttttcgagagagaaaataattggtgcaacgaanataaagtacgcatgtatgataaatcgttgtctgagttgacaatacattgggaaatgcaagcgtgttaacataaagcgtgacaggacactgtaagacttgactacacattgtgaaatgcaagcatgttaacataaagcatgacaagacactgtaagacttgactatacattgngaaatgcaagtgtgttaacataaagcgtgacaggacactgtaagactngactacacattgggaaatgcaagggtgttaacataaagcgtgttagcatgtcacg

SEQ ID NO: 261496 - DNA, 816 bp, Glycine max
  unsure (1)..(816): unsure at all n locations
ggtgtgcttttctacactgaaacacnnanaaaaaacacgatttgaaggacttagtttacggtctttttttagaaaaagcagggagagactctaaacaaaagtcgtcccacattaagctaaagattcttacaagaccgtttgcatcactacacagggtatcaatctagggcagtaggtaattcaattaacttgaaccatctcccaatcatcagatccatacggtattcgacctgccctaacgattgtactctcgcgtcgtatatgtacaatggatgactgcctcccatacttaatctgacaacataactactgcgcgctagacaatctttcaaactacaacggtatatggacctaagggatcaaattggaaccccaaccttgaaggactgctgtagaacgcatatgctttgggtgacatgctcggatacatgctgtccatcttcaaatccatgttgctacgaagttctcaacttctagtagatacgtcctctacctgtactactggacttgatgatgctccctcgaccgactgtaagaatttccagattatatgtttgctagatgaaacgacgctgctactgtcgccatcatgaataaccctaccacgtcgcgcatgatgatccgacttaacaacgaaaatggatcggtgcataggccctagctactatcatcgctcgaaggtgatctgtaaggattcgatcggcagcaaattacccttttgtaatgaattggatgtgttttggttgggggnggggcggggggccggggggggaaagagccaacgacaccatcgtcaccgattaggacctctattat

SEQ ID NO: 261497 - DNA, 458 bp, Glycine max
  unsure (1)..(458): unsure at all n locations
agcttagtgaagtggttgtgagggttatttccagcattctccttcacctcttctatgcacactttcaacataatctctgtaacaggccgaacttttaataaataaataagaaaataataaattaataaataagtaagcaaaaaaaataaataggtcataaattcccactatataaaccaaatattaacctagagcagctnttagaaaacacattntgttcctttcttctttttctaacgcacaagaaccctaacagaacaatcagaggtggagctctagagagcaccagagacgccacaattactaacggataacatttaagcgactacatcgagggaagggatgagttattcacgcttggngattagaataaacatgtgtagggatccttagaggatcaattnntgggttatttctgggtgtttatgaagtttaattatggtttcatgtttaatcgc

SEQ ID NO: 261498 - DNA, 793 bp, Glycine max
  unsure (1)..(793): unsure at all n locations
gtcaaccaacccacatataaaatgaaatntaaataatataaaaaaaaagagtgactgaccgaacctganacccanaanaaaaaccgcaagaacggaaagctttggggcccactagaggggaagcagaagcgacaaaccagtagaaacccccacagagcaaaaacacacgacgaacagccagaagaagccgacgaaagccgaaggcagcgaagacatagagaaaaaacgacgtcaaaccaaacaaacgagacacaaagaagcgaccaaatgaggcgcgaaaaaaagaaaaacagagacacacacaaaaaggaagctcatcaaacaaacacaaggcgaaaaaagcgcaaaaaggaagaaacaaggaacaagaaggcaaagggtcaccagaacaaggaccaaaaggcacaaaacaaagacacgcgcagacccccgaatgaaaacaggcgccagaaagccggccaaccgaccaccgaagcaagccaaaccgagaaccggggcaccccaaacaaaaagcgggaccgaccagaccaaccagaagaggaaaagggggccaagggcccccccagtcccccccccccaaagaaaggacatggaaaaaaggaggtataaatgtattgtatagagggaagaaggaggaaaagaacacaaaccgagcaacgaaaggaaggaagaaatgatngaanagaagagagggaggagaggaagaaagggggaaagaggagaaccaccccaccccccccccaccgtaccgatngaaggagaaagaagaacgacacggaaccccccgccccct

SEQ ID NO: 261499 - DNA, 382 bp, Glycine max
gaaactaaagatattcaagatggatgatcaagacagtctttagagtcttagtataggtatattaaataggaagggaattccaattgaagtagcaaaaggtttggccaagaaatttaagttaaaaagtctttttcaacaaatttactctctggtaatcgattaccagaggatgtaatcgattaccagtggccaaaaatgatttacaatagctattaaaatttgaattcaaaatttgccctatgtaatcgattacacatatatggtaatcgattaccagcagtttctgaaccgtttaattcaaattttaaagcttgtaatcgattacacatatactgtaatcgattaccagagcagattttctaatatattcttaacagtcaca

SEQ ID NO: 261500 - DNA, 444 bp, Glycine max
atgcttgttacagtaacacaataaccctatagataatttatgtctactagataaacgggtacttacaatttgataagatgataatgacattatcattaaagttcatatatattaatagcttatcagtccaatgacccatatgctaagcaagtcgtgtttgcattcctatatcaaggctaatgaggaaggttgatgtgtatattttaacgccacgtcagtttatggaccccagacagtacaaatttgaaaaataatcattgtaagtaaaccaaatgtcttataggatactgctttttagaagttcacattctgtttctctaatcaaattttaatatttatatttttaagaactttggctctacttatgaggttgaagaatactcttccaaaaatattttcttgcatgagctaagatagtcttgttttaacatgaagaattctcat

SEQ ID NO: 261501 - DNA, 431 bp, Glycine max
  unsure (1)..(431): unsure at all n locations
atatacanaagttaacttcagagaacttgtgctcattttttttcacttgattatttttccttctcatggttctggaaagggacgccttttatagactttattgaatgatgcattacatgatcaatgtcgaaccttgatatgatngttgtctcataattggaggaaaaacacatggcgcgctttggatggcgatgataggattaaaggtacaaactgcatgtgttcctcttccacaacaaaagcaacctttaaggaatattctgcanatactttntattctctttgattctgtcattntcttaaacttcaaatgttagcaattcaaaataagagaggcacaaccaaaatttgaaaagcgagatcgtgcacttncctttgtggctaacatagtcctttagtaccttgatggacatcactgataaggatataaa

SEQ ID NO: 261502 - DNA, 481 bp, Glycine max
  unsure (1)..(481): unsure at all n locations
agcttgncatttattntctctggtttctatgaagactatatataacattctaccaagcagagcttcttgattctgtgatagcactgntatttggtgtgctattgacaactatgatcattatttagaagagtgagcaggtgagcgcacagtgaaatgattccagaagacaatagtattagccaatgatgacagtcctcacaaatatcaaccaaaatgtatgataaaataaggccgatatttacatgtattttacttgaaacaactgcatattntanaacatcngaattgaatatgggtccgcatcacctgatgggccatcacaacctcatcatccncaactgagaactgcattattatgccaaatcatgtccaccatgagaacactntanaagcttgccatgttcaaaacacttctaagtaaacaaaattagcatagcacgcacaacatgcatactgcatacttcattcatgtgaagcaact

SEQ ID NO: 261503 - DNA, 401 bp, Glycine max
  unsure (1)..(401): unsure at all n locations
gttatatacactcattgataagttaaccacatcatgaggttatagaaatttttaattggtggttaaataaagtcgttaataatgtcatgatgtttttaacgtaccatatcatatgatatgacatttatgttcaaaatagaaagctccaaattagttattattttaaaaaaccaatgaagacttatgggttcctgtattatatatttgatcatattctagaaagaatatttgattctanttatagtcaccaataacctataataatgattnnttaattctattttttatattattcttaacacttncgtatgagaaaagaaaaatattgagaatgacggtgttattggtccatattcattaatgaggatagtaaagtaacatgtgaatattaataataacgt

SEQ ID NO: 261504 - DNA, 348 bp, Glycine max
  unsure (1)..(348): unsure at all n locations
ggcacgaaaatcattcactgatgaaaaagaatgacctaatccccacaaggactttcactggctggagaatatgcatcgattaccacaagcttcaagaagccatgaggaaagaccactttcttttgcctttcatggaccaaatgtaggagaggcttgtgggacaagcttattacaacttcttgtatggatactctggatataatcaaattacggtggaccccaaggatcaggagaagacgaccttcacatgaccttntggtgtctttgctttagaggtgcatgttggcatattttgtagatatggtggagaaaagtatcgaggtattcatggatgatttctcggtatat

SEQ ID NO: 261505 - DNA, 483 bp, Glycine max
  unsure (1)..(483): unsure at all n locations
gtacattgcacggngcgtcaacagtcaaaatgtcactatgacccaaggttgcggtggtgccgcgacaatgtaccctangttgcggtggtgccgtgaacaacactcaacgcgaagttaatggggccatgacaatgtacccttccttttgcggagctgacggtggtgtggcggagattgacctcaacaggagacgccgactaatagcacaataatttttagacactgaggatgatgagtgttcaattagcgcacaagggggacatatatatatgaaaccatgttaacgacagtgtatttctaaacccatctttgacagtcaagatcctctacaacaatgtttataaatacaccgtctttgataagggttggcataaccaacaaagatggtgctgccaaaaaacgtcattgtagacgtcacgtgccgtgcacatgcncngttaaaatggcatatatttacaaaaatgccactggttaccttactac

SEQ ID NO: 261506 - DNA, 426 bp, Glycine max
  unsure (1)..(426): unsure at all n locations
gtagatgctcctaaacctcattggtgcttaattcatttttattcatgtatttcctcacatatcctgtgttgaatgttggtaacaaagattatgtagaatttccactgatttaacttgctatagaagctagatttgattntctatgattcaaattttttggttttgttcttgaaccatgaatngtgttgagtttaggttcctttgagtttttttttcttgttatttttttgtgactgacacctanaccataaaattcttacaaaatcattaaagtagaagtaaatttcaaaaatctagagtgacatgttcacctattgtagttttgtcatagaagtcatgtctagatgaaacttgtcacanaagaattcttatgttgtgttgaattntattntttcctttntctttatctaactcattttgtcatga

SEQ ID NO: 261507 - DNA, 462 bp, Glycine max
  unsure (1)..(462): unsure at all n locations
tatgctgcanacatctacaatagacctcctcaacctcagcagcanaatctttcacaacagaataactatgacctctccagcaacaggtacaatcccggatggaggaatcatcccaaccttatttggtcgaatccttcacaacaacagcaacaacaacaaccttactttcaaaatgctgttggcccaagcagaccatacgttcctncaccaatctagcaacaacagcaacaacagaaacaacaaacagttaaggcccctccgcaaccttcgcttgaagaacntgtgaggcanatgactatgcanaacatgcagtttcagcaagatatcaaagcctccattcagagcttaactaatcagatgggacagttggctacacagttaaatcaacaacagtcccagaattctgatagaataccttctcaatctgtccagaatcacanaaatgtgagtgccattacattg

SEQ ID NO: 261508 - DNA, 476 bp, Glycine max
  unsure (1)..(476): unsure at all n locations
agcttgcggcagaaaatcttntagatgagttgtcatcttatcatggagctatcatacgacaagtaacatcaatctttattntatattttcttctntgttagttctaattatcaatcaattaccttcaaactgtttgtgttacatatatagatgaaacaaatggtggagatttatatcagacttgctgagatggaaacaaagagagaggtgaaatgcttttatatatttcatatccattctttcttttttccgtcaatttatttgaagctatttctatcaattggcttgccaagtaatctggaaaactntattnttcacagccttctgattggattatttatgcaggataccaataaaaaagtgacactaccaagggacttacgtaatctcccggtgctagaacttgtgagtagtttgctaaatttctatgtgataatgaagctttcaggtngatgcaatgactggtgggtttttgg

SEQ ID NO: 261509 - DNA, 1087 bp, Glycine max
  unsure (1)..(1087): unsure at all n locations
gcgtacaatcacgtnagaactgagantgnggagagataattgtangaagttngatataaaaaaaatnatannnnnanannnnnntcgacgctggacctcgatagaacnnccacnnnnnannannannnnnnnnnnncgnnananananannaaanncanacacgacgagagagganaagtctacgtactaccctncnccaccatcaatcaaacgagagangnagacngcacaggcaccaagaggcacaccacagacatcgccgcgaaaagtcgaacacaccaccgaggcgcgaagggaacccgacccacaacaacagggaagcgaaacgagcaaagaccccagacccgccagagaaaaaaaagcggaaaagcgggagaaaaaagccaacgcgaggagggagacaaaacaagcaaacgagaaatcaagaccagaacacagtcaagggaagaagacaccgaaaacagaggagccgaataccgaagaacagagccgaaacaaaaaaaaggacatgaaagtgaaggaggaggaccgacctccgggaaacaggaaacccacctatggaacaacataagacaaaaaaacagagcccggcatcaaactaacagagatagaaaatgcaagacggaccccaccacgcaaacaagcgacggagacacacaacagagcgagtccaacgatagccgcaaagaagccaactgcacacaaagagcacggaagagcgcgaaggcaccgcaacgaccgaaaaaccgaccgatggacgcgcgaacggacgcaaccacacaaccagcagaaaggccgagcacgagaagccagcagccagacgaaagaaacaaggacacgaagacaccaacagaacccccgcagacagcaacgaacggagagggaccctgcaacgaatgnagggaatgaagaaagagaatggagggngngggngtggggggggggggccccccccccccccccccccaccccagaagaaagtgatttaaagtgattggaaagaagaggaaagaaaggagagagggngganagggaaaaaaagaagaggaaaggagaaagagaggaaagcacaacacaccaccccct

SEQ ID NO: 261510 - DNA, 388 bp, Glycine max
  unsure (1)..(388): unsure at all n locations
agcttaagataaagaaaaagaatatacacttaaattgtcattatactnttattacattaattagtgttacagttgaaataagtcttttaatataaaattattcaaaaaataataaaaaaataaataaatntaaaacatttatgattatcaatntcatgaaatataanttttaaataataaattaaatattataagtagtataatggttaaaataaatagtgttatattaaaaatataaatatagataaaaaataaaataaacctatcattaatggttatcaattaaaaaattcattatcaatatcatgatgtgtaatgctaaaattattagtgtaatagttaagttaaaaaatctaatacaaatgtaataaataatataaccctatat

SEQ ID NO: 261511 - DNA, 279 bp, Glycine max
atgtccaacgtaatgccctgtgttgtttctcacatgtaaggcttattgtgatttttaggctataagatattacaacacattctgtttaatcattttcataatttattgctttactttttattatccagctcagtctatcaaagttgttgactatgactcttgtagtgtatgtgttgttaggtgaactggattattctctctccatatttgagtctattatgcaccctttggcccatctatctttggttttcataacttaaaaactgtataatatacaca

SEQ ID NO: 261512 - DNA, 392 bp, Glycine max
  unsure (1)..(392): unsure at all n locations
agctatgaacaatatacttgtccttcattaactgtctttggtggcggcatctcacaagacttcacactctgacatgattgatcatgtgtatggaatgtgcgacattcttcaaaccttattgatacattctaagaggtggntgtcatgtgaccatatngacgtccttctctatcataagtcatcgtccatttttcctttgaaatgcgatcaatccatgttgctatggctggactcagttgacgaaatttgtctaaattttgataaaaaaaatgtgcttgcaaggagtgtangttgcataaaattagttatcaataacaattntaagtatatataaaacttaaataaacatgaccatcaaatatgaaatcttacccaatttcttcaacatttct

SEQ ID NO: 261513 - DNA, 117 bp, Glycine max
ccctttccttgtgttgaagctcactacaagccttatatgacacaccatgatatcaccactatccttaaggaatcttggagctttggaattgttttgggaataagcgtgggggggggg

SEQ ID NO: 261514 - DNA, 443 bp, Glycine max
  unsure (1)..(443): unsure at all n locations
agcttgacaatcaaggaccctgggctcccgtccgactttataaataactaggttccaccttcacttttcattcattctcaactcactcacatacttacttgagcatcagagtccttttttgcagctcccttcttttcgttcccctagtggaggacacctataaattcgacctgggaaatcgaggaacccatctttgctacatcaaccttgacgtcagtttgctctagattntggtaagtacaattggtgcccaccgaggggccatgataaaacttcccctaggaccacccacattcatggttatcacactntctggccttcggcgagagacacccncaaaaaattcatatcctcctccgacaatgaccaagacggaaaatgatgccctccattaacttcaaacccgcatcgcanagatggaacaccgccatgaataggaactt

SEQ ID NO: 261515 - DNA, 1024 bp, Glycine max
  unsure (1)..(1024): unsure at all n locations
ttaggaaccaaatataaataaattatcgttnttttaaataatnnaanaaaaagctagccctganaccccannatananannccggaaaacaagaaaaagaggacaagggaagcacattttgtcagggaaattggggtcgagggcaaacctgaatcatggagccgcaacaaaacagacgaacatataaaaaatgcaaagacctgcggaagagagcgacacaaaaacccaatcgcaaatcaccttcacccttgaaatcaacaataacgggctcagaacctagaactgaaagcccggctaagcacgattaggtgaaaacgaataacacagtaggacatgacgaccaacagaacaaaccgaggcggcaagaagagaccaaaccgcaaatggcagaaaagcacaaaacggcaggaatgtcaaaggcaaaaagccgtcatgctgcagggaaagagacaatgataagacttccacaaaccacagaaaagaacttgacagaccaccgaactcaaccgacacggcacagacgaccaacaagaagcgactaccctagaccccaaaaacgcccagcaccaaatacaccagcgccacaacatcactcacaaacagaccgaaaagacacgcgaccgcgtacaaaactactcaacaccaaacagaacccgcgacacccatagatcaaaactttacaccacacagactcactcaccgcacaccaaccgacccacacgaaagcgcatcgaaaacggtccccaatatcaatagcaaccagggtcaacctacactagcgaccaacgcaagcagaatcatagggaagggagatggaaaataaagaaatangaaaaataatatgaattgaatatgaaatgtagaacaaaaaatatataggaagtgaattaggttggagtatatgattgatataataaatttatctctccacgaaaacccaccccaccgcaccccggcctgctgatcacatcacgatattgactaaatattatattaacaaataaccacccgccccccccccccg

SEQ ID NO: 261516 - DNA, 445 bp, Glycine max
  unsure (1)..(445): unsure at all n locations
agcttgttcgcacatcgttcgtgtgtatgatatccactccacaaggtttgaagtagaggagaccttcaatcctataacgcaacgtggcagacaaaagtgggtagttaacttgaatggtcattattgtcaatgcggaaagtattctgtgcttcactatccatgttcacacattattgcaacttgtggttacgtgagcatgaactactaccaatatatagatgttgtttacacaaataagcacatcttaaaagcttactccgcacaatggtgcanaaggtcagccaaaatcaacaaggataaggaatgagatggattggctcgaaccatacgagcaccgacaaaaatgtagtagatgtggagcagaagggcacaacaagcgtcgatgtccaatgcaatatgaccgtgggagttattcatttaattgatttatgtatgctacacgagt

SEQ ID NO: 261517 - DNA, 1194 bp, Glycine max
  unsure (1)..(1194): unsure at all n locations
ggatctacacacggcacacagagatactgtgttcggntnatncgaaaaaaaaaannnaaaaaagaggcgatcgctgacgacccccccngannccnnnnncnnnnnnannnnnnnanggaacaaagaggcgaggaaaaggcctccgcgtcaaagaccatnaanaanagngaaggggcggaaggaaagagagccgaacaccaccccccacacaccgcacgagaatgccatgcacacaataacacgcgggtnccgaaggacgacaccgcataaactacgacacgcgcaacgncacgacaacaaaccagcaccaaggcagccgctacgcaacacaccacaccgagacgccgacacgcaaggaaaaacccaaccacaaaagggcccaaatcaccacgaacaggtcaccacccaacacaacacgcaccacgtagcgagcgcagcaaacaacacaaagacaaaacggagccacccgcgcggagggacaaccccacaccgaacacacaaaggatagagtcgatgcgccacaaccataatgccagcatacaggaccagaacaacccccacggaagaaacccgggcccacacacancaatgaacgccgaccaacagaacaaagaggcaaaggtccacaaagcacaacaaaccgaccaggcatggaacaacggaaaaaaacccacacacaaccgcgaaggatgagaaaaaggaagatacaaaaaaaaggggaaccacacaacccccgcaacaaggccatgccacaaacagccccccaccgaagaaaaaaggaacaaaataaatgggagaaaaaaaaagaagaacgaaggagaaattagatggaggaaaggaaaagagagagaacccccccccccccctcgcaccgcatgaggcgnnnntgnnttttcgcccccnggnganngnaagtgagagggagccgccccccccccccccccccagacagacttntaggtggacaaatnactaaaaacagacgaacatgggaaagaagaagaaggatagaacgcgcgcccgatacaaccacacaaagacgcaccccacgccaccaaggcacagcagaatgagcaacaccaacagggacagcgaagagaggagaattttntataacacaccgccaatgaagagacgcacacgcgaccngcgaaacggcagaaagcgcaacggcgaccccgcaaacccacacct

SEQ ID NO: 261518 - DNA, 997 bp, Glycine max
  unsure (1)..(997): unsure at all n locations
agcgtactgagccattgactgancanctgtanaaccnctatnatnatntaaanancaaataatggaagaaggaaccttgatctttttccnaccattattttcaggagggggaccaaccccacgggatgcccccacatatcgcgttcctgagatatttagccatagcaattagaccacatcttgatgagcatattacatcacttggtgtccttatatagccagctcagcatcccatcggttgccatcaatcacgtattacgcttcgtatgggaacggaatttacctctcatagttgacgtttatgcaccccggtccccgcatcttgcggtcatcgctcaacacgtaaattgcacccaagttcaccggatcccactgttcacacacaaaactcctttcatccgaaccttacccttggttttcacccaacggcatccgcctactatggctgacacgatatagtcacgtctcgctctccacagtttctgcactgacgagtcattctacttaggcaacgcatatattcgaatctcttgcgtcttgatagttaccaccggattacgtttgccgtaccaatccaatagtgtcctcttgtcggaactacgtctcatccaaccgctataacttgctgactccatgtctacctgctgactatctttgttatctcatgtcaagcacagcacgcaaatgcttgcgaccgccactgatgcctcgtcatcgactctatcctttttctcatcattcagtcagtgacctttaattatagtacagtcatgccatgctgacttgtatttttccataattacctgtatacagagttgctactatcgtcacaggtatttatcgtattctcatcggattttatttttattggttttttataattttgtaacggggggccgggtgttgaggaacaaacaagcaccctatacccttttccacatttattgatctgcctccgcatcggcagcgcctaaccatctgcaccgtaccactccct

SEQ ID NO: 261519 - DNA, 427 bp, Glycine max
  unsure (1)..(427): unsure at all n locations
agcttttcctttggttgctctattanggtttctaagcgttagagcgaaagagaagggattgaagcctcatttactgtcttcgtgccaggggacgcttctctctctgtggacattatttanaaaatccccaaaagtggagatgtgaaacatgaatttgaacctggtgttaaaattcatgatgattcaacgggtaacgagtccgggatcgtaattntactgaaacaggtttgggatatgcgagaaaaagaaagctacgatgtgaaagacatttctctcaccttagacattgtttcacanattccaacggtcaaaatgttngaaaatgagttcctaacttggttctcanatttcatgtcgatccaacgtttaatgtatttggaatcgtcattntactgagaacaaattgggtgtatgctgaanaaaaaag

SEQ ID NO: 261520 - DNA, 496 bp, Glycine max
  unsure (1)..(496): unsure at all n locations
ngagctcactgttgctaccccataatgcttcatggatattgtcactgtcatgctcttccttgcgagccctcttggtttcttgttcaagggcttttgcggtagttgcattaccttctcgtaactcaacacactctttccggacgtttgtagcgaccaacttgaattnttctttggcaagtctcgcttttcctagttcggttttcaaagctcagacttcttcatcctcttctggagcttcgaagctnntcttcgtgataatctttaacttggcgagccaatctaaacctcgtgtacgaactttcagccattcatgataaccaccaatgatgccattacaaatgcccctaagttctttatctntccttaacgggctttcccacgccttatggactctttgtataaccttgaaatnttgtgcgccaaaatctctcacaaggaaaggagacaggctttcttccgtcggtgctcccctcatggggtaccctaactgtcttat

SEQ ID NO: 261521 - DNA, 543 bp, Glycine max
  unsure (1)..(543): unsure at all n locations
gcacacgcgcacaaggtgatgacanatgacaggtaagatatactgtgtaaaatcacgccaaggcgttttgcctcgtcgccagacnccagatcgcctgcagctgcacacttcatgttgaaggatgcagcggaggaactttgtattttgttgcacgacaagaaacagtcaacctggtgcggactagaaactcgcctagaccggacatgaagaggtaataggaccgcaaggaacacatgtcgtaccctgacgcaacaagcgcatttgaagatctggacaacacacaggagggcgtgcatacatacgacctgccaagaatatcaacagctattcacccaaaaatgaacttgatgaaatgctcaagagcataaacgactgtctaaaccggctaacgaaacaatatcaggatataatgctcccaaacataagaccgagactatggccaaatcaaatgccccacgtgaagaggatgatataactatcatcctcacacccaggtcaaagaagctaaagggcgggcaaacatgggcacggcaagccaccccg

SEQ ID NO: 261522 - DNA, 477 bp, Glycine max
  unsure (1)..(477): unsure at all n locations
atgaattaaaaaaatctaanaaacacattatatatccagcaaagtatatttctttgttggtgaaatgatccggaagcaaaacctcaaatctgattggtcagtatctactttaattgttgatgtaagcaagttcacagtgtgatgagcaacaaatttctcatcatgtactccaccatgatgatgagaagacagatcgacttaaaagtccagagctcagagctattcctctggccagaatgttgactactagacccctacacatgataaataaccacaaaaaatgtntttttatataaatgtttgccaattaatcaccctcaatgtatcacttgataaatggtttttataaatggcatgcacttncggataccaataaatgagtgtgtaaagacatagctgattccaaacctggataatatagggctccatttggtgcaacaattcatacccctactggtggaaataattcaagtcaca

SEQ ID NO: 261523 - DNA, 445 bp, Glycine max
acatgatttcacagtgatccttgtaagaccaaataaaggaaacatcaactagacttcctccaaatggacatatcgtatcaataactagccctacttgtggctttaactggtgctatagttgtcacacgttatcacaacacacacattccgacgcagtcacactacggcttctctcatatgcattttcccctagatgcaaggggacttcataagggagtcatgtccagtaacatacaatatatatttcgtgtgagccatgatacgaatgaaatatagtgaaaaaaataagtcaataatccttaataataaacaattatacttaactaagaaaataaaattaaaaacattacatttgtctaaaaaaataatacacatgaacagaattatgaattgaaaataataaattaactaagaagataatactcacatcttaaaaagattggat

SEQ ID NO: 261524 - DNA, 502 bp, Glycine max
  unsure (1)..(502): unsure at all n locations
taagctctgcgtgncctctgggctcaaaatcccaaaacaaatccctcttattactagctattttgaattctttagttcctgaatgtacaactttcaaattggtggtcgttcccctctttggtttatgcaaaaaatgaaatcaatatcaaacaaaacatgcatacaattgtcatcgttattgctacttgaaccataaggaataacatctaaagaagtactttaaaacgtttatctattttttttggtattttttgaattacaatcttacttcaatatctaatattttaatgtacttaagtggaggatgttgacgaagagaaggagaatgaagaaaataatttaaagaagattaaggaagtgtcacatatttttctccttagcaaggaagtgtcacatgaatgctcgttggtgaacaagcataatggcatttggatgacagagcctgatgagatcacaaaggaggagtattatgctttctacaagagtctcaccaatgactgga

SEQ ID NO: 261525 - DNA, 85 bp, Glycine max
aagaagagaagggaggggagaaggaagaaaggaaggaagagaaacaggaaaaaaacggacgagaggggaaaaagaggaaaggaga

SEQ ID NO: 261526 - DNA, 354 bp, Glycine max
  unsure (1)..(354): unsure at all n locations
agaaaagtgacatctcaattgtggcctgcacaacaagattgcctataattctgttcatgtctcatttcaaaacctgaagctatggtttacctttcttccatgtattctttttatattaattcaaccttttctaacaggagaatttgatagttggtatgggaaaaacatgtttacggattgataccccaaaagttggaaatggtgaagcctttgtggtagatgatcctctgagatgtcctgtggataagctcattgatggngttaagctggtaggcacacataacggngaggtgactgatttgtcgatgtgccaatggatgaccaatcaatttgtatctacatcacangatgaca

SEQ ID NO: 261527 - DNA, 438 bp, Glycine max
  unsure (1)..(438): unsure at all n locations
atactacgtcatcaatattatatttaaacaatgacattngtctaaggaaaaactaagatgatgatacattaggacaattatttctgctatgaccatgttgccggcaaagttcacatttttttctacttgctcgttcattttcgtcttcgtccatctcagtangaatgcgagttgaaacgggacgaccctntgcagtcctctttctccttggatcaggaccccactgatctccttcatattcttgccacattgattcgtgtggcaataaaccacaggagttgtcgtaaatgtgcaaaatgtgttgtanagtgaatatcattggcacataggtcatgggatcaacattgacagatttacaggcagccatgacgtgagaacacggtatatgtttagcctgaaattcaccacaatcacactcttgggagtgtacattactct

SEQ ID NO: 261528 - DNA, 286 bp, Glycine max
  unsure (1)..(286): unsure at all n locations
actctctatgggatcagagaggctgctgagttcgccaaagagtggggtccgttctgtaacaattatggcgtcaagtcaaggtgtcccaaggtcttcttctctccctttggcgaggaggatcaacacactctctcccacgatggattcagtacacaacgagacctcatcaagggacgatattatatttttctctgctnattattaagcactaattaatcatcatcacgttaatgagttcaggtcataacactcaattgaatatttaatatgacataatctaataata

SEQ ID NO: 261529 - DNA, 407 bp, Glycine max
  unsure (1)..(407): unsure at all n locations
taggttgagtatggtcaaaatgattataagtatttggcttatatctcaaaataatttcttccagcagtgtcttaattatcagagggtatgacttactatgagatccgntgtttaaatcacgagtggaactaataaaagaaaaattaaattaagtatgaatgccacactctanttcccctctgctaaaatgtaaattcatagaaagtagataagcatcacatattatcacaagagtgagtgacagatctataaaataaaagtttcgtgtctcttacaatcnttttcttacctttctcactcctttgagaaatttcaactatattgattgtgagaagaagccttcccatcgagatatgtaagtagttgaatacttaaataaaatctgaccaattcattactagattgac

SEQ ID NO: 261530 - DNA, 458 bp, Glycine max
  unsure (1)..(458): unsure at all n locations
agctntcacaccataaaccanaatagataactcaagtctttcatagataagtaccataatgtttacatcgttcaagctttcaaatttaaagtaccaaagtacacaacataaactagtacatactgaatataaattagtcatatccaactacacatcctaataacaaaataaaacaagaaaagggtcttcacttttcttcatttttatactggatctttatcagcagccttccttccagtgaacctcggtgttggcatgtaaaataagggtgttgttggtgggccatccacaacaggtgcgtctactgttgaagtgtgtgaaatgttcttttggttgggtcttgttatgtttagcttataccttgctactggtggaacatcaacaatagatgcatggacctacatgcaaatgccaaacatgaataacacttgtaatatataaaaacaaattgggtagtc

SEQ ID NO: 261531 - DNA, 495 bp, Glycine max
agtcgcataggcgcgactatgagtatcgcgatatcccttgttcttatatagagagttctgaattccacacccactcggagagtttggactatttgcattcctatgctgagcactttgatgtgctcaagaacatcaggttcaacttcaaggtggtggaaatcacgtatgttggggaccaggaagatctttcttctagttttggaggcctacctagtgaccatagaaccccactccctggtcatactgtatgggaaatcggtgtgcaaaaatacaatcaatcagacagcattcaggtatttaatttgttcactctcaactcaattggcctccccatcaaagaaaatgatagtgaaaagattcgaatccaccacatctcttccaattcttcatttaatctttaaattctgtgatttcaaccatcagactaatggtataactgatgtgtgatcatataatttattaatttgcaacaaacaaaataataacgtgtaacat

SEQ ID NO: 261532 - DNA, 494 bp, Glycine max
  unsure (1)..(494): unsure at all n locations
ccggatccttaagcacctgcggctgcagcttgnataagatttgtgagggagtttgacatttttcttgaagaagcctctgcatgcacgagagtctggcctgggcttgaagcttttgcttgttntggaagttctagagagagaaaggtccaagttctagagagntctgagagattctgctgtgtgaagatctctatagacgagagctcgaagcggaagccattttgagaacttgagatgagtttgtgagtgattgtgagatcctagaggtgaaggagacatcctcaccacttgtatttttgcaatctttcatgttgntcttctctatgtntgaaaggaggttttcggactatggaaagctaaatcctctgttggattntccctgtaggtacctgatgtaaatatatttctatctatgtaatgatgttctgggtgttctctgtgctatattgcttttcattcaagtatgcctttaccttcatcacgtagatgcatgc

SEQ ID NO: 261533 - DNA, 506 bp, Glycine max
  unsure (1)..(506): unsure at all n locations
aaagttattcaaaataagaaaaatctcacaattatttccataatgagtgatcatggnggtgaatttgaaaataaagaatttgaactattttgtgataagcatggcattgaacataacttttctgcacctagaactcctcaacaaaatggagttgttgaaaggaaaaataggtctttggaagatattgctagaaccttattaaatgacactcctcttccaaaatatttttgggctgaagccgttaatactgcatgctatatcatgaatagggctttaataagacccattttaaagaaaactccatatgaattgtttaatggtagaaaacccaacatatcacaccttcatttatttggttgcaaatgctntgtactatacaatggaaaagataacttaggaaattnttatgcaaaatctgatgaaggcatctatcttggatattcattgcannagtaagcatatagagtatataacanaagaactatgatcatagaagagtctattca

SEQ ID NO: 261534 - DNA, 416 bp, Glycine max
  unsure (1)..(416): unsure at all n locations
agcttaagaattctatttcgatcgtcccggtatatttttggtctcaatcagatatccgagntaaaaagtattgtcgtntgaattaactctgagggtcataattcaatttcgagcgtctcaatagattacgggaccgcatcatacattccagcaaaatggtattggcgcttgaattaactcacaacttcacaattcaatttcgatcgtttcgatatattaccggactcaatcaaacatctgagtaaaaaagctattgtcgtttgaatttgctgagagcttcaacattcaatttcgagcgtctcgatgtattacgggactcaatcagacatccgaggaaaaagttattgtcgtttgaattggctctgaggttcaaaattcaatttcgagcgtctcgatatattacgggactcaatcac

SEQ ID NO: 261535 - DNA, 279 bp, Glycine max
acgacaataaatacttactcggatgtctgtatttttcccgtaatacatcgagacgctcgaaactgaatgttgaagctctcagcaaattcaaacgacaataactctttactctgatgtctgattgagtcccgtaatatatcgagacgctcgaaaatgaatgctgaagctctcagcaaattcaaacgacaataactttttactcggatgtctgattaaagtccgtaatacatcgagacgctcgaaacagaatggtgaagctctcaaccaattcaaacgaca

SEQ ID NO: 261536 - DNA, 482 bp, Glycine max
  unsure (1)..(482): unsure at all n locations
agcttgtaaggttaaagtctcacgattgtcacgtgcttatgtttaattgttagncgnggctatacgagacatcttgcccaacaaagacaggttagcgataactcgcctgtgctttttcttccatgctatatgtagcaaaaacattgatcctgtcaagtttgatgagttggaaaatgaggccacaattatactgtgctagttggagatgtattttccccctgctttctttgacatcatgattcacttgattgtgcatctggtcagagaaatcaaatgttgtggtcctgtttatctatggtggatgtacccggttgagcgatacatgaagatcttaaaagggtatacaaagagtctatattgtccagaagcatcgcatctattgttgagaggtacattgcagaagaagccattgaatnttgttcagaatacttagagaaggctaaacctattggccttcctgagtctcagcatgatgacagagt

SEQ ID NO: 261537 - DNA, 1019 bp, Glycine max
  unsure (1)..(1019): unsure at all n locations
tcgtccaccgtatattatctcacttatcggattgngattagatataaannnnaaaaaggttgaccgctgactccaccataaaaccanccgtacttactactctccatcccgagctgactctttctatctgacgctgtctggctggaacatccaagccataagccattctcgcatgaccacctgcactactgctcaaaagtcccaagaatcactttgaaactctgctcctcacgagagagatgaccccaacatggaccttcagaagatcgtgctcttatagaactctgacagcactgctttctgctcacacctcacacaccatcttattgtggccatacaacccaggcatatcagaccaccctccttgcaatctcaccagggacgtgcagaaacgacccctgtcactcttctaacctcgaaacaacaattgcgccagacacacgcttgtttgaacccccttctagacccaattgaccaaccacatntgacccagaaaacaggaagctacaaaagttgcttgtctactaccagcaaacttgatcacccctcaggagacacccacgccacttttgtgcaaccagaacggacgtacgaacggtgggattcctaagaagatagactaaagaangggctcgcccccccccggagcgggtgtcaggtacggcaaaactcaaatgggatccacccttccaacaaagggaggcgcccggaactggaaacaccttgtaccacatcccacacacacatgcgcccagctanggcacagaatgagcaanggaggnnnatagcaccaataatcccacgatgagcaaccaatgtatattagatcgcacatcgattagtgagatgggaacccctttcccctccccccccccccctgaatatgatttagattataaatagaggaagtcggaanaanaantaaagaagaagcacccccccagcaccnntccntntgtgtnntnntaatttttttagatcattatatttagaaccgtcataactcccccccaccccct

SEQ ID NO: 261538 - DNA, 299 bp, Glycine max
  unsure (1)..(299): unsure at all n locations
ctcattgaagctcaaagatccaccctccatataagccccacaagcaagcttccatcacattcctacacgggcaaatttcccatcagcccaacaatgtcattactcagccaataacagtccctctcacccaatcatccataaaagccatccncaaattagccacaaggcatgcctgcttaccaaatgcacaatgcccaaacaccacctatagcgcaaaccaaaaaggaattntgtagcanaaaacttgtaggattcaccccacattccggtgtcatatgctaacttgctcccatatctac

SEQ ID NO: 261539 - DNA, 1159 bp, Glycine max
  unsure (1)..(1159): unsure at all n locations
acgtgtgcatcgataacctgatnaacttgnagaaccancnnaantagagaaaaagggggcagtcctaacaggagggaacttttcttatananccctgtttcttatatggacaccaacagattaacggggtataatgttatgaatgggctcgccacaccttacacatgtgaactcatgcgcagtaccatttatgttatgtgctgagacaatgctctcatttacagagcttcgtataggtatcaatggccgtgctcttagcacccatttactgagtgcaacagggagtgtatatatgtactgggtacaaaatttggggacaatggaactggtcaatacaactgctggcatgtctgaaataacaaatgatgcggcgatatgagcaagactcagcttccgtcttgtgagtgaagaagcatggctgtcacatggaccgttatcaaagtgaaataacacactgaagttcgatgtagaaaaccactagacacacccgtatgtgctactcacaagtgatgcccattctctataatgatcttaacctaatcacccacatgtggacctcatatataggcccagtattcccacccacaggagcaatgttaccaaatgaaccctttcaatctttcatcggacagacatacggccggtttcaaaagtaattccggagaaagaacaaaaaaaggacccttcttttttcccccccagacaaaatngttatatatccacctcgcaataccctctatgaccgtaaccatagcactgtccgacacgaaccgcgcgcacactgcctactccgaacccaccaccatctcgcactgcgtcacttaatatatcatctgtcaatatcatccttcctggcaatccgtactctattacngatcggatgtgataaccacttgcttcacagtttctgatcctacacgcgctcagcccctctgacactgcattctcatacacttctcatcatcacccggtctaggactaagtgatagcgtacccgataatagtaatggtcatgtacttaatgnttatttaatatagtataacgattaactgcaacgcccacacctcccccccctatagttctatacataaccctctctctnttgacgaccgtatgccttacattctatggtacatcctaagaaaagacaatagaaag

SEQ ID NO: 261540 - DNA, 416 bp, Glycine max
  unsure (1)..(416): unsure at all n locations
agctngtaagggtntaagtgggaaatgatattgagacttcacttgggtaccaaccttgtgctacaacaattacagcaagacccactatccacaatgagagaacaattttttgttaacaccctgcatcttgtatgaaggatgttctctcttttggtttaagtcaggtcataaaatatactcctaaggagccttctcaccattagaagttcaccttcttcataggggtaaaactcctcaatatgcttatcacccgtggcttcaccctcacttccacttgaagcgggaaaagaagtagcttcctcttggctactatatatgtcttaacccctcatgatcatggttttctttgcagggtattgagaagcaatgcggcccttcccaatacatttgaagcacttgatgttactagttctatc

SEQ ID NO: 261541 - DNA, 474 bp, Glycine max
  unsure (1)..(474): unsure at all n locations
tcaagaattatggcctcatcaaaatacttgtttcctgagggaaattctataaatagacctgccatctttaatggagtgggttaccactactggtaaacccgcatgcaaatctttatagaggcaatagatctaaatatttgggaagccatagaacaaggaccttatgttccctctataatagccggaagtgcaacaatagaaaaacctagagcaaattggactgaggaagaaagaagattagtacaatataatttaaaggccaaaaatattattacatctgccttacgcatagatgaatactctatggtttcaaattgtaaaagtgctaaggatatgtgggatacactacaagtaacacatgaaggcacaacagatgttaacagatctangataaacactttaacgcgtgagtatgaaccttntangatgaatgtaaatgaaagtatacaagacatgcaaaagagggtcacacac

SEQ ID NO: 261542 - DNA, 474 bp, Glycine max
  unsure (1)..(474): unsure at all n locations
agcttcaacattcaatttcgagcgtctagatatatttcttgactcaatcaaacatccgagtaanatgttactgtcgtttaaaattgcttggctcttcagcattataattcgagcgtctcgatatattacgggactatatcagacatccgagtaaaaagttggtgtcgtttgaatttgcttagagattcaacattcatcttcgagtgtctcgttatattacggggctcaattagacatccgagtaaaaagttattgtcgttggaattggctttgagcttcaatattcaattacgagggtctcgatatattacgggactcaatcagacatccgagtaaaaagttattgtcgtttgaattntctcatagcttcatcattcaattntgagcgtctctatatattacaggactcaataagatatccgactagaaagttattgtcgtttaaattgctaagagcttcaacattcaactttg

SEQ ID NO: 261543 - DNA, 349 bp, Glycine max
  unsure (1)..(349): unsure at all n locations
acaacaataactttttactcagatgtctgattgcgttccgtaatatatcgagacgctcgaaattgaatgttgaagctctgagccaattcacacgacaataactttntactcggatgattgattgagtcccgtaatataacaagacgctcacaaatgaatgttgaagctatgagccaattcaaatgacaataactctttactcggatgtcctgatgagtcccgaaatatatcgagacgctcgaaattgaatgttgaacctctgagccaattcaaacgacaataacttattactcggatgtctgattgagtcccgtaatatatcgagacgctcgaaattgaatgttgaagc

SEQ ID NO: 261544 - DNA, 565 bp, Glycine max
  unsure (1)..(565): unsure at all n locations
agctttgcagaagaaaatgagaaatttaacaaacattgtgttgttaggtttttcatttttaattgtaatgttagttttagggggaatgtattttaagtaaaatgtgtaatagcatcttttgatattgtaatttttgttttgttgaagaatttgtagtaggaagtaggaagtaatttgttgctactatcaattacccatttcaattaaatataatatgttggtgaaatttgttgctgaaatttgcaatttattaaatataatttgttgctgttgttatatcctaatttcgtccgaggaccatttgtttggtgggatgcaaccttcgcttgatcgctttgaggaacttaacacccatcgttaggcaatccgtgaagttctgcgacatgtctggagtcgaaaggaagcattgttgcgtaacccgtaaagtttcataacattccanaagtcaaagaggggatggttgcgtaatcccgtaagtttcacaacgttacggaaataaaacaagtatcgttacgaaaaaagaatcagcaaaatacgcaaaaggggatgtatttaataaataggg

SEQ ID NO: 261545 - DNA, 296 bp, Glycine max
ttagcatggcctctgtgatagaagccatttgatcttttaaggccgataggttggccttcatctggtcttgcactccctcttcgttatccatcttacttctggatcgagtgttataggggtgcctttgcgcttttttagttatggtgagttccttaaagaaacaaacagtggtgagtatgccaccaaaacatgaatatgctaatgaatgatcagagcactaagatccacctcaaggccattttaaacaacgtcatgagtttcaaaacttctctttttataaaaaggaacaaaagctt

SEQ ID NO: 261546 - DNA, 492 bp, Glycine max
  unsure (1)..(492): unsure at all n locations
agcttcttcttccatggcttattccctaanggatggtgcctctcctctcctcttctcctttgccttctgctgcatctccatgggggaaactcaccattgaagctcaaagatccaacctccatagaagctccacaagcaagcttccatcattgagtttagtccaacaagaagaatctgcgaacgatgcttgatcaagattaggctaaactatcatgaggcatcggggtttagtatctcaggagacaccataggaacacatgagcattgttagatagagaatatctttttagcatcaggcacctattaagaaggccaacgtgttttctacacatcatttctctcgcgtgattttcctttttgcacagatagtttacacacttgttcatattcatgcttatctttacacaccagacacctatttgctgaaatagcttaccaaataacacaagtttctcgagagttcgatactcggttcttaccgttttatactac

SEQ ID NO: 261547 - DNA, 312 bp, Glycine max
tataatactcaagcttgcttctacattcacaaacatgcagcttttcaaagataggaacatatgtactagagtcacaactgaaataagctagtaagaatgacaaatatcaaggaaggatcatcaaccagaatctcacagtcattgtttcactcaagctcaagtgtttaggctcattgcatcataaacaactaaaacaagtcctaatctttgcatttcatctcataccatacagaaaatgaatccgaaggactttctaggcttgtaatgaggttatgctgccaacaaatcgtggtttttctaggattcaaaagc

SEQ ID NO: 261548 - DNA, 591 bp, Glycine max
  unsure (1)..(591): unsure at all n locations
agcttgaagtgaggaagtgtggaagggtgagacttcctacttttattcgttgaccacagagtagtacctagaatacagaagaagcaacaacaatcaatttaacaatattctttaaacatgcaagacacaattgattgcaacaaaataaataagataagggaagagagaatgcaaacacagttttatactggttcggccacaacccgtgcctacgtccagtactcaagcaacccacttgagatttccattatctttgtaaaatcctttacaaagtctgaaccacacagggacaacccatcccttgtgttcagatgctttacaacaagagactcacagtctcttaaccaatctcattgaataagaagaatggaagaagaattctctcttcaagagaagaatattacaatgaagatcatgtaaaaatccttatagattttgcaagtgtttggccaagggattcttttgagagagcatttgacaatgaagttcttttggaatctctctcattgtcttttgagaggataagacatttntgccaagccaaactctcttaatcttttgagaggataaaacattttgatcaatcaaaac

SEQ ID NO: 261549 - DNA, 297 bp, Glycine max
tcaagaaaaagatggcctcagcaaattccttatttccagaagggaattctatcaatagacctccaatctttaatggagagggttaccactactagaaaacccgaatgcaaatttttattgaggcaatagatctaaatatttgggaagccatagaaatagggccttatatacccaccacagtagaaagagttacaatagatggtagttcatcaagtgaaagcataactatagaaaaacctagagatagatggtctgaagaggatagaaaacgagtacaatacaacttaaaagccaaaa

SEQ ID NO: 261550 - DNA, 781 bp, Glycine max
  unsure (1)..(781): unsure at all n locations
ccccttaatcactcgtccgggatcttaaacactgagctgcaacttgcttaagaagttcagaaaggacaaggccggcaatgaactaattcccccccggaataccaaaagtcaccccttttagaacggtgtacaccaacaacgcttctaagccattaaaggattgtcgttttttccggaaccacgcgttcaactcaaggaccaataatatactgatttccaagaagaaataaggcccccgcggtgggcaccactggttacttccatggccaaatttgatccaaaaatagtccttgaattttatgccaatgcttggccaacaaaagaaggcgtgcgtgacatgaaaaccctggttaggggtcaatggatcccgttccaagccgacgctattggccagctcctgggatatccgttggtgttaaaaaaaggccaataatgccagtatggccaaaggaggaacccgtcttgatggttcgatgaggacgccattctccagttgctatgtatacccgngcaggatttttcccggactgctgcccgaagacaggtgctggatctgccccaccacattaccaaactgactcagatattgatgactctgctgtttagcaacattctgcccaccgatcataattcctacctccctagcccaagtgcaactggtgttctccatcttgaaccgataaccatcatgtgcttcatttaacccgtagctacttattttcgcagtatgcctccctatgccccttttgacccaaaaattctactgctccttgatccctcg

SEQ ID NO: 261551 - DNA, 310 bp, Glycine max
ttacgagtgcctgtatattgatgcgcctgagtcggacattcgagtgaaaagttatgaccatttgaatttctcgagagcttcctatggttaattttgagcgtgctcatatattatacgcctgaatcgaacctcagggtgaaaagttatgaccatttgaatttcttgagagcatccgatgctcattatcgagcgtctctatatgtgatgcacctgaatcggacctccgtgtgaaaagttatgaccatttgaatttctcgagagcttccgttgttcaattttgagcgtctcgacatattatgcgcccgaatcg

SEQ ID NO: 261552 - DNA, 191 bp, Glycine max
acctttaatgagaagtcatgtggtaatgttccgccctgagggccgtatctggctgttgtgcaagggcacttgggatacatgcttctgctgacaaccgctcagcgcgcatattatgtatatgagtagcccttgacgtgtacttaaacttgggaaggtctgccatgcctaactcaattttgagagacttgact

SEQ ID NO: 261553 - DNA, 297 bp, Glycine max
tatcctcagtcgctaagccattgttgtctcacttagcgatttggtctcgctaagcgcatggttcacgcttagcgagatagcaacttttgcaccttcataattttctcctttttacctgaaattgaggtgaaatttacattaaattcataaggaaggcttctattgagcacatataaaaactaaactagaaatatttacaatcctaccaaaaataaccataaattgggagatttatatacattttataaaagttttctatacaaaatttagtcttatgagatgactaacagtaatcaa

SEQ ID NO: 261554 - DNA, 127 bp, Glycine max
gcttgctaatactgtatataaactcattttgggaaaaaaagaaggacaaatttagattaaatggtagggctctggcggaagttttattggatatgaatttaagaatgtaagccacattatgcaagac

SEQ ID NO: 261555 - DNA, 301 bp, Glycine max
actctagctttatacgaacaaatgaaaggtacattatgacaggagtcaaatgtctttcttctattttggatcactttgcaacaagatatagataacaacgtatgagtaagtgaaatataacttgtaagctcaaaagaatccagttccaacaaggaatggatgcatagcttcacatagttttgctgagtgattatacaatttacttactggcgaaatattctagctaccctcacaactatataggagtggcaaaagcagaacacatctctaatagggtgaacattattaaagaggaatctac

SEQ ID NO: 261556 - DNA, 506 bp, Glycine max
agcttctctgagaagtgagaacacacttctgaacacacaaactcagcgtgtgtacagtcaaaacatgtgattttacagcaaactcgccatattgtgttctgagctgggattgagacgagcttcccgcaaagacagaaacatacaactctgtaggtcagaatacaatttttattatcataattctatgagaaaacaaatttaattacccatcataacccacagacatgctaccctagatgtatgtttgggaagccactagaattactatggtttggggtccaaaaaagtcagcaaaaaatactaaattcaagcgaaatgattaaaaacatttgggcaaaaaatcttattactgaaccttgtccaaaactgaagcacgtggttcttcaggcatgtctcctcttgccctagctttcatctcttcattaatttctggagcctgaaaaacaatcaaatcacaaataatgcatatcacgaagaaatatatagctcaatcatatcagttcatg

SEQ ID NO: 261557 - DNA, 294 bp, Glycine max
tgttattcttgtcaattaactaaaattagatacaatatagccaatagtccttaacatcaagtaaaagaacagagagacagagagaccaaaggacagaatatcaaaagattcttacaggaagacacggcagcaatgcagtaaggttgtatgacaattgttcaatttttttggcaggaggaagcttattttcaatactgactgatgccatcttcactggatcacctgatgttgttaaatataacaatgtatatgaattaataacagtatatgtgcaagtttgttatgatactgata

SEQ ID NO: 261558 - DNA, 615 bp, Glycine max
agcttggtgcattgagaaggatctttgtcgagttggaaggacttcacttctttagtgggtttcactctcgactttgcttttctcaaatcgagttcagtttctcccaagttactattgagggaggtgcatgctaccgattgtactttgggctttgctacccttttccctttagcaatcttgaggcttacaatataacattccattccactcatttgatcaactctgatagtgataattttcccatcctcacttgggaacttcatcgctagatgcggagttgaaatgatggcccctaactcgttatgtgaaggacatcttatcaatatattgtaaaaagtcaaggtgtcgactaaaaagtacttgatcatgatggactttgaccccttttcatctttgaaagtagttagcaagtgcacatatcctattgtgctcattgtctctactacacaaccaatgaattgctttaggaatggctcaatctagtttactgctatgcctagttggttaaaggccaaccaatatatgacatcaatcgatctcccattatcaagtagaactttgcatactaagatgttaacaaccttgtattttgaccaccatgggaatcattgtgac

SEQ ID NO: 261559 - DNA, 295 bp, Glycine max
tgttaaagaactgatgaaaaatcaagaacaagcttgttcgcacatcgttcacgtgtatgatatccactccacaaggtttgaagttgaagaaagcttcaaccctataatgcaacgtggcggacaaaagtgggcaacaaacttgaatggtcgtcatttgcaatgcggaaagtattctgcgcttcactatccatgttcacacattattgcagcttgtggttacgtgagcatgaactactaccaatatattgatgttgtttataccaacgagcacatcttaaaagcttactccgcacaa

SEQ ID NO: 261560 - DNA, 363 bp, Glycine max
agcttccattgttgaattatgagcaccgcgatatattgtgcgcctgactccccatctaaaagagaaaagccgctaccagatcgattgctccaaagctcgcattgatgacattcaagcgtggttatatattctgcagcgaaatctgccctttgagtgagaagagtttaccgttttcctttatgaagaacggcccctgcacaaggcaccactggttaatatattgtgcgcctaagatgcacctacgagtgaaagagttttgaccctttgaatggctctaaaacgaccgttggtgaaacatgagagtctcggtatatggtccgcctgaatcggaccatgccgacaaaagtgatgaccatttgaaat

SEQ ID NO: 261561 - DNA, 294 bp, Glycine max
tcaaccaaggggagatggaccatttcaagtgcttgaaagaatcaatgactatgcttacaaagttgaactgcccggtgagtataatgttagttccaccttcaatgtctctgatttacctctttttgatgcagatggagaatccgatttgaggacaaatccttctcaagagggagagaatgatgaggacatgaccaatagcaagggcaaggatccacttgaaggacttggaggacctatgacaagggctagagcaaggaaagccaaggaagctcttcaacaagtgctgtccatact

SEQ ID NO: 261562 - DNA, 575 bp, Glycine max
agcttgttttggaccttgaacaggctactaacttctgtttcaaaaccatgctacgtgctcgcaactggaacctgtcttcccttcacaacttgagttcactattgctaccccacagagctccgcgaaatctattgcggccatactcttacttgcgagccctcttgggctcttgtttaacggcccttgtggcagttgcaatatcttcccggaacccggcacacttctttcgaatgtgtgtaacggccaacttgaacttctccttggcaagattcgcctttcctaactcgcttttgagagcttggacttcttcgtcctcttccggtgcctcaaaactctcttcgctgacgacttttaacttggcgagccaatctaaacctcgtatatgaactttcagccattcatggtagccaccaatgatgacattacgaatgcctctaagttcttgatctttccttaacggcgtttcccatgccttatggattctttgtatagtcttggaaatttgtgcgccgaaatccctcacaaggaaaggagacatgctttcttccatcggtgctcccctcatggggtaccct

SEQ ID NO: 261563 - DNA, 290 bp, Glycine max
tgtggggggacatgttgacttgctatgcaatctgacattcaccacagattctgccttattctattttcagatagggaatgcctctcacagcccctctgccaatgatctgcttcatgcctgttaagtgcagacgtccaaatctttgatgccatattctgacttcatcttctttggaggataaacatgtggaggactaactggcttcttgaggtgtgcataggcaacatgggtacttggatctgatgccgcttattataactacactcttctcattagtcaccaagcattct

SEQ ID NO: 261564 - DNA, 561 bp, Glycine max
agcttgagatgaggaagtgtagaagggtgaaacttcctgcttttattgttgaccacagagtggtacctggagatatgtcgcgggggttaggagacctcggggacgtcaggtggggtgctattgcccaaaaccaagcttgaccaatcccgacccaacccgggcatagtcggtcagtgagaacctgtgatgtacctaaacaggcgagctcctggcagtcaacagataaaaggaacaaagaccacaaagcaaggaggcttgtggtggctggccagctgtgaattttgtgtgatatgtggattatggccactggtaatcgattaccaagggtgggtaatcgattacaaggcttaaaaatgaagacaagaggctaagatggtctctggtaatcgattaccacgggatgtaatcgattaccaggcttgaaaacgaggtcaggaagctaagggagcttctggtaatcgattacaagggggtgtaatcgattaccaagcttagaaaggcgactggaacattgtggaggcctctgggtaatcgataccagccttgtgtaatcgattacac

SEQ ID NO: 261565 - DNA, 292 bp, Glycine max
tggttcgaggtacttacccgttgaagatcgaagaacgatgaagaacgaatgaagaacgtcgaagaacgattgaaacctttgcgaaattcttcacggaaaacgttacggaaacgtttcggaagcgcctcggcttagattttcttcacggaaacaatttttccaagcaaattcgaaagagagagaagtgcctaaggggctgaaccctttccttcttcacttcctcccctatttatagcaaaataggggaggtgcttgccgcccagctcgcccaggcgagctcaactcgcccagg

SEQ ID NO: 261566 - DNA, 593 bp, Glycine max
agcttcccaaccaatctccgatatctttcaggatcagaataaggctccccctgattgggtaacaatttttgatttggattcatgggactatcaattgatctacaatctgacatactagtttctttaagtatgtctaacgcatacttcctttgtgagatgataatcccatcttttgactgagcaacttcaattccaagaaaatatttaagttttcccaaatccttagtatgaaaatgactaaataaatgttccttcagttgagcaattttttcttggtcatttcctgtgatgactatatcatctacatagaccaccaagtaaacacatctactcgatgaggtatgacaataaaaaattgaatggtctgcttcacttcgtttcatcccaaaagcctgaacaactgagttgaattttccaaaccaagctcgtggagattgtttgagtccataaagagacctccgaagtttgcaaaataagctagactccccctgagcaacaaatccccgtgggtggctcatataaatctcctcttctaattctcatgtagggatgcatttttaatatccaactgatacagtgatccatgacggatg

SEQ ID NO: 261567 - DNA, 293 bp, Glycine max
gcttcaaaatatggcctcaacaaacttcttatttcgagaaggaaattcaatcaatagacctcccatctttaatggagagggttaccactactggaaaacccgaatgcaaatttttattgaggcaatagacttaaatatttgggaagccatagaaatagggccttatatacccaccacagtagaaagaaccataatagatggaagcacaacaagtggaagcacaacaatagacaaacctagagatagatggtctgaagaggatagaagacgagtataatataatttaaaagcca

SEQ ID NO: 261568 - DNA, 801 bp, Glycine max
gcacccgtggttgaatgcatgcattcctgaccccacagtaacctgaagcatgcagcttagaacccatctattgtgtgcattgaaaggttttgttttctcgctaaaagcagactcggggtgagaacggggaacaggatgaaaatgtagacattccttggagaagtattgcggggtgttattctgccatatcaggggtaatcaaccccctatccacccgggaaaaaccctgtcaacgggaacgttggattgtccttaaacaggggggcctccttggaatacaaccgtataatgggggacaacccccttctcctttaatgcgtgttgacagtcctctgcacatgtcggagcacttgggcgaaaaagcgtattaacgtcacgcgcattttagaaaccaggggggcttacttgcttccatggcttgaaccttatgacaaaaggcgtatatggcctcttgtatatcactaccccaggacgtgtacttccctcctctatgaaatatgtctagaggctatgacacttctcgttatctataaccgtcggggaatgagcgacacatcttttagtggccatcgcccattgtgacggcccacggaacgtcatccagcctgtgagaatacacctttcaacgaatgcgctcactggactatgcgactctctattgtaatttatcagctacgcttctatttaatctaacgctcccgtgtgcaatcacatctccaccctcaataccctccctgttccgtaagggacctcatcagtacatctcaccgttctataatattctccctagctcatgatcac

SEQ ID NO: 261569 - DNA, 459 bp, Glycine max
  unsure (1)..(459): unsure at all n locations
agctntaaaattaagtataaattccaaaagaaagggggagaattaaatgagtgaacgatagaacaaaacctgcatgtattctcttgatttcaagattgtcatcatcaaaaagggggagattggggaagcaatgctttccaagattattttgatgatgcccaagactcaagtcaagaatgaagagtcaagcaagtttcatgaatcaaagagtcattcaatcaaagccagtttcaagaatcaaagagtcattcaatcaaagcaagtttcaaagaatccaagagttgttcaatcaagaatcaagattcaagaaaagaataaagataagactcaagatatgcaagaaccattaagataagtattaaaagagtttttcaaaatattgaatagcacaatttagttcaagagaatttttcaaaaagaaaaatcttttaccaaagagttttactctctagtaatcga

SEQ ID NO: 261570 - DNA, 297 bp, Glycine max
tcccaagtttttaagttcttcctcaaaactgtcctaagcaaagatcccaaagtcctattaacaacttccgtttgcccatcggtttgtgggtgacaagtggttgaaaataacaatttagtgcccaacttgctccacaaagtcctccaaaaatgacttaggaacttagagtccctatcactaacaatgctccttggcaaaccatggagcctcacaatctccttgaaaaacaaatcagccacatgggaagcatcatcaacttttttacatggaataaaatgagccattttagaaaaccta

SEQ ID NO: 261571 - DNA, 215 bp, Glycine max
  unsure (1)..(215): unsure at all n locations
cgcaaccttgacaatgganaattgctcttagtaatcgctacgtttatctctctaccccgcggtggtggactcttgaacaattaccctcttcatggggcctcaaaaaaagtgtgtctcatcgataattacccttatcaatctcttcgcataactccaaacgccgtggtggaagacacatcaaccaattcgcacttcgtggttcttcgaaaaaattt

SEQ ID NO: 261572 - DNA, 295 bp, Glycine max
tggctctgggcaatagcgccccacctgacgtgcgcaagggctcctgacccttacgacatatctccaggtaccactctgaggtcaacaataaaagcaagaagtttcacccttcaacacttcctcatctcaagcttgcaggattatggggtacccatcacatgtggtactaggtggcggcccgtcgatggtgcacaacaagtttttcacatccacaatgcgcgcataaacccaccatcccctgttgactacctacgactgaacttacgtactcccacgtagcccatatcctagaatc

SEQ ID NO: 261573 - DNA, 517 bp, Glycine max
agcttgttttatggtaaaacttgctaacaaaacaatttgttctgttcaggtgcaattggtgccgaatggttaaaagcattcaaaggctatattgaaaatccagagaccatgttgttgtaagaataaattgaaggctcccatgacgtactaaatttctttcaagaccttgtaagcaggggatgaaattttgttcaccttggtatttctatatggcccatttgggttttgttattgtatccctgaccaatttttgattgaagtatttaatcactgaaaataaattttgcagatttgtaattcttttaataagagagggtagattaggcatttaatttaaacccaaatgttttgctctcaattgaattctgccccgtaatacagacagatcagtatgtaacattttctttgttaaatgctgcaaatatttggaagaacatgtatttaaaaaattaacatgtcggcatcgtcacttgttaaaactcggattgtttcagttttttttttatatatattttat

SEQ ID NO: 261574 - DNA, 295 bp, Glycine max
tgccggaaaactggaggcacccatcggcatcagagaggcatatatagataaagagttcagagcatcatcgataaacagtgttatgtgagagagaaagaaagggagaggagggtgacttgaatgagaggtggatttgtaggcgggagaaggagccggacactgacacgtgtcggttacggattaggggcatgtgtacgtttgtttgttagggcgttttttattgtttttgttgttggtttgtcagaagtgttgtccgagaaagttagtgacatggcaatccttatccagtgttggc

SEQ ID NO: 261575 - DNA, 576 bp, Glycine max
agcttgcttattttacctgaaattgaaatggaaaggttattaaatacacaaaagcgggatactaaatacttattacctaaatttacaaaaaagttcttacaatactacaaaaagaactaaaaatggaaggagttgaatacaatttacacagtttttttacacaaaagttagtcatattaaccgactaacaaactcccctaaatttacagtttttcttgtcctcaagcaaataaagaacagctcattggtccccaagtgacaaaacatgcagtgattttgaacaaaggtgtgtaacttccaaaatattagttgcatgataaaaaatgaaacagaaatgcctttatcaatttcttttcacaaggcatgcagttgtttagagaaaagaacatgttagcaagcaacacaacttaataaagctgggtatgagacaaattttatggaaagatgcttaaccaaaatctcacggcttctgtttcactcaagcacaagtgtttaagctttttatcattaacgactagcaagaggtccaatctttgaactttatctcatgtcatacagtcagaaatgcacaaattg

SEQ ID NO: 261576 - DNA, 295 bp, Glycine max
tccattcccaagagcatttcttatttaagcacttcaacctttgctttcgtgtagcttaggaaaaatgtcatttcttcttctttctttcttccaaagccatttctaatgtcccaagcactttctccatcacccacagccagcattagccaccacaaaccatcattgttctccattgaaaccccacaccgagaggaacccttcaaccgaagcggaatcttccaacttggcttgcggtttcggtagagaacgaaaccctaatctgactgtcgcaacctacccttcggcgggagggcga

SEQ ID NO: 261577 - DNA, 146 bp, Glycine max
aacaaatatctatcttattaaactctttacggcaattgctcatgtttcccgtaaattgtcacttcaggaatatttgtttgaaacgtcccgatactcctctcgtattcctccaccccatctcaacattctattatgctcagcgaccg

SEQ ID NO: 261578 - DNA, 584 bp, Glycine max
agctttatgaatcctatcattctataggtcaattaattacgataagatgatcataaacacacaatcaactaataatttgagtgatcaatttcaatatagaagtgaaagtgacaaaaagatacaattaattgaataacatcgaagaactttattaaaaagaagaactagagtacatgggtacatctatatcacaatccaagttctaaggggtttagctaatcatggtcatagaataactaaataacatacaatattgctttagaaattaaagagataaaaaacccttacaagttcagaccccaattgttctcggagtagttctcttctcaaaatctcttgatgtttgtaaaatttataatgaatttcaaattcccaagtacaaacttcagcatctcatttatagactcctaaagataattactttaattaggcacactatagatagatattctaatatgatctctaaagataattactttaattaggtgtactatagataaatactattattagatccctaaagaataatactttaattagatgcctaaagataatttacctttattaaactcattactatcatg

SEQ ID NO: 261579 - DNA, 294 bp, Glycine max
ccaaaccacagcaacacaaaatctaggtatccaaaacccctcaatttaatggattttcaaggtttgagaagtgaaattgagaatgaggtaaatttgaagcaaactctcacctcacacaagtccataacatcaatttaaacttgttcaaactggatttacacctaaaatttcatcgaatcaaaatttgactcctcaacacccaaatttaccctagaaatggctctttgttcactttggtcatttgtttttctctctagcacagcccaaactttctcataagtcctaaaagacatt

SEQ ID NO: 261580 - DNA, 554 bp, Glycine max
  unsure (1)..(554): unsure at all n locations
tagcttctcccccaattttctataaatagggggagatgtgaagtagaacagggttcagccccttaggcacttctttctcttgcgaatttgcttaggaaaattgcctgcgtgaagaaaatccaagccgaggcgcttccgtaacgtttacgtaacgtttacgagagtgattttgcgaaggattacgaccgttcttcgacgttcttcatacggcttcagtctgtaacgggtaagtacctcagaccaagcttttcaattcattctatgtacccgtggtggtccacatttggtttcatgtatttttattctcgttgtcatttactttttataccccctttcgacgtgcttaagccatttatttaagtcatttctcgcttaacctaaaaataaaatgtatctccaccaatcgtttgaattgtatcatccgtgaactatggttgaaataaattccgaccgatcggtcgtgccgcatccacgtaggaaataagaaaaaaggaggttaataataatgtaatanaaaaaataccttttagtaaaataaagcgaaatatcaatcg

SEQ ID NO: 261581 - DNA, 294 bp, Glycine max
cgtaggattatggggtacccatcacatgtggtactaggtggcggtcgggcgatggtgcacaacaagttttccacatccacaatgcgcgcacaaacccaccatcccctgttgcccacctccaactgagctcacgtactcccacgtagcccatatcctcgtttctctcaacaccgggtccccatcaatcctcccaagcttccacaacatccaagcaaaacaacattcaaacagcacaagctatcacagccaggcaaaacagagcaaggcataaactctgctcaacacatcaaccaa

SEQ ID NO: 261582 - DNA, 499 bp, Glycine max
agctttaagaaaagtcaaacgacaataacttttaactcggatgtccgattgagtcccgtaatatacgagacgcttgtaattgaaaatagaagctctgaacaaattcaatcgacattaacttttgactcggatgtccgattgtgctccgtacgatatcgagacgctcgaaattcaaaacggaagctctgagaaaaatcaaacgataataacttttaactcggatgtctgatcgagccctgtaatatatcaagacgctcaaaattgaaaacggatgctctaagaaaagacaaacgaccataacttttgactcggatgtctgattaagtccccgaagatatcgagacgctcgtaattgaaaatggaagctctgagaaaaatcaaacgacaataacttttcactcggatgtctgattgcgccctgtaatatatcgagacgcacgaaaatgaaaactgaagctctaagaaatgtcaaactacaataactgttgactcggatgtc

SEQ ID NO: 261583 - DNA, 293 bp, Glycine max
  unsure (1)..(293): unsure at all n locations
ctgcggatttggtcttcgccggcgaaatgatcgaagtgggtctaaaaagaggaaaatctgatcatcttgctttgataaatgctaaanaaaaaaaaaaaaaaaactggggcaagtgaagaggatgagaaggagggagaaacctatgctgtgactgccattcttatacgaccaagtttcccaccaacccaacaatgtcattactcagccaataacaacccttgtcattacccaccacccagtcatccacaaaggccatccctaaaatcaaccacaaagcctacctaccgcacttc

SEQ ID NO: 261584 - DNA, 538 bp, Glycine max
  unsure (1)..(538): unsure at all n locations
agcttgaaccaaaaaccgatgagagtgtaaccttaaactatgagtgaacgactagttgtgagtgatgatctttgcatgaatctctgaattttagaataaaatgtataaatgaggacgtgatgaaggccacgatgtagaagcaaagcttcatggtgaatcaagagtaattcaaagatgttttgatgataacaaagatgataacaaaagatgatgacaaaggtgatgacaaaaagctcaaaggtcaatcaaagaatgagttcaagatgttcaagatagaatcaagaacacttcaagattcaagagaaaagttgaattcaagaatcaaggatcaaggttcaagactcaagattcaagaatcaagaaaaggctattcaagaatcaagaaaaagcttaatcaagataagtatgaaaaggttntttcaaaaactgagtagcacatggatttttctcaaaacatgtttaccaaagagtttttactctcttgtaatcggttaccaaattattggtatcgattaccagtagcanaatggatttgaaa

SEQ ID NO: 261585 - DNA, 294 bp, Glycine max
tcaatatcacaatggagggaacaggtacaaatttcaaaatattaatattaataactctaatgttcagtagtttctgataactttggacaccactccaattgttcaaaatgtggttcttaaagggaaagaagggagtgtggatcaagctgcccagagaacattcaaatcttgtggattctgcagttaaggcaaacacttgtttaattttctgctacatatacacatgcatagcttagaagttagagattaaaattgttagaagtcgccaaacacatggattaactgacaggagtt

SEQ ID NO: 261586 - DNA, 519 bp, Glycine max
  unsure (1)..(519): unsure at all n locations
agctttaaccgtttatttaagccattttctcacgtaataaatgctaaaatgaatttcaaccaatcatttgtgttgtaatgtcatttaatcaatgttaaaacaaaatctaaccgatcgttcacgctataacctcggttaaacaaaaaaaggtaaaataataataaaataatcaaaaaaatcaatcggacgtttttctttgaaagtttccttgaattaattgactaataacccaagtgaaaccaaggctaaaatcaactcacaaatcaagcttgtccgcaaaaaatcactcaagaccgttttaaggtccaacgccttaaaacggtcctctttgcttatattggttaaaatggaccattcaaagcataaaatcaacatataaatttatcgcttttgcaagaactacgtaggtatgattttctcatcacaattgaggatacgtangagcaaaagccccacttttgtcgaacaccccaagagatcgttaattatccaacgccttaacgcttctctcatttaaaa

SEQ ID NO: 261587 - DNA, 291 bp, Glycine max
tcatcctcatcagggttaaggaggtgttaagggttagcgtagtctcaatgttttccagtcgggtagttgtattctccaacaaactatgaacttcagttgagtgctcttgatggaggtgcagcataacatccatcttctgaatcataagtgaatcaaaaggactccattgatgtgtaggctcttattgagcttcagcttcagcatcttcttccatctgttcaaagtttccaactgctggctctccagccattatccattcatgatcaacaaacctcattccaagcttcttga

SEQ ID NO: 261588 - DNA, 528 bp, Glycine max
agcttctcaatgaactaaagctatttggaaagtcgatagtaattaagttatttatagttccaagttccaacagataaaactattctgcaaagatattttactgtatcactttcaaattacatagtcacagtcagtgaattcctttaatgttttgatccatgttaatgtgcttttacttctcactgtcaagctcaaatgcaagacttaactggctttgtggagacacgacaacaacttttgatgctcaagtcaaatcatcgcatgaactggattggctttgctgttgctcatcattagaacactaagtatgactttttgtttttataaaattaaatgatttatcctaatgatagctacttgagctgccttttttactaaataatatataatatgagacctaaggattatcttcttagatgttgttttcactatttcatgtatgaaatattgaaaactagaaacaaagtaaaaacaaggtggcatttttgtaattatatctaaaaatagaaaatgtttttcctactaaaa

SEQ ID NO: 261589 - DNA, 293 bp, Glycine max
ttaagcttttagctactagctaattccagctagctttcagctacctttgtcgaacttaacatttaccaaacaatcaaacaaacttttcagctagtaaaaaaaactaaaaactagcgaaaatttctcatcaaacaaaaccaaccttaggctatgtctggcaaggcttttcaacaagcttatagctttttggtagtttcttagtaacttttagctttttttgaaatactacttgaagtagtatttttaaaaatgttagcttttagcttatagcttttcaaattttcttccaattt

SEQ ID NO: 261590 - DNA, 426 bp, Glycine max
acatacaacacattactttaattttgctttctttgatctattgattcctttgactaacatagtagttatagcacatttattggtcttttgaactggataactactgttctgttttcttgaagcaaaaaagatctactgcaagtgatttgatccccatttatttggagattaacgccacttgtagaatgcgtaatcaagagaaaattataaaaattttgcaggatttagaagcacgtatccatttcagaggaagaagctcaatcttctgaggcatcttctagttttcctattacaagaaattctcattagatcctatcgaaaaccacatcatggctaaagagccaagaaaaatcacccttgaagattattcaagttctaatgtgccttatttttcaccagcattgcacaatcagaagttcaagccca

SEQ ID NO: 261591 - DNA, 294 bp, Glycine max
tgggtgatgttgcgcgtactgatgggtaccatgaggtgtttgctgggttttgacccacgcaggtgttgaagagacggcatgggcatctccctccttcctttttgcccctgttgccccgattcttttggcattcgcgtttgtggaggaaacgtaatcaaactttcctcttttcaatccaacctcgattctttccccggcaaacaccagatccgcaaagctggacggcatgtaacctactagcttctcatagtagaacactggcagagtgtccaccatcatggtgatcatctctct

SEQ ID NO: 261592 - DNA, 422 bp, Glycine max
taatgcttaactttatgggccctggcggctatgcttatctttacaccggttgaaatgcatgtataaatgaacatgtaatgaattggggtaattaaactaactatgtcaccttgacttgattttgggccataggaaattatatcaatattggtaaaaaatataattaaaaatattatattttagtaagtactaactgagattatttaataatatttatatattatgtcaagattaatttaccttcataattaattgatgaatttaagtcattgtgcaaaagtatcccaactcgattaaaaatgtataacccacaaaataaagtgtgcttctgttgggttgaatgggtaacacgttattcaaggttataattccatttaacacaagtttacttggtttaggttcgtattgatttcttaacctgt

SEQ ID NO: 261593 - DNA, 295 bp, Glycine max
tgtatccatggcttcctatggtggtgagcttgttcttgactcatcttctccttgaagtggcatctccaatcacctttccttcttttccattccgttgtcattgatcttcaagaagcaaagggctctattgatgaagaagatccaatgcttacaagctctatatggagctacatcagtttatgaaatataggttgaagttgtgtataatatttgattgatatcattttttgggggatcaaggatatcatgcatatgttacaatttagatgcaaacaaaatttgcatagactaacca

SEQ ID NO: 261594 - DNA, 1366 bp, Glycine max
  unsure (1)..(1366): unsure at all n locations
actaccgcacctacatgctatgtaatcagaatctgactgtcgctctnactcaccgctgctcgaaacactgtgtgcttattacctctcatcctctcaccccatacactcaaccacgagaatgattgcattccctctcgagccgcggcaacctataaactgtatgcccacgcattgctatatctcgacagagatgtatactcccgctatgacaatacacgcatctgatattctatactgctctcgccgcatcaaccccactcaacactattcttgagagcgttgtcacatgaatacatatatactctcttggagacttgaatgtagggtgcatactacacgctccagcgcgatagcctctcaagatatctgacatcctcctctctctatgcgacaaacgcgtcgcgcgaactggtacctctactcgcgtcatggaggtatgagaatgacggataccgggtgcggatgtagctcctctgtgagactacctcactcaatgatcatgcgcgactcgtcgtctacacgcaaacatactaaactcattactaatgtcggataactacntctccaccgttcgtagcgttccgagtaacaggtgggcatcaccntggcgatctatactctataataccagtctattcgactctatgggatacgatactgtgaagctaccacacaacactancgcacgtcgtctatcngcctntgcgtgttgtnacntatntggcgtgtctgcacgagctcgacccntcggacgacagaacactacttatccaccactttgcntagcgngngcatctagcgatacgcgtatanacaattgtacattagtgatgggcggcgcgtgctataaacacatactacacggctcatctgtcgtgttccgcaacggcngtggccacatcgaacgactcttatctggacctcggtcaatctgcagtgtcgcccccttacacacacaaatctgtacatctgcacttgcgcggacggaatgaaagcacatctctggcgtcggtgatgcaccggcagccttcttctgttctccggccggtgatcgactctctaccactcggtctcgcaggcaccgcatgtcgtcttccgacngcacctctagcatctcnttctatgtagatgctcatcgtacctacctgtcgattcccacaccatcgctctactccactctcatcactgcgacgactccgatctcgtgaactgcgtacactccaaccgcgcggatacgcatcagtcttcgaccgaaaagctcgactcgcggcatctcgccaagctacagctcgcatacgtatacctggatagcgcgacaacttctcgactttatgttgatcaactactaccgcatcacgtcatcacg

SEQ ID NO: 261595 - DNA, 299 bp, Glycine max
tgttggaaaaaactttggtgacgaaggacaagaaattgtaaccgacacgcttgaagaggtaccacaatgcggtggcataaacgagcaccgcaaccgctccacgccaattcatccacaacaccacatcagcaactaagcctttgccgagaacacgatgaaaggatgagaaactaaggcaatgcccagattgtcagaagaataaagaatgaaggggttagaatcatcaatggcagccatggccaggagagaaaaaaaaaaccaaccagacatccgaaaggttcccttaaaaaacgattcat

SEQ ID NO: 261596 - DNA, 513 bp, Glycine max
agcttgtccaacaattttttattctaatttttttaaaaaagttgatgcttaattatccctttgatgaaaggtttcttctgaatagcaaggttgttgagaattctcattgtcatatagaagtcgaccatatggtttgggagtttcaataatgtattgtctaaatcgaggaagtgcttttaaaaaagtgggaggttatgaatattaatgaataaaattgtgataatgtgtatatatgctttatgatttatttgttttttcaaatcaactgtaaaaaaaacagatcaaattaattatatataaaaacacttgtgaaaacgccactcaagtaacaggtcatttttaagtttttatcatcctatgaagaatctaagaacatgctatggatatgtaacaaaaaagctagtctacaaaagaaataatgacattttctttagtaattaaatttaggttatatggtggtagccttaattatttttattagccaaggccggggtacgttataactcctttgat

SEQ ID NO: 261597 - DNA, 295 bp, Glycine max
tcacgttagccttttaacaaaattaacatcatatctcccccgaaatcagtttatacgatacctcttaccatgtaccaaaaccagcaccccttttaaatattcgcacagaggaagaaaactatgaatttaagaccaagaaattaattatatttttcttcttgtgcacaacttaagaaattaacaaaatggaaataatgtaaattgttaattaccaattttgcacaatgctacaattgttattgctaattccccattctattttagaaaacaatttcccagcaaaaaagtaagaccc

SEQ ID NO: 261598 - DNA, 542 bp, Glycine max
agcttctattttcctggatctggggtaattattaccggagacacttttttcaacttatcatgtggcaagctctttgaaggaaccccacagcaggttgttttaaattgtacttgtcccttttttcttttttttttcttttaaggtttgagatttctatccagtaataggttgttgcatcttcgcacgtgtcttatttttatatcttgttttatccccttgctagaagtgtttgatgttggatcgagtggctctcaaaataattaagaaggggggggggttgaattaattgttcctaaacctttactaattaaaaaattactctttaaggcttttactaaattgttaagagaatgaggagtataagagaaacttaacatatagtcagtacaagataaacttaacagaaagtcaaagctgaaattccatgctcagcggaaagtaaaagagttgggaagaaggaaacaatcatacaagagtttttatactggttcgtaacaacccgtgcctacatccaatccccagcgaactgcggttcttgagat

SEQ ID NO: 261599 - DNA, 297 bp, Glycine max
ttttctcatcaacattagtaggtgctactttttaaccgacgtcaaccaaaaaaatatcacaagcctacatcgtccaaaaatatcaaagctggcgtttgccaaaaaattgccccgactgacagccgataaaaaatagtctcgattgatgtcaacaaaaaaactaattgataatgactgtcgaatcgttcaaaagcaaataaaactaggaaattttgcaacacaggataaacctaggtccaactcagaaatatgattcatatgttgatttgcttataaatagaaagggggaaatttttt

SEQ ID NO: 261600 - DNA, 1144 bp, Glycine max
  unsure (1)..(1144): unsure at all n locations
acctaccctcccatccgtgtcatactatactacacactcattagctgatgctatatcaacacgctaaagcctactatctgcatctcatatctccatcacgcccaggcgagttgatgcctatcgtccacgcccccgtaacataccaaccgagcgctcgctacgcaaccttttagtatcttaaataaacgctatacctttattatttatcatctatatggacggccgctgctcacactgtcctcctgtcttgaaatgcgacgcacacataagggctccacacatttgctcttatttcgacgtcgctgtaccacgctatcctcacctatcagcacaaacgatagagcaaaaacactgttgcacactcttggaaatctgcactanaatgcccacccatgcgcgaatcggngttgncaactgttactccggaatatccaagttatagcacggcaggtctacatctaacagtgcccggccgggggccctgtctcgcctcgaaagctacgtcatctcatattatcatcgaatagcgcctcgaaaattaacatccccacgatgcattggctgcaacacggtacgtgttctcgctcacaatctgtatcgccggccactgcactaaaccatcgatcatctagaatcctcatacttattaaaccaattcatctccgttaagcgcttcgcagcttattggaatcatggccttctctataagatatcaacaacacccgcgtgtatctagcgcaccgctataccctatctctaatcgaagaacattttctacgctctcccactgtacaaacctcgtcatgttctttacaacatgcgcacgaaataccggcacttgcgcaaacaacttccggggtctgaaatctatcatgagatgctctccttaacacacgatacgacacctgagtcgataaatggaatggtgagcgacacgcgcttatcctagtaaccttgagcgctggtgacatacgtcttgtaaccccctccggcgctactacaattcggtcctacatccccacgcctcctatcgaaaacataagatcagctgttgaatctcgctaaacgctcttacgttccacattagaacgtcgcacggggatacaattccatcaatcgcgctctctactcagaagtctacacg

SEQ ID NO: 261601 - DNA, 292 bp, Glycine max
ttaccaaagagcttttactctttgctaatcgattaccatattgttgttattgattaccattagctaaaagagtttgaaaaagttttcaaactgaatttacaacgttccaaatattttcaaaaagttgtaatcgattacaatgttttggtaatcgattaccagtgcccttgaacgttgaaattcaaatttaaatgtgaaaagtcacatcctttcactcaaaagctttgtgtaatcgattacacttatttggtaatcgattaccagtgtttgtttctgaaaaatctaaagatgt

SEQ ID NO: 261602 - DNA, 345 bp, Glycine max
actttgctctattttacccaggtgcccaagttggcctaaggtgactccatggtctaattttttttcctttggggttttgaactagaggagtagggattgcatttctctattgttgtcacaaacccttaccttcgggaccttcttcatgagttctatttcttgttcaaagagcccacacaattgccaccaccacgatccactgaccaccacttttcattattgcccaactctaccttggtcaacatgcgttcgtatcagaacccatatgtgcaaaaaatggaaattgaggttcatgttaccaagatggttgtaactggatggatacaacctaccatgagtccattt

SEQ ID NO: 261603 - DNA, 292 bp, Glycine max
ttaaaatttgaattaaaacattcagaaattgctggtaatcgattaccatatatgtgtaatcgattacacagggcaaattttgaattcaaattttaatagctgttgtaaatcagttttggccactggtaatcgattacatcctctggtaatcgattaccagagagtaaatttcttgtaaaagactttttaacttaattttcttggccaaaccttttgctacttcaattggaattcccttcctatttaatataccctttgtaagactctatagactatcttgatcatctatctt

SEQ ID NO: 261604 - DNA, 869 bp, Glycine max
cccctccccctctcccgattccttccccaccgccagattctttataacggcccagcccaacccagacccggatgatgctcatcccacccgaactttagagacgtagcatgtactatctagtgatctttgttgttaaagaataatattatctgtctcgcccaaccactgtagtcctcactctccaaaaaaatatactctcgaagaacgtggtgcattaaatacacccttcctcttgatctcgactctctccctagctaaacccatgagtggacccacctgacgcgacaacgcggcgggtgagaaccttaatcattaaaatgcggtgcccaacgccaaaataaacgatgaaacctcccttgcgcgatacggaccccggaaacaataaagtttgcactgacgaccgagacaaccactcgggcatcttggtcgatagggatcgattctcctctaaaccctctcccctaaggtgaaaaaaacggacaaatctttccaagggtgggcaaaataacataattcccatgccaccgaaggcgcgcaaaccagcacttatgggactggggagacccggccctatacaaaaatatgctcgcgatggggaatataaccacctctgactgtgcgcgaacggtatttttactcagcggaagtcgtatctcaaccacacctgcggcgggtgggctctgtcagcaatggtccgccataggactggtgtgtcaaagcaaacctacttactagctaccctcacttcctctcgaatcaactctaaatttctggcacgctactcaaaaagctgcgccccgcttattcacataactcttccttgccatcaggcaaaaatctgttcgattacgacccttccactcatgctg

SEQ ID NO: 261605 - DNA, 294 bp, Glycine max
tgcttgtggagcttctatggaggctggatctttgagcttcaatgatgtcctttaatggtggttttccaccatggagatgcagcggaagacaaaggagaagaggtgataggagacgtcatccactagggaataagccatgcaagatgcaacagacattattggcatagcataggtgataaaaatccatatggaatgatttaataattttaatcatgtggtattttgtggcaggaaacccaggtaacagacctttgggattatggcttaccatttgatgttgtatggggaatttga

SEQ ID NO: 261606 - DNA, 286 bp, Glycine max
tgccaatctctacttgtaagttactgtttatgtttaaatagtctacctattcttacttttacaaagcgtgtggggggttcatctttcaatcaatcttttccttgcccttatagtagtatgccttagaaatcataactggcttgtccactactaattgaaacataccttcattagtgtgcaagacatagaaactgagagcctaacatgaaatgcagatgcatgtttaattcgttgtacacatttgaaggaaacttgccttgccctgatttcttacttgtattggttg

SEQ ID NO: 261607 - DNA, 606 bp, Glycine max
  unsure (1)..(606): unsure at all n locations
agctttgagccaaaatcctgactcaccataaaccttgacccagggtgagaatgtcaatccttaccctcggaagcaaaaaagaatagaagggaaattttcaatcaaagaaaagagaaggaaaattttcaatgaaagaggaaaaagaaaagaaaggaaattcccaatcaaagagtgggagaaggaaaaaagaaaaggaagaaaattcccaaccaaagaatgggagaaagtaaaaaaggaaggaagcttctggtcaaagaaaccagaagaaatgtgcagagaggtctttggaccagacgatatctgaacagtacagaattgtcactaaatgaacaaaaaggaaggaaaggaaaccacgacctaaaatggtcttctccctttaattaccaaccaaaatcccgtgcgctagcgacccttttttctcgccccgcactaaaaaaaaaaacagaanaaggaaaagccaggaaaatcaaaagccaaaaacacacaaaagccgaaagaagaaaccaccaaaagaacacgtttccaagggaagccctattgatccatgatcacgcatgtaatttttggtttgataggaaataatttgcaaagtcaagtcatgacata

SEQ ID NO: 261608 - DNA, 293 bp, Glycine max
ttggaaaatgatttctatacaaaagttagtcatatgaagtgactaacagatgcacacacgaaagctacactttttgcacacagtgtgagttgttaagggccctatacccgggtccatgggaacataggaagtggaggtgaatctgtggtcatgctaagtctccgacttacttgatgacagtgaagcctcaactagagtttttctctttgatgatgcattgtcattggtagtccttaccgccgcaatgatatcaatgaggatgatgtctctagaaacctttgaaagctagatac

SEQ ID NO: 261609 - DNA, 606 bp, Glycine max
agcttcaataaaaaagatgaagttgcaaatacataaacaccaccgggaaaattaagtgaacccattggcctactcaacacaattaacaatataggttctagccttgtgaactcctctgcaccaaaagaacacagttcagacccttcccccaacacacataaaataaacaccatataaaggaatgtttgtcgccttccaagaaaaaaaaaggaatgtttgtctgtttttcaaaattaaaatatcaaaatatagtggtggagtagacatgcggaatacagttcaaaatcccattaagacagtttttggttttatgagttaccttgtaagaccatataaccaaatgttttgattaccaagtgcaactgtgcttaggagtataggatgaagtattaaattttcaatcagattcacaaagtaaacaactactttcttcctatgaagtagccatacacaggttatttcttcagggaataaggaagcccaagagtttacagatgcatttaacagtccaattaggtcagttacaaaactgttaaaaagatcggattaaagatgttcacaaccataaataaagggtaaatgcactgttaaaatgtaatatattcc

SEQ ID NO: 261610 - DNA, 291 bp, Glycine max
taggttgtttagaagccaagagggatgcgtgggggttcctgtgttttaaagacggagtggcacatgcctgggtgtactagacatcgtaatggaggatgaggtactgagtgagatgatggacgtggtgaagtgtgtgtgcaaggcgcacaaagtgcctttggcactggcatgggctccatgcgtccaacagaagcaagccaaggactgcgggcattcaagggatgagagctatgtgtctactgtggtgagagcgtgctttgtctgataaaagaacccccagctgatgggctt

SEQ ID NO: 261611 - DNA, 488 bp, Glycine max
agctttaacctcatcgtctctcacagtctttagatttgggagccaatccaatccttgtgtccggactctcagccacttatgatagccgccgatgctcccattactgcttcccctaagctctttgtcctttcttcacgccgcatcccatgccttgcgaactccttggagtaccctcgcgttgtggtcactaaaacctcgtgcgatgaaaggcgtgatgctttcgtctgatggcactcctctcatgggacatccttcgcatgaagattgaatcctgattcttccttccttctagcgagggaaccatttaacaaacgccccttcatgctagccaagagttggtcccaattcgtctttctttttcgacgcacaagcggtgaccttgtagcagatagacgggcctaccttcttagagaaaaaggtgtgaaaccagccccacatagagagctggagtacagccaacaatccttgcattgctttcttcacatctt

SEQ ID NO: 261612 - DNA, 289 bp, Glycine max
tgccgcccagctcgcccacgcgagcaaggttgcttcctccataagcaacagccttctggaggaatcttctggagggcccaagtgggcctggttgctatttgcacccttttttttactgaatgcacccccatctatttttttggtaattctttttccgtaacattacgaaactttgcgaatttcataacgatacttattttccttccgcaaggttatgaatccttacggatcatgtatttactttcttttagctttcgaagaagttatagaaactcacggattgcgcaaa

SEQ ID NO: 261613 - DNA, 703 bp, Glycine max
  unsure (1)..(703): unsure at all n locations
agcttgtccacaaaaataggtttttgaagtttgtcatttcaatttctcactaagtaaaatggatcattttcaaggtccaacgccttaaaatgatcacctcttaaagtaaaaaagaatcacttgataagaaagaactacgtaggtctgatttcctcatcgcaattgaggaatacgtatgagcaaagggaaacacccttgtcgaccaaaaaaagagaaaaatataaaaagggtataaaggatataaggacttaaaagggaacataaaaaatcaaggtcatgtttgcacattcgattaaaggctgccgtcccttgggacggacgtgtggggtgctaataccttccctgtgcgtaaatacaactcccgaacctttcacttaaaagttcgtagatcgcgtcttttccggtttttccgacgttttcctcaaataaacgttggtggcgactccgcgcgtattcctttcgtggaacacgcatcccgcgagtcacgcgtcgccctcccgccgaagggtaggttgcgacacacatcaacagatgtgactcttcatttttgaatttgaaaatcttaacgttttaaaaccactggtaatcgnatactataatctggtaatcgattaccagagagtaaaaatcttggtaatgattttgtgaaaacttgtgctactcatgttttgaaaacttttaatacttatcttgataagtcttc

SEQ ID NO: 261614 - DNA, 296 bp, Glycine max
ttgaaggtgcgtagcccaccattttccatagtagaacactgggaatgtgtctactatcattgtcatcgttattttgacattgaggtgccactttgagctggcaggttcttcacctttgggcgtattctttgaaagatttgtgccccctttttgcacatgttctgtagatgcatcctatccgaagacattatactgacactgcctaacgaatgcaaccactaagtccttccaaaaatggactcgggaaggttccaagttagtgtacaaggtaacagctacccaataagactttcttg

SEQ ID NO: 261615 - DNA, 524 bp, Glycine max
  unsure (1)..(524): unsure at all n locations
agcttntgcatgtctagagagttttagagagagaaatgtcctagttccagagagtttgagagattttgttgtgtgaagatctgcaaagaccagagttggaagaagaagccgtcttgagagtttgagatgagtttgtgagtgattgtgaggtcctagacgtggaacagacatccccactacttgtatttttgcaatctttcattctcttctctttgttgaaaggaagcttccaagttatggaaagctaaatcctctgttggatcttctttgtaggtacttgatgtaaatatctttttatctatttaatgatgttttgtgtgttcactgtgctatcagaactttattttatcatgcttttgccttgatcacgtcgatgcatgtgtttttaggatcattcaacagtggaaaactggtctggttcttacaacttgatacgacagggcttgtttgtcgcattgccacgatgaatctgcggaccgtaccctaattgtagttcgtatgtcttaatgcggccctggccgact

SEQ ID NO: 261616 - DNA, 294 bp, Glycine max
tctagtatttatagccttcatcttcaagtatttgttgtctcacaacagggagatttcttcacttgttcttcatctgatgataatagtcattggagcatttaattcttgcattaaatgcatgtcctttcttaatgcatatagtccactctggttggcttaaagcctggcactttcagatcctgatcttcaattattatttataggattttgaaagatcttaagaaaatgtctctgcaaagtgaatttcagacacaaagtattaaattaagacataaatgtcaactcttaaatgct

SEQ ID NO: 261617 - DNA, 551 bp, Glycine max
agcttgtaggattatggggtacccatcacatgtggtactaggtggcggtcgggcgatggtgcacaacaagttttccacatccacaatgcgcgcataaacccaccatcccctgttgcccacctccaactgaactcacgtactcccacgtagcccatatcctcgtttctctccacccgggtccccatcaatcctcccaagctttcacaacatccaatcaaaacaacattcaaacagcacaagctatcacagccaagcaaaacagagcaaaggcagaaaactctgctcaacacatcaaccaaaatcacagcttttctctcttaaagaccacagtaacaatttcttcgatccaattcgttaaccgttggatcgactccaaaattttactggaagtctatagtgcataagcctacattgtgaccgttgggatcgactagcaaacatccagaactcattctgtactactctttccacagccaaccacacacaagcattttttgcaccaagctaaaattctgctgcacctattttgacagcaaaattctgcttaagtg

SEQ ID NO: 261618 - DNA, 299 bp, Glycine max
ttgagccaaaatcctgactcaccataaaccttgacccgggtgagaatgtcaatccttaccctcggaagcaaaaaaggaagagaaggaaaatttccaatcaaaggaaaaaagagaagaaaggaaattcccaatcaaagagtgggagaaagcaaaaagaaaagaaagaaaattcccaatcaaagaatgggagaaagaaaaaaaaaagagaaggagaagaaggaaagaaagctcctggtcaaagatcgaaagaaaacagaagaaatatgcagagaggtctttggaccagacaatatctgaac

SEQ ID NO: 261619 - DNA, 521 bp, Glycine max
agcttataagaacaaaattgccttaatcatttccaaatatgcatgtgaattaggacgcatcaacaagaatcaagccaaggctattgtgcaagcaatcaatggggcaaaacacaccaaatgattataatgatggatggctcaaattctcacaaaggtaaaatcatcactttcaaattgagctttcaaaactatcatgacatgtagagaagaatcaaggatttcaagtcacaaaatgtcaagaacttttattttcaaaacaattacccatttcttgaacatatcctataattcaaagaaaaacatgcaaagtcgtacatgcacatgaaattgacccaaaatattaaactgaaaatccgacgaaactaacaacattaacaaattaacacaactaacaaattaacaaaaccaacaaaactagcaaaaccaaagaacactccccccccccccccccatacttaaacaacacattgtccttaatgtagcacaattaaaagattaaaaacaattaaatcatcaaagag

SEQ ID NO: 261620 - DNA, 295 bp, Glycine max
tgagatgaggaagtgttgaagggtgaaacttcctgcttttattgttgaccacagagtggtaccgggagaatatgtcgcgggggtcaagaaaacttggggacgtcagggggggtgctattgcccaaaaccaagcttgaccaatcccgaaccaacccgggcatagtcggtcagtgaaaaccttggatgtacctaaacaggcgagctcctggcagtcaacagataaaaggaacaaagaccacaaagcaaggaagcttgtggtggctggccagctgtgaactttgattgatatgtgggt

SEQ ID NO: 261621 - DNA, 887 bp, Glycine max
cctccactcggacttctatctgtactgatcttttcccctatcattgcttccgcattttccaattcctccacatatccacactctctccacccacccgccacccgcacttgaatcatgcgaaccgtgatgcccgcgctacctgcaggcatgcatgctgcgtaccagcctgacaaaaaacaaggggccaacgggaccctgtcttttatatctgtgcttatgcacaaaattgcctaactgatcctggcgaaacttctcatgagcatttcttatcaccccaccatctgtcgcctatctgaagtggtcaaccgcgttcatagacccttgatttcgcccaagccacatgcgaatccctcccacccactattatttttggagtggaatgtgagctgcttcaggacatcgggcctttctgatacagggctcacccctatcaacgactcttaacgtaaaccaccaacggcgattcctgactacactaccgggaaagacggatgtcttcgtaatggattttctccactcgcgaacgacaccacatgtttccccacccaacgacgaaagctcgagatattgcccggggagagaatacccatgctgactggctcttctacaggacaatttcaaaccgaaactgtgtatcttcatataaaaacttaccgcggaccgcgggggcggaaaacacccacccggggcaacgcattgtgctctctttaaatacacaaacgtaacgtggtctttttttcttcattacaccacaactagaatcgccaggttaaaatataaacccccccccttttggctcaaaggacgacccaccctcacgcatccatgggacaaactagtttgtccacttctatcctcacacaattggggagcctcccttcgtagtc

SEQ ID NO: 261622 - DNA, 160 bp, Glycine max
ctcttgtatcttaattaggagaaacctccgtctgcggtccatctgcttcaaatgtgaagtcggcgttgcaagggtattgcacaaatgttacactactacaattcattggaagaacatcgtaagattaacattcgctcttaaaaaaaacgattgtaagaac

SEQ ID NO: 261623 - DNA, 521 bp, Glycine max
agcttgtaggattatggggtacccatcacatgtggtactaggtggcggtcgggtgatggtgcacaacaagtttttccacatccacaaatcgcgcataaacccaccatcccctgttgcccacctccaactgagctcacgtactcccacgtagcccatatcctcgtttctctcaacaccgggtccccatcaatcctcccaagcttccccaacatccaggtaattcaacatccaaaacatcacaaactaacaaaccaagcaaaacagggcaaaggcagaaaactctgcccaaaactcaaaccaaaatcaccgctttttctcacttaaagaccccagtaacctttttctctagtacataagtctacgttttgaccgttgggatctactagcaaacatccagaactcattttgtactactctttccacagccaaccacacacaagcatttttctgcacaaaaccaaaattctgctgcacctatttggcagcaaaattctgcataagtgcagaatttcgaaactact

SEQ ID NO: 261624 - DNA, 294 bp, Glycine max
tgtaaggatggcagaaatcaaggaaggattatcaaccacaacctcacagtcattgtttcactcaagctcaagtgtttaggctcattccatcataaacaactaacacaagtcccaacctttgcatttcatctcatgtcatacagcaatgaacacacaaaatgaatccgaaggactttctagtcttgtaatggggttaggcttccaacaaattatggtttttctaggattcaaaagcttaggttctaggagagcattcatccatagataaaccttcacttttcattcattcacacc

SEQ ID NO: 261625 - DNA, 458 bp, Glycine max
  unsure (1)..(458): unsure at all n locations
atcttgacaagtgtgtttttgtcgattaaggctatgcatgatgcgtctgagccaaccactagatatccgcagctgctataaaacttaccctgatcgaaggtggtcatcaagaacacgtatcctctaggctcgactctatcccttgcaaaaccaaggagtggaccaacgagtgggtctatagtgtaccgagagaccttgagaatctagaaggttttccaatacacaatatgagtgaaactttcttggtcaacaaggaccctggaaaccgtaaagtttgcaatgatgacggagacaaccgcagggtcatcttggttgacnnggttgatgcaccagaagtccctatacatgaaagtgattgaacggagatttcatcgttagggtgtgtaaaaaaagtcaatggcgatgtttttgaaggtgtgcatataacacttttgggactggttctaatgtcccctata

SEQ ID NO: 261626 - DNA, 287 bp, Glycine max
tgcttgtggagcttctatggaggctggatctttgagcttcaattatgtcctttaatggtggttttccaccctggagatgcagcgtaataacatagatatgaggtgataggaaacgtcctacactttggaataagccatgcaagatgcaacatacattattggcatagcctaagtgataaaaatccatatggaatgatttaataattctaatcatgtggcatattgtggcaggaaacccaagtaacagacctttgggattatggcttaccatatgatgttgtatgggg

SEQ ID NO: 261627 - DNA, 497 bp, Glycine max
agcttctttgttagacctcgatcggtcatctttccaggccgaggtcgaccgtcatttttttcgatccatttcggtgaataatatttttttgccgagatgggcaaaatgccagtttcggccgaataaaggggaaaatgccagtttcggcccaaacgaaaagtcggttgggctcgcacaaaaaaacctagccgacctacattttaaattttttatgcaacaccaaaacaagaaaactttctgtgccgtaaaaaaaaaacattacatgacagcgagcgttttgaaaaacaaaattgcgcaacgtcggctgaaaaatatcagtcggggctttttcacgaccgatgtcggctattgagttttcaattcaatccgcgaacgaaatttgcatgatgtctgttaggaaatgttcgatcggcatcatcctgtgaagattcttttttaggcctcgatcagtcatcattcctgaccgacgtcgactgtcattttttcgatcaatatcg

SEQ ID NO: 261628 - DNA, 293 bp, Glycine max
tcaccggatgacgccgatcgaacatttcctaaccgacgtcatgcatatttcgttcagggattgaattgaaaactcgttaggcgacatctgtcgtgaagtagcgaccgatatttttcagccgacattgcacaattctttttagaaaagctcgctggtcgataatggtctttttacggcagagtaagttttcttgttttggtgttgcataaaaaagttacaatgtacttcggctaggtttttcgtgcgagttcaaccgacattttgtttcggccaggaaaacattagcccacctc

SEQ ID NO: 261629 - DNA, 477 bp, Glycine max
agcttgctctaaatttacattgatgtttgtatttatgggaggaggttgtatgtcatttttgttttaagagtagtgtcccactggtaaaactaactttccaaatgtttgccttcgcaggaaatggccccgaggaagcttgcctcaaagaggtccaggaaggacaaggcagccgaaggaactagttccgctccggagtatgatagtcaccgctttaggagtgctgtacaccagcagcgcttcgaggccatcaagggatggtcgtttctccgggagcgacgcgtccagctcagggacgacgagtatgctgatttccaggaggaaatatggcgccggcggtgggcatcactggttactcccatggccaagtttgatccagaaatagtccttgagttttatgccaatgcttggccaacagaggagggcgtgcgtgacatgagatcctgggtaaggggtcaatgggatcccgtttgatgccga

SEQ ID NO: 261630 - DNA, 293 bp, Glycine max
tctctaaatttatattgcaaaacagagtatctagacatagttgtactcaaatatattatgtagctatccttaatgttttgtgtaatatattttctgtttctcctctggcagcttaaacgatgggagcggaaggagtgtaaaccaaacagtcttcctatcttgcacaaaatgcaggagatgcggtttaagtcatatttggacgagaaaggggtaaagttggggagattactgaaatcttcaagcatgacaacagtgttatagtgaaagatttaaatttgaagacaaagcatgtc

SEQ ID NO: 261631 - DNA, 709 bp, Glycine max
agcttgtaattgattaaaccgatacgagatataactctgtaagcttaaaacaacttttgtaatcgattactataagattgtagttgattaaaacacagagttttatcttctgaagaaattttctaactttgaaaattttcttttcactcacacatgatgatgcatgatgcacaaatgatatgatataaactaagatgcaacatttaatataacaaataatacaaatgtcattcaagagagttggaaatgtaaaagataaaacttcttcaagcttcaaaactaagtcttcaatgttgctcatgttgctccctctatctctaacataatattcaagtatttttttatcatcaagttatttttaactttcacaaaccaggtttaaaaatattttcaaagaaataaactctcacatagagaataaaggcaatgcaaaatgaatactcatgaattaactttgctagccaaagcataacactttgagaccaaatgatcatctatgagagcttttttggaaggagttttttgacactttgtgtttacttatatcctaagttctttttcttcaaagtttcaatctttcttatatataggctttaattaatgggtactagagagacgccccgtgccgatgcacgggcttatactaatatgtaaatatttatacatatacattattacatgtatacacctatataattttatttatttg

SEQ ID NO: 261632 - DNA, 292 bp, Glycine max
tgataaaccctaatttgaggaagaagaagccagtgaccaaaaaaagctttatgaacacagacttcagtggcacgttggatagtctatgtgggactataattggcaacaatgcaccttactgacggggttaccttcgaatttaacggcaaagactattttacaacacttatgccaagatagggactattttttacatttcaataggatagggactaatatgccaaatgactacaaaaacagggaccaaaatgcctattcactcgatttttgaataatgagttttgacatttag

SEQ ID NO: 261633 - DNA, 628 bp, Glycine max
  unsure (1)..(628): unsure at all n locations
agctttacaaatcgtgaacactccatcataattagtattccaaacaatataatctggaggattagagcctaaaggaggtgccaaatttcgaattatatcaataatatgaggctataattcagacatgagacgctccacatcccactatcctttattgttaataaagaaacattcacgctcatcatgaccttgctgatttcctgaattacaaatctcagacaacttccctactcctgacacccaattatcagaccagaaccgagttgatctaccattaccaataacccatctcacattaggtatcaacttatcccaacaaattaaccataccacgtcagaaattataactcggtatgttggagctaatcactggaagtgtatcatacccacacttatattttgatctaatcacacgaacctataaatcatttggttttgtgcacaaattccatccagctttcagcatacaagcttgattcatagtactcgccattcttgaccaagactgccatatttttttcggttgcacgtatcctttttattaaaccaatgaacctttctcgaattttgactatctccccatatgaangttcgatacttaacaatatccttgcacactgattctgga

SEQ ID NO: 261634 - DNA, 293 bp, Glycine max
tcatcctcaatccaagaaggaagtgataaagaagattcaaatgaaatagacgaagatgatgatttcaacctttttgtaaagaaattcaacaaatttctaagaaacaaaggaaatcaaagaagatcaaatttcaaatcaaagaaaagggcagcagattcatcatctcttccaaaatgttatgaatgcaatcaaccaagacatctgagagttgattgcccaagtttcaagaaaagaatagcgagatctgaaaagaaaactttcaatgataagaaagcaaagaaggcctacattac

SEQ ID NO: 261635 - DNA, 550 bp, Glycine max
  unsure (1)..(550): unsure at all n locations
agcttgtaactcttggcaatttctttaaaactagtcacttaaaaagttgtgacttttgaaaaaatctttagaaacaagtcacttgaagaattgtgacttttggaaatgtatttttcgaaatcagtcactggtaatcgattaaatgtgactcttcattttgaattttgaaaattaaaacgtttagaatgtctggtaatcgattacaagtgttgtgtaatcgattacacaagtttataatgatttaaaactgttaaacacaagttgtaacttttgaaatttgaaatctgaacattttaaactctttggtaatgattttgtgaaaacttcttgtggtattcaatgttttgaaaagcttttttagtacttatcttgattgagtcttctcttgattcttgaatcttgagtcttgaatcttgatcttgattattcttgaatcttgattcttgaaacttgattcttgaatctttggattttgcttgactcttaattcttgaatctttggattttgcttgactcttngatctttggcattatcaaaataacccttgga

SEQ ID NO: 261636 - DNA, 296 bp, Glycine max
tgagatgaggaagtgttgaagggtgaaacttcctgcttttattgttgaccacagagtggtacctggagatatttcgcgggggtcaagaaaccttggggacgtcaagtggggtgctattgcccaaaaccaaacttgaccaatcccgacctaacccgggcataatcggtcaatgagaacctgtgatgtacctaaacaagccaactcctggcagtcaacagataaaaggaacaaagaccacaaagcaaggaagcttgtggtggctggccagctgtgaattttgtgtgacatgtggattg

SEQ ID NO: 261637 - DNA, 643 bp, Glycine max
agcttgcctgtccgatgcaatagtaatgatggcccgagttatgttggggaacggttacgaacccggaaggggtttaggcaaagacaacggcggcataactagcctgataaatgccaaaggaaatcgtgggaagtatgggttaggctataagcccactcaggcagatataaagagaagcatcgcgggaaggaagagcggtagtcaaagctcacggttgagacaagaaggtgaaggaagcccaccctgccacataagcaggagctttataagcgcgggtctgggggacgaaggtcaagtggtcgcgatatacgaagatgatgttccgagtacattggatttggtacgaccatgccctcctaatttccggctgggaaattggcgagtggaagaacgccccggcatttacgcgacgagcataatgtaaacctttacggttttaaaagctctatagttgggcctaggctttagagtttttcttttgtaaggctttgtgtcttttgtttttggattataatacaaggatctttctttatctgttcctacgtctctacccattctcatccatttgcatgtttacttctttattttaaaacggcagatccgatgacgagtccctcgaagtactaatacctgggacccgcct

SEQ ID NO: 261638 - DNA, 297 bp, Glycine max
tgcacccttgtcttcctattctaatttccatatccagctcttcaagtgtaagggggagtcctttttgatggactcagtccatggttgcctttgagaggaagcaaccacggttggatgaaccttcaatacatgcatgttaaaaaaaaagtatttttagaggtttttatgcaaactattttagaaagatgtgggcttttcctttgcaagcatatctcctacctttcattttctcttttttgtgctttcgaagaaatccaaatacagaggaggctctatccaaatttccttacaatataa

SEQ ID NO: 261639 - DNA, 509 bp, Glycine max
agcttcctcggggccatttcctgcgaaggcaaacatttggaaagttagttttaccaaggaatgctactcttaaaacaaaaatggcatacaaccttctccaataaatacaaacatcaatgtaaatttagagcaagcttatgcgcatacttctttacgaacgttcacttgcacaagacattcttataactaagaaaaatgcacccatatacaatcaaggcaccttcgttacctagattatttatatgtacttccaaggtgtatttgttacctacatctcatgaacttccttggctaaatttacatacatgcgtactcaaagcatttggggtaccaaaaattgcacatgtgcacattccggtatttctaatacttatgcatatacaaactttgtgatgaatcttggctatctacacaataaggtgatacatttcatgctttactcaagtgtttttgctacctaaagccgcatgcaaattcaagtacattttcttttgctgacctaaaatgta

SEQ ID NO: 261640 - DNA, 294 bp, Glycine max
tgaagcagtgcccccatctccaccaattattatcatctctgattccctatttggagaagcagctgctccccctgattcgccagttggaaaagctgctattctctctgattcccaatctggagaggctattgctctctctgctttcccagttttccatctgatagatgaggaggaggcttagactcaagatacccaggatctgtctcgggacttttaaattcctgatggttttgctttttggataatgattataactatattagtttcagtacattgtttttagtgattttaatt

SEQ ID NO: 261641 - DNA, 564 bp, Glycine max
agctttgtccacaaaaatcactgaaaaaacgttttaaggtccaacgccttgaacggtcctctttgcttttttatcggttaacatggaccgttcgaaagcgtaaaatcaacacatcactgccttttgaaagaactttgtaggtttaatttcctcttcgatggagggtacgtaagagcaagagccctgcttttgtcgacctcaaaaataaaaaagaaataaaagtttagatacataatttcacacaattctaatctaaggctgttgtcctttgggacaaacgtgagaggtgctaataccttcctcaaacgtaatgataactcctgaatctggaatattcttcatgaccggtttcctttggtttttctaaccgttttctttcaataagcgttggtggcgactccgcgcattttcctcctatggaagacgcacccgtgagcctcgcctcgctcacccgcaaaagggtatgttgcaatagaggggaaatttctttaatatttgtctttatttcaaaatgtatttccttcttaactaatctcttggaggagacacttacctccttacact

SEQ ID NO: 261642 - DNA, 292 bp, Glycine max
tctaaactttatacaagaatgaagctctaataccacttgttagacaagtggcctcagatatcttaagaaggggggggggggttgaattaaaatattccaaactacttcccccattaaaaatctatttcactttctttttaagttataaattcccttaactatgaacttcttaaatattaattcaaataaaacaatttgagtatgaatataaatcacttataaacaaatgatattaatggaagagaaagtgccaactcagatttatactggttccgccacacccttgtgccta

SEQ ID NO: 261643 - DNA, 743 bp, Glycine max
ggagaaacaccaatccattggtgatgcatcataattttctattgataaattttaaggactgtaatagccttagtaacttaagacagcaattggattcttcaacaactctaattctagacaatgtagttacaaagtatgtgcatttttcaatagtgagatccaaacgtattggatatatatccctacatggatgtgaaggattagaatgtggtgtactttcttctctcatatgtctccatttacagaacttgtatcctgaattcatcatttggaagcttgtctacacctctagtttccatggatatttttgggtcatctacagccaaagcatggtgaattttcaagcttcaaagtgcatatgggtgcaatgtcgctctaagtttcaagtaacacaagaatgtagaagaattatatgaattacttaaatggtgtaaatttcactgaattagaaacatcatttgcaccacaaatatcagagaattccatggatttcatgttggaatgggaaattaccaactcatgaataccattagctagaagggaatatatatatatatatatatatatatatatatatatatatatatatatatatatatatatatatatacacacagatgatccttctggatctcttttgttcccgtgttgttttctctttggcaatgggaaaatatgagctggagctaattacagaacaaaggattatatttccatggtttacacaacatattgttggaaag

SEQ ID NO: 261644 - DNA, 297 bp, Glycine max
ttggaaaatagtagatttttgctaactggacctcaacttcctctaaatatacccctcactaaaataaaatacacatattttaagtccattttcgtgaaaaccaactaaacataccacaccacataaaccaatcaccgtatttttattaattaacttatttaaaaaatagtttaaatttatcaatcacttatttaatataatggtaattcataaattgaacttttgaacacaattaataagaaagctagctagatataaattactaccatttattgacgatacgaaaataaaaagtat

SEQ ID NO: 261645 - DNA, 238 bp, Glycine max
agcttgttagcatcggactgataaaccaaccgaatgtgtgcgaaagtaagatggtggccagcatgctcaatacatgacttgtaggtctcggattctgctacttgttggttcaacaacttctatcaaacgatgaccagttgaaaaacgagcctaacctttcacggatttgactacgatatactattggagagtggacgcgacactctctttttcaccctcaattgtcggcttgcctatc

SEQ ID NO: 261646 - DNA, 283 bp, Glycine max
tgtcagaagcactgttctggacagatgtgctgctgcatgcgtcagtaaaaaggccctactgagaaatagctcaaagctggaacagacggactggcctgatcaaaatcgaaaggtatgcatacctagattaccttatggcagatggtcgaccctcaagacatcttcatactatgagttagccaagaaacatcagactcagtctatactcatatcctaatttgctgattacctttcgtcacggaagtactgactactacactacgtatataaataatgccctgcc

SEQ ID NO: 261647 - DNA, 540 bp, Glycine max
agcttcatccgtagatccctcttgtaagactagacttagatcaaccaatcctcgtaagtttagcctaattcatcccaagcttaatctgtagatacctcttgtaagactaggctcagtttgaaaagcattatcatcacagcataataagaaaactaaaaccccgtaatccatccttggtaatgcagttattcaatcctgcttctatcaagttctaaggtaacaatacatttcccaatgataaagtcacctaacagtacacacaagtgggtgatcaaaccaagagtatgcagaaattaagcattgaaagaagcattgaacacaacaaaacacagttaattagatataaagtatttacatcaactattcattagaaatccccaactaaattgtttagccaaccatacacagaaaccctaacccaaatgagatagagagtactgaataattgttgcttacacaagaagggggatcattcctcctcttctcagcacctcacaatcactctaacactcacaaatctctctaaaaatgcaaaaccct

SEQ ID NO: 261648 - DNA, 294 bp, Glycine max
tgaaggtaaactagatgccttggttaacctggtaacctaactggtcatgaatcaaaaatctgcacctgtttccagactttgtggtttatgctcctctatcgaccaccacacaaaccttttcccttctgtgcaacaatctgaagcaattgaacagcctgaagcttatgctgcaaacatctacaacagacctcctcaacctcagcagcaaaatcagccacaacagaataactatgacctctccagcaacaggtacaatcctggatggaggaatcatcccaaccttagatggtcgaa

SEQ ID NO: 261649 - DNA, 581 bp, Glycine max
agcttgaactactataatatagtcacattccaaccataaatttcgccaaccattctttccagccaattcaattgccaaaatggctcccataattttcagcaaaaagaaattttttaattcccaaattggaagcaaaacgtccaaggaataaaaatcccgccagatcccgcaatacctagagatttcataatcaacaattcagaaacagaagagttcatgacaacaagggtgtgattacccgtgattcttactttgcccatcaccattgatatggctccatggatagagacactacggttttgaaacctgttctggtttcaatgaacatactcaccgaagcagctatgtctgtggggagacctattgagtcctgaatggtctctgacgcaaccatttatccccccaaaaattgatagaagagtcacgtcagcatggtcattaaaatttacaactatgtgttaagttaaaataatttaaaaagtttaactaacctttaattttatttttatagctttcttccttttttccttcgaaacgcactgtacgaaatttgttaaacgcatttgaatggcgaatcgcac

SEQ ID NO: 261650 - DNA, 293 bp, Glycine max
tgtccgcataatctttgattgtctccgaatctttcatcctctgcatctcaagttctcgaatcagattcaaagcttgcattcctttgattttctcactgccttcgtactcttccttcataaaattctagattttgtgtgccgttttcatcgtcattattctgttgaaaatgactggagatacagctgtgaacaaaattgatttggctttggactttcgaagcctcctttctttgtgacttttcatttgggcaacaatgggattatttggcaaaggaggaacttcgtagtcctct

SEQ ID NO: 261651 - DNA, 499 bp, Glycine max
agcttgcaaaaaattttatatcacaattcaatccctcttcttcaaaattttttctttatactactggttgctatcaaattttgacaacaaatgatctatcttgtagtagtttgtgtattcaactctatatgagtcaaactttgacattttaggaacctttacctctagaagtcctctttccaacctcctctagtctcataattttttagtttatatagaatatttgttgaatatacgatattggatgttttgtggaggtagcttacgttggggtaaacccatataatttgttagtgtggatgttttctttcctatcgcttgtttatttctattgctgcgcgcttaattatttttataaaccttattttgaaaaagattaactttgttatttgatcaaaaggtcttcataaaaatgttttcttattagaagcacacctacttcaagcaagaaaagaaaagaaaaaccaaaaattgtgaataacaaacctatgattttgta

SEQ ID NO: 261652 - DNA, 293 bp, Glycine max
tgagatgaggaagtgttgaagggtgaaacttcctgcttttattgttgaccacagagtggtacctggagatatgtcgcgggggtcaggagaccttggggacgtcaggtggggtgctattgcccaaaaccaagcttgaccaatcccgacccaacccgggcatagtcggtcagtgagaacctgtgatgtacctaagcaggcgagctcctggcagtcaacagataaaaggaaaacaagaccacaaagcaaagaggcttgtggtggctggccagctgtgaattttgtgtaatatgtgg

SEQ ID NO: 261653 - DNA, 426 bp, Glycine max
agcttgagatgaggaagtgttgaagggtgaaacttcctgcttttattgttgaccacatagtggtacctggagatatgtcacgggggtcaggagaccttggggacgtcaggtggggtgctattgcccaaaaccaagcttgaccaatcccgacccaccccgagcatagtcggtcagtgagaacctgtgatgtacctaaacaggcgagctcctggcagtcaacagataaaaggaacaaagaccacaaagcaaggaggtttgtggtggctggccagctctgaaacttgattgatatgtgagatatggtctctggtaatcgattaccaagggtgggtaatcgattacaaggcttaaaaatgaagataggaggctaagatggtctctggtaatcgattaccacggggtgtaatccattaccaggcttgaaaa

SEQ ID NO: 261654 - DNA, 293 bp, Glycine max
tcggaagaaagtgatgaggtacaagccctaaaggcagagcttgaaagagcccgagtagtcgaagagaagttcaagtccatagccatcaaagtctgaaaagagtatgatgaactaagggacgtcaatatggccaccgctgatgccttggaacgagaaaccaagaaggcccaaaaggaagaacacgtgccagcaaagttttgaggggctttatagggcagcaatagtaagctcaagctccgaagaggtgaaaggaatcatcacgggtcaaaggcatgatcttgaaggacgagcta

SEQ ID NO: 261655 - DNA, 556 bp, Glycine max
agcttgcatgatttacattctacccctttctcaagcaaattcttaagtcttcttgacatcatcaaaatcttcatgatttacattctctgaatcacttgaataatttatgacattatcttccctagtgatatatcctttcttttctttcttctctttgaaattcatcttgtcggatttttccattcttcttttaaacacaggacaattgaatctcatgtccaagttgatcgcactcagcattttggggctaaagaggaaccttcttctttttctttcatcatcatattctttcttctctagtttttatttttatttttatgtagttgcatttctccctaccattgtaggaataaatgaatcaaattcaatggcttcccatatctttagatttatggcttctataaagatctacattcgggttttccaaaaatgataaccctcaccattgaacataagagcctattgatagaattttcctcagaaaatggaaatttggatgacgccatatctattcttgaagtttttaaacttatacaagaatcccgctctgatacca

SEQ ID NO: 261656 - DNA, 291 bp, Glycine max
tggacaatctcaaagatatcaccatgttaactggagggataaggatgccatcacaacgttttacttcacacgcttccatgaacacataacaaaaaaggatctctgggctcagttcaagaaatggggggacgtgagggagattttcatccccaaagacaggaacaaaggtggaagacgatatggttttgtgaggtttaaaggggtatccgacgaactcagattagaaaaacagcttgataacatcatattagacggactcaagatgtatgttaatgtcccaaaatacgggag

SEQ ID NO: 261657 - DNA, 294 bp, Glycine max
agcttgagtgatacctttatggtcacagtccacaaataacacttgaagcgcctccatccaaatcactttaataatatggattacatctccctctttataaaaaaacacgctcttaaacatatagcaaaagtttagtttagatggctatcaaataccctagtccttaccacccaagtataagcatcccataggcttgtcacttatgggcatcctgccttaggtttatagacattatatgattagcctagaatacaataactagctatatttgaaaagcattatactcctcacact

SEQ ID NO: 261658 - DNA, 291 bp, Glycine max
tggagatctttgctgctggttactactactgagcttgcccatcctaccactattaagcacttcactgttaatagaagatgaaattgatagctttttcttgcatggtgaatagctatcagagttcatgtccacattccccccagtccttatttttggggagcttgttgatcttgcttttgcttttgctgattctgttgcagccatgtatgctggagttgcaggagagcttgaaaatgagtggtcttctcccactgaacactgcctcctatgaggaaaagatcttcttgaacc

SEQ ID NO: 261659 - DNA, 527 bp, Glycine max
  unsure (1)..(527): unsure at all n locations
agcttcacattgatggcggcccgtattatttaaatgcatntattttgtatataaattttcgtgctttacttatgctttcttaaaaatatttataataaagctttataatggcacatttgattttgggtaaaaaatatctcacagcaaatgatctccaataataatgaacatagaatgtgcagaatcatgtcctgatctggcattgttaactgcaatgaaatgttcaatgtccaacatgaacatttttgctagtgtgaatattagggggaaattttaagtttaataacacagcaggggtgtataaccacgaccataatttgagacagatcagctggcaatgaccatcttggttattggttctgtgtctaacagaaaaacagaactgggtaacatgaactccttttatactcaacttaatggaacatctttaactgcaatatttaaaaaatgtctacttctaaaatctcattatgattaaacaccttttagttccttatatctacattgaacatttgggaatactgaaa

SEQ ID NO: 261660 - DNA, 295 bp, Glycine max
tgctttagatcactactctaattgggatgaacaattttggaccattctctggttggtaaatgatgtattggtaaatatatttaaagcggagatctatagaactactcacagattgcgtgttgcaatttgttttgggaggcgagtgattaattagtattcactcctcattttttaggtgtaaatactttataacctttggattgaggggctaattcaaatagctatttgataggatcctaatattgatacccctgggacccttaattaatatattttgcatattcaaaaaaatatt

SEQ ID NO: 261661 - DNA, 534 bp, Glycine max
gttgaactgcacgcatgcaagcttatgttaaatctctagacattatgattagaagaaacctttttaagattcaactctttctgattgagataaagaattactaaattggacgcaaaattcatacgtatactcttatcgatgctaaaatacaacatgtgaatgaaatgaaggaatactcgaaagatgaaagtccatggctaaacatatgactgaataactgtcaccctttaaatcgtaggccatatagataagttctaggaatacatgcctaaatcaaaacatggaggaattatgtatcgggaattgaaggtccttgactatgttgatgtatatgtgtggtctttaaacgaacaagcgcctgttaaccatatatacagatactcagatactcagatgaccctgaagcatagtgtgatagaaatattattgaacaggtcccataatacatctctgccatccgagttatgtatggaaccttaattaagttatgcaaaatcttataaaagaggtgatgacttggtattaactttgttt

SEQ ID NO: 261662 - DNA, 464 bp, Glycine max
  unsure (1)..(464): unsure at all n locations
acctacagaccatttcgactacntttctacattgtcgccttctcatcacgtaaccttagatatcttttacatgtactatatgtatcgctattttcctcctttttacnnnnccagcccgcgtgtgacgctctttntaacagcgacactatataatactcacacttctatccaaatggaccttaccttgaattaattcctctcgatagcacttttttatccttgcattcatttccttgattagaagctcactactaaccataagctgagaaacctagatatctccataatccttaaagaatattggagctctgaaatcgtactgataatagttgccgagggtctctgtttgactgtatgacctgttttaacggctatgcttactaacatattttgctccaagcatgatacactttgcatatagatcatactgtccaacgtgctgattgatatgtggtttactgatc

SEQ ID NO: 261663 - DNA, 516 bp, Glycine max
agcttcaccttctggtcctcctcatagttgttgcatgagaaaacatgctctattttcatctcccactccaagtaggcctctggatcattctttcctttaaatggaggaatgttgagtttaataccatcaattcggttttgtctaagaacaccatcattccctcttctcctcctttcttcttcattatgatctctattctccatttgatccaacctctcatggagcgcatcatctcgttgtttcattaacctctccaaatgttgcatcaaagcttgcatttggaattgcgaaagccccactccatcattaggattagtacctgacatcttaaacaaacaaatcaaacgttacaagacaattatagttgctgtttgaatacctcacccactcaagtgtatcacacaattatggcttttctctaatgaaacactcttgccttttaccactctaattccccttgagttcttacgcaattcaagagaatatggccacaacaaagaacaattcaccaatatg

SEQ ID NO: 261664 - DNA, 296 bp, Glycine max
tatccttatggcttgcctccggacttcactccccgtgccactccgaaagatttaagccaagcccctacttttgaggggcaactcccgccttgtgacgactatcccgggcaagacgatgaggaaggagatacccatctcggccccctgctccaccttaatgatccgtccccacatgaactaccccaaccgaacatagtccgccatatcccggcctcacccacacccgtaaaagaatctgttcccttcgcggaagataagggaaagatagaggcgcttgaagagaggttaagagcagt

SEQ ID NO: 261665 - DNA, 558 bp, Glycine max
  unsure (1)..(558): unsure at all n locations
agcttatcctagtacaagtaaaatcaacatattgagcctttagtcaacattagattttagggttttgataaacctatcaaccattagattgtcgagagtttatcaatcattagtctcctgagaaacaaaatcttgatttatagtacaagaggccctaagatgagtcagacgaagctcaccattaatccacatgtagagaaagcttacctctttctgactaaactcttctttaagtcgggtgatatcttcttgaaattgaacattttcttcttgttctcattgtgcataagcctttgattctttagcatggactttcaactcgttaaactcttccaacaatgcatcaactcgctcttgcgtcttcttcaaagcaacatttttctcttcaatcaatttcaatgggtttgcatcacccaaaaagtgcttcaattttagaaaanttctataacttggagtgataaagtcagatacctttactccaaccaagatcaaaatagcataatctaagttagaagagccttcttttaaatggactcccaatctttcgacaagatgaca

SEQ ID NO: 261666 - DNA, 296 bp, Glycine max
ttgaagacttgaattattaattgaagagctcatattcaaattctttctgtaaattcttgtaaagtttggaatagctctcaaaacactttgtatattcgtttgtaagatgattgaaagttggtcagtgtgcaataaaacaaataaatcttctaatttgtattagagtcaatagtgacttggtaggacaaacaatactagttgtaataagcatggtgtagtgtcataccctaatttcgtccggggaccattgtttgttggcatgtgacctctgtttgaccacttcaaaatgtttaata

SEQ ID NO: 261667 - DNA, 589 bp, Glycine max
agcttctacattcaatttcgagcttttcgatatattactggactcaatcggacatccgagtaaaaagttatcgtagtttgaatttgctcagggcttcagaattccatttcgagcgtctggatatattacgggactcaatcggacatccgagtaaaaagttattgttgtttgaatttgctcagagcttcggtattccatttcgagcgtctcgatatattacgggactcaatcagacatccgagtaaaaagttattgtagtttgaatttgctcagggcttcagtattccatttcgagcgtctcgatgtattacgggactcaatcagacatgcgagtaaaaagttattgacggttgaatatgctcaaagcttctacattcaatttcgagcgtttcgatatattacgggactcaatcagacatccgaataaaaaggtagtgccgtttggaattgctcagagcttcaccaatccatttagagcgtctcgatatattaccggactcaatcagacatgcgagtgaaaagttattgtcgtttgaaattgctcagagcttcaacattcaatttcaagccgttcgaaataatacgggac

SEQ ID NO: 261668 - DNA, 295 bp, Glycine max
ttgagaaaattcaaacgacaataactttttactcggatgtctgattgagtcccgaaatatatcgagacgctcgaaattgaataccgaagcgctaagcaaattcaaacgacaaaaactttttactcggatgtctgattgagtcccgtaatatatcgaaaagctcgaatgtgaatgtagaagctctgagcaaattcaaacaacaataactttttactcggatgtctgattgagtcccgtaatatatcgagatgctcgaaatggaataccgaagctctgagcaaattcaaacgacaat

SEQ ID NO: 261669 - DNA, 550 bp, Glycine max
agcttgtgcccctctctctatctcgctcacacgaactactttacaacattacttgctttactcacctaatacacattcttacttgagcattggattcctttgttttgcaggtctcccctcctgtcaaaagcacttctccaagccaacgttgaagttcggaccccactcagccacgtccatcttgacgtgccacggttccgaattttggtaagaacagtttgtaattaaatttttcagttcttttactattagtattatgttaactataattatattaaaatggaggaagattaatcattatatttttatttgatataatctttatttttatcattattattcataatatattgtagagtaattaaatgtaagaaaatagactttcgtgtgtctctctctatatatatataataaaaattatttaaaataacattatgtgtgtaacttgattttattctttgatgttaataatttaagtaattttaaatagttatttataaattatttagaaatataaattagttactttaaaatattttgtcaagaaaaa

SEQ ID NO: 261670 - DNA, 283 bp, Glycine max
cttttaccaatggacttaccttgaattaattcctttgatagctcttttgagccttggttccctttccttggtttgaagctcactacaagccttaagtgaaaaaccatgatattaccatatccttaaagaattttggagcttaggaattgttttgggaataagtgtgggggggttttgattcattggacaacttggtttgttggctatgcttcatgatgtattttgggccatacttgatgtacattggatattggttaaatgttggacatgctgaatgaaatgt

SEQ ID NO: 261671 - DNA, 440 bp, Glycine max
agcttttgaaccagaaagaaatattcactgcaaatgctgatagaaacttggatttctattttaaaatatgaagagtaactccctgcagcagagctagacatctgtaatctctcaaaaacagaaatgaatatggttacagacactttgaggggtctgcttcctccctgcccatgggcccaaaatgctccaggatccgttcctcccttttatccttgctcctactgtcccatacccgtttccacgtaggcaaacgatagacgggaaagtagatggggaaaggtgtatgttagaaaatacccttggaagagttagggagcttccagttgtaggacagctaagatagctgttagttagatagagagctgtcagttgtaggacagctaaaataactgttagtttgttataactaactgttagttagttagttataaccaattgtg

SEQ ID NO: 261672 - DNA, 457 bp, Glycine max
  unsure (1)..(457): unsure at all n locations
actaactcgcctgtgactgttgactattgcaaatttcgtatatcatctatataacacaatttctgacttcacacactatatctctntatatataaanntanatcnnaagaccctagtgtgacgctcttgtaataaccctctcttatactnatgcttgcttggaagaaaaactgatgctttgggtaacttcgtaacccaaccgggctttatccagaaactcgtacccattgcaaggggttgcggtttgtgctcctctgctgaccaccatacagacctttgcccttccatgcagcaacctggagcagttgagcagagtgtgaattctactgcaaatatctaggaattagcgccattgcctctgtagtataaataaccacagttcaccaatattcacccacagctatactagaaacaataccttggatggaggaaacaacctaacctcagatggtccaac

SEQ ID NO: 261673 - DNA, 586 bp, Glycine max
agctttcaacaaatgtcttcacaaataatcatcacacagcagaaagctaacaaaactacccctcatatctcccaaaaccccatacccacgaaaatcaagagggaaagaagtccacccaaacctggattttcgaagtcccgctcgtagccacgcacttcacgactccgaaaatgctctcctttcgcgatttggagcagaaatgagcaccaaaggttggagctttgttggggtttcaatggagaatggaggagaaggaaaaagcaacgtgaggaagagggagagcttctgaattttctgttttggctgagtgaggagagagaaaagctttttggtcttaaataaaaggttttcctctttttctattattttattcaagctctgccacatgtccctatttgattggagcaaaaagggcccactttctctttttgactgtgacccatactcagtcacaaaagtgagaaaaatctgaccgttgaaacgctaaaatcctgcctcggtttgcgtgccatttctctggttccagtttttcgcgtttctctgcgtccgtcggggccagtttttcgaagcaagcgatacgtatatc

SEQ ID NO: 261674 - DNA, 290 bp, Glycine max
tcttttctaaaaagttccttccctggttggtgttttgattggtattatgggtggtgtttggtcttggatgtgcaacaagtggattttgtggcagatttaggggtggcctttgcagatgattgggcactcttggttggtaaggtggtgagtaataggaatgactgatatctgctgagtattgatattgttggggaagatattggtacatgggatttaaagggctggtgggaaatttggccatgtatgaaccatagtcacggcatgggtttctccctccttcttattccctc

SEQ ID NO: 261675 - DNA, 620 bp, Glycine max
agcttcgagaacactccaaacatcttctcaaagatcccaacggtcagatcgtggaaaagtgtcttttgaagctacagacctaattttgagaagatccaacggttaacgaagggtgggcaccatttttaccgaggcagcttcatgtagcttcctcaagaagcttcattaagaggcttcttcaagaagcttccccgtggcttctttgagaagctttctcaagaggcttttttgagaagctagatccttatctacccacacccttttattgtagaagcaaagcttcatggtgaatcaaaggtgattcaaaggtgttttgatgataacaatgatgataacaaaagatgatgacaaaggtgatgacttaaagctcaaagattaatcaaagaacaactcaagtgaatcaagaacaattcaagagttcaagataagaatcaagatgaattcacgactcaagaagacagtctagagtgaataatcaagattcaaggttcaagatcttaagaatcaagatcaagattcaagactcaagattcaagaatcaagagaacgcttaatccaaatagtatgaaagcgtttttacaaaattgagtagcacatgacttttttcaaacatgtttacc

SEQ ID NO: 261676 - DNA, 535 bp, Glycine max
  unsure (1)..(535): unsure at all n locations
atgaatactaagagatatgaaacatctgcattcttctgccactgatgttcagctaacatcnccggctatacattantcatattatctaatntanntnttctncnnnnncaggctcaagtgttgacgcccttctattcagcgacactataaaatacttcaaccttgtatggttaaatgtctcaccaattgtcacgtgcctcatgccaccaatttgtttaatcgtgggctacacagagaacatctttgcctaaacaaaagtcaaggttaaaccaatgacctctgccttatgcctcttttcttttcatggcctatatggtagccaaaagtcaatttgatcccaggccatggttctgattgaagttggaaaaattgaaggccggcatattatacttattgcccagtttagaagatgctatttctccccctttacttttctttggacattcattgatttcaactttgcattggtggcatcttgggttcagaaagaaaattcaaaatcgtctggtggttcccatggtcattatacttaccg

SEQ ID NO: 261677 - DNA, 675 bp, Glycine max
  unsure (1)..(675): unsure at all n locations
agcttaggaatagaggataatggcccaggttcaagttcatttgtggtgttgcaaagccaccatttcgtcagatttagacttcgtgtacactcaatcaaatatttaattactatcttaccgtttattgtgtcgcccatattccactaaaaaaagtctcgtgggtccatctcaggtataccttgtgatatgtgaattgtctttttcgtggttagtgttagtcctataatgtaaaacaaaattaaataaatatcaatatataacaaatttattgagaagatataaggttgcctcatagttggaaaaggatgaaaggagaagtcataaattcaaatcctctaattgatatttttaataaaactaataaattaatatatactaataaaaaataaatatttattgagatttattatgcttctctcttgggtttcaatggcaataaaatttgcttgcttccttaatcaactgagtaataagtgagctttaaaaagtaaagacttgtgtggataaacttctggttaaacatttataagatgaagaaaaattataaaaagatgcaatacactttagataaactaaaatagtttatgtataaantaataatacgaatttggagaaactaataatatgatantgtttctacaattagtttattcacaagctattattttaacttat

SEQ ID NO: 261678 - DNA, 312 bp, Glycine max
cactattgcttactcacccttcggagtttccaagtgccgattcgtcttcttctttagtccagtcttcttctggcttcaattcattagagggctttccttctgtgtccagcatcttgggatgttcccagcctttgatgacagctttccaggttctgctatccagtgatttgaggaaggccaccattcttgctttccagtattcatagttggttccatcaagaattggtggtctgttcactggtcctccttctttctccatgttcatcagaatttatctccctagatctcactcagtgatttcgagtgcccgct

SEQ ID NO: 261679 - DNA, 403 bp, Glycine max
  unsure (1)..(403): unsure at all n locations
agcttcaaactcgaaggtggaggacacatgaactaaaattcaattcatggggctccgaaaaaggttgagaatggagaattgcactaagcaataactacgcatagctcaaaactcgaaggtggaggacacatgaaccaaaactcaattcatggggctccgaaaaagggtgagaatggaaaattgcactaaacaatcactacccatagttccaaactctaaggtggaggacacatgaacgaaaacgcaatttatggagcttcaaaaaagggtgagaatggggaattacactaagcaatcactacccatagctccaaactccatgggggaggacacatgaatgaaaaccatatntatggggctcccaaaaaggttgaaaatggagaatagctctaatgaattacta

SEQ ID NO: 261680 - DNA, 295 bp, Glycine max
tgaaggcaaactggatgcgttggtcaacttggtaacccagctggccttgaatcagaaatctgtacctatcgcaagggtttgtggtttgtgctcctctgctgaccaccatacagacctttgcccttccatgcagcaacctggagcagttgagcagcctgaagcttatgctgcaaatatttacaatagacctcctcaacctcagcagcaaaatcaaccacagcagagcaattatgacctttccagcaacagatacaaccctggatggaggaatcaccctaacctcaaatggtccagc

SEQ ID NO: 261681 - DNA, 503 bp, Glycine max
gctgtccttttatttgacaattctctatgtttgagcacttataagagaatttctggttttataatgatatatatgacatattccagccgagtacacactagtgtatggctactactcatttgctttttaaaactcacctcctcctagtcattcattgctatagcagttgaccattataatcctatacgaccttatgctttccacaaaaattttgcgtgacgaaacctgatctcgcgggtatgcacttctctgttctgcatcctgtatcacaatctttactatttcgaaattggtagcaagcttattctccattatgttcggtttgttattttcaaaattgctgacccctcgatgtttttcataacattaacactcctctgtcgactactctttctgtcatacgctcaccgttgtctcacatcctccccaacatattttatatatcttttactactaccctatccagtttatcttacccagtaaaggaatttactatttgtccc

SEQ ID NO: 261682 - DNA, 549 bp, Glycine max
agcttgcacttcttcactttcctcaaggacttcagcttctttcccacttgggcctttaagctttgggagccaagttatcccttgcctcctaaacctcaaccacttgtgatagccgctgatgacgccattgctacttcccctaagctccttatctttcctttccactgtattccatgctttatggattctctgaagtatcctcacattggcttcattgaaacctcgtgcgacgaaaggcgcgatgatctcctccaatggtgcacctctcatagggtagcctagttgtcttatggccagcatgggattataattaatacaaccccttgttcctatcaaggggatgtttgggaatccttcacacgagcacaacactcctgcccctccttctttccatcgggggaactagctaatggacgctcctaccatacctgccaagagttcttcttaattcgcttttcccttttcggcgcacatgcgatgaccttgtagaggacagacaggcctaccttcatgacaaaaaatgtgggagaccaaccacacataaagagc

SEQ ID NO: 261683 - DNA, 138 bp, Glycine max
ttccatatccttaacagcaacaaattttgcaaccaattaccaatcatatacaaatgcctaagggctgaacccctaaatgaagccttgcggcccaatttatagccaaacatgggatgtggttgccaaccaactccccca

SEQ ID NO: 261684 - DNA, 608 bp, Glycine max
agcttgctctaaatttacattgatgtttgtatttaggggaggaggttatatgccatttttgctttaagagtaatgtcccactggtaaaactaacttttcaaatgtttgccttcgcaggaatggccccgaggaagcttgcctcaaagaggtccaggaaggacaaggcggccgaaggaactagttccgccccggagtacgacagtcactgctttaggagcgttgtacaccagcagcgcttcgaagccatcaagggatggtcgtttctccgggagcgacgtgtccagctcagggacgacgagtatactgatttccaggaggaaatagggcgccggcggtgggcaccactggttactcccatggccaagtttgatccagaaatagtccttgagttttatgccaatgcttggccaacagaggagggcgtgcgtgacatgagatcctgggttaggggtcagtggatcccgttcgatgccgacgctatcagccagctcctgggatatccgatggtattggaaagagggccaggaatgctagtatggccagaggaggaaccggtctgatggggttgatgaagacgccatcgcccaactgctatgtataccggggca

SEQ ID NO: 261685 - DNA, 295 bp, Glycine max
tatttcagggtatcagctcataggtatgttgatgtcctcatttctgtttatatgcttcatggggaattctgatcaccatcattctttgtacttctttctctcgacaattttttaattaaagcaaagttaattaaatggacaacttggcaagctctactaatttctatcaatggaaggtactaaatcaaattaacatggtatacaatgttaagagaaatggccctgtattactaccaagtaccaacatacaacatcattccactaattcaattggaaggccaacaagcaatattcc

SEQ ID NO: 261686 - DNA, 676 bp, Glycine max
agcttatagttattggagggagaataaaacaatccaaaatctaattgtacctttcaagtaacgaaaaattcttttttgcgcttttagaagaagagagggaggagcctccataatagcgacacacaactcccaccgtatataaaatatcgggcctttgattggatagaaaccttaaactccccacaagactcttgaagatcggggagtctaccttctctcttcataaacttgataacttaagccaccttccataggtgtgttcacgggattgcaatcaaacatattaaattttttcaacactttttttgtgtacctttcttgtgagacaaagataccattctctgtttgcttcacttccattcccaagtaatatgacatgagtcccatatctgtcatatcaaattcacgagacatggactccttgaagtcttcaaacaaatttgggttattgccggtaaagataacgtcttccacattaagacaaattaataagacatctccttattaaaagtttaacataaagagcatacttttcttgacatgaacaaacccattgtttggaagattgtcaatgcgatattccatgcccttgggcttgctttacacatacaagccttgtcaattcagaaattttttcttgaccttaagaaaaaccattgctgtcacataacatttt

SEQ ID NO: 261687 - DNA, 297 bp, Glycine max
ctcttagatgaccaatggatggatgtatctgccttagttgtacacattcttccagatttaaccttgcaagatttaggtcctctacaaaatgtggcaagtttacgagacttttgcaatctctcaaatttaaaacaataaggtttcttagaagaccaatggatggatgtatctgccttagttgttcacatctttcgagatttaacttcttcaaaagaattaggtcctctacaaaatgtggcaagtcagtgagacttttacaccctcccaattctaatgaaggagtaagctttcttagac

SEQ ID NO: 261688 - DNA, 700 bp, Glycine max
  unsure (1)..(700): unsure at all n locations
tttnattataccttcttctattttttttttttccgacataaacctactttacccccctctcgtgctatgtggtatctaacaatacaaactagtgtgcagcggaacaccacacattaatgatactgaaaccctttgtttctaattttgacactttcttataaccgtattttctccctcaatcgctcaaaacgggtgaaatatttcatgcgcgtccctcaataaacacctgcaaggcttacttggcgggtctttcgtctttctgaaaccaaccggtcgtacatggcatactttcctttcttgtgatcgctgtagactgttaggtctacaacttctgttccccttgttatacattacaaacgtaaataaagcatcctgttcgaatagcgaaaactctataagctctgtagaaatgacctcttccgtccccacgtttctattccactttccactcatgtgctgaatcggtgcctttttcgccaaattacataagagttacacctgctatgggtacgggaacattattacggcgctaattacgtagcgtgctacttatgcttaccgaggcctggtcacctcccagcccgtaaaactcctcttgtcttcaactcttgtcacaaactacacaggcaaggccaatcgcccggaattcctcttttaacgtgtccctcaaccacctcctctacttctcttgctgttttct

SEQ ID NO: 261689 - DNA, 297 bp, Glycine max
tgcatgatttacacctccctctttctcaagcaaattcttcttgatatcatcaaaatcttcatgatttacacctcaaacctctagtaggggcaaattcatttgaggggctgccatttatgagaatggatatagaagctgattgattgcaagcattgatccatttcctccatataggacagaaccccattctgaccatcatataatccagaaagttccatgaaacagagtcataagcctttgcaaagtccaccttaaacaccaaagttggttacttacttcttttagcttcctctattg

SEQ ID NO: 261690 - DNA, 668 bp, Glycine max
  unsure (1)..(668): unsure at all n locations
agcttgctgcagccatcagcatacaagattttaagtttatccataaatctaaccgattcatgaatttcaattaaactctcacaattgcaaacatctgccaatttgatttgggacaccacataagtcaagtatctctgatatattttgagaatcagaaaaattcaaaaactctcatattcacgaacatctgccaaaaaggtacaaaaaagagaaagaaataggaatcaaaggattaatattcaaaagaacttattgatatagaagtagtgaagagaacttgtatgcatacattctttgacatgaacaaatcaagagacattaagcaactaccaagtaactctagtttgacaagtttctttggatgaaaatcaattggtaaagatggtgaaggatagtcccaccattctaatactcttaaactatttggaagatgtttgggacctgtggtaaagctaccactttctatgataagtcttttgaggttattcatcttttcgaaggccattccatcccattctactactccacgatatttgaaacaatacagatttatgataagtcttcttgtgttctttcccgaaantgctaaaatccttttctattaaatcctaacgatggaaatatcatttctgaatacaatttttgtgatgcacacacccaatttaaca

SEQ ID NO: 261691 - DNA, 295 bp, Glycine max
cgccaaggatgcttcaatggaggaaaagaacgagggagagaaagagagaggggggagcacgaaattgaaggaataaaagagggagagaagtggaactttgaagtatgtctcacaagactctcattcatcaaagttacaacaagtattacacatgcttctatttatagactaggtagcttccttgagaagctttcttgagaaaacttccttgagaagctttcttgagaaaacttccttgagaagcttctttgagaaaacttccttgagaagctagagcttagctacacacacccct

SEQ ID NO: 261692 - DNA, 572 bp, Glycine max
  unsure (1)..(572): unsure at all n locations
agctttcccaacatcaaattaatacaacattcaaacagcacatgctatcacagcaaagcaaaacagcgcaaaggcagaaaactctgcccaaaacaccaaccaaatcacagcttttctcacttaaagaccccagtaacaattccttcgttccggttcattaaccgttggatcgacttgaaaattttactggaagtctctagtacataagcctacattttgaccgttgggatctactaaaaaacatccagaactcattctgcactactctttccacagccaatcacacacaagcatttttctgcacttgtgcaaaattccgctgcacaatttcactgcaaaaatctgcacaaagtgcagatttcgaaaaccacacttcccctcatccaatcttgcccaaatcaaatcctacaagtcccaaatcatgtatcaatcatgtctaaaccaaagccaagcttcaaaccacagcaacacaaaatctaggtgtccaaaacccctcaatttaatggattttctacgcttgagaagtgaaatttagaatgagggtaaattgaagcanactctcacctcacaca

SEQ ID NO: 261693 - DNA, 297 bp, Glycine max
taaatccgttgttatatattttgggttgaaaggaatttttttttttttatgaaagatgatgcctcatcttaaaaatcataattttctgcagttttgaatcattttaatcaataatatcatgtggtaattgattaaaatgagttctgggggttaattttgggttctacgttgtttgtaatcgattaattcaagcccagggactattttgttaacctaagctccattgcaatcgattacaatgagttataatcgatcacaatggccacacctcagtcatggagtccaaatctaggaaat

SEQ ID NO: 261694 - DNA, 583 bp, Glycine max
agcttcaacattcaatttcgagcgtctcgatatattacgggcctcaatcagacatccgagtaaaaagttattgtcgtttgaattggctcaaagcttaaacattcaacttcgagcgtctcgatatattgcgagtctcaatcagacatccgagtaaaaagttattgtcgtttgaatttgctcagagcttcaacattcaattttgagcgtctcgatatattacgggactcaatcagacatccgagtaaaaagttattgtcgtttggattggctcagagattcaacattcaatttcgagcgtctcgatatatgacaggactcaatcagacatccgtgtaaaaagttattgtcgtttgaattggctcaaagctccaacattcaatttcgagcgtctcgatatatgacgggactcaatcagacattcgagtaaaaagttattgtcgtttgaatttgctcagagcttcaacattcaatttcgagcgtctcgatatatgacgagacttaatcagacatccgtgtaaaagttattgtcgtttgaattcgctcataggttcaacatttaatttcgagcgtctcgatatattac

SEQ ID NO: 261695 - DNA, 297 bp, Glycine max
tttaactgaatttgcaacattccaaatgttttttaaatggtgtaatcgattaccagtgtatctgaacgttgaaattcaaattcaattgtgaagagtcgcatcttttcataaaatgcattgtgtaatcgattacatggttatggtaatcgattaccagtgacaagttctaaataaaaagtcaagagatgtaactcttccaatggttttctcaagattttctcaaggttataactcttccaatggttttcttgacctgacatgaagagtctataaaagcaagaccttgaattgcattca

SEQ ID NO: 261696 - DNA, 586 bp, Glycine max
agcttgcaacttcaactttccagatatagaaaaattggtattgatgtgatttcccgaattatttactttctggtcttttgggtttctcagcaacaaaatcaattttctgaggaaaaaccaccatgttggaagtttgtttactttgctttgcatttatgagagcttgtgttatggcattcttgctaggaatggatgaaaatttgagaaataaaccatgtgtcatgtctaaatatacattgtaattttcattttgtgttccttcattcttcttattctcatttggcttctacatggcatactctactcttcttgtgattgcggaggagtgtagggcttttgactttttgttaccctctgcttcaacttgacaaatgttgagaatgcatgcatgtttgaagagtgaaatactttatttgctctgtttgattttgcccctttcgatttgtctgctatcagatttcatcttttcttgccctgtagttgtttttggctcctttttttgagacatttatataacgatgtgatttctgatattttgtatggtgaacaattattagggcgcatattttcctatgcttgttaattt

SEQ ID NO: 261697 - DNA, 293 bp, Glycine max
tatttatcatgtaccgttagcgttatgtgtttttctttttctttttgggacattgcaaaaatgctcaatcacctgagtgcattctgaagtggtctaaatgaatctgtcttctttcagggcttgaaggaattcataaatgaagttaatactcttgcatctttgcaacatccaaacctctgtaaattgctaggatttcatgcccgagagggttcagaacatagaatgctggtttatgagaggctataccatggaagcttggatcgcttattgtatggaagatctgatgggccatc

SEQ ID NO: 261698 - DNA, 550 bp, Glycine max
  unsure (1)..(550): unsure at all n locations
agcttcacgattaaatgaaaccagcagcgactcgatcctcaccgaacgtagatttttttttccctcctttcttttattttttttttttaacatttataacatgtttgaattggattataaaattaatttttaatgaaattgattttaaaataatatgacaaatatcataaattaattttcaacatgcaatcactaaaatggattttagttatttatacatgtctaatgtattattatttattgttatattgatatgatatttgttaatttgaaataaataggtaggtttataataagttattataataaaattaataattaaaatattagattgtgaaataaaatgcatccctttaataaaaattttgtaatcaaaattaatataacaatatatttataaagtgttgatagaaaaatacaaaaagataaataattcttaatataacacaattttgttctaccaccataacactaattntgatttaatacttgtgtcatttcatctcatattgaatctcgaacacgatacatctgaggcgaaggaatgaca

SEQ ID NO: 261699 - DNA, 293 bp, Glycine max
tggtgaatcttcaagttgattttgatggtatacgtagtccaaactccaaacacgttagttttaagggagattatctaagtatttgtaaagatatcttaatacttaaatcagcgagtgaacgaattgaataattgattagttatatatggaaagatagttcgcttgataacactggatgtaccttatttatagcgctcaaatacaattaaattaaatatgacattcaagcacatatctatttttttttaaggaagcacatatctaatttacttgataaagaaaatcttaaatat

SEQ ID NO: 261700 - DNA, 582 bp, Glycine max
agcttatttgtaaaaaaaccctaaaacctaatttgtcaaatacccattaaaccccaatcagtcaagtaattctaaacccttatctttcaaatacccctaaaccataactagcaaagaaatccaaaaatctaatttgtcaaataaacataaaccctaattggtaaagtaacactaaacacaaatttgtcaaatacccctaaaccctaattagtgaagtatccataaaccctaagttttaaaataactataaaccctaattggtcaagtaacactaaaccctaattagtaaagtaaaactaaaccctaatttatcaaacacccttaaaccccaattagtaaagtaaaactaaaccatgatctgtcaaatatagctaaaccctaattagtcaagtaattgtatccctaatttgaaaataaccctaaaccctaaacagtcaagtaacactaaactctaattagttaagtacccataaaccccaatttgtcaagtaacccgtgaatccctaaatttcaaatactcctaaaccctaatataataaataacccttaaccctaattggtcaagtaacacaatattctaat

SEQ ID NO: 261701 - DNA, 292 bp, Glycine max
tgcactttaagagttggttatatccacagtccatgtgcagagggaagtctcgtatgcaaattggccacccaatactacattaatattgtccacaccagatggattgtagtaactactttatgggttatagtgttaggttgttaattagtatgtgtttgtcattatagagataaacttcattctcatgatcaatccaaagcatataaactaacatagttcaaaagttatcaaaatatgtaacaactatgtagctgaactcatttacaatggtagcaaacaaatcatgccctct

SEQ ID NO: 261702 - DNA, 495 bp, Glycine max
agctttgcggatttggtcttcgctggcgaaatgatctaagtgggtctaaaaagaggaaaatctgatcatcatgcattgataaatgcaaaaaaactgtggcaactgaagagggtgagaatgatggagaaacccatgatgagattgccattcctatacaatccaagtttcccaccaacccagaaatgtcattactcattcaataacaaaccttcttcttacccaccacccaattattcacaacagccattcctaaatcaacccccaaagcctgtttaccgcacttccaatgacgaacaccacctttagcacaaaccataacaccaaccaagaaatgaattttgcagcgaaaaagcctgtaaaattcaccccaattccggtgtcctatgctgacttgctcccatatctacttgataattcaatggcagccataaccccagccaatgttcatcaaccctcatttctaccataattcgacttcgaacgcaacgtgtgctt

SEQ ID NO: 261703 - DNA, 295 bp, Glycine max
ttgagccaattcaaacgacaataactttttactcgaatgtctgattgagtcccgtgatataacgagacgctcgaaattgaatgttgaagctctgagctaattcaaacgacaataactttttactcagatgtctgattgaggcccgtaatatatcgagacgcttgaaattgaatgttgaagctctgagccaattcaaacgacaataactttttactcggatgtctgattgactctcgtcacatatcgagacgctcgaaattgaatgttgaagatctgagccaattcaaacgacaat

SEQ ID NO: 261704 - DNA, 472 bp, Glycine max
tagcttgtctgcactagagttaccttctttataaatgtgagatcctaaaattcatgttactcgctagatgaacacaattattttacctgtttaagaaattccaacaaggaacgacttctgaacatcttaaggctttaaggatagcagatgagtcatattacagccagaggtttctccaccctttagcatgtgcaaactcaatggcagtaacagctgcaagaagctcggccagcaaagaggaggaaatgccaagaggaactactaatccacaataaaaacctccatttgagtattgaaatatgccttcattataagcaaggcctatattaccttttgaagcctcggcaaagctacatattaacttatacagatgtggttgcaactagataaccaaattaaaatatgtttgtgatttctaataaatacccaaatttttgtttgttcctaataaacaacgcttaaatatgttttt

SEQ ID NO: 261705 - DNA, 292 bp, Glycine max
tctataagatatgacttaaatcatatatctccagaaagacaatcataggaagcacacctgcagccaatcaaggagtccaaaagcacaagaagaaacttttcaatattgaactccttagataattctaataaaacccttgttaggtccctatatgaaaatgaatttaatatatcataaatataaataaagaaaggacaacaatcaaagcacaatgattatgcatatgttaagcagttcgaggaagacttccttatttccttcggggcaagcaaatcaatgatttcttcattat

SEQ ID NO: 261706 - DNA, 1125 bp, Glycine max
  unsure (1)..(1125): unsure at all n locations
cacacacacgcgacgcgcgtcgaccagacancatcccgttgcaanacncactcacactcgttatctgctccagtatccgcactcaacctggntcttacgtccgcgcacacgtcatcatatgtcttaccatnccacacagccaccagcgantttggtggcttgcgatcgcgacggaccactccaattacactggacgtcctaccaacccaacaaacataacgtagcctcgataacagtagcggcagccgcaatcctcttttcattactacaaggcgctcactcgacagcgccagacgcaaggagaacacagttcgaatggtgggacaacattaggcgcccgaccgccaacccctttgaatcgcagccgataactgaatcgatttccaacttaggactaaacccggttggttaacacaacgaaccgctactctcacaaagaaatctatgtcctcacacccacacaataatcgctcctggaatgcggccacttcccctccagtatggcgcatatgatcttaactcatatgacacaacaccatgatttggtaaatccgcgcttaaaagacgactcccaaccacaggacacccatacactcgaaacatctaattcaaacaatgtgactctagaatcctacaccttccgaacgtcacaaagtccgccactactcttcggccgttcccaagacggaccgctattgctcactacttatgtcactagagaacaacgcgcagccccttattcctcctccacggggttccatatcgccaaatatcacgtcaacaacaacacgcagcgtggctcgctcgaatggacaactcttaaacggacataggcgctcagagttcgttcttcacagacacaaaatgagggggagcgtcaaacccgttattggaaaaacagtgtgtactagactaactatcatgatcggaatgcacgaaccatatncgaatgtagatcaccctaaacggcattaatatccgttccgctcccgaggtatctcggaaaatagcagctcgccccaagccgctaaagtactcaacactcacctgcgaagtacgtactctctacaacagtcagcaaatcctcttcctggacatacaagaggcacacatgcgtgaaccgcg

SEQ ID NO: 261707 - DNA, 294 bp, Glycine max
tatttctaagtctaaaaacttattctatcttaataattaattattctaacaaaaaattaattaaacaacacaagcgttatactcaatcaaaacacaatcaaccattcataaaaaacaagaattcaaacaagatcaaacaaaccaaataatctatacacaattaataagagtgaatcaatcaatcaatcaatcaatcatccaatcaattcctatttttctaaatctcttacgtctaagagacctaactctcttctaatagagaagaacacttccttggggagaggttttgtgaaa

SEQ ID NO: 261708 - DNA, 483 bp, Glycine max
agcttacccatggcgtacctacaccatgcccaaattcaagggacaaattaaatatatgccataagttatgaagcaaattataaatatatcatgaatggtccgcagtatgaaatttctatatgccaaaaatcataaaattaaaaaaaattgcagcctgcatgatagggacttgactgtgaccatgtgcatgtggttcttttttttaacactgcaagttatgtactggcagtgtgggttgagactgaagataaggcagggtactttcaaatgacatgaaatggggtactcgtaaatcgtaatacttactctggtgccgaatatccagtggtccccaacatacgggtggaaacctgaccgttcctcttgtctgatcccatcttaggcaatccaaaatcagacaccttggcacgcatgttttgatccagtagaacgttgttactcttgaagtctctgtggatcacaagagagactgtttgttcatgc

SEQ ID NO: 261709 - DNA, 295 bp, Glycine max
tttgcgataaaatcttttgaaaaagttggccttcttattcgatttctattggagtattaattactggtgcactttgtttggttcgagattaattgcattccttgattaagatttgaataaattgattaataggacaaatctcatattaggaagtggacctatacctaagtaaattcatcatgaatggaaaaaaaatagtaaaccgattaattttcaaaacgtaattaattaaactgaatttcatccacaatttaccattttactttttgtccaaagactcaacatctttcattgt

SEQ ID NO: 261710 - DNA, 643 bp, Glycine max
  unsure (1)..(643): unsure at all n locations
agcttttctcagtcgtctataaggatgattgggtgttataaagcggtgatgcctactgtagactatttttctcccatgtttaagttgtatgtaacttgtattttcttcacagacggggcatgcatgatgacccttaacactgtaaccgctgagattcccatatgctggaaagtcattaatggtacaaaaaagcattgcacgtatttcaaacgtctccttgcgaaacgcatcaaatactacaaccccctcgtcccacaactttctcagatcttcaaccaacggacttagataaacatcaatgtcatttcctggttgtcttgggcccgatatcatcatagacaacatcatgtattatcgcttcatgcacaaccaaggaggcaaattgtaaattactagcagaattggccatgaactatgttgagtgcttaaggtgccatatggattcattccatcactggctagtccaagtctaagatttcttggctcattcccaaaatccggatacaaaccatcaatcttcttccactgcgagtaatcagcccgatgacagaccattccatcagaaatccttcatttgcatgccatgtaanggtctttgcgtcattctcgttgcaaagagacgcttaaccttggaatgattgga

SEQ ID NO: 261711 - DNA, 298 bp, Glycine max
tcaaggctaagtcttcatgtcactcccttattctaacacaggagaaggcacgagtctgctgcatccactaagtgtccacccacattaaatcttgtcgcacaaagggtgaaagaccaaagtaagtctgatgatgataatgaaaggttcttacaagtggccatccaaaaaaggaaagttgttgctgctgatacacccgctcccaagaaagccaacaaggctcaacctacagctgaaccacatgtgtccattcttcctcacgccactctataagtctacattcaactccacaaccacgtcc

SEQ ID NO: 261712 - DNA, 453 bp, Glycine max
agcttgctctaaatatacattgatgttcgtatttatgggaggaggttatatgccatttttgctttaagagtaacgtcccactggtaaaactaacttttcaaatgtttgccttcgcaggaatggccccgaagaagcttgccttaaagaggaccaggaaggacaaggcggtccaacgaactaattccgccccggagtacgacagtcaccgctttaagagcgttgtacaccagcaacgctttgaagccatctagggatggtcgtttctccgggagcgatccgttcagctcagggacgacgagtatactgatttccactatgaaataaggcgccggcggtgggcaccactggttactcccatggacaagtttgatccagaaatagtccttgagttttatgccaatgctcggccaacataggagggcgtgcgtgacatgatatcctgcgttaggggtc

SEQ ID NO: 261713 - DNA, 294 bp, Glycine max
tctattttttattacgagcgtctcgatatactacgggacacaatcggacattcgagtaaaaagttattgtagtttgaatttggaacgagcttcttttttcaattacgagcgtgtcgatatattacgggacacaatcgtacatccgagtaaaaaggtattgtcgttagaatttgctaagagcttatgttttcaatttcgagcgtctagatatattacgggtcacaatcggacatccgagtaaaaagttattgacgttagaattttctaagagcttatgttttcaatatcgagcgt

SEQ ID NO: 261714 - DNA, 587 bp, Glycine max
agcttgacaaaaacaaggtcaccaatggcaaagtgtcttttagatctgtgcttatcagcaagttgcttcatatgattctgagcttgctataaatgaaacttcaaaactctaaacatttcctccctcttgctaaggcttcaatccaccaaagaaaccttggattcaccaaaaagctaagtgttcgcatcctggtactacttgtttttgtggatgtgaaatctaaccggcaagtgcaccgggtcatcaagtaaataattaaaatggtgtgaaccgagtatggaactcatggaacttgttttacttggcaaagcatcattcagtaaataggcatttgcgtaaagaattaattatcatgaagtaaaaacaaaagtaattctaagtaaaagcagtaattgtgagcaagtgtgtgtgaaaacagatatgtaaaagcgttgggtccttctactgagatacttgatgcaattacgggttttatctactcgaaattatttctgtgttctatgctgaaggaacaaataccacacaccgatgtcttatgagtttgacctaattcaaataaacttcattctcagatgtcttttgttgac

SEQ ID NO: 261715 - DNA, 291 bp, Glycine max
ttagaattttgatgataatttcatatatgtccaattattctactaaggaattttatacttgcaaattgaaattcataaatgtatcactactacaattcattgatttaacatcgcaagattaacatcggtttttaaaaaaatcgattttaagaaaagcacggtagcattttcataaataagttgacttaattaacatcagttttggaaaaatcgatgttaacatcggttactgaatgctatttgtaccccccttttttactaaatgcacccccttctatttttttggtaatt

SEQ ID NO: 261716 - DNA, 540 bp, Glycine max
agcttgacagtgcctgattcattgaccagcaagtttgttcctttgatatctctacagaaccaaatcaactcaaccattttaacaaacttcaaacagcaatgccaaacagattttattagcaagatagaaaggttgctttcattaaacatccttgtcacctgtggatggttttgttactatgtaagtaagctaatcccgaaagaatatgccttgtaaaattgcaaaccacagattctgtcatagctccacaatgttcacgcataaatttactgattgatcccgggtagacatactccatatatatgtacaaatgatcgccaacctgaaaatacaaatgcttcaaaacgtcaatctaatttactatgacaaatatccttaactttccattgggttgtatcgattatacttggaacaaaaacttaacaaccaagaattaactcactgtttcacttccataatactgcacaatgttgggatggtgtagttgacggaaaattttgatttcctggaacacagaactttttagaataacagcctaaa

SEQ ID NO: 261717 - DNA, 297 bp, Glycine max
tttgttcctttttataaaaagagaagttctgaaaatcatcacgttgtctaaaaaggccttgaggtggatctaagtgctctgatcattcattagcatattcatgatttggtggcatgctctccactgtttgtttctttagggaactcaccataactaaaaaagcgcaaaggcacccctataacacccgatccaaaagtaagatggacaacgaagagggagtgcaagaacagatgaaggccgacaagtcggccttaaaagatcagatggcttctatcacggaagccatgctaaaaattc

SEQ ID NO: 261718 - DNA, 651 bp, Glycine max
agcttgatttgtggacaccacggaggaaggattcttgtcttcccaaattctgtcattccttcgcttgcaccaaagtgagagcgcaaagatatgtttctggtttgtgggaagagtatccaatatgttgaaatgaagtctttggcagaatttgaatgttgcattcggtagctgactttattctagaggcatgttgttgtccatatattgttgacttgttcacaactaaataagagatgtcattcattctcaatattatttttgcaataagagtagagacacgagcatggcacaccttatgtttggagtcttgatcttgtgggtagacatccacgaagtgttctccataaaaagtgcttgattttgggaggtaaatgaaggctccaaatgttgttctagcttccttgaactcacaacaattcattgtccaccatattttccattaaagtgtgataagcggatctaattatgtatagatccatgacactttgctttcaaataaagcaatcaggctcctggggaattagaatgggcattagctttatatctcttgaatcatcatcattgaaaaatttgatcaatgagatcactattccaactatttctatcaacatcaagaggctatgtgaagaaacaaaatactatctttttgta

SEQ ID NO: 261719 - DNA, 296 bp, Glycine max
taccatttgcttgtacttaaacagctcagtgtggtctacttgcttgcgagctgggccactctcgatcccacggacacgggtggcgaaattcagtgagcaaagtgtctctcccaagtctgctgaacttggactcacttgcacaaacattaaagttttgcagtctcctcctgcatttgaccccatatcaaacattattagttataaaatttcaggcatattagtgaaatcaaataaaaaaggagttatttccagagtaatatttaattcataatgctgcaatggaatctcacctaaag

SEQ ID NO: 261720 - DNA, 456 bp, Glycine max
agcttctcgatacattatgcgcctaaattggacattcgagttaaaggttatgacaatttgaattgctctagagattccattgttcaatttcgagcgtctcgatatattatgaatttgaatcggacctccgagttaaaagttatgaccatttgaatttctcgagagcttgcgttgttcaatttcgagcgtcttgatatattatacgccagaatcggaactccgtgtgaaaagttatgaccatatgaatttctccagagattccgttgttcaatttcgagcgtctagatatattatgcgcccgaatcggacctccgtgtgaaaagttatgactatttaaatatctcgagagcttctgtcgttcaattccgagcgtgtcgatttattatgcttcgcaaatttggtctcgaggtaaaaggaatgaccattggaatttctagagagctttcgttattcaat

SEQ ID NO: 261721 - DNA, 291 bp, Glycine max
ttaactcggatgtccgattcaggcgcataatatatcgagacacttgatattgaataacagaagctctcgagaaattcgaatggtcataacttttcacacggatgtccgattccggcgcataatatgtcgagacgctcgaaattgaacaacggaagctctcgaaaaattccaatggtcataacttttcactcggaggaccgattcacgcgcataatatatcgagacgctcgaaattgaagaacggaagctctcgagaaattcaaatggtcataacttttaactcagaggtcc

SEQ ID NO: 261722 - DNA, 554 bp, Glycine max
  unsure (1)..(554): unsure at all n locations
agcttaatacaccaattattaatttttttttaatagattgtaggtattttatatgaaagataatcttatttaaactggataaataagataattataagtgataaaactctgtctccaaatatttaacgtaattatatatgtaagactaattaatctaaaataactttgcatgattaacatactcagtgctataacactaatagtttggtaataactaattcattgataaatattataaaatcatcaatatttgagagtattagaataaattttacttcgtattagaataaaattaattagatgcaaacctattaacgaaatgctttaacttcaccaaatatgtgattatgaaagcaaagggtagatggcagaagaaagagcaggataaataccatgggacggtggcatttgagaagtgattggaaaggaagcaggggcacttgtgcggaattgactntgaaatcttcataattagggccactagaagacataaaattatgatctatctttgattccaaagntcgtagttggtgtgattctgcttacataatgac

SEQ ID NO: 261723 - DNA, 294 bp, Glycine max
tcctcgtggcttctttgagaagctttctcaagaggcttctttgagaagctagatccttatctatccacacccctctattaactaaattaacttccttaaaaataattacagatgaaaataacgcaacaaataatcaaacatcaaacataattactaataatatatagatatatatatcagggtgttacaccgtgtggtgttagctggaatatggatgccaaagtggcaagcgcatccgccatctgattttcctctcggggaacatgatggaaggagatctcatcaaaggaacca

SEQ ID NO: 261724 - DNA, 405 bp, Glycine max
agcttgcctttattgatgaatgatgattttccttcctttgtatggctaccacaatgtgtcacagaaaaagttgttgcggccggaaagagatcatgaggacgtgttgtggcgtgctattgcccaaaaacaatcttgacctattccgacccacccctaacaatagtatgtcagtgagaacctgtgatgtacctaaacatgcgagctcctggcagtctacagattataggaacaaataccaccaagctaggaggtttgtggtggctggccacctctgaaacttgattgatatgtgagatatggtctctggtaatcgattaccaagggtgggtaatccattaccaggcttaaatatgaagataggacgctaagatggtctctggtaatccattaccacggggtgtaatc

SEQ ID NO: 261725 - DNA, 292 bp, Glycine max
taacattgacgggttgtgaataagctattttttaattgatgataggaattttgctaaaaaaatttatttattcaatatggaaatatatagaattttgttgagaatgtttaaattattttaaaagtttttttcccgcttttgtaggactcaagacgttataaaatttttacaagtcaacaactacattaaaattggaagacattctcacattaattattgaaactaagaaatgtaaaataagttctaaaacttaattatttatttttattttggttcttaaacatatgctaat

SEQ ID NO: 261726 - DNA, 697 bp, Glycine max
agctttctatgggtgaccttcctgttgtcagagagtttactaaagtgtttttgttttaattggttatagagttgtcgtaatcgattacaacaagctgcctgtagcttgtagagttaaatctcgtatcagtttaattgattttggtagtactttaatcgattacactattgtttgagacaatgactgaatttttttaggagtctctgcttaataaattaccaggtggattaatcgattacttttctcttgtttaagttgtccagaggtgaacaagaacacttttatcgattacttaggtcatctaatcaattacattgttcttaaggtgttttccagatgttggatgaatactttaattgattacctaaataacataatcgattacttcattgaaataatcaattaccttatagatttaatcgattataggtggctataactgttttctctataaataagcagcttgtgttcacatctattcatcatgagatcactagagaatactcaatatatctcaaaaatcacttcttagcctcagaatgagcaagattttatgctttcattggtgaatggaagaaaagaagaaaagagctttattgtaactcacaacttcttaatattttgattcgaagatcttttcttgatatgagttatttttttgagtagaagaagacaacttttcatccatccagcattt

SEQ ID NO: 261727 - DNA, 294 bp, Glycine max
tgttcagtcctttatctttttccatttcacctacatcttgctccatattctcagattgctccaggtgactattctcatttgatacagctacacttccttccattgcaaatgtttggcttgatgtgctctcagtgacttttttcctttgagcctcattcaacatcccattaatctgttgcattggagtttgatttacacacacacacatacacatacataaccacacacacacacacacacagccacacacacacacacatacataaccacacacacacaaacacaacgactcac

SEQ ID NO: 261728 - DNA, 521 bp, Glycine max
agcttgcaaaccttacggataaaaaacctatttttttaaatccacatagttatatcaagtttctaaatctgacccattaagcccatgaacctaggtggctttgcgaataacaaacttctttttattaaaatccatatatttgtattgagttttagggtctgacccgtgaacttagtaaactttatccatgaactcgtgaagtatccatttaatccgcctaatatgtgtaagtatttataatttgttatgttaaagttttggtcaatttagattgttattgttaatttgtagtgtataaaatattaatatattctagtgtgatagattttagcttaaaaaatgatttcatttttttcttcaaattttatatattttcactttttttttaaaaataacttataaaaaatactttgtttttaaattatcatgtgtcaggtcggtccatttatttgcggcttttacgaatcagatatgaatctttaaaaaaagtctatttactaaactggctcgcctaaaatggg

SEQ ID NO: 261729 - DNA, 292 bp, Glycine max
ttgaaagccttagcagtcggcctgtcgaacacgatgctacaatgaggacacaacataacttctttctcaacttttagtttcttcaatagaaattcgaccaataataccccaacaagtggtaaaactgaatccttttcatttttgaactcttccaaggcttgatagacctctccttcagataaatgagtgctcacttttggcgtttctatcaaatctctcatcatcatgatctacatgggttcaatgtaattagcctggatgtggagtggatcagtatctaccttcattggtt

SEQ ID NO: 261730 - DNA, 379 bp, Glycine max
  unsure (1)..(379): unsure at all n locations
aacatcggatactctctgggtattcaaatagtcataactattcacacggatgtctgattcgggcgcataatatgtcgagaggctcgaaattgaataccggaagctcttgagaaattcaattggtttaacttttcacacggatgtccgattcaggcaaatcacatatagagacgctcaaaattgaacaacggaagctcctgagaaattcaaatggttataactcttcacacggatgtccgattcatgattataatatatcgatacgctcgaaatcaaacatcggagactctcgcgatatgcanatagtcataacttttcacactganggtccgatcaggcttataatatatctatacactcgtaattaaacatcggaaac

SEQ ID NO: 261731 - DNA, 492 bp, Glycine max
  unsure (1)..(492): unsure at all n locations
gggtgtagatatactttcagattgtatgttgttattatatcctcgacatatatgtcttggaatttttaagtagggtattgtaaattaaattctagtgtgataaaaaacttatgcttgaagaaggctttaggtttatacatttgagttcaagagtttaatatgtcacccatataattttcttacttgagtaagagtatcattgccataattactactattattatcattatcatcaccagagncactttcatgattattaagntacttaatatcatatttattgttataattggtggtatcactactattattcttatcttgcataagacatcattgtcacattcttatctctacttcgtcatcaaactaaacaagttcaaaagagaagtgaaaaatatttatgtgatttacatntaaatttgatgttaaattaagaaactgataacacagagactanactactatataaactgaagtgtaagttttttttta

SEQ ID NO: 261732 - DNA, 328 bp, Glycine max
  unsure (1)..(328): unsure at all n locations
cgtctaacaagagcgcacgatctgcgttcaattattgcgacgcctgtaaaaagatcacgtgacgaaactngatccatgatcttcgtcttcagtgtgatgacaagcgtagtactttcattctattctcaatagaaatcatgagtagcttaagatcataatacttgtaatatgctaacaataaaaatacattcatttcacgagaagcttgacctcaacatagataacatcaattatgatcaccctcgtttatagtaagagctactgggttctaactcagcctctgaatagcttcataaagcagncactangcatcaactactttggaact

SEQ ID NO: 261733 - DNA, 310 bp, Glycine max
  unsure (1)..(310): unsure at all n locations
aacggaatcgaagaaggcgaaanatagagatcctagggatgcaaactcataaattccgcgggtatggcttttgaaaggagggaaaagaagnttttgaatgcaaaaacgccccccctttcgtcactcttataattaggtgcacgggttgctcacccaggcgagctaacctgcactttttntttcttgtgaggggaacattacccatgtcctctccttttcatgggttagcgtctcgcctaccttgaacttacttaagttagaattaggcgtcgatcacttattttaanacaaaccaatagtaaaaggatac

SEQ ID NO: 261734 - DNA, 456 bp, Glycine max
ttatgccagcacgactagagtagaggtggtgtttatgtacaagagctctcctcaccttgataatatgcttagctgatctgacaacattctcactatgacaaagagcccacagatgaggtagatgttttgtcctccctgccaccttaacagaaaatggggcatatcagaagtaatattataattattaaaagtattgcgagcaagccaacatatattatacggagtgtaatttacttgttcatcatcctatagaaaaattaccactgtactctatgtgagcaaattacacatggcttactcttgcaatattacgaacatatattccatgagcatgcaaatgcttcagtttatggcttggcaatccattgtgcatacttctatgtgacttacggcttgagtagactgggaagtccacatttgtaagatattgactgactatttctacattatatttat

SEQ ID NO: 261735 - DNA, 243 bp, Glycine max
ttatgtgctccttaaacctccattaattttcaactttaccttctcctttattgatgtttcttcgatattctccatgtatctcctcacatgtattgtgctaaatgttgttaacatgattctttagaatttccactgattaatcttgctatagcaacatgtatctcctcacatgttttgatggaaacttgcttgtggagctcttatggacgctggatctttgagctccaatgaggtccttcaatg

SEQ ID NO: 261736 - DNA, 470 bp, Glycine max
  unsure (1)..(470): unsure at all n locations
acacaatcatttcagaaagcatgagaggggtatcatctttgaagattataaaaggctacactgtgcgttttggagggagttcatctagggcatgccttgaagcacaaatatccactcgggagaacttttcttccatttctttgtttcattttcttgttttaagcctctgatgactatgagagactaacttactcactgttgggggcttgagtaccaaagactctgtaatgtaatgattcttactatntatttaatgttattctagtattattgcttcctttatctgnttattgctttgtttatgggttgatcacctatatacatatatattataggattgtagtaatcggaatttatttttactttaagagctgaaaggaacttctaagtaaccaatgtccaaggatgaaatgatgttagccttatttatgcatctctattcttaaagcaagtaattgatctacctttct

SEQ ID NO: 261737 - DNA, 348 bp, Glycine max
  unsure (1)..(348): unsure at all n locations
aaatcttcttaccggngatgaagatgacatccattacagcacttattggtctatctacaaaacaagacttggaggttgagcaacttgatgtctaaaccacattcttacatggagacttagaggaagaaatttatatggagcaaccacaaggttttgttgaactagggaaagaacacttattgtgtctcttgaagaaaagtctctatgtgttaaaacaagctccaagacaatggtataagaagattgatctctttatggtccaccatgatttcagaaagacctccgcaaaccactgtgtgtgtgtgaagaactacaagaatggtgagtgcatcatactcttattgtatg

SEQ ID NO: 261738 - DNA, 371 bp, Glycine max
  unsure (1)..(371): unsure at all n locations
acagaagctctgtgcanattcaaacgacaatacantttaactcggatgtccgattgagtcccgtaatatatcaagaacactcgaaatgagaataaaagctctgaacaaattcaaacgacaataactttttactcggatgtccgattgagtccagtaatatatctagacactcgaaattgagaatagaagagctgagcaaattcaaacgacaataactttttactcggatgtccgatggagtcccgagcgtctcgatatattatgcgcctaaatnggacatccgagttaaaagttatgacnaatttaattgctcanaagcttccattgttcaatttcgagcgtctcgatatattatgtgcccgaatcggacc

SEQ ID NO: 261739 - DNA, 474 bp, Glycine max
  unsure (1)..(474): unsure at all n locations
tacaatcttcccctctttgatgatgacaatccctgaaatcaagacaagctatatacaagatgatagcacgttcacacaaaccttactccccctatcttttggcatgtatgcctaactttaaggattgatttttaatgatagatttctaattgatttctaacctaagttctcttcccctttggcaacataaaaaagaactaagcaaaacaatcaatatctaaacagagccaaacagtaaaccaaaataagtccatacattgtcataaccaaccaaagcaaagtcgagaaatataatagaagtgcaagattatgataactagagcaacaaaaagcccaatacacgacgattaaacaaagtactaataatacttaatcattaataaaaataagctaagatgatgatggaggcggtggtggtggatcaaagcatgtacggatgaaggagacatctttntcaaccttggtgatccttga

SEQ ID NO: 261740 - DNA, 134 bp, Glycine max
tttacactgggatgttcttggcagctatctatctctaatgactgtgatcttcttctatataggtgttgaaacaaacttctttcctggaggtatcctccttacagttgcccatactttgtaattcattcatgcca

SEQ ID NO: 261741 - DNA, 417 bp, Glycine max
gtacaaaagtagagacattacttattacctaagcagtttgtaatcaaaactgatcacaaaagtctcaagtatattcttgaccagagactctccacagctttccaacaaaaatggttggtaaaacttatggaagatgatttcattattgaatacaagtacggaagtgagaaccaagctgctgatgcactatcaagagttgaatgtgctactatttccactcaccaacccgagtcacgtctactagagagaatcaaagcatcttggcaaggtgatgatgccttacaaaaactgactgctgaagttacgaaagatccttcttcatataatgagtactcttggcacgaggagaataaagaggaacgaaagttggcattgtaaagatcttgaatgagaaagggatacttatttagtgactct

SEQ ID NO: 261742 - DNA, 215 bp, Glycine max
tgggcgcctatgtcttatctcgatttttttttcaagtcattaaaaatggactatagtgccatataaaagctaaaaactagttggggtctgaccttatgctctggagagataaatttttattgtgtcactatgagagtgaaacgaaatgtctgaaactcgtgatgccttatttcaaaaagctagcataacggcatgaatgccgagaaaatggatga

SEQ ID NO: 261743 - DNA, 266 bp, Glycine max
ggcaacagagacagggagagccattttttttagacagatcggaatccaaaggacagagacacaagcaagaaagacaagcttgtgagaaaagaaaaagagatgaatttaaaaataaaaaaaaaagaatggatgacggcaggaaaaactaagacagaccccggcgcaatatgaaaacacactccaacagacaaggaatcagtagaatgaaaaatattcaaagaaacaataaacaagcatatatttaataaacaattaacccaggcaac

SEQ ID NO: 261744 - DNA, 394 bp, Glycine max
ccgggctatacgagacatcatgtcaaacaaagtcatgttcacgataactcgcctgtgcatgttcttccatgctatatgcagcaaagcgattgatccagtaatgtttgatgagttggaaaatgaggccgcaattatactgtgccagttggagatgtattttccccctgctttctttgacatcatgaatcacttgattgtgcatctggtcagagacatcaaatgctgtggtcctgtttatctacggtggatgtaccccggtgagcgatacatgaagatcttaaaatggtataccaaaaatctatatctgtccggaacatctattgttgagaggtactttgagatacgccattgaatttgtcaaattacttaagatgctaagctgttggcttttgag

SEQ ID NO: 261745 - DNA, 331 bp, Glycine max
  unsure (1)..(331): unsure at all n locations
agctnngtagaatggctanganccatgatacatgtcagtggcttgngtttggttcaagggtaaaagggatgccccacattatttccatgacacanatgcanaaatgatgatttggaaactttatgtaaaactggtcatgcatgcatctatgcggacactcanatgctcaaattttatggtcatgtgatgctacggctcaggattcatttcctctatttttaatcaacccaatgtttccacaatatgttcttttatcaatatgtgcattcatccgagtccatttcgggcgttcggtgaaattcacagcattcacccttcaggtgtatacaca

SEQ ID NO: 261746 - DNA, 261 bp, Glycine max
tagctctaaacaaatcaaaagagattatgtgggtgtgcttgcacaacgactaaatctatgattgtcttaaagataaatctacaatcatcacttattcttttctcttcatatggtcaaagtgttttgataattttttaactttataagaataaaaaaaatgtgttttacagaacgaataatgaatgttctctcgcaaaggtggtgttatatcttaaactttctggatatataggcctcaatttcaagtgttcgctgtctcac

SEQ ID NO: 261747 - DNA, 476 bp, Glycine max
  unsure (1)..(476): unsure at all n locations
gtagcagcaataattcctactacatattcaatattatgaatagaacacgggtgcatcttccaaggaggaaggcgcgtggagtcaccaccaacgtttattcgaggaaaacatcagaaaaaccagaacgtgtggtctacgaactttaagtgtgaaaggttcgggagttgtttttacgcacgggaaaggtattagcaccccacgtgttagtcacaagggacgacaacctttaatcaagtgtgcaaatatgacttcaaaactatgtattntcccttctttatgctgttatgtatcttccctcttctatgtttctttaagctatttatgggtctcttgtatctattatcattttgaggcgacaagggtgtttccttgctctaactatctcaattggatgagaatcatacctacgtatttttgagactaacatcgtaagttgtttactttttccagaaatttattgacaaagcattaagcgt

SEQ ID NO: 261748 - DNA, 384 bp, Glycine max
  unsure (1)..(384): unsure at all n locations
ctcttcttgtcagatattcaacactgtatatctaagtagtctctctttaattcaacaatgtgttgattcctatatgatacaattgaaaattgtagatgatcgaatatctgatttaccttgaaccatgatgatggggtcttacgtcttatcgatgatgtttatgcattctttgttatcaatataatatttatttctagatgttataactaacacaagttcaatcatgagctatttatgcattaaatatttgagtttgattagctcttaactctccagtgaacagattctttctttggactgtaaactgggttctagttntacttataatcaagggcaaaataatttcatattttaagataaataatttattttgtaaaatctttg

SEQ ID NO: 261749 - DNA, 450 bp, Glycine max
  unsure (1)..(450): unsure at all n locations
attcaattatgttcctctatcactatgntgttcaattgaggtgacatgaccattattttgccgatatggagattgaagagctctctcttttcttttaatgacataatggtattcttgctcacataaaacaaatccacattagcccaattgccttcaattgaaggcaatctgatgaaggaacataactgcatcatgtgagcaaaactaaagcaattgaaacaagagggccaaaatttaacttctctcaaacaagggaaccanattgcactgaaggacctaagaaaaaacagtgataaattattttacaaagaattccaagcttaccatttcccgtacttcttgctcaaatgacttagaaactgcattgctgctgaaattgtcaatcaccttgctgccagcttgatccactttcttagcaactggtccgctcaaaattatctgctactttat

SEQ ID NO: 261750 - DNA, 535 bp, Glycine max
  unsure (1)..(535): unsure at all n locations
agcttattctactaanggactttagacaacattatttcacatttatggtatcaacacatctagagtataccttaacatcaggatgcaaatacagtaataactctntaaacctcctatgttcaacaaaagagaatggaagaccatgctcaataatcatcatagatgtcatctcacataccacactttgatcaagtcttttagttcttaaattcccaacatgatcaggaataatttttccaacatcaccattagaacatgtcttctaatatacgccacatttccttgtatggcgttgtaaggttgaagtctcattcttattgtcatcacccacataatctttcaaacaatatttgcatttacacctcactttcccatcactatgtanaacaagtttctcaaaaaaattccacacaagtaatgaatatttcccagccctattatttggcattttagactcattgagttcttcttcattaataacattttcatgcacacccacatcaattttctcattctcattntcatcaacattaac

SEQ ID NO: 261751 - DNA, 320 bp, Glycine max
ggagaccttggtgtatggccacggtatcctgcaccttggcctctctttttgagacgcacttcacgacggagaaagagctcatcctcctcatccggaggctcacgttcgcgttccttccgatgaagcggagcctcgatttggcggaggatctggccgcgacgccgatgaatccggcgacggagcttcggcgaagaaacgccgactctgcgccggtggaggccgcggacaaccgtatttgcgtggaagaagaagccattgtggaatcgcaaatcttgaatctctctttcactcgaaataataatgaatgagagagagagccc

SEQ ID NO: 261752 - DNA, 401 bp, Glycine max
  unsure (1)..(401): unsure at all n locations
tttatttcacagctgaatgggaacttatntgctggtacaatgtttcaagatctgatatccttggtctctggctacctactttcttaaccttcaggcgctgggatgaagattgcaccaaactctgctaaaattagtgcacgaattttctggtataagtgagacttgtgaatgtaatgccagttacatatatataaactacaatagtcagatatgagtgctgacaaatgccagcttctcctagccttctctcccttacttaattgcaccttcaaacacttaattgctaatgactggaactatattntntcttgtttagagactatacatgatgttgtcaatacttacggacatcaacatacaataagaattctatattaagttgtatctcatactaatttata

SEQ ID NO: 261753 - DNA, 414 bp, Glycine max
  unsure (1)..(414): unsure at all n locations
tgtgtngcanaaggatctcttaggtagcttaacattcgagaattttaatggtatgcataaagctagacatcaacttttacagaaatggtaaatgcttaatagattcttacacagaccaggaacatgttgagattattcaacactaaagggaatgaagattatggttagaattattgaagtgccaacatgtttgacaagaataccagaacttgtaacaaatagaacaaattcttcactattgtactgaaactttgtgtgaagggtaactaattctgaagtcacatgattggagaagccatagaattgggttaccaagcaagatcaacaactgttgatggagtacccattaaaaggcttgcagatcggttgaatcgacgcttgccagttgctgctgacaactatgtttggtgcttt

SEQ ID NO: 261754 - DNA, 314 bp, Glycine max
agctgcaagattcattttattgttctcttctataagtacttattgagaaacttccatactagattttagtgaatttgacgtctgcgaatattatattagtgtacttaagctaatgcaattatggtgatgttggcgggatgccgcgtgaggatttattttccacatacatgttttggtggtatataaacaaggtgaaaatgatgcacaagaattctacaatagatccttcgattatgaaagtagcatatgttaatagatctagcaagccattgatggcctgatggaccatttacatatgtattcaataggagaaa

SEQ ID NO: 261755 - DNA, 389 bp, Glycine max
  unsure (1)..(389): unsure at all n locations
gcctctctatctgctaaaaatccgcgagccctcactaacaccctctaccttccctcatatacaactatcctttcaattctgctatgacaaaataatctaccttggccctccttttcttcctataatagacatttttttattaagattattatatgcatttctaataaaaggtctaacagacatgggtgaaagtgatacacaaatataatctcttactatggtagagggacaagagaaagagtggctntataataacctgaaagcaaattggctgtaggagtctaaaatttgactgaattatgtgcacccatgtgaaggaaacataccaatctatgctttgttatatggaaagtaaatggctatagtaagaatattcatacttctatctg

SEQ ID NO: 261756 - DNA, 272 bp, Glycine max
cgagttgtgtggtccactatatgcctactctacttctggacttaatctctatacccaacatcatatatggagtcctttccatttgtgttgcatgaattaacatgataaacgatttgctgcgttggcacgatgtggggcaagctggtttacatagctattcaagaatattggaaagcttggcttttacagtactttcaagaatagatgatgtacttcaagccgactatcaaattcaattccataatctattatggagaacgataagtttggtt

SEQ ID NO: 261757 - DNA, 289 bp, Glycine max
gacacctactgattgatgagatcaccaacgccgctatcggtatgttgcgacaataccttcacaaccattatctattcattcggagagggtgtttgtcatgtgaccatatcgacgtccttctctatcataagccatggtccatagttcccttgcaatgcgatcaatccacgttgctatggctggactcaattggcgaaacctttctgaattttgatcataaatatgctcgcaaggagtacatactgcatgaaatgacttaacaacaaccattctaagtatatgtctaact

SEQ ID NO: 261758 - DNA, 396 bp, Glycine max
  unsure (1)..(396): unsure at all n locations
ctcgataaatggttatgctaatcgaanatctttaagctaaagatcattcatcttgatcttgtagaaagaataagcgtacttaattattnagaagctcctagaaacaccagatgacattattctagcttaaggcatcaaatagaatgtggctattggtctgaaagatcaataattggggtgcgagantacttttggtacatgactttataaacttacacatggttgcataagaatttaactgtttcagtaattttatttacttgtgcgttgggcttcttaaaatgaacggtacactattactaacagagaaaataatgtagtgaagaaaacacgatatatcggttggagatattgataatacaattatacagagggtaaatttaattagttataatg

SEQ ID NO: 261759 - DNA, 402 bp, Glycine max
aagcaaagagaattgtggaaatcacacgaagaatcattttgtttggcacatgaacaacgtttcatggagttgcaattaagcaatacacctgctagtgtctatgattctccaggaagaatttcaacaagtgatccctcagacgcatatatctctcctactagtgtggaaaaggcaaaacagtttgtttcaatgattgatgactgtgaatcatctactgtatatcgtaaaggcatctcagttaggatgaagcaaaatccaccctgccctgctatttccaaattcaccgggagttggaatcaaaatctttcagctgcagctttgatggagaatcaaattcgagctttgaactttgcttgcctgacgaggacagtttaattacacttgacgaactattcttgatgc

SEQ ID NO: 261760 - DNA, 443 bp, Glycine max
  unsure (1)..(443): unsure at all n locations
agctataaaaactagattggtacttttggaccagagatatgaacttgttcgtactaatcctaaaggatatatacattacattcggaagtgaatacgattagaaggacgcattgcatcgcatgcaaaagacaggactagacaaggtgaagatgggcaagngggtcccttccttaacaccacaccataccatgttgagtgttacaaccacaaacagtgcctttgattgctgttctctctagcagcttcttttgctctccaactaacatccacattgctctgtactgtgaagattcgggttttgtcgtataaaatataaaacaaaactgatcatcttttatatatatcttctgtgttcagacaaaagctattcctattccgacccctcccatctgctactggaaatccaggattcttcacatatgctgcctccttaattacgctac

SEQ ID NO: 261761 - DNA, 407 bp, Glycine max
ctagaaggtgtatatatatggagtgacagtcctatcgatagtccctctgcttccgccagttattctaaatggctcattattgtttccacacaattgcagagctctttcgttgtgaaatatatcagagtagctcatagctgacttttacacatgtttgggatgaattcttttttggaaaatactatatatatattatgttttatttatgctccctcccacagttaacacaaaacaattatttacatcgtctgtgtgtgagagagataaagagagaataactaggctatatttgtcgctaaaagaagcagaagcatgtcaaatgacctgagagctgtgattatatttttaaattgcatcttaaatctcaagtatgagcacatccactatgtgaaaggaatcaaatagtc

SEQ ID NO: 261762 - DNA, 416 bp, Glycine max
  unsure (1)..(416): unsure at all n locations
aggattgtatatgatagaattgaaaagttgtattataaagtaaatcaccgccttgcttctatagactcttcatgtntcgccaagaggaccatttagaatagttataacttttagaaaaacttacaaccaatttgaaaaagtcagaaaccatttgaatagttacattttttgatttattcagaaacaatcacacgtaatcgattaccatatcagtgtaatcgattacacaaagctgttatgtggaaggatatgactcttcacattcgaatnntgaattcaacgttcataggcactggtaatcgattaccaaaacattgtaatcgattacagctatttgaaatgaactggtacgttgatattcacgttggaaacttttcaatccatttggtactggaatcattacaaaatctggtatc

SEQ ID NO: 261763 - DNA, 198 bp, Glycine max
agaagtattttggggagaactatgcgctcttgggattagcgagcctcttggtaaaacctctacggtggccgaatggtttacacttcgactcagacctgaaagaaagatactcacgccttggcaagaacgccgttctgcggaatatatgactcatgctcctttaggtccttagattacgtggggggtgtagctacagag

SEQ ID NO: 261764 - DNA, 257 bp, Glycine max
caaggccgaaccacagaattgtttttaacaaaagaaagcaaaaacaaaaaatagccccactataaaagtactttcaacaacaggccccagccagcaaagttggtagaatgcagatcacagatcaaggaaccacaactgccccatatacttaaatgtcaatacacacctttcccaaaggataataaatccaataactggcaaggcaaaggattttaatacgcccgagcagatatataactcaaaaaagctgatcaaaa

SEQ ID NO: 261765 - DNA, 257 bp, Glycine max
ccacagtccacgatcacatagtgacagaagaatatgctccagtgactctaaatacgacgctataggaagggtgatcgggagtcaagaacattcccgattgctagccaatgctcaagatatgtgggacacctatctcgcctccgaggagatacatggactttctagctattgtcagcatatgacagacatatatggccatataattagataccgctaggaaatttgtattgcactcacatcttgactagttataactt

SEQ ID NO: 261766 - DNA, 420 bp, Glycine max
  unsure (1)..(420): unsure at all n locations
tatagatactcagcttatgcgttnatgaaatttactcatgagctattatcgattgtcacgcgctatgcagttgaatatagaaaggcttttttctgcagaatactcgctaagcccaatttcataatttttaaagacagagagggattagcgcttaacgcggcaaggcgcacttatcgtgactactctactggacaacacaggcttagcgagcagactcactaagcccaattccaagaagtataaaaacatataggtaattgtgcttagcgtgacaggcacgcctagcgcacatcaaaacacaaaaattctaagtgtctgatacacaacacttgcttagcgcacagttgtgcttagctgagtcaacagttaactttcacagataatatgaatgctcttagcgtgacaggccgtacttagcgt

SEQ ID NO: 261767 - DNA, 434 bp, Glycine max
  unsure (1)..(434): unsure at all n locations
atctatatacacatgggtggtgcttgcttgaatcttgatttcaggtattgtattgtcatcatcaaaaagggggagaatgtagatgcaattgactttgatgttttgatgatgatcatgatgatgtgttgcaattgatgcaaatgggcttttcaagattaaaattcaagacaatactttaagattacaaggcacaacatgaagatgatcactagaatattaggaagggaattcctaattgaattagcaaaggtttggccaagtgatttaatataaaaagtgctttcaaagctattactctctggtaatcgattacatttgaattcgacatttaaaagctgtaatcgattacacaatngnggtaatcgattaccagcagttagcaaacgttttaattcaaatttganaagctgtaatcgattacacaattgctgtaa

SEQ ID NO: 261768 - DNA, 351 bp, Glycine max
  unsure (1)..(351): unsure at all n locations
cttatgctcacttagctacctatatagagatatgcaatactattaggttggcgggtgtgcctacggatgcaatccagttgagtctgttctcattttctttatatggagaagctaagaggaggcttgattctcttataggaaacagtctgaagtcatgggatgaagtggtagaaaagttcttaaagaagtacttccctgaattgaagactgcagaatgcanagttgccatctcttccttccaccagtttctagatgaatcgttgagtgaggcacttcatggttttcagaaccaatacagctcaacatattcatagatgggttgagaccacaatctaagccgctcttggatgc

SEQ ID NO: 261769 - DNA, 316 bp, Glycine max
  unsure (1)..(316): unsure at all n locations
atgatacgcggaggtcgcgtctgggttgtaccatctcaggaaaggagactggtaaattcttctaggtgtcaccactgccaactggttggcgattaaggatggcatcacgtccccatatgacattggaatcggggcgaacttctgaagcttctttactggagggttcctccccaaattggaacttgtgccacgatagaaatcgccggcgggactaggccttgcaagagtcggngcttgagcaatgactctttgtggtggtgcagatgtgtgttgctggatgggcgccgagttatacgaatcttctgatgcaattcta

SEQ ID NO: 261770 - DNA, 241 bp, Glycine max
  unsure (1)..(241): unsure at all n locations
atatgaggtcaatccactcatgcgaatgagcagatacggactcgctctctagagcctgccggtgcttatgaataaaatcaacaggatttctaccccaagcacgaagtgttacagtatctggcatgacagatgtaagctcataaccatgaaatgccttngtgagcatacaatgacctcttcattaatgaaaaaaagcactaatgcgaaaacatccatgaatataccaagccttccttccatt

SEQ ID NO: 261771 - DNA, 383 bp, Glycine max
  unsure (1)..(383): unsure at all n locations
agcttagcggaccaatgttgccttggtggagcatgggtatgtctgttgttgaccatgcgtagtangagccaccattggcaccgtacactttcttgggcaactgaggagaaagatcaatgtccatgttgctcttttggctcgcattcactgcgtagaaacaccgcgggtggggtgggtatntataaagttaagtgtaacagaaaaggatgagtggcagcggcacttaaaggtaacagtcatcatccacgggaccactactagtccttatcccattctcatctacaatcaatgcagctaggtaggtaattcgaatcattttcttttcaactaactgttaaattcagattatggataattattaattacagaaatgattctagtac

SEQ ID NO: 261772 - DNA, 519 bp, Glycine max
  unsure (1)..(519): unsure at all n locations
gcttgtcatgaatccatcctttatatatggagactactctggtgtagccttgattaaatatatgcattgtcgtgattcatgagtcagctactcagcttcttntataaggaagctgcagaagaaatataattctttgttcttatatttcttttttattgtgaaaaaatattccaggaaataccacctgaatttgcagaaatatatttgaagaatacacatgcagttgtcatccttgaggtcttggaagggagaacatggcctgttatttgttctgctcctacaattactcggggatggcacaaatatgcatctgaanatcatttgaatgtgggggacgtttgtgtttttgaactgatccagaagatccagggccttgccttcaaggtttccatctttcgaggcgcagaagaaccaagttgccccatttcacaaggtatctattgttccatttttatctacacaatgaggatttataatcagttcaaggtgatgcacgtaattagacctaacttttcacgt

SEQ ID NO: 261773 - DNA, 282 bp, Glycine max
  unsure (1)..(282): unsure at all n locations
cgcagtgagaaagtgtggaagagacactcttcctacttttatttgttgaccacagagtggtacctgcagatatgtcgacggggtcaggagacctcgtggacgtcacgtggggtgctattttccaaaaccaagcttgaccacgcccgacccaacccgggcatagtcagtcagtgagaacctgtgacgtacctaaacaagcgagctcctggctgtcaaccaatcaaagaataaagaccactaagcacggaggctngtgtggtggctggctagctatggatcttg

SEQ ID NO: 261774 - DNA, 522 bp, Glycine max
  unsure (1)..(522): unsure at all n locations
gctgtatcgataaacgatacacacacttttattttgtcttatacaatcgggtaatcgactacgagcagcctatatatgattaaaatagagagttataacttcagaagacattttctaactttagaanattttcttctacattatgatgcatgatgcacatatgaaaagatagatactaagatgcaacacacactataacacttaatacaaatgccattcaagagagtcggacatgtaaaagacaaaacttattctctctcactcagaaacctcactgcaccttaacctattcttctctcagtcactcaaaaaacttgaaaccctaattgtggccaagaaatagaaccaacccctaggtgtccaagtcacacctaactttagaaacaaccctccctctacatcattcgaggacgaatccaccattnagattaccatacccacacccatgaccattctttttgtcgagttacaatgaaggacacagatgcacgagttcacatcgagcatttcttcatatcgatt

SEQ ID NO: 261775 - DNA, 384 bp, Glycine max
  unsure (1)..(384): unsure at all n locations
tgtctcagcgtntatgcgagacggagaccaacatgctatctattatcgtcaagtaccaagaagagttaggtctagccgcggcccacgagcataggattgcggacgaatatgcccaagtatacgcggaaaaagaggctagaggaagggtgatcgactctntacaccaagaggcaaccatgtggatggatcgggttgctcttaccttgaacgggagtcaagaacttcctcgattgtagccaaggccaaggcgatggcagacacctactccgcccccgaagagattcatgggcttctcggctattgtcagcatatggtagacttaatggcccacataattacaaatcgctaggaaacttgtatggtctctcagaccttgactagata

SEQ ID NO: 261776 - DNA, 378 bp, Glycine max
tttcttcacacacctctcggcatgataggctgtcatcttttgctcgtaaatattggaggactcataagcattgagcctcacttcttccagctacaacaactgtagctttcgcttctcccccgacaaggactcatcatagttaaggaacttaagcgcctaataaactatgtgcttcatctctactaagaggtgacaaaccttcccataaaccaattggaatggagacagaccaattgtggtcttaaaagcagttctatagcaccataaggcatcatccaattcacagcccaatcctttcttaaagatgcaatgatcttctcaaggatcttctttaattcccttgttaacaattcaacttggccatttgtctaagatgat

SEQ ID NO: 261777 - DNA, 390 bp, Glycine max
aagatataagctacctctctctaatctatagctgatattatttgtaatgtagcttacagcagtaggggttcttaggtagttttgtatggtaatggtagccgaggaccaactacgcagcatgtacgttcttgtgttacagtagggctgtacaaaggctccaggcgaacataaatgtcaaaacagtgatagctccataaatgtcatctttattggatttctacccacactgatagagagagtctgagtgaatatatatgacagacgtgttcggatatttattcttttcttctccagagttttaaaaagtagcacgcaagacaataatcagaatgaaaattttgatcctaatgcagttttagtgaaattccatgagtctattaatgaaatata

SEQ ID NO: 261778 - DNA, 464 bp, Glycine max
  unsure (1)..(464): unsure at all n locations
gtcacctgaggctgcagcttccaagtttaagttctcctcaaactgttcttttctagntaccaatgtcctatnaacaatctctgtttgcccatcggtttgtgggtgacaagtggttgaaaataacaatttagtgcccaacttgccccacaaagtcctccaaaaatggcttaggaacttagagtccctatcactaacaatgctctttggcaaaccatggagtctcacaatctccttgaagaacaaatcagccacatgggaagcatcatcaacttgtttgtggcagccccaaaacaaaatccatggataaatcaatccaaggatactccgaaatnggaaatggagtatacaatccatgaggctttgccttttacatacaatgcaatgttcacaaaatttctgtacatcctttntcatatgacgccacataaatagtcttgtaatgtttctagagacttttggacccc

SEQ ID NO: 261779 - DNA, 402 bp, Glycine max
ctataagcgcgggttctggagaccaggtcaagcgttctctatttctaagatgatattccgagtactctggatttagtacgaccatgccctcctgatttccagctgggaaattggcgagtggaggaacgccccggcatttacgcaacaagcataatgtaaacctttacggttttaaaagctctatagttgggcctacgctttagggttttcattttggtaaggctttgtgtcttttgtttttgaatttataatacaaggatctttcttcatctgctcctgggctctacccattctcattcatttgcatgtttacttctttatctaaaacggcagattcgatgacgagtccctcgaaggtactaatacctgggacccgtctatcaacttctagcacaaaatgaa

SEQ ID NO: 261780 - DNA, 461 bp, Glycine max
tcctactaaagatatgtacttgatggagggtgtgcttagaaatgtgacggagagagcacaattatttggggatgaataactcaacttgcattccctggacacaagatcctctttagataagtttttgtataagcactaatagaagctgaaaataagagagaaaaaggaattaagttcctcagatttattttgctcttgcgcagtcgaaatatatatctaccaacaaaatataagagttacgattcttatataaagattgatagaggtagtataaatctgactcattatataacgacgttgctcgaatctcattggtcgtaatgatttgcaagtaccagtattttttgagccaactcaccaaaacttttggtacgacaaaataaaattaaaataatgtctcgattctgacttatgatattttgttgtgcattatggtgctttttgacgggacatgagcatca

SEQ ID NO: 261781 - DNA, 365 bp, Glycine max
  unsure (1)..(365): unsure at all n locations
ctcaacatcctcttcctccatggatgtatgctgttcttggaacttcgcactacaaaaggctgagaagaagaagcagtacaatcctccctctgtgaacactccacatcagacttgcgatggctgttataaacccagtcttcatcattacaacttactctcgcattggaatgaaaaaatcctccagcatttgcagaagccagtggttcataaccgaatgaccttctaacactggaatnctccttctccccatctgtttcaccttcctcagaatcatcaagtgacttacaatccaaaggataattgtattcaccatcctcactcctagagcaccttccttcactgccgtcttcctcacgacaaccctt

SEQ ID NO: 261782 - DNA, 242 bp, Glycine max
ctttgcggttgatataaggatggccctatgtggataactgggtggtggcgaacgaggacgtctgttattggctgaacaatgacattgctgggttggtgggaaactcggcccgatacgaatggccagcacagcatgggttctacctccttattaccctctcctttgccccagtttctcagccgcctaatgggatgaccaaagttgcccctttctcagactcacatcgatccttatactggcga

SEQ ID NO: 261783 - DNA, 471 bp, Glycine max
  unsure (1)..(471): unsure at all n locations
tgtttggattctgcaacagatctctgatgttcttactctgagtaagcactaaagacttatcaggaagagtttttacttcaactccaagagagtagtccagttgaccaagttgtttgagagaaaacttggaattgggctgagatgtgagatattgaatcagntgatcagaactacagtaattataatgtcatctacatatactagatgataaaaagtatgagaagcagtcttgtagatgaacaaagaatgatcgcatttacttgcaatataacctaactgtatgagagtggactgaagccttatataccacttgttatggagcttggtttgagtcatacaaaactctattcacgttgcaagccatagaagatttggagcttagataaccaggtggttgagacatatatactcgtctcattaagcagttcattcataaaatcattgtttactattaactaagcatgttacact

SEQ ID NO: 261784 - DNA, 305 bp, Glycine max
  unsure (1)..(305): unsure at all n locations
accctcctggtaattcaagaacacttgaaattagtgaaaaacatcggtttcgtgaagaaaattccagccgaggcgctttcgtaacgtttctgtgggtgaattcgcgaagattattgaccatattttgacggttttcgttccttcttcgtcgttcttcggcttcaactggataggttccgacctcaaacttttcaatacatcttatgtaccctnggagcgcctcatttgtcttcacgtgcttctattgtcatttcatttacttttcgtacccccttatgacgtgctttagtcattgacttaagtca

SEQ ID NO: 261785 - DNA, 504 bp, Glycine max
  unsure (1)..(504): unsure at all n locations
agctngaatctcactatntattngagaccaacaatatgattgcttatcttgtgtttgtttctggccactcttcgtcattgtttctggacaatctgtttatgtatcgtagcgcaactggttgacgtcaatttcctctatttnggctctattctgttcacaatcacatcatgcatcataatccttagaggtccctatttagtatagcattttgggggttggctaatgataatgaactgagcccaaatgcgaatgacgctctgtaaacagtaaacaatatgctgctaactgataatgaccaaactgtattcggagtcggacttttagtttngtttcactaaattaacttgtcagggttgcatagccatgcttaatttatgcttatttttcaagtcaatgtctaatatttgaactattatnntttaagttgatgaagcttatgaacaangttgttcaattacatgtgttaactttgtgacttggtgtctatgtttgactatgtattgg

SEQ ID NO: 261786 - DNA, 364 bp, Glycine max
ttttaatctgtcaataagattatatatatgtatatatgaagcaaaagtactttagaagttagagtacaaggactatccctgcccatttacattagtatataatcgagtaattaataccatagcaaattagcatgactgactaaaaagaagaattgaccaccactcatacaacaggtagaagtattttaaattttagctttaatctataaccaactcttaactttcatttaacggaaaaagcaaataacatctattcgtaggcaccatgtatcaaaactgcagtttacaaaagttagggaatagaccataaagcaccttcccaatacaataaaaggcaccaccaacccacctcatttgtattaac

SEQ ID NO: 261787 - DNA, 190 bp, Glycine max
cagcagcaagacgacgggaccgcagcaccagagcactttcaacaaaaaaaaaagacaggcccaacgaaaacggaaacaaaaaaaacctaccgccaccgaaaaaaaaccaacagaaggagacaaacaaaaaaccacggaccgcaaacccaaacacgatagaagcaacagcgaggagaagaaagaaacaaag

SEQ ID NO: 261788 - DNA, 286 bp, Glycine max
  unsure (1)..(286): unsure at all n locations
gcttgtatcgattcgctcctagtcacgatcacatcatcttgctcctttctttntcatataactcttggtcgttctctccttctctctttttatatgttctggggtataataattcatatatgtatgtatgtgtcggaacctacccttctgtaagagggcgaggcgaaaagccaaaggagcatcttccaaaaaggaaaacccgcgggagtcgccaccaacgtttactctaggaaaacattagaaataccaaaataataaggtcgaaggtctgcaaattttgaaaatg

SEQ ID NO: 261789 - DNA, 419 bp, Glycine max
  unsure (1)..(419): unsure at all n locations
ccaggacaacggcacatggtaagtcttcctcccaccacggaattataaaggtgagctattttggtgtactctaaataagaataatgcacacatgaacatgtactacgtgagtttatggggcagtgtanactcattgaaggtggtgagtaggtggatggaataagtagccgtgggaaactcagaaataggtaacatttgggaccattnttttaattaatttaatacataaagattaagnatctctaataaccactcgatcaagaatgaaatgaanaccatgtctctgtattcttgaggaaagcaccattatgtctttctttttttattgttataaagggctaaaatatttagctgttttatgagatcaaatttaaacaacaaatattttcttatatataaagtcctaaaatatatcacgg

SEQ ID NO: 261790 - DNA, 240 bp, Glycine max
  unsure (1)..(240): unsure at all n locations
ctcaagcttagaagaagctcatgngtgacatctacaactctctcccatttctgtgacacacagggatgaaatgtctgcatgaggttatgaaggtaacacatgaccgctcactgcttactctcacaattttcttgatgcattggtagcatctgatcgtttctgctacaaataccatgtgtggcacattattatcccacgattgtntatacacattccgcttaactgctgaaacaaaaggct

SEQ ID NO: 261791 - DNA, 354 bp, Glycine max
tccttgagaagcttctgtgagaagcttcctttataagctagagcttaactacacacagcggcgctaatagctagagctcaccctccttgagatgagaagctagagcctatctacacatacctgctataatagctaagctcaccccaagccaaaatacatgaaaatacaaagaaggctcttctacaaagactactcaaaatggccctgagataccacgctaaaaccctatactactagaatggccaaaatacaatgcccaaaagaaggaaaaacctattctaatattgaccaagaagagtggatccaaccttggcccatggacttagaaatctaccctgatgttagtgagaaccc

SEQ ID NO: 261792 - DNA, 314 bp, Glycine max
  unsure (1)..(314): unsure at all n locations
ctcaacgaagctacctacgctatanatagaagcatgtgttacacttgttgcaactttgatgaatgagaatcttgtgagacacacttcatagttcaacttctctccctcttttcctacttcagatttgtgttccccactctctctatctctctctctttcttttacttcattgaagcttcctctataagctgtttatccaaggcactctcttggtgcggaagctttctccttcatagttcatctcctagtggatgacgcctctcctcacctctctatctacatcttctgtcgcatctctatggtgaaacatcacc

SEQ ID NO: 261793 - DNA, 370 bp, Glycine max
gaattctccagcgacacattgaactcgcacctatctagtggcagaagacccactgtgtacaaaagttttcctccatcatatacaaaccttttgtccctaattcacaagagtattgtttgtagaaactatcaatcacttttctaccaatggccttgctttaacagctcgttatcatcgaagataaactaccttgaagccttaataactaaagcccagataccctttacggaaactgcaagactgaatggtcctcctcactatactgaaaaaactgtgctggacattacacacttcaaaagatcacagaaaggatggttttctgggcccacccattctaagataaatacttgacgagcattgtcgttccaat

SEQ ID NO: 261794 - DNA, 390 bp, Glycine max
  unsure (1)..(390): unsure at all n locations
tcagtatggtgaggtacattggagagaatacggaaagttatgttagttcatgatctatcatgttaatcaggggtttataatctgatttatcacttangatctcttgatctctttaatatgataaaaattataatattgcacacgacaaataccaaattttatgttatttgatgaaacatatacaacacatataataatatatctacaggaatacccttttaaattaaggaaataatataatgcatgtatgtaagagtgcccatgagtactttagtatatacaaaaattacatattattttaattgtgtaaaacttaaataaatatttcttttaatccttacaaaatcactcttataattaaatctctcacagttcataactatatattac

SEQ ID NO: 261795 - DNA, 352 bp, Glycine max
  unsure (1)..(352): unsure at all n locations
acttaataaatganataacactatgcacaaaccaagtaacttaacatgccacaacttgtgtacgtgagtaccttatgaagaggccagctagcttgtgacagcttataagccagatcgaattgaagaaatttctccatatataattcaagaaattttgtgtcagcaatgtatgttgtgtgaataaagcttcaaataaggtaatgaggttcacaatcaagcttcatatggttctagtcaaatcattgctcaatattattcttagttacaatcaaactccatatggntctgccatcagttgctacgcacttgtataccttgtgagaggtggaattgatgcaatcctaccccctaa

SEQ ID NO: 261796 - DNA, 342 bp, Glycine max
atgcttactaaagggagacaaaaagctagtgcaaatcaaaactccgatatctcatgggtgggatggatgaatgcatgatggaatgcatatgacacagatgcaatctaaaaaagcgggggtccggggaatttgtccccttcttagatacgacgtctaggggtagcagaatgccccaacgcactgttttaagaaggcgacacggaccctccgttggttatgtttacagaagggatcaagacagaacccatatgcgacgcctatgcaaaagacacaatgcgggaatgtacacagtatgacaataattactgcacataagcaaaagggtatatgatacttatgcat

SEQ ID NO: 261797 - DNA, 478 bp, Glycine max
  unsure (1)..(478): unsure at all n locations
tcacctgcggcatgcaagcttgtatggtcgatatcaccatgatggtatatganatctctgctcatccgattgtgagggagtatgttcctccatctcccaatagtgagattaccttntccgcatattcgacatacgatctagctacccatactgggttccttntgcccatatgtctaattgattggacatctcatttggaggactacactggtggtgtcagtgatgaggtgaaggatccttataaggatgtgagcgacccgagggagacatcatagatccaggaagatccatctaaagattcttagatcttgcggcatgttttagctgatgatttgtagtaagtaggatttcattcttatggctagatatttactttccaatatgtacatgggtgggtagatctaagatagcattcttgatgtaatacctctatatcatctcttggttggacattttatggcgattgtaatacttgaat

SEQ ID NO: 261798 - DNA, 407 bp, Glycine max
  unsure (1)..(407): unsure at all n locations
cgaaggtgtgtaacccaccattttctcatagtattaacaccggttacgcgtctactatcattgttatcatctccttttccatcattgggggcgccacttgagctgccagatccctccacctttgggcgtattctttaaaagatttgtgcccttntttacccatgttctgtagctgcatcctatctgaagccatatcagaattgtactgatactgcctaatgaaggaaaccattaggtccttccaagaatggactcgggaaggttccaagttagtgtaccaggtgacggctgccccagtaaggttttcttggaagaaatacatcagcggtttttcatctttcgcgtacgcccccatctttggacaatacattttcagatgaatcttggggcaaagtagccccttgtac

SEQ ID NO: 261799 - DNA, 521 bp, Glycine max
  unsure (1)..(521): unsure at all n locations
gcgatccttaatcgactgagctgcagctggaagagcttaatggaggaagaagagggtgataattatagagggggagcacgaacttgaaggaagataaagggagagaagtttaactttgagttgtgtctcacaagactctcattcatcaaagttacaacaagtgtcacagatgcttctatttatagactaggtagcttccttaagaagctttcttgagacaactttcttgagaagcttctttgagataacttccttgcgaagctagagcttagctacacacacccctctcataactaagctcacctccttgagaagattcctaaagaagctagagcttagctacacacacctttctaatagccaagctcacctccttaagaagagaagctagagcttagctacacaccctctataatagctaatctcacgcccatgacannaatacatgaaaaacaaaaaaagtccctactacaaggactactcaaaatgcctcngaatacaagcctannaccctatactac

SEQ ID NO: 261800 - DNA, 181 bp, Glycine max
gaggctgattatcagggcactggacccattctccaatacaacctaagaaactaatatctacacaaggacactccttaaatcgcaagagggtgttctctaagactgaaaactgcctgaatgtctaaggataaatggccctactataactaaaaatcataaaaaacactacaatcactaaaaa

SEQ ID NO: 261801 - DNA, 384 bp, Glycine max
aagttttgtggagtctattttgggcagctcagtattggagcaaatagcaaaacagcgcagttagaaaagatctcgtcagcgttcagatcaagagcgtcataagcaggtcagaatatgataagaaaatctgagagactcttaaatagttaaagagtttaaaatatgatgccactttgtcagaaattttaaagaaaatctttaccaagagttgtactctttgggaatcgattaccatagcggaggaatcgattaacaggagtcaacactattttcaaactgatgtacaaagctgtgatcgattaccataatcatgtgatcgattaccaatggtttaaaatgttagatttcaattctaagagtcacaacttgtgataaaacactttc

SEQ ID NO: 261802 - DNA, 358 bp, Glycine max
  unsure (1)..(358): unsure at all n locations
cttgaatcgacatccgtgtgacaacttatgaccatttgtatttatgagagcttccgcagccacattcgagcggctctatatgtgatgcacacaaattggacattcgaattanatggtatgaccatttgaatttctcaagagctctcggtgttcaattctgagcgtctcgatatgtgaattgcctgaatctgacatccgtgagaataagttatgaccatatgaatatctcaagagctatcgttgttcaatgatcagcctctcgacatattatgcgccccgatcagacatccgtgtagaagatatgactatctgatattcccggagtttgtgacgtttaattacagcgtatcgaatatta

SEQ ID NO: 261803 - DNA, 368 bp, Glycine max
  unsure (1)..(368): unsure at all n locations
agcatgattgattatagaaatatatttatatacaccagctggtctgttagaaagacccaacatcttacctatngttgtcaatttttacttgcattgttgtttactcgttttagcctatacttatttaattctgttccaaatcatcaattatcaatgtctctctctacaatgccttagtatatgaatataactcctgtctaagactattaccctgagttcgatactcacattcatccatattaatattaaatacttgatgattcagcgtgctctccaacaaatctgatttcccttgagcatatgtgtataaaataaagtggatcataaagtatttggaggggaaatccatgaaatgtattatggcaccg

SEQ ID NO: 261804 - DNA, 384 bp, Glycine max
cagcctggtctgatagtcttcataaaagccctgttatatttgttttcttcggcgcacgaacgcaatataataggtgatggaaaaggaaacgttaaccagaatatgaaaactcaataaaataatgagtaatataaatgggcacatgactcacacctaacatgtgattaacgtcttactcgattataggaacggaagctatagagcaataatgtgtaatcaaagtctgtttggttcaaaaaaaataattggacccaaaaataataaagtaaaattgtaccaaaaataaatcaaataatacatatataaggctacttaccagctcaaaggttctaacaagctaacctgaccattaattaaaggattaaaaacctgacctacctctaa

SEQ ID NO: 261805 - DNA, 359 bp, Glycine max
  unsure (1)..(359): unsure at all n locations
ctgttatccctccactgacgggaatgggaggtgttcgctgatctgtgaaaccagcctcacgcagggccctccactctaagaaccaggagacctatgccttcgctcaagacccatgagtcaattctcaacttggagcgggcaggccaacattttgcggtcacagcccaacccatcaaagccaatgaactgttccatcacctttgtgcccccacttgggtcacaagctaacgtaactcagctcggcattcaatcaagcttttcagagggtatataaagatattgttgtctccttntctatcctatgtgggacataaggatagaagaaagtttgcagtttaacactaacaatctcanagagc

SEQ ID NO: 261806 - DNA, 125 bp, Glycine max
aaaaaccgctgagacgacagacaaagggaacgcacattactgagacaaacatcaaaaacagagtggtattataacagccaactgcaagcaaaaacccaagaaagggaaaagacaaatccaagaac

SEQ ID NO: 261807 - DNA, 449 bp, Glycine max
  unsure (1)..(449): unsure at all n locations
attttcacattaaaatataatattctatatattatattaatcagaaaactttataagttagacgttcatatatttaagatatgatgtatatatatattagccttaagcaaattaatatatctaacataatataatataatgttattcaatataatataaaaaaaattaaaagtaaaaataactgaataatatatattaaataattgaaaatacaaaaatattgtcgtatgcctctccagtttccataataatgtaaaataaatactgcacagtacaacgacattatagtaaattttggaatgctactcttgtgtgcatgaaacaacattacaaaattggttttataataaaacgatcatactctaacttnntttttaaattgtcaccacatagaaaatgaacaaaaatntccatccgccatttatattgacactcgtctgattgttata

SEQ ID NO: 261808 - DNA, 202 bp, Glycine max
  unsure (1)..(202): unsure at all n locations
ntatggcaaactattccacacggcatccatccatgactattctctatcaaggacgcctaaatatgaagactctaagtgacggatgactgcaaaatacaccctatctataatgataataccaattaattcttttagggcatccttagatgtacataccatgcccaaacaacaactaaatctctttcatattggcgcgagtcga

SEQ ID NO: 261809 - DNA, 449 bp, Glycine max
  unsure (1)..(449): unsure at all n locations
gaaactggagtcattgtacatgacanagtcccttgctaatcggctatgcttgaagcaacaactgtgcaccttctagatgacagagtcaagaacagccactatacaattggctgatttcaacaagattcttgataatatggaatatattgaagtatagcttgaagaggagaataaagcactcttgcttctgaattccttaccaaaatcctctgaacatttcaaggattcaattctttatggcaaagatcaagacattaccctagaagaagccagaccttataaggaccaggagacgctaaacagcatgactccaaattgacgatatggtgaagcttgatatttcaggggaggatgaaaaagggacaagagaagaagtcagacacggcagggattaagatggcagaaacaagtcaatgcttattgcacanactgtctttaagaagatgcca

SEQ ID NO: 261810 - DNA, 331 bp, Glycine max
tagcttgcttagagctgagtgaatctctctatgcaatgatgttattatataattatctaatcgaagaattgggcttcggcaatgcgtatatgaactgaccttaatgcaatatatacactgtgacgctggttaattaaatcgtcacaaagggatatgttagacttaatagacacctttatcaagcaatacttcttgctcaaataaacatgttctttgcctctggagaacaagcctaacctatataagcatataatcgaactggcctgttttcatgactactgggtgtcattatgtcacacacttaatctgtgaatgagactccttctacaat

SEQ ID NO: 261811 - DNA, 389 bp, Glycine max
cacatgaatcttgcgtgctatatatcccctgaagatgcctcacacgatgtgaattatatgggaaactagcaccgatcaggatttaatgcaagaggatttgcctgctaccagccaggttccaatattaatataaatcaacggcagctgacgtctcatcctggaaaccaatttaataaagaccaaggaggaccatccaatacgcctcaaaatgaagagcctagcctttatgagagaacaaccaagctggaggagactttggctcagttcatgcaagctgtgatgtctaatcacaaaagcatagagtatgctttaagaacctggaaattcaagtatgacaactggctaagccgatagcccataattcttctgctatctttggggctaatact

SEQ ID NO: 261812 - DNA, 218 bp, Glycine max
  unsure (1)..(218): unsure at all n locations
tataaatactcagcttacttcaagttgaagctggttcagatttaaattgattatctatacacaaagatgtccctgcacaccgagacacattattttaactcacggattcatgctgggcangattaatggagacaagcactgacacattgatctttgaacatgcctgcatgagacattcattaacaccaacataatccatgcaaaacaaatgagcatat

SEQ ID NO: 261813 - DNA, 487 bp, Glycine max
  unsure (1)..(487): unsure at all n locations
gcttctatataagctgaaccattttatcaataaacacaagttgagttttattcaganaattagagtttatctctcttatcttagtgagagtgattctcctaaattcttgagtgattcaagaacaccctggctgtatcaaaggactttcacaacctttgtgtgttgccctcgctggaaagagtgattctttccttcctatcatctccacccttgttctttcaaaccacaattccagaaaatccacctctgcccaaaattatctcgtgaccataactcccatttcacacactcaaattaagtgattcttgagcctatattgaatttcaaaacgagacctcttcacctcgtttggaatcacctcatttggagccctgtagcttccgntattgccatttctatatttctgtccagccaccacttaacctacgttgtaccatcccattcatncattttatgccagaaaccaccttattaagacccacgagat

SEQ ID NO: 261814 - DNA, 329 bp, Glycine max
  unsure (1)..(329): unsure at all n locations
tatgcgcctatttccttacaaacgttctcttgcaccagacatttaattcgaaaaatgcacccatatacaatcaaggcagcttcgttacctagattatttacacgtacctccaaggtgtatttgttacttacatcacacacatctccttggctaaattcacatacatgcatactcaaagcattttggggcaccaaaaattgcacatgtgcacatcttggcatttctaatacctatacatacgcaaactttatgatgaatcttgactatctacacaataaggtgctacatttcatgctcctttttcaagttnttggtacctaaagccgcat

SEQ ID NO: 261815 - DNA, 356 bp, Glycine max
  unsure (1)..(356): unsure at all n locations
tttgaccacagagtggtacactggagatatgtcacggtggtcangagacactgtggatgtcacgtggggtgctattggccanaaccaagcttgaacaattccgacccaacccagacatagccagtcagtgagaacctgcgacgtacctaaacaggcgagctcctgggtgtcaccccataaaagagcanagaccactaagccaggaggcttgtgtggtggctggccagctatggatcttggatgatatctcgaatatgggctctggtaatcgattaccacaggtgtgtaatcgattacaacgcttagatatgaagacaggaagttaagatggcctctagtaatcgattactaggggt

SEQ ID NO: 261816 - DNA, 393 bp, Glycine max
  unsure (1)..(393): unsure at all n locations
gaagaagaagaagttcnagagatcaaggcgtgttaangattgtataagaatgattggaacaaagtgtattcaagattattgaaatgcaaaacaaagccttgcttttatagactcttcatgtctggtcaagacaaccattataagagttatgacttttataaaaacttaaaaaccaatttgaaaaagtcaaaaactatttgaagagttacatcttctgattntattcagaaacaatcactggtaatcgattaccaaatcagtgtaatcgattacacaaggcttttatgtgaaaggatgttgactcttcacattgaatttgaatttcaacattcaaaggcactggtaatcgattaccaacgcattgtaatcgattacaactttttgaaattaatt

SEQ ID NO: 261817 - DNA, 214 bp, Glycine max
  unsure (1)..(214): unsure at all n locations
agtggatcaaactaatgctggcgactttatgttttattcatgagtctanaagcccacaaggactgcttgaatgcaaactcacacgtcccgatgaaccaaacatagggttacttgaagcctcaatgcctccccactaccaaatacaggagtactcgacaccccaaatgcacttcctgtgctaacaaaagttggacttgagggtgaaccaaatgca

SEQ ID NO: 261818 - DNA, 472 bp, Glycine max
  unsure (1)..(472): unsure at all n locations
tgcaagcttacagaagttaagaacattatgcaccttatgtctttggttctacgtatctaagatgntaagggatatcacgtaactgttatcgaggtatctaaagctttgcacctaaagctttgatgaggtcactacttgcaagagcattctagagaagggtggactctaaggatatcatgtaactgttatcaggtaactgctaaaacaatatcagggattatgatgagaaaattactacagaagcgcacgcacgtatgatatgataatcttatgattatatatataatgtattcttgaagacggtctaaggatcaacaacagtctaaaggttacataaatggtttcaccgtttaaagctatgtttggaaagactttcacactatattactgcttgataccatagctacatggttaatctaaccgctatatagtttaaaaaaatacttgttaacaattagaaatatataaatgc

SEQ ID NO: 261819 - DNA, 412 bp, Glycine max
  unsure (1)..(412): unsure at all n locations
tactcangcctcaatattcttaagcaaaagctaactaatgcccccattcttgttgttctcaactttcacaaatctcttgaaactgagtgtgatgcttcaaatgctgggactggggccgtgtaaatgcaagaaggccatccaattgcttaatctagtgaaaagntaaatggttctacccttaactattcaacttatgataaggaggtgtatgccttaatacaggcctctgaaaacatgcgaacactacctttatcccaaggaaattggcattcatagcgaccatgagtccctcaaaatatcaatgtgcacggcaagcttaacaaaaagcatgccaagtgggttgaactcctataacaattcccttatggtatcatacataaaaagggacaaggtaatactatagacgatgctc

SEQ ID NO: 261820 - DNA, 470 bp, Glycine max
accccacctgacgttctttatgtctcctgacacccgcgacatatcttcaggtaccactctgtggtcaacaataaaagcaggaaggttcacccttcaacacttcctcatctcaagcttgtatgattatggggtacccatcacatgtggtactaggtggcggtcgggcgatggtgcacaacaagattctccacatccacaatgcgcgcataaacccaccattctctgttgcccaccttcaactgagctcacgtactcccacgtagcccatatcctctgttctcttaacaccgggtccccatcaatccttccaagcttccacaacatccaagcgaaacaacattctcacagcacaagctatcacagtctatctaacagagctaagcagatactctgtcaaacaccaccaaatgtacagctttaccatcaaagacccagaacaatttcttgttccattctgtaccgttgatcga

SEQ ID NO: 261821 - DNA, 231 bp, Glycine max
  unsure (1)..(231): unsure at all n locations
ttcatttaactggcttagggcttggcgggcacgatcaacacactacctacgacacctactatatggtgatttgaccaacactgttactacgatgtcgcgacaatgctacanaaccttatttatacattttgagagggtgggtgtcatgtggccataactacgtccttctctatcataagccctccgccattcttaccttgaaatacgaccaatccatgttgccatggctgg

SEQ ID NO: 261822 - DNA, 342 bp, Glycine max
  unsure (1)..(342): unsure at all n locations
cattgatgttngtatctatgggaggaggttgtatgccatttctgtcttaagaatagtgtcccactggtaaaactaactttccaaatgtttgccttcgcaagaaatggccccgaggaagcttgccttaaagaggtccatgaaggacaaggcatccgaagggactagttccgctcccgagtatgatagtcaccgctttaggagtgctgtacaccagcagcgcttctaggccatcaagggatggtcgtttctcttggagcgacgcgttcagctcatggacgacgagtatactgattttcaggaagaaatagggcgccggcggtgggcaccactgtgtactcctat

SEQ ID NO: 261823 - DNA, 283 bp, Glycine max
aactagctggttaaaacagccgatcttatgatgcatttccaagttccgaccgcaatcatttgagggcaagacatctaattgtgttagcaccaggaagactaatccataatgacgaaagcagatatggcataatcttgacaatatacgcatttttttttttgaaagcaacaactccgcttttaagctatgaatctactacaagaattgggcacgctttcaggaaaaacagtagatgtcggacactttcattataagtatatacataaaaataaaacttgaaaat

SEQ ID NO: 261824 - DNA, 469 bp, Glycine max
  unsure (1)..(469): unsure at all n locations
acccatcacatgtggtactatgtggcggtcgggcgatggtgcacaacaagttttccacatccacaatgcgcgcataaacccaccatcccctgttgcccacctccatctaagctcacgtactcccatgtagcccatatcctcatttctctcaacaccgggtccccatcaatcctctcaagcttccacaacatccaagcaaaacaacattcaaactgcacaagctatcacagccaagcaaaacagagcatangcagaanactttgccaaaacaccaaccanatcacagcttttctcacttaaagaccccagtaacaattccttcgttctggttcatataaccgtggatcgactcgaanattttactggaagtctctaatacttaagcctacattntgaccgttgggatctactagcaagcatccagaactcattctgcattactctttccacagccaaccacacacaagca

SEQ ID NO: 261825 - DNA, 335 bp, Glycine max
  unsure (1)..(335): unsure at all n locations
tataagaacanannatgctanatcatntcctaatatgcatctgaattatgatgcatcaacaagaatcaagccaaggctattgtgcaagcaatcaatggngcaaaacacaccaaaagattatgatgatggatggctcaaattctcacacaggtaaacttatcactttcaaattgagctttcaaaactatcatgacatgtagaggaaacacaagggattcaaatcataaaatgttcagagacttttattttcagaacaattacccattacttgaacatatcctataattcanagaaaaacatgcanaattaacacaacacaactaacaatattaaac

SEQ ID NO: 261826 - DNA, 532 bp, Glycine max
  unsure (1)..(532): unsure at all n locations
gcgatctctaagtcacctgcggcatgaagcnttggtntaaaattcgagcgtctcgatatattactgtactcaatcggacttccgagtgaaaagttattgtcgctagaattagctgcgagcttcggttttaaatatcgagcgtctcgatatattacgggactcaatcggacttccgagtgaaatgatattggcgctcgaatttgctacgagcttcggntttaaatttcgagcgtctcgatatgttacgggactcagtcggacttccgagtgaaatgttattgtcgttagcattagctgtgagcttcggttttaaaattcgagcgtctcgatatattacgggactcattcagacttccgagtgaaatgttattgtcgttagcatttgctgcgagctttcggtctaaattttgagcgtcttgatatattacgggactcaatcggacttccgagtgaaatgttatttgtcgtcaaatttgctacgagcttcggtttaaatttgagcgtcacatatatacaggactcaatcgacttc

SEQ ID NO: 261827 - DNA, 248 bp, Glycine max
  unsure (1)..(248): unsure at all n locations
cttttcactccgaagtctgttttgttcgtgtatatatcgcgacgctcgaatttaaaaccgaagctcgtagcatattccaacgacaataacatttcactcggaagtcctattgagtccgtatatatcggacctcgaattaaaacgagctcgtacgattctacgacatacatttactcgaagctgatggtccgaatatatggacctcgatttaaaccgaactngtgctagtcaacgacataacattcact

SEQ ID NO: 261828 - DNA, 385 bp, Glycine max
  unsure (1)..(385): unsure at all n locations
tcttgaggaagctacatgagctttctcggcanaaacgctgcctatcctttgttaaccgatagatcttaccaaaatatggtctgcagcttcacaagacactcgtacacgatctgaccgttgggatctttgagaagatgtctggagtgtgctcgaagcttccattctcgagagcatttcttatttaagcatttcagcctttgcttacgagtagcttaagaaaaacgccatatcttctcctttctttttccaaagccatttctaacatcccaagcactttcttcatcacccacattcaccattagccaccacaaaccatcgttgctctccgctgaaaccccacactcatcggaactcttcaaccaaagtggaatcttccaacttggct

SEQ ID NO: 261829 - DNA, 483 bp, Glycine max
  unsure (1)..(483): unsure at all n locations
ctgcagctacaaacctggtatctctgcaaagctgctcctttgttatctctagagctcttttcccgaaatacgcactatggtgtgctctggaatctgtgcacatcatctgctacccttattctgcacaaaacaggctntaaataagctatgaattcgtgacgttgcgcttagcaccaccctcgcgcttagctcgagtaagtgggtttaagcttaacgccagtcgtgcgctgagcctagctaaagacacttgctgtgcttaccgcactgatctcgtgcttagcgtgcgaccttgatggtgatgcattgccagattcttctattgtgctaagtacgctgaagctaccatgctcaactgtcacttttggcacttcatgacttaacctcattttcacctganatagcacatatntcatcattaaatgcaatggacatattctagagacagcctttaccataaaacaagatttatttacaataattacc

SEQ ID NO: 261830 - DNA, 282 bp, Glycine max
gaaaagaagagaaagtgaaaaattgtttttttgattaggagtagaaaaatgttataaggtaaaattttgtataatgttattggagagtattgttgtatttgtatgaatgtgagaattaaaaaaaaaaagggaaaggaaaaggaaattggagaattaggaaataaatgaaataattggtgatgtataagaaaatgaaaatgggagtttaaagagtggattaaaaagaagtaaggatgaagatagagggaaaagtgtatatgatggtaaatgtgtgaatttgaa

SEQ ID NO: 261831 - DNA, 326 bp, Glycine max
atgatatacaagatgccattgtgatgaacaaggcatctctagatccgggggttggtcgctgtattgatatgaagaagtatgcaattttattcggtgattctatgctcttggctgcgtcatattttattgtctaagctatttaaggtagcatttctgatcttgaacttccctgctgtataggtataatgccctcattcaaaagcattcgaatgacacatcataccgaatacttatgcctaatataactgcatacaccgctggccgtatgcatgaaagtgcctttgaagttcatacaaaatcattacatacctcatttactgacgcta

SEQ ID NO: 261832 - DNA, 307 bp, Glycine max
gtacctcgacctctcacaaaactactctgtttgtaagatttctgatgagatagaccacttggctagcctgagatatcttaaccttggtggcaacaacttctctggtgacattctcaccaacattgggaggttaaaggagctaataagtcttctactttatcagtggcttctcaatggtactttccctgcccaacatggcaacctggccaaccttgagtccttgtatgtgttcttcaaacacatgcttcctctcacaaagatgccatcaatcttgaaccatgtgaacaaaatgaaggtcttcatatgt

SEQ ID NO: 261833 - DNA, 434 bp, Glycine max
  unsure (1)..(434): unsure at all n locations
atcttctttatcaatggattcctctgcttcttggtagatgaatggctctgaatggagaagggaaagagagaggagacgccacttctacgagaagatgagtctanaagaagctcaccaccatatgatgccatggataagagctcggaggaagaaggagatgaatgaacggagagggagagaatagcacgaaattttgtgctctaaatgagctctgcaatctgaagttaatattcaaatatcaaagttccaaataatgccacacatgacctctatttatagctaagtgtccacaaaattcatggaaattcatatttacttgaatctgaattgaatttgtggaccaaactttggagccaaattcactagtatgatagtgaatttatttggttcagctactaatcagatcattcaatatttcactagtgtgctagtgt

SEQ ID NO: 261834 - DNA, 336 bp, Glycine max
  unsure (1)..(336): unsure at all n locations
ataganactcaagccgtacttacacattcataacctacctcacacacttgttattatatattgcaagcatatattgtaattaatattaacaaagagttaacctataagacaaattctaaacacgaattacttacagcattcacagctgtaatatagatatgctcaaacacttngtcacctaaaatgaactcagttacatctgcatgtgtgacgaaaaagctatctttcgcattancgatccaagattcatcccatcccacgataactcaactgacttttggtatacatcaaacaagttcttacacaattctcccaatggatcaactacagccactg

SEQ ID NO: 261835 - DNA, 502 bp, Glycine max
  unsure (1)..(502): unsure at all n locations
agcttataggaagtgaaagaatagtatgggcagatatgtcttctcattgattggtgaatctgttcnccacatccctgaagaatgtaaagatccaggtacattcagcataccttgtattatagggaacagtaagtttgacaatgccatgctagatttacgagcttctgctagtgtgatgcctctgtctatatttaattctctatctcttggtcccttgcagtcaactgatgtagtaaattcattagctaatagaagtgttgcctatcctgctggtttcattgaggatgtcttaatcagagttggtgaactgattctccctgtcgagttttatattctgaatatggaggagggagtttctaaaggatcagttcccatcattttaggcagaccttttatgagaactgctacaactaagatagatgtatatgcacgcacactacctatggaggttgggatataactgttattttaatattctcgatgctatgaaacacacatctga

SEQ ID NO: 261836 - DNA, 167 bp, Glycine max
tggtacgagacatgggaacgagctctcctgactatttagaagagcacttacacactgccaggtgtggggtaacccaagtcgggaagacacctagttcttgaaatgtgaggagttgatgtattattaactcaacccgcggataagaagaagggagacaccatctgcct

SEQ ID NO: 261837 - DNA, 451 bp, Glycine max
gctgaacattgatgaagctatgtgtaatgaactctgtttgatggctatgcatgaagagctaaatcagcttaagagatatgtgatatagataaggggagcaacatgagcaacatgaagacaaaagcttgaagcttgaagaaaagcatgaacatattctttcttttacatgcccaactcctttgagtggcatttgtaaatgttgttatattgaatgttgcatcttagtgcatatcatatattttgtgcatcatacaccatcatgagtgagtgagaagaaagttctaaagtaatatatttcttttaaggaaaaatctatttagtcgatacatccttatcgtaacgatacacaagtttttaacttgcaagtatgctcgatcgattaatcattacacctatccaatgatactagtgtttgaacaagatgatatcaaagcttgctttcatacacgga

SEQ ID NO: 261838 - DNA, 393 bp, Glycine max
  unsure (1)..(393): unsure at all n locations
catgatgccttcgtttatctatttactcagcttgccatgaatcagacatctacacctattgcaagagtctggggtctatgttcttctgtagatcaccatacanatctctatccttctttgcagtaattaggagtcaatgagcaacctgaagcttatgctgcaaacatttataatagacctccttagcaacaaaaccaacaacagcagaataattatgacctttcaagcaatagatacaatccaggttagagaaatcattcaaatctgagatgggcaagtcctttacaacaacaacaacagcttgtccctcctttccagaatgttgctggtccaagcaagccatatgttcctcctccaatacaacatcagtcacaacaaagacaacaagcaact

SEQ ID NO: 261839 - DNA, 390 bp, Glycine max
  unsure (1)..(390): unsure at all n locations
gttctcgggccattttctgcgaaggcacacatttgttatgttatgtttaccaagaaatgctactcttaaaacaaaaatggcatacaacctcctccaataaacacaaacatcaatgtgaatttagagcaaactcatgcacatatcttcttacgaacattcactcgcacaagatattcttctaactaagaaaaatgcacccatgcacaatcaaggcacctttgttacctagatcacttatatgtacttccaaggcgtattntctacctacatcacatgcattttctttgctaaatttacatacatgcatactcaaagcactttggctatcaaaaattgcatacgtgcacattctcgtatttctaatacctatacatacacaaacttcatgat

SEQ ID NO: 261840 - DNA, 379 bp, Glycine max
  unsure (1)..(379): unsure at all n locations
tatatcgagtagcaacaatctagaagatcaaatggaaagatgaaaattgcacatgcaggttgcaaaatttgtataacagacaacaatctttacagaagtgaattcacttaactacttcttatttcttataagtgatagaggaagaaatatgaacggctgaaatacatgaaggatattgtatccaacattttggacataganattctgaaagacaaatactaagagcctgctagtattggttgaccattgaaattgacacaactaactatgagcgaaaatgtgaaagatgccaaatatgtgctgacataccacatgcaccagctaacgaattacatagcttatcatcttcatggtcatttctctggtgcgggattgatat

SEQ ID NO: 261841 - DNA, 243 bp, Glycine max
  unsure (1)..(243): unsure at all n locations
gacaataatcatgctcttttgttacagagggaacaaaactacactacagtagttctccatatgctgacattattattgttgactattaattgaatcgatcttactgtttattacatgacaataaaaattatctagcgtattcttaggaacataaccggctcttatggccactacattcttttgaactgatcatagaattgagntaactaacactgtgatctggctgccgctttattattatgc

SEQ ID NO: 261842 - DNA, 144 bp, Glycine max
atatattcgccagatggtcattggagccaacaaatgtgttggaacaagtgttcttctaataaataaaaaagggtggttgaattaattattgatgtgtcctgactaattaaaaattatccttcttaatattactagagtcaatta

SEQ ID NO: 261843 - DNA, 100 bp, Glycine max
ctgacaacccacccacccggatagctacataagaacctgtgagtccaaacgggactctgcctcactataaagacaaaaccacaacaggtgctgggtgcta

SEQ ID NO: 261844 - DNA, 343 bp, Glycine max
aaaaaaaaaacactcgattgtccatttaaagtaacacatggtatagcttcatagacactgtaacatgtggattctggaggaagtgggaaccgacacgtgaatgtattgcagaacaaaagtgtacaaattgcgaatattttgaattaatccatttttaaagttcacaattcattaaagaaaatcttttacgaacacttatattgattgctattttaaattgaagtgacatgcatgtggacattaaataaagggtatatttggtgctcaacacaaccaaattgaggttgaaattatcaataaagatgagtagaagaggaattggcctgacatgacacttaaatga

SEQ ID NO: 261845 - DNA, 289 bp, Glycine max
gggtgatgaacaacatcttcgactaaaactataacacctgggtatactcccatttcaaatcctcttaagcagtatggactcccttacacatatcgtgtgtcacgtcgtcactaccacgagcgactatccccaaatatttgcttaatttctcttaacggggccgcacgccttgttagtcagtagatctacgtggaccactggttcttatgccccaagtggtctagtggccaacgatcgttaccgtgtcactctgcaatgccgctacaaggtaaacagatactctgatgct

SEQ ID NO: 261846 - DNA, 338 bp, Glycine max
  unsure (1)..(338): unsure at all n locations
ctactataatagctcgcatattattaagtgcataaatctcacaaattatgtgcctccctatctattactagtacgcttcatgaatagtttctgttattaattgtcactaatatataaagaagacctcataggatgtgtcttcataaaccagtctacgttgaattcttggatttagttgctattgaagaacgaaaggtgtctccaaatcanaatagcatggagaaattctcctcttcatttagaaacagttgcattcgattntgctgctgaacaatagtcatacattaaatgtgatataactagaagccaaggtagtactctcctggtctcaaatataa

SEQ ID NO: 261847 - DNA, 444 bp, Glycine max
  unsure (1)..(444): unsure at all n locations
ctatttcgaatctcctatgctgttcctacatacataanaacagccncaccatcccaatttttacagaatcatattcatacaccattggggcatctcaccgagcacttggtgagcgcatgtttggacatgaattgcaagagaaggggagcaatgtggcatgccccattgcttcagaatacaacctaggcctaaggccttttcattcatatcctcaattcaagaaaacaagcaccaaagcaaaccaaaactgcctcacaaatataagcatgttctcacaatttaaggcaccaaaagatgaagaaagcacatcaatgggaagcaaaaacatcaaggatggaatacttacttgttggagtgaattgaaacaccatatatgaaagcacaatgcaaccaaaagtggcttgagggggcatgaactgcaagccttcgtgttctttctttctt

SEQ ID NO: 261848 - DNA, 404 bp, Glycine max
ttttatcaatttccatatgtcatcaaacattaatatgggaatgggaatgtattggctgatgcactgtctatgagacatgctttacttgctatgcttgaaactaaactgtgtggtctctagtctttgaaatacatgcatgtgcatgatgtggactatgctgtatttttgctgcatgtgataagttttctgaatattggttactataggcataatggattcttgtttaaagcaaataaattgtgtgtgcctaattgtcccattaaagagttgcttgtgagtgaatcacacgagggggggttgatgggacactttggcgttcaaaagaccctgaaaattctgcaagagcatatctgttggcctcatatgatgcgtgatgtgcataagttatagtggcattgcattgc

SEQ ID NO: 261849 - DNA, 419 bp, Glycine max
cagcgtctcatatattacgagcctcaatcatacatccgagtataaagttatggtcctttgtattggatcagagcttcaacattcaatttcgagcgtctcgatatgttacaggactcaatcagacatcagagaaaaaagttatcgtcgtttgagttggctcagagattcaacattcaatttcgagcgtctcgatatgttacgggactcaatcagacatccgagaaaaaagttattgtcgtttgaattggctcagagcttcaacattcaatttcgagcgtctcgatatgttacgggactcaatcagacatccgagtaaaaagttattgtcgtttgaattggctcagagcttcagagttcaatttcgagcgtctcgatatgttacgggactcaatcagacatccgagtaaaaagtattgtcg

SEQ ID NO: 261850 - DNA, 153 bp, Glycine max
ctatatcatcatgaatatggcgagcgtccttctcagaggcgatattgtaaggagacaaccattgatgttgaatgaatgaatatctcatatgaccattctgcccacattatgaactttccccatgtcaaatgttgaagatgaacaaaagcttgc

SEQ ID NO: 261851 - DNA, 401 bp, Glycine max
  unsure (1)..(401): unsure at all n locations
tcaaaatggtgtaatcgattacaagatattggtaatcgattaccagtgtatcctgaatgtgaaattcaaaatcaactgtgaatattcatatcctttcataaaaagctttgtgtaatcgattacatggttttggtaatcgattaccagtgacaagtttggaataaaaatcaaaaagatgtaactctttccaatgtgtttcatgttttctcgaggtcataactcttccaatggttttcttgaccacacatgaaaggtctataaaagcaagatcttgacttgcattttacataacaattacttacaacatttttatatactcttttacaacactttgaatctctttgaacatcttcttgaacttctctttcttcttcctttgccanaagctttctgagtcttct

SEQ ID NO: 261852 - DNA, 351 bp, Glycine max
  unsure (1)..(351): unsure at all n locations
cacaatcaaagactctctatagaatttgcatgaacatgttaaggactaattaacatgaaatatttgaatcaaatcaaataataggctaagagaatttcatacactcatgaaaaatgagttagacaaagaaacaagaaaaataaaattaagcacaacataagaaatcttatgtgacaagtttcatgactagacatgacttctatgacaaaactacaataggtgaacaagtcactctagatttttgaggttntcttatactttaatatttttggaagaattttatgggttaggtttcagcccacaaaaataacaagaaaaaactcanaggaacctaaactcaatacaattcat

SEQ ID NO: 261853 - DNA, 308 bp, Glycine max
tgcgaatatgatgttccgagtacattggatttggatctaccatgcccatctagatttcagctggtaaattggcgaatggatgaacgcacccgcatttacgcaacgagcataattgtcacctttaccgttttaatagctctatacttgggcctacgacttataatatttccttatgttgaagcattgtggcttgtggttttgaatttattaaacagagatctttcttcatctggtcctacgtgtaacccatttctcatcatttgcatgtatacttctgtttctgaaacggcagaatcgatgaaaattcc

SEQ ID NO: 261854 - DNA, 349 bp, Glycine max
  unsure (1)..(349): unsure at all n locations
tccctgaaatcaagacacgctatatacaagatgatagcacgttcacacaacccttactccgactatcttttggcatgtatgcctaactttacttaatgataaatttctaattgataatggatttctaacccaagttctctcaagttctctccctctttggcaacatcaaatagaactaagcaacataatcaatatccaaacagagccaaacaataaaccataataaatccatacattgtcataaccaaccaaatcanagtcaagatatataatataagtgcacattacgactaatacgcatatacagccaatacacggcaataaaccaaagactaatatacttaatact

SEQ ID NO: 261855 - DNA, 375 bp, Glycine max
cttattccacaacggaatcctatcaatagacctccaatctgtaatggagaaggttaccactactggaaaaccctaatgaaatttttatcgcggctatagatctaaatatctgggaagccatctaaatatggccttatatacccaccacagtaaaagatgttcattatatggaggtcatcaagtgaatagccaaccatacaataacctacatatagatggtctgtacaggatagaaaacaattacaatacaacctataagccaataacataataacatctgccctaggaacggatgataattccagggttccaaatagtaatagtgctattgaaatgtgggacactctcctattaacacatgatggaactacagat

SEQ ID NO: 261856 - DNA, 416 bp, Glycine max
agcttatactaatatgtaattttaactcttgacaacttttggttgtgaggaataacatatgttctaacatatgggattgaaactctgttattattaatcaaaatttattagacattattaaattataaaagagtcttttaaataaaaagtaagactttgtgatttttaataaatttagtcaataataaaaagtaagttcgaacaaatatgttactcatattttgtttatgttaaattatctcttgcaagtttaaacatgaactctccacatcctttggattaaagagacatctaatcatgcatgtttgggagctggaaaaacatttcttgagtcaaaagaaaattgagcatttgttctttatgtgtgggactaagtgatgtaggttgtattcaagtgaaatttgatttatattggg

SEQ ID NO: 261857 - DNA, 478 bp, Glycine max
gcaagcttcaataactacattcacgactacacacataataagggagttaagtagtcatgcgtttacacatcaagaaagacacactcatccaagatatatatatggtccaaaacgtttttgcaacactaatccacgcatcaaaggagaaataagctaactaacaacatacacacaggacgattgaggttcgttaacacattatcaatcaatatcaagactacttgcatcacccaatggcttgccataatgtccaaccgcacttcgcaaattatagagatggtcagtcttataacttatgactcaacagtggatttatggtatagcagacattaaggatgcaaggcacatacaagcattattattaagtcttatttaatcacctaggagaaaatacaaataataattcaagcatgctcaacataagtactcatatgtaaccacacagagtgcacaccagaatatggtaagcacataacac

SEQ ID NO: 261858 - DNA, 363 bp, Glycine max
gtgacgaccaacgaggcagcgatgacgactgttgacagaggactagtgatgacgaggaccgcaactgagggccagcaatgacaatgcaagtgagggctttcaaagcagaacaacagtgagtaactcaacttcagcacaacacgaccatttagtcacgactcgcgagtaagggagctcaacttcaaaacggcgccgtttcaaaaatttcatatactcgtggactcgtcgcagactcgcgagtctacctaaactcgcccgagtctgcgctaaatcagacgagtctattccgatttcgattctacttccgattcaactcgtcgatccttggtggaatcgtaaaatcatacgatttcacgagttaaa

SEQ ID NO: 261859 - DNA, 434 bp, Glycine max
tggatcctttcttctgtttttccatgaaaacgtcagaaaaactggatcgtgtggtctactaactttaatcatgataggtttgggagttgctcttacacatggtgaaagtatcaacacctcacacgtttgtcacaatggacgacaaccttcaatcaagtgtgcaagtatgacttcaaaactacgtattttcccttttttatgttttattgctttatatgggccttttctgtattctttatctttatgtggtcgacaaaggtgtttccctccctactacgtatcctcaattggatgaagatatctgacctacgttgttctttagaactaaacgttggtaagtggctttatctttctcgcaaatagattctaattgaacaaattcatttaacgtgctggccattaaagatctttgatatttgaaaggaacaaacgtt

SEQ ID NO: 261860 - DNA, 259 bp, Glycine max
atcagagacggttattatcataaaccgccgtgagcgcgacatattactgatttgaattacaaaaatgccaccgtattatgtactacatctgtagatgaatataaccgatgtatagaccgcgacgtgaaaaggcagttgtttagtagtgtagagaccatatggtctgtacaaatgatgtaatagatgttacttaataatgtactgcgatcattgatcaatccttcttctatagagggcagattatatactctagtgacag

SEQ ID NO: 261861 - DNA, 237 bp, Glycine max
gaaaccaaaattttttttctcattttgagtccaactagatggattgtctcccagttatgcagaggacgaatagcacaaacggcgggtgatgcccacacctatgggtacgaaaattcctattacgatcagtaggattgcgattatgtaaaagatgcaacctgtagcaacatagaaattttacgggacacctaaaggggccaatggaatcactataatacgtttatacttaaaataaaa

SEQ ID NO: 261862 - DNA, 457 bp, Glycine max
  unsure (1)..(457): unsure at all n locations
gcttgtgtatngatacactgattggttaactatatcagtgatagttccgacaaaatcaaagagtaactctccaatagtttcaactttctcaaatggttgttaagtttttctacaggttataactcttctaatggttctcttgaccagacatgaaaagtctttaaaagcaatgctttgatttgcatttctatgtatcttttcaattcattctttaaacaacaaacttttgccaattgatttctgagtctctttgaacttcttcttcttccttttgccaaaagacttccaanagtgttctggttttctaaaccttgaaaacttgcgctattcatctgtctcattctcttctccacttgccaaaagaattcgctaatgactaaccgcctgaattctgtttgtgtctctcttctccctttccaaaataacaaaggactaacgcgctgaattcttttatgtc

SEQ ID NO: 261863 - DNA, 362 bp, Glycine max
tgagatcctataggtgaaagagacatcctcaccacttgtatttttgcaatctttcatcttgttcttctcttttttgttaagaaggcttcctggtatggaaagctaaatcctctgttggatcttccttgtaggtacctgatgtaaatatatttctatctatttaatgatgttttgtgtgttctctgtgctatctgcttttcatttcagtatgcctttaccttgatcacgtagatgcatgctttgttagggtcattcaaccctgagttgtcgtgctttcacgaggaatcggggtgcgataatttagtttagtatgtgtgtcttaatgcgcgcctggttgagtttagtcttacaagaggaatctg

SEQ ID NO: 261864 - DNA, 488 bp, Glycine max
  unsure (1)..(488): unsure at all n locations
tcatctaactcttcagcacaagatgcattgaccttcttatgttttgaacaactctccaaaggtcgtattctaaccttatttaagctctntgctggaaactctccaaaggtcacatccgaaccttacttgaggtcgtatccgaaccctattaagaaacttacgttaacttaatttattttgcaatttatttaaacttacatcttacttttagtgtaactcagcaaactcagaaagttgtactaagtaactctgtcgttcatttataggtaagttcatatgttaacttaattagtagagttagttacataaacattaaacccaacctacacttagganaaaatacaaaacacaatgaacagacaaataaacaacacacaagggagactaactagccatacgtgaaccacttcattgttntgccctgttcttctcttcatcagaaactaagtgagattctctacanacacaccatcaactacaatctattt

SEQ ID NO: 261865 - DNA, 359 bp, Glycine max
agctacattgatctctctgcactttgttaccgggtatacaacatttgccaacaaagcagattcatgatactccctggcttttcttcatgcttatgtacaagtgattgatccatatgttgagagtggaaataggccgaatatactctgcagtgaggtgatttcccctgcttttttacatcatgattacttattgtcatctggcagaaaatcaatgtttggcctgttatcatggtgatgacccggtgagcatcataagatctatagggttcaagaattattatccgaactctattgtgaaagacatgcaaaaaccatgatttgtcgacacttaaaactaactgtggttctatgcgatatac

SEQ ID NO: 261866 - DNA, 411 bp, Glycine max
gttccaaaaagagtttggtctagccacggcccacgagcatataatcacggatgattgtgctcaatcgtatgcggaaaaagaggctagaagaagggtgatcgactctttacaccaagaggcaaccatgtggatggatcggtttgctcttaccttgaacgggagtcaagaactttccctattgttagccttggccaatgcgatggcatacacctacttcctccccgaatatattcatgggcttctcggctattgtcagcatatgatagacttaatggcccacataattagaaatcgttaggaaaattgtatggtctcttagacctagactggatacgacttctttttttcaaataaaatgagtttgtcacatgttctactccaaaatgctggtgcaatcaaatcactcctaca

SEQ ID NO: 261867 - DNA, 381 bp, Glycine max
ctcggatgtcttattgagtcccgcaagatatggagaccgtcgatattgaatgttgaagctctgagcgaattcaaacgacaataactttctactcggatgtctaattgagtccgctaatataacgagacgctcgaagccgaatgttgaagctttgaggaaatctagacgacaagaaatctatactctgatgtctgattgagttctcgtatatatcgagacgcccggaatcgaatgtagaacgtctgtacctattctaacgcacaatactttttactccgactgctaatgtagctcgccctatatcgagacgctctgaattgaatgtagaagctctgagctaattcatacgactatatcattttcctccgatgcctgattgag

SEQ ID NO: 261868 - DNA, 391 bp, Glycine max
  unsure (1)..(391): unsure at all n locations
ggaagcaaaacaagttacatttgagaggaatcctcgtacatatgaaagtcttttttcttcaaaattttgcagctttcataatcctgaagattggaaaagattttgtcttaaatggttcttcttggaagcactancacccctctcattttagtgggtgtcactatctcaaaccggttggaatgaaagcatcccttccacttcggccccacccaactcatcttgcttggattggaccacaagccattctctaatttataatacgtgcgcaccctgcacagngagtgagtcacttccggttctcccatgtatttcctacatttatatatgtttgatgttctccctcttctatttaccatttaatgaagaaacgtttgaatttattctggtgatg

SEQ ID NO: 261869 - DNA, 276 bp, Glycine max
  unsure (1)..(276): unsure at all n locations
tttaatttcttttgtatgttctaatgttaaacaaaactgcaacatctgtcatatgatgaattcaactaaagcaaacaagttgtctacaaaagtaattggtttgtaattatattaatagcattataaacatatatacttcaaacttgaagttatattaatcaatcttccttttttactttgtactacatacatgttataactntaattgatgggataaatangagagtttgagtcataaaggggtgttagagaatcttcataggatttgaaaaaatt

SEQ ID NO: 261870 - DNA, 260 bp, Glycine max
ctatatctttcatattaatctgggcggccccatgttcgatactttggctataggtaacgagggacacaccttgaaccaaagtccatattatatcattgtcacgggcatcaaagtctctatacaagatgtgggattttcttgctaaatgaagacatgacatcgggagactccctttcgaacacatggctagcatgaatgatcatctttccaatacgcttagcacaaaacgtgagtgtatcactttgatgcgcatgatatat

SEQ ID NO: 261871 - DNA, 262 bp, Glycine max
  unsure (1)..(262): unsure at all n locations
caccccacctgacgtccccaaggtcttctgacccccgcgacatatctcgaggtaccactctgtggtcaacgaataanagcaggaagtttcacccttctacacttcctcaactcaagcttgtaggaatatggggtacccatcacatgtggtactangtggcggttgggcgaatgtgcacaacaangtttccacatccacaaagcgcgcataaacccaccatcccctgttgcccaccttcatctgagctcacgtactcccacgt

SEQ ID NO: 261872 - DNA, 467 bp, Glycine max
  unsure (1)..(467): unsure at all n locations
gcaatgttccaattgatttcaaaatggtgtaatcgattacaagatattggtaatcgattactagtgtatctgaacgttgaaattcaaaatcaattgtgaagagtcatatcctttcataaaaagctctgtgtaatcgattacatgattatggtaatcgattaccagtgacaagttttgaataaaaatcaagagatataactcttccaatggttttcaggtttttctaaaggttataactcttctaatggttttcttgacaagacatgaagagtctataaaagcaagaccttgacttgcatttcaagaacaataattntacaactttggcacacaacctttttgatatacttctgaatatcttcttcttcttcttcttcctttgccaaaagctttcaaagttttttggtttccaaactttgttctttcacagaaaacaaagtgtgcaattcatctttntcattcttttc

SEQ ID NO: 261873 - DNA, 175 bp, Glycine max
  unsure (1)..(175): unsure at all n locations
cgtacacacttcggccatggctttctctttggctagtagacgcgggaggtcttgacttccattcaaggtcaaggcgaacctatccatncacatacccccctctctaccacacgataatcaccctctctctgcttctatttaacggacagttgtcaaaatccttcactaacttttg

SEQ ID NO: 261874 - DNA, 369 bp, Glycine max
tatactaaccctcattaattcagtcttaatatccttacccatctatttgctgtccttctgcaagattcctaaacatgtcgcgcaaaagatttcatctattcaaaggaattcttatggggaagtcaccatgactgcaataagattccttgggtgaggtgggacatagcttgcctacctaagagtaaaggggggttcgggatcaaagatttgactacatttaatgaggctctgcttgccaaatgggggtaggagttggcaattattaaattaactctggccagaatctatttccaaatatggggtggaagaactgattttgtgagaactacatgttcctctctggtggaagactcatgttgctcaacaaca

SEQ ID NO: 261875 - DNA, 368 bp, Glycine max
tatggaagaagatgttggagcagctatgcaatatcttcagtcttaggcactatgtatcacgccaatatctctagcctcatccattttccgcatgcctcaatcggaagcatcaacaggcatcaaacctgaatctaacagtcactgatattagtgatagaaccgaaacaaaattaaagtatcatgacagacattacataattaaatttcttcatcctttatgacaagggtattctactttcttgtataaatttcctgattggagggagaaggatctaatcggtgcagctggttcactcttctcaagttttgtcaaacaaggagtaattgttattcctattaagtaaaatcggaggagcccagcaaatgtc

SEQ ID NO: 261876 - DNA, 465 bp, Glycine max
  unsure (1)..(465): unsure at all n locations
caagcttgtgcttatagagagcttatcctctttttttgttttttaactgataaccgaattgattcttatcaagaaagctantcctttgtggtgaataccccttcaacttatctattctttgtggatcatggcgacattctattcttcttcttcatcacatccatccttcttatctttctggtcatgttttcatggaaagtcaacaatgctgggtcttgaatttgcatccggaatgatctgaaccaagcgcccacagcttgaattgcatcaaatatcaagtgaaggtataaatggcggcatgttagtggttcgcccaaggatagattgtgtaatatctccaggcttctattctgatccttgacatcaataactttaatggacatattcaactttcatcattttgtaacctctattgcaattagcattcactttctgatgtgccctcaatgtgtgcaacatgtgaaa

SEQ ID NO: 261877 - DNA, 507 bp, Glycine max
ctcctcccggatccttatatcaccgctgctgcagctttatgcccttaatttgaagcaatatttgacattcccataatgtattccctaacatttcctttaccttgatacttcatggaaatcaagttctgaaggagagtacttgttttcgccttatcacttcttgcaaagcgcttttcaatttcgcaaggaattgtttggcactatttatatcatctaaaatagtgcccctaaagaccttatgaatgtcacgcttaatgatcataagactcatgcgatttgagtgatcccacttctcatgaagtttcctctattcagaggtattgaaatccgtaggagaagggggtttctaaatccttaatgcaaggtctagatccatgcagccaagaacaatgtgcatgttctctgtccaatccttataatttgaccattaagtaccggaaccgaattcatattatcagataaagaagcaccactataatatcaaaataaataattcaataatctcat

SEQ ID NO: 261878 - DNA, 472 bp, Glycine max
  unsure (1)..(472): unsure at all n locations
tagtctctttagtttggttgatacaatcaagtatgaaaagatgcagaaatagttgatattccttctttgcttccgcggcaagcagtaatcacattctgtttacttcccctttttttatcttttacaaatcaaaatagattctgggtgtatatgaataagttaagcacttaattcataaaaaggttatgaaataaaanttgtgtatgatcttaaatgtgaaatttactgaattaaattcaaaagttctgatgttctgtatttattttgttttcaatggttattatattactatgcagttttagagcatctctggctgcagtgtttacatgagttgtttaattntaagtatttatactaaaataatagtatcttttctattnntggaattattatttcttatataaacatttaaatatagaanaagtaaaaccataccatctttatgattaaaaacaaatatttctcaaactat

SEQ ID NO: 261879 - DNA, 402 bp, Glycine max
  unsure (1)..(402): unsure at all n locations
ctcatgtgaagtttntccagcatcacgatcggcaagcgtcgcatagcgcagtggaatctgtggattggtgagaagataatgaagacgatgtcttttaatcgcaggttcaacctgttgacaccgtaacagataattggacttcttgagtttctccaatatcgaatgtgaaaaatcctttgtaattgctgtggaagatgcgacggcgactggtgttctgcggaaattggtgcanaattcttcagaacagaaccatgaaaggaataatggggatcaaaactactcatgatccataaggtacagagagaaaaacgaagatgcctgagtgaaatgtgttctattcacccaacagagacagttacacttggttatatgtgggacagagggtactgcaactactacagt

SEQ ID NO: 261880 - DNA, 435 bp, Glycine max
  unsure (1)..(435): unsure at all n locations
agcttgttgctcgtcacaaagatattcgttatgcatactgcacgtcgaataaaaatccctaagtntgagttctaaaaaaaagtaaataatcctgcgtttaattttctcatcattgctctgcctttttcttcgtgtccttaacaatcgtgagcgttctaactaaaaagtcgcaggagtcaagataacgatcgaatgctgggagcataattaatagcatgctaattaaagaagcaggactggaagacaataactgataatagcttaattataaaacggcaataaaagatggccggacatgtaaaatattaagcactcatatatatatatatatatatataactgctttaatctcataataatcgctgcgtgaaaagaaaaatatgatcctaacatatntatgttaatttgttatgtaacaataattatgattattta

SEQ ID NO: 261881 - DNA, 373 bp, Glycine max
  unsure (1)..(373): unsure at all n locations
catggttcttcttcttncagcngcaacacttcacacgtccncnctgcccaagctgctagacttgttgctattttgaaggataaaaggtcttcaacgccatcatatggtttcttctgtttnttgaaatcttaatctttggttatgtaacagtgcattgactntatattgcaatctcactatgatgttatgaattatcttatcttttcaaacaagagtttaataaggagtcacttcagtataaaagttcttacactgataaaaaaaattatcattagtaagaatttcaagtaattattataaggaagaagccacatggacatccaanagttctattcaacacttagtgagagaaaaactatagatatatataatt

SEQ ID NO: 261882 - DNA, 287 bp, Glycine max
tttgacttgcccctggataaaggtcttgcctaactagcgatgggataggtccgttgacctgttgaattactcctatgatggttacgaagtgtaagtttgagttgcacttgattgaaagacccgtcatgcaatctggtggtgggtcgtcctgacctagataagtactcctttgatgtgaagagtgaatacaggctctaacctcattaacggccttgccatatgatggggcgacagttcgtttggttgaactttgaaccttgatggtggtcggcgtaattgttgaatgt

SEQ ID NO: 261883 - DNA, 172 bp, Glycine max
  unsure (1)..(172): unsure at all n locations
ttttattctaatttagaaatccatgaatgtaccctaatgtctgatgtttatgggattaagatggtcattgactagtccctattntatgatataacccaattgccaagcgaaggtgtaccatttgaaggtgcattgattgatgattggaagtttgatttctttgtacatgatg

SEQ ID NO: 261884 - DNA, 333 bp, Glycine max
caagttccacaagtgttacacatgcttctatttatatactaggtactttcttgagaagcgttcctcgaaaaacttccttgagaagccctctttgagataaataccttgagaagctatagtttgctacacacacccccttcgttactaagctcacctgccttgaaaacttcctttaaaagattcctgaatgaagctagagcttatcttcacactccctctctaatagctaagctcaccctcttcgagatgagaagctagaacctatcctcacaccccctatattatctaagctctctcccatgactaattaaatgtgcctactacaaagactac

SEQ ID NO: 261885 - DNA, 343 bp, Glycine max
cgtctctgctgcattagaacagtactctatacctctaccagccgcatcacacttaacttcaaaaggtaaatcaaaatttggaagaattagcacagggggagaagtcatgatcctcttcatctcctcaaaggccatgacagcttctattccccaagaaaaattgtctttcttagtcaattcggtgagagattttgctattttaccataatcctggataaactttctataataccctgtgagacccaaaaaaccacgtacccccttcaaattctttggtgtgggccatgcaagaatacacttcaccttttcaaggtccactgccacaccttcttcagaaatgata

SEQ ID NO: 261886 - DNA, 353 bp, Glycine max
  unsure (1)..(353): unsure at all n locations
caataacaatgcctataggttggacctcccataagagtatggtgtcagcaccacttttaacatttctgatttaactccttttgcaggtggagctgatattctggaggaggaactaacagatttgaggtcaaatcctcttcaggggaaggggatgatgccatcctccctattgaaggacctatcactataaccatgagcaagaggctccataaagattgggctatagctgctgaataaggccctaaggttctcatgaaccttatggtagatttttgagcccatgggccaaggtcgggtccaattatctntgtacatattacactaggatcgcattatatttggtccttgtatat

SEQ ID NO: 261887 - DNA, 347 bp, Glycine max
  unsure (1)..(347): unsure at all n locations
tagaaatatggtaatctctcagtgaatcagaatcacatttcagttttaataaacactcttgttaatattcattccaatactccgtttcctatatcaaattatcccagatgttttgattntaaatagagttagctgagttaagttcaaagattcaattataccatgataacctataacaattatntaattacaataaatctatccattatctatattattactttaatctttttttatctttctatacatttaattnttttttatgaatatttggacaganaatgattaaataataatatgttagagaaataattaatccgtctaaaagaaattcttataaaaaagaa

SEQ ID NO: 261888 - DNA, 244 bp, Glycine max
  unsure (1)..(244): unsure at all n locations
gataaactgcctattgtattataaaacgttatgggcatcttgaccacacattccagtaaaccgttatatacaacactatgaaatattggatcgctgttatcatgatggnagataagctcgtcaccacacatcattattaagtctagaacagtactgattttagaagcttttactgagagccattcataaagtaaagaggtgtgcgttatctgtgctctacactgctgtccacaagctttaactg

SEQ ID NO: 261889 - DNA, 414 bp, Glycine max
gcttcacatctaaattttgagcgtctcgatatatatctggactcaatcagacatccgagttataagttaatacgagcttccgttcttaatttgtggcatttcttaataaattacgacactctgtcgggcatccgaatataaagttattgtcgttagaactttctaagaatatccgttttcaatttggagcgtctcgatattattacagggactcaattcggacatgccgtgtataaaagttattgtcattgtatattgttcatagcttctattctcaatttggagcgtttcattatattacccgattcattcggacattcgtattaaagttattgtctattgaatttacacaatcctcgttttcaattgggagcgtgtcgttatttacgggacttattggacatccgggtttaa

SEQ ID NO: 261890 - DNA, 269 bp, Glycine max
  unsure (1)..(269): unsure at all n locations
tacctgtcatagcatatagggtgactctaatgtctcatgggataatgttccctcacgtcacacttatggnggattactatgcttatggaataattctcgttttgaagtagacagcanggtgaaaggcagcaacttcctaatgcttgcaggtagatggataaaggatgatcagaggatatacattgttaatatatatgctccttgcgacctacacgggaagagagctctgtgggaagagttgaggcagctaagaatctctcacactgatg

SEQ ID NO: 261891 - DNA, 512 bp, Glycine max
  unsure (1)..(512): unsure at all n locations
gggatcctttagtcacctgctggctgcaagcttgcttctacaactttggtatcttttgcatccttgaccaaaacatcaaatgatatttcatcttgcgtggtaactggtgtcgaataacacagttcagctagcgagaatcaaaacatcagtgaatgatagtcctcgtacgaaattagggtctgacactntgtaaagttcaatcttacccaatcactagtgttgtgaagctgtctttaaaaagattgaaagttaataaagaaatccaagataaaaccaacttataactaatttcttttatcaaatatcacttgagatcgtttcaaggtccaatgccttaatgattctctctacttttcaaaatttaaaacatcatttcaagggccaacgctttaaatgacttgtcanttgcaattaaaatgaatcttttaaaaacataaaaatcaatgtgacacacaaacattcaaacttaaagaactacgtatgtctgaattcctcatcgcacctaatgatac

SEQ ID NO: 261892 - DNA, 382 bp, Glycine max
  unsure (1)..(382): unsure at all n locations
tcatctctatccatcaaggcttgtgttatggtctccaccaatgtctccccgggtatgaacctgggtatgggtggaggaggtctgccataaacaatctcgaatggagtgctctgggcagcagtgtggaaactggtgttataccaatattctgcccacggaatgaaatcgacccatgtctttggttgctcagagctaaagcatcgtanggtaagttcaaccgtgcaattcaacacctccgtttgtccgtctgtttccggatggtaagctgtgctcatcttcaatttagttccttgcaatacgaaaagctcctgccaaaaattacttaagaacggtgggtctctatcactcacaatggacatatgaatgtcgtgtttctaaccac

SEQ ID NO: 261893 - DNA, 441 bp, Glycine max
  unsure (1)..(441): unsure at all n locations
agcttgcagcaagtnttagaaagtatatttttttggcctgcacatatctaaaatctataaaacaagaatgagtagcaagaagtattcgcaaagtggccttgctaagcttctatcacagaaatgtccaaacagaaaattttagcctaagtttcccaagtaaatattaagtcaatctcaattagcaaactgaacagcttctcaacaaaaggcaagtgcctggaggattataataatgagtaatcctttgtattctaattctaatttcaaaattacataagcatcaaaattttgaggcatgaaaaatcagattatagaacaaaaacaaaaaatatttctgttgcaaaatatataagaataaatataaagaattcaatctagtctcaatatatattcatagaattcaaaactaattgggtttatcatttagttttgtaacctctc

SEQ ID NO: 261894 - DNA, 395 bp, Glycine max
  unsure (1)..(395): unsure at all n locations
ctaacctganattgtagtgaaatntcactgcatgatgcatattatntaattatacaacatcctaaatgtaactcataatgactcagcttctagtaaaaaagctagctagttgttcattgcaatacctagaaagtgcatttgtgattgcgcaaatgacaagctagcacataaactgcctgttcaataaaaactgcatgttccatatccacattngcacccatcaacttcatgcacaacataaaccaaaatgatccacttgtcatgtccataaaatagtctccaactaaggttgaaatggcctgccatgtgctgtccaatgtgatcctttgactccatatacgaactacttcacctgcctttntctttcctacaagaatccattttgctatcatatg

SEQ ID NO: 261895 - DNA, 456 bp, Glycine max
  unsure (1)..(456): unsure at all n locations
tacatatatttgacccttgacaggactcctataatactgatacatggtgtgattaacaagcttcacacactctatgtacgagggatttcaatcatggaccatatgtatatatatacgcgacgcgacatacctgtcatgaaaggttcactccaccattccacgacctatatggaagcacattgttatggaaacacattgtgtgtgtgtgtgtttgttntaaggcgaagctgtacattctaatattattttatgcataattaactatgcatgcacgaggcaggcattaaaaaatttgagtttatcgaattttaaaactagtaaatttaagaatttaatttttatcccataattttgtttaaaaataatttggcatttactaatattgtgcatagtgtaattaataaacttaacaacactatanatattaaactatatgatactacatgaattatatat

SEQ ID NO: 261896 - DNA, 389 bp, Glycine max
  unsure (1)..(389): unsure at all n locations
tcatttctatcattctgataccttgctctaaatttagcgttattataccgatgcaagactntaaagcagtgagccaaatgcataaaatgattctgcatacagctctaataacagaacatataagtcatacagatgatataagggttntgtagataacactgataatagaaaaggtttgctgaaacctgtttgaatgcacagctggattcaagggtcatggacctggattgtcgggtgaaaatttgtatagacaaattgccggtcatgattacggaacanattgctgggtttgcaaaacagtgttaaatngatgggttgcaaatgttgagggcatatgagggtttgaactttgaactctgttttgtcttttcagttgatgtagaaccact

SEQ ID NO: 261897 - DNA, 420 bp, Glycine max
agcttcttagaaggttcgttcctaatttctctacaattgcatcacctctcaatgaactggtgaagaataatgtggcatttacctgcggtgaaaaacaagagcaagcctttgctttgctcaaagaaaagcttactaaggcacctgttctagctcttcctgacttttctaaaactcttgagctagaatgtgatgcctctggagtgggagttggagctgtattgttacaaggtgggcaccctatggcttattttattgaataactttatagtgccaccctcaactaccccacctatgataaagagacttatgccttaataagagccctccaaacttgggaacattaccttgtgtccaaggatattgtcattcatattgatcatcaatcacttaagtacattagagggcaatgcaagttaaaca

SEQ ID NO: 261898 - DNA, 363 bp, Glycine max
  unsure (1)..(363): unsure at all n locations
ctactgtcatctacattgccaattctagcgcacgttaaattaactctttatgaagctcaatatatnttcagttgaacttaatttaaacattatcgtcatgacagcagtgggaaagtgtttggagggagaaaataacgtagcattgctagcattggtagaacctgccagtttattacaattgtcataatgagctggcttgggaggagagatgccttggactagatgccattntgtggttgctccataggagttgttgatggttgcatctatgcattagaaggattttcaagatcttcaacaattaaatatgtttggcagtatgatcccattaaaaactcttgggctgaggctagtccaatgtca

SEQ ID NO: 261899 - DNA, 338 bp, Glycine max
  unsure (1)..(338): unsure at all n locations
agttattgtcaattcaatttactcaaggcttcggatcttaattttgagcgtctcgatatattacaggactcattcagacatccgagtaaaaagttattgtcgtttgaatntgatacgagcttccgttntcaatttggagcatctatcgataaattatgacactctgtcgggcatccgagtaaaaagtaattgtcgtttgaattttctaagagttctcgttttcaatttggagcgtcttgctatattacgggactgaaacgaacattcgtgtataaagttattgtcatttcaatctgctcagagcttctagtctcaattttgagcgtctcgatatatta

SEQ ID NO: 261900 - DNA, 419 bp, Glycine max
actggatgcattggttttctcggtaacccaactggcactgaaccagatatctgtacctgttgcaagggtctgtggtttgtgctcctctgctgaccaccatacagacctttgcctttccatgcagcaacctggagcaattgagcaacccaaagcttatgctgcaaatatttacaatagacctcctcaacctcggcagcaaaatcaaccacaacagatcaattatgacctttccagcaacagatacaaccctggatggaggaatcaccctaatctcagatggtccagccctcagcaacaacaacagcagcctgctccttccttccaaaatgctgctggcccaagcagaccatacattcctccaccaatccaacaacagcaacaaccccataaacagccaacagttgatgcccctccacaac

SEQ ID NO: 261901 - DNA, 404 bp, Glycine max
  unsure (1)..(404): unsure at all n locations
ccttccttggtggcagagacaaacttcttgctctcaaattccttgagctgatcaacaacatattcatcaatggcatcaaccatataaagaacctcctattcctttgttcttaccaaaatctgaaattgtggcatgtcaggatcgatgtgaataggtcccaaacttcacacatcagcttggagatgtgcctttgaaaggagggggacctgcaaaacaaaggactccgacggtcaagtaagaatatgtgtaaggagaataaaacaagtatatgatgtaatggaactcgtataagtgaaagagaaagaacangtttgttgccgtgtactgagtgtgtgagcaagtcgtgtagagtgattcgatggaacctgtgtttatactagttgagtgagggtgttggtccttgt

SEQ ID NO: 261902 - DNA, 392 bp, Glycine max
  unsure (1)..(392): unsure at all n locations
tatcatgggacacaatcaaacatccgagtaataagttattgttgtcagaatttgcactgagcttctgtattcaatttcgagcgtctccatatattacgggactcaatcggacacccgagtaaaaagatattatcattagaatgcgctcaaagcttcgtgcttccaatttaggagcatgccgatatattatgggactcaatcagacatccgagtaaaaagtctacgtcggttgaatttggtacaagcttccgctgtcaattacgagcgtctctatatattacaggactctattggacatgcngacaacaagttattattgtgtgaatatgctcatagcctatggtttcaattttgtgcatctcgatatattacgggactcaattggacatcca

SEQ ID NO: 261903 - DNA, 182 bp, Glycine max
acaaatcaaacgtaacaagacaattatagttgttggttgaatacctcacccactcaagtgtatcacacaattatggcttttctctaatgaaacactcttgccttttaccactctaattccccttgagttcttaggcaattcaagagattatggccacaacaaagaacaattcaccaatatgt

SEQ ID NO: 261904 - DNA, 419 bp, Glycine max
agcctcttatccaaagctcatcttgttggtgtaacttcttcttccatggcttattccctagtggatggcgcctcctctcacctcttcttctttgtattgcgctgcatcttcatggtggaaaatcaccattaaaggacctcattgaagctcaaagatccagccttcatataatccccacaatgcaagcttcccatcaatgtggtaattcaaaaacacacatagcttcaagtaggtgctccttacacctccattaatttttttgctttaccttctcttccattggtgtttcttcattattctccttgtatctcctcacatgtcttgtgctaaatgttgttaacatgattctttagagtttccaccgactaaacttgctatagaagctagaattgattttctatgggtcaaatatcttattc

SEQ ID NO: 261905 - DNA, 470 bp, Glycine max
ctgcaagcttctatagagttctacattactctatagttctccggaacgttctataaaatactacacttttctagaaagctctataattgtctaaaacctctccaattaaggagggatcccaacaaatctccccctcccgacttaattggggtgtagtatcaaaccggcaccttgacagcaatcttcaaacttctttgtcgctagtactttggtcatcatgtctgaccagttctcgtctgtgtgaaccttgtcaagatgtactttcttttccttgaggacatctcggatccaatgataccttatgtcaatgtgctttgtgcgggaatgaaatgatgagttctttgccaaataaattacattttgattatcgcacttcaacacatacctatcttgatctgttcccagctcctgcaacatgttcttcatacacaacatctacttgcaagcttcaatggtggataatgcaacac

SEQ ID NO: 261906 - DNA, 407 bp, Glycine max
  unsure (1)..(407): unsure at all n locations
acaggatatgcacaaccaccttattttgtatttgctttttctgattatgtgttacaatatgaattgccaaggggttattgatgtagctccatgtggagcttgtaggccttggatcttcttcatcaatggattcctttgcttcttgaggtttgattacaacagaatggagaagaagaaagatgaatggagatgccacttcaagtagaagatgagtctagaagaagctcaacaccataggaagccatggataagagcttgaaggtagaagaagatgaatgaagggagagaaatagaagagcacacaatntagtgcctctaaagaagtatgaactttgaagtttaattctcaaaatcatcaaagttgaaaaaatgcacacacatgacctctatttatagcctatgggtca

SEQ ID NO: 261907 - DNA, 471 bp, Glycine max
  unsure (1)..(471): unsure at all n locations
agcttagcggatatgtatggtgctaaactaattcaaatccagtttaaatcgcaagaatatccgcttatccagcagattacatgctcatccccatggccctcaattctgactgcaatgaatagcgcttggcgacatatggtcgcgcttatccaatggaagccatcgctcaacgatcagtttgtcgcttagcagaattcaactcgaattgattttggcttatctaaaccttggctagcttatcggaaataaccttatgtgtcagagtggtgtgctaagagcttaaactcgtggcttagtgcatgagtgattatgcgcttatcgagaagcacgcgcttagtgaaaggactaattttcaaaaagattnttctgagttataacttagtcctttcccaagaaattaaaacccttaatttcacattcaaagagaggtngatatgctccatgtaaagattattatgcaagttcctaatg

SEQ ID NO: 261908 - DNA, 399 bp, Glycine max
agacactatgtcttcctaaatgaagactaaacatgcattggttatgtgattgtattcattatgcgatataatctgttgtaagccattaatagccaattaatattattaagtactcgtttcgttaagaaaaaaattagttggttcaacaaaaatcaattacatgtgtacgatacatcgttgtcataattaacaacacataatgacatgcatgcgtattaaagtgtgagcaccgacaccacattgactgacttgactacacattctgaaggaaacataaatacgacacatgttcacgcgtgtctattgttgtgtaaaacaagtgaagcaatctgtcagtgagaaccatgtatatatatgagacacggctgataaatcacacattatcttgctttacatagt

SEQ ID NO: 261909 - DNA, 425 bp, Glycine max
tcacctgctgcatgcatgcttaaaatatgatttaattcgttcacatactgccgggaattgatgaccatatatttgtaatcgattacacagggcaaattttgaatacaaactttaatagttgttgtaaatacagtttggccactggtaatcgattacatcctctggtaatcaattaccagagagtaaatttctgtgtaaagacttcttaacttaatgttcttggccaaaccctttgctacttcaattggaattccctttctatttaatataccctttctaagactctatagactgtcttgatcatacatcttgaatatctttaattgctttgtcttgaataaagcgttgagacgcatgtgatcttttggcatcatcaaaacatcggcttgatcctttgtctacatataaaagtgttgcttaccctg

SEQ ID NO: 261910 - DNA, 311 bp, Glycine max
  unsure (1)..(311): unsure at all n locations
acgccgcggctgaagggacctgtgccgctcccgagtntgacagacatcgttttatgagcagtgagcaccagcagtgtttccaggccatcaagggatggtcattccaccgagagagacgcgtccagctcagggacgatgagtacaccagattccaggaagagatagctcaccggcgttggacgtcgctggtcactcccatggcaaagtntgacccagatgtagtcctagagntttacgccaatgcttggcccacgaaggagggagtgcgggacatgcgatcatgggtaaggggccagtggaatcctttgatg

SEQ ID NO: 261911 - DNA, 480 bp, Glycine max
  unsure (1)..(480): unsure at all n locations
agctgcaagcttaacaaccttgatggaagggcagactctatctattgaatttggagtgtctgtcacttatattttcaccatactggctactagttgatgtcaccccctcatgtaagagttcgacatctcaatgttgaatttaataggattagacagcatctggcaagatatccgataatgaccattacacagcatgtggtcctatatgccaacaacaaccattattgtgaagccatattagaattacggtttaggtcttagatgttcagaaatatctctagccatcaatctcatgccaactccaatacacaccagcgtataaagatactataaaaaagaaatccatatagtgagtatcatatcagactcatacaattattcaaagagaactagttctagtttgatcaaatgaaagactcagaanaagatagtttctcaaaacagtaatatagaggttcatagtttctctgcaacatcata

SEQ ID NO: 261912 - DNA, 219 bp, Glycine max
  unsure (1)..(219): unsure at all n locations
ccttcttgtcttcaacgcgaactttgaccattggtcttccttcccgcgatgctccttttcatgtctgcttgagtgggcttatagcctaaaccataccttccacgattaccttgggtatntatcagtctagttatgccgcccgtgttttttcctaaacccatcccgggctcataaccgttccccaacataactcgggccatcattaccgctgcatcggac

SEQ ID NO: 261913 - DNA, 463 bp, Glycine max
  unsure (1)..(463): unsure at all n locations
atctagagctgccattttatccctatgccctatccaatatctatatacacacatgttcacttctactctatccaatattatcatccttattcattgcctaaatttaataaacattaggctcctggcatgtaggctcatagttgtaaatgcatcgtggtatatactaattgaatataacactaacttctcttaggtacatatttttaaaagttttgtttccaaatatattaagaaaaatataagccacaagtatttaatgtcctcaattttatccgatatctttaaggaactataagatggaggagtagggagaagaaaaaaggttatatataaacttgcttttagtatgtgtgtttacaaataaagaaaagaaaatatagaattatcacataatccatcaaattcattggtgtaaacagtgcaaagttccatgaattntgaatctcacactttaagtaaataa

SEQ ID NO: 261914 - DNA, 314 bp, Glycine max
accttcatgttggtaattcttcagtattcctctcaaaatctaattgcaacattatgtactagcccttatgtgtgtcacttgttaagaagttccacatcgcttgccttgattctcgggatgcagcttatatatctactggacaactttacctagtgccacttggtttaagatgaaactaacatcactacaccttgaacgtagaatagtgtaaactagcttctgagaagcacgaattctccctgcccatgggaatatgcttctaccaacgattacgatctaaagatgatactattctgcttatcattgtactagac

SEQ ID NO: 261915 - DNA, 418 bp, Glycine max
gactcctgcgtgttttcatggattttgttccaagctgggaatgctcaatatccattcccagcttgaggggggctcttaacagtaattagctttctattaatttttctgttatactttctggattgctgaactataatgttaatattctgttattcccttagttgacattgtatatatacttcattctcagtaataataagatcatgcctctggtgatcattcttatgagctttttatgctctctttatctggattgcatatctttgtgatccaattataacctttagaataatgtgattgtattctttattctaagggtattggtcaattattactataattataagaacattgtcaattcttaactcgaaatggaacatgttcataatagataacagttaacttctagtaaatatat

SEQ ID NO: 261916 - DNA, 439 bp, Glycine max
  unsure (1)..(439): unsure at all n locations
agcttctatagataactacatggagttgcctctgttttttgcttcccagccttctttaaccagtggatcttctcgaaatttggtttgaaacttcacaagacaattttccatgacgtgaccgttgggatctgtgagaggatgtctggagtgtgctataagcttccgttcccgagagcatctcttatttaaacatttcatcctttgctttcgtgtagcttangaaaaacgacatttcttcttctttctttcttccaaagccatttctaaagttccaagaactttctccatcacccacatccaccattatccaccacaaactatcattgttctccattgtatacccacaccgagaggaacccttcaaccgaagcggaatcttccaacttggcttgcggttgcggtggagaacgaaaacccttatctgacctttcattttctt

SEQ ID NO: 261917 - DNA, 417 bp, Glycine max
  unsure (1)..(417): unsure at all n locations
cttctggaaatctattcgccggtataattacatagatcacaattcatataagtttgtgtcattatgtcaccaattcaaaatttcaaaatgtcatgttcacaatctctctggtaattgattacacgaacctggtaatcgattaccagttcaaaaagatattattttgaactgatttaattttgataaaagaagtttaacaattaaaggttttaaggccaaactataacaattaaaatttgagattcttttaacaaaattgactaagttcttatcttagatttacttgatcttgtgtgttgacttgattcaatctaggatcatcaagtaaatactttggcatcattaacacctgcataatatacatccacagttntatgttcaagatccttatgatgaaaggtggtcagtggttctaca

SEQ ID NO: 261918 - DNA, 452 bp, Glycine max
  unsure (1)..(452): unsure at all n locations
ctttgtccatgtaactcgaattcataattacatcatgaaacanaaagggattgttggtggtttccaatgccttggtaacttgttctgatatggatttgttgttctgtgattggatttgttgaaatttgataactcggagttgtattttccataggaggatcctcaatttagtgaacctgggattattttctatccgggtgtttctttggttttttctgcaatctgtgatgtatcacttatatctattcatgaaaaataatcccacgttctataggactaccacatgcttaatccagaaacatccgaaatggaagaaccaatggtacgcacgggcgtggtagtcaacggcttgtcctcggcttcatatcgttcactacatatttaggcttcgtgaccagaaagcattaaacaccccattcaatattcttagtctcctccatctctntcttttt

SEQ ID NO: 261919 - DNA, 487 bp, Glycine max
  unsure (1)..(487): unsure at all n locations
gatagtaaatcctacattgaattacaggttgagtttattgtaagaaccaaaaaaacattntaataaaatgacaatttacatcggttttgtcaaaattgatattgaaatgtgttatacaagatcgatatgtgctatacaacatcggttttaaccataaccaatgtggcatagtacatttcaacatcatttttgacaaatccaatatcgtatagcacattcaacctctgttttactaaaatggatgttgtatatgatttttaacatcagtcttgtcagaaccgatatagaaatcactttatatattacaccattttgaccacaaattagtaggggtggtcatagtttagtcatttaaataaccataactataactaaaaaatattgagaattataagtattataataactataactacttataattngctataactgggtattggatttaanaactgggttaataagcgtttntgaatatactntcttt

SEQ ID NO: 261920 - DNA, 393 bp, Glycine max
  unsure (1)..(393): unsure at all n locations
agcttctatgatgaattcccttattcctttctcacataaagaaatggnggcccattntgtgagagataatgaaaggaattatttatattttctcttgaaaatgaaaaaaaatacaccgtgcaatcatgggttggttgttagaaaatcaatttcaggtgttagacacatctcaatctaatcattctctcaaaacacagtgaacaacattttaggtcaaaacacagtgacacaaacattctaagaatcacagcagagacgtacctcaatcacagtgactgagaccgaatggaaagacacagcttcaatggcagcttcaacggtagtggtaccttcaacgcagcttcaatgacagtggtagcaagaataatgacgaaaaggacaaatggcaatgtg

SEQ ID NO: 261921 - DNA, 263 bp, Glycine max
atgatttattggtgtgttcataaattactgcattatggatgatttatgattcttcacttcctactacttttacgtttgatgttgtgataaatatcttaaggattacattgcagctaagagtggatgtgactgttgatcaaacacaaaaggtatttgacaggatcctaacaaagttaggtcatattgccccaccagctcttggatatcgcatgcaaaaaggaagtaagatgctgcagtttttataccatgcactttcatacctt

SEQ ID NO: 261922 - DNA, 197 bp, Glycine max
  unsure (1)..(197): unsure at all n locations
cctctcaccaacaaaggtttgaagaccatcaaacctttccaaaatcttcgaaagaagagatgaatcttctccctcatgtccttcttcaccaatatntctagcacccttctttacccatgatccatcatgctccttaatataaccaaaggatgctatgactaanacgcctatanggaatcatctcttgatttgaacat

SEQ ID NO: 261923 - DNA, 473 bp, Glycine max
  unsure (1)..(473): unsure at all n locations
atccttatagtcacctgctgcatgcaagcttaacttgaataattacctttcgtggtctgcttccgngaagtgtggtttctcaatcaagggcaccatgaccacttggagaaagcttctgattctattccagacgatataagacctgaatgggagaagcttgactatcaactctacgttgtgttatggaaatcagttgagccacatattttggagatctttctatcatttaaatcgtgtcgttctttttggaagatagcccaagaaatctttgcctatgatatctaaagctagtttgatgcaaccatgaaggttacagtcctcaagcaaaccagccatgatatgatcgctcatgtgggtaaggctcgggctgccgtanaagatctgagaaagttccttatatatgattcattggaagaagtgaacaggaaacttgacaagttctacatgatcctcattctgatgagcttacattc

SEQ ID NO: 261924 - DNA, 373 bp, Glycine max
tcgagactgttctatcagctgaccggttggatatgaaagttactttaatgtatcgtgaatgtgatatacacttgaatatttatatatctatatcagcgtttcttagtacttacagacgtttctacagattcttggcattgaaaaaccttgccactgtttttctccagcaagactctacacattatgagaatgctctacgctgttaccttcaagctgaggagattgattctaaagattctgttgtctggaaccggctgggaacactgtcatgctcaatgggctcactgagtatttcacggtgggcatttgagcaaggcctcttgtgtagccctaataactgttagcatctaatactcttagatcttaacaagtc

SEQ ID NO: 261925 - DNA, 151 bp, Glycine max
ttaaccgaaatacatgtgcgtctggctagaattcacacgacaatagagctggataaaaagaaagacaaaggttataaattaactttaaagagaagaaattataaaacatgtggaagaaaatatgtactaaaagcaaagacattatttgata

SEQ ID NO: 261926 - DNA, 376 bp, Glycine max
  unsure (1)..(376): unsure at all n locations
gtctaaattcagntattatgttaacaggaatagcagattaattagtcatatactttccctgctcaaatccatgtttggtctctatagtttatcttgattttattttttggtatattttaaaactacttgttttttggctcctatgacttcattccatttaagctttggtctctgctgctagcaatacgccaccacccatacccttcangagaaaactatcaaaatcaatgttgctaactacagtgaccaaaatctaaacaaaatgaaacaataggaattcaaaaccaaccttttaccatatanggaccaaaacccaaatcaagggtaacttcgggcaactaaaatatatttaaagctactttcacttgacggtcat

SEQ ID NO: 261927 - DNA, 466 bp, Glycine max
gcttgcattgattacttgagataattatttattgcccttaagtgtaaatgaccgcaattaattgtatgtcgaatataatttgaataaatatatctgagcgatattgaagtcagaatagtcttttggaaataatgatggtatatttaattgcactcagtttctatttaccgtatcaattttggcttgttttttacatgccattcaaattgaggcagaaatggaaattcagcatctaaaagatcgttgaacacttttagaatctgcatgcaatattcctaatcatttggcacatgttgagaaggtagcagtaaagtcaacagctgatctgcatttatatcccaaagattcattgtttctaatatgaggctttgatggaaattcatggttaacaactatggatatgtatcgtacttctcacaatgtaatcaaatctcttatgcctatgagctcagttcgctcatatgct

SEQ ID NO: 261928 - DNA, 301 bp, Glycine max
  unsure (1)..(301): unsure at all n locations
ctattatcgcaattagctacgtgtagtattatatggctaattgccacattttatgcctccacgcataattaattattgtatctagggatcagactatatggtcaaccaatcaaacattaatggtcactccccatttgttataattagttatcatgaggcttgcacgtggataattntatggataaaacttagatataattatttaaatgtgttttggtaacaggtgtgtttggatctactttaacactatggttcaagctcaactacatcaagttgaaggggaaaaaagaatggaagtact

SEQ ID NO: 261929 - DNA, 463 bp, Glycine max
  unsure (1)..(463): unsure at all n locations
ggatgagttatacatacccattctcgtttagggtttttgtgatgatgtttgtgatgtntatatgctgaaattgcttatggaaaactgttagagatgaatggtagagttaacctacggttggaaagtgagaatgtggtgttatgagtggaaaaagagtgaatttatgagggctggaaggccaaatctggaattggtggtatctacaggtttgagtgagttaatcttattctgaaatgccatttatgacttatgagaaaggttaggctatgctagagggaaaaacaaatgaccaaagtgaacatagagccatttctagggcaatattaggtgttgaagagtcaatatttgattcggtgtgaatttaggtgtatatccagtttgagcaagcttataattgatgtatggactggtgtgaggtgagagttcgcttcanatttacctcattctcaatttaacttttcat

SEQ ID NO: 261930 - DNA, 396 bp, Glycine max
tacttgttctcacatcgtacacgtgttttatatccactccacaaggtttatagtaaaggagaccttctaccctataacgcaacgtggcggacaaaagtgggcaattaacttgaatggtcatcattgtcaatgcggaaagtattctgcgcttcactatccatgttcacacattattgcagcttgtggtgttgtgagcatgaactactaccaatatatagatgttgtttacacaaatgagcacatattaaaagcttactccacacaatggtggcctctcgggaatgaagcggctattcctcctttggatgacgcatggacacttatccctgacccaactacaattcgtgcgaaaggtcggccataatcaacaaggataatgaatgagatggattggct

SEQ ID NO: 261931 - DNA, 382 bp, Glycine max
tgcgcatggtctcagagaagagttcttatttagtatgacgcgatatgaggataaatcatacctaagttggtgagcatgtaacacctccaatgaatcgcattgaaataagtgatcccaaggatgagtaagtataggtctgcacaactgagaatgacttagaggatataattggctctacctataccagccagatgcatatactattctgtactccatcacttaagaattcacagataaacatgcttaactatggacgattatgaggtgagtgatcttctgggaagtctcccacatagcgagtgaatcaagactgagaacactgagaagtctcatgtctgggactgtacctatggaatggtctaatccatggacagatcagacc

SEQ ID NO: 261932 - DNA, 384 bp, Glycine max
caaacgccatctcaaaagtgctgaactgggacctatggatttgattaactgtttacacagacagcccagaattacaaataagaaagaaattatacatgaaaaaaataaatacccataactaatcaacaatctaatactcattatgctggttgacaaactaccccactatgggtcaatccttcaagggatatcctttttttctaaaggaaaaaagaaacccataaagattgaaacttttgctctggttcatgttcttctttggttcgagtcatagttgcacattaaatgtgaaatttctttcaacaaaattgtagtcttgattcgccatgtcttaaagactaatcctttccctttctggtgcaaacaaagagagagagagaaatg

SEQ ID NO: 261933 - DNA, 152 bp, Glycine max
acttgaactaccgactgaattcatcttatgcatgttaatcacaatgcttatccattctaagtatatgaccatgcaagttcctaataaaagggcaattatattaaagaaccattttaatatcacaaatagagtggtatctaacaatacatcac

SEQ ID NO: 261934 - DNA, 318 bp, Glycine max
  unsure (1)..(318): unsure at all n locations
ctgaaaggtgtgggtccaaatcattcagagcatatattgcagtgccattcgctttttgaacatggagaaaccgaaaggacttcccacgtagctttccatgattaaagctaaagaattgctcaaagagggtgttatctttcacattggttcgaaggaaagttccttttggttngaagcttggactaatgacgagccactntgcacagagtcacctatgtgaatatccaggatataaacctaagattaatgacggttatacggacaatatctgganggttgatgagcttgctactgttatcccagactacaccaaacaac

SEQ ID NO: 261935 - DNA, 364 bp, Glycine max
  unsure (1)..(364): unsure at all n locations
atgctcctctgccgaccaacacatatacctttgtcctcttatgcaacattctgaagaatttgaacagcctgaagcttatgctggaataatctacaagagacaccctcaacctctgcaacttaaatagccacaacagatcacttatgacctttccagcaacaggtacaatcccgggtggaggaatcgatccaaccttagatggtcgaatacctcacaactacaacaacaatgaccttattntcaaaatgttgctggcccaaacaaactattcgttcctcaccaatccagcaggaacaacgaacacaacagctactaccgcagatacagcaaacaagtgaggctcctccgcaacctctccttgaat

SEQ ID NO: 261936 - DNA, 475 bp, Glycine max
  unsure (1)..(475): unsure at all n locations
catcaaagcaaaacaacattcatacagcacaagctatcacagccaagcaaaacatagcaaaggcagaaaactctgccaaaacaccaaccaaatcacagcttttctcacttaaagaccccagtaaaacttccttcgttccggttcattaaccgttggatcgactcgaaaatnttactggaagtatttagtacataagtctacattttgaccgttgggatcttctaccaaacatccaaacctcattctacataactctgtccacaaccagcaaatacatagcatttttctgcacagccaaaattctgctgcacccattttgacagcaaaatnctgcttaagtgcagatttcgaaaatcacacttcctctcatccaatcttgcccaaatcaattcctacaagtcccaaatcatgtatcaaccatgtctaacccaaaatcaagctttacagcacaacaacacagaatctaggtgtccaa

SEQ ID NO: 261937 - DNA, 337 bp, Glycine max
  unsure (1)..(337): unsure at all n locations
tacacaattagaataaatatttggaggaagaactttgtccccataatagtactattcggctcagacaggattacctccaatggaatatatgatggtgttagacaaaacaaaatatttcacggcataattattgaatgaaaaaggatcataacaagttaacaaggatctcacagctaattgcattgcgtatgctggaggctctgctataatatcttcctgctgagcaacaccatngatgtagagtgcccgatgatcaaactgcatttgaatatggaagagagaaaaaccagatgaacgtgctattactctatgccatcataacaattattactcattt

SEQ ID NO: 261938 - DNA, 342 bp, Glycine max
  unsure (1)..(342): unsure at all n locations
ctctttttcataagaggagtgcgatgccatttacaaaggttcctgttaaaactcttaacagatacatggatatatctgggtcatagttaaaaaatatatatatatggtgcttaacagtattgtcttangcgatatgctttacatggatcaaatctaacccattcttttaaaaacgatcgaatgaaatatgttctgtacagcattatatatgggccttaagcttgcaattggaatataactcctgcctgtaataaatttaactgtcactatgaatgccaagcttatgattgagtgagagaattattgattgtattatagtaatatataatacttatcacggtc

SEQ ID NO: 261939 - DNA, 210 bp, Glycine max
acttatgtggactaacaggccccacatatcactcttttctttaaaatagaataaaaagtctctcaatttttactttagggcttaatttctgttgggtcggcccttacacgggtaactctaagtcacacaaaaacagcaggtataatagaattgttagtccttacactccccctacaagaacaagttgaaagttccatttgatccattttc

SEQ ID NO: 261940 - DNA, 253 bp, Glycine max
  unsure (1)..(253): unsure at all n locations
aaaattgctgctgagacaatctttcatcctaatgagaatgcctcttcaaacacaaacttagggggctgaacatatccgaagcaaaagtacactgaaactgctcttaagttaaggggaactctgaaaagttaaaaagaaaaacgaactgaaacaagcactgaaaggtcaatacaagaacaacttaaaactgttggaaaaaacaacaccacctattcactggggacatgtaaccgatgaacaaatntctgattaa

SEQ ID NO: 261941 - DNA, 219 bp, Glycine max
  unsure (1)..(219): unsure at all n locations
ctctattaactaatttgtagacatatgggagaacttcacaaattagctaatgaagaactccttttaacttaatgaaccaattcatctcgttattntcttctcttanacttgcttcttaagaagcttacccaaatacaccttacactactactgtctctatatactaatctctctcttcaattcaatatccctctcttagggatgcatgtgtatggtttc

SEQ ID NO: 261942 - DNA, 488 bp, Glycine max
ggatctcttatcacctgagcatgcactttaaaactaattttgcccgggtctcttttaacgcttatgagtatgatccttgaataatatctatctttctgggtgaaattatgattccttggcgacctgcagaattgcttaaaactgtagaagcaattgagaaatagtgggttgaataatgttaatgcaaaataatataccaaaccatcattaatctatgaaggtgggatccagggggttcctatacaggggagtaaccacctctgatagaatgtggacaaattaaagtgtcactctttggtgtaagttgaaaaagaaaataaattattcctttggacattggataaaccaattattgggctatccttggcactttcttttacataattaataataattataattaataaaagaattgaattcctttggaagcctctcattggtctcacattgttgacctttgaattatgcctctacaacttgctggcgtc

SEQ ID NO: 261943 - DNA, 366 bp, Glycine max
  unsure (1)..(366): unsure at all n locations
ttttttttntttctgcttgccctatagatgacttggtgtgaaaaaagtgttattcgcggataaatcttcatatggcttggccaagggaagaggagatgcattggtggcaacacattgcttttgtttattaaaagtggtgttggaaaaaaaagatggtatgtggtttggagacgggtttatggggcatatggaacaaaaggaatggttgctttctcaataatacaaccttttgaagagaaacgagtgattgtagatttaaaatctgtggcctggacctggttgaggagtatgtgcgtcgaggagtaaatgcagggggtttgattactcatttccttcctggtctctaaccatggtgcgtgattgatg

SEQ ID NO: 261944 - DNA, 285 bp, Glycine max
gcttgtctaagctgtaaagtgttgatgtaggaatctgatggatccataaatgatgaagtgacccttatgtccagaaagttcaaaagatgatgaagaagaaaggaaagttccaacactcctctagacatacagattcaagaattataaagaaaaacgaggaaagcaaagagattatccaatttgattgtcgaaagcttggacatattaaagcttaatgtcccagttgaaaaaaaaaaagatactctggggacaagaaaaagaaaagtttgatgtcacctgggatga

SEQ ID NO: 261945 - DNA, 295 bp, Glycine max
aagccatataagcttatgtacccaccatggtggctggaaatacaacaatagagaaacctacagataagtggtctgaacaagaaagaagattagtgcagtacaatttaaaggctaaaaaaatcattacttctgccttaggaatggatgaatattttacggtttcaaattgtaagagtgctaaggatatgtgggacactctacaagttacacatgagggaacaactaatgtcaaaagatctaggataaatactttaactcatgagtatgaattatttaggatgaagacaaatgaaag

SEQ ID NO: 261946 - DNA, 294 bp, Glycine max
gctatcatattcgtactacttccccgcattactcttaggaacgtccacttgaaggcacccggcacttttgccaggggaaaaagaaaccttaaggcctgtgacataggtcattaagatgaactactgatgagatattattcagctactaaaactagtccgaatacatcgaccaaccatttgttttgtccttttgactagcggggtttaggcgaagttcaaaactgatgcctatcatccagacctggaacatttgttacccctacgccgtggtaatttttccaccatatatatatg

SEQ ID NO: 261947 - DNA, 363 bp, Glycine max
gagttatgacaaaaaatggccagcggttataaatcactagaatcaattttacctcaatcctaatcttaatgaaagttctttcctacttaattaccgattcccaaaatcaactaaagcctatgatcaatgtcaaaagattgatgttttgcattaaatcaatatcccaatgatcacgaatctattaatgttagtcacaggataagattaattctatggatgattaattgaagattaactaatctatcagagtctacccaaacactttgatcatgtaattctggataaaacattctctacctatatctaccaattaaatgtagaaaatcactactatacaattaagtgagtattagacagaccgac

SEQ ID NO: 261948 - DNA, 475 bp, Glycine max
  unsure (1)..(475): unsure at all n locations
agctngaccagtaattatgtgcacgggttgtttgttgatttctggttgttcctggtgcggatatgatggtacatatggtgtaccacgatctgaattttcttttggtgaggtagccatggaaaagctcagcgtttggaatgatttcgctaatctcagagaactattgtgaaatgctggtgataacacgaatgccacgcatatattattctgaatgacaaatgtagaggggtgtgtgaagcaacggtcaaatctgttttggcccactaatgaatgtgctcataacgttngagtacattcaaatagaagtaattgctgtaactcttctacagacaaatgcccagcttgccccatcacttttaaactgatttgcatccaaagcctttgtgaaaatatctgctatttgttcctcactgtcaacatgctgcagtgtgaacactttatcatcaacaagatctctgatatagtgatggcttat

SEQ ID NO: 261949 - DNA, 425 bp, Glycine max
  unsure (1)..(425): unsure at all n locations
cctcatcgtccctcacagtctttagatntgggagccaatccaatccttgtgttctgactctcagccacttatgataaccgccgatgatcccattactgcttcccctaagctctctgtcctttcttcacgccgcatcccatgccttgcgaactccttggagtaccctcgcgttgtggtcactaaaaccccgtgcgatgaaaggcgtgatgctttcgtctaatggcgctcctctcatggggtagccaagctgtcttatggcgagaacgggattataattaatacaaccccttgttcccatcaagggaacatttggacatccttcgcatgaagatagaatcttgattcttccttccttctagcgagggaaccaattaacagacgcccncccatgctagccaagagttggcccaattcgcctttctttt

SEQ ID NO: 261950 - DNA, 432 bp, Glycine max
cattcaatatcctgatgagggtgttccatatattctcaagactggactaatacatttgctacccaaatttcatggtcttgcatgtgaagatcctcataagcctcttaaggagttccatattgtttgttccaccatgaagccccctgatgtcaaaaagatcatatctttctaaaggcttttcctcattctctatagggagtggcaaaagattggctctactacctcgctcccaggtccattttcagctgggatgacattaagagggtggtcttggaaaaactcttccctgcatctaggatcactgccatcagacaagacattttatgcatcaataaacttattggaaagaagctgtatgagtactgggaaagattcaagaatatgtgtgcaagctgtcctcaacaccatatttctgagcaaatccttcttcaa

SEQ ID NO: 261951 - DNA, 407 bp, Glycine max
  unsure (1)..(407): unsure at all n locations
attctagggcattatacaggatcaaaccaaaacatagggaataagaatcgccgcatgtaaatgcccatgatatggcaagatatgctagatagggcctacaacgaacatcttagccgacccataagtgaaaagatttaacttcattcattatatgaatgaatttacgggaagtttaatatccatcctcattggagcacaagttgcacataaacaatggctgagaacatgagacataaatgttacggttgttagaaggaaatcctgtcatcattcccaagttattgatattctaagttctttatttacagatactctatttataaatttaagttaattagattgattattatgtggacaatcatntaataattcttaatttttattaaaacttttaatattataacatt

SEQ ID NO: 261952 - DNA, 414 bp, Glycine max
  unsure (1)..(414): unsure at all n locations
tcttccatagggctacaatagtaagttcatcttcaatccaacacatcatggaatgttatattatatttgggaagcacaaattagaatcagaaattagagaaataatatatgagcagagaacatgctaatggtagtagagcataaataaatagaaaaaaatataaaagaattaagaaaacatgaataccttccatgtgagtttagagttagatgtacttatcaaagacttcctacctatgctttgtcttgaaagaaattgaagcacacgtttcatgtgtaacatcaaacttcatatttcaactgagaatggtataaccttttaaagcacatcaattggttttttattcttacctctcttttgaaataatgacatntaaattgtttataattatatttcagtccaccaaatttagt

SEQ ID NO: 261953 - DNA, 453 bp, Glycine max
agcttggtgggagtgaccggcactccatatatattggaaatgcccgcgatcaaagtttgaaaccccatggccctgttggactgctctgggtccactatgtgtccacgatgcgtgatcccttcaaattgatatatagcatctgagatcaactgggccacatggatactcacctgaatcaagatggcgttaaccaacttacacttcgacaaggggaggtttgaattatggtcgttggggagaatgttgctgaacaacaacgtcatccaaatctgcgtaagggtggtcatgctggtgcgcatgatccgcacccgttctccctccacactctgagcaaagccctactccgaaacgcacagcaattggctgatggcctcctcgtcaaaccccatagtgtattgaccccctcgtcgctacgatatcaacactctaatactacggtaattcaatttttat

SEQ ID NO: 261954 - DNA, 397 bp, Glycine max
  unsure (1)..(397): unsure at all n locations
tttggagtaaatctcgnaaataaatcttgttttatggttaatgcatgctctataacatttccattggatttaatgatgaaatctgtgcattttcaggtgaaaaagaggctatgttttgaattgcaaaaagtagcagttggactaagatcagcaattaggctaaatgcataaccatcgctaagcgcatcttcagcgtccttcgcgcataggagaatatggtagagcatcaatatcaaggtcgcgcactaatcgcgagatcagtgcgcttagcgttactggtgccttcatccaagctaatcgtgagactggtgctatacccaatctcacttacttgcgctaagcctatttaaagccttntttgtgcagaaattatggaaagatgatgattggcacagat

SEQ ID NO: 261955 - DNA, 335 bp, Glycine max
  unsure (1)..(335): unsure at all n locations
ttcatgtgtaagaagttctagagagagaaaggtccaagttccaaagagtnttgagagaattttctatgtgaagatctgcagagatgagagctcgaagcggaagccattctgagagctcgagatgagtntgtgaatgattgtgagatcctagaggtggaggagacatcctcaccactttgtattttgcaatctttcatcttgttcttctctgtgttgtaaaggaggctttcggactatggaaagttaaatcctctggttggatttcctgtcggacctgatgaaatatactctatatatgaatgatgtttgtgtttctctgtgctatctgtttcatt

SEQ ID NO: 261956 - DNA, 395 bp, Glycine max
ccatctaaaaacttagctcacttccttgagaagcttacttgtgaagctagagcttaccttcacacacccatctaaaaactaagctcacctccttgacaaaatacatgaaaatacaaaaaataagtccctactacaaagactactcataatgtcctaaatacaagggctaaaccctatactactagaatggtcaaaattcaaggcccaaaagaaggaaaaacctattctaatatcttacaaaaaagagtggatccaaccttgacccatgggctcataaatctaccctaaggttcatgagaaccctatggcgctctttagtatctctaacccaagcctcttggagtcttctatccaataccgctggggggtatgattgcatctacctatttcggtac

SEQ ID NO: 261957 - DNA, 284 bp, Glycine max
  unsure (1)..(284): unsure at all n locations
aacccatgttgccattcctacatggccaaatttcccaccagctcaacaatatcaatactcagccaatattagtccttctcattacccaccacactatcatccaaggacactcaatcatccacaaaggccacccctaaatcagccacaaaaaccacctgctgcacatccgataccaaacaccacccttaacacgaaccanaacaccaactgangaangaatttctagaaaagaacctatagaatcaccccaattcngtgtcgtatgctaactactccatatctac

SEQ ID NO: 261958 - DNA, 347 bp, Glycine max
  unsure (1)..(347): unsure at all n locations
agctngctccgcgctttacaattctgctcttcctcggctcaaatcctggatacgtaaggttgccttatacagtgatgatgaacacttaatgaaatccgtccacaaaccatcaccgatggatgaagctgcgcaccccgcttaatcatctgcacctgcagctgcgtatgtggcaaacgcgatccaataattgctggcttctaaaggcgaaggagggtttgttgaactttaattttcatgctgcaaaatgtctctgagttgttttaacactcctactctgcttggtgtatacatgagaaaagactgtggttttgctgcatctggattcatactgtgcagagaggagatac

SEQ ID NO: 261959 - DNA, 221 bp, Glycine max
atgttccttggataataggcctcaagaccttatcttatcacttcagaggatgcaacacatcgctgcggcaagtaacgaactccgctgtgtgacgctctatcgagaatgtcaaaagccgctctttagcttgctttgctcgctgggtgagctacacttgctgggcaagttgtgaagatcacctaaatcctctttctccattcttgagctaccatgtgatgtct

SEQ ID NO: 261960 - DNA, 404 bp, Glycine max
gtaaatacgctttcagcatccggtattaagtactttcaacatcgggtattaatcggtgttgaaactaccgacgttaaaaatgtcaacattaacatcagttttacaaaaccgatgttaagtattttacacaacatcaagtgtataaaaaaaatgatgtcggttgatgaaaaaattacaaaaaaatacgtggttgttttttatgataatggatgttgtcaggcaacagataaaaaatcgatgttattggttctcataaaaaaaattgatgttattctgaatgataacatcagttgtttgggagaaccacatgctgtccataaattactatcacaacacgccacgaactgtgctgagtgctataatagtcatacagattcgtttatcactggcagtccaacctaaat

SEQ ID NO: 261961 - DNA, 340 bp, Glycine max
  unsure (1)..(340): unsure at all n locations
ttaaagagtatacttgtggaacctgtacccgacgaagacactgacaaaaacttatgtgcttctttttctacaaagtatggcaggctgggggcaaatatatattcttgccattagaccttagatgccactgtgaacgtatgcccatatcagatagatcttaacgggtattcaagccatccttcgtcttgccttgaatcttaaggagcatcccaatcacattgtcacatacattnttctccacatgcataacatcaatacaatgtctaacttctagatcacaccactactgaagatcagagaanatggaccttatctttcatatgcgactcttacttttatt

SEQ ID NO: 261962 - DNA, 341 bp, Glycine max
agcttggagaggattcttcttgtgttgatttttatacggagacaatgagagaggggggtgctcactattgaaggaagaatttaaggagagaagtttaactttgagttgtgtctcacaagactcttattcatcatagttacaacaagttgtacacatgcttttatttatacacttggtaacttccttgaaaaacttcataataaaacgttcttgagatatcttacttgaaagactagatcttagcgacacacacccagataataacttatctcacctccttgacaaaatggatgaaaatacgaaaaaagggcctactactataacttctcgtaatggcctga

SEQ ID NO: 261963 - DNA, 196 bp, Glycine max
  unsure (1)..(196): unsure at all n locations
tttaaaacataaccaagaacaatctaacatattacaacacctcataatccattataacatgttatcaaatacacatttaagcactaaaaatcaactttgttcatacaactatatgcacacaaagattacaaaaatattaatgctatgtnctactctattactcttattaatcaaaaataattactctagaatcata

SEQ ID NO: 261964 - DNA, 476 bp, Glycine max
catatattaagcgcagagttaattaatcattcactaagcatgcatggattaagagcaacaaatacagagtgattggtgaagaggaaaaactaatcaaaattcaatagtaataataaaacctgaaagagagttgtgcttgatcctcaaaagaaaacaacactggagacttatccttccattaatcagtagaaaacgaaattgcagatggaagcataaaatgaaattgtagattgaagcagaaaatgaattctattgccacgtgaatagtatgcatgaacagtataaattggaattgcaaaacctcatattattctcgccatacgaaaaaactcactaaaactaataccttggtgctgttatatatgttctcagccccagagcttacaaatctgtcttaagtccaaacccatatataagagtaaatctggacaagaatagataagatttgataaatacaatctagatgaaatcaaatc

SEQ ID NO: 261965 - DNA, 210 bp, Glycine max
caagggcattatgaacaaggcatacacaacaagctgggccaacctttacgtactgaccagatgcgccgactaacttgtacttggttgactatgacgcattggcggcatgtgcgaagctacttaacttttgtggatattaagaactctaagggggggccgctgtgccctgcggcatccagctgtggggttcccttccctgctggaccagac

SEQ ID NO: 261966 - DNA, 467 bp, Glycine max
  unsure (1)..(467): unsure at all n locations
gcttgtacttaaatcattcataaacctatttcaaacatttgacatgaatattgttaagcatatatggtaattaatattaataaagagttaacctataagacaaattctaaaccgaatttacttacagcatccacagctgtagtatagatatgttcaaacatttgtcacctaaaatgatttcagttacatctgcatgtgtgatgaanaagctatcttttgcattaggtatccaaaatttcatcccatcccacgataactcaattgacttttggtatacatgaaacaagttcttacccaattctcccaatggatcaactccagccactgcattgcccatttcaagaggtccaactgatttcgccacacgcttatgtgaatcttacatggttaatgaaaataacaattacgctaattttatttaacaatgtcactgaaattagtacattcagagggaagagaaaaaacct

SEQ ID NO: 261967 - DNA, 370 bp, Glycine max
  unsure (1)..(370): unsure at all n locations
cactgtcgatactcacgcttctattggaccatgaacatgcaactatctactctatcanaacgatgctatgtgctcgcgacgtggacctttcttcccttcgagaggtgagtaccctattgctaccccatatagctccgcgacattgattccggtcatactcttccttgcgagccctcttggtctcttgttcaagggcccttgtggtagttgcattctcttcccgtagcccggcacacttcttacgaatgtgtgtagcggccaacttgaacttctacttggcaagtatcgcctttgctagctcgcttttgagagctaggacttcttctgcctcttccggtgcctcgcaactctcttcgctgacgacttttaa

SEQ ID NO: 261968 - DNA, 167 bp, Glycine max
gctcaaaaactttagcagtttttttacccccccaacgaacaaagaacgtacacgccccagaaaacatgcaccatgccctgaggttccccgacttacaccgctggataacaagctccctcataatagcactgaaaaaccaaatccgaagcggtctggaaaagtgactt

SEQ ID NO: 261969 - DNA, 430 bp, Glycine max
ctacttacaaaatcgagtgtgtatgtcttgttaaagtattaagaccaccgctctgatattaccaatttgataattgagaacaaaggctgaagattcttcaatgtactctaagatttttttgcttagtaaacaaaaattagattaactacaaaagctaactactaatctgttaataaaaaaaaacttcttctcaaccttgcattttgtgatggaagaaaacaaattaaaatatgcaatgataaagataaagttgcgcgacactaatataaaagaagacaggagatcatcaatgtaattctagagtgctaatgtcgaactctccaataatattcatagtgctaatgtgaaaccagttcctacattcttgttattaggcatataaaatcgttttttaggatttaaggatgctctcccaattattctaagagta

SEQ ID NO: 261970 - DNA, 270 bp, Glycine max
cctgcttatatattaagtaatggccacctgttcagtttggctttgcaaatgtgacaagatatcatgtgattatagaacattcaccctcttgattaagaaccttttttcgtgattgtaaactctgattctaatcttatctatgtatctgacgattctactccatcttatgataagactctccatataatggtccaggcatataaatccatattgaatttctggctttttctgcgcaggatatttataccagatatacaaccttacgcttat

SEQ ID NO: 261971 - DNA, 337 bp, Glycine max
agcttacttgtgctgttgaatatgagtgcttaagggagcaaaaaggtaggcaatgcacggagattgaagtactgtgcagagggtgaaaatgctcaaaggaagtaaaatggcaactgcgtaaggtagttgccttatttactggcagtttcaaatgactcgcttagcacatggactcactaagcgagtcaacatgacgtttgaattttaaagctcatgcacttatcggatctgctcgctaatcccaatacacaaattatgaaattccagagaagtttttgggcctatcacgaaggtatgtgttgggcaaattctgcagctttgatcggtcctgcaacta

SEQ ID NO: 261972 - DNA, 144 bp, Glycine max
atcccttaaaatacacttgagtcttgcatgctcaatgctgcatgagtcacattctgcataataagcacacaacaaaatcttcaaggtacacggataacttatggatcataaaactcataccatatgcttgactgcgcataacaa

SEQ ID NO: 261973 - DNA, 344 bp, Glycine max
  unsure (1)..(344): unsure at all n locations
ctcgcttagccacatgcatctcagcaagaggatgagtgttcatcctcaaaagatgaactcgcttagcgcggtaggcatgcttagcgagttcttcctataatgcgtatattcaataaatactgatgaactcgcttagtgtagcatgttcacttagtgagttcatcacattttccagaaaaacgcagaaaacgcagttcgttttcttgcatttttcaagcctctataaggcatatcatacatgcaatggttccaaaataatctatacagcccattcatatataaattcctaatctttaactacatctaaganaacattaaaaccctataaatataaagctaaatct

SEQ ID NO: 261974 - DNA, 334 bp, Glycine max
  unsure (1)..(334): unsure at all n locations
tcccctgatggttgtgatgagttatttttgacttgcccctggntaaaggtcttgcctaactaatgatgggataggtcgttcgacctgatgaattactcctatgatggttacgaggtgtaagtatgagttgcacttgattgaaagtcctgtcatgcaatctggtggtgggtcgtcttgacctgtataagtactcctttgatgtgatgagtaaatacaggcttcaacctaattaaaggtcttgccaaatgatggggcgacagttcagttggttgaacttggacccctgatggtggtcgtcgtattgttgcatgtaacggaccatggggaccttggg

SEQ ID NO: 261975 - DNA, 426 bp, Glycine max
  unsure (1)..(426): unsure at all n locations
cggacctattgaaaaagagtattcaagcgttgctccaacatcacattaatgctctctcgatctgtcttgatgataaagcgaccatgggagaggtaggcaccctacttttgaattgcatagacaatagcaaggaattccctctcatagatagacatggccagttgtttagggcccaaagctttactgatgtaagcaataaggtgtttttcttgcattagcacaaccccaactcctgaacctgaggcatctgcctncaccacaaagggtttggaaaaatttggaagggctaaaatgggtgtggatattaaagcctgttgcaaatagtgaaatgcatccttagattctatcgaccattggaaacagtcctttttaagcatgtcattgagagggttggaaatactgccgaaaatttgtacaaatctccta

SEQ ID NO: 261976 - DNA, 413 bp, Glycine max
  unsure (1)..(413): unsure at all n locations
cgtatccgtacttggattgctctgtttaccgccttcctaatgcagtatcagtacaattctgatatggctcccgaccgtactcaactgcagaatatgttcaagaaagagggtgaaacctttaaagaatatgcgcagcgatggagggatttggcggcacaagtagctcctcccatggttgaaagagagatgatcaccatgatggtagacactctgccagtattctactatgagaagctagtaggttacatgccgtccacctttgcggatctagtgttngccggggaaagaatcgatgtaggattgaaaagaggaaagcttgattacgtttcctccgcaaatgcgaatgccaaaagaatcgtggcaacatgggcaaaaaggaatgaaggagatgcccatgccgtctcttcaacacc

SEQ ID NO: 261977 - DNA, 417 bp, Glycine max
  unsure (1)..(417): unsure at all n locations
caagaacttgntcatgaagtgctgcaatggtatatatgcagaatggaagcttggtttgcttntgatgcgattatcataccactgaaaacctgtgatcaggcaagtgccattatattagttgaaggacacaagatcctatttcgcctaagcttctacacatgtcctttnttctttatttttatacttgagtctttattttattatgaaatctcattttgccactaggtccctggttaaataattgttaatactataactgatgacatttgctttgtggagctctatataattagcagaaatctaagtttctggcctttataaaacctatacagtattatttcctatacaacattatatttctgaacgtcactanacttctattagagaaatacatgagaaacacaaaaccctatccac

SEQ ID NO: 261978 - DNA, 381 bp, Glycine max
tcttgattttttctaatttcctttacaagccttgaacaatatatttgtccttcatttaactgtctttgggcttggcggccacgctcaacataatattttcgacacctactgtacgttgatttgaccaacgctgttatgggaatgttgcgacaatccttcaaaaccttattgatacattctgagaagttggttgtcatgtggccataccgacgtccttctctatcataagccatcatccatttttcttttgaaatgcgatcaatccatgttgctatggctggactcaattcacgaaatttttctagattttgatcataaatgtgcttgctaggagtatatgctgcactaaaataattatgaaatagaatttaaatatatatc

SEQ ID NO: 261979 - DNA, 252 bp, Glycine max
atgaaggtaccctaatgtctgaggtttatgggattaagatggtcattgactagtccctattttatgatttaacccaattgccaagcgaaggtgtaccatttgaaggtgcattgattgatgattggaagtttgatttctttgtacatgatgcccgccggttggtttgcaccaaccaagcggatatgaccggaaggcttcttgccggttcattggcttttgaaagtcgcatccttcattaccttattgttcgca

SEQ ID NO: 261980 - DNA, 427 bp, Glycine max
agcttcgagaattgtccaaactcctcttccatttatgatttcaggcttaaatatgtggccttgttggtgcttgcgtgcttaatgcaactctggctcgcttatcgtgcatgagtgaatttcagcttagcacccaacttctcggttagcagatgcatgcaagcagtgtgcttagcaagatgagctctcacttagcgcatgtgtccagctcatccttcttccagattcttcctcgcgctcagtctcaagagtggtgtgctcagtggatggctcgctaagccgacagattggcttattgaaaagctaaaaatcagcacttcacaaactcgcctaattaacctgaaattgaaaggaaatgattattaaatacacaaaatgggagtgctaagtgattattacctatatctaacaaatagttattacaacacta

SEQ ID NO: 261981 - DNA, 392 bp, Glycine max
  unsure (1)..(392): unsure at all n locations
tctgctcatctagtagccacaaattatctatagggttcttacactactataacaaccctgacaatcaaggaaccaggactcccatccaacgttataaataactagtttctaccttcacttttcatcccattcccaactcattcatatacttacttgaacgtcggagtcccttttagtaggtaaccccctccctttcctccggtggaagacgcctgcagatttgacgtangagatcgtggagcncttcaagctacgtaaccctgacgtcagtctgttcatatcttgtgaatacctataatatactataataatatcatactaatagtatctaatatactatcatataatatcatatataatatataatacaacacacaacacacacacacaca

SEQ ID NO: 261982 - DNA, 440 bp, Glycine max
  unsure (1)..(440): unsure at all n locations
cagctttanaaagaatttgtggcttgctgcaaatatactcgactcattggatttcagaaccaattcaactgaatatatttattgacgggttaaggccgcaatccaagcagctacttgatgctcctacagggggaaagattaaattgattgaaaatatggctgcaagtgatcatgcaatcttgcgtgatcagatgcacattcccaccaaaagaagcctggtagaactcacatctcaagatgcacttttggcacaaaacaaagtgtngtccaagcaacttaagacattaactgaaacattaagtaagttgccaaaacaattgcatgttaatcaaccttcacattccactgttttgaggttggaggttacagcatttgtgggggagcctacgaagtttgacattgtattctcttatatacacaacttaagaggtgaattacat

SEQ ID NO: 261983 - DNA, 337 bp, Glycine max
  unsure (1)..(337): unsure at all n locations
agcttcaccaccaagagagcgccntagataattatcttagataggaagctncaatggaggaagagaatgatagagggagagagagagaatggtgtggaaattgaacgagaatacggagataagttgaactttaaagtgtgtctcacaatgttctcattcatcaaagttatgacaagtgttacacatgtatctatttatggcctaccacatgggaagcttccttgcgaaactagaggaagaaagcttccttgacaagctagaggggggatactcacacctctctaatatctaagctcacctccataccaaaatacatgaaaatacaatggaaagcttt

SEQ ID NO: 261984 - DNA, 374 bp, Glycine max
  unsure (1)..(374): unsure at all n locations
agctttttcacattgacttctccaatagatcaaggaatagttacacttccaggatctttatgcttgagtggaaggatcttctggatcacaacatttgcaatttccttccactatgatgttttcctgacgaatatatttatgcttccttgcgcacatatctttcaaaaatttaaagttgagcggcatctgctacaaagcttctccgaagggcatggttatttccagtttcctgaacatatctaaaagtctcgccagatgacgatctttttctttcttggaangaccgcagggtacagtactttcacaccttcatccacaaccttttcacgtcctactcttctttgcattcctattattgattttcctcattttca

SEQ ID NO: 261985 - DNA, 382 bp, Glycine max
ggaccttaagacactgcagcagcactttcctgaagtgccaaagcggaccttctagccggatcgtataagaaggctatgacgtcttcccttctgcacttctaaactctcttgcgaaccaaaataagaaactacgccatgaagtggtattgaactattgattgatttgcactcaaagagtgagtagataaaccctgccgaggtcttgaccacagcgagaaaacgtctgtgagttttgtacctgcttagcctggcttcggatttgtttttgtataattaagcctctcccacgggattccttgatatctttcccgctgctggcttacgaagcagtggtataaagcttcgcaatactctgttgatcggctctcattcattaatcgat

SEQ ID NO: 261986 - DNA, 436 bp, Glycine max
  unsure (1)..(436): unsure at all n locations
catgcaagcttgtccaaattgagctaagtttattcttcttgttgatgcacctttctatccccaccaaattcaattcaacatcctttgaatctcatcctttagagttgctggaagcaagtagatactcattgtgtatgaaggcatttgctcttctccaagtcactatttttcttaaaaaacagaccttttccaggatttctctttaaatacctaaaaanttggtagaatgcctcaatgtgtttttcataaggagaatgcataaactgatgtacaacactcactgaaaaagcaatgtgttcgggtataagacaagtaaatataattgccaactaactcttggtatctctcaacatcaacagaaacacttcctttttcccaccatttcccattgggatcgataggggtatctgctggtctacaccgctcattccagttc

SEQ ID NO: 261987 - DNA, 450 bp, Glycine max
tgagctgcaactttccaaagcatcctttgcatattgaggcaacctcccttcttctcgactcttaactgaatgacagttgcgacaacctcccattaaccacccttcatacttagactctttgtgcttcacactctagattgtggggttgtgtacccctttggccccatcggtcaacttcacaacgaccaatctccccacttagtcctctaatgcttttgcactcaagatagcggggttgtgtacctattagcccctcccttaatcaactgggaccctttttcgcagcacccttaaatctcaaccaagtcacttacaccactttggcactcactatgcacatgatataatccttagtctgtaatcaatcctacccgcctacacgaagtgcgctcggcgatttccgacgtaatggaaaaacatgataagatagttccttctacgatatccgat

SEQ ID NO: 261988 - DNA, 399 bp, Glycine max
  unsure (1)..(399): unsure at all n locations
gctttaacagtttttggaaagactaagntttatttatcatactattcaacccttattttaatgtgtttcaggtatttcagttggtatcaaaacttggcctctacgttgatctcttgacacagtagaggaaagaaaactcctgaaatgatggaacaaggatagcctgtgaacaaacctttcatgttcaagggccaactatgactactggaaggaaagaatgattgccttctttgaattcacttacatcgatatataggatgttgtagaaaaaaggcaatcaaattcctttaggcgcttaaagaaacaaaatccctagggacaaatgaacaacataagtntagatttctatctcaagaggagtattccaatagtcacaacttcataagcagcaaacagatg

SEQ ID NO: 261989 - DNA, 362 bp, Glycine max
agctctggaaaaagctattttcaccttctcgctaatccaatatactggcttagcgagcatccactaagcgcaacacttctgggctaagcgcgaggaaaaatccaaaagaagatgagttgtataggttcgctaagagcactgcttcagctcatccgttaagtgacaaaggcgcgctaagccaaaaatcactaacgtgcgctaagcgcacaagcacgaacaaggccacctatttaagcctgaaatcagattttgtggaaggagttcggactgggattcacagctttgcatgtctagggtttctagagagagaaaggtccagttccagagatttttgagagattatgctgtgtatagatctgcag

SEQ ID NO: 261990 - DNA, 237 bp, Glycine max
  unsure (1)..(237): unsure at all n locations
tgaaactaaagacataaatggataatgaaactgtggaattgaaacgagaatgaaacttaagcagaacgttaatgaaacttaaggtagaaaaagaaatataaacgaaattgcaatntgaagcagagaattcgaaagtgcattacgtgaacaaataaaatatagctcaaaaacgtaaaaccctaaaccctatgctctgtgttaattctccaatcgatggggatcaaatcacctgcagta

SEQ ID NO: 261991 - DNA, 462 bp, Glycine max
  unsure (1)..(462): unsure at all n locations
agctttggaagtttacccattttcctgagataaacaagtcttcaggatatatttgagttgcatctccaacattttttatggtggggatgttcttccttggaggttccattgttcacaagagacaagtgggtaaaagagagagagagcacaaatactaagagagagagagttttgaagttggataaaagagagagttttgaagttttcgagttcttagacgattgtttgcaagagcacaaatactaagagttcaaaagtttcaagaacttctctaagtgcctgcgtttgccttttatatttttttcaaaaagaaggaaagagaaagatgatgtaacgactcaattttcatttaaatattttcaaaaactattttccaatcatggctaanaggacaatgcacgtttctaanaaacaaacatttntgtctttgtgaaaatcgtcccccttccattgtgtcatttc

SEQ ID NO: 261992 - DNA, 350 bp, Glycine max
  unsure (1)..(350): unsure at all n locations
agcttctacttatgtggcagggcgggcttcctttactttcttgtctccaacgcgagctttgaccactggtcttccttcccgcgatgcttcttttcatgtccgcctgagtgggcttatagcctaaaccatacttcccacgatttccttgggtttttatcaggctagttatgccgccgttgtctttgcctaaacccatcccgggttcataaccgttccccaacataactcgggccatcattaccgctgcatcggacagacaagggtgcccaaagagggagtccacggaggaaatgttgaccacctcaaaagactggaaagcggnttctaacgattcttctgccgcttccaca

SEQ ID NO: 261993 - DNA, 325 bp, Glycine max
cacaagggacgacaacctttaatcgagtgtgcacagatgacttcaaattgttttattctccctcttacgcgtcttttcgcgcttctatgcttttaatatttcctatcttcttatgggggacaagggagtctcccttgctcctacgtatacctcaattgtgataagaaaataaaacctacgctgttctctctaaaggggtgaatcaagcgattctttttacttggaggtggtcatttaaggcgttggaccttataatgatccattttacttggtgagaaagctaaagcgttggacctctaaccatctcacgaggtccacaaaagcg

SEQ ID NO: 261994 - DNA, 444 bp, Glycine max
  unsure (1)..(444): unsure at all n locations
agctntccaaaaagagttgcaagagacatgttagtaagatctcttgattctgcaattgttgttacttttggttgtcattgtctgcttaaacatctcagcactttgttaatgagatcttcattaggaaatatttttcccaatgatgcaagatgattaactatatgtgtaaatctcttttgcatatcttggtatcgctcattgattcattntaaacagntcatattcatgtgtgggagtgttaattctagatctcttgacattagttatgccttcatggattacttgtaatgtatcccatatttctttggcatttttataatttgagactctaaaatattcatccatgcctaatgcantaagtgatatattttntgcctttaaattgatttgaccattcttcttttatatcatccattcttctctaggtttctatagtgcattcac

SEQ ID NO: 261995 - DNA, 434 bp, Glycine max
  unsure (1)..(434): unsure at all n locations
cctctaaacgactgccgcttgcaactttaatagcnacagaccctgttcgctagactgagattaattcaccacttccaacttcaactctggaaacaatggttttgtcaagttttttaaagaggctcacgtcattggccatatggtttgcgcacccgctgtctattaaccatgaatcactataactatttcttgtggctatacatgttgcaacaaagagatgctcatcttctcgttcctcngcaaccacccttgtttcctctgatttggacttgcatattcgctctacatgtcccatattgccacactttctgcacttgacatctggcctccaccaacattttctttcacgatgatttgtctctttcaatgcggacaaagaagaaaggtctcacctctctgcttgttggaaccatctggttatatttcctccattt

SEQ ID NO: 261996 - DNA, 369 bp, Glycine max
gaatatactaagatgccttatgcatattcttataatactccttttagattcacatgatataaaaatgaaattcacaatttactgatctatgctataaatagaaacatgtgctacacttgtcataactttgatgaatgagaaacttgtgagacacactttacagtttctcttcctattctccttcaatatacatgccacactctctctctctctcattctctccctccattgaagcttactctttaagcttcttatccaaagcactttcttggtggcaagcttctccttcatggcttatttcttatgatggcgctttctcactctttccttatttccgccgactccatggtgaaatcaccttgaagagct

SEQ ID NO: 261997 - DNA, 463 bp, Glycine max
  unsure (1)..(463): unsure at all n locations
agctctaaaaattgaattaaaacgttcacaaattgctggttattgattaccatatatttgtaatcgattacacacggcanattttgaattcaaattttaatagttggtgtaaatcagctatggccactggtaatcgattacatcctctggtaatcaattaccagagagtaaatttcttgtaaaagactttttaacttaattttcttggccaaaccttttgctacttcaattggaattcccttcctatttaatataccctgtctaagactctatagactgtcttgatcatccatcttgaatatctttaattgctttgtcttgaataaagctttgagacgcatgtgatcttttggcatcatcaaaacatcggcttgatcctttgtctacaaatagaagtgttgcttaccctgtaggcttcatagaagatgtgtcggtcaagttggtaacctatattcctgtgatt

SEQ ID NO: 261998 - DNA, 421 bp, Glycine max
agctttaccaagttttcttgagcccttcttcatcaagcatatgtaaataacctccattttcaactctaagcttgattttcatttcattttcttgctctattctcacatgtagtttctaaatcttatttttgcactcttgaaggttggaaacttgaatctaaactccgccattcttccctctaaatttcatggagactacaagaggtagggaggggtctccatctcttgaaccctatgtttgatgttaaacttccttgaacatgtggctgtcttgaaatttttgtgcttgcttccctattatggatctatgtgttgagctattttacttgagttttctaagccacaaatgagttctatgaatgtagaacttaagctagccttaaattcacttaattggatttttgccaagtatgaataaaca

SEQ ID NO: 261999 - DNA, 419 bp, Glycine max
agaacctactacttgcatttgtctcttacctggtgcagcattcttatgttgacgttgttgacattgtgcatgcgacaatacccatggaaacaattgctgcctgctcgaacaaagatgctgctcacaaagattccgcatacgattttgtgatgtccccaccacatactggtagacatgaatatctagcatgctaaaaactagcctaccctaccccagcatcctgcagatttaagttctattggaacagtcaatacagggctgacacactgaaatcctactgataaacttctgcaccctatgaagagtttatggtctcacattctagccaatacgatatttctatataccacaagctacgtttgactaatctttctggatcctatctggtgaggatgactcattatctggtaaatcaatca

SEQ ID NO: 262000 - DNA, 466 bp, Glycine max
  unsure (1)..(466): unsure at all n locations
ctgagctgcagctctaactacaataactatgctgaggtatgatttatatgctatattaaaaatacaatttaattataggttgctaatgacctaatgtataatcgatctctcaggttagcaaggcaaccaaaattgtgtttaagcccctaaataaaaaaaaaaacaaaagtcattctacgcttattgtataatccgattatttttaataaaataataaaacacaaattttaactaccataaactaacaacacccaacaaatattgactagaggcaaatcaaatttgattgttgtcttaccatatatgatcacagtgttcccaatcatgcactactagaagatagaattttacatcggctatttaagactttaacattgattattaccaatgttgaaagaccaacgttgaaagattattgtaatatcgtnttataaattgatgtaatgaaaatacacatccgtattaa

SEQ ID NO: 262001 - DNA, 420 bp, Glycine max
agcttgcatttggaattgcgaaagccccactccatcattatgattagtacctgacatctcaaactaacaaatcaaacgtaacaagacaattatagttgctgtttgaatacctcacccactcaagtgtatcacacaattatggcttttttctaatgaaacactcttgccttttaccactctaattccccttgagttcttaagcaattcaagagattatggctccaacaaagaacatattaccaatatgtgtaaggtaaggctatagagacaaggaaaaggttaaccaagaaaaaggcttacaatgtttttaggcacaaatgaaggaaataaaattcagaatttatgaattcaagtaacaatccttcatgcaaccaatatattaccttaaagagggtgttttttttatagttttcaagcatg

SEQ ID NO: 262002 - DNA, 364 bp, Glycine max
ctgcactcaaaataggcctattaactattgtttccgaggaaattcaaaaagacctccattttatggaaggcgtaccactactggaaacccgattgcaatcttaattaggcaatagatataatattgggaagcatagaaaaggaccttatgttccctctataatagccggagtgcccaatagaagaacctcagcaattggactgaggaaaaagaaataattcacataattaaggcagaaaatattacattccttagaaagataatctctaggctcaaatgaaaaggctaagattgtgggatcctacagaaccatgaagccaacgatgtaaagactaggtaacacttacttgtgaaatgaccttta

SEQ ID NO: 262003 - DNA, 406 bp, Glycine max
  unsure (1)..(406): unsure at all n locations
agctttgtagatntggtcttcgccagcgaaaggatcaaagtgggtctggaaaaaggaaaatctgatcatcctgctntgatgaatgcgaaaactggggcaaatgaagaggatgagaataagggagaaacccttgctatgactgtcattcctacacggtcaaattacccattattctaacaatgtcattactcagtcgatatcagcccttctcattatccaccacctagtcatccataaaggtcatccgtaaatcatccacaaagcctgcccgccgcacattcggtgccaaaacaccaaccaaaaaggaattttttagcaaaaagcctgtaggattcaccccaaattccagtgtcatatgctaacttgctcccatatctacttgataatgtaatgggagccataaccc

SEQ ID NO: 262004 - DNA, 349 bp, Glycine max
gaagaaattaggtcaggtcagaccaggctaggctttatgtaaataggcctatattgttttataaaacaaagacctaagcttgacctattatctattagaggctgttttctttgtctagcctaacctttttaaaagtctagtatgacctattagcttatttaaaagctcaatttatattctttccaaagtaaaactcacaccacatattaggttttcagcaaataagaaactaacaatcaacaacatatttgcatatttgatccattgatcccgtctttcaattggataaaattatctatgcatacatgctatgctcctttttagtattttgatccttcatctattaaat

SEQ ID NO: 262005 - DNA, 356 bp, Glycine max
gactaaatgtgcataataccgcaaaaattatttgtggtatgtatgatatacagtcgctaaattcatttcttcttcatccgcttccttaggtaggccttcggtctctcaatgtaggaatatgccccaaattgaatatactcagcatagaagccatgtttatggtctcactttagttgataggatggggtgttctgtccgaggcatcacttaatagtcctctcttgacatctttggatgcttccttttgcaggtgatggttcttttattattatctctggcatgctgcttgtatggagactgatgtctctattttcttttttatgacatacaaccaactcactgatgaatgcttgtct

SEQ ID NO: 262006 - DNA, 383 bp, Glycine max
tagcttcaagaaaaagatggtctcagcatattctttatttccagaacggaattctattcatagacctcctatctttaatggagagggttaccactactggaaaacccgaaagcaaatgtttatcgacgcaatagatctaaatatctgggaagccataaaaatagggccttatatacccaccacagtagaaagagtttcaatatatggtatttcatcaagcgaaagcataaccatacaaaatccttgagatatatggtctgaagaggatcgataactacttctctacaactctagaaccaaaacatatttcactctgcctctgaatggatgaactattcagggtttcacattgcaaaactgcacggatatgtgcgacactcttc

SEQ ID NO: 262007 - DNA, 325 bp, Glycine max
aaaaggaggctagaggaagggtgatcgggagtcaagaacatccccgattgctagccaaggccaaagaaatggcggacacctactccgcccccgaggagatccatggacttctcagctattgtcagcatatgatagacataatggcccatataattagaaaccgctaggaaatttgtattgtcactcagatcttgactagttataaaccttctgaataaaatgagtttatcccaacattttactccaaatattagggtgaatcaaatcactcccgcatttatctctgcatgcattatttttctttactactgtccaacctaccctt

SEQ ID NO: 262008 - DNA, 397 bp, Glycine max
  unsure (1)..(397): unsure at all n locations
agcttntctncctctttttctcacgttgctatttttttcttctttctcaccattgaagctccatcaaagctccaacctttgcacaccatatttgctccaaatcgcgaaaggaagccatttttggagtcgtgaagcgcacctctccattgtgggacttcacatttcaggtgtgggtagacttcttctcacataaatattcgtggatattgggttttgggagttatgatgggtagttttattaggtctatgcctcatgatagttatttgtgaagaaatttgatgaaagcatgttaaacttgtcatgtgtggtatgagtcaagcttacccattctgttttaaggttattatgatgatgcttgtgatgctttgatgctgaaatggctgatggaaaactgat

SEQ ID NO: 262009 - DNA, 359 bp, Glycine max
  unsure (1)..(359): unsure at all n locations
acgaggtttactacctctcttacagacgnacttatactattgaagagaacccataaatgggagagtgtagagcaatgtatacgagtttgatacacagaagagaagacgactactccgactagcacgcatggaatattcctaagacccaaaacttgtgaagaatcataacaatgcgaaaggaggcgatgagaagaatacccactgttaattgaaatggaaacttagctaattaacagcgggactacgcttaaccataatggaggagctaaatcttaggcaacctgtgatcgaacaccctaaaaacgtggtgattgttaatgcatctggaccctaaaacatataacagttttaaaaacaaa

SEQ ID NO: 262010 - DNA, 452 bp, Glycine max
  unsure (1)..(452): unsure at all n locations
gcttatgacatgctgttgggaatttggcttggtgtggacaataatggaatgacttgtttctttagttgtgcacttctacgggatgaaaacattcagtctttttcgtgggctctaaaggcaagaaccttatgatattgtaacttgataatcttgtatttgatttctcaattggctgctatctaatgtaggctttaattactatgctgaacctactatttgctagcttttgataaagtttngcaaaaataaaatctgatctatttttntatatgtataaatatcaattagtgagaacatataataaatataagggttttattaacatgtgaacacaagttaaggtatcacatgctgtttggattttcaaggtaaggaccttaacatgtgccctgataactgctgtatacgaaaccttattattaaagcagcaaaaaatgtagttttcttttcaa

SEQ ID NO: 262011 - DNA, 391 bp, Glycine max
  unsure (1)..(391): unsure at all n locations
tgatgccccatagagtctctcggaacttttttcaaccccatttttcttgtcaggctctctntttttctcgctctaacgcttcggccatgggcatgttgacatcccttagctcgtcatactctttcctgaccctggcggctgccatcttgagcttttctttgaccactctcgttctttccaattttgctttcaaggcttgctcttcctcgctcttcgcagagacttcagcttcttccccacttgaaatctttagcttcaggagccaagctatcccttgcatccaaacctttaaccatttatgatagtcgccgataacaccggtgatgcttcctctaagctccttatcttttctttccatttcattccacgccttttggattctctaaagcat

SEQ ID NO: 262012 - DNA, 358 bp, Glycine max
acatactgacttgctttttatctgacattaccacagaatctgccttcttctatttcagatgtgaatgccctacaacacctttgcaaggattttcttcatcgcctcttaagtgcagatgcccaaacctttgatgccatattctgacttcatcttctatggaggataaacatgtggaggagcagctggtttcctggggtggccataagtaacaattcgccctttgacctgctgccctttattataactccactcttctcaattgacaccaagcattctgactttggaagctacattgaatccttcaaccacagctgactgatgcagataagtttgcatcactcccttaaccgcagtactt

SEQ ID NO: 262013 - DNA, 463 bp, Glycine max
agctttaatggagatattccacaatatatatgtgtcaattgaggcgtaacatacaaattcaaacatattttatcaatgagcataccttctataaccaagccatagtacatcatgaacaaaaagttgttccatggggaactggttatttgttcaaggatcacctaataacaggatatttcattcatgagagcattagttataaatcttgaccagagccaaagaaattacagaacacaatacaaaatactctccctataagtgaaagagccagaggacagaccaacagacaacaacatcaaaagcttacagtaccttcttagcaacagtgtcattgcctttctcccccttaaaatatttatccatcaatttgtggagaaaatgtccaaagggcccagagtttgcgaaaccatagagctgaaatcaatttgattgcaaactgctcagactaaaaagattcactaca

SEQ ID NO: 262014 - DNA, 457 bp, Glycine max
acctgcggcatgcaagcttctgcatcagcattaacactcttcaccctctctggtttatgcttttgtgctgcattatgtgcttcctcgttataaatctcagctttattagaggttgcactagaacgatcagcaccaatctgtgcttcttcctcgtctaccagctcaatatctttcctttcaacttttgttttgtaaattacagtgtagtttacaaaagcaaaggtcaaatgaaagatattgagctggtagaggaggaacaggcacggattggtgctgatccttctagtgagacctccaataaatttgagaattataaggaggaagcacagaatgcaacatagaagcataaaccaaagaaggtagagagtgtcaatgcagatgcagaagcctttggtgatcactggaaaattctgattggtctatgcattctgaagctgaaccactagaacatacaaag

SEQ ID NO: 262015 - DNA, 452 bp, Glycine max
  unsure (1)..(452): unsure at all n locations
ttaagcacctgagctgcaacttgcacccactctccagcgagcaatgttgcttctccacaacaacagtcttctggaggaatcttctggagggcccaaatgggcctggttgctatttgcacccctatttttactaaatacaccccctgccttgtttttggtgattcttttttcgtaaaggtacggaaacttatgaatttcgtaacgatacttgttttctttccgtaatgatacggaaccttgcggattacataatcatcctctttttgacttacggaatgttacggaacctcactaattgtgcaacgatgctttcttttgatttccggtgtgtcacggaaccttacggattgtgcaccaatattntattgtgattccggccggtacggaatattcaattggctaatgagggtgcagcacttataatgacaaacacaagtgatgccaccaacaca

SEQ ID NO: 262016 - DNA, 395 bp, Glycine max
agcttctcgaacgtgatcaatacattcattgacatatattgaaggatgaagttgtggcgcgagattcgttctggtgtcacccacatgcagtaaagttatgcaatgcatgtcatctggtgttttctatagacagtacctataaaacaaacaggtacagactcccactacttgactttgttggagtgacaccaacggcgatgacattctctgctgggtttgcatatctggaggctgagcgtgttaataatattgtatgggctttggaacgatttcgaggcctatttttaagaaacgatcgcctccctgttgtattgtcactgacagagacctagcactgatgaatgcagtgaaaactatgtttcctgagtgtacaaatttgttgtgcacgtttcata

SEQ ID NO: 262017 - DNA, 464 bp, Glycine max
  unsure (1)..(464): unsure at all n locations
agcttcagatattgcaaattntctttggccagtctctagaggcataatgatgcttttgaagtccgttgattcatcccaaggatgatcaccattacggncacatcatcatggtacttcctcctcctcccatccggaacattcatcaactcttccatgctgaagcctgcaagagaatcacttgtgtaaccaaccataatacaagataaatttatattcatgcaaggaaaattagatttagtatgagaacttaaaaaatgacctgcagaatcagctgctcttgcaactagttgctcaataagaaatattgctggatcaccaaaagggtttctcaagatataagactctacaagctgtactgcttcatcattgctgaagaagtcaaataagccatcactcccaactataacaaattgatcagaatctgagattntgtgcacattcaatgatggatcaagaaaaacata

SEQ ID NO: 262018 - DNA, 269 bp, Glycine max
atatcctaacccaaacttcccgtggctttctctggtgcttaccaaataggctctgctgccagtggtctagccccaacccattatgggctcgtggccggagcccaacatcattcgcgcgaccttaattttcccattgataagcaaggctgccagacagggaatctttcaggcagtgcttactgctaagagattggaagctgttgcaacgacttctccgagattcccttatggttataggaggggacgtaccaaacctcatttcctccgat

SEQ ID NO: 262019 - DNA, 430 bp, Glycine max
  unsure (1)..(430): unsure at all n locations
agcttataagaacataattacctaaatcattgttctttatgcatatgaattangaagcatcaacaagaatcaagccaaggctattgtgcaagcaatcaatggggcaaaacacaccaaaagattatgatgatggatggctcatattctcacaaaggtaaacttatcactttcaaaactatcatgacatgtaaaggaaaaacaaggatttcaaatcacaaaatgtctagagactntttatttcagaacaattacccatttcttgaacatatcctataattcaaagaaaaatatgcaaagttgtacatgcaaatagaattgacctataatattaaactagaaacccaacaaaactaacataactaacataattaacacaaacaaaactaacaaaactagcataaccaaaaccaaagaacacttcccctccata

SEQ ID NO: 262020 - DNA, 351 bp, Glycine max
caagcttcctcgtggcttctttgtaaagcattctcattaggcttttttgagaagatagatacttatctacccacactcttctattaatctaagtaacctccttgaagataaataccgctaagaataacgccataaataattaaacctcaaacataatcactaatcatatatagatatatatatcccggggtaacaggctgaggatgcaacacaaatttacggccaagattggtggagggaatctcattagttaggccattggcaatgatcctcctatcaaattgccatggccttcttaaaagaatatgtcctgcctccatgggaaccatatcacaattaactctatcctta

SEQ ID NO: 262021 - DNA, 397 bp, Glycine max
  unsure (1)..(397): unsure at all n locations
tcccactcgtaagactctacttaaagatagnctttccaagagatctctctcgacaacttcctcaaaagacctatctagtctacctatccttttcacatgactgaaaaccatgtaatctagtcttcttaccggtccctcttgcatacttttgtgttcgtgtccaaactaccctaaccaatattttgtcatatcttcctccttcgatgttacaccgattttttctcaaatataaatattttgtatcgtatcctgtcttggttggtcacacatcccatacctcctaacatgtgcaatattgctactctcaattcttctcatgtagattctttagagccccacattcactgctgtcttgagttaagatgaacatataacacttcaataaaacttgtcttta

SEQ ID NO: 262022 - DNA, 377 bp, Glycine max
  unsure (1)..(377): unsure at all n locations
aatccaacgctcaaatacactagggatcgagtaccaaatcattggtatcgatggcgccatttcgaaatcaattggaacattgtaaattcaattgagaactttntgaaaacaatcttgctactggtaatcgattacaataaactggtaatcaattaccagagagtacaaactctctggtaaaaggtgttgtgagaaattcatgtgctattcagagttttgaaaaaaaatttaatacttatcttgatcgagtctctccttgagtctagaaacatgaattttgaacttgattcttgattcttgaattcaaatttcccttaattcttgaaggggtctcgactcaatctcgctctcattcttctgggtgtttgtcatcatct

SEQ ID NO: 262023 - DNA, 385 bp, Glycine max
gacccgacttaaacaccgggccgcaaccttaattcgatgatgcattgttgttcccctatgcctccctatgagatgatcttccgcgcaaactgggggagtggagccacctcttaataaaatctggcttcacagactctgttccaaggctcacactggcacaacttcatacttccctcctattacgagccttataaaaaatggaaagaactgtctaaactgtgggggggcacggccatattttttaattctccagtctcagcagctcttccactgataggctaaaccgaaaatcctcctaaggtggggccggaacgggaaaatttctaaatacctttagggctcccactttatggacctgacaggaaaaaacagcctttccccctta

SEQ ID NO: 262024 - DNA, 385 bp, Glycine max
agcacctgggctgcagcttgcggagactggaagacaacgttcaaatatatattgacggtctttgacttattagaaaccaaatgttaccgaatatttaaccgatacattattatttaactaataatagcgattcacaggcaaagaatttaaatattagagattttttatgaagaaaaaaattgtcaaaagatgaaaaagtccaatataaatcatggattaaaaacataattttattttcttaaaaaagtcattttcctatccaaaagtgtaaattcttcatgtatttggtttgaccgactttttagtgccaattgcggatggaagggagaaagacccatgacatgttgtcttcaattgaaagaatacctttaaaataattaaaaaa

SEQ ID NO: 262025 - DNA, 108 bp, Glycine max
atggaaggcaagtctacttgctgcttcctcaaatatagacgcttgttggcataggaagtgggtgggacaaccttggatacctcctttaaaggtaaagtttgcttggat

SEQ ID NO: 262026 - DNA, 392 bp, Glycine max
ataatctttcatgctcaatttgttaagccactatcatcagcatgtcctcttcacacccattattataaaatgatttaattattcatttaattcttatagattctaaaattatcttttttaattcctatagttaataaataaatttttttagttcttaaaatttaataaataaattttttaatctttgaaatttataattaactccgttagctaaaatataaactttaagaattaaaaaattatatttattaactataaagactaaaaaaaattaaaaattataaagactaaataaataattaaacattataaaatataaacagctaactgacactgtattagcagaaataatgttcactagctagctagtattgagggttacagacatttgc

SEQ ID NO: 262027 - DNA, 345 bp, Glycine max
gctgcagcttaacccactataattctcacacaagactttataaatcttaatggctcacagaacaaggggaaatgatatgttaccaacaagtgaaggtgcctctctccattgtgacatataacgatgaagttaattgtgatataattcccatgaaggcagggcttattctcttatgaaggccatgacaactttgataagaagatcatttacaatggcctaactaatgagaataccctcacccatcttggcactaaatttgtgttgcatcctcaaacaccttcacaggtggccaaggatcaactaactatgaaagataagagggatgaggaacaaaaacctcaaaac

SEQ ID NO: 262028 - DNA, 330 bp, Glycine max
gacccagagcactgagctgcagcttccgatcctaggatttctggtacccccatgacatggtcctatcttttcttcaaacaagaatccttggctgccaggattactctgctgcaactagaccctcaaagcgacacaaagcacacagacaggtgctcatgttggggggcaattggaaaaaactaaaaaacgtcacgctcttgagaacgccccaagaaaaaggctggcgattgagacaacttccaccacttaattcaccccagtccatatttcacttaactaaacacccgaaaacaataaccccatcagaataatgagggcgcctctatacag

SEQ ID NO: 262029 - DNA, 316 bp, Glycine max
  unsure (1)..(316): unsure at all n locations
agcttctccggtcatgctgagaattcctctatcttacacccgngcagcctaaggcacccacccagagggaagcttcccaagtttcaactccgaacgcgactcgaccaaccagttatttcaacactaccaggaacggccctcccaagccgtttcctgagttcaccccactcccaaagacgttcgaagatcttctaccatccctcatccccaatcatttggccctggatacctcccagaagggtacttctaaccccttttccctaagtggtatgaccctattgcaacttgcaagaaccattggggtgccccggggcat

SEQ ID NO: 262030 - DNA, 188 bp, Glycine max
ggaccttaagcacgcggctgcaactcaaaataaaaatctttagaattccacgcataattacgaacactggaaagacagatttggaacgaaattactcattttaaacaaaatactccgaaggatgctctatttttatacatgtcttacaggaaaattaaaacaccctttatatattcgtcacaaggaaa

SEQ ID NO: 262031 - DNA, 468 bp, Glycine max
  unsure (1)..(468): unsure at all n locations
gcttcttgagatgcctntcggtaatctcactatatgctttggtaaagtccacaatcttattagagacatcaacattgaagtactcaatgaatcttgaggaaagcacaacataaggaaattcatactccaccacgcgatgactcttcaacataatgtcttcaatcaatagtacccagctcatcttgatacctgatttcggaccataaactatctatagatcatcatctgttacctgagcatgattgctacacctcgatgttagaatgtaggtaatgaggtaaactagcattttgtcctatgcagtcagtccaccaactcctaagcgattcctcaaagcaaggtcaagaagcattcccttatagacctgcatcttgttgtacaatcangcatttcatcgaacttgtggnactcaccccatgtcagaccagctactttcttccacacaatagcatcaatgaccatatctac

SEQ ID NO: 262032 - DNA, 378 bp, Glycine max
  unsure (1)..(378): unsure at all n locations
agctttgtttttaacaaaaacaatggagagatcatatctaacatgatcactttgttaacatatgagtgatgtaatcgtgaatttgcttaatgtgaatgttctttaatttatataaaataatgtgattgttaatataaaaaaacaattgtggcttacatatgaatgatccatgggtcactatttacacgtttaataaattntttgcattttaaaaaacttcatacaagtcaacagaagagaataaattcagagacttgacaaagatnatttttgaccagtcgcacgtcttgggaaaatttcaaacaaataaacgctataccatattcacaactgttatacaagatatgcgggtattacattattattgtttaataataa

SEQ ID NO: 262033 - DNA, 264 bp, Glycine max
cctgaacatacgaacttgtaaatattactgggaattggtcactgcaaattttgagctgaattttctatgaaagttttacctctctagaaaaatttgaaaaaaaacagaaccagtgatttgggtaaaggaaaaataaataaatattcacgttggagaaaaaattttgccaggaaaatccataaaaagtgaaaggaaggtgcttgtgtttggcaaaattagtgtataataggccttttttaccacctttttttaaatttattaaaa

SEQ ID NO: 262034 - DNA, 458 bp, Glycine max
  unsure (1)..(458): unsure at all n locations
agctttaaaaaagcctaagcctatccttttattttaatangtcaggacaggccaaactttatgtaggccaggtcgtaggcccatgtaggccggcctatcctattcccacccctaattgtcagcggtatacttgggctttggtcaatcattaaagttacacttggaccttattgaaccttcattaatcataagtgctacacttgagcccttttgggctttgattaatcataaatgttacactttgtagtctttagggatatacttaggccttggtcagtcattggtgttatatttgggtcttactgggttttggtcagtcgttagtggtatacttggacattaataagccttagttaatcatcaagattacagtcgggccttattggaccttcatcaatcttaagtactacactttgggccttttgagccttgattataataagtgcaacacttgggcc

SEQ ID NO: 262035 - DNA, 429 bp, Glycine max
agcttttatgctactataggtgctgaaataatcttttctaaggaccttaaaatggaaattttcctagagttacttgaggacttagattatgattggctaataatgtcacagaagcaataatgctcttttcttaaaaactgggtctcatctaataataaaaatcttggtaaatgtgaaatttctttccatctccccagatgatgcataagctgagggatctcaatacttttatggactattgagtagggtggcaagctgctctcaccatgctgtggactctgtacaatgaaattgtctttctgaaccaaacttgaaatcaaattcaaatttgtagcatggaaagtgtatacttgtaattgtgacagtcatcacatggaactttactctggctcaacaagagtttgtgaaatggccactgttgaatatgat

SEQ ID NO: 262036 - DNA, 367 bp, Glycine max
agcttcaaaggatcttacatcatgtggatcagagcttcaattaaataaaattaaattgaatttctagaagcccaatccaattaaattttagagggggaggcgagcatttggttactacaccttattgccacattatatggtcacacgttgtgcatgtccttcatgctttacatgcctcatgccacctaagcacacttagtggagaatcttggaattgatcttggattattgggctgaaccataactaaaattcactaatcataattagtgaaattttgtctccaaagtttgggtccacaaattcaatttcaaattcaagtgaaatttgaattgaaattcaaatctccctccaatttgtgtgacactt

SEQ ID NO: 262037 - DNA, 432 bp, Glycine max
  unsure (1)..(432): unsure at all n locations
agcttgagaggacaaccacatttcctactcccagtgtctcctctaaaaaattctttcttcctacacttatactgactgctcctttcacaaccaattaacacaaatgaatttcttcctctactaccagtatgtgtatcagacctcataatgattgcaactctcgtttcatgggcaaccgatcgagcccactgcaagacatcttctcgggtaccaaagacctacaacgcaaccccgacaatttattttttatacagaacatacattcaatcaaatgactcaaactaatgaacattattacctgagaaatattaaaagcatccgaacaatcaacatgtggttcattcacactatatctttgttcattntcataatccatatcaacttttcagacattatattgcatacgccattgatttcgccatctaacaaaca

SEQ ID NO: 262038 - DNA, 195 bp, Glycine max
agcttataccgataaccactctggtatttccgcccgtcagcgtgactcaaatgtgagtttgacagatcttgtgagcgcgaaagatgacgtaaatctccgcgtgtcaacgggcttgtcggccgcgattgacgaagggcgcaaaatacgacattagtctctgcgtgctattaggcttttcgtcttacagacagcaaa

SEQ ID NO: 262039 - DNA, 298 bp, Glycine max
  unsure (1)..(298): unsure at all n locations
tataacttcaatctagcacaagaacaaaagtttcagtgaaagcaataccttctttccggntataaccttgagttactaacctaaggtgtgttcatatcacctttcctcgttcatccaattaattttaatacccatcttgtgccaatgatgctcttgcttttaactttgggaacaagagtccagactttgttttaataaatatcgaacctcttcttcctaaaaagacaaagcatcatctatagaacttctttatgcctgtggtctattcaacataaagccatgagcaaatcttgatgag

SEQ ID NO: 262040 - DNA, 370 bp, Glycine max
  unsure (1)..(370): unsure at all n locations
agctntagggtgctattgactccagattgctgcatagaaggacagagatctgtatggtgatctgcagaagaacataaaccacatactcttgcaacaggtgtagatttctgaatcatggcaagctgagttactaggttgaccaaggcatcaagttttccttcaagctntttattttcagtagatgaagataaatttgtggccacctcatggactcctctaagaaaaatagcattatttcttgcactaaattgggtgggagtggaagccatcttcttaatcaaattcctagcctcagcagaggtcatatcaccaagagctccaccactggcagcatcaatcatactcctctccatgttgctaagtccctcat

SEQ ID NO: 262041 - DNA, 406 bp, Glycine max
gcttgaggtcttttttatatgtttcctcggtatgtatttgcaaaaggtttcatatgatgaggcaacaaaatctgctttttcaaatggaaagttttcttccggcatgaaaatagtttgcagatactacaaagtattttaaaccttggtgtgagttagactaatatagatacactatagtatttgatgatacactgcaagtgaaatggtcatccatttattgttctattaatgcactcacaatgtctttacatgattagctgaagatttttatatgatttgttcttctagactacgccttgtcactgttatatactcaaagatatctttgatactctttcaatccacttttaagacttgatgatcacttctttctcttcagaaggtaatgatgaggaggatcaccatg

SEQ ID NO: 262042 - DNA, 298 bp, Glycine max
attctaattcacttcataatccaaaatctctactaaaatatagatttatcagaatcacatttcatatactacaaataagccaatgctacgattgaatactttgataggtgatccacgtagaccatatttaagaagcaataaatcaagcgattattataggtctgaccacacttaattccctggtcttctcccactaatctctctgaccaccatttgtcactgtcggacaacaattctggcggcggtcttttattttttatctttcttcttcttctagatcccaccttcacccccatcg

SEQ ID NO: 262043 - DNA, 459 bp, Glycine max
agcttgagaacaccttgtctttattcacgcatgtctccatttcaaaccacaaaagcatcgagtcgacaatcaaatatctagaagtgcaagtatgccagcttgcaaaacaactcacaaagaagtccaataaaaattttgtgcctaacatggagcctaatcctaagcggtgcttacaaggagtttgagaaaggatagccctgttcatgatgggattgtataggatgtattggaggttgcaagtgatagggatgatgttgtatgtgagaatgaggggggaaagaataaagagaaaattaggagtattgaaaatgttgaaaaaaatgagagaaatgatgaaaaagataaaaaatagtctcaaggaaggtgttgatgaggtcttaagtcacaagaccaaaagtcaagtagtgagaaaaatagagaaatgtgtaagtagtgaccccaccaatgatgtgccctatc

SEQ ID NO: 262044 - DNA, 463 bp, Glycine max
  unsure (1)..(463): unsure at all n locations
ctctagatcgactgccgcatgcaagctnataagcttagaaatcaatatatcattatattcaaaacattaggcgagtatggaatgagcgaacgctctatcttgatatattctatctcgaatcttgattctaggaattaaaattgtcatcattcaaaacggggagattgtataagtaaaaactttgatgttttgatgacgccaaaagatcatgcgcttctcaagtctaattcaagaggatcatacgcttatcaagtttaatttcaagacaagaatccaagaaattcaagatatatgatcaagataatctctagagacttangacgggaattgcaagttgaaaccacaagaggtttggccaatgaaattaagctaaaatgtttctttcaagagatntactctctgatgtaatcgattaccagtggccgaaatacttcctgagatgcttcaataattttttgaatac

SEQ ID NO: 262045 - DNA, 428 bp, Glycine max
  unsure (1)..(428): unsure at all n locations
agctttcattgatgttatgaaagatgtcttgaagttattgctggtttctccctagctgacttgtatcctattaaagggctccaagttttgacagggttgagatccaaagttgagaagttacatcaagaagtcgataggatccttgagaaaattgtgagagaccacagggacacaagttcagaaacaaaggaaacccttgaaaaaactggagaggatctagttgatgtgctactaaagcttcggaggcagaacaaccttgagcatcctctatctgacaacgttatcaaagcaaccattttggttagattttcgcaattacatatcacataatttcctgaatagctacaaatagatattatcagagatcaattaactcctattgccttagatgctatacattttctctgtanagactgttacgtgatact

SEQ ID NO: 262046 - DNA, 355 bp, Glycine max
tcttcttatcctgataaactcttctgcctactctgagcagatctcatcctctcttgaatcaacttaaccttcttagtggtttgttgtaccacttcagatcctaaggtgaggttctctccaagttctagccagcacaagggtggtctacacccttctccataccgaatcttataaggagccatgccattgggagaatgaaaactattgttatatgtgaactctatcaacgacaaaagctcttccaatttctttttggttaaaacatagctctaaaaagtctccatgactgaatggtccgtcagctaacctcacttgaggggatagctgaattaactaccatggtccatgcttgtta

SEQ ID NO: 262047 - DNA, 447 bp, Glycine max
  unsure (1)..(447): unsure at all n locations
agcttatccagaaaaggactactactattagttttgttcaagtctctcatcataacattttagtaatagtgatatttacaatttaaataagcaaaaaaacatctgttgggaccatttaatgaacaaacttaggtaaattgaaaactttcacattgtttgataaaaataaaatttaatgatcaactcacaatttattgttaatataaattttaaaattattattataaaaattaataaatttattatacataaagaattataattagatgataatataaaattttgtataatgttaatatataattttttttctcataaaaataaatgaaacacagtttgaatctagaaaaaatacatgttntaattatactttcaaagagtgtctttatgataataattgataattgattaagtcgcactctttaaataatattataattagattat

SEQ ID NO: 262048 - DNA, 280 bp, Glycine max
  unsure (1)..(280): unsure at all n locations
ctcttctcctttgccttccgctgcatctccatggtgaaaaatcaccattgaaggacctcattgaagctcatagatccagcctccatataagccccacaagcaagctttcatcattctncttcatgtcctacttcaccaacatttctagcacccttcttcacccaagagccatcatgctcctttatataaccaaatgatgctatgactgaagcacctataagaaatgatctcttgattggaacattacgttcaaaatcaagacggatgttgaagtgttgat

SEQ ID NO: 262049 - DNA, 197 bp, Glycine max
cggacaaccaggcgggacgagcaaaacaacacgccgcaaacggcaagcgccccgaccaagcaaaaggcaaagcaaaaggcgccaaccacaacgagccacaagcaaacaaactcagcgccgagaaaacacaaaacaacgcggaaagagagcccaaacgaccaaaacccagggaaaagccaaaacaaaacccccaccaa

SEQ ID NO: 262050 - DNA, 187 bp, Glycine max
cgccaaagcagagaaatgctgacccccccagaacaccgcagacgaaccaccgccagcaccggggaccccgacaccgccacaggacagccgcggcaacggacccaggcagtcccaacaagccaaaagcagcgccacggagcgaaagaaccggaggagacggacaagcacaccccagaacctagcaaag

SEQ ID NO: 262051 - DNA, 408 bp, Glycine max
  unsure (1)..(408): unsure at all n locations
gcagcttgtgcatctacctacagcngggtgtgaggttgattatttcttgacccaaaanaagatgtattggagcttttctggaccattgtgcgccacctgaattgtcatgcttcangcccatagacctacgcatgagggtgtgtgttggatagccaccttagttgcaatcatccattgctcatcttaatccgggcctctttggattgcctgaattgcaacctacgcgggtggttgtatagctccaaatccacaagagatgtggttanatagagtcataacgctgtctatttcactctaaagctgatttgtgaggtgagtaggcttgagcccaatacaacatcttctttgttgggattgcctcttgtatgtatatgtccttgaacaggcccttgttcgcatgttatggaa

SEQ ID NO: 262052 - DNA, 354 bp, Glycine max
  unsure (1)..(354): unsure at all n locations
caagcaccgcngctgcagcttaccttctgggctctcaagngtgtgttattatcatgctcatnnncacnccactcaagaggccttcggatcattctttcctttcaatggaggaatgttgagnttaataccatcaatctggttctgtctaggaacaccatcattccctcttctcctcctttcttcttcattatgatctctattctccatttgatccaacctcctcgggagcgcaacatcccgttgtttcattaacctctccatatgttgcatcaaagcttgcattggaactgcgacaccccacttcatcattatgatcagacctgacatctctaacaacaaatcaacgtacaagac

SEQ ID NO: 262053 - DNA, 475 bp, Glycine max
  unsure (1)..(475): unsure at all n locations
ctctctatatcatatttaagtccagtcttacccanganacaattatgagaagtcaacaaggcatctaagttcgctcttccacttgcgaactttgcaagtgtcttttcaagataatcaattttgcattgaagatactataaattctcacaatttgagctagaagaaatattacttgatttagattctcaaatggaatcctcaatagattcttctaaagtcactctttcttttctcanatcatggacttccttttgttaaatagtaaatttctcaatatgccatcaaactttggcttttagagttctgttcacacaggtaagtctctgtgtctctttatggaactctttgaatgcatctagtagattgtcattagttgtattacattcaaatattcacttatgttgcttgtggctcatccttatcaatatcagccatgagacatagattnngcttcttctcctcacttgaatcacta

SEQ ID NO: 262054 - DNA, 452 bp, Glycine max
  unsure (1)..(452): unsure at all n locations
cttcagataatggatggactagtacagctactgctgttaataacaactctaatgtagcttccaatcttggtggttctttgcctagtactgttagtctttggcatgctaggttaggtcatcctaatagtcatgtaatgaagctaatcttcaatcattgtaatatttccccatctaattagaaaatttcaaacttttgctcctcctgttgcatgggaaagtctcacagattaccatctcacacttttaccttctgttactctcctctggagcttaatttcacatatntgtggngacnctctcacttgacttcctatgctggntntaaatccttatgtatcctntattgatgcctntntcgngtacactttggatattcaagcttttaaaccaatgattgaacttttctgcnttcaagctttaaatcaatggttgactacancttaccactaaat

SEQ ID NO: 262055 - DNA, 469 bp, Glycine max
  unsure (1)..(469): unsure at all n locations
tcttggattagngggctaaaccatagctaaaattcactaatcataattagtgaaatnttggctccaaaattggctccacaaattcaaattcaagtgaaatttgaatagaaattcaaatttccctccaattttgtgtgacacttaagctataaatggaggccttgtgtgtgcagttnttcaacttgatcatttgagaattacacttcanagttcatacctcatttgaggcttgaaatttcgtgctccttctctccttctccctccactcatcnttctctaccttcaagctcttatccatggcttcctatggtggtgagcttgttcttgaactcatcttctctttaaagngacaatttcaatcatctnttcttcttctcattctgctgcatngatcttcaagaagaaaggactccattgtaaagaaaatcangggctacagctcacatagagtacatacatgccccccccc

SEQ ID NO: 262056 - DNA, 183 bp, Glycine max
acacgagcgccgaaaaaaacaaacccagccataaacgcagaaaaaaagacaccgaacccccccaagccgcggcgaaaaacagcccaaagaacaacaaacacaaacaaggcacccacccaccagagaaaaaaacacagaccaagaggcacgaaaaaccaaacaaagaagggggcacccaaaaag

SEQ ID NO: 262057 - DNA, 333 bp, Glycine max
  unsure (1)..(333): unsure at all n locations
gcataggcgnccattcctttcctttttcccaaaagacttctctgaaccttcttctaaaccaacacgccagatcaaatagccagttattaacaactatacttgctcacaggggaggataattacatagtgctttcgcaatgtaaataaaaacaggctgacataccctaccaaattaacattaaatatccattcaattacacaacttcttattaataccactacgacaaaagatcgtacaacgattttctcactacttcttttgactgccccggacatttgtcaaacactttcaagctccattaatgtgatcttcaacctcacctccacttcctt

SEQ ID NO: 262058 - DNA, 251 bp, Glycine max
cgcacaaccaacccatccatcattgtgggcacaaacttcacatagggcgactgtttgggtcgaatatggtgatgactctacaatgggttggtgcgtccgtgctaatggtggcgctaatgatagatctggccacaccctcgatatgaaatcatcgccctggtgctttctaaatcgacgcacatacaacttcaagggtgcatgtgattcgctacaaaataaggcactgcgacacacagagatatttgtctaac

SEQ ID NO: 262059 - DNA, 207 bp, Glycine max
tctctcactgcttctccttagtcttccgctgcatcttcatggcggaaaatcaccattgtaggagcacagtgaagctcatagatccagcctggtaaactcgagagtctactcaacagttactaaaaagagagttacacatgagcaactccacagataagtcattctaaactcgaagagtatgagcaacttagagttgatcccctggta

SEQ ID NO: 262060 - DNA, 287 bp, Glycine max
  unsure (1)..(287): unsure at all n locations
tccatagaaaagaggaggaactaagcataatgaagacatgggaagccacatncacttcaacatctaaatcaattggcactggcctatccttacttgaagagttatatatttgcttggaagatcttcttaatgtggcatcaacgcacaaagtgatttctaaccatcaaggtgagaaatgcatggaagaactgcttgatggttcagtgngaatcttggatatttgtggcattacaaggaacaccatgccacaagttaaggaaaatgttcaagcacttcattctgctctt

SEQ ID NO: 262061 - DNA, 316 bp, Glycine max
  unsure (1)..(316): unsure at all n locations
taagcataagggtatcatcacaaaacacgaaaagaggtctctttcttttctgccctaacatgatagngggcgtcaattcgatggagaacagtggtatcgatgaaattggattaaatggggagggagaaatgatgaaaaagatagcgtctttgaagacaagaagtgaagggtgggtgttgaagattaaacctgaagttgctcgacgggtaaagggccaggttgtatctcttcggcttcgtcttgttgctggggcgctttctggtggcgttgctgctccatggttgccgacattctgattctgacccctcacagattc

SEQ ID NO: 262062 - DNA, 255 bp, Glycine max
  unsure (1)..(255): unsure at all n locations
gaactaagcataatgaagacatgggaagccacatccacttcaacatctaaatcaagtggcactggcctatccttacttgaagattatatatttgcttggaagatcttcttaatgtggcatcaacgcanaaagtgatttctaaccatcaaggtgagaaatgcatggaagaattgcttgatggttcagtgcgaattctggatatttgtggcattacaatgaacaccatgccacangttaatgaaaatgctcatgcac

SEQ ID NO: 262063 - DNA, 207 bp, Glycine max
tgagaagagtacatcttaaagagaaatgacaagctaatgtcgtgattacggtcgcaacatcaagggttttagagtctttgcgaccccatatccccattgcaatgatactaccaccacaaccactatttaaaaccttgaggacaagagaattgcattggcatgttagaaaatgagaaggttacccgaaatttcattctgcacacacat

SEQ ID NO: 262064 - DNA, 305 bp, Glycine max
  unsure (1)..(305): unsure at all n locations
cgactgaataatataacgagcatatatagatcacatggtgcaagaggttgcagtaaccctcaactactaatgatcgtgtgagtgagaaagacagcaacgcttcaatggttatataagccacgtaacccaattntctcaattgagttgcataacagaaggatactctgcttttccaattttntgattgaccagtatctacttgacaatatgctnttgtaatcacgcacaatatcatgttaaagggaacataantangtatcatttgcatttttctttatcactgcaacattcgtgagaaatatata

SEQ ID NO: 262065 - DNA, 96 bp, Glycine max
gaacgacgccacagggattttttttttgttccacaatgagcccccgattgatcacggacccctccacagtgatgcggctccctggtggcgcgcgac

SEQ ID NO: 262066 - DNA, 204 bp, Glycine max
  unsure (1)..(204): unsure at all n locations
ctgcagcttcgtctaccgtgctccccncgcttctnantttatttatgtgagcgncncttccgccatccaggntagggttctaaccctattagctcggtctctatttgatcgcgtaatggcttacgaagacgacttgtcgttgttggtgctggaggttgaagacgaanggtcttccgcgggaagcaccttcttccttgcgtgtga

SEQ ID NO: 262067 - DNA, 284 bp, Glycine max
  unsure (1)..(284): unsure at all n locations
ctgaaaatccctatcctgagcatcttcacatgagggaacatggttcctcaccaactcaatcactggcgctgcacgtatagacaaatatgggacacacctcttgtaaaagtttgttaagtcattgaagcacctaatctcccttatactcggcggagtgtgccactcacaaatgattnttattctcttangatccgtggaaaccgcttgatcactatgtataatactaaggaaagtaatgcaataaaacatacattcttctggattttcatggttaatactcctac

SEQ ID NO: 262068 - DNA, 319 bp, Glycine max
actatcaagccaataagatattgtgtccgatgggtatggactatcaaaagattcatgcttgccagaatgattgcatactgtacacgcatgaattccaagaaatgtccaaatgtcatatgtgtggcgcaccactgtacaaagtgaaggatgatgaggactgcagctctaatgaaaactcacagaagggccctccagcgaacgtgctgtggtatcttcccatcattccaagggttaagcgtctttttgctaatggagatgacgcataagaccttacttggcatgcacatgggagaaactctaatggaatggtccgtcatct

SEQ ID NO: 262069 - DNA, 446 bp, Glycine max
  unsure (1)..(446): unsure at all n locations
agactaaccctataaggccaagaaaggaaacactngatgatattatagattcattagaagacatgcacattaatgagaaagggcacaaaggaaaaggaaatggaaatgaagaagactctcaaattgatgaatataaaacaaatatagatctttcaagagagtggagaacttcaagatatcatcctcttgataatatcatcggtgacatctcanaaaaggtaacaactagacactctctcanagatgcatgcaataatatggcttttgtttctttaattgaacctcaaaacttanatgaagccataattgatgaacattggatcattgctatgcaagaagaagttatatcaattaaaagacatcaagtttangaatttagtgatanacttaatgatcatctagttatacgaactaaatgggtatttagaaacanacttgatgaacat

SEQ ID NO: 262070 - DNA, 376 bp, Glycine max
  unsure (1)..(376): unsure at all n locations
cccccccccctactcacaacatttgtttttantnnncccccggtttatcttatccttnaaccacnaaccaaccaattaggcaacccatcagttttttttttatggataaagagaattgacaacttactaccaatttacataattactgctcaacgattaccctaatcaccataaattatctacaccatttgctaaaaggttggtacttgtatttttttttactaccaactttaattctaagaatcacttttaatacttaccttacacaataatacctcaattaagcacttttcattaatcattactttactggtgttacttgcttaaatcatcattcgttaatcaacattcaaactaaaatggtgtattcactgat

SEQ ID NO: 262071 - DNA, 328 bp, Glycine max
  unsure (1)..(328): unsure at all n locations
atgacagcaggcacctgtaacccgctagacacagnagncagnagcgaagaaccanggggcgaacgggggggannagcacggggtgaacgacggcaacgagcacggagaagacgatcccaacccacacgtagaacatcgcgacttatactggtgggcacagctttattttggtttgtcttgctgctagacaccctttttctgctgcagttattttcgtgtctattgacacctcttttacttacacatgtcattttaattcttttctatttgaaccacaatttatttcttcgctagcccctcttaatggtgaccatattcatgctgtact

SEQ ID NO: 262072 - DNA, 381 bp, Glycine max
  unsure (1)..(381): unsure at all n locations
acatttgaaagaatatcacattgtctgctccaccatgaaacccctagatgtccaagaggatcacatatttctgaagggctttcctcattcattagagggagtggcaaaggactggctgtattaccttgcttcaggtccatcacgagctgggatgaccttaagagagtattcttagaacaaatntttcgtgcttgcangaccacatccatcaggaaggatatctcatgtattagacaactcagtggagagagcctgtatgagtactgcgagagattaagaaactatgtgccagttgcccccaccatcagatttcagaacagcttcttctccatatttntatgaacgactcctaatatggagagaagtatgaagatgctgcag

SEQ ID NO: 262073 - DNA, 267 bp, Glycine max
  unsure (1)..(267): unsure at all n locations
taccctcggagcacaaaaaaaagaaagaaggacaattccaatcaaagagaacgcataaagaacagaaagaatatctccaatccaagaatgggagaaagaaagacaacacagaacaggatgaagaagacggaaagatagctcctgatcaaggatcgaaagacaacagaagaaatgtgcagaaaggtctttgaccagacaatatctgaacaatacagaattgtcaccgaatgaacaaaaagaacgaaaggagaccacgacctanaatgg

SEQ ID NO: 262074 - DNA, 203 bp, Glycine max
  unsure (1)..(203): unsure at all n locations
atttacacctacttccaaggcgtatntgttacttacatcacacacaactccttggntaaattcacatacatgtatantnaaagcaatttgggtgaccaaatattgcacatgtgcacctctcggtatttctaatacctatacatacacaaagcttatgatgaatcttgactatctacacaataaggtgctacattttatgctct

SEQ ID NO: 262075 - DNA, 248 bp, Glycine max
  unsure (1)..(248): unsure at all n locations
gggcgggaagagatgggggaaancgacattcccatncagataggcccncacacttgcaatgtggggtttcaagtaatggatataaatcccgcctatagctgcctcttgggaagacctcggattcatgccctgcgagtggtcccttcaacgctacaccagatattgaagtctgcagtgggtggacctttagtgatagtgtccgcggaagaggatatgttattgagcttgccctcctccgcaccgtacgt

SEQ ID NO: 262076 - DNA, 402 bp, Glycine max
  unsure (1)..(402): unsure at all n locations
ctacgcgcaattcctgttcttagggacctcatctanaaccatatatcagagggtatgttcttattagaaacaccagtacatgcgaataaagtggaggaaataaaaaggatacttgcgcttaataattgcatcgcagctgatagataagggtatgagtgagggtcttgctcttgtttggaataataaggtcaactgtcaaattatgaattattctatgaagtttatcaatgtcatggttgtgatgataataataataatcgaatatctactagtttgtatgggtttcctgatagccattgaaggaaagaattcttggatatgctaagaaatctctctttctatcatctctgtgtcggcgtgtaattgcaatcttaatgacattctttccccatatgataaatg

SEQ ID NO: 262077 - DNA, 378 bp, Glycine max
  unsure (1)..(378): unsure at all n locations
tcacgtcccgtaaagcccaatctttctctttctcactcctctttcacttccaccgatcaagaatcagaataacttcatcatatggcagagccatcaaagaagagaaagggatcatcctccaccgctaccgctatctgccatcgncgtcacggcccattcggagcacccacagcacctatttctccttctttgtcatctacaagatcatcaacactgttntcatccgatgatcaacgtctgcggtacctttctcaattttcttctagaataatcttagaccctaagtacctagacgtacagttctctaatgatgaaacgctcgattgctatcaagtgttccaaactctggtcttgtgattcatgtcattaaatagcata

SEQ ID NO: 262078 - DNA, 111 bp, Glycine max
tttttattattatttttctttttcttaaataaactttcttatttttttttatcaatctttaattacttctttttaattttttttattttttattttgttttttatttgatt

SEQ ID NO: 262079 - DNA, 188 bp, Glycine max
tagccctatcttctaaatctatccgatgcatacatgtggatggactaataccagcaatgtctgccacggtccagcctatatccttcttatgcttcttgagaactgataacagcttctcctcttgctcatcagcaagggaggcagatataattactggaaaactcttgttatcatccaagtaagcatat

SEQ ID NO: 262080 - DNA, 285 bp, Glycine max
  unsure (1)..(285): unsure at all n locations
atgcacggtgaaagccttggatgaaagaggtatgcctatgttgttgtggatgatttctccagatttacctgggtcaactttatcagagagaaatcagaaacctttgaagtattcaaagagttgagtctaagactccaaagagaanaagactgtgtcatcaagagaatcatgagtgaccatggcagagaatctgaanacagcacgttcactcgaatctgcacatctgaaggcatcactcatgagttctctgcagccattacaccaccacagaatgggatagttgag

SEQ ID NO: 262081 - DNA, 196 bp, Glycine max
  unsure (1)..(196): unsure at all n locations
cacttcattcatgttgtcttagagtcatgttctgtcatgataattgtcacattatgttctaagcttgagctcaattatgatcttgttgattgaattctagatacatttgttcttgtattcttgcaattcttagcctatcatttgaagtntgagtctaattcatgtatgtcgtttagttcataacatgttctaaatc

SEQ ID NO: 262082 - DNA, 200 bp, Glycine max
taagcgcaacactactgggctaagcatgaggaataatctacaagaagatgagttgttcaggtttgctaagtgcaacgcttcagttcatccgctaagggagaaaggcacgctaagctcaaaatcactaacatgcgctaagcggcccatacatgcactaagcgcacgagcacgaacaatgccacctatttaagcatgaaatc

SEQ ID NO: 262083 - DNA, 415 bp, Glycine max
  unsure (1)..(415): unsure at all n locations
tcaaatgacantgtntctatatttcctttcttgatctctcttatgtntttgggtttacttgtcctatgagcaagaccacataanagtttccttccgtaaggatcccttcatagatgagggccaaatatcaagaatttaaaataatacacaataaatacaggacatgttattgtaggtctttcctaatgtcatcgcaaaccattggtaaaaggtgagattaaacatgtccatcttgcaactgcaattaaggccatagaaagatatcattatagtgtcacatttgattntcaactgtggttcctcaatatttctttcttcttatggaaagatgtcaaaatactaataacatcaattaagaactcataatgggttccactaaattcttcaagcctttcaaagaaaagatcacaatacc

SEQ ID NO: 262084 - DNA, 66 bp, Glycine max
ggggacagacacaaacgcggcgcccaaacaaaagcaacacccaacaccagcgaaaaccccccagaa

SEQ ID NO: 262085 - DNA, 298 bp, Glycine max
  unsure (1)..(298): unsure at all n locations
gagcgaacacgtnntcatttagtgcttctttcctccatttaactcatttacgtgagattaattaataaacatatatttattaggaatttatgtcatttttaaattatattcgataaaattagttcataactagctaacaaaaattatagttataatttactgttatatagaagctaaaacgctacaagattataagctagttcatataactacttctttatctaattaatcacggggtgntagcaatctttttaagagtgtcatgggaacattaggataattaattattgtagtgatt

SEQ ID NO: 262086 - DNA, 101 bp, Glycine max
cggcgcacgagacaggccaaaaatttttttttatccacggcctggagaaattaaaattactatatgtacttgagacagccgattgaacaaaatcataatat

SEQ ID NO: 262087 - DNA, 297 bp, Glycine max
  unsure (1)..(297): unsure at all n locations
gagcagcagctgctatctctaacaggacttgtattttactgttttgaccccacccagnaaggacattaaaggcggtgcccttatcaatggcttcccaaaactttcactcaagaagacatcatgactacatctcgccatatatagtagtcgagagtttctatccatctagctgcagtcgataatagacattcagtgcatcttctgtcatgctctattattttcctgataacatggacccaaccgctagtattaagtcacttctaagtactgaatcatgcttaataaacctttttctta

SEQ ID NO: 262088 - DNA, 336 bp, Glycine max
  unsure (1)..(336): unsure at all n locations
actgttgagacanattaagacagctctctctagaccaataatactaataagtttatggcgttagtgagagagtgctcccaaacagctaataagtctcttgctgggacattaatgagtacactaaccaccatgaagtttgatagttcgcgtactatgcatgaacatgtcattgagattacaaatattatagcaagacttaagaccttgggaatggctatgaatgagaactntcttattaagtntattctaaactcattaccgactgagtatggcccattccaaatgagctataataccatgaaaaataaatggaatgtgcatgatatacacaatatg

SEQ ID NO: 262089 - DNA, 327 bp, Glycine max
cccccccccccactcccgttcgtccccccttaccgcgctatgtctatacccattaccataaataagattcgagaatgttttttttgggcagcaggaataagccctaatataaacccccaccttgaagagtattttaattataaaaaaaactttctcggaacaatatgttctctatcaatcaaaggcgactacctgactcacatctgtctaaatggtaaaaactgtcgcagcctagatactcactctgatgcacttcttgagcaacttacttctcatcacaagaacgctaataatgcctcgctacaaagacacctgctctgctttcaa

SEQ ID NO: 262090 - DNA, 286 bp, Glycine max
  unsure (1)..(286): unsure at all n locations
tatctctatagatcctgaaataataagtgatcaggacaacaaagcaactaaaggcatgggtaaatatagcaatcaattacattatctcacaagcatcaacaaatcaaaaaatatgaacattgacaatctaagggcctntntagctacgaaaacattctctgttcttagatataattacaaacatgccacctgtgttttactgtgtttctagttctcaatagtttatacatgagatagtgaagacaacatctaagaagatacatcttacgtctcatattatatatta

SEQ ID NO: 262091 - DNA, 134 bp, Glycine max
tttcgttcttgagcttttttttctaacccgtctatctatttctctacacggagagaaaaattggtccctctaaacgcgaaatccaggacggagtcgtgatctgtgttggactcacccagcctattactcaatgc

SEQ ID NO: 262092 - DNA, 371 bp, Glycine max
cttaaccactttcctttttgacaaaaattcgagagaggacaagttgtataaaatgttttcattaaaaagtcctctcataacactctactcatgcaagtttatgtggatgacataattttttggttgcactaacaaatctctttgtcaagattttgtgcacaagatataaggagagtttgaaatctcaatgatgggaaagctaaattacttttcttggtctttaagtgaaacaaatggaccgtggaacatttcttcatcaagcaaatactgcaagtaacctctcaagaagtttgagatggaaaaaaaaaagcaaggaggctgccactcctatggttactagttgttaccttagtgtggatgaaaaaggaaag

SEQ ID NO: 262093 - DNA, 307 bp, Glycine max
  unsure (1)..(307): unsure at all n locations
cgcctaacaacctcattgactcacatctttatagctgctttttctcactcgtttgagcaccgagagaagtaaattctcatgctgagaacagtcaaaacatttcagctggaacatctagaaaattataagcatttaagcatggccaggctatagattcccaatctacggatgtcacctaacatgagtgaactgaaattacagtagcgcgctgcttatagaatttcgaagccgctaaagggggaagcataacttggccagaaattgttctctaccctaatcaaaagaacgcattcaagcggantctcac

SEQ ID NO: 262094 - DNA, 417 bp, Glycine max
gcagcatgcaagccccaaaagaccaaccagaaagaaaactccttatgtgttatataatggaagaaaacggaacatttcacatctccatgtgtttggacggaaacgcttcgcgctaaacaatgacaaacgtaatttaggaacagtcgacgctcaatccgatgaaggtatatctcttggctattcattgcaaaggaaagcacttagaattcataacaaaagaactatgatcatcgaagaacccactcatgtcgcctttgaggactctaacgcaatttttccaagacaagatgtactacatgatattccaaaatcattagaagaaatgcatattcatggggaagatcacaaaggcaaacgagatggaaataatgaatatttctacatcgatgaaataaaaactgatgctgatcttccaag

SEQ ID NO: 262095 - DNA, 456 bp, Glycine max
tactaagcttcaccaccagagagtgccttggataagaagcttagagtgttatcttttatggacgaagagaatgagagatagaggggggcgtgggaattgaaggagattagggagagaagttgaactttgaagtgtgtctcacaagtttctcattcatcaaagttatgacaagtgttacacatgtttctatttatagcctagcacatgggaagcttccttaagaagcaaggaaggtagcttccttgggaagctagaggaagaaagcttccttgagaagctagaggggggctactcacacccctccaatagctaaacttacccctatgccaaaatacatgaaaatacaatgggatgctttcttgataagcaaggaaggtagcttccttgagaagctagagggaggctactcacacccctcaacttctaagctcacctcatgcaaaatcctgaaaatcc

SEQ ID NO: 262096 - DNA, 257 bp, Glycine max
cataaggagctcatcctaataatcaatgttcttcaagggattgtattaatacacacgcctcttggtgaattcaccatgctactaaacatttggggaccaaaaatgacatgcctcattggtttctatcctatcattcaacttccatgattttgactactaccataggtgcacttaatgccttttaagtttgctaccaagcgatgcaaatcagctatttctttgtgctaaatggttcataaaggaattttttgaaaggt

SEQ ID NO: 262097 - DNA, 468 bp, Glycine max
  unsure (1)..(468): unsure at all n locations
tgctagagaagcttctatggaggctatatacttgagctctattgaggtccttcaatggtgatatcaaccatggagatgcagcagaagataaaggagaagaggtgagaggaggctccatccactacggaataagccatggaagaaggagcttcaccaccaagagagtgccatggataagaagcttatagaggaagcttcaatggaggaaaagaatgagagatagagaaaaaaaagtggcatgggaatgaaggaaaaagagggacagagttaaactttgaagtgtgtctcataagactctcattcatcaaagttgccacaagtgttacacatgtttctgtttatagcctangtagcttccttgagaagctagtgtttcacccctccaatatctaagctcacccccatgccaaatacatgaatgaagacagcttccttgagaacttccttggggagcaagtgtacacccct

SEQ ID NO: 262098 - DNA, 464 bp, Glycine max
ttctaccatttatgcatcaaattcttgatttattacgtgtttaccatatttattactcattcttttgtcttttgccataggatatgagataaggaaaccgtgatttgagacaaaggtactcgcaatgcaagcagtgtttccatgagcaacggattggttggaccaaattcccaagagtaaatggactcaagcctgtggtgaaggaaaacagtatgaccatatgactatcaacattgccaaatgtatgaattctattttgaaaggagctcgaacattgcctattactaccttagttaatgaaacatttaataaaataaatgatttatttgctactaatgacatgaaaatcatgaatatgataaatattcgacatacgtactctgaagaggtatatgtgatgatgcaagagaatcgacacattgcttacgttgcattatgttcgcatgtacgtgtagcaatgacat

SEQ ID NO: 262099 - DNA, 168 bp, Glycine max
atccctcctccagcgactaatccctaaaaccgatcctaaaaaaccctctaatgattttctactaaagattaccccccttcaagccccaacccctaaaatgatccaggatgaacctataaacatttgtggcatttaggcctgcaaaccctacctaacggggttaccttt

SEQ ID NO: 262100 - DNA, 431 bp, Glycine max
  unsure (1)..(431): unsure at all n locations
ctttacatgcatgttcacaccatatttactatacttcgatctactgatgcaatctatttgattgaaaagataatttatattactcttctaatgtagtcgacaactaaaaaaaaatataacagaaagtaatgcttaggccaatctaatcaagtcattttgaatctcgtcattactatcatgcatctcaaagagaaggagaatcaggcatcgtaatacatagcacaacaaaacatttaaagaaaacatgccttccaaagccaaccaaggttaaaatgtattcatatttggtgaactttttcaaaataataacacatatatataaacatggtggaacaatctgaccacatgcacaacacattccacacattatntctgaaaatgagtggcaagggaatataataaagcattgttattaaaactgtacatgcact

SEQ ID NO: 262101 - DNA, 422 bp, Glycine max
  unsure (1)..(422): unsure at all n locations
agctttcactgggtcaaaacccttttgncacatttcttttttgatcgtaaaacaanccngnagggccgaaacccctaaagcttaaagctccaccctgtctcactctagcccagccaaaactcaattctagctaggtcgaagccccctaaaacttagagcaccattctatttcactatggcccaaccgaaactcaattctagttggaccaagcaaaaaatggggcttcaaatctgtgagtgttatggatctaaataacatacccacttatcccattcacatgtaaagaccctctcaagtttataaacatccacaaacaccaaatacatcatcatttcaatgataatacataacaatcaaagcatttaaaccaaaatagagcttcccttaccctaagaattaaccaaaaaccttgaagaactat

SEQ ID NO: 262102 - DNA, 397 bp, Glycine max
  unsure (1)..(397): unsure at all n locations
tcaccaaaccccgataccatcgcttatatcgatacacatttatctctatcatcaacgnccatctaataccaagcccaaataatataccacataaactagctctaaccgacctacacaatataaaaatcaaactctaaacacattcatctacgagagtcaaagaccgttcaacaacaactaatcattctgaatatgaaataaatgtatactcacttctcaactaatatcatcttaataaacgtaattagactgtaaaaaaataatggacacagaaattatagtacattatcttgttctactctacatcaagataaacacgaatacggtataacaaataacagcgaactatggatgatactcgaaattaaatgcgcgtccgacactaagctttggacaa

SEQ ID NO: 262103 - DNA, 376 bp, Glycine max
  unsure (1)..(376): unsure at all n locations
cttcatcttgaaattggcagcataagacagtaacataatgttccatttaggnttcccacattttttctacgtagacccacatctcttaggaactcacccaattcatagaattttctctcctttatatacgcagaggccacggcccgaatcacttccttctctattagaaatctagatttcttaaggcggccatacgtgttctccatctcttccaaagtaccaaatagactataataccaaacgaaagcatcggcagttctagaatatatatggacaccacttgaagccatttcattaaccatatcctccatcaatttaagctggacttctctatcccaacaagatatagccaaccagtacacatctggtaaaatac

SEQ ID NO: 262104 - DNA, 313 bp, Glycine max
  unsure (1)..(313): unsure at all n locations
ctaccatgctacagcagctccggccaagctgtntctgantgacattgaccatccaatttcgtccacacaatacgcccccattttctggcatacatcccaagcaggccttctccgacactgccgcacctttggacttatcaaacgtctgggactctgaacttgcgagggacgactacgtcgggcacaagacataagaccgctacattcagagagtgggtaattagccgaggccctcaaatgctctcaacactatttcaagccgcctcaatccatcccttatcttcacgaagggaacatattcttttacgggcgc

SEQ ID NO: 262105 - DNA, 346 bp, Glycine max
  unsure (1)..(346): unsure at all n locations
ntactcgtagatctgcaccaacagacactactatatttctttgtgatacctctctcccacactagaaacttgtgaaaggtcgtcatgtgatcgccaatgtcatcatgaggtgtttcttcgtttgacttaacaggagtgcgctaggtgggtccggagaaagagctacactaacactagtacgaggctcttggttatggcccatatgtctcgaccgcctaggtcttcgtgtacgtcattgccatcaacactcagtccccaggtcctactatcaatgncacacaaacaacaatgttgctgtcaatgcttaaaacaaagcggacgacatcatccctcatccattgctaca

SEQ ID NO: 262106 - DNA, 271 bp, Glycine max
ccatgcaagtattggctgagttttctccaatgtccatgcttttttattgaacacttaatgggacatcctttgaactgataaacacgtaatttcccttgtgtcaagaacacccatgctctgagcctttattagtagggacttggatcagtacacatgttcgccttgttcattggaactttccttcattttcttagactctcacgacaggatctatgttctcttatgttggattttccttataatgttcttggtcagagagtattttttctcc

SEQ ID NO: 262107 - DNA, 402 bp, Glycine max
  unsure (1)..(402): unsure at all n locations
tgcagattntggactggcacgatcattttctaatgaccaatatgcaaatcttacaaatcgtgtcattacgttatggtacaggtaattggtgtcattttttatcatgatctatgagattggccaatgcatgtattgatttctttatatatatttagaccacctgagttgctgctagggacaacaaagtatggaccacctgtggatatgtggtctgttgggtgcatttntgctgagcttcttcaagggaagcctatctttcctggaaaagatgaggttagtgatgttctatgtatgataatcgagagaaattacatatagattgatgagtgattgatgtgatattgattatgggctagatatggctctatcttgtatattatcatcagtaagttatacataaat

SEQ ID NO: 262108 - DNA, 211 bp, Glycine max
gtttgctagagctgaaagaccttatcagaatcattgcgactttcctccttgaaatagttaatgacccaataattattatgaaaataattgaagtatataaaactaccaacaccaacgtctacaatgcaccctcaatttactgtgaatatatccacttcttatgataaacatgttacttcatcagtttcattgtcttcacctaccccctgca

SEQ ID NO: 262109 - DNA, 381 bp, Glycine max
tggcagcgaattgtgagtgtgtaatcgttaactcatcgtcacaatcacctgtgtgaagatgatccctaatgaaatgatgcttaatatttatacgctgtgtcctaaaatgcatgatacgattcctactgatactaatgacactagcgttatcacatcttaaaggaatatgttctaaatgcaatttaaagtcagaatgtttatgattaagacacaagatatgtgctcaactactttacacaacaatgtactcagccttatctgtaaacaaggcaacacatgcttgattcttactattccatgaaaccaggccattacctaacaagtggcaaatactactagtgtttttcctatctaatgtcaatctggaaaagttcgaatctg

SEQ ID NO: 262110 - DNA, 459 bp, Glycine max
  unsure (1)..(459): unsure at all n locations
ngacaaacctgtaactctggcacctatcaaggttatcaccttcgacaccggacaacacttgtccaagcttgtgggctcaacaagctcacgaccctcctacttgtcaaggctctacccttgacactagacaatctctttcgccaacaagctggctcaaaacttggggggcttatgtattgtttagggtccacaaaatggatgtggcaagtgacgtggcactccattgtgcacgtcaaccctgcatgtcaaccctgacacaagagcatggacgtctcgcccatagcagctgggctactaggccgacaagttatctctaatactgcattattcgaatattaatgataatgttgcaacccccttatcaagtggcaagtacctaaatatctataacatacacattattcataatccacaacctatctactacctaggaattatttgtaaagatgttacatcact

SEQ ID NO: 262111 - DNA, 303 bp, Glycine max
ataatacggacgccccacactatccccatgacacaaatgccaaggtgaatatctgaaactttatgcaaaactgggcatgcatgcacctacgtggacacatcaagtggcatatattcaaggtcatgcgaagctacggcccaggactcactgactttaatttatcaaccgaaacggaccacaacaagtacttcatcacatagacattcatccaaatcacttcgggcgaatgggaaaacctcacagcaatcaccccttatgcgacacacatatattgcacactatcatgatctgtgaacttcccca

SEQ ID NO: 262112 - DNA, 474 bp, Glycine max
  unsure (1)..(474): unsure at all n locations
gacctatacacactcaactttagcntatgcgaacaacatgaatagtatatacacatttatttatgccttcacgccaaatcccttatggcttgaaacgtggatagcgagcaatcctaccaacctcgtgcttaaatttaagtttttattacaaaaactggggtaacacattataatctataacactaagtcatagaacatgtgtgaacatataatggacctattattctaaaatcttgagctattaaattgacgatgcacgatgattttatattacgtctctaactcccataatattcaacacattggcacttggatgaataaaatattgttgacttctatcatctctctgtgcttgcgtgcgttaatgtgatagaaagagatgaaccgaatgtctgcagatcttgaatcggaactaatccactttgatcaacgttattattatcatcacgtatctcacttgtgtatcacttcatc

SEQ ID NO: 262113 - DNA, 293 bp, Glycine max
gattttttcttccctctatgaatattggagccttggaattggtttgggaataagctgggaataagagtgggggggtatgtttcattggaaagattgatttttggccatgcttaatgttatatttcggccatgcttgaagaatatatatattggctagatctttctttaattttaagtccaacttgttcataaataaattcatgaattgaaaaatgcaataaagaaaagaataatggacgttaataaatatgtcttgatatgagaacttgattggagccttggtgatttgttga

SEQ ID NO: 262114 - DNA, 390 bp, Glycine max
  unsure (1)..(390): unsure at all n locations
tgaccagttgttngacctttcgcaattcgattcttttctgtattgttatctttctcaacatgagggctctaagccatacagaaaacaattttatctgaattacgaagtgaaaaaaaaaacagaaagaaaagttaggtatcatgaacctagcagctaaggcatcctttaaattttttgtataatattaatcataacattattatccacttataatatttaatttatatcaatagtcaatttattttttgtcagaaaaatataatacagtcacaaaatagtcctaattaacaaacaattaagttacacatgtgagcttggatagaaaaaaaataacaacaaacaattgattggggttgcacaataaccccaccctgtttaaagtcatttcct

SEQ ID NO: 262115 - DNA, 256 bp, Glycine max
  unsure (1)..(256): unsure at all n locations
agaatcggacctcantgagaagagttatgacgattattatttctcttgagcaatcacngcacaacgtcgagcatctagacataatatgcgctcgatacgaacatccgtgtgaaaagatatgagcatgagagtatctcgagagcttccgcggtacaactcccagtatctagacctattaagtgcccgaatctaaccttcgtgtggaaagctatgaccatttaaatatctccacagcatctcatgtataatttcgagc

SEQ ID NO: 262116 - DNA, 444 bp, Glycine max
  unsure (1)..(444): unsure at all n locations
ctctccttcgtaatctctcttaataaagctttaattgtttatctatttgganatgaaaaaagctgcaggtgtaaactgcaaaatttccaattaactttaaagataaatggctatcaattctgattatctaaaactatacttactaatatcatactcgattattaaaaaaaaaataccatacttctctgatttgattgatgatgttggttgtaattctttgggacaaggtcttcttactaacacttttgttggagaaataatgttcgccattgctgttgcaacccttggatcggttcttttcggattgctgattggtaatatgcaggtaagtgcacttaaactttctctcttattagcctagacctgtcttgcatatgccaattattgacctcttttataatgtctttgacattagaagatactgcctaaaacatggacaccatc

SEQ ID NO: 262117 - DNA, 391 bp, Glycine max
  unsure (1)..(391): unsure at all n locations
aactatcacctttatcggaacattnaaagagaatgagacttggtactgaacatactgaccaggttttnctctacttcctaacttgattccttgtttaaaatagaagagacagttgtgattgtcataaaattgcatttgcatattttgtacacattctttactgcaaagagcataaatataccttgtatactgtgtgtcctgtactttcaccaatttgaaattnttattatccccaaaatgatcatcatcttctcattcatttgcatgaatatattcttgcttgtttggatatgttccatctgtgaaagtgaaaccgtcttaattatagatctaaggactgaataaacttgntctttttatttcaattttacttattaatcccttatattat

SEQ ID NO: 262118 - DNA, 388 bp, Glycine max
ttttgtaacacataagcggaaaggctgcacatgtgggttcatttccttatccatcatctccaaaacgtactaactaacttccttaacaaacttaacattagcggcagcgacaagacccttgataagaaccgcataggtgtaagcattgggagaaaccccagaagccaacatgcgcgtgtaaaccttgagagcctcttttggctgaccggcgttggcgtaagccttgaggacgggggtgtgggccaccacatcgggcatgtggcccttgtccttgatctgggcgaaaagctccagggcttcgtgggtgagaccctctttggacaatgcgtcgaacatcttgactgcgtggctgaataagccgtcgccggttctcatgttgtggaatatc

SEQ ID NO: 262119 - DNA, 380 bp, Glycine max
  unsure (1)..(380): unsure at all n locations
tagaacaatatactngtccttcattaaattgtctttgggtcttgcgaccacaatcaacaaagtactttcggcacctactatatgtcgacttgaccaatgctgttatcggtatgttgcgacaatccttcaacaccttattcacacattatgagaggttggctgtcatgtgaccatatcttcatccttctttatcataagccatgctccatttttcctttgaaatgcgatcaatccatgttgtgatggctagactcaattgacgaaatttttctaagttttgatcaaacacatgcttgcaaggagtgtacgctgcatcaaattttgtactaacaacatttgtaagtacatatcaaacttaaattaacttcatgttacaaagt

SEQ ID NO: 262120 - DNA, 403 bp, Glycine max
  unsure (1)..(403): unsure at all n locations
gacactatacaaaatcacgctagtcctttcagcgacgcgccgctcagctcatacctcgtttatccccaaatccactctccgactctcaaaataacgttcactttactctcattctttaaaaaacgatcganagaacatcaaaatacatcatttcacaaagtcatgaagcaaactatggatctcgtaaacataaggattagagtgaccaacactcatacaatatatcatgtcctataatgagtgactactcctcaatcatcatatgatttttttttttaaatctctattatcaaaaggctacatttttatgtcttctcctactcaacaaataagtgaccaaaaaaaacttatgactatcttctgtatatggcaacaactacgcttccagaacacggtctggata

SEQ ID NO: 262121 - DNA, 426 bp, Glycine max
acacttcaaactcagctgatggagaaagtgccgatctcgaagattaaaaggtgttttatttatattccacatcaggacatcaacattcttcattcgagctagaatttatcaccctggaccatcaacatttgaaatcatagtttacaaaaaaatacttattataaactgttagacaagtagtctcagctatcttaagaagggacgttaaattaagatatacaacctatcctttaattaaaatttaactctttttgattaacaatgcaacccttattatgaattattccaagaacaattcaaaaacaaacttctctaaagaaaaatattaacaatacataataacagaagtttaatggaagagagaatgcaaactcagattttatactagttcggccacgccctgtgcctactttcggtgcgcaagca

SEQ ID NO: 262122 - DNA, 255 bp, Glycine max
cgcgcagcaccccaaaaagcccgaaggttcgggaaagagacacaagccgcacaacgggcaaacacggccaaaaagcccgaacgagccgggacagagacacgaaaccagagcgcggccaaccgccccaaaaaagcccgaaagacccgggaaagagacagggaacccgaacaccgggcaaagacgccgaaagaagcccgaaggactcgggacagagaacagaagcccgacgagaggaaccaaagcgaaagagggcaa

SEQ ID NO: 262123 - DNA, 326 bp, Glycine max
tctcgatatattatgcgcctgaatcagacttccgtttcatatgttatgaccatatgaatctctccactgtattccgtgtgacaagttatgaccatttgaatttctcgatagcattcgttgttcaatttcgagcgtctcgatatataatgcgcctgaatcggacttccgtgtgacaagttatgaccatttgaatttgtcgagagcatccgttgttagatttcgagtatctcgatatattatgcgcctgaatcggacatccgcgtgacaaggtatgggcatatgaatttcttcagagacttccgtgtcttattttagagcgtccatat

SEQ ID NO: 262124 - DNA, 64 bp, Glycine max
accaccgagaccagggaaaggacaggttttaacatagaccaaagagcagaaacaggcaaacaac

SEQ ID NO: 262125 - DNA, 456 bp, Glycine max
  unsure (1)..(456): unsure at all n locations
ctaacattacaattacacttctaaaagctattgatgtgccatcattttcttctattntctaaaccctttttgcaccattttaattattgattggtcttaattgtcaattaattacgcagttctattatttgggttcatttagctaatttgatgtttttaatctaatttcaggaattaatgaaacattgggcttaatccggattttatttgtggacttgaagagggaaaataaagcagcgcttaccttagttaatatctaattaggaaatttcgcaattttattttatgctgttcagtgcttatttccttttgggccagagtattgtaatagggcccagtgactttgagtgactcttctaaatagctgcctgtgattcgtgcacgattctgtatctatcattatcacactttgtttacggtttcgtttctgtttatgctctgagtccaatgcattta

SEQ ID NO: 262126 - DNA, 391 bp, Glycine max
  unsure (1)..(391): unsure at all n locations
tatacacacacaacnnntccttccaggcttactctctagtagacggggccacctcttatcttttctcctttatgctcccgcttcacttcatggctaaaaatcaccactgaaggacctcattgaagcccaaagatctagcctccatagaagcctctcaagcaagcttccatcaacatcatatagtgagagctatctacatcccaagatgcaagtccgcttaaaattgaagatgcccttgagaaacactgatgagaagcattagagtaaaggactaaaacatactactcagtctaaccttggacacaacaccagcacaccagctattagacttctactaaggctttatgaaggaatcaatttcaaaatgcctgccaccttcgaagaagtacta

SEQ ID NO: 262127 - DNA, 319 bp, Glycine max
ggctcaatacaaaccctaacataccgatccactcatttcatacgatctctcattcaactcaatcacagcacttcatttcatacgaaatcaaaccactgaatatcatatacaatcagggcactggtcaaacatgctattgtacaagctacagacactaaaacaacataaatgtaaaagtccggaatctaaccgactaataaagcatagactcaataactgaccaaataaaactgttcataattcgcaaaaaatgctaaagacaaactatgcaaaacataaaactcttgggcatctactgctggtcttctgcatgctcgtt

SEQ ID NO: 262128 - DNA, 348 bp, Glycine max
ctcatcgcctctcacagacttcagatccgtgatttatccaatcctaggcgccggactctcagccacttatgatagccgccgatgctcccattactgcttcccctaagctctctgacctttcttcacaccgcatcacatgccttgtgaactccttagagtaccctcgcattggggtcactgaaaccccgtgcgatgaaaggcgtgatgcttccgactgacggcactcctctcatggggtagccaacctgccttatggcgacgaccggattataaataatacaaccccttgtcccatcaagggaacattggacatgcctccatgaagacagaaacatgaaccctcctcct

SEQ ID NO: 262129 - DNA, 408 bp, Glycine max
aacttgctactacaggcccaaaacaaaaaatgggaaattttggagacagatatcacacggtgggccgcaacataaatgggcctgatcctaagtggaaggtatactctagaaatacgcggtgtaaaaaggaacctgaacctaataagacagaacgacccaaacaaataattgagccccaagatgaccagcaacagcagcagaacaggtggtgcaaaaaggaagctggacccaaagagacaaatgggcctcaaaatgatcagcaacagcaacagaacaacaacatagaaaaggatccaaccttcaggtaaaccaaccacgatacatcccgaaagctacggggtagcggatcgaaagaaattataagctgggaggaaaggtatgatgatgattacaacgtatttgttctac

SEQ ID NO: 262130 - DNA, 444 bp, Glycine max
  unsure (1)..(444): unsure at all n locations
cctngtgcaattatacgaactaactataataatactcagttcctccctatgtaccatacaataattcttatgtaagaattctaatttctagcgttgcttattcgctgttacttggagtgcgtcattacaactaggacagattttggcacgtctagtgtgaatccacactaccctcctctctttcttccttcagaaaaacattgtatatgtaaactttaatgtaaagcacaaatctattttcttatatctaataacataattatgtttctattccccacaccctgcaatcaacagactaatctcttgaatgcacgttaacttttctatatgaagacatctcttgaacatatactgaatattgcaccttgctgtctcctgctgacaaagctaaaatatcatgaaaaaaactgtcgctatatattctaataccaatataaagaacat

SEQ ID NO: 262131 - DNA, 305 bp, Glycine max
aaacaaacacacgcctagcaagttgcggcactagaaggcaagttttttttacacccacaaatgggccaatcaaacgcgtccgccaacttggaggatccaccccccgcaaaaaggcactacacccgtacttattagccttgagcaccagaggaatgggacacgtcccaacattcaaataaggagaggcaggcctttacttaaaatattacgccatccaaaaacagcgagatcgctaacaacattcaaaataacataaggcctttccaaaaaaaaaaaatccatctgggtcagtaaaaaaaaaaccc

SEQ ID NO: 262132 - DNA, 344 bp, Glycine max
  unsure (1)..(344): unsure at all n locations
nttacaaaatatataagttcatgacatacaaaaatatattttatattntacaaattacaattaccttctacatggtatttttatttttattgttcctattataaaaaaaagtatttttccttttgtatgtaaccaaacaattctggattgttgcacatttcatttttaatgatttacaggagaaggataataaagtgataaaaattactattaatttatttttcatatttcttaatttcatttcaaacaaaattatcttatgggatcaacatctattctttgtgagggaaattttctttttattaaatatgtgcaaagaaaataaataaataaaatactttatg

SEQ ID NO: 262133 - DNA, 390 bp, Glycine max
  unsure (1)..(390): unsure at all n locations
acctataaaaactcaacttaagtgtgaagaacagaatgaaggatctttttgatcttatcctatncgaacactatgctactttatttgtcacccactcattcaatgcttgaatattcgatttctttgttaccactcgtctaagataaaggcttcacaaactaaagatataactgataattcgttttacaagacttatggttacattgcttatctgtttcaaggttaaaatttacattgaacactatatatcatcctatatgacatatccgaagcaatttttcattgtctccgaatcttaaaatttgattcaaactatgacttatgattcaataactagcttggacattcaagaatacaatctcaatttgataaccttggctcacatattca

SEQ ID NO: 262134 - DNA, 457 bp, Glycine max
ggcctaacaacctcattgactcagatctatatagctgtactcagcacacttgtttgagcaccgtgagaagtaaattctcatgctgagaacagtcaaaacatttaagctggaacatctataaaattataagcatttaagcatggccaggctatagattcccaatttagggatgtcacctaacatgagtgaactgaaattacagtagtgtgctgcttatagaattttgaagctgttaaagggggaagcatagcttggccagaatctttcctctaccttaattataggattgtatttatgtggtttctcagatccccatttcagattcttcttatgttcaaggacaacttttattctaaccggtgttatgaatataaagtatctcctaattctaccaatgattaatttctatcaaagaattgatccatcacctttaataaaatttcatagacacccttct

SEQ ID NO: 262135 - DNA, 319 bp, Glycine max
  unsure (1)..(319): unsure at all n locations
ngatgtgagaaagcgcggaagagtcactcaccctacattttttgttgaccacacagagagacccggagatatgccgagggcggcacgagacctcggggacctcacgcggggtgctatcgcccaaaaccaaacttgaccaatcccgacccaacccgggcatagtcagacaatgagaacctgtgacgtacccaaacaggcgacctcctggcactcaaccaataaaagaacaaagtccacaaaccaaagaggcctgcgtggcggctggccacctatgaatcttgagcggcatctggaattccgccctgcgacaacatcacca

SEQ ID NO: 262136 - DNA, 335 bp, Glycine max
  unsure (1)..(335): unsure at all n locations
atcaaacctacctccactnccacgatgcaaggggcgcaccaccttttctctcctctaatgacagggcacattactggcgctaactgtggagttggaaccatcttccaattaaatcttggcttcacaggagtcatgtctccaagggccccaccactgcgcagcatacaccatacttactcccatacgattgagtccctcataaaaatattggaaaagaagctattatgaaacgtgatggaggggtccactggcacataggttcttaaatctctaccagtactcatacaggctctctccactgagtcgtctaatacctgagatatccttcccgatgg

SEQ ID NO: 262137 - DNA, 335 bp, Glycine max
atcccgcctggacgaacgagaaaactgcggcaaataatgagggcgacgatgagggagatacccatgctgcgactgtcattcctatacggccacagttcccaccaaacccaacaatgccattactcaggcaataacaaaccagctgcttacccaccacccagctatccacaaaggccatccctaaatcaaccacaaagcccgtctaccgcactcccaatgacgaagaccacctgtagcacataccagaagaacaccaaccaaaagcgaatttgtcacgaaaaccctgtacggttcacaccaaatcccggtgctatatgcttacctgaccccatatc

SEQ ID NO: 262138 - DNA, 343 bp, Glycine max
acttcttatacccccctagagacgtgctgaagccattatacttaagacaattctcgcttaacttaaaaataaaacaaattcccaccgaacgctggaattgtattatccattaactccggttaaaataaattccgaccgttcggtcatgccgtaaccacgctgcgaaatcaaaaaaagaggtataaaataatatactaatcaaaaaaagatctctttagtaaaataaagcggaaaatcaatcggacgttttctctctgggatagctcatacttaatcgaatcgattaataactaaagtgaaatcaaggctaaaagcaactcgcctagtccagctcgtccacaaa

SEQ ID NO: 262139 - DNA, 356 bp, Glycine max
agagcaatatggataacattattacttaagcttgaagcttgcgcaacagcttgaatatgttttgccttttacatgcctaactccctcgatctgatctttttctctcattcaagtattaatcaatttttctaaaaggctcaagatctatctttgtgaaagaaatgatattaatgaaggatgtcgtataagggtggattaattaagcatcgatcgagtcctgttcataaagtcttgagatacgatccatacaaaagaagtctttttcgaatctctggtttaaaagtaccgtttgttttgaaaacctattcactctccctcttgcgttattgagctccatcatctcttttaaagcttgg

SEQ ID NO: 262140 - DNA, 457 bp, Glycine max
  unsure (1)..(457): unsure at all n locations
ngctgataaactgcatcttcctctgcttcccatcatgaggaacatcccatttcatatacaacgcctccctctcctccagtgacaaacgtgttgtcagtctcttggccagaaattccctttctcgtttcaaagctctaatgctgcatatattataaaatgtatattcaatgaaaaattctcattcataatgatgcacagctctatatatatctatctatatataactacatagtgtaaaatatatattcgatgaaaaattctgattcttaagggtaagtatatattcgatgaaaaattctgattcttaagggtaagtgtatatgagagagtgaaccttgatgacaacgagatagttggttcttctccaacatgaggagctgggcttgcattcccaagttctgctaggtgttgctgcaaccatgtcaaacgccttagttctacttccatgtatatttga

SEQ ID NO: 262141 - DNA, 317 bp, Glycine max
ccagctgccacaaaactcttgcccgcacttagaaccttttgtttgtcaaagacgcccctctaaacccctgcaagaatgcagctctaacatctaactgccgcaagtgaagatcctctgcaactacaatactcacaataactctgatggtagccactttcacaactggagagaagatctctgagaaatcaaatcctcgtttctgacgaacccctttcaccacaacatctcggctcggatcttcttctaccgacagatattcccttaacctatacactcacctatcatgcaccgccttcttcccttctagaaattaactc

SEQ ID NO: 262142 - DNA, 458 bp, Glycine max
  unsure (1)..(458): unsure at all n locations
tgtcaaaataatntccttntcaatagacttcacactcatgttttctaatnagctctcattttataagaactcatagaataaatgcttacttaacttgtttaccaaaacatgccaaaggctcaagtaaaaaacctacaaaggaagctataaagaatntaaaaggtcagtcacttgtaatttagtaaaaagtcatataaagcttgtacattgtttgttccactaaaagctatcaaagatgttgggctattatcaacataatgaccttaatccccaagtctgtgttattncaaatagcaagcaccaatcaatataaattatacaaagagaagaataaaatatcactggaatttattgatagaaaaacttacagaacaccataatatgataaggtagccactattaatgaaggcacaaatggagaaacaaatcgaaggtaccatattaattgatcccaaatc

SEQ ID NO: 262143 - DNA, 455 bp, Glycine max
  unsure (1)..(455): unsure at all n locations
acctatanaaactcaagctctgaaagtgttgtttttcaccttctcgctaagacaatctgtcttggtgtgggcggcccaccgtctaatgcaatacatgctgagccatactacctggttggtgtccaagatggatccagttaagtatatgtctgagaagcctgcccttacgggatagatcgctcgatggcaggtgttgctatccgaatttgacatcgtctatgtcaccctgaaagtgataaagggaagcaccttggcagattatctggcccaacaacccctcaatgattatcaacccatgcattctacatttccagatgaggacatcatgcgcctattcatggaaaagctggaagacgaagacaaggacaaataggccgtatagttcgactgggcattatacgctctaaatcatatggtgcgggcaccttgtctctcctgaatcagtgcgaccctta

SEQ ID NO: 262144 - DNA, 381 bp, Glycine max
tataatctcttcttacaccattcatcatccaaattctatctttgaagcctgtactctggcaagtgatatggaatattctctatatatttattctaacgctgtccatactcttgtgtcaactaagatttcgttctttaagtaatcaaggtaggacgtatattttattagctaccacgactacttgatactaattgaattcttctgtataatttctctcacacacccagataacttatacacaacactctttacacaattagtccattaacaaacctggttcgagacagctctatagatcaatttatcattaatcatagagaatctttcaatgaagataaaatcggacaaaagataatcactttgcaacattatatatcgata

SEQ ID NO: 262145 - DNA, 393 bp, Glycine max
tataaatactaagctctatatccacgaataaccaacgaaaatacctatatcttacttaacatcaaactttcctaagatctctgctccattagttaacacaaagcatttgcaaccaaaaacatcgaaagtagcgcaaacgttacagtctctctacacattaatacagcttcatatcggagtttccttctaaaacgtggctatattaaaggccctattcactgatggtaacatagtagtattaacagcttcagcccacaaatataatggaagaggagagtcatctaataatgatttatccacttcttccaaagatctatttctcctttcacaactccattctgttgaggggatctaggtgcactaaacgtatcgtcaacgtcatgcttatcacac

SEQ ID NO: 262146 - DNA, 430 bp, Glycine max
  unsure (1)..(430): unsure at all n locations
ccgcagcagcagcgcacgtacgcctcattatagagattatttcttgttatccacaaaatantaaacacccatttcttttccatgaagctcatgtttttggtataaggtatcaaatcccatacatcgcttctcttgaattgattcaattcctcatgcattgatatagaccaaaacttatctttgaaggcctttttctatagataatggctctactcctaacacaaatgtaatatgcccacaaaataagatcaaagagtgtctagtagttactccactttctatgtccttcgaaaagttgactataaagagatcccttggtgctctccattccttgtgaagatgatgttgttatgatgagggcccttcttgatgtttattgctaacttcctctctaatcctctggaaatgcttctccttgacttcctacatc

SEQ ID NO: 262147 - DNA, 385 bp, Glycine max
tcttagcatttgccaatcgccatgatgtaatctccttcttgactttctctcatcaagttggagtggtatcacagcattgaactaagctgatcgttccaatgggatgatggttttgattgctgcagataaagtgtgtgattgtgagtttctggtcccatgagttaaactacatcgactaaaaaaaatattgtccgaactctaaggtcaaaaggataattaaaccttttatttttttattactttttttaacaacgggttatatatatgtagcagtttattctaaacaatggactacctgtgaaattcttcaattctatgtaagacatgttatttcaaacttctcatcacccttattgtcaatgatgggatgctcacttgaattcta

SEQ ID NO: 262148 - DNA, 327 bp, Glycine max
tgtacaatggctagacatgacacatgtcctggtttggtttgtttcaccgacaaaacggatgccccacattatttccatgacacaaatgctaaaatgatgatttggaaacttcatgctaaactggtcatgcatgcacctatgtggacactcaagtgtcaaattcttatggtcatgtgatgctagggctcaagattcatctcctctatattaaatcaacccaatggttccaaaatatggtcatatatcaattcgtgcattcatccgaatccatttctggcgtccggggaaattccacagcattcacccttcacgtgtacacacatcttt

SEQ ID NO: 262149 - DNA, 357 bp, Glycine max
ccaatttcgcttcttttttttccagtctttctactggccttcaattacattaattgggcctttccttatgtggtccaaacatcattgtggatgttctccagcctcttgatgacaactctccaaggttttgtatccagggatttgaggaggccaacatccttgctttcagtattaaagttggtccatcaaaattggggctgtcactggcctccttcttctcatgtcatagaatcactcctaatctcactaggatttcagtgccgctctgaaccaattgaaattctgaaccaatgccaaatgtcggacaggatgttacgacatcacgctcaaaacatgcagattatatttgagagtatg

SEQ ID NO: 262150 - DNA, 254 bp, Glycine max
ccccgcgcctataacctgcgaactaaaaaactcgcacccacgctagacgttcgactcgataagtacgcttgtcgcaattaggatgaacaaaaagcggacaagaacgatcttacacccgctcaactacccgtaacagaatctgctgtaaaagatcctactgaaccacctcaccttcaccacaaccacgcgactaagaacgatcatcaccacaggctactccaataacagttacatctattggggacatatattaa

SEQ ID NO: 262151 - DNA, 428 bp, Glycine max
  unsure (1)..(428): unsure at all n locations
cagcatgcaagcttatcggtttctttttggcttaacgcattttaattatttttattctcttcgtttaagccgacctgaattttaaccacgccaaggatcatggcgaggattataacgattaacaacactgaagttttattattcttacgcacccaaaaaggccttaacagacagagatactttgctatcaacataccaagcgtaatgggaatggttatcattaaccaaaattgattgtgccatcccatgattatctatggcantgatttactgatgaaacttatttaagtatcattttacaatatgaaatataaaggaatatttcattttcagtgggtatggttatgctatcgataatcaaagatattgttaatgccctgaagcataccacgtaagccaggattttcgcacgggaagatgatgatgac

SEQ ID NO: 262152 - DNA, 464 bp, Glycine max
  unsure (1)..(464): unsure at all n locations
tgtcagcccgtntttggggaatgggcataccacctgcattctccaggattcctgcaaggataatctggttgtcgaaagtaatggagacatttacgaatgcgaccactttgtctatccacagtacaaaattggaaacattaataaatctgaactcaaaacgatgaacagtgtacaactgacagcgcaaaaaaaacggattccagcgaaacgtcagcaatgtgcatataaacctatctgcaatggcggttgtcctaagcatcgtattactaaagtaaacaatgagactgtttcttatttttgcgaaggttataaaatcctgttttcaaccatggtaccttatatgaacgccatggtagagttagctaataacagagtaccgctataccacattatggatgttgcaaaacaaatggagaataattaataacgctctctcttaactcattcttagcctccttcttatg

SEQ ID NO: 262153 - DNA, 249 bp, Glycine max
cgcactacaagttcctaaattagctttggtataaaatgatatgactaactaactaactaactccactaatatatacagtgactactcaaaaggaagggttgggcctcgattaggccatctaatatacataattaaactaaggcaaaattgtacttttggtccaccagtttatctccaattttggatctggtccccctataatttaattcacaaatttggcctcatagttctataaatccctgcaaaatc

SEQ ID NO: 262154 - DNA, 447 bp, Glycine max
aatcagaccacccctacatcacatctctatttcttcatttctttctttacccacccctcacggtgagttctttagggaacacaccatatctaaacgcgccgcaagggattcctatcgcaccagatccaaatgtataacgatgggcgatcaataggagacacacgaacagatgaaagcccacatgtcggttctgaaagaacaaatgacctccatgatggatgccatgctacggttgaagcagctcatatagaagaacgcggccactgtcgacgttgcaattcggctgtctaagcaaaccgactctcttggaactaccaccatctccctcaacatttatgactgggaaggacacctgggcacatgggagtctcaccgggaacaaccagcggctaccctatggatcgcgcccacatatcgcaccatctgcacgaaatacggcccatgctc

SEQ ID NO: 262155 - DNA, 280 bp, Glycine max
gcccaccttaacgttacacacttatgcacagggggatgtgtaaaatatcctactatttatggcaatgtacaaggacctccaacacattctagttaccatacctatatatgtattttttaagagaacacacattctcatgctcaaggcactgcgtcaaaattcacacctaatcacatcctatatattttgctatcacaaactacctacacatatttgaagcaccatatataagactttcattgtttcactcacatttatttatatgcatattggaaagcta

SEQ ID NO: 262156 - DNA, 457 bp, Glycine max
  unsure (1)..(457): unsure at all n locations
agccccactccatcattataatttgttcctgccatctcaaacaaacaaatcaaacataacaagacaattattgttgctggttgaatacctcactcactcaagtgtatcacacaattatggcttttctctaatgaaaacactctttccttttaccactctaattccccttgagttcttatgcaatccaagagattatggccacaacaatgaacaattcaccaatatgtgtaaggtacggctagagagacaaggaaaaggttaaccaagaaaaaggctaacaatntttttatgcacaaatgaaggaaataaaattcagaatttatgaattcaagtaacaatccttcatacaaccaatgtattaccttaaagatatttctttttaaaagttcttcaagcatgaaccactcagcccacaatttcttttttctttttttaattttgttatacgaattctacc

SEQ ID NO: 262157 - DNA, 443 bp, Glycine max
tgcgtgagttacattctcaccctttctcaagctaattcttaattcttcctgacaccatcaacatcttcatgatttacattctccccttttgtatgatgacaaacacctgtatgttaggagccacaaccaagaacaaatatgtatttgcatatagaatactcccccttggctttgcaatgattgcttatatgagacaggtgaagatttcatatttttcatatgtaaacaaattgtctcataaagaatacataacttctcttactattctatctttgatctttctctccccctttgccaacataaaaaacaaatcatgaatagagaggagaaagatgttcctacttgttgattacatacatatattttatcacttatcttgtggaatgcaatgtatgagaatgaagtgataccataaggcattaaaacaattattcaatattaat

SEQ ID NO: 262158 - DNA, 315 bp, Glycine max
  unsure (1)..(315): unsure at all n locations
aacattggccaaatgacagagatatatatttatgttgtagatactctatttatcaaaagaaattataggcatgttctttctctctctcccccctaaatggatgctcttgtatgtagcctgcatgcaattttctaagtgatttgctaataaaagcctacatgccggntagagcaaatgcataattggaattttcatgtggcacggatactgatactgcaaagcctgaactctccccaagcattaagggcatttcaaaactgggcttgaacgctacatctggaaaattggaaagaattatgcctattttcatcccaa

SEQ ID NO: 262159 - DNA, 378 bp, Glycine max
aaactcaacttacgagctctatttagttaacttgacctcttatctactagaaatcttttaaaggttggagcttgcctgttatagtaaacaagtcacgccgatatcaaaacttaaataggtcaagccataggtccttgaaaagttactctactcattctcattactactccgaatacacgtttcattatggtttataatttattaaaaattataaatttacgataggctaagaccgagacctaattttataatgtttaataacatataatcgatactatcttcccttatgtcactcaatcttaaagaatctatcttaagagtgaattagaaaacatgttactactatatcttatatgcatataaagcctgcataaactt

SEQ ID NO: 262160 - DNA, 423 bp, Glycine max
agcttcttgaggaagcctcttaatgaagctttctttgtaatctacatgagctgccttggtaaaaacgttgcccatccttctgtaaccgatggatcttctcaaaatctggactgtaacttcacaagaaacttgtccatgatctgaccattgggatctttgagaagatgtctggagtgtgcgtgaaacttccgttcccgagagcatttctcatttaagcattttagcctttgctttcgtgtagcttaggaaaaacaccattacttcttctttctttcttccaaagccatttctaacatcccaagcactttctccatcacccacaggcaccattagccaccacaaaccaccctttgtttttgttgaaaccccacaccacaaggaacccttcaatcaaagcggaatcttccaacctggctcgcggtt

SEQ ID NO: 262161 - DNA, 433 bp, Glycine max
  unsure (1)..(433): unsure at all n locations
cgcctcanagaggtccaggaaggataaagcggtcgaaggatccagttccgctcccgagtatgacagccaccgctttaggagtgctgaacaccagcagcgcttcgaggccatcaggggttggtcatttctctgggagcgacgcgtccagctcagggacgatgagtatgccgatttccagggggagatagttcgtcggcggtgggcatcactagttacccccatggccaaattcgacccagacatagtcctcgaattttatgccaatgcttggcctacggaggagggcgtgcgagatatgagatcctcggtgaggggtcagtggatcccgttcgatgcggatgctatcagccagttcctaggatatcctttantgctggaagagggccaggagtgcgagtatggccagaggaggaaccggtccgatggttttgat

SEQ ID NO: 262162 - DNA, 427 bp, Glycine max
atctttaagccagggccacattctcatgcatgcttatgctttttcaagaaaaactccaaactccatttgcaaatttgatttcaggcttaaataggtggccttgttcgtgctcgtgcgcttagcacacgtatggaccgcttaacacacgttagtgatttttggctcagcgcgcttctctggcttaacggatgagctgaagtggtgtgcttgatgacctaaagcggtgcgctcagcgaacgtgacaactcatcttcttttggattcttcctcgtgcttaaccactgagtttcgtgcttaacaaatgcgcgttaagccagcatattggcttagcgagaaggtgaaaataacactcttgccaatttgcctaattaacctgaaatcgagaaaaattgattattacacacaccacacaaaagtataaattatc

SEQ ID NO: 262163 - DNA, 407 bp, Glycine max
  unsure (1)..(407): unsure at all n locations
caggctanattagtccaaactctcataagctatgtaagctgtattctattcaacaagagggatctgatgacgacacttggattgattcaatctaactatggattgaggttcaactatctaggctacaacataaaacataaaagcatgattgattagagaaatatctttatatacaataactcagttcgtagaaagacccaacatctttacctactgcgtgcacatttacttgcattttactattttagcctagactaggtaatcctgtctaaatcccaattataatgtttctttacaatgcctatctcgaatttaacccgtctaaactattcctgagtcgatctcgattcatcatttaatttaaaacttgacaccagtgcacttctgcaacagatttcctgaaatat

SEQ ID NO: 262164 - DNA, 206 bp, Glycine max
caaaaagatactatttttttttccaagaacgccaaaaaatacttcgaggtgtgtgcaaacctctaatgcacagggtgactttatgtataccccaatactataaaaaagtcgtataacctttccaacggctaatataaaatagcctgccaatttctgacaaacatatatttaaagagccaattaataaacttaaaagtaatcttttt

SEQ ID NO: 262165 - DNA, 346 bp, Glycine max
gccaagggccaaaagcaactagatcttggataacctttcgccttttctaaactaggctgtaaccctcatatagcccgcgtccacgctcatctctagcgtcatatgccacataagaagctggttgggccaggattctccggacatgacggtattggttggataattaaaaaataccaggtcttcgtgtatcaaggagataccactcacgaacacctcaccgtggccacttatgtcatggatggcgcctacgtgccgtgggtatagcggatggcaccaattgactaccttatgccatggtcgatcatggttgaggccttacagacgagggacgccctttttttatatg

SEQ ID NO: 262166 - DNA, 396 bp, Glycine max
  unsure (1)..(396): unsure at all n locations
ctcaagaatactgtgcataagagacgaatagtcatcttctcttataatgcggtgatggacagcgaccttctgtggcttgtactggagcattcttctctacccaagaaccatccctctctttgaggtaaccgaaggaggaaactacattcgcacctatagagaaggatctcttgactttgacaaagggctcacagtcaagacggacattgaaatgttatagaaacaaagtaatcaaatgacgatatgggagcggagcatctgatcgcaatcgccttatgcatctaatatctcacaagatgggcccagttgattngacgaccggttaagaaaacctacatgattatcaaatcttcctcagacacctgtgcaaagttggaaaatctatggagaacgatg

SEQ ID NO: 262167 - DNA, 340 bp, Glycine max
aaaaagaaaaaaggggacatccccatcaaaaaaaagaaaagaaaagtccccacgcaagcccaaaaacaaaggaagggaaagctcctaacaaaaaacagaagaagaaaatccccccatcaaagagcgggaaaacagccaacgaaaagaaaggaaattccccatccaaagaatgggagaaagtgatatacgaagaacatgaaggaaagaaagcccctgaacggggatcgaaggaaaaacaaaagagatatgcagagaggtctttggaccggacaaaatctgaacactcacaattgtcaccaatgacaaaaaaaaggaatgaaaccccacccagaacgccttc

SEQ ID NO: 262168 - DNA, 393 bp, Glycine max
  unsure (1)..(393): unsure at all n locations
taagtatgcccgatcattcatacctatgagatgttgttgaagtctcggcgatcagaattgccattccttggattatacggttgaaccaagctcatgcttttacaaaaaggttcatcaagtcaagttgaaatatggaagtaaccgccttgcaaaatnggggcaaaagatgaatcgagtcacatcactgcttcggttactgccatacatatctacgattgttgatgtccttgctacttccagtttcaccttgacaaagatgtcatggaccatgttgaaaatctaaatcgattcaaccccatatcctgcgtgaaaatttgcaacactctaattggacatcattcgcatgcattcatgcttttcattgtgctgattgctaattgccattctttcttg

SEQ ID NO: 262169 - DNA, 383 bp, Glycine max
tatacctcccggtgacgcgctcaacccatttcacttacgtcgcttttcgcttcgcttaaaaatcgtataaactttcaccgaaccgtcgaatcgtattatccattagctccggcggaaacaaataccgaccgttcggtcgggccgttcccactttggatatcatacaagaggtgcaaataatataatacgcctaaaacatctgtgagtcaaataaagcggaacatcaaggggacatttcctctatgggattcttcattcttaatccgactgactaatcactacagagaaactaacggctatacatcattcgcctacgcaagctcgtcatatagaatggctatgacgcttgtctctcgtttcccactcagtacatggcacatctc

SEQ ID NO: 262170 - DNA, 418 bp, Glycine max
acccgcagcatgcaagcatcaataatcttgtccattggcttatatttatgcaatattatcgctccgccctaagggaactgccaaaaccaagtgacgcccttggtggcctacctgtaattgctttggcatattattatcattgtggaagaaagaccattcttttatcctctcatgaagcaccttaacatggattctctgttccactgatggttattacccattacattcataacatgttgtggcacaaactgcatacgtaattggcatttttaaaaatgcaaatgacatgatgcacatattggaatttatatacatttgctcattacataccatttggcaacaaacaatgttattgcataagtgatcctggattcccatactaaatcatgcgtccatgagtgcatacctttaaatcaac

SEQ ID NO: 262171 - DNA, 375 bp, Glycine max
cggacacaacaaactcacttataaagctggatgtgtagaaacaagctcctacagctttgtacaacaacattgatgcctactttaacactcaagggtttaagagtgaaaatgatgccactctttatgtgaaaacgttgttggatggcggctctttaattgtctctgcgtatgtcgacgattttcttatgactaacctttatcttaaagaagtgcaacaaccgatagtggaaatgcaaaatcattttcatatatcctacttatgaaaaacgaatattttctatgcttggagccatccaattgaagttggtatttttctgaatcctgaaaagtattgctatgaaattttgaagaagattagaatggaaagttgcaaat

SEQ ID NO: 262172 - DNA, 416 bp, Glycine max
agcttgaccaggaattatttgtatgggttggatgttgaattctggctggtcctggcgcggagatgatggtacaacgggtgaaccacaagcggaagtttcttttggtgaggaagccatggaaaaacagagcgtttggaatgatttcgtaaatctcaaaaaactattgggaaatgctggagaaaacacgaatgccaagcaaatataaatttgaatgaagaatgtagaggggcgtgtgaagcaacggtcgaatttgctttgtggtgaacgtgctattaatgttaagtgattcgtttgggcacgttcagattgcagtagctgctataattcctctaacaaaaaaatgcccagcttgcccctcagtttttcaaactgatttgcatccaaagcctttgtgaaaatatctgctatttggtcct

SEQ ID NO: 262173 - DNA, 314 bp, Glycine max
cccctgctgcaactcgccaccctcaatctatctcgtttttttacacgaaccatgagagagccggacgtacctctcgattgtcacccaaccgaaactctgcttcgcttaaaaagctcgctccttcgaatcctgcatggaaccgagtctgaaatccgccgatctggggcgcgcaccaatgggattacaaatctacgcggagatactgtgcaagataatctagagtaaaatatgctccaaatggccatatgtaaagggccctgtatatacctttgaagtaaacacttactataaatgtctgctatgacaaacgaccc

SEQ ID NO: 262174 - DNA, 403 bp, Glycine max
tctatagatcttatacatctatacgtggactatctcaaactctctgatattacgctgactaagactttgcttacacctccttcaaagtgatctgagtaacctctctacatcatttggcccatgctcagaagatcttcttttatcttgtgaactaatcatacattatggatgagacgcgtacctttatttgtgttcaccatgacagtgactttgctttttgattcaaccgcacttgcatataccagtcgaactttgactttgacaactcatcaatgcttctgaaaattagctcatccttatccatgtgattgctacatccactatccgagcacaaactttctcccttatcttttatcgagtcttgagtggcatagaacatacattgattatgaatcatgctctt

SEQ ID NO: 262175 - DNA, 418 bp, Glycine max
agctttaatcgagtgtgccacttgtctccaaaattatttacttttcccttttatatatctttctatatttgggggcgacaagggtattgcccttgcttttacgtatcctcaggtgcgatgaagaattcagacctacgtcgttctttaagttcaaatgtttgtgtgttaaattgattttatgtttttgaaagattccttttaattgcaaacaaaaagtcatttaaggcgttagaccttgaaacgaatgtttaaattttgaaaagcggagagaatcgttaaggtgtttgacctttaaacgatcttttaaatttgaaaagcggagagaatcattaaggcattggatcttgagacaatctcaagtgatatttgataaaaagaagttagctatgagttggtcttatcttggctttgtctatta

SEQ ID NO: 262176 - DNA, 363 bp, Glycine max
caactatgacatagcggcgtgggtgagaatgtaatatacaacaacacatgttccaatttcaaactattataaacctaatcaacttacccttaattctaatttcaaaaaaactcactgttttcaaatattaaacagtgtataaaatttaaaatgaatactatggatcaagttggatccgtacgttccttacggatcaagttgaaccgtaacaagcttacgcaacttcatgtgtactctaacgcctacacatatggatcatctatttatgcttggggatcatcctaactatgggaacgactaacaaaagccatggttagggagctattttgactggggagggtgatgaatcttccttcatgggga

SEQ ID NO: 262177 - DNA, 319 bp, Glycine max
ccaactcgcttgagtggcatttatattggttgtcatctcgtatgtcgcctctcacacatatcatacttgatatgcatcctccatcatcatagaaagtgtgaacaaaagtttcaaaagtaagaaagctcttttcaagaggcaaaaccctctgttgtaatcgattacacgatttgtccgaatcgaatacaacaaattgtttgaagcttggagaaatgagtcctcgctcagtttaatcgattatagcactctcgtaaccgataacactgttgtttgagacaatgactgaattattcaagagtctttattttaatcgatcacc

SEQ ID NO: 262178 - DNA, 188 bp, Glycine max
aaagcggccaaaaccaaaggaggaaaacgggagggcgaaaggaaaaagggaacaaggcgggcaaaaaacgagcggaaaacaagaccgaaacgaccagaggaccacaaggccgaaaggcccgaacgaaaaaacaaaccccagcaaaaaccccaggaggagaagcaagaaaaaagaaaaaacgccaaaaa

SEQ ID NO: 262179 - DNA, 424 bp, Glycine max
  unsure (1)..(424): unsure at all n locations
ggaaaatgatntctatacaaagacttttttatatattagcgactaacaaactcccccaaatntacagttttgcttgtccttaagcaaagaaagaacagttcacttgtcctcaagtgacaaagacagtggccaatcaaaagaaaatggtgtttgattcatcaagggcatcaaccatatgaactgaataccatggaatgcttaaatcaattaattctcacaagcatgcagtttttcaatgataagagcacaagtattagagtcacagctgaaataagctagtaagcacaagtaggactttctatgcttgtaacggggttaggctgccaacaattcatggtttttctaggattcaaaagcttatgttctaggagagcattcatccatagaataaccttcactttttcattcattccttccccatact

SEQ ID NO: 262180 - DNA, 399 bp, Glycine max
tgcagctttaccaaatggccgaggctcaatgtcctctatacatggattaatattggactaataaagaaatggctctttggcaataaacaggaaattaagtgcatttaccagctgactataggaacacaaaaacatatgactctgagaaaataggttcttttttaatccaagtcaacactttgctttaatgaaaagtcctgtatagactaaaccataagctgtcagtatgtacaatgcctcaacctatcttctgagaaaatcttccatattttcctgccacaaaaattatatttagaaataaggcatcaattttgaagctgctcctttcacatcataaatcattagacagtcactcacttcaagtaaatatcaaaatctccactgtctagcttttccttg

SEQ ID NO: 262181 - DNA, 419 bp, Glycine max
gcttcagaacttgagaactggggttgcactgtttccatttggataaattctgctatactctgtataagatggttctcaaaatctccatcatccctttgaatgtccttgttaccatatctgacaatgcacctatacattcgatatggtctgggacaaactcggccaataaggaaacgctctttatgtgaaacatacggaacaggaactgattttacacaaacaaaaaccaacaccttgtgaaatgcaggaagatttgttacaaaatgggaaaatattgcaggtattcctgttgctagttcagtgtagatgagaccaatccccgggacacgaacaatgccaaggcttgggcccaaacccagtaaccatttcaatgaaactttgttgtgcagatcatagctgtacttcctaccagttccata

SEQ ID NO: 262182 - DNA, 408 bp, Glycine max
tgcagctgcattggattgcgaagcccactttatcttatgattagaacctgacatctcaaacaaacaaatcatacgtgacaagacaattatagttgttgtgtgaataccttacccactcgagtgtatcacacaattatggcttttctctaatgaaacactcttgccttttatcactctaattccccttgagttcttaggcaattcaagagattatggccacaacaaagaacacatcaccaatatgtgtaaggtaaggctagagagacaaggaaaaggttgaccaaaaaaaaggctaacaatgtttttaggcacaaatgaaggaaataaaattcagaatttaggaattcaagtaacaatcctttatgcaaccaatatattaccttaaagagatttttttaaagttcttca

SEQ ID NO: 262183 - DNA, 376 bp, Glycine max
tggtcgagtacaggaaccaggtgcaggtggatgccatgtccgccaaaaaggataatgataagcctatctccaacaaagctcacgacgaaggatgagggatgccacctcgaatataatgttatgctgactacattccccttaccgccaataaatctcatatcatggatcaggccttggccatagacattttgactatgctgaaaagagctaacaccccaccaaaatccaactactcaaaacgttatcgatatcagcacaatcatggtcactcaacaaaggaatacaacgccttgaaagacaaaatacaagaacttatcaagcttggccatctaaaggagttcattcacaagccacagtcaaacaggcccaacaattt

SEQ ID NO: 262184 - DNA, 418 bp, Glycine max
  unsure (1)..(418): unsure at all n locations
atcaccgcagcctcaagccgaaaaagcggcttgcattattgttacttacactcacggcgtcctcaacataactatttgggtacaagtattgcttaactaattaacaatcattcttatactttattcacggaaccgatgaagacggcgtcgantgcttctcatggcaagcaattgtgggaactttgtaaagagaaatatgaacctttatggctcaaaggagggaaccactgtaatctggaactctatccagaagacctacgacatctcagaaaattcatatctataatagaaaactcaccatcgcaggggcaaacttagtggaaaagcataggtggagttgaacaaaccacaagaagtgttgattgctttgaagctccgaggatgagtgcctgaccttaaggacaaaccaaggaaaagc

SEQ ID NO: 262185 - DNA, 412 bp, Glycine max
  unsure (1)..(412): unsure at all n locations
tgcaagcttcttttagacctcgatcggttgtcttttctggccgacgacgactgtcatttttttcgatcaatatcggngaataatatttttttgccgaggtgggctaatgttttcctggccgaataaatgggaatatgccagtttcggccgaaacgaaacatcggttgagatcacacgaaaaaacctagccgacctacattgtaagttttttatgcgacacccaaacaagaaaacttcccctgctgtaagaaaaaacattatcgaccagcgagcgttttttttttaaaaaaattgcgcaatgtcggctgaagaatatatcagtcatggccatttcacgaccgatgtcggctattgatttttctattcaatccctgaatgaaatttgcaagatgttcattaagaaatgtttgat

SEQ ID NO: 262186 - DNA, 345 bp, Glycine max
agatatgtgccgggggtcaagagaccttgccgtcgtcacgcgggatgctattgcccaaaaccaagcttgaccaatcccgacccaacccgggcatagtcagccagtgagaacctgtgacgcacctaaacaggcgagcctctggccggcaaccactaatagaacaaacatcacaaaccccggaggcttgtgcggcggttggccatccatgaatcttgagcggtatctggaattgggcctctggtaatccaccaccaagggcgagaaatccggtacaaggctctaaaacggagacaggaagttaagacggcctccggtaaccattaccaagggtgcggaaccgaccac

SEQ ID NO: 262187 - DNA, 417 bp, Glycine max
tgcagctgccgccctgagtttccgacatgtctttgtttgtggaacaagctaccaaaggagagagcatgaaatgaagagcccatggttgatacatggacggagatgaaaaagatcatgaggaagtgatatgtgccggctagttactcaagggacttgaaattcaagctccaaaaactaacccaaggcaacaagggggttgaggagtatttaaggaaatggatgtgctcatgattcaagcaaagattgaagaagatgaggaggtaactatggctcgatttcttaatggtttgactaatgatatccgcgatattgttgagctgcacgagtttattgaaatggatgatttgcttcacaaagcaatccaagtatagcaacaattaaaaaggaaaggagtggcttagaggagttttaccaact

SEQ ID NO: 262188 - DNA, 302 bp, Glycine max
cagagaatgctgcctctacaatcgaaacgttgccaaaacacattctctgccactaccattaattcgcgggaaactgcccttggagggaaaggaagagggggaatgtgccacttccgcaaatcagaattacctatggaagaagaatcacccgcacagaaaaagaaagggaaactgctgccaccacctaaatccggagtaaagtgaagctcgccaggttcatttgcacaagaggaaggcgccacgggcggaggtccttgacaccgctaacccgacctccaagaaatggcatcgaccaccccggg

SEQ ID NO: 262189 - DNA, 417 bp, Glycine max
  unsure (1)..(417): unsure at all n locations
ggaccttaaagcacgcagcagcacaaaaaacaaagccttttttcaaagcaggaangggaccacacagaataagccaggctattgtgcaagcaatcaatggggccaaacacaccaaaagattatgatgatggatggctcaaattctcacaaaggtaaactcatcactgtcaaaatgagctctcaaaactatcatgacatgtagagaagaaacaaggattccaagtcacaaaatggcaagaactttcattttcaaaacaataacccatttcttgaacatatcctataattcaaagaaaaacatgcaaattcgaacgtgcacacaaaattgacccaaaatattaaacctgaaaatccgacgaaactaacaacaataacaaatgaacacaactaataaaataaccaaaccaacagaactac

SEQ ID NO: 262190 - DNA, 423 bp, Glycine max
  unsure (1)..(423): unsure at all n locations
acctctaagcgacngcagcatgcagcttataaataatagccgctttactctttctatacttaacacgaaatntatgattaagaacatatatctactgagattaaactcatacatgcacaaacgacacaccatagagttctctttgtcagactaagttgtaattcttagagtgttacaactttaacttattttaattattctatatcatataattagacactttaattagtcaccaactagttaaaataaaatcttatttataaactagttatatagtcatttatgaaaatgccctccactttcttatgactcaattactctttttctaattctatggaatctagatcacctttaatcaacacttattcccacttaatttctaactgtacttacattaattactaatattcttcaagcttctaa

SEQ ID NO: 262191 - DNA, 365 bp, Glycine max
ggggaatctcgcttaaaaacacgctgaggaatttaaaatctacactaaaatagtggagtaaagagaatggggatgtcaatatcaacaaaatccatcacctgaggcagaagctaaatgatattgaagacactgcctctgatagaactttgtctgaggctaaacttatggctaagaagtccatccagcatgacctgggggaggcttcaaatgcctatgattcctattgagacataaatcaagggctaagtggctcaaggaaggtgacagatatacaacttatcttcacaaaaccataaatttcaaagaaatcataatgccatccacggaatctttattaatggtgtatgggttcagcaacctaaact

SEQ ID NO: 262192 - DNA, 368 bp, Glycine max
  unsure (1)..(368): unsure at all n locations
tagccagaaaattatgactaattaattggctataggattaagctaaataaatcgttaaattacataatattctcttatttattattagatagtaattagagatttattttgttactctattagattgatgaatgtaattaatactgatctcacttactttttttaaataaaggcttcatgtgatgatcaaaacacacacaacttacaacttacaatagtacaacatttttatatgatattagagcaaaatattcttatccttggatgaggtatcactaaaatcctgtcttacccggattccactgtccccagtgggccatccgctgaccttttcaataaccagnttaaacttcacggccgaagcttcg

SEQ ID NO: 262193 - DNA, 198 bp, Glycine max
caagacccacccccgaaaggggccacggaacggaaaaaaaacccagaacacaccccgcggcaccgcgccgacagaaaccaaagggacaggggcgaaaaacaaaaaccaccacagaacaaacgcaaaaaaaaccaccccaccgcggagcacccaaaggaaaagggaacactcgaaatcaggggccgaaaaaagcagaac

SEQ ID NO: 262194 - DNA, 260 bp, Glycine max
ccgagggaggggcgaaaagccaaaaaccacgcccccacaagcaaagacgccaaaaacacgcaaaacaaacggcacaagcgaccacaaaaacaagccacggacaaaccgcaaacgcccccccccaaaccgaggaaaagaaccaaaaaaagcaaaaacgagaagaaaaccccccaaggacaaagaaggggaacccaaaaacacaaaaaagaaggcccccaggggcacacggcggcgcccacaaaacccacacaccacgaaaa

SEQ ID NO: 262195 - DNA, 389 bp, Glycine max
  unsure (1)..(389): unsure at all n locations
ccctcgtatatttttggactcatggncactatgaatgacaaaatccttgggataaaggtagtgtagccatgttttcaaaacccctactaaggcatacaactccttatcataagttgaatagttaagggtaggaccacttaacttttcactaaaataagcaattggatggcctctttgcatcaacacagccccaatcccaacatttgaagcatcacactcaatttcaaaaaatttttgaaagtttggcaacccaagtatgggtgcattaattagcttttccttaagaacattgaaagcttcttcttgtttctctccccatttgaaaccagcatttttcttgagcacttcattgagaggtgctgccaatgtgctaaaatccttcacaaatt

SEQ ID NO: 262196 - DNA, 363 bp, Glycine max
gcttattcacgcgctttacgcgaacaaataaagcttatgtatctgtgttttttttttatatatcacaaaatgctagttgttagttttttttagcaaaacggatcaaatacacgacacgatcattcttttctttccttgtcaaccttatatatatatatatatatcccaggttatgtatttgtgaataatgcaatatctattattatgagtttgtaactgatcgcctctgctttcttccgtaaatctagttttgtccctaaagggaagacaaggatatatgatgctggcttgtttggtctgattggagaggaccatgatgaggcgggtttttccctgttgaagagattagaaaccgtacttttt

SEQ ID NO: 262197 - DNA, 232 bp, Glycine max
tgttccttaaccaaggcaagaaaagcctcatcaaagcaagacaatgcatctgaaagataattttgctcaaggcgagcacagccagtcttgaaacatactgaagcaccagttccacggggaacctaacatacgatccatgaaaagagaatgggaacaatggtgaaacaatatatatgcccaccacgctaagaaaaaagccaatttcctagctgtattaacagaagaacaaacc

SEQ ID NO: 262198 - DNA, 400 bp, Glycine max
gatagacccagcgcacaacgtatattatggaatctaaacccttgctaagagaaccactccaagtccagaaacttgggttttatcacattctcactgcgtataacatcttgaactcgctcttcttattctacttgttggatcaagcggcctcaaaataattaagaagggggggttgaattaattattcctaaacctttactaattaaaaacttactcttctaaggcgtttactatgttgttaagtcaatgaagaatagaaaagaaacttaaccaaaagtaaaagcaagaattaaagtgcacaacgaaaattaaaagaattaggaagaatgagacaaacacacaagagtttttattctgattcggcaacaactcgtgcctacatctagtcccccagcgactt

SEQ ID NO: 262199 - DNA, 405 bp, Glycine max
agcttgccacccaactcgcccatctttcatgtttgctttctccagaagcaacagccttttggagggcccaattgggcctggttgctatttgcacccccatttttactaaatacaccccctacctttgatggtgattcttttttcgtaaagctacggaaacttacgaatttcgcaacgatacttgttttctttcccgaaatgtacggaaccttgcggattacataatcatccccttttttgacttacggaatgttatggaacctcactaattgtgcaacgaagcttccatttgaattccggggggtcacggaaccttacggattgtgcatcaatatttttttttgaattcccggatgtcccggaacttcacaaatttgctaatgatgggtgccaagcaccttacaa

SEQ ID NO: 262200 - DNA, 372 bp, Glycine max
ttcctcgatggtccaagcgctccatttctagcataagatattcattgaaagattcattaatgccatcactgagatttgaaagccccaaatgaatctagaaaagaaacacaggagattaagattataaatcacatacagaaacaaacatgacacatcattccaggcatcataggacaagatacataaataagcacctctacacacacttcttgagaagaaaaaagaaatgtcactttttaacatcctcattataaagattttttacactgctttgtagataatctgctaccgcttatttgatctaagatgtctttgcatcttggctctcgtttccatctctggaaacaagaaaaacatttaaccccttttaaa

SEQ ID NO: 262201 - DNA, 410 bp, Glycine max
agcttgggcaactgataacattctttcttctttttttcccgaacccagtgttctaggaaaagaagccctgccggggaaggacggaccttctggatggaaaaaagagatacttgagtacttgaaacacgagacactctcaacatacaaggggaaagctacaaagttataagcgcaagctgccaagtataccttagtggccggtgaactatataggagagggttctcctttgtcgcaacctacccttcaaagggaggaaggcgccgcggagtctccaccaacgtttatttgagtgaaaacgtcactaaaaccggaacggtgtattctcacaacctcttttgcgacacgtccgggagttgttttacgcccggagaagggatttccacccccactttctgtctcagggggcgac

SEQ ID NO: 262202 - DNA, 370 bp, Glycine max
cgtggcatgcaaccccatcctcaaaactagcgttcgttttccatgcgcccgaatctgacctcgcggggacaagttatgaccatttgaatctctccagagcttcctgtgatcaattacgagtgacttgatatattatacgcctgaaacggacctccgagtgaaaaattatgaccatttgaaacgctcaaaagcttcccttgtgcactataccccgactcgattaattatgcgcccgatatcggacctcctgagaaaagatatgaccatttgaatttctcgagagcttccgttgttcaatttcgagcgtctcgaaatattatgcgcctgaaactgacttccgggtgagaactgatgaccatttgaatatttc

SEQ ID NO: 262203 - DNA, 272 bp, Glycine max
accacattttagacctgctttcatcatcaagggctgggtgagccaaatcttccacttcttctctcatcttcaggtgcacaaaacctggggcgaggactccaaacactggggccaaatatgacaaccaaggaatctaaactataaggcaccgcatcccgaccaggccaggagatccattcctccaggatgaagcctaacccgcttaacagcgggacaaagctagtgcaaatggcgtaaatcaaatatgaactaaaacaaaacacctaaaaggc

SEQ ID NO: 262204 - DNA, 402 bp, Glycine max
  unsure (1)..(402): unsure at all n locations
agcttgaaacaaaacattttgttttacctttgatganggcccggctgtgcccgcattgaggattaacaatcctcatcccaacaacacttgcacaaatttgattttcactctaacgtcttttctgttgagagctcttgcataactttctcttagtccttcataaggcatgggtttaacaaaaataaatttggtagaaagccttctttttctaaaaataagaacaatgctgttaataacaacaataagcctaaggataaaaattcggggaatgaaatttcttgctttgtttgtgggcgagctaatcatttggcttaaaattgttttcaacgtcatcgccagcccatcagtgctgcctctgattccccatctgacaggtaccatgtcactagccctgagttaaat

SEQ ID NO: 262205 - DNA, 343 bp, Glycine max
ctttgacccacagctccaacaacaatgtagggttttcctcgacattttctttgatacgaggttctgtgggttccagcgagcggtttccgacagtattgaaatgaatgtggggcaatgtgggtgtcaaccgagcgcgtttccataaatttctcgtgggaggagaaaaacaacatacagtgcaccaaggttttcaagcgcgtgagttgtgaaatttcaacacgttttaacatattaacataacaacatcaacatccgttttttaaggataaccgatgttaggatgaatctgttaacatcaattttgtcaaaaccgatgttaacttcaacaagggaacatcggttt

SEQ ID NO: 262206 - DNA, 102 bp, Glycine max
  unsure (1)..(102): unsure at all n locations
cgcagctgcagccncaagacagaagccaatttcatttgacggtcacaatagacaacaaaaaccatgggaccctcttaatggccacaacacaagaaggaaatg

SEQ ID NO: 262207 - DNA, 343 bp, Glycine max
tgggtctgataaaagcaatttgatcattctgctttgacaaataaaaagcctggggaaaatatagaggacaagaaggaggaaggaacccatgctatgattgtcgttcctacatggccaaatttcccaccaactcaacaatgtcattacttagccaatattagccctttctattaaccaccacccaatcatccccaaaggctatcccctaaattaaccacaaaggcagcctaccgcacatccaatgccaaacaccgctcttagcacaaaccaatacaccaacccgggagggaattttctagcataaaagcctgtaggattcaccccaattccggtgtcctatgct

SEQ ID NO: 262208 - DNA, 369 bp, Glycine max
aatgctgcccagccttcattgaccgatggatcatttcgaaatttggtctgatacttcacaaaaaactattccatgatctgaccgttgggatctttgagaaaatgtctggagtgtgctagaagcctcttaatgaaacttctggaggaaaccccttaatgaagcttctagagaaaactacatgaatctgccttggtagaaacgctgcccaaccttctttaaccgttggatcttctcgaaatttggtttgccacttcacaagacactttaacaagatataaccgttgggatctttgagaaaatatctggcgtatgctaaaagcttcccgtcccgagaacatctcttatttaagcatattaacccttgctttt

SEQ ID NO: 262209 - DNA, 299 bp, Glycine max
ccactgaaagagcttataaataatctgaacgccatgatacttttatatggctaataaatacaaaaaaagcttctgcataaatatttactcccaaaataagaccctcttactaagatggagatcgatggtaacctgaactgagacttgtgaagaaacttggagttcttatactggggagaaacataggctatcagcgaggaatccactggatattctgataaatccactctttttttttttatagccacaactacagcttgagctaaacttgttagtggagctgggacggatgcttttac

SEQ ID NO: 262210 - DNA, 427 bp, Glycine max
  unsure (1)..(427): unsure at all n locations
agcttaaccaccaagcagaaactatctctttagttaaccacttggcagaaaaaacaaggcttaaccatcacgagaagaagctaaaatcaatgcttaacccctcaagacagaagcaaaataataattcaatgcttaacaattcatggcaaaagcttacacaatgcttaatcaccatggacagaagcttaaatcaacaaaatagaagaacacaaaanttgtcttcaatgaagacttttcacaaacactttgtaaaccaacaacaactaaggtttaactatccatggtagaagctaaaataatacttaaccaccatgaacaatagcaaacaaatgagcaatgcttaatcaccacacatggcagaagctaaaatcataaaacatacaagcctataaggctgaaaacaataagccaaaatcttcataagcat

SEQ ID NO: 262211 - DNA, 445 bp, Glycine max
tcagacccgaccttaatcactcagcatcaccttgcactaatgttttgttatggtctattacctactaaccgcatgcaagctgatgacatggtcgcaatgtttttaaacgaggttggcgtaaccccctgaaattctgcttactataaatcaatgttcaattgtatctatcgcgtcatttaattatacgattcacttgaatgagtttagatatggtgtgaattactcatgtgtgatatgatcgatgcggatgttgagctatgtggagttttattgacctaatttgaaatatgagatttcaaatttattaaacctatatggtaaaccgtgatcttatttgtaacctctgatatgttcaacttgactgaagttccaaccatgacctatggttgctgtgggatttccaaaaacaatgtttaaataacatagtggactcttgctaacgtat

SEQ ID NO: 262212 - DNA, 278 bp, Glycine max
  unsure (1)..(278): unsure at all n locations
cttcttgatatcatcaaagncttcatgatttacattctccccctttttgatgatgacaaccacctgcaagttaagagcaacaacaaagaaaaaatatctatttgcatatagtttactcccccttaggtttgaaagattgcttatatgagactantgaagatttcatattnttcatactgaaacaaattgtctcataaacaacaaataattnttcttactatattatctctnatctttctctccccctttgtcaacatcaaaaaccaatcatgaattga

SEQ ID NO: 262213 - DNA, 462 bp, Glycine max
  unsure (1)..(462): unsure at all n locations
ctttcctcccttcttactccatgtcttggagttaattccttgattattatttntcaggggagacaagggattggctacaaatntctgttatttgtacctattcgatactacaagctaatttaaaagcaaaagcatgttcaacatagtagaaaactttttgggaaaatggagctgagacttcctttcacatatttcaatattgggggttagccatgcatgattaaaggttntatgacaggtttcgtagctttcttaatgcatgcacattgccctttggggtagaccttggtacgaccttcgcttttgatttttgtctcactgtcaataaaaaaaataaatgacagtgagagtgagcctgattaaaatgacaatgagagcaagccttgtgaagcactaaagatgcaccttgggaatagattgttattataagttcaaanttcaaaacaatctctttgtatatgt

SEQ ID NO: 262214 - DNA, 488 bp, Glycine max
  unsure (1)..(488): unsure at all n locations
atccttaagtcacctgcggcatgcaagcttaggtgattcttttgatgatcccaaacttattcatcttttctcttggagntnttnttttttttttgttagagaaaaaatgtaaaaagtaaaaccatttttcctatgtataaggttttttagtgcttgtattctccaattttaagagtgtcattattttctccttgaatttagaaaggtcttgtaatcttttccatgtagtgaaaattgtcggtaagttcttgtagtacaatggccgcactgaggttataaaatatcaatattgtaaatagttgaaccaacaccaagaaaaagtctttatcaggtgcatacctgaacaccttgggaagaaatattgcaccaaggagcatctgatacttggtctccatcaactgaaatatgataaccgcttccctgaaagtaacagaatgggtacatttgaataataaggatcacacaagtatctgatatagaagtctatt

SEQ ID NO: 262215 - DNA, 393 bp, Glycine max
  unsure (1)..(393): unsure at all n locations
ntggatagagntctctcagagtttagcgcattggacactatgtatttataaagcattggatgaagtccattttgtagcactttgaacataagttcattcaaaacaagtttttggagttagaagtaagaaagattatacctataatcatattggatgcatgttttgcttgcatgactcaatagctcattagtccatcaaattagaatatctntggtattatgatctggctaaggagggagaccttggcatgtctcacacaataagacactagtttataaccgntagattcatatcattntaaattagagggtggaatgcattccttttctatttttctcttctcatagnntatccatatcttcttgttgaactagcaagccatatgttgcaacc

SEQ ID NO: 262216 - DNA, 408 bp, Glycine max
  unsure (1)..(408): unsure at all n locations
gaggtctgataatggtaaggagtacttcttttcatcactcatcatgttttgtgaggaagcagacattgaacattctataacagcttcttacacctctaaacaaaatggggttagtgaaagaaagaatcaaacaatcttggaaatggtccgatgtatgtttcatgagaaagagttacctaaggcatattgngcgacagctacaaacactgcagtatttttgctaaatagacttcccaccaaagcagtagatgagaagactccttctgaggcttggtatggttataaacccttcttgaaattttaacagtatttggatgtctgcgctttacttatgtgcctcaaattaagagagacaagctagacaagaaagttgaacccgatatctctgtgggttacagctcactatct

SEQ ID NO: 262217 - DNA, 316 bp, Glycine max
ctacattaactattatgcttcactcttctcttccataggttggttcttcattattctcccatgtatcctcctcacatgtcttgggctcaatgttgttaacatgactctttatagtttccaccgattaaacttgctataaaagctacatttgattgtctatggttcaaatttcttgttcttgttcttgaaccatgaattgtgtctgagttcacgttccttcgagattcatcttgataatttttggggctgaaacctaaaccactaaattcttacaaaaatattaacgtccagcgacacctccaaaatctagagtgac

SEQ ID NO: 262218 - DNA, 417 bp, Glycine max
agcttgtgctattccaagttcattttccatacctctgagtcagattgcttccttcactccttcagctagggccatgtactctgcttcagttgttgaaagagcaacaagtgattgttgatttgctttccaactgattgttataccaaacaaagtaaacacatatcatgttaaggatttccttgtgtctacatttcctgcaaaatccacatctacatagcctatgatcgctgcctcatgtactgtcttcttgtaccttaatccagctttcacagatccatttagataccttaatgtccacttcatagcttcccagtaagcactgccaggatcctccatgaacctgcttattatgcttactgcatgagccaaagcaagtctgctgtcaaccattccatacattatgcttccacacccctg

SEQ ID NO: 262219 - DNA, 355 bp, Glycine max
  unsure (1)..(355): unsure at all n locations
ttgcatcgcaagatagcttcatatgcaaatnaaagcctctcttcttcccagatgcaataatcatagatttggacaggaagaaaccccctcgacccgaattactgattttagaagtcttcctttttggacatctaattgcctctcctcaatacgaggttggcttctagagtagcactttctttccctttttgagaaggttgggtncgacccgaacaaaaccatcttcatcaaggtcaacatctaaatgcattattgctcctgcaattcagaggattttgaaaacagccacagcatttgaccctatgaattagaggtgaagaagaacaaacttattatcctgatcattcttaatttc

SEQ ID NO: 262220 - DNA, 313 bp, Glycine max
aggattgcccttgaggtccgcacttacgcaatcatgaaattgagctccaaactccaaagtggaggacacatgaacagccctaaacaagacattcatgtggctctggaaaaggacgagaatggaggattaccttgaggttcctctcttaagaaatcatggaatacagctccaatactcgaaaatggagaacacatgaacagccctaagcaataacattcatgtggcttccgaaaaggacgtgaatggaggattgccttgaggttcctctcttatgcaatcatggaatacagctccaaactcgaaaaggaggaca

SEQ ID NO: 262221 - DNA, 302 bp, Glycine max
  unsure (1)..(302): unsure at all n locations
ggctacttcttgctctcctctaaagacaanagcancatntctggcactatattgctaagatttagaagccatcctctcaattaaattcttggcttcagcaaaggtcatgtctccaaaggctccaccactggcagcatctatcatgcttctctccatgttactgagtccttcataaaaatattggagaagatgctactccgaaatccggaggagaaggcaactggcacatagntttctgaatctctcccagtattcatataagctctccccactgagtagcctaatagcctaacatatccttt

SEQ ID NO: 262222 - DNA, 417 bp, Glycine max
agatgccaaacaatgaacctatccacctttcaatgtttcctgtggcaatgactatggaaggtgaatggaaggtgtcgtatggaatttatagcatgattctagagaagtattaaagtgtatagtattcactttgacttgatctcactccccaaaatgggatacagacatagtaatagtatattatacactatgcatcttgcgtaggccaatttgctttgtaactttagtttctcccttgaccccatttaagtcctgcatatatatgcgtagctatttttatagttatagtgagtgagaatagccatgtctacttcaaagagcgtcagcagttctagtgaagatgacaatgaacttacaagagggccttggactcttgaagaggataattgctctcccaatactattttagtcatggag

SEQ ID NO: 262223 - DNA, 388 bp, Glycine max
  unsure (1)..(388): unsure at all n locations
tttttcgacgtcactttttataatctctttcaaatcctattggtaaaaaattaacataacatcaaactccccatttttctcattaagaataataataaataaatgaattctaattattccgaccaaaattgttatcaacaaatctcaaatttacaattatcatatagatgtgttaaataaaaaaaatattgaacttctcgctaccttctatgtaaagaaaaacaaaatacgtacaaacaaagatcttcttcttcttacatatactgattctctttgtacatacgtcacaaacaaactacaccagaaattttattgatacatnttcaatgtatttctaatacatcattcacatatatatttcacgtatatttcaaacaatattttataa

SEQ ID NO: 262224 - DNA, 480 bp, Glycine max
  unsure (1)..(480): unsure at all n locations
gatcttaagtcacctgaagcatgcaagcttctcaagggggtctttggtatcacatttaatcttgaaccattgtcgatgagtaccttagcgacgacatggtccatacatctgacagacacatgtagagccttgttgtgccctctctcctcaacgggaatctcttcttccgcaaacgcgatatagttattggtggttatatgattaacaatgccttcaaaaccctcaactgagatgtcgtgtgctacgtgggcttcgttgaggaccttcatcaatagtgcacgataaggctaagagtttatgagcagttcaagcaaagagattcttgtcggagttntattcagttgctcaactactntanactcgctttgttggatgagacanaggaactcatgaacctcttccaaagtcaccgcctttccttgaagaccttctttcttttcagctccttttaccaccggaggatccacttcctttgagggg

SEQ ID NO: 262225 - DNA, 168 bp, Glycine max
  unsure (1)..(168): unsure at all n locations
cacccgctgataaaaactttcacaacctttgagtgttgccctcgccggaaagatagattntttccttcctttcatcttcaaccttgggctttcaaatcacaattccaaaatatccacttntgcccagaattatctcgtggccataactcccattttacgcactcaaat

SEQ ID NO: 262226 - DNA, 243 bp, Glycine max
taaaacccatatctcatagatctctcactcttcataccatctaatatacggatggaaatctgtctttcaatggaaaaaacaattataacgcaattttgctaaataacctcttgatgctggctcattttttcaaaaactatatacacaataatacaaataaatttggcgataccatatgtattgacatctttaacaataattcaagacagtctctaacggagatcacttctgcaggcgatctaa

SEQ ID NO: 262227 - DNA, 391 bp, Glycine max
attttccttgagacaaataaagactacgttgttccacaccatgctgctctacttagcaattcgaagtgcccctttgtttcagggctttttccacctttacccgaggaaactacaaaatcaacgaagttctcttctatagccactcagattaaggcctgttttgtcttgccaatcatataaatgcaaattacctgcattgtgtttatctgtttattcttgatgcatgtattataaagcttcaactgcaatctttgcttgacaactatatgctacccagccacactacattcgttgtgtaaagccaaataatcttctgaagcctggaattgttcagccaataatgtgttgcagcaccttcgatgtggagtaagttcaatgccattttggctgt

SEQ ID NO: 262228 - DNA, 209 bp, Glycine max
  unsure (1)..(209): unsure at all n locations
gtcatcatattgcgcgcttagatattgtatactttaggggtaggccctggcccaataagtagaacaaatagctcaatgtggtattccacaaggtccaaggaagatcaatggaaagtacattcattcccaccttgttgctaaattaaaaagtaaattgggattngctctaaccattactcacgattagagcccaccctatatgataaaca

SEQ ID NO: 262229 - DNA, 355 bp, Glycine max
  unsure (1)..(355): unsure at all n locations
gctagatgattaaactaaatctgggttggactcaagcattttcttctttttatattcccacaatatataacatctactcataaaataggataacacattatagcctcctgcaaattccaaagaatcacatatttttcacactgcataggatctaagataataaatcgnagagagagttaataatagnacttacaactgaaattgactttgcaagcaactagtatcataactcagagagttaactaactagaatccaacatcttcaatgctttaagtcttctataccacaatattgcaaacaattgagntctctacagaaccccatttgcattataaagatttattatacgtactc

SEQ ID NO: 262230 - DNA, 392 bp, Glycine max
aaataaaagataagctcagggaccaaacacatgtgctatatatacacattctaccatcaaaaatgtatttagtagtcatcaccacccatcaagaaggtcattcaatattagacttttcaactccaaaattgatggagcaattgacattccaaaatgtacagaccaaacttatacatccttccacttggtctaaacattgtgactcgttgattaaaataagccaatgatgaatctttttaagaaatgaacatactaatcatagcgataattcctctataacgagtaatatcattcatgtaattacaacatgcctaatctcccaagtagtatactcaaggcgggaataacaactaataaacaacccattgctattcttggtacaaacataattt

SEQ ID NO: 262231 - DNA, 398 bp, Glycine max
  unsure (1)..(398): unsure at all n locations
ggacagggacttgaagagcctcgaggaatagagngacatccatcactgcttggagagtttcatggggagagcgagggaggaactgactctgcctcgtggatgaaaaaaacaggataatggctttggaatagagcactgcggactactttcactggaacgcggggaaagaccaagggctacgtatgtctctgatcgcgcgtgatttcttgaccatatnggacaacgtttgcagagaggtgagcgagtccaccgtgaacttaaccaaggctgcaagcaatagcgccacagaagcgactaggagttcaggttcttattctcaaaactccacaaatcgcctgtgatattatacaagctgctccgccattgcgagaggaagtacatactctgctctgacagga

SEQ ID NO: 262232 - DNA, 308 bp, Glycine max
  unsure (1)..(308): unsure at all n locations
tacatcttataccccatatttacagtagagctcaaagaatacaccagcttattgcctaacacccatgactagcaaaatttcttacacccataattacagaggaactcaaagaatgaaccagcttatatcaatgccttgcaataaataggcattcacctttaatcttgaatctacctgcaaaaaaacacaatttattaaacatacatcaaagataaactcattatcagagtatagaaagtagatctgagattatggntctcagttctcaccactgaaaacagagcagaaagcccaacaccaacaccaat

SEQ ID NO: 262233 - DNA, 471 bp, Glycine max
  unsure (1)..(471): unsure at all n locations
agcttcattaagaggcttcctcaagaagctttcttgtggcttctttgagaagctttctcaagaggcttctttgagaagctagatccttatttacccacacccttctattaactaaattaacctccttgaaaataattacggataaaaataacacaataaataatcgaacatcaaacataattactaataatatatagagatatatatatcagggtgttacaccttgattgcatcatgcatctcttcatggcatcgtaatgggcatatcattcctgcatttatcatttatcatattcatgcattgcattngcgtgagtcattgcattattatacatcttcatttaacatgcttttgttctacaaactgcatacattntatattcatcgcttgcatgttatgtctactcatgcatgattctcgcatttcctctgcnaaaaaaaaggaacaaaacaatacataaacaaaatata

SEQ ID NO: 262234 - DNA, 486 bp, Glycine max
  unsure (1)..(486): unsure at all n locations
cttaagtcacctgcggcattgcaagctttccaatctcagtgaacaaaaagcttctttttccgcnttctatgtcattatcggcttaggtatttccccttgtgtaatgacccatcaccgttacatggaactaggaactaacttaagggaaagaatttattttaattcatttaaaactcttcaaataattcatttatgaaagttattgtaaacttctcatgttttatagacccaaaaactaaaatgcatggtatcaagataaaacatcacatgatatatatacataaccaaaaattccaggtgccctatggcactccatcataatataaacttatacaacattagaccaaatcaaaattcctcaaaacatgcatatagacatnaacttatgaatataaacttcctagactctgagctggtcaacattgtacataactatcaagaggaagacaaaagggaaaccacatcttcacatccaggtatgcatgt

SEQ ID NO: 262235 - DNA, 252 bp, Glycine max
  unsure (1)..(252): unsure at all n locations
actccctattaaataaactaataaaacatcccttttattntctaaaaacatattcattctatttaccttaaaaccattattttaattaataaaaccatttatccctatttatggaatcacaaaaacctcattggttttcaaaaactctattnatttaaaaaaaaaccatttntaatctattttatgtaatacgggatgttattgaagctgatgtggtagtagcctatccttgttcaccaatcacaattgttc

SEQ ID NO: 262236 - DNA, 328 bp, Glycine max
accggaccaaagcaccgagctcaactggccacagaaaattcttttcaataaagcatcggggactattggaaacgggtacaaacgatggcacaggataatatataaagatagaggaaatcttaaggactcctaacataatataaaaacacagactgaacctagatctacaacatcataagaaaaaataagaggtccttctcaagaactcctctaggccttgatcctgaaaagaaaaaagatcattcttggcctcttatgcttctcgtcggaggcaggggaaaaaaccctcggcagaaggacatttcacgagggataaccctttaaccct

SEQ ID NO: 262237 - DNA, 363 bp, Glycine max
  unsure (1)..(363): unsure at all n locations
agctcgcttgcgtggactacatggatgctgtatcttcttgcttcaatgaggtccttcaatggtgatttctcacactggagatgcacnccgaaggctaaggataaaaagatacaggaggcgccatccactatggaattagccctggaagaaggagcttctccacacagaagagccttggataagaagccttgaaggatgcttcaatggatgaaaacatagagggatagaaagagagaggggggagctccaaattgaacgaataaaaaaggtggagaaaactaactttgaactgtgtctcatataactctcattcatcatagatacaacaagtgttcacatgcttcttttatagacaggtagctt

SEQ ID NO: 262238 - DNA, 207 bp, Glycine max
  unsure (1)..(207): unsure at all n locations
nctatattagctgaacctctttatcatataaacacattttttgtcctattcagaaaatcagagctcttctcttttatcttagagagagtgattctcctttattcttgagagtttcaagatcaccctggctgtatctaaagactttcacaacctttgagtgttgcccttgcaagaaagagtgattggttccttcctttcatcttnacc

SEQ ID NO: 262239 - DNA, 340 bp, Glycine max
tcaagtccatagccatcacagtctgaagaaagtttgatgaactaagggacgtcaatatggccaccgatgaagccttggaatgagaaaccaataaggcccgaaaggaagaacacgaccaatacaagttttgaggggctttatagggcagcaatattgagctcaaactccgaagaggtgaaaggaatcatcactggttcaaagcatgatctggaaggacgagctaaaggcttgccttatgtcgaatagaaatttgtcccaacagttaaagtgagactgaagggaatatgtgggccatcatcgatgagtgcaaagagaagctaaatctagctgcgactcacga

SEQ ID NO: 262240 - DNA, 431 bp, Glycine max
  unsure (1)..(431): unsure at all n locations
agcttttntatggcttatagtttaaaactgtcatgtccgccaagatgctcacaattcacttgttcgtgctcgtgccgncttgaaatatattgtgctagctttatctgggcatatggatgacatacttggaaaatataaggtatgagagtaggaattattgctttttcctcccctttcttctcttgtcatatagatacatttgtgcttgagcccaaagatgcaaaatttcagtgcgcaatgaaaatttcttgatatgtccttctcttttgattactttatcttctcttttgtcttgagaatccctacccctatcaaatattaatactataactatgaaataatcctaaggtaaagaggaaaccagtaacataatacttctaagtaaatgaggagaaaactgagaaatattcatatgtaaatgaataaataag

SEQ ID NO: 262241 - DNA, 401 bp, Glycine max
  unsure (1)..(401): unsure at all n locations
tctntagagcaagtattaagcagccatagatcttgttcttatctatgatcccaaccacaaaaatatataatctaatccccccttgaacacagatctcatccctgttgttgctggaccaagtgtggaaagagaatgtcaaaaaacttttttaaatttgaaaacattatgatttcaaactcaactctttatatagaaatcacctcaaaagagcatcctacattgcatgatatacttgccatcaaaaatataattcctatcagctctagtttattacaacaagacctatacataaaaattaaaaatgcatcagctaagctcaaaaaaattaataataagcaaaatcctttgactagaaaatcaatggnnncttttgagattcaataggaatatatacaacatat

SEQ ID NO: 262242 - DNA, 423 bp, Glycine max
agcttagtataatatcagaatacgctccagttgtattaatatgaatctcgactaccccgctgacaatctaaactcaaatatttagatctattcggatgcaaatttccaatttaggatccgataagataaataatatgcaagtgtgctcgttgataatagctgcccatctacatgtatgcattcataattactttctaaaatcccctttttaaaaattccaaaagcaaccttttagtaaagtgtttttcccttctaggtaaaatgtgatcaaattagactattactctatatacaatgtccatataaacaccttacccacgccgtgacaaaaaaacacagcatcaatcaaattacattctggcttggtgtgtttcggaaggattaattcaaaacctctcacacaattctgaatttttgatcttt

SEQ ID NO: 262243 - DNA, 414 bp, Glycine max
attctctcatctctaggacggagctctgatggctaagattatagtgcttttaattgcccgagataagtgttagtacttattactgttagcagcgcatgacttgtattgtacaattcccctataattaaataataatgtcgaaatatcccgtacaagacgcttctaagaaaatctaaaatttgtttcacagaatagactacattgttatcctaaaccacaatagagttttttttaatcagccaataaaatatataagactatgaccattatataccacaaatattatttttgttacatccagctatactcattccttataatcttacatgcattcagatctttcttgatttcttcatctctctttctaatctaaattaacttatataagatgccttatacttcaattcactttat

SEQ ID NO: 262244 - DNA, 261 bp, Glycine max
ctgatcaccctctttctatactatgtactacatcggcaaatttataaaccacatcacttcaaactcgctgaaacagctcatttaaaacataagttactggaagtaaagcccacagttgatatctactctttcatccacatcttattttgacactcacctctaatgaaaaaaaaggctatttccactgctccattgtataaaacaattctcatccccacctaaattacaattcggtaacctcactcattcctttatcaacct

SEQ ID NO: 262245 - DNA, 251 bp, Glycine max
ccattcacaaacgtccacagtgtaccctgctctattaggacatgagccacctgagaactttctgaaaactcctgataacctattagacaatcctgtgaacaaactactacacacccccctcatataacccactctgaaactcccttaaaatcctaaaaactgacctcctccaaccttctaacatctcactctgaagaaactaagctactcccccctaatactactcaccatacaaactaaaacaaaaacct

SEQ ID NO: 262246 - DNA, 378 bp, Glycine max
  unsure (1)..(378): unsure at all n locations
gatcctccatgaagagaatttgagtttgaaaaacttggataagggtagtaaggaaagtgtccaaaaccaccaacattaaaaccttggcgacgtttaacaagagcacgttcttgttatgcgcatttnggtgtccccccaaagcttgcgaggtagataactctctcttgcaatagttgcatgagaaagtctttgcttctagctntgtatcttcatcatctgcacctttagagtcacaaagaggtgaatcaaccaccttacttgatggttgttcttgttcttgagccttatttgaaagctccatgaaatctatcacttcctacttgtttgattggaagccttttcttgtcgtcaggcttgagacccttttcttgctgattt

SEQ ID NO: 262247 - DNA, 354 bp, Glycine max
  unsure (1)..(354): unsure at all n locations
gacaccatannaaaccaagccaggcttacactntattcacaagagatatgaccaaactaatctatttctatttcaaacnagcccctatctgttctaccagataatcaattntgccaccaaatgccagctatcctaagatctcaaattgctagttattatcaagacaacatatagaaaaacaggaagagacagatgaatatcgtgcaaagattacagatccagcatcgacgtaaccggaaaggggttgagaaacatgaaataaaaactaagagcaacacctttgctaaagcccagatgctgaagagagcacgatattccctggaagtcatgcctccatcgccaacttccaacata

SEQ ID NO: 262248 - DNA, 465 bp, Glycine max
  unsure (1)..(465): unsure at all n locations
agcttaaagtatgcccgagtcattcatccctatgagatgttgttgaagtattggcgatctgaattgccattccttggattatagggttgaaccaagctcatgcttttacaaaaaggttcatcaagtcaagttgaaatatggaagtaaccgtcttgcaaaattggggcaaaagatgaatcgagtcacatcactgcttcgtctactgccaaacatatttaggattgttgatgtccttgttacttccagtttcaccttgacaaagatgtcatggaccatgttgaaaatctgaattgattcaaccccatatcctgcgtaaaaattcgcaatacttcaactgtacatcattcgcatacatccatgcttttcattggttgcattgctcatntcattctttccttganaataaaataaataaaattaaatgaacttaatcattgttatcaaaaagaaaaggacacgctttac

SEQ ID NO: 262249 - DNA, 390 bp, Glycine max
  unsure (1)..(390): unsure at all n locations
ntgaatctcttaggtcttcttcttcttctttgagccaaaagctttccaagagttntctggntttctaaaccttgaaaacttgagctattcattcttttcatcccttctcccttttgccaaaaagaattcgccaaagactaaccgcctgaattctttttgagtctctctcctcccttttccaaaagaacaaaggactaaccgcctgaattcttttgtgtctcccttctcccttggcaaataattcaaaatgacacagcctgagaattcttttgattattccctttcccttatacaaaagatttcaaaagactaaccgcctgagaattcttttgtatccccattcacaaagatccaaaagtttaaccgcttgagatctttgncttaacacat

SEQ ID NO: 262250 - DNA, 310 bp, Glycine max
ttcttacctcctctcctttgacttccgctgcatctccatggtgaaaaatcaccattaaaggacctcattgaaactcaaagattcaccctccatagaagcttcacaagccagcttccatcaagtgtgaatcacagcacaagagctacaagtaggtgctccttaaacctccatataaaattttcgctttaccttctcttccattggtgtatcttcatttttctccatgtatctcctcacatgacttgtgctaaatgttgctaacatgattctttagagtttccaccgattaaacttgctatagaagctacat

SEQ ID NO: 262251 - DNA, 459 bp, Glycine max
  unsure (1)..(459): unsure at all n locations
gcacgcatgcaagcatgtacgtatatggggtacccatcatatgttgtacttgtggcggccaggcgatggtgcacaacaagtattccacatccacaaatctcgcataaacccaccatcccctgttgcccaccttcaactgagctcacgttctcccacgtagcccatatactcgtttctctaacacccggtccccataaatccctcccagctctcccaacatccaagtaatacaacattcaaacagcacaaattatctacaccaagcaaaacatggcaaatgtataaaacttngtccaaacaccaaccataatcacagcttttctcacttaaagacccctctaacaattcctttgtccaattcgtaaccgctggacactccaaacttactggaagcctcgactaaacctaattggacccgtggatctacacaaacacctaactattctgtctattttcaca

SEQ ID NO: 262252 - DNA, 187 bp, Glycine max
aaacactctgcgcacctgaaaacggggtattttttttacaattaacagcgcaagggagccaacgaacgcaacaacaaactctcatattttattccgaaaaaaacacccccaactcaaattggcaatatgaataatgaacattgtcttatattacacctgaagaaatctttataaaggggaaccgcct

SEQ ID NO: 262253 - DNA, 362 bp, Glycine max
agcatgcacacttatattgtcaataaacaacatattgctcttatttatttgagaaagtgcgtaatatatcttactaacagctcagttattcaaggcacgtacattacccacaaagttgggcctctaacaaactctaataaaaccactaagcctacctaactaagcgcctacaaactatgataaaccctaaatttatgaaaaaacatcaccaccaataaatgtatgaatctcaatcatgccattatccattgcccattgcccattgtcagccatatatagctatcacaactcgctgaccaggtagtctagcaaaccgtttcatgaaattccttgtcacaattatgcgatattcaatctatacc

SEQ ID NO: 262254 - DNA, 442 bp, Glycine max
  unsure (1)..(442): unsure at all n locations
agctngtttcttgcaattcctagatacaagatatcttcctaatagatggcatgttccacttctgcttttcctatctagtttgcaccctgcaaaatcagaatctgaaaagccaattagatttaaggagatacctttgggataccacaagccaacattggttgggcccttaaggaacttaatgatccttttaacagctgtcaagtgagattcattaagattagcctgataccttgcacaatggcaaacactaagcataatatttggtcaacttgcagttaagtaaagaagtgaaccaatcatacctctatatcttgactcatcaactgatttacatttttcatctaagtcaaaataggttgatgatgccattggagttgatgtctctttgcacttttccatgtcgaaattcttaattnagtttgtacaatatctggtttgacat

SEQ ID NO: 262255 - DNA, 404 bp, Glycine max
  unsure (1)..(404): unsure at all n locations
acccgccaatgaaaatatatacctgtatgggcttagactgcggccccaatccatgagtaagagttttccgtagcacgctacggaaactttctagggctgcactcacagatcgatctgcggactagtgaaatgaagagatggagccttntcctatgcagtcttggactctgggaatattttttcagaaacttttccacaacttaatcccacgtccttaagctattacctttgaatgaatgcagccacctcttggcttctccaaatagtgaaaatgcaaataagttgagcctaccagcatcttctggcactccatcaattcagactgcgttacaaatatcaatgtatgatgctaaatatacataccgatcttcattgggcaaaccacgaaattgatagccctgtat

SEQ ID NO: 262256 - DNA, 471 bp, Glycine max
  unsure (1)..(471): unsure at all n locations
agctttagcatggcctccgtgatagaagcctttttatcttttaaggccgataggtcggccttcatctgttcttgcactccctcttcattatccatttttctggatcgagtgttataggggtgcctctgtgctttcttagttattgtgagttccctaaagaaacaaacaatggtgagtatgccaccaaaacatgaatatgctaatgaatgatcggagcacttggatccacctcaagaatnttagataacgtgatgagtttcagaacttctcgttttataaaaaggaacaaagcttttatctagccaagatcatacaaaagtgttacaacagaacctaacggtttctaattatatgggccatcaaatctatcatgtgttgacagtagttgattagcccgtgaatatcctcaggggctgtacacactttagcgatggcctttgctttggctaatagtcgcaggaggtcttgact

SEQ ID NO: 262257 - DNA, 470 bp, Glycine max
  unsure (1)..(470): unsure at all n locations
ancttgccatactaagttcttacgcttcggttatgcctccttttcccacacaacctttgttagtccataccaagatttccacattaacttcctcctattacatactcgtgatataaggataattggatcgttaagaaagaaccgaaaggagaaaaggtcacgaattcaatcctctttaacaaaaataacaattaacatttacccattaaaaaaaatactttgatgctaaataacctcttgaacaaacgatgcatcaacaatttcgtttataaagactaattgattaattacacacttaagtaaaccgtaaaagagaagcatgacattaagatagcgagtaaatagtcatatataacatctcaaaagaaattatgaatgtttcctgtaacacataaatagtttagctgtgtttgctaattaaaagattctccataagtgtacatcttgtataaagtgatagcactcatcaa

SEQ ID NO: 262258 - DNA, 398 bp, Glycine max
tatattaaaataggaagggaattcctattgaagtagcaaaaggtttgccaacaaattttagttaaaaaagctttctcaagaaatttactctctggtaatcgattaccagaggatgtaattcattaccagtggccaaaactgatttacaacagctattaaaatctgaattcaaaattcgcactgtgtaatcgattacacatatatggtaatcgattaccagcagttattgaacgctttaattcaaattttaaagcttggaatcgattacacatatactgcaatccgataccagagaagattctcagaaaaatattctcaacagtcacatatatttacttgtttcttgaatggccatccaaggcttatatatatgtgacttgagacacgaattcgctgac

SEQ ID NO: 262259 - DNA, 390 bp, Glycine max
agcttaccctgttcatgaatattaaatactttgtctctctgttgagcctgttttgattgattgagctgaaacttgagcctgtatagtcataatctccatctaccttttcttaggttgtatgaaagcattatggttcaaacaaaatctgccccaaatttgggggagattattgggtgatgaccagagtgctaagacaaataacaaccacatagaaatttgtcaagaagcagtaaataaaagctgctaatattaaaaaaaaagaagaaatttcagaattaaagttttgtgggctgttatttgaagctaattgccttaaattgttaaggcaagtaattgaagctggaataaaaagacaaagagttgatctaatgatgaatgctctccaaaact

SEQ ID NO: 262260 - DNA, 498 bp, Glycine max
  unsure (1)..(498): unsure at all n locations
agaccgggatccttaagcgactgcatgctgccagcttgagtgagctaccgtagaatgagtcattccttattgaatgcctctctgagagagaaaataaatagcttggaaaatctctatccttaagctngagtgagccaccatagagtgagtcaattttgtaaacacatccttgtaaccctactatctttttatatagtggaagaatctccatattagagaattataatcgtgtgctttcattactacctttaattattaagtgtctatcttaacttcacgaaacggaaaagtgtgacttttcccaacatgaagaacctaagaaaaaggtgcaatattgaactgacttgaaaactagttggatcatctataatgacatgatgattattatagagatgaacaaacttaacaactgagaggataataacaaagatgatgatatatagtaacaacagaagtaaaagtcacgatttataaaacctattcgcgcagtatatattt

SEQ ID NO: 262261 - DNA, 338 bp, Glycine max
ctgcaccttggactatatataaattacttatatcgaacactttgctataagacttgcaatcttatgtctacatcctccatgcttttttaacctgcttctcttcttcgacatattaaagaattggtcccgactgagtgttgtgaaatatctgggtccattggctcaaaacactttattacactgcctaccatatatgacaacactctttatctctcgagtaattaaacctattattatcatcaaatctatcattcatatattggatgaatattgcctgaatctaaaaattgaatatataaccttacctttataaggacaagtcacggcctatgttaagt

SEQ ID NO: 262262 - DNA, 239 bp, Glycine max
cctcgaccgactatacgactcactgggctcttccgcacacgttgcagccgatcagggcgacccgttctcctatgctgagcggcggtatctagttcgagttacgactcaaggaccttatttagcatgacgctattgtcgccccttattattcggacatgttagggcgggttttgtgaaaccaaaaaaccggagtcccactgttcaaggaacgacctgtccccaattaatacaggcaattt

SEQ ID NO: 262263 - DNA, 292 bp, Glycine max
gacttctctgcccgcaggacatatgccgctcccgagttcgatagccatcgtttcatgagcgctgagcacagcatcgttttgaagccatcaagggatggtccttccaccgacagagacgcgtccatctcatggacgacgagtacacagaatttcatgaagagatagctccgcggcgttggacatcgctaatcactcccatggccaagtttgatccaaatatagtcctcgagatttacgccaatgcttggcctacagaggagggcgtatcggacctcctgtcatgggtgagggg

SEQ ID NO: 262264 - DNA, 438 bp, Glycine max
  unsure (1)..(438): unsure at all n locations
agcttgaggcgagcgacatgaagttagcctttgtattggttaaactctgncaagagatcttcttctttcttgaccaattctgctttagatcgctctgtttttttttttattggcccttgtattagcataagtttttccttagccttctgaaaacctttttgagcttgaattaacttatttcaatcctgctctatagaagactctatttcaacaatataaattgtatgttgactatgtaattgatgagctctaaaggcattattgaagatattaaggaaagattccattttccttttgaatctcatcaaccaccaagtttcgaaatttgaaaacctcattgattgattgttgaagatgacgcttgctatttggattggaaagagagtctttgagagatngatcgaaagcaagccttcgaaactttgcctcagcttcatt

SEQ ID NO: 262265 - DNA, 320 bp, Glycine max
  unsure (1)..(320): unsure at all n locations
tctgccccttaagcacttctctctctttcgtatttgcttggaaaaattgtttccgagaagtacttccttgccgaagcgcttccgtaacatttccgtaacgtttctgtgtagtatttcngaaaagtttcgaccgntcttcgacgntcttcattcgntcttcatcgtncttcgatcttcaacgggtaagtacctcgttcctagcttttcgattcattctatgtacccgtggtggngcacattgtgtttcgtgtattttattctcgctcattacttttttacccccttttgttgtgcttagccatttatcttattcatttctc

SEQ ID NO: 262266 - DNA, 268 bp, Glycine max
atattatattttacaaactaaaataacgcatttccagatagcacataagataatagccgcatcgctagacgatgataaaaatcaactaagtgactgatatacattagttcggtcattagtctaggaaaactggttacagaaataaggcatgtcgcccaaaaatataagaggggagggaagatagatcattttgtcatttgttttgggcattgggaggtgcagaccctcgaagttccacaagacaggtaattatctttatgtaattctg

SEQ ID NO: 262267 - DNA, 270 bp, Glycine max
gagtggtgatacttgccgctgacaacctgaatcgtggccctctgcagatcccatcctgtaatccaaggatgcccataggtattaatcctgcaaagaaagtggtgtatgaacctttaataaaaaaatctgacgcttagttaataaatagaactagagaaccatatttatggctgacagaatcacatcaattaacgatgtcttaacagcatcgcccctatttaatatgcccattttcagggcccctacaacaatgattaataggctcaatgc

SEQ ID NO: 262268 - DNA, 466 bp, Glycine max
  unsure (1)..(466): unsure at all n locations
gacccggatccttaagtcacctgaggcatgaagcttgcaatattaaaagtagtagccattttagttaaagttaccgtacgaaagatcatgagttaaatttactggctatttgggttttagcttaaatgtttaaatagatgtcttgggtctgaatcatggggtatccaaaaaaaaaatattatgcttatcaataagttttaattcttaatacatggaaacaaaattgtttattcaatgtgttacatatgttaccatttgcaggtgctatctcaagtaaaaccagatcagaaaaagaagttcataaatgaattacacaaaaataaaaacattgtagcagaaattgaacttggaaaagctccattaactcaaaaaccaaaatgcagaaaaggaagaaattggcactgaccaaatgaagaaattggcactgacccgtntgcagcccagtagctgttgttagcaacaacta

SEQ ID NO: 262269 - DNA, 462 bp, Glycine max
agcttctcgtgatcttgtgtcatggtcatattgatacatgtgtgcggtccaccccattgtgtgactttccatgaatcatttttttaagataaaactgccatcatataaaaagggcaaggacactctgcgcttttattcaagcaacaaacgacatacttgttcgatttgctttcaacaactttgaaaccttgatgcaccttcataacatattgtttgatgcattttttactgcatctttactatcaaaattcatgccaacatataattcttggccaacattaaaactcgatgacatctccaaaccacaaatgtcctcctcatcaggatgactccattttgtattattataatgcacagcatcacttcaaaatggattttgaattccttgtacacctaatagttcaaaaataagaattcaaatgatacatatttagcataaatacaattgcatcaatgataatg

SEQ ID NO: 262270 - DNA, 464 bp, Glycine max
  unsure (1)..(464): unsure at all n locations
agcttggttttgggcaatatcaccccacctgtcgtccccaaggtctcctgacccccgcgacatatctccaggtaccactctgtggtcaacgaataaaagcaggaagtctcacccttctacacttcctcatttcaagcttgtcggattatggggtacccatcacatgtggtactaagtggcggtcgggcgatggtgcaaaatgattctccacatccacaaatcacgtataacccaccatcccctattgcccacctccaactgagctcacgtactcccacgtagcccttatcctcgttcctctcaacgccgggtccncatcaatcctcccaagcttccacaacatccaggtaattccacatccaatcatcatggactaacaaaaccaagcaaaacagggcaaaggcagaaaactctacccanaacacaactcaaaatcacagcttttcacatacaaataccccagt

SEQ ID NO: 262271 - DNA, 111 bp, Glycine max
ccgctctgaacaccccctgagaaatcatgaaacctttgccacttatctttcttcatcttcttcccttggcaaaacgggacatcccataatttctatccggaattttgtagc

SEQ ID NO: 262272 - DNA, 199 bp, Glycine max
cgccgggaaaggcgcaaccaaaagggaccgacccgaaaaacagaacacgcgacaaaccgaccgaccagaacaaaccaaaacagccccggaacaccaaaaaaaaagaacgcggacaagaaaacgtgaaaaccaaccgaacaaaaaaagaccacaaggacacaccggcaagacaacaaaccgacaagagaaagaaaaacag

SEQ ID NO: 262273 - DNA, 341 bp, Glycine max
acgaacgaagaacagcgaagaacttccacggtagcattatggaagcacctcagcttgaattttttttccttttttcccttctcctcactaatttcaagtgaaagcgtagtgcaaaaattgttggatccttaaactcagccccattcccctatttataggagaaaaggggaggtaggtgcccgctataggcttccaaggaagattctgagcgcaccccccagttgttatttaacccatcctatagcttcgtaggaagtttctgagcgcatcccaattgataggtacccccattaaatgtctggagagtttctgaccacccccatttatgatacccccctttg

SEQ ID NO: 262274 - DNA, 456 bp, Glycine max
  unsure (1)..(456): unsure at all n locations
tgagtgtgttaagtatagtcttttttcatacataaataaggctntatatccattcgatgttttgtctctctttttntccaatgctaccagaaatataagaaatacaaacaagcagctaagcccctggtagataaagcaaaacaaaaatgtgggtacctcgatcgatcacatacatggcttcgattggtttcaggctaatcaatgtatatgagtccaccaaatctttccacaggtacgatctatacgaccacattcctattatgctaactcgcccaatcaatccaatggcctcgcccgttccaatcccattatagagatccaaaaactggatattctgagcctatcgatcccgcggttgataatacaaatgcttcgagattcaaacatatgacaacaactgctccnagattcatatgttggacactacagtccaactcttgcatccatggttcacta

SEQ ID NO: 262275 - DNA, 314 bp, Glycine max
  unsure (1)..(314): unsure at all n locations
agcttgcaagtgctattatgtatgtttgttttgtaaaatccccaaccaatgaaccacaagaaccatgaggaanaagaanaattcagagggaaggcaaaaagaggtagcatgtttgaagtggtatgtgagtaatacatacgcaatctcaacaatctttgtaaggctgaaaacacgtggatcagatggagacctcaattcctccatggagaccttgcatagaaccttaacaaaatctattatggcctcactgttcaacttctggctccgagtgaatatgcgattcatttcagatgcttccaacttgtccaacatat

SEQ ID NO: 262276 - DNA, 159 bp, Glycine max
aaccgacaaaagccccgggggaaaacccaggcaaaaacgacacagcgcaacggagaccaacccacacaaaggaacacgaagagagcaaggaggaaggaaaaaggacgggcaccgaacaggaaccgaaaaccgagccgcaaaaaaaaggagacgaggaga

SEQ ID NO: 262277 - DNA, 137 bp, Glycine max
  unsure (1)..(137): unsure at all n locations
aaaaaaaaaaaagagggaaagtgtgactcgtgacncggaacgaaaaaccagcccagaaagaaacagaagaaggggcgattgttaaaggcagccggcacgaggaacaaaaaacaataatgcaaaaaaacggaaaggaa

SEQ ID NO: 262278 - DNA, 243 bp, Glycine max
tacgcatgacgctaccataccacaagggctaccacaaccgcgacctatacaaggaactataaagcaaggggctaccgacggtcggttaggtgaacaaatatcaaaccctaagtaagactggccgctacgcacaaagtaggggctacactagtcacacggatacggcttacggctggccctaggcgtattggaaccaaatttacgtggagacagtagggcagcacctacggccacggatccaaa

SEQ ID NO: 262279 - DNA, 426 bp, Glycine max
  unsure (1)..(426): unsure at all n locations
agctntacaattatgtatcaacacatgaatgttttgtttcattttatacgtatctcagctatggtattctgaagtgttgttattcacactctaattataagttntgttgaaaactgtggcaacatttttcttttgttctacatgtaatttatcttgagctcattgcgtacacaagataatagtatccagttttgaagtcttggtcgaaaaacccataagcttaatttagagaaatttctacgtcatgtagacttcacttacacaatttgtctaacattaactaattaagtaacgagtgtattataatgtattggtgtaggaatcaaacaattagaataaaacagttgggtgacaactatataaggatagatgcttaatgcatctatctcctttctgtataatatataatgaaaattcattttagct

SEQ ID NO: 262280 - DNA, 188 bp, Glycine max
  unsure (1)..(188): unsure at all n locations
gcagctgcaagctganggctaagtctcacgaggttcttttctatcacaacgaaccctggctatacgaacttcttgccaacaagtaagctcaccatactccctggcttttctactgcttagttccaaggatcgtccattgtgtcgacgagtggaaatgatgccccttctctgcccgttggagatgattt

SEQ ID NO: 262281 - DNA, 251 bp, Glycine max
ccgcagaatgggagtaggaaaaaagaaaaaaaagagggattgtctgcatcgcaccaaaccacgagagcgccgagggaagaaaacattattttcaaaagccataggccagcccgacacagacccatctgcgaccagaaaggacccccccaaagaaatacgcaagaacgaaaggggatcaagccaacacctgagaaaggaaagaagaaggaactttctaaccccaacggccccaagaaaccaaggggccacaa

SEQ ID NO: 262282 - DNA, 261 bp, Glycine max
agaaacgaatccagtagggtttttttttcatgacgtgaagaaccatctattaacgaatttcttcctagaatgtcgcacacagcggtttctgtcatgtcatcgtgcaatcctgatgttagcaacattggcttatattagggcgatgatcacttcttacggctacaaactctaatcttcatccagtgaggatgctgacttatccaactgcagtgcacaacccatgacactttgagacatctgtagaactactcaacttatcat

SEQ ID NO: 262283 - DNA, 319 bp, Glycine max
acgggacacaatcagacatccgagtaaaaagttattgtcatttaaatttggtgagagcctctgtattcaatttcgagcgtcaagaatcattaaatgactcaatcggacatccgagttaaaagttatagtcgtttgaatttgcttagagatactattctcaatttcgtgcgtctcgatatactacaggactcaatcggactttccaagaaaaagttattgtcatttgaatttgttgagagcttctatattcaatttcgagcgtcttgaattattatgggaggatattcgacatccgagacaaaaattattattggttcaa

SEQ ID NO: 262284 - DNA, 384 bp, Glycine max
cacactggttatcgattaccaaattctttgtatcgattacagcatattgaatataattggaacgtggtaaattcagtttgatattcttttgaaaaccattttgctactggtaatcgattactagagagtaaaaactctttggtaaaaggttttgagataaattcatgggctactaagtttttgaaaaagcatcttaatacttatcttgattgagtcgtctcttgattcttgaatcttgagtcttgaatcttgatcttgattcttggaacttgaatactgatacttgattcttgaattcaactttcctcttgatcactgaagcgacattgattcaatcttgaactcattctctgattcttgatatcataatacttgttatcacga

SEQ ID NO: 262285 - DNA, 222 bp, Glycine max
  unsure (1)..(222): unsure at all n locations
actattggagctatcgaggtagcttccaagtacttctccatccctattttgggtaactttattcgcttgagtcctacatagtccattctaatcctaaattttaatggtgggagtcacnccgggcgaaatattcattataattnngnggacnanaaaaacagacgacccaanaaaaaaaaacgaaacataaacaatacgaaaaacagagacaaaagcaaaact

SEQ ID NO: 262286 - DNA, 449 bp, Glycine max
  unsure (1)..(449): unsure at all n locations
acatggcatacatacaccagctatcttgtttatggataatccaaattttaatatccttacattatcaccggtttcagtttaagctattggagcactattattgatgtagactaagtngatagtttctgttagtttaattacgatcttaattatgttagtatcttttatctgatatcacttaattattaaaaaaatattaatatgtgtttataaaaaatctttaactgaagacattttgttagcagtttcttaactaataatgtaatatacaatttttttggtagagttattgttaggcgttaaataaaagttagtaatgcaaactgaaatggttgagatggcaaatcttaatctctctatatgtttcatatagttttcctcacagatcttattgatcaaataggaatagttcccatttttctacaacttatgttttaaaaaaatgttta

SEQ ID NO: 262287 - DNA, 436 bp, Glycine max
  unsure (1)..(436): unsure at all n locations
tactaagcttcttacatagtccgctttgctgacctttgtatgctttataacagaaacattangcatatgcaaaagatcaagaggagttagtgggttaaaaccataaacaacttcaaaaggagaacaattagtggtgctatgaacagctctattgtaagcaaattcaacatggggtaaacaagcttcccaagtttttaagttcttcctcaaaactgtcctaagcaaagttcccaaagtcctattaacaacttccgtttgcccatcggtttgtgggtgacaagtggttgaaaataacaatttagtgcccaacttgctccacaaagtcctccaaaaatggcttatgaacttaaagtccctatcactaacaatgctccttggcaaaccatggagtctcacaatctccttgataacaaatcaccacatgggaagcatatca

SEQ ID NO: 262288 - DNA, 296 bp, Glycine max
acacaatcagacatccgagttaaaagatatagtcatttaaattcggcgagagcctctgtattcaatttcgagcgccaagaattattaaatgactcaatcagacatccgagtcaaaagttattgtcgattgaattcgcttaaagctactattctcaatgtcgtgcgtctcgatatactacaggacgcaaccggacttatccagaaaaaataattgtcactttgaatttgttgagagcttccatattcaatttcgagcgccctgaattattatgggagtaaattcgacatccgagtca

SEQ ID NO: 262289 - DNA, 451 bp, Glycine max
ctctaagcaaattcgaatgactttaacttttgactcggatatccgattgagtcatttaataattcgaaacgctcgaaattgaatacagaagctctaagcaaattcaaatgacaataacttttgactcagatattcgattgagtcattttataatttgagacgctcaaaattgaatgcaagagctctcaccaaattcaaatgacaataactttttactcaaatgtccgattgagtcatttaataattaaagacgctcggaattgaatatagaagctgtcacaaaattcaaatgacaataactttatactcggatgtctaattgagtccggtaatatatcgagacgctcaaaattgataacagaagctctaagcaaattcaaacgacaatagcttttgactgtgatatccgattgaaccatttaataatccgagacgctcgaaattgaaaaca

SEQ ID NO: 262290 - DNA, 426 bp, Glycine max
  unsure (1)..(426): unsure at all n locations
catgcaagcttctaactattcaagatacaatcttctttccacgcatgagttctctaagaagtttccccaccctacgcatattgttatcatagatcccatgctcaagcataaaaattaccttactgcgttcaaagactggtgttaactaaactagttattttatcgtgaaagccttaatttgtacttgtgggagnggccccggggagacaataggattanatacananactgaatagnnncgagggganacagnnagccggggncaaacccaatagacttagtaggtatagaaatactatatacaaattctgtgttatatgcactattatattaggttatatatngatgtccttctgtgccattttcatctatttgacgtggttagtcgttaagtcatcatctacatgcaaaaagaagtcaatttga

SEQ ID NO: 262291 - DNA, 449 bp, Glycine max
actcagctgtgttttaagggtatacggaagatagcacacgatattttgttattcaatgattgcccccacgtattgtctcgtatgggttatgaacatattgacaagaaacttatggacgagaagaggaagcgtcgagatcagcaagatgagtttactgaatacccaacactcaacctcgaccctccatccccagtgtcgagacacctgaagtggaagatggcccgcacaaagcgttatggccaaatgacttctgaagcggcacaacaaattgcaaacaaaattgtgagttcatgtcttcttcacttacagtgattgtcaaataatcgttagctaacatttaactgtattttattgaaattcaacaaatatatctgcatgtatgattcattataggaacaggctacgcatggaagccttgttctgcataggcgtcatgatatactgaacac

SEQ ID NO: 262292 - DNA, 300 bp, Glycine max
atggcgcctactctcacctcttctactttgtcttacactgcatctacatggtggaaaatcaccacttaatgacctcattgaagctcaaagatctgacctccatacaatctctacaagcaagcttccatcactcgaaacatcgtaaatctacaggaggtatggcagaatgagctattgttatacatgctggatgaggagctgctgatgtagaagctggatgacgagctgttgatgtaacaagaacctcatctggtcttgcccttattcttctggcccacctaataataactgttggatcat

SEQ ID NO: 262293 - DNA, 449 bp, Glycine max
  unsure (1)..(449): unsure at all n locations
atgcctatgatgtccgagttgtgctcctatcttcaaagagctntcagttgaactcatcttcactatctttatctgatggtttcaagtcctttggacccatgatgagcgaatctcaattgactttccattgaccttatttttcttccgatcaagatctctaaataatgatacaacattgaataattcacaataaatttgaatgtatttgttttatcattattccctcaattcagcaatgactgtatctttttttaagctctatcatttcggctatttataataattttcaagtgtcaacaaaagtattatagatatagttattctataaacaaataaaaaaatatatatgcccagtggataaatagatataaaacttttgctaaatgcaagacgatctatgtcataattctaatgatactaagcaaagcataatatcgactatctatgat

SEQ ID NO: 262294 - DNA, 407 bp, Glycine max
  unsure (1)..(407): unsure at all n locations
agcttctaaggaaagtttctcaagaaagcttctcttgaagctacctagtctataaatagaagcatgtgtaacacttgttgtaactctgatgaatgagagtcttgtgatacatacttcaaagttccacttctctccctcttttattccttcaatttcgtgctcccccctctctctttctatccctctttcttttcctccattaaagcatcctcttcaagcttcttatccaaggcaattcttggtggtgaagctccttcttccttggcttattccctagtggatggtgcctcccctctcttcttctcctttgccttccgctgcatctccatggtgaaaaatcaccattgaaggacctcattgaagctcanagatccatccttcatagaagctncacaagcaagctttca

SEQ ID NO: 262295 - DNA, 105 bp, Glycine max
aagaggaagaggcacccaagaaaccgggaaagacccaccccaagaccggacaaacagaagagctcggacaaaaaaggaaaaaaagggacaaaacaagaaaaagga

SEQ ID NO: 262296 - DNA, 215 bp, Glycine max
aagcacgagacaagaaaaggaaagagcatccataagaacactggaaaggaccaacacaaaaaccgaggaaaaactgaagagctcaaggcgaaaaaaaggaaaaagaaaagggacacacatgacagaacaaggaagacagaccagagaggatgaaactaacactaagcgcacaaggaccagctcaataagacaagagatcggaaacatcaggaaac

SEQ ID NO: 262297 - DNA, 230 bp, Glycine max
accgattcaggcgcataatatatatagacgctcgaaattgaacaacggaagctcgcgagaaattcaaatgggcataacttttaactcaaaggtccgattcaggcgcataatatatcgagacgctcgaaatggaacatccgaagctctctagaaagtcaaatgggcataactcttcacatggaggtccaaatccggcgcctcatatatcaagacggccaaattgaacacca

SEQ ID NO: 262298 - DNA, 372 bp, Glycine max
  unsure (1)..(372): unsure at all n locations
tcctgactgagagcaaacaatgaacgtaacagacaatcatgccgcagcttaatacctgcccacccaagaggtcacacaattatggctttctctaaagaacactcatggctgtaccactctgtattcccttgagtcttagcaattcagagatatggccgcncaagacattcaccaattgtgtaagtagggctaaagacacgaaaggttaccaacaaaaggctacatgtttttgccactgaggaataactacaattaggattcagtacatcttctgctccatatttcctaaagaatttttaagtcttaacacgacatcacccattttttttttatatgataacaaattgggtttttatttttttaacaaaaaaa

SEQ ID NO: 262299 - DNA, 386 bp, Glycine max
gctgagctcgaatagacaagagtggcgaatggtttcttgatgtggcagtcactaaggttaggaaagaatgtgatgagctaaaagatatctacatgaccgcggctgaagcgttatagcggtacatgaagaaggccagataggaagagtggagcataaataagtttcgaggggctttgctatgcagtagtaatgagctcaaacttataaaggccaagatggacaaatcaaagatggaaagcctgatgttagaggataagttaaagagttgtcaaagttcgaagagaagtttgaaagaacagttgagaataacagaagataatatgttgataatcattgaccaatataaagagaaggtgaatctagctgcttgtcacgaacagatgctg

SEQ ID NO: 262300 - DNA, 402 bp, Glycine max
cataagtgtggttgagagatccaattgttccattagccgttgaagtcgtcattagagtcgagttactggaggtgcttggcgatgatgacatagtggatctcagtagggttgtgcattaaccagttcatattaaaatcgaaccaaactgattttcgaactggtttaaccagtttgggttttaacctatatctgcgaactagttattcaactggtttgaaaccgaactagttttagaaaaccagttttgaattggttctaaccaaagttataactgctttccaagccgaaccggtttgaactggtttcaactagtttaaactgtttaagaccaactggtttgattggtttcaatattttggatacgatatatttgctaaaatacaattaccagagcagatatat

SEQ ID NO: 262301 - DNA, 468 bp, Glycine max
tctttctactaagatacgcataattttttatttcataacataagagtatgttagtgcgtatatgtcaatttcaattgtgttaaatcttcttttcttccctctaattctcccaataatgaaagggagaaagatgatgttctgtgtatacctttggactcgatggagagagattagaagataaatgaaagaaaaatgatatacatacaatgagctgtggaaataatattttaatccttgtgtgaaaaacttaatgtcaactaataaaaaattcttgctaatataaactttaatataattattataaaagtagcaaccctacataattgtaattagataattatattaaatatattctcacttgtaatgcatacaactgttattcttgtaataatgagcagaacaataatatattgtgacgacaaacgataattgacaatggcttctgtgaaacaatatataaaatgttct

SEQ ID NO: 262302 - DNA, 316 bp, Glycine max
  unsure (1)..(316): unsure at all n locations
ttattaaacatatccaattgttctctcactgatctatcttcatgcattttaaacaaatacaaaggctgctttatgtaatacgattaactaaagaattaatcatgtacaaaccttcaagctttgaccaaaccccagcagtagttgttgtcttagagacttacctcaacaccttgtctccgagactgaagataattgcactgtgtgccttctacagtagtgtttncttatccccatcagccatcatcttttttgagtttggctactccatcaagtgcttctaccatgccctgttgaacatgaagggccttcatcttca

SEQ ID NO: 262303 - DNA, 275 bp, Glycine max
aaagagagaatttaaaagaaagaaaaaaagaggtaggagagagaaagagaaagaataaggaggaaggagaaagaaagaaaaacaagaaaagagaagaaaggaacagacgacggaaaaaagggaggagagagaaggaaagaggaaaaaaaaggagggaaaagaagagaaaaggagaagaagaacgggagccggcgagaagagaaaggagagaacagggaggagggagaggaaaaagaagagcggagagggcgagaaagaggaaggggaaggagaaa

SEQ ID NO: 262304 - DNA, 384 bp, Glycine max
ttataatactcaagccttgaatgctctattcaatggagtagacaagaatatcttctttctgatcaacacatgcacagtggccaatgatgcatgggagatcctgaataccactcatgaaggaaccttcaaagcgaagatgtccagattgcaactatgggccacaaaatttgaaaatctgaagatgaacgaggaaaaatgtattcatgacttccacatgaacattcttgaaattgccaatgcttgcactgccttgggagagaggatgacagatgaatagctggtgagaaagatcctcagatccttgcctaagagatttgacatgaaagtcactgcaatagaggacgcccaagacatctgcaacttgagagtggatgaaatcattgg

SEQ ID NO: 262305 - DNA, 251 bp, Glycine max
ggatcttaatcaccgcagcatgcactccccaaataggcttttttgttttaactcaggcgggaggaagcagtagaataattcacaaacaactttaaactgcagccaacagtaaaatacattttacaaaatattacaagaaacttttaaaccctagaacccatgtttgggacacagatactgcatgtctttgcttcaagtttgacatttcacacatttgaaattcctgcacaatttactgaactgaacttgcc

SEQ ID NO: 262306 - DNA, 302 bp, Glycine max
tttcttatttgatcttggtgaatggtaataccgtgaatgaacctgtctaatgtgcatgatgcatgttgagcgatttgcgtgcctttatactaaccaagtatctaactaggagttggtctcttcatacatgtactacatacccactgaagagtatatgcatcatgaatattgcatcttcgaaagctgagctcttctacttgtgtgtcttgttatgcaccacctctcttttatgggaggcatatatggtgctggtgaataatggtagaaacatacccacgttttcaacgtctgttaataaaggg

SEQ ID NO: 262307 - DNA, 498 bp, Glycine max
  unsure (1)..(498): unsure at all n locations
agctnggcccgttcttctatctttnttctgttttgttctatntttgggcccaacttaattgcattaatatttntctttgcatataaattcttgtatgattntgtgtttgttattgtgaagtgaaggcagagatatataagaagttaggaacaaaaatgaaggatgaaatgtgtgagcagtcagtgagccaccaatcagcagtcacgtgctctttagttcagctaacttgttgtacctaacataaccggctggtgatcacgagttgagtaaaagacaggtatcataaaataacacaatgaaataataatgaaccaatttccataaaagatgtgcttcgatgtggacctgcattgtctttgtcctatgccatgtgagaataaagcagaatttaatttggaatttcctagttaaaatagcacatgtnttcatatntaatattttaaaaatgtaattaaaatagattttcanatatttcattatcagtatgaatgtattttt

SEQ ID NO: 262308 - DNA, 321 bp, Glycine max
  unsure (1)..(321): unsure at all n locations
aagaagaaaaaacgcttccgtaacgctttcgtaacgtttccatgatttattctgtgatcgttcttcatcgttcttcgtccattcttcatcgttcttcattcatcgaccagttagttnttgtatttgaagttgtgaattcattctatgcacccttangggtccactcttacttttcgcatattcatctccattcttctaccatcagtgatctcatttctttgtgtaagcgagtttcgaccgactaattgagtcgtaatcgcatttttatcgttgaaaagcgagtttccactgattaattgtggttgaatctcacttaatctt

SEQ ID NO: 262309 - DNA, 426 bp, Glycine max
  unsure (1)..(426): unsure at all n locations
agcatcataaatcattacatatttcaatgctttttgctttatcttcttatctatgtttttggaaggtcttttatataccgaattaatttgtcctgccaaggatctaatttatcatcatccaacaacaaaaaatcgactaaaggatattcttctaattgagtaccttcaccaaatggtgtataccctaaatcaccatgggctaactcattggcttcttcattntgatatcttgatacacaagtaaccacgtcaacaaaccattgtaagaaattgttttccaattgaaaccatttaaccaattccctatgttagtattcatactttcttttcaactacctaatcaccaattgagaatccccacaatatgtacatattgagctcccatggtaatcaacactctaagcctcataatcaatgtatcatatt

SEQ ID NO: 262310 - DNA, 471 bp, Glycine max
  unsure (1)..(471): unsure at all n locations
ctaccacatttccacctctcaactngacctcgcttganactcttttactttcatcttgatccaatcttgagaattttccagaaatattaagagagatgaaaaacttgacctcgcttataatgtttgaccttggcttaaaagaattgccagtttcatttcaaaatcttgttggactcaaaactttatccctgtgtgattgtggaattcttttgttaccaagtaacattgtcatgatgcctaaactggatattttgtgggctaaaagttgcgaggggttgcaatgggtaaaatcagaagagcgtgaagaaaaagtgggctcaataatatgttcaaatgtatatcacttcagtgtcaatggttgcaacctgtatgatgattntttttcaacaggtttcgtgcagcttgatcatgtgaaaactntaagcctaatggacaataatttcacattccttcctgaagcatcaaagaatt

SEQ ID NO: 262311 - DNA, 378 bp, Glycine max
ctattaatagaagaatatggcgttattgaatagatggctatcccctctactactgcaaagatcatgtctgcttgtggccataaaatttcagcatcttcatttctatcaaaactctttaatgcattttcaaaccaatatggctagcttttttctccccccacttgggtagatatcttgctatctctccatatgtacttctctcgttatttcacaactatattaccttatttaaagtaacactgtgacaaacaagaggtaattagaggaaatgagagtgaagtaggaatcatggagatggtgccttgggaaaaaagattgatgaaactgaacagcggaatagataaaaagacgagacggtcgatatttttatctatatca

SEQ ID NO: 262312 - DNA, 425 bp, Glycine max
  unsure (1)..(425): unsure at all n locations
agcttagacccactacgttggcttctggtcttctatccattnttgctgcttataaatggcaagggagagaaaattcgacacaaattatatttaacttcaagtatactgattaattgcgagagggattaaaaagaattgaagacagattataataggaaatcaacttaaattgattaatgaacattgtgaactagctttgattaataatacatatatgtgtacacgtgcgggttaaggttggtagcttcgaggcaattctcatttatatgatcacaaccttcagcctctacgttccagattggagtttcgtggatcactgtaacggcgatgaaccaaagagaacacagtgcatactctctctctctctaatcactgggttgagcataccttaatttgttctatcttcagaaatctaacttgacact

SEQ ID NO: 262313 - DNA, 283 bp, Glycine max
aacttttttttttccaacaaacacatggcatgttatgtcccctgcttatctctgctatcttactactgcgaattaccagatacattgacacttttttaagagtttcaagtgcatcacctatacgttaatagagatgagccaaataaatggcagagaaagaaatgactccatcctgtatgaccataaccaagatggaatctggactatagtctcctgcacaagtataacaggcaggaaacactggtcagtcagactaaaactagttgaaagtgcgattactccc

SEQ ID NO: 262314 - DNA, 282 bp, Glycine max
tttcccgcggcaaagcacaacagcaaccagaccaaatgcaacgcaccagagcccaaaaccaaagggcaacgaaccgttaaaacaaccacacaaacaaaagaccatacgagaaaagaagaaccaaacccaacccaacacaagcacgacaacacgagcacacgggaaacgcaagagaaagcaaaaccctgcaaacacccacgagaagcaacaataaggaagatgccaaccacaaggggacagaaagaccacaagatgcaagcaacacaaccccacgatccacaa

SEQ ID NO: 262315 - DNA, 340 bp, Glycine max
  unsure (1)..(340): unsure at all n locations
ctttgttcaaatatattcaagggaaatctggtttgccggaaagcgcaccggatcatcaagtatttaaaaattaaaacggatgaatttgagtatcgaacacagggaactaatgttagccggaagaaattttattatatgaaacattgnnaagagaacatgnatgaatgataatttcaaatagaatttaaactaacttttatgctaaaaactataaaagtcaaagtaagtaaaaatgacaacagaagatagaaatggtgggtgttataacanacaagcttatgcatataattatatttctctaatcaatcatgctcttgtgtctatgttgtacctaaataat

SEQ ID NO: 262316 - DNA, 428 bp, Glycine max
tccatcaagtggttatcagagcacaagagcttcatttttttcttcttaaacctccattaattttttttctttaccttctcttacatagtagtttcttcatttttctccatgtatctcctcacatgtcttgttctacatgttgctaacatgattctttagaagttccaccgattaaacttgctatagaagttatgtttgatttttatggtcaaattcttgtcttgttcttgaaccatgaattgtgttgagtttaagttcctttgagttctgtcttgttattttttgtggctgaaacctataccatataattcttacaaaaatattaaagtagaagaaaacctcataaatctatggtgacttgttcacctattgtagttttgtatagaagtcatgtctagtcatgaaacttgtcacataagaattcttat

SEQ ID NO: 262317 - DNA, 237 bp, Glycine max
agagcactactaacccatgcattataggataatgctgtcctcttccaaagtatgtctagaacgatagatataggcatgtttaaaaatccccttagactctcctattattgtttctatatgaccatctgcaagataaaaaatagaaacatgcctcagtcattataggaacaatgtctttttcatacactctctcactttgtaagagacaactccttttccctatattaaatttaaaat

SEQ ID NO: 262318 - DNA, 308 bp, Glycine max
agcttctgggataaatttgagtctttcttatgttacgggactccatcaaccgttcgagtgaatagatattgtcgtacgacattgctacgatctctggttttaaatgatcgagcgtcttgctatattacgcgactcaatggaacttccgagtgaaaagttattgtcgctagaatttgcatccatcttcaattctaaatttcgagccgcttattgtgttacgagactcattattacttccgagtgataagttattgtcggtcgaatttgctactagctccatttttaatcttgagcttaccaattattac

SEQ ID NO: 262319 - DNA, 428 bp, Glycine max
  unsure (1)..(428): unsure at all n locations
tgtagcatattcgaacggcaataacatttcactcttttgttctattgagtcccgtaatatatcgtaacgctcacatatttaaatcgaaggtcgcagcaaatttcaacgactataacatttcactctgaactccgattgagtcccgtaatatatcgagacgctcgaaatttataaccgaagctcggatcaaatgctgacgacaataacatttcactcggaagtccgattgagtcccgtaatatatcgagacgctcaaatattataaccgaagctcgtagcaaatgctaacgacaataacatttcactcggaagntcgattgagtcccgtgatatatcgagacgctcgataattaaaaccgaagctcgaacatatgctaacgacaatacattttactcggaaggcgattgagtcccgaatatatcgtgac

SEQ ID NO: 262320 - DNA, 303 bp, Glycine max
atcgccactccaagatagcctcggatcattctttccgttaaaggaggaatgttgatttaataccataattcggtatgtctatgaacaccatcattccctttctcctcctttttcttattatgaactctattctcatttgtccaaccttatggagcgcatattcgttgttcattacctctcaaatgtgcatcaagctgcattggattggaaagccccctcatcattagatagtacctgactctaaactacaatcaaccacaaacattatagtgctgttgatcctacccactcaggttacacata

SEQ ID NO: 262321 - DNA, 196 bp, Glycine max
  unsure (1)..(196): unsure at all n locations
gcccacaaaaaaaaaggccccacccaacacgcaaaccacagcacaaaacagcggagcaacgaatacgagcaccggggcgggcgcaacgctcggacacacaacgcaagagaatggggacaaagnggcaagccccacggcaccacaaaaccacaaaagccaaaagcctgcttacacaaaccctcaacccaacaaaaca

SEQ ID NO: 262322 - DNA, 443 bp, Glycine max
  unsure (1)..(443): unsure at all n locations
cttaagcancgcagctgcaacttgtgcatccttgctgaaattatgttctttctatggagcggnaaagccactgtatattggaataacacactggtaagacggcacataattattcttaaactggtgtggaagataagagaatcttatcccacatgtcgacatacaattgttcctgtacgaaattacggtatgacatgttcaaatacattttattctcgaatccaactcgatatatgctctgcctttaatccatataaatgtttgcatactgaatatgcaatgtctaagtgaaacaaattccgtgagggtacgacactcagtcttaccgttgtatattacttgagtgactcactacactagccgaccatcgaaccgaccgggcctatagaaatcttccttatgaatacataagtctatcaattcaaaatgcccattacccccct

SEQ ID NO: 262323 - DNA, 435 bp, Glycine max
tttttattgttgcttacgcagctggattcactcatttgcaatcaaaaaagttctatgatcggaatgaacaaattattaatccatgctctatcatttctatggctgatgtaagaaatgcacacgtacgttaatgcatacacttccatctttttattcttgtaacaattttaattttttgcttccaagtcaagtgtttgaaagagtacaaaatcatgacatataaatatggacacagactaatacctgtgtatttgtaataaacaagcttgagcattatgttaaatatgcatactgaaacagagcagaaaaataacttatattggacataacaaattaagacgaggtagtgcgaatacaaacgtgaatatcatggactgttatgctgatctcaaatcaatatcactatatataccaaaatgaaaataataatatgat

SEQ ID NO: 262324 - DNA, 103 bp, Glycine max
agcgggaacgagaaagggggggggaattttttgtaaaccccaactgagaggaaacacaagcacacaaacaaatccagttggcaggagaaaatggaacccgagg

SEQ ID NO: 262325 - DNA, 313 bp, Glycine max
cacaccatggaaaaggaggcaacaaccacaaacacgaccacgccagaaccacccaccaacaaaaaagagggacgacccgaagcagaaagttgacaaccccccaacacggccaaagcaaccacgtgctgacctacggacaggaagaacccaccccacgccacagtagcaaacaaaaccatgagcataaacagacgaaaaaagaaagaataggaactagaaagccctacgtatacccgaaacggacaccacagaaccgaccaccaggaaagaatcctagaaatagcgccaagatcccaacccggaacaatggcca

SEQ ID NO: 262326 - DNA, 468 bp, Glycine max
actggggcctggaaaaatgcactcaagatgttctgttctattgtatctaccatatagatcttttcctctatacattgttaagtgctcaacctttagaggatgtgctctaataccaaactatatttgctaataacacaagatagggggttgaattgtgtttttagaatatttaaaactttcttaaaacaaaaaacatgagttatcatctgatatggatgttgatgaatacatataatagaatatgtgaaaagcttgaccagacgatgatgaatagattttcacaatagacaaaaacagatataagatctataatcaaattcaaaccccttgtcaattaatacataggaaagaagtaaggaaaaacacacaaggtttatactggatcgtctctgccattgagactacatccaattcttggtaacccacaaagttccactaactttaatagttacaagtattcttcactac

SEQ ID NO: 262327 - DNA, 366 bp, Glycine max
  unsure (1)..(366): unsure at all n locations
ttaagtcacctgctgcatgcagcttgcctgcgagctgtgcttcacttattgttccgncttctggggaacaccccggaaggcccaagtgggcctaatttctattttcacacccttttttactaaatacacccccttttgctttttttggtgattctttttccgtaacgttacggaaattttcggattatgtaacgacacttattttctttccgttatgttgcaaaagcttacggattacgcaataatcccctattttgacctctggaatgttgtagaactttacgtgatttgcgacaatgccctctttcgacttccggcatgtcgcggaacttcacagattacctaacaatgggtgtgaagtacctt

SEQ ID NO: 262328 - DNA, 399 bp, Glycine max
  unsure (1)..(399): unsure at all n locations
cttgcttctacagatgatgacgtatagcccacgacaatgatctctttattgtttcatcaagattcaagactcaagatatgttcgctttcaagactgaacatacgatgaacttctcattcatgagaagaaatcaagaagacttcacaagggaagctattgaaagacttgtcacaataaacacacatagcacaatattgtttttcacatagagattttctcacaattttctaaattaccaaagttcttactctctggtaatcgattaccagtggctaagcttgatttcaaaagctcttaactgaatctgccacgttccaaccgatttctaaatggagtaatcgatgtccagtgtgacttaacgtngaaactcaaattcaatgatgaagagacacatctttt

SEQ ID NO: 262329 - DNA, 427 bp, Glycine max
  unsure (1)..(427): unsure at all n locations
agctngatacatcattacaccatcatccttgntatcaancagcatcgctntntatctagtctattttcatgctgctcacccctgaattaaagttggtgcaacattntaacttactttgattcaaaaagtaagcaataatatgatacaacctagagaggaactactgtttttttttttacatccacgtagatattcatcaatttcaatatatatctagaagagagcaaaatatgaaccaagttatccagtatttagaaaggaagatgcaagcatttgagtgcaatcccaaaactctgtagaaaagatattgcgcttttatgatataaagcaagtgcacaacatgaacaacttgagaattgattatctgcactctctatcaggcaactatacaattcaatgacttacacgacttatcagtagtgccaat

SEQ ID NO: 262330 - DNA, 368 bp, Glycine max
acatttactaaaggttactataaagcgaataatatattgtgtcccacgggtatggagtattataagattcatgcttgcccgaatgactgtatattgtacagacatcaatttcaagaaatgtcgaaatgccctatgttcggggtatcacggtacaaactcaaggataatgagaagtgtagtagtgatgaaaactcatacaagggtcccccaacgaaggtgttgtggtatcttccgatcattccaaggtttaagcggttgtttgctaatggagacgatgcataagaccttacatggcatgcatatgggagaaactgcgatgaaatgcttctttatccggcttattccttgtagtggaagaagatagatcg

SEQ ID NO: 262331 - DNA, 495 bp, Glycine max
  unsure (1)..(495): unsure at all n locations
agcttgcttatcttgagatagtaggtggtctttctcatttgatagtggaggggcaacatatttctttggcctaataagaactccaatatttttgtagcttctgatgttatgattgagttggtcacaccttctagatgtaaagttaggcaatttcccctttagcctatgtcctatgacattgtcttcatctacagatctccttctatttttcttaagccttcctctttggaaccttttatgtggtggaacaggttgtgcatactatgtctgggcccaatattgtggtccttggtctggttcaataaaaatgcaggtatgtcttattataagcctctattgacagccactcatgacatatgtcctcaagtgcatgttcattcagctaaattgacctcaaccttattcccccacatgtggacctcatatctaatgcccatgctatcaccacaccanaatggagtccatcgattagcaaaatgaatcttttttctagtc

SEQ ID NO: 262332 - DNA, 474 bp, Glycine max
  unsure (1)..(474): unsure at all n locations
gctaatattacacattctgtcaaattttcttactatngcttccatcgaagtcacatttctgtttcaacctatctccatgctccaactcaatattgaacaactttctccctgtaagatccacttgtttccccatttaaagagtgaattntgtntttctgtcaacttatcacaaaaggaaatatttagttgattattattatcaccaccatcaaaagcttagagaaatgaatttttctaatgaagactatggcagataaacatcaaaggttaatcctaacatcccaacaatgttgatactccaagactaaacaactaatatataaattaacacttcattatatattagcatcccaacaatgatatactgtgagtgtatttttaaaaaatataataataacttgtaacctatttttctaaaaaataaatgggtgatgtgtgtgtgtataaggaattttgcaaaatctataacatcat

SEQ ID NO: 262333 - DNA, 419 bp, Glycine max
  unsure (1)..(419): unsure at all n locations
ccctcatatccagatatcaattttgacttgcctcatgtcttaaaacatgcttcttcctatcctagtatgatctttacacattctaatcctgtagttggggaaaattggaaaagaaataaatgagcaacaaaattgaaaagcaacatgtttttatttctttgtcctataaccaaagttatttggtaaatttatgagtttcatttaaatagtaacataaataatgccaattgcctactttctttgttagtatttgacataaatagtgcatgtctactttctttgttaataattaatactccatgcactattacgtgagttgtgcattaatatgtctactntctttgttggtgaagctcatttccataaattaaaatcaatttatagttaattcttaattgtgttttgaaaaaagacattct

SEQ ID NO: 262334 - DNA, 416 bp, Glycine max
gacgagggatcgaggttcaatatttcttgtcttcaacatagaacacaagagcatgattgattagagaaatatatttttatgcataagcttgtttgttagaaagacccaacatttctacctactgctgtcacttttacttactttgcattttatagtttttagcataaagggttactcttaattctgtttgatattatcaatcatacatgttctctcaacaatgcttcatttctgaacttaactcaggctaacattatgtccctgtgttcgatacttggattcatctgttttaatatttaaatacttgacgatctggtgcactttctggcaaaccggatttcccttgaatatatctgaatgaagacaaaaaaggtgaaacacaaagcaactacaggggaaatccatgcaaagtttta

SEQ ID NO: 262335 - DNA, 193 bp, Glycine max
  unsure (1)..(193): unsure at all n locations
acaagcaagagggccagcggtggatcctgtctctcaacatcattcaactttttcaacaaaattttttccgattcatcttctcttcatcntgtcaaaaggggnggttggaaactctgcggtggagattatttttttgaacaaaaacttgtgctattcatcgtttccattcccttctccctttgccaaaagaacg

SEQ ID NO: 262336 - DNA, 309 bp, Glycine max
  unsure (1)..(309): unsure at all n locations
aaaactgaaacataactataaacctaaatcataaaacgcactaaaagcataataataataaaagtgttcaaaagacaggaaattagaagtcctatcatgggtcccgtggtgcacaaggggcaaaatccatggctgtgacatcatcctcatccttagagagctctagcatatgtgtacctgctggtgatgcctacagagaagacaactctaccactggagtggtcactggtgatggctgnggagctgtctctagagtagccgggtcagtttctaggatgtctagcgctggaatctataaggcaacctctg

SEQ ID NO: 262337 - DNA, 208 bp, Glycine max
caacaataaagggacaaaaaacacggcagcagaaaaacaagggaacagccaaaaaaaaggcaaagggcagaaaaaaatgataacaagggaagggacaacgaaaggcacgagaaaaaaatataaaatgagacgacgaccaacacggggacaaaaaagacacgacacgaggaccaaccaaaccaaagaaaaagaaaaagtgacggccaaa

SEQ ID NO: 262338 - DNA, 422 bp, Glycine max
  unsure (1)..(422): unsure at all n locations
caataactcataccttttcaacatacaaaataataatccgggagcttacatgcattcgaaggggaaaattactcaattcttaaagtatgttttgagtctgagtaatggaaatacaaattgcttaatatttaactacaatgttgacttaacggatgagcagttcatcatagctgctgaaaggttacatattctcttattcttaattaccctttaatgtgtgcatgcatttggactattatttatacaaccttctaaaacaaaacacccatcagtattaattaagaagtctaaattaaatactgcatatatataaaagttgtttggtagtacatgttgcataatagaagaggagactatataaaatcaaggagattctcttcatctgacatacttaagtacataatcngaatctctatttataa

SEQ ID NO: 262339 - DNA, 381 bp, Glycine max
  unsure (1)..(381): unsure at all n locations
agcttgagacatcaagatatgagttcattgttctctttgagaatntncgngcaagcttcatcaaggtaagggggtctttccacttctcaaactttgatcttgttacctttggaagctaaacttcattgcatgttgtattgatgttcaaaatttcatagctactgtcttggctggaactgtgtgatatgttgtttttcttgaagttttaaggttaaaaatgtgttctttaagtgtcaaacttatggttagccttaaatttcacttaaatcggagttttctagcaaaagttatgaataaaacaagtttaaagttgtttttgtaggaataaatctatcacataactaaactgattgttatagatgtaaggattgctcttcttaa

SEQ ID NO: 262340 - DNA, 309 bp, Glycine max
  unsure (1)..(309): unsure at all n locations
agcttgacttgagtcatcaagagtatttttatatgtgaccatggcatgagcttcattaatcatctatatttcaatctttacaacatcatctctcaacatctttcaatatccttctacataattgtctgattcatttctcttcatctttctaaaaggttttgatcaacactttctcttccaagaaaagttctttgttcaaaaacttggtctattaatctttntcattgtcttctccctttgccaaaagaacagaaggactaactgcctgaattcttttgagtctttcttctcctttacaaaagattcaaa

SEQ ID NO: 262341 - DNA, 68 bp, Glycine max
ccggacccagagcacgcagcagcaccagaggggctaatttccatttggctcacaaaaggggaaaggaa

SEQ ID NO: 262342 - DNA, 414 bp, Glycine max
  unsure (1)..(414): unsure at all n locations
tactcactggatgacctcaagagtggagactgttttctgttggaatctctctcgtgaggagaaaacctataatttgtgcagtgaatcacaaatccatttttatgtaaaaaccaccaatggctaacagtgaagtaatctaatggtgtaactggtctaatacacgcttggttngaagtgcgaggaactataagaatgttaatctaatggttcgttggtccaattctgaatcggttatgttagtaaaatattatctttaagagtgagggttgtacgtatcctaagcttgggtgacatataaaaaatcctttggcactgtttctttacttacttacttgcttgccaatttaaaattgttttgccaatcttaatctatcatttcccaattacaaaaaacctatatttttacaaagctta

SEQ ID NO: 262343 - DNA, 392 bp, Glycine max
  unsure (1)..(392): unsure at all n locations
agcttcatgatgatgaaccaatcttntnnttatgatgccaaaagcctaagtgattgattcaagattgattcaagacttcaagatcaagcatcaagaatccaatccaagattcaagattaaaaagaagaagtcaagaagcaactagtcaagacttcatatgggataagtattaaaagattttttcaaaaaacaaatagcagagttttgctttacaaaagaattttctcaaattttctaagttactagagtgattactctctggtaatcgattaccagttgactgtaatcgattaccagtgaccagttgggttttaaaatgttttcaaatgggttgcaacgttccacaataatattcaaatagtgtaatcgatacactatattagaatcgatta

SEQ ID NO: 262344 - DNA, 412 bp, Glycine max
  unsure (1)..(412): unsure at all n locations
ctgngaaaaaagttgcaagggaataaggagggacttgtgttgttatacttgtaagcaacaacaacaaaatcatgatggttttgaatcaagagtgagggaatagcaagggaataacaaaggtttagacagaataattgggagggactagtgagggaaaaatcataaggatagaaggttttgcaatgaaattattgcaagggaaaaatcgctatagcattttgacggattagcaagaaagattcgtaacaaattagtgaggaattattcattctaaatcatctatcttatgaggaattttttgaaggagttgcaagggaaatcatgagatcagcgagggaatattttcctcactagttatcaacctatatttattgacaccgacttctctcataaattcatggcaaacttttgc

SEQ ID NO: 262345 - DNA, 166 bp, Glycine max
atgccaatgggatcatcaacctacattatcagagaaatcaaacacagcggaaattctgcaagtagcaaagtcgtctccaggatgtcatgacatctgacatgacatcagatgtctgcttatgctaccgctagactcatgctcttactccagcatcttatatcacata

SEQ ID NO: 262346 - DNA, 364 bp, Glycine max
aattatttctaaatcggtgcggaagataagagatacttaacccacatgtcgacaaacaattgtccctggacgaaactagggtatgacatgttcacatagatcttagtcctgaatcccacccgatatttgctctgcttctaatccatataaatgttcgcatactgaatatgcaatgtctaagtgaaacacattccgtgagggtacgacactcagccctacccgtttataatacttgagtgactcagcacacttgccgaccagcgaaccaacaagcgctaaagaattttgcctgaagagacaaaagcttataattccaaatgcccattacccacctttgactctcttgacaacacttctaaggacc

SEQ ID NO: 262347 - DNA, 316 bp, Glycine max
aatcaaaaaaggtagatgatcggaacgaacaaatgattaatccatcctctatcatccctatggctgatgtaagaaagcaacagaaccgtaattcataccctcccatctttgcattctcgtgcacagatattcttttttgcttccaagtcaagtgtgcgaaagagacaaaatcatgatatataaatatggacacagactaatacctgcgtattagtaataaacaagcttgagcattagtttaaatatacctagtacaacagagcagaaaataacttatagtggacaataaaatcaagaagaggtatggaaaaaaaaa

SEQ ID NO: 262348 - DNA, 409 bp, Glycine max
  unsure (1)..(409): unsure at all n locations
aagtcaactgacgctgcagctcaacccagactaactatgactttcctcatctatatagagccttccctttagaagcaaaaagctacttttatgctggcttggtcttcaaagaggacatactttgtccaatcagctgatggatacttaatcagagacgatctctatttattgcagtngtggaaaggtgaatggattgaaaatactgaatgcaaacttgatacttctgatcatgatgagattgagtacgaaatgtggtgtcctattctctcttgaatccaaatatgcctgctcttcatgttgagtgatactaagtgatcatgaataatgtctttaatatggtgaatagagaacgaagactacatgcatctctttaaaaattgatgcatgtagcttctttgggagtatgctt

SEQ ID NO: 262349 - DNA, 340 bp, Glycine max
tttatttgaaaaatttttttttcttatgaacccttggtgcggaccatctaattgcatgacattgatgagggttttgactaagacctttaagaatggtcattacatactctcactaagaagctttccaagttttctcaacatatgtagagaaacatgtcacagcactgttatcaactctccattttaaaaaaggcaataatacattcttcagaacatttggaccagtttaaaaggggggaagtgaatttgtcaccggaagatactggattggattttggaaaaggtcttccgaaattgatataatggccctgtccttgctctgggataaattttacagtga

SEQ ID NO: 262350 - DNA, 281 bp, Glycine max
ggcaaaaccatgcgcccatccacaaatcacgtataacccaccatcccctattgcccacctacaactgagcgcacgtactcccatgtagcccttatcctcgtccctctcaacgccgggtccccatcaatcctcccaagcttccacaacatccaggtaatgccacatccaatcatcatggactaacaaaaccaagcaaaacatggcaaatgcagaaactctgcccaaaacacaacgcacaatcacaacttgtcacatacaaataccccagtaacattttcttc

SEQ ID NO: 262351 - DNA, 306 bp, Glycine max
  unsure (1)..(306): unsure at all n locations
acccgtcattcgtggtactangtggcgatcgggcgatggtgcaagtcaactctccacattcacaaatcacacataaatccaccatccccaattgcccaccttcaactgagctcacgtactgtcacgtaacccttatcctcgttcttctcaacaccgcgtccccattaattcctccaagcttccacaacatccaagcaatttaacatccatacatcatgaactatcaaaaccaagataatagggctgaggcagaatactttgccccaaacacaaaccaataccacaactttccttactcaaataccc

SEQ ID NO: 262352 - DNA, 432 bp, Glycine max
acatcagatgccactctatgctaaatacacgatttatttcttctaataagaacaagtatatccacagtgacaccatattcttggatggaaactacaacactgttattcaacagttccttccactgtatcataatgatccgagcagagtcactatactctgttctataagtgaagatataatatgcatcgctcttattgatttatgatccagtattaatttgatgtcgctctccatgtgcacgagacttgtatagctggatataatgcctactcagatgaccttacatttggctgatcactccgtcactaaaccctatggagtgattgaatatgttctgggtaaagtcaagcatcttatctttcttgcatattatgtggttaccgatatagaagaggatactaatattcccataatttttgtgacatacttta

SEQ ID NO: 262353 - DNA, 296 bp, Glycine max
  unsure (1)..(296): unsure at all n locations
ttttcctataataggttgaggagggaagaacaaaagcgttcaaccctcctggcatctgaggatcacgtgaaattagtgaaaaaaatcgatgccgtgaagaaaatccaagccaaggcacttccgtgacgcatacaaaaatcctcacggggtgatatcatgaatattggcggccgtctcgcgagcagacaattattttattcggncntcaacccggaagcgcccgaaaacgaacctttcaattcattctatgttcccttgntggtacccacctcgttcgcgaactgttatctccattt

SEQ ID NO: 262354 - DNA, 302 bp, Glycine max
tagaagagtaatcgcctctttggatgaaaatctgcatacttgattttacatcattaaattaatcttggttaaaatattgcttagcttatcttaaaaagctatcctttattttcgtcacaaaaaaattaccagaaattttgaaaaataaaacgactatttgtgcataaagataggctgatccaaatgtgtgtccaccatataacaaaatttattggaaattccaaactaatgaatggctttgagaccattagattctaaaacatgcacctatttattgtagaatacgtgcatgtttggaatac

SEQ ID NO: 262355 - DNA, 337 bp, Glycine max
  unsure (1)..(337): unsure at all n locations
taaagctacggagaagngncattctggtcagctcaaaaattttctcaagaagaaggggaagttgtcttcacttcatgttgatcgcggtncagcggagagaaaaatttatgttttgtctncccacncannnnncanncannnaaaaannncttgcatcatagcttaactgctttctgctgttatgtttggtgtttttgtcatactttctctataaagattttgcttgttttttattgcagagaactttgcttgttaaaaggcgtctctaattgattgatttcttttatcagataaaaataatttatcagaagaattgaatttcttgtattaaaattca

SEQ ID NO: 262356 - DNA, 322 bp, Glycine max
gaacataaaactcaactggcaagtagcaccgcggcagccttctcttatttttatatgcatgcaattcatccaagatggcattggttcaactcacaccccaagactatttatctctgcatagatggaaggtctggcaactgccaacaaattatgcattgaataacccctttgccataccatgctctgcaaaagacgatcttccaatgaattcaaatgtcttccaattctctcgggagaaatacttcatgtctaatgaaactttcaatcaccctgctaagaacacaggctgttattccagtcctctctaatactgcatggaaca

SEQ ID NO: 262357 - DNA, 403 bp, Glycine max
gaacaacggaagctgtcgattattcaatggtctatcttatacacgaaagatcgattcaggcgcatgatatatcgagacgctcgaaattgaacaacggaagctctcgagaaattcaaatggtcatatactttcaaatggatgtccgattcatgcgcataatatatcgagaaggtcgaaattgaacaacagaagctctcgaggaatttaaatggtcataacttgttacacggaagtccgatttaggcgcataatatatcgagacgctcgaaattgaacaacggaagctctcgagaaattcaaatggtcataactcgtcacacggaggtctgattccggcggatagtatatcgagaaggtcggaattgaacaacggaagctctcgagaaattcatatggtcataac

SEQ ID NO: 262358 - DNA, 259 bp, Glycine max
  unsure (1)..(259): unsure at all n locations
catgctgcacaccctgtagaccagtctcagaaaccggttgtggttgccctgcctgttgttgcctacattccccaaccacatcaactaatcgtcctaaaatctcttgcntattttggagaggangccgggacagagatagngttgtatttccncgngnagcncnaggaaccccaacctctggcagtccaccacccataccaagacttgccccgccacgacctcttgnggctacatcttggggttgagcagatgcctcatc

SEQ ID NO: 262359 - DNA, 454 bp, Glycine max
  unsure (1)..(454): unsure at all n locations
gtattatgcactctgctacatcaatatggcacctttctttttataatagttngaanatttaaacaaagaaaaatatttatcatattgaggcatataaattaaactgagacaattgattcaagatttgagcttattatgcttattaaattaatgacataaaatgaaacataaagattgatatgattactcctcctttccatattatataatgtttaacgttgcgacatatgtattaaggaatgcaattaagttgttagtccctcaaatctttcaagcattatccaatacttatgaataatcagatatgaaagacaataatatgtcttacaactgacaatgggttggaatgttattctacgtaatataacgaattctatagagatgaaggcatagcaagacaacatataatgcgctatatttcgcatcagaatacagtgactgacagaatgaacat

SEQ ID NO: 262360 - DNA, 307 bp, Glycine max
aaacatgctctattttcgtctcccactccaagtaagcctccggatcattctttcctttaaatggaggaatgttgagtttaataccatcacattcggtttgtctaggaacaccatcattccctcttctcctcctttcttcttcattatgatctctattctccatttgatccaacctctcatggagtgcatcatcttcgtgtttcattaacctctccaaatgttgcatcaaaacttgcaattggaattgcgaaaaccccactccatcattatgattagtacctgacatctcaaacaaacaaatcaaacg

SEQ ID NO: 262361 - DNA, 344 bp, Glycine max
  unsure (1)..(344): unsure at all n locations
gcagcttgtatagttgtctgtgcaataatatcttattcttttctgcatcctttcccctaccccaaaagttntcttcgataaactgtaagtacgaatctcactatgtctggctaattcttgtgaaggcaccctcaaggggccttaattatcttcatctggaaaatgcgaatatgatttagaacccaactgcttgtcgtgataacccaaaatgcgaatattattattattattattatcacaattttcacaacgatggttgactagctnttcccatatctttttattttagtaaccgaacacaaaaccacatacccttctaacaaccaagaacaagaagaggagct

SEQ ID NO: 262362 - DNA, 490 bp, Glycine max
  unsure (1)..(490): unsure at all n locations
aaaaatgtgctctttacgaccttatctagcttgatttgtatgtttctactaatgggaattttgttttttgtttaatttcttntataataaactcacccctcacaatttttgtaccgtgtggttggtacctgtgatgatcgcggacctttgttcgtgggagcagaatgacagtagtagagtacgagaaatgagattctcttgtggagccaccgagtcgatgtgatgatgttgggatcattttgggagaaagttgtgttttgttaatcaactcctccatagctggttccataattctttgtgttgaattgaggatgtaaatcacaaatttaattatatgtatgaacaaatttactttccattatgtgaatgatgtgtactgagttactatacctatatattcacttaagtaatggtgcattgtttggtgaatatatatccacgaaaaaattactttcatgtttcataagcaaattaacagagtttcatttaa

SEQ ID NO: 262363 - DNA, 119 bp, Glycine max
  unsure (1)..(119): unsure at all n locations
gataagataagattntgtagggataaatctagagaaaagcgaatgaaatattatcgcgatgagataaaatctggataagataagatttgataaaataaaattgtctgctctcttcaagt

SEQ ID NO: 262364 - DNA, 439 bp, Glycine max
  unsure (1)..(439): unsure at all n locations
aagctacagcttagctactttttctctctatagctaatctcacctgctcgagatgagaatctaaagcttatctacaaaccccctataatatcttatctcacccccatgacaaaaaacatgaaactacataaaaagtccttactacaaagactactcataatgccccgaaatacaaggctaaaaccctatactactagaatgaccattttacaatgcccatacgatgaaaaaacctattgatgcaagctccattggagcttgtatgcctaggatcttcttcatcaatggattcctttgcatcttggaagatgaatggcagtagaatggagaaagggagagagagagatgagacgccacttcaatgggaagatgagtctagaagaagctcaccaccatatgagaccatggatatgagcttggangaagaacgatatgaatg

SEQ ID NO: 262365 - DNA, 435 bp, Glycine max
  unsure (1)..(435): unsure at all n locations
tngagccaaaatcttgactcaccattaacactgaaccattgntttattgtcaaacactaccctcggaagcaaataggagagattgataatatccaatcacacgaaaaaaagagaggaaaggaaactcccaatcaaagaatgggagaaagaatgggagaaagccaagaaagaaaagaagaaagctcctggtcaaaggaaccagaagaaatgtgcacagaggtctttacaccggacagtatctgaacaatacaaaattgtcaccaaatgaacaaaaagaaagaaaggaaaccatgaccttaaatggtcttctccctttaattgccaaccagaatcagtgcgctagcgacttgttcacctcgcgcaaatacataacagaaaaggataaagccaacgaacaaatcataagccaaaaacacacaaaagccggaataccca

SEQ ID NO: 262366 - DNA, 451 bp, Glycine max
  unsure (1)..(451): unsure at all n locations
aatattttgcaatattgaataaatctaaatcaattatccattaatattacattgtcatgacaaaattatntatcatagcagaaatcgtagtagcaacattagggcgaacaaatttatatttaccataatcggtcaaatctgtttaaatttaaaaattaattttatattagtatatttaaaaaattgattttaatttttaaaaaataggatttggttcttaaaaaaatagaaaactatctttttctttataaaaaatagtttaagtataaacattaaaatataaaatctacttattttattaaagaaaatactttttttacaanataaactaattaaacatacgaccctaaatatgcttgccgtgaggacagaagtcagatgatgaaggccacgggaaacatatcacgtgcatgcaatcagaagtaactaatatataactatatattatata

SEQ ID NO: 262367 - DNA, 353 bp, Glycine max
  unsure (1)..(353): unsure at all n locations
acagaagaaaaacaaacgagggaatgtgaacctganaccaataaaaaagaaagagagcgaaacagcaaagggggcggcttcgcgctaccgaaaaacaacgcggggggcacaaggccgaccccaaccgcaaagggacccgggccaggaggccagcccggaacccccaaaaccagaagggccacgggaaaccagaaaagaaccgagaccgaggggggacccaccccccgggcgcccccagccaaccaaaagccaaaaaccacgccaacacgaaagccgaacgcgggaacgacccacaggccccaacgacgagggccgagcgcggcccccccaaaggggaacagccaccagaacag

SEQ ID NO: 262368 - DNA, 392 bp, Glycine max
ttgcaagctggaatcatttatcctatctccgacagtctttggttgtgtcctgtccaggtagttccaaagaaaatcggcctcaccgtgatcaaaaatgagaaggaggagctgattcctactcgggtgcagaacagttggagagtctgcatcgactataggaagctgaaccaggttaccaaaaaggaccattttccactgtcattcattgacaagatacttgaacgcctagcaagtaaatctcactactgtgtccttgatggtttttctagttatatgcaaatcactattgctcctgaggatcaggaatagaccatattcacctgcccctttggcacttttgcctataggaggatgccttttggcctgtgcaatgcccctggtaccttccagcg

SEQ ID NO: 262369 - DNA, 354 bp, Glycine max
cttaaccacttgtgatatccaccaacgatgccattgctacttcccctatgctccttatctttccattccactgtattccatgctttacagattctctacagtatgatggataatgaagcattgttgagagaacatgtatgattgataatttcaaacagaatttaaactaacttttatgctaaaaactataaaatgcaaagtaagtaaaagtgacagcagtaggtagaaatgttaagtctttctaacaaacaagctgatgcatataaatatatttctctaatcaatcatgctcttgtgttctatgctatagcctgaattactaaacctcgatcccttgtcagaccgaatcaatcc

SEQ ID NO: 262370 - DNA, 75 bp, Glycine max
  unsure (1)..(75): unsure at all n locations
cctgattgctatttgcacccccaantttactaaatacacccccttgcttttatttgaagattctttatctgtaac

SEQ ID NO: 262371 - DNA, 313 bp, Glycine max
  unsure (1)..(313): unsure at all n locations
taccacgttcgcggtcaacaaacatatagttggatagactgacttctcccacgccccnnncgcatcaagcttataaggattatggnggtactgcgttatatagtggtatctatggtgagcgatccgggcgtatggcggcaaatcaactcctcccacttccataatgtataacatatacacagcatccccagttgcccacctttcaactgagctcacgcactcctatgtagcccttatcctcgttcctctcagcaccggagtcccatcaacccattcaatctttcacaatatncaagcaattcaattccaaata

SEQ ID NO: 262372 - DNA, 160 bp, Glycine max
  unsure (1)..(160): unsure at all n locations
aacaaacgaaaaaaaaaaaaaaatgtctgaactcgaaacggaaaaataccngcggaaaaaaancaaagagcagagtttttctcttaccccagaaacaagccacctcccgaatgaaaacagagctaactacacccccccaaaaagcaagccaccccctgac

SEQ ID NO: 262373 - DNA, 289 bp, Glycine max
acgagctcactatcggtttttttcttttggaacacaaagaccatttagttttaacagggtcgatagtctcttactgaatttatttttcggaggatattggaagtttacaaataccccactaaggatattatgtataacatgcgaagacgtgcatgaaggagtagctgtttacttcaaaaccttggctataagagccatactgtgaagtagacggcatcacgcatcgaatgggcgtcttttatattaaaattaatccgaccggctaccttaaaaaaacgtggccccattt

SEQ ID NO: 262374 - DNA, 341 bp, Glycine max
gcccctaggggcagctgtttttttttttaaagtcggtcatcaaggcttgaccggctaccggatcgaccgatcgttaaacgtgtcttataggcaaggcataaattcaaccaactttgaccgtagttacttaatccttaaataaagcacagatcgttcttctgtacccaaggatatataataattgttcaccggcataacttgaaagtttctttatgagtggaataccactgaacagactagctactgacacaacttgtcataaaaacgttgatcctcaagccaccctaaaaatcttttacttatggtaaagacttttgaattaatcaccttgataacttttg

SEQ ID NO: 262375 - DNA, 325 bp, Glycine max
  unsure (1)..(325): unsure at all n locations
atatggatgggttggtttgagtttagcgtgttatatactcatagtaggagtgtgttacattggtgtttctgggtctaggaacaaacacaggcgtattaacataaacgggtttgggtgtgnaagaatcatttctttataaataacacagtcgtgaatcgtgtgcactaatccataaacctcctataccaacacggcctcttttatgttattaaaataacttcgatcactgtcctataagccaccttaggtgcatataatttattttaaacacataacattttcactatactatactgatttccggtcacacaatctatctattatt

SEQ ID NO: 262376 - DNA, 468 bp, Glycine max
  unsure (1)..(468): unsure at all n locations
actaagctttctttcacatcgatctgtctactaactaacaatgctaattgcatgttcatattcttgnactttctttgtctaacatacacacttactcaaactcatgataagaaacacaaactccatcaaaattatgcactcaatttaaaataaaaacatacatccattttccacaaaaagataaaagtgttgcactgccatgtcattaaaaaccaagttaaactgttcaaaatgcttcagagtaagcatactaattattcataaatcaaactaacaaacaggaattactataataagactataattaacataataataaactaaatggcacaaaaatatcatcaggaatttaaaaatcctgtgatctgtcctgagtatcctgtgtctgaacatcctcctcatctgttaagtgaaacacacgggtatctaaaggagaggtgttcggagacaagactggtgtacactgat

SEQ ID NO: 262377 - DNA, 441 bp, Glycine max
  unsure (1)..(441): unsure at all n locations
ctacatactgtgctatgctcgctttttttattatgaaatcgatgcgctattatgtcttgatcggagtgtgtgattcatgtgtaatgtgattgatgattaaaaagtgaattttaaatgacaaagtggtgaaattacgtgagttatgtttaagtaagttgtatctcatttatatgatatgtatatctagttgtcttgtttctctattagttaggaatgtgataactcactccctgtgtgttgnttgtgtctgaatcctatgatgatcttgaactctgtgttcggcggagcagatgactatgtgaattgctttaacgaaccttatgctgaaggacgtcgggacacaatgctctgataggatgtgacattggagtataagtttctatattaattgtatgaaatcttacgcagccttgtttgagccaagatgactttattatttat

SEQ ID NO: 262378 - DNA, 350 bp, Glycine max
  unsure (1)..(350): unsure at all n locations
ccttcaatctttgatggagagggttaccactactggaaaacccgaatgcaaatttttatcccagcaatatatctaaatatctgggaagccattgtaatatggccttatatacccaccacagtagaaagagtttcaatacatggtagctcatctcgtgaaagcataaccatagaanaacctatagatacattgccagaataggatagaaaatcgagtcaatacatcctaaaagcccaatacataattacatttgccctatgaatggatgaatatttcagagcttcanattgcaacagtgctaaggaaatgtgtgacactctctcatttacacatgatcgaactacagatgg

SEQ ID NO: 262379 - DNA, 487 bp, Glycine max
  unsure (1)..(487): unsure at all n locations
ctttacgtgcctgatccatagaactaaataaaaagtctattcttagatgagaaagaatgaaagatattatttttcccagagtaaaaaaacgatataaatgaggttaaatgtaatgtatccattcctaattaattaaatcattaaataatattaatacacaagaataactattaatgacggttacacttgcttcagtgttttacgcatagcaatgaatgcctagtctctcttcttgactttctccaatatacatcctcagcaaatggtgcgttntcatttgcattctattatttttatatatttcatatttcattgaagatcatcactcactccctttgagtcattcactcactcatctctcttctctgtttcattcattgcttctttgttgtcaactatgaacgctcttgcagctaccaaccgcaactttcaacgtgcagctcgcattctcggtttggattccaagcttgagaagagtctnctcata

SEQ ID NO: 262380 - DNA, 473 bp, Glycine max
tgtagcgatatctacatctcaacaattcaaattgagtgtatgtctatccccacagaaaattgaagagctaacttatatggaaagtatcccatatgctaacattgcaggctcaataatgtatgctatggtatgtacacgacctgatatagctcatgcagtgagtttgttgatagtgtttatgcctaatcctatgaaagcacattggtaggctttaaagtggatcctaagatatatcaaaggatctcttggtagagttctagtttatggtggagccaaagacaaaaaaggaacaacaactattgaagggtttgtagactctgactatgcatggggcctagatactagaaaatctctcactggttatgtgtttggtgtatatggcattaccattagttggaaaaaaaatttgtaataggtagtggctttgtctacaactgaagtcgaatacatggttgtgactgaggctgtgaaag

SEQ ID NO: 262381 - DNA, 438 bp, Glycine max
actaagcttgaggcaaactggatgcgttggtcaactcggatattcatcttgtcttgaatcacacatttgtacctgtcgcaagggtttgtggtttgtgctcctctgctgaccaccatacagacctttgcccttccatgcagcaacctggagcaattgagcagcctgaagctcatgttgcaaatatttacaatagacctccttaatcctcagcaggtataatcgaccacaacagaacagatatgacctttccagcaacagatacaaccctggatggaggaatcaccctaaccttagatggtccagccctcagcaacaacagcagcctgctcctttcttccaaaatgctgctggcccaagcagaccatactattgctcaccaatgcaacaacagtaacaaccccagatacaaccaacagttgaggcccttcacaaccttcc

SEQ ID NO: 262382 - DNA, 307 bp, Glycine max
  unsure (1)..(307): unsure at all n locations
gaccacacagtggtacctggagatatgtcgcggnggtcaagagaccttggggacgtcaggtggngtgctattgcccaaaaccaagcttgaccaatcccgacccaacccgggcatattcggtcagtgagaacctgtgatgtacctaagcaggcgagctcctggcagtcaacagataaaaggaacaaagaccacacagcaaggaggcttgtggtggctggccagctgtgaaacttgactgatatgtgagatatgatctctggtaatcgattaccaagggtgggtaatcgattacaaggcttaaaaatga

SEQ ID NO: 262383 - DNA, 392 bp, Glycine max
  unsure (1)..(392): unsure at all n locations
agcaattaagtatgacaaaaaaatcttcagccacaaattaaatctacaccaaataaattaagagataaaatactttcttatttaaatacgtgttaaattcaaaacttcttcgttcccaaaaatttatcatgaacttttataagaactatnggcacactaatatttataaaaaagtttatgaacaaatctttatatacttgagttttcattatactctaagagaaggacatagctgtgctgattggcttgcanagaagggagtttgaatgacaataaatggcattgggatgctaccctatagtttacacctaagtgtagctgatgaggggagggaagaaaaaaaattatatacatcttcattaatattagggggatttgatttaatttaattt

SEQ ID NO: 262384 - DNA, 502 bp, Glycine max
  unsure (1)..(502): unsure at all n locations
actaagcttgataagggaaagaaaataatcaatgtgtaaatgaaccattcatgttatactcaagcttcatactgttaacaagccaagtacaagttttaaatatacttcattttaaataaatgaccaagacttagcatcttctacttttgcaaaccaagcatcaactctaatttcttggcttgacttgatactatgacaatgcccttaacaatatacattactccgatntgattgaacctaagtgttaatattacatgtaatataatttcacttgcacacaccgaagaaaactcattgaccaaatggcagcacctgatattacttctagaatataaggtttatatgcatagttaccatgtcaatgcatcttatcctaaagactgctttcaacatcacacacacacacacacacacaaattaatctaaacaatttaccttgcaagtgaaatatgaaaatcttgtctgaactcatcattatgttacaactcatttcaagttctat

SEQ ID NO: 262385 - DNA, 389 bp, Glycine max
cttactaggaaggcttcaacttgacttaatgctccttaatgacctcttataaatccaaggaagaccttttaagtggagtccactcaacgaatagacttctaaaggaagcagacctagatgacaactactatgtcatgatacctatcatggtcactctgaggttcccatcttgacgaacctttattatgaacattatgaagttacattagaatgaagattctaatgctatttgagataagatccatactggccatatatatttttgatgaagttcatcatatatgtctatctaaagtagtgcagtttcctcaatcttaccactgtttcacaacacatagtattttgaaatagattgcttcatacaaactacgaggatgtgttggatcaag

SEQ ID NO: 262386 - DNA, 313 bp, Glycine max
gagtatcacatgactcacattcctcaaagttacaacaagtgtgtcacatggatatattcatagactaggcagctcccttgagaagcttaactgaaagactaccttgagaatcttctttgagaaaacacccttgacattctacaatatatgatgaacgagctgccaccaccgacgattttgtacgagtttgcatgtccaagctgccagaaccaacgattgttttatacatggtatatagaatgccgtgggcttacactcaaccgactatgtctgctgactaactattattgttaccacagtttatgagttaata

SEQ ID NO: 262387 - DNA, 414 bp, Glycine max
  unsure (1)..(414): unsure at all n locations
ttggaaaaagttatgactcttttcattccctctctttgaaccccacaacttactgaactcacccataccaattccatcacttaaggcctactcacctaggcccaaacactcttaaaaccaactaatcacacatataacatggttaagcataaacatatatataaccacaagtcatcatctcataattaataaactaattacatgtacttaaattaaatttaattactcttgaaaatcacagtgtaacaatacttcccaacaagaataaatttcatcctcgaaatgtagttgtgaagaaaatatcataaacacggatcaagcacgcaactacgctntctgagaatttgatctgtcctgnggatcttcattagtcaagttgcccttttttgttgagcatcatcaaatccctacctt

SEQ ID NO: 262388 - DNA, 432 bp, Glycine max
  unsure (1)..(432): unsure at all n locations
actanagcttgggacgattcnctagttttcttttgcaaacacctattcttttntttctatcgnntgcctttcatgacccatgttgcgataaatggagactccactaaggattggttagagagttaagccatttgattgagcatgcaatttgatcgtgactttttctttatttattntccctttttcttttatctttttgttgtactcttatttgttatcattttattctactaccatttttttcaagattattctttgatcttggttcttttattctttggttcgctcatgcttgtataaatcatttgctatgctgctacttctttgtgttatccttggatctattattactttcatgttagaaaaaattgtgcattgaatctaggtagaaacatgactatactcgttgatccgctaagaattctggtgttt

SEQ ID NO: 262389 - DNA, 439 bp, Glycine max
  unsure (1)..(439): unsure at all n locations
agaagagaaagatgaacatcttgctttatacaagtagcgnggatgtctcctccacctctatgacctcacaatcactcacaaactcatctcaagctcttaggataacttcctcttcaagctctaagctctgtagatcttcacacaacaaaatctctcaaactctctggaatttggacctctctctctctaaaactctctagacatgcaaaaacttcaagagaaggccaaacttccctccaaaatctaatttcaggcttaaataggtggctttgttcatgctcatgcgcttagcgtaattctaaaccgcttagcgcgcattagtgaatattggcttaacgcgacctttctcgctcaacagatggaccgaagcggtgcgctcatcgggatggccctttgctcagcaaacaagcacaactcatncttctttcagattcatcat

SEQ ID NO: 262390 - DNA, 354 bp, Glycine max
atgacccactaacctagtatttttactttttattgccactaacctagggaattaaaaagaaacttaatggctgagtgtaactgagattgtggcaaccaaaagtcacccccaacagccaacaagtcagccaccatttggtcttccaaaaggctgatgcctacgttgccaattgggcccttattacaacttgaactaaacctactaaagcccttttagttgattaacccaaaacatatttttggtcagccaactctacaaggattgagtcattatttagacaaactaaacactcttaaattgagacacagtggtgccatttagtcctcctccatttgggccatggtacaactcaca

SEQ ID NO: 262391 - DNA, 422 bp, Glycine max
gcttcttacacagagttccccaggtgtgtttcttgggtgggatcgaccagtgtcatgatcaacaaacttaacttccaaatttgggaggatgaaccccactgagtttctatgagtacttcccaatcctctttgtgcataagatagggtgatgcagctatgctcaattagtccatatgcctaacaaatataaactaacactctatgtagatacaccatgcctaatatgcacattatttgtcatacaaattacataattgaaaatatttgatcgacgttttgtctttcaaaatattacaatttctcatttatctctctttaaatatgtcctaacgcaccatccataaacattattttaccgaatgctctcgtacttcagttgttctcattatttcacaattttattagactcctttaagaaccaa

SEQ ID NO: 262392 - DNA, 414 bp, Glycine max
  unsure (1)..(414): unsure at all n locations
ctcagcttctatggcttgaaggctaaccccattgttttatctcttcatgccaactcttggtattcgnttagcctatttcatacatttctgatcttaatgcaatttattatttttatctttgcaaagaaatttgggagaaaagaataaataaattaggctcttcatgcgggaaatcaaatataaagtgtcttactagatgtgggtggaaacaaagatttcattacatagaaaaaaaatcattaacattgcatcacaagtagttttggcatgctaggctccaacataatcacattctgaattcatctttcggcatttaaattattggtcatttctcttggtatttcttccttttccttttatccccaattttcacacttacaattccttatctcttctacttcttctaattgctta

SEQ ID NO: 262393 - DNA, 422 bp, Glycine max
  unsure (1)..(422): unsure at all n locations
ggtttaataatttgaggtcattaaagtttagatgaccatacctcaagtgctacagtatggactcatccatattctcacatttcaatgcattggtttgcccaaatggcataaatagaggaaatactttattaggaagccatttgatagaaataatttggccctttcttttatgaatgatattacatttatcatcatcaaagatgactttataatttttatgaataagttgaccaacacttagaagattttgagtaagacctggcacataaaanacatcatggatatattntntgctaccattntgagttntaacagcaatggtgccttttccttcaactttntgaacatttccatcaccaagtgtaactttgaaatttattgtctcatctaattgcacaaagcaactttnnntgttttgtcat

SEQ ID NO: 262394 - DNA, 423 bp, Glycine max
  unsure (1)..(423): unsure at all n locations
cattaccaattaggctttatggttatttgacaaaatatggtttcttgacaanatgngattatgggtatttgaaaaataagggttgagggttacttaacaaattcagtttaggggtatttgactaatgagggtgtatgggtagttgagtaattaaggttagtattagttgaccaattangcgttatgtgtgtttgactaattagggtatatgggtatttgaaaaattaaggtttagtttacttgaccagttacggtttaaggttatttgacaatttagagttatttgattaatcacggtttacgggtatttgaaaanttaggattcatgggttacttgacaaattgnggtttatgcgtgtgtaactaattagggatatgaatacttgactaacttgggttaagtttactcgaccaattatggtt

SEQ ID NO: 262395 - DNA, 428 bp, Glycine max
  unsure (1)..(428): unsure at all n locations
gagaagcatatgccaatacctgtccccgctgcataaacactccacccaaacccatcttggacgcatcacaatacaccacaaaagattcactcggattatgtaacactaagactggtgcagtggtcaacctttccttaagggtacggaaactactctcacattgngcatcccacacaaaaacttgacctttacgagtaagcttagtcaaaggtaacgctagcttagaagaaccctctatgaatctatggtagtatcctgctaagccaagatagctcctaatctcatacactgacttaagactnctccaactcatcactgcctctacctaggaaggatctaccgctatcccgtccttagatataacgtgcactaagaagctcaccctctctagcccaaaatcacacttggacagactaacatacagtcta

SEQ ID NO: 262396 - DNA, 414 bp, Glycine max
  unsure (1)..(414): unsure at all n locations
tcgccctcagaaagaaaaaagagtccccatcaaagaatggaagaaagcaaaatggaaagaaaaaatcccgatcaaagatcagaagaaaacaaaagaaaatatatagaaaaggtctttggaccagacaatatcttaacaatataaaaatgtcacaagcaaacaagaaaagaaaagagaccatgactggaagtggtcatctccctttgattaccaaccaaaatcttgtggcgccggcgaatttttgccccgcactaaacaaaaaaaacaaaaaaggagagaggccaaaacactcagagccaaattcccctccaaaaacactattcctaagaaaaattcctatggatccatgatcacacatgtaatcntttgattgataggaaatgatttgcaaaatcaagtcatgacatatctatg

SEQ ID NO: 262397 - DNA, 307 bp, Glycine max
ttgtgacacataccgaataattgatttactctcatatgatagaagcttgagtaaattctatacaactctcaaatggattatgaacctccattcctcgagacctacaaagcccttgttcataaccacgtcgatgattcatagaatgactcctctttggtggagagatgtgaactaccagtgatcgatcttggcaagttcaactacgagagagaccaatgcgagaaagacattgcagaagctgctaatatatggtgcttctttcaagatgtttatcatgggatttcacacgagccgctgaagagtcttg

SEQ ID NO: 262398 - DNA, 413 bp, Glycine max
  unsure (1)..(413): unsure at all n locations
ttcatggnggtgtcggtttgggatgggtttggtcaaacgcatgacccaacccaatcaaatttgaacggattggattgggtttgttttctaagaaaaaaaatgaaacccaagccaaaccaacctgtttgtaaatggtttggattataatgggtcaacgggtcattttttttaaactattttttataagctaaaacttttattaaatgaatcagacacaagattttttttaaaaagaaaattttgtgatggtgtcatatcccactccacttcaccaactcctatctatctatctatctatctatccatgagggatgaaaattaagcataccatattcgagataaggagtttcaataagcatagtgaagatgggtttcaaacactttttttctaccataaccaatgggacatcatg

SEQ ID NO: 262399 - DNA, 437 bp, Glycine max
  unsure (1)..(437): unsure at all n locations
accatggagatgcagcggaagataaatgagaagaggtgagaagaggcgtcatccactatggaataagccatggaaggagaagcttcaccaccaagaaagtgtcttggataagaagcttatagaggaagcttcaatggaggaacagaatgagagaaagagagagggagagagagatatatcgagagagagagagagaaagagatagtggcatggaaaattgaaggaagaaagggagagaagttgaactttgaagcgtgtctcacaagactctcatttatcaaagttgtgacaagtgttacacatgtttctatttataacttangtcactaactaaatgaaattcactctttttgtgactttcattctcatttcatgtgaatctaagaggaatattccaaggatataccaaagaaatctagcatattccaagaatatgc

SEQ ID NO: 262400 - DNA, 465 bp, Glycine max
  unsure (1)..(465): unsure at all n locations
tccttgagaagattcctagagaagctagagcttattttcttatacttctctaatagctaagctcacctccttgagatgagaagctagaacttaactacacaccccctataatagctaagctcacccgcatgacaaaaaacatgaatatacaaataagaggccttactacagagactactcaaaatgccccgaaatacaaggctaaaaccctatactactagaatggccaaaatacaaggcccaaacgaaggagaaacctattctaatatttacaaagataagcgggtttatacttagcccatgggctcgaaatctaccctaaggctcatgagaaccctagggccttcccttggatctctagcccaatctacttggagtcttctacccaatgcccttgcgggataggatggcatcattccctccaccttggaaaggattngacctcaagtccgangtcttcatact

SEQ ID NO: 262401 - DNA, 290 bp, Glycine max
ctccagaacatactttcctttaaacggacgaatgttgagattaataccactaattctgctgtgactaggaacaccatcattccctatgcttctccatcctacttcattatgacctctattctccatttgatccaacctctcatggagcgcatcattgagtggatgattaacctctccaaatagtccatcaaagattgcattcgcaattgactaaaccccacttcactattaagataagcgaagatcctagaacgcgagctctgataccacctgatatgcatcctcatggc

SEQ ID NO: 262402 - DNA, 161 bp, Glycine max
gtagaaccttcaccctgccaagacactgacgaaaacatatactctgcttcttgcacaaagtatggcgggctggaggcaagataatgttattaccattattacctgcatgcaactgtgattgtgtacccctatgagctcaatctcgatgggtattctagaca

SEQ ID NO: 262403 - DNA, 418 bp, Glycine max
gctagagctgacccaataactgccctatactctttataaggcgacccctaggctctcgaccttgacttgatataacctctttttaagcgaaggcatttgacttgatcccatgttttactaaagcgaacaaatcgatgcgaatcagaactacaacatctatcatgggtggaatggatgaatgcatgaaaacatgcatatgacacatatgctatttatgaatacgggagcccgggaaattgtcttcttcttatatacaacgtcttgaggtaacacagcgcccaacgtatgtatttaagaaggtgacacagacccttcgttgattcgtctatagaggggattaagacggaacccgtgtgtgatgcatatgccaaaggcgcagtacgggaaagtacatagtacgacagtactcacacaatat

SEQ ID NO: 262404 - DNA, 442 bp, Glycine max
  unsure (1)..(442): unsure at all n locations
catcacatgtggtactatgtttcggtcgggcgaaggngcacaacaagtttgtccacatccacaatgcgcgcataaacccaccatcccctgttgcccacctccaactgagctcacgtactcccacgtagcccatatcctcgtttctctcaacaccgggtccccatcaatcctcccaagcttccacaatatccaagcaaaacaacattcacacagcacaagctatcacagccaagcaaaacagagcaaaggcagaaaactctgccaaaacaccaaccaaaaatcacagcttttcccactcaaagaccccagtaacaattccttcgatccaattcgtaaaccggtggatcgactccaagaatttactggaagtctatagtgcataagcctacattntgaccgttgggatctactagcatacatccagaactcattctacattact

SEQ ID NO: 262405 - DNA, 388 bp, Glycine max
  unsure (1)..(388): unsure at all n locations
tcaatgacgttctgcaaattaacatttgaagcatattatttatttgatattaacataaataagtaaatgtttaggggagaaagtcatgacctgctcaagatggaatgacgcatcatatctgtgcacaattctcggtactcataaatttgatgggacctatatgagaaacgtttatgctatgaggtagtgaacagagatgtacccattgaaaggagaagataaatatgcgcaatatcaaacatgtgctatgaacgaacagagcacgcatataaagatgaatgatgcatgatgaagcaaactcttacatatacttataagaaggtnaacatagaggatggaaatagtaaacttacagcagccgacacattctatgatgatgattcatagt

SEQ ID NO: 262406 - DNA, 490 bp, Glycine max
  unsure (1)..(490): unsure at all n locations
accttgactttttatgtagatcaatatgtttaacattttatatgtactaataaatgtaaaatgtaatgtaatataacaaatttagtatcatattattattattattgaatattcgtttatgttggacttaactatgattttgatccttgataaatatttatattttacgtttggttcctaattttttaatggccacgtaagcagataacggatcccaactaaagatagggatctccggcaaatattttcaaatatcaggggctcgatccaaaggaaaaacttatttggaaccaaacgcaaaaaatgagtatttatcatacaccanaaacatgcctttagtgttttntaaatagttcaatcggttaggcctaaaagaccttgcatatggcttaaggtctaacctttntaactatatagactttattaaaagacttggtctggttgattntctcgaaaagtctagctttacttgggcctgatataagctatg

SEQ ID NO: 262407 - DNA, 408 bp, Glycine max
  unsure (1)..(408): unsure at all n locations
atacgacgagaatatgtntgaggggattttatagctaaacaacactcatgggttggatcttccttgatggtttgtttgttcttcacttcattgtggaagcaatgctttccaaggttattttgatgatgccaaagaatcaagagttaagcaaattccaaagattcaagaatcaagtttcaagaatcaagattcaagattcaaggataatcaaggtcaagattcaagactcaagattcaagaatcaagagaagacttaatcaagataagtactataatttttttcaaaacattgagtagcataagaaagtttcacaaaatcattaccaaagagttntactctctggtaatcgattaccagaaggcagtaatcgattaccagtagccagcattggtttcaaaactgattta

SEQ ID NO: 262408 - DNA, 213 bp, Glycine max
gaaaaaaacgttgtctacgttgagtatgggataacgatacacagcatgatatcactgtatttacattatcgctaaacgaatattgatgcaatcgtggaataagatgtactctattatattgcaccgactaatctaggacaacatacactaaactgtatatgtactcactccttcagccttgatgatgaaagtgtatgatactatgctaaaaaa

SEQ ID NO: 262409 - DNA, 417 bp, Glycine max
  unsure (1)..(417): unsure at all n locations
aagaatagaagactgataattattgagctcactatattcggcgataataaatgattaattgacacaaatccttccattccaagcaaaaatataatcatttgcatcacttcaatcttttattaacacaacaatagtattttttctctaaaaaataaaaccaaagtacataaaccaacaacacaacatttaaaccaaggaacaaatatattaataaaacaatccccaatgtgcatgttcttaaaaacttacaaaatattacttgaagaaaaggtgtagtaataccatattacttttgcaaagatgtaaactctgatgttntcttcatgacgtgaatatccaactgaacaaacaactatcaataaaactagtctctcaaaaaaataaaaatggttaaactaaactaaaaatacctatctg

SEQ ID NO: 262410 - DNA, 171 bp, Glycine max
agatgacgcccaagcaaaactgatgatatggaaataatatgcacaactggtcatgcatacacccaggtgtgcactcccaagattaatgtgttaggtgatgtgctgatacggctcgagatacatcctctgtgttactcatagagacaacgtctccttatcctggttctttat

SEQ ID NO: 262411 - DNA, 297 bp, Glycine max
acatctcaagacataccacaatgaacacacaaaatgaatcctaaggactctctatgcatgggacggggctaggctaccaacaaatcatggctattctaggagtcctaagcttaggttctacgagagcattcgtccataaatgaaccttcactctttcgctcattcacagcccatactctcgttttagttaggcaatcaacttcattgtattatgttgcagcatacacacttattaatttcatatgtacttacagtttttctaacacaacatatagagagacaatatctgtctgtaca

SEQ ID NO: 262412 - DNA, 241 bp, Glycine max
gatcgcatatatgcggattgagttcactctataccgcaaatgcgatttatgataaatacatatgtggtataggattgtgtaaatgaatctctgcttctcacatatataaataaaaaatcacattatacgatgctactcactcctgcttgatgatgatcattactagtaacaagaactgtgacaggcttttattctgcgacaacgttaagagtgatttaagaggaaaaggactaacataggt

SEQ ID NO: 262413 - DNA, 486 bp, Glycine max
tcagatagctatgatggatctcaatctctgggtgacgccaatttttctgcagaaagaggggagcttcagttgccgacaataaattctctggccgggatctccgtcgatgaactctgaggagtccgggataacgacaacgtgtttggagagcgggatcagagatcactatgctcctgacggagaccgaaaagtgctaaaccttttcatttgatgacatttttcatgacggtggagaagaggaagaagttgatgatgtggcgttgatgtggcaacctgtgcttacatggttagtgactaggcatgatgacatggcactccgtctgcacgtcatcacttaacggatgtagcttgatggcaggtactaaaatgaaacgacatatgttttaggtatctagggaaataaatgaatgttaggtagtttttcgaatactaactatgtttcaggtataaaaaacttaattaagccaagatcaatcgctcaataca

SEQ ID NO: 262414 - DNA, 317 bp, Glycine max
  unsure (1)..(317): unsure at all n locations
cctttcatgggaatggagctgcacactggattccatattcacgagccacctttcatgtaactggagaatcacacaacatttcagcaagatttgacatactcagagacaaactcaatgtgaagagtctttcttctgaaaactcttccccttgagtttgangggcgatatcagaatattacagcatgtgttgcataactgtataaacaagtttgtaaatttgtgtacttgaaaaggctgatagcctttgctaacagcacttctctatcattagacatctgtatacagattagttaattcacctagttcggtagttaatt

SEQ ID NO: 262415 - DNA, 500 bp, Glycine max
  unsure (1)..(500): unsure at all n locations
tcgtcctcagatccctattggtggactaggcttaattcagacagccctcctagggttagactaacttgagctaagcttcatcctcagatccctcttgttggactagacttaccttaaatagcttacggaagtttagattaatttagcctaagctttttcctcagacccctcttgttggactagacttagaccaaacaacattattgtatcaacatatttaaaaccaaaacttaatccgcagatccctcatttaagactaagtttcaaccctgcttcattcaagttctaaggcaacagtacatttcccaatgctaaagtcacctaactatgcacacaaatggttgatcaggccaagagcatacaanaattaagcactgaaagaagcatagaagacaagaaatacaatcaattatatattanagtaattgcatcangtgttctttagaaatccncaacaagggtggttagccagccattacagaagaaccctaacaataatg

SEQ ID NO: 262416 - DNA, 346 bp, Glycine max
  unsure (1)..(346): unsure at all n locations
atgggcttatagcctaaaccatacttctcagtgattaagcttgagccttgatcaggctagtaatgcccgcgttgtgtttttctaagcacatccctggttcaaaacctttcaccaacactacttgggacatgattacacctgtattggacagacaagggttcccaatgagggagttcacggaggaaatgctgaccaccttcaaagactgcacagcagtgtctaacgattcctctgcggattacacataaagcatcgaggatgggcatcttaccaagatatcttnctagcctgacacgatgaccaagtgcctctacactacgaatctcagctattggtggaccgtata

SEQ ID NO: 262417 - DNA, 431 bp, Glycine max
gaacatcgatccttggaagcagattaggtcagttctctaaggctggaagactttgaaagctgaaaagctataattggtgcacacagatgtttgggggccagccccagtgaaatccgttggaaactcacgctattatgtcacctttatcgacgactctaccagagaggtatgggtgtatattcttaaaaataaatctgatgtgttctctgtgtttaaaaggtggaaaacagaagttgaaaatcagacaggtctaaaggttaaaagtctgaaatctgacaatggtggggagtatgatagtcaggagtttaaagacttctgttcagaacatgggatcataatgatcaagacaataccaggaacacctgagcaaaacggtgttgcagaaatgatgaatagaaccttgaatgagagagcaaagtgtatgctgatcc

SEQ ID NO: 262418 - DNA, 114 bp, Glycine max
accatgggaatgtggtgtgttgaaacctaagaaaccgttgatatgactatgagaacctaatgtcaatgtggcttagctcatgtacagaatatcattatggtagatcaggtgggc

SEQ ID NO: 262419 - DNA, 254 bp, Glycine max
tcaatctaagcgtttcgatatatacaggactcatcagacatctagaaaaagttattgcgtggaattgtgtggagcttcaattcaattcgagcgcctcatatggacggaactcatcgacatcgagaaaaagaatgtcgttgaattgctcagagctctcatcaatttcggcgttcgaatgtgacagactgattagacatccgagcaaaattatgtccctgaattgctaagctcacactcatttagcggcgatatta

SEQ ID NO: 262420 - DNA, 342 bp, Glycine max
  unsure (1)..(342): unsure at all n locations
cccctctagaagcgtagctcacccncatgccaaaatacatgacaatacaataaaagtccctactaaaaagactactcaaaatgccctgaaatacaaggataagaccttatactactagggtaccctaaacttgtaccctttattngtatggaaccctaacaacctaaaatggccaatatacaaggcccaaaagaaggaaaacttattctaatatgtacaaagaataatagacccaaccttggccatggactcaaaataaccctgaggttatgaaaccctaggctttttctcactctacctaatctttgagccttgctatggtctgggatggtccttctagga

SEQ ID NO: 262421 - DNA, 484 bp, Glycine max
  unsure (1)..(484): unsure at all n locations
tcatgatgatgaatcaagntgattcaagaagttttgttgatgtctattatgacgacaaacaccccaaagaatgatttcaagatttagtcaacaagttcaagatcaagataaatttcaagtttcatgagaagaaatcaagaagattcaagaatcaagagaagcttgatttcaagattcaagagaagattaattcaagattcaagagaagaaatcaagaagacttcacaagggaagtattgaaaagatttttcaaaaaacaaacatagcacaattttgtttttcaaaagagtttttctcaaaattntctaagttactagagtgtttactctctagtaatcgattaccagtttcctataatcgattaccagtagcaaagtttgatttcaaaagcttttaactgaatttgcaacgttccaattgatttcaaaatggtgtaattgatttcacgatattggtaatcgattaccagtgtatctgaacgttg

SEQ ID NO: 262422 - DNA, 450 bp, Glycine max
atagtatgatcctatacatgtgtgtttttatgtacattattactattatgatgattattggcatctttattctattctattatatatggtgttataagagtattaaatgaacttctgatagttaaagtgcttgaaaattgtaagtattcattttatgatgacaaccttggaaagatcatgtcatatcttgagttatagatgttcatttaaggtgttgtttgcattgttggaaaagcttgcttaaaaaactacaattcattcatacaccttagaaagcaaaatcaacttctatcttagagaaaatcagttccaaagtaggtcacttgatctatgaaaatgttcctaagtcccacattggacaaaataacctcatgaatctctgtcttaccctatatatagaggagaccaacaagccttatatgcaccaaagaattaagtgagcttaacaat

SEQ ID NO: 262423 - DNA, 416 bp, Glycine max
  unsure (1)..(416): unsure at all n locations
actcagcttccaagtntctggtttctaaccttgaaacttgttcttttattctttcatccttctccttgccaaaagaattcccaaggacaactgcctaatttttttgtgctctctttcccttttcaaaagaacaaagactaaccgctgaattcttttggttcccttccccttgtcaagaattcaaatgacacagctaagaattctttgatcttcctttccttatcaaaagtttcnaggactactgctgagaattatttgatccccttcacaagatcacagttaaccgctgaatcttggttacacattggaggacatctttgggacaagagaggtcatctacttggtgtgactgaaacagagaggacatcttgtgatagttatggaggacatcctagtcaaaaacaggaggcatcctg

SEQ ID NO: 262424 - DNA, 336 bp, Glycine max
  unsure (1)..(336): unsure at all n locations
tatcaagagatatctgtttattgttatcgggggctacttgagtcgccaatctgtccatctttggggtattcttagaatgatattgccccctattgcacactttatgtagttgcatcctatccggagccatatcataattgtactgacactgcttaatgaaggcaaccattangttcttccaagaatggactcgggattgttccaagttagtgtaccatgtaacagctaccccagacagactttcatggaaggaatgtatcaacaattcctcatcatttgcgtattcccacatcttctgacaatacatctttagatggttcttgngacaagtagtcc

SEQ ID NO: 262425 - DNA, 449 bp, Glycine max
  unsure (1)..(449): unsure at all n locations
ataaaaggtatctaaagcagaaaataaatgaaaatcctatcaataatcatcctgagctggtgtttgctcatcctgngctggtgcaggctcgccatgaggtgaggagggaacatcctgngctggttggggtgtctcttgatctgtaacagaccaaggatcctaagtgctctgcgttgcagtcatatcagctgcataatccgcatcagcaacaccatcctcctccccaaagacctctaaanatggtgaagtgactggtgaggtctgtggagtagcctctagagtggcctcatgaggtacctccggctgtggttgaggctcctgggctgcggaagcctcacctccccccccnccccccaaaggagaaaggtgtgactctagccaggccacctgagaattgaacnntctcatactaataatangccgatgctgagccgagtcgtgcatacttt

SEQ ID NO: 262426 - DNA, 343 bp, Glycine max
agcacatatgattgggcaagagagtttttatcttaggaataatgtttccaagctcgtgactctctggtaatcgattaccagaaggctgtattcgattaccagacgcccaacatttttgaaaatggggtttcaaaagtgtaatcgattaccatgactttgttatcgattaccagtgcttataaagttcagaaatattgtgaaataccttgtaatcgattacgccgaacatgtaatcgagtactagaggctctgagtgttggacattcaaatgttcaatgacgagtcacaacttataagaaagataactgtgtaatcgagtacaccaggattgccatcgattact

SEQ ID NO: 262427 - DNA, 434 bp, Glycine max
tacaatgaacaaagagtgacttcaatggtgagagtacaacatcatagcaaaagcctacaccttaattaaacatgcattcagttgaattccaaggtacaatggattttaaaaaatcatgcataattgataatatattggtatggatacacttagccttgtgcaaggttgcttatacagatgagatctttcaaaatgggctattctaagcttgattcgctcagcgaaatgggaatgttctggaatctacaaacccattcagatttacacaacaaaatgtagaatcttctacgaagggatcacaccattttcaactaagatcgtctacctaagcttcatgcatcctaatgtacacaatccattcaacatatgtgtagaatcccactaaattctagacccataatctacccacaatagaacaaacaaggaaaggaaag

SEQ ID NO: 262428 - DNA, 238 bp, Glycine max
cagtgaagaactctgtgaatgtatctatagcatggctgagcttcctgtgcagtcaacatgataaagaggaaaactaagaccacaaagtcagtgaggctcgtggtggctggccacctgtgaactttgtgtaatatgtgagatatggcctctggtaatcgattaccaagggtgggtaatcgattacaaggcttaaaaatgaagacaggaggctaagatggtctctggtaatcgattacca

SEQ ID NO: 262429 - DNA, 488 bp, Glycine max
  unsure (1)..(488): unsure at all n locations
tgctctactatggtttccaagcgttatagttattgagaagagattaaagcctccattttactgtctccgtgcaagggatgtttctctctctgtggacattattttataaatcccaccagtagaggtgtgagaatataagttccaaatgtggtatccaaatttcatgacgatccaacagttgacgaattcaggatcatagttttactgggaccggttttgggagaggaaaaagggaaaacgaaattgagaggaagaggaaacgtagagatgtatcgttagtatgaaaactgacctaacgtgtctctatttataactagggtactcttagcctattatttactctattttttattttattattntataaacaagaactctattttatttcctattaaatgaataaataaaatattatttntattntccttcaaaccattattntaataaagttatntccccttatttaattngattataaaacctcatca

SEQ ID NO: 262430 - DNA, 284 bp, Glycine max
gcgatgattatatgctgaaatcgcttcacgcaaactgatcgaggtgaagggcatagctaatctacggttccaaagagagaatgtgacgttatgactggaaaacgactgaggctttgatagttgaaaggttacatctgacttctctgcgaaacggaggttatagagagcttatcctatcttgaaatgtcctttaggactctatgataaatctcggactgcgctacagagacaaactacaaatgacctccgtgaacccacagccatttctagggcaaactaggctg

SEQ ID NO: 262431 - DNA, 437 bp, Glycine max
ctaaactctatacaagaaagaagctctgatacctcttgttttctattggcctcagatatcttaagaagggggggttgaattaacatataccaaaatacttccccaattaaaaatctatttcactctcttttcaagctataaattcccttaacaatgaacttcttaaatattaattcaaataaaacaatttgaatatgaacataaagcactaataaacaaatgagattaacggaaaagaaagtgcaaacttagagttatacttggtcggccacacccttgtgcctacgtacagtccccaagcaacccgcttgagagttccactatcttgtaaattccttttacaagttctaaacacacaacgaaaatccttcctttgtgcttagaattccttttacacaagagacccacagtctcttatccctcagaaatgagagtag

SEQ ID NO: 262432 - DNA, 311 bp, Glycine max
tttttttttctcgaaaacatctatggtctttgtataacactaggctctcacaacatctgtgttaaccttgagagacaagactgaacgaactgagacatatctatgcatgcaatacgatatgatattagtctgtgtgacaacctccaacggatcttattgatttgtctataaccgacaacggctaaagttgatgaaccttggctggggttatagctaacactgaattatcgagtatatatgggagctaagttacgtatgacacctaaattggggtgaatactatatgctgtctcgatggaatataccctccc

SEQ ID NO: 262433 - DNA, 428 bp, Glycine max
  unsure (1)..(428): unsure at all n locations
taatggtgaatctccaccatggagatgcacggcagacatacgacaagaggtgagaggaggcaccatccactatggaataagccatggatgaacgagcttctccacccaaatgagccttggataacaagcttggataggatgcttcaatggaggaaaagaaagaaggagagcgatcgatgccgttccccaatcaaataaacattanaatgtactaactacgaagtgatcctatgtcgttttccaacgatcgatgatacaccaaatgttcataacacatagtacgatatagtaacaaatttgtgggggacggtgggactccccactcctttcacagccaattaacacaaacgtactccttcctctactacatgtgtttgtgttcgacctttaaatcatcngcaccaatcctgcttcatgagccacggatc

SEQ ID NO: 262434 - DNA, 315 bp, Glycine max
tggagcacaacaagttatttcacattcacaatgcgcgcgtaagcccaccatcccctggttgccacctccagctgagctcacgtactcccaccgagcccatatcctcgtttatctcaacaccgggttcacatcaatcctcccaagcttccacaacatccaagctgaacaacattcacacagcacatgctatcacagcccagcaaaacagagcaaaggcagataactctgccaaaacaccaaccaaagatcacagttttttccactcaaagaccccagtaacaatttccttctatccaattctgtaaccggtggatc

SEQ ID NO: 262435 - DNA, 288 bp, Glycine max
  unsure (1)..(288): unsure at all n locations
cttccatattcaattacgagcgactcgatatccttcgggcacaattggacattcgagcgaataagtattatcgtttgaacttgctatgagcttctgttttcaattacgagcgtctcgatatattacgggactcaatcggacatccgagttaatagttattgtcgttagagtnttctcagagcgttcgctttcaattacgagcgtctcgctatcctacgggacacaatcgaacatcagagtcaaaagttattgtcgcttaaattttctcagagcttcacgtttcaatta

SEQ ID NO: 262436 - DNA, 335 bp, Glycine max
caaatcctctgaatcaactgttacgcacaccgcgcgtgccctaaacaaccatccctagacccaagttgtagattatgaataaatattggtccatattcataattcataccatatcaactaaacttaacctggaattatgtttttctattaaattgctttatactctccctcaccaaatattctgttcttccccaacattctgtcaaaaggagccgtgcactgagatgcttgttcataaaagttaaaccttaaaataaaggacgctgctatggtgaagatcgggaatacttcctcacatgtggaacacagaacattacccgcaattgaaagttact

SEQ ID NO: 262437 - DNA, 430 bp, Glycine max
catatacaacttttcatccactggtttagctccatcttctttgcaaaacttctccttttgattcattggaattgcagttggattgcacccttccatgttgaacttcttgagaatttcatttgcatagttttcctggccaagaaatatttcattctgtctttgatacaccttcataccgagaaagaatgtcatccttccaaggtctgtcatttcaaaaacatctttcatttcttgcttgaacttgtcaatatgctccccgctgcttgccgaaaccagtagatcatcaacatatagagatactacaagtatttcaccatcagtcttcttcagatataatgtagattcacttaaactctttgtgaagcctaagctcaccaagtgtgcatcaattctgctataccatgaccgcggtgcctgtgttaaaccatac

SEQ ID NO: 262438 - DNA, 361 bp, Glycine max
  unsure (1)..(361): unsure at all n locations
catttaagaggaaaaggtcgggtcagtgcatcgctccttcctcaatattttatacaccattatctaacaaccatcaattcaccaaaaagtaatagaatgaaacaaaataaagatttaattactcatttagtatctatagtttccaaacttattcaatntagtctttatagttaataagtgactnttttagtctctctagtttatcttttaatttctaatagatccctatcgttaaaattatttaacacggttaacttattgttgcaaaactccctacactacatcccacacanaactcccaccgcattttcaattcatctcactctcgaccattgtcgttcattggtgggaataaaactca

SEQ ID NO: 262439 - DNA, 470 bp, Glycine max
  unsure (1)..(470): unsure at all n locations
gctgtngaacttgcccatgttggatgagttagacatttccatttgttttatggncnnngngatgatgtttgtgatgtttatatgctgaaattgcttatggaaaactgatagatgtgaagggtagagctaatctacggttacaaagtgagaatgtgatgctatgagtggaaaaagagtgaggctttgagagttgaaaggttaaatctgaattctgtggtaaatggaggctaaagtgagttaatcctatcttgaaatgtcatttaggacttatgagaaagctcggcctgtgctagagagaaaaaaaacaaatgaccaaagtgaaccaagagccatttctagggcaaaattgggtgttgaggagtcaaatcttgattcagtggaatcttaggtgtaaatccagtttgagcaagtttagattgatgttatggacttgtgtgaggtgagaagttgcttcantattacctcattct

SEQ ID NO: 262440 - DNA, 265 bp, Glycine max
caaaatcgcctgcgagggttgggttggcccttgtgacacaacaaccttgctttctgccaactgagcatgacacctgactatgctgaatatacataacctctaactcgacgaattacacagaacatatgacttcacacaaacacccggaggagatacctaactaatgggcaccctacacaacacgagctgtcttctcaaagcgtggcaaaaacatatctcccatccaacgaaacccaacccaagtgggccccacttctcaaatgga

SEQ ID NO: 262441 - DNA, 498 bp, Glycine max
  unsure (1)..(498): unsure at all n locations
taaggtctnttattntaatttgagacaatggagactaatgttatttgttgtgattgtctacgaggcctagactaacatggaccatctttataagtaattcaaaatgaatcattaatatagattaatctaaatccacattattatggtacacctttcataatatattttttctccctcactgccatagtcttgtcaatcaacctacagcctcctacctcctatgtccgaccccatcctctaatttttattttttttataaatgcaaaacaaaaatatctgacttagaaaaacataattttttttagttgattcaagtcttcccttgttgcaatcatccaatctaagctgtaaattgatttcttttttctacattgcatcactcgaataatttaattcttcgtatttgactatagaagaatattngttctcaatcgtgcttcataccttgagcacctttagattcatctcttatttcatttttacaaagacgatcatagt

SEQ ID NO: 262442 - DNA, 428 bp, Glycine max
  unsure (1)..(428): unsure at all n locations
ggctctanattacattgatgttggatttatgggaggatgttatatgccattcttgctttaaggatagtgtcccactggtaaaattaactttccaaatgtttgccttcgcaagaatggccccgaggaagcttgcctcaaagaggtccaggaaagacaaggcggccgaaggaactagttccgctccggagtacgacagtcaccgctttatgagcgctgtacaccagcagcgcttcgaagccatcaagggatggtcgtttctccgggagcgacgcgtccagctcagggacgacgagtatactgattttcangaggaaatagggcgccggcggtgggcaccactggttactcctatggccaagtttgatctagaaatagtccttgagttttatgccaatgcttggccaacagaggaaggcgtgcgtgacatg

SEQ ID NO: 262443 - DNA, 339 bp, Glycine max
  unsure (1)..(339): unsure at all n locations
aatgagatgcttgtgagacacaactcaaagttcaacttctctcctttnttttcttccttcaatttcatgctcccccctctctctttctctccctctttcttttcctccattgaagcatcctcttcaagcttcttatacaaggctcatcttggtggtgaagctccttcttccatggcttattccctagtggatggcgcctcctctcacctcttctcctttgtcttccgctacatctccatggtggaaaatcaccattaaaggacctcattgaagctcatagatccagcctccatagaagccccacatgcaagcttccatcgcatatgttgatgaagagag

SEQ ID NO: 262444 - DNA, 364 bp, Glycine max
gagaatgaaaatttccaatctaagggaaaaaagagaggataggaaatttccaatcaaagaatgggagaaagaatgggagacaagtaagaaagataagaagaaagctcctggtcaaaggaaccagaagaaatgtgcaaagaggtctttagaccggacagtatctgaacaatacagaattgtcaccaaatgaacaaaaagaaggaaaggaaaccatgacctaaaatggtcttctccctttaattgccaaccagaatcagtgcgctagcgacttgttcgcctcgcgcacaaccaaaacagaataggaataagccaacataacaaatcaaaagccaaaaacacacaaaagccgcaaaacccatcaaga

SEQ ID NO: 262445 - DNA, 431 bp, Glycine max
  unsure (1)..(431): unsure at all n locations
agaatatctgggtgaatcttgcacctttgtatttttctttataagctaanngaccactataccatattaatttatgtttaagtattccacacataaaatttgtgttacatttaattattttatttatttataataattcatgtaattcaactagtaactcaccaattaaactagtgatccaatgacccaatacttcaattggatcattcatctttccaaaatttaaatattaaaaacacatataattccatcattttaattcataaaatatctaaacatatatgataatacaacatctgactaatattatacacatactagcttacccatgggtaataccataacccagaaattgtataatattacactaagtggattgatccaacatgaagcaataatattagttagatctacacagttaaatatcacta

SEQ ID NO: 262446 - DNA, 91 bp, Glycine max
agctatgtgcacccatgttcactgacggcacactgtgcctattctggagaatatatattcgtagagagacaggaacttacgaatttacctg

SEQ ID NO: 262447 - DNA, 313 bp, Glycine max
  unsure (1)..(313): unsure at all n locations
caagacanatagacaacactgtcatatgcaatccaaatcaaatactgcctgatcgaatcatcaacatatagcgaaacggacatttacaaattgtgaagagcaaaagctgaaaaaacactgtatttaatttcataatctattaactacaccacttctttggaaatgatagccaactcccctggcttaatgccctgtttggagaactccctcaccgcataaccttgcatattcgaaaaaagtaattatcaccagtatcgaataagtcataacacgagaaaaaccaaagagtttctgcattttgcaattgcacaat

SEQ ID NO: 262448 - DNA, 222 bp, Glycine max
  unsure (1)..(222): unsure at all n locations
cagcttagcgcatatncttgcngcagatgttcagctcatttgggcgctttcccgctaagctaattctgcagaagctaaaattttgcaacttccgctaagtggctccacatgtcgctaagcggtagtgtttttttttttttttttttacaaaggccagctaagcggaccatgtctcgctaaagcggcagtgtctttttcaatttaatttttttccagttttaa

SEQ ID NO: 262449 - DNA, 288 bp, Glycine max
  unsure (1)..(288): unsure at all n locations
tatgtgaatgtgggacacgctcatgtagcagcngtggaggttttctgacacaacgaacttatcccttgagtctctgatttgaaatgctaagacaagtctacgccattctacaagctgcctcgtgaaccaccaaggattgcgatgctatccgatggcactcttctagcaagaatatggttgaagcaatgacatgtgaaatatgacgaggcatgacagccattacagccattgggagattgctagtatgaggaaccttttttgtgagcaagctgaagatacatcaaagag

SEQ ID NO: 262450 - DNA, 438 bp, Glycine max
  unsure (1)..(438): unsure at all n locations
ttttacctcgtgaacgattcatatgacatcagnngnngacaatatcctaaattcatgtacaccactaagtacctggctgtattattggtcatatactcgaatatataaatgtatagtgagacaagaatttacgttttaacctgcttccaaaagtgtaaatgtaagtaagcgacacacagtgtaaccaatacacactgaggttgggctaagggatgtaacatctaatttgcctcgatctagagatctttgcgtgaaaaagacccgtctcacagtgcatttaattcatggatccgaattattaaggattgtccgaatgctagataccaaccanagagggtagatcttcatatatggctatattatgacatggttaaactgggccactgaccatggttgttgttaagactaagactgacatttccattcctctacgtgact

SEQ ID NO: 262451 - DNA, 364 bp, Glycine max
  unsure (1)..(364): unsure at all n locations
ctaagcttagaagattanaagaaacccatctgctgattaggtaagttctttcttttgaaganctacancttatcatgttgttaagacatcacgaaggccttacacaaaagatttatcaaagtctacaaggagctcacaacatcataatgaagttgcaccacagtctacattacaatgatgaatatcttgactctgaagagctgaacatcagaatggcttagaatgcacctctaagacaacattagttatgccatatgtcatcgcacattactgaaggcacatcagaagactaaggttgaggatctcacatttcatatgttgtcacacattgagggcaatcatgttgacagtgaagttgtccact

SEQ ID NO: 262452 - DNA, 318 bp, Glycine max
ggagttgacgaaattataaaagttacatacgattgttaagtgtaatggataattgaagtcaatttggttatatttcttatggtttttttcatgagagtttgtgtctgtgttgcgttatgttattcttgcgcacgatttgaatatacttgagcgaaaattggttaaaggataatcaaatatttttcatatgccgaagatatttctaaaagaaataaattaaattactataattcatatatattcataatatttgcttgcgttgataattgttttttgtgaacatggaatgctgggatgtatattaaggtttttcatttg

SEQ ID NO: 262453 - DNA, 445 bp, Glycine max
  unsure (1)..(445): unsure at all n locations
gagctttccatttattatggctttggaatttgccaacacaagtgtccttagaatagggatggttccgtagtggaatgagccctgaggatttggccgagctgcatttgctgtcaaattcagtcttccaaacaacagaacaaaacacagtcagaggcaatgatcacaagattcccaattgaaaacagggcaacatttaaaaaaaatgaatttattaactaaatagtctaaacttaacctttttaattgaatttaagaaattgtaaacttaactaacttaagtaaattatattcttaccacttatttgagatgataaacattntctatttttgtnttatttaatttttaaatggaaaaatgccatatntttattntattntntattatnattgngtataaagtaacaaacatatatnagatatatntatattntcacttaatttttct

SEQ ID NO: 262454 - DNA, 279 bp, Glycine max
agaaaagaaccaggtgcaatgctacgctcatactgacacttaaggcatgatccttcttcacagtagataaccttttccatacttgatgggggcagatacttttgtagatcttgaacaacaaaaatactgaatccatcatgtgacatatccataatgaagctgtgacagatgttcaccgcctctaaatgttccaaggaagtgagcacactcctcaaagccttcatgctcactaccgtggaccgaatgctgaacaccttcaagttaggggtagattcaatc

SEQ ID NO: 262455 - DNA, 152 bp, Glycine max
tgccctcgaccttcgaatacaccatgaagaagtatcatccattcatgagcgtctatacagaatacaggacttcaatataccattgagtatatacagaatataggaacgctgtcctcacatccattcgatataagcatgtatgtcaagaacta

SEQ ID NO: 262456 - DNA, 362 bp, Glycine max
ctcgaagctctaccaaaggagtcgacaagaatatcatcttatctgacaacacttgcacagcggccacagatgcatgggagatcccgttaaccactcatgaacgaacctccacagcgaacatgtgcagagtgcatatattggctacataatccgaacatccgaagatgaatgaggaagaatgtattcatgacttccacatgaacattcatgataatgccaatgcctgcactgtcttgggagagaggatcactcatgaacagctggtgagaaagatcctcagatccttgcctcagagatttgacatgaaagtaactgcaatataagaggcccaagaatttgcaccatgagagtggatgaactca

SEQ ID NO: 262457 - DNA, 358 bp, Glycine max
  unsure (1)..(358): unsure at all n locations
atgagtagcccncctctagctttctaaggaagctttcttcctctaacttcccaagaaactaccttccttgtcttctcaaggaagcttcccatgtgctaagctataaatagaagtatgtgtaacactagtcataactcttgatgaatgagaaacttgcgagacacacttaatagttcaacttctctccctaatctcctttaatttccatgcccccccccccctctctctcattctcttcctccattgaagcttcctctctaagcttcttatccaagacattctcttggtggggaagcttctccttccatggcatattctctagtggatggcgtcatctctcacctcttatcctttatct

SEQ ID NO: 262458 - DNA, 442 bp, Glycine max
  unsure (1)..(442): unsure at all n locations
tccatcangtaagttacatgcctntgagtttngtanatctattttttctagtgatagagttgaaacacgtctaaggaaaggaaattttgatcatgttgcctttgcacatcctggcaataggagacctatgatgagtggaatgaggaacaatgatggagaagctcatgtcatggctgcagttcccacatggccaaactttccacaagccacttattatcccaatactaatatccttcccaacaatatcactattcaggcaatatcagtcctattgacgacccaccaccctaccaatcaagaacacccaatcaaccacaaaggctacccctatatcgggcataaaatccacccgctgcataaccaagaccaagcatcacccctgatacaaaacataacattgaacaatgaaggaatttccataaaaagaagcctgtagaattac

SEQ ID NO: 262459 - DNA, 344 bp, Glycine max
  unsure (1)..(344): unsure at all n locations
cattggatttgggaccaccatgccctcctgatttccagctgggaaattggcgagtggaggaacgccccgacatttacgcaacgagcataatgtaaacctttacgattttaaaagctctatagttgggcctaggctctagaaattttcttttggataatgctgtgagtattttgtgtttttaatttataatacaaggatctttcttcatctattcctacgtctctacccattctcatgcatttgcatggttacttctctatttctgaaacggcagatccgatgacgagttccccgaagtactaatacctgcgacccgcctatcaatntngagccagaaacatatc

SEQ ID NO: 262460 - DNA, 356 bp, Glycine max
attggcgatcataagtgccattccttggattataaggatgaaccactctcatgcttataccaaaagggtcatcaagacaagttgaaatatgggagtgaccattttgcacaattgcggcataagatgaatcgagatacatcacatgctttcctactggcaaacatatttaggaatattgatgccctgggtactatcagtttcaccttgacaaagatgtcatggaccatgttgaaaatctaaactgattcaaccccatatcttgcgtaaaaattcgcaatactacatctggacatcattcgcatgcatccatgcttttcattggttgcattgctcgctgcagtctttccttgaaaaat

SEQ ID NO: 262461 - DNA, 387 bp, Glycine max
  unsure (1)..(387): unsure at all n locations
tgctctattntcatctcccactccaagtatgcctccggatcattctttcctttaaatggaggaatgttgangttaataccatcaattcccgtttgtctaagaacaccatcattccctcttctactcctttcttcttcattatgatctctattctccatttgaaccaacctctcatggagcgcatcatctcggtgtttcattaacctctccaaatgttgcatcaaagcttgcatttggaattgcgaaagccccactccatcattaggattagtacctgacatctcaaacaaacaaatcaaacgtaacaagacaattatagttgctggttgaatacctcacccactcaagtgtatcacacaattatggctcttctctaatgaaacactc

SEQ ID NO: 262462 - DNA, 460 bp, Glycine max
  unsure (1)..(460): unsure at all n locations
tcgagtgtctcgatatattacgagactttatctgacatccgagtaaaaagntattgccgcttgaatttgctcagagcttccgtactaaaattcgagcgcctcgatatattacgggactcaatcagacatccgagtaaaaagctattgtcgtttgaatttgctcagagcatcaagaatctatttcgagcggctcgatatattacgggactcaatcagacatcaaagtaaacagttatggtgcgttgaatttgctacgaccatccacattcaaatttgagcatctcgatatattacgggactcaatcatacatccgagttaagagctattggcttttgaattgctcacagcttcagcattcaattgtgagcatctcgatatattacgagtctcaatcacacatcccaggtagacgctattgtctgttgaaattgctcagagcatcaacattcaattccgagc

SEQ ID NO: 262463 - DNA, 438 bp, Glycine max
actgagcatcagctgccatatattgattgaattcttttttctaaataaaatttaactaagattgagattggataattgagattgacaaatgaagaatgagtataaaaattgtatgtagaaattatgtgtgtactaaagcaatttatagaatgttattacctaacattgtgtgtgtaacagctgaacaagtctacaaattttattgtttaacggtaaaattttgtagccaacgttcactgtacacacttacgattttgacaagtaacgttcttttttactaccctcattgagagtctcttcctctctctttctctctctttagattatctcacccacccaccccttcatttttcccacttttcttcttctattgtgacccaccctctcatcttcctcactcttgttttttcctctctctccttagtgcccttttttccc

SEQ ID NO: 262464 - DNA, 310 bp, Glycine max
atttatgttttcaaggggaatacaaccttcacttggatgtcaaaaaagcatttgatagtcactttttcgacctgtgaggtgaaatacatagcagctacttcatgtgtctgtcatgccagttaggcttatgaatttgttaaaagagttaagcatgtcacaagaagagccaaccaagatctttgcggacaataggtcaggcattgctctagcaaagaatccagtgttccatgatcgaagcaaacatattgatacctgttaccactacataagggagtgcatagcaagaaaggatgtacatgtagaatatgtg

SEQ ID NO: 262465 - DNA, 395 bp, Glycine max
atggcttaatccctagtggatggtgccttctctcacctcttctcctttgtctttcgctgcatctccatgggggaaaaccaccattaaaggacctcattgaagctcaaagatccagcctccatagaagccccgcaagtaagcttccatcaagtggtaatcagagcacaagagcttcaagtaggtgctccttaaacctccattaattcttttgctttaccttctcttccattgttgtttcttaatttctctccatgtatctcctcacatgtcttgttctaaatgttgttaacaatgatttctagagtttccaccgattaaacttgctataaaaactagatttgattttctatggttcacatctcttcgctcttgttcttgaaccatgacatatgttg

SEQ ID NO: 262466 - DNA, 400 bp, Glycine max
aaaaaaggctaaaggaagcttactgggatcgctgaaattggatgcaaagaaggaagcaatgagtagagcacactgcagagaagaagcaccaacgaaatgccaaaatgcagtttaaaagcacaaatgaaaatgtaactgccaaaggcagttatgccttatatttggcggtttcgaatgccttgcttagcgcatgaattcgctaagcgagcatacatggcgtttaagtttccaaacacatgcgcttagcaagcaaactcatttagtccaatgcaaaaattcaaatttttccacagaagattttgggcttatcgcaaagagttgcgcttaacgagctctgcatctttgaattggctgcaactcatgcttaacgggaagtggcttgacttaacgaataacatgc

SEQ ID NO: 262467 - DNA, 161 bp, Glycine max
gaccaaaaactcagctgatgagctgaccattgatttatttcacaactgtggttattagaagaaacaagtaccgcctctagggcagagagagagagtctcctgaataccagagggatataagaacaccctggctgcatcaaaggagattcacaacccatgag

SEQ ID NO: 262468 - DNA, 401 bp, Glycine max
  unsure (1)..(401): unsure at all n locations
actctttggtaccagaaaaacaaagaatattgggtgaggttgggaagcaagaattcaacttttcttcatgcccaaattgttgtgagaagaaaaatcaataaaattcaacctatcttctacaagttattctangaagttgttagggatgatgtttggctctttgtgaagaatgcctttgagagtggcacctttgatccttaggttgatgaaactttagttgtgctaattaagaaagtggacacccctaaatatatatataaaggacttcagacccatcaatttgtgtaatgtacaaactgatatctaaattgcttggtattaggttgagatctttcctggagactttggttaaccctctcttgagcaactntatcctatggagaagcatangtgataatgta

SEQ ID NO: 262469 - DNA, 306 bp, Glycine max
aagctacctaatctattaatagaagcatgtgtaacacttgttgtaactttgatgagtgagagtcttgtgagacacaactcaaagttcgacttttctccatcggtctctcttaatttcctgctcccccctctctctttctctccctctgtcatttcctccattggagcatcatctcccagcttcttatccacagctcatatttggggcgaagctccttctttcatggattaattcctaggggatggcgcctcctttacctctactcctttgtcatttcctgatctccatggtggaaaaccaccatta

SEQ ID NO: 262470 - DNA, 388 bp, Glycine max
tgggagaggctgatgtcattttgtttaagaatagtattccactggtcaaactaactttacaaatgtttgccttcgcaggaaatggtcccgatgaagcttgcctcatagaggtccacgaaggacaaggcagcagaaggaactagttccgctccggagtatgataatcaccgctttatgagcgcggtacaccaacagcgcttcgaagccatcaaggggtggtcgattctccgggagcgacgcgttcagctcacggacgacgagtatactgatttccaggaggaaataaggcgccggctgggggcaccactggttactcccatggccaagtttgaatcagaaatagtccttgagttatatgcccatgcttgggccacagaggaaggcgtgc

SEQ ID NO: 262471 - DNA, 382 bp, Glycine max
  unsure (1)..(382): unsure at all n locations
gagggggaagaagttccggtgaaaaaaacgttccccctccacccctttatattttcgtacaggggttgctcgcccacgcgagctaacctgtacttttttttaggggtgcattaaccatgtctcccccttttatggagtagcgttttgcctaacttgagcctacttaagttagaattaggtgtcgattacttatttaaaacaaacaatagtaaaagaaactgccttgcagcgacgttctctgcttgtttagcgccgggaaggggtggcgcttggtcggtcgtgatcctatccttcattcgcttccctccctaagtacctgcaagtaagagccaaatgatatgcgaccaatcgngaccggtcatcatcttacccttggtgattt

SEQ ID NO: 262472 - DNA, 305 bp, Glycine max
  unsure (1)..(305): unsure at all n locations
ctgatgataatggagatggaaagctgacactctccccttatctcatttattttggcgcaatcaaataagtctcgcatgcttaaagaacattattaaattgattgctgcttcttctgcattcagagtctatcatttagaagggggctaaaagcttattagcggaaaaataactcaccccttcttaagatattgaggtcgctggcccaacatttgcaataactaattctactcttaagctaagtaaaatgtagctttccatacgcgagaatatttgctttgcttgatgcangctgatgataacggag

SEQ ID NO: 262473 - DNA, 453 bp, Glycine max
gcttggcactgcagcagttaactgaacaaatgaagtgtcctctttcattggatggctgcctggtagaggtacatgttataaactaataagatttcctgcgtgttaggtataattattaagaagaggcactatatatatagacttttatatataaagcttattaagtttaacacactctttttaacacactctccacttgtggtcctcaattaattgagaattataaaatcagaataatgactcatcatatgagtagtgggacctgccaaatttgtgatttttaagaaatttgagccaacaaaaaaaagtgttcaagagaatatgttagagacagtgttgctaccatttctctgtttaggaatggtgtttgtagttattagtgaaaatagaaatagaaaatattttccttatgtcacacacgcttctgcattactaattttatgttttacaaca

SEQ ID NO: 262474 - DNA, 468 bp, Glycine max
  unsure (1)..(468): unsure at all n locations
ntgaaacannattaanatttttccatgagataaaagcatggtattgatcgtccattacccatgaaccgaataaagatcaaaacctgtaaaagtgatctactgtcaatgtagttcttagattgcacanaaatatgcttttaaacagcaattaagggcacataattaaatattaagcccacaaatctcaagataaaaagaaaagatgtgccaactgttttatgcttttaacccgcaattaagtccactcattntttatcctatctatttatcagcacttagataataaaaaaaaacacattattgagtattaaatttagtgtacattctctaaactaatgtatggtgtgcacaaactataccgtgatctaaacatngcattaatgttatagactatagtgggaatcatggtgttacttaccacaccattagctaataattgagctattgtgcaaatgttgggcacataaa

SEQ ID NO: 262475 - DNA, 233 bp, Glycine max
ggacccccgtaagaaaaattatgaccactccgaacttcctctagagcttccgctggttaatttcgagctcctcgatatctgacgcgcctgaatcggacatccgagtgaaacagagggacaaattcaatttccccagagcctccgctgctcaatattgagccgcccgatatgcgatgttcctgaaacggacctccgcgtgagaactcacgaccacctgaattgctctagaccct

SEQ ID NO: 262476 - DNA, 392 bp, Glycine max
  unsure (1)..(392): unsure at all n locations
ctgcagcttgagggcgtacccacattttttatgtagnagatcgataatgtgtctaccatcacgatcatcgtctccctttccatcattgggggtaccacctgngccgccagatccctccaccttttgggcgtgttctttgaaagatccgtccccctttttgcaaatgttctgtagttgcatcctatccggaaccatatcaaaattgtactgatactgcctaacaaaggcaaccattaggtccttccaagaatggactcgggaagattccaagttagtgtaccaggtaacagctaccccagtaagactttcttggaaggaatgtattagcaattcctcatcttttgcgtattcccccatcttctgacaatacatctttagatggttcttgggac

SEQ ID NO: 262477 - DNA, 436 bp, Glycine max
  unsure (1)..(436): unsure at all n locations
tccttggggccattcctgcgaaggcaaacanttgaaatgttatttaccagcgggacatctactctaaagcaaaaatggcatataacctcctcccataaatacaaacaccaatgtaaatttagagcaagcttatgcgcatatttccttacatacgttctcttgcacaagacatttaaccgaaaaagtgcacccatatacaatcaaggcagcttcgttacctagattatttacacgtactgccaaggtgtatttgttacttacatcacacacatctccttggctgaatttacatacatgcatanctcaaagcatttggggtaccaaanattgcacatgtgcacatcttggtatttctaatacctatatatacacaaacttcatgatgaatcttgactatcttcacannaaggtgctacacttcatcccttttttcaag

SEQ ID NO: 262478 - DNA, 389 bp, Glycine max
tttaagtcattcactcgctcaacgcgcgctgtgcgctaagcgaatctttgttcatgcactgagcaagtcacttcctgtgctaacgggctcgctgagcaagccctgtgcgctaagcccaaaaacttctctaaaatttcatcttttggaatggggctaagcgagtcatcttgctaagcacccactatgcgctaagcgcaagttcctctctgttcgaccatttatgagaattgggcccagcgggtcagcccgctaagcctaaatccctctcgggtttgaaattgcactaaacgagcgccactactgcatcaggaagcattttattcgctaagccgacccatggaccattaagcgagaggtgtaaaccaatcagagctgtaaactcgctaagc

SEQ ID NO: 262479 - DNA, 499 bp, Glycine max
  unsure (1)..(499): unsure at all n locations
cgcctcgagtgcaactgtagcaccacccatgtgcgccataatatcatgcgatatgttaagattctcacttggagataaactgattgacgaacgagagatacataggctgttgtattaactagtcgcatgtaaacagacttactacacgtgtagatatatatcccgagagtgactatatattgataaagtactattgacttgttacggaaacacacatctctaaaaaactatactcaagcgagtgaactctataactcggtctgaacacatagtaaagagactgctactattgatanggagcagttattaatgacaactgtgaaaataaagaatcaatatgcaaatacatgctcagcatcatttacttggagatcatgataatcccaaaccaactataacttctttaggttcacatatactactcccgatctaaatatacgtaaatcatcatacttagacatgaagactatagtaactaatcgcatctaatcttctatga

SEQ ID NO: 262480 - DNA, 354 bp, Glycine max
tctctatactcactggtcatgggagtcctaaggagtcaatggcctcaaataatttacagcccagagcaccacaaagatctaactagactgaagggctatgaatccaccactcaatataggcctggccatacaaatgttgtgcacacgccctatctcacagtttttagcttcacaaaggcatggttgtctatctgtcaatgccctatttcacatttcttgcccaactcaaaagggaactagctgctaaccaggagttcacagctctccagcgagacatgcaggaacatccagccaaccaccttgatcttatttacatcgacgacttaactctacagaatggccgcatttgggtac

SEQ ID NO: 262481 - DNA, 97 bp, Glycine max
ccgttgacaaaagaacacgagaagcgccaattccggaccaaaacaaccggggaaagctcaggaaagccggagaaaaaaaacgaccaccctctaagga

SEQ ID NO: 262482 - DNA, 429 bp, Glycine max
  unsure (1)..(429): unsure at all n locations
tccgtcgggcttctttganaagctttcttatataagcttctttgtaaagccacaccacttaactgaccaaccctctatcgacgaaaataacattgctctaagaaaagtacggatgagaataacgcgtctcatgatcaaaccggcgacgtggattactaggtatatatagatatatatatcagagatgtgacactaattcccatgcaaacatacatgattcacacctgatgttttaccacaaatcattcggatgataggaacataacaactacatacttttcagcattggaaaatacgaggaatcaacatcttcctgaagattgaaagcatgctgagcgcaacgggggtttgctttgcaattttggaacgacctgggtttgtggtaaactaatggatgcgtgtcctaaccagttgaaaaaaatgtcgaat

SEQ ID NO: 262483 - DNA, 364 bp, Glycine max
  unsure (1)..(364): unsure at all n locations
cctatgtatataaaacagtcccacaatcccaatcttacaaaatcatattcatatgtcattggggcatttcaccaagcacttggtgggcgcgtgtttatgcataaattgcaagagaatgggggcaatgtggcatgccccattgcttcaaaatacaacatangcctaaggccatcccctacaacccatcaactctaacaaatcaagcataaaaagcaacccaaaactgccccacaaatatgagtacattctcacaatttagagcaccaaaagatgaacaaaacgcaccaatggaaagctaaacactcaaggatngaatacttacttgctggagtgaataggaataccaaaaatgaaagccaatgca

SEQ ID NO: 262484 - DNA, 416 bp, Glycine max
  unsure (1)..(416): unsure at all n locations
acattatctctgtcacctattaaagttttcttgctgagggttgctgtaaaaaaaggaggcgttacatattacccatagcagttgtaattaaaactgatctcagaaggctcaagaatattcttgaccatagacttttcacaacttttcaacaaaaatgggtgggaaaacttatggaatttgatttcattattgaatataaacccggaaatgagaaccaagctgctgatgccttttcaagagttgaatgtgctactatctncattcaccaacccgattctgatctactatagagaatcatacattctgcaaggtgatgatgccttaccaatactgatgctgaagtacgaaagatcctcttccataaggatatctcttggcaggtgggaactatgaggacaggaactggctttggaaaa

SEQ ID NO: 262485 - DNA, 226 bp, Glycine max
gtcttcgtgagaacacaactctacagtgcaacttctctccctttttattccttcaatttgcggctcccccactctctgtttgtgtccctctctcttttcctccatggaagcatcctattcacacttcttatccaaggctcatcttgttggtgaagctcctatttccaagggttattccctagaggatggcgccatctctcacattttctcctttgccttccgctgc

SEQ ID NO: 262486 - DNA, 365 bp, Glycine max
ttcagagaattgaattggtgagggaaatgaaaataaaaaaatgaaagtgtacaaagaaaagtacacaccattgattcaggtcttgtgagaagcttacaagagagaattgagaagttccgattacagagctaacgagagaaatgatgagagggctaacaagcaagagaattgagaagttttgattacggagctaacaagagagagaactgagaaatgtcgattacagacctaacgagagagagaactgagtaatagtgggttgaaattaacaattagaagtcattgccaattaagaacaatggtgaagtataaattggttttagtggctataatatattggccatgaatgacctacattagaaagt

SEQ ID NO: 262487 - DNA, 479 bp, Glycine max
  unsure (1)..(479): unsure at all n locations
gcttgtgttcagcttactatgttgcctacgcagaanatccacatatcactcagtttgattccactattccaatacgcttggagcagcttaatagatctcaagctntgcaaatattcagagctaataatttgagctgagtctaaataatgaaggaacagtaattcaagttaacttcattatcccccgggatttggaaggacaatttttgcattgtatataatgatttagtttttgatgtagtcttgaattatgttaaatctttataatgccggttctctatttttgtacatgaatatagacagcaacatgcaatgaacagctccatttagttaggactgatagtcatagctgatagtgtacaactgaaacaacaaaaccatatgttatatatatatatatataaaccatgaccacaagattaatagctctcataaaatagctccacactattctatagatcaaagggacattagttcatg

SEQ ID NO: 262488 - DNA, 357 bp, Glycine max
ccccatctgatattggccgcagattctgtgaaaatccatttttgagaatatatcctcatcgtctacgagagtacgtttctctggtgtacttattcagagtgttgctcaatgcccttgagatgtatgatctgacatgcaagaaacaccatatctgcttacaaggagataaagacaacggtatgaaaaaagtagaagcaaagactgaacatcctacttcttagaatgcatacaatcactctcacaagattaccctccatcttttccagataattaacacatatgaacaaagcgttcatctcatcggacaaaaaaaattattaccttaacccattaaaagtacagtgcagcacgtcgcac

SEQ ID NO: 262489 - DNA, 393 bp, Glycine max
actaggtcatggtcacttgatgatttccagtgattccatagaaatctctgagttctgtccatccaaccaatagatttgggctcaccagatcttggttgtatgtaacacaatgcatgttgacattccagtctaatagacgtcaaggattctctagtacatcctttcatctttcaacaaatgacctactaacttcaccataagactacatttaacaagcaaacaaatataagccaatgcattatatcatgtcatgtctatctgagaatagtcttgaaatttctagcctaatccataatatgaactgtgttgaacatttcctctggttgttcttttgttaatcttcatcattgacttacacatatgcttcaagatgtgttgattttatccatcatt

SEQ ID NO: 262490 - DNA, 415 bp, Glycine max
  unsure (1)..(415): unsure at all n locations
ctttatntgnattagcaacaaactaaatgattgctcttctattttataccacactttccttaagttggaggcatttggttgataagctagtagctcttgcataggtttgtggtttagaatttaaattactgcctacctctaatcatatcctaatttgaataaatataagttacaacatggccataaagacaacaacatttattagaaattactttttgtatatagccgagttcatgtcctacattttagacattatagatgtacacgctgctagatatgttatagctaataattcttctgacatctctgttaatattgaagagatcttctgagggagtattaagtcttggaaggtttcgattaatattagaggtgaacattaacagtgatagcgagacgttaggctttctgaatt

SEQ ID NO: 262491 - DNA, 240 bp, Glycine max
ctttctagagaaaatagacacctttgagtttccaggagtgagctaaacttaaagataaaatactggtatcatagaatcagatgacttggcagagagtcgaaacgcggttactgatcttgccatctgaagctactcatgatttttcgacctataaccaacaatggatattgagagaaaaatgacttgcagagttgtaggaatgttctgccaaaactcctatatctatggtgagctgacacg

SEQ ID NO: 262492 - DNA, 295 bp, Glycine max
ttccaaaagaattctctgactacccctgattcttttgtgttctttctccttttcaaagaacaaagactaaccgctgaatctttttttctccctctcccttgtcaaaaattgacacgacacagtctgagaatcatttgaatctccctttccttaacaaaagcgtcaaaagacaaccgcttagaattctttatatcctattcacaagtatcaaggtttactgcctaaatctttgtttacacattgagggaccacctttgtgtgcaagtataaggacatctactgtggttgactagac

SEQ ID NO: 262493 - DNA, 410 bp, Glycine max
  unsure (1)..(410): unsure at all n locations
tgcggcatgcaagctttggtcaatggccccaatgacatctatccttcacatgtaanaaggccaaggggcggacatgacattcagaggatgtggtggaacattgacattnttcgcgtacgctngacatttatggcatttccttacatgggcacagcaattgctttccatagtgagccaggaataacctgctctaaagatctttctggccatagcatgcccattggcatgtgtcccaaatgaaccccggcggatttactcgatcatgtagttcgcctcattggcatctatgcatcgcaggagggtcatgtcctggtttcatttgtacaggatggtaccactcacaaagaaaccagcaggcaatctccttaacgctctttgttctcgacatactggttgatgtcgaaatacca

SEQ ID NO: 262494 - DNA, 453 bp, Glycine max
gacacttaaaactcagcttctatggggctgaatcttatgcttcaatgaggtcctcttatggtgattttccaccacggagatgcagcggacgataaacgagaataggtgagaagaggcgtcatccactagggaataagccatggaaggagaagcttcaccaccaagaaagtgtcttggataagaagcttagagaggaagcttcaatggaggaacataatgagagaaagagagacggagagagagatatatagagagagagagagagaaagagaaagtggcatggtaaattgaaggaagaaagggacgagagttgaactttgaagcgtgtctcacaagactctcacttatcaaagttgcgacaagtgttacacacgtttctatctataacttaagtcactaactacacgaaattcacttattttgtgactctcactttcatttcatgtgaatcta

SEQ ID NO: 262495 - DNA, 437 bp, Glycine max
ggatagctctaagactcggtgtgtctttcccttctgcttcctcctccttatatagggtccaggtagcttacttttcacgttgactttgcacttaacatgggctttctcgctaagcgtgccttagggcttcactgtgggctttcttcgcgctaagcttggagtgggagcgaagcctggagtgcgagctaagcctgaagtatgcgctaagcctagagtgcacgctaagcctagagtatgcgctaagcttgaagtgtgcgctaagcctggagtgcacgctaagcgagctgtccaattctttcaacttttcttcaaggttttttcttgagtttttgcatcaatttttcctctaaagcactcgaaatcttctgtctttgactcttgctaataaaaaattgcaaagatgttaatttcttcattacttcattaaaaacaatagt

SEQ ID NO: 262496 - DNA, 371 bp, Glycine max
catgaagaggaggttgagccatgttctcagtataaaaattagtagtagaatgttcaaaatcagaatcaccctctacagaatgctcaaaatgcacagaatgactatgatgcacactatgtctaactaatctatgaaagggtctatctatttcagtatcaaagggttgtaaatcacttggattgcccctattcatgcactatatgcagcaaataatgtgtttctcaacaagcacctaacaagggggtaaaactacagctatactcatacgatatcaaaatgagctgaaattttgtgaggaacactctaaagtcatggaaagatagcacaataaatttcaaacacaaattcaaagtctaactatgaaaactacc

SEQ ID NO: 262497 - DNA, 308 bp, Glycine max
attcggccttaaactaactggaggcaatttaagcggtttgaatttctggacttagcatgccaaacaaagaaattacttttgccccatgcataacattctcttcttatcaaacaaacagattagaatactttctagtggttctcatcttattaaaaaagtcacctggtacccctccagataaaccaacagaactctcaaagaaattaatcatatttccctgaattatcgcagacatattttctaatttttaaggaaacggaactttttgaggaaagcgtaactaatcatattccaccatattgtccaga

SEQ ID NO: 262498 - DNA, 396 bp, Glycine max
agaagatgggagaagaaagatgcacagctgtccgaaaaaagtagacaaactccttaatgcttaattcattatagacatcagatattctacttggctcgccatcatcgtcatgggcaaaaaggtcaaaggcaaatggcgaatatgcaccgactacactgatctaaacagggcgtgccctaaagatgattaccctctgcacaacatcgaaaaactgtggaaggaatgccttccaagattattttgatgatgccaaagaatcaagtgttaaacaagtttcaagaatcaagatcaagattcaagattcaagtaaagtatcaagactcaggattcaagaatcacgagaagactccatcaagataagtattgaaagagtttttcacaaattgaatagcacaa

SEQ ID NO: 262499 - DNA, 439 bp, Glycine max
actaagcttattcaacgtgtagatctgcactataatttgagacacctacgtcattgacattacaacacatcggcggttgacacccagaaaaacacacgcgccatatacactacgaaacaccagatctgccatcgttatctgcgatggcgcaaggacacaacgatcacacttgccccaagtgttcacgatgctgcagatatgggctcgaaaggatgactaatgctattgcgagatacacgttatgaagatagagggataggagacgccatatcggacgaggcactaaaattaaatttccgaactgaaggagagaacaatgagagggctaattaaggaaacgggtcatgacaaaatgaaattatcataataggtattgtgtgtaaaaagattacaataatgagtaaaaggtattttgatataggactttacaatataaaaa

SEQ ID NO: 262500 - DNA, 298 bp, Glycine max
gagagcatctctttgatcatatcgagagtgattatactttatgcgcctgagatccaccaacaccttggctagttcaaccgactgaatcatcctatagctgccgcccgttctggaaaaacggattgatatcttacgttcatgataaccctcgttcattgaaaccgcatgaccatataaatcacctctacaccttacttatgtcaaggccgtaactcccattatactcactccaatgaatcgaacctccgacctaaatggaatgaccatacgaaacctttcacagcttcttgggatcacc

SEQ ID NO: 262501 - DNA, 459 bp, Glycine max
  unsure (1)..(459): unsure at all n locations
gctttgctgtggaagcaatgccttccaagattattttgatgatgccaaagaatcaagaagtcaacttgatttcaggaatgtcatcatcaaaaagggggagactgtggaagcaatgtcttccaagattattntgatgatgccaaagaatcaagaagtcaaacaagtttcaagaatcaagatcaagattcaagattcaagaataatcaagatcaagatccaagattcaagtaaagaatcaagactcaagattgaagaatcaagagaagactcaatcaagataagtattaaaagaatttttcacaacattgaatagcacaagaatttttcaaaaagaaaaatcttttaccaaagagttttattctctggtaatcgattaccagaaggcagtaatcgattaccaatagtcagcattctattcanaacagatgtacaaagttgtaatcgattactataatcatg

SEQ ID NO: 262502 - DNA, 461 bp, Glycine max
  unsure (1)..(461): unsure at all n locations
taacccatcaacttctcatagtagaatactggtaatgtgtctactatcattgttatcatctccttctccgtcattgggggcactatttgagctgccaaatcccttcacccttggccgtattctttgaacgactctccttcttgcacaagttctatagctgcattctatccaaagccatatcagaattatactagtactacctaatgaaggcaaccattatgttcttccaagaacgaacccgggaagattccaggttggtataccaagtgattgctgccccagccaaactttcctggatgaaatgcatcaataatttttcatctttcgcgtatgccccattttcctgcagtacatnttcaggtgattcttggggcaagtagccccgtgtacttatcgaagtctaacaccttgaacttctgaggaatgaacatgccgngtactatgcacaactcttccatatc

SEQ ID NO: 262503 - DNA, 423 bp, Glycine max
gctctaagctacgagtaggaaagctgctatctcaataagcttactgaccgaaaaaataaagaacagctgtctatttggccaatccaatcagaaaaagaacgtagcctacgctgagtatgggattaggatacacagcatgagatcctggatttcattaagtaaagactatgatgcaatgcggaaaagatgtatatagtaattgcacgagtaagtaggaaataaacacaaactggatagtactcagccttcatcttgatgatgaaagtgtatgatactatgcttaaaaaacggctttcaaacgggttgttacataatagacgagggttacacgatcctggatttgattttgatgcaccattcagattggcttaaggataatggatcaaatatctatatatttcattgtataaaaatttcagctat

SEQ ID NO: 262504 - DNA, 406 bp, Glycine max
  unsure (1)..(406): unsure at all n locations
gcttttatggaggctggatctttgagctcaatggtgttctttaatggngattctccaccatggagatgcagcggaagacacaggaaaggaggtgagatgaggcgccctccattaaggaataagccatggaaaaaagagctctaccaccaagatgagccttggataagaagcctggagggatgcttcaatggaggataagaaagagggagagaaagagagaggggggagcacgaaattgtaggaagaaaaagggagagaagttgaactttgagttgtgtctcacaagactcttattcatcagagttacaacaagtgttacacatgcttctatttataaactaggtagcttccttgagaagctttcttgagaaaactttcttgagaagcttctttgagaaaacttccc

SEQ ID NO: 262505 - DNA, 415 bp, Glycine max
  unsure (1)..(415): unsure at all n locations
aagtcactcccgcattatatctctaacattcattgtatgttggtctccgcctttgtcacgggaagccggaagggccatatcaccttcttaattggacacatggggcactgcgcccccaaatgcgcaagtaaaaagagataatttttcgggctctcgtgcccgaaaatgcattcatatcatgcatcgcataagcatctcttcataacatcataatgggcatatcctgcatatgtccgtatcatattccagcctcacattttgcatgaatcatggcatcatcatgcatatgcgttcaacaaacattttgatctgcaaaattgcataccatttgttctcatgttagctcatccctagcgggttcctctacaaaacanaaaccaaaaaagggggaagcgtgaaacttcacactacattc

SEQ ID NO: 262506 - DNA, 310 bp, Glycine max
ccacctgagttgcccaggctctccatcttcgggcgcatactttgaaagatctgcgccctctatttgcacattccttgaaagatctgcgccctctctctgcacacgttctgtagatgcatcctatccgaagccatatcagaattgtactgacactgcctaacgaaggcaaccattacgtccttccaagaatggacccaggaagggccctaagtaagtatactacgtgaccagttgcccaagaagaccctctcgggaaaaatgtatcagcacgtactcatctttcgcgcatgcccccatcttctgacaacac

SEQ ID NO: 262507 - DNA, 379 bp, Glycine max
tgaggactgatctttaaccctactttctcaaatgatcagaagtttgaataaaatgcactcaccacgcctctatttatagccttagtgtcacacaaaataggatggaaaattgaatttctattcaaatttcacttgaatttgaatttgagcttgtggagccaaatttggagccaagatttcacttattatgattagtgaattgaagctatgggtcagcccacttaatcaagatcaagtccaagaattccactatgtgtgcttaggtgtcatgatgcatgtaaagcatgaaggacatgtacacaatgtgactatttgatgtggaatgtggggtagcaagcaaaactcacccccacttatgctatccataattaattggatt

SEQ ID NO: 262508 - DNA, 442 bp, Glycine max
  unsure (1)..(442): unsure at all n locations
ctgcagcttanaaaaccttcgttcaagccctctgtacttcttgccgtttacaatgcaattattcgtaatatggttgtagaaattatgccacttacaatatttttcccttccaatttttttagaaacagtaacttatgtcaatcctttggacgaatttgttggtattttatgagatgataaaaaatataatcctcctttgatatgttaaagtcatactcaaactttccatcctcagcatcacctttgttttttcttttttcaatgttggtcttgaataaggtttcccctataagatctcaacaagcatgatttcatcttcctcttaaaggtttcaaccttctcatcatcaacgttaactattgagatcaaacgggatcatcgttctttattagccctactcagctncttctcatgtatgaattgttctattcagatagcttta

SEQ ID NO: 262509 - DNA, 111 bp, Glycine max
ccgacgcacaaaaagatgccgccgtcctatttcatgaagagagcctaatggccccacatactctcaaagcccaactaatatccgcctcagcgatatagcacaagattatag

SEQ ID NO: 262510 - DNA, 375 bp, Glycine max
  unsure (1)..(375): unsure at all n locations
ggaacgcccaagtgggcctggttgctatntgcacccccatttttactaagtacaccccctgccttttttggtgattctttttccgtaacgttatgaaactttacgaatttcataacgatgcttgttttctttccgtaatgttatgaaaccttacggattacgtaatcatcccttttttgccttccggaacgttacagaactttacgaattgcacactaacacttccttttaatttctggcatatcacggaacttcacggattgtgctacaatgctttcttttgacttctggcatgtcacggaacttcacgaattgcctaacgatgggtgccaatctcctcaaagtggtcaaacgagggtcgcatcccagtaacag

SEQ ID NO: 262511 - DNA, 437 bp, Glycine max
  unsure (1)..(437): unsure at all n locations
catcagcgnctaaactctatacaagaaagaagctctgataccacctgttagacaagcggccgcagatatcataagagggaggggtcgaattaagatattccaaactactgtcccaattaaaaaggtatgccactctcgattcaagatatgaatctccttaaggacaagcctcttaaatattgatccaaagaaaacaacatgaatatgactataaagcaaccataaacaaaggacattaatggaagagaacgtgccaactcagattgatactggttcggccacacccttgtgcctacgtccagtccccaagcaacccgcttgagagctccaccatcttgtaaattccttgtacaagttctaaacacacaatgacaatcctggcgttgtgtgtaagagccttacaactagagacgacggtccttaatccctaaagaatg

SEQ ID NO: 262512 - DNA, 410 bp, Glycine max
  unsure (1)..(410): unsure at all n locations
agctntgtgtaatcgaatacatatatttggttatctattaccagtgtttgnttctgaanaatctaaagatgtaaactcttcaaaaaggttttgactttttcaaatgggttttaagcttttctaaaagttataactcttctgaatggccttcttgaccagacatgaagagtctataaaagcaaggctttgttttgcattttttatcaaggtctttctaacaatctcatacaatcctttacaagccttgaatctctttgaaacttcttcttcttctttgtaccaaaagctttatgaagttttctggttttctaaaccttgaaaacttgcgctattcatcctttatattctcttctccctttgccaaaaagaattcgnccaggactaatcgcctgaattcttttggtgtctct

SEQ ID NO: 262513 - DNA, 429 bp, Glycine max
acacaatggtgataacaagacaaacttcaattgcttcttggttggggcaactttgttttcatccaaatgatgtacaactaacttggtagaatatagtccagaaattttcccaaattattataaagtgatatcataatatttagaatttttcttgggaaaatactgttgtagggcaacaaaggaacaataattatgaaaaatagattcttgtaatttgttcggcttgagaaaaatatatgacatattattaaggttatggaaactccctgttaaattttatataattcagagctgtctaagtattttttttaaatataaaaatagcatttcagaacaattctaatgttaaaaattaaattggaaaaaatgtctctataatgattcttggggaacccaacatcctttatgatgaaatctttctttatatat

SEQ ID NO: 262514 - DNA, 455 bp, Glycine max
  unsure (1)..(455): unsure at all n locations
tgtgcagagatgttacaaacaaatggtcctacaaaattattaatcaaatagtattgataaaaaatgtgcataaatcaagtacaaacccttcaaaacaaagtaaaatcaaatagtaattttagctgaaaatagaaaaagaataaaaaaagggataaaaaactaaagttagaactaaatgtaagaacaaaatcaaaacccttgaaatttaaggtgtgtgagagagagctgaaccgatggaattgcgacttttgaagaacaaataaaagtgaaaataaatagaagagagtgattattttgaactaagaaatatatacttggtggcatggtttttgcacagccatatcataatcgtcctgagaccattgagaaatcgagattcattggcaattntataagatcaaagctaatattttggtgaaaccacatattgagtcatcctgtggaatctgaatacc

SEQ ID NO: 262515 - DNA, 420 bp, Glycine max
  unsure (1)..(420): unsure at all n locations
ctagcttttcattggtgtattnngatctccttttggggctcctaaatgtgggagtgtgctcaaatatatggggcaatnttgatttgttttcttgcttgattaggttgaattaagggttggtatgaaatggccctatgcctataatgcattttgaagtaatgggacatgccacattggccccgttctcttgctattaatgcctanacgcgcgcccaccaagtgttcggtgaaatgcctcaatggcattagcgcgtgaattttgtagggaaacaacccatggngcaatttggcttgcacatatttttgggacatgcattcattttcgaaagagctagagtaattgccccgcatatgtnctaggcctangaaccaaagtttttatgcanaagtacacaaaaggaggtgcatattgggtaaagt

SEQ ID NO: 262516 - DNA, 293 bp, Glycine max
  unsure (1)..(293): unsure at all n locations
atgcacctgaagcatacctccgtgttaagcgtcatgaccatgcgaatgtgtcaagagctntcaccgttcaattttgagcggatctttctgtgatgcgcctcaatcggacctacgtgtgaagagctctgaccattcgtatttctcgagagctttcaccgttcaatttcgagcggcgcgatatatgatgcgcctgaatcggaccaccgtgttaagagctaggaccatttctacttggggagagctttgactgttcgaatttcagcggagctatatatgatcagcctaaaatgcac

SEQ ID NO: 262517 - DNA, 402 bp, Glycine max
  unsure (1)..(402): unsure at all n locations
gtatttatgggaggagggtatatgccatttntgctttaaagagtaatgtgccactaaaactaactttccaaatgtttgccttcccaggaatggcaccgaagaagcttgcctcatagaggtccaggaaagacaaagcggccgaaggaactagttccgccccggagtacgacagtcaccgctttatgagcgttgtacaccagcagcgcttcgaagccatcaagggatggtcggttctccgggagcgacgcgtccagctcagggacgacgagtatactgatttccaggaggaaatatggcgccggcggtgggcaccactggttacttncatggtcaaatttgatccacaaatagtccttgagttttacgccaatgcttggccaacagaggaaggcgngcgtgaca

SEQ ID NO: 262518 - DNA, 445 bp, Glycine max
  unsure (1)..(445): unsure at all n locations
gagctctatggaagctgtttatttattttcaatgatgnccttcaatggggattttccaccatggagatgcagcgacacggcaaacgaggaaaagagaggggaggcaccatccactacggaataagccatggaagaaggagcttcaccaccataaatgtgccttggataaaaagcttgaagaggatgctttaatggaggaaaagaaaaagagaatggggcgagcacgaaattgaatgaataaaagatggagagaagtggaactctgaagtgtgtctcataagactttcattcatcacagttacaacaagtgttacacatgcttctatttatagactaggtagccttcttgagaaactttcttgagagaactttcttgagaagcttctttgagaaaactttcttgagaagctagagcttaactacacacactcctctaattactaag

SEQ ID NO: 262519 - DNA, 416 bp, Glycine max
actctttaatattagtgctcaatacaatctgcactgaaacaggtcattatttgcgtagaaaagtttatttgtaattgagcttatgtatttatcctctctttgagtgttattgaattgttgtatttattcaaaattttgtttgtgaaaatcatgagtgacttggggtcaaacaatacttaggtgtccttagattcaagggaagtctaagggtgtgccactaatggcctggagaatacttatgtagccaagaatggcatgatagaatacttgtttgtaataaagttctgattaatggaaccctttgcagttttgtaaaggagaactagttgtaactgtgttatagtgaacgaatataaagtaagtgtttctacttctctcttgagctatatgtttaagtattcttttaagcttacctt

SEQ ID NO: 262520 - DNA, 357 bp, Glycine max
  unsure (1)..(357): unsure at all n locations
accaccatccctgttgccacctccaactgagctcaccgtactcccaacggagccccatatgcttcgtttctctcaacaccgaggtcccaacaatccctcccaagcttccacaacattccagcaaaaacaaaatcacacagcacgagctatcacatcccagccaaacaaagcaaaggcagaaactctgctcaacacatcaaccaaaatcacagcttttctcacgtaaagaccacagaaacaattccttcgatccaatttgtcaaccggtggatcgactctcaagatttactagaagtctatagtgcataatcctacattatgaccgntgggatctactagaaaacatncagaactcat

SEQ ID NO: 262521 - DNA, 380 bp, Glycine max
gagaagttgaactctgagttgtgtctcacaagactctgattcatcaaagctacaacaagtgttacacatgcttctatttatagactaggtagcttccttgagaagcatttttaagaaaacttccttgagaagctctcttaagaaaacttccttgagaagtttctttgagaaaacttccttgaaaagctacagtttagctacacacacccatctaaaaactaagctcaccttcttgagaagcgttcttaataagctagagcgtagctacacacacccatctaagaactaagctcacctacttgagaaggctttctgagaagctagagcttagctacacacctctatgatagctaagctcacctccatgacatataaacatg

SEQ ID NO: 262522 - DNA, 394 bp, Glycine max
atgaagcatgtgctctctttgtttgagatcatatagagcctgcatcattaacaatatataagaaaatagtaaacaaagtcacataattataaagatcaagtctaaggtattctcattatatttttgaaatattgtacataagctgaaaactctatattgcaattccttatttccttttataagaggtcggagggatatttttatatgctctcctactcttgtttatagaaaataaccactcttctaatgccatatcatcttttcccatcctctgattttttttccacgttcaatcttatatgaatttgggaaattcctgaccatgtgtaatcccatttttatccctcgatataatatgaatggcttcaaagctcatctggttatgtatgattct

SEQ ID NO: 262523 - DNA, 375 bp, Glycine max
tcatgttctctttgaatttcatgctaattgctgctcttttaaatctcatgattccaataaaatacttcttcaaggagatgttggacctgatggctcgtaccagctctttaatcttcagttctgctctatagtgtcttctctagcttttagctcttgtataaaatctgtttcttctgccgattgtattaatactatgcctaattctggatatacttggcaccttagactatgccaccctaactctcaagctgtagacttgtgcttaattgtgtaatttcaattttctattaaggtgaacttctttttgtctgcttattgatggatggcaagattatagatttgttctagctttctaatctgtatacattctcttgg

SEQ ID NO: 262524 - DNA, 289 bp, Glycine max
  unsure (1)..(289): unsure at all n locations
gctgcagcttgacatcaacgcagactttctttttgtgatggccccaaaatcacagctaaatgatgtgagcttgaccatttaacgacataattttatggaggtatgagtctatatatacgaacgcttaatgaatgtgaagcttgacanatcaacgacatactttactcgagccgatgatcccgtaatatgaaggcgaaatgaagtgagcttgacaatcaacacatactttactcgatgtctatgatcatatatacaacctcaatgatgtgacttgagaatcaacaataat

SEQ ID NO: 262525 - DNA, 442 bp, Glycine max
  unsure (1)..(442): unsure at all n locations
tactcagcttaacattcaacntcgagcgtcacgttagtatatccgacttatttatacatccgtgtaaaaagttattgtgcggtgaaattgctcaaatcttcaacattcaatttcaagcgtctcgatatatgacgggactcaatcacacatccaagttaaaagctattgtcgtttgaactgggtgaaagcctttacatacaattttgagcgtctcgtatgttacgggactcattcaacatccgataaaaagatattgtcgttgaattgctcagacatcaacatttaatttcgagcatctagatatgtgacgagactgatcatcgtcccagtaagaatattgtagttgaattggtcaagcttaacttcaatttcagcggtcatattacgggctcatanacatccgagaaaagtttgtctttgatctgtcaactcacatcaattc

SEQ ID NO: 262526 - DNA, 362 bp, Glycine max
ttctctctctttcgacattgcttagaaaaactgtttccgtgaagaagatccaagccgatgcgctctcgtaacggttccgtgagtgatatcgcgaaggttttcgaccgtccttcgatgttcttcattcggtcttcatcattcttcggtcttcaacgggtaagaacctcaaacttaacttttcaattcgttctatgtacccgtggaggtccacattgcggttcgtgtattgtcattctcgttctcatttactatccgtaccctttttgacgtgcttaagccatttattttggcatttctcgctaacctaaaaatataagaatttccaccgacgctgaattgattatccgtactttattaaaatg

SEQ ID NO: 262527 - DNA, 271 bp, Glycine max
tctctgtttgaaaatgcacacaagcaaaatgtatgcatgaatgaataaatgaatgggatggatggatgggtgtggcgaacaaacgtgaatctatcatttctaatcccatcatctccgatacaacagtctcatgggctaggctctgaagtctaaagcactcgtatatttaacttccgtaatcataactttcccgctgctgacatgggtgaggcactgataaatgcataggttacctcgaccccgcatatatatttatatatatatatatata

SEQ ID NO: 262528 - DNA, 117 bp, Glycine max
accacgcgcgcactacaggaaagtttttttttttagaaagccaaaagaaacggttttacatgtcgacctggcataaactaagagcgggttttttatatatctaactacataacttct

SEQ ID NO: 262529 - DNA, 323 bp, Glycine max
  unsure (1)..(323): unsure at all n locations
agcttgagctantatgattaatgatagcatgttattgacgccgtacccgtatcacattaacattaaatatgcaatatctaggaagtgatcctatgtcgtctcccaacgagtaatggtcaaccaaatgttcataacagattgtaataaaacaataacgaattggggggggggggtgttcgtttagtaaataatcagcatgtattttaatcagaaaactctaaatctaacacggtgttcccttgattcatagccaatttttatttanttacgaggattttccttactattcgtacttatacacccttattaatattagcaaataa

SEQ ID NO: 262530 - DNA, 344 bp, Glycine max
gtcttgctttgtacaaggctgttattgaaatacatgccgtggtcacatatttataatcaattgatgacttcagttaaaggttgcgactcttggcaatttcttttgaactaaccactttgaaagattgcgactctttggaaaactagtcacttaaaggttgcgactgttgaaaatatcctctgaaacaagtcacttctaaaattgtgacttttggtaatctatttttctaaatcagtcactggcaatcgattaccataaatgtgtagtcgattacacattgatagatgcgactttccatgattaaatctcgaaatcaacacgttacaaacacacgttatctatta

SEQ ID NO: 262531 - DNA, 429 bp, Glycine max
gcagcttatgaatatttatttataactattttttcgaagaactcattcatgtttcctttgatgagtctaatgctatctctccaagaaaggatattttagatgatgttacagaatctttagaacaaatgcacattcatggacaagattctaaaggaagaagtcaaatcaaatgatgaacttccaaaagaatggaaagcttcaaaagatcatccccttgacaacattattggtgatatctcaaaaggggtaacaactagacattctcttaaatatctatgcaataatatggcttttggtctatgattgaacctaaaaatataaatgaagccataatagatgatcattggatagtagctatgcaagaagaactaaatcagttagaaagaaacaatgtgtgggaattagtaaagaaccctgaaactactctat

SEQ ID NO: 262532 - DNA, 343 bp, Glycine max
  unsure (1)..(343): unsure at all n locations
tctctttatttccttcgtcttcatcttattcccatgatatcctccttgtttgtggntnggtgctgttaacagtagattaaaaaaaaaaccgattaaatattagatctacacttgttcttgcatttctatggntcaaatattgtagatctattcttgaatcttgtttttgtgtagatttctggttctatcatntttcattcataatattcttgtgctgaaccttatatctaaaatttcttccacaatattgattagaaaaaaaaaacaaaaatctaagtgtaaatcacttaatccatgttgtcttagagtcatgtttagtcatagtaattgtcacattatgttc

SEQ ID NO: 262533 - DNA, 403 bp, Glycine max
cgatttcaagcaccagctgaggtctcaagagaagaatccagataggttttaagatagactattagaaaagattctgaaaagcacatatgattgggcaagagagtttttatcttaagaataatttttccaagcttgttactctctggtaatcgattaccacaaggctgtattcgattaccagaagcccaacatttttgaaaatggtttttcaaaagtgtaatcgattaccatgactttgtaatcgattaccagtgcttataaagttcaaaaatattgtgaacaaccttgtaatcgattacacacaacatgtaatcgagtactagtggctctgaatgttggaaattcaaattttatatgaagagtcacaacttttcaatgaagataactgtgtaatcgagtacac

SEQ ID NO: 262534 - DNA, 407 bp, Glycine max
  unsure (1)..(407): unsure at all n locations
caataattcactatgcattcccctcttgataaagctctagttgaatgccattaagtgcttgaagaaggaagaagaaaaatatctcanagcattcttggatgtccttgacaaattgaaagaaactctttccgaggaaaatacttatgaagagacgaagaaagatgtttttgttgataacaattgtcgaatcgattcacaacaaataaaactaggaaattttgcagtaaaggattaacctaggtcgactcagagatacgattcaatttggttcctactttaattcccttataaacaataaggggaatttcaacaaatagtttgtaggcacttgaaagaaatgcaaaaacagaacataaatgtgaaatctaaactgaaacaaagttttaattgcagaacacaaataaaat

SEQ ID NO: 262535 - DNA, 423 bp, Glycine max
  unsure (1)..(423): unsure at all n locations
ggtgttatctaaaaanacaatgaacaaagagtgatttcaatggtgagagtacaacatcatagcaaaagcctacaccttaattaaacatgcattcagttgaattccaaggtacaattgagtctaaaaaatcattcataattcataatatattggtatggtttcacttagccttgtgcaattttgcttagaaagatgagaattttcacaatgggctattctaagcttgtttcgctcagcgaaatgggaattttctggaatctagaaacccattcagatttacacaacaaaatgtagaatcttctacgtagggttcacaccattttcaactaaaatcttctacctaagcttcaggcatcctaatgacacaatccattcaacataattgtagaatcccactagatcctagacccataatctacccac

SEQ ID NO: 262536 - DNA, 410 bp, Glycine max
atctatcccaaccactgttagtgaattttctattctctaacatcccacctctacaaaatttagctattaaggcttcaatctcattacaaatagaaaagagggcagtctcggacacaccagtcaatagcattatcgatgggaatgggtctgcaccacatcccttgaattgaatttctcgacctacctaagataaacacttctccttccacccttttagtttcttccagaccctatccctcactgcttgaaacacttagaactttgacttaccaataatagtttgcagtcctaagcatgtcatgtttcttttcattgccttaacaccaaggagcatttggcttagctgcaagagagctgagactttttaaagtccacctttctggcccgaagcatgctcatgcatcctcaac

SEQ ID NO: 262537 - DNA, 411 bp, Glycine max
  unsure (1)..(411): unsure at all n locations
acatggctaggatgatttttgaggattgccacatgttagactgattctcttgatgcgagctcaaatctaaagaaaagacactaggacatgtttgatgcaagtggaggcttctagaataaggattgcatgtactgccacactcggtagggagatgcaccgganatgctggattgaaaacaaataatgcatacatatagacgcattaggactccaatgtgagtgaaaccaacaaggttatgctggtcttggagagaaatcaggtctcgcggttggtgttaaccacggcaaccaccacccaagaggagggtcaagggtgaattggctgatcacatatttttaagcaactcatagaaattatgcatcttgatgcattcaaactaaagatgtagcaaaataagtttagaaaagatc

SEQ ID NO: 262538 - DNA, 357 bp, Glycine max
ctgatccggggattttttttttttgcagaacaaaactcacctgtgaagaggtgtggtatagtcttctgcaaataccatcaaaacttggctttttgcacaattggagtaatgagcaacctgagctatgctgaaacattattaaaacccctcacagtaaaccacacaacttaaaattatgaccttcagcctagatcaatccaggtggggaatcatctatttgagatgggcaagccttcacaaaaacaacacctgccctcttttaaaagcgctggtcaacaagcatatgtcctctccatgagcacacaaccgagtgcatcacaaaaaccccacactgggtcctctcaactcttaaaagaa

SEQ ID NO: 262539 - DNA, 399 bp, Glycine max
tcgggggtatgtcataacaatccattacccgttattttcatgagctatatctgatattcaaaataactaggtcactcaatttatagcgcttgaccttaatttcaagaaccccgctttcgtgaaagaagttattaaaaagctaatcttttttcagcttttcagttagactatatgcctttgtggaacaagttatcttatgtttagatttagacaacataaatatatacttatctaccaccacatgttaagaccacatgttaagaccatgcaatctcatattcctaataatcaacacgtggaatttacataagtcacgacaacagccaatgaattcactcagcccataaaaagtatatattattggtttaaagaacttataaaaaatctaaatctgatttt

SEQ ID NO: 262540 - DNA, 188 bp, Glycine max
atgctcaaaaacagaaacattacgcaaatgcaaacgatcaagacgagcgagagggcgaaaaccataaacgacttgcataggagaacaataaatggtgctaagaacagctccatagcaaacaaattcaacatggggaaaacagagcccccaagcctttaagtacttcctcaaaactggcctaagcaaag

SEQ ID NO: 262541 - DNA, 345 bp, Glycine max
  unsure (1)..(345): unsure at all n locations
gaaatagagataattaagactctgccacaggttagattttgatttaagcaagtgggtaccaaattacaatgatttagtatgctttaacttttagttaagatgatgcagatgagtttgtagctacctaatgcactcttgtaatgactatggaataatttctggagctaaactactgggagttggatgccatcttcttaatcaagtttctggctttagaaagagtaatgttgcaagggactcacactggcagatcattatactttntgcatataatgggccttataaaaattggaaagaagttctccgaattgatgtggggaactggacatatttttaaattttcca

SEQ ID NO: 262542 - DNA, 356 bp, Glycine max
accagctcaacttatcagaagatctcgatcccggtttgcttggcttcaaactaagaagggggtgaataagatattgcaatacaaatcccttataatgaagctcttaaataatgattcatatagaacaatctgaatataaatattacgccgtgattaataaaagaggttaagggacgagaaagtgcacactccgatttatactgggtctggcacacccttgtgcctacatccagtccccaaccaacccgctagagaataccactatctggaataatccttttacaaggtctgaacacacaacgacaatccttcctttgtgttcgaaatatttacaacaagagacctcggtcttcaat

SEQ ID NO: 262543 - DNA, 377 bp, Glycine max
  unsure (1)..(377): unsure at all n locations
catatggtgaatacagtgatttcagatttcacacctacctaaattccacggtgccaggatttcaagcatgggcatcaataacaaccaccacacatactggtgtcataaaagtaccaatgaatctcccataaaaaatgagtagccaaccaccctctattgcatctatttacccaattttctgctaaactctttggcctcataaaggaaagggaagcattgggcatcaatcaacctcttaaagaggtacanaacttatcttccttgaacatgaaaatgtaacttattcgtctaattgaaatcaaccattagtggaataatatacttacggagattgtcaaaaacatctgaatgttggttctcaacgcttatgttactat

SEQ ID NO: 262544 - DNA, 403 bp, Glycine max
  unsure (1)..(403): unsure at all n locations
actcagcttgagtaacatatatgaagagattagtatacataatttatgagttgaatcatggcatgacattntacttaagagttagatcggtcatgaatgataatgttctaataagaaaaaacaaatctagagatcagggtctcgatacagatccaatccaaaacttttaacgatgttttgtgctaaggctatttattgttataaaaatcatccacatgacatcttttgatttgaaaactttataacaaggacataagcaacttgatttgatactttggatattgttttccaatcaaaattacaatttcacctcagtaactcttaaggtccacattataagttaaaatttgagggcgagccctggtgcagcggtaaagatgtgccttggtgacttgttggtcat

SEQ ID NO: 262545 - DNA, 349 bp, Glycine max
gacgttctcgaaatcaataagaagcacgcttgcgcgatccgtaaaatttatgaaatgtggcggaagtcgaaaagaagtgtttttgcgcaatccgtgagtttccgtaacttctttcaagctaaaaagagtaattcatatccggaaggattgtaaccttgccgaaggaaaataagtatcgttacgacattcgtacatgttcataacatttctgaaaaagaattaccacataatagaaagggggtgcacttattaaaaacgggggtgcaaatagcaatctggccacttgggcttcagatctttctcaaaagctgttgttttggagaagaaccttgcttcctggcaactgggt

SEQ ID NO: 262546 - DNA, 278 bp, Glycine max
tttgtgagctaagctattctcccgaaggatatttagagacgttacaaatcttataacaaagccatcatggacagattctaaggaagaagtcaatcaaatgatgaactccaaagaatggaagcttcaaagatcatccctgacacattattgggatatctcaaaggggtacacccacattctctacatatcatgcataacaggcttttgcgctatgatgaaccaaaaacataatgaaccataatagatatcattggatagactatgcagaaaactaaatc

SEQ ID NO: 262547 - DNA, 361 bp, Glycine max
ttctcatttagtaaaagggatcattttcaaggtccaacgccttataatgatcaccttttaagtaaaaaagaatcacttgattagaaagaactacgtaggtctgattttctcatcgcaaattgaggaatacgtatgagcaaagggaaacacccttgtcgaccacaaaaagaaaaaaatataaaaagggtataaaggatataaggacataaaaagggaacataaaaaaatcaaagtcatgtttgcacattcgattaaaggctgtcgttccttgggacggacgtgtggggtgctaatactttccccgtgcttaaatacaactcccgaacctttcacttaaagttcgtagaccgcgtcttttccg

SEQ ID NO: 262548 - DNA, 349 bp, Glycine max
tgttcgtcattggaagtgcggtagacaggctttgtggttgatttaaggatggccttcgtggataactgggtggtgggtaaagagagggtttgttattggctgagtaatgacattgttgggttggtgggaaactaggccgtatatgaatgacagtcacagcatgggtttctccttcactctcatccttttcattcgccccagttttctcattcgtccaagcaagatgattaaattttcttcttttcagacccatttcgatcctttcgtaagtgaaaactaaatcagcaaagcttgaaggtgtgtaacccaccatttttcatagtagaacactggtaatatgtctactacc

SEQ ID NO: 262549 - DNA, 426 bp, Glycine max
  unsure (1)..(426): unsure at all n locations
tcatcagatggtgcatttcaagatcgcttcctcttatgttagaatggaatgcacttctggcattgtatatttggttaatagtcggacagctattgacattgtgttccttcagagttagcaaaatgtttcttggcttcaccatggacttcgtcatatcaacaataagtgttttttcagctttagtcaatcgctccgcatatggatgtccaactaatgactnggccaattcatgattatgcactccacaaatcaacttcaccatccagccttctcctccaaccactggcttgcaacgaagctcgaagggacacccacatttcctagtcccagtgtctcttctgataaattcntttttcctacacttatactcgccactcctttcacagccaattaacacaaacgtactccttcctctactacatgtgt

SEQ ID NO: 262550 - DNA, 145 bp, Glycine max
acaaacgcacattcatggacaagattctaaaggaagacgtctaatcctacgatgaacctcctaaagaatggacagcttcctaaagatcatcctcccgacaacattattggcgatatctcacaaggggaaacaactagacattctc

SEQ ID NO: 262551 - DNA, 380 bp, Glycine max
cattattaaatattttgaaagttttaaaaatgggaaagaaaaaaaacacaggatccaaaattcgggcttggattctttaaccttgattttgacaaaaaaaaataaaaacagggaggtgactgagatcaatgtgtttgtaacaaattctcaccctgaataacaaaaatgtctaattaggtaaataaaataaaaatctcgaagacctttcttgaatagttagagagcctaatgaaaacacaaaaattactttttaataaagtgtgaattttagaaaataagggcaccggtattttggaacttcttagatccaaagaccaataaattcgtttttctactaacgatctcgacaaaataacaacacaactatctaaattatcttt

SEQ ID NO: 262552 - DNA, 445 bp, Glycine max
  unsure (1)..(445): unsure at all n locations
gcgcgggtctgggagacgaaggtcaagtggtccttattacgaagatgatgtttcgagtacattggatntggtacgaccttgccctcctgatttccagctggggaattggcgagtggaggaacgccccgacatttacgcagcgagcataatgtaaacctttacggttttaaaagctctatagttgggcctaggctttagagattttcttctgggtaatgctttgtgtactttgtctttaaaattataatacaaggatctttcttcatctgttcctacgtctctacccattctcattcatttgcatgtttacttcttttctgaaatggcagatccgatgacgagtcccccgaaggtactaatacctgngacccgcctatcaacttctagcaagaaatgaatcatacggaagatgaagggaacgaggatgtgggacctcccccagaat

SEQ ID NO: 262553 - DNA, 260 bp, Glycine max
ctcatcattcgaagtgtcttttatgtttgcacgcaagatctcaacattagctccacttacgtctaacacttctaaagacaatatgtgataattggtgatgacaatgtacatatatcagtgtgagataacatcaaatctatcatttcctctgatggcaccgtgaattccttgagagaagaacaacctaagacgtcaattccatagagagatctggaattagatggatctgaacaaccttttaccatgattaacatatactc

SEQ ID NO: 262554 - DNA, 383 bp, Glycine max
  unsure (1)..(383): unsure at all n locations
tgcaaagctccatctgcagtgctgctgtctcttcctgaagcctatttaacactgccactgtctgatttgctgctattgcaaaagcactcctctcttcttctagttctgcatatacaacatttaaggcctccctttcagctttcaatgctgattccaacttctcaaatgttaactcaccacattctatatcacacatgacacttccttctaatgattcttctgatcctgattctttccttccaagcagntgtagcctcttgcgtaactgatgcagattctctgcataagtgggtgtatcagccatcaagaactgtctcttcttccatcttattaagctccaaatatgatgcacatgcgcatctacagctcgcatattcataaca

SEQ ID NO: 262555 - DNA, 376 bp, Glycine max
attcttgatactgagctgaacttccacttctttttcaaaatataaaactgctcattgctatttaaaattagaggatattctggaaacttattgccaaaaaggctttaaagactatcttccactgtaaatgaagaaactcaggatgtgatttttggagtgaaaaagatcattctattatagattgaaaatgtgtagtcaaatattgaattttagtgcataagaaggtatcacctataaggtgaaagatagaccatggtaaatatgtattttctgacatagcatataagacaatatatttgaaaaagaagaaaatagaggaaagcttaacgctaaatcatactgataatgttctggaaaagagacaaacactgacttg

SEQ ID NO: 262556 - DNA, 380 bp, Glycine max
accagccatgagaagcacgccccgcgagatcccttggctttacatttatacacactattgtttcatgaaggagaggctatgtatgattatcaccttctcgttacaaaaagaatcgtcttcttacaaaccttttgagggaatcattctcttatttgttcttccactaggcgtttgaagacaaggccttactatacttctttctctctcgtgtctcttcctcacccttcttatcaactttgggcttaaaaggtgcagtccctaagatgccttgctcttggcctttctttggataagagcgagagccataagattttgaaatcggcttccttttatattggtactacgtcatctagggccctatatggaaggagctcaacctt

SEQ ID NO: 262557 - DNA, 353 bp, Glycine max
caaggcctctagaccaggagaggagacacgcaattctcttgaaccttcacccctcactataacatcatgccacagactacgggaagcccaacaggatttccgctatcaagtagccggaacaaaactcaatagcttcatttgcaacgcaccttcccacaataaatgtctcacgaggaggtagatgctttgtagaccctaataagagctccacatactgcccaaccaggttcatccaccacatataaacgagaccacaacatataattgtccttaccagacgaaaaactaagcgaaccatgatgtcaaaaaacgaatgacgagatacacctctaaccgacacaagaaaatagcag

SEQ ID NO: 262558 - DNA, 359 bp, Glycine max
  unsure (1)..(359): unsure at all n locations
cacaagtcacaatgacaaatatgcaatggttcgtagcttatatttcttccccatattttaggtggctcactataaatgtctgataacaagccttgcgctcaccatattntatggggattcacatgaaagtctgaaattcttagcaaatttaattgaccattagaattcttcaatttctctattggtaagtgacagcactcagcaccagatgcccatgcacactatccgcaagcccacggattggaaggaatacattcactaggatgatactctaagcaattactctagtagtgctaaataaagtaggtctggtacagaggaattgcattgtccttgctttctgtatgacgggatcacat

SEQ ID NO: 262559 - DNA, 442 bp, Glycine max
  unsure (1)..(442): unsure at all n locations
actcaagctgtgaactagccatggnggattatgttttcataccctttctgatttatggcccnagagatgacgctggtgatgtttatatgctgaaattgcttatggaaaactgatacatgtgatgggtagagtttatctagggttataaagtgagaacgtgatgttatgagcggaaaaagagcgaggcttagagagttgaaaggttaaatctgaattctgtggtcaacggaggctaaagagagttaatcctatcttgacatgtcatttatgacttatgagaaagctcggcctgtgctagagagaacaaaatcaaatgaccaatgtgaaccaagagccatttctagggcagaattgagtgttgaggagtcaaattttgattcagtggaatttcaggtgtcaatccagttcgagcaagtataaattgatgttatcgacttgtgtg

SEQ ID NO: 262560 - DNA, 345 bp, Glycine max
tttttttcctctgcccccccaagagcatggttcttttaggcgcctaaccgtccggagtcggaaactcacttttcaataaaagtgctggcttcaacccgaacttgtcttctagggctcttacatttacaacatctattatacttctctcctattactgagacccttataaaaagatcgaacaaaactattttgaattcgatggtgggggaacgggcacataactcttaaatttctccggtctcgtcaggctctctccattggttgctaaacctgaatatcttctgatggcgaggactggagcatgaaaattttttaaaataactctaaggcatccccctttgatgg

SEQ ID NO: 262561 - DNA, 435 bp, Glycine max
  unsure (1)..(435): unsure at all n locations
agcttattacaagatctgaaccctcaaggtttcttttccttngngnacagatatctttacaacaagagaccctcggtctcttaatcctttntcagaataaagaagaagaaaagaagtaatctctcttgaaagagatagattgaacaatttgagcactcaaataattccttctgaatcacaagtgttttggccacgaatttntaagaggataaaacgactttgctttttaagaggataagacctttttgttctgaaaaactcttagcaaattcgtgtctcaagtcacatatatataagcctttgatggccattcaagaaacaagtaaaaacatgtgactgttgagaatatttttctgaaaatcttctctggtaatcgattacagtatgtgtgtaatcgattacaagccttaaaatttgaataaaacgtcaataact

SEQ ID NO: 262562 - DNA, 422 bp, Glycine max
agcttctcaaggaagctatctattctataaatttaagcatgtgtaacacttgctgtaactttgatgaatgagagtcttgtgagacacaactcaaagttcaacttctctcccttattcttccttcaatttcgggctcccccccctctctttctctccattgaagcatcctctccaagcttcttatccaaggctcatcttggtggtgaagcttcttcttccaaggcttattccctagtggatggcgccgcctcttacctcttctcctttgtcttccgctgcatctccatggtggaaaatcaccattaaaggacctcattgaagatcaaagatccagcctccatagaagctccacaagcaagcttccataaagaccgttgcctttacaactctacattgtgtggctacgaatgcatcctcagaaa

SEQ ID NO: 262563 - DNA, 417 bp, Glycine max
  unsure (1)..(417): unsure at all n locations
tatttatgggaggtttttatatgccactcttgctttaaagatagtggcccactggtaaaaataactctccaaatgttcgcctttccaagaatgggcccgaggaagcttgcctcaaagaagtccacgaaagacaatgcggccgaaggaactatttccgctccggagtacgacagtcaccgctttaggagcgctgtacaccaacagcgcttctaagccatcaaaggatggtcgttttcttcgggaagcgacggcgtctcagcctcagtggacggactgagtatacttgaattntcatggaagaaatattggctgccagccggtgggcaccacatggtactcctatggccaagtttgatctagaaatagtcccttgattatatgccaatgcttgggcaacagaggagggcgtgcgtgaca

SEQ ID NO: 262564 - DNA, 438 bp, Glycine max
  unsure (1)..(438): unsure at all n locations
cagctgaagcttctagnttatagatgctatgagtttgtatctacctcatgcactcctctaatgactatagcatcatttctggcgctaaactgctgggagtaggaagccatcttctcaattaaatttctggcttcagtaggagtcatgtctccaagggctccaccacttgcagcatctatcatacttctctccatattactgagtccttcataaaaatattggagaacaagctgctccgaaatctgatggtgagggcaactggcacatagtttttaaaatctctcctcagattcgtataggctctctccactgagttgtctaatacctgagatatccttactgatgagtgtggtcctggaagcaggaaaaaaaatttcaagaatagtctcttaacgtcatcccagctcgtgatggaccttggagcaacggaatacaacc

SEQ ID NO: 262565 - DNA, 407 bp, Glycine max
tctaaggaagctacctagtctattaatagtagcatgcttaacacttggtggaaccttgatgaatgagattcttgtgagacacaactcaaaggtcaacttctcttctttgttttcttgcttcaatatcatgctcccccctctctctttctctacctttttctttatctccattgaagcatcctctccaagcttcttatccaaagctcatcttggtggtgaagctccttcttccatggcttattccctagtggatggcgcctcctctcacctcttctcctttgtcttccgctacatctccatggtggaaaatcaccattaaaggacctcattgaagctcaaagatccagcctccatagaagccccacaagcaagctttcatcgcatatgttgatgaagagagaaaggga

SEQ ID NO: 262566 - DNA, 323 bp, Glycine max
ccgctcaacacatgcactgtggccacagatgcatgggagatcctgaaaaccgctcatgaacgatgcctgccaagtgaagatgtacggattgctgctattggtcaccaaactcttaaatctgaggatgaatgaggaagaatgcattcatgacttccacatgaacattcttgaaattgccaatgcttgcactgccttgtgagagaggatgacatatgacaagctggcgagaaagagcctcagatccttgcctacgagaggtgacatgatagtcactgcactagaggaggcccaagacatttgcaacatgagagttgacgaactca

SEQ ID NO: 262567 - DNA, 410 bp, Glycine max
  unsure (1)..(410): unsure at all n locations
ctgtcgcaagggtctgtgggttgtgctcctctgctgaccaccatacaaacctttgcccttccatgcagcaacctggagcaattgagcagcccgaagcttatgctgcaaatatttacaatagaccttctcaacctcagcagcaaaatcaaccacagcagaacaattatgacctctccagcaacagatacaaccctggatggaggaatcaccctaatctcaaatggtctagccctcagcaacaacaacaacagcctgctccttccttccaaaatgctgctagcccaagaagaccatacattcctccaccaatccaacaacagcaacaaccccagatacagccaacaattgatgccgctccacaaccttccctcgaagaacttgcgaggcanatgactatgcagaacatgcag

SEQ ID NO: 262568 - DNA, 388 bp, Glycine max
gagcgttcggtatattacgagacttaatctgacatccgtgttaaaagttatcgccgcatgaattggcttacagcttaaacattcaactttgagcgtctcggtatattacaggactcaatcagacatccgagtaataagttattgttgtttgaattggctcacaggttcaacattcaatttctagcgtctcgatatattacgggactcaatcagacatccgactaaaaagttatcgtcgtttgaattggcttagaagttcaacattcaattttgaacgtctcgatatattactggacccaatcagacattctagtaaaaagtcattgtcgttcgaattggctcataggtgtcacattcaatttcgagcgcgtcgatatatgacggtact

SEQ ID NO: 262569 - DNA, 178 bp, Glycine max
gaggcacccaccattttagaacatacctgcattgcttccaatgcaggtcaaaatgggcccaaaacatttcagaacctggtaattacataataactgattttgcagcatggacgaccttgagacctgatgatattaggaagacttctaagacaattgccccaagaatgagtgccatatg

SEQ ID NO: 262570 - DNA, 257 bp, Glycine max
gctatgtaacctcatcagattttatcccacaaatctggtttcgatcctgctaaggttgtacgccataacggaagtgacatcgcatatctctaagcgattatggatggtgaccatcttgtaacacatggcgccgaaggggaccaggattcaataagccagctgcggcaccaccaaccataggtgttcatatatagtatgcatataatgaactcttaccataagttgtgattggttcacttatatccagatggcctgta

SEQ ID NO: 262571 - DNA, 396 bp, Glycine max
  unsure (1)..(396): unsure at all n locations
atggagatcgcggtatggtatttgtagtgacatccttggccagagtggatttgattgggatggcactaagtacatgatcacagttgagaatgaaaatgcttggaatgaatattgcactggaagtattctttaatatgttgctatttgttattcaaagtagattggatttgactttttctttgttttccagttgcataaatcggctaaaccgtttcgattcaaggtgcttcaaaattgggatgatatagtgaatttgtgtgctaaagataaaggcaccgattatggagctaaaactgctatggatgttgatgaagcggtgagtagagaaacaaatgaagtggaattcatggnggtaggtgctacggccatagatttagaagaaccaagctctaatac

SEQ ID NO: 262572 - DNA, 446 bp, Glycine max
  unsure (1)..(446): unsure at all n locations
gtggtagaagtgggtcactctattgatgcaacaaaggattatttctcacacaaagaacttagctcgagtttctctcaattggaaagctttgacatgtcttcaagattctccttgttgtcctcttaaagcttcaatgatgactattgaagtggaggccactcaactataaaacttatggaagaagcataaaaaggtgataattgtcgagtcatgacagctagtagagtcattctgagattgtcattatgaagaaccttctttatgagctttctaaagatacatcaaaatggtgattctaatgttaactgagaaaagatctatgtctgaagcaatatcccttttgatgaagtacaactgaaatggctgtctgaaataacatagcttcatcatgcttaacacatcttcacanagcattctaaattagtttgcatcatatatagaaattg

SEQ ID NO: 262573 - DNA, 395 bp, Glycine max
atgctatctccacatacataaaacaaccctcccatcccaatgttgcaaatcatattcatatatccatggggcgtttcaccgaacacttggagggcgcacgtttggacataaattgcaagagaatgggggcaatgtggcatgccccattgcttcagaatacaacatatgcctaaagtcggtcgcctttcctaataaaatatatcactagggcctatggatatttcaagctgcccgcaatacttgagccgctgaagcaatacttccactgcgggataggttaccatgatatgcgactccccgaggtgatccggcacgggagaccatgcactccgcttgcaaagattgatatatataccggttagcagtatccacctactctatctcttttgtccgtg

SEQ ID NO: 262574 - DNA, 382 bp, Glycine max
  unsure (1)..(382): unsure at all n locations
ataactctgacaaaatagccgcaactcaagacaaactcgagacataactaaaaagcgaaaatgatcatgttcgccgagaatgatggctctcaacttaagagtacgatacattaacctatacatggaggaaaagactacgtatatgctgagaacaatctcccttcggatgatctctttcctaacatactcttntttctcagtatgaatgtagttttcctctaacatttacncaatctctgctttcataaaaatacgtcggcctctgaggattgtctaatatatatgaccgagaatgaatatcttgccttgacctattaaaanatcatactaccattttcagctaccactattacgccttgatttattaatgtcatgtgaagat

SEQ ID NO: 262575 - DNA, 433 bp, Glycine max
  unsure (1)..(433): unsure at all n locations
acatatactaccattatatttatttttttctctatctcnnttcagcagatcaagcatcttatctattgtgtgttttcatatctctcttttaaattttgaactttggtttacaatatttataaatgatcgagtattatcatccaaattcatttcaattaattgctcatatatgtggtgcagcctttcattcctaaagagaacaatatggtgattctccaagaaagttatgtagatgctttgggatccatgttggtattcgctcctttttatatggaaggattggatttgatcatgaagggagaagactcatcactgtttccgattcttccctctggccttaccatatcttgggattaccaatgcaataaagttcttgaatgaccaatctgacaagttggtcaatcaaggcggtcgttggtgactctatcgttta

SEQ ID NO: 262576 - DNA, 399 bp, Glycine max
  unsure (1)..(399): unsure at all n locations
attttgaaacgctgtcaatagacactaccgatcttaatgagaagggttaccaactcttggaaacccgaaagccaattcttactctagcaatagaactacatatctgggaagccattgtattatggccctatatacccaccacagtagaaagagtttccatagatgctagttcatcaaatgacagcttaaccatacaaaaacctataaatagacggtctgaagaggatagataacgacgtcatatcgacctaatatccacaaacataataacatctgccctaagactggatgaatagttcatagcctcaaattgcaagagtgctaaagaaatgtgggacactcttctattaacacacgacngaactacacatgtacaagatctaagattaatgcctcact

SEQ ID NO: 262577 - DNA, 339 bp, Glycine max
  unsure (1)..(339): unsure at all n locations
tttgangctataatattaccatcttccctccaaggctccaactgctatcaatatttctatcaatacttttttatttagtattattgatcaattgctatcaaaaaaatttgatgcttatctatgtgttgtttgttgaggttttactttatctttggttgtaaatgagctgaattatgtaatgcaaggtgcaaggttcaaataaagttgccaagaccaagaaagaggctcctgcaagaaccagcgtctcanaatcaacaatttctgggaacaaatcttcccagttaaaatctgttaactcaagctccgttgttattccaaaggctaattctttatcacaaa

SEQ ID NO: 262578 - DNA, 271 bp, Glycine max
aaatcatcgcctcaaacaaagctatgaacaggatacttctcagactgacaaagggatcctattgagtggggccccaaatcatggtagaataacaaaacctccaagaagttctgcttaaacaaggccaaagactaaataacccttgaggctataagacgcattgaaagtcagtgaagggggaatgtacctaaaaaccatataataaatggaggatatatcaagtagtgcactctccagctgaagatcaacatccgcaaaaacaaggcgacct

SEQ ID NO: 262579 - DNA, 386 bp, Glycine max
atacattaaaataataataataatagtaataataataataataataaacacgctcatatatatatatatatatatatatatatatatatatatatatatatatatatattatttatataaataagaaaagcattatatatatatatatatatatatataacccacatataaaatatatatatatcactaacatataaaatatataaaagaaacgcattatatatatatatatatatatatatatatatatatatatatatatatatattaatataaaaaaataataatactcacacatatcattgaataaatatattgtatatatatcacaacggaaaaatttatatacttagaacacatatatacctatctcccacatatatctc

SEQ ID NO: 262580 - DNA, 382 bp, Glycine max
cttgtgaacatatccattgggttctcccttgtattaatattattgacttcgaccttctttctcatacggaagaagtggtatatgatttcaatggtcttgcacctctcatgatggacataatccctggcttaacaaactgcccatatatctactcataatactgactgcttgtgatgggtccaattttttgcatacaatatcatacattagattgcgtacaatacttgcataaggaacacaagaaatgtatttctactttgattttgactgagtagtattgagttcaaatataagaatagaccctgtctgacgagtacatactggttttatggatgccatcccaaaacaattcaacactttcttaatgtattcctctttacac

SEQ ID NO: 262581 - DNA, 378 bp, Glycine max
agcctgcaaaatctacaatacgacaagaggatcctcgttcctcaggaacggctacaaccaaaactttatacgctagcacggaaaaagaccaagttacctctgctattgtgacgactgactatgcctagtgcaaaacaacgggccgaaaatctcccaaataccggattaccgggaaagcaccccccgcctaaacaaggtgggctaacactcatgtgcgcggcgcgcaaccgaccaaccaatacaaaaatgccctccactctcggatacgatatcgagaagtatcatcatttatgtagatatacagaatataggcagtctataggcattcactatatagcaaatatggaaccctacatagcatctctcgatatcagcata

SEQ ID NO: 262582 - DNA, 69 bp, Glycine max
tttagaatggaattctctcactagaccaacgtttcttaatggacatggttaccacttctgcataacccg

SEQ ID NO: 262583 - DNA, 319 bp, Glycine max
tcagggcccacagatgcctgggaattcccgtacaccactcatgaaagaaccgacaatccgaacatgtgtacattgcaaccattggctacaacattccaagatctgaacacgaaagaggaccaccggctcatgacttcccatgaacattcttgaaattgccaatgcctgcactggcttgggagataggatcacccatgaaaagctctgtgtaaaacaccctcatatcctcgcctatgagatttgacttgaaagtctctgcaataaagaggcacaccaccttgcaacatgctagtgatgatctctaggtcccttccacctt

SEQ ID NO: 262584 - DNA, 401 bp, Glycine max
ggatccttaagtcacctgcggcatgcaagcttagataccaccagcatcaaggaattatggcggttgatggaacctctccaaatgcaagctttccgcaagacttacggaaagatcttagaattgaccttagcagaggtatccatagaagccattgcatcactcacccaatactacgaccagcctttgagatgcttcacattcggagacttccaattagtaccaaccattgaagaatgtgaggaaattctaggatgtcctctcgggggaagaaaaccatatctttcatccgggtgtctcccctctttgagcagaattgcaactgtggtcaaggattcagcaagagggttggacagcataaaacagactcggaacggcatggcgggcctaccacggaggtacct

SEQ ID NO: 262585 - DNA, 435 bp, Glycine max
atggatggaaagaaagagggagagtattatagatggtgtatcacacaattgaaggaataaaagagggagagaagtggaactttgaagtatgtctcacaagactctcattcatcacagatacaacaagtgttacacatgcttctatttatagactaggtagcttctctgagaagctctcttgagaaaactttcttgagaaacttctatgagaaaacttccttgagaagctagaggttagctacacacacccctctaataactaagctcacctccttgagaagcttccttgagaagattcctaaagaagctagagcttagctacacacaccctctataatagctaagctcacccacatggcaaaagtcatgataataaataaagaagcgctatacaaaactactcaaatgcctgaatacaagctaacctatctacta

SEQ ID NO: 262586 - DNA, 460 bp, Glycine max
gcaagcatacaaatcataagaaattcattgatgtactaaatggggcagttttctgcttatgatctacggcaacacattaattaagaatattggcctttataatatctcatcatcagattgatgaattggattttctacataagctctaacaacaatgttacaattagttttaaactatttctttagaaaagtaaggatagaattgtctttttaataaaaaaattgatttttcccctaaaaataaggtgttcccataactaaaagtgagagattaactctagagaaatagtcaaagtgagttttacctctcctaaaatacataatcgaacctaaatgaaccatatactgttatcatattcgattggttttgactacttcgaatctgactgtgattaccatttagtttaatatgaaagagacattgtcacgttaatatttcaagctctgttctgttaccctt

SEQ ID NO: 262587 - DNA, 487 bp, Glycine max
  unsure (1)..(487): unsure at all n locations
cgataacttaatataatgtgaatttaataaaatagtagttgtaagtcaaagttatgcatggatnnncctattacttaaatggaatgatagcgtgatagtggcatcatttgactctcgacatgctgttgacgtcacgtgaaatgcttatgcttttcaagatgacgctaatttgaccatcttttaatctctgcgcacccgcttcaaaatctataccctcgacactaatgggagccaaaatgaattgctgtaatatagataaaaaggtcccactataatattactctataattcacaggttgctctattcatctattacaacttaaatattaaactatgacaatatattaagcaatcctatcatttatcaataataacggcttattataaataaataaatatataatcttatatcgtgaatacacattattttaataataaataaaataatttgaacataatacatatactatataatattaaaataaat

SEQ ID NO: 262588 - DNA, 234 bp, Glycine max
aaaaccacccgaagaaggaacgaatctccttttccacaccgggccggaaccccgggcagaaccggaacagggggcctgccaaacgacgcaacccgccacccggccagcgcatgcacccgggaccaaagcacacccttccaataagaccaacacagcggagctgggggcgcccgtaactgagaaggaaaggcccgaacaaccagggggacaaacagcaaaagaccgagcaaagcc

SEQ ID NO: 262589 - DNA, 415 bp, Glycine max
  unsure (1)..(415): unsure at all n locations
ctgcattatgaaatagaaataaataagcatatttagtattgttcccattgttccagtaggcaacctatatatgatattatatcaaattatacctcttcccaagcagaattttctatgcggagatatatagtcaacatgatacaacctgaccttatatagctctctatctctgtgggactgtgggataaccagttaaggatctggtaatcaaagaataacataaatcatacactatacaaaaaacagtgtagtgaaattgtttatagcaatctcaaggcggcgatgaagtacctgtgatcggagagcatggtggaaatcattcggagccttgccaaatagtntgaaaacaantcgatctgtgcgactctgtaaacagaaaacaaacaataacatgccaataaatacaatcttttga

SEQ ID NO: 262590 - DNA, 400 bp, Glycine max
tgcttgttttcttatcattcacgcgtatgatatccactcgacaaggtttgaagtataagagaccttcaatcctataacgcaacatggcggacaaaagtgcgcagttaacttgaatggccattattgtcaatgcggaaggtattctgcgtttcactatccatgttcacaaattattgcagcttgtggttacgtgagcatgaactactaccaatatatggatgttgtttacaccattgagcacatcttaaaagcatactccgcacagtggtggcctcttgggaatgaagcggcaattcctccttctgatgaggcatggacactaatccctgacccaactacaactcgtgcgacaggtcggtcaaaatcaacaatgataaggaatctaaccactgaccaaatg

SEQ ID NO: 262591 - DNA, 331 bp, Glycine max
aactttaaagtaattaactaacctattgtgttatacataaattaacaaaaaggtttaaggaagcttacttggatcgctgaaattggatgcacagaaagaagcaaggagtatagcacactgcatagaagaagcaccaacgaaatgcccaaatgcagtttaaaagcacaaatgaaaatgtaactgccaaaggcaagtatgccttatttttggcgagttcgaatgccttgcttaccgcatgaattccctaagcgagcatacatggcgtttaagattccaaacacatgcgcttatcaagcaaactcatttagtccaatgcaaaaattcaaatttt

SEQ ID NO: 262592 - DNA, 264 bp, Glycine max
gaagagatcctatgactgtctgtgataccgcgtttgtgatttgatgctgatgatgatcttgagatgagatgatattgacgttgatgataatgttgatatgacatgatgatgattgctgctgaggatgatgctgatgatgatacatgatattgagatgacatgacgtctgttgtggacctacatacgggtaaggggaatgaccatgttggatatccctctatggggaaatagagtggtttaagagttttaaatatccctggagag

SEQ ID NO: 262593 - DNA, 380 bp, Glycine max
tttattgtttataccgcccacttcccttctgttggacgcactgtccatgttgaggtttcaccacctctggggttggtttggtcacttgccaacaacatattgcgagaataatctgccatgaatagtgacttcatgggggcttgaggttcctactgaagatattactcttacacttcttccgaccatactaccatccttcctgtaagtcacgctttcatacacctgcttgatggggtgttcatcttgactaccacttggtaactttgaaagtatggtctgaggcgttaagccaatgtaataagaaccacgactaccttcttgatcatctggtgtcgcttctcaacatcttgaaagatgcatctggtgaaatacatatgaag

SEQ ID NO: 262594 - DNA, 388 bp, Glycine max
tctaaaacgacctgcagcatgcaagcttctagccaaatggacttaccttgaatttattcctttgatagccctttagagccttgtttccctttccttgttttgaagctcactacaagccttaagtgaaaaaccatgatattaccatatccttaaggaattttggagctttggaattgttttgggaataagtgtggggggtttttgtttcattggacaacttgttttgttgactatgcttcatgatgtattttgggccatacttgatatacattggatattggttaaatgttggacatgctgaatgaaatgttgtttctcaaaggcaaaaaaaaaaaaacaaaattcaaaaaaaactaatttcgccaataaatgaaagaaataacccaaa

SEQ ID NO: 262595 - DNA, 423 bp, Glycine max
tactctgctgtttggtgctagaaagcacatatatgatagcatattatgtgaagctccccctttgggccaccatttggtaggtgttgcaccatgatggttttgttgcgcctaaatgatgtgaagcacttgttgaacacttgttgtgtatgtgtgtataaaataagtaaccaagtgtttttccaatatgcatgtgtgttgaacatggcgcgaaaatgcctcccaatatggcagcacatggcatgaaatggttttgcaaagtgtgaatgagtagtgaagagatttttctacctttcccatgaatgggtgatgtgaaattgctttctaaataaacgtaaatatgtgttcgtgatgaaattggctctcaagtgtgcgtatatatatatgaataatatgtgaatgaagtcgtaaaataccatgttattt

SEQ ID NO: 262596 - DNA, 320 bp, Glycine max
  unsure (1)..(320): unsure at all n locations
cttacccgtngaagaacgaagaacggatgaagaacggtgaataacggacgaaaaccttcacggatttacttacggaaacatctcggaagcgttacggaagcacctcagcttggattttcttcacggaaacaatttttttcacccaaaacagctgaaatatatagccagggggctgagggatccttagaacagcccccttcaacctatttatatgaaaaagggggaggaggttgccgcccagctcgcccaggcgaccttagctcgcctaggtgagctgggttccttacctcataagcaacccaggctacaaaaacattcta

SEQ ID NO: 262597 - DNA, 310 bp, Glycine max
actctcttactttctagatttctcactctaagatgcggatacactcttgtcttggatcggttaggaatgaaagctcctacccttatttatactactccacctccataatgaatggaggagaatactttgatcctatggtggagaataattctttacaatgctccacacattctaggaggctctgcactcctttacgtcctttataatcttccatactctttcataaggttccagaaaggttcacacatctctagaatattgcacaggttttttcattctttcacaaacttctagagagtgttacactact

SEQ ID NO: 262598 - DNA, 435 bp, Glycine max
  unsure (1)..(435): unsure at all n locations
attgccttaatcattttcaaatatgcatgtgaattaggacgcatcaacaagaatcaagccaaggctattgtgcaagcaatcaatggggcaaaacacaccaaatgattataatgatggatggctcaaattctcacaaaagtaaaatcatcactttcaaaactatcatgacatgtagagaagaatcaaggatttcaagtcacaaaatgtcaagaacttttattttcaaaacaattacccatttcttgaatatatcctataattcaaagaaaaacatgcaaagtcgtacgtgcacacgaaattgacccaaaatattaaactgaaaatccgacaaaacttacaacatttacaaattaacacaactaacaaattaacaaaaccaacaaaactagctaaaccanagaacactctcccccccccatacttaacaacacattg

SEQ ID NO: 262599 - DNA, 461 bp, Glycine max
  unsure (1)..(461): unsure at all n locations
acatgcacaaagtgtgactatatgatgtggttatatggtgtagcaagcaaatgctcacctnccnctctaaaatttaattggattgagcttctcccaattcaattaaatttattttccaacacacacatcaaatattaacttaatgcatatgaaattacaaaactacccctaatctaaaaactagtctaggtgccccaaaatacaagggctgaaaaatcatacatttgtagggtaccctacctacgttatggagccctaaataaaaggcccaaaaataatgaaaccttaatctaatatgtactanaataagtgggctcacacttagcccatgggcctaaaatctatcctaaggttcatgagaaccctanggtcttctcttgcatctctagcccaatctacttggagtcttctatccaatgcccttgcggggtaggatngcatcattcccttccccatgaaaa

SEQ ID NO: 262600 - DNA, 418 bp, Glycine max
agccttttgatgaaaagaataacaacaaaacatgaactatttaaaagaccacctggaagaaaggatgttgaagagcctctgaagctgttggcctcttgcagggatcccaggagcaaagtgactacattaaagccaagaaaacagaaaaaaaaataaaattggattacatactatttgttgatcaggggctcgcagctaagcaatatataaaaaatacttacttgaataaggctgattgcatcatcactagcagacggaatcaaagcagaaagatgcacaccggcaagctgtggaaagtaaaagcgtatagtaaaaagtgttaagtaaaatactattacacctagcacattaattaggcaagtagcatcctatagggctaataccaaaaatagcaagatccaagttatatatctaacct

SEQ ID NO: 262601 - DNA, 433 bp, Glycine max
  unsure (1)..(433): unsure at all n locations
aatcatattgcaattaccaagctttctggctttgaccaggaattaaaaaggaaaaattcttttaattttagccttgttaaaaaaataaaaaataaatacactgtacttttatcctctaccacatagaagccactatgatacttaacgagctctatctagcattttggactcgcttaattaaatgagtaattgaaggactactctaactattttttttttttaccagcgtctataaacattacttaagaaattaacatatatatatatatttattataaaaattatatgagagggtaaaaaaagttatgaaaaatataatcttatactatctaataaaatatacttttnttaattctttaactaatggccctagtacatcggntaataattttttaacgagactcgacatgttaaacaagtgattgacatatat

SEQ ID NO: 262602 - DNA, 420 bp, Glycine max
  unsure (1)..(420): unsure at all n locations
gcttgaatgcgggttgcatttttcatggtttatttatttaaatcacgactatatttcggaaattaaattgtggttttttcacagcccggattaggtgtttattctgatcataaagcgtttgacattaattatgattgatccttgttggttgtgcacttgtgctttgttggtataaacttcgtgcttgactggtgagttaactctaatttccattntgattgagaggtgagtaagattatgatttatggggaataactcataccttggccttgggtgttcttgtctttgtcctgatggcattgtgcctacgacttcattttgatagaactcatgtaatcgttccttcacttccttggacatgggatcttattcaatcgtggttgtcaatgttgtctcttcaaagtgaaatgggagctttat

SEQ ID NO: 262603 - DNA, 483 bp, Glycine max
  unsure (1)..(483): unsure at all n locations
tttacattaaaagcanacacacanatgacatgctcctgatattactagttgatctctcaagcaattaacttagactagcgggtgtttaccaaattccagcgtaaacacctatagagtgttgatatacatgattagaaatagactgaaatccttaacatggtgcctaaggtctctcataagcaatatcatgttttagtgtagcaatagagaaaatgttacttttgaccaaggtgtgagtcacagttcacaattataaattattcatcgggagtcatgagggcatactacttctattagtgacattgacatacggcaacacttatgattttggactaagctaatatttggtcttgtatgagtcattacacaagtaatattgggtaaataattattttagtttctataaattataacactgtccactattcttgaaattatgaaattcacataagtactatgtatcactctagtcgtaatacatgt

SEQ ID NO: 262604 - DNA, 359 bp, Glycine max
  unsure (1)..(359): unsure at all n locations
agctttctgaagttntctggttctccaaactctttaattcttgtgctattcatcttgtcgtccgcttctccctctgccaaaaagaattcgccaaggactaacaacttggattctttatgaggatctcttctctcttttccaaaagaacatgggactaaccacctgaattcttttgtgactcccttctcccttgtcaaagaagtcggaacgacacagtctaagaattcttttgattcttctgagagaatgtgactgagcgaacgacccaagatcaacagcgctatttaaagcttgtaatccaaaatggaagggagttctcaatttttggcgtgatctctgttcttggaagtattcctctg

SEQ ID NO: 262605 - DNA, 390 bp, Glycine max
cttgcttctacactactatccttctctgttctatgagaatgatgtgtactatgtgaactatggcaccctctataatagccgctcagttcttcacttaaactcttgcaagagtcatgactactatcagagacatgcttttctcttttcatttctgtcattatttttcttctttcttcctctcttattatctctcttttatcttgacttatttctgccactctctttttctcctttatcttttctctgatgctttactttccacaacttacaggatctcaactgatctaatatctcatacaaagggtccttatgagtagaaccctcaccattcacactagatgaagaacgaacactcatgttggctcctacatcgaggatctttcttgacgg

SEQ ID NO: 262606 - DNA, 212 bp, Glycine max
  unsure (1)..(212): unsure at all n locations
tacctcttaatcgatcctccaaatatgcccaaggggtcatgagacgctaatgaactcaggagtggtgctatagaacncacctagattgaccatgcactatgctacccaagtatactctattcatgagaacctgtgatgaatcatacaggcgacctctctgtagcaacagattatacgaacacaaaccacttacacatgatgcttgtagtggg

SEQ ID NO: 262607 - DNA, 343 bp, Glycine max
  unsure (1)..(343): unsure at all n locations
actcttaaagcacaaatgggaataacctcctcccataaatacaaacaccaatgtaaatttagagcaagcttatgcgcatatttncttacatacgttctcttgcacaagacatataaccgaaaaagggcacccatatacaagcaaggcagcttcgttacctagattatttacacgcactgccaaggtgtatttgttacttacatcacacacatctccttggctgaatttacatacatgcatactcaaagcatattggggtaccaaaaattgcacatgagcacatcttgggatttctaatacctatatatacacaaacctcatgatgaatcttgactatcttcac

SEQ ID NO: 262608 - DNA, 223 bp, Glycine max
tacactcgctcaagcgcgctgtgcgctaagcgaatcttcgttcatgcactagagcaagtcacttcccgtgctcacggcctcgctgagcaagacctgggctgctagcccaaaaacttgtctagaatttcatccttaggaatggggctgggcgagtaatttgtgtaacaccactttgcgctagcgcaggttctgttgttcgaccattatggacatggcccccggg

SEQ ID NO: 262609 - DNA, 406 bp, Glycine max
  unsure (1)..(406): unsure at all n locations
agctttgatgatatggtctccactgactaaaggatcaaagtangtctaaaagaggcaatttatcatcctgcttgggcgaatgagaaaaccgtggcaaatgaaaaaggtgaggatgtgggagaaacccatgttgtgactgccattcctatacggcaaagtttcccaccaatccaacaatgttattactcagccaataacaacccttctctttacctaccacccatttatccacaaaggccatccctaaatcaacaacaaaacccatctaccacacaaccaatgctaaacaccaccttttgctccaaccaaaataccaaccaagaaatgaattttgctacgaaaagcctgtaggattcaccccaaattncggngtcatatgctaacttgctcccatatctactctgat

SEQ ID NO: 262610 - DNA, 464 bp, Glycine max
  unsure (1)..(464): unsure at all n locations
cttacccgttgaagatctgtaaacgatgtataacgaatgaagaacgtcgaagaacgggtgaaacctctgcgaaaattctcacggagaacgttacggagacgtttccgaagcgcctcggcttagattttcttcacggaaacaatttttccaagcaaattctaaagagagagaagtgcctaaggggctgaacccttttcttcttctcttcctcccctatttatagcaaaataggggaggtggttgccgcccagctcgcccaggcgagctcagctcgcccaggcgagccaggttgcttcctccagaagcaacagccttctggaggaatattctagagggcccaagtgggcctgggtgctatttgcacccccatttttactatgtacaccncctctgctgtttttttggtgattcttnttcgtgaagtacggaagctacgaattcgaacgatcttgattcttccgaat

SEQ ID NO: 262611 - DNA, 376 bp, Glycine max
ttttggtgttttgataaaaccaatccaccccctctgggtttgtgagattcatcatccttttcaataggtatcagagctacatcttgaaagtttctcaagatcacagattttctaaaatgggctctaaacaaatcacattctaagagggtgcatctctcaacccgacctccattgtttgagggagaacatttttcattctggtaaaaaagatggaaatctttattcgatcaattgatcccagcgcatgaaatgctattgttacatgaccttttataccaactaaagaagtaaatagtgaattggtgcctcaagaatgagatgagatgaaagatgatgacaatacacaatgcccgatgatcaacatgcctaaaacatt

SEQ ID NO: 262612 - DNA, 377 bp, Glycine max
  unsure (1)..(377): unsure at all n locations
agctnnttttcattctgcatagcagaaataaatagatcgagtttaatatgaaatatatagacactttcacattctgcatatagcagacgttccttggttgtttcaacaattcaaaaactcgtatcattaatatttttgagcgaagatcacaattccaattaagaaagaacgaatttgaataaatcaaaaaatatggataaatataacttttcgttattcagttttatacatttaactgattttatatgttttgcaaaccaaaccaccgcttaattagagtgaatccatgttcttcatatgagacttctataacagctgttgcaagtgtcaagcgatgacagataacataatggcaataacgagtccaatattaatac

SEQ ID NO: 262613 - DNA, 426 bp, Glycine max
  unsure (1)..(426): unsure at all n locations
tcttcggcgaccccgtcggttttatttgccaaaactgcactcacacgagaagaggaatgaaatcgagcgaatgattaaccctagtctaaccgaatgcgaagcccgagagagagagagagagagaccttgatgtcgaaatcggcgccggcggtggcgagagtggcggagagagggtggaaatcgagggttaagacgggcttgctctcgtgccagctaatctgaaccgtgccacccttcattcttttccgtatcgaagtttttatgtttagagtgttgaagaagaagccacagagacacggggaaatggattntcgcgctccccacctttgctcttggcgggaaatgctgtatgggcctaccacacttctattctatctatattgtttctttnttgcctcacaactcaacacatcctagatcctacca

SEQ ID NO: 262614 - DNA, 306 bp, Glycine max
ttaagtcacctgcggcatgcagcttttgctctccttagcgacctcatttttttttgatacccgtctgaacttgccgcgaatctggggattcactttgcgaaatatcctcacatctacgagagtacgtctctctggagttcttaatcctgagatgctgctacaaagcccttgtgaagtatgaactgacgtgcaagaaacaccatatttgcttacaggtagataaacaaaactgcatgacaaaagttaaaactcagacggcacaacctactacttagaatgcatacaatcactctcacaagattaccc

SEQ ID NO: 262615 - DNA, 94 bp, Glycine max
cattaccacatctgctttagggatgtctgacgcattatggattcttgacacattcggactacgggtagatgaaaagtataggttgagggttaca

SEQ ID NO: 262616 - DNA, 443 bp, Glycine max
taagtcacctgcggcatgcaagcttttaactaaattttcaacgttccaaatattttttaaaatgatgtaatcgattacaaaatattggtaatcgattaccagtgtatctgaacattgaaaattcaaattcaattgtgaagagtcatatcttttcataaaatgcattgtgtaatcgattacatggttatggtaatcgattaccagtgacaagttttgaacaaaaagtcaagagatgtaactcttccaatggttttctcaagattttctcaaggttataactcttccgatggttttcttgaccagacatgaatagtctataaaagcaagaccttgacttgcattcaaacaactttttgaacaatttcttgaacaacttttgagaaatcttgaaacctttgctactcatccttcttcttattactttgcccaaaaacattctaagt

SEQ ID NO: 262617 - DNA, 426 bp, Glycine max
  unsure (1)..(426): unsure at all n locations
ttagcttcatcatcttcttccatctattaaatgtttcaaactacaggctctctatccattatccattaattcatgatcaacaaacttcattccaagcttcttgagatgccttttggtaattttactagaggctttggtaaaatccataatctcattagagaaatcaaccttaccgtagtcaatgaatctagaggcaagcatagcataaggaaactcataatccacaaggcgataacatttcaacataatgtcttcaatcagaaatacccaattcatcttgttacctgattntagaccataaataattagtagatcattgtctgtaacatgagcatgtgataagtgtagaagcaaagctacatggcgaatcaaaagtgattcaaagatgttttgataataacaatgatgataacaaaaggtgatgac

SEQ ID NO: 262618 - DNA, 98 bp, Glycine max
tttaattaaacttggacatataccgcgacatcactaaataatcatttgtaacattcaaaattggccggacatatgcctggttataccaagaaaattta

SEQ ID NO: 262619 - DNA, 196 bp, Glycine max
aatcagacccggaataacatatacaattgtcgacatctctttatctatatggctattccaaacttgacctcgaaaaaatatttatctattaccatcggagtaacctattctaatgagaacttctcagcaaccgcaacacaatggctctggtcgagggggcccacgacaaagtgacctcacatcttggttattcgga

SEQ ID NO: 262620 - DNA, 244 bp, Glycine max
tatttggagaactgcttcccaacatgaacattattattcttgaccatatcacttactgagtgttcgctgagattcacaaagtgactctaaattgggctcacaaacttatgatatcttcgcttactcagaatatacaaaatacaccacgactaatggtgctctgatatttaacgagtattggacagcctataatttgttattaacccacaagaatcgccttacgttttactacatagtctacact

SEQ ID NO: 262621 - DNA, 279 bp, Glycine max
ggaagcaaatgactctgatgttttgatgatgatcatgatgaattgatgcggaagatgcaacatgattaagaatacaacgcccaacatccagatgatcactattattttaggaagggaattcctaattgatttagaaaaaggtttggccaacgaatttgacgtaaaaagtgtttttcaagagatttactctctggtaatcaattaccagaggatgtgatccattaccagtggccaaaaatgggtacaacagctactataatttgaattcaaatttatact

SEQ ID NO: 262622 - DNA, 456 bp, Glycine max
  unsure (1)..(456): unsure at all n locations
gcacctgcggcatgcaagcttgccgcccaactcgcccattttatcttgttgctttctccacaagcaacagccttgtcgaggaatcttctggagggcccaagcgggcctggttgctatttgcacccccttattactaaatgcaccccactttctatttttttgtaattctttttctgtgacgttacgaaacttcacgaatttcgtaatgatacttattatctttccgcaaggttaccaatccttacggataatgtatttactcttttttagctttcgaagaagttacggaaactcatggattgcgcanaaacacctcatttcgacttccgtcacattacgaaacttaacggatcgcgcaagcctgctgccttatgatgtctgagacgtttcggacttcatttattgcatgcatcaagaataatcccggacaaattaggtatgacagtgccctcttta

SEQ ID NO: 262623 - DNA, 445 bp, Glycine max
  unsure (1)..(445): unsure at all n locations
tctaagtcacctgcagcatgcaactttggacccacaactacttacaaattttctccttcctagacctaagcctcttggaaattttgttttatttcaagacaataaaagtgttttccaacatctttcacatctcaaaatcatgccatgggtggccaatccacaagaagatttaagttaagacataaaatgctaacatagaggataaatatacaaagtatatattctttcatatcaaaagatacatgggagttcaaaaatggttacatcaaccccttacaattgaagagtttagccatggattctggcttggtcaaataatagtntttgttcttccaaaaatctggtgtgtaagctaatccttttgaagctctagtactttanaattgctctccaagatgcattctgcttctgaccctttttctacaaaaaaaatgggataaatgat

SEQ ID NO: 262624 - DNA, 266 bp, Glycine max
attccctatgctcattaaatttgtgcaacaatatattattaagtttatgaaaaagctgaaataaaccttttattcattttatatgtatatctctatattttctaaattattttaataaatcttttgactctcaaatgctttattataaattcatacaaatttaccccaagagcgcattatgcaccatttttttatataaatcccgtattatgatcattaaatttcttaaaactctttaatttaaaataaacacatggtgggctcct

SEQ ID NO: 262625 - DNA, 178 bp, Glycine max
gctgctgcagctgctggtttttattatttttggccaggctgaattagaagagacaactcttcttcgatctccgcgcacacgattcataactcttgacaagattcagatcttttctctcacttccaaaagtggcaaacttatcttcaaaaaagacttgtcaaactcggatatcatattt

SEQ ID NO: 262626 - DNA, 455 bp, Glycine max
  unsure (1)..(455): unsure at all n locations
agctctgatggcgttgagaagaatacacatgttttgttttcatcaataagggggagaatgtgaatgtatgtatacatgatttcgatgatgcccaaacaagaatcaaaccaggcttcatttgctctcagattaatacaagattgtttcaacaaacaaagccttgattcaagatttcttcaagatcaagccttgccttacaatgaaaggtntcaagtcatttaaggctcatgtaatcgattaccaatacatgtaatcgattaccaatggtttgaaagtgtgtaatccattacacatcatatgtaatcgattactagagactctgaacgttgggaattcaaatattaaatgaagggtcacaattgttcaagaaaaacaactgtgtaatcaatacactaattctgaatcgataccataaaggatgttaaggaatattgccaccagcacatctcttcata

SEQ ID NO: 262627 - DNA, 321 bp, Glycine max
actcagctttaatgtctgggtttctgagagagaaaggccattttctatagttgatatatttgttgggaaacctgcgagaatcagcttgaaaggaagccgcctaaagcttgaatagtttggagtgatgtgagttctaagtggggaaaatctcacccttgttttcttcaatccttatcttctctttatatgtgtaaggaagttcccatttggaagctaaatctctgtggtcttcttgaggacttgatgaaatatctttttttatctattaatgatgtatggtgtcactggctatagacttatttaccatgctttccttgtcca

SEQ ID NO: 262628 - DNA, 337 bp, Glycine max
tgcggctgcagcttgctgtaattgttgcggaatttcctcaccattgaaattctttgggaggacaagagaggcgaaaattttgctctgctgcattacataaagcgccccaaataagttctcccagctattgtttgacaaagacaaagtcaaaagggaagtgaagtttgcataactctcggggatttggccagttaattcatttttggcaaggcttaccatcgtcaattcatggcaatacgacaaggaatttggaagggatccattaaaattattgctacccagatccaaagtgaaaagattataccacccagagaaattaacagcaacagaacctgtc

SEQ ID NO: 262629 - DNA, 436 bp, Glycine max
cctcttaaaactcagcttggtgaaatctactccttgctagtgattggtccatccatgttgagatcctcacctaactaagatcttccttcttggatactccatcatcactatggaaatcttgaatgagtgtcaatgttgaatcaagttggggaagtaattcatgcacggtttgtatgagtggcgtgaacatggacttggcatgcagtgtcgctgaaataattagggtctacattctctccctagacatggaataattaataataattgctatttgttctttctcttaccatctcatgttgttggttatggggtttattaaataatggggtgtctgtccgcgagacatagatgtataaagtattgactgttatggagacatgctggctctattctattcctatggtcatattgagctgatatgtgtgctaccatgtgc

SEQ ID NO: 262630 - DNA, 416 bp, Glycine max
tgtggaagcaacgccttcccatattattttgatgatgccacagaatcacgatgtccacttgatttcaggattggcatcatcaaaaagggggaaactgcggaagcaatgtctatcaaaattattttgatgatgcctaagaatccccaagtcaaacaagtttcacgaatcacgatcaagattctagattcaagactaatcaagatcgtgatccacgattcaagttgagaattcagactcaacattgaagaatcaagagaagactcaatcaaggatagtattaagagaattcttcacaacattgaatagcgcaagaatttttcataaagataaatcctttaccagagagttttattctctggtaatcgattaccagaaggcagtgctcgattaccactagtctgcattctattcacaac

SEQ ID NO: 262631 - DNA, 316 bp, Glycine max
ttctatgcacaaagttctatagctgcattctatccaaagccatatcagaaatatactagtactacctaatgaaggcaaccattatgttcttacaagaacgaacccgggaagattccacgttggtataccaagtgattgctgccccagccaaactttcctggatgaaatgcatcaataattattcatctttcgcgtatgccccatttttctgcagtgcattctcatgtgattcttgaagcaagtagccacgtgtacatatctgagtctaacaccatgaacttctgatgaatgaacatgccgggtactacgcacaact

SEQ ID NO: 262632 - DNA, 215 bp, Glycine max
gagtattactaaaaaaaatgcacgcaaataccatcacagctcactaagggcctaaattatgttatgtgcttccaaagtggatatgttacctaatcgcgggcagatcacccagttaaatgagatacatggctactcaaaacactgaagcgatctaaaaccgtatacctgcacataccgggctttaaatacctgtcatacacaaggttgcgagaata

SEQ ID NO: 262633 - DNA, 296 bp, Glycine max
  unsure (1)..(296): unsure at all n locations
gtgttgaagtgagataatcaaagtgcaatctacttggcaaagaactcaacattncattctcacacaaagcacattgacataaggtatcattgggtccgagatgtcctcgaagaaaagaaagtacatcttgaccaggttcacacatatgagaactggttagacatgatgaccaaagtactatcgaaaaagaagtttgaagattgctgtcaaggtgccggtttgctactaccccccaattaagtcaggaggggaagattttgtgagatccctccttnattggagaggttctagaaaat

SEQ ID NO: 262634 - DNA, 428 bp, Glycine max
  unsure (1)..(428): unsure at all n locations
agccttacatggagctacatcatgtggtattatagcatctttctctangagangggctgangcttactctatcatattattaggtcaattcacttcaaatccttgattggtcaggttcatgtaactggaactggtgtcacaatcaatcaatactttggacaggccttacgaggttcgaacactttatttgcatcaatcaccccaataaaattgaaagaaatcataggaaatctaaaggaagggtggaggagagaagtataagaggaaaacaaatgctgtttggagataatgaataaagagttgaaggaggcgactaaaattgagttatcccaaatggcctcgcacactcacccccatttagacaccggaacacacgtatagctacacgcgtaccactaaggaagttggctgaactattacaatcttta

SEQ ID NO: 262635 - DNA, 307 bp, Glycine max
  unsure (1)..(307): unsure at all n locations
cggatcttaagcacctgagctgcagctgaaaaaaatggacgattattatttcttcctgtccacnccattacatatgaaatgttaatttttgtcggtgacactcaccaacataatgaatttgatgtggggggacaaacaaaatatagaaaacatggcattttatcctctacaatatttctataagtaaggggcggaaacgagaaaatactattgaatttggaacctaccctctgtccaaccatttaaatgtccccatcttgacagctgtatttagaaaacactactgactctagtagtctctccccta

SEQ ID NO: 262636 - DNA, 328 bp, Glycine max
  unsure (1)..(328): unsure at all n locations
tgatgctcttatttacngctgcgtatatattaaactgagttccaaccaaggctgtctcaaagacaccttttgaattgttcaatggtttgaaaccaagtttgcgacatatacccgtttggggatgcccgtttgaagtaagaatttattatccacaagagaagaatctacaccctaagactattactgggtatttcattggatatgctgaaaggtctaaagggtataggttctattgtccatcccacaacactaggattgtggaatcaacgaatgcaaagtttcttgaaaatgacttgatcagtgggagtgatccatttcacaacatttc

SEQ ID NO: 262637 - DNA, 387 bp, Glycine max
agcttgacacaatgttgataacaagacaaacttcaattgcttcttgtttggggcaactctgttttcatccaaatgatgtacaactaacttggtagaatatattccagaaattttcccacattattataaagtgatatcataatatttagaatttttcttgtgaaaatactgctgtagggcaacaaaggaacaataattatgaaaaatagattcttgtaatttgtttggcttgagaaaaatatatgacatattattaaggttatggaaactccctgttaaatcttatataattcagagctgtctaagtattttttttaaatttaaaaatagcatttcagaaccaatttaatgttaaaaattaaaattggaacaaatgtttctataatg

SEQ ID NO: 262638 - DNA, 482 bp, Glycine max
acggacctatgaaactcagcttggcgagtgttcaaacaatggcctacaaatttattatcaatagtattgataaaaaatgtgcataaatcaagtacaaacccttcaaaacaaagtaaaatcaaatagtaattttagctgaaaatagaaaaagaatataaaaagggataaaaaactaaagtttgaactaaatgtaagaacaaaatcaaaacccttgaaatttaaggtgtgtgagagagagctgaaccgatggaattgcgacttttgaagaacaaataaaagtgaaaataaatagaagagagtgattattttgaactaagaaatatatacttggtggcatggtttttgcacagccatatcataatcgtcctgagaccattgagaaatcgagattcattggcatatttataagatcaaagctatatatttggtgaaaccacatattgagtcatcttgtggaatctgaatacctcaagccaaatcac

SEQ ID NO: 262639 - DNA, 364 bp, Glycine max
agcttggggtatgtatattacttcgactcatcatgtcttcgagtaacctactcaaaatcaatagaatatgatagatttaattaagaaaaaagaaaaaatttatcttctaccaaaaagataaaatatcccctaaaaaatatattatgtattattagagaaaaaaaataagataagttatattttttcccatttattctattttatgagagaaattgagattttattattcaattttatctcaataaaaaaagttatcaagtttcggttaaattaatttaaatctgacctctgatacttgcatataccattcaattgttttttttttctaaaagatatattttttaatttgaaaatataatataaa

SEQ ID NO: 262640 - DNA, 175 bp, Glycine max
  unsure (1)..(175): unsure at all n locations
atgtctaattctatctaaactatctatgaaaacattttcaaaagtgaaactagccatagacccgcacaactagcttctctcgtggcgcttaaatgaagagtngcttgcgcttaagcaagatgacttgctaaggaacaaggctactggttttcaaacttaagcgtgactggaacca

SEQ ID NO: 262641 - DNA, 305 bp, Glycine max
aatctgcacgctgttcagcaagccgtataagtctcgatccatgaccatattagcaagttaccgcataaaaataatatccggtgatgtatcggcactcttgcgtactgctggaatataccgtctattatgacgaaccatgttaactgtctgctgtggagttccttcgaaaacataaactgcatgggctctcttctatttaaaccaaaaatatgtattgcgattcaaccatgaaacattagataataatattgcccacccatgataaacacctgttggcatagacaacttatattttcttattaaat

SEQ ID NO: 262642 - DNA, 452 bp, Glycine max
  unsure (1)..(452): unsure at all n locations
catgcaagcttctgctcaattaactaaatgtcaatattatttatgacatacatgtaatgagaggccaacatgatttcaaaataagggtaagggtaatccctagtttggttccattttaattacaatgttacaatcaatccccttgtattatttaagtggaatgtgataacacacaggccaacatgattggtagtaaattggagtcatgcagtgatataaggtatatgctgtactgacacttgtggatttggtttacaaatgccacattaattttgctaacatcacatatctcaacgagaggttagtttcacctttgtaaatttcatgatttaaatttcactttggtgcatagatgttacccctgttactcaactattagatttgaattaatgtaataaaaaaatgtgtatttaagttagactcaagaagacnattatattaaaatttgcatt

SEQ ID NO: 262643 - DNA, 480 bp, Glycine max
  unsure (1)..(480): unsure at all n locations
tcttccggggttgatgggttctatctcgtagaatggttttttactaacttatatgttctcaattagctcaattgcttcttccggggtcttcagatatatctttccccctgcagaaacatctaacagttgcttggtttctagtcttagcccatctataaacatattcaattggattggcttggaaaacccatgattgggagttcttctcaacaagcctctgaacctctccaatgcttcactcagagattcatcaggaaactaatgcaatgaagagattgcaactntcccttctacagtcttggactctgggaagtatttctttaggaacttttcaaaaacttcttcccaggttttcagactggtctttgaatgagtggagccacctcttagcttctcctgccaatgagaatgagaaaaggctgagcctaatggcttcgtctggacaccgacaatcttaacagtgtngcatatttcaatgaa

SEQ ID NO: 262644 - DNA, 350 bp, Glycine max
cccaactctttgagtgacattcgcattgaatattgcatctcactttccattttctcatatgtacatcatgcattatcatgcagagacaggaagattgtttctaaagctataaacttcttcagagcataaaatactctattttaatcgatcacaagggtgatcgcaatcaattacacaagagtttgtagcttagagagagattctagtctcggtttaattgatcaccaactaatcataattgattacacaattcaggtgagaccatatctgaatctttatgagtctctgctctaatcgattactacgtgatcggaattggtactgcattaaatttcttttcaaaatacaag

SEQ ID NO: 262645 - DNA, 321 bp, Glycine max
  unsure (1)..(321): unsure at all n locations
ccactactggaaaacccgaacgcaaattcttattgaggcaatagacttaaatatttgggaagccatagaaataagaccttatatacccaccacagcagaaagaaccatcatagatgggagcacaacaagtggaagcacaacaatagaaaaacctagagataaatggcctgaagaggatagaagacgagtacaatataatttataagtcaaaaacataattacatcttccctggaaatggatgaatatctcaaagtttcaaattgtcagagagctaatgaaatgtgggacactntacaagtaacacatgaaagcacaacaga

SEQ ID NO: 262646 - DNA, 424 bp, Glycine max
aagctttggataaccaagccaaacggaatgctctacaatttataaatgggaatacaggggacaacggcggtgatgacaaaccgaggcagaaccgggttgagggagtaaagcccattgatcctcccttcaaagggtgaagcgatccacatgcctactcggactgggaaatgaagactgagcacttatttgcctgcaatgactacactgatgcgcagaaagtcaagctagcagcagctgaattctccgattatgccctagtttgggggcttacataccaaagataaatgttgagataggaaccacgagaggtaaatacatggactgagatgaacagggtgatgagaaaaaggtatgtgcccactagctctaacagaaccatgcgacagaaacttcagtggctgtcccacaggaatttaaccgcgga

SEQ ID NO: 262647 - DNA, 405 bp, Glycine max
  unsure (1)..(405): unsure at all n locations
agctngtagaatggctagacatgatacatgttatggtttggtttggnacaaggataaaagggatgccccacactatttgcatgacacaaatgcgaaaatgatgatatggaaacttttatgctaaactggtcatgcatgcacctatgtggacactcaagtgtcaaacttttatggtcatgtgatgctagggctcacgattcatttcctgcattttaaatcaacccaatgtttccaaaatatgttcttttatcaatttgtgcattcctccaagtccatttcgggcatgcgggaaaatttcacagcattcacccttcaggtgtagacacgtttgttgcaaaactagctatgatcagcgaatctttcttttaaagaaaagatggaaatgatctcttttcaaagcatgtc

SEQ ID NO: 262648 - DNA, 479 bp, Glycine max
aactaagcttatgctgtgggcgcctttgagattttgttaatattttttcattctagctcagacatggagcgttctctccttttataacctcatacctacctcccacacatatgatgtcaccttggacagagccaagttgatttatggtcttattatgaagatggttgtgaacttggggtacctcatcttccaccagatctctctgattgcacagcatgacacattcatacttggattgtctgccttgatcacaactctatgcaaggctagaaaagtccattcagattctagatccctggagaacttgagccctgccattaacttggcatatattaataagaactgttagaatcttgatgatccaacaatgacatttatagaggcaaagaatgtctccggtaagagatcagatgtccccactactttaacaccacctgagacaccatctacttcttcgttcacagctctatacctttctc

SEQ ID NO: 262649 - DNA, 371 bp, Glycine max
agcttctttgtcaatgcaaagtccttgcttattcccacaaaagtgaatgcaccatgtattgcttggactgtatgaatggagccctttgctctacctgtcttgcttctcacagagaacacagagctattcaggtgaaagcttacttactaataattaattaattctctttgggggatctatgcataactcaatttgatgcaattctgcgggcattcgaacccccaaaaagccaaaactcaaggatttggatgcctgtaatctgattgtgtaactttcctacattattactttgttaggagccaaccctttctgattgatcctaaagttatttgtctcttgtgttggtacgtgtttttctataccgaattatc

SEQ ID NO: 262650 - DNA, 395 bp, Glycine max
ttgggctcaacggggacggcacaaataggggcatcctgatagtttcctgctcgacaaagccgaattaagggtcggaatgagatggccctacgcctataatgcattttgaaacaatacgacatgccacaccgtccccgtcccttgcactcaatgcccacacacacgcccaccaaatgttcggtgaaaagcctcaatggcattagcgcgtgactcttgaaggagacaacccacggggattctggctcgtgcacatctccatattgctggacatgtatcatccccgaaaaagctagagtatcgccccccataatcctagcctaaaaccgaattcatgcaaaaaagaaaaaaaaaaacaaagccacaggagtgcaatggggaaatacccttttgcccca

SEQ ID NO: 262651 - DNA, 251 bp, Glycine max
aaaaacgaacccatgccataaataataatctggaaaacaaactgtaatccacctctgtgaaaaaagcaataatgaaaaaaattatctcgaaaaacatatcgcgaacacacaaatgaatatccatattctcgagcctcaagattataatcctctgcatgaacccacgatatctactctaaatattgatttatacttatcaattaaagatggttttttagattaagtaaattctacaaattaatcaaatctaa

SEQ ID NO: 262652 - DNA, 395 bp, Glycine max
  unsure (1)..(395): unsure at all n locations
agcttctaaccatattgctggacatgcacttatgctggccgctatgtatncagcctcacatgacgataaggccgccacggattgcttctttgaacaccaactaatagctgcatttcctagctgaaacaaataccctgtggtactctttctatcaattttatccccacaccaatcagcatctgaaaagccaatcatctcacaagaattgctactcaagttttgaggaaataacaaaccaaaaccaataggccctttcaagtacctcagtagccttttcactgcattcaaaaggccttgctgtggtgctttcaaaaatctactcaccaagccaactccatatgctacatactggtctggtgttgcatatatacctcagggagccaaccatttgtctg

SEQ ID NO: 262653 - DNA, 427 bp, Glycine max
  unsure (1)..(427): unsure at all n locations
tgttgcgtgctaagcctcatatctcatgctgagcgcatattgtttattattttgcgtngcagaaagcgctaaacgccacctgctgcactaaaccccatatgctcactggaatttgaaacctcaagttgggcttaacgctaggttatgctaagcacaaggttactcacaacctaaacattttattgacgtgctaagcgcgccatacaaatttcagtttttaaaaccaaatgctgaggcgcttgggtgttacccaaaaatcatttgcctctacccttttctaaccctgatcttttgtgctttctactatgtgctgaaacttacttgtctgcattgttcttgcttcattctacattgcaatcataatcgaagtaagcgagtacattttcaatttcattttcatctttcataccacacgatagatgatttt

SEQ ID NO: 262654 - DNA, 315 bp, Glycine max
atctctaagtcacctgcggcatgcaagcttcatgagagtgtcatttatcaagatgtgaggaaaaataaaagttatgctaaacaagccaacttagggagaaagaaggttgtcttcgaacccggagattgggtttgggtgcacatgaaaaaagaaaggtttccggaacaaaggaaatcaaatcttcaaccaaggggagatggaccatttcatgtgcttgaaagaatcaatgaccatgcttacaaagttgagctggccggtgagtataatgttagttccaccttcaatgtctctgatttatctctttttgatgcagat

SEQ ID NO: 262655 - DNA, 433 bp, Glycine max
  unsure (1)..(433): unsure at all n locations
tagtgaaacatataaanaatatatttactcacttttttacccttccaaatcttctaatatagaagagaagcccaaattgagtaagcagagattctgctttttctaatttcctctcctcttaaaaattgaacttgttaacaaaaaaaatattaaatcactcatccccttttcttctcaggggatgccaagctttagtgaaactatataaaaaaataaattaaactcacttttccacccttccaaatcttctaatatagaagagaagcccaaattgagtaagcagagatcttgctttttctattttcctctcctcttaagaattgaacttgttaacaaaaaaaatatttaatcactcatccncttttcttctcttccttccatttttctcaaaccaaacactctatattaaagtagtagaagagcatggtagtcg

SEQ ID NO: 262656 - DNA, 461 bp, Glycine max
gacacaaaaactccgcttatctagagcctgaatttatgacttgtttgacatttctattgctgttgaacctcccattggaattcttagattgattatttcatggattgagttatacttgctattaggtgatgtgattgcattaaacttgttcgtgtgtggcttatagagtacaagatgttgctgtgttacttggcctgatggttgacgatcacaatacgtatacatgctgatgccaagacccatgcgtaagacacgtattaattttctttacaaacctggctaacaatgtggatgtaaaattgcttaaacttatgtttaaatacccttttagtccttgccatttagtgctgttttctctttttcttcctaccacaatgttttttgttttagttcttgcaaatatgtttgtcggttttactcctaaaacacttacataatgtgtaacagtaacaaagtttcta

SEQ ID NO: 262657 - DNA, 274 bp, Glycine max
  unsure (1)..(274): unsure at all n locations
gggcacgggatatanggccgttgtggaaagaacaaaaattcatttaatgaagggactgtttaaaattttagaataaggctgagctgtgaacacagtaacttcaagcgtttattaaacacataacactttctagataccatcgagtctgtagatgttatcaaagaggcttcatttgtgatcctccgcaagtgataaatataacacctctcggccttcatacaagagaatccaaacatcgacataatgcctttgctgattgcttcaacaggagtat

SEQ ID NO: 262658 - DNA, 401 bp, Glycine max
cacatgctctaactaaatgcatagatgtgcaaatgataccttcttgcactacatgccaatcgctcaccaaggcatacatgataatgcacaatcatacctgacatgagcagttcagtgtcttgctttaattctctagtcataagaagcgacttgatgcaaaattaggagaataataaaatgtgcgagatatacaagaacaatatatgcgtctcggaagattttcattgaacacttaattatgtgaagacacaatattatatatatagaattgaattgatcacatgacttatataaccaacttatacattgtaatgtttaagaaattttatgaaacaacttataccttatgaggacaacttaacttatggaataaaccacgttcaacttattgtattataatt

SEQ ID NO: 262659 - DNA, 191 bp, Glycine max
cgaataaggccggcaacagcatttacaatctactcgaaacatacgcgaacaataagtacaaactaacacccagaataccgaacaaaaaacgggcttgaacaacgagcgagaggtaagtcaatgaccaacgcagaccgtaacaagacgatgagctccatccatacaaggaagcagacgaaaataccggtaca

SEQ ID NO: 262660 - DNA, 387 bp, Glycine max
tcttatcccaacactgttagtgaattgtcctattctctacatccccactctagcaaaatatagctatgaaagcttcaatctcattacaaataaaaagaggcagtctgacacacagcatatcatatgatggaatggcctgcaccaataccttgatttgaatttctcgacctacctaagataaacacttctccttccacccttttagtttcttccagaccctatccctcactgcttgaaacacttaaaactttgacttaccaataatagttcgcagtcctaagcatgtcatgtttctttccattgccttaacaccaatgagcatttggcttatctgcaaaagagctgagacttttaaggtccaccttctggcccgaggcatgctcatgc

SEQ ID NO: 262661 - DNA, 429 bp, Glycine max
ttgattgccacatggctaggatgatctttgaggattgccacatgttaaactgattctcttgatgcgagctcaaatctaaagagaagacactaggacatgtttgatgcaagtggaggcttttagaaaaaggattgcatgtactgccacactccgtagggagatgcaccggaaatgctggatcgacaacaaataatgcatacatatagacgcattatgactccaatgtgagtgaaaccaacaaggttaggctggtcttggagagaaatcatgtctcgcggttggtgttaaccacggtaaccaccacccaagaggagggtcaagggtgaattggctgatcacaatttttaagcaacttagagaaattatgcattttgatgcattcaaactagagatgtagcaaaatacgtttagaaaagatactacctatgt

SEQ ID NO: 262662 - DNA, 427 bp, Glycine max
  unsure (1)..(427): unsure at all n locations
atcctctnagtcacctgcggcatgcnagcttggacaaactactggatgtctccctttattcctctccaatataaatttgccgctattcttctgtatgtgcgatagaaaccggaatgaccaccttgaggagtagcatggaattcttccaaaaaatttggaatccaaattgatttctcagggatgactaggggatttttataataaagtaccccttgtttatatacaaatctagcattgatattttccccctgtcctttcttcacttcttcgattatttttctcaacttctcatctgcgtgcaccttagcattgatttcttggcaatccagccatactgggaagtaaatcatattgttcagttccatttcatctctactacgggacagagcatcaactcctcgggtcttctttccaagcttataaatta

SEQ ID NO: 262663 - DNA, 451 bp, Glycine max
  unsure (1)..(451): unsure at all n locations
taatgtacaaaacgcttctgattatcctgtataaatatccccaagtttttcttgtaaaatcatcaatgaagcatattaagtatcttttacttccattagaagatgggtttattggaccacacatatcataatgcaccagttccaagacatcttttgctttccatgactctcctttgggaaattgagatcgatgttgtttgtcaacaacacattcttcacaaacttgggaaggaatagtaatttgaggaaggcctgtcaccatgtttttctgttgcagggtctttagtccactaaaattcaagtgaccataacaaaagtgccacaaccatgatggatcttccatgtcagtcttaaagcaagtctgaatactttcaatttttcatgggaacaatttgtatgaactcatttgaaccatngcaatggcacctctaacaggatcataaattcacat

SEQ ID NO: 262664 - DNA, 287 bp, Glycine max
cgagccgcctgaggaacagacacttttcgcttctcgaccccccccagaaaacaactgtggcccaggacatgccccccagcatatcgcataaaacacgcgaccaggctggcacaaagcctttacccaaaacccaaagggagccccccgaaccctaccggcttccccataaaatcctaggcgccacaaagaccacccgcaagacaaccatgaaaaaccaaacatcaagctgctcatgactcagcacgacccgagaccaggacacacgaatcgagaaaccatgagaagaa

SEQ ID NO: 262665 - DNA, 371 bp, Glycine max
gcagcttggggggaagctactcccgtggttttatggtcccacaatacttcagggaacacgggaactggagccactccttatgaagtcgccttttgccaaaaaccctttaactttccagaatatattacagggtcttcgaacattgaggccattgaagagatgtggactgatatggataacactcttcaagctattcgaaataatcttctcaaggcttaagctgctatgaaaagccaagttgatgggaaacattgcgaagtgaactaccagataggagattgggttctccttaagcttcaccctcgccggaagacatctacaatgggatcccagtaagtttcacgcaagcttgccaagtggttctatggacc

SEQ ID NO: 262666 - DNA, 326 bp, Glycine max
ttaagaactacataggtttgaggtcctcatcggaattgaggatacgcatgaactaaagccccactttttttgaccccaaaatagatcgtctaagggaccaacgccttaacgtttctcaccctaaagagatcgttcaaggtccaatgccttagcatttctcacccaaaagagatcgtttaaggtccaaatccttaacgttgctcacccacaagagatcgttcaatgtccaacgccttatcgttcttcacccaaaagagatcgttaaaggtcaacaccttacagtctttccttcaaatcagagccgttaaggccatgcttacaacttc

SEQ ID NO: 262667 - DNA, 446 bp, Glycine max
agcttatagaatatataataaaagatctatgtttattgaagaatctatccatgttccctttgatgagtctaatgctatttttccaagaaaggatattttatatgatgttacagaatctttaaaacaaatgcacattcatggacaagattctaaaggaagaagtcaaatcaaatgatgaacttccaaaagaatggaaagcttcaaaagatcatccccttgacaacattattggtgatatctcaaaaggggtaacaactagacattctcttaaatatttatgcaataatatggcttctgtgtctatgattgaacctacaaatataaatgaagccataatagatgatcatcggatagtagctatgcaagaagaactaaatcagtttgaaagaaacaatgtgtgggaattagtatagaaacctgaaaactaccctatcataggaacaaaa

SEQ ID NO: 262668 - DNA, 381 bp, Glycine max
  unsure (1)..(381): unsure at all n locations
tgtccataaaaaataggttnttgaagtttatcatttcaatttctcattaagtaaaaaggatcattttcaaggtccaacgccttataatgatcaccttntaagtaaaaaagaatcacttgataagaaagaactacgtaggtctgatttcctcatcgcaaatggaggaatacgtaggagcaaagggaaacacccttgtcgaccacacaaagaacaaaatataataagggtataaaggatataaggacatataaagggaacataaaaaaatcaaagtcatgtttgcacattcgattaaaggctgtcgttccttgtgacggacgtgtggggtgctaatacttttcccgtgcttaaatacaactcccgaacctttacttaaagttc

SEQ ID NO: 262669 - DNA, 352 bp, Glycine max
atcttaagcacctgagctgcagctaatccccgcttttttggctcatacattcatgagggtcctcaaaccttcgtagatgaggtgtcatagatatgtcgaggtttatgttgttcccctactcagatggtacagtttgcagcttttcgtttgcgtgatgtaacaaggggatggtatgaaactatgctccttgcgagaccaacaggaacacctcttttatcatgggatgagtttgtccagttgttcttagctcactttttgcctcaaagagttagagacagtagagcacgtgagtttgagactcttgtgcaaaccgagccgatgttagtgatggagtataatatccaattcatgc

SEQ ID NO: 262670 - DNA, 353 bp, Glycine max
aacattagggatgcttatattagattattttacaatttctttcctggaataagagaggctcttgaccacccctcctacttaacattcaatagacaaaaaatatattcaccacccctcctaaggaaattttttattcgaagtatcattcttcgtcagtcaaaataactatcttttaatatattctttcaaactcgaaagatatgtcggatcaaatctctgcaataacatgttctgattgtacatatatatattgataatcaatatctagatactagaaaacgtttaggtggaataagcatgctatttgtagtaatctcattttcaacagctatgaacagaaaagctgcatatgc

SEQ ID NO: 262671 - DNA, 411 bp, Glycine max
agcttcttatccaaagctcatcttgggggtgaagctccttcttccatggcttcttccctagagaatggcgcctcctctcacctcttctcctttgtcttccgctgcatctccatgggggaaaatcaccattaaaggacctcattgaagctcaaagatccagcctccatagaagccctacaagcaagcttccatcatgaggggtatcggggcttttgtgaagctacatccttggtgaaatatatcaccaattggttaggccttccaaaacttctctcatccgcggactgcatacatatatgctgctcttgcctcccctcatcgtcgacttccattcggccttgatctatcattcgttgcaacaattcctccactgctaaacatgattccatgttatgtagctcatcgggatgc

SEQ ID NO: 262672 - DNA, 410 bp, Glycine max
  unsure (1)..(410): unsure at all n locations
atcacgattatcgtctccctttccattattgggggtaccacctgagccgccagaatcctccacctattgggcgttgtctttgaatgatccgtccccctttttgcacatggttcggagttgcatcctatccagaaccatatcaaaattgtattgatactgcctaacaacggcaaccattaggtccttccaagaatggactccggaagattccaagttagtgtaccaggtaacagttgttctagtaagactttctcaggaaaaatgtatcagcagnttctcatcttttgcgtatgcccccatcttccgacagtacatgtttagattgtccttggagcgagtagtccccnttgtcttgtccaagtccggaactttgacttgggatgaccatgtttggtatacgaacactcttt

SEQ ID NO: 262673 - DNA, 345 bp, Glycine max
agcttggtgagattattatattattacatattttctttataaatacttaaatgtattattaattaaacacaataaattataacattattaattatttgaaagtattaaaaaatggaaagaaaaaaaaaacaggatcaaaattcgggtttgtattcttaacctgattttgacaaaaaaaaaaaaaacaagggaggggactgagattcagtgtgtctgtaacaaattctcaccctgaataacaaaaatgtctaattaggtaaataaaataaaaatctcgaagacctttcttgaatagttagagagcctaatgaaaacacataaattactttttaataaagtgtgaat

SEQ ID NO: 262674 - DNA, 343 bp, Glycine max
  unsure (1)..(343): unsure at all n locations
agtacattggatttggtacgagacgtgcctactgatttccagctggggaattggcgagaggaggaacaccccgacatttccgcaccgagcataatgtaaacctttactgatttaaaagctctataaatgggcctacgctntagagtttctcttttggctaaagctttgcgtatttagtctttaaaattataagacaaggatcgtccttcatctgttgctacgtcactacccattctcatccatttgcattgggacttcttttctgaaatgggagatccgatgacgagtcccccgaaggtactaatacctgggaccggctatcaacttcgatcaaagatgaatc

SEQ ID NO: 262675 - DNA, 430 bp, Glycine max
cttctatagcccaatgtgcggcatatatttgcttcgaaatatttcttcatatgccctatgacactgtactgtctcagctctggctttatttgcactgacttcaagtcattccactaacatcaacaccgcttcattgacatgaagagtctcaaagctatggaaagcacctgtgatgggcagatgaagaaaagagaccttttcctccagggcaatggtgtcctctcctactaaaagatggaaactgctagattccttatgccatctcttcgcaaaagctgatataagtcctctaacaacagtgtccaatgaacatgcgattagaggacttaaacctgtggtgcaactaaccctttaatcataacagcatgccgtccacattattgaaccttccttcatgggaggataactctcaatcaagatgttcctatat

SEQ ID NO: 262676 - DNA, 442 bp, Glycine max
agctttaggttgttcaattgcttcagattgttgcacataatggaaaaggtctatgtggtggttggtagaggagcataaaccacagagtctggcgacaggtgtaaatttttgattcatggccagttgggttaccacgttaaccaaggcatctagtttaccttcaagcttcttagtctcagctgatgaagatgaatttgtggctacttcatgcactcctctaatgacaatagcatcacttctggcactaaattgctgggagtttgaagccatcttctcaattaaatttttggcttcagcaggggtcatgtctccaagggctccaccactggcaacatctatcatacttctctctatgttgttgagtccttcataaaaatattacaggagaagctgcttataaatctggtggtgagggagactggcacatatatttttaaatctc

SEQ ID NO: 262677 - DNA, 478 bp, Glycine max
  unsure (1)..(478): unsure at all n locations
gaatggctagacatgatacatgtcatggctnggttttgttcaaggatataatggatgccccacattatttccatgacacaaatgcaaaaatgatgatttggaaattttatgcaaaactggtcatgcatgcgcctatgcggacgctcaagtgtcaaatttttatggtcatgtgatgctagggctcaggattcattttctctattttaaatcaacccaatgtttccaaaatatgttcttttatcaatttgtgcattcctccaagtccatttcgggcgtccagggaaattttcacagcattcacccttcaggtgtagacancgtttttttcttcaaaaatcggttatgatcaattgaatttttttttttcaaaaaaagtggaaatcatctcttttcaaagcatgtcggtattagctggacaacttatttcctttttccacctttntccttactcgctttcttttattccttatttgctctc

SEQ ID NO: 262678 - DNA, 382 bp, Glycine max
cttgctctatctacacctcccactccaataagcctcccgatcattctctcctttaaatggaggaatgtagagtttaataccatcaatacgggtttgtctaggaacaccatcataccctcttctcctccctttttcttcattaagatctctattctccatttgatcccacctctcatggagcgcatcatctcgttgtgttattaacctctccaaaagttgcatcaaaactggcatttggaaatgcgaaatccccactccataattatgaattagtcctgccatctcaaaccaaccaatcataccgtacactacaactttatgtgctgctaaatacctacccactcaagtgatccacaattttgtttcatataaaagaactctt

SEQ ID NO: 262679 - DNA, 321 bp, Glycine max
gactgaattaagcggctgagctgaactattggaaaatgattgttttttacttcaggatatacattcctggagttgtggtaatagccatcaaaaatggtgagtaccgaatatttatataagcacaatttaaataatcatattttctaaccaactagtaaaggagaaaggggtaatagtgcttggctaaagatgaaaattaaatacatgccataatcccccatttattttgcctctggtaactaagaagataaaaagaatgactaagatacccgctaagacttacaagcccaattttatgatcttatgcaaatgaaaggaaat

SEQ ID NO: 262680 - DNA, 438 bp, Glycine max
caatgggttcactaggattgaagagtgaaatctataatgacgtaaatttgaagcatactttcacatcacaccagtccataacattaatctaaacttgctcaaactggatttacgccttaaattccaccgaatcacaatttgactcttcaacacccaatattgccctagacatggctctttgttcactctggacatttgattttctctctagcacagtccaagctttctcccaagtcctaaatgacatttcaagctagtattaactcactttaacctgcatttaccacagaattcagacttagcctttcaactctcaaagcctcactctttttccactcataacatcacattctcactttctaacgctaggttagttctaccatccatctcctaacagttttcataggcaagttcagcacataatcatcacatacatca

SEQ ID NO: 262681 - DNA, 267 bp, Glycine max
cttcgatgctccacttcaaagacatggatgcggatgtataggacagtccatgataaggttcacaaacgatcatggacgccccacttctgctggggtatctgcagaaactttcagacatcacactgataagcttgtccaaatcaatcttcaaatcatgataccagatttaccttgctttttatgcatatgacgcaccactttctgagcaatgagagcgttgtgccctgttacactccccggagataaactgttttgacagggtccaat

SEQ ID NO: 262682 - DNA, 351 bp, Glycine max
  unsure (1)..(351): unsure at all n locations
ncagctnattacaagatctgaacctctctatgtttacccttcctctgtgtgcagaatactttacaacaagagaccctctgtctcttaatccttgttcagaataataaagattaaaagaagttatctctcttgaaagagatagattgaacaatttgatcactctaattatatcttttgaatcacaagtgtcttggccaatgaactttatacatgattaaacgatattgcgtttctagaggatcataccttcttgtttgaaaaactcctatctaattcgtgtcatcaagtcacatatatgttaacctttgatggccatcctacaaacaagtaataacatgtgactcgttagaa

SEQ ID NO: 262683 - DNA, 360 bp, Glycine max
  unsure (1)..(360): unsure at all n locations
agcttctcaaggaagctacctagtctataaatagaagcatgtgtaacacttgttgtaactttgatgaatgagagtcttgtgagacacaactcaaagntcaacttctctccctttttcttccttcaatttcgtgctcccccccctctctttctctccattgaagcatcctctccaagcttcttatccaaggctcatcttggtggtgaagctccttcttccaaggcttattccctagtggatggcgccgcctcttacctcttctcctttgtcttccgctgcatctccatggtggaaaatcaccattaaaggacctcattgaagatcaaagatccagcctccatagaagctccacaagcaagc

SEQ ID NO: 262684 - DNA, 466 bp, Glycine max
  unsure (1)..(466): unsure at all n locations
cgctctaatttacattgatgtgtgtatttatgggatgaggttatatgccatttttgctataaggatagtgtcccactggtaaaattaactttccaaatgtttgccttctcaggaatggccccgatgaagcttgcctcaaagaggtccatgaaagacaaagcggccgaaagaactaattccgctccggagtacgacagtcaccgctgtatgagcgctgtacaccagcagcgcttcgaagccatcaagggatggtcgtttctccgggagcgacgcgtccagctcagggacgacgagtatactgattntcacgaggaaatatggcgccggcggtgggcaccactggttactcctatggccaagtttgatctagaaatagtccttgacgtttatgccaatgcttggccaacagaagagggcgtgcgtgacatgaggtcctgngttaggggtcagtggatccccgtcgatg

SEQ ID NO: 262685 - DNA, 193 bp, Glycine max
tttttctcatttgggaacgtgggttgctctgacttgatgatgcaggaaaatcacggcttttgcgcttcacacaatctgatgttcgcagacaagctgactagattttagatacccttgctcaatgaggttaagtatcttgcctgtatcgttaccactctgtacataccaggctgaagggaatcatcacattttg

SEQ ID NO: 262686 - DNA, 214 bp, Glycine max
catacatacatcctaacaattcacaattatgcgggccattcagcctatcatatgctgaccatacccgagaaattcatggacttctttcgtggcggcacacgtgctctccatcgccctgcctttactaacacacggggaaggcttgactcctcgtcaattgacagctaaccgatccatgcaccggccgccaccggtgtataagtaattaccccat

SEQ ID NO: 262687 - DNA, 373 bp, Glycine max
agaaatcacatgtttgtcatcatcaaaaatggggagaatgtgaatgtatgtatacatgattttgatgatgtccaaagaagaattaaacaaggctcattttgcttcaagattaatacaagaatgtttcaacaaacaaagccttgattcaagatttcttcaagatcaagccttgcctcacaatgaaagggttcaagtcattcaaggcacatgtaatcgattaccaatacatgttatcgattaccaatggtttgaaagtgtgtaatcgattacacatcatatgtaatcgattaccagagactctgaacgttgggaattcaaattttaaatgaagggtcacaactggtcaagaaaaacaactgtgtaatcgattacc

SEQ ID NO: 262688 - DNA, 375 bp, Glycine max
  unsure (1)..(375): unsure at all n locations
tagagcttagctacacacacgcatctaaatactaagctcttcttcttgagaagcttccttgagaagctagagcttagctacacacccctattatagctaagctcacctccatgacaaaaaaacatgaaaataccaaaaaaaaatcctactacaaagactactcaaaatgcgctgaaatacaaggctaaaaccctatactactagaatggccaaaatacaaggcccaaaagaagaatacaacctattctactatntacaaagaagagtggacccaaccttggcccatgggctcaaaaatctaccctaaggttcatgagaaccctaaggccttctttatcaactctagcccaatcctcntggagcctcttgctcatg

SEQ ID NO: 262689 - DNA, 471 bp, Glycine max
  unsure (1)..(471): unsure at all n locations
agctntaccatgtntttcataaatgagataatcattattttttcttcattggttaaacaaccaacatatgaatggccaagcaatatttccattactttatggttacagaaaccacattcaacagtaagtctccaccctatggttctcacaaacctccctttaatatagaaggacacccatattttctggttttaataaactagcacactaacttgtctctctactatttgtacttatttccccccttttcacaatccatatgttgtttttacttacttctaacttatgaatgacaatcacaaacctgacaatcacaaacccgagatcatttcccacacatcaagtccaatttaacaaatcatcgtgctcttgaaaaatctaaaaaaatcaaaaaaattattccataacaaaacacaacacatacaaatgagagtctaatgaaatatactttatcaatcatgaaataactag

SEQ ID NO: 262690 - DNA, 446 bp, Glycine max
  unsure (1)..(446): unsure at all n locations
acttattttcttccgtctaagctgacttcctccagcttttgttaacaaaatctctattaggcagatgatctcaattctaaaggtgaactcttatgataactaacagttcatcccatgagaaagttttcaaatttctagcttcttggatggttgttgtttttggttcccataccttgngaaagctgccttgaatgttcaattctatttaagctttggtgaaggtgtgcccaagagcttcaagaccatttagaagcacttgaagtctaccaaacatgtatccacaaattctccttctttcatggagaagcttttattatgtcacgtcaaaatggcaccctctcttagttgaacatacttttagttgtcttaagtctgaatatttcgtttcactcattcctggcaatgagtatatctctattagttaagcttttgttagcttattatac

SEQ ID NO: 262691 - DNA, 252 bp, Glycine max
ggtcttgacacttattgtagtcgggtaatacgactaactctttgtgtaagaaattgaattaattgtatacaactcctcccatttatggatctttgtgtaactatagaattaaatcttgttaatatagggaattagtactcaatataccaattttgtgcatataatgatccttccatctcaaaatcatgtgaaatacgctagattggtgaagtgtaaaattgtcgactcgctaagcctattcatccgctgagc

SEQ ID NO: 262692 - DNA, 366 bp, Glycine max
gtggggccaaaaagaggcaaatctgatcatcaggctctgataaatgcaaaaaaactggggcaggtgaagagggtgagaatgactgagaaacccatgttgtgactgtcattcctatacagacaagtttcccaccaacccaacaatgtcattactcagccaataacaaaccttctccttacccaccattcagttttccacaaaggtcatccctaaatcaaccacaaagcctgtctaccgcacttccaatgacaaacaccaactttagcacgaaccataacaccaaccaagaaatgatatttgcagcgaacaagcctgtagaattcaccccaattccgatgtcctatgctgacttgctccatatctact

SEQ ID NO: 262693 - DNA, 366 bp, Glycine max
actcacttagccaatcctgctcccatattcttgaccagtgtataatgcatcttacctcgagcaaaaagaataagggaattccatcaaaaaaagaaagaaatttccatgaagccaaaaaaaaaagaaattcccatcaagagtgggaaaaccaaaaagacaggatggatattccccaatcaaagagtgggagaaagcaaaatgaaaagaaaggaaaattcccaatcaaagaatgggagaaagtaacaaacgaagaagaggaaggaaagaaagctcctgatcaatgatcgaaagaagacagaagaaatgtgcacagaggtctttggaccggacaatatctgaacaatacagaattgccaccaaatgaac

SEQ ID NO: 262694 - DNA, 425 bp, Glycine max
acctgcggcatgcaagcttaaacattcaatatcgaaagtctcttatattacgggactcaatcaaacatccgagaaaaaagtgattgtcgtttgaatttgctcaaagcttaaacattcaatttcgagcgtctcgatatattacgggactgcatcaaacatacgagaaaaaagttattgtcggttgaatttcctctgagcttcaacattcaatttcgagcgtctggatatattacgggactcaatcagacacccgagtaaaaagttattgtcctttgaattggatcagaggttcaacattcaatttcgagcgtcttgatatatttcgggactcaatcagacatccgagtaaaaagttattgtcgctttatttggctcacaggttcaacattcaatattgagcgtcccgatatattacgtcactgaat

SEQ ID NO: 262695 - DNA, 357 bp, Glycine max
cgctttatctctaccttttttttctactctacccactcctcacgcgtgggttattagggaataacaccataactaaacgcgccacaaggcatccctatcgcaccagaatcaaatctagaacgatgggtgatcaagacgagactcatgaacatatgaaagcccacatattcgctctgaaagaacaaatggcctccatgatggaggccatgttaagtatgatgcagctcatggaacagaaattggccaccgctgccgctgtcagatctgctgccgaagcagacccaactctcttggcaactgcgcaccatccttccctcatacatatgaagaccgggaatggacacactgtggcacgat

SEQ ID NO: 262696 - DNA, 431 bp, Glycine max
agcttgaaggggagcattgattgagttcttatacactggctccggcatgaaaaatcctagctctggaggatgaacttgatattatggtccaacaagggtggaataccccccccccccccttcaaatgagttaatgtccaagatcaaatctatcattgaagatgtggatcgttaggggaggaaaattcatgcaagattctgaggaaaaaattgatgattgtagaaagcaactcaagatgagttgtgaatccattaatgatcattcttcaacatattatgaggaattcaacaataaactcaataatcttattgctcaagaggaatcctaccagctacagagggaaaaaatcttttggctaagagatggtgacctacacacgaagtattttattttgttgctgcacccaaaagagaatgaactttattagttca

SEQ ID NO: 262697 - DNA, 314 bp, Glycine max
  unsure (1)..(314): unsure at all n locations
ggaagtctacaaggatgattaattanttaataatttcctttttgctagtgcacccactaagtgtgagaagaacttgtatttcttggattcttgcagcaactgctctcatagactcttgtaggttctgcagttctggtcaagtaagaatcatctttttntaacctattcctgtgatctggcattgcatttctatatgatttttattagtatatagtttaatagaggcacatatgatatgtgtagtcaagaaacctcccaaatggtaattattgaatgagtatgattcattgtcgtttgaagagtctacattgctt

SEQ ID NO: 262698 - DNA, 283 bp, Glycine max
agcttgccttacctttgactaattttactcttaagggtcaagtttttgtgtgggatgcccagcgtgagagtagtttccgtacccttaaggaaaggttaaccacggcaccagttttagtgttacctgacccgagtgaaccttttgtggtgtactgtgatgcgtccaaaatgggtttgggtggagtgcttatgcaacggggacaaatagtggcctatgcttctcgacagcttaagatacatgaaaggaattatcccacacacgatcttttgtggtgtactgggat

SEQ ID NO: 262699 - DNA, 405 bp, Glycine max
  unsure (1)..(405): unsure at all n locations
cacatncacaatgcgcgcatatacccaccatcctctgttgcccacctccagctgagctcacgtactcccacgtagcccatatcctccgttctctcaacaccgggtccccatcaatcctctcaaactttcacaacatccaagcaaaacaacattcaaacagcacaagctatcacagccaagcaaaacagaacatgggcagaagactctgttcaacacatcaacccaaatcacagcttntctcacttaaagaccacagtaacaattccttcgatccaattcgttaaccgttggatcgactccaagatttactggaagctataaggcaaagccctcattgtgaccgtgggatcactagcaacatcagaactcatttacattctcttccacagccaacaccacaacatt

SEQ ID NO: 262700 - DNA, 248 bp, Glycine max
aatcgctattgtcatggttctcgttcacatgttcctatctatatatatatatacacatacataatatcatatatgatatatacccaaactatgttatataaccagaacaaggttgtatctctctatatggatatggataactcacatataagagatatatctataacccacatataaaatatatagaagaaatgtatcatacctctatatatatatatatatatatacctatgaatatagactgatat

SEQ ID NO: 262701 - DNA, 381 bp, Glycine max
tcttgtacctctcatgatggacattatccctggctaaacaaactgcccatatatctactcataatactgactgcttgtgataggtccaaatttttgcatacacattgatacataataatgcgtacaatacttgcataaggaacacaaaaaatgtatttctactttgactttgactgagtaacatttagttcaaataatagaatagacccttggtgaggagtacatactggtgttatggatgccactccgaacacaattaaacactatcgtaatgtattccttttgacacagaaaaagcttcttgtggtctcgggccttcttgatctgcatgccaaagatatatttatcaacatccatgtgcattatcatacattcactacc

SEQ ID NO: 262702 - DNA, 399 bp, Glycine max
ttatccagcttgaatgacttcaactcgactttcctggatgtttctcaaaataagatatagcaatgaaacatcacagccctgaattcccacaaaaactttaagcatttttgaatgctccctatcaactgcatgcctcacgactaaatagttgattactgtatccacagaattcttttattgcgtatgtcacatggagaataaatagtaacaagggatgaccagtgagcttcttggacccattccccaaccaataagataaaaccactaccactgattttcctctgcaatctaaatgaattatcattccacaaacatagtatgccacctgtctgagtaatagctggcagcaatttccaacttacatttacatgttcccacaaagcctgacacatagcttta

SEQ ID NO: 262703 - DNA, 463 bp, Glycine max
  unsure (1)..(463): unsure at all n locations
agcttatgcgcatgtttactacgaacattatttgcggattacatcctattaaccgaaataatgcacccatatacaatcaaggcagctctgttacctagattattcacacgtacttccaaggtgtatttgttacttacattacacacatcttcttggctaaattccatacatgcgtactccaagcatgtaggggtaccaaataatcgcacatgtgcatatcttgagatttctaatacttatacatacacacacttcatgatgaatcctgactatttacacaataaagagctacatttcatgcccttnttaaaggttttgctacctaaagccgcatgcaaattcaagcatatatctctttgctgactaaaattgatccgaatatatatatatgtttggaataagatgttcatacacattcacatattatatatatatgtagtgaacatttgactacaatacttta

SEQ ID NO: 262704 - DNA, 371 bp, Glycine max
cactgaggtaaactacgatgacggagagcatattgtatcgggcatacaacactgccaacaatctagttaccataactaccgcgttttcttcatgccatctagcaaagtcttgtcttatcaagtttaatagctgaaaatgaagccgaattatacgtgcccgttgaaatgtatttcctcctgctttttttacatatgaatcacttgatgggcatctgtcaaaaaatcaatgtgcggacctgttaattgcatggagtacccggctggcgaacttgacatctaaagaattccagaatctattcgtcaaagcatctatgtgacagacatgaaaataaccatgaatttttcaaatacttggaggctaatttggcttc

SEQ ID NO: 262705 - DNA, 271 bp, Glycine max
agcttgcttctacatcttgcagagctttactctatagatattgccactctcttttgatactttccaccaaggcgcttgttctgtagaggctgccttctatagacttcaatgaacgattcgttacaagattattggattgagcactcaccactaggccaaaaggtatagctgatactcatggcacaactctctctacttataagaataacagctccagtgccactagaccactatgacttgacccaactgggcctccatcactggacaactg

SEQ ID NO: 262706 - DNA, 302 bp, Glycine max
  unsure (1)..(302): unsure at all n locations
agcttgtcagaatatgctcanagatacccatctatgataaattcttctgcctcaatctatatgacaagacagaaaaatagaaatcaagtgattcaacttaaagacaatacatccagaagaattactacttttctcgggtaaaattattgttgcgatagagttccatgaatgagtcagaaagcttcaagttcttcaaagctaaaacaccttgatcaagccttgatggatcatatattatgccaacctagcgtctactattctacttgaaaacattgccaagtttgcaacaaatggtcatttac

SEQ ID NO: 262707 - DNA, 419 bp, Glycine max
  unsure (1)..(419): unsure at all n locations
gaccttaagtcacctgcngcatgcaagcttggcagtcgaaaaagagataaatcatattatctttgaataagctgatgtccctttctcgcaacaatcccttagcaagatcatccactatacaactaggtgcttgagtggtggcgtcatctttctttttcttattcctctttccttttctaggttctttggagtgacattatcctttagaggatttttcctccccacacttgggtgaagtctagcttgcacaatattacaggaggaggaagagctctgtgaagaaccaagtattataagcacttccaccttatcacctaacctcgaagtcaatttcccttctctgacatcaatcaacgcccctcgagtgtttaagaaaggtcatcccaaaatgattgggacttcctcatccttcttcatgt

SEQ ID NO: 262708 - DNA, 129 bp, Glycine max
acgagagcgacccgagaaaaacaccacttattttttaagacccccgaagaaagaagtgaacagcctgaagcgcaccttggcgggacccagagcaagagacactcaaagccaagaaacagaaaaaaaaaa

SEQ ID NO: 262709 - DNA, 431 bp, Glycine max
  unsure (1)..(431): unsure at all n locations
ttctgggactactagaacacgaccattcagatgtaaaagtgtgttcatactatcatatngcaataaccaagctttctggctttgactaggaattaaaaaggaaaaattcttttacatttagccttgtctaaaaaataaaaaataaaaacactgtacttttatcctctaccacattgaagccacatatgatacttaacgagctctatctagcatattggactcgcttaattaaatgagtaatcgaaggactactctaactatgttttctttttaccagcgtctattaacattagtatagaaattaaaatatatatatatatttattataagaaatatatgagagggtaacaaaggtataaaaatatcaatttatctatctaataacatacatatatttaactacttaactaaagtcgtagaacatcggttat

SEQ ID NO: 262710 - DNA, 356 bp, Glycine max
  unsure (1)..(356): unsure at all n locations
agcttggcgctgcagcaattaactgaacaaatgttatgttcacagtcattggatggctgcctggcagaagcacatgttataaactaataacaaatcctgcgtgctaagtataattattaaaaagaggtcctatatatatagactattatatataaagcttattagagttttaacacactctttttaacacactctacaatggtggtcctcaattaattgagaattataataacacaataatgacttattatatgagtagtgggacctgccacatctgtgatttttaagaaatgtgagccaacaaagaanagtggtcaagagaatatgttagagacagtgtcgctaacatttctctg

SEQ ID NO: 262711 - DNA, 476 bp, Glycine max
  unsure (1)..(476): unsure at all n locations
ctgaaacaaattaaaattttccatgagaaaaagcatgttgtttcgtaccaagacccatgaaccgaaaaaagatcaaaacctgttaaagtgatctactgtcgatgtagttcttagattgcacaaaaatatgcttttaaacagcaattaagggcacataattaaatattaagcccacaaatctcaagataaaaagaaaagatgtgccaactggtttatgcttttaacccgcaattatgtccactcatgttttatcctatctatttatcagcacttagataataaaaaaaaacacattattgagtattaaatttagtgtacattctctatactaatgtatggtgtgcacaaactataccgtgatctacacatgcaattaatgttatagactatagtgggaatcaggtggtacttaccacaccattagctaataattgagctattgtgcaaatgttgggcanataaataagccacttggg

SEQ ID NO: 262712 - DNA, 305 bp, Glycine max
  unsure (1)..(305): unsure at all n locations
ctttagaggaggcctcttaatgagacttatatagaaagctatttgtatctgtcttctgataaacgcttcctggccttcattaaccgaagggacgtcttgaaatgtggtgtggaagatcaaaaaacacgcttacatgatctgaacgttgtgatccttagaaagaatgctggagtgagcatcaagcgctctaacgaaacttctggtagaatgctcttaatgaagctnttgacaaaactctttaaactgcctccgttaaacgctgtccaccctctataaggttggacctctgaaattggctttaactc

SEQ ID NO: 262713 - DNA, 296 bp, Glycine max
  unsure (1)..(296): unsure at all n locations
agctctgaaggtgcgtagcccaccatctttttatagtgagtatcgatcatgtgtctaccatcacgatcatcgtctacctttccatcattgagggtaccacctgagccgccagatccctccaccttttgggcgtgttctttgaaagatccgtccccctttatgcaaatgttctgtagttgcatcctatccggaaccatatcanaattgtactgatactgtctaaccaaggcaaccattatgtccttcccagaatggactccggaagaattcaagttagtgtcccatgaacagctacc

SEQ ID NO: 262714 - DNA, 257 bp, Glycine max
tggccaataacctcctcccataaatacaaacaccaatgaacattaagagcaagcttaagcgcataattccttacatacattctcttgcacaagacattaaacccgagaagcgcacccatataccaaaaaacgcaagctcattacctagatatattacacgtactggcaaagtgtatttgatacttacatcacacacatcctcttggctgaaattacatacatgcatactcaaagcaatttggggtaccaaaaattgc

SEQ ID NO: 262715 - DNA, 315 bp, Glycine max
atattaatccccaattactctatatgacaaacgtatcgacttttacgaaaacactctctaaaacatatatgaatgacgacatctacattttaacactataacagattctacttcgatcatacatccttattaaacctgaaatacaaatcaactgccaatcatgcccacattaattactggagatcatgatactcccaaaccaactataatttctttacgctcacatatactactgccgatcgtaattaagttaattaactacttagcatgaaactaattattattgatctatcttctagacattacaagactcct

SEQ ID NO: 262716 - DNA, 373 bp, Glycine max
agcttctacagtatacagacattcacctaatatattccaaagatcaaatgtcagcaccgcggtaagtatgccttggccttcaagctacacatcaacggctatccagctgaaagatccttataaattataaactaaggatgcattaaaataaaaaatttcattaagcacttatttaataaactcttaccaaataaaaatccgttcataaaattaacagaattactgagaagttaaacaaaaaacttattgtaacaagtttatctgtaaatcttattacaataaacttgaacacagaaacttataaaagttgtgaactactttctcacaagtctatctttgttttcaagcaccccacagataacattataattct

SEQ ID NO: 262717 - DNA, 330 bp, Glycine max
tgagagatatgcaatctctcacagaaactatgatgttatacatgttcactcgtcaactcaaacaatagatcagatgataaagatgcaagttgaacgacccggcacagaaagtggaccttataattgagacctaaaagttgcagcataggatgcttcacaggttgatcgaaactcacgcaatcacagcaaaaatactccttgaaaaaataagaacgatgatttggactaaaaaggagaggaaggttaccacagagaggagaagaaaaatggaaaggaggctaatcgattggagtatgtatcttcattgttcacaacttaataaaagaagaa

SEQ ID NO: 262718 - DNA, 326 bp, Glycine max
tgtagtatatgcgaagcatgatgcatgattcttcccattatcatatacatacccgaaggcccattgtgttaccagtcgagctatacaatatgtgatggtgtatccaaactcttgtctaacgaatgcgaaatatgtaagaatggtcagatgcttcgtatcttcaaccatcgcaaggataatattgccaacatgcatctaaaccatcttatcgagatcatgtgacatggttgagatgatgcatgtgtgaagacctttttcattctaatttcccaacgttggatttttctttacacgcttaatttccattggcaccctcacttggcaga

SEQ ID NO: 262719 - DNA, 326 bp, Glycine max
  unsure (1)..(326): unsure at all n locations
gaagaacantcacgaaaccattaccgaagcaccttgtcgcaacctacccttcggcgggagggcgacccgtgactcgcgggatgcgtgttccacgaaaggaatacccgcggagtcgccaccaacggttacttgaggaaaacgtcggaaaaaccggaaaagacgcgatctacaaactttcaagttagaaaggttcgggagttgtatttacgcacggcgaaggtattagcaccccacacgcccgtcccaatggacaggagcctntaatcgaagtgcgaacatgacattgattcttatgttccctcttatgttctcaaacctttataccc

SEQ ID NO: 262720 - DNA, 488 bp, Glycine max
  unsure (1)..(488): unsure at all n locations
tactcaagctcgcccagacgaagagtccacggatgagatgcttaccacctctaattactggcaagcagtctctaatgactcctctgctgcctccacataaagcatagaggatgggcaactcaccaagataatcttccttgcctgatacgatgactaaatgtccttgcactacgaatatcaactcttggtggaatgtacagggaacaactcccactgagcggatccacagggcgccccaacaaacagctntaggggggagtaatgtccattatttggacagtgacttgacacgtgtgagggactatctgtactgcgagatcgatctctcccctaacctctcggcgggagccgtctaaagcacgaactaccatcgaacttggctntaagtgagaggctctgaatggtaatnagtccacagagctcttatgcatcacgtttaaactggaaccaatatcgatgagcactcttgcttccatatggaccataca

SEQ ID NO: 262721 - DNA, 277 bp, Glycine max
agcttggtgacccaaagactactcacaaattctacttcattcctagacactgagcctcgtggagaattttggtctaagttcagacaacaaaagtgttttccaaccaactttacatcttcaaatcatgccctgggtggccaatccacaagaaaactaatgtaagactaaaatgctacgttgacgataatatacaaagttatattcattctatcaaaagatacagggagtttaaaatggtacataaccccttacaattgaaaattagcatggatcttgc

SEQ ID NO: 262722 - DNA, 469 bp, Glycine max
tatttaatgcttgaggaacgactaaaatcatggttcttgtagtgagaaacacattcctttatcagtacacctaaatgctcattcacatatttagtgcaaaatattttattaatattggtgttatgtaaaaacagggagaaattcacatgttaatttaatctaatttataacatttttatgaactcttatcttactctttaaattataattgtaggaataaatcctaatttgacatacattcaaatatggatatctatataatttgacttttcattatagataatatttatcttataaatggatgttgtattgagggacaacatttcttatttatatcaagatatccgttgtatatattgcaatacacatataaaatatcatccattaaataacagatttaaattatttagaagataattaaatactatcattgggattgtggacactactcatatgatgaaagagtata

SEQ ID NO: 262723 - DNA, 467 bp, Glycine max
  unsure (1)..(467): unsure at all n locations
tatactatatcgagacgctcgaacttaaacatctgaatctcttgagaaattcacatggtcggaactntttacacggatgtccgattcgggcgcataatatgtcgagatgctcgaaattaaacaacgaaagctcttgagaaattcaaatggtcataacttttgacacggatgtcctattcaggcaaatcacatatcgagacgcttcaaattgaacaacggaagctcctgagaaattcaaatgcttataacatatagtgacactcgaaatgtccgattcatgcttattatatatcgatacgctcgaaataaaacatcgaaagctctcgcgaaatttanatggtcataactcttcacacggatgtccgattccgacgcataatatgtcgagaggctcggaattgaacaactgtagctctcgtaaaactcaatggcataactttacactgaggccgattaagcttatctat

SEQ ID NO: 262724 - DNA, 411 bp, Glycine max
  unsure (1)..(411): unsure at all n locations
cgctgcaagcattgagccaatacaaacgacatattctttttactcggatgtctgattgagnccagctatataacgagacgctccgaattgaatatggaacctctgaggaaattcaaacgaccataacttttttcacggatggttgattgacacctcgattactatcagacgctccaaattgaatgttgaagctcctgcacttaataaaacgacaataacgttctactcggaagtttgaaagagtcccgactatatcgagacgcttcaaattgaatggtgaatctctgacccactccaacgacaatacttttttacctggatgtctgatcgacgccctaatatttcgagacgctcgaaattgaatgtggaagctctgtaccaatcaaacgaaataactttcactcggatgtc

SEQ ID NO: 262725 - DNA, 326 bp, Glycine max
tcaacattcaattgcgagcgcctcgattattacatgacttcttcacacatccgagataaaagttaatgtcgcttgaatttgctcagaggttcaacattcaatttcgagcgtctcgttatattaaaggactcaatcagacatccgagtaaaaagatattgtcacctgaataggctcagagcttcaacattcaacttcgagcgtctcgatatatgacgggacttaatcagacatccgagtaaaaagatattgtcgtttgaatttcctcatagcttcaacattcaattttgagtgtctcgatgtaagaccggactctatcagacatccg

SEQ ID NO: 262726 - DNA, 403 bp, Glycine max
  unsure (1)..(403): unsure at all n locations
cacgacaaaagttaaaggtcgnttatatgattgatggataattggagcttgaaggaacaataatacattacccttgtctcgaaaaatttggtctaagaggaaaaattctcaagagcattggcatgctgcaacaaattgaccttgggaccctangtcgaattggcttcactgagagcattcaaaaaccttattaaagactaaacgatgaagtacagtgaatggtggaaacgaataaaggaacaataatacattacccttgtctcatttcaatagcaaccaaacaatatattccctgcagattcaaaattcaaattcaaatgtaacgaaataataataatgattctagattcagtgatgcagacaaatgtagaaaaaagcaatgacatagcataccttatcttaa

SEQ ID NO: 262727 - DNA, 161 bp, Glycine max
  unsure (1)..(161): unsure at all n locations
acatactcaagctggaacacgcgcgctagcccacgactacacgcgtgtatttgttgtgtctcgctnaacgcgccaacgaagactctcaagctcactccaacaaccataaatacagggtgagcccaaaggatagataacaccacgacacaaccccctctcct

SEQ ID NO: 262728 - DNA, 385 bp, Glycine max
agcttgacatgaagaagcgtagaaaggttattacttctgcttttattcgttgaccacagagtggtacctggagatatgtcgcgggggtcacgagaccttggggacgtcaggtggggtgctattgcccaaaaccaagcttgaccaatcccgacccaacctgggcatagtcggtgagtgagaacctgtgatgtccctaaacaggcgagctcctgtcagtcaacagattaaatgaaccaataccactaagcaaggaggcttgcggtggctggccacctgtgaaacttgattgatatgtgagatatggcctctggtaatcgattaccaatggtgggtattctatttcaggtttacacatgaacacaggacactaatatggtctctggta

SEQ ID NO: 262729 - DNA, 365 bp, Glycine max
  unsure (1)..(365): unsure at all n locations
tngaatgctctattcaatggagttgacaagaatatctttttattgttatcacatgcacagtggccaatgatgcatgggagatcctgaaaaccactcatgaaggaaccctccaagtgaagatgtccagattgcaactattggctacaaaattcgaaaatctgaagatgaatgaggaagagtgtattcatgacttccacatgaacattcttgaaattgccaatgcttgcactgccttgggagaaaggatgacagacgacaagctggtgagaaagatcctcagatctttgcctaagagatttgacatgacagtcactgcaatagaggaggcccaagacatttgctacatgagagtagatgaactcatt

SEQ ID NO: 262730 - DNA, 479 bp, Glycine max
  unsure (1)..(479): unsure at all n locations
actcaagcttgaggggngtgacccatgacaatatcatagcacaagactttttatgagattactatcagtgtgagcatctccgtcaccgtcattgggggcactattcgagctagaaaatcccttcactcttggccgcattcttagaacgactttgcttcatgcacaagttatatacctgcattctatccaaagccatatcagaaatatactaacactacctaacgaatgcaaccattaggctcttccaagaacgaacccgggaagagtccagggctgtataccaagcgattgcgtgcccagccaaactttcctggaggaaaggcaataataagttatcatctctcacgtatgcacgatcttcctgcagtacattctcacgagatacttggggcatgtagcccagcgtactaatagaagtatacaccgggaacttctgaagaatgaacatgaccgagtctaagcacaactcattcatatca

SEQ ID NO: 262731 - DNA, 325 bp, Glycine max
ttaagtcacctgcggcatgaagctttatttataggtctaccaatcttttttcatcttagttccttcataataaattctctaaattgagaggattcaccaagatgccaaagccaaatatagtcttttctagatatagaagtggctgtagaatagtagaatagtgctgaaaccaatgagttagagccaaactgataacacattaggcaatacagcttttgtaggggttttaaaaattaaaaatttaacttatcattaattttaatcttatctagtattagtatcttagtccacatgagaaaacttaaaccttggaaagaactttgga

SEQ ID NO: 262732 - DNA, 503 bp, Glycine max
  unsure (1)..(503): unsure at all n locations
ccttacagacncagctngcttctaaggatgccacatatgatttgcgggtcctgtattgtacacatatgaagtaaaagtgtcccaagtgcactgtttgatgtgtaaagaaaggaaaacttctcttgttctaaagttaagttagttttcgtacccaaaggcatttggtggatagatattggtgttattactcacataagtatgttntcgcaaggttacttgtggagtcatttgccaagtgatgttgaaagaatcacctatacaggacaatgaaaataaagttgcatttgaagttatatgaacttttaagttgctcttaaagaattgctatatgaatttggttgggacatatattgcaccatctgttagacaaaattcaatttctattctctatttggacaaatccaattattcttgttcatttgaaaataataaagttaatctcgtgaatcacatgatgttgaatatgggtctttaattgatattggtgttcctattattaaata

SEQ ID NO: 262733 - DNA, 327 bp, Glycine max
cagctcgataacacgcacagaccaatgttctcttctgtgcccttcggcaaacgcggcagacaaacccgctgacacgcagagatatacctcatcttccgcgctcacaagatctgccctactgacttttgagtcaagctgacacgcggaaacacccgaatgggtatccctataaactccttgctgtctgccagacgaaaagcctgatcgcacccacagactaatgtcgtcttctacgccctgcggcaatcgcggccgaccagcccgttgactcgcggagatctacgttatcttcccgcgctcacaagatctgcataccgactctagagt

SEQ ID NO: 262734 - DNA, 392 bp, Glycine max
  unsure (1)..(392): unsure at all n locations
cttaaactactttaatattgtgaacgcccgtgcttggtcaagttagagtagacactagatacaagacagccttgtgtcttgtgcacacttcgggaggacctgatcggagctttcacaaggaacccgagcccacacgttattgagaaacgtagaaaaccagaaaagacgcgatctacaaacttttaatgaaaggctcgggagttgtatttatgcacggngaaggtattagcaccccacacgaccgtcacaaggtactgcagcctttaatcgaatgtgcaaacatgactgtgatttatacgttcncctttaatgacttatatccttatacccttttacactttttctctatatgtgccgacaaaggatatcccttgctccacgtattcctcatt

SEQ ID NO: 262735 - DNA, 278 bp, Glycine max
tatacctcctaggcttctatatagctatctctcaagaggttaattataaactttaagtacatataattcattccttctgcctcagtccctataatattcttctacttattctaacatagttggcctctataattagctttagcaaattaccgcttgctattaaaggtatagcagcgataaaatctcttattagggaataaacacaaaagttatgtcttaagtgcatggattaacatagaagttttttattcagacaatcaatatatgatgtcatgtat

SEQ ID NO: 262736 - DNA, 493 bp, Glycine max
  unsure (1)..(493): unsure at all n locations
cactatanaatactcaaccttgttaatatttggtgaaatactttagtagcttacaagctatttaatattggaccaaaaataagctagtaatagtgtttggctagaaacttttcttggaaaaactaccccaacttataaaatttattttttatgttaacagaagtagcgtctgacttataagagtggtatattttacccttgttaactttaaaaaaaaaaaaaaaaaacaacaacaacaacatgacgacttatttactaaatattttcaattcaataagtcaccttatcagcttttagtttttaattctcaactattaactcctttcaatatttatgttttcttactttcaagtaactgttcaactaattaagacaaaattgagaataaccttcattacagcatgagaaaggctggacgttgtttcattggctattcttacttgagaagggtcatttcatgcagtctgtactctgtaagtttgacattcattgg

SEQ ID NO: 262737 - DNA, 434 bp, Glycine max
  unsure (1)..(434): unsure at all n locations
agcttggggaggaacctcacccaggaaagttcttgaatagttgacatcttaattaacttacccatgttatcatatgcttgattaagctctaaaatacaaaatgctatagaatttgcgccatgtccaccaagccatgtaggccatggcccatgaccatattagcaggttccggcatcaagataatattgtttaattaatttgcacttttgcatagtcatggaatatatcatctattatcatgaaccatcttaattttctgctgcaaatttcctttgaaaacatgaactgcatggtcttttttctctttaataaataaattatttattgtgtatcaactatcaagtattagataataaaantgcaccaacaatgataaacacaagtaggaacaaacaacttatatcttttaattaaataattcanaattcaaaatt

SEQ ID NO: 262738 - DNA, 395 bp, Glycine max
  unsure (1)..(395): unsure at all n locations
gggaactaacctatatgatgaaagaacttgcagtttctcacaaaattatagtgatgttcatgaaaaaccttcctttattattgaagccattgagctttctggacctcggtgacattaagtgtagtcccttcctttttgcaaagtcttcaatgtacatgaagtttgcattttttcaataaggataacacataggaatattttcaggtagagcctataattgtaacgttattctgttttccaatgtaattcttatttgcgaattaacttgattgggctgtgaagtgacataaaaatttgagaaggattgtcatagaaaatgatacgcgtntggacgctaaaaggcgttcttgctgtactgcatgtgttgtactcatcaatctttatgataattctct

SEQ ID NO: 262739 - DNA, 67 bp, Glycine max
tgattcccttgatgcgagctgaaatctaaagagaagactctcggacatgtttgaagcaagtggaggc

SEQ ID NO: 262740 - DNA, 368 bp, Glycine max
aaaaaacaggattgatgaagtttattatatctacttagaaatagaatagtccagctcataatgaacaatcaagttgctcaaaaagaaaatgcaaacagttatagaataagttcttgtggatggtaaagctcttgtgtataggcagctgctcacctaataccatatcgggaaaacaaagtttagatcaggtggtaagatgaaaggttaacaaatgtagagtcttgaacaacagcaatcttcagatctatgcaaagaaaagtaagaagttagaagagagacgagcgcacataagtgtttataatgtgtcaccccaaccttgggctacggacagtcctcactcttaaagaagagaattaaaagcacaaaca

SEQ ID NO: 262741 - DNA, 372 bp, Glycine max
ttaagtgaccgaagctgcaattctgctcttaatcgcttttattttgatacatctatgcgtcttatagcataacttagtcatcataatataggctcacaatttgccctaaacaagttagctttatcgagatcaacgaacatacaagtgacatactcttcttttctacagtttccaaaaaggagcatgacctacttcagtgggtaacgccccacatctctactaccacataattcacttttacgatatggacccttaaactgggaatcgaaggaaacctatttatgatttcgccatgataatataattgttcctctataaggaactcataaacggcaaactcaaaaaaccttagctcctgttagaacctttttt

SEQ ID NO: 262742 - DNA, 399 bp, Glycine max
agcttctactagagtctctctctattagaaaccaacagtggtcttgagcactctattgagaggtgctgtcaatgtgcttaaattcttcacaaatcgtctatataaacttgctaagccatgtgtcgcaacctacccttcggcgggaaggcgaagcctgactcgcgggatgcgtgttccacgaaaggaatactcgccgagtccgcactaatggttatttcaggaaaacctctgaaaaccggaataaaagctatctacgaactcttaagtgaaaggctcgggagttgctttacgcgtggggaacgtataacaccccacacttcgtacaaagacggttgctttaatcaaagtgcaacatgaattgaatttacgttccctttatgacttatacccttataccct

SEQ ID NO: 262743 - DNA, 381 bp, Glycine max
tccattcacaatattcgagagcatctcttgtatcttatcgagagtgattctcctatattctcgagtgattcacgaacaccttggctgtattgaaggactttcacaacctttgtgtgtcgcccttccttgaaagagtgattctttccttcctttcatcatcacccttgttctgtaaaccacaattccataaaattcacctctgcccataattatctcgtggccataactcccattatacgcactccaattaagtgattcttgagcctaaattgaatttcaaaacgagacctttcacctcgttctggaatcacctcatttggagccctgtagcttcagccattgccatatctatatgtctgtacgaccaccacttaacctacg

SEQ ID NO: 262744 - DNA, 380 bp, Glycine max
  unsure (1)..(380): unsure at all n locations
gcgcttagcgccttcttcgcgcttagcgcgagaaagagganctgagctcaacatcagacgagcactgagcctagctgaagacaactgctgtgcttagcgcactgatctcgtgcttaacgtgcgaccctgatattgattctctgctagattctctggttgcgctaagcgcgctgaattcgcgcttaacggngggtgtgcgcttagcccactgatgagctaagctcaactggcacttttagcacttcatgacttagcctctttttcacctgaaattgcgcatatntcatcattaaatccaatggaaatattctagagacagccttaaccataaaacaagattcatctacaaaatctccacaaaataaccataaattggggga

SEQ ID NO: 262745 - DNA, 336 bp, Glycine max
  unsure (1)..(336): unsure at all n locations
cttaacagacacggcgttattctccacctacatatgtgatatttgtcgctgataggcacacgggcacaaggatcgaaacatttatgacgcttgccgacctttgtattgcttcgcaccttgccagcttctatcttgacacatgacacctctccttgttctactggcactttagctacgcaatatcggaatgcattatctgacagactactctctgtgatacagcgtaatgactcgaacgccagcgatatccacagctcttggaatctatatnagacttaatttgactgagtctcctattgattcgaggctctcgtgccctgacactcgctcgaggtt

SEQ ID NO: 262746 - DNA, 385 bp, Glycine max
cctgaacatatctttttatctcaccaaatggcgatccttctacttctcggaaggtaccataagatatggcacttctaccccttcattcacaacattttctctcttcttttctctagcttggtcacttctactcctctcttcaatcatatattttcatcttttcatttctttatcttttcaactactttttctttttcctcgccatttaatttctttttcttgaccattatttgcttttcttctcctgatactttcacctctcacatcatctttcttatcatcaaacccttcttttaacaactttcttctaggcattgaaacccttgtcctattctctgcctccacaaacctcttactccatgtcattaccactttgcattcctcc

SEQ ID NO: 262747 - DNA, 389 bp, Glycine max
tatcgaggtatgccataacaatacaacacccgcttctttcttatgccaaacagatatcctaaataactgggtcactcaattaaaagcgcttgacctataattcaagaaccccgtttcatgaaagaagttattagaaagctaatctttatcagcttttcagttgactatatccctttgggaacaagtatcttatgcttagattatacaacaaaaatatatacttatctaccaccacatggtaagaccacatgttaagaccatgcaatctcatattcctaagaatcaacacgtgtaatatacaaagtccacgacaacagccaaagaattcactcagcccataagaataatataatattcggctataaagaacttataaaaaacttaaatct

SEQ ID NO: 262748 - DNA, 318 bp, Glycine max
cgcttatagaatatataataaaagaactattactattgaagaatctattcatgcttcctttgatgagtcctaaagctcatttctccacaaaaggatattttagatgatgttaccgaatctttacaacaaatgctcattcatggacaagattctacaagaagaagtcaaatcaaatgatgaacgttctaaagaatggaaagctccataagatcatccccttgacaacattatttgggatatcctaaaatgggttacacctagacattctcttaaatatttatgcaataatatggcctttgtgccttgattgaacctaaa

SEQ ID NO: 262749 - DNA, 446 bp, Glycine max
  unsure (1)..(446): unsure at all n locations
tttgaagctgatcatttttatttcttattaagcaaaacggatcattttcaaggggcaacgccttgaaatgatcacctttttaagtaaaaagaatcacttgataagaaagaactacgtagggctgatttctcatcgcaaatgaggaaacgtagagcaagggaacacccttgtcgacacaaaaagatnaaaatatataaagggtataaaggatataatgacataaaatgggaacataaaaaaatcaaagtcatgtttgcacattcgattaaaggctgtcgttccttgtgacggacgtgtggggtgctaatacattccccgtgcttaaatacaactcccgaacctttcacttanagttcgtagaccgcgtcttttccggtttatccgacgttttcctcnataaacgttggtggcgactccgcgcgtattcctttcgtgaacacgcatcc

SEQ ID NO: 262750 - DNA, 439 bp, Glycine max
atcatatatttatcattttaagaaatgttagtaacgcattccttcttattcattaaaatttattataaattctaaatttgttggtccaacctctttgttaatgaaattctcgtaataattctaatgtagtttaactaaaaataaaaagaaatagttcaaaatacgctagagtatgtttttgtgtccctctaaaatacacaaacgtttgttataagtccctgaaattcttttgtctattttttgacttcataaaattaaaacgtgtgactttctgacatagagttagatctgcaaaatccatacctacatgaaatttcttgaaaataatttcttagatataatttatgaaggttaacaatcactactaattgcaaaaaaaaatccagaatacatattttgacattaacaatcgcccaaatgtcaaaaaataaaaacatgc

SEQ ID NO: 262751 - DNA, 432 bp, Glycine max
  unsure (1)..(432): unsure at all n locations
tgggctctngcctcactcaccgcctttntgggttcatttctagctatcttatacttatcccaagtttcagaatttctacacctagaccactccttgaaacactcattgtttactctaactttgctctgaacattttcattccaccaccacgattctttacccctaggtccaaaacctctagattcacccaacgtctctttagccactttaataatctcttgggacatcttgttccacatatcatttgcacttccttgtgattgtccacaccatccctcccatatctnttgttggaagattccttgtttctcacccttcaagtgccaccatttgatccttggtgctaccataggacttcttctcttngccctatctctaattcttacatccataaccataaactctatgttgggtagtcaagctctcttccgg

SEQ ID NO: 262752 - DNA, 384 bp, Glycine max
  unsure (1)..(384): unsure at all n locations
tagcttgcacatgtttatgtatgaatgcacatttatgtggaagaacacaaaaatcaattacatttgcttcttatggctgcaaacttttctcgtagtcaaattgatgtcattcctagaggttagtctaatgactattgctcttccttgttatttataagataaactaacttagtttgctttaaacttgagaaagtaatatctaaatataatattgactatgaaatcgcactttctgtttttcataatgctgctcatttgcccatttcttttgctttggcagtaaaagtatttgtacatgcacatgtnttattgtctctgaattctttcctctatattattatgtactctataattaagtgttaacatccaatttgaataccattt

SEQ ID NO: 262753 - DNA, 323 bp, Glycine max
  unsure (1)..(323): unsure at all n locations
aactaactnaacaaacatgctacactcggcgcggattttttttcacctcccttcagaaagcactataaaaaaagatacccccctcaaagattacacacaaacggactcgatgaccgatgaagagagagagagaggagagcggaacatgaaatcacactaggaaaaaggcagcagccctccctcgcttacccatttatctcctttctatcatcatatatataaaacgcgaacgtaaaaggtacatgcgtcgctccatataagcaataaattaaaggtgagcacgtgtcaggcaccgcaaatgcattggggatactcaagaggaa

SEQ ID NO: 262754 - DNA, 321 bp, Glycine max
agcttgtgagatatagactagacatttgtgtgtctttccctgatctcgacctgtctcacactgtgatgagacactcctcaagtgctgtccacgctaggatcaacagatgagcttaaaccctgtgttcgtgacatcaaatggctacgtgaactactataaaaaaccttgtgatgcgaagacctcgacacaccacatttggaatagatgtggccttggaacaggaattttactttaattagctgacgtatcatacatgtcatttgcctttattagatccacccaccagacttgtgcacaccgtgatatctctaaaaattctat

SEQ ID NO: 262755 - DNA, 304 bp, Glycine max
tattatctcaagttctcggaactcaagcttgggtttgaatttttactaagggtttgctagtggaggccatgacacattcatctcagcaagagctggaaccgggaattcgtattgcaccacgatctatttggaaaattgcctaaatttttttttcaccttttccctcccattattctaacatgtgtcttagccttccgttaaaccagaataaaaaactgttgttactggcaaggaaattaagctatctatatgctcacatggatctgatattagagaaaataaggtgatatctgactacgtttac

SEQ ID NO: 262756 - DNA, 447 bp, Glycine max
  unsure (1)..(447): unsure at all n locations
ctggagtttccaagtgccaattcgtcttcttcttttgtcattcttcttcnggcttcaattcatcagtgggctttccttctgtgtccagcatcttgggatgttcccaacctttgatgacagctttccaggttctgctatccagtgatttgaggaaagccaccatccttgctttccagtattcatagttggttccatccagaattggtggtctgttcactggtcctccttctttctccatgttcatcagaatttatctccctagatctcactcagtgatttcgagtgcctgctctgataccaattgaaattctgatactgcggacagatgtcgtacaggatgtcacgacatcacgcttcagaacatgcagattgtctttgactgtatgaacagattatacaagtaantaacacaagagaattgtaaccccagttcgtgcaccctcacta

SEQ ID NO: 262757 - DNA, 335 bp, Glycine max
ccctacttatgtggcatggcaggaatccttcactttcttgttttcatcgcgagctccgaccactggtcttgcttaccgcgatgcctctttatatgtccaaccgagagggcttatatcccaaaccatacttcccacgatatccatgggttgttatcagaccaactatgcccgcaatgtctttgcctatacccatcccgggttcataaccggtccacaacataacttggtccaacattaccgccgcctcggacagacaagggtgcccaaagaaggagtccacggaaggataggctgaccatcttcaaagactggaaagcggttctaacgactcttct

SEQ ID NO: 262758 - DNA, 292 bp, Glycine max
agcttgtcaaggaagctacctagtctattattttaagcatgtgtgacacttgctgtaactttgatgaatgagagtctagtgagacacaactcagagttcaactttgctccctttttcttacttcaaatttgtgctcccccccctctctttctctccattgaagcatcctgtcgcaactgtttaacctaagcttattatggtggtgaagcatctctcttcaaggcttattcgctaggggatggcgcccgctcttacctcttcttctttgtcacgcgctgcatctccatggtgg

SEQ ID NO: 262759 - DNA, 353 bp, Glycine max
  unsure (1)..(353): unsure at all n locations
cgctctaaantacattgatgtctgtatttatgggaagatgttatatgccacttctgctttaatgatagtgtcccactggtaaaattaactctccaaatgattggcttctcaggaatggccccgaagaagcttgcctcatagatgtccaggaaagacaaggcggccgaaagaactagttccgctccggagtacgacagtcaccgctttaggagcgctgtacaccagcagcgcttccaagccatcaagggatggtcgtttctccgggaacgacgcgttcagctcatggacgacgagtatacttgattttangaagaaatagggcgcctgcggtgggcaccactggttacttctat

SEQ ID NO: 262760 - DNA, 322 bp, Glycine max
  unsure (1)..(322): unsure at all n locations
ttgatctaccaacatcggcgacaccattattttattntttctcttatttcaatatcactagtactttgatatccagccgcgtatttggctatattattatgacacttgaacaatttaatatttctttatttgcatggtgtgttagaacaattatgaattatgttatgtgactatgtgatttttctatatatttgatttggtcatgtttcttgcttcatgagtagcctatatatgtccatgattgttgagtgaatgattaggtgtattcgtatgtttcatacttgttacgcactttggctttttgttgatgccaaacggggag

SEQ ID NO: 262761 - DNA, 292 bp, Glycine max
  unsure (1)..(292): unsure at all n locations
ntactggctctgtaatatagcgtagccaccttgatagttttgtagcaactcacaccgggagccctcctctttgatctgtcaattgttgacgaacccctcttcttaattcttgtagaagaggaatggaaacatcgactccttatctacttcatcagcctcatactctatgacaccgagaactgctatcgtaagattgatatggtggtgcttgcactcatcactctctgccgacgacttaagccctacttttagagtgattatctggtgacaaagatgatctaccctatatatc

SEQ ID NO: 262762 - DNA, 386 bp, Glycine max
tccttgagaagctagagcttagctacacacacgcatctattatctaagctcacctcctggagaagcttccttgagaagctagagcttagctacacacccctattatagctaagctcacctccatgacaaaaaaacatgaaaatacaaaaaaaaaatcctactacaaagactactcaaaatgccctgaaatacaaggctaaaaccctatactactagaatggccaaaatacaaggcccaaaagaagaaaacaacctattctactatttacaaagaagagtggacccaaccttggcccatgggctcaaaaatctaccctaagggtcatgagaaccctaagggcttctttatcaactctagcccaatcctcttggagcctcttgctcat

SEQ ID NO: 262763 - DNA, 484 bp, Glycine max
  unsure (1)..(484): unsure at all n locations
tatacatactcaancttcgtggatctggtcttcgccggccaatagatcgaagcatgtctttaaatatgctaatgcgatcatcctgctttgatcaatgagaatactatggcaaatgaagaggatgagaatgaggaaagaacccatgttgtggctgccattcctacatggccaaacttcccaccaacccaacaatgtcatcgctcaaccaatattggcccttctcattacccaccacccagtcatccataaaggccatccctaaatcatccacaaagtttggtggccgcgcatccaatgccaagcgcatacccataaatgagatttgcagcgaataagcctgtagaaatcaccccaaatctggtgtgctatgctgacttgcgtccatatctacttgatgngcatcaatgtctcctaattcttaacaccttttgtcaccatttaaatactgattagcttaattgtcaaataatatgcagtttatcat

SEQ ID NO: 262764 - DNA, 335 bp, Glycine max
  unsure (1)..(335): unsure at all n locations
agctngctatcaatgataatcccagactccttttcttattggatatactcataatcagtttccggaattgtctgctagtatatcggacaagctatagatcaattaaactaaaccaaacctggtatacacaatatatgtttgtttgtaagaaaataacattggaacggacatgtaaaacaattgcaattaatatacaaccatggctattcaatctccaattgagtctgactaaaactacaatactaagaagaacatcaaacgttcgatgaaaattctaanattacccaaatacggtaaccaatgactaggagtacgatcaaataactagtgggatc

SEQ ID NO: 262765 - DNA, 453 bp, Glycine max
  unsure (1)..(453): unsure at all n locations
gaccttgaatctcagcttaatagttttttacttgaatataggctgtgttagattattatctatnntnnttnacaactaagtatctgaaaaattttcagtttcattatactacctaccgttagtcaccttccgataagcgatgaggtaacaaacggaatatcatgtcattacaccttggcacggacacctcattggcaagtcatcacattcaatgatgtggcaggcactggcgtgtcagtgattgagtgtgatgatgtgacactctatttgtcacgtcatcatttaacggaagacgattaacgggtaaatgaaactgaattctgtttcaagtatgtatctgacaaaaatatgatttttacgtaatatatgaaaccattatttttaggataaaacttatttatattgacccgaaaattatttaaacatttgtattggagtttaaggccttgatca

SEQ ID NO: 262766 - DNA, 343 bp, Glycine max
ctctattgataaagaacacaaatggtcataccagaccaactcttttcacaatacagagttcctgatattcttgactcaaaaatttccactcctcccattagaaaagctcaacccccatttcactgtatatcagattcaacttcttgatatcataggctaaccaagcacaagaattagactcctgatattgagttcgggatactcacaaatttaatctacaatgagcattttgtctgatctaaaagcccgcaaaaattaaaatgaacaaaatcatgccaataataactatagaacattttacaacactgactaacttagtcgcattagccactaattgaataac

SEQ ID NO: 262767 - DNA, 475 bp, Glycine max
  unsure (1)..(475): unsure at all n locations
ntcaaaccaagtatctctgcaaaagctattctctttgctacctccagagctcttttcccaaaatatgcactgtggtgtgctgtggaattctatgccctgtgcattgtaccctaattctgcacaaaataggctttaaataggctctgaattcacgacgttgcacttagcgccacccttgcacttatcgcgagttaatggatatgagcttagtgctagtcgtgcactgagcatggctgaaaacaactgttgcgcttagcgcactgatctcgcacttagcgcgcgaccttgatgatgatgctctatcagattcttctgtcgtgctatgcgggctgaagctgtgcttaatggtgaatgcgcgcttagcccactgatgagctaagttcaactgtcacttttagcacttcatgacttattctcattntcacctgaaattgacatatttcatattaaatccatggcatattctgagacagct

SEQ ID NO: 262768 - DNA, 416 bp, Glycine max
  unsure (1)..(416): unsure at all n locations
taaaaccagcttagttgttcaattcatgttttacccacttcttgttttctacataacaaattgcttgtctcatacaccaaattgtgtggatagcgattatttccttctatctctttacaacctattgtctcttgaggaatggggctggagatacaaacatctttaatttttatttgtcagctctaatattgcaattattatgcaagtacaaaggtggttcagttcttaagtttcagtgtaacacccctcgtctaaatcctaacgagctagaagcatataggcttaaattaaatcacttgactcatgagtctaatatcaatataccattccatcctttcttgngttttatgtttaatattaatttactcgtggctaattacatgaatataaatatcgacaaactgatctatatgtat

SEQ ID NO: 262769 - DNA, 213 bp, Glycine max
agcttggcggattctgtggtcgtggaggattttatacgcaggggtgtgaagcaccgctaatgtggtcatcaggctttgaccaatgcagggaaacttgggccggtgcacagggtgtgattgacagcgattctcatgccgtgactgtcattcgtatactgttactattctccacgaccactatgtcatactcacacttaactaccttatcttatc

SEQ ID NO: 262770 - DNA, 229 bp, Glycine max
accaaccctgaacaagccaaaattctggcttcttctttaaagcgcccgatcaaacgatcggaggatctccaatatatccggctcaactgattaccataacacgacacataggtgaatagcaagcttctcccattcacgtcttctatcaactgaaacagaatccgaggtgttctccaagtggacaaggggtccttgaccaaggaaccccaactccacggaagcagaccac

SEQ ID NO: 262771 - DNA, 453 bp, Glycine max
  unsure (1)..(453): unsure at all n locations
tgngcgaatcanatcactcctgcattacatctctaccattcttttttctatccttacccactcctcacgttngggtttntatggaaaaacaccataactaaacgcgccacaaggcatccctatcgcaccagatccaaatctagaacgatgggtgatcaagaggagacacaggaacagatgaaagccgacatatctgctctgaaagaacaaatggcctccatgatggaggccatgttaggtatgaggcagctcatggaaaagaatntggccaccgctgccgctgtcagttcggctgccgaagcagacccaactctcttggcaactgcgcaccatccttcctcanacatagtatgacggtgaatggacacacttgtgcacgatggcagccctcacctgagatacaaccgagcggcttacccttatggattgcacgccaactactcaccacccgtc

SEQ ID NO: 262772 - DNA, 194 bp, Glycine max
actgcagcatgcaagcttgaaagagatcattgtatgaagttttattcatgtctttgctttgacaatccctagctttggaagatgaacttgaatttatggctcaacaagggtggaataccctcccctcccccttctaatgatttaattgtccacatcaaatctaccattgaagattttgatcgttaggggaagaa

SEQ ID NO: 262773 - DNA, 420 bp, Glycine max
actcagcttattgtgttggtgagtgtatattacggtatttatttacttttatggtggggagtgtttggaagtctagaacgatgataaaatagttaataatttcctttttgctagtgcacccactaaatgtgagaagaacttgtatttcttggaatcttgcagcaactgctctcataaactcttgtaagttctgcagatctgttcaagtaagtttcatctttttttaacctatttctgtgatctggcattgcatttctatatgatttttattaatatatagcttaatagaggcacatatgatatgtgtagtcaagacacctcccattgcgaattattgaatgagtatgattcattgtcgtttgaagagctacattgcttgtaaccatatgctatgattattgtaaattaaaaaataaactt

SEQ ID NO: 262774 - DNA, 263 bp, Glycine max
  unsure (1)..(263): unsure at all n locations
agcttgaactattgctctctcaatagacttggtattagaaaggaaacagcttgtgctctatctcttcaaaacagaccctctattaggttctttctcgctcatggccatctaaaagacaccaccacaaccacaggcaccttccggtgggcatgctcaacaagtactggtctatatagtcttgtagatttctaactaccatagtctttngtgctatctctcacagcttgtgtggttgtgttctgtgtgtgtagaaacattggctt

SEQ ID NO: 262775 - DNA, 419 bp, Glycine max
  unsure (1)..(419): unsure at all n locations
agctttgcgatgattcacagatattggcagacatttttatcaactatgactgtgatgtcaattcaacaaacatatttgagaggggtgctatgttctgattcattagggattctctatgaataatttcgtttattttacatttataatttataatatggatccccattccccaggttattatcatttaatgttcttggattgattttgactccatttgggctggtgaggatgtgattgtctggattgtcaatttatctactctgtacttattttatattgtgtggtccttataggacgataaatggacttcttaaaactgcccaaagtgttcctcctggtgcaacgaccacagntntgccacctcaagaggaacacttaatatgaagcatgaagtgctaattgctggttaaaatcaatgg

SEQ ID NO: 262776 - DNA, 453 bp, Glycine max
ttaagcacctgagcatgcactgtcttggttacatgtttttattcatgatttaagacttgtaagatctaatttgggcaaaattggatgagaacaacagtgatttctcaatctgcccaatttgtgcagcaaaaagctgtcaaattctgtgcagctaaaaatcgtgcttgtgcataaaatgttgtgtattgctggttattgaaaggatactacatatttgtgttctggacattttatatcagatcccaacggtcaaaatgtagacttatgtactagggactctcaattaaaccttctagtctatccaaccgtttactaatctgaacaatgacactgtactggtgtatctgagtgaagaaagctgtgggattagaatgtgttttgggtagattttctgtcttgccctgtctcttggtttggataattataatcttcatgtcaattgttgatgtgcga

SEQ ID NO: 262777 - DNA, 420 bp, Glycine max
  unsure (1)..(420): unsure at all n locations
taggacaaggtccagtatacttcaactattatccaaacataacggagagtctgattgacagaaacattcttgactctctattnttaaatatccactttcatggccttgacattaaagaaggatcaattccagcagctttgatctataggattcagtacaaagtaatgaatacttgtgcatctagagtcctgttaaaacctcaaagaggagaaacaactttgtttatcactgatatgacaaaggctaacatttctctcccgagaaaaataaaatgggatgaagtaactcttcccgaaagatgggtcatggataaggccacaccatctattccctgacccgctccaaccatagagcaaattaagcaagataactcccgggtaggtagaaataaccttcaataacaaaaattctttttcatca

SEQ ID NO: 262778 - DNA, 433 bp, Glycine max
  unsure (1)..(433): unsure at all n locations
agcttctagccaaatggacttaccttgaattaatttcttngatagcccttntgagccttgttcccctttccttgttgtgaagctcactacaagccttaaatgaaaaaaccatgatatcaccatatccttaaggaattttggagctttggaattgttttgggaataagtgtggggggtttttgtttcattggataacttgatttgntggctatgcttcatgatgtatcttgggccatacttgatgtacattgtatattggttaaatgttggacatgctgaatgaaatgttgtttctcaaaggctatagagcaaaaaaaaaaaaaaatttcaaagaagaaaaagaaaagccatatagttgagtgaattagaatctaaatggcacaagaatgatgaaactcttggctcactctctatgtttaaatgtatcttactt

SEQ ID NO: 262779 - DNA, 442 bp, Glycine max
agatctaatcctaggtaaatgtttcatatttgtattcccttacttgggttattcgattccggtgtaacccattcatttatatcttatttgtgtgtaaagaaacttaagctttgtgtgtcttctttaaataaagatctggtggtagagaccctaactagtggttatgtgttaacttctaatgtgtgttcgaattgtcctgtggaaatttctggtagaaaattcttgattgatcttatttgtttgcctttgagccaattgatgttattttgggtatgaactacttatcttccaaccatgtcttgtaaactaatttgataaaattgtggtgttgatgattctgaactgagtaacgatatgatgtttatctctgccaaccaagttgtgacatctttacaagaagatgctcaactgtacatgatcatatctaacctggaagtagaga

SEQ ID NO: 262780 - DNA, 468 bp, Glycine max
  unsure (1)..(468): unsure at all n locations
agcttctaaactttatacaagaatgaagctttgatatcacttgctagacaagtggcctcaaatatcttaagaaggggggttgaattaagatattacacactatctccccaattaaaattctatttcactttctattctagttacaaattcccttaataatgaactcttaaataatgattcaaatacaacaatctgaatataaatataaaacaataataaataaaagagtttaaaggaagagaaagtgcaaactcggatttgtactggttcggccacacccttggcctacgtccagtacccaagcaacccgcttgagagttccactatcttgtaaaatccttttacaagttctgaacacacaaggacaattcttcctctgtgttcagaattcttttacaacaagagaccctctgtctcttaatcccttatagaatntagaaagaagagaagaatgaatctctcttgaaa

SEQ ID NO: 262781 - DNA, 476 bp, Glycine max
  unsure (1)..(476): unsure at all n locations
tcctctctaagcttcttatccaaggcactctctctggggtttatttctttcttccatgacttatttcctaggggatgatgcctcctctcacctcttctccttctccattccattgccattaaacttcaagaagcaaaagactccattgatgaagaagatccaaggcctacaagctccacatggagctacgtcatgtgttatcaagagcatcttcgtctacgtgatgnttttttgcttcctctatctttntgttcggtcaattcactttaatttcatattctttgtcttattctccatgtatatcctccattgtcttgaggtttggtgctcgttagagtacattcaaaaaaataaaccgattaaatcttagatctacacttgttcttgcatttctatggttcaaaatttatagatctactcttgaatcatgtctttgtgttgattntaagctctaattattttcagccataatattc

SEQ ID NO: 262782 - DNA, 357 bp, Glycine max
  unsure (1)..(357): unsure at all n locations
cggaaaggaggctagagggagggtgatcgactcgttacatcaagaggcaacaatgtggatggaccgatttgctcttactttgaacgggagtcaagaacttccccaattgctagccaaggccaaagcaatggcggacacctgctccgcccccgaagagatccatggacttctcagctattgttagcatatgatagactcgatggcccatataattaacaaccgctaggaagattgtattgtccctcagatcttgactagttatagctctctgaataaaatgagtttatcccatgtgtttactccatagaacagtgcgaatcanatcactcgcgcgatttatctctagcatgcattcat

SEQ ID NO: 262783 - DNA, 432 bp, Glycine max
agcaagctttgaccaacatcaaaagataataactttctacttggatgtccgaatgaataccgtattatatcgagaggttcgaaattgacgacggaggctctgagaaaatccaaacgacaataactttttactcggatgtcagattgtgtcccataatatatcgagatgctcgtaattgaaaccggatgctcgtagcaaattcaaacgacaataactttttactcggatgtccgaatgaatcccataatatatcgagacgctcgtaattgaaaacagaagctctgagcatattctaatgacaataactttttactcggatgtcagattgagtcccgtaatatatcgagacactcgtaattgaacacagaagctctgagaacatttaacgacaataactttttacttggatttctgaatgaatcccgtaatata

SEQ ID NO: 262784 - DNA, 402 bp, Glycine max
agtaatgacccactaacctagaattaaaattatttattgccattaacctatggaattaatacaaacttaatggctgagtgtcactgaaattggtggcaaccaaaagtcacccccaacagccaacaagtcagccaccatttggtctcccaaaaagctgatgcctaagttgccaattgggcccttattacaacttgaactaaagcccttttagttgattaacccacaacatatttttggtcagccaactttacaaggagtgggccattatttagacaaactaaacactctataattgaaataaagtggcgtcatgtagtcctccatttgagccatgagacaactcacaaccttggacttttctccttgaaacttgagcgggtattcaaatagtatggacagcac

SEQ ID NO: 262785 - DNA, 431 bp, Glycine max
gtcacctgcggcatgcaagctagtacagaactatgaaaatcatttctatcttgttcgcacatcgttcgtgtgtacgatatccactcgacaaagtttgaagtagaggagaccttcaatcctatcacgcaacgtggcggacaaaaatgggcaattcacttgaatggtcattattgtcaatgtggaaggtattctgcgcttcactatccatggtcacacatcattgcagcttgtggatatgtgagcatgaactactaccaatatatagaagttgtttacaccaatgaacacatcatataagcatactccgcactaagagggcctcttgggaatgaaccggctatatctccgtctgaagatgcatggacactaatccctgacccaactacaattcgtgcgaaaggtcggcctatatcaacctggataaggtatga

SEQ ID NO: 262786 - DNA, 68 bp, Glycine max
aaaccccaccccccccaggttgtgtcagcgccaaaaaacacaaagaaaccagagagggtattccccag

SEQ ID NO: 262787 - DNA, 470 bp, Glycine max
  unsure (1)..(470): unsure at all n locations
ggatcttaatcactgagctgcagctgaggtgccaccaccatctttttattatagtaccgataatgtgtctaccatcacgattatcgtctccctttccattattgggggtaccacctgtgccgccagatccctccaccttttgggcgtgttcttttaatgatccgtccccctttttgcacatgttctgtagttgcatcctatccggaaccatatcaaaattgtactgatactgcctaacaaaggcaaccattatgtccttccaagaatggactcgggaaggttccaagttagtgtaccaagtaacagctaccccagtaagacttttttggaaggaatgtatcagcaattcctcatcntttgcgtattcccccatcttctgacaatacatctttagatggttcttgagacaagtagtcccctctgtcttgttatagtccagcaccttgaacttgggaatgaccatgtctggg

SEQ ID NO: 262788 - DNA, 371 bp, Glycine max
  unsure (1)..(371): unsure at all n locations
tgaaacttcctgcttttattgttgaccacagagtggnacctggagatatgtcgcgggggtcaggagaccttgtggacgtcacgtggggtgctattgcccaaaaccaagcttgaccaatcccgacccaacccgggcatagtcggtcagtgagaacctgtgatgtacctaagcaggcgagctcctggcagtcaacagataaaaggaaaacaagaccacaaagcaaggaggcttgtggtggctggccagctgtgaattttgtgtaatatgtggattgtggcctctggtaatcgattaccaagggtgggtaatcgattacaaggcttaaaaatgaagacaggacgctaagataggctctggtaatcgattaccac

SEQ ID NO: 262789 - DNA, 448 bp, Glycine max
  unsure (1)..(448): unsure at all n locations
agctttatgtacagacaacaacaacttttatctttggattgtnaaatatacttacttggttggcgatggtcgcacacaatgttgactcgacacgcaagagacaggttcaacaaccggtcaatggatgaacagagcaaccaccataggtgagcacatgaacttagtgagggagggcaaagtggggcactagggcgagtgggtcatggtctttgagcgaggtgaaggacgcgccataataattaaggggtgtttggtttggttgttttctagtttcattttcactagaaatagaaaatggtgatggaaatctgtttggttggatttctgtttctattttcagagaaaatattctcccaaacgaaccgaaaactgtaaacaataaaatctcgtttttagttgaaaccaagaacctcatcttgggtaaataaaaacgtggtggctaagaatg

SEQ ID NO: 262790 - DNA, 337 bp, Glycine max
cacatgacagctacatcacaagtgtagctagagcataatttaagttcataaattgcttcaaagaacaaaagccttacttctgaaacattgagatttttagctattgggcccaagcttaatgtctccacataaaagggatatgatatccacaatttttccttctacacaaagacacaggatgataagggtgcactgcaaaatagtgggataaatatggatggtggttccttacacttttgtagtgcaccagataacaaccccattcacgcatccacaccttacattggagtcattgaagaaatctgggagcttgattatagcaaagccagagtactca

SEQ ID NO: 262791 - DNA, 446 bp, Glycine max
  unsure (1)..(446): unsure at all n locations
tatacaanaccgcagcctgccaaccagctcggtcaggcgagctcaactagcccattcttgctcagctcgcccagacgagctcaactcgcccatgcgagcagggctgcttcctccagaagcaacatacttctggaggaatggtatggagggcccaaatgggcctggttgctatatgcacacccatgttactaagtacaccccccgccttcatttggtgattctcttctcctagagttacggatactcacgacattcgtaacgatactaggttactttccataatgggacggaaccttgaggaaacataatcatcccccttttgacatacggaatgatacggaacctcactaagtgtgcgacgatgcttccatctgatgatcggcgtgtcacggaaccttactgattgtgcatcaaaagattcttattggttcgcggacgttctgaat

SEQ ID NO: 262792 - DNA, 451 bp, Glycine max
agctttgaatgctctattcaatggagttgtttagaatatcttcagactgatcaacacttgcacagtggccaaagatgcatgggagatcctgaaaatcactcatgaaggaacctccaaagtgaagatgtccagattgcaactgttggctacaaaattcgaaaatctgaagatgaaggaggaagaatgtattcatgacttccacatgaacattcttgaaattgccaatgcttgcactgccttgggagagaagatgacagatgaaaagctggtgagaaagatcctcagatccttgcctaagagatttaacatgaaagtcactgcaatagaggaggcccaagacatttgcaacatgagagtagatgaactcattggttcccttcaaacctttgagctaggactctcggatagggctgaaaagaagagtaaaaatctggctctcatgtccaatgat

SEQ ID NO: 262793 - DNA, 344 bp, Glycine max
tctagcttctcaaggaagatttctcaaagaagcttctcaaggaagttttctcaagaaaacttctcaaggaagctacctagtctataaatagaaccatgtgtaacacttgttgtaactttgatgaatgagagtcttgtgagacatactacaaatttccacttctctccctcttttattccttcaatatcgtgttccccccctctctctttctctccctctttcttttcctccattgaagcatcctctccaagcttcttatccaaggcttatcttggtggtgaagctccttcttccatggcttattccctagtggatggcgcctcctctcacctcttctcctttgt

SEQ ID NO: 262794 - DNA, 393 bp, Glycine max
agctttgatatatggactttatcttctatatgatcaaagtgggtctaaaaagaggcacatctgatcatcatactttgataaaagccaaaacaaaaactagggcaaaaggagagggtgagaatgagggagaagcccatgctgtgactgccattcctatacaaccaagtttcccaccaacccaaaaatgtcattacttagccaataacaaaccttctccttacccaccgcccagatatccacaaaggcaatccctaaatcaaccacaaagtctgtctaccgcacttccaatgacgaacaccacctttagcacaaaccaaatacaccaaccaagaaatgaattttgcacgagaaagcctgtagaactcaccccaattccagtgtcctatgctgact

SEQ ID NO: 262795 - DNA, 395 bp, Glycine max
tggcttattccccagaggatggcgcctgctttcacctcttctactttgtcttccactgcatctccatggtagaaaaccaccatctaaggacctcattgaagctcatagatccaacctccatataagctccacaagcaagcttccatcaattcctgctcctcttctcagcatcatacactcactctctactcaataatctttctcaaacgacaaaacctaggcttcaatgcacaagctgctccccttttctgcttctagggctctttatcccaaataggcctgtggctgttctggaattctgtgccctggcctttctatactaatgtgtagaagctatcatcagaggtgtaccctaattcacacaagaacgctttaataagctctgaattgtgacc

SEQ ID NO: 262796 - DNA, 453 bp, Glycine max
  unsure (1)..(453): unsure at all n locations
agctntgtcgcgtctcagaagttttgttgagtgatgcttctccttctcaatgagtttgatgctacaacattggcggcacttctccttttcgatgaggccatggaatcccgcacgttcccccccccgtacagcggcacggtggtggtggtggtgcatcgccttcggggtgttgcagaggtgttgttggtgtgcggtattgtttaagtcgaggtgacacaggttcttaacgaaaatatgattctgatttaatattcaacaaaacaaaattgtttttattttatctttttgtgtgaaaaaattgtataacaaaagtatcattctggtgtataatatataacgagatcgtgattttactctgtaattttattttttacactcccacctatatagtaaaagtatgatttcaatatatgatgtataatttttggaacatgttttacatcatgcttcaaa

SEQ ID NO: 262797 - DNA, 444 bp, Glycine max
ctaaaaggggagaaaattaacattatttagctcatttatattaaactgaaatcaaatataatgtatatttatctttcaaaagtggagagttcatattttaaaacaaaatgagaggaacgtgtaatttaactatcttttaagaaaggaaaatgcctggttcagtatttttaaccacagatccacattaatatatgcactctcattttgttatagatgcggccattttaagattcacataatggctgcatgcacttcctgtgtaaatatagatgcacacaatgctctttttaagattcataggatatgtggaatggttgcatgcatgtctggttcagtacttttaaccacagatccacattcaatttgaagcacgcctttatgttttaatatgaatttgatgtgaaaattaaaaaataagcatgtttgaaactcgaatccaacaca

SEQ ID NO: 262798 - DNA, 222 bp, Glycine max
agcttatataacttaacctctaagagcatgcttatttcaggatcattctaaagaaatgatgaatcaatagtttgtcacataaaaatacatagaatggtgattccaacactaagatgggactccttccaatataagaatggcccgaggatgggattccttctgcaacagaatgaataactgttatcatatttaataagtgactttctacaatgatgtacgata

SEQ ID NO: 262799 - DNA, 431 bp, Glycine max
  unsure (1)..(431): unsure at all n locations
aaatcactcgctccaccggacgcacccatgccgaatctgccccccatggtcggaatcaattccggcaccacctactcttgcgtcaaggtgtggcagcaccaccatgtcgaaatcatcgccactgatcagcgtaatagaagctcggcatcttactttgctttcaccgaacgtttgatcggtgacgccgccaagtactacgtcaccatcaaccccatcaacaccatcttcaatgctaagcgtttgtgtggaaggagattntccgctgcctccattcggagtgataggcagttatggctatataaggttttccctggtcctcctgacacacctatgattgtggtcaattacaagggtgaggacaagaaattcgctgctgaggaaatgtcttccattggtctcatgtgattcagcttcctttcattgatgttatt

SEQ ID NO: 262800 - DNA, 450 bp, Glycine max
agcttcgaatgggcaaaagcagaggctgcttctttctctggtcatcaaaactagaatacttttgcgaccatggagcagcaacaacaactacaggttcgttcctgtagagttggctgctccaagtttggacttttatttcatcagactcgacggggctctcaccctcatcctcgaaaaaagaagaaacgtgaaggaaccttgacacaagagattgtgcagcgtcaaacctgaaggaaccacaaacacacccacacacacacatatacccaactacaataataaagcataagcacccttcacacccagcattgtaaattagttacataatcaactgctgatgtctatatttgtctgtaattgcaatttaccttctgtatgctcttgtatgtgatcagtgtaatttgctatataaacaatcagttgtcatgctgagtgaaccttagattcccg

SEQ ID NO: 262801 - DNA, 384 bp, Glycine max
  unsure (1)..(384): unsure at all n locations
ccccataatgtggtagcgagacccttttccttgagcatcgatcttaccattcccataactgtgcgatcctttctcttggaaatccattttgttgagaagaatatgcgactgtaagttatcgctgaatgccttcatcctcacaccatctgtcaaacttgctagaggtgtgctctttgtcgcgatcgcttcttacttcttacattcattatccactttgattgtcaccaagggccttgagattttngaatactccaaagactcttgattatccttttacaatatatacccatgtcattatagagaagtcatcattgaagagtattatgcacctgaagatctcatgtgatggcctcctcataggaccataaacgtcccgccgtatca

SEQ ID NO: 262802 - DNA, 423 bp, Glycine max
ctgcagctgtcttatttttgacggcatgtttctttgtttgtaccctaccttgatctctatgaacctagtggttgtcctttcctagagcggatgcactccataagtactgtctgatgtaatcacacaactcgctgtataagtagcctctacttgtaccacagaagtgatgtactcgctccaatgtaggtgaagactttacatctcatgcggctaaacctttgatacttcgagcatggtgatacaaaatacttctcatgcggttagtcctttgaacacttttgtattattgaacgggactaatctaaagaattctcagactctgactgactttttaactgagcctgtagacggatatcaaacgaatgatgcggcatttgttcgttctttagagaaggtggaaatagacgccacgcctctgcgtta

SEQ ID NO: 262803 - DNA, 428 bp, Glycine max
  unsure (1)..(428): unsure at all n locations
ctcagcttgcggattgagtcttcgccggcgagatgatcaaagtgttttttattagaggccaatctgatcatcgtgctttgattaatgcaaagaanatcggggctaatgaagagggtgaatatgaaagagaagcccgtgctgtgactgccattccaatatagccaagtttcccaccaacccaacaatgtcattactcagccaataacaaaccttctccttacccaccgcccagttattcacaaaggccatccctaatatcaaccactaagcctacctaccgcacttacaatgacaaacaccaccttctgcgtaaaccaaaacacctaccaagatatgaattntgccgcgagaaagccttagatattcagtgagctatgctgacttgctcccatatctacttgataattcaatgggagccataaccctaa

SEQ ID NO: 262804 - DNA, 431 bp, Glycine max
  unsure (1)..(431): unsure at all n locations
agctntggtgatgagcaagtaatcagtttctgatatttatacaagcacgaaccacacctgctgccaagctaacaagtaataacgtatctcttgtggctaaagtctccatcaggatctaatatctttcacgttctataccttgtaaatcttcgaataggggattctttttttattttccggtaaaatatgctggaattgatattgttttattaccctttgttcttttcttcatctattccccccaatactatgctgtaggtttccacttgtaatgttgtctcacgcaaagaaaaagaaaaagaaaaagaacagctctgagctttcattcaaaagtaccctctgctattatcatatttatcaacagctttgtcaattgatagcagaagtttccagcatgactgaggttatatattatacacactggcttattg

SEQ ID NO: 262805 - DNA, 405 bp, Glycine max
  unsure (1)..(405): unsure at all n locations
ggaccctttcctctctctggagcttaagctcgctgttactgccccatagagcccctcagaattaggtccggccgtattccttcctacgaacccttttggtctctcgttctaaagcctctggggtagctttatttacgtctcttagatcggcattctcctttcggatcttaagagctgctgattagaacctttctttgactgattgggctagctcgagttctgccctaagggcctgcacctcttcgtcttcctccggaacctcaacttccacccctttagaggttctcaaacttgggagccaatccagatcttgaaagtgagctttcaaccacctacgatagctgtcgatgagcccattngtattgcctatgagttccttattctttctttgccacatctctcatg

SEQ ID NO: 262806 - DNA, 342 bp, Glycine max
agctcgacataaggaagtgcagaaaggtgattacttcttcttttattcattgaccacagagtggtacctggagatatgtcgtgggggtcaagagactttgcggacatcaggtggagtgctatgtcccaaaaccaagcttgaccaatcccgacccaacccgagcataatcaggcagagagaacctgtgatgtacctatgcacgcgagctcctggcattcaccagataataggaactaacaccacacagcaaggaggctcgtgtggaggctggccactctgtgaactcttgagtgagatatgggatacggcctctggctatctattaccaagggtgggtaatcg

SEQ ID NO: 262807 - DNA, 326 bp, Glycine max
ctcatccaaataactgcttggtcagatgattatactgattagacttttgttccattgggcaattggatgaggcagggggattcaaatctcccaatctggcagcataaactgtcaaattgtgcgcataaaatttgtttgtcacaaaagttgtgtgctggttcggaaaagtatacaattgggactggacatttgatacacccacggcataatgtaactatgacttgacctcagtaaattcgatcatccacgggaacaaatgaacaaagaagtactgggatggagaagaactgggattggttggttggcaagttctgcctgcctgtttt

SEQ ID NO: 262808 - DNA, 462 bp, Glycine max
agcttatttgattttctaaagaggaataatttatgcctattccctgtggatcttgtttgggaatttggacgtcagcttttggaacctgtagcatgtctgtggattattcttggccttcagtttatatctcatgtttcattaagtctcttgcttacaaatcaaaccatgcctttttccttggcttgctttctttgtccagggatgcagtgtatcttggttgtgtctgcttaatttaacttgtttcttgttctttatcatattcaaatatgcacgaactactcctaatccacactgacctgaagccagaaaatatacttcttgtttcctctgaatatgtaaagctccctagctataaggtatttagtatttttggatccaaacataataatgtttgtagactcagttataatatatgataatcacaactatagcttcattgtttctacaaggcattacagagct

SEQ ID NO: 262809 - DNA, 484 bp, Glycine max
  unsure (1)..(484): unsure at all n locations
ttgtaaaatgacttctatacaaaagttagtctcattaagtatcttcaacaaaggtgttgcccttgctcctacgtatcctcaggtgcgatgaggaattcagacctacgtagttcttaaagtccgaacgtttgtgtgttacattgattttttggttcttgaaagattgattttaattatgaacaaaagtcatttaaggcgttggaccttgaaacgacctcaagtgatgtttgatgaaaagtggagaaaatcattaaggtgttggaccttgaaacgatctcaatcgatatttgatgaaatgaagaagtttatgagttggttttattttgggtttgcttattaaccttcaatcttntttaaagataacttgcggcactaatgatcagttaaaacttactttacaagaagaaaatggtatttctgatgctagaagaagatgaagatgcacaaaccataagagtacccttaggattcatagatcgcattc

SEQ ID NO: 262810 - DNA, 460 bp, Glycine max
gcttagagaggaagcttcaatggaggaacttaatgatagagagtgacatggaaattgaaggagaatagggagagaagttgaactttgaagtgtgtctcacaaatttcttattcttcaaagttgtgacaagtgttacacatgtttctatttatagcctaagtcactaactaaatgaaattcacttaatttcatgtgaatctaaaagaaatattccaagaatatgtcaaaggaatcttagcatattccctttagatgccacaagcatgggaggtgtgactctagcacatgggaaacttcattgagaagcaaggaagaaagcttccttgagaagctagaggttagctactgacacccctcttatagctaagctcactcccttgccaaaatggacttggcttcttgggtaaagaggtggctaacattcatctggcttggggaggcgcaagccctgatgaatctt

SEQ ID NO: 262811 - DNA, 414 bp, Glycine max
  unsure (1)..(414): unsure at all n locations
gaggttgagccatgttctcagtatgaaagtttgtagtggaatgttgaaaatcagaatattcagaattaacctcaacagaatgctcagaatgctcaaaatgcacagaatgactaggatgcacactatgcctaactaatctatgaaaacttctatctantttaggatcaaagggttgtaaatcacctggattgcccctagtcatgcactacatgcagcaaataatgtgtttctcaacaagcacctaacaagggggtaaaactactgctatactcaaacgatatcaaaacgagctgaaattttgtgaggaacaccctatatcatgaaaagatagcacanaaattttcaaaaaaaaaaattcaaagtataactatganaactacctaagcaaagtttagaaaaataggacaataatac

SEQ ID NO: 262812 - DNA, 402 bp, Glycine max
  unsure (1)..(402): unsure at all n locations
agttttatttagaaaattagagtttttctcttttatcttagtgagagtgaatctcctaaattcttgagtgattcaagaacaccctggctgtatcaaaggactttcacaacctttgtgtgttgccctcgctggaaagagtgagtctttccttcctttcatcttcacccttgttctttcaaaccacaattccagaaaatccacctctacccagaattatctcgtggccgtaactcccattttacgcactcaaattaagtgattcttgagcctaaattgactttcaaaacgagacctttcacctcgttttggaatcacctcatttggagccctgtagcttcagttattgccatttctatatttctgtccagccaccacttaacctacattnntaccatccattca

SEQ ID NO: 262813 - DNA, 371 bp, Glycine max
gtcagttgaatattttattttcatcctgcacaataggggcaaaagatgaatcgagtcacatcactgcttcgtctactgccaaacatatttaagattattgatgtccttgttacttccagtttcaccttgacaaagatgtcatggaccatgttgaaaatctaaattgattcaaccccatatcctgcgtaaaaattcgcaatacttcgactgtacatcattcgcatgcatccatgcttttcattggttgcattgctcattgcattctttccttgaaaaataaaataaaataaaatgaacttatcaaaaagaaaaggaaacgctttacggcgtccttaccgaactcgtgctagagctagagtaatgggtgaagc

SEQ ID NO: 262814 - DNA, 409 bp, Glycine max
  unsure (1)..(409): unsure at all n locations
acctgctgcatgcaacttgtaatgattacacatatactggatttttttactagagccgattntcgaagagattctctacactcacatctctttatgtgggtctcgaatggctatcaaaggcctatatatatgtgacttgagacaccaatttgctaatagttttgcacaacaaaaaggtcttattctcttatatagaaaaaacgttttatcctcttacacactccttggccaaattacttgcgattcaataaggaattatgcgagtgctcaaattgttcaatctatctttatcaagagagaattcttcttctcttcttcttcattctgaaaacggattaagagaccgagggtctttagttgtgatagaattatcatcacaaaggaagggctgtccttgtgtgttagaact

SEQ ID NO: 262815 - DNA, 456 bp, Glycine max
agcttggttcccaacactatgttcatactctctaaaaatttagaggtaaacctaagatctctgtcaaacactatgctagatggcacatcatgtaatttgacaatctcattaatatacagggaggtcaacttgtccaaggaaaatatgatattaatgggaataaagtgagcaaacttggttagtttgttaacaataacctagatagaatctaaacctctggggttcctaggtagtcctacaacataatccatgaaaatactgtcccacttccactaaggtatctctaaaggtcgtaacttacctgaaagtgttagatgttctatcttagccttctggcagactaaatatgcttacacaaactcactaacctctcttcatgttgggccaccaaaacattgttttcagatcctgatacatcttggtagcaccacggtggatgctacacttgctcctatg

SEQ ID NO: 262816 - DNA, 265 bp, Glycine max
tccggagcatgacagacaccgctttatgagcgctgtacaccaccagcgcttccaggccatcataggatggatgtatcttcaggagcgacacgtccatctcatggacgactagtcttctgatttccatgaggaaataaggcgccggcggtgggcaccactggttacttccatggccaagtttgatgcagacatagaaccttgagtttatgcctatgcatggtcaccaaagatggcgtgcgtcacatgataacctgagtaaagggtc

SEQ ID NO: 262817 - DNA, 459 bp, Glycine max
agcttataagaacaaaattgttctttattattttcaaatatgcatgtgaattaggacgcatcaacaagaatcaagccaaagctattgtgcaagcaatcaatggggcaaaacacaccaaatgattataatgatggatggctcaaattctcacaaaggtaaaatcatcactttcaaattgagctttcaaaactatcatgacatgtagagaagaatcaaggatttcaagtcacaaaatgtcaagaacttttattttcaaaacaattacccatctcttgaacatatcctataattcaaagaaaaacatgcaaagtcgtacgtgcacacaaaattgacccataatattaaactgaaaatccgacgaaactaacaacattaacaaattaacacaactaacaaattaacaaaaccaacaaaactagctaaaccaaagaacactccccctccccatattaaaaacac

SEQ ID NO: 262818 - DNA, 353 bp, Glycine max
  unsure (1)..(353): unsure at all n locations
aatggattntcaaggtttgagaagtgaaattgagaatggggtaaatttggagcaaagtctcacctcacacaagtctataacatcaatttaaacttgttcaaactggatttacacctaaaattccaccaaaccacaatctgacttctcaacacccaattttaccgtagaaatggctctttgttcactttgcgcatttgtttttctctctagcacagcccaaactttctcataagtcctaaatgacatttcaagctaggattaactcactntaacctccaaataccactaaatccagatttggccttccaactctcaaaacctcacttctttttcactcataacaccatattctc

SEQ ID NO: 262819 - DNA, 437 bp, Glycine max
  unsure (1)..(437): unsure at all n locations
agctntagaaaggcttctaccaacacttcctcttcaggtagaggaaggggtagaggtataggcagaggaaggggtctaggccgaggcataagctactacagaggagatcacccagcaacaaccagaaacagaaagaggaagatggagccattagacaactaactacaagtcaactgaaagtctaacattgaatgttctagatgtcaccggctgtgccatcacaaatcagagtgcaagaccaagaagaagaagaggaagaagtgtgcctcctaacctcttgtcaagaagaaaaggaatcaagtaaaagtttgtggtacttagacacagcttgcaacaatcatatgagtggaagtcaagattcactaaacttggatgtgacgtatcgtcgtataataaaacttggtgaatctagatattcaattatgggataaggagag

SEQ ID NO: 262820 - DNA, 468 bp, Glycine max
agcttgtgcagatctccaactccatgttttgttgttctttaaacagctacacacatttcatctgtggttggaaccatacatccacagggttcccaaaccaatattagtggtgatggcggagcataccaatcatcattaaaatcaacggaaagattctaagacatacgaaggatataaagaagcttggaaagataaagttatatggggcgtgcctgacaaaatataaacggtgaaataagagctctacagatatactcaccttgtacttccgaacacggagaagatagtgctatacagacatactcaccttttacttttatgtagatagctaagctcgtgtcattgtttatgtctgagattctgataagaatatatcggtctccaaataagaaagagtgaggctagcacatcatgatctagtgaaggttagcactctctggcttccactaaccaaagctagatcatgct

SEQ ID NO: 262821 - DNA, 370 bp, Glycine max
taattctttgatatctctttagtgctcacatctcatagagagaaactgagagaagagtgtgtacatctcacgagagaaaatccgagaagaacgatgagttattaatttaattaatgatttggagtaatagaaaacatagatatatcaatcaagctctcgtaatctatgagcgcctaaattcatcatactaatcaatttgctgactaattcctaaaacaggaatttggttcaaaatgagaaccagaattgtactactatgttcacaaccacgaccataaaagttgctatttccacccacctaactccacatatagcgctttctcactgacgtagcattcgcagtgatgatgatagccatagcccataccat

SEQ ID NO: 262822 - DNA, 360 bp, Glycine max
aaactattcacttaacacagcgcgaccgccgaaaaaatcttcacaaacaagtcactagaaaaaccgcgactcctggaaatacatttctcgaaatcagtcactaggaatcaattaccattaaggagtaatcgattacacatcaacagaagcgactctccattctaaattctgaaaatcacaacgccgagaagcactgggaatcgcacacaaggattgcgtaatcgattacacaagtccaaaatgatccgaaaaagtcgaaacacaagttgcaactcttgaaattcgaaagcgtaacattgcaaaacacctggaatcgatcaccacccttctggaatcgattaccacaaagcaaagctctcc

SEQ ID NO: 262823 - DNA, 483 bp, Glycine max
  unsure (1)..(483): unsure at all n locations
tgcttctacactccattggcaaaagtttactaaggtttattctttgtataattacgtgactcataggactatagctagagccaaactgcatctaggacaaaaataaggctaggtaggggattgagtgccagatttcattcaagacaaacattggtcatattgcattttgaacaaaaagataggacaacattgaaaaccaatgataataccaaaaaggtagaaaagctgaaaatttaacaatgaacatacaccaacacattgaacccagaccaatgaggttgagtgtcatcagattggccacatcaaggtaagcaaaagagtcagactacaaatttaaaaagaacctaaaaatttaacaatgaaagagaacttcacaatatgaaaattagattcacattntatttgtaattaaaagcttcatgttgtattcacagaatcaaagtattcttcattcacaagattcttgagaactaccaatagaga

SEQ ID NO: 262824 - DNA, 406 bp, Glycine max
  unsure (1)..(406): unsure at all n locations
agcaagcttgagccaaagacctgactcaccatatatttcgtttcagngagacactgtccatccttaacgctcagaacctaaacagagtagagagatgatctccaattatcatataatacaaggaaaatttccaatggcagcagcaaaagaatagaatgagaatcctccattcaaagagtgggagcttgcattcatacttgaaaggagattaccatttatgaacggtacttcgtaatatgcgtatcaaatgacagagataaaactcctgatcagggatctaaagaaaaacatataaattgtgcagagaggtctttacactcaaccatatctgaacaatacatgattgtctcctcatgaccgaaaagatagaaaggaaatcacgacctacaatggtctgcttcctttg

SEQ ID NO: 262825 - DNA, 375 bp, Glycine max
tactcagctttgcgaagacatatggaaagatctgcgacttggctctgatttatttgtctatcacagccattgcatgcctcccttaatattacgaccagctgacgaggtgcttcacatttggggactttcaggtagtaccaactgtccaataatttgaagggatcttgtgatgcccgctaggaggaatgaaaacctacctgatttctggggtatacccctccatggcacgaatatccaacgcggtcaaagtctccgtgcaagaattggaccgagtaacacacaattgaaatggcgtggtcggaataccaaagagatactttggatacaaagcgacggcttaggaatatcaacatgaatgggcatcactcattgatg

SEQ ID NO: 262826 - DNA, 456 bp, Glycine max
  unsure (1)..(456): unsure at all n locations
agctngagatgaggaagtgtagaaagatgattcttcttgcttttattcattgaccacagagtggttcctggagatatgtcgcggaggtcaggagaccttgtggacgtcaagtggggtgctattgcccaaaaccaagcttgaccaatcccaacccaacccgggcatagtcagtcagtgagaacctgtgatgtacctaaacaggcgagctcctggcagtcaacagataaaagaaacaaaaccacaaagcaaggaggcttgtgtggtggctggccaactgtgaactttgtttgatatgtgggttatggcctctggtaatcgattaccaagagtgggtaattgattacaaagcttaaaaatgaagacaggaggctaagctggtctctggtaatcgattaccaaagggtgtaatcgattaccaggcttgaaaacgaggtcacgaagctaggagagcttctg

SEQ ID NO: 262827 - DNA, 491 bp, Glycine max
acctatagatactcagctgctcgggactttatggagctagatattgagctttaatgttgttctttaatggtgatcttacaccatggagatgcaacgaacgacaaaggagaagaggtgagaggaggcgacatccactagggaataagccatggaagaaggagcttcaccaccaagatgagccttggataagaagcttggagaggatgcttcaatggaggaaaagaaagagggagagaaagagagaggggggagcacgaaattgaatgaagaaaaagggagagaagttgaactttgagttgtgtctcacaagactctcattcatcatagttacaacacgtgttacacatgctactatttatagactaggcagcttccttgagaagtttcttgaaaaactttcttgagaaggatctttgcaacacttccttgagaagctaagtttacaacacacacccctctcatactaactcacctcttgaaagcttccttaa

SEQ ID NO: 262828 - DNA, 454 bp, Glycine max
agctctgaatgaccgagttttgactaggagtaataggtttaggacatacgcataaaaatggagaagttgacctcaaagaagaagacaatcaaggagaacttggcatctacaaaggatatgattgctaacctgaagaacactcttgagaatatggagagtgagttgtataagaaagagagagatcaggctgatttaatgtttgagttggatgagcccaaaagattgattgttttgaatcaccacgaaggcttcaaaaaggcccaacgtcgagtgaaggtgttgctgtcgagttttgattccgcataacttgatgtgaaatgtgatgttgtagatggcgaaatagttagagaatcacaactttgctctaagtctaaggaggaagaggagaaataacagattgaatcaaagtgactagtttaatgctctttctttccagtgttatttcgtaagagtt

SEQ ID NO: 262829 - DNA, 438 bp, Glycine max
  unsure (1)..(438): unsure at all n locations
atcaattgtgtatgatataactgttgaaatttaagaagaaattgcaatgcttcttagatatttatatacttggaaagttcaaaacatgggtggtatttttttgatcatatgtatataactgttgaaatttaagaagaaattgcaatccttcttagatatttatatacttggaaagttcaaaacatgggtnggatttttttatcatatgtattcttcatggaagataattttattcaaatcggataaatattataaataatcatttttttcttttaagtacttaatacaaccatgattattaaactcttgagttaactcgttaattcttacgacgaatntatgaatccacttgttctctgctagttaactcttaagtaaactctttttttgatagactctggataaactttatatattctaagtaagctcggtagactc

SEQ ID NO: 262830 - DNA, 330 bp, Glycine max
ggatccttaagtcacctgctgcatgcaagcttctatagtatagtaccatactttcgtttttcgaccaagactattttaaaagatgtggtattagattatgatacataaagtgcgcgcccatcgagtcatcatactattctggatgagaaaaagggatataacttccgccgataaatgaatacatcttgaccgatgaaatttagtgtgaatacataaattgacacatgaggaacgactcgtgtctcataaaacaaattatcatagttcccataacggatatcaatatctaccctcgatatgccgcaagggctcaaattctatcatcaacac

SEQ ID NO: 262831 - DNA, 456 bp, Glycine max
ctgcagctttaagacggatatgcgagaggccattttgtcttgaaaccaaattaggctggtatccaaccaggcctaaatagttcgattgaacacctgtacgacaagacaggatctgtggattcaagtaaaatgaccatatttcgttcacttcttcttcattgtccggatcaacagcaggaaaatagtcagtgaaccaggccgggccaacctctcgactaatgaatggagcatgttgaggaagaaacttgtcaaagctcagaaaaatcctcatgtactttaggaacaacttttgtgggttttgatctaaggtcttgggtgttaatcgaagtgctctatggccttcgatcgagcgatttgcaacttcttcagcataatcttgtgggattattaatcccatttcttgttcgaaagtggcattaagccacaattggagaagccacataagcccggacacta

SEQ ID NO: 262832 - DNA, 490 bp, Glycine max
  unsure (1)..(490): unsure at all n locations
ntacaaatgggtaacaggctcacattcactctcttctacttcatattcaaacttgtccaaataaataataaagtcatctcgactcaaagaaagtcatataagtctcatacaattaatatagaacctatatcctaatgtcacatcctatcagagcgtggtgttcccgtgtcctctagcatgaggttcttcatagacatccacctattcatctgctcccccgaacacaaagttcaaatcatcacaggatcgaaacacaaacagcaaaccgggagtgagttatcacattgctaactactagagagaaacaacacaacatatagtaaccaaatacaatntacttagcatatctcacattatttcatcactttgtcattcatcaatcacacttttcatccattaatcacacctttcaatcatcaatcatcatacacaggaatcacacactccgatcaagacataataacacatcaacttcataataaacaattag

SEQ ID NO: 262833 - DNA, 441 bp, Glycine max
taagcttattgaatcttcatagatgttctcttttttactggagaaacaaaaaagagaagatggaatctcatacctggaagccccaaaacagagcaaatacatattttttgaccaccctagtttctatagtaagtggtacagcatgtacatagatcccatatggaaaagcaccggaactggaatccaaacaagcagcggcatttacatttttgttccacagttctgactggtcagatgcacggtcactgccacaatcaataaatgctgagcatccagtaatattagaatgttggcaggcctttcgcaagcattgattaaccctctggaagaaggaagaggattgaaaaagagaaagttaataatctaatactacccatcatttacagaatcaaattcctgattctaattgaacaggtcatctagatccagagaaacataaca

SEQ ID NO: 262834 - DNA, 441 bp, Glycine max
gctatatagcgcgggtacgggagacaaattgtcttctttctcgatatgccaagatgattctccgagtactttggactgtagacgaccatgccctcctgatttccagctgggaaattggcgagtggaggaacgccccggcatttacgcaacaagcataatgtaaacctttacggatttaaaagctctatattggggcctaagctttagggttctcattttgctaaggctttgtgtcttttgtctttgaatttataatacaaggatctttcttcatctgttcctggactctacccatcctcattcatttgcatgtttacttctctttgtaaaacggcagattcgatgacgagtgcccctaaggtactaatacctgtgacccgtctatcaacttcgagctgtacacgaatctcacggtagatgaacgagatgaggatgtgggac

SEQ ID NO: 262835 - DNA, 479 bp, Glycine max
  unsure (1)..(479): unsure at all n locations
tgcttgtggagcttctatggaggctggatacttgatcttttatgaaggcctttaatggtgatattccaccatggagatgcagcggaagacaaaggagaagaggtgagaggaggcgccctccactatggaataagccatggaagaaagagcttcaccaccaagatgagccttggataagaagcttggagaggatgtctcattataggaaaagaaaaagggagagaaagagagagaggggagcaccatattgaacgaagataaaagggagaggagttgaattttgagttgtgtctcacaagactctcattcatcaaagttccaacaagtggtacacatgcttctatttatagactaagtagctntcttgagaagctttcttgagaaaacattcttgagaagcttctctgagataacattcttgagaagctagagcttatctacacacacccctctaaaactaagctcactctcctgagaag

SEQ ID NO: 262836 - DNA, 450 bp, Glycine max
agctgccatccgagcacagaatgatttgtttagttatgttggggaacggttacgaacccggaatgggtttaggcaaagacaacggcggcataactagcttgataaatgccaaaggaaatcatgggaagtatggtttatgctataaacccactcaggcggatataaagagaagcatcgcgggaagaaagagcggtggtcaaagctcgcggttgagacaagaaagtgaaagaagcccgccctgccacataagtagaagctttataagcgcgggcctgggagacgaaggtcaagtggtcacgatatacgaagatgatgttccgagtacattggatttggtacgaccatgccctcctgatttccagctaggaaaatggcgagtggaggaacgccccggcatttacgcaacgagcataatatccgatgacgagtccctcgaaggtactaatacct

SEQ ID NO: 262837 - DNA, 414 bp, Glycine max
cccccccacaagcgctgtgatgtgcatcagaccggaccctaagcgaccgagcagcaacttaatcagagatagaatgatttttaacctagaactaacagaacctaatgccactaacccaaggaaacaaaagaactcactggccgagtgtaactgaaattgtggcaaccaaaagtcacccgcaatagccatcaagtcagccaccatttgagctcacaaaaggctgatgcctaagttaccaattggacccctattacaacttgaactaaacctgactaaatccattctagttgattaacccaaaacatatctttggtcagccaactctacaaagatagggccattatctagacaaactaaacactctaaaagtcagacaaagtggtgccatctagccctcctccatttgggccaaga

SEQ ID NO: 262838 - DNA, 465 bp, Glycine max
  unsure (1)..(465): unsure at all n locations
gcttgcaacatatagnggctaatattatgtcaagcacattgcttgaggggacctaacatatagaaggcaattattgacttacgcatttaataaaataataataataatatagctattgcagatggttttgagacttagacctcatgcttaattatgcctcacttaaccactaaggcattttagttatgcttacaatgttaagattttattttatttttattttctatcaagtgcatgagaactaatttgtataaacaacttttgaagtgaatagagaagagacttttggtgggtgttgtcataccctaatttcgtccggggaccattgtttggnggcatgcaactttagttggaccactttgagggactnggcacccattgntaggcacttcgtgaagttccgagacatgctcgaaatcataatgaagcattgctacgcaaccgtgaaatccgaacatgccggaa

SEQ ID NO: 262839 - DNA, 416 bp, Glycine max
  unsure (1)..(416): unsure at all n locations
tcttcacatagtccgcctntgctttaacttctntatgcttaataacagaaacattacgcataggcaaaagatcaagaggagttagtgggntaaaaccataaacaacttcaaaaggagaacaattagtggtgctatgaacagctctattgtaagcaaattcaacatggggtaaacaagcttcccaagttnttaagttcttcctcaaaactgtcctaagcaaagatcccaaagacctattaacaacttccgtttgcccatcggtttgtgggtgacaagtggttgaaaataacaatttaatgcccaacttgctccacaaaagtctccacaaatggcttaagaacttagaagccctatcactaacaatgctccctggcaaccatggagactacaatctcttgataacaaacagcccatgg

SEQ ID NO: 262840 - DNA, 421 bp, Glycine max
agctagcttctacaaaattcttatggctctcactcttattcaaagaaggactgagcctatggaattttgggggctgcatcttcagaacccatggaagataagggtaagaccatagaaaaatatacccctaagactagttcccaagaaaggactagcaacattaaatgcttcaaatgtcttgggagaggtcacattgcctctcaatgccccacaaagaaaaccatgatcatgaggggtcaagacatttatagtactcaagagaagactacttcttgcctttcctctagtggaagtgaagatgatgtaaggagtgaagagtttactgaggaagtctacccccatgaagaaagtaacctcttaatggttagaaggctccttggaggtcaatcttgtgatctatctcaatcccaaaaagagaaca

SEQ ID NO: 262841 - DNA, 486 bp, Glycine max
  unsure (1)..(486): unsure at all n locations
tagtcttgagttgtagggtcagaagtggtgctagtgatttatacttgtaatttgntggggggtagccaaaacaaaacataatctcaggagtagaaatcaacatatataaatctctatgtcttaatgctttcgtttatctttttattcttaaactgacctaggacttgattagatcttgttttgaaaactttgtctgatttgcaagatctattttaatcgtctgaaagtgattttgcgaaaatctattatntatcttataaaggtattcttcaaacggtaactctgcttttaaaaaaaatgctttaaaaattttaanatcacaattcaaagcccggctatatttgcctttacatatactataaataaagcatattaaatcaaaacactaaaaatataataaattaactaagatacgataaattcgattatttttctactagctagtaacacaatctatcataattttcagtcataatatatatcatt

SEQ ID NO: 262842 - DNA, 455 bp, Glycine max
  unsure (1)..(455): unsure at all n locations
agctagttcttactccgttagagaagaatcttgttttctggagacagctctggcgggttgttgagcgcacagatctgctatgttggcatcatctctgaagttttatgggttgataaaggattctgattttttttctctcttttcaatgaattgttgtatttggaggtaagtattagttttggaatcgtgatacactagtctgattatgctatgttactgtgcataataatggcctagttattaggattgaactcagtcaagatgggtatggttctcgtttttatgaatatatggttgccaaacaactgcatctgcttatccatgcatctgctcttaacctttccccacatttattctcatactcatattntccactatatgattagttctggtcgcattttaattctcatattctcacagttatccttgtcgggctttggtcctagcactgaatg

SEQ ID NO: 262843 - DNA, 476 bp, Glycine max
  unsure (1)..(476): unsure at all n locations
tctacttatgtggcagggcgggcttccttcaccttcttgtcttaatgcgaactttgaccattgttcttccttcccgcaatgcttcttttcatgtctgcctgagtgggcttatagcctaaaccatacttcccacgatttccttgagtatttatcaggctagttatgccgccgttgttttttcctaaacccatcccgggttcaaaaccgttccccaacataactcgggccatcattaccgctgcatcggatagacaaggttgcccaaagagggagtccacggaggaaatgctgaccacctcaaaagactggaaagcagtttctaacgattcttctgcggcttccacataaggcatggaggatgggcagcttaccaagatatcttcctcgcctgacacgatgaccaagtgcccctccactacgaatttcagcttttggtggagcgtagacggcacgactnccactgagtggatccatgg

SEQ ID NO: 262844 - DNA, 458 bp, Glycine max
agcttcaacatcagaccacttgcagggtgcttgatctacttcacatggacttgatggggcctatgcaagttgaaagccttggaagaaagaggtatgcctatgttgttgtggatgatttctccagatttacctgcgtcaactttatcagagaaaaatcagacacctttgaagtatctaaggagttgagtctaagactccaaagagaaaaagactgtgtcatcaagagaatcatgagtgaccatggcatagagtttgaaaacagctagtttactgaatactgcacatctgaaggcatcactcatgagttctctgcagccattacaccacaacaaaatggcatagttgaaaggaaaaacatgactttgcaagaagctgctagggtcatgctccatgccaaagaacttccctataatctctgggctgaagccatgaacacagcatgctacatccacaacaga

SEQ ID NO: 262845 - DNA, 492 bp, Glycine max
  unsure (1)..(492): unsure at all n locations
tgcttgtggggcttctatggaggctggatctttgagcttattgatgtcctttaatggtgattttccaccatggagatgcagcggaagacaaaggagaagaggtgagaggaggcgccatccactatggaataagccatggaagaaggagcttcaccaccaagatgagccttggataagaagcttggagaggatgtttcaatggaggaaaagaaagagggagagaaagagagaggggggagcacgaaattgaaggaataaaagaggtagagaagtggaactttgaagtatgtctcacaagactctcattcatcanagttacaacaagtgttacacatgcttctatttatagactaggtagcttccttgagaagctntcttaagaaaacttccttgagaagcttccttaagaagaatcctaaagaagcttgagcttagctacacatacctctctaatagctaagctcaccttcttgagatgagaagctagagctt

SEQ ID NO: 262846 - DNA, 470 bp, Glycine max
  unsure (1)..(470): unsure at all n locations
agtcaccgcagctgcagctaaagtttatgttgagacgagcttaatattccttacctggaacggaggtcgagggttgtcattgtgtgaattctacccatggggagacctaacttaaaaatccattctaacacatctttaccatcaaatcgtggaaactcaagcttaaaattccttatctggaacggaggttgggggttgtcattgtgtgagttctacccatggggagacctaacaaaaaaatgggtggttgacaacagtttctcaatcgcagcttcaattctatcaatcctggagccatgattccccaccatctgctcaatgtgaaggtccacagaccgcaacagttttgcctatttccatgactttcattatttctaggattcagncaacctttgtttgcaattccttgagtttggtgatgtctaccatggagtgatgaaagcaccaattgttaagaataaagaacgatc

SEQ ID NO: 262847 - DNA, 429 bp, Glycine max
ctggactatgcactgtggtcaggttccagtacaaccgatcatacttttctattcgagtctagtttaattacaatcactaccatgaacaatgtattatatataatagtataatctttaattatataatttataaaaattacatgtatcatattttggcttataaactattggacacaattttttcacactaacaaataaaaagtatagattcttcatgggtgtcttccattgttgacaagtaactaatgagaatataggttttctttcattgctcataggtaactattgagaatatatgaataattgaataaacactattatattcttttttgaacaatgaagcaatagtagaaataaaaataaacttgcatgtgaaaatatttttgtgatctaatcttgattaagatggtatgtgtgtggcgggggggg

SEQ ID NO: 262848 - DNA, 401 bp, Glycine max
  unsure (1)..(401): unsure at all n locations
ttctcgtgtaaagcgtagacatcaagacacatgtttaatttatatatatctccgcatatatatgtatatgtatttactgctggaaatggagaagaaatcgcggggcctcgtatatattgatatacttggaaaggtcaaaacatgggtggaatgatcttgatcctatgcatataactgtgggaaaacaagaacaagttgcaggccttcctatatatggatatactctgaacgcccacatcatggccgggattgttttagcacatgtcttgtacatggaacataatgatattctngtcggctaaatattgtaaagaaacatatggttcttataagtacttaatacaaccatgagcatcaacccctggaggtagctcaataagacgtacgacaaattcatgaat

SEQ ID NO: 262849 - DNA, 459 bp, Glycine max
agcaagcttgggctgctcaattgctccatgttgttgcatggaagggcaaaggtctgtatggtggtcatcagaggagcacaaactacagacccttgcgacaggtacaaatttctggttcaaggccagctgggttaccaagttaaccaatgcatccagtttgccttcaagcttcttggtttcagatgatgcagctgagtttgtagctacctcatgcactcctctaatgactatagcatcatttttggtgctaaactgctgggagttggaagccatcttctcaattaaatttctggcttcagcaagagtcatgtctccaaaggcttcaccactggcagcatctatcatacttctctccatattactaagtccttcataaaaatattggagaagcagttgctctgaaatctgatggtgagggcaactgacacatagttttttaaatctctcccagtattcata

SEQ ID NO: 262850 - DNA, 486 bp, Glycine max
  unsure (1)..(486): unsure at all n locations
tgtaggattatggggtacccgtcacatgtggtactttgttgttgtcgggcgatggtgcaagtcgactatccacatccacaaatcacacataaatccaccatccccagttgcccaccttcaactgagctcacgtactcccacgtagctcttatcctcgttcctctcaacaccgggtccccatcaatccctccaagcttccataacatccaagaaatttcaacatccaaacatcatgaactatcaaaactaagcaaaaacagggcagaggcagaaaactctgcccaaaacacaaaccaataccacaacttttcttattcagataccccaatcacattctttttgttccaattcattcacctgtggatcgactcagaaattntactggaggtctctagtacataattctaaactttgacccgtgggatctcctagaaaacgtgcagaacccaatctgtactactctgtccacaaccagcanatacacat

SEQ ID NO: 262851 - DNA, 462 bp, Glycine max
  unsure (1)..(462): unsure at all n locations
agctntatntaattaatattaaaaaatatattattaacacataagcaaaattatcggctgtccaaaaactnttgcgagtaaacaattcacataataaatctcttagacatccatgaatttataaataaagacaaatcataaaggttggcactccaaaggccatacaagttataatgaaaactttaatataaaatccataaagaaactcttataaaaacataacccaacccttatttcacaactattagagcacaaaaagtcccataactcaaatataaactaagcatgtgaggctaaccctcttctttaacatcatgtgactactttaatgatccttacctaggggtggcaatcaacctatacacaaacaacataaacagagtgagatacatctcaccatatataacagtgtaagcattaaaaacaattaaaagcaatttatcatcacacgtgacaagcatt

SEQ ID NO: 262852 - DNA, 459 bp, Glycine max
  unsure (1)..(459): unsure at all n locations
ntgcatgtctagtgattctagagagagaaaggtctttttttctagagctttgagagattttgctgtgtgaagatctgcacagaccaaagcttgaagaggaagccgtctaagagcttgagatgagttngtgagtggttgtgagatcctagaggtgaaggagacatcctcaccacttgtattttttcaatctttcatcttggtcttctctttgctgtaaaggaggcttcctagctatggaaagctaatatcctctgttggatcttctttgtaggtacttgatgtaaatatcttttcatctatttaatgatgtcttgtgtgtcctctgtgctatcagctcttcattctagtatgcccttaccttgatcatgtagatgcatgcttcgttatggtcattcaacagtggaaactcggctgantttgatgaccttgataggacaaggctaagttgtcatactatct

SEQ ID NO: 262853 - DNA, 457 bp, Glycine max
  unsure (1)..(457): unsure at all n locations
agcttctctcgtaagatctaaacttctgattcttcttctactntnttgcagcatttataggagtcatttagccgtaaaagatcagtcttttttaaatataatattagtaaaatatttatagatttttttaattattaatttctatcagaaaatttgattaatcacttatccttgagagaattntttctcataattatttttttcttcaaaagattcaaatctatggcctaactaaaaaggactcagccctattctccttgttttatgattcctaaaaaattctgcaaaaattatgaaacacaaaaaagtattctcatcatgcactgctattgctaattaaatatatgcagctatgataactagaatgctacgcaagctgtcaattaaaattcagaatttcactcagtccatgcattccataaaattcattttcaatatttcaaacaaaacaatgcag

SEQ ID NO: 262854 - DNA, 400 bp, Glycine max
atgctcgtgcgcttagcgcaattctgaactgcttagcgcgaattagtgaattttggcttatcgcaggcttttctcgctcagtgaatggactaaagcggtgcgcttagcgggatggcccttcgctcagcacacctgcacagctcatgcttattccaaattcttcctcgcgctcagccgaggagtgttggcttagtgagagggtgaaaatcagcactatacaaactcgcctaattaacctgaaattgagagaaaatgattattatgtagaagcaagcttcatgatgatgaatcaagtagtcttgatgatgagaaaaaaagcccacaagaatgatttcaagattgagtcaacaagttcaagatcaacgttaatctcaagattcattagaagaaatcaagaaga

SEQ ID NO: 262855 - DNA, 451 bp, Glycine max
agcttatcaagttagaacccttgtggtgtctaccctttacttatcttcaatattgggaagtggcatcattcattttcgtgacctgtaccaaacgatctgctcctaataaagatcatgtcattttaccattaccatccaaatctctctatcacactctatctttaccttcaacattagcataaacggttcacatatacaatcataatattttctttactacaaggggaacatataaggtttattaaaatatgcttgaaagctactactagtagagtaacaccgagccacagattaagccaaaatgtgatcactactatcaccaaatttgatgggtcaacctgaatatttggatagtaaatttgacaaacatattgacaagtcgtttttaatctatttgctcaccataaatgagaaaaccacaccaccataacacttagtggcgaattcacta

SEQ ID NO: 262856 - DNA, 463 bp, Glycine max
  unsure (1)..(463): unsure at all n locations
aactcagcttgtcgtgagctgacccataactgtcgaactctttttattggtganccctattctcttgaccttgacttgatagaacctctttttaagcgaaggtgtttgacttgatcccatgttttactaaagtaaaacaaaatcggtgtgaatcaaaactccgacatctatcatgggtggaatggatgaatgcatgaagaaatgcatatgatacagatgcaatttatgaatacgggagcccgagaaattgtctccttcttagatacaacatcttggggtagcaaagtgcccgacgtatgtatttaagaaggtggcacgaaccctccgttggtttgccaaagagaggggatcaagacggaacccgtgcatgatgcatatgcgaaaggcacaacacggggatgtacatagtatgacaatattcacaaacaaatattagccaaagggtacatgacatttatgcttg

SEQ ID NO: 262857 - DNA, 461 bp, Glycine max
  unsure (1)..(461): unsure at all n locations
agcttgtaagattatggagtacccatcacatgtggtactaggtggcggtcgggcgatggtgcacaacaagttttccacatccacaatgcgcgcataaacccaccatcccctgttgcccacctccaactgagctcacgtactcccacgtagcccatatcctcgtttctctcaacaccgggtccccatcaatcctctcaagcttccacaacatccaagcaaaacaacattcaaacagcataagctatcacagccaagcaaaagcagagcaaaggcagaaaactctgctcaaacaccaaccaaaatcacagcttttctcacttaaagaccacagtaacaattccttcgatccaattcgttaaccgttggatcgactccaaaattttactggaagtctatagtgcataagcctacattgtgaccgttgggatctactagcanagatcaagaactcattctgtact

SEQ ID NO: 262858 - DNA, 310 bp, Glycine max
ctcgcccaaagcgggccctctcttttggagggccacccgcaatgggacctctataccctcattcaatagcgttatcacactccacatgcttctcttcaattctaaagatatttcatcccttttcaaatttttttatattccacccctctttccttttcttaatgaataaaaacattttacttgaccaacaattggtccccttttcccgaatggtttcacccctcccaacatattttttgccctcaagaaccttcctttcaacaacgttcctactgggcactaaactcttcttaatcttaagcctcgcaaa

SEQ ID NO: 262859 - DNA, 371 bp, Glycine max
agcttgatagatctatgtatgatttagaactagcctcacgccagaggtaccttatgttgcatgggataatttcttcatttggtcttgatgaagaccacatggatcaaagcatatgccacaaagtcagtgggagtaaaatatgtgctcttggtttatatgtacatgatattttacttgcaaccaatgatcaaggtttgctacatgaggtggaacaatttctctctaagaatttggacatgaatgatatgggtgatgcatcttatgtcatcggcattaaaagtcatagacatagacctcgatgtattttaggtctatcataggaaacctatcttaacaaaatcttatagtgatcttggatgaaaactgttcac

SEQ ID NO: 262860 - DNA, 452 bp, Glycine max
  unsure (1)..(452): unsure at all n locations
agctagtgaaaagaccatttgtcaagtttatttatttatttttaaattattctactatgtatacactataggctatacatgtatatcggcacaatatttctaaactttgaaggaaaaaaaaaaaaaacctttcttcttattcaggcgtgtctttagccccaagcatacacgaaatggacgcatcggtccatgagatgtttctagcccgttaagatttatttgtctcttggccttgaagacactaaaatagatgaataataatcattaatcaacgaaagaaaaaaaaaaaaaaaaaaaacactagaattggctaagtttgtcattttccaaacaagccaaatattatataaaaaaatatatgatttgagaaaattaagaatggatttttctcgaagtgatctcttccaagtngaagaaatcaattataagatatataactagaaaacaaatga

SEQ ID NO: 262861 - DNA, 391 bp, Glycine max
  unsure (1)..(391): unsure at all n locations
aacacatacacattctttttcctagtcgatcactcacttaattctccatattcttcccctttgtttttgaagttatgcttcacttgaaattaagttaattacttatgtgagttctcgatataatccccatttctctccccctttggcatcaacaaaaagccaaagtgcgtaacaaatataaaacatacatacattactaatcattcacaagatattcattgaanaatataaaccaatcatgaagcaagtaacatgaatagatcaaatatataataaccacatagtcatttaacataattcataattgttcaatcatactatgcacataaatgaaatactaaatggttcaaatgtcataataatatagccaaatacatggctagaaatcaaa

SEQ ID NO: 262862 - DNA, 462 bp, Glycine max
agcttgagaagatatatatcataaacacattttgtttgtgcaggacaggctaaagttagttgattatcattattcaacgtctcttctagtaactaactaatcctattcaccactaaaaatcataatggtttaagaagaaaaaaatactaacaactaatgagaaaaaaatatcaaaaagatatgaagttattctaaatatgaaaaaattatgttgaaaataagaaaatggaattaattaagtattaagcccaaaaaccaagtaaacccaccaaaaaaaaattcaacccacaaatgcatattgagtgttggattcattgtgcaataattttttgtctttcagttagctgaaattatcttcaaattatagaaatgtaacaattcttggattgagttcaagattagataaactttcttcagcttgtagcttcttctctaatattagaaagccttatttaattcttt

SEQ ID NO: 262863 - DNA, 426 bp, Glycine max
  unsure (1)..(426): unsure at all n locations
tctccccttatttgctataaatagggggagaagcgaagtttatttggttcagcttcttaggcacttctctctctctcgaaattgctgaggaaaattagttccatgaagaaaattcaagtcgaggcgcttccgtaacgtttccgtaacgtttctgtgagtaattcaacgaagattctcgaccattcttcaagattcatcgntcgttcttcgttttcttcagtcttcaacgggtaagtacctcaaaccgagcttttcaattcattctatgtacccatggtggtccacattttgtttcatgtatttttattctcattttcattcgctntttatacccccntttgacgtgcttaagccatttatttaagtcatttcctcgcttgatctacaaataaaataaatttccaccgatcgtttgaattgtatcat

SEQ ID NO: 262864 - DNA, 459 bp, Glycine max
  unsure (1)..(459): unsure at all n locations
ctctaagtcacctgcngcatgcaagctagccgcccagagtttccgacttgtcttgtgtggtggaacaagctacaaaaggagagagcaagaaatgaagagccaatggttgatacatggacggagatgaaaaagatcatgaggaagcggtatgtgccggctagttactcaaaggtgaaattctgatactggggacagatgtcgtacaggatgtcacgacatcacgcttcagaacatgcatattatatttgacagtgtgaacagtttaaacaagttaataacacaagagaattgtaacccagttcggtgcaacctcacctacatctggnggctaccaagccagggaggaaatccactataatagtgttagttcgaagatctaacagccactgtttacaaccttctcacctaaccactacccgtgcaatctctacctaagagccactcttatatatgagaacc

SEQ ID NO: 262865 - DNA, 366 bp, Glycine max
  unsure (1)..(366): unsure at all n locations
gtgacgaggccttacaaaagaatacttggacggaagcctatttattcctctagaaagaatacttggagggaagccttatgaggctttgagaaagaatacttggaggaaacttggaaaggttttgcacaacaatactctatgaagcctatagaggcttttcaaaagtaatattcatggagcttgtacaggcttacagaatactagtggtaggagcttatggggcttccaaaaaaaaaaaagaatatcattgtacggtgcttggtctttgaggagaaagtctatatgcgcangtagtggatgtagcccatgttatggtgaaccatgtataatttcttggagcgattatcctttctttattgcttcttc

SEQ ID NO: 262866 - DNA, 436 bp, Glycine max
  unsure (1)..(436): unsure at all n locations
agcggaatagcttataaagcatataatgatttttatctttcttatgggcgaagtaagatttgcagcataacttgatgaaaccacttatatgaatgtcaagcggggtcgctcagctaagatcatgaatactaggcacacgcgtgggctagtagcacaacacaacaacaatgacaagaattatgggggcggattatcattggtaaaccactagcaaacaccaaaagttttaggttcaatagcttgctacacctactacattatgtgtcatgtcttatcaccctaagcctagctcaatagnttgctacacctaagttgatgcattatatcccatcagaacccatgaacccttttcttctattcttaatatgttttctcaaaatcgctcatttagccttttgcatatgcgagggactagtgtggtggaaagatacacaaa

SEQ ID NO: 262867 - DNA, 473 bp, Glycine max
  unsure (1)..(473): unsure at all n locations
ttgggactcgtctgttctgtgtataaatttttttctttataaatgtttatttatgcgtggctatgtaaacaactaagcatcatttgttcttttaattatattttatactgcatatggagatattgttaacttttatagggcattgtttggggggtttaaatttacattcttacgaatgttgaaatgggtatgtcacattcttaggtttgtnttaagctttgtaaaaacatttccatctaaaacttgtacctaggcattttgagtgttattctcaccaatattgggtgggtatagtgggcagtgggagaaaaaaagacaattctatttctttagggtatttctatcttataattacatatttctgggaaaccctttaaatgatgtaagatatgataatatatcttcagagatatcattcctgggtatttattcccaataatgcgacatcattcccnaaatatatgcattcttga

SEQ ID NO: 262868 - DNA, 380 bp, Glycine max
ttctcgaactctggaaaccctcgagtcgaagacctgctatcttgcaaagatttctatgaccccattagggcgagcggattaaaaggcagctatatatgagcaagaatgaaagagaacaaacaaacaaacaaaaattgcttcatacaaaatgtggaacaaaaagacgaatgtgaaacgaacaggccgaacacatgcgtaattcatgattgtgccatcatgtgaatattcactttaatacgggaatatcttaacatcaatcaattattattatttgcctcttaaagcggcaggcggtagcaaccaaaagtatatcttgagacaacgaagggacaagcattttaccaccgccaaaaaaaatctcaaaacaactcgacaacata

SEQ ID NO: 262869 - DNA, 485 bp, Glycine max
ttaagtcacctgacgcatgcaagcttataagaacaaaattgccttaatcatttttatattgcatgtgaattaagacgcatcaacaacaatcaagccaaagttattgtgcaagcaatcaatggggcaaaacacaccaaatgattataatgatggatggctcaaattctaacataggtaaaatcatcactctcaaattgagctttcaaaactatcatgacatgtacagaagaatcaaggatttcaagtcacaaaatgtcaagaacttttatttacaaaacaattacccatttcttgaacatatcctataattcaaagaaaaacatgcaaagtcgtacgtgcacacaaaattgacccaaaatattaaactaaaaacccgacgaaactaacaacattaacaaattaacacaactaacaaattaacaaaaccatcaaaactagcaaaaccaaagaacactctcccccatacttaaacaacacattgtcct

SEQ ID NO: 262870 - DNA, 412 bp, Glycine max
  unsure (1)..(412): unsure at all n locations
atgatactaagcttgtggccttggatcttcttcatcaatggagtcctttgggtttgattattaatggcagnggaatggacaaggtgaaagatgattggagatgccacttcaaggagaagatgagtcaagaagaagctcaccaccataagaagccatggataagagcctgaaggtaggagaagaagaatggagggagaaggagagtgggagcacaaaattttgtgcctcataagaggtctgaactntgaagtgtaattctcaaatgatcaaagttgaaaaaaatgcacacacatggcctctatttatagcctaaatgtcatacaaaattggagggaagattgaatatcacttgaatttgaaagttgaattgtggagccaaactttggagcctacaattcactaattatgatta

SEQ ID NO: 262871 - DNA, 458 bp, Glycine max
agcttcacctttaggtcctcctcatatttgttgcatgataaaacatgctctattttcatctcccactccaagtaagccttcgaatcattctttcctttaaagggaggaatgttgagtttaataccatcaatttggttttgtctaggaacaccatcaaaggaaatgatgatcctagaatcggagctctgataaccaaatgatatgaaccctcatggcacaagggctgacttatgattgtctacgactaaaccttgttggaaaatccaaaaaattgattaagaaaaggatgggaaattggctacattccagggttggcagtggctaatttcctacgacttaataaggtgaatcttgacataaaatagatgaatgagatggtcaaaacgaacgctcagtggtgactggacagaaatatagaaatggctataactcaagctacagggctctcaatgatgtga

SEQ ID NO: 262872 - DNA, 408 bp, Glycine max
  unsure (1)..(408): unsure at all n locations
ctgcagctgacaatcaacacaatttttttttttagatgaccaanggagccccataatatattgagacgctccaaatataaaccacacgctctaataaaaatcaacaacaatcacttattactcggatatctgattgagccccgtaatatatcgagacgctcgaaatagaaaacagaagctctaagctaattcaaaccgacaataactttttactcggatgtacgattgtgtcccagcgtatatcgagacgcactgaaattgaaatctgaagctctgagaaaaatctcacgacaataacttgttactcggatgtccgattgagtcccagaatatatctagacgctcgcaattgaataaagaagctctggtcaaattcatacgacgataacttgtgactcggatgtccga

SEQ ID NO: 262873 - DNA, 455 bp, Glycine max
agcttcgaatctcttcttgaagctgacattctgagcaaaccgggttgagataatgttgtatacaatatacctgcatcattgacaaaagggggaaattggatcaatgatactttctagattgtaagtaagcgaactcatctccatatatgatagagcagagatgaaacgattgtaataaggtattttattgaatgtgtgaataatggaaaactgaatacaaaccagagccaagctcctcagcagagaacaaactctctctagctgcctaaccacaagggtgaaagcaaaatgaataatctccctccaataactaattcccactactctacttattgagggaatatcctaaccgaatgccacctcagctatcacactatctttgtgactcctttcttaatccttctgtcatacacgcgccaaactttgggctcaacattctttgtgttaaccaatac

SEQ ID NO: 262874 - DNA, 336 bp, Glycine max
  unsure (1)..(336): unsure at all n locations
cgacatgtnttccttatctggatcaagctcgacatgtttattttacattcttttttccatcacggcggacaagtattttggctactttttacatttaatacatgagaaatattactctaaatttctatataactataattacaccagaataatgtgaactaccaacttgcaagtttgtcaaatgaagatcaccatgctgataatcgagctttaaaaaaagatcctttagccctattttctatgcggaatcaatcatgaatccggtcaagttatgcttcctctcaatttcgggagcaaagncttaccgaccctcgcctttccacggattatttacta

SEQ ID NO: 262875 - DNA, 347 bp, Glycine max
agcttgtccacgaagaaaggtgttttggagttactctcttcaatcactgacgacacaaaaaggatcacttgcaatgtcccacgccgtgtaatgaacacctcttacgtaaagaagaatcgtttggtcacaacaactattgacgtatgatgtcctaatcccggcttaggataccgatgagaaaaagcgctgcttttagtcacgccctcctcagaccgttaatggatcaatggcataacgacctctttctttcgaagaacaagagatcgctaatgggccaacaccttagcgtgactcttctttcataatctctagaccgtttaatggaacggcagcttacatgacccttt

SEQ ID NO: 262876 - DNA, 238 bp, Glycine max
tgaaagagcataacaagacttttctaaattggtttaaagatataagctttgttgcgatgatgctttaaaacatatagaggtttgccatgggcctaaatgagatgttgtaacttgggaaggatacgatggcaacaaagcttctgttctcgtgtcatcgtaagacaacaagagttcgctgcaaaagcatggggctagactataggctgaatctccacactttgctctagttcatgatgac

SEQ ID NO: 262877 - DNA, 315 bp, Glycine max
  unsure (1)..(315): unsure at all n locations
agctntaagatagtcagatactatgcattgttgtgtatattgcccagaggctcttacattgcttgcagacgagcctacaccagctcatgtggctataggtgcaaaatggtgagagacagtccttgccgtgaccaatgctacacagctgcttctacctgatctgtaaccttatgtaactattatcaatcatatgagcccagcactacatgatacactaccctaagaacattaacttaagttatcattctaaccagatcatactctttagccatcttctgatggaagctgtctggttaggctaacatatgcgcatga

SEQ ID NO: 262878 - DNA, 320 bp, Glycine max
  unsure (1)..(320): unsure at all n locations
nggtgatgacggtggatctagacaaaggagaatcacgctttattgttattataatgtttcgagaactcagtggatagatctatcgctccgatctagaaaacaattgataagcatggccaagctatagacggacccatatgacgcgaccgacggcaagaaaacttatgctgatttcacccttttagagtttggcctacgcgagacaagaaattcatcggttaatgctcccagactaatactaatgaagtgattggacttcggtctggaatcgactgtcactgtacaatacgcgatctcgaacatatgcatatatatctaat

SEQ ID NO: 262879 - DNA, 464 bp, Glycine max
agctaggatagttacaagttagagtctgcatattctttttatcttgaataacacaattcaagagagctttagacttatttgtatttacaaatccagccacaacttaacaccactactcaacttcatcataggcatcatgtacgaaacttataaaagaaaaaaaagttcaacaacaagactacttctatgaattgatttagaacatgttataaactaaaaaacatgcatgaattatactcaaaattcaaaagataggctaagaatgacaagaatacatgaacaaatgtatctagaattcaatcaacaaaataaaaattcaacacaaacttagaacataatgtgacaattattgtgactaatcatgactctaagacaacatggattaagtgatttacacttagaatcttgtgctttttcttctattcaatattttggaagaaaatttaggtctaaattctcaacac

SEQ ID NO: 262880 - DNA, 399 bp, Glycine max
ccaaggactacctgaataatccttgatacttttttatcctgcttcctttcctgtttgaactcctacagccttcatgaaaaccatgatataccatatctttggaatttggagcttggaatgttttagaataatgtggggttttgttcattggataacatgtctgtgggtatgcttcatgacgattttgggccatactgatgacattgatattggtaaatgtggacatgctaagagacttgttttcacagctcatacgtaaacaaatgaaacaaaaataaagcataaagtgatgaatagacttaatgacaagaagatagactctggtctactttatgtaaatttatcttattttttatttcttattttataaaagcctattccatgctccattcttggatc

SEQ ID NO: 262881 - DNA, 345 bp, Glycine max
gtaatctctgggcttggttgataattcttgactctgactgatatgaagttacgagagtggaacctgacgcgatcattaagtcgtcaaaattaggcatttggttgatacctttctgatcatatccgataatgacaatgagaagcggtatgaccatactataatcttgtgagctaagagaagagcctcaatttctgcaatcggaagaggttcaaacttgctttcaaccactaaaattacagaattataacctcttgggagacctttgagcagcgcatcgacatgctcttgaggagaaatcggactttctaccgaagcaagagaatcagcgatctcctgaactctggg

SEQ ID NO: 262882 - DNA, 460 bp, Glycine max
  unsure (1)..(460): unsure at all n locations
tactaagctnacagcagatttattcttgacccactaacctagaatcaatatatctttatgccattaacctagggaattaaaacaaactatatggctgagtgtaactgaaattgttggcaaccaaaagtcacccccaacagccaacaagtcagccaccatttggtctcccaaaaggctgatgcctaagttgccaatcgggcccttattacaacttgaactaaagccctcttagttgattaacccaaaacatatttttggtcagccaactctacaaggattgggccattatttatacaaactaaacactctataaatgaaataaagtggtgtcatttatacctccatttgggccatgatacaaatcacaaccttggacaacacttgatgaagagcattcttggctttccttgctctatcccttgtcataggtcctccaagaccttcaagaggatccttgccc

SEQ ID NO: 262883 - DNA, 352 bp, Glycine max
  unsure (1)..(352): unsure at all n locations
ctgcagctgcaactntacccaaggactaccggatttttttttgaagccctgtagagccttgctctccttaccttgttatgaagcacactacaagccttaagtgaataaccatgataataccatatccttaaagaattttggagctctggaattgttttgggaataagagtgggggctctgttgttcattgaacaacatcgtcctgtaggctatgcttcatgatgtattttgggccatacttgaagcacattgtatatcggctaaacggcggacatgctgaaggaaatgtagtggtaaaaagctacaaaaaaaaataagaacgaacaaaaacacttctaaaaagaaaagaaaa

SEQ ID NO: 262884 - DNA, 480 bp, Glycine max
  unsure (1)..(480): unsure at all n locations
ttcttaagaaaacttccttgagaagcttctttgagaaaacttccttgagaagctagagcttanctacacacacccatctaaaaactaagctcacctccttgagaagcttccttgagaagttagctacacacacccatctaaaaactaagctcacctccttgacaaaatacatgaaaatacaaaaaaaaagtccctactacaaagactactcaaaatgccctgaaatacaaggctaaaaccatacactactagaatggccaaaatacaaggcccataagaagcaaaaacctattctaatatttacaaagaagagtggatgcaaccttgacccatgggctcaaaaaactaccctaaggttcatgagaaccctatggccttcttagtagctctagtccaagcctcttggagtcttctatccaatacccttggcggggaggagtgcatcaacaccttctaagcccaacgatgatacgggaagac

SEQ ID NO: 262885 - DNA, 430 bp, Glycine max
  unsure (1)..(430): unsure at all n locations
agctntatgagaatccgattcaatatactattatgattcaattatatgattcttaattattaattaataatataattaattaactctttaaacattatttgtaattttttttttcacaaactataagagagataaaagataatagaaggctttgagatgaaagaaacatatacttttaattgtggagtaatnttgaaaaaaaaattgattattctattacttttaattgtttgataccatttgtcattaagatatccttcaataagaactctcttatttccaaccattgagagattaccctctgtggccaatgagaagaaaggcaaaatcaaagtttgtttttggttttaataccccgcttagatatggagacgagaaacaggtaaaatgattaaaatcacgttgaaatacaattattattacaatctgt

SEQ ID NO: 262886 - DNA, 368 bp, Glycine max
ttttctgctgagaacctatgacatccagcctattctccttcatatcctctctacatggtgccagaggttggattgaacgatccatgaacatgctttctcatgtttctccatgaacgtcttacgatgaactgagtggtcaatcaactggctcattgtactgtaaatattacattacctctaccgaccttacttcaagataaaagtcttgctgctttgctgaaccatctttgcatattacataacccttaatcttggatttctagtcgtacttatctccatgtcttgagtttctcaagcattaataataacacttaagcatgctaatcgacatagttatgctccctaggcatgttatcacctgtaactat

SEQ ID NO: 262887 - DNA, 452 bp, Glycine max
agcttatccttatggctagcctccggacttatctcctcgtgccactctggaagatttaagccaagcccttactcttgaggggcaactcccgccttatgacgactatcccgggcaagacgatgaggaaggagatacccatctcggccccctgctccacctcaaagatccgtccccacatgaactaccccaactgaacatagtccgccatatcccggcctcacccacacccgtaaaagaatttgttcccttctcggaagataagggaaagattgaggcgctcgaagagaggttaagagtagtcgagggtcttggcaattacctattctcggatttagcggatttatgtctcgtgcccaatatcgtcattcctcccaagttcaaagtaccgaactctgataagtacaaagggacgacatgtccgaaagggcatcttccgatgtattgccaaagat

SEQ ID NO: 262888 - DNA, 461 bp, Glycine max
  unsure (1)..(461): unsure at all n locations
gctctattcaggcttctccaanatctatatgtttacctaggatctctatcagacactatgctagatggcacaccatgttatcagacaatctcactaatatacagggaggtcaacttctccaaggaaaatctattattaatgggaataaagtgagcagacttggtcagtctgtcaacaataacccacatagaatctaaacctctacgggttctaggtagtcctaccacaaaatccatggaaatactgtcccattttcactgnggtatctccaagggttgtaacttccctgaaggtctctgatgttctatcttaaccttctgatagactacgcatgcatagacaaactcactaacctttctctttatgttgtgccaccaaaacatcaccttcanatcctgatacatcttggtagcaccaggatggatgctcanattactcctatgtccttcctctaagatcat

SEQ ID NO: 262889 - DNA, 447 bp, Glycine max
  unsure (1)..(447): unsure at all n locations
agctntatatcataggaattcaagtgtatatgataattcctaataagcaagaacgtttagagtcagtgatcccagcctccctaatgaatggcacatagaagttgggcttagtaaacgggtaacaggcaaaatggaacattgatcactcaatttttttttttccattaatgctacaatcaacagtaacttatgcaacatatgacaaagagatacatacctgaatggctagaaatgcagccatgcaaatgcagttccctatcaagcacagaactccaagatgaaaatggtcaaaccaaaggttctgtaaaccaccaattaaccatccagatggctctggctgacctttagcacttatctcattttgtgttacatgattgaattcagcatatcctatcaaagctgggccacgataaataccataaatatggcaccagagacacagataat

SEQ ID NO: 262890 - DNA, 477 bp, Glycine max
  unsure (1)..(477): unsure at all n locations
tttaattataacaatgaccatataatcacttaccattattatccagctgttatttgtagttatcttcaccatgtacttacaagaatgaggataaaaaaatagcttaagcctaaattaaaaaatgacaaattaaagcctaaattaaaactaaaaaaattaaattaaataaaaagaaaatgaaaacataaattgattgagtttaaacatgtttgaattcagtaatttataagggtgaaaaaaatgctttaattaagagtgaaaaaaaatctggattaagttcttaagtaatgaaaagtaaagaacatgttcataaattatacaaagatacatttgttgttcgatggacgttgtaaaaatcatttacactacatacactatttactcgntatatatctattntttcttctaaaatntcaatcatctcgtaattttgccaccatcccttgattttaatatatagttatcgacttataacat

SEQ ID NO: 262891 - DNA, 401 bp, Glycine max
agctcgcaccaagtaacatacaatatttttatgttaatcacagcctttcaaaacgattattcaacttggagaaaataaagacaaaagggcaaaactaactgacaatctattacaataaaacataggtatccaacactcaatcatcatacaacacacaattcacttacagatttgcataaaagtggatggttccacaccataatacatataacccaatacattgcggccttatgaatccactccaaggaaaagcagataacaggtcattaacatcaataaaatatcttctacttaccaaaaacataacaaataacatccaccaaccatatgtgtatggtgagaattaacccgcttcgcgcacatcaaatcggaatgccactttcggctatatacataagacc

SEQ ID NO: 262892 - DNA, 403 bp, Glycine max
  unsure (1)..(403): unsure at all n locations
taagctctntaaaccgcacaacgctcttaagatttgaatattatccttgcggaatcttcacccgacgaagacactgactaaaacttatcttcttcttactggacaaagaatggcaggctgtgggccaagtaattatctttccatcagaccttggatgcaactgtgatcatatacccatatcagctagatcttgacgggtattcaagccatccttcgtattgcctctaatgttaaagagcgtcccaatcacactgttacaaacatttttctccacatgcataacatcaatacaatgtctaacgtcaagatcacaccagtacggaagatcaaacaaaatggacctctatcttcatattcaactttgacatttatcctttctttgtgtcttcccaaatataggatt

SEQ ID NO: 262893 - DNA, 452 bp, Glycine max
  unsure (1)..(452): unsure at all n locations
agcttgtaagattatggagtacccatcattgtggtactaagtggcggncgggcgatggtgcacaacaagttttccacatncacaaagcgcgcataaacccaccatcccctgttgcccacctccaactgagctcacgtactcccacgtagcccatatcctcgtttctctcaacaccgggtccccatcaatcctcccaagcttccccaacatcaaagtaatacaaaattcaaacagcacaagctatcacagccaagcaaaacagggaaaaggcagaaaactctgcccaaaacaccaaccaaaatcacagcttttcacataccaataccccagaaacatttccttcgttccagttcgttaaccgttggatcgactcgaannatttactggaaatctctagtacataagcctacattnntgaccgtgggatctactagaanacacccagaactcat

SEQ ID NO: 262894 - DNA, 476 bp, Glycine max
  unsure (1)..(476): unsure at all n locations
acagatgatggcacctccagactctatcccttttgtatattagtttaatgagatggtagcctggctcgggacccaaccttcgcttcacagggaagacgaaggtcccacagcccatgtacctcaacatatggaggatgagtcatctgaggccaccatcccaaagccatttgatatatgagaagaggaagaggagacacaggtgagacaggtagctgctaccactcctgagcgatcccttgaggctacttcaaagccttctacaccagtggtaaacctaccctcacctcagcctgcagcagacccctccactcctcttctatagatgccaaaggactcgactacaccagtcctagctatggacacttcttctccaactactccagtgcttcagctgacacatgaggaggacggtcagacacacgatacccatgaccagtcacaggaattnttggtcctgatgacaacttttgcttttt

SEQ ID NO: 262895 - DNA, 380 bp, Glycine max
agctaaacattagaggcgagtgtttcgttatttacaggactcaatctcacatccgagtgaaaagttaatgtcgtatgaattggctcaaagcgtaaacatacaactctgagcgtctcgatatattacatgactgaatcatacatgcgagtaaaaagatattgttgtagaataggttcacacgttcaagattaaatttcgagcgtctcgatatattactggacttactcagacatccaagtttaaagatatagtcgtttgaattggctcagatctataagattcaattttgagcgactctatatattacggcactcaatcagaaatcctagttaaaagtaattgtcgtttgaattggctcacaggagcaatcattaatttta

SEQ ID NO: 262896 - DNA, 447 bp, Glycine max
  unsure (1)..(447): unsure at all n locations
ttgagccaatgctaacgatcataacgttttactcggatgttccatcgagcgccgtaatatatcgacacgctcgaaattgaatgttgaagctctgagccaattcaaacaacaataactttctactcggatgttcgattgagtgacttaatatatcgggaccctcgagattgaaagttgaacctctgagcacattcagacgaccataactttttaatcggatgtttgattcagctccggcatatatcgagacgctcgaaattgaattttgaacctgtgagccaattcaaacgacaataacgttgtactctaatgtctgattgagtctcgcaatatatcgacacgctagaaactgaatgttgaatctatgagccaattcaaacgacaatcactgtntagtccgatgtttgattgagtcccataacatatcgagacgctcgaattgaatgt

SEQ ID NO: 262897 - DNA, 333 bp, Glycine max
  unsure (1)..(333): unsure at all n locations
gcaaattatacccttgtcacaagcttgtgttggcttaatctaacatgaccgtgctaaagtcaatcatttgaaggatttaatttgaccaattgagaagcacgatcattccactngtagcatgatctacaatctcgattcggtcacttacaagagaagcacgactatgctcaggctctaaatgactttgttctagtttggggagacttcatctatcggcagacacagatcatgctacttctcagagagtgtttagaaaaggatcatgaccatgctagatttaagtacgattatactaaactcgaaatttgaattgagccccgttctagcacaatt

SEQ ID NO: 262898 - DNA, 449 bp, Glycine max
agcttcctcacttgtaacttgcgcctaaattcatatatcatggttaacacttgttaaagagttcccttggccttctttggtctagcccttggcataagtcctccaagtccttctaaaggatccttgcccttggttattgccatgtcctcatcaaaaggggcccaatgagcgataaagccttattctattcaccaggaccttataagtgactttgaacaacacattacaaagactaatacgtcaacactctttcatattaaaaatggattcaatcttatggaaaggaagaattacagtctcaacaagtgcaagactaaatatccctatagaaaatgcagaagcaaccaaactccacacctcatcctagaccaagttccaataaatacaaaaaagataggctgacatccattaagtccaacatatttataaggattcatggaaaacatgct

SEQ ID NO: 262899 - DNA, 414 bp, Glycine max
acttcatcataattcactatgttttgcgatgatacggccatgagcatgaattaacaactccttacaccccgtcacataatggggttcgtgaaacaaaaacattgaagataacggaaatggccaaatgaatgcttcatgaaaaagggctacctaaggaatattaggcagaagctgcgaacactgccgtattcttgctaaatcgacttcccaccaaagcagtaaatatgaagactccttttaagacttgcgatggatataaaccttccttgaaaaatcttaaagtatatggatgcttgtgttctacttatgtgccacagattaagagagaccagctagacaagaaagctgaacatgggactttgtgggaataggcagtatcaaagctatagagtttgcacctcacacacgaaattt

SEQ ID NO: 262900 - DNA, 461 bp, Glycine max
  unsure (1)..(461): unsure at all n locations
agcttgtccatgttgtaatatgaaaatagcttctataaattcataaacttattcaaacaggatcatactccagcattgtttttacaaccctattgagagaagaataacagcactgttagtgcattcgtgtcattaaattcgtaaaagattcagttaatgccatcaacaagaagctatttgaggtactgctgcaatcaaaccattatctactctcgcagatgttccattccccatgtttcttggtcacagtgcgatatcatagacacaaaaaagaggttgaatttggctttagacttggtcaagagtgaacgaaacaaggaaaggatatataacattggtatgtggaaagaaacaagaaagatgacggattcaaatttttctaactgatatttttaataaaactaataaattaacattttcaaggaaagggaaacactatntcctanagctgccacatgaca

SEQ ID NO: 262901 - DNA, 422 bp, Glycine max
  unsure (1)..(422): unsure at all n locations
tattttctacacaaattatgtggatcttctttaatatgttttgncttaaaaattcaaaataagctaattaaaacacttaatctcaataaattcaggaggtgcagctcaagtgaaaggtaatgcgggtgtctatttctatgttgctctttttttctttctttttttctttctataattatcattattgtttaatgttaatgaatggtgttcttgattggatattatattattgcaaataagctatagatgagtggggattcatgttatggtacattgggcatttgtcttgagcttgaaatggtgaaaaggggaaagaggaaatggaaattttgtgattgagtaagggtgtgggttatctatgtgaagatatatgttggaaaggaagattgaatctcangaatttgatggttggtgggtgtgtg

SEQ ID NO: 262902 - DNA, 492 bp, Glycine max
  unsure (1)..(492): unsure at all n locations
tggcgcatttactcccttgtaaaggcttctgccaacgtatttatattggatgccaaaggctacaaattgaaagattaagatagtttaggtaacaaacattgccacataaaataagaaggcaatttaattgtggtggtataccactagcctttctctaaagtatcatttctgagaaggggtaaaaatagcattggttgcctcattcaaggtcatagagcacattaccttgcgcaaggtataaaaggattcaaggtatttgcaaaagctatgtgcatcactcaggtcacgcaaatacctaagaagatttgcagcactactatatcagataatgccacggtcattccaccccatgttgaatgcatctcccatcagctgggctccaggagtaagataagaagctgctggcttgcttctgtntcgcattgtgcttatgttgcctttgtccactgcggctatgaaagcgtcatgaagctcaagaggaatctgcattaa

SEQ ID NO: 262903 - DNA, 464 bp, Glycine max
atccttaagtcacctgaggcatgcaagctcactccatactttcttgatattaattcttgttataatgtgtccaacgagacagcttggcaagcactcattgtagctggaacatacttagcttcacatgttgataaagccactatggattgcttcttagaactccatgatattggtgttgcaccatacatgaatatgtaacctatagtactctgtctgtcatctctgtctcctccccaatccgcatcagtatatcccactaattcctctgagttgttgttgtctttatttggaaatagaattccagtattgatggttccttttatgaaccttataatcctcttagcagttaggagatgaagaattctgggtcttttcgtatatgtacttaccagcccaatagcaaattccaaaatatgtcttgaatgacacaagtacctgagagaaccaacaatatagttgaactc

SEQ ID NO: 262904 - DNA, 492 bp, Glycine max
  unsure (1)..(492): unsure at all n locations
gcttcttcgttatccttgctcaatcctgaatttcttctacattgtgtaactcaattcttattaaattaggtttagcagccttatgaaattgttgtcattgaaacaagagttcttcaacatcaataggaatcattgcatcgctaccatatgctagccaaaaaagtgtttctttagttgctcattgacgtatacaacggtatgcccacaaaactcccaacagcttcgacccatgcttcttttgcttatccaagctatttttcaactcatcgaggataaccttattaaatgctttggcttgtccatcggattgagggtgttcaattgagctgacttgatccatttggcgaagtaatcgaccacaactattangaacttgcattgccctttntccaatggaaaggctacatggatattcattccctacatggcatangttcatggcgaactaatgctatgaagctcatctacctactaatgtatagattaccatta

SEQ ID NO: 262905 - DNA, 494 bp, Glycine max
  unsure (1)..(494): unsure at all n locations
tactcagcttaacattcaatttcgaatgtctcgatatattacgggactttatttttcttacgagaaaaatgttattgggcgttgaatttgctctgagcttcaacattcaatttcgagcgtctcgttatatcacgggacttaatcagacatccgagtaaaaagttattgtcgtttgaatttgctcagagcttaaacattcaatttcgaatgtctcgatatattacgggactcaatcaaacatacgagaaaaatgttattgtcgnttgaatttgctctgagcttcaacattcaatttcgagcgtctcgatatattatgggactcaatcagacatccgagtaaaaagttattgtcggttgaatttgctcaaagcttacacattcaatctcgaatgtctcgatatattacgggactcaatcaaacatacgagaaacatgttattgtcggttggaattgctctgagcttcaacactcaatttcgagcgtctcgttatat

SEQ ID NO: 262906 - DNA, 363 bp, Glycine max
tcactctctgaatcaccctcactccgagtctcataccaatcaaaatgtctccagacggcaaccatcatgctagaaacatcctgaagtgaaaagcaccgaatcataaaccaatccacggctcgtcgtaccaactcggcctaacttcccaaatcaatcctcgccctcagcgaatcataacacacatgtagaaatctccgaacaacatcactgacgtcagacgatctccaccggaacacacgaaccatgtacgctgtgggcactcctacattcttgtacgaaatgacatacccacctcttagtccagggagccgactaacaaatccacacagcagctgagcttacacaccccacgatctcccaacg

SEQ ID NO: 262907 - DNA, 451 bp, Glycine max
  unsure (1)..(451): unsure at all n locations
agctntataagaaatcccataagacctcgttaatgganaatgagctgaaaaatgcagatgctggtgaccaagtgcctaaagaagtggtacttgaagttgtcaaagatgcatctgaagcaaagcaacaccaggttaaaatagctgaaagagttgaaacaactttggagaccagttgtgaaatcttctataccactttttgctaaagagaagctgagcttgaaccagctatgatgtatgagcagatagttgaggaagaaaaaagttcttgaagaagctatggtgcaatttgttattgaagcatctctttctgaggaagaagagaacatagcagaaatagatcttgttgcaactcccatcagacaaagatctatacagacacaagaaatgttgatgatgtcttatttgaagtaatggacaaagataagttcacacgctttggagctatctattg

SEQ ID NO: 262908 - DNA, 471 bp, Glycine max
tctagattagggtaccagatgaccattgccccatttatttatcttggaagaagtgcatcaacaacttctcatccctggaatacgcccccatcttccgacaatacattttgagatgggtcttaggacaagtcgtccctttgtacctatcgaaatcaagtaccttgaatttcggggggatgacgacgtccgacactaagcaaagatcaatcatgtccgcgaacgaatagtcgtcaaagccttcaacagccctcaatccctcttcgatgagatcgagtttcttcttttcttctgctgccaggggtggccctcctgcggaaaaaaataatggctgtgttgggtggtttcgaggatcttccgtgagggtgggctgaagtagtgcattgggtgccggcccctctgcggtgaacggtgagtaagaatcgatgcctccctgggcatgctctcgacaatccttgttgacctcatctgact

SEQ ID NO: 262909 - DNA, 283 bp, Glycine max
aagacatgatacatgttttttcttggtctggctcaacgataagagggatggcctccattatctccatgacacatatgccaaaatgatgacttgagaactccacgcaaaagctggtcatgcacgtcccctatactgacactcaacagccaaaacttaatgggcatgtgatgctatggctcacgacacatttcctctatgttaaatcaacccaatgttgccaaaatacgttcgtttatcaattggagcattcctccaagatcatttcaggcggccgaggaaattt

SEQ ID NO: 262910 - DNA, 451 bp, Glycine max
atacttcacaaaatatatgtatgtgtgtttatgtagtgaaaatgccttagatatgcatgtatgtaaacaaaagaatacttcacaaaatatatatatatgtatgtttatggagaaagataccttggatatgcatgtatatagcacaaataccttacaaaacatatatagggatgtttaggtagcaagaaaccttggatatgcgtgtttatagcaaaaatacctcacaaaaatatacacatgtttaggtagcaaaatacctcatgaataaaaaaacaaacaatccacctcgactaagaaatttacaaatgataaaaaaggaaaagacaaataagttggttagcttgaaaaccgatatgctcttgaaaagagatgactctccacttttcgttgaagaaatactgatcatcactaagttttagaaatgtgtatacacttgaaaggtggatgctgt

SEQ ID NO: 262911 - DNA, 426 bp, Glycine max
agctagcctgtgcgagccaattgtttatgtttaagtctcaactcgcccaagcgagctgtcatggtcttaaatgctttggtttttgaccaactcatatactaatctctttttatcaaatatcacttgagatcgtttcaaggtccaatgccttaacgattctcctccgcttttcaaaatttaaaacattatttcaaggtcccacgccttaaacgacctcttgcttgcaattaaaatgaatcttgtaaaaacacaaaaatcaatttaacacacaaacattccgaattaaagaactccataggcctgaattccttatcgcacctgaggatacgtacgagcaaagaccatccccttgtcgacccccataatatagtaaatatgcgatgggaaaatcaattatattgtagctacgctttcgcctattcaatt

SEQ ID NO: 262912 - DNA, 448 bp, Glycine max
agctcgcattataaagtaatatacttttattactacgacaaagtagttctgacaaataaaacataatactaaagaattaaaagaatctaactcaattgactgactaaagcgcatcgattattataaattctggatacctatccttaatatttatgaatgaaaaaaatatgtaattacatatttaacatccaacttctattattatgtgaataatatcctttagattttatttgtatgaatctgattatctaaatgttttatatttcattcattttactgatgttaatgtgacactaaaaaaattatttcgtataaaatagtgtcgttctattaccaacaacatgataataacatgtgtcaaactaagaacttacaataatacaattcactgaaaaagaactcggatgcataaactcataacatgatgaacatcgagtgataaaatatg

SEQ ID NO: 262913 - DNA, 474 bp, Glycine max
  unsure (1)..(474): unsure at all n locations
tagatggagaagtctaagaactgaatatcgagtccattattttgcatgactggngcaaatagaaggactttaattagttcatgcttcccattacaatgaccatagatttaattagattaaatcatactttataaccacctgatcaaagtggccatgaagtttgaagatgaatcatggatgagaatgttggtagagtgttacgcgagattggggaggggaggagagagaagacagttttttgtttaaaataattaattaattactataataagtctgatgtaactgcttagagtaaaagagagttggattttttttcctaataattctggtattagttattaataggaagaaatctgagtgcattaacaaatcatatatatatatataacattcttatttttttatattataaatacttaaaaagatactttattgatatattttaaaatattatctaattatangtgactaact

SEQ ID NO: 262914 - DNA, 344 bp, Glycine max
agcttgttgtgctacatatccttcaacacttctttcttttgtcctcaataggtctttagtgaaccttctcaacaccttcgtgtaccagctctccagaaacatccactgctgaagaactggcctcgatcactatgcttgtagtacaagatgatacttgctcagtgaaccgtatatcagaataatgctggcggatatgattttcttcactgatctgctatgatggataattcaatcttcctcttatctcaccgatgcaggtttatgactttgtggcgtatggcttcgatgaaccacctcagccaaagggttgcgctcatgcctgagtgctgcgatactccaagaat

SEQ ID NO: 262915 - DNA, 179 bp, Glycine max
  unsure (1)..(179): unsure at all n locations
gaatactcacatgatggtgatttttataagcgcaaaacggaatcgaanaatgcgaaaagtacagatcctagggctgcaaactcgcaaattccgtgggtatggcttttgaatggggggaacagaagttcttgaatgcacaaacgctcccctttcatcattttttatatatcggtgcaggg

SEQ ID NO: 262916 - DNA, 345 bp, Glycine max
tatgctggtaacatttacaacagacctcctcagcctcagctggtatatacaccacacgagaacaattatgacctctccagcaatagatacaatctcggatggaggaaacaccctactctcacatggtctatgacgcaatcctaccccccaagggtattcgatagaagactccaagagcctcgggctagagctactaaagaaggccctacgggtctcatgaacctcatgcgacacttttgagcccatgggtcaaggatggatccactcttctttgaaatattacaatacgtcgcccttcatcacgccttgactttgccattctagaccatacgttctagccttgat

SEQ ID NO: 262917 - DNA, 408 bp, Glycine max
agacaattcaacactgaagcgatatactctattttgaaatctagcaaaggggcgtttgtctgggtctgtccctgcccactaggcgaggaaaacaaccttatttatgagaaacgaagaccgagttagataagacacccgaaagagttaaacagaaagacaacaatgagccaatacggggaaatgcagtgcatatttgtctaatcgctgtacttcttagccagggaattgaaactcctttggaaaaacaatgtgcagaataccaatgccaggccttaaacactaacttatgccctaacacattatatgtaagggcaaagagatgccctttttgcatttgactgcacctgatggagcataagcgatacacattcagaaaagctttcacactttttattctttcttacacat

SEQ ID NO: 262918 - DNA, 389 bp, Glycine max
taatgctatctctagaatatttccattaaatttagtgttgaaatttgtgcattttcacgtgaaaaagaggctaagttttgaattgcaaaaagtagcagttgggctaagctcagtatttgggctaagcgcaacttcagcgcgcttagcacaaaggagaatttggcagagtgtcaacatctaagccgcacgctaagcgtgagatcagtgtgctaagcgcagcaggtgccttcagccatgctcagcgcacggctggcgctaagcccgaatccacttacttgcgctaagtgcgagggtggcgctaagcgcaacgttgcaaatttagagactatttaaaccctggtttgtgcagaattatggtagagctgataattggcatagattggcacagt

SEQ ID NO: 262919 - DNA, 441 bp, Glycine max
agcttataagaacacaatagtctttatttatccaaatatgcatgtgaattaagaagcatcaacaagaatcaagccaaagctattgtgcacgcaatcaaaggggcaaaacacaccaaatgattatgacgaaggacggctcaaattctcacaaaggtgaactcatcactttcaaattgagccttcaaaactatcatgacatgtagaggagaatcaaggatttcaattcacaaaatgtcaaaaacttctatttcaaaaaaaagaatacccatttcttgaacatatcctatgattcaaagaaaaacatgcttagtcgtacatgcacacaaaaatgacccataatattaaactaaaaatccgacgaaactaatcagcattaacaaattaacacaactaacaaattaacgaatcctacaaaactaacataaaccaaagaacacttcc

SEQ ID NO: 262920 - DNA, 366 bp, Glycine max
  unsure (1)..(366): unsure at all n locations
ctgtcatagttagtaaaaagttaatcactcgtccaaaaagtattgagaacataaacaacccacactaaaaaagatgatagacaaacatttttttgtatatcatacaatataaagactctcattntgtctttgtcatatatatgaaactaactcatcgatattgacaccaccacgaaagcaaatcgccttttgaaaatcaaaaaatttttaaatagaaaaagaaaaaaaaaactcacggagttgaatttgttgttccacttctaacacgaacataggaatcatggaatgagcaggctaaagcccacacgatatgggccttaaaattgcattttttttttttggaattaaaacttacacccttattac

SEQ ID NO: 262921 - DNA, 446 bp, Glycine max
  unsure (1)..(446): unsure at all n locations
agctngatggtacgctaagcctcacatcttatgctaagagcatattgcagaaaagtttgcgttgcagaaagtgctaagcacagcttattgtgctaagccccagatgctcactggactttacaacttcaagttgggcttaacgcgaggttaggctaagcacttgggtttttaaactcaaacgtcacatgggcacgctaagcacagctgtgcactaagcgcgccatacaaatttcaatttttattaaaaccaaaggctaaagcacttgggtgttaccccaaatacctttagcttctccctttgttaaccttgagcaagtgtgtatttctgctgcgtgtgtgtactgcttgtcagcatcttctttggttcatttcaatcacaatccaagtaagtgggtacatttccattttttattttcatccttcaaaccttaagataaatgacttct

SEQ ID NO: 262922 - DNA, 452 bp, Glycine max
  unsure (1)..(452): unsure at all n locations
ctatacaagggagcaaaagatacaagtatcattcaaggttttctatgtggtcaaagagcttgtgtctatacaattcatggccttcatcaaggtatcattcgaggaagatttcagagcgcaccccaattactaagttcacccccccttttcgtactttacggaaaagttacagaagccttatgggagcgtttcagacttgattntcctcttttttctcttccctttcaccaatattaagtgaaataagataactcaaggttttcagaaattttacggaagcattacggaagcctcaaatgctatattttaacaaaatggaggtgattgccgcccagaggcttcttgaggaagaatcctgaatgcaccccataattgataagttcacccctcttctagaatggtttggatgaaagttcctgagcacacaccccgtgtttgaataagtcacctgc

SEQ ID NO: 262923 - DNA, 460 bp, Glycine max
agcttagttgttcaaacaataagcttatattctgtcttaaatggaatcttgctaaattggcttcaacacaaattgagcttgataaattgaagcaagaaaatgaaaaacttgtttcaagttataaagccaccaattatgtttgtgcttctacatctcttaatatggataattacaaatctttgctagatgagtttgaaaagtttaaaaaggattaatatgaagaacgtacaaagttgcaaactgaactttcatgtcttaaagatgtttttagaaaaatgaataaacaaaagagtgatcttaatcacttacttagtgtgcaaaggcatactaccgataagaccatgttggggtataacaagaaaattgacctttctaagaaaaccaagttcgcacccctcaaataggtgaaaacaaagtcttcaaaaagaaaagcatagtacattctaagcctaaatcaaag

SEQ ID NO: 262924 - DNA, 505 bp, Glycine max
  unsure (1)..(505): unsure at all n locations
cattcggaccttagatactcaagctgatagatacaattgggttacttatgctcaattatcttgaataacataattcaagagagcttaagacttattttgattcagaaatccagctacaactcagcaccacaactcaacttcatcataggcatcatgtaggaaacttagaaaacaaaaaaaagagttcaacaacaagactacttctaggagatgatttagaacatgttatgaactaaataacatgcatgagttagactcaaaattcaaaagataggcaaagaatgacatgaatacatgaaaaaatatagctagaattcaatcaacaaaataaaaattcaacacaaacttagaacataatgtgacaattactatgactaaacatgactctaagacaacatggattaagtgatttacacttagatnnttgtgtatntttntataatcaatattttggaataaaattaagatctanagggtcaacacacgaatattatgaatgaaaaat

SEQ ID NO: 262925 - DNA, 456 bp, Glycine max
agcttcggaagaaagtgatgaggtacaagctcttataggcagagcttgaaagagctcgggtagtcgaagagaagttcaagtccatagccatcaaagtcttaaaagagtatgatgaactaagggacgtcaatatggccaccgctgaagccttggaacgagaaaccaagaaggcccgaaaggaagaacacgaccaaagcaaagctttgaggggctttatagggcagcaatagtgagctcaagctccgaagaggtgaaaggaatcatcacgggtcaaaggcatgatcttgaaggacgagctaaaggcttgccttaagtcgaaaagaaatttgtcccaacagttaagcgagactgaagggaatatgtgggccatcatcgataagtgcaaagagaagctaaatctatcggtgactcacgagcaaaggctagaggatgagtacgccaagatatcaccagaaa

SEQ ID NO: 262926 - DNA, 432 bp, Glycine max
  unsure (1)..(432): unsure at all n locations
actcagcttatgccagaaatgtaatttgaaatgagatgctcttttatacaccatttcctagttaaccatgcattangtaccatgttcaattatcttgttctgctggtgtgtgttttttttttttttttttagaaatgggtttatgatcccaacatggttgcctcatggtgtctaacacatgcaactaaaaatgtagtgtgaagtttcacgcttcctctttttttgtttttgttttgtagaggaaaacgcaaggatgagcaaacatgaaaacaaatggtatgcacatttgcagatcaaaaagtttgttgaacgcatatgcatgatgatgccatgactcatgcaaaatgtgaggctggaatatgataacggacaaatgcaggaacgatatgttcattatgatgttatgaagagatgcttatgcgatgcatgata

SEQ ID NO: 262927 - DNA, 272 bp, Glycine max
atacgcgacccttgcagccacttatattctaagccgaagcatcccgatagaatactcatcaccacgcgcatcctgtctctgatgtcgagacattactttgtggcaccctcctaggctctcaaaaaaattgtcctattcataaaagtcacactttaataattcattgaatctcaaacggcgagatcgaaatgaacgcatgcatcctacggcatatctccacaaaaaaaaaatacagaatagtctttgccgatgtcttaaaaatcagacctgcc

SEQ ID NO: 262928 - DNA, 402 bp, Glycine max
  unsure (1)..(402): unsure at all n locations
accttaaaactcagcttaccttgggctcttttgcccaatcggttttgtttcattttcnggatcgngaagtgcgtggctaccagtgggacttcgaaaattcaggtttgggtggacttctttctctcttaaatatcgtgggtatggggatttgggagatgtgatgggtagttttgttagttttctgcttcatgatggctattngtgaagactcttgttgaaagctcgttgaaattgccatgtttggatgagttaaacatacccattctgttttagggtttttgtgatgatgtttgcgatgtttatatgctgaaattgctgatggaaatctgttagagacgaagggtagaactaacctacggttacaaagcgagaatgtgatgttatgagtggaaaaagagtgag

SEQ ID NO: 262929 - DNA, 455 bp, Glycine max
agcaagctttggatacaagattaataatatttttgagagcttttctattagaaaaagttctatattttctgttaaaaaaattctcaaaaacaccttatattcaaagaggcctaacatgtgattaaactacttacccacttgtgaacttaccgcgcagtttggaatgggaagcgcgttggaaacgctatgtggacaagcttacggagcggggcaagtgcacatgttgggagtgtacatgcagcgctcgtgggtgattgtgaacgccaccgcgatcctgctgtcgctcctctacatcttcgcggggcctatgcttagagctataaggcagacagaggcgatttcggcagcggagggggagttcgcggtgtggatgatcccgcagctgttcgcgtacgcggtgaactacccggcgcagaagttcctgcaggcgcagagcaggatcatggtgatggcgt

SEQ ID NO: 262930 - DNA, 365 bp, Glycine max
  unsure (1)..(365): unsure at all n locations
gctggagctgctgcacatgatgtccaacgctatgtccaagaataaaatcgggctgcacaatgcataaagcgagataaagtgtccaatgaagaattgaagctgcaggattcacgatgtcggatacaatgtccaggacatcctgcctgaaaatactggaattgctaaaagcattgaagctgccagatccacgatgtcggatacaatgtccaggacatcccgccccaaaatactggagttgctaaaagcattgaagtngcaggaaccaccatgtccgatacgatgtccaagacatctagcccgaaatactggacaaataaactgctattctttacccaacattgtgcagtagcagagatagagatcta

SEQ ID NO: 262931 - DNA, 448 bp, Glycine max
  unsure (1)..(448): unsure at all n locations
agcttnttttggaccttgaacatgttactttctcctctttcacaaccatgctatgtgctcgcgactggtccctttcctcccttcgcaacttgagttcattattgctaccccataaggctccgcgaaatttgttccggccatactcttccttgcgagccctcttggtctctcgttcaagggctcttgcggtaattgcattctcttcccgtaacccggcacactccttccgaacgtgtgtagcagccaacttgaacttctccttggcgagttttgcctttcctaactcgcttttgagagcttggacttcctcgtcctcttccggtgcttcaaaattctcttcgctgacgactnttaacttggcgagccaatctaaacctcgtatgcgaactttcagccattcgtggtacccaccaatgattgcattacgaatgcctttaagctcttgatc

SEQ ID NO: 262932 - DNA, 460 bp, Glycine max
  unsure (1)..(460): unsure at all n locations
tggataagaattggaataacgctcttgacgtctgtgagtatatatattattctgcccacatttaatttcagagcttagctctctatcttattcttatttatttctaaggtactgacaaagaatcacactctcatcccttggcaaaccaacctcttgcagattagtttttccatattctaagctgcacgctatgaagcttatggtactgaaactcctagctatcgtgttcctttggttgtggtggagtacttgtattcatgttaaagcaaaaaatgatcgtttaaagcctggcgattcactgaattnttcacaatcactaatttctaanagcggcaaatattcaacaatacattttcgtattcttgatgaagatgaatatcacttatgaatacaggccaaagataaaaattttgattggtcgaaatatgaaacctttatcaaggatatgaattttatcact

SEQ ID NO: 262933 - DNA, 438 bp, Glycine max
  unsure (1)..(438): unsure at all n locations
agctcttggagtnacacattgtttcatctcactttatttcaaaaaaagaagtcgtatgcagtcaaggtctgagagaccatacaagtttcctaacgatttctaattatgtgggccattaagtctatcatatgctggcaatagccgagaagcccatgaatctcttcgggggtggagtatgtgtctgccatcgccttggccttggctaacaagcggggaagttcttgactcccgttcaaggtaagagcaaaccggtccattcatatggttgcctcttggtgtaaagagtcgatcacccttcctctagcctctgtttccgcatatacttgatcatactcatccgcgattctatgctcgtgggccgtggctagacctaactctgcttggtacttggcgatgatagctaacatgtgggtctccgcttgcataacgctgagacag

SEQ ID NO: 262934 - DNA, 418 bp, Glycine max
  unsure (1)..(418): unsure at all n locations
ctcttagtctccgctgatgaagtatatttctggctactctatgcactcctctaatgacaatagcataacttctggcactaacatgctaggaatttgaagccatctcctcgattaaacttctggctttagtaggggtcatgtctccaagggctccaccactgacagcatctatcatacctttttccatgttactgagtccttcataaaaatataggaggagaagctgctcagatatctggtggtgcgggcaaatggcacataatttcttaaaactctcctacgatacatataagctctctccattcagatatctaatgcttgaaatatccttctgatggctgtggtccttgaagcaaggaattntttttaataatactctcttgaggtcatcccacctcgtgatggacctctgacaagg

SEQ ID NO: 262935 - DNA, 392 bp, Glycine max
cttcggaccttaaacgaccgagcagcagctttgttgccctctagaacacctccttttctctttgacctttaacaaaacacctaagaatgggccatcctccgccggctgtgaaagtatattgatgccatcctaccccacacgagcattggataaaagaccccaaaaagattgggccaaaaatgcaagaaaaagccctaaggctctcatgaaccttatggtatatttccggcccatgggctaagtatgagcccacttatcttggcacacattagattaaggctccattaatactgggccatgcaattacggctccataaagcaagcagggtaccctacaaatataggatctttcagcccttgactatagggcccctagaccacgcattgaatac

SEQ ID NO: 262936 - DNA, 436 bp, Glycine max
  unsure (1)..(436): unsure at all n locations
taagcaccgcggctgcagcttgagaccaccattggcggcttttttttgcttattctaaggatacgangaacaccgatgctggctactccatacacatccaatggtgacaaaccaagttctatgggtgctctcactgttagtggaatggcccccttgactgatgccctctctctcctactgtaataatgaactcatctatataaggagactttatacaacgaggagagatattggccctgatggaaccctcgtgattatattgttagaatagaatggaagacgcattctttttatgtgatactcgatggacgccgtggtcgacatgtactgacctacgacagactcatctatagaactatgtcctgtcaggttactaaatactgaggtagaggtttagtgtcaacaggaattaaaaccattgtttcttaagtgacta

SEQ ID NO: 262937 - DNA, 236 bp, Glycine max
gtctctgccgtgttcttccaacaaaaagaagataggtggcctccttcatttatctacaaaaatgatgaccttacctatatgtgaacgcggccactgaaggactgtggccctacaattatgcgacctgaatttgagaaggatgtggctgccaccctcgttaacttgacactaatctcagctggtcaaagaggccgaacctgtgctcttgggagagataagagcagctcctgctacaa

SEQ ID NO: 262938 - DNA, 422 bp, Glycine max
  unsure (1)..(422): unsure at all n locations
gcggcatgcaagcttccaagagctgaagaggcggnagacattttcttctgcgcnaaatttgcccgaccctaagagaccatttgaagtgtattgcgatgcaagctggctaggcttgatgtgtgtgttaacgcaagagggaagagtagtggcttatgcttcacgccaattgcgtcctcataaaggtaactatctgacccatgatttggaactggcagatgtggtctttgccttaaagatttggaggcattatatatacggtactcgttttgaagttttcagtgaccacaagagtctcaaatacttgttcgatcagaaggaactcaatatgatgcaacgaagatggatggagttccttcaagattatgattttggtcttctctacccttcacgaaaggcttaatgtatattngatgcgctgagcc

SEQ ID NO: 262939 - DNA, 295 bp, Glycine max
  unsure (1)..(295): unsure at all n locations
cccaaaaaaaaaaaaaaacggatgccccacccaaaagggnatgtgtgatcagccnaaggacgagagcaccggggacaaaacagnctaataacaccaccaaccgagcagaaagaaacgaccagggaaaaccacaagcaaaacacaggccgaaccgaaaaacaaaagccactcacaagccgaaaaagcgaagaacggaaaaaacccgaagacaaccatccccaaacagcgagagcatgcacagacagcaaaaaaaaaaacaaagcacgactaccaaaacgcagaaaaaaagaaaaca

SEQ ID NO: 262940 - DNA, 241 bp, Glycine max
  unsure (1)..(241): unsure at all n locations
tcctaccctacaacgggacggcgaacgccaaanagatacggccaacgcgcccaaccaccaagaagaaaacgcgaggatacgccaccaacgactaaccaacgaaaaccgacaaaaaactaaaaagaaggctccaaacaacgcaaaaaagggcacggaacgaacagacgcatggggaaagaataacaccccacgcgccatcaaagggacggaccgaacaaacaaaacgccacaacggacacag

SEQ ID NO: 262941 - DNA, 225 bp, Glycine max
acacgagggcacaaaagcagacatccttaacctccccacggaaaaaatggagcacccagaaggaccaaaacccaggaaccaccccgcgcacaagccacaccggagcacccgacaaaaggaaaccacgcgaagccccggcccaaccaaccaaaccacacccaagacacgaggcacccatgaccccaaaaagacggacccacgccgaaacaaccgccccagggaaac

SEQ ID NO: 262942 - DNA, 243 bp, Glycine max
  unsure (1)..(243): unsure at all n locations
agctaagaagaacttatttttcttcaccanattctttattgcangagaactaagacgcatcgacattattcaacccaacgctattgtgcaaacaatcacaggggccaaacacaccaaatgagtataaggacggatggctcacactctcacacaggtaaaatcatcacttacaattgagctccaaacctaccttacctgtacagaagaatcaacgaattcctgttcacgaacagtccacgaact

SEQ ID NO: 262943 - DNA, 261 bp, Glycine max
  unsure (1)..(261): unsure at all n locations
gcaagcttcttcctcagatccctcttgtgggactattgttgttttanactgtcctctnagggtgagactaacttaaactgagtttcgcccgtagatccctcatttaagactagactcagttcaagtagcttacgaaagtttagcctaatttagcctaagcttcatccgcagatccctcatttaagactaggcctaaactaaacaacattattgttacaccttctttaaaaccgctctcttgttcggtatcccccactaaaa

SEQ ID NO: 262944 - DNA, 345 bp, Glycine max
atcccaagctcgatggcgccttcccgtaacagcctttctatgacatgttcctgtggcgtgcattatcgcgcaagaattttcaactcgttccttcgtctgttcattcggtcattcaacgcggtaagtctcccaaacatcgaatctttcaattctttctatgtacccttagaggtcctcattggtttcgcgtgcttttattttcatttcatctactttccgtacccccttttgacgtgctttaataatttatttaagtcattttctcgccttatcaaaaataaaataaattacaccgatcatttgaattgaacatctataatttttgtaaaatgattccgaccgttc

SEQ ID NO: 262945 - DNA, 359 bp, Glycine max
  unsure (1)..(359): unsure at all n locations
catgcaagctttgagcctaaatcctgactcagcatatttctttctctnggttagaatgtctatccttaccctcagtagcaaatataattaatgaatatttccaatctataaataattaatcgaaaatttccttgatagcataaaaagacaataaggataattccccactcatatagtgggataaatgccaaatgaattaaaggaaattccccatcaaagaattgtgaaaagtaaattatgaagaatatgatcgaaagaaagctcctgatccaaggatcgaaggaaaaacacataatatgtgcaaagaggtccttacaccatacaatatatgaacaatacacatttgtctcctaatgaac

SEQ ID NO: 262946 - DNA, 439 bp, Glycine max
  unsure (1)..(439): unsure at all n locations
agctngtagcagatacgaacgacttttcattgttctcggaagtcccgacgagacccggagtatatcgagacgctcgaacattaaaaccgaagctcggatcaaatttgaacgacaatgacatttcactcggaagtcctattgagtcccgtaatatatcgagacgctcgaaatttaaaatcgaagctcgtaaaaaatacgaacaacaataacttttcactcggaagtccgattgagtcccgtaatatatcgagacactcaaaatttaaaaccgaagctctcagatacttctaacgacaataacttttcaccccgaagaactattgagtcccgtactatattgagacgctcgaaatttaataccgaagcccgcagcaaattcgaacgacaataacattccactcggaagtctgattgagtcccgcaatatatcgtgacgctc

SEQ ID NO: 262947 - DNA, 444 bp, Glycine max
  unsure (1)..(444): unsure at all n locations
agcttatatctgaatgactgtgtagctggtttatatctatattgntaatgatttcatgttgagccagggaaatggttggaactgaagcatatttgacaattttaataattatctgccaaatgtcaaagtcaccagagatacacacccacatcttcaattggaaaagcccatccatcctcttgtcattgaacaccaactttgaaagtgtggtcttccccaagcctccaatgcccactatgggaataacacatatacttttatttccaacactgtcaccatgagagtgaggttgcatcaaaagcttgataatttcttccctatcattgtcccttcctatcaatcctgaagcatcaacatgggaataagccatttctcttctttgcacaagtctgtggtcaacatcaatccttcttgaccaagcatgtttccatcagctactatctt

SEQ ID NO: 262948 - DNA, 445 bp, Glycine max
  unsure (1)..(445): unsure at all n locations
agctntgagagaaggagtctcaagacactattatgtgttcttggaagaagatgaaaatggcgatctctttctccttgaaggcctcatgcaagaagaagaaaatgaaggctaaagttttggttttcggagaggaaatggtaagaaatgatgagaagtgatgcaaagctatgcctaatgctattgataagctcacttgacaagcttgaatgaccatttgatggccatgttggatgtgccaaagggtgtcataagtaggtagttttgcttttgaatttttagccataaatgtaacaccctctaccctcacaaataacgaataaagggaaataaaatcatgcgaatttttttttaaatatattgactttaaattgatttcaaaagataaaggattcgcattcacttaatgaaaacatagtagaaattgttcgaaaaaacaacaaagtta

SEQ ID NO: 262949 - DNA, 382 bp, Glycine max
  unsure (1)..(382): unsure at all n locations
catgcaagcttgcgtgacaattcactgtgacagnctattatctattcacttatcatatcaccaaacgtaccatgagaggacaaagcacatatatgtgaaactacacttcattatatatgtgattgaatctgagaaggtgaaggtggagaaggtttcaacagaagaaaactcagctgatatgttcacaaagtccctctctagtgtcaagttcaagcactgtctggacttgataaattttgaagatgcctaaagtagattggtataagtgcagccctgaagcacaaggtagacacttgttgattcggagtcaaggcggagatttgtggtgtgtgactcaaaatcacaaatggcacaagtgagaatgttctaagaggtgctgcca

SEQ ID NO: 262950 - DNA, 426 bp, Glycine max
agcttgccacctagctcgcccaggcgagctatgttgcttcctccagaagcaaccaccttctggaggaattttctagaaggcccaagtgggcctggttgctatttgcacccacacttttactaagtacacccccatgccttttttggtgattctttttccgtaacgttacgaaactttacgaatttcgtaacgatgcttattttcttttcgtaatgttatgaaaccttacggactacgtaatcaaaccccttttggtttccgggatgtcacggaattttacggattgcgcactaacacttccttttaatttccggcatgtcacgaaacttcacgaattgcctaatgatgggtgccaagtacctcgaaatggtcaaacgatggtcgtatcccaacaacggatggtccccggacgaaattaaggtatga

SEQ ID NO: 262951 - DNA, 440 bp, Glycine max
  unsure (1)..(440): unsure at all n locations
catgcaagctatntaattaattgtacttttaaaattttgtttaaaacaattattagttgattaaaaatttgattttaaacaatgattaaacaatgattaaaatcagttaacctttaccgctcttttatattataaaatattttaaaaatattatcctatttaactacctttaaatttgagctcctagcttatgatcttttagttaacctataaactctgaactagtttattagctcaatttccaaaatatatcattttgaaaactcacatgtaattaaattgaaaatgtttagtaaaattagttgatacatataaattttcataaaaagatataataattatttgattaaaaaagataaacaatattgcagataaattaacaacgatgaaaaaaattataacttttaaagctagcttattttataagctattaaataagc

SEQ ID NO: 262952 - DNA, 433 bp, Glycine max
ttaagtcacctgccgcatcaagcttactttattcacacaatttttgtttttctcctctgagacctcttctgtctcaatgcaattgcttaacacaactgacagacattttgcctttgcacctctcttttttttttatgtacctctacacctcttgattttcctatgtttggaaaattaaaaactgttgaagttaggcaataaatattgttggttactaaaggggaacatagggaaggctgaaatcccctttgatgatacgaggcttgctttcactgtttcttgcattttgcattcctttgccgcagcgattaagatggtaatggaatcaaaaaacgaaagacggcagtgaactgaatagaaaggaacacaaaaaactacatatatttcaatttcttatgtatattccttatagagctttggtataaaaaattat

SEQ ID NO: 262953 - DNA, 194 bp, Glycine max
gcaacggacgatgcatctatagtggctaaaggaaacgttctctaagcataacccatcaattatatgccccctgaaagagctctaagagtctcttatcatgataccctaaaaagtaggtggagctacgccatatatatacattcgtgtgactactatagtgtgcctctcctatgggtggcgagagacctaaacac

SEQ ID NO: 262954 - DNA, 318 bp, Glycine max
gctataagtagacccagtttgctattctacttatctccaaattaggaagtggcatcattcattttcgtgagctgtaccaagcgatctgctcctaataaggaacatgtgaatgtaccatcaccataccaatttttctcttacactttggctttactttcaacactagcataaatggctcacataaagaattacaatatttgttttactacaaagggaacataaatggtgtattaaaatatgctcgaaagctactactaatagagtagcagcgtgcccgtgtattaagcccaaatttgagcactactattaataaatttg

SEQ ID NO: 262955 - DNA, 441 bp, Glycine max
  unsure (1)..(441): unsure at all n locations
agctngttgagagagtgagagagagatagtctcttaatatcttaaacaaaatgtaagatttcattgtgattttgaaaaaacacaacaacatctcatgtatgttgttaattaatagaaaatacacaatgaaaccataactatgttgcacgaaatataaaacataaccacatttcattggcctccaatgtatcccaaatttgtatgtgtaacgaaaatgattttttatttaatatttttggtcacaaaatcatattctgtcaaggctatttttgagaaatccaaatatatttggtgggaataacatccccgatgtaggtttttgcttatgttcttggctcaatgttttctcttatcattaacactcttttccaatcaattntattttcttggtctttctcttttatctagggtctaccataagagaaatttgttagttagaac

SEQ ID NO: 262956 - DNA, 357 bp, Glycine max
agcttcttatccattgttcatcttggcggttaagctccttcttccatggcttatatattaatggatggcgcctcctctcacctattttcttttgtcttccgctgcatcttcatggtgggaaatcaccacttaaggaccccatttaagctcaaagatacagcctccatagaagcttcatcagccagcttccatcaatggctcatgagcggacatggatgccttgtgtcttgttggaacaagtgcgaaaccaacacaacacaaatggcgggcaagcaacagatgatccgcgcgctacttcttttgtacctttcgccacatgtgtcatatagatctgccaagacagctaccaccggactt

SEQ ID NO: 262957 - DNA, 441 bp, Glycine max
  unsure (1)..(441): unsure at all n locations
agcttgaacaggtgaatattgtctgcgtgttgtgcaacaattttgaaattaaatttcactttgattanttttttcccataatgacctcttttcttacgtggcagcacatatgtgcaacgtcagttatttaaggtggagatgaggaccataggattgttaattcatgatgattttgtattgtgtatgatttggaattcttccatttttgggagcttgaccctcaggtgtagtgatatgaccaaactatggttacctcaactacacatggttaaggtggggacaccatacactttaaaaggcacagcttggagcaacatatttcccaaatcgttcttctccattttgcgctttcattggtattgcaaccattctttgtttcacgttatttgcacttctggcctctagctttgcgcatcaagctcaacattccggttcttatat

SEQ ID NO: 262958 - DNA, 462 bp, Glycine max
  unsure (1)..(462): unsure at all n locations
agcttggatagttacaaatttgtgtagtgcatatatctcttattatctctgaatacacacaattcaagagagctcttatacctatttattatttacagaatccagccacatacctagcatccactatctcatacttcatcaataggcactcatgtaaggaaaacttataataagaaaaataaagtttcaacaacaaggactactctctatggaattgatttcacaacatngttataacactacaaaaacatgcattgaattatgactcaaaattcaaaagataggctaagaatgacaagaatacatgaacaaatgtttctagaattcaatcaacaaaataaaaattcaacacaaacttacaacataatgtgacaattattttgactaatcatgactctaagacaacatggattaagtgatttacacttagattttcgtgcctttttttctatccaatatttt

SEQ ID NO: 262959 - DNA, 416 bp, Glycine max
  unsure (1)..(416): unsure at all n locations
agcttcatagcatacaatgtgctgatgaatgtttatattatttctttgacaaaanatgctaacaacttacacactattttcactgaccgtgaattagatccctatgcaaattggttatgtaaccactacctaacctctactcagaataattgtttgtcaacagttatcaagaattacaactattccacaattcaataaaaatgctcattcgtatataccatcattataaaccaaattatataaaaaattattattcttaataataaaacctggactgctcacaaaaaatttcaacaactaaattttcaaattatatctaagttgctaattatacaatatcttatataaaaaacaacatactatatatatatatatatatatatatatataactatattatattttagaactccata

SEQ ID NO: 262960 - DNA, 429 bp, Glycine max
  unsure (1)..(429): unsure at all n locations
acatcagaccacttccagtgtgctgttactactccacatggattaganggggcctatgctagtcgaaagcctcggaggaaagaagtatgcctatgttgttgtggatgatttctccagatttacctgggtcaactctattagagaaaaatcagacacctttgcagtattacaggagttgagtcttagactctcatagataaaaagactgtgtcatcaagagaatcacgagtgatcatggctaagagtttgaaaacagcaggtttactgaattctgcacatctgaaggcatcactcatgagttctcttgcaccattacaccacaacagaatggcatatttgtgaggataatcaggactttgcaagacgctgctagggtcatgcttcatgccaaagaactttcctatattctttgggctgaatgcctgaaca

SEQ ID NO: 262961 - DNA, 373 bp, Glycine max
tctcttgatattagccatgcacatccttgcaatgacatgattgtgagtgtcagatgcgttattattcacaggcattaccctgcttagtcatctagtatatctatgtttcgtgctatacactgcatgctcatgcgcatgtattctatattgcgcgcacttatgcgtgcattttctcgcattttgtcccgcaagtcggaaggttcggatcaccttcataaatgcatacatggtgcactattggaatgactgcaaacgaaccatgatgcttgaatgtttgtgagtcagaatagaccgatctctccaactcttgtgttagtataaagcatttgtgatatgcataggataagcaatccttcatgcattgatcatattt

SEQ ID NO: 262962 - DNA, 438 bp, Glycine max
  unsure (1)..(438): unsure at all n locations
agcttgtccatgttgtaatatgaanatagcttctattttttcatttacttattcaaacaggatcatactccagcattgtttttacaaccctattgagagaagaataacagcactggtagtgcattcgtgtcattaaattcgtaaaagattcagttaatgccatcaacaagaagctatttgaggtactgctgcaatcaaaccattatctactctcgcagatgttccattccccatgtttcttggtcacagtgcgatatcatagacacaaaaaagaggttgaatttggctctagacttggtcaagagtgaacgaaacaaggaaaggatatataacattggtatgtggaaagaaacaagaaagatgacggattcaaatttttctaactggatattttaataaaactaataaattaacatttttcaggaaagggaaacacta

SEQ ID NO: 262963 - DNA, 444 bp, Glycine max
  unsure (1)..(444): unsure at all n locations
cttaagtcaccgcagctgcagctttgatancctcttatagctaccgttattctttatcatcataacaaaccccacttgatgcgacatctaggaccatgaagtataatctattatgcgcatggtgcactcaagtagatcttctagaaagcctcatgcacttgcggttcatcaagtctggttgaattggcttctaaagattaagttcaattaacgcttgatctctgaaactcatacgcttggctccttgaagccataaatttgttggaagttgacgacctcttgtggtgccttttggaacattaaataaaggtatgtcagtttccatctcatagtcctgagctttttcattggctaattgagattcatcaagcttaactcaaccatgacttctcttctcccgcaagaatattccttctaaaaaaataattcctttgccataacatt

SEQ ID NO: 262964 - DNA, 380 bp, Glycine max
  unsure (1)..(380): unsure at all n locations
agcnttcttgagaaactgtgctgatattatttctacagaagctagagcttaactacacacacctctctaatagctaagtgcacctccttaagatgagaagctagagcatagctactcaccccctataatagctaagctcaccccatgacaatatacatgaaaattcaaaaaaatttcatatcttcacagactactcaaaattgcctgaaatacaaggctaaaacactatgctctactagaatggccaaaatactaggcccaaaagaaggaaaacctattcaaatatctacaaagaagagtggatccaaccttggcccatgggctcatacatctaccctgaggatcatgagaaccctagggccttctttagtagctctagc

SEQ ID NO: 262965 - DNA, 407 bp, Glycine max
  unsure (1)..(407): unsure at all n locations
gacctctaaacgactgcagcatcaagctatacaatatgttcatttgtcctgttgtactatcggagtaaccatcctgctaacttggggcacaagatgaatcgagtccatcactgtttcgtctactgccaaacatacttaggattattgatgtccttgtaactaacacttacaccttgacaaagatgctatggaccatgttgaaaattctaactgattcaacctcatatcctgcgaataaattcgcaatactttgactgtacatcattcgtatgcaaccatgctttacattggacgcattgctcatcgcctcttttccctgaaaaataaaatatatacagatgaacttatcaaaaagaaaaggataaactatactgccgccttaccgaacttgngctataactaaagaa

SEQ ID NO: 262966 - DNA, 434 bp, Glycine max
  unsure (1)..(434): unsure at all n locations
agctngtagaatggctagacatgatacatgttatgtcttgtgttggttcaaggataaaagggatgccccacattatttccatgacacacatgcaaaaaatgatgatttggaaattttatgcaaaactggtcatgcatgcgcctatgcggacgctcaagtgtcaaatttttatggtcatgtgatgctagggctcaggattcatttcctctattttaaatcaacccaatatttccaaaatatgttcttttatcaatttgtgcattcctccaagtccatttcgggcgtccggggaaattttcacagcattcacccttcaggtgtagacacgtttttttcttcaaaaatcggttatgatcaatgaattttttttcaaagaaaagttggaaatcatctcttttcaaaagcacgtcggttcttagctagacaacttattt

SEQ ID NO: 262967 - DNA, 216 bp, Glycine max
tgggagtaaaccaacattgttgtatgcaaagatgggacacttttatcacatcttatacacaggtgcacgtgtggcggttgccaagtcaccatatcgccccccagatgcaaatgaggccatgctccatttttgctttgacatgcgatcaagccatctcgctatggttggactcaatcgatgaaatttatctaattattgagcaaacacatgcttgtt

SEQ ID NO: 262968 - DNA, 414 bp, Glycine max
agcttctaatttcttgagtatcaattacaatgttgttgttgtaaattcattttcctttcttatatttggcttttgtgtctacacatagttattatatattatttgacttagtgcaaatcataaagcaaaccctatgtctatagaatgtgtgttagaaactacataatataaagatgttccaccatgcaagatgctttgattcattgtaactttggaaatgaagttagaattctgattcattgtaaattatgaaattaaattagaattattaccctaattatactttcttgtaagatgcatactgtgtttttttttaaaaaaaattcctatctgattattctgtatatgtatacctaaggatgagtgtgtttttcactcgagcaatttcactcaagtattctctcacatagtcac

SEQ ID NO: 262969 - DNA, 372 bp, Glycine max
atccgtgaaggtgatgaaatattttcacctccattggaagacagttctattgaccacctatttctggatacacttgctctaaaacacccttcactcttcatgaaagagtcattagttgcaacttctgtaaagattggtaccccttctctttcccataaatgaaattctggattcgacgccaagctttactttatcacaatacctcacatcctaggtagtgagatagtgactcgtccctacttatatgattgctgcaaactgtgtctaagaccccctcctctggctctgtctatacctgtggaaccagtcgtggtacaagccttcaaagctcgctattatgctgccaaaaatgaacctcgactcatttctgct

SEQ ID NO: 262970 - DNA, 442 bp, Glycine max
  unsure (1)..(442): unsure at all n locations
tgcaagctgttgnttaaacaataagcttataatctgtcttatatggaatcttgctaaattggcttcaacacaaaatgagcttgataaattgaagcaagattatgataaacttgtttcaagttataaagccaccaattatgtttgtgcttctacatcttttaatatggataattacaaatctttgctagatgagtttgaaaagtttaaaaaggattaatatgaagaacgtacaaagttgcaaactgaactttcatgtcttaaagatgtttttagaaaaatgaataaacaaaagagtgatcttaatcacttacttagtgtgcaaaggcatactaccgataagaccaagttggggtataacaagataattgaccttcctaagaaaaccaagttcgcacccctcaaaaaggtgaaaacatatgtcttataaaagaaaagcatatta

SEQ ID NO: 262971 - DNA, 442 bp, Glycine max
agcttataaactttatacaagaatgttgctctgataccacttgttagacaagtggcctcagatatcttaagaagggggggttgaattaagatattccaaactacttccccaatttaaaaatttatttcactttcttttcaagttatagattcccttaacaatgaacttcttaaatattaattcaaataaaacaatttgaatatgaatgtaaagcaataataaacaaaggagattaagggaagagaaagtgcaaactcagatttatactggttcggccacacccttgtgcctatgtccagtccccaagcaacccgcttgagagttccactatcttgtaaattccttttacaagttctaaacacacaaggacaatccttcctttgtgtttagaattcctttacaacaagagacccacggtctcttaatcccttagagaatgagt

SEQ ID NO: 262972 - DNA, 410 bp, Glycine max
acatcagaccactggcattgtgctggtactacttcttatggacctgatggggcccatgcaagttgaaagcctcggaggaaagaagtatgcctatgtagttgtggaagattcctccacatttacctgggtcaaatttatcagagagaaatcaaacacctttgtactattcaaagagttgagtctcatacttccaagagaaaaagactgagtcatccagagaattacgagtgaccatggtagagaagttgaaaacagcaagtttactgaattctgcacatctgaaggcatcactcatgaggtcttttgagtcattacacccctacaaaatggcatatttgaaaggaaaaacatgactttgcatgaagctgctagggtcatgcttcatgccaaagaacctctctataatctct

SEQ ID NO: 262973 - DNA, 364 bp, Glycine max
agcttgtgaggatttatggtgacccggtgttgttatgaaacaagatatgggctacgtgggaggacaggagcttagatggaggtgggcaacaggggataggtgggctatgcgcgctctgtggatgtggaaaacttggtgagcaccatcgcccaaccgccacctagtaccacatgtgatgggtaccccataatcctacaagcttgaattgaggaagtgtacaagggtgaaacatcctgcttttattccatgaccacatactggtacctagagatatgtcgcgggggtcatgagaccttggggacatcacgtggggtgctatctccaaaaacaagcttgtccaatccgacccaaccctggcatagtc

SEQ ID NO: 262974 - DNA, 254 bp, Glycine max
gggaagcaccgactccgaccaaaaaaccggaatccaacaaacggagacgcaatcccacaagagaagccaaaaaaaagaaccccaacagaggcggaagcaaaaaaaaaaaaacccaccaaaaggaaaaaaaaaaaaagagaaaaagcccgcacagacaaagaaacaaaaaaggcaaaagctgaccgacaacgaaaacataatggccaagaacaaggagaagaacacacaaaggcttccctgaacaacaacccgcc

SEQ ID NO: 262975 - DNA, 339 bp, Glycine max
cttatggataagttaatgtacctaaaatgagaagggagatgtcaaccctacaaggtattctattatagggaccataacgatatggaaggcaatttaagagctgacttgattttcagttatcccataagctaaaatttgctttttataaattgaaagccaagctctgtaaaagtaaatggcttgtcttggtaaatacacacctgaaagattttattcaaataaaaatcaaataattattaatcttgattacaggatttacataatcatactcaccaaaacactattcagaagggaaaaaatttattacatgctttttttacaactactaaacattgcatc

SEQ ID NO: 262976 - DNA, 365 bp, Glycine max
  unsure (1)..(365): unsure at all n locations
ctaaccgttgggatctttgagaagatgtctggagtgtgttcgaagcttccgttctcgagagcatttcttatttaagcattttagcctttgctttcgtgtagcttacgaaaaacaccatttcttcttctttctttcttccaaagccatttctaacgtcccaagcactttttccatcacccacagccaccattagccaccacaaaccatcgttgttctccattgaaatcccacaccgagaataacccttcaaccgaagcggaatcttccaacttggcttgcggtntcggtagagaatatgcctaatctgacctttcattntctattgagggaaacatgggtctacgcttatttcttggtagtctcat

SEQ ID NO: 262977 - DNA, 682 bp, Glycine max
caatcttattgttccaaatcaaaaaatcacttctttttttgtcgcttcaagtcataacattctttggttatataaagggagcctgaatggatcttgggggaagaagggtgcttaaaatgttggtgaaaaaggactttaacgagaagaatcatcttttctttccaaaaatatggacaggtttgatggtctttaaacctttgtttgtgaaaggtttgacactttggaaattgcaagtggatatgcacttcaatgaaatggagtcaaaaattacaaaggttgaagaaaaagtgtcttacattccttcaagcttttgatctttaccactggcgccaccattatcttagaactctatttttatattaattagaactttgatttctaaccatgttttttggctattatattatgggaatttgaacaatattacttattccctttttgcatggagagtttttaacaaaatataaagcatgttattttgacattaggggttttatagaaaatctatttaagattggtgggtcaagaattatgctttcatggctagtgtggaatattctccaaaaatggtgtaaggaagttaaatatttttgaatattcaaatattttaccactttgctttttttttttccaaggggggaaaaatgggataaatttcaaactccacgagccatcttttatt

SEQ ID NO: 262978 - DNA, 410 bp, Glycine max
  unsure (1)..(410): unsure at all n locations
tgttaactgttagatcattgtncaaattgaacaccaggtntggaacttatttctgcacattcccacagttgggatctgtgaaataatattttctgtaagagaaatgtccctcacacgtaactttcttttctcgcatatattcaaatttgtcccattagaactatgatcgcagactctttaactgttcaatcatcgtgaaatttgaacaccaggtttggaacttatttcctcatattctcatcgttggaatttgtgaaataatatctaggagagataaatgtccctagcacaaagacattgaaatagaggcttcaatcccttctccttctctctaacgcttggaaaccttagcagagcaaccagagaanaagcatgaggaatcttaggaattgctagagactctccatatt

SEQ ID NO: 262979 - DNA, 501 bp, Glycine max
gcaagctactctaccaaaaagagggcgcccatcttgcgacagtacattttgagaaggagtttgggacaagacgaccctttatacatgacgaaatccggcacttagaaatttcggggaataacaacaaccggggacaaaacgaaagaaccgtcatgactgcgaacggaaaaaccccaaaaccttcaccgggtttaaatttttcctcgaggaagaaaaaactacctcatttacttcggaagccgggggcggaccctacgaggacaaaacaatagggtgggctccgaagatgggatgaagcaacaagccgggggccggccctttggggaacgggggataaaacaagaaacccctcagacaaatactgggggcttaggggccccgaaaggccgcaaggaggtcctctttaaggacgccaaagaaaaatggaccccaaatctccgaaaaaaggggggggaaaaatccggcgcgcaaatcaaaaaggtgaaccctctgggggaaccc

SEQ ID NO: 262980 - DNA, 499 bp, Glycine max
  unsure (1)..(499): unsure at all n locations
ctataaaactcagctaaatgataattacattgggtttaaatatatcattgaaagcaatgtgaaatgacaagcggctaatgtttccaacaaattaagctagtaatgaccacaattgaatccgaaaaggcatacccaatcatggcaaccaacaagaaaatgatcagcgcctccagttctgttccagaaagtatatttccctgcaatcatttcaacatagttatgcagatactgaaccaggttcttatgattatgtgaattctgcacatacaatgtttcctctagcattcgagaactaaaaggtaagtaaaacaagtgggccttgtttgggtctctagttagaaatctcttattnagcttccattgcttcataaaccatccttcagaagcataaagtcctgtgaaaaatggggagtgcattattggtctagctccttctctgtatacatacactctgagagtctgttccattaattcatcagctctaaaaattgacaatcat

SEQ ID NO: 262981 - DNA, 404 bp, Glycine max
agcttaacaaaaacccaaggcccacctttggtaccaaaacccaaggtcatcccttggtacatacttctaccaaacccaaggttaccccctttggtgtccttcacatgcagcaattatgactaccaccgtcaagggtctaagttccaccaagaaaactaccatcccattatttggccagacttttttttaaggccaagccccacttcttctttaaacatcagggttatacttttgcaggtcaagaccttcaatcaagggcagctcacactcactccttataacccatagagtaggaactcaataggttaagcgacctatccccacattggttaggcaagacttataaccctgggcaaatcaaacacaactccttccaccatcatgggagaagcttccacaacaga

SEQ ID NO: 262982 - DNA, 344 bp, Glycine max
  unsure (1)..(344): unsure at all n locations
aaagaaatttgtcccaacagttaagcgagactgaagggaatatgtgggccatcatcgataagtgcaaagagaagctaaatctagcggcgactcacgagcaaaggctagaggatgagtacgccaagatatcagcagaaagggaagcaagggaaagggtaattgattcattgcaccaagaggcaacaatgtggacggaccgatttgctcttactttgaacaggagtcaagaacttcccccattgctagccaaggccaaagcagtggcggacacctactccgcccccgaggagatccacggacttctcnctattgtcagcatatgatagacttaatggaccatatga

SEQ ID NO: 262983 - DNA, 331 bp, Glycine max
atgtctatcctatatgccgtgcacaacgcacataggtcacgtccgcacagagtctaacaactatgtgcatttgtcaactaagctcaatcgtttgccttataccataactgagctaaggtgagaaaatccaggtcatagagatgtcgattgagcaagaataatggaataatattaaaatacgagcgaaccagtcaaactccccatactttatctgttgcgctcctgtgcaaaacgtaaagaaagggtctgatcaataagtcactctattttaaaccacagccaacgaaacgtatgatcatggctcacaccgtttttaatggatcctcacaat

SEQ ID NO: 262984 - DNA, 420 bp, Glycine max
tctacttatgtggcagggcgggcttccttcactttcttgtctccaacgcgagctttgaccactgttcttccttcccgcgatgcttcttttcatgtccgcctgagtgggcttatagcctaaaccatacttcccacgatttccttgggtatttatcaagctagttatgccgccgttgtctttgcctaaacccatcccgggttcataaccgttccccaacataactcgggccatcattaccgctgcatcggacagacaacgctgcccaaagagggagtccacggaggaaatgctgaccacctcaaaagactggaaagcagtttctaacgattcttctgcggcttccacataaggcatggaggatgggcagcttaccaagatatctttctcgcctgacacgatgaccaagtgcccctccactac

SEQ ID NO: 262985 - DNA, 307 bp, Glycine max
tatcacaatgcggcggcataaacgagcaccagaaccactccacgccaattcatccacaacaccacattagcaactaagcctttgccgaatacacgatgaaaggatgagaaactaagacaatgccaatattttcagaagaatgaataatgaaggggttagaatcatcaatggcagtcatggccatgagagagagaaaaaagaaccagccaggcatcccaaaggtccccttaaaaaaatgattcataacgaggaggcctatccagttatataaaaacttaatcattaatgatatccgtggccatgacag

SEQ ID NO: 262986 - DNA, 379 bp, Glycine max
tgcttaaagtatgccccagtttttcaaccctttgagagggttgtcgaagttattggcaatctaaaattgccattccttggattatagggttgaaccaaagcttattcttttacataaaggttcatcaaggtctagttgaaaattggagagttcccgcccctcgcaaaattgtggggtataatataaatttgggtcaacattactggtttcgtcttctgggcaaacatattttaggattgtaatgtccttgtaccttcagtttaccttgacaaatatgtcatggaccatgttgaaaattaaattgattaaccccatatcctgcgtaaaaaagtccaaaactttgatggacaacattcgcaagcatacatgcttttaattg

SEQ ID NO: 262987 - DNA, 480 bp, Glycine max
cttatgtgaaaggatgtgactcttcacatttgaatttgaatttcaacattcaaaggcactggtaatcgattaccaaaacattgtaatcgattacaactttttgaaattaattgaaacgttgtaaattcaatttgaaaactttttcaaaacaattttgctactggtaatcgattacaacaatcttgtaatcgattaccagagagtaaaaactctttggtaaacatgttttaagagaaatcatgtgctactcaatttttgagaaaaacttttcatacttatcttgattatgccttctcttgattcttgaatcttgagtcctgaatcatgaagttgattcttgagatcttgaaccttgaatcttgattcttgactctaaaccttcttcttgagtctttaattcttctagattcttatcttgaactggtgagatggtcttgattcacttgagttgttctttgatggatctttgattcacttgag

SEQ ID NO: 262988 - DNA, 677 bp, Glycine max
gcagcttgcaagcttgcctcaggtcaaaaagaaatttgtcccaacagttaagcgaaactgaagggaaaatgggggccatcatcgatgagtgcaaagaaaagctaaatcttgcagcgactcacgagcaaaggctaaaggatgagtaccccaagatatcagcagaaagggaagcaagggaaagggtaattgattcattgcaccaaaaggcaacaatgtggatggacccaatttgctcttactttgaacaggagtcaagaacttccccgattgctaaccaaggccaaagcaatggcggacacctactctgcccccgaagagatccacggacttcttagctattgtcagcatatgatagacttaatggaccatatgattaaaaaccgctatgaagattgatttgtcgctcaaacttgactagtataaccttttaaaaaaaggagttaacccacttttttactcaaaaatcatggggaataagacactccccatttatttacaacatccattgattgtggggctcgcctttgtactggaagccaaagggccaatatactttttaatagtccaaaagggactttgccccacaaagccaagaaaaagaaaaaaaatcccaactctcctttccaaaaagcttcttatatactctcaaaaaacttttcttgagataaaaaaaaaac

SEQ ID NO: 262989 - DNA, 416 bp, Glycine max
  unsure (1)..(416): unsure at all n locations
tcccttgataaggaagacaattagaagggcaattaatctagttggatttatctatgcccattctaataccttaagtgtgtcgagaaattttacaaacaagagggaattggtgagacatgctattactagacttgccacttcttatctaaccttggaaaggctccacaaagagaaagcaaatattagaaagatgtttacttctgatgaatggaccttgaacaagctatctaaggagcctaagggaaaagaagctgcaaaggtagttctcatgccttctttttggaatagtgtggtttacattcttaaagtcatggctccacttgtgaaagtgcttcgtcttgtggatggtgaaaagaaaccagccatgggctatatntatgaagcactggacaaggcaaacgaaacaattatcatgt

SEQ ID NO: 262990 - DNA, 498 bp, Glycine max
agcttataaaaacaaaatcgcctcaatcatttccaaaatatgcatgggaattaggacgcatcaacaagaatcaagccaaggctattgtgcaagcaaacaatggggcaaaacacaccaaaatgattatgatgaaggggggctcaaatccttcccaagggaaactctatactttcaaattgagctttcaaaactatcatgacaatggaaaaggagaataaggatttcaagtcacaaaaagtcaaaaaactttatttacaaaacaattacccatttcttgaacatatcctataattcaaagaaaaacatgccaagtcgtacatgcacacaaaattggcccaaaattttaaattaacaatccgacgaaacttacaacatttacaaattaacaaaaccaacaaaacttgcgaaaccaaaaaacactccccccccatacttaaaacaaacaatgtcctccaaggtgcccaatttaaagaataaaaacacattaatctccaataa

SEQ ID NO: 262991 - DNA, 463 bp, Glycine max
  unsure (1)..(463): unsure at all n locations
gtgctacattcgcatggaggttactcatatacaggttaccaaccaaggtaaatctgcggagaaggcaacttgagttagatgattntctttgtcctttttgcatatctacggaggagagtgcaggtcacctatttttccattgtgacaagatactcccaatctggtgggaatcgatgtcttgggtgagtttggtgggcgcctttccgcttcacccaagacaacattttctccatcacatttatggcggttcggagaaaatgatggctaccagatggaaatggtggtagctagcattgacttggtcaatttggaggcacagaaatgatattatcttctncaatgttatcttcaatcccaacaaactgatggacgacgcagtgttcttactatggttgtggctcagacatctggagaaggatntcgactttcactacaatcacattgtctaccaatatcacggatg

SEQ ID NO: 262992 - DNA, 440 bp, Glycine max
  unsure (1)..(440): unsure at all n locations
tctcagcttctcaggaagttctctctagacagcttctcaaggaagctacctattctatatatagaagcatgtgtaacacttgttgtactttgatgaatgagagtcttgtgagacatacttcaaagttccacttctatacctgttttattccttcaatttcgagctccccccctctctctttctctccctctttcttttcctgcattgaagcatcctctccaagcttcttatccaaggctcatcttgggggtgaagctccttcttccatggcttattccttaatggatgagcgcctctctcacctattatcctttgtcttacgctgcatctccatggtggaaaagtaccattataggaccccattgaagctcacagatccagcctccatagaagccncacaagcaagcttccatcaagtggtaatcagagcacaagaagag

SEQ ID NO: 262993 - DNA, 729 bp, Glycine max
taactttgggagagaaaaataatttttgtattttaaaaagcacgaaaccacacctgggtgtgaagggtaaaaaagaaataaacgctattctcttttgtgggggtaaagagatttcactttaagattttaaatattattttcagagggacttttataccttggtgaaaattttcacagaaagagggtttttttttttttttatattttccgggtaaaaatataacggggagaataggaatattgggttaattaacccctttgggtatttatttttaaatattttaccccccaaaaataaagggtggaggggtttcaacttgtaaattttgtgttcgggcctggaaaattaaaaaagaaaaagaaaaggcgtggagctttaattcaaaatataacggtttgggtgattataaatataatattacaacaggtctgggaaattggaaagcaaaaagttcccagcctgggtgggggtttaatattaaacaaccgggtttttggcaggaaactgaaaataattgataaaagcccaaaaaaataaattttcactcggctaatttttattaaactttaaaaattattaatattttaaaaaaaaattatgggggttaggataaaattttaaaaggtttttaatttaattaaaatcgtaaacctatccatgggaaaaataaaaggggggataaaaatatggtaataaaaaaatggattggggaaatctatatttaaaaa

SEQ ID NO: 262994 - DNA, 470 bp, Glycine max
  unsure (1)..(470): unsure at all n locations
tctcttggaccttaggcaaacctttagctcatccttcaagatctatctgtctactcgtgattggtccctttcctctctctggagcttaagctcgctgttactgccccatagagcccctcagaatttgttccggccgtattccttcctacgagcccttttggtctctcgttctaaggccttggtggtagctttatttacgtctcttagttcggcattctcctttcggatcttaagagctgctgatttgaacctttctttgactgattgggcttgctcgagttctgccctaagggcctgcacctcttcgtcttcctccggagcctcaacttccacccctttagtggttctcaaacttgggagccaatccaaatcttgaaagtgggctttaaccacctacgatagctgccgatgagcccattggtattgcctatngagtccttatccttcttttgcaccatcntccatgcctt

SEQ ID NO: 262995 - DNA, 449 bp, Glycine max
gaaagaagaatgcaacctagccctacgacggggagggcgaacaccaaaaacataggccaaaggcgaacgaacacaagaaaaaaaaagcggggaagcgccaccaacagtacatgacaggaaaacgcgacaaaaactaaaaagagggcccccaaacttgaaaaaaaggggtacgggagaataaaggcacggggaaggaagaaataacccacgcgctaaaaaacagggacgggagcccaaaaagaaaagagacaaaaaaggaactcagaaacaagaactcaggccaacaaaaatattccaaaagacaaagggggaaaacaaggagagaagcagaacctacgaacacaaaagggcaagagggaagaaaacccaggagacatcaaacataaaagataggggggcaaaaaggaagacaaggaaatcacgacaaaagaaatcaaagccacaaaaaa

SEQ ID NO: 262996 - DNA, 420 bp, Glycine max
tcgagtaccacaatcttggtttcgattaccagagagtaaaaactctttggtgaaaggtgcttgagaaaaattcatgttctactcagtttttgaaaaatttctttaatacttatcttgattgaggcttcttttgattcttgaatctttagtcttgaatcttgatcttgattcttggaacttgaatcttgaaacttgattcttgattcttgaaatcaaatttcctgttgaaccttgaagggttcttgattcaatcttcaactcattctttgattcttgagatcatcatctttgttatcatgaagtgctcttgactcttgagctttctgttatcatctttggtataataaaaaatctttgaatccatcttgattcatcatgaagctagcttctacacttgttggccgctcaactgcccattca

SEQ ID NO: 262997 - DNA, 372 bp, Glycine max
  unsure (1)..(372): unsure at all n locations
ctcatttaagactacgctcagcttanatagcttaggaaagtttagactaatttaacctaagcttcatccgcagatccctcatttaagacgaggcttagatcaaacaacattattgtaacaacatattngaaaccaaaacttaattcgcagatccctcatgtaagactaagttttaatcctgcttcaatcaagctctaaggcaataatacatttcccaatgctaaagtcacctaactatgcacaccaatgggtgatcagaccaagagcatacagaatttaagcactgaaagaaacattgaacaccagaaacacaatcgattagatattaaagtaattacatcatttgttcttagacaatgcacaagggtgtta

SEQ ID NO: 262998 - DNA, 272 bp, Glycine max
  unsure (1)..(272): unsure at all n locations
ttgtttttacctaagttctgacaggctcgtatgcagactactggtctagcacaaaagaattgcatatcctttgacttatggccggtaatgtgacgagatgagaatagactggagcacctgctctgacgttcctcggataaaaacactgcggaagaggaccctganggtcgaattggcgctgcggatgcgctagtggctccagaactatgagctcttgaagccgcctcggatgcagcataaccccttcgattctatgacgattctgccatttg

SEQ ID NO: 262999 - DNA, 483 bp, Glycine max
  unsure (1)..(483): unsure at all n locations
ctcagctttacanaaggttcatcaagtcaagttgaaatatggaattttccatcctgcacaaatggggcaaaagatgaatcgagtcacatcactgcttcgtctactgccaaacatatttaggattattgatgtccttgttacttccagtttcaccttgacaaagatgtcatggaccatgttgaaaatctaaattgattcaaccccatatcctgcgtaaaaattcgcaatacttcgactgtacatcattcgcatgcatccatgcttttcattggttgcattgctcattgcattctttccttgaaaaataaaataaaataaaatgaacttatcaaaaagaaaaggaaacgctttacggcgtccttaccgaactcgtgctatagctagagtaatgggtgaagcacagaaggtgcaagagaagatgaacgccgaaaatggaggccataaaagagcaaatggccacaatgatgaaagccatgatgagca

SEQ ID NO: 263000 - DNA, 580 bp, Glycine max
tagcttgccagacccctacacgataaatggttgtgttcttgactttattaacaggtaaatgttgcgttcgtaataagttaaattggattatgatgcaaacatatttttatctctatgttcaccccatgtttttagggctggatatacgagcacttttccagtgtgcattagtgtgacactgaagatgcctatgctgagataaacccaacttgcctaccaatggctgattatgaaggctacatgagagggattagaggagcgtcttaccgagcacgtttagatgcttctgaagatcacggacatgtgttggatgccctacacttgaccactgaggagttaagggccttgaacttattacctactttccaaggtagctgaaaaggggtcctattgtggactatgttctcttaatagggtggtcagaaaatttgggaaatttaacaaaccttccgcccctatattgcttaatttctcttaaggaaaaaaaataggagatagatttttcaaccagtatccctccgggtaaaaattaggtagacctgactatgataaacaaaatacaacaggggtttttaaaaaa

SEQ ID NO: 263001 - DNA, 345 bp, Glycine max
  unsure (1)..(345): unsure at all n locations
accaccaagatgagccttggataagaagattggagaggatgcttcaatggaggaaaagaaagatggagagaaagagagaggggggagcatgaaattgaaggaagaaaaagggaaagaagttgaacattgagttgtgtctcacaagactctcattcatcatagttacaacaagatttacacatgcttctatttatagactaggtagcttccttgagaagctttcttgagaaaacttccttgagaagcttctctgagaaaacttncttgagaagctagagcttaactacacataccnctctaataactaagctcacctccttgagaagattctaatgaactagagct

SEQ ID NO: 263002 - DNA, 59 bp, Glycine max
cataaaatggctgatactcgcggaggataagcagggacacctgggtcaataggtcacaa

SEQ ID NO: 263003 - DNA, 166 bp, Glycine max
gacacccattaactgtctccatcgctgcactgagggttgtgaatactgcttaagggcttagagtacctatcagatggtatgcttcttcgcggcccgggtaataagaccaacgtctctaatgatatgtcggcctcatggaaaggttggtcagatattgtacctggaa

SEQ ID NO: 263004 - DNA, 541 bp, Glycine max
agcttcttcctcagatccctcttgttggactatgcccgatttagacagccctcttagggtttagactaacttaaactgagtttcgtccgtagatccctcatttaagactagactcagttcaagtagcttacgaaagtttagcctaatttagcctaagcttcatccgcagatccctcatttaagactaggcctaaacctaaacaacattatttgtaacaacataattaaaaccaaaacttaatccgcagatccctcatttaagactatgttttgatcctgcttcaatcaagttctaaggcagcagtacatttcccaatgctaaagtcacctaactatgcacacaattgtgggatcaaaccaaaagcctacaaactttaagcattgatcacaaagaacacaatccattagatattacgtatttacatcagctggtcatttagaaaccccaactatggtggttagccagccattacaaagaaacccttacaataatggagattaaaagccgagaatgtaatttttctcacaaaaaaaggaattc

SEQ ID NO: 263005 - DNA, 476 bp, Glycine max
  unsure (1)..(476): unsure at all n locations
gcgtctatacgagacagagaccaacatgttagctatcatcgccaagtaccaagaagagttgggtctagccacggcccacgagcatagaatcgcggatgagtatgcccaagtatatgcggaaaaagaggctagaggaagggtgatcgactctttacaccaagaggcaaccatgtggatggatcggtttgctcttaccttgaacgggagtcaagaacttccccgnatgttagccaaggccaaggcgatggcagacacctactccgcccccgaagagattcatgggcttctcggctattgtcagcatatgatagacttaatggcccacataattagaaatcgttaggaaacttgtatggtctctcagaccttgactagatatgacttcctttntgaaataaaatgagttggtcccaggtttctactccaaaaagcttgtgcanatcaaatcactcctacatctcatctctagcatgcat

SEQ ID NO: 263006 - DNA, 649 bp, Glycine max
agcttctccttccttttcctataaataggggtaaggtaggaaaaacaaaaatgttcaaccttcctgggatttgagatccactgaaaaatagtgaaaaaaattgtttccatgaaaaaaaaccaagccgaggcgcttccgaaacgctttcatgaaatttccgggggtgatttcgcgaaaaaattcaaacggtcttacgtcatcaaccggcctaaaaccggaaagttcccaaaaacgaatctttcaattctatctatgaacccctaatggtcctcattggattcccgcgcctttatattcatttcaactacattccagacccccttttgacgggctttagtaaattatttaagacattttctcgccttataaaaaaaaaaaaaaaatttccaacgatcatttgaaatggaacaaccattaatctcttgtaaaaacgaattccaaacgatcggtaatgccgaaaccacatttaacacccaaaaagagcaaaataataatataataattaaaaatatttttaagcaaaccaaacaaaaaaaaacactcggaatttacttggggaatacctttcttaatcaaaccgacataacccaagataatcagggctaaaaccattcataaaccaactttttgcatgcccaaaaaacatttc

SEQ ID NO: 263007 - DNA, 472 bp, Glycine max
  unsure (1)..(472): unsure at all n locations
atcgattacgatcagcctataattgatttttatagagagttttaacttcagaagaatctgtctaactttagaaaattttcttctacattatgatgcatgatgcacatatgaaaagatagatactaagatgcaacacacaatataacacttaatacaaatgccattcaagagagtcggacatgtaaaagacaaaacttcttctctcttcctcagaaacctcactgcaccttaacctattcttctctcagtcactcaaaaaacttgaaaccctaattgtggccaagaaatagaaccaaccccaagttgtccaagtcacacctaactntagaaacaaccctccctctacatcattcgaggacgattccaccatttagattaccagacccacacccatgaccatcctttntgtcgaagtcacaatgaaggacaaggaagcacgagttcacatcgagcatttcttcaatatcgattt

SEQ ID NO: 263008 - DNA, 462 bp, Glycine max
  unsure (1)..(462): unsure at all n locations
tctcccncaattntctataaatagggggagaagtgaagtagattttgtgttatccccttaggcacttctctctttctcgaaatagctgaggaaaattagttccgtgaagaatatccaagccgaggcgcttccgtaacatttccgtaacgttttcgtgagtaatttacgcgaagattctcgaccgttcttcaagattcatcgttcgttcttcgctttcttcagtcttcaacgggtaagtacctcaaaccaagattttcaattcattctatgtacccgtggtggtccacattttgtttcatgtatttttattctcgtttacatctactttctgtacatcctttggacgtgcttaagccatttatttaagtcatttctcgcttaatctaaaaataaaataaatttccaccgatcgtttgaattgatcatccgtaaattcagtaaaatgaatttcgaccttcagtc

SEQ ID NO: 263009 - DNA, 583 bp, Glycine max
agcctaaaacacacttcaacctcacacacactcactcaaaacagccttttacctacacagtggtctatacaatacagctggctacaatatatatttaacaacatttaaaggtcaaacccaatcttctttattcaacattttttccaatgtctgtccaaaagaagttgctagactttttgaaaaatgcatgggtgtagtaaaaaaacttgcagtggttaaccccaggattgtgatcgacaaatttgaaatcaggtctgcacacaagatgttgctttcactgggaggtgttgatgacttgattgaggccttaacggccttcttgcattaaggtgcctatcgttgccacattaaatatggtgtagacaagccatctcatagtgtttcatttgctaaaagaaaaaaatctaagtcctttgtaaaatttcaattaaatcaaagataatttaccaaaaacaatctttttgaggaagattattaattatccgttggggggacctggcaagttaaaaaatgctctttggataaaaaacccataatagcctttttggagatttccgaatataaaaatgtcttacgttttttt

SEQ ID NO: 263010 - DNA, 462 bp, Glycine max
  unsure (1)..(462): unsure at all n locations
tcagaatacaaccaccatcacctgcgcggataatcttgcgatatttgtagcggcaactttcatgaatgctatcgtcaggaagaatgtcctagtgacatgccctctcttgctgttttcggatgccatggagagatctgaatcgccttgaaaaaaacccaccaatcctaaacccatgtaccagatccaggacaagactcttagatgcagcggtggtgatgcttgttcgcaatgacgaagttggagtttgaagggaggagtggtgatggggtggctaaaagggaagagtagttcgggttgaaggtgaagggagagtgaaaggtcaggaaatatagctacagtccacgtttaaaaaanaacaattatatagtactttctctattcggtgcatcctcactcatatgagacctatgaagttcacgcacaatagaataggagcacaaaggctacaataatgtgactcaa

SEQ ID NO: 263011 - DNA, 84 bp, Glycine max
acctttcacggtctaggattgttaaaattcttgcagaagaaataaatgattttaatttattattggattacaaattataaaaaa

SEQ ID NO: 263012 - DNA, 420 bp, Glycine max
tactaagctttgccttcttctccaagcgcttccttggtatcccaaccaccctatttctactttgcttcaaacagtctagctcttattctgagatcttgaccacttttgctattcttgccatagaaggatgaaacccagaaaaaaggtatggcttccttcctcctaccgggcatccaaagatcccttcgaactcttctatggtcggtgccaactgaaaatcacaaaaagtgaagcatctgagcaactggttgtagtattgtgcaagggatgtgatggcttcaatggacacttctaccatggccaaatcctagattttcctatacgccttgatgaaggcttgacatcaaacttcatccatccactgtcctagttcttgcaagctatatagttctaggttcttgactttgacatgatagaacc

SEQ ID NO: 263013 - DNA, 458 bp, Glycine max
  unsure (1)..(458): unsure at all n locations
tcagaanacttccttgagaagctagagcttagccacacacttctctcataactaagctcacctncttgagaagcttccttaagaagattcctaaagaagctagagcttagctacacataccactctaatagctaagctcacctccttgagatgagaagctagagcttagctacacaccccttataatagctaagctcacccctatgccaaaaaacatgaaaatacaaaaaaagtccttactacaaagactactcaaaatgcctcaaaatacaaggctaaaaccatatactactagaatggccaaaatacaaggcccaaacgcagganaaacctattctaatatttacaaagataagtgggctcatacttagcccatgggctcgaaatctaccctaaggctcatgagaaccatagggccttcccttggatctctggcccaatctacttggagtctttta

SEQ ID NO: 263014 - DNA, 497 bp, Glycine max
  unsure (1)..(497): unsure at all n locations
tattgtgtatggtggagactccggtgatcagtatcatgtttttttttatatgctnganatgacaacaatgacttggtctaaagtatgatctctcctcctcctctctataatcgccgatatttttcttcgaaatttggagaggggaaatgttatatttttctactaaaaggggtttagtaatagctttcttggcattttaatgacagttgtctattcaaggttctccaccangagtcagggcacgtcatgctgcagtgaacattggaacaaaggcaagttagtgatatgcatttttactagaccttgcttattactaaagagtaaatagtatagtataaagaatctgacactatcatatgatatatttacttcanaactcctttcagcgatgatctctgactgattcacattctaaanattttcacattgtcaacgcataacaattaatctccttactaaaattatatgtagctcttctaaattatatactcattata

SEQ ID NO: 263015 - DNA, 288 bp, Glycine max
tatgatatagagatgccctctgtttctgcgtctcctaggagagcatgcattatgtgccatgtgcagtatactggtgcgggatgtgtgtctatctttcgtcgaaatgggtatatgatcccaacatggatggttcacggtgcctagcacatgctactataagtgtccagtgtagtttcactctcctcctaatgttgtcgttgtgtcctacaagaaatgacctcaaaacggatggtgccttgactgctgcgaaatgtcatgctcgattatgatttctggcaaatgctggat

SEQ ID NO: 263016 - DNA, 380 bp, Glycine max
  unsure (1)..(380): unsure at all n locations
gataacctccaacaaatggtggcagccatacttgacaggcccaagcggagaaagacgaaggccccaaggcactcccaagaatcttgatcattnttcgttctcattatcgatcttccattatctgcctattctattcattttcatttctttgtctgcttgatggatggactgtttgtgccttggtctattcgaattctgtttgggacaaattctgtttgctggataaatttatgggttgggtcanattgcctaattgcctagtgaatgaatacattggctggaccactggaattgattgaacattctattatcctggacgaatngtgaagagcacatactatatatatatatatatatctctatatatatatatatatata

SEQ ID NO: 263017 - DNA, 639 bp, Glycine max
agctttaaattatgaataaaaaacggtcataaactgctgggaaaaaaaaaccatatatgggatatctaatgaacagggcaaattttgtattcaaattttaaaagccgggggaaaaacaattatggcccctggtaaaccattaaatcctctggggatcgatcacccgagaagagaattggttgaaaaaaacttttttaccttaaaattattgaaaaaaacctttgggtaacttcaattggaagaccctctccaataaataaaccccttgtaagaaactagaaagaatctggacctccaatctgaaaaaatataattctttggcctgaaaaaaacttgaaaaagcaaggaaaaccatggggttataaaaaaaatcgatggagccttggctaaaaaatataaggccaaagggcaaaggcctgtggaaatatgttttgggccagggaaacgaaacatactttggaactcgcatcagaaaagaaatctttaaaaaaaattttcacgggcgtacccgtatggaccaaatgttgggaacagggtggtaaaatttatgaaaaaattaaccccttttttaaataggaatcaaaagaaatacctgatccataaacatccgaagaaggccaaagggtttgtgaaccccca

SEQ ID NO: 263018 - DNA, 328 bp, Glycine max
  unsure (1)..(328): unsure at all n locations
ccattaaggtagaccaaatgcaagcacaataatgctatgcagaacgcctgaaggtagcaccatatccttncaccacggagcctagcaagcctcacccaaaagcggctgaaggcactcaagtcataagtgtggacagagggcttccaatctgagccctcaccgtctaacaagcaagcctagacaatgaatttgacatacatctgtgagatgacacctatgacagaggcctaaaactcatcgaagacctcattaagttgcagctcggaactaaacccgagcagtgtatgcagccgagtaaggacctcaccagtcatgagcaccggcgcat

SEQ ID NO: 263019 - DNA, 363 bp, Glycine max
agcttgtgagacaattcactgtgaaaggataattgccattcacttagcaaaatacccaaatggtaccatcgaaagggaacaaaagcacataattatgtcgaaaaacttacaccttctatataagatactgtggatatgaaatcttgaagaaagggtgaaagggtgtgaagaaagggctttcaaacacgaaacgaaaaaccttcagacttgaatattgtaacaccaaaagacccttctcttaatgtcaaagaacaaaccacggactggaattgataaattctgaaaatgcctaaagtaaattggaataaagatgcaacccctcgaaacaacaaggttaacaacttgttgaattaggaagtcaag

SEQ ID NO: 263020 - DNA, 435 bp, Glycine max
  unsure (1)..(435): unsure at all n locations
agatccctcatttaagactacacccgatntagactaccctcttatgtttaaactaacttaaattgagtcttgtccgcagatccctcatgtaagactagactcagctcaaatagcttactaaagtttagcctaatttagcctaagctttgtccgcagatccctcatgtaagactaggcctaaactaaacaacattattgtaacaacataattaaaaccaaaacttaacccgcagatccctcatgtaaggctaagtttcaatcctgtttcaatcaagttctaaggcaacagtacattttccaatgctaaagtcacctaactgtgcacacaaatgggtgatcagaccaaaagcatacaaacaataagcattgagggaagcaatgaacacagaaaacataatcaattagatattagatatctacatcagttggtcatta

SEQ ID NO: 263021 - DNA, 508 bp, Glycine max
agcttgccacctagctcgcccaggcgagctaggttgcttcctccaaaagcaaccaccttttggaggaattttttaaaaggcccaagtgggcctggttgctatttgcacccacatttttactaagtacacccccatgccttttttggggaatcttttatccgtaacgttacgaaaatttaccaaatttcgtaacaaggcctaatttctttcccgaatgctatgaaaccttacggactacgtaatcaaaccccctttgggtcccgggatgtcacggaattttacgggttgcgcactaacacttccttttaatatccggcatgtcacgaaacttcacgaaatgcctaatgaagggagccaaatacctcgaaagggcaaaacgaggggcgaaaccaaacaaccgaggggcccccgacaaaaaaagggatgacaagtgcccccctggactaggccttaatggagaaaaagggaaaggaagaataaaaacctaatttgttcaagcaaaaaaaat

SEQ ID NO: 263022 - DNA, 449 bp, Glycine max
  unsure (1)..(449): unsure at all n locations
gtctaaactttcgtaagcgctgagtctagttctacataagggatctgaggacgaagcttagtttaagttagtctaaacctatgagggctgtctatattgagcctactctagtaagagggatctgaggatgaagcatggattgattcagtctaactagggatcgaggtttagtaatttaggctacaacatagaacacaaaagcatgaatgattagagaaacatctttatatacatcagctggtctattagaaagacccaacatctttacctactgctatcaatcttacttactcgaatctttactatattaagcctagacttaggttaaatttgttgtaaatcatccatcatcaatgtttctttcaacaatgccttatttctgaatttaaccttgtctaagactagttccctgagtttgatacttggatcatccgtnctaatttaatact

SEQ ID NO: 263023 - DNA, 481 bp, Glycine max
gaatggactaaagggagagaaatatgcccgaataaaaaccaaaaggagtttgaccctacacctagaacccatgaagcaacacaggcaagctataacaaggcaggacaaagaagagataaaccaatgccagacccatgaacaaaagcttgaaaaggactaaccaagaaaagtaccgcgaaaagggaacaaaagggagggagaaagaagcgatacatcaagaggcgaccatgtggagggatagggcccccttgaccatgaaaggaaaacagaaccgaccgcgaatactataaaaggaaaggccatcgcaaaaaagggcgtcaaccgcagagaaaattaaaggtaaataaaagatgagcacaacaggaaaaaatcgaagggcgacgagaaacaaacacgaagggctgggggtaaaacgtatgagcgaaagtggggaagaaaaaagctatgggccttttgcgatgaaaagaaagcctagaaatca

SEQ ID NO: 263024 - DNA, 391 bp, Glycine max
  unsure (1)..(391): unsure at all n locations
aatcggatgctgatgatgtgggccaattncttgtgttggtggggtttgcaacctaatactcaaatttcttcataatggctttcttgtgagaaatgcgctcgttgttaggtcgggtcttttcacttgctaatcattatggcagaggtacccattgtacgttcaaaaaatgaactgtcgtccttaacgacattgatcttaacacatctaatggttaagaggactcaagccttatgggcctagctcctattaatatgccctcacattgactttgttggcgcttatccatttcttatcctcacttcttttggatccaaataagccttctatacctgcaacatacgtcattcttatataactacctaacatcacatttctctcccctaactacttg

SEQ ID NO: 263025 - DNA, 431 bp, Glycine max
accattaagaataaattaataaataattttttttttaactaacaaagggagaaacattaaattggatttattaaaaaatatgctttgaaaagctactactcagttataagtagccagcgtcgccaagtggtattaagcccaagaatctggatcacctactaattaagtaaaatttgatggggtcaaacctggaattatttaggataagtaaaatttggacaaaacattattggacaagggctttttttaatctattttgtccccaccataaaaggagaaaaaaccagaaccaccttaacacttagtggggaatttcactaataacaacactttttatcctataaatgaaaaagccattaattcacagttaacaaaaagtgctcaaaacccccttaagggaaaacaatttttcaataatagggcttcttttt

SEQ ID NO: 263026 - DNA, 451 bp, Glycine max
  unsure (1)..(451): unsure at all n locations
tgccgctggagctgacccataactggcgaactctttatactggtgatccctangctcttgaccttgacttgatagaacctctttttaagcgaaggtgtttgacttgatcccatgttttactaaagtaaaacaaaatcggtgtgaatcaaaactccgacatctatcatgggtggaatggatgaatgcatgaagaaatgcatatgatacagatgcaatttatgaatacgggagcccgagaaattgtctccttcttagatacaacatcttgnggtagcaaagtgcccgacgtatgtatntaagaaggtggcacgaacccttcgttggtttgccaaagagaggggatcaagacggaacccgtgcatgatgcatatgcgaaaggcacaacacggngatgtacatagtatgacaatattcacaaacaaatataagccaaagggtacatgacatttat

SEQ ID NO: 263027 - DNA, 615 bp, Glycine max
agcttgttgagagagtgtgagatatagatactcatattttacacaaaaaaaatgttagatttcattgggattttgaaaaaacacaacaacatttcttgtatgttgttaattaatagaaaatacacaatgaaaccataactatgttgcacgaaatataaaacataaccacatttcattgggcactcccaatgtttccccaaatttgttatgtgtaacaaaaatgaatttttatttaatatttttggtcacaaaatcatattttgtcaaggctatttttgaaaaatccaaatatatttggtgggaataacattcccgatgtagggttttggttatgctcttgggtcaatgttttatcttatcattaacacttttttccaatcaaatttaatttcttggtctttctcttttaattaggggccaccctagggagaaattgttatttgatccgaaaatttaaaagagagggggggaataaaattctcaaattattgaaattttttggaggaatcaattcaaatctaaaaacctctttaaaaaacaaggggtgtcctcaatatttttatccccaggtaattttcgtttaaaaaaaaaactctgtgtggtaaaaacattttt

SEQ ID NO: 263028 - DNA, 475 bp, Glycine max
  unsure (1)..(475): unsure at all n locations
cgctgctcctgtgctgagtgtgtgatggaatgtgtaaatggttctatggaacctgtatttatagtagttgagcgtgactgttggtccttgtttgtatgagctgttgtancctttgtagataattcccaacttgtagataatagccagaagcttatagataatgctagagataaatatttgcttatagataaaaagtagaagatcattataccttgtagataatgtctgaccttatagataattaatcaccttccaataaataaaatattcaaatacatgtgaatattaataagttaaagataatctgtttgttggggagcccggctgctgagggttgagcgtccaccctcatgtagtatggctaatatggaggagtgacacttgtctctatgtgccaagtaagatgtcacctggtatttgtgggtcctagacaatacattttgcatatgaatntacttaatatattttctatact

SEQ ID NO: 263029 - DNA, 339 bp, Glycine max
agcttcggaaaaaagtgatgaggtacaaaccctaaagccaagcttgaaagaacccggggagtcaaagaaaagatcaagtccatagccatcaaagcctgaaaagaggttgatgaactaagggacctccatatggccaccgaagaagccctggaatgaaaaaccaagaaggccccaaagggaaaacaccacccaaacaagttttgaggggctttatagggcagcaatagtgaactcaaactccgaaaaggtgaaaggaatcattcacggggtcaaaaggcactgatcttggaaaggacgaagcttaaaggcgttgctctttatgggccgaaaaagaaattt

SEQ ID NO: 263030 - DNA, 327 bp, Glycine max
  unsure (1)..(327): unsure at all n locations
gcgtgagagagagggagagcttctgaaatttcttttgggctgagtgaggacagagagagaggtgctttttggttttaaaaagggttttctctttttctattattntatttaagctatgccacatgtctccatttgagtggagcaaaaagggcccactttctcttttgattgtgacccatactcagccacaaaaagtgagaaaaatctgacctttgaaacgctaaaatcctgcctcggcttgcatgccgtttctctgattccagttcctcgcgtttctctgcgtgcgtcggggccagtttttgaaagtcagccatatatatatatatc

SEQ ID NO: 263031 - DNA, 189 bp, Glycine max
caaaagccatgtactaccggcacattgcagaggaccgaaagaccagcctttatgcacaaacccataaaaaaaagcacaccgccaacaaaagaggaatattgcaaacaaaaaagcttggaggagatcaccccaaaatcccgatgacaaaagcaaaagctcgatcccatagttactagataaaacaaaggg

SEQ ID NO: 263032 - DNA, 460 bp, Glycine max
agcttatggcggaaaaggtaagctttcgagcctaaagcatgtggatgcttgcgcttgtgaactttgtatccttggaaagctgaaaatgggcttttctctcgagggcatggaaaaaaattaaacctgagaagcttgaattggtgcacacacaatgttgggggggcagcctcagggaaaattttttggaaactgaactctaaaatgcccccttttatgaacgactttaccaaaaagggactgggaaattttcttgaaaagaaatttgatgtggatccagtgcttacaatgaggaaaacagaatttgaaaatcacataggtgtaaagggtgaaaggctgaaatctcacaatggtacggacaatgacaatcttgagttaaaaaacatttgtttaaaatacgggatcgcaaggatcaataaaaaagccgaacacctcagaaaactgtgttgcggaaaagatgaat

SEQ ID NO: 263033 - DNA, 116 bp, Glycine max
taaactccatgtgtctcctaacatgtcgtgtgctaaatgttgtatacatgattctatcgaatccacaccgacctatcttgctatagaagctagaggccactttctattgttcacat

SEQ ID NO: 263034 - DNA, 408 bp, Glycine max
cagagaagaggaagcaagaacccggaagaaccaaaatggcttcttcatgtgcttcttccagaggaggaggcgccttttataactttttgttaaagggtaaaatggcccattcattaaaattgctaggtgcaccagcaatattgctgggtgcacctagcatttccctaaacatagctatgattcccaagtgtgagaggcccaaatccatacatgacttgcgaccaatagccctttgcaatgtttatacaatatattttttccaaagctttggcaaataggctgagaggcattattgggaagtatgttagggatgagcaattcgctttcatcgaagggagatcgattctagacaatgtgctcatcgctacataaatcattcactatttataatcaaagaccagacgggaa

SEQ ID NO: 263035 - DNA, 353 bp, Glycine max
  unsure (1)..(353): unsure at all n locations
tgngtcgnggaagaaattctcaaacagaaacgctctttcattaaattaaattaatttatnaattntattataagggccaattgtgtaacttcacataattgctaggtgcaccagcaatattgctgggtgcacctatcaacaacctaaatggntttaaggtactcttcatttacattctcaaacctatcattttttcgagaaaaagattgtatctaaactataatttcgctatagaactgtattgctatacacacaatttgatcccaaatactttatgaaactaagctattcacacattccacaaaaactaacaaacatataagctattaacactagacattacacaaaatgtt

SEQ ID NO: 263036 - DNA, 659 bp, Glycine max
gcagcctgcaaacttcaaacagcttgttataataaaaaacaatgaggttgtaattgattaaaacagagagtttttgcctctgaagaaatttttctaactttgaaatttttctttacacatactatgatgatgcataatgcaaaaacaaatatcaaatgcactaagatgccacaacccagataaaaacccatacaaatgtccctcaagggaagtgggcctgttaaaaacccaaacttcttaaaacctcttaagcttttccttgagcttcaagctttacccttaggtggtcactatattgcttatgttgcccccctatctctaacaactttggcaccaagacttggaaaactcatattcttgggaagcatgttcacaagggaaacaaatcaaaccgccttcaaattcaactaaaacattgaatcttgaaggaaagaaggatgacttttactagatgaggactattctaaaaatcttggggatacttcccttgcctaagcaagaagtttttagaactttgaaaaattttgtataaaggggcccacaaaaaataaaaatagtttctctttttttaaagtgacttggaactgatttgaaaaagccggattgaaaattcttttaaaaaagggtatttcaaatattttttcctaaaaccttaaaaa

SEQ ID NO: 263037 - DNA, 465 bp, Glycine max
  unsure (1)..(465): unsure at all n locations
ctttacaagccagttcaacagattcgcaatttggtattctcgctcttggaatctgctctaagccgtacagtgccttctttaatagatacaccttgtcttcatctccttttgcagcaaagccttcaagtttctcaaaataaatttcttcatttaggaagtcatttaagaaggctgacttgacatcaagctgatctatcttccattgcttttgtgctgcaatagctagtaacattctgattgatctagtcttgcaactggagcaaatagtatcaacaataattactccaaaagcttgagcatacccttttaccattaaccttgctttatatttgctaattgagtcatttgcattctctttctttctgaacacccactttactccaattaacttctaatggttaggtctttcaactaattcacaagtctgattntttttcgatcatagcaagctctttctgcatagca

SEQ ID NO: 263038 - DNA, 377 bp, Glycine max
  unsure (1)..(377): unsure at all n locations
nttggtctcaattacgagcgtgccgagatattattggactcttatcgccattccaccaagaacatatcgtcgctcaaatttgctcacagcttctcttttccattaccagcgtctggatatactacgggagaccatccgacatccgagtcaaaagttatggtcgttagatactatccatagcttatgttctgattattccagcgtcttgacatcttaccggacacaaccggacatccgaggcaaaagttatctgccgctaaatatccacacagcttctgtctgcaattacgagcgtctccgaatattacgggactccatcagacatccgacaanacgttattgccgtccaattcgctcaagctcctatctaacacaca

SEQ ID NO: 263039 - DNA, 590 bp, Glycine max
aaagaaagaacaaagaaacaaaaaaaaagaaagaaaaaaaaaaaagaaaacagcaaaaaataacaagaagtcagaactgaaacttcgaaaacccgaccaaaaacaaccgcagcagcaaccggagctagataaaaaaaaggcttatacgacaaaaagaacaggcaggaccgggaaaaaagacaaaaaaaaccaccaaacacagccacgagaaaaggagagcacaggaaacggaaaggaaaccaacccggaaaaggaaaagaaaaagaaaagaaacaccaaaaaaaagaaatccaaaaggcccctgaacagacggagaactaaaacaagaggggacagagcaaaaacgaaaaaggaaaaaaaccaaaagaggggaaacaaaaagaaacacacgacaccacagaaagaaaacaaaaaaagacagaaaaaaaccacgaaagcaaccatggacggactgaaggacgaaaaagaaaaagaacaagaaaaaggagacggtacggacaaagagcaaacaaaaaaaagaaaaaggagcagaaaaaaataaggaacaaaaaaggagaaaaggggagaaaaacaaaacaaaagcaaaaaac

SEQ ID NO: 263040 - DNA, 495 bp, Glycine max
tgtccactcaatatttcttcaaatatagagagtcatattctcttttatgaatttcaagaagctcatgtgttttagttgtacatccactcaataaaacatcaatttattttctttcctaattctttatatttattttctgagtagaaaacaaataagaaactataggagaacaaagcttacataataataataataataataataataataataataataataataagtaaacaaatcacacaaaaagaaacttgatcgttgaatgtaatcaaatgtaataatgacaaaaatatgatacaatgattcaacaattaattacgtgtatattaatatttaatgaatcggtatatatagtaatcaaatattatatgttaaaaaatgtaatgaaagccataatttcttgatgttgaatcattgtatgttaagatgatgtgattggactacactaaaataattaaaaaattcaatcggaatatatgttactattactataca

SEQ ID NO: 263041 - DNA, 453 bp, Glycine max
agcttgaaaatgcattcgggcacctattttgaatctcctatgtgggctctacatatataaaacagtcccaccatcccaatttcgcaaaatcatatacatatatcattggggcatttcaccgagcacttggggggcgcacgtttggacacaaattgcaagaaaatggggacaatatggcatgcccaattgcttcaaaaaacaacataggcctaatgccttctcacacaaaaccctcaactcaacaaaacaagcatgaattcagatgcgaattgcttcacgaattttgcaaaaaatgagcaactaaagcaccaaaacacatgaatggagagccaaataaccaaaggaaattgcacttacttgtggggagtgaaataaagcgtgaaaagggaaacaaaaacccaacaatggaaacttgggggctgctgttctccaaaacccgggaacatgggggtt

SEQ ID NO: 263042 - DNA, 485 bp, Glycine max
  unsure (1)..(485): unsure at all n locations
ctaagaacacaaagaactcaccaattataagatcattatcattntgaagcaaaaatgtatgtaagagacgtagaaacaaaatgataacggaaaatcttctcagcttgaatccctgaacaatcaatattaggtaagaaaaccagcatgtattcgtcatttgtagactggagctttggattatttttagacactaaaatatattttgaatcatgtaagtttttccttcttcaagtactttccaaaaagtgctgacatatttnttcttgatagatgcatgaattgtatcactcaacatataaaaataaacaaatgttagtccaatttaaattagaaaatgtcgcataaaacaataatatttgaatctaaggtaacattttcatccacaagatgcaattcgattaacttacatatttcttaactcgcagttgatgacaagtagttatattcataaacattgcttttgaacttacctgtngctacataac

SEQ ID NO: 263043 - DNA, 446 bp, Glycine max
agcttcttgaaagaagagcaataacagtttttcgtccggggaaaaagcccccaaccttcggcaaacatccgaagatgactctttggacacggtggccctttatattaatcgaagactggtaccttgaacttgggaggaatgatgatgtcaggtactaaaaacagatcggctaaatcccaaaaaggaaaaaatggtcgaagccctttccaccggatctcaatctattttaaagcaaaacgatctttcctttgtcttttgaaatgggaaggaggtccttaatgggtgcggatagagacagggcatggcggataatggttggttggggcaactaatggtgggccggttccttgaggggaaagaaagggcctaaaagggcaattacttcatcaacatcctacaaaagaaaagtcaacatgaggagggagttgcccctccaaggagagggc

SEQ ID NO: 263044 - DNA, 431 bp, Glycine max
  unsure (1)..(431): unsure at all n locations
tgccttgctccctngatatatctgagggactcatggtcactattatatgaaaattccttgcgataaaggtagtgttgccatgttttcaaagccagtactaaggcatacaactccttattataagttgaatagttaagggtaggaccacttaacttttcactaaaataagcaattggatggccttcttgcatcaacacagccccaatcccaacatttgaagcatcacactcaatttcaaaagatttttgaaagtctggcaacacaagtatgggggcattagttagcttttgcttaagaacattgaaagcttcttcttgtttctctccgcatttgaaaccaacatttntcttgagcacttcattgagaggtgctgccaatgtgctaaaatccttcacaaatcgtctataaaaacttgctaagccatgaaaact

SEQ ID NO: 263045 - DNA, 423 bp, Glycine max
  unsure (1)..(423): unsure at all n locations
agaatggaattctatcaatagaccttcaatctttaatggagagggttaccactactggaaaacccgaatgcaaatttttattgaggcaatagatctaaatatctgggaagccatagaaatagggccttatatacccaccacagtagaaagaattaccatagatggtagttcatcaagtgaaagcataactatagaanaaccttgagacagatggtctgaagaggatagaanacgagtacaatacaacttaaaagccaaaaacataataacatctgccctgggaatggatgaatattttatggtttcaaattgtaagagtgctaaagaaatgtgggacactcttcgattaacacatgaaggaactacagatgtttaagatcttgataaatgcctaactatgagttgaatattataagaatgcca

SEQ ID NO: 263046 - DNA, 228 bp, Glycine max
gaataataacttaggtagctcttttgagccttgctgccctttccttgatgtgaagctctctgcacgccctttttgcaaaaccatcttatctccatatgctataggaatgctcgagcataggatatgacacatgaataaacgtgggggctttcgtatcattggattacaagatttgtaggctgagcatcatgatgtattctgggccgtactagacgttcattgaatctt

SEQ ID NO: 263047 - DNA, 497 bp, Glycine max
  unsure (1)..(497): unsure at all n locations
gggcgctaagatagcaaaacttaaccaagagtgatatcttctatttcagatccccatcacaaggagaaagagaattgatatcatcagtgactaaaagaaaatgaagcaaaacttgatggctcttttgattggattaattggtgcagccgtcaccttatttgcttactcacaaaccttcgtatcaccaagtctgtgcatcacacttggccttattgttctcatgcatgttgggcttgcttgtangagaaggtctgatatctntctaatttcttcttgtttttcttttccctttcagtatttccttcatctatgtatatgccttgtttatgtgccataataagtctttgattaagaactttttctagatactctttgtgttttatccatatcttgaatattgcaaattgaatcttattctatgaagggttgaaggaacaatgatgtaatttctgagcacaatatttctttcttctatagacctcaatatatgatattga

SEQ ID NO: 263048 - DNA, 483 bp, Glycine max
tgtagagcactctacttgagtgtctataaatctataatctatatatatgtgcaatattgagtatttcagtaagtgataaaatcattcattaccctttacatattctctgaaacatcagaatctaatattaactcaccttcattgtgtgatcagaactcatccggaagtatcttgaagcacgtttttgaagctcaatagtatttaaaggaaatggaggatatttcggcttctcctgttgtctaatgtttgtgacctgaaaggtaattaatataataataaaagaaattactttaaattcaacatatattcaatcataagcattgagaatcaggaatttcatgcatcataatgtgataggatatggtatctaatgtagaggagactgaacatcctctaattatgtgtattcaatactacctggctatataaacaagcatctgatgtggattctaacacacgaatttcgtctattatccctgtata

SEQ ID NO: 263049 - DNA, 398 bp, Glycine max
gactattgatgtacatgagccacagcacataagaatttttattgagcttaacctggaaaacaacagttgagtgttttcacagcacacattcagttctcaatatgaaggaataacctgctcacaaaaagttaaaaatggattaaagtagataccacaaagataacaaaatgcttgttctttccaaacaacatatcgaaacaagaattgcattgaattctctcttgcatggacaaaaggccaaaagaagaaaaaacacaatggcccactttcctgcttatattatttgtctagaaagacctttaattcatccattcacgcccatcactacatgaatatacttctcaacaaccaggtattataaaatgatagacaggctcaaaataatcattacctcccta

SEQ ID NO: 263050 - DNA, 177 bp, Glycine max
tttaatgtgctgatgccaatagaagtctatcaaatgctgtgaaaagtgcatgagggaaacttaggaacacatgccattggatagctgggtattactcaactcactaatggagaagccgatttgctcgcataactatgtggagggtaaatggctcataataattgccagaacctttta

SEQ ID NO: 263051 - DNA, 504 bp, Glycine max
cggggaactttaagaacaactgccggcatgccagccttaaaactcaaatatctgcaaaaatttttgagaaaagaaaacaccaaaggtccaaaggtaaaccacttcattcatggtggcttaaaatcatggttagtcataaaaataggcccattatgtactaagttaggggtcaatattgaatttggggaataaacctccagaaaccattggtcaagtattcctgaaaataataaccccaccctttgaaatttgagcctaaggaatgccaggtatttagttcataaccagggttaaaatcaatcccagaagaaggcctggtgaactatttttattggatactaaggtccccaaaaggagcccaagaaaaaattgagctgtggggctgaattgggcgcgggatttgtgaatcaaaaaaaagcctaaaaacctctgaaatttgggtattcaaaaaattgaccaaaagcaaacaaaaattgaaactatccatgccttaagaaaaaaaaa

SEQ ID NO: 263052 - DNA, 466 bp, Glycine max
  unsure (1)..(466): unsure at all n locations
tctccgaagggcatggttattcccagcttcctaacaatatctatattatctcgccaaatggcggtccttctccttcttggaaggtaccacaggatatggtacttccgcaccttcattcacaactttttctctctagcttgttcacttctactcctctctttattcttatttttttcatctttttcaatttttattatctttttatttttctacttctttttcttttttcttggtcatttaacttctgtttcttgaccattatatgtttttctttttcctgattgctttcacctctcacatcatctttcttatcatcagtacctttcttttcaacagctttcttcttaggcacgacactatcctcatnctccgccttcacaaacctcttactccttgtcataatagccttgcattcatccttgcgattcttttctgtattcgccacaaaactggtggatgacttgtc

SEQ ID NO: 263053 - DNA, 372 bp, Glycine max
  unsure (1)..(372): unsure at all n locations
atggagagaatagcaagagcgcccttaattgacgtttccgtttgtacaaaacatatacctgtagttctgcactatcaaccatgtattgtgcgccccactctctctcttaagtatttgtagctctgcaccagcttcaaatattcactctaagtagatatttgctcgagaaacctcttacttatcctcctggtgatctcccagcaaattctcctgcccaaacttctggacttgatgtgtcaggcccaaaaccaagaactgaagtcagccttgcgaaatgttcataactggagtctatcgtattctctcttgactgtctttacatattgaaattattacttagacatgatagntcacatggcaaaaggaagatac

SEQ ID NO: 263054 - DNA, 346 bp, Glycine max
atgcaagcttgggaaaaaaaaggaaaccaagatttgtttgacccaaacggccaatccctacatagaaaagggacctaagcgcttggggccaaaagcaccagagatcgaataacaactctacgcttagaaccacacaaaatctggataaaaggaatacaccaatagggaaggccacacatatccaagctaaaatataagaattaaccaattaacccaaaaagtgaaagccggcatcccaacaaataatctgaaaaaaaaagggaacctaaaacccatagtttccaaaagaacacaaataacccaatttatccaaataagaaaccgaaacccaaatttccgtctaaat

SEQ ID NO: 263055 - DNA, 489 bp, Glycine max
  unsure (1)..(489): unsure at all n locations
tgactaatacctagaanttgagctaaactagaatctanaactttctcctataatnagcttctcacaaaanataaaatataaaaaatacacaacctgaaagtgatgtgagtgaggtaaatatgcatatagcctcctgttttggagtgcgtcgattacgcatgtctccccctaaaaccatgtaaattaggttgttttacgtggaagcaaaaatatgttgattctgtgaaacatggaaagagaagctatacgtgcatttcagaattgtattcaaacacgcatatagcctcttaggatttttcatgtctaagtatgcaatatgcattattaagtctaacctggcaagccttgatgaagtcatgtactttctgaagtgtaggtccatattcttcacataaatcacatgaaaggaatngttgtatagctaatgcaacattccatagttgagaaccacagctctataattcttttaacacgagaaaactagaaata

SEQ ID NO: 263056 - DNA, 494 bp, Glycine max
  unsure (1)..(494): unsure at all n locations
acagatgatggcacctccagactctatcccttcagtagatctttttaatgagatggtagcctggctcgggacccaaccttcgcttcacagggaagacgaaggtcccacagcccaggtacctcaacatatggaggatgagtcatctgaggccaccatcccaaagccatttgatatatgagaagaggaagaggagacacaggtgagacaggtagctgctaccactcctgagcgatcccttgaggctacttcaaagccttctacaccagtggtaaacctaccctcacctcagcctgcagcagacccctccactcctcttctagagatgccaaaggactcgactacaccagtcctagctatggacacttctcctccaactactccagtgcttcagctgacacatgaggaggacggtcagacacaggatacccangaccagtcacaggaattttggtcctgatgacactntttgtttttgggttatattattttaatat

SEQ ID NO: 263057 - DNA, 406 bp, Glycine max
agcggccatctatctatgattcctctcatgacgtggagattgactcatgttctcattttgaaaactagcaggagactgctcactgatacaatgttcaatatcactagcaatagaacgctcagaatgctcataacgatcacgatgcacactatgcctaactaagtctctaaaagctctctctattataggatcaaagggttgtaaatcacctgcatcgcccctagtgatgcactatatgcatcaggtgatgtctttatcatacaagcaccaacgggggtgaaactacaactatactcaaatgatatccatacgagcatgaaatttgtgagcaacaccctactatcatgaagagatgcacataaattttcatccccatgctaaagactaaccatgaccaatgcctcat

SEQ ID NO: 263058 - DNA, 428 bp, Glycine max
cctgcaagcatgcaagcaatgaaattccccccgtagataatattttatcttggagagccaaatctaaccctcgtgaatgaactcttaaccatacatgataaccaccgatgataccattacggatgccccaaagttctttaactatccttaacaggctttcccacgccttgtggactctatgtacgattttgaaactttgtgcgcctaaattttttaaaaggaaaaggcgataagctctcttcagtcaaggctcccctaatggggtaccctaactgtcttatagcaagagcgggattataaaaaatacaacccctcatccctataaacagaaacgttgggaagtccccacatgaaaaaagaaacccctccttttcttccttccatagagaaaccacttggataatgtgccccctatccctacaaaaaat

SEQ ID NO: 263059 - DNA, 471 bp, Glycine max
  unsure (1)..(471): unsure at all n locations
gtaaccgagcgtgtaaggcgttatctcgcctaatttatgattatatgaattccaaccgaccatttgtgttgtaatgtcgtntaatcactgccaaagcaaaatctaaccgattgttcacactataacctcagctaaataaaaaaaaggcgacaaaataatataatcatcaaaatatcttgaaagaaaaatataatcaaaaatcaaaaaaatcaatcggacattcttctttgaaagattccttgaatgaattgactaataaccaaagtgaaactaaggctaaaatcaactcacaaaccaagctttgtccgtaaaagtcacttgaaaccgttataaggtccaatgccataaaacaggtctctttgcttttatcggctaacatggacctgtcaaaagcataaaatcaacacataactttaccgctttccaagaactacgtacgcttgagttcctcatcacaaatcgagaatacgt

SEQ ID NO: 263060 - DNA, 390 bp, Glycine max
agcttaggatactgacactgataaaaattttgtttcataatgttacctgtgcaacaaattgtatgtcatgatagctattgtcaacctattaatgtgacttgataaacccctacaatttaagcttccatataattcctaacttataattagcgtttatcacatgcatttgatatttaatgacaaaatggttcatcatatgacacaaaaagatgaattagtcattcctaaaaataactctacataccatggagactctgttcattgttcaaaaactttcaccatttgcaaaattgatgagtacccttccaagataatattctttcaaaagttgaattatcactaactcataaattaaatccttgcactcattacacttggcattactatttt

SEQ ID NO: 263061 - DNA, 472 bp, Glycine max
  unsure (1)..(472): unsure at all n locations
gggcttctatggaggctggatctctgagcttcaatgatgtcctttaatggggattttccaccatggagatgcagtggaagacaaaggagaagaggagagaggaggcgccatccactatggaataagccttggaagaaggagcttcaccaccaagatgagccttggataagaagcttggagaggatgcttcaatggaggaaaagaaagagggagagaaagagagaggggggagcacgatattgaatgaagaaaaagggagagaagttgagctttgtgttgtgtctcacaagactctcattcatcaaagttacaacaagtgttacacatgcttctatttatagactaggtagcttctttgagaagctttcttgagaaaacttccttgagaagcttctttgagaaaacttncttgagaagctagagcttagctacacacacccctctcataactaagctcaccttcttgagaaac

SEQ ID NO: 263062 - DNA, 317 bp, Glycine max
aaataagctaattaaaacacttaatctcaataaattcaggaggtgcagctcaagtgaaaggtcatgcgggtgtctatttctatgccgctcttttcttcttttttcttttctttttataatcatcattattgcttaatgttaatgattggtgttcttgattggatattatatcatctgcaataagctatagatgagtggggattcatgttatggtacattgggcatttgtcttgagcttgaaatggtgaaaaggggaaagaggaaatggaaattctgtgatcgagtcagggtgtgggttatctatgtgaagatatatg

SEQ ID NO: 263063 - DNA, 466 bp, Glycine max
  unsure (1)..(466): unsure at all n locations
tntacttatgtggcacggcgggcttacttcactttctggtcttcaacgcgagctctgaccactgtccttccctcccgcggtgcttcttttcatgtccgcctgagtgggcttatagcctaaaccatacttcccacgatttccttgggtttttatcaggctagttatgccgccattgtctttgcctaaacccatcccgggttcataaccgttccccaacataactcgggccaagggcgccncaacaggcagctgtagggggggttaatatccattatttggaaggtgacttgacaggtgtgagggcctatttgtactgggagatcgatctctccnctaacctctcggcgagtgccgtcgaaggccctaaccaccattgaacttggttttaaatgggaagcatngaatggtaacttgtccaaagtgctcttatgcatcacgtttaaactggaaccattatcgatgagta

SEQ ID NO: 263064 - DNA, 497 bp, Glycine max
taactgcaagcatcccaaccttatgcacggaaaatgtaattaagaaattgagatgccccaaaaaacaccattttctagataaccatgcattaagtaccatgttcaaatattttggttttaagagaaacgggtatatgaatcccaacatggttgggctcgtggggcctaacacatgaaactaaaaatgtagtgtgaattttcacgctttccccttttttgtttttgttctgaaaaagaaaacaacttgaagttacaagggcctgtggaaacattccttgtgggtgttatgtgttggcactgaccaaacaaggggggaagggttctttaacaagttagatggtcagggttggaaatgtcattttcttctacagaaaaatatattttaatgtagtcagtacaaaataataaaggtcactggcattttaggtgaaaatttaaaatgggctaacacaatctctttaaaaaaaaaaggcttgaatataaattctataaaaagc

SEQ ID NO: 263065 - DNA, 406 bp, Glycine max
aaactcaagcccttcttctgtaaaggacttgttttaagaccagtcttaaagcttcagcaaagatgccagtgacctgataaactgtaccgactacattaaaatgaatttctccgtaggaggaaatgacaactccaacactgaccatcaacatgttgaagaacacatcacaccttgctttgtcagtgccacacataacagccacgaggaatgttgccacaggcacttgaacatcaagtgttttcctctacaaaacaaaaacaaaaaagggggaagcgtgaaacttcacactacattcttagtttcatgtgttaggcaccacgagccaaccatgttgggatcataaacccgtttcacttaagaacaaaataattgaacatggtacctaatgcatggttaactaggaaat

SEQ ID NO: 263066 - DNA, 269 bp, Glycine max
ccaagcccatgcttacacaaaaaggcgcatcaaggcacagccgaaaatggaagtacacgccctgcaaaaatgcggcaaaagatgaaccgacgtacatcactagcttcgactactgccaaacataattaggaagattgatggccccgtgacctacactaacaccttgacacaaaacgtatggaccatgtggaaatctaaagtgaggcaaccccatactctgcgcaaaaattaccaatacatcgacctgacaacattcacatgcctccacg

SEQ ID NO: 263067 - DNA, 370 bp, Glycine max
  unsure (1)..(370): unsure at all n locations
tgtgcaggtctttccactagtactatataatttcttcaacactccaacaagaaaaggattgtttgcgagttatgcatttgtttattatacgtagccgtacgtagtggagcttacatttttaacaataatttcaaatgcattctaaagggaatcgatcaaccttggtataaccaaaatacacatcacanacaatcctttccttgtagcaccagacaggttaagaaattgtatcgaaccaccaagagttagatatttcaagaactttgtggccataattgagatttgctctctttctctcgaacaaactaccgactaaaattaacttctatgacagagagaaacactattngtaggaagatgattccttttt

SEQ ID NO: 263068 - DNA, 392 bp, Glycine max
aaaaaaaaaagggaaggggaaaaaaaaagagggaaaagcaaagaagggagaaaaaaaggggagaggggggaaaaaaggggataaggagtaaagggaatggtaaaaaggggggaagaaaaagaaggggggaaaaagaaaaaaaagggggaagtaaataaaaggggaaagggggaaaaaaaagtaaaaaaaaaagggagtgggataggggaaaaaaaaaaagaaaaagttagggaggaggagggattaaaaaaaaaaaaaagaaaatgggagagagaaagaaaaagagaaaaaagggatataaaagggggagaatggggaaaaaaaggaaaaaaaattcttggaaaggaaagagggggggaaaaaaaaaaaaaagggttagagaagggtgaaag

SEQ ID NO: 263069 - DNA, 411 bp, Glycine max
  unsure (1)..(411): unsure at all n locations
cattcctttcctattttcttaacaaaccatagctcatatttcaccaccccaaccttattgttgtgctacacttaatagcacacaaaatttatttggcacataattgcttctagcttttatttatcaatataaataaacacacataatgttattttattttgacaattgaaactcccncaaatttggggaaattgttcctgatccatgagtactctcctataaactaagatagagtgcttacacagtatcattcaactcaagtgtcaacatcaaattcattcacattaggctcaataaggtgcaagggattcattcattcactaatggcagggtggctatttggctaagtagccaaaacaaaataacaacagggccttgatcatctctacatcatgtatgcattcaaacagt

SEQ ID NO: 263070 - DNA, 402 bp, Glycine max
cgcctctaccgagaggagtgcgtagctaagctctattttcttattgaagctcctcaaagacgtgagctgaactcttaaaggggcgtgtgtaactaacctctatcttctcaaggaagatgtctcaagaaagcctctcacggaagctacctaatctataaagagaagcatgtgtaacacttgtctgagctttcatgaatgaaagacttctgagacactctcaaggtccacttctctccctccttcatgtcttccatttcgtgctccacccatctctctttctttgtcttcattaaagcatacaactcaaacttcctatcccaagcgcactcttggtggtgaagctacttcctccatagcttattaccatgtcgatggtgccgtccctgtcctcttctcctttgc

SEQ ID NO: 263071 - DNA, 598 bp, Glycine max
agctttaaaacttgaattaaaaacgcttaaaaactgctggtaatctattaccatatatgtgtaatcgattacacagggcaaaatttgaattcaaaattaaaagctgtcgaaaaacagatttggccactggtaatcaaatacatcctctggtaatcgattaccagaaagtaaaatttttgaaaaaaaacttttaacttaaaagtctggaccaaacctttggctacttcaaagggaattcccttcctatttaatataccctttctaaaaccctaaagacctaacttgaacatccatcatgaaaatctttaattcctttgacttgaaaaaagctttgagaagcatgtgaaaactttggcattatcaaaacatacaacttgatcctttgtctacaaaatttaaagtccactgtgcaacgggtggtgtaaattgtttttgggcactgggaaatcatatactaacttgggaatccgataccactaaggaaactttctaaaaaaacaatttgacggtgccatcccgtatgggaaccactcgaatggtacttggggagaaaattctctggaaaaaaactacccccttttttatttctgaaaaccga

SEQ ID NO: 263072 - DNA, 467 bp, Glycine max
  unsure (1)..(467): unsure at all n locations
tccacaacatccaagtacttcaacattcacacattctttactatcacagccaagaaaacagggcaaaggcagaaaactctgcccaaaacacaaaccaaaatcacagattctctcacttaaaggccccagtaacaataccttcgttccaattcgctaaccgttggatcgactccaaaattttactggaagtctctagtacttaagcctacattgtgaccgttgggatctactagcaaacatccagaactcattctgtactactctntccacagcccaccacacacaagcatttttctgcacaaagccaaaattctgctgcacctatttgacagcaaaattctgcataagtgcagatttcgaaaatcacacttcctctcatccaatcttgcccaaatcagaatctacaagtnccaaatcatgtatcaatcatatctaaaccacagtcaagctttatagcacagcaacac

SEQ ID NO: 263073 - DNA, 213 bp, Glycine max
  unsure (1)..(213): unsure at all n locations
aacagtgaggcccctacacaaccttccctcgaagagcttgtgaggcanatgactatgcgaatcatgcagtctcaacagagaccagagctgacattcagagcttgactaatcagatgggacaattagctacacaattgagtaacaacagtcctagaatgttgaccagctatcttctcaagctggcaaagatccaaaatgtaatgtcattcattg

SEQ ID NO: 263074 - DNA, 307 bp, Glycine max
gccccgggaacccagaacgaccgcggcagcagccaaagaggaatacccacagggggggaaaaattaaaacgcaaaacggaatccaaaaaagccaaaagcagaaaatctagggcctgacaaacttcgaaaactaccgtggggatgggttttaaatggggggaaaaaaaaaattttgaatgcaaaaacgtcccccctttaaaaaatttacaataaattagggcaaggggtgatctcactacaaattaacatcaattaaaaaccgaaagcgtagctaagacagaaaagatattaccatgctaaaaaaaaa

SEQ ID NO: 263075 - DNA, 443 bp, Glycine max
  unsure (1)..(443): unsure at all n locations
tactaagctttgctgtaacatttacacagaccttcttcacctcagcatgatatattaccacaggagaacaattatgacctctccagcaatagatacaatctcggatggaggaatcaccctaatctcagatggtctatgatgcaatcctaccccccaacggtattcgatagaaaactccaagagccttgggctatagctactaaaagaaggcctagggctctcatgaaccttatggtagaattttgagcccatgggtcaaggcttgatccactcttctttgtaaatattagaatacgtttgtccttcgtttaggccttgtattttggccattctagtagtataggcttttagccttgtatttcgaggcattntgagtagtctttgtagtaaggacttatattgtttcttcatgtattatgtcatggcggtgagcttagctatta

SEQ ID NO: 263076 - DNA, 401 bp, Glycine max
  unsure (1)..(401): unsure at all n locations
tgcccagagaaggagtccacggaggaaatgcttaccacctcataatactggaaaacgggttctaatgactcctctgcggcttccacataaggcatagaggatgggcagctcaccaagatgtcttcctcgcctgatacgatgaccagatgcccttccactacgaatttcaacttttggtggagtgtagagggaacaactcccactgagtggatccacgggcgccccaatagacagctgtagggggggttaatatccattatttggaaagtaacttgacaggtgtgagggcctatctgtactgcgagatcgatctcttccctaacctncttgggggtgccgtcgaaggcactaaccaccattgaacttcggcttaagtgggaggcactgaatggtcatttctc

SEQ ID NO: 263077 - DNA, 558 bp, Glycine max
aacaaaaaaaaacgcacccaaaaacaaaaaaggcacccacaatacctagaacaattaaacgtcaccaacaaggaagaaaagtaacctacaacacacgcatgacatttgcaaaaaatcacaaaaatgcaaacccaaagcaccaaggaaaaaaaaaaagaaaaaggccaaagggaaaacaaacccaacaacacaaactcagaagaaactgatatcacaaaaaaggcacaataaggccaaataaaggaccatttaaaccaaaccaagcaaaccagaaattccaacgccaaaaaaagcataaaaaaaaggaaattggaagaaaaacttaaaaaaaagcaacaaaaaaaaaattggaaaaaaaagacaccaaaaaaaaagggcgaacaccaagagtgggcacaaaacccaaggaaaagccaaagaaatagacaaactaaaccaaaaaaaaaagaagaaaagaaacacacagggcagcaaaaaaaaggaaggggccaaacacaagggggcaaaaaggaaataaccaaaaaaacccccctaggaaatctaaaacaaaaaagaaca

SEQ ID NO: 263078 - DNA, 405 bp, Glycine max
  unsure (1)..(405): unsure at all n locations
tactaagcttgacggatgtaagagatatcttcttcgaccttggtgattcttgactccatttcattgaatcacatgtccagttgtaactccaaagtatcaaacctttcaccaacaaaggtttaaagaccatcgaacctatccaaactcttttgaagaagtgaggaatcttaatcttctccaccatgtaaatgtccttcgtcatcaatgggtcgagcaccctttttcacccaagagccattgtcgcaacctacccttcggcgggagggcgatgcgagactcacgggtgcgtcttccaagaaaggaatacgcgcggagtcgccaccaaatgtctatctcatgcatacantttaaaaacacattaaaagcatcaaagagttacatattagaacgtaagagaaataaaag

SEQ ID NO: 263079 - DNA, 605 bp, Glycine max
aacattgaagggttaagagaccccttggaaaaagatatattccctgacgaatgttgtatcttaattggtaaaaacagaagctatgttactgaaataactaaaggctgtggaatacaagctgaaattggaataacagttctcttagagcggaaccttatcaaagttgagaaaaaaaacaaacttggaatgcatcctttggttacaaacatggaaggaaaataaattgtgaaagttcacgaaacaaacctggaaagcgcagtcaatagtggttacaaaaggagggacttgaagtattgacaaagaatactgtgagaacattctttacaaaaaattttattaagtgttgtccctttcatgtgcaaaaaaatgtgaggggaggctcaactataaatgtcagaatctaactagtgaagaattaatagaaaattccaattcatttcttggcttaaaacacaggggaacaaaactaatgggggtttggccgctaaattgcttaaaacaatgcaaaaggcttaaggctatgctacaaagaaaaaaaaagattgaaaatttgcaattgaaaaaataatataaacgaaaatttacttatttttaaaaaactaaaa

SEQ ID NO: 263080 - DNA, 340 bp, Glycine max
acttcttgtagatagttgacattactcttttcactttcaaccatttttattttcttgtatttggggcttgtcacaatagggaaatgcaacggtgttctcagaatttcagcatggcaccctacaagcaaaaacatattgcttacacttcttccacctccaacaagaaaccaagagtaacaagaagaggtgttactttccaagcccctcttaccatttctgatgcttatgatgccaagaccttttggaatcacattgtgtggatgaactctcaaaaagtcttcacttttggttatgatgaaagtgacaataatgagcaccataacgtctgtcaagtggtatg

SEQ ID NO: 263081 - DNA, 635 bp, Glycine max
ttaaagtctaccctgcggcatgcaagcttgtaggattaagggggacccatactttttggactaggaggtggacgggcaagggtgcacaacaaaggtgacacaatcacacattgcgcaaaaacccaccatcccctggagtccacctacaaatgagctgacgtatctccacaagacccattaactcgattctatcaacaccgggttcccgataaatattccgagctcccgcaacatccagggaataaaacattcagacagcgcaaactattacaggcaagaaaacatggcaaaggcaaaaaactttgtccaaaacaccaaccaaaatcacggcttttctcacttaaagaccccagaaacaattccttcgctccagtatgttaacacgatggaacgacttcaaaattttactggaagtctttagtaaaaaacctacaatgtgaccggtgggaatcaattagaaaaaatacaaaaatatttctggtcaattttttcacaatcaagaaaggaaaacaattttctgacataagcaaaaatttgttggccctatagggagcaaaagttcgattaagagcaaaatttaaaaaaacactttacctcaccaattatgccaaataaaactacaaacccaaaaattt

SEQ ID NO: 263082 - DNA, 445 bp, Glycine max
  unsure (1)..(445): unsure at all n locations
acacggtatnctctttctccacaatcttcagcacaatgtgagaattggcctatactttggctttcaaaagaacaacacttattgcaagtgaaatgcttggaccaatggaattgcaatggctgattcttatctacttaatctaagcactctgaatgacaattaatatgactaattggcagcttggacagcccttgaggttctctccacgagctcatcaatgccttatatggctccttgcactgtgccacaactatctaaaaggataaagtacacttttaccaaaaatggcaagaactactttagctaacactggcgaaacctactctaatcttctagaatagtgtgctaacctnccttcggatatgcgtacccagaagacaccttcgacagagtccattcacgtagagacaaatcacacttgcactcaatgcataatacaattccc

SEQ ID NO: 263083 - DNA, 664 bp, Glycine max
aagaggaaaaaattggtataaaaagaaaaaccggagaaagaaaaaagacaaaaagggaaaaaaaaaaaaaaatgaaaaagatacgaagagaaagacgacaatcaagaccaaaaaaaaaggaaaaaaagaaagcacacggctagagcaaaaacaagacaaaaaacaaaaagaaggaacacaaaggccgaaactagcaaaaagaaattaaaaaaagacaagcaaagacaaaagaaaaagccagggcggacaaaaaaaaagaacaaaaggggccaaaaaattgggccaacaaaaagaaaaacaagaacttggaaactacgggggaaaacgctaaaaaaaaaaggaacgggaaaccagaaaaaaaacataaatgaaaggagggcaagaaaaaaaaaaaaaaaaggcgaaaaaacaaaaaaaagaaaaaagaaacaaacatcggaggaggaaaacaaaaaaaaaagggaaagggaattaagaaaaaaaacatgctttttagggtgaaaaaataaagaaaaatccccaaccacctcaaagaatggaaagaaaaccaccaaaaacgagcccaaaaagaaagacaaaaaaaagcggggaaaaaaaaaaaaacacaaagccctatgggggaaagaaaggggaagcagaaaaaaaaaaaaaaggggaaaagaaa

SEQ ID NO: 263084 - DNA, 392 bp, Glycine max
  unsure (1)..(392): unsure at all n locations
agagaactttatgtatctctatcngagggaaccaatataaactaagtgtttntacttttatcttaagttatttgattagtattctctttagcttatattgacacactttgccacacaggtgttattttgagaaacctttgcgaaaatagttatataaatcactagacgatagtgtttttgctttcttcaaaactgcttntattctttggacgacattgccagcaactcggtttttacatatctttatgtgaaaaaaaacttcttgcgacaaaatatntatttcttttatctaacaccatattcgacctcccttctagtatgatatctgttattaacaaatgtggcagtgcaaagtaactgtaacaatagataacgctatttataatcataac

SEQ ID NO: 263085 - DNA, 615 bp, Glycine max
acctcagcatgcaagctttaaacttttacaagaatgaagtttgtttccactggtagacaggggcctcaaatattttaagagggggggttgaattaaaaaattccaaactacttccccaatttaaaaatttatttcactttctttttaagttttaaattcccttaacaatgaacttcttaaatattaattcaaataaaaacaatttgaatataaaggtaagccattataaacaaaggagattaagggaagagaaagtgcaaactcagatttatactggttcggccacacccttgtgcctatgtccagtccccaagcaacccgcttgagaattccactatctcgtaaattccttttacaagttctaaacacacaaggacaatccttcctttgtgtttaaaatcccttacaacaaaaaccccggtctcttatcccttaaaatgattaaaaaaaaaaataattttctaaaagaaatgtttttcaattgacccccaaaaattccttaaaaatgccataattgcccagaattttaaagaaaaacattttgtctttataaaaaaaacttgttcttaaaacttaaaattgtgtcaaaccccttttggctttatccctttatac

SEQ ID NO: 263086 - DNA, 504 bp, Glycine max
  unsure (1)..(504): unsure at all n locations
actcagctcgatgattacatctccctctttctcaagcaaattcttttttatatcatcaaaatcttcatgatttacattctccccctttttgatgatgacaaccacctgtaggttaggagcaacaacaaagaaaatatctatttgcatatagtttactcccccttggttttacaatgattgcttatatgagacaattgaagatttcatatttttcatatataaacaagtgtctcataaaacaatagataatntntcttactattttatctcttatctttctctccccctttgtcaacatcaaaaacaaatcatgaatagaaaggagaaagatgttaccacttgttgcaatgtatgagaataagtgataccaaaaggcattaaaacaatcattcaatattaatcaagcaaaaacaagtacaataacacatcaatcaaacacaatcgaacacaatcaatcattaaatatctcatatcagattaattaaattaacaatcaagtaacta

SEQ ID NO: 263087 - DNA, 556 bp, Glycine max
agctaaaccctaaagaaaagagctcgcccatgttacttgtgggcatagccaagaaggtatatcacgggccatgcgagccaaaagctaacctgggcgaaccggggtctaggaaaatataaaaagacccttttggcccctttcttgggatctttatggatccatgattgaaacactggagggatccttggctcaggccggaactaggggaaaaacaccgaaattcaactggcgagaaataaaaaaacaacgaacgatagtcccaaatgaaatgagggtctgacaaaaatatgcaacaatctctctttttgaggtgcatttcacacacttgcattgcactaggccaaaagtttggcccaacatctcaaaagaacaaaaattcaatctccgcctatatattaaaattttaagaacaacaacgcataacaacctttacccttatctttagaaaagaagtcaaatatcttaaaagtgaaaagacaaaaacaatcttaaaaaccggaaaaggttgaagctcctcccctataaagggggagaactattgattttcccccaaaaa

SEQ ID NO: 263088 - DNA, 465 bp, Glycine max
taacggttctcaaacatgagaagatatatagatcgatctcattagtttctaagaagcaataagttcaacattgtgtaatagactaccaagtctaagtaatcaattacaaagtgttagaacaagcaacaaaacttacttttcttgaaatattgacaagttttatcgaattaatcaattgccaaagttttgtaatcgattacccaggccaacttcaaaagaaaagagtttctttaactcaaaataattgattatcacatcttgtaatcgattagattgtgttttgaaattatagattaacacatttgataatcgattattccaaaaactatagaagcttgagaagattaccccattctgtaatcaatcaccaagtttctagaaatacagaataagagggatctgaaccaactaatcgattatctcattcgtcaattaaatatattctttatggtaaaactatatata

SEQ ID NO: 263089 - DNA, 352 bp, Glycine max
  unsure (1)..(352): unsure at all n locations
accaacgcttggaacatataaactgaattctatggccccctaaggacttagtcaaaatatctgctggctgatcattggaattaatgaattcagtgacaatctctttagacagtagcttctcccgaataaagagacagtcaatctctatgtgctcgggtctctcatggaagattggatntgaagcaatatgcagagcagcctgattatcacaatacaactctatttgcatcactttgcagaatttcaactcttcaagaatttgtttgacccacataagtacacatgtgactacagacatagatctatattcagcctctgcactatatctaacaacaacagggtgcttctactt

SEQ ID NO: 263090 - DNA, 468 bp, Glycine max
caagcatactgggaagagggagaaggctgggaattataattagaacacctgaaaaattaagggggacttgtgcattaaacaatgttgaaagaagatgggctactaactagtcaacaccctttgcggggtgaaaaactcaaaacaaacgggtggattaaaaagaaccatctaaaaaatcaaggcttggaaaaccgctttgggtgaagaaaaaaatataaagctgaatgggtggggagcacaaagaacttttgaggctacaagatatgaacaaaaaatttcaagggcagaaaccactacttggttctacattcttcggggtgcaagttgaattgggcttaaataaacaccatggggggatagaaaaagaatgaattatttcaaacctcattagggcaaaaagttgggtcccacacatataggccactaacacaaaaaattaaaattggaaatcttgccccccaatgggga

SEQ ID NO: 263091 - DNA, 488 bp, Glycine max
  unsure (1)..(488): unsure at all n locations
cgcgagtatcatacgctttgagtcttaacttatccatctcattcaattgntgctacctgttgctacctacaagcctaagatcaaagtttagaaactatagagcccacatggctttgtgaacaagttcaacaagcaaatggaaattcttcccataaactagactaaagggagacatcaaagtgggagtcttaaaggtttttttgtatgcccagagtgtgtcatccaatttcaatgaccaattctttctagatgctctcacagttttctctaaaaccttctttagttacctattagatacctcaacttaaccaattgcttgagggtgataaaaagtaataaccttatgggtaacaccatatttagccaaaaggctatcaaacaatttaatgcaaaagtgtggtcccccattaccaatgattgctcaaggtataccaaagagtgtacaaatgttctatttcagacatgtgattacactacgagcatcatta

SEQ ID NO: 263092 - DNA, 356 bp, Glycine max
taggtttgaataaagaccacaattttcttgattgtgaatccaaccaaggggaggaaacaggggacaaagatgattccacaatggaaatgctggacactcttactggttttagcacatcaacaaccaatactagcatgtgctcattgattgaagcggtgcattgatgcggtttgactctttatacaccgttcaaccacttcaagcgtcactttcttcactcatcttcctatagcgattgtaaagcccgattttatactcaatccctggatcacacatgatcgctctatgcaaactgaaccgaagatcttggatgtgctctttaactttcatgagaacatcttttgagatgcctcaca

SEQ ID NO: 263093 - DNA, 431 bp, Glycine max
  unsure (1)..(431): unsure at all n locations
agctnntaaaataagcataaattcagaaagatttgcgttataaaaagatgagtgaatgatagaacaaaacttgcatgtattctcttgattttaggattgtcatcatcaaaaagggggagattgtgaaaacaatgctttccaagattattttgatgatgccaaagactcaagtcaagaatcaagagtcaagcaagtttcaagaatcaaagagttgttcaatcaaagcaagtttcaagaatcaaagagtccatcaatcaagattcaagattcaagtaaagaatcaagagaagactcaattaagataagttttaaaagagtttgtcaaaatattgaataacacaattttgttcaaaagaatatttcatagaaaaatcttttaccaagagttacactctctggtgatcgattaccagaaggaagtaatcaattac

SEQ ID NO: 263094 - DNA, 366 bp, Glycine max
tgcatgtgggagaataatcaatttgtttatataatttatgggtgatttcttatgtgtgtaaatttttttgaacgggtcacagtcatacattgcgagtaagattagtctaatctagtgaattgatagacacatgtgatctctgatccataaaaaaaatatagataaataatttgaaattgtttcaacatatatattttttgtaatattattattttggactagcaacaaccaatgcaagcacaattttcattcttactagtttaataaataagtattattagcaataaaaagattacattgtgaattagttagaaataatttttaataaaaattgaataattattatataaaataataactttatga

SEQ ID NO: 263095 - DNA, 420 bp, Glycine max
agcttatgtataagtctgttaggtagttagtataagatcacagctgttaagagatagttgctggtgtaactaactaaactcttgagcctttctctctattctgcaagagtataaatgtatcataaatacagcaataaatgtctgcagtgcttttggtcatttacatttgttatactataatttccctctttctctcatggcacgttattagtttcaatatggtatcagagctcttcttgtgaagagttctgttgtgccaccatactaacgcttacgtctagctcgacttgctcccttccaacaatattaaccatgaatgagttactactgaacttggaaagctacctctacctccatccaagtgaaaacccaggcgtggcactcgtttctacagccttagattcgacaactattattcat

SEQ ID NO: 263096 - DNA, 347 bp, Glycine max
  unsure (1)..(347): unsure at all n locations
ttttcaatcgtcggtaagggtgatttttttttttataacatcgangccgagtgtatactatttttcaaccatgtttaagttgcacgtaggttgtgtcttcttcacagatagagcatgcatgatagtcgttaacactgtatccacttaaattcccatatgctagaaagtcattaatggtacaaaattgcattgcatgcaacttgaatgtctcattttgatacccatcaaacatgacaaccccctcgtcccaaaactttgtcaaatcttcaatcaatggactaagataaacattgatgtcatttcctggttgtcttgagcccaatatcatcatagacaacatcatgtat

SEQ ID NO: 263097 - DNA, 402 bp, Glycine max
  unsure (1)..(402): unsure at all n locations
ggtacccatcacatgtggttctangtggaggtcgggcgatggtgcacaacaaattttccacatccacaaatcgtgcataaacccaccatcccctgttgcccacctccaattgagctcacgtactcccacgtagcccatatcctcgtttctctcaacaccgggtccccatcaatcctcccaagcttccccaacatccaagtaattcaacattcaaacaacacaaactatcacagccaagaaaatagggcaaaggcagaaaactctgcccaaaacaccaaccaaaatcacagcttttctcacttaaagaccccagtaacagttccttcgttccagttcgttaaccgttggatcgactcgaaaatttcactggaagtctctagtacataatctctacatttgacc

SEQ ID NO: 263098 - DNA, 353 bp, Glycine max
tgtctttggtttaaatatgaattatactttatttaggacttgtaggatccaatttgagcaaaattggatgagggcaagagggatttcgaaatctgcccaatttgtgtagcaaaaagctgtcaaattttgtgcagcagaatttggctcttgtgcaaaaaatgtttgtgtattgctggttgtggaaagggtagtaaatattgggttctggacattttctagcagatcccaacggtaaaaatgtagacttatttactagggacctccagtaaaactttcgagtcgatccaacggttaacgaatcggaacgaagagaatgttactggggtatttgagtagggaaagttgtggtattg

SEQ ID NO: 263099 - DNA, 401 bp, Glycine max
agcttgtattcttggtatatttcatcaagatattgttgtttctgatgtgctgtattgcaaacctcaaagaatacaagttgagggtgtaaagtctccatggagtcaagtccatctttgttgtcaatgattaatcaactggtgatgatgatgtttgattggttgaatcatgatagttgattgattcgcgttgacctaaatgtatgattgaatgacggttctgggtgaactgaatatcttatgctgattgtcttttgaattaatggtattatgagatgtcctattttgtgaacactaagattttttgtttacatatgacttccacatgttatgctcttaatatgacggactttgatgaagtcttaatatttaagttgatatttgttagaatgggtgcttttgct

SEQ ID NO: 263100 - DNA, 364 bp, Glycine max
tcatatgtctgagtggactcgtcctttgtttttatcatccactttatcttgaaggttttctcaagtttcaaatgatctttggatagttttttgatatcttttcacaagtttttgtaagcttttgaaagaatggatgagtttgatagtagttcatgatatgtatttttaagagattcaggatcattgagatttacctcatcctcttgatcttattttgattctttagaagctgtatcttccattaggcatagattgacttcttcttcatcagacgaggtatcatctagattttcccaggtgctcatgagacctttcttctatttggtcttgtagtttttcttcttgtcttgagccttttccaatt

SEQ ID NO: 263101 - DNA, 390 bp, Glycine max
gcatgcaagcttgtatgaagccaaaagaggattattatattattcttcggcactctgaaggaagtgatgaggagaagcattacaatgagccacgcttgcgagtatgactccacttataagcaaagaaagctgagatatgacatgtctccaatattgaaacaaaaggggaaagtgcacacacacacactatgtctgatatattacaacaagagtgtgcattatacttatactcttgcattccacagaggaaagaatcactccctttgcttgaatatgtcatcacaaggagcaaccatgaaaggtcctcataagttttatttgaacgtgcttcaatctctatatcttgaagttcaaaaaaattgatacaatgggatactttgttctcatgca

SEQ ID NO: 263102 - DNA, 353 bp, Glycine max
  unsure (1)..(353): unsure at all n locations
tattaacaacatacacacaagtttatttatgctngntagggcattaataattaatatcaagactacttgcatcacctaacggcttgtcataatgtcctactgcacttcacaaattatagagatgaccagtctcatagctcgtgactcaacagtgtaattatggtatagcagacattaaggatacagggcatataatgagcatcaattagtctcatgcaatcatgcatgcgaaatggaaaaacaagcaacaattccaattaatttaaacaacaaaataaccacaaaaaatcacacagaatgcataatagaatatgataattacataacacactgatcgaagggttctaccttac

SEQ ID NO: 263103 - DNA, 429 bp, Glycine max
agcttgtaacgttcaagtctcggtttattatgttttgtacattattaattagttatatagtagtattatttacatatatataacatacttatagttttgatattatgctagtaatatttttcaatggcaaacagtgtataattaaaagtctggcggcgattttgaattgatttgtggtgaatataaataaatgcgagtgacgccaagacgttaaccactcagttacaacaaaaatgacaacacaacaacgaaaacgattggtgactacgtacgtccactcgaaggtaataatgaaccttactcgttggaggaggactgcacaagtcaattagcagataagaacacaaaggaaaataataaagtatcaaaataaaaatacaaattaaatatttatcgctacttaatctggtattttttattttcatttgg

SEQ ID NO: 263104 - DNA, 364 bp, Glycine max
ttagcaaaatgggagaattgacttttactttggcttttaaaaacaacacttattgtaggtgaaatgcttggaccaatggaattacaagacctaatccttatcttcttaatctaaacactttgaataatcattaatatgactaattggcagcttggacaacccttgccgtcttctccatgagctcagccatgccttaaatggcttcttgtacttttccaaaacaaactataaaaggataaagtagagtttttgccgaaaatgataaaacacaaacacacacatagcacaaaattctatgattaaaaatatatgacaattgaaattaaattcatacatgcacagatgacacaacacaatgttttct

SEQ ID NO: 263105 - DNA, 336 bp, Glycine max
  unsure (1)..(336): unsure at all n locations
agcttgctgccagtgctagagaatgttcatattattacactgnctcggaacacgcttatgatgatgccagatgggatgcaaatgatggctgttatggccttccttggaaagtgtgattatgacaatnttatatatacaccaactaaaaagtccaaatttctatgttaatatgtgcacaatcaattgaattcatgaagttctagattattgagaccaagtgggaactcgacctccctgctttgctaaactggaacctgtgaaactatagaatatatcctgcaccaaaataaccgatgaaaaattaaattgggtagagaaatgatcacttacaacgtt

SEQ ID NO: 263106 - DNA, 327 bp, Glycine max
tgcacttatgtggcagggcgggtgtcttatattttgctgcctccaacgcgagcttagaccactgttcccccttcccgcgacgcttattgccatgtccggctgactgggcttatagccttaaccattcttccacacaattcctggggtatttctcacgcatcggtttgccgacaggagacttagactaaacccatcccgggttcataaccgctccccaacttagcactggccatcattaccgatgaacctagacggacaaagctgtgcaaagagggagacctctgaggacatgctgcccacctcagaagactggatagcaaacattaa

SEQ ID NO: 263107 - DNA, 412 bp, Glycine max
gagcttggaactaaacaaattgtcactaccattttctatccacaaactgaagggcaaacagaggtagtgaataagtccttatccaccctttaaagggctcttccgaaaggcaaccataagtcttgggatgagtatctccctcaagtagaaaccgcctacaacagggggggttcatagaaccaccaagcactcccctttagaaggttgtctattggagatcaattcctcctaacactagatcagaaccacgattccccctcccacatggacacattcttttatacataaagaaggggaatctcggcgagagtttgaaaagaagttgcatgagacggttaagaaccaaatagagaaccaaacaaaggtgtattctactaaaggcaacagaggaaaaaaaacactatttcttaat

SEQ ID NO: 263108 - DNA, 346 bp, Glycine max
  unsure (1)..(346): unsure at all n locations
tgtagaatggctggacatgatactttgtttggtttggntnggtgcaaggataaaaaggatgccccacattatttccatgacacaaatgcaaaaatgatgatttggaaattttatgcgaaactggttatgcatgcacctatgcggacactcaagtgtcaaatttttatggtcatgtgatgctcgggctcacgattcatttgctctattttagtcaacccaacgtttccaaaatatgttcttttatcaatttgtgcattcatccgagtccattttgggcgtctgggaaaatcttcacagcattcacccttcaagtgtatacacattttttcaaaaactagttatgatc

SEQ ID NO: 263109 - DNA, 402 bp, Glycine max
  unsure (1)..(402): unsure at all n locations
agcttanggatggaacacttacttgttggtgattaacaaaagcgcataatggaataaaaaatgcgaaaaaggatggccctagggctgcaaactcgtcaatcccgtgggtatggcttttgaaaggggggaaaagaagtttttgaatgttaaaacgccccccctttcgtcattcttataatttggtgcaagggtggctcgcccaggctagcccagctcgcccaggcgagctaacctgcacattttatttttttttttgaggggaatattaaccatgtcccctcccttctcatggattagcattttgcctaacttgaacttacttatgttagaattaagcgtagattacttatcttattactttttaatacaaacaaaaagtataaaaaatctgctatatacaaa

SEQ ID NO: 263110 - DNA, 361 bp, Glycine max
tataatatattgatacgctcgatttttaacatcggaaactctcgagaaattcaaatggccataacttttcacacggatgtccgattcgagcgcataatatgtcgagaggctcgaaattgaataacggaagctcttgagaaattcaaatggtcataacatttatctcaaatgtccaattttggcgcatcacatatagggacacacgaaattgaacaacagaagctctcgttaaattcaaatggtcataacttttcacactgaggtccgattcagggttataatatatcgatacgcacgaaattaaacatcggaaactctcgagaaattcaaatgatcatgacttttcacacggatgtccgat

SEQ ID NO: 263111 - DNA, 147 bp, Glycine max
cacagcaccgcagcagcaaccgaacccagggttcatttttctaggtgctccttccaaacaacagccctttggtaggaagaaccggaagggccaaaagggcccaaatgatactagtacaacctacctacgaaaaggacccccctacca

SEQ ID NO: 263112 - DNA, 358 bp, Glycine max
tgtagggttaaagtctcattattgttacgtgctgatgcaacaattgttagccgtggctatacgagacatcttgccaaacaaagtcaggttagcgataactcgcctgtgctttttcttccatgctatatgtagcaaagtcattgattcagtcaagtttgatgagttggaaaatgaggccacaattatactgtgccagttggagatgtattttccccctgctttctttgacatcatgattcacttgattatgcatctggtcagagaaatcaaatgttgtggtcctgtttatctacgatggatgtacccggttgagcaatacatgaagatcttaaaagggtatacaaagaatctatatcgt

SEQ ID NO: 263113 - DNA, 313 bp, Glycine max
cttaatcgactgcggcatgcacttgcaaaggcgaaagaatttgtcttacagccagcaacactgggggaatatgcgggccattattgacgagcgccaagaatagccaaaactcgcagcgacccacgagcgaaagctaaaggatgagtacgcccagatatctgcaaaaagggaagcaatggaacaggtcattcgattcattgcgccaagaggctacacaggggaaggaccaacttgctcgtacattgaacaagagtcaagaacttacccgactgctagccaaggccaaagcaatggctgacacctactctgaccc

SEQ ID NO: 263114 - DNA, 339 bp, Glycine max
tgccttggtaaggaagacatttttttttgcaattgatctagttggatttatctatgcccattctaataccttaagtgagtcgagaaatgttgctaactagagggaattggggagacatgctattactagacttgccacttattatctaaccttggaaaggctcctcatagagagagcaaatattacaaagatgttcacttctgatgaatggaccttgaacaagctatctaatgagcctaagggaaaagaagctgctaaggtagttctcatgccttctttgtggaatagtgtggtttacattattaaagacatggcttcacttgtgaaagtgcttcgtct

SEQ ID NO: 263115 - DNA, 423 bp, Glycine max
  unsure (1)..(423): unsure at all n locations
gcttttattttcagtagatgaagatgaattcttggccacctcatggactcctctaagaacaataacatcatttcttgcactaaattgttgggagttggaagccatcttctcaatcaaattcctagcttcagcaagggtcatatcaccaagagctccaccactggtagcatcaatcatactcctctctatgttactaagtgcctcatagaaatattgaagaaggagttgctcagaaatctggtggtgaggacagcttgcacacaatttcttgaatctttcccagtactcatgcaagctttctccactaagttgcctgaaatgtcttttttgatggcagtggtcctagatgcagggaagaatttctccaagaacaccctcttatggtcatcccagctgaaaatggacctgngagcaaggtagtgt

SEQ ID NO: 263116 - DNA, 365 bp, Glycine max
tgtaattcgtgttaagggaggtgaattataatacgcagataaccactttctctctttttctctctttctttctctctctctctctctctctgtgtgggaggacccttgggcctcgaataccaagcatagcattggtgctttcattgagcaaccatggcggaagcaactcactctagggtttcagcagaccggattgaggatgcaatcgcgaaactctcagcttcacaactagcaatgaacacaaagatcgacgacctcctccaacgaatgaatcaattagaggttggccagcaaccaccgcaatcattgtcgtcgtcttcagtaggacaaacaccgcaaatgcataacgcagtccaccgcatgaa

SEQ ID NO: 263117 - DNA, 417 bp, Glycine max
  unsure (1)..(417): unsure at all n locations
agcttctatggaggctggatctttgagcttctattatgtccttcaatggngattatcaaccatggagatgcagcggaagataaaggagaagaggtgagaggagacaccatccactatggaataagccatggaaggatgaacttcaccaccatgagagtccttcgataaaaagcttagagaggaagcatcaatggaggaaaagaatgagagagagggggggggggcatgaaattgaaggagaaaaaagagggagagaagtcaaactttgctgtgtgtctcacaagtttcacattcatcaaagttgtgacaagtgttacatatgtttctatttatagcctaggtcactaactaaatgaaattcacaaaagntaatttcattttcatttcatgcgaatctaagaggaatattataaggat

SEQ ID NO: 263118 - DNA, 364 bp, Glycine max
  unsure (1)..(364): unsure at all n locations
ttgaacaacttttacaactcacatttttttttttcagttcttggagatttctaagcaatgtttctctgaaggttatgtgattagcaagttgtaaacatacttgagatcaagagaggtccattcaatcaagtcttttattcttgcatttgaaagtaaaggttgtatctctccgtgactttatttcatatggtttttacacattgttattacatgtgcatgagtttttacaatatgctagagtaggtgtttctagttttaagctaagagtatgtttcttttaggcttatattaacaaatgaccctagggttgggtgcctaagtttcattttctaggtagaatntgaaattacttgtgattgcttgt

SEQ ID NO: 263119 - DNA, 421 bp, Glycine max
  unsure (1)..(421): unsure at all n locations
agcttccaagagttgaagaggcggttgacatcttctncagtgttaattttgcccgaccctaagagaccatttgaagtgtattgcgatgcaagcgggcaaggcttggggtgtgtgttaatgcaagagggaagagtagtggcttatgcttcacgccaattgcgtcctcataaagataactatctgacccatgatttggaactggcagatgtggtctttgccttaaagatctggaggcattatttatacggtactcgttttgaagttttcagtgaccacaagagtctcaaatacttgttcgatcagaaggaactcaatatgaggcaacgaagatggatggagttcctcaaggattatgattttggtcttttctaccatccaggaaaggctaatgtagtagccgatgcgctgagccggaagtcct

SEQ ID NO: 263120 - DNA, 351 bp, Glycine max
tctcaaggaagttttctcaagaaagcttcttaaggaagctacctagtctataaatagaagcatgtgtaacacttgttgtaactttgatgaatgagagtcttgtgagacatacttcaaagttccacttctatacctcttttattccttcaatttcgtgctccccccctctctctttctctccctctttcttttcctccattgaagcatcctctccaagcttcttatccaaggctcatcttggtggtgaagctccttcttccatggcttattccttaatggatggcgcctcctctcacctattttcctttgtcttccgctgcatctccatggtggaaaatcaccattaaagga

SEQ ID NO: 263121 - DNA, 354 bp, Glycine max
ttaaccgatcgtttaagtcatttttttttctaataaatgacaaaatgaatttcaactgatcatttgtgttgtaatctggtttaatcactgttaaaacataatctaacctatcgttcacgctgtaacctcggttaaacaaaaaaaaaagcaaaataagaataaaataatcaaaatatcttgaaaaataagaataaaataatcaaaatatatttgaataaaataataaaaaaaatcaatcggacgtttttctttggaagttttcttggatcaattgactaataaccaaagtgaaactaaggctaaaatcaactcactaatcaagctttgtccgcaaaaatcaccaaaaaccgtttt

SEQ ID NO: 263122 - DNA, 401 bp, Glycine max
agctcgttgacgtgtgctgagtgttgtcgctttctaccctactactggacggcgaacgccaaatatataggccaaaggcgttcgtctccaatgaagaaaacgcggggattcgccaccaacgtttattctaggaaaacgttagaaaaactaaaaagaggtctccaaattttgaaaataagggttcgggagttatttatgcatggggaaggtattatcaccccacgcgctcatcacaagggacggtagcctataatcaaatctgccaaaacgtgacttcagatatatttacttttcccttttatatttttttttatttcttggggtcgacaagggagtgtgcttgcttctacctattcttaagagcaatgaggaattcaaacctatgtgagtctttaagtcta

SEQ ID NO: 263123 - DNA, 364 bp, Glycine max
  unsure (1)..(364): unsure at all n locations
ttntgaaaaacattttgctattggtattttattacaacaatctggtaatcgattaccagagagtaaaaactctttggtaaaaggtttttgagaaaaattcatgttctactcagtttttgaaaaatttttttaatacttatcttgattgagtcttcttttgattcttgaatctttagtcttgaatcttgatcttgattcttggaacttgaatcttgaaacttgattcttgattcttgaaatcaaatttcctgttgaaccttgaagtgttcttgattcaatcttcaactcattctttgattcttgagatcatcatctttgttatcatgaagtgttcttgacttttgagctttttgttatcatcttt

SEQ ID NO: 263124 - DNA, 362 bp, Glycine max
tcatgctgatgacccatgcggtttttttagcttaagataaacagccctcggatgtttatactctcttagactgagctctcgatcgcagatccctcgtttgagactaggctcatgataagaagcttaggaaagtctagactcattaaacctaagctttctccactcatgcctcaatgaatacgaggcttacgtcaagcaaccttgttgactccacatggtgtgtaccgaaacttaattttcagatccctcctgtgcgactaagtgttaatcctgctagaatcactctctaatgccttagtacccttacctatgactctgtggccatagcttgcccacttactggtgatcagaccacagcatac

SEQ ID NO: 263125 - DNA, 413 bp, Glycine max
agcttagcaaccaataaagatatcatattgcttttcacatattccatgaagtatatttcctcactaaaacaatataaccaaacaatacagagtctaagagaaacatacaggattttgttcagcacgtgacttgctgagagagctaggattctaatgttaattatctatttcaaattggaaaaaaaaaataactgaggtgtaagaaaatataaagcacataagcagtgaggatcaaatgaaaagcaaatttcatatttttcaaatcattgtatatgaatgtcatagaattaatggtttctcatcatgcagatctaaaattcaatctcctctctaactaaaatttcatatttgaggataatgtgccttttcatgttaagtactgagaggagggttgaacaaccttgtgtttgcag

SEQ ID NO: 263126 - DNA, 363 bp, Glycine max
tgtgcatcctttgctatataaatttctctttcagtgcgttacaggaagctgaagcaacaaattgcatgcattaaattattgcattttcccaaagttccaattaatggtagattggtttggttggcaagtgtgcagtctcaattgctatttctgaagaatcaaggttgcaggggcgttagaattattcgcaaggtacacggttgtgcaagcagctgaagggttattcatgcatagtaaataattatatcataaacgctttgaatgctacacaacaacatgatcaaacaatgcagactgaggcttgtcacttggtttctaatttaatgaacttgggctaatactgagaattcgttttaaagaaat

SEQ ID NO: 263127 - DNA, 405 bp, Glycine max
  unsure (1)..(405): unsure at all n locations
agcttctatataagctgaaccattttatcaattaacacaagttgagttntatttagaaaattagagtttttctcttttatcttagtgagagtgattctcctaaattcttgagtgattcaagaacaccctggctgtatcaaaggactttcacaacctttgtgtgttgccctcgctggaaagagtgagtctttccttcctttcatcttcacccttgttctttcaaaccacaattccagaaaatccacctctacccagaattatctcgtggccgtaactcccattttacgcactcaaattaagtgattcttgagcctaaattgactttcaaaacgagacctttcacctcgttttggaatcacctcatttggagccctgtagcttcagttattgccatttctatatttc

SEQ ID NO: 263128 - DNA, 347 bp, Glycine max
tttacaaaaaggttcatcaagtcttgttgaaatatggaagtaaccatcctgcaaaattggggcaaaagatgaatcgagtcacatcactgcttcgtctactgccaaacatatttaggattattgatgtccttgttacttccagtttcaccttgacaaagatgtcatggaccatgttgaaaatctaaattgattcaaccccatatcctgcgtaaaaattcgcaatacttcgactgtacatcattcgcatgcatccatgcttttcattggttgcattgctcattgcattctttccttgaaaaataaaataaaataaaatgaacttatcaaaaagaaaaggaaacgcttta

SEQ ID NO: 263129 - DNA, 414 bp, Glycine max
  unsure (1)..(414): unsure at all n locations
agctngaatatcttgaattgagttatgcatttttatccaaagcatttgattggctacacactctccaatctcttccttctttgacccacctatatttatctgaatgcacactccctcactataatgaaccatgcttgctcaacttctcatctatgcaatttctcattctttacaatactagttattcccctgccatttattttgtccccaagtggatattcaaattgaagaaacttgtttctcttcaattagtgcgtaatggcatacaaagtccgattcctggtggtattctaaacctcacacttcttcaaaatcttgacttgtctgaaaattcattctcatcttctatacctgatggcttatacggtcttcatcgactcaagttcctgaaccttatggacaacaacttacatg

SEQ ID NO: 263130 - DNA, 342 bp, Glycine max
tacatagattcccgatctgagttgtttctgttccgttgccaacatctctcacggcatgatacaccaaatttgacagattcccaatctgaggaagaatcttcccccacaatccaatataatagaggttgacgtgagtcaaggaagtcattgttccaaggaaagaacgaattgccataccttttacaaggaattcattgtcgctcatgtccaaataattcaaatgctttaaatcaaccaaacaatgacttatctctccaccaaagatccatcttcgataagcttccacatcgaatctacggtataatccatgatatgtattcatactcgaaagcaaaatctgac

SEQ ID NO: 263131 - DNA, 419 bp, Glycine max
agctttgcttccacaaacaagaccttataggcgcaccggtggccgcgatgaaacttttcatcacagttgaagaaaaggtcacgttcccgccgcatagccaactcctccaatgacaagctcttgatcaggagaggtggagaaggttgcaacggaggtgacaacaaaagtgaaggggataaaggcaccactagcaatggaacttctcctcttgaagacacgttaatcctacggcttgaaccaaagtcagaggttgcaaggtttgaacctcgcaaagaatctcaagagtcaagcccgagataaagcaacttaaaggaatggtgggggaaggccaatggtgcggttggcaaggtcttcaaacttgaagaggtaagcattgatggtactacactatgtaaatataaacaaggcgcttatgggat

SEQ ID NO: 263132 - DNA, 365 bp, Glycine max
  unsure (1)..(365): unsure at all n locations
tgtgttgcttccaagagtgagagtttatataaggaagaacaaacggctgcattttgctttatatcaaactctgaaaaaggctttgtacaaacctgctgcattctttaagggcatactgttttcactatgcgaggtattttgcttgtttctatgttagtttttgacattccaaattaataattggtggatattttcttaggttctatttgtggcattatattaattcttcaattatggtatattttgctttttcatataataatatttcacccatcctttanggtgagctgcatctgatgtttttttattataattgctggaatatagaggggggaaattaactatgaaccgtgttttgcaaaatg

SEQ ID NO: 263133 - DNA, 410 bp, Glycine max
  unsure (1)..(410): unsure at all n locations
agctctattcaagacaatgtgaatttattatattcacgatggatgatcaagacagtctctatagtcttagaaagggcttattaaataggaagggaattccaattgaagtagccaaaggcttggccaaaaattttaagttaaaaagtctttttcaacaaatttactctctgggaatcgattaccagaggatgtaatcgattaccagtggccaaaactgatttacaacagttattaaaatatgaattcaaaatttgcactgtgtaatcgattacacatatatggtaatcgattaccagcagcttctgaacgttcttaattcaaattttaaagcttgtaatcaattacacacatactgtaatctgataccagaggagatatntagaaaacattctcaacagtcacatcttttt

SEQ ID NO: 263134 - DNA, 356 bp, Glycine max
tgctatttcgaacaatattcttattatcgatctaaaatgacatatcactaaattggcttcaacacaaagtgagcatgataaattgtagcaagaaaatgaaaaacttgtttcaagttataaagccactagttgtgtttgtgcttatacttctcttaatatggatgattacaaatctttgcaaaatgagtttgaaaagtttaaaaaggatcactatgaagaacgtatgaagttacaaattgagctttcctatcttaaagatctttttgagaaaaaaaagatgatggaactcaataaaccaagaggaagagagggggtaaattggttttcaaaacaaaatgtaccattcaaaaataaag

SEQ ID NO: 263135 - DNA, 413 bp, Glycine max
agcttcaacattcaatttcgtgcgtctcgatatgttacgggactcaatcagacatccgagaaaaaagttattatcgtttgaattggctcacagcttcaacattcaatttcgagcgtctcgatatgttacgggactcaatcagacatccgagtaaaaagttatggtcgtctgtattggctcaaagctgcatctatcaatttcaagcgtctcgatatgttacgggaatcaatcagacatccgagaaaaaagttattgtcgtttgaattggctcaaagcttcaacattcaatttcgagcgtctcgatatgttacgggactcaatcagacatccgagtaaaaagttatggtcgtttgatatggcctcagagcttcaacattcaatttctagcgtctcgatatgttaccggactcaat

SEQ ID NO: 263136 - DNA, 339 bp, Glycine max
tcccaagtttttaagatctttctttttactgtcctaagcaaagttcccaaagtcctattaacaacttccgtttgcccatcggtttgtgggtgacaagtggttgaaaataacaatttagtgcccaacttgctccacaaagtcctccaaaaatggcttaggaacttagagtccctatcactaacaatgctccttggcaaaccatggagtctcacaatctccttgaaaaacaaatcagccacatgggaagcatcatcaacttttttacatggaataaaatgagccattttaaaaaacctatcaacaaccacaaaaatggaatctctaccattgcttgttttt

SEQ ID NO: 263137 - DNA, 344 bp, Glycine max
  unsure (1)..(344): unsure at all n locations
agcttgggcagatcaaggagagtagaactcattcattgatatattagcactattggtgtttgggaccatactctttccaaatatttacgagctagtagatttagcagcgatcgacgctgttcttgcttatcattatagcaaggaaaacccaatcatcgttgtcttggacgatgcatatgacacattctacctaagatgcgaanaaaagaacgtgaggaatgtctattgcacacccgctctttatgtgtggttggtttcccatgtttttcatcatgaaggtagacctgtctgtcccctataaggtcatcgcatgtgcaccgaaaagggaaaagcaaattgggagg

SEQ ID NO: 263138 - DNA, 364 bp, Glycine max
ttccagcgccatgtaccctggggttccaacaatttctcttgttgagtggtgagtttttttgctgagatgaactgtgcgagccaagccaaagtctccaagctgagcattgaagtccgaatccagcatcacattgcttggttttatgtctctatgtagcactcttttgtcacatccattgtgaagataatccagtcctgtagaaactccacatataacattgagcctcatttcccaactcaaaattgaatcccctccaaatgttgaaaaaatgaatttgtacaagctaccattttgcattaactcatacacaaggatgatctcacccttttcatagcaccaccttattaacttcactagatttttg

SEQ ID NO: 263139 - DNA, 410 bp, Glycine max
  unsure (1)..(410): unsure at all n locations
acttaccttgaattaatttctttgatagcccttttgagccttgtttccctttccttgttttgaagctcactacaagccttaagtgaaaaaccatgatattaccatatccttaaggaattntggagctttggaattgttttgggaataagtgtggggggtttttgtttcattggacaacttgttttgttggctatgcttcatgatgtattntgggccatacttgatgtacattgtatattggttaaatgtggacatgctgaatgaaatgttgtttctcaaaggctaaagagtaaaaaaaaaaaaaaaaattggaaaaaaaaattgaaaaaaaaaattcggaaaaaaaaaaagaaaagcaataaagttgagtgaataagatcttaaatggcacaagaatgatgaaactcttg

SEQ ID NO: 263140 - DNA, 375 bp, Glycine max
ctataaatactcagcctacattgaaagtagtggaggctttacaactctgaaaagggaaacattgtagcttgcggtggtccaacaagacgcgacgcaaaaaccaaagacgcacgacaatggacgctaccttccttcgaccatcgtcacgatggtgccacggagatgcaggcaaacagcagaagtcacaatagaaatttcagacaaatggggagggagctcgagccaggtacgagtgttcatcaattagagcgcaaaagtgggatataaacctcaatgttaacgatggtgggtgtataaaaacgtcgtttatattcaaaatttctaagatgatgtttacaaatacaccatcttagattacctactccataacctact

SEQ ID NO: 263141 - DNA, 438 bp, Glycine max
ttaatcacctgcagctgcagctgtagcaatgcaaccaaataacttttattcttgatattcgattgagtcccgtaatatatcaagacgctcgaaattgaatacaaaagctcttagcaaattaaaatgacaataactttctactcggatgtccgattgggtcacgtaatatatcgagtcgctcgaactgaatacagaagctgaaaacaaattcaaacgacaatgacttttaactcggatatcccattgagtcccgtaatatatcaagatgttcgaaattgaatacaaaagctgtgagaaaattcaaacgacaataactttttactcggatgctcgattgagtcccgtaatatatcgagaccctcgaaatttaaaacggaagcttgtagcatattcaaacgacaataactttgaacttggattttcgattgagtcctgtaa

SEQ ID NO: 263142 - DNA, 349 bp, Glycine max
tctattttcaaattcaagcatcattatttattactggactcaatcggacatccgagtaaaaactaattgtcgtttgaatttcctcaaagtttctattttcaattttgtgaatctcgatatactacacgaatcaatcggactttccagtaaaaatgtattatcgcctgaattttctcaaagcttctattttcaatttcgagcacctagaattattaagggactcaattggacatccgagtcaaaagttattgtcctttgaatttcctcagagcttctattttcaattttgagcgtctcgaattattaaaggactcaatccgacatctgtgtcaaaagttaatttcgtttg

SEQ ID NO: 263143 - DNA, 421 bp, Glycine max
  unsure (1)..(421): unsure at all n locations
agcttaatacacactcaacctcacacacacactcttttatagcctnttacctacacagttgtctatacaatacagctgtctacaatatatatttaacaacatctaaaggtcaagcccaatcttctttattcaacattttttccaatgtctgtccagatgatgttgctagacttcttgaaaaatgcatgggtgttgtcacaaactgcagtggtttacccgaggatgttgatcgacaaattgaaatcaggtctgcacacaagttgttgctttcactgggtggttttgatgacttgattgaggccttaacggcctccttgcataaggttgcctatcgtngccacattaaatttggtgtagacatgccatctcatagtggttcattcgctaaaagaaagacatctaagtcctctggaaaaatttc

SEQ ID NO: 263144 - DNA, 351 bp, Glycine max
tcagaatacaaccaccatcacctgttctttttatcttgcgaagatgggagcggcaactttcatgaatgctatcgtcaggaagaatgtcctagtgacatgccctctcttgctgttttcggatgccatggagagatctgaatcgccttgaaaaaaacccaccaatcctaaacccatgtaccagatccaggacaagactcttagatgcagcggtggtgatgcttgttcgcaatgacgaagttggagtttgaagggaggagtggtgatggggtggctaagagggaagagtagttcgggttgaaggtgaagggagagtgaaaggtcacgaaatatagctacagtccacgtttaaaa

SEQ ID NO: 263145 - DNA, 409 bp, Glycine max
  unsure (1)..(409): unsure at all n locations
atccttaaccacctcggctgcagcttaatggtctagatgtaaaactgtttattaaatatatgatgatacgttcattatgctatgcaaattataaaaaaatcaaatttgcttgaaataaacgtaccgcttgccagttattcctaaaaacacctaaaatgaaggaggacatccagtgcatgacataataactgcactcaccgcttcctttttgtctattacactaaatacataatgaaanttggatattaattaaacaactagggtaccgacacataagaagtatatatcaatggaagttttatgtaaatgacgtaccttgatgacaatacacctatcaggagcctttgatntaagctgtagagcatcatcaacacctattaaagcactgtttcagactagtaacaattaa

SEQ ID NO: 263146 - DNA, 365 bp, Glycine max
tgtgcctttttctacgagcgctgtcttgtgttctcaaccaccccatttctactttgctgtaaacagcctatctcttattctgagatcttgaccacttttgctattcttgccatagaaggatgaaacccagaaaaaaggtatggcttccttcctcctaccgggcatccaaagatcccttcgaactcttctatggtcggtgccaactgaaaatcacaaaaagtgaagcatctgagcaactggttgttgtattgtgcaagggatgtgatggcttcaatggacactattaccatggccaaatcctatattttactatacgccttgatgaaggcttgacatcaaacttcatccatccactgtcctagttc

SEQ ID NO: 263147 - DNA, 424 bp, Glycine max
  unsure (1)..(424): unsure at all n locations
agcttgtgacagacctgagatccttgttgtattattgcatgcaaatccaccagcttgaacaatattatatgcaccattgaagcatgtgcaaacaatgcgatcataatcctttatgataggataaccatcagcatacaacaactcttcagggacaactgtccacccaagccgaaccccagtaaaaccagcaatatttgagaatgatgaaatttcaattgccacccactcacatacacacaaaacccacatgtgagtaatatcaaggattcttctcttaaacctttattttcagctntttctcataacacatttttcttttaaaaaaattagattaaaanttttaaaaaatagttttatacttttgtctatctacaaatcaccttccaattgcgattcgatgacaatctatcagtgcatgaatatt

SEQ ID NO: 263148 - DNA, 362 bp, Glycine max
tgtaggattatggggtacccatcttatgtggtactaggtggcggtcgggcaatggtgcacaacaattctccacatccacaaatcacgtataacccaccatcccttgttgcccacctccaaatgagctcacgtactcccacgtagcccttatcctcgttcctctcaacgtcgggtccccatcaatcctcccaagcttccacaacatccaggtaattccacatccaatcatcatggactaacaaaaccaagcaaaacagggcaaaggcagaaaactctgcccaaaacacaactcaaaatcacaacttttcacatacaattaccccagtaacatttcctttgttccaactcgttaaccgatggat

SEQ ID NO: 263149 - DNA, 422 bp, Glycine max
agcttgtcactatgttctagaacaggatgtgttatgtatctagcaaactgcttaggaagctagaaacacacgtatagcttgggatatattccttttcattaatgagccttctatataggctttttagacatacaacaactaacacagagccaataactaactgtaatagaattagttattgactaattcacagcttatcgaatcaattagaaactaactctaacatatcctccctgagactgaattatcaacaaggaatgcagtttaatcatacaactttatcatccccaatctgctactaaagatagagaaggattctaacatcaaatgctttgtgataatatcagagatctgctcttgggacctacactgaaccaatttgataacttcatctttgcaaaggtcgttgagaaaatgaaatc

SEQ ID NO: 263150 - DNA, 347 bp, Glycine max
tcagagaagtttcttgagaagctatatcttatccacacacgcctctggtaactaagctgacctccttgagaagcttccttaagaggattcctaaagaagctagagcttagctacacataccactctaatagctaagctcacctccttgagatgagaagctagagcttagctacacaccccttataatagctaagctcacccctatgccgaaaaacatgaaaatacaaaaaaagtccttactacaaagactactcaaaatgcctcaaaatacaaggctaagaccatatactactagaatggccagaatacaaggcccaaacgcaggaaaaacctattctaatatttac

SEQ ID NO: 263151 - DNA, 413 bp, Glycine max
  unsure (1)..(413): unsure at all n locations
agccttgttctcaaaataaccaatgttatctcatttttctttatgatgggcaattnttntatgtctaagatcagaattngtttttttgctttttatttccttcaattttctttaatggatttcttgatatttttcatatgagaaatcaaatgactttcattcaacaactagaagctgtgggtatgtggtgtttcttattcatttttttttctttttcattttaactttccttcatatttttttaggaaatttctttcttttctcaccctgcaagttctgaaggactacatgtttgaactacattatttatattagaagaaaaaaataaaataaaaaatgcattttttattcctatcttacaaaaaaattggattcttgctaaataaataagccaacaacccgtgcgtacgcac

SEQ ID NO: 263152 - DNA, 351 bp, Glycine max
tgtgttagttttcacgaagttgtgttctcaaaaaaattaaaaatagaacaagtatatgcatgtgtgggtttattttatttatgaaaatagtggtcaatgttgtgtaatagcaagtggttcttggaactcactcatgtttgttgctttaatttttttgtcacaacaggtcgtgccaatttttctttcatagatcgcaccttgacgaatacgtacaggtttccagttgaatatcagccttggcattgtcttttccaaccttgttaagtaagccaccaacaagtaagtttcttgcgtgtgcgctcctaatttcatcctttttggtttgaataaatcacgagtttgtgttttaaa

SEQ ID NO: 263153 - DNA, 402 bp, Glycine max
  unsure (1)..(402): unsure at all n locations
agcttgccattgccatctgtatgttatttgtatttctcacctccttttaggcgntttcaacatttgatttgatacacttgcaataaatcatgggtttcctacatgtgaggttttttagacggtgatatgtggagaatgtaccattgtggatagtctagtgtaatagacgtggattatacctattaacaagagattaatcctaaagctaatttacaatccataatcatacacctaaaacctgcgcccgatatataaagataatgacccacggcctcaataacagatactgatcatatctgattgatgaacctcttgagtttttcctatgctatatatgtagttgagtacgtagaatatgatgcttgaccgaacacctatctgaactttttttttttgaactgc

SEQ ID NO: 263154 - DNA, 330 bp, Glycine max
tctttaggtttccgtaacgaacttttatttgagcctccttttggaagaaattttttaaggctcgcactacccctgggttcccaaaccaacgaaagctccagctaaggactctcattgggcccgatgaaactggacaccacccccctccaatagcaaaaaatgagatatcttgttttggtgggtctcttacacctctattgctcctccatggctaacttcttctattgatctctttgcgccttataaaataaggtaacttttagaacttggggactattcacgagcaaccctcttccactttcgaattgaagtatattgttcccccatttt

SEQ ID NO: 263155 - DNA, 418 bp, Glycine max
  unsure (1)..(418): unsure at all n locations
agctntgtgagtgccatggcagaatcttgctgtccttttggtccaccactcttaagaagccacaagaatgctgggatggctccagcactttcaacacaagcacgaatatcttcactgtgacagcacaaactccacagaacatttgctgcttcctctcttgctttctgtgatcctgtctccaacaactgcaccaatggtggaatccctccagcagcagtgattgcccacttgctgtcatcgacctggtcagttaagattgctagcaactgaactgagtactcttgatgctgctcactggataatccaagcaatgatattagtaattggataccttctctttntttaatggcctcccatactccaatcttatcacaacacaagcttgtcaatgaaagtatcagatactcttgcacatcag

SEQ ID NO: 263156 - DNA, 327 bp, Glycine max
tgttgaaactaaggatggaatatttatgcaccagaagaagtacatttaagaagtattgaagaggttcaacatggatcaatgtaataatgtagatatttcggtggaaggaaatatgaaactggatacaggcgatcatgaagcttcagtagatgccacattgttcaagaagctagtgggatgcttgagattcgtctaccatagtagaccagaaatctcatatggatttggtcttgtcagcagattcatgagtaatccaaaacagtctcatttggcagcagcaaaaagaatcttgagatatctaaaaggaacacttaattatggcatatt

SEQ ID NO: 263157 - DNA, 338 bp, Glycine max
tgtctttcacaaacaactttttgtattatcacatattctaacacatagagagtgtgtttacaataaaggttaggtagatagccttggttagaaaaggattgactctataagtacaatgtatggctctgatactcttacgctttggacttaagtattgggagtgatctatgttaatttgttactgttcagaaaagactcgaagccccttttatgcttacaggatgagcgaatcaatgcagggacttgatttatcagaatatgactgtggacaatcatcgaatctttgattgctactgacgatagatgatgcatgtctggaatgatccacaatcaatact

SEQ ID NO: 263158 - DNA, 409 bp, Glycine max
agcttaaagccccttgttcattactaaacaatctaaaattaatcgcaatcacaagcaagatatcctaactacatgtaagagataagaatgaaaatagaaaagggaaagaaaagttgggttgcctcctagtaagcgctcttttaacgtcactagcttgacgcatcgtcctgttatccaagatccaagcgaagaacagtgttcaatctttccatagctccaccatggtattgtttaaacctttgtccgttcactacccatgtcctatcaggatctttagattgaggatcacaaagctccactgctccatatagtcaaactttcttgatagtcaatggtccaaaacactttgatttaagctttccaggaagcaatttaagtcttgagttgaaaagcaacacctggtgtcttg

SEQ ID NO: 263159 - DNA, 351 bp, Glycine max
tcatgatgatgaatcaagtatgaattttgtagttttgatgatgacaaaaagcccaaaagaatgatttcaagattcagtcaacaagttcaagatcaagattaatttcaagattcattagaaaaaatcaagaagattcacgattcaagagaagttgatttcaagattcaagaaaagacatcaagaagaatcaagattcaagagaagatgaattcaagattcaagagaagaaatcaagaagcaacaagtcaagacttcacaagggaaatattgaaaaggatttttcacaaaccaaaaataacacagttttgttttacaaaagagttttctcaaatttttctaagttacgagagg

SEQ ID NO: 263160 - DNA, 430 bp, Glycine max
  unsure (1)..(430): unsure at all n locations
agctntgctataacattctaatgtataacaatctcacctctatactgggaggaaccagtggtctcttccctttcaactctctagttaagaagtccagtttcttttcttcatcccattcactgtacgtacccatatccaaatacctcgtaattgcatcaattgtttcagcatgtctgccggattcctgtcacactgctagtttcaggccacaactgattatccaaacaataatgaacaaaaaactttgaaacatacctgacgcaagtcaagcttcattaacaccatgccaaaagtagcaactcttcgaatcagatcagctagtcgaccatcagctagcaccccagatccacataattgctggagaaatgtagagctaaatgaaaattctgcacaatattagagggtaaaagggtagaaaagaaagaatacc

SEQ ID NO: 263161 - DNA, 362 bp, Glycine max
ttacaagctctatatccagtaggatgtgttaaacttttcattttaagaaaaggaaagaagttgatatttaaattattttgagcttcttttcatttttcaatattattgattgaagtttgagagtttattttgcataactttagtctacaactttgactggttacattacctataacttgctttttgttctttttaggtttaaagttaaactctagatctatgaacttagtttatggtgtaaaccaaggctagtacactacactttgaggaagttcaaagccagctaaaagtcaattcaaactttgatacaaatttacccaaaataaggactgaaactccttctgtaactgcctatatcagta

SEQ ID NO: 263162 - DNA, 412 bp, Glycine max
agcttgaaattgcattcgggcacctatattgtatcttctatgttgtctctacatatataaaacagtcccaccatcccaatttcgcaaaatcatattcatatatcattggggcatttcaccgagcacttggggggcgcacgtttggacacaaattgcaagagaatggggacaatatggcatgcccaattgcttcagaatacaacataggcctaatgccttctcacacaaaccctcaactcaacaaaacaagcatgaattcagatgcgaattgcttcacgaattttgcaaaaaatgagcaactaaagcaccaaaacacatgaatggagagccaaataaccaagggaaattgcacttacttgtggggagtgaattaaagcgtgaaaagggaagcaaaaactcaacaatggaagct

SEQ ID NO: 263163 - DNA, 358 bp, Glycine max
ttctcttttctctcaattgttctttattcttcttcctcttttctcttttgttctaccattttcttgcacaaaatttttttatttttccattgatgatgatcatggagggctaaacaatcaatcaatccaacgatccactccatgcaaggttgagtttgagttctgatttggtatctctaatctttgtgaatgttcatctttctcttcaatcctattttggattttcatgattacgattatgcttaggattgaaaatggattaggttatggattcatttcctaattttgaaatttaatcacagattgtttagaagatcttccaacataatttgggattccaaataatttatagattgac

SEQ ID NO: 263164 - DNA, 405 bp, Glycine max
agcttgacatttatatacatacgtgtctgcatattacttctatgtactttcagcgtaccctaaataaatactacacttaaattaattttaaaaataaataataattttattattatcaagaaaaatatttgaaaaattaattcttgtgattaatttcttcccacaaaacaatatcaaactattgaagaatcaataagagcataaataaatatatctaatgaaattgattttgaaaccaattaccgtaaattcacctgtatacagctacagcacttttaagtgatgcgacaaataaatggtcacttgaatttggaagtttctgaatccttgcataatattttgagcaagtgagagaaagtgtgtgtgagtcgcggcaaatagtttaattcttaagaaagagacaaa

SEQ ID NO: 263165 - DNA, 348 bp, Glycine max
tcttgggcaccaacaacacaggcttttttcattgacttaggctctcttggacccaacccttctccaagaattccttaacttgggattcaatcttgaggattattcctataagctggcctattaggaaggcttgctcttgggactaaatctatttggtgttttattcccctaagaggaggtaacctaaagggtatctctttgggaaatacatcaccaaattcctgtaagagttcttggacctttgggggaatggtctcaaagtgtgggaattgtggtagtgctaagggaagtctcccttgagaggagaagatagaaagattgattgagaagaagagctctcttaataac

SEQ ID NO: 263166 - DNA, 415 bp, Glycine max
agcttgccacctagctcgcccaggcgagctatgttgttttctccagaagcaaccaccttctggaggaattgtctagaaggcccaagtgggcctggttgctattggcacccacatttttactaagtacacccccatgccttttttggtgattctttttccgtaacggtacgaaactttacgaattgcgtaacgatgcttattttctttccgtaatgttatgaaaccttacggactacgtaatcaaaccccttttggtttccgggatgtcacggaattatacggattgcgcactaacacttccttttaatttccggcatgtcacgaaacttcacgaattgcctaatgatgggtgccaagtacctcgaagtggtcaaacgatggtcgtataccaacaactgatggtccccggacgaaa

SEQ ID NO: 263167 - DNA, 328 bp, Glycine max
  unsure (1)..(328): unsure at all n locations
ctaaacttttgttgttctgagtctaatccaacaaaagggatctgaggacgaagcttantttaagttagtctaaacctatgagggctgtctatattgagcctattctagtaagagggatctgaggatgaagcatggattgattcaatctaactagggatcgacgtttattaatttaggctacaacatagaacacaaaagcatgaatgattagagaaacatctttatatacatcagctggtctattagaaagacccaacatctttacctactgctatcaatcttacttacttgaatctttactattttaagcctagacttaatttaaatt

SEQ ID NO: 263168 - DNA, 428 bp, Glycine max
  unsure (1)..(428): unsure at all n locations
agcttcaagcacacgttggctatgagaaatgtttttcaagcaattgatttggcttggatgtgaaacatgtgatgaggtagcattagaactttcctgagccatgtttggcacaaaactaaaacaagcatcaccttgttgcatgtttctcatcatattattaattccataattacaagctccatcaaactgatccattgaatatgtaaaattcacccttctattgtcatcattaatgaggatttgacttggatggttggagaaaccacttgctcgagccatgttttgcacgaaactgaacttggcttcactctgatgcnttgttttcaacatgttaattctatgatcataacctctaatcttagaatccacatgagcaatgaggcccctcaatttctcctctttgatgtttctgatactttgatcccaag

SEQ ID NO: 263169 - DNA, 362 bp, Glycine max
tgggataaagcttgatttgagagttttattggtcatgatagaatacttgtatctttgttaagatagtggaacttagtggtttaccaagaactagacgcattcttggtggttgagatgaaccagcataaacctgtgttttatatgcttttgcttttcttctgctttaaattgacctagggtttaaatttgattgttgtttgaaaactttgtatttttacaaaatatgtgtttgtcgtctaaattcgtttgtgaaaatctatatttgtttcattaaaaatatcatcaagtgataacattgttttgaaaagaaaaaggctttcaaaaataaaaatcacaattcaaagccccttcttgtgatattt

SEQ ID NO: 263170 - DNA, 416 bp, Glycine max
agcttagcattagcatgtgttgactctggatctttaatcattgggtacgtgtttgttactttattggatcctatcaaagaacctccgcttataactacaaacatagttctgtctgtttttgttgtgtattgtcatgtggacaaagttccatgccatgtttgagacatctaagattggcgtcttgcctttgcccagtattattttttgcaacatcttcctttcttaaccttgtcattacctcgaaattttaatatggcaacttactcttgtggaaaataattcttaagaattaatataacactttaaaattaaatttataatattaaaaaaatataaaacatagatataattctttaggtgttattgatacttttctcctgttagaatataaatcgtacttcagtaatccacataat

SEQ ID NO: 263171 - DNA, 369 bp, Glycine max
  unsure (1)..(369): unsure at all n locations
ctaacactactaagctntaacatgtatgtggatggtgttttcatgtgccatcctatngacagccatttgatttgactatatcaaattgtttcccgactatggcaaccggtatgaaaaaagtttgcctatctttgaaagattgagactaatttgtttgaacggtacttgatgcaatatattgagtcagttaagctttcgagaaacttgattcataaaacaagaaatttcaatgtccgtcactctcattgttaattttcataaaaattgaattctcaagtcgaggtaggtgtgtgaaaagcaaacggaaaaattcaaggagaaagttatgaaatttcttctacattaattcttatgggagaaaggtttttt

SEQ ID NO: 263172 - DNA, 404 bp, Glycine max
gcagcttgtttgctagcagatgattatatgtaatttggaaaatcccaatggttaaaacatgaagacataagttatgcacctgcaattcaagtttgaaggcgatccaacgattaatgaattcgagatgatggtttcaccaaaacaggttttttaggtcaaacttgaaatctcacatttccaacataggtcaatcaaactccacataacctaacattcacaccaagcaatcacacacagataattccccaggtctttagactctcccaaaatctagaggtgaatctaggatctctatcatacattataccagatggcacaccatgtaatttgacaatctcactaatacatagggaggtcaacttttttaaagaaaacctaatattgatggggataaagtgagctga

SEQ ID NO: 263173 - DNA, 356 bp, Glycine max
tgagatgaggaagtgttgaatggttaaacttcctgcttttattgttgaccacagagtggtacctggagatatgtcgcgggggtcaggagaccttggggacgtcaggtggggtgctattgcccaaaaccaagcttgaccaatcccgacccaacccgggcatagtcggtcagtgagaacctgtgatgtacctaagcaggcgagctcctggcagtcaacagataaaaggaaaacaagaccacaaagcaaggaggcttgtggtggctggccagctgtgaaacttgattgatatgtgagatatggtctctggtaatcgattaccaagggtgggtaatcgattacaaggcttaaaaatgaag

SEQ ID NO: 263174 - DNA, 380 bp, Glycine max
agctttaggctgatgcagggaactcttttatttttgcacccgagcaggctaatgcacccacccaaagggaagctcgccaagttgcaactccgaacacatactcgaccggccgtggattccaacacgacaaggaacttccctacaaggccattggcagaattcaccccgctctcaatgacgtgcgaagattttctaccatccctcatcgccaatcattaggccggggtaactccccgaagggtcctctaaccccctatcccgaagtggtgtgaccctaatgcaacttgcaagtaccatgggggtgtcccatcgcattccctcgaaaaatgctcggcccttatatcaaggtccagcatataatggatgccatacggctgact

SEQ ID NO: 263175 - DNA, 344 bp, Glycine max
ctcagcttatgctaaattaggctagactttttttttttacttgagctgagtctagccttacatgacggatctgtggacgaaattcaatttaagttattctaagcctgagagggttgtctaaatcttgtgaatgctcacatgacggatcttcctgtaaaactttaattttcagactgacaacggatcgatcgtatagtactctatgctgatacttacaacacggaaactgcgaggatcatagaaaactctcaccatacgtcgacctacttgctccaattactcaacgtttctacctactgggggcgttctatacaccttgcattttataggttatagcataaaag

SEQ ID NO: 263176 - DNA, 418 bp, Glycine max
  unsure (1)..(418): unsure at all n locations
tgcaagcttctgtcattaattgctcaacttgtttttgctctntgtgcctcaaagtgccacgagaactgatccttgcagatcagtgattccaggtgtatgatgtgtgacgagagtgacatactgtacaccaacatatcatcaatgaagaccacaatgaacttacacaataatgaccataaaacgtggttcattatggcttataaggtcaacgaagcattgcataggttgagtgaaatgatcttcaatttgtagtacccatgatgggtgaaaaatgtcatgttaggtatatatcttctttcgccatacgaatctggtgaaagccctggcgtaaatcgagcttggagaaccataaagcaagacccaagtcatcaagcactttatcgatgatgggcatctgaatatggtctttcactgctat

SEQ ID NO: 263177 - DNA, 409 bp, Glycine max
  unsure (1)..(409): unsure at all n locations
agcttgttgagagagtgagagagagagagacacagatntaacaaaaaaaaaatgtaagatttcattgtgattttgaaaaaacacaacaacatctcatgtatgttgttaattaatagaaaatacacaatgaaaccataactatgttgcacgaaatataaaacataaccacatttcattgtgcactccaaatgtatccccaaatttgtatgtgtaacgaaaatgattttttatttaatatttttggtcacaaaatcatattttgtcaaggctatttttgagaaatccaaatatatttggtgggaataacatccccgatgtaggtttttgtttatgttcttggttcaatggtttctcttatcattaacacttttttccaatcaagtataatttcttgggtcttctcttttat

SEQ ID NO: 263178 - DNA, 359 bp, Glycine max
tgctgctcctgtgctgagtgtgtgatggattgtgtaaagggttcaatggaacctgtatttatagtagttgagcgtgactgttggtccttgtttgtatgagctgttgtagcctttgtagataattcccaacttgtagataatagccagaagcttatagataatgctagagataaatatttgtttatagataaaaagtagaagataattataccttgtagataatgtctgaccttatagataattaatcaccttccaataaataaaatattcaaatacatgtgaatattaataagttaaagataatctgtttgttggggagcccggctgctgagggttgagcgtccaccctcatgtagtat

SEQ ID NO: 263179 - DNA, 379 bp, Glycine max
agcttaagcacctacaattgcacatcgctcttaataacagaagaggatccatgcggaaccttcacccagcgaatacactgacaaaaacttatcttctccttcttggacaaagaatggcaggctgggggcaagtcaatcttcttcccattagtccttggatgcaactgtgattgtgtacccatatcaactagatcttgatgggaagtccatacatccttcatcttgccttgcatgttaaggagcgtgccaatcacactgacacaaacatttatgtctacatgcataacgataattcaatgcctaacttgaagatcacaccatttcggaagatcatagaaaatggaccttttgttacatatgcaactctcgactttatcct

SEQ ID NO: 263180 - DNA, 328 bp, Glycine max
tctttaggaatcttctttatgaatcttctcaaggaggtgagcttagttatgaaaggggtgagcgtaactaagctctatcttctaaggaaggttttctcaaaaaagcttctcaaggaagatttcacaagaaagcttctcaaggaagctacctaaactataaatacaagcaagcgtaacacttgttgtaacttggatgaatgagagtcttgagagatatacttcaaagttccacttctctccctcttttattccttcaatttcgcgctcctccctctctcttttcctacatcgaagcattcttccaagcttcttatccaagactcatctt

SEQ ID NO: 263181 - DNA, 408 bp, Glycine max
  unsure (1)..(408): unsure at all n locations
agcttagtcagtgttgctggtaaacgtgtatttatatgtgtnctattaaatgcattgaggcattgagtgtgacatcccaaaaaatagccgcctataaaacatagaacaatgacaccatatattttcatagctgcacacattaaatgcatttgaagataatgaggttagtaacaaaataataataattgtaaagtattcaaaaaatcagtgcattgaatattgtatatatgaataatagtatataaataataataaattatggacgtctgggatacgctaagcatgggttaaatttttttaaaattattattattattattattattattattattatataattagtattatttattataattattaaaatagtaataataataatattaatagtaatactaatactaa

SEQ ID NO: 263182 - DNA, 326 bp, Glycine max
  unsure (1)..(326): unsure at all n locations
ctcaagcttgtatactgaatngagtatggcgctcacattgcatgtctgatatgccttttaaaggcttgaaaagtgcgagaaaacgagatgtgttttctgcgttttctggaaaacgtgatgaactcgctaagcaagcattcgacgctaagcgagttcatcaatactcattgtctataagcattatctgaagaactcgctacgcgcgcttactgcgctaaggaagttcatcttttgaggatgaacacttatcctcttgttgaatcgctaagcccaggtaacttaaccattttttttgtgatagtcgtgcactaagccgagcattcttg

SEQ ID NO: 263183 - DNA, 328 bp, Glycine max
agtgaaaaaggtccgtttctcaatggcagggaagactctcaaagctgaaaagcttgaattggtgcacacagatgtttggtggccagccccaatgaaatctgttggaaactcacgctgttatgtcacctttatcgacgactctaccacaaaggtatgggtttattttcttaacaataaatctgatgtgttttctgcgtttataacgtggaaaacagaagttgaaaatcacataggtctaaaggttaacagtctgaattctgcaatggcagggagtatgatagtcaggagttaaaagacttctgttcagaacatgggatcagaatgatca

SEQ ID NO: 263184 - DNA, 355 bp, Glycine max
tccatcaagtggtaatcatagcattatatcttcaagtaggtgctccttaaacctccattaattttcagctttaccttctcctccattgttgtttcttcatttttctccatgtatctcctcacatgtcttgtgctaaatgttgttaacatgattctttagaatttcaaccgattaatcttgctatagaagctagatttgattttctatggttcaaatttcttgtttatgttcttgaaccatgagttgtgttgagtttaggttcctttgagttttgtcttgctattttttgtggctgaaacctaaaccataaaattcttacaaaaacattaaattagaataaaaccttaaaaatata

SEQ ID NO: 263185 - DNA, 423 bp, Glycine max
gctattcctaatgtatcgacacagaccttcttaattaataaaacacactctcctaattaaaataacaaacttatttcataacaactcctataataacgataatagactcctatgattattcattttattcttttgttcctttatttctcctgtaaaccctccaaatctttggcttgggcccactgtcaaggcccaccacttgatccacctttctatcaagaaacaaccaacattttagaaataaagatttattgagatacatctagaaggttgcttggtgtctcccaatctaggtcattaataccatcttaaagaggtataacatggaaactctaaaagtgactatttgttaataggaattgaagttgctctcagtttgaaggattgtcctaaaactcatgaaatgagagaatacataacttg

SEQ ID NO: 263186 - DNA, 358 bp, Glycine max
tgacatagaagaggaagccagaatttttttaaccaaaatggcaacagcgagtgcttcttccagaggaggaggcgctttttataattttttgttaaagggtaaaatggcccattcattaaaattgctaggtgcaccaacaatattgctgggtgcacctagcatttccctaaacatagctatgattcccaagtgtgagaggcccaaatccatacatgacttgcgaccaatagccctttgcaatgttttatacaatattttttttccaaagctttggcaaatatgctgagaggcattattgggaagtatgttaaggatgagcaattctctttcatccaatggagatcgattctatacaatg

SEQ ID NO: 263187 - DNA, 401 bp, Glycine max
agcttgcttcttttggtgcatagaatgcggttttttattatagcattttgtcaagaatctctgacataagctataaccaattaacattgtctgaatgacaactgttgtaattggactacaatgacatagtttgtcctccatggtatgcattatgttcttattggttatagtcttggtatgctttatgttcctattggttatagttctggtatgctttaatgttctaatgggtatagctttggtgctagaatgtttaatctggagttcacaagaggaggatctccatattgcgctggagtttttttggagatggacaataaacctattaaaatgactggacttgaaatacattgatatatatataattatccataaagcaatggatttggattaaattcatt

SEQ ID NO: 263188 - DNA, 360 bp, Glycine max
ctcagcttttggttgaaaaatgcaaaggaaatgttttattcatctcaacttgttgcatattaggttggggttatgtaaatgtgcatgttaagtactattcatttattgcacataggatgatgtgtacctaaggaacaataaaaaatagacttaaatatgtttttagccctttaaacttgggtcaatttttttagttctacaaataaaaatatgtttttttagtccctcaatcatagaaaatactctctttagtccttttcctagaaatcattagcatgtgctaaacaaggagtaactttttgcattttctaacggttttaaacagaaataatcatttaaaacaataataaaaaataaaaa

SEQ ID NO: 263189 - DNA, 442 bp, Glycine max
gacctctgagtcacctgcggcatgcaagctcacgaggccttatcttgggtttgtgatcattctttgttgccttcttcttcacggcagttggtttattcctcagttgcctattgtactcaataaattcttccaattggatgtactttgttgctctacaccgtagtttgtccaagtttgatgtcggctttttgcaaaggctattaatgaaaagttttggttgtaatgttgtaaccaaatggtgcataactaccatcgagtcaagatttagaatatccaaggctaccttcccaaacctttccatgaaagaccgtaatgtttccttcttttcttgttgcaaacttactaaggaaaccaacaccatgtgatgttgactagttgcaaactgaagcccaaacctcatgggctcacaacagtttatggatctcgttggagtccagtgaac

SEQ ID NO: 263190 - DNA, 349 bp, Glycine max
tgtgtgttagagaggatttgttcgctcgttgaccaaagagctccaaagggttcttcttgtctaatgaatgtactaggaatgctgatatagtttgcattggtgtttctttttatcataacagttattgttttggtgtttgtgtacttttttccacagtaaaaggatttatattaatattaagtgaaggttatgcttgtcacaagaagtgccagacccaacctcataaatgcatcatggagttccttccaaaacactactactcctttacatatatattgattctacaacattataaggaacagatggtatcaacaatattccatagtaccctaccatgcttcctagtgtt

SEQ ID NO: 263191 - DNA, 360 bp, Glycine max
agcttgtcacccagctctgccaagcgagcttttcttgttctgctagccaggttgcttcctccagaagcaaccgccttctggcagaagaattctggacgcccaaaagggtctggtttctattatgcacccccttttttactaaatacaccccctctacttttttttgggaatcttttttcgtaacggtacgaaaacttactaattcttagcgatacttattttctttccgtacgttacggaaccttacagatcatgaaaatactcttttttaacattccaaaaaataacaaatactcacggattgttaacaatactaacctttgaatcttgccactactgaattttgtcgattgctaacaa

SEQ ID NO: 263192 - DNA, 362 bp, Glycine max
tcgggctctcacaagttaatcattatattttctcactcttactgtcttcttttgatgttccttgtttatcttcatctgcattttgcataaaatttaatagaagaaggaaaaaacaaaaagttgaatgggctagctccttttctcctcctcccttgtgcttctgattatcttaggtgcattggtcattgttatacctcgattctgtaattccctgctctaaggtcatatatttcaatttatatttgaccttgttatatttacgttggctgtgaatgcctgaatcttgtttgcaacaagttcaaatatttgttgagaaggcctttctatacacgtacagagtcagtcttcctattaatccttta

SEQ ID NO: 263193 - DNA, 369 bp, Glycine max
cctgcaagcttatatggagggtggatcctattttctatcatgatgactgtcacggttatatcacccatggatttgcaccatacgataacccacatgtgacaggagacgccatactctaacgaatccgccattgtagaagaagctctcccaccgacagagtgtctggcctaagaaattctgataggaacctactctggacgaagacaatgatcgaaagatatacctataaagaagtgtctgtctgtataatgaaggaaagatatggcgatagattggactatggagagtgaccccctaacatatttacacttatgaattcaagtttaactgcctttatcttgctatgtgacgctataactgacttgagag

SEQ ID NO: 263194 - DNA, 355 bp, Glycine max
ttaaccgatcgagtaagccgttttttctcctactagagcataaaaggaacttcaaccgatcatgggagtagcaacatcgtgaaatcactgtcgaaataaagcctaaccgatcgttcacgctataacctctgtgaagccaaaaaagcaaagtatgtcataaacttatctgaatatcttgaacaaaatgatgataaaataatcaaaatatcttggaacttaataataaaaaaaatcacatcggacgtttttctttggaagtttacttgaacagaattgactaatctcccaagtgaaactaatgctgaaatcttacacatatcagactctgtccgcagaaatcactaaaaaccgtttt

SEQ ID NO: 263195 - DNA, 411 bp, Glycine max
  unsure (1)..(411): unsure at all n locations
gcttgcatatcctcatacaagttgttttatgagtggcctttttacctttttttggtgtttagttttcacctgaacaaacccctcttctatatgatcatccaactcagtgttccctgtttctttgaggtcagaagaattctgaaggacagggacatgatttgcaaccagaacatgntttctgtgaggagggacagacatattagtctagacattctttggattatcacaggggcttgctgtattggtatgtgggggcattgctgaatcacccacttgtggctgatccaaggtggggcacgctgtgatgagaacacgcttattcgcagtgacagttctacaattagtgaggcggtgcccaatcatcttgcagtgagtgcaaaaagaaggtctattctcatactcaatcttttg

SEQ ID NO: 263196 - DNA, 351 bp, Glycine max
ttttgtctagtaaggtaaatattgttttgtcctttcatggttttgtctggctactgagtattgagatcttgacccagaaaatcattagtttggcaattaacaaatcttgggttagtcctttcatggttttgtctaaaagctttctctggtctacaagagcacaatcatcctcatacacttcttctgcaaatggaaacacgttctacaaactcccaggtggttgtctcaaaccaggagagaatggtaagatcttgcttatttttttctaaatataatagtctgaaaataacaactcatgattatcttaatgtacatttttgtgggcttgaagagaaagttgactagcaagct

SEQ ID NO: 263197 - DNA, 355 bp, Glycine max
ttgaatgacaataaggtttatttctatttctatataaaaaatcatcaaactattcatatgaattataacaaagataactagaaccagtaattcaggtttcttttcaatataaggaccatttcatggatggataattcaaaaaattcttcaccacttccatgcatcaaccttatcctcataaacttccacaccattgatgccagaaaaccccaaaaaaagaaacaaacttgccatcggatacaaggaggggcacctgggcgcttttgccccacctccttcaaatttctttccactcgtacctctttgttttttctaaattgcacccgacactcctccttttttgcactctacaaaa

SEQ ID NO: 263198 - DNA, 408 bp, Glycine max
agcttctttcgtctcttcagaatttgtgccttttcttgttctctatgagaaatccctgcatatgtgtaatactttgcttatatgaaatcgagagttattcgtgtgtaattgtgatcatatcttcttcttttataatgatcatttcccttattatttacctttatattataattgattattcatacttttctttcttcagataaacctttctcgactttcttacttttactttttaagagctctatctttcctttattctttatttatcacaaatattcaatttgcccttacttaccttttttcacttcctttttgttttattctacccattactttctattctttccttcatttcataaggactcttttttcctttctttcaattctaaaatatatatctaaccaatt

SEQ ID NO: 263199 - DNA, 347 bp, Glycine max
tgctttaaagctactagtgcatttttgttcttcctcatgctgtgagaggaattggagtacatactcctttattcattctttgaagagaaacaaaatggatccaaagagggctgaagatttggtttttgtgcactctaatcttaggcttttgtctagaaaagaggaagggtataaaaaaagagagacaagattgtgggacattaatggagatgtacatgatccacttgatgatagttcttgaaatggcagatttttctcttgatgagccagatttagaagctatgcttttcttatatgatggcaatggacgagaagaaaatgaaacaatcagagtttgacaataattt

SEQ ID NO: 263200 - DNA, 422 bp, Glycine max
  unsure (1)..(422): unsure at all n locations
agcttgcttcttgcaattccaagatactagttattttcccaagaggtgacatgtcccacttgtgcttttcctatatagcttacatcctgcgaagtcaaaatctgaatagccaatcaaactcaaggaggtacctttatgataccacaaaccactattgattgtgcccttaaggtacttgataattcatttgacatcatttaaatgggattccatgggaatntaatgatatcttacactaacatgatgtcgggtcgacttgcattcaaatattggagagaaccaatcatacctctataatttgactcatttaccgatttacctttttcctctaaggcaatataagcgaatgtccccatttgttgttgttgctttcttgcacttttacatattgaacttcttaatcaattctgtacagtactttg

SEQ ID NO: 263201 - DNA, 364 bp, Glycine max
tggaaggatgcttcaatggaggatttttttagggagagaaagagagagggggatgcacgaaatggaaggaataaaagagggagagaagtggaactttgaagtatgtctcacaagactctcattcatcaaagttacaacaagtgttacacatgcttctatttatagactaggtagcttccttgagaagctttcttgagaaaacttccttgagaagcttctttgagaaaacttccttgagaagctagagcttagctacacacaccccctataataactaagctcacctccttgagaagcttccttaagaagattcctaaagaagctagagcttagctacacatacctctctaatagctaagctcac

SEQ ID NO: 263202 - DNA, 420 bp, Glycine max
  unsure (1)..(420): unsure at all n locations
caactgcagcctgccagcctaacgccatcttggatcgccttgcatatttcactccagcacccataacgactccgcgtcccatggctggttcccacctctctgccaacagcgagccccatgccccctccttctatctccatcgcaggggcgaccactcacaccattatgccaactccacctcccatagctgcttcccatcttccttcatcgatcacaaacctattnttatcactctttgactctctcgctctcgctcctgtgacgaccagaggagcgttcgaaatcacggcctctctctccatctatgtcgagatccttcttggaccctacgttctcgtcgacgcccctcgacctcttgctctgtctgacatcggcatcaacgatcgccagcccacccaccaacatatacaccgccaccgt

SEQ ID NO: 263203 - DNA, 326 bp, Glycine max
tatattatcgcatcacatcctcatatctttttacgaaacgcaccttacttcaaaggaaagtataactaaacccattcataaatgtgtgttctaaaaacatgagcgggatgatgcgaataaaataaaggagaaaacaaatgtatttaaacttggacccaaagactgttcatggaaactttgtttctcatattgctacctgttgctgggctatggtggttttgcaagcttctacactgggcgtggttgacgccaaacatatgggataggtacacgctattggctggataccctcgggaaatcctacgggtgttatgaatgctgtcaaa

SEQ ID NO: 263204 - DNA, 390 bp, Glycine max
agcttggaggggttgatggggacctctgtgcttataggaacgaggataagggctacgtaggagtgcgtgagctcaagttaaaggtgggcaactgggatggtatgcttgtgcttgacttgtgaaaatgagagagttgatttgcgccatcgcccgatcgccacctagtaccacatatgacgggtgccccatgatccactaagcttgatgtgagaaagcgtgtaagagtcagtcttcctacttttgtttgttgaccacagaatggtacttggagatatgtcgcaggggtcaggataccttatggacgtcatgtggggtcctattgcccaaaaccaagcttggcttatcccgacccaacccgggcataatcagtcagtgagaacctgtgacgta

SEQ ID NO: 263205 - DNA, 349 bp, Glycine max
tgagtacaagactttgattgtatattatgaaggagtacaacaaaaaagaggcaaaattttatggaaatatgttcaacaaactgcacaagctaaattctcttgacagtaatgtgagtattccgtctctatagttgctcttaagtatacatacatacactctagtattccatttcaagtctacgtacgcattggtaatttttgaattagaaaatctctccaagctatctggttgttcataaccagaaaccaatgcgaaatagtctaattttgatatcaataacatgaatattccccatttgaaaaacgaagaagtttaaaattttctcatgtctaacgatgtatgtaattt

SEQ ID NO: 263206 - DNA, 402 bp, Glycine max
attcttccggttatcccaagaggatgtcgttcagacataatcaatgcacaaatcaattcatcatacctttggggcaatattgtcatgtgttaaggctcacaagaaatatgtgtctacaaaatggtccaaacaatgatagtgaaacaaagctcaaagaattttctcaatggcttttagatctgggtgatggaatagcttagccaaatgatggttatgcatcaatacaaattcctaaatcacttttgacaacagagtttgaaaatcctacaaatgctttagtgcaaaaaaagatttacttcatcaatacaataatgaggagttcttgcaattcaaagctattcttgcatcaactattgagattgttgatcaaattaatgattacatttttcagtgctaacaagt

SEQ ID NO: 263207 - DNA, 356 bp, Glycine max
tgtttcttgcaatttcagtacactatagagctttctaataggtggcatgtcccacttatgctttttctatctaatttccatcttgtaaaatcagaatttgaaaggcctcttaaatttaaagaggtacctttaggataccacaaacctacattggttatgcccttaagatacttaatgatccttttaacggtagttcggtgagattccttaagattggactggtatcttgcatataagcaaacgcttagcatgatattcagtctacttgtagttaggtagagaagtgatccaatcatacctctataccttgaatcatctactgatttacctttctcatctaagtcaagttaggttga

SEQ ID NO: 263208 - DNA, 421 bp, Glycine max
  unsure (1)..(421): unsure at all n locations
agctttntatgaaaggatatgactctnacaattgattttgatntcaacgntcagatacactagtaatcgattaccaatatcttgtaatcgatacaccattttgaaatcaatgggaacattgcacattcaattaaaagcttttgaaatcaaactttgccactggtaatcgattataggaaactggtaatcaattaccagagagtaaaaactttggtcacttagaaaattttgagaaaaactcttttgaaaaacaaaaatgtgctatgtttgttttttgaaaaatcttttcaatacttcccttgtgaagtcttattgatttcttctcttgaatcttgaaatcaaacttctcttgattctttaatctttntgatttcttctcatgaaacttngaaattatcttgatcttgaacttgttgactga

SEQ ID NO: 263209 - DNA, 357 bp, Glycine max
tccttgggaagctagaggaagaatttttttttagaagctagagggggggctactcacacccctccaatagctaagatcacccatgcgaacatgcatgaaaatacaaaaaagtccctactacaaggttaaaaccttatactactagggacccttaacttgtaaggtagggtgcccttaatttgtaggataccctacaaacctaaaatgaccaaaatacaaggcccaaaagaaagaaaacctattctaatatttacaaagaaaagtggactcatacttagcccacgggcccaaaatctaccctaagacttatgagaaccctagggccttctcctgcatctctgacctaatcttctttga

SEQ ID NO: 263210 - DNA, 419 bp, Glycine max
cggatccttaagcgactgggctgcagctttatatggcatgaagggcgataggattcatccctgtgactgagaagaacatgaatattgttgaagttaaaaccaaatcatagataaaagtgacagtgttaacaaagtagaaaacttaaaagagacaaaactaagcgtacagagtcattttgctgcttgacaataaaaggattatgggaagagcatcctgtgcacaaagacaacatccagacagcaaaagcactagctagtaaaaacaaaacagagcatttaagctttattcatatagaaatacaccatttagatataaaaagatgccaagggagtgctggaagttaatcaacctgctaaattatctgaccaacagagagcaggctcatctgagctactccaagaagaaatatgacattttc

SEQ ID NO: 263211 - DNA, 351 bp, Glycine max
  unsure (1)..(351): unsure at all n locations
tggcgctgacatagcaacacctattttttattgtatcngccattgcagatccccatcaaaaggagaaagaaaattgttatcatcaccgactaaaagaaaatgaatcataacttgatggctctcttgataggattaattggtgcagccgacaccttatttgcttactcccaaaccttcgtatcaccaaatctgtacatcacacttggccttattgttctcatgcatgtcgggcttgctcgtaagaaaaagtcagatatctttctaattccttcttgaatctctttatccctctcactactttcttcatctatgtatatgccttgattatgtgcaataataagcctatgataa

SEQ ID NO: 263212 - DNA, 432 bp, Glycine max
  unsure (1)..(432): unsure at all n locations
gaccttagcacgcgctcagctataggtatgtaaatttaagacttttctttctcactngntgtatagtattactttggaggaaggtttgatctggtcaagtttgcccagactgttcagcaggctgggatgtacttgattcttcgaataggcccatttgttgctgcagaatggaattttgggtgagtcccatcatcatctttgctatttttttttggcaacattatgagaggtggtatgtaagagactaaactgagctataagtttcagtagtgtatgttggaggaattaattcatattaaccacttttactaagttgatcgcgatttcataattcttaaccatagctatatgttacagtggtgtaccggtatggctgcattatgttccaggcacggtattccggacttacaatcagccttttatggtatgtat

SEQ ID NO: 263213 - DNA, 351 bp, Glycine max
tgtagagcactctacttgagtgtctattttttataatctataaatatgtgcaatattgagtatttcagtaagtgataaaatcattcattaccctttacatattctctgaaacatcagaatctaatattaactcaccttcattgtgtgatcagaactcatccggaagtatcttgaagcacgtttttgaagctcaatagtatttaaaggaaatggaggatatttcggcttctcctgttgtctaatgtttgtgacctgaaaggtaattaatataataataaaagaaattactttaaattcaacatatattcaatcataagcattgagaatcaggaatttaatgtataataatgt

SEQ ID NO: 263214 - DNA, 386 bp, Glycine max
agcttctcaaggaagctacctagactataaatagaattatgtgtaacacttgttgtaactttgatgaattagagtcttgtgagacacaacacaaagttcaacttctttccctttttcttccttcaatttcgagctcccccctctctctttctctccctctttcttttcctccattgaagcatcctctccaagaatcctgcctagggtagctgtgctattcttagccagtcccaagccccgataaaaagagagggttgtgttatgctttcgacagccaacgttaaactttgtcgaatctctatgacatggatcaattacgtaataatgtgaatgctaggtcgttgcccggaagcaacgcgctgtatggctcgagtacagtgtcaaaa

SEQ ID NO: 263215 - DNA, 365 bp, Glycine max
tggaggggttgatggggacccgtgtttttttaatgaggataacggctacgtgggggtatgtgagctcagttgacggtgggcaactggggatggtgggttcatgtttgatttgtggatgtgggagagttgatttgcaccatcgcccgatcgccacctagtaccacatatgacggataccccataatcctacaagcttgaagtgagaaagcgtggaagagtcagtcttcctacttttgtttcttgaccacaaagtggtacctggagatatatcgcgggggtcaggagaccttggggacgtcatgtggggtgctattgcccaaaaccaagcttgaccaatcccaacccaacccgggcatattcagtca

SEQ ID NO: 263216 - DNA, 258 bp, Glycine max
ctcggaccttctatatgaaacgatccattcaacactccatatacccgcatgtcgcctgtttcaacgactacaggacattgctaatgttggcatccaacttcttcctgagtgtgaatattctatacaagaggaaccatgacatgttgctacttcgatgtatggatgccttaaacctaagacagatgctgcttcactgccatgaaggaaccttttgaacacatgctaatggagagctgctcattactagctcactatgga

SEQ ID NO: 263217 - DNA, 355 bp, Glycine max
tcttagtttcaaatgatgcattatagttttttgctccctcgggcactcctctaatgactatagcatcatttatggcgctaaactgctgggagttggaagccatcttctcaattaaatttctggcttcagcaggagtcatgtctccaagggctccaccactggcagcatctatcatacttctctccatattactgagtccttcataaaaatattggagaagcagctactccgaaatctgatggtgagggcaattggcacatagttttttaaatctctcctagtattcatacaggctctctccactgagttgactaatgcctaagatatcctttctgatggctgtggtcctggaaac

SEQ ID NO: 263218 - DNA, 419 bp, Glycine max
agcttcaacatcagaccacttccagggtgctggtactactccacatggatttgatggggcctatgcacgttgaaagccttggacgaaagaggtatgcctatgttgttgaggatgatttctccagacttacctgggtcaactttatcagagaaaaatcagacacctttgacgtattcaacgagttgagtctaaaacttcaaagagaaaaagactgtgtcatcatgagaatcacgagtgatcatggcagagagtttgaaaacagcaagtttactgaattctgcacatctgaaggcatcactcatgagttctctgcagccattacaccacaacagaatggcgtagttgagaggaaaaacaggactttgcaagaggctgctagggtcatgcttcatgccaaagaacttccctataatctctgg

SEQ ID NO: 263219 - DNA, 353 bp, Glycine max
tctagaggaggtctggtaatgaagcttctagagaaagctacatgaagctgcctcggtagaaacgctttccagccttcattaagcgccggatcatctcgaaatttggtctgcaacttcaaaaaacaatttttcatgatctgaccgttgggatctttgagaagttgtcaggagtgtgctagaagcctcttaatagaagcttctggaggaagcctcttaatgaagcttctagagaaaactacatgaagctgcctcggaagaaacgctgcccagccttcgttaaccggcggatcttcttgaaattaggtttgcaacttcacaagacactttaccatgactgaaccgttgggatattc

SEQ ID NO: 263220 - DNA, 421 bp, Glycine max
agcttggagaggatgcttcaatgatgtaatttatagagggagagaaagagggaggggggagcacgaaattgaaggaagaaaaagggagagaaagagggaggggggagcacgaaattgaatgaagaaaaagggagagaagttgaactttgagttgtgtctcacaagactctcattcatcaaagttacaacaagtgttacacatgcttctatttatagactaggtagctttcttgagaagctttcttgagaaaactttcttgagatgcttctttgagaaaactttcttgagaagctagagcttagctacacacacccctctcataactaagctcacctccttgagaagcttccttaataagattcctaaagaagctagagcttagctacacatacctctcttatagctaagctcacctccttg

SEQ ID NO: 263221 - DNA, 355 bp, Glycine max
tgaagggacacccacatttcctagtttcagtgtctcttctgataaattcttttttcgtacacctatactcaccactcctttcacagccaattaacacaaacatagtccttcctctactacctatgtttgtatttgaccttaaaatcaccgccacaaatccgttttcatgagcaacggatcgagcccaccgtaaaacatcctctcaacactcaaacacctacaaagcaatccacataatttaagttttctactagtattcattttattaaatctgtgacaaacaataacattataacctgagaagtattgaacgcatccgaacaatcaacatgttgttcaatcacaccacttgcat

SEQ ID NO: 263222 - DNA, 412 bp, Glycine max
agcttagggacccaaactttttagctttaatgctagaaaacatactcatgactaggaacccaaaatttggttttagaattagaaaagcatgaaaatagggacttgcttgtaagaatttgggctgccccatgattggtactttgcacctaagtaacgtgggaaatgcttttcaatggtgtgtagatatatgtgtaaatataaggggcataaaattcctcgccaagtatgaataattgttttcctaaatgaatgtatgatagcgtggaatgcctttttgaatgcaaatatgtgcaggatgtaattagctttccaatatgcatataaataaatatgagtgaaacaataaaatttgtatggtgtacttcaaatgtatgtaggtagtttgtgatagaaaatgcttaagatataaatt

SEQ ID NO: 263223 - DNA, 353 bp, Glycine max
tctaaactgtagtccctttaattttacaactttgtggatgtgctgtatttaagctgcttgaacatctcacaataacataaaacatatccaagaagtaaagcttattccatgtttgcccatatctaagaagctttaggatatctaattttattttagaatatctaagttatttgtttgtttttcccttttattgccttagtaccatccttttgcattatctcatattttttttttggtccttcattctgtatcagatttgaccatgactggaaaaagattgaagcatttgttgtatcaaagacaatcatccaagtaatttcaaatgcaagttgtgactggatatttacattagc

SEQ ID NO: 263224 - DNA, 422 bp, Glycine max
  unsure (1)..(422): unsure at all n locations
agctctagtcttgcaagaagtaaagcttcacctgaggttgattctgttctgcacaatgaggatgaaggttgcactcttcctcagggattgtagatataggaatcagataaggtgttttcggctcttaattttaggatataaaaagtaatagggttattctatttactgattattagtgtcttcagttaatgacatttccaataaaaacaaattatgtgcagacttttgaggttagtggaaatctgacatccaagccctctagcaatcctcaataaatagcttgtactgatactaattacacaaaagtggaattagtggcaaattcagagagtctaaagactaatgtacaacaagttgttcctgacattgatgcaatccanaataccgatattcaaaatccatgtcttccaagcgaacataaa

SEQ ID NO: 263225 - DNA, 369 bp, Glycine max
taggtaatgtggctgccaacttccatcttagattggatcgaaaacttttaaggacccaactgaaagtaatgattgagttccaggaacctggtgaaaaattaatgtatttttcatggaccaaatttataatttagcaaagatgaaatcttattggaaataagtatattatatatcatattttaccaggctacaccagtgaaaaaatctgacccaacaaaaaattcgagatcatccacaatttatttttcaaaatgttttcgtttttattaaaatatagatacactaatattactggaatgctgctgccacataatctcatttgttaacaacttgatgaaaatgaatttcatagatagatagatggataaa

SEQ ID NO: 263226 - DNA, 387 bp, Glycine max
agcatgtaaagcattgactatatgttgactttctcatacggcggcgtatggcgcatacaatataatgattcctttgatgccgccgaatgcggcgaacactgtttcatgcaccctctgacataaacagatgcactcgcttacccaaacattgacgccactcacacggttactgatatcacccacagccacgcaaagtatcgccacatcgagacccatatatgacacgaacactctgatgcaaagatggatatatagacactctcacaacgactcggcacactgacatgtaagcactggctttcggcctcagacacatacacatggagagatacacacacacatagaggaacaatgactctcgcacacacacacttagattaagggact

SEQ ID NO: 263227 - DNA, 321 bp, Glycine max
tttataactgtagtcatgtgttgttctttacgtacgagtcctctcatgacgcggagattgactcatgctctcaagatgaaaatgggccgtcgaacgctcacaatctgaatgttcacactcactccccgcataatgctcataatgctcaaaatgatcacgatgcacactatgcctaactaatctgtgaaagtgactctctatgacaagatctcatggttcgaaataacctggactgcccctagatgtgcactatatgcaggaagtcatgtattattcacacaagcacccaagggcgatagactgcgactatactacaaagat

SEQ ID NO: 263228 - DNA, 406 bp, Glycine max
agcttgaaccaaaaatcggtgagagtgtgattttaaatcgagactgaacgactacgtgtgagtaataatctatgcatgaatctctgaattttagaatgaaatgcataaatgaggacatgatgaaagccatgattgtacatacacaagccttttgaccaaaaagcttaccatgaatgataattgcatcttttgctcccttgtataaagctgattgatgcgcatgaattgaaccttgaactttaaatgattatctactaattcctcgtttatattctatgatagcatatggatcaagacatatttactctaaattgtggggagaaaatttgatatgaataaagataaagatgtttagcatcatcacacacaagaaataagttgtatgtttaaaaaaatataaaaaaag

SEQ ID NO: 263229 - DNA, 347 bp, Glycine max
tttaattgtagtacaagaattcttttctttcgcctaggaatctaaggtatggttttgaatgaaaaaaggcatgaatattaggacatgtttgagaggttgatattagaatttaaatttagctgccccatgaggaataccttgcacctaggtagcatggaaaatacctttcaacggtgtgtatatatgtaaatatatagcatggaaatgccttgcaaaacgtcgaataaaatgccttgcagaaagttgaataaaatgccttgcataataggaatatgtatagcatgaagtgccttacaaagtgttggatgggtagcgtaaaagtagttttcaaaagatgtgtatttgtg

SEQ ID NO: 263230 - DNA, 384 bp, Glycine max
  unsure (1)..(384): unsure at all n locations
gaaactgtgcaaaaaatagatgtcatgaagctattgcaacctataatgtagttgataaccctacaattaacttcagataatcttaatctaattgctttagcaatgtattgatatcaggacaaatggtcatcatatacacaacagaggtatagtcatcctaatttactcagttacatgaagcttgtcatgttcaaaatatcacatatgcaaattgatgataccttccaaataatagcttcagaagttgattatcacgactcaaaattaaagcctgcaccattacactgtcatactatntaaccataacagagaatttaatacagagtcacactaaacttgacttacatcacacctgcttaagacactaagtataaacattgcatg

SEQ ID NO: 263231 - DNA, 352 bp, Glycine max
tgcttgtggggcttctatggaggttggatctttgagcttcaatgaggtcctttaatggtgattttccaccatggagatgcagtggaagacaaaggagaagaggagagaggaggcgccatccactatggaataagccttggaagaaggagcttcaccaccaagatgagccttggataagaagcttggagaggatgcttcaatggaggaaaagaaagagggagagaaagagagaggggggagcacgaaattgaaggaagaaaaagggagagaagttgagctttgtgttgtgtctcacaagactctcattcatcaaagttacaacaagtgttacacatgcttctatttatagact

SEQ ID NO: 263232 - DNA, 422 bp, Glycine max
  unsure (1)..(422): unsure at all n locations
gcttctaaaaatatacatgagttgaacagcttatgtcttctatggtcttcaacatggtatttgcatcanatgagaaacaagatatctccaaatctcaaaaatcaatcctaaaaatagttaaacattaacaaaagagggagaatctttcctgacctttccctctgccgatttagcactatcaatttctttacttttagggtatgtttggtttaaaggaatgaaaggggtgttaaagtgacaagagatgaaagatttgaattaaagtagtgtatagatgtgcaacccacaccaatttctaaaattttcatctcaaatacacccaagatgaaagtaaccaaacactaccagtcaaaacagctttacttaatctctcacggtattagacctcttatggcctanaggaatcactgtagcgatgccta

SEQ ID NO: 263233 - DNA, 321 bp, Glycine max
tcggaaaatatttggcatggacagatatgaagaaacacctacatctatataagcacatttaataccagaattgcatgcatgagatacaaggcaacctattaaggtaacaaactatagagattaccatattccaattgcatctagtatgcttgacattatgttcagtatttttgtatgtgcgttggatactaatcatgtcttacgaaatttcattttactactgtgaaacatataatgaaatatttagtcggagacattgaatgtagtactgctttggtaccctaagggttctagttgttgttagataggttactctaactt

SEQ ID NO: 263234 - DNA, 328 bp, Glycine max
cttctacacatgtagaatggcggactttctttttttattaggaccacgcgaggctcggaccacatgaccatagactccacgcggggcttatttgcatgacaacgagaggggcttatagacctaaaccgtactctccacgatgccctagaggacatatcatgctaaaaatgcccccatacacatgccctaaaccacaacctaggtcacaaccgtgacacccataactcaggcacgtggcgccccaagaggaacatgtggggggggaaaatacgcagtattcggtacgacaataaccgagtgacagggcctattatgactgagagaacga

SEQ ID NO: 263235 - DNA, 423 bp, Glycine max
  unsure (1)..(423): unsure at all n locations
agcttcttgggtagcaactttgtatggttaaaatatctatcgcttgcatgatattcttgatttattttatgttcacaaagacaaaaatggattgtgctcttaaaatgagtttatggattaatcaatctagaaaaaactggcttctaggattggcttagttttataaggattatattaactttatttctagttgagatcttaatatactacctcctttcttatgtataagattatttttactcaattgtttgtccttttttttataagattttcttctaaaagtctgatgcattaattatttctatctataatatccttaattaattgagaaattgattgagagaaatgcttcaacagctgaagagttgattcagttaccaaatggaaaaatctcntttggtgagtccttgagctctagttata

SEQ ID NO: 263236 - DNA, 357 bp, Glycine max
tgatttcaaagaagggagtggaagttcttctagaaatataagtttctatgacacctattctacgatggttctaagtggaccgccttaaaaaatgaacctatggcattgttctaattattgtaatgaaaaatgccttttacaacacacattcactactagaaaaagtgcttattatgcacctcaactacgacggttggcaaaaaaccgtttttgaaaaggattcggtggcaatattataataaattatgagtttaaggtaggttatttagaaagccgtcgtaattgtttgatgtacaaagacgggttctgaagaccgtctttgtatttttgcatttttttttcattttctctctctta

SEQ ID NO: 263237 - DNA, 416 bp, Glycine max
  unsure (1)..(416): unsure at all n locations
agctgtctagccaatagacttaccttgaattaatttctttgatagcccccttgagcctatgttcccctttctttgttttgaagctcattacgagccttacgtgaaaaaccatgatatcaccttacccttaaagaattttggagctttgggaatggtttgggaataatatgggaataagtgttggggggtatgtntcattggaagatataaatatggccatgcttaatgttttattttgggcatgcttgatgtatatatatattggctagttcttgctttaatctttcattgctgcaaaaaaaaaaatatatcaattgctgcaaattcttattggtcaaaaaaaaaaagagaacaaggaacttgataaatgaagcttgtattatgacatgattggaacccttggtgatttgttatat

SEQ ID NO: 263238 - DNA, 375 bp, Glycine max
ctcaagctttagcaaggaattatacaaaatctcttttattcatgatgctaattaacacaggaaaaagaaactgtaaaagcatgatgaatttcccgttggcacatagaatcatatcagatatataaacatttgcattaactgagttgagttatttcacacaagaaacttttttgagaatttcctactctaatgtttcggaaccagttaatcattctgtacaactatgtgaaaatatcttaactcatttcttctagaatttcattagccgtctcaaaaagaggtgtgggagcttttaagcttggtgattttatctctgctacgatttctcttttgttataggatcagcagacaaactgaacttctcattcttttcca

SEQ ID NO: 263239 - DNA, 393 bp, Glycine max
agcttaataaattcatctatggattgtttctcttctcccgccaatagtatctaaaatctcatgaggtcatcacttcattcggctttcaagagaacatcatggatcaatgcatatagcaaaatgtcagtgggagtaagaattgttatcttgtgttatgcgtggatgatatttcgcttgcaactaatgataagaatttgctatatgaggtgaaacaatctctctcgaagaactttgatatgaaggatatgggagagacatctaatgtcattggcattaagatccataaggaaaggtctcgaggtattttaggtttgtctcatgagacctatattaacaatagtttagagagatttaacatgaaagattgttcaccaagtgtatctcccattgtga

SEQ ID NO: 263240 - DNA, 355 bp, Glycine max
  unsure (1)..(355): unsure at all n locations
agcttntattgcaaaataacgncccnagtagtttaaaattancatcataaaacccaacccgaatttccccntggatcananttgacaatcttcttaatgaaattaaacatcaatttacacaacctatacgacaaatagatattatattaaacatccnttgtttaatttcatggattgatcaatgagcgagggggacgggcaacaacattatttaacccacaaacacgaaaccaaatactagaccaataaccaaaacagacgtaaaagaactagcaatactcaatgaaatgccaaaattggatcaactaataaacaataatgaaaaagataatagcagtaatatcaggatcctaaa

SEQ ID NO: 263241 - DNA, 418 bp, Glycine max
agcttctgaacaattatttggatattatgttttgtgatttgctcggatcggtattcctgcatgttctgtgagcccatattttatacttttgatgttgcgggcttcttttccctgtgcaataaattcagaagtcaacttaggactgcaaatttcactataagtttgctgagtgaaattggtaaatgtctttgagatgtaaacatgggttaaaaggattgaaattctctaaatgaaaaagatcaacaaattaaaatcttgattgtgaggaagagcgtaggactacatttctaattttacaaaaagggtggattcatcaaaatcttaagaacaatggattaaggctaaatcttcccatgctcttcgtgattattatcaaggattctgctttatctctctaattgaatatttgaatagcaat

SEQ ID NO: 263242 - DNA, 353 bp, Glycine max
ttaatctgggttttggagcttttcattatatttcaagttccatctgcaggtgcaggtctttccactagtactatataatttcttcaacactccaacaagaaaaggattgtttgcgagttatgcatttgtttattatacgtagccgtacgtagtggagcttacatttttaacaataatttcaaatgcattctaaagggaatcgatcaaccttggtataaccaaaatacacatcacaaacaatcctttccttgtagcaccagaaaggttaagaaattgtatcgaaccaccaagagttagatatttcaagaactttgtggccataattgagatttgctctctttctctcgaacaaa

SEQ ID NO: 263243 - DNA, 398 bp, Glycine max
agcttgagcaaattagtcatgcaatgtggtttgatttgtttttcgacttttcaagtttttactcttttctgatctttttccatatatgagttagattctgccatatcatatgtggcctaacatgctctttataaatgtgtaagctataatgacatttaattaatagaggataattcgtttaagtattactatgccttgttatttctcagttgtatttagtatcaactttgatatctatccaatggctttcactggcttcagatttttttataacagttctgtttgcaaatgcgattaagctggtagctcagttactgctatggaattgacttataatagtaataacttatatgatcttatcagaaatttaaacatatttttcagagacataatgtcat

SEQ ID NO: 263244 - DNA, 357 bp, Glycine max
tcacacaatttatttttctcattctttattttcggaataccaattactaattcctttttaactagatgattgagaggatgcatatttatatgtgcagccctacgatgccataaccaagaatcacccatcttacttaccaaacaactaagttcatgaaataatgcatgttcaatattcaacaagtagatattacctatccttttacctatgtcaaaaacctcaccagaaatagcttcacaaatgagacaaaaattcttgttgaattaaattttgatgcctttgtcaaatagttgactaatgcttaagagattgggctttagtccattaacaaataggaaattttttatttgtgtcttg

SEQ ID NO: 263245 - DNA, 318 bp, Glycine max
tagcttgatgcaacatttggagaggtttatttatcattttgatgatgcgctccatgagaggttggatcaaatggagaatagagatcatagcggagaagaatagatgagaagagggaatgatggtgtttctatacaaaaccgaattgatggtattaaactcaacattcctccctttaaaggaaagaatgatccggaggcctacttggagtgggagatgaaaatagaacatgttttctcttgcaataactatgaagaggaccaaaaggtgaagtttgccgccacggagtctttccgactatgcctttgtgtggcggaaca

SEQ ID NO: 263246 - DNA, 320 bp, Glycine max
cctacatccccaacgattttggtgctacctccataagcaacagccttctggcagaatcttctagagggcccaagtgggcctggttgctatttgcacccccatttttactaagcacacccccctacttttttttgtgattcttttatacgcaaggtacgggaacttaccaatttcgtaacgaaacttgtgttctatccgtaatgttacggaaccttgtggattacataaacatcccctctttgacttaccgaaatgtactgaacctcactaactgtgcaacgatgcttccatttgattttcggtgtgtcacagaaccttac

SEQ ID NO: 263247 - DNA, 262 bp, Glycine max
ctcatgcctcacatgaagaatgctttagtgacatctaaaagccctctccagctgaacccttttttttttaagaggatggtgcagtacccgagccatcttctcaaactgagcctgagcctgaaccatctgcaccagtgcccgacttgcctatatctcaagatccaccatctgtaccatcactagacctgaaccagcattcagagatcaatcataggatgggtgaaacgatctttatttctttaccctcttgaaaatttatatt

SEQ ID NO: 263248 - DNA, 360 bp, Glycine max
tgcttctacagagaggtgtgtgtttcttagctctagcttctcaaggaagcttctcaaggaggtgagcttagcttttagaggggtgtgtgtagctaagctctagcttctaaaggaagttttctcaagaaagcttctcaaggaagctacctagtctataaatagaagcatgtgtaacacttgttgtaactttgatgaatgaaagtcttatgagacacttcaaagttccacttctctccctcttttattccttccatttcgtgctccccccttctctctttcttttccttcattaaagcatcctcttcaagcttcttatccaaggcacattcttggtggtgaagctccttcttccatggctta

SEQ ID NO: 263249 - DNA, 411 bp, Glycine max
agcttgcaataatatattatatactttcattatactgctgggaatcgattaccatatatgtgtaatcgattacacaatgcaaatattgaattcaatatttaatagctgttgtcaaacagtattggccactggtaatcgattacatcctctggtaatctaataccagagagtaaatacgttgataaagactttttatcttaatattcttgaccaaaccttttgcatacttcaattggaaatcccttcctatttaatataccctttctaagactctagacactatcttgagcatccatcttgaatatcggtaatttctttgtcttgaataaagcttcgagatgcatgtgaaaactttggcattatcaaaacattcagattgatcctatgtctacaaatattaacgtgcaatgt

SEQ ID NO: 263250 - DNA, 348 bp, Glycine max
tccacagcatccaagtacttctattttttcacagcccaaactatgacagactagaaaacatggcaaaggcagaaaactctgcccacaacacaaaccaagatcacagaatttctcacttaaaggccccactatcaattccttcgatccaattcgttaaccgttggatcgactacaaaattttactggaagtctctaatacttaagcctacattgtgaccggtgggaactactaacaaacatccagaactcattctgtactactctttacacagaccaccacacacaagcatttatctgcacaaagccaaaattctgctgcacctatttgacagcaaaattctgcataag

SEQ ID NO: 263251 - DNA, 389 bp, Glycine max
agcttagatgtaatatgggtgtgtatctatttatatgcaactcttgtgcaggaggtgagcttagtaattataggggagtgtgtaactaaacactagcttgtaaaggaaacttctcctcgaagggagcatagtggatacatgggcgtgtggatcttacctctagcaatggatggaatgattctcaaagaaatatccaaggaagttttattggaacaacttctcaaggaagctacctagtctgtaaatattggcatgcgttacacctggtgtaacactgatgaatgagaggcttatgagacactactcaatgtcgtttcctttgatttactggatttcgcgttacaccctgtctctttatctaactctatctttaacgtgcttggagcacc

SEQ ID NO: 263252 - DNA, 265 bp, Glycine max
ttcctcctatcagaaactatttcttttacgctcaggagcgtatgcacagattgcttcatataaacaaggaacacctttgccaacatatgcacttcgtgacataccatacactcatgtgcacactatgtggaaccaaggactctgttcggcttgtgacggggtcgatctataaacatattcatgggttttcttgtatgcaagattatggctatataaaagcatgctttatgagaatgcacaacctatcgttttctgtccttacatc

SEQ ID NO: 263253 - DNA, 364 bp, Glycine max
agcttgtagaactgcatgaactgaaagacttttgggtttacttcgagatcaggcataacaggaccacacacatacttttgggtatccacacccaaaaatgaggaatcctggagatctagactacatggagaagcgtgccagagccaatcctcttggtcgtcaacatgatattaataatattggcgacccatctgatctttatttttccttgcatgagactgacaagaagaacatcctccgtcgtcaactcagcatgattgttcccccttgtagttattatccgagaagccacatatgccaagcgcttgtgctccaggatgagtggcgcagttccacaacaatcgcggccctgtgctatggaaca

SEQ ID NO: 263254 - DNA, 350 bp, Glycine max
taaggcgtgattccgtattgcaatcttatttttgtttcgaaagtgattctttcatcaagttcgtgctagaatctcgcatttcatttggcctttgctggaaaagagcatcatgggttttgatgatcaaatgtttctaaaagaaacactattgttgtgtgctaatccaaagataagattggcacatactgcatgccaagtatttccacagcatgttatgttgaagaaaaaattgctatttaagccccaaaagaaggttataaactatcgctcttctaatacaaaatcaaggcacacgtgaattgatcgatataaacttgcgtaagcaacaaagggaatacacggctgaatat

SEQ ID NO: 263255 - DNA, 357 bp, Glycine max
ttgagccaaaatcctgactcaccatattttcttgacccagggagagaatgtcaatccttaccctcggaagcggcaagaatagaagggaaatttccaatccccgaaaaggaaagaacgaagatttccaatcgaagagaaagccaaaacgaaacgatggaaaattcccccatcaaagagtgggagagcgcaaaacgaaaagaaagaaaattcccaatcaaagaatgggacaaagtaacataggaacaagaagaacgaaagaaagctcctgaacacggatcgaatgaaaacagaagaaatgtgcagaaaggtccttggaccggacaatctctgagcaatacataatagtcaccctctgaa

SEQ ID NO: 263256 - DNA, 365 bp, Glycine max
  unsure (1)..(365): unsure at all n locations
agctttaaagactgtgtgcaaccacaaatttacattgagtgtcctcattgatatgttctacagaaaattttgcttaaatttctaattgacataacatatgattcatggatatgatttatgctttctttctttacattttaagccactggccaaaaagctatcctaatgtatattattttaccatttgcaagcgctntgagccaaacacttgatattttgttggaacattaacctatgataaaattttcctaccttaccttacgttaagagagcaaaggtattttgatggggatttctatcatttggtggctaatgtgatgcaaatactttcgttctaatattggaattaagtggaaacctaatat

SEQ ID NO: 263257 - DNA, 358 bp, Glycine max
tgcccagagaaggagtccacggatgtttatgcttaccacctcaaaagactggaaaacggtttctaatgactcctctgcggcttccacataaggcatagaggatgggcagctcaccaagatgtcttcctcgcctgatacgatgaccagatgcccttccactacgaatttcaacttttggtggagtgtagagggaacaactcccactgagtggatccacgggcgccccaatagacagctgtagggggggttaatatccattatttggaaagtaacttgacaggtgtgagggcctatctgtactgggagatcgatctctcccctaacctctcggcgggtgccgtcgaaggcacgaaccacc

SEQ ID NO: 263258 - DNA, 423 bp, Glycine max
  unsure (1)..(423): unsure at all n locations
agcttatgcgcatacttctttacgaatgttcacttgttcaagacattcttataactaagaaaaatgcacccatatacaatcaaggcaccttcattacctagattatttatatgtacttccaaggtgtatttgttacctacatcacacgcatttcctttgctaaattcacatacatgcatactcaaagcactttggctatcaaaaattgcatacatgcacatcttggtatttctaatacctatacatacacaaacttcatgatgaatcttgactatctacacaataaggtgctacatttcatgctctttttcaagtgtttnttttttactacctaaagccacatgcaaattcaagtatattttctcttgctcactaaaattgtatttaaaataacaagtattttgtaatgtattttctttacat

SEQ ID NO: 263259 - DNA, 357 bp, Glycine max
tgtacggatgttagagatatcttcttttacttggtgattcttgactccatttcattgaatcacatgtccagttgtaactccaaagtatcaaacctttcaccaacaaaggtttaaagaccatcgaacctatccaaactcttttgaagaagtgaggaatcttaatcttctccaccatgtaaatgtccttcgtcatcaatgggtcgagcaccctttttcacccaagagccattgtcgcaacctacccttcggcgggagggcgatgcgagactcacgggtgcgtcttccaagaaaggaatacgcgcggagtcgccaccaaatgtctatctcatgcatacattttaaaaacacattaaaagc

SEQ ID NO: 263260 - DNA, 393 bp, Glycine max
agcttgaagagatgcttttggttgaaaatatagagggacagaaagagagaggggggagctagaaattgaacgaataataaagggagataagttgaactttgagttgtgtctcacaagactctcattcatcaaagttacaacaagtgttacacatgcttctatttattgactaagtagcttccttgagaagctttcttgagaaaaccttcttgataagcttctttgagaaaacttccttgggaagatagaacttatctacacacacccctctcataactaagctcaccttcttgagatgagaagctagagcttatctaacaaccccctataatagctaagctcacccccattccacaaatacatgaaaatacaaaaacaaagtttctactacaa

SEQ ID NO: 263261 - DNA, 321 bp, Glycine max
acagtgcgtattataaaaatacattatttacaaatattaatacgaaaacttccatttcatttaccaaacataatcatgtgtgtattataagaaatctaactcaattacttaaacataatgtgagtgttgcaaattttttaataacatcctggattcttatggataataaaaaaaatataacaacatgtatatacaccaaagtatccaataattgccgactagggacttaagccctgagttaaggatttttgcccaacaccttaataattattgagacatcactatgaaaagtacatatttattatatttaatcattctagc

SEQ ID NO: 263262 - DNA, 424 bp, Glycine max
  unsure (1)..(424): unsure at all n locations
tgcaagcttcatctactatatccctattttttatttatatctagcaaataaaatggaatatgaatttatcaaatacctcaacacagatcatgatgattggtttctaaaagtgtgtattgctcgattgtggaatatttataacaagaaagatgaacaacacccaatgttatnggaaatgatgttgctagatgaaaatgttactaatatcgaatgtcgaattgctcaaaaacaaataaaattaggaaattttgtagcacatgattaacctcagtcgaactcaaaaatatgatacaatatggttcctacgttcattcacttataaacacaaagggggaattttatcgaatagtttgtgagcgattatcaaggaatgcgaaaacacaaaaacataattctagatactaaacaaaatacaattcaagat

SEQ ID NO: 263263 - DNA, 349 bp, Glycine max
ttgaagaagcgtcaaagcaagtatttttgtcaaggcaatggaagaagagatacagatgatcgagaaaaacaacacatgggagttagtaaatcattcccatggaaaagatatcattgggtttaagtgggtctataagacaaagctcaaccctgatggcaccatacagaaacacaaggcgaggctagtagctaagggttactcacagcaacccggaattgactacaatgagacatttgcaccagtagctcatcttgataccataagaactctaatagctcttgcgtcacaaaaaggatggagtatccatcaactagaaaagcaaagtgttaagactaagaaaagcactcta

SEQ ID NO: 263264 - DNA, 406 bp, Glycine max
agcttgtggatagtatataccatcttattattcatcctaatagaaacgctgcatagccttaagaaactagagctaaaaacctaccttatctcgaagacccctccaatgccacttctccaccagactctatgattgaattgatgcttatgtctcaccctcaagccgttctctatctttggcagacatacgcagtcccatcttagccacatgatttcgctatactactatcaatctcctatgaatagctgtgacgtctaaaacgatcaaccatggtgctatattttgggcgacctaataaagaggcacgctctccggaacctactgcggcgatacatttatacacccgaacgataacctgttacccttctttacagacatgtgtgctgtaagacattatacactagat

SEQ ID NO: 263265 - DNA, 351 bp, Glycine max
ttgataggcgtaaatcatcactgttttttctaagagtactaggaaagactttttgtgaaggctccactagaatctttgagccaactataggggttgaggttaaaaagtatccttacattttaacgagagttgaacctataacagcggcgagagtgatagaggagtctactagaagaactaacctttgagatgagataaaccgaccatttgaataactgatctggacgagacctagtgatggtacgccatggacatcatcacggggttgacttgtcagaataggcgaatatactgttatccattaaatcattctccaatacatcttgcctcatttctttgctcccttctaca

SEQ ID NO: 263266 - DNA, 416 bp, Glycine max
  unsure (1)..(416): unsure at all n locations
agctntactatgcaaggaataaccaatgattttttcttcatttgacttagcatcaaactttcctaagttttctttttcattgtttaatacaaaacatttgcaaccaaaaacatgaagatgcgagatgtttggtttcctgccattgaacagttcatatggagttttctttaaaatgggtcttattaaatccctattcatgatatagcatgcagtattaacggcttcagtccaaaaatattttggaagaagagtgtcatttaataaggttctaacaatttcttccaaagacctatttcttctttcaacaactccattttgttgaggagttctaagtgcagaatagttatgttcaatgccatgcttaccacaaaataattcaaattctttttttcaaattcacccacataatcactcct

SEQ ID NO: 263267 - DNA, 358 bp, Glycine max
tattgaaatcaaacacgataatttttttccctcacattataatagaagcatatgtgcataaataacaaataagtcacaagtcatcaaaacacaaatcatttgtctaagttacttgcatctagaaatcctaattctcttctaatggtgtagaaagagtctttggttagtggttttgtgaagatgtctgcaagttggtttttagtatctacaaatttttaaaaatacagtcacttttttcctaagactaagtgctaattgactaccaacacttatcaagatgagtttttattaacatagaaggttctatcatatcaaaataattttatttgaaatacaatataataattttgaaaagtat

SEQ ID NO: 263268 - DNA, 401 bp, Glycine max
ctgcagcttatataaaagttacaatacatcttttttgttttgtcaaggatattcttgtaaaggaaaattaagagaaaaaaaaaagaactaacaagaggcagaagagtaaaactgggagtgtggatagtatggccccttacgttttgtccatgatgatactcatgcataggacccttagctcactgaccacacttgatttatgacttttcttttttgttgtatatgctacatttttcgtatgggtttattactattcatactacactttatcaacttgtaatattgactttattcactgtatgcttacttaaatttacataactattatatttttcaaattgcgttacataagtatatggtattttagcttttaactggtcattagaaattgcctaatcata

SEQ ID NO: 263269 - DNA, 359 bp, Glycine max
taaacgtattgaaatattaagataattgcttacaaaatggtcattaaaataagtttcaagacaattatcaacatggtaaccagtttctcgctaaattatgtttttagtctctcatctttttatgaaatttacttttggttcctcaacaatattctttttaccaatcttaatctcttaacaattttttgaccaattgttgtcctttaacaattttgttgattgatcttagttcctcaacttttgtttgtcattagactactagtataatgtaatactcatatgataaaatatttctaattcaagacattttcttatggttctaaggcgctacaaattgttttacagtataaaactactag

SEQ ID NO: 263270 - DNA, 409 bp, Glycine max
agcttgtatagagactagtatttttttcattcttgacaattgtagacctttcgaggagttaaacctatgaaggaattgagacaaaaaaacccacttgctctcttttctcttccttatagaggcgtattggttggatggcttgaagagacaagcggttgagaagaatctttttgaaaactacttgtggggttccttggatgtaaacgtcaacttgctacaatttgcagatgatacctttttcattggaaagcctctgataaataaacatcattatcctcaaaaccatgctcagatgctttgagcttgctttcatcctaaggtgaacttaaacaaaagcaagcttggtggtattggcatcttgaatgataggcttatgtgatttggttttatctctaactgcagaaccatg

SEQ ID NO: 263271 - DNA, 359 bp, Glycine max
  unsure (1)..(359): unsure at all n locations
tccaaaatagcattgtattgtctgttactgtagncntgctgatttaatatattactattaggatgagaatctatatatatatatatatattactaccttttttgttgtttccatgttgatttattaaaatttcacatcctcaatcctatatatatttccttccataatattggatatgcatattgagcccaatgatatgcatattgtatatatttgtgaattgcaattattaattatgagcatattttcatttttgagcatttatgtgtgttataaaatattcatattgcatccaaaatgtttgatcttgctaaagcacttttgagggtggacatttcatgtggccaaaaataaaaaaa

SEQ ID NO: 263272 - DNA, 409 bp, Glycine max
catgccagcttggcatgacatatgatcattatgaatttatcatggccatagagcaaaccacaacaacaatgacaattacatggaagaagaagctgaagaagaagctcatctatagctaacaccacaatggaacccttttgcagtttcttatgattcagaagatggatgatatcctttatctgcatcatgaacaccatgtgtaacgtcacagaagttcacaactccttagaaaacattacaacaaggcttaagaacatagaaactaagttatcccttactaacttcataaacctagatgaagatgatgctcacatatgaccttgtgtttagatctgctatctgatggactgtctatatgttaagatttgtatcgcttagcttcaagatgattaagtttaactttcttcga

SEQ ID NO: 263273 - DNA, 351 bp, Glycine max
tctttgagccgatatcctgactctccatttccttgacccaaggtgggaatgttgatccttacccttggaagcgaactatggctgagaaggatgttttccaatcttaaaaaaggtgagaaggaatatttccaatcataggaaaaaaacatgatttaaaatttccaatctatggaaaatagagatgaaaggaaattccctatcaaagaatgggagagagattacccaaagatagaaggagaagaaggaaagaatgctcctgatcaaggatcgaaagaaaacataagaaatgtgctaaagaacaatacggaattgtcaccagatgaacaaaagaaagaaaatgaaatcattacc

SEQ ID NO: 263274 - DNA, 407 bp, Glycine max
agcttacaactagtgtgtttagaataaataataatggcgactatatatataatcaaattgtagcttttacaataaaattatttaataggtagttattaaataacgtagtagtaattaaagtagtttatttggtattgtctaaacgttaagacaccaaagttcaactttcacatgttcctatttttggtacctacactatggtaatatttatttatttattatgtgattgatatggagtattaattaatgtttttgctaattaattctgattgaaaaatataactgattattttaatgagttgttttttctctcattaatgttgttttatcctcaaaatctaacatagaatttttattgaaggaaattaaacatatacccctattggttacatgctttctttattata

SEQ ID NO: 263275 - DNA, 352 bp, Glycine max
tctagccaaatggacttaccttgtattaattcctttgatagcccttttgagccttgaatccctttccttgttttgaagctcactacaagccttaagtgaaaaaccatgatattaccatatccttaaggaattttggagctttggaattgatttgggaataagtgaggggggtttttggttcattggacaacttgttttgttgactatgcttcatgatgtattttgggccatacttgatgtacattgtatattggttaaatgttggacatgctgaatgaaatgttgtttcctaaatgcaaaaaaaaaaaaaaaaagaaagttcgaacaagaattagacaaagaaaagcaataa

SEQ ID NO: 263276 - DNA, 275 bp, Glycine max
  unsure (1)..(275): unsure at all n locations
actcaaacgcacttaagcacgagctcaactacaccaacccccgaaagctttcccacccacccacaaccatgaaacgaacaaaggtccttactacacanactacccagaacgccatgaaatcctacgccaaaacgcgaccctacaagaacggcccaaatacacagcctaaaagaaagaaaccccatcctaatattcacaaaaaagagcggacccaaccttgacccatgggctcaaaaatcaaccctgaggtacatgagaaccttgaggccatcttt

SEQ ID NO: 263277 - DNA, 369 bp, Glycine max
ctacatggagctacatcatgtggtatcatagctgaccattttaacttggtgtgctacaatcaccacacacaccaccatcgatgattctgccaacattattgtccctgccaacaccatcattattaacaatagcacctctggaattgtcaccacaaccactaccaaggttattgctatcaccaccacaccggcatcaccaatatggctacctccaccaccacaccattgacattgctaccacccccactcatcctgccaccacctcaagtgacacattactcaaaatatgagttgaattgcggtttgaaaactttttcgctcctttaaataaaaggcatatgatgatattctctaattaacaactatttt

SEQ ID NO: 263278 - DNA, 322 bp, Glycine max
acactttaaatactcttttaatccactgacctacgcttagcaagttttgggcaatgtctcggtcctaaagaacatctgatatttatttgatatctgaacacgtcgaaattggtacaggtccttttccttttataggattatagccaccattcccaattctgacctttgaaacattaattggctacaaatccttgaataaagtcttatcatatgtcatgtggctcgtacaaccactatcaatcaaccaacattcacttgattcactactcaagggtgataatttttcttttgatccttacctcttgattgggtggatgcgcta

SEQ ID NO: 263279 - DNA, 429 bp, Glycine max
  unsure (1)..(429): unsure at all n locations
nttctttgtatgccaagatggccacctggtgcggaagaatgactttattttttgaccganccgatctcatggtctggaatgcatctcctaataatatggccactgcacaactatcacaaataggggtcatcccaaatataatgcttaacatcgctcttaatttttatcattttaagctttaaatgctaagggaggaaaaacaaatacaaccaaattattcacaatattagctaaccaacgagtggggaaggaatcagaaatactatacagaatgtacaaatggtcatccggaaaatcatcctgaatgggtgagttcttaaacgcgcacgcaatcctactcaggtggtcaaccacgaagttctgtgcaccactcccatcacggatctccaaatcaatctcttggagccaaaacatcctgcttatcaatct

SEQ ID NO: 263280 - DNA, 362 bp, Glycine max
tgacagctactacttcgccacttgaaagagtgccctgaatatctcaaactaaatcaactgacatatctgtagatggacccttattccctcttgcatacaaaccaaaaaaagtaccctagtaccataccttgcaaacctcaccaaatccaccttcccccaacttgttataggcaaagaactcgtgtgtggccgcttcaattgcgctgaaatcgaattgcaaggagtccacggtggggatgtcatactctcctaacaagcccaaacaaacgcataagataaaatctttcataaaaaaacagaatctttaacttctcggcggatccttactttttccctcctttacagaaccctgcggctcttcc

SEQ ID NO: 263281 - DNA, 265 bp, Glycine max
aagagtggcaagagaaaaacatacacacaactataataagcaaatgacctgagcctaaaacaaataataaccactacaaacaaggcactctatacatgaaggcgcctatatattatccattccaaaaaaacaccaaacagccaatgcaaatcggcctaagtaatcacaatctcgatatgaatcctcatcttttctatatatgtgagccggaatctttctgacgcactgcccaataatatcatataaagcaaaagtacataaaaat

SEQ ID NO: 263282 - DNA, 426 bp, Glycine max
  unsure (1)..(426): unsure at all n locations
ctatanaatactcacgcttgatgacattagactgaacaaactccctgatgatatggttgtctatgtcaatgtgcttggatcattcgtggtgcgtacgggtggaggcaacgcttacaacaaatttattatcacaaaacaatatcacagaggacacatcaatttcaaagtgaagaagtaacctgtttaaccaaacaacttcactagttacaaaagacaaagcacaatattcagcctcagtggacaatttataaacaatagattgattcttagaatgccaagagagaaggttgttttctaaaaatacacaaaagccagaagtggaccttctggtatcaacacagctagcgcaatcagcattagtaaaggcaatgagtttgagagagctctgatcaggaaaaaataatccttgtccgggagcatatttga

SEQ ID NO: 263283 - DNA, 187 bp, Glycine max
acccatcaaagggtgcccgatcacctcctcccaacaccttcaaaagcgaagcaacccattatgaacatacggcaaccaactaaagcaaagactcatgaaaaccagaccatggctcaaccgaactatgcaaccgaataagaccaattggtaatcgaataaaccaaaacaaaaatctctccgcagccat

SEQ ID NO: 263284 - DNA, 417 bp, Glycine max
actcaagcttccaaggcgtgcactaggtgataagcacaaaacctcgctctgtaatgcaaagcccggaagccagctcccagggatctggatgtgaatgacaaaatctggagtgagcggtgtagagccccccaagctccaaaaccatcggggtctctaaaaacgactttagcatctcaacatcgaattacatcaaccttccttgcactcagacctatctcggggacataccttctggagcacataaattcgcatagagagccttcaccagggccacatcaatgtgaccatcaagcggcctggccaaagcctcatgctaggtcctcaactcgagctccttgcggaacccatcatactcacaaacgtataagaggaccctcttccacgaaagaatgccccgggagcgaacatcctatgcat

SEQ ID NO: 263285 - DNA, 375 bp, Glycine max
atccgagcaaaaagacattgtccttcgaatatggacacagcttctacattcattatcgagcgttccgatatattacgggattcaatcagacatccgaataaatagttattgtcgtttgaatatgctcagagcttttgcattcactctccagcatatctatatattacgggactcaatctgacatcccaataaaaagtcattggcgtttgaatcttctcagaacttcagcattccatttccagcgtcttcatatattactggactcaagcagacatccgcgtgaaaatttattgtcgtctgaatttgctcacagcttctaccatcaatttcaagcgttccgatatattacgggactctatcggacatccgagcaaa

SEQ ID NO: 263286 - DNA, 370 bp, Glycine max
gtgtgctcttcatcttgttcattcccttctccctttgccaaaaagaattcgccaaggactaaccgcctaaattctttttgtgtctctcttctcccttttccaaaagaacaaaggactacccgcctgaattcttttgtgtctcccttgtcctttgtgaaacaattcagaacgacccagtttgagaattcttttgattcttccctttcccataaacaaaacatttcaatggactaattgcttgagaattcttttgtttacccattcacaaagtttcaagggactaaccgcctgcgaactttgtcttaacacattggagggtacatcctttgtggtacaagtagagggtacatctacttggattgtttgactg

SEQ ID NO: 263287 - DNA, 445 bp, Glycine max
tccttttagtgcgtcacatttaaagccgagctcgatggtggtgctagcctttgatggcactcggcgggaagtgataggggaaatcgacattcccattcagataggcccccacacttgcaatgtggtgtttcaagtaatggatataaatcctgcctatagctgcctcttgggaagaccgtggattcatgccctgggagtggtcccttcaacgcttcaccagaaattgaagttcgcagtgggtggacttttagtgatagtgtcgggtgaagaggacatgttagtgagctgcccttcctccgcaccatacgtagaagcggcggaagaatcattggaaacggctttccaatcctttgaggtggtgagctgtgcctcggtagaaccaagttcgtcactaccttctctctccaaagcggccataatggtggcgcgtgttatgctcacgaat

SEQ ID NO: 263288 - DNA, 322 bp, Glycine max
ctaccaccactacgtgacttccaaatcaggttcaattgtaaatgttcccacctcttaacaattcctctctctagagatctgtccttggcctttgttgatcaataacaagaatcacataactgccacacctatactttgcacgcatgacttgaacccaaaggtcatatggtagcatacaaaatctccatcccaccttcattatactcgtctagttcacaatactaactcgactaagcccatgcccaccattcctctttggagacatatagaatctcattgacgccaatggactttattagagtttgtagaatggcccaaacaa

SEQ ID NO: 263289 - DNA, 308 bp, Glycine max
ccccctgagccgattatccccttactttgctcagaacctcatcacaagccttaagtgacaaaaccatgatatcaccttacccttaaggaaatctggagcttcggaattcgttcgggaataagcagggaataacggggggggggtatcgtccattggaagatatgaactatggccatgctcaatgtgttatcctgggcatgcttgatgtatatatacattgcctagttcttcctttaaccttcaattcgcggctattcaaaagacaaaagaatcggaaaaaaagcagtgaaccccaacaaacacgggct

SEQ ID NO: 263290 - DNA, 391 bp, Glycine max
aaaccagctggcctaaaggatggactttcaggttttggagatgatttttttatgcctatacgctggacctcccaaaagagtatggagatagcaccactttcaacattgctgatctaattcctttcgcaggtggagctgatatttaggaagaggaactaatagatttgaggtcaaatcctcttcaaggaggaggggatgatgcaattctctctatgaagggaccagtcactatagccatgagcaagaggctccaagaggattgggctagagttgctgaagaaggccctacggttctcatgaaccttagggtagatttttgaccccatgggccaagggggggcacactatcttttcactcttaaatgaggatactcatatttgggcccttata

SEQ ID NO: 263291 - DNA, 349 bp, Glycine max
  unsure (1)..(349): unsure at all n locations
ccaaacgcaaaagcgaggaaagaagccgaagganactaccctgcacctctaataagccacttagtctacaccatagaaccatgcaagtgcatcctcactcaccaaccctccctctccatacacatcctcataaccatagcaccctacgacacatactccacctccaaatacatctccaccgtctccaccacactcccctccattactatccacaccctccccaccttcaatccccccaaaacccttctctcttcctcactcaaccacgaaaccccattggtgcacgtgctccaccacaacaacccgcacattcaccaaaccctaagatccctgtccagaactcacaccc

SEQ ID NO: 263292 - DNA, 219 bp, Glycine max
ccggggagacgtgcaaaaaaggacgaacccccgccaaccgacaccaccccccacggggaacacgcccccgccaggcccgccaacagcaacaggcacaccctcatcaccagggcacaaagaacgccgaaccatagcgcacccggccgccgcaaccccaaacaaagcaccccaataaggcacgaaggccaccacccggacccacggggacccaaaaagcaa

SEQ ID NO: 263293 - DNA, 378 bp, Glycine max
aaaactcagctatcaaggtgtctggaatacttgccgacgctccttattttgcttgccggcgcggaaaaacaattagcttccagcttctctcatagatggaaagttcctctcctcctaattaattatatatattatctgcataacacgaattcaccttgttttttaaaacactttcatgatgtgtaaaataaaattaacattctttaaaaaattgggtggattaattatgtggtcaactcatccacttccctctaaatgaagccggttatattctccacctacttcttgctgtatcctccttaaggctggccgaaaatacaccgaccagttcgactcactttaccgcgctcctatcgagagagaaagaagaggataacc

SEQ ID NO: 263294 - DNA, 354 bp, Glycine max
aaacacagagagctcctaagcttctgaacacaacctaataaactacaatatgtggtaatcaattatttcgagctacagagtctctctccttttgaagttgacttaggtaactcattacaaaactttggcgatctattaattcgataaaacttggcgatattttaagagaagttatgtcgttggttctaacactccgtaattgattacttaaacttggcaatctattacacgacgttgaacttattgcttcttacaaactttggagacctatccaaatatcctctcatgtttgataaccactaagcatggataaagagaactaagtctataacactcaacatgcctagtctgaaa

SEQ ID NO: 263295 - DNA, 435 bp, Glycine max
  unsure (1)..(435): unsure at all n locations
tactaagcttacccacatattnttggaagccaaacttacaagttatctttcccatatcaagcaggtacaagtctttctttcccaataccattagattgaggagcatacgaaggtgtcccttcatgaataatatcatgcatttcacaaaaattactcatatttaaagatgtgtattctccacctctataagaacgtagaatttttatttttctttctaattgattttatacttctgttttatatactttgaacttatcaaacaactcacttttgtgattgactaaatacacatatcaatatttggagaaatcatcaatgaaattaataaagtatctcttaccaccacgtgttaatacatcattactatcacatacaactatgaaccaattcaagtaagttagtttctatttcaatacatgtagtaaaaccctttct

SEQ ID NO: 263296 - DNA, 347 bp, Glycine max
  unsure (1)..(347): unsure at all n locations
ccacgcaagcaataggagacgaaaatctagcttgtttcctnctttgacaacatgtgagcaagctgactctctggaccctcgagagcaaagaatgatccaacaataaatccacacccaagtgtaaagcatagggcaaactttcggggcataaccaccatgacgggcagaaataatgtaaatgctatgaaaacaaagaagactccacttgccagatacaaaccaaaatacacaagcgctccgccagaaggcacattactagtggcagactggaaagcgccaggaagatctctcacacctttagaaaccctaaaacaaaagaaacaaactgcataactacgtgaggacat

SEQ ID NO: 263297 - DNA, 296 bp, Glycine max
  unsure (1)..(296): unsure at all n locations
ccgacaaacgccaaacaaaccggggcaaatgaaaacggtgagaatgagcgacaaccccatgccgtgacagccatccccacacagcccacgccccaccaacccaacaaggtcattactcagccaataacaaaccttctccctacccaccgcccagctatccacaaaggccacccctaaatcaaccacaacagccgacgaacaccacctttagcacaaaccaaaaacaccaaccaagaaacgaattctgcagcgagaaagcctgcaaaacccacnccaatcctagtgtcccatgccga

SEQ ID NO: 263298 - DNA, 272 bp, Glycine max
atttttttttttttcacgaaaccggggagatggggtatatggaacttcttggtcttctcttgaaaaacttggcatctccatagggttctagggcgatgtcatttaactgactccgttgacactttctttctttcccagctcgagacatatagaacgtgcaggtcttacttcccacttgctctgtgctcaatctccagtgggtacgcccatctcttaaatcactcgatgcatacatgaggatgggctaataccaagaatgtccgccagggtcc

SEQ ID NO: 263299 - DNA, 275 bp, Glycine max
actaccagagggcttttttttttctcaatctggtcaggacattctggatacaatctcttgcaaagggaattcggtggcttttggaactaaatccttccaaatgcagattttttcgggaataccattcttcagggggctcctgtccaattaccccctactggacatggattgaaagatggatttctctagtgcctatattaacagtgggtggaagctcttgggctatctccactgcttgatctcgaaatatctattctttttctccgaaattaata

SEQ ID NO: 263300 - DNA, 346 bp, Glycine max
  unsure (1)..(346): unsure at all n locations
ttatcattctcgcnccgcaaataccttctcatgttacaaaattactattctatttggtgctctatttctctgccttgtatatacggtacagggggtgatgacctggctgcacaactgccaaatgcctcttaacgttggctcttgggtggtaaaagcggagcaagtctattttcccctacagtgaacattatgcttactaccatatgctttccttccatgttcctgcctctttctaatatacctgtagagctcttattcttttccctcacgcgctacaattggcctctcctctcttattgtcgccgaaagaaaaattcgccgggatctttacattgatgggcctctt

SEQ ID NO: 263301 - DNA, 335 bp, Glycine max
  unsure (1)..(335): unsure at all n locations
aactacattgataaaataggaacaatcatgactaacacgttctctgagaatctgcatgagggaccttgctttctgttccaactgatcagcataggccatatgagctagaggagtcactgcatcacgcacatttcttgtctttgccaagttatcattatttgtttcaccatccacagtcccacttgaagcaacatcaacccctgcattttcctcatctaatccttgacgggatgcaccaatggcattcactttctttccgaatgaccgacgaagaacattacccaacctctancgtctngttgccaatcgatcttccttctaattcctatgaaatt

SEQ ID NO: 263302 - DNA, 432 bp, Glycine max
  unsure (1)..(432): unsure at all n locations
ctaacctcgctgaggagaggacttggataaaggacctggntatntgtagtattcattcttgaaatgcccgaagccagtgttgatatagctggatgataatgactggacaaaagattgagttcccaaagttctgaggcaagggcaccacttaaattggggtctgcggaatatggtagatatttctgcctaccaaagagggagacaatccataaaagcatacagaanaaaaatggtcctcactaaaatattttgcaatgaaattcacaagtttagcatttttaccatagacccttcgacataaaaaaattcatacccagtctttctttaaaaaataaactacctacaaaataatcttttaaataaaaagaatagcttcatgctgatgcagattactctggaagcatttctccctcctttccctttcctttatat

SEQ ID NO: 263303 - DNA, 314 bp, Glycine max
acacgcggcagccagcagaaccgaagggatactttcttccgagaccaacacgagggcgaggggacgacacaccacagagacgaacgcacgagacgaccacgaggaccaaaacaactcccagagaagacccgagacgagccacaacacctcacaaccagagacaccgctcacaaacacaaccaaaaaacaagacaacaccagacgcaagagcacgatcacgaaacaccaccaacaaagccaaaaagccccaaacacgaggaccatgagcttcacaaaacccaccaagaagagacgccgggaacacacagcaaggg

SEQ ID NO: 263304 - DNA, 281 bp, Glycine max
aacgagaaacaaacaacagccgccttttctcggagaaccatcacagggagaaacagaaccctaaccaaagcacgggccgacaaaggggacccactgaaggccacatgccagcggaagaaccccggcatatccagtgacacacaaagaccaggggacacgaccgaaccacaccaaaaacagccgggacccaagacacaccaaagcaacccccccagggggcccaggaagaaccgcattcccatcgaagagcagacacagacctgaccaacacaacaggcaaa

SEQ ID NO: 263305 - DNA, 435 bp, Glycine max
  unsure (1)..(435): unsure at all n locations
aactaagcttgctcacacacctnttaatactaaggtacctcgttattttattttgagctcactacacacccgctaaatagctagatcacccctgacaaaatcatgaaaatacaaaaaaagtccctatactaagactactcacaatgccctgaaatacaaggctaaaaccatatactactagaatggccaaaaacatggcccaaaagacgaaaaaaatccattctaatatttacaaagaagagtagatccaaccttgacccatgggctcaaaaatctaacatgaggttcatgagaatcctaaggtcttctttagcaactctagcccaatcttcttggagtcttttatcaaatacccttggggggtaggattgcatcatcccctccaccctggaaaggaattgacctcaaatcctgatggtcttcatactgtgggct

SEQ ID NO: 263306 - DNA, 368 bp, Glycine max
gcgctcactttataagaacgttttttttccatccctcaagattcctatttatggctaactgtggatggaaccattctaataaattctgcttaacagagtatgtctcaagggctccaccactggcagcatctatcatacttttctccatattactgagtccttcataaaaatattgaaaaagaagctgctccgaaatctgatggtgggggcaactggcacatagttttttaaatcgctcccagtactcatacaggctctctccactgagttgtctaatacctgagatatctcttctgatggttgcggtcctgcaaacagggaaattctttctaaaaatactctcttaaggtcatcccaccttgtgatgg

SEQ ID NO: 263307 - DNA, 434 bp, Glycine max
tgttcttgaatttataatacaaggatctttctttatctgttcctacgtctctacccatgctcatccatttgcatgttcacttctttatgtttaaagcggcagatctgatgacgtgtcccttgaaggtactaatacctgggacccacctatcaacatcgagcagggaacgaatcaaacggaagatgaagagaacgaggatgtgggacttcccccggagttagaaaggatagtcgcccatgagggccaagaaatggggcctcatcaggaagaaacagagctagtaaacttgggaactggcagtggaaaaagggaagtaaagataggcacgggtattaccgcacctatccgtgaagaattaataaccctgctaagagactaccaagacatctatgcttggtcgtaccaagatatgcccggtttgagctctaacattg

SEQ ID NO: 263308 - DNA, 328 bp, Glycine max
cttggggacgtcaggtggggtgctatcgcccaaaaccaagcctgaccaatcccgacacacccccggcatagctggccagtgagaacccgtgatgtacctaaccacgcgagctcctggcacgcaacagataaaaggaacaaagaccacacaccacggaggctcgtggcggctggccagctgtgaacttcgattgatatgcgggctatggcccctgcgcatcaattaccaagggtgggtaatcgactacaacgcttaaaaatgaagacacgacgctaacatggcctctgcgaatccattaccccggcgtgcaatccattaccacgctcga

SEQ ID NO: 263309 - DNA, 438 bp, Glycine max
tactcaagcttcgcctgccactccttcaagaccttacacagttttcttttattctttacctgcgctgttgcagatccttcataatggcgctgtcatcatcatgcagagcctatagagctcatgcctgcaacctatcatgagcatggaaaagatcattatccaggtggatggaccatgagtccaaccttctgctttgggacggggtgagggctacgcagcccaagagccttgtgcccgatgatgaggacgagtctctcccccctgagcctttcatttatgagccagacacagagatcgctcacgaggaggcaccatcaccagagcttattcctcaagcatcaccatcaccagctttagttcttgaagacccagagccatctggaccagcaccgatacctgatcagcctcttgctcaagaccctctagctgcactaatgt

SEQ ID NO: 263310 - DNA, 353 bp, Glycine max
aaaatttttttttttatgtccggataccgacggggggagaccacagatataggactaatctgcccacccaaatattacttttaacaacactatctattttttctacaaactgaataatgtctaacattaagagcaaacaaatcgactttattttttacccccagaactatcctattaaacaatgctatacaattcaacaaaacaaaataaccactataatctatgttaaagatcaaaatcttaaaataacgaattaatggtacctcacattggacttacgcggattaaacaacggatggtttgtgagtttgaagactaaatatgttacgtccacgggcttaacggattgaact

SEQ ID NO: 263311 - DNA, 379 bp, Glycine max
actctccagcgaacaactcgtggctctcactccactccatgctccttgaggtgattgatctttgacattcttagtaggggagcgattggaccaataaacggcgcatgcaacagcttccgcccaaaatacctttggcatattgctagcccttaacacacatctagccgtattaacgaatagatctactttttatctccgctaccccattatattgtggagatctacgaaccgttatagggccacaaatcccatattttttacacaaaacattagattctttgatgggaaaccgccacctctatcggagcttaagccttgatacataccactctcctttccacagacttcaaactttaaacctaaagcgcctcaattttgc

SEQ ID NO: 263312 - DNA, 164 bp, Glycine max
ctttgaaagcgctgggagcgtgggtcctttcttgttgaagctcctacaacactacggagacccatgaattactatccttaagaattggagcttggaatcgttcggaaaaagggggggtcttgtttactggacaactgcttgtgctatgttctgaggattcgggc

SEQ ID NO: 263313 - DNA, 430 bp, Glycine max
  unsure (1)..(430): unsure at all n locations
actcaagctttaaggaaagacatagtacgagcaactaatatatggctttctatagtatatnnngagctctgagccccacaatgatacggagtaacccatacagaataataaaaaggaattgataactaaaatagaattctttcattacggatgttgttcttctttttaatattttaaataatacttatttttcaattataaagattaattttaattttattaatattttaaaaaataaataaaattttctatattttaaaataaattcaataaatttagatttttaaattaaaagatgatttttaaataattatttttaaatcacaataaattacttgcgaattttattctgcaagaaaattcacaggttatttcatgcggatttaacaatttgtatgaaatttcttgtgaattttcctggaactttaaa

SEQ ID NO: 263314 - DNA, 392 bp, Glycine max
  unsure (1)..(392): unsure at all n locations
agcttntagctcttacgagccgttggcttctataactcangaaacacaaagtgaaaatgaggatgctggggaacataagggacgcgaaaatgatgatataatcaaagaactgaagaagttgaagaggcacaacttcgtgactcattgtcttctttcggggatgatcgttctcactgtggcttggcaactatcggaggtttctcttattttgaaagtcaaagatggaataagccacccttttaaatcatttggaaatatgctcacagggatggcgaaagtccctaacatgaatggccaggaagctgatgacaaagaacacccatctgaatctccatccattccttcaatgatcattccaaatatgtctcataatggaaactagtgaaacttgc

SEQ ID NO: 263315 - DNA, 423 bp, Glycine max
tgaatggagctctagacagttctggggtcctgaacagattgctttctatgggaatccaacagctgggatccaacagcataaattcaggaaatcacggcatgtccttcattaaagatggaaggaatgtcctaagaaaaaagatttatggcgaacccaccttcacttctcctacaagagacggggcatcttctgcggtgtcaatacgttctatacggttttccccttaaatttctttattagaaacctagattttgtctgaaactgcttcagaaagcttgctttccaagaaaactgttgtggaatagcaaaagaataagcatggagatttttatgtactcatgttcctaatcttaagttgcccaaatggatgagctcgtacttgatgtcaactgcaaacagattaagttcttgactcattgttta

SEQ ID NO: 263316 - DNA, 414 bp, Glycine max
  unsure (1)..(414): unsure at all n locations
tggctcgtatcggtcaagtgtatggaccacgcagaagccaaggtgtctcatttattatggncacaanngacacgaggagcccaagagcactttggacaaattaccattcaatgttaacgacctaaaggcaaactccatggtggtccatgccttggacgggacccgtctagagagcgacctacctgttcacacaagcccgcgcacctgacaaggtacctttcaaataatggatagtgacccccccttacatctgcctgtaggggcgcccgaggattcactcagcgggagtagagccctttacactgcaccaaaagttgaaattcatagtggaaggacatctggtcatagcatcatgccaggaagacatcttggtaaactgcccatgctctatgccttatgtggaggccacaaaag

SEQ ID NO: 263317 - DNA, 353 bp, Glycine max
cagcaagccgctcaccgctagcaagaggatttttccgctcgcatcacgccagggcgaagaaaagcagggccacccgccgcccacgagcataggattgcggacgaatatgcccaagccaacgccgaaaaagaggcgacaggacgggcgaacgactcctcacaccaagaggccacacatgcggaaggatcggctcgcccttacccggaacgggagtcaaaaacttccccgattgtcagccaaggccaaggcgatggcagacacctaccccgcccccgaaaagattcatgggctcctccggtatcggcagcatatgacagactcaacggcccacacacacagaaaccgcgaggaaa

SEQ ID NO: 263318 - DNA, 448 bp, Glycine max
  unsure (1)..(448): unsure at all n locations
ctaancttccacacagtgtaccacactaccgcggctccgagccagtctattttgttataagtatatnaacacgctcgcagtcttagagtgtgcgcccatcttgcggcagtacatattgagatggtttttgggacaggggcgtccctttatacttgtcgaagaccggcgctttgaacttcggggggataacaacgctcggcactaagcaaagatctgtcatgtctgcgaacggatagtccccaaatccttccacggctctcaatctttcctcgaggagatccagcttccttttttcttcggttgctggaggccgtccttccgtggacaaaactattggtggtgccgcgatgctgggttgaagcaacctgctgggtgctggcccttccgcgatcgggggatagaactccacatcccttcgagcatagtcttgagggtctatgcggacctc

SEQ ID NO: 263319 - DNA, 281 bp, Glycine max
  unsure (1)..(281): unsure at all n locations
gcatgcaagcttcttatccaaggctcacctcggcggtgtttctccttnctccatggctcattccttaagggatggcgcctcctcccacctatcatncctcgtctccccctgcatctccatggtggaaaaccaccactaaaggaccccattgaaccccaaagacccaccctccatacaagctccacaagcaagctcccatcaagatgtcctatcgagtcccgtaacatatccagaccctcgacatacaatgccgaacctccgaccatttcaaacgcacaaaa

SEQ ID NO: 263320 - DNA, 423 bp, Glycine max
taaacattcactttcgagcctcacgatatattacgggacttaatttatctttcgagaaaaaagttattgtcgtgtgaatatgctcaaaggttcaacattcaatttccagcgtctcgatatattacgggactcaatcagagatccgagtggaacactattgtcgtttgaataggctcaaagcttaaacattcactttcgagcctcacgatatattacgggactcaatcaaacatccgagaaaaaagttattgtcgtttgaattggctcacggcttcaactttcaatttcgagggtttcgatatattacgggactcactcagacattcgtgttaaacgttattgccgtttgaattggctcagaggttccacattcgatttcgagcgtctcgatatgttacgagaccccatcacacatccgagtaa

SEQ ID NO: 263321 - DNA, 431 bp, Glycine max
  unsure (1)..(431): unsure at all n locations
ctgaggcatgcaagctngatgttacgctaagcctcacatctttatctaatctcttattacagaaatatgtttggtgttgcagaaagcgctaagcgcaccctgccgccctaaaccacaaatgcttatgggagtctacaactctaagttgggcttaacgcgaggctaggctaagtgctaatgttttaaactcaaacgtcacgttggcaccctaagcacaactgtgcgctaagcgcgccatacaaatttcagtttttttaaaaaaacaaaggttgaggcacttgggttgctacctttgcacctaaacctctgcaccttcttatctttgagcattctattactttctgctacgtgtgtactgctactatgcatcatttcaaagataatccaagtaagttagcatacttctatttttactcttcatgcttcacacc

SEQ ID NO: 263322 - DNA, 439 bp, Glycine max
  unsure (1)..(439): unsure at all n locations
tccatcacttanggtctagaatgactctattatagaattgttatttttacctatgacactaatcatcagaggaaaataatatggatggtcgaggagatgaacgagagggaagaactggtgctggtgggtctccacaggttccatggcgatggtggccaacaatggtggtggtggaggaagatctcttttgtttctttgatgattcagccatttgaagttgtttcagctgattttaattggtggagtttgaagagaattgaaaaagatgaacattgggctttttttgaagcgatttggttaagaaatgagaaagatatgacgatttgaagatttggggagggtttgcgccgtcacatgaaaggggagagtgagagttctgtgaaaacgcacatatttatagatagagacgtctttgtatcgattaccaaccatcgtaatc

SEQ ID NO: 263323 - DNA, 429 bp, Glycine max
  unsure (1)..(429): unsure at all n locations
agctttgcgaatttggtctntgccagtgtatgatcgatgtgggtctgaaaaaaaaaaggcaaatttactcatcctgcttggacgaatgagaaaactggggcaaatgaagagggtgaggatgaaggagaagcccgtgctgtgactgccattccaatacagccaagtttcccaccaacccaccaatgtcattactcagccaataacaaaccttgtccttacccaccgcccagttatcgacaaaggccatccctaaatcaaccataaagtctgtctaccgcacttccaatgacgaacatcacctttagcacaatccaaaaacaccaaccaagaaatgaattttgcagcgagaaagcctttgaattaccccaattccatgtcctatgctgacttgccccatatctacttgaaattcaatggtagcctaaccct

SEQ ID NO: 263324 - DNA, 435 bp, Glycine max
  unsure (1)..(435): unsure at all n locations
ntggtctctgcagatcttcacacaacagaatctctcatttctctttggaacttggacctttctctctctagaaactctagacatgcaaaactttgaatcccagtccaaactccctttctaaaatctaatttcaggcttaaataggtggccttgttcgtgctcatgcgcttagcgcacttctggaccgcttacctcacatgagtgaattttggcttaacgcgtgcctttctcgcttagcggatgaactgaattggtgcgcttagcaaacctgtacagctcatcttcttccagagtcatcctcacgtttagcccatgagtgttgcgcttagcagacgctcgctaagccagcacattggcttagcgagaaggtgaaaaataacacttttcaatgctttcctaattaacctganattgagagaaaatgattattaaaca

SEQ ID NO: 263325 - DNA, 454 bp, Glycine max
  unsure (1)..(454): unsure at all n locations
gaccttganactcagcttccaggcgtgcccttggtgttaagcacaaatcctcgcccgnattgcaaagnccggaagccagctcctanggatctggatgtgaatgacaaaatctggagtgagtggtgtagtgctccccaagctccaagaccactcgggggtctctaaaaatgactttagcatctcaacattcaatttcatcagctttgcttgcactctgacctatctcggggacttatcttctggatcatataaatttgcatagaattccttcaccagggccacatcaatgtgaccatcaggctgcttggtcaaggccttatgctagttcctcagctcgagctccttgcggaactcatcatactcagaaatgtataagatgacgctcttctccgaaagaatgttcccggagtgaacattctatgcatatctctcccaggcgccctcagatatgaat

SEQ ID NO: 263326 - DNA, 421 bp, Glycine max
  unsure (1)..(421): unsure at all n locations
agctctttagtttcagatgatgcagatgtttttgtattcacctcatgcactcctctaatgactatggcatcatttctggcgctaaactgctgggagttggaagccatcttctcaattaaattcctggcttcagcaggagtcatgtctccaagggctccaccactggccagatctatcatacttctctccatattactgagtccttcataaaaatattggaaaaaaagctgttttgaaatctgatggtgggggcaactggcacatagtttcttaaatctctcccagtactcatacaggctctctccactgagttgtctaatacctgagatatccttcctgatggctgtggcnctggaagcagggaaaattttccttaagaatactctcttaaggtcatcccaactcgtgatggaccttggag

SEQ ID NO: 263327 - DNA, 439 bp, Glycine max
  unsure (1)..(439): unsure at all n locations
tgtcgggttcagttntaattaagcgcttggggcattcctatggtctgagtgaaaaggcttgggtcatttaaagactacccatcttttaaggcacaaagcgaggatcagaacaacgaaaccctaatcccacgtttctttaaaagattacgatgagaaaaaatacaaaggataggaatccttgggggaaaccatagaaaacaaaaacatgcagcaacttccttaatttccccaggtcttaagcgtagtatcgcttgacaacatcggagttcacgggtgaaggtagttcctcgtcatccatgttggcgagcacaagggcccctccggagaaagcctttcttacgacgaaaggcccttcgtagttcagggcccaactttccctatagtctttcagcgctagggagactttcttcagtactagggctcccttcactgaacctgc

SEQ ID NO: 263328 - DNA, 426 bp, Glycine max
  unsure (1)..(426): unsure at all n locations
ggatcttnatcaccgcggctgcaacttgatgtgtagtcttcttcggttgttgagagtgtcatcttgctggattctgacacaaaatcaatcaaatcttggtcctttaattcagctccatcttnttttgcaattttgttcttttcttgatgctctctgatgatgttttccaggaccttgtcaaccctgctgggcaacttcttcaatctggccatctttccagttccgaaatataagaatggaattgaaggaaagacatcagcaaggtccaatcctcccccggattctaccatttttcggatcaaagacacaacaaactcatcttgctccttgtatatgccaccgaatgctacccttgaaatagaggcccatatcaatgagaaaatctactggtgagattgataggcgaacccccacattcccgaatgg

SEQ ID NO: 263329 - DNA, 443 bp, Glycine max
  unsure (1)..(443): unsure at all n locations
gacctatgatactcagcttagactttgaagaagcctggaactaattgttaatatgttgctagtgatcacactatcttgcgtgatagaacacactatcccaccaagaagagtttattagagctatcatcacaagatgctctgttggcacaaaataagttgttgtctaagcaactcgagactttaatagaaacattgagtaagctgccaactcaattacatgttacttagcctttaccttcttctgttttgcaggttgcaggttgtaggttgcacactttgtggtagagctcatgaatcaggctgttgtattcccactgaagaatcaacacatgaagttaattatatggggaacctgtggcgtccctaaataatgtctggtttaatagtaataatttaaataacagaaaccatggaaaattttntttcttttctttttctctctc

SEQ ID NO: 263330 - DNA, 443 bp, Glycine max
ctaagctgtcatgaattctaattgcggccaagaatgccatggtttcgtttatatatactatacacacacacacacacgcatatatatatatatatatatatatatatatcattcgatcttaattaattattacccgtgggaagattaatgacataaaaataagaagtgtcatgatcatgtattcatgtggtacaagtttcgatggaataaaactacatggagcaaatgggtacttgctggatcagttcctaaaggacaaagtgaaccacgaagatgatgagtacggaggtactatataaaatctttggcggttcccactgcaagtggtgaaggcagtctctgatgagatcggagctgacaacgttgggattacgctctccccttttgctgattgcgtaggaaaccacacccacaacgatgatcctcaagcattggcgattcac

SEQ ID NO: 263331 - DNA, 438 bp, Glycine max
  unsure (1)..(438): unsure at all n locations
ctaagctntaagcttatttaacgtattttttatataaagaggagattatattttgtcttttactgacttctgcctcccagcgagaaaagaatcacgataatccttctttatgtacaggtcataagtcacctatttgggcctacatatgatgtctgcgattgagtgtattttccctctaacagctggctaattagtgtagttcatgcgtaaatggagcatctctaaatagttatttctacgccaatgattctgggttattcggactaggatgagactatcttggaatggacatgatccaataaattgacaggctgtgacaaaattgtgtcagacagtgatctatatatacctatttacatggagaaattattggactaggataccccaagactggagtaccctcaagtgattcattacatttcatctttctcttatcac

SEQ ID NO: 263332 - DNA, 357 bp, Glycine max
ccgcggcagcaaccccacaccggaaccactttgctacagcacgcccacaggcaggcccgccccaaagcgggacagcaccacggaaaacaccaccccaacccgacgaccaccaccggacaagcaccaagagcaccaaccaaaaagccgcggggggcagacaactcaaagcaccagcgaggccccacagcaactagacccagcacccaaaacactcacaaaacaaccagccagcggaaggccaacgccccagaacgaagggcggaacacgcccaacaaaaccgaaaaacacaggaagcacaccgcaagaaacgccaaacagccccaccccagccaaaacacaaaacccgcaccaacccc

SEQ ID NO: 263333 - DNA, 445 bp, Glycine max
  unsure (1)..(445): unsure at all n locations
aagtcaccgcagctgcagcttaaattcaagatcgaacctttatttctcagagtgctgcttntaaaatgtgtatgtgtaaatcctataacaatattcattctcttcaaaacaaaccaagatatcagagaatacatggataatcctaacccaattcaaatggtgcaacaaatattactccacttttctcattattccctccatattgcgcaaacatattggtgaaacaaacctgaataaaaaagacattaaatattctaaaaatgaccacaataagaccaaagaaaaaatacttaaggactaaacactacaatttcaacttagggattaaaatcaaaaaatgaaattttataggagctaaaatttaaaggtaaaaattctataagaaaattctataaggactataatgacataaaaacattgtgtcatatgatatcacatgaaaatg

SEQ ID NO: 263334 - DNA, 427 bp, Glycine max
tgtgagtgtgtccggtgcctcaccaacttaatataggttcttcttcaatcaatcctgggggggtgtttgatgataataaaaacaagttaactacatatttgtcttgttgtataacatgaatatacaaaaaatgtgttaaccaacttacatatgtcaattgagttcgggtgtcaacccacgatcttgactttctcgttaggcaagaacttggcggggtcaacattacaccaaagttcccaagcctaagaaatcaaaacacatctataaatgtgaatgttctgactataagagttattgtgtcacgcatcacaattcttatggctgtattttgcaaactcaatatgaagagctcccatgtgttacttgttgctcgccatttacctcccacagcataacagtgcacaaacataatctagaatggtaacct

SEQ ID NO: 263335 - DNA, 317 bp, Glycine max
cctgcagctgcaacttaagttccaccttttttggtttttttaccccccaaccgccccaacaggggtgagagagacatacacagatacagacagagattgttgctccgactcacatctcatttaagtcttctcgaaaactattcttccatcgggcgcgaaaattatgacgcacatttgctcacaaaaaccgaaatgttcttgtctttttgaacacctccctccttctgcctatacactccaacaaacattcggcgcaactgattaatgaaaataaggtaagatgatgctatcgtctaaaaagaaatctttttaatccg

SEQ ID NO: 263336 - DNA, 363 bp, Glycine max
ccacacattccgcgctaagcccaattctcctcgggttacaataccgctaagccacacatcacgtgctaagcccaatttctccgcggggtagaattgggctaacccaaacattcgcgctaagccctatggctagaagcatgcttagcaagctcggagcgctaaacgagccgatccacaatcctcaaggcgctccacgcgacacgctagcgattacatctttccttccctctgatgaatagcccatccttgagcccttcggccatccgatctcacaaacactcggctcgggaccttgcgattggagctcccacataggtagcgactccagggccctatgctctctggactaccctccatcatccc

SEQ ID NO: 263337 - DNA, 433 bp, Glycine max
  unsure (1)..(433): unsure at all n locations
aagctatgtcngcaattcaagatagggagaacgtagcattttngttgttgttcacttgngcccnnncgagcgaggtcgcatcctacaaaatcaaaattccacaacccagtcataattaaggaggcacctttaggacaccataagccaacattggttgtgccctctagatacttaattatttcttttaacggctatcacgtgagatcccttacgataagtctaataccttgctcacaagcnaacactaagcataatgtctggcctactatgtcgttaactaaagaagtctaccaatcatacctctatatcctgactcataaacagatctacctctgtcatctgagttatgataagcggaaattgccattagagtagaggctttttcgcacttttcatgctgaatattttaattaacaatgcacaatattcggtc

SEQ ID NO: 263338 - DNA, 395 bp, Glycine max
tgttgcttgctcgtgccgcctggttcggcccttcgaggtattttttattcttctggggcgcggaaatcccaaacacgtaagctttttgccttctcgtcgtcgcctagttggttttagaagcaagaggtttatcctatttgggtgtcaaaggtggtgggtgaaaaacgtggtcgtcgcctgaagcatgttgtcatcagtgttgttcctatggaaaggagttcctcgtcgtacacctcggagccccgaagtcacgtgatgtgtttgtgtaacctagagacttcactggtgacatcatggactgaggataatctaaggtgacgtttttatggtcgtggtctatacaacgtaatgagtaatgtacgtcgcgggttatgctatagtttatttgttgacta

SEQ ID NO: 263339 - DNA, 377 bp, Glycine max
tcttacaaacattgtctgagcattaacaatatattagccttctcttctcttccaaacactctagcgaaaccttttaagggcatgtctgggtgtaagtttctctagaagcacttctatgaaaacaaaattataagaaaaaaatacaatgaacttcctcataagctaaaattacttctccattagctaatttgtaaaactcttcccatataacttctctaaaagaaagatgaggggacatctataaattaggtaatggggagcttatttcatcttatagacaaacttattccacttttctctccttatcttcgtctactataaaagccctctacagaaactttacctaacacacccttatcatttgtaccaacctaccc

SEQ ID NO: 263340 - DNA, 410 bp, Glycine max
  unsure (1)..(410): unsure at all n locations
tgtgcacaccatatttactgcacttacatcttctttatctttctattcgaccganaagatagggtatactactcttataatgtactgcccaactaaaaaaataatataatagaaaatagtgcttaagccattcgagtcaaggcattttgaatctcatcattagtatcatacatctatatgtgtcacagagaaggagaaacatgcctggttatgcctaacacaacaaaacattataacaaaacactgtttctacacccaaccaaggtaaaaaagttttcatatttcatgaaatatcatggctttctatggcggaacaatgatattaattcggtgagtaagtctcgagactgcttaatcggatgctttcctgaattcgaaaatattactcgaaatacacaaatggtctcatg

SEQ ID NO: 263341 - DNA, 288 bp, Glycine max
gaggagggggcgatccctcaccatatctccttcgacttacaccgcatatgcatggtggaaaaacaccatcaaaggcaccccatgtgaagctcaacagatcctagccctccatagacagccccaccaagcacagcctccattaagcggtatcaaagcacaagagcatcaagtaggtgcttcataaaccaccattaaatcttcgctataccctctcttccatcgtggagacctcaattctccccatcgatctccccacatgtcttgcgacaaatgattctaacatgatac

SEQ ID NO: 263342 - DNA, 251 bp, Glycine max
gggaccaccacaggaaaccccggggaaccaacctctaccacaaagaccccaaaagccaggcgaagccaaaaaaaacccgaagctctcaaaaaccacagaacggcacacccccgttggaaatcaactcggcacaaaactaaaagttctaacaaccgacaaaggcccggagtctgtttcacagcaccccaacgagttttgcacgaaaataggcatcaaaaggcacaaaacagcccctcacactccacaacaga

SEQ ID NO: 263343 - DNA, 434 bp, Glycine max
aactcaagcttcatctgctagagctatcaatggaagggtggtgtgaactttattcttatctgtccacaaaaaagagagctaaactttcaattggagaacatgaaactgatccaaatcttataaacattgaactcgagggaacttttgaacacattaaggaagcaagtaacatggtaaaagatctactattgactgtgtcaatgtctgccccaccaaaatataccccacgtgtacctggtgcccttgccccttgccccttggaagcaacttcaagaccaagctgtgtgagaattttgcaaaaggatcttgcacctctggagaaagatgttactttgcacatagagctgctgaattgcgcaagtcggcaattaaagtgatagacaagtagcggggttgactattattaatttttctcaagtcaatgacttaattga

SEQ ID NO: 263344 - DNA, 178 bp, Glycine max
cgtatggacccgtctacgcacattaatgagttttggctgactgaaccttgttcccttatcggatgacctgaagcggtgctcttgatgacctggatgcgggcacctaccgaacttgacagctcatcttcttttggattcttcctcacgcttagccactgaaggttgcgcttaccgaatt

SEQ ID NO: 263345 - DNA, 393 bp, Glycine max
  unsure (1)..(393): unsure at all n locations
atactcaagcttatgaaggtgagaccatgactagcttgaganaaagagtatacttttttgagtgatgcatgtcggttcggaagaaagaagtgttaacaatttgatttgataaatatgaggacaatgtcgcttttgtgggtgttggcaatttacactgtgaatgaagaaattttataaagggtgatggtgatgtgtttctcttgattttgtgaggcacggattattgaaattggatgggtctagacacgggaaaggtaattactggaataataaggcctccacaattattttatgatggtgtaaagacaataagtgaataaatgttggctaatggatgtggaatattgggattcggcatgagaaatcgtggcacttactactataagacttgta

SEQ ID NO: 263346 - DNA, 387 bp, Glycine max
ttcttaccagtggcagaggcattcttgaattgcttagtttctgagctacctttcaaattcctagggataccaatcggatctaatccaacgttagtcaggacgtacgaatcaatggtggctcaattttataagcgacttgcgggatggaaaggcaaaaacctgtcaataggagtgagattggtccttatcaactcagttttaagcagcctccggttgtactacttttccttttataaagcaccaaagaaagttgttacagaattggtgaagatacaacgtcgcttgctttggcaaggctagaccgaggcacagaagatcagttggaccaaaagtcatgggaacatatttgttggattgggggtgaaagaattaacaagttttaacatc

SEQ ID NO: 263347 - DNA, 424 bp, Glycine max
cagcttgttaatggccggatttttcttttataattccaagggccatttggccctattatagagtctatacaccattactttaatcaccaaattatgctgctaagaagaaaaaaatccccctccactgctgaaatttgggatttatgaagtatctgtctgtattcgcgcctaacaggtaccggtggagttgacacttgacagcatcagaatctggcactttctttgtctatcatccatcaattatgctgcacgtagtattggttgttaaatgaggcacagtcttcgttttttttaattgatgagtgatatatttcacattttcactctcaccggcgcatatatgtaatatgggcatcctatcattggttttttcacatcctcacattgtttttattggagacaattctgttcaatctgacctgat

SEQ ID NO: 263348 - DNA, 448 bp, Glycine max
  unsure (1)..(448): unsure at all n locations
ccatagaaactcaagcttaggaaattcatggaagcctcctatcagcacctccaagtgtactacagaaaanaataaccgaacaacacggcgatcagtaactttattatcaaataatacaagagaaaatgcttcaccaaatattcagcaatgagaacaaggagcatctgactgagcatgtgatctgaagaaaaaagctgtcaaagagactgaaaacactaatgtttagacagcctaaaataccccgatgtgttcacatttagaaggataattttgtagtcttttgttagttatatctaggactcaataagttttgacctaggagcattaacatatatgttgaaacctaagtttgttaaaaaataggtttaggctatataccgtaaaggaaataggacttcgattacctttagttgcattcaactctgattcgccacttttgtacgcacca

SEQ ID NO: 263349 - DNA, 412 bp, Glycine max
  unsure (1)..(412): unsure at all n locations
tcccacccaatccgggcatagnctgtcagatatattctgcgacgtacctaaacaggcgagctctcggcagtccatcaataaaagaacacagaccacgaagcaatgaagcttgtgtggcggctggccacctatgaatcttgagtggtatctggaaattggctctggtaatcgattaccaaaggtgtgtaatcgattacagggcttaaaaatggacacaggaagttaaaatggcctctggtaatcgactaccaacggtgtgtaatcgattatagggcttacaaatggagacaagatgttaagatgacctctggtaatcgattaccaatggtgagtaatcgattacacaaagtaacaaggcactggtaatcgattaccagttgggtgtaatcgattacacagggagatgagacac

SEQ ID NO: 263350 - DNA, 431 bp, Glycine max
gctgttagtccatttaggcatttcgagaaatttgtctatattcttgttctatgggcaaccctgtctctagaacatttccattggatttaatgatgaaatttgtgcattttcaggtgaaaaagaggacaagttttgaattgcaaaaagtagcagtggagctaagctcagcaattatgctaagcgcatattcaccgctaagcgcagcttcagcgcgcttatcgcacaggagaatctggtagaccatcagcatcaaagccgcacgctaagcatgagatcagtgtgctaatcgcagtaggtgccttcagccaggctaagcgcgagactggcactaagcccaatttcacttactcgcactaagcgtgagggtggcgctaagtgcaacgtcccgatattagagcctatttaaagcctgtcatatgcagaacttgggt

SEQ ID NO: 263351 - DNA, 369 bp, Glycine max
cacggatgcttttctttttctgccaaaccattcgctatctgtataacccattctactactcaaccagaaacaattagaattgctaattaaaaaacttttaaacagatatagtccgaatatccatccgaaagttgctgctggcatagttcgacagtgatatcaacgcgaaaagaatctatacatattcttttttgttcctaatctaatgtatgatattaataaacgccggaaaacctgcgacaattatctgatagtataatcatggcgtgggtaggggttctctgtttgccattaaaatttccgaatgtcctcgtaacagggacgaagatcagcggacgtatgatactctaatgtccgaagaagttgata

SEQ ID NO: 263352 - DNA, 279 bp, Glycine max
ggaacccacgaaatctttacaaagcctcactcaaggacctcggtggaaactgatgacaggatgacatgacagcttttccttcaacagtcctggactctaggaagtatctcttaaaggattcctcaaccacttcattcctagacttacgactgctaccttaaaatgaatggagccatcttttctgctctccagacaaggaacatgacaacaagcgcaatctaacagcatcctcaagcacaccaggcagtccgacaatggtgcaaatctcaatattagcgg

SEQ ID NO: 263353 - DNA, 339 bp, Glycine max
aataactcaatgccgttatcctatggaattaaaaaaaacctaatggctgaatgtaactgagattgtgtgaaccaaaaatcacccccaacacccaacaagtcatccaccatttgcgctcccaaaaggctgatgcctaggttgccaatagggcccttattacaacttgaactaaacctaactaaagcccttttagttgattaacccaaaacatatttttggtcagccaactttacaaggattgggccattattcagacaaactaaacactctaaaatcgagacaaggaggtgtcatttaatcctcttccatttgggccatgatacaactcacaaccttgga

SEQ ID NO: 263354 - DNA, 440 bp, Glycine max
  unsure (1)..(440): unsure at all n locations
aactnaagcttcccctaccggtgataaaacattgccggacagcgcttgtataatttttgcgcaatgtccgctgaaaaacattagctggtgctgtctaactaccgatgctggctactgttttttctattccacccctgaataatacttggacgatgtccatttggaaatgttccatcggagtcatccggtcatgcttctttttaacacctccacctgtcatcttttcctggcccacgtcggctagcatttttttcgatcaatatcggcgaatcatgctttttgccaccgtgggctaacgttttcgtggctcatgaaacgagagcatgccactgtccgccgatacacaatctcgcacgaataaccctaaccgacctacattgtaattnttgtacgcaatacccaacagcaaaacttcgtctaccataaagaatattatccac

SEQ ID NO: 263355 - DNA, 421 bp, Glycine max
  unsure (1)..(421): unsure at all n locations
tgaatcttccttggtcgggtacatgagcatatgcaatgctcccaaatactctcaaatgatcaactcttggcttcactccactccatgcttcttgtggtgtttgatctttgacattctttgttggggagcgattggacaaataaacggcacatgcaacagcttcggcccaaaattcctttggcatatttttagccttcaacatacatctagtcatattaataatagttgtattttttctctctgctaccccattttgttgtggagatctangaaccgttagaaggcgacaaatcccatgtttttcacaaaattcattanattcttttgatgtgaattcgccacctctatccgatcttagaactntgattacataaccactccccttttccacaaaagcttagaggcatcactttcaccatct

SEQ ID NO: 263356 - DNA, 341 bp, Glycine max
ccattgtgcaagcaatcaatggggctcatcacaccaaacgattatgatgagggatggctccaattctcacaaagggaaacttatcactctccaaactatcacgacacgtaaaggaaaaacaaggatatcaagccacaaaacgtcaagagacttttatgttcaaaacaatcacccattacttgaacatatcctataactcaaagaccaacatgcaaatttaacacaacaaaactaacaaaattaacctagaacccaccaaaactaaaaaaattaaactaatctaccacaactaacaaaaccggcaccaaagaacaccactcccccatacttacacaacacat

SEQ ID NO: 263357 - DNA, 390 bp, Glycine max
  unsure (1)..(390): unsure at all n locations
aacttataaagctcccctaataatccttcactattgtgtgatttgatatcagatgttgaagctgctatttcgattacaagtgagtgtgagttttggtgcttatatagattaaaaagtgaggcttcggggggaaaattggatgctatattggatttgttaataggtggtttgaactgtgtggatagcagaggttttcattttcacaacccgtatcttaattgccacatagatatgtcttctttgtctttattgtttttcaaattttgcatgtagggtttaaggaggttgaggttagtttntactaattatgaaagatatgaaatggtttttagtcaactctgaacatgtcgaagaactgaagttgttcctgaattttgaatcctttacatg

SEQ ID NO: 263358 - DNA, 421 bp, Glycine max
  unsure (1)..(421): unsure at all n locations
ntataagcgcgggtctgggagacaaaggtcaagtggtctttatatgcgaagatgatgttccgagtacattggatttggtacgaccatgccttcctgatttccagctgggaaattggcgagtggaggaacgccccggcatttacgcaacaagcataatgtaaacctttacagtttttaaaagctctatagttgggcccaggctttagagtttttccttttgttaaggctttgtgtcttttgtttttgaatttataatacaaggatctttcttcatctgttcctacgtctctacccattctcattcatttgcatgtttacttctttttttgaaacggcagatccgatgacgagtcccccgaaggtactaatacctgtgacccgcctatcgacttctagcaagaaatgaggtcaaccgaagatg

SEQ ID NO: 263359 - DNA, 245 bp, Glycine max
caaaatgtccaaaatcaaggctaaaagaagaaatccttttctatttttacaaagaaaagggccccacctttgcccatggcctaaaatctacctgaggttcatgaaaccttgggcctttttacagcttaaccatcctttggagttctatccataccttgggggtagattgattttagaggtggccatttgttcttctttgtgagatccttaatgcttaatggaaagtccttacttgcatttttggt

SEQ ID NO: 263360 - DNA, 479 bp, Glycine max
  unsure (1)..(479): unsure at all n locations
gagctacatcatgtggtatcagaactcaccattaatactaggggtgttacaatcaccaacaccaccaccatcaatgtctctgccaccatcattgtccctgccaccaccatcattattaacaataccacctctggtattgccaccacaaccactaccaaagtcattgctaccaccaccacaccgccataaccaatatcgctaccttcaccaccccaccatcgacattgctaccacccccactatcgctgccaccacctaaagtgacaaattaccaagaagaggagtcgaattgcggttttgaaaactttttgttcctttcgaataaaatggttatgatgatattttacaattaaaaactattttgaactcagaataaaaattcaagttggtcacaatgcacaaatatttgcatactggtncaccttaaccttgggctatgtccaatcctcatccttcaagaagagactttatctaacaca

SEQ ID NO: 263361 - DNA, 469 bp, Glycine max
  unsure (1)..(469): unsure at all n locations
gcttctatggaatattgaaaacagaaatgctgtttggttctgggttgctgctcttttcaaagccgctgcacctgccaagccttgtccttctcggcagtatgcacagagaaaattacatgaggacaacaaaaaggatgatgcagccgaaactaatcaagatgatgatgcatgtcaaacccatcaagatgatggagccaaaatccagcaagatgatgaagctgaatcccatcgagatgatggagctgaaacctgtcaagatgaaggagctgagacacataaagatgaagtttcaacatcccttaacactaacagcatctcggattctccctcttctcaggctgccaagaattctgaattaccttcatccccaccacatttggataatgcggacaacttgccatctagtatgtgccataagcttcaagaaatttacatgcaagtngtcaaatagaacacacaaacacacaca

SEQ ID NO: 263362 - DNA, 352 bp, Glycine max
  unsure (1)..(352): unsure at all n locations
ctcatatatgcattaacttgggatgactaaaccaaaagcttaccgcaatgcactttatcatggtgttcaaacactggtcctttgaagtcactacatgaagaattgtaagtatcactggttagaaaatttacagcaaagtaaaacagccttaaagtaaccttttttcctcatatttccaatgtcacatgctaccttgtagatcattnatccatttcaattgtttaaagcttcaaaaggagagagagaagttgccaaattatataaaactaaagcaagcaacgatcacaaaacaaatactacattaagatcaaattgatctttttctcgtacgagaggggcaagggggtcataa

SEQ ID NO: 263363 - DNA, 464 bp, Glycine max
  unsure (1)..(464): unsure at all n locations
actcagctttactatttatattnttagctcgatatatttcatttctaaacctgaaacttccatgcatacttcatgcttctaccatctgtacttttttgagtgtttcctttgtattgatgttttttcatacgttgacaatatatttgtatcggtattggatgtgcatggttgggttttagttcaattaatgacacaccttcttttgactggtggagttttttttttttctcccggtgttcctaatgttcatcttttcatgttttcgacagggatacagctggccaggaaagatttagaagtcttattccaagctacattagggactcatctgtagctgttattgtatatgatgttgcaagtacgtcatttgggattcgctttcttttaccttttactattgcccactattngatgctatcttacatggntttgtctttaattaaagttaatctgatcgaagttgc

SEQ ID NO: 263364 - DNA, 157 bp, Glycine max
cgcccaggttgggtggcttttgtgaccatcaacttgccttctcagacctgacatgacacctgagctttgctgcatattacaaaactctaactagagcaatcacactctacaatttactttcacacaatcacctgaggagataccctactaatggcac

SEQ ID NO: 263365 - DNA, 356 bp, Glycine max
  unsure (1)..(356): unsure at all n locations
cggtcttaacattncctccggatcttcaaaaaacgaaagaaacctatcgcgaacgcttacnatttaacatggaaaactcgggggaattccgacgggctaaagttatgactcggatggccaattgaggcccataatatatcatcgcccttgaagtattaatggactgacaacgcatattcggacagccataacgtttgactcggatttccgattgaagctcataatatatcgagaagctcttatgataaaatagaagcccattggaaattcatcggccatacttttcctttggaatcctaataaggaaagtaacctatcgtgacgctcaatattaacatggaaaactcgggtaattc

SEQ ID NO: 263366 - DNA, 390 bp, Glycine max
ttttcttatgagtcgcctgatatagatgggcctcaatcggacatgccagtcataactttagcctgtcggaatttacccgagttcttcatgttaaattttgagcgtcgcgatacgttgcttgccttattaggagatccgctggaaaacatatgggcgttcgtatctgccaagggcttcatttttatccaaagtgcgtctcagcagattatgagcttagatcatgcattcgagtataacgttccgcccgccgaatatgcggggcatcccatttcaactgttaatcgccatgattattacgggcctaatctgacatcccagtcaaaactatagcctgatgaattcacccggtcttcctgtttactttgacgtcgctatggttacttccttatc

SEQ ID NO: 263367 - DNA, 178 bp, Glycine max
catccactctggaataatccacggaagaatgagcttcacccccaaaattgccttggataaaaaacttgaagaggatgcttttatggaggaaaagaaatagagaaggggggagcaccaaattgaaggaatactagagggagagaaatggaactttgaagcgcgtctcataagactctca

SEQ ID NO: 263368 - DNA, 392 bp, Glycine max
agccactactgactcctaaccgattacataagattctttggataagattgcagtgaaatcacatacctattttttgtcaagaacaaaaacgtatctggaaagagagaaacccagtggagtagatagtctagtacaggctacgttggaagtccaatgggaaactgacaaggttgtgaaatccaatgattgctagtctagttgtgaactaattgtgttagtgaaaatctcatcttaaaaggggaggactcgacgcaaccaaaggttgaggtgaaccaatataaaaatacttgtgcacccttctttcctatttctttcattccgcgttcgcataaatctataatttggttctaatcgagaacactcaaactattattctacatcttaactaacat

SEQ ID NO: 263369 - DNA, 209 bp, Glycine max
aaaaatgtcccttaaaatatgggaaaatccaaaaagattacagatataaatcttttcttgcagggaatgaattaatacgcggcgctggttgttatcatggaactctcctttatgagtgataactgacataactatgaaatattcgatactgcccatataaagacgggagtctattcaaggtttaagtgccaacattaaagttcctgaac

SEQ ID NO: 263370 - DNA, 333 bp, Glycine max
caaacacaccacatgaatataatgatggatggctcagattctcactaaggtaaggtcatcactttctaattgagctttcaaaactatcatgacatgtagaaaaaaatttatgatttcaagtcacacaatgtcaagaacttttatttttcaaacaattacccatttcttgaacatatcctataattcaaagagaaacatgcaaaatcgtactgtgcacaatgaaattgacccacaaaattaaacttgaaattctgccaaactagcaacattaacaattaccacctctaacatattacaaaaccaccacactagcaaaaccaaaaacacttcccc

SEQ ID NO: 263371 - DNA, 354 bp, Glycine max
gctatttttttttttattccttctcctttgccaaaagaattcgcaaggactaaccgcctaaattttttttgggctctttttcccttttccaaaaaacaaggactaaccgcctgaattcttttgtgtctcccttctcccttgtcaaagaattcaaaacgacacagtttgagaattcttttgattcttccctttcccataaacaaaacatttcaatggactaattgcttgagaattcttttgtttacccattcacaaagtttcaagggactaaccgcctgcgaaacttgtcttaaccattggagggtacatcctttgggtccaagtagagggtccttctactctgattgttggact

SEQ ID NO: 263372 - DNA, 455 bp, Glycine max
  unsure (1)..(455): unsure at all n locations
gcgtccatttaaagccgagctcgatggtggtgcgagccttttatggcactccgcgggaagtgataggggaaatcgacattcccattcagataggcccccacactcgcaatgtggtgtgtcaagtaatggatataaatcctgcctatagctgcctcttgggaagaccagggattcatgccctgggagtggtcccttcaacgcttcaccacacattgaagttcgcagtgggtggacttttantgatagtgtcgggtgaagaggacatgttagtgagctgcccttcctccgcaccatacgtagaagcggcggaagaatcattggaaacggctttccaatccttcgaggtggtgagctgtgcctcggtagaaccaaatccgtcactaccttctttctcanagcggccataatggtggcgcgtgttatgctcatgaatggaatttatcccggaatgggtt

SEQ ID NO: 263373 - DNA, 225 bp, Glycine max
tcaataagggttagacttgcttacatgtatatactatgtagcttccttgagaagctcccttgtgagaacttgcatgataagctcctttgagaaaacgatcttgaactcctacaagtttgtctgtgcaagctgccaacaccaacgatttttgacggcttgtatgtccaagctgccagttgcaacgattttatttaagcttggtaatttgatcgtcttgggctttct

SEQ ID NO: 263374 - DNA, 280 bp, Glycine max
tattggggagttcacaattgtatgactgctttgtctttccaaaaatgccatagttttttgtaagagtcgggttacgactgaaacttgtggttttttacagtgttaggttgtgtcatttatatagatgaagtttaatataagtggctgcatttttatagattaaaaatatgcctgcacatgctttctgtttgtgttgtcaactacaccaatgacgtgacacgctttatcttgcatcagatctgcatgtgcagtcatgctatgcgaggtcctttcacgtgct

SEQ ID NO: 263375 - DNA, 267 bp, Glycine max
  unsure (1)..(267): unsure at all n locations
tatgtatgagatanctacgttactcatagagaattagtggaatacacagtacacaaaatagtcaactgcttaagctcctccgatttttgtttgagcaggaagtcacaatatcaagctatcttaaccctccctcattgacttgcgtatatgggttctctgtaacattttatttatgactatatcaaaggggttaccactacagaacttgcagagattatacagggcacgcttcttgcattatagattctctatttctcatcattatta

SEQ ID NO: 263376 - DNA, 348 bp, Glycine max
tctgaacacaaactaataaattacaatatgggggaatcaaatattttgagctacagagtcttttttcttttgaagttgacttaggtaatcgattacaaaactttggtaatctattaattcgataaaacttgtcgatattttaagagaagttatgttgtttgttctaacactttgtaattgattacttaaacttggtaatctattacacgatgttgaacttattgcttcttagaaacttttgagatctatccaaatatcttctcatgtttgataaccactaagcatggataaagagaactaagtctataacactcaacatgcctagtctgaaaacatccaataaaaatg

SEQ ID NO: 263377 - DNA, 455 bp, Glycine max
  unsure (1)..(455): unsure at all n locations
tcaccccacatattttttggcaagccataacttacaagtatatcattcaccatatcgagcaaggtacaattctttctttccgcaataccattagattgaggagcatacgaaggtgtcccttcatgaataatatcatgcatttcacaaaaattactcatatttaaagatgtgtattctccacctctataagaacgtagaattnttatttttctttctaattgattttatacttctgttntatatactttgaacttatcaaacaactcacttttgtgattgactaaatacacatatcaatatttggagaaatcatcaatgaaattaataaagtatctcttaccaccacgtgttaatacatcattactatcacatacaactatgaaccaattcaagtaagttagtttctatttcaatacatgtagtaaaaccctttctaggttctttgcttgataaat

SEQ ID NO: 263378 - DNA, 342 bp, Glycine max
cctcacaagacttttgtgattggtttaaaatcaatctttgtagatgacaatgcttcagaaacattaagagagctatcacatatgcctaacacaaatgttataacttggctaggatacgacataaacaagtattcatcttacacaatagcttcacatgacaaaagtacaatgcacaacaactgggtcaccctataggctgaatctcaacactatgcaagtgtgaatgacgccaatccctgtgtatcatccatcccttactttgggttcattgaagaaatttgggagcttaactatgtgacaattactgtatgtgtatttaaatgtaaatgtgttgacagcaac

SEQ ID NO: 263379 - DNA, 375 bp, Glycine max
ggtctgaaaagaggcaaatttgatcatcatgctttgataaatgccaaaaaaactggggcgaatgaaaatggtgagaatgagcgagaagcccatgctgtgactgccattcctatacagccaagtttcccaccaacccaacaatgtcattactcagccaataacaaaccttctccttacccaccgcccagttatccacaaaggtcacccctaaatcaaccacaaagtctgacgaacaccacctttagcacagaccaaaaacaccaaccaagaaatgaattttgcagcgagaaagcctgtataatccaccccaattctagtgtcctatgctgacttgctcccatatctacttgataattcaatggtagccataaccct

SEQ ID NO: 263380 - DNA, 466 bp, Glycine max
  unsure (1)..(466): unsure at all n locations
tgaagtgaggaagtgtggaaaggtgagacttcctacttgtattcattgaccacagagtggtacctggagatatgtcgcggnggtcaagagaccttggggacgacaagtggggtgctattgcccaaaaccaagcttgaccaatcccgacccaacccgggcatagtcagtcagagagaacctgtgatgtacctaaacaggcgagctcctggcagtcaaccgataaaagaacaaagaccacaaagcaaggaggtttgtgtggtggctggccagctatggatcttgagtgatatttgggatatggcctctggtaatcgattaccaagggtgggtaatcgattacaaggcttaaaagtgaagacaggaagttaagatggtctttggtaatcgattacataggatgtgtaatcgattaccaggccttanaaggggaccaggaagtcaagatggcttctggtaatcgattact

SEQ ID NO: 263381 - DNA, 374 bp, Glycine max
  unsure (1)..(374): unsure at all n locations
aatctatgaacacttcgaccacagcgcaagttccgacccgacgacggcttgtcttctaaggacgtcagacaaacagctccgccgccgtagacggcgagggtcatccgttcaggtctagggttcgctgttgctgctgagagttgaacgaatatgaaggcacaacaacagtctcagaagggaaaacactaaaatacacncgttcaagctttctggacgtcgttttgaatcttttctaaaaaaaaaaaactgctcaacccaacccgggttctcaaaaccgtacgggtcatccgattatacttgtactgatctaataagagtgtaatgaccccaccaaccgagataacagcgaaattaacctcccttatgaaaaggat

SEQ ID NO: 263382 - DNA, 345 bp, Glycine max
tatatcgagactctcgaaattgaaaacagatgctctgagcaaattcacacgataataactttttacacggatgtctgattgcgtcccataatatattgagacgctcgtacttgaaaacgaaagctcgtggcaaattcaaacgacaataacttttaacttggatgtctgattgagtcctgtaatatattgaggcgcttgtaattgaaaacggaaactcgaagcaaatgcaaatcgcaataacttttaactcggatgtccgattgtgtcaagtagtatatcgagaccctcggaattgaaaacggaacgtcgtagcaaattcaaacaacattaacatttaactcggat

SEQ ID NO: 263383 - DNA, 390 bp, Glycine max
tagcgccacgatatagtactggacacaatcggacatccgagtaaaaagggatagctttttgaatttctcagagcatcagttttcaatttcgagtgtcttcatatattacaggactcaatcagacatccgaggtaaaagttattgtcgttcgaatatgctacgaacttctgttttcaattgcgagcgtctagatatactaagggacacaatcgtccatccgaaaaaaaagtgaatgtcgtttgaatttgcacaaagcttccgatttcaatttcgagcgtctcaatatactaccggactcaatcggacatccgagttaaaagttattatggtttgaatattctacgacctactattatcaatttgaacatctcgtatattacgggactcatc

SEQ ID NO: 263384 - DNA, 383 bp, Glycine max
tcattgtgatcatttattattattgccattcctcctttttttggaacaacttgaacaggactaacccatgagctgtctgaaaatggatagataaggcccgcctttaataacttgagcacttcttttcttacttcttccttcattacaggattcaaccttcattggggttgtcgcacgggtttatattttgcttccaaattgattttgtgcatacaatatgatggactgattccttttagaatagaaatgtgccaaccaatagccgctttacgtcgttttaaaatctacaccagttgatcttcttcttctttcttcaaagagttgctaattatgtggaagcaaagcttcatgatgaatcaacaatgattcaaaggtggtttgat

SEQ ID NO: 263385 - DNA, 455 bp, Glycine max
gcaataactctcttcaaaacatgctatgtgcccgcgactggtctctttctttccttcgcaacttgagttcactattgctaccccatagagctccgcgaaatttgttccggccatactcttccttgcgagccctcttggtttcttgttcaagggctcttgcgcgaattgcattctcttcccgtaacccggcacactccttccgaacgtgtgtagcggccaacttgaacttctccttggcaagttttgcctttcctaactcgcttttgagagtttggacttcttcgtcctcttacggtgcttcaaaactctcttcgctgacgacttttaacttggcgagccaatctaaacctcgtatatgagctttcagccattcgtggtacccaccaatgatgccattacgaatacctctaagctcttgatcttttcttaacggcgtttcccatgccttatggatt

SEQ ID NO: 263386 - DNA, 254 bp, Glycine max
ccttacattctattaagtgggaagatattgtgctgctaacaatcctcttcagtaatgctctctataaactaaaataatactctctgatctggtttgcattgttcacacttcacaaacatattagaccacttaactttatactgggggatgctgttacctatataactttagctcaacagcactattctgtttaaacattgttatcagcattttttagacccattaatttgtccctctttgagtattaacaaatg

SEQ ID NO: 263387 - DNA, 273 bp, Glycine max
ggtggaattttaagggactacacgagttcttaatctttgcttgtgcatgtaaattgtgaatatgtttcaccattcaagtgaactatgaaccattcttcatggcctacaaatctcttggagagaggatttcacaaaggaattgcgtatgtgtttgtgagagctttttcatgtgtccataagatattttgagcttgtttcaataagttcttcaagatagtttataattaaaaaccacttatagcttatttataaatagtcccaccccgcttttac

SEQ ID NO: 263388 - DNA, 419 bp, Glycine max
  unsure (1)..(419): unsure at all n locations
aaattataatctcgttttcttttattgtgacaggatgtcttcttgaattgcatattcagatccatgtaatctcgagcttatattttaaactaattattcactacttataaatgatgctcaacacagtctatcacacattattacaaatataggtgctataatccacaactagttagtctcttagaattatcgcatgatttgtttcttggccataacaagcatctttgacccccgacaatggctttatttcacctacgatacttcatcttttgctattgcctccattcttttaactctcttgaagatctatgctacaaaccaaaaattcccttcacattaagactatagaagtcttctttgattgagaacccacatccatatgggccctcatngcctttcatgtctcctttgcttacatg

SEQ ID NO: 263389 - DNA, 335 bp, Glycine max
gtgaaattacattaaatcatatggaaagcttctattgagcaaatataaaaacttagcaagaaatatttacaattcttccaaaacgaaccatatatggggagaaatatatacctttttgaaaacttttctattcaaaagttagtcgtcaaagacgactaacaataacgacaatgcttatgtaaaaaaccaataccccttaaggagtaaaaaatatattaatgtcaattcacaatcattcgaagcaagtgaacaaaatttaacaaactattataaacaacaagaagatgtgccctaagaacataccaaaaccaccccaaaatggagcataaaatccc

SEQ ID NO: 263390 - DNA, 333 bp, Glycine max
tctatcacccgcccgaaacattatatatgcctatgagaactgtatacgagtactagtcctaacaccctaaaaggaatactattttcaacaaatgtttgcattcaaacaacatcttcccagttcaaccaacatctatatcttccgcggataatcttctacctgcacactataaaaacaatattactcaaatgtgatcctaaacgaatacataagatttgacactgtttgttcccctttatctttgctatgttaatatcagcttctttgtgccacaaatactgccttttccttctcaattaacgacattactcagggtgaaatgccctcagtcac

SEQ ID NO: 263391 - DNA, 346 bp, Glycine max
cttgtccaagatcacaaatcatatcgtccaaacgatctcccatttttacatcaaatggttcagattgggactcactctacatgtctatcaattcaccatgccatatccacgttgtataattcttcttaatcccatcacacaataaatgctcccctatgtcgtccagtgttttcgtctcccgttcaaacaatttatgcacgaacaaaagaatttcccattttcatccggtcgacttctttccgaagcaaatagcatgaattgttccacgccttccttatacacatggctcatgcgacttttattcattcaacttccatccatctagataataactccgtgatactcc

SEQ ID NO: 263392 - DNA, 415 bp, Glycine max
ttgcgattggcttcgcaggaaagatcatgtgtgttcaaagagcatattttatcatcctactacgacgactgagagaactggggcaaataaagagggtgaggatgagggagaaacccatgctgtgactgccattcctgtacggccaagtttcccaccaacccaacaatatctttactcagccaataacaaactttctccttacccaccacccagttatccacaaaggccatccctaaatctaccacaaagtctgtctaccgcacttccaatgacgaacaccacctttagcacaaaccaaaaacaccaaccaagaagtgaattttgcagcgagaaagcctgtagaattcaccccaattccagtgtcctatgcctgacttgctccatatctacttgataattcaatggtagccataac

SEQ ID NO: 263393 - DNA, 312 bp, Glycine max
aactgacacggttgccagggccaggatgctggaatcctgaaaccactcatgatggaacctcaggtaaagatgtccaaactgcactattggctaaaaattcaaattctaagatgaagaggagaaggattctgacttcacatgacattctgaaattgcaatgcttgactgccttggggagagatgaccatgaaagcggtgagaagatcctcagatcttgcctagagattgactgaaagcctgaatagagaggccaagaatttgcacatgaagtggtgactcattggttttcaaccttagctagacctcaatggg

SEQ ID NO: 263394 - DNA, 430 bp, Glycine max
ctttattctcagtagactaatatgaatctgtggccaccttatctactcctctaaggacaataacatcatttcttgcactgaattgttgggagttggaagccttcttcttaatccaattcctagcctcagcaggggtcatatcacgaagagctccaccactggcagcatcaatcatactcctctgcatgttgctaagttcctcatagaaatattgaagaaggagttgctcagaaatctggtggtgaggacagcttgcacacaatttcttgaatctttctcagtactcatacaagctctctccactaagttgcctgatgcctgaaattgtgttagtccagtcttgagaacatatggaacaccctcatcaggatattgaatgcacaagtcttcataagtgaaatcaagtgcagccatctccctaagagtcctc

SEQ ID NO: 263395 - DNA, 298 bp, Glycine max
acctcctacctttttgcggactttgacactcgaccctagacctatctgggtgtagtaaaaaaattcagcctaagcaagaagaccaatgggtccagcttcttccccaaaaggaaattccttctttggaacagggcgttctgacctttttttattccaatcctagcaaaatataatttttccatacaaaatcactccccaaagccatattttttaataacattcataagacacctaatatttttgccaaacaacatgcttttgtatccccaatctttatgcgctgccccttttaggccca

SEQ ID NO: 263396 - DNA, 197 bp, Glycine max
cttcttaacccgttagaatcctttgaatttataaaccactgcgcattggagatgggaaacttcttaagtcttaatctactattctatgactacgattttgatgttaaaggcatattaagcattggaagataggtgaatcacgaggctcgtacttatcacaaaaaaaatataagtgtttatacttactttctaactgc

SEQ ID NO: 263397 - DNA, 210 bp, Glycine max
ttttcaccaaaggcaccctgtggtggtcgttgctctccttaacgagcagacttcccattgtaccaagccaagcgaggcaacacctctccgccccgaaaattatgggctttggtattgcagcatatgataactaatggcccatattaaaatcgtagaactgatggtttcaacctgctaatacattcttttgaataaatgatggccatgttc

SEQ ID NO: 263398 - DNA, 420 bp, Glycine max
  unsure (1)..(420): unsure at all n locations
tccacactaccgcggctccggccaagctatcttgaaagaagtatattaatagcttctcatccttagagtgtgcgcccatcttgcggcagtacatcttgagatggattttgggacaggtcgtccctttatacttgtcgaagtccggcactttgaacttcggggggataacaacgtcgggcactaagcaaagatctgtcatgtctgcgaacggatagtccccaaatccttccacggctctcaatctttcctcgaggagatccagcttccttttttcttcggttgctggaggcgggccttccgtggacaaaactattggtggtgccgcgatgttgggttgaggcaacctgctgggtgctggccctctcgggatcggnggataaaactcgacatcccttcgagcataatcttgagggtctttgt

SEQ ID NO: 263399 - DNA, 351 bp, Glycine max
ggaatcttctgccaagggcgtctggttgctatttccacccctcttctatattatagcgattctttttccgtaaccgtacgaaactttacaaattttcgaacgatccttaatttcctttcccaaggttacgaatccttatggattagggatttactctcttttttagctttcaaagaagttacggaaactcacatattgcgcaaaaacactttttttcgatttccgccacattacggaaattcacggatcgcgcaagcctgctttcttttgatttctgagacagttcggactttctttattgggtgctatcaacaataatccccggaaaaattaaggttgacagttgcccct

SEQ ID NO: 263400 - DNA, 368 bp, Glycine max
  unsure (1)..(368): unsure at all n locations
atctatataatagaagataagattagatctagatgaaataatatctagatgagatcaaatctaaataatatctagataagataaagtctagataagataaaatcttgtagaataaaatagtctgccctcttcaagtccaagcccaattcacaaatttgattaagcctcacaagatatacactctatctctcaagtgtctaggctaatgtttactcttgaagcacctatgaaaacaaacaccacatagacttggcaaaattctaaaattgacaaacaacttgacaaacacatgcacatgaggatcanaaggtctntataggttgtaatggggccaacgacaatgtaggggaaaaaaatatggaataagt

SEQ ID NO: 263401 - DNA, 384 bp, Glycine max
taactagccgcgagtcaaaaagctgcactctgtcccagactctgtggtttatgctcctctgccgaccaacgcacaaaccttttgccttttgtgcaacaatctgaagcaattgaacagcctgaagcttatgctgcaaacatctacaatagacctcctcaaccttaacagcaaaattagccacaacagaacagttttgacctctccaacatcaggaacagtcccgggtggaggaatcatcccaaccttagatgggcggatccttcacaatagcagaaacaacaacaacaaccttattttcagaacgctgctgatccaagcaaaccatacgttcctccactaatccaacagtaataataacaacagccccagagcaacaaatagttg

SEQ ID NO: 263402 - DNA, 433 bp, Glycine max
  unsure (1)..(433): unsure at all n locations
ctcaagcttattacgcgtcgatgattataacacacacacacacacatatatgtatatgtattgttaanataaattaggaattaataggtcaaataataaaattaaattgaaggccattaatatattaagattcaacgataaatacttttaatgcatatttagtttgattatttatttgttaaacaagtgacctcagtatcttaagaaggggggttgaattaagatacaaaacttccctcaattaaaatattaactctcttttggattaacaatgcacccttaatatgaattactcaaagaacaattgaaaataaacttcttttaagaaaaagattaactacaataaataaaagaagtntaagggaagagagaatgcgaactcacattttatactggtttggtcacgcnctatgcctacgtttagttcccaagc

SEQ ID NO: 263403 - DNA, 217 bp, Glycine max
atttttatacaatgattcacattaaacaatcttaatataatctgtaagcaattataaattaaacaatttaaaggaagagaaagtgcaaactcagatttatactggttctgccacacccttttgcctacgtttattccccacacaacccgcttgaaagttccactattttgtaaaatccctttacaaattcttaaccacaccaggacaactcttcctt

SEQ ID NO: 263404 - DNA, 434 bp, Glycine max
ctctttagtcctcaaggcttttaatgttatcagtgtggctccttaggatttaagaaatgtctggatgaatactgtattctattgtggcccaaatggagtttcgtgtctcccatattttccgagataataatgtatgcattgatcatttggctaactatggtgtagaaatgctctattatgtgggaagataaactttgaatttggatgaggtgtacaaagggagatacttggtgttgcaaggacagaaaaataaagataacatttgctatttggatggacaagccttgaagagaaaccatgataacaaagtgaagaagaaaatgaagttttcctatattgtagaaatgttgggagatactctcgttggaggaggattcgaatctaccgagaggatctgaaattgcttaagtgagtgtaatgtcagttacactcac

SEQ ID NO: 263405 - DNA, 292 bp, Glycine max
actgacaattgcctcaagtaaaactttggtgttgtgcttgatttatttaatttgagagtcgaattcttaataatagatcgttgatgaagtccatttcttcccccatagaacccccattaattaatttattggtttctactttaccaattggctcatagagtattaaaaaccttagattttatgtctgcatcacgaaatcgtaaaaatggacaaaccaatatttgaacaaagtgatattgtctttgttaattcaaatggacagtgggaaaccaaccaaactttttatgattta

SEQ ID NO: 263406 - DNA, 428 bp, Glycine max
  unsure (1)..(428): unsure at all n locations
tacggtaaaatctgggacttagccatggtagaagtctccacataggccattgcctgcctcgcccagtattatgatcagccattgaggtgcttcacctttggggacttccagctatcacctatggtagaagaatttgaagagatcctaggatgccctctagggggaaggaaaccatacctcttcacagggttctatccctcattagctagaatttccaagatagtccaaatctcggtgcaggaattagaccacaggaagcaagtcgaaaatggtgtggttggaataccgagaaaatatttggagacaaaagcaagaatcttggcaggtaaaggcgagtgggcctcgttcatagatattcttgcactggttgattttggaggagtcctttttccgaatgtnggatgggtggtggacctggcagcaatcaa

SEQ ID NO: 263407 - DNA, 362 bp, Glycine max
taccgtcgcaccaacggcgcactatgtttccgatcgccgtgttccgccgccgccggcgactgcggaggcgtatacgacttccacgggtcaaagccggcgacgtcccagctccaccggttcttttgctctgccattgttcccaaacacacttcgcttcttcttttctctccttcgcttcgaatttgagtgaagagaagaaaaaaaaaaagtgattcggaatataaataattaaatgcgaataaatactgagaggcgctttatggtttttatttttattatcatcatttctggctgctgtggctttttggtttggttttgggctgtgataatgaatggagggagaaggaggttttggttttggg

SEQ ID NO: 263408 - DNA, 420 bp, Glycine max
atgactctattatagaattgttagtagtacctatgacactaatcatcagaggaaaataatatggatggtcgaggagatgaaagagagggaagaactggtgctggtgggtctccaaaggttccatggcgatggtggccaacaatggtggtggtggaggaagatctcttttgtttctttgatgattcagccatttgaagttgtttcagctgattctaattggtggagtttgaagagaattgaaaaagatgaagattgggctctttttgaagcgatctggttcagacatgagacagatatgacgatttgaagaattggggagggtttgcgccgtcacatgaaaggggagagtgagagttctgtgaaaacgcacatatctatagatagagacgtcttgtatcgattacaaccattgaatcaata

SEQ ID NO: 263409 - DNA, 366 bp, Glycine max
cttgctcaatttgatattgtatatgcttaatatatgcatttgctattctgatcattgtgtgttgtgtgattatttcttccatgcaggtacatgattcctatttgttgtgagagtgaaatgatgggcaacagcaataagtgaggtgaggttatatttccttttttttgtctttatctttggtagattgttatatatttcttattttatatgttcgagttttaaatgtgtaaaaaatataaaggtctgttgattgcttattaaatacaaagtacgatattttggttgtagagttaaattatcccccagccacacaataaataggcttttttgctttcattttgccccccatagatagaaaatagatag

SEQ ID NO: 263410 - DNA, 450 bp, Glycine max
tgtaggattatggcgtacccatcacatgtggtactaggtggcggtcaggcgatggtgcacaacaagtgtttccacatccacaatgcgcgcataaacccaccatcccctgtagcccacctccaactgagctcacgtactcccacgtagcccatatcctcgtttctctcaacaccgggtccccatcaatcctcccaagcttccccaacatcaaattaatacaacattcaaacagcacaaactatcacagccaagaaaacagagcataggcagaaaactctgccaaaacaccaaccaaaatcacagcttttctcacttaaagaccccagtaacaattccttcgttccaattcgttaaccggtggatcgactccaaatatttactggacgtctctagtacacaagcctacattttgaccgttgcgatctactaacgaacatccagaactcaatc

SEQ ID NO: 263411 - DNA, 337 bp, Glycine max
ccacttcattaagcataaggtgtattttcttgcctaatttgttaattaatgttctggttaggaaaataaactatagaattataggagaacagaacttacataataataatactaataatgatattcataataataaaacaaagcacacaaaaagaaacttgattgctgaatgtaatccaatgtaataataacacaaatatgatacaatgattcaacaatcaattacgcgtatattaatatttaatgaattgttatatataggacacaattattatatgttaataaatggaacgaaagccatactttttgatgaatatcgcatgttcaatgattgatt

SEQ ID NO: 263412 - DNA, 369 bp, Glycine max
  unsure (1)..(369): unsure at all n locations
aatactcacgctttgattttcgttatgatcgcatgatgttatgctacttgttctttagaatancgttatgggttatgatttgcatacaatctatgccattttgtcatgtttaggatacgatttggtggtctactagaggcctattttgagggggctgaaaaagccccattatttttggaaatggcgatgaacgcactaagcgtgtcttgctacgctaagcgagtttatcactatttgatgaatatatggatttccagatgaactcgctaagctggccctgttctgctaagcgagttcaccttttatgatgaatgattgaatgtttatgatcctcctaagcgcgactgtgtgcaaagcgagttatgagtt

SEQ ID NO: 263413 - DNA, 349 bp, Glycine max
aaacttgtctttttttaccaagttggaatgcaatgattataacaagatgctagtaagtcacatcaaaatgcggcggacatggtttcttaacttgttttttttatatcaagttagattgtgtgggttaaatcgagatgccaataggtcaaaccagaatgttaagtagtacagtttccaacttgtcctttttaatcatgttggaatatgagggtcaaatcgagaggccattaggtcaaatcaaaacgtcaggtaggatggtttcttcacttgtgtttttgggtcaacactactagaaaatatcatttcttgttgtttaactactgccactgtatgcccgtataattgtggg

SEQ ID NO: 263414 - DNA, 458 bp, Glycine max
  unsure (1)..(458): unsure at all n locations
atcacttagtctatggttttntaccaaccatatattatgatcaaaatttattggaggaggtttattttaataccaacgaaggtccctatccatccagggtggagtatatagtttttctagacatatattaagttcataaacatgttttgtgatgagtgacaaggatgttgtaaagatggttctttataagctatttcttgaaaagtaattgacctaggatatagtttatcattgagtaatataacacctatgatgaatgattgctatttttgacaggggtctgtgaatatttgtagtttgcattttgcaacatatgagtatctctagtcctctcaatgaatatttatatactttatacacatggctagcatctgattttatggcccttgattctctcttatgagaataggttgtcattgccctacaattctttcatttatatttggttcttcctgtta

SEQ ID NO: 263415 - DNA, 365 bp, Glycine max
  unsure (1)..(365): unsure at all n locations
ttaagagttggggggaggggagcatttggcttaaaaattacagatagaagctcctaggggcattgggtttgctggagagaatgataatgtgaagctcactggtgaaagctcaagacatagtactcatcagctttactctcagaaaaagctgataaaagtgtcccttaaggcccttgggtctgcaacatatgctcctgcaaactctaccagatctcaacactcacatgacagatcattacctgcaactctaatcatgattcttcagaaggtaataagttcggaggtgacatttattactcagcctgtacttgtatgagtgaaataatccacaaagatccgacatgcttctcttntttgcatgaaat

SEQ ID NO: 263416 - DNA, 395 bp, Glycine max
agttctgagcgcttttattgtgatttgcctgaatcagacatccgtgtgaaaagttatgaccatttgaattctccgagagtttttgatgtttaattccgagcgtatcgatctattataagtctgaatcggacatccgtgtgaaaagttaggaccatttgaatttcacgagagcttcccttgttcaatttcgagtgttactatatgtgatgcgcctaaattgaacattcgagttaaatgttatgaccatatgtatttctcaagaccttccgctgttcaattctgagcgtctggatatgtaatatgctcgaatcggacattcgtgtgaaaagttttgaccattatgatctctcacgagcttccgtggtgtaattcagagcctctcgaaatattatgcg

SEQ ID NO: 263417 - DNA, 318 bp, Glycine max
  unsure (1)..(318): unsure at all n locations
tgctcaaaatttttcagaacaaaaaggttctatcctctcaaaaagccaaaatctttcttatcctcttaaaattccttggccaatacacttgcaattcaataaggatttatttgagtgctcaaattgttcaatctatctctttcaagagagatttcttcttctcttcactctaattctcaaaaagggattaagagaccgagggtctcttgttgtaaagaaatctgaacacaaaggaaggattgtccttgtgtggttcaaaacttgtaaagggatnttacaagatagtggaactctcaagcgggttgcttgtggactgga

SEQ ID NO: 263418 - DNA, 418 bp, Glycine max
tagaagcatgtgttacactttgtggtaactttgatgaatgaaagtcttatgagatacacttcaaagttccacttctttccctcttttattccttcaatttcgggctccacccttctctctttcttatcctccattaaagcatcctcttcaagcttcttatccaaggccaatcttggtggtgaagctccttcttccttggcttattcactagtggatggtgcctcccctctcctcttctcctttgccttccgctgcatctccatggtgaaaaatcaccattgaaggacctcattggagctcacagatccagccctcatagaagtcttacaagcaagctctcatcacctctttttctgtacatgactggtgtagacgagtctatgggatgcgtgttggggaacatgatgactctgggaaa

SEQ ID NO: 263419 - DNA, 371 bp, Glycine max
gaaccgaaggcaatgccgcactaaaaagaagaaacacacaagcaaaaccttttgaaaatggggggtagaagcttttccagaaaaaaatggcttttctaggaaaaaaggtgaaaagagcaattttggcttttaaaggtttgctgggtgcaccatcaaaaatgctgggggcacctagcaacactcattatctaaagtccaatggccattttttttggtaatggctataattatataagtggtcattgttgaatatgccacctggagttgaaatttcttttgcaaatttgttatttgttacattgataagatgtttgaaatttgcaagttgatagatgtcgttgaatgactgttcacttattagttaatactga

SEQ ID NO: 263420 - DNA, 449 bp, Glycine max
tgagtctaagatcgtcattttttgggatatatttggcggcatgcgggaatagagagagttttgggacgaacagaacgaaaaacgaaattgagaggaaaaggaggatgagaagctatcgtcagtctgaaaattgagctaaaatctctctatttatagttaggctactcacaacccattatttactctattcattcatttttgctattttatcaaaacaaactctattttattttctatcaaatgaataaataaaatatcctttttattttctctcaaaccactattttaattaataaaggtatttctccctatttatttaattataatgatctcatgattcttataaaactatttatttaccaataacaatattctttaaatttgtttacgagaaatgggatgtatatttttccttttccccagacacccaacatctatccgagaaaact

SEQ ID NO: 263421 - DNA, 328 bp, Glycine max
ggataggcagattaaatttcctatattggacttgggatctcggacactacacgaaattcactttgaaagattttccaacgcactgcattgtaccataggggcggataccatcacgagtgatcttattcgattaaaactaaacgagggaacacggaatcatacaattttgtgaccatcacgaataaatgttaaccaatcgaactctgaacctgaactaagtaaaaacctgcaatgaactactcggtacactaccaaagtaaactttgctagactaggaactttgacaccatggttgaaattcttgtctattgccgactccatgcacgat

SEQ ID NO: 263422 - DNA, 256 bp, Glycine max
ggtgctattgcccaaaaccaaagcttgaacaatcctgacccaactcaggtatagttaagcatggtgaacctgtgatgttctttacacagccagcttctggccgttaacacatgatatgaacaaacaccaccaagcatagacgcttgtgtagtggctggccaactgtgaatctgtgtgatatatgggatatgggctcctgtaattgatcaccaagggtggtaatccgatacaacgcttataaatgaacaccggagac

SEQ ID NO: 263423 - DNA, 272 bp, Glycine max
tgtaaactcatgaaaaagaacactatcattctatcacaattattgcactcaattctcaatataagcctccatctatttttcacacaaagaatacacgcgtttaactgccttgtttctaaaacacccatgtaaccggtcaatatactctagaataagccaactaactccccctaaattaaaatatctaatgtgtgtagacctcaaggaaatattgtcctaaacccccaattatctttttattcttaattataaagcctaagtatcatctggaa

SEQ ID NO: 263424 - DNA, 303 bp, Glycine max
gcccgggggggataacaagccatttttcggctgtactagctgctccagcatattggcgcctcattcttccctggaatagcggctcaataatagataatttatgtacttccctatcaaaagcaggaaaaaattaacgcccacgggggagctgtgtcattggggcatcccttgggttgcagtggagctcgcatcttaattacattattaggggtaacatgtgaccttggttctttatatttcattttctttcacccttggcacacaaattcttatagatctctagtaagtattttggaagccatg

SEQ ID NO: 263425 - DNA, 371 bp, Glycine max
ttttttttctggccccatttttttctaaggagcgaccgggttcaactcacacactcaccgcggaattcaagcaaaggacatccctcgggccttttataattccgccacttaccaggaagtacaaaaactctctgcccgccctaattcgccaaccatttggccgtagttactcccagaaagggctaccaaccgcctttccgtaagtggtatgacccttacgcaacccgtatataccacgggggtgtcccggggctctccatagaacaacgcttggccttttaatacaaggctcaacattagataaaagctgcgaggctgactttccaaaagattcacctaatgtgacactaccccgctcccaatatggaggg

SEQ ID NO: 263426 - DNA, 273 bp, Glycine max
tgctccttccttcctaaatgctgctggcccaagcagaccatacattcctgctccaatccaccacagctacaatcccagaaacaaccaacagttgaggcctcctcacaaccttccctccaaaacttgtgagcaaatgactatgcagacatgcagtcctttctgagaccacagcctcatatcgagcttaaccatccaattgacattagctcccaatgagtcacaacagtccacaatttgacagctgctttcagctgtcaaatcccaaaagtagtg

SEQ ID NO: 263427 - DNA, 296 bp, Glycine max
gacttaaccaacaactttttgtacaacatactcaaaaccaaaccttaaatccgtatatttctttgtgtaagactaagttctagctcttattcgctcaagttttatgacaacaaaccatttccaatgttaaaatcatttatctaggcacacaaatggttgatcacaccaagatcatttcaaatataagctctgaaagagtgcttgaacactaaaacctacatccaattagatatgaaaataattacataagttgtgcagtaaagatccccaccaacgggtttaccacgcccttacaa

SEQ ID NO: 263428 - DNA, 315 bp, Glycine max
cttctccgatgcttcttctcatgattccctgagtggccttatagtccaaaccatactctccacgaattccttgggtatctatctcgctagtcatgctcgccattgtcttttgcctaaatcccatcctcgggttcataactcgttccccaacataactcaggccactattaccgtcacatccgaaagacaatgttgcccaaatagggagtccccggacgaaatgctgaccacctcaaaagactggaaagcggattataacgattcttctgcggcttcaccatatcgcatggaggatgggcagcttacccacatatc

SEQ ID NO: 263429 - DNA, 360 bp, Glycine max
gtttattttgggtgaataaaacttacttatagaagcagaactttttatattgtagattgtgcggctactttaacagacaaatgtggacttttcttctctaaatgttcttcaaggctgaacaatacaaacctcttaatttaaatattttctctttctgttaccttatcatccctaatgtaggactactcgagcaatgctagctcctcaaacgtcaaatctttttcttatccattctaagtggcaaacttatccgttctaattataagtggcaaatttgaaacggaggtgaagcttttaattaatggcaattgacgcgaaaatgtaaccagctcccttctcttgataataaatattatttat

SEQ ID NO: 263430 - DNA, 454 bp, Glycine max
  unsure (1)..(454): unsure at all n locations
tgatggctagtgtacacattntctatacatataagtcgttaaagagaatgaacgtgatgctagtggaggaacacttataatttgatggttgtttaacaggcattacatttgttcctatggatgtctttacttctggactaagttatagcttggaatcataaagcttttcacccccccttccccaattcaaaatgctgtttagagtattttctagtcttgagtttaatataattatatatacttgaataccacaaacatttctagttgtccttttgtgcctgcatgaatatatatattaacagttacaaatgatgtttaacagagtcccagatggcaactctttgtcttcttggtgtggatggcatactgaccacggttcactcgcaggttgttattatatatatatatatatcatattcgtataggatatgggctgtcgcgtcatatattttca

SEQ ID NO: 263431 - DNA, 385 bp, Glycine max
tttttaccagggggacattactcttaaagcaaaaatggcatataacctcctcccataaatacaaacaccaatgtaaatttagagcaagcttatgcgcatatttccttacatacgttctcttgcacaagacatttaaccgaaaaagtgcacccatatacaatcaaggcggcttcgttacctagattatttacacgtactgccaaggtgtatttgttacttacatcacacacatctccttggctgaatttacatacatgcatactcaaagtattttggggtaccaaaaattgcacatgtgcacatcttggtatttttaatacctatacatacacaaacttcatgatgaatcttgactatctacacaataaggtgctacatttcatcc

SEQ ID NO: 263432 - DNA, 327 bp, Glycine max
actccgctctccccaatttctataaagggggagaaggaagttataaggtcagcctcttagcacttctctcttttcgaccgtcttcgacgttcttcattcgttcttcatcggtcttcagtcttcaacgggtaagtacctctaaccaaggccttcttttcattttatgaacccgtggtggtccacatttgcgttcatgtatctttattctcattttcatttacctttttatacccccttttgacgtgcttaagccatctatgtaagacattgctcgcttaacctagaaatacaataaatttccaccgaccgtctgaattgcaccatacg

SEQ ID NO: 263433 - DNA, 293 bp, Glycine max
  unsure (1)..(293): unsure at all n locations
cacaatatttccatgacacaaatgcaaaaatgatgaattggaactttatgcaaactggtcatgcttgccctatgtggacactcaagtgtcaaatttttatgggcctgtgatgctagggctcacgattcattccatctattttaatcaacccaatgtttccaaaatatgttctttaatccatttgtgcattcatccaagtccattatgggcgtccggggaaatttcacagcgttcacccttcgggtgtacacacattnttttcaaaaaccaactatgatcggtgaatttcccaa

SEQ ID NO: 263434 - DNA, 353 bp, Glycine max
aatagaactgagaggaagacattcacacatcttaaaacttgaaagaccatgccgaagtgttaatttcaaggcaaccttcaatccactccactccacaagatattggcatcattaatagacagatttgttaccatatacttttaagtgttaagaaattcataatatatgatgcccaaagatgatgatcaagacaaagaagcatcccatgaaaagcattatgaaattctaaatctggtggataaataaagccgtgtttaacaatggtagaatatcacacattcacaccattcagatagacattgaagaataatacaagaagcaagcgttagacagtcctaatgaattcgattaat

SEQ ID NO: 263435 - DNA, 264 bp, Glycine max
ggttaagatggatttaagtctagggtggaatttgatattcacataaataagtgacataaatggtgttacactttagaattcaataaccatttgaatgctatcagagagcaagagagatactttatacttatggaaccaatgatgacgaaagttgacgtgttcacctatggaccatgagccatctcgatatgagacgtgatatcacactttaactcaacacctgaggtctcacgaccatacgtgttcttctcaattatacggtgc

SEQ ID NO: 263436 - DNA, 274 bp, Glycine max
ctctattgctagattaaatctctttctcccatgaaagttgggcgcaatttattgaacgtatcaccaagaacaaggcacacctctttgcgttgaaaaaatattcttttgaaaaataatcaagtgtgctccatgtaatagggcacttccttgataaacctacagtgctatctcctgttaaacaaaccaattaaccaagtcgtctccatgtagtatggcactttcttggtaaacctaaaatgctcccttaaattaaatattagatactcttcgaata

SEQ ID NO: 263437 - DNA, 217 bp, Glycine max
ctggcaatcttaaaaaaatccttgatgaaaattcccatagaacctaacatgtccttaaaagcttctgatgcctttgacattttgcttagtggaggcaatttttcattgtctttcactttggctttgtcaacttcaatgccgcgtaaagaaaatttgtggcccaacacaatgccttcagtcaccatgaagtgacatttctcctaattgagcacaagat

SEQ ID NO: 263438 - DNA, 445 bp, Glycine max
  unsure (1)..(445): unsure at all n locations
tactcacctatcctatggcctgtctacgactttattcccgtgttattntgaaaagttaagccgagctccttcttttgatgggcaacttccaccatatgaagagtatcccgggcgagacgatggggaatgagatatctctcttgggcccctgctccaactcaaagatccgttccccgatgaactacacccaccaaacctagtccgtcataccccgggctttaccaaacgctaacagaatctattccctgtgcggaagataacggaaagattgaagagcttgaagacaggttgagagcaatcgagggccttggcaattagccattctcggatctatcggatttatgctcgtgcgcaacatcgtctatcctcccaagttacaccacccgactttgataaataccaaggacgagttgtccgaagggcctcttcgatgtttgcccaagat

SEQ ID NO: 263439 - DNA, 253 bp, Glycine max
  unsure (1)..(253): unsure at all n locations
cctattactacggttttttacacaaaaccgccctttggtctcatatgggaggctattcttaataaattatttatgcttcagtctttggtacgcgcatgcctttccatctcccttttggccttcacccttcacccttcaccttgccatgacctccatacatntcattctcgcccttcaccctgccctgaccttcacaagctcgtcgtggacatttcccaacctgtgctctgtccccgcttcggtgaagggtagg

SEQ ID NO: 263440 - DNA, 172 bp, Glycine max
atatccttaaatgccaaacatccattttggaacaccggtgaaaaatgaattttattcagtcttaaagctgaggaaaagacactttacatgattagcaaaccatgtgatagacttttactattgacctaccgagagaaggtttaaaaaaatcctattgttattctaccccccc

SEQ ID NO: 263441 - DNA, 172 bp, Glycine max
atcttaagcttgcctgacacatactaaaattcaccactaaacgaactaaggtgttaacctcaaattttggtacatgtaaaaaaaatcatgtcatctaagcagaaattgaggactgcatccattggaagcgctgagcaaaccattaatttatctttaataccacccggcataa

SEQ ID NO: 263442 - DNA, 252 bp, Glycine max
caggaaatcttagccaagtacttttgctaagactattaataacatggcttatcatttaaactcatgctcttcataaacaaattatcaaaatgatctcatgctatcgtctcccattaaaatccacactcccgggtggggtaagaacctcaaattattgcaaccctaaatttagtcatgcccaatagtctttttttatactgtactgtcaacatatacctatatgatcaccatatcatcaccttcatctcacaa

SEQ ID NO: 263443 - DNA, 317 bp, Glycine max
ctactctgaaaatgtgcgatgattcttcattgtcgatattataaaaaatatctccctttctttctctctatgtatgtaaccaaaaaatcattcaatgatttatctcccatgcgattttgcattctattctttacaaaattcattgcagagaaacatctttcaactattgcagttgtcataggcaaaatcaaagctagattcacaagcaagtataccattggatacacaatatgctttctagttatcaccaacatttgagaaagatcagtaatcccttttaactttaaaactaatcattagaccaaacatcttttatg

SEQ ID NO: 263444 - DNA, 415 bp, Glycine max
ggcattttatcacagaggagatatttacagcaatatatatctatatatatgggcacacacaataacctcaaatatcgtaaacaaactatattatttcctaacacaaatatgggctacatactctttaatacctaatgactagacagataattcaatggtcaagcaaccggaacaaaatagacacaacagatatcaactactgacctaagtttgagattcgccaccaacacaaatgtaacaagcaccacggaaattcaaattcatgcagctgctctcattcattcgtgcatgaacgatctataggagagaagcttattccactactcccacttgcgaaaccctctcataaaaggtttctaaaaggctgctaactatgctaccctgctacattcagactgcgaacatgtatgcatgc

SEQ ID NO: 263445 - DNA, 394 bp, Glycine max
attctggatgggattaccatattgcgatggctattttatagcactcaccaatgtttgcatgcttaacacttatcagcatcttcaactgcaactgtcaaattacaattttctttaaataaatgtgcacatgtcataatatgatttcttggctcgtaattggcgtgacatataatccttggttagtaatttttctgttgaattcaagactacacgacatcaggttctaagtacttggattgatcttcaatcatgtttctagagaaaaaatgtcacatctttattgcctaggctggctctgcctccgaggaggattcgaccttttttatccattaagaacctgatacaaatcactacaactttgtgactaataaaaaatagcgattcttgaagattt

SEQ ID NO: 263446 - DNA, 262 bp, Glycine max
  unsure (1)..(262): unsure at all n locations
cccccatacagagtgacaagaccccaaaccagagggaagcgaaacacaccccttataagcaaaacgggagaagctccacaaagcagaagcaagcctcacaagatgggtgacaagacctttaaccaggctgaactcaaacccgagaggaanacgtgccagccacctattacaacaccaccacagagcttccccaacaacgacaagggcaggcgccccgtgccatcaaagaaaccacactcacaacggcccattcacattacca

SEQ ID NO: 263447 - DNA, 277 bp, Glycine max
ctaagagcaaacagtatcattctcccaaatggcttaatgcacctatctattgcacacaaatggatgatcaaaccaaaagcatactaacattaagcattggaggaagcctctgacacagaaaacataatccattaaatattaggtatttacattacttgttcattacaaatccctaactagggtgcttaggcagccatttcagaaaaacccacataataataatgttacagaacctagtgttcaatgcaccaactgctctcttgatgcttgtaaggct

SEQ ID NO: 263448 - DNA, 386 bp, Glycine max
acataacacgccgaataacattgtagtgcacaacattgtcacttccatcatagccaaaagtttttgagagtgcatccacacaatctaactccagaaggccctagcatcatgagcctttggagtgtgtattagttgctttccattaaacaccgagcttcagttgcggggaaagtcgacaatctccaccttcattattcttgtaggcatctcttctttgtcatacaactcagatccctttttctttctagcatcccacactatgtaacgcggacacactctattagcaaccatgttgatgtcagtggcccatgagatgtgcagactgagaatatatgttgtggctttatctggaaacgcatttgtccatgaactcgcgaaggatgacc

SEQ ID NO: 263449 - DNA, 277 bp, Glycine max
ttttatctccatgaatttcctcacatgtcttgtgctcaatggtaataacacgaatcttaaaaattcccaccgagtaatcttgctataaaagctaggatggaatttctatggtcaaatttcttgtccatggtcttgaaccatgaattgtgttaagtttaggttccttttgagtattgtcttgctatttttttgcggctgaaacctggaccataaaaatcttaaaaaaccataaagtagaagaaaacctcaaaattctagaggaacttgtcccctattg

SEQ ID NO: 263450 - DNA, 397 bp, Glycine max
ctcagctttacttatgtggcggcgtcttcttacttcttttttcaacgcgagctttgaccactgctgttccttcctgcgatgcttcttttcatatccgcctgagtgggcttatagcctaaaccatacttcccacgaattcctttggcatttatcacgctcattatgccgccgttgtccttggctaaacacattccgggttcgtaatcgttccctaacataactcgggccatcattactgctgcatcggacagacaatgctgcccatagaaggagtccacggaggaaatgctgaccacctcacaagactggaaagcgtgttctaacgattcttctgcggcttccacataaggcatagatgatgggcagctaccaagatgtttttctcgctgacacgatg

SEQ ID NO: 263451 - DNA, 284 bp, Glycine max
ctttcataccccctgttgacgtgcttaagccatttaaatataagcatttctcgcttaacttaaaataaaaataatttccaccgaacgttcgaattgggttatccatttaacttcggttaaaataaaattcgaccgttcggtcatgccgtaacccggttggaaatcaaaaagaggtaaaaataatataataatcgaaaagacattttttagataaatagagcgggaaatcaatcggacgttttctctttgggatttctcattcttaaccgaattgattaataact

SEQ ID NO: 263452 - DNA, 473 bp, Glycine max
  unsure (1)..(473): unsure at all n locations
ctcaagcttggaagctcaccactaactaatatactatagctttattattttcatgtncgngaatttaatgaaacagatttcattccaaaacgaatgctttgaaagataaaggatcacaacaaatgttaaaagctagataaataaaaataatgatttaaacttagatttatgtactgcacacaatgcaattattttggactatcattatttttgcatttggtaatctttcaatttaattttgttgataattagctattgtggccatgtattgagtttaacttggatggaaagttaatatcatattcactaaagtgtctttccttcacttttattaattatctttcggattgagttcttattaacaattaagttaatgaattattgcttccaggctagtgcacatgtttgctctcaattgaggcactcaaaggatggcctggcatttatgtttcaagtgggaaatgtggaaacct

SEQ ID NO: 263453 - DNA, 330 bp, Glycine max
tcaaaaaatgtgacatggaccattgctggtatgttaaaaaatatactaatagttatgtcatccttgctgggtatgtcgatcgacatgttgattgcaggatctattttggcaaaaattaacaggttgaagctgcagttggcagaaaactttgaaatgaaggatcttggtccagctaaacagatccttggtatgagaattcttacaaacatatcaaaaggaatttcgaagctgtcctaagagatatatatcacaaggggcttgacaggttttaccttggaaatcataaacaggaataccctttggatctctttgaagtttcaagagcaatct

SEQ ID NO: 263454 - DNA, 203 bp, Glycine max
aaacagtttttttcaaggcgcctgactaagacttttatcaaatccatttggttgtgtcttaaacagttctggacggggtagggaaaaaatcttttgggaaattttggggagggggaacctttaaaacaattccatataatataactttttccaagatacagttgggaaaatggctttttttgaaatgggggaatgacttcttt

SEQ ID NO: 263455 - DNA, 309 bp, Glycine max
  unsure (1)..(309): unsure at all n locations
ccctgttncccacctncaactgagctcacgtactcccacgtaacccatatcctcgttactctcaacaccgggtccccatcaatcctaccaagcttacacaacatccaagcgaaacaacattcagacaacacaagctatcacagccaagctaaacagagcaaaggcagaaaactctgcgcaacacaacaaccaaaatcacacagtctatcacttaaagaccacagcaacaattcctccgatccaattcgctcacacgcagatcgactcccaaatgttaccggcagaatatagcgcataagcctacatttt

SEQ ID NO: 263456 - DNA, 363 bp, Glycine max
ccaccacggctcattccccagaggatggcgccatctcgcacctcttctcccttgtcttccgctgcatctccatggcggaaaatcaccattaaaggacctcactgaagctcaaaaatccagacctccatatgaagccgccaccaagcaagccttccatcaacaccccattgagacacaaccttatacctttttgaaccttggcccataaaaaaagaatcctcattctttcccccgaagcaaggacagcggaatctcctcaaaggagagcaaatagaatgctcaaacccgatctcccaaagaaagggatggggaaggaaaagtgaaaaggatgaaacggtaagaaacgaaaaagaataaagagat

SEQ ID NO: 263457 - DNA, 446 bp, Glycine max
  unsure (1)..(446): unsure at all n locations
gtattcgtgactcatgagatttattgtattcagcattcgctcttacccaagcatgtagaattattaatttttgttgctatcctgactctggagatctgcagtttaaccatatgttttatggaattgttcaattacaacatagttcactttttagtaaatattaaaatgaaagtctacttgttttacagagataaatagatgttttgcatgggtgaattttgttaattaatgtgagcttgaagatgtatgctaaaatgactctgttactagttaaatntggcaaaaaaataaaaataaaaatcagcattctacatctacatcggttgtagaccaaaaacgatgtagaaactctacattctacatcggctggatctcataacgatgtagaaacttcacaattctacatcggttgcacctcagaaccgatgtagaaacctcacaatcta

SEQ ID NO: 263458 - DNA, 399 bp, Glycine max
gaatacgaactacaggaactatgatatgtctcacttgaagacccataaatgatgattatatcgaagaaaaggaggaccattcatgtcctttcagctagaagcctagcccttccagatagttagtatatgacaattatatttggtagatttattttaacatttgaaaagaaaaatatattgcaaccagtaaccaccatgctttcctccattgaccgcaatgtcaactcgacatttgtatggtggattttaagcttgctactatctactaataataatgcccacttctaatcacttggtcattcatgctctgctagtaacatgttaaaagaacctttcaagccaaaattctatgtcaggtgagctaatggaatataaacggttatctataacaaaacaaca

SEQ ID NO: 263459 - DNA, 429 bp, Glycine max
  unsure (1)..(429): unsure at all n locations
actaagcttccaagttccttcaactttccatcaagtccatctcccattgttatnttatgaatcgccttatatgcactcttagtcgaataacagccactaggctctgctgcccacttncattgatcatttaattccggcctgattgtgaacccttccagctgttggaggaaagctaccgccatacctatctcgctatcaaacaaaagtctcctccacttaaaatgtcactcccacccaccttctttcacagcacctgcttttaggctttgatattgtaatagtatggttgtgatccactcattttctcttcctatacctctctgtactggcttatcataaattaaaatacaatttgaaaattctcttgagtctgaactatagtttcgcatgtatcaagaatctggccaaatgatcttgagaaatgaaact

SEQ ID NO: 263460 - DNA, 436 bp, Glycine max
agcttcatgcttaagtatgtatggaagactttatttctattgatcaagacatacaagtgaccttgtaacaaatcttctagacttggagggatcacatggagtcctcttgaacccttaccacctcacttctgtcatatgctgagactcacgaagggcaacagggttaaccttctcaatgtattctgaaccacattcaatggctttttctgcaatgtacctctcaacaatagatgcttctggacgatatagattctttttatacccttttaagatcttcatgtatcgctcaaccgggtacatccactgcacataaacaggaccgcaacatttgatttctctgaccatatgcacaagcaagtgaatcatgatgtcacagaaagcatgcgaaaatacatctctaactggcacaatataatggaggcctcatttgccatct

SEQ ID NO: 263461 - DNA, 375 bp, Glycine max
  unsure (1)..(375): unsure at all n locations
aaaaactaactaagacttcggacttgatctaacgaaacgtcttattttatttcaggagaatctttcagacatgtttccaattcagcaatgaatactgaaggtacgggaaagactacccanagaggtcaaaatggtcgaggcagatcaaagtcaacagaggaaaggtcaaaaaaatatacaaagtaacattacttgctggaattgtgactatagaggtcactttacctatcaatgcatggaaccaaagaaaaacacgtctcaaaaacacaagaagcgcgatgatgatgaatccccaaatgcagcatgttacatccttgatattcttacccgcaattctcgcaaacgatgtattttgaatgattatatatatataag

SEQ ID NO: 263462 - DNA, 453 bp, Glycine max
  unsure (1)..(453): unsure at all n locations
agcttatgcttttctntatattgncacactgtttttatattcttaatggctgctggtttttcagacacttcctatttttcttgatggccttgntactgcatggagcgctatcctaatttctgtgacattaattcttttgtttggtgaagtgaaaaagttctgtccttatatgattttaagtataatacattcatgtcacagattaagtgcttgtgttgtttgtttagaggttggaacctgtaacaaaaatctggtggcacagcacccgttttgtttggttcacgttttttccatttgtgaaagacattttttgttaattagaatcaattccagttaaagtgggaaccagtagcttctcattcctctaatgttatgtttggcaataaaaaatgttcagatgctattatcgataaatgtaatgaatataacttacctttataatatattattaaa

SEQ ID NO: 263463 - DNA, 201 bp, Glycine max
  unsure (1)..(201): unsure at all n locations
aagtgctgctactggtctaggggtgtattttactttattaaaggcctatcaaagctaagtntaatatgatattattatcctgccagcacaatgatgctccccagtggttgtctgagacaaaaaaatatttaatttaaagcttggctcaactctattgaatgtttttggagagtatggggaatctaaaataattacctctgg

SEQ ID NO: 263464 - DNA, 456 bp, Glycine max
  unsure (1)..(456): unsure at all n locations
agctttgatctaccaccaccaccgttactatcatcnttattttcaattatgtttaatattattagtactttgatttctagccgtgtatttggctatattattatgacatttgaacaatttagtatttcttttatttgcataatatgactgaacaattatgaattatgttatatgactatgtggtttttatatattggaactattcatgtttcttgcttcatgattggtttagattttccaatgaatgtcttgtgagtgattagttatttatgtatgttttatatttgttacgcactttggctntttgttgatgccaaagagggagagaaatatggattaaatcaagaactcacataattaattaacttaatttcaagtgaagcttaaactcacaaaccgaaggggagaatatggagaactaagtgagtgatcgactacgaacaagaatatgtatgc

SEQ ID NO: 263465 - DNA, 430 bp, Glycine max
  unsure (1)..(430): unsure at all n locations
aactcagcttgctagcgttatgcggacggagaccacatgctatttatatcgncnanaccaagaagattaggtcttccacggcccacgagcataggatcgtggacgagtatgcccaagtatacgcggaaaaagaggctagaggaagggtgattgactctttacaccaagaggcaaccatgtggatggatcggtttgctcttaccttgaacgggagtcaagaacttccccgattgttagccaaggccaaggcgatggcggacacctactccgcccccgaagaaattcatgggcttctaggctattggcagcatatgatagacttaatggcccacataattagaaatcgctaggaaacttgtatgggctctcaaaccttgactagatacgactttctttttgaaataaaagaatttgtcccatgtttctactc

SEQ ID NO: 263466 - DNA, 254 bp, Glycine max
atatcgatagcataatacagccatacagcgctctgagagcttgccacaatcgagccctaacactgactcaaggcgagagcatggccagaagatgatatagctcatggtgagggccgctccaacaagatctccttcgcatggatgggcgccaaatagagccaaaccctcgagtcacaaaagggtgcaggaccagcaaaaaaatagaaagatttgtataccgagaactataagttagaccaccactcgtagtctat

SEQ ID NO: 263467 - DNA, 237 bp, Glycine max
ccataaaactcagcttagatgagcccactgcgagggaatttttttttattttgaccgagctccgccggaagtttttcttgcctgcgagaacattttatggtgcacaagagtctttcctcaagaacataaatatttccctgaatcccctcagatggagaatataacacgaatcgagatcatgcccttatcacgaatccaacgctaacaaagagacttcaaacatacgacatgaatccc

SEQ ID NO: 263468 - DNA, 295 bp, Glycine max
agcttacttaggattattgatcactgtttatctgtatgttgcagcatacatattcgagtgtatctgattatgatgttaactcatatcgagcatatcatcgggatgactagaccaaagagtgtccgccatgcactatatcacggtgttgaaacacgggtccgttgaattcctgacggaatagattgaagtgtcactgatcacttcttctaccactatagaaagcgaccttatcgattctgatcatactgatatcaactatggcacatgactccgagaacaacacttatccataact

SEQ ID NO: 263469 - DNA, 347 bp, Glycine max
tccactgtgtgcacttggtgtaacgcacaatacttctatttgtaatgcagagactggcatgcagactctatgcatctagcagcgagtcactaatgatggagtgagtggtgttgagcttccctaacaccaagaccatatatgtctatcagaatgaggatgtgcatggatgcgttatagttcaaataatgacacgcactcttatgtatggcggagacttatcttctggatcacatgaacctacagagaatttcttcatgattgccacatggatgcgaccgtccagcagataggtaaaagccttatgctaggctctcatatggagctacttgtgaacgtattagtacttg

SEQ ID NO: 263470 - DNA, 388 bp, Glycine max
  unsure (1)..(388): unsure at all n locations
agcttataatatatcgagacgctcattagattttatcaagcccatcgcacatacaaacggccattacatttcctccggatcttcgaataacgaaagtaacctatcgcgacgctcaaaatttaacatggaaaactcgggtgaattccgacgggctaaagttctgactcggatgtccaattgaggcccataatatatcatcgcccttgaaagtagtaatggactgaccacgcaaattctgacagccataacgtntgactcggattcccgattgaagctcataatatatcgagaagctcttaagataaaaatgaagcccatcggaaatacgaacggccataactgttcctctggaactccgaataaggaaagtaacctatcgcgacgctca

SEQ ID NO: 263471 - DNA, 323 bp, Glycine max
  unsure (1)..(323): unsure at all n locations
tagatcacgcatccgagacaaacgttatggccgtcnatatttctggccaatccatncaactctaatccgcctgataattatgggcctccatggacatgcgagccaaactgtagcccggcggaattcacccgagttttccatgttaaattttgagccgtccgataggttgattgccttattacgagatcccttggaatagatatggtcgcttgtatttgcaatgggctttatttctatccagagtgcatctcaactaattatgatgctagatcaggcatccgagtgatacgttacgggcgttcgaatatgcgggggcatttcat

SEQ ID NO: 263472 - DNA, 356 bp, Glycine max
tctacatacataaaacaaccccaccatcccaattttgcaaaatcatattcatacaacatcggggcatgtcaccgagcacttgaggggcgcatgtttggacataaattgccagagaaagggggcaacgtggcatgccccattgcttcaaaatacaacataggcctaaagccgtctcattcaaatccccaactccaaaaaatcaagcataaaaacaaaccaaaactgccccacaaatataatcacattctcacaatttggagcaccaaaagatgaagaaaatacaccaatgggaagctaaaacatcaacgattgaatacttacatgttggagggaatagaaacaccaaaaaccaaagc

SEQ ID NO: 263473 - DNA, 371 bp, Glycine max
  unsure (1)..(371): unsure at all n locations
ctcagctgagataggaagtgtcgagggtgaattctttgtttattgtngccacaagcggacctgagatatgtccgggggcaggaaccttgggacgtaggtgggtgctattgcccaaaaccaagcttgccaatcccgacccacccgggctaatcatgcaggagaacctgtgatgtacctaacaggcgagctcctggcatcaactgataaaggacaaagaccacaagcaaggaggcttgtggggctggccactgtgaaacttgatgaatgtgaaatgatcttggaatcgatacaggggggaatcgatacaggctataatgaaacaggagctagatggctctggaatcataccaaggggaatcataccagcttga

SEQ ID NO: 263474 - DNA, 449 bp, Glycine max
agcttacactcggaggtccgattcatgcttataatttatcgagacgctcgaaattgaacaatggaaactcttgagttattcaaatggtcataacttttcactccgaggtccgattcaggcgcataagatatcgagatgctcgaaattgaacaacggaagctctcgagaaattcaaatggtcataacttttatcacggaggtcagattctggcacataagatatcgagacgctcgaaattgaacaatggaaactcttgagttattcaaatggtcataacttttcactcggaggtctgattcaagcgcataagatatcgagacgctcgaaattgaacaacggaatctgtcgagaagttcaaatggtcataacttttcactcggaggttcgatttacgcgcattatatatcgagactgctcaaaatgaacaatggaagctcttgagcaactc

SEQ ID NO: 263475 - DNA, 404 bp, Glycine max
tcccttgttcaatttcgagcgtctcgatatattatgcgtctttaatcggacctccaagtgaaaagttatgaccatttgaattgctcaagagcttccattgttcaatttcgagcgtgtcgatatattatgcgcctgaattggacctccgtgtgaaaagttatgaccatttgaattgctcaagagcttccattgttcaatttcgagcgtctcgatatattatgcgcctgaatcggacctccgtgtgaaaaattatgaccatttgaattgctcaagagcttccattgttcaatttcgagcctctcgatatattatgcgcctgaatcggacctccgagtgtaaagttatgaccatttgaatttctcgagagcttccattgttcaatttcgagcgtcctgatatattat

SEQ ID NO: 263476 - DNA, 454 bp, Glycine max
  unsure (1)..(454): unsure at all n locations
agcttctaacagggataggctgganacctctttgcttttgtgtggcaacatctctggtgaagtggatcacaatggcttgggtttgcttgggcttttatcaaccgattgcatgcacgcatctccttccgcctttcttgcgccacaaacttcaattaggcctttgtccatcatccactatagcagttcctccgccgttgggcatgtctccacgtcgtgtgatgcccccggatgcatcaaacaagaatctcccttgtccccgtcaacacaaatcatgcccgctttgtacagcgcttccaatatgaacctcttaaaggttaacacatcttccatccgcttcggtccccgaggtccacactcctccaccgcattaactgctgatccctcatgactggaaagatgattcgtccttacattcanagctatctcttgaaatgtcagccaccctgcgtcaatc

SEQ ID NO: 263477 - DNA, 402 bp, Glycine max
  unsure (1)..(402): unsure at all n locations
actcagctttgataagggaaagaaaataatcaatgtataaatgaactaatcttgtcttactcaagcttcatacttttaacaagccaagtacaagttttaaatttacttcattttaaataaatgaccaaaacttagcatcttctacttttgcaaaccaagcatcaactttaatttcttggcttgacttgatactttgacaatgcccttaacaatatacattactccaatttgattgaacttaagtgttaatattacatgtaatataatttcacttgcacacaccgaaaaaaactcattgaccaaatggcagcacctgatattacttctagaatataaggtttattngcaaagttaccatttcaatgcatcttatcctaaagactggctttcacatcacacaca

SEQ ID NO: 263478 - DNA, 437 bp, Glycine max
  unsure (1)..(437): unsure at all n locations
agcttatgcgcacacttctttacgaacgttcacttttatatgacattcttataactaagaaaaatgcacccatatacaatcaaggcaccttcgttacctagattattcacatgtacttccaaggtgtatttgttacctacatcacacacatttcctttgctaaattcacatacatgcatactctaagcactttggctatcaaaaatngcatacgtgcacatcttggtatttctcatacctatacatacacaaacttcatgatgaatcttgactatctacacaataaggtgctacatttcatgcttttttcaagtgtttttactacctaaagccgcatgcaaattgaagtatattttcttttgcttactaaaattgtattcaaattaaaaggtatttttgtaatgtattttctctacataacatgcaacatatttata

SEQ ID NO: 263479 - DNA, 403 bp, Glycine max
  unsure (1)..(403): unsure at all n locations
ctaacccctcaataagaggcatgctaagtngtagagttttagagttattttatatgtcatcaaacataaaaaggggaaagggaatgtantggctgatgcactctctatgagacatgctttacttgctatgcttgaaactaagctgtttggtctcgagtctttgaaagacatgtatgtgcatgatgtggactttgctgaaatttttgctgcatgtgaaaagttttctgaaaatggttactataggcataatggattcttgtttaaagcaaataaattgtgtgtgcctaagtgttccattagagagttgcttgtgagtgaatcacatgagggggggttgatgggacactttggggttcaaaaagaccctgaaattctgcaagagcatttcttttggcctcatatg

SEQ ID NO: 263480 - DNA, 439 bp, Glycine max
  unsure (1)..(439): unsure at all n locations
agctttataagtaatacttaggtcttatctctattttatgtacctttcaacgcactaagagctgaccttctgatggttgtacactattatgcttcacttagccttnttggtcaacacctagcttctaaagtgaaggctgcccaagttgtataagcactatttaggccttatatttggctcatgtgggatcataactcccaagagctgacgtctgaatggatgcacactacacaatgcttgacttaccctttctctagttaataaatatccccacattgacaaccaactctaacaatcacaattaaagcaggctaggggtgatggcaattaaggtggctttccaacattctattaatttccatagcatgttatgtttctgtctatgaagatatgaataactaataatgaaacatactttaaccctccttaaagtaaagct

SEQ ID NO: 263481 - DNA, 434 bp, Glycine max
  unsure (1)..(434): unsure at all n locations
agcttgcaggtagaactctcacatacccatgagggatagggttattttactgttcaggncggaaaatacatgtttcctgcaggctttacgattatggatataaacgaagatgaagaaataccaattattttgggacaatccatcctcaacacaggaggaaccttgattgatgtcagggaaaggaaattgacttggaggctacgtgatgaggaggaagtatttaagggttttggtactggaaagagctcattctctcccccttcctacaattacaagtcactaacaagatggaagtcactatggctaagcctcacccaagtgtggggaagaaagacccttccaggaacaaagtcattccataagaccttggatggagtaagaacaatggagataacatcaccgttcatgctcttggctttggaatgggtgattat

SEQ ID NO: 263482 - DNA, 460 bp, Glycine max
  unsure (1)..(460): unsure at all n locations
agcttgtcatagttgacccctgaaggatgtacttatctccctgcctagctccctgtattagcaaagacttctttttccttttgatctacataactccacattcaacccaataagaaaaaccttttgaaccatggcacccacagatacaagatttctcttaagctctgaaacgtgacaaacataagttaagattctaacaacaccatcatgcattctgatttctatagaacctatattgacagacttacaaggagcatcattatccatgagaatgttaccaccggacttctcatatgtcacaaaccaatttctatgtggacacatatgataggaacaacctgagtccagcacccactgtttagaatgttgttgtagtggttcaccaacagtcagaaccaaattgttntctgatgagggattattctgaacaagagtatcaacanaatatttctttacgttc

SEQ ID NO: 263483 - DNA, 409 bp, Glycine max
  unsure (1)..(409): unsure at all n locations
agctagaatcggacatccgtgtcaaaagttattatcattcgaatttcacgagagcttccgttgttcaatttcgagtgtcactatatgtgatgccgccaaaatggacattcgagttaaatgttatgaccatttgaatttctcaagagcttccgttgttcaattctgagcgtctcgttatgtgaattgcctgaatcggacatccgtgtgaaatgttatgaccatttgaatttctcaagagcttccgttgttcaatttcgagcctctcgacatattattcgcccgaattggagatccgtgtgaaaagttatggccatttgaatntctcgagagcttccgatgtttaattttgagcgtatcaatatattataagcctgaatcggacctcagtgtgaaaagttatgaaccattt

SEQ ID NO: 263484 - DNA, 364 bp, Glycine max
  unsure (1)..(364): unsure at all n locations
tctggtgctcaatttcgagcgtgtcgacatattatgcgcttttctcttacatccgngtgaaaagngataaccaattgaatttctcgagagtttccgatgtttaatttcgagcgtcttgatatattattgtcataccctaatttcgtccggggacctttgctcgatgacgtgcgaccattctttggtcctcgtgaggtgcttggcacccatcattaggcaatttgtgaaattccaggacatgccaaaaaaccaaaaaaatattgatgcacaatccgtaagtttccgtgacacaccggaaatcaaatggaagcatcgttgcataattaagtgagggtccgtaacattccgtaagtcaaaaagggga

SEQ ID NO: 263485 - DNA, 399 bp, Glycine max
  unsure (1)..(399): unsure at all n locations
taaagcgactaacanactcccccaaattcacaattgtgctcggccccaagcaaagaaagaataactcacttgtcctcaagagacaaaaagaggggccaatcaaaataaaaaggtggctgaatcatcaaggatatcaaccatatgaactgaatatcatggagattttaaaacaatcacttctcacaagcatgcaacttttcaaagataggatcacaagtattagagccatagatgaaataagctagtaagcatgacagaaatcaaggaaggatgagcaaccaaaaccctatagtcattgtttcactcaaactcaagggtttaggcttattccctcataaacaaccaacacaagttgcaacccttggcattcatctcccatcatacaggaatgaacacaca

SEQ ID NO: 263486 - DNA, 313 bp, Glycine max
acttgaagaattgtgactttcggaaatgtatatttcaaaatcagtcactggtaatcgattaccattaaggtgtaatctattacacatcgatagatgtcactcttcattttgaattttgaaaattaaaatgtttacaagctctggtaatcgattacaagtattgtgttatcgattacacaagtttaacatactttaagactatttaaacataagttataactcttaaaatttgatatcttaacgtttagaacactggtaatcaattacatgattatggaaattgattacaactttgtaaatcagttttgaaaca

SEQ ID NO: 263487 - DNA, 419 bp, Glycine max
  unsure (1)..(419): unsure at all n locations
agctngaaaagaaacaccacaggcgtcgtataattattattcatcnggaaaactaacacctaatgtggagttcacaattgtctgactgcttgtctctcccaagaatgccatagttttttgtaagagttgggttacgactgaaacttgtggttttttacagtgttaggttgtgtcatatatatagatgagttttaatataagtgctgcattttttaaagattaaaaatatgcatgcacatgctttctgtatgtgttgtcaactacaccaatgacgtgacacgctttatcttgcatcagatctgcatgtgcagtcatgctatgcaaggtccttccacgtgctttatgtttaggggtgagaataggccagaccaacctacaggggcctatgatctggcctatataaagcctcgcctgaattg

SEQ ID NO: 263488 - DNA, 396 bp, Glycine max
aaaactccgctacatggatcaccattaatgaaattgattacttttattatttattcacggaacattaaaaaaagagaagaatggagggcaatacttaaatatgaccgtcattgtctatgtatgagatagctaggatactcatagagaattagtggaatacacagtacacaaaatagtcaactgcttaagctcctccgatttttgtatgagcaggaagtcacaatatcaggctatcttaaccctcccttaatgacttgtgggtatgggctctctggagcattttattcatgactatttcaaaggggttaccactacaaaacttgcagagattatacagggcagccttcttgcattattgaatctttatttctcatcattaataatttctgtattgga

SEQ ID NO: 263489 - DNA, 455 bp, Glycine max
  unsure (1)..(455): unsure at all n locations
agcttgcaaactcacttctggaggattattgttaacccagccctttgacancctttgatccgggtgttccagtagttctttatctcattatctgtgcgaccaggcaactacaagcaaaacaaattaaccatcataacagattaaggggtttaaattattcaagaaacctataagctttattattgatttaattgtcacttccctgttttggcaatataatactagtcaattgttttcctagtcaaggggcacaagtccacaacatccaatagaatgtaacataggcaaccttctaactcttaaaaatgaacagttaccatgatgtattttattatctactttgtaagattattaataacctaatttgcaattgaagttgtagatatgatagaattacaaatcatttgcaaacacagaanataaaaaactgcattgaaatgaatgtctcccaagta

SEQ ID NO: 263490 - DNA, 436 bp, Glycine max
  unsure (1)..(436): unsure at all n locations
tctcccccaattntctataaatagttggagaagtgatagtttataagggttcagccccttaggcacttctctctctttcgaatttgcttaggaaaattgtttccgtgaagaaaatccaagccgaggcgcttccgtaacgtttccgtgagtgatttcgcgaaggttttcgaccgttcttcgacgttcttcattcgttcttcattcgttcttcatcgttcttcagtcttcaacgggtaagtacctcaaaccaagcttttcaattcattctatgtacccgtggtggtccacatttggtttcatgtatttttattctcgttttcatttactttttatacccccttttgacgtgcttaagccatttatttaagtcatttctcgcttaacctaanaatgaaataaaattccaccgatcgtttgatttgatcatccgtaactt

SEQ ID NO: 263491 - DNA, 450 bp, Glycine max
  unsure (1)..(450): unsure at all n locations
agcttcacttgaaattaagntaattaattttgttagttcttgatttaatccctatttctctccctctttggcatcaacaaaaagccaaagtgcgtaacaaatataaaacatacataaataactaatcactcacaagacattcattggaaaatctaaaccaatcatgaagcaagaaacatgaatagttccaatatataaaaaccacatagtcatataacataattcataattgttcagtcatattatgcaaataaaagaaatactaaattgttcaaatgtcataataatatagccaaatacacggctagaaatcaaagtactaataatattaaacataattgaaaactaagatgatggtggcggtggtggtggtagatcaaagcttgtatggatgtaaaagacatcttcttcgaccttggtgatccttgactncatctcatcgaatcgcat

SEQ ID NO: 263492 - DNA, 456 bp, Glycine max
  unsure (1)..(456): unsure at all n locations
tggtggagttagaaaagaaccacgggaggttcgggctttgatatatgcctacacgcgaggatgtaaggagaagtgtcatanaaagaaggggcaaaagcatgggtaagcaacaaggaccacaagtaaaatgggctcccttatatcacatcaatgagagtttcatcagcacgggctggatgtgtgaagggcacatcgccatgatccatgatgaggtctcttaagagccatcagactgggtgcggtcatgccctcctgagttaagttggggaactggcagattatcgaacaacttggaatttcccgggtggatataatgtaatttgttagtcctcaccctatagctgggcctatgctttagggttttctccctggttgggcttgtcttttgctattagatatatataaaatacgatctttcttcattgttcttgcactcttaggcattctcattcatcc

SEQ ID NO: 263493 - DNA, 436 bp, Glycine max
  unsure (1)..(436): unsure at all n locations
agcttgtgatagtcataaaatctatttttttttgttgntttttaatatttgagtcaaatacaaagccaggcatagccaggtaagttggatagatcattgcacatgcatgcttccaaattattagaccgaaaggaaaaggaagaaggaacacaaagaacactctcaattaactaactaaccacattatacgtacaacaaagaagagtgtcttgcatataattccaattatagctaccaccttttcatctctttgatctatctctttctatagatctcgtacaaacaacacagttttaatttagacttttagtccttagtggatgcagggcatcatatcctggttattccatgtgaagtgctttcctttcttatgaatatgaaacttgctcctttgtacatacagaaatattaaagtatagtctaaacaatatgagac

SEQ ID NO: 263494 - DNA, 344 bp, Glycine max
  unsure (1)..(344): unsure at all n locations
ggacctataaaactaagcttgagcgaggctgggctacaataaacaatggnttttcttttattaaaagctctaattataggagagcactaatcctacaattaacctatcttttcttttccatttacattcttttcaactcaactcacttgccctttgtacttagctttattctaatagcacacacacctcttatttaaaacttactgtgttttttttttaaattacaatctaattacctatttgctgcgcgcgctaggatttcttacctttataacttggctacccaacaaactcccccaaatttgaggaaaaatgcgttgaatcctattgctgccctataacct

SEQ ID NO: 263495 - DNA, 458 bp, Glycine max
  unsure (1)..(458): unsure at all n locations
agcttgtgcctcttcacgtctggaatatgtatgtatcatatagatccaaagacccttaggtgctttgctgatggcttcttcccgttccaagcttcaattggagtcttgtcttttacagacttagttggacatctgttgagtatgtaaacagcagtgtagactgcttcagcccagaatttgttaggtagtcccttctccttgagcatcgatctagctatttccataactgtgcgattctttctctcggacactctattttgttgaggagaatatgagactgtaagttgtcgctcaatgccttcatcctcacaaaatcttttaaactcgcgagaggtgtactttntgccgcgatcacttcttagtacttttatccgttttccacttttgatttcagcaagggccttgaactttttgaatactccanagacttctgattttattntagaaaaatacccatg

SEQ ID NO: 263496 - DNA, 382 bp, Glycine max
gacctatgaaactaagcttatatagatcgagacccctgttccttatttattttcttgcgtgagctattccaattgagtgggacgcaactttgaatgagttctgcctatcaccctcagacagatgggcagactgaggtgatgaacagaatcatcgagcaatgcttacgcgcatttgttcaccggagaccgcgggtgtgggggaagctcctcttatgggtagagtgggctcataatacctcttggaacgctgcgatgggatccacaccttacgagattacttttggacgaaaaccattcaatttcccagattatatcacaggaacttcaaaattggatgcggtagacgagatgctccaagacagggaggaaacattccaatgtc

SEQ ID NO: 263497 - DNA, 416 bp, Glycine max
  unsure (1)..(416): unsure at all n locations
agcttgccacccagctcgctcattctgcttggttgcttcctccagaagcaacagccttctggaggaatcttctggagggcccaagtgggcctggttgctatttgcacccctatttttactaagtacacccccctgcctttntttttggtgattcttttttcgaaaagttacggaaatgatgagaatcatgaaactgaccaaatacaggctaaaggcccaagtggagaaggacgaaggcccaagtggagaaggacaaagcccccgagtggagaagggtgaaggcccaagtggagaaggatgaaggcccagaggcagagacactatcaagactactaattgttgttgaaggcccaaactaacttgaaggcccaagttaaataagttnttagttataatttatttttattggaattttg

SEQ ID NO: 263498 - DNA, 453 bp, Glycine max
  unsure (1)..(453): unsure at all n locations
ntgtccgcanaaatcacttgaaaccgttttattgtccttctccttaaacggntctctttgcttatatcggttaacatggaccgttcagaaacataactttaccgcttttgcaagaactacgtaggtctgatttcctcatcgcaattgaggataagtaggagcaaaagccccacttttgtcgaccaccccaagagatcgttaatgttccaacgtcttaacgtttctctcctttcacaaccaagagatcgttaatggtccaataccttaacgtttctctccattcaaaaaaacaagagattgttaatggtccaacgccttaacgtttctctcctttcaaaatcaaaagatcgtttaatgggccaacaccttaaatgaccttttggtcagtcaaaatatatcttgcaaaaaaagataaaacancttaaccaacgcttagttctttgagaactacat

SEQ ID NO: 263499 - DNA, 344 bp, Glycine max
  unsure (1)..(344): unsure at all n locations
tgcatccagcataagtatgttcaccgctactttcctaagagcaaccaagacatgactctatgccaatccgattgattagggagaaatagcgcccggcggaatggactagagcactgctgttttactttatactcacctgcatagaacaagctatgtaactgacttctcaacagtttgtatcatcttttccaggagtatagtgcatacaagctgattgactggctgcttatgaataagctactggccgacgaacttgccactgtcttcctgacaatattgaacgacactaacattcttgtgattcttgacagatngctatgtaagttaaacaaatctgggacatg

SEQ ID NO: 263500 - DNA, 249 bp, Glycine max
  unsure (1)..(249): unsure at all n locations
tactaagctngcttgaccctttacaaccgcttactgccgtgtctttgtttgtctatgtgcccggcagtcgactctttgttccatttaacaatagagacctctcctgcgtccatgaatagaccataaaaaagtgtcccggtcaatgctctactggcgagcctttaatgaaaaagtgaaaatggctcgcgcggaaaacgcatgtgagtttcatggacccagtacactcattgcaagcaagtggacagccaa

SEQ ID NO: 263501 - DNA, 403 bp, Glycine max
  unsure (1)..(403): unsure at all n locations
gggggtttgatagtgaaaaatttcactgaaagagtgaggacttggcatagccatgagtttagggtgaaccaatataaaaattctggtggaatcttattctccctatcttctcgactgccttaaaatagattaacatcatnatttcttttcataaacaacttttcattgaaacaatcctttggacacaaaattgaatttttagaaaacctatttaactgaaataaacattttaaagactntttcttttagaaaattaagaattgttttataaaactgctaagttctcactctaagctcagaacaagtgttgattcttaacatagtctttctaaactatntttagaacaaccaagttttacaacaaanaaaaaagaagcttatgttttgacacacaattcaacta

SEQ ID NO: 263502 - DNA, 416 bp, Glycine max
  unsure (1)..(416): unsure at all n locations
ctaagcttaccaccattggaggccatggataagagcttggaggattaaagtgnattattgagggagagggagagaaaagcatgaatatttttgtgctaaatgagctctgaaatctgaagtctaatattcaaatgatcaaagttgaaaaaaatgcacacacatgacctccatttatagcctaagtgtcacacaaaattggagggaaatttgaatttcaattcaaatttcacttgaatntgaaattgaaattgtggagccaaactttggacgccaaaattcactaattatgattagcgaattttagttatggttcagcccactaatccaaaatcaattccaagattctccactaagtgtgcttaggtgtcatgaggcatgtaaagcatgaagaacatgcacaaatgtgactatatgat

SEQ ID NO: 263503 - DNA, 456 bp, Glycine max
  unsure (1)..(456): unsure at all n locations
agcttctcaaggaagctacctagtctatatatttaagcttgtgtaacacttgttgtaactttgatgaatgagagtcttgtgagacacaactcaaaggtcaacttctctacctttttctgccttcaatttcgtgctcccccctctctctttctctccctcttttcttttcctccattgaagcatcctctctaagcttcttatccaaggctcatcttggtggtgaagctccttcttccatggcttattccctagtggatggcgcctcctctcacctcttctcctttgtcttctgctgcatctccatggtggaaaatcaccattaaaggacctcattgaagctcaaagatccagcctctatagaagcctcacaagcaagcttgcatcaagcggtaatcagagcacaagagcttcaagtaggtgctccttanacctccattaattnttagcntaccttct

SEQ ID NO: 263504 - DNA, 461 bp, Glycine max
  unsure (1)..(461): unsure at all n locations
agcttaaagtaatctttatacacctatactcactccactgtataacttcgaacttaagagtgggggttcaactgttggttacgatgtctaactctctagctaggacactggtcacatcaaggatttcctactcaagctccaactactaagttagctctaatggttgaaattaaacacacaacaagattcttaagaattctacctatctcttctacctcgaattcaactccaaagaatacctcatcatgcccgttggtcttataaatgctccttcaaccttccaatcaacttgaactcaattttcatgcccctgctcaaggaggtaggtgttgggttnttttttttatgatattctagtttataatccctcttgggaccaacatataatgcactntggagaagtactgcaatttctactcaatcantaaattttttgacaaaataaaacaaatgcttatttg

SEQ ID NO: 263505 - DNA, 142 bp, Glycine max
  unsure (1)..(142): unsure at all n locations
ntatacatacccaagaatactattactaaggtgttaagtgtttatttttcatttttaaaaaattacctaacgtgacactatgtctgccacgtcatcattttagtacctactgacagggtacatctgttaagcgatgaacttg

SEQ ID NO: 263506 - DNA, 459 bp, Glycine max
  unsure (1)..(459): unsure at all n locations
cgacctctgagtcacctgcggcatgcaagcttcatggtgaatcaagagtgattcattgatgtnttgttgataacaaaagatgatgacaaaggtgatgacaaaaagctcaaaggtcaatcaaagaatgagttcaagatattcaagatagaataaagaacacttcaagattcaagaggaaagttgaattcaagaatcaagaatcaagagtcaagaaaaggcttaatcaagataagtatgaaaaggttttctaaaaaattgagtagcacatggtttttctcaaaacatgtttaccaaagagtttttactctctggtaatcgattaccagtagcaaaatggatttgaaaaagttttcaaattgaatttacaatgttccaattaatttcaaaaagttgtaatcgattacaatggtttggtaatcgattaccagtgccttcgaacgtngaaattcanattcaaat

SEQ ID NO: 263507 - DNA, 218 bp, Glycine max
gagccggggaatgctttttaaaaaaaaatcctttagactagaaagcattgtttgctccttagcccaccttgagagcacatttgccctttattcgacataagacctgttgatttattctacatcaatgctgggaaaattacacaaggagaatgcttttagatgagaatttcacctgacaatttgagtaattgccaacacacattcttttgagaacaata

SEQ ID NO: 263508 - DNA, 453 bp, Glycine max
  unsure (1)..(453): unsure at all n locations
agcttgttaatcgtatttcaagatgtttttgttttattggacaatgaggttgattattaaaaaagtgttatgagagcgtgttttattggctagttagaaaagtgactaacttatttaattttcttgtttttttttcttataagtgcttatggaaaatttacccaacagggcatagaactttatttgttttgacactaatatcctataattagtgtaaaatgagagaaatatagagggataatggactgaaactgtgtgtcagagtacacaatgaatgcttgttaatatagacaggtagtattgattacacataattagaggatattcaatntcctctaaatcagatcctctaaatcagatatcatatcctatcacattattatacattaaattcttggttctcatcacttaccctcaagctaaagcttttatctagttacaagaaaatctatt

SEQ ID NO: 263509 - DNA, 367 bp, Glycine max
  unsure (1)..(367): unsure at all n locations
aactcacctaagctcttcactgcacaggctcttaaatttaattgttcctngnggaaccttcacccacaaagacactgacaaaaacttatcttctccttcttggacaaagtatggtaggctgggggcaagtaaattttcttcccatcagaccttggatgcaactgtgatcttatatccatatcagctagatcttgacgggtattcaagccatccttcgtcttgccttgaatgttaaggagcgtcccaatcacactgtcacaaacatttttctccacatgcataacatcaatacaatgtctaacgtcaagatcactccagtacggaaaatcaaataaaatggacctcttctttcatatgcaactctgac

SEQ ID NO: 263510 - DNA, 308 bp, Glycine max
  unsure (1)..(308): unsure at all n locations
ntcctcgtgaggcgggagacgaccgntgtacaacacaagttattattcattggncgngaaaccaccggcgataaatacgtgactaacgatacgctttggaccacaatgttgacatagacacgacaatgctaatcgagtgtaccaccacggtccttttgcaccaactacaaatatgatcctgaactaacaatcactgtacacacgtgtgtccgcggatntacaagcatgaccaccaacttacacactaatttctagtgctgaagaagggcacacctgtactgagcatagagttcaagaccaccgatgtt

SEQ ID NO: 263511 - DNA, 446 bp, Glycine max
  unsure (1)..(446): unsure at all n locations
agcttagtgaattgctgaacacttattgttcntttatctctcccacactctacctctaatggtgtataaaccttgtgtttcttgtaaaaatctttggtatatacaggaaggcttcaaaagtgttcgttgtgactcatgttcaacttttttgcttgatttctttattgagagaaaacgatcgctgaagacattaaatacaatattaaatatcttttaccattttgacgtgataaaactttaagggtctttaggttgataagtttgtgcaacatatcttgaaaagtatttttttagtatgaatgaattcaaggctccagggtaaatgatatgttagccaccttctacccatgttacaaagaaatgtgaacctttctatgcaagttagcatgaaatctattttaagaagccttttacaatcataatgctcatccttaaaatgtaacttg

SEQ ID NO: 263512 - DNA, 459 bp, Glycine max
  unsure (1)..(459): unsure at all n locations
agcttcattaagaagcttcctccataatcttcttcgtggcttctttgagaagctctatcaagaagcttctttgagaatatagatccttatctatccacacctctctattaactaaattaacttccttaaaaataattaccgatgaaaataacgcaacaaataatcaaacatcaagcataattacatatatatatatatatatatatatatatatatatcagggtgttacaccttcactaggcaattttgttaagtcataaaatagggattggttaatgaccatcttaatcccataaacttcagacattagggtaccttcatgtatntctaaattagaatagaaagctntgactaattcagaatagacaggtaatttcagagacatgaatggaataagaatggagttttcaaatgctcggaagcattcaaaattctcatttgagaagaactctatatcaa

SEQ ID NO: 263513 - DNA, 392 bp, Glycine max
ctctcggcaatttcttagtcacttaaaaagttattatttttgaaataatcttcagaaacaagtcaactgtagaatcgcgacttttggaaatgtatttttcgaaatcaccactggtaatcgattaccattgacgtgtaattgattacacatcaacatatgtgactcttcattctgaattttgaaaatcttaaagttttaaaacactaggaatcgattacagctttcgaaatcagtttgaaaaacaatgcgagctactagtaatcgattactaccttctggtaatcgattaccagagagtaaaactctctggtaaaagattttgcgaaaacttcatgtgcaactcaatgatttgacaaactttttagtacttatcttgatagagtcttctcttg

SEQ ID NO: 263514 - DNA, 433 bp, Glycine max
agcttcaacattcaatttcgagcgtctctatatatgacgggactcaatcagacatccgagtaaaaagttattgtcgtttgcattggctcagagcttcaccattcaatttcgagcgtctcgatatatgacgggactcaatcagacatccgagtaaaaaattattgtcgtttgaattggctcagagcttcaacattcaatttcgagggtctcgatatattgcgggactcaatcagacatccgagtaaaaagttattgtcgtttgaattggctcagagcttcaacattcaatttcgagcgtctcggtatatgacgggactcaatcagacatccgagtaaaacgttattgtcgtttgaattggctcagagcttcaacattcaatttcgagggtctcgatgtattagcggactcaatcagacatccgagtaaaaagtt

SEQ ID NO: 263515 - DNA, 444 bp, Glycine max
  unsure (1)..(444): unsure at all n locations
ttgagccaattcaaacgacaataactttntacttttatttttgattgagtcccttcatatatcgagacgctcgaaattgaatggtgaagctctgagccaattcaaacgacaataactttttactcggatgtctgattgagtcccgtaatatatcgagacgctctaaattgaatgttgaacctctgagctaattcaaacgacactaactttatactcggatgtctgattgagtgccgtaatatatcgagacgctcgaaattgaatgttgaacctctgagccaattaatacgacaataacgttttactcggatgtctgattgagtcccgtcatatatcgagacgcgtcgaattgaatgttgaagctccgagccaattaaacgacaataacttttactcggaggtctgatgagtcccaaataaacgagaagctcgaattgaatgttg

SEQ ID NO: 263516 - DNA, 456 bp, Glycine max
  unsure (1)..(456): unsure at all n locations
agcttgtgcaaatcanatcactcctacattttatctctagcatgcataggatggtggtctcgtcctttgtcacgggaagccggaaggtccatatcaccttcttaattgtacacatggggcactgcgcccccaaatgcgcaagtaagaagagataatttttcgggctctcgtgtccgtaaaatgcattcatatcatgcatcgcataagcatctcttcataacatcataatggacatatcctgcatttgtccgttatcatattccagcctcacattttgcatggtcatggcatcatcatgcatatgcgttcaacaaactttttggtctgcaaaattgcatgccatttgttttcatgtttgctcatccttgcgttntcctctacaaaaaaaaacaaaaaaggaggaagcgtgaaacttcacactacattcttagtttcatgtgttaggcaacacaagtc

SEQ ID NO: 263517 - DNA, 409 bp, Glycine max
  unsure (1)..(409): unsure at all n locations
tgaggganaacttgatgccttagtcaacctagttacttttcttgccataaataaaaaatctgcatctgcatctattactgttgcaagagtctgtggtctatgttcttttgttgatcaccatacagatctctgtccttctttgcagcaatttggagtcaatgagcaacctgaagcctatgctgcaaacatttataatagatcccctcagcagcaaaaccaacaatagtagaataattatgatctttcaagcaacagatacaatctaggttggaggaatcatccaaatctgagatgggcaaatcctccacagcaacaacagcctgtccctcccttccagaatactactggtccaagcaggccatatgttcctcctncaatgcagcagcaacaacaaagacaacaagcaact

SEQ ID NO: 263518 - DNA, 454 bp, Glycine max
  unsure (1)..(454): unsure at all n locations
agcttcatgatgatgaatcaagttgttttttgtagttntgatgataacaaagatgatgaccaaaacccccagagaatgatttcaagattaagttaacaagtttcaagaatcaagagaagtttgatttcaagattcaagaaaagatgaactcaagattcaagtgaagaaatcaagaagacttcaaaagggaagtattgaaaagatttttcaaaacacaaacatagcacagttttgtttatcaaaagagtttttctcataattttctaagttactagagtttttactctctggtaatcgattaccaatttcctgtaatcgattaccaatagcaaagtttgatttcaaaagcttttaactgaatttgcaacgttccaattgatttcanaatggtggtaatcgatacaagatattggtaatcgattaccaatgtatctgaatgtngacattcaaaatc

SEQ ID NO: 263519 - DNA, 366 bp, Glycine max
  unsure (1)..(366): unsure at all n locations
ttgctcacatttctcattccagacaaacttctttacttttagttagntnagttaggggtagtgctaatttaaaaaatccctcaatgaatttcctataatagccggccaaccccaagaaacttcgaacttctgttggagttgtcggttgttgccactccataaccgattccactttaaccgggtccaccgcaaccccatcttttgaaatcacgtgccccaagaactgcactatctctaaccaaaattcacatttcgacagtttggcgaacaatttcctatccctcaggatatgcaacacaattctcaagtgctnttcatgctccttcttattcttcgaatacactatgatatcatcaatgaacacca

SEQ ID NO: 263520 - DNA, 458 bp, Glycine max
  unsure (1)..(458): unsure at all n locations
agctntctacaatcaatgcacattatccatcctatgactgttctggtaggaattagttcatnttgatcattntttattattttcattcctcctttttttggaacaacttgaacaggactaacccatgagctgtctgaaaatggatagataaggcccgcctctaataacttgagcacttcttttcttacttcttccttcattacaggattcaaccttcattggggttgtcgcacgggtttatattttgcttccaaattgattttgtgcatacaatatgatggactgattccttttagatcagaaatgtgccaaccaatagccgctttacgtcgttttagaatctacaccagttgatcttcttcttctttcttcaaagagttgctaattatgtggaagcaaagcttcatgatgaatcaacaatgattcaaagggtgtttgatgaatacaatgatgacaac

SEQ ID NO: 263521 - DNA, 380 bp, Glycine max
tcttttggaccttgaacaagcaattaactcctctttcataactatgctatgtgcccgcgactggtctctttcttcccttcgcaacttgagttcactattgctaccccatagagctccgcgaaatttgttccggccatactcttccttgcgagccctcttggtttcttgttcaagggctcttgcggtaattgcattctcttcccgtaacccggcacactccttccgaacgtgtgtagcggccaacttgaacttctccttggcaagttttgcctttcctaactcgcttttgaagagttggacttcttcgtcctcttccggtgcttcaaaactctcttcgctgacgacttttaacttggcgagccaatctaaacctcgtatat

SEQ ID NO: 263522 - DNA, 429 bp, Glycine max
  unsure (1)..(429): unsure at all n locations
agcttcgaataatatacttgtncttcattttattgtctttgggcttggcgaccacgctcaacaaaatacttgcgacacctactgtacgttgatttgaccaatgctggtatgggaatggtgcgacaaacctttaaaaccttattgatacattctgagagggtggttgtcatgtggccatatcgacatccttatctatcataagccattcgccatttttcatttgaaatacgatcaatccatgttgctatggctggacttagttgacgaaatttttctaaattttgataaaaaatatgcttgcaaggagtgtaagctgcctaaaattagttatgaaataacaatttaactatatattaaagttaaataaacgtgaccatcaaatatgaaatcttacccaatntctttaacatttctttntgtntagcatta

SEQ ID NO: 263523 - DNA, 385 bp, Glycine max
  unsure (1)..(385): unsure at all n locations
tatgagatgtcaaagactatcaaccaaacattagaaggagtgactattttcntgggctaagncctgcaggcaaatttccctataggggcacttttacaaagttattcccgagatagggctgttttcaaactatgcaaaccgccagctccattggcgcgtttgctgtggctgttacacgtggcgaagacgccattgccactagcgggttccatggtgtcgcctgccccattggcgatatcgccatgcatggtgagtagccagtcaaactggcgagttccaagcacagggcgcaggcttctcagccttttcaggcttttcagttggcaggctttctcaattggcaggggcaggggtacaggcttaagggaagtagccaatggcattg

SEQ ID NO: 263524 - DNA, 470 bp, Glycine max
ttaagtcacctgcagctgcagcttaactgcaaaccagcatcattttttattatctaactctacatcatatacggtagtgattaattaattaactaattaactaatacatcctaatggttataataacacacatagacgtacttgcatggtcattccatcttcagaaacccataagtaatctgagacccttgccagatgcttcttaaaggcatctccctgtggatcttcaacccaacaagcaagcatacatagaacctgaaaaacatatacatgtttagcatagttgaatgagtttccttcttgaagaggaaactaatttttctcataaggctaaacaatcaaattaatgcattattgttatgacacctaccttttccacacacccaatagttatgtatcgactattctcatcttcgtaatgaatatggttcattagtacttgaagaggcctttctctaattagtttgttg

SEQ ID NO: 263525 - DNA, 381 bp, Glycine max
gacacacaaactcaacttataaggcatattccaataaaaaaaggatttttttaatctattcctatgttaataaagaggtataccatcattccaccaaactatacacaacaggggacccttagacatacatgttgattatacaatgacatctcacggttcattggaagttaattatgcgcacctaacaacaccagttttgtagtagatagtaagctaaaatttacaataacaaggccaaagaaaaagagattacctcctgagaatccaagacaacaggactttcaacaaaggtattttcctcaacattggaagacttacgatgatcaaggttagtctggatatgggttctcctgtcaatgggactaaatcccatactttggt

SEQ ID NO: 263526 - DNA, 425 bp, Glycine max
  unsure (1)..(425): unsure at all n locations
agcttgagatgaggaagtgtagagggtgttctttctgcttttattcgttgaccacagagtggtacctggagatatgtcgcgggggtcaagagaccttggggacgtcaggtggggtgctattgcccaaaaccaagcttgaccaatcccgacccaacccgggcatagtcggtcagtgagaacctgtgatgtacctaaacaggcgagctcctggcagtcaacagataaaaggaacaaagaccacaaagcaaggaggcttgtggtggctggccagctatgaacttgtttgatgtgtgagatatggcctctggtaatcgattaccaagggtgggtaatcgattacaaggcttanaaatgaagacagaaggctaagatggtctctggtaatcgattaccaggggatgtaatcgattaccaggcttgaaaac

SEQ ID NO: 263527 - DNA, 421 bp, Glycine max
  unsure (1)..(421): unsure at all n locations
tgactaacacccagcattctttgtcctaccaaaccattgttgtttatatatacatcaaaatagatttatggttgatgtttagtcagagactaaatataaaattgtcttatagacatatatacaatcaacactttctctttttctcccagtatgtttaaggtgttttgagagttgtttctaaactctacaagaatatacaanagctttttgcacaaagaatgatgaatgtttttcacacgagattcttattctcagtcttcaaaacttttggtttatataggcctcattttcaagtatcaattgtctcaataaggtaaatttcttcacttaatcttcgtctgatgaatatggtcgttgggaacatctaatgtttgcgttaaatgtacgtcctttcctcatgcagagagtccactcttaaatg

SEQ ID NO: 263528 - DNA, 450 bp, Glycine max
  unsure (1)..(450): unsure at all n locations
agtcttcacaaataattattcacattataaccctagcaagactacccatcatatctcccaaaaccccatacccacgaaaatcaaaggagaaagaagtccacccaaacctgaattttcgaagtcccactcgtagccacgcacttcacgacccctaaaatgctctcctttcacgatttggggcaaaaatgagcaccaaaggttgaagctttgtgtggagcttcaatggtgaatgagggaggaagaaaagcaacgtgagggagagggagagagagcttctgaaaatgtggggctgagtgaagagagagagggttgctttttggttttaaataaaagggtttttctctctttctattaatttatttaagcaatgccacatgtctccatttgagtggagcaagaaaggcccactntccctttttgactgtgacccatactcagtcacaaaagtga

SEQ ID NO: 263529 - DNA, 397 bp, Glycine max
  unsure (1)..(397): unsure at all n locations
tgccttcaaactcagctggataagctaagaagtctgctttacatgctttctcccttatgggcattggnnattagttttatattgaatattgcatcttagtccatatggtatcttttgtgcatcatgcatcattatgagtaagtgagaagaaaaatttctaaagttagaaaaggttcttcggaagacaaaactctctgttttaattgattacacaccttattggtaattgattatacaagttgtctgaagcttgcagagttatatctcatatcagnttaattgattacagccttatcataatcaattatagagttgtttttgagacaatgactgatttattcaggagtctctactttaatcgattaccatttgatataatcgattactgcgtttctat

SEQ ID NO: 263530 - DNA, 461 bp, Glycine max
  unsure (1)..(461): unsure at all n locations
agcttagaatacctactgccaattttgtttctcttgctaacaacaattncatttctattaaatttatgttgtcttgtaataaagaagtcattgatatttggcattttcgtttgggttatccttcatatgataggatgcaattgttgaaacaaacttatcctatgttgaattgtgatataacctttgtttgtgatactttccatagagcaaaacagagaaaacttttatttcccaatagtgactcctatgcttctagtcctttctctttgatacatgtagatatttggggtccttgtaccacaactgctttgaatgccaaatatcaatgactttcaagactttcacactacattcacatcagttattactggtcaattcttaggtactcgttatcctttaagctttgttttatcttacgaaaattcgtctcctacataccacaatgttattatcactacatc

SEQ ID NO: 263531 - DNA, 346 bp, Glycine max
  unsure (1)..(346): unsure at all n locations
tcaacctagtcagaaaaaactatgaatccatggctccctcatttacgagaattnntttaagctctagaatgtgacgaactntagttaaggttctaacaacaccatcatgcattctaatttgtatagaacctatactaacatatttacaaggagcatcgttacccatgaaaccacaagactttttaccatatgccacaatccaatgtttgtgtggatacatatgataagaacagcttgagtccaatacccattgttcagagtgttgttgtagttatttaccaacatctagaaccaaaccattttccgttgaggagtcattttgaacaagagtaacaaaaaaatcttt

SEQ ID NO: 263532 - DNA, 463 bp, Glycine max
  unsure (1)..(463): unsure at all n locations
agctagccgctggagctgacccatttacttccttaactccttaaagctggtgacatcaaggcccttaaccttgacttgatagaatctttttccgatttgatttgtccccatcatttacctaaaaaggggtgaatcaaggctctgatatgaatgatgcaatgcacatgcgtgaaacgaaaagaagaaaaacaagtggtaatttacatatacgagaccgaaaaagatccatctttttaatactacgctctaagcattgcggcgccccaacgtatgcattaaaaagtgacgcgttactctaaagagacaagacatcactagatatacaacaaaactataatttatgtgctattcgtagaagaatgcatgagaacaaatggtacagagcgtgcttgctccatgctcctatttgnggacctataagataatatctangggtctctaataactactctcaacgatccat

SEQ ID NO: 263533 - DNA, 368 bp, Glycine max
tgtgcattcaatatcctgatgagggtgttccatatgttctctttactggactaatacatttgctgcccaagtttcatggtcttacaggtgaagatcctcataagcatcttaaggagttccataatttttgttccaccatgaagccccctgatgtccaagaagatcatatctttctaaaggctttttctcattctctagagggagtggcaaaagattggctatactaccttgctcccaggtccattttcaactgggatgaccttaagaaggtgttcttggagaaattcttccctgtatctaggaccactgccatcagaaaagacatttcatgcatcaggaaacttattggagagagcttgttgaatact

SEQ ID NO: 263534 - DNA, 458 bp, Glycine max
  unsure (1)..(458): unsure at all n locations
agccttgatccgcctctatattntttacttttccatcctccctccagataatgagtttctggtgaagggtagatggcacagccccaactccatgaatccattctcttcctaatagcaagttaaaattagccttggactgaatcaccaggaatagagttggtcgaactatactgcctacagcaacatctacttgaatggctcccaaagaatagccagttttaccttcataattcgaaagcacaatgttgtgggcagatagatcagtgtcatgtttcccgatcttgtagagcatagatcgaggcattaagttgacagccgctcctccatcaatgagcactttgttgattccaacattctcaacttttgctctgatganaagaggtttgagatgactnttcatctgaaaatctggcttttcgaaataagctaattgctcttccacacagccattattcata

SEQ ID NO: 263535 - DNA, 432 bp, Glycine max
  unsure (1)..(432): unsure at all n locations
ntntatctttcctttgcactgcatctcatgccttgtatatttcttgaagtaccctcgcattagggtcactgaaatcccatgcgatgaaaggcgtgatgttttcctccgacggcgctcctctcatggggtaaccaagctgtcttatggcatggacgggattataaataatacaaccccttgttcccaataaaggaacatttggaaatccttcgcatgaggaaaaaaccccggttattccttccttccaacaggggaaccaattaatggatgcccctacgacactagccaagagttgctcccaaatttcctttcctttctctgcacataagcggagaccttgcagatgataagtgggcctactctctagacaaaataaggtgcgagacaagccatacatagagagccagtgtattagcaacaattcttgggcgg

SEQ ID NO: 263536 - DNA, 459 bp, Glycine max
  unsure (1)..(459): unsure at all n locations
agctagtccactcaatatgtcttcaaatatattttgtcatatacatgttcaggaatgtcaagaagctcatgttttttagttgtacatccactcaataaagcatcaatttattttcttccctaatttttttatttattttctgattagaaaataaactaagaaactataggagaacagaacttacataataataataataataataataataataataataaaacaaagcacacaaaaagaaacttgattgttgaatgtaatcaaatgtaataataacaaaaatatgatacaatgattcaacaattaattacgtgtatattaatatttaatgaattgttatatatagtaatcaattattatatgttaataaatgtaacgaaagccataattttntgatgaatcatcgcatgttacgatgatgtgactggataacaattaaagtaattaacaaaatcaatg

SEQ ID NO: 263537 - DNA, 409 bp, Glycine max
  unsure (1)..(409): unsure at all n locations
cattacggacctataaaactaagcttgattgtcgtctgatggcatgatgtaggttattttttgtttaatagcgtaggggttntgattcgcatacaatctatgccattatgccatgtgttggataggatttggtggtctattaaaggcctaagatgagggggctgaaaaagccccattttttttggaaatggcgatgaacgcactaagcgtgtcttgctacgctaagcgagttcatcactttttgatgaatatatggatatccagatgaactcgctaaggtggccctgttctgctaagcgagttcaccttttatgatgaatgattgaatgtttatgatctccctaatcgcgactgtgtgcaaagcgagtaattgagtttagacacttagaaaaattttcattgctttcat

SEQ ID NO: 263538 - DNA, 409 bp, Glycine max
  unsure (1)..(409): unsure at all n locations
agcttgctgatcgagccatcaaatgtgttttttttggatccttcacgatacagaanggtggtcgatgatactctcctgttcacccacgttgttatatctctgcataagcaactttctttgaagacaaaccatactgcgctccatacatggttgaatcaaagtctcttcaagaagaagttcctatgtcctatctagatccatcacctctcttgccagaatcagaggctactgtagacactaccatacatgttcctaacaatcttgcactagaacaaactcaaagatcacacgtcatatattgacgtcgtactcgaattgctgacggataacttgattgtgatgaaagaccagctgtatcatgatctactcctgcttacaacccgaccatggacctacgcgaagagaatct

SEQ ID NO: 263539 - DNA, 350 bp, Glycine max
ttcatgtcttagactgtggatgatgcccatccatctttagtttgataagagaaagctactagaagattatgttaccacaccttgtgtctgtatatccttgagtggaatttatttgattggcccacttaaatttagtgcggaataacgctaccgggactttgtctatgaatatgcacataagggaaaaatttttttcatatcagaattgggccctctctaagaccctctccaaaaaccataatcactctcttgcactagatttgttgaaaaaaatgatcatagtcaatgacaatatgttgaggagaaatatgcacttaagagaatatattagtatatctatctaaacgttc

SEQ ID NO: 263540 - DNA, 454 bp, Glycine max
  unsure (1)..(454): unsure at all n locations
agcttatggattatagcagttcatctgtatcntctgttaaagagttggggggtgttgagcatttggctcaaagattacagatagaggttcatagggtcattggttttgctggagagaatgataatgtgatgctcactggtgaaagctcaagacatagtactcatcagctttactctcagaagaggctgataaaagtgtcccttaaggcccttggttctgcaacatatgctcctgcaaactctaccagatctcaacactcccatgacagttcattacctgcaactctagtcatgatttttcagaatgtaaataagttcggaggtgacatttattactcagctgttactgttatgagtgaaataatccacaaagatcctacatgcttctcttctttgcatgaaatgggtcttccaaatgcttttttatcttcagttgcatctggaattcttcctca

SEQ ID NO: 263541 - DNA, 408 bp, Glycine max
  unsure (1)..(408): unsure at all n locations
taaatataaatggaagttcagagttcagtgtttttctgttctatccacacaaaatccattatcatatcctttgcactcttctacctttataatttgntttctatgaaaacaaatgtttcttttactataaagaaattataaaagataattgcattgttttctaaatattttaggctgtacaactgacatgtagattggaggttaaagaaatagttttatgatgtcagtaactagatatctgggtctgatgccttcttgtgttttttttggtttgtcctaagggatctgagtctactagattgttgagcttacagttcataaggaggcttttggttggccttcctgctgagaaaaaggggtcaagattctttaatcttcccatgggaagaaccagatcaatttcagata

SEQ ID NO: 263542 - DNA, 433 bp, Glycine max
  unsure (1)..(433): unsure at all n locations
agcttccgttggtcagntctgagcgtctttatatngtgattgcctgaatcggacatccgtgtgaaaagttatgaccatctgaatttcacgagagttttcgatgtttaatttcgagcgtatcgatatattataagtctgaatcggacatccgtgtgaaaagttaggaccatttgaatttcacgagagcttcccttgttcaatttcgagtgtcactatatgtgatgcgcctaaattgaacattcgagttaaatgttatgaccatttgtatttctcaagaccttccgttgttcaattctgagcgtctcgatatgtgatttgctcgaatcggacatccgtgtgaaaagttatgaccatttgaatttctcaagagctntccgtgttcaatttcgagcctctcgacatattatgcgcncgaatcggacatccgtgtgaa

SEQ ID NO: 263543 - DNA, 387 bp, Glycine max
tatatatatcgctacgctcgaacatatttatcgtaatttctcgagaaatgcagatggccataacttttcacacggatgtccgatccgggcgcataatatgtcgagaggctcgaaattgaacaacggatgctcttgagatattcaaatggccataacttttcacactgaggtccgattcacgcttattatatatcgacacgctcgaaattaaacatcggaaactctcgacaaactcaaatggtcataacttttcacacggatgttcgattcgattgcataatatgtcgacaggctcgaatttgaacaacggaaggtcttgccaaattaaaatggtcataacctttcatacggatgtccgattcaggctcataatatatcgacccgctc

SEQ ID NO: 263544 - DNA, 467 bp, Glycine max
  unsure (1)..(467): unsure at all n locations
agcttaagctccttcaactgcacaaagctcttatatatttaagagtatccttgnggaaccttcacccgacgaagacactgacaaaaacttatcttctccttcttggacaaagtatggcaggctgggggcaagtaatatttcttcccatcaaaccttggatgcaactgtgatcgtatacccatattagctagatcttgacgggtattcaagccatccttcgtcttgccttgaatgttaaagagcgtcccaatcacactatcacaaacatttttctccacatgcataacatcaatacaatgtctaacgtcaagatcacaccagtacgtaagatcaaagaaaatggacatcttctttcatatgcaactctgacttttatcctttctttgggtcttcccaaatacaatattcaagtgttcaacccgctgatatacctgctcaccagtcaatggtatcggcgcaatatcatg

SEQ ID NO: 263545 - DNA, 434 bp, Glycine max
  unsure (1)..(434): unsure at all n locations
actaagcttaagttgccagtattcatccttgagagttgttatatttttttgatcacgaatgccattccttggattataggggtgaaccaagctcatgcttntacaaaaaggttcatcaagtcaagttgaaatatgtgaagaaccgtcttgcgaaattggggcaaaagatgaattgagtcacattactgcttcctctactgccaaacatatttacgattattgatggccttggtacttccagtttcaccttgacaaagatgtcatggaccatgttgaaaatctaaattgattcaaccgcatatcttgcgtaaaaattcgcaataatccaactgtacatcattcgcatgcatccatgcttttcattgcgtgcattgcttcgtgcattcttccttgtaaaataaataaatgaacttatcttggtattaaaaaaagga

SEQ ID NO: 263546 - DNA, 439 bp, Glycine max
  unsure (1)..(439): unsure at all n locations
agcttgttgcggatcaagttgatctgcattattatatgtatcaacttaaaccgcaagctcngtgcggatcaaaatacattacgaatcatctcattccattatngcggatcatctcattccatttgcggatcatctaaatccaaaactacctctactgcggatgaccccctaaatccctatgcaccctaaaaactacactacaccagcaaacatggaagcacaaaagcaatggagaagaacaagggaagaagaaaggaagaagaggcttacctcgtcgtcaatggagcagcatgaacagaagaacaacgcgcacagccgaggtgaagaccaccaccaacatgccgccaacaatgctgaacaacaacacgcaccaaaagaacggtcttaacaagcatgccgacagccaaagaacgcgcagaaagtgaagtcgcagttgcgt

SEQ ID NO: 263547 - DNA, 253 bp, Glycine max
ccttctcttccattagcgcgtcctcattcttctccatgtatctcctcacatgtcttgtgataaatgtcgtaacatgattctttagaatttccaccgattaaacttgctatagaagctagattttattgtctatggtacaaatttctcggtcttgttcttgaaccatgaattgtgtggacgatatgctcctttgagttctgtcttgttatttcttgtggctgaaacctacaccatataatctctacagaaatat

SEQ ID NO: 263548 - DNA, 462 bp, Glycine max
agcttgagggtgagaaagaggttggcttattctctttaagcgctaagcctggcacaatggacaacattaaaaacaataaatgtcaattaaattatgtaggggggcttagcgtgataaggcatgctaagactacacagtgacaattgaaaagatgcatagcttatcgcgacgtgtgcagttagctaaggcatcagacacgaaagggcattggggcttacccctacaactatgaaacaaatatgaaaccaaacaaaaaaaattggtttaaccttacaacaccaaaataaccaactaatgattaaagagcgagaggtaacaaaaaataatgaaatgaataagctaaagaagaacaaggatgcttacaatcctcaaaaggtaagaaaatatgagtaatgtttgagaggaacgacgaagacgatgaaacatatagggtagaggagagggttcatagaggagagatat

SEQ ID NO: 263549 - DNA, 435 bp, Glycine max
ccttactcatttccaaatatgcatgtttattatgacgcatcaacaagaatcaagccaatgctattgtgcaagcaatcaatggggcaaaacacaccaaatgattattatgatggatggctcaaattcttacaaaggtaaaatcatcacttttaaattgagctttcaaaactatcatgacatgtagagaagaatcaaggatttcaagtcacaaaatgtcaagaacttttattttcaaaacaattacccatttcttgaacatatcctataattcaaagaaaaacatgcaaagtcgtacgtgcacatgaaattgacccaaaatattaaactgaatattcgacgaaactaacaactttaacaaattacacaactaacaaattatacaaaccaacaaacttgcaaaccaaaaacactcccccccccctacttaacaacaca

SEQ ID NO: 263550 - DNA, 361 bp, Glycine max
  unsure (1)..(361): unsure at all n locations
atatcgatcaacnacnacnaggataacggtgaatccatgcgatggcaatatacgaataatgaanttcatcgataggtctttccatactccctctgggattggtaaaagttgtaggagccccgccagtcgtctggtactggccttggtttgttggcaaaccttgcactcccttacaaaacttttaacgtcttggcgtagtcctgaccagaagaaaccggactcgagacgatgagtggtcttcgcgatgcccacctaaaggtgtagcgtggtattcaagtgggagagatggaatgccaaggttgcccttgttcaactagatgcgccctaggaataatatcaggtcattatggatgcgatattc

SEQ ID NO: 263551 - DNA, 407 bp, Glycine max
  unsure (1)..(407): unsure at all n locations
tnctatgattactttgcacaataagaaaacaccatttcttctttatttgaatgctnanaccataattaataattactaaataaaggatggaagaacanacctgcgctgcaagaagagggtggatctttctgcaagtccttgagcactttcaagattctctttgaagccatcgatatgatgaaatttatgcttcaatcagaatagaacctgcaatgcaaagacccccggaatatgaaacaaatattcaattatagaaaaaaaaacaaaaaaacaataaacaagagatctcatctctcataccaagggagctcttccttaatcttcccaaatcccaagtcattgtgtgttggtagttcgtcccaaaccaaacgctcgtaacataaatgacaacctatcatttttctttc

SEQ ID NO: 263552 - DNA, 420 bp, Glycine max
agctcgacaaccggagaagacagatcatttttgtttcatatgggacaatgacaggagacagcaagcactaagtggcacagaccctccactccagataggtacaacattccactaggcaggtatacaacatcatgctgctataaccacttccaattctgatagaacaattagcacaagcatatcaagcagcggaatgaataaaggaatgagaacaatcacctcaattagctctccttaggtccttagctggagcagcagaaaagagtagttattcgtatcacacattaacaagtgcaaatcagatatggaggctagtagacaactcgaagaacctctcagctgctcaatatatggaaataaacaaccacttaaactctgtgcttcatcaagaagagcacatgtaggaagcaaagggcgaaa

SEQ ID NO: 263553 - DNA, 477 bp, Glycine max
  unsure (1)..(477): unsure at all n locations
cttaagcgactgcagcatgcaagcttaagaaggtaaatgaatatgtaatgttttgtttcaagaaatgcatcaaccctggcatagaggctaaatatggaagacataccttgtcataaatcacacagtttaagtatccaaggttgtccattacacaaaacaataaagcaatcttcatatttattagtgggtgattgtaatcttgagattgagaatctcaaggggatcttgtagaaaggttctacaagaggttattatttttcttatagggttctagaaacttaaagtgtgtgagcaaggtgtttgagtaattctctattttcaattttgagattgcaaaaaatttgaattagtgaaaactcttagtttgattttgatggaggtctagatgtagctcgtagtgatagaaaataaaccaatataagaaaaattgtcactctgttcctcccttctcttatctctcgataatnggcatatagt

SEQ ID NO: 263554 - DNA, 365 bp, Glycine max
  unsure (1)..(365): unsure at all n locations
ntaagttgctcatngactccaaattggtgcaaatatatgttatattttgtngaaatggatgatttgcttcacaaagcaatccaagtagagcatcaattaanaaggaaaggagtggctaagaggagttctaccaactttggttcttctagttggaaagacaaaggcaagaaagatggggctgctacttctagtagttccacacctaccccatcaaaaactcgttcgaagtcccaagaggaaccctctaataggagtagagatgtgaagtgtttcaagtgccaaggcctacgacactatgcttatgagtgctctaacanaaggtccgtggtacttatagatggagaatatattaatgaatcccatgt

SEQ ID NO: 263555 - DNA, 449 bp, Glycine max
agcttcttttaaattattgcgcatttatattctgtccaatgggacgatgattgtcaaatggcatttgaaaggattaaacggtgtttgatgaatcctcctgtgttcatgccaccggtgcccagaagacctcttattcgatacatgacagtattagatgagtcgatggggtatgtgttgggacaacacgacaaatccggaaaaagggaacgagccatctattacttgagcaagaagttcacagcgtgcgagatgaactactctttgctagagaggacgtgttgtgccatggtgtgggcaactcaccgtttgaggcagtatatgctgagttacattacttggttggtgtccaaaatgaatcatgtcaagtgcatctttgaacagcccgctctcactggaacgatagctcgttgcaggttctattgcaaaattcaatattgctactcactcaa

SEQ ID NO: 263556 - DNA, 372 bp, Glycine max
  unsure (1)..(372): unsure at all n locations
tgttgaganattgtacaaacaagagggaatnggtagatttgctattactagatttgccacttcttatctaaccttggaaaggctccacacagagaaagccaatattataaagatgtttatttctaatgaatggatcttaaacaagttatctaaggagcctatgggaaaagaagctacaaaggtagagctcatgtcttctttttggaatagtgtggtttacactcttaaagacatggctccacttgtcaaagtgcttcgtcttggggatggtgaaaggaaaccagccatgggctatatttatgaagcaatggacaaggcaaaagaaacaattatcaagtttttaacaacaatgaaaacaagtacaaagatgtg

SEQ ID NO: 263557 - DNA, 427 bp, Glycine max
  unsure (1)..(427): unsure at all n locations
agctttancaaaaacctgagaaccattgttagtttatatcccgcgagncntattcaaaacttgtcactggtaatcgattatcaaaaccatgtaatcgattacacaaagctttttatgaaaggatatgaatcttcacaattgattttgaatttcaacgttcatatacactggtaatcgattaccaatacctttgtatcgattacaccattttgaaatcaattggaacgttacaaattcagttgaaagcttttgaaatcaaactttgccactggttattgattacaggaaactggtaatcgattaccagagagtaaaaacttctggtacttagaaaattttgagaaaaactcttttgaacaacacaactgtgctatgttttgttttttgaaanatcttttcaatacttcccttgtaagtcttcttgatt

SEQ ID NO: 263558 - DNA, 426 bp, Glycine max
  unsure (1)..(426): unsure at all n locations
gcgtagntgccttgcggaccataacccttttaattatattaattgngcttntctattggtgggtcttgttctattaccgaatgtgaatggtcacttgtgttgctagctacaaaataaaaatttaatttcttaataattataaatttataataataataaaataaaataatatattantttaatttgatgagttgacgggttgatccaccaatccatgggttgagcccacctaacccacgggttaagtgggccggactaaaaaaattgctgataccaattttattttttttaaattgagctcgacccactctattgcgcatggggccgaaacccataataacggcgctatggtgaacgtttgtaatcttattaaaagaagaaaataccaacttaacaagagagacccctttttacgactattccgag

SEQ ID NO: 263559 - DNA, 422 bp, Glycine max
  unsure (1)..(422): unsure at all n locations
agctnttctttcacaatcaaactgtttattgttttacaattctaaatgcaagttcacattcttgttctttctttatctaacatacacacttgctcaaactcatgaaaagaaacacaaactccatcacaatcatgcactcaattcaaaataaaagcatacaactatttttcacaaaaagataacagtgtttcactgccatgtcataaaaaaccaagttaaactgttcaaaatactttagaataagcaaactaactacccataaataaaaatagcagtgtatgtagacctaaaggaaataatgtacaaaaaaccaaaattataataataataataaatcaaaaagcaaaaagtatcatcaggaatcaaaattcctgtgcctgtacatncctcttatctgtcagatgcaatactgaagtagctgg

SEQ ID NO: 263560 - DNA, 442 bp, Glycine max
  unsure (1)..(442): unsure at all n locations
tcgaagggaagagagagaccgatcacgagcacattctttttcttattagaagagatagccgcttgctcaaggtccaaaaggaacttgactcagcgtttgtgcgagacagagaccaacatgttagctatcattaccaagtaccaagaataactaagtctagccacgacccatgagcatatggtggtggacgagtatgcccaagtgtacgcggaaaaggaggctataggaagggtgattgactcattacaccaagaggcaaccatgtggatggaccgactttctcttaccttgaacgggagtcaagaacttccccgattgctagcttaagccaaagcgatggcggatacctactccgccctcgaggagaaccaccgactttctcactatttgcagcatatgatataantaatggcccatattattacgaaccgctaaggaactt

SEQ ID NO: 263561 - DNA, 449 bp, Glycine max
agcttatgtttgaacaaatgattatatttttcttttacaaaacatacagggtcaacatcttctttatcttcaagcagtaattctttgcccttgtagcattggatcttcttatataagataggcttatcaacataaatttgaaggcgagtttctggaatggccaggcaagagaattatgacctagcatgaaaggcatttgagtgttgaacttttggattcttcgaaaagaagcttgccttgatctaatctattctctatatgcagataacttcattctcaattttggcccatagtctaatagttcccaatctgaaaaatttagactctctttaagttcctccaacaaagatgtcttcagtctagaaggttacgtcagacttagaatgatcccattgaagaacaacattgaggtacattcaagaccataactgttgaaatccagtctacta

SEQ ID NO: 263562 - DNA, 367 bp, Glycine max
  unsure (1)..(367): unsure at all n locations
tgcatagagganactgattcagcgtgtgtttattgctattatcaaacgctatgtcagaatattcattacaagaggtgcttccatgttagttttagctttaggtgctatggatggttcttctttttcttgtcattttttccctacattagcttcatgtgaattatttgtccaggctattgatcttctacagaagaaccaggataatgctaaagccagtttagaagctcttgctgctgatatgcaattcttgatgcaggttttgatgatgcccaaaataatttacttgataatggttgtcatcatcaaaacgggagagaatttgaatcatgcaagttttgatgatgctacaaagaaattaccttgatat

SEQ ID NO: 263563 - DNA, 449 bp, Glycine max
agctagtgtcagccccacatgggtggagttttctcgcaaaacagcgtgaccctgactggtctccctctgattttacctagagagagtgacctgacttaccagtgtgtggtttgtcttgtcatgtactcatgggcgtctaacgaggtttttcacttacatggtaccacattgcatataagattgagtcttagtatatatgttgcataacgcttgtgtatcgattgatattgattgattggttgagtgatattgtgtttgagcattgagtacgtgaatgatgtaaaaataaattacgcatgttgtgttgaggtgtagtgttacgcaacaggtggtggaatgacatgaactatgtttaagtaagttatatttcatttatatgatatgtatatctatgctttcatgtctccctatattagttaggaatgtgataaatcactcctcgtgtgcta

SEQ ID NO: 263564 - DNA, 403 bp, Glycine max
  unsure (1)..(403): unsure at all n locations
atgaaactacgctatttaactatgcgaagctatatttctttgcttatttcatncattttccttcttgttactctttagaagtgctgttaacaagtttatccaatggggccttaataattgctactttctttttttttaacatgttttgttgtgttgcgagtttatggttcagttttgcaggggggtatacaaaacatgcttgagcgtagcttaaatcttgcacaaacaatttttggagatattcttgcttgggtgggtatttctgaagataacccttttctcttgctttattgatggcttgcctgagatatgctgttcactggcctttgtccaattataactattataactctttgtcgcaaataagaggtgtaaggactaattttttgcttcatagtccctt

SEQ ID NO: 263565 - DNA, 390 bp, Glycine max
  unsure (1)..(390): unsure at all n locations
cttcaaaacccttcacatttatttgcgtggattgagtaccctcacgagggggcaatgtggtcacatcaagcccctccaaagctgatgttaaatcaatactagaaagatcctttggtttcttgaacccttcaacaagctcttgtggcttgttaattgcatcactcgcggcaaaaagatccttttacacctgagaatcatcctgcttctgctgcggctcctcctgaagctccggcgcagcggaggcgaggctggcngcgacctcgtccccagccttgagcgtctccggcggcaattctaaagtcgcggtggtgaatgcgtcgatgccggcctggtgttctagggaatgcacctccgctgagggccatgtttcggcgcagcggatcttgttct

SEQ ID NO: 263566 - DNA, 337 bp, Glycine max
  unsure (1)..(337): unsure at all n locations
aaggccacttacattncgntattccatgaatagagcccttacacttactcagcagggggcttaaatctaccgaaattgcacaacgaatcggccctaactacgaatagatccgaatggaatgtaacaccaaagcgtttatgaagacagctaaaattggttggatcactgatgtggtaataagtaaaccaaactagctaggtagtgcctacaatttaatgaggatcgccttattaatgtacatagatatatctagcttcgcatgaccatgtgcatgttcaaaactagggtatgagaaatcaaacatcactttccagaataactattgctcactaatgga

SEQ ID NO: 263567 - DNA, 427 bp, Glycine max
gcttctatagaaagttcgttcctaatttcttactttagcatcacctctcaatgagttggagaagaagaatgtggcatttacctggggggaaaaacaagagcaagcccctgctttgcttaaagaaaagcttactaaagcacctattctagctcttcctgacttttctaaaacttttgagctagaatgtgatgcctctagagtgggaagtggagctatattgttacaaggtgggcaccctattgcttattttagtgaaaaacttcatagtgccactctcaactaccccacttatgataaagagctttatgccttaataagagcccttcaaacttgggaacattaccttgtttccatggaatttgtcattcatagtgatcatcaatcacttaagtacattataggaccaagcaagttaaatagacgcatg

SEQ ID NO: 263568 - DNA, 352 bp, Glycine max
tactaagccttggtgtgcattattgaactgtgaaaatgtaaattactgttttctatttcacattctttacactgcattctaagcacccacgggtttgagtaaaaaaggggccctatacccgggttcatgggaatttaaggagtgaaggtgaatctatcatcatgctaggtctccggcttgcttgataatagtgaaacctcgtctagagctttctctctttataatgtgttgtcgctggtattccataccgccacaatattattatcttgagtgatgatacctctagaaaacagtcgtgtgagttataaattgttggggagtagttattagagacccctagatattttcctat

SEQ ID NO: 263569 - DNA, 451 bp, Glycine max
  unsure (1)..(451): unsure at all n locations
agcttatngaatagttgtaacactctaatattttctttatttaacatcatcagctctcatgcgtctagacgcttctttataacttctatggagacaagttttggtgttccataaatctcttataaccatctaagcttgtattcatttgttgtatcaaattgagcagcaaagagttgttcatcaacatcagacattggcctaggacaaataagagtagctctaggatctgtctcaatgatatcctcgtttgcttccacaagagatgcttcaatgattgactgaagcatggcttcttcaaaagcttccctttcagcaaggtccatgtctttacgagtagtggcaacttctatttttgcttgtctttaagcaagatctagaaacaagaattgtgtgcaagttttgcttcanattgagctcactctagttctttcatctaagcattcttcatctc

SEQ ID NO: 263570 - DNA, 184 bp, Glycine max
actagagacaacgagaaagaactgggcatttttccttttaagcaatgatattctgcacaaatgtggagatgaccactctaataaatacggtcagaggggcatgctccaggcccacacggcacaacaaaatactcacccagtacgagccttcaaaaaaaaggaaaaaccgccaaaaatgggggac

SEQ ID NO: 263571 - DNA, 458 bp, Glycine max
agcttatcatgcgtcatgctaggctttttttttttacacaagattttcatgttaaagagaatttattagccactatgaaaataatttttttttaaaagggagagattttagtagccatgtgacagtcacaatattttgaagaagataaatgatcatttacgaactcattctaagaaaaaatgtacacaaaaggtcatgatgtcgatatttttgctaaaattttagttttcttttattattattttttatcaaacaaagatcaattttattaaaataaaaaaatatgtatataaatagtactttaactcttacatacttaatagagaaactcagtcatttaatcctcatatatacaaattaacttgcatcatacaaagtataagacttaccaattggaaaacactctactaacatcatttattaaagttgagaagacatacactgtatgatatctttta

SEQ ID NO: 263572 - DNA, 449 bp, Glycine max
  unsure (1)..(449): unsure at all n locations
ataatctagctgagataaactttcagctattatcttcatcttatttttctctctaactntntagttttctcactctaagaagtggattcactcttgtcttggatggttatgaatgaaagctcctaccattatttatactactccacttccacaatgaatggaggagattacttgtatcctaaagtgaatatttattctctagaatgctntgcacattctattagtttctacaattttctatctccttccatatcctttcatactcttctataagattctagaaagtttcacacatctccataatagttcagaggttttcacatttttccataagtttctaatgaaatctacaccactctagaggtcttcaaaacatctaaaaaaatctacattcttttataaaggtctaaaatctcctggacctatgtgatttaaatatataaaaattt

SEQ ID NO: 263573 - DNA, 251 bp, Glycine max
aaaactaacgcgaggcctaaacattaattattgacgaaacctcgccaagaatccccattgaaaaaccttaaatcaaacctcccaaagttagtgagaaggccaaaagaaaaattagggaactcagaaaaactaaaaccttaattgaaagcgtacgcgacaaccatagtgaatcactaaaccagatcggcagtatacttaaagtcattccagataccccccaagcctcggaaaatacctccaaaatggcaaca

SEQ ID NO: 263574 - DNA, 368 bp, Glycine max
  unsure (1)..(368): unsure at all n locations
ttctaattgcttgccaattgtcaaggcaaggaatgtattctgatctcttagcngnattacaaaggttccagtcatatgttctgctgtcaatagaaaccgaagacttctgtgattccttctcatgctgtgactttgcagcttgagttgaccatgttccattttcagtgctagtttcaatcaaagtttctgatggggtaccagcaatagaaacttcttttaaagctggattgctttcatggctttctgtgttactccctccagnactttgtgttgtctctgaatgcagattattctttattttctcctcctcagtctcaccaaccatcctatcttggtgtgtgacttcacccttactcttttctgtccct

SEQ ID NO: 263575 - DNA, 445 bp, Glycine max
  unsure (1)..(445): unsure at all n locations
agcttctcaaggaagttntctcaatatagtctttcaaggaagctacctagtctataaatagaagcatgtgtaacacttgttgtaactttgatgaatgagagtcttgtgagacatacttcaaagttccacttctatacctcttttattccttcaatttcgagctcccccctctctctttctctccctctttcttttcctccattgaagcatcctctccaagcttcttatccaaggctcatcttggtggtgaagctccttcttccatggcttattccttaatggatggcgcctcctctcacctattttcctttgtcttccgctgcatctccatggtggaaaatcaccattaaaggaccccattgaagctcaaagatccagcctccatagaagctccacaagcaagcttccatcaagatgtcttattgagtcctcgtatatatcgaga

SEQ ID NO: 263576 - DNA, 321 bp, Glycine max
taaacattcactttcgagcctcacgatatattactgtatcttttcaaacatccgagaaaaaagttattgtcgttagaattggctcagggctccaactttcaatttcgagggtttcgatatattacgggactcaatcagacattcgtgctaaacgttattgtcgtttgaattggctcacaagttcaacattcaatttccagcgtctcgatatgttacgagacccaatcagacatccgagtaaaaagctattgtcgtttgaatttggtcagagattcaacattcaatttcgagcgtctcgatttatgaccggacttcatctaa

SEQ ID NO: 263577 - DNA, 367 bp, Glycine max
agctagccacccagctcgcccaggctagttttggtgcttcctccagaagcaacagccttctagaggaatcttctggaaggcccaagtgggcctggttgctatttgcacccccatttttactaagtacaccccccttgcctttttttttgtgattcttttttcgtaaagttacggaaacttacgaatttcgtatcgatacttgttttctttccataatgttacggaaccttgcggattacataatcatcccctttttgacttacggaatgttacggaacctcactaattgtgcaatgatgcttccatttgagttccggtgtgtcacggaaccttacggattgtgcataaatatttgtctcttgctttc

SEQ ID NO: 263578 - DNA, 442 bp, Glycine max
  unsure (1)..(442): unsure at all n locations
tgaagggacacccacatttcctagtctcagnatctcttttatcttattctttcttcctacacctatactcaccactcctttcataaccaattagcacaaacgaagtctttcctctactaccagtgtttgtgtcagactttataatgaccgccacaaatccattttcatgagccacggatcaagcccatgcaaaaaatcatcttagctgtcaaacacctacaacacaacccagacaattttagttttccacaacacattcattatattaaatcactcacaataatgaacattattacctgagaagtattgaacgcatccgagcaataaactttggggtcattcacaccacattcttggtcattttgatcatcgatatccacttattttggcattatagtggcatacattcattggacttcgccatcctaaccataaataaaaa

SEQ ID NO: 263579 - DNA, 419 bp, Glycine max
  unsure (1)..(419): unsure at all n locations
agcnttgcggattaggtcttcgccagtgatatgatcgatgtgggtccgaaaagaggcaaatttgatcatcctactaggacgactgagaaaactggggcaaatgaagagggtgagaaagagggagaaacccatgctgtgactgtcattcctatacggccaagtttcccaccaaacccaacaatgtcattactcagtcaataacaaacctcttccttacccaccacctagttatccacaaaggccatccctaaatcaaccacaaagcctgtctatcgcacttccaatgacgaagaccacctttagcaccaaccaaaaaacaccaacaaaaaggaaattttgcagcaaaagcctgtagggttcaccccaaattcccgtgtcatatgctaaactngatcccatgtccactcaataaatcaatg

SEQ ID NO: 263580 - DNA, 353 bp, Glycine max
  unsure (1)..(353): unsure at all n locations
tgagatgaggaagtgttgaagggtgaaacttcctgcttttattgttgaccacagagtggtacctggagatatgtcgcgggggtcaggagaccttggggacgtcaggtggggtgctattgcccaaaaccaagcttgaccaatcccgacccaacccgggcatagtcggtcagtgagaacctgtgatgtacctaagcaggcgagctcctggcagtcaacagataaaaggaaaacaagaccacaaagcaaggaggcttgtggtggctggccagctgtgaattntgtgtaatatgtggattgtggcctctggtaatcgattaccanaggtgagtaatcgattacaaggcttaaaaatg

SEQ ID NO: 263581 - DNA, 459 bp, Glycine max
  unsure (1)..(459): unsure at all n locations
agcttgtagaatggccagacatgatacatgttagggtttgggttggttcaagggtaaaaaggatgccccacattatttccatgacacaaatgcaaaaatgatgatttggaaactttatgcaaaactggtcatgcatgcacctatgtggacactcaagtgtcaaatttttatggtcatgtgatgctagggctcaggattcattccctctattttagtcaacccaatgtttccaaaatatgttcttttatccatttgtgcattcatccgagtccattttgggcgtccggggaaatttcacagcgttcacccttcgggtgtacacacatttttttcaaaaaccagctatgatcggtgaatttcccaaagaagagttggaagtcatctcatttcaaaagcatgtcggtttttcagctaaacaacttatttntcttttatttntcctctcttttttcttactag

SEQ ID NO: 263582 - DNA, 392 bp, Glycine max
  unsure (1)..(392): unsure at all n locations
tgtaggattatggggtatccatcacatgtggttttgngtgtttgtcgggcgaaggagcacaacaagntttccacgtccacaatgcgcgcataaacccaccatcccctgttgcccacctccatctgagctcacgtactcccacgtagcccatatcctcgtttctctcaacaccgggtccccatcaatcctcccaagcttccacaacatccaagcaaaacaacattcaaacagcacaagctattacagtcaagcaaaacagggcaaaggcaaaaaactctgctcaacacaccaaccaaaatcacagctnttctcacttaaagaccccagtaacaattccttcgatccaattcggttaccgttggatcgacttcaaaattttactggaagtctat

SEQ ID NO: 263583 - DNA, 356 bp, Glycine max
agcttcttagctcgcatcgttaacttcttttattcagcacccgtacatcctagagtgcccgcccccatccagagggaggccccccaagctccggctccaaccacgactcgcctggccggcaatgcccactttggtgccgattccaatgcgatgagaaacattcccctgaggccaattctagaattcaccccgatcccaatgacgtacgaagacctcttgccatccctcatcgccaccgaaaaatgcttggcccttaaatacaaggtccaacatttgatagacgccagatggctgacgtttcaagaggatcggcccaacatgaaaataaacccgctcgccaatcatagagggggagt

SEQ ID NO: 263584 - DNA, 355 bp, Glycine max
  unsure (1)..(355): unsure at all n locations
tctcccncaattttctataaatagcggtatatgtgaattttataagggttcagccccttaggcacttctctctctttcgaatatgcttagaanaattgtttccgtgaagaaaattcaagccgaggcgcttccgtaacgtttccgtaacgtttccgtgagtgatttagcgaaggtgttttccttgctacctctatgcaaagtatcaaacacggggcagcccaaattcaaataaaaactctcacaagcaagtcctaattttcatgcttttctaattctaaaaccaaattttggattcctagccatgactatgtcttcttgcatttgaactaaaaaggttgggttcctaagcttaaaa

SEQ ID NO: 263585 - DNA, 400 bp, Glycine max
  unsure (1)..(400): unsure at all n locations
agctttgatagaggtaagacttcacaacctctgttttttttctttcatcttcttattccttgaacaagtttcattatgagtcttgatttaggcatgttcacattgttttttcttttgttacttggtgatatatgatttctatcaatacttttttacatgtcattataactattatatctagatagctttttcctattactagctgtcctatggtgtgtagcatccactcatgcaaattataatgaggtgaatgtacaagttcctacagattcaactcaagtagaagctaacaatcaagaaaatgaacatgaagaacctattgtcgggagaaagaggaaanaaacttcaattaatgtgacgaagacttttaagaacgctatcacgtcacgctacactttta

SEQ ID NO: 263586 - DNA, 327 bp, Glycine max
  unsure (1)..(327): unsure at all n locations
gggactcatgaagtggaagccgaggactaagcggattattccttcttgttgncaccaacgtccgtccttacggtacaggtgagatcaaaagcgactccacaaacaggagcttcaaggtcaatggacaccgacttaagccattcctcacaaacccttcattagtggacgcagtggtggaagagacttccttactccaccctactcttgctctaccatgacttagggaatagttctgtcctatctccttctttactatcattacatttggtcaattctatacgatgggtcaactgcttttaatcttttaattgtgccacattgaggaca

SEQ ID NO: 263587 - DNA, 437 bp, Glycine max
  unsure (1)..(437): unsure at all n locations
agcttcttatccaaagctcatcttggttgtgtttcttcttcttccatggcttattccttaatggatggcgcctcctctcacctcttttcctttgtcttccactgcatctccatggtggaaaatcaccattaaaggaccccattgaagctcaaagatccagcctccatagaagccccacaagcaagcttccatcacttgatctctctaaagcttggcccattcattagttggatgttaaaaatgcctttttacatggtgaactaaaagaaatagtgtacatgcatcaacccttaggttttaaagatcctgatcatcctaatcatgtgtgtctttttcaaaaatcgttgtatgggctcaaacaagctctaagagcctggtaaaaactatttgccgactatgtatcttctattgngttctctcagagcangtctgacaac

SEQ ID NO: 263588 - DNA, 423 bp, Glycine max
  unsure (1)..(423): unsure at all n locations
tctgcatgtctagggttntctagagaaagaaagggccttgttttttattgtttgagtgattntgttgggtgaagatccgcagagaccagagcgtgaagaggaagccgtcttgagagcttgagatgagtttgtgagtgattgtgaggtcctataggtggaggagacatccccaccacttgtatttcttcaatccttcatctttctcttctctttgatgtaaaggaagcttcccagttatggagagctaaatcctctgttggttcttccttttaggtacttgatgtaaatatctggatatctatctaatgatgctttgtgtgttcactgtgctatcagaacttcattctaccatgtcgttgccttgatcacttagatgcatgtgtttgtagaatcattcaacactggaaactggtctgattctta

SEQ ID NO: 263589 - DNA, 406 bp, Glycine max
  unsure (1)..(406): unsure at all n locations
agcttcgatttcctataaaaactataaactattgtgacctttattnggggagaatgactatcaatatgatttttatatgcaagatatggctaaacttacacatcatnttgtgagaggaaataatccacagaagtttgcttctactctagagagttttttgggcaaggtcagcctcctaacttttttattccttgttatttggctcaactttccaaaattatgtggaggcatactaaaacattttgatcttacttttctgctaaaatttggttcgacacttgggatgattttatttatgttatattattgggtggctctcaaacttaattggaggaggtaattaatgcctttattttatatcttacgcatagttttgggaacgatcaactgatatgctttttcaaat

SEQ ID NO: 263590 - DNA, 439 bp, Glycine max
  unsure (1)..(439): unsure at all n locations
tggactgtgctagagaganaaacaaatgaccaaagtgtttcatttctctttctagggcaaaaattgggtgttgaggagtcacaatttgattccgtggaaacttatgtgtaaatccactttgagcaagtttagattgatgttatacacttgtgtgaggtgagagtttgctccaaatttacctcattctaaattccacctttcaaacctagaaaagccattgaattgaggggttttggacacctaaattctgtgttgctgtgtttcgaagcttgattttgggttagacatgattgatacatgaattgggacttgtatgaattgatttggcaagattggatgaggggaagtggggttttgaaaatacctctttgtgcgatattgctgtaaaatgacaacataattctgcacagtgcataaaatccatgttatttgtggttgt

SEQ ID NO: 263591 - DNA, 457 bp, Glycine max
  unsure (1)..(457): unsure at all n locations
agctagactctagcatatggtcaaaagatttttttataggattcttccatgcaaatcctcattcaggaaatatcctgatttgtaaatgatcagacgcgagtcatcagctatatttggttgctaatatctctctaactgctatttcatctctaagtgagtatcctacagctattgtatagatgctttaatcaagaggaattacatatgaaaatgaccgtaatagtggcatgggtagaatattgcgaattagtattagacatgagggtctaattttttttaactcttaaccatcctgatgtagtaacttccctcaattcaagttgccttgctagactatggacaggtgaaggatctcccagaatagttgaggcttgcctatgctaatctagttcttgcgattgctaatggtgacccattaagagctgcggagagctttangtacttctacattaatctg

SEQ ID NO: 263592 - DNA, 456 bp, Glycine max
  unsure (1)..(456): unsure at all n locations
agcttgtgttgcanaagtaggtggtatttttacttagatgggtttgaccttagatgtcattactaggtggaattctacttttatgatgcttgaaagtgcccttgtatattgatgtgctttttgtagtcttgaatttgatgataggagctattcaagttgtcttattaatgaagaatgggagagaggacaaaaaatgtgtgattttttgcgtccttttttttcaaatcacagagttgatatctggttcctcttacccaacgtctaatttgtaattcatgcaagtgtggaaaattgaatgtttattgcttcaaaatttgagtaataaggatgagttgattagaacaatggaaattgatatgaaaacaaagtttgataaatattagagtgattatagcaatgtgctttcctttgggtgcattctangtccacgctttaaaatcaaacttttgaagtatt

SEQ ID NO: 263593 - DNA, 407 bp, Glycine max
tattgatgggcttccagaattgaaaaggtgattgatgtttttgtttgccaaggatgacagttaggtaacgctcacaagctgccatttaaaagctctaatggggccagaaaaaacaccttgttatagcggatgtaaataagctatggcgctagtggatgattacactcgatatacttgggtgtatttcctacaggagaaaagtgaagctgcatagaagtttgatattttctctgacatggtggaggagtttgatgcaaaaatcaaatgcttgaggagtgacaatggaggtgagttcaactcaacagatttcacagttttttgtcatgataaagggatccagagtcagcttacttcgtgagatacactgcagaaaatgcagggctgaaagaaataactcatcatcttca

SEQ ID NO: 263594 - DNA, 400 bp, Glycine max
  unsure (1)..(400): unsure at all n locations
atttcacgcttaaataggtggctttgtttgtgctagcgtgcttaacgcgactatggaccgctcaccatgcattaatggaattcggcttagtgcgtgcttttctcgctcagcggatggactgaagtggtgcgcttaacgggatgaccctttactcagcgaacatgcacaacccatccttcttccagattcttcctcgcgttcagctaaagagtgttgcgcttagcggttggctcgctaagccagaagattggcttatcgagaggatgaanatcaacacttcacaaacttgcctaattaacctgataatgagaggaaatgattattaaacacacanaatggaagtactaagtatttattacctatctttaaaaagagtaatcacatactaccaaataaccat

SEQ ID NO: 263595 - DNA, 464 bp, Glycine max
  unsure (1)..(464): unsure at all n locations
ggacctatgaaactcagcttgtcatgtgatcgacttattaaattttggaatatttttggttttggttatactggtgtgaatgagtctctctcggtctctatctttgtctctctctcacaacagcaagctccgactggtgtccaacaactatgggatctggccacccaaccaggttggattttatcctgctttaatttaccattgaagtaaattacctcataatcttatctcgcaacctaccatttttcgtttttatttaatcatattgcgcttactgcattgtttttatttgaaccatgctgtgcttatgtaaaaattgttctaagcttatattatcaatttgtaacttattttntaaaaaatgacaccaaacacaagtttatatatacaatggtattaatttggtatacctaattactttaaattaatcactcttttgtatcaatatggttaggttcttaaaa

SEQ ID NO: 263596 - DNA, 440 bp, Glycine max
agcttctaagcacaattcatcaaaatggtttgaaacttctttgttcaagagattgcttaaaggcttggcaatcttagaaaaatccttgatgaaattcccatagaacctagcatgtcctagaaagcttctgatgcctttgacatttgctagtggaggcaatttttcattgtcttccactttggctttgtcaacttcaatgccgcgtagagagattttgtggcccaacacaatgccttcagtcaccatgaagtgacatttctcctaattgagcacaagatttgtttcaacacaccgcttcagtacaatgtcgagattagacaaacataaatcaaaagaagagtgaaaaatagagaagtcctccatgaatacttcaatacctttttcaacaagattagagaaaatagcaagtgtacaatgcttaaatgtagcaagaacattac

SEQ ID NO: 263597 - DNA, 365 bp, Glycine max
tatccttatggcctgcctccggacttcaccccctttgttatcctggaagagttaagccaagccccttcttttgaggggcaactcccaccatatgaagagtatcccgggcaagacgatggggaaggagatacccatcttggccccctgctccacctcaaagatccgtccccgcatgaactaccccaaccaaacatagtccgtcataccccggcctcacccacaccctaaaagaatctattccctttgcggaagataagggaaagattgaggtgcttgaagaaaggttgagagcagtcgagggcctcggcaattagccattctcggatttagcggatttatgtctcgtgcccacatcgtcatccttc

SEQ ID NO: 263598 - DNA, 437 bp, Glycine max
  unsure (1)..(437): unsure at all n locations
agcttcttagtttcagatgttgctttattgtttngtagctacctcatgcactcctctaatgactatggcatcatttctggcgctaaactgctgggagttggaagccatcttcttaattaaatttctggcttcagcaagagtcatgtctccaagggctccaccactggcagcatctatcatacttctctccatattactgagtccttcataaaaatattggagaagaagctgttctgaaatctgatggtgggggcaactggcacatagtttcttaaatctctcccagtactcatacaggctctctccactgagttgtctaatacctgagatatccttcttgatggttgtggtcctggaagccaagaaaattttttctaagaatactctcttaaagtcatcccagctcgtgatggacctttgaggcaggtaatacaacc

SEQ ID NO: 263599 - DNA, 371 bp, Glycine max
  unsure (1)..(371): unsure at all n locations
gacctaagaaactcagctttcattatttatgtacccgagtgtgttctatttttttcgngcattnttattctcattttgcttactttttataccccctgttgacgtgcttaagccantttacttaagtcatttctcgcttaacttaaaaataaaataaatttccaccgaacgtttgaattgtattatccattaacttcggttaaaataaattccgaccgttcggtcgtgccgtaaccacgttggaaatcaaaaagaggtaaaaaataatatataaatcaaaaagacatcttttagtaaaataaagcggaaaatcaatcggacgttttctctttgggaattctcattcttaatcgaattgattaaatactaaa

SEQ ID NO: 263600 - DNA, 379 bp, Glycine max
agcttgcgcacatgcatatgtcttattatatttcctacacaactgcattactaaaactacatagcatgtgatcatattagcgacttgatatcttcctatataaagtaaaccttcattaatatataccaaaatcgttatgcttgtccttgacgagcatgacatcaaaatttcaaaccagtgacacacatccttaacgggtccaaactctcataatttcatggaaaatgagaaaacaaactattcatgttcaatacgggtactgcaaacatggacgggctctgagtgcattaggtgcaaagtcaaaggtgtcataaactatattaacatatatacgaactatgacgccacccacactcaatatatattataacatgcaaat

SEQ ID NO: 263601 - DNA, 383 bp, Glycine max
  unsure (1)..(383): unsure at all n locations
tgagagggataaggacaaccattgccgattgtttctctattcgccacaagcagaggagctacaagatactgtctcatgagagggatgtgtctctccactcgggaatcaaagaggagttgaggaacatcttgggaaggaaagggaatctacaaaactttttatcaagggacagtacgttgcatgaactgaagaagtgtttgggttgcatgaaatggagtggctggggaggctttttgaaagaacgccgccttactcatgagaatcgcatgtncttgctgcgccaacatagaatgctgtatacgttccatcagaagcggaagatgcacagtgtacactgacaacaaccatgaaagcttcagtagatgngctagatgcgactaaaa

SEQ ID NO: 263602 - DNA, 448 bp, Glycine max
  unsure (1)..(448): unsure at all n locations
agcttanatattcaatttcgagctgttttttatattacgggactcaatcagacatccgagttaaaagttattggcgtatgaattggcttanagcttaaacattaaactttgagcgtctcgatatattactggactcaatcagacattcgagtaaaaagttattgtcgtttgaattggctcagaggttgaacattcaatttcgagcgtctcgatatattacgggactcaatcagacatccgagtaaaaagttattgtcgtatgaatcggcttatagcttaaacattcaactttgagcgtctcgatatattacgggactcaatcatacatccgagtaaaaagctattgtcgtttgaattggctcagaggttcaacattcaatttcgagcgtctcgatatctcacgggactcaatccgacatccgagttaaaagttattgtcggttgaatt

SEQ ID NO: 263603 - DNA, 308 bp, Glycine max
  unsure (1)..(308): unsure at all n locations
tcgagcctattcaaacgacaataactctttactctgatttgtgattgagncccgaataataacgagacgctcgaaattgaatgttgaacctcttagccaattcaaacgacaattaacttttacatagatgtctgattgagtcccgcaatatattcggacgctcgaaattgaatgttgaagctgagagcaaattcaaacgaccataacttttttctcgaatgttcattgagtcccgaatatatcagacactctaacatgaatgttatgctttgagcaatccaaacccaataactctgactcgatgtctg

SEQ ID NO: 263604 - DNA, 420 bp, Glycine max
caagctttgtcaatcgctgatatgggtgatttgtttttaaatctctagcgagaataatgtcttttttatgttcaattggatgcagcttgccctattttctcatagaaaggacatgcgtgatatccttttatactatatccactcaattctcatatgctgaaaagtcattactggtacaaaatattattgcatgcaacctaaaggtctactacagatttccattaaacacatcaaccccgtctactcacaattatttcaggtcttcaatcaacggaatgagataatgtcccaacctaaccttctgcgggagggctacgcgtgactcgccggatgcgtgttccacgaaaggaatatgcgcggagtcgccaccaacgtttatatgacgaaaacgttgtaataactggaaaacacgccatctac

SEQ ID NO: 263605 - DNA, 378 bp, Glycine max
tactcagcttgctccagaagagagacaagtgtcccgggagctatatttatttgtctttgggtcacatccttcattatctcgtctatatgatctagtgctctacacaacgaccaactagtttctttgaacgattagatgtaaatctcggacctttatgactatatttcgatattctatatatgaatgacgcttctctactcgtcactgatgatttcattctattcataatgcttgattctatgcgaccaatactttcatgaaatcggattttactccgaatgtactctcagaatttgaattgaatgaatatactctatatgttacgtcgcttggaataaagcataatgttctgactacaaacacccccagattatgatc

SEQ ID NO: 263606 - DNA, 316 bp, Glycine max
agcttataccatttcgtgtacggacgcgtatattttgttttctccctacaatacgccctgatgtcgcaccctgtatacttgaagagcggcctccgcatacagttgggaagtgtccacagagatggacggtacttataaccccaacctagaagactgttaaatgttgtgcgtcttatacactagtgggacaaatggcttcgccccaccctcccccttgcttcattgcgcagatgttacccacatagactacgtgccccctttatccgaagcgtgacctttttatactgcagaattgccaatgtgcggactggctcac

SEQ ID NO: 263607 - DNA, 264 bp, Glycine max
aaaaaagagacaaagaagcgcaaccctcgtaggcgaaaaccacaaaacaaacgccggtgcaccgcagttgcaccaagagggggaagaggcatgcaggacgaacgccgaccacatcatcaccaaaagaagggcaggtacacgaaagaacttcaaacccgaagggacaaaaacgagataaagcgagacagtcgataagaagaagggcaagcaggtgtcggacagcggggaaagaagaagcacgggcacaacccagagagggcgaaa

SEQ ID NO: 263608 - DNA, 457 bp, Glycine max
  unsure (1)..(457): unsure at all n locations
agcttcatccgtagatccctatagaagactatgtctagactaaacagcattattgtaacagcataattaaaaccaaaacttaatccgcagatccctcttgtaagattaagtcttgatcctgcttcaatcaagttctaaggcaacagtacatttcccaatgctaaagtcacctaactatgcacacaaatggatgatcaaaccaaaagcatacaaacattaagcattgaaggaagcattgaacacagaaaacataatcaattaaatattaggtatttacatcagttgttcattagaaatccctaactagggtgcttaggcagccattacaaaaaaacccaaataataataatgttacaaaacctaggtttcaatgcacaagctgctctcttgatgcttctagggctnttttccacaaataggcactgtggtgttctctggaatctgagccctttcttct

SEQ ID NO: 263609 - DNA, 321 bp, Glycine max
  unsure (1)..(321): unsure at all n locations
tgcaagcatcatcatagtgagacttcttaccaggacataacacccgaataacattgtagggcacaacattggcacttccatcatagccaagagttttgagaagccatccacacaatctaactccagaaggccctagcatcatgagcctttggagtgaggtatagatgctttccattaaacaccgagcttcagttgcggggaaagntgacaatccccaccttcatttttcttgtacgcatctctgctttgggatacaactcaaatcccgttttctttctagcatcccacactagtatacgccgacacactctattaccaacc

SEQ ID NO: 263610 - DNA, 452 bp, Glycine max
  unsure (1)..(452): unsure at all n locations
nagcttncatcaagtggtattatattactttagcttcaagtatgtgctctctaaacctccattaattntcaactttaccttttcctccataggtgtttcttcatttttctccatgtatttcctcacatgtcttgtgctaaatgttattaacatgattctttagaatttccaccgattaatcttgctatagaagcttgatttgattttctatggttcaaatttcttgttcatgttcttgaaccatgagttgtgttaagtttaagttcctttgagttttgtcttgctatttttttgtggctgaaacctaaaccataaaattcttaaaaaaacattaaagtagaagaaaacctcaaaattctagagtgacttgttcccctatagtagttntgtcatagaagtcatgtctagtcatgaaacttgtcacataagatatcttatgttgtgctgaattt

SEQ ID NO: 263611 - DNA, 348 bp, Glycine max
  unsure (1)..(348): unsure at all n locations
tctacttatgtggcagggcgggcttccttcactttcttgtctccaacgcgagctntgaccactgctcttccttcctgcgatgcttcttttcatatccgcctgagtgggcttatagcctaaaccatacttcccacgatttcctttggcatttatcaggctagttatgccgccgttgtccttgcctaaacccattccgggttcgtaatcgttccctaacataactcgggccatcattactgctgcatcggacagacaaggctgcccatagaaggagtccacggaggaaatgctgaccacctcaaaagactggaaagccgtttctaacgattcttctgcggctttcacata

SEQ ID NO: 263612 - DNA, 407 bp, Glycine max
  unsure (1)..(407): unsure at all n locations
gcagctttcaatattctaagccttcgttttttccacatagcggctcgcgcatttacattcctatgttgagtacatgtatatacccccagatgacgngcttaagccattttacttaagtgatatctcgctaaacttaaaaataaaagatatttcctccgaacgttggaattgtattatccattaactgtggttaaaatcaatatcaaccgtgcggtcatgccgtaaccgcgttggaaatcaatatgaggtcaaaaataatgacgtagacccaaatacattttctaggtataatatgcggaaaagcaatcggacgtttattctatgcgatcgtgatgtttaaccgaattgattaataacgaatgtgaaactaaagctgaagataaactctcctagtctagctagtccac

SEQ ID NO: 263613 - DNA, 356 bp, Glycine max
agctacagctaattaatagactatagattttttttttatggggcgaataaaggaaacaaagtttattccataacgactgctttgaaagatacaggatcttagcaaatgttataagtgagattggataaatgatgataaaacttatatttatgcactgcacacaatgccattaatttggactatcattatttttgcattcggttattttccaatctaaatagtgtgataatcagctatgggggccatgtattgagcttatcttggatggaaagttaatatcatattcactaaggcgtcattccttcgctattaattattatcgtttaggtttgagtacttattaacaagtagagtta

SEQ ID NO: 263614 - DNA, 435 bp, Glycine max
  unsure (1)..(435): unsure at all n locations
agcctgtcttcaacaaacaaatcataatctattatctgatcttcaaaacctagctccagcttgctttttcccatatcaactatgcagcttgcggtcaacatgaatttccttcccaatattatagggatgtcaatatcttcagagacatccattaccataaagtctaccgggaagataaaatattttactctgaccaaaacatcttcaattactccatatgacctggtaatggagcgagcaactaattgtaaagtcattcaagtggggcatttccaactctcccaatcttctgcacatggagagtggcatcaaattgatactggctcccaggtcaataagagcttttcctacattgacttctccaattgaacaaagaatcgttacactcccangaatcttatgcttgggtggaaagatcttctagatcacaacact

SEQ ID NO: 263615 - DNA, 401 bp, Glycine max
ggacctataaaactaagcttctcaggaggtgagcttagttatgagaggggtgtgtgtatcttatctctagcttctcaaggaagatttctcaaagaagcttctcaaggaagttttctcaagaaagcttctcaaggaagctacctagtctataaatagaagcatgtgtaacacttgttgtaactttgatgaatgagagtcttgtgagacacaactcaaagttcaacttctctctctctttcttccttcaatttcgggctcccccctctctctttctctcccactttcttttcctccattgaagcatcctctccaagcttcttatccaaggctcatcttggtggtgaagctccttcttccatggcttattccctactggatggcaccgcctcttacctcttctc

SEQ ID NO: 263616 - DNA, 317 bp, Glycine max
cctccacacatctcctcattgttgtccaaatcactgttcattatatcacatggggcggatctcaccagagcaacttgcgtgggcgctactgttaggactataatattgcatgtagaatgaggggcatatagtggcatgacccctattgtcttcagaaatacaacactaagcactaagggtcggtccgctttcctattaaaatatatcgataaggcctatggatattacaagctgcccacaatacatgatccgctgaaacaattattacactggaggatgggttccgatgtatagctactcccctaggtgatccggca

SEQ ID NO: 263617 - DNA, 215 bp, Glycine max
  unsure (1)..(215): unsure at all n locations
gacacaaaaaccagcagaacagnaggcgaaaacagagcacatatttatctacaggaaacaccgaaaaaagcaaaacacaacaaaatcgacacacaactaaaagagaaaagaccaagacgcgaaaagaaggcgcgaaccaagagacgaatcacaactaacaacggaggaaacacaggaaacgccgaaaataaccaccacggagaccaccttcaaaa

SEQ ID NO: 263618 - DNA, 449 bp, Glycine max
  unsure (1)..(449): unsure at all n locations
agcttgcttgtccgatgcagcagtaatgtttgtctgagttatgttgaggaacggttacgaacccggaatgggtntaagcaaagacaacggcggcatgactaacctgataaatgccaaagggaatcgtgggaagtatgggttaagctttaagcccacttaggcagatataaagagaagcatcgcgggaaggaaaagcggtagtcaaagctcgcggtcgagacaggaaggtgaaggaagcccgccctgccacataagtagaagctttataagcgcgggtctgggggacgaaagtcaagtggtcgcgatatacgaagatgatgttccgagtacattggatttggtacgaccatgccctcttgatttccagctgggaaattggcgagtggaggaacgctccggcatttacgaaacgagcataatgtanacctntacgggtttaaaagctctat

SEQ ID NO: 263619 - DNA, 374 bp, Glycine max
  unsure (1)..(374): unsure at all n locations
tgtacttggtttagacatgaatgatacatgatttgggtcttgtaggattcaatttgggcaaaattggatgaaggtaagagtggttttcgaaatctgcactttatgcacaatnttgctgttgaaatgtgcagcaaaattttgcttgtgaaatgtgcagcagaattttgtatatgtgcagaaaaatgcttgtgtatggctggttgtggaaagggtagtacatatggggttctggacattttctagcagatcccaacggtcaaaatgtagacttatgtactagaaacgtccagtaaaattttcgagtcgatccaacggttaaccaactggaacgaagagaatgttactggggtatttgaatgtgaaaagctgtgata

SEQ ID NO: 263620 - DNA, 444 bp, Glycine max
  unsure (1)..(444): unsure at all n locations
agcttcatttcgtctaacctatgtctgtgttgtttcggctaaccctangnacatttcgtggtgacctgaccgaggtacgaggaaagcttcaagtctctgtgccattgttttagatctcattgccgttgtcactgtttgggttcgaggtaagcttggtctctttttcatttctagtttagttaggaaacatcttgaatcttgtctctattaagagtctgatttttctatgaatctattactactttggtttgttgcaacccaacctagatatatgaacatgtttagatcgactagtgtagctaaaaatgaggacattaaaagttcaagcagcacttaaatatggnggactgaattaataatcatcaagccaataagaaaaataaatgagaacaaagagagcgtgagggagaacagtacaaataaggcaactcatccactgattat

SEQ ID NO: 263621 - DNA, 379 bp, Glycine max
  unsure (1)..(379): unsure at all n locations
tgcatgtaagaatgcattntgcatatattgttcattttctcacccaagtgagctgctaaagaaatgatgatcttgactgtattcatctttgccagtggagcgaatgtctactcataatcaatcccataggggttgggcgattcctttgctaagaaccttgccttataccggtccaatgcgccataagcctgatatataactgtatatattcacctataacccactatcttcttgtctgttagactctctacaatcttctaagtctcgttcctttccaatgcacccatttctatattcatgggtcgaacccaattatcatctgtttaagcttcttgtactgaagtacggattttgatacaatccatacttgaaataaaac

SEQ ID NO: 263622 - DNA, 462 bp, Glycine max
taatcacctgagctgcagcttttactgcagtatttattactttatgagaagatgatattccgccctctgttacctttggtaaattagcctttacattcattatattattttattattattttggcttattttttttttatatataaacaaatacaaaagctgttgcttgacatttctgcttctgtctctggatttgcatcttgtcatatcatattctttttaacgtgagctaccagtatatattctcttatttttctattttcttctcaatttctttaatgaaatagtaataataacgccaagcgaagcaaggtgcatacacaaaaaaggtgcacacttttattgcgatggataattgatatcaagtgataatctctgctttatgattttttctttattcgacctccattagagggtgcaacaaggacaataaatcggattgtaattttcttggatataaat

SEQ ID NO: 263623 - DNA, 390 bp, Glycine max
tgcaccttgggcattcaccatactaaatgtttgtctctctttacaaatacacttgaaacaagcttttctttttccacccattttgctaagacattttgaaaatctacagttttatgcttacagaacaaaccaaaagcatagatatctatgttataaacttacgtaccaatataccatgggaagttcagcataattatacataataattaacattaattaaacataccatggataacgttataccctccaatgcctgactttgaagaaaaacatcacggaaatttaatggttctcccccaacatcagaatcgtaataaagaaccttgaaagaaacagtgaataacaaacaccaatatcacagggtaaaaggatgcgattattgttactaac

SEQ ID NO: 263624 - DNA, 450 bp, Glycine max
agcttcccagatccgatcatggattgacttggcaactgccttcattaggtagtaccagtacaatacggacatggctctcgatcggaactagcttcagggtatgactaagcgagagcatgagtccattaaggaatatacccaaagatggagagatctcgcagcccgagtcgtaccgtccatgatggagagggagatgatcacaattatggtagatacgttacccacgttctactatgaaaagctgataggctacatgccagctaactttgcggatctcatcttcgccggagaaaggattgaatccggactacgaaaaggcaagttcgaatatgctgccaatatgacccccaaacaacaacagaagagccccagtagggggcgcgaggaagaaagaaggagacgcccacgcggtcaccaccgccccgacatggatgaaagcaccccaaaata

SEQ ID NO: 263625 - DNA, 317 bp, Glycine max
  unsure (1)..(317): unsure at all n locations
ngagatgaggaagtgttgaagggtgaatcttcctgcttttattgttgaccacagagtggtacctggagatatgtcgcggtggtcatgagaccttgtggacgtcaggtggggtgctattgcccaaaaccaagcttgaccaatcccgacccaacccgggcatagtcggtcagtgagaacctatgatgtacctaagcaggcgagctcctggcagtcaacagataaaaggaacaaagaccacaaagcaaggaggcttgtggtagctggccagttgtgaaactcgactgatatgtgagatatggtctcttgtaatccattac

SEQ ID NO: 263626 - DNA, 167 bp, Glycine max
aagggggggattttttttaaaaacgggggctgtggactaagaatgcgtctggaactactcaaggcagactaaaggattcgaatctaaagtccccggttcctgtcaggcactcagcggggacttaagagttctaaaaaaattttgtcagacccgaccagagaatcagt

SEQ ID NO: 263627 - DNA, 347 bp, Glycine max
aacatggctaagagaaatacactcaatcgttttaaattgccgactactagttttcccttatatagaaaagcataagatcacatctatatacgccattgtgaaagctcatcaaaccaatatcctctcatccattgactgaaaaatttaatgtaaactaaggtcaagctattttgcatcatgatttcagccaccaattatatcaataataatcaaatataagcatacaaaaaaaaagacacaagtcttatcccactagatgatatcggctacatgaatcacacgatgtcatttggcacggatacaacctagttccacacatattgagcatataacaatacacaatgcat

SEQ ID NO: 263628 - DNA, 301 bp, Glycine max
tgaacattatgataaaagcatgagcctattcctaacctgagaggaactcctcttatctactggactatcatatgacttcatatgaagcgtgatggagtcaaaataatgaattaaggctgattctgcacgaaccatgagtccacatatcccaagtagtgcagcaacacaacattgacctaagtaaacttgattctcaacaccgttcgatcctggcaacagaaataatgattatatatcaacatcattacgcctaacaccttatgctttgtggacacatatggcagtaaccacttatcttatc

SEQ ID NO: 263629 - DNA, 303 bp, Glycine max
taccaccaattgcttgccctttcatggcatatactgtgcacaacagcggctacactgggagtggaatatcatgtgtcctctccatgggttgagagacatgtcctaactagggtgtcgactctaatgtgtatgggagcagagcattgacattcctatgggaggtacgccacattgtgcggcgatagctgggaggaagccataggcgggaggatgctcgttcgatttcacatcagggggtgccatccttctaaatttgcctaccttatcggagctgagatcttagtttgagcatatggggctttg

SEQ ID NO: 263630 - DNA, 307 bp, Glycine max
  unsure (1)..(307): unsure at all n locations
gacctaagcaccgagctgcagctaccttattatttagaatttttattgaaaaataaaataaatcttcttaatgtttacttatacaatcgatctatctatcctgttgggggtgattacatcttgaagcatcaccccataatactagactccggagtttgattgttccgggttgaagattccgatctcaatccccaacccgcctttctcgnatcgattgtcctcatttaacaaccacacaacacaacacttcccttcctcagatcccatcgtacctgaaaccaaaataaatcacactcacacacaaaat

SEQ ID NO: 263631 - DNA, 301 bp, Glycine max
  unsure (1)..(301): unsure at all n locations
agatggcctcagcaaactcgcgtagagccattatgggaattctcatcacggacctccgatctttaatggagacggttaccatgactggaaaacccgaacgcaaatctttattgacgcaataaaatcaaatacttgggaagccatagatatagggccttaaaaacctaccacagcagagagagattcaatagatggtagttcatcaagtgaaagcataactatagaacacactanatatagacggtctgaagaagatagaaaaacgacccatacaacttaaaagccaaaaacataaaaacat

SEQ ID NO: 263632 - DNA, 414 bp, Glycine max
  unsure (1)..(414): unsure at all n locations
acctgcagcatgctagcttggagaggatgctacaatggtatgatanatatacggagagaaagagagagtgcggagcactacactgaacgaagacaaacggagagaagttgaactttgagttgtgtctcacaagactctcattcatcaaagttacaacaagtggtacacatgttcttatttataaactacgtagcttccttgagaggctttcttgagaaaactttcttgagaagcttctttgagaaaacttccttgagaagctagagcttatctacacacacccctctcataactaagctcacctccttgagaagcttccttaagaagattcctaaagaagctagagcttagctacacatacctttctaatagctaagctcacctccttgagatgagaagctagagcttagctac

SEQ ID NO: 263633 - DNA, 67 bp, Glycine max
  unsure (1)..(67): unsure at all n locations
tctgcccggcaaaacnccgcagggagccagaactttttctgagaacccacacccgctgacgtgaaac

SEQ ID NO: 263634 - DNA, 403 bp, Glycine max
cagcatgcaacctatcacatagagccgtcacaatatatctactctgaagcagacaacatacaacactacccatcataactcccgaaacaccatacccacgaaaaataaaggagaaagaagcccacccaaacccgacatatcaaagtcccactcgcagccacggacttcacgactacaaaaacgccctcctctcacgactcgggacagaaaagaaggccaacgggtggagctttgacggggattcaatggagaacggaagagaaggaaaaagcaacgcgaggaagagggagagcttccgaattattctgctatggctgagagaggagagaaaaaagcttcttggatataaataaagggactacactatttctaataatatattcacgctctgccacatgtcact

SEQ ID NO: 263635 - DNA, 335 bp, Glycine max
  unsure (1)..(335): unsure at all n locations
caacnnacaaagagnagnacaagcagaccgcaacaacttcgttaagcgcctatccaagcactacagaaagagcaagggagaggagcctaccgcaacctaccgccaagcccaactcgagaaagcacaattccagacagggatcgaggccgatctcacaacatcccgcttactgctgccccaaaagagttcccagagaagaaaaggcggcgagtgcatcaccgtcagctaagaccactacatgaagatcaatgctggcgaagatgtggagcaaagcgcaacgacgagtgctgagctgaacgataaagccaaccgagccaggggtctaagcacttaac

SEQ ID NO: 263636 - DNA, 376 bp, Glycine max
atatggatcaagccgggtatttctgacatggatgttcgcgacatactaccaggattgtctgatcatgaatatttatgcggctttatgactgccccctgcgattcttgtgggcgttctgtgatgtttatggacatggacattcaccagcgtgctgatcatataacggttaattgtgatttttcatcttaacagcatctcgtgaaagaatgcttctaggtcatgaatagaatagtaatagaatctggaggaaattgaaagatacacgcttattgatggtggagcagaaacatctctatgctctactagggacaactggcaggatacatcaccctgtagtgatcttgcttttctcttgctaaaattatgatatgaatta

SEQ ID NO: 263637 - DNA, 264 bp, Glycine max
ggagtttactgcggaataggaatcgcctgtctagaacttcttcttatctctcctagccctcaagcattaataattaaatcaccatcgttgctgaccatttattaacatacaggcatacatgcaatctgtgaactcattaccatcttcattctatgcacccagcgcaaactccatgacgtacctaaattatggtgctcgcattagttacgcacgtcgttattattattcgacccatatgcatagttcaaatcaaaatggaactct

SEQ ID NO: 263638 - DNA, 458 bp, Glycine max
agcttaagaattatggcctcattttacttttgtttcccgagggaaattctataaatagacctcctatctttaatggagtgggttaccattactggaaaacccgcatgcaaatctttatagaggcaatagatctaaatatttgggaagccatagaacaaggaccttatgttccctctataatagccggaagtgcaacaatagaaaaacctatagcagactgtactgacgaagaaagaagattagtacaatataatttataggcgaaaaatattattacatctgccctaagaatagatgaatactttagggtttcaaattgtaaaagtgctaaggatatgtgggatacactacaagtaacacatgaaggcacaaaagatgttaatagatctacgataaacactttaactcctgaatatgaactttctatgatgaatataaatgaaagtataccagacatg

SEQ ID NO: 263639 - DNA, 355 bp, Glycine max
  unsure (1)..(355): unsure at all n locations
tgcatcgggttctgaatcaaaattcactgtgcaatttcaaatctcaatctcttcaatgtgatgattcatgtcatcgtcagcgaatgattcaaattcgctcttgatgctcgtcgttatcgccgcaagtgacaaatcagagtccgattgcaaactttggcgacggatttgattggaaacctttttcatcagaactactcatcgtgggctttgccatcacatccaccgacgatgttgcgcgtggatatgatcttggttggntcaggacactggacaccacgtattggacacaagtcctctatgagaaggctcccccactctcaaactcaccctttttgcgaatcttgacgtgcctatc

SEQ ID NO: 263640 - DNA, 379 bp, Glycine max
atatgtattattgagctcatctcctcacgaacgaagtctattaattattacaatacggctaattctttggacatacaacatattaactcgcatccgaaggatcacatcactatcacgcaaaatatatgatgtaaataaggacaaatctgttacctttgaaggacataatgagaaattgttaagaaaataatcaaatactactgcccagttagatactgtgacttggtgcccaacaccaattagagtgcatcgacaatttctattttgacttaatgagcatgtgcaacatcaattatagctatcaacgagcaaggctcttactgccacattaactattgttgcccagtggccttatatatctaccttagctttcacactt

SEQ ID NO: 263641 - DNA, 289 bp, Glycine max
atggaaccctctcacatggcaactaacaaatatgagttacgtaaggataggccattcaagtcttttttctaattgaatccagctagtattatttccgacaatatccttcttatcacgtgaacgccaagtgatgaataacataagaggcttttagatccttaccagggtgattaaattgaatgagcctataataaacctaaatattattattttaattttgtttctggagttgtacttcatatatgccaactaacctctattcataaaaatagataaatcgatgtattaa

SEQ ID NO: 263642 - DNA, 459 bp, Glycine max
  unsure (1)..(459): unsure at all n locations
agctttganaagtgttgtttttcaccttctctctaagccaatctgctggcttagtgagcattcgctaagtgcatcattcatgggctaagcgcgaggaagactctggaagaagatgagctgtacaggttcactaagcgcaccgcttcatctcactaagcgcaccgcttcagtccatccgctaagcgagaaaggcacgcgctaagccaaaattcactaatgtgcgctaagcggtccatagttgcactaagcgcacgagcatgaacaaggccacctatttaagcttgaaatcatattttagagggggagtttgggctgggattcagagctttgcatgtctagagattttagagagagaaaggtccaagttccagagagttttgagagattctgctgtgtggagatctgcatagactaaagctcgaagcanaagccgttctgagagcttgcgatgagcttgcg

SEQ ID NO: 263643 - DNA, 450 bp, Glycine max
  unsure (1)..(450): unsure at all n locations
gaactataaaactcacgcttttttacaatcaatctggctactgactaacaattcttattgcaagntcacattcttgatctttctttgtctaacatacatacttgctcaaactcatgaaagganacacaagttccatcacattcatgcactcaattcaaaatgaaaacatacatctcatttttacagaaagataaaagtgtttcactatcatgtcatcaaaaatacgttaaactgttcaaaatgcttcaggataagcatactaactattcatatataaaactagcagtatatgtagatataacgaaaatactgtacgaaaatcaaaattataatagggataaatcaaaagcgaaaaatggcatcacgaattaaaattcctgtgactggtcttgattatcctgtatctgaacatttctttcatctgttagatgccatactaaagtaccggaa

SEQ ID NO: 263644 - DNA, 363 bp, Glycine max
agcttggactactcacatgcgacacgcatttttgttctttactctcctccatgcactgaaggttcactgaatctatctccaaacacttatctctatatattaatattgtagatagcttagtatacaattcatagacaaagttaatatcatgtgttggagccgaatacacatggactatagagaggggcgaaccgggtgatttgaaattcgtattattgagagggccttttgaaaaattcatcacgcgcctgtgtatatatggtggacataatgctacgaactatatattcttctataaactggacactatacaaagtatatctttcaatggtattggtaagaacagcaatgcatcctaacgta

SEQ ID NO: 263645 - DNA, 392 bp, Glycine max
ggcgcttttttaagtctaaaaatttttgccaatgtttgcaatttcttcaactttagatgatttctaatgcattcaatccttaaaactctgccacatacaatactcataagataattgacattatataagttgaagtaataaatataatgaaattcttttcaactaaacaacgtagtactgtcttccaatcattgttgatagcccctgagactatggtcaacatccaatgcatgacataatagtcacacttagtgcctctagtttgaatattaatctaaattcaatatgaaatataattatatctcataatttcgaactaataaaatgtcattaataatattctagcatgtctgtataaaataacttagatcatccatattacttttttgatg

SEQ ID NO: 263646 - DNA, 387 bp, Glycine max
gggagtaaacacatgcacatttgatctatatacaattgcttgttgcttgcttgaatcttgattttaagtattgtattgtcatcatctaaaacggggaaaatgtaaatgcaattgcctttgatggtttgaagatgatcatgatgatatgatgcactttatgcacatgggctcttcaagattaaattcaagactattcttcaagattaacaagtcacaacattaagatgatcactataatattaggaacggaattcctgattgaattaacacaaggcttggccaagctaattatgttaaaaagagtttctcataggttttactctctggtaatcgattaccagaggatgtaatcgattaccagtggcccaatactgcttataacagcta

SEQ ID NO: 263647 - DNA, 405 bp, Glycine max
gcttcttatcatacacaatccttatggtggctgcttataaatcatattttttgtggcctttaccctcttaggcaatgaaatttaatgattgttaatcaagccaagggctttcatactggatgtcccctaaagttgtccctgctcttggatcatttgcttggagtaattctgtaaggaatgaaatcattttttatatttaaatgaaaattatatttaaggaatatggtaaaataaactaaacctttgaaaataattacttttaaaaaatttgaatgtaattttgcaataagagttaaaatgcaaataacaaatcttcaattacttaccaattaaattacacatatagaaaagactattgaaagacttgaaagatagctaacttttctattgctttctgctataaag

SEQ ID NO: 263648 - DNA, 454 bp, Glycine max
  unsure (1)..(454): unsure at all n locations
tgaaacagaaaaggggtatgtttcttaacaaaaaccaagtaaatatattacagagttctttntgatacttaattaacatgggaaatattcgtgtatctgaccaagagaaggaagagattacatttatacattaatcaaaagggaaggagatgaaatgacaaaagcaagggaaaaaaatatagagactttgtttaattatcatataaatcagtaattgtacttctagtttctgtctaaccatatatatgtggtctatatcattcacatncaaatttgcgttaaaaggaaattatcatgactgtaaggatatatatctcttgcatataaaggttgattaatatgcactttccacaaggaatctcatttagagctataagctaattaaaagattggttttataatttgaatatcctacatattcttaattatgtatcatataatcaatannattatg

SEQ ID NO: 263649 - DNA, 388 bp, Glycine max
  unsure (1)..(388): unsure at all n locations
cacagnaccgtataccagacttttgtttatattggacatgaaaggaatagctggntactatcctccaaggcactggttgcaaaaacacaagaggtttggagtggcacaactactaacgcccctcttatttaactgctggtgtgtcggaaccgatccagtaatgcaaggacctacgaagggacaactgaattcccaaaatgcttgatccatgttggaggggaatcaactcccatgccctgttgctgatgattaatgagaaagttatatgccgaggccacagaaaaagaatttgagttgtcttggttccaacaccatctatctggacaagttggttgtaactgcacctctcgtagcttatccataangggttgccaaaagtctttcttcc

SEQ ID NO: 263650 - DNA, 486 bp, Glycine max
  unsure (1)..(486): unsure at all n locations
taagtgacctgcggcatgcaagctntatacatcttccatgcatttgagttatactcanatgccatttgctgaaagatagtaatccttctcttgatggcttcgaatttttattccagaaagaattgttggaaaaactcatctttgatttgctcccatgagggcaaactatggtgtggttgagaattgagccattcaactgcacttccccctaatgaagagggaaaaagtagcatcttgatgtgactgactttgattccgtgtattcatactaatgtgcatatttgttggaatcgattaatgtgggtatgaggttcttcgatgttggatcccataaattaagtgttatggagagtattaacgatcatgctagaaagatttacttgatgctctcttgtgtttggtggaagaacagattcatttatatctatgccctggcgagcttctaatttggccatgggtgggattcagccatctttataattatgg

SEQ ID NO: 263651 - DNA, 438 bp, Glycine max
  unsure (1)..(438): unsure at all n locations
agcttgcctcaaagaggtccaggattgtttatgttttcgaacgaactagttccgccccggagtacgacagtcaccgctttaggagcgttgtacaccagcagcgttttgaagccatcaagggatggtcgtttcttcgggagcgacgcgtccagctcagggacgacgagtatactgatttccaggaggaaataaggcgccggcggtgggcaccactggttactcccatggccaagtttgatccagaaatagtccttgagttttacgccaatgcttggccaacaaaggaaggcgtgcgtgacatgacatcctgngttaggggtcagtggatcccgttcgatgccgacgctatcagccagctcctgtgatatccgatggtattggaagagggccaggaatgctagtatggtcagatgaagaaccggtctgatgggttccatg

SEQ ID NO: 263652 - DNA, 340 bp, Glycine max
  unsure (1)..(340): unsure at all n locations
aagaacggcgggagcggtcgaaacctttgcgagattcttcacggaaaacgctacggaaacgtttcggaagcgcctcggcttagattntcttcacggaaacaatttttccaagaaaatttgaaagagagagaagtgcctaaggggctgaacccttttnttcttcacttcctcccctatttatagcaaaatacgggaggtgggtgcccgccagctcgcccaggcgagctcagctcgctcaggcgagccaggttgcttcctccagatgcaacagccttctggaggaatattctggagggcccacagtggcctgggtgctatttgccccccattttactaagta

SEQ ID NO: 263653 - DNA, 454 bp, Glycine max
agcttcgaatattgaccaatgctattttttattcttcatataataatccttagattcatagtcaatttgtcttttaaagtaatctttaatgcattttcattatgattactaataaaatatttagcactctagattaacaaaatctttatatttacaggggttgtctttttcataggcacatatattccgctacctataaatctagcaattcctccaacgaacaatgaaataaacttacctgcgtagtagtatagtacagctatttaatgaactttgactgccatgtgatgagaatacctagaaacccacctatcatgtaaccaagtctagttttcttattccaatgatttgattatggattacggaacatctcatcaaattattaactaactagaatattgatcacacgcgccccaatgaataattggctaccatttcgatatcatcattgatt

SEQ ID NO: 263654 - DNA, 465 bp, Glycine max
  unsure (1)..(465): unsure at all n locations
taccaaggacttaccttgantaattcctttgtttgtccttttgagccttggttccctttccttggtttgaagctcactacaagccttaagtaaaaaaccatgatattaccatatccttaaggaattttggagctttggaattggtttgggaataagtgtggggggtttttgtttcattggacaaacttgttttgttgactatgcttcatgatgtattttgggccatacttgatgtacattgtatatttgttaaatgttggacatgctgaatgatatgttgttgctcaaaaaataaaaaaaaaaaaagcaataaagttgagtgaataagatctttaatggcacaagaatgatgaaactcttggctctactcttcatgtttaattcttatcnttacttcttttttttttctttaatatgcacttattcccctttgctcctctattcctttgggattagccacttatt

SEQ ID NO: 263655 - DNA, 452 bp, Glycine max
  unsure (1)..(452): unsure at all n locations
agctttatgatgaatcaagagcgattctttatgttttgtnaataacaaagatgatgacaaaggtgatgacaaaaagctcaaaggttcatcaaagaatgagttctacatgttcaagatagaatcaagaacacttcaagattcacgaggaaagttgaagaacacttcaagattcaagaggaaagttgatttcaagaatcaagaatcaagattcaaggatcaagcttccaagattcaagatcatgattcaagactcaagattcaagaatcaagagaagacttactcaagataagtatgaaaaggttttttcaaaaactgagtagcacatggatttttctcacaacatgtttaccaaagatgttttactctctggtaatcaattaccagattattgtaatcgattaccagtagcataatggatctgaaatagttctcaaatgaatctacaacgttc

SEQ ID NO: 263656 - DNA, 127 bp, Glycine max
cttgatttctgtcatgcttactagcatattttaactgggactctaatgcctatgctcctatctttgaaagttgcatgccttgcgagaagtaattggattaagcattccatgatattcaattcatatg

SEQ ID NO: 263657 - DNA, 425 bp, Glycine max
gatcgacgaggggtggctaacattccaagaagacgtgtccttatctaaagacaaatatgcttgccaattatgggggaccggtagtaaacgcaatataggagtgcgaactgtagaggtcgaataaaatgaaggacgtggtaacctccacgaggttcatattagaggcactgcaagaggcgggcatggttccctcgatgggaacatgggggattcctgtttaatgcatccgagtgcattgcatgacatggaaacatgtttaacggtagaggagctgttacagcgaatgatggaccaacgctggtttgaaatttgtgttgtaagcaaggaagatcaacatgtgtgcatgcaatcggcagacaaaagcccatgcatacccaaacctttgtggatacacttcaccagagatgccacctctcaaaaaaccg

SEQ ID NO: 263658 - DNA, 431 bp, Glycine max
agcttgaccgatcccgacctcgccttgttttattcgcccagagacaacctgtgatggtcctatacaggcgagcttctggccgtcaacaggataaaggaagactagaccacaatgctaggaggctttgtttggttggacagctgagaattatgcgtaacatgtggatggcggcccttggctatctatgacaaagggtgggtaaagcagaacaaggcttaaaactgatgacatgaagataagatggactctaataatctatatccagcgggtgttgtacataaccaggcttgaatacgacaacttgaaacttatggagcctctgtgcataaattaccacgctcgcgcacctattacacagaggtatgggtcactggtaatccattaccaagcatgtgtatatgtttcccagtgaacactcgatatttcatgtg

SEQ ID NO: 263659 - DNA, 228 bp, Glycine max
ttggaagaggagtcagctgtctgcttaatgttcaaaagacacttgtcttccggttatgcgacacatagaccaacacgttacccatcctcagtccgtaccaataagagcttaatttagccgcggcccacaatcatagtgtgtggggcgagaatgcccgaatgttcgccaaaatggatgctagaggaaagagatcgactcattacttcgtgaggcaactatgtggatgga

SEQ ID NO: 263660 - DNA, 445 bp, Glycine max
agcttatgagtgcaaactgaggaatggataacaatctaacaactcgaaacctgctgcaccacatgctcctcaagcacatctagcagaaaatgaagaagtgatagttgctgtggtagtggaggcaaacatggtcgacaacaaggtggactggattctagataccggtgtttctaaacacttatgcgccaacaaagagctttttcaccagattgaggatgctgatgacggagaatgtgttttcatgggaaattcagctacagctggagtgcttggtaaaggaaagattctccttaaacttacttctggaaaaacattatctttgagtgatgttttgtatgttccctctctgcgtaggaacctaatttctggtagttgtctaaatagagctggattaaaaatggtttttgaagctgacaaagtagtaataactaaaaatgggaacttt

SEQ ID NO: 263661 - DNA, 457 bp, Glycine max
  unsure (1)..(457): unsure at all n locations
tcataagcaagcttccatcaccactcctatgtttctctactggagcaaaacgagaccgctgccacacctcggnttctcctttgtttatctcttccctctttccaagcctcaacaaacatcataccagaatacaaatcgacaagccactcttcatccctaatcttgtgccactctaaaattcagattcacaatcccaaatcaaaactccaatttcagattcaaataaaaattgggatttagagttgatggtaagagttttgcatgtgcaatgtttacagtgataaagggagggttgcatgcaagattttgggtatgggtggagccgtggaggtggttgcgacgcatgaatagtggtttgatgttgttttgttcggatctggtgacgggtgatggttttgggtgcggatntgacagatctaatgatgatgatggtgatgggtgaatggtttgaacaaca

SEQ ID NO: 263662 - DNA, 417 bp, Glycine max
  unsure (1)..(417): unsure at all n locations
ctaccaacacccttcaaataactaagctcacctccttgaaaataaaacatggattaaataacacaacaaaataatcaaacatcaaatataattactaataatatttcagggtgttacattttgacctttcccttttctgtttttgtttagtgtggggcgagaaagtcgccagtgcacacgattttggtcggcaaccaaagggagaggaccacttcaagtcatggtttcctttcttttcttatttggttgnggctattctgcattgtttggatatntgtctggtccgaagacccttttgtataattctttcattttcttcctatctttgaatgggaattttctttntccctgtgttttcttccgatctttgaccgggaactttctctntgntttctttttctttcgatttctaaccga

SEQ ID NO: 263663 - DNA, 363 bp, Glycine max
tcgattaccaaaacattgtaatcgattacaacattttgaaattaattggaacgttgtaaattcaatttgaaaactttttcaaaacaattttgctactggtaatcgattacaacaatctagtaatcgattaccagagagtaaaaactctttggtaaacatgtttttgagaaaaatcatgtgctacttaatttttgagaaaaacttttcatacttatcatgattaagccttctcttgattcttgaatcttgagtcttgaatcttgatcttgattctcgagatctttgaccttgaaatctgattcttgactctaaatttcttcttgagtcttgaatcttcttgttcttatcttgaactctgaatgt

SEQ ID NO: 263664 - DNA, 299 bp, Glycine max
  unsure (1)..(299): unsure at all n locations
ctatagatctttctgaactctttctcttcatctttctaaaagcgttttagctcataccatctttctctctccaacacaaagttcctttgttcaagacctcgcgctaatcatattatttattctctactgcctttgccaaaagaatagaaggactaaccgtctgaattcttttgagtctcctttctgtcttacaacngactcaaaggactaaccgcctgagaattcttatgattattcccttccccttacgcaaaagatgtcataggacttaccgcctgagaattctttgcccaacacat

SEQ ID NO: 263665 - DNA, 230 bp, Glycine max
atccccttaccgcagaccttgcgcttatctctcaaaacataaacccccgactggccggcagaatagttcagcattatgcatatcactatgctaagcccaacatcttcacggtaattgaacttataccagtgggcttaacatggatgatgcgtctaaggccacttcttctccggaaaagatttatcgaaacaccgctgagagcacaaccctatgctagccctacaggcatt

SEQ ID NO: 263666 - DNA, 460 bp, Glycine max
  unsure (1)..(460): unsure at all n locations
ctgcagctatacactataggtaagagacactatttttttgctgttgctatgactttaattgatcactagttatttgtatcaactcttgagaatctgcctcatttttacttgtggcttccttggtggaagaacatacatcaattattatgcttgggctaaagaaatgacatgagtcctatctcatgatattctaatattttataaaagaatctattctattttctttagattttgattactttattttttaattgcttatcaggatggtttgctcgcgatccatctatcctgcatcgtgttggacatgttttacttcaattgaattcagcggagaccaaaaggtccagacattctatatttgcagacgatctctttcagttatctaaaattcctacacagaatacaatatatgttatntgtanagctattgagaatatgtccgggtgtaagttcttgatct

SEQ ID NO: 263667 - DNA, 356 bp, Glycine max
atatgccacaacttttttttttacaaaataggcctgatagccattaaacccattactttgctaatacaccacatttttggttttggccggatccacgcgagggtgttatcgttttaagggtaaatgaggtctgataccgacataaatggtcccggataaattgggttgacagtgacctctttctatctctattgagataaaggaagaaagataaactctattcttcgactgatcatccaccggcactacgaattaagtattaaacctgggagcataaacctatatcctcttttcgttgtctttcttccttactatatatatatatatatatttaatatttttatattattttattt

SEQ ID NO: 263668 - DNA, 450 bp, Glycine max
tatttgagaagcgtgctgtatgtatcttcccaactaccggataactgcgtgagggcccattgttttaccaaccatgctttacaatatgtgaaggtggattcgaacctctatattacgaatgcgatgaatgtatgaatgattaattgcttgtcttcttcaaccatcgcaagtatatttttgcctactagttttaaatccatcttaatgtgatcttatgaaatggttggcatgatgcatgagtgaggcctttctatcattctaatttcccaaacttgtagatttttctttcggacgctctaagtttccactagcacccttcaatcgggcaacataagaacaatgatcctacacacatctcttggatttgatagtacatggatcttaatgtgccacatattacggcgtgtctcaagtccttcaattgacgaatcactaaccaacatacaactc

SEQ ID NO: 263669 - DNA, 456 bp, Glycine max
tagagacaagaaggtgattattagacgatttggttgttttaacgagaaggcatgaaggaatgctctttcaagtctcaataggaatcgatggtgatcgctgacaaccattaagaaaaatatgaaaggctactatatccaacacctgatgaaccctaatcatccaggaagccatagaggaatcctcaactctcagctagattgcaagattatgtcatgtttaatgacaaagatacatctaatgaagagattatcaattttactttatttgcagactgtgatccagttatttttgaagaagcctcaagtgacgagaattggagaaaggcaatggatgatgagaatcgtgctattgagaagaatgacacatgtgagttggtggacttgacacatacaaaaggccatcattatgagtaaaatgggtgtacaagactaagtacaatcctaaaggagaaattg

SEQ ID NO: 263670 - DNA, 433 bp, Glycine max
catgcagctaagtgtgggatagaccaggccatttttatgacctacaggaacaatgagctattgtatttcaagcttaagcatggactgagtcaagcttaagtgtaaaacaagtttgacttaagtgcgaaaccttgcgaaatatgtatgaatgacttcccaaatggatttgaataggaatttccttacgttataagaattatgagatgcataaatagggttctaagggtatgttatgaaaatttactcttactaagtatatatgagttgagagctgaatggatttagtatggattttttgcctttaattgtattgactgaattggagaccagaggcttttgatccttgaaaaatgcgtgtaggaaccttgatgtgaagcttgataataattcaaaattattgaggataagataggatatgaaacctgggggggac

SEQ ID NO: 263671 - DNA, 408 bp, Glycine max
cagcttcttatccaaggctcatcttgtgttttgtatctcctcttccatggctaattccctagtggatggcgcctcctctcacctcttctcctttgacttccggtgcatctccatggtggaaaatcaccattataggacctcattgaagctcatagatccagcctccatataagccccacaagcaagcttccttcagggatggcaacaacgttgttcatgagtttcaatggatatgttgtcgtggcgtcgtgagagtgatggatggacaaggacagcacgggtggaagggaaagattgatcaacagcatcatacatatttcaatattcggttatcttaatcatttaaagataatattaattagccattattaaaacagattttaattctaatcttcactacggctatgt

SEQ ID NO: 263672 - DNA, 450 bp, Glycine max
  unsure (1)..(450): unsure at all n locations
agctttacaagtgagatccagctttgtcttattttcgacatcgtaacattgtaaagctacatgggttttgttcacattcacaatactcacttttggtgtgtgagtttctggagatgggcgacgtcaagaagattttgaaggatgatgaacacgcacttgcgtttgattggaataaaagggtggatgttgttaagggtgtagcaaatgctttatgctatatgcatcatgattgctcacctccaatcgttcatcgtgatatatcaagcaagaatgttcttttggattccgattatgtagctcatgtctcagacttcggaacagccaagtttcttaatccagattcatccaattggacctcctttgcaggaaccttatgatatgctgctccaggttaatttctttctctatactatatgagtacatcatgatattttagtcngtcttccttag

SEQ ID NO: 263673 - DNA, 458 bp, Glycine max
acctgcggctgcagcttaactcgagtgaggttttttcttatagcactcatggggctcctgaacaagttgataatggagaattgctctatacactcactatgcatagctccaaactctgaagtggaggacacatgaacgaaatcactatttatggggctcctaaataggttgagaatggagaattgcactaagctatcactacacatggcttcatactctaaggtggacgacacatgaacgaaaacactattcatggggctccgaaaaaggctgagaatggagaattgcactaagcaatcactacgcatggctccaaactctaaggtggaggacacatgaacgaaaatacaattcatggggctcctaataaggttgagaatggagaattgcactaagctatcactacgcataactccaaactcgaaggtggaggacacatgaacaataactcaattcat

SEQ ID NO: 263674 - DNA, 407 bp, Glycine max
ttaagccaacacttgtttgggctgcaccatgttctcttttgatctagatagtgtgaaaatgttgttcaccacgtacatgtgtgtgttgaatatgtagctaaatgttttgcacatgtgcatatatgttgaaattggcaccaacatgcttctcaaaataagaacatatgatatgaaattgcctttcaagaatgtgaatgagtagtacaaaaattgcttttccaatgaaggtgcgacatgaaattggtctcaaatgagtgtatattgtgccaatattaacatgaagttgcctctcacatgtatgtgaatgacatgtgaacatatagcaaaaaaatggcgtaggtaggtagcgaatgccttggaaaatatgtatggatagtttgacatatagcgtaaggaatatcttggca

SEQ ID NO: 263675 - DNA, 447 bp, Glycine max
  unsure (1)..(447): unsure at all n locations
agcttgcctgtccgacgcagcagtaattttgtgtctagntacggnggggaacggngacgaaccctgaatgggattatgcaaatacaacgactgtataactagcctgataaatgccaaatgaaatcgtgggaagtatgggttatgctataagcccactcatgcagatataaagagaagcatcacgggaaggaagaatggtagtcaaagctcgcggttgagacaagaaggtgaaggaagcccgccctgccacataagtagaagctttataagcgcgggtctgggggacgaaggtcaagtggtcgcgatgtacgaatatgatgttccgagtacattggatctggtacgaccatgccctcctgatntctagctgggaaattggcgagtggaggaacgccctgacattacgcaacgagcataatgtacacctttaccgttctaaagctctat

SEQ ID NO: 263676 - DNA, 283 bp, Glycine max
  unsure (1)..(283): unsure at all n locations
tattggtaagggattatcaatgtgtntgagaggtggaatttaaatattaatgtgaagagtctcatccttttatgaagaagtttttgtaattgatgtacaggatttggtatttgattaatagtgaaaatgttggaatattaaatcataagatgtaactcttggattggttnttaggtttttataaaggtattaactgttctaatgatttatttgaccaggacttgaagagtgtataataagaagaccttgatttggatttgaacaatatttacaaacttttaaa

SEQ ID NO: 263677 - DNA, 478 bp, Glycine max
  unsure (1)..(478): unsure at all n locations
cccggatctntaagtcacctgaggcatgcaagcttgtgcatccaataccctgatatgatgttccatatgtncttaaaactggactgattcatttgctttcaaagtttcatggccttgcatgtggagacccgcacatacatttgaaggaatttcatattgtctgctccaccatgaaacccccagatgtccaagaggatcatatatttctgaaggcttttcctcattatttagagggagtggcaaaggactggttgtattaccttgctccatggtccatcacgagctgggatgaccttaagagagtattcttagaagatattttccctgcttctaggaccacagccatcaggaaggatatctcaggtattagactactcagtggagagagcctgtatgagtactgtgagagatttaaaaaactatgtgccagttcgcctcaccatcatattctggagcagcttcttttcaatattttatg

SEQ ID NO: 263678 - DNA, 447 bp, Glycine max
agcttagatgcctgtcgtatggttatttttgctcaggcagatatgaccggcagactgcttgtcgggtcattgacatttgattatcacatcttgcactatatcattgtaagaatattgatgcctcgttcttctaatctagctcaagcctctgaggaggatttgattctgatgtgggatttcttgaccgatcgtcagatcgactgggcccatttgatttgttaccgcatgcataaggcattgcggtctagtgcacctttaccctatcctcagttaatcactttatttctgcgtcatttcaatgcacctcttgcttcttagccttttattcaagttaaatgatccttctctattggtgttggagcggacacctcttatcgctaccgcacggagatggatggctcttgggtgaagaaagatgcattcgcacaggctgcacatgagcataca

SEQ ID NO: 263679 - DNA, 304 bp, Glycine max
tgcatgttaggaagttctagagagagtattgtccattttccacagagttgtgagagattgtgctgtgtgaagatctgcagagacgatagctctaatcggaagccgttctgataacttaagatgagtttgtgagtggttgtgagatcctggagatgaaggagacatcctcaccacttgtatatttactatctttcatcttgttcttctctgagatgtaaaggagctttccagaccatagaaagctaaatcctctattggatttgtaggtacctgatgtgaatatatttctatctatgtaatgatg

SEQ ID NO: 263680 - DNA, 445 bp, Glycine max
agcttgtgaagtgtgcaggttgatcaattatttctctggctagaggctaatggccaaagccctcatcagggaggcagcataatcctaaggcgccaactgtatccaaacgtgaaaagctgcatcaccgcatagagtttcttgcctgtaaagatcatactccacgagggagataattcaacatgaaaactatctttcacggacccagttgcagctctttacacctgccaacttcattggagcaacatcacgtgcttcatgctcttgaactcttgatgcagttgctgcctctatctggcgcctgagactttgcgaccataacttagttatgctaatgtgctcagtggccttttacttgctagtcgctattcttcatatatattctggatctagctaaattcaatgaagtcatatgggagaatatgagatatcaatcatatcatgatgc

SEQ ID NO: 263681 - DNA, 405 bp, Glycine max
tatccgctggtaccataccagagagttttgtttttctcaaacttaattcatacaagttagaggagtttactatctgaggaggaatctctcctgatatttggttggaggataggtcaagctcccgcagttggtccaactgaaaaatctcacctggaatgttgccacttactccattcccagccatgttgagatattgcaagtttttgcaagcaccccaatttgcagagaggtcaccttccaccctattatagctgaagtccatgtaagtgagattaggataaactccagaatcctgatctgcataacctgtcatccggttgtattcaagtcgaactctgtacaatgctgggcagtttctaaagcttattggtattgggcctgtgaaactattgtatgctgcactaa

SEQ ID NO: 263682 - DNA, 446 bp, Glycine max
  unsure (1)..(446): unsure at all n locations
agcttctccacgttttggaaaaatggatttctgtgctttatggcttccgtaatgcttttgtaaaatttccgaanaccttgggtaagcatattccacttaacattggtgaaagggaagagaaaaaaagatgaaagttaagtcatatatgcttccgtaaggcttccgtaactttttcgaaaattatgaaagaaggtggggtcaacttatcaagatacgggtctaaataaaaatttgagtctaggcccttctggaacattttggaagttgggttgcttaaggaggaagcaactgtgcggcaagctcctccacgtttttgaaaaatggtttctggggcttttgtggcttccgtaatgctttcgtaaaatttccgaaaaccttgggtaagcatatcccacttaacattggtgaagggaagagacaataatgaaaataaatctgaacacttc

SEQ ID NO: 263683 - DNA, 342 bp, Glycine max
  unsure (1)..(342): unsure at all n locations
gggggtggaataaagtattcccaacttttcctaattaaaaaatcaattgttgatttttacccaaaatccaagattctttcaaatgaacttctaaataattatgcaataaacaataaaagagttaaagggaagaacgattgcanactcagaattatactggttcggccacacccttgtgcctatgttcagtccccaagcaactcgcttgagagttccactatcttgcaaaagccctttacaagttttgaaccacacaaggacaaccctccctttgtgttcagaatgctttacaacaagagaccctcggtctcttaatccctntttagaaataagatgaagaga

SEQ ID NO: 263684 - DNA, 454 bp, Glycine max
  unsure (1)..(454): unsure at all n locations
agctttnttgtgaaaggatgtgactcttttcattttaatttaaattccaacgttcaaacatataagtaatcaattaccaaatcattgtaatcgattacaacattntgaaatcaattggaacgttgtaaattcagttgaaagccttttgaaaatcattttgctactggtaattgattacaataatctggtaatcgattaccagagagtaaaaactctttggtaaaaggttttgagaaaaattcatgtgcttctcagtttttgaaaaaactttntaatacttatcttgattgagtcttctcttgattcttgaatcttgagtcttgaaacttgatcttgattcttggaacttgaatcttgaaacttaattcttgaaatcaaatttcctcttgaaccttgaagtgttcttgactcaatcttgaactcaatcttgaatgtcatcatctttgttatcatg

SEQ ID NO: 263685 - DNA, 396 bp, Glycine max
  unsure (1)..(396): unsure at all n locations
gtgtatggaccatgtcgtanctcatgtgctcatcgataatggntccagtttaaacgtgatgcctaagagcactntggagaaattaccattcaatgcttcccacttaaagccgagttcaatggtggttcgtgccttcgacggcacccgccgagaggttaggggagagatcgatctcccagtacagataggccctcacacctgtcaagtcaccttccaaataatggatattaaccacccctacagttgtctgttggggcgcccgtggatccactcagtgggagttgtgccctctacactccaccaaaagttgaaattcgtagtggaggggcatttggtcatcgtgtcaggcgaggaagacatcttggtgagctgcccattctctatgccttatgtgga

SEQ ID NO: 263686 - DNA, 467 bp, Glycine max
  unsure (1)..(467): unsure at all n locations
tgcggcatgcaagcttttgctcttactataagtttataatgtatattgtattcttagaccacctatttaaaataaaacaatctcatactgagtagttaaattataaattattatgtatattgaatgatacattacataatcgcataatattaattaagatattataaatgatatttaaattatttaaaattaatattctaatagttgctttatatactatgcaaatatgcattacattataatattaggtagtattatttttaatcaagggttttgatcgacaccagctaagaaattaaaaagagtaattctctttattgaaaaacatgtgtaaggacattttanaattacaggagagcttaatttcacacatctcaatacacaataattatctcttactttcttgatcaatgctttaagaatactacgttatatttatctctaatcaatgattaatcgttcactta

SEQ ID NO: 263687 - DNA, 365 bp, Glycine max
  unsure (1)..(365): unsure at all n locations
ataagaaatttaaggatgtttctatttcattgtattcttattttgcctccacacaacctcattcttgaaccactattaatgtttattggggcttgtttcaagagttttctattcttgtctattnttctttactaaaaaaaacactgtttctttaaaaaaaattcccaaattcaatttttcctttcaccttcaacaattaaaaaaaaaacccacaaatatctctccaatacattactatatttgggtaaatataaaagctttaaacattggatcatagaagcaaaaaccacaatgagagagaaacggctgtgatataaggtatggacaaattgcacttaaacttctattacatcactnaatattaa

SEQ ID NO: 263688 - DNA, 454 bp, Glycine max
  unsure (1)..(454): unsure at all n locations
agcttcaccaccaagagagtgccttggattagaatcttagagaggaagcttccacgaaggataagaatgagagagagagagaaggggggagcatgataatgaaggagaaaaagagggagagaagttgaactttgaagtgtttctcacaagtttctcattcatcaaagttacaacaagtgttacacatgtttctagttgtagcctaggtagcttccttgagaaacttccttgagaagcttccttgagaaacttccttaagaagcttctttgagaagtttccttgagaagctagagcttaactacacatacctctctaataactaagctcacctccttgagaagcttcttagagaagctagagcttagctacacacatccctctaatagctaagctcacctccttgagataagaagctagagcttagctacacacccnnctatatagctaagctca

SEQ ID NO: 263689 - DNA, 347 bp, Glycine max
  unsure (1)..(347): unsure at all n locations
tgttctcagtatgaaaattaatagtcgaatgcttcaaatcaaaatattcaaaatcaccagcaacagaatactcaaaatgaccaggatgtacactatgcctaactaatctatgaaagggtctatctatttcaagatcaaagggttgtaaatcacctaaattgcccctagtcatgcactatatgcggctaatcatgtgtttcttaaacaaacaccaggggagggttaaaactacaactatagtcaaacgatatctagatgagctgaaattttgtgagcaacatcctaaaatcatgaaaagatagcacataaatttctagacanaaattaaaagtctaactatgaaaact

SEQ ID NO: 263690 - DNA, 441 bp, Glycine max
  unsure (1)..(441): unsure at all n locations
agcttgactactttggactgaacatattcttggatgaaatgatgatcaatgtcaatgtgcttggatcgttcatgatgagtanggtttgaagcaagacatatagcagatttattatcacaaaatagcatcacagagggcacatcaacttcaaagtaaagaagtaactagcttaacctaacaatttcactagtaacagaagacaaggcatgatattaagcttcagtggatgattttgaaacagtgagttgtttcttataacgccaagaaagaaggttgtttcccaaaaaaacacaaaagccagaagtggatcttctggtatcaacacagctggcccaatcagcatcagcaaaggcagtgaggttgagagagttttgagcatggaaaaacaaaccttgttcaggagcagatttgatatactacagaagattatgaacaacatgt

SEQ ID NO: 263691 - DNA, 252 bp, Glycine max
ggtgtttgatattcccattggaaagtacaatgataaggtgctttgtgatgttgttcctatggaggccaaccacttactcttggggagaccatgacaatttgataaaagggcttatcctgatgaattaacccacaagatctctttcaccgtttcaacgcaaaaagatagtgctcacaccattgagtctcacaaaagtgtgtgaggatcaaagagaaatgagagagaaaattctttcatgttagagagaaaaag

SEQ ID NO: 263692 - DNA, 435 bp, Glycine max
  unsure (1)..(435): unsure at all n locations
ngcttcaagtggtaatcagagcacttgattcttcatataggtgctccttacctccattagttttcagctttaccttctcctccattgatgnttctttgattttctccatgtatctcctcacatgtcttgtgctaaatgttgttaacatgagtttttataatttccaccgattaaacttgctatagaagctagatttgattttctatggttcaaatttcttgttcttgttcttgaaccataaattgggttaagtttaggatcctttgagttctgttttggtattttttgtggctgaaacctaaaccataaaattattacaaaaacattaatgttgaagaagacctcaaaaatctagagtgacttgttcacctattgtagttttttcatagaagtcatgtctattcatgaaacttgttcacctacaaaattattgct

SEQ ID NO: 263693 - DNA, 358 bp, Glycine max
  unsure (1)..(358): unsure at all n locations
ggccacagagtggtacctggagatatgtcgcaagggtcaggagaccttggggacgtcaggtggggtgctattgcccaaaaccaagcttgaccaatcccgacccaaaccgggcatagtcagttagtgagaacctgtgatgtacctaaacaggcgagctcctggcagtcaacagataagaggaacaaagaccacaaagcaaggaggcttgtgttgtggttggtcagctgtgaactttgattgatatatgggatatggcctctggtaatcgattaccaagggtgggtaatcgattacaaggcttaaaaatgaagacaggaggctaagatggtctctggtaatcgattaccangcttgaaaa

SEQ ID NO: 263694 - DNA, 441 bp, Glycine max
  unsure (1)..(441): unsure at all n locations
agcttaggaatcttgaagaaggatattatatatatgggtaaggcttgttaagactgaattaatgagggttattctaccccccattgatagatttctttgcttccattttgtaagtttagcctcgaatttgctaataatgggctgccacacaaacctacttttagagctcacccctacaggaattccaaggtaagagaatggaatatccatttgactacaattgagagaaaatgctgcctccctacaccagtcctccgatttgcccaaacacccaaatttgctcttattgtagtttatcttaagaccagagaccaattcaaagcttttcaggatacactttagaattntaacattatcattagtggcagccccaaagaacaaggtgtcatcagcatattgaagaatattaacttcctctttnttctttcccacttggtagct

SEQ ID NO: 263695 - DNA, 396 bp, Glycine max
tatacttggccttcatttaactgtctttggtcttggcggccacgctcaacaaagtactttcgacacctactgtacgttgatttcaccaatgctgttatgggaatgttgcgacaatcttttaaaaccttattgagacattctaagaggttcgttgtcatgtggccatatcgacgtccttctctatcgtaagccatcgtccatttttcctttaagatgcgatcaatccatgttgctatggctggactcagttcacgaaatttttctaaattttgatcaaaaatgtgcttgcatggagtgtaggctgcataaaattagttatgaataacaattttaagtataaatgaaagtaaaataaacgtgaccatcaaatatgaaatttacccaatttcttcaaca

SEQ ID NO: 263696 - DNA, 458 bp, Glycine max
agcttcctcaaccacctcattaagtatcttattaccatgaagtatatgtctgtctttaatgaaagttgtttgtctttcatcaattaagacaggtatgacattcctcaacctgtttgctagtagcttagctatcaccttgtacatgcatcctatcaaagagattggtctatagtcattgaaggactgagggtggtttactttagggattaaagctaggaaagaagcattgctgcctctagggaagctgccattgacatggaactcatccacaaatcttctaaactcaggtttcaacactccccacaactgtttaataaaattgaagttaaaaccgtcaggcccagggcatttgtctccaccgcagctccatacagcttcctttagttcttgatctggttaagggagaatcatatcctccatctgcctcagagtaagtgaggggaactgaactccatcaa

SEQ ID NO: 263697 - DNA, 449 bp, Glycine max
  unsure (1)..(449): unsure at all n locations
acctctcanactggtacaattataacaacctacttctctntctttaagtattngatgggtgcaatgaatggatttagaagcttgacatctctcaaacttttacaatcagaacaacctactcttatttatatagctttaatatacctaaaggcgtgaatggaaagatttaagatcttaagttgtccgaatcattcatgagaggcggagtcgacattatgaaagtactaaatgtttgaaaactaatagttatgctactgcaaaatctaagactaccacaagagaattaaaagaagataaagtaatcaatgactaagatgtttcatatcattgaatgatgactcttcaagtgtccttatctaggtttaaggattaaaatacaaattatataatattaccaattntagactaattaagtccaaactgtaaattctttaaccatttaactttat

SEQ ID NO: 263698 - DNA, 455 bp, Glycine max
  unsure (1)..(455): unsure at all n locations
aagctgtatcataatcatagcccttctctctattattagtaagatctccattcttctcagtgtggtttctggattctttggcttctctagcttctgcagatactttatgtaatgcagaagctgagctttccattaattgcctttttactcttttcttctctggctcctgttaagcctatactgtataatatatataagtatggatctactatcaaataggaacaattacatgatgcaggatcatcatttattttcctgaccataaacatacatgtatggttattgtatatgataaaaaaattaaatttaaatagattcatatatatatatagaggaacataaccaatcatgggaaattaatgtggtataattaacttatttaggggagaattgaaataanctctacataatatgttaagtaacgtatgaactctctacaatatagacttgctatt

SEQ ID NO: 263699 - DNA, 442 bp, Glycine max
  unsure (1)..(442): unsure at all n locations
aacttcattatgaagtttcattctcttagtcttgctcttcatcattatgatgcaaactctggtgtagctttattctagaagctctctttgtagtcttggatttgtcttctatgtaaggccttattgtcttgtacttttcaagctcaagtactcagggggaaacattattcatcatgtagatgggcttctaaggctcttactcttgatagtagtactaagataatgataaatcataatttgagtgatattttttgtgagtttccgtgctattttcatgcatnttcttggcaaaactcacgtttgaacactagttttaccttgcagaagtataaccgcttaatcaagtgaagaagttggaaaattcacaatttaatgaaaggttgatgctattctcacttgataacagtcatggtgcattgaccacggtcgtgggcaactcata

SEQ ID NO: 263700 - DNA, 459 bp, Glycine max
agcttttaggaagcactgtaaataccttatattccttgttatgtatctccttgatagccttttgcgctacctgtttctattaaaagccacaaaggcataaccttcgtgttctcctttatccctgtctttcattaatcgcacctgaaaattaaaagcaaatatttttttaacaataatcccaattttccccacttgcagtgaacccaacccgactcacatctaggtagagtcccagctccttgtgctggtagagccactccacgtagcgccgccatagtgcgtgtggctccttctcgagtctggtgttgagagatttagttatttcagagagttgttgtcacggcgcgggagcctcacacgtgagggagcgtgacgaggagggtttggaggggaggagtgggatgcggcgtcatacatgggatgaagtggttgagagatgccggaggatgagaaaatgcc

SEQ ID NO: 263701 - DNA, 200 bp, Glycine max
acaatgcgcgcataaacccaccataccctattgaccacctccatttgagctcacgtactcccacagagcccatatgctcttttctctcaacaccgggaccccatcaatccctccaagctttcccaacatcaaagcaaaacaacattcaaacagcacatgctatcacatccaaagcaaacagagcaaaggcagaaaactct

SEQ ID NO: 263702 - DNA, 394 bp, Glycine max
  unsure (1)..(394): unsure at all n locations
agcttctgccccaacncactatacatagttggagcagtgaagttaaagagggatgagcccgttctgcactcttctatgttttgaagttgcttaagacaatcgtctgtgtcaagaatatcctatccgttgctcttacgtaacgctttcgaacgttaccgtgagtgatttcgctatgctcttgaccgtgcttccatgctcttcattcggtacacatcgttcttcagacttcaacgtgtaagtgacctgctccatgattttgaatacattctatgctcccgcggcggaccacattgggtggcatgagtttacattctcgagttcatctacttgttatacacccatacgacgagcttacaccatgtatattagatatctctcgcttaacctagacata

SEQ ID NO: 263703 - DNA, 224 bp, Glycine max
ggcatgatacaccgggatcggcaccagcatccggactatggtgagtaccattgtataagagacctctgtgtctgaagctgatgaagatgttcccacatcttccacaccgaatgctgctgagcctgatggtgaaatagatgatacaatatcttccgccaccgatgttgctgtgcctgacgacataacagatgttgtagcatcttccggcccttatgctgaagtac

SEQ ID NO: 263704 - DNA, 416 bp, Glycine max
  unsure (1)..(416): unsure at all n locations
acgagcccaaaaggtgctcaatggtctatttcttcaagacccgaggagcttcgaatatcgcgacaacctgttcatactttggatctaacgatctaagagttctccccataatatttacatcaacaagcctttcaccatttctctgatgtggatcggggaccattatagctcttaaagcttgaagacatacctgncttgaccggatctattcccttatataaggatagaaacttctcccacgcttcttttaccgacattgctttcacaaccttctcgaaagcatcatcattaactcttgaaaattagaacagagcttcttatcctcttcttgatctctcaacatcctctgagatggagaacatcctatttgtgatctggggacttctctacattccaacatctgtcccaagaaagct

SEQ ID NO: 263705 - DNA, 217 bp, Glycine max
aaatgccttcacttttaacgcgtcatattcagtctgatgggtgtacccactatgcctttaaagaattttcctctgatgtgttcaagaacgtaaagtcaaattgaaggtatacaccatcaaacgtcacacctttaagcagggggattgtaacatttttaccacgcttgaacctaagcgtatcaacattttgcggaatgctaattagggttaaattcaa

SEQ ID NO: 263706 - DNA, 112 bp, Glycine max
atccagccacaactccatggactacattgtaagttcccaaggtaactattccatggagaatccttgaaaacaacctcttaaatattgaaattgtatactagaataaatatgg

SEQ ID NO: 263707 - DNA, 436 bp, Glycine max
catgcaagcttcaggctgctcaattactccaggtttctgtattgaagggcaaaggtctgtatggtggtcagcagaggagcacaaaccacaaacccttgcgacaagtacagatttctgattcaaggccagctgggttaccaagttaaccaatgcatccagtttgccttcaagcttcttagtctcagatgatgcagctgagtttgtagctacctcatgcactcctctaatgactatagcatcatttctggcgctaaattgttgggagttggaagccatcttctcaattaaatttctggcttcagcaggagtcatgtcttcaagggctccaccactggcagcatctatcatacttctctccatattactgagtccttcataaaaatattggagaagaagctgctccgaaatctgatggtgagggcaactgtcacatatt

SEQ ID NO: 263708 - DNA, 437 bp, Glycine max
agcttgctaacccatggaagctactaatattttcacctttttggggggggccattcttgaatggccttattttctcagggttcacttggaccccatttctaacaactacaaaacctaagaagactatattatctacataaaagggacacttctctatatttgcatagagggtcgctatcctaaggattgacagaactatcctgaaatgtcttaagtgatcatctaggctcctactgtacactacaatatcatcaaattaaacaactacaaatctacctatgaaatctcttaagacatgatgcataagcctcataaaggtgctcggtgcattagtgaacccaagaggcatcactagccattcatacaaaccaaacttgatcgtgaaagcgctttccactcatatcctatttcatcctgatctgggataaccactttta

SEQ ID NO: 263709 - DNA, 199 bp, Glycine max
ggatgtggatctacttttctttgattaagtgagaggaaatgatatagagattggagaaaaactgaattattcaccctgaaagcagtacagaattagttataaagaggtatatatagacctctaatcctttgaactaagcaaaacacaattaaccataaggagggaaattctgtcaatagaagctaacatcctaacacca

SEQ ID NO: 263710 - DNA, 332 bp, Glycine max
tctgggagagaaacggagaagaagttgactttgactgagctgaccagattctcattcatcataggtacacacaagtggtacccatgcctctattcattcactttgtagcgttcctgaaacactcttctaacaaaactatcctcgataagctactttgataaaacctccttgcgaagctagagcttagctacacacctccgctctataacaaagctcacctccttgagaagaaaagctagagcagagctccacacccacgctatagctaacctcaccccttagacatatatacatgaagattcaatagaaatgtccttactacaaagactact

SEQ ID NO: 263711 - DNA, 408 bp, Glycine max
  unsure (1)..(408): unsure at all n locations
ctatctctaacattatcaacctttgacggttgaacagagagaggagcacaaaatccctgttctttttacaaggcacacatcttgaagctgccaatgttaaagctattattccccatgaatctctcaatcttaattgtgttgaccatcttctngatgaatgttgaagacacaacacgaacaaaaatataatggttgaactctaatgacctatacccaccactaaacagatgctgaactaatctgaaccaaagctttaataccaatttgttgggattaaaactaacaaaatatgctaatatatgatccgaggagaagatatatacacaacactggagatcgatatgatataatttagttcagagctcttttactccttatcaaccagctacataccctttatagacatac

SEQ ID NO: 263712 - DNA, 209 bp, Glycine max
attctgctaataatttggacgttttaatatcattgacaaactggtgtatgtcggaaatgttatccatagctgacaatacttctggtaggtatctgccaaattctctgggcaatgtatccacccaactcaatcaactgaatcttggaggtaatcagatatcacgagaaatttccgatactatatgaaatttaattggctatctttttaac

SEQ ID NO: 263713 - DNA, 429 bp, Glycine max
  unsure (1)..(429): unsure at all n locations
agcttagattgatctcttgatgaatatattatgtatagctcaaatcaaacactaatatggtcaaacccaattaataaaaatcactagaactacaaccataacaatcaaacagtatcctcttcttccactcatttaacaattgaagtttatggagtgaatcgaccatctctaactggagcaaacatcaactcgaatagggaaaagaatgctagtagtaatgtctaaattggtaaagttacaaatgattaaactcctaagcatgtgaacattaaacaaggaatgtgttcgaactgtgttcagacagatacacgttaaacactacctagtctagatnttgcatgtaacccatcatagggtggtgatagaatgacgtttcaaatagtgaacacgcgtttaattgaatcatggcaaatggataantgataaact

SEQ ID NO: 263714 - DNA, 388 bp, Glycine max
aagctccttcaactgcacaagagctcttaatatttgaagagtatccttgtggaaccttcacccgatgaagacactgacaaaaacttatcttctccttttaggacaaagtatgacaagctgggggcaaataaattttctttccatcagaccttggatgcaactgtaatcgtattcccattttagctaaatcttaacgggtattcaagccatcctttgtcttgccttgaatgttaaggagcatcccaatcacactgtcacatacatttttctctacatgcataacatcaatacaatgtctaacatccagatcagaccagtagggaagatcaaagaaaatagacctcttctttcatatgcaagtcttacttttatccttcttttgggtctt

SEQ ID NO: 263715 - DNA, 330 bp, Glycine max
agctcgcatgatttacatctctctcttttttatgcaaatactccttgatatcatcaaaatcttcatgatttacaacggcaaccctcatctgggatacaaccgagcggcttatccttatggattgtccgccaactactcaccacccgttctgcatgacgatgcgggcaatattgcttctcctgtccttgaaagagagcctccttaacagcccgacgaggtccacgaagaccctcaagactatgctcgaagggatgtcgagttctatcccccgattaccgaagggccgacacccagcatgttgtctcatcccaacatcacgacacaaccaat

SEQ ID NO: 263716 - DNA, 362 bp, Glycine max
  unsure (1)..(362): unsure at all n locations
tttattcgntgaccacagagtgggacctggagatatgtcgtggtggtcacgagaccttgcggacgtcatgtggggtgctattgcccaaaaccaagcttgaccaatcccgacccaacccgggcatagtcgctctatgagaacctgtgatgtacctaaacaggcgagctcctggcagtcaacagataaaaggaacatagaccacaaagcaaggaggcttgtggtggctggccagctgtgaatattgtgtgatatatgggttgtggcctctggtaatcgattaccaagggtgggtaatcgattacaaggcttaaaaatgaatacaggacgctaagatggtctctggtaatcaataccacggggtg

SEQ ID NO: 263717 - DNA, 303 bp, Glycine max
ataaactcatgttcatacacaaagagcgacgattcctatatataatttactaaaatctctcttctcgctcaacatctaccaacttagaaagaaaaccctcttaattatgcacccattcatttataatgaattcagctctaattaatccacctacctctacatgacttttatttaacaatgtgaaatttaatgagactgaaataaagcatatctcacgagcttgttgtgcttccagattcttatattcagatgattaacttgtgttatgactgtacactgaaatgacaactcttgataaaacat

SEQ ID NO: 263718 - DNA, 415 bp, Glycine max
tttattcaaacaagcagttgaacagataatatttatttatcctcaccagacaattctatgctgagacactaataaaattcaaagttctcaaaacatcacgaattataacttagttcacccaataaaaatattgataattcatgtataaaacaaaagaaaaggagtcaacttgttcgatttactgtataaatgttaccaaatgatactattttattaatatccgcaacattaatttctctgaacatgttagataaaatgttattaagctgtattttagatgctaatccaccaaaggttcgtcaatacttgctctctaatgatgggatcgttcccacttactttcacatggctcttttcttaccttgaatgtggttggaatgctgcttctttaacgtaagagtgttttgcctacctt

SEQ ID NO: 263719 - DNA, 462 bp, Glycine max
  unsure (1)..(462): unsure at all n locations
agcttaaagtatgcccgagtcattcatccctatgagatgttgttgaagtattggcaatcagaattgccattccttggattatggggttgaaccaagctcatgcttttacaaaaaggttcatcaagtcaagttgaaatatggaagtaaccgtcttgcaaaattggggcaaaagatgaatcgagtcacatcaatgcttcgtctacttccaaacatatttaggattattgatgtccttgttacttccagtttcaccttgacaaagatgtcatggaccatgttgaaaatctaaattgattcaacctcatatcttgcgtaaaaatgcacaatacttcaactgtacatcattcgcatacatccatgcttttcattggttgcattgctcattgcattctttccttgaanaagaanatataaataaataaataaattaaataaaataaaaatgatcttaatcattgttat

SEQ ID NO: 263720 - DNA, 450 bp, Glycine max
  unsure (1)..(450): unsure at all n locations
tattcctttatgtgttccttttcctgcaagttgtgttaattccaagtctatgggaatcaaaacacctatagaagaccttctttgcttgcaaaacaagcaaaataatagttaaccaattccaatgaacaatgaattatgcaataactaaatattcacaaaataaacaatgaatgaaagaataaaaaaaataaacacctatatattgaactaaacttttctaaataaaaagaagttccccgacaacgtcgccaaaatacttttgttcacatcctggtattactacttatttttgtggatgtgaaatctaaccggcaagtgcaccgggtcgtcaagtaaataattaanacggaatgaatcgagtatcgaactcagggaacttngtttacttggaaaagtgtcattccaaatgcaagtgtctataaatataattaagtgtcatgaattgaaaac

SEQ ID NO: 263721 - DNA, 352 bp, Glycine max
  unsure (1)..(352): unsure at all n locations
aattttggctctcaaaattggctccaccaattcaatttcaaattccagtgaaatttgaatagaaagtcaaattcggcttcaatttttgggtgacactaaggctacaaatagaggctatgtgtgtgcatttttccaactttgatcattcgagaattaaacttcaaagttcagacttctttagaggcactaaatttcgtgctcttctctttctctgccttcattcatcttcttctaccttncaagctcttatccatggcttactatagtggtgagcttcttctagactcatcttctacttgaagtggcgtctncattcatctttctccttctccattctgctgcaatcagacct

SEQ ID NO: 263722 - DNA, 346 bp, Glycine max
tccacccatatctggccttcacttaaccatactttcattggtgacaacagcgtcaaagaattcttgctccccgcatacaaaggcttctctgaatcaatttgcaatgtatcatacataggggcatgtgcttgttgaatagactcttgtccaagatcacgaatcatatcccttaagtgatctcccatttctacatcaaatggttcagattgagaccccctctgcatgtctgtcaattcaccatgtcatatccacgtggcgtaattctgcttaatctcatcacacaatagatgctcccgtatgtcgtctagtatctgtcgtctcccgttcaaacaattgatgccaggac

SEQ ID NO: 263723 - DNA, 405 bp, Glycine max
gtcacctgcggcatgcaacttacaagggcaaagctcacattcttttcttctacatcataatccaacttggccaataaataatacagtcatttccactcaaagaaaggcatatatgtctcataccattaatatagaacctattatcctatggcacatcctaatagagcgtggtgtccacgtgtcctttagcatgaggttcttatagccatcccctattcatctgctcccccgaccacaaagttaaatcattcaggatcgaaaccacaacagaaacctgagtgagtatcactttgctaccactagagagacacacacaccttattcttacctaatacaatttacttacatatctcacatttttatataccttgccattatcatcacacttttatccttactccacct

SEQ ID NO: 263724 - DNA, 368 bp, Glycine max
gcctatgccccttgaggatgaaggttttgccaaactactggatgtgtttccacatttgtcgttgaatcgccaattgttggaagcgacaatgggactcctgctgatgttggtgagaatttatgcctaagcgtggaatgaagatgttgaacgcttgcttgctggatttgtttcaatctcttgagagaaatgtgaccgaccaataagaggaagaagcgcggttgtatgaagaaaaggacaaggaggaacctactctcaggagacctaataatgggccagcggggaacgtgaagaaatggatctgctcgaggggaatggaatactctgatgaattgtacctttctgtaaacactttctgaaataatattggc

SEQ ID NO: 263725 - DNA, 389 bp, Glycine max
  unsure (1)..(389): unsure at all n locations
gcgacaaaataacttatgtgaatggaacatattttacattgcttatttctattaggaatgcaaaaaaagttgttctaatagaatctaaatttcaaatcttcctcgagacaaaaaaaatattttaattttataagagccaagagaatctctgagatttttaaaagaaccaagatgaatntcaaaaatctctaattttatgaagggtgaaaacacataatatcagttgtttatatatagtacaactgtgtgagatactgagagattgcaagtggttgagatatatatttaaaattatttactgaataatattattttctaatacatatgttattgcacctaacaattataaaactccagtacaaattctcctggatgagagatacaatcta

SEQ ID NO: 263726 - DNA, 450 bp, Glycine max
agcttattaattcttttaaacttttatataatatcatataaaatacccatcctaaaataagggcactttaataaataatattaattagtaagacatttaataatagaaagtgaattttgaatgcacatttattattagttattggaggaaggataatggattttactgatcttataatgaatattagacttcatcattcatcatgaaaatttgacattgactaatttagaattacgctaatttaaaattaggctgaatattaaggtctgatcaaaaattatttttgtcaggaatcaaatttggataatgttcaaactatttaaccttagtatattaaccacttgtatccaaatcactggtttatttattatatgatataaaataatattctttagatactcaattgaaattgtatttggcttaacatttaactaataacaaaataataca

SEQ ID NO: 263727 - DNA, 400 bp, Glycine max
tgattctttttgttcaattctgatcctagaaatgcgacctatgcgcttatgccataatgcacttgagttaatattatcaattctacgcttaataccacacagctctgcattaaaggattcaccataagaagctacagtatccagtatatataaattatcattaaccaagagtgaaccagttccaacaatatctgaattaaaagtcaacctgaacacattgtttccaaatgaacataaataacccaatttgttcaaataagaaaccgaaaccaatttccatctagatgacggtaccacaaaagtgtctctcaaattcgaatacaaactagtacatcataataatctaatatgctctatagcttccagcttcacccgattaccatctcctacatagatcatc

SEQ ID NO: 263728 - DNA, 440 bp, Glycine max
agcttgatgtcagactagacagtacctgtcactttggcgttaacggcgccggtggccatgctaactcggttgccggcgtaagtggtgacgttgagttggagccttgtggagccatcgccggcttgggtctgaacggcgttggtgagactgttgaagttggagatggagagatgaaagatgagagagtgtggaactgaagaagctccactttttgtctatcgttaagagagtttataaaacctggtttttgctttgagaatgcactgtcttctggagcgaaaagggttagtcctgaagaagatgaagtgatgagttgtgagttgagttgggtggttttttaacaaaccggtgagtacggagaatctcttggctatgggaaatgtctatggtgggaggtatcggggtggcggagacaggagaacccgcgggtgatgtgggta

SEQ ID NO: 263729 - DNA, 460 bp, Glycine max
  unsure (1)..(460): unsure at all n locations
tcgtctccatacctgaaacaagaaatagatgatttatttttgttgntctacgcagcaatccgagaaagagatatgaacagcaatcaacgcgagtttgtgtgagcagttgataaaaactaaccctaaatatattggtttgccagaattactcataacaaaaaaatgcttcttacttttcctccatgaaatggaagcatcatcctgcactttattcattaatcaaacagactatgatattacagcatatattcagtgaaatgccctcttattgcttgaatttaaaaaataaacgtctgtatcagaaaatataaagtacttaactggaatttccaaatatctcataatatctataacaacagttcgntggatttcaaaagttaatgcttgaaaacaaacaatatttggtcacttttgtttccaatttccatgcaattcttttatttcatgcatatattgtact

SEQ ID NO: 263730 - DNA, 322 bp, Glycine max
gcttgggttgctctattgacatgttttttagcgtggtcgcattgtaaatgctatctcagtgtttgagaatgttgaacatcaatgtgttgatcattggagtgctatgatcggtgtgttagatattcatggaatggatgaaatgactttcgaatatcccaaggagatgggaagaatttatcttatttcctgacgatatcacattcattggagtattgagtgctcgtaagcatgcttggcatgtgaaggagggaactatatgttttgagctcatgcataaagcatacagctggaaccttaagtgcacactattgatgcatgggga

SEQ ID NO: 263731 - DNA, 400 bp, Glycine max
acatattacatggcatatacgttattggttattttaaaacttagtgcaatgaagtactttcgaaggtaaggagaatggacatccaccttaatggattgaaccaaaagtatgtcgatattcccgtattgaatgaaaattcaaattaataccatgtgttacctacaaatgacaaagcttaattgggtattttcatattgcacgtatagtcatgtacaagccggagggtatgagtgtggatattatgtcatgcattggatgtggtgcataatcagcgacggactgaagaatgaatggatcactgtatgcatactattataataactattgaatttttatgtatggaattttctttgctcggccaaatatatatatattaatgagtccaggggactgaatatac

SEQ ID NO: 263732 - DNA, 430 bp, Glycine max
  unsure (1)..(430): unsure at all n locations
agctntgagctatgagcacccactagtgtttcatcaccctagtagcaacagtgtatgtatggttttcttcgagtgaggacaatgtgggttctgtggggttcgagcgaagacaatgtgggttttccggcaatgtaaggggttctgtgggttccagcgaggacaatgtgggttttccgacagtgtacgggattctgtgggtttgagcgatgacaatgtgggtgtccagggagcggctttcggcagatctcaggcggtaggagaaagagaagagtgatttcaggcatgaggatgacaaatagaagaggaacggcaaggttttcgagcgcgcgcggcttgtgaaatctcaattnttaacttataaacatacaacattggtttttatggatacaaatgttactgaatatgttacatcggtttgaaaaccgaagta

SEQ ID NO: 263733 - DNA, 387 bp, Glycine max
  unsure (1)..(387): unsure at all n locations
ggcaaaattggatgagggaaagagtggttntcgaaatctgcactttatgcagaattatgttgttgaaatgtgccagcagaattctgtataagtgcagaaaaatgcttgtgtatggctggttgtgaaaagggtagtacatatggaagtctggacaattgctagcagatcccaacggtcaaaatgtagacttatgtactagagacttccagtaaaattttcgagtcgatccaaccgttaacgagttggaacaaggaaatgtactggggtattgtattgaaaagtgtgatttgattgtgttttgggagagtttttgcctttgcctgttttcttggtttgtagccatgagattgatgtgaattacctgatgtgtggaacttggaggatgat

SEQ ID NO: 263734 - DNA, 466 bp, Glycine max
acgctgtaagattatggggtacccttctattgtggtactaggcggcggtcgggcgatggtgcacaacatgttatccacattcacatagcgcgcataaacccaccatcccctgttgcccacctccaactgagctcacgtactcccacgtagcccatatcctcgtttctctcaacaccgggtccccatcaatccttccaagcttccccaacatcaaagtaatacaaaattctaacagcacaagctatcacagccaagcaaaacagggaaaaggcagaaaactctgcccaaaacaccaaccaaaatcacatgcttttcacataccaataccccagaaacatttccttcgttccaattcgttaaccgttggatcgactcgaaaattttactggatatttctagtacataagcctacattttgaccggtgggatctactagaaaacacccagaactcattctgcactgctc

SEQ ID NO: 263735 - DNA, 276 bp, Glycine max
  unsure (1)..(276): unsure at all n locations
tccccctatgctgaccaantacaaaggcgtctttattatttcattggccttctcatcaccaagatgagcccttatattcttttggggctcctttggatactcaacttttttccatagagggttgaccttctgcgaaattcaaattaaagaatggtcgaggatataaataattgtgcgacgcttattagcattagctaagggtaacgaaaaagtattcttgaactattatcttttgacccggcactatattttcttaattaagtgggtagacggata

SEQ ID NO: 263736 - DNA, 448 bp, Glycine max
  unsure (1)..(448): unsure at all n locations
agctntctgcatggaagctaagtgtgatttatgcaatcctgcacacgattggcgctgcnaactgtgtacccaccaatcatacttccactgttgccacaggtttgggtaaatttctgtatgctgttggaaccaagtccaaatttaattttggaaactatatctttgatcaaactgttaagcattcagaatcctttgctgtcaaattacccattgccttcccaactgtattgtgtggcattatgttgagtcaacatcccaatattttaaacaacattgactctgtgaagaagagagaatcggctctgttcctgcattacaaactgtttgaggggacacatgtcccagacattgtctcgacatcagggaaagctgctgcttcaagtgctgattccaaggatgctttgattgctgaactcaatgacacatgcaaggtgctggaagcaccatc

SEQ ID NO: 263737 - DNA, 333 bp, Glycine max
  unsure (1)..(333): unsure at all n locations
tgaaattctgcagcatttgcaaagcanattcatattaattgaagttatgtacgaacactgtagcttttacaaaaataagcactgcagcttatttaaggcacaaattctgcagcatctgcagtatgtgggtggaaaacgggtgggagtggaaatttaaatggagaagacacttgtttgacagagagcttgagatagcatattgtttccgtaatgatgttgctggcagctgtattcagattcacaaaataagatgactggagaactttgacaaggactntgccttcacctacagctaattggcgtctaacataagcatcggatttgtcttggctg

SEQ ID NO: 263738 - DNA, 419 bp, Glycine max
gtgtctgaactgcgaccggacatagcaccgagctgcactatgaaaacatatgttttgttttgagataccaagtcatgagaaagctgagaatccagatccttctgatacacaatgatgacattaagatgagttcagattgagtgcagattgtgccaagaacacttctaggatcaagagcatatttgatttcaagaatctagattcaagattcaagattcagaattatccgatcaagattcagattcaaagattccagaataatcaagatcaatattcaagactcagagattcaagaatcaagagaagacttaatcatgattagtataaaaaagttgttcaaaacattgagtagcacaagaagtttttacaaatcattacaaagagtttacttttggtatcgataccagatatagtatcga

SEQ ID NO: 263739 - DNA, 422 bp, Glycine max
gtcattatcatataaaccattcccacaggagttattatcatgaatattctctggcgttgggagataaacaaaactaagaagaacaaaggaaacactacactctagggataggcagaagcatagcatcttctgacaacaatccctgcaactcactaggaggaaccactaactctgaaccaaggaccagaattaggacccaacttcgccagaaagtccgcacaacccgcacaacgagtgaacaaagctcaatctccaatctcccttacaaaattctctatattctctacaatgatcgcatactggtggcaaacctgaacaccattaataatattatcatgaatatgatgccctactattaattattcaattatggtgtagatattgggactcaatatctaattaatgctcttctcactgtcatt

SEQ ID NO: 263740 - DNA, 447 bp, Glycine max
  unsure (1)..(447): unsure at all n locations
cgaggtacttacccggtgatgaattaatatcgatgaagaacgaatgaagaacgttgaagaaccgtcgaaacctttgcgaaattcttcacggaatacgttacggaaacgtttcggaagcgcctcggcttataatttcttcaccgaaacaatttttccaagcaaattctaaagagagagaagtgcctaaggggctgaacccttttctcttcacttcctcccctattatagcaaaataggggagatggttgccgcccagctcgcccaggcgagccatgttgcttcctccagaagcaacagccttttggaggaatcttctggagggcccaagtgggcctggttgctatttgcaccctcattnttactaagtacaccccctgcctttttctgggtgattcttttttcgtatagttacggagacttactaatttcgtaacgatgctctgtttc

SEQ ID NO: 263741 - DNA, 265 bp, Glycine max
aaaatccgcagtattgggagtagcttttgaaagaacctctgtgcctgaacttatggagaagtccacatcttcccccaatgttctgtgcctgatgttgagaaagatgttccaacatcttccgttccaaatgctgaagccgtcccttcacccagtgaagaggaatcaacgggagaagatgatcaagccgcagaggagacccctgcaccaagggcaccagaacctgctccaggtgacctcattgaccttgaagaagtccaatctgatg

SEQ ID NO: 263742 - DNA, 323 bp, Glycine max
  unsure (1)..(323): unsure at all n locations
tctaagaacttttcttctctttctttttcaactaataacaaccacttgatcttacctcattctcaggcttgcttgtgtaatcttctagattgttatgaagagaacatacacctggctatttatagagaaaacatttataactgcctcgaatngattaaatctaccagataatcgattaatctcacaaagtaatcgattatattatcttcttaatggattaaagtgcgcctttaaacaactggaaacaactcaagaaccatgtaatcaattagatacctaaagtaattcattaaaggattcttcgtcacttctgaactaattat

SEQ ID NO: 263743 - DNA, 191 bp, Glycine max
aggaaagcccctcctggatagcggagaaagctccccaaaggctgaaagctgaagaatccggggaaaagaaaagagcaaaggggcagaatgaaagaaagcaactcttagggtcaaattattaagtcaaggaccagcttttgcagtctctgaatcgaagtttaactctgaatactataccccttatcacctct

SEQ ID NO: 263744 - DNA, 443 bp, Glycine max
  unsure (1)..(443): unsure at all n locations
agcttgtatgaatataagagacatcttcttctatcttggngattcatgactacatcttatcgaagcgcatgtccacttgtaactccaaagcatcaaacctttcaccaaaaaaggtttgtagaccatcgaacctatccaaaatattttgaagaagagaggaatcttctccaccatgttcttctttatcaacaggtcgagcaccctttttcactcaagagccatcatgctctttttgataaccaaaggatgcaatgacaaccacacctattagaaaggatctcttgattgggacataaggttcaaaatcaagagggatgttaaagtgttgaaggaagcgggtgactatgtgtgggtatggcaatggagcatttaatcgcaatgccttatgcatgctatatcagactaagtgtgccaatcaatttgtcggccttatgaaagcccac

SEQ ID NO: 263745 - DNA, 298 bp, Glycine max
tcttttgtagaatataaccggcctgccactccttctttgctgttttgagtgtccttatcttttgacattggcaatcatctgtttacaaaatcaattatttttcaggttctaccctatgaccaactgatgcaggagttagatgtgacaaatgttcgtgagcttgaagattttctaataaatgaatgcatgtatgcggtaggcatcatacattcccttcctgagtgtttaatgcatttactgctcaacatggacatttacaccatcgttatcactgttatgattattgttattgctataa

SEQ ID NO: 263746 - DNA, 396 bp, Glycine max
cgcttagtctaccagggaggggatttttcttattgctgagggccaactctaaagatcttgaggataaacatgagacctcccttgcttagactaggagcaatttttactttgctaaccacatgcccgcattccacgacttagatgtctctcatgacagactcaactcatttatggcgtcttcctgaatagggacataaatgtggggtacactatctactaccagatctccctcatataacaacatgacgcattcagactaggattccctggctatatcacatcgttatgttaggctaggggaggacaaaccgattcgaggcccctgcagagtctgaatcctgccatcaagttggcatatattaagaagaaccgttggaatcctgatgatccataagt

SEQ ID NO: 263747 - DNA, 406 bp, Glycine max
  unsure (1)..(406): unsure at all n locations
agctngatcacagattgaacgctttttgtctgtcacaagattaagtcatctgatcgcatgttcactggacactggtgatccggaacttatatttgcttttgcacagaggtggcattatgaaactagtagtttctatctgcccgcatgagaagtgactatcaccttgaatgatgtgacatcgttgctacatctacccattacaggcgtcgtccatagcattgaggctctacatgtggatgatgtcaccctcctcttattcgaattgcttgaagagagttctgatatgccacaactgatacagcacaatggcatgcggcatatgttcggctatcctgcctgcgaaacatatatcaaacaaatttgaccaacacggtgtactgcaccacttcagcatattgttacatct

SEQ ID NO: 263748 - DNA, 259 bp, Glycine max
ttcccgaccacaagggacctgagatatgttctggggcaggaaccttgggacgtaggtgggggctattgccaaaacaagctcgacaatcccacccacctggcatagcagccatgaaaactgtgtgtactaaacaggcgagctctgcagtaacagataaagaacaggacacaacaagaggctgtggggtggcagcttaactgttgttatgaattggctctgtatcataccacggggaatgatacaggttaaatgaaacgga

SEQ ID NO: 263749 - DNA, 282 bp, Glycine max
  unsure (1)..(282): unsure at all n locations
ggtgtacgtnaaaaattactactacagatatttttttgtatntatcacaatatgcacatgagatgatcacagtctaactcttcccatgcctaaatatttctctaggtctgatactatctgccaatctgtatactaagatcttcttcttttatgtcttatgatgcgagtgtgatatggcaaaacattaaggaaagccattttgcatccccaaacagagagatgcaagctccttgcaacgttttgaataatcccttcatgatcnggtttgggatcttgcaactt

SEQ ID NO: 263750 - DNA, 450 bp, Glycine max
  unsure (1)..(450): unsure at all n locations
gcaagcttgccgccacggagtattccgactattctcttgtgnggcggaacaagctaccaaaggagagagcttgaaatgaagagccaatggttgatacatggactgagatgaaaaagatcatgatgaagcggtatgtgccggctagttactcaagggacttgaaattcaagctccaaaaactaacccaatgcaacaagggggttgaggagtatttcaaggaaatggatgtgctcatgattcaagcaaatattgaaaaagatgaggtaactatggctcgatttcttaatggcttgactaatgatatccgtgatattgttgagctgcaggagtttgatgaaatggatgatttgcttcacaaagcaatccatgtggagcaacaattaataaggaagggagtggctaataggagttttaccaactttggttcttctaagtggaaagacaaatgta

SEQ ID NO: 263751 - DNA, 387 bp, Glycine max
ttcgagcgtctcgatatatttcatgtctccatccggcatccgagtaagaagttattgtcctttgaagttgctatgagcttctgttttcaatttcgagcgtatcgatatattatgggactcaatcggacatccgagtaaaaaattattgtcgattgaatttgatatgggcttccgttttcaatttcgagcgtgtcgatatattacaagacataatctgagtaccgagtaagaaggtattgttgtttgcattatgtacgagctatccgtttcaattttgagtatctcgatatattacgggaatcaatcagacatccgagaaagaagttattgttgcttgcatgttgttcgagcttccgatttcaatttcgagcgtttcgatatattgcg

SEQ ID NO: 263752 - DNA, 386 bp, Glycine max
  unsure (1)..(386): unsure at all n locations
gaccctaaggcacctgcggcatgcaagctgtcaggtgagcttatcaattacattttgcatagctccgaatcattaatcaccattacttaccatattctctccaacaactaaaacgtgaacattcattttcttcttcatgcccgaagctttggtatcttaaagctcttcttttctactcatttcttcatctcttatgcgcagaaacaattcatacttcgaagcttgngaatatctagatctaagaccttgagtcatctgagcatttccgtgcaagcttcatgttgatggattgacaattgcaataatctctctcgagtagtacagttataatggaagactaagtggcaaattcaaggaactttgcttgtacttaggtcgatgaatat

SEQ ID NO: 263753 - DNA, 356 bp, Glycine max
  unsure (1)..(356): unsure at all n locations
ttctnncaagacggntcacattgcatgttggatctattgttctcanaataatcaagaaggtggggctcaattatattattcctacacccttactaattaaaaatttactcttgtaaggcttttactatgttgttaggtgaataacgagtggaagagaaacttatccaaaagtaaaagcgaaaattaatatgctctgtataaagtataagactacggaagaaggagacatacacgcaagagttcttatactgggtcggtaattacccgtgcctacatctcagccccatgcgatctgcggatcttgagatttcttttcaaccttgtaaaatcctttttcaagcaagatccacatggat

SEQ ID NO: 263754 - DNA, 451 bp, Glycine max
cagcttgatgtacttcatctacttcaagactttgttctttacttcaaattatgccttaacaaaaccaaagaaatacttgtgggtatcaacacccaaatagtcaagaattctggagatctaaactacataaagaaacttggaagagccaattcttctggtcttcaacatgatattaataataatgctgacccatttgatcttcatcttcccttgcataagactgataagaagaagatcctcctcagtcaactaagcatcattgttcccccttggagtaataatcaaagaaaccacataggccaaaagcttgtgctcaggcatgagtggtccagtaccaaaacatttgtttccctttgctttcgaacaataacatcatagacagaaggattcttcatcatagacttgtacttcttaaccttgttaacagagaattcaactttcttgagaccca

SEQ ID NO: 263755 - DNA, 384 bp, Glycine max
  unsure (1)..(384): unsure at all n locations
ttttttggaaaaggtcttcatggtttnttcattcttcaaatgatttcaaaaagaaacacttttgttgtgttctaatccaaaaataagtttcacacatactgggtgttgattatttccaagcatgttatgtntaagaaaaaatttctatttaagtcccaaaagaaagttataatctataactatactaatagaaaatcaaagcacacgtaaattaatcaaaataaacttggcgtagtaaataagggaatacagttctgaatttaatacaaaatgataaataaacatatagacaagttcacgagtttttgaagatcatggttgaagctctcaatctccttcaataaataatcaaccaatctaccatgtcttcatcatcctcagctc

SEQ ID NO: 263756 - DNA, 242 bp, Glycine max
gccttgatacacctccagaaaggttgagcgaacgcatctttttttgcccaaggacaccgggatagcttgtcttagataccttggacccccgaggtgtgtgacacagcttcacgctgtccggatatcccgcctagcttgggctaatattgtgtactcaccgaagtttgctactacaaatgggacataacccaattttctctagtggctggcacctggtccatgaccatttaattctgcccggt

SEQ ID NO: 263757 - DNA, 59 bp, Glycine max
gctgacaatattgcccttatgagaggttattatctggcccttaccaattgtgcttctgt

SEQ ID NO: 263758 - DNA, 422 bp, Glycine max
  unsure (1)..(422): unsure at all n locations
atggtgtaatcgattacaatgatttggtaatcgattaccagtgtgtttgaacaattgaaattcaatttaattgtgaagagtcacatcctttcacaaaaagctttgtgtaatcgaatacaatgaattggtaatcgattaccagtgataatntttgaacaaaaatcaaaagatgtaactcttccaatggttttcaagtttttaaaagttataacttttcaaatggttttcaagtttttctaaaggttataactcttctaatggttctcttgaccagacatgaagagtctataaaagcaagactctgattngcatttcaataatcttgaacattctttagaacaatcaatacattcctttacaaccttngaatctatttgaacttcttcttcttcatttgccaaaaatctttcagagttttctgg

SEQ ID NO: 263759 - DNA, 386 bp, Glycine max
  unsure (1)..(386): unsure at all n locations
tatgctgcanaaatttacaatagaccttctcaaccttatcatctaaatcaaccacagcagaacaattatgacctctctagtaacagatacaatcccggatggaggaatcaccctaatctcagatggtctagccctcaacaacaacaacaacaacaacctgctccttccttacaaaatgctgctggtccacacaggtcatacgttcctcctccaatgcaacaacatcaacaacaatagcaacaatagccacagagacaacaatcaactgaggccccttctcaaccttccttagagcagttagtgaggcaaatggcaatacaaaatatgcagtttcaacaagagacaagagccttcattcagagttngacaaataagatggggcagat

SEQ ID NO: 263760 - DNA, 344 bp, Glycine max
atgcttcaaagattattgggttagtgggagaaccgctctctaacaaattgataaatctcttggtgggacacttatgagtactttgaccaccatgaaatttgatgtttcacgtactatgcctgaacgtgtcaatgagatgacaaacattgtaacaagacttaaaccttggaaataactgtgaataagaacttccttgttcgtttattatgactcactccatctgagatggtccgttccaatgagctatataccatgaagatacatggaatgtcatgaattgacagtatgttatttaagaagaactgcgcttaaaatcaggaaagcattcgtccttatgtatacac

SEQ ID NO: 263761 - DNA, 367 bp, Glycine max
  unsure (1)..(367): unsure at all n locations
gcttctaagctttatacaagaatgaagctgtgatactacttgtttgacaagtggcctcaaatatcttaagaagagggggttgaattaagatatcccaaattactttccccaattaacaaaatntatttcactgtcttttcaagctatagattcccttaacaatgaacttcttaaatattatattcaataaaacaatttgaatatgaatgttaagcactgataaaccaacgagattgtgggaagagaaagtgcaaactcggatatatactggttcggtcacacccttgtgcctacgtccagtccccaagcgacccgcttgagagttccactatcttggaaagtccttttacaaggtctaaacacacaa

SEQ ID NO: 263762 - DNA, 446 bp, Glycine max
agctttaatttaagataacaacatattttatcttagcctaacaaaactgacctttgcatggttcttgcaatgaactaaatatcttcgtcatagttgcatacaacaattcaactccatgttgagcaatgctttcaatgttatattgctcttgcaaaacctgcaccatattagtcaaccaaacaattaaaatccatgtatataacatcaatagtcatcacattttttttatttattattgggtatgtgtacaaactatatagcaatagtcaacatcatctgtatgtgtcaaatttgcattcatatacacttattatgttgccatggtatcaagcaaatagaatacaagtgttaattgaatatcgaaaaaaatatatcctggtaggacttgggatacataaattttcaactagcagagtttaaactgagaaagaacaagtatattggat

SEQ ID NO: 263763 - DNA, 409 bp, Glycine max
  unsure (1)..(409): unsure at all n locations
gctttaaacctgtcggtgttcaagcttttgataattacggaaatgccatcgtgtcacattctaagacggctatttataaccgccttagaatgtacgacgtaaaaacaaatttttattcacctaattacaaaattgccaccacgccatattctaaatcggttttttagaactgtcgtagatagcgcgtcgtaaatacaatcttttctagtagtgagggagaggaaatttactatacgaatatccaccttcgctaactganaataaggtagtaggtaggaggaaacacctatagccaatttgttgtgcaacaactatatatcaaggagtgaacaaataatcagatattgagtggaacttctgtagcagagtcattgggcatgatctatctcgctatgtgaaaatagtatgt

SEQ ID NO: 263764 - DNA, 379 bp, Glycine max
agcttgcatgacatgaagagagttcttcttgatctttagaaagtgacgcaacacacttatggccttagatcttcacacggaagaacaattggggcgcaagatacttcttgtagcaacatatcgtctcttcgttgctcatctaataacaacacgttgatctttctcattcagatgtccggagtgtgcttatgagattggatcagcagacataagctggctattcattagaaaacatctatggccgtctgttatcgcacagatgtacgatataagcgcataatacgacaaaaggctcgattatagtatccttatactggatgaaagtgtacatgtacacacctggacacaccgatggtacattgtgacgcattacatactc

SEQ ID NO: 263765 - DNA, 347 bp, Glycine max
ggaccttagaaactccgctgcatggggatgcgtctagagcttctgagaagttctttttgtggaatcttcaccatggcgatgcggcggctgataacagataatacgctcgaggaggcgccttgcgctaagggatatgacaatgaagaaagagcttcagctcccagagagtgccttggatcagatacttgtataggaaactctgattggggatttgaggagagagatgatgaccagatggggggagcaagagcttgcatagtgaatataggcacagaagtagaactgtggagcgtgactcacacgactctgatgcatcgaagtgaccacatgagttacccatgcttcta

SEQ ID NO: 263766 - DNA, 359 bp, Glycine max
acaattttcttattctcctttctcaaaactccaccaaaccaccctaaaaactcctcctacaccacccaggaccatcggtagccaccacaagccactgttgcttgccgccaaccatcatacggagaggaaataaaatgcacagcggaaattaaagagttgggaaaagggacacacctcaagagttttatactggttcgtaacaacccggctacatcagtcccaagcaacctgggttctgaaatttttcaactttgaaaaacctttacaagcaagatcccaaggatgtcccctccttgtctcttgaactagtgatgtccctcactgaactgaccacaaaatgacccttcttgtctcagcat

SEQ ID NO: 263767 - DNA, 368 bp, Glycine max
ttccaatcttttatgaagcaaaataaaggagagaaggaaaatttccaatcaaaggagaaaagagaggataggaaattcccaatcaaagagtgggagaaagcaaaaagaaaagaaaggaaattcccaatcaaagaatgggagaaagaaaaaagagaaggagaataaggaaagaaagctcctgatcaaggatcgaaagaaaacagaagaaatgtgcagagaggtctctggaccagacaatatctgaacaaatacggaattgtcaccaaatgaacaaaagaaagaaaaggaaaccattaacctaaagtggtcttcttcctttgataccaaccacaatcctgtgcgtcggtgacttgttcgtctcgcgtcaa

SEQ ID NO: 263768 - DNA, 463 bp, Glycine max
agcttcaatggaggagaagaaagagggttataaatggagaggggggagcacgaaattgaaggaataatagaaggagagaagtggaactttgaagtatgtctcacaagactctcattcatcaaagttacaacaagtgttacacatgcttctatttatagactagggagcttccttgagaagctttcttaagaaaacttccttgagaagcttctttgagaaaacttccttgagaagctagagcttagctacacacacccatctaaaaactaagctcacctccttgacaaaatacatgaaaatacaaaaaaaagtccctactacaaagactactcacaatgccctgacatacaaggctaaaaccctatactactagaatggcccaaatacaacgcccaaaagaaagaaaaacctattctaatatttacaaagaagagtggatccaaccttgacccatggctcaaaa

SEQ ID NO: 263769 - DNA, 418 bp, Glycine max
acaatagggtccatgggttaacaccaaaagtatatttatattgtttcattctgggccttatccttgagatttgtactgaaatgagcatcttacgaccttcctcccttgctaatgccattggttttgccaaacttgtcgaggctaaggttaaggcttcaaaagtccacccctttacttgctccagtcctttcgcaaaccaaaaacattctcacaaccctgcttcaaaccctattccaaacgcctccactattcccttcaagaaactcaccccatcttagtatagtgaaaaacgcacaaaagattttatgctactattgtgatgaaaaattccatattggccacaagtgctaaaataagcaattttttctcctgattgtagtcgagggtgatgaaaaagatgagcttgaccttaacacta

SEQ ID NO: 263770 - DNA, 484 bp, Glycine max
  unsure (1)..(484): unsure at all n locations
gacccggatcttaagcgactgggctgcagcttgcttggggcttcttggttgctggatctttgagcttcaatgaggtcctttaatggtgatttctccaccatggagatgtagcggaagacaaaggagaagaggtgagaggaggcgccatccactagggaataagccatggaagaaggagcttcaccaccaagatgagccttggataagaagcttggagaggatgcttcaatggaggaaaagacagagggagagaaagagagacaggggagcacgtgtctcccaagactcccattcatcaaangtacaacaagtgttacatatgcttctatttatagactaggtagcttccttgagaagctntcttgagaaaacttccttgagaagctagagcttagctacacacacccctctaataactaatctcacctccttgagaagcnttcttgagaagaattctcaagaagctagagcttagctacacaca

SEQ ID NO: 263771 - DNA, 387 bp, Glycine max
gatgatgaatcaaggtgattgaagtatttttgtctttgatcaagatgatgacaaagatcccaaagaatgatttcaagaatgagtctcatgttcaagatcaagtttaatttcaagtttcataacaagaagattcctgaatcaagagaagattgatttctagattcaagacaatatttattcaagattcacgagaagaaatcccgaacacttctccagggaagtattgaaaagatttttcaaaaacaacatagcacaattgttgttttcaaaagagtttttctcaaaatttgttaagttaccagagcttttactctctggaatcgataccaattcctgtatcgataccaatgcaaagttgatttctaagtttcaactgaattgcacgtc

SEQ ID NO: 263772 - DNA, 452 bp, Glycine max
  unsure (1)..(452): unsure at all n locations
agcttaacacacactntcactctattgttttttctacanagcggcaactccgcaatgatntacataacatctttctgaacaatagttctatttctgaccatttctttcgaattcaaacaattattgattctctctcgtcgaatggagaacgtgtgtctaaatctgatcatgttgacattgttcttgatgggttaccagatgagtttgagttgctgtcacttttgtgagtggcaagtttgagtgctgtctattgatgaagtcgcaactctcctattggctcatgagactcgaatcgcttgcaagaaatcacttgcctcatctgtagcttccattaatctctctgaaggagcagaacctaattttagccaaattcggtgcaccaggattctcatcctcaagcctatgttgctcaaggttctagctcatcgtcgcattntggcatgaactataat

SEQ ID NO: 263773 - DNA, 435 bp, Glycine max
acctttgggctatgaaatacaacaatctattttgctctaacaaagaaacacattattctgagagtcactctgtatgggtatgcccttggctgaaaaacagggctactatcaagatgtggccagatttcaatagcagattggacgatatgtcaagggccacatcgacaacatggtcatcaaattccattacatagcccaacacatggcataccttgaagaaagtgttgaagaaatctacacacacgatgtgctccttaacctggaaaaatgtactttcagggtccgcaaaggcaagttcttgggctttatgatcacacatcggtgaatagaagccaaccctcaaaaaggcatacccatactggagatggatagtcctaccagcatccacaaagtccaaaagttgaatggtaaactagcatccttgtccaggttcct

SEQ ID NO: 263774 - DNA, 460 bp, Glycine max
  unsure (1)..(460): unsure at all n locations
aagcttcttgagaaactttcttttattctagagcttagctacacacacncctgctgtaactaagaccacctccttgagaagcttccttgaaaagattcctaaagaagctagagcttagctacacacacctctctaatagctaagctcacctccttgagatgagaagctagaacttagctatacaccccctataatagctaagctcacccccatggcaaaatacatgagaatacaaaaaaaaagttcctactacaaagactactcaaaatgccacgaaatacaaggctaaaaccctatactactagaatggccaaaatacaaggcctaaacgaagganaaaaacctattctaatatttacaaagataagcggactcatacttagccgatgggctcanaatctatcctaaggctcatgagaaccctacggccgttcttnggatctctggcccaatctacttg

SEQ ID NO: 263775 - DNA, 416 bp, Glycine max
actcagctagctgaattagatcgaattaagatagcttatctctatcttggccagcttagcggaccaaatcaaccttaaatgcaagggttgggcgctaagcgcttgagactcgcagcttagtgcatgaacaaagatgcgcttagcgaacggactgtttttcagaaaatatttttctaagttatttttcagtcctttttccaagagattgaaacctttttgttaaacatccaaagattggctgatatactcctatgtacaaactatatagcaagttccaaatgatttaaatgcatgacaacaaagataaccgaatttaaaaactgggttgcctcccaggaagcgcttctttaacgtcattagcttgacgcataatttatttactttaaggtgcatgaaagtcacaaagaacacatctt

SEQ ID NO: 263776 - DNA, 287 bp, Glycine max
  unsure (1)..(287): unsure at all n locations
gaccatactctctccaaatgtagacgagctagtggaattagcagagatcgactcttttcttgcttatcatcacagcaaggaaagcctacatcattgttgttntggccgatgcatatgacacattcaacctaagatgaaaaaagagcagtgcaagaagtatttgttggacacatgctctttatgtggggttggtctcccacgttttttttcatgaaggaagacctgtttgtcctctacaaggtcatcacatgtgcacttgagaaggcaaaacaaattgggaggaactc

SEQ ID NO: 263777 - DNA, 419 bp, Glycine max
agctctttggagtagaaacatgggaactttttatttttttcaaaaaggaagtcgcatctagccaaggtctgagagaccattacaagtttctaacgatttctaattatgtgggccattaagtctatcatatgctgacaatagtcgagaaacccatgaatctcttcgggggcggagtaagtgtctgccatcgccttggccttggctaacaatcggcgaagttcttgactcccgttcaaggtaagagcaaaccgatccatccacatggttgcctcttggtgtaaagagtcgatcacccttcctctagcctctttttccgcgtatacttgggcatattcatccgcgattctatgctcgtgggctgtggctagacccaactctttcttggtacttggcgatgatagctaacatgtaggtctctg

SEQ ID NO: 263778 - DNA, 105 bp, Glycine max
ccggaccaaggaccggagcactcaaaaaaaaagagtatttctttgaaaatgccgaaagcgacaggagcgttcctttgtcacggctgaagctctaagacggaaaga

SEQ ID NO: 263779 - DNA, 268 bp, Glycine max
  unsure (1)..(268): unsure at all n locations
tggcactccccttccatagctacctgagaacaaagatcgcgntggaataatgaccatggaataagccattgatgagctcttacaggtactacacttcctatgatcattatgaacaatcgagaccagtcattacgccttgttgtgagaaagcttatttacgtgctaacgaagactgatgggtcatatttttggatgatggatcttgagagacaatctcatttgagactctaaagcgcttgttcataaaccttctgtcatatcgttgttg

SEQ ID NO: 263780 - DNA, 397 bp, Glycine max
agcttcttttggaccttgaacaagcaactaacttctctttcagaaccatgctatgtgctcgcgactgggccctctcttcccttcgcagcttgagttcactattgctaccccatagagctacgcgaaatttattccggccatactcttacttgcgagccctcttggtctcttgttcaaaggctcttcgcggagttgcattctctttccgtaatccggcacactcctttccgatgtgtgtatcggccaacttgaacttctctatggcaagattcgcctttcctaactcgctattgagagcttggattctttggactcttgcggggcctcaaaactctcttcgctgacgacttttaacctggggagccaatctaaccctccgtatgaactttcaaccatt

SEQ ID NO: 263781 - DNA, 344 bp, Glycine max
taaaactcagctgtcgtgcctccacgtttaacctaaacctattacggtctcatatccgtcccttatcataacccgagccaccatcaaagcgacaccagataagcgtggctacaccagaggagattccacataagcactactcacaatttgcagtgcttggaatgatgtttccaatgactcctctgcagcctcaacatacgacatagaagacataccacttaccaatatgtcttcctcccccgatactataaccaggtgcccttccactacaaactctaatatctggtgcagcggtgacgggaccaccccaaccgagtggattcaatgccgtcctaacaagcaac

SEQ ID NO: 263782 - DNA, 340 bp, Glycine max
acaaagtggtacctggagatatgtcacggggtcatgaaaccttggggacctcagatggggtgctatatgccaaaaccaagcttgaccaatcccgacccaacccgggcatagtcggtcagtgaaaacctgtgatgtacctaaacaagcgaactccttgcagtcaacagattaaaggaacacaataccacaaagcaaggaggcttgcggtggctggccagctgtgaaaacttgattgatatgtgagatatggtctctggtaatcgattaccaaaggtgggttatcgatacaaggcttacaaatgaagacagggggctaagacggtctctggttatcgattac

SEQ ID NO: 263783 - DNA, 396 bp, Glycine max
ttcgtcctcttctttagtttactcttcttctggcttcaattcatcaaggggctttccttctgtgtccagcatcttgggatgttcccagccttagatgacagctttccaggttctgctatccagtgatttgaggaaggccaccattcttgctttccagtattcatagttgcttccatcaagaattggaggtctgtgcactggtcctccttctttctccatgttcatcagaaattatctccccagatctcactctgtgatttcgagtgttggctctgataccaattgaaattctgataccagcggacagatgtcgtacaggatgtcacgacatcacgctctataacatgcagtttatgtgtgttcgcatgaacacgattaacatgttataacacacga

SEQ ID NO: 263784 - DNA, 331 bp, Glycine max
  unsure (1)..(331): unsure at all n locations
aatgaagaacgtcgaataacggtcgaaaccttcgcgaaattcctcacggaaacgttaccgatacgtttcggaagcgcctcggcttggattttcttcacggaaacaatttttccaagcaaattctaaagagagagaagtgcctaaggggctgaaccctttntcacttcacttctccccctatttatagaaaattgggggagaagcttgccacccaactcgcccaggtgagcagggttgcttcctccagaagcaacagcctttctgaagaatcttctggagggcccaagtgggcctgggtgctatttggaccnccattattactaagtacacc

SEQ ID NO: 263785 - DNA, 359 bp, Glycine max
ctgcagcatcaaacttttgaatgatgaaggagcctcatttttgtataggccatattttgctctctacctctgcgaagctctatatctggatctggctgtgcaagattttcactactaataacaggaagataaccggatgaagaacccccactattccttaatttaaaaagaaatctattttcataaaaatcagcatcatttgactctatgatcacttgtgcatttaggtcataaaacctatacgctctgctattaatagcataaccaatgaacacacattcataggctctacttgccagtttaaccctcctggggtgtgggatccttacataagccagacatccccaagttctcaaata

SEQ ID NO: 263786 - DNA, 473 bp, Glycine max
  unsure (1)..(473): unsure at all n locations
cttgacccttgagcaccgacgactggtgcaactccctattatctactctgtatctacggtgttcttcgacctaagacaatgtgggttctgtcggagttcgagcgacaacaatatgtggttttcggcagcgtagggggttctgtgggttccagcgacgacaatgtgggttttctggcagtgtagggggttctgtgggttcgaccaaagacaatgtgggtgtcgacggagcggtttccggcagattttgggcgggaggagaaagagaacagctatttcaggcaggaggatgacaaacagaataggtagggcaatgttttcgaacgcgcgcggcttctgaaatctctattgtattttaacttantaacacaataacatacggtttttatggataacccgatgctactaaatatacctcacatttgtgtttgtanaacccgctgtaaacatcacatacattacattctgtgtttaac

SEQ ID NO: 263787 - DNA, 284 bp, Glycine max
tggtgtgcgttaccaaaccctaacctctcaacgaagttctctcaaagaagcttctcaaggaaccttctctcaaccaagctcctccaggaaactacctactctatcaatagaagcatgtgtaacacttgtggttactttgatgaatgaaagttctatgacacatacttcaaagttccacttcgcgccttctatatactcctcaaatatcgtgctccccccccccctttctcttttctttccatcattgaaacactctctccaagcttcttaaccaaagaacattc

SEQ ID NO: 263788 - DNA, 433 bp, Glycine max
tgaaacttattcgggcacctatatagagagtgctatgttgtctctataaagcagtcccaccatcccaatttcacagaatcatattcatatatcatgccgcatttcaccgatcactgggggcacacgtctgacacatattgaatataatgtggacaatgtggcatgcaccattgcttcagaatacaacataagactaatgccgtctcacacaaaccctcaactcaacaaaacaagcacggattcagatgcgaattgcttcacgaatgttgccaaagatgagcaactaaagctccaaaacacattaatggagagccaaataaccaagggaaattgcacttacttgtggtgagtgaattatagcgtgaaaagggatagccaaactcaacatcggatgcttaggggctgccgttcttgaagttccaggagcttgggg

SEQ ID NO: 263789 - DNA, 347 bp, Glycine max
atccatatagtcgatctgaggcatgccagcttgtgcagctggaagcaatattcttattctttacaaccagtgggtgagccccgagaaagatcggccctacagtgattaaaaatgagaatgaggagcttactcccacttcgggtgcacgacaattagtggagccttgcttggactttggaagcctaaccatgttactataaaaggccatttgcccctgacgttcatgaccacaagctagaacacacggcgaggaaatccactaccggtccctgatggctttcttggaaatgccgattactattctcctgagggtaagaaaaacctacttcccctgcccgctcgaactt

SEQ ID NO: 263790 - DNA, 385 bp, Glycine max
  unsure (1)..(385): unsure at all n locations
tttaataaccggcatcgactatgcgagcccttagcttgcgcaagtctgtgaccgtggaggttgcctaaccctcgaacgctaggtattaacgaccctctccaaaacaaataattagacaaatggaaacgttacataaaacacagaataaaactctagcttatcaatactttaaaggtagtgggtaaagaattaaaacaaaaaatttaatatggtaatcatataaaaatgtaagaaaaattatgagacacactattttatgtctcccaatagaaaatttctactctcagctttttgactaatgctcctgctgacacttattagtattntgtcacactcttaattagtaatactataatgagaaaaaaaatgggaaagaataaaaaaa

SEQ ID NO: 263791 - DNA, 396 bp, Glycine max
ctttctgcttttatttgcgaccacagagtggtacctggagatatgtcgcgggggtcaggagaccttgtggacgtcaggtggggtgctattgcccaaaaccaagctggaccaatcccgacccaacccgggcatattcagtcagtgagaacctgtgatgtacctaaacaggcaagctcctggcagtcaacagataaaaggaacatggaccacaaagcaaggaggctggtggtggctggccagctatgaacttgattgatatatgagatatggcctctggtaatcgattaccaagggtgggtaatcgattacaaggcttaaaaatgaagacaggaggctaagatagtctctggaatcgattaccaggcttgaagacgagggcacgaagctaggagagct

SEQ ID NO: 263792 - DNA, 379 bp, Glycine max
agcttaattcacagtcccatttaagttaacaacttgagttgatctcatatctaaactaatgactaaacatgtttaagcattcagattttaaaagaaacacatagagtcataccctaatttcgtctggggactatcattcactgatgttttgattctcgctagccgaactgcgttgttcgacaccagttaccgtacaaaatgaaggatcattcaatgttttgatcaagaatgcgaaagataccataaaagagaaggcaaaagggtattttgcttggttttcctggaccctagatcacccaagctagcctctggctcgcttgggccacccaatagcttcatggtgaagaaaccagcttgcctgtgcgagctcacagctgga

SEQ ID NO: 263793 - DNA, 411 bp, Glycine max
cattattattgtagcatttagagttatctctatgttataaatatgatgagagtgtctgttttcatttcttgtcaactggacttctttctctctttttcgaatttaatgtattcactcaacttctagtgaaatatacccatcgccatctctcgtcccctcggaatgaaattaagttcttaaatattaaataatatgttcaacaattgaagggacgcatttcggaagaggaaaggttaccactctgggggttgcgtagcctccaattatacttttattcctctcctcaacttttttactaacaaaatattatgaggacaataatttataatgtataaatacaataacatggaggattcacacacagattactctctgtgatagttgaaacttaccagtcacgctttgtagaga

SEQ ID NO: 263794 - DNA, 376 bp, Glycine max
aacacattgcctaagagttactatcaggcgaagaagatactgtgcccaatgggtatgaaatattagaagattcatgcttgcccgaatgattgcatactttacatacatgaatttgaaaaaatgtccaaatgccctaggtgtggggtatcgcggtacaaagtcaaggatgatgaatagtgtagtactgatgaaaactcaaagaagggacccccaccgaaggtgttgtggtatctgtcgatcgttccaaagtttaagcatctttttgctaatggagacgatgctaaagaccttacatggcatgcaaatgggagaaactgcgatggaatggttcgtcatccggctgattgctaccagtggaaaaagatagatcatttgt

SEQ ID NO: 263795 - DNA, 334 bp, Glycine max
atcttccattaagtggtaatctgagcacaagatcttttatttgtgcttcttaaacctccattaattttttgctttaccttctctttcattgctgtttcttcatttttctacatgtatcttctcacatttcttgtcctaaatgttgctaacatgattctttagagtttccaccgattaaactagctataaaagctagatttgattttctatggttcaaatctcttgttcttgttctcgaaccatgaattatgttgagtttatgtttctttgagttttgtcttgttatattttgcggttgaaaccttcaccataaaattcttacaaagatattaaa

SEQ ID NO: 263796 - DNA, 419 bp, Glycine max
  unsure (1)..(419): unsure at all n locations
agcttggatgaaggtagaagctaatcttttatatntttgtttagacgcagatgatttatctaatgctccttatactttcaacagatatcagattatgagaaagagatagaaataatgtagactatgaccaaagaggagtatttggccactttaaggagggaaatacttgtgatttaccttgagaaggggcagagaagtaactgcagttttatattttataagacatagcaatagtactatagtagtgtttgcagcagataaagttgtatagaatttgatattatatatgaatttctntactttggttattctaaaattgattttacagaaagagcagtggatattataagacacagcttgcatgcttgggacatgcatgctagctgtgtcttctcactaactacctagggttacaatct

SEQ ID NO: 263797 - DNA, 451 bp, Glycine max
  unsure (1)..(451): unsure at all n locations
ttattctctgtggtgggagcctatgtcatatattntttattactgatgttncttacataatcaaacaattgttaacatctccacttagggttacactgtggtcatgttttcgtttatagaaatcattcagaatactttgtgttgattatcagctcctaatcaattgggtggtcattttgttattggctgctcatcattcaatcatgtcttgtcaaactacttgataatctgtcatgttgttacttctgttatgaataaagagagactctcctcttgttaatcacgttaaggtgtctcgagaggaaaattcttgagtaggcatgatccttgttacctatagatgagaatcaacttattaagtcatgtacctgtgttcttaaagatgtgcttagtaccacctaagtgcagattgaaattctatatgtgaatacccatacaaatgaaactgatt

SEQ ID NO: 263798 - DNA, 360 bp, Glycine max
  unsure (1)..(360): unsure at all n locations
acctgccgcatgcaagcttgangccaagatcttctccaggttgtcttttttttggaacagaatggcagcagagggattatgtgagagagacgtactccctttcagagaagattttctgctttattctcacaccactgatgcatggatacatctcggagtagaggatatcttgcagtttagaaatatagcccaaaattatctcttaagagcatgaatggtgagtaaattttcatgtattgcagtgataaagcctcacatgacctctatttatgcctgcggcacgcccattgtggcaatttaatttctttaaatccccttgcattctgatcggatatgagcctactttcagcctcattcata

SEQ ID NO: 263799 - DNA, 284 bp, Glycine max
gcacaccaaaggaggaaaaaaaggaaaaaaggacccgaaggggcccaaaaaagccagcaacaaagacaacagggaccccagcccaaaaaaacaagagccccccgaaaacttgggaaaaaccccggaaagcctcggaaaaaccccggaaacaaagcccaccaccccccccaaaaaaagcacccccgaaaacgccaaaaaaaccaaaaacggaaacgacccccccccacgaaaacaaacacccccggaaaaaagcagaccacacccccccaaaaacaagcaccccc

SEQ ID NO: 263800 - DNA, 389 bp, Glycine max
tcaccacaaacccattaccatattattttttatttccagcaccggcatattatttcaaaattcagccctataaacatgtcatcgtgccttatggtgcccgcatggccgctatataacaacactggtgactattaatggtccatacaatattactaaacaatgagattgatgttaccactttcacaaactggccaactttgtatgctcgactgggaaaattctctacaattttgcaatttacctgatattgatgctgaaactcaacatcaatgtaatttgaaatcaatccaacctaaaaacattttaaaaacaacataagttgagaacacaaagaatacacataattaatatttgggaacgaggtagtactgcggacattaaatgaatat

SEQ ID NO: 263801 - DNA, 473 bp, Glycine max
  unsure (1)..(473): unsure at all n locations
ngaagagctcttgccaatacccactaaagaacaatggatctctatcagatactaagcttctggcgataccatgaagctcgacaacaacgttaatgaagagctgtgctaccatgtgagcggtatgggcctgatgcagaatgcccaaatggatcccctttgaaaaacggtcaacgatcaccaggagcacctgtttgccttgaaaggggggtagaccaacaacaaagtcaatagaaagatcctcccatggtctgaatggtactgggagagggcatagcaaccccgcaatgcgtttcgtttcatattttgtgacctgacattccctacaattggtgacataagtgacaacatctaccctgagtcctcggcacatgatattctccacagtcgactaattcttggaaccccacatggccctcattgagtgggtatactcttgatatgactgaatattggaatctcccgaagcatatcac

SEQ ID NO: 263802 - DNA, 279 bp, Glycine max
  unsure (1)..(279): unsure at all n locations
agcttgtgcatncaatatacctgatagggtgtttcatatggtctcaagactggactaatacatttgctgtcccaggtttatggtcctgttggtgaagactctcataatgcatccttaagggagtttcataattgttttgttccaccaatgataagccccttgtacgtccaaagaagattcattatcctctctaaaggccttttcctcattctttggaagaagtggccaaagattggctatactaccttgctcccaagttcattttaagctgggatgaac

SEQ ID NO: 263803 - DNA, 312 bp, Glycine max
  unsure (1)..(312): unsure at all n locations
acaaggctgtcgaaagaactatttccgctccggagtacgacagtcaccgctttatgagcgctgtacaccaccagcgcttcgaagccatcaagggatggtcgtttctccaagagcgacgcgtccagctcagggacgacgagtatactgatttccacgaggaaataaggcgccggcggtgggcatcactgtgtactcccatggccaagtntgatccagaaatagtccttgagttttatgccaatgcttggccaacagaagagggcgtgcgtgacatgagatcctgtgtaaggtgtcagtggatcccgtttgatg

SEQ ID NO: 263804 - DNA, 418 bp, Glycine max
  unsure (1)..(418): unsure at all n locations
agcttgcagtgctcttggaaacatgtgtcgttttattgcctatttntatagntcacttgtaagtattaaaaataatggtatttgccctcggagtactttataaacataacgaanattaaaaaggaagaaacaatgatatttcgtttgatgaaagctacttcctgaacttttcatgatttatcctacctcagcttttttctcttcctgtttatattttttagtttgctgttaagcaattattcctttttcaatccctagatatatacaactttgtaaactagatttatactgcggctgttatctgtaaggaaaaataagtcttcctttctggatgacagagtacatattatattaaaatttctgatactcagtaaaaatgtgaaaaaacaataagtgatactctgctttcttcttttct

SEQ ID NO: 263805 - DNA, 454 bp, Glycine max
gagctcgaagagtcaagagtggtgaatgatatgttgagggtggtagtcactatggtcaggaaaaaatgtgatgagctgaaagatatcaacatgaccacggtggaagcgttagagtgggaaataaaaaataggcccgaaaggaagaatggagcatgaacaagtttcaaggggctttgtggggtagcattatcgagctcaaacttataaaggccgagagggacaaatcaaggatggaaagcatggtgttagaggataaatcaaagaagtttcatagatcgaagagaattttgatggaacagctgagtcaaacagaagagaatatgttggcactcatcaatgaatataaagaaaaggtgaacctagccgctagtcatgggtagaggctggaagatgacgacaaaggtatcgttttgttattgaaggaagcagagaaaggtgatgagtattgcccggg

SEQ ID NO: 263806 - DNA, 204 bp, Glycine max
acaggggcaaaaagccccggacccacgcggaaacgcaaaaaaaaaaggggcaggaaaggggaacgaggaacccggcggacggcatccatacgcaggtccaccaccacatgcataccacaaaacaaacgccctaccacaccagaacccaagccacccaaaacccaagcgcaccgctcaggcaaaccccttgcaaccaacccacca

SEQ ID NO: 263807 - DNA, 374 bp, Glycine max
tacttttattcgttgaccacaaagaggtacctggagatatgtcgcgggggtcaagagaccttggggacatcaggtggggtgctattttccaaaccaagcttgaccaatcccgacccaacccggtcatattcagtcagtgaaaacctgtgatgtacctaaacaggcgagctcctggcagtccaacgataaaagaacaaagaccacaaagcatggaggcttgtgtggtggctggccagctatggatcttgagtgatatttggaatatggcctctggtatcgataccaagggtgtgtattgatacaagcttaaaaatgaaacaagaagtaagatggctatggtatcgataccaaggtggaatcattacacgcctaaa

SEQ ID NO: 263808 - DNA, 329 bp, Glycine max
  unsure (1)..(329): unsure at all n locations
gagcggtcgctaagcgcaacactcctgggcttagtgcaaagaagactctggaagaagatgagatgtacaggttcgctaagcgcaccgcttcatctgactatgcgcaccacttcaggtcatccactaagcgagaaaggcacgcgctaagccagaattcactaacatgtgctaagcggtccataagtgctctaagtgcacgagcacaaacaaggccacctatttaagcctgaaatcagtatttanagagagagtttggactgggattcacagctttgcatgtctagggtttctggagagagaaaggtccatgttccagagagtttcgagag

SEQ ID NO: 263809 - DNA, 383 bp, Glycine max
tcattatataaaatactttcttttttttttgaagacatgcatatcctttattgttaggtgaattatcccccaaactttataatggactatatattattctgatgcccatatttaactattgaaaataattttatccatcaatcttgaatatattttcatcgtacatatatatatatatatatatatatatatatatatacatatatatatatattctctatttttacgcatattattgttctaattgccaaacgtacataacgtactatatttttcttataatgcaatgacttcatcccactataaagaatgggcgttaattgcataaatctcagtgtaagattttatatgcaaaaaattaaaaatttaaaaccttaatatga

SEQ ID NO: 263810 - DNA, 391 bp, Glycine max
  unsure (1)..(391): unsure at all n locations
tgagataacatagtcaggctgtttcctctattgttcgtgcttnctttctaccagaccattttggtggggtgtatgagggcatatgagtctatgaataataccaagctttgcaagatacctagtaaaaggtctgttttcccctccccaatcagactaaacagcttttataggcaaattaaatttgagtttcaccataagttgaaactgtttaaagataggtagtgtctctgatttatttttcaacaagtacaaccaagtgaaacaagtgtgagcatcaacagaagctacatagtaattataaacagtgtaaatgagttcaaaaggaggtgaatacacagtatgagagggagaggagggaagttatgagatttgcaatgctacatgggaacaa

SEQ ID NO: 263811 - DNA, 378 bp, Glycine max
cttgaagttaggtactttattatctgtattatcatacatatatattaatacttatatgggtgtggcgttctattgttatcgacaggtatgaatctgcatggttattatgacatgacgctacaagttattggtatgttggtattacagaatattattatttatatgggagtgtgcactgagatgttgattgtatttgagtatgaactttgaactcttgcatcacacaacttgaaaaaccctttagtggcgactagttaatacgtgacatagttatgatgggctccatagtgggaaccctactatgtgaatcacttgaagcatgatgagtaaaataatcttgagaatattgtaatttgaaaacatcgagtgccctgactg

SEQ ID NO: 263812 - DNA, 330 bp, Glycine max
agctatggcatcgtctgtggattcattgcttttattgtggttgagaagtgtttcctgcatgtatgttaaacaattatgctgatgtgggagacactctataccatctttatcgtggatatggtctctattatcaaacgcgatctcacatatgtttgacataaaaaacatgtgtaaacacttaacaaatacgtttgaacctaagacacctaccggtatccacatacacccaatagctactacatttgctaatgcagacatttaatgttgggcaagaagtatggaatcctgcataataatcatgtttccttaatgacaatcacacattttcca

SEQ ID NO: 263813 - DNA, 383 bp, Glycine max
  unsure (1)..(383): unsure at all n locations
ctcagcttattgtgcatgtcatggaggagagngtcatatgtgtttgcttgtacaatagattcttccttgaaagagacaagctatgtctgggtggccatctcttttatatggtttgatatactaataatattgagccatgattaactacactgggcatatctcctatataatgtggggcgcagagattaaatgccattgcatcaattcatattgacactagaaaataaaataatttgaagaactaactataacatctatgtttagagcagtaattgtcttttattaactgtaaaagaagagaagagatggaagggnttcagaattatgtgaactttgtttcaaactttccaataattatctaaagagcttggctcatgttgttg

SEQ ID NO: 263814 - DNA, 365 bp, Glycine max
ggcttatttcctagaggatggcgcctcctctcacctcttttcctttgacttccgctggatctccatggaggaaaatcaccattaaggaacctcattgaagctcacatatccagccttcatataagccccacaagcaagctctccatcaagtggtcattagagcaccattagcttcaagtatgtgctccttaaacctccattaatttttcgctttaccttcacttccattggagcttcttcatttttcttcatgaatctactcacatgtattgagacaaatgttgttacatgattctatacagattcaccgattaacttgctctaaaactacatatatttctatggctaaattattgtccttgtct

SEQ ID NO: 263815 - DNA, 424 bp, Glycine max
  unsure (1)..(424): unsure at all n locations
agctttcacaacattcaagtaaaacaatattttaacagcacaagctatcacagccaagcaaaacagagcaaaggcagaaaactctgctcaaacaccaaccaaaatcacagcttttctcacttaaagaccccagtaacaattccttcgatccaattcgttaaccgttggatcgactccaaaattttactggaagtttatagtacataagcctacattgtgaccgttgggatctactagcaaacttccagaactcattctgtactactctttccacagcctaccacacacaagcatttttctgcacaaagccaaaattctgctgcacctatattaacagcaaaattctgcataagtgcagatntcgaaaatcatccttcctctcatccaatcttgcccaaatcaatttctacaaagtccaaatcat

SEQ ID NO: 263816 - DNA, 366 bp, Glycine max
  unsure (1)..(366): unsure at all n locations
ctgaccgcgggccctggcctttgttcctcctttccgagatgttnttccttacgtcagcttgcgtaggtttatagcctaacccaaatttcccgtgatttcctctgacacttactaagccggccctgccgtcgttgttctggcccaaacccatttcgggctcgtagccgtgccccaacatcacctgtgccaccatcaataccgcgctagacaggcatgggttgccttgggaggtaatctatggaagcgatgcttaccaccttcaaggattggaaagccttttccatgactactctgcagtttcacatacgggatagaggaagacaacttaccagaaaatttctctacctgatactatgaccaatgtct

SEQ ID NO: 263817 - DNA, 338 bp, Glycine max
agctaggtgcatatgatatatatgctcttattttttagggagtgtcaaatatgtgtggacatgcttgcttctattggtatgtttagcttgtttcagaaggcagcattacaatgtcccatcaagttgtcttatcattaagccttgtattgtgtatatatgtatgtgtgttaaagtcaataaaattaagctaagtgagtctcctttcaactcactaaaatatcaaagcttcaagtgaagtataccatatcttacaggtcataaatttaataaaccaaaccccattgctcttaatttattttggtttaaaaattatcaatagtgtatcagataatactaat

SEQ ID NO: 263818 - DNA, 331 bp, Glycine max
tattgagtacaacatgcccaaccatatcatgtatgtgtcgatgacataatcatattctgcagaggtaccactaaaaacaccaaagagctctcaacttatttgcgttgtatggtgaggcttcatggcaaacagttagtcatgaaacatcaatcttctaccatggtaatatcttcacaagtcgactttacaaatttgcacatcttgggtttacatataaacaccccattttgagaccttggatacctattttaaggtgagactacgaatgtacctgcatgcatcgagataggacattaaaaatatcttctagaaggaaactcttggtgaaaat

SEQ ID NO: 263819 - DNA, 198 bp, Glycine max
agcttgagatgaggaagagcggaacggttaatcttcctgcatttactggagaccacagagtggaacccggagatatagcaccagggacaagaaaccgtgtggacactaaggggggtgctattgcccaaaaccaagcttgaacaaatcctacccacaccaggcataatccggcattgagaacctgtgaagtaactaaac

SEQ ID NO: 263820 - DNA, 355 bp, Glycine max
ctatgagaaaccataaagactaaggtagtttctaaacatatatcaattgatgaagcttcgccgagcatccccattgaataacctttattcaaacctttcaaagttagtgagaaggctaaacgaaaaattatggaacttagaaaaactaaatccttaattgagggcgtaggtgacaaccatagtgaattactaaacaagattggtaggttacttaaggtcattccagatactccccaagcctcagagaatacttccaaaatggtaacaagaagtacctccaaattaattaatgttattaatgaagatagtgaccaaaactcagataacacaactgagataggatcagtgtcagaaa

SEQ ID NO: 263821 - DNA, 370 bp, Glycine max
gcctattattatagatcactaggtagcattaaaaataaagcgatttgccctcccgacacttcataaacataacgaatattaaatacgaagaaacaatgacttttcgtccgatgaaagctacctcctgaactcttcatgatttatcctacctcaactttattctctacctgcaaatataatctagagtgctgataagcaaatattcctttttcaatccctagaatatacaactttgaaactagatatatactgcggctgttaactgcaaagaaaaataagcctttctttccggatgacggagtgcatattatattataattttcgaatctcagctaaaatggaaaaaacaatagggatactctgcttcttc

SEQ ID NO: 263822 - DNA, 455 bp, Glycine max
  unsure (1)..(455): unsure at all n locations
ttgaaagttgagctcgaagagctaatagtgtgtaatgatatgtcgacggtggtagccactatggtcacgaaaaaatgtgatgagctgaaagatatcatcatgaccacggtggaagcgtttgagtgtgaaataaaaataatgcccgaaaggaataatggagcatgaacaagtttcaaggtgctttgtggggtagcattaaggagctcaaacttagaaaggccgagagggacaaatcatggatggaaagcatggtgttagaggataaatcaaagagttctcatagatcgaagagaattntgatggaacagttgagcaaaacagaagagaatatgttggcaatcttaatgaatttaaagataaggtgaacttaccgctttcatggtagaggctgaaatgaacacaaaggatctttctgatattgaagggagcaaagaaaggtgataattattgccggg

SEQ ID NO: 263823 - DNA, 195 bp, Glycine max
aaacactgagatgcacttgatacagccactattttttatccagggacgaacggtgtctccatgacttggatgaagccacaacctgtagactctggagcaaacctcggtcacattacctctaaaagggactacacaagtgcgacccatcctacacaaaaccccgtctagcattcttagacgttacacataaaaata

SEQ ID NO: 263824 - DNA, 347 bp, Glycine max
gtgtgatcgagacgatttaaccatgagaacgcccaaacggtgaacctttgcgaaattcttcacggaaaacggtacggaaacacttcgtgagcgcctcggcttataatttcttcacggaaacaattcttccaaccaaattcgaaagagagagaagtgcctaggtgctgaaccctcttcttcttcacttcctcccctaattaaagcaaaatatgggaggtggttgccgcccagctcccccaagcgagccaagttgcttcctccagaagcaacagccttctggaggaatattctggagggccccagtgtgcctgagtgctatttgcaccccaattatactaagtacacct

SEQ ID NO: 263825 - DNA, 426 bp, Glycine max
  unsure (1)..(426): unsure at all n locations
ctgcaactgcttgggggcttctatggaggctggatctttgagcttcaatgaggtcctttaatggtgattttccacaatggagatgcagcggaagacaaaggagaagaggtgagaggaggcgccatccactatggaataagccatggaagaaggagcttcaccaccaagatgagccttggataagaagcttggaatgatgcttcaatggaggaaaagaaagagggagagaaagagagaggggggagcacgaaattgaaggaagaaaaagggagagaagtttgaactttgagttgtgtctcacaagactctcattcatcaaagntaccacaagtgttacacatgcttctatttatagactaggtagcttccttgagaagttttcttgagaaaacttccttgagaagcttctttgagaaaacttccttg

SEQ ID NO: 263826 - DNA, 414 bp, Glycine max
  unsure (1)..(414): unsure at all n locations
ctcaagctttgacgtatcggccaagtgtatggacccacgtgtagcctttgtgctcatcgataataggtccagattaaacgtgatgcccaagagcactctggagaaattaccattcaatgtttgccacctaaagccaagttccatggtggttcgtgccttcgacagcacccgtcgagagatcgacctccctgtacagataggccctcacacctgtcaagttaccttccaaataatggatattaacccccccttacagctgcctgttggggcgcccgtggatccactcggtgggagttgttccctctacactccaccaaaagttgaaattcgtagtggaaggacatctggtcatcgtatcatgcgaggaagacatncttgtaagctgcccatctctatgccttatgtggaggccgc

SEQ ID NO: 263827 - DNA, 427 bp, Glycine max
  unsure (1)..(427): unsure at all n locations
agctntgacttgagtcgtcaagagagacatttttttttccatggcgtgagtgctaagaatgatgcaccattcttgaatcatctctctttcaatcgttctctcagacatcgtcactcgaacatctttcaggtaatctttcgatatcatacgacacaactttgtgattcaagtctccttatctatcctagagcgtttttatcaacactttctcttccaacaaaagttctttgtgaaaaaaacttgggctattcagcgttatcaatctcttctccctttgacgatacaacgaaagactaaacccctgacgacgttgtgtctctctctcttccatacaagagaatcacaggactagccgcctaagaatattcttgattcttcccttccccttgagcgaaagattcttgaggactaaccgcctgagattctt

SEQ ID NO: 263828 - DNA, 470 bp, Glycine max
tgtaagattatggggtacccatcacatgtggtactaggtgtcggtcgggcgatggtgcacaacatgtctacacattcacaaagcgcgcataaacccaccatcccctgttgcccacctccaactgagctcacgtactcccacgtagcccatatccttgtttctctcaacactgggtccccatcaatcctcccaagcttccccaacattcaagtaattcaacaatcaaacaacacatactatcacagccaagaaaaacagggcaaatgcagaatactctgcccaaaacaccaaccagaatcacagcttgtctcacttaagaccccagtacaattcctcgttcaattcgtaaccggggatcgactcaaaatttactggaggcttagtgataacctaattggaccgtgggatctgtgcaacatcaaaactactctgactgcttttcacaaccagaagatagcatttctacctgg

SEQ ID NO: 263829 - DNA, 376 bp, Glycine max
cagcttatggttagaactgggacctaaccattgttttgttttcacagaggccattgcctccttcgcccaatattatgaccagactttgaggtgcttcacctttggggactttcagtaacacccatggtggaagagttttaaaagatcctgggatgccctctggaaggaaggaaaccatatctcttttcaagattctattcctccttagctagaatttctaaaatagtcaaaatctctacacatgaattggaccaccgaaagcaagtcgaaaatggggtaattagggtacaaaagaaatgtttggaagcaaaggcaagaatcttggccagtcaaggtgaatgggcccccgctcatagacatcttaacacttttgatc

SEQ ID NO: 263830 - DNA, 408 bp, Glycine max
  unsure (1)..(408): unsure at all n locations
ctcagctngcttaacagccctatcactaccttcttctatcaaattcaccaatgaatatattgcttcatcagaaataatagcttctgtggaatctaccactccttcaaatattattctgttaagttcaacaacagcagtttcctgtgcttctggggagaacgaagttctgatctgttccagaagtcttggaattgtctcgtagagtgtaatttccacattgattggatagaggctcgcaatggaaccagagagagaacttattttaactaggcaagcagctacccactctttattgtgaaggggaatgctggacctgaggattccgcgaagcaaatcaatgaactgcaaggagtttattttgtggcagaattgctcacaatcgagtagccttgtcaataatcgggatgc

SEQ ID NO: 263831 - DNA, 342 bp, Glycine max
tcacacagtctattctaatacagcttacgagttgtgggggcacagactgagggaaaagcctgttcattaccattctaataaaacacaaaggtataatcataatcatcattactgggaaagtcaggtttgaccgtggaccacatcaaaccaacaataaaatgctcttgtttcaataactttttaatcaaaaatgtgtaataaatcaagtttttttctagttcaaaaaggcaattatacaaactctttcattaacgttataaaaccatatacgtaatttcgagagaactttttttttctaaaaatactttttaaaacaattatttcaacaatataaaaaaatta

SEQ ID NO: 263832 - DNA, 255 bp, Glycine max
aagtatctgacttggccaccacgaaccgatccttcttcaaacccaaacaatcgagccaacagaacaatccaccagacctaacccaaacactccatctgcctcacactacctcagactatcgctcattatcgctcccccaacatctctctcaagaactctcccactctcgaaaataatagacggatgtgaagccttagctgccaacgaagaaggacgatgaaaaaacaacgacaagtgagacggtggggagggcac

SEQ ID NO: 263833 - DNA, 294 bp, Glycine max
  unsure (1)..(294): unsure at all n locations
ctcacgcttgtacgaatataagaaacatcttcttcgaccttggtgatcttngactccatgtcatcgaatagcatgtccacttgtaactcaagagcatcaacctttcaccaacaaaggtttgaagaccatcaaacctatccaaaaccttttgaagaagagaggaatcttctccaccatgtanatgtccttcttcatcaatgggttgagcaccctctttcacccaagagccatcatgctctttacgataaccaaaggatgcaatcataatggcaccgattaagaaggatctcttga

SEQ ID NO: 263834 - DNA, 415 bp, Glycine max
agcttgagaggaatgaaggggacccattgtttataggaacgagggaaagggctacgcgggagtacgtgagctcagaagaaggcgggcaaccggggatggtggatttatgtgtgatttgcgaatgaggaaagtcgacttgcaccatcgcccgatcgccacctagaaccacatatgatgggtaccccataatcctataaacttgaagtgaggaagcggggaagagagagtcttcctacttttatcacgtgaccacagagtggtacctggagatatgtcgcgggggtcaggagaccttggcgacgtcacgtggggtgctattgcccaaaaccaaggttgacaaaacccgacccaacccgggatagacaggagagagaacccgtgatgacctaaacagggagctccaacagccaaacga

SEQ ID NO: 263835 - DNA, 303 bp, Glycine max
tgctgtagatcagactgatgctagtatgtattggaggtaggtttattccattaatgcttgaagaaataagtaccactgtgaaaactaacttttcaaatgcttgcctgtccaagaatgtgcccgaggaagcttgcctcatacaggtccagtaaggacaatgcggccgaaggaactatattcctccccggagtatgacagtcaccgctttatgagccgtggacaccagcagcgctttgataccatcaagggatggtcgtttctccgggagcgacgcattcagctcatggactactagtattctga

SEQ ID NO: 263836 - DNA, 194 bp, Glycine max
gaccatttgactctctcgaagagatccgttgtcaattttgagcatcttgatatattatgtgaatgaacccgatatcccaggttaaagatatgaccatttgaattatttcgagaggctccattgtttaattcttgagcgtcccgatatattatgcgcctgattcggacatccgaatgaaaagctatgaacatttg

SEQ ID NO: 263837 - DNA, 134 bp, Glycine max
tgtacttactatacttactatttgaaacaaagcaaataatatttaaacatatacagatgtaataatgaaactgccgttgcattttaaacatttaacaaaaaattctctttgatctctaagtcttttctcctgga

SEQ ID NO: 263838 - DNA, 317 bp, Glycine max
atcagtaagttgatcttgctactatgactacaagagagtgtgagttttggtgcttatatataataaaaagggagacttaaggggggaaaaatcaaatgctatattggtttgtcaaaagcggtttgaattgtgtggataaaagctttatctagttatgggtaggataaaaatcatttatcagaggaagggatctgaagtgagaatattactagcaaaatctatttgagtcaccccttatattcttcactctcagcaatcctcgccagcttaggaatacgccttagaggttttaattggaataatgcacatgaacattt

SEQ ID NO: 263839 - DNA, 279 bp, Glycine max
  unsure (1)..(279): unsure at all n locations
ctaattatatgtgccactaaatctatcatgtgttgacaggaattgattagcccgtgaatttcctctggggctgaacacacttcggccatggctcttgctttggctagtagtcgcgggaggtcttgacttccattaaggtcaaggcgaacctatccatccacatggtcacttcttgatgcaatgcatcaatcaccctccctcttgcttccttctgagcgtatgctngtgcgaagtcctctactaacttttgctcatgggcaaagactgggttaactcttc

SEQ ID NO: 263840 - DNA, 426 bp, Glycine max
agcttatgcgcatatttccttacatacgttctcttgcacaatacatttaaccgaaaaagtgcacccatatacaatcaaggcagcttcattacctaaattatttacacgtactgccaaggtgtatttgttacttacatcacacgcatctccttggctgaatttgcatacatgcatactcaaagcattttggggtaccaaaaattgcacatgtgcacatcttggtatttctaatacctatatatacacaaacttcatgatgaatcttgactatcttcacaaaaaggtgctacacttcatcccttttttcaagtttttgctacctaaagccgcatgcaaattcaagcatatttttctttgcggactaaaattgtattcaaattaaaaggtatattttttgtaatatgttttcttcatgcaacatattta

SEQ ID NO: 263841 - DNA, 380 bp, Glycine max
  unsure (1)..(380): unsure at all n locations
ntgcttggagcttcaatggagaatgaagaagaagagattgttatcgtgatggatagagagagagctgtctgaatagtgtggggctgagtgaagagagagagagagttgctttttaattttaaaaaaaagcttcttcctcatttcttattattttattataaactatgccacatgtctccatttgagtggagcaaaaagggcccacttttccttcttgactgtgacccatactcagccacaaaagtgaggaaaatctgacctttgaaacgctaaaatcttgcctcggtttgcatgcgcgttctatggatccagttcctcgcgtttctctgcgtccgtcggggccagttttcgaaagtaaccaatatatatatcaaaacgct

SEQ ID NO: 263842 - DNA, 426 bp, Glycine max
  unsure (1)..(426): unsure at all n locations
agcttgacgccggaaactataccttcaccgtatcgtctatcgntgctacccccacgaaccgaaggcaatgccgcacgtaaaagagaaaactagaagcaaaactttttgaaaatggaggtaagaagcttttccagaaaaaaatggcttttcaaggaaaaaaggtgataggagcaattntggcatttcaaaggtttgctgggtgcaccagcaaaaatgctgggtgcacctagcaacactcattatctaaagtccaatggccattttttttgttaatggctataattatataagcgttcattgatgaatatgccacctggtgttgagatttcttttgcacaatttgtatttggtacattgataagatgtttgaaattcgaaagctgattgatgtccgtgaatgactcgtcaattattaagtaataccga

SEQ ID NO: 263843 - DNA, 429 bp, Glycine max
ttataacaatccaacggcgaatgagtctaagatcgcatttttctgtgatagatctcggggtatgcgggaaaagagagagttctgggaggaagagaaggaataacgatattgataggaagaggaggatgataagctatcgtcagtctgaaaattgagctaaaatttctctatttatagttaggctactcacaacccattatttactctatttatttatttttgttattttataaaaacaaactctattttattttctatcaaatgaataaataaaatatcctttttattttctctcaaaccattattttaattaataaagttatttctccttatttatttaagtataatgagctcatcatgtttataaaactatttatttacaaataacaatattttctaattagttacgaaaaatgggatgtatatttt

SEQ ID NO: 263844 - DNA, 252 bp, Glycine max
  unsure (1)..(252): unsure at all n locations
agcttctgtncncaannnagagagtctcgatatattattgtattcattaggacatccgggntaaaagttattgtcgtttgaattcgctccgagcttctaattacaaatatgagcgtctcgatatattaccggacttatttggacatccgagtgaaaagtattgtgcgtcgcatccgctacaaactttcgtttccaattccgagcatctcactatattgcgggcatcaaacggacatccgattaaaaagtttt

SEQ ID NO: 263845 - DNA, 245 bp, Glycine max
cgtagtatatctgtgatgccccgagatagacaacataatgactgagcaaattcaacgacaataactgttactcagatgtgcgattgagtcccgtaatatatcgagacgctccaaattgaaaatagaagctcctagcaaagtcaaaacataataacattttactcggatggtcgagtggagcccgtagtatatctagacactccaaatcgaaaatagaagctctgagcagactcaaacgacactta

SEQ ID NO: 263846 - DNA, 113 bp, Glycine max
tcatccgtataaatcaccatcgagagtttaccttagggactgccactatccccgtggagaagaatgaacagaccatgcatgcctaacggggaagagaccatacctattccagg

SEQ ID NO: 263847 - DNA, 401 bp, Glycine max
gcttccttgaaaagattcttaaagaatctagagcttagctacacacacctctctaatagctaagctcacctccttgagatgagaagctagaacttatctacacaccctctataatagctaagctcacccccatgacaaaatacatgcaaatacaaaaaaaagtccctactacaaagactactcaaaatgcctcgaaatacaaggctaaaaccctatactactagaatggccaaaatacaaggcctaaacgaaggaaaaaacctattctaatatttacaaagataagcgggctcatacttagcccatgggctcaaaatctaccctaaggctcatgagaaccctagggccttcccttggatctctggcccaatctacttggagtcttctatccaatgcccttg

SEQ ID NO: 263848 - DNA, 388 bp, Glycine max
tcctaccaattcactgttggctctacacaaatcataagatttgttatttttttgtacactgactaactcttaatcatcttatagatggatgtacaatctcatcacttatcttttcttttgaggtgttcaaggtgttatcggagcttttttgaactatctaaaaatttatagaaagctctttatagaaagaatctaaatgagagagcgtaagttcataaccatgtattcaaagattctagtatttataggtcttcttcaacaagtgttcattgtttccatatggatagacttgagctcgtgtctaaagaatgtggttgttaaagaatttaatgcttgctttaaatgcatgtacttcttcatgccggaaaaccactcttgtgagctttat

SEQ ID NO: 263849 - DNA, 405 bp, Glycine max
agcttctatataagctgaaccattctatcaattatcactagttgagttttattcagaaaattagagcttatctcttttatcttagtgagagtgattctcctaaatatctgagtgactcaagaacaccctggctgtatcaaaggactttgacaacccttgtgtgttgccctcgctggaaagagagattctttccttcctttcatcttaacccttgttctttcaaaccacaatttcagaaaatccacctctgcccagaattatttcgtggccataactcccattgtacgcactcaaattaagtgattcttgagcctaaattgactttaaaaacgagacctttcaccctattttggaatcaccttatttggagccccggagcctcaggtattgccatttctatatttc

SEQ ID NO: 263850 - DNA, 369 bp, Glycine max
ttaggctgttcaatagcttcagataggtgctctgaatgtcataggtctgtgtggtgggcggcagaagagcataaaccatatagtctggcgacaggtgtagatttttgattcatggccagttgggttaccaggtttaccaaggcatctagtttaccttcaagcttcttagtctcagctgatgaagatgaattcttggctacttcatgcactcctctaatgacaatagcatcacttctggcactaaattgttgtgagtttgaacccatcttctcaattaaatttctggcttcagcaagggtcatgtctccaagggctcaccactgggacatctatcatactcctctcatgttactgagccgtcataaaaat

SEQ ID NO: 263851 - DNA, 346 bp, Glycine max
ctattttacgagccctcttggactttatgaccaaggccctggcagtaactatatttgtatttcttaagtccgcactcttctttcggaatttaagagctgctgactagaacctatttttgactgtttgggcttgcccgagttctgccctaaaggcctgcacctcttcgtcttgctacaatgcctcaacttcctcccttttagcggctcaaaaaacacaggagcccatccataccttgcatgtgggctttcaaccaccttcgggagccaccgataggcccaatggtactgcccctgagttctttatccttcttttgcaccagcttccatgccttgcggaccttatgaa

SEQ ID NO: 263852 - DNA, 411 bp, Glycine max
  unsure (1)..(411): unsure at all n locations
gtgnatcgagtcgctccctagcaggatcacatcatcttgctcctttctnnttcatctaacttctggtcgttgtttccttctctctttatatatgccttggggtataataattcatatatgtatgtatgcgtcggaacctacccttcggtatgagggcgaggcgaatagcctaaggagcatcnttcataaaggaaaacccgcgggagtcgccaccaacgtttactctatgaatacattagaataaccaaaaaaaaaaggtcgaaggtctgcaaatcttgaaaatgagggtttgtgagttgtttacacacgaggaaggtatttgcaccccacgcactcgtcacaagggatggcaacctttaatcgagtgtgctaaacatgacttcaaaaatgggcattctccctttcatatgt

SEQ ID NO: 263853 - DNA, 384 bp, Glycine max
agcttccacaacatccaagcagaacaattttcatacagcagcagctatcacaaccaagcaaaacagagctaatgcagaaaactctgcctaaacaccaaccaaaaatcacagcttttaccactcaaagaccccagcaacaattccttcttaccaattcggtaaccggtggatcgactccgaatttttactggaagtctctaatacataagcctacatattgaccgttgggatctactagcaaacatatccgactcattctgcactgctctttccacaaccagcaaatgcctagtatttttctgcacttgtgcaaaattctgctgcacaatttcacagcataaatctgcacaatatgcagatttttgaaaccacactctccctcat

SEQ ID NO: 263854 - DNA, 315 bp, Glycine max
aaatcaactaatccattttcacaagttaggcataagcacaccatccccaggtgcccacctttaaattgatctcacgcactcctacgtagcccttatcctcgttcctctcaacaccgggtacccatcaacccctccaagctgtcacaatatccaaaacaattcaatttcatttgtcatgaaactaccctaaaccaagaaaaacagagtggacgcagataactctggacaaaactcattcaaattccacagtttttcctactcacatagctcagtaacaattcttgtgttcccattcgttagccattggatcgcctt

SEQ ID NO: 263855 - DNA, 297 bp, Glycine max
cacacactcctcttatgactatgctcagctgcgtgagaagctgtcttgagaagattcctagagaagcttgagcttgggttctcactcctttgtgatagctaagcgtaccttcttatagatgagaatttagagctgatgacacacacctctctaattgctaagcacaccttcttgagatgagaagcgtgagcttagatacgcaccttctataatagctaagctcacccccatgccagaatacatgaaaagtatagaaaaagtcctactacatacactactccaaatgccgtgctgtac

SEQ ID NO: 263856 - DNA, 337 bp, Glycine max
acatcaaaagatcatttagccctcccttttgggtaattttccgtattcttttccgaaacatcaaaaaatcttacggattgcatgacaactgatgttaagcaactcaattcgtgtggcaagaatccaaactctagcaaattatcgcccctggacgaaaatagggtctaacacttttatttagaaaaagaacttatttatcagaaccaataataaaatggtaagtcattaattttatcaataatatcataaatctaaatcttattccaaaaatagtctttgagagtagtgatatatctaatgacctacacatgattaagaaatgacacttctccccccc

SEQ ID NO: 263857 - DNA, 363 bp, Glycine max
  unsure (1)..(363): unsure at all n locations
ncatgatgatgaatcaggtagnntcgatgatgagaagattagccctttctaatgagtcgcagactgagtcaaccagttcaagatcaagtttaatctccagattcatcagaagaaatcaagaagattcaagattcaagacaaggtgatttcacgattcatgagaagacatcacgaggaatgacgattctagagaagatgaatccgcgattcatgagaagaaatcaagaagcaacacgtccagatttcacacgggaaatattgaaaaggatgtttcaaaaaccaaacatagcacaattctgttttacaaaagagatttctcaaacttttctaatgtaccagagaattgactctctggtgatcgat

SEQ ID NO: 263858 - DNA, 396 bp, Glycine max
  unsure (1)..(396): unsure at all n locations
actaagctttcgattattctatgacccgtagggccacattgtgtttctgcattttattctcgcttggttacttttataccccctcttgacgtgcttaagccattttacttaagtcatttctcgcttaacttaaaaataaaataaatttccaccgaacgtttgaattgtattatccattaacttcagtcaaaataaattccgaccgttcggtcgtgccgtaaccacgttggaaatcaaaaagaggtaaaaaataatataataatcaaaaagacatcttttagtaaaataaagcggaaaatcaatcggacgttntctctttgggatttctcattcttaatcgaattgataataactaaagtgaaactaaaggctaaaatcaattcgcctagtcaagct

SEQ ID NO: 263859 - DNA, 420 bp, Glycine max
agcttctacctcctctttcaaaaattatgttttatggaagaacacaaatgctcaaccctcatggtatctaacattcacttacaatcaccgagaaaaatcgtctccgtgaagaaaatccaagccgatgcgcttccgtaacacttccgtgacgttaccatgggtgatttcgcgaggatttttaaccgttcttcgtcgttcttcggtcttcaaccggtaagttcccgaaaacgaactatccaactcattctatgtacccatagtaggcctcatttgatttgcgtgcttttatatttatttcatttacttttcgtacccctttttttacgtgctttagtcatttaatctatgacattcctctcgcctaatcaaaaataaaacaattattcaccgatcattcgtatataacatcccttaatttct

SEQ ID NO: 263860 - DNA, 359 bp, Glycine max
gctatacgagacatcttgccaaacatagtcatgctcacgataactctcctgtgctttgtcctccatgctatttgtatcaaagtgtttgatccattaatgcttgatgagatggaaaatgaggccgcaattatactgtgccagtaggagatgtatattccccctgctttctttgacatcatgaatcacttgattgtgcatctggtcaaataaatcaaatgatgtggccctgtttatctacggcggatgtacccgtttgagcgataccggaagatcttaaaatggttactaagaatctatatcatttgaatcatctattggtgaaggacattgctaagagccattgattttgtcatacactt

SEQ ID NO: 263861 - DNA, 164 bp, Glycine max
cacgtaagcactgagatgcacactgtaaaaaaagaagtaatgttttaagatgaaaactctccaaatggggtaaaaatcgtaaagcggccaggtctaattataaacctgacctttgtaaacgatgttaaataaaccctactttattaaatatcacggtaacatac

SEQ ID NO: 263862 - DNA, 401 bp, Glycine max
  unsure (1)..(401): unsure at all n locations
ttattaggctatgcttntgaagcattatgattaacctctagttagtatgtctaagcttttcgttccataccntatggggctctttgattgagagtaagcatgacacatcttgactcgacagattagtaaggttaatcttataaagatttccttgtctcttagcagagaagagagaacgagttgttccttgatttggacaatacacatatccttggttgaggtgacattatatccatagtcgcataagtgagctatgctcatcaaattatgattcacctttttacagtaaacatttcaatggatggaaaaatggatatcgatctatctacaccagtatagacctatatattcctctgaagtacaccccccacacaatgactaggagtgatggaactttcatt

SEQ ID NO: 263863 - DNA, 269 bp, Glycine max
agcttgcttatggagcttctatggaggcatgatctttgagcatcaatgagggcctttaatggtgactttccaccatggacatgcagcggaagacataagagaatatgtgagaggaggcgccattcattatggaataagccattgtagaatgagcttcaccaccaagatgagccttggataagaagcttggagaggatgcctcattggatgaaaagaaagaggaagagaaagagagggggggtgggtgtcctttctctactcctcatact

SEQ ID NO: 263864 - DNA, 396 bp, Glycine max
agcttttacaagcatgtgcacactatatatactatactgtgatcaactgatacaaaatattagattgaaaagataatatatactactcttccaacgtagtggaccactaaaattaaaataatataatagaaaatactgcttaagccattcaaatcaagtcattttgaatctcaccattagtatcatgcacgtcaaagataaggagaatcaagcgtcgtcatgcataacacaaccaaacattagaagaaaacatgctttctaaagccaaccaaggtaaaaatgaattcatatttcatgaacatgttcaaaattataagacacatataaacctatatgaagacatggcagaacaatctcaccacatgaacaacatagaccacacatttcataaaatga

SEQ ID NO: 263865 - DNA, 262 bp, Glycine max
cacttttggctatagatgacttgctccacggttgaactcactgttcaatttgtggagaaatcgagggagatgattccaccttatgaaattgtcaatgaaggtattaacatcaaagacattcaatgtgcacagtactgattattatcaagctctcacattgccatgcaagtgatgggaatcaattgtgattgaactccagacgtatctgtcactcttgcaattgcagattcttcaaacttgctgatatacatgaattggtatc

SEQ ID NO: 263866 - DNA, 264 bp, Glycine max
attcaaatatcctaagacatggttaaacaagcatgtcagaaaggcattgtctgataagctgtggggagtgttcttttgacctaaagtcgagtgttttatttgatgagtcagaatatagcgactgaagagctgtacgaatatatgatactcacagcgagattacctgaataaaggctgactcatgaaatcgatcaactaatcctgtgttactgtcactttgggcagaccatgactgcccattgtgacataatgataccctattgt

SEQ ID NO: 263867 - DNA, 212 bp, Glycine max
actgagcatgcaactaactgtaatagagaaaagttttttgtttaactaaaacgatgaacaagggcacttcataagcaaactcctgttcgcatatccgaccacctatacaaggccaggggactgggcacattggtgaatggctgtcaaacgggcccttcagaacgattcatacccaatgtcagaattagtttgcctctaaaagtggcgtcaaa

SEQ ID NO: 263868 - DNA, 196 bp, Glycine max
gagctcacccctcagaaaccgtacttgagcataaaagggaaggattttgaaaaatataaacccaacctgctcgatgttaaaataagcatagaataaaagaaaactggaaacataaaagtggcgataccataaattgccacgaacgggcatgttgaatatacctcgaaaagtgaatcgaatacataatctgaaaaaa

SEQ ID NO: 263869 - DNA, 451 bp, Glycine max
  unsure (1)..(451): unsure at all n locations
gacactataaaactcagcttttatncatgctcatcatggtggagaagctccttcttccatggcttattccctagtgngtggcgcctgctctcacctcttctcatttgtcttccgctgcatctacatggtggaaaatcaccattaaaggacctcattgtagcttaaagatccagcctccatataatccccacaagcaagcttccatcaaaactatcatataaatattagtcatgatagccaccaacaattaaaggattggttgggatgtcaagcggctcaatcatgtactggttcacatacgcaaatgcagaatccacaaaactgcaagaacaacaaagtgagcaatgaacatggtttgaaatcaaattttgacaaaagtgtctgatgtacaacattaatattggcagaactggtactggtctgcaagttcttggtcaacaatattatttca

SEQ ID NO: 263870 - DNA, 395 bp, Glycine max
  unsure (1)..(395): unsure at all n locations
agctntgagggtgcgcagcccaccatctttttatagttagtaccgaaaatgtgtctaccatcacgattatcgtctccctttccattattgggggtaccacctgggccgccagatccctccaccttttgggcgtgttctttgaatgatccgtccccctttttgcacatgttctgtagttgcatcatattcggaaccatatcaaaattgtactgatactgcctaacaaaggaaaccattatgtcctttcaagaatggactcgggaaggttccaagttagtgtaccatgtaacagctaccccagtaagactttcttggaaggaatgtatcaacaattcctcatcttttgcgtattcccccatcttctgacaatacatctttagatggttcttgagaca

SEQ ID NO: 263871 - DNA, 441 bp, Glycine max
tccttctagtgcgtcacgtttaaaaccgagctctatggtggtgcgagcctttgatggtactcggcgggaagtaatggtggaaatcgacattcccattcagataggcccccacacttgcaatgtggtgtttcaagtaatggatataaatcccgcctatagctgcctcttgggaagactgtggattcatgccctgtgagtggtcccttcgacgcttcaccagaaattgaagttcgcagtgggtggacttttagtgatagtgtcgggtgaagaagacatgttagtgagctgcccctcctccgcaccatacatataagcggcggaagaatcattggaaacgactattcaatctcttgaagtggtgagctacgcctctgtggaaccaagttcgtcgctcacttctctctcaaagcggccataatggtggcgtgcgtatgctcaaaa

SEQ ID NO: 263872 - DNA, 323 bp, Glycine max
taaaactagctgattgccccgatgagctcttttattttcaactaaggtacacgcgatgccccttggcgatttatccaaatcttctaaattaatcctatgtcctaactatagagtaacatggactattaaagtaaggtcaatgattcaattgaaaattgttattattttgagatgcattatctctggatgtactgacagtatccaacgtatttgacagcttgaccatgaacgaggattaaataaacatttgagcactttaacctagttatgaagctggctcactatgtgtcataaatgaatagagcatttttttgcccaaataa

SEQ ID NO: 263873 - DNA, 312 bp, Glycine max
ggagaccttctatttattatgtcttatacaccccaagtatgaatagaagagcactgtgatataaatatgtgggaggatttagaagctttattccatacggaatgccattacgaaaataatagttttttacgaggggatctaaatggtcatgtatggagaacatctacaggatatgaaggttcatatatggattacgatctaggactaggaaatgtataaggtgaatctatcctagatttcttattagctcatgacttcacaatagccaacacttataacttctttttgtggtgctttgcctcttactgtact

SEQ ID NO: 263874 - DNA, 423 bp, Glycine max
ctgcagcatgcaagctttaaataactttcatataaaaattcattctattgtattaaaagtatcaacaagctatactcttttatatatatggatgcctaattcttaaatttatattaagacaacttttttctttcttttttctaaaattgttccacataacaatttgtcaagcctatagatccacccaaaagaattagttttatatttacattgcagttaggtttataattacatatcagctccgttttttataaaaaaaattataatcatgaaattattatatatgataaatttattaatttttatagtaattattttataagttataccaaatctttttatgattaaataatgatatatcttttttcaaaatatatcggcacttgaattctggtgggtataaccatatacatattattgaca

SEQ ID NO: 263875 - DNA, 278 bp, Glycine max
  unsure (1)..(278): unsure at all n locations
gtatgatatccactcgacaaggttngaagtataggagaccttcaatcctataacgcatcgtggcggacaaaagtgggcagttaacttgaatgaccattattgtcaatgcggaaggaattgtgcgcttcactatccatgttcacacattattgcagcttgtggtatgtgagcataactagaccaatatattgttgatcgagtggctcagaataattacaatgggggtgaataattattctaacattaccaattaaaaatactctttaaggctttactaa

SEQ ID NO: 263876 - DNA, 386 bp, Glycine max
  unsure (1)..(386): unsure at all n locations
tcaagccgnatagcctgcagcttcgaatatgagaaaactaatctgttagaggttgttttgccaacggatgaaagtgtgatcctctgacagcaccctacaaatcaaaaaaaatagaactagaagctcagctccgaaattaacacttggcggaataatatatatactcacagacgtcaagagccggattccaaatcttattacaagcttctcacacgacctatatgctcccccttccaattctgccgcgaatttaaatatgcctggccgctgtaagcacatgtcactaggaaagaataagattgacccggctacctcgttctcatgttgttttttccacggcatgcattgtgtatcccagttatttcctcgcaacacattaaaaattc

SEQ ID NO: 263877 - DNA, 386 bp, Glycine max
agcttgccaagacaatgcacacgccctctttttttcgtcctttgacttttaaatatatatcatttttctaattaatagaatctttggtgctcttgaaatattgtgaactctctacttcaaccattttcttttttagttcatcctacataaatacaccaaataaattattacattgcatcaatatccttaatacttcaatgccactaaacaaaactcatctcctcattagttactccccctcacaccataaccctctattagaaaattgagcataacatagagaaagtattgaaataaaaattaaaattcttacgggtacagtagcaggcttttcagtaacaatgcttccatctctgtgagttcaagtgtcgatactaaattatact

SEQ ID NO: 263878 - DNA, 364 bp, Glycine max
  unsure (1)..(364): unsure at all n locations
ctcaagctngaggggggatttntactattccacactagattagcgtgtactcattttgctttgtccttcccataaagagctgtcagtaatgcactttcacccatctccattaaaagcctttcttcttgctgaacacacatggtcaataattcattgatagaccattngtccctatgtgtgtggcgtaaaaaatcttaaacgacccatattctgacggaaaggtgttcaaaatgaagtgcaccaggaaggattcaaacatgtcaacctctagtttcttaagttgagctaacatatatcgcattngcattatgtactcatgcacacctttcacactggtgagccgaagaagaaaaacctcatgatc

SEQ ID NO: 263879 - DNA, 343 bp, Glycine max
gcagacatcacctcatctaacattgaaggcttatctggctgcaactatgccaagtgatccaccacgtacaggaataatcaatccacatatatagaacttgaattgttgcattagattttggactgcatatgctcttaactatgtaattttgataaaaattaaaattgatattaatctccgaatctaactgtaatcacattaatccttaaatttaaaagactgttttcgcaattttacgaagaatgaaaatcattttttttgtaagttagaaatcgatcgccttattgaagtcagaactaaacatgttcatgaagtcacgattgaacatcttccttaaaattga

SEQ ID NO: 263880 - DNA, 329 bp, Glycine max
gaacatagaacaccagctgccggtgaaaagcaagaaccgtcttaagttatgatgccgcaagccccagaaaggtatatttgctttgatgccttaccttaaaaaagagcgggagcttgaaaatagattacattgatatactgcgacccgcaaatgatatcaccacaatggtactcgtaaactctgcaacaccctacgttagacattgaatcacagagataagtgcataatcttcaaagataatcaatgatattctcaactactctcctgaagcgacagactactatgcgcttgtgaggaggatgcgaatccaatctctgtgcggatacata

SEQ ID NO: 263881 - DNA, 281 bp, Glycine max
taagttattgaacacaatctaaagaaataccataagtggggattcattatttttagcctcagagtctctttttttttggagagtgcttacggaaacgattaccaaactttggcatgcattaaagtcgataaaacctggcaaattttaagagaaagtacgttggttggccaacactttggaaatgattacttaaacttgggtatctaatacacgaagttggacttattgcttcttagaaaattttgagaactattccaatatcttcttctggttgataacca

SEQ ID NO: 263882 - DNA, 252 bp, Glycine max
atatcaagcacggtaaagttctttctttccgcaataccattatatagaggagcatacgatggtgtcccttcatgaataatatcatgcatctcacacaaattactcatatttaaagatgtgtattctccacctctataagaacgtagatattctatgttgctctctaatcgatgttatacttctgttttatatacgtgtgaacttatcatacaactcactcgtgtgactgactaaatacacatatcaatattt

SEQ ID NO: 263883 - DNA, 417 bp, Glycine max
agcttatatatctcttgcttgtcgatcgtattactcttcaagaaaaaattatccgacgatatagggcagttatttatattttctttcatggctaattaagtacaacagctagaaagagctgcactttccataattgtctctctatcagttcccgtaattaaatattacatacataggtacggttgtattgaaagacttaattacgtaaatatattttatggtagcctaatattggagtatcttaaattaatcattaatgcatttatatttactaggaagaaataagatggatcttttgctaggggagaaataagatggatctcttgctaactgatattttaagaatattgggtaagaaattaataaataaaaaaataatgttaaacttgtattgaaaattaccgaagagtgtatcat

SEQ ID NO: 263884 - DNA, 296 bp, Glycine max
tccttgaggcgcattattagtggttgctatattaaatgtcgcatcttagtccctatcatatctgttgcgcctcatgcatcatcatgaggaagtcagaagaaaattttctaagttagaaaatttcctcagaaggcaaaaaactatgttttaatggattaccagcttatcgtaatcgattacaaaatttgtttgaagcttgcagagttatgtctcgtatcgggttaatcaatgacaaccttatcataattgattatgtcgcaacctacccttcagcgggaaggtgaggcgtgactcaa

SEQ ID NO: 263885 - DNA, 186 bp, Glycine max
gcaaagaaacggggagatggaaagcaaggccatgcgcaaggaagaaacacccggaagaaaagcgggcaagataggtgaaaaaaaaaagagccgccgcaaaagaaagctaatacgcgggcggaacaaggcagggcgcaaacaaagagacagaaaaggatgacacagccacgatacaacggaaagaag

SEQ ID NO: 263886 - DNA, 395 bp, Glycine max
tcgtatacaatataataaactcattgtagaacagaaaatgatctattcatttgtactaataataaaaaatgaacaaagctctaagctttgttgttgcgatgaataaaataaccacaaaaagctagtaaatgattcacatgcaacatcaaaacccaacaaaacctccgaccaagaatgggtacagtaactaacaatacacactcatagaaaatatcgaaaatgcttcttatacaaaacaacaaactcatgataaaatgcaaaaaggtcaaaccttttggcttgaaataccattatacttgctaaccaagccgaaaacgaacaacaacaacgctctttatgaacaaaaaggtcgaaccttgtggcttgaaataccatcataccttgtaaccatgccg

SEQ ID NO: 263887 - DNA, 95 bp, Glycine max
tttccggattccgcacactccttccggaaggggggaacgggcaacttgaaacttttttgggcagatttccctttctaactcctatgagagcttgg

SEQ ID NO: 263888 - DNA, 124 bp, Glycine max
  unsure (1)..(124): unsure at all n locations
gcatgcaactcgcatcatattgacgatttcatttgcanaacacaaattaactcagattgagattggcaaattgagactgtacaatgaagaatgagttttaaaattgtctgtagaaattatgtgt

SEQ ID NO: 263889 - DNA, 410 bp, Glycine max
  unsure (1)..(410): unsure at all n locations
cgcggcatgcaagctcaaccttatggatggctccttgattttattcctcggccaccncggaagaattaagccaagcccttactttctaggagcagctcccaccttatgacgactatccagggcagacgatgaggaaggagatacccatctcggtcctctgctccacactaaagaaccatccccccatgaactaccccaaccgaacatagtccgccatatcccggcttaacctacacccgtaaaagaatactgtcccttcatggaagataaagaaaagattgaggcgctcgaagagaggttcataataacccgaggccttggccattacccattctccgattcggaggatttatgtctcttgcccaacaacaccatcccttccaaattacaagtaccggactttgataagt

SEQ ID NO: 263890 - DNA, 330 bp, Glycine max
tttagatataaggctactgagccttgaggattatctatattcttttgaagataacacacgagggatatctgaatatgacggagacctacggtgtgttgacattaacttgcgaaaaaaaaactaatcaagtcagcacacagaaagaaatgtatggagcaataagattgatgaatgaatgataaagctatgcattattgttaaaacacatggaagaatatatatcggactttaaccagacgcatttacaaaggaaagttctcccataaaccctcctcatgatcagtacaattggcatatacatcattatctagttcttcatcaagaattcaa

SEQ ID NO: 263891 - DNA, 412 bp, Glycine max
agctgcttcatccgcacaagagtcttaatatttgaagagtatactagaggaaccttcactcgacgaagacactgacaaaaactaatcttcgacgataaggacaaaggatgagaaaatgcgggcaaggagattttctttccatcacaccttggatgcacactgagatcttatacccatatcagctaaatcatgacgggtattcaagccattctttgtcttgccttgaatgtcaatgagccgcccaatctcactgtaacaaacgttctcctgcgatgcataacatgaatacaatgtctaaagtctagatcacaccactactgaagaccaaagaaagaggacctcttcttcttatgcaactctgactttcacccttcttaagggcattccaaatacaccgatcaggtgaagaacc

SEQ ID NO: 263892 - DNA, 229 bp, Glycine max
cgccttaaaactaagctgcgctatacttgacgactttttttttattcacgcccagataaggggctgagcaagactccgttcctaatgactggagcggttgcgggctaatcctctatggattctggaggttaaccgacctcgacatggaatccattgaattttaaggccgatagacggcgaagacgtttctcacccctctcatatccttttctggaacacgtataggggc

SEQ ID NO: 263893 - DNA, 143 bp, Glycine max
cctaaaaagcttttcacgagcctcctactctcacatacatcatgtgtacacttgttgtgtctttatgaatgataccttattaacacacttcaagaccccttctttcctctttaactcactaattcaggcaccccccttaactc

SEQ ID NO: 263894 - DNA, 368 bp, Glycine max
gagaaccagaggaaccttcactctacgaagacactgacaaaaactatatctgtgtcgtctaggacaaaagatggcaaactgcgaggcaaggagattttctttccatcacaccttggatgcaactgtgatcttatacccatatcaactaagatcttgactggtattcaagccatcctttgtcttgcctggaatgtcaaggagcgttccaatcacactgtcacaaacattcctctgcacatgcataacatcaatacaatgtttaacgtccagatcacaccaccactgaaaatcaaagaaaatggacctctttctacttatgcaactctgacttttattcttttttagggtcataccaattacaccgatca

SEQ ID NO: 263895 - DNA, 84 bp, Glycine max
ccctttttacaggaaaggttgaggttggtggatccatacccgaaaccaattatttttgccgggccaatattgctcggaattttg

SEQ ID NO: 263896 - DNA, 414 bp, Glycine max
agcttgccacccacctcgcccaggcgagctatgtttgtttctctacaaacaacagcctcttggaggaatcttctggagggcccaagcgggcctggctgctatctgcaccctcatttataccaaatacaccccctgccttttttggtgaatcttttctcgtaagatacggaaacttactaatttcgaaacaaacttggtttctttccgtaatcttacggaaccttgcggattacgtaatcatccccttttttgacttacggaatgttacggaacctcactaattgtgcaacgatgcttcctttagatttccggcgtgccacggaacctcacggattgtgcatcaatattttcttttgatttccggcacgtcacagaaatcccgcaaatagctaaagatgggtgccaagcacctca

SEQ ID NO: 263897 - DNA, 226 bp, Glycine max
atctataatggagaggtgtaccacaactggaaaaccctaatgcaaatttttatcgtggcaatatatctaaatttttgggtagccctagaaatacggccttatatacccaccacagtaaaaagagtctctatagaaggtatctcatcaagtgaaagcataaccttagaaaaacctacagatacatggtctgaagaagatacataatgagtcaatacaacataaaagc

SEQ ID NO: 263898 - DNA, 424 bp, Glycine max
gcttattaaacatcctatggaatctatgttgtctttgctgatgaaagtgaccaagccatggcaagaactgctccatttgaagtcaaagattcattttatgtgaacaataagtctggtgatgaaaagataaattcttttgttgggatgcaacttgaggtattcttttaatcaacaacgccgtcggaaaaatgaccaacgttaagcagttatgacttcctcaaaagcatatttgagctttatggcttgattatcgacttacatagctgataacaagaaacaagcagatactacaatcatcgaagtccaagaagcagctactactactattgaaatcaacgaaaagatggatattgattccatcacagaaaagaagaaaaagatgggtatcgataccattgaataaaaaaaagaaaatatggatact

SEQ ID NO: 263899 - DNA, 282 bp, Glycine max
catgtaccctctctcacagaggatctccatcacagatccaaacgaaaagattaagggataggtaaaagaaaggatgggacaaaagggtggataaaaaacccgagtctaggttactctattcaacgagctaaaatagtactagacaagtgttggcaacaatacacactgtcaatatatgagagaaacgcatcaataaaacgcggaggattattcccccaaaacaattcgtgatcaaaataagatatacttagactagaaaaacccacgctcaaaatacaaaaa

SEQ ID NO: 263900 - DNA, 430 bp, Glycine max
tgaggcatgcaagcttcaatgttaatgtcacatcagataatgtcttttactgtatcaaattatggagatcgtggtatggtattgtaagtgacatccttggccacagtggatttgattgggatggcactaagtacatgatcacagttgagaatgaaaatgcttggaatgaatattgcactgtaagtattctttaatatgttgctatttggtattcaaagaagattggatttgactttttctttgttttccagttgcataaatcggctaaaccgcttcgattcaaggggcttcaaaattgggatgatatagtgaatttgtgtgctaaagataaaggcaccgaatatggagcttaaactgctatggatgttgatgaaacggtgagtagagaaacaaatgaaatggaattcatggtgttaggtgctaccggcat

SEQ ID NO: 263901 - DNA, 359 bp, Glycine max
acttttgaaaaaatcttcataaacaagtcacttccacaattgcgacttttggaaatttatttttccaagtcaatccctggtaatcgattaccatctatgtggaatcgattacacatcaacagatgcgactcttcattttaaattttgaaaattacaatgtttacaagctctggtaatcgactacaagtattgtgtaatcgattacacaagttttaaatgatttgaaaatgcttaaacacaagttgtaactcttgaaatttgaaatcttaacgtttgaaaacattggtaatcgattactaccttcttggaatcgatcaacagagagtaaaactctttggtaatgattttgtgaaaacttc

SEQ ID NO: 263902 - DNA, 262 bp, Glycine max
atcaactcgctgcaaagacctgatgtgtgggaacgactcatggaatagatcagaactttcttcgagttggaatcggaaagccaccgagtcatgcttacgtggttctcgacacgggaagggacctgagctggatccattgcgcgccgtgctccgaatgctacatacaatcggatccaatctatcgacccgatttcgacgaacacggactcttcgatccgctgcgacgagccgctttgtaagtgcctgtacctctccgagtgcc

SEQ ID NO: 263903 - DNA, 419 bp, Glycine max
agcctttatagtttttggaataattctttattaaatgtgctaattgattattttgaaacacagagagctcctaagtttctgaacacaatctaataaattacaatatgtggtaatcaattattttgagctacagagtctctcttcttttgaagttgacttaagtaatcgattacaaaactttggtaatctattaattcgataaaacttgtcgatattttaagagaagttatgttgtttgttctaacactttgtaattgattacttaaacttggtaatctattacacgatgttgaacttattgcttcttaaaaacttttgagatctatccaaatatcttctcatgtttgataaccactaagcatggataaagagaactaagtctataacactcaacatgcctagtctgaaaacattcaata

SEQ ID NO: 263904 - DNA, 438 bp, Glycine max
  unsure (1)..(438): unsure at all n locations
tcaccccacatattttntggcaagccaaaacttatatgtattgtcttcaccatatcaagcatggtacaattctttctttccgcaataccattagattgaggagcatacgaaggtgtcccttcatgaataatatcatgcattccacaaaaattactcatatctaaagatgtgtattctccacctctataagaacgtagaatatttattcttctttctaattgattttatacttctgttttatatactttgaacttatcaaacaactcacttttgtgattgactaaatacacatatcattatttggagaaatcatcaatgaaattaataaagtatctcttaccaccacgtgttatacatcattctatcacatacaactatgaaccaattcaagcaagttagttctatttaatacatgtataaaaccctttctagttcttg

SEQ ID NO: 263905 - DNA, 152 bp, Glycine max
ctgcagcttcgccctacccgttttttgttgcaacccgaccgcatctaatcaaaattcccctgtgacagtatgctcctcccggccaatgtggcgcttacatatccccgtgatacctatgtctattcggttaataacagagaatgatgtttcac

SEQ ID NO: 263906 - DNA, 124 bp, Glycine max
aagcccatacaccccggctggaacggggagacacaacaaagcggaaaacaccaactgccagaagaactgcaagaagacaagaacacaaaagccaagctcaaaatatcaacctgacatcataaaa

SEQ ID NO: 263907 - DNA, 376 bp, Glycine max
agcttattgaagaagagcctagttatattattgattctaacacaaccctaacctcgtcaagaacaaatacaaggcgctagcatatttaaaaatcatttataaaggaagaacgtttgaaaggatagattaaatgtggaaaaaaatctacataaatacaaaagctagaccaaatattttaaaatggaaaaaagattcgatcccccggtaaaaaaagtatggccatcaaaatgaactctaaggtcaaatataagctattggtctttaattttaaaatgttatatccaccatgctaacatttagaataaaagaacccaaggcggggcattaacaaagaagctgtatatggtgaaaaaagattgtgacagcatttttctta

SEQ ID NO: 263908 - DNA, 387 bp, Glycine max
cttatttctagaagggaattctatcaatagaccttcaatctttaatggagagggttaccactactggaaaacctgaatgcaaatttttattgaggcaatagatctaaatatctgggaagccatagaaatagggccttatatacccaccacagcagaaagagttacaatagatggtagttcatcaagtgaaagcataactatagaaaaacctaaagacagatggtctgaagaggatagaaaacgagtacaatacaacttaaaagccaaaaacataataacatctgctctgggaatggatgaatatttcagggtttcaaattgtaagagtgttaaggaaatgtgggacactcttcgaataacacatgaaggaactacagatgttaaaag

SEQ ID NO: 263909 - DNA, 388 bp, Glycine max
gcattggggctgagaacctatataaaagcatcacggttttatttatagagagctcctctggagagaataatacattataggttctagcaattccaagttttactattcatgtgcactattcacgtaacaataaaattcgttctctgcttctatctgcaatttcgttatctacttcaacctgcaatttctatctctgctgattaatggaaggctaagtctccattgttattttctcttgaggatcacgcacatctctctttgaggttatgttagtactattgaatactgatcacgtttttctcattccacattactctgtatttgttgctattaatccatgcatgcttagggcttgcataattgactctgtccttaatttacgttcatg

SEQ ID NO: 263910 - DNA, 226 bp, Glycine max
tcttcacatcatgttcggaagcttcgatccccaatggtatgagacgatggttaagtttacgtggtactgaaataactgtactgacaagccaccctttgggcaagatgaatgcttgttattcacggggtggtgatctgtattaacacgaaaatactatcattccttggtgtaaaacaatatttcaacaaggtgtgtggacaaactcattcatgaaaaaattagaaaa

SEQ ID NO: 263911 - DNA, 386 bp, Glycine max
  unsure (1)..(386): unsure at all n locations
tgttgtgaagcccgcaagtctctcttttaattccttgtgctcaccatcacaaatcgagacatctaactcaaatgatggatcactcaagatgttcaatgaattgaatcgagatttctatattgatttcctatagacgaagncaatgatgtgattcgaattcaagagtaattggacttgaagcttcgatgtgatgacatgaaatctaatacagtggtgcgaatgtgagaattgagggtgaattcttgctgaaatcatctttaaagggagttggttaatttgtggtgagtgaaagaataaaatccaaatgagttgtaggacatagggccttttataagcctcttgaaccttgccccatgtgtgctggctcacagagagcttttgggcct

SEQ ID NO: 263912 - DNA, 337 bp, Glycine max
  unsure (1)..(337): unsure at all n locations
acccgaagagccgagcggcgagagaaancaagccctagccaccaagaccgaaaaaagcaagatgaactaggggaccccacaagggcaccgccgaaacccaggaacgagaaaccaagaagggtccgcaaggaaacaacaccgagccaagcaacaaggttagaggggccgcgacaggggagcaacagtaagctcaagctccgaagaggggaaaggaaacaccacggggcaaaggcaggatactgaagacgagccaaaggcggaccacaaggcgaaaagaaaaaggcccacacagcaatccaaactgaaaggaacatgggcgccaccaccgacgagggcc

SEQ ID NO: 263913 - DNA, 340 bp, Glycine max
gtgcacgtgagcttaaaattaaaggtggggcattggggatggagcgcttatgcctggctgggggaaatgggataattgatttgcgccatcgtctgatcgccacctagtaccaaatatgacgggtgccccataatccaataagcttgatgtgagaaaacgcggaaaaatcagtccttatatcttttatttgtcgaccacagaacggtacctgaagatatgttgcgggggtcacgaaaccttggggacgttaagtggtgtgctattgcccaaaaccaagcttggcaatcctgacccaactccggcatattctgccagtgagaacctgtgacgtacctaaaca

SEQ ID NO: 263914 - DNA, 412 bp, Glycine max
  unsure (1)..(412): unsure at all n locations
agcttgtaggattatggggtacccttcatatgtggtactaggtggcggncgggcgatggtgcacaacaagtttttccacatccacaatgcgcgcataaacccaccatcccctgtagcccacctccaactgagctcacgtactcccacgtagcccatatcctcgtttctctcaacaccgggtccccatcaatcctcccaagcttccccaacatcaaagtaatacaacattcaaacagcacaaactatcacagccaagagaacaaagcaaaggcagaaaactttgccaaaacaccaaccaaaatcacagcttttctcacttaaagaccccagtaacaattccttcgttccaattcgttaaccgttggatcgacttcaaattttttactggaagtctctagtacataagcctaca

SEQ ID NO: 263915 - DNA, 408 bp, Glycine max
agcttctcccctactttgctactaaatatgttgataagcgaacaacaaacgggttcagccttcttgggacttatctctctctctaaacagctgacgagaattgtttcccggaataatattccaaccgaggcgcttccggtacatttcccgaacgttttcgtgagtaattacgccaatattctcgaccgttcttcaagaatcatcgcattttcttcgttttcttcagtcttccacgggtaagaacctcaaaccgagcattttcactcattctatgtacccgcggaggtccacattttggatcatgcatttctattctcgttctcatttgctctctataccccctttggacgtgctttagccatttatttaactcatttctcccttaaactaaaaataaaataaaatctc

SEQ ID NO: 263916 - DNA, 342 bp, Glycine max
gacttgctatgaagcggcaccctgattagaaccctataactatatggatgcggaagccaaattcaagctgatctcaggagccaatgatgtatgttctttatcacccatcattttgtctcaatgtaatgccgattgggatgtgcataaaagttaacactatcatgcaagctgtcaatgatttggtttgaaattttaataagaaatcttaagcgttgaattattattaattgtgatttgaagaaacggaaatgtggatattacatcaatatttattgcatccaatctcaatgtattgccaattgggatgtgaaaaacaaccgatgggtttataaaagaatccat

SEQ ID NO: 263917 - DNA, 331 bp, Glycine max
ggagaaaaaaaggtgtggagggaatgatagtaataataaggtataaatgttatagaaaggtataagtacaattgagtgtaaggataaaaaggttgaggaaaaaataggagaataaatgatatataatggatatatgtggaaataatgagaattatatagaaatttaggtaaaagagagaatagtatatatataaaaattggtaagaaaatggaaaaagtggaatagtaaaatattttttaagatgaatagaaaatggttaattgttataaaaataataatgtaaatttttgatggagtttttgataagagaatatttgaataaaaataatt

SEQ ID NO: 263918 - DNA, 371 bp, Glycine max
tgctgaaactctgttcctatgtcttaatcatgaaaggcgggcgtatctggttaccctaagggttccaattcattcccacattactagttgaggaccacttaacaccctctagcagtcacatgggtgttgctaaaacggcggcacgcttgactgaaaatatttcctgtctaagtcttcgaaaggacgtggaacatttcgttgctgcgtgtgtggattgccaacacacccaatatgaaacaaagaagggttctggcttgctctgcccattacaggtccttcactgtccatggaaggacctctcgcttgatttcatcactggcttgccaccatttcacgctaacacaaccattcttgtggtcgtggattgcttt

SEQ ID NO: 263919 - DNA, 424 bp, Glycine max
tctatagaaggctcgtacctaattactctacttttgcattaccctctcaagagctggcgaagaagaatgtgacacttacctgcggtcaaaaacaagagaaagcctttgctttgctcaaagaaaagcttactaaggcacatgttactactctttctgacttttctaaaactcttgagctaaaatgtgatgcccctggagtgggagatggagctgttatgttacaaagtgggcaccctattgcttattttattgaaaaacttcatagtgccaccctcaactaccccacctatgataaagaactttatgccttaataagagccctccaaacttgtgaacattaccttgtttcaaggaatttgcattcatagtgatcatcaatacttaatacatttagggcaaagcacgttaacaaagcatgaaaatg

SEQ ID NO: 263920 - DNA, 251 bp, Glycine max
aaatggttacaaccattccaaggatcatcattgtttgcaatattctcttgggtcactgcggacagtgtttgtagaaacaacgaccttgctgcatctggggctgacaatggttctgtccgactatgggaaatttaaaggattccacgacatttcgccctttatagtgggcccttggtaagagaaacgaatagcagctcaaatctagttcacttttcctaaattattttctcttagactttgatatatcttct

SEQ ID NO: 263921 - DNA, 399 bp, Glycine max
  unsure (1)..(399): unsure at all n locations
tggaaggtagncatacctcacaaaatatatatatatangtangtatangtagcangacactatggatatgcatgtttattgaaaaaatacctcacaaaacatatatatgtatgtttaggtagcaagataccttggatatgcatgtatatagcaaaaatacctcacaaaaatatacacatgtttaggtagcaaaatacctcatataaaaaggaaaaacaaaaacaatctagagaaaattaatatccaatgataaaaagagaaaaaaaataataataagttgtctagcctaaaaaccaacatgcttttaaaaagagataacttccagctcttcttagaaaaaattcattgatcataaccacgttttgaaaaaaatgtgtataccctctgaaggtgaatgct

SEQ ID NO: 263922 - DNA, 416 bp, Glycine max
  unsure (1)..(416): unsure at all n locations
catgcagctttattaactaaaacttaattataagtcatagaaattgttagcaagaaaaaggcttcatttatcacgaaaaagttgtatcctggaataacaaataataaaaacctatattggacacagaaaagaatgtaaatctatacgggtaattaaatcatgttttgtgagtagtaatatataggatctctctaaaatctatacatcttctataatttctccttttttatccaactagcctcgtagaaaaggggagaagtttaatcaagacaaggggatgggggtattggaacagtaataaggaagataataaatcctctcaatcctcaccaatcatatgaattaaagagctatatagtatcacgtaaccacaggatcttccctctactttntcagccaaaatttataagatccta

SEQ ID NO: 263923 - DNA, 355 bp, Glycine max
  unsure (1)..(355): unsure at all n locations
aatggagatgcagcggaagacaaaggagaagaggtgagaggaggcgccatccactanggaataagccatggaagaaggagcttcaccaccaagatgagccttggataagaagcttggaatgatgcttcaatggaggaaaagaaagagggagagaaagagagaggggggagcacgaaattgaaggaagaaaaagggagagaagtttgaactttgagttgtgtctcacaagactctcattcatcaaagttaccacaagtgttacacatgcttctatttatagactacgtagcttccttgagaagttttcttgagaaaacttccttgagaagcttctttgagaaaacttccttgagaa

SEQ ID NO: 263924 - DNA, 447 bp, Glycine max
  unsure (1)..(447): unsure at all n locations
gcacgtatcggtcaagtgtatggaccacgtcgagcttttgtgctcaatgataatggntccagctaaaacgtgatgcccaagagcactttggagaaattaccattcaatgtttcccacctaaagccaagttccatggtggttcgtgccttcgacggcacccgtcgagagatcgacctccctgtacagataggccctcacacctgtcaagttacacttcaaataatggatattaacccccccttacagctgtctgttggggcgcccgtggatccactcggtgggagttgttccctctacactccaccaaaagatgaaattcttagtggaaggacatttggtcattctatcatgcgacgaagaccatttggtaagctgcccatcctctatgccttatgtggaggccgcataggagttgttataaaccgctctccagtctttctaggtggt

SEQ ID NO: 263925 - DNA, 331 bp, Glycine max
aagataactttttctgtcagtcagacccacccgaggtttggcttctcttccataaagaagtagccattaatggccctttatactttaaattcctgaatgggacctgtttgcataatacctcccataagtgttttgggacataaaaaccctgcatacatatgatttatttagataaccgatcaatgtatattgatgctctcattcgggtgatacaccaacactctacatacaaacatgatgatgctaataaaattcttaacattatttggaaattaaatatgcaccaattagtagtacctaacttctttgggtatataaataaaactaatga

SEQ ID NO: 263926 - DNA, 460 bp, Glycine max
  unsure (1)..(460): unsure at all n locations
ggcgccttattatgtgctacttttacattccctagaccatctttattctacccatcccccaaattaggggtttattatgactaaaacctttatgctctcttagaaccctaaaataaggttagagatatcacaattaggcttaggggttgtatttagaaaaataattactaatttttgctcaagaagggtgcaagggataaatttcattacangttggctttttggctaagtggctaaaataaaaaagaaacatggtcttgatcatatccaccttatgtaaataatctaacagtctaagaatgatgcaaaattaggaatttaaaaatagacattctctcataattaagttcacacagttcaccgggacaagataaagttattggcttaccggaccatgatataatttcatcaagctaaacctttctctctttgtgattcatgtntcactgtttgactgact

SEQ ID NO: 263927 - DNA, 404 bp, Glycine max
agctatgcattggaaatgcgaaagcccctctccatcattatgattagtacctgacatctcaaacaaacaaatcaaacgtaacaagacaattatagttgttgtttgaatacctcacccactcaagtgtatcacacaattatggcttttctctaatgaaacactcttgccttttaccactctaattccccttgagttcttaggcaattcaagagattatggccacaacaaaaaacaattcaccaatatgtgtcaggtaaggctagagagacaaggaaaaggttaaccaagaaaaaggctaacaatgtattgaataatatttggatgatgtccattaagaaatgtctgctggaaaatattttcaacccaacttgagcaattttattacaaacgcctgccataatatt

SEQ ID NO: 263928 - DNA, 462 bp, Glycine max
  unsure (1)..(462): unsure at all n locations
actaactttgtttcatattgacatctcgattattacgggacttaatcagacattctaagtaaaaggtattattgtcagaatttgcaccgagcttttgttaacaatttctggcgtcctgatatattactggactcaatcggacatccaagatacaagatattgtcgcttgaatatgcttagagcttttgttctcaatctcgagtgtcttgataaattctgggactcaattatacattcnacttaatagtatttcggttacatttgcaacgagcatccattattaattacgagcgactcgattattacgggactcaatcttacatctcatgtaacataaattatcgcgttaatcggctcaaagcttttgttttaattatgagcatcttcatatataacgggactcaataagacatacgaggaaaacttatggtctttgaatttgaacgagctgttgtttaaata

SEQ ID NO: 263929 - DNA, 347 bp, Glycine max
  unsure (1)..(347): unsure at all n locations
taggtttaaatcaccattccaaacctccaagtatcttctgaatggtatccttatgagaacacaacacagccctattctgagacttgtccctataaataccattcctaaaattttcttcacagtccgatcttcagattttgtatatcacaacatgcctttatgctgcaataagcacgccatctacatagagtacaagaaaatcattgaaccatcctccaccttggtgtgataaacacaacagtcatagagacttcctttgaatccttggctaatgaaanagctgtcaaacctcatgcacctttgcctcggaaaatgttgcaaaccaacaaagacctctgaatagacaa

SEQ ID NO: 263930 - DNA, 412 bp, Glycine max
  unsure (1)..(412): unsure at all n locations
atattatatgtctaccaagccgctgttgactctaaacatatcaacaggcatctgttngatgattgcacactaacaaaactttatgaacggctcactaatggatatatcacttaccacatttagtcttctctctcaaggtatacaatcgtgttttgagagctctgtatctatactagaatttatagaaaactttgcaagaaaggagaaaagtatgactcttgtatgtaataggtgactcgtttattcacgcttattttatacacagatttcattctgaagaatctgatgtctcacaatcgttggattcttcactctgatattccgctaaagtcataagactgttatataaagcaaacattatatgatcatcatttattcatgccacaatcatggtgagaggaattctcagact

SEQ ID NO: 263931 - DNA, 75 bp, Glycine max
cgagagcagttgagaagaggacccacaaacggtaagaaaggccggagacaaaaagaaaacaccgaaaaggaggaa

SEQ ID NO: 263932 - DNA, 363 bp, Glycine max
  unsure (1)..(363): unsure at all n locations
tgcctcaaagaggtccaggaaggacaaggcagccgaatgaactanttccgctccggagtatgatagtcaccgctttatgagtgctgtacaccagcagcgcttctaggccatcaagggatggtcgtttctccgggagcgacgcgtccagctcagggacgacgagtatactgatttccacgaggaaatagggcgccggcggtgggcatcactggttactcccatggccaagtttgatccagaaatagtccttgagttttatgccaatgcttggccaacagaggagggcgtgcgtgacatgagatcctgtgttaggggtcagtggatcccgtttgatgccgacgctatcggccaactcctaagata

SEQ ID NO: 263933 - DNA, 371 bp, Glycine max
gaaggaggaaaaaaagagaagttttagaaaaaaaaaaaaaaaggggagaaagaaacagtattgaggagcgggtggcgaaagaagaaaggaaaaaaaagagggaaagggaacagaagggaagagaaaagagaggggaaaaagaagaaagggctaaaaaaaaaaagaagaaaaaacctggaaaaacaaaaaaagaagggaaagaatgaaaaaaggggaacaggtggaaacacagagaaaaagggagaaaagggaaaaaaaagaagcgagggggcaggtttaaaaggaaaggaaaaaagaaagaacggggagggagaaaaggggaggtaaacgagagaaaaaaagaaatgaaagagggagcaaaaagagatagg

SEQ ID NO: 263934 - DNA, 335 bp, Glycine max
caaactcttaacctccctaagtaccctaccacgagcagcagaaaggaataccggttcgaacaaaggaggacaatcaaaaccaagtgacgccccatgcatcccatggggcaaaaaaaacccaagataggcaaattgctccacaaaccaccacttataattttacaccgagacaagtattacatggacaatctaacgaaatctaagcgggaacgcctcttaagaaggctccaacactatactcgctacattccactgtgggtgtcacaccacagactatgagaaggcactaggaccaactcttggtgaccccataaccaaaaattaacattctataa

SEQ ID NO: 263935 - DNA, 449 bp, Glycine max
tgtcttttatgatctgcaggagacttgcgtcccttatatatttatgacttacggactatatctattttaacaaactgcaatagatgtactatgcgaatatatgcttctcaccgaaccctctctggaatttgagactactctctctgtagtctctaagctcatagcccttttgcctcttcaattttagtaataccctttttagctgctgtctgatgcattattctgtactgattattagatttgactgcttgtggacaataatttctagtacatattctttataaaaactgagaatgactctgatatgcttaagcttataaaacaaacctttggccggaccaaatactggtactttatatactcataactcaattgcatgtatagattggcatattcataaactattgccatatttggacccgtaatctgaacaattccaatattatgat

SEQ ID NO: 263936 - DNA, 416 bp, Glycine max
cgaccgcagcatgcaaccgcccccactcgccatttatatgttgctcctgaaggcccaagtgggcctggatgctattcgcaccaccatctatactaaatacacccttgccttttattggtgatacttttccataacattaaggaaacatacgaaattcctcaccaaacttgttttctttcctcaatggtaccgaacctcgccgattacataaacatcccttttttgacttacggaatgctaccgaacctcactaattgggcaacaatgcctccttctgattcccgttgtgtacggaaccttacggattgtgcatcaatatactcatttgatatccggcacgtcaccgaaatccacaaatcgcctaataacgggcgccatgcacctcacaatgaccaaacacatagttgcatgccacc

SEQ ID NO: 263937 - DNA, 372 bp, Glycine max
  unsure (1)..(372): unsure at all n locations
ngaaggtgcataccncaccatttctccatagataaacaccggtaatgtgactattattaatgtgtcatctctttctccgccaatggaggtgccacttgagctgctacgactctccacctttacgcgcattctttgaatgattcatgcccctttttgcacaagttctgtagttgcatcctatccagagccatatcaaaattctactgatactgcctaacgaaggcaccattatgtctttccaagagtggactctataacgttccaacttagtgtaccaagtaacaactactccaccaatactttcttggaagaaaatgatcatcatgaactttatctttcgcgtatgcccccatcttacgacaaatcatcttt

SEQ ID NO: 263938 - DNA, 466 bp, Glycine max
agcttcattaagaggcattcctccacaagcttttcttgcggctacatttgagacgcacttctcaacttctatggagaagcgtagacctcttatactattccacaaccccttcttttaactcaaaagtaacaccccttcaaaaataatcagcgggatggaaaataaccgccaacacaatatatcgcaaccatcaaagcataagttacctaataatattatccggtagtataatcaacaaaagtgcaaattaaatgcatagtgagaattacacaaactaatccctagtacacaaaaactagtctaaagtgacactaaaaatacaacgggctaacaaaattctacattactaagggtaccctaaactttgtgggataaccctccctacactatggagccctaaatacaaggcccacaaaataatgaaaccctaatttaatatggtaaaagaaagggggttcatacttag

SEQ ID NO: 263939 - DNA, 291 bp, Glycine max
ttgtgaagagttgttcttcaccttctcgctaagtcaatttactggctaagcgacctgccgctaagtgcataactcctgggctatacgcgaggaagactcatgaagaagatgagttgtaccggtttggtaagcgcacacgcttttctcactaagcgcaactcttcatatattcgctctgtggagaaagcgtgctaagccaaaaatcgcttacgcgcgcttagcggtctatttatgcactatgcgcacgagcacgaacaatgccacctatttagcttgtaatcagattctata

SEQ ID NO: 263940 - DNA, 399 bp, Glycine max
  unsure (1)..(399): unsure at all n locations
ccggatccttgagtcacctgcggcatgcaagctttctcttttgtgcaactatctcattctctttntcaggtgtagaatgaagcttgacaggttcaggtgcaagtgctgctactggtggaggcactcgaatttggtttccagacctcaaggtgatggcactcacattattcggattatgcacagtttgtgaaggcaacttgtcaaaattttgggactgagcttgattcatctgagtagccatctgccccatctgatttgtcaaactctgaatggaggcttttgtctcttgctgaaattgcatattctggatggtcatttgcctcactaactcttctaaagaaggttgaagaggagcctcagctgttggttgtctttgttgtgactggtgctgctgttgct

SEQ ID NO: 263941 - DNA, 440 bp, Glycine max
  unsure (1)..(440): unsure at all n locations
tatctgccacctatttctgataggccacagaacaagagactgtcttgaaaggattggacgaccaagatagagtcgcattcaagccaaaccttttctccaagcagtttcaatagaaaaaatggcaccccataattccacaactaaagatgaggaagagcctatattgaaagcaaagcttcccaaacctctccatgcgtgatcccagaataagccccctcacgctgtcgggccaggatgaccacgcaccgcgccatcagaattggctatgacctaaccacggaggggcgggtaccaagtaatctcacaaataacaggagctctaggagcatgatacaaaatggcaaaattctttataaccacaaactcctgaatggaggactgcatagtgcttttagtgtanttgcctgtgaatgttatgcaacatgaggggaaaaaacatg

SEQ ID NO: 263942 - DNA, 418 bp, Glycine max
  unsure (1)..(418): unsure at all n locations
agcttataacaagaatgaaactatctntatcctgtcaaacttttttgtaattcgtaagacaaacaaggtcaaagatgcttcgtctctcacatattatgtgttacatgacactttgatgctttaactactaggaagtaattcgatttttaatttcaaatctctaaaatattattttaaaaaatatatttatctttagagattactaattttttgttaattgattacattgttgtatccaaaaagagagcaagttcatactcattaaacaagatataaataaaatatacttaatgatttaaaaaagtaaatgaataattttatggttgaaacgaaagaaaattcaaataaattctaaatcatttttaggatttcatttaagtcttcaaaattgatatttttggtatttttgttcctagtc

SEQ ID NO: 263943 - DNA, 377 bp, Glycine max
tagaaaaataaatcatcattgtttcacaaatttgtcatagttaatatgaacaacgtagttaaatcttacaaaacatgaaattagaggagtatttctcaatgtcaatcataaggtataagattggaaacagcttataaagttgtggtcttgtgaccaaatcaatgatggattatataatttggattggtggtacaattttgaaggaagggcagatttggttaaatttgtgaaggcggtagcagcagcaggtctatatgtgcatctccggattggtccatacgcatgtgctgaatggaactacgggtaaaatttgatcctctttttgtaggcctttaacttttctgaacagtggtttccctctttgggctacatttatt

SEQ ID NO: 263944 - DNA, 414 bp, Glycine max
cccggatctctaagcaccgcagctgcaagcttgtcttgttcttaaaaattggttcagattccaacgaaacaaacttcccttataatcgctcagtgttttgtgatatgatatcagtcgctgaacttgctactatgactaaagagagagtgagtttggggcttatatacaataaaaagggagacttagggggggaaaaatcaaatgctatatcggctggtacacaagcgggtagaaacgcgtggataaaagctctagcttatgattggtaggataaaaaaattttatcagaagaagggatttgaagtgagaaatttactatcagaatctatttgagtcgccccttatattgttcactctcagcaatcctcaccaggtaacggataagcccttagcgggttatatgtgaatgaatgg

SEQ ID NO: 263945 - DNA, 453 bp, Glycine max
  unsure (1)..(453): unsure at all n locations
ccgggacctctaagtcacctgaggcatgcaagcttatgcgcatatntccttacatacgttctcttgcacaagacatttaaccgaaaaagtgcacccatatacaatcaaggcagcttcattacctagattatttacacgtactgccaaggtgtatttgttacttacatcacacgcatctccttggctgaatttgcatacatgcatactcaaagcattttggggtaccaaaaattgcacatgtgcacatcttggtatttctaatacctatatatacacaaacttcatgatgaatcttgactatcttcacaaaaaggtgctacacttcatcccttttttcaagtttttgctacctaaagccgcatgcaaattcaagcatattttcctttgcggactaaaattgtattcaaattaaaaggtatattttttgtaatatgttttcttcatgcaacatat

SEQ ID NO: 263946 - DNA, 397 bp, Glycine max
  unsure (1)..(397): unsure at all n locations
ntgcttggagcttcaatggagaatgaagaagaagagaatggcaacgtgagggagagagagagagctgtctgaaaagtgtggggctgagtgaagagagagagagagttgctttttaattttaaaaaaaagctttttcctcatttcttattattttattataaactatgccacatgtctccatttgagtggagcaaaaagggcccactttccctttttgactgtgacccatactcagccacaaaagtgaggaaaatctgacctttgaaacgctaaaatcttgcctcggtttgcatgccgtttctatggttccagttcctcgcgtttctctgcgtccgtcggggccagttttcgaaagtaaccaatatatatatcaaaacgctcagaataaaaccccgag

SEQ ID NO: 263947 - DNA, 322 bp, Glycine max
  unsure (1)..(322): unsure at all n locations
cttataacaatccaacggtgaatgagtctaagatcgccttttatctgggatagatntggcgcgacgcggcataagagagagtattgggacgaacacaacgaaaaacgaaactgagaggaagaggaggatgagaacctatcgtcagactgaaaattgagctaaaaattcctctatttataggtaggctacccacaacccactatttacgctattcatctaactttggaattttataaaaacaaactctatttcattttccatcaaacgaataaataaaatatcctttttattttcactcaacccatatattaattacaaaacg

SEQ ID NO: 263948 - DNA, 336 bp, Glycine max
gaaaaaggaggaaagagggataggggacaagaagcggagaagaaaggggaggatagtggaagatgtgagagggaagcggaagatggaaaagagataaagggagagaggaaagtagagaatggagatgaaaacaaaggaggacggaaaaaggagagggagagttgggcaaggagagggagaggaaggaggaaagaaacaggaagggagaaggaagagctagagagggaagaaaaaagaggaaggtggagagatatgaaatagggaagggggagaagggaaagagggagaggggggacagggagaggaaaggagcatggaggagaagacgaaggggaa

SEQ ID NO: 263949 - DNA, 369 bp, Glycine max
ttgaacaatatacctggccttcattcaactggttttgggcttggcggccacgctcaacaaatactttcgaacccactgtacgtgattacaccaatgctggtaagggaattgtgccacaaacttttaaaaccctattgagacattctaaaaagatcggtggcatgaggccatatcgacgtccttctctatcataagccatcggccatttttcctttaagatgccatcaatccatgttgctatggctggactcaattcacgaaatttttttaaattttgatcaaaaatgtgcttgcctggaatgtaagcttgcataaaacaactatgaaaaaccaatttagcataaatgcagtaaaaaaacgtgaccataa

SEQ ID NO: 263950 - DNA, 373 bp, Glycine max
aaccagttccgatcccgaatatgacagccatcgttttagggacgacgagtatactgacttccaggaagagatagttcgccggcggagggcatcgctggttacccacatggccaagttcgacccagacatagtcctcgagtcttatgccaaagcttggcctacaaaggagggtgtgtgagatatgcgatcttgggtgaggggtcagtggaacccttctgaagcagatgccctcacccaggagtgcgagtatggccagaggaggaaccaagccgatgggtttgatgaggaggccatcgcccagttactgcgtatatcggcgcaggaatatgcccggactgctgctgggagacaggggccgatcatgcgcaccaac

SEQ ID NO: 263951 - DNA, 385 bp, Glycine max
ttcggaatataaacatgggaccaacttattctatattatatacgaagctcgatccagtcaaggtctgagagaccataccagattcctaacgatttctaattatgtgggccaataagtctatcatatgctgacaatagccgagaagcccatgaatcttctcgggggcggagaaggcgtctgccatagccttggccttggctaacaatcggggaagttcttgacttccgctcaaggtaagagcataccgaaccatccacatggttgcctctctgagtaaagagtctaacaccctatctctaacctctttttacgcgtatacttgggcatactcattcgcgaatctatgctcgctggccgcggcataaccataatattattggtactt

SEQ ID NO: 263952 - DNA, 353 bp, Glycine max
gctgcagcctttaacactaaaacctacattatatctccgaataaatctagcatttcacaatcaccattacataagaaaagaggattagctttccttaccaacaatcaactccaagctatgtttgaaaaaaaaagaagagaagatcttgagctcaataagaagattcccttcaattattagctctaccacactcaaactcatggaaacatcccaaaagccacactccatatgaattataaatcaaaacccgctatgggtcactctcaggaaaggtaaagagaaaagaaatggggcatagagatgaaaggacgaacgaggaaggaggagagcctacccactccatggcaatccaa

SEQ ID NO: 263953 - DNA, 226 bp, Glycine max
ctgagagaccatacacattcctctaacgatctctaattatgtgggccatcaagtctattcatatgctgacaatagccgcaaagcccatgaatctctttcggggcggagtaggagactgccatcgacttgggcttggctaacaatcggtgaagttctagactctcttccaagggtagagcgacacccgatcatccacatggtcgcctcttggtgtaaagagtctaac

SEQ ID NO: 263954 - DNA, 408 bp, Glycine max
  unsure (1)..(408): unsure at all n locations
gcagcaagctcgntcatatacataagatagaattttatattttttgcgtaacatatacatacatatcgcgataatacaaacaaataacaacgagatcaacagccttataggtgtaataaatcgcaagtggagcctctaaaaaactctcggagaggggggaccaacccatgggcattttgaaagaaaatttaaggcgtatacgcagtaaaaaaaaactaagaagtcttatatagaaattaaaaagacctggggggggccctaaatatggtaagtacatttgcaatcaataaaaaagcattgtaactctcgaaaaaacgttactctcaatacaaattaatcggattatcgatctcgagctagcaatctaaattgctaatctggatatcaaattatacccaaaggccatct

SEQ ID NO: 263955 - DNA, 361 bp, Glycine max
tgtgaccgcctaaaaccactttattcccttcaaaactccgccctatttgttttactagatggcaaatcgctatctattaacctattttgatatcattaggtatgtccaaaacacaattgaaagtggctgaagttgaaagtggaaaataaaatgggtagcttattaaataaccaactgtttaatagctgcgaaaaggtgaaaaattaatgacagaaataatagatctgattatttaaaagttaatagatataaataaattttggatatacttaaaagagggctgagagacgcttaaaaatacttcactacattcaagctacaagtacaaaaatattcactaacagcaaagttttagcaataa

SEQ ID NO: 263956 - DNA, 302 bp, Glycine max
  unsure (1)..(302): unsure at all n locations
cgagacctannaaaactcaagcacacgcntcgcaatccaagatacgggagaaccgactattatgtgttttctaacctccagagctctaactcacccgttcgcaccctacataattaaaatgagaaaacctacatagacttaaggaggtacctctacgacaccatacgccaacatagaatgcgccctagagacactaatcattcctttaacagctctcaagtgagaatccttaagagtgctctaagacccggaacacaaacaaacactacgcataatgtccggtcaaagtgctgttaagtaaa

SEQ ID NO: 263957 - DNA, 315 bp, Glycine max
acacgtacgctttttgtctactcgtcagcgcctatttggtttctaaaagcatgagtatcatcctatctgggtgtcaaaggtggtggatgaaaaacgtggtcgtcgaccgaagcatgttgacatcagtgctgctcctatggaaggagttcctcgtcgaacacctcggagccccgaagtcgcgtgaagtgtatgtgtaacctacagacttcactggtgacatcatggactgaggataaacatatgtgaccatttataggttgcggtctataccatgcaacgaataatgtaccgcgggggatatgttatcgtttattt

SEQ ID NO: 263958 - DNA, 395 bp, Glycine max
  unsure (1)..(395): unsure at all n locations
ttncgattcattctatgtacccgtagtggtccacatcgtgttttttgcattgttattctcgtatagttaactttttataccacctctcgacgtgcataagccattttacttaagtcatttctcgcttaacttaaaaataaaataaatttccaccgaacgtttgaattgaattatccattaacttcaaggaaaataaattccgaccgttcggtcgtgccgaaaccacgttggaaatccaaaagaggtgagaaataatatagtaatcaataagacatcttctattataataacgcggaaaatcaatcggacgtttactcattgggatatctcattcttaatcgacatgttgataactaaagtgacactaagggcttaaatcaattcgcctagtcaag

SEQ ID NO: 263959 - DNA, 424 bp, Glycine max
gcatgcaagcacattcttattcggggaagttgattatgtatttcatgcctgaagtgagacgaagaaaaggtgagttttcagcaccagcttctatgagaacttctccaacaaacagtggtcttctatttgcaactactggtcttcctcctgcgaatgacagcaccatggaagagttgcaagcggccattcaagctgcaattgctcactgcaacattctatcgccaaagaaaagaagctcacgtgctgatacaaaccgggtagattttttttttttttgtactagttgcgctaatattggcataagttttggactttatattctaagaaggtgaaatctaatcccccggagatattacactttgttacccatatgttaattattgggatctaacatcggtccactcgaaaattaatttttaaccat

SEQ ID NO: 263960 - DNA, 393 bp, Glycine max
  unsure (1)..(393): unsure at all n locations
ctttattttagacatccttccttcatatctttaaaatttanttcttttatattatcttaatgttaacatgaaatatttactttgattttaatcttgtaaaacttatttatttaaattttttcaattaacattatactattattgtatattaaaaaataaaaaagggactattattttaaaagttaacggctaataaaaaaaattaagagccaagattaaagtaactgaaacttgtaattttaaagactaaaatataaatttaagcctttttatttgaagtttcatgtcggtgggtgtatgtttaggcaactaacattatgtcagatttgaaaaatatattacgtccgtaatattcattaacaattatatgttagttacactacataataaatt

SEQ ID NO: 263961 - DNA, 285 bp, Glycine max
caaactctttgttagctcactatatgaatttgagtcacgaccaaatggcttttcacaataaccctagttcatccatcttttgaagaagctttaagactatcgcattttaccacatccacaaatatgttcggaggtattgacaaataaaacaatctgcttgatagctttccaccctagaaaaggccattgtcaaatatatataagcatagtttcaagagcaattattcctataaatttaattctgggaaatataagatgccttatattatatgattgataatatca

SEQ ID NO: 263962 - DNA, 194 bp, Glycine max
cttctccttccgaaagattcccaagacaaccgcgattcgtttgggctctcttttccttttcaaaagaacgaaggactaaccgctctgaattgttttagaggcccccttctccctttcaaagaagtccaactgaccccctctgagaattctttgattctttcgctttcccataaacctaaagatactcaaaagaa

SEQ ID NO: 263963 - DNA, 389 bp, Glycine max
  unsure (1)..(389): unsure at all n locations
ttattatatggcgaatcgcttatggcatgacgtctactaatgatagactntggtcacagggctgcgttgttgaatccacgtgtgcaatatgtggtaaagcataccaaactgtcgaaaatctttttctgacctgcagtttcgcttctaatttatggcataggttgcagacttttctgccttgcatgctggaaaatacttctagtattgctgtgttgatatccgcgaataggccttgcagctctcaagtgaaggatgttctgatatctatcgatgtgcatgttttttgggctatcaggcggtgcagaacaaccttaagttccgaaatgttcatttactatgaggcaggctccatcttatgtgatctgagttcgcctcctcatatggacaag

SEQ ID NO: 263964 - DNA, 385 bp, Glycine max
ttaatgagtttttttttggaggagtttttgctctttgtttagaggatatctcactcgtaaaataactttcaaaggttgcttcgcggaatggcccgaggatcttgcttcaagaagttcaagaatgactacgctgcctaaggaactaatccactccggagtactacagtcaccgtttttatgagctgctgtacaaccagcacgcttttaaaccatcaagggatgggtgtttctcgtgagcgacccttcacttaagactttaaaaaaccgctctaagagagcaacccaaataccttttaaaatttctgcctgctatttgatcactttttatactaggacgcacctagttgctcatgatccttgtgaatttaaataaaacaagcgccag

SEQ ID NO: 263965 - DNA, 467 bp, Glycine max
tataaaaactcagcttgtttaccccatgttgaatagcttacaatagatctgttcatatcaccactaattgttctccttttgaagttgttcatggttttaacccactaactccttttgatcttttgcctatgcctaatgtttctgtttctaagcataaaaaaagtcaagcataggcggactatgtgaagaagctccatgagagagtcaaagatcaaattgagaggataaataaaatctatgctatacaagccaacaaagggagaaagaatgttgtcttctaacccggagattggtgttgggtgcacatgagaaaagataggtctccgaacaaaggatatcatagcttctacctatgggagatggaccatttatagtgcttgaaagaataatgacaatgcttacaaagtgagctgcccgtgagaataagtaattcacctcaatgctctattaattattttatgcaatga

SEQ ID NO: 263966 - DNA, 391 bp, Glycine max
agcttagaagttctgccacaattttccccctcctaatctgcatataattactctctcagcttttacacttaatcacgtaaggtaagataaatccatgaactaaaattcatatgcatataaatatattctttatacgtgattcataatgcacatgataaatggcattgatcactgcaaattagacagttatgaagtgagggtaagcgagaccttcaacggtgacttgcaatttgaaggcgatgaatccatatgaagaagccacggcccttatgcatttgattttgcaaaccataataagctggtccagttccacacagcaaccaagtagaccaacatggttgccggggttaataaagtggcataatatgaaaagcttcgtgatgacttggtc

SEQ ID NO: 263967 - DNA, 462 bp, Glycine max
tgcatacattccatacagatgacacacacacgccacttgtagtgatttgcttttgtggtcccatgttatttcctttaagagaattattctgatttggaagtagtgtgacacacctagatgaattgtttcaaatgcttaggggtgaattgcttcacatttcagttaaatgtaattcttttttggattagtgattataaagttactactacatatcattctatttatagagaatgacttgttgtcattctctactatatggtaatattcaatggaagaaaaattacataacttagttaggatataaataaatatatatactcttatttaagaataagaagtccgatttataatacaagaaaaaatccacataacttctgtgtatattatttacttatacgaatacgtgactcaaatatcactctaacgagtagtgatgtaaatattaacgactcgttcatttac

SEQ ID NO: 263968 - DNA, 401 bp, Glycine max
agctttcttcgcagatctctcttgtatgactaggcttaacttaaacaacattatcatcatagcatattcagaaaaccaaaaccccacaatccatccctggtaatgtgggtattcagtcctgctgctataagttctaggcacaatacatttcccaatgctaaagtcacctaactgtacacacaaatgggtgatcagaccaagagcatgcagaaattaagcattgaaagaagcattgaacacataaaacacaattaattatatattaaagtaattacatcagctgttccttagaaatccccaacaagggtgtttaaccaaccattatagaaaaacctaacacaaatgagattgagagtacagaataattgttccttacacaaaaagggggatccctcctcttt

SEQ ID NO: 263969 - DNA, 451 bp, Glycine max
tgtgtattaactgctgacagaaactactatatacatatttactatcaaaataacatgagttgccaaagtcaatgaacttcataattgcacaacccatgactctttctgtacattcaaatatcttgattccacaaagaaagattgcaattaaatttttaaaaagggagaatactaactaaccaatggtctacattaaatttcaaacataagtaataatatttttttcagccaattttgctaaccggcaagtttgatttgtgattttaacgggctggcccgcagaacactataatttgaaagaaaaatgggaattgagaattaactaatgaataagcatttaaaatttatacttgaaagttaagacattatataagactttcatatttagtcactgtatttagttgagaatgtttttggacgtactttggtgagactcttaacattaaaatca

SEQ ID NO: 263970 - DNA, 402 bp, Glycine max
agcttttctaggtgggtgggtgcactctttacgtaggatagcatgatcactagtagacatattcttaatcaatttagttgtctctccaagggttttcagctttatcttccctcccgctgaagcatctaacaactacttggattgcagtcttaacccatctataaacatgttcaactgaattggctcagagaacccatgactgggagtcttccataacaaaccacgaaatctttccagtgcttcactcaagaactcatcaaggaactggtggaatgatgaaataacacgcttcctttctgcagtctttgactcggggaagtatttcttcaaaaatttttcaacaacttcctcccacgttttaagactattgcctttgaatgaatggagccacctcttggcttt

SEQ ID NO: 263971 - DNA, 451 bp, Glycine max
taccagtggcagaggcattcttgaattgtcgagtttctgagctacctttcaaattcctagggataccaatcggatctaatccaaggctagtcaggacgtacgaatcagtggtggctcaatcttataagcgacttgcgggatggaaaggcaaaaacctgtcaataggagtgagattggtccttatcaactcagttttaagcagcctccggttgtactacttttccttttataaagcaccaaagaaagttgttacagaattggtgaagatacaacgtcgcttgctttggcaaggctagaccgaggcacagaagatcagttggaccaaaagtcatgggaacatatttgttggattgggggtgaaagatttatcacgttttaacatcagcctgctcgccaaatggagatgggacacgttaattgattcctcagctatttggtataatctgatgga

SEQ ID NO: 263972 - DNA, 304 bp, Glycine max
gatggtgcacaaacagtatttatttaccacatccacaatgcgcgcataaacccaccattccctgtgtgccaactcaaagtgagcacactaactcccacgcagcccatatactcggtattactcaacaccagggtcccaatacaatcctctccaagactgtcaccaacgatccaagcaaatacaacatttcacacatgcacaagctattacaagccaagcaaaacatagtaaaggcagaaaactttgtccaaacaccaaccaaaaatcacagtttttcccacacaaggaacccaaatacaattcc

SEQ ID NO: 263973 - DNA, 371 bp, Glycine max
tttatctagccaagatcatacaaacgtgttacaacagatcctaatgtgttctaattatatgggccattaaatctatcgtgagttgacagtaattgattagcccgtgaatattctctggggctgaacacacttcagcgatggccttcgctttggctaataatcgcaggaggtcttgactttcatttaaggtcaaggcgaacctatccatccacatggtcgcttcttgatgcaatgcatcaatcaccctccttcttgctttcttcttggcgtacgcttgtgcgaagtccactactaacttttgttcatgggtcaaagactggattaactattcttttgactcgcctattatggctagcatgcctttgctccgt

SEQ ID NO: 263974 - DNA, 406 bp, Glycine max
acacataaatactcaagcttcttattcaaggctcatcttggtggtgacgctctatctttcatggcttattccctaatggatggcgcctcctctcacctcttctcctttgtcttacgctgcaactccatggtggaaaatcaccattaaaggacctcattgaagctcagagatctagcctccatagaagctctacaagcaagcttccatcactcgtaacattgataatctacatgaggtacggcagaaggaacaattgctatacatgctgcacgacgagctgctgatgtataaactggatgatgagctgttgatgtaacaagaacctaagctggccttgcccttagtcttctggccaccctaataataactgttggatcatccgaagttcaacagcattttcttatgt

SEQ ID NO: 263975 - DNA, 351 bp, Glycine max
taaaggggagagagaatgaatttggttcacccctacgcacttctcatctttcgaaatgcttagaaaatcgttccgtgagaaatacaaccgggcacttccgaacgtctcgagatgattctcaaagtttcaactgtcttcattgtactcatcgacttcggcctcaacggaaagtacccgaaccaaactttcaatcatttatgtccctacgggccacatgagttcctgatcaccctctgaatcataacacacgacacctttacggcctaaccatctataaagtattcccctaacctaacaaaaatatccccccatgttgaatgttatcccctacccgcaaaatgaaccatcgtc

SEQ ID NO: 263976 - DNA, 315 bp, Glycine max
tattttccctttcagatttggtgccccatcttcacatcaattaatctaatcatggcatgaaaagagcgatcatcacttaacctgaaatttagcataagaatctaaaacctaacctaacaatctagcatagatgcttggcatgaattactaatgaacaaatttctactccgtatgcacccacaattgacctagagagttcaacaagcggtaataattttctaaactggattaataaatacgaccctaatggcgaataaacatctaaaacgccaccccagggcttgtacttgatctggagctaacgtagatctgatt

SEQ ID NO: 263977 - DNA, 398 bp, Glycine max
  unsure (1)..(398): unsure at all n locations
tgatgatatgtntgataatgataaaatgatacacacctttataaaggaatataaggttcaagtgcactttcactcccaagaacaacataagtttatgttgatattgttataacaataagaaagtcaaagcacaaatcaaataacttttatgacatcttaatcaaattctcacaaatcttcaggttatgttagaaatttgaccatttaccaaaaaaccaaaaaactagatccttgatacattaacaaccaaacatgttggcttgtttgttactccatattatagcttcaaaataaaaactcattttcgtcatgttaatagatggtttccaagcaattgctaatatctctagaactacaaaattctttgagaaactctcacactgatgttctttacatac

SEQ ID NO: 263978 - DNA, 240 bp, Glycine max
ggaccataaaactagcttcagagccttaatggggggcgagggggattttttgatccacacagaggggcgcagtagatcacaccgggggcacctccattataatcgtctagaagtgctcacgccattgatgtacatatttctccaagggggatggtctgcgtgaccacatagcagcccctttgatttgatcagaggcattagtatgccaaaaattgatggtggaaactcgtgtcgatgctc

SEQ ID NO: 263979 - DNA, 422 bp, Glycine max
  unsure (1)..(422): unsure at all n locations
ggctgcagcttaacttacaatgagtgattcatgcttatcgccactacatgcgctaagcgcacttncaatgatttcaaaacagaacaatgttggcgcttagcgcattctttcccgctaagcccagcttgaaagctcaacttacagaatgaatctatggcttagcgcagctataataaatttccacagagaggaagcggcgcttagcgcatcatccacgctaagcccactccttaaggtgcaacttactgtgaagatgttgggcttagcgtagcgatgtgtgcttagctgaaccattcagccaatcaatcaggggtctttgcgcttatcgcgagtaagcttggcttagtgcatgaagagatggcacttatcacaagggtagtgcttaacggataagcaatctgaaaaattgtctaagtcatttt

SEQ ID NO: 263980 - DNA, 233 bp, Glycine max
aatacatgacattggctatcataaaactaacacgggcatatttaagaacatttctgatgataattctaaagaaacattagaattgaaaatctaatgttacctaaaaaaagatccatacttgaagtacatccttttgatgacatcacctatttgtcatctaaagtagcatagacttcattatcgtacacatcttccaacacaaatcattttgaagatattgcttcataaaaaaa

SEQ ID NO: 263981 - DNA, 354 bp, Glycine max
tcaagaaaaagatggcctcagcaaattccttattttcttataggaattctatcaatagacctccaatctttaatggagagggttaccactactggaaaacccgaatgcaaatttttattgaggcaatagatctaaatatctgggaagccatagaaatagggccttatatacccaccacagtagaaagaattacaattgatggtagttcatcaagtgaaagcataactatagaaaaaccttgagacagatggtctgaagaggatagaaaacgagtacaatacaacttataagccaaaaacataataacatctgccctgcgaatggatgaatattttagggtctcaaaattgtaag

SEQ ID NO: 263982 - DNA, 421 bp, Glycine max
agcttcacacagtatatttttcttaaactttgatttttgaagaccaattactaaagatttcctaattaaatgatttagatgatgcatgctaatggggggagtcctatgatgtcacaacctaaaatcatctattttacttaccaagcaacttaactcatgaaatgatgcatgttcaacatttagcatatagatattacctattctctttccaatgaggacacctttaccggatatgacttcacttatatggcaataatttctgttgaattcaactttcaagtatttatcacaatgctgactaatgctttagtccatccacatataacacattctttatctaatttttccctatattcgtttctcccactattttttctttgctattgtctccaaacatgacatattcttcaccttttgacac

SEQ ID NO: 263983 - DNA, 368 bp, Glycine max
tgtatagttccccaatttatggtcattttcgagtaaattttgtatataaatcttgctatatggataaccctgtctctagaacatttccattggatataatgatgaaatttgtgcattttcaggtgaaaaagaggacaagttttgaattgcaaatattatcagtggagctaagctcatcaattatgctaagcgcatatccaccgctaagcgcagtttcagcgcgcttagcgcacatgagaatctgttagaccatcagcatcatagtcgcacgctaagcatgagatcagtgtgctaagcgcagtatgtgccattagccaggctaagcgcgagactggcactaagcccaatttcacttactcgcactaagc

SEQ ID NO: 263984 - DNA, 396 bp, Glycine max
cagcttaacctttatatataatacataaatttattgtcaatctctattgcaccaagaactaaaaaaacatttcgaaagaagaattccaatttcagaaactaaaaattaaagtgatctaactttatggacacttttaacgtcatggatgtcgagtcataagaccacattaaaaccttagaaaattttcttaaaagcaaataaacactaagattaaaggtgcgtttatatgccaatagaccaaagcattggatgtcgtgtgatggaataacataatagcaaacaaaatgctaagttcctagaaagcatttaagactgaattaattctttgtgttcgagattttgtctgcaaatatttgtcaaacatattttctaagatatgtcgcagagcagaaaagt

SEQ ID NO: 263985 - DNA, 383 bp, Glycine max
actggatgcattggttaacttggtaacccatctggttttgaatcatacatatgtacctgttgcaagggtatgtggattgtgctcctctgctgaccaccatacaaacctttgtccttccatgcagcaacctggagcaatcgagcagcctgaagcttatgatgcaaatatttacaatagaccttctcaacctcagcagcaaaatcaaccacagcaaaacaattatgacctctccagcaacagatacaaccctggatggaggaatcaccctatcctcaaatggtccagccctcagcaacaacaacagcagcctgctccttctaccaaaatgctgctggcccaagcagaccatacattcctccaccaattcaacgacagctacaacc

SEQ ID NO: 263986 - DNA, 395 bp, Glycine max
gtaaaagattactataacaacaattattcttatataacgactaacaaactcccccaaatttacaagtttgctttgcctcaacaaacaaagaacagttcatttgtcctctagagacaaagacagtgggcaatcacaagaaaatggtgttcgattcatcaacgaccaccaccatatgaactgaatatcatggaatgttcaaataaacactctctcacaaacatgcatatttttaagaaaatagcacaagtatttgagtcacagctgaaataatctacttagcatgacagaaatcatgaaggaacatcgaccaaaacctctcaggcactatttcactcaaactcaagcggtaacgcttattccatcatagacgaccaacacaaggtctcacccttgca

SEQ ID NO: 263987 - DNA, 410 bp, Glycine max
actaagctgcatgaatacattctctcgctttatcaagcaaattctttttgacattatcgaaacctgcatgatttatattctccccctttttgatgatgacaaccacctataggttaggagcaacaacaaagaaaaaatatctatttacatatagtttactcccccttggttttgcaatgattgcttatatgagacaattgaagatttcatatttttttcatatataaaaagttgtctcataaagaatagataatttttccttactattttatctattatctttctctccccctctgtcaacatcataaacaaatcatgaatagagaggagaaaaatgttgccacttgttgcaatgtctaagagtcaagtggtaccacaaggcattaaaacaatcattctatattaatcaa

SEQ ID NO: 263988 - DNA, 285 bp, Glycine max
acttattcaaagaaaatctttcccaggcccctagacaaaacattttgcctgatggggatggaccacttcatcaaatcaccttacagatatatacaaggctcctctgcgataacaactctgccatggctaaccccaaaaaattgaaagagtctaaaattgggggagacagctgacaaaatttgaatctccagtcttataaagctcttcctaaatgctgagctaaagttttttgaggagtggtctaagctggaagaatccccaaacccccttaggcacccacgaaag

SEQ ID NO: 263989 - DNA, 410 bp, Glycine max
  unsure (1)..(410): unsure at all n locations
ntctaaagntntctagtattccaaaccttgaagagagatttgtgttatatcttatattctcctctccctttgccgaaaagaattctccaaggactacccgtctgaattctttttgtggttctcttctcccttgtccaaaagaacgaaggactaaccgcctgaattctttagtgtctcccttctcccttgtcaaagaattcaaaatgacacagtctgagaatacttttgattcttccctttcccttaaacaaaagaattcataggactaaccgcttgagatatctcttgtttccctctcacaaagtttcaaaggactaaccgtctgagaactttgtcttaacacattggagggtacatactttgtggtacaagtagagggtacttctacttgggttgttgtgactgaaaac

SEQ ID NO: 263990 - DNA, 353 bp, Glycine max
  unsure (1)..(353): unsure at all n locations
taacacttggaacccagactaaccatcgactattctatctatgctgggcagacaatatgcatctatggggcatgcctcgtttagaacggngtatacattaaacatatcccatttgccattggggagcctgttgacttcttctttgacaaccttacgatgtactcacccatctttcttttcttaatgaaatctggatggcctatgggcggatagcaagattgaggcagaatatgctggggcggatatctcccatatcagatgggggtcacgacaataaaaacatgttaatgtgtatcacgttgttgatgcaccagcgctctgaattgatgagatcctactgattctcgcgcact

SEQ ID NO: 263991 - DNA, 306 bp, Glycine max
cgagcatgcaactgctaagacaagcctatattttacctacggataaaccgtatctgacaaaaaatcgcaattgaacttcaacattgaccacttcaccttttaacctcatttgaagataatcacgattcaagatccacgacttggctgaaggagatttgcgagaaaaccttggtgaatttgaccaatataaagccatcgagcacttgtcacttcatagccagaacttggtgtgtacccttgattcaatcggcatcttatattagggattcggatcctcttaaagcgccctgaaatttattgattaaa

SEQ ID NO: 263992 - DNA, 433 bp, Glycine max
  unsure (1)..(433): unsure at all n locations
tgcagtccagcaaggcagcaaccgaaattaaatcttatttcatgaagaattataaaactgtaatttcttcttcaggatattccattcattccaatagaaaattctgtaagtaaaattgcattttctacgttattgatgcgttaaccttcaactgtaggatgatttgatattggcaaaatctcccctttcttttgttctatatgtattaatctaacaagattttatcagtactataagactttcacatggaattttaaaagtatatatgtgaaatgtttcaaactaaaagtaaaagttgaaactcatgtgctacatttgtattgtaattaacttctattcttatcctattgaatctctttaatattgagttatttcttcgttactgaaaanggtgacagtcttgatctttgaaacatatgagtacaatgcttgc

SEQ ID NO: 263993 - DNA, 328 bp, Glycine max
tattgatctatcttcttgggagagaaatacctccttaagaagacacttgtgcactcggttccatgtagtgatactattcttcaagattgatcacaacaagtgtcatgccttcccattaacagagaaagggaaggcatcaagtatgatatactttgctagtacacagtcctatctcaccgtgttggtcaatgaacttccttaggcgctgcatatgattttcatgcccagcaccattgaataggttgttctccaacatttgtaagaacccatgcttgaagtcaaaagtgagtccttcagtagctcagataataatataagattggcgtcc

SEQ ID NO: 263994 - DNA, 431 bp, Glycine max
  unsure (1)..(431): unsure at all n locations
taacatgccggaaatgacggattggcgaccgatagtattctctaaagccatatggtggataccaggaacgcgttatcaaaagggacgaccatgaatattgagcaagtcaagctaattaaaataatgcttttgagattcctagtatttttcttatacttagtagcttggagcggtaagaagcctanctgttctcatttgcgaaactttggtcatacatatgctcatgttcccaacaagaccgaagttagatgacaagtgaaaattatgattcattagttataactcatattctaagaattacgctactgctctcccaatcgatcactaatcttcttttcacacgcttctgaagactatttcgctaacctttcttcattatatttctctcaatcgagactatcacattcgagtatattatgtcattatataac

SEQ ID NO: 263995 - DNA, 377 bp, Glycine max
atctgatttcaagcttaaataagtggctttggtcctgctcgtgcgcttaacgcaattccgaaccgcttatcgcacattattgaaatttggcttagcgcgggtttatctcctcaaaggatggactgaccggtgcgcttaccgggaaggttcttggctcaacgaacaaacacaactcaatctttttccagattcttcctcgcgccttatcaaagaatgttgcactcaacggatgggtcgcttagccagtagattggcttaacgagagggtgaaaaataaccccttcaaaacttgcctaattaaccctgaaattgacagaacatgatcattaaacccacaaaatggaagtctaatatctattacctctcttacaaaaagt

SEQ ID NO: 263996 - DNA, 303 bp, Glycine max
ttcaaaaactgagtaacacatggatttttctcacaacatgtttaccaaagagttattactctctggtaatacgattaccagattgttgtaatcgattaccagtaagcaaaatggttttcataaagtttttaactgaatttacgacgttccaattgatttcaaaaagctgtaatcgattacaatgttttggtcatccattaccagtgtgcttgaacgttgaaattcacattcataagtgaagagtctcattcttttcacaaacaagctctgtgttatccagtacacttgtttggtaatcgacta

SEQ ID NO: 263997 - DNA, 300 bp, Glycine max
cacttggtgataagcaggtgaattgattgtggttcatggctttattactattcttcatgataccttcattcgagtatttgtactaatccgccaacaatggcttgtctcatggcattacagtgaaagccaatgtgctcttgtgtatgggcaaaatgaatgagcccccctgtgctcccgcccgcgttggtcttactgggcttactgtggctgaacactttccctgatgctgaaaggcaacaatgtgcttttttagtagaacacaattttccgctttacccaagtaagtcctttggtcaactt

SEQ ID NO: 263998 - DNA, 360 bp, Glycine max
ttatcaaaccttttgtggcattgattataaaaatactaatagttgagccatacacatgtgtcgaagtttgttgtcaccaccaccaagctcaagcgggacgatgtcgttatggccaaggtcgacaccaccgtcaaaaatgatttggcaaacaagtacgccgttttgaatattcaaacatgtatcactccctatggtggggttaatgatttgacaaacaagtacgccgttttgaatattcaaacatgtatcactccctatggtggggttgcgtgcgacaagatggtattagatcttgaaagggtgggttgtgtgaatattgactacggaaggtgtggtgcagcatgatttggtcgtatattc

SEQ ID NO: 263999 - DNA, 415 bp, Glycine max
atcttaagcacctgcagctgcaactttataacaaacgggtccatatcttttcatcattcacgattgatgagggaggttgattatttgacaactgattttatatatatacatgctgcggaagtgaagaaaaatattttggttttagctttagcaaatcaagatgatttgttgcattgggtttgaaatttcgggaagagccttatatttgttgcagtgggttccagttgttttagttaactcctcctttattaagtattgctatgtgtatccattcgacacttggtaaaactctagttaatgttattattcatttaatgtgaactataaagcttgataatgttgtaagacatgcatattgtgttgtaagttatgttaacagaaacatgctttcttttttttattttgcattttttac

SEQ ID NO: 264000 - DNA, 409 bp, Glycine max
cgtaactgtcggtattacgatcattatgccgttctagttctaacctgagccgagggacggatggcaggggctcgccagcataatgaagctttcaaattgcaagggtgagcacacaaatgagtcctttacagcctgcagcaatgctatggagtttgtcacatcatcatcgtctatgaattcaattcaacaattgatcaaaagaggattcaaaaaataacattcagatcacttaaatttcaataattttcattccttcatcccaattatgttcttcactcagcatttagactgaataattttatgaaattacttcgttacatcacaattatgttcttcacttaacatttaaactgactaagttatgaattacttcgtacatccactaatacgggaatgtaggaaatggaac

SEQ ID NO: 264001 - DNA, 363 bp, Glycine max
agcatgcaagcttcttattatcagatgatgcatatgggtcttgtactacctcatgcacttctctaatgactatggcatcatttctggcgctaaattgttgggagttggaagccatcttctcaattaaatttctagcttcactaggagtcatgtctccaagggctccaccactggcagcatctatcatacttctctccatattgctgagtccttcataaaaatattggagaagaagttgctccgaaatctgatggtgagggcaactgacacataaattcttaaatcgctcccagtactcatacaggctttctccactgaggtgtctaatacctgagataatttttctgatggctgtggtcctgg

SEQ ID NO: 264002 - DNA, 374 bp, Glycine max
tgagaaaacctttcaggatcaagtagatggttcactatattagtccgctcaagcagtataacttgtgaaactcttaaagaaaaagagtccaagttatgcattgagatagagacaaatgctagaaaaaggctactcttcttaagaacttttagcagttgaagaaaaaaactaaaagatctttaaaggatctgaaggaactcaataaactacatattcatcaaaaaagaagaaaggtatgatctttggagagagagcgcacaagcacacaaagaatatgatgaactcacagtagttaacacatttttgggtgaatgagaagacataagaaatctgcagctttctaaaaaatgagctttaaagaatcagaactaaag

SEQ ID NO: 264003 - DNA, 450 bp, Glycine max
  unsure (1)..(450): unsure at all n locations
tactttcgagcgtctcgatatattacgggactcaatcggacatccgagtaaaaactaattgtcatttgaatttgcacaaagcttctgttntcaatttcgagcatttcgatgtattacgtgactcaatagaacatccgagtaaaatgttattgccatttgcatttgctacaagcttctgatttcaatttcgatcgtctcgatctatgacgagactcaatcggacatccgagttatacgtattgccgcttacatttgctacgagcttccgctttcaactatgatcgtctcgatatattactggactcaatcgaacatcggagtaaaaaagtattgtnncgtagaattgttcagtgcttcacgttttcaattagagcgtctcgatatattacgggactcaatcgaacattccgagtaaaaagtattggtcgtagatnttgctcatagcttctg

SEQ ID NO: 264004 - DNA, 480 bp, Glycine max
tcgctaacccatggaagctccatatatctgccacactcgttgttgtgtggccatcttggatggccttgagtgtatcagggtccacttggaccccatttctaccaactacaaaacctaagaaaactatattatccacacaaaaggtacgcttctctatattcgcatagagggtgtttttcctaaggattgacaaaacttgtcttagatgtcctaagtgatcatctatgctcctactgtacactacccatcatcacaataaacaactaaaaatctacctatgaaatcccttaatacatgatgcataagcctcataaatgtgctcggtgcattagtgagcccaataggcatcactagccattcatacaaaccaaacttggtattgtaagcggctctccactcatcaccctgtgtcatcctgatgtggtgataaaccactttaagatcaattcttgaaaagatattggcaccatgcaactcatc

SEQ ID NO: 264005 - DNA, 464 bp, Glycine max
actaagctctgtcaacagaaaatccgaaatgtcaacagaatgggtgttgaattagcataacaagactttctgtgattggtttaaagatacaatctttgcagatgagaatgcttcagaaacattaagaaagctagcagatgggcctaaaagaaatgttataacctggcaaggatatgacaaatgtacaatgtataacagtggggtcaccctaagggctgaatcttaacactttgcaaggtactatggcgttgcacatgccgaaaggcatcctcctatatgcaaaagtgccgaaggggcaggtgaatgtggtcttttcctgatcctcaggagcaatagtaatatgcatataaccagattaaccatcaaggaaacagtagtgggatttacctgccatgcgttcaagcatctggtcaatgaatggcagtggaaaatggtccttgttggtaacctggttcagcctccta

SEQ ID NO: 264006 - DNA, 446 bp, Glycine max
ttgatgatgacaacccttatttcattaaacacattcacattctttgtcctaattgatcaactacttaattttccatattctccccctttggttttgagtttaagcttcacttgaaattaaggtatttaattatgtgaattcttgatttaatccctattgtctctccccctttggcatcaacaaatagccaaagtatggatgacatacataatgtataaacacacaaaatattctttgtaaaacaatcataaaaaatgttaaaccaatcatgaaacaaaaacatgaataaaccatattgaaattcataccacatagtcatatatcacaatccataaatatcatgttcagtcatactaatcaaatattaaaagaaatacttagtattcaaatgttataaaaatatagatcatgtggataagtcactaacatctagcagtactaattct

SEQ ID NO: 264007 - DNA, 464 bp, Glycine max
gtaacactaaggcttatggttcattttctttatttaaatcatgtcagtgttcccaaaagatgctcttttatcaatttatgcacacatccaagtccatttatgcattcgggaaaactttcacgacattcacccttctgttgtacacacacattctttataaaaaaccacttgcgttcagaccggtgattttcttcaaagaagaactggcagttatttctttccaaaagcgcccggcctttcttttttcttttgggttaattgattaattattattttttgtttttttttctttctagctattttttccaatcaattgtcatcaagcaaaaaagagaaaggattaaaaacaacttgcaatccatgcacggttggtatctgagatacaatttatcatctaaagggcgtttcatacaaaccatcacataattcatacgacaatatgctagacgtggtagaaatactca

SEQ ID NO: 264008 - DNA, 470 bp, Glycine max
  unsure (1)..(470): unsure at all n locations
tgtgccttttcacgtctggaatgtgaatgtagcatatatatccaaagacccttagtgctttgttgatggcttcttcccgttccaagcttcaattggagtcttgtcttttacagacttatttagacatctgttgagtatgtaaacagcagtgtagactgcttcagcccagaatgtgttatgtagtcccttatccttgagcatcgatctatccatttctataactgtgcgattctttccgcggacactccattgtgttgaggagaatatgcgactgtaagttgtcgctcaataccttcatcctcacaaaatctttcaaactagcgagaggtgtactctttgccgcgatcacatcttantacttttatccattttccactttgattgtcaacaagggccttgaactttttgaatactccaaagacttctgatgtttcttgtagaaaatatacccatgtcattctagagaagtc

SEQ ID NO: 264009 - DNA, 466 bp, Glycine max
  unsure (1)..(466): unsure at all n locations
ngacaggttataaaaaaccacacaatctatgaatgacatttgttaacaacttaatagtaagtaaatgcacagaatccaggacaccgattataaccagtgactgctttttctttttttttttttatttcaaaacttggtgaatctttctatacagaacagagatcctttccaacaattttatccaatcattctctgttgtttcttatattattttcccctcatacatgaatctgttttacaatgcatcaacgaaattaaacatttctaaagtttatcacaagcaaacccaactacttatcaaggacaagtgtcttgcgttgcatcttctgtgctataaattcagtcaacagtttacaactttaccatcatggtttatacaattatcaaggtgaagaacacctcaaattgtagaaagaaaacagagaaaataattaaaaaaaatatttttcatcattctgtatataaa

SEQ ID NO: 264010 - DNA, 419 bp, Glycine max
  unsure (1)..(419): unsure at all n locations
taaagtcgacatcattntattctcgctggtaatactgatatagaagaaccacactagaaatacgttgaatgtgtgtatgttaagtttaaaagctttttttgaaatttttttacaaagcttttgagataacaagtttgaaaaaatgtttcctccaatatatacattattctcttgcttcttatcttctcctaaggtctttcatacgcttgagagataaagtattcattgtgcgcagagcttttaatttctttcattgttaagcttcatttattaatgcatgagaagcttgacatgtaattgcttttgacttggttacttttcggaaggaaagaaaatgatttctttcttataaagttttgacattctctgaagtcttgtattgcntcttggatatattcacttcagtcttctcctcattg

SEQ ID NO: 264011 - DNA, 385 bp, Glycine max
  unsure (1)..(385): unsure at all n locations
tcattatatattaataaggatgatattcaatgttttatttatcctacacaaaattttctcgattttttataattcattgcattttgactctaggactcactaatgctatcaatgatgacaacaaaaaaagatcaagaagcgagaatttagtggcaacgtcattacattctcgaccccaatgtggtattgttgtcttgaccaaacaactatggagctgcaacacagtctataagagctgaagcaaatgttgtccgagccgagtgatcgcacgtgacatgcaacgataacattggttgttagtgatgtcaccacgacattattagagactataaaggacgtccgaagantcacggatgatcaaattgttgtggttaacaaatgtcat

SEQ ID NO: 264012 - DNA, 413 bp, Glycine max
  unsure (1)..(413): unsure at all n locations
tgataatgtttattttaaagttagtatagcatggtggtttaccaagaattgaacatagtctcggtagttgaaacgagccaatataaatttattgcgtcttattttttattgtattatctgaattgacctanggtttgaatctgatctttgcttttgaaaaactcaatttgttttacaaagatctggaactattgtctgatctgtcctttaatcgaaaatatgatatatgttttcttaagttttacttcattagataatatctttgctatattcaaaaaaggttttaagttaagtaaaaatcacaattcaactcttttattgtgatatttgtctttataggttgtgtanggacatagttatcatcatgtctatagtagcaacaagaaactttacgaccatacttatggaaaatc

SEQ ID NO: 264013 - DNA, 457 bp, Glycine max
ttcattaacttttttcgcctactttgggataaaatcagatgtttggttaactgtggcaacaaaatccattcaattaatgcaaatgctttaagtcaactattaaatgcatggattaactttataaaaaaaaaataaaaagaagcatggatcagttagtggagaaatttttcagtttaatgagtgatattaagttaaaatctaattcaatgatagaacaagcgtgttagtattataaattttttactattgttttcaattcctctccaatttcaatactaaatatataaattccttaaataattggagaagtcgtgtagctcataacaattgttctcaaatcatatagaattgttttttttcttcatagaaaatagaatggttttctacaaaatacctgtagtctctatgaataaaacattgtaagccaatgatgctaatttactacctttatttatat

SEQ ID NO: 264014 - DNA, 483 bp, Glycine max
  unsure (1)..(483): unsure at all n locations
ctaagcttagcgttatgctttgatggaaagttttatatgtacaatttgtttcatcttacatcacaccgagtatcaatcctncatgtcagtcttgctacaaatgctacaagagcaaggacacctgacctttaacagccagactccccaataaatatgttatctttaacctactaatatttaaatgtatttaaatatcttatctattgacaaataattaataatctataacgtcacattgtatccacacgcgacgattatcttctacttttaatctataaacgaatatttatctctaacattatctataagttcttggttattatctataagccgaaaattatttacaaaggctacaacaatccctataaacaaggaccaacaaccacactcaactaatataaatacaagtttcattgaactctctacacatctgatcacacactcaacacaagagcaacaagactatgtctttctctctttctc

SEQ ID NO: 264015 - DNA, 447 bp, Glycine max
  unsure (1)..(447): unsure at all n locations
cagtcttcctactttttttcttntaccacagagtggtacctggagatatgtcgcgagggtcaaaaataccttggggacgtcaaatggggtgctattgcccaaaaccaatcttgaccaatcccgacccaacccggacatagtcaatcagtgaaaacctgtgatgtacctaaacaagtgagctcctggcagtcaaccgattaatgaacaaagaccacaaacaccgacgcttgtgtggtggctggacagctatggatcttgagtgatatttggaatatggcctctggtagtcgattaccaagggtgtgtaatcgattacaacgtttaaaaatgaagacacgaaagtaagatggcctctagtaatcgattaccaaaggtgtgtaatcgattaccaggcctaaaaatgggatcacgaaagtgagatggcttctggttatcgattaccaatgg

SEQ ID NO: 264016 - DNA, 381 bp, Glycine max
  unsure (1)..(381): unsure at all n locations
gtttaagaatgagtgctcttttgatatcacctttttcttgcaaaatggttttccttcttataaatcttggaggaatccttttactccttttgcttccccttggcctctgaagacaaagccttactattcttctttttctttcgttgattctagttgttcttcctcatccctcttatctttcatcccagctgatctttggccaccgtgaaggtgtttgaggatgcaacataaactttgttccaaggtgggtgagggttatctcattagttaggccattatagatgattttcctatcatattgccatggcctacctaagagaaggtgtcctacctccatangaactacatcacaaatcacttcatccctatatattccaatgg

SEQ ID NO: 264017 - DNA, 449 bp, Glycine max
  unsure (1)..(449): unsure at all n locations
tgtcttcataaacttgttntcttctcttggatgacttctttatatctttcttgcctagctttcaatgaagatttctatctgttaaaaggttagtatctttgattagcacactattcaaccccccattaagtgtgattgttgttatgtcaattagcacattgtgctttgaatccctaataaaacaaaaaattatttttggtccttgttattttattttagttcttgcatatatctattctttgttttggtccttgataaaataaagaattttgttttggatccctatcaaatctttctagggagactaatacaaaataaataaaatgtcataaggaccatatatatatatatatatatgaagggctaaacaaaataataaggactacaaacaaaagtttatgtatggatgtaatacaaagaaatttgtattagactcatacaattcatta

SEQ ID NO: 264018 - DNA, 436 bp, Glycine max
  unsure (1)..(436): unsure at all n locations
ctgttaactccctgagttaacaacttaatgcttgtttttagataagtataaagaatgatcatgcaaacatatgtgtgtgtgtgtgtgtgtttggttatgagtgtgtaatagtagtgaaaataaatacttagagttttccaaactagttttattaatcaagagttgcgcattacaagatcaaagtttcttttaaccttctctcccttttttcattaacaaaaaaactaagggtcgaagaaagaaatgatgataggacatcattatcactcttgaacttgtggtcctagaggaggctatgctaggggtggtgaagatggtgactgtgttggaggtattgctttaacanggcaaaaaaaattgttgtggggaatggttcaataataggtggttgtaggttggttggtggtggttggacgattgcaatatatgtttggat

SEQ ID NO: 264019 - DNA, 465 bp, Glycine max
  unsure (1)..(465): unsure at all n locations
actgcatgcaaagttngtgattcgaaggaagctgctggagtcatcatatcttgcttattattacaggcattgaagaaccttgcatgataacaagaggatgtgaacaacctaaccacactctataaggtagtgagtaattccttttttgccacatcgatcaatccgtgattctatcatctgtcaaccttcatcacttgctctcaagccttttgcaccaaaaattctatcatgcacaacaaggtgcacacacaagaacaaaagaacttacatatataaagcctgcagtatgtattattgtgcttgtgtagtgtgttaaaagtgctctccttgtccattaaagaccttgacatgcgggtcatgtcttagattntatctcctttggttgtttgtctccatagtcaattccatatggacctaattgaaactatgcgatgcttgtgtcacggtaacacctgacatggaaat

SEQ ID NO: 264020 - DNA, 461 bp, Glycine max
  unsure (1)..(461): unsure at all n locations
tccctcttcttggactagacttanaccttttatcattattgnaacagcatatgtaaaaccaaaacttaatcctcagatccctcttgttggactaagttttgattctgcttcattcaagttctaaggcaacaatacatttcctaatgttaaaatcacctaactaagcacacaaatggttgatcagaccaagagcatacataatttaagcactgaagaagcattgaacaccgacacaaaatcaattagatatgaaaataattacatcagctattcaatagaaatccccaacaagggtgtttatccagccattatagatgaaaccctaacaataataagcttacaaaacctatgtatctncacaaaatttgctcctcttgctgcctccagagctcttttcctgaaataagcattgtggtgtgctctggaatgttgtaaaatctgttgaaaagttctgtacccta

SEQ ID NO: 264021 - DNA, 414 bp, Glycine max
attaattatatcatgacacaaactatctgcgtcacaagtagaatagtgaatctctttgcagtatggaactggttccctttcattattttgatcataacattggataaaagcccctaaacaacgcgtgagtctttctaagtttaaccattaagtggatttgaggagtgatcctatattcccgtatattgacatattaatcttggtctgtggagggggatgtatattatttgccatttctatctactggctattgctctatcaagcaccatcattatattaatcatgtaaatgttaatatgttaaatataacgttctgagttgaggggggctaagcttggttgacttatcaacacttttgtgctcactcgtggaggcctcaccaaattgtgttcgtatggtatatgactaagacgt

SEQ ID NO: 264022 - DNA, 456 bp, Glycine max
  unsure (1)..(456): unsure at all n locations
cgcttggtttgtatggctatactttattattgcattaatggtttcttttgattntaattattattattttcctttttctgcccaaatgaaagggcataaagtaaaacaaaactaggacgaaattggcacgtgtcctgcattccgttaaagattagcggttagtcattcggtcccattctggattaggatggttgtctggaagtgcangtccctatttgacatcaaaattacttcattttaaatttgttgaaataatgtatttcttgttaaatatatataattgttaattattgtaaagatattaaaataatattggttattaaagattggctgtaagtctaactttgattattttttataaaaataaatagtagtaaaatataacaaaatcataaaggatagcaatgtcaatttctcaatgagttgacttgatggtcgacttaagcacatatattt

SEQ ID NO: 264023 - DNA, 395 bp, Glycine max
tctatccttcctaagatggttcttaaccctcattaagaactagctgtttccttcctttattgcctttagttgaatacacctttgtttggttctctatttggttcttaaccctctcatgcaacttctttacaaactctgacctatattccccttttttatgtataaaagaagtgtccagtgggaggggaatgaggtcaaacggtgttaggggattaaaccccagacaacctcaaaaggggactgcttggtggttctataaacccccttgttgtaggaaaattctacatgaggaagatactcatcccaagacttatggttgcctttcaaaagagcccttaaaagggtggataaagacctattcactacctctgcttgcccatcagtttgtggatgac

SEQ ID NO: 264024 - DNA, 445 bp, Glycine max
  unsure (1)..(445): unsure at all n locations
tctggtgggacatcttgacttgctttccaatctgacattctctctagattctgccttcttctattttcagattgggaatgcctctcacagcacacttgtcaatgattntcttcatgcctcttaagtgcagatgtccaaatctttgatgccatatgttgacttcatcttctttggaggatagacatgtggaggagtaattggtttcttgaggtgtccataagtaacagttgtactttgatctgcgccccttcattagaacttcactcttctcgtttgtcaccaagcattctgactntgtgaagtttacattgaatccttcatcacacaactgactgatgctgatcaagtttgcagtcaatcccttcaccagcagtactttgtccagactatgaagtacatcatgggctaactttcccattccagtgatctttcctttatagccatc

SEQ ID NO: 264025 - DNA, 410 bp, Glycine max
  unsure (1)..(410): unsure at all n locations
ttgagcttctcgacatactacgggactctttctgtcatcccagtataaagttattgtcggtntgaatatgttgttagcttctgttttcaattacaagcgtcacgatatattcgggactcattcggacaacccattaaaaagttattgtcgttagaatttgctcagagcttccgttttagcatctcgatacattacgggattcattcggacatccgagtaaaatgttacgccatttgattctgctcagagcttctgttctgaattttgagcgtctcgatatacttcgggacccaatcggacatccgagaaaaaagttactgtcgttagaatatgctcagagcttctgttctgaatttggagcgtctcgacatactactgggcccaatcgaacatccgagtaaaaagttatt

SEQ ID NO: 264026 - DNA, 480 bp, Glycine max
  unsure (1)..(480): unsure at all n locations
atgttcgcacagcaaaaatctattcaatctcttctgtatactnggacactttctctctctgagaagaaacctcacattgcaganagctcctttgagaataaatgggccaanactgcgctcttcgcaaaatcttgatttcagggcttaatatagggtgggctttgttcattgcttgtgtgctgtagcgcaattctgaatcgcttatcacggagcggatggaccgaagcggtgcgcttatcgggatggccctcactcaacaaacaagcacaactcattcttcttccagattcttccttgcgcttagttgaggaatgttgcgctcaacggatatctcactaagccagcagattggcttatcgagagggtgaaaatcaacacttcaaaacttgcctaattatcctgaaattgagagaaaatgattattaaatacacaaaatgggagtactacatatttattacctatctgtaacaaaaaagtat

SEQ ID NO: 264027 - DNA, 338 bp, Glycine max
actctgccttagatcgatgatggagtgaatatgccattaaatccctgatattgtaaccagattgcatattaatccctgacttaaattgtaattcataatagtccctaactttacataagttttgcaaaatagtccctgtcgttaaattctcaggtgacggcgttagtgatgtgtaccgtggcaattcattgctacatagactgtccaacgtggcactaaggtctgcatgtatcaattctctctcacgcaaggttgcttcttcttcttcttccccaaataaattatgggttacgaaactgctggtttcccacgctgagtcgcttcttcttcttctaatc

SEQ ID NO: 264028 - DNA, 448 bp, Glycine max
  unsure (1)..(448): unsure at all n locations
agagttgaaaaatgacccttctgtncaatatgttctgtatcaggtatgcatttattgtcattttatctaggctccattctatgcttctagtcctcaaagagactcactaaaaatttcagacgattgtctgccttttagaatgacatgtaaattaagttatgcttttatttgctttgttttggtacaatagagctcataatctcatctcatgtcattaaccgactcggttggcacgcagaatttcagcaagaagttcagaataattaaaaaatgggatacgtttaaaccttatgtttgggtccatctgaaggactatcttgttctaaactcaagcccggaatttgagacattactgcaagctaagttagctaacaacttgtctaaaactagttcagtaataaaaaattaaaatggatagaaaaactacttatcacggtaatgctgtcat

SEQ ID NO: 264029 - DNA, 462 bp, Glycine max
  unsure (1)..(462): unsure at all n locations
caacatcccttgtggatctgtgtttgtaaatgattttacatggttgaaaagaaatctcaaggaccgcaggtcgctttggaactggatgtatgcactggttgttgccgaaccagtataaaactcttgtgtttgtcttcttcctctctacactctntaatttctgctgtgcactttaattatcgcttttacttttggttaagtttctatttttgttctttactttcttaacatctagtgaaagcttaattgagtttagtaacattaagaaggatagattgttaattagtaaaggttcattaataattaattcaaccactccttcttaattattccgaggccacttgatccaacaaaaggttggtcgttcctcanagagagatgaatccagcagagggacggngagcatgttgagtttcaagaagaaattgtctggaggcaatggtcccagctggtatcacccat

SEQ ID NO: 264030 - DNA, 458 bp, Glycine max
  unsure (1)..(458): unsure at all n locations
tagatggagaagaagacagacagaatgagaagactttgttatgttacgaaacatacctatgtatggtggtgaatgagaagaacagatacttgtgacgatgcttgagtgcgacgaagacgatgctcgagtgcgacgaacacgatgctcatatgcatacagggaccttgaaggtagaaggagattataagaagaagagagcgtgaaagcttagatggagaagaagacagagtgcgagcgcttacggctcaccatattttttaaaatataagttcaacatcggtttaaaaaaaaaaaccgatgttaacaaaatgatgttaatgttaacatcggttttctggataaaaaaccgatgtttacatatcanacgttaacatcggttttctaaaaacccgatgttaactaataaatgttaacatcggttattaataaaccgatgttaactaataaatgttaacatc

SEQ ID NO: 264031 - DNA, 390 bp, Glycine max
  unsure (1)..(390): unsure at all n locations
gtgtctactatcattgncatcgggttttcgtcattgaggcgccacttgagctgccaggttctccacctttgggcatattctttgaaagatccgtgcccccttttttgcacatatttggtagttgcatcctatccgaagccattataccgacactgcctaacgaaggcaaccattatgtcctcccaggaatcgctcgggaaggttccaagttagtgtaccagataacaactaccccagtaagactttcttggaaggaatgtatcaacaattcctcatcttttgcgtatgcccccatgttccgacaatacatctttagatggttcttggggcaagtaatccccttgtacttgtaaaatccaacaccttgaacttgggaggggtgatgatatt

SEQ ID NO: 264032 - DNA, 461 bp, Glycine max
  unsure (1)..(461): unsure at all n locations
tgtgactcttggcaatttctttaaaactagttacttatatgttatgactttngaaaaaatcttcagaaacaagtcacttgaagaattttgacttttggaaatgtatttttcgaaatcagtcactactaatcgattaccattaaggtgtaatcgattacacatcaacaaatgtgactcttcattttgaattgtgaaaattaaaatgtttagaagctttggtaattgattacaagtattcgtaatcgattacacaagtttaaaatactttaaaactgtttaaacataagttataattcttgaaatttgaaatcttaatgttttaaaacactggtaactgattactaccttctggtaatcaattaccagagagtaaaactcttaaatatgattttgtgaaaacttcttgtgctactcaatattttgaaaaaaaattttaatacttatcttgattgagtcttctc

SEQ ID NO: 264033 - DNA, 433 bp, Glycine max
tactacgcttggtaaaatatattgatatgactctctcgtcatgaatttctcatccaaatggtctcctattgattgacataactcaacatttcatgcaaagctactctcttatctcctcatcaaacttgccacatgcgtcatgtgcatgctataagatgaatgatatgcaatgaaactactttattttggtttactattaaaattgttgacactactacaaaaagcagattttacaccctcaaactaagctatctacgtctggcctcccaccgtctttgttacagatgtcgttgtaagtcgacaacaacgacatctgtcatcccaaccaccgtctttgtaatgtcaaaagacgacgtcagtgcgcaattaacaatagtcgttatataacatatatcaacaacggattttcaagagcaccgttgttgttcggatc

SEQ ID NO: 264034 - DNA, 478 bp, Glycine max
  unsure (1)..(478): unsure at all n locations
gcttctgctntcaaaataagcggttgtccttcaatgggtctgttcctgatatatttccactcagaattggtcctttaacaactactccacatctatgttctgttgcatacctaataaaaggaatagccaaaacatataaagaactgctaattcttttggtagataagaattgctaatttaactctgcataaatcttgagttcccatactagtaaatgattggtagtcaattntacttgagtacggctcttaaaattttggaacgaaatcttttagccagataaagctcaacaattagtccttaaaaaattaacattgcccataataattggttacctacattaacaattaacccttaaatgttatagcaaccttatgcatcttcacctgactctgacttcatattgagggaaagatggcagcttcaatccatctanggcagcacaaaggatggngccttcttcttcaaagtgactgtc

SEQ ID NO: 264035 - DNA, 438 bp, Glycine max
  unsure (1)..(438): unsure at all n locations
tctttcaaagcagtataagccttctcttgctgatcacccattcaaaaacaacattggtgttaacaatttcatttagaggtgcaaccaaagtgctaatatctctaacaaacctgctatagaaacttgctaagccatgaaagctgcttacttcacttatatttttggggcttggccaatcttgaatggctttcacctttatgtggatgaacttacactccttgtgagctaatacaaatccaagaaaaatgacatggtccatactgaacacacatttttccatgttagtatacaatttctcacaccgaagtgcttccaaaacacacctgatatgcataacatggtcatcataagatttgatatgaataagaatatcatcagaatagaccacaacaaactgtcctatgaatntcctgaacatatgattcattaatcccatga

SEQ ID NO: 264036 - DNA, 473 bp, Glycine max
tgtctcatcgtttatgcgagacagagaccaacatgatatccatctttatcaagtaccaagaagaattaaatctagccacagcccacgagcataaagtggcggacgagtatgcccgaatgtacgcagaaaaggaggctagaggaagggtgatcgactcgttacatcaagaggcaacaatgtggatggaccgatttactcttaccttgaacaagagtcaagaacttccctgattgctagccaacccaaagcaatggtggatacctactccacccctaaggagatccacagacttctcagctattgtcagcatatgatagacttaatggcccatataattagaaaccgctaggaagttcgtattgtcactcagatcttgactagttataacgttctgaataaaatgagtgtatcccatgttgttactccaaagatcaatgcgaatcatatcactcccgcattgtatctctatcatg

SEQ ID NO: 264037 - DNA, 366 bp, Glycine max
cttcaacatacaacacaagaacattcttaattaaagaaatatctctatatgcatcaaactcgtttattaaaaagacccaacgcttttaaaccactgttgtcacttttaattgcttgcgtttactgcttttctaattaagatatatcatacttttacttcaattcacaattattattttttgtcaacaaaatcgctgattattgaacaaagctttgccaaataaacaatttccctatgtttgatactcggatcattccgtcttaattttaaatacttgacgacccagtgcgcttgccggtatattacttcccctttgatataagtgtcagtaaatctaagaaaaaggtatcgtgtggcgaggcaaac

SEQ ID NO: 264038 - DNA, 465 bp, Glycine max
  unsure (1)..(465): unsure at all n locations
attctctaatcattccaatccactcatattgttctattgatcattcaaatcattctcaacactcatttcatgaaaaacaatccactgcatatcaaattcaatcaattcactgttcaaacacgcttttggtacaagcaaacaactcaaggtgctgaaatttaaataactgaaatttaaagaactgaaacataaaaattgtattttaaatgactgaacataaatcataaaatacgcaaaattaactaaaatgttcaaaatgcacaaatntaaatgtcctgcttctgtggttgcccctgtgcatgctcattaatatccaacacctgagcagctggtgaatcctgagagataagctgctctaactcagatgctagtgtagatggcatggaatcatcangtattggtgctgaggatggctctgggatctggtctgttgaagtctactcctcttgagccatgtgtacacct

SEQ ID NO: 264039 - DNA, 409 bp, Glycine max
tgtcctcatgggcttgagccacaagacttctcttctaattgaactataaaataatcatatgtttggcacttgggtataggccttacttgggagttgggagcagccacatttttgtttaaaatatgtttttctattttgaagccttataatagcatgaaattgtcagaaaatgacaatttgtggtggctgtaaaaatcttaagagatcaattacaaatattttacaagataaaccgcacacttactatttttttagtttagagacctaaataaaaactcctaaatagttgagggaattaaattaaccttgaatgaacaaaaacaaacaattattcacatggatatgtaaataaaaacaccaaaattcctaattaaaatgaagttgtgactgttacggatcacctgatccg

SEQ ID NO: 264040 - DNA, 469 bp, Glycine max
  unsure (1)..(469): unsure at all n locations
cgaggtacttacccgttgaagatcgaagaacgatgaagaacgaatgtttaacgtcgaagaacggttgaaacctttgcgaaattcttcacggaatacgttacggaaacgtttcggaagcgcctcggcttatattgtcttcacggaaacaatttttccaagcaaattcgaaagagagagaagtgccaaaggggctgaacccatttcttcttcacttcctcccctatttatagcaaaaacggggagggtggttgccgcccagctcgcccaggcgagctcagctcgcccaggcgagccaggttgcttcctccagaagcaacagccttctggaggaatattctggagggcccaagtgggcctgggtgctatttgcacccacattnttactaagtacaccccctctgctttttttggtgattcttttttcgtaaatttacgaaaacttacgaatnttgtaacgatactcgttttc

SEQ ID NO: 264041 - DNA, 453 bp, Glycine max
  unsure (1)..(453): unsure at all n locations
tctcccntattttgctatatatagggggagaagtgaagtaatttaggttcagcctcttatgcacttgtctctctctctcgaaattgctgaggaaaattatgtccgtgaagaaaatccaagccgaggcgcttccataacgtttccataacgttttcgtgagtaattacgcgaaggttctcgaccgttcttcaagattcatcgttcgttcttcgttttcttcagtcttcaacgggtaaaccctcaaaccaagcttttcaattcattctatgtacccgtggtggtccacattttgtttcatgtattttaattctcgttttcatttacttttcatacccccttttgacgtgcttaagccatttatttaagtcatttctcgcttaatctaaaaataaaataaatttccaccgatcgtttgaattgtatcatccgttaattttggtaaaatgaattctg

SEQ ID NO: 264042 - DNA, 461 bp, Glycine max
  unsure (1)..(461): unsure at all n locations
actaagctgtaatgtcggtctctttatacatgtgcattgaggtgagttcgaataacttgtctcataaacaatgtccaaaagacaaatgagaggagaaaaataaagagaacacgtattagtattcataagttttcttctagggcaaaagttgataagtaattttaatttttaaattaattatagtcaatttaatatcaaccaaatactaatgaaagtatttgattataaatatcatgatttataatcgctaaaataacaataccaaattataaaaaggaaagactattaaaacaataaacaatactcaaatattttgtttaaaaagagaanaaaaaatgcagttatctctacaatgaatactataaaaatcaaaatgcaacatttatctttaaaaatgacattatctttataaaaaaggaaaatacaatatgtatctaaaaaatatcattatctttacaatg

SEQ ID NO: 264043 - DNA, 451 bp, Glycine max
  unsure (1)..(451): unsure at all n locations
tcgattcgttgagagatcacaactagccatggtctaacttctttaccgctnggcacgaggttgctactatgtatatagagagagagagtggggaccacaaacgctttctggagcacatcttcagagaagtacaatttgctagtgtcccctagtgctcagagctgacttttagtgtacagattgaaagaaaagttaacaaaataagacaaaaggaattaagaatgtcaagacaggataacgaaatttttccttttgtgcactatggcacgagtttcttactaaacctatggacattactttcttgtgatcgttttcatttcttgaggattgagtaattgttccattggttttgtattgtgagccaagtgtgaaagcacttgtcttctcaaggctggatgcataagcagtatcgtccagtgactgatactttgcttatcgtcaaaaacttatg

SEQ ID NO: 264044 - DNA, 408 bp, Glycine max
  unsure (1)..(408): unsure at all n locations
atgtttggatgagttagacataccctttctgttttanggtttntgtgatgatgtttgtgatgtttatatgctgaaattacttatggaaaactgttagagatgaaaggtagagttaacctanggttagaaagtgagaatgtgatgttatgagtggaaaaagagtgaagctttgagagttggaaggttaagtctgaattctgtggtaaatggaggttcagtgagttaatcctagcttgaaatgtcatttangacttatgagaaagcttggactgtgctagagagaaaaacaaatgaccaatgtgaacaaagagccatttctagggcaaatttgggtgttgaagagtcaaattttgattcggtgagattntaggtgtaaatccagtttgaacaagtctaaatagatgttat

SEQ ID NO: 264045 - DNA, 445 bp, Glycine max
  unsure (1)..(445): unsure at all n locations
ctgcattgttatgctgagttaattcatccaccgccttcttgtatgtgattatcaatgtttactcctactgcactcactgtcagaccttctggtttgtgattcttgacatcaagaaaaattaaatgcttgatcacaatcacaacccctataatttaagtgtgaaataactactatcttccattcattttcataaattatcacaaataaaaatcaaaagataaattcaccggaaattacccttacctttcgttaagttatcatgtattagtcatgagagtgaacactaaataaaaacgattgcaatataaatatgtacatgaagaanaaagtacctccattgagccataagagaatgggttnnttttttctggtttgtgagtggcctcgaaaaaccaatagaacaatgctcttcctggagtttcattgatagtgatataaccaccat

SEQ ID NO: 264046 - DNA, 465 bp, Glycine max
  unsure (1)..(465): unsure at all n locations
tgtgacacccatatggganaatcttctctatgaagtacctatttggtgttctgaattacccactttcactttcaaataaaaatagaatgataatatatggacactcatatnttttaaacaacataacaaacaccttttctttctccctatctctcttcatatcaaataataatatctataatacctatatttttttcacttttatctttctctctcgctggctttcaattggcataccgaatgttcaagtataatttgtcatacaaataatgctacaaaagcaaaaacaacgggtttttttacacaattatctatgtgaagctatgtatctgacaccttctcttactttntttgttttaagagtgttactgtgttattcgcacacaatgccaatttacacacttatgcacacagcagcgagttatataaagaatagattgaagaatacacggaaaatactcataa

SEQ ID NO: 264047 - DNA, 422 bp, Glycine max
  unsure (1)..(422): unsure at all n locations
tagtataagatatatcattgatccatcctctttcttgttgtgataaacacaacaatcatagagacttctcttgaatccttggctggtgataaagctatcaaacctcatgtaccattgccttggagattgtttcaaaccataacaagacctttgcagttgacaaacatacctttcttttacttgaacttcaaacccttcaggctgtttcattagaatattttcttccaccctccatggagaaaagcagtcttgacatcaagttgttcaagttccagatcttggtttgccactatagcaagcataaccctgatggatgtatgcctaaccataagagaaaanatttcgtngaaatctattccttctttctagctgaatcccttggcaactaacctaaccttgtatcttataccttccttttctaa

SEQ ID NO: 264048 - DNA, 457 bp, Glycine max
cgattcattctatgtacccgtagcggtccacattgtgtttcttgcatttatattctcggtttgggtactggttataccccctgttgacgtgcttaagccattttacttaagtcatttctcgcttaacttaaaaacaaaataaatttccaccgaacgtttgaattgtattatccattaacttcggttaaaataaattccgaccgttctgtcgtgccgtatccacgttggaaatcataacgccgtccaaataatattataatcataaagacatcttttagtaaaataaagcggaaaatcaagtggacattttctctttgggatttctcattcttaatcgaattgattaataactaaagtgaaactaaaggctaaaatcaattcgcctagtcgagctcgtccataataagtaggcttttgaagtgtgcattccatttcctcactaagtaaaatggatcat

SEQ ID NO: 264049 - DNA, 439 bp, Glycine max
tagcttatccaaagtcagagatcttggcattcagattcttgtcatgtaagacattggttgccataatgtccctgtgtactattatcaaacttgactcctcatgaagataaaccaatccccttgctatccccacacagatcttcattcttgtgggccaatacaagtgcagcttctgttcatgttcacctacgggaaatgcggcgggaaaggaaataagctctttctgttatatattgattcgcagcagaaacatacacacacttacacaatgtgtatgttgcccgtaaagcatttaccgaacagtgcacgagcaagactgttgttctccatgtattcatatataagtagcaactggttgtcttcaatgcaacagccatatagcttcaccagattttgatgctgcaaagcagatatcattccaatttcattgacaaattca

SEQ ID NO: 264050 - DNA, 379 bp, Glycine max
gctgcgggctaccccatcactatagtatactttttcacctaaatctgcaaacatatataactacattaattggtatgactattctgacttatatggacatcctttttattattatattcatagtgtcatactaattaatggtacatcattactttcatctatttgccactcccaccgccactcggtgttttgtatgctcttcttgaattgcctgataagcactaacttcttgaggaataatttggaattataaaatgtctagatataactgctgattcggaaataatatcatgaatgtgtggcctcagaagatgtgaaagatcccatcgaagtactgaatttgattctctatgccagaatcgatgcgtagaaatatctt

SEQ ID NO: 264051 - DNA, 415 bp, Glycine max
atggccttaaacaagcacctttctcttgtgttgatcgtttcaaatctttgcttcgtaaatatgtggtcttttgtagcaaggctgatccatccttatttatttggcactcaaatattggatcactgattcttcttctttatgtagatgatatactcctcacgggatccattaccactctagtttctgacttcattaaacttctacaatccgaatttccatgacgactcgggtcctctccatcacttacttggcattgaaatactcaaaacaactgatggctttcatctatcccattcacactatgcccttaccattctctgacgagctaacatggttgattgttaaccaaagatcacaccacttgaagctaatatgaagatgacatccaataacactccccttgatgatccaagtt

SEQ ID NO: 264052 - DNA, 431 bp, Glycine max
  unsure (1)..(431): unsure at all n locations
actcttataatactcaagcttcctcggagccattcctgcgaaggcaaacatcnggaacgtgntttnttacttttaaatgctacccttggaacataaatggcatacaactcccttcaataaatacaaacatcaatgtaaatttagagcaagcttatgcgcataacttttcacgaacgttcacttgcacaagacattcttataactaagaaaaatgcacccatatacaatcaaggcaccttcgttacctatattatttaccccacttccaaggtgtatttgttacctacatcacacacatttcctttgctgaattcacatacatgcatactctaagcactttggctatcaaatattgcatacgtgcacatcttggtatttctaatacctatacatacacaaacttcatgatgaatctngactatctacacaat

SEQ ID NO: 264053 - DNA, 464 bp, Glycine max
tgaagagttgagtctcatatcggtttaatcgattacattgttgtttgagacaatgattgatctattcaagagtctctactttaatcgattacgaagtggattaatcgattacttctcgctcgtctagtagttcaaaagtgaacaaaaacactttaatcgattacttagagcatctaatcgattacattgttcttgagttattttcagatgttgggaaaaacactttaatcaattactcgataatctaatcgattacttcattgaattaatcaattactttgtagatgtaatcgattacaggtggttataactattttccctataaataaccagcttgtgttccctccacatacactaagagaatactcaacatctcgaaaataacccattagcctctggatgagaaagatctcgagctgtcattggtgaatagagaagaaaaaaatgagctgtatagttatcac

SEQ ID NO: 264054 - DNA, 309 bp, Glycine max
tcaaagagaaagggaaaaaggaaagaatgaagatttccaatcaaagagaaaggaaaaaaggaaagaatgaagatttccaatcaaagagaaagcaaaataagaatagaaggaaaattcccaatcatagagtgtgtaaagcacacagaaaagaaagaaaattcccaatcaaagaatgggagaaagtaaaaaggaagaagaagaacgaaagaaagctcctgatcagggatcgaaagaaaacagaagaaatgtgcagaaaggtctttggaccggacaatatctgaacaatacagaattgtcactaaatgaaca

SEQ ID NO: 264055 - DNA, 454 bp, Glycine max
tgcaatcactaattaattatcatgccgtcaaatttaaatgatacttttgatgttatattaattaaaacttggttaattaaaatccttcttgaaaaacaatatgaagaactcttcttatagaaccattctacaaactaaaggagttctatttgcatgttgaatgaaaatatttacaacatcaagtcacgaagactcatcccacaagtcagaaataaaaaaaaaagtaatcataacccgataaagattttgacgaggatggttaagacgctgaacacttaaatattttgattgacgaaagaggtatatttaaaaatacggaaaagagtggtgatcataaatgttttatgttcttctttaccttgagacatatattgcagtaaactgcacgctgtccatgtgtaaatcctatcatattattatgtaaaacaatatattgaatgaatatgattcatac

SEQ ID NO: 264056 - DNA, 476 bp, Glycine max
  unsure (1)..(476): unsure at all n locations
actaacttacatcatcatggatataattatcgatattaatgtatgtctatataaccttatcaatacctgatggtggagtaaaatatcaagttttatatacttgacataacatattgccgtaattctattcaattatcaatgatccattatattaatgaagtccaaaatagattcctttgtttctttaataaaagcatataattctaaggcagatagattcgttaatgtaagtcttgctcantcccgcgcccgggatgccatggtgccttcaaaaaagatgacacatgtatgtcgtccatagcctttgtatgttgagaagctcatgagagacctatgcactattcttacaaacaacagtcttatatttctgcatcttctgaagaggatcntctttttgaaagtgacacgccaacggtttcggttgaatatgacatggaagcattcttctaacgcatcctaactctattactcgtgat

SEQ ID NO: 264057 - DNA, 245 bp, Glycine max
ctaacaactattacaacttttctcacttgaagaccctactaacattctcctgcctccaattcgttaaccggtggatcgacttgagaatcgttctgatagccttctttcacataagtggacattgcgaccgttgggatctgcaagataacgtcccaacccaatctgtactactgtgtcataacaacaaatacacatcatgttctgcacaagcgaaattctggtgacatatttgaagcaaattctgc

SEQ ID NO: 264058 - DNA, 432 bp, Glycine max
  unsure (1)..(432): unsure at all n locations
taagcttctaaactttgtacaagaatgaagctctgataccacttggttttctagtgggctcanatatcttaagaagggggggttggattaagatattccaaacttttctcctaattaaaaatctatcttactttttacttaagttatgaattcccttaatgacaatcttcttaaatattaattcaaatgaagcaacttgaatataaatataaagcaataataaataaaggagattaagggaagagaaatgcaaactcagttgtatactggttcggccacacccttgtgcctacgtccagtccccaagcaacccgcttgagagttccactaacttgtaaattccttttacaagttctaaacacacaaggacaacccttcctttgtgttagagattctttcaacaagagactcacagctcttatcccttaagat

SEQ ID NO: 264059 - DNA, 461 bp, Glycine max
  unsure (1)..(461): unsure at all n locations
actgtttctgagagtggaacgtaaagcctctttccatggcaaatagttattatagcaactacatgttctttcacataattgcatccctttcttttgctctatgataataatgagacaaacatatcaagaagcaaagaaagggtcttatctagttctcttattatccctctctttctttctgtgtgttgttttttgtactttttattgcatagagagtcaaaacacacatgaacacacacaaaagagggttcagcactggcttcctctattnttctccctcttatgagtgtttttttgtgtgttcttgctgacagtaactactttctacacatcatgtgttntctgacttgtgtccccttatatcagaactatgaanatagcttatcatagtgtggatgtccatattctgtgaaatagcatgaatggaaccgtgtgccttctgtgccttacaaactggagtg

SEQ ID NO: 264060 - DNA, 91 bp, Glycine max
  unsure (1)..(91): unsure at all n locations
gggctgctattcctgctgattctatgagcaatgggtgttcttgagtgtatgggggggaganacattacaccttatacagtataattaatct

SEQ ID NO: 264061 - DNA, 441 bp, Glycine max
ctggagcatgtaaatgcactgtctagctctcgtgatgtttctgcacatagaaccattatgagattctgttatatggaacctttcttatgggcattctgtagaactattacaatagccatcttgatgtttgttatgaattaatccatacttgatgaattgtatattgatgttctattctgatgtaatgctgcttcatcactcttaacaattcttcacaacttcaaatctttctgaacgcgactacttccaaaagacttaatagaaattattttattggtgtgttaatgcactatccaaggtcaaaatgagtatttctcttcaatctttcaaatctacacataagtgtttctcatggacgacttcatcattcaacaatcttgcatcttcttatgtaagtggctcttactttctgatatgcctacagtggttgtggcaacatat

SEQ ID NO: 264062 - DNA, 454 bp, Glycine max
tagttgcagtaatatgttatccatccgacaacaataattgtgatcatttgttgcacctcacaagtgtcgccacccactttgtgacaattgccatttatactcacacttttggctcatatttaagcaattgtcttctcatttcttaccttaattaagacatttgtttaaccctttatattgtgtttttataattaattaattaagaataaatattttattttcagtttatttgttttcgcccgccctgcgaataggctttgaggaaggtaaaagagactaattttaaagccctctggaaggcatacgtacacttgatggtcgcgctcaacgcaaggttccaaaggaagaacacctttcaatgtgaggctaaacaccagtttactatgctaattaagcgcttgaatgtaccaaagaaaatgaagtttgcatgcataacgccaatgtatcatgcatt

SEQ ID NO: 264063 - DNA, 443 bp, Glycine max
  unsure (1)..(443): unsure at all n locations
tctgtgaaaagattcctaaagaagctagagcttagcttctcacacctctctaatagctaaactcacctgcttgagatgagaagctagaacttagctacacaccccctataatatctaagctcacccccatgacaaaatacatgaaaatacaaaaaaagtccctactacaaagactactcataatgcctcgaaatacaagactaaaaccctatactactagaatggccaatatacaaggccgacacgaaggaaaaaacctattctaatatttataaagataagcgggctcatacttagcccatgggctcaaaatctaccctaaggctcatgagaaccctatggccttcccttggatctctggtccaatctacttggagtcttctatccaatgcccttgcanggtaggattgcatcacttaacccatgggctcgaaatctaccct

SEQ ID NO: 264064 - DNA, 456 bp, Glycine max
  unsure (1)..(456): unsure at all n locations
tctggataattggagagttctagagagagaaaggtccattgttcagagagtttgagagaatttgttgtgtgaagatctgcagagaccaaagctggaagaggaagctatcctgagagcttgagatgagtttgtgagagattgtgaggttctagaggtggaggaggcattcccactacttgtatttctgcaatctgtcattctcttctctttgttgtaaaggaagacttcccttatggatagctaaatcctcttttggatcttccttgtaagtacttgatgtaaatatctttttatctatttaatgaagttttgagtgtttagtgtgctatcagaacttcattctaccatgattntgccttgatcacgtagatgcatgtgtttataggatcattcaatagtggaaactggtctgattcttataacttgataggacanggctagtttgtcgtattttca

SEQ ID NO: 264065 - DNA, 414 bp, Glycine max
tcccaagttgttaagttcttcttcattactgtcctaatcttagttcccaaagtcctattaacaacttgcgtttgcccatcggtttgtgggtgacaagtggctgaaaataacaatttagtgcccaacttgctccacaaagtcctccaaaaatgacttatgaacttaaagtccctatcactaacaatgctccttggcaaaccatggagtctcacaatctccttgaataacgatcagccacatgggaagcatcatcaatttttttacatggaataaaatgagccattttagaaaacctatcaacaaccacaaaatggaatctctaccattgcttgttgttggcagccccaaaacaaaatccatggataaatcaatccaaagatacttcggaattggcaatggagtatacaatccatg

SEQ ID NO: 264066 - DNA, 417 bp, Glycine max
gccccaaacgtgaccttttttccctccttttgggctattttgcacatttccttctgaaacatttaaaaaccttatggattacacgacaattggtgttaagaagctcaattcggttggcaagaatccaaatgtttgcaaatgatcatccccagatgaaattatggtatgacagttgcccttctttacttatcttttattggaaataaaatggaagtcagataaagacactaatttcgtttgagcgatcgcgtcatccgaccggccactatcggaagcccaagtagtaaaacctgtcaaaagaaggagtataagaggcagcaggtatatcaacaaaagaccttgaagtcttgcaaagtaagagagacattgaagtctcaacagaaaactttgatagtctctaaaacaaaagactctgat

SEQ ID NO: 264067 - DNA, 432 bp, Glycine max
  unsure (1)..(432): unsure at all n locations
tccagtgttggagaatatcttcgttcttgcctacnagattgacttgcctagtgagtataatgtaagtgccactttcaatgtgtctgatctatctctttttgatgcagatggaggagccttggatttgaggacaaatccttttcaaaaaggagggagtgatgaggacataaccaagggcaaggaccatgaagcacttgtaggtcccatgaccagatgcaccttcaacaagcccaacacgtcatagagacaaggctggtcatttgtatagctgccattgatgatgattgaaggcccaagtggagaaagatgaatgcccagatgcagaggcactaccaatactactaattgttgttgaaggcccaaactaacttgaaggctcaagttaaataaagttttagttattattgatctttattgtaattttggcccata

SEQ ID NO: 264068 - DNA, 469 bp, Glycine max
acccagctcgcccaggcgagctcagctagcccattctttctggttgcttcctccacacacaagagccttctggaggaatcttctggatgccccaagtgggcctggttgctattcgcacccgcatttttactaaatacaccccccttttctattgttttgtaactctgtttacgtaacgttacgaaactttacgaacttcgtaacgatacttattttttcttccgcaaggttatgatccctcacgacttatgtatttactctgttttagctttcaaagaagttacggaaacttacggattgcgcataaacacctctttttgacttccgccacattacggaatgtcacggatcgcacaagcctgcttcctggtgatttctgagacgtctcggaacttcatttattgcatgtcatcaagtaatatagcccggacgaaattacggtatgacagttgtccctctttacttacct

SEQ ID NO: 264069 - DNA, 441 bp, Glycine max
tcctctgactctatcttggtcgatctaaaggatgtttgtctctgttatacattgttttgtctaaaacccctctaccaatttattatatacgcaactggtaagtattgtggacatggagttatgcagaatttattttttaaataatattcatactggtgaaaaccaaaatatagaaattctagtcgattaatcacaaaatttaagtgttagtgacacaagactcttaacctaacaataatcgcacagcaattttctaacccgattcaacttaagtctatttgattttaattttttttccaggttgaatcgaacttgtgagtttaactggacctataacttgtcctaagtatcacaaaattgtagtgattatatcttgttactcatagaaacaataatataaaagtgtatttcccttctggttgccatttgctacacttgact

SEQ ID NO: 264070 - DNA, 421 bp, Glycine max
  unsure (1)..(421): unsure at all n locations
aaaccatcatagaagagtgccatcatgctaaaataaatttagtatacagtcaaagcataacaagatgttacatgttacctactttaaaaaacaaccaaaactaaacctttctttccccatctgaagggtgattatatcttgcatcatggttgatttcaagaaatagtaacattaacaaacacacagaacacacatggggatatgttaaatttgatgactgatcaactatctgtctcaaattcagacagaatgtctgaatcaaattgatgtaatgttatatgcatacacagtcaagcttgaaagaatatcatctcaaggcctgatatttctttctcatgtgtacaatcaactntgaatctaagatgaattccgganaattggcctaaattattctaaattacgtttctactcaccaagaata

SEQ ID NO: 264071 - DNA, 400 bp, Glycine max
tctcacgattgtcacgtgctcatgcatcaattgttagccgtggctatacgagacatcttgccaaacaaagtcatgttaacgataactcgcctgtgctttttcttccattctatatgtagcaaagtcattgatccactcatgtttgatgagttggaaaatgaggccgcaattatactgtgccaggtggagatgtattttccacctgctttctttgacatcatgattccttgactgtgcatctggtcagagaaatcatatgttgtggtcctgtttatctacagtggatgtacccggttgagcgatacatgaagatcttaaaagggtataccaagaatatatatcgtccagaagcatttattgttgagaggtacattgcataagaagccattgaattttgttc

SEQ ID NO: 264072 - DNA, 413 bp, Glycine max
  unsure (1)..(413): unsure at all n locations
acctatataacagcaccaaggttcttgttttatgacgctctctttcgttttagcccttntcgttttggagaataattctagttttcttcgttttctactacagtttcattttctattgattaatggaaggctaagtctccagcgttgttttctcttgaggatcaagcacaactctctttgaggctttattattactattgaattctgatcaatttttcctcttaacaattactctatatttgttgctattaatccatgcatgcttagtgcttgattaattgtctctgcgcttaatttatgttcatgcttaatgatcagtttcgtttatgattaattggcgtatgtgttgcttaatcacataatgacagcctcatgttaaattgtgcttagtaatttaatttaaggttggatta

SEQ ID NO: 264073 - DNA, 471 bp, Glycine max
  unsure (1)..(471): unsure at all n locations
ttgttatatctctgtattctctaacttgattattgaatggtagttatccttttgcaaagaatgagaaaccatattgcatgtgcaaacaaaggctntaaattgtagttgcagttaaggcttggttttggtttatagtcacagcctaatgatgcaacaacggctgtgttccatcaaacttggtcattttttcatataacacttaatagagttttggggaggagtcaagaaggaaaggcccctggtggcgtgcgatgtgtgttgttatttggtgcctaacttcctatggttggggattaatttccaatatcaaactctttaatatcaatgttagtctttttccttcttttacaataccttccttttaattcttgcatcggaaatcaattggcgaacatgacccgtaaagtatcatagctgcatagatatatattgttattatttcaagaatcaagcacgttatcagatatgaag

SEQ ID NO: 264074 - DNA, 364 bp, Glycine max
tcactcaattctctatgattcatccattaaatgttgaagttataacataatagttagcttactcaaactttcaagtttcaacaattggaataaaaaccccttccatccaaaatgcttcaatttatatagcttaaattaaaattcaatttatagaagaaaaaaaattgattcacctaactcctggtcatcataaccatagtaatcaattcaaggcaagcttagctactaaagacaatattcatatacacgggtaagattattgtgacattacatgcttcaagccaaccaacaaacaccatgtattgctctctttttaacaaagccactaatcctactcattacacttgacgaaacttatatgtga

SEQ ID NO: 264075 - DNA, 380 bp, Glycine max
atcttagctctatcagttccattttctgacaactcctgcagtgctgcttctgcaccatgttctttcgctagttttaattgcagtggatctccggtgcatagtgaccataatacagcagcaacattctctcgattgcgtggagagccggttcgtataacctcaacaagaatatgaattggcttggcctgaccgatcgctaccctgcctttatggtggcttgcaaggctgccataatagctagtgcttcatctaccattccacccgcagcatcctttaaaaattgtatcggttgggctactataccagcttgtacaactcttgctttatttccctgataatagatacgttgaagatagcagtagcagcatccttcttacctg

SEQ ID NO: 264076 - DNA, 407 bp, Glycine max
gatgtgagtgttgcagagagattctataggaagagaatgacatgaaattaattgatagggtcacgagaaaaagatagagaatagcctggtggcgttgtgtgagctgcaaagcaatacgaggcaaccctacaaggaaagtgtgcgcttatgttctgtgtctaaccatctaattaccatttctaccacacaagacccaaaatctaatgtgtgcaaatatttatatttattcgaaaacactcttaatgtaattctaaaataactattgcatgagggtagaattttatcataataatttatgtataatgtaaactttaaaataagtatagacattgtcattattatcttctaattaaatttaatttacatcttacacatgcctcacttgtataaactcaattgtggatctc

SEQ ID NO: 264077 - DNA, 433 bp, Glycine max
aagaaggggttcatgaacttggtgatttgtgaacagaatagaacttaatgtggtgttcagttgttcactcgctaagcgtgccactcacgctaagcgctaagtcttcacgcactaagcgggtgtcgtaacctacccttcggcgggagggcgacgcgagactcacgggtgcgtcttccaaggaaagataatgcgcggagtcgccaccaacgtttattcgaggaaaaccgcacacaaaccggaaaaggcgtggactacgaactttaagtgtgaaaggttcgagagttgtatttacgcacagggaaggtgttagcaccccacgcgtccgtcacaagggacgacaacctttaatcaagtgtgcaaatatgacttcaatgtgttgtatcttaccttgtttacgttatttatgtacttttatgcctgttggatttatatc

SEQ ID NO: 264078 - DNA, 363 bp, Glycine max
  unsure (1)..(363): unsure at all n locations
acaaaaatgatgacaaaggtgatgacaaaaagctcaaaggtcaatcaaagaatgagttcaagatgttcaagatagaatcaagaacacttcaagattcaagaggaaatttgatttcaagaatcaagaccaagattcaaggatcaagcttccaagaatcaagatcaagattcaagaatcaagagaagacttaatcaagataagtatgaaaaggttgtttcaaaaactgagtagcacatggattcttctcaaaacatgtttaccaaagagtatttactctctggtaatcgattactagattattgtaatcgattaccaatagcaaaatggatttganaaagtttcaactgattgtaaacgttcaat

SEQ ID NO: 264079 - DNA, 432 bp, Glycine max
  unsure (1)..(432): unsure at all n locations
ttctatcaatatacctccaatctttaatggagaagggtaccattactggaaaacccgaatgcaaatttttattgaggcaatagatctaaatattggggaagccataaaaatagggccttatatacccaccacagtggaaagagtttcaatagatggtagttcatcaagtgaaagaataactattgaaaaacctatcatacatggtctgaagaggatagaaaacgagtacaatacaacttataagccaaaaatataataacatctgccctgggaatggatgaatatttcacggtttcaaattgtaagagtgctaaagaaatgtggaacactcttcgattaacacatgaaggaactacggatgtttaaagatctangataaatgcactaactcattgagatgaattatttaaaatgaatgcanatgaaaatatt

SEQ ID NO: 264080 - DNA, 445 bp, Glycine max
atctatccttcctaagatggatcctaacccagtcaccctcattaagaactagctcttttcttcctctattgcctttagttgaatacacctttgtttggttctctatttggttcttaaccctctcatgcatcttctttacaaattctgacctagattccccttctttatgtataaaagaagtgtccagtgggaggggaatgaggtctaacggtgttagggcttgaacccatagacaacctcaaaaggggactccttggtggttctatgaacccccctgttgtaggcaaattctacatgaggaagatactcatcccaagacttatggttgcctttcagaagagcccttaatagggtggataaagacctattcactacctctgtttgcccatcagtttgtggatgacaagtggtagagaaaagaagtttagttcctaacttatcccat

SEQ ID NO: 264081 - DNA, 276 bp, Glycine max
atcgtgggagggtttctccctatatttttagaaccacggttttataacaacagagaatggaagactgcatgtacaataacaactatatgcctttctattttgtataaatcatatgtaaaaggggggctgttttgacaccacatgctgattactgtcttcctggcattactacatcaactgtcgcccctcccatccactcgttgttatttggatagcttatatcatatgatatatttgtttaatatgaattcatatgatatacttatatactgtcat

SEQ ID NO: 264082 - DNA, 456 bp, Glycine max
  unsure (1)..(456): unsure at all n locations
gcaatttggctacaaatttttttattatgttgtgaataattccttagagaatgaaaattgaacacaatacaatataaatactcgaaggtgtaccctatctgatgggtcgagtcctaagcctttacaaaatgaaagataaagcaagtcaagccaaattatctagttcctttgcatgcatatcaacttcgccgactattaaggttttatttcaagttaaaacaacttataggtcaagtgtaacccaatcataatttagtaactgaactatcacccaggtcgctcccaaaggaataaatgagggatttcatataattatttaactaagatctangtttttgtatttatcttgtgattgtcatgaaataaataacataaaataaattgcaataaaaattaaatgacaataaaataattaagtgaagatagaaatactagacttggatagtgacatcaatc

SEQ ID NO: 264083 - DNA, 406 bp, Glycine max
agttgttctggttttctaaaccttgaaaacttgtgctattcatcttttcattcccttctccctgtgccaaaaagaattcgcctaggactaaccgcctgaattctttgtgtgtctctcttctcccttttccaaaagaacaaatgactaaccgcctgaattcttttgtgtctcccttctcccttgtcaaagaattcaaaacgacacagttttttacaaggttgaaagaaatctcccgaccgcacgtcacttggggattggatataggcacgggttgttgccgaaccagtataaaaactcttgtgtgtttgtttccttgttccctactctgttactttccgctgtgcattataatttctgcttttacttttggttaagattctgttctactccttattctcttaacaac

SEQ ID NO: 264084 - DNA, 448 bp, Glycine max
tgtaagattatggggtacccatcacatgtggtactaggttgcggtcgagcgatggtgcaaatcaattgtgcacatccacaaatcacacataagcccaccatccccagttgcccaccttcattgagctcacgtactcccacgtagcccttatcctcgttcctctcaacgccgggtgcccatcaatcctgccaagcttccacaacatccaattaatgtaacatccaagcatcatgaactacacagccaagaaaacagggcagaggcagaaaactctgcccaaaacacaaaccaatatcacaactttccttacttaaagaccccagtaacatttccttcattccaattcgttcaccgttggatcgaattgaaaattttactggaagtccctagtacatatgtctaacatttgaccgttgggatctgctagcaaatgtccagaaccccatat

SEQ ID NO: 264085 - DNA, 465 bp, Glycine max
acacttaaatactaacttatcgatctatatacctgttctgtaaaaaatttcttaaggggagatacataatatctcaatgagtgctctaaggactctatatgtggactagactgttctacccaaacttcattgtttcttacttttcatggcttgattctcactgcgtatgtaaaagaaccttcatgcctaagattggttttatgccttttggtcattaataactttcactgacttcgcttttgtttgcttaactattataatgatttcctagcactataactttaagaatcacctaactgataatacttctttgacatagctacatctagttaacatcaatgttcctcacttagtttcacctttcctttcttcgatacttagagttctctaccaaattaaatctaggattctactattcttggatatctcaaatgttcactttaacctacataagtcttattctct

SEQ ID NO: 264086 - DNA, 424 bp, Glycine max
  unsure (1)..(424): unsure at all n locations
catgcctttatcccttgagtggcatttgcattggttggtatcttggttggttcatcttactacattttgatatttgtattgcatcatgcatcaccatggtatatgtgaaaaaagtttctaagttagaaaagtttcttcataggcaataactctttattttaatcaattacagtctcactgtaatcgattacaacaagcggtctggagcttaaaaagttgagtttcgtatcgatttaatcgattatagtagtcttttaatcgattatgctgttgtttgagacaatgattgatntattcangagtctctactttaatcaattaccaagtggattaatcgattacttctctcttggttagttgttcagaagtgaacaagaacacttcaatcaattacctagagcatctaatcgattactttggtctt

SEQ ID NO: 264087 - DNA, 387 bp, Glycine max
aattatctggggtttcagaccccatgtattagcttatggattacttctgccattactcaaggtaaaccttttacaatatttaggaaaaatatcaattaacgcttaaagtgctacacgagaggttgagagaaacttctaacagtattaatcgccgaccctaaagggaagatgtgttagcaatgggccttctcgacgtcaatccctaggtggagctgataacatctcaaaactaacatctaatgggtttttgaagagatcaccgtccactcaaattaggtcttctgtgtgcttaagcacagttttgaagcatgctaaaggcacatctaaatcatttgatggtggtacaaggtcattataaaagagtaaaattcttctaaatggaaaacc

SEQ ID NO: 264088 - DNA, 335 bp, Glycine max
  unsure (1)..(335): unsure at all n locations
ttttttattccagttattataaccacattcaacaacgctcctgaacgctatcaaaaaaaattctttcaaaatatacatatatctatatataacttgcttctcttgctccccaaatagtggtttctggctcatattcttgacttttcttaaagaataccatcttggngcgtgaattgccattgtagagtttataaaccttgttttcgtccaatccagtgaaattttgtatacacaggatgttgacagatagtatccctcaaatttttcggttcacgcctcgaattaatgaacgtttactattctagacatttcattaatattcttacacatctcac

SEQ ID NO: 264089 - DNA, 281 bp, Glycine max
agcagaaaccatacggagcccccgaagcacacggcgaaaacaggtggttggacaccataaaccaacgaaaaataggtcccgaaaaaccctaacaacaagacttaactggcacatctcttatataatcatggaccaaataaaaaaacaacattcaagaactaaaccatcattggggtactctcacaaaccaaacaaaatatctaaccaaaaaacattccagcataaaagcactgggatgaaagaaacaaaccaacaaacactctcacagcaaaagccaaccc

SEQ ID NO: 264090 - DNA, 425 bp, Glycine max
  unsure (1)..(425): unsure at all n locations
tagagctttanagaagatacacccaaataagtgttgcatagtttattaaatccctcaaacaccttttcctaatttgtatgtatccaaaattaaccatgtgggttaagtttggttatgaaagtgatagagagaacctatggaatgcgagtagctcatagagagtctctaagagtgtagcctaaagaggtgaagggaaatacttgtactgtctctcccatgcccaagtgtaatgttgtggttaagatggtttgcttcccaagagtggggagagttttatggagagggaaacctaatgagaggtgaaggttgcttaccaaggatcgcggtggttttatggtgagatgtcttcccttttaggaattgaactactctatgggttaagccctcatgaataagtgaataatacttggattgtctcttccatg

SEQ ID NO: 264091 - DNA, 433 bp, Glycine max
  unsure (1)..(433): unsure at all n locations
agcttctntatagttataaatcaattatatttattgtgtttgattaaaggcgcaagtacttttcacatatgctgaacttaacatttccttaaagctttgaaaactcatgtttgcgtacaaatgttatggctctgaacatgacttgccaacggcaaaacaaccattttgtatgattagcaagcaaaataaaagtcactactcacaactctaaatgaaaatttgagtactgaatagcataattaacaaatagtttcaaaattataaaaagaattcaaaaatacaaaaaagatgcatgatgaacgtcacaatgtgccataaacccggactacctcttctttatctctaacgaatatctcagttccatgtgacaccttctgtcatcatcttcanactataatcacagaaacaaagagccgcaacgctatacaagtag

SEQ ID NO: 264092 - DNA, 433 bp, Glycine max
  unsure (1)..(433): unsure at all n locations
agcttgnagaatggctagacatgtttctttgttgtgntcggcttggatcaaggataaaggggatgctccataatattcccacgacacacatgcaataatgatgatttggaaactttatgcaaaactggtcatgcatgcatctatgcggacacttaaatgttaaattattatggtcatgggatgctaaggctcaagattcatttcctctattctaatcacaccaaagctcccaaaatatggtcttttatcaatttgtgcattcatccgagtccatttcgggcgtccggggaaatttcacagcattcacccttcacgtgtagacacattatccaaaaatcgatcatgatcaatgaatttctctaagacaggttggaaatcgtctcttttcaacagcatgtcggttttacatcttgacaacttatttatttctttt

SEQ ID NO: 264093 - DNA, 454 bp, Glycine max
tgtagaatggctagacatgatacatgtcacggtttggttttgttcaaggataaaagggatgccccacattatttccatgacacaaatgcaaaaatgatgatttggaaattttatgcaaaactggtcatgcatgcacctatgtggacgctcaactgtcaaatttctatggtcatgtgatactagggctcaggattcatttcctctatttttagtcaacccaatgtttccaaaatatgtccttttatcaatttgtgcattcatccgagtccatttcgggcgtccggtgaaaatttcacagcattcacccttcaggtgtatacacatttttctaacactagttatgatcaatgatattttttaaagaaaagttggaagtcatctctatctcaaagcatgttggttttcagctagacaacttatattatttattctctctttctaacctattttcatt

SEQ ID NO: 264094 - DNA, 421 bp, Glycine max
agctatgacatacatgcacccgctttggattcttcctcggcatgaccatgcacagggcgagattgccatacattttctgacgggactcaatgaatcctatagttcaataccgcgccagattctttctatggaactattcccttccattaatcaaatttcttctctagtggtctaagaagaaacacaaagagagattggaacttctatttctgctctccactccacaaatgatgcttcacaaactcatgcttttgctgttaaagattccagatatcagcctgatcacaagggtagtgctacttccagaaatcgacctctttgtgcacattgtggccgactcggccatactcaagataagtgtttcaagttacatggctcttctcccaattacaataagaataaaccttcttcttcttatact

SEQ ID NO: 264095 - DNA, 407 bp, Glycine max
  unsure (1)..(407): unsure at all n locations
tgagctcactgttgctgcctcacaaagatccacagaatttgtttctgtcatgttcttccttgcgagccctcttggtttcttgttcaagggctcttgcggaagccgcattntcttctcgtaactcggcacactctttcggatgtctgtagggactaacttgaatttttctttggcaagtcttgcttttcctagttcggcttttagagctcggacttcttcatcctcttccggagcttcaaagttctcttcgttgataattatcaacttggagacccaatctaaccctcacgtacgaactttcagccattcatgataaccactgaagatgccattacggatgcccctaagttctttatctttcctcaacgggatttcccatgccttatggactctttgtataaccttga

SEQ ID NO: 264096 - DNA, 429 bp, Glycine max
cttaagtcacctgcggctgcagcttatgatgatgaatcagtttctgattttcgtcgacaagatgtgccgagtgccaaacatgatttccagactaaatcatgatcaaattcaagaatcaagagaagtttgatttccagattcaagaccagatgaattcaagttccaagagaagacatcaagaagacttcacaagggacgtattgaaaagatttttcaaaaaacaaacatagcatagttttgtttttcaaaagagtttccacacaattttctaagttaccagagtttttactctctggtaatcgattaccaattttctgtaattgattaccagtggccaagtttgatttcacaagctttcaattgaatttgccatgctctaattgattcccaaatggtgtattcgactacaagttcttggcaatcgactac

SEQ ID NO: 264097 - DNA, 448 bp, Glycine max
tcaacctagaggacacagaccattccaagcggtggttaataatatcgacaatggctacaagattgacttgcctagtgagtataatgtaagtgccattttcaatgtgtctgatctatctctttttgatgcacatggaggggccttgggtttgaggacaaatccttttcaagaaggagggagtgatgatgacataaccaagggcaaggaccatgaagcacttgaagggcctatgaccagaggcagacttaaacaagcccaacacatcatagagacaaggttggtcatttgtatagctgccatagatgatgattgaaggcccaagtggagaaagatgaaggcccagaggcagaggcactaccaagactactaattgttgctgaaggcccacactaactcgaaggcccaagttaaataagtctttagttataatctatttttatgggaattt

SEQ ID NO: 264098 - DNA, 290 bp, Glycine max
aatactatccagtatcggcgcgggcgttgactaaactcctatcccaaaccataagatccccccaccaatccacatctgatgatgtaccaccttcataagaataggctcgagtagacctgtatttgccaggaaccttacttaaccacccgaaacgaatgtcgggctctttgctgactactatgatataaacacggtagcttaataataaccggctgtgcagcaataaacaatgctactctgaacgggactctttatttcgccacgatatttcctgatacttcattatcaac

SEQ ID NO: 264099 - DNA, 252 bp, Glycine max
ggccaattctatcaaaaagcccaagccaagttttgacaagatatgaacttcgaagccgtaaagcaagatgagaaaaaacctgagccacctccaccaccttcgccaaagcaagaaccttctaaagtggagatcactaaagtcactcctcccaaaattgtgacggatgaggacgtcaaaaaagaagatgaaattaaagacgcggaaagactagatgaaaccaaaagccgtactatcaatcatgaccgtgaaaaa

SEQ ID NO: 264100 - DNA, 427 bp, Glycine max
  unsure (1)..(427): unsure at all n locations
agctagatctgngagatgattattttcctttctctcgctctggtcactcatccattcatgtcaggaaacttccaaagaaaaacgtctgattgattcttctgattatcttattcaacagatatcctgactattctattattatttctttcaagatattctgattatcttattattatctcgcctttttcttatttaaccgaggttacagcgtggacgatcgattggatcttattttaacagtgattaaacgagattacaacacaaatgatcagttgaaattcattctatcaattattagacaagataacgacttcaatcaacggcaaaaatctcgttcaaaacgtgaaataagaaaatccgaaacagaccagatgaagatgacagctcacaaaaccagaaacgaatcgcaagcctcggattccaacac

SEQ ID NO: 264101 - DNA, 455 bp, Glycine max
  unsure (1)..(455): unsure at all n locations
tctccaggaagctacctagtctataaatagacgcatgtgtattcacttgttgtaactctgatgaatgagagtcttgtgagacacaactcaaagttcaacttctctccctttttcttccttcaattatgagctcccccatctctctttctctccctctttctttttctccattgaagcatcctctccaagcttcttatccaaggctcatcttggtggtgaagctccctcttccatgacttattccctagtggatggcgcctcctctcacctcttctcctttgtcttccgctgcatctccatggtgganaatcaccattaaaggacctcattgaagctcaaagatacagtcttcatagaagccccacatgcaagctcccatccagtggtatcagagcacaagagcttcaagtatgtgctccttaaacctccatatattattttgctttaccttctct

SEQ ID NO: 264102 - DNA, 366 bp, Glycine max
ctaaatacacatccctttgtataaccaaactcatttaagaagcttcaataacttaacttgaactcatctaaacccaccaaaacatattatacaccaaaatcataacattttttcattaattttattatatcaaataacaaattaaatttaaattctcttgactttttttaatcaataacttaatcatacaattagaaaaatcacaatgttacaaatacttaaatataattataaatgacatgatattaatatacaatatgcatttaaataaacaaattctattgtgtttgtataggataataataaaataatattattatattaataaaacacccccccgccaaaaactttaatttggcaataaga

SEQ ID NO: 264103 - DNA, 466 bp, Glycine max
tccctgagaaacttcattgagaagcttccttgagaagatttctagataagctagagcttagctacacacacccctctaatagctaagctcacctccttgagatagctaaactcaccccatgccaaaatacatgaaaatacaaaaaagtccctaatatacacggctaaaaccctatactactagaatggcaaaagtgcaaggcccaaaagaagaaaaaacctattctaatatttacaaagaagagtgaatccaaccttggcccatgggcttagaaatctaccctgaggttcatgagaaccctagggccttctttagtagctctagctcaatcctcttagagtcttctatccaataccctctgggggtaggattgcatcacttggtcaatgaggaccttggaaaccatgaagatggcaattacgatggagacaaccatgtggtcattgatgtgtcattattttctctt

SEQ ID NO: 264104 - DNA, 429 bp, Glycine max
tgcatgctcataccacatctttatcatcctcatcttgcccccaatatatacgcaccctaaagagctatcttcttccccataaaattgctttatttaccaacatccaagggtcatatacctctttgcttatttaattttgatatgaatatacttcgatatgtcccctgaattcctacaatcacaaacactaattgatttaccctctttgtcattctcctttcaagcatgttgtggtctagccttcgatccacttcctttagagcttgctaatttcgagcaaccaatattggctagacaaactagtttctcatgacaaatatcctatcgtggaccatatttcttgcataagaaacaaaccaagtgttcataaacctttatatttatggaggaaatatcactccatgagccttataggccactaccaacttc

SEQ ID NO: 264105 - DNA, 456 bp, Glycine max
tgcatgaattacattctcccccattctcaaccaaactattcttgttatcataaaatcttcatgatttacaaatgttaaaaccacaagaaaaacataaatttgcaaactcaaaatatagtttttacattactaacgcgaatagaattttcaatgtattattaaaggataaaaaaattacacttagtgataatcataaaattcatccatttgcgcaatgaataagaaagagatattacaaatttcactatgtctttatacattggactaataattgcttacgttttagagatatgatacaaaaggctaataatgaaagaaagcttgaagttgaagaaaaacctatgcaagtggatattaatcctttccaagtccagaccaattatgtcgaacctatctagattttgatgtacgggctctgatgaacatcaaagattgaaatacctttgtctaaagatg

SEQ ID NO: 264106 - DNA, 391 bp, Glycine max
ctgcagcttttatttcaagatgagatctttttttctttttcagacccactttgatcctttcgccgacaaaaaactaaatcgacaaatcttgaaggcgtgtatcccacaattctttcataagtaaacactaataacgcgtctactatcattgctatcatctacttctctatcattgggggcactacttgagctgccagatccctccatcgttgggcatattctttgaaggattcatgctcttgtttacacatgctctgtagatgcatcctattcacagccatatctgaattgtactgatactgcctaaaaaaggaaaacattaggtccttccaagaatggactcgagaaggttccaaattagtataccaagtgacagctgccctacatagac

SEQ ID NO: 264107 - DNA, 465 bp, Glycine max
  unsure (1)..(465): unsure at all n locations
ttccttaggttctttggtgctcttcacatttttttatattaagtttcacctcaataatctcttaataaaggtttgcattaaagatcaacataaattaccgagttgaaattccaattttgattgaagaatagcaccaaaagcacttaaggaacggtatctaagtttcgtccttattgttttcagttattccttgttctcaatggaaagaaaatntttatgctcgattatatggcaatatcttttcactttaccctcatttgtacatgaagtagaaccctaggcccagttttcatgttttaatttattcttctcaggatgagtctccaagtgaaaggaagattaccaaattatgtgaatatgctgcaaaaaaccctttccggattccaaaggtattttattaatttattttgcatgtgtattgcgaatttcttctttacacaaagaagaggaaatcagatatgcttg

SEQ ID NO: 264108 - DNA, 370 bp, Glycine max
atcttaacccttgctttttctgagcttcatggagttgagtcacatgaactatcatttgttctttaatcattttcttcatattataaggcctctcatattgaatggtacgaaagctggagtacgccattgaatgaacgaaccgttgtcggcgtcctttataaagaagatgcaagcatcatcgaagtaatacttcctaactggtcgtaacacttgaaggacgtcatggtgcttagcattgtcattttcatcataaccaaaagtgaaggctctatgagtgtccatccacatgacctggttctagaagatcttaacatcatatgcgtcaggagcacgaacaagccttttccccctaaacagggaactcctattc

SEQ ID NO: 264109 - DNA, 473 bp, Glycine max
  unsure (1)..(473): unsure at all n locations
tctcaacttgtaacttgggcctaaattcagatagcatggttatctcttgttgaagagcttccttagccttctttgttctagcccttgccataggtcctccaagtccttctaaaggtttcttgcccttattccttgccttgtcctcatcacctgtgatcaatgctagaaatcccagtgccctgttggacttctttgagtccattggtgtctcaaaggtgcaatacctacaaactggtagatggcatccgaggtaagctgtgctacatgaacactgaccctgngtgagaataatgtataccaactggcatttaggcagtgggagatcaaaattatggtcattgggaatgatgttgctaagcagaagcatcatccagatctaggtcaaaggtcatgctagtgtgtatgatccgcacctgcttcctaccatgccccgtgcaaaatcatgtcctgtggagcacagtaacttggcctat

SEQ ID NO: 264110 - DNA, 401 bp, Glycine max
  unsure (1)..(401): unsure at all n locations
cactttgagtgattaaatacatttttttctacatatattanttgngaaagtcaggagtgtcttagtgacagagaatatttaggtcttaatctcacggggagactaagggtagtatcaagagtggtcttgagagtacttgttgtaaccagaaggggcatagagaatacttggttctaatcaaagaattgattatagaaatccttcaagatttgaaggagagctggacataaccaagagttggggtgaactagtataaaacatttatgttgtctttactacttctatataattaggtttttcctacaatttatttctacactactgtatccaagttttgtgaattggtttttaagcacaatgtgatttcgaactcctttgatgaaacccatcgtccattgata

SEQ ID NO: 264111 - DNA, 328 bp, Glycine max
cattactataacaacatacttaaaaccaaaacttaattcgcagagccctcttgcaagactaagttccaattctgcttcattcaagtactaaggcaacaatatattttccaatgataaaatcagctaactaggcacacaaatggctgatcagaccacgagcatacaaaatttaagcactgaaagaagcattgaacacaagaatcacaatcaattagatatgaatatagtcacatcagctgttcattagaaatccccaacaagggtgcatagccagctattacaaaagacaccctaacaataataagcttacaaaacctacgcatctctg

SEQ ID NO: 264112 - DNA, 439 bp, Glycine max
  unsure (1)..(439): unsure at all n locations
agcttaacagtattacaaaacncattatattttttctagcgcgagcatggatcttcattatgtataccatgaaacaaattactctatattagctgtatcaatgaacgtgggtaagttaagttttgtgcctgaacctctggtagtgcaacacttgagaaatattgcggcaccgaagtacttgagtaatcttccaaggtcactcgtcgaggttgctcttcaaccattatatcataccctaatttcgttcggggacacttgctatcgactttcgaaccttgtttgttccctttgggaccctcaaaacaagcatttttgcgtaatccataaagtttcgcaacattccagaagtcaaaacaaccattgttgtgtaattcgcaaagtttcacaacattccaaaaggaatagcaagcatcgttgcgtaacccataaagtttcgcaa

SEQ ID NO: 264113 - DNA, 450 bp, Glycine max
  unsure (1)..(450): unsure at all n locations
gtactatgcagagaatatccaaggagaataccttcatcttactttcatcaaattttcctaaggtatcctttccattattcaatacaaaacatttacaaccaaagatatgaagatgtgagatgtttggttttctgacattgaacaattcatatggagttttctttaaaatgggtcttattaaagccctatttaaaatgtaacatgcagtgntaacggcttcagcccaaaagtattttggaagaggagtatcatttaataaagttctagcaatctcttccaaagatctatttttcctttcaacaacaccattttgttgaggggttcttggtgcagaaaagttatgcccaatcccatgcttatcacaaaataattcaaattctttattttctaaactcaccccatgatcactcctaatagatataatcttgagaattttcttattttgaatga

SEQ ID NO: 264114 - DNA, 431 bp, Glycine max
agctagcttctacagtgagaccttttattcttctctgcctgagcccacacctgtgcagtttaattcaaagccagctaacccacaatctccagtggtgaatccaccttcttcgcctgagcttgaagtagttcccccatctcctcctctgatatcatttctgatgcatcatcagatgaagtagctgctcctcctgactcacaagctgcagaaatagctgacccccctgtttccccaattggaggaattactgatctttctgattcatcatctggagaagttgttgctctcaccgattcctcggtttaaagacttttgacattgctgattcttgatgtcactttttgcttttccggttattattataattatgagttttgtacaatatttcctttatatttatatacactgctagctttatttataaacagttg

SEQ ID NO: 264115 - DNA, 472 bp, Glycine max
  unsure (1)..(472): unsure at all n locations
cgctttgctgattttgttttccttttatcatcatgtnggtttatttttcatgttgattgtttgtgggaggcataagtttttagtagttggagatttctgggattaactctccctcaaggtttgaagcaaacagttggtaggcactataagaattatttgatttatggacaattattgaagttgaattcattcttttattatgcaaaggttgtttatatggaaaccaagtcaaaccaaattgggttcacctatgctaatgagcttatagtcattctcatcggtatatcttgattcttatagattaacttattggttcttatgcttcatattatagacttatttgtattttgtgatttttgaagctgatcttaattcttaattattataatcgtattaaataaaaattattttccttgaatattaaataacatcttacaatggatgtatattgaaagttgccaaccatacaatg

SEQ ID NO: 264116 - DNA, 409 bp, Glycine max
  unsure (1)..(409): unsure at all n locations
cttaagcaccgcagctgcagctaacaaaagctgcgaagtttgggtaaatttatagcactncccttatggtaacaaacataaaacgggaaaaagtaatatcgtagccgacgctctatctcggcgacatgcattactttctatgctcgaaacataatcgcttggtctcgaatgtttgaaaagcatgtttgataatgatgaaacttctgaacaaattttaaaaaatgcgaaaaattttccgaaaatggcttctttaaacatgaaggctttcttttacaagaaaacaaattgtgtgtgcctaaacgtcctactacaaatttgcttgtctgtgaaccacatgaacgatgtttaatggggcactattgggtccaacagactctagatacattacaagaacaattttattggcctc

SEQ ID NO: 264117 - DNA, 419 bp, Glycine max
  unsure (1)..(419): unsure at all n locations
ggatcttaagcacctgcagctgcaactgttttggtgaaaatttcaggtcattatctaagactgaaaagctgaaaggtggcaaatcaatgtcttccttccttggtatattnttgtaacgcttattgtaaaattttcttagagaccctgaatggttggaaaataacagtatataaacctggacacgtagtataaacatttttgtttttgtgcctaattgttagtattagatactaaattatatctatatacttacctggatttttaattaccaatatacatacacatgtgataattaatccaaagatagtcacaccaacagctatcgctacaatctttttgttgatttttttttggccaccatcatctaaaagaaacagagcatgatcagtccccaactttaaaataaacagctctattga

SEQ ID NO: 264118 - DNA, 461 bp, Glycine max
  unsure (1)..(461): unsure at all n locations
gagggatgccttgtagaaaagcaacacanattacttattntcaactaacaaagcatggagagctaaagacttgttagagttaatccacactaacatttgtggaccgatgacgactcgtcaataaacttgaataggtacttcatcctctctattgatgagttttctagaatgacttgggtatacttcaaagataaattagaggtcgttggaatattcatgaaattcaaagctcttgtcaagaaacaaagcgggaaacatattagattaatatgaattgatcgaggcaaagaatataactcacacaagtttgataagttatgtgaagatgaaaggatcaggctacaacttacaatcacatactcaccgcaacaaaatggtgtgtctcaaaggaagaatatgacagtcatggagatggctagatcaatgctaaagaanaatggtttgcgtaatacagtttgggc

SEQ ID NO: 264119 - DNA, 430 bp, Glycine max
  unsure (1)..(430): unsure at all n locations
agctaaatggaaaaaaatcctttccttttccgtattcncattatgcttggaactttttctagttcttattgggcgattcttcgaagtcacaaaacacagcagtgtaccttaacttcgcacataccgcaggcaaatgtgccagcagtatcatgtgtttcctttctatcaaacaaaatatttaaagataagaatttcactctgaatataatgaccggcacgaaatctgtgcgccgctggtataatgataaaaaataaaataaaaataggaactaacgcgtatgtatgggtagtattttttcctgaggggtgacatgaaagccgntatatatatttggacagtcgagaccaacgaagaggtttctgccagtgtgtaaaaactgtctgaccagaattagtttcttttagctatgatatacgattntgaaattat

SEQ ID NO: 264120 - DNA, 489 bp, Glycine max
  unsure (1)..(489): unsure at all n locations
cggacctataaatctcagctaagcaggggatcacacaataaaaaaagggaatttcttttattccttgngtagtttgaagagtctgttagttagttagttagttgtgtgatagtttaggatccggccaattcttaaattttgttcctttctcatactctggagtgggtatgacttacgaatccccccttcttaaattgtgatctttgatctcatgtgcatgattccatctctctcagatagggaattctatcagtcccaaatcaactaaatgggactaatttatgggctcaggtgttgatataaaggaaaaagggtcctgtggaggttccaaattttacatcggacaagctttctccagccaactaggaaccttaattttgttgggaacttgccttatactggtgttatacaattntaaaacacatgtatatcatgtatgtacttgcattgancctctgtattttcttctttctcacggaacgcacatgg

SEQ ID NO: 264121 - DNA, 429 bp, Glycine max
  unsure (1)..(429): unsure at all n locations
agcttgtagaatggctagacatatttcttttgttggttggntcggntcaaggataaaagggatgccccacattatttccatgacacaaatgcaaaaatgatgatttggaaattttatgcaaaactggtcatgcatgcacctatgcggacactcaagtgtcaaatttttatggtcatgtgatgctagggctcaggattcatttcctctattttagtcaacccaatgtttccaaaatatgttcttttatccatttgtgcattcatccaagtccatttcgggcgtccgggaaaattttcacagcattcacccttcaggtgtacacacattttttcaaaaactagctatgatcagcgaatttttcttcaaagaaaagttggaagtcatctcttttcaaaagcatgttggtttttcaactagacaacttatttt

SEQ ID NO: 264122 - DNA, 473 bp, Glycine max
  unsure (1)..(473): unsure at all n locations
cgcctttatccatggcctcctatggtggtgagcttcttctattctcatcttctccttgaagtggcatctcctctctctcttccttctccattccgctgccattcatcttccaagaagcaaaggaatccattgatgaagaagatcctaggcctacaagctccaatggagcttacatcaactccttcaagagctttatttttcctctccacaacaccattttgttgaggtgctcttggggcgggaaaactatggtgaattccattttcttcacaaaaattntcaaaatactcattntgaaattcaagtccacgatcacttataattgaaacaatatttagactnttctcattntgaataactttggcaagttcgcgaaaggcatcattntttgtgtttcgaaaatgaagtccaagtgtacctggaataatcatcagcaattactaggtcatagtagttaccacctacactcatag

SEQ ID NO: 264123 - DNA, 267 bp, Glycine max
  unsure (1)..(267): unsure at all n locations
ggaaaaagtgagtggacggagatggaaaaaaagggccaaacatttatgccaaatgaggtctcgaacttgaagtgtaatttcttcaatgatcaaagttgaaaaaatacacacataaggcctttatttataacctaagtatcacacaaaattggagggcaattcgactntntattcaaatttcactngaatttgtggaaccaaatttggagccaaaatttcactaattatgaatagtgaatttaattatgggtcagcccactaatccaa

SEQ ID NO: 264124 - DNA, 434 bp, Glycine max
tggcgggttcaggtgcaggtgctgctaatggtggaggcatattgttttgcttgccagacctcaaggtgatggcactcacatttttcggattctgcacagtttgtgaaggcaatttgtcagaattttgggactgagcttggttcatttgagtagccatctgccccatctgatttgtcagactctgaatggaggctcttgtctcttgctgaaattgcatattctggatggtcatttgcctcactaactcttctaaggaaggttgaggatgagcctcagttgcttgttgtcattgctgtgactgctgctgctgttgttgcattggaggaggaacatatggcttgcttggaccaacatcattctggaaaggatggacaggttgttgttgttgtggaggactcgtccatctcagatatggatgattcctccaacctgga

SEQ ID NO: 264125 - DNA, 295 bp, Glycine max
  unsure (1)..(295): unsure at all n locations
aattcaagaatgcttcaacacacaaagccttgtttaagattcactaaaaccaagccttgccttanaacaaagtgctttcaagacatgcaaggctctggtaatcgattaccaggaagtgttttngcccccanaagacagggttgagaaatagctgttgaaaacgctnttgaatttgaatcttcaacatgtcatcgattaaatgtgaatgtatgtatacatgaatttgatgatgtnaaaaaagaatnntaaaagggtgggttaaatgataagcatttgcttcaagaataattcaaga

SEQ ID NO: 264126 - DNA, 308 bp, Glycine max
tgaagcgggttgtggctggttgtgttcgaatcggaagatattatttataatagaagaagaaagaaaggaagaggcatgggagaaatagagagataaatggaattaggcacagaagaagaaagaaaggaagaggcacaggagaaatggacagttgtagggtcacgtgtcaatcttaaaaaatttacaaaattccaattctgttaactgcagggggacacatgtcaccacctgaagcatgggcacaataggcttttccctagacatttcatttataagacttagtatagatataataagggattgggttc

SEQ ID NO: 264127 - DNA, 343 bp, Glycine max
acatattctctctctttatatcatctatgactatcccctctcatggtgttttcttgctggagaggcaacatgtgcagaaataatccacacacctcgagaaacaggtgaaaccctggaaatgttgtaactcgtgttacaacttaaggagagatatctaatctaattacatcgaagtcttttttttttatatccttggagaggaaaacgaaattgaggcgtcaatcgcggagaggaaatgatgtatgtcaatttattacttgagcgcatcattagttcataactaggcctttcccatgacacgtggagattaaatcatgtttttttttctcaaacaatatacatt

SEQ ID NO: 264128 - DNA, 474 bp, Glycine max
  unsure (1)..(474): unsure at all n locations
cgaggcagaagggagatacatatgccattcacataccatttatatacgggatatgctggagaaactaaagagtatatatcccaactacaaataccctgcgaagtaagattctcagtttcacttgaattataatacaaaggaaagttgtagtaataagccaagtatcaacctaaatgtgtcttgacccttattttggatttgatgcacctgcatagaaatcttatttatgaccccaagctccagcttgttgtgtntggtctgaattcttgatttaactgctgttattgataatttcttattttatatgtacatacaaattttgtaattattattagaatatgtatgatatatgaatggttagtacacactctaactattggttgaaatttacgtggaatccactaaatgatgtgtgccctactccctctttgctagctctacatgaatttcacctaataagcgtgttgcaagcac

SEQ ID NO: 264129 - DNA, 439 bp, Glycine max
  unsure (1)..(439): unsure at all n locations
catgcaagcttgncttatcagttgtgcgagacctattccatcatttttaccatcatcagcatgtaccaagatgaattatatctagtcaccgtccacgagcacaaagagtgggacgaatatgcccgagtgtacgcagaaaaggaggctagaggaagggtaattgactcgttacatcaaaatgcaacaatgtggatggaccgatttgctcttactttgaacgggagtctagaactcacttgattgctggccaaggcccaaacaatggcggacacctactccatccccgaagagatccacagacttcttagctatttgtcaccatatgatacacttaatgacccatataattaggaaccgctaggaagtttgtatgncactcaaatcctgactacgtataacttttctgaataaaatgagtctatcccgtgtttttactcca

SEQ ID NO: 264130 - DNA, 464 bp, Glycine max
  unsure (1)..(464): unsure at all n locations
tcaagaacccgttcaagagtaggccccattaattcttctttttatagcgntatttnggaacgcatggggaatggccaatcagcctacccagannattctaaaaatgctntgttctactcaccattcagatttgctatttattacaaaacatttgacatatatcaccgatattcataattcctattgacataaaagtgttccctctaatctctagtcatcacaaacatagagagacagaaagaatagtcaagggagtgaaatcttgtttttctcttatttcaaggaatcaaagtacacaagagagaaacctcattatggagaaaggtacgcattgtttatctattatttgtgagaatcatatatttcaagatcttattggctctctataattggtagcctacgaaacctctaatattttacatgtggtatcagagcatgtgttataaaatttctgactcttcaat

SEQ ID NO: 264131 - DNA, 470 bp, Glycine max
ctcccattctctatggcaggtaaggcaaagacatggctctttttatatccaaacaaaagcctaaatgaaattctgataccaatgacagatgtcgtaccggatgtcacgacatcacgccttaaatcatgcagattatatttgactgtatgaacagattaaataagtaaataacacaagagaattgttaacccagttcggtgcaacgtcacctacatctgggggctaccaagccagggaggaaatccactaaaatagtgttagttcgaagatctaacagccactggttacaaccttctcacctaaccactacccgtgcaacctctacctaagagccactcttagatatgagaacccctctcactccctctcaatcactctcccgtgtttacaattaaatcatagacataccacagattgctctctgaacataagagatcaactctacacactcaggtccaacacttgatggt

SEQ ID NO: 264132 - DNA, 397 bp, Glycine max
  unsure (1)..(397): unsure at all n locations
agctatatcaaatggatgtaaaatgtacattctttatatagctctattcaagaggaagtatatgaagatcaaccccttggatttgaaaactcagacaagcctaatcatatttttagattaaaaaaggctttatatggattaaagcaagcccctaaggcttggtatgagcgtttgagtaagttccttttagaaaatgatttctctagaggtaaagtagatactacttttttcataacgagaaaattaaatgatattttattggttcaaatttatgttaatgatattatttttggatccactaatgaattattgtgcaaggaattctctcatgacatgcaaagtgagtttgaaatatcaatgatggaaaatgntaagnanatggttanannaatgagta

SEQ ID NO: 264133 - DNA, 488 bp, Glycine max
  unsure (1)..(488): unsure at all n locations
accttaaaactcagcttcctcatattcctccacccgggattgtatctattgttgtatatgtcataattcgtctggtggcggattttgctgctgacgttgaagaggtctattgtagatgtttgcagcataagcttcacgctgttcaattgttccagattgttgcacagaagggcaaaggtctgtatggtggtcggcagaggagcataaaccacagaatcttgcgataggtacatatttctgattcaaagccagctgggttaccaggntaaccaaggcatctagtttaccttcaagcttcttagtttaagctgatgaagatgaattcgtggctacttcatgcactcctctaatgacaatagcatcatttctggcactatattactgggagttggaatcatcttctaattaaattcttggcttcagcaggggcatgtcttcaagggctcaccactggcagcatctatcatacttctcttcatgtcactgag

SEQ ID NO: 264134 - DNA, 436 bp, Glycine max
cctgcaagcttaaggctgctcgactgctctttgttgctttatggaacggcacacgtctgtatggtggtcaataaaggagcacataccacacacccttgcaacggtacagatttctcgatcaaggccagctgggttaccaagttaaccaatgcatctagttgccctcaagcttcttagtctcagatgatgcagctgagtctgttgctacctcatgcactcctctaatgactatggcatcatttctggcgctaaactgctgagagttggaagccatcttctcaattaaatttctggcttcagcaagagtcatgtctccaagggctccaccactggcagcatctatcatacttctctccatattactgagtccttcataataatattggagaagaagtcgtctgatatctgatggtgggggcaactggcacataatttc

SEQ ID NO: 264135 - DNA, 468 bp, Glycine max
  unsure (1)..(468): unsure at all n locations
actagctaactctttcaggttgttataatgagcttttgttatttttccttcaccaattaacccacatgcgttcgattaatctgtgcacgcttcgtgttcgattaattgcctctgtgcttaaattgcgttagtgcttaatgaacatggggttaattggtgtatatgttgcttaatcacatattgacagccctaaattgattttcgcttagtaaattaaaatagggttggattaagtggttaactgttagggacgaattcttcataacctaggacaagagaatggcttatgaatcagaggaaacaacacatttttactattattaatttcgtattcgaattttcttgttctttaattcacacaacaaacaacccccccccccccatggttactgttactactagtatattatgaacaatnggtttatcattgctcgttgagaaacgacctaggatcactttctagttact

SEQ ID NO: 264136 - DNA, 435 bp, Glycine max
acctgcggcatgcaagctaggacccaggctacaaattttttttttatttaactatggctaacagagcaactaaagcttttgacaataccaataaccatgggtaacactaactatttacttttaaacaaaacaagccatatatcctggtcaagaaaacatatactaggagttattttctttataaatgattatgaaaatgaattatccgcatcttcatgttcccctcctatccatcaaaaggaataagacaaggaactttgttggtcaaacaaatatcaaaataacaatgtcaaaacaacaattatgtacaatgatttataatttagtccccacaccatctatagaacaaattaaacaccttggacctaagtatcatgactaaaaggcaaactaacaaaaaatattttgatccttcccacttgttcttaggccact

SEQ ID NO: 264137 - DNA, 472 bp, Glycine max
  unsure (1)..(472): unsure at all n locations
ntgccaagagcttcgattcattgaggtcgccttctatgttgattacatcatgcttgtcgagtccaacaatgtcgtctccacgtcattttaacgtgaaggatatgtgggagccgacaaagcaaactgcgccattgatgaggacggacatgccaccttgacaatggatctaggcatagatgtggacgtactccttccactggataccgccctaggaggcagagaggtagtagctgctagaatcaacgaatcattggaataagttgagatcgaagtcaggtaagttgaagaagatgactttggcggtgaaagcggagtaaaagagggaggtgagggtttggaggaagtgggggtgagagtgagagtgcgagagagggtttggaggatgtggtggtgagagtgagagtgctagagagggtctggaggaagtcggggtgagagtgagagtccgagagagggtttggagaaagtgtga

SEQ ID NO: 264138 - DNA, 300 bp, Glycine max
cttcaacgttacctaaatgtttcttgggctgaccatcgactttgtcatttctccactatatggcattttattcttagtatattggccagcgcatgtaagaccacttaatgacttggccaattcatgaatatgactcccacacatcaactttaccatccaaccttgccctacaaccattggtctcccacgaagcttgaagggacacccacatttcctacttccaatatctcctttaacaaactttcctcttctaaattatactccccactctatccccacccattaacacaattgacttct

SEQ ID NO: 264139 - DNA, 410 bp, Glycine max
acacataaaactcagcttcttgaacttttttcgtattttttctgtatgacttgtgtctaaacatgactgaaataacatgagatgactttattctatcttttaacaaaataacacgagatgattcaatgtagtttttgccatagaattaaaatttatcaaaataaaaagctacaacactcataattatagtactcacacgtcatgattggctgggggttactattaaccccattgaaattgctcttgcccctaccgaaggggttgacaacgttttttttattatgagaatgtccttaccatgtgtcgcaacctacccttcggcgggagggcgacacgtgactcgcgggatgcgtgttccacgaaaggaatacgcgcggagtcgtcaccaacgtttatttgaggaaaacgtc

SEQ ID NO: 264140 - DNA, 359 bp, Glycine max
  unsure (1)..(359): unsure at all n locations
ccctatttcaagacatgctatgcagctatgtcgcatcgaatagtactggtattctttgtagtcctgtttgctgatatactttttccattaacgtctctcgtaactacaatgtgttatgcctagatatgtaatagaatttaaaatttttgaccacattttctacatatgaattttattgcttcatcattgattctcgctttggagaatctcttaaacactcagaatatacataacattctttatttgtaggtgagacattgtgtgtgcacacgcatgtntgtggtacaatttatcagttgtatcatctatggcgttgacaaatgctaccacagttgtggtcttcacacagatcaaaaatg

SEQ ID NO: 264141 - DNA, 359 bp, Glycine max
  unsure (1)..(359): unsure at all n locations
acaaggtaactaatatggtttgtctaacatggcaatcccatttcagaatgatcactctcttattgaagttataatactgaaatcaaaccaattgatcactatgggaaatccctgttatggagttacaacatcataatgaattgaagctataaagtttaatgtcacaccagattgaagttataatacacaaaatcaaaaccatggataacacactanggaaatcccacttcagattgatcactctctaattgagttatagataaataggtcacctatttacctgtcaaaagtcaaacctttgccaactaaagccaacttgacattgacaggtccactcagaggtttgaacatagatggat

SEQ ID NO: 264142 - DNA, 375 bp, Glycine max
  unsure (1)..(375): unsure at all n locations
agcttgactttggacaaaacatgattgattcatgatttgggacncgnaagactcgacttgcgcaagattggatgaggggaagtgtggctttcgaaatatgctctttgtgcagattttgctgcaaaattgtgcagcagaattttgcacaagtgcagaaaaatccatgtgtttgctggttgtggaaagagaaatgtaggatgagttctggatgttttctactacatcccaacggtcaaaatgtatgcttaagtactagagacttccagtaaaatttctgagtcgatccaacggntaacgaattggaacgaaggacatgttactggggtctttaagagagaaaagctgtgattttggtggtgttttggcacacatttc

SEQ ID NO: 264143 - DNA, 468 bp, Glycine max
  unsure (1)..(468): unsure at all n locations
ngagatgaggaagtgttgaagggtgaaactttctgcttttattgttgaccacagagtggtacctggagatatgtcgcggcggtcaggagaccttggggacgtcaggtggggtgctattgcccaaaaccaagcttgaccaatcccgacccaacccgggcatagtcggtcagtgaaaacctgtgatgtacctaaacaggcgagctcctggcagtcaacagataaaaggaacaaagaccacaaagcaaggaggcttgtggtggctggccagctgtgaaacttgattgatatgtgagatatggtctctggtaatcgattaccaagggtgggtaatcgattacaaggcttaaaaatgaagacagggggctaagatggtctctggtaatcgattaccaaggggtgtaatcgattaccacgcttgaaaacgaagtcaggaaactaagggagcctctcgtaatcaattaccagtct

SEQ ID NO: 264144 - DNA, 469 bp, Glycine max
  unsure (1)..(469): unsure at all n locations
tgctaaaggaagaaagagancaagagagaataatantattttctttcttttctttctaagagatattatatgtagctaaagttggaagatcatggcatgttcaagataatatatttaatttgtgtgaaattgatttcttttttgggtatgataatcataacaaagtttgaatcaataatttcatttaaataattcaaatctctctctgtattggtctaattctttatagcatgaatctatctcgtatgttctttgtggtcaagctatgctggaccgattctgaggtgaaaataaataaatacttgatctaatccctttaattttgatactcgattatctatttgattnntttctacaattcaaaattaatcaactctaaaagagttattctttatctttatgtccattgtcatgaaacctattggtttactgtgtagtgaactaatcttaacataaaataacaaaaaag

SEQ ID NO: 264145 - DNA, 199 bp, Glycine max
  unsure (1)..(199): unsure at all n locations
cgcgtgcactaaatatgggacctttttttancataaaataacacttatatatattataaaaattaggattatataacaatctatatattattaaatattttttgtaataaaattaatgagaaatctcacaaatatataaagaactttaatagttaccaagttgggggacaaaattttgcgtaacgcttgacttaacttc

SEQ ID NO: 264146 - DNA, 461 bp, Glycine max
  unsure (1)..(461): unsure at all n locations
cttgagtctagaaattgaacttacatcacctccaagattctgatgatagatgatgatagccacaggtggcaccttcctaggagcaatattctgagttgttggcatttcatctagaaactccaagctcttgcttgatggcagatattctcatcatcactgaatacaccatccttcaaaaaactcttcttggaaatgtgaaaatgtatggaaccaagaaaggtactatttgcaacaaaccctcatatgaagattcgtgctagctagtttgatggaatctgtgggggaattgctgaactatcttccattgtggcatntgaacatctatcatgaacttccatttgagactttggtatcgatggataattagactcatcacacagcatctataaaagaaccatggatngctgtagactacttttaataaaattctcgtttattattgacggacaactataaaattg

SEQ ID NO: 264147 - DNA, 428 bp, Glycine max
ctgcagcttgtgattagatggccgacgatttctattttatattccatccagcgctcatggagatcctactcatcattaccttctgaagagaaagaagtgaacattaagtcttaaaagtggattgaaagagtatcaaagatatctttgtcgatatcacaatgacaaggcgtaccctagaataacaaattatatagaaaaatcttcagctaatcatgttaagacattgagagtgcatcaatacaacaataaatggatgaccatttcaccttgcagtgtatcatcaaatactatatggtattatatcaacctaactcacaccgaggtgtaaaatactttgtatcatctactactattttcatgccgcaagaaaactgtccatttgtaaaacagatattgttgctcttcatatgaaacctttgcaaaacatt

SEQ ID NO: 264148 - DNA, 425 bp, Glycine max
tctagagagctctcactactctagagtacgccagaacgttctatattatttacacttttctagaaaactctagaacgttcttgaacctttctaattaacgagggatcccaacaatgcgtgttacataaacccccactcatgcataataacatttgggcacacacacatcaactaggtgaacgaccatttgattcactcaaaatattttattaccaatttgactgagactgaatcataatctatcacatgctgaggttaaaactagactagcggatcatacgcttcaatttaactttaataatattactcgccttaactttacgcatggtgtaacagtattcaattatttctaattaaaatcaaatcgacctaatatggaaatttcgatcttatattactacacacacctattgttaaacaccctt

SEQ ID NO: 264149 - DNA, 362 bp, Glycine max
  unsure (1)..(362): unsure at all n locations
ctttaatggggatgtttcaccatggagatgcagcgaaagaccaaggagaagatgtgagaagaggcgccatccactaaggaataagccatggaagaaggagccttaccaccaagatgaacctttggataaaaagcttggaacgatgtttcaatggaggaaaaaaaagaaggagagaaanaaagaggggggagcaccaaattgaatgaagaaaaagggagagaagttgaactttgagttgtgtctcacaagactctcatttatcaaagttataacacgtgttacaaatgcttttatttatagactagatagcttccttgagaagctttcttgagaaaacttctttgagaagcttctctgagaac

SEQ ID NO: 264150 - DNA, 469 bp, Glycine max
ctaagcttgtgttacttgagacatcccgaactccctaccttttatgtgaacatcaaaatggtaacaagaagtacctccaagttaattgatgatattaacgaagatatcgaccaaaactcagaaaacacaactgagataggatcagtatcaaagaaggacatcaatccaataaattctaaacactgaaaaacaccctccaaagtatattatcaacaactaactacccctgaccttctattagaagaaagaggtgaaagtaatttcaaaagttttagtgcaaataacatttatgagtggaatatagatgcccaaacggagtacaatatcatgaatacactccaacacatgaccatagtagccacagcctaccaaacatttcatgagtgttcagaagagaccattattgacattctaatagcaggattctccggactattgagaggatggagcgatagttatctcactaatg

SEQ ID NO: 264151 - DNA, 423 bp, Glycine max
  unsure (1)..(423): unsure at all n locations
agcttataatatatcgatacgctctaaatatatcattgaaactctcatganaattaaatgggcataagttttcacccggatgtccaattcgggcgcataatatgtcaagagtctcgaaattgaacaacggaagctcttgagaaattcaaatggttataacttttcacacggatgtccgattcatgcaaatcacgtatcgagacgctcagaattgaacaacggaagctcttgagaaattcaaatggtcataacttttcacacggatgtccaatttaggcgcatcacatatagtgatattcgaaattgaacaacggaagctctcgtcaaattcaaatggtcataacttgtcacactgatgtccgattcagggttataatatatcaatacgctcgatattaaacatcggaaactctcgagaaattc

SEQ ID NO: 264152 - DNA, 492 bp, Glycine max
  unsure (1)..(492): unsure at all n locations
gacctataaaactcagcttggttcgggtacttacccgttgaagatcgaagaacgattaataacgaatgaagaacgtcgaagaacggttgaaacctttgcgaatttcttcacggaaaacgctacggaaacgtttcggaagcgcctcggcttagattttcttcacggaaacgatttttccaagcaaattcgaaagagagagaagtgccaaaggggctgaacccttttcttcttcacttcctcccctatttatagcaaaataggggaggtggttgccgcccagctcgcccaggcgagctcagctcgcccaggcgagccaggttgcttcctccagaagcaacagccttctggaggaatattctggagggcccaagtgggcctgggtgctatntgcacccncatttntactaagtacaccccctctgctctttttggtgattcttttttcgtaaattacgggaacttactgaatttgtacgatactcgtttctttcg

SEQ ID NO: 264153 - DNA, 432 bp, Glycine max
  unsure (1)..(432): unsure at all n locations
gctagttcttgattnttcctaatttctttatcacgcttagaacaataaatgtggccttctcttaattgtctttgggcttggcgaccacgatcaacaaagtactttcggcacctactatatgttgacttcaccaacgctgttattggaatgctgcgacaatctttcaacaccttattcacacattctgataggttggttgtcatgtgaccatatcgtcgtccagatgtatcgtaagccatgctccatttttcctttgaaatgcgatcaatccatcttgctatggctggactcagttgacgaaatttttctaagttttgatcaaacacatgcttgcaaggagtgtacgctgcatcaaattttttatcatcaaaagttgtacgtagacatcaaactcaaattatattaatgtataaaataaaccttaccaaattt

SEQ ID NO: 264154 - DNA, 466 bp, Glycine max
  unsure (1)..(466): unsure at all n locations
tcacaaagtaaatcatctttatataacaagcttggttattctcttacgagatcatgcttttgtagttttgagattaatctcaagctagcatgtccaagctttttgtgccacaccaagtgattttcctttatggatagtcggcaggttacattttgttcataaggatcaccaaggtgccacaatagttccttacgacacaccctttctagttgaaggaaacattgtgtccatagaaaccatgcatgagagtcaggcattggaacatacacatttctcttgtcatgtgtcatgagtagagtagccactatctgggtaccatggtggcatgtctttttccggttaaagatatatgccacaagaattatttatccttaggtacccaaatntatttgggttctttcttgttagtcttgaaagcattggacaactcaatcttaggtagaattctacacttgaatgtcatatg

SEQ ID NO: 264155 - DNA, 433 bp, Glycine max
agctagcatgatttacatctctcccttctttctctataaaatacttctcgacatcatcaaaatcttcatgatttacaatcaaacttgacaggatcaatgactttgttacatatggcatgaaagaaaaagcacagacgagttatggctaacctaactttgtttggcaagatgtctcgtatagccatggctaacaattgttgcatgagcacgtgacaatcgtgagactttaaccctataagcttaagctcgttcaactgcacaaggctcttaatatttgaagagtatccttgtggaaccttcacccaacgaagacactgacaaaaacttatcttctcctttttggacaaagtatggcaggctgggggcaagttaattttcttcccatcagaccttggatgcaactgtgatcgtatgcccatataagctagatctt

SEQ ID NO: 264156 - DNA, 475 bp, Glycine max
gggctgaagacaactgctgtgcttagcgcactaatcttgtgcttagcgcacaaccttgatattgatgctctgccagattcttcaagcacgctgaagttgcacttagcgatggatgcgcgcttagcccactgatgagctaagctcaactgtcacttttagcacttcgtgacttatcctctttttcacctgaaattgcacatatttcatcattaaatccaatgtacatatgctagagacatctttaacaataaaacaagatttatttacaaaatcactacaaaataaccataaattgagggaactatacaagttttggaaaatgttttctatacaaaagttagtcgtataagacgactaacacccaacagggcactacaacaaccaacatagaaaggcccaaaataaagaatataccattcaagcacttagccgattatttctaaagaagtaataacaaattctgatagaagaatgg

SEQ ID NO: 264157 - DNA, 427 bp, Glycine max
  unsure (1)..(427): unsure at all n locations
agcttanatagactatcaganatagttactgtttaattattnnttcggttaccaacagtaattaaaaaaaaaaggtccctctattaatttatttaattcaattaaattcctcttttaataaaaagttaaatttgatctttatcttgcaaaacttttcaatgcggctctttccgccatattgccaagaatgacgttaacgttgtatatacatgacacaaacaacttagcaccacattgataagtttggttagccatcctaatggcacgacaccgacagaaaggaccacattgaagagttcatgaaaaataagagatgaaattgaacttttcattaaaagtgaaatcaaattgcattaaaaaaagtagaggaaacaaattagtaagttagccaaataaaaactattcttatagatatgaaaacttgaac

SEQ ID NO: 264158 - DNA, 474 bp, Glycine max
  unsure (1)..(474): unsure at all n locations
tgagccanaatcctgactcaccataaaccttgacccatggtgagaatgccaatccttaccctcggaagcaaaaaagaatggaagggaaatttccaatcaaagaaaaagagaaggaaaatttccaatgaaagcaaaaaagaaatgaaggaaaattccccaatcaaagagtgggagaaagcaaaaaaaaggaaaagaaggaaaattccccaatcaaagagtgggagaaagcaaaaagaaaagaaaggaaaattcccaatcaaagaatgggagaaagtaaaaaaggaagaagaagaaggaaagaaagctcctgatcaaggatcgaaagaaaccagaagaaatgtgcagagaggtctttggaccagacaatatctgaacagtacagaattgtcaccaaatgaacaaaaaggaaggaaaggaaaccacgacctanaagggtcttctccctttaattaccaaccaaaatcccatgcgcta

SEQ ID NO: 264159 - DNA, 430 bp, Glycine max
  unsure (1)..(430): unsure at all n locations
gcagctgctctaattacattttttttttatttatgggaggaggttatatgccatttttgctttaaggatagtgtcccactggtaaaattaacttttcaaatgtttgccttcgcaggaatggccccgaggaagcttgcctcaaagaggtccaagaaagacaaagcggccgaaggaactagttccgcttcggagtacgacagtcaccgctttaggagcgctgtacaccagcagcgcttccaagccatcaagggatggtcgtttctccgggagcgacgcgtccagctcagggacgacgagtatactgattttcangaagaaatatggcgccggcggtgggcaccactggttactcctatggccaagtttgatctagaaatagttcttgagttttatgccaatgcttggccaacagaggaaggcgtgcgtgaca

SEQ ID NO: 264160 - DNA, 467 bp, Glycine max
tcttgaacgggatcaatatattcattggcatagattaaaggatgaagatgtggtacgtgatatcttttggtgtcaccctgatgcagtgaagttatgcaatgtatgtaatttggtgtttttgatagatagtacctacaaaacaaacaggtatagactcccactacttgactttgttggtgtgacaccaacggggatgacattctctgatggttttgcatatctggagggtgaacgtgttaataatgtggtatgggctttagaacggtttcgaggtttttttctaagacgtgatggtatccctggagttattgtgactgacaaagacctagcattgatgaatgcagtgaaaagtgtattccctgagtgtacaaacttgttgtgcaggtttcacatcgactagaatgtcaaggcaaaatgtaaatccctaattggtcaaaaaaatgtttgggagtatgtgatggatgcct

SEQ ID NO: 264161 - DNA, 424 bp, Glycine max
  unsure (1)..(424): unsure at all n locations
agcttctcatggncntgtgttatatttatatttagacatgtgngcggnccaccccattgtgacactttccatgcatcagtttttttggataaaattgccctcatataaaaagggcaaggagactcttcggtgttgttggggcaacaaacaatatatttgtgtgatttcgtttcaacaaccttaaaactttgatgcaccttcatcacatattgtttgagtgcatttttgaccgcatctttactgtcaaaatccatgccaacatataattcttgtccaacattaaaagtcgttggcatgtccagaccacaaatgtcctcctcgtctggatgactccaattgatattattataatggctagcatcattccaaaatggattttgaatttctggtacacctaataatttataaaataaatcacgtcaac

SEQ ID NO: 264162 - DNA, 466 bp, Glycine max
  unsure (1)..(466): unsure at all n locations
tagagcatttgacttatatgctccagcttgaggaggagtgttgaaattacacacattgtatggggagttgttccacacattgtatgggtagttgttccaacaaagaatatgtacctagattgtcacatattcatgtatctaggaattcacatgcatgtacataggtactagaacttcattaatattcttgtaaatttcacattgtacttactcccttagtctatataaatatagatcagctgagtgagttaagcactcaagcatttcacaacctcttgtctcttcaataaagcactaggatttattttctttntatgctggaagagaagtgtcatcacttttgtatactatcctactattttcttattggatctcagagttaattaatagttagtaaattgtttaacttctttgttcataaataaagttcaatgttcctttcatctatctccccattnttttcttc

SEQ ID NO: 264163 - DNA, 338 bp, Glycine max
  unsure (1)..(338): unsure at all n locations
ctgcagctgaatgagattgttaaggtttattgttgtttttattcgttgaccacaaagtggtacctggagatatgttgcggnggccacgagaccttggggacgtcacgtggggggctatttgccaaaacccaagcttgaccaatcccgacccaaccctggcatagtcagtcaatgagaacctgtgatgtacctaaacaggcgaccttctgctggtcaacagataatcggcacaaagaccacaaaccaacgaggcttgtgtggtggctggccagctgtgaatcttgagtgatatatggcgaatggcctctggtaatcgattaccaatggtgggtaattga

SEQ ID NO: 264164 - DNA, 460 bp, Glycine max
  unsure (1)..(460): unsure at all n locations
tctaatgctgactactgcagagattttggagagttttttatttatacatcgcagttaatggaaagcttaagaactgcctaagatgttgggggaaactcaaatttggttctgaaacttaactctgtgttgattgtcaacttttgaacattgtgcatagaagcatatttcatgaccctatttaggagtttgggctcaaccaaaccatggcgcttgatatcaagactaagaagggaaatcgagtcatctcgactgaacagaacccaagatacaaatgttctaaatttgttcagcttactaaagtgtgaagaatngaatgcaaaattagtgagacgttttcaaaggtctttctcctctttactatctcttcctcttcatcttcatcaccaacttcccctctcttccttttgctacctatatatagcccacaatagtttctaaaatatttcatctatagatatta

SEQ ID NO: 264165 - DNA, 438 bp, Glycine max
ctgcagcttactaaaaattaagttctggaacttgtttatattttaagccaggattctggactcactataacttcattatttaccttcttcttggtaatggcattggtgttggcatatggtgtcgcgccattaagatcaagcaccattggagaaattggaaagcctaaaagtgatgaatgaaacgggattgaactatacgatggaaagtaaaagaaaattccgcgagtagaaaaaagtgttgttggtgccaggaataaaaaaccaagggaagaagaatacattctgggataactatagagagaaacttattgtgtcatggtccatgacaaagatgaggcaaagaagcgtgaacatgagaaggaacgtgcccgctgaaatcactgatggagaggtggcctttgtcccttatgcaacggcttgtgaacctagagggggagt

SEQ ID NO: 264166 - DNA, 439 bp, Glycine max
ctcaagcttgctctataatacattgatgtttgtatttatgggaggttgttatatgccatttctgctttaagagaagtggcccactggtaaaattaactttccaaatgtttgccttcgcaggaatggcccccaggaagcttgcctcaaagaggtccacgaaggacaatgcggtcgaatgaactagtttcgctccggagtacgacagtcaccgctttaggagcgctgttcaccagcagcgcttcgaagccatcaagggatggtcgtttcttcgggagcgacgcgtccagctcagggacgacgagtatactgactttcaggaggaaatacggcgccggcggtgggcaccacttggtactcctatggccaagtttgatctcacaaataagccttgagtattatgccaatgctcgtgccacaaatgagggcgtgctgtgacatg

SEQ ID NO: 264167 - DNA, 365 bp, Glycine max
  unsure (1)..(365): unsure at all n locations
tttcatctcaatagatggactacaagcatccttatatcacatggtttcatcataatgagcaagaagtaaatactgtcaagatacatcatcgaaccaatttgaatatataactaatatcccaatatatgaaaatattgaatataattgacctaattatatactaaccttcatatgtcgccacattacatctacatcatctgtactaatttcactccaatcattaacttgtanagggactttctggggaatagacacttgcgcctcatactggaaatattatgcatgttttcacaaatcttataaaatggtggaggaaatttgatgccaatacttctttctttttacataagcttttcctttttctt

SEQ ID NO: 264168 - DNA, 467 bp, Glycine max
  unsure (1)..(467): unsure at all n locations
cgcatatgttgaggctcgggttcttcttgctccatgggtttttgtctctacttaaataggtcaatcaatgataggtttttaacattctcctagtcctgatagtacattttggctcttctcttttcatagntgaaatatcatgaggctggaaggaagatagaatacttgccacaagttggtcaatggaacgtgatgaacaaggttatcttatactttaaaagattatagttacagtataatttttttaagtgaaaaaaaattaagactacttgttcccaaccgaatgtaactctagttatttcaatgcaaaaagttataaacggaagcactgtaagatattgcgcatgtaattctagcgttggattttacataataggcatgaacttatttgtttaatcctatagaccttgatattggtaaatgaatatttcactatttctactctttattgccaagttacactattt

SEQ ID NO: 264169 - DNA, 294 bp, Glycine max
actctaaaaaactgtccagatcatcatgactccttcaaaccccaacgaaaatattaacatgaacgtctgtacgattctcttcattaaaactgctagggttcaactgatttgcaggggggaatgatgcatacgacaccttgaacatatatggtttatataactggccaaacaatgggggtaaatataacctttactgcgcgccactgatttgtaattcaccttcccagggcacaactatattagaagaaaaatgtacgtatgtcactgtgaacgtgctattactccttatatttg

SEQ ID NO: 264170 - DNA, 472 bp, Glycine max
  unsure (1)..(472): unsure at all n locations
actaaccttacccctatgccatgaatcaaaaacctttattttgttaaatcgagtacaaaaatagaatttaacttctgattatggtatcaaagttaattaattaaccaaataaatcgtgctacctgtttaacataaataattaaaaactttttctttaagtgaaaaggattaattacttcatggatgtggcacttgctttttcactaattacattcaagggattaaactgaacttctgttatctttattactattcaagttgagaattgaaatttgaaaccctataaacaaaagctaaactttagtatagacatgtatattgcttaagtcaaggctagctaaagcctaattaaagagggaaaaatctttgcatttggtctataaaaaatatttctacacgttaataatatttctaaaatggaaaacagagttattgattatntaataaataatactcnctccagtctatttat

SEQ ID NO: 264171 - DNA, 286 bp, Glycine max
atgagatacatttggagcaatctctcacctcacacaaggttttaacatcaatcctaacttgctctaactggatttccacctaaaatcttaccgaatctaaatttgactcctcaacacaccattttgccctaaaaatggctcttcatcactttggtcatttgttttctttctagccagcctaacctttttcacatgttctaaatggcatttcacgctaagaataactcactctaactttctaatactaccaattcccgatctggccttccatccctctaaaatacac

SEQ ID NO: 264172 - DNA, 427 bp, Glycine max
  unsure (1)..(427): unsure at all n locations
cactctcttggaggagatgctccttcttctatggcttattccctagtggatggcgcctcctctcacctcttatcctttatcttccgatgcatctccatggtggacaatcaccattgaaggacctcattgaagctaaaagattcagcctccatagaagcttcacaagcaagcttccatcacttttgacgacttgtaagtgagattccttagcattggcctgataccttgcacataagtaagcacttagcatgacatatggcctatttttactttagcagaggagtgatccaatcatacctctatatcttaactcatccacttgattaacctttctcatctangtcaatgtacgttaaagttgccattgaagtagatgcttctttgctttttccatgcctaattccttaagtagtgttgtacaatattt

SEQ ID NO: 264173 - DNA, 443 bp, Glycine max
cctgcagcatgcaagctaggcaaataagttatttttcattttatctctagcatgcattggatgggggtctcgtcctttgacacgggaagccggaaggtccatatcaccttcttaattgtacacatggggcactgcgcccccaaatgcgcaagtaagaagagataattttccgggctctcgtgtccgtaaaatgcattcatatcatgcatcgcataagcatcttttcataacatcataatggacatatcctgcatttgtccgttatcatattccaccctcacattttgcatgagtcatggcatcatcatgcatatgcgttcaacaaactttttgatctgcaaaattgcataccaattcgtttcatgtttgctcatccttgcgttttcctctacaaaacaaaaacaaaaaacggggaagcgtgaaactatacactacattcttag

SEQ ID NO: 264174 - DNA, 411 bp, Glycine max
  unsure (1)..(411): unsure at all n locations
aactatanaaactcaagctttgganaatgatctctatacaaaagttagtcgttatttattactaacacttatctgcacagttcgcttaacgtgctgatttgcactaagcacaatttcaaaaaaatattttaattaataataatctgaattttaaatgggccccatgttggcttttcaagagaagaggcgaaaagccaaacgtctctttcgcttagcgaagtgactcgctaagcgagttgctcgaaaaatggataagtaaagtgtaacaacaggtacacttaccccattttttttcaaaagctttcctgcaacctctctgtcttctgagattcatgcattgcatcttcgagttcatcttgcattgtgcatcctatcttcacaaagcatattcaatccaagtaagttcccaac

SEQ ID NO: 264175 - DNA, 369 bp, Glycine max
  unsure (1)..(369): unsure at all n locations
gaacgaggagaagactacgtttgtgcacgtgagctataaattaaaggcgggcaactggggatggtgtgcttatgcctggctggtggaaatgggatagttgatttgcgccatctcctgatcgccacctagtaccaaatatgacgggtgccccataattcaataagcttgatgtgagaaagcgtggaagagncagtcttcatacttttatttgttgaccacagaatggtacctggagatatgtcgcggtggtcatgaaaccttggggacgtcaggtggggtgctattgcccaaaaccaacttggtcaatcctgacccaactcgggcatatttagccagtgagaaccctgtacgtacctaaacaggcgaact

SEQ ID NO: 264176 - DNA, 473 bp, Glycine max
  unsure (1)..(473): unsure at all n locations
ntgagggattggtctttgccagtgaaaggatcgatgttgtgtttaaaaaaggcaaatttagtcatcctgcttggacgaatgagaaaatcggggcaaatgaagagggtgagaaagagggagaaacccatgctgtgactgccattcctatacggccaagtttcccaccaacccaacaatgtcattactcagccaataacaaacctcctccttacccaccacccagttatccacaaaggccatccctaaatcaaccgcaaagcctgtctaccgcacttccaatgacgaagaccacctttagcataaaccaaaaaacaccaacaaataggaattttgcagcaaatagcctgtatggttcaccccaaattccgtggcatatgctaaacttgatcccatatgcactcaataattcaatggtagccataaccccaaccaagggtcctcaacctccatttttctgaggatacgactcgaac

SEQ ID NO: 264177 - DNA, 239 bp, Glycine max
ccgtaaaacgaacatacagcacttcccacccaaaccccaatccccaaactcaaacaccctaaatctctctgaaaggcgaaatggacaagctttccctaatcatcatcgagcccaccccttgagaaacaaagctcttctcctcctcagcgtcatctcaaaggtcttggaacatggcaaaactcattgcctgcttcgtctaaacagagtttggaaacccatttaaggcagctctcacctga

SEQ ID NO: 264178 - DNA, 443 bp, Glycine max
  unsure (1)..(443): unsure at all n locations
acttagaaactaagctcttatattagacttgttntctctctgatatcagtattttctatggccaaatacacggtcataactaagtttcagtgtcatataacaaatgatcgtcatgagtaaaaaatattctcttattattccaagagatcattcacgagttatttaccattatatcattaaaataaaatatatgagttgtctaattataacgtgatattgtcgcaaccaattaatatacgataaaaaaactcaaaataaattacttaaatcatacccaatggaaatgctattggtggcattgccatgatctctttaatcaaataagagtcaatatacacattatctattcacaatatcgttaaaatttatctactagatcgcgatcactttattccacaatgttgtcattatattttttatcttgcgtgttgcacctcatacct

SEQ ID NO: 264179 - DNA, 380 bp, Glycine max
gccgcatgcactttctttttcttatcaccatttttttttttattctgcctctcctctctacgtagctttcttttcttcatctcattgaagctcccacaaagctccaaccttgggctcattctactccaatcgcgaaagagggcattttggagtcggaatggccggctccaatgtgactcaaatttcaggttgcgtggacttctttctctcttaaatttctggtatggggttctggagatatgatgggtggctttgtagatctctagtgtgcatgatatttgtaaggcattgctgaaacttgtgaaatcccatgtttggatgaatatacatacccatctgtttacggttttggagatgttgtgagttattgctaaattgtg

SEQ ID NO: 264180 - DNA, 450 bp, Glycine max
  unsure (1)..(450): unsure at all n locations
gaatactaacctcgcttaagggcgtggaccttannacggttnttagtgattttttgttttctaagctcgatttgcgagtcgattttagctttaatttcacttaggcaattacgcaattcattcaaggaaacttccaatgacaaacgtccgattgattcttttgattattttattcaaagatattttgattattctattattatttcttaagatatcttgattattttattattatttatggaaaagttacgaaagcttgcggaagcatatatgactccattttcttcttgttcctcttccctttcagcactatcaagtgaaatatgcttacccaaggttttcggaaatttacggaagcattacggaagtcccgaagcccgagaagcctattcttaacaaacaggggaggtggttgctggcaggtcgtccagaaagctaggtgcttcccct

SEQ ID NO: 264181 - DNA, 255 bp, Glycine max
ccaccattgagaaatcttgtcttggcatccatctgatgaaactcaagatcaaaatgtgcaactagtgccatgatcttcctaaaagagtctttagtagaaactacagagaaagcctacttagactcaaccccttcctttcgagaatatccctttgccacaagacaagccttatatctctccacactaccatctgcatcccgtgtggcttaaatatccatttagaccaatggactctatatctttacgcagcgaaac

SEQ ID NO: 264182 - DNA, 394 bp, Glycine max
  unsure (1)..(394): unsure at all n locations
aaagcaagagccattnctatggttaattgggtgttgagggaccaaattttgaatcgggggagttttcaccgtaaaaccagtttgagcaagtntaaattaatgttatagacttgtttgagatgagagtttactccaacaatacccattctcattttcacttctcaaaccttgaaaatccactaaattgatgagctttagatacctagattttggattgccttggtctgaagcttgttcttggtttaaatatgatttatacatgatttaggacttgtacgatccaatttgagcaaaattggatgtgggtaagatggatttcaaaatctgccaaattgtgcagcacaaagctgtcaaatttgtgcagcagagtctttcaacatgtgtataaaatgct

SEQ ID NO: 264183 - DNA, 460 bp, Glycine max
  unsure (1)..(460): unsure at all n locations
tggcttctacaaacctatngacaatatagtggtccattagtataattagagaatgtgaaaaatggctagaaattaaaattttattaaaagataaatatgcatgctacaaggctaacaaagcatagttaaaatgagataaagagaaagaatccttgaaccatntttccttttcttcaacactgccttcctcttcaagagattgcttatgaatgtaaggtcacccttctttcttgccatgatgtcataccctaatttcgttcgggtaccattgtttgagggcatgcaacctttgtttaaccgctttgaggtacttggcaccctattgtgcacaatacgcgaagttctgtgacatgctagagatcaaaaggaagcattgttacataattcgtgagattccgtaacatgccggaaatcaaaaggaagcattattacacaatctgtgagggttcgtaacattccg

SEQ ID NO: 264184 - DNA, 395 bp, Glycine max
tgaagggtctgagaagacgcaaatttgagtatcctgctttgatgaatgggaagcctacggaaaatggagagaacaagaaggagggaggaacccatgttgtgactgtcgttcctacatgacccaatttcccactagctcaacaatatcaatactcagccaatatcagtctttctcattacccaccaccttatcagccaagaaggccacccctaaatcatccacaaaacccgtctgccgcacatccgatatcaaacaccacccttaacacaaaccaaaacatcaactacggaaggaattttccagagaagaagcctgtagaaatcaccccaattctgttgcgtatgctaatatgctccatatctactcaataatgcaatggtagccataataccaac

SEQ ID NO: 264185 - DNA, 227 bp, Glycine max
tgctcaaccccaacacgtctccgcctccctccccgcactaagatcaacgcctttgctgaatcctttgtcactgttggcaccaccctgatccctggaaagacactccttctcctccttcaaaggaatctctctctcttctgctccatcatttcgcctctgatccgtaactccctcaacgacattctcctcatcatttccaaccacattgacattctctcctacgctca

SEQ ID NO: 264186 - DNA, 382 bp, Glycine max
tggaaaaagagctataatagcatctcatccctagagtgtgcgcccatctcgcaacaatacatcttgaaacgggtcttgggaaagacgctcctttatacttgtcaaagtctgacaccttgaatctgtgggggataacaacatctggtaccaagcaaagatccgttatgtccgcgaacggatagtcaccaaagccttcaacagccctcaatctctcctcgaggagatcgagtatccttacttcttcggacgccgggggtggtccttatgtggacaagacaattggatgtgctgagaggttgggctaaggcaacgagttgggagtcgagcccctcacggggatcggtgggtagaacttgacatccccttgggcatactcttgatg

SEQ ID NO: 264187 - DNA, 423 bp, Glycine max
agcttgaccagtcctaccatgaggtttcttcgtgttgttcccttgccactggactaggaccatatgcttgggtccggtctccgacggaatgactttatatgctacaatggctaagggtgtgataatcgggtgattgtcatatgccaaagggggaaggtccatgactgtcgccgcggtgggagtcgctgagtatggcttgagaagtgagacatggaaaaccggatgaatgcgtgagtggtctggaagttgtaaccgataggctaccttacccatgcgttcagttatctgaaaggggccataatacctcttacttaatttcgaacaggtggtgcccgtgaccgaaatttgtcgttgtggcctgatcttgactaggacccaccacccacctggaattcttgatcaccacggtgcgcatttgcgttg

SEQ ID NO: 264188 - DNA, 396 bp, Glycine max
  unsure (1)..(396): unsure at all n locations
cactctcctacaagatgctntgggcctacctgaagaatcaccttggaaagcccaatttataagacaagaagcatccatgggtcagagctgatcaatgtctggtggactattaatattgggctaattagataataatcaagtccaacacactcataaatttttagccaactttttagaataagatgtatattcaattttaagcctcttattattagacaattattgcgcactgggcctaatttagggttattaataggagatataaatagactccttcaacactttgcgagacagaattctaagactaataaaaattgagagcttctctactatgagaagtttccccctggtcttggaataaagactgatagcgttgatctataggcatgcccggta

SEQ ID NO: 264189 - DNA, 375 bp, Glycine max
  unsure (1)..(375): unsure at all n locations
agctatgacttacacaaacatcgtttttttttctattgtacncatcacaaccgcgtccacatctgagagcatatctaaaatcctcacacatcactattacagccaaaccgcgttttagatgtatactctataaagaccgccctaatgaaatgtaacttgaccagaaatgtcacttacacttaacattcacagttgacaacaataacataacttgtataataagatattattcccaaacaataaataaaacagagaactcctgattctgagttgattaaattacttttcattttattttacttggcatacaaatatatatatatatattcatacacaacaaaaaactatatctatatatatatatatatatatata

SEQ ID NO: 264190 - DNA, 481 bp, Glycine max
  unsure (1)..(481): unsure at all n locations
catagaaactaagctttctgagccactanagcttctagaaagaaattattctttttaatctaataaaacattgcaattaacagtgttaaaatacgaattgaattacaatatatacagaactggtcaatctttatttgaatttataaaatttatatgaaaaaatggagtgtattgacaatatattatttcgttagaacagtaatacacataccgctctacactaaacgaccactacttctatgggggtgttcgttagacatttttgattttgttatacggttatctcacctcatattgttactgttatgtaaagtaagttaattcacttatataataattattttaaaaattgtatttaaattattttttaatttgtaatagtataaaaatttatgtaccaataataatacatgataattaaaaaacaatctattatgtgaaagcaaactcagataataatataagctccaataaatatcaa

SEQ ID NO: 264191 - DNA, 431 bp, Glycine max
  unsure (1)..(431): unsure at all n locations
agcttatgctgcanatatttataatagattttctcaacctcagcaacaaaatcaaccacagcagaacaattatgacctctccagcaacagatacaaccctggatggaggaatcaccctaacctcagatggtccagccctcagcaacaacaacagcagcctgctccttccttccaaaatgctgctggcccaagcagaccatacattcctccaccaatccaacagcagcaacaaccccagaaacaaccaacagttgaggcccctccacaaccttccctcgaagaacttgtgaggcaaatgactatgcagaacatgcagtttcaacaagagaccagagcctccattcagagcttaactaatcagatgggacaatnggctacccaattgaatcaacaacagtcccagaattctgacaagttgccttctcaagctg

SEQ ID NO: 264192 - DNA, 472 bp, Glycine max
cgaaggcaaactggatgcattggttaacctggtaacccatctggccttgaatcataaatctgtacctgtcgcaagggtttgtggtttgtgctcctctgctaaccaccatatagacctttgcccttccatgcagcaacctggagcaattaagcagcctgaagcttatgctgcaaatatttacaatagacctcctcaacctcagcagcaaaatcaaccacagcagaacaattatgacctttccagcaacagatacaaccctggatggaggaatcaccctaacctcagatggtccagccctcagcaacaacaacagcagcctgctccttccttccaaaatgctgctggcccaagcagaccatacattcctccaccaatccaacaacagcaacaaccccagaaacagccaacagttgaggcccctccacaaccttccctcgaagaacttgtgaggcaaatgactatgcagaacatg

SEQ ID NO: 264193 - DNA, 426 bp, Glycine max
  unsure (1)..(426): unsure at all n locations
agctnttcgcaaagcttactgtaatatttgtacctagccatgggagaagtctccacagaggccattgcctccctcgcccagtattatgatcagtcgttgaggtgcttcacctttggggacttccaactatcacccatggtggaagaatttgaagagatcctaggatgccctctaggggggagcaaaccatacctcttcacagggttctatccctcattagctagaatttccaatatagtccaaatctcggcgcaggaattataccacaggaaccaagtcgaaaatggggtggttggaatactgagaaaatatttggaggcaaaagcaagaatcttggcaggtaaaggagagtgggccccgttcatagatattctcgcactgttgaattttgaaggagtcctcttttcgaatgtggataggttggtg

SEQ ID NO: 264194 - DNA, 458 bp, Glycine max
  unsure (1)..(458): unsure at all n locations
tggggtacccatcacatgtggtactatgtggcagncgggcgaaggggcacaacaagttttccacattcacaaagcgtgcataaacccaccatcccctgttgcccaccttcaactgagctcacgtactcccacgtagcccataacctcgtttctctcaacaccgggttcccatcaatcctcccaagcttccccaacatcaaagtaatacaacattcaaacagcacaagctatcacagccaagcaaaacagggcaaaggcagaaaactctgcccaaaacaccaaccaaaatcacagcttttcaaatacaaataccccagaaacatttccttcgttcccattcgttaaccgttggatcaactcgaaacttttactggaagtctctagtacataagcctacatnttgaccgttgggatctgctagcaaacatacataactcattctgcactactctttccac

SEQ ID NO: 264195 - DNA, 277 bp, Glycine max
  unsure (1)..(277): unsure at all n locations
accaacgactactctaactatggcaccaattgggactcacttatttctcttggcacgtttcagcggaagcaatgatcaaatggggtanggaaagaacaatatattgtcccttgtacacattttttcgacacatcagcgacaactaatgcgtggaagagcctcgaccaatgaatttaattaattgtacggcgagaatgaacttaatatattgtgagcctgtgctaacacctgtacgtgtagatcaattgtgaacgatattccaatttaatcacgaggt

SEQ ID NO: 264196 - DNA, 360 bp, Glycine max
  unsure (1)..(360): unsure at all n locations
aaccganaccaagagccactttttttaaactgattcacaagcagaaatcgaataccatgagcatgtaatcgattacctatgttttataacgttagatttcaaattcatgagtcacaacttgtgataaaacagtttcaaacttgtgtaatcgattacacaatatatgtaatcgattactagtgtttctaaacgatggctttcaaacttaaacatgaagagtcacatcagttgatgtgtaatcgaatacactacaatggtaatcgaataccggtgacttattttgaaaaataaattaccaaaagtcacaattcttaaagtgacttgtttctgaagattttttcaaagtcacaactttaagtg

SEQ ID NO: 264197 - DNA, 338 bp, Glycine max
tgcatgcatgctttttattatactaattcatccaactacaggatcgtaatatgtcatagacatctctatacattaaaattatgttaaatgtttaatgtgaatccaattaattatatggatgtgtatcttaacttgcggtaaacattaaaatgactttctatatactccataggtttatttttatatgccaaacctatctgtcaataatgaaaatacaaaacatgtcataccaatgaattatttttcctaaacttttaatttttctttataaaatttaacatctcttttttacattacattctttatccttaactttttaataatagtgtaaaataaaa

SEQ ID NO: 264198 - DNA, 216 bp, Glycine max
  unsure (1)..(216): unsure at all n locations
gcccccagaagacaangccagaggaaagaaacaaaccacacacaaacgagagaaatgggagacgccagaaacacggggaatgacaacaggatcaggcgcccgcggaaacaaaccacaaaccaaggaaaacggcacgcgaagaagacaacaagaaagcggaggccaaccaagcaaggcccacaaaacgaaccaggccgaaaacccacagcagcacaa

SEQ ID NO: 264199 - DNA, 376 bp, Glycine max
aaaaaaattaaaacaggttaatagatattacttggattgctgaaaatggatgcacaagaatgatgcaaggagaacaagcaaagagtgagagcacattgcatagaaaaagcaccaacgaaaagccaaaaatgtagtttaaaagcacaaatgaaaatgtaactgccaaaggcagttatgcctaattttttgaggatatcaatgccttgcttagcgcatcaactcgcttagcgagcatacataacgtttaagattccaaacacactcacttagcaggcaaactcgcttagcccaatgaataaattcacattttccagagaagactttgggcttagcgtgaagagtcgcgcttagcgaataaatatgctccttaaatgta

SEQ ID NO: 264200 - DNA, 435 bp, Glycine max
  unsure (1)..(435): unsure at all n locations
ccgctgcagcttttgtgcaaatactttctgttgtgttattcggcctgcgctaaaggaggtcttcgtcattggaagtgcggaagacaggctttgtggttgatttacggatggcctttgtggataactgggcggagggtaaagaggaggtttgttattggctgagtaatgacattgttgggttggtgggaaacttggccgtataggaatggcagtcacagcatgggtttctccctctttctcaccctcttcatttgccccagttttctcagtcgtcctagtaggatgatcaaatttgcctcttttcggacccacatcgatccttttgctggcgaagaccaaatctgtaaaacttgaaggtgtgtaacccaccattnttttcatagtagaacaccggtcacgtgtctactatcattgtgataatctctttctctgttt

SEQ ID NO: 264201 - DNA, 442 bp, Glycine max
tagtgcttgatcactacgcgtggctccagactcattggtttactatgcatgaacgacaatcaatccatggggctccgaataaaagtggagaatggggaattgcactatgcaatcactacgcgtggctccagactcattggtggaggatgcatgaacgaaaatcaattcatggggctccgaataaaagtggagaatggagaattgcactaggcaatcacttcgcgtggctcgagactcattggtggaggatgcatgaacgacaatcaattcatggtgctccgaataaaagtggagaatggagaattgcactaggcaatcactacgcgtggctccagactcattggtggaagatgcataaccgacaatcaattcatggggctccgaataatagtggagaatggagaattgcactatgcaatcacatcgcgtggctcagactcat

SEQ ID NO: 264202 - DNA, 406 bp, Glycine max
cacctgcggcatgaagctttactaatttacccagattaatttgttttttcactcttataatatggcgcttttgatttctgaatctaaaaagctttctctggattgcccactctaacgatcaaagtaagaataaggttaaccatcatcttttattcattcctttaattttctgagaactgcaattcctcaaccaactcttctattttctgagtgttcaactgcgttgcacaaaagatattgccattggaacacatggtttgatatctgtttgagatattaagtttggtagtttactttaaatttgtaaaaaatacttgtggcaactcacaagttaataagtcgatatatatactttctacatggtaagatcaaggcgacgtgacaaacataatgatcctttatgaaa

SEQ ID NO: 264203 - DNA, 442 bp, Glycine max
  unsure (1)..(442): unsure at all n locations
ggtctacccacaagtganatgctaacaatatactccttttcactntttctaatacactatcattagtggaaacttatcagaaatcatacacattgtaagtttggcttcttattcgacaagtcttactcgtgattttgtagtctctaataatctttaaccagtacaataaagtgtattagagaatgagttattaacactcctgccgacaaacttgcttataggtaccgaggaaaaaatatcccttctgcattcttagctaggaagccagtatactgttatatttcttccggcttcttagactcaaattccagtttttaaaaccattatgcaaccaatatatgctctctgtgaacatgaaaactaatgttggacaacatgagtcatcccaatttatctgttaaacgtaactatctacaacacccttcttctgtctctaaggtca

SEQ ID NO: 264204 - DNA, 286 bp, Glycine max
  unsure (1)..(286): unsure at all n locations
aatgatccttattctctcacggtccatgggatccccttgatcacaatttacacaattctcaaaagtcatagccctcgaccataccttcttcttgactttcatgttgattattcctaccacaaagtatgacaaacctacggtgtccctatgaacgcctaagatngtctcgaaactaaaaatatgaacaaacctacctaatgagtccgtatgtacacatatcatgaagattctgggtgcacgactgatttacaaaagagtgttgcaccacccaaaccatccacacacc

SEQ ID NO: 264205 - DNA, 434 bp, Glycine max
tctccgcagggcatggctattcccagatgacctgaatatatcttaaaatccgcgccacatggtggtccttctccttcatggaaggtaccacaggatatggtactttcatactttcattcacagctttatcacttctactatactctttactatcatactcttcatctttctcaaacttatgatctgcttttactttgtctacatctcatatcttgtctaggccactaaattctctttcctgacacattatacagatcctcttttacctgatcgctatcacctttcacatcaatttacgctgccatcggaacccatcttttcagcagctatcttctagcgcacaacactctcctcatcctcagcctacacaaacatcttacatctagacatcacagctttgcatatcatcatgcgattcttttctgatatgccac

SEQ ID NO: 264206 - DNA, 312 bp, Glycine max
tgactactaacaccccaagaggagaatactaactatctattacctatacttaatagaacatacttattacactactaaatactcataattgggagagttgatacaatttatactagttttatacacacaagctagtcattttcactgactaacaacctccccaaatttacagttttgcttgtcctcaagcaaaaagagaacaactcacttgtcctcaagaaacaatgacatgcagtggctatgtacaaaggtgtatgctacaaagtgactgatttcatgataacaggatggagttaaatgctcttatcacac

SEQ ID NO: 264207 - DNA, 427 bp, Glycine max
  unsure (1)..(427): unsure at all n locations
gctnattcttttactcatatgccttttctttttgccacatggntgaattattgacagcctcagtaactgctaccatatcttcatctgcaatcatgtaaagagatcctcgcttctttccacgagccacaatgagattgccttttgttaccttccaagctccatctccaaaagtggtgtgatgtccctcatcatccaactgccctatagatattaaatttctctttaaggcaggaatatgtctgacattgtgcaatgtccatagggatccactggaggtcttgatgttgatatcacctcttccgacaatgtcaagagattttccatctgcaaaggtaaacttttcaaatcttccagaaacatagttagacaataaatctttagagggagtagtgtggaacgacgcacctgagtccatgatccatgaatc

SEQ ID NO: 264208 - DNA, 478 bp, Glycine max
  unsure (1)..(478): unsure at all n locations
tcttaagctcttcaactgcacaaggctcttaatatttgaagagtattcttgtggaaccttcacctgacgaagacactgacaaaaacttatcttctccttcttggacaaagtatggcaggctgggggcaagtaaattttcttcccatcagaccttggatgcaactgtgctcttatacccatatcagctagatcttgacgggtattcaagccatccttcgtcttgccttgaatgttaaggagcgtcccaatcacactgtcacaaacattnttctccacatgcataacatcaatacaatgtctaacgtcaagatcacaccagtacggaagatcaaagaaaatggacctcttcttccatatgcaactctgacttttatccttcttttgggtcttcccaaatacaatgttcaggtgttgaacccgctgatatacctgttcaccagtcaacggtatcggcgcactatcatgctcttgacttcca

SEQ ID NO: 264209 - DNA, 430 bp, Glycine max
gctgcagctggaagcaatttatcacttcttattcttctgctggcttagcgagtcatccgttgagcgcaacattcctcagcaaggcgcgaggaaaaatctggaagaaagatgaattgtgcatgttcgctgagcgaagggtcatgaagtacgctccattggagcttgtacgcctaagatcttcttcatcagtggattcctttgcttcttggaagatgaatggcaaccgaatggagaaagaagaaagagaagagacgccacttcaaggagaagatgagtctagaagaagttcaccaccataggaggccatggataaaagcttggaggaagaagaagatgaatgaacggagaggaagagaagagcatgaaaatttgcgctctaacagagctctaaatctgaagtttaatattcacatgatcaaagttataaatg

SEQ ID NO: 264210 - DNA, 466 bp, Glycine max
cggagactgcttaagaagtgaacagatttatcaatataatcttataatgatagcataattttcaaaggtatgcttagaaaactagatggtgcaaaggtatgcttggaaatacagcttggaaaattagatggtgcacaggtatgctcatgtaatatgtctacaaggagatattgtttaatttgtgaaagttgttaacttgggtatctaattttcttcatttctcttcatcagtttgatttgtcattttatatcataaataatatacctcctttttccatgcagagtattgcaatagaattgcagagcgagcaacagttgggataattagctatgtctattggaaattaaaggtgttctctatgtgatttgaatcttcagctgtatatatttaacctatactatgttctttgtgtaaagctttattgcactcctaaatatccataaccaagtgtattatacattttcg

SEQ ID NO: 264211 - DNA, 358 bp, Glycine max
cggatgcggtgaatctaaggtcttgattcatacataccacgttctctttctgtgctcgcctgcaatcttttttcctttacaccattatcatctttcctgaagctgaaaccttgtgttataattcaaattgaatttacatgaacaacaagtggcgctgtattaccatgaatctaaaaagtggtatatataatgtatggtgtcatgtgctgtgtttagtgttcaccttacctttataaatacaagcctatattgacaaggttattaaagggagaaagatctagcgtctcttgccaaagatatattctatctatgttgaagatggccaagagacggtcctttcttttctccatatgaccat

SEQ ID NO: 264212 - DNA, 467 bp, Glycine max
  unsure (1)..(467): unsure at all n locations
tgtcatcatgaggcatcagggacaagtagatggatagatgttgttcttaatcagntcactggctttgataacagacaaatccagaatccatatatctaagttaattacacttgtcaggttttagcgattttaatatatagattctactctctatttttattgttggcttttttagaagtagttattccttatcttactgttgggtattacgagcaagtatttagatttactagatntacattttatttatttgaatttcgtagaagtagttatctttatcgcaatctaaatattttctatcttctaattgtatcttttaatcttatctttaaatcttttatcttatcttatctattatctgtatcttttattttaaatcttagaccttttatcttatctattatctctatcttttatttcaaattgtaaatcgtctatcttatcttatctattatctatatcctcta

SEQ ID NO: 264213 - DNA, 420 bp, Glycine max
agcttaatcaagtcctttaatttttaattttgtctcttaagggctttttcatctaattataccgaaccgttaaaattatgaattttgacgatttttgtttatgaatagtgacaattttaactatcactatattaattatttgtaaaaattaaaaaaattatttgaaaaataaacattttaaaaaaatgtttgtctcttggggtttgaagcatttcacccacatctccaagtgggattttggctaggagactagatttggcttgttagtgctgacggggattgccatgatggtgtggtttgcggtgaggagagtgcaacaacgataggcttgaacgtgaggatgagggggtgttggggttggagccacaattctactaacgaccaatggaggaggcgaggaactcgtcgttgccatcatca

SEQ ID NO: 264214 - DNA, 471 bp, Glycine max
  unsure (1)..(471): unsure at all n locations
tctaagtaaaactgcattatgctttccttttgaaaatatgatgttgtnttatttattacgcaataaaattccggttcactttttcccaagtttatataattgtgaacttaaattcatcaatattctttataaaataaagaaataaaataattaaggtataattacattttgagaaattagggtgttacattcttcgtagttaaggggttccattgcacatggtattgaatggcatcaaatggcaaaccgagtctaaggcgaagccccaactctaacaacatatatttgatttcatggtgtgaaaactgccaattggatgtcgtcttgcaagctttgacaactttcctgcatgatgccccacacgactcttttcaatttgtactttttgcattccactgcatatatgcatccacttgcacatctctcaagtgcactaatcttactagaatgaagtcttagtcagatcgatag

SEQ ID NO: 264215 - DNA, 379 bp, Glycine max
tgtatgccatttttggtttaaaagtaatggcccctggttaaactaacttttccaatgtttggctctccaagaaatggccccgaggaagcttggctcaaagaggtcccggaaagaccaggcagcccaaagaacctttttcgcttcggagtatgacagtcaccggtttatgagcgctgtacaccacccacgctttgaggccatcaagggatggtcgtttctccaggagcgacgcgtccagctcatggacgaccagtatactgatttgcacgaggaaatacggcgccaacggtgggcatcactggttactcccattggccagtttgatccagaaatagttcttgagttttatgccaatgcttggccaacagaagagggcgtg

SEQ ID NO: 264216 - DNA, 454 bp, Glycine max
  unsure (1)..(454): unsure at all n locations
tgctcgataagccagtgatgtccagtagagtattctcgcttagcgcaaatccttatctgttttgaaaatttgtggaattgggcatagcgagcctgctcgctatgccaattctgcagaaaaaaatggatttgtgttcactcgctaagtgtgtggtagccacacgcttagcgcataagtcatttttcctaaggcacgttaagcgagtcacttgcgctaagcgcctagtctgattttcaattttgttatatgattcttaatttgaataaattcttgtctaatcttatgttttgattcttttgtattgcagatggcttcccgtatgaggaaagccataactttagtgtctcagaccggttatgatagatcaagattngtatcacaggaggcctgngaccgctactcagataatgtgtttgccaagaacattctgccaaaaggaaatgtcagctgtata

SEQ ID NO: 264217 - DNA, 311 bp, Glycine max
tacaagcgcactcattgtctacgggaaccgcacccttaacatgcaataagtaccgcagactacatctacctgtcgcctcgcaaccagatattggtggctaccacccaccgcaaactcaattcctgatacggcaccagcagaacatcaaccattggtcctcctgacgtatgcaacattccacaacagaggacttaaagaaatgaagagaacatgtctcatacaaaccaacaagctctagaactgaacttcttaaattttagaggacataaaaacatattttacccaaaatataatatgcttaaacataacat

SEQ ID NO: 264218 - DNA, 439 bp, Glycine max
tcaagcttttgacaaacatttagtatgcttatgtctattattaccatttaataatacgaagcacacaaatcaagaacaagggttacaacacatttttctgtattataaaagaatttatttaagacgggaataacaaaaacagatagatcaggaatccaccaaagagcatccaaaataaccataattatcaatctcagatgacacacatagtgactgaccctaaaagtgatatatcggtataaagcatagcaggatggccactatttagaattcttatatacagatacagattaaataatttatactatatacatattaatgctcaggcatcaaataaataatcaaaattcatggcatattcattattaacaacaaaaggccataggttttaagtaaaacatacaaataaataacaataaaaatcaaggaaacaaacaaa

SEQ ID NO: 264219 - DNA, 468 bp, Glycine max
  unsure (1)..(468): unsure at all n locations
tgagaatacataatgttatggtcgaaacgagcaagagcttcattganagtttatctgctagtgctagataattacctgacttacatgagtgattctaaatctaatcattatatgtagtaactggtttagatgcaataccatgatgtgagtggccaaggacagataattactgaggtttgcttgtaatgtgccttaccatgatgtatttatgttattattgcatatacaccactacacctcaatctaattcacccttagcttaaggtgcactaaaagtgattcctagtttcttagttctttgaaaatatcttaaattagcactaggaaaatttctcatatcttattgaagttatcttttcaggtcataaaatacagtatggagatcttcatatntatgttgtatgttggttggaattatatctttatgattctaaactgaaggataattgcgagttgttaaagtggtgg

SEQ ID NO: 264220 - DNA, 430 bp, Glycine max
  unsure (1)..(430): unsure at all n locations
ctgcagcttgccacgaccataaattttcttttttactgagcgcagttntctgagatcctcatcaacagcttcaccatgatgggtatggtgttagagcaatccttcaaagccactctaccttcggggaccgacgccaacgcatccaaaacacaaagggccaattccgtacaatcaggctccatgccagacaacaattcaaccaactgagaaacagccccaatgctcacaagcaaattcctaacttccttatgcaaacaaattgttctgaggagactcaacccaggacacactccattgctgtgccgcttatccttaacaagcctcatcaacccaaccaagagactatgactcgatataacctccgatcgaaaatccttctcctcaatcaacgattcaatcagccgggtgcaattgatcttcgtctcaatgg

SEQ ID NO: 264221 - DNA, 470 bp, Glycine max
  unsure (1)..(470): unsure at all n locations
nttattaaccagaggaccaccgatggggttgagataatgctttatcgactcgccgagcctgtcatatttaggtctctacaggtaaatgcatcataggtgaaacactcccttcgttgtatttgaatgctggttttacatgtgagcactgtgtatttattattagggtgctaactaactgttaggatcagttgccaaaggagaagtgttagggcggaagtgatgtggtactttaaaggttcctcaaggtgattgtttgtaatggttttatatgaattctcttgtaataggtaggttttcacaaccctaggtaaataccacagcctctagcctgtgtagtgcatgttntggaaatacacgagaaatcaaggaatcatgtcaatttagcccaacaatgtggagaaaccatacctattagcttctggttaaatgtggagaatcacatcgctgcgtgcaatcaaacacgctatgat

SEQ ID NO: 264222 - DNA, 426 bp, Glycine max
  unsure (1)..(426): unsure at all n locations
agctttanccagggagaggagtnttgttgtttatttaaagagcccggaaagacacgggtgggcaggaataaaaattagttaaactctccatttgatctttattttaagttttaatccttatatcagaaaattataagctttagtatctacatatgcataaaaatttaagtttttttctctaacaaaataagtcttggctcctgaattaatactattgaaatcttttggcagtataaacccactaaatggtaataaactgctataaaaaaattgtttcagaactaaaacttacaatcttctatataaggattaaaacttacaatagaaataagtgaactgcatgaatagtttaataaaataacatgtctgtgtaagtaaataactataatgcttgtaagttaagcgttgagtacaaaactacgaagc

SEQ ID NO: 264223 - DNA, 470 bp, Glycine max
  unsure (1)..(470): unsure at all n locations
taatcaccacaaacccattaccatattatttcacattcttattacggccatgtactaatataattgaatggtttagaagcaaaatagaaaagtgagaaattntattctattatgaacaatatccaaagccttattctactagaggcaaagttggcaaacatttgagaacacaactatcagtgttatcaatggtggatggatgaacatggcggaaggccaaattcagccatataaacatgtcatcgtgccttatggtgccatcgtggccgctatataacaacactgatgactattaatgtaccatacaatattactaaacaatgagaatgatgtttcgacttcaagacactgcacaacttcatatgcttgactgcaaaaattctctagaatgtttgcattttagcttgatattgatgctgaaactcaacatcaatgtaatctgaaatcagtccaaacttaaaatcattttt

SEQ ID NO: 264224 - DNA, 416 bp, Glycine max
  unsure (1)..(416): unsure at all n locations
agcttcacgatcattacatttgtttgtttttttaaanacacaaacgataataaacggtgactacttactaaattatcatggctgctactttccctacttaacaaatcttgtgggatttaactatttgatgtgaatttggaagaagccatctcttaaaaccaaaaattctcaaagcactcctaatacaaataactgaaactctaattgaaaaacagcacaacacagccattacttgctaacctgctaacttttnttttcaaacatacaaagatcatagatgtcaccataccagagatagaagcaatgcgcctggcacactatataacaattggatctgagtgttccactgcacttgattctttttaagaaaaggatgccatcctatgaactcttatctttccttcttattgccctct

SEQ ID NO: 264225 - DNA, 457 bp, Glycine max
taatgcaatggtgttggcagcatcatcaacacttgtattctgaagatcagttagaagcccctattcacgcaggaaatggagagtacttaatagagttagccattggaacaccaccagtgtcttaccctgcggttttggacactggcagtgaccttatatggacacagtgcaagccttgcacacggtgttacaaacaaccaacacccatttttgatcccaagaagtcctcttctttttccaaggtttcatgcggtagtagctggtgcagtgctttgccttcttcaacatgcagtgatgggtgtgagtatgtttattcatacggtgattattcaatgacacaaggcgttttggctaccgagactttcacttttgggaagtctaagaacaaggtttccgttcacaacattggttttggttgtggcgaggacaatgaatgtgaatggattgaacaagcttc

SEQ ID NO: 264226 - DNA, 432 bp, Glycine max
  unsure (1)..(432): unsure at all n locations
agcttgaactagaaaagcaccctatacatttctgccattaagcgcagnagctatggagagtaatataagtagactatcgctccagaagaaaagaggaaaaacttatgaactagaaagctaagaaattaagcaagatgatcaaaacaagcttctgtcttattcattgagcaaaatgaacttatatacagattgagaatagatccagaaactaacacacaagcagttacaaagtttgttacaaatctgttagagttcaaaatgaatttggcgggaaatgacagcttcattaatagcccccctcaaactgggaatagatgttcatcattcccaacttggaaatcatgaattngaatgaagctggctgcaggctttggtaaatgcatcggctagttgcatagaggacctgntaacaattttagatgaccactcaaa

SEQ ID NO: 264227 - DNA, 469 bp, Glycine max
  unsure (1)..(469): unsure at all n locations
tgaactccaatctcttctaagtcagagctaaaatggtctgtatgtgaattaaccatctaagatacataattcacaactattgtcataattcttactgggaaaaattttcaaatcctcatagagcgcacatttgaataaaaatgtaaacaaatgttaattttctagttttgaattgacaaaacatatagacaaggactctgttgatgccaactagaatgttttgattcaacaaccaaatacgtctcttcgaaacttaacagcaaaagtcaacttgcaacagcaacaaagataatattaaactgcaaaataagacaatatcaacttgngtcattttccctctagtcacgagtatcaatattcaacaaaaaagaaatattaatgaattatcaaaacagataaacttataataattgatctagcaaatctgttaactctatatccgtaattacaaattgatacaaagtgatca

SEQ ID NO: 264228 - DNA, 430 bp, Glycine max
agcttggagaggatgcttcaatggatgtttataaagagggagagaaagagggaggggggagcactaaattgaaggaagaaaaagggagagaagttgaactttgagttgtgtctcacaagactctcattcatcaaagttacaacaagtgttacacatgcttctatttatagactaggtagcttccttgagaagctttcttgagaaaacttccttgagaagcttctttgagaaaacttccttgagaagctagagcttagctacacatacccctctcataactaagctcacctccttgagaagcttccttaagaagaatccttaaagaagctagagcttagctacacatacctctctaatagctaagctcacctccttgagatgagaagctagagcttagctacacaccccctataatagctaagctcacccc

SEQ ID NO: 264229 - DNA, 319 bp, Glycine max
  unsure (1)..(319): unsure at all n locations
tttaccaccatgatgagccttggataagatgcttggagaggatgcttcaatggaggaaaagaatgagagagagaaagagagaggggggagcacgactttgaaggaagacagagagagagaagttgaactttgaattgcgtctcacaagactctccatcntcnnnnatacaacgcagtgtacacatgcttctatttatagactacgtagcttccttgagaagctttcttaagataacttccttgagaagcttctttgagaaaactctcttgagaagcctgagcttatctcacactcccatataataactaactctccttc

SEQ ID NO: 264230 - DNA, 295 bp, Glycine max
tgggtgtcttatgggtaacaagaagaaggggaaacaatgctgataaacaggaaaacagacttaagctgctataaacttcttctcaagtacacagagttcacatgctttttattactagacgtcctgaaaactttgaaaaactcctggaactcttggaaactcttgtaactaagttactaacaatccttatactaactacctctaaaacttcttaaaatactaaaactaactactaccaccccttaaactactcactctgaagaaagtaagtactaccccctttatactactactc

SEQ ID NO: 264231 - DNA, 402 bp, Glycine max
  unsure (1)..(402): unsure at all n locations
acagagactaggccaaatattacctaactttattcactgnncaaacagaagtgtgtgatgtgggggccaagttggagtatgagaggacactccacacctgagctagtgtggacagacccttcctgagaatctctctaggatggccctctgagttcaagatgaacccttggccacgtatgcataaggcagcctctatctctctgtagtctgtaggcaacctagaggatctggagtaagcgggaaggtctccccctcagctaataccataggtgtctccaagaatgtgttgagactgtcagcatcaatcttcaccaaatgacctctgactctggactgctttggtggatgatcctcacaactgtatacatttgcctagaattctttcaccaaagctaggtctat

SEQ ID NO: 264232 - DNA, 197 bp, Glycine max
  unsure (1)..(197): unsure at all n locations
tctgcttctgaatatgacagacacccntttaagagcgctgtacatcaacggcgcttcgaggccatcaacggatggtcttttttctgtaactacgtgtcagctcacagacgatgaatattctgttttccaacaggagatacggcgccggcggtggacatcactggttactccatggccaagttccatccacaaatagt

SEQ ID NO: 264233 - DNA, 404 bp, Glycine max
ttaataagtccgtctatggattgaaacttgcctcccgtctttggtatataaaatttcatgaggtcatttcttcattcagctttgaagagaatgccatgtatcactgtatataccaaaaggtcatcgagagtacgatttgtttccttgtattatacgtagatcatatttcgcttgcgactaatgataagggtatgctatatgaggtgaatcaatttttctcaaagaactttgatatgaaggatatgggagaggcatcttatgtcataggcataaagatccatagagaaagatctctaggcattttaggcttgtcccaagaaacctatatcaacaaagttttagagagatttaacatgaaagattgtttcccaagtgtagctcccattgtgaagggtgacaaagtc

SEQ ID NO: 264234 - DNA, 429 bp, Glycine max
  unsure (1)..(429): unsure at all n locations
cttcctactcacgagcgccattcagtgttttctgagatccttaacatgatatgtctgtccacatttttttgtacaagcgaaagaagctaattctttcttgccatattntacagcttccttactcttaaattatacttttccaacctttccagtggaaacttcatgcatgtgcacagagtactgatatatacttgtccacacagatttttgttcaaatggccttacatgaaggtcctggtaacatgtcacataacaacagatttgttattattaaaatgtactttcaaatggcttttagatattattcaggtcttagcttttaatcaaaggcacaatctgcagcatagcagaatatatctttgctaacattgtgtttgttgcagaatagatctgttcttaaacttcaagtactgtgggaacataattgac

SEQ ID NO: 264235 - DNA, 434 bp, Glycine max
agcttcatgaactttgcttgatcattagctagaaaatcagtgccaatattttgagtccttctggatgggatagcttttgctatgttctcacttttctgcatacaaactaaagtttcactaacagttttaggcattctatgcaacttatcctttctagaagtaggtttttcagaagatggataaggagagctgcaattgcaagcctttctggattggctgatttcccaggttttgtttcctgagaaatccatgagtgatcataggcttcctcagcattcattaaagaattaggcttacggcccctcttccttggtacagtattcaattgcgtttctgattttggttcctgaacagagtctaaattatcagtttccatattggctttcgcatttcctctgttggagttctttattatctcagaatgtgggctccta

SEQ ID NO: 264236 - DNA, 409 bp, Glycine max
  unsure (1)..(409): unsure at all n locations
tactcacgctntaagaaactgcaatgtgtaagttacttcatgtaaagcattaatgctatgaatttatctaacgagttactactgtctaagaaaacatagtccttattacgagttagatttttatgtatttcatatttcgctcatttttctttcattgaaaaccatgactttttataacatagtattaattgttatcttttatcttgaatatatatatatctttttctattgttccaaaactactctatgattgagagcacacttgtgaatgtgatttacacgattatttttataatacgatatcttctattttgtatattatttttactttgtaattaaatgtattcagcaatattcttatattgtgattgtgataacattactcttattgattattatgtcaatatta

SEQ ID NO: 264237 - DNA, 431 bp, Glycine max
ttcagttacctgcggcatgcaagcttatgttctcaatttcaagcatcttgttatattacaggacacaatcggacatccgagtaaaaagttatagtcatttgaatttgctcagagcttctattttcaatttcgagcgtcacgatatattacaagactcaatcagacatccgagtaaaacgttattgctgtttgaattatctcaaagcttatgttctcaatttcaagcgccttgatatattacaggactcaaccggacattcgacttaaaagttaatgtcgtttgaatttgctacgagcttccgttttcaattacgagcgtctagatatattacgggactcaatcagacatccgtgtaaaaagttattgtcgttagaatttgctcagagcttccgtctttcattacgaccgtcttgatatattacgggtttca

SEQ ID NO: 264238 - DNA, 377 bp, Glycine max
acgaccataacttttaactcggatgtctgattgaggcctgttatatatcgagacactcgaaattgaaaacagaagctctgaggaaattcaaacgactataactttttactcggatgtctgattctgtcccgtagtatatcgtgacgctcgaaattgaaaacataaggtctgagcaaattcaaacgacaataactttttactcagatgtccgattgagtcccgtaatatatcgagatgcttcaaattgaaaatagtagctcctagcaaattcaaaacataataaatttttactcggatgtccgattgagttccgtagtgtatcgagacactcgaaattgaaaacagacgctctgagcaaattccaacgacattaactt

SEQ ID NO: 264239 - DNA, 431 bp, Glycine max
  unsure (1)..(431): unsure at all n locations
agctntgatctaccacctatcccgccacctttatcttagttttcaatgatgtttaatattattagtactttgatttctagccgcgtatttggctatattattatgacatttgaacaatttagtatttcttttatttgcataatatgactgaacaattatgaattatgttatatgactatgtggtttttatatattggaactattcatgtttcttgcttcatgattggtttagattttccaatgaatgtcttgtgagtgattagttatttatgtatgttttatatttgttacgcactttggctttttgttgatgccaaagagggagagaaatagggattaaatcaagaactcacataattaattaacttaatttcaagtgaagcttaaactcaaaaacgaagggggagaatatggagaattaagtgagtgat

SEQ ID NO: 264240 - DNA, 349 bp, Glycine max
  unsure (1)..(349): unsure at all n locations
atcgtggacgagtatgcccaagtatacgcggaaaaagaggctaaaagaagggtgattgactctttacaccaagaggcaaccatgtggatggatcggtttgctcttaccttgaacgggagtcaagaacttccccgattgttagccaaggccaaggcgatggcggacacctactccgcccccgaagaaattcatgggcttctaggctattgtcagcatatgatagacttaatggcccacataattagaaatcgctaggaaacttgtatggtctctcagaccttgactagatacgactttctttntgaataaaatgagttggtcccatgtttctactccaaaaagcttgtgc

SEQ ID NO: 264241 - DNA, 385 bp, Glycine max
ggtaaaagggatgcgccacattatttgcatgacacaaacgctaaaatgatgatttggaaactttatgtaaaactgggcatgcatgcatctatgcggacactcaaatgtcaaatttttatggtcatgtgatgctagggctcaagattcatttcctctatttttaatcaacccaatgtttccaaaatatgttcttttatcaatttgtgcattcatccgagtccatttcgggcgtccgggaaatttcacagcattcacccttcaggtgtatacacatttttttcaaaaagtggttatgatcaatgaattttctcaaagaaaaggtggaaatcgtctcttttaaaagcatgttgttttttagctaacaacttatttattttttttcttt

SEQ ID NO: 264242 - DNA, 357 bp, Glycine max
  unsure (1)..(357): unsure at all n locations
actcaagcttctatagaggctggatctttgagcttcaatgaggtccttcaatgctgattttgcaccttcggagatgcagcagacagatatattgagaagaaggtgtagatgaggcgccatcgcactttgggacatatgaccatgcgaagataagagccttcagccacttacagaactgtgcccttgtgagacggatggcttctatggtgtgaaaatgagagagaatagagagaagggggggagctacataatntaacgaagaaaatggggatagaagttgaactttgagttgtgtctcacaggactatcattcatcaaaattacaaccagtgttacacatgctggtatatatagact

SEQ ID NO: 264243 - DNA, 421 bp, Glycine max
agcttataaaataagaatagacacttatataatcttgtaatgttaatagactcgtatgtgataataacagaggttacttataaagatggctttgggttaggcgctaacatttcctagtgaataaaacattaagggtatatgacatgaccagcctaacatgtttacctgaagaaccaacgtgagatttctatgtataaagtgatgatgattcaattggaagccaaaaaccttgctggatgatatctatcaaatatacaaggttgctgacttgctgtcttagaacctacaaatgacacccaagacaacatactccgggtttggagaaagctaagcataaaatgatactaagcgtgagatgattaacaaaacggaaacacgaaaattctcgttcgctccattgacgtttaacaaccaaacacat

SEQ ID NO: 264244 - DNA, 412 bp, Glycine max
  unsure (1)..(412): unsure at all n locations
ntcatggtctacaacaacaacttgtaaggtgaaatcctttaccaatatcaggactgtccatcactggcagctcttgatctctcatcaaatcatctatctggaagcattccagccagcattgcttcatgtcagaagtaggttaatttgaacctccaaaacaaccaattgactaccgaaatccccaaagcattaactaaaatgcctacattggccatgctcgatctttccaacactcctctgacaggtcacatacctgaacactctggagtttctccagctctggaagcactcaatgtctcatacaataagctagaaggtccagtcccagcaaacggtatactaagaactatgaacccaaatgatcttctcggaatgctggcctatgtggagggatcctccctccatgtgacca

SEQ ID NO: 264245 - DNA, 440 bp, Glycine max
  unsure (1)..(440): unsure at all n locations
gcggcatgcaagcttacaatnctattatattaatnntttttttaattnatgacaccttttatttgtctagctaactgttgaatcattaccagataataatctccatctgctaaattattttacgacattgagaaggaatataaatatataatacccctacaaataaaatcacattacaggagacatctatctaaatcgagtaacatgggaatgaacgtaaacttcattacatactcaactgaaattgagccaaaatgccgacaaactcagtctgacatcatgaatgttcctcgggatttgggacgcccaatgaaaaccaatataaactcatgtaagtattcagattcatccacccaagtcgtaggaaaattggtgattagtaacagattttgcgtgaaaggagttttatggtgattggatgaatgaaggatgagaatttg

SEQ ID NO: 264246 - DNA, 320 bp, Glycine max
  unsure (1)..(320): unsure at all n locations
tgtgcattctcaagtacctcagtttcactatccacatattcaccaactcatacaaaacaaaaaagtgagaaccaatccaaaagagagaatgaatatttaacctttgaaacagcaatgagactatatgggattttagtgtgtgaaagagagagacagagatctgggatgagagtggattttggttacaaatgaaggaaaaagaagagttttttattttacacagaagattatactgatgggcaaagacaaagaagtgagagaaagtcacgagagcattattaatcaccaacgcgttcttgggaactcanatcactttctac

SEQ ID NO: 264247 - DNA, 328 bp, Glycine max
  unsure (1)..(328): unsure at all n locations
agctttntaaatttatatattaaaaattttgatgttccagacacaaagtacaaaatggtggtatggcacttaaatgcgaaaacaaaatccccggcaacggcgtcaaaaacttgttagctgtttggcaagtgtaccaaatcgtctcgagtaataatctctcggtaagccgagtgttgtaccacacagatattgttgcacttatgtgaagaacttttcagtttgcaaattgtaaatttagtgtataaaattaaatgcaatttaaatctaccctgggataagaaatttaaaatacaagataaagaaggatatttgatgagataaagaaaag

SEQ ID NO: 264248 - DNA, 434 bp, Glycine max
  unsure (1)..(434): unsure at all n locations
nttgtcactccacctatatctggttcttacattaactatacataacaccaccgacaacaacatcaaggaattcttgcaccccggatacaaaggcttttttgaatcactttgcaatgtatcatacataacggcatgcgcttgctgaaaagacttttgtccaaggtcacgaatcatatcctccaagcgatctcccatttctacatcaaacggttcagattgggacccactctgcatatctgtcaattcaccatgccatatccacatggtgtaattctttttaatcccatcacacaatagatgctcccgtatgtcgtccagtatttgtcatcttccgttcaacaattgatgcaaggacaataatattatgcatcctcatccggtcgacttctttcaaaggcaaaatacaagaattgttcgatgccttcctcgtatgc

SEQ ID NO: 264249 - DNA, 337 bp, Glycine max
cctcttggcaaaattaagagcatgggagttgaaagaaaatatttacatcaattatctagggaaagagaaaagtgttaccgatgcccaaaaagccaatatcgtcaagtaagtggattgaataagttgcacttaccacgggatggaattgaagagtgagacttataagaatcacaatccaaagaaaatgttgagaagattcttgaagcacttcaacctgatacccaacaacttcagagtttgttctatatggaagcatataaaggtatccttttccacaatggatgtctagtctttctcttaaatatttaacttgtttaccactattgaaaatgaaagt

SEQ ID NO: 264250 - DNA, 424 bp, Glycine max
  unsure (1)..(424): unsure at all n locations
ggttcacaactgactcattgacnttccattttattatctgaattaagcagtaacattattttggtaaattattttcctgatgaatgataaaggaaataagtatgactttatttgtcactatgatcaatgaatattcattgacacaacctaagaaacttgtctagataatttattagcagaaatgtcaattcaaaacaactttgggagtgtggatagtagtatataccttaagaggacaacatagagtttcttttcctttttgtcatcagaccatacttctaagtttgaagtctggcgctggaattttttctttggggtatcactttgcaccatctccacaacattatctcctttatctccttctgacaagtcttcagacatgtnctctactgcctctctgcatccttgttctcgctcccatctt

SEQ ID NO: 264251 - DNA, 416 bp, Glycine max
agtcttgatctaccaccaccatcgccactatcatcttagttttctattatgtttaacattattagtactgttgattctagccgcgtatttggctatattattatgacatttgaacaatttagtatttcttttatttgcatagtatgattgaataattatgaattatgttatatgactatgtggtttttatatatttgatctattcatgtttcttgcttcatgattggtttacatttttcaatgaatgtcttgtgaatgattagtaatgtatgtatgttttatatttgttacgcactttggctttttgttgatgccaaagggggagagaaatagagattaaatcaagaactcacataagtaattaacttaatttcaagtgaagcataaactcaaaaacaaagggggagaatatggag

SEQ ID NO: 264252 - DNA, 431 bp, Glycine max
tgaggatcaaaatcttttctctctttttctctcaactattcttcattcttattcttttcactttggttcttcctttatacttgcaaaaattttgtggcttttacactggtgatgattatggaaggatagacacttgatcaatccaaggattcactccaagcaaggctgaatttgagttctagtttagtatttctaatctgtgtgaatgctcatctttttcttcaaacctattttttatcttgatgattatgaatatgattaggatagaaaatgaattattttagggattcctttcctaatttcaactttaatcacagattgtttggatgatatttcaacctaatttgcgatctcaatgaatttacggattaattcgattgacacaactctaatgatattgattgaactctcacaacatgatcattctctgt

SEQ ID NO: 264253 - DNA, 450 bp, Glycine max
  unsure (1)..(450): unsure at all n locations
agctcttaatttgttccttagaagagacatgtactaagtgatttggatactcatgagtatttacatgcactaacccattaactataagagtaaaatgatcatttgggagtagatcgggacaggtcttccacaaattaattttagatcaagntaatggtgagttttataatgagttatttaacgaaatgttattgaatgatttaagaggaagcttgagttacactttattaaaatcatccattaaattatttctccttctttttatcctatacatctgtncacatagtgaattaataaatgaaaaatcttatttgctgtttaacagatttattgacattacttaactaagatgacgatgtaaacacacttcaggtatcttacatgaaggtaccttacattaagatgtgatcctgactacgagtggatcgcttgacacacgctatgagacat

SEQ ID NO: 264254 - DNA, 278 bp, Glycine max
tagctgttatcaatttcttcagtcagccagcattatgtcttgtgcagattttgttgctgcatacttgccagcaacaatattttttccattcaattcttaactggcaacaaaatgaatgactaagcaataagccaattggaaaaaaataacacaacagccaaacaccacagataacctacttgtccaatgcttctaagtacttctactttcgtatctcacagaagatctttatggagtatttattgtcatccaacttcataaaaccagacaagtactta

SEQ ID NO: 264255 - DNA, 235 bp, Glycine max
ccctcgccagaatgatatccgctccctaaggtgtggagctcacgcgacctatttatctatctttcgacaaagcgtgctatactgtgcagtggaaaagcccggcggaccttgtcagtgccgacaagattctgtcctggagccaccagaatcaaacattatggcatccttgtgtcccccattcctgaactaggaccagtgtatcaagattgcctacaagaagaccctcatggcaaac

SEQ ID NO: 264256 - DNA, 449 bp, Glycine max
agcttgagtgaaacaatgactgcgagggtttggttgatgattcttccttgatttttggcatgcttactagcttatttcagctatgactctaatgcttatgctcctatctttgaaaagctgcatgcttgtgagaagtgattgatttaagaattccatgatattcagttcatatggttgaattcctttatgaatcagacaccattttcttttgattgaccactatctttgtcacttaaggacaagtgagttgttctttctttgcttgaggacaagcaaaactgtaaatttgggggagtttgttagtcgccttatacgactaacttttgtatagaaatcattttccaaaacttgtataatacctcaatttatggttatgttttatggactctcgtaaataaattatgttttatggataaaagtgtctctacaatatgtccatttgatttaat

SEQ ID NO: 264257 - DNA, 371 bp, Glycine max
tattaccgataaaccttttgctattactaatattatttcttatggtgcacttgagattaaaaatgaagttaccggcgaagtcttcaaagttagcggtcaccaactcaagctctttcatgaaagccctcaagtgaaaaaggagtttgtgcagacctctctttagtcttgcccattttacgtgatgatgtgccttgaatggcacttgaggagtatccttctcccttcttttatatgttgtctttttggttgcatctcattgcatgcttatattgaggacgatgtgcactgcaagtgtgaggggaagggtttaaaacatgaaaaaaaatttgcttatttctatttattctagatgcagctacttgtgtctatat

SEQ ID NO: 264258 - DNA, 453 bp, Glycine max
  unsure (1)..(453): unsure at all n locations
tctaagcttactttntctttgtatagtcttgaagactcataagctttcaatcttatctcttccagctccaagagttacaactttctcttttcccctgatagagactcatcaaaattaaaaaattntcaggcccagtatgctttatgttccatttttactggcaagtggcaagctttgccataaaccatttgaattggagacaggcctatcggggttttgaaggcagtcctgtaagcccatagtgcatcatccagcttgcttgaccaatccttccgagtggaggccataattttctccaggatcttctttagttccctgttggaaacttcagcttgaccgtttgtttgtgggtgatattntgaggctactttgtgtgtgacatgataatggcctaacaccttctgcaattaactgttgcaaaagtgagagccncatcactgattatgctacttt

SEQ ID NO: 264259 - DNA, 386 bp, Glycine max
  unsure (1)..(386): unsure at all n locations
agccttaggagagtgccatgtgagctgtctcccttattttttaacatagacaacctgggtgtctttatggagtattatcatgcaatacacagagatgcatccttgtatcaagtattatcaatcaataaacaacgatcacgcttatactcaacgattattatctgataacacacatcattagtgaatcacatctccgatatatataacatttatactttcatagggtggggattcacanctgtccaggtcttcagacaacacaagtctcatacaacacaatccataaaatcacgagactagtattttagggaaaaattctaaattaaagaggagaactatgagttacaaaacaaactcttaagcgcattgaaaatttaataaagaaa

SEQ ID NO: 264260 - DNA, 417 bp, Glycine max
  unsure (1)..(417): unsure at all n locations
gactngagtcatcaagagattataaatatgtgaccatggcatgagtttcatctatcatcaatcatccttgaataatctatctttcaatcttctctcaacatcattcaatatctttcaactctttctacagaatntttctgattcatcttctcttcatctttctaaaagtttttgttcaatactttctctttcaagaaaagttctttaatcaaaaacttgcgttattcatctttttcattctcttcttcctttgccaaaagaacgaaggactgaccacctgaattcttttgtgtctctcttctccctttgccaaaagaacgaaggactaaccgcctgaattctttcgtgtctctcttctcccttacaaaagattcaaaggactaactggctgagaattcttttaattcttcccttccc

SEQ ID NO: 264261 - DNA, 332 bp, Glycine max
acatcttgccaaacaaagttaggttaacgataacttgcctgtgctttttcttccatgctatatgtagcacagtcattgatccaatcatgtttgatgagttggaaaatgaggccgcaattatactgtgccagttggagatgtattttccccctgctttctttgacatcatgattcacttgattgtgcatctggcaaagaaatcaaatgttgtggtcctgtttatctacggtggatggaccccgttgagcgatacatgaagatcttaaaagggtatacaaaaaatctatatcgtcaaaagcatctattggtgagaggtacattgttgaaaaaac

SEQ ID NO: 264262 - DNA, 260 bp, Glycine max
  unsure (1)..(260): unsure at all n locations
tctgatcatcgagctttgatacatgccatanaaaactttggctaatgaagagggtgagaatgacggagaagcccatgctatggctgccattcctatacagccaagtttcccaccaacccaacaatgtcattactcagccaataacaaaccttctattacccaccgcccagttatccacaaaggaaatccctaaatcaaccacaaagtctgtctaccgcacttactatgacgaacaccacctttagcacaaaccaaaaaca

SEQ ID NO: 264263 - DNA, 440 bp, Glycine max
  unsure (1)..(440): unsure at all n locations
agctttaattacaagaacttgaggagattctcttaaaatcctatgagaaatctaagatttacaaggagaaagtgaagaggtttcatgactctaggattcttaggaaggagttccatattagccaaaaagtgttcttgtttaattcttacctcaagcttatttttggtaaacttcgatctacatgggattagccttttgttattactaattttttttcccacgtgcagttgaaattaaaaatgaagttaccagcaaggtcttcaaagtgaacggtcgccaactcaagctttttcatgagagcccccaagtggaggaggaattngttgcagacctctctttgatcttgccaattttatgtgatgatgtgccttgaatggcacttgaagagttttcttcccttttcttttacatggtggctctttgttagcatttcattacat

SEQ ID NO: 264264 - DNA, 412 bp, Glycine max
  unsure (1)..(412): unsure at all n locations
tagccttgcccattntcatcactttaccatttctctccaaaaccaaaacttggaccttcattcttctcccattgtgcgagacactcaaggagggagaggtcaccattttcatcttcttccaagctccatctgtgagacttcttctctcaaagccttggtaagaagcccttaaacctctattttcttcttatttatttttcatttttgtgcaaaattcttacttgaggttccaaaatttctttttcatcctttcgaagcttaagagttcaagatctaagttttttttccttgaccatttcgtggaagcttcacttaaggtaaggggagtctttccacttcttaaaccctaaccttgttgtctttggaagctaggtttcattacatgttgttttgatgtttaaaatttcatgtc

SEQ ID NO: 264265 - DNA, 436 bp, Glycine max
agcttgatccttgaatcttaattcttgaattcaaatttcctctcgaatcttgaagtgtgcttcattctatcttgaacatcttgaactcattctttgattgacctttgagctttttgtcatcacctttgtcatcatctttgttatcatcaacacatctttcaaatcaatcttgattcatcatgaagctttgcttctacaatctccccctttttgatgatgacaacttctgaaatcaagaaacacacacacacacacacacactttttcctagtcgatcactcacataaatttccattctcccactttgttgttgaatttatacttctcttaaaattaagttgattactcatgcgtgttcttgatttaattcctatttctctccctctttggcatcaacaaaaagccaaagtgcgtaacaaattaaaaacatacaaat

SEQ ID NO: 264266 - DNA, 444 bp, Glycine max
  unsure (1)..(444): unsure at all n locations
tcatgatgatgaatcagaattatgttgattcaagaagttntgataatgaccaagatgttgacaaacagcccaaagaatgatttccagattaaatcaagaacaaatgtcagaatcaagagaagtttgatttcaagattcaagaaaagatgaattcaagttctaagtgaagaaatcaagaagacttcacaagggaagtattgaaaagattcttcaaaaaacaaacatagcacagttttgtttttcaaaagagttttcacaaacttttctaagttaccagagtttttactctctggtaatcgattaccagtttcatgtaatcgattactagtggcaaagttggatttcaaaagcttttaacttaatctacaatggtccaattgatctcaaaatggtgtaatcgattacaagatattggtaatcgattaccagttcatctgaacgtgg

SEQ ID NO: 264267 - DNA, 436 bp, Glycine max
agctttgagcaaattcatacgacaataactttttactcggatgcctgattgagtcccgtgacatatcgagacgctcgaaattgaatgctgaagctatgagcatattctaacgacaatagctgtttactcggacgtctgaacgagtcccgtagtatatggagacgctcgaaattgaatgtagaagctctgagaagattcaaacgaccatatagttttactcggatgtctgatgtaggcccggactataacgagacgcttgaaattgaatgctgaagctctgagcaaattcaaacgacaataacattttactcggatgtctgatggagtcccgtaacatatagagacgctcgaaattgagtgttgaagctctgtatcaattcaaacgacaataactctatactcggatgtgtgatcgagtcccgtcatatatccagac

SEQ ID NO: 264268 - DNA, 396 bp, Glycine max
tagtgaagctaagcactaacatattatgctcaatgcatctacattcaatttcgagcttctcgatgtattacgggactcaatcatacatccgagtaaaaagatgttgtcgcttgaattggctaagagctacaacatatcaatgtcgagcgtctcgatatgtgacaggactgaatcatacatccgagtaaaaagtcattgtcgtatgaatttgctcagagcttcaacattgaattcacagcgcctcgatatgttacgggactcaatgagacatccgagtcaaaagatattgtcgttcgaattggctcagagcttcatcattcaatttcgagcgtctcgatatatgaccggactcactcagacatccgagttaaaagttatagatcgctgaattggctc

SEQ ID NO: 264269 - DNA, 438 bp, Glycine max
  unsure (1)..(438): unsure at all n locations
agcttgtttgttagaaagacccaacgctttttacctattgttgtcaacttttacttgcatttactgtttttaccatagaagtagtttatttctgtttttaaccatcgattatcaatgttgttccaacaatgccttacttctgaataaaactctatctaagaagcaagttccctgagttcgatactcggatcatttcgttttaattttaaatacttgacgacccagtgtgctttccggtgtttcatttcccttgaatataattgttgaaaattagagaaaaaggaaccatatgggaaaatgaacaatggacgtgtctttggcatgccaggtaaggtaagtcatcaaatttgacaactctgcctttttttctgaccgtgggagagtccattgaagacaanctcgaacaattatttgttgtaacaagcgcctacggcacac

SEQ ID NO: 264270 - DNA, 436 bp, Glycine max
  unsure (1)..(436): unsure at all n locations
tcttccctattntcctataaatatggggagaggtgaagtgaaaaaatgttcagccctcctagtaattcgagatcacttgaaattagtgaaaaaaatcgccccgcaaaaaattaagccgaggggctttcgtaacgtttccgtgggtgatttcgccaagatnttcaaccattcttcgacgttcttcgttcgttcttcgtcgttcttcggtcttcaaccggtaagttcccgaaatcgaacttttcaattctttctatgtacccttagtggtcctcatttgttttcacgtgcttttattttcatttcatttactttccgtacccccttttgacgtgctttagtcatttacttaagtcattttcttgcctaatcaaaaaataaaataaatttccaccgatcatttgaattgtaatatccgttaatttctgtaaaatgaaat

SEQ ID NO: 264271 - DNA, 398 bp, Glycine max
  unsure (1)..(398): unsure at all n locations
agctntgacttgagtcatcaaaagattattaatatgtgatcatggcatggattctttaaaaaataacaatcaagaaatctatctttcaatcttctctctcaacatcattcaactctttcaacagattttttctgattcatcttctcttcatctttctaaaagtttttgttcaaaactttttctttcaagaaaagttctttgataaaaaacttggtctattaatctttttcattctcttctccctttgccaaaagaacaaaggactaaccgcctgaattcttttgtgtctctcttctctctttccaagagaattcaaaggacctcgcctgagaatncttttgattcttcccttccccttaaacaaaagatctcaaaggactaaccgcctgagatatctt

SEQ ID NO: 264272 - DNA, 440 bp, Glycine max
tcttagtttcagatgatgcagatgggtttgtagctacctcatgcactcctctaatgactatggcatcatttctggcgctaaactactgggagttggaggccatcttctcaattaaatttctggcttcagcaagagtcatgtctccaagggctccaccactggcagcatctatcatacttctttccatattactgagtccttcataaaaatattggagaagaagctgttctgaaatctgatggtgggggcaactggcacatagtttcttaaatctctcccagtactcatacaggctctctccactgagttgtctaatacctgagatatccttcctgatggctgtggtcctggaagcaaggaaagttttttctaagaatactctcttaaggtcatcccaactcgtgatggaccttggagcaaggtaatacagccagtccttt

SEQ ID NO: 264273 - DNA, 422 bp, Glycine max
  unsure (1)..(422): unsure at all n locations
agctngttgaagatagctgaaaatatgtgtaggttggtgtgggttacaagcctacaagtgcttacaaaaggaggattgattcggaaaggaaagagaaaagcttagctcgtttacaagggcgaggatcacaggtggaaagggtccttatttgtcacatcaatgagagctttgtgagtgtagcgtggctgcatgaagatcaggttgctatgctggataaagagaccaatcaagatcagtcgaattgggtgtagccatgttccccacactttgaattgaaaaattggcatatcatagagcaaccaaagatttctatttcgaatttgatgtaatcaagtagtttggatcctattgtcgtgcctaggctttaggggttactttctttgttgggcatactcttctttaacgttctagtgaccattact

SEQ ID NO: 264274 - DNA, 430 bp, Glycine max
  unsure (1)..(430): unsure at all n locations
ntatgttgtgttctttcccaccccacataagcttcctttgcaaggatttaattgtgtgtttcactttccttggaattttataaaatgacaagaaaaatagcgataaagtagacaatgtagagtttatgaggcttccttgaccaccaatggatatttacctttgtctctatggcattatcttcattctcaaattctcaatcattaggcgtcgtgtatcctccctcccttggttaacacctaatggaatgcccaagtaggtgaaaggtagcttcattgtcatgcaatttagcaaatatgagggcctcatttccctacacaacgatcccaaccaaacgactgttgaaaaatttactctaaggcctaatacaaacttatagcatttgaacactaccttaagggtcaagacantttccaacattggcttccataa

SEQ ID NO: 264275 - DNA, 248 bp, Glycine max
actcaattgtatgattcattcattccagtctcacagagccggtttatcttttcatagacggaagatacctaactggagtaacccactagcatactcccatgacttccaggaactaacgaagcgccataaccaactgcctacttaaagaactcctagtatccaacgaacagccttatccaactaactactgcgaaaactccttgtaactaactgcaaccgcttaatcgagatacccgctcaagtaggcg

SEQ ID NO: 264276 - DNA, 201 bp, Glycine max
tgtgctcttactgcacagattatgctcttggaactagtttatgacaattgatgtctcatgacatgaagctgatgattctcttgtggactatataacctaagttactgtatttagcggcctagtaactcgttttgtttataacttatcaatctcatattatcagacacgcggttgtgacaagatgatctcacttgaagtctt

SEQ ID NO: 264277 - DNA, 425 bp, Glycine max
  unsure (1)..(425): unsure at all n locations
agcttgtgtctatcccacatggttagagtattctcccaaattatcgtgatcttgactggtctccctgtgattagcatatttattgcataacacttgtgtattgatcgatattgattgattgagtgatattgtattntgatccttgagtacatgaatgatgtgaaaatgtgtgaaacgagtagtgttaagatgtgatgttacacgatacatggtggaatgatgtgaactatgtttaagtagattatatttcatttataaataaatatatatatatatatatatatatacacacacacacacgtaagttgtctcatttctctctattagttaagaatgtgataactcactccttgtgtgttgtttgtatttgggtcctatgatgatctcaaactttgtgttcatgggaacagatggttatgtgaatg

SEQ ID NO: 264278 - DNA, 443 bp, Glycine max
  unsure (1)..(443): unsure at all n locations
accttaaatctcagctttagcattgngtttctcttggagaagaaaaagattatttgttgcacatgcttatatgaattctaagggtttgggaaggttttatgactcctacaattctcctttccacacccaggttttctgtgagcacactcacccctcaacatatattaaggtccatcatctaaactcactanatacacacaaacataagcacgacatcatcacataaataattaattntcttcaagcactaaatttaaatttaactacacttactaattaattacggttactaaaatattccttattgaaaatcccagtggtaccattaaaaattaaccaagggaagtattaaaccggatttgcttttctttaaaaagaaanttaatacttatatcagtgggttaaaatatgaataattaatataacatattttaaataaatat

SEQ ID NO: 264279 - DNA, 436 bp, Glycine max
tgcaagcttgcttctacagagactaagccaaatatcatcctagctctatccactgtcaagtcatatttgtgtgatgtgggggccaacttggagtatgagaggacactccacacctgagctagtgtggtcagacccttcctgagaatcttcctaggatggccctctgagttcaagatgaacccttggccaggtatgcataaggcagcctctatctctctgtagtctgtaggcaacctgcagcatctggagtaagcggtaaggtctccccctcagctaataccataggtgtctccaagaatgtgttgagactgtcagcatcaatcttcaccaaatgacctctgactctggactgctttggtggatgatcctcacaactgtataaatttgcgtagaattctttcaccaaagctaggtctatgctcccatcgactaaatt

SEQ ID NO: 264280 - DNA, 425 bp, Glycine max
  unsure (1)..(425): unsure at all n locations
gaggtccaggaaggataaggcggncnaatggactagttctgctcctgagtatgacagtcaccgctttatgagcgctgtacaccagcagcgcttcgaggccctcaagggatggtcgtttctccgggaacgacgtgtccagctcagagacgatgagtatactgatttccaagaggagatatggcgccggcggtggacatcactggttactcccatggccaagttccatccagaaatagtccttgagttttatgccaatgcttggccaacagaggagggcgtgcgcgacatgaggtcctgtgtaaggtgtcagtggatcccgttcgatgcaaatgctatcggccagctcctgtgatatccgttagtgctagaagagggccatgagtgcgagtatggccagaggatgaaccggtctgatgggttcgatg

SEQ ID NO: 264281 - DNA, 435 bp, Glycine max
agcttattctttatctagagtagttaagctcaactagttactgacatatattcggcttcagtagtgaacaatgcagttgacccttgcttcttgcataaccatgttactaagttgccaccaataaagtggcggctttgacttttgcttttccttttaactctatcaccaacatagtcaggatcatagtagcttgtaagtctgaaactttcacttcttttgaacataagaccaagattagaagtttgaattagatagctaaaaatgtgtttaattgcaaataggtgaacttcccttggttctttttgaaaccctacacatagagaaacactaaacatagtatcaggcctaaacccagtgacataaggcaatgagtcaatcattgctctatactgagtcccttccaccttttgtgattccttgtccaatccatggtat

SEQ ID NO: 264282 - DNA, 413 bp, Glycine max
  unsure (1)..(413): unsure at all n locations
cttgaagtgagaaagtgtggaagagtcagtcttcctacctttatttgttgactacttattggcacctggagatatgtcgcggnggtcaggagaccttggggacgtcaggtggggtgctatttcccaaaaccaagcttgaccaatcccgacccaacccaggcataatcagtcagtgagaacctgtgacatacctaaacaggcgagctcctggcagtcaaccaataaaagaacaaagaccacaaagcaaggaggcttgtgtggtggctggccagctatggatcttgagtgatatctggaatatggcctctggtaatcgattaccaagggtgtgtaatcgattacaaggcttaaaaatgaagacaggaagttaagatggcctctggtaatcgataccaagggcgtgtaatcgatta

SEQ ID NO: 264283 - DNA, 423 bp, Glycine max
acgaaatgttgaaaacatgattgtcaagatcgtgagatctacgtaggcgcatgagagttttctgagactccaatactcgatctgcaaaagtttacttcaaataaaaaaatgataagataactatgaatatcatatcaactgaccactttattaatattctaacgcacataagtaataagtggatccaattacaaaacataagctcttctccaacaaaaggtgatacagttggaaaacactactagagaagatgaacctgattggcagccatggtttacgaatggaatgccggatacagaacaagcgctgctgagggagtatactggtgctctttggaattataaagatatgagaaagactagcccacatagagaagaaaaatcaagacgaccactcctgtttatctttcccgctgaaagaact

SEQ ID NO: 264284 - DNA, 451 bp, Glycine max
  unsure (1)..(451): unsure at all n locations
gagatgatgcttcaatggaggaagagagagagagagttaaagaaagatgatggagcatggaattgaaggaggaaaagaagatgaactttgagttgtgtctcacaacactctcattcatgaaagttacaacaagtgttacacatgcttctatttatagcctaggtagcttccttgataaancttcttaagaagcttccttgataagcttgcttgagaaacttccttgagaaacttctttgagaagcttccttgataagctagagcttatctacacacccctctaatagctaagctcagctccttgagaagctagagcttagctacacacacccctctaatagctaagctcgcctccgtgagatgagaagctagaggttgactatacacatcccctataatagctaagctcaccccatgcccaaatacaagaaaatacaacaatgttcctact

SEQ ID NO: 264285 - DNA, 415 bp, Glycine max
  unsure (1)..(415): unsure at all n locations
tgcaagctttagtgccttcactttctcactnttacactcatttaaatattatcctctcataaaaaggtgaacttttactaacatgtatatccttttatgttttcaaattttatttgtgttactatggtacaccattatgaatagtgattgcccatagggtgaatatttttgaatttttctctcaacacaatttatttcacaaccaaggttagaatccgaaccccaaacaacaatattttaaaatcgaacccgttagtgaatcgataaagatactggttcaaggtttaatggttcaacaataattgaacaattgttgaaccagtaataattaaataatacttttaaatttaaatacaataaattacatagtttttataaaaataataatattcataactttcctttgaaattatta

SEQ ID NO: 264286 - DNA, 433 bp, Glycine max
  unsure (1)..(433): unsure at all n locations
tatgtacttctgcattctactaatatatggagctgaccactgctttgcctgaggatgagaattcctagaccataacaatgctagaggcgataaaggacaacggtctttcaaataaacctgttgtacgtgaacaaacattattaactcaaatgaacacaaatgattgcataaatttaaaaataagactaactatcttcaatgtacctaaacaaaatgatttccaaacacatgatcgacacatataatgcggtgcatagaagaatctgttggtggttgacttctaagaggaaaaaatgtcatgctttgttgtcgggacaatgatacaaggattacattataccttgatgcaatgacatatcccatctccgttatatccatccacgtatctacactaacctgaatcanacaaatatacacatcaaagttattaaag

SEQ ID NO: 264287 - DNA, 391 bp, Glycine max
agctttgacttgcggcgtggagacaccatatctgtcggcccatggcatgtgtttcgagacttatcacccatcctggaatcatcaatgaatcaatcctgtggcagcatcatggcgcaaacatctatgaatcaatctttccatatcttggtgcacaactaggtgattcattgctcttcatcgatcaagaagacttgatgctcaccttgtcgtccaacaaaagttctgtcgccggaaacttgggaaagtcctatctttcatactatcctccctttgccaaaggagcgaaggagtagccgcctgaattcttttgggtctctcgactgccttacaaaagattcaaaggactaaccgcctaagatatcgttgaggtacccccttacaaagatacaaa

SEQ ID NO: 264288 - DNA, 297 bp, Glycine max
agcttctcgcattagagataaatatcctgttataatacctttaagattgtactctgtttaggtaccctgtttatatatttatttattcttttaaaactctcgctcatatattgcaattgtgtgcatgtgattgtggagaaagctagaaaaagtgacattccacacattgataagaaaaaagtaattcattttcttactacttttgtcccttttgattagttcccaggcctgataatgttgtcttactacttcaaagttttttattggggggggggggggggtgtcctctttcttctc

SEQ ID NO: 264289 - DNA, 439 bp, Glycine max
  unsure (1)..(439): unsure at all n locations
ggtagacaacactgcggctgcattattcaatgttgatcttttccaacctggctcgcccttgttgcccaaattcctttgatctctcagtacatcagccaatacaagttcatcttcaaatttcatgtaaaataacttcttgtttcctcgttattttctcctaaaacttttcttttgctcgtcattttgtcattagatgactccattgaagttaatgtcacttattcctgcacataacaaatattagatacaacctactttattcatttgattagtccactgcacaatcatagaaaatatttcaagcaaagtttttatgcaatagcaaagtacataaaagtctatcttcaatagcaaagtacagtagtaacaaagcacagaaagtntgtctgcaatagcaaattatattttaaaagaactatccctaaacaaagtttcttct

SEQ ID NO: 264290 - DNA, 421 bp, Glycine max
  unsure (1)..(421): unsure at all n locations
agctntccgtctatctactccgacgacggttgttgcgacgtgactctctatgggatccgagaggctgctgatttcgccaaggagcgggtcccgttctgtaaaaagtatggggtgaagtcaaggtgtcccaaagtcttcttctctccctttggggatgaggatcaagagactctttgggacgatcaattcagaacacagagagacctcgtcaaggtactatattatatctctttctgtgtgcgactctattacttgcatgctctattgctttcttattcacttccaatgacctacctcatgcattttgtgttttttctactctaatgatccacgcaccaattaatcatcaacataagtactatgaattgaattggattgaatattcttacttttttcatggaaagaaagctgaatatttttc

SEQ ID NO: 264291 - DNA, 434 bp, Glycine max
acacaacaaactcagctagcgttattatatatattgaactctatttttaccttatcattgggagaggtcattcaggcaatttgtttactgaaccagtttatttagtattcaatgaaatgattgttttacgttaatattacatcgtttttactagttaatttccttttactcatatttcctctaaaaaaaaaaaaacttttactcatatttgaggtcatatatatgtaaatcgataccaaaataaaagcgaaggtataatgactataagagggcccactaaattttttaatgtcaattgctacaaatagatcgactctattaaaataagggtttgggtaattatgattaattgattatcagttcatctggttgctttattaataatattattatcggtctattaagcaatatgttggtatgagaaaaaatttata

SEQ ID NO: 264292 - DNA, 434 bp, Glycine max
  unsure (1)..(434): unsure at all n locations
agcttagggcacaatggtttactgaaaaatgctatggggtgctggtaggcatancactggtgctgagctgactgtaacgacccgcctcatcactacggtatccacactctaatattcgatgatttcaatttttatttttttttataaaaagaacttccttaatttttgactatgaaaatagaagtgattgtatcacaacataaattcatccaacaacacgccattacttaagtgaatatgcataattacctagaaacaataattcgatacacgtcatacatataacgaaaattaaatgtgttcatagatataattaaaatcctagttttacatctttaactcaacaaaataaaacttaaaaaccaactacggaggagttgattacaaaatacaactctctcccaaaataacgcaaacgtcaatcacgtcgactc

SEQ ID NO: 264293 - DNA, 348 bp, Glycine max
tgaagtgaggaagtggggaatggtgagacttcctacttttattcgttgaccacagagtggtacctggagatatgtcgcgggggtcaggagaccttggggatgtcaagtggggtgctattgcccaaaaccaagcttgaccaatcccgacccaacccgggcatagtcagtcagtgagaacctgtgacatacctaaacagacgagctcctggcagtcaaccgattaaagaacaaagaccacaaagcaaggaggcttgtgtggtggctggccagctttgaattttgagtgatatctggaatatgtgtcgcaacgtgcccttcgcgggcgagcgagggcgaggctcacgggtg

SEQ ID NO: 264294 - DNA, 423 bp, Glycine max
  unsure (1)..(423): unsure at all n locations
agcttcctcggctattagcatgcctcttgtcttacttgttaaaccttcttcactcttacaatacgcaggttaaattgtttatcatttaaggaaaatttaaaccactgctagctggtgaatgtactgtgtttgctatcacatacatatatacactctatgatatgtggcaactccaggtagtgtcttttgagttttgagtggtattctttgagtaaatcattcttaacattttgcttttaggatccagaaaaaagtcatttatttatacattgacaatcatgtatgtattctttatttatctgtatctttctttttgtatataaatagtattatattttacatttctctctctttatccctttctctctaagngttaaatagtatggaatgtccatacatnaatnttcttatcaatattactaa

SEQ ID NO: 264295 - DNA, 423 bp, Glycine max
tgaggggttggttacttccagaatatcatcgagtctttacttggtatttgagtacatggagcatgatcttgctggtctttcagctgctgttggtgtcaaattctctgagccacaggtaccactattctatgctctgatatttttccagtggtgtcacctcatcattttgttgccttattatcatacaatttgaagaactattagctcttttcattagtggagattttttttatttgctcctagagcctccaaaccaagcccatcatcttgggtcccatacatgcgctgttttgagcgtgttttttacttttgattttgtatgattcttgctctgaaatttcacatgtcacatcactccataaaatgaagttagcacttgattcggaagttttactttatccccgctaggatgcaaatacaccg

SEQ ID NO: 264296 - DNA, 422 bp, Glycine max
  unsure (1)..(422): unsure at all n locations
agcttggagtgagtataataaccccacgttagttcacacaacaaaaatttcttggacttttactgctgctcttggctccctgttatatttcttggacttggttactcaccttgatgacttgaattatngcataatattctggttgatttcctgggtttggctgattctcttattgttgggtaatcaaattaacacataaaatgattatggtgttcaacaataaagcaacatcattaattattacgcataagtaattagcatatgaacttcttggtaccttttgaactgcctgaagcgttaattaattagctggggattcaagtcttgaaggaaatgaaaaatcgtttcatggccaagagacaaaatgctatcttccttacacctttcaattgtgtgtaatacaatacatatatattatattt

SEQ ID NO: 264297 - DNA, 442 bp, Glycine max
gacctataaaactccgcttaacttgttcgaggattgacttgtttaaattattttcttcaaactctcagacgtgactgtgaacgtctgtttatggaggagtcccagtcaatttctgattatatttctcgagtattggccgtagtcaatcaacttaaaagaaatggtgaagatgttgatgaggtgaaagtcatggaaaaaatacttcgaactttaaatccaagttttgacttcattgttaccaacattgaagaaaacaaggatttaaagaccatgactattgagcaactcatgggttccttacaagcatacgaagaagaacaaaagagaaaaattaaacaaaaggaggctatggagcaactactacaactcaacgcaaaggaagcaaactatgcaaaatacaagagccaaaaatgacgaggtcgcggccaagatcgtggacgtg

SEQ ID NO: 264298 - DNA, 438 bp, Glycine max
atcagcaatatatttaaataaatatttataatactgacaataaagtatgtctagtggctgttggtacaagaagctaattcctctaaagagtttgagtatgattagttgccgaggaaaaaatatccagattctcacatcataatacatctaatcctccattagagatacacataaatctcgttctgttttctgtgtagcatttatcgatgttttatttcagtaccacaaaaaaaaaaaaaaaaccattatttccaccctctcgtgaaaacaaaaagaggaatagaatttaaaaaacatgggagcaaaggagtataggatgtagaaaacaactttcttctctttatttgaattttaattttaatgtcatacaaataaagagaaccaacgtgtaaaagaaatttacaatcaaatgttcattgttaaccagtaacagaattt

SEQ ID NO: 264299 - DNA, 387 bp, Glycine max
  unsure (1)..(387): unsure at all n locations
ttaccaagaaatgctacccttaaaacaaaaatggcatacaaccccctccaataaatacaaacatcaatgtaaatttagagcaagcttatgcgcatacttctttacgaacgttcacttgcacaagacattcttataactaagaaaaatgcacccatatacaatcaaggcaccttcgttacctagattatttacatgtacttccaaggtgtatttgttacctacatcacacancatttctttgctaaattcacatacatgcatactcttagcacctttgctatcaaaaatgcatacgtgcccatttggatttctaatcctatactacccaacttatgatgaatttgctattacacataagtgtactttaagcttttcaagttttttttt

SEQ ID NO: 264300 - DNA, 449 bp, Glycine max
agcttcaagaatcaagatcaagattcaagattcaagattctagattcaagattcaagaatcaagagaagacttaatcaagataagtatgaaaagaatttttcatgaaattgagtagcacatggatttttcacaaaacatgtttaccaaagagtttttactctctagtaatcgatttccagattgctgtaatcgattaccagtagcaaaattgttttgaaaaagttttcaaattgaatttacaacgttccaattaatctcaaaaagctgtaatcgattacaatgttttggtaatcaattaccagtacctttgaacgttgaaattcaaattcaaatgtgaagagtcacatcctttcacataaaagccttgtgtaatcgattacactaatttggtaatcgattactagtgattgtttatgaataaatcaaaagatgtaactcttcaaatagt

SEQ ID NO: 264301 - DNA, 254 bp, Glycine max
  unsure (1)..(254): unsure at all n locations
tcccagatccgatcatggaaggacttggcaactgccttcattatgcagtaccattacaatacggacatggctcccgatcggaaccagcttcagggtatgactaaacgagagcatgagtccattaaagaatatgcccagagatggagagatcttgcagcccaagtcgtaccgcccatgatggagagggaattgatcacaattatggtagatacgttacccacgttctactattaaaagctgatangctacatgct

SEQ ID NO: 264302 - DNA, 356 bp, Glycine max
gaagtgaagaagtgtggaaaagctgttcttcctacttttgttaggggaccacagagtggtacctgtaaatatgtctcaggggtcacgacacctttgggacctcaggtgtggtgctattgcccaaaaccaatctagaccaatcctgacccaacccaggcatagtcagctagtgagaacctgtgaggtacttaaacaggcgagctcctggcaggcacctcattaaagaacaaagaccaccaaccaaggaggcttgcgcgggggctggccagccttggaccttgaatgggcttggaactcggctctggaatcgacaccaacgagtgtttctacacgagcttaaaagaaacagaagtaaa

SEQ ID NO: 264303 - DNA, 434 bp, Glycine max
tcttaataagtactgctattccaaccattgttcttcaccccaaataaataatatgtggctgaatcttgaacattcactgacaccaaatatatggccaccaatttaattaaaaaaattgtttttgtaatctttttctgttaagttaaataataattttgaaatcctttttataaagatcacagttcacaagcatccttctgagttaaactagaacaatatagcatcaggcaatcaacacccttgatgataataattctgaaattctaactaaatcaccatataccaagaatttacactgtgcataaaaaaaatataaaaattaataacgtgaattgcggccacaggattaataacgatgtgattaaatttcaaccaacaaactaaacttatagacaagacctgaagtatatactaagaaataaaacacatggagc

SEQ ID NO: 264304 - DNA, 435 bp, Glycine max
  unsure (1)..(435): unsure at all n locations
agctttaagccagaaacttgtacanaattagtatctgaatcttattccaactttaaaggcattggctacattgcacattaaaagcactgacacaggaagtgaggattgaggaaaaagtaccatacaaaagtatcctccattgctttaacttatcaaaacacttatttctcgttaatatcagagtccttgtaggcatctctcccggataacttagaaacaatgtcttatcactgtaacatttactttggggggaaagtcccaattttaaaatcaacattacaagattttaacaaaaataaaccacattatgtacttcttgattgaaaagtccgatcatcattgtttactggaggccataaaaataaataaaaaataaggcttccaagtcagacaaatatcttcattttttttatttgatgacacaccaattacatg

SEQ ID NO: 264305 - DNA, 346 bp, Glycine max
  unsure (1)..(346): unsure at all n locations
tggtggctagttcatggcattaatgctccaatacttcttaaggttgcccttaagctacttgcgcaaccttgtttgtcttcatgttgtgaaaggaattagagtacatattcatttatccattctttaaagagaagcacgatgacaccacatagagatgaagatttagtattttgtcatagcaacctacgacttctctcagggaatactccacaatatcatcaagaggaaactaaaatgtgggatgtagctggagatgattttggatcacttgatgattgcggtgttcttgagattgctagtttgtctttaaatgaaccagagttagagggtgtctttntcaatgatg

SEQ ID NO: 264306 - DNA, 455 bp, Glycine max
agcttataatgagtcatagatagcgcgggtgttttttaaatgtttagagaaagtggactgaaaatagattaaaagcattttcatgagaacagtccactcgctaagcgcatatcatgcgctgagtgcatctccttctttctctaagcgaggctagcctgcgctaagcgctcaaacccctgcatctaaaggagattggctcgctaagatggccatgggcaagcttagcccaattcaatttgacctgaattgggctaagggagagtacactcgctaagctcattgtgcttgtgggctaagcacgatgtacccacgctaagggctattcctcacaggcaaattactagtttaattgaactaaacacgatgtacccacgctaagcactattccttgcggccttatagcgctaagctagcaaccactaactaagcgcacgcccccctgtatataggatgca

SEQ ID NO: 264307 - DNA, 389 bp, Glycine max
  unsure (1)..(389): unsure at all n locations
tcaacacatttaagggttggctgcattctgagtttgtcctcatgtntactgaccacccactgtctatttgcttgtttgttgttcacttctctgcagcaattatggctatgcttaaatgtctttatctgaaaagagtttctaacttcattctttgcacagtagatttcctaatcacaaaatgccttcttgcattttgctctagccctctgtttatcattcttcttccacttgaactccctgcccatcaatatgctatactccttccaggcagatttaaattcatctagagtaccaaactccatccctaattccaacttctgttcaccaactccactactttgattatattgaagattaacttcaacatcttcatctttatcattactact

SEQ ID NO: 264308 - DNA, 379 bp, Glycine max
tgtggaggtaatggacggaatgtggtaaatgaacgattctaatggttgagaaaaaaacaccagatggatattatgtgatcgattcttcttaaaaaagataaaaatttaaatttaaaaaaatagagattaacatgaaaattctatatttttaaaacgaatttacgcattaacggaaaaaaataactattttaaaaaaatggcatcatcttatgattccgatcctgttcaaatccgagtatgggaaattgggaaccaaaacaattgtggccgggcagtacttatccacgccagaaccagaaatcagcagaagaataatgcgaaaacaacacatggttccctcctctgttttatttcttacacgtggcacagcctccatcat

SEQ ID NO: 264309 - DNA, 440 bp, Glycine max
agcttattattatttatacatactaacaataaggtactttaactcggtaaattaaatgatcagcgtaaatgtacatcaatacaaatataatataataaaatattaacgtaaacgtacatattatatatatatatatatatatatatattaatataaaataatcacaataatatcacacatatcattaagtaaatacaaattatatataacaataaatatatactcatattgatttatatgaacaacatgtatatctatattctaaacatatttcaactaagttaccaacatcaagaaaatgcctaaatacaatgcgaatacaactttagttaatttctttaaatgatgttagccaattcaattatccaacaatccctacacatatgaatttcatgacgaaaaatcactcacatgaaataaaatataaagtttgtgaaaaa

SEQ ID NO: 264310 - DNA, 435 bp, Glycine max
ttgagccaaaatcctgactcaccataatccctaccctctgaagcaaaaatatgaatagaagggaaatttccaatcatagaaaaaaagaaggaaaatttccaatgaaagccaaaaaagaatagaagggaaatttccaatcaaagaaaaaaaagaaggaaaattccccaatcaaagagtgggagaaagcaaaaagaaaagaaaggaaattcccaatcaaagagtgggagaaagcaaaaaggaaagaaagaaaattcccaaccaaagaatgggagaaagtaaaaaagggaaggaaagaaagttcttgatcaaagaaactagaagaaatatgcagagaggtctttggaccggacaatatctgaacaatacaaaattgtcaccaaattgaacaaaaaggaaggaaaggaaaccacaacctaaaatgggtcttctccttta

SEQ ID NO: 264311 - DNA, 434 bp, Glycine max
agcttcaaatctttggtgcttggctgagcaagggaagctaaaagtcacgtgtaattggacgaactctaagtgcttaaaaataacaatttgaggaagcagcagcactttgaggcaaagtgcatgtggcccgtaatataaaaccatcttgcaaggtcccaactctaccattcgtttaagtaaggtttcaatacgagtctgtagattgaagagtttttatttttcttttgaaaattattgtatttcatggttgtgtttctatcattgttatgagttatagccagataggaataggcagaagcaatcgaagaaatgtgcagtttttcctgttatctgcatggaccttgcaatactaggcccaacagaggtcctataaatgagggccttatcaacctactaaatacttgcaaatattcaaatattagttttgatttatg

SEQ ID NO: 264312 - DNA, 427 bp, Glycine max
  unsure (1)..(427): unsure at all n locations
tacaccaatgcttagccaccattgacaagattacatctatagtaactccaataaaccagaacaactcaaatgtcttcaaaaaggatagttcacaaacacttaatgagcataatttcaactcaccaaatcaaatagcttcaataaaagccataatgggacaaatcaaatcattatcaataacaagaaagaaagaaactagggcaaaaataagcatagtagctaaagatgacaatgagtgtgaaaggatcctttcatgtaattttagtatttatctatctcctaataaatattagataggttccaccaatttattgtctatatagagggagatatacacaattngaacatgaccatgtgatgttaaaaattgagatgagaggaatcatttcttgtttgatattgangagaaattgatggaaacctctct

SEQ ID NO: 264313 - DNA, 441 bp, Glycine max
agcttctagagagttctacactactctatatttctttaagacgttctataaaattctacacttttctagaaagctctagaattttctagaacctcttcaattaaggagggatcccaacaaaatgaaacaaaataagagtgtaaattttttatttgttacccttttgtgattgacaaaaatagaattagcctaaagggttggcattgactcctcccaatatgaagtcaattctcattcaagaaaaaacttgatgtgtcttgcactcaccaattaatgctaagtgaggatgatactgtgagagggtcccattggattcgtaaaggaattaaattaccagactcactgcctaccccaatttctcttccaccaataaaaatctaacatgtgtgcaatgatgacatgtgtaatttccctgcattgaatggatcgtggtgaggggtt

SEQ ID NO: 264314 - DNA, 441 bp, Glycine max
  unsure (1)..(441): unsure at all n locations
gttctttcacaatcaatttgtctactaactaacaattctactgtgagttcacactcttgttctttcttctttcaacatgcatattcgttcaaattcatgaatagaaacacaaatctcatcttcaacatgcattcaatttaaagcaaggcatacatccatttttcaaaataaataaactattttactgcaacaccaacaaaagttaagttaaactgttccagatgcttcagaatgagcaactacactactcatgcacaaaactaacaagaagtaaataatgtactaaaaccataattatactaatagatcaaaaagcacaaaaaaatcaataggaatntaaggatcctgtgattggtccagggtgtcctgtgtctgaccctcctcctcttttgacaatgaagacatgagtagctataggagaagtgttcagagacaggactg

SEQ ID NO: 264315 - DNA, 438 bp, Glycine max
agcttggaaggatgctttttggaggaaattaaagagggagagaaagagagaagggggagcacgaaattgaaggaagacaaagggagagaagttgaactttgagttgtgtctcacaagactctcattcatcaaagttacaacaagtgttacacatgcttctatttatagactaggtagcttccttgagaagctttcttgagaaaacttccttgagaagctagagcttagctacacacacccctctcataactaagctcacctccttgagaagcttccttaagacgattcctaaagaagctagagcttagctacacatacctctctaatagctaagctcacctccttgagatgagaagctaaaacttagctacacaccccctataatagctaagcctccccccatgaccaaaaacattgaaatacaaaaaaaagttctta

SEQ ID NO: 264316 - DNA, 378 bp, Glycine max
  unsure (1)..(378): unsure at all n locations
tatagaanactaaataaacattttcaacatcttgaaatataatgaggatctcaagaaagatcatcaagttcacttagttgattntgtcctggaatccactttgcctggtagtgtacaagatgcctctagttgtgaggaagtcaaggcactatcggacaaaaggtaaggtatctagtggatgcaaaactcttcttaaggattttcatgatttggaagagaaggtaaaatccttaaccacaactcttgaagatttagaagaagggcgcaaggaaatgcttaaacaaaaactcttcaaaaagaatacacctttgctaatgatngaatggataaactgaaaaaaacaactcanatctctggacgaaaataacattataaaaa

SEQ ID NO: 264317 - DNA, 403 bp, Glycine max
  unsure (1)..(403): unsure at all n locations
agcttcaatggtttantgaggatggagatgtgcaagtaaggaagcaagtggagttggatatttccattggaaagtacaatgataaagttctttgtgatgttgttcctatggaggtcatccacttactcatggggaaaccatgacaatttgataagagggataatcatgatggtttcaccaacaagatctctttcacgcatcaaggcaaaaagatagtgctcaaaccattgagtccacaaaaagtgtgtgaggataaaagaaaaatgaaagagaaaattcttcttgacaagagagaaaaagaaaaagagagtcttacgcttgagagttcaaaaagtcaggacaaaaagagggaaacatgagaggaaaaagatgagtgaaacacttgaagtgagggagaatttac

SEQ ID NO: 264318 - DNA, 433 bp, Glycine max
  unsure (1)..(433): unsure at all n locations
ttaaccatactagtgagttactgtgtaatcaaaatttgttacgaatgtgaatttggaatgtctaaagtattgactaaacatcaaatagaactcatttatttggttgttttcctttttctgggaaagttgtacaaggattccctctactttgtaatcttttatggtttctcacgtgtagaataagttcgttcttatgtacccaaaaagaagaaaaaaaaatgttttagcatttcattgatctaattaagacatgcattaacaaaatcttaagcatgggcacttcattcccatatcgggtataggaagacattggattcgtcgtatcgaaattaattaaaaaaaacgtttactaaacttagatatgattctaattaaactaaatgcagtttgagatttagctatgttcacgtacttgtatttcattntttttcta

SEQ ID NO: 264319 - DNA, 416 bp, Glycine max
agcttcataccaaagcaacataaaatctatgtatccaaaacccctcaatttaatggattttcaaggtttgagaagtgaaattgagaatgaggtaaatttggagcaaactctcacctcacacaagtctataacatcaatctaaacttgctcaaactggatttacaccagaaattccaccgaatcaaaatttgactcctcaacacccaattttaccctagaaatggctctttgttcactttggtcatttgtttttctctcttgcacaacccaagcttcctcataagtcctaaatgacatttcaaactaggattaactcactttaacctccaaataccactaaatccagatttggccttccaactctcaaaaactcaccttttcccactcataacaccatattctcactttctaaccct

SEQ ID NO: 264320 - DNA, 430 bp, Glycine max
  unsure (1)..(430): unsure at all n locations
tctctggggttgtcgcacaggcttataanttggctctttattgattntttgcatacaatatgatggactgattccttttagatcaaaaatgtgccaaccaatagccactttacgtcgttttagaatctgcaccagttgatcttcttcttctttcttcaaagagtttctaattataacaggtttggtctcatcttctcccaaaaatacatactttaaatatgccgaaagggtctttaattctgctttgggcttttctgctggtctcagtttttacaattcttcaaaaaccacctggtcaacaccactgtcttttgaatcatcgagctcttcatcacaagctaagcaatctctcctgtagccaggttctttttccaaaggagactgtagtaccatggttgaggctaacaatgctatttcctgctccacctct

SEQ ID NO: 264321 - DNA, 315 bp, Glycine max
actggaaggcggtttttagtgaatcctctgcggccttcacatacggcgtaaaggatgggcaggtcaccaagatgtcttcctcgcctgatatgatgaccagatgcccatccactacgaatattaacttttggtggagtgtagaggaaacaactcccactgagtggatccacggacgccccaacacacagctgtagggggggttaatgtccattatttggaaggcaacttggcatgtgtgagggcctatctgtactgggagatcgatcttttccctaaactttcggggggtgcccgccgaggcacgaaccaccattg

SEQ ID NO: 264322 - DNA, 328 bp, Glycine max
caaacatttggacagttaggtgcaccagtgtgacattacttgttaaagcaaaaatggcataaaacctgctcccataaatacaaacatcaaggtgaatgtagagcaagcttatgcacatatttccttacaaacgttctcttgcacaagacattctattaaccgaaaaaatgcacccatatacaataaatgcagcttccttacctatattatgtacacatactatcaaggtgtattagttacttacatcacacacatctccttggctaaattcacatacattgcatctcacagcatgtttggggaccaagaaatggacatgtgccaatct

SEQ ID NO: 264323 - DNA, 414 bp, Glycine max
  unsure (1)..(414): unsure at all n locations
ancttgtctcatcgtatatgcgaaacggttttcaacatgtttgctatcatcgccaagggccaagaagagagaggtctagccacggcccacgagcatagaatcgcggatgagtatgctcaagtatatgcggaaaaagaggctacaggaagggtgatcgactctttacaccaagaggcaaccatatggatggaccggtttgcttttaccttgaacgggagtcatgaacttccccgcttgttagccaaggccaaggcgatggcagacacctaatccgcccccgaagagattcatgggcttctcggctattgtcagcatatgatacacttaatggcccacataattagaaatcgttaagaaacttgtatggtctctcacaccttgactatatacgactttctttttgaaatagaaaga

SEQ ID NO: 264324 - DNA, 425 bp, Glycine max
  unsure (1)..(425): unsure at all n locations
tgaatagttcgttcggacagtttaaggagactcatatttttatggtagattcttgcgttaaggttaagacttcttggttaaatctgatgatagttctgtccaattaatgcatttctagttgttctttgagtgcatacttgcttattggggaaataatctcaccgatatcatgtcgtgtacttggagaccaatgcgaaatgctaccagaatgttgtcaaatctaacaaagaagacttaaccttgacgtatgaagctaccataaaaaaatgtcttcctgaatgggataaggccacacctaacatgaaaaagtgagaatttgatgcatggaataactttgtgagtatcacaaatttattatttacatggatgcgagttggatgaatacaagtcacatgagccctgcatatgagaaaagagtngatcag

SEQ ID NO: 264325 - DNA, 451 bp, Glycine max
  unsure (1)..(451): unsure at all n locations
agctngtaggattatggggtacccatcacttgtggtactatgtggcggacgggcgagggttgctcaacaagttttcacatccacaatgcgcgcataaacccaccatcccctgttgcccaccttcaactgagctcacgtactcccacgtagcccatatcctcgtttgtctcaataccgggcccccatcaatcctcccaagcttccacaacatccaagcaaaacaacatacaaacagcacaagctatcacagccaagcaaaacagagcaaggcagagaactctgctcaacacaccaactaaaatcacagtttttctcacttaaagaccccagtaacaattccttcgatccaattcactaaccgttggatcgactccaacaatttactggaagtctatagtgcacaagcaaacatccagaactcactctgcactgctctgtccacacacagtaa

SEQ ID NO: 264326 - DNA, 434 bp, Glycine max
  unsure (1)..(434): unsure at all n locations
ttggtcttcgctggtgaaaggatcgatgtgtttccgacaagaggcaaattcaatcttcctgcttggacggatgagaaactggggcaaatgacgagggtgagaatgaacgagaaacccatgttgtgactgccattcctatacagccaagttttccaccaacccaacaatgtcattactcagccaataacaaaccttctccttacccaccacccatttatccacaaaggccatccctaaatcaacaacaaagcctgtctactgcacttccaatgacgttcaccacctttagcacaaaccaaaacaccaaccaagatattaattttgcagcgaaaaagcctgtataattcaccccaattccggtatcctatgctgacttgctccatatctacttgatattcaatggagccataccccaaccanggtcatcacctcca

SEQ ID NO: 264327 - DNA, 389 bp, Glycine max
gatgtatgtgcagaatgcattaaaggtaaacagactttaagcaagaaattttgtgcatatagagctacagatgtctggcaattgatacatacaaacatttgtgggccctttcatacaacttcatggaatgctcaacaatattttatatcattcgtagatgattactcagatatgcatacttgtttcttatacatgaaaagtcacaatctctggatgtgttcaaaacatttaaagttgaagttgaaaatcaactcaacaaagaatcaagagtatcagatctgaccatggtggtgaatactatggcagatatgatggtttaggtgaacaacatccggggccttttgctacgtacctggaggaatgtggaatcgtcccacagtacaccatgt

SEQ ID NO: 264328 - DNA, 210 bp, Glycine max
gcttgtgccattagaagagaatgagcttttgattggatttatgactgaaaacgctagtcactttgtgggattgtattgtgaacgaatgccttggccgtttcccggtgatagtgtgatccctaaatattgagagaatccactagtctttcagcctgatgtttgtccgaatgtctgtagaatggagtcaacccctgaaatttgtgatgatca

SEQ ID NO: 264329 - DNA, 321 bp, Glycine max
  unsure (1)..(321): unsure at all n locations
catgtaacccaccattttctcatagtncaactttggtgacgtgtctattatctttgatgtcacctacctcccgctcattgggggcactacttgagttgccaaatcccttcacctttgggcgtattctttgcaagattgatgctccttcttacgcatgttatgtagatgcgttctgttctgaaccatatcaaaattgtactgatactgcataatgaaggcaaccattaggtccttccaagaatggacttgtgaaggttccatattagtataccaggtgactactgtcccactacgactttcctggaagacatgcgtcaacaa

SEQ ID NO: 264330 - DNA, 411 bp, Glycine max
agctgtgtccgcaaaaatcactaaagaaactttgtaaggtccaacgcctcagcttttgtcaccaagtaaaaatggatcattttaaggtccaacaccttaaatgaccactttccaagtaaaatgaatcacttgattcgtccattttgaaagaactacataggtctgatttcctcttcaatggagggtacgtaggaacaataccctcacttttgtcgacctcaaaaataaaaaaggaaataaaagcttagatacataatttcgcacaattctaatctaaggctgttgtcctttgggacaaacgtgagaggtgctaataccttcctcaaacataaagataactctcaaatctggaatattcttcatgaccggcttcctgtggtttttctatccgtttcctttcaataaacgttg

SEQ ID NO: 264331 - DNA, 431 bp, Glycine max
ctataatactcagcttgatatcaatttgaattgtataataattatataattatattatatatataccgagttatacgaattatatatatatatatatatatacacacacaccgtcccctaacgtgaatggccaaacctcaaatggattttttttgtatgaatgattcttatggcctgcactttttgagtttggcattaaagcagcatcgcacccctatgtgctttggttataataattaactgtgtgaaaattgataaatgttataatagtctaaacagaattgcaacggttaaaacaaaagatagatacgttaaggtgcaatatataagtttaatacgttaatgattcttgtttcatattaaattgataaacggattgtgccaggtaaacatttctctatggtgcataatatatgtaataattgaaatat

SEQ ID NO: 264332 - DNA, 435 bp, Glycine max
  unsure (1)..(435): unsure at all n locations
agctntgactngagtcatttatagattattattatttgaccatggcatgagtttcaataattatcaatcatctttgaatcatcaatctttcaatcttttttcaacatcatctctcaaacatctttcaatcaatctttcaatatctttctacaaaattttctgattcatttctcttcatctttctaaaagttgtttatcaacacattctcttccaagaaaagttctttgttcaaaaactcgtgttattcatctttttcattctcttctccctttgccaaaagagcgaaggactaaccgcctgaattcttttgtgtctctcgtctcccttacaaaagattcaaaggactaaccgcctaagatatcttttgttttcccctttacaaagattcaaaggactaaccgcctgagaattctttgctcaaaacattggagggt

SEQ ID NO: 264333 - DNA, 456 bp, Glycine max
actatacaacactcaagcttcttatccaaagctcatcttggtggtgaagttcctttttccatggcttatttcctagcggatggcgccacctctgtacctcttctcctttgtgttccgctgcatctccatggtggaaaatcgccattaaaggaactcattgaagctcacagatccagcctccatagaagccccacaagcaagcttccatcaataaggcaccctaataaaaaaaggaaagaagaataataagggcagaaaataaataggtgccataagtgttgttcgaacaataaattgaggttaaaaaaaataaccctatgcttaataattgaaagtctttttaagataaatgctctcttataaccctaatttttgaaatctcggaacaaccataatttctttgattagctagggccacattacagccaataaaagtccttagtcatccaccaagtg

SEQ ID NO: 264334 - DNA, 394 bp, Glycine max
agcttatccttatggattttcttcggactttactccccgcgcccccccggaagattgaacccaagcccctacttatgaggggccactcctgccttatgacaactatcccgggcaagacgatgaggaaagagatacccatcttggccccctgctccacctcaaagatccgtccccacatgaactaccccaaccgaacatggtccgccatatcccggcctcccccacacccgtaaaaaaatatgttccctttccggaagataagggaaagattgaggcacttgaagagaggctaagagcagttcagggccttggcaattacccattctcggatttagcggatttatgtctcttgcccaatatcatcattcctctcaagttcaaagtgcttgacttt

SEQ ID NO: 264335 - DNA, 440 bp, Glycine max
  unsure (1)..(440): unsure at all n locations
tcttatccaaggctcatcttgattgtgaagctacttcttctatggcttatctcccaatgagatggtgcctcctctcacctcttctcctttgtcttccgctggatctccatggtggaacatcaccattaaaggaccttattgaagcttatagatccagcctccataaaagccgcacaagaaagcttccatcatgtgtggccttaagaacaattagcgcgtttgttgtcaatttatgtcaatcggtagtatgtaagtttcgtgggtgtcttggtactgctcatgaaatctgctcattgtgtgcaaaatttgaatatgtgctttttgtcacttgcatggaactcgagtatgtaagttatatgcatcactgattagagtgactaatgaattatatntctatgatatgtacatgtacgtttatcttgatggcattgataacatgg

SEQ ID NO: 264336 - DNA, 438 bp, Glycine max
agcttcttctccaccacctacaaccaccgttggttgccgcaagctgtcatatttctccgttgaaatcccacaccgagaggaaccctttaatcagagtggaatcttccaagcttgtctcgaggtttcagtaaagaatgaagcccaatctaacctttgcaggtatcttcgaggtgactatgattttaagcttgttccttggtagtttaagcttatctttgcatctttattgactttggaaccatcattgtatgttttacgcttccttcgaaaaaccttagagaaagagactttgtaaaagttatctttttatgatatgggtgttatttttgtgaccttcactgaaccccgatcatattggcatgatcagaatttcaaaatgatgttgtttcctttttgtaaaatccgaagcgctcctcaaccctttcatgtagtgacatg

SEQ ID NO: 264337 - DNA, 438 bp, Glycine max
  unsure (1)..(438): unsure at all n locations
ntcacgtcctcgaccactattgctagcaccactgttgttgccgccttgccgaccaccattacagttgaaaccactaccgaaacaaccaccgagactagatctgccacgaaaactgaaaaatctttccggttcttgcttgtttggcaccggttgagtgtgcgtattgttcactgaaggagaatccacgagagattgcttgaacttattcaagtgcgattcatgatcaagtagaagcgcttcaacctatgcgataggcagcggttcaaatttactctcgattattgcaatgatcgaatgataatctgatgataaaccttcaagaatagaattgatatgttcctaaagcatgattgggcttccaacagaagcaagagagtcaacgatagccttgatctgtgacaaatgctcgtgcattgatttttcagcaagcctcgtgga

SEQ ID NO: 264338 - DNA, 342 bp, Glycine max
  unsure (1)..(342): unsure at all n locations
catgcaagctataacctcattgtctctcacagtctttatatttgggagccaaggtatttctggtgtccggactctcanccacttatgatagccgccgatgatcccattactgcttcccctaagctctctatcctttcttcacgccgcatcccatgccttacgaactccttggagtaccctcgcgtcgggggcactgaaaccccgtgccatgaaaggcgtgatgctttcgtctgatggcactcctctcatggggtagccaacctgtcttatggcgaggacgggattataattaatacaaccccttggttccatcaagggaacatttggacatcctccgcatga

SEQ ID NO: 264339 - DNA, 370 bp, Glycine max
gtacggacataatttctaaatgggtgggagagtcgttatgccctaacattttgctaactatcaatcgatggtccattgtatttattgtgttattcgattatatgatcgacttaaataagttgagatatggtgcgaattaggcatgtgtgatttgcttgatgtggatgttgagttatgtggagatttattgacataagttgatgatgcaatcctaccccccaagagcattgtataaacgactctatctggtcatggatgctggagaaagccctgaatttgcatgatccttattgtctattatgagcccatgggctgagtatacgcccacttatctgtgtgcttattataatagggttccgtcatttatagg

SEQ ID NO: 264340 - DNA, 136 bp, Glycine max
atcggcttcactaatgacactgcttgccttaacctgaaaagaaattactttaacaaagaccacaaataattatcatcttcaacaaattgcattgtaagagtacaaatgaaatagtttcacatatgtaccaaaaagc

SEQ ID NO: 264341 - DNA, 334 bp, Glycine max
  unsure (1)..(334): unsure at all n locations
cgaaaaacacagaaggagagggttctagttattatataaacctgaggaaaaagcacctggttagtaccgataaaaagagtagttgtagaaatgagaaaaaaaaagtgagggaagatcatggtagagtaattaactaaaccggccatcacaaatttagatgagagtggtttgaaaaatgcagactgtaacaaattagtgggacttaatttgaaagaaggaagaaggagacaattgtcgtctctttgtccactactccacctcagttntttggacatgtctattttgaaactacttagtaacattccctgcggaaaaagctagaagaatacggtag

SEQ ID NO: 264342 - DNA, 424 bp, Glycine max
  unsure (1)..(424): unsure at all n locations
agctntcattatatacaaacaattcaattttattngtcatgaaactaccctaaaccaagaaaatagagtggaggcaaaaaactctgcacaaaactcattcaaattccacagttttccctactcacataccccaataacattctcttcgttccgattcgttaaccatttgatcgccttgaaaattttactggaggttcctagtacagaaatctacattttgaccgttgggatctgctagaaaatatctagaacacgagatgtactacctttcccgtgactagtgctgcacaatcatttttctgcacatttggtcaaaattcctgcacaatttgacagcttttgctgcacaatttggcagatttcgaaatccaacttgtccgcatccaattttactcaaattggatcctacaagtcctaaatcatg

SEQ ID NO: 264343 - DNA, 427 bp, Glycine max
  unsure (1)..(427): unsure at all n locations
tgtggagaccgtccaagatttgaaagtccccccattgtgtatgctgcattctgctgatgaatttgcagtaataacaaacatcacttcattgtgcattaagatttactttgaactttccttcttgacctattatgtgtgcaactatatataatgatttatgatctgtaatatttaggttgatttggagcataatcaatatcgcactttccaaggcttgacttgcctgatgcaaatctcaacaaggactgaagattttattgttgacactttgaaacttcacagttctattgggccctatttgagggaagtcttcaaggacctttccaatagaaaagttagtggcacatgattgatttttctttcaattcatcatatttgtttcattnttttgaccctatttatggttaattgggttatgcatggagcg

SEQ ID NO: 264344 - DNA, 290 bp, Glycine max
  unsure (1)..(290): unsure at all n locations
cgaccatggatttctttcgagagctgccggaagtcaattgccaagcggctaaacgcctgaagcccttgagagggacttccgcctgacagccatgaacaaatgactanccgccgaaatccattggcgattccccaccccctcgaaaataatgcaggcgacacagacctgcgagtgttaagaatgaccctttacctaacgagagattccgagtctaaccccccggaaaatttttatgccatgaacaagacttccagggaaatctccgccatctggtttaacagagggagggt

SEQ ID NO: 264345 - DNA, 249 bp, Glycine max
tgcgcctgaatcggacctccgcgtgttttagtctgaccatttgagtcactttctagcgtacgatggacaatgtcaagcttttctatatctgacgcgcctggattggacctccgtgtgagcagtcatgactctttcatgttctcgagaggttgcgagatcaactatcacgcgctcgatgtttatgccccttaattggaccttcgttaggataaatatgagcattggaatttattgagagcattaggggtt

SEQ ID NO: 264346 - DNA, 442 bp, Glycine max
  unsure (1)..(442): unsure at all n locations
atgcacccttaaaaaaagatnttaaagaatgtattatgcacaaattttatctggagaagttcaccgaatacagcagagcaatttctaaacagaaagggcacctatttcaatgataaaatgattgtctataatattgtccatattctttaaagttgatcctactggtaaaatttacaactaatgccatcaatatttaatattgaacctttgtaagtgataaaacgtcattattgacattggccgcagctgaaaattgagtagcaggacaatctcaatagttttaacgatattattcaagtactactggagatgatccttaactgtgcaatcacaacccaatttcagttcatagctctagaagaggctagaagcagaacgcaagcataccatcaccacttacaaaggccgtagaagcgggtaatcttcaaataactcccgttct

SEQ ID NO: 264347 - DNA, 439 bp, Glycine max
  unsure (1)..(439): unsure at all n locations
ntagagtctntgatcctgaccttgcatcccagacacgcacaacctagtgaacttcaaaaaaaatgaagaagtaaaccatggtcagagacaacatcccaaaaaattcaagctactacagtgcaagcaaaccatctctactgcttcaaatgtaaagaagcctcaagaattgtttcactttcattcatatgccatattgtaccttttctgtgccaccggagacaagaattgttccactttcattcatagccaatgcataaacagaatctttatggcctttggcagcaattggaatgtatccctgagtttgagtagtgtgcatggacatattgttgctcgagttaataagacgcaagcttgtcaatggtagtacgttgccagaaccattgataccatttgaagattcatcaactgtagcatcattgcacttagagactggagt

SEQ ID NO: 264348 - DNA, 395 bp, Glycine max
  unsure (1)..(395): unsure at all n locations
atgcaccctttcatatgtgagatcaagtgcagcctttttctttanatttctctcacggagaggaggttgtgccatgttctcacaatgtgcaaaatcagaatgctcacaataacaatgctcaaaattataatgctcaacatcaggatgttcacaatcaccaataacagaatgcacagattcaccagtaatggaatgctcagaatgatcaaaaggtataaaatgatgcctaactaatctatgaaatgtcctatctatctcaggatcaaagggttgtaagtcagatggattgcctctagtcatacactacattcaacatgcacacaactagttgccttgcatgtaaataaaggtgtaagtttgaactacagctaccctcaaatgatatccaaatgact

SEQ ID NO: 264349 - DNA, 439 bp, Glycine max
aactgatacgagaaacttctttgccttctacaaacacttgttgtaatcgatttcgattagcctgcagtcgattaaaacagagagttatactctagaagaaattttctaactttagaaacttttcttcttactcctacatgatgatgcatgatgcacatatgaaatgatagatactaagatgcaacacacagtataacactcaatacaaattctactcaagagatttgtgcatgtaaaagacaaaacttcttcaagcttcaaggctaagtcttcatgttgctcctcctatctctaaccaaaacttattcaataatttaaccttaaaaatctaggtgtttctaaagagttgctattggttcaattttatatgttattggtctctaccaacgagttgatcccttttttattcccaaaatgtctttcccacggaatcatgatt

SEQ ID NO: 264350 - DNA, 263 bp, Glycine max
gaaattaacacagtcctgaccatggacgtaccagaacaacgccgcacgacatgaaaaacaataagccaaactcacagtcaacaaaataaccaaaccagaactcaaacaccatcaaatgtcgacaaccacaaaatatccaagactgaaattctaaaaacacaagataaataaccaaaatacctagcataataatgtaaattctaagaaactaaaaaccaaaatacacggcttataaaagataaataagcagaatctaaaaccta

SEQ ID NO: 264351 - DNA, 275 bp, Glycine max
tccaccgcttttgtactaagagcacccttagcacatctgctgatacagaaaggtatcactctcaaaccaaaacttgactaatgagctctaatgcggccataggtgctctaagcgcgcgagcactaataatgccacctattcatgcctgagaatatactttagaggggaattgggactgggattcagagcaatgtatgtatatggttgctagataaagaaaggtccatgatccatatagactaaaaagattttgctgctgaagatctgcatagacc

SEQ ID NO: 264352 - DNA, 269 bp, Glycine max
ccgttttttggagcaccgggggaggaggagttatacagattgttcccaactccaccaccaaaaagttaataaacagaaaagccgtgggtagtctcttctttctctgtatgaattaaaaagagctgtccgaaatcttaaaaaaatttactcctgatgtgtacataactaaggtagatctgcttactagtcattggaaatagtaacaatcttcatatgtggagacaaaaataaagcactcatcactataaacaatcaaatttaacacttct

SEQ ID NO: 264353 - DNA, 163 bp, Glycine max
taataattgaaggatggattggattttgtggagaaaataaatgtttgcttgtaggtttagatttaaagtttcttcttgtttttggtgcaagacaattaagaatgcaatgggaaaatttattttattttaataaaagtatttatgattaatataattagaatgt

SEQ ID NO: 264354 - DNA, 387 bp, Glycine max
  unsure (1)..(387): unsure at all n locations
agcttattcaagctaagatcaaattggtgtatgattanatnggactaaaaaagactaaatataatttgtgctcaaatctaaagcaaaattattacatttaattgatgtataggttgggctggactggtcacaagcttgatgttggtcatgagctatagtaggttgagttaaaatatctaaattcaatgtgtacctttaaaatgatgtttgagcctaaagaagagccattttgtagggattaattgtgtgggatatatgtctactataagtccaaaattacttggtgctcaatttaaaatttaaaccctatatttcattgagtaggttttggttccaacccattttgcctactcaaagaagaatgatcaaaaggtgaagaagatttga

SEQ ID NO: 264355 - DNA, 433 bp, Glycine max
  unsure (1)..(433): unsure at all n locations
ttgtttcgagagacctancaactggtgtcactccgcttcagtctnctggttccctccgctgcagtctccttcccaattcagccgaattcatattaacatagaacgaaatcccttattttgtttctgtgattgctgttttaaaattgggggttcttggtcaagattatgttttatagggaacaagtgtgaattttctgctgcagtgttgtgtatgtactgtgtggtttcaattgttggctggtgggggtaatttgcacaccaaatccttcgtggatgtggttcaagcaaaagcttttcttcatcttttttataattgtctgaatatctagctttggtatttcaacgttntgatccattcttaagctgggctttggagaattgattttctgatgaattttggagttggatgatcgaatgccaatcacaatttatt

SEQ ID NO: 264356 - DNA, 448 bp, Glycine max
  unsure (1)..(448): unsure at all n locations
cttagtcacctgcggcatgcagcttctacccttgttgtttaagaattttatccctaanaacaaagtgacaaaaagaagaatattttaccgggataatcattggagtttcggtagagaacaatgtttgtaggtcttcttggtacagaagacatggatgttagatttgatgtccaattgtccacaatccaccctctttgtgtcccgtgtatatctttttaaaatagaaaacttaaaattctaatttaggaaatacaatagtcagaataataaagaatttgtcttattttgaatatgggcttactgatagcctaagtatttaataatttaacactaaaccttatggcaataaagtgtgatataggtagtaaataatttttgtgtagtcctactaatgaaaatttgattgcgcaaaacattgattntttttttaaatatgaattgatccttt

SEQ ID NO: 264357 - DNA, 440 bp, Glycine max
  unsure (1)..(440): unsure at all n locations
ttgacgtcaacaatattttcaatgaaatcatgaatgcatggggtgaaatgatccaacattggcatcttcctctttgggtttgggtgttcaaatgatgatgcataatgtttcactaaagaattgttattttacatagaaatgaatgcatccacatactcccagtaagacggatcatgctttgttgatctttgttgtttggtgatctgtttctttttagcaccttttgttttgaccttttcatgaggagtacacatagaatttagattagggtacgcaattttctgaggtttactctttagagtcactttgttacgtacatcaagatcttcaaatcgcttggatatggctctcatctcttcggctatgtaaaacttgggctcaaaataaacctaatctaaaaaacttaacctncgccaaacatatggatcgtgtcaagtgat

SEQ ID NO: 264358 - DNA, 390 bp, Glycine max
agcttgagagttgagatgttctttcccttattttaagaacaacagcggcaacaaaatatgaacaattattagatagatgtgtacctagtgaggcgtgcaaataagtacgatgtatatattgtgttgggagcaatttcaaatccatccctatcttgttgttactagctagtgaaaaggatagcacgagggatacaaactaaagtatagtaccgagtacaaagggcatggttttggtctaagttcaagttctcctccacttggcaattttcttattgtccctgaaattggaaggtgtgtgagccaaactcaagttaagatcaacatcaccatcaacaatattagtctttattcccatgcttgcacccattggtctaacaaacccaacctcat

SEQ ID NO: 264359 - DNA, 434 bp, Glycine max
tctcgacatcattagatttctttgagaaggattgctcttcaattacgcttttagtggctccagcaagaatctatcttattattaaagtttatattaatgaaggcctaataattgatattagtatatgataatattttttgggtgatcatataagagagcatgttgaagtaacatatgtactaaccctcaacaaaagtgagcttcttgatggttccggggccaccatttccttcaacgatttcaacactcttgatggcctcaactgcctttgggacgaggttatcagcatccttaaccaaagctttgtaaagcctagctggggctacagtaaaggtggtctcatcctcaacagtaaaacacccatgatgatgatgatgacgggaaattaacacaacgataatgacattgctagtgtgaaaataagaggatttttg

SEQ ID NO: 264360 - DNA, 437 bp, Glycine max
  unsure (1)..(437): unsure at all n locations
agcttctataagatatgacttanagcatatatctcctgaaagacaatcataggaagcacacctgcagtcaatcagggagtccaaaagcacaaggagaaacttttcaatattgaactccttagataattctaataaaacccctgccaggtccctatatgaaaagggatttaatatatcataaatataaataaagaaaagacagtcaaagcacagtgattatgcatatgttgagcagtttgaggaagactaccttatttcctttaatatctccaaagccttcaatgggagtatttcaacattttgagactaagaaaattccaacagaacaaattaaaataaaaatatagccagattcagaaatatatattgcacaatgaaaggaaattggatgaaataccatttacccccctccccaccccccaaaaaaaaggattaat

SEQ ID NO: 264361 - DNA, 440 bp, Glycine max
  unsure (1)..(440): unsure at all n locations
ntggaaaaatgcataagaaaccaaatgtgttggtgacttaaaaaagttaggctaaggtgtgtggatttagcctggacaattgcaagtatgcagcaatattaatatcagatatgtgatatatactaaaggatgctacctcagaagttataaggcatatatagggtgactaatgtagagacaactcattatattatgtttctgttgccgaaccatatcaatagtaccctgtgatggtaagagagttccatgcagtaattgacaattgacaattgacaaggaaaccagaaagcaagcattggaaaaatggatagatgaaccagatgtgttgaatgtgcaattntttcttctcaagaaaatagcttggtgtcgaacctgaacatggctttttgaaagatttanggcgcactgaatatcaaagaatcaccggggaagctttgaag

SEQ ID NO: 264362 - DNA, 433 bp, Glycine max
  unsure (1)..(433): unsure at all n locations
agctttanaatttgaataaattgctggtatttatttaccatccatgtgtaattgattacacattataaattttgaattcaaatttctagtgactgttataaacattttcaactgctggtaatcgattaccggagagcaaatctcaatttgaaatgatagaattctttggtcaaaccttttgttttttcaatttggaaacttcttccaaaagattctagaaatcaacttgatcatatatcttgactttcttggattcttgtcttgaataaaacttacaagcacttgatcctttagcatcatcaagacatcaaaacatcttgcttctacataggagtcatttgacttaatccatcagctgaaaaatccttcaactatttcttcgtcttggaaaattctttttgcagaatcaattgcgtctttattcttcctccta

SEQ ID NO: 264363 - DNA, 415 bp, Glycine max
  unsure (1)..(415): unsure at all n locations
tctgcctagtgtttatagaacatgcatgagagggagttcttatcatatcatcaatgagcctcttcgaggaagaactctccctctcatagttctccttcttattatcatggcattgtgctctaaagtaaagcttctccccattgttcattgaacatgcatgtgagggagtacttagcacattatcaatggacctctttgaagacaagagcagagaggcatcgttagtaatttcccagaacttgtgtctggggtctcttggggatcgaaaggttatgccatagccagagcaagagccttggccaggttcctttggaaactggtgcatagcaccactaccaccaccaccaccacccggtgttttgggacctatacagaaaaggannataatatttccacccaaattggtaaaaagatg

SEQ ID NO: 264364 - DNA, 421 bp, Glycine max
  unsure (1)..(421): unsure at all n locations
agctttatactaaatggatgagtgggagagaagttcatgatatgttgattgaagagtttcaatgttgtttatatttacatattcatctgattcaaagtctgatccttgtgatgtagtgtttgccattaaaaaaaggggggctttttcttcttcttcttcgatttcctcatcgaatgatgtgtcatcttggtcttcccaagtgctcattantactttgttgtcctttggcttgaagtaccttttcttgtggtatgtcttttcaagatctggatattctgacttgaagtgtcctggtttcttacacttatagcatatgagggaacttttatccctatctttcctttctttatatggatgcttggatcccttccactttgattcgttccctttcttccacatgttccttatcttccttgaaata

SEQ ID NO: 264365 - DNA, 424 bp, Glycine max
tcatgcttaactatgtatggcaaaacttcattactattgttcaagacatacaagtgaccttgtaacaaatcttctacacttggagtgatcacatgcagtcctcttgaacccttaccacccactctgtcatcatgccgagacttaggaagcccaacaggtttagcctgctctaagtattatgaacaaaattcaatggcttcttctacaatgtacctctcaacaatagatgcttctggatgatatagattctttgtatacccttttaagatcttcatgtatcgctcaaccgggtacatccatcgtagataaacaggaccacaacatttgatttctctgaccagatgcacaatcaagtgaattatgatgtcaaagaaagcagggggaaaatacatctccaactagcacagtataattacagcctcat

SEQ ID NO: 264366 - DNA, 348 bp, Glycine max
  unsure (1)..(348): unsure at all n locations
agcttataagtcttgcgtaacgtntgatgtatttgcatgaaaatttcaaaaaccgcgtgatcatatactagtaactggataaaaagtcaacacacatatatatgcttggaaaatagctgtatggttgaccctgccttcgaagtagacttgatcatagaagaagccaaggatgtgtaaagggtgttgtcctacatgcctatgaggctatgaatattcctctatagttgaacaattcaagttcctcatagcctagttcctctggttgaactattcaagttcattcagttttggttatctttcttatagaactgcacatttctcataattgggacctccttgaagttatta

SEQ ID NO: 264367 - DNA, 431 bp, Glycine max
tatggtatttacaaccttcattcttttgtgttcgttgtctcacaacggataaatttattcacttgttatttgtctattgatcatgggtgttattaaatgtacaccctttcttcatgtagaaggtttactctagttgacttttgtgtaaagtacttcagcaaaaagtcactttccattggtcaaagcatgtctacacaacagagtgcaccttttgatggagtttggcaactttcatatcttgtgtttcatttattcttcataggattcgatagatcataggagaatgtttatacaaaacgaatctcagacacaaagtattaaatgccgactcttacatgttgtatcggatcatgacttttagcttgctattgtttgatgcttcaagcgtaaacttgtgaagcatgatttgatgacgcataagacaattttta

SEQ ID NO: 264368 - DNA, 442 bp, Glycine max
cgcttgcttccatagagcttgactccacaataaatgatctcttctctccattagatgagtattgtatatggatcatttttctcctaaaaaatggctgtgaagaacctggctccgcaacaaaccattctccttcaaaagtttctccttctccatcacgtgaatattgtttatagaccattttttctcctaagaattgacttaaatttattaatttatcggcgttgttcttattcttatatacaaatttcggtgctctccaaattttgagatattaaagtaatttatttgtccaaattttgcatattaagatggtttgaagagaataaggatagtccaaaacaaagattaaatttatctatgtcatttctcatgattcgatgtgttattctcaattttgaatatgtcaaaggaaggtttaatgctcaaacttgaatgattatgt

SEQ ID NO: 264369 - DNA, 389 bp, Glycine max
  unsure (1)..(389): unsure at all n locations
actcagcttggaagtgttattttaccttctcactaagccaatatgctggcttancgagcgtccactaagcacaacactcctgggctaagcacgaggaagactctaaaagaagatgagctgtacaggttcgctaagcgcaccacttcatctctctaagcgcaccgcttcagttcatccgctaagcgagaaaggcgcgctaagccaaaaatcactaatgtgcgctaagcggtccatacgtgcgctaagcgcatgagcacgaacaaggccacctatttaagcctgaaataagaatttagaaagggagtttggcatttttcttgaaaaagcctctgcctgcacgagagtctggccttggcttgcacgctttgcatgtctaggaagttctagag

SEQ ID NO: 264370 - DNA, 284 bp, Glycine max
tatacccccagatcccatactggttccctagctcttgccttgttacacccagtccagccttggaaatctggagtaccctccattgggcactacacccgtgcgagaaagaggagcttccgttaatgcgctctccattggtaccacctgtcttggtacacggggtgtattaaacacccctcgttccataaggaaaaaggactccttgcagaaaaaaatttgattttcttcttctgcgaggacaattactaccccccctgctaaccaagtgggccattcgcttcttt

SEQ ID NO: 264371 - DNA, 356 bp, Glycine max
atggactatttatccattggaggacctttagagggcgtgtgttttacagaatgacacgaagctgggagtagcctcttacattgatcgaattcacttataacaaccgatttcactctaccattggcatggctcccaatgaagctttgtatggtagaaggtgtaagacacccctatgttggtcggagcccatagaaggccttaccttacgaccagaactgctacagcaaatcactaacaaagttaactttatccaacaaaggatgaagactgctcagagtggcacaaacgtttcatgatataggacgaagatctcaaattgaggtggtgacatgtttcttgaagtccttcatgactgg

SEQ ID NO: 264372 - DNA, 334 bp, Glycine max
atcaccaattcttcaaagctaaacccattcaatcgccaaataaggcaggccaggaaataaaaacggaatctaaatccaaaaaaccctgctaatcaatatactacaaacatacgtaactaaacaccatgctacagaaaatagacatttgtctactcccaggcaaacgatgcgaagataaaaactcagtcgatatttcatatgaaaaatcccacatattggtatgacggcctctcttgcaaaccatccattttcctccacatactccaaaaatggaaacacagcattttcttactgtaaataaaaatgtggccagtctactcaaattgccgcatac

SEQ ID NO: 264373 - DNA, 427 bp, Glycine max
  unsure (1)..(427): unsure at all n locations
ctagacaactatatctataatctgtaaaatntattcacattttagtgttcaaattgtataaaaatggatttatatttctaatattaatagtgtaattcgctttctcgattatattttcatgttactattatccttgtatattgaattataaaatcgtattacaaaaaattatttaatatttcacattctaggtttatactaccatcaaataatgtttaatttactataatataatctatagcgatcttaaataacagctagtgtacttaatgtttgaagtcccagtatattaacatttttgtctcaacaactacatttcatatttgcttatgaatgtatctgatgaaagagtctgtcttatatatgtgagaacaagaaaataactaatgactattaaaatttattatcagtaggtgagattaaaaac

SEQ ID NO: 264374 - DNA, 384 bp, Glycine max
gtcactggtgcatggcatgatctcaaaagatttttagttgcttgcgcgaggcccacgaggagttgtgctcatcacttggaagccactgagctaagcatgctatccatcatagggcaatacactgaagaattgaaccagtccatggcccatgaacaaaagctagtggaggattttgcacaagtgtatgccgacaaacaatcaagacggagggtgatcgatgcgctgcatcctgaagccactatgtggatcgatagatccgcctttatccaaagcaaaagccatggccgaattgtgtactgccctcgacgaaatgcatgggctaatcaattactgtctacacatgatagactcgatggccccatataatacgaatctgtacgttct

SEQ ID NO: 264375 - DNA, 307 bp, Glycine max
tggcggcacgcgtgatattgcagagtgtgattggtgaagacaaactaccatcgtttacttggaatgtccatgtcgatcatggtcacctagataatgacctctcaaatgttagaagaatcctcgggcgctcctcttgactttgctacatacttgcaaacaagacgcattttgcctcctagaagaattcttcaccaacttcaagcaaacttggttgagcatattttggaaccgtacaacactaatgaaatttgacttttcgttgacataaaagtgctgcatcttctattatcaaactaagtggattttc

SEQ ID NO: 264376 - DNA, 321 bp, Glycine max
aaaccgctacaagcgcgcttgctacgaacttatgtatgccgaattttttgtgactggccaacggtggattatttgtccccttgttttttatggccggattgtggtcggccatacttttattctgcaacgaagatactagtgggaccttaccttgcaagccgattacccactggtattatcttttgatcctgacagatcaaaatttcaattggtctggcaactggaaggcagcttagatcgagttcctttgagagatacctgcttttgccacatccaggtactttgcaaaaccaacacgtcctgcttgtatttcggatttga

SEQ ID NO: 264377 - DNA, 420 bp, Glycine max
tgcaagctgtcacaatatccatataattcaatttcatttgtcatgaaactaccttaaaaacagagtgaaggcaaacatctttacacacgattcattcaaattccacaaagtttttcctacccacatacctcaagaaaatcctcttcgttctgattcgttaaccattggatcaccttgaaattttaactgagggttccaaatacagaaatcttaattttgaccgttgggatctgctaaagaatgtctagaacacaagatatactacctttccggtgacagcagaaaccaacactgcacaaccatttttttctgcataattggcagattgggtgcacaattggacaacctcttttgataattttgcaaatttcgaaatctacttacatgctccaattcactcaaatggatcctacaagccta

SEQ ID NO: 264378 - DNA, 443 bp, Glycine max
  unsure (1)..(443): unsure at all n locations
tgtttgttagaatgacccaacatttctacctactactgtcactnttacttactttgcattttatagtttttagcataaaagttagtttaaattttgtgtgaaattatcaaccatacatgtgctctcaacaatgcttcatttctgaacttaattcaggctaacattagttccctgtgttcggtactcgaattcatttgttataatttttaaatacttgacgatccggtgtgctttccggcaaaccggatttcccttgaatatatttgaacgaagaaaaagtggaacaaaaagtaactacaggggaaatccaacaaagtatttatggcgccgttgtcggggagctaaactgtaagtagagtttagtttagttgtgcgacattgctctatttttgctttctttgatttattgattcttttgactaacatagtagttatagcacatt

SEQ ID NO: 264379 - DNA, 432 bp, Glycine max
cgagtgcctgtatatcgatgcgcctgaatcggacatccgagtgaaaagttatgaccatttgaatttctcgagagcttcctatgtttaattttgagcgtctcgatatattatacgcctgaatcgaacctcagtgtgaaaagttatgaccatttgaatttctgtagagcatccgttgttcattttcgagcgtctctatatgtgatgcaccttaatcggacctccgtgtgaaaagttatgaccatttgaatttctcgagagcttgcgttgttcaatttcgagcgtctcgacatattatgcgcccgaatcggacatccatgggaaaagctatgactatttgaatttctcgagagcttccgttgttcaatttcgagcgtctggacatattatgcgcccgaatcggacatccatgggaaaagctatgaccatctgaat

SEQ ID NO: 264380 - DNA, 416 bp, Glycine max
  unsure (1)..(416): unsure at all n locations
gaatgattccacggatgttatgcttaccacctcaaaagactggagagtggtttctaatgactcctctgcggcttccacataaggcatataggacgggcagctcaccaagatgtcttcctcgcctgacacgatgaccaaatacccctccactacgaatttcaacttttgggggaggggggagggaacaactcctactgagtggatccacgggcgccccaacagacagctgtagggggggttaatatccattatttggaaggtgacttgacaggtgtgagggcctatttgtactgggagatcgatctctcccctaacctctncgggggtgccgtcgaaggcaccaaccaccattgaacttggctttaagtgggaagcattgaatggtaatttctccaaagtgctcttaggcatcacgt

SEQ ID NO: 264381 - DNA, 443 bp, Glycine max
  unsure (1)..(443): unsure at all n locations
gacctataaaactcagctgngtgatgttgcacgtactgtgggtccatgaggtgtttctggggtttgacccacgcgagtgttgaagagacggcatgggcatctccttccttcctttntgcccctgttgccccgattcttttggcagtcgcatttgtggaggaaacgtaatcaaactttccccttttcaatcctacctcaattctttccccggcaaatactagatccgcaaagctggacggcatgtaacctactaacttctcatagtagaacactggcagagtgtctaccatcatggtgatcatctctctctcaaccatgggaggagctacttgtgccgccaaatccctccaccgctgcgcatattctntaaaggtttcaccctttttcttgaacatattctgcagttgagtgcgggcgggagccatatcaaaattgtactgata

SEQ ID NO: 264382 - DNA, 414 bp, Glycine max
gagcgcctcaatatattattggcctgaatcagacatccgaatcaaatgttatggctgtttgactatgccatgtgcttccatgttcaattatgaacatctcgatatattatgcacctgaatcgggcatctgagtgaaaagttatgccatatgagttagccgagagcttcgttgttcaatttcgagcgtctcgacatattattggcctgaatcggacatccgagtcaaaagttatggcagtttaaactttgcatgtgcttccatgtttaattttgagcatctcgatatattatgcacctgaatcggacatctgagtgaaaagttatgccatatgagatagccgagagctttctgttgtcattttcgagcgactcgattattattggcctgaatcggacattcgagtcaaaagttat

SEQ ID NO: 264383 - DNA, 363 bp, Glycine max
  unsure (1)..(363): unsure at all n locations
aagcttgtaaatggtagacatgaacatgtcaggcttggtttggttcaagggtaaaagggatgccccacattatttccatgacacaaatgcaaaaatgatgatttggaaactttatgcaaaactggtcatgcatgcatctatgcggacactcaaatgtcaaattnttatggtcatgtgatgctagggctcgggattcatttcctctattttaatcaacccaatgtttccaaaatatgttcttttatcaatttgtacattcatccgagtccattttgggcgtttgggaaaatcttacagcattcacccttcggtgtagaacattttcaaaaactattatgatcaggaattttttcacaaaaagtt

SEQ ID NO: 264384 - DNA, 379 bp, Glycine max
  unsure (1)..(379): unsure at all n locations
tcccacatatggattgctaaatcctttgttggttctttcttgtgngcacttgatgtaaatacctgcatatctatttaatgatgttttatgtattctctgtgctatcaatacgtcattttagtgtgctcttgccttgatcacgtatatgcatgctttgttaggatcattcaacaacgggaactactctgattcttagaacttgataagacagggctagtttatcctattatcacaagggatcggggtacagcaacctagttgttgcgatgtatgacttaatgttcttttggtcatgtttagtccaacaagaggaatctgacgatgatgcttgatcatgattangctatacaatggatcgatgtttaacatttcaggagac

SEQ ID NO: 264385 - DNA, 417 bp, Glycine max
  unsure (1)..(417): unsure at all n locations
agctngaatatgttcgtgttaagactgttgttatacaagagaatcatttgagacaaaattaacacgtgctataacgctgccaattttcactggatgacaaccaatgcttgaatttctacttggagaggtattcatattcaatatttacatgctataacaggaactaaaaattgtattatacaacaagttttctattagacaattctaatattaagttagttagctaatcttgattctctctcatatatatatatatatatgcgtgtgagtgtgtgtgtttgggtgtgtggaaactggacatcaattgtaattatcctttcctataaatgaaatttagatttctcaaatccaatatactctaagcttcaatatggtattcagagaaaagtgttactctacgtgcgcgtgcctatttct

SEQ ID NO: 264386 - DNA, 377 bp, Glycine max
  unsure (1)..(377): unsure at all n locations
atacggacatggccnctgatcggaaccagcttcagggtatgactaaacgagagcatgagtccattaaggagtatgcccacagatggagagatctcgcagcccaagtcgtgccgcccatgacggaaagggagatgatcacaattatggtagatacgttacccacgttctactatgaaaagctgataggctacatgccagctaactttgcagaccttgtcttcgccggagaaaggattgaatccgggctacgaaaaggcaagttcgaatatgctgccaatatggcccccaacaacaacagaagagccccagtagtgggcgcaaggaaaaaggaaggagacgcccacgctgtcaccaccgccccaacatggatgatagca

SEQ ID NO: 264387 - DNA, 372 bp, Glycine max
tatgaggctgatcctaaagatcctgagccactcaacgattgatgataactacgggatcgaattttacgcaagcttaatgttcatttactaacggctcaacaatatatgaagatgctagctgataagaaaagaacagattcgcgattcaccgttggtgattcggttatagttgagctacaaccctataggcaacattcagtggctttgatgaagcatcagaagctatgcgtgcactattttggaccatctcgagtgattaaaagaataggagcagtagcatataaagaagagttgtctgagtctgctgaaactcatactgtatttcatgttgctcttcacaaaccatttcatggctaaagtcctccaccatat

SEQ ID NO: 264388 - DNA, 417 bp, Glycine max
  unsure (1)..(417): unsure at all n locations
acctnttcgattcattctatgcacccgtagtggtccacattgtgtttcgcgcattcctattctcgttatgcttactttatataccccctgctgacgtgcttaagccattttacttaagtcatttctcgcttaactcaaaaataaaataaatttccaccgaacgtttgaattgtattatccgttaacttcggttaatataaatttcgaccgtttggtcgtgccgcaaccacgttggaaatcaaaaagaggttcaaaatcttatcctaataaaataaaacctcttttagtaaaataaagcggaaaatcaatcggacattttctctttgggatttctcattcttaatcgaattgattaataactaaagtgaaactaaggctaaaatcaactcgcctagtcaagctctgtcataaaaaata

SEQ ID NO: 264389 - DNA, 462 bp, Glycine max
  unsure (1)..(462): unsure at all n locations
ctattacggaccttataatctcagcttctcaggaagttttctcaagaaagcttgtcaaggaagctacctagtctataaatagaagcatgtgtgacacttgttgtcactttgatgaatgagagtcttgtgagacacaactcagagttcaaattctctccctctttcttccttcaatttcgtgctcgcccctctctctatgtctccctctttcttttcctccattgaagcatgctctccaagcttcttatccaaggctcatcttggtggtgaaactccttcttccatggcttattccttagtggatggcgcctcctctcacctcttctcctttgtcttccgctgcatctccatggtggaaaatcaccattaaaggacctcattgaagctcaaagagtcagcctncatagaagctgcacaagcaagctgtcatcaagtggtaatcagagcacaagagcttcaagt

SEQ ID NO: 264390 - DNA, 428 bp, Glycine max
  unsure (1)..(428): unsure at all n locations
tatgtaaaataccttacaaattgtttngcttttgggaaaagcaaagcttaatgattcttccctaatggatggtatcacacggggcatgcataacctcattattgcccacggaaagtgaatttacaatttacttgctactactgttaattgatggttaacgcatgtgatctgtctattatttatgggcacttggtaaagattgtacatatatgttatgctaatcgagggatgtcaagcatcttattaaggaggatagcagctaaagcttactatagaatatatgttacgagcttgtggcactcctatacttataacctataatcctttcgcctagcaaaaaaagttatatgttataattgattctctcacttgtaaatagaaatgacaacttgttttagatccaatgagtactcataaaaatttcccac

SEQ ID NO: 264391 - DNA, 434 bp, Glycine max
ttcactatatctgtagatggtgtattatacaaacatgtttgatgtgagctcattgaccaaacacatgcgctatatatagtcattctaccatcaagaatgcttttagtagtcattaccacccattgatgtcattcaaaatttggccttttaactcctaaactgatggagcgctagaccttctaagtgccaaacattcacaccactattgcagagttaatcagagctcttaatacaaaattattacatgatattgcttggattccttattgctcatgtcgcttatggattataaaagaacgtatccttgaatatgtatagcttaatccttgtgatgttgtacttgcattctcgatatgtatagccttgattcttgtgatgctgcacctgcattcttgtatgaagtttgtagccattgtgttgtatcatgtgttgtt

SEQ ID NO: 264392 - DNA, 425 bp, Glycine max
  unsure (1)..(425): unsure at all n locations
actacatttagaatcaccggtttgagtcttctttcgggctgtcttactggtttacctccatcctctaaacttatttgatgcatacatgtggatgggctaataccaggaatgtccgccagggcccaccctatagccttcttatgcttcttgaaaactgacaacaacttcttctctcgctcatcagcaagggaggcagatataatcactggaaaactcttgctatcatccaagtaagcgtattttaaatttgatggcagaggcttcaattctggtgtggtcggctggacagtggtataaggagatggtttctcagcctttacctcataaagaaaagtagaggtatgtgtacttcctgaaacatggttagtcctatctgactctatanaatcaattctcaagaagtaaaacaccaccaccaggcatgc

SEQ ID NO: 264393 - DNA, 419 bp, Glycine max
gcacacatctaatcattccagtccactcaatttatacatttgatcattcaagtcattcacaaacactcattcataataaatcacaccactgaatatcataatcaatcagttcactgttcaaacatgcttttgtataagcaatcaacacttatacaacagaaatttaaaagactgaaatttaaagactaacaaagcaaaaactaaataattgacaagaactaaataactgataaaataaattgttcatgatttgcaaaattttaaaaactatgcagaatttaaaactcctgatcatcctgctgctgatcttctgcatgctcgttcagatctagcactgaagaagctggtggatcctgtgaactagactactcttactccaatgctggtgcatatggcgaggtatcctcagaaataggtgc

SEQ ID NO: 264394 - DNA, 417 bp, Glycine max
aagatgggaaattcgtacacaaaattatgatcagttaaagtagactgattccgaatcacaacacagaatagattatatacaggttgtgagcaatctgtaattctgtatgctccgaaatcatgaaattaactaataactcatctcattttttctagttctagttatgctcattctaagttagctgacttgtgtttgacaacgcaaccatcttcctaggtgaataattagaatgcaagacaggaatgtcagagtttactaatcactgtgctttcactctattttcttctgtatttttatgggggaaatttcatgatctgatcaactttacatttttatacttcaatttgagctcgcaattctatctgattacatatcaatatcataagatgttgctatcagaaagggctgtgtctacta

SEQ ID NO: 264395 - DNA, 445 bp, Glycine max
  unsure (1)..(445): unsure at all n locations
tgtctgtctgggtggatcaaataaacctgagaattcctatttttagtggaccctaatatatactactctagaaaagagacaaaatagctttttacacttaatttaaccagaaatttgaaaaaacttttgaataaaaggcatgactaattactgtttactaaatgtacacgtaaatacgttnttcatctctcaaaatatgacgggtttttacttcttttttgctggataaacgggtttttacttttatccttatacaaattaaattcaatttcagtttttatatttgacaaaaaaatgatatgattttatacgtccatcaggaactgaaaagaactaaaaaattaatgtattttcaagaatgatcaataatttcatttatatataatatagctacaattcatttgaaatgatgatatacttacttttatccttataaaaaaatgta

SEQ ID NO: 264396 - DNA, 397 bp, Glycine max
agcttcctttataagattcctaaagaggttatagcttagctacatacacctttctaatagctaagctcacctccttgagatgagaagttagagcttaactcacacaacccccgtaatagctaaactcacccccatgcgcaaatacatgagaatacaaaaaagtgcctactacaaagactactcaaaatgccctgaaatacaagactaaaaccctatactactagaatggccaaaatacaaggcccaaaagaaggaaaaacctattctaatatttacaaagaagagtggatccaacttttggccctgggctcataaatctaccctgaggttcatgagaaccccggggtcttctttaacagctctaagcccatgctcttggaggtttctatccaatacc

SEQ ID NO: 264397 - DNA, 433 bp, Glycine max
ttacacaacatttggagaggttaatgaagcaacgatatcaaatgaagaatagagatcataatgaagaagaaaggaggagaagagggaatgatggtgttcctagacaaaaccgaattgatggtattaatctcaacattcctccctttaaaggaaagaatgatccggaggcctacttggagtggtagatgaaaataaaccatgttttctcatgcaacaactatgaggaggaccaaaaggtgaagcttgccgccacggagtttttcgactatgctcttgtgtggtggaacaagctacaaaaggagagagcaagaaatgaagaaccaatggttgatacatgggtagagatgaaaaggatcatgaggaagcggtatgtgctggctagttactcaagggacttgaaattcaagctccaaaaactaacctaaggcaacaa

SEQ ID NO: 264398 - DNA, 419 bp, Glycine max
tgcaagcttgtataagtgaaatttgtgcacctatctccctaacagtcctgtcatgaggtggaggttgagccatgttctcagcatgaaaattagtatttgaatgttcaaaatcacaatattcagaatcaccagcaacagaatgctcataatgctcaaaatgcacagaatgatcaggatgcccactatgcctaactaatctatgaaaggttctatctatctcaggatcaaagggttgtaaatcacctggattgcccctactcatgcactatatgcaacaaataatgtgttctcaaacaagcaagaagggaggggtaaaactacaactatagtcaaatgatatccaaatgagctggaattttgtgagccacactctaaaatcatgagaagatagcacacaaaatttctgaccaaaatgtcaa

SEQ ID NO: 264399 - DNA, 441 bp, Glycine max
  unsure (1)..(441): unsure at all n locations
ccgctctttggaccttgacaagtcataactcctctntcttaaccatgccatgtgctcgcgattggtccctttcttcccttcgcaacttgagttcactattgctaccccatagagctccgcgaaatttgttccggccatactcttccttgcgagccctcttggtctctcgttcaagggctcttgcggtaattgcattctcttcccgtaacccggcacactccttccgaacgtgtgtagcagccaacttgaacttctccttggcgagttttgcctttcctaactcgcttttgagagcttggacttcctcgtcctcttccggtgcttcaaaattctcttcgctgacgacttttaacttggcgagccaatctatacctcgtatgcgaactttcagccattcgtggacccaccaatgatgccattacgaacgcctctaagctcttg

SEQ ID NO: 264400 - DNA, 430 bp, Glycine max
agcttccttaagaagattcctaaagaagctagagcttagctacacatacctctctaatagctaagctcacctccttgagatgagaagctagaacttatctacacaccccctataatagctaagctcacccccatgacaaaaaacatgaaaatataaaaaaaagtccttactacaaagactactcaaaatgccccgaaatataaggctaaaaccctatactactagaatggccaaaatacaaggctcaaatgaaggaaaaacctattctaatatttacaaagataagcgggctcatacttagcccatgggctcgaaatctaccctaaggctcatgagaaccctagggcctacccttggatctctagcccaatctacttggagtcttctacccaatgcgcttgcgggataagattgcatcattccctccacc

SEQ ID NO: 264401 - DNA, 436 bp, Glycine max
  unsure (1)..(436): unsure at all n locations
ntagtggttatattntgttgtggtgttccgttggaggtgtggtccctatattgttgttatgatggggtttctgcttaacttgtggtggaccctatacttgtggtggacccttgttgttgtaaaaccagaaacatgaatggttttttttttgtggtggtggtccccatgttggcttttatttttgttatgttctgaaaagctttgttggtggtgttgtttttattaaatttttgggctttgttgtcgttcgcgtttttgcaggccaaccaaagaacacatagtgaggttaaagattcaccatggagggatgtttatttataagccatccactgtgtatgtcaatggacacatcgttgaagaaaaatggggttgggatgtggatactatgtcatatattgacttgacgaaggttattatgtctattggctacaaagca

SEQ ID NO: 264402 - DNA, 344 bp, Glycine max
  unsure (1)..(344): unsure at all n locations
ntgactctgcatgcnagagagtatgatgatgagagcttggtggngacgatgtccctttcggacagcattcaaatttgggctggaccatgatgtctgccttacacctagaagtttggaaatgtgtgtgatcatgaacataaaggtgtacagtcggtaacgaacacgccgttgttagtatacttatagattgaggcagcacaaatacttttgctaatgtatacgtataagtagcatagataccttagttgattaacaccttagaatatgtatatatgtagtgcacgtcgcacaaatactagaatatggaatatgaaatctttggcgggaaaacaccctgaatgtgt

SEQ ID NO: 264403 - DNA, 203 bp, Glycine max
ttcctgctttattcttttaccacagagtggtaccttgagatatgtcgcgggggtcacgagaccttggggacgttaagtggggtgctattggccaaaacacaatcttgaccaaatcccgacccaacccgggcatagtcgtttaatgagaacctgtgatgtacctaaacaggcgagctcctggccgttcacagataaaaggaaca

SEQ ID NO: 264404 - DNA, 423 bp, Glycine max
tcctagcggtttctaattatatgggccattagatctatcatatgctgactatagccgagaagtctgtgggtctccgcgggggcggagtaagtgtccgccatcgctttggccttggctagcaatcgaggaagttcttgactcccattcaaggtaaaagaaaattggtccatccacattgttgcctcttgatgtaacgagtcgatcacccttcctctagcctccttttccgcatacacttgggcatactcgcccgccactctatcctcgtgggccatggctagatttagttcttcttggtacctactgatgatggcaaacatgttggtctctgtttcgcataatcgctgatacaagtttcttttggaccttgagcaaacccttaactcatcttcaacatcgaactgtctactcgtgattgatccc

SEQ ID NO: 264405 - DNA, 352 bp, Glycine max
agcttaccttgtgaatgaatgacatatcttttgcacccacgactaagctaaaaatctgactgtttgagtgaaccttgaatctatggattacatctccatctaccttgtcttaggttgtaggagagcattatgattcaaagcaaatttgtcccaaatttgggggagtttattgggtgatagcttctaatggtaagaaaatattagcatacacagtaattcaataagcagcaagtaaagagttgttgtataaaaaaaaaaaactgtaagttttcaaaataaaagtgtgtgtgttgttatctaacaaaaagtgaagctaagtgttttaggcaagttattgaagcttgaaataaaa

SEQ ID NO: 264406 - DNA, 426 bp, Glycine max
  unsure (1)..(426): unsure at all n locations
nttgatcaaaaaattatctaatcattctaatccactcatatcatacaattgctcgttcaaatcattctcaaacactcatttcatgcaaaataatccactgcatatcattttcaatcaattcaccattcaaacaagctttttggtacaagtaaataactcaaagtgctgaaatttaaaaaaaaactaaaatataaagcaaactaaatactgataaactaaaatgttcatgctttgcagaaattaaactaaacacaatttaaacatcctgctcatcatgtggctgatcttcattaagatctagtgctagagctgctgatgaatcctggataggctgctctggctccatgactggtgtagatggctaagtctcctcaagaacaggtgcaggagatggctcaggtatctaatatgtggaagtccccttct

SEQ ID NO: 264407 - DNA, 393 bp, Glycine max
caagctttctttgatggatgatgaactctgtctctcagaatggcatgactgctggctgacataatttcaattatcccaatcgtctcattaggggtctacagctttatgttacccctgttgaagcatctaacactctcttggtttgtggtctcatcccatccataaacatattcaattgaatcggctcacataacccatgggtggaagtgttattcaataaacctgtaaacctttccaacgctccacttaaggactcgtcagggaactgatgaaatgaaaagattgcacctttcccttccatagtctttgactctaggaaatattatttaaaaccttttcatcaacttcttccaacgtctcagactgtcacccttaaaagagaggagcccctct

SEQ ID NO: 264408 - DNA, 301 bp, Glycine max
tgtatggaggctgaatctttgagcttcaatgaggtctttctatggtgattttgcaacatggagatgcagtggaagataaacgaacagatgtgagaggaggcgccatccactaggaaataagccatgaaagaaggagcttcaccaccaagagatggccttggataagaagcttacagaggaagcttcaatggcggaaaagacagagagagagagagaaatgggcggggggcttgtacggcattaccttaatctaggcaaaatggtgtcatattttattcgctgacaataaaggtggcattat

SEQ ID NO: 264409 - DNA, 329 bp, Glycine max
  unsure (1)..(329): unsure at all n locations
atgtgcaccccaacccaatcttcgggttcgaaaaacaccctctttctccctctgttggcttggttagcataagctttatttttcctcccaatttgaatcttgactctctcatgaaacttcttcacaataaccgcctttgcttgaccttctttatgcttacaaacagaaacattacgcctaggccaaagatcaagaggagttagtgggttaaaaccataaacaacttcaaaaggagaacaattagtggtgctatgaacagctctattgtaagccaattcaacatggggtaaacacgcttcccaangttttaagttcttcctcaaaactgt

SEQ ID NO: 264410 - DNA, 337 bp, Glycine max
  unsure (1)..(337): unsure at all n locations
cattcaatttcgtgcgtctcgatatgttacggggactctatcatacattccgagtaacaaagttatgggtcgtttgtattggctcanaagcttcaactttcaatttcaagcgtctcgatatgttacgggactcaatcagacatccgagtaaaaagttattgtnatttgaatttgctcagaggttcaacagtcaatttcgagcgtctcgatatgttacgggactcaatcacacatccgagtaaaaagttattgtcatttgaatttgctcagaggttcaacattcaatttcgagcgtctcgatatgttacgggactcaatcacacatccgagtaaaaaa

SEQ ID NO: 264411 - DNA, 409 bp, Glycine max
tggctcattacctatcataggctgtgtttaaagactcggctcggcttacataaaagtctggcttggcccacgagcctatttaaaagcttgcttaaagacgtctttgattaattaattattttaaaacctagtgaaatactaactaaaaaaagaaacttataaaatttcgtataagtaatgtacaaatccaaaaataattgataaacaaaatcatattgaattcaagtcgttaaagcacaaagtatatcaaaagaaaataaaaagagcgtaatattaaaaaatgtgtggattaggtcctcagccctaaagcttacaaatctattttaagtccaagcccataaacgaaataaaataaaatctggacaaaataagataagattggatgaaatacaatctggacgaaataaaa

SEQ ID NO: 264412 - DNA, 305 bp, Glycine max
  unsure (1)..(305): unsure at all n locations
attgcaggtttatttttgaaatggttattgtattggaattttttctttatcattaccatcatgagattgttatgttcgacgggccaattgatgccctaatgtgaattggttgataaaattgaacgctcttggtgtttttgtattttttaacctatgattttgattctgatatgattatgtgaaattgcttgaggggttttactccccatgttatgaaaactatttttgtataatccatttatatntccaacaagatttactagattaacgtgagaactagattgctggaaacattatttgtcata

SEQ ID NO: 264413 - DNA, 440 bp, Glycine max
gcggcttcagcttattaattttaaattgccttatctgttgttccacatggcaacattcatctcacgagctgttgcaattaatgcccctaccccctctagatttagggcgcacaaaatcacttgacctattggtttcaaaaagaaccctaaatcaaggtcctcgtggatctgtcaatagcatctcaaatacttagagggaaccaaagattccatcaagtatataggaatagagttcaagacaaacttggtcaaagtcacccttcctgatctaaacaataattgggactctcagccagccacacgattgttcaccctatccatcacataaaagaagtcattcttcttgacttcacaatactcaaattttcgcttggcagatgtaactttcgctgcaaagaatctacctccagagggtgttaattcatgaaaaattattattg

SEQ ID NO: 264414 - DNA, 376 bp, Glycine max
  unsure (1)..(376): unsure at all n locations
ataacttaagcccctcaacaatggaggaagagaagaggtgaaagcaatgggttcccccctccctctcttagccgcgggaaaaaataggtggggaaaggttgcttttctttntatagcgggaaggggttaggttaagtggggcctcctcatgtgggtccctataggtttttccctctctttntcctattcaaactaacaacacttaaggatttaagctcttaattagtccttaattaattctaacttctaaattaattctagagtgataagttcatttactagtctctcctatcaatcttgactaaaaataataaacgagaatgagaaattaatcctcttttttcttaattatttaaactaatcatttcttacttct

SEQ ID NO: 264415 - DNA, 458 bp, Glycine max
acttagcccgcgctgcactaggctttcttgaaattttattttctttgcttttaacgaatcgatctagctcacttagtcaacttccttttctctctagcctgatccataaagaagttgtaggtttttacagcctagtaggctttgtgctctatctctacaggaagatgacatgccttgcttaagacaacccgataaggtgacattcctatgggtgctttgtaggcagtcctatgcgcccaaagagcatcatccatcctggtgctccaatcatttctgttcggctgcacaatcttctccaagatcttttatatctccctgtctgaaatctcaccctacccattaagttgggggtggtaaggtgtggaaattctgtgcaccaccccatactctttgagcaaggcatacatggcactattacataaatggtgccttgatcactaacgatggctctcgggact

SEQ ID NO: 264416 - DNA, 432 bp, Glycine max
tagcgtggaagggtgagacttcctacttttattttttgttcatacagcggtacctggagatatgtcacgggggtcaagagaccttggggacgacaggtggggtgctattgcccaacaacaagcttgatcaatcccgacccaacccgggcatagtcagtcaatgagaacctgtgatgtacctaaacaggcgagctcctggcagtcaaccgataaaagaacaaagaccacacagcaagaaggcttgtgtggtggctggccagctgtgaatcttgagtgatatatgggatatggcctctggtaatcgattaccaagggtgggtaatcgattacaaggcttataaacgagatcaggaagcttagagggcttctggttatcgattacaaaagggcgtaatcgattaccagcgctacaaatgggactggaatgttgaa

SEQ ID NO: 264417 - DNA, 235 bp, Glycine max
cttatggatgaatttggttcccacaagccgcccatttttacagtggccccaaccctcctagtgggggtgttaaataggagtcagggaccgctaccgtggggtggatggcaaagcatttgatcaatacaattggccaaggttcaatgggagtatattatcacttcactgctgttgcccttttaatgcacattgtccgtgcaaacttgtcggagggacaaactgagtgaatgaaaag

SEQ ID NO: 264418 - DNA, 441 bp, Glycine max
agcttcttcttgttctctcccatttgttatcaacattttcttgagcacttcattgagaggtgctgtcaaatgtgctaaaatccttcacaaatcgtctataaaaacttgctaagccatgaaaactcctcacctcggtcacagacttaggtgtaggccattcttgaatagccctaaccttctcctcatcaacttgcactccttttgaactcacaacaaaaccaaaaaacacaacatggttagtacaaaagatgcatttttcaagattggcatacaattgttcttttctaagcacagtcaagacagattttaaatgatcaatatgcaaatcaagtgaagtgctatagataagaatatcatcaaagtacaccacaacaaactttcctatgaactctctcaagatatggttcattaatctcatgaaagtgctaggagcgttagtta

SEQ ID NO: 264419 - DNA, 453 bp, Glycine max
  unsure (1)..(453): unsure at all n locations
tcaagcttgaaattgatcaacggaagcacccgagaaattcttattgttctttctatcacaccgaagtccgattcaggcgcataatatatcgagacgctcgaaattgaacaacgaatgctctccagaaaataatgtggtcacaatttgatgtgaacctgagtaggagcggatcgtttgatacaggctacggagtttggatgacgccacttccggtgaaggaagataagtcanggtagacgccacaaggattaccttgataagtctgataattggttcaacaaggaacccacanagaaactctcaccaacatttatcaaatgccaaaagttttttttttttgttgaaaacaaacacaagtacttatagtgtatctgaagaaaagataaaatagagatgggccttctaaacagtttgcgccggcattacaataataataaattatacgtaaaacta

SEQ ID NO: 264420 - DNA, 333 bp, Glycine max
cactgaggcatcaacttggacctatgataagttttgccttttttgcctactcactaagacgtgcggggtatttattagcacatggcttgacaatgattttttatctgattgaactaatccttgtgtttggctattggaaatagcgatcctttctacatgtggtcctagaaagactacaccttatgaatggtaaattaattaaccctctcttaacatcaaagacttattgcatatacataactttaattactcattataagctctctacttactgtaacattatatgagtatctttattcattatcagtgacatacataatcttattactcatt

SEQ ID NO: 264421 - DNA, 419 bp, Glycine max
ctacatagcataattgacatccatttcagcttgtttatattttttaatggactctttgtgtgttcaaactttctatgtaagcttgttgtacatgttgtgcttgctattgtttctggttctttgaccctttgaatggcgaagctaaatctcaatgtcttcatgagaattggagagaattaaattcttgaaatttaagcattgggcttgtgtctgctggactactatagcataagcaatcttcaatacattgcagctatgttatattgtgaggacaaaatgagatctttatcttgatcatcaattcttcccaagacacaagccatatttctcactacttctttatgaaagaagtagatctttatcttatatttcaaaagacactaagattatcttaaatgcaattttgtagctcaagtaga

SEQ ID NO: 264422 - DNA, 440 bp, Glycine max
  unsure (1)..(440): unsure at all n locations
agctgggggttatgggaggatatcaactttttntttatgncgaatngaggagcctactaagtaacaactaatgatcaataccttttcaagtaaattcgtttattaatctatgaaattgtaagaccagtttaattcttgacattttaaattcttttttagttcttgactaagtaaaaaacaaaaatttaatattctttcatatcattttcccgtaacactaaaaattcaagtgaatgactttttatgaaattacatattaaacgagaattttaagaagttaaaggctaaagtaatcgacttacaatcttagaaattaatgtaatgttttactccatattttacaacttataaatactgctacttgtgaagtaaaacactgatagtacttagtacccaagtaaagccctggttacatgcacagaaaagttgaaaagttttgc

SEQ ID NO: 264423 - DNA, 440 bp, Glycine max
ctcagcttgtcgaatgtgaaacatcttcttcaccttggttttcttgacttcatctcattgaagcgcatgtccacttgtaactccaaagtatcaaacctttcaccaacaaaggtttgaagaccatcgaacctatccaaaatcttttgaagaagagaggaatcttctccaccatgtaaatgtccttcttcatcaacgggtcgagcaccatttttcacccaagagccatcatgctctttttgataaccaaaggatccaatgacagcaaagcctattataaaggatctcttgattggaacataaggttcagaatcaaaagggatgttaaagtgttgaaggaaaagggtgactatgtgtggatatggcaatggagcatttaattgcaatgccttatgcatgcgatatcgaactaagtatgccccactcaattgtacgcctttatg

SEQ ID NO: 264424 - DNA, 360 bp, Glycine max
  unsure (1)..(360): unsure at all n locations
attgaaaatggaaactcttaaaaaattcaaacgacaataaccttttactcggatgcccgacagagtgtcgtaatttatcgagggatgctccaaattgaaaacggaagctcgtatcaaattcaaacgaaaataactntttacttggatgtctgattgagttctgcaatatatcgagacgctcaaaatttagatccgaagctctgagaaaattgaaatgacaataactttatacacggatgtccgggtgagtcctgaatatatcgagacgctccaattgaagaccgaagctctatgagattcaacgacaataccttttacttggatgtccattgagtcggtaataatcgagacgtcaaaatt

SEQ ID NO: 264425 - DNA, 416 bp, Glycine max
tcggatctaaattatgcgcgtctagatatattactggtctcgttcagacatctgagtaaaaagtgattgtcgttagaatttgatacgagcttccattttcaatttggagcgtctctcgataaattgcaacactctgtcgggcatccgagaaaaaagttatcgtcgtttgatattttaaagagtttccattttcaatttgaagcttctcgatatattacgggactcaaccaaacatccgtgtataaagttattgtcatttcaatttgctcagagcttctagtctcaatattgagcgtctcaatatattacccgatacaatcggacatgtgagaaaaaagttattgtcgtttgaatttcctacgagtttccgtgttcaatttggagtgtctcgatatattacgggactcaactggaca

SEQ ID NO: 264426 - DNA, 281 bp, Glycine max
gggggagcactaaatttgacgaattaaagagggagaaaagttgaactttgagttgtgtctcacaagactatcatttcttaaagttacaacaagtgttacacatgcttctatttatagactagggagcttccttgagaagtgtcttgaaaaaacttccttggaaagctctcttgagaaaacttccttgagaagctagagcttatctacacacacccctcttataactaagctcacctccttgagaagcttccttaaaaagattcctaaagaagctagagctt

SEQ ID NO: 264427 - DNA, 432 bp, Glycine max
tcggaagaaagtcatgaggtacaagccctgaaggcagtatcttgaaagagcccgggtagtcgaagagaagttcaagtccatagccatcaaagtctgaaaagagtatgataaactaagggacgtcaatatggccaccgctgaagccttggaacgagaaaccaagaaggcctgaaaggaagaacacaaccaaagcaaagttttgaggggctttatagggcagcaatagtgagctcaagctccgaagaggtgaaaggaatcatcacgggtcaaaggcatgatcttgaaggacgagctaaaggcttgccttaggtcgaaaagaaatttgtcccaacagttaagcgagactgaagggaatatgtgggccatcatcgatgagtgcaaagagaagctaaatctagcggcgactcacgagcaaaggctagaggatgagta

SEQ ID NO: 264428 - DNA, 285 bp, Glycine max
gatagagaaacactttacacaaagaataacaatgtatacacagttgattttaactctgcgggtgcaaattaagtttatttatacctctcttctttccataattatttatggagaaatttatctatacaacaacttgtgacggaagagctgaatattaacttacacgagagagaaaagaacatctcaccttccaccagaatacaatttgcatacctttagctttgagcacattcaaatggatgcaagcgtaacacccttcaggaggatcctgcctcctaaatgatt

SEQ ID NO: 264429 - DNA, 305 bp, Glycine max
actcatgtgccgccagtagcattttttctttttgttcatacgccgacagtgatgttactaatcatgtacacaatatatactttaaatgatgactttgtgtagttgtgtgaaatctgaatagacgttaaccaacaacggaccaacgatgccggagacatcttgtagcttatgaacttcctatacgagacttcatttatgtcttatattaggctgttgttactgtttgacgtacttgggaagatattttgtactggaccactttgaaggtgatggttcctatctcactgccatatctttccgcctgt

SEQ ID NO: 264430 - DNA, 389 bp, Glycine max
  unsure (1)..(389): unsure at all n locations
aatgcattaacacttgtgcaaagttgcacgacatacctcaatcaaaatcagaccctgtgagcacaactgaacaccctcaatggacttgcaagtgaaatgtacctctataaggtcctttcatccgaaacaaactaagagtccttacaaggagcaccagttcctacctatgtatttaaaanaaaaactcctgaaacgtacctaggtgaggtggcgagctatcacggtctctagtgcgatgaataaaaataagcttatatagagaataagagagcttagatggagaatcaagacaagagcgccagcaacatagggctcacgcctgatatatattagaatgtaagtccaacatctggtttcaataaaaaaaaaaaccgatgttaacaaatgat

SEQ ID NO: 264431 - DNA, 255 bp, Glycine max
ggagcataccaaaaggtggagggtgaaccaaccaactcccacgaacctggcctaacagcaataagcgcaagcctgccaaccattccggtcgaaccattcaacatacggccccatactgcgatcgacaacaagtgcccagaagaatcaggaggaaaactaccaccccaagacagaaaacggttataatcgctctcgcggcctcacatatggcaagaagagggcaactaccaagaggcttctcgccgatagaaacca

SEQ ID NO: 264432 - DNA, 356 bp, Glycine max
ttatctgatccttttcctgggacaccaataaaaactccttcttagaggatatcacacattcttttacaggaaaaggtatttcaaatggttatgtggtcaaataccctggatcaaagccccgaaccctttttgtatttcaaaatggcatccttgcctttgtttggaaggacactaaggcttgcttgactttgcaaagacttgacctgcaagatattttgaagaaaggagacagagtaccttttctgccttccatcaacaatttttcatatttgaccaagtcctactcaaatgtatttacaggctgttctggtgcttccacttgcttgccttcaccaagtttgacttaaccctgacat

SEQ ID NO: 264433 - DNA, 346 bp, Glycine max
  unsure (1)..(346): unsure at all n locations
atcaaaacaagctggtacttcagttaaccaatatttctggaggtcattattatttggtcattcataattagnttactatacatggatggttatattggccaacaaatattcggcattaatggttaccataaactcttttggagcagttaagtagtacttgcataaatctgattggtaattggaatcatacctttctcatcttctaacatgagtagcggggtcatcttttttttttttccttttcttttaacatcatttgatggtcgtgaacaaaatgctaagaagttgaaggaatgaatgttcttaaattattgaaaggcaaattatattaaactcctacaccaca

SEQ ID NO: 264434 - DNA, 394 bp, Glycine max
  unsure (1)..(394): unsure at all n locations
attgggttaattttgatggtgccgctgtcattaaggccaaagtttcttatgcaaggaaaaatgggctactcgggtacaacgtgttccaaataggcaatgacaaaaattgggaactttcaaaggcaggtgagttacagaacattttgttgaggtggactgacactatgattattattatatttatataattatgttggtagttatgcttaaaatattcttcttagttgtttttgaaataacatataacatcacttcctttgcaacacaacccttcagctcaagaagtagatgaagaagttgaagatcatcataagaagaggctggtgataattgttctgcttgcaactctgactttggcactcttgctggagatagtattntgctactaccgccg

SEQ ID NO: 264435 - DNA, 377 bp, Glycine max
  unsure (1)..(377): unsure at all n locations
ttttcacgcccacgnaagcacaagcggcaataatgtgtgaacatggatagtgaagcgcaaaataccttccgcattgataatgacgatcattcaagtttactgcccacttttgtccgccacgttgcgttatagggttgaagctctcctctacttcaaaccttgtggagtggatatcatacacgcaaacgatgggcgtacaagcttgttcttgatttttcctcagttctttaacaagctttgaacaatatacttggccttcatttaactgtctttgggcttggcggccacgctcaacaaagtactttcgacacctactatacgttgatttcaccaatgctgttatgggaatgttgtgacaatcctcttaaaccttattg

SEQ ID NO: 264436 - DNA, 441 bp, Glycine max
  unsure (1)..(441): unsure at all n locations
ctcagctgttcttgattttcaagtttttacaacctaaaacatatcttgtccttcattaatggctttgggcttgtcaccacgatcaaaaagtactttcgacacctactatatgttgatttcaccaaggctgttatcggtatgttgcgacaatccttcaataccttatttacacatttggacaggttggttgtcatgtgaccatatctacgtccttcttcatcataagtcatagtccattnttcctttgaaatgcgatcaatccatgttgctatggctagactcaattgacgaaatttttctaaattttgatcaaatatatgcttgcaaggagtgtagcctgcataaaattagttagcaataacaattntaagtatatatgaaacttaaattaacttcatattataaattaaatcttacccaatttcttcaacatttcttttt

SEQ ID NO: 264437 - DNA, 432 bp, Glycine max
  unsure (1)..(432): unsure at all n locations
ctgcaactcacaaaagcaacgtatttttttattctaaatttcttaaccagagaagcgtgcgctcagttgaccacaaattattctgtcagctgcacctgactagaatggagtcatccccaagaaatcaattacctgtgatccggatccaaggaagcatccatcttagactgggtgttagcctactcagtctggtaaacctaccacattanatcctctgnataaggacttatctacactgccaaaaaacactcaaggaaaggctggacaaccaccacaaaggctttctactcaacacaccggtttctntaacattagcagttactcagcttcgaccttaaatactgccaagaataataaactatatccaatttcaaaccttttacgctcattgtgtgcaatggagttgatatctgtagaaacagaatcaccaac

SEQ ID NO: 264438 - DNA, 436 bp, Glycine max
  unsure (1)..(436): unsure at all n locations
agcttatcngaatcgattatacagttgcttttgagacaatgattgatttattaaggagtctttggtttaatcgattaccatgtgatataattgattatttctctttctataagggtttcagaagtgaacgataacactttaatcgattaaaaagataatataatcaattacttcattgaattaatcaattatcttgtagattaatcgattacaagcggttataattgttttctctataaatagtcaccttatgttctctcttataacacttagaagaacaagtttttatgagctagaatcacatgctgatattagttaaagaaaagtgcttagaaatagttactcacaacctctaatctatgattataaagatctctttgtgacaagtgagttgtgatactttcttgagttcaagaagacacctcattcagtcaag

SEQ ID NO: 264439 - DNA, 453 bp, Glycine max
  unsure (1)..(453): unsure at all n locations
tatcctctnttccatttgttaataacaatatattattattattaatttattattatccctggtacatttttcctcacattttgttactcaacttgtaatagtcttttctctagctacgtggcagagcaagaaggcaaggggatgaagaccatgtatggtaagtttgttgtagtagactactcactactgctactgctgttacagctaaatagtttttatatacatacaagtctgaagacgacttgtcatcatatatagtccaaaatgggttgttcctcggtcttactcagacaaactattgttttgattataaggtgctataagtntaccaatattgaaaacttttaggtcgacataggctcacaggaattggaaggtaaaattanaattgaagtttccttatgtgcatttgaagtgtctttcacaatacaaaacaatgttacaacaaacaaa

SEQ ID NO: 264440 - DNA, 457 bp, Glycine max
  unsure (1)..(457): unsure at all n locations
agcttgaccaatcccgacccaacccgggcttattcaatcagtgagaacctgtgatgtacctaaacaggcgagctcctggcagtcaaccgataaaaggaacaaagaccacaaagcaaggaggcttgtgtggtggctggccanctgtgaaactttgattgatatatgggatatggcctctggtaatcgattaccaaggggtgtaatcgattacaaggcttaaaaataaagacaggagactaagatggtctctggtaatcgattaccaggcttgaaaacgagatcaggaagctaggagggcttctggtaatcgattaccaaggcgtgtaatcgattaccaggcttaaaaatgggactggaatgttgaaggagcctctggtaatcgattaccaagctgtgtaatcgattacacagaggaataagccactggtaatcgattaccagtcatgtgtaatcgatt

SEQ ID NO: 264441 - DNA, 288 bp, Glycine max
taaacctcaattaatatgtagctgtaccttctcctacatagatgtttcttcatttttcttcgagtattggctacatggcctgggcctaaatttttcaacctgaatctttatagctttcaccgcatgaactagctatagaatctacatttgagtgtctatgactcaaatatcttgttcttgttcttgaaccatgaattgcgttgagtttaagctcctttgagttatgacttgctattatttgtggctgaaacctaaatcataaatgcttataaaacattaaatttgaag

SEQ ID NO: 264442 - DNA, 272 bp, Glycine max
  unsure (1)..(272): unsure at all n locations
gaaagtttccgacctaattaatttcatacctaggttaattatgaggatatctcagaatccatcctagaagtcataggacataattatgatagttatgcacacaaaaagaaaaaaaaacctaaaccgcgagaaggatggaagctagtttccataatcaagagacttatgtgtggaacgacatataaatcntgcatcatgcttaatttccttcaaaaccacatccatcttgcttttgacctaaagctaatcataagtaatattagcttcagatt

SEQ ID NO: 264443 - DNA, 456 bp, Glycine max
  unsure (1)..(456): unsure at all n locations
agctntctcgtgaggcttccttgagaagtttccttgaattgtttctttgagaagctagaagtttaactatccacacccctctaataactaaactaaccttcttaaaaataaaacatggataaaataacacaacaaataaaatcaaacatcaattataattgctaataatattttagggtgttacacgggtcaagcatcttatctttcctagtgactttgttgtaatggacattgaggaagatgcagatattcccttaattttgggacgtccatttatgtctattgcaaaactgtgtagtggacatggggaagaaaaagttagaaatgggtattgaagaccaacagatcaacttttatctatttaatgaagaaagaaaattgttggaccagaatatntgtttacaggtgaaggagtctgatgagaaggttctgaaggagagaaccaagagtgatcca

SEQ ID NO: 264444 - DNA, 400 bp, Glycine max
  unsure (1)..(400): unsure at all n locations
ntgatcacatttctcattccagacaaacttcttattctttcttgtcagnttagctaggggcagtgccaatttataaaatccctcaatgaattttctataatagccagccaaccccaagaaacttcgaacttccgttggagttgtcggttcttgccactccataaccgactcaactttaattggatccaccgcaaccccgtctttagaaatcacgtgccccaagaactgcactttctccaaccaaaattcacatttcgacaatttggcgaacaatttcctatccctcaggatatgcaagacaattctcaagtgcttctcatgctcctccttattccttgaatatactaggatatcatcaatgaacacaaccatgaactgatctaagtaatcatggaatata

SEQ ID NO: 264445 - DNA, 372 bp, Glycine max
  unsure (1)..(372): unsure at all n locations
cggcttcggttagtaccaaaatggtaagtttttctaaatgactccttattgtttccacactcaagagtctttaaaggccaatttaatataatgtctggttcttcattcttgtggttatagtaaagagatatttttcctataggctatgtttaccttcccaccatatcttttgttatgaaatttaaaattaagtttggttgaggatacaaaaattgtggaggattgctacacttcgttgaggtataaatactttttgcttgacatatgactnttaataagaaatatttcttttgagaaatattcattatttgaactggattccttgatgttatgtctttcacctggatggtatggactattgancaaatgatc

SEQ ID NO: 264446 - DNA, 224 bp, Glycine max
cccctcccctcttggaactactcatctttctcattgccttcttgaatacaccttgtgggtctctatttgggtctaaccctctatgaactttttacaactctgacctagattccccttctttatgtataaaaaaggtcaatgtgatggaatgaagtctagggtgttagggattgaacccattaaaacctcaaaggggatgcttggtggtctataacgcccttatt

SEQ ID NO: 264447 - DNA, 439 bp, Glycine max
  unsure (1)..(439): unsure at all n locations
aacttgcaacatttgagtngattctgtaaaaaagattcgtcttcaaactcttagaggtgactttgagcgtttgtttatggaggagtcccagtcaatttctgattatttttctcgagtattggcccgagtcaatcaacttaaaaaaaatggtgaaaatgttgatgaagtgaaggtcatggaaaaaatacttcgaactttaaatccaagttttgacttcattgttaccaacattgaagaaaacaaggatttaaagaccatgactattgagcaactcatgggttccttacaagcatacgaagaaaaacaaaagagaaaaattaaacaaaaggaggctacagagcaactactacaactcaacataaaggaagcaaactatgcaaattacaagagccaaagaggatgaagtcgcggccaaaatcgtgaacgtggacgaggacat

SEQ ID NO: 264448 - DNA, 437 bp, Glycine max
cagcttagtctttttaagtgcttgtttctgttgtttgcttgttctgatctacttatattctgtttgtttctatttggctctatttgttttaaaagttacgatataatttagtagtttgatggttaagttgtacaagttttatatgaatgaaatgctatggctctttccttcagatttttgtttaaaatgattttgtgataactacaactttttggccttattaacactaaaaaagggagatgatgtattagcatagtaaagtgcattacattagcatttgttttgtatattgcatgagcattatgcaaaaggcaagaatatattgcattagtattgcatcatacatttatatataactctacctaatgatgatgatgacatggaattgatacttctcttagtattaagaaactttcaggtttgactaagaaaaattg

SEQ ID NO: 264449 - DNA, 401 bp, Glycine max
  unsure (1)..(401): unsure at all n locations
ttctttccaattaatctggccacttactatcttttctaatttctaatncacattcgtggtctttctttgtctaacctacacactggctccaactcatgaaaagaagcacaaaatccatcacaatcatgcattcaattcaaaataaaagcctacaaccatttttcacaaaaagatataagtggttcactaccatgtcattcaaaaaccaagttaaactgttcaaaatactttagaataagcatactaactgttcataaataaaattagcaaaaagggattactggactaaaaccatgatcataataataataatctaaaagacaacaacgaaagaacaccaaacatcatggatatcaacattcttgtcagtatgaggcacaacttcctcaacaatccatcct

SEQ ID NO: 264450 - DNA, 402 bp, Glycine max
  unsure (1)..(402): unsure at all n locations
ctcacgctttacttcttggatatgtnttatgttattgcgagatgttctatcttctattatacagcatatccacaaagttgttaatcttgtgacctgttaaaagcctgtactttgaggatcattatagttgtaggttatttagtttgatagcaactataggatacttgggaattgtttagttgtgctcatttaagttgggggtggttctttttaattttgggatttaagtgttcttgatttgcttaacttcgaggttgaagtggtaggatgtccttgtgcaatgtcaaaagcaaatatttacacgtctgatatgtatatcacacgctgatgtatgtctcacaatccaggttcttgacaaggaggcgtttcacaagtagatgttggagaagcttatatggaatt

SEQ ID NO: 264451 - DNA, 273 bp, Glycine max
aactttgaagcctaattcctcaaatgatcaaagttggaaaactgctctacacacaaacctgatatttataggcctaagtggcactcgaaattggagggaaatggaaattctattcgaattcacttggatttgaatatgtggagcacaatttggagccaaaatatcactaatcatgataaaggcatttcaactatgggtcaccccactaattcaagatgaagtccaagatcctccaatacgtgcgcttaagggccatgacaaatgtaaagcctg

SEQ ID NO: 264452 - DNA, 403 bp, Glycine max
atgaattaagatttttaaaggctttattcaataaatttatggattcaatccaatttgtaaaaaatataaataaatcttgtgatattcaatcctcactatcataattctggacgaattgtacaaaatttggtggtattcctaaaaaaccttccatagataaatgtcacttaaaatgaatctcgatagattcctcatgacatcttagtataatatataatgtcacatctatctagcaatttcacccaaactgttgagactcttctaaactctcattctttcttttttagtggatagttaaacttttctttatcccatcacatataattcattctctcttattggagggttgctagacattggtatacttagacatcttttctttcattctacatagcctctctat

SEQ ID NO: 264453 - DNA, 269 bp, Glycine max
  unsure (1)..(269): unsure at all n locations
aacatattgtgcagaaaagcaatctgatgttacctnctccaaacttctagaccagagtgaattttctttaaatgcctaatttgcttcttttgaatttttatttctgccctcaagaatgcagggccatcacctatttgaagagacactgaaggtcanaagtatacctataatctataagagactacataagcaaatactgctcaatatactagagtgacttttgcaagtactggcaaaggtaaaacttatgaatcagagtgacctctttt

SEQ ID NO: 264454 - DNA, 307 bp, Glycine max
aacccaaagacgagctcagtttaaacaaaaaacggatttgtttttcacctaccaccggaaggcctgatacattgggtccctgctgagccgaaagaagccaggtgaactggtactgttataggatgcccacactgagccgatgaacaagacgggagtggtgaaacctcctgatcacccctactactttccgtggcttatggctgacttcttgaagtgccttggaaatatgatgagcccctatttcatcaaggtgattttggaacaaccatttgatgcatgcctgtcatgggaagaacgcttcttgtga

SEQ ID NO: 264455 - DNA, 424 bp, Glycine max
  unsure (1)..(424): unsure at all n locations
aggcttcatacaataatatagaacccatatctttatttcacatcctttcaaagcgnngnggcccgggtcctctagcatgaggtttcttcataatcatccacctattcatctgctcccccgaacacaagttcaagatcatcacaggattcaaacacaacaacccacagggagggagttatcacattcctagctcatagagaaacaagacaattaaatatacctattatataaatgagataccacttgcttaaacatagctcacataaacttaccacttcatcattcaaaattcacttttcaattatcaatcacattacacaagaatcccacactttgatcaagatataataacacatccattagcaagcatatgcaatagttatgctaagactcaattctatatgcaatgtggtaccatgtcagt

SEQ ID NO: 264456 - DNA, 308 bp, Glycine max
gagagaaacacccttatatacatcagctgatcggtagaaagacccaacaccttcacccactgaaggcaaacgtacttgcattgctactgggttagcctagactcagttcaattatgtgcgaaatcatcaattatcaatgggtctttcaacaatgcctcatttctgaatttaaccctatctaatactagctcctcgagtgagatactcggatgtatcccgcttaattataaatacttgacgacccggtgcacttttcggcaaactggaagtcccttgaacatatctgtataaagaaaaagtggccaaaa

SEQ ID NO: 264457 - DNA, 381 bp, Glycine max
caattccttttcatgtacctataacttcccaaataatgtagcaagagacatgttagttaaatctcgtgactcaataatggctgtcaccttgggatgccattccttgcttaagcatctcaaaactttatttataaaatcttcatttgaaagatttttcccaatgatgcaaaatgatttactatgtgggcgaatctctttcgcatgtcttgaatattttcatttggattcattctaaataattcatattcacgagttagtgtattatcctagatatctttacatctgttgacctttatgtgtacctgtagggtatccacatatcttccgcactttaaatttgatactctaaagacttatccttcctaagcaatgtattatatt

SEQ ID NO: 264458 - DNA, 254 bp, Glycine max
aaatagtgacatcatatttgtctttttattaccaatggaaccatctttccttctgcttttagaacttcaagcatgtttttaaagcgtcaaaaatgtttcattacaaaaaggtgcttaaatactccccaccaacgcttatcatttccatgtcaaatacgaataaatgtgaatatggattatgttttcaatgaatcaatcaaacttttggtcaaaaaataattaatacaccctcgaaatttgtaatcatttatcat

SEQ ID NO: 264459 - DNA, 450 bp, Glycine max
acctgcggcatgcaagcttggatttaaggtcgatgccaaccttttactcgagaattttggtttggttttggggttctagaatgtcacgagcgatgtgggaagggtgtagctttggtcatgtggttacacaaaatgatcactgtaaagcgtttccataaccctattttattattctatttttttggctattaatgtgaaactgtgatggtacgttttattttactgcctttgatttttattttgcttcctttttctttctatttttaaaacgcaatttcattggaatgttgaatggtgttgttctccactgcttgatagttaattggctgcagaggtgacatgtgaaaaactgtgcatgattgtatttgtataatggaaatttaactgccatcgttgcacacattatactgggccaaagcaaaatcgtttcttctattatgattcgtcata

SEQ ID NO: 264460 - DNA, 432 bp, Glycine max
  unsure (1)..(432): unsure at all n locations
tcacacaatntattgttttttatcacacttgagttttgtattatcaattactaagactttcctaactagatgatttaaatgatgcatgttaatatgtgcagccctatgatgccacaatcatgaatcatctatcttactcaccaagcaacttagctcatgaaaagatacatgttcaacattcaacatatagatattacctattctcttactgatctggacaactttaccggatatggcttcacttataagacatcaatttctattgaactctattttgaaccctttatcacaaagttgactaatgcttagaaggttatgctttagtccatccacatataacacattcttaatctgagttttatgttgattccctatatcatgagaatcattatttttcctttgttgttgtctcaaacatgaccaatagttgga

SEQ ID NO: 264461 - DNA, 358 bp, Glycine max
tgccaaactgatatctatgacccttcatctttatcaatttcttgagcaaaataatgctcaaactagctaggtacatactttaactaatgtgtgggtttttttggtctgacaagcacaaaattttttaagaataggccattacagtgtgctaatcaaagcatattggcttgaatgataacattgaataggtggcaatcaaaacaaatggcatttaaaaaaaatatcactttttaagtcgggtctagagaaaaccatcttagaatataagtcattctatgacggtctccgggctagaaccgtattataataacctacattttaaacaggccatgttgagagaccgtgttataatgacata

SEQ ID NO: 264462 - DNA, 276 bp, Glycine max
ctgcactatgagagacagttgattttgttgagagcaaaagcccaaatgattagatggtcacagtcagacagaagacagatattcagatcgaatgctaaaaatcaattagaagagcttccagggagatgaaatgttttaaaccactaccagttgttacaaaattttaatttttataccattactttggatataccgtctgttcatacgggaaagtgatcaaacttactaattcacgtcaagatttagggaacatactttggacatccggtttgctga

SEQ ID NO: 264463 - DNA, 396 bp, Glycine max
  unsure (1)..(396): unsure at all n locations
tgctctaaatntacattgatgtgtgtatttatgggatgtgagtttatgccatttctgctttaaagagtaatgtcccactaaaactaactttccaaatgtttgccttcgcaggaatggcaccgaagaaacttgcctcaaagaggtccaggaaggacaaggcggccgaaggaactaattccgccccggagtacgacagtcaccgctttatgagcgttgtacaccagcagcgcttcgaagccatcaaaggatggtcgtttctccgggagcgacgcgtccagctcagggacgacgagtatactgatttccangaggaaataaggcgccggcggtgggcaccactggttactcccatggcccagtntgatccagaaatagtccttgaattttacgcccatg

SEQ ID NO: 264464 - DNA, 348 bp, Glycine max
aatggagaatatagatcctaatgaagaagaaaggaggagaaaagggaatgatggtgttcctaaacaaaaccgaattgatggtattaaactcaacattcctccatttaaaggaaagaatgatcccgaggcctacttggagtgggagatgaaaataaaacatgttttctcatgccacaactatgaggaggaccaaaaggtgaagcttgccgccacggagttttccgactatgctcttgtgtggtggaacaagctacaaaaggagagagcaagaaatgaagagccaatggttgatacatggacggagatgaaaaagatcatgaggaagcggtatgtgccggctagttactc

SEQ ID NO: 264465 - DNA, 426 bp, Glycine max
  unsure (1)..(426): unsure at all n locations
gaccttagaatactcagctntgttttcattacgagcaactcgatatattatgagtttcatttggacatccgagtaaaaatttattgtcattagaatttgctaagagcctctgttctgaatttcgagagtctcgatatactacaggactcaatcgggcatacgagtaaaaaattattatggtttgaatttccaacgagcttctattttcaattacgagcatctcgatatattattggactcaatcggacatccgtgtaaaaatttattgttgtttgaatttgctacgatattccgttttcaattatgagcgtctcgatatactacgggacacaatcggacatccgaaataaaatttattgtcggttgaatttgctcagagcttatgttntcaattccaagcgtctcgatatattaccggactaaatc

SEQ ID NO: 264466 - DNA, 379 bp, Glycine max
aacccctctatttattggattttcaaggtttgagaagtgaaaatgaaaatggggtaaacttggagcaaactctcatctcaaacaagtctatatcatcaatctaaactcgctcaaactggttttacgacgaaaactctaccgaatcaaaatttgacttctcaacacccaattttaccctaaaaatggctcttgttttcactttggtcactcatattcctcatttgcacagtctaagctttctcataagtcctaaatgacatttcaaactaggattaactccctttaacctccaaataccactaaatccagatttggccttccaactctcaaagcctcactctttttccactcataaccccacattctcactttctaaccc

SEQ ID NO: 264467 - DNA, 255 bp, Glycine max
  unsure (1)..(255): unsure at all n locations
tctagaagaccataaaaaggtgagggcaattttcctctctcactccttacttttggactttcttctttttccaaacacttgtttttctagtcatatcttttcttcgatcatccacttctttttccaggtatgcattntgaacctcttcctcccttcataatttcttattttggggagggttttgtgtgctctatcaaaggtagagtgttgtcgttgaaggttcacccaatcgggggggagttacactgacaacgc

SEQ ID NO: 264468 - DNA, 440 bp, Glycine max
  unsure (1)..(440): unsure at all n locations
gcttttaatgttttatcatcaatgttgtttccttatattaacaaaattaatcattgattattgttatttttttattaacaaaacataacaagctccttcaaaacataattaatccaacctcaacaaatactgactggaaactcatattatcaacacattaaaaaaagtttgaaaggatttgagaaccctcttcttaatgccacatgctttgcacgccgtcaatcctcttcatagcaagcctctataatgccccttccataattgagaaggaaatgcaaggagaagagaaattaaaagggaaaaaagagattgagaagacgactttgaaaggatttgcaaacatggacctaaaaatngagatttgagagaattcgaagaaagtagaatgcaagtgtgacatttgagggcataaactctggtagtagataatctctgagaga

SEQ ID NO: 264469 - DNA, 388 bp, Glycine max
gttcttgatcacttctgggaacacttttgagaatgaagaatcgattacgatcacctggtattgattaaacagagactcatgaaaacctagatggctcaacaaactgtgtatcattacagatattggaatcgattaaacgaaaaaagatctctctgcaagctccaaatgacttatgtaatcgattacgaatagcctgataatcgattaaaacaaagagttttatacaccgaggaagtttctaacttttgaaacaatcttcttacctctacatgatgatgcatgatgtacatatggatagattgagactaagatgcaataatcaatacaaatgccactcaaagagtcgggcatgtaaatagacaacttcttcaagctccaaagcttaatc

SEQ ID NO: 264470 - DNA, 313 bp, Glycine max
tattaaagaagctaatcatttcataaaaaggtgtaacaaatatggtatgtaacatcgatttcttcaccaacccgagttaaccaagtgacgtaacatcggatttaaaaaactgatgttaacagatacacattatttacaattatgccaccatgtttatgttaacatcggttttgtcaaacatccatgttaatctgccgatgttaaatatgcttttgtagtagtgtctatttcctatcaaatgaataaatcaaatatcttttttattttccttcatacttatgggtgaggagactaaagttgttcctatttacct

SEQ ID NO: 264471 - DNA, 405 bp, Glycine max
tggcaatccttggcgccgaaagaaagccaaaaaagaaagaaaaatttccaattgtagagtgagagaaagccaaaaaaaaaaagaaaattcccgatcaaggatcgaaaaaaaacagaaaaaatatgcagaaaggtctttgggccaaacaatatctgaacaacaccaaaattgtcaccaagttaaccaaaaaaaggaaaccacgacctaaagtggtcctctccctttgattgctgtcgcaacctacccttcggcgggagggcgacgcgggactcacgggatgcgtgttccacgaaaggaatacgcgcggagtcgccaccaacgtttattttaggaaaacgtcggaaaaaccggaaagacgcgactatgaattttaattgaaggtcgggagtgtattaccacggggag

SEQ ID NO: 264472 - DNA, 379 bp, Glycine max
  unsure (1)..(379): unsure at all n locations
atttgatcattctactangatgactgaaaaaactggggcaaatgaagagggtgagaaagagggaaaaacccatgctgtgactgccatttctatacggccaaagtttccaccaaacccaacaatgtcattactcagtcaataacaaacctcctccttacccaccacccagttatccacaaaggccatccctaaatcaaccacaaagcctgtctaccgcacttccaatgacgaagaccacctttagcacaaaccaaaaaaacaccaacaaaaaggaattttgcagcaaaaagcctgtagggttcaccccaaattcggttgtcatatgctaaacttgatcccatatccactcaataattcaatggtagccataaccccaacc

SEQ ID NO: 264473 - DNA, 224 bp, Glycine max
aaactaagtcgaactttgattgtatctcccactgctcaaagcttgggaactttttccataatcatgaccatatcttggagttgcaaaaaaaatctttggtcattgtctggggagaacaatggaagcccataatatactggggagttcctcttttcataagcccttacacctgttgattctagtacactaagccctgaggatgacaatcttggctgcctttgcct

SEQ ID NO: 264474 - DNA, 318 bp, Glycine max
tgtgctatcaatcaatgcggcaaaacacacccaatgatcatgaggatggatggctcacactctcacaaaggtaaacttcatcacttttcaatattgacgctttcattaccatcatgacatgtagaggagaatcaaggatttcaaatcacaaaatgtcaaaaacttctattttcaacaatattacccatttcttgaacatatcctatgattcaaagaaaaacatgcgaagtcgcacatgtgcacagaattgtcccaaaatattaacttaaaaatcccatgaaactcatcgtcctttaccaatatacacatctgacaaat

SEQ ID NO: 264475 - DNA, 452 bp, Glycine max
  unsure (1)..(452): unsure at all n locations
agctttatcaaatggatggtaatagtgctttttctaaaggcttaatncaagaagaagtgtatgttgaacaacctccaggttttgaaatatcagataagccaaatcatgtttatagattgaaaaaggctttatatggtttgaaacaagcccctagggcatggtatgaacgtctaaacaaatttcttttagagaaagatttttctaaaggaaaagtggataccacactgttcataaagagaaaacatgatgatattctgttagttcaaatatatgttgatgatataatctttggatccactaaggattcactgtgcaaggagttctctcttgatatgcaaagcgaatttgagatgtcaatgatgggagaactaaattacttcctggggtacaaatcaagcaagctaaataaggtatatttgtcaaccaagcaaaatactgcaaagaattgatca

SEQ ID NO: 264476 - DNA, 411 bp, Glycine max
  unsure (1)..(411): unsure at all n locations
taggacaccatccccattcaaatcanattgttttattcttgatatggatacttttaccgccttggactagaatgacattcctttccattaaattttactctaccaaacaaaaaaatatagtgtatgcatacaaattctcaaaaatgataaaaaaattattctaaattcatgatcataattaagaatagaaagtcataggtgtgttaaataccaacaaaagtcaaatacaagtttcatagataggaaacaccaatcatcatcttctgaatccaagtctccttagtcattttcactactattacatcttatcctcttttgaatcacaattaaaaaccacaattaaatcacttatgacttatcctcttatcctcttttgacttagcaattgagattgttgtcagcaggccattg

SEQ ID NO: 264477 - DNA, 398 bp, Glycine max
  unsure (1)..(398): unsure at all n locations
ggagagaccttacagcagatgcctctgtatacaaaatttttgaaggacttgctcacgaaaggcaaatacatcaacaatgagagcatcgtgggggaaggaaactacattgctatgatctagaggattctaccacaaaaattcaaagacccaggaagtgtaaccatctcatgctatattggggatgtgtcagtgggtagagctcttattgatctgggggcaaacatcaacctaatgcccccatctatgtgctggagaatcaggaatntgagaattgcttctactaggatgacgcttcagctagtagacaactctattactagaccatatggtgtagttgaagatgtccttgttaaggttcaccaatatacttattcagtggatgttgtgatcatggatat

SEQ ID NO: 264478 - DNA, 434 bp, Glycine max
  unsure (1)..(434): unsure at all n locations
cgcgattcatggttggaccaatctgataaggtattcttctatgttattgctaaattctactgttactgttaatgtgactatccttgctttatttcattccttcatggtatttacaatggatgatacactggatacaggcactattggcctcagcgagggggacatgatattaacaaaatgaaaatatcaataacacaattggtggaaatatcctattagttataactaacttctgaccaaatagtaacaagggtaatgcttgtctgattctattgntgttatcacacatagtcttgaaggtaagtgggtggcttatgcactcttctgggccggtggctgctatctgcacccctctgtgtggtattgctatcagatgttataaaccaacaaaagaaagaacgctaggtcattaacaaatacttaacacaacacaa

SEQ ID NO: 264479 - DNA, 464 bp, Glycine max
  unsure (1)..(464): unsure at all n locations
acctgagctgcagctgagattgaacaactatggctgttatacacnttgatgctcttcaaaaactagggggggagtgggatattctgtacatgaaattgattttctctttcttgaaaaattgactggttcattgcaatccctatcttcagaactactactgatatcatccatttcttcggaattctcagcaaagtgaggtgcgagaagattttgtatgctgtttttatttactgatttcctccctattaaagacctaagttgttcatcacaaagtatctttcgctttttcttagggtcaaaaagattgttttctctgcagtactctataatgattgaggtaacatcatgttcagaaaattctttgcttgtatctttaccgatatatttaaggaattctattagcattcttgaaccccatccaataaactccttcttatctttcacctttcctttcattgatttca

SEQ ID NO: 264480 - DNA, 436 bp, Glycine max
tatgaaagtgactccacaatttgaaagtatagctattattgatttattgccttattgcaatttaattagttggaagaagaggataaaaagtatatgccataaataacaacccactaccacttttattattatcattttaggctaaagaatcactcaggccttcaattcatgtgaagcatggcagagtgaccatgcatgcgacaaagtggagaatatatatatctgtatgtggggtactattctttgcgtctcttaacaaaaattaagtgtcaatgtttcattaattttacaaattataaagcaacaaatcagcaaaccaacacaattgttaagcaaagaactcatttttttaaaaagatatgaattcaatttcgactgtcaacgtaatccaactaacataattttttttttatctaaaacaaaattaacaaagcac

SEQ ID NO: 264481 - DNA, 425 bp, Glycine max
  unsure (1)..(425): unsure at all n locations
agctntctcataagtcctaaacgacatttctagctaggattaactcactttaacctccatttaccacagaattcagacttaaccttccaaccctcaaagcctcactctctttccactcataacaccacattctcactttccaaccctaggttaactctatatttcatctctaacagttttccttcagcaactttagcatacaaacatcacaaacatcatcacaaaaccctaaaacagaatgggtatgtctaactcacccaaacatggcaatttcaacaagctttcaacaaaagtcttcacaaataatcatcacacagcagaaacctagcaagactacccatcatatctccccaaaccccatacccacgaaaatcaaaggagaaagaagtccacccaaacctgaaatttcgaagtcccactcgtag

SEQ ID NO: 264482 - DNA, 454 bp, Glycine max
  unsure (1)..(454): unsure at all n locations
gacctatgaatctcagcttacatcaacccttcaggtgctggactctttattggacttgatggggcctatgcaagttgaaagccttggaggaaagaggtatgcctatgttgttgtggatgatttctccagatttacctgngtcaactttatcagagaaaaatcagaaacctttgaagtattcaaggagttgagtctaagacttcaaagagaaaaagactgtgtcatcaagagaatcaggagtgaccatggcagagagtttgaaaacagcaagtttactgaatactgcacatctgaaggcatcactcatgagttctctgcagccattacaccacaacaaaatggcatagttgagaggaaaaacaggactttgcaagaagctgctanggtcatgcttcatgccaaagaacttccctataatctctgggctgaagccatgaacaccgcatgctacatt

SEQ ID NO: 264483 - DNA, 355 bp, Glycine max
atttttttgaaggaattaaacttcataatttggtaattcaaaccttctaacaaccaattatattaccttcaagaaattttgaaagctattatagcatgaaccattcagcccaaataattttttttaataagaaattaaaggcctaatttttgcaatgggtcagcctcaataaaaaaaaaaaaaacatgaacagggtaatataaaatggcgaggaagaaattacaaggatgttaccaagaaatttcaacccaagctttcttgaaaaaccgttgaaccagagctctgataaccataatgatgtaaacccatttgcacagggtagaagatggatcttcaaaggttttttttttttatt

SEQ ID NO: 264484 - DNA, 423 bp, Glycine max
tcttcttccatggcttattccctagtggatggcgcctcctctcacctcttctcctttgtcttccgctgcatctccatggtggaaaaccaccattaaaggacctcattaaagctcaaagatccagcctgcatagaagccccacaagcaagcttccatcacttttaccttatgttagcctttcaatagtaaaactctataggccaagaatgtggagctctattatgttggtaggtgttttcttttgatgttgtggattttgatggtggagaaattcgggcaacttgcttcaatgttgtggctgatcagttctacaatgttattgaagctagtaaggtatatctaatttccaggggaagcataaagccagttcagaagaattttaatcaccttcacaatgatcaaacgctgacccttgatgtggca

SEQ ID NO: 264485 - DNA, 466 bp, Glycine max
ctgcagcttcattctcagccaaactccctctttttatctgatttcaggtttaaataagtggccttgtttgtgctcgtgcgcttaacgtaattatgaacctcttagcgcatattagtgaatttcggcttagcgcgtgcttttgttgctcagtggatggaccgaagcggtgcacttagtgagatgaagcggtgcgctcagtaaacctgtacaactcatctccttccaaactcttcctcgcgattagccaatgagtgttgcgcttagcggacgctcactaagccaacaaattggcttatcgagaaggtgaaaaacaagacttttcaaagtcacctaattaacctaaaattgagagataatgattattaaacacacaaacatggaagtgttaagtatttattacctatacttaacagaaagtacttataacactacaaaataaccataggttgtggaagtttgatacaat

SEQ ID NO: 264486 - DNA, 380 bp, Glycine max
  unsure (1)..(380): unsure at all n locations
acctaacgatgacaatactatattgtgcgcctttttcattatcgcactcttctatgcagatctaagctcgactggcaactttgcttttccttccaatgccaactcacattcttgtcatgtgaggagagcgggcatcttcacccaccaaagattgaagttatttttaccaataaatttctcaacatcaaacttcgtagatgccatagctttgataccaatttgttgtgacaaattgtcttcgacatagaaatttaataatacaaaatataactgtaacaaagaagaatctctattgcaagaaaataatacaattacaacgaagaattntatatgaattcttaatctctcacaagtatactctaaaggatttgaatccttat

SEQ ID NO: 264487 - DNA, 194 bp, Glycine max
gggtcccttatttccttgcaacatgagtcactattgctacccctaaagctccgcgaaatttgttccggacatactattccttgcaagccctctaggtgtcttggtcaagggctcttgcggaaatagaataatcttctccaaatccggcgcactccttctcaacgtgtgtagcaaccaacttgaacttccccttg

SEQ ID NO: 264488 - DNA, 342 bp, Glycine max
agaatctctctttttggtctgtacttccattttttgtttcatcccactgctttcattattctgaaaactgttattatctttacaagattacaattctgaaacatgttcgaatcgaattcttgatttctgccttcaagaaataaaaacactaaaaatgcattttcaaaacgaaatgtagttttaaatttgcttaaaatacattacttcgcacctcattgttattttacccacaatgaagttcctggtctcaacttaaaacatctgaaaaaagaatctattatctccagctcttgattcccttggggaaatattctcactgaccatgaaaacagaaattccacc

SEQ ID NO: 264489 - DNA, 343 bp, Glycine max
ataagaaaccaccacctctccttggatgtcaaaaaaagaaccgaaattcactcttttgactcgtgagggcaaatacgtagcacctacttcatgtgtttggcatgccacctagcataagaatatattaaaagagttgggcatgtcacaaaacgaggtgaccaaaatcttttgggataataaattagtcattgctctacaaggaatccaggttctatgatcgaaacagcatattgatacccctaccactccataagggagtgctaacaaaaaggatgccatgcacaatatggaagtctcagaccaagagctgacatttcccaagtgctcaccagaaacttttcaa

SEQ ID NO: 264490 - DNA, 256 bp, Glycine max
gtattccagggagttgagtctaagacttccaaagagaaaaaagactgtgtcatcaagaaaattacgagtgaccatggcagagagtttgaaaacagcaagtttactgaattctgcacatctgaaggcatcactcatgagttctcttgcaccattacaccaccacaaaatggcatagttgaaaggataaacacgactttgcaagaagctgctatggtcatgcttcatgccaaagaacttccctataatctctgggctg

SEQ ID NO: 264491 - DNA, 257 bp, Glycine max
cgttaataaaaacccaaaaacccctcatgaaccatccgccgacaacgatctgccgggcggcgaaaatcaaatcgacccgaccccaaacaaaaggcacacacaaaacgacgaacagaacaatagaacacaaaaacgccatcaccaacaccaatcacatgcaactcaaaaaaccacataatcgtcacccccaccttcacacacagtaatcatccccgccggaagaaggggaaaacacaacagaacgccgacgaaaaacg

SEQ ID NO: 264492 - DNA, 288 bp, Glycine max
atctatgacacagcgcaaattttgaattcaaatttgaatagatgttgtgaatcatttttgggcatgtggaatcgattacatcctctggtaatcgattaccagagagtaaatctcttgaaaaaaactttctaacttaaattctttggccaaaccctttgctacttcaactaggaattcccttcctatataatatacccttcctaaaactctaaagactgtctcgatcatccatcttgaatatctttaattcctcttgcttgaataaggctttgaaagacatgtgatcct

SEQ ID NO: 264493 - DNA, 406 bp, Glycine max
  unsure (1)..(406): unsure at all n locations
agcttaaacattcaacttcgagcgtctngttttattactgtgcctcaaacagacatccgagataaaagatgtttgtcgtatgaattggctcatagcttcaacatttcatttcgagcgttttgatatattacgggccacaatccgacatccgagtaaaaaggtatttgtcgttcgaattggctcaaagcttcaacattcaattttgagcgtctcnatatatgacaggactcaatcagacatccgaggaaaaagttattgtcatttgaatttcctcaaagcttcaacattcaatttcgagcgtcttgatatattacgagactatatcagacattcgtgtaaaaagatattgtccgctgaactggctcagagcttcaacattcaatttcgagcgtctcgatatatgacg

SEQ ID NO: 264494 - DNA, 414 bp, Glycine max
  unsure (1)..(414): unsure at all n locations
gtgagctaattcaaacgacaataacttgttactctgatttcttattgagtcccgngatataacgagacgctcgaaattgaatgttgaacctctgagctaattcaaacgacaataactttttactcggatgtctgattgagtcctatcatatatcgagacgctcgaaattgaatgtcgaagttctgagccagttcaaacgacaatatcttattactcggatgtctgattgaggcccgtaatatatcgggacgctcgaaattgaatgttgaacctctgagccaattcaaacgacaatagctttttactcggatgtctgaattagtcctgtcatatatccagacgctccgaattgaatgttgaagctctgagctcaatcaaacaacaatatcattttactcggaatgctgaatgagt

SEQ ID NO: 264495 - DNA, 326 bp, Glycine max
  unsure (1)..(326): unsure at all n locations
agctggagatgatattgagagtgattngtgatcctattgtgaaggaaacatcctcgccacttgtgtgtttgcaatcttccatcttgttcttttcctttggggaaagaaggctctctggtatggaaagctaaatcctttgtgggatctctcctgctggtacctaatgtcaatatatctccttcctatcaatgaggccctatgtgtgctttggcctatctcttttcattataactaccttacctttcatcacctaatgcacgctttgttaggtccttcacactggacgccggctgagttaagtccttgatggtgattgtgggctttca

SEQ ID NO: 264496 - DNA, 296 bp, Glycine max
tacccactgccccatccagaccctccatcatccatttattttatatatttctgatgcagctgacccctgaaaagttttttgtaagttagaatcaaaacattaaagcctatttgttaaaaaagacttcgtggcatgcttctttacaatatataaagaccacattgtaagtttctcttcattccaaattgacgatttatagaaacaggaaataaccatcttatttgctacttaaaaatactggaaaataatacaaaagaacaaagcgcctctttaatactatataatgaattgaaaga

SEQ ID NO: 264497 - DNA, 366 bp, Glycine max
  unsure (1)..(366): unsure at all n locations
atattcttggtcaatataacaaagaaataatattttacttttttatactgaagncataacgagacataagcgtgttctatttcaatataacggacaatctacactagatgggatagcaaaataaaaaatatcacacacttccttgcattcaaccttatcactttgaacctcctcccaccatcgaagaaaaccacgaaaaccgaaaaaattgaaacaaagctggcagaaagtgagtccttcgtggccgttcactataaatcattaacgagttgaggtgccgatggtgaaggggaagccgatgatgatgtcaatgagatcacatctggctagtggaagcgtcatattccactatggaggggggtggtg

SEQ ID NO: 264498 - DNA, 313 bp, Glycine max
tgacgtcaaaggtacccactatcacaattgccttctatatctcctgcgagctcttggttttgcttctcaaatgtgcacgtgcgaacctcaggatttttttaacaatcacaaacgtgtgcgtggttcattctaaaatccgaacttagaagaaaaattagtccttccgtgatccacataggctttattgggcttgtaacatggccaagggttaaaagggctatgatagaaaagtttgaaggctaacagaggtttaagggttacataagtacgaacttgagcgcctcctcgcacttgttggaaaacaacctcataa

SEQ ID NO: 264499 - DNA, 430 bp, Glycine max
  unsure (1)..(430): unsure at all n locations
tgtcatcaagttctggatacaagaacacatattgatggtggtatatatnaacccgcatgggctgtgtgactgcaacatgattacactgaatttgatgtagtatgaccacaacaagttatggaacaaaactcaaatataatttcttagaagccattatatcatgctctaattaaaattgaagttaagcttctataatgtgtattaaaggtattattagagaattatatgaattaactatgtgaaactttaatcttgattgaagaacgacaatcaaaatttgcatataaattntatcctttttgatagattggttatggtgttattttttaaataatgagatataagccttgattgctaacttttgttgtggaatttttggagaaatgtgctacaacatcttgaatttctaggagcttcacttaatcatgga

SEQ ID NO: 264500 - DNA, 321 bp, Glycine max
  unsure (1)..(321): unsure at all n locations
tattccacaactgtttcccctaattaaaaatctatttcactctttactcgagttatgaattcccttaatgacaaccttcttaaatatatattcaacgaagcaacttgaatatgattctaaaccccaaataaatcaaggaaattaagggaagagaaaattgcaactccgttatatactggttcggccacacccttgtgcctacgtccattccccaagcaacccgcttgagagttccactatactgtaaattccttctcaagttctaaacaccaangacaattcttcctttttgtttagagatcctttactacaagaggactc

SEQ ID NO: 264501 - DNA, 282 bp, Glycine max
tgactgggggcgatcttggaagcgaaggtggaggggtatggacaaaactaacattggctgagtagagatatcgccagagaagatattgcgacatggaataataaggggctagtggaaagtttggccacgcaggaactggagccacaacatgaggatatccctccttcttcctctgggcactccactcgagtcccccaataccaggattcacaaacgcaacacaactcaatatccctttcctcagacttgcttcaattctctcgccaccaaacactagatctg

SEQ ID NO: 264502 - DNA, 241 bp, Glycine max
actttttactacggattttttttgtttttattacagctcgggagatttttgcaatggctagttctgcgaaatgggaatgcattcgccacaaattggggtcccaaaacagcccactttaatttttcaacaacaaaactcggcgaaaaaaaacttttaccgcgttgaacaatgcagtgtgattatgggtttcacggcgttgattaatacgacgattttagggaaaagcacctctcggagtttt

SEQ ID NO: 264503 - DNA, 305 bp, Glycine max
tgcacaacttctttttatgaaaactccgtggtcgaaaagggctctttacggagaataagtatcctgtttgggtgtggctaaaaaagttacaatgcacttcggctagggttttcctgcgagatcaaccgacattttgtttcgtgcaagaaaacattagcccacctctgccacaaaaatatttgctaaccgccttcatgcatatttcattccacgattgaatagaaaactcaatagcccgacaccgtcgtgaaatagtccccactgatattttcacccggcattgccaattctctttacaaaacgct

SEQ ID NO: 264504 - DNA, 327 bp, Glycine max
aatagccttgctgcacacatagacgctgagcgatactattgtccgctcagcgccacttctctggacttaaaatgcgtgattttagctaagcgagcccatagcccggcttaacgagaggtgtaggttttcttataacaaatctcgctgatcggtctgacacacccgctaggccaaactctactatatatatatatagcttaccacaaggtttctctaagcgaaatgccttataaaaccaaacgctctctcaattcgcttagcgaaacattttgctcagcaagagagtgcaaaataccttacggaagtgtaacatcaataccctcacat

SEQ ID NO: 264505 - DNA, 321 bp, Glycine max
attccttcatatcctaattatgtgacgggaacataacgcttatgggctccttaaaaaaaaacgggggcagagaccccaacctagggtcctatgttaacttctaacgcgcgtcaggattgtcctatggaaatttctaatacaaccttcttgattgatctgatatgtatgcctttgagccacaatgatgttatacctggtatggactaattatcttccaaccatgtcttgttaaattgttttgataaaactgcggcgtttgatgattctggagcgaagaaagatatgaatattatctctgccaccaacgtgcgacatcttaaa

SEQ ID NO: 264506 - DNA, 360 bp, Glycine max
ctgcagcttaacaaggacctgggggcctttctctactatcttctgaaacactcaccacctgtgtcatatctaataattttcacatttatgtctaatggcctttttacttcattggaggaaatttctaaagcatccattggctaagaaatctcgggcagctattagacataatcgtaacatgaatgatcatcaataatggtgataaaatattattcctttccaaaagaactaacatcaaaagggccacacaatttagtttgcaccatttaaagaagctgactgcttcttgtaactccttcttttgtatggtttgcttgtgttcccttaataccacccacacaaaattttaaatctattaaa

SEQ ID NO: 264507 - DNA, 333 bp, Glycine max
agccacaagggcggggaagtgcgaaccctatgaacccacatccccagaagcttctgggcaggaccgaagaccttcatgtcaacaatgtagcccaaaaaagacaccaacttattcacatcacactaaaggtcaccagcaataagcatatcatcaacatataggagcacaaaaataaaagagtcatcatcaaagatcctcacgtcaacacaacaatcatacttacatcgcccgtagccaatccgagacatggaagaggcaaaccgcttgtaccaccaccttggagactactccagaccctacaaagacctcttaactaacaaaccatgcgacccg

SEQ ID NO: 264508 - DNA, 297 bp, Glycine max
cgcctcactgaagaatggattttttttttcacattttagagcgaggggtatctgtctttcccaccgtcaatatttcttgcagaacgaatcatccgggctgcgaacactatcaggactgaacaagaacctcacaaagtttatgtacggacaccaaaattaatcttccttaaaaaaaatcgcccctatcaaaaatcccatttactgtaatactccgtttaaggcggttctttatttatttaaccgtagatgagatgcatagttttcacgggttggaaggtattttaatagcgaatgttc

SEQ ID NO: 264509 - DNA, 447 bp, Glycine max
  unsure (1)..(447): unsure at all n locations
tgcaggatgcaagcttccacaacatccagacaaatcaacattttaacagcttatgctatcacagccaagcaaaacagagcaaatgcagaaaactctgctcaacacatcaaccaaaatcacagctgttctcacttaaagaccccagtaacaattccttcgatccaattcgttaaccggtggatcgactccaaaattttactggacgtctatagtgtataagcctacattgtgaccgttgggatctactagcaaacatccaaaactcattctgcactatactttccacagccaaccacacacagacattgttctgcacttgtgcaaaatcctgctgcacaatttcacagcanaaatctgcacaaaatgcaaatttcgaaaaccacacttcctctcatccaatcttgcccaaatcaaatcctacaagtctcaaatcatgtatcaatcatg

SEQ ID NO: 264510 - DNA, 378 bp, Glycine max
tgtgtggaatcgacaagcaatgacaaaaaggaatctttttgtttgcttctaggaatcccgggggtagctcactatatgtaaggggagtttattataaaatttaccattttaacaccatagttaggattaaagaacctagctatgaggatatctgcctgtccttgtgcatgctgattttttttcaaagaaaattacgttttaactaatgggatgcgatatatatattgtgatgaatgatattgttttggctgtttgaacgctgtgcgtgaggaaatgatattgttgtgtttgtttgaattgttgatgatgttgctattgacgattttaattgatatgtgatgataatgatgattatgatgatattgattcgagatgaca

SEQ ID NO: 264511 - DNA, 457 bp, Glycine max
atgcaagcttatcgccatcttcaatggcggcacttatcctctcgccattgcagatggcggagcaaccattccgccaatgccactagcgggatccataaaaaacagaccccctacgttaaaactttgcaaacagaccctgaatggtaaatagtttttaaaactaaccccttacagtaaatttgcctagctctggtccctttccagactgattcaggtctgctcataagaaccaaatgtctacctaaccccatcatgtatctctagtacctctggtactcttatatatatacttatttttgctgagccaaaaaaaatattgttaacaggccaggcttgtacagcaaacctagttgattaaaatgcagcactaatgtggtcttgaactccaacaatctttgaaaacaaaactgaagaagaacagggaacctatctgtgttgaatagagtacacaatcaca

SEQ ID NO: 264512 - DNA, 417 bp, Glycine max
actaagcttgtaaaagtcttgggatccattaggagcctaattatgccctaatcaaaatgaaaccaagaaataaatactacgaaaacatattatatatcaagttgaggcgaagacttgaaggtctatcataaaggcatcacaatattttcttctatttgtcaactatttgaaagcaaattattctttaatgttgatggttattgttggtgtaacgataatttactaagaaaataatttattctattttagtacgattttttaccataataagaattttcgtaaaaataaaataatgtttaacatatataccaatctatactataaatttattacggttcttggtgacatgtaagattgatgattatcatttgtaattctggtggtctaaaaaatatttaatttatgtgttatataaac

SEQ ID NO: 264513 - DNA, 395 bp, Glycine max
  unsure (1)..(395): unsure at all n locations
agcttgagatgaggaagngnttaagggctaatctttctgcttttatnngggaccacagagtggtacctggagatatgtcgcgggggtcaggagaccttggggacgtcaggtggggtgctattgcccaaaaccatacttgaccaatcccgacccaacccgggcatattcggccagtgagaacctgtgatgtacctaaacaggcgagctcctggcagtcaacagataaaaggaacaaaaaccacaaaccaaggaggcttgtggtggctggccaattgtgaattttgtgtgatatgtaaagtaatggcctctggtaatcgattaccaagggtgggtaatccactacaaggcttaaaaatgaagacaggaggctaacatggtctctggtaatcgattac

SEQ ID NO: 264514 - DNA, 426 bp, Glycine max
  unsure (1)..(426): unsure at all n locations
ttgccgatttanttttcaccggcgaaaggagtgaagtgttttttataataggcaaatttgattatcctgctttgatgaataagaagcctgcggaaaatggagagaatgagatggacggaggaacccatgctgtgactatcgtttctacatggccaaattttccaccagctcaacaatatcaatacttatccaatattagcccttctcattacccaccacactatcaaccaagaacattcaattatccacaaaggccacccctaaatcatccaataccatacaacaaccttaacacaaaccaaaacacctaaccaggaatgaattttncagcaaagaagcctgtagaattcactcccattctagtgtcggatgctaacttactcctatatctactcaataatgcactggtagccataaccccagcca

SEQ ID NO: 264515 - DNA, 446 bp, Glycine max
  unsure (1)..(446): unsure at all n locations
agcttaagcttacctggattcctangaatttatgcttntatatataccattctctcatagaatgcaaagcatggaaagagaaagactgagtanaaaagactgggaaagaggcagtaaacccctcaaattgttcttccttttttgccttctcagtattcctctttaactctaggtgctacagatctctatttattgccatactaaaccaacaatatggaattaatctgttttatttctagtatcccatcaagcaaaaagtgaaaaaataataccatcccaacatacagttgtacttaccacctacaccaaaataatataacctacacattaaaaaatattaatagttaaaaggatagtgtgttttttctagaacttaatgacaacactcccaccaaacacgatntcagatttttacagaaaaggtttgcatctataaataaaataat

SEQ ID NO: 264516 - DNA, 420 bp, Glycine max
tggttctacaaaaagtagaccatgtctatagattaaatattcactttatgcggcaaaacaagcacctaggggttggtatgaaagattaactaaattcttattggtaaaaaatttcactcgagggaaggtagataccaccttattcataaaaaagaaggataatgatatcttattagtacaaatttatattgatgatataatatttggatctactaatgaatttatgtgcaaggagttttctattgacatgcaaagtgagtttgagatgtccatgatgggtgagttaaattactttcttggactacaaatcaaacaaacaaatgatggtatctatgtcaactatgaaaaatattgcaaggaactcatcaagagattcggaatggaaaactcaaaacacctggctactcctatgagcactgg

SEQ ID NO: 264517 - DNA, 435 bp, Glycine max
acccaagtcacctgcggcatgcagcttaaagaaacagaactctttttatctttgcacaaaggatccattctattgtcacaaccagatttctgatcatatattcgaacagccgaggtttttgggtggaatttcgtatacatttgggttagagtggattttgagaaaattgtgaatttttctgcggactactgttctgaatctgtatctttatatgttgatatgtgctttaattcctagtttatatttaagtgcacattggttcaattaatgtggaattttttgtccaattgttcttgtaaatatgaaattctggttcattattgatccatatacctcaacttttttgatttttatcaacaataatttattaatttgtgaaaaattaatgtgaaggaccattcttcattgaatttccatcacctctttcgttctcat

SEQ ID NO: 264518 - DNA, 367 bp, Glycine max
tcttccttggccgagtatggatcaatcgttctctctatcactgatccccctctttcaaggcccagctttctcacatggcttactccatatggcgctgccacaacctcccccttgtgtcgcttctcctttcttattgcaaattatatcatctaaaatccaattacctcaattcattaattttttacaagcctctgatgtcactctatccttaaagctatactaaattgtaggcaactgcactaatgatattttgacacattctgacatgagttgggaaaaatatgtatttctgccgtcttcattgtggggaaaatatattatgcattctgatattggtgaggaaacatatgtgactgagattttgata

SEQ ID NO: 264519 - DNA, 302 bp, Glycine max
aacaggtcatgagagtaccacaaagcttaaaaagccgcctactcctaagagtccaagacttaattttacagggaagcttggcctcttcttggattctccctgacttttctattctgccaacatcttggaaattcttttttgttgcacatgaattatattcttgtagcagcagaaaaaattcattcactttctaacttaatttctctttatgttggctagcataatcttatgtctgcgacaaaattaggagggattgattattctgataaaccaaacattgtgcatgtcctttcttgccaagc

SEQ ID NO: 264520 - DNA, 452 bp, Glycine max
  unsure (1)..(452): unsure at all n locations
tcagctatgccaaattagtanaaagtattctcaagtttagtctcattttctttccattcaccacatacacactcgcaatttgacttttaaagagaataacaagactatatttatactgtcagcttcatacagaataaatatgaacataaatctgttagatagaaataaatgtgaaatatatatctttttttaaaaaaagaactaaccatcgcaatagtgtcttctacatcatccttgtttctgcctgccagacgcctttttaaggattcaagtgcatctctaagcttcttcaaaagaacatgtttttccaatgatgctgcctctctaagtctagcctaaacttcaccagcatacaaaaagctagttaaaacaggaacatcaatctattagtaaactatgaatataatcatcggttatttcagttgcaaacattntacaataagaatcttagg

SEQ ID NO: 264521 - DNA, 284 bp, Glycine max
  unsure (1)..(284): unsure at all n locations
ccaaaagagncacgagaaagcgaccacggatatacccaaccgccccacggacgcgcacgggggcacaaagcacaacgagggccacccaccaaagaggccacccgaaacgagcaccaagccaccacacaaaaccacaaaagcccaggccagggaacacccacagcgcgaccaccgcgccccacaacccaaaggggggaacaccacaacgcaggaacagcagggggaggccaccgacgcagacgaccccccacaccccgggggagccaaagccaaccccaagaacc

SEQ ID NO: 264522 - DNA, 350 bp, Glycine max
tcctgcttttataggtgaccacagagtggtacctggagatatgtcgcgggggtcacgacaccttgtggacttcaagtggggtgctattgcccaaaaccaagcttgaccaatcccgacccaacccgggcatagttggtcagtgagaacctgtgatgtacctaatcacgcgagctcctggcagtcaacatataaaaggaaaacaagaccacaaaccaggaggcttgtggtggctggccagctgtgaattatgtgtaatatgtggattgcggcctctggtaatcaatacccaagggtgggtaattcattacacggcttaaaaatgaagacaggaggctaagatggtctctggt

SEQ ID NO: 264523 - DNA, 402 bp, Glycine max
tctattaagctgaaccatattatcaataaacacaagttgagttttattcagaaaattagaagggatctctgttatcttagtgagagtgattctcctaaattctcgagtgattcaagaacaccctggctgtatcaaaggactttttcacaacctttgtgtgttgccctcgctggaaaaagtgattctttccttcctatcatctccacccttgttctgtcaaaccacaattccagaaaatccacctctgcccaaaattatctcgtgaccataactcccattttacacactcaaattaagtgattcttgagcctaaattgaatttcataacgaaaccttacacctcgttttggaatcacctcatttggagccatgtaacttcccgtattgccatctctatatttc

SEQ ID NO: 264524 - DNA, 469 bp, Glycine max
ggatccttgagtcacctgcggcatcaagcttgatgagatgcgccagggattttatttactctaacactaatccgagattggaaattggtggtaaaattagggttacacttagtaagatttacagcacctagagatttctttctgagtttgtcaagacgtgattcatgagcaagaaggagcgattctacatcatccacaaacataggcttagatttgttgtagatataggataccatggtctcatactctgtcggtaatccttcaacaatgatatcaacttgttcgctttgcgagaccaaaacaccaatggaggtaagcgcatcaaccaacgtctgaacatgaagaagatagtcagtgattttgtgaatgtcaagagagaggtttcgaagctgatgcttcctcgcacgagcaatcgaatggaaatgggtgtgaagattcttccatagatgccacgaagttgtgcatctac

SEQ ID NO: 264525 - DNA, 441 bp, Glycine max
tattgtgatattggtcatttttttttttacaaaagcttattgtcattgaaattgaattatactacattggtgtattataacatcaattactaaataagttaattaaattatttcagaatgataaaaaaaaattaattacaatgtaaaagaaagcaagatataatcctattctaccaattaaataaatgaaatgtcacatcaatgtatgtatagaagattactaggtcggtaacaagtttatatgaatgctaggcccattaactaaaaataaaataagtaatatattttttgaaggataaataagatacgtaaatttaaaggatgaaaaatctagtctaataaatatgcttgaatcactattttattgatgtaaaatatcatcggctctattgattattaatttatctggctattttgagtagagtgttgaatcactatgtt

SEQ ID NO: 264526 - DNA, 376 bp, Glycine max
  unsure (1)..(376): unsure at all n locations
atatatccggtgctcgaaatagaataccgaagctcttggcaaattcaaacgacaataagcttttactcgtatggtcgattgagtcccataatatatccgaaccctcgaaattgaagacagaatctctgagcaaattcaaacgacaataactnggatgctgtctattaagaaatgttcgatcggcgtcatccggtgatgctcattttttaaacttggatcggccatctttgctgaccgacgtcggctagaattattttagatcaggatcggtgaatcaaaactattctcccgaggtgggcttacgttttcccttccaagcgatagaaaacttatcggttgcgcgcgaaacaaaacttcggttggctggaacgaaaaa

SEQ ID NO: 264527 - DNA, 408 bp, Glycine max
tcaacattcaatatcgagcgcgtcgaatagttatggtctgatatcacacaaccgcgtaagaagtggttgtagtttgaagttgctcaaagcttacactttcaatatcgagcgtttcgatatattacgggactgaatcatacatcagagtaaaaagttattgtcgcccgaattatctcacagcttcgcgattccacttccagcgtctcgatatattacgggactcaatcacacatccgagtaaaaagttatggtcgtttgaatttgctcaaaactacacattcaatatacaagcgtttcgatatattaatggactgaattagacaaccgactacaaagttattgtcgtttgaagctgctcagaactatcactttcaatttcgaccgtttcgtatatttccggactgaatc

SEQ ID NO: 264528 - DNA, 414 bp, Glycine max
taataggtccctatatggcctgaaatattcttttgttctatggaacatgagatttgatgaattgatcgctcaaattcaatttaaacggagtcagtatgtgatgtgccattattttctcctatttcttaaccctttctgcaccattttaattactgattagtcttaattgtcaaattaattaggcagttttattatttgggttcattcagctaatttgatgtttttaatctatttcaggaataaatgaagcattgggcttgaatccaaaattgggcttggacttgaagagggaagactattttcttctaccaaattttatcttatctagactttatcttatctagatattatttagatttgatttcatctagatattatttcatctagatcttatctagatattattgtatttat

SEQ ID NO: 264529 - DNA, 444 bp, Glycine max
  unsure (1)..(444): unsure at all n locations
ccggatcctctaatcacctgcggcatcaagcttaaggaacacatattattgtttataaattaaggagcaaatttcctgctattgacgaggtccgcctttacatggctagttaattagcctaaataattggtgttgctaatcttataaaataatcataatctcgcatagctcatagatctaaatatgttttgaaggtattatgatatgtnttttttctttgaggctgtaaaaatgcatgctttgcataatttaaatatactcaaacatctatttaattaatatttgattatgttatgaatctttagatttacaatgtgatgtattcatattttagttagtggctaagtagatttctaagatgatgtacgctgtcttgattcaataatgagttccttcaattgtgttgcctcctctaacaaaataactcttctctgtatgaactac

SEQ ID NO: 264530 - DNA, 411 bp, Glycine max
  unsure (1)..(411): unsure at all n locations
tgactaggcgagtcgatntagccttagttnctcattttttatttagtcaattcaattaagaatgagaaatcccaaagagaaaacgtccgattgatttttcgctttattttactaaaaggtattctttttattatattattatttacctctttttttgatttccaacgtggttgcggcacgaccgatcggtcggaattcatttcaaccaaaattaacggatgacaattcaaaagatcggtggaaatttattttatttttagattaagcgagaaaatgacttaaataaatggcttaagcacgtcaaaagggggtataaaaagtaaatgaaaacgagaataaaactacatgaaaccaaatatggaccaccacgggtacatagaatgaattaaaagcttggttgaggacttaccc

SEQ ID NO: 264531 - DNA, 402 bp, Glycine max
  unsure (1)..(402): unsure at all n locations
agctttaacttaatcaattcttaagccttttgtgcttggncattccacccaaacgcacccttcttcaaacattcggtcataggacttgctatagtgctaaaattctggataaagcgtcgataaaatgatgcaagaccaaggaaagatctcacctccgaaactgttgtagggctcggccaagtcttgatagcatccacttttgtttgatcaacggatactccatctttagacaccacatatccaagaaacaccacacttttaaccaagaaatcacacttttccctcttcccatagagtttttgtgctcttagggtctcaaatatttgtttcaaatgagtgaaatgctcctctatagatttgctatacaccaatatgtcatcaagataaacaacaacaaactta

SEQ ID NO: 264532 - DNA, 422 bp, Glycine max
tctagtcgtccatagacctcctctgtggtactgtctattaaacgttgcatctgtgcattcatcgcatccactaacagacgttgagcgccgtccaactgatggtactcgtcaccaccaccacctgctccagccataattcaacaggaaaaaaaaaatgtgcaataaaaattattaaggtttcaggacctcacaacactctactcacgtctcttagatggtagtacactcgtgtttaatgctctcaataggcttttgtgtaatgtattccctcttgccttttaccactcgtgtttcctcttaagttcctggatggaccaaattagacacacaaggtaatataaaataaaaggaaagacaatataatgatcacaaacagatttgatttgggataacaacttggactttgattggataataatata

SEQ ID NO: 264533 - DNA, 461 bp, Glycine max
aagcttgtgaccaaacttcagcgaatttataaacgttactataacaatattttctttttgtgtcggtcactttccttgcatgaatctattcacataaaaaaatattaaaatgttgtgtcaaagtatatcgaaatgctacttcaatccaaaagttataaaatgattttgttctaaaaaagtgaaaataagcagaaataaacgttgcgactaatgataacatcctcgctggtgatgattaatctcatagattgatcctttatttgtctttctagggaaatccatcgattaatccttaaagatttatgcatcaatcgctttaatttaatgtctcacttgtggatggatcaacacattcaattttatacaaaaacagcatggatgatcaattaacctcttacatacttgtgtttaagaatggctatctctaattgcattaaaaactcttatcattatttttcacc

SEQ ID NO: 264534 - DNA, 433 bp, Glycine max
tggaatctaagaaggcacctattattgctgcttgattgctgctttatgctgcatcttggccccaaacctcaatggaaatattctagcaacttcacctttttcaattgaaaatagctattcaagatgaatatatactaataataataataataataatcacattgcatttttagagtgatcgagaagataattgttcattaacttttttaatctaacatttgttaactatattagatgcaacaatatatatagtagactaatactataaagaatgagatgcatacttgcgcaataaaccaggccgttaaagagaagcaactgcaaatcaaaaacaaagtgccacgaagcatgttggttttgtgtgctgcagtagcagtttgagcgtgatgactatggtgaccaagataaaactccttccctttgtaaagactat

SEQ ID NO: 264535 - DNA, 457 bp, Glycine max
agcttgtaggcacactacggctgcagctattcatttcttacctttccaacctccgtcggccttgtggcaaaactaactttgaacacttaatacatcacccaatacaacgttccatttccaaattccatgtgaaacaactttttggttcaccattattttttcccaaaacttttcttttgcctgtcactttttattaaatgactccactgaaattaatgtcactcatttaacctgcacataacaaatatctaatacaacctagtttattcatttgatcagtccactgcgcaatcataaaatatatctaacgcaaagtttttatgaaatagaaaattacctaaaagtctatcttcaatagcacaaagtgcaatagtaacaaagcacacaaagtgtgtctgcaataacaagttacatatagacaacaactatccgtaagcacagtttcttctaacctgat

SEQ ID NO: 264536 - DNA, 348 bp, Glycine max
ctttttaaagaacaacaaatccaggcgtcgaatccttttcttttgaaccttctaatggcaaaatctttatgataccatagccccatttgcacgctattggtatgggctacctggtcatttcattgcttgcttccttgacatactctaaagaaaaatctttacatatataatgcataaagagcattatcgacaatcaacgtttgtgatgagctatcaaaatgttgctcaaagccttcagagtatttacactgactcaatgtgtaaataattcctctgcagatcggcaagtccaatcaaatgttgcttgtcttgcgctatccattcacaatctgcaagtatgaccatcta

SEQ ID NO: 264537 - DNA, 458 bp, Glycine max
gctgcagcttggaagatgcttatggaggatttatttatggagagatatagagaggggggagcaccaaattgaaggaagaaacagggagagaatttgaactttgaggtgtgtctcacaagactctcattcatcaaagttacaacaagtgttacacatgcttctatttatagactaagtagctttcttgagaagctttcttgaaaaaacttccttgagaagcttttttgagaaaacttccttgagaagctagagcttaactacacacacccctctcataactaagcttatctccttgagaagcttccttaagaagattcctaaagaagctagagcttatctacacatacctctttaatagctaagctcacctccttgagatgagaagctagagcttagctacacaccccctataatagctaagctcacccccatgacaaaatacatgaaaatacctaaaa

SEQ ID NO: 264538 - DNA, 371 bp, Glycine max
accacctcttccatcatgcaaccactggattgggagcttccattcgagctcatatgtgaagcctccaattatgcacttggggttgttttgtcatcaagagttgatagactatcacatgtcattggttatgcctcacgcactctggatgtagcctaagtcaactacaccaccaccaccgaaaagaagcttttagctattgtatttgcattagataaattcatatcttatttgttgtgctcctatattactatttttactaacctgcagccttgaggtacctgttgaagaagcttgatgctaaaccaagattgatcaggtaagtgcttcttcttcaggagtttgatattgagatcagagataggagtgctcac

SEQ ID NO: 264539 - DNA, 377 bp, Glycine max
  unsure (1)..(377): unsure at all n locations
cggctgcagcttaagccagatgctgatacagagggtatgttttnttttcntcccaaaaaaacgaaatgcggagattcctgttatggcgcaccattggagtatgtagggtcctatttgtttgcatggcaatggtaggattaaatgggcaacaacacgtatgtgattgggttgaacactctgaaagtcaacgctttcttcgctcagtaagggaattctaagtgatattttgtgactgctccaaaaaagtggctattgaaactgatctataagtgaattttaccgcccacgctcttgtggggtaatggcaatggggttccatttgggacctgtttattaatgattctctattgaaaagatgggagaatatcttggttata

SEQ ID NO: 264540 - DNA, 400 bp, Glycine max
gacatcatcaaaaacgtcatgaatgacattctccccctttttgaagatgacaaccacctgtaggttaggagcaacaacaaaaaaaaaatatctatttgcataaagattaactcccctcggttttgccatgattgcttatatgagacagttgaagatttcatatttttcatatgtaaacaaattgtctcataaacaatagataattcttcttactagtttatctccccctttgtcaacatcaaaaacaaatcatgaatagagaggataaagatgttaccacttgttgcaatgtatgagaatcaagtgataccaaaaggcattaaaacaatcattcaatattaatcaagcaaaaacaagtacaataacacatcaatcaaacacaatcacacacaatcaatcg

SEQ ID NO: 264541 - DNA, 341 bp, Glycine max
ggagctattacagggctaccaccaaatttgtatgctcttcggccacacacccaagaccgcttgcggactcaccatgggcattaccaaattaaggtagtgccctcacggtcgagccaaacaccacactccttccacgcgacaatgaaacagatattccggccgttcctccgtcgctatctcatcgtcttcttccacgacatcataatctaaagtgcctcctttcgtgagcacttgcaacatttaaagggcacctttcaggtactgcttgacaacaaaaatgttcttaagaaatctaaacgcctcctcacgcaggcccaggtcgagtatttgggcccacgcct

SEQ ID NO: 264542 - DNA, 359 bp, Glycine max
catctgaagtgtcatgatgtcattccttcattaggctttgaagagaacatcttggatcaatgtttataccaaaaggttagggggagaaaagatttgctttcttgagtgatacctggatgacattttgcttgcaactaatgataagggtttgctatttgaggtgaaacattttctcttgaacaacttttatatgaaggatatgggagaaacatctcatgtcattggcattaacatccatagggaaagatcttcaggcattttgggtttgtctcaagaaacttatattatcaaagttttacagagattaacatgaaagatgttctccagtctaccttcattgtgaaggtgacaactcgctt

SEQ ID NO: 264543 - DNA, 431 bp, Glycine max
cctatagccataagtatagattgtgtttttatgtgctgaatcacggcagctatttctgaagaatgagcttgggtatgacttgacactgattctaggcttttaattcatgcttattttgagccggatattgcaccttgggatgtttacaatagctggctgaattgaggagtctacgcatactttcaacttttggatctttcacatttatagggtgagcaatgcttgtgctgataagcttgcctcttttgttggcaaagtttaggttatacttggtggaattctccaccctctttcctttctcaggagctccttaggtatagaaatgggctcccatcgtatagactcacatagtttggtttccttgggtataggttaggtcatttaaagtgaactgatcttttatttatcaatgatattctgggtgtgctgtt

SEQ ID NO: 264544 - DNA, 309 bp, Glycine max
aggaacagggatcaaacctactctttgttctttctaaggtgcgtaataaactaaagatggaatgcgttctgtctggctctctgtctctctctctggctatttatattgacaacttcttttgggctctattaattatattgttgaggtctaatatttcccattgctttataacagattctggcgtttactgtcagattcattataaaagatgcagaggagaagaaggcctcttttaatccacggccacttttcagattattcatcaactggcttctagatcttggttcacttgagcctgtgactgatgga

SEQ ID NO: 264545 - DNA, 382 bp, Glycine max
tgattttgacaagaacttcttaccctgaatcggcgatgaagattgttccaagctatttgctttttgttttgatatatcgttatattccatagtaacaaatcatgatttaatgttatatatattgaaaagtttaaataacgtaatgatgatttatatatcgctaattgttaggctcaggactcatcacgaacaaatactttggattagtttatattattgctgaaaccattaaaatattttgttttattatagagcactttttgaatataagataattctgttgtgcctttcaaatacagctctagttacacactgtaatatatctaatatttattgagtttataataattatctgaattaaggttatgataaactaattcat

SEQ ID NO: 264546 - DNA, 300 bp, Glycine max
gtcgcctgcggcatgcaagcttcaatgttaacagtgcattggtgatatatagtgccagagggtacacggagaggaagacagcgtgagagggtcaacggacaacaagagagcgcgagcaaaataggtcgcatcaaatataatttaaaatgcaagttcaacatcggttttcaataaaaaaaaactgatgttaacaaattgatgtgaacgttaacatcggttttattcaacaaaccgatgttaactgatcatatgttaacatcggttttgaagaaaaccgatgttaacgtacacttcgatctc

SEQ ID NO: 264547 - DNA, 419 bp, Glycine max
atcattataagagttatgcttgaatttactttaaagctacttgacagctgtattagattgctaatttgatatgttagtttgtacaaacattgctttaatacttaaaactgaatgggcttgaatattttttgagctagcctgacaaggagtgtggctaagctaaaaaatgttaagcccgaaaactttcttggctcgagttgtgaacaggtctgaccagtccaataatcatatatcaatctcttactgtcttacatttgtgtcaggctgctcttcctaccacccttttcccagcccataatttgtttgttgtcttttccccaaaaatatttctgtctgcgtttacgttatacataattaatcttatattattattaactcatttataaaatttatttgttaccattaatattatacaaaat

SEQ ID NO: 264548 - DNA, 466 bp, Glycine max
  unsure (1)..(466): unsure at all n locations
cctgcggcatgcaagcttctaaatatccaaacatgatatnattgtgtccttgggcataaaaagntggttatgcatatttcttaagtgtggtacgtcattaaatgactagacatatgtacttctttggttacacttaccaaatttaggcgtttaactcttattactaaaatatcattttccaacattctacttatagttcataaaaaatacattaggccacaatttatttttcccgtgtagtttatgaaatttcaataatacaataacatttagtttaaattttaacttaaaaatatttttagtccttataaaatgaacatgttttgattttggtccctataaaaaaaattatttaattttcattcctttataacttaaaattattcattgtagttcttataaaatgagtaaattaattttgaattaagccttgctatattgttggtgggttttaatattccttcca

SEQ ID NO: 264549 - DNA, 369 bp, Glycine max
aattttgggtgcaccagcaataatgctgggtgcacctaacatgtgtcttgggttaatttatactcgtcctaaaatgataccctgaacgaatgtcttcttttatttagtgcaaaagcaatgacttaaccttacaaatgctaaccaaataaaaaaaaataacataaagataaaactaacagaatcctaaaacaaataaaagcaatcataagcaagacaattattattatcagaacataatggaaagaactaaccagatatccttatcataacataacataacataacataacataaagaactaaaacaaaacagaaaatctaaactaagatatctcttccacatattttcttgggtaattctgaacacatg

SEQ ID NO: 264550 - DNA, 429 bp, Glycine max
  unsure (1)..(429): unsure at all n locations
tctcatgcatgagaacaattctcaagtagcagtaccattcatcataattggcttcaactagttttgtagattcaagaataccatgaagcgatagagaagacatactgttgattaagcacacaacaaaatatagttatgtcagagcataatttttcaaaccttttaaaaatataaaaatattaatgatatttccactaattacaataataatatagtaatgtaagaaatacttatttcttttaagtggatcacataaagcctcttaaaaattgtgagctagccacttggttatcaagtcgtttctcaacacattctaagacaatgcatcatatacattntcaaatcaaaataagaaatatcatatcacataagttcctagttgtcaggtcaattctattgatatncaataaattaatttaatacttccct

SEQ ID NO: 264551 - DNA, 383 bp, Glycine max
taaagcaactaacaaactcccccaaatttacagttctgattgtcctcaagcaaagaaggaacagttcacttgtcctcaagtgacaaagacagtggccaatcaaaagaaaatggtgtttgattcatcaaggacatcaaccatatgaactgaatatcatggaatgcttaaatcaatcacttctcacaagcatgcagcttttcaaagataggagcacaagtattaaagtcatagctgaaataagctagtaagcatgaaagaaatcaaggaaggatcatcaaccaaaacctcgcagtcattgtttcactcaaactcaagtgtttaggcttattccatcataaacaaccaacacaagttccaacctttgcatttcatctcatatcata

SEQ ID NO: 264552 - DNA, 400 bp, Glycine max
ggggagttttggctttttttcttgagaatcctctgcatgcacgagagtctaagcttgggttgaagcttttgcatgtttaggaagttctagagagagaaaggtccaagttccaaagagttctgagagattttggtgtgtgaagattggtagagacgagtgctcgaagcggaagccgttttgagagcttgagatgagtttgtgagtgattgtgagatcctagaggtgaaggagacttcctcaccacttgtatttttgcaatctttcatcttgttcttctctgtgttgtaaaggaggtttccggactatggaaagctaaatcatctgttggatcttccttttaggtacctaatgtaaatatatttctatctatgtaatgatgttttgggtggtctctgtgcta

SEQ ID NO: 264553 - DNA, 410 bp, Glycine max
tcttaagtcacctgccgcatgcaagcttcttgaggaagcctcttaatgaagcttcttgatgaagctacattagctgcctcggtaaaaatgctgcccaaccttcattaaccattggatcttttcgaaatatggggtggcccgtgccatgacccttagtgctgatctgacctgtgcgctctcatagagatatctggagtgtgcgccaagctgtcgttcgtacccgagagcatttctcatttaagcatttcagcctttgctttcatgtagcttaggaaaaacaccatttcttcttctttctttcttccaaagccatttctaaccgtccaagactgtcgcaacatgcctctttgcgggcgagcgatgcgaagctcacgggtgcgttttctaaaggatgaaaatgcgtggagttg

SEQ ID NO: 264554 - DNA, 431 bp, Glycine max
tttcgaagctttcaattctttctatgcacccttagtgggccattcttgcttggtatgctttcatcttcgtctaatttactttcggtatacttttcttccgtttttaatgagcttcgaccgattgtttaagccgttatctctccaaataaataataaaatgaatttcaacaaatcatttgtgttgtaatctcgtttaatcgctgttaaaatagaattcaaccgatcgttcacacttgtacctcagttgataaaaaaagggaaaattttctcccatcagacattttactttgaaagttcttttaaataagttgataagtaaccaagtgaaattaacgctaaaatcaacttacaaaccaagctttgtccgcgaaaaggtcatttgaaactgttttaaagttcaacgccttaagcagtcctcattgcttttatcg

SEQ ID NO: 264555 - DNA, 351 bp, Glycine max
  unsure (1)..(351): unsure at all n locations
agcgaccngangcatgcaagctaacatgggccgggattaacactttntttatttctctaccaaatattcggcttttgaagggattacctgctacttgatgacatacgtatttatgaaagcggagataactttcagtttttgaatgagtttattcgattcacttaacacctgaaaagttagaaatagctatctttgaaattagaagttattctgtttaaatgttgcttttaaacttgtccaataccgacatattgttgctatgtattgtcttatattatgtacgaaagcttggtgacattaacaaacttatgatttctgcttgtttttttacaaagcgcatgtggaatgaaa

SEQ ID NO: 264556 - DNA, 351 bp, Glycine max
gtggtgaactgaatttggaaccaaggtacccccacagcaacagtcagcaccatttggtctcccaaaaggctgatgcctaagttgccaattgggcccttattacaacttgaactaaacctactaaagcccttttagttgattaacccaaaacatatttttggtcagccaactttacaaggattgggccattatttagacaaactaaacactctaaaattgagacaaagtggtgccatttagtcctcctccatttgggccatgatacaactcacaaccttggactgttctccttgaaacttgggcttgtattcaaatagtatggacaacacttggtgaagagctttcttggct

SEQ ID NO: 264557 - DNA, 422 bp, Glycine max
  unsure (1)..(422): unsure at all n locations
agcttgtattttctaattgaagaaaacatatcttatatacatngatgaagctggccactagaacaccaatgcattaaaagaaaaagctacacgaaaaaatatagtagaaacaagcaatcatcattgcaattatggaaaaatagtgatgtttctactcttatttcttagcatactagaacattgcattcatgattttatggaggacatcgtgcattttaattgatatttatgctaaagagcaaagtaaagttaaatttattactacacataattttttcattcatcatatgaaatttaactttttaattgtcattcaagcactctctcattattgaggagtatataaagacatggattcctgtaacaaatctctacttgaccttcttttgtagtagatgattgtgctattacttcactctact

SEQ ID NO: 264558 - DNA, 443 bp, Glycine max
ctcagctttcggggctggtctttgacttaataagggccttcactgtgtgattttagctatggagttgtagcggaagataaaggaaaagatgtgagaggaggcgccgtccactagagaataagccatggaagtaaaagcttcaccaccaagagagtgccttggataagaagcttagagaagaagcttcaaaggagggagagaatgaaagagagagaggggggtggaaattgaaggagaatagggagagaagttgaactttgaagtgtatctcacaagtttcttattcatcaaagttacaacaagtgttacacatgcttctatttatagcttaggtagcttccttgagaagcttccttgggaagcaagtgttacacccctccaatagttgagctcacccccatgggaacacacacccctcccatagcttagctcacccccaaata

SEQ ID NO: 264559 - DNA, 420 bp, Glycine max
  unsure (1)..(420): unsure at all n locations
agctcggtgttatgtccccagagcggttttcttttcttaatccattattgtccagcgacagaatgaagaatttgttccatctagtgttttttctgaagatttacgcaagcaatctagagcaagttgaactttctctggtggagataaagaagaatctaagcatttgacttctttttcttttaagcctgccagaataaacagaaaccatgatcaactttctcttatagcaacctaaggtcaaaatttcacaatcaaatatgctcatgaccatattctttctcaaaccttcaaaatcatgtaggggaacaaagagaggcgattctttgaactctgcatttgtgatgagctgtggaaataaaataataacactcgcttacagattntctatagaatatatatatatatatatattaatcacac

SEQ ID NO: 264560 - DNA, 369 bp, Glycine max
catctctgggtttcattcgatcatgttccgctgtgatctaaccttgaagtttatgaatatcattagctaagttaaagtttggaacgatattgtatttcagtttctccacattagatcctactacgtttggatgagaggaagacaatcgaacatgactagaactctttgctgtataaactttttttaatactggaacggaacgaaaagagagctgggaggataataatttccatacaatgcttgataaatggaataaggggggcactcgaatatcattgctcatgataaataagatatgcacacaatcataatgtgtgtcacacgagacgaataatatgggctctttaaccatgtgatgatcagggtttg

SEQ ID NO: 264561 - DNA, 420 bp, Glycine max
  unsure (1)..(420): unsure at all n locations
agcttgtggactataccatcaactactctgcggctctatcttgcccggaagtaaacgggttgcaacaccggctccgcttccttaaccgaacaggaagncggagacgcgagcttaacctcctaggttaatgtggagctataacatgacctccgagaaggaagccatttaatcttataaggccgatagatcggccttcatctgttcctgcacgccctcttcattatccattcttctggaccgagagctataagggtgccttggtgctctctaactatgatgaatttcctaaagaaataaacataggtgagtatgcctccaaaacatgaatatgcaaatgaatgagcggagcacttggatccactcaaaggttttagcgaacctgatgagtccataacctctcaatttataataagaacatag

SEQ ID NO: 264562 - DNA, 397 bp, Glycine max
gggttaaaggtagcactggagcaaggcggattctgatccccataaataagagtagtacaacacgcatccgttgtagtgaaggctgttgcatttctccatgggggtctgattcgacattcttttataacatgaccttttttctgcaataattgcataaatttttaggacaatgggaagcaaaatgtccatggcctttgcaacagaaacattggacaatactcatgtctcatccttgagggttgccttgtactgcatatgccacaataagggatgcagaattatgttgctccacattcgcctgagtgaggagacgttgttcttcatgaagcagtacatttaggcattcatccaaggaggggacaatagctctacttattatgttggttcaaatgcactt

SEQ ID NO: 264563 - DNA, 459 bp, Glycine max
  unsure (1)..(459): unsure at all n locations
gtcacctgcggcatgaagctangctaatagtctaactttgtaagctatntaagctaagtctagtccaacaagagggtattgaggatgaagcttactttaagttagtctaaacctaggagggctgtctaaatttagcctagtccatcaagagggatctgaggatgaagcttggattgattcagtctaactagggatcaaggtttantaatttaggctaccacatagaacacaaaatcatgattgattagagaaactgttagacaagtggccttagatatcttaagaaggggggttgaattaagatatcacactcttttcctaattaaaaattctatgattattttaacccaaatcccaagattcctttcanaaatgaactcctaaataattatgcanattaatcttacctgatagaaacgatagccaccaataataaaagagttaagggaagaaagatgc

SEQ ID NO: 264564 - DNA, 442 bp, Glycine max
agcaacacaaaatctaggtatccaaaacctttcaatttaatggattttcaaggtttgagaagtgaaattgagaatggggtgaatttggagcaaactctcacctcacacaagtctataacatcaatttaaacttgttcaaactggatttacacctaaaatttcaccgaaccaaaatttgactcctcaacccccaattttaccctagaaatggctctttattcactttggtcatttgtttttctctctagcacagcccaaactttctcctatgtcctaaatgacatttcaagctaggattaactcactttaacctccaaataccactaaatccagatttggccttccaactcccaaaatctcactctttttcctctcataacaccatattctcactttcaaaccctaggttaactctacccttcatctctaacaggtttccata

SEQ ID NO: 264565 - DNA, 394 bp, Glycine max
  unsure (1)..(394): unsure at all n locations
agctngtaatactcaccaagggcggtccttgntgtttgagagcctttggagnngcaagactcaccatggatggaccttacgtttgacgagccagtgagactcaccaaagatcgaccttgtgtttaatgagcctttggagacgcaagactcaccaagggtgaaccttaggtttgatgaagccttggagctactaccagggacacacttgtcctgtgttttgtcaagacttaccaagggtggaccttgggtttaacaatcctttgtagagttgacatacggaaattataaaagttaagggatgtagaattttattcaatgtagttaatagagtacaaatttcgttcgttaccccggatatgccttgttaaacctctcaagccaaaccttgattttt

SEQ ID NO: 264566 - DNA, 347 bp, Glycine max
gtggatggtatagaagcgacatccttggccaatctgggtttgattgggatggcactaagcacatgatcacagttaagaacgagaatgcttggaatgaatcttgcaccgtaaggatttcttaacatactgctatttggtattcaaagtaaataggatatgactttttcttttttccagtcgcataaatacgattcaaggtgcttcaaaactgggatgatatagtgtatttatgtgctaaagatagagccactggtcatggagctgaaactgctatggatgttgatgagtacagaaaccaatgaactggaattcatgggtttaggtgctactgctactatcgacctaga

SEQ ID NO: 264567 - DNA, 65 bp, Glycine max
  unsure (1)..(65): unsure at all n locations
gcgaccataagngaccgcagcagcagcttaaaagaggacggcagttttgcgacccgaccaggaac

SEQ ID NO: 264568 - DNA, 326 bp, Glycine max
attggctgccaatctcatttccttagcccatatttgcttccactacatatctggtttgaaactatatatagctgccttcaaacgatagcacaagctaccaaaacttaaataactgatttgaatccattgtagccttttcgatcgagtcatactatccttgaggccctctgaatacaatttttctagttccctttacggccttgaactttccatcaaccacttaacgttatcaatgatactccagtggctgtccaacgtcacttccaaacttgttgagttagacctcagggatatccccttgggaggttccacatcaaaccattttg

SEQ ID NO: 264569 - DNA, 462 bp, Glycine max
  unsure (1)..(462): unsure at all n locations
ggcagcaagcttntgtgtaattgcaaaagatatttatattctccaatttgcttgggaattaagtgcccacatccacaattctcagatgctcctctcgaatgctgccactaggcgtgttcctttaacaaccagggaaacagaaagggctatccatgatatggcattattgttataccaggcccagcagctccattatgatagtgcaaccatgatcatgagattcaaagcaaaaattcaagctcttgaggaacagatgaattctgttagtgaaaagagttcaaaatatggacaaatagctgctgaagaagtcccaaaaagcctctattgtctaggtgtccgattgactacagaatggttcaaaaacttctatctgcaataaaaattgaacgacacaaagcacgtggagatgaagcttaaagatagcaatcttcaccactttngcattttctcagataacattat

SEQ ID NO: 264570 - DNA, 451 bp, Glycine max
  unsure (1)..(451): unsure at all n locations
tcaagacagaggctacaactttcttgaacttgagagcatcattgttgagcttaggcgattcgggctctgtgaaagaatctagcttataggttgtgaggaagattttcctctgcttggctcttctgcgtctgtagctaatggacttgagaatgtggtcccttccactgctaggcacacccccaagagtttcatatttgtatctacggctgcgagagagggtggagctgcggagaaaggtggccatggtgggtggctatgcgaagttgcaaaaactctcagtctcagacactactcatcacttgatacagaacaagcttttgattcttgtttatgatcgatcgctatcattgtttggtgtttccttctattgtgctgtccctacccttcgaattggtgggtgtagacttcaataaaaggtagttcaccatcattccggtcttatcnttttctc

SEQ ID NO: 264571 - DNA, 403 bp, Glycine max
  unsure (1)..(403): unsure at all n locations
agctatgatgatatggtcctcatcgtcgtaatgatcgatgcgggtcttaaaagaggcaaatttagtcatcctgctcggacgaatgaaaaaactggggcaaatgaagatggtgaggatgaatgataagcccgtgctgtgactgccattccaatacagccaagtttcccaccaacccaacaatgtcattactcagccaataacaaaccttctccttacccaccgcccaattatccacaaaggccattcctaaaatcaaccacaaagcctacctaccgcacttccaatgacaaacaccacctttagcgtaaaccaaaacacccaccaagatatgaactntgcagcgagaaagccttacaactcaccccaattccaatgtcctatgctgacttgcgtccatatctac

SEQ ID NO: 264572 - DNA, 443 bp, Glycine max
  unsure (1)..(443): unsure at all n locations
ttcctcgccgatcagagtccaaacatattcaacgtcggagtggtgagtttctcacttctctctccgtttacgttgaattttcgcgcatttttttgttctgagaatttgaagcggaattaaatctgttaagagagtaaaattatctaatcccatccaatcacgaaagcagaaagcagcactgtcatattcgtcatagcaaataacggtctctgtttttttttgttagattagttttgtttattttatttttttgcgttaagagttctgattcgtggattatgtgagcaatgaaaaaaagtgattttgaaaaatatatttacacgggatgagaacggagtctttgtgatagtgaaacttatttatttgcttatnttgagtggataactgtggaacttaattttttgttttggttttattacttacacaaggtgcgtatcgcgatg

SEQ ID NO: 264573 - DNA, 422 bp, Glycine max
  unsure (1)..(422): unsure at all n locations
agcttgtaatcgattacacacattctgtcatcgatnaccagaggagttnttcaaatagcattctccacagtcacatcttcttgtgtggttcttgaatgactatcataggcctatatatatgtgatttgagacacgaatttgacaagagtcttgaagaaaaaaaagtcttatcctcttcaaaagcaaaatcgttatatcttcttacaaattccttggccaaaactcttgtgattcaataaggaattatttgagtgctcaaattgttcaatctatctctttcaagagagatatcttcttttcttcttcttcattctgaaaagggattaagagaccgagggtctcttgttgtgaaagaattctaaacacaaaggaagggttgtccttgtgtgtntagaacttgttaaggaatttacgagatagtg

SEQ ID NO: 264574 - DNA, 369 bp, Glycine max
  unsure (1)..(369): unsure at all n locations
cactgagagagtagcagattacataacaagagtcttgaatttggccaaccaaatgaagggtgtggaaagaagattacagagccaatgatcatagagaaaattatgaaaaccttaattccctgctttgactacattggagttgcaattgaggagtcaaaagacattgaagtcatgaaggttaaagagctacagggttccttagaggcacaagaactgagattgatccaaagaggtgttgtgaaacctgctgagtgataattgctatgcatatgtaatttgaatatttaaatcacacagcaattatctaaatttcctctcttttattggcttctttgngtaaaacattaagaattagcttcttatgaattt

SEQ ID NO: 264575 - DNA, 452 bp, Glycine max
  unsure (1)..(452): unsure at all n locations
tgtgtagtttggaactgtcatgttatttttgacagcctatcattgttggagatgggaacaaaggacctgactttngtccaattaaaccaattaattggaagaaaaactggaggaatatcagtttatccattcacatcatcagtgcggggcaaggaagatccatgtagtcacatggttattcgaggcaaagccatggctggacatattgaagacctttatgacttggtacttttatttgtttaaaagtttccagtttcaacacgctgaattagcctagaatttccaattgtaataacgtaaagcctaattttatgctgctgctttaggttaattctgttcttcaagatgtccaatttacagatcaacagcgtttcaaacaatttgtttcccagagtagagcaagaatggaggtaattatcaaactgtctaatgtaaagagaggacaaaaatga

SEQ ID NO: 264576 - DNA, 447 bp, Glycine max
agcttaaaaccccttgttcatcactaaacatgttgatattaataacaatcacaagcaagatatcctaactacatacaagacataagaatgaaaaacaggaaagggaaagaaaagttgggttccctcccagtaagtgctcttttaacgtcactagcttgatgcatcgtcttgttatccaggatccaagcgaagaacagtgttcaatctttccatagctccaccatggtattgtttcaacctttgtccgttcactacccatgtcctgtcaggatctttagattgaggatcacaaagctccactgctacatattgtcgaactttcttgatagtaaatggttcataccactttgatttaagcctttcagggaacaatttaagtcttgagttgaaaagcaacacctggtgtcctagctgaaagtccttcttgagcaacggtttgtcattata

SEQ ID NO: 264577 - DNA, 468 bp, Glycine max
  unsure (1)..(468): unsure at all n locations
gaccttagaaactcacctntgcggatatggtcttcgccggcgaaaggatcacagtttgtctaaaaagaggcaaatctaatcatcccgctttgatgaatggaaaaactggggcatatgaagaagatgtgaatgagggagaaacccttgctatgattgtcattcctacatggccaaatttcccatcagcccaacaatgtcattactcagccaataacagtccctctcacccaatcatccataaaagccatccccaaatcagccacaaggcttgcctgcttaccacacccccaatgcccaaacaccacctatagcgcaaacaaaaaaggaattttgcagcaaaaagcctgtaggattcaccccaaattccggtgtcatatgctaacttgctcccatatctactcgataatgcaatggtagccataacccctgccagggttcctcaacctccatttttccgaggatacgact

SEQ ID NO: 264578 - DNA, 421 bp, Glycine max
  unsure (1)..(421): unsure at all n locations
agcttcgaagggaagagagagaccgatctttttttctatagcatggnnntaaaagaagagttagccggttgctcaaagaccaaaagaaacttgtctcagcgttgacgcgagacagagaccaacatgtttgctattatcaccaagtactcaagaagaactaagtctagccacgggccacgagcatatggtggcagacgagtatgcccaagtgtacgcggaaaaggaggctagaggaagggtgatcgactcgttcaccaagaggcaaccatgtggataaaccgatttgtcttaccttgacgggagcaagaacttcccgattgctaccaagctaagcatggcggcacctctccgccccgagagatcacggcttctcactattgtcgcattgatagattaatggccatataatttagacccctat

SEQ ID NO: 264579 - DNA, 424 bp, Glycine max
tacggcgcctatgtgtctgtgtgtgtgcagaaacacaagtgctttccatttatgtatccgcataggggcgtcagtaatcctattatgctatctattttatttaatatattttgtaatatatttcataattttactttttatgctttgtttattacaataatatgataaattaatatattatgtttataaatacatatttatctatatataattgattaaatcatttgttgtacatatttaaatatcattctattagataaatacatttgtgaaatattgaaatgataatattattaggtcacatgttaaaaaaaatttcttcttgatctttaattatctttactgttagggtgtatatatttccgttctaaggatttattaatatatttcaaagtaaaatatgtggttaatagaaaaataagag

SEQ ID NO: 264580 - DNA, 452 bp, Glycine max
  unsure (1)..(452): unsure at all n locations
agcttgccccacttganaagcctcttttgaatgtgtgactctaatgtaagcaacaattatgttcccattaaggctagaggaaatgaaaatttaacctggtattcaaatgttggatttttcagcattcttactttctcatggatgattcctttaataactctagggaatgagaagactttagagcatgaggatctcccacatcttgctactgatgacagtgtggatgggattttgccaacttttacaaacaaacttgagtcagagtgtggtaatgtgataacaaccctactctagtttcataacaaccctacgaaaatatgaggttactgcacacatgaacaacactacactagtgtgataacaaccctgcttacactatgcaaacaaccctgcttccagtgtatgtttgtgataacactacgttacccattattcanatctctcatgcccta

SEQ ID NO: 264581 - DNA, 370 bp, Glycine max
attgcaccaccctcctccctgcacacacaattgcaaccaggtcaataatatttttgagaggaaaacactctctgccacactctctttaatacgttttattattggttaaaattcattaaaatctaaaaaatttatgagcaaaacttattaaataagaagggagagctacagaattttgtgattttcaatggatttcaaggaattataaataatgcgtgcctttacaagggtgtgtcagagaagaaattattacatgctgaaggactaccaccagtctctagttcccgcaaatttctatgggacacataatcaagtttttcaatttaccaactcaactacaagttactccctctgttttcataggtttctg

SEQ ID NO: 264582 - DNA, 417 bp, Glycine max
agcttcctcggggccattcctgcgaatgttatctatttgtaaagttagctataccagcgggacattactcttaaagcaaaaatggcatataacctcctcccataaatacaaacatcaatgtaaatttagagcaagcttatgcgcatatttccttacaaacgatctcttgcacaagacattctattaaccgaaaaaatgcacccatatacaatcaaggcagcttcgttacctagattatttacacgtacttccaaggtgtatttgttacttacatcacacacatctccttggctaaattcacatacatgcatactcaaagcattttggggtaccaaatatggcacatgtgcacatcttggtattttaatacctatacatacacaaactccatgatgaaacatgactatctacacaata

SEQ ID NO: 264583 - DNA, 415 bp, Glycine max
gatacttagagtcacctgcggcatcaagcttaaaaaatatactcgcctttttttttttctttgggctcggcgaccacgatcaacaaagtactttcggcacctgctatatgttgacttgaccaacgctgttatgggtatgttgcgacaatccttcaacaccttattcacacattctgagaggttggttgtcatgtgaccatatcttcgttcagatgtatcgtaaaccatgctccattattcttttgaaatgcgatcaatccatgttgctatggctggactcaattgacgaaatttttctaagttttgatcaaacacatgctttgcaggagtgtacgctgcatcaagtttgataccatcaaaagttgtatgtagatatgaaactaaaattaatttcatgtataaaatacaccttacc

SEQ ID NO: 264584 - DNA, 404 bp, Glycine max
  unsure (1)..(404): unsure at all n locations
ctttttatgttggtataaatgggtcaattgaaaccttagcattcggattggtaaatggaggagcggaccccttttgaggattctttgaacacttgtgtggaatgaaagggccactattgttgcgaattttatatagggtgnatgttgtaatggctgcatgggcttacaatgggtggctttaatatttatgtatgcatacttatcggtggacacaatgattcatggtagggtatatgtttttgttggcactgatttaaggtttagaatcttttttttatgcatgctcttgatgtatacactacgattcttcttcttggggtttgtttaatatgcgagatggctatggctatcttttatatggtgggtggagcttcaatagtatgaatgtggagggtggtaatggc

SEQ ID NO: 264585 - DNA, 441 bp, Glycine max
agcttggaatgtttctgaccatcatatgtgtttaaagcttgataggatgaggctcaaatctaaatggtttaatgatcacatttttggtgatatcttcgcaggaagaaaatagtggaagctaaagttaggggtattcaaagggagttggaccacaaccattcctctgacatgctagccttggaggttgatctttagactgagtataaggatgtcttgaagcgggaagagatcctatggtttcaaaagtttatagaggagtggatcaagtcaggggatcgcaacaccaagtttttccatacccagactgtggtgaggtgaaggcacaacaccatccacactattcagcttacgtttggattatggtgcagcgatatcttttagtctagactgagtctacgggatattttccgtaagttggttttcttgccttggtatcaccat

SEQ ID NO: 264586 - DNA, 391 bp, Glycine max
ttctgtatgacatcgagcaatatagtgcctctagtgaagtcgtaccttaaggtttgtattcaaactcctgaaacatgtgccactgctttacctttcacttaactaagtgttccttcttttttttttttttaatataaattacgctcttttggatgatttggctgagaaggatgcaagagagaagtctgatgctgtaagtgaagcacttttggctgaaattgctcttgattccaagaaggctgttaaggggggaagtgagagcacaaggcatgttcagaaaactaaagataagaagaagaattatgatcacccaagagcaagagatttgaaggtgctcatcatgctcgtggaatatcgtcatttatatgggccattgtctatgacaactgac

SEQ ID NO: 264587 - DNA, 435 bp, Glycine max
agcttgtaattagaaaatctcactttctcttaattgaattcgaataattcccacaaacttcgattctattgcgaatagttataagaatcagccacggggagaatcaacacttaaacaaaactccaaaacagccaaggggagaatcaacactatggcctatagcattgcataaatattgtattaaaactagaggaaggctaagagaacacttcctaccacatttttttattgattaacatttattaaaaattataaaataaaaaaagagctagattcattaaacaagaaatgtgatctacaactttctttttaatatttaataaagttcaactaatctaacaattatgttaaagaatgtattaaatagtatatactcctaacacttttcttaaaactaactaaaatttaaaacatttatttgatgcgcaaacatat

SEQ ID NO: 264588 - DNA, 323 bp, Glycine max
catatgtaaacatttatttctgctactcaccccatcttggagctagagctctacagcagtgtgcccaagaaggattaaactcctctcaatcgtatctgatacttcctcaatcaatgattcccgaacttcgctaatcgaattcttcgcctgtgaaattttgatgtcaaactccttggattggttttcatcaagatcacgaaatgctacgatcaaggtccttagacctgcatcagcttattcctgcccatgggccatggttttttcttcaactcttttccattctttgcaagccctttcaacatgacactgcatgaaaatatggc

SEQ ID NO: 264589 - DNA, 397 bp, Glycine max
agcttcttgcgtagccgctcttggtgctcataatatcccaaaaacaaatccctcttattactagctattttgaattggttagttcctgaatgtacaaccttcaaattgttgctcgctcccctctttcttttctacaaaaaagaaaatcaaatgctatcaaaacatggatgaagtcctaagaaaatcaatatcaaagaaaacatggatgaaatcacaattaaaaagcacaactacctatctttcaaagtcctttggttaatttgtcttgtctccttatgtggcggggttttgtttaataatcttatactcttgctttccaaaaaaaacttatcactaatcctcttttcattaatccaaatttgtatgttattgtataaaagaacatgggttcttcacc

SEQ ID NO: 264590 - DNA, 422 bp, Glycine max
  unsure (1)..(422): unsure at all n locations
ctcagcttaagaaattatttgatgatgctcaggaattataaagatcattcaagaatgaagaacgcaagattntaagcaaaggcaaaggtctcaagaaaagaattaagataggttttaagatagactattagaaaagattttgaaaagcacaaatgattggccaagagagtttttatcttaagaataatttttccaagcttgttactctttggtaatcgattaccagaagactgtaatcgattaccagaagcccaacatttctgaaaatggtttttcaaaagtgtaatcgattactatgactttgtaatcgattaccagtgcttataacgttcaaaaatattttgaaaaaccttgtaatcgatgacacaaaacatgtaatcgattaccagtggctctgaacgttgaaaaatcaaattttaaat

SEQ ID NO: 264591 - DNA, 410 bp, Glycine max
  unsure (1)..(410): unsure at all n locations
agctntaggttggcaaaagttatatctatcctatactcaactaaacacagggttaagttttcaatggaaccactttgtatagattgaaaagtttcctataataatatctatcatgcatgaatggtattcaacaaaaaatagcaaagagaaaaaaagactgttgctaatgagtgacagaagcacacctgatatatatttcctgtgtccaacatccctccagtctcactatctgaaacagccttttccagctgcactatttgcataccctccattgccttcacctgtggcttcctcatctttgcgtgtttctttgccttcactgccttcacaacctctaaaaacccataaacacaaaagctatttataacatgaaactaagcaaacacatgtgcttcatatacactactaca

SEQ ID NO: 264592 - DNA, 157 bp, Glycine max
aaaaagacccctaaaaaggccaaacacactaacgacggttgtgaccgcccacaacatataatggaaaaagtggcaatctgcaacgacgcgaaaaaaaacacccctctaaaaaaaggacaacctccaacgacggagaagaagaaactgacctagaaaa

SEQ ID NO: 264593 - DNA, 376 bp, Glycine max
  unsure (1)..(376): unsure at all n locations
agctctagtcacttcatatactaattaatccccctgctgtgntcgctgcaagctgcacttcccatctaacatcatgatctccccatatggactgacacaatttgatgtcaatgtgcctgttcttcgtcttctgaagacacaataaatctactgtgtgattcctcactagcctactaattgtagaccacttaacccacctccccaaccctcttacattaaaagatagaatgttcatgaggcacatatttcccagctttttttcctctttcctatctctggtttcgatagcccggatcttgtcaatgaaattttcatggttagtatccgccgataaacccatatgtatccccagtgccaatggtaatgagctnctata

SEQ ID NO: 264594 - DNA, 395 bp, Glycine max
  unsure (1)..(395): unsure at all n locations
actcagcttttatncaggctcatcatggtggtttagctccctctttcatggctcatatctaaaggatggcgcctcctctcacctatttctttgtactccgctgcatcttcatgagggaaaatcatcattaaaggacccaattgaagctcaaagatccagcctccatagaagccccacaagcaagcttccatcagaaggttttcccctctcttctgaaggatgaatctccccttatattgaaggatttccccttcctttttctaaaaaagatgggttcctctacatcaatagtaggatggtactaaccatgtatacagatggcctcttaatcgtctatcaattcttagagttgccttatttcctttattctttttccctctttaaaccaccactca

SEQ ID NO: 264595 - DNA, 352 bp, Glycine max
agcttgctcgcacatcgatcgtgtctattatatccactcgacaaggcatgaagtggacgagacctttcatactattacacaccgcggcggacaaatatgggcagataccttgaacggccattattgtcaatgcggaaggtattctacgcttcactatccatgttcacacattattgcagcttgtggttacgtgaccctgaacatctaccaatattaaatgtggccacaccaatgagcacactcataaggtactccgacagtggcgtgctcttggaaaaaagcggaattctccttttgagatgatggacactatcctgcccactacattccgcaaagttgccatatctcaaga

SEQ ID NO: 264596 - DNA, 331 bp, Glycine max
  unsure (1)..(331): unsure at all n locations
tcgtctttgcgactctatctctcttacagccttatcgtcactatgacacctcaccaccgtacccaagtatttttttgcaaccctatttttcacgaatctgtattccttgcatctttttgtattcaataccatggctaagtttggctcacctcgcatggctgagttttaacttcttgtttttattttatccacacgggtgtcaagcataagcatctgntatgtatatgtaatatgtaattgtggggtttccggtttcttcttctccttggtgcttcttgtnttaagtgcttcagatatgattaggtaaacacatacatttaaaccaatgtga

SEQ ID NO: 264597 - DNA, 305 bp, Glycine max
ctatatttctagcaaacagtggcgcatggttcattgtgacttagaatggcccacctaagaattcacatccttggctgacaagccaaaccaagacacctagctagatgccttttttattctttcccatagtccgagccgatgcgcgtctaaacaggagatgtgaaatccggccgccccttaagtagagctccacttgcgtgaatagagaaagacccctccttcatctataacatgttatgcctatccaaatccgtctggtgtggatggatcagagtttttttgtcgatcgtactttatttttacac

SEQ ID NO: 264598 - DNA, 145 bp, Glycine max
tgcactgcagtcaaaacacaatgtatttgtgaaccctgagaaatagcctcagagtcgatatcatgacacaaaatacaagcaacactttacaatagcacaagatattgtcggtaataaccctacagctaactacaaaatttgaaga

SEQ ID NO: 264599 - DNA, 443 bp, Glycine max
  unsure (1)..(443): unsure at all n locations
gcgctnctatgaaggctagatcttngagctttattgangtccttcaatggttattttacaccatggagatgcagcggaaggcaaaggagaagaggagaggggaggcaccaaccactagggaataagtcaaggaagaaggagcttcaccaccaagagttgccttggataaaaagcttgaagatgatgctttaatggaggaaaagaaagagagaaggggggagcacgaaactgaaggaataaaagagggagagaagtggaactttgaagtgtatctcataagactttcattcatcaaagttacaacaagtgttacacatgcttctatttatagactaagtagcttccttgagaagctttcttaagaaaacttccttgagaagcttctttgagaagctagagcttagctacacacacctatctaanaactaagctcacctccttga

SEQ ID NO: 264600 - DNA, 439 bp, Glycine max
tatatctgcttatgattgcatatacaaatcttaatactcttaataaacgagaaaacaaaaaaaaatgataagtttcattttacaaccataatatatgaatcttagctgtgtattaattacattttgatcctggtctcttaatattacaaaaaaacatcgataatgggacattatattcataaaaataaaaatacgagcataaaaaataaaaatagaaaactggtatgaaatataatgattatctatccatttaattaaaaattaaaaaaatcctcctcctccttttgatataataaaacaagcatatacaatatgtcaaatttattattttatgtaatacaaacaataatgaatgaatggagattttgaaaacactaataaaattatcctaaactcactttttctctgaattccgtttcttactttccgaaaagaggaa

SEQ ID NO: 264601 - DNA, 375 bp, Glycine max
catgttaagcccacgtggatccaattcaatattttaaacaactgtgaaatgggcgttggtaggtgcacccaccaaatatgctggtgcaccccacaattcaaagaaataccacaaattaccccttcattctaacaaatcacaggctaatatatttttttaaagaaaaaacaactttttttccccgcctgattattattccccttgcttacgcgcttgtttcttttccccgtgcacccacaatctaaattgggctttttcttccggaaatggcttattccttcttctcccgccctatttgcttctcattttacattggtcccttatttgaattcatgcgtctccccgatattggaacctacatggtttgttagtcgt

SEQ ID NO: 264602 - DNA, 413 bp, Glycine max
  unsure (1)..(413): unsure at all n locations
agctntttctctagcttgccttccacttataattatatttccggcgatctagttcatcttcttgtgttgttacctgctcctcgagatcaactttgagatgtaattgatatatgtgcaatatataacttactataaactagntgtaatttatatattgtgtatgtatgatagtatacagatagaaacttactatattgtgtaagaaatctgtttgatggcattccatttataaacaaatcttatagctagcttagttgtttctttgcatagcatatcatttactataattatagtaaatgtgcttatttgcttctttctgagggataattcaaattaacatgttaagttgttgccaatacaaagaaagaatggatttaactggggttattntntgtgtaaccgcaatattaccc

SEQ ID NO: 264603 - DNA, 290 bp, Glycine max
tctgtttatcaaatgacacttagtaccaccaattctgattgaggattcacctatgtgaaccaaccctctggcaccgggctgactagaacgctacgattaaccttgaaggaaaatgcgaaactgatcacgaaaggaggaacataagtcgataactgcgtgggtcttaataggttggtctaggcaaaaaaggagaatgggagcgcaaaagttgttaagaggcggcggacgaaaaataaaatggacaactgaactacaggctccaacgagtgatccaaacaggcgaaggctcg

SEQ ID NO: 264604 - DNA, 377 bp, Glycine max
atcattgggggcactactggagctgccatatacatccacctttgggcgtaccctttgaaagattcatgctccctttagcacaagttttgtagctgcatcctatccgaagccatatcaagattgtattgatatggttgtcccaataagactttcctggaagaaatacatcaacagcttttcatcttttgtgtatgcccccattttcctacagtacatcttcaggtggttcttggggcaagtagtccccttgtacttattgaagtcggacaccttgaactttaaagggatggtgatgttaggcactaagcacaattcccgtgtgttagcgaatacataaccttcaccttcttcacaggctctaaacccttcctttatat

SEQ ID NO: 264605 - DNA, 453 bp, Glycine max
  unsure (1)..(453): unsure at all n locations
agcttcactggaaactaagttaattaattatgtgagttcttgatttaatccttatttctctccccctttggcatcaacaaanagcaaaagtgcgtaacaaatataaaacatacataaattactaatcactcacaagacattcattgaaaaatctaaaccaatcatgaagcaagaaacatgaatagatcaaatataaaaattacatagtcatataacacaattcataattgttcagtcatactatgcaaataaaagaaatactaaatgttcaaatcttataataatataaatcatttggataggtcactagcatctagaagtcctaattctcttctaatattgtagaaagaatctctgcttagtggttntgtgaagatgtctgcaagtngattnttagtatctacaaattctaaaacaacatcacctttagaacatgatctctaataaatgata

SEQ ID NO: 264606 - DNA, 450 bp, Glycine max
aactcactgacccctcgggcgagatatgttgcttacttgtttgtatgctgctgtacggccagtttatgttttaactattaacagcattaacagcttcacttgatatttaacagtttcacttgataaaatctaaactatttaattttaactaatgttttgctactcgtgtaaaccttgcagtgatcctaacttgcactttgtggagtctcctgcatcggctccaccagaagtttaaattgattttgctgcacaacaacagtaagctatcttccttgacctaaattaattctttctatagtaggataaaaacatagattgtagaattcatagttgcattttgaagataaaaagtaaacataaatccttcttcacaaacataaacccttctttagtatattcataaatcatatataacaaatttgaattctcattttttaaaaagaaattatt

SEQ ID NO: 264607 - DNA, 451 bp, Glycine max
  unsure (1)..(451): unsure at all n locations
agctttcattctcttgggagtccttctttgtttttgacttcttctggaggatcttcattgtttccttcgtcatttcctttggaatcttgttcatgaatgttcatatgttctaaagaatctgcaatgtcatctagcatattctttcttgacaatatagcattagattcatcaaaggtaacatgaatggattcctcgatattcatagctcttttattatatatcctatatgctttgctttgtaatgaatatccaagaaaaataccttcatcagattttgcatcaaattttcctagattatctttaccattattaagcacaaagcactcgcaaccaaaaacatgttgatgagaaatattaggttntctaccattatacaactcatatggggttttctttaaaatcggtcttatcaaggccctattcatgatgtaacatgcagtattgacaactt

SEQ ID NO: 264608 - DNA, 452 bp, Glycine max
actcagcttggcaaattaaacactcctacactatcatctctagcatatattttctttctttcttaacccactcctcacgcttgggtttttatggaaaaacaccataactaaacgcgccacaaggcatccctatcgcaccagatccaaaactagaacgatgggtgatcaataggagacacaggaacagatgaaagccgacatgtcgactctgaaagaacaaatggcctccatgatggaggccatgttaggtatgaggcagctcatggagaagaacgcggccaccgccgccgctgtcagttcggctgccaaagcagacccgactctctttggaactgcgcaccatcctccctcaaacatagtaggacggggaagggacacactggggcacgaaggcagacctcacctgggatacaaccgagcgggttaccttatggattgccgcccaactactc

SEQ ID NO: 264609 - DNA, 448 bp, Glycine max
agctaggctaatctttcctgtaattatttcttgtcataatctgaagagctattttcaatcgctgatctaatctgctggttaaaactcatcacaagagacaagtcaaaaacatcattaagtatcagttcatgaagacagaattcaccaactctggttgaataaaaaataatgttagattcaaacagacctgctcacatctttcctcaatcgctttcttatcaccacctccatcaaggatgacagtgtcatttttagaaattgttatctaaaacataaagaaccttatttagtatgggcacagaatagtgaaatttaatgaaacttttcttaaagctatacacaagcagttgctccaggagaaaagtctgcatcctctaccaaaaatatgaaatgaacattgtaaaaaaaatgttctaagctctatctgtgattacaattctaatgctac

SEQ ID NO: 264610 - DNA, 400 bp, Glycine max
  unsure (1)..(400): unsure at all n locations
tntcagctcctgctgggaacgcctctagctcaacacctgttcagtcttaggcacccacccagagggaagctccccaagttccaactccgaacgcgactcgaccagccggttattccaacacgacaaggaactttcctccgaaaccgttgccggaattcaccccgctcccaatgacgtacgaagatcttctaccatccctcatcgccaatcatttggccgaggtaactcccggaagggtcttcgaaccccctttcccgaagtggtatgaccctaatgcaacttgcaagtaccatgggggtgccccggggcattccatcgaaaaatgcatgggccttaaatacaaggtccaacatctaatggatgccggatggcttgatttcctagaagatccgccccaatg

SEQ ID NO: 264611 - DNA, 427 bp, Glycine max
  unsure (1)..(427): unsure at all n locations
agctnntgggctggaaaactatatttcttctccaaggttctagtttaggctctctcttctctttcttctttattttcatttttggaattccagttctgacttttcgttttagcaataaaattttgttcttcaatctataatttcgttctctatttgattaatggaatactaagtctccaacgttgttttctcttgaggatcaagcacagttctctttgaggttctattattactgttaaattctcttcagtttttcctcttcactaattactctgaatttgttgcttttaattcatgcatgcttagtgctcgattaattgtctctacgcttaatttacgttcatgcttaatgatcatttatgagtaattgggtgatgtgtggcttaatcacataatgaatgccttatgttgaatttgcttagaattt

SEQ ID NO: 264612 - DNA, 426 bp, Glycine max
  unsure (1)..(426): unsure at all n locations
ttaactgatcgtntaagtcgctatctctcctaataaatgatataatgaatttcgaccaatcatttgtgttgtaatgtcatttaatcgttgctaaagcaaaatctaaccgattattcacactgtaacctcggttaaataaaaataataataaaaagaaaatcaaaatatcttgaataatataataaaaaaattatcaaaatatctttgaataacataaaaaaaaaaatcaatcggacgtttttctttgaaaggttccttaaatgaattaactaataaccaaagtgaaactaagactaaaatcaactcacaaatcaagctttgtctgcaaagtcactcacaccgttttaagggccaacgccttaatacggcctctttgctcttatcagttaacatggatggttcaatagcataaaatcaacacataac

SEQ ID NO: 264613 - DNA, 316 bp, Glycine max
agctgtgtgtaaacgattactctgttttgtttatcgattaccactgcgtggatctcaataactcaaaagaaggactcttcatgaggatggtgactttatcaaataggtgttaaagtgttctaaaagatataactcttcaaaatggctctctcgaccacacatgaagagtctatacaaacaaggctttgatctgtattttcaatcaatctttctaagcaatctttctatcagtgcatgtcgaccatttatttcaaccatcagacaagattctctttcatctatatcaacaggagctttggtgcatcttctcttcatc

SEQ ID NO: 264614 - DNA, 427 bp, Glycine max
  unsure (1)..(427): unsure at all n locations
ctcagcttatttctctctctctctctcatntaccttagatgctatctagagccatatagatntttttcgtaagcctttgtgcatctgctctcatagttagtttgaatcccatcccttctgcaacccatgtagatttggacttggtttcaattggatggttggacgtgatttggacttggtttcaatccttagtgcattcaaacatatttcagcatcagttgcaattgcgacacctgttcttaaagaaatgtgagggtgtatttctagtgatcattctagttgtaaagttttgctattttttttatttactatgtgaccatgtagatagaagaactccaaattttgttttgcttgaaatgataaaagctggattctcatgatttaatcttttcaatgaaaagcagtgacagaataccagtagagtaca

SEQ ID NO: 264615 - DNA, 401 bp, Glycine max
agctttgagcaaattcaaacgacaataacttttgagtcggaagtcgaattgtgtcccgtagtatatcgagaagctcgaaattcagaacagaagctgttagaaaaatcaaatgacgataaccttttacacggatgtccgattgagtcccgtaatatattgcgatgctcgtaattgaaaacagaatctctgagcaaattcaaacgacaataactattgactcggatgtgtgattgtgtccgcagtatctcgagacgcttgatattcaaaacagaagctattacgaaaatcaaacgacgataactttttacacggatgttccattgagtcccataatatatcgagaagctcgaaattgaaaacaaaagctcttgagcatatcatacgacattaactctttactc

SEQ ID NO: 264616 - DNA, 377 bp, Glycine max
acttaatgccattaacctagggaattaaaacaaactaaatggctgagtgtaactgaaattgttggcaaccaaaagtcacccccaacagccaacaagtcagccaccatttggtctcccaaaaggctgatgcctaggttgccaattgggcccttattacaacttgaactaaagcccttttagttgattaacccaaaacatatttttggtcagccaactttacaaggattgggccattatttagacaaactaaacactctaaaattgaaataaagtggtgtcatttagtcctccatttgggccatgatacaactcacaaccttggacttttctccttgaaacttgggcttgtattcaaatagtatggacagcacttgttg

SEQ ID NO: 264617 - DNA, 457 bp, Glycine max
  unsure (1)..(457): unsure at all n locations
actaagctngaatctagttcctccattcatggagttggagctttctatgttcaccagctgcatttgagtcaaagttcagaaactttaatgcccaataagctttatgttccaactcaacaggtaggtgacaagatttgccataaactaattggaaaggagtaagtcgtaagggctttgtatgttgttatgtatgcccacaaagcttcatctagtttttgggaccaatccttccttgattaagcaactattttttctaagattttcttaacttccatgttagaaacttcatcttgcccgttggtctaagggtggtaaggtgaggctaccttgtgtttgacactgtattgttggaggaatttttgagttgggcattacaaaaatgagatcctccgtcacttattggttccctgggcgtgccaaaccttgagaagatattnttctttatgaagcaaataac

SEQ ID NO: 264618 - DNA, 413 bp, Glycine max
  unsure (1)..(413): unsure at all n locations
agctcggctgtnttaacaatggttaccctttctttgttttagcatgcagagacagagaatggccgtaataaaaaatctgcagaattcattaattagtttctttctctaacatttcttccggagaccattatcccaattatcttgtcttttggatgtaatccaagcaatttctgaaacattcaattcaattcaaccatctctcacattacacgcacttaaaaacaatcaccaatctctaacacaacaagtgctgcaatgcaacctcaactcaaggcttgattgaaaagaaaaaatccaaacaccataaataaataaacttatcccgttatcatatgttcagcacctttcatagtcaaaatctcaagcaacaaagaatgcngaaccctaccatcaataatactcgctgtaataac

SEQ ID NO: 264619 - DNA, 438 bp, Glycine max
ttaggagtgtctattgttataatgtataacaattcttttatatgttatattctacactattaataaacacatttctctaatatcttatactgtataatgttaatttttccgtcttgtcgcattatatcaattacttcatctcacatttttctcttttttatgtgagataagataagaagtgcgtgttttaggaccatgtttgaaacgcgcgcagattcatacttttcctccatacgtccaaattaagaccacaaagtggaagttacttcagatgttttaagtggatggtatttttcatgtctcgtgatgagcttcattacacactagaaattcacacaaggtaaataacacacttgacactttatactcagagcttactgtaattatgttaagaaaatatcatcgggctgatttctatacatggtgcataagataaaa

SEQ ID NO: 264620 - DNA, 370 bp, Glycine max
agcttcactggaagttaagttatttaattatatgagttcttgatttaatcccaattttctctccccctttgtcatcaacaaaaaagccaaagtgcgtatagagacataaaatcatacacaaactcataatcatccaagcattttaatccatacaacaagcaaggaggaaaataattcatacataaactaagcaaggaagataataattcatccattaatcttaataaaatgtcagataattagaaagtcatccaagataaccaaattaaaacaactaatttagaaagtaatatactaataagtgtatcaaaacatagccaaatacacggatagaaatcaaaatactaataatactagtaatgtctaaact

SEQ ID NO: 264621 - DNA, 467 bp, Glycine max
  unsure (1)..(467): unsure at all n locations
acctataaaactcagcttctntgagagaacttccttgagaagctagagcgtagctttacacacccctctaaaaactaagctcacctccttgagatgagaagctagagcttatctacacaccctctataatagctaagctcacccccatgacaaaatacatgaaaatacaaaaaagtccctagtacaaatactactcaaaacaccctgaaatacaaggctaaaaccctatactactagaatggccaaaatacaaagcccaaaagaagaaataaacctattctaatatttacaaagaagagtggacccaaccttggcccatgggctcaaaaatctaccctaaggttcatgagaaccctaaagccttctttatcagctctagccgaatccgctctagccgaatcctcttggagcctcttgctcatgactctggtaactgggcatttcctagggaggatngcatcagagga

SEQ ID NO: 264622 - DNA, 441 bp, Glycine max
  unsure (1)..(441): unsure at all n locations
agcttatntatgcacattcctaanatngttatttgtgaaataatatctctggtaagagaaacattcctcacatgtagctatctttttcctgcatataccaaaatctatcttagcaaaaatttgattccgtacttgttcacccgtggatcctcaaaacattcgaacaccgtgttcggaattcattttcacatatctccaccgttgggattagtcaaaattgtatgtggagagagaaacgtcccttgcatagagacagagaaatggcggctcaaatcccttctgctactctctaatgcttgaaaaccctatcagaacaactagagcaaaagtttgaggaaacttaagaaacagctagagatgccactactgctgtcggaatacacacgggagtccacttacatgtagggatgagtttatccccattgggttgaatgacctatg

SEQ ID NO: 264623 - DNA, 310 bp, Glycine max
  unsure (1)..(310): unsure at all n locations
tagcttgagatgaggaagtgtanatttgtttttttcttgctcttatacnctgaacacagagtggtacctggagatatgtcgcaagggtcagaaaaccttggggaacgtaggtggggtgctattgaccaaaaccaagcttgaccaatcccgacccaacccgggcatagtcagtcagtgagaacctgtgatgtatctatacatgcgagtctcttgcagtctacagattagaggaacatagaccacanagcaaggatgcttgtgtggtggcttgccacctgtgaactttgagtctatatgggatgtgcgctct

SEQ ID NO: 264624 - DNA, 434 bp, Glycine max
  unsure (1)..(434): unsure at all n locations
ttataagtgcggttctcggatacgcaagtcaagagttttctatatgtgacgatgactcgtccatgtacttctgatttggtccgaccatgccctcctgatttccagctgggaaatcggcgagtggaagaacgcccctgcattacgcaacagcaaatgaaacctttcggtttaaaaggtntaaagaggggcctacgctttagagcttccatttccaaaacgctctgtgagtattganattgaattaataatacaaggatctttcttaatctgttcctggtctctacccgttctgattgagttggatggttacttctttttctgaaacggcatatcctatgacgagtccctccgaggtactaatacctgggaatccggttaatatgcttgagcaggaaatgaaccaaatggaagatgaagagatggcgatgtgggac

SEQ ID NO: 264625 - DNA, 440 bp, Glycine max
  unsure (1)..(440): unsure at all n locations
agcttatgcgcatatttccttactatcgttcacttgcacaagacatcctatcaactaagaaaaatgcacccatatacaatcaaggtagcttcattacctagattatgtacttccaaggtgtatttgttatttacatcacacacgcctccttggctgaatttacatacatgcatactcaaagcantttggggtaccaaaaactgcacatgcgctcatcttggtatttctaatacccatacatatacaaacttcacgatgaatcttgactacctacacaataaggtgctacctttcatgtttttttttcaagtttttgctacctaaagccacatgcaaattcaagcatattttcctttgctgactaaaattgtatcaaattagaaggtatatattttttggatatgtttcttacataacatcaacatattatatatattttt

SEQ ID NO: 264626 - DNA, 435 bp, Glycine max
  unsure (1)..(435): unsure at all n locations
atgactgagaattggtttctttgaattttgagctgaaattcttaatgaattttctagacatctggaaaaaagttatacaaaaagaaccaagtgatttggataaaaggaaaaaatactaaaaatcacacaagttggcagaaaaatcagtatccaggaaaaaaaagaagtgaaagggaagtgtgcttgtagtttcggctcaaaatttattccataattggtgcctatgttataccaatcttagttcggaaatttcaattgaaaattactgtgaaaacaagtgccaaagctagaggtttgttgagtcttttttatatagtttttttactctactctagagccattcttaagttctctttgagtcctagcgtgcttctatgtcctttntcattactttaatagtcgagtaatctttgaaacacttgcttggtataactc

SEQ ID NO: 264627 - DNA, 454 bp, Glycine max
  unsure (1)..(454): unsure at all n locations
agcttattttgatgatgccaaagactcatgttcaaaatcaagattcaagcaagtttcataaatcaaagagccattcaatcaagaatcaagattcaagtgaagattcaagagaagactcaagatatgaaataacttcaagaaaagcatcaagataagtataaaaagattttttcaaaagaaaatattgaatagcacatatttgttcaagagaatttttcaaagaaaaatcttttaccaagagttttactctctggtaatcgattactagaatgcagtaatcgattaccagtagccaacattcttttcaaactgatttacaaagcggtaatcgattaccataatcatgtaattgattaccaatgttttaaaacgttaaatttcaaatttcaagagtcacaacttgtgataaaacatcttcaaatcatttcanacttgtgtaatcaatacacaatac

SEQ ID NO: 264628 - DNA, 396 bp, Glycine max
tggattgtacaattgctatgaatcaattgaatgaattataaaatgcaaatcacggtcttacttttatagactcttcatgtctggtcaagaaaaccattagaagagttatgacctttaaaaaaacttgaaaaccattggaagagttacatcttttaatttttgttcaaaacttatcactggtaatcgattaccaaatcattgtaatcgattacaaagcatttttgtgaaaggatgtgactcttcacatttaaatttgaatttcaacgtgtaaattcagttgaaagctttttgaaaacaatctttgctactggtaatcgattaccataaacctggtattgattacaagaaaagtaaaactttttggtgaaaggtttttgaaaaattcatgtgctactc

SEQ ID NO: 264629 - DNA, 441 bp, Glycine max
agctgtaatttctctgacaaaagtgtcttcatttccatcatcattgattatgtgctttattgcaacattcagattatttgtcattgtacccttatagaccttacataaaattgaaatccattaataagatttccttatacatatagattcaatcaagcttggacaatataaataaataagtgggtgtcttcaattggttgggcaagggcaagaaccaagattttaagtttttaactctaggaacacttatccaattcctgtagctcttatttcacattaatatgtatctatattatgcctaggcatctaggacaattagatgtaactatcttattgtactttgcgatattgtctagactcattcatgattaggttaaataatcttttgtcaccaccagcttcttataaggtgagaaaagaatctcacctgaggtcctttcc

SEQ ID NO: 264630 - DNA, 395 bp, Glycine max
tctaatgaaggagtactatcgcgttatacatgtgtcaaggatgtaacatctcagatcttaattgacacggaaaatattacttgaaaaacacttttatttaatttatttttggaataggagtcagtaatttcaattggtacttctagctattgaaatatctctttttttcaaacaaacacgtcattcggaaaatgataagtctttacattgaactaaataagtgcagatgtagaataacttagtttccatacattaattacagaacatgagtattatcaccggaaaaaaaatgccgatacaagtcataattgtatgtaagtaagcaaaatacattatacatcactgctacaacaaaatttatattcttggagaaaaccattcataatatatcaaaa

SEQ ID NO: 264631 - DNA, 447 bp, Glycine max
  unsure (1)..(447): unsure at all n locations
agcttctatataagctgaaccattttatttataaagacaagttgagttttattcagaaaattagagtttatctcttttatcttagtgagagtgattctcctaaattcttgagtgattcaagaacaccttggctgtatcaaaggactttcacaacttttgtgtgttgccctcgctggaaagagtgattctttccttcctttcatcttcacccttgttctttcaaaccacaattccagaaaatccacctctgcccagaattatctcgtggccataactcccattntacgcactcaaattaagtgattcttgagcctaaattgaatttcaaaacgagaactttcacatcgttttggaatcacctcatttggagccctgtagcttccgttattaccatttctatatttctgtccagccaccacttaaccctacgtttacccatccattcat

SEQ ID NO: 264632 - DNA, 435 bp, Glycine max
tcttagtttcagatgatgtagatgggtttatagctacctcatgcactcctctaatgactatggcatcatttctggcgctaaactgctgggagttggaagccatcttctcaattaaatttttggcttcagcaagagtcatgtctccaaaggctccaccactggcagcatctatcatacttctctccatattactgagtccttcataaaaatattggagaagaagttgttctgaaatctgatggtgggggcaactggcacatagtttcttaaatctctcccagtactcatacaggctctctccactgagttgtctaatacctgagatatccttcctgaaagctgtggtcctggaaggagggaaaaatttttctaagaatactctataaggtcatcccagctcgtgatggaccttggagcaaggtaatacaactagtc

SEQ ID NO: 264633 - DNA, 326 bp, Glycine max
gactctgtggattatgctcctgcatcgaccaccacacagaccttagtccttctgtgcaacaatctgaagcaattgaacaacctgaagcttatgctgcaagacattgtacagaccttcttacctcacagcaaaatcagacacaacaaagaatttgatctctccccaacaggtacagtctgatggaggaataatccaaccttaaaggtcaactcttacacaatacaccacaaaatagcctatttcaaagcactgggcaacagccatacttctccccaatcgccacacacagactacacctccaacaaaacattgagcccttgaaattc

SEQ ID NO: 264634 - DNA, 388 bp, Glycine max
accgccttctggtggaacttcctggaaggcccaagtgggcctgattgctctttgtacccctttacttactaaatacacccccttcctttttttgctgattctttttccgtaatgttaccaaactttacgaattatgtaacgatacttgtttcctttccgtaatgtcacaaaaccttacgaattatgtaatcatcccttttttggcttctggaatgttacggaacttcacagattgtgcaacaatgcttccttttgacttccggcatgtcacagaacttcacggattgtgcaacaatgctttcatttgacttccggcatgtcagagaacttcacggattgtgcgacaatgctttcttttgacttccggcatgtcacggaacttcatgga

SEQ ID NO: 264635 - DNA, 421 bp, Glycine max
  unsure (1)..(421): unsure at all n locations
agcttgagaggattgatggggaccctgtgttgagaganacgaggatatgggctacgtgggagtacgtgagctcagttggaggtgggcaacaggggatggtgggtttatgcgcgcattgtggatgtggaaagcttgttgtgcaccatcgcccgaccgccacctagtaccacatgtgatgggtaccccataatcctacaagcttgagatgaggaagtgttgaagggtgaaacttcctgcttttattgttgaccacagagtggtacctggagatatgtcgcgggggtcaagagaccttggggacgtcaggtggggtgctattgcccaaaaccaagcttgaccaataccgacccaacccgggcatagtcggtctgtgagaacctgtgatgtacctatacatgcgagcttctggcagtcaacagat

SEQ ID NO: 264636 - DNA, 415 bp, Glycine max
acttgtcactatgcttagcataagaaactaccttttccctctagcatctctcatgcatctcatgttttttatttacttcatatggacatatggggcccgtgttcaaaaccatctatgcatggtcacaaatacttcttaacaattgtcgataatcattcacgatttacatgggtacatctcatgcataataaagctgaaacacggcctattatcatgaatttcattacgtccattgaaacccaatatgatagcaaagttaaaataataagaagtgacaacgagcctgagttcatgatgcatggcttctatgcttcaaaaggaatagcgcatcaaaccacgtgtgtagaaacgcctgaacaaaacggcatagctgaaccaaaacatcaacacttacttaacgtcacacgtgcacttt

SEQ ID NO: 264637 - DNA, 411 bp, Glycine max
aagaaagagagaatgtgggagcactaaattgaaggaataaaagagggagagaagtggaactttgaagtgtatctcataagactttcattcatcaaagttacaacaagtgttacacatgcttctatttatagactaggtagcttccttgagaagctttcttaagaaaacttccttgagaagcttctttgagaaaacttccttgagaagctagagcttagctacacacacccctctaataactatgctcacctccttgagaagcttccttgaaaagattcctaaagaagctagagcttagctacacacacctctctaatatctaagcttacctccttgagatgagaagctagaacttagctacacgccccctataatagctaagctcaccccatgacaaaatacatgaaaata

SEQ ID NO: 264638 - DNA, 342 bp, Glycine max
  unsure (1)..(342): unsure at all n locations
agctngcttctacatatgggttctatcgtttattttggcatgatcactggctgacatattctcaattagctctgttgctttttggggtcttcagctttatttttccccctgcagaagcatctagcaattncttggttggtggcatcagcccatctataaacatattcaattgaattgtcttggaaaacctatgggtgggagttcttctcaataaacctctgaacctctccaatgcttcactcagagattcatcatggaactgatgaaatgaagagattacagctttcccttccgcagtcttggactctgggaagtatttctttaagaaactttcaacaactt

SEQ ID NO: 264639 - DNA, 450 bp, Glycine max
tagcaaatggacctgggtgttgcccagtttcatcatatcttccgtaatacttatcacctctatcatatctaataattttcacatttatgtctaactgctcttttacttcattgtagtaaatttctaaggcatccattgcctaagaaatcttgggcagtaagtagacataaccgtaacgtgaataatcatcaataatggtgataaagtatcattcctttccaaaagaactaacatcaaaaggtccacaaatatcagtatgcacaatttcaagaagctgagtgcttcttgtagctcctttctttgcatgttttgattgttttcccttaatataacccacacaaatatttagatccgtaaaatctagataagaaagaatttcattctttattaatctttccatcatttctctagaaatgtgacctaaacgtttatgccacaagaaagcagatc

SEQ ID NO: 264640 - DNA, 425 bp, Glycine max
agcctcccgtaggtaaataaacgtacactttatccctgtgctcatacacacagcagtatcctatcagctacatagtacatccacaggaaagttgaagatcacacagaccactttcaggctactatgattacgttttaacatccacaacccgagattatgatctcaaatagtatacactatttcacaccaatggtccaatactataagcacaagttaatcataaccgataaacataaccttattatcatcaggtacaaccaaacatgccacacagagaaaaaaaacgggtcaatttagaaagtggagttcacgttttctagcaaggctgcctaaaagaaacctgtgttaaatcaatgaaaacgctctcaaggcactcacagagctcctatctcctaggatagtttattacaaacaaatccctcaac

SEQ ID NO: 264641 - DNA, 441 bp, Glycine max
agcttgaaactttataaaactcttacaatttgtttcttttgtgcttacaacttcaaaagtactggtctattctaagcacctctaattaggtgtttatagttcatttttcatgacaacaattaaatgggagaacccaattaaaaaaaggtcaaagatctaaatgaaaatttaataaaagtatggggacccacagaataattaaacctatattttataaaggtattggtaccttttcattataaaccaataaattaggttgtacattaaattacatcttaattgggttgtaatttaattttaataatggtgttttaaatcttatgattgcaaaataaaaactattgttgttcatctcaattttttaaaattcaatactacacttgaaaaaaacatgtaattgtaaatgaattgggcaacaaaagtactcctataagtcattta

SEQ ID NO: 264642 - DNA, 419 bp, Glycine max
tgcgcaatacacaatgtttatttttttactacaaaatagtgtttcagaaaggcataatatgaactttaagggatatcgtttggagtatgttaatcaattcaactttactcggatctttatcgatgtatgccttgaaaactgtcatgtatttgttgaatagggtttctagtaaggcaatttcaaagacaccttttgaactatggacgaataggacacctaatataaagcacctgcatgtttggggttgctatgcagaaataaggatttattatttgcaagaaagaaaaatagatgcatgaacaatccagggatatttcattggttatccacaaaagtcacaggggtatatggtttattcgcctaatcataggttgagaattgtcgaaactagaaatgcaggttcattgaaaatggtaaat

SEQ ID NO: 264643 - DNA, 332 bp, Glycine max
agcttgcctcaaatagatctcaggaaagattaatctgttgaagaaccagttccgttcccgaatatgacagccaccgttttaagagagctgagcaccatacgcgcttcaaggccatcaagggatggacatttcttcgggagcgacatgtccatctcaaggactacgagtatacctacttccacgaagagatacttctcctacagtgggcatcactggttacccccatggccaagttcgacccagacatagttctcgaaatttatgccaatgcttggtctacacaggacggcgcgctagatatgcaatcctgcgtgacgtgtcattggatcccg

SEQ ID NO: 264644 - DNA, 314 bp, Glycine max
caacaaattgcttcttacaccactaacagatgagattgtggctgaagaaaacacatgcgtctaaggtggaccatctgtaatctgtgtcatacacccactcaacatctcataaagtctctatagaaaaaaggtgcagaagcaagcttgaaatgcgagccccacgagagggggctcttgaaataccgcagtatcctctttatggaacatatcgtaacgccctgaaatttccctaactgtgaatccagtttaaaagcatttctcatcctatttgatggtgtgattttattggacgagccgcagcattgctagaatat

SEQ ID NO: 264645 - DNA, 129 bp, Glycine max
ctgcatgagttttttttattaattaaatcggctaaatactacattttaaattttattgatagttaaagaattacaaaagatgttaaaacttattagattactttgaattgatgatgaaccttttttttt

SEQ ID NO: 264646 - DNA, 397 bp, Glycine max
ggggaaaagcaaaccctaaaggagctgttttggtgaagaataccgaggggataacttcctcgttaacggacaaatctagctcaaataccgatgaatagaaaataaatagtaatattttgaggttattaataataaaaggaagaagcaataacataacagagttgaaaaaagataacttactttatgtttatgagtgtggcttctgcaatatgcagatatgttaactagtatggtaagcggcaagtagcaagagtatacaagaattgtttcagcggaaacaaatacacacatatcttcattgtttgtccaaaatatgtacccgagtgtgtgatgagatgctcgtgttcatactggttctggagttagtttaatccctacttgtatatgaatttaacct

SEQ ID NO: 264647 - DNA, 375 bp, Glycine max
  unsure (1)..(375): unsure at all n locations
agcntatataccaccagcatcaagtgtttttatggcggttgatggaacctctccaaatgcaagctcttcgcatgacttacggaaaaatcttagagttgaccttagcagaggtatccatagaagccattgcatcactcacccaatactacgaccagcctttgagatgcttcacattcggagacttccaattagtaccaaccattgaagaatttgaggaaattctaggatgtcctctcgggggaagaaaaccatatctttcatccgggtgtctcccctctttgagcagaattgcaactgtggtcaaggattcaacaagaggtttggaccgcataaaatagactcggaacggcatagcgggcctaccacggaggtacc

SEQ ID NO: 264648 - DNA, 458 bp, Glycine max
  unsure (1)..(458): unsure at all n locations
ccaanaaactaagctttaaccccttctaaggataggctcagaatgcacatgtattatcaacaatcaatttaataatgttctttaaacatgcaagacaaaattgattgctataatataaatgagataagggaagagagaaatgcaaactcaatttatattggttcggccacttcccgtgcctacgttcagtcctcaagcaacccacttgagatttttcactctctttgtaaaaatccttttacaaagtctgaaccacacagggacaacccatcccttgtgttcaagaatccttacaacttaagagaccctcggtcccttaatcattctctttgaataagaagaagaagaagaattctctctttaagagaagaatattacaattgaagttccatgaactcttaatagatttgcatgtgtttgcccaagagatgttgagagagcatttggcaatgaagttc

SEQ ID NO: 264649 - DNA, 400 bp, Glycine max
  unsure (1)..(400): unsure at all n locations
agcttgcatccattataagacaattacttgtgtttagaagtatgactggaaatgttagtcagtttgtcagattgattgtgaaggaatgcattgactgtatcccggtgagagtgtgatccttaaattttgagagaaacgactatcatttagtactgatttttgcatgaatctctgaaaaatggactgaatgcatgtaactgatgatgatgaatgccatgtttgattgtgatagccacttagccaaaaaactgaccacgtgcttgaatgatttatcccttgcacccaatttgagctgaaagaattattgattgattgaaccttgagcctatatnagagtatctcctaataccttgtcttatgttgtaggagagcatcattcacagacagctcggttcaaaac

SEQ ID NO: 264650 - DNA, 222 bp, Glycine max
  unsure (1)..(222): unsure at all n locations
acctgccctttngttttgtaatccttaccctccgaagcacaaaaagaggaaaggaatttcctctcaaggaagaaaaaagaggagaggatatttcctatcccatagaaagaaatgaagatgaaaagagatttcctatcatagagtgggagaaagagaaaagatataaacaaaagcccccacccaacaatgggagaaaaagaaaaaatgaaaagaaagaaaagt

SEQ ID NO: 264651 - DNA, 392 bp, Glycine max
  unsure (1)..(392): unsure at all n locations
agcttgttcgcacatcgntcgtgtgtactatattcactctacaaggtttgaagtataggagaccttctatcctatcacgcaacgtggcggacaaaaatgggcagttaacttgaatggccattattgtcaatgcggaaggtattctgtgcttcactatccatgttcacacattattgcagcttgtggttacgtgagcatgaactactaccaatatatagatgttgtctacaccaatgaacacatcttaaaagcatactccgcacagtggtggcctcttgggaatgaagcggcaatttctccttctgatgaggcatggacactaatccctgacccaactacaattcgtgcgacaggtcggncaaaatcaacaaggataacgaatgagatggatt

SEQ ID NO: 264652 - DNA, 407 bp, Glycine max
tgcttttaattattgtgcattatctactgcgcaatagtttatccataaaaaagagctacggcgaaaaataggagatctaccgaacttatcaagaggtgcaacaactgtccctttaagcaacaatgacagctgcataatataaaatatgccagtgagggaggaaaatataggagtacatcttctaggttcaagcactgtgtacgcattcaaacagctgaaagaaattaattaaaagcatgcatatgcaagttcatacagaataagacagacaaacagtttcactccacaagctaaacatacccagataaatgcctcttcccttggggaacttctatatccaccacacagtatatttaccaataaagaagggtccataccgataataaaaagaatgttgacaaaaaacc

SEQ ID NO: 264653 - DNA, 444 bp, Glycine max
agcttgagttggtatcattgttaattgtttctgatgtcaccggagataagaagatactcttaaaaattatgaaagcgggtgaggggtttgatcatcctaacgagggatcccaagtgaaaggtaactcttatctcaattcccaagaacatgatctcggatataatggtggcattttggcaaattataaacaaaataatgttaactaatcataatatcaaatgcatcctaacgttgttaataaatgttttcacttcctgcagtgatatatttgtgtaaaggggaagatggtactgctattgatagcaaatgatcagaggaagaaccttttgagttgacaactcacgaaggcataacgttgtagttgttcatgatcatggagcatgcatatttaatatcagataccaattcttagtgttctctatttaatttcttctgctataattt

SEQ ID NO: 264654 - DNA, 383 bp, Glycine max
  unsure (1)..(383): unsure at all n locations
agaccaattataaatatttagttttaggcttctatgttacatttcacaatntgnttgttttaaaggattgtgatttttaatacaagttactttaattattcaaggctctacgtcaattatatatagccttttcaagcctaagaaaacaatttttggcttaattttgaatttgaaataaaaacttaagatttattaattgtatgaaattggaattatatttccaattatacaataattggttttactattttctggctatgactattagtaaaaaaaaacttgatattcttatctcttaacttgacctagcattttaagacttctaatactagtaaagcttttcctaaaacaanaaaaaaatacactttttcctcaagtcttga

SEQ ID NO: 264655 - DNA, 477 bp, Glycine max
gatcttaagcacctgagctgcagcttttgactttgttcttaaaacttgcttaactcttgattctttggcatcatcaaaataatcttggaagtcattgctttcacattcagtacaaagttgcaacaaactgaacgaaagaactcgcatgaaaaatgaaagtagagctggtaacaagataaaattaacggaacaaggatgttggaaaatagatttactcaatgaataaaatgtaactcctccaaatttgaatataagaaaaaataaactaatatcatgggaatcaaaagaatcattggaaataaaatctgaactaaataaataatatttttgggatgatttcattaaggaaaatgctaatcagtgccttgatgaattaaaaatggaaagttttctattggaagtgtagcagtgaattctcctgagatttccaatgcaacttcaacataatatctaatattaaaaccctacgctctaccg

SEQ ID NO: 264656 - DNA, 435 bp, Glycine max
tcactccacccagatcttgccttcaggttaccattgttaacacagctgacaaccgcgtgaaagatgtgcacccctgatacaatggcgtgttggaatcacgttctattgtatcatacagaggtgcatgcgcttgctcaaaagtctcttgtccaagatcacggatcatttcctctatacgctctccgctgtcttcgtgaaccgtctgagactgagaaacagttggaatgtcggccgattccccatgccatatccattttgtgtaatttggaatgatgccgtaacatatcagatgtgatcggatttcatcaactgactggcgtctaccattaagacaattaacacatgggccaaaataattgcccctcaaactatcagcattaaagtgcgtaaacagtagaaattgtccaccccggtcttatactcatcactgatgcg

SEQ ID NO: 264657 - DNA, 453 bp, Glycine max
  unsure (1)..(453): unsure at all n locations
agcttgcaaaagtttctttgtaaaaatctattatatttgttggacattntcagttaaaactattntcaaagaanaatagttntaagttgttggacactatcttgaagagcaccacatttcaaacttttactagatttacacttatgaaaatctctatcttgcgaaaaagctttcaagttttatctaacacattattcataccccctcttttcttgtgtgttccttgtatttcaggcacaaagcaagatctatggtggagacatcgtgctcacaaccatcgtcatcactgccacatgcgcacgaaggttgggcacttgtgcctttcagtgttttgaagtgacaccaatggtggtgttttgtctccttgtttggtcacaaacaagacaaagacgaagaagaacgtgaacgaaatgacatcatggcatggagtagtagaagctttgcccatctcag

SEQ ID NO: 264658 - DNA, 406 bp, Glycine max
  unsure (1)..(406): unsure at all n locations
tcttagtctcagatgatgcagctgagtatgtagctactttatgcactccgctaatgactatggcatcatttctggcgctaaactgctgagagttggaagccatcttctcaattaaatttctggcttcagcaggagtcatgtcttcaagggctccaccactggcagcatctatcatacttctctccatattattgagtccttcataaaaatattggacaagaagctgctccgaaatctgatggtgagggcaactggcacatagttttttaaatcgctcccagtactcatacaggctctctccactgagttgtctaatacctgagatatctttcctgatggctgtggtcctggaagcanggaaaatattttctaagaatactctctttaggtcatcccacctcgtgat

SEQ ID NO: 264659 - DNA, 438 bp, Glycine max
  unsure (1)..(438): unsure at all n locations
agctncttctatatatagncattgttttctagtattcgttgtctcacgacgattggattcttcattttgatcttcatctaaagtcttgagtttggtggagaacgtcccttctttatgcaaagttcatgctgatagaataacatatcttaaacttcagtagggaagtctcttttttcaccatattaggtctgcaacaatagagcacgcctcttgatgaggaccagtgtctttcagactatgaactttatttattctttatgggactgtgacagatcattggagaatgttgtctgcataaatgaatctcagacatagagtattaatgaaggtattaaatgcactacttaaatggtacatcaaatcgtttgatgagtgcattgcttgagatcttcacacacacaaatatggatcatgatctaataacacatcaaacacaac

SEQ ID NO: 264660 - DNA, 419 bp, Glycine max
actaagctggcataaaatcaactcgtggtacctgttcaattctcccttgattttgcccgacttggagaagcgagtttgagtttgggtttagatatgtcactttgtcccatatgtgtcccgctaaaatccaatggggataagatttggtttcatttttacactcatgttttgtaaatctgaatccaccttgttttcattcctacccgctacggatatcatataataatgtctgaagaagttaatgggtctagctattgcttatgaacttataattgattcatgacatgtcaacaatgggccatgcaaataaattagtggtgcttcaaaaaaactttatcacttttcctttgacttctaattgtaaattggctccaatctaaatgttcatgtaggggcctaaccaatctagatttggatga

SEQ ID NO: 264661 - DNA, 381 bp, Glycine max
agcttgtccattaaaaatagagctttgtaattttgtcatttcatttcctcactaagtaaaatggatcatttttaaggtccaacgccttaaaatggtcacctcttaaagtaaaaaagaatcacttgataaaaaagaactacgtaggtctgattttctcatcccaaaattgacgaatacgtatgagcaaagggaaacacccttgtcgaccacaaaaaaggggaaaaatataaaaagggtataaaaggatataaggacataaaaaggaacgtaaaaatcaaagtcattgtttgcacatttcattaaaggctgccgtcccttggggccgacgtgtggggtgctaataccttccccgtgcgtaaataccactcccgaacctttcac

SEQ ID NO: 264662 - DNA, 447 bp, Glycine max
tattgtgggctgcagcactggttccgcttcctaactttattgaggcggttgccatggcattatcctctagagttttctggagttttagcatggcctccgtgatagaagccatttgatcttttaaggccgatagatcggccatcatctgctcttgcacgccctcttcattatccatttttctggatcgagtgttataggggtgcctttgtgctttcttagttatggtgaattccctaaagatacaaacaacggtgagtatgccaccaaaacatgaatatgcaaatgaatgatcggagcactcggatccaccccaaggtttttttagataacgtgatgagttcagaacttctcgttttataaaaagaacaaagctttatttatccaagagtatacaaaagtgttacaagagaacctatacggttctaattatatgggccatcaaatcta

SEQ ID NO: 264663 - DNA, 240 bp, Glycine max
agctaggaaatacgaggaggatagtgcttgtctacaactaaaagcggacatatagcacaccgaccgtaagggcagaacggagccgcatattcctacagatgtacatgtagcccaaggaatgcaaggaagacatggactgttcatactgcattgcatacatatacagctctgagtatctcaactcgtcctgctctaccttacttaccaaagaggaggtctacaaacgacaaaagacaatgg

SEQ ID NO: 264664 - DNA, 432 bp, Glycine max
  unsure (1)..(432): unsure at all n locations
gattagagggaagaggctnacgcntgttgttatattcactgaataggaaccagcgggaatacatggctagtatggtgaatactgcggttccttcatataacaagacctggtacaagactggttctcttgccatcttcaaaatagaggtttgtaattgactttctcctttttctcttgaccaagcaggggtatatgcctgaaaactataacatgatttacgaccgtgtcaatggttttaatcaatttttatgttacatatacgagttgaatctctcaatttacaaaaataatgaataaaactcaattccatgtcacgcgacagaagaatgactcaaattatagtagttcgaacatgggaataatttctcatacgtaccagcctatttggaccactcgcaaatcataatgaattcgccaaattgatacaccaca

SEQ ID NO: 264665 - DNA, 301 bp, Glycine max
ttcatagcggccctccatgacaggtcattactgacattgttgttcctatacaatgaggagcaactatcttttataatatctgattccttttcgtaaaaatgacagcatgacttactttgacccccctatattttaacttattagcccatcaccttggggtcggcttgtccatgggcctataacacttatgatatataatgaatattttgtcaaaaaaccatacttctgcttaatattgtaagatctacaagactaaaaactaaaggcgatctggacgcttgctgtgagaatacttatcaca

SEQ ID NO: 264666 - DNA, 432 bp, Glycine max
  unsure (1)..(432): unsure at all n locations
agcttnttatgagagcccacaagttgttgatgtatttatggcgggccttactttagaggtttcatgcttaatgtgaaccattgttgcaattgtcgaagtgataagtacgcttgaaaaatttgaggaggatcatgtgtgataaaatgatgccttgtgagttttgggattttgtggatggattgtattattccattcatgctctttcatgtatgatttcacccttgtgctagattactctaggttttgccttgcttatcttctctaggtttcttttagacactagcaaaataagcctacctttcatggatattcattgtcaccctctttgagcctctaacttctttaattttgagctcattacaagccaaaaagtggaaaaccatgttgtcctatacattatggagaaaaggggccttggaattgttttgggag

SEQ ID NO: 264667 - DNA, 422 bp, Glycine max
  unsure (1)..(422): unsure at all n locations
tccaacttgtggcctgtcacaacatcaatcacaacaatttcatcattgntattattattattncgnagatctgttcacaacgacaataataatctaattcttcgaaatcacgagtgaccctaatttgagaattcagaagagagtgaagaaacctggaggaactggcgcgcagtctcggcggtctggccctgagcgacctcgaggaaggaagagaccatgctctgttgctcgttcgcggacagcactccttccattgatgattcttcttccgattccgaaggggttagggttccgatgaagacgaagaagaatatcaggactcctcattaaccagctaacacacgtccttactccactcttccgagtaatgtaacgtctttaggcaatacttntaaatttttttaggttaacatttgggtatt

SEQ ID NO: 264668 - DNA, 445 bp, Glycine max
agcttgtggttgcgccacaacaaagttctgtttctacctgagggagcgacagaaacttgagacttacaatccctctggttatacagaattgtttggtattcatcatcagcatttctagtgaatttcagcatgaagaagtctccattgttagacatgcacaatggtaaaatcattgatttttcttcataaggacaaatattaagatgtaaataactaaaatttattaattgaatccaagacttgtcatctccaaacttcctcatctgccacaagcaaagatgagtgttgctatcttgccaaacacacagcgagtctctaaaaactccaatatttgtatcaaaaaagcaaaaatcgtccggaagaaacagtgatctgcaagtctccttctccaggtcaacagaaataattaccatttcagaatgaatgggttctttttccttaataa

SEQ ID NO: 264669 - DNA, 457 bp, Glycine max
  unsure (1)..(457): unsure at all n locations
taacttaacataattcacatcattntaccaatcattgtgttcatcacttgtcctaaggatttaatcacaaaatcatattctataccttcacattaatcacatgttcataacaaaacatctcaagtacaacacaacatctctcacacacaattcattacccacaatcacgtagcaagtcacaatgatcattacacagacgttatgcaacatatatactaagactcaatcctatattgaatgtggtatcttgtcagtgaaaaataacactagggcacctaggagtacataataaaatacaccacacaatgggtaagcaggtcactcttattaaaagaaatcataaggtgattaattagggttattctgtttagtgtgaatgctctaaccatatgagatcaacatagatttaaaggagcactcaaaccgagtgtatttaccctcaaggcctagactctga

SEQ ID NO: 264670 - DNA, 355 bp, Glycine max
ggctgcagctgttgaagagttttctcttttggaagcctgaccctattactttctctgtgttggggaagatgattgtggaggctggggactatgatggcattatgcacgtgtttcacgagatggagtctgttggggtgcaacctaatttggttgtgtacaataccttgttggaggcaatgggaaaggctgggaagccttggttgcgaggggcctgtttgacgaaatgatcgagttatggattgtgccgaatgagaagactctgactgcggttattaatatataccgcaaggcccggtggtcgcgagatgcttttgagctgtggcatcagatgaaggaaaatggctggcctatggat

SEQ ID NO: 264671 - DNA, 386 bp, Glycine max
tctacaaagtctgcctgactttactttagggactgtattatggtatgtctattgggaataaccatattaatagactatatctgacttgattctatcttggtattcaagtctctaaattcatgggcataagcatctaaatctaatgataaaatatttcaccaggtacatttgggaaacaacattttgttctaaatcctgacaaatacatgttggagcaagtttgttggtggcattacaaatatagtcctaagaagcatgcataagctacgttatgatttaggcagtgtgcatgacaaatattccatattacaccaacagttatagacaacatgtctttcaaaatcataagtcataagaaccttcacaaaggtctacaacagtgaaag

SEQ ID NO: 264672 - DNA, 430 bp, Glycine max
  unsure (1)..(430): unsure at all n locations
agctcgcgcttagtgaaatgattattctttatataatgncttccaagntattatttagttccttcctcaacaaatcgaaacccttatatctagcattcaaggataagctgatatactccaatgtacaaatcaaaaagcaagttccacatgatatatgcatgaaaaaaagagatagcaaaaattaaaactgggttgcctcccaggaagcgcttctttaacgtcattagcttgacgcatttacctcactgggtgatcttatgttttggttcataccgtcagaacctcttgacctccttttattaccagtaagcaaacatttggttcaggagcaggcttgtctttaaaaataaatcaaaatcaagtttctgatcttcaaaaccaaactacagctttctcctacccatatcaactatgcagctggcagtcaaca

SEQ ID NO: 264673 - DNA, 320 bp, Glycine max
taactagctctcccatttctaaaaagttttaattattgtataagccaccctttggatttcagaccacttaattttgaataaatgtttcggaaaaaattcagccgagcgcttcgtaacgtactgggtgatttccgaaaattcaaccgtcttcgtcgtcccgtcgtcttcgcagtcttcggcttaaccggtagttccaaatcaactttaattttttatgtccctaaggcctatttgtcgcttactttttttcgtatttttcgaccctttgaggctttatattcttagcatttttccaatcaaataataatttcccgtcttga

SEQ ID NO: 264674 - DNA, 467 bp, Glycine max
  unsure (1)..(467): unsure at all n locations
tatanaacactcacgcttaagggtgaaaccttgcataacgtgtatgaatgacttttattggatttcaattataatctccttagagtataagaattatgagatgcataaataggtttttaaggttatgttaggatttaagtatgaattccttgcactctaatcgatgttattgaattggtattgactcaattagagattgggaggacttgtgatcatcgtgcaaatggtgtgctggaaactttggttggtgtgtacttgtatgatgaatttcaaaattattagtgtgactaaggattatgaaatccttgagggggagcacatanaccacggcatgagtgcatttgtaaaaactagaattcaactctagtattattaaagactcattatgatgaacaatgaataaagacttaacaagagtgcgaatcttaatggacttaatacactatacataccctttgcatattgga

SEQ ID NO: 264675 - DNA, 398 bp, Glycine max
acaaggagagcgactttatactactctaaaggcaagcggaaccccgtgagaagagaagctagagcttaccttcacaccccctataatatccaagctcactccgatgacgagcaacatgaatagtccaataaaacgtccttagtacaaaaactactcaagaagccccataatacaggggtgaaacgctatactactagactggccaagagacaaggctcaaacgaaggaaaaacccatcttcagactacaaagataggcgggctcatacttaggccattggctcgaaatctaccctagtgctcatgagaaccctagggccgtcccttggatctctagcccaaactagatggagtcttctacccaatggccttgcgggggaagatgggaacactatacca

SEQ ID NO: 264676 - DNA, 442 bp, Glycine max
  unsure (1)..(442): unsure at all n locations
agcttctttgagataacttccttgagattctttgcttatctacacacacnccctctcataactaagctcacctccttgagaagcttccttaagaagattcctaaagaagctagagcttatctacacacacatctctaatagctaagctcacctccttgagatgagaagctagagcttagctacacaccccctataatagctaagctcacccccatgactaaaaaagatgataatacaaaataaaaaagtccttactacaaagactactcaaaatgccccgaaatacaaggctaaaaccctatactactagaatggccaaaatacaaggcccaaacgaaggaaaaacctattctaatatttacaaagataagcgggctcatacttagcccatgggctcaaaatataccctaaggctcatgagaaccctaggccttcccttgga

SEQ ID NO: 264677 - DNA, 455 bp, Glycine max
ctataacactcagctttcaaatatgcaaacaattcaattccattcgtcatgattctaccttacacaatgaacaatacagtggaggcagaaatctttgccaagattattcaattcccatagttttttctaccctcatacctcaacaaaatcctttctgttccgatttggtaaccattggatcgccttgaaaattttactggaggttcctaatacagaaatctaaattctgaccgttgggatctgctagagaatgtctagaacacgtgatgtactacctgtcccgtgacagcagaaactatcattgcgtaaccatttttttctgcataatttggccgtttagctgcacaatttgacagctttttctgcataattctgccgattttgaaatacagcttgcatgcatccaatcttactcaaagtggatcctacaagacctataccatgtacacatcatg

SEQ ID NO: 264678 - DNA, 395 bp, Glycine max
agcttgtagggttaaagtctcacgattgttacttgctcatgcaacaattgttagccgtggctatacgagacatcttgccaaacaaagtcaggttagcgataactcgcctatgctttttcttccatgctatatgtagcaaagtcattgatccagtcatgtttgatgagttggaaaatgaggccgcaattatactgtgccacttggagatatatttcccccctgctttctttgacataatgattcacttgattgtgcatctggccagagaaatcaaatgttgtggtcctgtttatatatggtggatgtaccaggttgagcgatacatgaagatcttaaaagggtatacaaagaatctatatcgtccagaagcatctattgttgagaggtacattgca

SEQ ID NO: 264679 - DNA, 384 bp, Glycine max
tctcccagtcctaaatgacatttcaagctagtattatctcactttaacctccatttaccacagaattcagacttagctttccaactctcaaagtctcactcttttttcactcataacattacaatctcactttctcaccctaaggtgactctacatttcatctctaacagttttccatgggcaatttccgcatataaacattacaaacatcatcacaaaaaccctaaaacagtatgggtatgtttaactcatcccaacatggcgatatcaacaaggtttcagcaaatgtcttcacaaataatcatcacacagcataaaccttgcaagacaaccatcatattccaaaaccctaccccaatataaaggaaaagaagcccccaacct

SEQ ID NO: 264680 - DNA, 55 bp, Glycine max
agcttagctcagcttatcatcctcaaatatattttctcactgaacgaaccattca

SEQ ID NO: 264681 - DNA, 363 bp, Glycine max
tttaacctgacatgggaaacctattgacgggttgatttgtcctcatgcttacttaagagagacacacagctggcgcaaatctaaactccgatatctcatgggtgggatggatgaacgcatgaaggacagcatatgacacttctggtaatttaataatgcagggcctcgggacattgctcctttttagaccaacgtctggggtagcaaaggccccaacatatgtatgtaaaacggtgactccgaccttacattgatttgtctatagaggggatcaagacagaacccctatgcataatgcatatgcccaatgctctataccgcgatgtccataggacgaccatattcacagacaaatataagcca

SEQ ID NO: 264682 - DNA, 450 bp, Glycine max
  unsure (1)..(450): unsure at all n locations
agcttcaactgcaagcattatgctatgtttgtcttgcancacgntgatattcgattcacaacctatcgaattggatgacattctgcttaccctctcttcttcacaaaaatcaacaatttatattctggcaaccgcgtactttcggcttggtgtatgactgggcttctaagcaataaaacatatttgagatacatatgtctcttgaacaacctcattatattttgcccacttcgtgtttctcagcttttatccctgagcttatcttcttgtggaaatgaaaactacttgctccaactgtgttgagcccatcatataaaccttcaacttctaatatatagaaccaaagtatgcaatatataaacacttttgcatagagtaatacattgatactttcatcgcgtacatacatatatttatctacctctatcttctatatatccatatctaacc

SEQ ID NO: 264683 - DNA, 463 bp, Glycine max
  unsure (1)..(463): unsure at all n locations
gcattcggaccttaaaactcagcttaagatgagcggtcatccttgcagcccataattcgttctttctaccatcaaaaattggtggcgaacctgttgtgtatgatgattctccctccattgcgatctctcttaactcacagatcccttaaagataacagctctagatacaaatttgctgttttttgttaataacagcaagcagaaatattaaagaatgaaagggagcgtaaagaaagaaattgagactacaaaggcttgttttattctgatatgaaacaacatatttaaaaacatgaaaaatatagtaactgctaacaaaaagataacaccactgacagatcatgcctagagaataggatcaaaactgctttattctatcagtcaacatgactnttatntttcctaaaaaatagcataaaaatcttatctactataatctttaggcagttccaacagtcaaatc

SEQ ID NO: 264684 - DNA, 399 bp, Glycine max
  unsure (1)..(399): unsure at all n locations
agcttnctcagcttggatggctcttttcttttgttctactctgtcatgcatcactgcttctagatcagcttcaaatccttgtgcttgtttctccatttactcctctaatcctctgatatggcttttaagtgccttaatggtagccagagaatttgagaagtcttctgattggtccttgagttgatcttccacattcttgatgtgggtttcaatggccattattgtttcaggaggagatgaacattcatactgcattttcaactcgttcttgcgatcgctttgctccaccttatatgcaacgccatggctttcctgcttcaatatctcatagtccagtgcaagctggtccatcctgatctctaactcatctttgggtgtcctatcatttctatttcccct

SEQ ID NO: 264685 - DNA, 452 bp, Glycine max
  unsure (1)..(452): unsure at all n locations
taacgttatattagntcatcttcgctagcataattctctattatgagtttacattaagaatatgatacaatatattaacaaaattaagcattcaccttatacaacacacaaaaatattatttatataataattcatacaacaatttgtacaataacatgttttttgtgtccatcaatctcctgcagataatgtattacatgtcataatgatgcaaaaaaatacaaaaataatgttatacgtacaagttattgtatatacacatgcgggcttatagtatggttttattattataattgaaaaaaaaaaatttatcgacaattttattaatttttaatgcaaatatttattatataaaattattgacgaagtaaaatttcaaaatctccattcaacaaaatcggaattaacgaaacgtaatcaaattcatattaggagacttacatctagcatc

SEQ ID NO: 264686 - DNA, 332 bp, Glycine max
  unsure (1)..(332): unsure at all n locations
agcttcttttggaccttgaacaagtctttttctcctctttcagaaccatgctatgtgctcgcgactggtccctntcttcccttcgcaacttgagttcattattgctaccccatagagctccgcgaaatttgttacggccatactcttccttgcgagccctcttggcctctcgttcaagggctcttgcggtaattgcattctcttcttgtaacccggcgcactccttccgaacgtgtgtagcagccaacttgaacttctccttggcgagtattgcctcttctaactcgcttttgagagcttggacttcttcgtcctcttccggagctatcaaa

SEQ ID NO: 264687 - DNA, 407 bp, Glycine max
  unsure (1)..(407): unsure at all n locations
actaagctgagactccaacttctcttaagaacctcntttatttatatcctctatctacaaaaggatgggataatttaccaagccacggaatcaaaatattatgctattattcataaactaattcaagccacacaataggagtaaagaaaaccctctaaatctaagaaagagcaagaaaagttcctcaaacagtatcttaagagtatatgaatttggcacttaataactcctccaaacttagagttttgtttgtcctcaagcataagacataacataaataaataaatagaacaaacgaaacaatactacaatgacatagatgaactaagaataattccatccaaacaaatcagcacatgctccctcttgcacatggaaagaactaaaccaatgatttcaacttaaaa

SEQ ID NO: 264688 - DNA, 444 bp, Glycine max
  unsure (1)..(444): unsure at all n locations
agcttgtaacaacaagatgcaaaacatttcttattacactcggttaaaaggcgaattctgcagccatgggaaggaagattaaagataagcattctgaatcatattggctcaatcatcaaacagagtgcacgaggactctttntagtattattaagtatcatcccctattgtgtcatttcttagaaagacttgcatacaacaggggtggtgatgaaagacatgttacaggttagtgcattatcctcatctctgtacaagttttcctctttgccattttactaatcattaattgatgtagtagtacctaaaatgaattttgtgctctaggctaactggtaagagaaagaatttttatatctaactaatttatatatggaaattgttgagccaaatgaaattatttgaagctttgatcaaacattagcaaaaacaaaggaattttac

SEQ ID NO: 264689 - DNA, 398 bp, Glycine max
  unsure (1)..(398): unsure at all n locations
gaacatgatgatttcagttacttcgtaaagagatncaacaaattcctaagatattaaggaaatcatagaagatcaaacttcaaaccaaagaaaaaaggagaagattcatcttctattcaatttttttttaatgtaatcaaccaggacatctaagagttgattgccagagtttcaagaaaagaatggaaagatctgaaaggaaaacctttaatgataagaaagcaaagaaagcttacatcacttcggaagataacgatatggattcatccgaagactcagaaaatgaagtcgtgaatctaagtcttatggccaaaaattatgaangcaatgaagatgattctttgaagaagagttggtacattgatagcggatgctctaaacacatgacgggagacgca

SEQ ID NO: 264690 - DNA, 395 bp, Glycine max
agcttgcaaccaaacaccctctcttctctctccattaccccacctcccaagacttccctctttgtgatatttgccaagtacgtactcactccttcctacttccttctcaaacaaatatctacatgttctctcaaaagatcattcaacgttaaaacagtaactagtacttaaacatgtgatcggaaattctatccattgagtagtctctatgtataaaaagaaacatctatctcagtctcttacccacgagtctgtgtttataagaagaaaaaaacatgtcagaagaaatcaatctcttacatgaatcttcctacttccagagattagtttgtgtgtccccggcgaataatacccttgaatcttgattttaagaaaaaaagacacagtaatataat

SEQ ID NO: 264691 - DNA, 387 bp, Glycine max
  unsure (1)..(387): unsure at all n locations
gggagaatgtgaatgtatgtatacatgatttttatgatgtcaaagaagaatctaacaaggctgcttcaaatgataagcatttgctttaagaataattcaagattgcttcaacaaacaaagccttgtcttaagattcactaaagaccaagccttgccttaaaacaaagtgctntcaagacatgcaaggctctggtaatcgattaccaggaagtgttatcgattaccacaaaacagggttgagaaatagctgttgaaaaagggtttgaatttgaattttcaacatgttatcgattactagcaacgaaactttggaaattcaaattcaacagtcataacccttcanatataactgggaatcgatacacaacattgattcgtcaccacgga

SEQ ID NO: 264692 - DNA, 333 bp, Glycine max
agctataacctcatcatctctcacagtctttagatttgggagccaatccaatccttgtgttcggactctcaaccacttatgatagccgccgatgatcccattactgcttcccctaagctctctgtcttttcttcacgccgcataccatgccttgcaaactccttggagtacccttgctttgtggtcactgaaaccccgtgcgatgaaaagcgtgatgctttcgtctgatggcactcctctcatggggtagccatgctgtcttatggcgaggacggggatataattaatacaacccctttgtccattcaaggaacatttggacattcttcgcat

SEQ ID NO: 264693 - DNA, 354 bp, Glycine max
  unsure (1)..(354): unsure at all n locations
gttcacgcaactttgccattgttcttccttcccgcgatgcttcttttcatgtgcgcctgagtgggcttatagcctaaaccatacttcccacgatntccttgggtatttatcaggctagttatgccgccgttgtttttcctaaacccattccgggttcataaccgttccccaacataactcgggccatcattaccgctgcatcggacagacaaggctgtccaaagagggagtccacggaggaaatgctgaccacctcanaagactggaaagcagtttctaacgattcttctacggcttccacataaggcatggaggatgggcagcttaccaagatatcttcctcgcctgacacga

SEQ ID NO: 264694 - DNA, 448 bp, Glycine max
  unsure (1)..(448): unsure at all n locations
agctngtgacagtcgtaatttggaccttctccagatggaatttccactatagtaaggtgtgttttagtgaacaacttcaaagtgcttaatgaataagtacttatcttataagcaatgatgtataagttatttttataacatcagaggatatagggttaacttcttttcaaataaactacgagctatttttataagttatacttgcaagttaattgaaataagatgaaaatggcttgtgtcataagtttaaataagctatcgaaagcattttcaaatgaatattaaattttgactattttgagtggatgaattacaggagggtcagtttcactatggaggagggtacttgaacatgaatcctaatatttcttacaacttttggatgagtaaatgacacactttttatcattaaagcttgcagtagaagtagtcatccatcttggagaac

SEQ ID NO: 264695 - DNA, 377 bp, Glycine max
  unsure (1)..(377): unsure at all n locations
gatctatggaacattctcagagagtggnggcaagtttgggagatcttcatcttcaaacacaggaacaaaagggggagaaggtacggatttgtgaggtttcgtggggtggcagatatcaacaggttggaaaggtagcttgataacctggtaattggtgggctgaagctatatgttaatataccaaagtatgacagaagtaacggcccacgagcagagccaagaccaggtcctggaatgcggaacagcagcggagctcaaggaaatcctgcaccacgtcagagtcacatgcaacacctgcaacacagttgaccttcaatgtcttacgcgaaggccctgctcacaaagccgacgagcctatgccaggggcgaggtacagt

SEQ ID NO: 264696 - DNA, 446 bp, Glycine max
  unsure (1)..(446): unsure at all n locations
tcctttgctggattgcctttaaattcactgattctatatgttcgtttgaattgaacatggtgagataggcgcctagaacatccagagcgagctttgttaagggatcatcacgttcagctgcaaccactgaagcccagaaagctttgattggtcactggcaggagatagttaagagccttgggaactttttaaatactttgaaagcaaatcatgttagtccaacctcctttgactttatcatctttttttttctttctaattgatgctttctcatagcaaaattcgctaagaaatgctagttctggctcttcacgaaaacatattaaattacattattatagtgaaatcacaggcttctattgaattttttgtctcctgagttagacatatattttttttctttctaatttccaatattatatatantaaagtggtttgtgttacta

SEQ ID NO: 264697 - DNA, 372 bp, Glycine max
agcttcctaacaaatattgtcgtgcacgtgtttttcttctaataattctgacttaccagcacctcttatccctcttccattcccatctagagcaattccaaacaataagatggaagaagccgaaaatgagatcttgtagatctttaagaaagtagaggtgaacatacctctgctggatgccatccagctaattccaagatttgccaagtttctaaaggagctgtgcacccacaataagaagctcaaaggccatgaaaggattatcatgggcagaaatgtgtcagcattgataggtaaatttgttcctacattcctgagaaatgaaagacccaagactttctgtattccttgcattatgggaacaataatttt

SEQ ID NO: 264698 - DNA, 402 bp, Glycine max
catatagaacatgtttgtttctatggaccaggctgggctgacctattcatttttttgcccctaataaattgcaatacatatctttagacataaaaaagggccttactaattattccgtgttaaggcaataaaaagtcaggactgaccctgggttttggttcgctattggataatgagatcaaaagcaatacttcatagacatcaaataggagagaattaaagactattccgagagaacgtaataaacaagatcatggttctttgtgagtggacgatgcgattaagagtaatgttacaatagggtagtcacaattttgcaacacccaagaaacatgcctcatacattaggaagccacttctatgagtaaggcctcttatgcaagcatcaaatcttcaacatgc

SEQ ID NO: 264699 - DNA, 409 bp, Glycine max
  unsure (1)..(409): unsure at all n locations
agcttaaataccaattaccttataattattattcacttctttaccagattggcatcccccatggtgatgattaattgatagcacaacgtctatgcaatactgtcctacagagaatgaaatatctgcatgttnaggcctcacgttaactggtgaagtcaacatcgagtctattatatcttggaccgacacgctgtgttagcagaactatgagaatgcttttgagtttatcatatatatgacgattatcatgccttcaacacatttctttaaatcctctggatccttaaaatatttgaatgtaactgatggttgtcatactgatccacttgaagatatacttatatgtgggtaaacttctcctaaaatattaagaggcctcacactatgataagaaaaaaatcacattcat

SEQ ID NO: 264700 - DNA, 418 bp, Glycine max
cggccttaaaactcgcttatcaatacctgtatggaatacctgcaggtttttctttattacggcctcaatgacctaagaccctgtaatatattctggatagataaaagctttcggctaaaggtaacaccatacgaaggggctccagttcccacatttcatgacgaaatatgggatcattcgacccacgagaggatctttccccacaatcttggtcgcagaaggatgaaagctctcaaatatagatcaagtatgcgaatacaaacctatgtgtgtccatcaagtatgtgggtgatactagaagctcattcgttaaagtgtcacactaaaacggatgaatctttgcaacaatctgctgatgaaaatatgggcattatgcgaaaccaatcttcggagaatcctattgattttgacgacattg

SEQ ID NO: 264701 - DNA, 434 bp, Glycine max
  unsure (1)..(434): unsure at all n locations
agctntgttgggcaacaatggtggatgattattatagaaagctacgtgagagagggagagaaaaggcttctgaatttttttttcttttggctgagtgaggagagagaacagcttttggttttttttttaaaaaaagggttcttctttttttctattattttattataaactatgccacatgtctccatttgagtggagcaaaaagggcccactttcccttttgactgtgacccatactcagccacaaaagtgagaaaaatctgacctttgaaacgctaaaatcctgcatcggtttgcgtgctgtttctctggttccagttccttgcgtttctctgcgtccgtcggggccagttttcgaaagtaagcaatatatatatcataacgctcagaatagaaccccgagcgtggttcagaggttggtttcgttaaatttt

SEQ ID NO: 264702 - DNA, 412 bp, Glycine max
atttcatgcaagtggaccttcttctatatttatgacttatagcaacctcctatcccccttccattcccacctagagcaattacaaacaaaaagatggaagaagtggaaaaggagatcttggagaccttcagaaaagtagaggtggacatacctctgctagatgccatcaagcagattccaagatatgccaagtttctaaaggagttgtgcacccacaaaaggaagttgaagggcaatgaacggattaacatgggcagaaatgtgtcagcattgataggtaaatccgttcctcacatttatgagaaatgtaaggacccaggtactttctcgataccttgcattattgggaacaataaatttgaaaatgccatgctagaactaagaacatcagttagtgtcatgcctctgtcca

SEQ ID NO: 264703 - DNA, 385 bp, Glycine max
tagcttcttatccaaagcacattcttggttgttgaactccttcttacatggcttattcacttggggatggtgccttccctctcctcttctcctttgccttccgctgcatctccatggtggaaaatcaccattgaagctcaaagatccaacctccatagaagcttcacaataaagctttcatcaagtggtaatcagagcacaagagctttaagtatgtgcttcttaaacctccattaatttttattgctttaccttctcttccattgatgagtcttcatttttctccatgtatctcctgacatgtcttgtgctaaaatgttggtaacatgattctttataagatccccgattaaacttgctatataagcttgatttgattttctat

SEQ ID NO: 264704 - DNA, 324 bp, Glycine max
atgcttggagaaagcgatagaggataatttctttgagctcatcaaagggctgatccaaaggttggtggtggcatgctagaaaaaatctcctgcgacgaatgtgcatgtaattgacgcgaccggaggagatgatattacggttgtgcacgatggcaatcggtggaggaatttggaattgcccatatatgacagtgatgatcctatgggctggttgagaaagatcaagcaatatttccggtacgcatggttagggaagaggacaagctggaggcggtaatggtcgttatggatggtgaagcattgtggtggtctcaatggtaaaaa

SEQ ID NO: 264705 - DNA, 395 bp, Glycine max
  unsure (1)..(395): unsure at all n locations
ctgtaagcactaataaattcttgatcactacctagaaagccttntgcaaaacatgctgtcctaaatgtaagatataccaaaccgttgactgttctaatgtcactgtaagactgtgcacctttggcagtggataacatcattctaaggtaaaacagttcaccagctgnnngtgggacccatatgagactgcctattggattcccttgttttctttgttgccagtatcttttgcgggcgacataaacaaatcttgagatatattgatgaatatgaagatcccgttcataagaacatattgtgttaaaatgcatccaagctgtgaacatgaattctttgattgtgtattttgataagacttcacctatttggtgatcatccgtacagtaaacatgctg

SEQ ID NO: 264706 - DNA, 445 bp, Glycine max
  unsure (1)..(445): unsure at all n locations
agctngnctnttattnnttattctccatgttattttttntctacgacactacccatcatttnttttattatgtcatatattgtaaatatgagtcttcattcttgaatatgaagaattcttttattgtaatgtttcttttatcacacattactttacgtattattacctaatatcctatttttatgttttaaaattattcaaattactaattataatatttattttaggttaatatttaatttttccatcaaattttagcattaatgaattttagaatattaattctgatttgaaatattaattatttattatattgtcaaattaattaatatgtatttttctcttatactgttcagtatttctattcatgtataatttctaataatattcaaatttacacataccctatataatgcatgacaattaaatatcttttgttgattac

SEQ ID NO: 264707 - DNA, 451 bp, Glycine max
  unsure (1)..(451): unsure at all n locations
gacctataaaactcagcttggctgatgagtataaactggttaaatatgactgttcttttgttcttatgactatcatagcccactggtaaaatctatgatgatgctcttgctgactttngtggcaagctgctgcattgtttcttgataaatttccatatttgatatttgtgactttgtttctggataaagttatgcgcggctactaaaaccaagtcaaatggccagttgttcagcccaaaataggcaattgtgaatcaacattcaacgctcattatcttctgaatcattcaatcaagtgttggattgtcattggcgtccatgctctaatagtactgcagtagactaatactactaaatctatcatgtttagattccttggcagttttcagcaattagtattcttcgtatactttgaacaggtaaattttgcttgaccggaaattaatcaatg

SEQ ID NO: 264708 - DNA, 387 bp, Glycine max
agctttacatgcatgtgcacaccatatttactaaacttagatcaactgatgcaatctatttgattgaaaagataatttatactactcttataatgtagtgtacaacttaaaaaaataatataatagaaaatagtgcttaagccattcaagtcaagtcattttgaatctcatcattagtatcatacatctatatgtgtcaaaaagaaggagaaacatgcatggtaatgcttaacacaacaaaacattattagaaaacatgctttctaaaccccaccaaggtaaaaatgttttcatattttatgaaatagcatggctttctatggtggaacaatgatattaatttggtgagtaagtcttgagaatagttagttgagtgtctttctgaat

SEQ ID NO: 264709 - DNA, 446 bp, Glycine max
  unsure (1)..(446): unsure at all n locations
gcttaattacttacactaatattcaaatagtaaacagggattaactcatattatcctagatntaacttcaattaacctaaacatagtcgaaatgaaaaaacacaaagattcttacctaaaacctacgacggaaaaaaaatccaaataggttaaagcaaaaaatgagctcatttgaacactataaattatattaaacaaagatattttttctaacaatgtttcaaacctttatccaacatattgttattggatacttgggaaaatggcaataaaggagagaaataaaacataaagaaattgaattaaatgagagagaagaaaatgtatgtatctaacatgcaacaacagttagttaagatgaagagtatgcatacaaatcaatggaagctcatagagaatccagaggacatgggcgtttcaaacttcggcactaacccgaaccctat

SEQ ID NO: 264710 - DNA, 435 bp, Glycine max
  unsure (1)..(435): unsure at all n locations
agcttcttgcgtagccgctcttggtgctcttaaaatcccaaaaacaaatccctcttattactagctattttgaattctttagttcctgaatgtacaaccttcaaattgttgctcgttcccctcttttttttctgcaaaaaagaaaatctatatcatagaaaacatggatgagatcctatcacaatcaatatcaaagaaaacatggatgaaatcacaatttaaaagcacaactacctatctttcagagtcctttggttaatttgtcttgtctccttacgtggtggggttgtgtttaataatattatactattgccttccaaaaaaaacttatgactgatcctttgttcattaatccaattttgcatgttattgttaaaagatcatgggttctccacctgcctgcactactcctcctcatattcctactnctacttc

SEQ ID NO: 264711 - DNA, 451 bp, Glycine max
  unsure (1)..(451): unsure at all n locations
tagaatatcttagatatgaaatacacaaactttgaatgtattatttttatcgtcgtagcggctataataattttatcctgcttgaataccagtgttttgaactggtaccaaaaaaattgaaacacatttgtaatgtaaaaaaaattacattttaatttaatcatacattattatctataataaaattattaaaatttaaaataattattttaaaaatcatacctaagtaagttttaattggttaatagtataataataatacataatattgtaataaaccatacaattagagcggagtatataaatacaaatataagttgaatataaaagttgaaatatgttaaaaacaaaatctaatattaaaaataatgttccttttacacccccttatctnttatttttttactgaatcctcaattaaatctcttttcatgaatttttcacgctattt

SEQ ID NO: 264712 - DNA, 426 bp, Glycine max
agcttttgcaagctggaatcatttatcctatctccgacagccaatgagtgagtcccgtccaggtagtcccaaagaaaaccggcctcaccgtgataaaaaatgagaaggaggagttgattcctactcgggtgcagaacagttggagagtctgcatcgactatatgaggctgaaccaggttaccaaaaaggaccattttcccctgccattcattgaccagatgcttgaacgcctggtaggtaaatctcactactgtttccttgatggtttttctggttatatgcaaatcactattgttcctgaggatcgggagaagaccacattcacctgcccctttggcacttttgcctataggagtatgtttttcggcctgtgcaatgcccctggtacctttcagccgggcatgaatagtatttttattgattttt

SEQ ID NO: 264713 - DNA, 314 bp, Glycine max
  unsure (1)..(314): unsure at all n locations
tcacttaaaattagtgagaaaaactggttccgtgaagaaaatccaagccgaggcgcttnccgaacgtttccgtgggtgatttcgcgaaggttttcgaccattcttcgacgttcttcattcgttcttcggtcttcaaccggtaagttccctagatcgaacttttcaattcattctatgcacccttagtgggtctcattgtttttacgtgctttcatttacatttttcgtttactttccgtacccccttttgacgtgcttaagccatttatttaagtatttctcgcttaaatctaaaaaaaatacatttccatcga

SEQ ID NO: 264714 - DNA, 416 bp, Glycine max
agctttgaacttataattcatcaatggattgctcggttggtttatgcaagctgcactacttaaggtgacactgctttcatcgagaagtggggaagcacccctgctggacattatagcgtacgctgggtatactttcactggcatatgtttagctgttctcggaagaataatattgggctactcgtactactttttgatgccatggacctgtttatgcatgggagtattcttggtgaaaacaaagaagagagtctcttttgcggaagtcaagagttatgacttaagcagacaccacttattcttgctctttattgctttggatacatccattgtcacatggcttgcaacatactattaatggctcttgagggtgaagttttacactgtactagagcgattctaatgaatttttggtg

SEQ ID NO: 264715 - DNA, 101 bp, Glycine max
attttttcttcaacgccaaaagtttctcataatttctttgctgatgacgacctttttattcataaaggccaacatttcttcccaacttcaatttagcaaaa

SEQ ID NO: 264716 - DNA, 430 bp, Glycine max
agctcggaaaaaaagttccattgtttatgtaagaaactatgtccaaggccttcacgtggacactatgaatgtagttcacttttttgcaaaattttaaggaaggcatgatggagtattctgtcttgaatggatatcaagtcagtttcccaaaaaatgaccatacaaggggttgtgtgtaagacaaaggagtgttcattcacaacatatgtatctagggttggtgagaccactacctttcaattgaaaacactaaaatcgacccacacacgtgccagagttttttaagataaaaatgtcagtccaaagtgggttgcaaaggtgctacttgacaagttcacaacatctgaaaaggttcacaatatgaaagcatgcatttagtacttactccaagtgtgatagtgtcatgaacaacatgtgtgagtattttaat

SEQ ID NO: 264717 - DNA, 404 bp, Glycine max
tgtatggtccatatatatcctctcatcgctgtatctagcattatattagccgccactccttcttgggtgagcccgaaagcaatttttcatctgagagtgaatcctgatgcatgggcctggtcttgggatcattgatcagttaattaattctaggaccgagaaaacattttctaatttcttcaaggtcaatatgacgtagattccttgcacgatcctctataacattattttctctgctcttctccaaatatttcttctttaggcgttggtcttgctggtacttccttagagggtcacctccaattatatatgtacttgccatcattttagcatgagcagatgcctcatcaggggccatctgctcttccatgtactttctttgagtttcacctccaatcacagct

SEQ ID NO: 264718 - DNA, 441 bp, Glycine max
tgcaagctttaggtaggcctccgctgtaataatctatggtcggaatatactgcgccatggcaccggtcacaatcacgtccagatactttgtgtttggccagattcttgtgattatgcggtcccagttttctcccgagcattctttcacaatgaaatcagcgagttctggatttggtgtgaggatttgggtcatgcgttgtttgatggcaaggtcggagattttggggtttagggttccggtggagatgtcgtgggctagttcagcccaattgagctggaggaagcggatggctctgagaaggcccgaggcgaaaacggctccgactctgaggacttggtggcgcatgatgaggccgcacagcatttgggtgtacatgctttggaaggaatcggcgcagaggaatgcttcgtctgggcttgtgtacacgttgaatggatcgt

SEQ ID NO: 264719 - DNA, 464 bp, Glycine max
  unsure (1)..(464): unsure at all n locations
catggtgaatcaaagatgattcacaggggntttatgattacaatgatgataacaaaagatgatgacgaaaaactcaaagatcaatcaaagaacaacttaagtgaatcaagaacaattcaagagttcaagataagaatcaagaagaattcaatacttaagaagaaagtttagagtcaagaatcaagattcatggttcaagatctcaagaatcaagatcaagattcaagactcaagattcatgaatcaagagaaggcttaatcaagataagtatgaaaagttttttctcaaaaattgagtaacacatgatttttctcaaaacatgtttaccaaagagtttttactctctggtaatcgattaccagtagcaaaattgttttgaaaaagttttcacaatgaatttacaatggtgcaattaatttcaaaaagctgtaatcgattacaatggtttcgtaatcgattacca

SEQ ID NO: 264720 - DNA, 415 bp, Glycine max
  unsure (1)..(415): unsure at all n locations
catgcaagcttcacttggntatcagctgcgctaggtttggtgaacttgaacgccagatttgggtggagtgaaaaaagtttcactgagttgcttgtgttattgaagaatatgcttcctgaagagaacattttacccaagagtcactacgaggcaaagaagatattatgtcccgtcggcatggagtaccaaaaaatccatgcatgtcctaatggttgcattatgtacagaaatgagtttgcgaaaatgcgtaactgccccacgtgcggngtatcacgctacaaagtcaatgaccgagaatgcattgatggtgcatccacaagtagtagtcatccaacaaaggtatgttggtatttgccaataataccaaggtttaaaagattgtttgacagtgcatctgatgccanaaacttaagct

SEQ ID NO: 264721 - DNA, 404 bp, Glycine max
gaacaatatacttttccttcatttaactgtctttgggcttggctgccacgctcaacaaaatactttcgacacctactgtacgttgattggaccaatgctgttatgggaatgttgcgacaatcctttaaagccttattgatacattctgagaggttggttgtcatgtggccatatcgacgtccttctctatcataagtcatcgtccatttttcctttgaaatgcgatcaatccatgttgctatggttggactcagttgacaaaatttttctaaattttgataaaaaaatgtgcttgcaaggagtgtaggctacataaaattagttatgaataacaattttaactatatatgaaagttaaataaatgtgaccatcaaatatgaaatcttacccaatttcttcaaca

SEQ ID NO: 264722 - DNA, 457 bp, Glycine max
  unsure (1)..(457): unsure at all n locations
agctngagaagttcacataataacaatactctcgtatttatgatatacttaagtgcgaaggctttcttataatgcttcattgagttctcacaaaacatcatccatgccgcatcctttaagggcaaagcagatctctgatcataaaatgggactacatcttgaagactgtcgtagtacaccaatgccaataactcgtgtatctcacactggaaatatagcaaatgcaagaaagaagttaaatatataaataaacaataattttagcaaggcaatgatgacatgcctcaagattcttagggtgtaagcattcatgtaaatgtcgtaagcatataaagttgcaaatccataacataaatcttgaatattacagcatataaatttttattgcacactttactagccttataaatattatcagacatttaatgtgaccaagtagctaccataaacaatgaat

SEQ ID NO: 264723 - DNA, 319 bp, Glycine max
  unsure (1)..(319): unsure at all n locations
tgggagttangagacatggatagacgattaatctctactggtttgagnggacgaaattgcatagccagcctacacaggatggtggactgcacttataattgccgtttatccttataaatacagacacacacactggagaaaggatgccattatcttattacgacgtatataaattattacactctttgcaaatttataagatatttttatcataaaacctatcattaaatggaaactcttcattatataaattatgtgccccaattaatataaaactgcttaatattctattaaattatttcaaaattgatcaaaatat

SEQ ID NO: 264724 - DNA, 422 bp, Glycine max
agcttgctaacccatggaagctcctaatatctcttacactctttggggggggccattcttggatggccttgattttctcagggtccacttggaccccatttctaccaactacaaaacctaagaaaactatattatctacacaaaacgtacacttctctatatttgcatagagggtgtttttcctaaggactgaaagaacttgtctgagatgtcctaagtgatcatctaggctcctactatacactaaaatatcatcaaaataaaaaactacaattctacctatgaaatcccttaagacatgatgcataagcctcataaaggtgcttggtgcattagtgagcccaaaaggcaccactagccattcatacaaaccaaacttggtcttgaaagcacttttccactcatcacccttttttatcctg

SEQ ID NO: 264725 - DNA, 413 bp, Glycine max
gattctgttaaaacataagcacttttactatgattgaaagctggagttgctgcacatgatgtccaacgttatgtcaaagaataagatcgggctgcacaatgcacaaggcaagataaagtgtcaaatgaagaattgaagctgccggattcaccgatgtcggatacaatgtccaggacatcctgcctgaaaatactggaattgctaaaagcattgaagctgcaggatccaccatgtcggatacaatgtccaggacatcctgcccgaaaatactggagttgctaaaagcattgaagttgcacgatccaccatgtccgatacgatgtccaggacatcttgcccgaaaatactggacatataaatctgttatatcttaacagattattgtgccgttagcaagagattacatgatctat

SEQ ID NO: 264726 - DNA, 456 bp, Glycine max
  unsure (1)..(456): unsure at all n locations
agcttgtaaaatagatatcaaaatttnttttatgtggtcctcacgatagacccagatctttgtaaacaaacaaagtttttcaaatacaaacatcaaattcgaaccttgagtcaatttaaagcacaaaagagaaaataaatatagttaagacacaaaaggctacattggttcatctcaaccactaagactacattcagttcttggtaaaccaccaagttccactaacttcaacaaggtacaagtattaatcactgccacttctaactctacaactcaaactctacaccaagcttgttacaaccagtattgtttgccctaccaagccattgttggctctaatagaaatcaaaagattttntgtttggctttcagactgactaacactccatcatcataaagatgaatatgcaatctcaacacttagtcttttctctcaaggtgctcaagatgatttga

SEQ ID NO: 264727 - DNA, 383 bp, Glycine max
aaactcaagcttagtctcgcatgaggtcctaaaatgattcggaacaaaaacaaattgtatccatttcgtatggctaggtgttgaaagtattatgaatgctcacgtctgtactcaactagatgtaagctatgcagttggaatgttagaatgatatcaaagtaacctggcaatagaactttggaaagttgcaaagaatgttgagatacttactaggaacaaaggatcacatgcctacaaatagaacttttgaccattacgaaagctgaatttgtagcatgttttaaggctacaattaaggctaattggttgtagaactctgtttttggatttggaattgtcgatagtattgccttgtcactcgaaaattattatgataactctat

SEQ ID NO: 264728 - DNA, 353 bp, Glycine max
tcctgaatggcgagggttaccactaaaggagaacccgaatgcaaatatttatccgcgcaattgattctaagattcgggaagccatatgactcgggccttatatacccaccacagtccagagagtttctactgatggtatatcatcaagtgagagcttcgccatataacaacctacacatagatgggttgaacaggatagagaacgagtacactacaacttaatagccagaaacataataacatttaccctacgaatgaatgaatatttcatggtttcaaattgtacgagggttaaagaaatgtgtgacactcgttcattaacacatgaaggaactacgtatgttaaaagatct

SEQ ID NO: 264729 - DNA, 372 bp, Glycine max
  unsure (1)..(372): unsure at all n locations
tccacaanagacaccgtaatcaactggcgatagtctacacacacacctcagggccaaactgtcttctttactaacaacactggtgctccccatggagatacagtgcgtcccacaaaccacttctctaacaacttctctaactgttgcttaagcttggctagcactataggagacatcctataaggggctatggatatggatccagcaccaagtaccaggtctatggaaagctctatctctctctgtcaagcgggagactggaaatatcctcagggaacacttccggaaactctctatcaacagggaggtcacacatggacacctctgtcttacttccaggtagacagaacatgccacttgatatctttttta

SEQ ID NO: 264730 - DNA, 417 bp, Glycine max
  unsure (1)..(417): unsure at all n locations
ngcttgccacctagctcgcccaggttagtctggttgcttcctccaaaagcaacagccttgtggaggaatcttctggagggcccaagtgggcctggttgctatttgcacccccatttttactaagcacacccccctaccttgttttggtgattcttttttcgtaaagttacggaaacttacgaatttcgcaacgatacttgttttctttccgtaatgttacggaaccttgcggattacataatcatcccctttctgacttacggaatgttacggaacctcactaattgtgcaacgatgttttcattatgatttccggtgtgacacggaaccttacggattgtgcatcaatactttcttttgatttacggcatatcccgaaacttcacaaactgcctaatgatgggtgccaagcacctc

SEQ ID NO: 264731 - DNA, 374 bp, Glycine max
cagctttgtcggccttgtggggccacccacattttgcttgggaatgacatccagctgtgaatactgctgggggatgctatgtgtctggaataataacaatttgcaggttgactttaaactatcacaaaagggtctgattctgctggaaggtgtttggatggttgatagcaaagagtggttgtggccaatatttatgctccttgcgatatacaaggtaaaagacagttatggcactctttgagtagaaggaagcttcaaatccaagtggactgctagtgtcttgtaggggaatttaattgttgtagacatccctctgagagaatgcctatcaatcatagttattcagattctaccttataactgaattcaatgat

SEQ ID NO: 264732 - DNA, 420 bp, Glycine max
caaaccaccgcagctgcaacctgcaatactcccccatttttgtcttggggccgaaagagcaaatcgatatcctactaggacgactgagacaactgcggcaaaagaagagggtgagaaagagggagatacccatgctgcgactggcactcttatacggacacagctaccaccaatccccaacaatgtgattgctcaggcaataacaaaactcctccttacacaccacccaggtattcaccaaggccatcgctcaatcaaccacaaagcctgactaccgcactatcaatgacgaagaccacctttagcacaaaccaaaaaaacacctacaacaaggaatcttcgcaacaaaaagccctgaaagcgccaccccaaacctccgtcgcatatgccaaacttgatcccatatccactcaataattc

SEQ ID NO: 264733 - DNA, 455 bp, Glycine max
agcctgcttgagaagactttatacttattgtatctttgagcttcactaaggtccttcaatggtgattttcagccatggagttgctgcggaagataaaggagaagaagagagaggaggcgccatctactatggaataagccatggaaggagaaacttctccaccaagagagtgccttggataaaaagcttagagaggaagcttcaatggaggaagagaatgagggagagagagagagagaaagtggcatggaaaattgaaggaagaaaaagagagaagttgaactttgaagtgtgtctcacaaaactcttattcaacaaagttctgacaagtgttacacatgtttctatctatagcctacgtcactatttgtgaatttcatttccatttcatgtgaatctaagagaaatattctaaggatatgccaaaggcatcttagcatattccaagaatatgc

SEQ ID NO: 264734 - DNA, 410 bp, Glycine max
taaggactcatgaaagcaagcaaccaaagcatgaactcttctcctctcttctccaaaagttcagccacacccaaaaactaaaatggctcagcttttgccttaaatgaggtgaaatcgaagtgtttaacaagtcaagaataggccatggttcaaggggttcaagtatccattggttccaaggcttgcttacctcataatgtcacttcaattttaaacaaatctgatagagggagagagagagagagagagagagcaagagagagggttgaacgtatgatgctaggccatatttggctatttactcttttgaaaatgttgctatagaaggctaagataggattaggtataatgggaaacttctttttaccaaatgaagtaaatctctagctaattatcctagacaatggtgc

SEQ ID NO: 264735 - DNA, 458 bp, Glycine max
  unsure (1)..(458): unsure at all n locations
agctngcacttcttcacttttctcaggaatttcagcctttttcccacttagactttntttctttgggagccaagttatcccttgcgttctagacttcaaccacttgtgatagccgctgatgacatcttctacttcccctaagctccttatcttttcttaccactctattccacgctttatagagtagcctaactgtcttatagagtagcctaactgtcttatggctagcacggggttataattaatacaacccctcgtccctatcaaagggacatttgggaatccctcacacgagcataacactcttgcccctccttccttccaccgtgggaaccatctgatggacgctcccatcatacctgccaagagttctccccaatttgctttacccttttcggagcacatgcaatgactttgtaaaggacaaacagatctaccttcatgatanaagatgtggg

SEQ ID NO: 264736 - DNA, 454 bp, Glycine max
  unsure (1)..(454): unsure at all n locations
aatatgagttattntgatagtaattatatattgaaaatatctttggcttaaatgataagaattgatatttttgttatttatggcttgtaaatgtgaaaatgatggattataagagaaaaaagatcgataaaatataaaaaatatggataagaaagattttcatcatcaggcccaagtccactacaacaactataaaaagggagtcaagccaagcagaaagacacaccatagaaccccctctagcaggggaaattttatcccattctttctttcacccctctcattgtaaagccctcatggccatgagtggctaaacccctagttagggcctgacaggtctaaaagccaaacgatgtatgatgtactcactatttatcaatgcaataccagggggtntctattctattaatctttctgcttttatcttgccatattcantctgatattcttttaa

SEQ ID NO: 264737 - DNA, 429 bp, Glycine max
agcttctacaagaagagatggccaagagaatctatgatggtctactcatcaaaggcaacgaaggatggaggcacatggagctgaattggagcaccttgaagatttgctaaacagctcgcttagcaacacaagctcgctaagctaaaatccatctacataggaaaaaattcgttgagcgcaaatgtttcgcttagtggcaaccttccgcaggaatctttgaaaacattatttacttgtgtaaggggcttcatgcatgttgtaagtaggccttaaaatgtgtgtttaagaggtgattagtggcttagttatcttcttatgcctagctctataaattcatagaagctcctaattctaaggataacaaatggtgaatgaattaagctctgcttagattgagagcatagtttcttcttggtcttgattgaacca

SEQ ID NO: 264738 - DNA, 326 bp, Glycine max
aaatctaaaaaatattttctctaccaatattttaaaaaatacgtctaaaattgaaaacaacacatcaatgcttttgctttttttaagaaataaaaatacataaacaccttaaagtactttcttctctatatattttctaaatcttaatggtaccttaaaactcctaagcgatgaagctaaagagactgctaataattatgaatcacgggttatattagtttctaattcagcgtatcaagaaacagctcgctcataagaaagggatcggttaactgttgcataaaaatttagaatagtgtctaagaacaaaatcagcggtgccatgc

SEQ ID NO: 264739 - DNA, 457 bp, Glycine max
agcttcctcctttcttcaatttccatgggcggttcttccatggacaaaactattggttgtgtcctgatgttgggctgaggcaacatgctgggtgccggcccttctgggatcgggggatagaactcgacatcccttcgagcatagtcttgagggtcttcgtggacctcgtcgggctattggagaggctctctttcaaggacgggagaagcaatatggcccgcatcgtcttgtatgacaggtggtgagtagttgggcggcaatccataagggtaagccgctcggttgtatcccagatgagggttgccgtcgtgccccaacgtgttccttccccgtcctactatgtttgagggaggatggcgcgcggttgccaagagagttgggtctgcttcggcagtcgaactgacagcggcagcggtggccacgtttttcttcatgagctacctcattcctaacatgg

SEQ ID NO: 264740 - DNA, 456 bp, Glycine max
  unsure (1)..(456): unsure at all n locations
tcaagaatcaagatcaagattcaagactcaagagtcattattcaatagaagacttaatcaagataagtatggaaaggttttttcaaaaactgagtagcacatggatttttctcaacatgtttaccaaagagtttttactctctggtaatcgattaccagattggtgtaatcgattaccagtagcaaaatgaatttgaaaaagttttcaaatgaatttacaacgttccaattgatttcaaaaaagttgtaattgattacaatgttttggtaatcgattaccagtgcctttgaacgttgaaattcaaattcaaatgtgaagagtcacatcctttcacataaaagctttgtgtaatcgattacatttgattggtaatcgattaccagtgattgtttctgaataaatcaaaagatgtaactcttcanatgcgttttgacattttcaaattggctttaagt

SEQ ID NO: 264741 - DNA, 465 bp, Glycine max
  unsure (1)..(465): unsure at all n locations
tgagctgcagcttgtccctgaacaatctgtgaaatcaaagctttgttcctgaaaccctctatgaanaattgacagcctcgtctctcccttcctgaaaacccactaaaaactgcctaacctcccctgctgttactccataatttattctgcaataactgcttaaggcagttacatatggtcctaaatcactacagaattcagtacgattaaccctttgtgcctaactagggtttcgaaacatcacaacagagacagaccattgaacaatggattttcatcattaacatacaacagagacataccttcgatggaagcacaaacacgaactccacaaacgcaaactcgacaatgtggttgcagtcacggaagcgcagcccagtttgcgacaaacacgaactcatgcagaaggagaaacaacaataacaccctgtgagtaccctttccgggactctttcatttcctact

SEQ ID NO: 264742 - DNA, 406 bp, Glycine max
  unsure (1)..(406): unsure at all n locations
acgcaccaccatgaatcaagccaaggctagggcgcacgccatcaacggggcaaaacacaccatatgattatgatgatggatggctctaactctacaaagggaaactcatcacttctaaattgagcctttaaaactatcatgacatgtagagaagaatcaaggatttcaagtcacaaaatgtgaagaacttttattttcaaaacaattacccatttcttgaacatatcctataatttatagaaaaacatgcaaattcgtacgtgcacacaaaattgacccaaaatattaaactgaatatccgacgaaactaacaacattaacaaattaacactactaacaacagtaacaatattactcaactcacaaattaacanaaccaacataactattcaaaccaaagaacact

SEQ ID NO: 264743 - DNA, 286 bp, Glycine max
tatatctcgatgcatactgatgatcttgatccctgctactcacttacgaatatcatgctgactatacaacatctaaaaactagacctcccccattgctttcacagcactttatgcacgccagtctgattaatcaagagcgcagcatcataagatatctgcacaatgaaatcatgcctcaccttccttgtatttctgagctctcattgcaaatcccacattgcatggaaataatgggtatatatacattgccttaatgtctgtgccccctacaatggataataatat

SEQ ID NO: 264744 - DNA, 267 bp, Glycine max
gagcgtgtgttgttcttcaacccagcgaaaaagccatgggtgggatatgtgtgagagacaacagattcactatataattgaatagaagaatatagaatatgaggctctttccgccataattcttattaccgcgacgtttgggccatacttatgggtctacatacatagaggcgcggcccggagaaatatatacacatatatatatatacccatatatatatatatctatatagatatataaggagcaagccctatatcgggccagaa

SEQ ID NO: 264745 - DNA, 428 bp, Glycine max
  unsure (1)..(428): unsure at all n locations
agctntgccatcattggcatctttgttaatctcgattaatttgccactttgccttgctgttgaactacatgtgctgcttgcatttataggcttcattagggccggcatgaatgatgatagtaaaaatcaaaccttatgcaaattgccaactgattttgtttcctcgtataacattgaattacattacaatattttacatagtctttaacgcatgcaattcgtgaatgatatcttatttttagaaggaatattcaatcctcagataaaaaatcatgcatgcggtaaattaatcattttagacaaaagatagaagaaagaagagaaaagaaaaagcataaaagtcagaaatattattctaattaagaattgatgaccaatctgctgtgtcaatataatttatttatctntacattggtcttcaattatat

SEQ ID NO: 264746 - DNA, 361 bp, Glycine max
tgcttcccggcgaccgctgcggcggcggcgtatccacctatcgcaccggcaatagcggcggatcggggtccggcggcggccctatatagagctccggtgccgagtccggcgacggcgctgttgacgaggtcatcggtgccccttaagtgggtcatcccactctcgaggccggcgaagatgaggcccaccacgccgagcgagttgccgagtctgcgacccgcgaggccccccgaggtgagtactccgttgagtcggattttgagggagtcggcggactcggcctcgcggaggccctggacggagcccctggcggcgccgggtatggcgccggcgaggtaaccggagccggtgtagtactgga

SEQ ID NO: 264747 - DNA, 422 bp, Glycine max
  unsure (1)..(422): unsure at all n locations
agcttgcctcatagaggtccaggaatgataatgcggccgaaggaactagttccgctcctgagtatgacagtcaccgctttaggagcgctgtacaccagcagcgcttcgaggccatcaagggatggtcatttctccgggaggaaatatgtcgccggtggtgggcatcactggttacccccatggccaagttcgatccagaaatagtcctcgaattttatgccaatgcttagccaacagaggagggcgtgcgtgacatgaggtcctgggtaaggggtcagtggatcccgttcgatgcagatgctatcggccagctcctgngatatccgttagtgctggaagagggccaggagtgcgagtatggccagaggaggaaccggtctgatgggttcgatgaggaggccatcgcccagttgctatgtata

SEQ ID NO: 264748 - DNA, 414 bp, Glycine max
  unsure (1)..(414): unsure at all n locations
ncatcagatgttgcgtttcggtatcggcttctttaacgttagcaagaagctctttgggttcaccatcgactttgtcatatcagcaatagctttcttttcatccttagtcaattgcccagcgtatggatgtccaacaaaggacttggccaattcatgattatgaatcccacagatcaacttcaccatccaaccttcccctccatgcactggtttcccatgaagcttgaagggacaaccacatttcctactcacagtgcctcttctaacgaattctttattcctacacttgtacagaccacttctttcacacccaattaacacaaatgaacttcttcctctgctaccagtatctgtgtaaacctcatacccactgcaacaaatccattttcatgggcaactgttcgagcccactac

SEQ ID NO: 264749 - DNA, 447 bp, Glycine max
  unsure (1)..(447): unsure at all n locations
agcttcangaataatggcctcagcatacttcttatttccagaaggaaattcaataaataggcctcctatttttaatgaagagggttaccactactggaaaacccgtatgcaaatcttgattgaggcaatagacttaaaaatttgggaagccataaaagttggaccttatgtacccaccatggtggctggaaatgcaacaatagaaaaacctacagaagagtggactaaagatgaaagaagattagtgcagtacaatttaaaggctaaaaacatcattacttctaccctaggaatggatgaatattttagggtttcaaattataagagtgttatggatatgtgggacactntacaagttacacttgagggaacaactgatgtcaaacgatctaagataaatactttaactcatgagtatgaattattacgatgaaacaaatgaaagtt

SEQ ID NO: 264750 - DNA, 417 bp, Glycine max
  unsure (1)..(417): unsure at all n locations
tgtactaccatcgaactctgttttatacgtgacgcattaaaaggaagtttctccaaggtggtctttggcatcacatttaaacttgaaccattgccgatgagtaccttatggatgacatggtccatgcatctgacagacacatgtagagctctgttatgctctcttccctcaactggaatctcttcttccgcgaacgcgatatagttattggtagttatgtgattaacaatgccttcaaaaccctcgactaagatgtcgtgtgctacgtgggcttcgttgaggacctttaccaatagtgcacgatgaggctcggagtttatgagcaattcgagcaaagagatccttgttgggggtttattcaattgctcaactactntaaagtcacttcgttggatgagacgaaggaactcatgagcc

SEQ ID NO: 264751 - DNA, 423 bp, Glycine max
actcagcttgtcttgagttgcctagttctttataagctttgaacaacacacttggccttcatttaactgtctttgggcttggcggccacgctcaacaaagtactttcgacacctattgtatgttgatttcaccaatgttgttatgggaatgttgcgacaatcctttaaaaccttattgatacattctgagaggttcgttgtcatgtggccatatcgacgtccttctctatcataagccatcgtccattttttctttgagatgcgatcaatccatgttgttattgctggactcagttcacgaaatctctctaaattttgatcaaaaatgtgcttgcaaggagtgtacgctgcataaaattagttatgaataacaagtttacgtaaaatgaatgtaaataaacatgccatcaatatgaaacttac

SEQ ID NO: 264752 - DNA, 417 bp, Glycine max
  unsure (1)..(417): unsure at all n locations
catttgganaattagttttacccaaaaatgctacccttaaaacaaaaatggcatacaacctcctccaataaatacaaacatcaatgtaaatttagagcaagcttatgcgcatatttccttacgaacattcactcgcacaagatattcttctaactaagaaaaatgcacccatgcacaatcaaggcactttcattacctacattatttgtatgtacttccaaggtgtactacctacaccatatgcatttccttggctaaatttacatacatgcatgctcaaagcctcttggctaccaaaagttgcacacatgcaaactttatgatgaatcttggctatctacacaataaggtgctacatttcatgctttattcaagtgttnttactacctanagccgcatgcaaattcaagtatattt

SEQ ID NO: 264753 - DNA, 416 bp, Glycine max
  unsure (1)..(416): unsure at all n locations
tcannacttgggtacagggaaccatcatagctttgtgactcaagggtgatgatgagaatcataaagtatggacgcgataataaatggaatgccataatttaaaaaaaaaaacgtctatgtagcacgctatgcaaataagatcttttggtattcaacggttgtactaaatacctacagattatcatagttttatagtaacggattcaatttgctgaatgatactaatattcacttggactaataggtcttttgtacaattttttcttggtaaccaccataatagttttctcgtactttgtgtacatgcgatttgatcgatgaagacatttaattttgaatggcgtggttgacggcgtatcgactatagagtcaaaatcccgctaaattcttcctttactgaaactctttatggaata

SEQ ID NO: 264754 - DNA, 483 bp, Glycine max
  unsure (1)..(483): unsure at all n locations
gtcacctgaggcatgcaagcttngagccaaaatcctgactcaccatataccttgactccaggtgagaatgtcaatccttaccctcggaagcaaaaaagaatagaggggaaatttccaatcaaagaaaaagagaaggaaaatttccaatgaaagcaaaaaaagaaaagaaggaaaattccccaatcaaagagtgggagaaagcaaacaaagaaaagaaaggaaattcccaatcaaagaatgggagaaagcaaaaagaaaagaaagaaaattcccaatcaaagaatgggagaaagaaaaaaagagaaaagaaggaaagaaagctcctgatcaaggatcgaaagataacagaagaaatgtgcagagaggtctttggaccggacgatatctgaacaatacagaattgtcaccaaatgaacaaaaaaggaaggaaaggaaaccacgacctataatggtcttctccctttgattgcaaccaaaatcccg

SEQ ID NO: 264755 - DNA, 418 bp, Glycine max
  unsure (1)..(418): unsure at all n locations
tctccctcaattntctataaatagggggagaagtgaagtttatattggttcatccccttaggcacttctctctctttcgaatttgcttggaaaaattgtttctgtgaagaaaattcaagccgaggcgcttccgaaacgtttccgtaacgtttccgtgagaaatttcatgaaggtttcgaccgttcttcaagattcatcgttcgttctttgttttcttcagtcttcaacgggtaagtacctcaaaccaagcttttcaattcattctatgtacccatggtggtccacatttcgcttcatgtatttttattccccttttcatttactttttatacccccttttgacgtgcttaagccatttatttaagtcatttctcgcttaatgtaaaaataaaataaatttccaccgatcgtttgaatt

SEQ ID NO: 264756 - DNA, 406 bp, Glycine max
gctttggataatgatttctatacacaagttactcttcattttgcaactaacaatagactaggtagctgccttgagaagctctcttgagaaaacattcctgagaagctcttttgagaaaacttccttgagaagctagagcttagctacacacaaccctctaataactaagctcaccttctagagaagcttccttgagaagaatcctaaagaagctagagcttagctacacatacctctctaatagctaagctcacctctttgatatgagaagctagagcttacctacacaccccctattatagctaagctcacccgcattcccgaatacatgaaaatacaaaaaaaaagtgcgtactacaaagactactcaaaatgccctaatatacaacgctgaaaccctatatta

SEQ ID NO: 264757 - DNA, 435 bp, Glycine max
agcttcgctgatttaattttcaccgacgatttgatcttagcaagtatgaaaagaggcaaatctgatcatcatgctttgataaatgcaaaaaaaactagggcaaatgaagagggtgagaatgagggagaagcccatgctgtgactgccattcctatacagccaagtttcccaccaacccaacaatgtcattactcagccaataataaaccttctccttacccaccgcccagttatccacaaaggcaatccctaaatcaaccacaaagtttgtctaccgcacttccaatgacgaacaccacctttagcacaaaccaagaacaccaaccaagaaatgaattttgcagctagaaagcctgtagaattcaccccaattccagtgtcctatgctgacttgctcccatatctatttgataattcaatggtagccataacccc

SEQ ID NO: 264758 - DNA, 422 bp, Glycine max
gaaactaagctgcttgggagctttatgaagctggatttgagctttttgttgtccttcaatggcgattttccaccatggagatgtagcggtagacaaaggagaagaggtgaggcgagccgacatccactaaggaataagccatggaagaaggagcttccccaccaagaatgtgccttggataagaagcttggagaggatgcttcaatggaggaaaagaaagagagcgagaaagagagagggggggagcacgaaattgaaggaagaaaagagaaagagaagttgaactttgaagtttgtctcacaagactctcattcatcaaagttaaaacaagtgttacacatgcttctatttatagacaacgttccttgagaagctctcttgagaaaactttcttgagaagctcttttgagaaaacttcctt

SEQ ID NO: 264759 - DNA, 459 bp, Glycine max
  unsure (1)..(459): unsure at all n locations
agcttcagaactcaatntcgattgtctcaatatattacgggattcaatcacacatccgagcaaaacgttattgtcgtttgaattagctcagagcatcagaattcaatctcgattgtctcgatatattacaggtctcaatcagacatccgaggaaaacgttattgtcgtttgaattagctctgagcttcagaattcaatttcgagcgactccatagattacgggactcaatcagaaatccaagcaaaacgttattgtcgtttgaattagcttagagcttcagaattcaatttcgatcgtctcgatatattacaggtctcaataagacatccgagcaaaaatttattgtcgtttgaatttgctcagagcttcaaaattcaatttcgattgtctcaatatattaccggactcaatcagacattcgagctaaacgttattgtcatttgaattagctctgagct

SEQ ID NO: 264760 - DNA, 393 bp, Glycine max
  unsure (1)..(393): unsure at all n locations
ttttttgttcggtattgcctaacaaatttgcaatgtagttcggctatgtttcttcgcgcgagctcaaccgaagatgtatttcggccgacgccggcattttgtcggccaggaaaacattagcccacctcggcaaaaaaaaacatgattcaccggtattgacagaaaaaaatgctggtcttagtctgccaggaaagatgaccgatcgaggtctataaaagaagcatgaccggattacgccgatcgaacatttcctaatagatatcctccaagcattattcagggattgaatggaaaaaacaatagccgacatcggtagttaaatagccgtgactgatanttttcagccaacactgcgcaactttttttacaaacgctggccgaaatattttttac

SEQ ID NO: 264761 - DNA, 447 bp, Glycine max
  unsure (1)..(447): unsure at all n locations
agcttcatgatgaatcaaaaatgattcttatgttgtttgatgataacaatgatgacaaccacagatgatgactaaggtgatgaacaaaaagctccaagatcaaagaaccactcaagtgaatcaaagaacatctcatgagaatcaagaacaagtcaagagttctagaatcaaggagaattccagactcaagaagaaagcctagaatcaagaatcaagattcaagatcaagattcaagactcaagattcaagaatgaagaaaagactcaatcaagataagtattaaaaagttttttcaaaactttgaataccacatgagtttttgacaaaacctttaccanagagtttttactctctggtaatcgattaccatattgttgtaatggattaccagtagcacaatgaggttgaaaaattttcaaactgaattacaacattccaatattttc

SEQ ID NO: 264762 - DNA, 427 bp, Glycine max
ggggtatgaagaagtggtcgatggagcattttttacttttattaaatgcatgacctctccatgttgagaaatcactctctctagatatatcgaagcatactctactacaaaatcatgtgtggttggctagaggagatctatcaaagcaagcacaattaggtatagcagagcgcgccttttgagaatggttaaactaatgagcgttggaggatctcatgcttcttaggactccaacaatccctatgaagaatgtttttaagacattgctgcgaaatgaatctcagacatagagtattaaataaagccttaaatgaaatcttaaatgctctatcaaattataacatatgactgcctccgtctaaaactccaaacgtgggacaatgaattttgctgactgacacaagacaaactttaacttttatttatt

SEQ ID NO: 264763 - DNA, 452 bp, Glycine max
  unsure (1)..(452): unsure at all n locations
agcttcaagaaaaagatggcctcagcatattccttatttccggaagggaattctatcaatagacctccaatctttaatggagagggttaccactactggaaaacccgaatgcaaatttttatcgaggcaatagatctaaatatctgggaagccatagaaatagggccttatatacccaccacagtagaaagagtttcaatagatggtagatcatcaagtgaaagcataaccatagaaaaacctacagatagatggtttgaagaggatagaaaacgagtacaatacaacttaaaagccaaaaacataataacatctaccctaggaatgaatgaatatttcagggtttcaaattgtaagagtgctaaggaaatgtgggacactcttcgattaacacatgaaggaactacatatgttaaaagatctangatagatgcactaactcatgagtatga

SEQ ID NO: 264764 - DNA, 417 bp, Glycine max
  unsure (1)..(417): unsure at all n locations
tctaccaactggtccataaggtcgcctattatgcaaatgtgtacgtattcctaatcgncaccttattcaactggcgatagtctacacacaacctcatggtccaatctttcttctttactaacaacactggtgctccccatggagatacattgcgtctcacaaaccacttctctaacaactcctctaactgtttcttaagcttggctagcactataggagacatcctataaggggctatggatatggatccagcaccaagtaccaggtctatggaaagctctatctctctctctcaagtggtagactggaaatatcctcagggaacacttccggaaactctctaacaacagggaggtcacacatggaaacctttgtctctactctcaggttagacaagatcatgtacacttgagtatc

SEQ ID NO: 264765 - DNA, 421 bp, Glycine max
  unsure (1)..(421): unsure at all n locations
aacagcacaagctatcacagccaagcaaaaacagagcaaaggcagaaaactctgctcaaacaccaaccaaaatcacagcttttctcacttaaagaccacagtaacaattccttcgatccaattcgttaaccgttggatcgactccaaaattntactggaagtctatagtgcataagcctacattgtgaccgttgggatctactagcaaacatccagaactcattctgtactactctttccacagccaaccacacacaagcattttctgcaccaagctaaaatcctgctgcacctattttgacagcaaaattctgcataagtgcagatttcgaaaatcacacttcctctcatccaatcttgcccaaatcaattcctacaagtcccaaatcatgtatcaatcatgtctaaaccaaattcaagc

SEQ ID NO: 264766 - DNA, 378 bp, Glycine max
  unsure (1)..(378): unsure at all n locations
tgcctcanagaggtccaggaaggacaaggcgttcgaatgatctagttccgccccggagtacgacagtcaccgctttatgagcgttgtacaccagcagcgcttcgaagccatcaagggatggtcgtttctccgggagcgacgcgtccagctcatggacgacgagtatactgattttcatgaggaaatagggcgccggcggtgggcaccactggttactcctatggccaagtttgatccagaaatagtccttgaattttatgccaatgcttggccaacagaggagggcgtgcgtgacatgagatcctgcgttagaggtcagtggatcccgttcgatgccgacgctatcagccagctcctgggatatccgatggtgttgga

SEQ ID NO: 264767 - DNA, 447 bp, Glycine max
agcttcaaccactctactaaagcgtttattttgtgtttaattctgcttcctctttcatgaataacgcattgtgcctgtggattttacttacgttggatattattcatattattaaagcattatgaatatgcttggttttaagctgaattgttgaactggaaaccttgctttcattaatgttcttttggttttgatgcagacatacggagatcgaatcgtcctttccttgacgataaaacagaagatgatttctttcaaattgatgtgagatttattgctttactgatttatgtctcctatattctacatttttgaaaccaaaaagaatttctacacccagtggtggtgaatggtgatataccttgggagggaagagagagatatataaatagatgtgcttctgtgaaaaaacaacgttgatgccacatactgttttgatcatttctc

SEQ ID NO: 264768 - DNA, 342 bp, Glycine max
  unsure (1)..(342): unsure at all n locations
ngttaataaatactcgtatcttctcgcaacgttgaatacttgttctttggggcatgtcactcggtttgaaactccctngagactatggttgatcaccatgggggggaggggagttatttatgcacgacagggtgacctcaacacttactgcctacttttcctaactgagagagtgtcatgtggacacgctaacctatttcctcatgaatgataccacattgcatttgagaattgacgccaggtgcatgtatcatattgagcatgattgattggaattatcgaacgttggtgactacttgctgaatgtatgttaaactaatgaatgttcgtgttactactatg

SEQ ID NO: 264769 - DNA, 455 bp, Glycine max
ctgcagctgtgaaaaatcatttgtttctataaaaagaaggtttccacaaacaatacggaaagatagacatgttattgagggcttctgtgcaaatacaaggaaaaatgcaattaccatcttgctcctcttagcctcttcatcgctgtcattaccatcatcaccaatagctttcctggaaaagtacatggcatttttaaatgtcagtacatcaataacaatatgcatatcaggagagtgaaacaacaaaacaaacagatactggacttcaaaccttctttttgtaatgacccgatcatcaagaccagcctcagcatggccatggccatggccgtagtcaggaaccctgctaacaacgtccctcagaaagtcaaagacattatagctttgtacacaatgttttctgcaatttacattctccacttgttagacttgactttatagttcatagtaattat

SEQ ID NO: 264770 - DNA, 416 bp, Glycine max
  unsure (1)..(416): unsure at all n locations
actgaaagatcttatangtgaccatagcagagatatccatagaagccattgcatcactcacccaatactacgaccagcctttgagatgcttcacgttcggagacttccaattagtaccaaccattgaagaatatgaggaaattctaggatgtcctctcggggaaagaaaaccatatctttcctccgggtgtctcccctctttgagcagaattgcaactgtggtcaaggattcagcaagaggtttggaccgcataaaacagactcggaacggcatagcgggcctaccatggaggtacctagaaaacaaggcgaggggtatggccaatcaaggagattgcgtcctgtttatggatgtgttagctttgctaatatttggggtcgtcctctctccaaacgtggatgggttggtggaccta

SEQ ID NO: 264771 - DNA, 286 bp, Glycine max
cactttttgtactacgtggcggtcgggcgacggcgcaaaacaattctccacaatcacaaatcacgtataaaccccccatcccctgtggcccacctcaactgagcacacgtactaccacatagcccatattctcgttcctctcaacgccggggccccatcaatcctcccaatcttccacaacatccaaggaattcaaaatccaagaatcatgaactaacacagccaacaaaatacggcagaggcagaaactctggccaaaacacaaccaacatgacaccgttcacac

SEQ ID NO: 264772 - DNA, 395 bp, Glycine max
  unsure (1)..(395): unsure at all n locations
ttcacttcgntggggttcttcaaaacactactgccagggaaaagagatttcataatatatatgcaaaagagacatcatctggttgagagaaaactaaagaaaccaatcttcatcttgaaaaacatttgcattgcgacccttccacaattgtctagcaggtaataccgaacatttgacctctaaaattcgtgaagtttgaaacgcagccactcagcttcgttgattgtgaagaaattgcagttgacatcaaaatggagctttccccagatgacaaaagcattagagtgtgaatccaagttttgtctactactccaccacacctgcaacacgaagtanagaaggaaaatgacgcttaaagagaaaaagttggtgtgtaaacatcctctataagtgaa

SEQ ID NO: 264773 - DNA, 405 bp, Glycine max
  unsure (1)..(405): unsure at all n locations
tcattcacacggntggtatgcttcaatgcacatttgctatatctcattggaacccaattttcctgtgcggccacatccaacactaagttcaaaataggagtggtcaagcatgttttgatcaaaaaggctaattgctacaagggcaaggatttgttgataaaagaagatgaagatgctccaccaatcacataaatcaaagtccatcctaaaaggctctttaagcatgaattgttgttgctatcattgctccaatgggagcgatagcaatgacaatgacatgcatgttggtggccatgtgcaatgatcacaacggcaatcttgatgaagatgatcatgatagtagtgatgatagaattgaaatatacttgaacgtaataaattagatatatgactttttatttgatg

SEQ ID NO: 264774 - DNA, 452 bp, Glycine max
agctgcttctacaatctctcccttttttatgtatgacaacctaaaatcaagaaacacatacaaactctatcttctaatcgatcactcacttaattccccccctttgttttttgagtttaaacttcacttgaagttaagttatttaattatatgagttcttgattcagtcccaattttttctccccctttggcatcaacaaaaagccaaagtgcgtatagagacattaaatcatacacaaactcataatcatccaagcattttaatccatacaacaagcaaggaggacaataattcatacataaactaagcaaggaagataataattcatccattaactataataaaatgtcagataattagaaagtcatccaagataaccaaattaaaacaactaatttagaaagtaatatactaataagtgtatcaaataagtcataagacatcataacat

SEQ ID NO: 264775 - DNA, 437 bp, Glycine max
tgaaagctcaaaagaagactcaaagcttcattggttgtgtaatgcattgaagaagtcagcatgctcactggatgaagagaaaaaattcaagacatgatatgtaatcaacaaataaaggataagaagaatgttgcagacatgaacatctgcacaatgaacatgacatgaagaacaacattgtttcaacacttagaaaggattttcatcaacaagatgagttcattttgggcattgtatctcgagtttcaaaaatgcaattgatctattcttgatggctatggaaattttgcataaagagctttaaatttcatgaacaagttgtggtctaaatcaacttggatcatggtcaaaattgagcatgaagttgtagacgttgatttgtccggacaacttgatatgtgtgcaggtaattaaaggtttctcgagctatacatatg

SEQ ID NO: 264776 - DNA, 415 bp, Glycine max
agcttatagtggcagaggctcatgaatgggtttctatctctagcaacatttatagaaatgattgatgaaagaatatactctttctagaagcttttatacaaatgcgaaagagtgtattttttcttttaattattcaatttatatttacaaaattttatactaggtatttgagaaattgctaacctttttctctcaagatttaagagagaatgcattgatttttaaatttattattttcattgtaagattttccagaaatagtttcatttgatgtaaatgcaacctaaagaaaacattgtggcaattccaatctgtgaagatgacctataagactagttctgggtgatacatggaagcattatcaggtatccagcttcagtaattttcatgttgtactacattatttacctgacca

SEQ ID NO: 264777 - DNA, 370 bp, Glycine max
  unsure (1)..(370): unsure at all n locations
aaccttttgacaacatcttgctactggtaatcgattaccattttctggttatctattactacagagcacaaactcttcggttaaaggtttttgagaccaaatcatgtgctactcacctcttgaaaaaagctntcaatacttatcttgattgagtcttctcttggttcttgaatctttaatctcgaatcttgatcttgattcttggaacttgaatcttgaaacttgattcttgaaatcaaatctcctttccaaccttgaagcgatcttgattcaatcttgaacttattctttgattcttgagatcatcatctttgttatcatgaagtgctcttgacttttgaccttcgccttcgtcacatctttgtatcat

SEQ ID NO: 264778 - DNA, 458 bp, Glycine max
  unsure (1)..(458): unsure at all n locations
agctttnttaaatgaaaaaaaatatataatttattctataaaaatcacactnttatcaactagtttttttagaaactaatatcaataaaatcaataaatattacataaaagtttaattggttgaactagttaagcaatagttgcttatttagtgtgtttggatacaaataagaattttggggcaaaaaatcatgatataaccgtgaattcaaagaaacaagtgagttgttgtgggtttaagatgaggcttatcatgattttttttcatgatgttgtcaccccaaacacgcacttaagcaacacattatcaagtcatatgctcaaaaaaaaattgttaagtaacgctacttaatgtaaagacaaatatcacaaaaatatttgaattgtaattctaaaatgattgtaagtatgtcttaaaactatcttctgatttaactctgtcaaattgaaaacaaagt

SEQ ID NO: 264779 - DNA, 452 bp, Glycine max
  unsure (1)..(452): unsure at all n locations
agcttgaggccttggatcttctttatattggagtccttggcttcttgaagatcaatggcaacggaatggagatggaagaaagatgattggagatgccacttcaatgagaagatgagtcaagaagaagctcacctccataggaagccatggataagagcttgaaggaaggagaagatgaatgaagggagagggagagaaggagcacaaaattttgtgcctcacatgaggtatgaactttgaactttaattctcaattgatcaaagtttaaaaaatgcacacacatggcctctatttatagcctaagtgtcacacaaaattggagggaaatttgaatttctattcaaatttcacttgaatttgtggagcccaaatttggagccaaaatttcactaattatgaacagtgaattntatctatggttcagcccactaatccaagatgaggtccaaga

SEQ ID NO: 264780 - DNA, 437 bp, Glycine max
tgccacccagctcgcccaggcgagcaaggtgtcttcctttttaatcaaccgccttctggaggaatcttctggagggcccaagtgggcctgggttctatttgcacccccatttttactaaatacacccccagctttttttttggtgcttcttttttcgtaaagttacggaaacttatgaatttcgtaacgatacttgttttctttccgtaatgttacggaaccttgcggattacataatcatcccttttttgacttatggaacgttacggaacctcacgaattgtgcaacgatgcttccattttgattttcggtatgtcacagaaccttacggatggtgcatcaatactttcttttgatttccgacatgtcccggaacttacaaattgcctaatgatgggtgtcaagcaccttacaaggaccaacaaaagttgcatgc

SEQ ID NO: 264781 - DNA, 474 bp, Glycine max
  unsure (1)..(474): unsure at all n locations
cggatccttaagcgacgcggctgcagcttatgctgagatattacaatttatcttctcaacctcagcagcaaaatcaaccacagcagaacaattatgacctctccagcaatagatacaaccctggatggaggaatcaccctaaccttagatggtccagccctcagcaacaacaacagcagcctgctccttccttccaaaatgctgctggcccaagcagaccatacattcctccaccaatccaacaacagcaacaaccccagaaacagccaacagttgaggcccctccacaaccttccctcgaagaacttgtgaggcaaatgactatgcagaacatgcagtttcagcaagagaccagagcctccattcagagcttaaccaatcagatgggacaattggctacccaattgaatcaacaacagtcccagaattctgacaagctgccttctcaagctgtccaaaatcctaanaatgtca

SEQ ID NO: 264782 - DNA, 419 bp, Glycine max
  unsure (1)..(419): unsure at all n locations
cacatacttgtttagggagaatgactgttttcatgttttatgtangaagagaaactacaacaaatttggacaaagtgaaccttccagcataagacaacacattcactctccaattattaagatgttgatgggtgtcataccctaatttcgcccggggacctttgcttgatgacatgcgacctttgtttggtccttgtaaggtgcttggcacccatcattaggcaatttgtgaaatttcgggacatgccggaaaacaaaagaaaatattgatgcacaatccgtaaagttccgtggcacaccggaaatcaaatggaggcatcgttgcacaattagtgaggttccgtaacattccgtaagtcacaaaggggatgattatgtaatccaccacgttccataacattacggacagaaaacaagta

SEQ ID NO: 264783 - DNA, 473 bp, Glycine max
  unsure (1)..(473): unsure at all n locations
ggatccttaagtcaccgcggctgcaagctggcttaagcttggtattttcttttctaangaaaagatccagaatatcaaagatatggaagaaggattctccaccaaccaaccaccactgttcagaggcataaaatatgattactggaaggagcatataatagctcactttgaatccattcatatagatctatggggcgtggtggaaaatgaagattatatttcatacgatgatcatctcaatgaaattcctagaggccaatggacggaggagcaaaaactcatattcctactcaactccaaggcttggatgtgatgttgtgtgctttatcagaagaggagtacactaaggtacacaatttcagaagtgccaaacaaatatgggacactctagttgtaacatacgaaggaacatcacaggtaaagaggaacaaactcagtcttctcactcgtaagtataaaaatttctctatgga

SEQ ID NO: 264784 - DNA, 399 bp, Glycine max
  unsure (1)..(399): unsure at all n locations
cgccaacccatggaagctcctaatatctcccacactntttggtgtgggccattcttggatggccttgattttctcagggtccacttggaccccatttctaccaactacaaaccctaagaaaactatattgtctacacaaaaagtacacttctctatatttgcatagagggtgtttttcctaaggactgaaagaacttgcctgagatgtcctaagtgatcatctatgctcctactatacactaaaatatcatcaaataagcaactacaaatctacctatgaaatcccttaagacatgatgcataagcctcataaaggtgcttggtgcattagtgagcccaaaaggcatcactagccattcatacaaaccaaacttggtcttgaaagcggctttccactca

SEQ ID NO: 264785 - DNA, 456 bp, Glycine max
  unsure (1)..(456): unsure at all n locations
agcttgcatgatttacatctccncctttctcaagcaaattcttcttgatatcatcaaaatcttcatgatttacattctccccctttttgatgatgacaaccacctgtaggttaggagcaacaacaaagaaaatatctatttgcatatagttttactcccccttggttttacattgattgcttatatgagacaaatgaagatttcatatttttcatatataaaaagttgtctcataaaacaatagataatttttcttactattttatcttttatctttctctccccctttgtcaacatcaaaaacaaatcatgaatagagaggagaaagatgttaccacttgttgcaatgtatgagaatcaagtgataccaaaaggcattaaaacaatcattcaatattaatcaagcaaaaacaagtacaataacacatcaatcaaacacaatcaaatacaatcaat

SEQ ID NO: 264786 - DNA, 452 bp, Glycine max
  unsure (1)..(452): unsure at all n locations
tagaatgccagagatacaggaagcaccaacatcaatggtgcagagaggagaagggaccaagagaagagtagtgaagcctgcatacctggttgattacgtgtaaggggcaaaattggaagatcgaactagcgaaatcagcccaaaatcccgcttgtagtgggtgctccctcataggcagtcatgcatatcaaaaccgttattagattccttttggatagaaattatacaaatatgttaaggggaattcttctatatatagctatgtaaataatcaagcaggatatgagaaaaataatattcccttcttaccttggtgtttttcccctttcttttcttcattctggaggccgctgccctcgaagccagctctaggttcttaccctaacaattggtgctctcgtttgtnctcatgggcttccgcaacctcgacgagggccttgctcgtcttgaca

SEQ ID NO: 264787 - DNA, 446 bp, Glycine max
gcttcaccccatagcggctgaatgcactctagtcatgagtgtggacgaagggtctcaaattcgagccttgactatctaccaagcaagcctgggtgatgaattcgacataaatctgcgagatgaaacctctgacaaaggcccaaaacctgtcgaaaatcttgtagccaaaggatcaagctgaatgttttgatgatgccaaagtttcacatgcatttcaaagctttattcaagacaaagaaattaaagatattcaagatggatgatcaagacagtctctagagtcttagaaagggtatattaaataggaagggaattccaattgaagtagcaaaaggtttggccaagaaatttaagttaaaaagtctttttcaacaaatttactctctggtaatcgattaccagaggatgtaatcgattaccagtggccaaaactgatttacaacagc

SEQ ID NO: 264788 - DNA, 442 bp, Glycine max
  unsure (1)..(442): unsure at all n locations
ttggagaaccaagccaatcagaatgctagacgaattatatatgggaatagaggtaacaatggcggtaatgatggaccgaggcagaaccgggttgagggagtaaagctcaatgttcctcccttcaaaggtagaagtgatccagatgcctacctggactgggaaatgaagactgagcacgtatttgcctgcaatgactacactgatgcgcagaaagtcaagctagcagcagctgaattctccgactatgcccttgtttggtggcataaataccaaagagaaatgttgagagaggaacggcgagaggtagatacatggactgagatgaaaagggtgatgagaaaaaggtatgtgcccactagctataacagaaccatgcgacaganactccaagggctgtcccaagggaatttaaccgtggaagatattataaagagatggaaat

SEQ ID NO: 264789 - DNA, 435 bp, Glycine max
  unsure (1)..(435): unsure at all n locations
atacgtttgggcgggtttcgattgaatgagtacgaaagtgaataaataatttgttcattacgaattggtgtgagtatgaccaggaatggtagctaatacaattattcttttctttggttattgagataattttttctccttattacttgcaattgcttttatatatatatatatagagagagagagagagaaatcaaaaacagatattgttaggagatatatcaaatgagttagacacattctttcagttctgaatttgtgattgatttgattattattttatttttagttataaacagttttatttgcgattgatttgattattataagcagttntatttgacccttatgtattttaatgatataataaattaaattttattttaaaacagaatagttcttaaacaatttattttcattcagtcataacatcat

SEQ ID NO: 264790 - DNA, 439 bp, Glycine max
  unsure (1)..(439): unsure at all n locations
tcaacaaataatgaacactcatacttattgganaaatgctaacaatacgtttattgaaatttacaaaaattataagtaaaactcatcagataagaaataaaacttataaaaaattataatttttagtaaattttacaataatggagtagctcataataaaaaatatctttacaaggctatgttttttttaacgttaaatcatgcattttataaggctatgttaaataatggagtttgtttttttccccttccccgtataaataaataattcctatattttttgagcaaatatttcctatattattaagagtaaaaataaataaaaaaacttacggagttggatcgggcatagaagcgcacagtagagagaaaccaaaccanagcgtacaccttcttcctttcttcgtgttccattgcgctaaagttcgctccattctca

SEQ ID NO: 264791 - DNA, 450 bp, Glycine max
  unsure (1)..(450): unsure at all n locations
gcttaaggataggtgcagaatgagcgatcttttatacatangaataacctctcgtatgctaatgccatctttcttgctgtaaacattttggcagcatattcccggcatgccttgccccgccttgctagcctctgtggtccttcctttacaactgcttccagtgcctcctgcaaggactccacattcggcgaaaacatgtaaccatattcatcatcgaccacaatagtccctttaatgcttggaaatcttgatgccaaaagaggcttcccgctcatcattgcctccatcaatgtaaggtcaagcccttgtggtctgagtgtgggattgacaaaaatgtcaatagcattatagaaagctcttaacatggaagggctcatcgatcccagaacaagaacctggctccctaaatctctgtacctgttcntccatggtccagaaccagcaacaatc

SEQ ID NO: 264792 - DNA, 451 bp, Glycine max
  unsure (1)..(451): unsure at all n locations
tgctcagtccctggttatgaagagagctttagagcaacatatattcttgtcaccccgaccaagttaaaacattatcatccataaattcaccatctagagagacttcaaaatgtttgaacaccagagtcattagcattccataagaaacaccagaagtggatttgatggatttagttgccttgatcacgtgattaatgatcaggtgaggcatgttaagggggaatcttcttccataaaaattaaatgaataacaggttatagtcatttacttcttgaaaggttccaactttaggcagcgcaaagtgcatgcaaatctagtggacaatccttccaaaggatttcagagacttggacttgaaactatctctcgttntgcagaactttatcttgacctttgtttttctgagtcccatggtctcaagccaatcttcataaagccttgagctatctt

SEQ ID NO: 264793 - DNA, 456 bp, Glycine max
agcttgtgaagttcttccaaggctatccttatcttatatttgtacacatattggagccattcttgaaaatcatcatgtataggattctaattcctttctcttaattagtcccattttttaagtatttggttctgtttccttgaatgctttaactatttgataaattattcttgcatggataggacataaacaaagtgttactgcaccaaagtccttttcctcttgtgaagtggaatagttgtaggatgaataagtatttcacctatattagatggatggcagagagaattaaggattcttccaaagtaggctctatgttatatgcagggcctgatacattagaagctagattaattctatactttgtagcatgtaattatatatgggaaaaataagatataataggacattgggaatgctgcttagtttcttatcttttctttgattgcccaccct

SEQ ID NO: 264794 - DNA, 465 bp, Glycine max
  unsure (1)..(465): unsure at all n locations
ntttatgttgcacaaaacaaaaagctcttaaataatgaacatttatttttatagcaaggaaacgatattccaagcaataggtggtgggcatgcaccaaaattttttagcatagcagcaacttcattctcacatttgttgaatatcgttcatcataatatgtgcacttgtttaaaaagcatctccccaatacaaagaaataccaatagcattgtttaaaatgctactttcacatttcttagacaacatgaattcaatgccagagcagcaagttcattctgacattctcacagttgttagactaccacaattcaatgctaatgaagcacaagcattcactcaaagacaaatgaaaacattctgacatggctgttggttaatgtagatcctttatagtggcaacgtagagtgtgccattttcagcatgtacttagctaaatcctaacaaacttcatttaataatacaa

SEQ ID NO: 264795 - DNA, 454 bp, Glycine max
tatggtcaactcacaactagacagacgcagagccacactgtatattataatcaaaattaacttttctttccagtacggctatggaactcaatcgttgacaacagagaagagaaaaacaatgagtctgcattgcattggcaccttttcttcctatttttctcctggctctcatcaacccgctcaggaaagttggcgggaccaggctctgtacacaaaccgtcccttcaattgggtttccaattccagaaggtaatttaacgcaactcacatcaccagttttgaggtcataccaacagagcttgctacggttgtgttcgaacaaaaccctgtccccatcatccaaagccaaaggcctcacatatttcaattttcccgatcccatctcatggtgagggatctctgttaatgaaaaaagcttttcccaagaatctctagatccgcacactctcatgac

SEQ ID NO: 264796 - DNA, 459 bp, Glycine max
  unsure (1)..(459): unsure at all n locations
agctttccttgctcatcacattaatcacttttttattctctttggtcaccacctcttcttgctcctcatcctttggctttggcatgatgagctcactgtcagctaaccaataagcctgtttgagaagaggagggtcagaacacaaggactcattttgaggattcaaatggtgtgaccatatgtttagagggtctttgttggttcttggggctgaaagcctcttccttttgctccttgccttccctggcacagcaaagttttgcaaaggtgactcattttgttgttggggtctcttcaatgtgcctgaagaaaggttggtgcttgtgcttgtagtcttgacaccaataggtaccaagacacagcttggagggcttgaagaacagtcttcaacaaactctgaaagccactccaactcaacatccacttcctacacatngtttggtgaaagaatccaaaatt

SEQ ID NO: 264797 - DNA, 450 bp, Glycine max
gacccgtgaaatctaagcttcccaggttatgcgtggtggggacggattcaataaaatcaaacgtgtttagaaagtgggcttcgtgggtaacgagtttggcgggtgcgggtttactcgcatttccacctgtagttatcagagtgaaaactatcctctagccattgcgaaactcgcccggacttagacccactctggtttagcttttctaaatcttcattgactcaacaatgtggtgtttctgtttttgaaggaccagtcagtaggcttgttgaaacagtgagcaaaatgtcttacttagaactctacccatcatggagttcaaaacgtggagatatatgtggggaccataaaatctcataatgttaacattgatataggcttgaatacaagtttgaagaatggacccggtagggtaacaaccttcatataactatttgcaatcacttaaat

SEQ ID NO: 264798 - DNA, 248 bp, Glycine max
taatactaataacaatacaactattacctataacatttccacggcattaagaatgacaggatgaaacgacataaagtgcttagaaagtacacttgcatgtggaatttttttttaaaaaaaaaacccatgttagacagataatgcaaccagattaacacttccaaagaaaaaaacgctctgtaaagacattcttagacaattcaaacattgttatttggctatattagtataaatcatctctaatccat

SEQ ID NO: 264799 - DNA, 426 bp, Glycine max
  unsure (1)..(426): unsure at all n locations
tgcatgaattacatctccccctttctcaagcttattcatcctttatcatcaaaatcttcatgatttacaatgcttatacgatcttctagcattgagaaaatgaaaaatcaagataggttatatgttttacacaaggaaataccatgatgtataagttgggagagttttgaaaattcataccatatactttatataaacaataggaaggacaatttattcacaaccaaaaagcataccttatacctttggaatttcccaaagaagagtttaatgtagaaaaaaggaagttgcaacttactagcagacaataatagggtcatgcaataatcaatcatttgctacatgtagaacaatncataataaggatgaatgaaacatatatcggaaccagacttcctagttcatttgttcaaattaaattatatg

SEQ ID NO: 264800 - DNA, 437 bp, Glycine max
ttgaattaagtactggcgtcagtgacgacggcttaaggtatgtcatatctgcatatgaggtgttctgaagtgaacttttctacctcgtcggctgatatttcttgtaatgaccttgcctcaatctattcggtgaaatagtcgataacgactattaagaactttactattcctggggcctttggtagtggtcccagtatgtccattccctacatggagaaaagccaaggggaactcaagctatggagattgtcgggaggagtgcgcggaatgtatacaaacacctgtcatcgactgcacctcctattgaagtcaaggttgtcggccttgactgttggctaatagtatctggcatgcaccacccttggtgcaacggagcgtcccctaatatacaagctgcatattccttcatgaagctctcgcatgacatagtctatcta

SEQ ID NO: 264801 - DNA, 420 bp, Glycine max
agctttagtcaagaaaagcaacccataaatgactaagaatagggcggtgaaagagcataacaagacttttctaaattagtttaaagatataatcttaggtgaccataatgcatcttttcattaatgaagttagcaaatgggcctaaaagaaatgttataacttgacaagaatacaatatcaacaagtattcgttctacacgaaatcacaagatgacaagagtacaattcaaaatagtggtgtaagtctaagggttgaatctcaacactatgctactgtacatgatgacaatcctcgtgtagcttccatgccttacattggagttattgaagaaatctgggaggctaattatgtaaacattagcgtttgtgttttcaagtgtaaatgggtaaatagcaatatcgatgtgtgaaccaatgat

SEQ ID NO: 264802 - DNA, 349 bp, Glycine max
  unsure (1)..(349): unsure at all n locations
tatatcanaacattgacgccagcagagctatttaatgattaacatgaactaagaactcaacagaagctagagtacctaaaccgggagcaccatgacacacaattagtgtcataggctgttatcatcatcggcacccgactcttcacacaatataatggtggtaagactctcgacacttaagcttttcaaccagagccaaaattatcctccttatactgaaaccaactctctaatatataggaacactgaatgactatcttnttgaaacatcttcattgccacacgaatgggtaagaaaaacaaactggcttttaaacaaaattaactataatgaataaccgatgctaac

SEQ ID NO: 264803 - DNA, 453 bp, Glycine max
agcttcataagtgactcatattgaacaaattttattaactgttggatacatctattttaaaattagaattttttaaattaaaaaatatgattaaagataaatttagacgtctgagccctaaaatttgtttagttactttcaatatatacttttttataaaagcctaatcctcaaaatattttttttataaaaagtgttgaaagtaattaaaaagaattagagttcatctttaatcatattttttaatttaaaaataatagtcaaggaataattttaaaaaataattaatgagaagatcacatataatttgattgattaaaaattaataatatcaaaatctctacagctcacaaactatgtgattcagcttctctattcattgatagttgcataactctcgttgcttgaccctatattgcgatgtttaaaacccatgtcaaggtagataatacg

SEQ ID NO: 264804 - DNA, 423 bp, Glycine max
cttaaatactcacttaaagaaccaatcctagactaggatatggaatgcacttatattattcttttcagccccctgtattgagtctttggcctattatttttcagcgtatacatttgcttgagaaattgcactcgacggcttcggaatttctctttaaccctcttagcgtatgtgttctttaccctaattatagaaattctatgtcgattggatatggattattgagttctatattgggggactgcaaaccttttttctttaaacattctctcctgaattgaccccatttttgcatcaggtggctaggcgcgattactttcgtgacatacatttcccaccttcatatttagttaaagagtgtatgcatcaacagccctccccgtgttatatgtctgaaatacattcagaggactccatgatgca

SEQ ID NO: 264805 - DNA, 247 bp, Glycine max
gtcaaaactgggcaattaacgcgaatgagcaacatcgccaatgccgaaggtaatctacgctacactatacatgatacacaatattacagattggggtacttgagcacgaaccacggccaaattatagatgtggtgtatacaaacgagcacatcataccagcttactatgcacaatggtggcctcttgggaatgaaacagctatacctgcttctgatgacgcatggacacttatccctgcccaactac

SEQ ID NO: 264806 - DNA, 353 bp, Glycine max
  unsure (1)..(353): unsure at all n locations
cgctntcaccgaaccagcactatctctttcacctcgatcaatacaactcgacatgacagaaaccttcccatgggcgcattaagtgcaacattgatgcagcacttttccagcaacaactatgtttcggaattggcctttgtttgaaaaatcacaatggcttatttcttcaagctcaaaacatggcaacatcgaactccaaacccgattgaggcaaaagcatcgggtctaatccaatctctgacttcgttgaaggatctaaattaccagaacattgattttgagcttgacaacaaggtggtggtcgatggcttcgacaatcctagccatgggctctctgactcaatctaactttg

SEQ ID NO: 264807 - DNA, 365 bp, Glycine max
gaatagaagggaaattccaatcaagcaaagagaatgaaaatattcaactgaagaggaacaaagaaaagaaaggaaattctcaatcaaagagtgggagacagaaaaagaaaagatagataactcccacccaaagaatgggagaaagtaaaaagggaaggaagctcctggtcaaagaaaccagagaggtctttggaccagataatatctgaacagtacagaattgtcaccaaatgaacaaaaaggaaggaaaggaaaccacgacctacaatggccttctccctttaattaccaaccaacaatccgtgcgctagcgacccttttttctcgccccgcactaataaaaataaaacaggaacaaggaaagc

SEQ ID NO: 264808 - DNA, 370 bp, Glycine max
tgtagaatggctagacatgatacatgttatggcttgttttgtttcaaggataaaagggatgccccacattatttccatgacactcatgcataaatgacgatttggaaattttatgcaaaactggttatgcatgcacctatgccgacactcaagtgacaaattcttatggtcatgtgatgctagggctcaggattcatttcctctattttagtcaacccaacgtttccaaaatatgagcttttatcaatttgtgcattaatccgagtccattttgggcgtctgggaaaatcttcacagcattcaaccttcaggtgtatacacattttttcaaaaactagttatgatcattgaattttcccaacaatagttg

SEQ ID NO: 264809 - DNA, 322 bp, Glycine max
agcttaggggcaagtacgaacaagtgctatgcccactgtccatcaaccatcgtcccacgtccggctcaagacgttaaagaagcgctactaggaggcagcctagtacctttaaaatttctgctttttattcattcgtctattttcttaagttatatttgaatatgcctagtttatttacaatcctaggaattaggaaaatatacaagcataacgaggggatatttaaatttttgcaaagaaattttgcaaaaaaaaaccagggttagctcgcctgggcgagcatgtctgggtgcagaaacataaaatggggggggggggggct

SEQ ID NO: 264810 - DNA, 407 bp, Glycine max
  unsure (1)..(407): unsure at all n locations
tgcggactataccttngaccaaacacggccgngtttctatctcggtccagatttaaggcaggctgcagcaccggctccgcttccctaactgtacttgaggcgggtgccatggctttatcctctatagttctctagagttttaacataacctccaagatggaagccatttgatcttttaaagccgatagatcggccttcatctgttactgcatgccctcttcattatccatttttctggatcgagtgttataggggtgtgtcgcaacctacccttcggcgggagggcgacgcgtgactcgcgagatgcgtgttccacgaaaggaatacgcgcggagtcgccaccaacgtttatttgaggaaaacgtctgaaaaaccggaaaagacgcgatctacgaacttttaagtga

SEQ ID NO: 264811 - DNA, 480 bp, Glycine max
  unsure (1)..(480): unsure at all n locations
acactantagaaactcaagcttctcccccaattttctataaataggggcgagaagtgaagtatatattgtgttcagccccttaggcacttctgtctctttcgaatttgcttaagaaaattgcttccgtgaagaaaatccaagccgaggcgcttccgtaacgtttccgtgagtgatttcgcgaaggttttcgaccgttcttcgacgntcttcattcgtgcttcatcgctcttcagtcttcaacgggtaaatacctcaaaccaagcttttcgattcattctatgtacccgtggtggtccacattttgtttcatgtatttttattctcgctncatttatcttttatacccccttttgacatgcttaagccatttcattaagtcatttctcgcttaacctaaaaataaaataaatttccaccgatcgcttgaactgtcttatccgctaactcttggtgaaaagaattccgaccgatcggtcgtg

SEQ ID NO: 264812 - DNA, 451 bp, Glycine max
  unsure (1)..(451): unsure at all n locations
gcttgatactcattgattatggcatttcttttctctacttcatagaagaggctagtgttagtgacatgtngtttgattgcaaccatctattttaattctaggtaatgttttactcataatatgtgttgaaaaaggcaccacattggttcatatttgagtattagttaacaaaaatagtgtaatataaaaaatgtgtatgaggaatgagtgacacagaactcaaaaataagaaaattatattttatttaaaaagaataataataaatttattaaattttaagaataaaagagaatagcatatataatgatagaagcctagcatttaaaaaatactacttccagtaacatcaatttgtcaaacaagattcaattaatagaacaagctaaaaaataattgagataattagccaaacatagccttactttatttctttattntcagtttaccgga

SEQ ID NO: 264813 - DNA, 384 bp, Glycine max
cttccagggtgctggaactactccatatggacttgttggggcctatgccagtcgaaagccctggaggatagaggtatgcctatgtccctgcggatgatctctccagaattacctgggtcaactttatcagagaaaaatcagacacttttgaagtattcaaggagctgagtctaagacttcaaacagaataagactgtgtcatcaagagaatcacgagtgaccatggccgagagcttgaacacaccaaggctactgaattctgcacatttgaaggcatcactcatgagttctctgcagccattacaccacaaacagaatggccatatttgaaaggaaaaacaggactttgcaagaggctgctaggggcatgcttcatcccaaaaa

SEQ ID NO: 264814 - DNA, 273 bp, Glycine max
tgtgactcgagccaccaccatagaggcatcagacaaactcagttgtattagaggagactccacataagcattgtgcacaatttccaatccctgaaatgacatttctaaagactcctccattacttcaacataaggagcagacaacggacgactaactagaatgcccttctcgccttatactataacgagctgacctcccaccatggatctcaattttcgatgcaaacatgataggaccaccccagtagaatggatccagggtcgacctaacta

SEQ ID NO: 264815 - DNA, 449 bp, Glycine max
agcttggatgggaaggtgatgggcttcacctctataatatcatagcttttagggtatacattaatgggttacagatcttctatacaatatcagttaggaaaattatgttgaggttatgacaatggttgcgcctctatggtttagagatatcttgtgacatatgtaacattctattgttaccactagagttagattccttagatttagcaaagggttctttgctcctccgggtgtgctatagtgttgatattggactagcttctgagttgcgactgaggtttgagccatttttgtcaccattttttttattagagagaatcgaaaattaatagctattctctcttgtactgctgctgcttttcagacgttgcgattgattagattcagagctttgagtcgtcaatatttgttaatataataaccaagcttcaataggtattggttcttcc

SEQ ID NO: 264816 - DNA, 259 bp, Glycine max
attttttaactcgcaccacaacatagtactgattctagtacctaatgggaagaaccacgccgtgatgatcaaaataagaataccacatatttttgaaaatacctttttgacaaaaaagtgcttgaacgtacttactaaaactctgagccagttactaatactgctgggtgcccactaactcaaaagcgcatactttgtttgtttgtaaatattacaaacggtccctccatactactgatactagagctacgggggtatt

SEQ ID NO: 264817 - DNA, 431 bp, Glycine max
  unsure (1)..(431): unsure at all n locations
agcttgcgccgataccatatggtttatctttcttcaaaacaacgtgacccggactagttttcctatgattttacctacgcgcccgatgaggtttatcactgacatggtaccacattgcatataggattgagtcttagtgtatctattgcataacgctggtgtattgattgatattgattgatttagtgatattgtgtttcgatccttgagtacatgagtgatgtgaaaatgaatgagatgtgttgtgttgtgatgtgatgtttcgtgacaaagtaatggaatgacgtgagctatgtttaagtaagttacattttgtttatatgatatgtatatctacatgttgtcttgtttctctttactagctatgaatgtgataactcactccccgtgtgctatttgtgttnggatcctatgatgatctcgaaccttgt

SEQ ID NO: 264818 - DNA, 437 bp, Glycine max
  unsure (1)..(437): unsure at all n locations
tgctaacccatggaagctcctaatatctcctatactttttggggtgggccattcttggatggccttgattttctcagggtccacttggaccccatttctaccaactacaaaacctaagaaaactatattatctacacaaaaggtacacttctctatatttgcatagagggtgtttttcctaaggactgaaagaacttgtctgagatgtcctaagtgatcatctaggctcctactatacactaaaatatcatcaaaataaacaactacaaatctacctatgaaatcccttaagacatgatgcataagcctcataaaggtgcttggtgcattagtgagcccaaaaggcatcactagccattcatacaaaccaaacttggtcttgaaagcagatttccactcatcaccgcttttcatcctgattnggtgataaccacttt

SEQ ID NO: 264819 - DNA, 455 bp, Glycine max
  unsure (1)..(455): unsure at all n locations
cctgcggcatgcaagcttattgaactgtatgtgggntcatgtttgttattaactatgaccggngagtctatgatgctataacctcttatgatcgtcgcgattggcgcaatgacattcgtgatgacgtatgatatcgacttgaatgatcataacatacatgcattgataaatgacattgcatgtgagtatgcacacaagttggacctgctattaaagtcctcaatctactcgtggaagctatcatggcggtttacgtcgaaagagcctatacaatggatgggtgggccaatccctacataggttaatgtctttgcccgccttactaagactagtcactacccacgcctatcctatttttataaaattacaacttcttcatacggttaattcgagtctccccgaatggccagatcatacagtgtgactatgctaaaggatgttccttactcaatcac

SEQ ID NO: 264820 - DNA, 434 bp, Glycine max
agcctgtgcctcttcacgtccggaatattatatgttcatacagatccaaagacccttaggtgctttgctgatggcttcttcccgttccaagcttcaattggagtcatgtcttttacagacttagttggacatctgttgagtatgtaaacaacattgtatattgcttcagcccacaatgtgttaggtagtcccttctccttgagcatcgatctagccatttccataactgtgcaattctttctctcggacactccattttgttaacgagaatatgcgactgtaagtctgcgctcaatgcctctatcctcacaaaatctttcaaactcgcgagaggtgtactctttgccgcgatcactctttagtactcttatccgcattccactttgatattcagcaacggccttgaactttttgaatactcctaagacttctga

SEQ ID NO: 264821 - DNA, 366 bp, Glycine max
  unsure (1)..(366): unsure at all n locations
ntgaggttgagttgcttgcagctatcgcctgtcactgttataggaaccttctctgtctaactccaagaaaaacaattactagggtttatactttatactaaggcactttctatcgtggacccccccacatgcagaggcttccccatcccaagttcaaccctctcaagaccaagcctcgaccactgcgacagaatcagttatagatccaattgagcagaaaattcaagtagcaaaacctctaaaatcattgtcataccctaatttcgtccggggattattatttgatgctatacaaccttngattggccgcttcgagatacttggtaccctttgttacacaatatgtgaagtcccgagacgtgccga

SEQ ID NO: 264822 - DNA, 423 bp, Glycine max
  unsure (1)..(423): unsure at all n locations
agctngatctcgaatcaatcatgaatctatgtttgtttgctgaaacaaccttgcataatcttgaagcaacgctctaaccttcgaatgttcgctgaagtaaatctcgaacacaaccctgctcgagtattctttgtcatcatcaaaagcatgtattcatacattcacattctcttccttttttatgatgacaatcaatatcaagtgaaatcttttcagcatcatcaacacctgcatgagtcacacttcaaaagattgcccttaaactacttaagcaatcgtgctcatgtccatgttgtgaaagaaattggagcacatactctcttatacattctttgaaaagaaataagatgacactttatagagagatcatctcagatttgttcatagtaatcttcttctcctttcaagaaattcctataatac

SEQ ID NO: 264823 - DNA, 399 bp, Glycine max
  unsure (1)..(399): unsure at all n locations
taacgtactagaatgggcatagatgaacccatctacatttattgtccctccaannngcctccttatcaagggaagcttcccaatgtcttccagcctcaaatcaatacaatgggatgcacaacgagtctaataaacatgtttccttttgcgttctaacaacacacccgctaaaacatagttgccgccattatcagtacaacttaacaacgttctcttctccaacttcctccacaatagcatcaagcaactcaaaaagctttttacctgtcttcacaaaatcagagccatcaatagacttcaaaaacattgtaccagcctgagagttaagcaaaaaattaacgatgcatctttgtgtccgatcaatccatgcattagacataatagtacaattatacttga

SEQ ID NO: 264824 - DNA, 315 bp, Glycine max
gacccacgaacttatatttaagattcttattgccatgaacctatggaataaaaaaaaactcaatggccgaacgtaactgaaattgtggcaaccaaaagtcacccccaatagccaacaagtcagccaccaattggtctcccaaaaggctgatgcctacgttgccaattgggacctaatacaccttgaactaaacctaactaaggcccttctagttgattaacccaaaacatatacttggtcagccaactctacaaggattgtgccattatttacacaaactaaacactctaaaattgaaacaaagtggtgtgattt

SEQ ID NO: 264825 - DNA, 429 bp, Glycine max
  unsure (1)..(429): unsure at all n locations
tgcagcttaaagatggctatattttgttttacataagcacttacacaatgaaggaaagctggagttgctgcacatgatgtccaacgttatgtcaaagaataagatcgggctgcacaatgcacaaggcaagataaagtgtcaaatgaagaattgaagctgcaggattcacgatgtcggatacaatgtccaggacatcctgcctgaaaatactggaattgctaaaagcattgaagctgcaggatccacgatgtcggatacaatgtccaggacatcctgcccgaaaatactggagttgctaaaagcattgaagttgcaggatccacgatgtcggatacgatgtccaggacatcttgcccganaatactggacatataaatctgttatatctctaacagattattgtgcagttagcaagagattagatgatct

SEQ ID NO: 264826 - DNA, 429 bp, Glycine max
ttacgtcgctcattgactccagatagttgctaagaaggacagagatctgtatggtgatctgcagaagaacatagaccacagactcttgcaacaggtgcagatgcagatttctgattcatggcaagctgagttactaggttgaccaatgcatcaagttttccctcaagctttttattttcagtagatgaagatgaatccgtggccacctcatggactcctctaaggacaatagcatcatttcttgcactgaattgttgggagttggaagccatcttctcaatcaaattcctagcctcaacaagagttatatcaccaagagctccaccactggcagcattaatcatactcctctccatgttgttaagaccctcatatcaatattgcagaaggagttgctcagaaatctagtggtgaggagagcttgcatac

SEQ ID NO: 264827 - DNA, 410 bp, Glycine max
  unsure (1)..(410): unsure at all n locations
tttgggtataagaagagagactattgaagttnttgtcatgattgacaaaaggaggaaccaacagcccttgctattcagcacaaatctggttagtcttctcgtcccaattccaataatcgtataccgctacattgttcccactataacaaacatcattacacaagggagacatgttggaagttacatgattaaccaccaggacagtccaagcataccacgaattatcatttcaagtccaacgataataatcaatcttcagcaaataatgccaaagaaaccctatcagcacatgtttagccccttctgaatggattgactgaattacaattacaacaaattttgtctattatgcagggcaatggagcatctcaatcatctgttcccaaggaaaataatgtcaatctttcttc

SEQ ID NO: 264828 - DNA, 402 bp, Glycine max
  unsure (1)..(402): unsure at all n locations
ntgtgtaatcgatctaaactaattggtaatcgattaccattgactgtctctgaataaatcacaagatgtaactcttcaaaaggtttttgactttttcaaattggttttaagtttttctaaaagttataactcttctaaatggttgtcttgaccagacatgaagagtctataaaagcaaggctttgttttgcatttcaagcatcttgaacacttattcaatcaatcctttacaagccttgaatctctttgaacttcttcttcttctttgtgccaaaagctttctaaagttttctggttttctaaaccttgaaaacttgngctattcatcttttcattctcttctccctttgccaaanaagaattcgccaaggactaacccgcctgaattctttntgtgtctct

SEQ ID NO: 264829 - DNA, 421 bp, Glycine max
  unsure (1)..(421): unsure at all n locations
aactttgattggccactctatagttgtgtttcattaactgacgacgcattgccacacaatatcttcaatggtctttccatgtcgtcaaccacatgcaaaccaataacaaaatctcttagtcatatcccatggttggatgcctcaaaacaagcaatgaactccacaaccattgttgaagaagctatgagagtctgtntagcaaacttccaagagatagcttcaatatccaacataaatatgtatccatatgtggagcctttgctatcttgacatccagcaaaattagagtctgagtacccaatgatctccaaattcttagacttctgataagtgagcatgtatattttgttctctttaggtaacccatcacatattttgctgctttcaatgctgcattccaggattacttgaatatctgccc

SEQ ID NO: 264830 - DNA, 444 bp, Glycine max
cgctttctatatactgtaagaatgtggaatgaatttagtatttgcaaccaaaatttggccttcatgatatctgaatatgactctaggtcttgtgctgacaatgatcataaaaacaaataacgagatgaagtttagtaattatttactctagcaatttttgtatggaaagcaattagaacgctctgttacgtgttcctacaaaaaaagcacaattctctaaggattacttgtattctaagccaaatgtatatgaaatgaaagatgttttaaatggggaagggaaaacttgattcttagaccaaaccttgctatttttaaacggagaaggaaatgatgtttcttcatctgacacaaaacatgttggcaaagagaagagggaggggcaaaggcagaaatttctgccgaagttgaaaagaaaaaaaaaaagagaaacttgagataaaa

SEQ ID NO: 264831 - DNA, 439 bp, Glycine max
ttaagaagatcctttatatggtttgcaacaatttgaaatatttatctatctcgaaatgcattgatctttaaaaaaaataatcaatgagttagctgaattgatttagttcttttcttgggagtggtataaagctaatggcggattttgttaccctcttcctggctggcttttaaatctcaatagtttgcctacgaattgtgcaataccaatcattttcttatctagagcaaaagagacataggttgctttggtgtaacccttggcgattgggtgcaagattggtgttaatcatattatttttgttggtttcacggtgttcaaagtgcttcaagtggtacctttttttattcatgcttgcaattcaaagttgcatgctggtgtgcatttgacttccattaaagaaagtagaaattattatgtataggacgggtctttaatt

SEQ ID NO: 264832 - DNA, 227 bp, Glycine max
agcttgtagggacaaatcatctcttcttgtacatttagcatgctcaatccatcatttatgctgctataatcaattgaatcaagtgagctctgaggagatgtggagttattcatggaagtgaaacaaaaatggatttgatggttgtctgataacatgtctgaccaatgattgtccattgtcctggactccatctagttctgggctaagtgtgccttcttttcattact

SEQ ID NO: 264833 - DNA, 426 bp, Glycine max
tcatacaattaatatagaacctatatcctaatgtcatattctatcagagtgttgtgttcccatgtcctctagcatgatgttcttcatagtcatccacctattcatctgctcccctgaacacaacgttcaagatcatcacaggatccaaacacaaacagcaaaccgggagtgagttatcacattcctaactactagagagaaacaagacaacatatagtagccaaatacaatttacttagcatatctcacattatttcatcactttgtcattcaaaattcacttttcaatcatcaatcacaatacacaagaatcacacactccgatcaagacataataacacatcaatttcataataaacaattagcaagcgtatgcaacaattatgctaagactcaagcttatatgcaatgtggtaccatgtcagt

SEQ ID NO: 264834 - DNA, 464 bp, Glycine max
acctgcggcatgcaagctttgatgcaacatctggagaggttaatgaaacaacgagatgatgcgctccatgagaggttggatcaaatggagaatagagatcataatgaagacaaaaggaggagaagagggaatgatggtgttcctagacaaaaccgaattgatggtattaaactcaacattcctccatttaaaggaaagaatgatccggaggcctacttggagtgggagatgaaaatagagcatgttttctcatgcaacaactatgaggaggaccaaaaggtgaagcttgccgccacggagttttccgactatgctcttgtgtggtggaagtgattatgcaagttgaagtggacgtttccattgggaaatacaatgataaggtactttgtgatgttgttcctatggaggccagtcacttacttttggggagaccatggcaatttgattaaagagccaatcatgac

SEQ ID NO: 264835 - DNA, 456 bp, Glycine max
ttgcttctacaataatatatcaagacgatcgaaattgatcaacagaagctctcgagaaattcgaatggtcatgacttttcacacgaatgttcaattcggggacataactcatgtagacgctccaaattgaacagcggaagcattcgagaaatttgaatggtcataacttttcacacgaaagtccgattgggggacataactcatgtagacgctcgaaattgaaaaacgtaagctctcgaaaaattcgaatggtcataacttttcactcggatgtccgattcgtggacataactcatctagacgcttgaaattgaacaatagaagctctcgagaaattcgaatgctcataaatttcactcggatgtccgattcggggcatagtatatcgagacgctcacaattgaatagcggaagctctcgagaaattcgaatggtcattacttttcacacagatgt

SEQ ID NO: 264836 - DNA, 444 bp, Glycine max
  unsure (1)..(444): unsure at all n locations
agctntcggatttgtggttgaacttgtattctataaattttcctttttgtttgctgcctagtatgagcaaagtaaatgtaggatcttatgtaaaccaattagaagtacaactttgcactaaaagttgagttactatttgtgatttgtggctgaagcatttttagaaatgtaagttttagtagtccaaccttgtaactttaaccattttgagcaaatacttccggcatgaggcatccatgtgctactattttcttcccagtttgctaactaattgtagcacttccaaattcctatatatgactgggtgtgaggtcatcttgacctccctttccaatttacttggctgccatccttgagccatgtatttgtcacctagtctccttttcaccttcaccaaatagcttaaacctgaatctactaatgcaaagtgctgaatccaatatt

SEQ ID NO: 264837 - DNA, 442 bp, Glycine max
  unsure (1)..(442): unsure at all n locations
tcgntgcttagctacttgttatcatcaatcatcaataattatattaattactcacaaacgaacatttgtggagagagcaacatttgtatttgtggggagaggagttgctttcagcaaaaaaaaaaaaaaaaaaaaaattcaataatgataaaaagaaaggtactttgaccgaacacgatgctaaagccattcaagcacaaactatatcaaaagcaatgtattccacccaacaaagtcaaggcaaaaactgaaacaacgaactcgctatgctgagatggtgtaaatgatgtgatgcggatgacgcaataaatttattattttcttctaggaaattttcaaaccagtcaactgtcaacatgtttagtaaaaacaattgtacgttgattaaacgtagaaattgtttttgaacatagttacatattactggccactgttcaataca

SEQ ID NO: 264838 - DNA, 455 bp, Glycine max
  unsure (1)..(455): unsure at all n locations
agcttcttactttcagatgacgcatatgattttgtngctaactcatgcactcctctaatgactatagcatcatttctggcttcagcaggagtcatgtctacaagggctccaccactggtagcatctatcatacttctttccatattattgagtccttcataaaaatattggagaagaagctgctccgaaatctgatggtgagggcaactggcacatagtttttaaaatctctcccagtattcgtataggctctctccactgagttgtctaatacctgagatatccttctggatggccgtgggcctaaaagcatgaatttttttttctaagaatactctcttaaggtcatcccacgctcgtgatggaccttggagcaaggtaatacagccagtcctttgccactccctctaaagaatgaggaaaagtcttcaaatatatgtgatcctctctgacat

SEQ ID NO: 264839 - DNA, 391 bp, Glycine max
  unsure (1)..(391): unsure at all n locations
ttntatccaaggctcatctcggtggcgaagcttcttctttcatggcttattccctagtggatggcgccgcctcttacctcttctcctttgtcttccgctgcatctccatggtggaaaatcaccattaaaggacctcattaaagctcaaagatccagcctccatagaagctccacaagcaagcttccatcaagtggtaatcacagcacaagagcttcaagtaggtgctccttaaacctccattaatttttttgctttaccttctcttccattggtggttcttcatttttctccatgtatctcctcacatgtcttgcgctaaatgtttttaacatgattctttagagtttccaccgattaaacttgctatacaagctagatctgattttctat

SEQ ID NO: 264840 - DNA, 443 bp, Glycine max
  unsure (1)..(443): unsure at all n locations
agcttgaatttggtttacacatgattgattttgatttgggactngtaggaattgatttgggcacgattggatgagaggaagtatgattttcgaaatctgcacttatgcagaatttttgctgtgaaattgtgcagcagaattttgcacaagtgcacaaaaatgcttgtgtgtggttggctgtggaaagtctactgcagaatgagttatggatgtttgctagtagatcccaacggtcacaatgtatgcttatgtactagagacttccagtaaaattttggagtcgatccaatggttaacgaattggatcgaaggaattgttactggggtctttaagtgagaaaagctgtgattctggttgatgtgttgagcagagttttctgcctttgctctgttttgcttggctgtgatagcttgtgctgtttgaatgttgttctgcttggatg

SEQ ID NO: 264841 - DNA, 375 bp, Glycine max
cggaccataaatctcaacttctattcaaggaggtgagcttagttatcagtaaggtgtgtgtatctaagctctagcttctcaaggaagttctctcagagaagcttctcaaggaagatttctcataagagcttctgagggaagctacctagtgtataaattgaagcatgtggaacacttgttgtaactctgatgaatgagagtcttgtgagacacatctcacagttgaacttctctccctttttcttcctctaatatcgtgctcccccctctctctttctctccctctgtctttatctccactgaagcatcctcttcaagcttcttattcaacgctcatcttgagggggaagctccctcttccatggcttattccct

SEQ ID NO: 264842 - DNA, 415 bp, Glycine max
ttggcttttacttgcccaactcctttgagtgacatttgtattggttgttatcttgattgatgcatcttagtacatttgttatctgctttgcatcctgcatcatcatggttagtatcaagaaaagtttctaagttaaaaaaatttcttcagaggtaaaaactctctattttaatcgattacagagttgtcgtaatcgattacaacaagctgtttgaagcttaaagagttaagtctcatatcggtttaatcgattacaatagtattttaattgatttcactgttgttagaccatgactgatctttttcaggagtctcaactttaatcaattaccaagtggattaatcgattacttctctctcgttcaagtgttcaaaggtgaactagaacactttaatcgattatattgttcttgag

SEQ ID NO: 264843 - DNA, 413 bp, Glycine max
  unsure (1)..(413): unsure at all n locations
ttgacttcgctcaccactaactactatggaaaaccaacatgcatactctctaaactactccactaatggaatcatctcatgggtcacttaaaaatatattactagaggttgaggatcaaagtcctacacatttctaactcagcttggtcgaaacaagggcttgacatcatctcacaacaacatgtgtattcttgacaagaacatctcatactccctaatcaacacaacaacatcctactaaagaaacatatgaaatggaatcaaatatcttanaattgatttccaccaatgaggaagtaataaaaatagtcattgagaataaggaaatcactcaaattttttttcatctttagaaataagttctcaaagaatttatagaanaggactttatacatcacaactaacttccatat

SEQ ID NO: 264844 - DNA, 448 bp, Glycine max
agcttgcttctacaagctttctctctttgatgatgacaactctgaaatcgagaaacacacacgcacacacacactttttcctaggtgatcactcacataaacttccattctccaccttcgtttatgagtgtatgcttcattcgaaattaagctagctaattacttatgtgagttcttgatttagtccctatttctcttcccctttggcatcaacaaaaagccaaagcgcgtaacaagtatgaaacatacatatactactgattattcacaagacaatcatggaagaatataaaccaatcatgaagcaagaaacatgaatataaaaaccacatagccatataatataattcataattgttcattcggaccatgcagattaagagatactaacttatccaaatgtcataatataaccaaatacacggctagaaaacaaagttctagtaat

SEQ ID NO: 264845 - DNA, 413 bp, Glycine max
  unsure (1)..(413): unsure at all n locations
ttcacaacatatagacctaccaaggcaatatatttaatcttttaaacacaatnccaatcagcaagttctatgtcacaaagtgttgtaacaggatataaaacaggccactgccaatgacaatattatgcatacatacaacatccgcaccaaaattaaaaaaccaaaagtaaccaagaacattgctctctttctctttcatgcatattcacaaacacatggtgctcaccatctagctcaaccaaaatccaagtaaactcaaagtaaataattttagaaatatataaatatgttcaagcaaaagcaaaacatacaggccatgaataaaatcaaaatcaaaagaataataataaaaaacagcgtacgagagacagaccatgaatattacaacctaaccacgagagatagagaaatgg

SEQ ID NO: 264846 - DNA, 181 bp, Glycine max
gcttctagccaaatggacttatcttgtattaattcctttgatagcccttttgagccttggttccctttccttgttttgaagctcactacaagccttaagtgaaaaaccatgatatcaccatatccttaaggaattttggagctttggaattgttttgggaataagtgtgtggggggggggg

SEQ ID NO: 264847 - DNA, 394 bp, Glycine max
tgcttgtggagcttctatggaggatggatctttgagcttaaatgaggtccttcaatggtgattttccaccatggagatgcagcggaagacaaaggagaagaggtgagaggaggcgccatccactaaggaataagccatggaagaaggagcttcgccaccaagatgagccttggataaaaagcttggagaggatgcttcaatggaggaaaagaaagagggagagaaagaaagaggggggagcacaaaattgaaggaagaaaaagggagagaagttgaactttgatttgtgtctcacaagactctcattcatcaaagttacaacaagtgttacacatgcttttatttatagactaagtaggcttccttgagaagatttcttgagaaaacttccttg

SEQ ID NO: 264848 - DNA, 454 bp, Glycine max
  unsure (1)..(454): unsure at all n locations
gcttctagccaaatggacttaccttgaattaattcctttgatagcccttctgagccttgtttccctttccttgttttgaagctcactacaagccttaaatgaaaaaaaccatgatatcaccatatccttaaggaattttggagctttggaattgttttggaaataagtgtggggggtttttgtttcattggataacttgttttgttggctatacttcatgatgtattttgggccatacttgatgtacattgtatattggttaaatgttggacatgctgaatgaaatgttgtttctcaaaggctatagagcaaaaaaaaatcgaaaaaagaaaaagaaaagcaataaagttgagtgaataagatcttaaatggcacaagaatgatgaaactcttggntctactctnntatgtttaaatttatctttacttctttctaatctcttatctttttctt

SEQ ID NO: 264849 - DNA, 444 bp, Glycine max
gtcacctgcggcatgcaagcttgtaattgaaaactgaagctctgagctaattctaacgacaataacttttaactccgatgtccgattgagccctttaatatatcgagacgctcgaaattgaaaacgcaagctctgagaaaagttacacgacaataactttaaactcggatgtcccattgagccctataatatatcgagacgcccaacaaatgaaaacggagcgctctaaaaaagtcaaacgacaataacttttgattcggatcgcccatagtgtcccgtaggatatcgagaccctccgcattgaagacggaagcttttataaaaacctaacaacactaacttttactcggtggtctgatcgaaccgcgaatatttccagacgctgagaattgaaaacgcgatgctttactaaaggcaaacgacataacttttgacctggatgcc

SEQ ID NO: 264850 - DNA, 359 bp, Glycine max
  unsure (1)..(359): unsure at all n locations
tctattntcattacgagcgtctcgatatattacgggattcaatcgtacatccgagtaaaaagttatcgtcatttgattttnctgagagcttcagctgtcaatttcgagcatctcgatatactacaggacacaatcggacatccgagtcaaaagttattgtcgcttgattcttcttatagctttagtttttaatttcgagcgtctcgatatactacgggatacaatccgacattcaagtcaaaagctattgtcgcctgaattttctcagagcatctgtattcaattaccagcgtctccatatattgcgggactcactccgcacatccaccccaaggtcttgtccctgattcccttacagc

SEQ ID NO: 264851 - DNA, 421 bp, Glycine max
  unsure (1)..(421): unsure at all n locations
tatcttgngggtgtatcttcttcttccatggcttattccctattggatggcgcctcctctcacctcttctcctttgtcttccgctgcatctccatggtggaaaatcaccattaaaggacctcattgaagctcaaagatccagcctccatagaagccccacaagcaagcttccatcaagtggtatcagagcacaagagcttcaagtaggtgctccttaaacctccattgattntcagctttaccttctcttccattgttggttcttcatttttctccatgtatctacacacatgtcttgtgctaaatgttgttaacatgattctttagagtttccaccgattaaacttgctatagaagctagattcgattttctatggctcaaatttcttgttcttggtcttgaaccatgaattgtgttgag

SEQ ID NO: 264852 - DNA, 393 bp, Glycine max
  unsure (1)..(393): unsure at all n locations
tcatgagagagtcaaagatcaaattgagaggaagaatactatctatgctatacaagccaacaaagggagaaagaaggttgtcttctaacccggagattgggtttgggtgaacatgagaaaagaaaggtttctggaacaaaggaaatcaaagcttcaaccaaggggagatggaccatttcaagtgcttgaaagaatcaatgacaatgcttacaaagttgatttgccaggtgagtataatgttagttccaccttcaatgtctctaatttatctctttttgatgcagatggagaatccgatttgaggacaaatccttctcaagagggagagaatgatgaggacatgaccntcaccaagggcaaggatcaacttgaaggacttggaggacctattac

SEQ ID NO: 264853 - DNA, 461 bp, Glycine max
  unsure (1)..(461): unsure at all n locations
agctntattaataacatccatacgaggccttatttcttgcgaganaatagctgagttccttttccaccaatgaaatctaaaagccaaaaagagaactccacttgatatcatgaaccaaatgactcgctaagagtttctccaaggaagcctctgtcaacaggataaagacatacgcaaaggccagatgagagataggggatccatgtctactcaaaaggatgagcctatcataagctttctccaagtctatcttgattaccatccaacctttccttccggtcttactcctcatggaatgaaaaatctcttggacaacaatgatattatctccactctgcctggaaggaacaaagcctgattgacagggaccaaccagcctactcatgaagggtctaattctcaaggaaagtagcctggtaatgtcttgtacccccacattacacaaactaatgggccgaaag

SEQ ID NO: 264854 - DNA, 467 bp, Glycine max
actaagcttgcccaagaacttgggttgcaacctagacaggtagccgtatggttttataaccgtcgagccagatggaaaaccaaacaattggagagagattatggtgtactcaaagccaattatgatgctcttaagcttaactttgacaccctcgatcaggacaacgaagccttaccaaagcaggtagaataatactccttccaaaatataaacaaatatcgattatttatctgtcttattaatgatattttctccaaattatattttatttaataagataaaaaaaaaactatgtttaatataattaaaaaaaactatttatattttaattaaaaataatataatttattgaaattaactaatttctttaataagtatgaaatgtgtttggttttcttataattaagatgggagagaatacataggagtataatatttatttcattgtgagtctaattaatttaaat

SEQ ID NO: 264855 - DNA, 402 bp, Glycine max
  unsure (1)..(402): unsure at all n locations
ggaacacgggtaatattacttgaattgccataatactatcttgataatggtcaaaatagtaataagtattgcgcttggcatatcttgtgctaaaagtttttttttttttttttgccttttgctgttaacaaaaaaaatattttggtaatggttggatggataaagtttaatgatgaaaacattcataataatgagtactattaatgcgcatggaaataataataaacaaactgtatgaaataattcatatacttatggaatcaagttaaacaactcttccatgaattaaaaatttcaaacttatttgaaaaaaatggaaaacaattatcaaaaacacaagaaaatatttaagatataagatngttgtttctgtcacaaatgaatngaacacttatccttaca

SEQ ID NO: 264856 - DNA, 376 bp, Glycine max
  unsure (1)..(376): unsure at all n locations
ttgtctggccctctctggttttcttggcatcttgttaagcataactagagattgtcatcgtccatataaaatcttgcatccttcgtcatatatcttgcaaatccagnctgtattttctggtgtgtatgcttgaagtatgctgaacattaatgggtattgtaagatatatcatgggtacatatatatagtttggttctttggaatgatcgtaaacaaattgatttctttattgtcttaacacatacaaaacaaaatgtatccaatatataaaaatagaagaatgaaaatagacatttctcccctttaaaacttaacaaactgaattatgatatgaatntaaactggggaacaatgcgtaagtaaatcttaatttatc

SEQ ID NO: 264857 - DNA, 451 bp, Glycine max
agctttgacttgagtcatccaagattattttctgtgaccatggcatgaattttaaaagaagagatcaatcatctatctttcaatcctctctcaacatcattcaatatctttcaactgattctatagaatgatctgagtctttttctcttcatctttctaaaagatgttgttcaaaactttctcttccaagacaagttctttgttaaaaaacttgtgatattcatttggttcattcttttctccctttgccaaaagaacgaaggactaaccgcctgaattcttttgtctctctcttctcccttacaaaagattcaaaggactaaccgcctgagaattcttttgggtcttctctttcccttaagcaaaagatctcaaagaactaacccgcctgagatatcttttgtttccctttacaaagatcaaaggactaacccgctgagaatctttgtct

SEQ ID NO: 264858 - DNA, 449 bp, Glycine max
tggtgtagaaatgtacaaacaagatggaattggtgagatatgctatcgctaaatttgccacttcttatctaaccttggaaatgctccacaaagagatagctaatattagaaagatgtttatttttgatgaatagatcttaaacaagctatttaaggagcctaatgggaaagaagctgcaaaggtagtgctcatgccttctttctggaatagtgtggtttattcttttaaagacattgctccacttgtcaaagtgttcgtcttgtggatggtgaaaggaaaccagccctgggctatatttatgaagcaatggataaggcaaaagaaacaattatcaagcctttccacaacaatgaaagcaagtactaagatgtgtttgcaatcactgcaggtgtccactttttaaatccagatgtcctttatgacaacattaatttggagtctgattttg

SEQ ID NO: 264859 - DNA, 434 bp, Glycine max
agcttgagatgaggaagtgttgaagggtgttactttctgcttttattggtgaccacagagtggtacctggagatatgtcgcgggggtcaggagaccttggggacgtcagatggggtgctattgcccaaaaccaagcttgaccaatcccgacccaacccgagcatagtcggtcagtgagaacctgtgatgtacctaagcaggcgagctcctggcagtcaacagataaaaggaaaataagaccacaaagcaaggaggcttgtggtggctggccagctgtgaattttgtgtaatatgtggattgtggcctctggtaatcgattaccaagggtgggtaatcgattacaaggcttaaaattgaagacaggaggctaagatggtctctggtaatcgattaccaaggggtgtaatcgattaccacgcttgaaaacgaagtc

SEQ ID NO: 264860 - DNA, 365 bp, Glycine max
  unsure (1)..(365): unsure at all n locations
cttgaccatttgaatttctcgagagcttccgttgttcaatttttagcgtctcgatatgtgatgcgcctgaatcgaacattcgagtgaaaagttatgaccatttgaatttctcgagagcttccgatgttcgatttttagcgtctcgatatgtgatgcgcctgaaccggacatccgagtgacaagttatgactatatgaatntctcggaagcttccgttgttcaattacgagcgtctcgacatattatgcgcctgaatctgacctccgtgtcaaaagttatgaccatttgattttcttgagaccttccattttcaatttcaaacgccttgatatattatgcacctaagtcggacctccgtgtgaaaa

SEQ ID NO: 264861 - DNA, 452 bp, Glycine max
  unsure (1)..(452): unsure at all n locations
tgcaagcttcatgatgatgaaccaagctatttttatgatgccnaaagcccaagtgattgattcaagacttcaagatcaagcatcaagaatcaaatcctagattcaagattcaagagaagaaatcaagaagcaacaagtcaagacttcatataggataagtattaaaagaaattttcaaaaaccaaatagcacagttttggtttacaaaataattttctcaaattttctaagttactagattgattactcactggtaatcgattaacagttattagtaatcgattaccagtgaccagattggttttcaaaatgttttcaaatgatttataacgttccaaaatgattttcaaatagtgtaatcgattacactatattagtaatcgattacaagtgaatctgaacattggaattcaaatccaattgtgaagagtcacaacttttcataaaataca

SEQ ID NO: 264862 - DNA, 375 bp, Glycine max
atttgaattgcatatcaagaactattgtcattctttcttcttgtgatcaatctccttatttggatttgaagtatcttttagtgacctacattgaaatatcttttattgaatgtcaagttaatagatcgatcaaaatggcttaataaaaataatggagggactaaattctttagaaaaaaaaataaggggaccaacgtagaccaaaagtgcaattaaacctaaaaaatagttattaccgatagtttaaagataaaaagggtcattattatcatgcattgtgctgctaattttcacttttggggcttaaaatcacgattaccgccaaatgatgtatatgtatctacaagtggattatcaataatgctccaaatctta

SEQ ID NO: 264863 - DNA, 457 bp, Glycine max
  unsure (1)..(457): unsure at all n locations
agcttgtaggattatgaggtacccatcatatgtggtactaggtggcggtcgggcgatggtgcaaaacaattctccacgtccataaatcacgtataaacccaccatcccctgttgcccacctccaactgagctcacgtactcccacatagcccttatccttgttcctctcaacgccgggtccccatcaatcctcccaagcttccacaacatccaagtaattcaacatccaatcatcacaaactataaaaccaagcaaaacagggcaaaggcagaaaactctgcccaaaccaaaatcacagcttttcacactcaattaccccagtaatattctcttcgttccaattcgttaaccgttggatcgactcgaaaattntactggaagtctctagtacgtaagtctatattttgaccgttgggatctattagcatatgtccagaaccccaagtgtactaccct

SEQ ID NO: 264864 - DNA, 439 bp, Glycine max
  unsure (1)..(439): unsure at all n locations
ttaacatcggntatttaggacttgctacatctgttaataactgatgtcgaaagtaccaacgttgaaagtattatcgttaacatcggttttagaaaactgatgttaacgtaaaataacaacatcgattatttaaataaccaatttatataataagaattacagacaaaaaggtatatatgttcatacaaacgttggcagttaacatcagtttttcatcaaaaccgatgttaacttccaacgataacatcggttttcttaagtagataaaccctttcctttccttgttcctctaattataaatattgctttaagtagagaatatggcctaatctcttagatagactatcacatcctaagcctaggagtaccaccaaagacaaaccttaaggcaatccttacttctgatatagttnctatttgagtttagtgaaatcaatta

SEQ ID NO: 264865 - DNA, 424 bp, Glycine max
  unsure (1)..(424): unsure at all n locations
cagcttctacttatgtggcagggcgggctttcttcaccttcttgtctcaaccacgagctttgactaccgttcttccttcccgcgatgcttctctttatatctgcctgagtgggcttatagcctaaaccatacttcccacaatttcctttggcatttatcaagctagttatgccgccgttgtctttgcctaaacccattccgggttcgtaaccgtgccccaacataactcgggccatcattactgctgcatcggacaggcaaggccgcccagagaaggagtccacggaggaaatgcttaccacctcaaaagactangaaagcggttctaatgactcctctgcggcttccacataaggcatagaggatgggcagctcaccaagatgtcttcctcgcctgatacgatgaccagatgcccttccacta

SEQ ID NO: 264866 - DNA, 396 bp, Glycine max
taacggtaagaaacttggatcagcttatgccaacagttaatgtcaatccttccagtgggagaggatcacgcccgcataaagaaaagttccacaactatataggcgtggtagctcgggaaaagattcctattgtccattgcaattgaaaattgcattagaatctttaaagaatctaatatgaaatgacatttttgaaattgcttaatttaagttcaaaaggttgtgattcactaagtcttacataacaagttcttatgcagggaaaattctatatcccagaagcattcaatgccaagaagaaggtgatgtcattggtggcactacatggaggcaatttaagtcatccctgaccactaaatgcgtatatgcagacaatgtccaagaagtatggaataa

SEQ ID NO: 264867 - DNA, 446 bp, Glycine max
  unsure (1)..(446): unsure at all n locations
gcagctttaaacattggctatcatttctctcgttctcaaataagacttcaaaaaagttttaaaacacaatctgactcccttcttgtgtttttctatgttttacatgatgctatcaccaagaaacatatatgaaacattttcgtatgaatttaattctggagaaaaaaattatggcctttcaattgattaatgaaatgttcgtttctaggtcgttgctagaaaattattagatttattaaatcataagaaaataaattaaagctacaacacaagaattttctatgaggttatcaatctcaaaagaggttttattaagtagtctattttggaattggctaggacctangtccccttcggtcacaatctagtattggttgagtcatgacctagtacatatcctctcactcaccatccaatggaggctaatggaattagtttaacttatc

SEQ ID NO: 264868 - DNA, 437 bp, Glycine max
tagttggtggacaagatgaggaatcccatttccaatccaaaatatgatcaatgactggatggttctaagtgctaatcagaggaagaacggcacgataagtgggtgacagtctgtgatggagtttcgatagtgagatatgaaacttggggtgaatcttataattgataccattgggatggcctgtcatgaacaaagacgcaaagatattgctccaagatgcgattcatgacctctgtttgatcgtccatctgtgagtgataggcagtgctcattcgaagcttggttccactaaggcgaaaaagctcctccaaaatttgctaataaacaatggatcccgatctgaaaccatgctttgtgggaagccatgatgcttacaaactatgtcaagaaataaaagggcagtctttgtagcggtattgtgtggcgatagtgccctg

SEQ ID NO: 264869 - DNA, 403 bp, Glycine max
attacatgctttttttttatagaacacaccaacacacacacacacaaaaaaataaaaaagatacatcaattaatatgccttgtgtcacaacaaatatttttactgcttgccagatcgttgatgtaattttggtaagcaccatttgttcttgagtatctttactgacagatttgtttaccctcttttatttcccttttttgtctcctgccagctaaaaatgagaatgctgacgacactgaggaggggattcgacacttcatggttaatattattgaacctcagtttaatcttcactcacaggacgcaaatgtaagttatagaatactttttttttctcattctaaatagagcttatgggctgagacacagagcattttaattattgtgcatgccttttatatgg

SEQ ID NO: 264870 - DNA, 367 bp, Glycine max
  unsure (1)..(367): unsure at all n locations
tgcagacaagcaccaaaggcttcttcttcaatgtctatgaagcaagcttcccagatgtgacatttgccaagtaattaagcacctcaattatatttgtgtatcttctagttctatgatataaaatcatctccgagctaattcatgtgctacttttatgttgagcttgtgagttgttactaaaagatatgttaatgatattacaccattttactacaactttgtgtgtgactaccaataactacgttatttgaagcacaagcaccaccaatgaagtgagtctgtctcttttgtttgccaattgaatctatttaagcatcaagagtagaattctttnttgtttcttaaagacattaatagttaaatagac

SEQ ID NO: 264871 - DNA, 368 bp, Glycine max
  unsure (1)..(368): unsure at all n locations
tgacacatcccgacccaacccgggcatagtcggtcagtgagaacctgtgatgtacctaagcaggcgagctcctggcagtcaacagataaaaggaaaacaagaccacacagcaaggaggcttgtggtggctggccagctgtgaatattgtgtaatatgtggattgtggcctctggtaatcgattaccaaaggtgagtaatcgattacaaggcttataattgaggacaggaggctaagatggtctctggtaatcgattaccaangggtgtaatcgattaccacgcttgaaaacgaagtcaggaaacttanggagcctctggtaatcgattaccagcctgcgtaatcgattacacagaggaatgggtcact

SEQ ID NO: 264872 - DNA, 217 bp, Glycine max
  unsure (1)..(217): unsure at all n locations
accgcttagaataaagaacacaattatatttgtcgagaagtgccaaatngtattcatacgatctttgctgcgccgtttgattaattggaatgtttctttatacattccactacgcacgttntgcagatgtgtttccggacattcctttaacatgtcatctaagaaaaacagttgcttacattctatgaatttttttagaatactcttttctttaata

SEQ ID NO: 264873 - DNA, 395 bp, Glycine max
tggatgtagatgacgatatctatacagatggatcttatatatctatatatctatagatagatatatagatgtagatatatagatatagatcatacaatgaagtaccgcacgagtgggtatataggaatccaaatctgccgaatcactcatgttatgatcttctacatcctaggtcttcccgttccttcatctggcttatgttcttcatgtagcattcagactgaatgactctatgaaattacgtcgctacttccacatggtacgggtaacgtaggagacatctctatttttcctcgcgggaatccttagaattaccacagcttagctgtcaattcgcctctgaccatcagatgaaatgtgaataacccgtcctcccctctttgaaactttgaaac

SEQ ID NO: 264874 - DNA, 394 bp, Glycine max
agcttcttatccaaggcaattcttcggggagaagctccttctttcttggcttattacctagtggatggtgcctcccctatcctcttctctttgccttccgctgcatctccatggagaaaaatcaccattgaaggaccttattgaagctcaaagatccagcctccatataagccccacaagcaagccttccatcaagtggtaatcagagccaagagcttcagtaggcgctccttaaacctccattaattcttcttctttacctctctttacattgatgcttcttcattgctctccatgtatctcctcacatgtccttgttctaaatgctcgcaacatgattctttagagtttccaccgattcaacttgctatacaagctatatttgattttctat

SEQ ID NO: 264875 - DNA, 501 bp, Glycine max
  unsure (1)..(501): unsure at all n locations
tactcagcttctatggaaccattctgccttgcacccgattctcattaaactccttggaggcttcataagctctggcagtgacttcagctgtttcacgtgcatcacatattgaacttgacagatgtgtgcatttcaagtcattagagagaaaatctttgcaatcttgcattctgtttcctaatcttttctttgtatgcaatgtcaaatccttctcagaaaaggtgccatttgtatgcttcaattccaactgtttttcactttgtctctctattcttactgtcctcttcttcaaatgttcatttcctacaaaagaatctgattcgtcagtagacatggaacaagcatcttgatgacctttaagagaagacaagtatttgctgtcgccaataactntttcattctttgtcatgtagagcanactttcctgtagaggtgatactaagacacccncaatgataggaaatgaagtcgtaacctatgtcatgaaataataagtaaata

SEQ ID NO: 264876 - DNA, 431 bp, Glycine max
  unsure (1)..(431): unsure at all n locations
agcttgccttggcccttgatatatttgagggactcatggtcactatgaatgacaaattccttgggataaaggtagtgttgccatgttttcaaagcccgtactaaggcatacaacttcttatcataagttgaataaggaaaggcaagaccacttaacttttcactaaaataagcaattggatggtcttcttgcatcaacacagccccaatcccaacatttgaagcatcacactcgaattcaaaagatttttgaaagtttggcaacgcaagtatggnggcattaattaacttttgcttaataacattgaaagcttcttctttgttctctccccatctgaaaccacacattttcttgagcacttcattgagaggtgctgccaatgtgctaaaatccttcacaaatcgtctataaaaactttctaagccatgaaa

SEQ ID NO: 264877 - DNA, 398 bp, Glycine max
  unsure (1)..(398): unsure at all n locations
tctctatccaatcctttgaagaaacatgcaatgtcttaaaaaatgtccttttgagaacagtctaagccatcataacttaattttaataccttatgaattntcatatttgaaatctttnttagttttctcaattcactttctcatgcttctttacttcttgaacgaaaacttacacccaaaacttttaaagccaaaggaatacctttgctctaagaaattgctcttcttgattgaacctcatatccatctntagggtgtatttctccaaaaacagtcaaacagaacaactgaagagaatgctcagagctcaaatcttggacctgatatatntcatcaattgggctaagtatttgcttgtttctagttgtaacaatgatcctacttgctgggtgacactc

SEQ ID NO: 264878 - DNA, 303 bp, Glycine max
  unsure (1)..(303): unsure at all n locations
agcttgttatttcctcacagatgtaactntgtattctttntttgttgttgcgtgtgctcttgttttttctgccttctacgttcacgggtacaatattctgaanatctgatatatcttatgcatatgtcatactatgatcaattttgaaaaaaagggtctttgtttctgctctcttctgagctcacgggtatagtattctggaaaattacaaaagggtcattaaaggaagattctttatgcatatgtttgtaatatgattaatcctgaagaaagggtctctcgtttggttggcgggatgatatc

SEQ ID NO: 264879 - DNA, 509 bp, Glycine max
  unsure (1)..(509): unsure at all n locations
tcttanttacattgatgtatgtatgcattggaggaggttgtgtgccatcttctgtttaagagtagcattccttggctaaactagatgtccaaatgtttgccttcgcacgaaatggccccgacgaagcttgcctcagagatgtccacgaaagataaggcggccgaagggactacttccgctcctgagtatgacagtcaccgctttatgagcgttgtacaccagcagcgcttcgaggccatcaatgaatggtcgattctgccggagcgacgcgtctagctcacggacgactagtatactgatttccatcaggaaatacggcaccgagcggggacatcactggttactctcattgccaagttcgatccagaaatagaccttgagttntatgccaatgcttggccaacagatgaaggcgtgcgtgacatgatatcctgcgtgacgggtcagcggatcccacttgatgccgacactatcgtgcagcttccgggatatacgctggtgtagaagan

SEQ ID NO: 264880 - DNA, 607 bp, Glycine max
  unsure (1)..(607): unsure at all n locations
gcacaccgtcatnntctctccgntncanntgcgtcanctcacttaactctnntntacctcgctctctctccccccnnnnnncncgcgcacgggtttgattaatcgtgatatcaccgaccgtgtananctaaagtcgacgcgtacgctcttaacttggaattgcatatgcgcacctatattttattccctattatgcacctacatatagaccagctgcactctccaatttaaaagtccatattatacattattgcggcatttcaccgagcaattggcgagtctatgttacgacatcaattgcaaaaggatggggaccaatgtggcatggcccattgcttcaaaaaaaagcatagagctaatgccttctatctctatcctcaactctagaaaacaagcataagacacaaaccataacttgtcctacagatataagcacatcctcacaatttggacgcaccaaagatgaataaaatataccaatgggaagctacaaacatcaacgattgaatacttacttgttggagtgaatactaacaccgaatatgagagcctaacgtcaccgaaatggctcgagggaacaagaactgctatgcctcgtgacgtctcg

SEQ ID NO: 264881 - DNA, 515 bp, Glycine max
agcaacgatgatgaactatcattacgcaccttacaacctcagcttctacataccaaccggttcggtatatgcagacagagactttttggtaggtctttatctcgcgtacctgcgtagcagtagggtctagccactggtccacgagcacacaatagccggattagcttgccgcggcgggccccgtgcaaatatctatacgaatggtgatcgactctttacgccaagaggcaaccatgtggatggatccgtttgctctttccttgaacgggagtcaagagcttccccgattgttagccaaggtctacgaagtggcggatacctattcagccccgaagagatcatgggctctcggctatgtcagggtatgattacttaatggcccactaatttaaatcgttcggaactcgttggtcctacaccttgtctgatacacttccttttgaataaatgaagtgtccctgtttactgcaaaaaactttgcaatcaatactccaatttctcttacatgctttttt

SEQ ID NO: 264882 - DNA, 306 bp, Glycine max
  unsure (1)..(306): unsure at all n locations
agtatgatactcaccgctttaggagtgctgtacaccagcagcgcttcgaggccatcaagggatggtcgtttctccgggagcgacgcgtccagctcagggacgacgagtatactgatcttcacgaggaaatagggcgccggcggtgggcatcactggttactcccatggccaagtttgatccacaaatagtccttgagttttatgccaatgcttggccaacagaggagggcgtgcgtgacatgagatcctgngtaaggggtcagtggatcccctttgatgccgacgctattggccaactcctacgat

SEQ ID NO: 264883 - DNA, 386 bp, Glycine max
  unsure (1)..(386): unsure at all n locations
tatgaaccatttaatttctcgggagtttccattgttcaataaccaatgtctcgatatattatgcacctgaatcggaaatccaagtgaaaagttatgaccatttgaatttctcgagggattttgttgttcaattttcagtgtctccatatatggtgtgcctgaatcggacctccgcgtgataacttatgaccatttgaatttcttgagagatttcgttgttcaatttcaagcgtctcgatatatgatgcgcctgaatcggacatccaagtgaaaagttatgaccatttgaatntctcgtcagcttccgttgttcaacttcgagcatctcaacatgtgatgtgcctgaatcggacctccgtgtgaaatagtatgaccattttaatttc

SEQ ID NO: 264884 - DNA, 220 bp, Glycine max
cattatctctatgacacaaacgcgcaaatgaggattcggaaactttatgtaaaactggtcatgcatgcacctatgtggacactcaagtgtcaaattattatgggcatgtgatgctagggctcacgattcatctcctctattatagtgaacccaacgcttcaaaatatggacttttatcaatttgtgcattcatccgagcccatattgggcgtccggtaaa

SEQ ID NO: 264885 - DNA, 444 bp, Glycine max
  unsure (1)..(444): unsure at all n locations
taatgtactaagtcctccaactccacataattntgcaactctgcaacatcccttatatcactatttaacccatgtagcaaacaagccatagtagcctctcaatcctccgtaacattagctctaatcatggaaacctncatctccttataatactcatcaaaacttatactaccttgtgtgagtctttgtagcttgttatgaaggtttctttgataatgagaaggaacaaatcttcttttcatcaacctcttcatttcttccctactatccaccaagggttcttcatatctcgccctttccctttgtaattggttccaccagatgaaagcatagtcagtgaattctatggctaccaccttcatctttgtatccttagtgtaattgaggcatgcaaatagccgctcaattntcatttcccactccaaatatgcttctggatcactc

SEQ ID NO: 264886 - DNA, 290 bp, Glycine max
agcttgaactcaatttgataaaaaccacgttgagggggaaaggaaacaaacaagattcgtgattgcagtacttcttaacaataattgactttcctgccttttgtattcctatctatgtaaatattatattgcgccatgccatcagcgcttgaatcatataatgcggtacatatggatgatatttgaagctagaaatattacatcatacatgccatgctagaataatactctaccaaaacacaattgattgttaaattgaatgcaatatagatgtgtctaataacaatgga

SEQ ID NO: 264887 - DNA, 420 bp, Glycine max
  unsure (1)..(420): unsure at all n locations
gtatattctattatgtgctgcattgcacgaagagcatttctctatagtcctttggaccatgtttcttgaactacctacatgataatgactcttattacatatatacttaatagcggctacacatatgtcttggttgcaacatgacttttttttttactgaggtttgccgatgggtaagagtgcaaactaataaggcacactattgggacatattcatatatatatatatatatatatatacagatatctatatatatatatatatatatatgcctgcatagcgattctgtcggaggcgtttntctctctcttcagctgctacgaaggaaaattaatgcgtttgtctgtctacaacaggcccatctatggaggagagccaccaaagattatcttctccgccccgatatnctatatataccg

SEQ ID NO: 264888 - DNA, 370 bp, Glycine max
tcaccaggaaagaacatctcatgtgttatataataacagcaagatcaataccgtcgatgatcagtgtaaggcgaactctaacagctcatctattagaatgacacgaaaacatacaaagcacattgctttggagaaagaagcaaggtcaatatctttggaaaatgaaggtaattctgtggagagagagtcaacaccaaatgcctgcaaggagactgtttctgacaatgtgagtatttaaaaccctaggaatggaagatacaagcatgtgtctatctatatatatgcattccatttaattcatgtgcgtggaaaatgaatgaccttaatatgctgacatattgttgttaacaagctgatggagtgttgtacc

SEQ ID NO: 264889 - DNA, 350 bp, Glycine max
gatgccaacgttgctgggatgtccactttttgctgggatcgacataggagcgccaacgttgttgggatgtatattgttgaccattcaacacgctcattctgcttatcttcttcgattgcattttgcattatgttaaaaaattaaaattcaataaaatgacgcatgcaacattattattaaaagacagacggctttgactataaaaaaaccaccattacattggttggcatcgactcggaaaaatggccattaaattggttagtatcgactcacaaaaattatcgtccaattgcaaaataattatgcaatactttactaagctatccgtcccattctaagatgagaatcat

SEQ ID NO: 264890 - DNA, 379 bp, Glycine max
  unsure (1)..(379): unsure at all n locations
tatgatgattgttaatgttntcttactaattatggttatttgatttttgtattaatttcttttataataaactcacccctcgcaatttttgtaccgtgtggttggtacctgtgatgatcacanaaccttgttcgtgggagcagaatgacaacagtagagtacgagaagtgagattcttttgtggagccgccaagctgacgtgatgacgttgagattattttgggagaaagttgtgttatgttaatcaactcctccgtagctggttacataagtctttttttttctaattgaggatgtaaatcacagacttatgtatgtgtatgaacaaatttactttccattatgtgaatgatgtgtactgagttactatgcctatata

SEQ ID NO: 264891 - DNA, 276 bp, Glycine max
tgtgactgcaaatcttcatcctctagcggctccatactgggtcacgctattcaattggttctcgttgatcacttgaatatttcccacaactcacttggcgtggggcatatttcaattcttcatctaattcacaactctctgttttctgcctcttcaagacttaagacacgcgcaaccattatttctctaccaccaacaagtgacaatccattgtgccggcaccgtctttccaggtcagcaagaagaagactcattatctccttcagttgcagccct

SEQ ID NO: 264892 - DNA, 407 bp, Glycine max
  unsure (1)..(407): unsure at all n locations
tacagtaaaatctgggacctagccatggtagaagtctccacagatgccattgcctcccttgcccagtattatgatcagccgttgaggtgcttcatctctggggacttccagttatcacctatggtagaagaatttgaagagatcctangatgccctctagggggaaggaaaccatacctcttctcagggttctatccctcattagctagaatttccaagatagtccacatctctgcgcaggaattataccactggaagcaagtcgaaaatggggtagttggaatactgagaaaatatttggaggcaaaagcaagaatcttggcaagtgaaggtgagtgggccccgttcatagatattctcgcactgttgattttctgacgagtcctctctcctaatgtggatgggtt

SEQ ID NO: 264893 - DNA, 408 bp, Glycine max
  unsure (1)..(408): unsure at all n locations
tttttcttctattgagagttagcaatatttaacctcttcttaagctacattggtattatttaagggaatagaaattcataattataatagaataataattagatatacttgatagtacaattaggaattccaacaatttaaaagttttttttctaagttttgaagtatttaataaaaaaatttaaataataaataaattctgctgtttcaattaagactaacaaatttaataagatctgttcgtatttaattaaaattgtttacaattctaaaaaagttggtattcaaaagtcacaaatctgatggaattttttttaagatgaattttaatgaattntatgaaactttttagtaaaaaatacatatcacacaatcttattcaaacctttgagatttatgatatttttc

SEQ ID NO: 264894 - DNA, 472 bp, Glycine max
  unsure (1)..(472): unsure at all n locations
gcttcgacgctcaatccctggtgcctnttccttgttgaatgaagaatctntaaaatcaattgccaataaagtgctcaaaaattgtagtttgtcaaaaacttcaatatctaagattggatcactgaactctgtaactgacaaatgacgagtctttataccaatcttggtttcttttccaagttcttctgatctgaaatagaattctccaccaaggtataatgctagatcatgcacgagatcatgcattacaaaataattgccccaagtttgattacttgaacgttgaaaaaatgatcttgaaactaagtcatcaaaatactcgtaaccaacttctaacgcctttcctctgtttggaagcttcaaaagatcttcagccatccacaacaagatcaagtccttctttcgaaattcataatctttacggcataatgaacactaaacaaagcaccgttgtaaatgtggagggagatat

SEQ ID NO: 264895 - DNA, 425 bp, Glycine max
  unsure (1)..(425): unsure at all n locations
agctntttttggaccttgaacaggcaactaacttctctttcaaaaccatgctatgtgctcgcgactggtccctttcttcccttcgcaacttgagttcactattgctaccacatagagctccgcgaaatttgttccggccatactcttccttgcgagccctcttggtctcttgttcaagggctcttgcggtaattgcattctcttcccgtaacccggcacactccttccgaatgtgtgtagcagccaacttgaacttctncttggcaagttttgcctttcctaactcgctnttgagagcttggacttcttcgtcctcttccggcgcttcaaaattctcttcgctgacgacttttaacttggcgagccaatctaaacctcgtatatgaactctcagccattcgtggtacccaccaatgatgccatta

SEQ ID NO: 264896 - DNA, 374 bp, Glycine max
  unsure (1)..(374): unsure at all n locations
tttctataaatagggggagaagtngaagtgaaaatggttcagccccggaggcacttctctctctttcgaatntgcttgaaaaaaatcgtttccgtgaagaaaatctaagcggaggcgcttccgaaacgtttccgtaaggaatttcgcgaaggttttgaccgttcttcggcgctcttcattcgttcttcatcattcttctatcttcaacgggtgagtacctcgaaccaagcttttcgattcattctatgtacccagggtggtccacattgggtttcgtgtattgttattctcgcttcattgactttntataccccctattgacgtgcttaagccattatatataagtcatttctcgcttaacctaacaataaaat

SEQ ID NO: 264897 - DNA, 296 bp, Glycine max
agcttctcgatatattatgcgcttgaatcggacctccaagtgaaatgttatgaccatttgaatttctcgagagcttctgatattcaattttgagcgtgttgatatattatgcgactgaatctgacctccgattgaaaagttatgaccatttgaatttctcgagagcttccgttgttcaatctcgagcgtctcgatatattatcctcctgaatctgaccttcgtgtgcaaagttatgaccatttgaatttctcgagagctctccctgttcaatttccagcgtctttatatatgatgc

SEQ ID NO: 264898 - DNA, 126 bp, Glycine max
  unsure (1)..(126): unsure at all n locations
atggatgtgctcatgattncaagcaatattgangaagatgangaggctactatggctcgatttcttaatggtttgactaatgatatccgtgatattgtgagctgcangagtttgtgaaatggatga

SEQ ID NO: 264899 - DNA, 375 bp, Glycine max
  unsure (1)..(375): unsure at all n locations
agcttatgctgcaaatatntacaatagacctcctcaacctcagcagcaaaatcaaccacagcatagcaattatgagctttccagcaacagatacagccctggatggatgaaccaccctaacctcagatggtccagccctcagcaacaacaacagcagcctgctccttccttccaaaatgctgctggcccaagcagaccatacattcctccaccaatccaacaacagcaacaaccccagaaacagacaacagttgaggcccctccacaacccttcctcgaagaacttgtgaggcacatgactatgcataacatgcagtttcagcaagagaccagacgcttcattaagagcttaaccaatcagatgggacaattagc

SEQ ID NO: 264900 - DNA, 377 bp, Glycine max
  unsure (1)..(377): unsure at all n locations
tttctataatagggggagaagtgaagtcnaatagggttcagccccttatgcacttctctctttctcaggataactgaggaaaattacttccgtgaagaagatccaagccgaggcgcttccgtaacgtttccgtgagtgatttcgcgaaggctttcgactgttcttcgacgttcttcattcgttcttcagtcttcaccgggtaagtactgtagaccaagcttttaattcattctatgtacccgtggtggccacatttggttgcatgtacttttattctcgttatcattactttgtatacccccttgtgacgtgcttaagccatgtatgtaagtcatttctcgcttaatctaagaataaaataaatttccaccgatcgt

SEQ ID NO: 264901 - DNA, 344 bp, Glycine max
ctaagcttctctctctcactattgggcatgatagccctgcatttcttttattgcacgaaaagttttgcgtcacgagtttcttttatcacgtcaaactcacgtttgccctcttctgggaagaattattgatagccctgaatttctgtcctcataaggctatattggtattgtgtattaccttggacatcccagcctttcatattcatcattgaatacgcagggatcatctctatgatcctcgagtaagagttttataacatggcgaggataattctgagcagtgaaattgctcacacagctcgttatcttgatggcgatgtaatccatcatttctgtctgtatta

SEQ ID NO: 264902 - DNA, 453 bp, Glycine max
  unsure (1)..(453): unsure at all n locations
cctgtcactatacttgattatntaaatgttcaattaaattcattttttatagagcatgtatacaccgttggaaatagattttttcagactagatatcattattataaatggtttttcaatcaaatatttaatataattacatattctaattttaatttgagacctctaattaaaatcaataattttgatttattaatatacaattaaatatgagaacaatacataaactagtgattattttttcttggttgaaaaaagaacttatagtttgacattaaaaacctatgaatgggtatacaataataaaataattaattctatactttataataaaagagatatacttaattactaatttgtaattntatcaattttttatctatgaattgaagacaatgttaggatttacaattaggatatactttatatgatgttcaatcaattaagttaatc

SEQ ID NO: 264903 - DNA, 248 bp, Glycine max
  unsure (1)..(248): unsure at all n locations
agcttnctcgtggcttctttgagaagctctctcaatacgcttctttgagaagctagaatcttatctacccacacccctctattaactaaattaacctccttgaaacaattaccgataaaataacacaacaaatataatccaacatcaaacataattactaataatatatagatatatatcagggtgttacatcctccccttttcttttatatcgtgactctttggttgcatttcattacatgctcaca

SEQ ID NO: 264904 - DNA, 443 bp, Glycine max
tgccactcagctcgcccaggcgagcaaggttgcttcctccagaatcaaccgccttctggaggaatcttctggagggcccaagtgggtctggttgctatttgcacccccatttttactaagtacaccccctgcctttttttggtgatccttttttcgtaaagttacggaaacttacgaatttcgtaacgatacttgctttctttctgtaatgttacggaaccttgcggattacataatcatccccttttttgacttacggaatgttatggaacctcactaattgtgcaacgatgcttccatttgatttccggtgtgtcacggaaccttacggattgtgcatcaatattttcttttgttttccggcatgtcccagaatttcacaaattgcctaatgatgggtggcaagcacctcacaaggaccaaacaaaagttgcatgtcatca

SEQ ID NO: 264905 - DNA, 399 bp, Glycine max
  unsure (1)..(399): unsure at all n locations
agcttgtaatacaactcanaataatgaacaattttccagcaaatcaagcatacacaatttttgttgttgttctggacgtgtattctgatgttaatctttatcaccttttcttgctcatttattttttgttttcggttcattatttatccattgctttcatccagatgtatatttaatccagttaaaatttcagctcaaaacttaaagtattcaaaccatggtggagttaagaagaaagtgtgccaaaattgacagcaaccaaaatttcaacctacaaataaagagtagtgtttatattgcttaacgcttacatagctacaatttgtggttgattaagatcaattgtcttgaataagacaaatccatagagcttaagacttattttgattcacaaatcca

SEQ ID NO: 264906 - DNA, 419 bp, Glycine max
  unsure (1)..(419): unsure at all n locations
nggatttcctcttagtagggaatgtatccttcctaagatggagccaaacccagtcccgctcattaagaaatagctcctttcttcctctattgcctttagttgcatacacctttgtttggttctttatttggttcctaaccctctcatgcaacttctttacaaactctgacctagattccccttcaatatgcataaaagaagtgccaagtgggaggggaattangtctaatggtgttagaggattaaacccatagacaaccttaaaaagggattgcttggtggttctatgaacccccttgttgtaggcaatttctacatgaggaagatacccatcccaagacttatggttgcctttcagaagagcccttanaatggtgtatagagacctattcactacctctgtttgctcatcagtttat

SEQ ID NO: 264907 - DNA, 395 bp, Glycine max
agcttaaggttttatataacataaatcttatttagtactagatgaacaaatatcaacgatctttatcaattattttgaacgttctctaacaattcaaagggttctttcaaatcatttcaacccataatattcttttacatcttatgaattcaaattttataattccgaactacaaaactcccaccataaaaatctattaaaaacatcttaaaagttattatatttctacaaaatcttttaaaatccaccggatttttttatgtcaaaatactctcttacaatcctaatccactataccccttaaaaatatgttcctttacgtccttcacattcactttgggagattaaaaataatattctacaaatctgagagattagaatagcatatttctaat

SEQ ID NO: 264908 - DNA, 355 bp, Glycine max
  unsure (1)..(355): unsure at all n locations
tcttggtttcagctgctgaagatgaattcgtggctacttcatgcactcctctaatgactatagcatcatttctggcactaaactgttgggagttggaagccatcttctcaattaaatttttggcttcagcacgggtcatgtctacaagggctccaccactggcagcatctatcatacttttgtccatgttactgagtccttcataaaaatattatagaagaagctgctcctagatctgatggtgagggcaactggcacatagttttttaaatctctcctagtattcatatangctctctccactgagttgtctaatacctgaaatatcctttntgatggttgtggtcctggaagc

SEQ ID NO: 264909 - DNA, 299 bp, Glycine max
gctggagctgctgcacatgatgtcccaccctatgtccaaaaataagatccggctgcacaatgcacaacgcaagatatagtgtcacatgaacaattgcagcttgccgattcacgatgtcggatacaatgtgcacaacatccctgcccaaaatactggagttgctgacagcatctgaaagttgccgatccacgatgtcggacaccatgtcctgcacttcggcccgacaatactggacatattaatctgctatatctttaacagactattgcgcacgtagcaagagataacatgatctatct

SEQ ID NO: 264910 - DNA, 403 bp, Glycine max
gtgagaaagtgtggaagagtcagtcttcctacttttattcgttgaccacagagtggtacctggagatatgtcgcgggagttatgagaccttggggacgtcaggtggggtgctattgcccaaaaccaagcttgacaaatcccgacccaacccgggcatagtcagtcagtgagaacctgtgatgtacctaaacaggcgagctcctggtagtcaaccgattaaagaacaaagaccacaaagcaaggaggcttgtgtggtggctggccagctatggattctgagtgatatctggaatatggcctctggtaatcgattaccaagggtgtgtaatcgattacaaggcttaaaaatgaagacaggaagttaagatggtctctggtaattaatttccaagagtgtgtaatc

SEQ ID NO: 264911 - DNA, 364 bp, Glycine max
  unsure (1)..(364): unsure at all n locations
tctcccctantttgctataaattggggaaaaagtgaagaagaatagggttcagcaccttatgcacttctctctctttcgaatgtgctgaggaaaattatctcggtgaagaaaatccaagccgaggcgcttccgtaacgtttccgtgagtaattacgcgaagattctcgatcgttcttcaaagattcatcgttcgttcttcattttcttcagtcttcaacgggtaagtacctcaaaccaagcttttcaattcactctatctacccgtggtggtccacagtttgnttcatgtattattattctcgctgtcatttacttttgatacccgcttttgacgtgcttaaaccatttatttaagtcatttct

SEQ ID NO: 264912 - DNA, 131 bp, Glycine max
gagagaagtgctcctctctaaggctcttacatattcttacgttccttttcaactcgaatgacccatttatttgcttttcaatctcttgcagctctagtgataaatccaactttcttctctgccactggatc

SEQ ID NO: 264913 - DNA, 385 bp, Glycine max
  unsure (1)..(385): unsure at all n locations
cgccacaattgatctatacagttgcaaagtgaatacctttcattttttttccaatttcatcttcaatgaaagactctttgtgattgtgtataaattgcactgtacaactgtctggaactaggtttatttatggcttaattgtgtaatgagagttgtgccgattaacttactccagtttggcttacaatnttctgtcttaggggagttatctgactgtgataaacattatataaaaaagatcaatatgtatcaagaatacccagtagccaaaaaaatgcactttctacatcatctaacagaggaactcttgtgaaagaggtggaagccttactatggagacttacacttatgcaaattatgtaggttcagtaagtgatatgttgga

SEQ ID NO: 264914 - DNA, 117 bp, Glycine max
ggagcgggttacccctgttggaaaacccccacgccaatctttctagaggctatagaattaaacatttgggaaaccctagaaatacggctttatattcccaccatggctgctggaaat

SEQ ID NO: 264915 - DNA, 357 bp, Glycine max
cggactcttgtgcagtagattcaccaccagcaccagacggtgttgatggtgatatgcacaagagtagtccagacactttggaatttcctgatgatagagatggcacttttcttcacacaacttctgacaccacagaatcaggtccaggttcggttacaacctctctatttgccccttctgatgagatttgttccttcagagaggaagagcaaacaccaagtccaactccaaagcatgtgaagcgtgtttctgcggtgaccttctgtgatcctgagtcaaactacatggtggagacagatagtgatgagtttggtgactctcatgttgagagtgttccactgatggaacgtgctgtga

SEQ ID NO: 264916 - DNA, 433 bp, Glycine max
  unsure (1)..(433): unsure at all n locations
agtataacacatatatatttatatgaatcgctaatataaattaggaattaatagttcaaataataaaattcagttcaacgaaatcaatatattaagattcaacgatacatactttcaatgcatctctagtttaattatctattaactctttctaattgaaaatcatatagcttgatttaatatatccttgtgttcgcgccatgtaaatatcaatattgggtgactgttatattattcatgaggtgagataacactgcgccttgcgaataacttcatgattgcaattgagtgtctgtgattaattaagcatgtgttgacttgcacaatacatgtgccttgaaattttgattgcccgagttgggagtcttgactcgctaatccccaatggcagaacctttaggagatgattatgcccccagttcttatggctccn

SEQ ID NO: 264917 - DNA, 344 bp, Glycine max
cctgtttccatatgatgatcaaatcagtctttcagaagttgctcttttatcaagtccatgcagagacatttgaactcatttggctgttgggagagtccttcattgttttcattcttaatgctctcaacaaaaatctttctgttgtgttctgatccacaaataagtttaaaaaatactggctgatgattctttccaaagcattttatgtcaaaaaaaaattgtttaagtcccacaaagaaatctatgactatactatcggactatcaaagaacacatcagtgagtcaaaataaacttgtgtaagtcttttaaaaaattcacaatgataaataacgtaataaagta

SEQ ID NO: 264918 - DNA, 288 bp, Glycine max
  unsure (1)..(288): unsure at all n locations
agcttgcatcanataaagccatcaaccaactctagtcacaagactataatcaatttgactcaatatgaaaaaaattatacacaagccacttttgtggcttctactagttttttttttcactctatacatgcattttgcattattttacgctacgttagattgcttcattttatgtttatttcgaagtgtgatttatattgccattcataaagaatgtatattttatttttaaaataaatcataccacaaaattcggcacatgcacaacacaagtttggtttcactatg

SEQ ID NO: 264919 - DNA, 433 bp, Glycine max
gtctcgcacgatatggcagtctatttcaatgtgtttagttcgttcgtggaaaatatggtttgaggctatctggatggcggactgattatcacaatagagagttgcaggttgaaggaaggggaccggaaaatcatgaaggaggtaggtgagccactgaagttcacacgtagtagaagccaaagctctatactctgcctcagatgaactgcgagagaccgtagattgcttcttggaccaccaggaaattagagactcacccagatagactgagaagccagtgatggagcgtcgtgtgtcgcaacatcctgcccaatcggagtcactgaaagctgtgagagtgagtgtaccttgagccacgaagaagatgccagaaccaggagttcctttgaggtaacgtatgacctatatagcagcttgtgagtgcgtggaagtg

SEQ ID NO: 264920 - DNA, 181 bp, Glycine max
gcttaactcttcttcttgctccttgcttgtattcttgcaaaataaaaccaccaaactagtatgaactagtagttcaagtcacctactacacaaaaactcagaggatgccgaaattccattgatttacacaaaaagaagcaatatacaatgtaagaatatcgctaattcttatatgttttaa

SEQ ID NO: 264921 - DNA, 164 bp, Glycine max
  unsure (1)..(164): unsure at all n locations
tctctcctacaacaatcactatgatgactcaggctttttctgactntgattnttgtgtgggctnttggtgtttatgttggggatggggattaatgtgtgggccgatggggttttgttgtggctcaagagcgagtgctgctaggatgtttacacatccttgcatt

SEQ ID NO: 264922 - DNA, 452 bp, Glycine max
agcttctagcacactccagacatcttctcaaagatcccaatggtcagatcatggacaattgtcttgtgaagttgcaaaccaaatttcgagaagatccaatggttaatgaagtctgggcagcgtgtttaccgaggcagctacatgtacctttctctagaagcttcattaagaggcttcctccataagcttcattaagaggcttctagaacactccagacatcttcttgaagatcccaaccgtcaggtcatggaaaattgtcttttgaagttgcagaccaaatttcgagaagatccaaccgttaacgcaggctgggaagtgtttttaccaacgcaccttcatgtatctctctctagaagcttcattaagaggattcctcgagaagccttctcgtggcttctttgagaagctttctcaagacgattctctgagaagctagatccttatctatcca

SEQ ID NO: 264923 - DNA, 466 bp, Glycine max
  unsure (1)..(466): unsure at all n locations
caaaaatcaattgaggaagcttcgccgagtgtgcccattgaaaaacctttattcaaacctttcaaagttagtgataaggctaaacgaagaattagggaacttagaaaaactaaatccttaattgaaggcgtaggtgacaatcatagcgaattactacacaagattggtagttcgcttaaggtcattccagatactccccaagcttcggaaaatactttcaaaatggtaacaagaagtaccttcaaattaattaatgttattaatgaagatagtgaccaaaactcagataacacaactgagataggatcagtgtcagaaaagaatataaatccattaaactccagacacttggagacccnctccaaattatattatcaacgttcaactgcccctgaccttctattagaagaaagaggtganaacaagtttaccaagtttagtgcacataacatctatgaatggaaca

SEQ ID NO: 264924 - DNA, 216 bp, Glycine max
  unsure (1)..(216): unsure at all n locations
cttactaacgcacctgttctagctctctctgatatttctaaaattgctgagctagaatgtgatgcctctggagtgggagttggagctgtattgttacaacgtgggcaccctattttttattntanagaaaaacttcatagtgccacccttaactaccccacgtatgataaagagctttatgccttaataagagccctcctgacttgggaacattac

SEQ ID NO: 264925 - DNA, 432 bp, Glycine max
tagagagatcctagagattctctaaggcttaatcttatatccttccctctacaagaaggttagaaccctaaggacgataatttgggcaaggaaagcttttactatgtaatttattatttgcattgtgttttgatgttgattttgtgatgctcatttgatgaatattgggtgtttaagttgtttttatcattttttggtgttggtgtagattgagggttggatttctttgtttttaggtcaaatcatgatcggcataattttgcaatctcgctaagtgagcaaatccctctgatttagaaaatttagaaatttcataagactcgctaagtgagcaaacctcactggaaaaaaagaagattggaactcactaagtgagacacacaagtttgtcttatctagaaatgctcgctgagcttgtcacttctttgtatt

SEQ ID NO: 264926 - DNA, 389 bp, Glycine max
agcttgtcctagcgtttatgcgagacggagaccaacatgttagctatcatcgccaagtacgcagaagagttaggtctagccacggcccacgagcatagaatcgcggatgagtatgctcaagtgtatgcggaacaagaggctaaaggaagggtgatctactctctacaccaagaggcaaccatgtggatggatcggcttgatcttactttgaacgggagacaagaacttccccgattgttagccaacgccaatgcgatgggacacacctactccgccctcgaacaaattcatgggctcctcggctattgccagcatatgatagacttaatgggccacataactagaaatcgctaggaaacttgcatggtctctcagaccttgactagata

SEQ ID NO: 264927 - DNA, 376 bp, Glycine max
gacctgctattaggacctatgaaactcagcttataagcgcgggttcgggagacaaaggtcaagcgttcgcgatatgcgaagatgatattccgagtactttggatgtggtacgaccatgccctcctgatttccagctgggaaattggcgagtggaggaacgccccggcatttacgcaacaagcataatgtaaacctttacggttttaaaagctctatagttgggcctaggctttagagtttttccttttgttaaggctatgtgtcttttgtttttgaatttataatacaaggatctttcttcatctgttcctggtctctacccattctcattcatttgcatgtatacttctttatctgaaacggcagatccgatgac

SEQ ID NO: 264928 - DNA, 391 bp, Glycine max
ccccccgtgtctcattccgccggatcttaagtgacgccgatgcaactttagttttggataatcgttgtcattctggaatcgatatttcaaacacaagagtttttagcttcagatgccacctcatcaattacgaaattgggatcattattcgggcttaagattctttttctgaaatgattgggtattgatacacattggtatagatccttcataaacttggattgattattaacggtaactatatggcgatgactatgctttaaactttaacaatactattcttatggtgggccactagctgggaaaaactatccaacacttcctggcttctcaacagaaccaggtctcttggaatgttgggttgcaagcaaaaaaaaactcaatattcttc

SEQ ID NO: 264929 - DNA, 336 bp, Glycine max
  unsure (1)..(336): unsure at all n locations
ngagatgaggaagtgttgaaaggtgaaacttcctgcttttattgttgaccacagagtggtacctggagatatgtcgcggnggtcaggagaccttggggacgtcaggtggggtgctatttgccaaaaccaagcttgaccaatcccgacccaacccgggcatagtcggtcagtgagaacctgtgatgtacctaagcaggcgagctcctggtagtcaacagataataggaaaacaagacccaaagcnaggaggcttgtggtggctggccagctgtgaattttggtaatatgtggattgtggcctctggtaatcgattaccaagggtgggtaatcgatta

SEQ ID NO: 264930 - DNA, 389 bp, Glycine max
agcttgcctaataaacaaggacacaacaagagacatgaatcttataaatataaatatagatacacatgcacggtaaaaaacttacattataataagaggtgacaagatcattataccatatataacattaacataacaacataaatgtttaattaaagaaaaaactaatatttaataaattactatcattattagctattgctgccttcatttgcgtctaattatttgtattacttattttctattcaaactaaacctgttcataacgcaataaaaattctaaagggtcacgcacagctttctgcactctctgtctcttacctatttgacagtgtgtatatatatatatgagatacacttccccccgttttatgtcttaaaactcccgc

SEQ ID NO: 264931 - DNA, 451 bp, Glycine max
  unsure (1)..(451): unsure at all n locations
tggagaggatgcttcaatggagggaaagatagagcgagagattgagagagggnggagcacgacattgaaggaggaaaagagggggagaagttgaactttgagttgtgtctcacaagactcccattcatcatagttacaacaagtgttacacatgcttctatttatagactaggtagcttccttgagaagctttcttgagacaacttccttgagaagcttctttgagaaaacttccttgagaagctacagcttagctacacacacccctctaataactaagctcacctccttgagaagcttccttgagaagatttgtatagaagctagagcttatctacacacacctctctaatacctaagctcacctacttgagatgagaagctagagcttagctacacactcgcctataatagctaaactcacccgcattcgcaaaatacatgaaaatac

SEQ ID NO: 264932 - DNA, 416 bp, Glycine max
agcttgcactcttaggggacatgatgaaagtgtgttatctggacaccgtggcaactctcttgaaatgataaagctcttatcttcttataatacggaaatagatgaaattatctcggacaacgcccctcacaatgtaagatacatttcactcactatccaaaaagatattctatatgtctttgctagaaaggcgcgagatgaaattcaagaagagatcggtaacgcaaaattctcgttcattgttgatgaagcccatgatgaatctaaaagagaacaaaccactctagctcttagatctcgcgataagaatggatatgtctacgagcatttcttggatatgatacatatgccagatactacatcatccattcttaagcacgggatatgtctcctattgcctcatcataatctcaaca

SEQ ID NO: 264933 - DNA, 364 bp, Glycine max
  unsure (1)..(364): unsure at all n locations
atctanaagacatatttgatctatagactaaaaggaggtatgaaaagcacaagatagcaaccaaagcaattatggcaatctagttcaataacagaagctagcacaagtaaaatagttatgtattcctattataacagattaacacctaagtcttttcaaccaaacttaagaagaaccctatgttgtgaatcataactaaagtatacatataaaaagtataaaaggcttatgtatataccanaagtgtagaagaatagcaccttgtgtttgccatggatatcaactctcacttttccttctttgggagttgcaacaacaacaacaaaagcgacctgaatagcttcatctttgaaatcataaataa

SEQ ID NO: 264934 - DNA, 229 bp, Glycine max
gagtgatgctgaagctctcgtctatctttggtgggttcatcttcaacgcttaagtgaaaatcattatttcctgcctcttctttgaactgcttgatgatcaacaaagttaaagaacgtcttctgtttgagaggataacgtgttagctttaatttagtcacattactattgaagataacgctggtgtttttgtacttactaatccctttcaggggaagcgacattcactaa

SEQ ID NO: 264935 - DNA, 332 bp, Glycine max
cttctacaccccatatttctccccctctggcaacatcaaaaagccaaagttcttgggaagtaaaccagagataataatggagtagaaacagatgaacatcaaagtgtaaggcataagcaaccaaacgcacaaatgaaaaaagaaaaaccaaaccataatccaaataataataataataaaaaacaaatcacaaagtatcaaagcataaaagttagaaatccaaattctacaagataaataaagtacttaacataataatctaaattctaagaaactaaatagccaaaatacacggcttataagagacatataattagaaactaaattctaag

SEQ ID NO: 264936 - DNA, 183 bp, Glycine max
  unsure (1)..(183): unsure at all n locations
agctcttatagaacaagaacttgtgtccactacttgtaagaaccaccgatttaaaaatagagtatctattgctgcacatacactagaactatatgactntgcttatacattctattcatgtcacacaagtcaaagtctagtactcacagatgagaagatcacggtaaagagaagtaatgtaat

SEQ ID NO: 264937 - DNA, 377 bp, Glycine max
  unsure (1)..(377): unsure at all n locations
tatacggcctaggatgtggttntgtgattaaattcaattaagacacaagtcttgcacttgccacattggtacaactccctccatcaatgatcaccatgcaaactttgccattgatcaaacatctagtgtggaaaatgttttctctttgactttcctccatagacttcaattattggccaagtaaccgcctaatcatcaacaattctccctccagtgttttctccacttcctgctcatcatcctcactctcttctcccttttcaacttcggactcactaatgtactctccatctctaagaatcatggctgtcttgttagggaactcatatgcataatgttccaagccttggcaccgaanacacttcacatnctggctc

SEQ ID NO: 264938 - DNA, 467 bp, Glycine max
  unsure (1)..(467): unsure at all n locations
cgcccagcgttgatcatcagtaccgngatcttaagtgactgacgctcgcacttatatgcgagaattccaggaacatactcttctttgacttagcataaactttgctaagttattttttccattatccaatacaaaacatttagaacccaagatattgggatgtgacatgtttggctttctgccagtgaacaagacatatggagtttcctcntaacacagggtcgttatcaaagcccctatttaaaatgtancacgcagcgttgacggctacagcccaacagtattttggaagaagagatctttaataagattagcatctttcaaagattactttcctttaaaacacatttgttgagtgtcttgtgcaaaattatgctactccatcttatcaataaattanattcttatttcaactcccccatatcatcctatagaatatcttagattttctattcgatgatcttgcn

SEQ ID NO: 264939 - DNA, 364 bp, Glycine max
  unsure (1)..(364): unsure at all n locations
ctaagctatatataaagcactntttctaccaaccacacataaccaccatgtcacaccatcttactgatcgaactgcatatgtgccatcaaccataaactaccatatgtgacagtgcaagagttaattaatatctggattcttattttttagcgagtcttctgttgtcaaataaaacttaaaaatactcaaatttttattccaataaaactcaatatggattcttgaactctctntgttagtctttactttatgtcctcactcacaaataatcccattgtgacttgaacatataatttttcatacttaataaacctatattaattaaagtttcttctatgagcaacttcattgattaaaaacttc

SEQ ID NO: 264940 - DNA, 345 bp, Glycine max
  unsure (1)..(345): unsure at all n locations
acgcacacgtcctctnttttcatgtcctttgactctcgaatatatatcatttgcccaatcagcacaatcttgcgtgctttgtaaactttgcgaactctctgcttcaaccattttcttttttagttcatcctacataaacacaccttataaacacaccttataaattatcatcatacatcaatattctgaatacttcaatatcactaaacaaaactcatcttcacattatttactccccctcaccccataaccttctattacaaaattgagcaaaacaaagaacaagtattgaaatcaaaactaaaattcttacaattacaacagcagccttttcagtaacaatgc

SEQ ID NO: 264941 - DNA, 434 bp, Glycine max
  unsure (1)..(434): unsure at all n locations
ntntatatatgttatcatttcagtgttataaagatatgatattagcttgttgaactcgacttacatagtcgtgattgttggggagtcatttccgggataagtacaattcagaccattccacatgtagtctataggggcgcatggattcattgcagaagaaagacacaaaaatcagagtagattcattgcagataattcttcggaatgatcgagaataagtatgagcctatctatcaagaagcataaattgagaataggtcccacatgctaaaaatggtcatctcagtgcttcaaaaaaattttccaaaagacatagagagtacacaatcatacataatatgcttagagcaaagtttgagggctttatcttactattgatatcctgcgccacaccttctgtggggatgaaccaaaatgttcatctccctgagtgg

SEQ ID NO: 264942 - DNA, 328 bp, Glycine max
  unsure (1)..(328): unsure at all n locations
agcttgtgtggagagaggagatatagacagacatttacttataaacttttttgcaattgtctatccgctaagcgcttagtattgacacgctaagcctagcttgctcgcgctaagcgcatagacccctgattggttggttgaatagtttaactaagcgcacaacactgtgctaagccccacatctttgcggtaattgaactttaaccagtgggcttagcgtggatgatgcgctaagcaccaccttttctccggaaaaattttattggagcagcgctaagcgtgctatgctgccctaaggcncttgatacattttgtaacttgagttttt

SEQ ID NO: 264943 - DNA, 498 bp, Glycine max
  unsure (1)..(498): unsure at all n locations
tgtattcttaggaatcactnggactagactcacccaccggctatcagaaatggngtagatgattccaactggcaagagcttggtcacctcctttntcaccacatctagaatgatggggttaagtcgtcgatgtggctgcctcactggcttagctccatcctctaaaagtatcctatgcatgcaggtagatgggctaatactangaatgtttgctaaagtccatccaatagctttcttgtgcttctggagcactaacaacaacttctcctcttgctcggcagtaagggaggcagagatgatcactggaaatttttccttgtcctccaagtaagcatacttgaagattgctggtaagggcttcaactctgatgtgggtggtggctgaatagtgggaggaaccanggtaggagaagaagaggagggttccttcacctgtacctcataaagcaagtcataagtatatgtaccttctgcaacatggttagtgcattatgactc

SEQ ID NO: 264944 - DNA, 414 bp, Glycine max
  unsure (1)..(414): unsure at all n locations
tgagtttagcgagggaaagagtcgacgccaaaatgaaaagtcaagcgacggataacataacacgccagggtcaagccaaatttaacaattaaatacacaccacaccaaacaacaacattttcatataaaaaattggcgccgacttgtgttccactatgacattctaaggcggtttcaacacactgtcttagaatgtgtgtcataaacaaataattattcttaattacagaaccgccaccgcataacattctaacgcgcgcatgtataatcgctttagaacgcgcgtcgtanaacaatgatcttctagtagcggcgcttgaaaccttcgatcaagcatgcacttgcgctttttgtctcagccacgatggggataaacgtccttttctttcgcctccgcacggtgcttatgaatcg

SEQ ID NO: 264945 - DNA, 422 bp, Glycine max
  unsure (1)..(422): unsure at all n locations
ctaagcttaactatganatgtgntatggcgattgatccgatacacaactcatggaagaaggtgaattctatgtctacaggtagggcatattgtaagacaggtgtcttgaataacatgctttatgtntgtggaggggttagtcaaggtcaagctggattgattcctcttcaatctgctgaagtttttgaccccttcaaggatacatggtccgacgtacctagtatgccattctcaagagctggagtcctgcccacagcttttttggctgacatgttaaagcctattgccaccgggttaagctcgtacaanggaaggttatatgttccccanagtttgtattcatggccattttttgtgatgttggaggagaaatatatgatcctgaaacaaattcatggatggaaatgccatatggaatgggt

SEQ ID NO: 264946 - DNA, 360 bp, Glycine max
  unsure (1)..(360): unsure at all n locations
agcttgtagatccaccgaacgtggaggacaagatctgtgttgtgcctcatggcctttccaccgattcagatgtccgtaagatgtgcgcattgntcgatttccctttctctctcgttctcttgtttttttgcgtataagcgtgcgtgtgttgttgcgactgaaagggaggcgtatatgatctccaagagatctcctccaagcaatgcggagaagtttgagttccaagccgaagtgtcgtggctaccttatggattgtgttctgccccaaaaaccctaatcaacagcccattcacagcctcaagggccatcatgggcgacactaactatatctgtccgctccacataaataataattcacga

SEQ ID NO: 264947 - DNA, 193 bp, Glycine max
  unsure (1)..(193): unsure at all n locations
tcattccattcctcatttttctcatcttagctttttatcttggttagggttaccaagaaaggtattgagttgtacggttcagctcatactttntctgttgtagggttgaacggattaaggagtcattttggagatgtacttgtgtatagtttttgtaaagtgattttctataatgtttattctaagggttctt

SEQ ID NO: 264948 - DNA, 281 bp, Glycine max
  unsure (1)..(281): unsure at all n locations
gtctacacgcacgcgcagggcgaaacaccacactaccctggggatggctgtgagcgggcaacagacgcaccgccatcaactctacagtttacctctgctcatccacaaaaaggcttgagtattgcctacaccacatgggcgaccaatacgcgaccaagtccaaagccaaacgtaagcacagtactacgtccgtgaccgacaacacataacgcgtccagctcaagacgttaaagaagcgctantaggaccgaacctactaccttttgaatctacgcttgcta

SEQ ID NO: 264949 - DNA, 470 bp, Glycine max
  unsure (1)..(470): unsure at all n locations
ntcaacanatgtcttcacaaataatcatcacacagcagaaccctagcaagattacccatcatatctcccanaaccccatacccacgaaatttaagagagaaagaagtccacccaaacctgaattttcgaagtcccacttgtagccacgcacttcacgactccgggaatgccctctttttgcgatttggagcggaaatgagcaccaaaggttggagctttgttgggcaacaatggtggatgggagaaaagaagaagaaggctgcgtgagagagagggagagctgtctgaaattctgtggggctgagtgaagagagagagagttgctttctggtcttaaataaaaggttttccctttntccgttattntattcaagctctgccacatgtccctattngagtggagcaagaaaggcccactntctcttttngactgtgacccatactcagtcacaaaagtggagaaaatctga

SEQ ID NO: 264950 - DNA, 242 bp, Glycine max
agcttcttgatataaactacgcattaatcttcaactaataacttaagatcctttgatagtttttgtgtatattgaccgactgccctttcttttacttggttaaaaatatatatttgatgcctgcatgcacatttatttaatgtaattcttttgatacgcgtagatagagaaaggtgcatgctacatattgtttaaaaattctgaaagcccactaatactgaatgagaacgatgcacgtcttg

SEQ ID NO: 264951 - DNA, 375 bp, Glycine max
  unsure (1)..(375): unsure at all n locations
taccatgtgtatgaaggaatntatccttgctccctgtttgagctgaaagtatgtntgattgattgaaccttgagcctacgcaatttatcgaatgctaccttgtcttatgttgtagagagcattattcatagaaagaatcttggttcaaggaaaatttgttccaaatttgggggagtactgggtgaaagtgtgatatggtaagaaaagagcagcacacacagttaaaaaaaaactataatataaaataaaagtatgtgtgtgctgccatttaataaaaagaaagctgagtgtaaaaagggggcaagtaatacggttgggaataaaaagaacaaggttgatctatggatgaatgctcccctagaatctaagcttttg

SEQ ID NO: 264952 - DNA, 445 bp, Glycine max
gcttagagaaactctatatatacattgtattaaaaactacttttctgctcattacagtacaacaaaggcataattattatgttcttaaatatttttaattacttacaatatactaagtattatatacactgtttgctattcatattcttctgtttgctatcgcaaaataccatgtgacatatttttcatcgtggagaagtgcatggatttaagtttggcagttctgtgacgcggaaaaataaggccttcaaccaaataatagcagctgaccatttctttgttgacgtttataagagtgctattcagacacgaaacccttcaacatggccatataagcccaaccagcaaggccaaaagacaattcacaatctcatcatctagtcctattaacaagtattcttatcaaaaagaagaaaaaactaagagacccagaaatctcatcatc

SEQ ID NO: 264953 - DNA, 479 bp, Glycine max
  unsure (1)..(479): unsure at all n locations
ggcagcaggacanacaaacccatccagtatcaacgtggacacatttataaatatttgatcataccacgaccttccacgctcagttttgtagcctgaagctgcttctttgttggagccctcaattgctgcaatttcttattcatctgcagtggacagttcacacaggtaaaattggttcacatctctactgacagagataccaccaccaaggtacataaattntacacattcataaagtctgagattngtttaaaaaaatcattatctaagatatttgtctaaataaattaataagaatgtcaaggtcacataagtaaataaattagtatccccatctccacttcatcttagactatcttatcagttcattatcccgttacatatcatcttactctattattactgttattatntacatatttattacttctgagcaatcatgacttgcaataggtcaccatagcaacgaccctacatta

SEQ ID NO: 264954 - DNA, 285 bp, Glycine max
  unsure (1)..(285): unsure at all n locations
ggatctctaagtcanctgaggcatgcaagcttgtgaccatttgaataactcaagagcttccttgtntcattttgaccgtctcgatatattatgcgccttaatccgacctccgagtgaaaagtcatgaccatttgaataactccacagcttccattgttcaatttcgagcgtctcgatatcttatgtgcccgaatctgaactccgcgtgaaaagctatgaccatttgaattactcgagagctttcgttgttcaatttcgagcgtctccatatcttatgcgcctgaa

SEQ ID NO: 264955 - DNA, 284 bp, Glycine max
  unsure (1)..(284): unsure at all n locations
tgtttcgaggtgcttacacgctgaagatcgaagaacgacgaacaatgaatgaggaacgtcgaagaacggtggaaatctttgcgaaattcctcacggagaacgtcacggaaacgcttcagaagcgcctccgcttagatgttcttcacggaaacaatgattccaagcaaactcctaagagagagaagtgcctaaagggctgggatccttttcttcttcatattctcccctatntatagcaaaataggggagatgcttgtcgcccagctcgcccaggcgagctcagc

SEQ ID NO: 264956 - DNA, 106 bp, Glycine max
agcttcttagtttcagatgatgcagatgggtctgtatctacctcacgcactcatctaatgactatggcatcatttgttgtgctaaactgctatgagctggacgcca

SEQ ID NO: 264957 - DNA, 405 bp, Glycine max
  unsure (1)..(405): unsure at all n locations
gctggagtaganacatgggaccaactcattgtatttcaaaataggaagtcgtatctagtcaaggtctgagagaccatacaagtttcctaacgatttctaattatgtgggccattaagtctatcatatgctgacaatagctgagaagtccgtggatctcctcgggggcggagtaggtgtccgccactgctttggccttggctaacaatcggcgaagttcttgactcccgttcaaggtaagagcaaaccgatccatccacatggttgcctcttggtgtaaagagtcgatcacccttcctctagcctctttttccgcgtatacttgggcatattcgtccgcaatcctatgctcgtgggccgcggctagacctaactcttcttggtatttggcgatgatagctagcatg

SEQ ID NO: 264958 - DNA, 445 bp, Glycine max
  unsure (1)..(445): unsure at all n locations
taacgcctgtntccatattcaaatcaaatcagtatttcaaaagttgttcttttatcaagtccatgcaaagacatttgaattcatttggctgttgggaaagtccttcattgctttcattcttaatgttttcaaaaaaaatctttttgttgtgttctgatccaaaaataagtttaaaaaatactggttgttgattctttccaaagcattttatgttaaaaacaaattgtttaagtcccacaaagaaatctataactatactaacaaaatatcaaagaacacataaatgagtcaaaataaacttgtgtaagttttttaaaaaattcacaataataaataaggtaataaagtacttgaaatttaatacagaatgataaataaacataaagacgangtcanaattctttgaagatcatggctgaagagctcaatctccttgatgatcatg

SEQ ID NO: 264959 - DNA, 443 bp, Glycine max
  unsure (1)..(443): unsure at all n locations
agtggatatggccatgcgttgttacacggaccacatgttacatctgccatacttgactccacatagtgctagtagatagaccagaagaagtgcccattactgtagaccatatacattgacctgctatatcccatagggattcacatctcgcccaaagctntgttattatgcaaattctcacttgtatttggactagaaaaaccacgccatgatttggaattcctattgactccaatggagtatgatgggcggngcaacgtttgtcgatacaacatggagcaagtgcacctaatagaggttataaaagatcaaggagaccatgcagacatgtcgtccgaggagttcgaggagtaccagatacttctaaagtagttggagtatatgtgtgaggaggagagtaacgattcttctgagaacacgtcttagtcagtttagtactctta

SEQ ID NO: 264960 - DNA, 408 bp, Glycine max
agtaatgacccactaacctataattaaaataacttaatgccattaacctaaggaattaaaaaaaacttaatggctgagtgtaactgaaattgtggcaaccaaaagtcacccccaacagccaacaagtcagtcaccatttggtctcccaaaaggctgatgcctacgttgccaattgggcccttattacaacttgaactaaacctaactaaagcccttttagttgattaacccaaaacatatttttggtcagccaactttacaaggattgggccattatttagacaaactaaacactctaaaattgagacaaggtggtgtcatttagtcctccccatttgggccatgatacaactcacaaccttggacttttctccttgaaacttgggcttgtattcaaatagtatggac

SEQ ID NO: 264961 - DNA, 441 bp, Glycine max
  unsure (1)..(441): unsure at all n locations
agcttatgatgttgactcgagattgattcaagttgttntgatgatgacaagagatgatgactaagagcccactagaatgatttcaagattgagtcaacaattcaagaatcaagagaagttaattattacaagattgagtcaacaattcaagaatcaagagaagtttgatttcaagattcaagataagatgaattcaagtttcaagagaagaaatcaagaagacttcacaagggaagtattgaatagatttttcataacacagacatagcacagttttgttttttaaaagagtttttctcataattttctaagttaccagagtttttactctctggtaatcgtttaccagtttcctgtaatcgattaccagtgacaaagattgttttcaaagctttaactgaattacaacgttccaattaatttcaaatggtgaatcgatac

SEQ ID NO: 264962 - DNA, 413 bp, Glycine max
agcttcttcttgtttctcttctcatttgacaccaatatttttctcgagcacttcatcgagaggcgctgccaatgtgctagaatacttcacaaatcgtctataaaaacttgctaagccatgaaaactcctcacctcggtcacagacttaggtgtaggccattctagaatacccctaaccttcttctcatgaacttgcactccttttgaactcacaacacaaccaagaaacacaacatggttagaacagaagatgcatttttcaagatcgcgatacgagtgttcttttctgagcacaggaaagacagagtttaaatgatcaatatgccaatcaagtgaagtgctatccataagaatatcatccgagtacaacacaacttatttttctatgaactctgtgaagatatggctcatta

SEQ ID NO: 264963 - DNA, 523 bp, Glycine max
aggacgcgtgaccatcgttgcctcgcttcactctaatcgcgccctctggaacactccagctgtaggccgcgttgcatatcttgctctaatcagtatctccaaaaggtgttcttttatccagtccatgccgagacatttgaattcatttggctgttgggagaggccttcattgttttcattcttaatgactccaaaaaaaaactttttgttgtgttctgatccaaaaactagctttagaaatactgggtgttgattctttccaaagcattttatgttaaaaaaaaatttgttaagttcccaaaagaaatctataactatacttacgaaatatcaaagaacacatcactgagtcaaataaacctgcgtagtttttttaaaattccaataataataagggtataagtcttggaattcataccaatgataataaacataagacgagtctaatttttgaagatcatggtgggagctcatctcttgatatcatgctgaagagctaactctccatgaatatcacagatcg

SEQ ID NO: 264964 - DNA, 337 bp, Glycine max
  unsure (1)..(337): unsure at all n locations
agctctgagccanaatcccaacttatcataaaccttgacccatggtgagaatgtcaatccttgccctcggaagaaaaccaaaaaagagaaaaggaacattcccaatcaaagagtgggagaaagtaaaaaaaagaaagtctcccgatcaaagatcgaaagaaaacataagaaacatgcagaaaggtctttggaccatacaatatctgaacaatacagaattgtcaccaaataaacaagaaaaaaggaacacacgacctaaagtcggcctttccctttgattgccaaccaaaatcctttgcgctagcgactgtctcgccccgcactaaacaaaaacaga

SEQ ID NO: 264965 - DNA, 403 bp, Glycine max
  unsure (1)..(403): unsure at all n locations
gtgcaccatcgcccgaccgccacctagtaccacatgtgatgggtaccccataatcctacacgcttgagatgatgaagcgttgaaaggtgaaacttcctgctattattgttgaccacagagtggtacctggagatatgtcgcgggggtcacgagaccttggggacgtcangtggtgtgctattgcccaaaaccaagcttgaccaatcccgacccaacccgggcatagtcggtcagtgagaacctgtgatgtacctaagcaggcgagctcctggctgtcaacagataaaaggaatacaagaccacacagcacggacgcttgtgatggctggccagctgtgaagtttgcgtaaaatgtggattgtggactctggtaatcgattaccaagggtgggtactcgattac

SEQ ID NO: 264966 - DNA, 445 bp, Glycine max
  unsure (1)..(445): unsure at all n locations
tgcagctgcagctttctttacaatcaatgagtctactgacttacaattntaaatgcaagttcacattcttgttctttcttagcctaacatacacacttgctcaaactcatgataagaaacacacactccatcacaatcatgcacttaatttaaaataaaagcatataactattctcacaaaaagataaaaagtgctgtactaccatgtcatcaaacacaagccaaactattcaaaatgcttcaggataagcaaactaactacccataaataaaactagcagtgtatgtagacctaaaggacatattgtatgaaaaccaaaattgtaataataataataaatcacaaagcacacagtattatcacgaatcaaaattcatgtgactggtcttggatatcctgtgcctgaacatcctccttatctgtcaaatgcaatactggagtact

SEQ ID NO: 264967 - DNA, 330 bp, Glycine max
  unsure (1)..(330): unsure at all n locations
tactcagcttcaccnctcgtcaagtttggcttcggagacatcacatatgatgttggcaaagcggtactacggaccctctgaggtgatggagaagatgggtaaagtggcgtatcgtctgacacttcccagccaaagacgcattcctcctgtgttacatgtttccttactcaaggctttcgtgggagatcctacaacgataagcgtggatcctttactagcttgcaccagtgcagcaccaatagcaactcctgtgataattttggactccaagatagttccatcggtcgacggtccacgtcgtatggcgctcgtgcatggggcggactcttc

SEQ ID NO: 264968 - DNA, 239 bp, Glycine max
caagacggatctgacgatgaagcttggatcgattcaactccctacggatcgacgcttattacctcacgctacaacatacaacacaaaagcatggttcattagagaaagatgtttatatgcactcacctggtctgttagaaagacccaccacttctacctactactgtccattatagttatttgcaattttactatttctagcctacacttactctaattctgttccaaatcatcaatta

SEQ ID NO: 264969 - DNA, 416 bp, Glycine max
  unsure (1)..(416): unsure at all n locations
ctatacaaaagttagtcgtataaagcgacttacagatataaagggtgttatacncttatttcgtctggggactatcatntgttaatcttttgattcttgttagtcgacttacagtgttgaacgccagttacggtgtgaaacagaaaatcattcagtgttttgatcaaaaatgcaaaagataccaacaaagggaaaaatggtcttttccttggtttccttgaccctagctcgctcatgctagcctctagcttgcctgtgccaccgaataacttcatggtgaagaaaccaactcgtcagggcgagctcattgcttcagcactaagttttagcttgcctngcaagctgcaactgctccaaagtgaccctctgcttataaataggcgttctangggttgtttaagagtccacgtccaaca

SEQ ID NO: 264970 - DNA, 269 bp, Glycine max
  unsure (1)..(269): unsure at all n locations
agcttgcatttggaattgcgacagcccctatttattattaggattagtacctgacatctccgacaaacaaatcagangncacacgacaattatagttgctgtttgaatacctcacccactcaagtgtatcatacaattatggcttttctctaatgaaacactcttgccttctaccactgtaatctcccttgacgtnataagaaattcaagagattatggccacaccaaacaacaattaaccaatatctgtaacgtaacgctagagagac

SEQ ID NO: 264971 - DNA, 399 bp, Glycine max
  unsure (1)..(399): unsure at all n locations
cgaagtcgattctacgacctgttttcttcactctgaattcttttgctanatttaaccttgcaatcacagtctcatagtcaactcgattgttagaagttttgatattaaaccttaatgattacttgagtgagatatgtccaggtccttcaagggtgattcctattccactaccattgaggttactagctccaacaacatagagcatacaccaatcacctctgtcactactactcgattcatatggaagctctaccatgatgtagaccatacattaagctctaatgggtccttgtggctagctccatggaccatgcaaccattctttcaacaagctctggcttttgaagcactagtctaataggatgagtggtcttgactctgatcaactgactttggaag

SEQ ID NO: 264972 - DNA, 346 bp, Glycine max
  unsure (1)..(346): unsure at all n locations
agcttgcatcagtaattntctagcatccatcaatatatagtactttgagtgctccaccatgtattctgcccaaggctgacactacattatctgtctagttccaccaaccaatgaggtttacattgaccagtctagcctaacaattatgcaaaagggggagaagacccacatcatttatggcatagacgttaatcacattaagatgctgaagtcaagacacaatctgaacaattatgactcggctagcattgataaaaccacgtcacttttgaattactaaacgtccaagagactcgcacggagaaagcatacaccctttcatatcgatatatttgactcccatgca

SEQ ID NO: 264973 - DNA, 349 bp, Glycine max
cccttgactgagatgaaatcaccatttccaatttttacttaggaaacaatggttttgtcaagttctttaaagaggttcaggtcattggttatatggcttgtgcagccgctgtctattaaccatgaatcactggaactattgcttgtggcaaagcatgttgtgacaaagagttgctcatcttcttgttcctccacaaccacctttgcttcctttgatatgaacttgcatattcgctctacatgtcccatattgccacaatttccgcacttgacatctggcctgcaccaacattttctttcacgatgatttgtctttttgcaatgcggacaaggaggaaaggtctcacctt

SEQ ID NO: 264974 - DNA, 357 bp, Glycine max
  unsure (1)..(357): unsure at all n locations
agcttctatatcagctgaaccattntatcaatatagacaagctgagttttattcacaagattagagtttatcttttttattttagtgagagcgattctcctacattattaagtgattcaagaacaccctggctgtatcaaaggacttttacaacctttgtgtgttgccctcgccggaaagagcgactatttccttcctttcatcttcaaccttgttctttcaaaccacaattccagaaaatccacttctgcccagaattatctcgtggtcataactcccgctttacgcgctcaaattaagtgattcttgagcctaaattgaattctaagacgagaactttcacctcgcttcggaatc

SEQ ID NO: 264975 - DNA, 459 bp, Glycine max
  unsure (1)..(459): unsure at all n locations
gttgttacaaatagtttatactcctttagccaaacctgtgcagcatcaattaaagaattctttataagatctgtcacaacctacccnttggcgggagggcgacgcgtgactcgcgggatgcgtgttccacgaaaggaatacgcgcggagtcgccaccaacgtttatttgaggaaaacgtcggacaaaccaaataagacgcgatctacgaacttttaagtgagaggctcgggagttgtatttacgcacggtgaaggtattatcaccccacacgtccgtcacaagggacggcggcctttaatcgaatgtgcaaacatgactttgatttttacattcccttatatgtcattatatcctgtataccctttttatatgtttattctctttatgtggtcgacagaggtgtttccctctgctcctacgtattcctcaattgcgatgaggaaatcagacctacgtag

SEQ ID NO: 264976 - DNA, 227 bp, Glycine max
aaatggacttaccctgaattaattcctctgatagcacttttgaggcttgcttccctttccttgatgtgaagctcactacaagccttaagcgaacaaccatgatatcaccatatccttaaggaattctggagctttgcaactcgcttgagaataagcgtggggggtctttcgtttattcgacaacttgtcttgttggctatgctctatgacgtattatggcccctact

SEQ ID NO: 264977 - DNA, 388 bp, Glycine max
cctgactcaccatataccttgacccacggtgagaatgccaatccttaccctcggaagcgaaaaaagaatagaggggaaatttgcgatcaaagaataagagaaggagaatttccaatgaaagcataaaagaaatgaaggaaaattccccaatctaagagtgggagaaagcaaaacaaggaaaagaacgaaaattcctcaatcaaagagtgggagagagcaaaaagaaaagaaaggaaaattccctatcaaagaatgggagagagtataacaggaagaagaagaaggagagaaagctcctgatcaaggatcgaaagaaccagaagaaatgtgcagagaggtcttgggaccagacaatatctgaacagtacagaattgtcaccaaatgaac

SEQ ID NO: 264978 - DNA, 317 bp, Glycine max
  unsure (1)..(317): unsure at all n locations
agccttctcaatcacactcttaccatagatgctttaagcttctcttcctttcgtatagtggaacagggctggctctcccaagacggaagaaataataaaaaacaaacttactaaattaagaagaccaaagccataagctacagctttccctgccagagttgttcttggtggaatctaggccctacatcatcactttctcaccgacctttacncatgctaaacgtgtcccagtttactaacgaaccggtgacgtagagcttctattctcaattgatccttttttcttcccctctgcagcctcgcagttgtcttttatt

SEQ ID NO: 264979 - DNA, 430 bp, Glycine max
  unsure (1)..(430): unsure at all n locations
tctaagcaaattaacaaggataaagtgattatactggttagtgtatagtcttatgcttaatttatccttcatctttgtctttatcattgttttcaattctgattttcttttcttacttcttctttagtgttatttggactgtgaaaaggttttgctcttttctttccggactaaaaaaatgtcaccttatttgagaatgtctcttgaatatatttttttttatcttgaagcctttatttggctagtgagcataaatgattttgtttattccattgcagaataagccagatgatcattgtggtgaagagcgcatagcaatgacactcgcaattgatgacaatgagagtctacagaagacatccaacaaggactggagttgcgagttgtgtcanatttctgcaacaagtttgaaaagctcgaatgatcatat

SEQ ID NO: 264980 - DNA, 210 bp, Glycine max
agctcgcatttggagaggctacatcaaccgcccttattgcttgatgctggaggaatctaagcttttcaccttggcttggtagaaactcttgctggctcgctttgtgatcatgcttgctcaagcgagacacaagctggtgcgaatccaagcttctatatcttatgggtggaatggatgaatgcatgaaggaatgtatataacacatatgcc

SEQ ID NO: 264981 - DNA, 437 bp, Glycine max
  unsure (1)..(437): unsure at all n locations
tattcacgatcgttttttcattaatgatcttaggaagcatagatgcatgattgattcaaacatctatcttagatgcaatttgcaatctgaatggatcatccatttgctcaaagacccattatgtggacaaaaacaactaggctaaacttttagcttagccactatggattggcttcaattcaacctgcaagggaaaggcaaccccctctcacccnctacacgaaagtgtgccattttctttggtgcctgtgtgagtcttttatggtgggatagaaacaactttgtcttcaataacaccttacacaactatgtcttttttcacaaagagctccacacaagtagtgtttcagatatatccaatggcaagagtgaggtccattttgatagagagaccaaccgcagtgttgatcatattgtgaatatgagttgtcatgctc

SEQ ID NO: 264982 - DNA, 487 bp, Glycine max
  unsure (1)..(487): unsure at all n locations
acggcacgggtgantcatctcgtactcgccgatcctntaaagtcgaactgcacgcatgcaagccttaaccntatgtatgattgcggctccacttttactctaaagcacattatgcacaagctgagacttgcgttaatagagggggcaccgcaaatttgcggaggttgtgatccacaattttaacattcgattgccctgataacagagaggaatttataagagccctgcaaaatataatctagatttacgatatatgctcataatatatttactcaatcctggctaaccattacctatacctattacttataagagaagctctacaaatctggtaacttgcactaagatgcctgcctcctttaatcgtagaccttctccatatctacctttattctatcgacacattcgaaggacccatatttattctatagaatatgaccattgtgaacccttctcttcggtataaagtcgctatgtaaaggcgact

SEQ ID NO: 264983 - DNA, 321 bp, Glycine max
ctaagcttggatttaacagattactcagcgaggaggtgagatcgaattttgctaaatttatatgtctgacgaaaaaagtggatgatggagatggatacaaagaaacaagttagacatgaatcaatacttcaaggcatgatccaggcttctgtatataagtcccttattatcacaagagttacttgatcattgaagtcgatgacgatatgttagatatctttagtttaaaaaataatttggtttttttaacagaagtatctgaactttgttgtaactatattctatgtacagtgctaagaaataaaagcttaataagcttct

SEQ ID NO: 264984 - DNA, 324 bp, Glycine max
  unsure (1)..(324): unsure at all n locations
atttgcacccccatttttggtaaatacaactccccttgcctttttttggtgaatgtttttttcgtaaggtaccgaaacttacgaatttcgtaacgatacttgttntctttccgtaatgttacggaacctttgggattacataatcattctctttgtgacttacggaatgttaccgaacctcactaattgtgcaacgatgcttccatttgatttcccgtgtgtcaccgaaccttacggattgtgcatcaatattttcttttgctttcggcatgtcccggaatttcacaaacttgctaatgatgggcgccagcacctacaacgaca

SEQ ID NO: 264985 - DNA, 473 bp, Glycine max
  unsure (1)..(473): unsure at all n locations
atcacatgtggtactacgtgagggtcgggcgacggtgcacaacaagggtgcacatgcactaagcgcgcataaacccaccatcccctgtagcccacctacaactgagctcacgtactaccacgcagcccatatcctcagtgctctcaacactgggtccccatcaatcctcccaagctatggcaacgtccaagtcatatatcattcagacagcacaaattatcacagccaagctaaatagggcaaaggcagagaactctgcccaaaacaccaaccaaaatcacagcttttctcacttaaagaccccagtaataatgccttcgttccaattcgttaaccggtggatcgactcgaaaatattactggaagtctgtagtacttaagcctacattgtgaccgcttggatctactancaaacattcagaactcattctgtacttatgtgtccacagaccaccacacacaagcattgttct

SEQ ID NO: 264986 - DNA, 260 bp, Glycine max
tgcatgcaatcaatgctgctcaacacacctcgtgattatgatgatggatggctcacacttctcccatcgtaaactcatcactttcaaattgagctttcaaaactatcatgacatgtatacgagaataactgatttcaagtcacacaatgtcgagagcttttgatcttcaaacaatcacccatttcttgaacatatcctataattcaaagaaacacatgctcagtcgtacatgcacacaaaattgacccataatattaaac

SEQ ID NO: 264987 - DNA, 139 bp, Glycine max
tcatggaatctccccgagtatagctgagcaccattctcccagttgaaaccaattcgactccgcatgctacacactatccgatcccatggtgtcactgaactgaaacccaattcagccatgggattattaaaggcccact

SEQ ID NO: 264988 - DNA, 418 bp, Glycine max
  unsure (1)..(418): unsure at all n locations
agctctctagcggtttntaattatatgggccattatatctatcatatgctgacaatagccgagaagtccgtggatctcctcgggagcagagtangtgtctgccatcactctggccttagctagcaatcggggaagttcatgactcccgttcaaggtaagagccaatcggcccatccatattgttacctcttgatgtaacgagtcgatcacccttcctctagcctnctttntcgcgtacacttgggcatactcgtacgccactctatgctcgtgggtcatggcaagatttagttcttcttgttacctactgacgatggctagcatgttggtatttgctttgcataaccgctgagacaagtttcttttggaccttgagcaaaccttcaactcatctcttaagatcaaactgtctactcat

SEQ ID NO: 264989 - DNA, 286 bp, Glycine max
actttcacagagaaaattgtatattaactcaggatataatctgaagcatttacaccccttgttaccaaagtacaagttccttccttcccctcatgcattttgcaggtaggcacgtatatttggtttgacctgtttcataacacctgtgatatgagagaaattataaaactaactttagagacttcaaactgaggagaatctaggtgttttggttctagaatcatgcttggtctgaaagcgactaatttactattgagtttggagttgggaaggatatcgtctgtgt

SEQ ID NO: 264990 - DNA, 401 bp, Glycine max
  unsure (1)..(401): unsure at all n locations
agctntttcagaatcagggagagctgcgggctattgtaattgagtcaaagtatggggggtggaggaatctaagcgaagcaaggtcagccaataatgaatctacatggtggagggacttgaagattgtagctcagcaccctcaacacggtcaagtgctgaatagactcatagtgtggaaggtacgacgtggggacaaatttaaattttgggacgattcttggataggggaagagacccatttactagagaaatatcctacgctacacagtatatctcttcagcaagatcatttcattcagcaaatgggagatgtcaaagatctacggtgggaatgggatcttaaatggacgagaccattgttcgacagcgaaatagattcgggcgatcattcttagaagata

SEQ ID NO: 264991 - DNA, 551 bp, Glycine max
  unsure (1)..(551): unsure at all n locations
agggcgccgtgaccgatcattgcgcgctctctatatccgtgcgcttctgaacactcccacatcttctaaagatgccaacggccagatcatggtcaagtgtcttgtgaacctacaagccacagttccagaagatccaacggttagcaaacgctgggaatcgtatttagcgatgcagctccatgtcaatctctctagaagcttgattaagacgcttcctctanaagcttgattaacaggcttgtagctcactacgcagatcttcgctaagatcccgacggatcaatcatggacacgtgccctttgaacttgcataccagatggccagaagatgcaacggataactattgctgggaagcattcttaccgagacatctctatgtagctntctctataagcttgattaagaggctacctacagaagcttnctcgtggctgcttttagaagctctctcaagagccttctgttagcaagtcatccttagctatccacaccccttattgactacaataacttccttaaaaaggtactgttgatataccgcaccataatn

SEQ ID NO: 264992 - DNA, 167 bp, Glycine max
tcgatacataagtcagtcgcgacacccgtcaacacacagtgacacggatcacgtatgagatggattgcttgaaccatctgaccgccaacaataatgtagtatatgtggagaagaagggctcaatatgcgccgatgtccaatgcaatctgaccatgggagctattcag

SEQ ID NO: 264993 - DNA, 411 bp, Glycine max
  unsure (1)..(411): unsure at all n locations
agcttactacaaacgaaacagatgacaccctgattntgtttcttttgtcctggacccttagcagcttcattcttgggctacacagttctttttcttttgcccttgtctttagaggtactcacaacatgagcactttcagtcctttgttgcttcaacctttcctcttcttgcacatacagtatgaaatgagctcattaagagattatttcttcttctgacatttataagagatcttaaactaactaaactgtgaacgtagagaaattagcactaaatgaataagcacgtattttgatagctcaagctttactgcccttaattttgaaccaatatttgacattcccataatgtattccctgacatttcttttgccctgatagttcatggaaatcaagttctgaaagagagtac

SEQ ID NO: 264994 - DNA, 452 bp, Glycine max
  unsure (1)..(452): unsure at all n locations
nggacgtgtagagaagaaatgtaccaaatatcatgcttagcgtgcacagaagggtatgtttcttactttggtctgttctgaggtcaatttagcttaagtacctggaaacacttggtggttagattctggtgccactaataacatcagtgtttcaatgtatggttgtctaagctaccggaagccaattgattctgaaagatggatctatgttggagatggtaaatcggtggaagcggaagctatagagcactntagattatttctatgtactagtttttatttggatttgagagacactcttgttgtaccgtcatttagacggaatttggtttcagtttcttatttggacaaattgngttatttgtggtcatttggaaacaatgtgttcttacgttgtcttttaattcagatattngtggaactggntcactcttnggtaatgataatctata

SEQ ID NO: 264995 - DNA, 358 bp, Glycine max
  unsure (1)..(358): unsure at all n locations
agcttctccttccatggcttattctctagtggatgctcgccnctctcacctcttctcatttatcttccgctgcaactccatggctgaaaatcaccattctaagaccttattgaagctcacagattcagctttcatagaagcttccatcaagtatatacaaaaaaaagcggatgactggaagctattttgtgtatacttatttaattagtgtcttaatattagtattatacatgtcgccattgtctttcttaatgaattgtgcattttgataacgataagtatatatgtaatccccgatattcatgctggtcatttacctacatgcggattggagaaccctgcgctatacttaatctca

SEQ ID NO: 264996 - DNA, 421 bp, Glycine max
  unsure (1)..(421): unsure at all n locations
tgtcacttttttgagtcactcangacagccctaagtttaattcaattggtgtctttatagaacttgtcttttcttaatacacttaagcaaactcataaataggcattaattgaaaatgcttatgatttgcgtttagaaggtttgtaataattaaagcatcaagggttttggactcaacaaatttcccataaaataagatgtaaaaacaattatcacagagacattggagaacattcaccatacaaggatagagagcacatatgaactaatcaaactgaatggtacacatattgaaataataagggactaaacaataaatatctaaacttcatataaccgagtaaaattacctgctacaacaagtcgattttggtgattcatcgtgcactgcccatttcaaaacatttctaanacttatgat

SEQ ID NO: 264997 - DNA, 387 bp, Glycine max
  unsure (1)..(387): unsure at all n locations
agcttgttntanaccatatatagatctatctaagcttgcataccatacgctcagcactattataggagaaaccttcccgttgcctcatataaacctactcctctaaatcaccattaagaacagctgttttcacatccatatgctgcttctccaggacaaaatgagcacctaatgctcttattatatgaagagaatctttcttatatactggagaaaaagtctctttgcaatctattgcttccttttgagtaaataccttagcaacaagncttgccttgtatctctcaatgaagactaatgaatcctttttggtcttaaagacccatttacatacaatagcctctcgcccattacgcaactctacaacgctacacactttggtactct

SEQ ID NO: 264998 - DNA, 455 bp, Glycine max
  unsure (1)..(455): unsure at all n locations
tgagcattcaatatcctgatgagggtgttccatatgttctcaatactggactaatacatttgctgcccaagtttcatggtcttgcaagagaagatccttataagcatcttaaggagttccatattgtttgtttcaccatgaagccccctgatgtctacgaagatcatatctttctaaaggcttttccacattcactggagggagtggcaaaagatcggctatactaccatgctctcagatccatctccagctgagatgaccttaagagagtgttgttggagaaattcttccctgcatctatgaccacttccatcagataagacatttcatgcatcaggcaactcattggagagaacctatatgaatactangagagatttaatatattatgtgccagttgccctcaccaccagatgttagagcaacttcttctccaatatgtttatgaatgactc

SEQ ID NO: 264999 - DNA, 460 bp, Glycine max
  unsure (1)..(460): unsure at all n locations
agcttgaagataagactatacgaggtatcttccttgggtatagcaatatctctcagggctaccatgtctacaacttgcaaactaagaaactcttcatcagtcgagatgttgaagctgatgagtatgcttcttggaattgggatgaagaaaaagtggagaagaatgttcttatacccgctcaactacctcaagaagaagttgaggaagaagacccaggtgaaccaccttcacctccaccacaacaacaagatcaagaactatcatcaccagagtctactccaagatgagtaagatctttggtggacatatatgaaaccagtagcttggccatacttgaacctggaagctttgaagaagcgtcaaagcaggaagtatgggtcaaggcaatggaagaagagatacagatgatcgagaanaataatacatgggagtatgtaaatcatccccatggaaaagatat

SEQ ID NO: 265000 - DNA, 429 bp, Glycine max
  unsure (1)..(429): unsure at all n locations
gacactttaaactcagctttaccaagagttatagtagaaatgtaaaacttccatatgtgaatgcaaattgagaaaacttgctttccttagcaaaaataaaagcttatataattctttttaaaaaagcagaaaggtaagcacatattgaatattcaaaaaaataaaaaagtggctaaagggaataataaatttgaaaataataatgctctatgaaaaccagcttgtgaaaagtggtcttcagatattgatcatgcatataatgcatatcanatatgatattactatcttatacctagaaaataacttcatgaagcccagcttattgtttggtactttttatattgaattgaaaaatagacttcctaactaatatgtttacactcttcgatcaaacaactatgtactttagtaatttcccatctaaatctc

SEQ ID NO: 265001 - DNA, 287 bp, Glycine max
  unsure (1)..(287): unsure at all n locations
agcttcaccggatgatgccgatcgagcattttctaattcacatcatccaattgttattcagggattgaatagaataaacaatggtcggtgtcggtccttatatggccccgactgatatctttcagccgacattgcgcaatttcttttacaaacgctggccgataataatcttttttttacggcagaggaagttttttgtttcggcgttgcctaaaaaatttacaacctangtcggctaggcttttccgtgcgacactaaacgagggttcgctccgaccgacactggc

SEQ ID NO: 265002 - DNA, 446 bp, Glycine max
  unsure (1)..(446): unsure at all n locations
tcctcgtggcttctttgagaagttttctcaagaggcttctntgataagctacatccttatctatccatccctctattaactaaattaacttccttaagaataattacggatgaaaataacgcaacaaataatcaaacatcaaacataattactaataatatatagatatatatatcacggtgttacacatcatatattgagacgctcgaaattgaacaatggaagctctcgagacattaaaattgtcataaattntcacacggatgtccgatcatgcacatcagatatcgagacgctcgaaattaaaaaaacggatctcgagaaattcaaatggtcataagtttcacacggaggtccgattcaagcacatcacatatggagacgcccgatagtgaaccacggaagatctcgagagattcaaatggtcataacttttcactcagatg

SEQ ID NO: 265003 - DNA, 517 bp, Glycine max
  unsure (1)..(517): unsure at all n locations
cgcaccgcgctgngtgannnctttgtanccctctcgacacccgatcctcttagaggacccgaggcatgcaaacatgtaatatattacacccatactgtgatcgactaccagaggagtttttctgacgacacttctcacagccacatctttttatccgcactctaaatggccatcaaaggcttatatatatgtgacttgagacaccaattttacaagactttttaagacaaaaaacgccttattctcttaaaaagcaaaatccttttatactcttacaaattccttggccaatacacttgcgactttataaggaattacttgagcgctcaaactgttccatttatctctttcaagagagatgtattcttctcttcttctttattccgaaaagggactaacagaccgacggtctgttggtgcgaaacaaatttaaacacanacgaaggattgtcgctgcgtgtgtacaacttgtaagaagaactcaccagatagcgcgactctcagccgggtgcttggg

SEQ ID NO: 265004 - DNA, 401 bp, Glycine max
  unsure (1)..(401): unsure at all n locations
ngngagggatgatggngacccggtgttgagagaaacgaggatatgggttacgtgggagtacgtgagctcagttggaggtgggcaacaagggatggtgggtttatgcgcgctctgtggatgtggaaaactcgttgtgcaccatcgcctgaccgccacctagtaccacatgtgatgggtaccccataatcctacaagcttgagatgaggaagtgtggaacggtgaaacttgctgttattcgttgaccacagagtggtacctggagatatgtcgcggaggtcacgagaccttgtgaacgtcacgtggggtgctattgcccaaaaccaagcttgaccaatcccgacccaacccgggcatagtcagtcagtcagaacctgtgatgtacctaaacaggcgagctcct

SEQ ID NO: 265005 - DNA, 571 bp, Glycine max
  unsure (1)..(571): unsure at all n locations
aacgcgcactccctcacttgtntntnntngnnnattagtcctatcccatatttaacttccccacnnnnnnacacgccgcgcttgantcatnctgttagacccgattctatanactcgacctgccgcatagcaactttcatcacaaccagattgttgaagatgttaatcaacacgaacgtggtatgcatcttctctatggatatcgaggtacatcacaaacatacattcggaagacacttcgcagttcgctgagagctgacaatacaactgtaataatggcaacctctatccgcactacttctctggtatcgcctggaggtagaaccgcacattcccaatttaaaaccccactcctacattctgaagactcaacttggaatatccatcaaggaactcaattagccgaggtattaaatcacaccagcctaatcattcgggatgaaccaccctggctcaaaattctgtgtgacgcctcgatcacagtctacaatatcatcaaaacaactcaacgacatacaatctttgaggcaagcatggctctggtgagatctcgcacacctgnccccttccc

SEQ ID NO: 265006 - DNA, 396 bp, Glycine max
  unsure (1)..(396): unsure at all n locations
acgttgttggtcaataaccttaaacaaagttccaccagggatgcatagaagagaaaacccattactaaagtgactaatatntacagttctaaattaacatagatatactcgttattatntgtagtgatatatggtttacttatatcttatttggataaatttctctattaatacttatatgagcaaaataaaaaagcgaaacgaattaaatttctcctataaattaaaatcacttatgcacttcagttttcgaagagaaaaaataaataggtgcacaaacttctataaaagttaagcattaaaaatactccatattattttcttctcttatactactttggttggtgatacacttccactttaccgggtgttctggtaaaaaagtgcagaagacac

SEQ ID NO: 265007 - DNA, 145 bp, Glycine max
cactgggagtatattgtactgacttgcccagaagcggcgcatgaatcattgaggcgccaaaagtcttgtctggtgttccctttgcactatgaattagccttcaccttcgactcgagggattttctatcgtacatgatatgtcgat

SEQ ID NO: 265008 - DNA, 422 bp, Glycine max
tctagtcgtccatagacctcctctgtggtacggtctagcaaacgttgcatctgtgcattcatcgcatccactaacagacgttgagcgccgtccaactgatggtactcgtcaccaccaccacctgctccagccataattcaacatgaaaaataaaatgtgcaataaaaattattaatgtttcaggacctcacaacactctactcacgtctcttatatggtagtacactcgtgtttaatgctctcaatacgctattgtgtaatgtattccctcttgccttttaccactcgtgtttcctcttaagttcctggatggaccagattagacacacaaggtaatataaaatataaggaaagacaatataatgatcacaaacagatttgatttgggataacaactctgacttgatttggataataatata

SEQ ID NO: 265009 - DNA, 455 bp, Glycine max
  unsure (1)..(455): unsure at all n locations
atactaagctttctgtgagcctcgcaacagcttgaccatagcagatgcttgaatggtcatcaaatcatggaatgtccccgagtatatctgagcaccattttcaaagttgaaaccaatacaactccgtatgctacacacttcggatcccatggagtcactgaattgatacccaattaagtcatgggattattaaaggcccactactatattagcttgaatctggggtcctcatattcatcagtgcctcatgtctaatgcctctagttatactagcagggtntagagtaatcatctacgaagatgaaacacaagctagattagtcggagcaatactacgaacaactgggaaaaatactttaactaaaaatgataaatgcattacaattatacctgatgactggctgggatcttcctgcttactttatccaacatggcaagctacagcatcaaattat

SEQ ID NO: 265010 - DNA, 401 bp, Glycine max
  unsure (1)..(401): unsure at all n locations
tcttaagtcacctgaggcatgcaagctntatagggagaaactgggagacacanaattgtaccatacattgaccaatgtcgccatcccagcatttgacatcaagcaccttcaacccgccatcttttccagcttccacgttcatcccctcgatcttcaattctaagatttaatttattatataaaataaaatataccacacttaattgttgtgagaaaaaaaaaacatccatgataaaacaatatgtttaattactatttcagtccctacattgggaggatatgttattttagtctctgaatttntttttaattcttgaattttgataaatttgttttttantttctaatataataaatcattattttatgatgatctttctagcattttttgataatctaaa

SEQ ID NO: 265011 - DNA, 459 bp, Glycine max
  unsure (1)..(459): unsure at all n locations
gctggtgctaattctatatgtgaccaatgtgcggacgccatgctttttacaagcattgacgtgttgataccataatttgatcctctnntataaatagaataaagtcgttaataaattggtttgggaagttggtgcggttcaaataattggattttgactttataacgtgactctcttcagtgggactccggggtggttgtaagaaatttggggcttaagtggtgtacagaaatttactataatattaaggattcatctttatattaattttctatttttaaaggtcgagaactaattattcatattttatgaataggtaattctagtattaatttattctcaatggcgctaattcaatcaatttatttcataatatgggtgatattatatagataaaaaattatgtgacgtttaattcgggaaacttctttgactatgacaattgttacgtgtatacat

SEQ ID NO: 265012 - DNA, 435 bp, Glycine max
agccttgcgagattcctcacggagaacgttacggaaacgtttcggaagcgcctccgcttagattctcttcacggaaacaatttttccaagcaaattcgaaagagagagaagcgcctaaggggctggacacttccttcttgctttcctcccctatttatagcaaaataggggaggtggttgccgcccagctcgcccaggcgagctcagctcgcccaggcgagcagggttgctttctccagaagcaaccgccttctggaggaatcttctggagggcccaaatgggcctgggtgctattagcacccccatttttactaagtacacccccctctgctattctttggcgattcttttatcgcaaagctacggaaacttacgaatctcgtaacgatacttgttctctttccgtaatgctacggaaccttgcggattacata

SEQ ID NO: 265013 - DNA, 395 bp, Glycine max
  unsure (1)..(395): unsure at all n locations
gcttaacctcatcgtctctcacagtctntagagttgggagccaatccagtccttgtgttcggactctcagccacttatgatagccgccgatgatcccattactgcttcccctaagctctctgtcctttcttcacgccgcatcccatgccttgcgaactccttggagtaccctcgcattgtggtcactgaaacctcgtgcggtgaaaggcgtgatgctttcgtctgatagcactcctctcatgggacattcttcgcatgaagatagaatgctgattcttccttccttctagcgagggaaccatttaacagacagccctccatgctagccaagagtagtgcacaacaaacaatacttgcgccgctcttttacatccccggtcgaacgtgtcatacat

SEQ ID NO: 265014 - DNA, 429 bp, Glycine max
gctgttatttattatgaaagtggtatgctactcctctatcgatatggaggtacatcaacaacatacatttggatgacacttgcaagttcacgtgaagctgacaataaaagggcaataatgcgaccctctaccagcatagcttctctgctaccgcctgcaggcagaagtgcgcatttctaatgtacaatatcagtcctatcttttgaagactcaccctgcaatatccatcaaggaactcacttagctgagctatcaaatcaaacaagtataatggttcgcgatgaaacacacatggctcacatatagtgctttgaggccgtggatcccagacttacagatatcatcatacacaagtcggagggacatacaatctgtggaggaaaagccatggcattaggtgagattcccgcttatctgacaatatatccc

SEQ ID NO: 265015 - DNA, 459 bp, Glycine max
  unsure (1)..(459): unsure at all n locations
ngtattangattccataggtcttgacatagtctggaaacagtgtatatatatcagtaccacttgtactaatcttattattataatacatattaattntgcggacaaaaaaaaactaattgttccaacctgtcaactcaaactaaccagtaaacacctctttaattggagacctatcatcaatttttagtttataaaatctcttcaagggacatggaaaaagttataggtaagcatatgatgaaatggtgtctatgacacanaaagcacaaagtccagtatgaacacgtgggttaggagagggcaaagtagagaaaatatacaaaaagaataaattacctcgtcacccccagcaaacataaatggaactacatctccatgcagggccaaaatccaatggataggcctgctaaacacaacctatatattaaaagtatggaaacantgttaatttatgtaac

SEQ ID NO: 265016 - DNA, 406 bp, Glycine max
agcttacaccatatatattatcattgaataacttggtgtgaaaactacctttttacatataaacaatttgaaatcaaatgattttatttgattttaaagatttataggaattctaatgttacatattagccttctcacattatgggtgcacgcacagtttgtacataattaataaaagcatacataatcaacgaattattaattaccaatgataaaacatcgataaaatcatacaaaacacttcatttttgtggttgaggacctggaaagcgaaaaatattatatacttttacattgacgagcagtacgattaacaattcatcaaagacgaatatgacttctccagactctttatagataccctcttatatatttatatataatataaaaattctttcattatatc

SEQ ID NO: 265017 - DNA, 442 bp, Glycine max
  unsure (1)..(442): unsure at all n locations
tctntcttgacagntgatgctagatccncatctgtaaagcctgtaacatctcccaacgtagcaacacattcaaaatctgaaactgatatttgtgtttttccttgtgaagcatagtacaactttttcaatattaggcttccatattccaagtttaaatgtgcattgacaatctataacaatcactcagtgctctgataattttctttactaattgaaaatggcaattcttcttttctaatttgttggctatatatcttttctttcgctttttaatttggcagctggcattcccaaaaggccttacttctgctcctggaagaccaagggtggctccaagcagtccagtcatatttgacgttagtttggaatatataccggcgcttgaagcggatgaggagtaaaataaggctgtcctttgtacgtgatcagtcttgattttatg

SEQ ID NO: 265018 - DNA, 486 bp, Glycine max
  unsure (1)..(486): unsure at all n locations
cggcccggtgatgctcattcgaccgcgatattaactcacgtgaggatgtaagctggaaaaaagaggcaacttggtcctttttggtgaagggatcgcacatacggagcaaatgattgcttcctcactcgacaattgtattcacattctcattttcttctcgggcactttgctgctatcacttctgactataaactcgctagatgtcacgatgtgtatacgagactaataatatgacgcccctgaagattaacttctcatctaactattctacaactcgccgagcggatggaactggcacaatantatcggctattattgttaagcaggaatttatacataaacatctcccctagctcctgtgcatcacgcgtctatgaatgacgaatctctggcctatactcgtcatatacagtnaggcgtccacggtgagaaaaaaacatccacaactgccttggcaaacacgcacacacctgcgcctccaaaccc

SEQ ID NO: 265019 - DNA, 209 bp, Glycine max
aaggatagcctttgtggataactgcgccgcgggtaacgaggacgtctgttcttggctgactaatgacactgttggggtggtgggaaacctggcccgataagaatggccaacacaccatgggtttttccctccttttcaccctcttgatttgccccacgtttctcagtccgcctagaaagatgatcaaatctgcctcttttccgacctac

SEQ ID NO: 265020 - DNA, 472 bp, Glycine max
  unsure (1)..(472): unsure at all n locations
cgtatccaacgcgtatcttggtggggaagctccttcttccatggctgaatccctaagggaaggcgccatctctcacctgttcttctttgacatccgctgcatctccatgatggaaaatcaccatttaaggacctcattgaagctcaaagattccgcctccatagaagccacacaagcaagcttccatcatcgttagagttgtcacatcttataatataatccgaccgagctttcacgccgtgaccacgttcgaaccacgaagaggcatgataataatatttcaatgcagaacgaagacttacaagcgtaaacaacgaagatagacatattgaagtcatatttgtgagtctgngtgtcgctcctcccctctattagtcacccgacagctctgtcgtttgagtcgcacctattgtcgagcgctccaacttcgaaatctaaacgacgtgttctgtttttacgtacacaaacttcg

SEQ ID NO: 265021 - DNA, 337 bp, Glycine max
agctattggattaactccataagctctctagctagaatcttggtacccgcctataagccacattataaaggctaacggcgctaaatctctctatgatctttgctccttccactttggagatcaaggatatcaagggcttcggctacggttctaacctttgaaggataaaaaacatgttcacaaccagtctagtaagagtgtcccctactacctcccattggttctgcgaaacacaggcttgaaatccattaggacctacagccttaaacgctctgtatacttctttgctgggccacaaatctaatccatagaggcgaatggtcatactttagtagtg

SEQ ID NO: 265022 - DNA, 405 bp, Glycine max
  unsure (1)..(405): unsure at all n locations
ngcacactanaccttctttaggagttgtaaaaccaggtggcactatcatgtagacatcttcaagtagatcaccatgcagaaatgcgttatttacatcgagttgatgtaaaaaccaatttttagctgttgctaacgcaagaactagtcgaaccgttgtaagtttaacaactggagaaaaggtctcagtgtaatcaacaccctcaagttgcgtatatcccttggcaaccaaacgagccttatacctctctatacttccatctgctttcctcttgatcttataaacccatttagaaccaatatgctgtttaccaaaaggcaaggcagtaagagtccagtttttgttactctccaaggctgcaatatcttttttcatagcatgtctccaacaagcatgtttcacagctt

SEQ ID NO: 265023 - DNA, 163 bp, Glycine max
ccgggactcttaagtcacctgagcactgaaatgccaactatatccttgatattatacgctgttgccgcctcaacatatgcaccatccaaaacgccatgaagacatcattaacttctatcacgtacttcccttcagatgcaaatacactgtctaacttgagctt

SEQ ID NO: 265024 - DNA, 568 bp, Glycine max
  unsure (1)..(568): unsure at all n locations
ctgcaggtgctcantcttatatatcatttattnattttgttatangcnncaaggcacagtgcgcctgnatgaccttgataccttgtaaccctcaactatnaatataaaccctcctgacttcatggaccgtgttgtctattcatcgtttccggctatgaacctgctgagaacaatccctctatgacaccgctattaatgctactaatctcgtgttaccaaggaacgcttcgcactctcaaatttttagtctttgccacgctgttagatgtcggaattacgtacaacattcttattggaactattcgctatcccatagctaacttggtcattgggtctcatttgacagcgagggcttatacatttaataggccaccccattctcatgaggaagtaggctaagatgtcaattttagacttggattacaaaaactttctggtctattcctacgacatggacaatccagacactgagagcttatacttcatggtataacttctggaccttctttcacaatgaaggtgggcacctgtatattactaacaaaatcaagttggcatttccctcatt

SEQ ID NO: 265025 - DNA, 437 bp, Glycine max
ttaaaccctagtgcttggaccagatttttaaactaaacaccaagtgtgatttgcaagtcaacaaaatgtttaaggtattcaactacgcaattatagagtacagagacaagccaataaccagtttgttagacagaatctgattttacattagttccagaattgtgaagttaaacgctatgatgatgaggtatgagggtactatttgtcccaaaattcagcaatcattgaaaaaaacaagatagcttgtgaagcaaggcagccacattggtctggtgatgttgatttatctttgtttgacgtgtcaacagacatagaaaggtttgtggctagtctaacagaacatacatgttcttgtagagagtgagagttaacagaaaataccatgcatgttgctcaatggtgtccaacctaacgtagtgtcaattcttattacatgt

SEQ ID NO: 265026 - DNA, 434 bp, Glycine max
  unsure (1)..(434): unsure at all n locations
agaagaaatcacatgtntgtcatcatcaaaaagggggagaatgtgaatgtatgtatacatgattttgatgatgtcaaaagaagaatcaatcaaggctcatcttgcttcaagattaatacaagattgtttcaacaaaaaaagccttgattcaagatttcttcaagatcaagccttgcctcacaatgaaaggtttcaagtcattcaaggcacatgtaatcgattaccaatacatgtaatcgattaccaatggtttgaaagtgtgtaatcgattacacatcatatgtaatcaattaccagagactctgaacattgcgaattcaaattntaaatgaagggtcacaactgttcaagacaaacaattgtgtaatcgattacactaattctgtaatcgattaccagagaagatttcaaggaatatcgccacagtcacatct

SEQ ID NO: 265027 - DNA, 183 bp, Glycine max
ctttgtcgaacatacatacttgctacaacttatcgaaaagaaacaccaactaccctcatcttaaggctattattcgaaattcattcataacacctattgtcacaagaagataacagcgcttcactgcctaatcatcaaaggcaagtcaaactattccatatgcttcagaacatgcctaccaac

SEQ ID NO: 265028 - DNA, 427 bp, Glycine max
  unsure (1)..(427): unsure at all n locations
tactaagcttatatntattatgaagcaagtaaagatacatgtatcgtgagtattcatctataataaagatgaaatatttgttgccgcatgagtccatatcgagacaacatatatcaatatgtataagttctaatattttttaacttctgttggcatttgtctttatcttgttagactgctttccttttatgcagtctacacagtgttaaagttattaaagttaagagtctaagtactccatcattcaccaaccttttaattctttctatggagatatgtcctagcctcatatgccacattttcattcatgatacaacatttaatactagtgttttcttgtgtatctatcacactattcataatcgtgttagataaattaattgtgaataaaccatcatttaacaccatttncaaaaacaatagactt

SEQ ID NO: 265029 - DNA, 480 bp, Glycine max
  unsure (1)..(480): unsure at all n locations
atgcactattcaatggagttgacaagaacatcttcagactgatcaacacttgcacagtggccanagatgcatgggagatcctgaatatcactcatgaaggaacctccaaagtgaagatttccagattgcaactcttggctacaaaattcgaaaatctgaagatgaaggaggaagagtgtattcatgacttccacatgaacattcttgaaatggccaatgcttgcactgccttgngagagaggataacagatgaaaagctggtgagaaagatcctcagatccttgcctaagagatttgacatgaaagtcactgcaatagaggaggcccaagacatttgcaacatgagagtagatgaactcattggttctcttcaaacctttgagctacgactctcggatagggctgaaaagaagagcaagaatctggctttcgtgtccaatgatgaacgagaagaagatgagtatgacctgaatactgatg

SEQ ID NO: 265030 - DNA, 350 bp, Glycine max
  unsure (1)..(350): unsure at all n locations
agcttaacgagtacatacactntgggtctctgcgttgctcttcatctaatggtgtataatggtgtgtagttttcgcaatctgtgcttgagctgactggttatctgatatagcttaactgcattgttcgcctctgttgactgtttgcttaccatgtctgaatgaattctgttacgcttttgtgtgtgtctggaacccatgaacttgctaagcatgcatcatgtgcttagcgagttcttgcataataaatttatgtatgaatttctggaaaaacattcatgatctcactaagcctacgacgtgcgctcagcgagttcattccatcttgattcgtgttcatgaattatggggt

SEQ ID NO: 265031 - DNA, 457 bp, Glycine max
  unsure (1)..(457): unsure at all n locations
ctcgcattaaacctggaagataggttaccctctcttactttttttgcttttcttcccttctttataatttgcctttttgttgttaatttttggcttcttcttggtcaaagagacaaaaagaagagttgatcattagacaaatctcttttaataaagattctggaacgttgagtgaggttctgaggtaataaataacacttggagatttaattcataatttcaggatacatgtagggaagggttttagttccaaagttgaagattaaagagctcttcttaactatcataatacaaagcaatctggcaatggatcgttgtactagtgttntctgaccaagctattaagaaaatctctgtttaaccaaagcatgttcttgtgtgaagagtcataacacagtgtcatggttatacattacgtgtcttgaatatctaagaacaatcaatttcaccccacatg

SEQ ID NO: 265032 - DNA, 331 bp, Glycine max
attatatgactcacggctactctgagtaaaaagttattgacgttagaatttgctcacagcttcaacattcaatttggagcgtgtcgctctatgaccggagtataatagacatccgagaaaaaagttattgtcgcccgcatttgctcacagctataacatctagtctaaagcgtctccatatatcactggacttcatcagacatccgagtcaaaagttattgtcgctcgaatttgctcaaagcttcaacattcaaattcgagcgccttgttatattatacgactcacctccgacctcccagagaaaagttattgacgcctgaatttgctcac

SEQ ID NO: 265033 - DNA, 77 bp, Glycine max
atacatctagacgctctaaattgaatggtgaacctctgaaccaagtcaaacgagcacatgctttgactcggatgtct

SEQ ID NO: 265034 - DNA, 274 bp, Glycine max
agcttagatcaggcatccgagtcaaacgttatgtgttgtacaaatatgcatgggcatctcatttttatttttaatcgccatgatatattacgggcctcaactcgacatgcgaatcataactttaccccgtcagaatccacccgagtcttccatgttaaattttgagcgccgcgatacgttacttggcttattccaagattcggaggaaaagttatggtcgtttgcatttgcgacggcctctcattttatcataacagcatctcgatatattatg

SEQ ID NO: 265035 - DNA, 482 bp, Glycine max
  unsure (1)..(482): unsure at all n locations
gcttaaaaaagctaacaaacttagaaatcaagtgatcatgtattccgaaatatagggggagaaaacggatgcacattntatctatatacagttgtttgttgtttgcttgaatcttgatttcaagtattgtattgtcatcatcaaaaagggggagattgtagatgcaattggctttgatgttttgatgatgatcatgatgatgtgttgcaattgatgcacatgggcttttcaagattaaaattcaagacaatacttcaagattacaagtcacaacatcaagatgatcactagaatattaggaagggaattcctaattgaattatcaaaggtttggccaagtgatttaaaataaanagtgtctttcaaaggttttactctctggtaatcgattaccagaggatgtaatctattaccagtggccaaatacgtcttataacagctataacaatttgaattcgaaatttaaaacctgtaatcgatta

SEQ ID NO: 265036 - DNA, 470 bp, Glycine max
  unsure (1)..(470): unsure at all n locations
tctatataagctgaaccattntatcaataaacacaagttgagttttattcagaaaattagagtttatctcttttatcttagtgagagtgattctcctaaattcttgagtgattcaagaacaccctggctgtatcaaaggactttcacaacctttgtgtgttgccctcgctggaaagagtgattcttttcatcctttcatcttcacccttgttctttcaaaccacaattccagaaaatccacctctgcccagaattatctcgtggccataactcccattatacgcactcaaattaagtgattcttgagcctaaattgactgtcaaaacgagacctttcacctcgttgtggaatcacctcatttggagccctgtagcttcagttattgccatttctatatntctgtccagccaccacttaacctacattntaccatcccattcatccattttatgccangaaccaccttatt

SEQ ID NO: 265037 - DNA, 512 bp, Glycine max
  unsure (1)..(512): unsure at all n locations
cggcccggtgatactccactcaacccggatcttagagtganctgcccgatgcaacctcgattggagaaagtgttgctcctctgtctatcgtgattaaatgtaagtatttctttttattcaagctataacaactaccatcgcagactgtaattgcacgttataatacataattctcttcatatatatacatatatatatatatatgctcttcctgctccccaatcagtgttccctggctcatattcttgactcttcttaatgattacaacgttggtggctgaattgtcactgtagagttcataacacttgtntccgcacaatccaccgacaattgtcatacagacgatgtcgagagataccatacctctaaactcttgggttttacgccctgaactaatgatacgtctcttattcttacacatttcatataatattcttacacatttccactcaactctgcggtggggtgcagcataccacgcctctaacgcttctacttcgctttggttgcg

SEQ ID NO: 265038 - DNA, 469 bp, Glycine max
  unsure (1)..(469): unsure at all n locations
tcgtggcataccagtggttggagggcaaggttggatggcgaagttaatgtgtggaagtcacaatcatgaattctgcaagtcattagttggacatccatacgttggtcgattgactaatgatgagaatacaattattgctgatatgacaaagtcaatggtgaaaccaagagacattntgcttacgttgaaagagcacaatgcctatagttgtgtaacactcgcacagatatacaatgcacgaagtgtatatcgttttttcattagaggaagtgatactgaaatgcaacatctaattaagcttctcgaatgggatcagtatattcattggcataaattaaaggatgaagatgtngtgcatgatatcttctggtgtcaccctgatgcagtgaagttgtgcaatgcatgtcatttagtgttgttgatagatagtacctacaagacaaacaggtacgnactctcattacttgac

SEQ ID NO: 265039 - DNA, 355 bp, Glycine max
  unsure (1)..(355): unsure at all n locations
agcttgcttntacaattaggccatcaaattctaaccagaacaacatacattgtatgaaaatataattcctaacactattttaactatcaactatcctagcatcatgcaatcagaacaaaaatcaaagctttaaagtaataaactaagttgactaacctaaggcttaaaaaaaaaaaataaaaaataaaaacaaggttaaaggaagcttacttggtgttgaccctcttccacattttctttttccaaaatttgtaattactctttttatgcggaagcggtttaccggaaagtgcctcggatcgccaagtaaataattaaaacggaatgatccgagtcgtaaacacagggaacttat

SEQ ID NO: 265040 - DNA, 479 bp, Glycine max
  unsure (1)..(479): unsure at all n locations
tcatgatgaatcaagagtgattcacagatgttttgatgataacaaagatgataacacaaaatgatgacaaaggtgatgacaaacagctccaaggtcaatcaaagaagagatcaagatttcaagaatcaagataagtatgaaaaggttttctcacaaattgagtagcacgttgaaattcanattcaaaagtgaagagtcacatcctttcacataaaagctctgtgtaatcgattacattgatttggtaatcgattaccagtgattgtttctgaataaatcaaaagatgtaactcttcacatggcttgttgactttttcaaattggttgtaagttattctaacagttataactcttctaaatggtcctcttggccagatatgaagagtctataaaagcaaggctttgttctgttttttaattcattcattcaatcaatcttgaacacttattcaatcaatcttntacaagccctanatctc

SEQ ID NO: 265041 - DNA, 428 bp, Glycine max
ctgcactaggtatgtttatgatcaaactaagagtttaaatcataagagtgtgctgcgtaccaacttctatattcgcccacccagatcatcttgtgatactataggacgtatctcttacatacaatcaaggccgcatttatttgttattgctttactttgagctagagtgcagtcttattttattattattgacactctacgatcatcctctaacatgcactgatatctcatcaaaaagcatatcgattgttttgcggtgcatgtactatgcactggcattgaacgcctacagaggtgatatattatcttaatagagacattcaaacaacaacgggttgtgtttatgacaaacccgcgtcagaatgctattggctcttatgtagaccggcacagacaatcggtttgtctgccctccatctcctccgtgc

SEQ ID NO: 265042 - DNA, 73 bp, Glycine max
gcttatttctgagttataataggcttatcaaacgtggctttaacttctctccgccttacgtggacttatccta

SEQ ID NO: 265043 - DNA, 505 bp, Glycine max
  unsure (1)..(505): unsure at all n locations
acggcgcggctgactcntccattganacccctctcgtaccccgcgattctctatagtcgacctcgaggcattgcagcctccacctttggtttcaatttctgatatggagatgactcctattttcgattctccacactaagatgatggctcttgtcgttttcattctaaaactaaagacgattcttcttgttattttccaattcacatgggaagacgggtcctcgcgcttttattactcactctttggtttccatggccgattgttgcggcgcgagaacgcatgcgcgcgtgccatttgccctgtgtgactcatgacttatacgcaaacagatggaaaccaatgtatggtggctttgcttgatggcccgacgggggagctgctttcctgctcccactctacgacaaccgtcactcaacaatcgcccaaccactctcctcatggacacgtctcgctctcccccattcaccagaagacgctccgatcacgtcccctgatccactctcc

SEQ ID NO: 265044 - DNA, 410 bp, Glycine max
gtcataatgtcaaatcaattcaattccatttgtcatgaaactaccttaaagaaacaaagtggaggcagaaatctttacacaagattcattcgaattccacagagtttttcctaccaatataactcagtaaaggcctcatagctgattcggtaaccattggatcaccttgagaatttaactgggggttcctaatacagaaatctaagttttgaccgctgggatctgctaaagaatgtctagatcacgagatatactacctttcccgtgacagcagatactagcactacacaaccagttctttttctgcataattggcagatttgctgcataattgggcagctattctgcataactgtgcagattttcaaatctatcttagttgcgtccaattccactcacagtggatgcta

SEQ ID NO: 265045 - DNA, 209 bp, Glycine max
agcttcataatagctagggatttgtgttttatgtgtagccgctttatgctttcgtgttgcgttagcgttgtttaatgccttgttatcttgcttagtgcggtgttctattttaattcttttgttcaacgcttcccctgtctcaatttctgtgttttgctgtgaatagcgctttgcgatggatttaaccaccacttttgcagacctggaag

SEQ ID NO: 265046 - DNA, 220 bp, Glycine max
tgccacctagctcgcccaggcgagctaggttgcttcctccacaaagcaccaactttctggaaggcccaaatgggccatggtgctatttgcacccccttttactaaatacacccccttggctttttttgttgattctttttccgtcacattaaggaaacttatgaatttcttgacgatacttgttctctttccataatgttacagaaccttacggattaca

SEQ ID NO: 265047 - DNA, 267 bp, Glycine max
  unsure (1)..(267): unsure at all n locations
cgatttcagatctaaagatgatggttcttgttgttttccattctagatctaaagatgattcttcttgttattttcgatttcacatgtgaagatggttctttgtgcttttattactcanctctttgtttccatggtggattgttgtgggtgagtaaagcatgggtggttgccatttgccatgtgtgactcatgagttataggcaaagagatggaaaccaatgtatggtggtcttgcttgatggccggaggggggagtgtctcttctgt

SEQ ID NO: 265048 - DNA, 344 bp, Glycine max
  unsure (1)..(344): unsure at all n locations
gaaatctttacacaagattcattcgaattccacagaggttttcctaccaatataactcagtaaagtcctcatagctgattcggtaaccattggatcaccttgaaaatttaactgggggttcctaatacagaaatctaagttttgaccgttgggatctgctaaagaatgtctagatcacgagatatactacctttcccgtgacagcagaaactagcactacacaaccagttttttttctgcataattggcagaattgctgcataatngggcagcttttctgcattaatttgcagattttcaaaatctatcttacttgcatccaaattcactcaaattggatccta

SEQ ID NO: 265049 - DNA, 464 bp, Glycine max
agcttgatagactaaaggttaaaggaatgggtcttatagtatatgtagggaacaacctttcctccatgagctaacatttgatgttgagttaggccaaaactcattctaagatattttttattgaaccacaagcaattctatcatggttattttagaaatttgtaattgatcaaggaaaacaataacagactatttgatattactctctttgaactcaccccacaccctttcactagttttcatagttaaaacattcaattgtcttgaaaacatcttttaggaaatattggcttcaagttaaaaatatccaccaatattttcccaaaataaaaaattaattgttgttgtaaaatcgcctcaattgcggtcacccttagttcaccttagttgtggcctcttttgggagctgccttaattgcagtattatcaatggcggaaggccaaaattttgccacataaacatg

SEQ ID NO: 265050 - DNA, 306 bp, Glycine max
  unsure (1)..(306): unsure at all n locations
accatctcccttcaagttttggctttccattgtggtattttggtgctctagttgtcatgttctttgcaaatttcgtgagacaatttatttgtgaatccatgctttgactgcttgattggggggctgcaatggatggccctatgcctacctttgatccctattatgaatggcatgtcatattattcttcattcctcatttntacatgcgcccactaaccgttcgatgaaatgcctcaatgatcattgcgtgtgttattgtgaaaattgaattntggaatgagtttgtgcatctatagtcgtcatttg

SEQ ID NO: 265051 - DNA, 426 bp, Glycine max
  unsure (1)..(426): unsure at all n locations
agctngaagctnggcctgaatagaatgagcacatgcagcacttgngcaagcaagcaaaatgtcatctgcatagaccaacagaacaaccagggaagcacctttgccaatggtcaaaagagaatagtcattctttgattgagagaaaccattagcaattaatgttgttgagagtttacaaaaccactgtctagaagcttgtctaaggccataaatggatttgttgagcctgcaaacaagattttttatcaactgaagtgtacccttttggaagttccatataaacttcctcaaatatatcaccattcaagaagacattatccacatcaagttgtaagattggccattttttagcagctgcaacagccaaaaggactttaactgatgtaagtttagcaactggagagaaagtatcagaanaatcaatac

SEQ ID NO: 265052 - DNA, 458 bp, Glycine max
  unsure (1)..(458): unsure at all n locations
ntgtcctcagatccctcttggtggactagacttagaccaaacaacattattgtaacaacatatttaaaaccaaacttaatccgtagatccctcatttaagactaagtttcaatcctgcttcattcaagttctaaggcaagaatacatttcccaattccaaagtcacctaactatgcacacaactggttgatcgaaccaagagcatacaaaatttaagcactgaaagaagcattgaacacaagaaacacaatcaattagatattaaagtaattgcataagttgttctttagaaatccccaacaagggtgtttagccagtcattacagaaaaaccctaacaataatgagattaagagtagagaataattgctccttacacaagaaggaggatcccttcctctcttctcagcatttcacaatcactatgtaactcactaatctctctctaatacaaaacct

SEQ ID NO: 265053 - DNA, 462 bp, Glycine max
  unsure (1)..(462): unsure at all n locations
agcttaatcatgtttntagattaaaaaaggctttatatggcttanagcaagcccctagggcttagtatgagcgtctgagtaagttccttttagaaaaggatttctctagaggcaaagtagatactactcttttcataaagagaaaattacatgatattttattagttcaaatttatgttgatgatattatttttggatctactaatgaattattatgcaaggaattctctcatgactgcaaagtgagtttgaaatgtcaatgatgggagaacttaatttctttcttggattacaaattaaacaaaccaagattcgaatttttgtcaatcaatccaagtactgcaaagagttaattcatagatttgggatggaaaatgctaagcacatggctacaccaataagcactgcttgctatntagataaagatgaaaccggtcagtcaatagatgttaagcaatatcg

SEQ ID NO: 265054 - DNA, 83 bp, Glycine max
  unsure (1)..(83): unsure at all n locations
ntggatctttgngaggcagtagaagaaaactatgatgttcctgaactacctttatatccaacggtggctcagatgaagaatca

SEQ ID NO: 265055 - DNA, 414 bp, Glycine max
  unsure (1)..(414): unsure at all n locations
tgtttggaactacaattggttcctatggacttntaaattacaaagataggttgaaataattttaatgaaaatgtgaaaggaccatataattttttcgttgttatatatttttgctttaaaatatgtgaaggaagaaacttgggctgaaaattcaagtccagatcttgctgtggtaaaatatatgataataatcacgtgaccataagaaagtatatgataataattaatcaagtcttgaaaatcagttttctcaattaagcatattactaatatgcacctttcattgatggatgataaaattatggttaaataaagtttaattgttaatntaaagttagattattggttggcaattcttaaaatgagactttgtggtaaagaaagtcttgagttgttcaagtgataaaaaagctt

SEQ ID NO: 265056 - DNA, 413 bp, Glycine max
  unsure (1)..(413): unsure at all n locations
gaccttttattgaaagcatcttctaaggatataaaagtaatattatctctttctccatagnttggtttaatttacttgtatatgtatgttttgttttggtgagcttacccttatatgttgcatgtgcgattatatgtgacgatcgcgtacttgacttaatgggaatcagatggcttttaggttggatcttcctcttagagatgaggtagatgaaaccaacattgactntgaagttgtgtttttctcttcctttntcttgagtattgtgtcaatcaacttaggtttgtatagtacattatcaaaagttttatcatcttgtgaaaaggttcaagtactttgatgtattatatttcatttactcttggcttataaatgcatgattngtatatcaaaatggttcaactttcaagtat

SEQ ID NO: 265057 - DNA, 407 bp, Glycine max
  unsure (1)..(407): unsure at all n locations
gagtcacctgaggcatgcaagctntaataattgatgagggttgttctatttctagaagctctctatcttttcctttctttcggccagctattgcttgaagcacatcgagcccacagaatgctaactagtatcgggccatcgagtgagaatcccaggtatgtacgcctcacccgcgtcgaactttcttttgcttgctgtccgatggcagatagactattttttttatcgtgctgtcacaaagactgaattctatactatcattggatgtatgataaaaaaaagtatctctcaaaatattcgttcaaataaattatttgcaatagactatatcaaaatttaaatcaaacgaacctcttcgaggcactacatattctcgngactgacatcaatatcttgaaataaaccaa

SEQ ID NO: 265058 - DNA, 402 bp, Glycine max
  unsure (1)..(402): unsure at all n locations
accagtgttacttactgagatttgccttttggttccagcctttaactaatttctcaggtaaaaagtgccagcgatgtggaatctatgaggaagaccaatttctttcagatgatgtgtttgacgcgtgggaattctgtccttcttgatttactacccctgatggaagatacctncacttcaaggaaaaagaattccatgctagttttctgtgcccagagtgcttatctttttctggtggtgggtttcttgctaccttttttctttgaaaactcctcttacggctatcatgctattaaactttgcaaacagcagtgtgatagtagntgtgacatatatgatgcccatgcaacaaatataaagtcatcanaagtaatccatttcaactttgatggttcttttaat

SEQ ID NO: 265059 - DNA, 451 bp, Glycine max
agcttagaaatcaagtgatcatcatattccaaatcatagggggagtatgaaatgagtgaacgcaatatatcacgcatatacattacttatatcttgatttcaggaattaaattgtcatcataaaaaagggggagattgtagaagcaaagactttgtctttgatgttttgatgatgatcgtgatgatttgatgaaaacgcgcttctcaagtttaattcaagacaaggatccaagaatacaagatacaacatcaagaagatctctagtattttaggaaggaaattcctaattgaaatagcaaaaggtttggccaagaaattacagttaaaaagtctttttcaagagatttactctctggtaatcgattaccagaggatgtaatcgattaccagtggccaaatggtttacaacaaccattaaaaatttgaattcaaattttacactgtgtaatc

SEQ ID NO: 265060 - DNA, 448 bp, Glycine max
  unsure (1)..(448): unsure at all n locations
ctcagcttgaggtattaaactcctatgctacttataataattataacaacgggtttataatgcttaactatttaaccaatctaacatttaataattgaatttcataaaagaaaaaataggttatacaaacagttttatatcatcatctaatcacaatccaacatatatgttatatttgctgattttatgataattattttaaaagttatatcaacagtgatttataattagatagcagtgttaaattattccgtactattagtgtataatcatcactactacaaaaattatattttaagatgcgaaatcgatgacgcttcttaagaaccgtcttaaaattgaacagaatggcaattttgtaaataaaanaagatatacaaagatgatttataaaaaatcgtttaaaaaatgaatgttaaagccgatcattaaaaccgtcttaaataca

SEQ ID NO: 265061 - DNA, 445 bp, Glycine max
  unsure (1)..(445): unsure at all n locations
agctntagtcaaacaatataatctatatatgctttagaattgagtgtcgaacaagcataacaagactatctgtgattggtttaaagatacgatctttgcagatgagaatgctatagaaacattaagaaagctagcagatgggcctaaatgaaatgttatatcttggataggatatgacataaacatgtattcattttacacaatagcacaagatgacgaaagtacaatgcagaacagcggagtcatcctaagggctgaatctcaacacttcgctagtgtgaatgacgccaatccctgtggaacttccataccttagtgtgggttcattgatgaaatctgggagcttaactatgggaagattactatatgttttttcaagatgtaatgggtngacagcaacaccggtgtactcaccaatgacatacgatttacgttggtagacctg

SEQ ID NO: 265062 - DNA, 414 bp, Glycine max
  unsure (1)..(414): unsure at all n locations
agcttcaccgaagggcatggttatttccagttttctgaanatgtctaaaaatctcgccagatgacgatctttttccttcttggaaggtaccacaggatatggtacttccacaccttcatccacagctttttcacttctactcttctttgcattcttattatttttttatttttttcattttctatttctttttctacttctttttctttttcttggtccttcaattctttattcttgaccattatttgttcctatttttcttgattactttcacctctcaccttatttttcttgcaatcagtacctttcttgtcagcagttntcttcttatgtacaacactatcctcatcctcagcctccacaaaccttttacttgtcatcacaactttgcattcctccttgggattctgttat

SEQ ID NO: 265063 - DNA, 301 bp, Glycine max
  unsure (1)..(301): unsure at all n locations
ntgcctttagggcttgtacctcatcactttcttccgaagctntaacctcattgtctctcacagtctttagatatgggagccaatccaatccttgtgtccggactctcagccacttatgatagccgccgatgatcccattactgcttcccctaagctctctgtcctttcttcacgccgcatcccatgccttgcgaactccttggagtaccctcgcgttgtggtcactgaaaccccgtgcgatgaaaggcgtgatgctttcgtttgatggcactcctctcatggngtagccaagctgtcttat

SEQ ID NO: 265064 - DNA, 411 bp, Glycine max
  unsure (1)..(411): unsure at all n locations
agcttatgctgcatatatttacaatagacctcctcaacctcagcaacaaaatcaaccacagcagagcaattatgacctttccagcaacagatacaaccctggatggaggaatcaccctaacctcagatggtccagccctcagcaacaacaacagcagcctactccttccttccaaaatgctgctggcccaagcagaccatacattcctccaccaatccaacaacagcaacaaccccagaaacaaccaacagttgaggcccctccacaacctttcctcgaagaacttgtgaggcaaatgactatgcagaacatgcagtttcagcaagagaccagagcctccatttagagcttaaccaatcagatgggacanatagctacccaattgaatcaacaacagtcccagaattctga

SEQ ID NO: 265065 - DNA, 419 bp, Glycine max
  unsure (1)..(419): unsure at all n locations
tcagatagcttgttgtaatcaattacgagaactntataatcgattaaaacatagagttntgcctatgaagaanattttctaacttagaaaaatttcttcactcacactatgatgatgcacaatgcaacacagatatcagatgtactaagatgcaacaatctgtagaagcaaagcttccaagagtattttgatgatgccaaagattattaaagattcgttcaaacaagattaaagaatcaagaagattcaagtgaagattcaagagaagactcaagatatgcaagaacctcaagagaaacatcaaggtaagttaaaaataatttttcaaagaaaagattgaacaacacacaattgttcaagagaatttntcaagagatatcttctaccaaaggttttttttactctctaggaatcgatta

SEQ ID NO: 265066 - DNA, 442 bp, Glycine max
agcttattcccccaagacttagctagcactagcaaacacctctatatctaaaatggtttcaatttctgatcatgaactggttttgatctttggtctcctaggtattgattagacttataagttattgtacaactctcattccaaccgtttgacagcatcattttaaactttgatgtcatcatgaaaataattcatatttattttgtctgtttcattccaactgacctagcaaaaatgataggtatccatctttgatttgtaacttttccatacagtctcattaaggttttttatcacacaattgagtgtaatgcatggaacaacagtaacttccaattttacctgctgcttctattttttcaaatataattcttttttgtcttgatccctcactgatgctctctgttctcttcctttctataggtaacattgtgtcattcat

SEQ ID NO: 265067 - DNA, 382 bp, Glycine max
  unsure (1)..(382): unsure at all n locations
tataagaacaaaatngcctcaatcatttccaaatatgcatgtgaattangaagcatcaacaggaatcaagccaaggctattatgcaagcaatcaatggggcaaaacacaccaaatgattatgatgatggatggctcanattctcacaaaggtaaactcatcacattcaaattgaactttcaaaactatcatgacatgtagaggaaaatcaaggatttcaaatcacaaaatgtcaagaaacttttattttcaaaacaattacccatttcttgaacatatcctataattcanagaanaacatgcaaagtcgtacacgcacacacgaatgacccanaatattaaactagaaacccaacgaaactaacaacattaacaaattaaca

SEQ ID NO: 265068 - DNA, 437 bp, Glycine max
  unsure (1)..(437): unsure at all n locations
gcaagcttctgaagggtactcaaatgcaatgtatattgtacgacttggtgttgatgtanggagttggattttaccattaatgcatcaacaattaaaacaaaaatggagtgacctaaattggcaagataaaacaaaaactaatgccaacaatagggattcctctgatgatggttcactagatacaagaggatcaattcctacatctgagcattttaagagactagtaagtaataattatatttacttttatatttcttaggaagaacattataatttacaatgggtgttcaaaaaacccataagtggatactgcacactgctcatccttgtttcttgctttggtttagccaggacattagttcatttttttagtgaacttagagcatctcttggctagtatggaccattttattgatatattgacattatttaactta

SEQ ID NO: 265069 - DNA, 284 bp, Glycine max
  unsure (1)..(284): unsure at all n locations
aacctagaaaacagagtagaggcagaaaactctggccaaaacttattcaaattccacagttttccctactcaaataccccagtaacattctcttcgttccgattcggtaaccattggatcggcttgaaaattttactggaggttcctagtacataaatctacattttgaccattgggatctgctagaaaatatctagaacacaagatgtactacctttcccatgactagtgctgcacaaccattnttctgcacatttggtcaagcttgctgcacaaatttgaca

SEQ ID NO: 265070 - DNA, 397 bp, Glycine max
  unsure (1)..(397): unsure at all n locations
agcttagggatggaatacttacttgttggtgatgaacaaaagctcataacggaatcaaaaaatgcgaaaaaggatgaccctatggctgcaaattcgtcaatcccgtgggtatggcttttgaaaggggggaaaagaagtttttgaatgtaaaagtgccccccctttcgtcattattataatttggtgcaggggtggctcgcccaggcgagctaacctgcacttttttttttttttttttttttgaggggaacattaaccatgtcccctcccttcccatggattagcattttgcctaacttgaacttacttatgttagaattaagcggtgattacttatcttattattactcttttcctttntaaaacaaacaaatagcaacagaaagctgctaaatac

SEQ ID NO: 265071 - DNA, 417 bp, Glycine max
  unsure (1)..(417): unsure at all n locations
actcagcttgaggattatgggatacccatcacatgtggtactaggtggcggtcgggcgatggtgcacaacaagttntccacatccacaaatcacgcataaacccaccatcccctgttgcccacctncaactgagctcacgtactcccacgtagcccatatcctcgtttctctcaaccccgagtccccatcaatcctcccaagcttcccccaaaatccaagtaatacaacattcaaacagcacaaactatcacagccaagcaaaacagggcaaaggcagaaaactctggccaaaacaccaaccaaaatcacagctnttctcacttaaagaccccagtaacatttccttcgttccaattcgttaaccggtggatcgactcgaaaattgtactggaagtctctagtacataaacctacat

SEQ ID NO: 265072 - DNA, 427 bp, Glycine max
  unsure (1)..(427): unsure at all n locations
agcttgcaaacgcaatcaagcatggcattgtatgaccccacactaagctcaaacccaccacgatacatctcaccggcgagcctttgagcttcatcgagcttcccatcaacgcaccaccctttgatcaacatatcacacgtggcttcgtcggggaaaaacaccttcgccaaatccttaaccattttttccgcgtaactagcgaaacccttcgaacacagcttctccacgaccacttttaaggaagcacgatcgcgcttcagcccgtagtctctctccattcgctcgaagaactgaaccgcctggctggggcggcccgcgcggacgaagcggtcgatcgcggaggctanggttttggggccggcggcggnggaagcggcggagaggacgtcatgcgtggccttgaagtccttacggcggccaaagtagt

SEQ ID NO: 265073 - DNA, 471 bp, Glycine max
  unsure (1)..(471): unsure at all n locations
actgatcggaatcgtaccaaatttcaacttttaagattcatatcttggttgagagcagnttgatattttgcttaccaatttagctacatggagaggccccattccatgaagcgatagctagtaattagtaaagatatcgtgggagggggattcattattcgagaatattgtaccgataagactcgaaaacaatgaaaatgcacgacagaacaagtccaaataaataatgaacttttgccacatattctgacggacttcattcaccactataatttaatgaaattcctataattctttctagatacaaaatattattccaagaagagcaatgtgttcagaagtaacaaggttcataacanaatgcgagtgaaaacttcatggaanaacgcccatatagtattattccttttactctcagcccanaaatctacttgcaccgcgtgatgatctnacctttgtcatccatcactg

SEQ ID NO: 265074 - DNA, 457 bp, Glycine max
  unsure (1)..(457): unsure at all n locations
tatcagcagttatctagaatntagtctctagagtggccaagctttataattgtgacccaagcatgaagggcaaatatgtgtttagcctttgaattcttcgaaaagaagcttgcctttatctgatctcctatctgaaggtagaaagtttcattctaagctcaaggccatagtctgataacactgaatctgcgaaatttagtctatcttcaggtgtctccaaaagaatctcctctatctgaaaagtctctccaaacttggtgcgatcccaaggaaggacaacattganggcacagatgatgcctatcaaggattgatgctactgttctgtcgtgcaatctttttctctctgcgttgtttcttctaaaggttgcttcatntctaaatccaatggaaccaattcacctaccaaagatctacgcatgcanacactaacaggaaaagcagttaacccattcaa

SEQ ID NO: 265075 - DNA, 455 bp, Glycine max
agctgtcccaacatcaaagtaatgcaacattcatacagcacattctatcacagccaagaaaacagagcaaaggcagaaaactctgccaaaacaccaaccaaaatcacagcttttctcacttaaagaccccaataacaattccttcgttccaattcgttaaccgttggatcgactccaaatttttactggaagtctctagtacataagcctacgttttgaccgttgggatctactagcaaaaatccataacttattctgcactgctctttccacaaccagcaaatgcctagtatttttctgcacttatgcaaaatcctgctgcacaatttcacagcaaaaatctgcacaaaatgcatatttcgaaaaccacacttcccctcatccaatcttgcccaaatcaaatgctacaagtcccaaatcatgtatcaatcatgcctaaaccaaattcaagcctt

SEQ ID NO: 265076 - DNA, 484 bp, Glycine max
  unsure (1)..(484): unsure at all n locations
ggctctanattacattgatgtttgatntattgtttgaagtttgtttgccgttnntgtttaagggtagcatttcttggtaaaactaactttccaaatgtttgccttcgcaagaaatggccccgaggaagcttgcctcaaagaggtccacgaaggacaaagcggccgaaggaactagtttcgctcctgagtatgacagtcaccgctttatgagcgctgtacaccagcagcgcttcgaggccatcaagggatggtcgtttctccaggagcgacgcgtncagctcanggacgacgagtatactgatttccaggaggaaataaggcgtcggcggtggacatcactggttactcccatggccaagttcgatccagaaatagtccttgagttttatgccaatgcttggccaacagaagatggcgtgcgtgacatgagatcctgngtanggngcaatggatcccgttgatgcgacgcatcaccagctctgga

SEQ ID NO: 265077 - DNA, 422 bp, Glycine max
  unsure (1)..(422): unsure at all n locations
agcttaaaaggaagggataaattttgaaacaattatngntgccagatgtaaattaacatgttcccaatatgaagcttgcacctcatgacaaaccattaatcttgttttgtggtactgggacaggtatccacaccaagaagtcattaacagaatgatcaatttaactttcaatcaccagggaaagatattccgtttcttgcttaccaatacccagtccacggtaaggtgctaaaacacctaatgtcatgatgtaaacccgaacttgccctccaccttctttcttctacagccggcacgcaatcgctccaacacaaatatcactatagtaagctgagagacaagggcaagtaatcaatggtgttagacacattctataagtncctcgtatacccatccctnctttgtgtatcattcatattatc

SEQ ID NO: 265078 - DNA, 257 bp, Glycine max
acttatataatttatctcgacactatctttattcgatgtggaacttcaacatatccccttttgcccacagctacccgccatgtgggactttcaacacacaccttctatctatgggtgaccacaatttgggtggctttttccaacaatatacaaattacttcactttaaaatcaatttcattcaaaattaattgtgcaaacaaatcagtcaaacacattcagatttcgtgcatataagctacacaagaattaataact

SEQ ID NO: 265079 - DNA, 447 bp, Glycine max
  unsure (1)..(447): unsure at all n locations
agcttcacccacctgtctcttgatttctgatactacaagacctccttttgatacaaaacatcattatacaatttctcaagctctttctctaaagagacaagtgaagcatatactctaacatcaagcactctatgaacaccttgaatccaagcctgcaactgacgctttcttttaaaaatgtttccaaaaacttgactattaaagatggtagtttcctccttaactttccttaagcttatgaatgacattacttggagagtcctgccctgccaagcatcaaccaccaaatttggatactctgggcgagagagccaagcatcaaccaccaatttgctacaactcanaagcaaaggattatggtctgagttatgctggtaaagaacctccaccaaagcttgagggaaaaggatcctccaatcaggattcaccatacatttgtctagcttc

SEQ ID NO: 265080 - DNA, 331 bp, Glycine max
  unsure (1)..(331): unsure at all n locations
tagatagaagcaatgaacacataanaacaacattaaatagattgttagagagttttacatcaaaggttcagcaaaactccccaacaagaggtttagccttccattacaagtaattaatttcagcacaaaggatagattttgaggaaagaaaatggtaaaaaatggttgaggatgtctcctccaggctctaaaaccctaatctcaatcctccaacctaaactctctttggaggcttgtttatgtcgctctagtttctcccttggatatgtttttcgactcccctccttagtttccgccaacttcagtgtttntaaatgccccttgacgtttc

SEQ ID NO: 265081 - DNA, 455 bp, Glycine max
  unsure (1)..(455): unsure at all n locations
agcttatccttatggcctgcctccggacttcaccccccgtgccaccccggaagatttaagccaagcccctacttttgaggggcaactcccaccttatgaagactatcctgggcaagacgatggggaaggagatacccatcttggccccctactccacctcaaagatccatccccgcatgaattaccccagccgaacatagtccgccatatcccggcctcacccgcacccgtaaaagaatctattccctttgcggaagataagggaaagattgaagcacttgaagagaggttaagagcagtcgagggcctcggtaattacccattctcagatttggcaaatttatgtcttgtgcccaacatcgtcatccctcccaaattcaaagtaccagactntgataagtacaaagggacgacatgtccaaaagggcatctccggatgtattgccggaagatgg

SEQ ID NO: 265082 - DNA, 456 bp, Glycine max
  unsure (1)..(456): unsure at all n locations
cttctcctattttatctaatctttcgttgattntatgaaattatacagtaatatatttttcatattggtgttttcaggattcctagtgaggatgcagagtctcaactcttaaaaggcagaaaaaagtgcagtggaagcttttgagacagcccacgttatgggtgttattatgtttgacttgccaaattgccctaagaaacattgtcaactagagacatccactgttaatggagaaggatcatctacccatactgttactgcatcttttgaaactaccttgaggtgggcagagaagtagttgttgcagtcaaaactgcatttataaggcttgcaaattgtccttcttttagtaacggtgaattcaaggaactactaagaaaaaatagtgaagatccagatacagtggaaggtaatatggactttgtctgagtctcttcagagtgtgaatctgagtct

SEQ ID NO: 265083 - DNA, 423 bp, Glycine max
agcttatgaaacctacagaaaacatgatataatatgtcaaaataagacaattgtatgattgtcgaaaaggaaattaaaaaaaaaaaaaaaaaaactaaccatgttggatggcatgtgcttaaatctgtgataactgtagtaaaaacaatcttctttaaaagaccctttgaccttaaaattcgaagtggaacgtgctgcatcagtggatgcacactgattattatatctggctgatatttcattaggcctttggcaacctcgctgtaaaaagagaaaagatattttaactatgacatgtgatgttacattgtatttgagaagagatacgcatgcacaagaaagtattttctgaaccatggaatgcagaaaaagtcaataaattgtgtctaatattaacacaatgcacaacaaacattgctagct

SEQ ID NO: 265084 - DNA, 415 bp, Glycine max
  unsure (1)..(415): unsure at all n locations
tcacgattaanaacactatgacaaattacattgtcacccgttatagtttcttgaaattttacacgatattcattgtcccctacctcttttaagcttatagtaactccccttaattggttgaaaaacattaaaccctgtacccttaatacctaagaaacacattacatcataaatccctgacactcctgtggtttcttgaaattttcacacgatactcctagtccactacctttttaagggaactcctttgaactggttgaagcacattggacaatgtatccttattatccaagaaacacatagcatcatgcatccctataatggctggagtattgtgtngaaattgaagaagccacatgaaccatgagcatatatttgccgaaaacattaatatatatgcttaacacaaaacaat

SEQ ID NO: 265085 - DNA, 448 bp, Glycine max
  unsure (1)..(448): unsure at all n locations
agctntaacttaagtgttagatcaagtggcctcaaaataattaagaagggggggttgaattaattattaatgaaccttgactaattaaaatttacccttcttaggcttttactatgttgttaagaaagtaaagaacagaaatataaacttaaccaaaagtaaaaacggtaattaaagtgcacagcggaaattaaaagagtagggaagaagaagacaaacacacaagagttttatactgattcgacaacaacctgtgcctacaagcaacctgcggtccttgagatttcttttcaaccttgtaaaatcctttacaagcaaagatccacaagggatgtaccctcccgtgttctctttgaacaacctagtggatgtaccttccactaganatgatccacaagagatgtaccctctcttggtctcagtcacaacaacccaagaagatgtaccc

SEQ ID NO: 265086 - DNA, 243 bp, Glycine max
atggaccgtttcacgtcttggataggatccctttcgtgcctataagaaggaccttccaagagagtatggagccaacaccacttcttatacttatgagttaattccttgtgcgagtggagctcatattgaggacgaggaaccaacatatttgtggtccaattctctttcacggggaggggacgatgcctttcactctaggaagagaccagttactagagccatgagccatacgctccactagga

SEQ ID NO: 265087 - DNA, 441 bp, Glycine max
  unsure (1)..(441): unsure at all n locations
agcttccattgtagaaaggtatgttgctgaagaagctattgagttntgttcgcagtacatggaaacagttgaagttgtgggggtaccgaaaagtcatcatgaccggacacgaggaggtcaagggacacgaggctacaatgttgttaccatgagtcgacaagatgtgtcacaagtgcatttgtatatcttgaataacatataggaggtcgttccatacatacaaactcacaaacaatatctgacatctattaacccaaaattgaagatgatgaaattgttgcaagagcataatagaactttcataaactggtttaaagaaacaatcatgagtgatgacaatgcttccaaaacattaagattgttggctattggtctgaatctaaatgtccccacttggaaggggtatgacataaacaatgtttcgttctatacaaagtcaca

SEQ ID NO: 265088 - DNA, 357 bp, Glycine max
  unsure (1)..(357): unsure at all n locations
tagcgcatatccttgtgacagatgttcagcttagcgggtgttgtcccgctaagccaattctacagaatctaaatttccgcaacttctgctaagcggctccacatgtcgctaaacggtagtgttttttttacaaaggccagctaagcaggccatgtctcgctaagcgccaatgtcttttttcagttttatttttcaattnttgaaatttgaataacttgtgtcctgatcagttgtttggttcctttatatgcatatggccactangaaacgtaagagtagtgattctaggccacaggatcagaatgataacaggagatttcaatcagaggaagcccggaacggatatatcgataatat

SEQ ID NO: 265089 - DNA, 396 bp, Glycine max
  unsure (1)..(396): unsure at all n locations
gcttctgattgaacagacttgaagatcaactcaagagcgcaagtcacttgcacaaacaaaccaatgacatatattcacattccagtggaagttaaataagcaaaaatgtaattgtgagagaatgagataaggacatcaaatttatccatattattagcattgcaactattgtttatagtaatggcataaacttgaaaatcctaatgagtcattggagacatctaacaacaaccttcaaaattgcctcatgtatagtgtcgcttgctaacgccagaattcacaagcgattctcttcaaacttcagccagcctgcatcaattagaccttgcaccttatgtttaagggtcctacaatgctcaatggaataccccaggactcctncatggtaagcacacg

SEQ ID NO: 265090 - DNA, 354 bp, Glycine max
tcgattacaatatattggtaatcgattactagtgtatctaaaagttgaaattcaaattcaattgtgaagagtcacatcttttcataaaatgctttgtgtaatcgattacatggttatggtaatcgattacaactgacaagttctgaataaaaagtcaagagatgtaactcttctaatggttttcagggttttctcaaggttataactcttccaatggttttcttgaccagacatgaagagtctataaaagcaataccttgacttgcatttcaataacttttaagaacaactattagaatttcttgaacaacttttgagaaatcttgaaacctttgcttctcatctttcttcttc

SEQ ID NO: 265091 - DNA, 438 bp, Glycine max
  unsure (1)..(438): unsure at all n locations
agctgttatagtaaaagaacttgtgtccactacttgtaagatctagtgttntaaaaatagagtatctattgttgcacatacactataactatatgactttgcttaaacattntattcattcacacaagtcaaagtctagtactcaccgatggtaagatcacggtaaagagaagtaatgtaatgttgctttttacaagtcacatctgcctttctttntgtgtgaataacttttttattcaagcaaaagtaatcagaagagcactttcatcttttatcattatcacagtagaaaaaacaattgtctaaaagggaactaaaagctaaagtctacacttaccttttccctctttctccaatcagagcacaccacgttagacttcaccttgatggtgaacaaagccacatcaagagattagtgccaaaatcctcaatggatac

SEQ ID NO: 265092 - DNA, 379 bp, Glycine max
  unsure (1)..(379): unsure at all n locations
tatacgggctaggatgtggntntgtgattaaattcaattaagactcaagtcttgcacttgccacattggtacaactccctccatcaatgatcaccatgcaaactttgccattgatcaaacatctagtgtggaaaatgttttctctttgactttcctccatagacttcaattattggccaagtaaccgcctaatcatcaacaattctccctccagtgttttctccacttcctcctcatcatcctcactctcttctcccttttcaacttcggactcactaatgtactctccatctctaagaatcatggctttcttgttagggaactcatatgcataatgttccaagccttggcaccgaanacacttcacatcctggctctt

SEQ ID NO: 265093 - DNA, 452 bp, Glycine max
  unsure (1)..(452): unsure at all n locations
agcttgctaacaaagtacatacatgataatgaagttggagccactgaaaagaaagtacttagccactgtccactttataaaataaagaaaacaaaagccaaaacaaactaaatagtcacaaacacagcagggcaaagcatccgaataggggtaagcaagaaaaaaaaattccaattgttaaactgacccaaactgaaccaggaaaaaaaattataataaaccaatttcatttcaattctgttctttagtaatgaagcagttcaatttaatcacctatggttgaccaaactgtatccagttaattattaaaaagacatctattagagatgtagaatacaaatttttaacacctctcttcatctcgttacaagaagtttctactcggtatatcaatggatcaaagctgggttgacatagatatcattcagtagaacaaaattnttactcttctc

SEQ ID NO: 265094 - DNA, 425 bp, Glycine max
  unsure (1)..(425): unsure at all n locations
tacagaaagataacagattattatgtgagtgataatttacgcaccaaaaaattaagttctcttagaagaaacaagaatataaatgtgatcctgaatacacacagaanagtcaaaagcatatcaaatataatgcaagttgctaaagaaaaaatattcaaaactacataaattaaataataatacagcccatattacttcctctatcggcagttaaataacttctaatttcttttgtcagcaatttcaatttgaatctaatggggatataaataacacacaatgataatcaaactatcaaagtcaacctttggtggtaaggaatttatggatggaaagaagtttgacacaataaactcctaaatcacacagaacactgtanactcnncaccctggtcgcttctattatctgttcacgaactcattat

SEQ ID NO: 265095 - DNA, 456 bp, Glycine max
  unsure (1)..(456): unsure at all n locations
agcttgttgaatgttctgtaaatggatggtgcctatgttggataaatatgttgtaatggaattctacatagagaggcagaattgcttattttcttgtcngtgtctttttgtaattggctccattgcttggccgatcatatcttgaacttggtaatgaataatggtagtgagttgtgcatagttgagaggagtagggctacaacttgtagaatatacaataatgacatcatgttcacccttgtctcaagaagtggcttcatttgaagttgtagactgcttggacacagaatctggaatgagtggttcaacttcatcagccatagctacattagaccctntgctagtttcacccatgacaccaatattngtaaggtcaataaagaccccatgcacaacagtgttgtccacaactttgacagatgcctcaacttgaacagcagtggcagcttcgttctc

SEQ ID NO: 265096 - DNA, 327 bp, Glycine max
  unsure (1)..(327): unsure at all n locations
ntngagtctgtatcgtcctctcagttacgtcgtcggatacatactgaaggagctagtatgatgttccacattcgattagagacacacacaccttcccagcaggatactaccccaattctgaaggagatcgaggaactgttggaacaatattcatcattattcaaaccattagtgggccttccaccatcgagaaacactgatcatgccattaatatcatacccgaagtagccccagtgaacgtgagaccatataggtatccccactttcaaaaacgagaaatcgaagactagataagctctatgttgagtaagggcttcatacgcacc

SEQ ID NO: 265097 - DNA, 439 bp, Glycine max
  unsure (1)..(439): unsure at all n locations
agctntacaggagaaaatactggaagagtccatgatccacactcttctaactaacttagttgggggagaaagagactcaagtaaaagtgtaaaagcaaaagggattgtagttcactatattacccatattaaaatatccaagtaaattacagtccctttgtaaataatgatcttagattcttagccttagattagaaatggctaatgagcaaacttcacaaagtagatagttgaaacatgcaggaaaagtctctgaaaaaggagcactccctatctaagcttcctctccaaagntgacaaggattccatcacccaaacaatagacatgtattcctgcaaaaaaaccttccaatcccaaaatctaatatgagcagtgttgctcactttggtagcatgccacctgttctgatgggttgtacttgctcttaatcttatatac

SEQ ID NO: 265098 - DNA, 361 bp, Glycine max
  unsure (1)..(361): unsure at all n locations
taatccctctatagctggggcaattctttctattnccccttgtttaattaccctcacgtatgggttcatagtatgactcacaagcttaatccctctttagttagctagtaacatcttccttggtcttatatataatcatacttttcctctggagatgtagcatcttcttaaacctcattatcttggtaaacaactttgtgaaccaaggtataatacttttctccccaaaacatttggaaacttctatagttatagatataaatgcaacccaactattcatgtgccttccctaatagcttaagctttgagaatagtcagttgactcagttcataacaggggaaattttggtcccactacttt

SEQ ID NO: 265099 - DNA, 407 bp, Glycine max
agcttcaagctgctcaattgctctaggttgctgtatggaagggcaaaggtctgtatggtggtcagcaaaggagcacaaaccacaaacccttgcaacaggtacagatttctgattcaaggccagctgggttaccaagttaaccaatgcatccagtttgccttcaagcttcttagtttcagatgatgcagatgggtttgtagctacctcatgcactcctctaatgactatggcatcatttctggcgctaaactgctgggagttggaggccatcttctcaattaaatttctggcttcagcaggagtcatgtctccaagggctccaccactggcaacatctatcatacttctctccatattactgagtccttcataaaaatattggagaagaagctgttctgaaatctgat

SEQ ID NO: 265100 - DNA, 179 bp, Glycine max
tctagccaaacggacttaccttgaattaattcctttgatagcccttttgagccttgtttccctttccctgttttgaagctcactacaagccttaaatgaaaaaccatgatatcaccatatccttaaggaattttggagctttggaattggtttgggaataaatgtgggggggggggggg

SEQ ID NO: 265101 - DNA, 452 bp, Glycine max
  unsure (1)..(452): unsure at all n locations
agcttgtagaatggctagacatgatacatgtcttggtttggtttggttcaaggataaaagggatgccccacattatttccatgacacaaatgcaaaaatgatgatttggaaattttatgcaaaactggtcatgcatgcacctatgtggacgctcaagtgtcaaatttttatggtcatgtgatgctagggctcaagattcatttcctctattttaaatcaacccaatgtttccaaaatatgttcttttatcaatttgtgcattcatcctagtccatttcgggcgtccggngaaatttcacagcattcacccttcaggtgtagacacatttttcaaaaattggttatgatcaatgaattcttttcaaagaaaagttggaaatcatctcttttcaaaagcatgtcnggttttagctagacaacttatgttctctttttccacctcttttcttact

SEQ ID NO: 265102 - DNA, 359 bp, Glycine max
  unsure (1)..(359): unsure at all n locations
tgcggactataccttcgaccaaacacagccgtgtttctgtctctgtccggatttaaagcgggttgcagcaccggttccgcttccctaaccgtactggaggcggntgccgtggctttgtcctctatggttttttggagttttaacatgacctccgagatggaagccatttgatcttttaaggccgatagatcggccttcatctgttcttgcacgcnctcttcattatccatttttctggatcgagtgttatangggtggcctggtgttttcttagttatgatgaatttcccgaagaaataaacaaaggtgagtatgccacccaaacatgaatatgcaaatgaattatcggtgcacttgga

SEQ ID NO: 265103 - DNA, 454 bp, Glycine max
  unsure (1)..(454): unsure at all n locations
agcttattagttatagganaaatttcatgatttaaattgataaatctcaaaaggtttctcgttcaaagaatcccattagtagatacagtattttgttgaactgatttagtatatttcacaaatagtcgcagattaagattactaaactaataataaattaagccaagccaagccaagataataataaaaaacaaaaataaaaaaacttcttctgcacaccaaaacaaatacttctgcacaagaactacaaccataataataaataattataataataataataataataatagtaaacacattagttaattaaaaataataatcaatttttttataaaaatgaattgataatattttcttagaaaatatatgttaaactttgattcctaattaacccctctttgttaacatttaatgataatataataatagaataaaagtaacgtagagaatt

SEQ ID NO: 265104 - DNA, 465 bp, Glycine max
  unsure (1)..(465): unsure at all n locations
tgtataagacgtaaaaaacaatttatttacattgttaatttataagaaagaattatacacttaataagcaatttgtgtttaataattaaagcatcaatgatatgaacccacaatctgctcattatttggcagcctcatcatcatcttcaatatcccaactcagatcctcatcttcgtctgccacactcaatctcttccgcaaatcaatcctacttgtggcccctttactctcatcattgctttcaatatcttcaatttcatcccagccaatgtcttcttccncaggcattgaaggctggcttgaaacaactgaaatatcactgtctttgcacgaaaccattgtatcgttatctgtcttcccttctgatgcctctntctcttcacatttaacatccaacttatctccactgctacttacattctcaggtacattagatgacacattctncgacttatcatcaacat

SEQ ID NO: 265105 - DNA, 436 bp, Glycine max
agcttcaacattcaatttcgagggtctcgatatattacgggactcaatcggacattcgagagaaaagttattgtcgtttgaatttgctcagagcatcaacattcaatttcgagcgtgtcgatatattacgggactcagtcagacatccgatttaaaatttattgttgtttgaattttctccgaccatcaacattcaatttcgagcgtctcgatatattacgggactcaatcagacatccgagtaaaaagttattgtcttttgaatttgctcagagcttcagcattcaattttgagcgtctcgatatattacgggactcaatcagacatccgagtaaaaagctattgtcgtttgaatttgctcagagcttccgtattcaatttcgagcgtctcgatatattacaagactcagtcagacatccgagtcaaaagttatt

SEQ ID NO: 265106 - DNA, 407 bp, Glycine max
  unsure (1)..(407): unsure at all n locations
ntgagcanattcaaacgacaataactntntactcggatgtctgattgagtcccgtaatatatcgagacgcacgaaattgattacagaagctcttagcaaattcaaaagacaataactttttactcagatgtctgatagagtcccgtaatatgtcgagaccctcgaaattgaatgttgaagctctgagcaaattcaaacgacaataactttttactcggatgtctgattgagtcccgtaatatatcgagacgctcacaattgaatgttgaagctctgagcaaattcaaacgacaataactttttactcggatgtctgattgattcccgtaatatgtcgagacccttcgaaatgaatgctgaaggtctgagaacatcaaacgacaataactttatctcgatgtccgatg

SEQ ID NO: 265107 - DNA, 336 bp, Glycine max
  unsure (1)..(336): unsure at all n locations
ngtctcanatcttagtagtcattacacatttataatatacactctctccattacatattgattaaccttttaggttgtttcacacgtattaaaaacagaattacttcaaaaaaatagtatttattatgggctaattntaatacaatatcctttcacattattaatttctttttttttatcacattcttattttctggcatggnttctttttggttatctttcacaatttgaggagtgaaaaaaggttattctaatttggtggcttaaatatgtttttgatccttgtaagttagcattttttcacttttgatccatatgacacccgctaccctaata

SEQ ID NO: 265108 - DNA, 440 bp, Glycine max
  unsure (1)..(440): unsure at all n locations
agcttcaacggagtgttcgggtttatgtgngaatattcattcactgcatatcgtagctttccattaattatggctatagaatttgccaacacatgtgttctttgaacagggatggtttcatagtggaatgagccctgaggattcggtcgagctgcatttgctgtcaaattcagtcttcagaacaacacaatagaacacagtcagagccaatgatcacaagatccccaattatttttttttttgtttataggtaagaatcaaaaaattcataaaactgatacacattactgaattaactaagaaaatatgttctatttaccttctaatataaatgtttaaacattataaacttaacaatgtcatatttccatttcatttttatttttatattaaatatataaataaagtaacaaacgtatatcnttttactattctatata

SEQ ID NO: 265109 - DNA, 280 bp, Glycine max
tatatatttgcattgagctggcatatatgtactatttggatatgaaaatgtaatcgcatataatgtttgaattcatattaaatattgaacacatttctatttttagattaccatatggtattaaaatgcgtattaagtagaactaaattgatgaagttaataactaatttaataacatttttcatagaagaaaaaataattaagttataaatcaactaaacaagtcatgcaagccttggagttttcaatcaagccaacctcgagtctactttgaataatg

SEQ ID NO: 265110 - DNA, 419 bp, Glycine max
agcttgtagaaaggctggacatgatatatgtctatgtttggctagcggtttggggataaaggggatgtccctcattatttccatgatacacatgaaccaatgctgattaggaaattttatgcaaaactggtcatgcatgcacctatatggctccgctccctcccaagaaaccgagcaagtcagtcatatcttcatccatatgggactcatcttgctcgctgggggatccagcaggctcctcccctgcctggggctcgggcaagtctccaggccatgcaaccttggccccaaactgctctggagtagggcatgcaaaagggacggaaccctgcccctgctctggggttggccgcctgctggcgaaccaaatgctgtagataacgctctatgcccagtaaccctacgggatcgaccagctg

SEQ ID NO: 265111 - DNA, 382 bp, Glycine max
  unsure (1)..(382): unsure at all n locations
ntntcttaagctnntggctacaaccttttcttcccctttggcaacatcaaaaagccaaagaactcggaaatcaactcagttataacaatggagtagcaagatataagtatcagagtattaaatacaataagccaaactcataatcaagaaataatcaaaccagaattcaaataacataaaatgtcaacaaccacaaaatatccaagactgaaatttaaaaacacaagataaataagcaaagtacttagcataataatgtaaattctaagaaactaaaagccaaaatacacggcttataaaagataaataatcagaatctaaaagctaagaagacggaggaggtggtggaagatcgaaactctgacgaatgtatnncgacatc

SEQ ID NO: 265112 - DNA, 453 bp, Glycine max
  unsure (1)..(453): unsure at all n locations
agctngaaggtaaactacatgccttggttaacctggtaacccaactgtgttggatcaattggtctcagaataattaagaagggggggttgaattaattattactagacctttactaattaaaaattaccattcttaggattntactatgttgttgagaaaataaggaatagaaaagaaacttaaccaaaagtaaaagcaggaattaaagtgcacagtggaaattaaaatagtagggaagaaggagacaaacacacaagagttttatactggttcgacaacaacccgtgcctacatctagtccccaagcgacctgcggtccttgagatttcttttcaaccttgtaaaaatccttttacaagcaaagatccacaagggatgtaccctcccttgttctctttgaacaacctagtggatgtacccttcactagaactgatccacaagagatgtaccc

SEQ ID NO: 265113 - DNA, 475 bp, Glycine max
  unsure (1)..(475): unsure at all n locations
gcgcacactttttacgaacgttcacttgcacaagacattcttataactaagaaaaatgcacccatatacaatcaaggcaccttcgttacctagattattcacgtgtacttccaaggtgtatttggtacctacatcacacacatttcctttgctaaattcacatacatgcatactctaagcactttggctatcaaaaattgcatacgtgcacatcttggtatttctaatacctatacatacacaaacttcatgatgaatcttgactatctacacaataaggtgctacatttcatgcttttttcaagggtttttactacctaaagccgcatgcaaattcaagtatattttcttttgcttactaaaaatgtattcaaaataaaagggattnttgtaatgtattttctttacataacatgcaacatatttatagattcttgtgagacattntgactaccaaaaaatatatgtacataca

SEQ ID NO: 265114 - DNA, 344 bp, Glycine max
  unsure (1)..(344): unsure at all n locations
agctntgagctaattcaaacgacaataatgttttgctcggatgtctgattgagtcccgtaatacatcgagacgctcgaaattgaatgttgaagctctcagcaaattcaaacgtcaataactttttactcggatgtctgattgagtcccgtaatacatcgagacgctcgaaattgaattctgaatctctgagctaattcaaacgacaataactttttactccgatgtctgattgagtcccgtaatatatcgagacgatcgaaattgaattctgaagctctgagctaattcaaacgacaataactttttgctcggatgtctgattgagtcccgttatatattgaga

SEQ ID NO: 265115 - DNA, 214 bp, Glycine max
caatttcgatcgtctcgatatattacgggtctcaatcagacatctgaggaaaaaagttattgtcgtttgaatttgctgagagcttcaacattcaattttgagcgtctcgatgtatttcgggacttaatcagacatccgagttaaaaagtattggttgttgaatttgctgagagcttcaacattcaatttcgagcgtctcgatattttacgggac

SEQ ID NO: 265116 - DNA, 439 bp, Glycine max
  unsure (1)..(439): unsure at all n locations
agctngaaggtgtgtaacccaccatttttcataatagaacactggtaatgtgtctactatctcttcctctgttattggggcgctacttgagctgccagatccctccacctttgggcatattccttgaaggattcatgctcttttttgcacatgttccatagttgcatcctatctgaagccatatcagaattgtactgatactgcttaaccaaggcaaccattaggtccctccaagaatagacttgggaaggttccaagttagcgtaccaggtaacagctaccctagtaagactttcttggaagaaatgtattagtagttcctcatcttttgtgtatgcccncatcttccgacaatacatctttagatggttcttggggcaagtagtccccttgtactcgtcaaagtttggaaccttgaacttgggaggggtgacgatat

SEQ ID NO: 265117 - DNA, 409 bp, Glycine max
  unsure (1)..(409): unsure at all n locations
ngaaggcaaactggatgcattggttaactgggtaacccagctggccttgaatcagaaatctgtacctgttgaagggtttgtggtttgtgctcctctgctgaccaccatacaaaccttttcccttccatgcagcaacctggagcaattgagcagcctgaagcttatgctgcaaatatttacaatagacctcctcaacctcagcagcaaaatcaaccacagcagaacaattatgacctttccagcaacagatacaaccttggatggaggaatcaccctaacctcagatggtccagccctcagcaacaacaacagcagcctgctccttccttccaaaatgctgctggcccaagcagaccatacattcctccaccaatccaacaacaacaacaaccccagaaacaaccaatag

SEQ ID NO: 265118 - DNA, 423 bp, Glycine max
  unsure (1)..(423): unsure at all n locations
agcttaggtactcatatgggacaccttangtttgtcatactttttggtaggaataatcaatatgaaaatacagaaaaaggtatgttttattatgttacttttcttaatttttcaaatagtgatcaaggggttcccatgaaccctaagagaataaaggttattcctgagtggcccactccaccaagtataagaaaaaatttggggcttccatgacttaacaaacttttacaaaaggtttgtcccatatttttctatacttgtagcaccactcattgagatggtgaggaaccatgttccttcatgggaagatgcccaagaaaatggatttcagaccttaccttacttcaacataccaaacaccactaatacatatgtttttgttctttatacaggtgttcagggaaggagcccacagtatgaaaa

SEQ ID NO: 265119 - DNA, 456 bp, Glycine max
  unsure (1)..(456): unsure at all n locations
ctggaagcccttagttttggttnggtttgataattttgcaatgttcaacatgtttaatagatgtggcttttgtaattaatgtttttagaccaggcatatgtgtgatatagtctaagtttctttcatgcttagtagtgatcaaatgtgaagtgattgaagtattctttttctctaagtttcctaagtaaaagcaataggatttacttctacttgaaatatcgctagaaccatcgaattaatcgattgcctagctggctaatcaagtgccaaagtcagttttagaagaaggaaggatctacaacttacgataattgattggctttctagataattgattgaccctgtgtgcatagtatctgtgttatagaatccaacgaattaaaatgaaagaggttcttgcatggctttctagataatttgatggaaaatgaaagaaataacataaaagaaatttgg

SEQ ID NO: 265120 - DNA, 459 bp, Glycine max
  unsure (1)..(459): unsure at all n locations
agcttgtagaatggctagacatgatacatgtcatggtttggtttggttcaaggataaaagggatgccccacactatttccatgacacaaatgcaaaaatgatgacttggaaacttttatgcaaaactggtcatgcatgcacctatgtggacactcaagtgtcaaacttttatggtcatgtgatgctagggctcaggattcatttcctccatttttaaatcaacccaatgtttccaaaatatgttcttttatcaatttgtgcattcctccaagtccatttcgggcatccggngaaatttcacagcattcacccttcaggtgtagacacgttttttttcanaaactagctatgatcnagcgaattttcttttaaagaaaagttggaaatcatctcttttcanaagcatgtcgattttttagctagacaacttattttctctttttccaccttttttcttac

SEQ ID NO: 265121 - DNA, 209 bp, Glycine max
  unsure (1)..(209): unsure at all n locations
atcaaacttttcaattcattctatgtatccttagtggtccccacttggttcgcgtgcttntatttttatttcatttactttccgtacccctttttgacgtgctttagtaatttaataagtcattttctcgcctaatananaactaaaatanattttcaccgatcatttgaatnngtaacgtctttaattttctgtaaatgaaatccgac

SEQ ID NO: 265122 - DNA, 403 bp, Glycine max
  unsure (1)..(403): unsure at all n locations
agcttgtggctattcctctatattgttccatttattcttgtatttaaaaaagaaatttcaataaataaattaatgcaaacaataaaattaatttaagcagacaaattcataaattttaataaaaatatggacaataaagctttaacatgtctctaattactttctgcatttccctctcttccctatctgataaaaaagacataagtagagtattagcattttcatccaaagtgtcttcaactctctctaaatataaagagtcttcaactctctcggcatccatagagtcttcaattatctctaaatctaaagaatctttgaccctcttcgcattcatggagtcttcaactcactactaaaaaaacaattnttatgacacactttcaaagacggtttccatgga

SEQ ID NO: 265123 - DNA, 373 bp, Glycine max
  unsure (1)..(373): unsure at all n locations
atgcgtcacaaaagcatcaaatttataacaaattaatctaatattgatatttctgaagaaaaaaaatattaaatgcttatgcgttttatgtcatgcatgctttcttttttttacttaaataattataaaaactattaaactcattgattgaaagatctagcatttctatttcaacttttttgcgtagtgatgtggaccttcgggtggccaataagagtcaggaaaagtgacatctgtcttttagactcgaaagtatccaaagctcttgtttcctactaaaaanggtaaataaaataaaaatattnttaagtttcataaattttttaaacttttaaatcaagacnacaaatagattctaattaatttcaaatta

SEQ ID NO: 265124 - DNA, 391 bp, Glycine max
  unsure (1)..(391): unsure at all n locations
gcttttcgtcttacagaatgcaataatgttatactgataactcctccggtatttccgcccgccagcgtgactcaaaagtcagtatgacagatcttttgagcacggaagatgacgtaaatcaccacgtgtaaacgggcttgtcggccgcgattgacgaatggcgcacaagacgacgttagtctctgcgtgctatcaggcttttcgtcttacacacagcaaaaagtttataccgataaccactcgggtattttcgcccgtcagcgtgactcaaaagtcagtatgacagatcttgtgagcgcggaagataacgtaaatctccacttgtcaacgggcttgtcggccgcgattgacgaatggcgcanaagacgacgttagtctctgcgtgctatca

SEQ ID NO: 265125 - DNA, 344 bp, Glycine max
  unsure (1)..(344): unsure at all n locations
acacgcagagactaacgtcgtcttttgctttcttcgtttatcgcggccgacaagcccggtgacacgcagagatttatgtcatcttccgcgcttacaagatctgtcatactgagttttgagtcacgctgacgggcggaaatacccgagtggttatccgtataaactttttgttgtctgtaagacgaanagcctggtagcacgcagagactaacgtcgtcttctgcgcccttcgtcaatcgcgggcgacaagcccgtttacacgcggagatttacgtcatcttccgtgctcacaagatttgtcatactgacttttgagtcacgctgacgggcggaaatacccgagt

SEQ ID NO: 265126 - DNA, 446 bp, Glycine max
agcttggagaagatgcttcaatggatgaaaagattgagggagagaaagagagaggggggagcacgaaattgaaggaataaaagaggtatagaagtggaactttgaagtatgtctcacaagactctcattcatcaaagttacaacaagtgttacacatgcttctatttatagactaggtagcttccttgagaagctttcttgagaaaacttccttgagaagcttctttgagaaaacttccttgagaagctagagcttagctacacacacccctctcataactaagctcacctccttgagaagcttccttaagaagattcctaaagaagctagagcttagctacacatacctctctaatagctaagctcacctccttgagatgagaagctagagcttagctacacaccctctataatagctaagctcacccccatgacaaataacatg

SEQ ID NO: 265127 - DNA, 307 bp, Glycine max
  unsure (1)..(307): unsure at all n locations
tgagaggatngatggnngacccggtgtgagagaaacgaggatatgggctacgtgggagtacgtgagctcagttggaggtgggcaacacgggatggtgggtttatgcgcgcattgtggatgaggaaagcttgttgtgcaccatcgcccgaccgccacctagtaccacatgtgatgggtaccccataatcctacaagcttgagatgaggaagtgttgaagggtgaaacttcctgcttttattgttgaccacagagtggtacctggagatatgtcgcgggggtcaggagaccttgnggacgtcaggtggg

SEQ ID NO: 265128 - DNA, 454 bp, Glycine max
  unsure (1)..(454): unsure at all n locations
agcttcanaacacagcaacccanaatctaggtgtccaatacccctcaatttaatggattttctaggtttgagaagtgaaattgagaatgaggtaaatttgaaacaaactctcacctcacacaagtccataacatcaatttaaacttgtccaaactggatttacacctaaaattccaccgaatcaaaatttgactcctcaacacccaaatctaccctagaaatggctctttgttcactttggtcgtttctttttctctctagctcagcctaacctttctcacatgttctaaatggcatttcaagctaggattaactcattntaacctccatttaccatagagtccagatttaaccttccaactctcaaagcctcactctntntccactcataacaccacattctcactttctaaccctaggttaactctacccttcatctctaacagttttccat

SEQ ID NO: 265129 - DNA, 314 bp, Glycine max
  unsure (1)..(314): unsure at all n locations
aatttcaaacattggctaatcgtgcagatccgctaagagagcctctntgagaaaccaaacatctcttatgctcgcttagcgaggcaatccgctaagcgagagggtcagaaattgcttaagtgagtgtaacatcagttatactcacatttgcccaaatttgctgaaccttacctgcattttctctcacaaccaatttcgtgcattcgtgttttctactgcattttcatgcatcttctgctactaacagcaatccaagtaagttcctcattccttttatttctcttttactttggtaaacgttaggttagaaaaca

SEQ ID NO: 265130 - DNA, 432 bp, Glycine max
  unsure (1)..(432): unsure at all n locations
agctngtaagattatggngtacccatcacatgtggtactaggtggcggtcgggcgatggtgcacaacaagttttccacatccacaaagcgcgcataaacccaccatcccctgttgcccacctccaactgagctcacgtactcccacgtagcccatatccttgtttctctcaacaccgggtccccatcaatcctcccaagcttccacaacatccaagcaaaacaacactcaaacagcacaagctatcacagccaagcaaaacagagcaaaggcagaaaactttgccaaaacaccaaccaaatcacagcttttctcacttaaagaccccagtaacaattccttcgatccaattcgttaaccggtggatcgagctccaaaatttactggaagtttatagtacataaacctacantttgaccgtggggatctacta

SEQ ID NO: 265131 - DNA, 412 bp, Glycine max
  unsure (1)..(412): unsure at all n locations
tctttnggaccttgaacaggcaactaactcctctntcaaaaccatgccatgtgctcgcgactggtccctttcttcccttcgcaacttgagttcactattgctaccccatagagctccgcgaaatttgttccggccatactcttccttgcgagccctcttggtctcttgttcaagggctcttgcggtaattgcattctcttcccgtaacccggcacactccttccgaacgtgtgtagcggccaacttgaacttctccttggcaagttttgcctttcctaactcgcttttgagagcttggaattctttgtcttcttccggtgcttcaaaattctctttgctgacgacttttaacttggcgagccaatctaaacctcgtatatgaactttcagccattcgtggtacccaccaatg

SEQ ID NO: 265132 - DNA, 445 bp, Glycine max
agcttgtattgagagttgggatgcgttttatatcaattatgagtgttatgaatacttagaaattgatttgggaatgaatgatttaaaaaaaaaaaaatcatatttgtgtagtgtaggtcattgatctcactttagctagtaaattgacttacttaagtgagttattacaataagaatttacgagcttatgttcttgcttaagcaagaagatcgtacttaaaaaaatattataaaagttataaatataaatattaggtaatcaatagatttgatttcactaaaaaaatattacctacaactccaaatattattattttaataagtaaaaatcgagctgtcacatcatacgacaaattcatattctttggaaacataacggattaaaacgagaaatttaaaacttaacatagaaaatactaaaatataaaaaatcaaaagcaatatt

SEQ ID NO: 265133 - DNA, 407 bp, Glycine max
  unsure (1)..(407): unsure at all n locations
ggataaatcataatatttcctacatgatctttaagatntacgagactntnttatgttaaaataattnttgaaaatcctaattcaatatactccctanagagttacaagaaaaagttaattntagtacatagtcaaatatatctctcttataacatgtttgattatacgtcttgaatatattttttatattttgaatgtaattntaaaaaattaatagttaaaggacgtgcttaaatttgtttaataatctatgttttcacacaaattcacatcaaattgtccaaaataaagtaaaagcaagtatgatctgcctcaactcaatgcatgctgattgtggagagacgtgaatcagacacacattagcttccacattnttntaacgagtttncaaaacactattaatcgta

SEQ ID NO: 265134 - DNA, 459 bp, Glycine max
  unsure (1)..(459): unsure at all n locations
agcttcataatagctagtgattngtggtttatgtgtagttgttttatgctttcgtgttgtgttagtgttgtttaatgtcttgttattttgtttagtgtggcgttttattttagtttttttgttcagcgcttcccctgtttcaatttttgtgttttgctgtgaatagtgctttgcgatggatttagcgaccacttttgcagacctggaagagtagtagtgcaaatccattagtgactacttctgacaatttaattggtgatttttgttttgatagttacggtttttattnttggcttaattttggcgtggtaggttcttttgactcatattntgagtgaaaaataccaggaacacttagtgtggccagatttgagagatttaaaaaaaaattgagaacttgtgtttaacaaaacttcgaacggccataacttttgcttcgcgtatcagaatgactatcat

SEQ ID NO: 265135 - DNA, 434 bp, Glycine max
  unsure (1)..(434): unsure at all n locations
tagctcgcccaggcgagctaagttgcttcctncagaatgcaccaactttctggaaggcccaaatgggcctggttgctatttgcacccccttttactaaatacacccccttggctttttttgttgattctttttccgtaacattaaggaaacttatgaatttcgtgacgatacttgttttctttccataatgttacggaaccttacggattacgtaatcatcccttttttgccttccggaatgttacggaactttacggattatgcatttacacttncttttgacttccggcatgtcacggaaattcacgggttgtgcaacaatgctttcttttgacttccgacatgccacgaaacttcacgaattgcccaacgatgggtgccaagtacctcgaagtggtcaaacgaaggtcgcatcccaacaatggatggtccc

SEQ ID NO: 265136 - DNA, 449 bp, Glycine max
  unsure (1)..(449): unsure at all n locations
agctntggaaaatgatttctatataaaagttagtcgtataaagcgactaacagattgtcgttaaacatagatcaataccaattaggttatgctaattcttactcgataatgttggttatttatattaatttgccaagacattgggatttaatctaaataatttaggctttttcacctaagacattggggttagaatatatttgtgtattgaggataaattgtatgaataattaaattaattgtggttactacattgtaataagggaaaccaagttcaaccctggctgttgaaacctctcaattctcacaataacactataatcaattctgctacttcatttcacattgcttttatttatgcaattgttctttagttatttattntactgtttggtggtctttaaattgttccaaaaaccctttgagaaaatacttttacaaaaccttag

SEQ ID NO: 265137 - DNA, 387 bp, Glycine max
  unsure (1)..(387): unsure at all n locations
gatgcatcctaaacctttccaccactttcttgaggtaattgctttgggataggaatagttcaccctttgctctatccctatgaatatcaatcccgagtatccttctagctgaccctagatctttcatctcaaattttgtgttcaagctttctttgagtttcctaatctcttccttattagcactcgctatgaggatgtcatccatatacaagataaggtagataacacacactctcccctttttcaggatatatacacangtgtcatatctggttctaatgaagccatatctgattaagaactcatcanatntcaagtaccatattcgagggctgtgcttcagtctatacaagaaatntttcagcaagcacaccttggtctcccctt

SEQ ID NO: 265138 - DNA, 457 bp, Glycine max
  unsure (1)..(457): unsure at all n locations
agctnggtcatgctaccttgaggttaatatcaaagcttcaaaagtatagcctcataagaggatttccaaagttgtcatatcaaaatgattccctttgtgaagcttgccataaaaaggaaacaagtaaaatgttcgtttaaatccaaacatattgtttccacttttaggcctttagagctcctacacattgacctatttagaccaatcaagactgcatccctctttggatgcatatatggtctggtcatagtgaaagattaccccagataggcatgggtcaggtttctaacccacaaggatgagtctattgataccttttataaattcagaaaaaagaatcagaatgaaaaaggtatttatatctcttcaatcagaagtgatcacggnggagagtttgaaaaaaattatgaagagaatgatattcacccctatttttccactccaagaacaccacaac

SEQ ID NO: 265139 - DNA, 385 bp, Glycine max
  unsure (1)..(385): unsure at all n locations
atttgtagtggttnttgtaaataaatcttgttttatggttaatgttgtctctagaacatttccattggatttaatgatgaaatatgtgcattttcaggtgaaaaagaggctaagttttgaattgcaaaatgtagcagtggggctaagctcagtagttgggctaagcgcatatccaccgctaagcgcggcttcaccgcgcttagcgcaaaggagaatctggcagagcatcagcatcaaagccgtgccctaatcgtgatatcagtgcgctaagagcagcaagtgcctttagccatgctaagcttgagactagcgctaagcccaatttcacttgctcgcactaagcgcgagggtggcactaagcgcagcgtcgcgatttcagagccta

SEQ ID NO: 265140 - DNA, 459 bp, Glycine max
  unsure (1)..(459): unsure at all n locations
agcttacaaatctantttaagtccaagcccataaacgaaatataataaaatctggacaaaataagataagattggatgaaataaaatctggacgaaataaaatctagatggaataaaatctagataaaataaaatctagatggaataaaatctggataagataagatttgataaaataaagttattattattattattattgttagttaaacaggccggcttgtcaagcttaacaagctttttttatagtttgagcttggcctttttatctaaagaggctttttaaaaagttgagcttgacctttgtagtaaacaagccgagccgagttgagccttacataggccgagccaaaggcccttgacaagctgctcggctcatttcaacccctagatacaataggtcggttgaagctcgttcttccctttcttgaagccttagagtaaatgtcatcttatgtc

SEQ ID NO: 265141 - DNA, 431 bp, Glycine max
  unsure (1)..(431): unsure at all n locations
tagagatgatactatcattgtcaaactacacatgtgagccttcttagaggaagggatgagtttatcacaattgggattagaaagaacatgtgtggggatccttaaaggatcaaattgggatttattttgggatatttattggattggaattctacctttatgattgtaatcatgaaaatggtatgtttgacgaaccaattgatgccttaatgcgaattggttgataaaattgagtgctcttggtgttttgtgtttttgaaccattttgattcctttgattataatatgattatgtgaaatttgttgagggatttgactccccatgttgtgagaagaatttatgtataattcgtttggtgtttggacaagatttactagattagcatgagaattagattgttggaaacgttctttgtcatgntttggtctca

SEQ ID NO: 265142 - DNA, 247 bp, Glycine max
ccatgctaccaagtggccatgggacgaaaaaatcgcccatgcgcctgtctgatgcgaattgcagctcccacaacttgatgcagagcgaatacaccagtactctatattgcattctatctacccttttggtggcttcatccaagatgtgggttgcaaattacaagtgtatctactggcaccttggtccagtaatccctaccctgagaccattctgaaaagaatggaaacgctcaggactggatcctca

SEQ ID NO: 265143 - DNA, 391 bp, Glycine max
gaaatagacactgtagaagacaggtgcacactagaaccttcagcatggtagcttcttgttctttcttatcagcaatgacttggtgtagctcaacgacctcctgctgcaactgctcaacctgcatgatcacaaacattttgctaaccacacaagcccaaagaccagaagaaaaatgagttggagagaaaaagaaatcataaacacaattgtacatggatactgaacaagctttcctagtatttatgccttttatggggttcaataaaagtactcttagctgattgaatgattaaatgatatttaaaacaagcttacttatattatttatgctaaaacatgcctcacgaatccggttaacataatgatgtcttcaagaatataacaaaaaaat

SEQ ID NO: 265144 - DNA, 425 bp, Glycine max
  unsure (1)..(425): unsure at all n locations
agctngccgccacggagttntccgactatgctcttgtgtggnggaacaagctacaaaaggagagagcaagaaatgaagagccaatggttgatacatggactgagatgaaaaagatcatgaggaagcggtatgtgccggctagttactcaagggacttgaaattcaagctccaaaaactaacccaaggcaacaagggggttgaggagtatttcaaggaaatggatgtgctcatgattcaagcaaatattgaagaagatgaggaggtaactatggctcgatttcttaatggtttgactaatgatatccgtgatattgttgagctgcaggagtttgttgaaatggatgatttgcttcacaaagcaatccaagtggagcaacaattaanaaggaagggagtggctaagaggagttctaccaactttgat

SEQ ID NO: 265145 - DNA, 534 bp, Glycine max
  unsure (1)..(534): unsure at all n locations
gggcacggcgntttgaccttgaaccgtgcgagtacgggctataaaagcgagctattcgattattctatgaacccgcagcggagcgcattgtgatgaccgcactaatattctcggagcgtncactgtttatacccgcgcgtgacgagcttaagccgnctcacttaagacattcgtgcgttaacttatgaacattataaattctcaccagaacgcggagttatattatgcacgaactgcggagtaaagaaattccgaccgacctgtcgtggccgagccacgctggtaatcatatgtaaggagcttacgttgtataatattcagcgagacgtcttttagtataataaagcggaacatcaatcggacgttgtctcttcgggatatctcattcttaaccgaacggagtaataactaaagcgaaactaanagctatgtcaactcgcctagtcaagcgtcgacacagtaatacgcatttgatngtcgnagtatcantgctgactaagtagagcggatcattnatatggtccaccgcataaa

SEQ ID NO: 265146 - DNA, 448 bp, Glycine max
  unsure (1)..(448): unsure at all n locations
agcttgaaagctngaaagcttctatttcaatccattgaatagtttttaattnttattatttttctgtgtgtgatgcagatggcaaaggaaatatcagaaaacaagagctttttcaggcttctgtagccctcaaggtgatttacaaaatgtcataaaatagttgtgttttcaaatataatatcatagcttctctatacatattaagcattgctcctgtaagggaactgttttaatttttgttttttttctttagatcacttagtggttatacctttccaatcttagaacataaatttctagagaaacctaggtagactttccttgataatgttgtacacataagttaaagatgacagtctttggccaaaatttaagaggtgtattctttgtttcgatgcaacaagtgaagattatcaatcatccagatatgcaggtttcgcaccgatag

SEQ ID NO: 265147 - DNA, 440 bp, Glycine max
  unsure (1)..(440): unsure at all n locations
tcttatccaagacactctctnggggtgaagctcatccttctatggcttattccctagtggatgacgcctnctctcacctcttctcctttatcttccgttgcaactctatggttgaaaatcaccaatgaaggacctcattgaagctcaaagatccagcctccatagaagcttctcaagcaagcttccatcaagtggtatcagagcacaagagcttcaagtaggtgctccttaaaccttcattagttttcagctttaccttctcctccattggtggttcttcatttttctccatgtatctcctcacatgtcttgtgctaaatggtgttaacatgaatttntataatttacacctattaaacttgctatagaagctagatttgattntctatagttcaaatttcttggtcttgttcttgaatcatgaacttgtgagtatgttc

SEQ ID NO: 265148 - DNA, 454 bp, Glycine max
  unsure (1)..(454): unsure at all n locations
agcttgagatgaggaagtgttgaatggtgaaacttcctgcttttattgttgaccacagagtggtacctggagatatgtcgcggcggtcaggagaccttggggacgtcaggtggggtgctattgcccaaaaccaagcttgaccaatcccgacccaacccgggtgtcgcaacctacccttcggcgggagggcgacgcgtgacttgcgggatgcgtgttccacggaaggaatacgcgcggagtcgccaccaacgtttatttgaggaaaacgtctgaaaaaccggaaaagacgcgatctacgaactttntagtgaaaggttcgggagttgtatttacgcacggngaaggtattatcaccccacacgcccgtctcaagggacggcagcccttaatcgaatgtgcaaacatgacttntgattttatgttcccttttatgttcttatatcctttataccct

SEQ ID NO: 265149 - DNA, 342 bp, Glycine max
tgataacacgcagagactaacgtcgtcttctgcgatcttcctcaatcgcgggcgacaagcccgttgacacgtggtgatttatgtcatcttccgcgctcacaagatctgtcatactgactttttagtcacgctgacgggcggaaattaccgagtggttatccgtataaactttttggtgtatataagacgaaaagcctgatagcacgtagagactaacgtcgtcttctgcgcccttcgtcaatcgcggccgacaagtccgttgacacgtggagatttaccttatcttccgcgctcacaagatctgtcatactgacttttgagtcacgctgacgggcgaaaata

SEQ ID NO: 265150 - DNA, 340 bp, Glycine max
  unsure (1)..(340): unsure at all n locations
agcttggatattcttttagcatggaatctattcttcctaagatggagccaaacccagncaccctcattaagaactagctctgttctttctctattgcctttagttgaatacactttcgtttgggtctctatttggttcttaaccctctcatgcaacttctttacaaactctgacctatattccccttctttatgtataaaacaagcttcaagtgggaggggaatgaggtctaactgtattaggggattgaacccatatacaacctcagaaggggactgcttggtggttctactaacccccctgagtcggcaaattctacatgatgaagatactcattcca

SEQ ID NO: 265151 - DNA, 320 bp, Glycine max
  unsure (1)..(320): unsure at all n locations
tctccnccaattatctataaatacggggagaagtgaactgaatataggttcatccccttacgcactggtatatcttttgaatatgcttggatacaatgctcccgtgaagagaatccaagccgaggcgcttgcgaaacattttcgtaacgttatcgtgaggaatttctctcatgtttcgaccgatcttcgacagttttattcgatcatcatcgttcttcgatcttcaacgggtgagtacctcaaaccaagccttttgattcattgtatgtacccacggtggtccacactgtgtttcgtgtattattattctcgattcattt

SEQ ID NO: 265152 - DNA, 443 bp, Glycine max
  unsure (1)..(443): unsure at all n locations
agcttaggataatgaagctgttataaattntgttttgaatgaaactgcgcaaaaaatagatgtcatgaagctattgcaacctataatgtagttgataaccctacaattaacttcagataatcttaatctaattgctttagcaatgtattgatatcaggacaaatggtcatcatatacacaacagaggtatagtcatcctaatttactcagttacatgaagcttgtcatgttcaaaatatcacatatgcaaattgatgataccttccaaataatagcttcagaagttgattatcacgactcanaattaaagcctgcaccattacactgtcatactatttaaccataacagagaatttaatacaaagtcacactaaacttgacttacatcacacctgcttaagacactaagtataaacattgcatgaagtatacatgcattcagt

SEQ ID NO: 265153 - DNA, 405 bp, Glycine max
  unsure (1)..(405): unsure at all n locations
taatgaaaagtgtgattctcttcanaggtcacaaatgttataaattatacactntttatattattgttctcattcacaatttcacacagaaattgacatacatgtttttcaatcacaaaatatgctaggcggtaatccagtaatggagataaggattatattgtctatgcaatttgattgcatattggaccactgagcataaaagagttgctaattcttgaggagcagcttgaaatagatttatcaaaagctangcaaaggaaggtacgtgtaaatgtataagtcctatgtgcacttctatagctgtaatataaaaagtaggatcttgntctcttaatacnaattttcatattgatttattaatatttcatattgatccttcgttgaattttatcaacactatta

SEQ ID NO: 265154 - DNA, 437 bp, Glycine max
  unsure (1)..(437): unsure at all n locations
agctnttcctcttttcttctcgagcaatagcctctgtttttctttatctcgatagctactgcacctaatgtgcagatctgtgcatggtgattttctagttcaagcttgatttgtgacatggtatcagagctcttcaaagagctctgctgcgcaatcaagagaagtttccgaagcaatttatgatttcttcacctctgttttgagtttcatctggctttgatcttcgattgtggcaatgagtgaaagagatacacatatcccagccatagacagcttcctttacttgcatccaagcgagaatcccgcggtttcgcttgtatctccagttcttgattccacaaattatcactcatggagcagatcaatgatgattgctctgagtgccananataaacttgagtttgttgatggaggagcagctgagccattgaaattga

SEQ ID NO: 265155 - DNA, 455 bp, Glycine max
  unsure (1)..(455): unsure at all n locations
tatgatattataaggaattgtgttgctaaagtatcatgttttcaaagctgccatgttaagtttgggagtaaacaagccaatcaagttgtccacaccttagatacgacatctagatcctttgcttgtccgcattattttgatcatagcccaatatgtattgactcttttattattggtgatttaatataattatattgctttcaaaaaaagtttaaaacgttaattaatatgatataagtttatcacctttaagataacttagttaaaaagcctattttgtaacaagctctaagtaaaacataaatttatcattcaataggcttatatgtttgactcttattgtagtcaacatttgaaatatntttaacaggtaaaaaaatgtatacttctgatacattcatataatctaatatgatgatgatgatgatgatgataaanatatatgataatcatta

SEQ ID NO: 265156 - DNA, 425 bp, Glycine max
  unsure (1)..(425): unsure at all n locations
agcttgtgatgttccattgattcacacatattcaaaaaagacaaaggttagaagatctctctctgtctataaacattgatatactttgtagttntacttgtgagaaaacatatggtatagagcttgatagcaatgactacaagaggtatgtttttgtgtatgcttctgcttactgaatgatttattcatgtttatatcataaaccaaagttttaaatttcttacatttggtatcaaagcctatctttgtagccttgttattaagcttgattttattattaaatgattgagaattttaagtttgttgattagtatgatgtgttcatctgtcttcggtaaaacccgtagtaagccattttgctattgagtatctatgaatggttttaagaaattcacatattaattgcaatgatgcatattggtaga

SEQ ID NO: 265157 - DNA, 409 bp, Glycine max
  unsure (1)..(409): unsure at all n locations
actcagcttctcttaatggtataaaggcttgttctattagaaggaaatttctagttgtcaatttaattgattacagttgatcataatcaattatattgttctttaggtaaacccaagtcaaataagaatattttaatcgactacatgctcagtttaatcgattaaatattttatattacaagacttttataaatagttggcctttcattgagtctttaagcttccaaatcattttctattttcaagacttatcttcgttgagagggtttttaagctgaagtaatggagatcaacaagattcacatctttgtctaaaagatngaagactangctaagtcttgtgttcaatcatgtgctaagaagatttaaatcactatgaattggtgatctctttcatgattgatttcta

SEQ ID NO: 265158 - DNA, 374 bp, Glycine max
  unsure (1)..(374): unsure at all n locations
agtttctcaagtacagagactaatctaaggctgggtttacaagggaattttacaggatcacggcttacaaaattttctgttcatttatttaaacatgtaccagactgtgatgaactagatataaatttattacaatccatttgtgcgcaattaacacaaacaaatatattaggttatcaaattcaaaacatcatcagtcagtcaaaataacatctatttgaatgaagagagaaagtctatgcttttcaaacatatcaagtatgccacacatnctctaggcaacaagaaagaccatttcacatgaaattaagcctgtctaagaaagaccataccacatgaaaataagcctgtctacttactgggaaactgtcaca

SEQ ID NO: 265159 - DNA, 172 bp, Glycine max
  unsure (1)..(172): unsure at all n locations
aatactggtggttataataacaattgtataggcttttggcacattattccttttgtccatggatgaaggtcattccgttggtgaactttcaatctgaattcaaaacatgccattttttttcttaaaatcatatgatctactatanattctgacataacttatgatgcatgac

SEQ ID NO: 265160 - DNA, 462 bp, Glycine max
agctgtggagggtgttcatggaggaaaatgaatatgaagaatgagagggaaaggaaaatggtctcttaccactaaaatcaatttaaattcgaaaaagaagctcagaaacaaggtcctttgtgcaagggaatcaagttctccaatagaggattttcttggagagggagaagaaagtgtgggtgttttgttcactactacaaaaagcagatttaacatcggcgtcttaacatcggttgttaaaaaaccgatgttaacgtaagcgcaatggcataattgtaaataatgtgcatccgttaacatcggttttgtgaaaatccgatgttaacgaagtgacgttaacatcggttattggaaaaccgagagtcacacacacacacagacaaacacacacacacacacataaaataaaacacacacacacacgctcacatacacacacacacacaaatacacacacacata

SEQ ID NO: 265161 - DNA, 223 bp, Glycine max
ttttttggcagcaaaaataatacttaaaccttgaaagactctctaattgatggaccaacagtttaaaatggtgttatgagcggttttttatttataccaataaaataatgatgaccataacaaatttattggataatatggcattacattattaaattaaacggaatttcaaaaatattcatcatgatccagtaaattctatttatattttaaacgaaaattt

SEQ ID NO: 265162 - DNA, 423 bp, Glycine max
  unsure (1)..(423): unsure at all n locations
agctntactcataatccttcaaatgagcaggaggtgttgtgcttctcttgggcctactgctgcatcttcttcccatcattccctagcccatcaaaaaaaccttatcctcaaggtgttaggtgcagaaaacagaacctggatcccaaatgaaagtaggtgtaggaatgagttcctaaagattgttgcggagatagagccatttggcaatgacaagaatgatgaaaacgatgaggaggaaggggtggtggagatttgtgtccctgactgtggcagcacatacaatggaaagggcgaagcggatgtcggagggaaggatgtagcggctgggggctccatgcgggactggtgactggcggcctggagggggtctgaaaacggtgcgaggtgtctggcgttaacagggaggtgggaagttgccatggg

SEQ ID NO: 265163 - DNA, 366 bp, Glycine max
  unsure (1)..(366): unsure at all n locations
tctctatgacctttgataggcctttaactagtcttgtaatatcatacattcgactctctactggtccctttcagacctttggagcttgagttcgatgttgctgccccataaaacccctcgaaacttgtttctggatccaatggtgcggctgtagccgtgttgacatccctcagctcatcacattcctttctgactctgatgggtggcgtcttgaacttttccttgactatatgagttctttccaattccacttttaaggcttgcacctctttgctctcctcanggaccttagcctcttcctcattagaaacccctagctatgggagccaagatatctcttgcgtcctagccttcagccacttgtga

SEQ ID NO: 265164 - DNA, 184 bp, Glycine max
  unsure (1)..(184): unsure at all n locations
agcttctaagtttccttaagtgatttccaagatttacattggtataaatgatnttgtatttgcctgaatttgaattgttgttgggacaaaagggatgggaaaaactgtttgggtcttttagagcagttagttggagtggatcagttggacaaattggggggttttgggggcggngggggggggg

SEQ ID NO: 265165 - DNA, 406 bp, Glycine max
  unsure (1)..(406): unsure at all n locations
gcttggtaacaaaaatctatagtccacacatgacacacctaactctacatctctaanagcatatttggattaccattgcttagccattggagaatacacaatgtgctttcagagaaaattttccttcttatcttttattctaaacctacttttgaaaaacttgcacgggtaatgcaaacatgcattaagccgaccaccatcaacttaagatcgtctggaatataatattatttgcaacagataaaagcttttctaatgatcaatctgaatcgaaacttccgaaagattttcttttaagagtaggagtacaaatgaaagaggagagaatggagcaaacgaattaatcacaacaaatccgacaactaagtaagcaaaaaatttaaagcactatctttcaaacatagtc

SEQ ID NO: 265166 - DNA, 368 bp, Glycine max
agcttctagccaaatggacttaccttgaattaattcctttgatagcccttatgagcctcgtttccctttccttgttttgaatctcactacaagccttaagtgaaaaaccatgatatcaccatatccttaaggaattttggagctttggaattgttttgggaataagtgtggggggggtttttgtttcataggagaacttgctttgttggctatacttcatgatgtattttgggccatacttgattgtcataccctaatttcgtgcggggattattacttgattacatgcaatctttggttagccgctttgagatactcggcgtcctttcttgcacaataaatgaagtcccgagacgtctcataaatct

SEQ ID NO: 265167 - DNA, 398 bp, Glycine max
  unsure (1)..(398): unsure at all n locations
actcagcttttatccaggctcatcttggtggtgaagctccttcttccatggcttattccctagnggatggcgcctcctctcacctcttctcctttgtcttccgctgcatctccatggtggaaaaccaccattaaaggacctcattgaagctcaaagatccagccttcataaaagctccacaagcaagcttccatcaatgcacacacttgcatttatttgagaaggaattttcatgccatctatttacacttgagaggcaattccacatcatatattcattttgggaagcattcaaacgtgtgtacatttataaagcacttgaccacctattcaacatatacacattntatttgaagggtcctttctctagctacctatcctatacatatatgtacatg

SEQ ID NO: 265168 - DNA, 436 bp, Glycine max
  unsure (1)..(436): unsure at all n locations
agctngatcaaacaaaatccaaacattcaaatccactcaattcatacaatttctcattcaaatcaatcacaaccactgcatttcatacaaaatcaaaccactgaatcctattcaattagttcactgttcaatcacgcttttgtacaaacaactaaaacaactgaaatttaaaagactgaaatttaaataactgaaacataaggcataaactaaataaactgttaaaaaaaactattcaaaatgcaagacaagaagataaagatcctgtcaatcctcctgcagttgattctcttcatgctcattaagatccaacactggagtagctggtggatcctaaacaataggttgctctggctctgatcctggtgcagatggctgggaatccttaagaattggtgctggagagataggaactggagaagtgggctcttgagct

SEQ ID NO: 265169 - DNA, 359 bp, Glycine max
  unsure (1)..(359): unsure at all n locations
gagaagatgagtggagggagagggagagaagngcacggaattntgtgcctcanaaaaggtctgcactttgaagtataattctcaaatgatcaaagttgaaaaaatgcacacacatgacctctatttatagcctaagtgtcacacaaaattggagggaaatttgaatttttattcaaatttcagttgaatttgaaattgaatttgtggagccaaaattttactaattatgattagtgaattttagctatggttcagcccactaattcaaaatcaagtccaagattctccactaagtgtgcttaggtgtcatgaggcatgtaaagcatgaagtacatacacaaagtatgactatatgatgt

SEQ ID NO: 265170 - DNA, 441 bp, Glycine max
  unsure (1)..(441): unsure at all n locations
agctntatcatatatttaatgggataaacattatttgttcttaatcttgtgctctaataactctaaggttttgtttgagaaacacatgaatataaaaatcagaaccaatgaacgaaaatgcacaacatttaaccaaaaaaatacattcaattacgatgtaatgcatcctaccactctgcataaactatacatttcacgtcttttgatgaagatatcacatcgactagtgttgagaccaaaataatatatataaataagagacaatcctcatcttacaaattgatttcataaagttgagttagattaataactcacataatatcctagtgatttgttgtcgagtgttaaagatctcacatctattatggtaggtttgaattattgaacctcatctcaatatttgtgatgaagatatgtctccaatgaggagttctaaatgga

SEQ ID NO: 265171 - DNA, 356 bp, Glycine max
  unsure (1)..(356): unsure at all n locations
cgaccaccttaatcaagcctcgaaacatattgaatataaacattattatttaatttaaattatttaaattaattgtgttcacaattataaatatttgttattctgtagccaaatgtttaaaaatttgtccaggtcatttgatatatatttactttaattataagtaggtttttattaacttgtgtgcgcgggcagaattgagttaacaaaacaacacgtgcaaccttatcgtttagattggtagtagataatacaaaagaatgaattggggtacatatatttgaatagaatatatggaataaaagtggcattctgtttttttatagatactttataatggaaccgaanaaatcttt

SEQ ID NO: 265172 - DNA, 444 bp, Glycine max
  unsure (1)..(444): unsure at all n locations
agcttgccacccagctcgcccatgcgagcagggttgcttcctccagaagcaacagccttctggaggaatcttctggagggcccaagtgggcctagttgctatttgcacccccatttttactaagtacaccccctgcctttttttggtgattcttttttcgtaaagttacggaaacttacgaatttcgtaacgatacttgttttctttccgtaatgttacggaaccttgcggattacataatcatccccttttttgacttacggaatgttacggaacctcactaattgtgcaacgatgcttccatttgattttcggtgtgtcacggaaccttacggattgtgcatcaatattttcttttgttttccggcatgtcccagaatttcacanattgcctaatgatgggtgccaagcacctcacaaggagcaaacaaaagttgcatgtca

SEQ ID NO: 265173 - DNA, 308 bp, Glycine max
  unsure (1)..(308): unsure at all n locations
tgaagatgttntgtcttttatatgcctaactcgcttgagtggcatttatataggttgatatcctgtatgttgcatcttagaacatatcatatatgctatgcatctttcatcatcatagtaagtgtgaagaaaagcctccaagttagaaagctttcttcaagaggcaaaaccctctgttttaatcgactacaggactgtcgtaatcgattacaacaatattgttgaagctcggagagacgagtctcgtgtcagattaatcgattatagtagtctccgaatcgattacactagtgtttgagacaatgact

SEQ ID NO: 265174 - DNA, 436 bp, Glycine max
agcttcttatccaacacaggtcttggtggtgaatctccttcttccttggcttattccctagcggatggtgcctgccctctcctcttctcctttgacttccgctgcatctgcatggtgaaaaatcaccattgaaggacctcattgaagctcaaagatccagcctccatagaagcttcacaagcaagcttccatcaagtggtaatcggagcacaagagcttcaagtaagtgctccttacacctccattaatttttttttttgctttaccttctcttccattgttgattcttcattattctccattggatctcctcacatgtcttgtgctaaatgttggtaacatgattctttataatttgcaccgatagatcttgctatagaagctagatttcattttctatggatcacatttcttgttcatgttcttgaaccatgag
